United States Patent Application Publication US 2015/0011416 A1 - sequence listing, part 2

SEQ ID NO: 29110 - DNA, 40 bp, Homo sapiens
agtcctgtatgcagttttacctactttcacagctgaagga

SEQ ID NO: 29111 - DNA, 40 bp, Homo sapiens
tccttcagctgtgaaagtaggtaaaactgcatacaggact

SEQ ID NO: 29112 - DNA, 40 bp, Homo sapiens
gtcctgtatgcagttttacctactttcacagctgaaggaa

SEQ ID NO: 29113 - DNA, 40 bp, Homo sapiens
ttccttcagctgtgaaagtaggtaaaactgcatacaggac

SEQ ID NO: 29114 - DNA, 40 bp, Homo sapiens
tcctgtatgcagttttacctactttcacagctgaaggaac

SEQ ID NO: 29115 - DNA, 40 bp, Homo sapiens
gttccttcagctgtgaaagtaggtaaaactgcatacagga

SEQ ID NO: 29116 - DNA, 40 bp, Homo sapiens
cctgtatgcagttttacctactttcacagctgaaggaaca

SEQ ID NO: 29117 - DNA, 40 bp, Homo sapiens
tgttccttcagctgtgaaagtaggtaaaactgcatacagg

SEQ ID NO: 29118 - DNA, 40 bp, Homo sapiens
ctgtatgcagttttacctactttcacagctgaaggaacaa

SEQ ID NO: 29119 - DNA, 40 bp, Homo sapiens
ttgttccttcagctgtgaaagtaggtaaaactgcatacag

SEQ ID NO: 29120 - DNA, 40 bp, Homo sapiens
tgtatgcagttttacctactttcacagctgaaggaacaat

SEQ ID NO: 29121 - DNA, 40 bp, Homo sapiens
attgttccttcagctgtgaaagtaggtaaaactgcataca

SEQ ID NO: 29122 - DNA, 40 bp, Homo sapiens
gtatgcagttttacctactttcacagctgaaggaacaata

SEQ ID NO: 29123 - DNA, 40 bp, Homo sapiens
tattgttccttcagctgtgaaagtaggtaaaactgcatac

SEQ ID NO: 29124 - DNA, 40 bp, Homo sapiens
tatgcagttttacctactttcacagctgaaggaacaatag

SEQ ID NO: 29125 - DNA, 40 bp, Homo sapiens
ctattgttccttcagctgtgaaagtaggtaaaactgcata

SEQ ID NO: 29126 - DNA, 40 bp, Homo sapiens
atgcagttttacctactttcacagctgaaggaacaatagc

SEQ ID NO: 29127 - DNA, 40 bp, Homo sapiens
gctattgttccttcagctgtgaaagtaggtaaaactgcat

SEQ ID NO: 29128 - DNA, 40 bp, Homo sapiens
tgcagttttacctactttcacagctgaaggaacaatagct

SEQ ID NO: 29129 - DNA, 40 bp, Homo sapiens
agctattgttccttcagctgtgaaagtaggtaaaactgca

SEQ ID NO: 29130 - DNA, 40 bp, Homo sapiens
gcagttttacctactttcacagctgaaggaacaatagctt

SEQ ID NO: 29131 - DNA, 40 bp, Homo sapiens
aagctattgttccttcagctgtgaaagtaggtaaaactgc

SEQ ID NO: 29132 - DNA, 40 bp, Homo sapiens
cagttttacctactttcacagctgaaggaacaatagctta

SEQ ID NO: 29133 - DNA, 40 bp, Homo sapiens
taagctattgttccttcagctgtgaaagtaggtaaaactg

SEQ ID NO: 29134 - DNA, 40 bp, Homo sapiens
agttttacctactttcacagctgaaggaacaatagcttag

SEQ ID NO: 29135 - DNA, 40 bp, Homo sapiens
ctaagctattgttccttcagctgtgaaagtaggtaaaact

SEQ ID NO: 29136 - DNA, 40 bp, Homo sapiens
gttttacctactttcacagctgaaggaacaatagcttaga

SEQ ID NO: 29137 - DNA, 40 bp, Homo sapiens
tctaagctattgttccttcagctgtgaaagtaggtaaaac

SEQ ID NO: 29138 - DNA, 40 bp, Homo sapiens
ttttacctactttcacagctgaaggaacaatagcttagag

SEQ ID NO: 29139 - DNA, 40 bp, Homo sapiens
ctctaagctattgttccttcagctgtgaaagtaggtaaaa

SEQ ID NO: 29140 - DNA, 40 bp, Homo sapiens
tttacctactttcacagctgaaggaacaatagcttagaga

SEQ ID NO: 29141 - DNA, 40 bp, Homo sapiens
tctctaagctattgttccttcagctgtgaaagtaggtaaa

SEQ ID NO: 29142 - DNA, 40 bp, Homo sapiens
ttacctactttcacagctgaaggaacaatagcttagagaa

SEQ ID NO: 29143 - DNA, 40 bp, Homo sapiens
ttctctaagctattgttccttcagctgtgaaagtaggtaa

SEQ ID NO: 29144 - DNA, 40 bp, Homo sapiens
tacctactttcacagctgaaggaacaatagcttagagaag

SEQ ID NO: 29145 - DNA, 40 bp, Homo sapiens
cttctctaagctattgttccttcagctgtgaaagtaggta

SEQ ID NO: 29146 - DNA, 40 bp, Homo sapiens
acctactttcacagctgaaggaacaatagcttagagaaga

SEQ ID NO: 29147 - DNA, 40 bp, Homo sapiens
tcttctctaagctattgttccttcagctgtgaaagtaggt

SEQ ID NO: 29148 - DNA, 40 bp, Homo sapiens
cctactttcacagctgaaggaacaatagcttagagaagat

SEQ ID NO: 29149 - DNA, 40 bp, Homo sapiens
atcttctctaagctattgttccttcagctgtgaaagtagg

SEQ ID NO: 29150 - DNA, 40 bp, Homo sapiens
ctactttcacagctgaaggaacaatagcttagagaagatg

SEQ ID NO: 29151 - DNA, 40 bp, Homo sapiens
catcttctctaagctattgttccttcagctgtgaaagtag

SEQ ID NO: 29152 - DNA, 40 bp, Homo sapiens
tactttcacagctgaaggaacaatagcttagagaagatgt

SEQ ID NO: 29153 - DNA, 40 bp, Homo sapiens
acatcttctctaagctattgttccttcagctgtgaaagta

SEQ ID NO: 29154 - DNA, 40 bp, Homo sapiens
actttcacagctgaaggaacaatagcttagagaagatgtg

SEQ ID NO: 29155 - DNA, 40 bp, Homo sapiens
cacatcttctctaagctattgttccttcagctgtgaaagt

SEQ ID NO: 29156 - DNA, 40 bp, Homo sapiens
ctttcacagctgaaggaacaatagcttagagaagatgtga

SEQ ID NO: 29157 - DNA, 40 bp, Homo sapiens
tcacatcttctctaagctattgttccttcagctgtgaaag

SEQ ID NO: 29158 - DNA, 40 bp, Homo sapiens
tttcacagctgaaggaacaatagcttagagaagatgtgag

SEQ ID NO: 29159 - DNA, 40 bp, Homo sapiens
ctcacatcttctctaagctattgttccttcagctgtgaaa

SEQ ID NO: 29160 - DNA, 40 bp, Homo sapiens
ttcacagctgaaggaacaatagcttagagaagatgtgaga

SEQ ID NO: 29161 - DNA, 40 bp, Homo sapiens
tctcacatcttctctaagctattgttccttcagctgtgaa

SEQ ID NO: 29162 - DNA, 40 bp, Homo sapiens
tcacagctgaaggaacaatagcttagagaagatgtgagat

SEQ ID NO: 29163 - DNA, 40 bp, Homo sapiens
atctcacatcttctctaagctattgttccttcagctgtga

SEQ ID NO: 29164 - DNA, 40 bp, Homo sapiens
cacagctgaaggaacaatagcttagagaagatgtgagata

SEQ ID NO: 29165 - DNA, 40 bp, Homo sapiens
tatctcacatcttctctaagctattgttccttcagctgtg

SEQ ID NO: 29166 - DNA, 40 bp, Homo sapiens
acagctgaaggaacaatagcttagagaagatgtgagataa

SEQ ID NO: 29167 - DNA, 40 bp, Homo sapiens
ttatctcacatcttctctaagctattgttccttcagctgt

SEQ ID NO: 29168 - DNA, 40 bp, Homo sapiens
cagctgaaggaacaatagcttagagaagatgtgagataaa

SEQ ID NO: 29169 - DNA, 40 bp, Homo sapiens
tttatctcacatcttctctaagctattgttccttcagctg

SEQ ID NO: 29170 - DNA, 40 bp, Homo sapiens
agctgaaggaacaatagcttagagaagatgtgagataaag

SEQ ID NO: 29171 - DNA, 40 bp, Homo sapiens
ctttatctcacatcttctctaagctattgttccttcagct

SEQ ID NO: 29172 - DNA, 40 bp, Homo sapiens
gctgaaggaacaatagcttagagaagatgtgagataaagt

SEQ ID NO: 29173 - DNA, 40 bp, Homo sapiens
actttatctcacatcttctctaagctattgttccttcagc

SEQ ID NO: 29174 - DNA, 40 bp, Homo sapiens
ctgaaggaacaatagcttagagaagatgtgagataaagta

SEQ ID NO: 29175 - DNA, 40 bp, Homo sapiens
tactttatctcacatcttctctaagctattgttccttcag

SEQ ID NO: 29176 - DNA, 40 bp, Homo sapiens
tgaaggaacaatagcttagagaagatgtgagataaagtag

SEQ ID NO: 29177 - DNA, 40 bp, Homo sapiens
ctactttatctcacatcttctctaagctattgttccttca

SEQ ID NO: 29178 - DNA, 40 bp, Homo sapiens
gaaggaacaatagcttagagaagatgtgagataaagtagt

SEQ ID NO: 29179 - DNA, 40 bp, Homo sapiens
actactttatctcacatcttctctaagctattgttccttc

SEQ ID NO: 29180 - DNA, 40 bp, Homo sapiens
aaggaacaatagcttagagaagatgtgagataaagtagtt

SEQ ID NO: 29181 - DNA, 40 bp, Homo sapiens
aactactttatctcacatcttctctaagctattgttcctt

SEQ ID NO: 29182 - DNA, 40 bp, Homo sapiens
aggaacaatagcttagagaagatgtgagataaagtagttt

SEQ ID NO: 29183 - DNA, 40 bp, Homo sapiens
aaactactttatctcacatcttctctaagctattgttcct

SEQ ID NO: 29184 - DNA, 40 bp, Homo sapiens
ggaacaatagcttagagaagatgtgagataaagtagtttg

SEQ ID NO: 29185 - DNA, 40 bp, Homo sapiens
caaactactttatctcacatcttctctaagctattgttcc

SEQ ID NO: 29186 - DNA, 40 bp, Homo sapiens
gaacaatagcttagagaagatgtgagataaagtagtttgc

SEQ ID NO: 29187 - DNA, 40 bp, Homo sapiens
gcaaactactttatctcacatcttctctaagctattgttc

SEQ ID NO: 29188 - DNA, 40 bp, Homo sapiens
aacaatagcttagagaagatgtgagataaagtagtttgcc

SEQ ID NO: 29189 - DNA, 40 bp, Homo sapiens
ggcaaactactttatctcacatcttctctaagctattgtt

SEQ ID NO: 29190 - DNA, 40 bp, Homo sapiens
acaatagcttagagaagatgtgagataaagtagtttgccc

SEQ ID NO: 29191 - DNA, 40 bp, Homo sapiens
gggcaaactactttatctcacatcttctctaagctattgt

SEQ ID NO: 29192 - DNA, 40 bp, Homo sapiens
caatagcttagagaagatgtgagataaagtagtttgccca

SEQ ID NO: 29193 - DNA, 40 bp, Homo sapiens
tgggcaaactactttatctcacatcttctctaagctattg

SEQ ID NO: 29194 - DNA, 40 bp, Homo sapiens
aatagcttagagaagatgtgagataaagtagtttgcccaa

SEQ ID NO: 29195 - DNA, 40 bp, Homo sapiens
ttgggcaaactactttatctcacatcttctctaagctatt

SEQ ID NO: 29196 - DNA, 40 bp, Homo sapiens
atagcttagagaagatgtgagataaagtagtttgcccaag

SEQ ID NO: 29197 - DNA, 40 bp, Homo sapiens
cttgggcaaactactttatctcacatcttctctaagctat

SEQ ID NO: 29198 - DNA, 40 bp, Homo sapiens
tagcttagagaagatgtgagataaagtagtttgcccaagc

SEQ ID NO: 29199 - DNA, 40 bp, Homo sapiens
gcttgggcaaactactttatctcacatcttctctaagcta

SEQ ID NO: 29200 - DNA, 40 bp, Homo sapiens
agcttagagaagatgtgagataaagtagtttgcccaagcc

SEQ ID NO: 29201 - DNA, 40 bp, Homo sapiens
ggcttgggcaaactactttatctcacatcttctctaagct

SEQ ID NO: 29202 - DNA, 40 bp, Homo sapiens
gcttagagaagatgtgagataaagtagtttgcccaagccc

SEQ ID NO: 29203 - DNA, 40 bp, Homo sapiens
gggcttgggcaaactactttatctcacatcttctctaagc

SEQ ID NO: 29204 - DNA, 40 bp, Homo sapiens
cttagagaagatgtgagataaagtagtttgcccaagccca

SEQ ID NO: 29205 - DNA, 40 bp, Homo sapiens
tgggcttgggcaaactactttatctcacatcttctctaag

SEQ ID NO: 29206 - DNA, 40 bp, Homo sapiens
ttagagaagatgtgagataaagtagtttgcccaagcccat

SEQ ID NO: 29207 - DNA, 40 bp, Homo sapiens
atgggcttgggcaaactactttatctcacatcttctctaa

SEQ ID NO: 29208 - DNA, 40 bp, Homo sapiens
tagagaagatgtgagataaagtagtttgcccaagcccata

SEQ ID NO: 29209 - DNA, 40 bp, Homo sapiens
tatgggcttgggcaaactactttatctcacatcttctcta

SEQ ID NO: 29210 - DNA, 40 bp, Homo sapiens
agagaagatgtgagataaagtagtttgcccaagcccatag

SEQ ID NO: 29211 - DNA, 40 bp, Homo sapiens
ctatgggcttgggcaaactactttatctcacatcttctct

SEQ ID NO: 29212 - DNA, 40 bp, Homo sapiens
gagaagatgtgagataaagtagtttgcccaagcccatagc

SEQ ID NO: 29213 - DNA, 40 bp, Homo sapiens
gctatgggcttgggcaaactactttatctcacatcttctc

SEQ ID NO: 29214 - DNA, 40 bp, Homo sapiens
agaagatgtgagataaagtagtttgcccaagcccatagca

SEQ ID NO: 29215 - DNA, 40 bp, Homo sapiens
tgctatgggcttgggcaaactactttatctcacatcttct

SEQ ID NO: 29216 - DNA, 40 bp, Homo sapiens
gaagatgtgagataaagtagtttgcccaagcccatagcac

SEQ ID NO: 29217 - DNA, 40 bp, Homo sapiens
gtgctatgggcttgggcaaactactttatctcacatcttc

SEQ ID NO: 29218 - DNA, 40 bp, Homo sapiens
aagatgtgagataaagtagtttgcccaagcccatagcaca

SEQ ID NO: 29219 - DNA, 40 bp, Homo sapiens
tgtgctatgggcttgggcaaactactttatctcacatctt

SEQ ID NO: 29220 - DNA, 40 bp, Homo sapiens
agatgtgagataaagtagtttgcccaagcccatagcacaa

SEQ ID NO: 29221 - DNA, 40 bp, Homo sapiens
ttgtgctatgggcttgggcaaactactttatctcacatct

SEQ ID NO: 29222 - DNA, 40 bp, Homo sapiens
gatgtgagataaagtagtttgcccaagcccatagcacaaa

SEQ ID NO: 29223 - DNA, 40 bp, Homo sapiens
tttgtgctatgggcttgggcaaactactttatctcacatc

SEQ ID NO: 29224 - DNA, 40 bp, Homo sapiens
atgtgagataaagtagtttgcccaagcccatagcacaaat

SEQ ID NO: 29225 - DNA, 40 bp, Homo sapiens
atttgtgctatgggcttgggcaaactactttatctcacat

SEQ ID NO: 29226 - DNA, 40 bp, Homo sapiens
tgtgagataaagtagtttgcccaagcccatagcacaaata

SEQ ID NO: 29227 - DNA, 40 bp, Homo sapiens
tatttgtgctatgggcttgggcaaactactttatctcaca

SEQ ID NO: 29228 - DNA, 40 bp, Homo sapiens
gtgagataaagtagtttgcccaagcccatagcacaaataa

SEQ ID NO: 29229 - DNA, 40 bp, Homo sapiens
ttatttgtgctatgggcttgggcaaactactttatctcac

SEQ ID NO: 29230 - DNA, 40 bp, Homo sapiens
tgagataaagtagtttgcccaagcccatagcacaaataag

SEQ ID NO: 29231 - DNA, 40 bp, Homo sapiens
cttatttgtgctatgggcttgggcaaactactttatctca

SEQ ID NO: 29232 - DNA, 40 bp, Homo sapiens
gagataaagtagtttgcccaagcccatagcacaaataagt

SEQ ID NO: 29233 - DNA, 40 bp, Homo sapiens
acttatttgtgctatgggcttgggcaaactactttatctc

SEQ ID NO: 29234 - DNA, 40 bp, Homo sapiens
agataaagtagtttgcccaagcccatagcacaaataagtg

SEQ ID NO: 29235 - DNA, 40 bp, Homo sapiens
cacttatttgtgctatgggcttgggcaaactactttatct

SEQ ID NO: 29236 - DNA, 40 bp, Homo sapiens
gataaagtagtttgcccaagcccatagcacaaataagtga

SEQ ID NO: 29237 - DNA, 40 bp, Homo sapiens
tcacttatttgtgctatgggcttgggcaaactactttatc

SEQ ID NO: 29238 - DNA, 40 bp, Homo sapiens
ataaagtagtttgcccaagcccatagcacaaataagtgaa

SEQ ID NO: 29239 - DNA, 40 bp, Homo sapiens
ttcacttatttgtgctatgggcttgggcaaactactttat

SEQ ID NO: 29240 - DNA, 40 bp, Homo sapiens
taaagtagtttgcccaagcccatagcacaaataagtgaag

SEQ ID NO: 29241 - DNA, 40 bp, Homo sapiens
cttcacttatttgtgctatgggcttgggcaaactacttta

SEQ ID NO: 29242 - DNA, 40 bp, Homo sapiens
aaagtagtttgcccaagcccatagcacaaataagtgaagt

SEQ ID NO: 29243 - DNA, 40 bp, Homo sapiens
acttcacttatttgtgctatgggcttgggcaaactacttt

SEQ ID NO: 29244 - DNA, 40 bp, Homo sapiens
aagtagtttgcccaagcccatagcacaaataagtgaagtt

SEQ ID NO: 29245 - DNA, 40 bp, Homo sapiens
aacttcacttatttgtgctatgggcttgggcaaactactt

SEQ ID NO: 29246 - DNA, 40 bp, Homo sapiens
agtagtttgcccaagcccatagcacaaataagtgaagttc

SEQ ID NO: 29247 - DNA, 40 bp, Homo sapiens
gaacttcacttatttgtgctatgggcttgggcaaactact

SEQ ID NO: 29248 - DNA, 40 bp, Homo sapiens
gtagtttgcccaagcccatagcacaaataagtgaagttct

SEQ ID NO: 29249 - DNA, 40 bp, Homo sapiens
agaacttcacttatttgtgctatgggcttgggcaaactac

SEQ ID NO: 29250 - DNA, 40 bp, Homo sapiens
tagtttgcccaagcccatagcacaaataagtgaagttctt

SEQ ID NO: 29251 - DNA, 40 bp, Homo sapiens
aagaacttcacttatttgtgctatgggcttgggcaaacta

SEQ ID NO: 29252 - DNA, 40 bp, Homo sapiens
agtttgcccaagcccatagcacaaataagtgaagttcttc

SEQ ID NO: 29253 - DNA, 40 bp, Homo sapiens
gaagaacttcacttatttgtgctatgggcttgggcaaact

SEQ ID NO: 29254 - DNA, 40 bp, Homo sapiens
gtttgcccaagcccatagcacaaataagtgaagttcttcg

SEQ ID NO: 29255 - DNA, 40 bp, Homo sapiens
cgaagaacttcacttatttgtgctatgggcttgggcaaac

SEQ ID NO: 29256 - DNA, 40 bp, Homo sapiens
tttgcccaagcccatagcacaaataagtgaagttcttcgg

SEQ ID NO: 29257 - DNA, 40 bp, Homo sapiens
ccgaagaacttcacttatttgtgctatgggcttgggcaaa

SEQ ID NO: 29258 - DNA, 40 bp, Homo sapiens
ttgcccaagcccatagcacaaataagtgaagttcttcggc

SEQ ID NO: 29259 - DNA, 40 bp, Homo sapiens
gccgaagaacttcacttatttgtgctatgggcttgggcaa

SEQ ID NO: 29260 - DNA, 40 bp, Homo sapiens
tgcccaagcccatagcacaaataagtgaagttcttcggct

SEQ ID NO: 29261 - DNA, 40 bp, Homo sapiens
agccgaagaacttcacttatttgtgctatgggcttgggca

SEQ ID NO: 29262 - DNA, 40 bp, Homo sapiens
gcccaagcccatagcacaaataagtgaagttcttcggctg

SEQ ID NO: 29263 - DNA, 40 bp, Homo sapiens
cagccgaagaacttcacttatttgtgctatgggcttgggc

SEQ ID NO: 29264 - DNA, 40 bp, Homo sapiens
cccaagcccatagcacaaataagtgaagttcttcggctgt

SEQ ID NO: 29265 - DNA, 40 bp, Homo sapiens
acagccgaagaacttcacttatttgtgctatgggcttggg

SEQ ID NO: 29266 - DNA, 40 bp, Homo sapiens
ccaagcccatagcacaaataagtgaagttcttcggctgtc

SEQ ID NO: 29267 - DNA, 40 bp, Homo sapiens
gacagccgaagaacttcacttatttgtgctatgggcttgg

SEQ ID NO: 29268 - DNA, 40 bp, Homo sapiens
caagcccatagcacaaataagtgaagttcttcggctgtcc

SEQ ID NO: 29269 - DNA, 40 bp, Homo sapiens
ggacagccgaagaacttcacttatttgtgctatgggcttg

SEQ ID NO: 29270 - DNA, 40 bp, Homo sapiens
aagcccatagcacaaataagtgaagttcttcggctgtcca

SEQ ID NO: 29271 - DNA, 40 bp, Homo sapiens
tggacagccgaagaacttcacttatttgtgctatgggctt

SEQ ID NO: 29272 - DNA, 40 bp, Homo sapiens
agcccatagcacaaataagtgaagttcttcggctgtccat

SEQ ID NO: 29273 - DNA, 40 bp, Homo sapiens
atggacagccgaagaacttcacttatttgtgctatgggct

SEQ ID NO: 29274 - DNA, 40 bp, Homo sapiens
gcccatagcacaaataagtgaagttcttcggctgtccatg

SEQ ID NO: 29275 - DNA, 40 bp, Homo sapiens
catggacagccgaagaacttcacttatttgtgctatgggc

SEQ ID NO: 29276 - DNA, 40 bp, Homo sapiens
cccatagcacaaataagtgaagttcttcggctgtccatgg

SEQ ID NO: 29277 - DNA, 40 bp, Homo sapiens
ccatggacagccgaagaacttcacttatttgtgctatggg

SEQ ID NO: 29278 - DNA, 40 bp, Homo sapiens
ccatagcacaaataagtgaagttcttcggctgtccatgga

SEQ ID NO: 29279 - DNA, 40 bp, Homo sapiens
tccatggacagccgaagaacttcacttatttgtgctatgg

SEQ ID NO: 29280 - DNA, 40 bp, Homo sapiens
catagcacaaataagtgaagttcttcggctgtccatggat

SEQ ID NO: 29281 - DNA, 40 bp, Homo sapiens
atccatggacagccgaagaacttcacttatttgtgctatg

SEQ ID NO: 29282 - DNA, 40 bp, Homo sapiens
atagcacaaataagtgaagttcttcggctgtccatggatc

SEQ ID NO: 29283 - DNA, 40 bp, Homo sapiens
gatccatggacagccgaagaacttcacttatttgtgctat

SEQ ID NO: 29284 - DNA, 40 bp, Homo sapiens
tagcacaaataagtgaagttcttcggctgtccatggatcg

SEQ ID NO: 29285 - DNA, 40 bp, Homo sapiens
cgatccatggacagccgaagaacttcacttatttgtgcta

SEQ ID NO: 29286 - DNA, 40 bp, Homo sapiens
agcacaaataagtgaagttcttcggctgtccatggatcga

SEQ ID NO: 29287 - DNA, 40 bp, Homo sapiens
tcgatccatggacagccgaagaacttcacttatttgtgct

SEQ ID NO: 29288 - DNA, 40 bp, Homo sapiens
gcacaaataagtgaagttcttcggctgtccatggatcgaa

SEQ ID NO: 29289 - DNA, 40 bp, Homo sapiens
ttcgatccatggacagccgaagaacttcacttatttgtgc

SEQ ID NO: 29290 - DNA, 40 bp, Homo sapiens
cacaaataagtgaagttcttcggctgtccatggatcgaag

SEQ ID NO: 29291 - DNA, 40 bp, Homo sapiens
cttcgatccatggacagccgaagaacttcacttatttgtg

SEQ ID NO: 29292 - DNA, 40 bp, Homo sapiens
acaaataagtgaagttcttcggctgtccatggatcgaaga

SEQ ID NO: 29293 - DNA, 40 bp, Homo sapiens
tcttcgatccatggacagccgaagaacttcacttatttgt

SEQ ID NO: 29294 - DNA, 40 bp, Homo sapiens
caaataagtgaagttcttcggctgtccatggatcgaagac

SEQ ID NO: 29295 - DNA, 40 bp, Homo sapiens
gtcttcgatccatggacagccgaagaacttcacttatttg

SEQ ID NO: 29296 - DNA, 40 bp, Homo sapiens
aaataagtgaagttcttcggctgtccatggatcgaagact

SEQ ID NO: 29297 - DNA, 40 bp, Homo sapiens
agtcttcgatccatggacagccgaagaacttcacttattt

SEQ ID NO: 29298 - DNA, 40 bp, Homo sapiens
aataagtgaagttcttcggctgtccatggatcgaagactc

SEQ ID NO: 29299 - DNA, 40 bp, Homo sapiens
gagtcttcgatccatggacagccgaagaacttcacttatt

SEQ ID NO: 29300 - DNA, 40 bp, Homo sapiens
ataagtgaagttcttcggctgtccatggatcgaagactcc

SEQ ID NO: 29301 - DNA, 40 bp, Homo sapiens
ggagtcttcgatccatggacagccgaagaacttcacttat

SEQ ID NO: 29302 - DNA, 40 bp, Homo sapiens
taagtgaagttcttcggctgtccatggatcgaagactccc

SEQ ID NO: 29303 - DNA, 40 bp, Homo sapiens
gggagtcttcgatccatggacagccgaagaacttcactta

SEQ ID NO: 29304 - DNA, 40 bp, Homo sapiens
aagtgaagttcttcggctgtccatggatcgaagactccca

SEQ ID NO: 29305 - DNA, 40 bp, Homo sapiens
tgggagtcttcgatccatggacagccgaagaacttcactt

SEQ ID NO: 29306 - DNA, 40 bp, Homo sapiens
agtgaagttcttcggctgtccatggatcgaagactcccaa

SEQ ID NO: 29307 - DNA, 40 bp, Homo sapiens
ttgggagtcttcgatccatggacagccgaagaacttcact

SEQ ID NO: 29308 - DNA, 40 bp, Homo sapiens
gtgaagttcttcggctgtccatggatcgaagactcccaag

SEQ ID NO: 29309 - DNA, 40 bp, Homo sapiens
cttgggagtcttcgatccatggacagccgaagaacttcac

SEQ ID NO: 29310 - DNA, 40 bp, Homo sapiens
tgaagttcttcggctgtccatggatcgaagactcccaagt

SEQ ID NO: 29311 - DNA, 40 bp, Homo sapiens
acttgggagtcttcgatccatggacagccgaagaacttca

SEQ ID NO: 29312 - DNA, 40 bp, Homo sapiens
gaagttcttcggctgtccatggatcgaagactcccaagtc

SEQ ID NO: 29313 - DNA, 40 bp, Homo sapiens
gacttgggagtcttcgatccatggacagccgaagaacttc

SEQ ID NO: 29314 - DNA, 40 bp, Homo sapiens
aagttcttcggctgtccatggatcgaagactcccaagtct

SEQ ID NO: 29315 - DNA, 40 bp, Homo sapiens
agacttgggagtcttcgatccatggacagccgaagaactt

SEQ ID NO: 29316 - DNA, 40 bp, Homo sapiens
agttcttcggctgtccatggatcgaagactcccaagtcta

SEQ ID NO: 29317 - DNA, 40 bp, Homo sapiens
tagacttgggagtcttcgatccatggacagccgaagaact

SEQ ID NO: 29318 - DNA, 40 bp, Homo sapiens
gttcttcggctgtccatggatcgaagactcccaagtctat

SEQ ID NO: 29319 - DNA, 40 bp, Homo sapiens
atagacttgggagtcttcgatccatggacagccgaagaac

SEQ ID NO: 29320 - DNA, 40 bp, Homo sapiens
ttcttcggctgtccatggatcgaagactcccaagtctatc

SEQ ID NO: 29321 - DNA, 40 bp, Homo sapiens
gatagacttgggagtcttcgatccatggacagccgaagaa

SEQ ID NO: 29322 - DNA, 40 bp, Homo sapiens
tcttcggctgtccatggatcgaagactcccaagtctatct

SEQ ID NO: 29323 - DNA, 40 bp, Homo sapiens
agatagacttgggagtcttcgatccatggacagccgaaga

SEQ ID NO: 29324 - DNA, 40 bp, Homo sapiens
cttcggctgtccatggatcgaagactcccaagtctatctc

SEQ ID NO: 29325 - DNA, 40 bp, Homo sapiens
gagatagacttgggagtcttcgatccatggacagccgaag

SEQ ID NO: 29326 - DNA, 40 bp, Homo sapiens
ttcggctgtccatggatcgaagactcccaagtctatctct

SEQ ID NO: 29327 - DNA, 40 bp, Homo sapiens
agagatagacttgggagtcttcgatccatggacagccgaa

SEQ ID NO: 29328 - DNA, 40 bp, Homo sapiens
tcggctgtccatggatcgaagactcccaagtctatctcta

SEQ ID NO: 29329 - DNA, 40 bp, Homo sapiens
tagagatagacttgggagtcttcgatccatggacagccga

SEQ ID NO: 29330 - DNA, 40 bp, Homo sapiens
cggctgtccatggatcgaagactcccaagtctatctctag

SEQ ID NO: 29331 - DNA, 40 bp, Homo sapiens
ctagagatagacttgggagtcttcgatccatggacagccg

SEQ ID NO: 29332 - DNA, 40 bp, Homo sapiens
ggctgtccatggatcgaagactcccaagtctatctctagc

SEQ ID NO: 29333 - DNA, 40 bp, Homo sapiens
gctagagatagacttgggagtcttcgatccatggacagcc

SEQ ID NO: 29334 - DNA, 40 bp, Homo sapiens
gctgtccatggatcgaagactcccaagtctatctctagcc

SEQ ID NO: 29335 - DNA, 40 bp, Homo sapiens
ggctagagatagacttgggagtcttcgatccatggacagc

SEQ ID NO: 29336 - DNA, 40 bp, Homo sapiens
ctgtccatggatcgaagactcccaagtctatctctagcct

SEQ ID NO: 29337 - DNA, 40 bp, Homo sapiens
aggctagagatagacttgggagtcttcgatccatggacag

SEQ ID NO: 29338 - DNA, 40 bp, Homo sapiens
tgtccatggatcgaagactcccaagtctatctctagcctg

SEQ ID NO: 29339 - DNA, 40 bp, Homo sapiens
caggctagagatagacttgggagtcttcgatccatggaca

SEQ ID NO: 29340 - DNA, 40 bp, Homo sapiens
gtccatggatcgaagactcccaagtctatctctagcctgg

SEQ ID NO: 29341 - DNA, 40 bp, Homo sapiens
ccaggctagagatagacttgggagtcttcgatccatggac

SEQ ID NO: 29342 - DNA, 40 bp, Homo sapiens
tccatggatcgaagactcccaagtctatctctagcctgga

SEQ ID NO: 29343 - DNA, 40 bp, Homo sapiens
tccaggctagagatagacttgggagtcttcgatccatgga

SEQ ID NO: 29344 - DNA, 40 bp, Homo sapiens
ccatggatcgaagactcccaagtctatctctagcctggac

SEQ ID NO: 29345 - DNA, 40 bp, Homo sapiens
gtccaggctagagatagacttgggagtcttcgatccatgg

SEQ ID NO: 29346 - DNA, 40 bp, Homo sapiens
catggatcgaagactcccaagtctatctctagcctggact

SEQ ID NO: 29347 - DNA, 40 bp, Homo sapiens
agtccaggctagagatagacttgggagtcttcgatccatg

SEQ ID NO: 29348 - DNA, 40 bp, Homo sapiens
atggatcgaagactcccaagtctatctctagcctggactt

SEQ ID NO: 29349 - DNA, 40 bp, Homo sapiens
aagtccaggctagagatagacttgggagtcttcgatccat

SEQ ID NO: 29350 - DNA, 40 bp, Homo sapiens
tggatcgaagactcccaagtctatctctagcctggacttc

SEQ ID NO: 29351 - DNA, 40 bp, Homo sapiens
gaagtccaggctagagatagacttgggagtcttcgatcca

SEQ ID NO: 29352 - DNA, 40 bp, Homo sapiens
ggatcgaagactcccaagtctatctctagcctggacttct

SEQ ID NO: 29353 - DNA, 40 bp, Homo sapiens
agaagtccaggctagagatagacttgggagtcttcgatcc

SEQ ID NO: 29354 - DNA, 40 bp, Homo sapiens
gatcgaagactcccaagtctatctctagcctggacttctg

SEQ ID NO: 29355 - DNA, 40 bp, Homo sapiens
cagaagtccaggctagagatagacttgggagtcttcgatc

SEQ ID NO: 29356 - DNA, 40 bp, Homo sapiens
atcgaagactcccaagtctatctctagcctggacttctgt

SEQ ID NO: 29357 - DNA, 40 bp, Homo sapiens
acagaagtccaggctagagatagacttgggagtcttcgat

SEQ ID NO: 29358 - DNA, 40 bp, Homo sapiens
tcgaagactcccaagtctatctctagcctggacttctgtc

SEQ ID NO: 29359 - DNA, 40 bp, Homo sapiens
gacagaagtccaggctagagatagacttgggagtcttcga

SEQ ID NO: 29360 - DNA, 40 bp, Homo sapiens
cgaagactcccaagtctatctctagcctggacttctgtcc

SEQ ID NO: 29361 - DNA, 40 bp, Homo sapiens
ggacagaagtccaggctagagatagacttgggagtcttcg

SEQ ID NO: 29362 - DNA, 40 bp, Homo sapiens
gaagactcccaagtctatctctagcctggacttctgtcct

SEQ ID NO: 29363 - DNA, 40 bp, Homo sapiens
aggacagaagtccaggctagagatagacttgggagtcttc

SEQ ID NO: 29364 - DNA, 40 bp, Homo sapiens
aagactcccaagtctatctctagcctggacttctgtcctg

SEQ ID NO: 29365 - DNA, 40 bp, Homo sapiens
caggacagaagtccaggctagagatagacttgggagtctt

SEQ ID NO: 29366 - DNA, 40 bp, Homo sapiens
agactcccaagtctatctctagcctggacttctgtcctga

SEQ ID NO: 29367 - DNA, 40 bp, Homo sapiens
tcaggacagaagtccaggctagagatagacttgggagtct

SEQ ID NO: 29368 - DNA, 40 bp, Homo sapiens
gactcccaagtctatctctagcctggacttctgtcctgag

SEQ ID NO: 29369 - DNA, 40 bp, Homo sapiens
ctcaggacagaagtccaggctagagatagacttgggagtc

SEQ ID NO: 29370 - DNA, 40 bp, Homo sapiens
actcccaagtctatctctagcctggacttctgtcctgagc

SEQ ID NO: 29371 - DNA, 40 bp, Homo sapiens
gctcaggacagaagtccaggctagagatagacttgggagt

SEQ ID NO: 29372 - DNA, 40 bp, Homo sapiens
ctcccaagtctatctctagcctggacttctgtcctgagca

SEQ ID NO: 29373 - DNA, 40 bp, Homo sapiens
tgctcaggacagaagtccaggctagagatagacttgggag

SEQ ID NO: 29374 - DNA, 40 bp, Homo sapiens
tcccaagtctatctctagcctggacttctgtcctgagcac

SEQ ID NO: 29375 - DNA, 40 bp, Homo sapiens
gtgctcaggacagaagtccaggctagagatagacttggga

SEQ ID NO: 29376 - DNA, 40 bp, Homo sapiens
cccaagtctatctctagcctggacttctgtcctgagcacc

SEQ ID NO: 29377 - DNA, 40 bp, Homo sapiens
ggtgctcaggacagaagtccaggctagagatagacttggg

SEQ ID NO: 29378 - DNA, 40 bp, Homo sapiens
ccaagtctatctctagcctggacttctgtcctgagcacca

SEQ ID NO: 29379 - DNA, 40 bp, Homo sapiens
tggtgctcaggacagaagtccaggctagagatagacttgg

SEQ ID NO: 29380 - DNA, 40 bp, Homo sapiens
caagtctatctctagcctggacttctgtcctgagcaccag

SEQ ID NO: 29381 - DNA, 40 bp, Homo sapiens
ctggtgctcaggacagaagtccaggctagagatagacttg

SEQ ID NO: 29382 - DNA, 40 bp, Homo sapiens
aagtctatctctagcctggacttctgtcctgagcaccaga

SEQ ID NO: 29383 - DNA, 40 bp, Homo sapiens
tctggtgctcaggacagaagtccaggctagagatagactt

SEQ ID NO: 29384 - DNA, 40 bp, Homo sapiens
agtctatctctagcctggacttctgtcctgagcaccagac

SEQ ID NO: 29385 - DNA, 40 bp, Homo sapiens
gtctggtgctcaggacagaagtccaggctagagatagact

SEQ ID NO: 29386 - DNA, 40 bp, Homo sapiens
gtctatctctagcctggacttctgtcctgagcaccagaca

SEQ ID NO: 29387 - DNA, 40 bp, Homo sapiens
tgtctggtgctcaggacagaagtccaggctagagatagac

SEQ ID NO: 29388 - DNA, 40 bp, Homo sapiens
tctatctctagcctggacttctgtcctgagcaccagacat

SEQ ID NO: 29389 - DNA, 40 bp, Homo sapiens
atgtctggtgctcaggacagaagtccaggctagagataga

SEQ ID NO: 29390 - DNA, 40 bp, Homo sapiens
ctatctctagcctggacttctgtcctgagcaccagacatg

SEQ ID NO: 29391 - DNA, 40 bp, Homo sapiens
catgtctggtgctcaggacagaagtccaggctagagatag

SEQ ID NO: 29392 - DNA, 40 bp, Homo sapiens
tatctctagcctggacttctgtcctgagcaccagacatgt

SEQ ID NO: 29393 - DNA, 40 bp, Homo sapiens
acatgtctggtgctcaggacagaagtccaggctagagata

SEQ ID NO: 29394 - DNA, 40 bp, Homo sapiens
atctctagcctggacttctgtcctgagcaccagacatgta

SEQ ID NO: 29395 - DNA, 40 bp, Homo sapiens
tacatgtctggtgctcaggacagaagtccaggctagagat

SEQ ID NO: 29396 - DNA, 40 bp, Homo sapiens
tctctagcctggacttctgtcctgagcaccagacatgtat

SEQ ID NO: 29397 - DNA, 40 bp, Homo sapiens
atacatgtctggtgctcaggacagaagtccaggctagaga

SEQ ID NO: 29398 - DNA, 40 bp, Homo sapiens
ctctagcctggacttctgtcctgagcaccagacatgtatg

SEQ ID NO: 29399 - DNA, 40 bp, Homo sapiens
catacatgtctggtgctcaggacagaagtccaggctagag

SEQ ID NO: 29400 - DNA, 40 bp, Homo sapiens
tctagcctggacttctgtcctgagcaccagacatgtatgt

SEQ ID NO: 29401 - DNA, 40 bp, Homo sapiens
acatacatgtctggtgctcaggacagaagtccaggctaga

SEQ ID NO: 29402 - DNA, 40 bp, Homo sapiens
ctagcctggacttctgtcctgagcaccagacatgtatgta

SEQ ID NO: 29403 - DNA, 40 bp, Homo sapiens
tacatacatgtctggtgctcaggacagaagtccaggctag

SEQ ID NO: 29404 - DNA, 40 bp, Homo sapiens
tagcctggacttctgtcctgagcaccagacatgtatgtat

SEQ ID NO: 29405 - DNA, 40 bp, Homo sapiens
atacatacatgtctggtgctcaggacagaagtccaggcta

SEQ ID NO: 29406 - DNA, 40 bp, Homo sapiens
agcctggacttctgtcctgagcaccagacatgtatgtata

SEQ ID NO: 29407 - DNA, 40 bp, Homo sapiens
tatacatacatgtctggtgctcaggacagaagtccaggct

SEQ ID NO: 29408 - DNA, 40 bp, Homo sapiens
gcctggacttctgtcctgagcaccagacatgtatgtatat

SEQ ID NO: 29409 - DNA, 40 bp, Homo sapiens
atatacatacatgtctggtgctcaggacagaagtccaggc

SEQ ID NO: 29410 - DNA, 40 bp, Homo sapiens
cctggacttctgtcctgagcaccagacatgtatgtatatc

SEQ ID NO: 29411 - DNA, 40 bp, Homo sapiens
gatatacatacatgtctggtgctcaggacagaagtccagg

SEQ ID NO: 29412 - DNA, 40 bp, Homo sapiens
ctggacttctgtcctgagcaccagacatgtatgtatatca

SEQ ID NO: 29413 - DNA, 40 bp, Homo sapiens
tgatatacatacatgtctggtgctcaggacagaagtccag

SEQ ID NO: 29414 - DNA, 40 bp, Homo sapiens
tggacttctgtcctgagcaccagacatgtatgtatatcaa

SEQ ID NO: 29415 - DNA, 40 bp, Homo sapiens
ttgatatacatacatgtctggtgctcaggacagaagtcca

SEQ ID NO: 29416 - DNA, 40 bp, Homo sapiens
ggacttctgtcctgagcaccagacatgtatgtatatcaag

SEQ ID NO: 29417 - DNA, 40 bp, Homo sapiens
cttgatatacatacatgtctggtgctcaggacagaagtcc

SEQ ID NO: 29418 - DNA, 40 bp, Homo sapiens
gacttctgtcctgagcaccagacatgtatgtatatcaaga

SEQ ID NO: 29419 - DNA, 40 bp, Homo sapiens
tcttgatatacatacatgtctggtgctcaggacagaagtc

SEQ ID NO: 29420 - DNA, 40 bp, Homo sapiens
acttctgtcctgagcaccagacatgtatgtatatcaagat

SEQ ID NO: 29421 - DNA, 40 bp, Homo sapiens
atcttgatatacatacatgtctggtgctcaggacagaagt

SEQ ID NO: 29422 - DNA, 40 bp, Homo sapiens
cttctgtcctgagcaccagacatgtatgtatatcaagatg

SEQ ID NO: 29423 - DNA, 40 bp, Homo sapiens
catcttgatatacatacatgtctggtgctcaggacagaag

SEQ ID NO: 29424 - DNA, 40 bp, Homo sapiens
ttctgtcctgagcaccagacatgtatgtatatcaagatgc

SEQ ID NO: 29425 - DNA, 40 bp, Homo sapiens
gcatcttgatatacatacatgtctggtgctcaggacagaa

SEQ ID NO: 29426 - DNA, 40 bp, Homo sapiens
tctgtcctgagcaccagacatgtatgtatatcaagatgcc

SEQ ID NO: 29427 - DNA, 40 bp, Homo sapiens
ggcatcttgatatacatacatgtctggtgctcaggacaga

SEQ ID NO: 29428 - DNA, 40 bp, Homo sapiens
ctgtcctgagcaccagacatgtatgtatatcaagatgcct

SEQ ID NO: 29429 - DNA, 40 bp, Homo sapiens
aggcatcttgatatacatacatgtctggtgctcaggacag

SEQ ID NO: 29430 - DNA, 40 bp, Homo sapiens
tgtcctgagcaccagacatgtatgtatatcaagatgcctg

SEQ ID NO: 29431 - DNA, 40 bp, Homo sapiens
caggcatcttgatatacatacatgtctggtgctcaggaca

SEQ ID NO: 29432 - DNA, 40 bp, Homo sapiens
gtcctgagcaccagacatgtatgtatatcaagatgcctgc

SEQ ID NO: 29433 - DNA, 40 bp, Homo sapiens
gcaggcatcttgatatacatacatgtctggtgctcaggac

SEQ ID NO: 29434 - DNA, 40 bp, Homo sapiens
tcctgagcaccagacatgtatgtatatcaagatgcctgca

SEQ ID NO: 29435 - DNA, 40 bp, Homo sapiens
tgcaggcatcttgatatacatacatgtctggtgctcagga

SEQ ID NO: 29436 - DNA, 40 bp, Homo sapiens
cctgagcaccagacatgtatgtatatcaagatgcctgcag

SEQ ID NO: 29437 - DNA, 40 bp, Homo sapiens
ctgcaggcatcttgatatacatacatgtctggtgctcagg

SEQ ID NO: 29438 - DNA, 40 bp, Homo sapiens
ctgagcaccagacatgtatgtatatcaagatgcctgcagg

SEQ ID NO: 29439 - DNA, 40 bp, Homo sapiens
cctgcaggcatcttgatatacatacatgtctggtgctcag

SEQ ID NO: 29440 - DNA, 40 bp, Homo sapiens
tgagcaccagacatgtatgtatatcaagatgcctgcaggt

SEQ ID NO: 29441 - DNA, 40 bp, Homo sapiens
acctgcaggcatcttgatatacatacatgtctggtgctca

SEQ ID NO: 29442 - DNA, 40 bp, Homo sapiens
gagcaccagacatgtatgtatatcaagatgcctgcaggtc

SEQ ID NO: 29443 - DNA, 40 bp, Homo sapiens
gacctgcaggcatcttgatatacatacatgtctggtgctc

SEQ ID NO: 29444 - DNA, 40 bp, Homo sapiens
agcaccagacatgtatgtatatcaagatgcctgcaggtca

SEQ ID NO: 29445 - DNA, 40 bp, Homo sapiens
tgacctgcaggcatcttgatatacatacatgtctggtgct

SEQ ID NO: 29446 - DNA, 40 bp, Homo sapiens
gcaccagacatgtatgtatatcaagatgcctgcaggtcat

SEQ ID NO: 29447 - DNA, 40 bp, Homo sapiens
atgacctgcaggcatcttgatatacatacatgtctggtgc

SEQ ID NO: 29448 - DNA, 40 bp, Homo sapiens
caccagacatgtatgtatatcaagatgcctgcaggtcata

SEQ ID NO: 29449 - DNA, 40 bp, Homo sapiens
tatgacctgcaggcatcttgatatacatacatgtctggtg

SEQ ID NO: 29450 - DNA, 40 bp, Homo sapiens
accagacatgtatgtatatcaagatgcctgcaggtcatat

SEQ ID NO: 29451 - DNA, 40 bp, Homo sapiens
atatgacctgcaggcatcttgatatacatacatgtctggt

SEQ ID NO: 29452 - DNA, 40 bp, Homo sapiens
ccagacatgtatgtatatcaagatgcctgcaggtcatatc

SEQ ID NO: 29453 - DNA, 40 bp, Homo sapiens
gatatgacctgcaggcatcttgatatacatacatgtctgg

SEQ ID NO: 29454 - DNA, 40 bp, Homo sapiens
cagacatgtatgtatatcaagatgcctgcaggtcatatcc

SEQ ID NO: 29455 - DNA, 40 bp, Homo sapiens
ggatatgacctgcaggcatcttgatatacatacatgtctg

SEQ ID NO: 29456 - DNA, 40 bp, Homo sapiens
agacatgtatgtatatcaagatgcctgcaggtcatatcca

SEQ ID NO: 29457 - DNA, 40 bp, Homo sapiens
tggatatgacctgcaggcatcttgatatacatacatgtct

SEQ ID NO: 29458 - DNA, 40 bp, Homo sapiens
gacatgtatgtatatcaagatgcctgcaggtcatatccac

SEQ ID NO: 29459 - DNA, 40 bp, Homo sapiens
gtggatatgacctgcaggcatcttgatatacatacatgtc

SEQ ID NO: 29460 - DNA, 40 bp, Homo sapiens
acatgtatgtatatcaagatgcctgcaggtcatatccacc

SEQ ID NO: 29461 - DNA, 40 bp, Homo sapiens
ggtggatatgacctgcaggcatcttgatatacatacatgt

SEQ ID NO: 29462 - DNA, 40 bp, Homo sapiens
catgtatgtatatcaagatgcctgcaggtcatatccacca

SEQ ID NO: 29463 - DNA, 40 bp, Homo sapiens
tggtggatatgacctgcaggcatcttgatatacatacatg

SEQ ID NO: 29464 - DNA, 40 bp, Homo sapiens
atgtatgtatatcaagatgcctgcaggtcatatccaccag

SEQ ID NO: 29465 - DNA, 40 bp, Homo sapiens
ctggtggatatgacctgcaggcatcttgatatacatacat

SEQ ID NO: 29466 - DNA, 40 bp, Homo sapiens
tgtatgtatatcaagatgcctgcaggtcatatccaccagg

SEQ ID NO: 29467 - DNA, 40 bp, Homo sapiens
cctggtggatatgacctgcaggcatcttgatatacataca

SEQ ID NO: 29468 - DNA, 40 bp, Homo sapiens
gtatgtatatcaagatgcctgcaggtcatatccaccagga

SEQ ID NO: 29469 - DNA, 40 bp, Homo sapiens
tcctggtggatatgacctgcaggcatcttgatatacatac

SEQ ID NO: 29470 - DNA, 40 bp, Homo sapiens
tatgtatatcaagatgcctgcaggtcatatccaccaggac

SEQ ID NO: 29471 - DNA, 40 bp, Homo sapiens
gtcctggtggatatgacctgcaggcatcttgatatacata

SEQ ID NO: 29472 - DNA, 40 bp, Homo sapiens
atgtatatcaagatgcctgcaggtcatatccaccaggaca

SEQ ID NO: 29473 - DNA, 40 bp, Homo sapiens
tgtcctggtggatatgacctgcaggcatcttgatatacat

SEQ ID NO: 29474 - DNA, 40 bp, Homo sapiens
tgtatatcaagatgcctgcaggtcatatccaccaggacaa

SEQ ID NO: 29475 - DNA, 40 bp, Homo sapiens
ttgtcctggtggatatgacctgcaggcatcttgatataca

SEQ ID NO: 29476 - DNA, 40 bp, Homo sapiens
gtatatcaagatgcctgcaggtcatatccaccaggacaac

SEQ ID NO: 29477 - DNA, 40 bp, Homo sapiens
gttgtcctggtggatatgacctgcaggcatcttgatatac

SEQ ID NO: 29478 - DNA, 40 bp, Homo sapiens
tatatcaagatgcctgcaggtcatatccaccaggacaacc

SEQ ID NO: 29479 - DNA, 40 bp, Homo sapiens
ggttgtcctggtggatatgacctgcaggcatcttgatata

SEQ ID NO: 29480 - DNA, 40 bp, Homo sapiens
atatcaagatgcctgcaggtcatatccaccaggacaaccc

SEQ ID NO: 29481 - DNA, 40 bp, Homo sapiens
gggttgtcctggtggatatgacctgcaggcatcttgatat

SEQ ID NO: 29482 - DNA, 40 bp, Homo sapiens
tatcaagatgcctgcaggtcatatccaccaggacaaccca

SEQ ID NO: 29483 - DNA, 40 bp, Homo sapiens
tgggttgtcctggtggatatgacctgcaggcatcttgata

SEQ ID NO: 29484 - DNA, 40 bp, Homo sapiens
atcaagatgcctgcaggtcatatccaccaggacaacccat

SEQ ID NO: 29485 - DNA, 40 bp, Homo sapiens
atgggttgtcctggtggatatgacctgcaggcatcttgat

SEQ ID NO: 29486 - DNA, 40 bp, Homo sapiens
tcaagatgcctgcaggtcatatccaccaggacaacccatg

SEQ ID NO: 29487 - DNA, 40 bp, Homo sapiens
catgggttgtcctggtggatatgacctgcaggcatcttga

SEQ ID NO: 29488 - DNA, 40 bp, Homo sapiens
caagatgcctgcaggtcatatccaccaggacaacccatga

SEQ ID NO: 29489 - DNA, 40 bp, Homo sapiens
tcatgggttgtcctggtggatatgacctgcaggcatcttg

SEQ ID NO: 29490 - DNA, 40 bp, Homo sapiens
aagatgcctgcaggtcatatccaccaggacaacccatgag

SEQ ID NO: 29491 - DNA, 40 bp, Homo sapiens
ctcatgggttgtcctggtggatatgacctgcaggcatctt

SEQ ID NO: 29492 - DNA, 40 bp, Homo sapiens
agatgcctgcaggtcatatccaccaggacaacccatgagt

SEQ ID NO: 29493 - DNA, 40 bp, Homo sapiens
actcatgggttgtcctggtggatatgacctgcaggcatct

SEQ ID NO: 29494 - DNA, 40 bp, Homo sapiens
gatgcctgcaggtcatatccaccaggacaacccatgagta

SEQ ID NO: 29495 - DNA, 40 bp, Homo sapiens
tactcatgggttgtcctggtggatatgacctgcaggcatc

SEQ ID NO: 29496 - DNA, 40 bp, Homo sapiens
atgcctgcaggtcatatccaccaggacaacccatgagtac

SEQ ID NO: 29497 - DNA, 40 bp, Homo sapiens
gtactcatgggttgtcctggtggatatgacctgcaggcat

SEQ ID NO: 29498 - DNA, 40 bp, Homo sapiens
tgcctgcaggtcatatccaccaggacaacccatgagtaca

SEQ ID NO: 29499 - DNA, 40 bp, Homo sapiens
tgtactcatgggttgtcctggtggatatgacctgcaggca

SEQ ID NO: 29500 - DNA, 40 bp, Homo sapiens
gcctgcaggtcatatccaccaggacaacccatgagtacag

SEQ ID NO: 29501 - DNA, 40 bp, Homo sapiens
ctgtactcatgggttgtcctggtggatatgacctgcaggc

SEQ ID NO: 29502 - DNA, 40 bp, Homo sapiens
cctgcaggtcatatccaccaggacaacccatgagtacagg

SEQ ID NO: 29503 - DNA, 40 bp, Homo sapiens
cctgtactcatgggttgtcctggtggatatgacctgcagg

SEQ ID NO: 29504 - DNA, 40 bp, Homo sapiens
ctgcaggtcatatccaccaggacaacccatgagtacaggg

SEQ ID NO: 29505 - DNA, 40 bp, Homo sapiens
ccctgtactcatgggttgtcctggtggatatgacctgcag

SEQ ID NO: 29506 - DNA, 40 bp, Homo sapiens
tgcaggtcatatccaccaggacaacccatgagtacaggga

SEQ ID NO: 29507 - DNA, 40 bp, Homo sapiens
tccctgtactcatgggttgtcctggtggatatgacctgca

SEQ ID NO: 29508 - DNA, 40 bp, Homo sapiens
gcaggtcatatccaccaggacaacccatgagtacagggaa

SEQ ID NO: 29509 - DNA, 40 bp, Homo sapiens
ttccctgtactcatgggttgtcctggtggatatgacctgc

SEQ ID NO: 29510 - DNA, 40 bp, Homo sapiens
caggtcatatccaccaggacaacccatgagtacagggaat

SEQ ID NO: 29511 - DNA, 40 bp, Homo sapiens
attccctgtactcatgggttgtcctggtggatatgacctg

SEQ ID NO: 29512 - DNA, 40 bp, Homo sapiens
aggtcatatccaccaggacaacccatgagtacagggaatt

SEQ ID NO: 29513 - DNA, 40 bp, Homo sapiens
aattccctgtactcatgggttgtcctggtggatatgacct

SEQ ID NO: 29514 - DNA, 40 bp, Homo sapiens
ggtcatatccaccaggacaacccatgagtacagggaattc

SEQ ID NO: 29515 - DNA, 40 bp, Homo sapiens
gaattccctgtactcatgggttgtcctggtggatatgacc

SEQ ID NO: 29516 - DNA, 40 bp, Homo sapiens
gtcatatccaccaggacaacccatgagtacagggaattca

SEQ ID NO: 29517 - DNA, 40 bp, Homo sapiens
tgaattccctgtactcatgggttgtcctggtggatatgac

SEQ ID NO: 29518 - DNA, 40 bp, Homo sapiens
tcatatccaccaggacaacccatgagtacagggaattcaa

SEQ ID NO: 29519 - DNA, 40 bp, Homo sapiens
ttgaattccctgtactcatgggttgtcctggtggatatga

SEQ ID NO: 29520 - DNA, 40 bp, Homo sapiens
catatccaccaggacaacccatgagtacagggaattcaac

SEQ ID NO: 29521 - DNA, 40 bp, Homo sapiens
gttgaattccctgtactcatgggttgtcctggtggatatg

SEQ ID NO: 29522 - DNA, 40 bp, Homo sapiens
atatccaccaggacaacccatgagtacagggaattcaaca

SEQ ID NO: 29523 - DNA, 40 bp, Homo sapiens
tgttgaattccctgtactcatgggttgtcctggtggatat

SEQ ID NO: 29524 - DNA, 40 bp, Homo sapiens
tatccaccaggacaacccatgagtacagggaattcaacat

SEQ ID NO: 29525 - DNA, 40 bp, Homo sapiens
atgttgaattccctgtactcatgggttgtcctggtggata

SEQ ID NO: 29526 - DNA, 40 bp, Homo sapiens
atccaccaggacaacccatgagtacagggaattcaacatg

SEQ ID NO: 29527 - DNA, 40 bp, Homo sapiens
catgttgaattccctgtactcatgggttgtcctggtggat

SEQ ID NO: 29528 - DNA, 40 bp, Homo sapiens
tccaccaggacaacccatgagtacagggaattcaacatgc

SEQ ID NO: 29529 - DNA, 40 bp, Homo sapiens
gcatgttgaattccctgtactcatgggttgtcctggtgga

SEQ ID NO: 29530 - DNA, 40 bp, Homo sapiens
ccaccaggacaacccatgagtacagggaattcaacatgcc

SEQ ID NO: 29531 - DNA, 40 bp, Homo sapiens
ggcatgttgaattccctgtactcatgggttgtcctggtgg

SEQ ID NO: 29532 - DNA, 40 bp, Homo sapiens
caccaggacaacccatgagtacagggaattcaacatgccc

SEQ ID NO: 29533 - DNA, 40 bp, Homo sapiens
gggcatgttgaattccctgtactcatgggttgtcctggtg

SEQ ID NO: 29534 - DNA, 40 bp, Homo sapiens
accaggacaacccatgagtacagggaattcaacatgccca

SEQ ID NO: 29535 - DNA, 40 bp, Homo sapiens
tgggcatgttgaattccctgtactcatgggttgtcctggt

SEQ ID NO: 29536 - DNA, 40 bp, Homo sapiens
ccaggacaacccatgagtacagggaattcaacatgcccaa

SEQ ID NO: 29537 - DNA, 40 bp, Homo sapiens
ttgggcatgttgaattccctgtactcatgggttgtcctgg

SEQ ID NO: 29538 - DNA, 40 bp, Homo sapiens
caggacaacccatgagtacagggaattcaacatgcccaat

SEQ ID NO: 29539 - DNA, 40 bp, Homo sapiens
attgggcatgttgaattccctgtactcatgggttgtcctg

SEQ ID NO: 29540 - DNA, 40 bp, Homo sapiens
aggacaacccatgagtacagggaattcaacatgcccaata

SEQ ID NO: 29541 - DNA, 40 bp, Homo sapiens
tattgggcatgttgaattccctgtactcatgggttgtcct

SEQ ID NO: 29542 - DNA, 40 bp, Homo sapiens
ggacaacccatgagtacagggaattcaacatgcccaatat

SEQ ID NO: 29543 - DNA, 40 bp, Homo sapiens
atattgggcatgttgaattccctgtactcatgggttgtcc

SEQ ID NO: 29544 - DNA, 40 bp, Homo sapiens
gacaacccatgagtacagggaattcaacatgcccaatatc

SEQ ID NO: 29545 - DNA, 40 bp, Homo sapiens
gatattgggcatgttgaattccctgtactcatgggttgtc

SEQ ID NO: 29546 - DNA, 40 bp, Homo sapiens
acaacccatgagtacagggaattcaacatgcccaatatca

SEQ ID NO: 29547 - DNA, 40 bp, Homo sapiens
tgatattgggcatgttgaattccctgtactcatgggttgt

SEQ ID NO: 29548 - DNA, 40 bp, Homo sapiens
caacccatgagtacagggaattcaacatgcccaatatcac

SEQ ID NO: 29549 - DNA, 40 bp, Homo sapiens
gtgatattgggcatgttgaattccctgtactcatgggttg

SEQ ID NO: 29550 - DNA, 40 bp, Homo sapiens
aacccatgagtacagggaattcaacatgcccaatatcact

SEQ ID NO: 29551 - DNA, 40 bp, Homo sapiens
agtgatattgggcatgttgaattccctgtactcatgggtt

SEQ ID NO: 29552 - DNA, 40 bp, Homo sapiens
acccatgagtacagggaattcaacatgcccaatatcactc

SEQ ID NO: 29553 - DNA, 40 bp, Homo sapiens
gagtgatattgggcatgttgaattccctgtactcatgggt

SEQ ID NO: 29554 - DNA, 40 bp, Homo sapiens
cccatgagtacagggaattcaacatgcccaatatcactca

SEQ ID NO: 29555 - DNA, 40 bp, Homo sapiens
tgagtgatattgggcatgttgaattccctgtactcatggg

SEQ ID NO: 29556 - DNA, 40 bp, Homo sapiens
ccatgagtacagggaattcaacatgcccaatatcactcat

SEQ ID NO: 29557 - DNA, 40 bp, Homo sapiens
atgagtgatattgggcatgttgaattccctgtactcatgg

SEQ ID NO: 29558 - DNA, 40 bp, Homo sapiens
catgagtacagggaattcaacatgcccaatatcactcatc

SEQ ID NO: 29559 - DNA, 40 bp, Homo sapiens
gatgagtgatattgggcatgttgaattccctgtactcatg

SEQ ID NO: 29560 - DNA, 40 bp, Homo sapiens
atgagtacagggaattcaacatgcccaatatcactcatct

SEQ ID NO: 29561 - DNA, 40 bp, Homo sapiens
agatgagtgatattgggcatgttgaattccctgtactcat

SEQ ID NO: 29562 - DNA, 40 bp, Homo sapiens
tgagtacagggaattcaacatgcccaatatcactcatctt

SEQ ID NO: 29563 - DNA, 40 bp, Homo sapiens
aagatgagtgatattgggcatgttgaattccctgtactca

SEQ ID NO: 29564 - DNA, 40 bp, Homo sapiens
gagtacagggaattcaacatgcccaatatcactcatcttt

SEQ ID NO: 29565 - DNA, 40 bp, Homo sapiens
aaagatgagtgatattgggcatgttgaattccctgtactc

SEQ ID NO: 29566 - DNA, 40 bp, Homo sapiens
agtacagggaattcaacatgcccaatatcactcatctttt

SEQ ID NO: 29567 - DNA, 40 bp, Homo sapiens
aaaagatgagtgatattgggcatgttgaattccctgtact

SEQ ID NO: 29568 - DNA, 40 bp, Homo sapiens
gtacagggaattcaacatgcccaatatcactcatcttttc

SEQ ID NO: 29569 - DNA, 40 bp, Homo sapiens
gaaaagatgagtgatattgggcatgttgaattccctgtac

SEQ ID NO: 29570 - DNA, 40 bp, Homo sapiens
tacagggaattcaacatgcccaatatcactcatcttttcc

SEQ ID NO: 29571 - DNA, 40 bp, Homo sapiens
ggaaaagatgagtgatattgggcatgttgaattccctgta

SEQ ID NO: 29572 - DNA, 40 bp, Homo sapiens
acagggaattcaacatgcccaatatcactcatcttttcct

SEQ ID NO: 29573 - DNA, 40 bp, Homo sapiens
aggaaaagatgagtgatattgggcatgttgaattccctgt

SEQ ID NO: 29574 - DNA, 40 bp, Homo sapiens
cagggaattcaacatgcccaatatcactcatcttttcctt

SEQ ID NO: 29575 - DNA, 40 bp, Homo sapiens
aaggaaaagatgagtgatattgggcatgttgaattccctg

SEQ ID NO: 29576 - DNA, 40 bp, Homo sapiens
agggaattcaacatgcccaatatcactcatcttttccttc

SEQ ID NO: 29577 - DNA, 40 bp, Homo sapiens
gaaggaaaagatgagtgatattgggcatgttgaattccct

SEQ ID NO: 29578 - DNA, 40 bp, Homo sapiens
gggaattcaacatgcccaatatcactcatcttttccttcg

SEQ ID NO: 29579 - DNA, 40 bp, Homo sapiens
cgaaggaaaagatgagtgatattgggcatgttgaattccc

SEQ ID NO: 29580 - DNA, 40 bp, Homo sapiens
ggaattcaacatgcccaatatcactcatcttttccttcgc

SEQ ID NO: 29581 - DNA, 40 bp, Homo sapiens
gcgaaggaaaagatgagtgatattgggcatgttgaattcc

SEQ ID NO: 29582 - DNA, 40 bp, Homo sapiens
gaattcaacatgcccaatatcactcatcttttccttcgcc

SEQ ID NO: 29583 - DNA, 40 bp, Homo sapiens
ggcgaaggaaaagatgagtgatattgggcatgttgaattc

SEQ ID NO: 29584 - DNA, 40 bp, Homo sapiens
aattcaacatgcccaatatcactcatcttttccttcgccc

SEQ ID NO: 29585 - DNA, 40 bp, Homo sapiens
gggcgaaggaaaagatgagtgatattgggcatgttgaatt

SEQ ID NO: 29586 - DNA, 40 bp, Homo sapiens
attcaacatgcccaatatcactcatcttttccttcgccct

SEQ ID NO: 29587 - DNA, 40 bp, Homo sapiens
agggcgaaggaaaagatgagtgatattgggcatgttgaat

SEQ ID NO: 29588 - DNA, 40 bp, Homo sapiens
ttcaacatgcccaatatcactcatcttttccttcgccctc

SEQ ID NO: 29589 - DNA, 40 bp, Homo sapiens
gagggcgaaggaaaagatgagtgatattgggcatgttgaa

SEQ ID NO: 29590 - DNA, 40 bp, Homo sapiens
tcaacatgcccaatatcactcatcttttccttcgccctcc

SEQ ID NO: 29591 - DNA, 40 bp, Homo sapiens
ggagggcgaaggaaaagatgagtgatattgggcatgttga

SEQ ID NO: 29592 - DNA, 40 bp, Homo sapiens
caacatgcccaatatcactcatcttttccttcgccctccc

SEQ ID NO: 29593 - DNA, 40 bp, Homo sapiens
gggagggcgaaggaaaagatgagtgatattgggcatgttg

SEQ ID NO: 29594 - DNA, 40 bp, Homo sapiens
aacatgcccaatatcactcatcttttccttcgccctcccc

SEQ ID NO: 29595 - DNA, 40 bp, Homo sapiens
ggggagggcgaaggaaaagatgagtgatattgggcatgtt

SEQ ID NO: 29596 - DNA, 40 bp, Homo sapiens
acatgcccaatatcactcatcttttccttcgccctcccct

SEQ ID NO: 29597 - DNA, 40 bp, Homo sapiens
aggggagggcgaaggaaaagatgagtgatattgggcatgt

SEQ ID NO: 29598 - DNA, 40 bp, Homo sapiens
catgcccaatatcactcatcttttccttcgccctcccctt

SEQ ID NO: 29599 - DNA, 40 bp, Homo sapiens
aaggggagggcgaaggaaaagatgagtgatattgggcatg

SEQ ID NO: 29600 - DNA, 40 bp, Homo sapiens
atgcccaatatcactcatcttttccttcgccctccccttt

SEQ ID NO: 29601 - DNA, 40 bp, Homo sapiens
aaaggggagggcgaaggaaaagatgagtgatattgggcat

SEQ ID NO: 29602 - DNA, 40 bp, Homo sapiens
tgcccaatatcactcatcttttccttcgccctcccctttg

SEQ ID NO: 29603 - DNA, 40 bp, Homo sapiens
caaaggggagggcgaaggaaaagatgagtgatattgggca

SEQ ID NO: 29604 - DNA, 40 bp, Homo sapiens
gcccaatatcactcatcttttccttcgccctcccctttgt

SEQ ID NO: 29605 - DNA, 40 bp, Homo sapiens
acaaaggggagggcgaaggaaaagatgagtgatattgggc

SEQ ID NO: 29606 - DNA, 40 bp, Homo sapiens
cccaatatcactcatcttttccttcgccctcccctttgta

SEQ ID NO: 29607 - DNA, 40 bp, Homo sapiens
tacaaaggggagggcgaaggaaaagatgagtgatattggg

SEQ ID NO: 29608 - DNA, 40 bp, Homo sapiens
ccaatatcactcatcttttccttcgccctcccctttgtac

SEQ ID NO: 29609 - DNA, 40 bp, Homo sapiens
gtacaaaggggagggcgaaggaaaagatgagtgatattgg

SEQ ID NO: 29610 - DNA, 40 bp, Homo sapiens
caatatcactcatcttttccttcgccctcccctttgtact

SEQ ID NO: 29611 - DNA, 40 bp, Homo sapiens
agtacaaaggggagggcgaaggaaaagatgagtgatattg

SEQ ID NO: 29612 - DNA, 40 bp, Homo sapiens
aatatcactcatcttttccttcgccctcccctttgtactc

SEQ ID NO: 29613 - DNA, 40 bp, Homo sapiens
gagtacaaaggggagggcgaaggaaaagatgagtgatatt

SEQ ID NO: 29614 - DNA, 40 bp, Homo sapiens
atatcactcatcttttccttcgccctcccctttgtactca

SEQ ID NO: 29615 - DNA, 40 bp, Homo sapiens
tgagtacaaaggggagggcgaaggaaaagatgagtgatat

SEQ ID NO: 29616 - DNA, 40 bp, Homo sapiens
tatcactcatcttttccttcgccctcccctttgtactcat

SEQ ID NO: 29617 - DNA, 40 bp, Homo sapiens
atgagtacaaaggggagggcgaaggaaaagatgagtgata

SEQ ID NO: 29618 - DNA, 40 bp, Homo sapiens
atcactcatcttttccttcgccctcccctttgtactcatc

SEQ ID NO: 29619 - DNA, 40 bp, Homo sapiens
gatgagtacaaaggggagggcgaaggaaaagatgagtgat

SEQ ID NO: 29620 - DNA, 40 bp, Homo sapiens
tcactcatcttttccttcgccctcccctttgtactcatcc

SEQ ID NO: 29621 - DNA, 40 bp, Homo sapiens
ggatgagtacaaaggggagggcgaaggaaaagatgagtga

SEQ ID NO: 29622 - DNA, 40 bp, Homo sapiens
cactcatcttttccttcgccctcccctttgtactcatccc

SEQ ID NO: 29623 - DNA, 40 bp, Homo sapiens
gggatgagtacaaaggggagggcgaaggaaaagatgagtg

SEQ ID NO: 29624 - DNA, 40 bp, Homo sapiens
actcatcttttccttcgccctcccctttgtactcatcccc

SEQ ID NO: 29625 - DNA, 40 bp, Homo sapiens
ggggatgagtacaaaggggagggcgaaggaaaagatgagt

SEQ ID NO: 29626 - DNA, 40 bp, Homo sapiens
ctcatcttttccttcgccctcccctttgtactcatcccct

SEQ ID NO: 29627 - DNA, 40 bp, Homo sapiens
aggggatgagtacaaaggggagggcgaaggaaaagatgag

SEQ ID NO: 29628 - DNA, 40 bp, Homo sapiens
tcatcttttccttcgccctcccctttgtactcatcccctg

SEQ ID NO: 29629 - DNA, 40 bp, Homo sapiens
caggggatgagtacaaaggggagggcgaaggaaaagatga

SEQ ID NO: 29630 - DNA, 40 bp, Homo sapiens
catcttttccttcgccctcccctttgtactcatcccctgt

SEQ ID NO: 29631 - DNA, 40 bp, Homo sapiens
acaggggatgagtacaaaggggagggcgaaggaaaagatg

SEQ ID NO: 29632 - DNA, 40 bp, Homo sapiens
atcttttccttcgccctcccctttgtactcatcccctgtc

SEQ ID NO: 29633 - DNA, 40 bp, Homo sapiens
gacaggggatgagtacaaaggggagggcgaaggaaaagat

SEQ ID NO: 29634 - DNA, 40 bp, Homo sapiens
tcttttccttcgccctcccctttgtactcatcccctgtcg

SEQ ID NO: 29635 - DNA, 40 bp, Homo sapiens
cgacaggggatgagtacaaaggggagggcgaaggaaaaga

SEQ ID NO: 29636 - DNA, 40 bp, Homo sapiens
cttttccttcgccctcccctttgtactcatcccctgtcgg

SEQ ID NO: 29637 - DNA, 40 bp, Homo sapiens
ccgacaggggatgagtacaaaggggagggcgaaggaaaag

SEQ ID NO: 29638 - DNA, 40 bp, Homo sapiens
ttttccttcgccctcccctttgtactcatcccctgtcggt

SEQ ID NO: 29639 - DNA, 40 bp, Homo sapiens
accgacaggggatgagtacaaaggggagggcgaaggaaaa

SEQ ID NO: 29640 - DNA, 40 bp, Homo sapiens
tttccttcgccctcccctttgtactcatcccctgtcggta

SEQ ID NO: 29641 - DNA, 40 bp, Homo sapiens
taccgacaggggatgagtacaaaggggagggcgaaggaaa

SEQ ID NO: 29642 - DNA, 40 bp, Homo sapiens
ttccttcgccctcccctttgtactcatcccctgtcggtaa

SEQ ID NO: 29643 - DNA, 40 bp, Homo sapiens
ttaccgacaggggatgagtacaaaggggagggcgaaggaa

SEQ ID NO: 29644 - DNA, 40 bp, Homo sapiens
tccttcgccctcccctttgtactcatcccctgtcggtaag

SEQ ID NO: 29645 - DNA, 40 bp, Homo sapiens
cttaccgacaggggatgagtacaaaggggagggcgaagga

SEQ ID NO: 29646 - DNA, 40 bp, Homo sapiens
ccttcgccctcccctttgtactcatcccctgtcggtaagc

SEQ ID NO: 29647 - DNA, 40 bp, Homo sapiens
gcttaccgacaggggatgagtacaaaggggagggcgaagg

SEQ ID NO: 29648 - DNA, 40 bp, Homo sapiens
cttcgccctcccctttgtactcatcccctgtcggtaagct

SEQ ID NO: 29649 - DNA, 40 bp, Homo sapiens
agcttaccgacaggggatgagtacaaaggggagggcgaag

SEQ ID NO: 29650 - DNA, 40 bp, Homo sapiens
ttcgccctcccctttgtactcatcccctgtcggtaagctc

SEQ ID NO: 29651 - DNA, 40 bp, Homo sapiens
gagcttaccgacaggggatgagtacaaaggggagggcgaa

SEQ ID NO: 29652 - DNA, 40 bp, Homo sapiens
tcgccctcccctttgtactcatcccctgtcggtaagctct

SEQ ID NO: 29653 - DNA, 40 bp, Homo sapiens
agagcttaccgacaggggatgagtacaaaggggagggcga

SEQ ID NO: 29654 - DNA, 40 bp, Homo sapiens
cgccctcccctttgtactcatcccctgtcggtaagctctg

SEQ ID NO: 29655 - DNA, 40 bp, Homo sapiens
cagagcttaccgacaggggatgagtacaaaggggagggcg

SEQ ID NO: 29656 - DNA, 40 bp, Homo sapiens
gccctcccctttgtactcatcccctgtcggtaagctctgt

SEQ ID NO: 29657 - DNA, 40 bp, Homo sapiens
acagagcttaccgacaggggatgagtacaaaggggagggc

SEQ ID NO: 29658 - DNA, 40 bp, Homo sapiens
ccctcccctttgtactcatcccctgtcggtaagctctgtt

SEQ ID NO: 29659 - DNA, 40 bp, Homo sapiens
aacagagcttaccgacaggggatgagtacaaaggggaggg

SEQ ID NO: 29660 - DNA, 40 bp, Homo sapiens
cctcccctttgtactcatcccctgtcggtaagctctgtta

SEQ ID NO: 29661 - DNA, 40 bp, Homo sapiens
taacagagcttaccgacaggggatgagtacaaaggggagg

SEQ ID NO: 29662 - DNA, 40 bp, Homo sapiens
ctcccctttgtactcatcccctgtcggtaagctctgttat

SEQ ID NO: 29663 - DNA, 40 bp, Homo sapiens
ataacagagcttaccgacaggggatgagtacaaaggggag

SEQ ID NO: 29664 - DNA, 40 bp, Homo sapiens
tcccctttgtactcatcccctgtcggtaagctctgttatt

SEQ ID NO: 29665 - DNA, 40 bp, Homo sapiens
aataacagagcttaccgacaggggatgagtacaaagggga

SEQ ID NO: 29666 - DNA, 40 bp, Homo sapiens
cccctttgtactcatcccctgtcggtaagctctgttattt

SEQ ID NO: 29667 - DNA, 40 bp, Homo sapiens
aaataacagagcttaccgacaggggatgagtacaaagggg

SEQ ID NO: 29668 - DNA, 40 bp, Homo sapiens
ccctttgtactcatcccctgtcggtaagctctgttatttt

SEQ ID NO: 29669 - DNA, 40 bp, Homo sapiens
aaaataacagagcttaccgacaggggatgagtacaaaggg

SEQ ID NO: 29670 - DNA, 40 bp, Homo sapiens
cctttgtactcatcccctgtcggtaagctctgttatttta

SEQ ID NO: 29671 - DNA, 40 bp, Homo sapiens
taaaataacagagcttaccgacaggggatgagtacaaagg

SEQ ID NO: 29672 - DNA, 40 bp, Homo sapiens
ctttgtactcatcccctgtcggtaagctctgttattttaa

SEQ ID NO: 29673 - DNA, 40 bp, Homo sapiens
ttaaaataacagagcttaccgacaggggatgagtacaaag

SEQ ID NO: 29674 - DNA, 40 bp, Homo sapiens
tttgtactcatcccctgtcggtaagctctgttattttaaa

SEQ ID NO: 29675 - DNA, 40 bp, Homo sapiens
tttaaaataacagagcttaccgacaggggatgagtacaaa

SEQ ID NO: 29676 - DNA, 40 bp, Homo sapiens
ttgtactcatcccctgtcggtaagctctgttattttaaaa

SEQ ID NO: 29677 - DNA, 40 bp, Homo sapiens
ttttaaaataacagagcttaccgacaggggatgagtacaa

SEQ ID NO: 29678 - DNA, 40 bp, Homo sapiens
tgtactcatcccctgtcggtaagctctgttattttaaaaa

SEQ ID NO: 29679 - DNA, 40 bp, Homo sapiens
tttttaaaataacagagcttaccgacaggggatgagtaca

SEQ ID NO: 29680 - DNA, 40 bp, Homo sapiens
gtactcatcccctgtcggtaagctctgttattttaaaaaa

SEQ ID NO: 29681 - DNA, 40 bp, Homo sapiens
ttttttaaaataacagagcttaccgacaggggatgagtac

SEQ ID NO: 29682 - DNA, 40 bp, Homo sapiens
tactcatcccctgtcggtaagctctgttattttaaaaaat

SEQ ID NO: 29683 - DNA, 40 bp, Homo sapiens
attttttaaaataacagagcttaccgacaggggatgagta

SEQ ID NO: 29684 - DNA, 40 bp, Homo sapiens
actcatcccctgtcggtaagctctgttattttaaaaaatt

SEQ ID NO: 29685 - DNA, 40 bp, Homo sapiens
aattttttaaaataacagagcttaccgacaggggatgagt

SEQ ID NO: 29686 - DNA, 40 bp, Homo sapiens
ctcatcccctgtcggtaagctctgttattttaaaaaattg

SEQ ID NO: 29687 - DNA, 40 bp, Homo sapiens
caattttttaaaataacagagcttaccgacaggggatgag

SEQ ID NO: 29688 - DNA, 40 bp, Homo sapiens
tcatcccctgtcggtaagctctgttattttaaaaaattga

SEQ ID NO: 29689 - DNA, 40 bp, Homo sapiens
tcaattttttaaaataacagagcttaccgacaggggatga

SEQ ID NO: 29690 - DNA, 40 bp, Homo sapiens
catcccctgtcggtaagctctgttattttaaaaaattgaa

SEQ ID NO: 29691 - DNA, 40 bp, Homo sapiens
ttcaattttttaaaataacagagcttaccgacaggggatg

SEQ ID NO: 29692 - DNA, 40 bp, Homo sapiens
atcccctgtcggtaagctctgttattttaaaaaattgaaa

SEQ ID NO: 29693 - DNA, 40 bp, Homo sapiens
tttcaattttttaaaataacagagcttaccgacaggggat

SEQ ID NO: 29694 - DNA, 40 bp, Homo sapiens
tcccctgtcggtaagctctgttattttaaaaaattgaaat

SEQ ID NO: 29695 - DNA, 40 bp, Homo sapiens
atttcaattttttaaaataacagagcttaccgacagggga

SEQ ID NO: 29696 - DNA, 40 bp, Homo sapiens
cccctgtcggtaagctctgttattttaaaaaattgaaatg

SEQ ID NO: 29697 - DNA, 40 bp, Homo sapiens
catttcaattttttaaaataacagagcttaccgacagggg

SEQ ID NO: 29698 - DNA, 40 bp, Homo sapiens
ccctgtcggtaagctctgttattttaaaaaattgaaatgt

SEQ ID NO: 29699 - DNA, 40 bp, Homo sapiens
acatttcaattttttaaaataacagagcttaccgacaggg

SEQ ID NO: 29700 - DNA, 40 bp, Homo sapiens
cctgtcggtaagctctgttattttaaaaaattgaaatgta

SEQ ID NO: 29701 - DNA, 40 bp, Homo sapiens
tacatttcaattttttaaaataacagagcttaccgacagg

SEQ ID NO: 29702 - DNA, 40 bp, Homo sapiens
ctgtcggtaagctctgttattttaaaaaattgaaatgtat

SEQ ID NO: 29703 - DNA, 40 bp, Homo sapiens
atacatttcaattttttaaaataacagagcttaccgacag

SEQ ID NO: 29704 - DNA, 40 bp, Homo sapiens
tgtcggtaagctctgttattttaaaaaattgaaatgtatt

SEQ ID NO: 29705 - DNA, 40 bp, Homo sapiens
aatacatttcaattttttaaaataacagagcttaccgaca

SEQ ID NO: 29706 - DNA, 40 bp, Homo sapiens
gtcggtaagctctgttattttaaaaaattgaaatgtattc

SEQ ID NO: 29707 - DNA, 40 bp, Homo sapiens
gaatacatttcaattttttaaaataacagagcttaccgac

SEQ ID NO: 29708 - DNA, 40 bp, Homo sapiens
tcggtaagctctgttattttaaaaaattgaaatgtattca

SEQ ID NO: 29709 - DNA, 40 bp, Homo sapiens
tgaatacatttcaattttttaaaataacagagcttaccga

SEQ ID NO: 29710 - DNA, 40 bp, Homo sapiens
cggtaagctctgttattttaaaaaattgaaatgtattcac

SEQ ID NO: 29711 - DNA, 40 bp, Homo sapiens
gtgaatacatttcaattttttaaaataacagagcttaccg

SEQ ID NO: 29712 - DNA, 40 bp, Homo sapiens
ggtaagctctgttattttaaaaaattgaaatgtattcaca

SEQ ID NO: 29713 - DNA, 40 bp, Homo sapiens
tgtgaatacatttcaattttttaaaataacagagcttacc

SEQ ID NO: 29714 - DNA, 40 bp, Homo sapiens
gtaagctctgttattttaaaaaattgaaatgtattcacat

SEQ ID NO: 29715 - DNA, 40 bp, Homo sapiens
atgtgaatacatttcaattttttaaaataacagagcttac

SEQ ID NO: 29716 - DNA, 40 bp, Homo sapiens
taagctctgttattttaaaaaattgaaatgtattcacata

SEQ ID NO: 29717 - DNA, 40 bp, Homo sapiens
tatgtgaatacatttcaattttttaaaataacagagctta

SEQ ID NO: 29718 - DNA, 40 bp, Homo sapiens
aagctctgttattttaaaaaattgaaatgtattcacatag

SEQ ID NO: 29719 - DNA, 40 bp, Homo sapiens
ctatgtgaatacatttcaattttttaaaataacagagctt

SEQ ID NO: 29720 - DNA, 40 bp, Homo sapiens
agctctgttattttaaaaaattgaaatgtattcacatagc

SEQ ID NO: 29721 - DNA, 40 bp, Homo sapiens
gctatgtgaatacatttcaattttttaaaataacagagct

SEQ ID NO: 29722 - DNA, 40 bp, Homo sapiens
gctctgttattttaaaaaattgaaatgtattcacatagca

SEQ ID NO: 29723 - DNA, 40 bp, Homo sapiens
tgctatgtgaatacatttcaattttttaaaataacagagc

SEQ ID NO: 29724 - DNA, 40 bp, Homo sapiens
ctctgttattttaaaaaattgaaatgtattcacatagcat

SEQ ID NO: 29725 - DNA, 40 bp, Homo sapiens
atgctatgtgaatacatttcaattttttaaaataacagag

SEQ ID NO: 29726 - DNA, 40 bp, Homo sapiens
tctgttattttaaaaaattgaaatgtattcacatagcata

SEQ ID NO: 29727 - DNA, 40 bp, Homo sapiens
tatgctatgtgaatacatttcaattttttaaaataacaga

SEQ ID NO: 29728 - DNA, 40 bp, Homo sapiens
ctgttattttaaaaaattgaaatgtattcacatagcatac

SEQ ID NO: 29729 - DNA, 40 bp, Homo sapiens
gtatgctatgtgaatacatttcaattttttaaaataacag

SEQ ID NO: 29730 - DNA, 40 bp, Homo sapiens
tgttattttaaaaaattgaaatgtattcacatagcataca

SEQ ID NO: 29731 - DNA, 40 bp, Homo sapiens
tgtatgctatgtgaatacatttcaattttttaaaataaca

SEQ ID NO: 29732 - DNA, 40 bp, Homo sapiens
gttattttaaaaaattgaaatgtattcacatagcatacaa

SEQ ID NO: 29733 - DNA, 40 bp, Homo sapiens
ttgtatgctatgtgaatacatttcaattttttaaaataac

SEQ ID NO: 29734 - DNA, 40 bp, Homo sapiens
ttattttaaaaaattgaaatgtattcacatagcatacaat

SEQ ID NO: 29735 - DNA, 40 bp, Homo sapiens
attgtatgctatgtgaatacatttcaattttttaaaataa

SEQ ID NO: 29736 - DNA, 40 bp, Homo sapiens
tattttaaaaaattgaaatgtattcacatagcatacaatt

SEQ ID NO: 29737 - DNA, 40 bp, Homo sapiens
aattgtatgctatgtgaatacatttcaattttttaaaata

SEQ ID NO: 29738 - DNA, 40 bp, Homo sapiens
attttaaaaaattgaaatgtattcacatagcatacaattt

SEQ ID NO: 29739 - DNA, 40 bp, Homo sapiens
aaattgtatgctatgtgaatacatttcaattttttaaaat

SEQ ID NO: 29740 - DNA, 40 bp, Homo sapiens
ttttaaaaaattgaaatgtattcacatagcatacaattta

SEQ ID NO: 29741 - DNA, 40 bp, Homo sapiens
taaattgtatgctatgtgaatacatttcaattttttaaaa

SEQ ID NO: 29742 - DNA, 40 bp, Homo sapiens
tttaaaaaattgaaatgtattcacatagcatacaatttac

SEQ ID NO: 29743 - DNA, 40 bp, Homo sapiens
gtaaattgtatgctatgtgaatacatttcaattttttaaa

SEQ ID NO: 29744 - DNA, 40 bp, Homo sapiens
ttaaaaaattgaaatgtattcacatagcatacaatttaca

SEQ ID NO: 29745 - DNA, 40 bp, Homo sapiens
tgtaaattgtatgctatgtgaatacatttcaattttttaa

SEQ ID NO: 29746 - DNA, 40 bp, Homo sapiens
taaaaaattgaaatgtattcacatagcatacaatttacac

SEQ ID NO: 29747 - DNA, 40 bp, Homo sapiens
gtgtaaattgtatgctatgtgaatacatttcaatttttta

SEQ ID NO: 29748 - DNA, 40 bp, Homo sapiens
aaaaaattgaaatgtattcacatagcatacaatttacact

SEQ ID NO: 29749 - DNA, 40 bp, Homo sapiens
agtgtaaattgtatgctatgtgaatacatttcaatttttt

SEQ ID NO: 29750 - DNA, 40 bp, Homo sapiens
aaaaattgaaatgtattcacatagcatacaatttacactt

SEQ ID NO: 29751 - DNA, 40 bp, Homo sapiens
aagtgtaaattgtatgctatgtgaatacatttcaattttt

SEQ ID NO: 29752 - DNA, 40 bp, Homo sapiens
aaaattgaaatgtattcacatagcatacaatttacacttt

SEQ ID NO: 29753 - DNA, 40 bp, Homo sapiens
aaagtgtaaattgtatgctatgtgaatacatttcaatttt

SEQ ID NO: 29754 - DNA, 40 bp, Homo sapiens
aaattgaaatgtattcacatagcatacaatttacactttt

SEQ ID NO: 29755 - DNA, 40 bp, Homo sapiens
aaaagtgtaaattgtatgctatgtgaatacatttcaattt

SEQ ID NO: 29756 - DNA, 40 bp, Homo sapiens
aattgaaatgtattcacatagcatacaatttacacttttc

SEQ ID NO: 29757 - DNA, 40 bp, Homo sapiens
gaaaagtgtaaattgtatgctatgtgaatacatttcaatt

SEQ ID NO: 29758 - DNA, 40 bp, Homo sapiens
attgaaatgtattcacatagcatacaatttacacttttca

SEQ ID NO: 29759 - DNA, 40 bp, Homo sapiens
tgaaaagtgtaaattgtatgctatgtgaatacatttcaat

SEQ ID NO: 29760 - DNA, 40 bp, Homo sapiens
ttgaaatgtattcacatagcatacaatttacacttttcaa

SEQ ID NO: 29761 - DNA, 40 bp, Homo sapiens
ttgaaaagtgtaaattgtatgctatgtgaatacatttcaa

SEQ ID NO: 29762 - DNA, 40 bp, Homo sapiens
tgaaatgtattcacatagcatacaatttacacttttcaag

SEQ ID NO: 29763 - DNA, 40 bp, Homo sapiens
cttgaaaagtgtaaattgtatgctatgtgaatacatttca

SEQ ID NO: 29764 - DNA, 40 bp, Homo sapiens
gaaatgtattcacatagcatacaatttacacttttcaagt

SEQ ID NO: 29765 - DNA, 40 bp, Homo sapiens
acttgaaaagtgtaaattgtatgctatgtgaatacatttc

SEQ ID NO: 29766 - DNA, 40 bp, Homo sapiens
aaatgtattcacatagcatacaatttacacttttcaagtg

SEQ ID NO: 29767 - DNA, 40 bp, Homo sapiens
cacttgaaaagtgtaaattgtatgctatgtgaatacattt

SEQ ID NO: 29768 - DNA, 40 bp, Homo sapiens
aatgtattcacatagcatacaatttacacttttcaagtgt

SEQ ID NO: 29769 - DNA, 40 bp, Homo sapiens
acacttgaaaagtgtaaattgtatgctatgtgaatacatt

SEQ ID NO: 29770 - DNA, 40 bp, Homo sapiens
atgtattcacatagcatacaatttacacttttcaagtgta

SEQ ID NO: 29771 - DNA, 40 bp, Homo sapiens
tacacttgaaaagtgtaaattgtatgctatgtgaatacat

SEQ ID NO: 29772 - DNA, 40 bp, Homo sapiens
tgtattcacatagcatacaatttacacttttcaagtgtac

SEQ ID NO: 29773 - DNA, 40 bp, Homo sapiens
gtacacttgaaaagtgtaaattgtatgctatgtgaataca

SEQ ID NO: 29774 - DNA, 40 bp, Homo sapiens
gtattcacatagcatacaatttacacttttcaagtgtaca

SEQ ID NO: 29775 - DNA, 40 bp, Homo sapiens
tgtacacttgaaaagtgtaaattgtatgctatgtgaatac

SEQ ID NO: 29776 - DNA, 40 bp, Homo sapiens
tattcacatagcatacaatttacacttttcaagtgtacat

SEQ ID NO: 29777 - DNA, 40 bp, Homo sapiens
atgtacacttgaaaagtgtaaattgtatgctatgtgaata

SEQ ID NO: 29778 - DNA, 40 bp, Homo sapiens
attcacatagcatacaatttacacttttcaagtgtacatg

SEQ ID NO: 29779 - DNA, 40 bp, Homo sapiens
catgtacacttgaaaagtgtaaattgtatgctatgtgaat

SEQ ID NO: 29780 - DNA, 40 bp, Homo sapiens
ttcacatagcatacaatttacacttttcaagtgtacatgg

SEQ ID NO: 29781 - DNA, 40 bp, Homo sapiens
ccatgtacacttgaaaagtgtaaattgtatgctatgtgaa

SEQ ID NO: 29782 - DNA, 40 bp, Homo sapiens
tcacatagcatacaatttacacttttcaagtgtacatggt

SEQ ID NO: 29783 - DNA, 40 bp, Homo sapiens
accatgtacacttgaaaagtgtaaattgtatgctatgtga

SEQ ID NO: 29784 - DNA, 40 bp, Homo sapiens
cacatagcatacaatttacacttttcaagtgtacatggtt

SEQ ID NO: 29785 - DNA, 40 bp, Homo sapiens
aaccatgtacacttgaaaagtgtaaattgtatgctatgtg

SEQ ID NO: 29786 - DNA, 40 bp, Homo sapiens
acatagcatacaatttacacttttcaagtgtacatggttt

SEQ ID NO: 29787 - DNA, 40 bp, Homo sapiens
aaaccatgtacacttgaaaagtgtaaattgtatgctatgt

SEQ ID NO: 29788 - DNA, 40 bp, Homo sapiens
catagcatacaatttacacttttcaagtgtacatggtttt

SEQ ID NO: 29789 - DNA, 40 bp, Homo sapiens
aaaaccatgtacacttgaaaagtgtaaattgtatgctatg

SEQ ID NO: 29790 - DNA, 40 bp, Homo sapiens
atagcatacaatttacacttttcaagtgtacatggttttt

SEQ ID NO: 29791 - DNA, 40 bp, Homo sapiens
aaaaaccatgtacacttgaaaagtgtaaattgtatgctat

SEQ ID NO: 29792 - DNA, 40 bp, Homo sapiens
tagcatacaatttacacttttcaagtgtacatggttttta

SEQ ID NO: 29793 - DNA, 40 bp, Homo sapiens
taaaaaccatgtacacttgaaaagtgtaaattgtatgcta

SEQ ID NO: 29794 - DNA, 40 bp, Homo sapiens
agcatacaatttacacttttcaagtgtacatggtttttag

SEQ ID NO: 29795 - DNA, 40 bp, Homo sapiens
ctaaaaaccatgtacacttgaaaagtgtaaattgtatgct

SEQ ID NO: 29796 - DNA, 40 bp, Homo sapiens
gcatacaatttacacttttcaagtgtacatggtttttagt

SEQ ID NO: 29797 - DNA, 40 bp, Homo sapiens
actaaaaaccatgtacacttgaaaagtgtaaattgtatgc

SEQ ID NO: 29798 - DNA, 40 bp, Homo sapiens
catacaatttacacttttcaagtgtacatggtttttagta

SEQ ID NO: 29799 - DNA, 40 bp, Homo sapiens
tactaaaaaccatgtacacttgaaaagtgtaaattgtatg

SEQ ID NO: 29800 - DNA, 40 bp, Homo sapiens
atacaatttacacttttcaagtgtacatggtttttagtat

SEQ ID NO: 29801 - DNA, 40 bp, Homo sapiens
atactaaaaaccatgtacacttgaaaagtgtaaattgtat

SEQ ID NO: 29802 - DNA, 40 bp, Homo sapiens
tacaatttacacttttcaagtgtacatggtttttagtata

SEQ ID NO: 29803 - DNA, 40 bp, Homo sapiens
tatactaaaaaccatgtacacttgaaaagtgtaaattgta

SEQ ID NO: 29804 - DNA, 40 bp, Homo sapiens
acaatttacacttttcaagtgtacatggtttttagtatat

SEQ ID NO: 29805 - DNA, 40 bp, Homo sapiens
atatactaaaaaccatgtacacttgaaaagtgtaaattgt

SEQ ID NO: 29806 - DNA, 40 bp, Homo sapiens
caatttacacttttcaagtgtacatggtttttagtatatt

SEQ ID NO: 29807 - DNA, 40 bp, Homo sapiens
aatatactaaaaaccatgtacacttgaaaagtgtaaattg

SEQ ID NO: 29808 - DNA, 40 bp, Homo sapiens
aatttacacttttcaagtgtacatggtttttagtatattc

SEQ ID NO: 29809 - DNA, 40 bp, Homo sapiens
gaatatactaaaaaccatgtacacttgaaaagtgtaaatt

SEQ ID NO: 29810 - DNA, 40 bp, Homo sapiens
atttacacttttcaagtgtacatggtttttagtatattca

SEQ ID NO: 29811 - DNA, 40 bp, Homo sapiens
tgaatatactaaaaaccatgtacacttgaaaagtgtaaat

SEQ ID NO: 29812 - DNA, 40 bp, Homo sapiens
tttacacttttcaagtgtacatggtttttagtatattcac

SEQ ID NO: 29813 - DNA, 40 bp, Homo sapiens
gtgaatatactaaaaaccatgtacacttgaaaagtgtaaa

SEQ ID NO: 29814 - DNA, 40 bp, Homo sapiens
ttacacttttcaagtgtacatggtttttagtatattcaca

SEQ ID NO: 29815 - DNA, 40 bp, Homo sapiens
tgtgaatatactaaaaaccatgtacacttgaaaagtgtaa

SEQ ID NO: 29816 - DNA, 40 bp, Homo sapiens
tacacttttcaagtgtacatggtttttagtatattcacaa

SEQ ID NO: 29817 - DNA, 40 bp, Homo sapiens
ttgtgaatatactaaaaaccatgtacacttgaaaagtgta

SEQ ID NO: 29818 - DNA, 40 bp, Homo sapiens
acacttttcaagtgtacatggtttttagtatattcacaag

SEQ ID NO: 29819 - DNA, 40 bp, Homo sapiens
cttgtgaatatactaaaaaccatgtacacttgaaaagtgt

SEQ ID NO: 29820 - DNA, 40 bp, Homo sapiens
cacttttcaagtgtacatggtttttagtatattcacaagg

SEQ ID NO: 29821 - DNA, 40 bp, Homo sapiens
ccttgtgaatatactaaaaaccatgtacacttgaaaagtg

SEQ ID NO: 29822 - DNA, 40 bp, Homo sapiens
acttttcaagtgtacatggtttttagtatattcacaaggg

SEQ ID NO: 29823 - DNA, 40 bp, Homo sapiens
cccttgtgaatatactaaaaaccatgtacacttgaaaagt

SEQ ID NO: 29824 - DNA, 40 bp, Homo sapiens
cttttcaagtgtacatggtttttagtatattcacaagggt

SEQ ID NO: 29825 - DNA, 40 bp, Homo sapiens
acccttgtgaatatactaaaaaccatgtacacttgaaaag

SEQ ID NO: 29826 - DNA, 40 bp, Homo sapiens
ttttcaagtgtacatggtttttagtatattcacaagggtt

SEQ ID NO: 29827 - DNA, 40 bp, Homo sapiens
aacccttgtgaatatactaaaaaccatgtacacttgaaaa

SEQ ID NO: 29828 - DNA, 40 bp, Homo sapiens
tttcaagtgtacatggtttttagtatattcacaagggttg

SEQ ID NO: 29829 - DNA, 40 bp, Homo sapiens
caacccttgtgaatatactaaaaaccatgtacacttgaaa

SEQ ID NO: 29830 - DNA, 40 bp, Homo sapiens
ttcaagtgtacatggtttttagtatattcacaagggttgt

SEQ ID NO: 29831 - DNA, 40 bp, Homo sapiens
acaacccttgtgaatatactaaaaaccatgtacacttgaa

SEQ ID NO: 29832 - DNA, 40 bp, Homo sapiens
tcaagtgtacatggtttttagtatattcacaagggttgtg

SEQ ID NO: 29833 - DNA, 40 bp, Homo sapiens
cacaacccttgtgaatatactaaaaaccatgtacacttga

SEQ ID NO: 29834 - DNA, 40 bp, Homo sapiens
caagtgtacatggtttttagtatattcacaagggttgtgc

SEQ ID NO: 29835 - DNA, 40 bp, Homo sapiens
gcacaacccttgtgaatatactaaaaaccatgtacacttg

SEQ ID NO: 29836 - DNA, 40 bp, Homo sapiens
aagtgtacatggtttttagtatattcacaagggttgtgca

SEQ ID NO: 29837 - DNA, 40 bp, Homo sapiens
tgcacaacccttgtgaatatactaaaaaccatgtacactt

SEQ ID NO: 29838 - DNA, 40 bp, Homo sapiens
agtgtacatggtttttagtatattcacaagggttgtgcag

SEQ ID NO: 29839 - DNA, 40 bp, Homo sapiens
ctgcacaacccttgtgaatatactaaaaaccatgtacact

SEQ ID NO: 29840 - DNA, 40 bp, Homo sapiens
gtgtacatggtttttagtatattcacaagggttgtgcagt

SEQ ID NO: 29841 - DNA, 40 bp, Homo sapiens
actgcacaacccttgtgaatatactaaaaaccatgtacac

SEQ ID NO: 29842 - DNA, 40 bp, Homo sapiens
tgtacatggtttttagtatattcacaagggttgtgcagtc

SEQ ID NO: 29843 - DNA, 40 bp, Homo sapiens
gactgcacaacccttgtgaatatactaaaaaccatgtaca

SEQ ID NO: 29844 - DNA, 40 bp, Homo sapiens
gtacatggtttttagtatattcacaagggttgtgcagtca

SEQ ID NO: 29845 - DNA, 40 bp, Homo sapiens
tgactgcacaacccttgtgaatatactaaaaaccatgtac

SEQ ID NO: 29846 - DNA, 40 bp, Homo sapiens
tacatggtttttagtatattcacaagggttgtgcagtcat

SEQ ID NO: 29847 - DNA, 40 bp, Homo sapiens
atgactgcacaacccttgtgaatatactaaaaaccatgta

SEQ ID NO: 29848 - DNA, 40 bp, Homo sapiens
acatggtttttagtatattcacaagggttgtgcagtcatt

SEQ ID NO: 29849 - DNA, 40 bp, Homo sapiens
aatgactgcacaacccttgtgaatatactaaaaaccatgt

SEQ ID NO: 29850 - DNA, 40 bp, Homo sapiens
catggtttttagtatattcacaagggttgtgcagtcatta

SEQ ID NO: 29851 - DNA, 40 bp, Homo sapiens
taatgactgcacaacccttgtgaatatactaaaaaccatg

SEQ ID NO: 29852 - DNA, 40 bp, Homo sapiens
atggtttttagtatattcacaagggttgtgcagtcattac

SEQ ID NO: 29853 - DNA, 40 bp, Homo sapiens
gtaatgactgcacaacccttgtgaatatactaaaaaccat

SEQ ID NO: 29854 - DNA, 40 bp, Homo sapiens
tggtttttagtatattcacaagggttgtgcagtcattact

SEQ ID NO: 29855 - DNA, 40 bp, Homo sapiens
agtaatgactgcacaacccttgtgaatatactaaaaacca

SEQ ID NO: 29856 - DNA, 40 bp, Homo sapiens
ggtttttagtatattcacaagggttgtgcagtcattacta

SEQ ID NO: 29857 - DNA, 40 bp, Homo sapiens
tagtaatgactgcacaacccttgtgaatatactaaaaacc

SEQ ID NO: 29858 - DNA, 40 bp, Homo sapiens
gtttttagtatattcacaagggttgtgcagtcattactac

SEQ ID NO: 29859 - DNA, 40 bp, Homo sapiens
gtagtaatgactgcacaacccttgtgaatatactaaaaac

SEQ ID NO: 29860 - DNA, 40 bp, Homo sapiens
tttttagtatattcacaagggttgtgcagtcattactact

SEQ ID NO: 29861 - DNA, 40 bp, Homo sapiens
agtagtaatgactgcacaacccttgtgaatatactaaaaa

SEQ ID NO: 29862 - DNA, 40 bp, Homo sapiens
ttttagtatattcacaagggttgtgcagtcattactacta

SEQ ID NO: 29863 - DNA, 40 bp, Homo sapiens
tagtagtaatgactgcacaacccttgtgaatatactaaaa

SEQ ID NO: 29864 - DNA, 40 bp, Homo sapiens
tttagtatattcacaagggttgtgcagtcattactactaa

SEQ ID NO: 29865 - DNA, 40 bp, Homo sapiens
ttagtagtaatgactgcacaacccttgtgaatatactaaa

SEQ ID NO: 29866 - DNA, 40 bp, Homo sapiens
ttagtatattcacaagggttgtgcagtcattactactaat

SEQ ID NO: 29867 - DNA, 40 bp, Homo sapiens
attagtagtaatgactgcacaacccttgtgaatatactaa

SEQ ID NO: 29868 - DNA, 40 bp, Homo sapiens
tagtatattcacaagggttgtgcagtcattactactaatt

SEQ ID NO: 29869 - DNA, 40 bp, Homo sapiens
aattagtagtaatgactgcacaacccttgtgaatatacta

SEQ ID NO: 29870 - DNA, 40 bp, Homo sapiens
agtatattcacaagggttgtgcagtcattactactaattc

SEQ ID NO: 29871 - DNA, 40 bp, Homo sapiens
gaattagtagtaatgactgcacaacccttgtgaatatact

SEQ ID NO: 29872 - DNA, 40 bp, Homo sapiens
gtatattcacaagggttgtgcagtcattactactaattcc

SEQ ID NO: 29873 - DNA, 40 bp, Homo sapiens
ggaattagtagtaatgactgcacaacccttgtgaatatac

SEQ ID NO: 29874 - DNA, 40 bp, Homo sapiens
tatattcacaagggttgtgcagtcattactactaattcca

SEQ ID NO: 29875 - DNA, 40 bp, Homo sapiens
tggaattagtagtaatgactgcacaacccttgtgaatata

SEQ ID NO: 29876 - DNA, 40 bp, Homo sapiens
atattcacaagggttgtgcagtcattactactaattccag

SEQ ID NO: 29877 - DNA, 40 bp, Homo sapiens
ctggaattagtagtaatgactgcacaacccttgtgaatat

SEQ ID NO: 29878 - DNA, 40 bp, Homo sapiens
tattcacaagggttgtgcagtcattactactaattccaga

SEQ ID NO: 29879 - DNA, 40 bp, Homo sapiens
tctggaattagtagtaatgactgcacaacccttgtgaata

SEQ ID NO: 29880 - DNA, 40 bp, Homo sapiens
attcacaagggttgtgcagtcattactactaattccagaa

SEQ ID NO: 29881 - DNA, 40 bp, Homo sapiens
ttctggaattagtagtaatgactgcacaacccttgtgaat

SEQ ID NO: 29882 - DNA, 40 bp, Homo sapiens
ttcacaagggttgtgcagtcattactactaattccagaat

SEQ ID NO: 29883 - DNA, 40 bp, Homo sapiens
attctggaattagtagtaatgactgcacaacccttgtgaa

SEQ ID NO: 29884 - DNA, 40 bp, Homo sapiens
tcacaagggttgtgcagtcattactactaattccagaatg

SEQ ID NO: 29885 - DNA, 40 bp, Homo sapiens
cattctggaattagtagtaatgactgcacaacccttgtga

SEQ ID NO: 29886 - DNA, 40 bp, Homo sapiens
cacaagggttgtgcagtcattactactaattccagaatgt

SEQ ID NO: 29887 - DNA, 40 bp, Homo sapiens
acattctggaattagtagtaatgactgcacaacccttgtg

SEQ ID NO: 29888 - DNA, 40 bp, Homo sapiens
acaagggttgtgcagtcattactactaattccagaatgtt

SEQ ID NO: 29889 - DNA, 40 bp, Homo sapiens
aacattctggaattagtagtaatgactgcacaacccttgt

SEQ ID NO: 29890 - DNA, 40 bp, Homo sapiens
caagggttgtgcagtcattactactaattccagaatgtta

SEQ ID NO: 29891 - DNA, 40 bp, Homo sapiens
taacattctggaattagtagtaatgactgcacaacccttg

SEQ ID NO: 29892 - DNA, 40 bp, Homo sapiens
aagggttgtgcagtcattactactaattccagaatgttat

SEQ ID NO: 29893 - DNA, 40 bp, Homo sapiens
ataacattctggaattagtagtaatgactgcacaaccctt

SEQ ID NO: 29894 - DNA, 40 bp, Homo sapiens
agggttgtgcagtcattactactaattccagaatgttatt

SEQ ID NO: 29895 - DNA, 40 bp, Homo sapiens
aataacattctggaattagtagtaatgactgcacaaccct

SEQ ID NO: 29896 - DNA, 40 bp, Homo sapiens
gggttgtgcagtcattactactaattccagaatgttatta

SEQ ID NO: 29897 - DNA, 40 bp, Homo sapiens
taataacattctggaattagtagtaatgactgcacaaccc

SEQ ID NO: 29898 - DNA, 40 bp, Homo sapiens
ggttgtgcagtcattactactaattccagaatgttattat

SEQ ID NO: 29899 - DNA, 40 bp, Homo sapiens
ataataacattctggaattagtagtaatgactgcacaacc

SEQ ID NO: 29900 - DNA, 40 bp, Homo sapiens
gttgtgcagtcattactactaattccagaatgttattatc

SEQ ID NO: 29901 - DNA, 40 bp, Homo sapiens
gataataacattctggaattagtagtaatgactgcacaac

SEQ ID NO: 29902 - DNA, 40 bp, Homo sapiens
ttgtgcagtcattactactaattccagaatgttattatca

SEQ ID NO: 29903 - DNA, 40 bp, Homo sapiens
tgataataacattctggaattagtagtaatgactgcacaa

SEQ ID NO: 29904 - DNA, 40 bp, Homo sapiens
tgtgcagtcattactactaattccagaatgttattatcac

SEQ ID NO: 29905 - DNA, 40 bp, Homo sapiens
gtgataataacattctggaattagtagtaatgactgcaca

SEQ ID NO: 29906 - DNA, 40 bp, Homo sapiens
gtgcagtcattactactaattccagaatgttattatcacc

SEQ ID NO: 29907 - DNA, 40 bp, Homo sapiens
ggtgataataacattctggaattagtagtaatgactgcac

SEQ ID NO: 29908 - DNA, 40 bp, Homo sapiens
tgcagtcattactactaattccagaatgttattatcaccc

SEQ ID NO: 29909 - DNA, 40 bp, Homo sapiens
gggtgataataacattctggaattagtagtaatgactgca

SEQ ID NO: 29910 - DNA, 40 bp, Homo sapiens
gcagtcattactactaattccagaatgttattatcacccc

SEQ ID NO: 29911 - DNA, 40 bp, Homo sapiens
ggggtgataataacattctggaattagtagtaatgactgc

SEQ ID NO: 29912 - DNA, 40 bp, Homo sapiens
cagtcattactactaattccagaatgttattatcacccca

SEQ ID NO: 29913 - DNA, 40 bp, Homo sapiens
tggggtgataataacattctggaattagtagtaatgactg

SEQ ID NO: 29914 - DNA, 40 bp, Homo sapiens
agtcattactactaattccagaatgttattatcaccccaa

SEQ ID NO: 29915 - DNA, 40 bp, Homo sapiens
ttggggtgataataacattctggaattagtagtaatgact

SEQ ID NO: 29916 - DNA, 40 bp, Homo sapiens
gtcattactactaattccagaatgttattatcaccccaaa

SEQ ID NO: 29917 - DNA, 40 bp, Homo sapiens
tttggggtgataataacattctggaattagtagtaatgac

SEQ ID NO: 29918 - DNA, 40 bp, Homo sapiens
tcattactactaattccagaatgttattatcaccccaaaa

SEQ ID NO: 29919 - DNA, 40 bp, Homo sapiens
ttttggggtgataataacattctggaattagtagtaatga

SEQ ID NO: 29920 - DNA, 40 bp, Homo sapiens
cattactactaattccagaatgttattatcaccccaaaag

SEQ ID NO: 29921 - DNA, 40 bp, Homo sapiens
cttttggggtgataataacattctggaattagtagtaatg

SEQ ID NO: 29922 - DNA, 40 bp, Homo sapiens
attactactaattccagaatgttattatcaccccaaaagt

SEQ ID NO: 29923 - DNA, 40 bp, Homo sapiens
acttttggggtgataataacattctggaattagtagtaat

SEQ ID NO: 29924 - DNA, 40 bp, Homo sapiens
ttactactaattccagaatgttattatcaccccaaaagtc

SEQ ID NO: 29925 - DNA, 40 bp, Homo sapiens
gacttttggggtgataataacattctggaattagtagtaa

SEQ ID NO: 29926 - DNA, 40 bp, Homo sapiens
tactactaattccagaatgttattatcaccccaaaagtcc

SEQ ID NO: 29927 - DNA, 40 bp, Homo sapiens
ggacttttggggtgataataacattctggaattagtagta

SEQ ID NO: 29928 - DNA, 40 bp, Homo sapiens
actactaattccagaatgttattatcaccccaaaagtccc

SEQ ID NO: 29929 - DNA, 40 bp, Homo sapiens
gggacttttggggtgataataacattctggaattagtagt

SEQ ID NO: 29930 - DNA, 40 bp, Homo sapiens
ctactaattccagaatgttattatcaccccaaaagtccca

SEQ ID NO: 29931 - DNA, 40 bp, Homo sapiens
tgggacttttggggtgataataacattctggaattagtag

SEQ ID NO: 29932 - DNA, 40 bp, Homo sapiens
tactaattccagaatgttattatcaccccaaaagtcccac

SEQ ID NO: 29933 - DNA, 40 bp, Homo sapiens
gtgggacttttggggtgataataacattctggaattagta

SEQ ID NO: 29934 - DNA, 40 bp, Homo sapiens
actaattccagaatgttattatcaccccaaaagtcccaca

SEQ ID NO: 29935 - DNA, 40 bp, Homo sapiens
tgtgggacttttggggtgataataacattctggaattagt

SEQ ID NO: 29936 - DNA, 40 bp, Homo sapiens
ctaattccagaatgttattatcaccccaaaagtcccacat

SEQ ID NO: 29937 - DNA, 40 bp, Homo sapiens
atgtgggacttttggggtgataataacattctggaattag

SEQ ID NO: 29938 - DNA, 40 bp, Homo sapiens
taattccagaatgttattatcaccccaaaagtcccacatc

SEQ ID NO: 29939 - DNA, 40 bp, Homo sapiens
gatgtgggacttttggggtgataataacattctggaatta

SEQ ID NO: 29940 - DNA, 40 bp, Homo sapiens
aattccagaatgttattatcaccccaaaagtcccacatcc

SEQ ID NO: 29941 - DNA, 40 bp, Homo sapiens
ggatgtgggacttttggggtgataataacattctggaatt

SEQ ID NO: 29942 - DNA, 40 bp, Homo sapiens
attccagaatgttattatcaccccaaaagtcccacatcca

SEQ ID NO: 29943 - DNA, 40 bp, Homo sapiens
tggatgtgggacttttggggtgataataacattctggaat

SEQ ID NO: 29944 - DNA, 40 bp, Homo sapiens
ttccagaatgttattatcaccccaaaagtcccacatccat

SEQ ID NO: 29945 - DNA, 40 bp, Homo sapiens
atggatgtgggacttttggggtgataataacattctggaa

SEQ ID NO: 29946 - DNA, 40 bp, Homo sapiens
tccagaatgttattatcaccccaaaagtcccacatccatt

SEQ ID NO: 29947 - DNA, 40 bp, Homo sapiens
aatggatgtgggacttttggggtgataataacattctgga

SEQ ID NO: 29948 - DNA, 40 bp, Homo sapiens
ccagaatgttattatcaccccaaaagtcccacatccatta

SEQ ID NO: 29949 - DNA, 40 bp, Homo sapiens
taatggatgtgggacttttggggtgataataacattctgg

SEQ ID NO: 29950 - DNA, 40 bp, Homo sapiens
cagaatgttattatcaccccaaaagtcccacatccattag

SEQ ID NO: 29951 - DNA, 40 bp, Homo sapiens
ctaatggatgtgggacttttggggtgataataacattctg

SEQ ID NO: 29952 - DNA, 40 bp, Homo sapiens
agaatgttattatcaccccaaaagtcccacatccattagc

SEQ ID NO: 29953 - DNA, 40 bp, Homo sapiens
gctaatggatgtgggacttttggggtgataataacattct

SEQ ID NO: 29954 - DNA, 40 bp, Homo sapiens
gaatgttattatcaccccaaaagtcccacatccattagca

SEQ ID NO: 29955 - DNA, 40 bp, Homo sapiens
tgctaatggatgtgggacttttggggtgataataacattc

SEQ ID NO: 29956 - DNA, 40 bp, Homo sapiens
aatgttattatcaccccaaaagtcccacatccattagcag

SEQ ID NO: 29957 - DNA, 40 bp, Homo sapiens
ctgctaatggatgtgggacttttggggtgataataacatt

SEQ ID NO: 29958 - DNA, 40 bp, Homo sapiens
atgttattatcaccccaaaagtcccacatccattagcagc

SEQ ID NO: 29959 - DNA, 40 bp, Homo sapiens
gctgctaatggatgtgggacttttggggtgataataacat

SEQ ID NO: 29960 - DNA, 40 bp, Homo sapiens
tgttattatcaccccaaaagtcccacatccattagcagcc

SEQ ID NO: 29961 - DNA, 40 bp, Homo sapiens
ggctgctaatggatgtgggacttttggggtgataataaca

SEQ ID NO: 29962 - DNA, 40 bp, Homo sapiens
gttattatcaccccaaaagtcccacatccattagcagcca

SEQ ID NO: 29963 - DNA, 40 bp, Homo sapiens
tggctgctaatggatgtgggacttttggggtgataataac

SEQ ID NO: 29964 - DNA, 40 bp, Homo sapiens
ttattatcaccccaaaagtcccacatccattagcagccac

SEQ ID NO: 29965 - DNA, 40 bp, Homo sapiens
gtggctgctaatggatgtgggacttttggggtgataataa

SEQ ID NO: 29966 - DNA, 40 bp, Homo sapiens
tattatcaccccaaaagtcccacatccattagcagccact

SEQ ID NO: 29967 - DNA, 40 bp, Homo sapiens
agtggctgctaatggatgtgggacttttggggtgataata

SEQ ID NO: 29968 - DNA, 40 bp, Homo sapiens
attatcaccccaaaagtcccacatccattagcagccactc

SEQ ID NO: 29969 - DNA, 40 bp, Homo sapiens
gagtggctgctaatggatgtgggacttttggggtgataat

SEQ ID NO: 29970 - DNA, 40 bp, Homo sapiens
ttatcaccccaaaagtcccacatccattagcagccactcc

SEQ ID NO: 29971 - DNA, 40 bp, Homo sapiens
ggagtggctgctaatggatgtgggacttttggggtgataa

SEQ ID NO: 29972 - DNA, 40 bp, Homo sapiens
tatcaccccaaaagtcccacatccattagcagccactccc

SEQ ID NO: 29973 - DNA, 40 bp, Homo sapiens
gggagtggctgctaatggatgtgggacttttggggtgata

SEQ ID NO: 29974 - DNA, 40 bp, Homo sapiens
atcaccccaaaagtcccacatccattagcagccactcccc

SEQ ID NO: 29975 - DNA, 40 bp, Homo sapiens
ggggagtggctgctaatggatgtgggacttttggggtgat

SEQ ID NO: 29976 - DNA, 40 bp, Homo sapiens
tcaccccaaaagtcccacatccattagcagccactcccca

SEQ ID NO: 29977 - DNA, 40 bp, Homo sapiens
tggggagtggctgctaatggatgtgggacttttggggtga

SEQ ID NO: 29978 - DNA, 40 bp, Homo sapiens
caccccaaaagtcccacatccattagcagccactccccaa

SEQ ID NO: 29979 - DNA, 40 bp, Homo sapiens
ttggggagtggctgctaatggatgtgggacttttggggtg

SEQ ID NO: 29980 - DNA, 40 bp, Homo sapiens
accccaaaagtcccacatccattagcagccactccccaat

SEQ ID NO: 29981 - DNA, 40 bp, Homo sapiens
attggggagtggctgctaatggatgtgggacttttggggt

SEQ ID NO: 29982 - DNA, 40 bp, Homo sapiens
ccccaaaagtcccacatccattagcagccactccccaatc

SEQ ID NO: 29983 - DNA, 40 bp, Homo sapiens
gattggggagtggctgctaatggatgtgggacttttgggg

SEQ ID NO: 29984 - DNA, 40 bp, Homo sapiens
cccaaaagtcccacatccattagcagccactccccaatcc

SEQ ID NO: 29985 - DNA, 40 bp, Homo sapiens
ggattggggagtggctgctaatggatgtgggacttttggg

SEQ ID NO: 29986 - DNA, 40 bp, Homo sapiens
ccaaaagtcccacatccattagcagccactccccaatccc

SEQ ID NO: 29987 - DNA, 40 bp, Homo sapiens
gggattggggagtggctgctaatggatgtgggacttttgg

SEQ ID NO: 29988 - DNA, 40 bp, Homo sapiens
caaaagtcccacatccattagcagccactccccaatccct

SEQ ID NO: 29989 - DNA, 40 bp, Homo sapiens
agggattggggagtggctgctaatggatgtgggacttttg

SEQ ID NO: 29990 - DNA, 40 bp, Homo sapiens
aaaagtcccacatccattagcagccactccccaatccctt

SEQ ID NO: 29991 - DNA, 40 bp, Homo sapiens
aagggattggggagtggctgctaatggatgtgggactttt

SEQ ID NO: 29992 - DNA, 40 bp, Homo sapiens
aaagtcccacatccattagcagccactccccaatcccttc

SEQ ID NO: 29993 - DNA, 40 bp, Homo sapiens
gaagggattggggagtggctgctaatggatgtgggacttt

SEQ ID NO: 29994 - DNA, 40 bp, Homo sapiens
aagtcccacatccattagcagccactccccaatcccttct

SEQ ID NO: 29995 - DNA, 40 bp, Homo sapiens
agaagggattggggagtggctgctaatggatgtgggactt

SEQ ID NO: 29996 - DNA, 40 bp, Homo sapiens
agtcccacatccattagcagccactccccaatcccttctc

SEQ ID NO: 29997 - DNA, 40 bp, Homo sapiens
gagaagggattggggagtggctgctaatggatgtgggact

SEQ ID NO: 29998 - DNA, 40 bp, Homo sapiens
gtcccacatccattagcagccactccccaatcccttctcc

SEQ ID NO: 29999 - DNA, 40 bp, Homo sapiens
ggagaagggattggggagtggctgctaatggatgtgggac

SEQ ID NO: 30000 - DNA, 40 bp, Homo sapiens
tcccacatccattagcagccactccccaatcccttctccc

SEQ ID NO: 30001 - DNA, 40 bp, Homo sapiens
gggagaagggattggggagtggctgctaatggatgtggga

SEQ ID NO: 30002 - DNA, 40 bp, Homo sapiens
cccacatccattagcagccactccccaatcccttctccca

SEQ ID NO: 30003 - DNA, 40 bp, Homo sapiens
tgggagaagggattggggagtggctgctaatggatgtggg

SEQ ID NO: 30004 - DNA, 40 bp, Homo sapiens
ccacatccattagcagccactccccaatcccttctcccac

SEQ ID NO: 30005 - DNA, 40 bp, Homo sapiens
gtgggagaagggattggggagtggctgctaatggatgtgg

SEQ ID NO: 30006 - DNA, 40 bp, Homo sapiens
cacatccattagcagccactccccaatcccttctcccacc

SEQ ID NO: 30007 - DNA, 40 bp, Homo sapiens
ggtgggagaagggattggggagtggctgctaatggatgtg

SEQ ID NO: 30008 - DNA, 40 bp, Homo sapiens
acatccattagcagccactccccaatcccttctcccacca

SEQ ID NO: 30009 - DNA, 40 bp, Homo sapiens
tggtgggagaagggattggggagtggctgctaatggatgt

SEQ ID NO: 30010 - DNA, 40 bp, Homo sapiens
catccattagcagccactccccaatcccttctcccaccag

SEQ ID NO: 30011 - DNA, 40 bp, Homo sapiens
ctggtgggagaagggattggggagtggctgctaatggatg

SEQ ID NO: 30012 - DNA, 40 bp, Homo sapiens
atccattagcagccactccccaatcccttctcccaccagc

SEQ ID NO: 30013 - DNA, 40 bp, Homo sapiens
gctggtgggagaagggattggggagtggctgctaatggat

SEQ ID NO: 30014 - DNA, 40 bp, Homo sapiens
tccattagcagccactccccaatcccttctcccaccagcc

SEQ ID NO: 30015 - DNA, 40 bp, Homo sapiens
ggctggtgggagaagggattggggagtggctgctaatgga

SEQ ID NO: 30016 - DNA, 40 bp, Homo sapiens
ccattagcagccactccccaatcccttctcccaccagcct

SEQ ID NO: 30017 - DNA, 40 bp, Homo sapiens
aggctggtgggagaagggattggggagtggctgctaatgg

SEQ ID NO: 30018 - DNA, 40 bp, Homo sapiens
cattagcagccactccccaatcccttctcccaccagcctc

SEQ ID NO: 30019 - DNA, 40 bp, Homo sapiens
gaggctggtgggagaagggattggggagtggctgctaatg

SEQ ID NO: 30020 - DNA, 40 bp, Homo sapiens
attagcagccactccccaatcccttctcccaccagcctct

SEQ ID NO: 30021 - DNA, 40 bp, Homo sapiens
agaggctggtgggagaagggattggggagtggctgctaat

SEQ ID NO: 30022 - DNA, 40 bp, Homo sapiens
ttagcagccactccccaatcccttctcccaccagcctcta

SEQ ID NO: 30023 - DNA, 40 bp, Homo sapiens
tagaggctggtgggagaagggattggggagtggctgctaa

SEQ ID NO: 30024 - DNA, 40 bp, Homo sapiens
tagcagccactccccaatcccttctcccaccagcctctaa

SEQ ID NO: 30025 - DNA, 40 bp, Homo sapiens
ttagaggctggtgggagaagggattggggagtggctgcta

SEQ ID NO: 30026 - DNA, 40 bp, Homo sapiens
agcagccactccccaatcccttctcccaccagcctctaaa

SEQ ID NO: 30027 - DNA, 40 bp, Homo sapiens
tttagaggctggtgggagaagggattggggagtggctgct

SEQ ID NO: 30028 - DNA, 40 bp, Homo sapiens
gcagccactccccaatcccttctcccaccagcctctaaaa

SEQ ID NO: 30029 - DNA, 40 bp, Homo sapiens
ttttagaggctggtgggagaagggattggggagtggctgc

SEQ ID NO: 30030 - DNA, 40 bp, Homo sapiens
cagccactccccaatcccttctcccaccagcctctaaaaa

SEQ ID NO: 30031 - DNA, 40 bp, Homo sapiens
tttttagaggctggtgggagaagggattggggagtggctg

SEQ ID NO: 30032 - DNA, 40 bp, Homo sapiens
agccactccccaatcccttctcccaccagcctctaaaaac

SEQ ID NO: 30033 - DNA, 40 bp, Homo sapiens
gtttttagaggctggtgggagaagggattggggagtggct

SEQ ID NO: 30034 - DNA, 40 bp, Homo sapiens
gccactccccaatcccttctcccaccagcctctaaaaact

SEQ ID NO: 30035 - DNA, 40 bp, Homo sapiens
agtttttagaggctggtgggagaagggattggggagtggc

SEQ ID NO: 30036 - DNA, 40 bp, Homo sapiens
ccactccccaatcccttctcccaccagcctctaaaaactg

SEQ ID NO: 30037 - DNA, 40 bp, Homo sapiens
cagtttttagaggctggtgggagaagggattggggagtgg

SEQ ID NO: 30038 - DNA, 40 bp, Homo sapiens
cactccccaatcccttctcccaccagcctctaaaaactgc

SEQ ID NO: 30039 - DNA, 40 bp, Homo sapiens
gcagtttttagaggctggtgggagaagggattggggagtg

SEQ ID NO: 30040 - DNA, 40 bp, Homo sapiens
actccccaatcccttctcccaccagcctctaaaaactgct

SEQ ID NO: 30041 - DNA, 40 bp, Homo sapiens
agcagtttttagaggctggtgggagaagggattggggagt

SEQ ID NO: 30042 - DNA, 40 bp, Homo sapiens
ctccccaatcccttctcccaccagcctctaaaaactgcta

SEQ ID NO: 30043 - DNA, 40 bp, Homo sapiens
tagcagtttttagaggctggtgggagaagggattggggag

SEQ ID NO: 30044 - DNA, 40 bp, Homo sapiens
tccccaatcccttctcccaccagcctctaaaaactgctaa

SEQ ID NO: 30045 - DNA, 40 bp, Homo sapiens
ttagcagtttttagaggctggtgggagaagggattgggga

SEQ ID NO: 30046 - DNA, 40 bp, Homo sapiens
ccccaatcccttctcccaccagcctctaaaaactgctaat

SEQ ID NO: 30047 - DNA, 40 bp, Homo sapiens
attagcagtttttagaggctggtgggagaagggattgggg

SEQ ID NO: 30048 - DNA, 40 bp, Homo sapiens
cccaatcccttctcccaccagcctctaaaaactgctaatt

SEQ ID NO: 30049 - DNA, 40 bp, Homo sapiens
aattagcagtttttagaggctggtgggagaagggattggg

SEQ ID NO: 30050 - DNA, 40 bp, Homo sapiens
ccaatcccttctcccaccagcctctaaaaactgctaattt

SEQ ID NO: 30051 - DNA, 40 bp, Homo sapiens
aaattagcagtttttagaggctggtgggagaagggattgg

SEQ ID NO: 30052 - DNA, 40 bp, Homo sapiens
caatcccttctcccaccagcctctaaaaactgctaatttt

SEQ ID NO: 30053 - DNA, 40 bp, Homo sapiens
aaaattagcagtttttagaggctggtgggagaagggattg

SEQ ID NO: 30054 - DNA, 40 bp, Homo sapiens
aatcccttctcccaccagcctctaaaaactgctaattttt

SEQ ID NO: 30055 - DNA, 40 bp, Homo sapiens
aaaaattagcagtttttagaggctggtgggagaagggatt

SEQ ID NO: 30056 - DNA, 40 bp, Homo sapiens
atcccttctcccaccagcctctaaaaactgctaatttttc

SEQ ID NO: 30057 - DNA, 40 bp, Homo sapiens
gaaaaattagcagtttttagaggctggtgggagaagggat

SEQ ID NO: 30058 - DNA, 40 bp, Homo sapiens
tcccttctcccaccagcctctaaaaactgctaatttttcc

SEQ ID NO: 30059 - DNA, 40 bp, Homo sapiens
ggaaaaattagcagtttttagaggctggtgggagaaggga

SEQ ID NO: 30060 - DNA, 40 bp, Homo sapiens
cccttctcccaccagcctctaaaaactgctaatttttcca

SEQ ID NO: 30061 - DNA, 40 bp, Homo sapiens
tggaaaaattagcagtttttagaggctggtgggagaaggg

SEQ ID NO: 30062 - DNA, 40 bp, Homo sapiens
ccttctcccaccagcctctaaaaactgctaatttttccat

SEQ ID NO: 30063 - DNA, 40 bp, Homo sapiens
atggaaaaattagcagtttttagaggctggtgggagaagg

SEQ ID NO: 30064 - DNA, 40 bp, Homo sapiens
cttctcccaccagcctctaaaaactgctaatttttccatc

SEQ ID NO: 30065 - DNA, 40 bp, Homo sapiens
gatggaaaaattagcagtttttagaggctggtgggagaag

SEQ ID NO: 30066 - DNA, 40 bp, Homo sapiens
ttctcccaccagcctctaaaaactgctaatttttccatct

SEQ ID NO: 30067 - DNA, 40 bp, Homo sapiens
agatggaaaaattagcagtttttagaggctggtgggagaa

SEQ ID NO: 30068 - DNA, 40 bp, Homo sapiens
tctcccaccagcctctaaaaactgctaatttttccatctc

SEQ ID NO: 30069 - DNA, 40 bp, Homo sapiens
gagatggaaaaattagcagtttttagaggctggtgggaga

SEQ ID NO: 30070 - DNA, 40 bp, Homo sapiens
ctcccaccagcctctaaaaactgctaatttttccatctct

SEQ ID NO: 30071 - DNA, 40 bp, Homo sapiens
agagatggaaaaattagcagtttttagaggctggtgggag

SEQ ID NO: 30072 - DNA, 40 bp, Homo sapiens
tcccaccagcctctaaaaactgctaatttttccatctctg

SEQ ID NO: 30073 - DNA, 40 bp, Homo sapiens
cagagatggaaaaattagcagtttttagaggctggtggga

SEQ ID NO: 30074 - DNA, 40 bp, Homo sapiens
cccaccagcctctaaaaactgctaatttttccatctctgt

SEQ ID NO: 30075 - DNA, 40 bp, Homo sapiens
acagagatggaaaaattagcagtttttagaggctggtggg

SEQ ID NO: 30076 - DNA, 40 bp, Homo sapiens
ccaccagcctctaaaaactgctaatttttccatctctgtg

SEQ ID NO: 30077 - DNA, 40 bp, Homo sapiens
cacagagatggaaaaattagcagtttttagaggctggtgg

SEQ ID NO: 30078 - DNA, 40 bp, Homo sapiens
caccagcctctaaaaactgctaatttttccatctctgtgg

SEQ ID NO: 30079 - DNA, 40 bp, Homo sapiens
ccacagagatggaaaaattagcagtttttagaggctggtg

SEQ ID NO: 30080 - DNA, 40 bp, Homo sapiens
accagcctctaaaaactgctaatttttccatctctgtgga

SEQ ID NO: 30081 - DNA, 40 bp, Homo sapiens
tccacagagatggaaaaattagcagtttttagaggctggt

SEQ ID NO: 30082 - DNA, 40 bp, Homo sapiens
ccagcctctaaaaactgctaatttttccatctctgtggat

SEQ ID NO: 30083 - DNA, 40 bp, Homo sapiens
atccacagagatggaaaaattagcagtttttagaggctgg

SEQ ID NO: 30084 - DNA, 40 bp, Homo sapiens
cagcctctaaaaactgctaatttttccatctctgtggatt

SEQ ID NO: 30085 - DNA, 40 bp, Homo sapiens
aatccacagagatggaaaaattagcagtttttagaggctg

SEQ ID NO: 30086 - DNA, 40 bp, Homo sapiens
agcctctaaaaactgctaatttttccatctctgtggattt

SEQ ID NO: 30087 - DNA, 40 bp, Homo sapiens
aaatccacagagatggaaaaattagcagtttttagaggct

SEQ ID NO: 30088 - DNA, 40 bp, Homo sapiens
gcctctaaaaactgctaatttttccatctctgtggatttg

SEQ ID NO: 30089 - DNA, 40 bp, Homo sapiens
caaatccacagagatggaaaaattagcagtttttagaggc

SEQ ID NO: 30090 - DNA, 40 bp, Homo sapiens
cctctaaaaactgctaatttttccatctctgtggatttgt

SEQ ID NO: 30091 - DNA, 40 bp, Homo sapiens
acaaatccacagagatggaaaaattagcagtttttagagg

SEQ ID NO: 30092 - DNA, 40 bp, Homo sapiens
ctctaaaaactgctaatttttccatctctgtggatttgtc

SEQ ID NO: 30093 - DNA, 40 bp, Homo sapiens
gacaaatccacagagatggaaaaattagcagtttttagag

SEQ ID NO: 30094 - DNA, 40 bp, Homo sapiens
tctaaaaactgctaatttttccatctctgtggatttgtcc

SEQ ID NO: 30095 - DNA, 40 bp, Homo sapiens
ggacaaatccacagagatggaaaaattagcagtttttaga

SEQ ID NO: 30096 - DNA, 40 bp, Homo sapiens
ctaaaaactgctaatttttccatctctgtggatttgtcca

SEQ ID NO: 30097 - DNA, 40 bp, Homo sapiens
tggacaaatccacagagatggaaaaattagcagtttttag

SEQ ID NO: 30098 - DNA, 40 bp, Homo sapiens
taaaaactgctaatttttccatctctgtggatttgtccac

SEQ ID NO: 30099 - DNA, 40 bp, Homo sapiens
gtggacaaatccacagagatggaaaaattagcagttttta

SEQ ID NO: 30100 - DNA, 40 bp, Homo sapiens
aaaaactgctaatttttccatctctgtggatttgtccact

SEQ ID NO: 30101 - DNA, 40 bp, Homo sapiens
agtggacaaatccacagagatggaaaaattagcagttttt

SEQ ID NO: 30102 - DNA, 40 bp, Homo sapiens
aaaactgctaatttttccatctctgtggatttgtccactc

SEQ ID NO: 30103 - DNA, 40 bp, Homo sapiens
gagtggacaaatccacagagatggaaaaattagcagtttt

SEQ ID NO: 30104 - DNA, 40 bp, Homo sapiens
aaactgctaatttttccatctctgtggatttgtccactct

SEQ ID NO: 30105 - DNA, 40 bp, Homo sapiens
agagtggacaaatccacagagatggaaaaattagcagttt

SEQ ID NO: 30106 - DNA, 40 bp, Homo sapiens
aactgctaatttttccatctctgtggatttgtccactctg

SEQ ID NO: 30107 - DNA, 40 bp, Homo sapiens
cagagtggacaaatccacagagatggaaaaattagcagtt

SEQ ID NO: 30108 - DNA, 40 bp, Homo sapiens
actgctaatttttccatctctgtggatttgtccactctga

SEQ ID NO: 30109 - DNA, 40 bp, Homo sapiens
tcagagtggacaaatccacagagatggaaaaattagcagt

SEQ ID NO: 30110 - DNA, 40 bp, Homo sapiens
ctgctaatttttccatctctgtggatttgtccactctgat

SEQ ID NO: 30111 - DNA, 40 bp, Homo sapiens
atcagagtggacaaatccacagagatggaaaaattagcag

SEQ ID NO: 30112 - DNA, 40 bp, Homo sapiens
tgctaatttttccatctctgtggatttgtccactctgatt

SEQ ID NO: 30113 - DNA, 40 bp, Homo sapiens
aatcagagtggacaaatccacagagatggaaaaattagca

SEQ ID NO: 30114 - DNA, 40 bp, Homo sapiens
gctaatttttccatctctgtggatttgtccactctgatta

SEQ ID NO: 30115 - DNA, 40 bp, Homo sapiens
taatcagagtggacaaatccacagagatggaaaaattagc

SEQ ID NO: 30116 - DNA, 40 bp, Homo sapiens
ctaatttttccatctctgtggatttgtccactctgattat

SEQ ID NO: 30117 - DNA, 40 bp, Homo sapiens
ataatcagagtggacaaatccacagagatggaaaaattag

SEQ ID NO: 30118 - DNA, 40 bp, Homo sapiens
taatttttccatctctgtggatttgtccactctgattatt

SEQ ID NO: 30119 - DNA, 40 bp, Homo sapiens
aataatcagagtggacaaatccacagagatggaaaaatta

SEQ ID NO: 30120 - DNA, 40 bp, Homo sapiens
aatttttccatctctgtggatttgtccactctgattattt

SEQ ID NO: 30121 - DNA, 40 bp, Homo sapiens
aaataatcagagtggacaaatccacagagatggaaaaatt

SEQ ID NO: 30122 - DNA, 40 bp, Homo sapiens
atttttccatctctgtggatttgtccactctgattatttc

SEQ ID NO: 30123 - DNA, 40 bp, Homo sapiens
gaaataatcagagtggacaaatccacagagatggaaaaat

SEQ ID NO: 30124 - DNA, 40 bp, Homo sapiens
tttttccatctctgtggatttgtccactctgattatttca

SEQ ID NO: 30125 - DNA, 40 bp, Homo sapiens
tgaaataatcagagtggacaaatccacagagatggaaaaa

SEQ ID NO: 30126 - DNA, 40 bp, Homo sapiens
ttttccatctctgtggatttgtccactctgattatttcat

SEQ ID NO: 30127 - DNA, 40 bp, Homo sapiens
atgaaataatcagagtggacaaatccacagagatggaaaa

SEQ ID NO: 30128 - DNA, 40 bp, Homo sapiens
tttccatctctgtggatttgtccactctgattatttcata

SEQ ID NO: 30129 - DNA, 40 bp, Homo sapiens
tatgaaataatcagagtggacaaatccacagagatggaaa

SEQ ID NO: 30130 - DNA, 40 bp, Homo sapiens
ttccatctctgtggatttgtccactctgattatttcatat

SEQ ID NO: 30131 - DNA, 40 bp, Homo sapiens
atatgaaataatcagagtggacaaatccacagagatggaa

SEQ ID NO: 30132 - DNA, 40 bp, Homo sapiens
tccatctctgtggatttgtccactctgattatttcatata

SEQ ID NO: 30133 - DNA, 40 bp, Homo sapiens
tatatgaaataatcagagtggacaaatccacagagatgga

SEQ ID NO: 30134 - DNA, 40 bp, Homo sapiens
ccatctctgtggatttgtccactctgattatttcatataa

SEQ ID NO: 30135 - DNA, 40 bp, Homo sapiens
ttatatgaaataatcagagtggacaaatccacagagatgg

SEQ ID NO: 30136 - DNA, 40 bp, Homo sapiens
catctctgtggatttgtccactctgattatttcatataaa

SEQ ID NO: 30137 - DNA, 40 bp, Homo sapiens
tttatatgaaataatcagagtggacaaatccacagagatg

SEQ ID NO: 30138 - DNA, 40 bp, Homo sapiens
atctctgtggatttgtccactctgattatttcatataaag

SEQ ID NO: 30139 - DNA, 40 bp, Homo sapiens
ctttatatgaaataatcagagtggacaaatccacagagat

SEQ ID NO: 30140 - DNA, 40 bp, Homo sapiens
tctctgtggatttgtccactctgattatttcatataaaga

SEQ ID NO: 30141 - DNA, 40 bp, Homo sapiens
tctttatatgaaataatcagagtggacaaatccacagaga

SEQ ID NO: 30142 - DNA, 40 bp, Homo sapiens
ctctgtggatttgtccactctgattatttcatataaagag

SEQ ID NO: 30143 - DNA, 40 bp, Homo sapiens
ctctttatatgaaataatcagagtggacaaatccacagag

SEQ ID NO: 30144 - DNA, 40 bp, Homo sapiens
tctgtggatttgtccactctgattatttcatataaagaga

SEQ ID NO: 30145 - DNA, 40 bp, Homo sapiens
tctctttatatgaaataatcagagtggacaaatccacaga

SEQ ID NO: 30146 - DNA, 40 bp, Homo sapiens
ctgtggatttgtccactctgattatttcatataaagagaa

SEQ ID NO: 30147 - DNA, 40 bp, Homo sapiens
ttctctttatatgaaataatcagagtggacaaatccacag

SEQ ID NO: 30148 - DNA, 40 bp, Homo sapiens
tgtggatttgtccactctgattatttcatataaagagaat

SEQ ID NO: 30149 - DNA, 40 bp, Homo sapiens
attctctttatatgaaataatcagagtggacaaatccaca

SEQ ID NO: 30150 - DNA, 40 bp, Homo sapiens
gtggatttgtccactctgattatttcatataaagagaatc

SEQ ID NO: 30151 - DNA, 40 bp, Homo sapiens
gattctctttatatgaaataatcagagtggacaaatccac

SEQ ID NO: 30152 - DNA, 40 bp, Homo sapiens
tggatttgtccactctgattatttcatataaagagaatcg

SEQ ID NO: 30153 - DNA, 40 bp, Homo sapiens
cgattctctttatatgaaataatcagagtggacaaatcca

SEQ ID NO: 30154 - DNA, 40 bp, Homo sapiens
ggatttgtccactctgattatttcatataaagagaatcgt

SEQ ID NO: 30155 - DNA, 40 bp, Homo sapiens
acgattctctttatatgaaataatcagagtggacaaatcc

SEQ ID NO: 30156 - DNA, 40 bp, Homo sapiens
gatttgtccactctgattatttcatataaagagaatcgta

SEQ ID NO: 30157 - DNA, 40 bp, Homo sapiens
tacgattctctttatatgaaataatcagagtggacaaatc

SEQ ID NO: 30158 - DNA, 40 bp, Homo sapiens
atttgtccactctgattatttcatataaagagaatcgtac

SEQ ID NO: 30159 - DNA, 40 bp, Homo sapiens
gtacgattctctttatatgaaataatcagagtggacaaat

SEQ ID NO: 30160 - DNA, 40 bp, Homo sapiens
tttgtccactctgattatttcatataaagagaatcgtaca

SEQ ID NO: 30161 - DNA, 40 bp, Homo sapiens
tgtacgattctctttatatgaaataatcagagtggacaaa

SEQ ID NO: 30162 - DNA, 40 bp, Homo sapiens
ttgtccactctgattatttcatataaagagaatcgtacag

SEQ ID NO: 30163 - DNA, 40 bp, Homo sapiens
ctgtacgattctctttatatgaaataatcagagtggacaa

SEQ ID NO: 30164 - DNA, 40 bp, Homo sapiens
tgtccactctgattatttcatataaagagaatcgtacaga

SEQ ID NO: 30165 - DNA, 40 bp, Homo sapiens
tctgtacgattctctttatatgaaataatcagagtggaca

SEQ ID NO: 30166 - DNA, 40 bp, Homo sapiens
gtccactctgattatttcatataaagagaatcgtacagac

SEQ ID NO: 30167 - DNA, 40 bp, Homo sapiens
gtctgtacgattctctttatatgaaataatcagagtggac

SEQ ID NO: 30168 - DNA, 40 bp, Homo sapiens
tccactctgattatttcatataaagagaatcgtacagacg

SEQ ID NO: 30169 - DNA, 40 bp, Homo sapiens
cgtctgtacgattctctttatatgaaataatcagagtgga

SEQ ID NO: 30170 - DNA, 40 bp, Homo sapiens
ccactctgattatttcatataaagagaatcgtacagacgt

SEQ ID NO: 30171 - DNA, 40 bp, Homo sapiens
acgtctgtacgattctctttatatgaaataatcagagtgg

SEQ ID NO: 30172 - DNA, 40 bp, Homo sapiens
cactctgattatttcatataaagagaatcgtacagacgtg

SEQ ID NO: 30173 - DNA, 40 bp, Homo sapiens
cacgtctgtacgattctctttatatgaaataatcagagtg

SEQ ID NO: 30174 - DNA, 40 bp, Homo sapiens
actctgattatttcatataaagagaatcgtacagacgtgg

SEQ ID NO: 30175 - DNA, 40 bp, Homo sapiens
ccacgtctgtacgattctctttatatgaaataatcagagt

SEQ ID NO: 30176 - DNA, 40 bp, Homo sapiens
ctctgattatttcatataaagagaatcgtacagacgtggc

SEQ ID NO: 30177 - DNA, 40 bp, Homo sapiens
gccacgtctgtacgattctctttatatgaaataatcagag

SEQ ID NO: 30178 - DNA, 40 bp, Homo sapiens
tctgattatttcatataaagagaatcgtacagacgtggcc

SEQ ID NO: 30179 - DNA, 40 bp, Homo sapiens
ggccacgtctgtacgattctctttatatgaaataatcaga

SEQ ID NO: 30180 - DNA, 40 bp, Homo sapiens
ctgattatttcatataaagagaatcgtacagacgtggcct

SEQ ID NO: 30181 - DNA, 40 bp, Homo sapiens
aggccacgtctgtacgattctctttatatgaaataatcag

SEQ ID NO: 30182 - DNA, 40 bp, Homo sapiens
tgattatttcatataaagagaatcgtacagacgtggcctt

SEQ ID NO: 30183 - DNA, 40 bp, Homo sapiens
aaggccacgtctgtacgattctctttatatgaaataatca

SEQ ID NO: 30184 - DNA, 40 bp, Homo sapiens
gattatttcatataaagagaatcgtacagacgtggccttt

SEQ ID NO: 30185 - DNA, 40 bp, Homo sapiens
aaaggccacgtctgtacgattctctttatatgaaataatc

SEQ ID NO: 30186 - DNA, 40 bp, Homo sapiens
attatttcatataaagagaatcgtacagacgtggcctttt

SEQ ID NO: 30187 - DNA, 40 bp, Homo sapiens
aaaaggccacgtctgtacgattctctttatatgaaataat

SEQ ID NO: 30188 - DNA, 40 bp, Homo sapiens
ttatttcatataaagagaatcgtacagacgtggccttttg

SEQ ID NO: 30189 - DNA, 40 bp, Homo sapiens
caaaaggccacgtctgtacgattctctttatatgaaataa

SEQ ID NO: 30190 - DNA, 40 bp, Homo sapiens
tatttcatataaagagaatcgtacagacgtggccttttgt

SEQ ID NO: 30191 - DNA, 40 bp, Homo sapiens
acaaaaggccacgtctgtacgattctctttatatgaaata

SEQ ID NO: 30192 - DNA, 40 bp, Homo sapiens
atttcatataaagagaatcgtacagacgtggccttttgtg

SEQ ID NO: 30193 - DNA, 40 bp, Homo sapiens
cacaaaaggccacgtctgtacgattctctttatatgaaat

SEQ ID NO: 30194 - DNA, 40 bp, Homo sapiens
tttcatataaagagaatcgtacagacgtggccttttgtgt

SEQ ID NO: 30195 - DNA, 40 bp, Homo sapiens
acacaaaaggccacgtctgtacgattctctttatatgaaa

SEQ ID NO: 30196 - DNA, 40 bp, Homo sapiens
ttcatataaagagaatcgtacagacgtggccttttgtgtc

SEQ ID NO: 30197 - DNA, 40 bp, Homo sapiens
gacacaaaaggccacgtctgtacgattctctttatatgaa

SEQ ID NO: 30198 - DNA, 40 bp, Homo sapiens
tcatataaagagaatcgtacagacgtggccttttgtgtct

SEQ ID NO: 30199 - DNA, 40 bp, Homo sapiens
agacacaaaaggccacgtctgtacgattctctttatatga

SEQ ID NO: 30200 - DNA, 40 bp, Homo sapiens
catataaagagaatcgtacagacgtggccttttgtgtctg

SEQ ID NO: 30201 - DNA, 40 bp, Homo sapiens
cagacacaaaaggccacgtctgtacgattctctttatatg

SEQ ID NO: 30202 - DNA, 40 bp, Homo sapiens
atataaagagaatcgtacagacgtggccttttgtgtctgg

SEQ ID NO: 30203 - DNA, 40 bp, Homo sapiens
ccagacacaaaaggccacgtctgtacgattctctttatat

SEQ ID NO: 30204 - DNA, 40 bp, Homo sapiens
tataaagagaatcgtacagacgtggccttttgtgtctggc

SEQ ID NO: 30205 - DNA, 40 bp, Homo sapiens
gccagacacaaaaggccacgtctgtacgattctctttata

SEQ ID NO: 30206 - DNA, 40 bp, Homo sapiens
ataaagagaatcgtacagacgtggccttttgtgtctggca

SEQ ID NO: 30207 - DNA, 40 bp, Homo sapiens
tgccagacacaaaaggccacgtctgtacgattctctttat

SEQ ID NO: 30208 - DNA, 40 bp, Homo sapiens
taaagagaatcgtacagacgtggccttttgtgtctggcat

SEQ ID NO: 30209 - DNA, 40 bp, Homo sapiens
atgccagacacaaaaggccacgtctgtacgattctcttta

SEQ ID NO: 30210 - DNA, 40 bp, Homo sapiens
aaagagaatcgtacagacgtggccttttgtgtctggcatc

SEQ ID NO: 30211 - DNA, 40 bp, Homo sapiens
gatgccagacacaaaaggccacgtctgtacgattctcttt

SEQ ID NO: 30212 - DNA, 40 bp, Homo sapiens
aagagaatcgtacagacgtggccttttgtgtctggcatcc

SEQ ID NO: 30213 - DNA, 40 bp, Homo sapiens
ggatgccagacacaaaaggccacgtctgtacgattctctt

SEQ ID NO: 30214 - DNA, 40 bp, Homo sapiens
agagaatcgtacagacgtggccttttgtgtctggcatcct

SEQ ID NO: 30215 - DNA, 40 bp, Homo sapiens
aggatgccagacacaaaaggccacgtctgtacgattctct

SEQ ID NO: 30216 - DNA, 40 bp, Homo sapiens
gagaatcgtacagacgtggccttttgtgtctggcatcctc

SEQ ID NO: 30217 - DNA, 40 bp, Homo sapiens
gaggatgccagacacaaaaggccacgtctgtacgattctc

SEQ ID NO: 30218 - DNA, 40 bp, Homo sapiens
agaatcgtacagacgtggccttttgtgtctggcatcctcc

SEQ ID NO: 30219 - DNA, 40 bp, Homo sapiens
ggaggatgccagacacaaaaggccacgtctgtacgattct

SEQ ID NO: 30220 - DNA, 40 bp, Homo sapiens
gaatcgtacagacgtggccttttgtgtctggcatcctcca

SEQ ID NO: 30221 - DNA, 40 bp, Homo sapiens
tggaggatgccagacacaaaaggccacgtctgtacgattc

SEQ ID NO: 30222 - DNA, 40 bp, Homo sapiens
aatcgtacagacgtggccttttgtgtctggcatcctccac

SEQ ID NO: 30223 - DNA, 40 bp, Homo sapiens
gtggaggatgccagacacaaaaggccacgtctgtacgatt

SEQ ID NO: 30224 - DNA, 40 bp, Homo sapiens
atcgtacagacgtggccttttgtgtctggcatcctccaca

SEQ ID NO: 30225 - DNA, 40 bp, Homo sapiens
tgtggaggatgccagacacaaaaggccacgtctgtacgat

SEQ ID NO: 30226 - DNA, 40 bp, Homo sapiens
tcgtacagacgtggccttttgtgtctggcatcctccacac

SEQ ID NO: 30227 - DNA, 40 bp, Homo sapiens
gtgtggaggatgccagacacaaaaggccacgtctgtacga

SEQ ID NO: 30228 - DNA, 40 bp, Homo sapiens
cgtacagacgtggccttttgtgtctggcatcctccacaca

SEQ ID NO: 30229 - DNA, 40 bp, Homo sapiens
tgtgtggaggatgccagacacaaaaggccacgtctgtacg

SEQ ID NO: 30230 - DNA, 40 bp, Homo sapiens
gtacagacgtggccttttgtgtctggcatcctccacacag

SEQ ID NO: 30231 - DNA, 40 bp, Homo sapiens
ctgtgtggaggatgccagacacaaaaggccacgtctgtac

SEQ ID NO: 30232 - DNA, 40 bp, Homo sapiens
tacagacgtggccttttgtgtctggcatcctccacacagg

SEQ ID NO: 30233 - DNA, 40 bp, Homo sapiens
cctgtgtggaggatgccagacacaaaaggccacgtctgta

SEQ ID NO: 30234 - DNA, 40 bp, Homo sapiens
acagacgtggccttttgtgtctggcatcctccacacagga

SEQ ID NO: 30235 - DNA, 40 bp, Homo sapiens
tcctgtgtggaggatgccagacacaaaaggccacgtctgt

SEQ ID NO: 30236 - DNA, 40 bp, Homo sapiens
cagacgtggccttttgtgtctggcatcctccacacaggat

SEQ ID NO: 30237 - DNA, 40 bp, Homo sapiens
atcctgtgtggaggatgccagacacaaaaggccacgtctg

SEQ ID NO: 30238 - DNA, 40 bp, Homo sapiens
agacgtggccttttgtgtctggcatcctccacacaggatg

SEQ ID NO: 30239 - DNA, 40 bp, Homo sapiens
catcctgtgtggaggatgccagacacaaaaggccacgtct

SEQ ID NO: 30240 - DNA, 40 bp, Homo sapiens
gacgtggccttttgtgtctggcatcctccacacaggatga

SEQ ID NO: 30241 - DNA, 40 bp, Homo sapiens
tcatcctgtgtggaggatgccagacacaaaaggccacgtc

SEQ ID NO: 30242 - DNA, 40 bp, Homo sapiens
acgtggccttttgtgtctggcatcctccacacaggatgat

SEQ ID NO: 30243 - DNA, 40 bp, Homo sapiens
atcatcctgtgtggaggatgccagacacaaaaggccacgt

SEQ ID NO: 30244 - DNA, 40 bp, Homo sapiens
cgtggccttttgtgtctggcatcctccacacaggatgata

SEQ ID NO: 30245 - DNA, 40 bp, Homo sapiens
tatcatcctgtgtggaggatgccagacacaaaaggccacg

SEQ ID NO: 30246 - DNA, 40 bp, Homo sapiens
gtggccttttgtgtctggcatcctccacacaggatgatat

SEQ ID NO: 30247 - DNA, 40 bp, Homo sapiens
atatcatcctgtgtggaggatgccagacacaaaaggccac

SEQ ID NO: 30248 - DNA, 40 bp, Homo sapiens
tggccttttgtgtctggcatcctccacacaggatgatatt

SEQ ID NO: 30249 - DNA, 40 bp, Homo sapiens
aatatcatcctgtgtggaggatgccagacacaaaaggcca

SEQ ID NO: 30250 - DNA, 40 bp, Homo sapiens
ggccttttgtgtctggcatcctccacacaggatgatattt

SEQ ID NO: 30251 - DNA, 40 bp, Homo sapiens
aaatatcatcctgtgtggaggatgccagacacaaaaggcc

SEQ ID NO: 30252 - DNA, 40 bp, Homo sapiens
gccttttgtgtctggcatcctccacacaggatgatatttt

SEQ ID NO: 30253 - DNA, 40 bp, Homo sapiens
aaaatatcatcctgtgtggaggatgccagacacaaaaggc

SEQ ID NO: 30254 - DNA, 40 bp, Homo sapiens
ccttttgtgtctggcatcctccacacaggatgatattttc

SEQ ID NO: 30255 - DNA, 40 bp, Homo sapiens
gaaaatatcatcctgtgtggaggatgccagacacaaaagg

SEQ ID NO: 30256 - DNA, 40 bp, Homo sapiens
cttttgtgtctggcatcctccacacaggatgatattttca

SEQ ID NO: 30257 - DNA, 40 bp, Homo sapiens
tgaaaatatcatcctgtgtggaggatgccagacacaaaag

SEQ ID NO: 30258 - DNA, 40 bp, Homo sapiens
ttttgtgtctggcatcctccacacaggatgatattttcag

SEQ ID NO: 30259 - DNA, 40 bp, Homo sapiens
ctgaaaatatcatcctgtgtggaggatgccagacacaaaa

SEQ ID NO: 30260 - DNA, 40 bp, Homo sapiens
tttgtgtctggcatcctccacacaggatgatattttcaga

SEQ ID NO: 30261 - DNA, 40 bp, Homo sapiens
tctgaaaatatcatcctgtgtggaggatgccagacacaaa

SEQ ID NO: 30262 - DNA, 40 bp, Homo sapiens
ttgtgtctggcatcctccacacaggatgatattttcagag

SEQ ID NO: 30263 - DNA, 40 bp, Homo sapiens
ctctgaaaatatcatcctgtgtggaggatgccagacacaa

SEQ ID NO: 30264 - DNA, 40 bp, Homo sapiens
tgtgtctggcatcctccacacaggatgatattttcagagt

SEQ ID NO: 30265 - DNA, 40 bp, Homo sapiens
actctgaaaatatcatcctgtgtggaggatgccagacaca

SEQ ID NO: 30266 - DNA, 40 bp, Homo sapiens
gtgtctggcatcctccacacaggatgatattttcagagtt

SEQ ID NO: 30267 - DNA, 40 bp, Homo sapiens
aactctgaaaatatcatcctgtgtggaggatgccagacac

SEQ ID NO: 30268 - DNA, 40 bp, Homo sapiens
tgtctggcatcctccacacaggatgatattttcagagttc

SEQ ID NO: 30269 - DNA, 40 bp, Homo sapiens
gaactctgaaaatatcatcctgtgtggaggatgccagaca

SEQ ID NO: 30270 - DNA, 40 bp, Homo sapiens
gtctggcatcctccacacaggatgatattttcagagttcg

SEQ ID NO: 30271 - DNA, 40 bp, Homo sapiens
cgaactctgaaaatatcatcctgtgtggaggatgccagac

SEQ ID NO: 30272 - DNA, 40 bp, Homo sapiens
tctggcatcctccacacaggatgatattttcagagttcgt

SEQ ID NO: 30273 - DNA, 40 bp, Homo sapiens
acgaactctgaaaatatcatcctgtgtggaggatgccaga

SEQ ID NO: 30274 - DNA, 40 bp, Homo sapiens
ctggcatcctccacacaggatgatattttcagagttcgtc

SEQ ID NO: 30275 - DNA, 40 bp, Homo sapiens
gacgaactctgaaaatatcatcctgtgtggaggatgccag

SEQ ID NO: 30276 - DNA, 40 bp, Homo sapiens
tggcatcctccacacaggatgatattttcagagttcgtct

SEQ ID NO: 30277 - DNA, 40 bp, Homo sapiens
agacgaactctgaaaatatcatcctgtgtggaggatgcca

SEQ ID NO: 30278 - DNA, 40 bp, Homo sapiens
ggcatcctccacacaggatgatattttcagagttcgtcta

SEQ ID NO: 30279 - DNA, 40 bp, Homo sapiens
tagacgaactctgaaaatatcatcctgtgtggaggatgcc

SEQ ID NO: 30280 - DNA, 40 bp, Homo sapiens
gcatcctccacacaggatgatattttcagagttcgtctat

SEQ ID NO: 30281 - DNA, 40 bp, Homo sapiens
atagacgaactctgaaaatatcatcctgtgtggaggatgc

SEQ ID NO: 30282 - DNA, 40 bp, Homo sapiens
catcctccacacaggatgatattttcagagttcgtctatg

SEQ ID NO: 30283 - DNA, 40 bp, Homo sapiens
catagacgaactctgaaaatatcatcctgtgtggaggatg

SEQ ID NO: 30284 - DNA, 40 bp, Homo sapiens
atcctccacacaggatgatattttcagagttcgtctatgt

SEQ ID NO: 30285 - DNA, 40 bp, Homo sapiens
acatagacgaactctgaaaatatcatcctgtgtggaggat

SEQ ID NO: 30286 - DNA, 40 bp, Homo sapiens
tcctccacacaggatgatattttcagagttcgtctatgtt

SEQ ID NO: 30287 - DNA, 40 bp, Homo sapiens
aacatagacgaactctgaaaatatcatcctgtgtggagga

SEQ ID NO: 30288 - DNA, 40 bp, Homo sapiens
cctccacacaggatgatattttcagagttcgtctatgttt

SEQ ID NO: 30289 - DNA, 40 bp, Homo sapiens
aaacatagacgaactctgaaaatatcatcctgtgtggagg

SEQ ID NO: 30290 - DNA, 40 bp, Homo sapiens
ctccacacaggatgatattttcagagttcgtctatgtttt

SEQ ID NO: 30291 - DNA, 40 bp, Homo sapiens
aaaacatagacgaactctgaaaatatcatcctgtgtggag

SEQ ID NO: 30292 - DNA, 40 bp, Homo sapiens
tccacacaggatgatattttcagagttcgtctatgttttt

SEQ ID NO: 30293 - DNA, 40 bp, Homo sapiens
aaaaacatagacgaactctgaaaatatcatcctgtgtgga

SEQ ID NO: 30294 - DNA, 40 bp, Homo sapiens
ccacacaggatgatattttcagagttcgtctatgtttttg

SEQ ID NO: 30295 - DNA, 40 bp, Homo sapiens
caaaaacatagacgaactctgaaaatatcatcctgtgtgg

SEQ ID NO: 30296 - DNA, 40 bp, Homo sapiens
cacacaggatgatattttcagagttcgtctatgtttttgc

SEQ ID NO: 30297 - DNA, 40 bp, Homo sapiens
gcaaaaacatagacgaactctgaaaatatcatcctgtgtg

SEQ ID NO: 30298 - DNA, 40 bp, Homo sapiens
acacaggatgatattttcagagttcgtctatgtttttgct

SEQ ID NO: 30299 - DNA, 40 bp, Homo sapiens
agcaaaaacatagacgaactctgaaaatatcatcctgtgt

SEQ ID NO: 30300 - DNA, 40 bp, Homo sapiens
cacaggatgatattttcagagttcgtctatgtttttgctt

SEQ ID NO: 30301 - DNA, 40 bp, Homo sapiens
aagcaaaaacatagacgaactctgaaaatatcatcctgtg

SEQ ID NO: 30302 - DNA, 40 bp, Homo sapiens
acaggatgatattttcagagttcgtctatgtttttgcttg

SEQ ID NO: 30303 - DNA, 40 bp, Homo sapiens
caagcaaaaacatagacgaactctgaaaatatcatcctgt

SEQ ID NO: 30304 - DNA, 40 bp, Homo sapiens
caggatgatattttcagagttcgtctatgtttttgcttgt

SEQ ID NO: 30305 - DNA, 40 bp, Homo sapiens
acaagcaaaaacatagacgaactctgaaaatatcatcctg

SEQ ID NO: 30306 - DNA, 40 bp, Homo sapiens
aggatgatattttcagagttcgtctatgtttttgcttgtt

SEQ ID NO: 30307 - DNA, 40 bp, Homo sapiens
aacaagcaaaaacatagacgaactctgaaaatatcatcct

SEQ ID NO: 30308 - DNA, 40 bp, Homo sapiens
ggatgatattttcagagttcgtctatgtttttgcttgttg

SEQ ID NO: 30309 - DNA, 40 bp, Homo sapiens
caacaagcaaaaacatagacgaactctgaaaatatcatcc

SEQ ID NO: 30310 - DNA, 40 bp, Homo sapiens
gatgatattttcagagttcgtctatgtttttgcttgttga

SEQ ID NO: 30311 - DNA, 40 bp, Homo sapiens
tcaacaagcaaaaacatagacgaactctgaaaatatcatc

SEQ ID NO: 30312 - DNA, 40 bp, Homo sapiens
atgatattttcagagttcgtctatgtttttgcttgttgat

SEQ ID NO: 30313 - DNA, 40 bp, Homo sapiens
atcaacaagcaaaaacatagacgaactctgaaaatatcat

SEQ ID NO: 30314 - DNA, 40 bp, Homo sapiens
tgatattttcagagttcgtctatgtttttgcttgttgatc

SEQ ID NO: 30315 - DNA, 40 bp, Homo sapiens
gatcaacaagcaaaaacatagacgaactctgaaaatatca

SEQ ID NO: 30316 - DNA, 40 bp, Homo sapiens
gatattttcagagttcgtctatgtttttgcttgttgatca

SEQ ID NO: 30317 - DNA, 40 bp, Homo sapiens
tgatcaacaagcaaaaacatagacgaactctgaaaatatc

SEQ ID NO: 30318 - DNA, 40 bp, Homo sapiens
atattttcagagttcgtctatgtttttgcttgttgatcat

SEQ ID NO: 30319 - DNA, 40 bp, Homo sapiens
atgatcaacaagcaaaaacatagacgaactctgaaaatat

SEQ ID NO: 30320 - DNA, 40 bp, Homo sapiens
tattttcagagttcgtctatgtttttgcttgttgatcatt

SEQ ID NO: 30321 - DNA, 40 bp, Homo sapiens
aatgatcaacaagcaaaaacatagacgaactctgaaaata

SEQ ID NO: 30322 - DNA, 40 bp, Homo sapiens
attttcagagttcgtctatgtttttgcttgttgatcattc

SEQ ID NO: 30323 - DNA, 40 bp, Homo sapiens
gaatgatcaacaagcaaaaacatagacgaactctgaaaat

SEQ ID NO: 30324 - DNA, 40 bp, Homo sapiens
ttttcagagttcgtctatgtttttgcttgttgatcattcc

SEQ ID NO: 30325 - DNA, 40 bp, Homo sapiens
ggaatgatcaacaagcaaaaacatagacgaactctgaaaa

SEQ ID NO: 30326 - DNA, 40 bp, Homo sapiens
tttcagagttcgtctatgtttttgcttgttgatcattcct

SEQ ID NO: 30327 - DNA, 40 bp, Homo sapiens
aggaatgatcaacaagcaaaaacatagacgaactctgaaa

SEQ ID NO: 30328 - DNA, 40 bp, Homo sapiens
ttcagagttcgtctatgtttttgcttgttgatcattcctt

SEQ ID NO: 30329 - DNA, 40 bp, Homo sapiens
aaggaatgatcaacaagcaaaaacatagacgaactctgaa

SEQ ID NO: 30330 - DNA, 40 bp, Homo sapiens
tcagagttcgtctatgtttttgcttgttgatcattccttc

SEQ ID NO: 30331 - DNA, 40 bp, Homo sapiens
gaaggaatgatcaacaagcaaaaacatagacgaactctga

SEQ ID NO: 30332 - DNA, 40 bp, Homo sapiens
cagagttcgtctatgtttttgcttgttgatcattccttca

SEQ ID NO: 30333 - DNA, 40 bp, Homo sapiens
tgaaggaatgatcaacaagcaaaaacatagacgaactctg

SEQ ID NO: 30334 - DNA, 40 bp, Homo sapiens
agagttcgtctatgtttttgcttgttgatcattccttcat

SEQ ID NO: 30335 - DNA, 40 bp, Homo sapiens
atgaaggaatgatcaacaagcaaaaacatagacgaactct

SEQ ID NO: 30336 - DNA, 40 bp, Homo sapiens
gagttcgtctatgtttttgcttgttgatcattccttcatt

SEQ ID NO: 30337 - DNA, 40 bp, Homo sapiens
aatgaaggaatgatcaacaagcaaaaacatagacgaactc

SEQ ID NO: 30338 - DNA, 40 bp, Homo sapiens
agttcgtctatgtttttgcttgttgatcattccttcattc

SEQ ID NO: 30339 - DNA, 40 bp, Homo sapiens
gaatgaaggaatgatcaacaagcaaaaacatagacgaact

SEQ ID NO: 30340 - DNA, 40 bp, Homo sapiens
gttcgtctatgtttttgcttgttgatcattccttcattcc

SEQ ID NO: 30341 - DNA, 40 bp, Homo sapiens
ggaatgaaggaatgatcaacaagcaaaaacatagacgaac

SEQ ID NO: 30342 - DNA, 40 bp, Homo sapiens
ttcgtctatgtttttgcttgttgatcattccttcattcct

SEQ ID NO: 30343 - DNA, 40 bp, Homo sapiens
aggaatgaaggaatgatcaacaagcaaaaacatagacgaa

SEQ ID NO: 30344 - DNA, 40 bp, Homo sapiens
tcgtctatgtttttgcttgttgatcattccttcattcctt

SEQ ID NO: 30345 - DNA, 40 bp, Homo sapiens
aaggaatgaaggaatgatcaacaagcaaaaacatagacga

SEQ ID NO: 30346 - DNA, 40 bp, Homo sapiens
cgtctatgtttttgcttgttgatcattccttcattccttt

SEQ ID NO: 30347 - DNA, 40 bp, Homo sapiens
aaaggaatgaaggaatgatcaacaagcaaaaacatagacg

SEQ ID NO: 30348 - DNA, 40 bp, Homo sapiens
gtctatgtttttgcttgttgatcattccttcattcctttt

SEQ ID NO: 30349 - DNA, 40 bp, Homo sapiens
aaaaggaatgaaggaatgatcaacaagcaaaaacatagac

SEQ ID NO: 30350 - DNA, 40 bp, Homo sapiens
tctatgtttttgcttgttgatcattccttcattccttttt

SEQ ID NO: 30351 - DNA, 40 bp, Homo sapiens
aaaaaggaatgaaggaatgatcaacaagcaaaaacataga

SEQ ID NO: 30352 - DNA, 40 bp, Homo sapiens
ctatgtttttgcttgttgatcattccttcattcctttttc

SEQ ID NO: 30353 - DNA, 40 bp, Homo sapiens
gaaaaaggaatgaaggaatgatcaacaagcaaaaacatag

SEQ ID NO: 30354 - DNA, 40 bp, Homo sapiens
tatgtttttgcttgttgatcattccttcattcctttttct

SEQ ID NO: 30355 - DNA, 40 bp, Homo sapiens
agaaaaaggaatgaaggaatgatcaacaagcaaaaacata

SEQ ID NO: 30356 - DNA, 40 bp, Homo sapiens
atgtttttgcttgttgatcattccttcattcctttttctg

SEQ ID NO: 30357 - DNA, 40 bp, Homo sapiens
cagaaaaaggaatgaaggaatgatcaacaagcaaaaacat

SEQ ID NO: 30358 - DNA, 40 bp, Homo sapiens
tgtttttgcttgttgatcattccttcattcctttttctgg

SEQ ID NO: 30359 - DNA, 40 bp, Homo sapiens
ccagaaaaaggaatgaaggaatgatcaacaagcaaaaaca

SEQ ID NO: 30360 - DNA, 40 bp, Homo sapiens
gtttttgcttgttgatcattccttcattcctttttctggc

SEQ ID NO: 30361 - DNA, 40 bp, Homo sapiens
gccagaaaaaggaatgaaggaatgatcaacaagcaaaaac

SEQ ID NO: 30362 - DNA, 40 bp, Homo sapiens
tttttgcttgttgatcattccttcattcctttttctggct

SEQ ID NO: 30363 - DNA, 40 bp, Homo sapiens
agccagaaaaaggaatgaaggaatgatcaacaagcaaaaa

SEQ ID NO: 30364 - DNA, 40 bp, Homo sapiens
ttttgcttgttgatcattccttcattcctttttctggctg

SEQ ID NO: 30365 - DNA, 40 bp, Homo sapiens
cagccagaaaaaggaatgaaggaatgatcaacaagcaaaa

SEQ ID NO: 30366 - DNA, 40 bp, Homo sapiens
tttgcttgttgatcattccttcattcctttttctggctga

SEQ ID NO: 30367 - DNA, 40 bp, Homo sapiens
tcagccagaaaaaggaatgaaggaatgatcaacaagcaaa

SEQ ID NO: 30368 - DNA, 40 bp, Homo sapiens
ttgcttgttgatcattccttcattcctttttctggctgaa

SEQ ID NO: 30369 - DNA, 40 bp, Homo sapiens
ttcagccagaaaaaggaatgaaggaatgatcaacaagcaa

SEQ ID NO: 30370 - DNA, 40 bp, Homo sapiens
tgcttgttgatcattccttcattcctttttctggctgaat

SEQ ID NO: 30371 - DNA, 40 bp, Homo sapiens
attcagccagaaaaaggaatgaaggaatgatcaacaagca

SEQ ID NO: 30372 - DNA, 40 bp, Homo sapiens
gcttgttgatcattccttcattcctttttctggctgaata

SEQ ID NO: 30373 - DNA, 40 bp, Homo sapiens
tattcagccagaaaaaggaatgaaggaatgatcaacaagc

SEQ ID NO: 30374 - DNA, 40 bp, Homo sapiens
cttgttgatcattccttcattcctttttctggctgaataa

SEQ ID NO: 30375 - DNA, 40 bp, Homo sapiens
ttattcagccagaaaaaggaatgaaggaatgatcaacaag

SEQ ID NO: 30376 - DNA, 40 bp, Homo sapiens
ttgttgatcattccttcattcctttttctggctgaataat

SEQ ID NO: 30377 - DNA, 40 bp, Homo sapiens
attattcagccagaaaaaggaatgaaggaatgatcaacaa

SEQ ID NO: 30378 - DNA, 40 bp, Homo sapiens
tgttgatcattccttcattcctttttctggctgaataata

SEQ ID NO: 30379 - DNA, 40 bp, Homo sapiens
tattattcagccagaaaaaggaatgaaggaatgatcaaca

SEQ ID NO: 30380 - DNA, 40 bp, Homo sapiens
gttgatcattccttcattcctttttctggctgaataatac

SEQ ID NO: 30381 - DNA, 40 bp, Homo sapiens
gtattattcagccagaaaaaggaatgaaggaatgatcaac

SEQ ID NO: 30382 - DNA, 40 bp, Homo sapiens
ttgatcattccttcattcctttttctggctgaataatact

SEQ ID NO: 30383 - DNA, 40 bp, Homo sapiens
agtattattcagccagaaaaaggaatgaaggaatgatcaa

SEQ ID NO: 30384 - DNA, 40 bp, Homo sapiens
tgatcattccttcattcctttttctggctgaataatactc

SEQ ID NO: 30385 - DNA, 40 bp, Homo sapiens
gagtattattcagccagaaaaaggaatgaaggaatgatca

SEQ ID NO: 30386 - DNA, 40 bp, Homo sapiens
gatcattccttcattcctttttctggctgaataatactct

SEQ ID NO: 30387 - DNA, 40 bp, Homo sapiens
agagtattattcagccagaaaaaggaatgaaggaatgatc

SEQ ID NO: 30388 - DNA, 40 bp, Homo sapiens
atcattccttcattcctttttctggctgaataatactctg

SEQ ID NO: 30389 - DNA, 40 bp, Homo sapiens
cagagtattattcagccagaaaaaggaatgaaggaatgat

SEQ ID NO: 30390 - DNA, 40 bp, Homo sapiens
tcattccttcattcctttttctggctgaataatactctgt

SEQ ID NO: 30391 - DNA, 40 bp, Homo sapiens
acagagtattattcagccagaaaaaggaatgaaggaatga

SEQ ID NO: 30392 - DNA, 40 bp, Homo sapiens
cattccttcattcctttttctggctgaataatactctgtt

SEQ ID NO: 30393 - DNA, 40 bp, Homo sapiens
aacagagtattattcagccagaaaaaggaatgaaggaatg

SEQ ID NO: 30394 - DNA, 40 bp, Homo sapiens
attccttcattcctttttctggctgaataatactctgtta

SEQ ID NO: 30395 - DNA, 40 bp, Homo sapiens
taacagagtattattcagccagaaaaaggaatgaaggaat

SEQ ID NO: 30396 - DNA, 40 bp, Homo sapiens
ttccttcattcctttttctggctgaataatactctgttat

SEQ ID NO: 30397 - DNA, 40 bp, Homo sapiens
ataacagagtattattcagccagaaaaaggaatgaaggaa

SEQ ID NO: 30398 - DNA, 40 bp, Homo sapiens
tccttcattcctttttctggctgaataatactctgttata

SEQ ID NO: 30399 - DNA, 40 bp, Homo sapiens
tataacagagtattattcagccagaaaaaggaatgaagga

SEQ ID NO: 30400 - DNA, 40 bp, Homo sapiens
ccttcattcctttttctggctgaataatactctgttatat

SEQ ID NO: 30401 - DNA, 40 bp, Homo sapiens
atataacagagtattattcagccagaaaaaggaatgaagg

SEQ ID NO: 30402 - DNA, 40 bp, Homo sapiens
cttcattcctttttctggctgaataatactctgttatatg

SEQ ID NO: 30403 - DNA, 40 bp, Homo sapiens
catataacagagtattattcagccagaaaaaggaatgaag

SEQ ID NO: 30404 - DNA, 40 bp, Homo sapiens
ttcattcctttttctggctgaataatactctgttatatgg

SEQ ID NO: 30405 - DNA, 40 bp, Homo sapiens
ccatataacagagtattattcagccagaaaaaggaatgaa

SEQ ID NO: 30406 - DNA, 40 bp, Homo sapiens
tcattcctttttctggctgaataatactctgttatatgga

SEQ ID NO: 30407 - DNA, 40 bp, Homo sapiens
tccatataacagagtattattcagccagaaaaaggaatga

SEQ ID NO: 30408 - DNA, 40 bp, Homo sapiens
cattcctttttctggctgaataatactctgttatatggat

SEQ ID NO: 30409 - DNA, 40 bp, Homo sapiens
atccatataacagagtattattcagccagaaaaaggaatg

SEQ ID NO: 30410 - DNA, 40 bp, Homo sapiens
attcctttttctggctgaataatactctgttatatggata

SEQ ID NO: 30411 - DNA, 40 bp, Homo sapiens
tatccatataacagagtattattcagccagaaaaaggaat

SEQ ID NO: 30412 - DNA, 40 bp, Homo sapiens
ttcctttttctggctgaataatactctgttatatggatat

SEQ ID NO: 30413 - DNA, 40 bp, Homo sapiens
atatccatataacagagtattattcagccagaaaaaggaa

SEQ ID NO: 30414 - DNA, 40 bp, Homo sapiens
tcctttttctggctgaataatactctgttatatggatata

SEQ ID NO: 30415 - DNA, 40 bp, Homo sapiens
tatatccatataacagagtattattcagccagaaaaagga

SEQ ID NO: 30416 - DNA, 40 bp, Homo sapiens
cctttttctggctgaataatactctgttatatggatatac

SEQ ID NO: 30417 - DNA, 40 bp, Homo sapiens
gtatatccatataacagagtattattcagccagaaaaagg

SEQ ID NO: 30418 - DNA, 40 bp, Homo sapiens
ctttttctggctgaataatactctgttatatggatatacc

SEQ ID NO: 30419 - DNA, 40 bp, Homo sapiens
ggtatatccatataacagagtattattcagccagaaaaag

SEQ ID NO: 30420 - DNA, 40 bp, Homo sapiens
tttttctggctgaataatactctgttatatggatatacct

SEQ ID NO: 30421 - DNA, 40 bp, Homo sapiens
aggtatatccatataacagagtattattcagccagaaaaa

SEQ ID NO: 30422 - DNA, 40 bp, Homo sapiens
ttttctggctgaataatactctgttatatggatatacctt

SEQ ID NO: 30423 - DNA, 40 bp, Homo sapiens
aaggtatatccatataacagagtattattcagccagaaaa

SEQ ID NO: 30424 - DNA, 40 bp, Homo sapiens
tttctggctgaataatactctgttatatggatatacctta

SEQ ID NO: 30425 - DNA, 40 bp, Homo sapiens
taaggtatatccatataacagagtattattcagccagaaa

SEQ ID NO: 30426 - DNA, 40 bp, Homo sapiens
ttctggctgaataatactctgttatatggatataccttat

SEQ ID NO: 30427 - DNA, 40 bp, Homo sapiens
ataaggtatatccatataacagagtattattcagccagaa

SEQ ID NO: 30428 - DNA, 40 bp, Homo sapiens
tctggctgaataatactctgttatatggatataccttatt

SEQ ID NO: 30429 - DNA, 40 bp, Homo sapiens
aataaggtatatccatataacagagtattattcagccaga

SEQ ID NO: 30430 - DNA, 40 bp, Homo sapiens
ctggctgaataatactctgttatatggatataccttattt

SEQ ID NO: 30431 - DNA, 40 bp, Homo sapiens
aaataaggtatatccatataacagagtattattcagccag

SEQ ID NO: 30432 - DNA, 40 bp, Homo sapiens
tggctgaataatactctgttatatggatataccttatttt

SEQ ID NO: 30433 - DNA, 40 bp, Homo sapiens
aaaataaggtatatccatataacagagtattattcagcca

SEQ ID NO: 30434 - DNA, 40 bp, Homo sapiens
ggctgaataatactctgttatatggatataccttattttg

SEQ ID NO: 30435 - DNA, 40 bp, Homo sapiens
caaaataaggtatatccatataacagagtattattcagcc

SEQ ID NO: 30436 - DNA, 40 bp, Homo sapiens
gctgaataatactctgttatatggatataccttattttgt

SEQ ID NO: 30437 - DNA, 40 bp, Homo sapiens
acaaaataaggtatatccatataacagagtattattcagc

SEQ ID NO: 30438 - DNA, 40 bp, Homo sapiens
ctgaataatactctgttatatggatataccttattttgtt

SEQ ID NO: 30439 - DNA, 40 bp, Homo sapiens
aacaaaataaggtatatccatataacagagtattattcag

SEQ ID NO: 30440 - DNA, 40 bp, Homo sapiens
tgaataatactctgttatatggatataccttattttgttt

SEQ ID NO: 30441 - DNA, 40 bp, Homo sapiens
aaacaaaataaggtatatccatataacagagtattattca

SEQ ID NO: 30442 - DNA, 40 bp, Homo sapiens
gaataatactctgttatatggatataccttattttgttta

SEQ ID NO: 30443 - DNA, 40 bp, Homo sapiens
taaacaaaataaggtatatccatataacagagtattattc

SEQ ID NO: 30444 - DNA, 40 bp, Homo sapiens
aataatactctgttatatggatataccttattttgtttat

SEQ ID NO: 30445 - DNA, 40 bp, Homo sapiens
ataaacaaaataaggtatatccatataacagagtattatt

SEQ ID NO: 30446 - DNA, 40 bp, Homo sapiens
ataatactctgttatatggatataccttattttgtttatc

SEQ ID NO: 30447 - DNA, 40 bp, Homo sapiens
gataaacaaaataaggtatatccatataacagagtattat

SEQ ID NO: 30448 - DNA, 40 bp, Homo sapiens
taatactctgttatatggatataccttattttgtttatct

SEQ ID NO: 30449 - DNA, 40 bp, Homo sapiens
agataaacaaaataaggtatatccatataacagagtatta

SEQ ID NO: 30450 - DNA, 40 bp, Homo sapiens
aatactctgttatatggatataccttattttgtttatctg

SEQ ID NO: 30451 - DNA, 40 bp, Homo sapiens
cagataaacaaaataaggtatatccatataacagagtatt

SEQ ID NO: 30452 - DNA, 40 bp, Homo sapiens
atactctgttatatggatataccttattttgtttatctgt

SEQ ID NO: 30453 - DNA, 40 bp, Homo sapiens
acagataaacaaaataaggtatatccatataacagagtat

SEQ ID NO: 30454 - DNA, 40 bp, Homo sapiens
tactctgttatatggatataccttattttgtttatctgtt

SEQ ID NO: 30455 - DNA, 40 bp, Homo sapiens
aacagataaacaaaataaggtatatccatataacagagta

SEQ ID NO: 30456 - DNA, 40 bp, Homo sapiens
actctgttatatggatataccttattttgtttatctgttc

SEQ ID NO: 30457 - DNA, 40 bp, Homo sapiens
gaacagataaacaaaataaggtatatccatataacagagt

SEQ ID NO: 30458 - DNA, 40 bp, Homo sapiens
ctctgttatatggatataccttattttgtttatctgttca

SEQ ID NO: 30459 - DNA, 40 bp, Homo sapiens
tgaacagataaacaaaataaggtatatccatataacagag

SEQ ID NO: 30460 - DNA, 40 bp, Homo sapiens
tctgttatatggatataccttattttgtttatctgttcat

SEQ ID NO: 30461 - DNA, 40 bp, Homo sapiens
atgaacagataaacaaaataaggtatatccatataacaga

SEQ ID NO: 30462 - DNA, 40 bp, Homo sapiens
ctgttatatggatataccttattttgtttatctgttcatt

SEQ ID NO: 30463 - DNA, 40 bp, Homo sapiens
aatgaacagataaacaaaataaggtatatccatataacag

SEQ ID NO: 30464 - DNA, 40 bp, Homo sapiens
tgttatatggatataccttattttgtttatctgttcattt

SEQ ID NO: 30465 - DNA, 40 bp, Homo sapiens
aaatgaacagataaacaaaataaggtatatccatataaca

SEQ ID NO: 30466 - DNA, 40 bp, Homo sapiens
gttatatggatataccttattttgtttatctgttcatttg

SEQ ID NO: 30467 - DNA, 40 bp, Homo sapiens
caaatgaacagataaacaaaataaggtatatccatataac

SEQ ID NO: 30468 - DNA, 40 bp, Homo sapiens
ttatatggatataccttattttgtttatctgttcatttga

SEQ ID NO: 30469 - DNA, 40 bp, Homo sapiens
tcaaatgaacagataaacaaaataaggtatatccatataa

SEQ ID NO: 30470 - DNA, 40 bp, Homo sapiens
tatatggatataccttattttgtttatctgttcatttgat

SEQ ID NO: 30471 - DNA, 40 bp, Homo sapiens
atcaaatgaacagataaacaaaataaggtatatccatata

SEQ ID NO: 30472 - DNA, 40 bp, Homo sapiens
atatggatataccttattttgtttatctgttcatttgatg

SEQ ID NO: 30473 - DNA, 40 bp, Homo sapiens
catcaaatgaacagataaacaaaataaggtatatccatat

SEQ ID NO: 30474 - DNA, 40 bp, Homo sapiens
tatggatataccttattttgtttatctgttcatttgatgg

SEQ ID NO: 30475 - DNA, 40 bp, Homo sapiens
ccatcaaatgaacagataaacaaaataaggtatatccata

SEQ ID NO: 30476 - DNA, 40 bp, Homo sapiens
atggatataccttattttgtttatctgttcatttgatggg

SEQ ID NO: 30477 - DNA, 40 bp, Homo sapiens
cccatcaaatgaacagataaacaaaataaggtatatccat

SEQ ID NO: 30478 - DNA, 40 bp, Homo sapiens
tggatataccttattttgtttatctgttcatttgatgggc

SEQ ID NO: 30479 - DNA, 40 bp, Homo sapiens
gcccatcaaatgaacagataaacaaaataaggtatatcca

SEQ ID NO: 30480 - DNA, 40 bp, Homo sapiens
ggatataccttattttgtttatctgttcatttgatgggca

SEQ ID NO: 30481 - DNA, 40 bp, Homo sapiens
tgcccatcaaatgaacagataaacaaaataaggtatatcc

SEQ ID NO: 30482 - DNA, 40 bp, Homo sapiens
gatataccttattttgtttatctgttcatttgatgggcat

SEQ ID NO: 30483 - DNA, 40 bp, Homo sapiens
atgcccatcaaatgaacagataaacaaaataaggtatatc

SEQ ID NO: 30484 - DNA, 40 bp, Homo sapiens
atataccttattttgtttatctgttcatttgatgggcatt

SEQ ID NO: 30485 - DNA, 40 bp, Homo sapiens
aatgcccatcaaatgaacagataaacaaaataaggtatat

SEQ ID NO: 30486 - DNA, 40 bp, Homo sapiens
tataccttattttgtttatctgttcatttgatgggcattt

SEQ ID NO: 30487 - DNA, 40 bp, Homo sapiens
aaatgcccatcaaatgaacagataaacaaaataaggtata

SEQ ID NO: 30488 - DNA, 40 bp, Homo sapiens
ataccttattttgtttatctgttcatttgatgggcatttg

SEQ ID NO: 30489 - DNA, 40 bp, Homo sapiens
caaatgcccatcaaatgaacagataaacaaaataaggtat

SEQ ID NO: 30490 - DNA, 40 bp, Homo sapiens
taccttattttgtttatctgttcatttgatgggcatttga

SEQ ID NO: 30491 - DNA, 40 bp, Homo sapiens
tcaaatgcccatcaaatgaacagataaacaaaataaggta

SEQ ID NO: 30492 - DNA, 40 bp, Homo sapiens
accttattttgtttatctgttcatttgatgggcatttgag

SEQ ID NO: 30493 - DNA, 40 bp, Homo sapiens
ctcaaatgcccatcaaatgaacagataaacaaaataaggt

SEQ ID NO: 30494 - DNA, 40 bp, Homo sapiens
ccttattttgtttatctgttcatttgatgggcatttgagt

SEQ ID NO: 30495 - DNA, 40 bp, Homo sapiens
actcaaatgcccatcaaatgaacagataaacaaaataagg

SEQ ID NO: 30496 - DNA, 40 bp, Homo sapiens
cttattttgtttatctgttcatttgatgggcatttgagtg

SEQ ID NO: 30497 - DNA, 40 bp, Homo sapiens
cactcaaatgcccatcaaatgaacagataaacaaaataag

SEQ ID NO: 30498 - DNA, 40 bp, Homo sapiens
ttattttgtttatctgttcatttgatgggcatttgagtga

SEQ ID NO: 30499 - DNA, 40 bp, Homo sapiens
tcactcaaatgcccatcaaatgaacagataaacaaaataa

SEQ ID NO: 30500 - DNA, 40 bp, Homo sapiens
tattttgtttatctgttcatttgatgggcatttgagtgat

SEQ ID NO: 30501 - DNA, 40 bp, Homo sapiens
atcactcaaatgcccatcaaatgaacagataaacaaaata

SEQ ID NO: 30502 - DNA, 40 bp, Homo sapiens
attttgtttatctgttcatttgatgggcatttgagtgatt

SEQ ID NO: 30503 - DNA, 40 bp, Homo sapiens
aatcactcaaatgcccatcaaatgaacagataaacaaaat

SEQ ID NO: 30504 - DNA, 40 bp, Homo sapiens
ttttgtttatctgttcatttgatgggcatttgagtgattt

SEQ ID NO: 30505 - DNA, 40 bp, Homo sapiens
aaatcactcaaatgcccatcaaatgaacagataaacaaaa

SEQ ID NO: 30506 - DNA, 40 bp, Homo sapiens
tttgtttatctgttcatttgatgggcatttgagtgatttc

SEQ ID NO: 30507 - DNA, 40 bp, Homo sapiens
gaaatcactcaaatgcccatcaaatgaacagataaacaaa

SEQ ID NO: 30508 - DNA, 40 bp, Homo sapiens
ttgtttatctgttcatttgatgggcatttgagtgatttcc

SEQ ID NO: 30509 - DNA, 40 bp, Homo sapiens
ggaaatcactcaaatgcccatcaaatgaacagataaacaa

SEQ ID NO: 30510 - DNA, 40 bp, Homo sapiens
tgtttatctgttcatttgatgggcatttgagtgatttcct

SEQ ID NO: 30511 - DNA, 40 bp, Homo sapiens
aggaaatcactcaaatgcccatcaaatgaacagataaaca

SEQ ID NO: 30512 - DNA, 40 bp, Homo sapiens
gtttatctgttcatttgatgggcatttgagtgatttcctc

SEQ ID NO: 30513 - DNA, 40 bp, Homo sapiens
gaggaaatcactcaaatgcccatcaaatgaacagataaac

SEQ ID NO: 30514 - DNA, 40 bp, Homo sapiens
tttatctgttcatttgatgggcatttgagtgatttcctct

SEQ ID NO: 30515 - DNA, 40 bp, Homo sapiens
agaggaaatcactcaaatgcccatcaaatgaacagataaa

SEQ ID NO: 30516 - DNA, 40 bp, Homo sapiens
ttatctgttcatttgatgggcatttgagtgatttcctctt

SEQ ID NO: 30517 - DNA, 40 bp, Homo sapiens
aagaggaaatcactcaaatgcccatcaaatgaacagataa

SEQ ID NO: 30518 - DNA, 40 bp, Homo sapiens
tatctgttcatttgatgggcatttgagtgatttcctcttt

SEQ ID NO: 30519 - DNA, 40 bp, Homo sapiens
aaagaggaaatcactcaaatgcccatcaaatgaacagata

SEQ ID NO: 30520 - DNA, 40 bp, Homo sapiens
atctgttcatttgatgggcatttgagtgatttcctctttt

SEQ ID NO: 30521 - DNA, 40 bp, Homo sapiens
aaaagaggaaatcactcaaatgcccatcaaatgaacagat

SEQ ID NO: 30522 - DNA, 40 bp, Homo sapiens
tctgttcatttgatgggcatttgagtgatttcctcttttt

SEQ ID NO: 30523 - DNA, 40 bp, Homo sapiens
aaaaagaggaaatcactcaaatgcccatcaaatgaacaga

SEQ ID NO: 30524 - DNA, 40 bp, Homo sapiens
ctgttcatttgatgggcatttgagtgatttcctctttttg

SEQ ID NO: 30525 - DNA, 40 bp, Homo sapiens
caaaaagaggaaatcactcaaatgcccatcaaatgaacag

SEQ ID NO: 30526 - DNA, 40 bp, Homo sapiens
tgttcatttgatgggcatttgagtgatttcctctttttgg

SEQ ID NO: 30527 - DNA, 40 bp, Homo sapiens
ccaaaaagaggaaatcactcaaatgcccatcaaatgaaca

SEQ ID NO: 30528 - DNA, 40 bp, Homo sapiens
gttcatttgatgggcatttgagtgatttcctctttttggc

SEQ ID NO: 30529 - DNA, 40 bp, Homo sapiens
gccaaaaagaggaaatcactcaaatgcccatcaaatgaac

SEQ ID NO: 30530 - DNA, 40 bp, Homo sapiens
ttcatttgatgggcatttgagtgatttcctctttttggca

SEQ ID NO: 30531 - DNA, 40 bp, Homo sapiens
tgccaaaaagaggaaatcactcaaatgcccatcaaatgaa

SEQ ID NO: 30532 - DNA, 40 bp, Homo sapiens
tcatttgatgggcatttgagtgatttcctctttttggcaa

SEQ ID NO: 30533 - DNA, 40 bp, Homo sapiens
ttgccaaaaagaggaaatcactcaaatgcccatcaaatga

SEQ ID NO: 30534 - DNA, 40 bp, Homo sapiens
catttgatgggcatttgagtgatttcctctttttggcaat

SEQ ID NO: 30535 - DNA, 40 bp, Homo sapiens
attgccaaaaagaggaaatcactcaaatgcccatcaaatg

SEQ ID NO: 30536 - DNA, 40 bp, Homo sapiens
atttgatgggcatttgagtgatttcctctttttggcaatt

SEQ ID NO: 30537 - DNA, 40 bp, Homo sapiens
aattgccaaaaagaggaaatcactcaaatgcccatcaaat

SEQ ID NO: 30538 - DNA, 40 bp, Homo sapiens
tttgatgggcatttgagtgatttcctctttttggcaattt

SEQ ID NO: 30539 - DNA, 40 bp, Homo sapiens
aaattgccaaaaagaggaaatcactcaaatgcccatcaaa

SEQ ID NO: 30540 - DNA, 40 bp, Homo sapiens
ttgatgggcatttgagtgatttcctctttttggcaatttt

SEQ ID NO: 30541 - DNA, 40 bp, Homo sapiens
aaaattgccaaaaagaggaaatcactcaaatgcccatcaa

SEQ ID NO: 30542 - DNA, 40 bp, Homo sapiens
tgatgggcatttgagtgatttcctctttttggcaattttg

SEQ ID NO: 30543 - DNA, 40 bp, Homo sapiens
caaaattgccaaaaagaggaaatcactcaaatgcccatca

SEQ ID NO: 30544 - DNA, 40 bp, Homo sapiens
gatgggcatttgagtgatttcctctttttggcaattttga

SEQ ID NO: 30545 - DNA, 40 bp, Homo sapiens
tcaaaattgccaaaaagaggaaatcactcaaatgcccatc

SEQ ID NO: 30546 - DNA, 40 bp, Homo sapiens
atgggcatttgagtgatttcctctttttggcaattttgaa

SEQ ID NO: 30547 - DNA, 40 bp, Homo sapiens
ttcaaaattgccaaaaagaggaaatcactcaaatgcccat

SEQ ID NO: 30548 - DNA, 40 bp, Homo sapiens
tgggcatttgagtgatttcctctttttggcaattttgaat

SEQ ID NO: 30549 - DNA, 40 bp, Homo sapiens
attcaaaattgccaaaaagaggaaatcactcaaatgccca

SEQ ID NO: 30550 - DNA, 40 bp, Homo sapiens
gggcatttgagtgatttcctctttttggcaattttgaata

SEQ ID NO: 30551 - DNA, 40 bp, Homo sapiens
tattcaaaattgccaaaaagaggaaatcactcaaatgccc

SEQ ID NO: 30552 - DNA, 40 bp, Homo sapiens
ggcatttgagtgatttcctctttttggcaattttgaataa

SEQ ID NO: 30553 - DNA, 40 bp, Homo sapiens
ttattcaaaattgccaaaaagaggaaatcactcaaatgcc

SEQ ID NO: 30554 - DNA, 40 bp, Homo sapiens
gcatttgagtgatttcctctttttggcaattttgaataat

SEQ ID NO: 30555 - DNA, 40 bp, Homo sapiens
attattcaaaattgccaaaaagaggaaatcactcaaatgc

SEQ ID NO: 30556 - DNA, 40 bp, Homo sapiens
catttgagtgatttcctctttttggcaattttgaataatg

SEQ ID NO: 30557 - DNA, 40 bp, Homo sapiens
cattattcaaaattgccaaaaagaggaaatcactcaaatg

SEQ ID NO: 30558 - DNA, 40 bp, Homo sapiens
atttgagtgatttcctctttttggcaattttgaataatgc

SEQ ID NO: 30559 - DNA, 40 bp, Homo sapiens
gcattattcaaaattgccaaaaagaggaaatcactcaaat

SEQ ID NO: 30560 - DNA, 40 bp, Homo sapiens
tttgagtgatttcctctttttggcaattttgaataatgcc

SEQ ID NO: 30561 - DNA, 40 bp, Homo sapiens
ggcattattcaaaattgccaaaaagaggaaatcactcaaa

SEQ ID NO: 30562 - DNA, 40 bp, Homo sapiens
ttgagtgatttcctctttttggcaattttgaataatgcca

SEQ ID NO: 30563 - DNA, 40 bp, Homo sapiens
tggcattattcaaaattgccaaaaagaggaaatcactcaa

SEQ ID NO: 30564 - DNA, 40 bp, Homo sapiens
tgagtgatttcctctttttggcaattttgaataatgccac

SEQ ID NO: 30565 - DNA, 40 bp, Homo sapiens
gtggcattattcaaaattgccaaaaagaggaaatcactca

SEQ ID NO: 30566 - DNA, 40 bp, Homo sapiens
gagtgatttcctctttttggcaattttgaataatgccact

SEQ ID NO: 30567 - DNA, 40 bp, Homo sapiens
agtggcattattcaaaattgccaaaaagaggaaatcactc

SEQ ID NO: 30568 - DNA, 40 bp, Homo sapiens
agtgatttcctctttttggcaattttgaataatgccacta

SEQ ID NO: 30569 - DNA, 40 bp, Homo sapiens
tagtggcattattcaaaattgccaaaaagaggaaatcact

SEQ ID NO: 30570 - DNA, 40 bp, Homo sapiens
gtgatttcctctttttggcaattttgaataatgccactat

SEQ ID NO: 30571 - DNA, 40 bp, Homo sapiens
atagtggcattattcaaaattgccaaaaagaggaaatcac

SEQ ID NO: 30572 - DNA, 40 bp, Homo sapiens
tgatttcctctttttggcaattttgaataatgccactata

SEQ ID NO: 30573 - DNA, 40 bp, Homo sapiens
tatagtggcattattcaaaattgccaaaaagaggaaatca

SEQ ID NO: 30574 - DNA, 40 bp, Homo sapiens
gatttcctctttttggcaattttgaataatgccactataa

SEQ ID NO: 30575 - DNA, 40 bp, Homo sapiens
ttatagtggcattattcaaaattgccaaaaagaggaaatc

SEQ ID NO: 30576 - DNA, 40 bp, Homo sapiens
atttcctctttttggcaattttgaataatgccactataaa

SEQ ID NO: 30577 - DNA, 40 bp, Homo sapiens
tttatagtggcattattcaaaattgccaaaaagaggaaat

SEQ ID NO: 30578 - DNA, 40 bp, Homo sapiens
tttcctctttttggcaattttgaataatgccactataaac

SEQ ID NO: 30579 - DNA, 40 bp, Homo sapiens
gtttatagtggcattattcaaaattgccaaaaagaggaaa

SEQ ID NO: 30580 - DNA, 40 bp, Homo sapiens
ttcctctttttggcaattttgaataatgccactataaaca

SEQ ID NO: 30581 - DNA, 40 bp, Homo sapiens
tgtttatagtggcattattcaaaattgccaaaaagaggaa

SEQ ID NO: 30582 - DNA, 40 bp, Homo sapiens
tcctctttttggcaattttgaataatgccactataaacat

SEQ ID NO: 30583 - DNA, 40 bp, Homo sapiens
atgtttatagtggcattattcaaaattgccaaaaagagga

SEQ ID NO: 30584 - DNA, 40 bp, Homo sapiens
cctctttttggcaattttgaataatgccactataaacatt

SEQ ID NO: 30585 - DNA, 40 bp, Homo sapiens
aatgtttatagtggcattattcaaaattgccaaaaagagg

SEQ ID NO: 30586 - DNA, 40 bp, Homo sapiens
ctctttttggcaattttgaataatgccactataaacattt

SEQ ID NO: 30587 - DNA, 40 bp, Homo sapiens
aaatgtttatagtggcattattcaaaattgccaaaaagag

SEQ ID NO: 30588 - DNA, 40 bp, Homo sapiens
tctttttggcaattttgaataatgccactataaacattta

SEQ ID NO: 30589 - DNA, 40 bp, Homo sapiens
taaatgtttatagtggcattattcaaaattgccaaaaaga

SEQ ID NO: 30590 - DNA, 40 bp, Homo sapiens
ctttttggcaattttgaataatgccactataaacatttat

SEQ ID NO: 30591 - DNA, 40 bp, Homo sapiens
ataaatgtttatagtggcattattcaaaattgccaaaaag

SEQ ID NO: 30592 - DNA, 40 bp, Homo sapiens
tttttggcaattttgaataatgccactataaacatttatg

SEQ ID NO: 30593 - DNA, 40 bp, Homo sapiens
cataaatgtttatagtggcattattcaaaattgccaaaaa

SEQ ID NO: 30594 - DNA, 40 bp, Homo sapiens
ttttggcaattttgaataatgccactataaacatttatgt

SEQ ID NO: 30595 - DNA, 40 bp, Homo sapiens
acataaatgtttatagtggcattattcaaaattgccaaaa

SEQ ID NO: 30596 - DNA, 40 bp, Homo sapiens
tttggcaattttgaataatgccactataaacatttatgta

SEQ ID NO: 30597 - DNA, 40 bp, Homo sapiens
tacataaatgtttatagtggcattattcaaaattgccaaa

SEQ ID NO: 30598 - DNA, 40 bp, Homo sapiens
ttggcaattttgaataatgccactataaacatttatgtac

SEQ ID NO: 30599 - DNA, 40 bp, Homo sapiens
gtacataaatgtttatagtggcattattcaaaattgccaa

SEQ ID NO: 30600 - DNA, 40 bp, Homo sapiens
tggcaattttgaataatgccactataaacatttatgtaca

SEQ ID NO: 30601 - DNA, 40 bp, Homo sapiens
tgtacataaatgtttatagtggcattattcaaaattgcca

SEQ ID NO: 30602 - DNA, 40 bp, Homo sapiens
ggcaattttgaataatgccactataaacatttatgtacac

SEQ ID NO: 30603 - DNA, 40 bp, Homo sapiens
gtgtacataaatgtttatagtggcattattcaaaattgcc

SEQ ID NO: 30604 - DNA, 40 bp, Homo sapiens
gcaattttgaataatgccactataaacatttatgtacacg

SEQ ID NO: 30605 - DNA, 40 bp, Homo sapiens
cgtgtacataaatgtttatagtggcattattcaaaattgc

SEQ ID NO: 30606 - DNA, 40 bp, Homo sapiens
caattttgaataatgccactataaacatttatgtacacgt

SEQ ID NO: 30607 - DNA, 40 bp, Homo sapiens
acgtgtacataaatgtttatagtggcattattcaaaattg

SEQ ID NO: 30608 - DNA, 40 bp, Homo sapiens
aattttgaataatgccactataaacatttatgtacacgtt

SEQ ID NO: 30609 - DNA, 40 bp, Homo sapiens
aacgtgtacataaatgtttatagtggcattattcaaaatt

SEQ ID NO: 30610 - DNA, 40 bp, Homo sapiens
attttgaataatgccactataaacatttatgtacacgttt

SEQ ID NO: 30611 - DNA, 40 bp, Homo sapiens
aaacgtgtacataaatgtttatagtggcattattcaaaat

SEQ ID NO: 30612 - DNA, 40 bp, Homo sapiens
ttttgaataatgccactataaacatttatgtacacgtttt

SEQ ID NO: 30613 - DNA, 40 bp, Homo sapiens
aaaacgtgtacataaatgtttatagtggcattattcaaaa

SEQ ID NO: 30614 - DNA, 40 bp, Homo sapiens
tttgaataatgccactataaacatttatgtacacgttttt

SEQ ID NO: 30615 - DNA, 40 bp, Homo sapiens
aaaaacgtgtacataaatgtttatagtggcattattcaaa

SEQ ID NO: 30616 - DNA, 40 bp, Homo sapiens
ttgaataatgccactataaacatttatgtacacgtttttg

SEQ ID NO: 30617 - DNA, 40 bp, Homo sapiens
caaaaacgtgtacataaatgtttatagtggcattattcaa

SEQ ID NO: 30618 - DNA, 40 bp, Homo sapiens
tgaataatgccactataaacatttatgtacacgtttttgt

SEQ ID NO: 30619 - DNA, 40 bp, Homo sapiens
acaaaaacgtgtacataaatgtttatagtggcattattca

SEQ ID NO: 30620 - DNA, 40 bp, Homo sapiens
gaataatgccactataaacatttatgtacacgtttttgtg

SEQ ID NO: 30621 - DNA, 40 bp, Homo sapiens
cacaaaaacgtgtacataaatgtttatagtggcattattc

SEQ ID NO: 30622 - DNA, 40 bp, Homo sapiens
aataatgccactataaacatttatgtacacgtttttgtgt

SEQ ID NO: 30623 - DNA, 40 bp, Homo sapiens
acacaaaaacgtgtacataaatgtttatagtggcattatt

SEQ ID NO: 30624 - DNA, 40 bp, Homo sapiens
ataatgccactataaacatttatgtacacgtttttgtgtg

SEQ ID NO: 30625 - DNA, 40 bp, Homo sapiens
cacacaaaaacgtgtacataaatgtttatagtggcattat

SEQ ID NO: 30626 - DNA, 40 bp, Homo sapiens
taatgccactataaacatttatgtacacgtttttgtgtga

SEQ ID NO: 30627 - DNA, 40 bp, Homo sapiens
tcacacaaaaacgtgtacataaatgtttatagtggcatta

SEQ ID NO: 30628 - DNA, 40 bp, Homo sapiens
aatgccactataaacatttatgtacacgtttttgtgtgac

SEQ ID NO: 30629 - DNA, 40 bp, Homo sapiens
gtcacacaaaaacgtgtacataaatgtttatagtggcatt

SEQ ID NO: 30630 - DNA, 40 bp, Homo sapiens
atgccactataaacatttatgtacacgtttttgtgtgacc

SEQ ID NO: 30631 - DNA, 40 bp, Homo sapiens
ggtcacacaaaaacgtgtacataaatgtttatagtggcat

SEQ ID NO: 30632 - DNA, 40 bp, Homo sapiens
tgccactataaacatttatgtacacgtttttgtgtgacca

SEQ ID NO: 30633 - DNA, 40 bp, Homo sapiens
tggtcacacaaaaacgtgtacataaatgtttatagtggca

SEQ ID NO: 30634 - DNA, 40 bp, Homo sapiens
gccactataaacatttatgtacacgtttttgtgtgaccat

SEQ ID NO: 30635 - DNA, 40 bp, Homo sapiens
atggtcacacaaaaacgtgtacataaatgtttatagtggc

SEQ ID NO: 30636 - DNA, 40 bp, Homo sapiens
ccactataaacatttatgtacacgtttttgtgtgaccata

SEQ ID NO: 30637 - DNA, 40 bp, Homo sapiens
tatggtcacacaaaaacgtgtacataaatgtttatagtgg

SEQ ID NO: 30638 - DNA, 40 bp, Homo sapiens
cactataaacatttatgtacacgtttttgtgtgaccatat

SEQ ID NO: 30639 - DNA, 40 bp, Homo sapiens
atatggtcacacaaaaacgtgtacataaatgtttatagtg

SEQ ID NO: 30640 - DNA, 40 bp, Homo sapiens
actataaacatttatgtacacgtttttgtgtgaccatatg

SEQ ID NO: 30641 - DNA, 40 bp, Homo sapiens
catatggtcacacaaaaacgtgtacataaatgtttatagt

SEQ ID NO: 30642 - DNA, 40 bp, Homo sapiens
ctataaacatttatgtacacgtttttgtgtgaccatatgt

SEQ ID NO: 30643 - DNA, 40 bp, Homo sapiens
acatatggtcacacaaaaacgtgtacataaatgtttatag

SEQ ID NO: 30644 - DNA, 40 bp, Homo sapiens
tataaacatttatgtacacgtttttgtgtgaccatatgtt

SEQ ID NO: 30645 - DNA, 40 bp, Homo sapiens
aacatatggtcacacaaaaacgtgtacataaatgtttata

SEQ ID NO: 30646 - DNA, 40 bp, Homo sapiens
ataaacatttatgtacacgtttttgtgtgaccatatgttt

SEQ ID NO: 30647 - DNA, 40 bp, Homo sapiens
aaacatatggtcacacaaaaacgtgtacataaatgtttat

SEQ ID NO: 30648 - DNA, 40 bp, Homo sapiens
taaacatttatgtacacgtttttgtgtgaccatatgtttt

SEQ ID NO: 30649 - DNA, 40 bp, Homo sapiens
aaaacatatggtcacacaaaaacgtgtacataaatgttta

SEQ ID NO: 30650 - DNA, 40 bp, Homo sapiens
aaacatttatgtacacgtttttgtgtgaccatatgttttc

SEQ ID NO: 30651 - DNA, 40 bp, Homo sapiens
gaaaacatatggtcacacaaaaacgtgtacataaatgttt

SEQ ID NO: 30652 - DNA, 40 bp, Homo sapiens
aacatttatgtacacgtttttgtgtgaccatatgttttca

SEQ ID NO: 30653 - DNA, 40 bp, Homo sapiens
tgaaaacatatggtcacacaaaaacgtgtacataaatgtt

SEQ ID NO: 30654 - DNA, 40 bp, Homo sapiens
acatttatgtacacgtttttgtgtgaccatatgttttcac

SEQ ID NO: 30655 - DNA, 40 bp, Homo sapiens
gtgaaaacatatggtcacacaaaaacgtgtacataaatgt

SEQ ID NO: 30656 - DNA, 40 bp, Homo sapiens
catttatgtacacgtttttgtgtgaccatatgttttcact

SEQ ID NO: 30657 - DNA, 40 bp, Homo sapiens
agtgaaaacatatggtcacacaaaaacgtgtacataaatg

SEQ ID NO: 30658 - DNA, 40 bp, Homo sapiens
atttatgtacacgtttttgtgtgaccatatgttttcactt

SEQ ID NO: 30659 - DNA, 40 bp, Homo sapiens
aagtgaaaacatatggtcacacaaaaacgtgtacataaat

SEQ ID NO: 30660 - DNA, 40 bp, Homo sapiens
tttatgtacacgtttttgtgtgaccatatgttttcacttc

SEQ ID NO: 30661 - DNA, 40 bp, Homo sapiens
gaagtgaaaacatatggtcacacaaaaacgtgtacataaa

SEQ ID NO: 30662 - DNA, 40 bp, Homo sapiens
ttatgtacacgtttttgtgtgaccatatgttttcacttct

SEQ ID NO: 30663 - DNA, 40 bp, Homo sapiens
agaagtgaaaacatatggtcacacaaaaacgtgtacataa

SEQ ID NO: 30664 - DNA, 40 bp, Homo sapiens
tatgtacacgtttttgtgtgaccatatgttttcacttctc

SEQ ID NO: 30665 - DNA, 40 bp, Homo sapiens
gagaagtgaaaacatatggtcacacaaaaacgtgtacata

SEQ ID NO: 30666 - DNA, 40 bp, Homo sapiens
atgtacacgtttttgtgtgaccatatgttttcacttctct

SEQ ID NO: 30667 - DNA, 40 bp, Homo sapiens
agagaagtgaaaacatatggtcacacaaaaacgtgtacat

SEQ ID NO: 30668 - DNA, 40 bp, Homo sapiens
tgtacacgtttttgtgtgaccatatgttttcacttctctc

SEQ ID NO: 30669 - DNA, 40 bp, Homo sapiens
gagagaagtgaaaacatatggtcacacaaaaacgtgtaca

SEQ ID NO: 30670 - DNA, 40 bp, Homo sapiens
gtacacgtttttgtgtgaccatatgttttcacttctctcg

SEQ ID NO: 30671 - DNA, 40 bp, Homo sapiens
cgagagaagtgaaaacatatggtcacacaaaaacgtgtac

SEQ ID NO: 30672 - DNA, 40 bp, Homo sapiens
tacacgtttttgtgtgaccatatgttttcacttctctcgg

SEQ ID NO: 30673 - DNA, 40 bp, Homo sapiens
ccgagagaagtgaaaacatatggtcacacaaaaacgtgta

SEQ ID NO: 30674 - DNA, 40 bp, Homo sapiens
acacgtttttgtgtgaccatatgttttcacttctctcggg

SEQ ID NO: 30675 - DNA, 40 bp, Homo sapiens
cccgagagaagtgaaaacatatggtcacacaaaaacgtgt

SEQ ID NO: 30676 - DNA, 40 bp, Homo sapiens
cacgtttttgtgtgaccatatgttttcacttctctcgggt

SEQ ID NO: 30677 - DNA, 40 bp, Homo sapiens
acccgagagaagtgaaaacatatggtcacacaaaaacgtg

SEQ ID NO: 30678 - DNA, 40 bp, Homo sapiens
acgtttttgtgtgaccatatgttttcacttctctcgggtg

SEQ ID NO: 30679 - DNA, 40 bp, Homo sapiens
cacccgagagaagtgaaaacatatggtcacacaaaaacgt

SEQ ID NO: 30680 - DNA, 40 bp, Homo sapiens
cgtttttgtgtgaccatatgttttcacttctctcgggtgt

SEQ ID NO: 30681 - DNA, 40 bp, Homo sapiens
acacccgagagaagtgaaaacatatggtcacacaaaaacg

SEQ ID NO: 30682 - DNA, 40 bp, Homo sapiens
gtttttgtgtgaccatatgttttcacttctctcgggtgta

SEQ ID NO: 30683 - DNA, 40 bp, Homo sapiens
tacacccgagagaagtgaaaacatatggtcacacaaaaac

SEQ ID NO: 30684 - DNA, 40 bp, Homo sapiens
tttttgtgtgaccatatgttttcacttctctcgggtgtat

SEQ ID NO: 30685 - DNA, 40 bp, Homo sapiens
atacacccgagagaagtgaaaacatatggtcacacaaaaa

SEQ ID NO: 30686 - DNA, 40 bp, Homo sapiens
ttttgtgtgaccatatgttttcacttctctcgggtgtata

SEQ ID NO: 30687 - DNA, 40 bp, Homo sapiens
tatacacccgagagaagtgaaaacatatggtcacacaaaa

SEQ ID NO: 30688 - DNA, 40 bp, Homo sapiens
tttgtgtgaccatatgttttcacttctctcgggtgtatat

SEQ ID NO: 30689 - DNA, 40 bp, Homo sapiens
atatacacccgagagaagtgaaaacatatggtcacacaaa

SEQ ID NO: 30690 - DNA, 40 bp, Homo sapiens
ttgtgtgaccatatgttttcacttctctcgggtgtatatc

SEQ ID NO: 30691 - DNA, 40 bp, Homo sapiens
gatatacacccgagagaagtgaaaacatatggtcacacaa

SEQ ID NO: 30692 - DNA, 40 bp, Homo sapiens
tgtgtgaccatatgttttcacttctctcgggtgtatatct

SEQ ID NO: 30693 - DNA, 40 bp, Homo sapiens
agatatacacccgagagaagtgaaaacatatggtcacaca

SEQ ID NO: 30694 - DNA, 40 bp, Homo sapiens
gtgtgaccatatgttttcacttctctcgggtgtatatcta

SEQ ID NO: 30695 - DNA, 40 bp, Homo sapiens
tagatatacacccgagagaagtgaaaacatatggtcacac

SEQ ID NO: 30696 - DNA, 40 bp, Homo sapiens
tgtgaccatatgttttcacttctctcgggtgtatatctaa

SEQ ID NO: 30697 - DNA, 40 bp, Homo sapiens
ttagatatacacccgagagaagtgaaaacatatggtcaca

SEQ ID NO: 30698 - DNA, 40 bp, Homo sapiens
gtgaccatatgttttcacttctctcgggtgtatatctaag

SEQ ID NO: 30699 - DNA, 40 bp, Homo sapiens
cttagatatacacccgagagaagtgaaaacatatggtcac

SEQ ID NO: 30700 - DNA, 40 bp, Homo sapiens
tgaccatatgttttcacttctctcgggtgtatatctaagg

SEQ ID NO: 30701 - DNA, 40 bp, Homo sapiens
ccttagatatacacccgagagaagtgaaaacatatggtca

SEQ ID NO: 30702 - DNA, 40 bp, Homo sapiens
gaccatatgttttcacttctctcgggtgtatatctaaggt

SEQ ID NO: 30703 - DNA, 40 bp, Homo sapiens
accttagatatacacccgagagaagtgaaaacatatggtc

SEQ ID NO: 30704 - DNA, 40 bp, Homo sapiens
accatatgttttcacttctctcgggtgtatatctaaggta

SEQ ID NO: 30705 - DNA, 40 bp, Homo sapiens
taccttagatatacacccgagagaagtgaaaacatatggt

SEQ ID NO: 30706 - DNA, 40 bp, Homo sapiens
ccatatgttttcacttctctcgggtgtatatctaaggtac

SEQ ID NO: 30707 - DNA, 40 bp, Homo sapiens
gtaccttagatatacacccgagagaagtgaaaacatatgg

SEQ ID NO: 30708 - DNA, 40 bp, Homo sapiens
catatgttttcacttctctcgggtgtatatctaaggtaca

SEQ ID NO: 30709 - DNA, 40 bp, Homo sapiens
tgtaccttagatatacacccgagagaagtgaaaacatatg

SEQ ID NO: 30710 - DNA, 40 bp, Homo sapiens
atatgttttcacttctctcgggtgtatatctaaggtacag

SEQ ID NO: 30711 - DNA, 40 bp, Homo sapiens
ctgtaccttagatatacacccgagagaagtgaaaacatat

SEQ ID NO: 30712 - DNA, 40 bp, Homo sapiens
tatgttttcacttctctcgggtgtatatctaaggtacagt

SEQ ID NO: 30713 - DNA, 40 bp, Homo sapiens
actgtaccttagatatacacccgagagaagtgaaaacata

SEQ ID NO: 30714 - DNA, 40 bp, Homo sapiens
atgttttcacttctctcgggtgtatatctaaggtacagtt

SEQ ID NO: 30715 - DNA, 40 bp, Homo sapiens
aactgtaccttagatatacacccgagagaagtgaaaacat

SEQ ID NO: 30716 - DNA, 40 bp, Homo sapiens
tgttttcacttctctcgggtgtatatctaaggtacagttg

SEQ ID NO: 30717 - DNA, 40 bp, Homo sapiens
caactgtaccttagatatacacccgagagaagtgaaaaca

SEQ ID NO: 30718 - DNA, 40 bp, Homo sapiens
gttttcacttctctcgggtgtatatctaaggtacagttgc

SEQ ID NO: 30719 - DNA, 40 bp, Homo sapiens
gcaactgtaccttagatatacacccgagagaagtgaaaac

SEQ ID NO: 30720 - DNA, 40 bp, Homo sapiens
ttttcacttctctcgggtgtatatctaaggtacagttgct

SEQ ID NO: 30721 - DNA, 40 bp, Homo sapiens
agcaactgtaccttagatatacacccgagagaagtgaaaa

SEQ ID NO: 30722 - DNA, 40 bp, Homo sapiens
tttcacttctctcgggtgtatatctaaggtacagttgctg

SEQ ID NO: 30723 - DNA, 40 bp, Homo sapiens
cagcaactgtaccttagatatacacccgagagaagtgaaa

SEQ ID NO: 30724 - DNA, 40 bp, Homo sapiens
ttcacttctctcgggtgtatatctaaggtacagttgctgg

SEQ ID NO: 30725 - DNA, 40 bp, Homo sapiens
ccagcaactgtaccttagatatacacccgagagaagtgaa

SEQ ID NO: 30726 - DNA, 40 bp, Homo sapiens
tcacttctctcgggtgtatatctaaggtacagttgctggg

SEQ ID NO: 30727 - DNA, 40 bp, Homo sapiens
cccagcaactgtaccttagatatacacccgagagaagtga

SEQ ID NO: 30728 - DNA, 40 bp, Homo sapiens
cacttctctcgggtgtatatctaaggtacagttgctgggt

SEQ ID NO: 30729 - DNA, 40 bp, Homo sapiens
acccagcaactgtaccttagatatacacccgagagaagtg

SEQ ID NO: 30730 - DNA, 40 bp, Homo sapiens
acttctctcgggtgtatatctaaggtacagttgctgggtt

SEQ ID NO: 30731 - DNA, 40 bp, Homo sapiens
aacccagcaactgtaccttagatatacacccgagagaagt

SEQ ID NO: 30732 - DNA, 40 bp, Homo sapiens
cttctctcgggtgtatatctaaggtacagttgctgggtta

SEQ ID NO: 30733 - DNA, 40 bp, Homo sapiens
taacccagcaactgtaccttagatatacacccgagagaag

SEQ ID NO: 30734 - DNA, 40 bp, Homo sapiens
ttctctcgggtgtatatctaaggtacagttgctgggttat

SEQ ID NO: 30735 - DNA, 40 bp, Homo sapiens
ataacccagcaactgtaccttagatatacacccgagagaa

SEQ ID NO: 30736 - DNA, 40 bp, Homo sapiens
tctctcgggtgtatatctaaggtacagttgctgggttata

SEQ ID NO: 30737 - DNA, 40 bp, Homo sapiens
tataacccagcaactgtaccttagatatacacccgagaga

SEQ ID NO: 30738 - DNA, 40 bp, Homo sapiens
ctctcgggtgtatatctaaggtacagttgctgggttatat

SEQ ID NO: 30739 - DNA, 40 bp, Homo sapiens
atataacccagcaactgtaccttagatatacacccgagag

SEQ ID NO: 30740 - DNA, 40 bp, Homo sapiens
tctcgggtgtatatctaaggtacagttgctgggttatatg

SEQ ID NO: 30741 - DNA, 40 bp, Homo sapiens
catataacccagcaactgtaccttagatatacacccgaga

SEQ ID NO: 30742 - DNA, 40 bp, Homo sapiens
ctcgggtgtatatctaaggtacagttgctgggttatatgg

SEQ ID NO: 30743 - DNA, 40 bp, Homo sapiens
ccatataacccagcaactgtaccttagatatacacccgag

SEQ ID NO: 30744 - DNA, 40 bp, Homo sapiens
tcgggtgtatatctaaggtacagttgctgggttatatggt

SEQ ID NO: 30745 - DNA, 40 bp, Homo sapiens
accatataacccagcaactgtaccttagatatacacccga

SEQ ID NO: 30746 - DNA, 40 bp, Homo sapiens
cgggtgtatatctaaggtacagttgctgggttatatggta

SEQ ID NO: 30747 - DNA, 40 bp, Homo sapiens
taccatataacccagcaactgtaccttagatatacacccg

SEQ ID NO: 30748 - DNA, 40 bp, Homo sapiens
gggtgtatatctaaggtacagttgctgggttatatggtag

SEQ ID NO: 30749 - DNA, 40 bp, Homo sapiens
ctaccatataacccagcaactgtaccttagatatacaccc

SEQ ID NO: 30750 - DNA, 40 bp, Homo sapiens
ggtgtatatctaaggtacagttgctgggttatatggtagc

SEQ ID NO: 30751 - DNA, 40 bp, Homo sapiens
gctaccatataacccagcaactgtaccttagatatacacc

SEQ ID NO: 30752 - DNA, 40 bp, Homo sapiens
gtgtatatctaaggtacagttgctgggttatatggtagct

SEQ ID NO: 30753 - DNA, 40 bp, Homo sapiens
agctaccatataacccagcaactgtaccttagatatacac

SEQ ID NO: 30754 - DNA, 40 bp, Homo sapiens
tgtatatctaaggtacagttgctgggttatatggtagctc

SEQ ID NO: 30755 - DNA, 40 bp, Homo sapiens
gagctaccatataacccagcaactgtaccttagatataca

SEQ ID NO: 30756 - DNA, 40 bp, Homo sapiens
gtatatctaaggtacagttgctgggttatatggtagctct

SEQ ID NO: 30757 - DNA, 40 bp, Homo sapiens
agagctaccatataacccagcaactgtaccttagatatac

SEQ ID NO: 30758 - DNA, 40 bp, Homo sapiens
tatatctaaggtacagttgctgggttatatggtagctctg

SEQ ID NO: 30759 - DNA, 40 bp, Homo sapiens
cagagctaccatataacccagcaactgtaccttagatata

SEQ ID NO: 30760 - DNA, 40 bp, Homo sapiens
atatctaaggtacagttgctgggttatatggtagctctgt

SEQ ID NO: 30761 - DNA, 40 bp, Homo sapiens
acagagctaccatataacccagcaactgtaccttagatat

SEQ ID NO: 30762 - DNA, 40 bp, Homo sapiens
tatctaaggtacagttgctgggttatatggtagctctgtc

SEQ ID NO: 30763 - DNA, 40 bp, Homo sapiens
gacagagctaccatataacccagcaactgtaccttagata

SEQ ID NO: 30764 - DNA, 40 bp, Homo sapiens
atctaaggtacagttgctgggttatatggtagctctgtct

SEQ ID NO: 30765 - DNA, 40 bp, Homo sapiens
agacagagctaccatataacccagcaactgtaccttagat

SEQ ID NO: 30766 - DNA, 40 bp, Homo sapiens
tctaaggtacagttgctgggttatatggtagctctgtctt

SEQ ID NO: 30767 - DNA, 40 bp, Homo sapiens
aagacagagctaccatataacccagcaactgtaccttaga

SEQ ID NO: 30768 - DNA, 40 bp, Homo sapiens
ctaaggtacagttgctgggttatatggtagctctgtcttt

SEQ ID NO: 30769 - DNA, 40 bp, Homo sapiens
aaagacagagctaccatataacccagcaactgtaccttag

SEQ ID NO: 30770 - DNA, 40 bp, Homo sapiens
taaggtacagttgctgggttatatggtagctctgtctttg

SEQ ID NO: 30771 - DNA, 40 bp, Homo sapiens
caaagacagagctaccatataacccagcaactgtacctta

SEQ ID NO: 30772 - DNA, 40 bp, Homo sapiens
aaggtacagttgctgggttatatggtagctctgtctttga

SEQ ID NO: 30773 - DNA, 40 bp, Homo sapiens
tcaaagacagagctaccatataacccagcaactgtacctt

SEQ ID NO: 30774 - DNA, 40 bp, Homo sapiens
aggtacagttgctgggttatatggtagctctgtctttgac

SEQ ID NO: 30775 - DNA, 40 bp, Homo sapiens
gtcaaagacagagctaccatataacccagcaactgtacct

SEQ ID NO: 30776 - DNA, 40 bp, Homo sapiens
ggtacagttgctgggttatatggtagctctgtctttgact

SEQ ID NO: 30777 - DNA, 40 bp, Homo sapiens
agtcaaagacagagctaccatataacccagcaactgtacc

SEQ ID NO: 30778 - DNA, 40 bp, Homo sapiens
gtacagttgctgggttatatggtagctctgtctttgactt

SEQ ID NO: 30779 - DNA, 40 bp, Homo sapiens
aagtcaaagacagagctaccatataacccagcaactgtac

SEQ ID NO: 30780 - DNA, 40 bp, Homo sapiens
tacagttgctgggttatatggtagctctgtctttgacttt

SEQ ID NO: 30781 - DNA, 40 bp, Homo sapiens
aaagtcaaagacagagctaccatataacccagcaactgta

SEQ ID NO: 30782 - DNA, 40 bp, Homo sapiens
acagttgctgggttatatggtagctctgtctttgactttt

SEQ ID NO: 30783 - DNA, 40 bp, Homo sapiens
aaaagtcaaagacagagctaccatataacccagcaactgt

SEQ ID NO: 30784 - DNA, 40 bp, Homo sapiens
cagttgctgggttatatggtagctctgtctttgacttttt

SEQ ID NO: 30785 - DNA, 40 bp, Homo sapiens
aaaaagtcaaagacagagctaccatataacccagcaactg

SEQ ID NO: 30786 - DNA, 40 bp, Homo sapiens
agttgctgggttatatggtagctctgtctttgactttttg

SEQ ID NO: 30787 - DNA, 40 bp, Homo sapiens
caaaaagtcaaagacagagctaccatataacccagcaact

SEQ ID NO: 30788 - DNA, 40 bp, Homo sapiens
gttgctgggttatatggtagctctgtctttgactttttga

SEQ ID NO: 30789 - DNA, 40 bp, Homo sapiens
tcaaaaagtcaaagacagagctaccatataacccagcaac

SEQ ID NO: 30790 - DNA, 40 bp, Homo sapiens
ttgctgggttatatggtagctctgtctttgactttttgag

SEQ ID NO: 30791 - DNA, 40 bp, Homo sapiens
ctcaaaaagtcaaagacagagctaccatataacccagcaa

SEQ ID NO: 30792 - DNA, 40 bp, Homo sapiens
tgctgggttatatggtagctctgtctttgactttttgagg

SEQ ID NO: 30793 - DNA, 40 bp, Homo sapiens
cctcaaaaagtcaaagacagagctaccatataacccagca

SEQ ID NO: 30794 - DNA, 40 bp, Homo sapiens
gctgggttatatggtagctctgtctttgactttttgagga

SEQ ID NO: 30795 - DNA, 40 bp, Homo sapiens
tcctcaaaaagtcaaagacagagctaccatataacccagc

SEQ ID NO: 30796 - DNA, 40 bp, Homo sapiens
ctgggttatatggtagctctgtctttgactttttgaggaa

SEQ ID NO: 30797 - DNA, 40 bp, Homo sapiens
ttcctcaaaaagtcaaagacagagctaccatataacccag

SEQ ID NO: 30798 - DNA, 40 bp, Homo sapiens
tgggttatatggtagctctgtctttgactttttgaggaac

SEQ ID NO: 30799 - DNA, 40 bp, Homo sapiens
gttcctcaaaaagtcaaagacagagctaccatataaccca

SEQ ID NO: 30800 - DNA, 40 bp, Homo sapiens
gggttatatggtagctctgtctttgactttttgaggaact

SEQ ID NO: 30801 - DNA, 40 bp, Homo sapiens
agttcctcaaaaagtcaaagacagagctaccatataaccc

SEQ ID NO: 30802 - DNA, 40 bp, Homo sapiens
ggttatatggtagctctgtctttgactttttgaggaactg

SEQ ID NO: 30803 - DNA, 40 bp, Homo sapiens
cagttcctcaaaaagtcaaagacagagctaccatataacc

SEQ ID NO: 30804 - DNA, 40 bp, Homo sapiens
gttatatggtagctctgtctttgactttttgaggaactgc

SEQ ID NO: 30805 - DNA, 40 bp, Homo sapiens
gcagttcctcaaaaagtcaaagacagagctaccatataac

SEQ ID NO: 30806 - DNA, 40 bp, Homo sapiens
ttatatggtagctctgtctttgactttttgaggaactgcc

SEQ ID NO: 30807 - DNA, 40 bp, Homo sapiens
ggcagttcctcaaaaagtcaaagacagagctaccatataa

SEQ ID NO: 30808 - DNA, 40 bp, Homo sapiens
tatatggtagctctgtctttgactttttgaggaactgcca

SEQ ID NO: 30809 - DNA, 40 bp, Homo sapiens
tggcagttcctcaaaaagtcaaagacagagctaccatata

SEQ ID NO: 30810 - DNA, 40 bp, Homo sapiens
atatggtagctctgtctttgactttttgaggaactgccaa

SEQ ID NO: 30811 - DNA, 40 bp, Homo sapiens
ttggcagttcctcaaaaagtcaaagacagagctaccatat

SEQ ID NO: 30812 - DNA, 40 bp, Homo sapiens
tatggtagctctgtctttgactttttgaggaactgccaag

SEQ ID NO: 30813 - DNA, 40 bp, Homo sapiens
cttggcagttcctcaaaaagtcaaagacagagctaccata

SEQ ID NO: 30814 - DNA, 40 bp, Homo sapiens
atggtagctctgtctttgactttttgaggaactgccaagt

SEQ ID NO: 30815 - DNA, 40 bp, Homo sapiens
acttggcagttcctcaaaaagtcaaagacagagctaccat

SEQ ID NO: 30816 - DNA, 40 bp, Homo sapiens
tggtagctctgtctttgactttttgaggaactgccaagtg

SEQ ID NO: 30817 - DNA, 40 bp, Homo sapiens
cacttggcagttcctcaaaaagtcaaagacagagctacca

SEQ ID NO: 30818 - DNA, 40 bp, Homo sapiens
ggtagctctgtctttgactttttgaggaactgccaagtgg

SEQ ID NO: 30819 - DNA, 40 bp, Homo sapiens
ccacttggcagttcctcaaaaagtcaaagacagagctacc

SEQ ID NO: 30820 - DNA, 40 bp, Homo sapiens
gtagctctgtctttgactttttgaggaactgccaagtggt

SEQ ID NO: 30821 - DNA, 40 bp, Homo sapiens
accacttggcagttcctcaaaaagtcaaagacagagctac

SEQ ID NO: 30822 - DNA, 40 bp, Homo sapiens
tagctctgtctttgactttttgaggaactgccaagtggtt

SEQ ID NO: 30823 - DNA, 40 bp, Homo sapiens
aaccacttggcagttcctcaaaaagtcaaagacagagcta

SEQ ID NO: 30824 - DNA, 40 bp, Homo sapiens
agctctgtctttgactttttgaggaactgccaagtggttt

SEQ ID NO: 30825 - DNA, 40 bp, Homo sapiens
aaaccacttggcagttcctcaaaaagtcaaagacagagct

SEQ ID NO: 30826 - DNA, 40 bp, Homo sapiens
gctctgtctttgactttttgaggaactgccaagtggtttt

SEQ ID NO: 30827 - DNA, 40 bp, Homo sapiens
aaaaccacttggcagttcctcaaaaagtcaaagacagagc

SEQ ID NO: 30828 - DNA, 40 bp, Homo sapiens
ctctgtctttgactttttgaggaactgccaagtggttttg

SEQ ID NO: 30829 - DNA, 40 bp, Homo sapiens
caaaaccacttggcagttcctcaaaaagtcaaagacagag

SEQ ID NO: 30830 - DNA, 40 bp, Homo sapiens
tctgtctttgactttttgaggaactgccaagtggttttgg

SEQ ID NO: 30831 - DNA, 40 bp, Homo sapiens
ccaaaaccacttggcagttcctcaaaaagtcaaagacaga

SEQ ID NO: 30832 - DNA, 40 bp, Homo sapiens
ctgtctttgactttttgaggaactgccaagtggttttggt

SEQ ID NO: 30833 - DNA, 40 bp, Homo sapiens
accaaaaccacttggcagttcctcaaaaagtcaaagacag

SEQ ID NO: 30834 - DNA, 40 bp, Homo sapiens
tgtctttgactttttgaggaactgccaagtggttttggta

SEQ ID NO: 30835 - DNA, 40 bp, Homo sapiens
taccaaaaccacttggcagttcctcaaaaagtcaaagaca

SEQ ID NO: 30836 - DNA, 40 bp, Homo sapiens
gtctttgactttttgaggaactgccaagtggttttggtag

SEQ ID NO: 30837 - DNA, 40 bp, Homo sapiens
ctaccaaaaccacttggcagttcctcaaaaagtcaaagac

SEQ ID NO: 30838 - DNA, 40 bp, Homo sapiens
tctttgactttttgaggaactgccaagtggttttggtagt

SEQ ID NO: 30839 - DNA, 40 bp, Homo sapiens
actaccaaaaccacttggcagttcctcaaaaagtcaaaga

SEQ ID NO: 30840 - DNA, 40 bp, Homo sapiens
ctttgactttttgaggaactgccaagtggttttggtagtg

SEQ ID NO: 30841 - DNA, 40 bp, Homo sapiens
cactaccaaaaccacttggcagttcctcaaaaagtcaaag

SEQ ID NO: 30842 - DNA, 40 bp, Homo sapiens
tttgactttttgaggaactgccaagtggttttggtagtga

SEQ ID NO: 30843 - DNA, 40 bp, Homo sapiens
tcactaccaaaaccacttggcagttcctcaaaaagtcaaa

SEQ ID NO: 30844 - DNA, 40 bp, Homo sapiens
ttgactttttgaggaactgccaagtggttttggtagtgat

SEQ ID NO: 30845 - DNA, 40 bp, Homo sapiens
atcactaccaaaaccacttggcagttcctcaaaaagtcaa

SEQ ID NO: 30846 - DNA, 40 bp, Homo sapiens
tgactttttgaggaactgccaagtggttttggtagtgatt

SEQ ID NO: 30847 - DNA, 40 bp, Homo sapiens
aatcactaccaaaaccacttggcagttcctcaaaaagtca

SEQ ID NO: 30848 - DNA, 40 bp, Homo sapiens
gactttttgaggaactgccaagtggttttggtagtgattg

SEQ ID NO: 30849 - DNA, 40 bp, Homo sapiens
caatcactaccaaaaccacttggcagttcctcaaaaagtc

SEQ ID NO: 30850 - DNA, 40 bp, Homo sapiens
actttttgaggaactgccaagtggttttggtagtgattgt

SEQ ID NO: 30851 - DNA, 40 bp, Homo sapiens
acaatcactaccaaaaccacttggcagttcctcaaaaagt

SEQ ID NO: 30852 - DNA, 40 bp, Homo sapiens
ctttttgaggaactgccaagtggttttggtagtgattgta

SEQ ID NO: 30853 - DNA, 40 bp, Homo sapiens
tacaatcactaccaaaaccacttggcagttcctcaaaaag

SEQ ID NO: 30854 - DNA, 40 bp, Homo sapiens
tttttgaggaactgccaagtggttttggtagtgattgtac

SEQ ID NO: 30855 - DNA, 40 bp, Homo sapiens
gtacaatcactaccaaaaccacttggcagttcctcaaaaa

SEQ ID NO: 30856 - DNA, 40 bp, Homo sapiens
ttttgaggaactgccaagtggttttggtagtgattgtact

SEQ ID NO: 30857 - DNA, 40 bp, Homo sapiens
agtacaatcactaccaaaaccacttggcagttcctcaaaa

SEQ ID NO: 30858 - DNA, 40 bp, Homo sapiens
tttgaggaactgccaagtggttttggtagtgattgtactg

SEQ ID NO: 30859 - DNA, 40 bp, Homo sapiens
cagtacaatcactaccaaaaccacttggcagttcctcaaa

SEQ ID NO: 30860 - DNA, 40 bp, Homo sapiens
ttgaggaactgccaagtggttttggtagtgattgtactgt

SEQ ID NO: 30861 - DNA, 40 bp, Homo sapiens
acagtacaatcactaccaaaaccacttggcagttcctcaa

SEQ ID NO: 30862 - DNA, 40 bp, Homo sapiens
tgaggaactgccaagtggttttggtagtgattgtactgtt

SEQ ID NO: 30863 - DNA, 40 bp, Homo sapiens
aacagtacaatcactaccaaaaccacttggcagttcctca

SEQ ID NO: 30864 - DNA, 40 bp, Homo sapiens
gaggaactgccaagtggttttggtagtgattgtactgttt

SEQ ID NO: 30865 - DNA, 40 bp, Homo sapiens
aaacagtacaatcactaccaaaaccacttggcagttcctc

SEQ ID NO: 30866 - DNA, 40 bp, Homo sapiens
aggaactgccaagtggttttggtagtgattgtactgttta

SEQ ID NO: 30867 - DNA, 40 bp, Homo sapiens
taaacagtacaatcactaccaaaaccacttggcagttcct

SEQ ID NO: 30868 - DNA, 40 bp, Homo sapiens
ggaactgccaagtggttttggtagtgattgtactgtttac

SEQ ID NO: 30869 - DNA, 40 bp, Homo sapiens
gtaaacagtacaatcactaccaaaaccacttggcagttcc

SEQ ID NO: 30870 - DNA, 40 bp, Homo sapiens
gaactgccaagtggttttggtagtgattgtactgtttaca

SEQ ID NO: 30871 - DNA, 40 bp, Homo sapiens
tgtaaacagtacaatcactaccaaaaccacttggcagttc

SEQ ID NO: 30872 - DNA, 40 bp, Homo sapiens
aactgccaagtggttttggtagtgattgtactgtttacat

SEQ ID NO: 30873 - DNA, 40 bp, Homo sapiens
atgtaaacagtacaatcactaccaaaaccacttggcagtt

SEQ ID NO: 30874 - DNA, 40 bp, Homo sapiens
actgccaagtggttttggtagtgattgtactgtttacatt

SEQ ID NO: 30875 - DNA, 40 bp, Homo sapiens
aatgtaaacagtacaatcactaccaaaaccacttggcagt

SEQ ID NO: 30876 - DNA, 40 bp, Homo sapiens
ctgccaagtggttttggtagtgattgtactgtttacattc

SEQ ID NO: 30877 - DNA, 40 bp, Homo sapiens
gaatgtaaacagtacaatcactaccaaaaccacttggcag

SEQ ID NO: 30878 - DNA, 40 bp, Homo sapiens
tgccaagtggttttggtagtgattgtactgtttacattcc

SEQ ID NO: 30879 - DNA, 40 bp, Homo sapiens
ggaatgtaaacagtacaatcactaccaaaaccacttggca

SEQ ID NO: 30880 - DNA, 40 bp, Homo sapiens
gccaagtggttttggtagtgattgtactgtttacattcct

SEQ ID NO: 30881 - DNA, 40 bp, Homo sapiens
aggaatgtaaacagtacaatcactaccaaaaccacttggc

SEQ ID NO: 30882 - DNA, 40 bp, Homo sapiens
ccaagtggttttggtagtgattgtactgtttacattccta

SEQ ID NO: 30883 - DNA, 40 bp, Homo sapiens
taggaatgtaaacagtacaatcactaccaaaaccacttgg

SEQ ID NO: 30884 - DNA, 40 bp, Homo sapiens
caagtggttttggtagtgattgtactgtttacattcctac

SEQ ID NO: 30885 - DNA, 40 bp, Homo sapiens
gtaggaatgtaaacagtacaatcactaccaaaaccacttg

SEQ ID NO: 30886 - DNA, 40 bp, Homo sapiens
aagtggttttggtagtgattgtactgtttacattcctacc

SEQ ID NO: 30887 - DNA, 40 bp, Homo sapiens
ggtaggaatgtaaacagtacaatcactaccaaaaccactt

SEQ ID NO: 30888 - DNA, 40 bp, Homo sapiens
agtggttttggtagtgattgtactgtttacattcctacca

SEQ ID NO: 30889 - DNA, 40 bp, Homo sapiens
tggtaggaatgtaaacagtacaatcactaccaaaaccact

SEQ ID NO: 30890 - DNA, 40 bp, Homo sapiens
gtggttttggtagtgattgtactgtttacattcctaccaa

SEQ ID NO: 30891 - DNA, 40 bp, Homo sapiens
ttggtaggaatgtaaacagtacaatcactaccaaaaccac

SEQ ID NO: 30892 - DNA, 40 bp, Homo sapiens
tggttttggtagtgattgtactgtttacattcctaccaac

SEQ ID NO: 30893 - DNA, 40 bp, Homo sapiens
gttggtaggaatgtaaacagtacaatcactaccaaaacca

SEQ ID NO: 30894 - DNA, 40 bp, Homo sapiens
ggttttggtagtgattgtactgtttacattcctaccaaca

SEQ ID NO: 30895 - DNA, 40 bp, Homo sapiens
tgttggtaggaatgtaaacagtacaatcactaccaaaacc

SEQ ID NO: 30896 - DNA, 40 bp, Homo sapiens
gttttggtagtgattgtactgtttacattcctaccaacaa

SEQ ID NO: 30897 - DNA, 40 bp, Homo sapiens
ttgttggtaggaatgtaaacagtacaatcactaccaaaac

SEQ ID NO: 30898 - DNA, 40 bp, Homo sapiens
ttttggtagtgattgtactgtttacattcctaccaacaat

SEQ ID NO: 30899 - DNA, 40 bp, Homo sapiens
attgttggtaggaatgtaaacagtacaatcactaccaaaa

SEQ ID NO: 30900 - DNA, 40 bp, Homo sapiens
tttggtagtgattgtactgtttacattcctaccaacaatt

SEQ ID NO: 30901 - DNA, 40 bp, Homo sapiens
aattgttggtaggaatgtaaacagtacaatcactaccaaa

SEQ ID NO: 30902 - DNA, 40 bp, Homo sapiens
ttggtagtgattgtactgtttacattcctaccaacaattt

SEQ ID NO: 30903 - DNA, 40 bp, Homo sapiens
aaattgttggtaggaatgtaaacagtacaatcactaccaa

SEQ ID NO: 30904 - DNA, 40 bp, Homo sapiens
tggtagtgattgtactgtttacattcctaccaacaatttt

SEQ ID NO: 30905 - DNA, 40 bp, Homo sapiens
aaaattgttggtaggaatgtaaacagtacaatcactacca

SEQ ID NO: 30906 - DNA, 40 bp, Homo sapiens
ggtagtgattgtactgtttacattcctaccaacaatttta

SEQ ID NO: 30907 - DNA, 40 bp, Homo sapiens
taaaattgttggtaggaatgtaaacagtacaatcactacc

SEQ ID NO: 30908 - DNA, 40 bp, Homo sapiens
gtagtgattgtactgtttacattcctaccaacaattttac

SEQ ID NO: 30909 - DNA, 40 bp, Homo sapiens
gtaaaattgttggtaggaatgtaaacagtacaatcactac

SEQ ID NO: 30910 - DNA, 40 bp, Homo sapiens
tagtgattgtactgtttacattcctaccaacaattttacc

SEQ ID NO: 30911 - DNA, 40 bp, Homo sapiens
ggtaaaattgttggtaggaatgtaaacagtacaatcacta

SEQ ID NO: 30912 - DNA, 40 bp, Homo sapiens
agtgattgtactgtttacattcctaccaacaattttacct

SEQ ID NO: 30913 - DNA, 40 bp, Homo sapiens
aggtaaaattgttggtaggaatgtaaacagtacaatcact

SEQ ID NO: 30914 - DNA, 40 bp, Homo sapiens
gtgattgtactgtttacattcctaccaacaattttaccta

SEQ ID NO: 30915 - DNA, 40 bp, Homo sapiens
taggtaaaattgttggtaggaatgtaaacagtacaatcac

SEQ ID NO: 30916 - DNA, 40 bp, Homo sapiens
tgattgtactgtttacattcctaccaacaattttacctaa

SEQ ID NO: 30917 - DNA, 40 bp, Homo sapiens
ttaggtaaaattgttggtaggaatgtaaacagtacaatca

SEQ ID NO: 30918 - DNA, 40 bp, Homo sapiens
gattgtactgtttacattcctaccaacaattttacctaag

SEQ ID NO: 30919 - DNA, 40 bp, Homo sapiens
cttaggtaaaattgttggtaggaatgtaaacagtacaatc

SEQ ID NO: 30920 - DNA, 40 bp, Homo sapiens
attgtactgtttacattcctaccaacaattttacctaagt

SEQ ID NO: 30921 - DNA, 40 bp, Homo sapiens
acttaggtaaaattgttggtaggaatgtaaacagtacaat

SEQ ID NO: 30922 - DNA, 40 bp, Homo sapiens
ttgtactgtttacattcctaccaacaattttacctaagta

SEQ ID NO: 30923 - DNA, 40 bp, Homo sapiens
tacttaggtaaaattgttggtaggaatgtaaacagtacaa

SEQ ID NO: 30924 - DNA, 40 bp, Homo sapiens
tgtactgtttacattcctaccaacaattttacctaagtat

SEQ ID NO: 30925 - DNA, 40 bp, Homo sapiens
atacttaggtaaaattgttggtaggaatgtaaacagtaca

SEQ ID NO: 30926 - DNA, 40 bp, Homo sapiens
gtactgtttacattcctaccaacaattttacctaagtatt

SEQ ID NO: 30927 - DNA, 40 bp, Homo sapiens
aatacttaggtaaaattgttggtaggaatgtaaacagtac

SEQ ID NO: 30928 - DNA, 40 bp, Homo sapiens
tactgtttacattcctaccaacaattttacctaagtattt

SEQ ID NO: 30929 - DNA, 40 bp, Homo sapiens
aaatacttaggtaaaattgttggtaggaatgtaaacagta

SEQ ID NO: 30930 - DNA, 40 bp, Homo sapiens
actgtttacattcctaccaacaattttacctaagtatttc

SEQ ID NO: 30931 - DNA, 40 bp, Homo sapiens
gaaatacttaggtaaaattgttggtaggaatgtaaacagt

SEQ ID NO: 30932 - DNA, 40 bp, Homo sapiens
ctgtttacattcctaccaacaattttacctaagtatttct

SEQ ID NO: 30933 - DNA, 40 bp, Homo sapiens
agaaatacttaggtaaaattgttggtaggaatgtaaacag

SEQ ID NO: 30934 - DNA, 40 bp, Homo sapiens
tgtttacattcctaccaacaattttacctaagtatttctc

SEQ ID NO: 30935 - DNA, 40 bp, Homo sapiens
gagaaatacttaggtaaaattgttggtaggaatgtaaaca

SEQ ID NO: 30936 - DNA, 40 bp, Homo sapiens
gtttacattcctaccaacaattttacctaagtatttctca

SEQ ID NO: 30937 - DNA, 40 bp, Homo sapiens
tgagaaatacttaggtaaaattgttggtaggaatgtaaac

SEQ ID NO: 30938 - DNA, 40 bp, Homo sapiens
tttacattcctaccaacaattttacctaagtatttctcaa

SEQ ID NO: 30939 - DNA, 40 bp, Homo sapiens
ttgagaaatacttaggtaaaattgttggtaggaatgtaaa

SEQ ID NO: 30940 - DNA, 40 bp, Homo sapiens
ttacattcctaccaacaattttacctaagtatttctcaaa

SEQ ID NO: 30941 - DNA, 40 bp, Homo sapiens
tttgagaaatacttaggtaaaattgttggtaggaatgtaa

SEQ ID NO: 30942 - DNA, 40 bp, Homo sapiens
tacattcctaccaacaattttacctaagtatttctcaaat

SEQ ID NO: 30943 - DNA, 40 bp, Homo sapiens
atttgagaaatacttaggtaaaattgttggtaggaatgta

SEQ ID NO: 30944 - DNA, 40 bp, Homo sapiens
acattcctaccaacaattttacctaagtatttctcaaatc

SEQ ID NO: 30945 - DNA, 40 bp, Homo sapiens
gatttgagaaatacttaggtaaaattgttggtaggaatgt

SEQ ID NO: 30946 - DNA, 40 bp, Homo sapiens
cattcctaccaacaattttacctaagtatttctcaaatct

SEQ ID NO: 30947 - DNA, 40 bp, Homo sapiens
agatttgagaaatacttaggtaaaattgttggtaggaatg

SEQ ID NO: 30948 - DNA, 40 bp, Homo sapiens
attcctaccaacaattttacctaagtatttctcaaatcta

SEQ ID NO: 30949 - DNA, 40 bp, Homo sapiens
tagatttgagaaatacttaggtaaaattgttggtaggaat

SEQ ID NO: 30950 - DNA, 40 bp, Homo sapiens
ttcctaccaacaattttacctaagtatttctcaaatctat

SEQ ID NO: 30951 - DNA, 40 bp, Homo sapiens
atagatttgagaaatacttaggtaaaattgttggtaggaa

SEQ ID NO: 30952 - DNA, 40 bp, Homo sapiens
tcctaccaacaattttacctaagtatttctcaaatctatt

SEQ ID NO: 30953 - DNA, 40 bp, Homo sapiens
aatagatttgagaaatacttaggtaaaattgttggtagga

SEQ ID NO: 30954 - DNA, 40 bp, Homo sapiens
cctaccaacaattttacctaagtatttctcaaatctattt

SEQ ID NO: 30955 - DNA, 40 bp, Homo sapiens
aaatagatttgagaaatacttaggtaaaattgttggtagg

SEQ ID NO: 30956 - DNA, 40 bp, Homo sapiens
ctaccaacaattttacctaagtatttctcaaatctattta

SEQ ID NO: 30957 - DNA, 40 bp, Homo sapiens
taaatagatttgagaaatacttaggtaaaattgttggtag

SEQ ID NO: 30958 - DNA, 40 bp, Homo sapiens
taccaacaattttacctaagtatttctcaaatctatttaa

SEQ ID NO: 30959 - DNA, 40 bp, Homo sapiens
ttaaatagatttgagaaatacttaggtaaaattgttggta

SEQ ID NO: 30960 - DNA, 40 bp, Homo sapiens
accaacaattttacctaagtatttctcaaatctatttaat

SEQ ID NO: 30961 - DNA, 40 bp, Homo sapiens
attaaatagatttgagaaatacttaggtaaaattgttggt

SEQ ID NO: 30962 - DNA, 40 bp, Homo sapiens
ccaacaattttacctaagtatttctcaaatctatttaatc

SEQ ID NO: 30963 - DNA, 40 bp, Homo sapiens
gattaaatagatttgagaaatacttaggtaaaattgttgg

SEQ ID NO: 30964 - DNA, 40 bp, Homo sapiens
caacaattttacctaagtatttctcaaatctatttaatct

SEQ ID NO: 30965 - DNA, 40 bp, Homo sapiens
agattaaatagatttgagaaatacttaggtaaaattgttg

SEQ ID NO: 30966 - DNA, 40 bp, Homo sapiens
aacaattttacctaagtatttctcaaatctatttaatctt

SEQ ID NO: 30967 - DNA, 40 bp, Homo sapiens
aagattaaatagatttgagaaatacttaggtaaaattgtt

SEQ ID NO: 30968 - DNA, 40 bp, Homo sapiens
acaattttacctaagtatttctcaaatctatttaatcttt

SEQ ID NO: 30969 - DNA, 40 bp, Homo sapiens
aaagattaaatagatttgagaaatacttaggtaaaattgt

SEQ ID NO: 30970 - DNA, 40 bp, Homo sapiens
caattttacctaagtatttctcaaatctatttaatctttt

SEQ ID NO: 30971 - DNA, 40 bp, Homo sapiens
aaaagattaaatagatttgagaaatacttaggtaaaattg

SEQ ID NO: 30972 - DNA, 40 bp, Homo sapiens
aattttacctaagtatttctcaaatctatttaatcttttc

SEQ ID NO: 30973 - DNA, 40 bp, Homo sapiens
gaaaagattaaatagatttgagaaatacttaggtaaaatt

SEQ ID NO: 30974 - DNA, 40 bp, Homo sapiens
attttacctaagtatttctcaaatctatttaatcttttcg

SEQ ID NO: 30975 - DNA, 40 bp, Homo sapiens
cgaaaagattaaatagatttgagaaatacttaggtaaaat

SEQ ID NO: 30976 - DNA, 40 bp, Homo sapiens
ttttacctaagtatttctcaaatctatttaatcttttcgg

SEQ ID NO: 30977 - DNA, 40 bp, Homo sapiens
ccgaaaagattaaatagatttgagaaatacttaggtaaaa

SEQ ID NO: 30978 - DNA, 40 bp, Homo sapiens
tttacctaagtatttctcaaatctatttaatcttttcggt

SEQ ID NO: 30979 - DNA, 40 bp, Homo sapiens
accgaaaagattaaatagatttgagaaatacttaggtaaa

SEQ ID NO: 30980 - DNA, 40 bp, Homo sapiens
ttacctaagtatttctcaaatctatttaatcttttcggtc

SEQ ID NO: 30981 - DNA, 40 bp, Homo sapiens
gaccgaaaagattaaatagatttgagaaatacttaggtaa

SEQ ID NO: 30982 - DNA, 40 bp, Homo sapiens
tacctaagtatttctcaaatctatttaatcttttcggtcc

SEQ ID NO: 30983 - DNA, 40 bp, Homo sapiens
ggaccgaaaagattaaatagatttgagaaatacttaggta

SEQ ID NO: 30984 - DNA, 40 bp, Homo sapiens
acctaagtatttctcaaatctatttaatcttttcggtcca

SEQ ID NO: 30985 - DNA, 40 bp, Homo sapiens
tggaccgaaaagattaaatagatttgagaaatacttaggt

SEQ ID NO: 30986 - DNA, 40 bp, Homo sapiens
cctaagtatttctcaaatctatttaatcttttcggtccat

SEQ ID NO: 30987 - DNA, 40 bp, Homo sapiens
atggaccgaaaagattaaatagatttgagaaatacttagg

SEQ ID NO: 30988 - DNA, 40 bp, Homo sapiens
ctaagtatttctcaaatctatttaatcttttcggtccata

SEQ ID NO: 30989 - DNA, 40 bp, Homo sapiens
tatggaccgaaaagattaaatagatttgagaaatacttag

SEQ ID NO: 30990 - DNA, 40 bp, Homo sapiens
taagtatttctcaaatctatttaatcttttcggtccatac

SEQ ID NO: 30991 - DNA, 40 bp, Homo sapiens
gtatggaccgaaaagattaaatagatttgagaaatactta

SEQ ID NO: 30992 - DNA, 40 bp, Homo sapiens
aagtatttctcaaatctatttaatcttttcggtccatact

SEQ ID NO: 30993 - DNA, 40 bp, Homo sapiens
agtatggaccgaaaagattaaatagatttgagaaatactt

SEQ ID NO: 30994 - DNA, 40 bp, Homo sapiens
agtatttctcaaatctatttaatcttttcggtccatactg

SEQ ID NO: 30995 - DNA, 40 bp, Homo sapiens
cagtatggaccgaaaagattaaatagatttgagaaatact

SEQ ID NO: 30996 - DNA, 40 bp, Homo sapiens
gtatttctcaaatctatttaatcttttcggtccatactgc

SEQ ID NO: 30997 - DNA, 40 bp, Homo sapiens
gcagtatggaccgaaaagattaaatagatttgagaaatac

SEQ ID NO: 30998 - DNA, 40 bp, Homo sapiens
tatttctcaaatctatttaatcttttcggtccatactgct

SEQ ID NO: 30999 - DNA, 40 bp, Homo sapiens
agcagtatggaccgaaaagattaaatagatttgagaaata

SEQ ID NO: 31000 - DNA, 40 bp, Homo sapiens
atttctcaaatctatttaatcttttcggtccatactgctg

SEQ ID NO: 31001 - DNA, 40 bp, Homo sapiens
cagcagtatggaccgaaaagattaaatagatttgagaaat

SEQ ID NO: 31002 - DNA, 40 bp, Homo sapiens
tttctcaaatctatttaatcttttcggtccatactgctgt

SEQ ID NO: 31003 - DNA, 40 bp, Homo sapiens
acagcagtatggaccgaaaagattaaatagatttgagaaa

SEQ ID NO: 31004 - DNA, 40 bp, Homo sapiens
ttctcaaatctatttaatcttttcggtccatactgctgtt

SEQ ID NO: 31005 - DNA, 40 bp, Homo sapiens
aacagcagtatggaccgaaaagattaaatagatttgagaa

SEQ ID NO: 31006 - DNA, 40 bp, Homo sapiens
tctcaaatctatttaatcttttcggtccatactgctgttg

SEQ ID NO: 31007 - DNA, 40 bp, Homo sapiens
caacagcagtatggaccgaaaagattaaatagatttgaga

SEQ ID NO: 31008 - DNA, 40 bp, Homo sapiens
ctcaaatctatttaatcttttcggtccatactgctgttgc

SEQ ID NO: 31009 - DNA, 40 bp, Homo sapiens
gcaacagcagtatggaccgaaaagattaaatagatttgag

SEQ ID NO: 31010 - DNA, 40 bp, Homo sapiens
tcaaatctatttaatcttttcggtccatactgctgttgct

SEQ ID NO: 31011 - DNA, 40 bp, Homo sapiens
agcaacagcagtatggaccgaaaagattaaatagatttga

SEQ ID NO: 31012 - DNA, 40 bp, Homo sapiens
caaatctatttaatcttttcggtccatactgctgttgctg

SEQ ID NO: 31013 - DNA, 40 bp, Homo sapiens
cagcaacagcagtatggaccgaaaagattaaatagatttg

SEQ ID NO: 31014 - DNA, 40 bp, Homo sapiens
aaatctatttaatcttttcggtccatactgctgttgctgc

SEQ ID NO: 31015 - DNA, 40 bp, Homo sapiens
gcagcaacagcagtatggaccgaaaagattaaatagattt

SEQ ID NO: 31016 - DNA, 40 bp, Homo sapiens
aatctatttaatcttttcggtccatactgctgttgctgcc

SEQ ID NO: 31017 - DNA, 40 bp, Homo sapiens
ggcagcaacagcagtatggaccgaaaagattaaatagatt

SEQ ID NO: 31018 - DNA, 40 bp, Homo sapiens
atctatttaatcttttcggtccatactgctgttgctgcct

SEQ ID NO: 31019 - DNA, 40 bp, Homo sapiens
aggcagcaacagcagtatggaccgaaaagattaaatagat

SEQ ID NO: 31020 - DNA, 40 bp, Homo sapiens
tctatttaatcttttcggtccatactgctgttgctgcctt

SEQ ID NO: 31021 - DNA, 40 bp, Homo sapiens
aaggcagcaacagcagtatggaccgaaaagattaaataga

SEQ ID NO: 31022 - DNA, 40 bp, Homo sapiens
ctatttaatcttttcggtccatactgctgttgctgcctta

SEQ ID NO: 31023 - DNA, 40 bp, Homo sapiens
taaggcagcaacagcagtatggaccgaaaagattaaatag

SEQ ID NO: 31024 - DNA, 40 bp, Homo sapiens
tatttaatcttttcggtccatactgctgttgctgccttag

SEQ ID NO: 31025 - DNA, 40 bp, Homo sapiens
ctaaggcagcaacagcagtatggaccgaaaagattaaata

SEQ ID NO: 31026 - DNA, 40 bp, Homo sapiens
atttaatcttttcggtccatactgctgttgctgccttagt

SEQ ID NO: 31027 - DNA, 40 bp, Homo sapiens
actaaggcagcaacagcagtatggaccgaaaagattaaat

SEQ ID NO: 31028 - DNA, 40 bp, Homo sapiens
tttaatcttttcggtccatactgctgttgctgccttagtt

SEQ ID NO: 31029 - DNA, 40 bp, Homo sapiens
aactaaggcagcaacagcagtatggaccgaaaagattaaa

SEQ ID NO: 31030 - DNA, 40 bp, Homo sapiens
ttaatcttttcggtccatactgctgttgctgccttagttc

SEQ ID NO: 31031 - DNA, 40 bp, Homo sapiens
gaactaaggcagcaacagcagtatggaccgaaaagattaa

SEQ ID NO: 31032 - DNA, 40 bp, Homo sapiens
taatcttttcggtccatactgctgttgctgccttagttca

SEQ ID NO: 31033 - DNA, 40 bp, Homo sapiens
tgaactaaggcagcaacagcagtatggaccgaaaagatta

SEQ ID NO: 31034 - DNA, 40 bp, Homo sapiens
aatcttttcggtccatactgctgttgctgccttagttcag

SEQ ID NO: 31035 - DNA, 40 bp, Homo sapiens
ctgaactaaggcagcaacagcagtatggaccgaaaagatt

SEQ ID NO: 31036 - DNA, 40 bp, Homo sapiens
atcttttcggtccatactgctgttgctgccttagttcaga

SEQ ID NO: 31037 - DNA, 40 bp, Homo sapiens
tctgaactaaggcagcaacagcagtatggaccgaaaagat

SEQ ID NO: 31038 - DNA, 40 bp, Homo sapiens
tcttttcggtccatactgctgttgctgccttagttcagat

SEQ ID NO: 31039 - DNA, 40 bp, Homo sapiens
atctgaactaaggcagcaacagcagtatggaccgaaaaga

SEQ ID NO: 31040 - DNA, 40 bp, Homo sapiens
cttttcggtccatactgctgttgctgccttagttcagatt

SEQ ID NO: 31041 - DNA, 40 bp, Homo sapiens
aatctgaactaaggcagcaacagcagtatggaccgaaaag

SEQ ID NO: 31042 - DNA, 40 bp, Homo sapiens
ttttcggtccatactgctgttgctgccttagttcagattt

SEQ ID NO: 31043 - DNA, 40 bp, Homo sapiens
aaatctgaactaaggcagcaacagcagtatggaccgaaaa

SEQ ID NO: 31044 - DNA, 40 bp, Homo sapiens
tttcggtccatactgctgttgctgccttagttcagatttt

SEQ ID NO: 31045 - DNA, 40 bp, Homo sapiens
aaaatctgaactaaggcagcaacagcagtatggaccgaaa

SEQ ID NO: 31046 - DNA, 40 bp, Homo sapiens
ttcggtccatactgctgttgctgccttagttcagattttg

SEQ ID NO: 31047 - DNA, 40 bp, Homo sapiens
caaaatctgaactaaggcagcaacagcagtatggaccgaa

SEQ ID NO: 31048 - DNA, 40 bp, Homo sapiens
tcggtccatactgctgttgctgccttagttcagattttgt

SEQ ID NO: 31049 - DNA, 40 bp, Homo sapiens
acaaaatctgaactaaggcagcaacagcagtatggaccga

SEQ ID NO: 31050 - DNA, 40 bp, Homo sapiens
cggtccatactgctgttgctgccttagttcagattttgtc

SEQ ID NO: 31051 - DNA, 40 bp, Homo sapiens
gacaaaatctgaactaaggcagcaacagcagtatggaccg

SEQ ID NO: 31052 - DNA, 40 bp, Homo sapiens
ggtccatactgctgttgctgccttagttcagattttgtca

SEQ ID NO: 31053 - DNA, 40 bp, Homo sapiens
tgacaaaatctgaactaaggcagcaacagcagtatggacc

SEQ ID NO: 31054 - DNA, 40 bp, Homo sapiens
gtccatactgctgttgctgccttagttcagattttgtcat

SEQ ID NO: 31055 - DNA, 40 bp, Homo sapiens
atgacaaaatctgaactaaggcagcaacagcagtatggac

SEQ ID NO: 31056 - DNA, 40 bp, Homo sapiens
tccatactgctgttgctgccttagttcagattttgtcatt

SEQ ID NO: 31057 - DNA, 40 bp, Homo sapiens
aatgacaaaatctgaactaaggcagcaacagcagtatgga

SEQ ID NO: 31058 - DNA, 40 bp, Homo sapiens
ccatactgctgttgctgccttagttcagattttgtcattt

SEQ ID NO: 31059 - DNA, 40 bp, Homo sapiens
aaatgacaaaatctgaactaaggcagcaacagcagtatgg

SEQ ID NO: 31060 - DNA, 40 bp, Homo sapiens
catactgctgttgctgccttagttcagattttgtcatttc

SEQ ID NO: 31061 - DNA, 40 bp, Homo sapiens
gaaatgacaaaatctgaactaaggcagcaacagcagtatg

SEQ ID NO: 31062 - DNA, 40 bp, Homo sapiens
atactgctgttgctgccttagttcagattttgtcatttct

SEQ ID NO: 31063 - DNA, 40 bp, Homo sapiens
agaaatgacaaaatctgaactaaggcagcaacagcagtat

SEQ ID NO: 31064 - DNA, 40 bp, Homo sapiens
tactgctgttgctgccttagttcagattttgtcatttctt

SEQ ID NO: 31065 - DNA, 40 bp, Homo sapiens
aagaaatgacaaaatctgaactaaggcagcaacagcagta

SEQ ID NO: 31066 - DNA, 40 bp, Homo sapiens
actgctgttgctgccttagttcagattttgtcatttcttg

SEQ ID NO: 31067 - DNA, 40 bp, Homo sapiens
caagaaatgacaaaatctgaactaaggcagcaacagcagt

SEQ ID NO: 31068 - DNA, 40 bp, Homo sapiens
ctgctgttgctgccttagttcagattttgtcatttcttgt

SEQ ID NO: 31069 - DNA, 40 bp, Homo sapiens
acaagaaatgacaaaatctgaactaaggcagcaacagcag

SEQ ID NO: 31070 - DNA, 40 bp, Homo sapiens
tgctgttgctgccttagttcagattttgtcatttcttgta

SEQ ID NO: 31071 - DNA, 40 bp, Homo sapiens
tacaagaaatgacaaaatctgaactaaggcagcaacagca

SEQ ID NO: 31072 - DNA, 40 bp, Homo sapiens
gctgttgctgccttagttcagattttgtcatttcttgtaa

SEQ ID NO: 31073 - DNA, 40 bp, Homo sapiens
ttacaagaaatgacaaaatctgaactaaggcagcaacagc

SEQ ID NO: 31074 - DNA, 40 bp, Homo sapiens
ctgttgctgccttagttcagattttgtcatttcttgtaat

SEQ ID NO: 31075 - DNA, 40 bp, Homo sapiens
attacaagaaatgacaaaatctgaactaaggcagcaacag

SEQ ID NO: 31076 - DNA, 40 bp, Homo sapiens
tgttgctgccttagttcagattttgtcatttcttgtaata

SEQ ID NO: 31077 - DNA, 40 bp, Homo sapiens
tattacaagaaatgacaaaatctgaactaaggcagcaaca

SEQ ID NO: 31078 - DNA, 40 bp, Homo sapiens
gttgctgccttagttcagattttgtcatttcttgtaataa

SEQ ID NO: 31079 - DNA, 40 bp, Homo sapiens
ttattacaagaaatgacaaaatctgaactaaggcagcaac

SEQ ID NO: 31080 - DNA, 40 bp, Homo sapiens
ttgctgccttagttcagattttgtcatttcttgtaataat

SEQ ID NO: 31081 - DNA, 40 bp, Homo sapiens
attattacaagaaatgacaaaatctgaactaaggcagcaa

SEQ ID NO: 31082 - DNA, 40 bp, Homo sapiens
tgctgccttagttcagattttgtcatttcttgtaataatt

SEQ ID NO: 31083 - DNA, 40 bp, Homo sapiens
aattattacaagaaatgacaaaatctgaactaaggcagca

SEQ ID NO: 31084 - DNA, 40 bp, Homo sapiens
gctgccttagttcagattttgtcatttcttgtaataattc

SEQ ID NO: 31085 - DNA, 40 bp, Homo sapiens
gaattattacaagaaatgacaaaatctgaactaaggcagc

SEQ ID NO: 31086 - DNA, 40 bp, Homo sapiens
ctgccttagttcagattttgtcatttcttgtaataattcg

SEQ ID NO: 31087 - DNA, 40 bp, Homo sapiens
cgaattattacaagaaatgacaaaatctgaactaaggcag

SEQ ID NO: 31088 - DNA, 40 bp, Homo sapiens
tgccttagttcagattttgtcatttcttgtaataattcgt

SEQ ID NO: 31089 - DNA, 40 bp, Homo sapiens
acgaattattacaagaaatgacaaaatctgaactaaggca

SEQ ID NO: 31090 - DNA, 40 bp, Homo sapiens
gccttagttcagattttgtcatttcttgtaataattcgta

SEQ ID NO: 31091 - DNA, 40 bp, Homo sapiens
tacgaattattacaagaaatgacaaaatctgaactaaggc

SEQ ID NO: 31092 - DNA, 40 bp, Homo sapiens
ccttagttcagattttgtcatttcttgtaataattcgtag

SEQ ID NO: 31093 - DNA, 40 bp, Homo sapiens
ctacgaattattacaagaaatgacaaaatctgaactaagg

SEQ ID NO: 31094 - DNA, 40 bp, Homo sapiens
cttagttcagattttgtcatttcttgtaataattcgtagc

SEQ ID NO: 31095 - DNA, 40 bp, Homo sapiens
gctacgaattattacaagaaatgacaaaatctgaactaag

SEQ ID NO: 31096 - DNA, 40 bp, Homo sapiens
ttagttcagattttgtcatttcttgtaataattcgtagct

SEQ ID NO: 31097 - DNA, 40 bp, Homo sapiens
agctacgaattattacaagaaatgacaaaatctgaactaa

SEQ ID NO: 31098 - DNA, 40 bp, Homo sapiens
tagttcagattttgtcatttcttgtaataattcgtagctc

SEQ ID NO: 31099 - DNA, 40 bp, Homo sapiens
gagctacgaattattacaagaaatgacaaaatctgaacta

SEQ ID NO: 31100 - DNA, 40 bp, Homo sapiens
agttcagattttgtcatttcttgtaataattcgtagctca

SEQ ID NO: 31101 - DNA, 40 bp, Homo sapiens
tgagctacgaattattacaagaaatgacaaaatctgaact

SEQ ID NO: 31102 - DNA, 40 bp, Homo sapiens
gttcagattttgtcatttcttgtaataattcgtagctcat

SEQ ID NO: 31103 - DNA, 40 bp, Homo sapiens
atgagctacgaattattacaagaaatgacaaaatctgaac

SEQ ID NO: 31104 - DNA, 40 bp, Homo sapiens
ttcagattttgtcatttcttgtaataattcgtagctcatc

SEQ ID NO: 31105 - DNA, 40 bp, Homo sapiens
gatgagctacgaattattacaagaaatgacaaaatctgaa

SEQ ID NO: 31106 - DNA, 40 bp, Homo sapiens
tcagattttgtcatttcttgtaataattcgtagctcatct

SEQ ID NO: 31107 - DNA, 40 bp, Homo sapiens
agatgagctacgaattattacaagaaatgacaaaatctga

SEQ ID NO: 31108 - DNA, 40 bp, Homo sapiens
cagattttgtcatttcttgtaataattcgtagctcatctc

SEQ ID NO: 31109 - DNA, 40 bp, Homo sapiens
gagatgagctacgaattattacaagaaatgacaaaatctg

SEQ ID NO: 31110 - DNA, 40 bp, Homo sapiens
agattttgtcatttcttgtaataattcgtagctcatctcc

SEQ ID NO: 31111 - DNA, 40 bp, Homo sapiens
ggagatgagctacgaattattacaagaaatgacaaaatct

SEQ ID NO: 31112 - DNA, 40 bp, Homo sapiens
gattttgtcatttcttgtaataattcgtagctcatctccc

SEQ ID NO: 31113 - DNA, 40 bp, Homo sapiens
gggagatgagctacgaattattacaagaaatgacaaaatc

SEQ ID NO: 31114 - DNA, 40 bp, Homo sapiens
attttgtcatttcttgtaataattcgtagctcatctccca

SEQ ID NO: 31115 - DNA, 40 bp, Homo sapiens
tgggagatgagctacgaattattacaagaaatgacaaaat

SEQ ID NO: 31116 - DNA, 40 bp, Homo sapiens
ttttgtcatttcttgtaataattcgtagctcatctcccag

SEQ ID NO: 31117 - DNA, 40 bp, Homo sapiens
ctgggagatgagctacgaattattacaagaaatgacaaaa

SEQ ID NO: 31118 - DNA, 40 bp, Homo sapiens
tttgtcatttcttgtaataattcgtagctcatctcccagt

SEQ ID NO: 31119 - DNA, 40 bp, Homo sapiens
actgggagatgagctacgaattattacaagaaatgacaaa

SEQ ID NO: 31120 - DNA, 40 bp, Homo sapiens
ttgtcatttcttgtaataattcgtagctcatctcccagtc

SEQ ID NO: 31121 - DNA, 40 bp, Homo sapiens
gactgggagatgagctacgaattattacaagaaatgacaa

SEQ ID NO: 31122 - DNA, 40 bp, Homo sapiens
tgtcatttcttgtaataattcgtagctcatctcccagtct

SEQ ID NO: 31123 - DNA, 40 bp, Homo sapiens
agactgggagatgagctacgaattattacaagaaatgaca

SEQ ID NO: 31124 - DNA, 40 bp, Homo sapiens
gtcatttcttgtaataattcgtagctcatctcccagtctc

SEQ ID NO: 31125 - DNA, 40 bp, Homo sapiens
gagactgggagatgagctacgaattattacaagaaatgac

SEQ ID NO: 31126 - DNA, 40 bp, Homo sapiens
tcatttcttgtaataattcgtagctcatctcccagtctct

SEQ ID NO: 31127 - DNA, 40 bp, Homo sapiens
agagactgggagatgagctacgaattattacaagaaatga

SEQ ID NO: 31128 - DNA, 40 bp, Homo sapiens
catttcttgtaataattcgtagctcatctcccagtctctg

SEQ ID NO: 31129 - DNA, 40 bp, Homo sapiens
cagagactgggagatgagctacgaattattacaagaaatg

SEQ ID NO: 31130 - DNA, 40 bp, Homo sapiens
atttcttgtaataattcgtagctcatctcccagtctctgc

SEQ ID NO: 31131 - DNA, 40 bp, Homo sapiens
gcagagactgggagatgagctacgaattattacaagaaat

SEQ ID NO: 31132 - DNA, 40 bp, Homo sapiens
tttcttgtaataattcgtagctcatctcccagtctctgct

SEQ ID NO: 31133 - DNA, 40 bp, Homo sapiens
agcagagactgggagatgagctacgaattattacaagaaa

SEQ ID NO: 31134 - DNA, 40 bp, Homo sapiens
ttcttgtaataattcgtagctcatctcccagtctctgctc

SEQ ID NO: 31135 - DNA, 40 bp, Homo sapiens
gagcagagactgggagatgagctacgaattattacaagaa

SEQ ID NO: 31136 - DNA, 40 bp, Homo sapiens
tcttgtaataattcgtagctcatctcccagtctctgctcc

SEQ ID NO: 31137 - DNA, 40 bp, Homo sapiens
ggagcagagactgggagatgagctacgaattattacaaga

SEQ ID NO: 31138 - DNA, 40 bp, Homo sapiens
cttgtaataattcgtagctcatctcccagtctctgctccc

SEQ ID NO: 31139 - DNA, 40 bp, Homo sapiens
gggagcagagactgggagatgagctacgaattattacaag

SEQ ID NO: 31140 - DNA, 40 bp, Homo sapiens
ttgtaataattcgtagctcatctcccagtctctgctcccc

SEQ ID NO: 31141 - DNA, 40 bp, Homo sapiens
ggggagcagagactgggagatgagctacgaattattacaa

SEQ ID NO: 31142 - DNA, 40 bp, Homo sapiens
tgtaataattcgtagctcatctcccagtctctgctcccct

SEQ ID NO: 31143 - DNA, 40 bp, Homo sapiens
aggggagcagagactgggagatgagctacgaattattaca

SEQ ID NO: 31144 - DNA, 40 bp, Homo sapiens
gtaataattcgtagctcatctcccagtctctgctcccctc

SEQ ID NO: 31145 - DNA, 40 bp, Homo sapiens
gaggggagcagagactgggagatgagctacgaattattac

SEQ ID NO: 31146 - DNA, 40 bp, Homo sapiens
taataattcgtagctcatctcccagtctctgctcccctct

SEQ ID NO: 31147 - DNA, 40 bp, Homo sapiens
agaggggagcagagactgggagatgagctacgaattatta

SEQ ID NO: 31148 - DNA, 40 bp, Homo sapiens
aataattcgtagctcatctcccagtctctgctcccctctc

SEQ ID NO: 31149 - DNA, 40 bp, Homo sapiens
gagaggggagcagagactgggagatgagctacgaattatt

SEQ ID NO: 31150 - DNA, 40 bp, Homo sapiens
ataattcgtagctcatctcccagtctctgctcccctctct

SEQ ID NO: 31151 - DNA, 40 bp, Homo sapiens
agagaggggagcagagactgggagatgagctacgaattat

SEQ ID NO: 31152 - DNA, 40 bp, Homo sapiens
taattcgtagctcatctcccagtctctgctcccctctctc

SEQ ID NO: 31153 - DNA, 40 bp, Homo sapiens
gagagaggggagcagagactgggagatgagctacgaatta

SEQ ID NO: 31154 - DNA, 40 bp, Homo sapiens
aattcgtagctcatctcccagtctctgctcccctctctcc

SEQ ID NO: 31155 - DNA, 40 bp, Homo sapiens
ggagagaggggagcagagactgggagatgagctacgaatt

SEQ ID NO: 31156 - DNA, 40 bp, Homo sapiens
attcgtagctcatctcccagtctctgctcccctctctccc

SEQ ID NO: 31157 - DNA, 40 bp, Homo sapiens
gggagagaggggagcagagactgggagatgagctacgaat

SEQ ID NO: 31158 - DNA, 40 bp, Homo sapiens
ttcgtagctcatctcccagtctctgctcccctctctccct

SEQ ID NO: 31159 - DNA, 40 bp, Homo sapiens
agggagagaggggagcagagactgggagatgagctacgaa

SEQ ID NO: 31160 - DNA, 40 bp, Homo sapiens
tcgtagctcatctcccagtctctgctcccctctctccctc

SEQ ID NO: 31161 - DNA, 40 bp, Homo sapiens
gagggagagaggggagcagagactgggagatgagctacga

SEQ ID NO: 31162 - DNA, 40 bp, Homo sapiens
cgtagctcatctcccagtctctgctcccctctctccctcc

SEQ ID NO: 31163 - DNA, 40 bp, Homo sapiens
ggagggagagaggggagcagagactgggagatgagctacg

SEQ ID NO: 31164 - DNA, 40 bp, Homo sapiens
gtagctcatctcccagtctctgctcccctctctccctccc

SEQ ID NO: 31165 - DNA, 40 bp, Homo sapiens
gggagggagagaggggagcagagactgggagatgagctac

SEQ ID NO: 31166 - DNA, 40 bp, Homo sapiens
tagctcatctcccagtctctgctcccctctctccctccct

SEQ ID NO: 31167 - DNA, 40 bp, Homo sapiens
agggagggagagaggggagcagagactgggagatgagcta

SEQ ID NO: 31168 - DNA, 40 bp, Homo sapiens
agctcatctcccagtctctgctcccctctctccctccctc

SEQ ID NO: 31169 - DNA, 40 bp, Homo sapiens
gagggagggagagaggggagcagagactgggagatgagct

SEQ ID NO: 31170 - DNA, 40 bp, Homo sapiens
gctcatctcccagtctctgctcccctctctccctccctcc

SEQ ID NO: 31171 - DNA, 40 bp, Homo sapiens
ggagggagggagagaggggagcagagactgggagatgagc

SEQ ID NO: 31172 - DNA, 40 bp, Homo sapiens
ctcatctcccagtctctgctcccctctctccctccctccc

SEQ ID NO: 31173 - DNA, 40 bp, Homo sapiens
gggagggagggagagaggggagcagagactgggagatgag

SEQ ID NO: 31174 - DNA, 40 bp, Homo sapiens
tcatctcccagtctctgctcccctctctccctccctcccc

SEQ ID NO: 31175 - DNA, 40 bp, Homo sapiens
ggggagggagggagagaggggagcagagactgggagatga

SEQ ID NO: 31176 - DNA, 40 bp, Homo sapiens
catctcccagtctctgctcccctctctccctccctccccc

SEQ ID NO: 31177 - DNA, 40 bp, Homo sapiens
gggggagggagggagagaggggagcagagactgggagatg

SEQ ID NO: 31178 - DNA, 40 bp, Homo sapiens
atctcccagtctctgctcccctctctccctccctccccct

SEQ ID NO: 31179 - DNA, 40 bp, Homo sapiens
agggggagggagggagagaggggagcagagactgggagat

SEQ ID NO: 31180 - DNA, 40 bp, Homo sapiens
tctcccagtctctgctcccctctctccctccctccccctt

SEQ ID NO: 31181 - DNA, 40 bp, Homo sapiens
aagggggagggagggagagaggggagcagagactgggaga

SEQ ID NO: 31182 - DNA, 40 bp, Homo sapiens
ctcccagtctctgctcccctctctccctccctcccccttc

SEQ ID NO: 31183 - DNA, 40 bp, Homo sapiens
gaagggggagggagggagagaggggagcagagactgggag

SEQ ID NO: 31184 - DNA, 40 bp, Homo sapiens
tcccagtctctgctcccctctctccctccctcccccttct

SEQ ID NO: 31185 - DNA, 40 bp, Homo sapiens
agaagggggagggagggagagaggggagcagagactggga

SEQ ID NO: 31186 - DNA, 40 bp, Homo sapiens
cccagtctctgctcccctctctccctccctcccccttctt

SEQ ID NO: 31187 - DNA, 40 bp, Homo sapiens
aagaagggggagggagggagagaggggagcagagactggg

SEQ ID NO: 31188 - DNA, 40 bp, Homo sapiens
ccagtctctgctcccctctctccctccctcccccttcttc

SEQ ID NO: 31189 - DNA, 40 bp, Homo sapiens
gaagaagggggagggagggagagaggggagcagagactgg

SEQ ID NO: 31190 - DNA, 40 bp, Homo sapiens
cagtctctgctcccctctctccctccctcccccttcttct

SEQ ID NO: 31191 - DNA, 40 bp, Homo sapiens
agaagaagggggagggagggagagaggggagcagagactg

SEQ ID NO: 31192 - DNA, 40 bp, Homo sapiens
agtctctgctcccctctctccctccctcccccttcttctc

SEQ ID NO: 31193 - DNA, 40 bp, Homo sapiens
gagaagaagggggagggagggagagaggggagcagagact

SEQ ID NO: 31194 - DNA, 40 bp, Homo sapiens
gtctctgctcccctctctccctccctcccccttcttctct

SEQ ID NO: 31195 - DNA, 40 bp, Homo sapiens
agagaagaagggggagggagggagagaggggagcagagac

SEQ ID NO: 31196 - DNA, 40 bp, Homo sapiens
tctctgctcccctctctccctccctcccccttcttctctc

SEQ ID NO: 31197 - DNA, 40 bp, Homo sapiens
gagagaagaagggggagggagggagagaggggagcagaga

SEQ ID NO: 31198 - DNA, 40 bp, Homo sapiens
ctctgctcccctctctccctccctcccccttcttctctct

SEQ ID NO: 31199 - DNA, 40 bp, Homo sapiens
agagagaagaagggggagggagggagagaggggagcagag

SEQ ID NO: 31200 - DNA, 40 bp, Homo sapiens
tctgctcccctctctccctccctcccccttcttctctctc

SEQ ID NO: 31201 - DNA, 40 bp, Homo sapiens
gagagagaagaagggggagggagggagagaggggagcaga

SEQ ID NO: 31202 - DNA, 40 bp, Homo sapiens
ctgctcccctctctccctccctcccccttcttctctctct

SEQ ID NO: 31203 - DNA, 40 bp, Homo sapiens
agagagagaagaagggggagggagggagagaggggagcag

SEQ ID NO: 31204 - DNA, 40 bp, Homo sapiens
tgctcccctctctccctccctcccccttcttctctctctt

SEQ ID NO: 31205 - DNA, 40 bp, Homo sapiens
aagagagagaagaagggggagggagggagagaggggagca

SEQ ID NO: 31206 - DNA, 40 bp, Homo sapiens
gctcccctctctccctccctcccccttcttctctctctta

SEQ ID NO: 31207 - DNA, 40 bp, Homo sapiens
taagagagagaagaagggggagggagggagagaggggagc

SEQ ID NO: 31208 - DNA, 40 bp, Homo sapiens
ctcccctctctccctccctcccccttcttctctctcttat

SEQ ID NO: 31209 - DNA, 40 bp, Homo sapiens
ataagagagagaagaagggggagggagggagagaggggag

SEQ ID NO: 31210 - DNA, 40 bp, Homo sapiens
tcccctctctccctccctcccccttcttctctctcttatt

SEQ ID NO: 31211 - DNA, 40 bp, Homo sapiens
aataagagagagaagaagggggagggagggagagagggga

SEQ ID NO: 31212 - DNA, 40 bp, Homo sapiens
cccctctctccctccctcccccttcttctctctcttattt

SEQ ID NO: 31213 - DNA, 40 bp, Homo sapiens
aaataagagagagaagaagggggagggagggagagagggg

SEQ ID NO: 31214 - DNA, 40 bp, Homo sapiens
ccctctctccctccctcccccttcttctctctcttatttc

SEQ ID NO: 31215 - DNA, 40 bp, Homo sapiens
gaaataagagagagaagaagggggagggagggagagaggg

SEQ ID NO: 31216 - DNA, 40 bp, Homo sapiens
cctctctccctccctcccccttcttctctctcttatttcc

SEQ ID NO: 31217 - DNA, 40 bp, Homo sapiens
ggaaataagagagagaagaagggggagggagggagagagg

SEQ ID NO: 31218 - DNA, 40 bp, Homo sapiens
ctctctccctccctcccccttcttctctctcttatttcca

SEQ ID NO: 31219 - DNA, 40 bp, Homo sapiens
tggaaataagagagagaagaagggggagggagggagagag

SEQ ID NO: 31220 - DNA, 40 bp, Homo sapiens
tctctccctccctcccccttcttctctctcttatttccac

SEQ ID NO: 31221 - DNA, 40 bp, Homo sapiens
gtggaaataagagagagaagaagggggagggagggagaga

SEQ ID NO: 31222 - DNA, 40 bp, Homo sapiens
ctctccctccctcccccttcttctctctcttatttccacc

SEQ ID NO: 31223 - DNA, 40 bp, Homo sapiens
ggtggaaataagagagagaagaagggggagggagggagag

SEQ ID NO: 31224 - DNA, 40 bp, Homo sapiens
tctccctccctcccccttcttctctctcttatttccaccc

SEQ ID NO: 31225 - DNA, 40 bp, Homo sapiens
gggtggaaataagagagagaagaagggggagggagggaga

SEQ ID NO: 31226 - DNA, 40 bp, Homo sapiens
ctccctccctcccccttcttctctctcttatttccaccca

SEQ ID NO: 31227 - DNA, 40 bp, Homo sapiens
tgggtggaaataagagagagaagaagggggagggagggag

SEQ ID NO: 31228 - DNA, 40 bp, Homo sapiens
tccctccctcccccttcttctctctcttatttccacccat

SEQ ID NO: 31229 - DNA, 40 bp, Homo sapiens
atgggtggaaataagagagagaagaagggggagggaggga

SEQ ID NO: 31230 - DNA, 40 bp, Homo sapiens
ccctccctcccccttcttctctctcttatttccacccatt

SEQ ID NO: 31231 - DNA, 40 bp, Homo sapiens
aatgggtggaaataagagagagaagaagggggagggaggg

SEQ ID NO: 31232 - DNA, 40 bp, Homo sapiens
cctccctcccccttcttctctctcttatttccacccattt

SEQ ID NO: 31233 - DNA, 40 bp, Homo sapiens
aaatgggtggaaataagagagagaagaagggggagggagg

SEQ ID NO: 31234 - DNA, 40 bp, Homo sapiens
ctccctcccccttcttctctctcttatttccacccatttt

SEQ ID NO: 31235 - DNA, 40 bp, Homo sapiens
aaaatgggtggaaataagagagagaagaagggggagggag

SEQ ID NO: 31236 - DNA, 40 bp, Homo sapiens
tccctcccccttcttctctctcttatttccacccattttt

SEQ ID NO: 31237 - DNA, 40 bp, Homo sapiens
aaaaatgggtggaaataagagagagaagaagggggaggga

SEQ ID NO: 31238 - DNA, 40 bp, Homo sapiens
ccctcccccttcttctctctcttatttccacccattttta

SEQ ID NO: 31239 - DNA, 40 bp, Homo sapiens
taaaaatgggtggaaataagagagagaagaagggggaggg

SEQ ID NO: 31240 - DNA, 40 bp, Homo sapiens
cctcccccttcttctctctcttatttccacccatttttaa

SEQ ID NO: 31241 - DNA, 40 bp, Homo sapiens
ttaaaaatgggtggaaataagagagagaagaagggggagg

SEQ ID NO: 31242 - DNA, 40 bp, Homo sapiens
ctcccccttcttctctctcttatttccacccatttttaac

SEQ ID NO: 31243 - DNA, 40 bp, Homo sapiens
gttaaaaatgggtggaaataagagagagaagaagggggag

SEQ ID NO: 31244 - DNA, 40 bp, Homo sapiens
tcccccttcttctctctcttatttccacccatttttaaca

SEQ ID NO: 31245 - DNA, 40 bp, Homo sapiens
tgttaaaaatgggtggaaataagagagagaagaaggggga

SEQ ID NO: 31246 - DNA, 40 bp, Homo sapiens
cccccttcttctctctcttatttccacccatttttaacat

SEQ ID NO: 31247 - DNA, 40 bp, Homo sapiens
atgttaaaaatgggtggaaataagagagagaagaaggggg

SEQ ID NO: 31248 - DNA, 40 bp, Homo sapiens
ccccttcttctctctcttatttccacccatttttaacatt

SEQ ID NO: 31249 - DNA, 40 bp, Homo sapiens
aatgttaaaaatgggtggaaataagagagagaagaagggg

SEQ ID NO: 31250 - DNA, 40 bp, Homo sapiens
cccttcttctctctcttatttccacccatttttaacattt

SEQ ID NO: 31251 - DNA, 40 bp, Homo sapiens
aaatgttaaaaatgggtggaaataagagagagaagaaggg

SEQ ID NO: 31252 - DNA, 40 bp, Homo sapiens
ccttcttctctctcttatttccacccatttttaacattta

SEQ ID NO: 31253 - DNA, 40 bp, Homo sapiens
taaatgttaaaaatgggtggaaataagagagagaagaagg

SEQ ID NO: 31254 - DNA, 40 bp, Homo sapiens
cttcttctctctcttatttccacccatttttaacatttat

SEQ ID NO: 31255 - DNA, 40 bp, Homo sapiens
ataaatgttaaaaatgggtggaaataagagagagaagaag

SEQ ID NO: 31256 - DNA, 40 bp, Homo sapiens
ttcttctctctcttatttccacccatttttaacatttata

SEQ ID NO: 31257 - DNA, 40 bp, Homo sapiens
tataaatgttaaaaatgggtggaaataagagagagaagaa

SEQ ID NO: 31258 - DNA, 40 bp, Homo sapiens
tcttctctctcttatttccacccatttttaacatttatag

SEQ ID NO: 31259 - DNA, 40 bp, Homo sapiens
ctataaatgttaaaaatgggtggaaataagagagagaaga

SEQ ID NO: 31260 - DNA, 40 bp, Homo sapiens
cttctctctcttatttccacccatttttaacatttataga

SEQ ID NO: 31261 - DNA, 40 bp, Homo sapiens
tctataaatgttaaaaatgggtggaaataagagagagaag

SEQ ID NO: 31262 - DNA, 40 bp, Homo sapiens
ttctctctcttatttccacccatttttaacatttatagaa

SEQ ID NO: 31263 - DNA, 40 bp, Homo sapiens
ttctataaatgttaaaaatgggtggaaataagagagagaa

SEQ ID NO: 31264 - DNA, 40 bp, Homo sapiens
tctctctcttatttccacccatttttaacatttatagaag

SEQ ID NO: 31265 - DNA, 40 bp, Homo sapiens
cttctataaatgttaaaaatgggtggaaataagagagaga

SEQ ID NO: 31266 - DNA, 40 bp, Homo sapiens
ctctctcttatttccacccatttttaacatttatagaagt

SEQ ID NO: 31267 - DNA, 40 bp, Homo sapiens
acttctataaatgttaaaaatgggtggaaataagagagag

SEQ ID NO: 31268 - DNA, 40 bp, Homo sapiens
tctctcttatttccacccatttttaacatttatagaagtc

SEQ ID NO: 31269 - DNA, 40 bp, Homo sapiens
gacttctataaatgttaaaaatgggtggaaataagagaga

SEQ ID NO: 31270 - DNA, 40 bp, Homo sapiens
ctctcttatttccacccatttttaacatttatagaagtca

SEQ ID NO: 31271 - DNA, 40 bp, Homo sapiens
tgacttctataaatgttaaaaatgggtggaaataagagag

SEQ ID NO: 31272 - DNA, 40 bp, Homo sapiens
tctcttatttccacccatttttaacatttatagaagtcaa

SEQ ID NO: 31273 - DNA, 40 bp, Homo sapiens
ttgacttctataaatgttaaaaatgggtggaaataagaga

SEQ ID NO: 31274 - DNA, 40 bp, Homo sapiens
ctcttatttccacccatttttaacatttatagaagtcaaa

SEQ ID NO: 31275 - DNA, 40 bp, Homo sapiens
tttgacttctataaatgttaaaaatgggtggaaataagag

SEQ ID NO: 31276 - DNA, 40 bp, Homo sapiens
tcttatttccacccatttttaacatttatagaagtcaaaa

SEQ ID NO: 31277 - DNA, 40 bp, Homo sapiens
ttttgacttctataaatgttaaaaatgggtggaaataaga

SEQ ID NO: 31278 - DNA, 40 bp, Homo sapiens
cttatttccacccatttttaacatttatagaagtcaaaag

SEQ ID NO: 31279 - DNA, 40 bp, Homo sapiens
cttttgacttctataaatgttaaaaatgggtggaaataag

SEQ ID NO: 31280 - DNA, 40 bp, Homo sapiens
ttatttccacccatttttaacatttatagaagtcaaaagt

SEQ ID NO: 31281 - DNA, 40 bp, Homo sapiens
acttttgacttctataaatgttaaaaatgggtggaaataa

SEQ ID NO: 31282 - DNA, 40 bp, Homo sapiens
tatttccacccatttttaacatttatagaagtcaaaagtc

SEQ ID NO: 31283 - DNA, 40 bp, Homo sapiens
gacttttgacttctataaatgttaaaaatgggtggaaata

SEQ ID NO: 31284 - DNA, 40 bp, Homo sapiens
atttccacccatttttaacatttatagaagtcaaaagtct

SEQ ID NO: 31285 - DNA, 40 bp, Homo sapiens
agacttttgacttctataaatgttaaaaatgggtggaaat

SEQ ID NO: 31286 - DNA, 40 bp, Homo sapiens
tttccacccatttttaacatttatagaagtcaaaagtcta

SEQ ID NO: 31287 - DNA, 40 bp, Homo sapiens
tagacttttgacttctataaatgttaaaaatgggtggaaa

SEQ ID NO: 31288 - DNA, 40 bp, Homo sapiens
ttccacccatttttaacatttatagaagtcaaaagtctag

SEQ ID NO: 31289 - DNA, 40 bp, Homo sapiens
ctagacttttgacttctataaatgttaaaaatgggtggaa

SEQ ID NO: 31290 - DNA, 40 bp, Homo sapiens
tccacccatttttaacatttatagaagtcaaaagtctagt

SEQ ID NO: 31291 - DNA, 40 bp, Homo sapiens
actagacttttgacttctataaatgttaaaaatgggtgga

SEQ ID NO: 31292 - DNA, 40 bp, Homo sapiens
ccacccatttttaacatttatagaagtcaaaagtctagtt

SEQ ID NO: 31293 - DNA, 40 bp, Homo sapiens
aactagacttttgacttctataaatgttaaaaatgggtgg

SEQ ID NO: 31294 - DNA, 40 bp, Homo sapiens
cacccatttttaacatttatagaagtcaaaagtctagttc

SEQ ID NO: 31295 - DNA, 40 bp, Homo sapiens
gaactagacttttgacttctataaatgttaaaaatgggtg

SEQ ID NO: 31296 - DNA, 40 bp, Homo sapiens
acccatttttaacatttatagaagtcaaaagtctagttca

SEQ ID NO: 31297 - DNA, 40 bp, Homo sapiens
tgaactagacttttgacttctataaatgttaaaaatgggt

SEQ ID NO: 31298 - DNA, 40 bp, Homo sapiens
cccatttttaacatttatagaagtcaaaagtctagttcag

SEQ ID NO: 31299 - DNA, 40 bp, Homo sapiens
ctgaactagacttttgacttctataaatgttaaaaatggg

SEQ ID NO: 31300 - DNA, 40 bp, Homo sapiens
ccatttttaacatttatagaagtcaaaagtctagttcaga

SEQ ID NO: 31301 - DNA, 40 bp, Homo sapiens
tctgaactagacttttgacttctataaatgttaaaaatgg

SEQ ID NO: 31302 - DNA, 40 bp, Homo sapiens
catttttaacatttatagaagtcaaaagtctagttcagaa

SEQ ID NO: 31303 - DNA, 40 bp, Homo sapiens
ttctgaactagacttttgacttctataaatgttaaaaatg

SEQ ID NO: 31304 - DNA, 40 bp, Homo sapiens
atttttaacatttatagaagtcaaaagtctagttcagaaa

SEQ ID NO: 31305 - DNA, 40 bp, Homo sapiens
tttctgaactagacttttgacttctataaatgttaaaaat

SEQ ID NO: 31306 - DNA, 40 bp, Homo sapiens
tttttaacatttatagaagtcaaaagtctagttcagaaag

SEQ ID NO: 31307 - DNA, 40 bp, Homo sapiens
ctttctgaactagacttttgacttctataaatgttaaaaa

SEQ ID NO: 31308 - DNA, 40 bp, Homo sapiens
ttttaacatttatagaagtcaaaagtctagttcagaaagc

SEQ ID NO: 31309 - DNA, 40 bp, Homo sapiens
gctttctgaactagacttttgacttctataaatgttaaaa

SEQ ID NO: 31310 - DNA, 40 bp, Homo sapiens
tttaacatttatagaagtcaaaagtctagttcagaaagca

SEQ ID NO: 31311 - DNA, 40 bp, Homo sapiens
tgctttctgaactagacttttgacttctataaatgttaaa

SEQ ID NO: 31312 - DNA, 40 bp, Homo sapiens
ttaacatttatagaagtcaaaagtctagttcagaaagcag

SEQ ID NO: 31313 - DNA, 40 bp, Homo sapiens
ctgctttctgaactagacttttgacttctataaatgttaa

SEQ ID NO: 31314 - DNA, 40 bp, Homo sapiens
taacatttatagaagtcaaaagtctagttcagaaagcaga

SEQ ID NO: 31315 - DNA, 40 bp, Homo sapiens
tctgctttctgaactagacttttgacttctataaatgtta

SEQ ID NO: 31316 - DNA, 40 bp, Homo sapiens
aacatttatagaagtcaaaagtctagttcagaaagcagaa

SEQ ID NO: 31317 - DNA, 40 bp, Homo sapiens
ttctgctttctgaactagacttttgacttctataaatgtt

SEQ ID NO: 31318 - DNA, 40 bp, Homo sapiens
acatttatagaagtcaaaagtctagttcagaaagcagaaa

SEQ ID NO: 31319 - DNA, 40 bp, Homo sapiens
tttctgctttctgaactagacttttgacttctataaatgt

SEQ ID NO: 31320 - DNA, 40 bp, Homo sapiens
catttatagaagtcaaaagtctagttcagaaagcagaaac

SEQ ID NO: 31321 - DNA, 40 bp, Homo sapiens
gtttctgctttctgaactagacttttgacttctataaatg

SEQ ID NO: 31322 - DNA, 40 bp, Homo sapiens
atttatagaagtcaaaagtctagttcagaaagcagaaacc

SEQ ID NO: 31323 - DNA, 40 bp, Homo sapiens
ggtttctgctttctgaactagacttttgacttctataaat

SEQ ID NO: 31324 - DNA, 40 bp, Homo sapiens
tttatagaagtcaaaagtctagttcagaaagcagaaacca

SEQ ID NO: 31325 - DNA, 40 bp, Homo sapiens
tggtttctgctttctgaactagacttttgacttctataaa

SEQ ID NO: 31326 - DNA, 40 bp, Homo sapiens
ttatagaagtcaaaagtctagttcagaaagcagaaaccat

SEQ ID NO: 31327 - DNA, 40 bp, Homo sapiens
atggtttctgctttctgaactagacttttgacttctataa

SEQ ID NO: 31328 - DNA, 40 bp, Homo sapiens
tatagaagtcaaaagtctagttcagaaagcagaaaccata

SEQ ID NO: 31329 - DNA, 40 bp, Homo sapiens
tatggtttctgctttctgaactagacttttgacttctata

SEQ ID NO: 31330 - DNA, 40 bp, Homo sapiens
atagaagtcaaaagtctagttcagaaagcagaaaccatac

SEQ ID NO: 31331 - DNA, 40 bp, Homo sapiens
gtatggtttctgctttctgaactagacttttgacttctat

SEQ ID NO: 31332 - DNA, 40 bp, Homo sapiens
tagaagtcaaaagtctagttcagaaagcagaaaccatact

SEQ ID NO: 31333 - DNA, 40 bp, Homo sapiens
agtatggtttctgctttctgaactagacttttgacttcta

SEQ ID NO: 31334 - DNA, 40 bp, Homo sapiens
agaagtcaaaagtctagttcagaaagcagaaaccatacta

SEQ ID NO: 31335 - DNA, 40 bp, Homo sapiens
tagtatggtttctgctttctgaactagacttttgacttct

SEQ ID NO: 31336 - DNA, 40 bp, Homo sapiens
gaagtcaaaagtctagttcagaaagcagaaaccatactag

SEQ ID NO: 31337 - DNA, 40 bp, Homo sapiens
ctagtatggtttctgctttctgaactagacttttgacttc

SEQ ID NO: 31338 - DNA, 40 bp, Homo sapiens
aagtcaaaagtctagttcagaaagcagaaaccatactaga

SEQ ID NO: 31339 - DNA, 40 bp, Homo sapiens
tctagtatggtttctgctttctgaactagacttttgactt

SEQ ID NO: 31340 - DNA, 40 bp, Homo sapiens
agtcaaaagtctagttcagaaagcagaaaccatactagat

SEQ ID NO: 31341 - DNA, 40 bp, Homo sapiens
atctagtatggtttctgctttctgaactagacttttgact

SEQ ID NO: 31342 - DNA, 40 bp, Homo sapiens
gtcaaaagtctagttcagaaagcagaaaccatactagata

SEQ ID NO: 31343 - DNA, 40 bp, Homo sapiens
tatctagtatggtttctgctttctgaactagacttttgac

SEQ ID NO: 31344 - DNA, 40 bp, Homo sapiens
tcaaaagtctagttcagaaagcagaaaccatactagatat

SEQ ID NO: 31345 - DNA, 40 bp, Homo sapiens
atatctagtatggtttctgctttctgaactagacttttga

SEQ ID NO: 31346 - DNA, 40 bp, Homo sapiens
caaaagtctagttcagaaagcagaaaccatactagatatt

SEQ ID NO: 31347 - DNA, 40 bp, Homo sapiens
aatatctagtatggtttctgctttctgaactagacttttg

SEQ ID NO: 31348 - DNA, 40 bp, Homo sapiens
aaaagtctagttcagaaagcagaaaccatactagatattt

SEQ ID NO: 31349 - DNA, 40 bp, Homo sapiens
aaatatctagtatggtttctgctttctgaactagactttt

SEQ ID NO: 31350 - DNA, 40 bp, Homo sapiens
aaagtctagttcagaaagcagaaaccatactagatatttc

SEQ ID NO: 31351 - DNA, 40 bp, Homo sapiens
gaaatatctagtatggtttctgctttctgaactagacttt

SEQ ID NO: 31352 - DNA, 40 bp, Homo sapiens
aagtctagttcagaaagcagaaaccatactagatatttca

SEQ ID NO: 31353 - DNA, 40 bp, Homo sapiens
tgaaatatctagtatggtttctgctttctgaactagactt

SEQ ID NO: 31354 - DNA, 40 bp, Homo sapiens
agtctagttcagaaagcagaaaccatactagatatttcag

SEQ ID NO: 31355 - DNA, 40 bp, Homo sapiens
ctgaaatatctagtatggtttctgctttctgaactagact

SEQ ID NO: 31356 - DNA, 40 bp, Homo sapiens
gtctagttcagaaagcagaaaccatactagatatttcagc

SEQ ID NO: 31357 - DNA, 40 bp, Homo sapiens
gctgaaatatctagtatggtttctgctttctgaactagac

SEQ ID NO: 31358 - DNA, 40 bp, Homo sapiens
tctagttcagaaagcagaaaccatactagatatttcagca

SEQ ID NO: 31359 - DNA, 40 bp, Homo sapiens
tgctgaaatatctagtatggtttctgctttctgaactaga

SEQ ID NO: 31360 - DNA, 40 bp, Homo sapiens
ctagttcagaaagcagaaaccatactagatatttcagcac

SEQ ID NO: 31361 - DNA, 40 bp, Homo sapiens
gtgctgaaatatctagtatggtttctgctttctgaactag

SEQ ID NO: 31362 - DNA, 40 bp, Homo sapiens
tagttcagaaagcagaaaccatactagatatttcagcaca

SEQ ID NO: 31363 - DNA, 40 bp, Homo sapiens
tgtgctgaaatatctagtatggtttctgctttctgaacta

SEQ ID NO: 31364 - DNA, 40 bp, Homo sapiens
agttcagaaagcagaaaccatactagatatttcagcacag

SEQ ID NO: 31365 - DNA, 40 bp, Homo sapiens
ctgtgctgaaatatctagtatggtttctgctttctgaact

SEQ ID NO: 31366 - DNA, 40 bp, Homo sapiens
gttcagaaagcagaaaccatactagatatttcagcacaga

SEQ ID NO: 31367 - DNA, 40 bp, Homo sapiens
tctgtgctgaaatatctagtatggtttctgctttctgaac

SEQ ID NO: 31368 - DNA, 40 bp, Homo sapiens
ttcagaaagcagaaaccatactagatatttcagcacagag

SEQ ID NO: 31369 - DNA, 40 bp, Homo sapiens
ctctgtgctgaaatatctagtatggtttctgctttctgaa

SEQ ID NO: 31370 - DNA, 40 bp, Homo sapiens
tcagaaagcagaaaccatactagatatttcagcacagaga

SEQ ID NO: 31371 - DNA, 40 bp, Homo sapiens
tctctgtgctgaaatatctagtatggtttctgctttctga

SEQ ID NO: 31372 - DNA, 40 bp, Homo sapiens
cagaaagcagaaaccatactagatatttcagcacagagaa

SEQ ID NO: 31373 - DNA, 40 bp, Homo sapiens
ttctctgtgctgaaatatctagtatggtttctgctttctg

SEQ ID NO: 31374 - DNA, 40 bp, Homo sapiens
agaaagcagaaaccatactagatatttcagcacagagaac

SEQ ID NO: 31375 - DNA, 40 bp, Homo sapiens
gttctctgtgctgaaatatctagtatggtttctgctttct

SEQ ID NO: 31376 - DNA, 40 bp, Homo sapiens
gaaagcagaaaccatactagatatttcagcacagagaact

SEQ ID NO: 31377 - DNA, 40 bp, Homo sapiens
agttctctgtgctgaaatatctagtatggtttctgctttc

SEQ ID NO: 31378 - DNA, 40 bp, Homo sapiens
aaagcagaaaccatactagatatttcagcacagagaacta

SEQ ID NO: 31379 - DNA, 40 bp, Homo sapiens
tagttctctgtgctgaaatatctagtatggtttctgcttt

SEQ ID NO: 31380 - DNA, 40 bp, Homo sapiens
aagcagaaaccatactagatatttcagcacagagaactaa

SEQ ID NO: 31381 - DNA, 40 bp, Homo sapiens
ttagttctctgtgctgaaatatctagtatggtttctgctt

SEQ ID NO: 31382 - DNA, 40 bp, Homo sapiens
agcagaaaccatactagatatttcagcacagagaactaat

SEQ ID NO: 31383 - DNA, 40 bp, Homo sapiens
attagttctctgtgctgaaatatctagtatggtttctgct

SEQ ID NO: 31384 - DNA, 40 bp, Homo sapiens
gcagaaaccatactagatatttcagcacagagaactaatt

SEQ ID NO: 31385 - DNA, 40 bp, Homo sapiens
aattagttctctgtgctgaaatatctagtatggtttctgc

SEQ ID NO: 31386 - DNA, 40 bp, Homo sapiens
cagaaaccatactagatatttcagcacagagaactaatta

SEQ ID NO: 31387 - DNA, 40 bp, Homo sapiens
taattagttctctgtgctgaaatatctagtatggtttctg

SEQ ID NO: 31388 - DNA, 40 bp, Homo sapiens
agaaaccatactagatatttcagcacagagaactaattag

SEQ ID NO: 31389 - DNA, 40 bp, Homo sapiens
ctaattagttctctgtgctgaaatatctagtatggtttct

SEQ ID NO: 31390 - DNA, 40 bp, Homo sapiens
gaaaccatactagatatttcagcacagagaactaattagg

SEQ ID NO: 31391 - DNA, 40 bp, Homo sapiens
cctaattagttctctgtgctgaaatatctagtatggtttc

SEQ ID NO: 31392 - DNA, 40 bp, Homo sapiens
aaaccatactagatatttcagcacagagaactaattaggt

SEQ ID NO: 31393 - DNA, 40 bp, Homo sapiens
acctaattagttctctgtgctgaaatatctagtatggttt

SEQ ID NO: 31394 - DNA, 40 bp, Homo sapiens
aaccatactagatatttcagcacagagaactaattaggtg

SEQ ID NO: 31395 - DNA, 40 bp, Homo sapiens
cacctaattagttctctgtgctgaaatatctagtatggtt

SEQ ID NO: 31396 - DNA, 40 bp, Homo sapiens
accatactagatatttcagcacagagaactaattaggtgt

SEQ ID NO: 31397 - DNA, 40 bp, Homo sapiens
acacctaattagttctctgtgctgaaatatctagtatggt

SEQ ID NO: 31398 - DNA, 40 bp, Homo sapiens
ccatactagatatttcagcacagagaactaattaggtgtt

SEQ ID NO: 31399 - DNA, 40 bp, Homo sapiens
aacacctaattagttctctgtgctgaaatatctagtatgg

SEQ ID NO: 31400 - DNA, 40 bp, Homo sapiens
catactagatatttcagcacagagaactaattaggtgttg

SEQ ID NO: 31401 - DNA, 40 bp, Homo sapiens
caacacctaattagttctctgtgctgaaatatctagtatg

SEQ ID NO: 31402 - DNA, 40 bp, Homo sapiens
atactagatatttcagcacagagaactaattaggtgttgg

SEQ ID NO: 31403 - DNA, 40 bp, Homo sapiens
ccaacacctaattagttctctgtgctgaaatatctagtat

SEQ ID NO: 31404 - DNA, 40 bp, Homo sapiens
tactagatatttcagcacagagaactaattaggtgttgga

SEQ ID NO: 31405 - DNA, 40 bp, Homo sapiens
tccaacacctaattagttctctgtgctgaaatatctagta

SEQ ID NO: 31406 - DNA, 40 bp, Homo sapiens
actagatatttcagcacagagaactaattaggtgttggaa

SEQ ID NO: 31407 - DNA, 40 bp, Homo sapiens
ttccaacacctaattagttctctgtgctgaaatatctagt

SEQ ID NO: 31408 - DNA, 40 bp, Homo sapiens
ctagatatttcagcacagagaactaattaggtgttggaag

SEQ ID NO: 31409 - DNA, 40 bp, Homo sapiens
cttccaacacctaattagttctctgtgctgaaatatctag

SEQ ID NO: 31410 - DNA, 40 bp, Homo sapiens
tagatatttcagcacagagaactaattaggtgttggaaga

SEQ ID NO: 31411 - DNA, 40 bp, Homo sapiens
tcttccaacacctaattagttctctgtgctgaaatatcta

SEQ ID NO: 31412 - DNA, 40 bp, Homo sapiens
agatatttcagcacagagaactaattaggtgttggaagac

SEQ ID NO: 31413 - DNA, 40 bp, Homo sapiens
gtcttccaacacctaattagttctctgtgctgaaatatct

SEQ ID NO: 31414 - DNA, 40 bp, Homo sapiens
gatatttcagcacagagaactaattaggtgttggaagact

SEQ ID NO: 31415 - DNA, 40 bp, Homo sapiens
agtcttccaacacctaattagttctctgtgctgaaatatc

SEQ ID NO: 31416 - DNA, 40 bp, Homo sapiens
atatttcagcacagagaactaattaggtgttggaagactg

SEQ ID NO: 31417 - DNA, 40 bp, Homo sapiens
cagtcttccaacacctaattagttctctgtgctgaaatat

SEQ ID NO: 31418 - DNA, 40 bp, Homo sapiens
tatttcagcacagagaactaattaggtgttggaagactga

SEQ ID NO: 31419 - DNA, 40 bp, Homo sapiens
tcagtcttccaacacctaattagttctctgtgctgaaata

SEQ ID NO: 31420 - DNA, 40 bp, Homo sapiens
atttcagcacagagaactaattaggtgttggaagactgaa

SEQ ID NO: 31421 - DNA, 40 bp, Homo sapiens
ttcagtcttccaacacctaattagttctctgtgctgaaat

SEQ ID NO: 31422 - DNA, 40 bp, Homo sapiens
tttcagcacagagaactaattaggtgttggaagactgaaa

SEQ ID NO: 31423 - DNA, 40 bp, Homo sapiens
tttcagtcttccaacacctaattagttctctgtgctgaaa

SEQ ID NO: 31424 - DNA, 40 bp, Homo sapiens
ttcagcacagagaactaattaggtgttggaagactgaaag

SEQ ID NO: 31425 - DNA, 40 bp, Homo sapiens
ctttcagtcttccaacacctaattagttctctgtgctgaa

SEQ ID NO: 31426 - DNA, 40 bp, Homo sapiens
tcagcacagagaactaattaggtgttggaagactgaaagg

SEQ ID NO: 31427 - DNA, 40 bp, Homo sapiens
cctttcagtcttccaacacctaattagttctctgtgctga

SEQ ID NO: 31428 - DNA, 40 bp, Homo sapiens
cagcacagagaactaattaggtgttggaagactgaaaggc

SEQ ID NO: 31429 - DNA, 40 bp, Homo sapiens
gcctttcagtcttccaacacctaattagttctctgtgctg

SEQ ID NO: 31430 - DNA, 40 bp, Homo sapiens
agcacagagaactaattaggtgttggaagactgaaaggca

SEQ ID NO: 31431 - DNA, 40 bp, Homo sapiens
tgcctttcagtcttccaacacctaattagttctctgtgct

SEQ ID NO: 31432 - DNA, 40 bp, Homo sapiens
gcacagagaactaattaggtgttggaagactgaaaggcaa

SEQ ID NO: 31433 - DNA, 40 bp, Homo sapiens
ttgcctttcagtcttccaacacctaattagttctctgtgc

SEQ ID NO: 31434 - DNA, 40 bp, Homo sapiens
cacagagaactaattaggtgttggaagactgaaaggcaaa

SEQ ID NO: 31435 - DNA, 40 bp, Homo sapiens
tttgcctttcagtcttccaacacctaattagttctctgtg

SEQ ID NO: 31436 - DNA, 40 bp, Homo sapiens
acagagaactaattaggtgttggaagactgaaaggcaaaa

SEQ ID NO: 31437 - DNA, 40 bp, Homo sapiens
ttttgcctttcagtcttccaacacctaattagttctctgt

SEQ ID NO: 31438 - DNA, 40 bp, Homo sapiens
cagagaactaattaggtgttggaagactgaaaggcaaaaa

SEQ ID NO: 31439 - DNA, 40 bp, Homo sapiens
tttttgcctttcagtcttccaacacctaattagttctctg

SEQ ID NO: 31440 - DNA, 40 bp, Homo sapiens
agagaactaattaggtgttggaagactgaaaggcaaaaaa

SEQ ID NO: 31441 - DNA, 40 bp, Homo sapiens
ttttttgcctttcagtcttccaacacctaattagttctct

SEQ ID NO: 31442 - DNA, 40 bp, Homo sapiens
gagaactaattaggtgttggaagactgaaaggcaaaaaaa

SEQ ID NO: 31443 - DNA, 40 bp, Homo sapiens
tttttttgcctttcagtcttccaacacctaattagttctc

SEQ ID NO: 31444 - DNA, 40 bp, Homo sapiens
agaactaattaggtgttggaagactgaaaggcaaaaaaac

SEQ ID NO: 31445 - DNA, 40 bp, Homo sapiens
gtttttttgcctttcagtcttccaacacctaattagttct

SEQ ID NO: 31446 - DNA, 40 bp, Homo sapiens
gaactaattaggtgttggaagactgaaaggcaaaaaaaca

SEQ ID NO: 31447 - DNA, 40 bp, Homo sapiens
tgtttttttgcctttcagtcttccaacacctaattagttc

SEQ ID NO: 31448 - DNA, 40 bp, Homo sapiens
aactaattaggtgttggaagactgaaaggcaaaaaaacac

SEQ ID NO: 31449 - DNA, 40 bp, Homo sapiens
gtgtttttttgcctttcagtcttccaacacctaattagtt

SEQ ID NO: 31450 - DNA, 40 bp, Homo sapiens
actaattaggtgttggaagactgaaaggcaaaaaaacact

SEQ ID NO: 31451 - DNA, 40 bp, Homo sapiens
agtgtttttttgcctttcagtcttccaacacctaattagt

SEQ ID NO: 31452 - DNA, 40 bp, Homo sapiens
ctaattaggtgttggaagactgaaaggcaaaaaaacactg

SEQ ID NO: 31453 - DNA, 40 bp, Homo sapiens
cagtgtttttttgcctttcagtcttccaacacctaattag

SEQ ID NO: 31454 - DNA, 40 bp, Homo sapiens
taattaggtgttggaagactgaaaggcaaaaaaacactga

SEQ ID NO: 31455 - DNA, 40 bp, Homo sapiens
tcagtgtttttttgcctttcagtcttccaacacctaatta

SEQ ID NO: 31456 - DNA, 40 bp, Homo sapiens
aattaggtgttggaagactgaaaggcaaaaaaacactgaa

SEQ ID NO: 31457 - DNA, 40 bp, Homo sapiens
ttcagtgtttttttgcctttcagtcttccaacacctaatt

SEQ ID NO: 31458 - DNA, 40 bp, Homo sapiens
attaggtgttggaagactgaaaggcaaaaaaacactgaag

SEQ ID NO: 31459 - DNA, 40 bp, Homo sapiens
cttcagtgtttttttgcctttcagtcttccaacacctaat

SEQ ID NO: 31460 - DNA, 40 bp, Homo sapiens
ttaggtgttggaagactgaaaggcaaaaaaacactgaagt

SEQ ID NO: 31461 - DNA, 40 bp, Homo sapiens
acttcagtgtttttttgcctttcagtcttccaacacctaa

SEQ ID NO: 31462 - DNA, 40 bp, Homo sapiens
taggtgttggaagactgaaaggcaaaaaaacactgaagta

SEQ ID NO: 31463 - DNA, 40 bp, Homo sapiens
tacttcagtgtttttttgcctttcagtcttccaacaccta

SEQ ID NO: 31464 - DNA, 40 bp, Homo sapiens
aggtgttggaagactgaaaggcaaaaaaacactgaagtaa

SEQ ID NO: 31465 - DNA, 40 bp, Homo sapiens
ttacttcagtgtttttttgcctttcagtcttccaacacct

SEQ ID NO: 31466 - DNA, 40 bp, Homo sapiens
ggtgttggaagactgaaaggcaaaaaaacactgaagtaac

SEQ ID NO: 31467 - DNA, 40 bp, Homo sapiens
gttacttcagtgtttttttgcctttcagtcttccaacacc

SEQ ID NO: 31468 - DNA, 40 bp, Homo sapiens
gtgttggaagactgaaaggcaaaaaaacactgaagtaaca

SEQ ID NO: 31469 - DNA, 40 bp, Homo sapiens
tgttacttcagtgtttttttgcctttcagtcttccaacac

SEQ ID NO: 31470 - DNA, 40 bp, Homo sapiens
tgttggaagactgaaaggcaaaaaaacactgaagtaacac

SEQ ID NO: 31471 - DNA, 40 bp, Homo sapiens
gtgttacttcagtgtttttttgcctttcagtcttccaaca

SEQ ID NO: 31472 - DNA, 40 bp, Homo sapiens
gttggaagactgaaaggcaaaaaaacactgaagtaacaca

SEQ ID NO: 31473 - DNA, 40 bp, Homo sapiens
tgtgttacttcagtgtttttttgcctttcagtcttccaac

SEQ ID NO: 31474 - DNA, 40 bp, Homo sapiens
ttggaagactgaaaggcaaaaaaacactgaagtaacacag

SEQ ID NO: 31475 - DNA, 40 bp, Homo sapiens
ctgtgttacttcagtgtttttttgcctttcagtcttccaa

SEQ ID NO: 31476 - DNA, 40 bp, Homo sapiens
tggaagactgaaaggcaaaaaaacactgaagtaacacagt

SEQ ID NO: 31477 - DNA, 40 bp, Homo sapiens
actgtgttacttcagtgtttttttgcctttcagtcttcca

SEQ ID NO: 31478 - DNA, 40 bp, Homo sapiens
ggaagactgaaaggcaaaaaaacactgaagtaacacagta

SEQ ID NO: 31479 - DNA, 40 bp, Homo sapiens
tactgtgttacttcagtgtttttttgcctttcagtcttcc

SEQ ID NO: 31480 - DNA, 40 bp, Homo sapiens
gaagactgaaaggcaaaaaaacactgaagtaacacagtaa

SEQ ID NO: 31481 - DNA, 40 bp, Homo sapiens
ttactgtgttacttcagtgtttttttgcctttcagtcttc

SEQ ID NO: 31482 - DNA, 40 bp, Homo sapiens
aagactgaaaggcaaaaaaacactgaagtaacacagtaac

SEQ ID NO: 31483 - DNA, 40 bp, Homo sapiens
gttactgtgttacttcagtgtttttttgcctttcagtctt

SEQ ID NO: 31484 - DNA, 40 bp, Homo sapiens
agactgaaaggcaaaaaaacactgaagtaacacagtaaca

SEQ ID NO: 31485 - DNA, 40 bp, Homo sapiens
tgttactgtgttacttcagtgtttttttgcctttcagtct

SEQ ID NO: 31486 - DNA, 40 bp, Homo sapiens
gactgaaaggcaaaaaaacactgaagtaacacagtaacat

SEQ ID NO: 31487 - DNA, 40 bp, Homo sapiens
atgttactgtgttacttcagtgtttttttgcctttcagtc

SEQ ID NO: 31488 - DNA, 40 bp, Homo sapiens
actgaaaggcaaaaaaacactgaagtaacacagtaacatc

SEQ ID NO: 31489 - DNA, 40 bp, Homo sapiens
gatgttactgtgttacttcagtgtttttttgcctttcagt

SEQ ID NO: 31490 - DNA, 40 bp, Homo sapiens
ctgaaaggcaaaaaaacactgaagtaacacagtaacatca

SEQ ID NO: 31491 - DNA, 40 bp, Homo sapiens
tgatgttactgtgttacttcagtgtttttttgcctttcag

SEQ ID NO: 31492 - DNA, 40 bp, Homo sapiens
tgaaaggcaaaaaaacactgaagtaacacagtaacatcaa

SEQ ID NO: 31493 - DNA, 40 bp, Homo sapiens
ttgatgttactgtgttacttcagtgtttttttgcctttca

SEQ ID NO: 31494 - DNA, 40 bp, Homo sapiens
gaaaggcaaaaaaacactgaagtaacacagtaacatcaag

SEQ ID NO: 31495 - DNA, 40 bp, Homo sapiens
cttgatgttactgtgttacttcagtgtttttttgcctttc

SEQ ID NO: 31496 - DNA, 40 bp, Homo sapiens
aaaggcaaaaaaacactgaagtaacacagtaacatcaaga

SEQ ID NO: 31497 - DNA, 40 bp, Homo sapiens
tcttgatgttactgtgttacttcagtgtttttttgccttt

SEQ ID NO: 31498 - DNA, 40 bp, Homo sapiens
aaggcaaaaaaacactgaagtaacacagtaacatcaagaa

SEQ ID NO: 31499 - DNA, 40 bp, Homo sapiens
ttcttgatgttactgtgttacttcagtgtttttttgcctt

SEQ ID NO: 31500 - DNA, 40 bp, Homo sapiens
aggcaaaaaaacactgaagtaacacagtaacatcaagaat

SEQ ID NO: 31501 - DNA, 40 bp, Homo sapiens
attcttgatgttactgtgttacttcagtgtttttttgcct

SEQ ID NO: 31502 - DNA, 40 bp, Homo sapiens
ggcaaaaaaacactgaagtaacacagtaacatcaagaatg

SEQ ID NO: 31503 - DNA, 40 bp, Homo sapiens
cattcttgatgttactgtgttacttcagtgtttttttgcc

SEQ ID NO: 31504 - DNA, 40 bp, Homo sapiens
gcaaaaaaacactgaagtaacacagtaacatcaagaatgg

SEQ ID NO: 31505 - DNA, 40 bp, Homo sapiens
ccattcttgatgttactgtgttacttcagtgtttttttgc

SEQ ID NO: 31506 - DNA, 40 bp, Homo sapiens
caaaaaaacactgaagtaacacagtaacatcaagaatggg

SEQ ID NO: 31507 - DNA, 40 bp, Homo sapiens
cccattcttgatgttactgtgttacttcagtgtttttttg

SEQ ID NO: 31508 - DNA, 40 bp, Homo sapiens
aaaaaaacactgaagtaacacagtaacatcaagaatgggc

SEQ ID NO: 31509 - DNA, 40 bp, Homo sapiens
gcccattcttgatgttactgtgttacttcagtgttttttt

SEQ ID NO: 31510 - DNA, 40 bp, Homo sapiens
aaaaaacactgaagtaacacagtaacatcaagaatgggca

SEQ ID NO: 31511 - DNA, 40 bp, Homo sapiens
tgcccattcttgatgttactgtgttacttcagtgtttttt

SEQ ID NO: 31512 - DNA, 40 bp, Homo sapiens
aaaaacactgaagtaacacagtaacatcaagaatgggcac

SEQ ID NO: 31513 - DNA, 40 bp, Homo sapiens
gtgcccattcttgatgttactgtgttacttcagtgttttt

SEQ ID NO: 31514 - DNA, 40 bp, Homo sapiens
aaaacactgaagtaacacagtaacatcaagaatgggcact

SEQ ID NO: 31515 - DNA, 40 bp, Homo sapiens
agtgcccattcttgatgttactgtgttacttcagtgtttt

SEQ ID NO: 31516 - DNA, 40 bp, Homo sapiens
aaacactgaagtaacacagtaacatcaagaatgggcacta

SEQ ID NO: 31517 - DNA, 40 bp, Homo sapiens
tagtgcccattcttgatgttactgtgttacttcagtgttt

SEQ ID NO: 31518 - DNA, 40 bp, Homo sapiens
aacactgaagtaacacagtaacatcaagaatgggcactac

SEQ ID NO: 31519 - DNA, 40 bp, Homo sapiens
gtagtgcccattcttgatgttactgtgttacttcagtgtt

SEQ ID NO: 31520 - DNA, 40 bp, Homo sapiens
acactgaagtaacacagtaacatcaagaatgggcactact

SEQ ID NO: 31521 - DNA, 40 bp, Homo sapiens
agtagtgcccattcttgatgttactgtgttacttcagtgt

SEQ ID NO: 31522 - DNA, 40 bp, Homo sapiens
cactgaagtaacacagtaacatcaagaatgggcactactc

SEQ ID NO: 31523 - DNA, 40 bp, Homo sapiens
gagtagtgcccattcttgatgttactgtgttacttcagtg

SEQ ID NO: 31524 - DNA, 40 bp, Homo sapiens
actgaagtaacacagtaacatcaagaatgggcactactcc

SEQ ID NO: 31525 - DNA, 40 bp, Homo sapiens
ggagtagtgcccattcttgatgttactgtgttacttcagt

SEQ ID NO: 31526 - DNA, 40 bp, Homo sapiens
ctgaagtaacacagtaacatcaagaatgggcactactcct

SEQ ID NO: 31527 - DNA, 40 bp, Homo sapiens
aggagtagtgcccattcttgatgttactgtgttacttcag

SEQ ID NO: 31528 - DNA, 40 bp, Homo sapiens
tgaagtaacacagtaacatcaagaatgggcactactccta

SEQ ID NO: 31529 - DNA, 40 bp, Homo sapiens
taggagtagtgcccattcttgatgttactgtgttacttca

SEQ ID NO: 31530 - DNA, 40 bp, Homo sapiens
gaagtaacacagtaacatcaagaatgggcactactcctaa

SEQ ID NO: 31531 - DNA, 40 bp, Homo sapiens
ttaggagtagtgcccattcttgatgttactgtgttacttc

SEQ ID NO: 31532 - DNA, 40 bp, Homo sapiens
aagtaacacagtaacatcaagaatgggcactactcctaag

SEQ ID NO: 31533 - DNA, 40 bp, Homo sapiens
cttaggagtagtgcccattcttgatgttactgtgttactt

SEQ ID NO: 31534 - DNA, 40 bp, Homo sapiens
agtaacacagtaacatcaagaatgggcactactcctaaga

SEQ ID NO: 31535 - DNA, 40 bp, Homo sapiens
tcttaggagtagtgcccattcttgatgttactgtgttact

SEQ ID NO: 31536 - DNA, 40 bp, Homo sapiens
gtaacacagtaacatcaagaatgggcactactcctaagat

SEQ ID NO: 31537 - DNA, 40 bp, Homo sapiens
atcttaggagtagtgcccattcttgatgttactgtgttac

SEQ ID NO: 31538 - DNA, 40 bp, Homo sapiens
taacacagtaacatcaagaatgggcactactcctaagatt

SEQ ID NO: 31539 - DNA, 40 bp, Homo sapiens
aatcttaggagtagtgcccattcttgatgttactgtgtta

SEQ ID NO: 31540 - DNA, 40 bp, Homo sapiens
aacacagtaacatcaagaatgggcactactcctaagattc

SEQ ID NO: 31541 - DNA, 40 bp, Homo sapiens
gaatcttaggagtagtgcccattcttgatgttactgtgtt

SEQ ID NO: 31542 - DNA, 40 bp, Homo sapiens
acacagtaacatcaagaatgggcactactcctaagattca

SEQ ID NO: 31543 - DNA, 40 bp, Homo sapiens
tgaatcttaggagtagtgcccattcttgatgttactgtgt

SEQ ID NO: 31544 - DNA, 40 bp, Homo sapiens
cacagtaacatcaagaatgggcactactcctaagattcag

SEQ ID NO: 31545 - DNA, 40 bp, Homo sapiens
ctgaatcttaggagtagtgcccattcttgatgttactgtg

SEQ ID NO: 31546 - DNA, 40 bp, Homo sapiens
acagtaacatcaagaatgggcactactcctaagattcagg

SEQ ID NO: 31547 - DNA, 40 bp, Homo sapiens
cctgaatcttaggagtagtgcccattcttgatgttactgt

SEQ ID NO: 31548 - DNA, 40 bp, Homo sapiens
cagtaacatcaagaatgggcactactcctaagattcaggg

SEQ ID NO: 31549 - DNA, 40 bp, Homo sapiens
ccctgaatcttaggagtagtgcccattcttgatgttactg

SEQ ID NO: 31550 - DNA, 40 bp, Homo sapiens
agtaacatcaagaatgggcactactcctaagattcaggga

SEQ ID NO: 31551 - DNA, 40 bp, Homo sapiens
tccctgaatcttaggagtagtgcccattcttgatgttact

SEQ ID NO: 31552 - DNA, 40 bp, Homo sapiens
gtaacatcaagaatgggcactactcctaagattcagggaa

SEQ ID NO: 31553 - DNA, 40 bp, Homo sapiens
ttccctgaatcttaggagtagtgcccattcttgatgttac

SEQ ID NO: 31554 - DNA, 40 bp, Homo sapiens
taacatcaagaatgggcactactcctaagattcagggaat

SEQ ID NO: 31555 - DNA, 40 bp, Homo sapiens
attccctgaatcttaggagtagtgcccattcttgatgtta

SEQ ID NO: 31556 - DNA, 40 bp, Homo sapiens
aacatcaagaatgggcactactcctaagattcagggaatg

SEQ ID NO: 31557 - DNA, 40 bp, Homo sapiens
cattccctgaatcttaggagtagtgcccattcttgatgtt

SEQ ID NO: 31558 - DNA, 40 bp, Homo sapiens
acatcaagaatgggcactactcctaagattcagggaatgc

SEQ ID NO: 31559 - DNA, 40 bp, Homo sapiens
gcattccctgaatcttaggagtagtgcccattcttgatgt

SEQ ID NO: 31560 - DNA, 40 bp, Homo sapiens
catcaagaatgggcactactcctaagattcagggaatgct

SEQ ID NO: 31561 - DNA, 40 bp, Homo sapiens
agcattccctgaatcttaggagtagtgcccattcttgatg

SEQ ID NO: 31562 - DNA, 40 bp, Homo sapiens
atcaagaatgggcactactcctaagattcagggaatgctg

SEQ ID NO: 31563 - DNA, 40 bp, Homo sapiens
cagcattccctgaatcttaggagtagtgcccattcttgat

SEQ ID NO: 31564 - DNA, 40 bp, Homo sapiens
tcaagaatgggcactactcctaagattcagggaatgctgg

SEQ ID NO: 31565 - DNA, 40 bp, Homo sapiens
ccagcattccctgaatcttaggagtagtgcccattcttga

SEQ ID NO: 31566 - DNA, 40 bp, Homo sapiens
caagaatgggcactactcctaagattcagggaatgctggg

SEQ ID NO: 31567 - DNA, 40 bp, Homo sapiens
cccagcattccctgaatcttaggagtagtgcccattcttg

SEQ ID NO: 31568 - DNA, 40 bp, Homo sapiens
aagaatgggcactactcctaagattcagggaatgctggga

SEQ ID NO: 31569 - DNA, 40 bp, Homo sapiens
tcccagcattccctgaatcttaggagtagtgcccattctt

SEQ ID NO: 31570 - DNA, 40 bp, Homo sapiens
agaatgggcactactcctaagattcagggaatgctgggaa

SEQ ID NO: 31571 - DNA, 40 bp, Homo sapiens
ttcccagcattccctgaatcttaggagtagtgcccattct

SEQ ID NO: 31572 - DNA, 40 bp, Homo sapiens
gaatgggcactactcctaagattcagggaatgctgggaag

SEQ ID NO: 31573 - DNA, 40 bp, Homo sapiens
cttcccagcattccctgaatcttaggagtagtgcccattc

SEQ ID NO: 31574 - DNA, 40 bp, Homo sapiens
aatgggcactactcctaagattcagggaatgctgggaaga

SEQ ID NO: 31575 - DNA, 40 bp, Homo sapiens
tcttcccagcattccctgaatcttaggagtagtgcccatt

SEQ ID NO: 31576 - DNA, 40 bp, Homo sapiens
atgggcactactcctaagattcagggaatgctgggaagat

SEQ ID NO: 31577 - DNA, 40 bp, Homo sapiens
atcttcccagcattccctgaatcttaggagtagtgcccat

SEQ ID NO: 31578 - DNA, 40 bp, Homo sapiens
tgggcactactcctaagattcagggaatgctgggaagatt

SEQ ID NO: 31579 - DNA, 40 bp, Homo sapiens
aatcttcccagcattccctgaatcttaggagtagtgccca

SEQ ID NO: 31580 - DNA, 40 bp, Homo sapiens
gggcactactcctaagattcagggaatgctgggaagattt

SEQ ID NO: 31581 - DNA, 40 bp, Homo sapiens
aaatcttcccagcattccctgaatcttaggagtagtgccc

SEQ ID NO: 31582 - DNA, 40 bp, Homo sapiens
ggcactactcctaagattcagggaatgctgggaagatttg

SEQ ID NO: 31583 - DNA, 40 bp, Homo sapiens
caaatcttcccagcattccctgaatcttaggagtagtgcc

SEQ ID NO: 31584 - DNA, 40 bp, Homo sapiens
gcactactcctaagattcagggaatgctgggaagatttgg

SEQ ID NO: 31585 - DNA, 40 bp, Homo sapiens
ccaaatcttcccagcattccctgaatcttaggagtagtgc

SEQ ID NO: 31586 - DNA, 40 bp, Homo sapiens
cactactcctaagattcagggaatgctgggaagatttggg

SEQ ID NO: 31587 - DNA, 40 bp, Homo sapiens
cccaaatcttcccagcattccctgaatcttaggagtagtg

SEQ ID NO: 31588 - DNA, 40 bp, Homo sapiens
actactcctaagattcagggaatgctgggaagatttgggg

SEQ ID NO: 31589 - DNA, 40 bp, Homo sapiens
ccccaaatcttcccagcattccctgaatcttaggagtagt

SEQ ID NO: 31590 - DNA, 40 bp, Homo sapiens
ctactcctaagattcagggaatgctgggaagatttggggt

SEQ ID NO: 31591 - DNA, 40 bp, Homo sapiens
accccaaatcttcccagcattccctgaatcttaggagtag

SEQ ID NO: 31592 - DNA, 40 bp, Homo sapiens
tactcctaagattcagggaatgctgggaagatttggggtt

SEQ ID NO: 31593 - DNA, 40 bp, Homo sapiens
aaccccaaatcttcccagcattccctgaatcttaggagta

SEQ ID NO: 31594 - DNA, 40 bp, Homo sapiens
actcctaagattcagggaatgctgggaagatttggggttt

SEQ ID NO: 31595 - DNA, 40 bp, Homo sapiens
aaaccccaaatcttcccagcattccctgaatcttaggagt

SEQ ID NO: 31596 - DNA, 40 bp, Homo sapiens
ctcctaagattcagggaatgctgggaagatttggggttta

SEQ ID NO: 31597 - DNA, 40 bp, Homo sapiens
taaaccccaaatcttcccagcattccctgaatcttaggag

SEQ ID NO: 31598 - DNA, 40 bp, Homo sapiens
tcctaagattcagggaatgctgggaagatttggggtttat

SEQ ID NO: 31599 - DNA, 40 bp, Homo sapiens
ataaaccccaaatcttcccagcattccctgaatcttagga

SEQ ID NO: 31600 - DNA, 40 bp, Homo sapiens
cctaagattcagggaatgctgggaagatttggggtttatc

SEQ ID NO: 31601 - DNA, 40 bp, Homo sapiens
gataaaccccaaatcttcccagcattccctgaatcttagg

SEQ ID NO: 31602 - DNA, 40 bp, Homo sapiens
ctaagattcagggaatgctgggaagatttggggtttatca

SEQ ID NO: 31603 - DNA, 40 bp, Homo sapiens
tgataaaccccaaatcttcccagcattccctgaatcttag

SEQ ID NO: 31604 - DNA, 40 bp, Homo sapiens
taagattcagggaatgctgggaagatttggggtttatcag

SEQ ID NO: 31605 - DNA, 40 bp, Homo sapiens
ctgataaaccccaaatcttcccagcattccctgaatctta

SEQ ID NO: 31606 - DNA, 40 bp, Homo sapiens
aagattcagggaatgctgggaagatttggggtttatcaga

SEQ ID NO: 31607 - DNA, 40 bp, Homo sapiens
tctgataaaccccaaatcttcccagcattccctgaatctt

SEQ ID NO: 31608 - DNA, 40 bp, Homo sapiens
agattcagggaatgctgggaagatttggggtttatcagaa

SEQ ID NO: 31609 - DNA, 40 bp, Homo sapiens
ttctgataaaccccaaatcttcccagcattccctgaatct

SEQ ID NO: 31610 - DNA, 40 bp, Homo sapiens
gattcagggaatgctgggaagatttggggtttatcagaac

SEQ ID NO: 31611 - DNA, 40 bp, Homo sapiens
gttctgataaaccccaaatcttcccagcattccctgaatc

SEQ ID NO: 31612 - DNA, 40 bp, Homo sapiens
attcagggaatgctgggaagatttggggtttatcagaact

SEQ ID NO: 31613 - DNA, 40 bp, Homo sapiens
agttctgataaaccccaaatcttcccagcattccctgaat

SEQ ID NO: 31614 - DNA, 40 bp, Homo sapiens
ttcagggaatgctgggaagatttggggtttatcagaactg

SEQ ID NO: 31615 - DNA, 40 bp, Homo sapiens
cagttctgataaaccccaaatcttcccagcattccctgaa

SEQ ID NO: 31616 - DNA, 40 bp, Homo sapiens
tcagggaatgctgggaagatttggggtttatcagaactgg

SEQ ID NO: 31617 - DNA, 40 bp, Homo sapiens
ccagttctgataaaccccaaatcttcccagcattccctga

SEQ ID NO: 31618 - DNA, 40 bp, Homo sapiens
cagggaatgctgggaagatttggggtttatcagaactgga

SEQ ID NO: 31619 - DNA, 40 bp, Homo sapiens
tccagttctgataaaccccaaatcttcccagcattccctg

SEQ ID NO: 31620 - DNA, 40 bp, Homo sapiens
agggaatgctgggaagatttggggtttatcagaactggaa

SEQ ID NO: 31621 - DNA, 40 bp, Homo sapiens
ttccagttctgataaaccccaaatcttcccagcattccct

SEQ ID NO: 31622 - DNA, 40 bp, Homo sapiens
gggaatgctgggaagatttggggtttatcagaactggaag

SEQ ID NO: 31623 - DNA, 40 bp, Homo sapiens
cttccagttctgataaaccccaaatcttcccagcattccc

SEQ ID NO: 31624 - DNA, 40 bp, Homo sapiens
ggaatgctgggaagatttggggtttatcagaactggaagc

SEQ ID NO: 31625 - DNA, 40 bp, Homo sapiens
gcttccagttctgataaaccccaaatcttcccagcattcc

SEQ ID NO: 31626 - DNA, 40 bp, Homo sapiens
gaatgctgggaagatttggggtttatcagaactggaagct

SEQ ID NO: 31627 - DNA, 40 bp, Homo sapiens
agcttccagttctgataaaccccaaatcttcccagcattc

SEQ ID NO: 31628 - DNA, 40 bp, Homo sapiens
aatgctgggaagatttggggtttatcagaactggaagctc

SEQ ID NO: 31629 - DNA, 40 bp, Homo sapiens
gagcttccagttctgataaaccccaaatcttcccagcatt

SEQ ID NO: 31630 - DNA, 40 bp, Homo sapiens
atgctgggaagatttggggtttatcagaactggaagctca

SEQ ID NO: 31631 - DNA, 40 bp, Homo sapiens
tgagcttccagttctgataaaccccaaatcttcccagcat

SEQ ID NO: 31632 - DNA, 40 bp, Homo sapiens
tgctgggaagatttggggtttatcagaactggaagctcag

SEQ ID NO: 31633 - DNA, 40 bp, Homo sapiens
ctgagcttccagttctgataaaccccaaatcttcccagca

SEQ ID NO: 31634 - DNA, 40 bp, Homo sapiens
gctgggaagatttggggtttatcagaactggaagctcaga

SEQ ID NO: 31635 - DNA, 40 bp, Homo sapiens
tctgagcttccagttctgataaaccccaaatcttcccagc

SEQ ID NO: 31636 - DNA, 40 bp, Homo sapiens
ctgggaagatttggggtttatcagaactggaagctcagag

SEQ ID NO: 31637 - DNA, 40 bp, Homo sapiens
ctctgagcttccagttctgataaaccccaaatcttcccag

SEQ ID NO: 31638 - DNA, 40 bp, Homo sapiens
tgggaagatttggggtttatcagaactggaagctcagagg

SEQ ID NO: 31639 - DNA, 40 bp, Homo sapiens
cctctgagcttccagttctgataaaccccaaatcttccca

SEQ ID NO: 31640 - DNA, 40 bp, Homo sapiens
gggaagatttggggtttatcagaactggaagctcagagga

SEQ ID NO: 31641 - DNA, 40 bp, Homo sapiens
tcctctgagcttccagttctgataaaccccaaatcttccc

SEQ ID NO: 31642 - DNA, 40 bp, Homo sapiens
ggaagatttggggtttatcagaactggaagctcagaggag

SEQ ID NO: 31643 - DNA, 40 bp, Homo sapiens
ctcctctgagcttccagttctgataaaccccaaatcttcc

SEQ ID NO: 31644 - DNA, 40 bp, Homo sapiens
gaagatttggggtttatcagaactggaagctcagaggagg

SEQ ID NO: 31645 - DNA, 40 bp, Homo sapiens
cctcctctgagcttccagttctgataaaccccaaatcttc

SEQ ID NO: 31646 - DNA, 40 bp, Homo sapiens
aagatttggggtttatcagaactggaagctcagaggaggg

SEQ ID NO: 31647 - DNA, 40 bp, Homo sapiens
ccctcctctgagcttccagttctgataaaccccaaatctt

SEQ ID NO: 31648 - DNA, 40 bp, Homo sapiens
agatttggggtttatcagaactggaagctcagaggagggg

SEQ ID NO: 31649 - DNA, 40 bp, Homo sapiens
cccctcctctgagcttccagttctgataaaccccaaatct

SEQ ID NO: 31650 - DNA, 40 bp, Homo sapiens
gatttggggtttatcagaactggaagctcagaggaggggc

SEQ ID NO: 31651 - DNA, 40 bp, Homo sapiens
gcccctcctctgagcttccagttctgataaaccccaaatc

SEQ ID NO: 31652 - DNA, 40 bp, Homo sapiens
atttggggtttatcagaactggaagctcagaggaggggcc

SEQ ID NO: 31653 - DNA, 40 bp, Homo sapiens
ggcccctcctctgagcttccagttctgataaaccccaaat

SEQ ID NO: 31654 - DNA, 40 bp, Homo sapiens
tttggggtttatcagaactggaagctcagaggaggggccc

SEQ ID NO: 31655 - DNA, 40 bp, Homo sapiens
gggcccctcctctgagcttccagttctgataaaccccaaa

SEQ ID NO: 31656 - DNA, 40 bp, Homo sapiens
ttggggtttatcagaactggaagctcagaggaggggcccc

SEQ ID NO: 31657 - DNA, 40 bp, Homo sapiens
ggggcccctcctctgagcttccagttctgataaaccccaa

SEQ ID NO: 31658 - DNA, 40 bp, Homo sapiens
tggggtttatcagaactggaagctcagaggaggggcccct

SEQ ID NO: 31659 - DNA, 40 bp, Homo sapiens
aggggcccctcctctgagcttccagttctgataaacccca

SEQ ID NO: 31660 - DNA, 40 bp, Homo sapiens
ggggtttatcagaactggaagctcagaggaggggcccctt

SEQ ID NO: 31661 - DNA, 40 bp, Homo sapiens
aaggggcccctcctctgagcttccagttctgataaacccc

SEQ ID NO: 31662 - DNA, 40 bp, Homo sapiens
gggtttatcagaactggaagctcagaggaggggccccttg

SEQ ID NO: 31663 - DNA, 40 bp, Homo sapiens
caaggggcccctcctctgagcttccagttctgataaaccc

SEQ ID NO: 31664 - DNA, 40 bp, Homo sapiens
ggtttatcagaactggaagctcagaggaggggccccttgt

SEQ ID NO: 31665 - DNA, 40 bp, Homo sapiens
acaaggggcccctcctctgagcttccagttctgataaacc

SEQ ID NO: 31666 - DNA, 40 bp, Homo sapiens
gtttatcagaactggaagctcagaggaggggccccttgtc

SEQ ID NO: 31667 - DNA, 40 bp, Homo sapiens
gacaaggggcccctcctctgagcttccagttctgataaac

SEQ ID NO: 31668 - DNA, 40 bp, Homo sapiens
tttatcagaactggaagctcagaggaggggccccttgtcg

SEQ ID NO: 31669 - DNA, 40 bp, Homo sapiens
cgacaaggggcccctcctctgagcttccagttctgataaa

SEQ ID NO: 31670 - DNA, 40 bp, Homo sapiens
ttatcagaactggaagctcagaggaggggccccttgtcgc

SEQ ID NO: 31671 - DNA, 40 bp, Homo sapiens
gcgacaaggggcccctcctctgagcttccagttctgataa

SEQ ID NO: 31672 - DNA, 40 bp, Homo sapiens
tatcagaactggaagctcagaggaggggccccttgtcgct

SEQ ID NO: 31673 - DNA, 40 bp, Homo sapiens
agcgacaaggggcccctcctctgagcttccagttctgata

SEQ ID NO: 31674 - DNA, 40 bp, Homo sapiens
atcagaactggaagctcagaggaggggccccttgtcgctg

SEQ ID NO: 31675 - DNA, 40 bp, Homo sapiens
cagcgacaaggggcccctcctctgagcttccagttctgat

SEQ ID NO: 31676 - DNA, 40 bp, Homo sapiens
tcagaactggaagctcagaggaggggccccttgtcgctga

SEQ ID NO: 31677 - DNA, 40 bp, Homo sapiens
tcagcgacaaggggcccctcctctgagcttccagttctga

SEQ ID NO: 31678 - DNA, 40 bp, Homo sapiens
cagaactggaagctcagaggaggggccccttgtcgctgag

SEQ ID NO: 31679 - DNA, 40 bp, Homo sapiens
ctcagcgacaaggggcccctcctctgagcttccagttctg

SEQ ID NO: 31680 - DNA, 40 bp, Homo sapiens
agaactggaagctcagaggaggggccccttgtcgctgagg

SEQ ID NO: 31681 - DNA, 40 bp, Homo sapiens
cctcagcgacaaggggcccctcctctgagcttccagttct

SEQ ID NO: 31682 - DNA, 40 bp, Homo sapiens
gaactggaagctcagaggaggggccccttgtcgctgaggc

SEQ ID NO: 31683 - DNA, 40 bp, Homo sapiens
gcctcagcgacaaggggcccctcctctgagcttccagttc

SEQ ID NO: 31684 - DNA, 40 bp, Homo sapiens
aactggaagctcagaggaggggccccttgtcgctgaggct

SEQ ID NO: 31685 - DNA, 40 bp, Homo sapiens
agcctcagcgacaaggggcccctcctctgagcttccagtt

SEQ ID NO: 31686 - DNA, 40 bp, Homo sapiens
actggaagctcagaggaggggccccttgtcgctgaggctt

SEQ ID NO: 31687 - DNA, 40 bp, Homo sapiens
aagcctcagcgacaaggggcccctcctctgagcttccagt

SEQ ID NO: 31688 - DNA, 40 bp, Homo sapiens
ctggaagctcagaggaggggccccttgtcgctgaggctta

SEQ ID NO: 31689 - DNA, 40 bp, Homo sapiens
taagcctcagcgacaaggggcccctcctctgagcttccag

SEQ ID NO: 31690 - DNA, 40 bp, Homo sapiens
tggaagctcagaggaggggccccttgtcgctgaggcttaa

SEQ ID NO: 31691 - DNA, 40 bp, Homo sapiens
ttaagcctcagcgacaaggggcccctcctctgagcttcca

SEQ ID NO: 31692 - DNA, 40 bp, Homo sapiens
ggaagctcagaggaggggccccttgtcgctgaggcttaat

SEQ ID NO: 31693 - DNA, 40 bp, Homo sapiens
attaagcctcagcgacaaggggcccctcctctgagcttcc

SEQ ID NO: 31694 - DNA, 40 bp, Homo sapiens
gaagctcagaggaggggccccttgtcgctgaggcttaatc

SEQ ID NO: 31695 - DNA, 40 bp, Homo sapiens
gattaagcctcagcgacaaggggcccctcctctgagcttc

SEQ ID NO: 31696 - DNA, 40 bp, Homo sapiens
aagctcagaggaggggccccttgtcgctgaggcttaatcc

SEQ ID NO: 31697 - DNA, 40 bp, Homo sapiens
ggattaagcctcagcgacaaggggcccctcctctgagctt

SEQ ID NO: 31698 - DNA, 40 bp, Homo sapiens
agctcagaggaggggccccttgtcgctgaggcttaatccc

SEQ ID NO: 31699 - DNA, 40 bp, Homo sapiens
gggattaagcctcagcgacaaggggcccctcctctgagct

SEQ ID NO: 31700 - DNA, 40 bp, Homo sapiens
gctcagaggaggggccccttgtcgctgaggcttaatccct

SEQ ID NO: 31701 - DNA, 40 bp, Homo sapiens
agggattaagcctcagcgacaaggggcccctcctctgagc

SEQ ID NO: 31702 - DNA, 40 bp, Homo sapiens
ctcagaggaggggccccttgtcgctgaggcttaatccctg

SEQ ID NO: 31703 - DNA, 40 bp, Homo sapiens
cagggattaagcctcagcgacaaggggcccctcctctgag

SEQ ID NO: 31704 - DNA, 40 bp, Homo sapiens
tcagaggaggggccccttgtcgctgaggcttaatccctgc

SEQ ID NO: 31705 - DNA, 40 bp, Homo sapiens
gcagggattaagcctcagcgacaaggggcccctcctctga

SEQ ID NO: 31706 - DNA, 40 bp, Homo sapiens
cagaggaggggccccttgtcgctgaggcttaatccctgca

SEQ ID NO: 31707 - DNA, 40 bp, Homo sapiens
tgcagggattaagcctcagcgacaaggggcccctcctctg

SEQ ID NO: 31708 - DNA, 40 bp, Homo sapiens
agaggaggggccccttgtcgctgaggcttaatccctgcag

SEQ ID NO: 31709 - DNA, 40 bp, Homo sapiens
ctgcagggattaagcctcagcgacaaggggcccctcctct

SEQ ID NO: 31710 - DNA, 40 bp, Homo sapiens
gaggaggggccccttgtcgctgaggcttaatccctgcaga

SEQ ID NO: 31711 - DNA, 40 bp, Homo sapiens
tctgcagggattaagcctcagcgacaaggggcccctcctc

SEQ ID NO: 31712 - DNA, 40 bp, Homo sapiens
aggaggggccccttgtcgctgaggcttaatccctgcagag

SEQ ID NO: 31713 - DNA, 40 bp, Homo sapiens
ctctgcagggattaagcctcagcgacaaggggcccctcct

SEQ ID NO: 31714 - DNA, 40 bp, Homo sapiens
ggaggggccccttgtcgctgaggcttaatccctgcagagg

SEQ ID NO: 31715 - DNA, 40 bp, Homo sapiens
cctctgcagggattaagcctcagcgacaaggggcccctcc

SEQ ID NO: 31716 - DNA, 40 bp, Homo sapiens
gaggggccccttgtcgctgaggcttaatccctgcagaggt

SEQ ID NO: 31717 - DNA, 40 bp, Homo sapiens
acctctgcagggattaagcctcagcgacaaggggcccctc

SEQ ID NO: 31718 - DNA, 40 bp, Homo sapiens
aggggccccttgtcgctgaggcttaatccctgcagaggtg

SEQ ID NO: 31719 - DNA, 40 bp, Homo sapiens
cacctctgcagggattaagcctcagcgacaaggggcccct

SEQ ID NO: 31720 - DNA, 40 bp, Homo sapiens
ggggccccttgtcgctgaggcttaatccctgcagaggtgc

SEQ ID NO: 31721 - DNA, 40 bp, Homo sapiens
gcacctctgcagggattaagcctcagcgacaaggggcccc

SEQ ID NO: 31722 - DNA, 40 bp, Homo sapiens
gggccccttgtcgctgaggcttaatccctgcagaggtgcc

SEQ ID NO: 31723 - DNA, 40 bp, Homo sapiens
ggcacctctgcagggattaagcctcagcgacaaggggccc

SEQ ID NO: 31724 - DNA, 40 bp, Homo sapiens
ggccccttgtcgctgaggcttaatccctgcagaggtgcct

SEQ ID NO: 31725 - DNA, 40 bp, Homo sapiens
aggcacctctgcagggattaagcctcagcgacaaggggcc

SEQ ID NO: 31726 - DNA, 40 bp, Homo sapiens
gccccttgtcgctgaggcttaatccctgcagaggtgcctt

SEQ ID NO: 31727 - DNA, 40 bp, Homo sapiens
aaggcacctctgcagggattaagcctcagcgacaaggggc

SEQ ID NO: 31728 - DNA, 40 bp, Homo sapiens
ccccttgtcgctgaggcttaatccctgcagaggtgccttt

SEQ ID NO: 31729 - DNA, 40 bp, Homo sapiens
aaaggcacctctgcagggattaagcctcagcgacaagggg

SEQ ID NO: 31730 - DNA, 40 bp, Homo sapiens
cccttgtcgctgaggcttaatccctgcagaggtgcctttg

SEQ ID NO: 31731 - DNA, 40 bp, Homo sapiens
caaaggcacctctgcagggattaagcctcagcgacaaggg

SEQ ID NO: 31732 - DNA, 40 bp, Homo sapiens
ccttgtcgctgaggcttaatccctgcagaggtgcctttgg

SEQ ID NO: 31733 - DNA, 40 bp, Homo sapiens
ccaaaggcacctctgcagggattaagcctcagcgacaagg

SEQ ID NO: 31734 - DNA, 40 bp, Homo sapiens
cttgtcgctgaggcttaatccctgcagaggtgcctttggc

SEQ ID NO: 31735 - DNA, 40 bp, Homo sapiens
gccaaaggcacctctgcagggattaagcctcagcgacaag

SEQ ID NO: 31736 - DNA, 40 bp, Homo sapiens
ttgtcgctgaggcttaatccctgcagaggtgcctttggct

SEQ ID NO: 31737 - DNA, 40 bp, Homo sapiens
agccaaaggcacctctgcagggattaagcctcagcgacaa

SEQ ID NO: 31738 - DNA, 40 bp, Homo sapiens
tgtcgctgaggcttaatccctgcagaggtgcctttggctg

SEQ ID NO: 31739 - DNA, 40 bp, Homo sapiens
cagccaaaggcacctctgcagggattaagcctcagcgaca

SEQ ID NO: 31740 - DNA, 40 bp, Homo sapiens
gtcgctgaggcttaatccctgcagaggtgcctttggctgc

SEQ ID NO: 31741 - DNA, 40 bp, Homo sapiens
gcagccaaaggcacctctgcagggattaagcctcagcgac

SEQ ID NO: 31742 - DNA, 40 bp, Homo sapiens
tcgctgaggcttaatccctgcagaggtgcctttggctgct

SEQ ID NO: 31743 - DNA, 40 bp, Homo sapiens
agcagccaaaggcacctctgcagggattaagcctcagcga

SEQ ID NO: 31744 - DNA, 40 bp, Homo sapiens
cgctgaggcttaatccctgcagaggtgcctttggctgcta

SEQ ID NO: 31745 - DNA, 40 bp, Homo sapiens
tagcagccaaaggcacctctgcagggattaagcctcagcg

SEQ ID NO: 31746 - DNA, 40 bp, Homo sapiens
gctgaggcttaatccctgcagaggtgcctttggctgctac

SEQ ID NO: 31747 - DNA, 40 bp, Homo sapiens
gtagcagccaaaggcacctctgcagggattaagcctcagc

SEQ ID NO: 31748 - DNA, 40 bp, Homo sapiens
ctgaggcttaatccctgcagaggtgcctttggctgctact

SEQ ID NO: 31749 - DNA, 40 bp, Homo sapiens
agtagcagccaaaggcacctctgcagggattaagcctcag

SEQ ID NO: 31750 - DNA, 40 bp, Homo sapiens
tgaggcttaatccctgcagaggtgcctttggctgctactg

SEQ ID NO: 31751 - DNA, 40 bp, Homo sapiens
cagtagcagccaaaggcacctctgcagggattaagcctca

SEQ ID NO: 31752 - DNA, 40 bp, Homo sapiens
gaggcttaatccctgcagaggtgcctttggctgctactgg

SEQ ID NO: 31753 - DNA, 40 bp, Homo sapiens
ccagtagcagccaaaggcacctctgcagggattaagcctc

SEQ ID NO: 31754 - DNA, 40 bp, Homo sapiens
aggcttaatccctgcagaggtgcctttggctgctactggt

SEQ ID NO: 31755 - DNA, 40 bp, Homo sapiens
accagtagcagccaaaggcacctctgcagggattaagcct

SEQ ID NO: 31756 - DNA, 40 bp, Homo sapiens
ggcttaatccctgcagaggtgcctttggctgctactggtg

SEQ ID NO: 31757 - DNA, 40 bp, Homo sapiens
caccagtagcagccaaaggcacctctgcagggattaagcc

SEQ ID NO: 31758 - DNA, 40 bp, Homo sapiens
gcttaatccctgcagaggtgcctttggctgctactggtga

SEQ ID NO: 31759 - DNA, 40 bp, Homo sapiens
tcaccagtagcagccaaaggcacctctgcagggattaagc

SEQ ID NO: 31760 - DNA, 40 bp, Homo sapiens
cttaatccctgcagaggtgcctttggctgctactggtgaa

SEQ ID NO: 31761 - DNA, 40 bp, Homo sapiens
ttcaccagtagcagccaaaggcacctctgcagggattaag

SEQ ID NO: 31762 - DNA, 40 bp, Homo sapiens
ttaatccctgcagaggtgcctttggctgctactggtgaat

SEQ ID NO: 31763 - DNA, 40 bp, Homo sapiens
attcaccagtagcagccaaaggcacctctgcagggattaa

SEQ ID NO: 31764 - DNA, 40 bp, Homo sapiens
taatccctgcagaggtgcctttggctgctactggtgaatc

SEQ ID NO: 31765 - DNA, 40 bp, Homo sapiens
gattcaccagtagcagccaaaggcacctctgcagggatta

SEQ ID NO: 31766 - DNA, 40 bp, Homo sapiens
aatccctgcagaggtgcctttggctgctactggtgaatct

SEQ ID NO: 31767 - DNA, 40 bp, Homo sapiens
agattcaccagtagcagccaaaggcacctctgcagggatt

SEQ ID NO: 31768 - DNA, 40 bp, Homo sapiens
atccctgcagaggtgcctttggctgctactggtgaatctg

SEQ ID NO: 31769 - DNA, 40 bp, Homo sapiens
cagattcaccagtagcagccaaaggcacctctgcagggat

SEQ ID NO: 31770 - DNA, 40 bp, Homo sapiens
tccctgcagaggtgcctttggctgctactggtgaatctga

SEQ ID NO: 31771 - DNA, 40 bp, Homo sapiens
tcagattcaccagtagcagccaaaggcacctctgcaggga

SEQ ID NO: 31772 - DNA, 40 bp, Homo sapiens
ccctgcagaggtgcctttggctgctactggtgaatctgag

SEQ ID NO: 31773 - DNA, 40 bp, Homo sapiens
ctcagattcaccagtagcagccaaaggcacctctgcaggg

SEQ ID NO: 31774 - DNA, 40 bp, Homo sapiens
cctgcagaggtgcctttggctgctactggtgaatctgagt

SEQ ID NO: 31775 - DNA, 40 bp, Homo sapiens
actcagattcaccagtagcagccaaaggcacctctgcagg

SEQ ID NO: 31776 - DNA, 40 bp, Homo sapiens
ctgcagaggtgcctttggctgctactggtgaatctgagtg

SEQ ID NO: 31777 - DNA, 40 bp, Homo sapiens
cactcagattcaccagtagcagccaaaggcacctctgcag

SEQ ID NO: 31778 - DNA, 40 bp, Homo sapiens
tgcagaggtgcctttggctgctactggtgaatctgagtgg

SEQ ID NO: 31779 - DNA, 40 bp, Homo sapiens
ccactcagattcaccagtagcagccaaaggcacctctgca

SEQ ID NO: 31780 - DNA, 40 bp, Homo sapiens
gcagaggtgcctttggctgctactggtgaatctgagtggg

SEQ ID NO: 31781 - DNA, 40 bp, Homo sapiens
cccactcagattcaccagtagcagccaaaggcacctctgc

SEQ ID NO: 31782 - DNA, 40 bp, Homo sapiens
cagaggtgcctttggctgctactggtgaatctgagtgggt

SEQ ID NO: 31783 - DNA, 40 bp, Homo sapiens
acccactcagattcaccagtagcagccaaaggcacctctg

SEQ ID NO: 31784 - DNA, 40 bp, Homo sapiens
agaggtgcctttggctgctactggtgaatctgagtgggta

SEQ ID NO: 31785 - DNA, 40 bp, Homo sapiens
tacccactcagattcaccagtagcagccaaaggcacctct

SEQ ID NO: 31786 - DNA, 40 bp, Homo sapiens
gaggtgcctttggctgctactggtgaatctgagtgggtat

SEQ ID NO: 31787 - DNA, 40 bp, Homo sapiens
atacccactcagattcaccagtagcagccaaaggcacctc

SEQ ID NO: 31788 - DNA, 40 bp, Homo sapiens
aggtgcctttggctgctactggtgaatctgagtgggtatg

SEQ ID NO: 31789 - DNA, 40 bp, Homo sapiens
catacccactcagattcaccagtagcagccaaaggcacct

SEQ ID NO: 31790 - DNA, 40 bp, Homo sapiens
ggtgcctttggctgctactggtgaatctgagtgggtatga

SEQ ID NO: 31791 - DNA, 40 bp, Homo sapiens
tcatacccactcagattcaccagtagcagccaaaggcacc

SEQ ID NO: 31792 - DNA, 40 bp, Homo sapiens
gtgcctttggctgctactggtgaatctgagtgggtatgat

SEQ ID NO: 31793 - DNA, 40 bp, Homo sapiens
atcatacccactcagattcaccagtagcagccaaaggcac

SEQ ID NO: 31794 - DNA, 40 bp, Homo sapiens
tgcctttggctgctactggtgaatctgagtgggtatgatg

SEQ ID NO: 31795 - DNA, 40 bp, Homo sapiens
catcatacccactcagattcaccagtagcagccaaaggca

SEQ ID NO: 31796 - DNA, 40 bp, Homo sapiens
gcctttggctgctactggtgaatctgagtgggtatgatga

SEQ ID NO: 31797 - DNA, 40 bp, Homo sapiens
tcatcatacccactcagattcaccagtagcagccaaaggc

SEQ ID NO: 31798 - DNA, 40 bp, Homo sapiens
cctttggctgctactggtgaatctgagtgggtatgatgag

SEQ ID NO: 31799 - DNA, 40 bp, Homo sapiens
ctcatcatacccactcagattcaccagtagcagccaaagg

SEQ ID NO: 31800 - DNA, 40 bp, Homo sapiens
ctttggctgctactggtgaatctgagtgggtatgatgagt

SEQ ID NO: 31801 - DNA, 40 bp, Homo sapiens
actcatcatacccactcagattcaccagtagcagccaaag

SEQ ID NO: 31802 - DNA, 40 bp, Homo sapiens
tttggctgctactggtgaatctgagtgggtatgatgagtc

SEQ ID NO: 31803 - DNA, 40 bp, Homo sapiens
gactcatcatacccactcagattcaccagtagcagccaaa

SEQ ID NO: 31804 - DNA, 40 bp, Homo sapiens
ttggctgctactggtgaatctgagtgggtatgatgagtca

SEQ ID NO: 31805 - DNA, 40 bp, Homo sapiens
tgactcatcatacccactcagattcaccagtagcagccaa

SEQ ID NO: 31806 - DNA, 40 bp, Homo sapiens
tggctgctactggtgaatctgagtgggtatgatgagtcag

SEQ ID NO: 31807 - DNA, 40 bp, Homo sapiens
ctgactcatcatacccactcagattcaccagtagcagcca

SEQ ID NO: 31808 - DNA, 40 bp, Homo sapiens
ggctgctactggtgaatctgagtgggtatgatgagtcagt

SEQ ID NO: 31809 - DNA, 40 bp, Homo sapiens
actgactcatcatacccactcagattcaccagtagcagcc

SEQ ID NO: 31810 - DNA, 40 bp, Homo sapiens
gctgctactggtgaatctgagtgggtatgatgagtcagtg

SEQ ID NO: 31811 - DNA, 40 bp, Homo sapiens
cactgactcatcatacccactcagattcaccagtagcagc

SEQ ID NO: 31812 - DNA, 40 bp, Homo sapiens
ctgctactggtgaatctgagtgggtatgatgagtcagtgt

SEQ ID NO: 31813 - DNA, 40 bp, Homo sapiens
acactgactcatcatacccactcagattcaccagtagcag

SEQ ID NO: 31814 - DNA, 40 bp, Homo sapiens
tgctactggtgaatctgagtgggtatgatgagtcagtgtc

SEQ ID NO: 31815 - DNA, 40 bp, Homo sapiens
gacactgactcatcatacccactcagattcaccagtagca

SEQ ID NO: 31816 - DNA, 40 bp, Homo sapiens
gctactggtgaatctgagtgggtatgatgagtcagtgtct

SEQ ID NO: 31817 - DNA, 40 bp, Homo sapiens
agacactgactcatcatacccactcagattcaccagtagc

SEQ ID NO: 31818 - DNA, 40 bp, Homo sapiens
ctactggtgaatctgagtgggtatgatgagtcagtgtctg

SEQ ID NO: 31819 - DNA, 40 bp, Homo sapiens
cagacactgactcatcatacccactcagattcaccagtag

SEQ ID NO: 31820 - DNA, 40 bp, Homo sapiens
tactggtgaatctgagtgggtatgatgagtcagtgtctgg

SEQ ID NO: 31821 - DNA, 40 bp, Homo sapiens
ccagacactgactcatcatacccactcagattcaccagta

SEQ ID NO: 31822 - DNA, 40 bp, Homo sapiens
actggtgaatctgagtgggtatgatgagtcagtgtctggg

SEQ ID NO: 31823 - DNA, 40 bp, Homo sapiens
cccagacactgactcatcatacccactcagattcaccagt

SEQ ID NO: 31824 - DNA, 40 bp, Homo sapiens
ctggtgaatctgagtgggtatgatgagtcagtgtctggga

SEQ ID NO: 31825 - DNA, 40 bp, Homo sapiens
tcccagacactgactcatcatacccactcagattcaccag

SEQ ID NO: 31826 - DNA, 40 bp, Homo sapiens
tggtgaatctgagtgggtatgatgagtcagtgtctgggaa

SEQ ID NO: 31827 - DNA, 40 bp, Homo sapiens
ttcccagacactgactcatcatacccactcagattcacca

SEQ ID NO: 31828 - DNA, 40 bp, Homo sapiens
ggtgaatctgagtgggtatgatgagtcagtgtctgggaag

SEQ ID NO: 31829 - DNA, 40 bp, Homo sapiens
cttcccagacactgactcatcatacccactcagattcacc

SEQ ID NO: 31830 - DNA, 40 bp, Homo sapiens
gtgaatctgagtgggtatgatgagtcagtgtctgggaagg

SEQ ID NO: 31831 - DNA, 40 bp, Homo sapiens
ccttcccagacactgactcatcatacccactcagattcac

SEQ ID NO: 31832 - DNA, 40 bp, Homo sapiens
tgaatctgagtgggtatgatgagtcagtgtctgggaaggg

SEQ ID NO: 31833 - DNA, 40 bp, Homo sapiens
cccttcccagacactgactcatcatacccactcagattca

SEQ ID NO: 31834 - DNA, 40 bp, Homo sapiens
gaatctgagtgggtatgatgagtcagtgtctgggaagggc

SEQ ID NO: 31835 - DNA, 40 bp, Homo sapiens
gcccttcccagacactgactcatcatacccactcagattc

SEQ ID NO: 31836 - DNA, 40 bp, Homo sapiens
aatctgagtgggtatgatgagtcagtgtctgggaagggcc

SEQ ID NO: 31837 - DNA, 40 bp, Homo sapiens
ggcccttcccagacactgactcatcatacccactcagatt

SEQ ID NO: 31838 - DNA, 40 bp, Homo sapiens
atctgagtgggtatgatgagtcagtgtctgggaagggcca

SEQ ID NO: 31839 - DNA, 40 bp, Homo sapiens
tggcccttcccagacactgactcatcatacccactcagat

SEQ ID NO: 31840 - DNA, 40 bp, Homo sapiens
tctgagtgggtatgatgagtcagtgtctgggaagggccaa

SEQ ID NO: 31841 - DNA, 40 bp, Homo sapiens
ttggcccttcccagacactgactcatcatacccactcaga

SEQ ID NO: 31842 - DNA, 40 bp, Homo sapiens
ctgagtgggtatgatgagtcagtgtctgggaagggccaaa

SEQ ID NO: 31843 - DNA, 40 bp, Homo sapiens
tttggcccttcccagacactgactcatcatacccactcag

SEQ ID NO: 31844 - DNA, 40 bp, Homo sapiens
tgagtgggtatgatgagtcagtgtctgggaagggccaaaa

SEQ ID NO: 31845 - DNA, 40 bp, Homo sapiens
ttttggcccttcccagacactgactcatcatacccactca

SEQ ID NO: 31846 - DNA, 40 bp, Homo sapiens
gagtgggtatgatgagtcagtgtctgggaagggccaaaac

SEQ ID NO: 31847 - DNA, 40 bp, Homo sapiens
gttttggcccttcccagacactgactcatcatacccactc

SEQ ID NO: 31848 - DNA, 40 bp, Homo sapiens
agtgggtatgatgagtcagtgtctgggaagggccaaaaca

SEQ ID NO: 31849 - DNA, 40 bp, Homo sapiens
tgttttggcccttcccagacactgactcatcatacccact

SEQ ID NO: 31850 - DNA, 40 bp, Homo sapiens
gtgggtatgatgagtcagtgtctgggaagggccaaaacat

SEQ ID NO: 31851 - DNA, 40 bp, Homo sapiens
atgttttggcccttcccagacactgactcatcatacccac

SEQ ID NO: 31852 - DNA, 40 bp, Homo sapiens
tgggtatgatgagtcagtgtctgggaagggccaaaacatt

SEQ ID NO: 31853 - DNA, 40 bp, Homo sapiens
aatgttttggcccttcccagacactgactcatcataccca

SEQ ID NO: 31854 - DNA, 40 bp, Homo sapiens
gggtatgatgagtcagtgtctgggaagggccaaaacattt

SEQ ID NO: 31855 - DNA, 40 bp, Homo sapiens
aaatgttttggcccttcccagacactgactcatcataccc

SEQ ID NO: 31856 - DNA, 40 bp, Homo sapiens
ggtatgatgagtcagtgtctgggaagggccaaaacatttt

SEQ ID NO: 31857 - DNA, 40 bp, Homo sapiens
aaaatgttttggcccttcccagacactgactcatcatacc

SEQ ID NO: 31858 - DNA, 40 bp, Homo sapiens
gtatgatgagtcagtgtctgggaagggccaaaacattttg

SEQ ID NO: 31859 - DNA, 40 bp, Homo sapiens
caaaatgttttggcccttcccagacactgactcatcatac

SEQ ID NO: 31860 - DNA, 40 bp, Homo sapiens
tatgatgagtcagtgtctgggaagggccaaaacattttgt

SEQ ID NO: 31861 - DNA, 40 bp, Homo sapiens
acaaaatgttttggcccttcccagacactgactcatcata

SEQ ID NO: 31862 - DNA, 40 bp, Homo sapiens
atgatgagtcagtgtctgggaagggccaaaacattttgtc

SEQ ID NO: 31863 - DNA, 40 bp, Homo sapiens
gacaaaatgttttggcccttcccagacactgactcatcat

SEQ ID NO: 31864 - DNA, 40 bp, Homo sapiens
tgatgagtcagtgtctgggaagggccaaaacattttgtcc

SEQ ID NO: 31865 - DNA, 40 bp, Homo sapiens
ggacaaaatgttttggcccttcccagacactgactcatca

SEQ ID NO: 31866 - DNA, 40 bp, Homo sapiens
gatgagtcagtgtctgggaagggccaaaacattttgtccc

SEQ ID NO: 31867 - DNA, 40 bp, Homo sapiens
gggacaaaatgttttggcccttcccagacactgactcatc

SEQ ID NO: 31868 - DNA, 40 bp, Homo sapiens
atgagtcagtgtctgggaagggccaaaacattttgtccct

SEQ ID NO: 31869 - DNA, 40 bp, Homo sapiens
agggacaaaatgttttggcccttcccagacactgactcat

SEQ ID NO: 31870 - DNA, 40 bp, Homo sapiens
tgagtcagtgtctgggaagggccaaaacattttgtccctt

SEQ ID NO: 31871 - DNA, 40 bp, Homo sapiens
aagggacaaaatgttttggcccttcccagacactgactca

SEQ ID NO: 31872 - DNA, 40 bp, Homo sapiens
gagtcagtgtctgggaagggccaaaacattttgtcccttt

SEQ ID NO: 31873 - DNA, 40 bp, Homo sapiens
aaagggacaaaatgttttggcccttcccagacactgactc

SEQ ID NO: 31874 - DNA, 40 bp, Homo sapiens
agtcagtgtctgggaagggccaaaacattttgtccctttc

SEQ ID NO: 31875 - DNA, 40 bp, Homo sapiens
gaaagggacaaaatgttttggcccttcccagacactgact

SEQ ID NO: 31876 - DNA, 40 bp, Homo sapiens
gtcagtgtctgggaagggccaaaacattttgtccctttct

SEQ ID NO: 31877 - DNA, 40 bp, Homo sapiens
agaaagggacaaaatgttttggcccttcccagacactgac

SEQ ID NO: 31878 - DNA, 40 bp, Homo sapiens
tcagtgtctgggaagggccaaaacattttgtccctttcta

SEQ ID NO: 31879 - DNA, 40 bp, Homo sapiens
tagaaagggacaaaatgttttggcccttcccagacactga

SEQ ID NO: 31880 - DNA, 40 bp, Homo sapiens
cagtgtctgggaagggccaaaacattttgtccctttctat

SEQ ID NO: 31881 - DNA, 40 bp, Homo sapiens
atagaaagggacaaaatgttttggcccttcccagacactg

SEQ ID NO: 31882 - DNA, 40 bp, Homo sapiens
agtgtctgggaagggccaaaacattttgtccctttctata

SEQ ID NO: 31883 - DNA, 40 bp, Homo sapiens
tatagaaagggacaaaatgttttggcccttcccagacact

SEQ ID NO: 31884 - DNA, 40 bp, Homo sapiens
gtgtctgggaagggccaaaacattttgtccctttctataa

SEQ ID NO: 31885 - DNA, 40 bp, Homo sapiens
ttatagaaagggacaaaatgttttggcccttcccagacac

SEQ ID NO: 31886 - DNA, 40 bp, Homo sapiens
tgtctgggaagggccaaaacattttgtccctttctataat

SEQ ID NO: 31887 - DNA, 40 bp, Homo sapiens
attatagaaagggacaaaatgttttggcccttcccagaca

SEQ ID NO: 31888 - DNA, 40 bp, Homo sapiens
gtctgggaagggccaaaacattttgtccctttctataatt

SEQ ID NO: 31889 - DNA, 40 bp, Homo sapiens
aattatagaaagggacaaaatgttttggcccttcccagac

SEQ ID NO: 31890 - DNA, 40 bp, Homo sapiens
tctgggaagggccaaaacattttgtccctttctataattt

SEQ ID NO: 31891 - DNA, 40 bp, Homo sapiens
aaattatagaaagggacaaaatgttttggcccttcccaga

SEQ ID NO: 31892 - DNA, 40 bp, Homo sapiens
ctgggaagggccaaaacattttgtccctttctataatttg

SEQ ID NO: 31893 - DNA, 40 bp, Homo sapiens
caaattatagaaagggacaaaatgttttggcccttcccag

SEQ ID NO: 31894 - DNA, 40 bp, Homo sapiens
tgggaagggccaaaacattttgtccctttctataatttgt

SEQ ID NO: 31895 - DNA, 40 bp, Homo sapiens
acaaattatagaaagggacaaaatgttttggcccttccca

SEQ ID NO: 31896 - DNA, 40 bp, Homo sapiens
gggaagggccaaaacattttgtccctttctataatttgtc

SEQ ID NO: 31897 - DNA, 40 bp, Homo sapiens
gacaaattatagaaagggacaaaatgttttggcccttccc

SEQ ID NO: 31898 - DNA, 40 bp, Homo sapiens
ggaagggccaaaacattttgtccctttctataatttgtca

SEQ ID NO: 31899 - DNA, 40 bp, Homo sapiens
tgacaaattatagaaagggacaaaatgttttggcccttcc

SEQ ID NO: 31900 - DNA, 40 bp, Homo sapiens
gaagggccaaaacattttgtccctttctataatttgtcat

SEQ ID NO: 31901 - DNA, 40 bp, Homo sapiens
atgacaaattatagaaagggacaaaatgttttggcccttc

SEQ ID NO: 31902 - DNA, 40 bp, Homo sapiens
aagggccaaaacattttgtccctttctataatttgtcatg

SEQ ID NO: 31903 - DNA, 40 bp, Homo sapiens
catgacaaattatagaaagggacaaaatgttttggccctt

SEQ ID NO: 31904 - DNA, 40 bp, Homo sapiens
agggccaaaacattttgtccctttctataatttgtcatga

SEQ ID NO: 31905 - DNA, 40 bp, Homo sapiens
tcatgacaaattatagaaagggacaaaatgttttggccct

SEQ ID NO: 31906 - DNA, 40 bp, Homo sapiens
gggccaaaacattttgtccctttctataatttgtcatgat

SEQ ID NO: 31907 - DNA, 40 bp, Homo sapiens
atcatgacaaattatagaaagggacaaaatgttttggccc

SEQ ID NO: 31908 - DNA, 40 bp, Homo sapiens
ggccaaaacattttgtccctttctataatttgtcatgata

SEQ ID NO: 31909 - DNA, 40 bp, Homo sapiens
tatcatgacaaattatagaaagggacaaaatgttttggcc

SEQ ID NO: 31910 - DNA, 40 bp, Homo sapiens
gccaaaacattttgtccctttctataatttgtcatgataa

SEQ ID NO: 31911 - DNA, 40 bp, Homo sapiens
ttatcatgacaaattatagaaagggacaaaatgttttggc

SEQ ID NO: 31912 - DNA, 40 bp, Homo sapiens
ccaaaacattttgtccctttctataatttgtcatgataat

SEQ ID NO: 31913 - DNA, 40 bp, Homo sapiens
attatcatgacaaattatagaaagggacaaaatgttttgg

SEQ ID NO: 31914 - DNA, 40 bp, Homo sapiens
caaaacattttgtccctttctataatttgtcatgataatg

SEQ ID NO: 31915 - DNA, 40 bp, Homo sapiens
cattatcatgacaaattatagaaagggacaaaatgttttg

SEQ ID NO: 31916 - DNA, 40 bp, Homo sapiens
aaaacattttgtccctttctataatttgtcatgataatgc

SEQ ID NO: 31917 - DNA, 40 bp, Homo sapiens
gcattatcatgacaaattatagaaagggacaaaatgtttt

SEQ ID NO: 31918 - DNA, 40 bp, Homo sapiens
aaacattttgtccctttctataatttgtcatgataatgct

SEQ ID NO: 31919 - DNA, 40 bp, Homo sapiens
agcattatcatgacaaattatagaaagggacaaaatgttt

SEQ ID NO: 31920 - DNA, 40 bp, Homo sapiens
aacattttgtccctttctataatttgtcatgataatgcta

SEQ ID NO: 31921 - DNA, 40 bp, Homo sapiens
tagcattatcatgacaaattatagaaagggacaaaatgtt

SEQ ID NO: 31922 - DNA, 40 bp, Homo sapiens
acattttgtccctttctataatttgtcatgataatgctag

SEQ ID NO: 31923 - DNA, 40 bp, Homo sapiens
ctagcattatcatgacaaattatagaaagggacaaaatgt

SEQ ID NO: 31924 - DNA, 40 bp, Homo sapiens
cattttgtccctttctataatttgtcatgataatgctagt

SEQ ID NO: 31925 - DNA, 40 bp, Homo sapiens
actagcattatcatgacaaattatagaaagggacaaaatg

SEQ ID NO: 31926 - DNA, 40 bp, Homo sapiens
attttgtccctttctataatttgtcatgataatgctagta

SEQ ID NO: 31927 - DNA, 40 bp, Homo sapiens
tactagcattatcatgacaaattatagaaagggacaaaat

SEQ ID NO: 31928 - DNA, 40 bp, Homo sapiens
ttttgtccctttctataatttgtcatgataatgctagtaa

SEQ ID NO: 31929 - DNA, 40 bp, Homo sapiens
ttactagcattatcatgacaaattatagaaagggacaaaa

SEQ ID NO: 31930 - DNA, 40 bp, Homo sapiens
tttgtccctttctataatttgtcatgataatgctagtaat

SEQ ID NO: 31931 - DNA, 40 bp, Homo sapiens
attactagcattatcatgacaaattatagaaagggacaaa

SEQ ID NO: 31932 - DNA, 40 bp, Homo sapiens
ttgtccctttctataatttgtcatgataatgctagtaatg

SEQ ID NO: 31933 - DNA, 40 bp, Homo sapiens
cattactagcattatcatgacaaattatagaaagggacaa

SEQ ID NO: 31934 - DNA, 40 bp, Homo sapiens
tgtccctttctataatttgtcatgataatgctagtaatga

SEQ ID NO: 31935 - DNA, 40 bp, Homo sapiens
tcattactagcattatcatgacaaattatagaaagggaca

SEQ ID NO: 31936 - DNA, 40 bp, Homo sapiens
gtccctttctataatttgtcatgataatgctagtaatgaa

SEQ ID NO: 31937 - DNA, 40 bp, Homo sapiens
ttcattactagcattatcatgacaaattatagaaagggac

SEQ ID NO: 31938 - DNA, 40 bp, Homo sapiens
tccctttctataatttgtcatgataatgctagtaatgaat

SEQ ID NO: 31939 - DNA, 40 bp, Homo sapiens
attcattactagcattatcatgacaaattatagaaaggga

SEQ ID NO: 31940 - DNA, 40 bp, Homo sapiens
ccctttctataatttgtcatgataatgctagtaatgaatc

SEQ ID NO: 31941 - DNA, 40 bp, Homo sapiens
gattcattactagcattatcatgacaaattatagaaaggg

SEQ ID NO: 31942 - DNA, 40 bp, Homo sapiens
cctttctataatttgtcatgataatgctagtaatgaatct

SEQ ID NO: 31943 - DNA, 40 bp, Homo sapiens
agattcattactagcattatcatgacaaattatagaaagg

SEQ ID NO: 31944 - DNA, 40 bp, Homo sapiens
ctttctataatttgtcatgataatgctagtaatgaatctg

SEQ ID NO: 31945 - DNA, 40 bp, Homo sapiens
cagattcattactagcattatcatgacaaattatagaaag

SEQ ID NO: 31946 - DNA, 40 bp, Homo sapiens
tttctataatttgtcatgataatgctagtaatgaatctga

SEQ ID NO: 31947 - DNA, 40 bp, Homo sapiens
tcagattcattactagcattatcatgacaaattatagaaa

SEQ ID NO: 31948 - DNA, 40 bp, Homo sapiens
ttctataatttgtcatgataatgctagtaatgaatctgat

SEQ ID NO: 31949 - DNA, 40 bp, Homo sapiens
atcagattcattactagcattatcatgacaaattatagaa

SEQ ID NO: 31950 - DNA, 40 bp, Homo sapiens
tctataatttgtcatgataatgctagtaatgaatctgatc

SEQ ID NO: 31951 - DNA, 40 bp, Homo sapiens
gatcagattcattactagcattatcatgacaaattataga

SEQ ID NO: 31952 - DNA, 40 bp, Homo sapiens
ctataatttgtcatgataatgctagtaatgaatctgatct

SEQ ID NO: 31953 - DNA, 40 bp, Homo sapiens
agatcagattcattactagcattatcatgacaaattatag

SEQ ID NO: 31954 - DNA, 40 bp, Homo sapiens
tataatttgtcatgataatgctagtaatgaatctgatctc

SEQ ID NO: 31955 - DNA, 40 bp, Homo sapiens
gagatcagattcattactagcattatcatgacaaattata

SEQ ID NO: 31956 - DNA, 40 bp, Homo sapiens
ataatttgtcatgataatgctagtaatgaatctgatctcc

SEQ ID NO: 31957 - DNA, 40 bp, Homo sapiens
ggagatcagattcattactagcattatcatgacaaattat

SEQ ID NO: 31958 - DNA, 40 bp, Homo sapiens
taatttgtcatgataatgctagtaatgaatctgatctccc

SEQ ID NO: 31959 - DNA, 40 bp, Homo sapiens
gggagatcagattcattactagcattatcatgacaaatta

SEQ ID NO: 31960 - DNA, 40 bp, Homo sapiens
aatttgtcatgataatgctagtaatgaatctgatctccct

SEQ ID NO: 31961 - DNA, 40 bp, Homo sapiens
agggagatcagattcattactagcattatcatgacaaatt

SEQ ID NO: 31962 - DNA, 40 bp, Homo sapiens
atttgtcatgataatgctagtaatgaatctgatctccctt

SEQ ID NO: 31963 - DNA, 40 bp, Homo sapiens
aagggagatcagattcattactagcattatcatgacaaat

SEQ ID NO: 31964 - DNA, 40 bp, Homo sapiens
tttgtcatgataatgctagtaatgaatctgatctcccttc

SEQ ID NO: 31965 - DNA, 40 bp, Homo sapiens
gaagggagatcagattcattactagcattatcatgacaaa

SEQ ID NO: 31966 - DNA, 40 bp, Homo sapiens
ttgtcatgataatgctagtaatgaatctgatctcccttcc

SEQ ID NO: 31967 - DNA, 40 bp, Homo sapiens
ggaagggagatcagattcattactagcattatcatgacaa

SEQ ID NO: 31968 - DNA, 40 bp, Homo sapiens
tgtcatgataatgctagtaatgaatctgatctcccttcct

SEQ ID NO: 31969 - DNA, 40 bp, Homo sapiens
aggaagggagatcagattcattactagcattatcatgaca

SEQ ID NO: 31970 - DNA, 40 bp, Homo sapiens
gtcatgataatgctagtaatgaatctgatctcccttccta

SEQ ID NO: 31971 - DNA, 40 bp, Homo sapiens
taggaagggagatcagattcattactagcattatcatgac

SEQ ID NO: 31972 - DNA, 40 bp, Homo sapiens
tcatgataatgctagtaatgaatctgatctcccttcctat

SEQ ID NO: 31973 - DNA, 40 bp, Homo sapiens
ataggaagggagatcagattcattactagcattatcatga

SEQ ID NO: 31974 - DNA, 40 bp, Homo sapiens
catgataatgctagtaatgaatctgatctcccttcctatt

SEQ ID NO: 31975 - DNA, 40 bp, Homo sapiens
aataggaagggagatcagattcattactagcattatcatg

SEQ ID NO: 31976 - DNA, 40 bp, Homo sapiens
atgataatgctagtaatgaatctgatctcccttcctattt

SEQ ID NO: 31977 - DNA, 40 bp, Homo sapiens
aaataggaagggagatcagattcattactagcattatcat

SEQ ID NO: 31978 - DNA, 40 bp, Homo sapiens
tgataatgctagtaatgaatctgatctcccttcctatttt

SEQ ID NO: 31979 - DNA, 40 bp, Homo sapiens
aaaataggaagggagatcagattcattactagcattatca

SEQ ID NO: 31980 - DNA, 40 bp, Homo sapiens
gataatgctagtaatgaatctgatctcccttcctatttta

SEQ ID NO: 31981 - DNA, 40 bp, Homo sapiens
taaaataggaagggagatcagattcattactagcattatc

SEQ ID NO: 31982 - DNA, 40 bp, Homo sapiens
ataatgctagtaatgaatctgatctcccttcctattttaa

SEQ ID NO: 31983 - DNA, 40 bp, Homo sapiens
ttaaaataggaagggagatcagattcattactagcattat

SEQ ID NO: 31984 - DNA, 40 bp, Homo sapiens
taatgctagtaatgaatctgatctcccttcctattttaaa

SEQ ID NO: 31985 - DNA, 40 bp, Homo sapiens
tttaaaataggaagggagatcagattcattactagcatta

SEQ ID NO: 31986 - DNA, 40 bp, Homo sapiens
aatgctagtaatgaatctgatctcccttcctattttaaaa

SEQ ID NO: 31987 - DNA, 40 bp, Homo sapiens
ttttaaaataggaagggagatcagattcattactagcatt

SEQ ID NO: 31988 - DNA, 40 bp, Homo sapiens
atgctagtaatgaatctgatctcccttcctattttaaaaa

SEQ ID NO: 31989 - DNA, 40 bp, Homo sapiens
tttttaaaataggaagggagatcagattcattactagcat

SEQ ID NO: 31990 - DNA, 40 bp, Homo sapiens
tgctagtaatgaatctgatctcccttcctattttaaaaac

SEQ ID NO: 31991 - DNA, 40 bp, Homo sapiens
gtttttaaaataggaagggagatcagattcattactagca

SEQ ID NO: 31992 - DNA, 40 bp, Homo sapiens
gctagtaatgaatctgatctcccttcctattttaaaaacc

SEQ ID NO: 31993 - DNA, 40 bp, Homo sapiens
ggtttttaaaataggaagggagatcagattcattactagc

SEQ ID NO: 31994 - DNA, 40 bp, Homo sapiens
ctagtaatgaatctgatctcccttcctattttaaaaacct

SEQ ID NO: 31995 - DNA, 40 bp, Homo sapiens
aggtttttaaaataggaagggagatcagattcattactag

SEQ ID NO: 31996 - DNA, 40 bp, Homo sapiens
tagtaatgaatctgatctcccttcctattttaaaaacctt

SEQ ID NO: 31997 - DNA, 40 bp, Homo sapiens
aaggtttttaaaataggaagggagatcagattcattacta

SEQ ID NO: 31998 - DNA, 40 bp, Homo sapiens
agtaatgaatctgatctcccttcctattttaaaaaccttt

SEQ ID NO: 31999 - DNA, 40 bp, Homo sapiens
aaaggtttttaaaataggaagggagatcagattcattact

SEQ ID NO: 32000 - DNA, 40 bp, Homo sapiens
gtaatgaatctgatctcccttcctattttaaaaacctttt

SEQ ID NO: 32001 - DNA, 40 bp, Homo sapiens
aaaaggtttttaaaataggaagggagatcagattcattac

SEQ ID NO: 32002 - DNA, 40 bp, Homo sapiens
taatgaatctgatctcccttcctattttaaaaacctttta

SEQ ID NO: 32003 - DNA, 40 bp, Homo sapiens
taaaaggtttttaaaataggaagggagatcagattcatta

SEQ ID NO: 32004 - DNA, 40 bp, Homo sapiens
aatgaatctgatctcccttcctattttaaaaaccttttag

SEQ ID NO: 32005 - DNA, 40 bp, Homo sapiens
ctaaaaggtttttaaaataggaagggagatcagattcatt

SEQ ID NO: 32006 - DNA, 40 bp, Homo sapiens
atgaatctgatctcccttcctattttaaaaaccttttagt

SEQ ID NO: 32007 - DNA, 40 bp, Homo sapiens
actaaaaggtttttaaaataggaagggagatcagattcat

SEQ ID NO: 32008 - DNA, 40 bp, Homo sapiens
tgaatctgatctcccttcctattttaaaaaccttttagtg

SEQ ID NO: 32009 - DNA, 40 bp, Homo sapiens
cactaaaaggtttttaaaataggaagggagatcagattca

SEQ ID NO: 32010 - DNA, 40 bp, Homo sapiens
gaatctgatctcccttcctattttaaaaaccttttagtga

SEQ ID NO: 32011 - DNA, 40 bp, Homo sapiens
tcactaaaaggtttttaaaataggaagggagatcagattc

SEQ ID NO: 32012 - DNA, 40 bp, Homo sapiens
aatctgatctcccttcctattttaaaaaccttttagtgat

SEQ ID NO: 32013 - DNA, 40 bp, Homo sapiens
atcactaaaaggtttttaaaataggaagggagatcagatt

SEQ ID NO: 32014 - DNA, 40 bp, Homo sapiens
atctgatctcccttcctattttaaaaaccttttagtgatt

SEQ ID NO: 32015 - DNA, 40 bp, Homo sapiens
aatcactaaaaggtttttaaaataggaagggagatcagat

SEQ ID NO: 32016 - DNA, 40 bp, Homo sapiens
tctgatctcccttcctattttaaaaaccttttagtgattt

SEQ ID NO: 32017 - DNA, 40 bp, Homo sapiens
aaatcactaaaaggtttttaaaataggaagggagatcaga

SEQ ID NO: 32018 - DNA, 40 bp, Homo sapiens
ctgatctcccttcctattttaaaaaccttttagtgatttt

SEQ ID NO: 32019 - DNA, 40 bp, Homo sapiens
aaaatcactaaaaggtttttaaaataggaagggagatcag

SEQ ID NO: 32020 - DNA, 40 bp, Homo sapiens
tgatctcccttcctattttaaaaaccttttagtgattttg

SEQ ID NO: 32021 - DNA, 40 bp, Homo sapiens
caaaatcactaaaaggtttttaaaataggaagggagatca

SEQ ID NO: 32022 - DNA, 40 bp, Homo sapiens
gatctcccttcctattttaaaaaccttttagtgattttgt

SEQ ID NO: 32023 - DNA, 40 bp, Homo sapiens
acaaaatcactaaaaggtttttaaaataggaagggagatc

SEQ ID NO: 32024 - DNA, 40 bp, Homo sapiens
atctcccttcctattttaaaaaccttttagtgattttgta

SEQ ID NO: 32025 - DNA, 40 bp, Homo sapiens
tacaaaatcactaaaaggtttttaaaataggaagggagat

SEQ ID NO: 32026 - DNA, 40 bp, Homo sapiens
tctcccttcctattttaaaaaccttttagtgattttgtat

SEQ ID NO: 32027 - DNA, 40 bp, Homo sapiens
atacaaaatcactaaaaggtttttaaaataggaagggaga

SEQ ID NO: 32028 - DNA, 40 bp, Homo sapiens
ctcccttcctattttaaaaaccttttagtgattttgtata

SEQ ID NO: 32029 - DNA, 40 bp, Homo sapiens
tatacaaaatcactaaaaggtttttaaaataggaagggag

SEQ ID NO: 32030 - DNA, 40 bp, Homo sapiens
tcccttcctattttaaaaaccttttagtgattttgtatag

SEQ ID NO: 32031 - DNA, 40 bp, Homo sapiens
ctatacaaaatcactaaaaggtttttaaaataggaaggga

SEQ ID NO: 32032 - DNA, 40 bp, Homo sapiens
cccttcctattttaaaaaccttttagtgattttgtatagg

SEQ ID NO: 32033 - DNA, 40 bp, Homo sapiens
cctatacaaaatcactaaaaggtttttaaaataggaaggg

SEQ ID NO: 32034 - DNA, 40 bp, Homo sapiens
ccttcctattttaaaaaccttttagtgattttgtatagga

SEQ ID NO: 32035 - DNA, 40 bp, Homo sapiens
tcctatacaaaatcactaaaaggtttttaaaataggaagg

SEQ ID NO: 32036 - DNA, 40 bp, Homo sapiens
cttcctattttaaaaaccttttagtgattttgtataggat

SEQ ID NO: 32037 - DNA, 40 bp, Homo sapiens
atcctatacaaaatcactaaaaggtttttaaaataggaag

SEQ ID NO: 32038 - DNA, 40 bp, Homo sapiens
ttcctattttaaaaaccttttagtgattttgtataggatg

SEQ ID NO: 32039 - DNA, 40 bp, Homo sapiens
catcctatacaaaatcactaaaaggtttttaaaataggaa

SEQ ID NO: 32040 - DNA, 40 bp, Homo sapiens
tcctattttaaaaaccttttagtgattttgtataggatga

SEQ ID NO: 32041 - DNA, 40 bp, Homo sapiens
tcatcctatacaaaatcactaaaaggtttttaaaatagga

SEQ ID NO: 32042 - DNA, 40 bp, Homo sapiens
cctattttaaaaaccttttagtgattttgtataggatgaa

SEQ ID NO: 32043 - DNA, 40 bp, Homo sapiens
ttcatcctatacaaaatcactaaaaggtttttaaaatagg

SEQ ID NO: 32044 - DNA, 40 bp, Homo sapiens
ctattttaaaaaccttttagtgattttgtataggatgaag

SEQ ID NO: 32045 - DNA, 40 bp, Homo sapiens
cttcatcctatacaaaatcactaaaaggtttttaaaatag

SEQ ID NO: 32046 - DNA, 40 bp, Homo sapiens
tattttaaaaaccttttagtgattttgtataggatgaagt

SEQ ID NO: 32047 - DNA, 40 bp, Homo sapiens
acttcatcctatacaaaatcactaaaaggtttttaaaata

SEQ ID NO: 32048 - DNA, 40 bp, Homo sapiens
attttaaaaaccttttagtgattttgtataggatgaagtt

SEQ ID NO: 32049 - DNA, 40 bp, Homo sapiens
aacttcatcctatacaaaatcactaaaaggtttttaaaat

SEQ ID NO: 32050 - DNA, 40 bp, Homo sapiens
ttttaaaaaccttttagtgattttgtataggatgaagttt

SEQ ID NO: 32051 - DNA, 40 bp, Homo sapiens
aaacttcatcctatacaaaatcactaaaaggtttttaaaa

SEQ ID NO: 32052 - DNA, 40 bp, Homo sapiens
tttaaaaaccttttagtgattttgtataggatgaagttta

SEQ ID NO: 32053 - DNA, 40 bp, Homo sapiens
taaacttcatcctatacaaaatcactaaaaggtttttaaa

SEQ ID NO: 32054 - DNA, 40 bp, Homo sapiens
ttaaaaaccttttagtgattttgtataggatgaagtttaa

SEQ ID NO: 32055 - DNA, 40 bp, Homo sapiens
ttaaacttcatcctatacaaaatcactaaaaggtttttaa

SEQ ID NO: 32056 - DNA, 40 bp, Homo sapiens
taaaaaccttttagtgattttgtataggatgaagtttaaa

SEQ ID NO: 32057 - DNA, 40 bp, Homo sapiens
tttaaacttcatcctatacaaaatcactaaaaggttttta

SEQ ID NO: 32058 - DNA, 40 bp, Homo sapiens
aaaaaccttttagtgattttgtataggatgaagtttaaaa

SEQ ID NO: 32059 - DNA, 40 bp, Homo sapiens
ttttaaacttcatcctatacaaaatcactaaaaggttttt

SEQ ID NO: 32060 - DNA, 40 bp, Homo sapiens
aaaaccttttagtgattttgtataggatgaagtttaaaac

SEQ ID NO: 32061 - DNA, 40 bp, Homo sapiens
gttttaaacttcatcctatacaaaatcactaaaaggtttt

SEQ ID NO: 32062 - DNA, 40 bp, Homo sapiens
aaaccttttagtgattttgtataggatgaagtttaaaact

SEQ ID NO: 32063 - DNA, 40 bp, Homo sapiens
agttttaaacttcatcctatacaaaatcactaaaaggttt

SEQ ID NO: 32064 - DNA, 40 bp, Homo sapiens
aaccttttagtgattttgtataggatgaagtttaaaactc

SEQ ID NO: 32065 - DNA, 40 bp, Homo sapiens
gagttttaaacttcatcctatacaaaatcactaaaaggtt

SEQ ID NO: 32066 - DNA, 40 bp, Homo sapiens
accttttagtgattttgtataggatgaagtttaaaactcc

SEQ ID NO: 32067 - DNA, 40 bp, Homo sapiens
ggagttttaaacttcatcctatacaaaatcactaaaaggt

SEQ ID NO: 32068 - DNA, 40 bp, Homo sapiens
ccttttagtgattttgtataggatgaagtttaaaactcct

SEQ ID NO: 32069 - DNA, 40 bp, Homo sapiens
aggagttttaaacttcatcctatacaaaatcactaaaagg

SEQ ID NO: 32070 - DNA, 40 bp, Homo sapiens
cttttagtgattttgtataggatgaagtttaaaactcctt

SEQ ID NO: 32071 - DNA, 40 bp, Homo sapiens
aaggagttttaaacttcatcctatacaaaatcactaaaag

SEQ ID NO: 32072 - DNA, 40 bp, Homo sapiens
ttttagtgattttgtataggatgaagtttaaaactcctta

SEQ ID NO: 32073 - DNA, 40 bp, Homo sapiens
taaggagttttaaacttcatcctatacaaaatcactaaaa

SEQ ID NO: 32074 - DNA, 40 bp, Homo sapiens
tttagtgattttgtataggatgaagtttaaaactccttac

SEQ ID NO: 32075 - DNA, 40 bp, Homo sapiens
gtaaggagttttaaacttcatcctatacaaaatcactaaa

SEQ ID NO: 32076 - DNA, 40 bp, Homo sapiens
ttagtgattttgtataggatgaagtttaaaactccttact

SEQ ID NO: 32077 - DNA, 40 bp, Homo sapiens
agtaaggagttttaaacttcatcctatacaaaatcactaa

SEQ ID NO: 32078 - DNA, 40 bp, Homo sapiens
tagtgattttgtataggatgaagtttaaaactccttactt

SEQ ID NO: 32079 - DNA, 40 bp, Homo sapiens
aagtaaggagttttaaacttcatcctatacaaaatcacta

SEQ ID NO: 32080 - DNA, 40 bp, Homo sapiens
agtgattttgtataggatgaagtttaaaactccttactta

SEQ ID NO: 32081 - DNA, 40 bp, Homo sapiens
taagtaaggagttttaaacttcatcctatacaaaatcact

SEQ ID NO: 32082 - DNA, 40 bp, Homo sapiens
gtgattttgtataggatgaagtttaaaactccttacttaa

SEQ ID NO: 32083 - DNA, 40 bp, Homo sapiens
ttaagtaaggagttttaaacttcatcctatacaaaatcac

SEQ ID NO: 32084 - DNA, 40 bp, Homo sapiens
tgattttgtataggatgaagtttaaaactccttacttaat

SEQ ID NO: 32085 - DNA, 40 bp, Homo sapiens
attaagtaaggagttttaaacttcatcctatacaaaatca

SEQ ID NO: 32086 - DNA, 40 bp, Homo sapiens
gattttgtataggatgaagtttaaaactccttacttaata

SEQ ID NO: 32087 - DNA, 40 bp, Homo sapiens
tattaagtaaggagttttaaacttcatcctatacaaaatc

SEQ ID NO: 32088 - DNA, 40 bp, Homo sapiens
attttgtataggatgaagtttaaaactccttacttaatat

SEQ ID NO: 32089 - DNA, 40 bp, Homo sapiens
atattaagtaaggagttttaaacttcatcctatacaaaat

SEQ ID NO: 32090 - DNA, 40 bp, Homo sapiens
ttttgtataggatgaagtttaaaactccttacttaatata

SEQ ID NO: 32091 - DNA, 40 bp, Homo sapiens
tatattaagtaaggagttttaaacttcatcctatacaaaa

SEQ ID NO: 32092 - DNA, 40 bp, Homo sapiens
tttgtataggatgaagtttaaaactccttacttaatatac

SEQ ID NO: 32093 - DNA, 40 bp, Homo sapiens
gtatattaagtaaggagttttaaacttcatcctatacaaa

SEQ ID NO: 32094 - DNA, 40 bp, Homo sapiens
ttgtataggatgaagtttaaaactccttacttaatataca

SEQ ID NO: 32095 - DNA, 40 bp, Homo sapiens
tgtatattaagtaaggagttttaaacttcatcctatacaa

SEQ ID NO: 32096 - DNA, 40 bp, Homo sapiens
tgtataggatgaagtttaaaactccttacttaatatacac

SEQ ID NO: 32097 - DNA, 40 bp, Homo sapiens
gtgtatattaagtaaggagttttaaacttcatcctataca

SEQ ID NO: 32098 - DNA, 40 bp, Homo sapiens
gtataggatgaagtttaaaactccttacttaatatacaca

SEQ ID NO: 32099 - DNA, 40 bp, Homo sapiens
tgtgtatattaagtaaggagttttaaacttcatcctatac

SEQ ID NO: 32100 - DNA, 40 bp, Homo sapiens
tataggatgaagtttaaaactccttacttaatatacacat

SEQ ID NO: 32101 - DNA, 40 bp, Homo sapiens
atgtgtatattaagtaaggagttttaaacttcatcctata

SEQ ID NO: 32102 - DNA, 40 bp, Homo sapiens
ataggatgaagtttaaaactccttacttaatatacacatg

SEQ ID NO: 32103 - DNA, 40 bp, Homo sapiens
catgtgtatattaagtaaggagttttaaacttcatcctat

SEQ ID NO: 32104 - DNA, 40 bp, Homo sapiens
taggatgaagtttaaaactccttacttaatatacacatga

SEQ ID NO: 32105 - DNA, 40 bp, Homo sapiens
tcatgtgtatattaagtaaggagttttaaacttcatccta

SEQ ID NO: 32106 - DNA, 40 bp, Homo sapiens
aggatgaagtttaaaactccttacttaatatacacatgac

SEQ ID NO: 32107 - DNA, 40 bp, Homo sapiens
gtcatgtgtatattaagtaaggagttttaaacttcatcct

SEQ ID NO: 32108 - DNA, 40 bp, Homo sapiens
ggatgaagtttaaaactccttacttaatatacacatgacc

SEQ ID NO: 32109 - DNA, 40 bp, Homo sapiens
ggtcatgtgtatattaagtaaggagttttaaacttcatcc

SEQ ID NO: 32110 - DNA, 40 bp, Homo sapiens
gatgaagtttaaaactccttacttaatatacacatgaccc

SEQ ID NO: 32111 - DNA, 40 bp, Homo sapiens
gggtcatgtgtatattaagtaaggagttttaaacttcatc

SEQ ID NO: 32112 - DNA, 40 bp, Homo sapiens
atgaagtttaaaactccttacttaatatacacatgaccct

SEQ ID NO: 32113 - DNA, 40 bp, Homo sapiens
agggtcatgtgtatattaagtaaggagttttaaacttcat

SEQ ID NO: 32114 - DNA, 40 bp, Homo sapiens
tgaagtttaaaactccttacttaatatacacatgaccctc

SEQ ID NO: 32115 - DNA, 40 bp, Homo sapiens
gagggtcatgtgtatattaagtaaggagttttaaacttca

SEQ ID NO: 32116 - DNA, 40 bp, Homo sapiens
gaagtttaaaactccttacttaatatacacatgaccctcc

SEQ ID NO: 32117 - DNA, 40 bp, Homo sapiens
ggagggtcatgtgtatattaagtaaggagttttaaacttc

SEQ ID NO: 32118 - DNA, 40 bp, Homo sapiens
aagtttaaaactccttacttaatatacacatgaccctccg

SEQ ID NO: 32119 - DNA, 40 bp, Homo sapiens
cggagggtcatgtgtatattaagtaaggagttttaaactt

SEQ ID NO: 32120 - DNA, 40 bp, Homo sapiens
agtttaaaactccttacttaatatacacatgaccctccgt

SEQ ID NO: 32121 - DNA, 40 bp, Homo sapiens
acggagggtcatgtgtatattaagtaaggagttttaaact

SEQ ID NO: 32122 - DNA, 40 bp, Homo sapiens
gtttaaaactccttacttaatatacacatgaccctccgta

SEQ ID NO: 32123 - DNA, 40 bp, Homo sapiens
tacggagggtcatgtgtatattaagtaaggagttttaaac

SEQ ID NO: 32124 - DNA, 40 bp, Homo sapiens
tttaaaactccttacttaatatacacatgaccctccgtaa

SEQ ID NO: 32125 - DNA, 40 bp, Homo sapiens
ttacggagggtcatgtgtatattaagtaaggagttttaaa

SEQ ID NO: 32126 - DNA, 40 bp, Homo sapiens
ttaaaactccttacttaatatacacatgaccctccgtaag

SEQ ID NO: 32127 - DNA, 40 bp, Homo sapiens
cttacggagggtcatgtgtatattaagtaaggagttttaa

SEQ ID NO: 32128 - DNA, 40 bp, Homo sapiens
taaaactccttacttaatatacacatgaccctccgtaagc

SEQ ID NO: 32129 - DNA, 40 bp, Homo sapiens
gcttacggagggtcatgtgtatattaagtaaggagtttta

SEQ ID NO: 32130 - DNA, 40 bp, Homo sapiens
aaaactccttacttaatatacacatgaccctccgtaagct

SEQ ID NO: 32131 - DNA, 40 bp, Homo sapiens
agcttacggagggtcatgtgtatattaagtaaggagtttt

SEQ ID NO: 32132 - DNA, 40 bp, Homo sapiens
aaactccttacttaatatacacatgaccctccgtaagctg

SEQ ID NO: 32133 - DNA, 40 bp, Homo sapiens
cagcttacggagggtcatgtgtatattaagtaaggagttt

SEQ ID NO: 32134 - DNA, 40 bp, Homo sapiens
aactccttacttaatatacacatgaccctccgtaagctgg

SEQ ID NO: 32135 - DNA, 40 bp, Homo sapiens
ccagcttacggagggtcatgtgtatattaagtaaggagtt

SEQ ID NO: 32136 - DNA, 40 bp, Homo sapiens
actccttacttaatatacacatgaccctccgtaagctggc

SEQ ID NO: 32137 - DNA, 40 bp, Homo sapiens
gccagcttacggagggtcatgtgtatattaagtaaggagt

SEQ ID NO: 32138 - DNA, 40 bp, Homo sapiens
ctccttacttaatatacacatgaccctccgtaagctggcc

SEQ ID NO: 32139 - DNA, 40 bp, Homo sapiens
ggccagcttacggagggtcatgtgtatattaagtaaggag

SEQ ID NO: 32140 - DNA, 40 bp, Homo sapiens
tccttacttaatatacacatgaccctccgtaagctggccc

SEQ ID NO: 32141 - DNA, 40 bp, Homo sapiens
gggccagcttacggagggtcatgtgtatattaagtaagga

SEQ ID NO: 32142 - DNA, 40 bp, Homo sapiens
ccttacttaatatacacatgaccctccgtaagctggcccc

SEQ ID NO: 32143 - DNA, 40 bp, Homo sapiens
ggggccagcttacggagggtcatgtgtatattaagtaagg

SEQ ID NO: 32144 - DNA, 40 bp, Homo sapiens
cttacttaatatacacatgaccctccgtaagctggcccct

SEQ ID NO: 32145 - DNA, 40 bp, Homo sapiens
aggggccagcttacggagggtcatgtgtatattaagtaag

SEQ ID NO: 32146 - DNA, 40 bp, Homo sapiens
ttacttaatatacacatgaccctccgtaagctggcccctg

SEQ ID NO: 32147 - DNA, 40 bp, Homo sapiens
caggggccagcttacggagggtcatgtgtatattaagtaa

SEQ ID NO: 32148 - DNA, 40 bp, Homo sapiens
tacttaatatacacatgaccctccgtaagctggcccctgc

SEQ ID NO: 32149 - DNA, 40 bp, Homo sapiens
gcaggggccagcttacggagggtcatgtgtatattaagta

SEQ ID NO: 32150 - DNA, 40 bp, Homo sapiens
acttaatatacacatgaccctccgtaagctggcccctgct

SEQ ID NO: 32151 - DNA, 40 bp, Homo sapiens
agcaggggccagcttacggagggtcatgtgtatattaagt

SEQ ID NO: 32152 - DNA, 40 bp, Homo sapiens
cttaatatacacatgaccctccgtaagctggcccctgctt

SEQ ID NO: 32153 - DNA, 40 bp, Homo sapiens
aagcaggggccagcttacggagggtcatgtgtatattaag

SEQ ID NO: 32154 - DNA, 40 bp, Homo sapiens
ttaatatacacatgaccctccgtaagctggcccctgcttg

SEQ ID NO: 32155 - DNA, 40 bp, Homo sapiens
caagcaggggccagcttacggagggtcatgtgtatattaa

SEQ ID NO: 32156 - DNA, 40 bp, Homo sapiens
taatatacacatgaccctccgtaagctggcccctgcttga

SEQ ID NO: 32157 - DNA, 40 bp, Homo sapiens
tcaagcaggggccagcttacggagggtcatgtgtatatta

SEQ ID NO: 32158 - DNA, 40 bp, Homo sapiens
aatatacacatgaccctccgtaagctggcccctgcttgat

SEQ ID NO: 32159 - DNA, 40 bp, Homo sapiens
atcaagcaggggccagcttacggagggtcatgtgtatatt

SEQ ID NO: 32160 - DNA, 40 bp, Homo sapiens
atatacacatgaccctccgtaagctggcccctgcttgatt

SEQ ID NO: 32161 - DNA, 40 bp, Homo sapiens
aatcaagcaggggccagcttacggagggtcatgtgtatat

SEQ ID NO: 32162 - DNA, 40 bp, Homo sapiens
tatacacatgaccctccgtaagctggcccctgcttgattg

SEQ ID NO: 32163 - DNA, 40 bp, Homo sapiens
caatcaagcaggggccagcttacggagggtcatgtgtata

SEQ ID NO: 32164 - DNA, 40 bp, Homo sapiens
atacacatgaccctccgtaagctggcccctgcttgattgt

SEQ ID NO: 32165 - DNA, 40 bp, Homo sapiens
acaatcaagcaggggccagcttacggagggtcatgtgtat

SEQ ID NO: 32166 - DNA, 40 bp, Homo sapiens
tacacatgaccctccgtaagctggcccctgcttgattgtc

SEQ ID NO: 32167 - DNA, 40 bp, Homo sapiens
gacaatcaagcaggggccagcttacggagggtcatgtgta

SEQ ID NO: 32168 - DNA, 40 bp, Homo sapiens
acacatgaccctccgtaagctggcccctgcttgattgtcc

SEQ ID NO: 32169 - DNA, 40 bp, Homo sapiens
ggacaatcaagcaggggccagcttacggagggtcatgtgt

SEQ ID NO: 32170 - DNA, 40 bp, Homo sapiens
cacatgaccctccgtaagctggcccctgcttgattgtcca

SEQ ID NO: 32171 - DNA, 40 bp, Homo sapiens
tggacaatcaagcaggggccagcttacggagggtcatgtg

SEQ ID NO: 32172 - DNA, 40 bp, Homo sapiens
acatgaccctccgtaagctggcccctgcttgattgtccag

SEQ ID NO: 32173 - DNA, 40 bp, Homo sapiens
ctggacaatcaagcaggggccagcttacggagggtcatgt

SEQ ID NO: 32174 - DNA, 40 bp, Homo sapiens
catgaccctccgtaagctggcccctgcttgattgtccagt

SEQ ID NO: 32175 - DNA, 40 bp, Homo sapiens
actggacaatcaagcaggggccagcttacggagggtcatg

SEQ ID NO: 32176 - DNA, 40 bp, Homo sapiens
atgaccctccgtaagctggcccctgcttgattgtccagtt

SEQ ID NO: 32177 - DNA, 40 bp, Homo sapiens
aactggacaatcaagcaggggccagcttacggagggtcat

SEQ ID NO: 32178 - DNA, 40 bp, Homo sapiens
tgaccctccgtaagctggcccctgcttgattgtccagttt

SEQ ID NO: 32179 - DNA, 40 bp, Homo sapiens
aaactggacaatcaagcaggggccagcttacggagggtca

SEQ ID NO: 32180 - DNA, 40 bp, Homo sapiens
gaccctccgtaagctggcccctgcttgattgtccagtttc

SEQ ID NO: 32181 - DNA, 40 bp, Homo sapiens
gaaactggacaatcaagcaggggccagcttacggagggtc

SEQ ID NO: 32182 - DNA, 40 bp, Homo sapiens
accctccgtaagctggcccctgcttgattgtccagtttca

SEQ ID NO: 32183 - DNA, 40 bp, Homo sapiens
tgaaactggacaatcaagcaggggccagcttacggagggt

SEQ ID NO: 32184 - DNA, 40 bp, Homo sapiens
ccctccgtaagctggcccctgcttgattgtccagtttcac

SEQ ID NO: 32185 - DNA, 40 bp, Homo sapiens
gtgaaactggacaatcaagcaggggccagcttacggaggg

SEQ ID NO: 32186 - DNA, 40 bp, Homo sapiens
cctccgtaagctggcccctgcttgattgtccagtttcact

SEQ ID NO: 32187 - DNA, 40 bp, Homo sapiens
agtgaaactggacaatcaagcaggggccagcttacggagg

SEQ ID NO: 32188 - DNA, 40 bp, Homo sapiens
ctccgtaagctggcccctgcttgattgtccagtttcactt

SEQ ID NO: 32189 - DNA, 40 bp, Homo sapiens
aagtgaaactggacaatcaagcaggggccagcttacggag

SEQ ID NO: 32190 - DNA, 40 bp, Homo sapiens
tccgtaagctggcccctgcttgattgtccagtttcacttc

SEQ ID NO: 32191 - DNA, 40 bp, Homo sapiens
gaagtgaaactggacaatcaagcaggggccagcttacgga

SEQ ID NO: 32192 - DNA, 40 bp, Homo sapiens
ccgtaagctggcccctgcttgattgtccagtttcacttct

SEQ ID NO: 32193 - DNA, 40 bp, Homo sapiens
agaagtgaaactggacaatcaagcaggggccagcttacgg

SEQ ID NO: 32194 - DNA, 40 bp, Homo sapiens
cgtaagctggcccctgcttgattgtccagtttcacttctt

SEQ ID NO: 32195 - DNA, 40 bp, Homo sapiens
aagaagtgaaactggacaatcaagcaggggccagcttacg

SEQ ID NO: 32196 - DNA, 40 bp, Homo sapiens
gtaagctggcccctgcttgattgtccagtttcacttcttg

SEQ ID NO: 32197 - DNA, 40 bp, Homo sapiens
caagaagtgaaactggacaatcaagcaggggccagcttac

SEQ ID NO: 32198 - DNA, 40 bp, Homo sapiens
taagctggcccctgcttgattgtccagtttcacttcttgg

SEQ ID NO: 32199 - DNA, 40 bp, Homo sapiens
ccaagaagtgaaactggacaatcaagcaggggccagctta

SEQ ID NO: 32200 - DNA, 40 bp, Homo sapiens
aagctggcccctgcttgattgtccagtttcacttcttggt

SEQ ID NO: 32201 - DNA, 40 bp, Homo sapiens
accaagaagtgaaactggacaatcaagcaggggccagctt

SEQ ID NO: 32202 - DNA, 40 bp, Homo sapiens
agctggcccctgcttgattgtccagtttcacttcttggtg

SEQ ID NO: 32203 - DNA, 40 bp, Homo sapiens
caccaagaagtgaaactggacaatcaagcaggggccagct

SEQ ID NO: 32204 - DNA, 40 bp, Homo sapiens
gctggcccctgcttgattgtccagtttcacttcttggtgc

SEQ ID NO: 32205 - DNA, 40 bp, Homo sapiens
gcaccaagaagtgaaactggacaatcaagcaggggccagc

SEQ ID NO: 32206 - DNA, 40 bp, Homo sapiens
ctggcccctgcttgattgtccagtttcacttcttggtgct

SEQ ID NO: 32207 - DNA, 40 bp, Homo sapiens
agcaccaagaagtgaaactggacaatcaagcaggggccag

SEQ ID NO: 32208 - DNA, 40 bp, Homo sapiens
tggcccctgcttgattgtccagtttcacttcttggtgctt

SEQ ID NO: 32209 - DNA, 40 bp, Homo sapiens
aagcaccaagaagtgaaactggacaatcaagcaggggcca

SEQ ID NO: 32210 - DNA, 40 bp, Homo sapiens
ggcccctgcttgattgtccagtttcacttcttggtgctta

SEQ ID NO: 32211 - DNA, 40 bp, Homo sapiens
taagcaccaagaagtgaaactggacaatcaagcaggggcc

SEQ ID NO: 32212 - DNA, 40 bp, Homo sapiens
gcccctgcttgattgtccagtttcacttcttggtgcttat

SEQ ID NO: 32213 - DNA, 40 bp, Homo sapiens
ataagcaccaagaagtgaaactggacaatcaagcaggggc

SEQ ID NO: 32214 - DNA, 40 bp, Homo sapiens
cccctgcttgattgtccagtttcacttcttggtgcttatt

SEQ ID NO: 32215 - DNA, 40 bp, Homo sapiens
aataagcaccaagaagtgaaactggacaatcaagcagggg

SEQ ID NO: 32216 - DNA, 40 bp, Homo sapiens
ccctgcttgattgtccagtttcacttcttggtgcttattc

SEQ ID NO: 32217 - DNA, 40 bp, Homo sapiens
gaataagcaccaagaagtgaaactggacaatcaagcaggg

SEQ ID NO: 32218 - DNA, 40 bp, Homo sapiens
cctgcttgattgtccagtttcacttcttggtgcttattct

SEQ ID NO: 32219 - DNA, 40 bp, Homo sapiens
agaataagcaccaagaagtgaaactggacaatcaagcagg

SEQ ID NO: 32220 - DNA, 40 bp, Homo sapiens
ctgcttgattgtccagtttcacttcttggtgcttattcta

SEQ ID NO: 32221 - DNA, 40 bp, Homo sapiens
tagaataagcaccaagaagtgaaactggacaatcaagcag

SEQ ID NO: 32222 - DNA, 40 bp, Homo sapiens
tgcttgattgtccagtttcacttcttggtgcttattctaa

SEQ ID NO: 32223 - DNA, 40 bp, Homo sapiens
ttagaataagcaccaagaagtgaaactggacaatcaagca

SEQ ID NO: 32224 - DNA, 40 bp, Homo sapiens
gcttgattgtccagtttcacttcttggtgcttattctaag

SEQ ID NO: 32225 - DNA, 40 bp, Homo sapiens
cttagaataagcaccaagaagtgaaactggacaatcaagc

SEQ ID NO: 32226 - DNA, 40 bp, Homo sapiens
cttgattgtccagtttcacttcttggtgcttattctaagg

SEQ ID NO: 32227 - DNA, 40 bp, Homo sapiens
ccttagaataagcaccaagaagtgaaactggacaatcaag

SEQ ID NO: 32228 - DNA, 40 bp, Homo sapiens
ttgattgtccagtttcacttcttggtgcttattctaaggc

SEQ ID NO: 32229 - DNA, 40 bp, Homo sapiens
gccttagaataagcaccaagaagtgaaactggacaatcaa

SEQ ID NO: 32230 - DNA, 40 bp, Homo sapiens
tgattgtccagtttcacttcttggtgcttattctaaggcc

SEQ ID NO: 32231 - DNA, 40 bp, Homo sapiens
ggccttagaataagcaccaagaagtgaaactggacaatca

SEQ ID NO: 32232 - DNA, 40 bp, Homo sapiens
gattgtccagtttcacttcttggtgcttattctaaggcct

SEQ ID NO: 32233 - DNA, 40 bp, Homo sapiens
aggccttagaataagcaccaagaagtgaaactggacaatc

SEQ ID NO: 32234 - DNA, 40 bp, Homo sapiens
attgtccagtttcacttcttggtgcttattctaaggcctc

SEQ ID NO: 32235 - DNA, 40 bp, Homo sapiens
gaggccttagaataagcaccaagaagtgaaactggacaat

SEQ ID NO: 32236 - DNA, 40 bp, Homo sapiens
ttgtccagtttcacttcttggtgcttattctaaggcctct

SEQ ID NO: 32237 - DNA, 40 bp, Homo sapiens
agaggccttagaataagcaccaagaagtgaaactggacaa

SEQ ID NO: 32238 - DNA, 40 bp, Homo sapiens
tgtccagtttcacttcttggtgcttattctaaggcctcta

SEQ ID NO: 32239 - DNA, 40 bp, Homo sapiens
tagaggccttagaataagcaccaagaagtgaaactggaca

SEQ ID NO: 32240 - DNA, 40 bp, Homo sapiens
gtccagtttcacttcttggtgcttattctaaggcctctaa

SEQ ID NO: 32241 - DNA, 40 bp, Homo sapiens
ttagaggccttagaataagcaccaagaagtgaaactggac

SEQ ID NO: 32242 - DNA, 40 bp, Homo sapiens
tccagtttcacttcttggtgcttattctaaggcctctaag

SEQ ID NO: 32243 - DNA, 40 bp, Homo sapiens
cttagaggccttagaataagcaccaagaagtgaaactgga

SEQ ID NO: 32244 - DNA, 40 bp, Homo sapiens
ccagtttcacttcttggtgcttattctaaggcctctaagc

SEQ ID NO: 32245 - DNA, 40 bp, Homo sapiens
gcttagaggccttagaataagcaccaagaagtgaaactgg

SEQ ID NO: 32246 - DNA, 40 bp, Homo sapiens
cagtttcacttcttggtgcttattctaaggcctctaagcc

SEQ ID NO: 32247 - DNA, 40 bp, Homo sapiens
ggcttagaggccttagaataagcaccaagaagtgaaactg

SEQ ID NO: 32248 - DNA, 40 bp, Homo sapiens
agtttcacttcttggtgcttattctaaggcctctaagcct

SEQ ID NO: 32249 - DNA, 40 bp, Homo sapiens
aggcttagaggccttagaataagcaccaagaagtgaaact

SEQ ID NO: 32250 - DNA, 40 bp, Homo sapiens
gtttcacttcttggtgcttattctaaggcctctaagcctt

SEQ ID NO: 32251 - DNA, 40 bp, Homo sapiens
aaggcttagaggccttagaataagcaccaagaagtgaaac

SEQ ID NO: 32252 - DNA, 40 bp, Homo sapiens
tttcacttcttggtgcttattctaaggcctctaagcctta

SEQ ID NO: 32253 - DNA, 40 bp, Homo sapiens
taaggcttagaggccttagaataagcaccaagaagtgaaa

SEQ ID NO: 32254 - DNA, 40 bp, Homo sapiens
ttcacttcttggtgcttattctaaggcctctaagccttag

SEQ ID NO: 32255 - DNA, 40 bp, Homo sapiens
ctaaggcttagaggccttagaataagcaccaagaagtgaa

SEQ ID NO: 32256 - DNA, 40 bp, Homo sapiens
tcacttcttggtgcttattctaaggcctctaagccttaga

SEQ ID NO: 32257 - DNA, 40 bp, Homo sapiens
tctaaggcttagaggccttagaataagcaccaagaagtga

SEQ ID NO: 32258 - DNA, 40 bp, Homo sapiens
cacttcttggtgcttattctaaggcctctaagccttagag

SEQ ID NO: 32259 - DNA, 40 bp, Homo sapiens
ctctaaggcttagaggccttagaataagcaccaagaagtg

SEQ ID NO: 32260 - DNA, 40 bp, Homo sapiens
acttcttggtgcttattctaaggcctctaagccttagaga

SEQ ID NO: 32261 - DNA, 40 bp, Homo sapiens
tctctaaggcttagaggccttagaataagcaccaagaagt

SEQ ID NO: 32262 - DNA, 40 bp, Homo sapiens
cttcttggtgcttattctaaggcctctaagccttagagat

SEQ ID NO: 32263 - DNA, 40 bp, Homo sapiens
atctctaaggcttagaggccttagaataagcaccaagaag

SEQ ID NO: 32264 - DNA, 40 bp, Homo sapiens
ttcttggtgcttattctaaggcctctaagccttagagatc

SEQ ID NO: 32265 - DNA, 40 bp, Homo sapiens
gatctctaaggcttagaggccttagaataagcaccaagaa

SEQ ID NO: 32266 - DNA, 40 bp, Homo sapiens
tcttggtgcttattctaaggcctctaagccttagagatcc

SEQ ID NO: 32267 - DNA, 40 bp, Homo sapiens
ggatctctaaggcttagaggccttagaataagcaccaaga

SEQ ID NO: 32268 - DNA, 40 bp, Homo sapiens
cttggtgcttattctaaggcctctaagccttagagatcct

SEQ ID NO: 32269 - DNA, 40 bp, Homo sapiens
aggatctctaaggcttagaggccttagaataagcaccaag

SEQ ID NO: 32270 - DNA, 40 bp, Homo sapiens
ttggtgcttattctaaggcctctaagccttagagatcctc

SEQ ID NO: 32271 - DNA, 40 bp, Homo sapiens
gaggatctctaaggcttagaggccttagaataagcaccaa

SEQ ID NO: 32272 - DNA, 40 bp, Homo sapiens
tggtgcttattctaaggcctctaagccttagagatcctct

SEQ ID NO: 32273 - DNA, 40 bp, Homo sapiens
agaggatctctaaggcttagaggccttagaataagcacca

SEQ ID NO: 32274 - DNA, 40 bp, Homo sapiens
ggtgcttattctaaggcctctaagccttagagatcctcta

SEQ ID NO: 32275 - DNA, 40 bp, Homo sapiens
tagaggatctctaaggcttagaggccttagaataagcacc

SEQ ID NO: 32276 - DNA, 40 bp, Homo sapiens
gtgcttattctaaggcctctaagccttagagatcctctaa

SEQ ID NO: 32277 - DNA, 40 bp, Homo sapiens
ttagaggatctctaaggcttagaggccttagaataagcac

SEQ ID NO: 32278 - DNA, 40 bp, Homo sapiens
tgcttattctaaggcctctaagccttagagatcctctaag

SEQ ID NO: 32279 - DNA, 40 bp, Homo sapiens
cttagaggatctctaaggcttagaggccttagaataagca

SEQ ID NO: 32280 - DNA, 40 bp, Homo sapiens
gcttattctaaggcctctaagccttagagatcctctaagc

SEQ ID NO: 32281 - DNA, 40 bp, Homo sapiens
gcttagaggatctctaaggcttagaggccttagaataagc

SEQ ID NO: 32282 - DNA, 40 bp, Homo sapiens
cttattctaaggcctctaagccttagagatcctctaagcc

SEQ ID NO: 32283 - DNA, 40 bp, Homo sapiens
ggcttagaggatctctaaggcttagaggccttagaataag

SEQ ID NO: 32284 - DNA, 40 bp, Homo sapiens
ttattctaaggcctctaagccttagagatcctctaagcct

SEQ ID NO: 32285 - DNA, 40 bp, Homo sapiens
aggcttagaggatctctaaggcttagaggccttagaataa

SEQ ID NO: 32286 - DNA, 40 bp, Homo sapiens
tattctaaggcctctaagccttagagatcctctaagcctt

SEQ ID NO: 32287 - DNA, 40 bp, Homo sapiens
aaggcttagaggatctctaaggcttagaggccttagaata

SEQ ID NO: 32288 - DNA, 40 bp, Homo sapiens
attctaaggcctctaagccttagagatcctctaagccttt

SEQ ID NO: 32289 - DNA, 40 bp, Homo sapiens
aaaggcttagaggatctctaaggcttagaggccttagaat

SEQ ID NO: 32290 - DNA, 40 bp, Homo sapiens
ttctaaggcctctaagccttagagatcctctaagcctttg

SEQ ID NO: 32291 - DNA, 40 bp, Homo sapiens
caaaggcttagaggatctctaaggcttagaggccttagaa

SEQ ID NO: 32292 - DNA, 40 bp, Homo sapiens
tctaaggcctctaagccttagagatcctctaagcctttga

SEQ ID NO: 32293 - DNA, 40 bp, Homo sapiens
tcaaaggcttagaggatctctaaggcttagaggccttaga

SEQ ID NO: 32294 - DNA, 40 bp, Homo sapiens
ctaaggcctctaagccttagagatcctctaagcctttgag

SEQ ID NO: 32295 - DNA, 40 bp, Homo sapiens
ctcaaaggcttagaggatctctaaggcttagaggccttag

SEQ ID NO: 32296 - DNA, 40 bp, Homo sapiens
taaggcctctaagccttagagatcctctaagcctttgaga

SEQ ID NO: 32297 - DNA, 40 bp, Homo sapiens
tctcaaaggcttagaggatctctaaggcttagaggcctta

SEQ ID NO: 32298 - DNA, 40 bp, Homo sapiens
aaggcctctaagccttagagatcctctaagcctttgagat

SEQ ID NO: 32299 - DNA, 40 bp, Homo sapiens
atctcaaaggcttagaggatctctaaggcttagaggcctt

SEQ ID NO: 32300 - DNA, 40 bp, Homo sapiens
aggcctctaagccttagagatcctctaagcctttgagatc

SEQ ID NO: 32301 - DNA, 40 bp, Homo sapiens
gatctcaaaggcttagaggatctctaaggcttagaggcct

SEQ ID NO: 32302 - DNA, 40 bp, Homo sapiens
ggcctctaagccttagagatcctctaagcctttgagatcc

SEQ ID NO: 32303 - DNA, 40 bp, Homo sapiens
ggatctcaaaggcttagaggatctctaaggcttagaggcc

SEQ ID NO: 32304 - DNA, 40 bp, Homo sapiens
gcctctaagccttagagatcctctaagcctttgagatccc

SEQ ID NO: 32305 - DNA, 40 bp, Homo sapiens
gggatctcaaaggcttagaggatctctaaggcttagaggc

SEQ ID NO: 32306 - DNA, 40 bp, Homo sapiens
cctctaagccttagagatcctctaagcctttgagatcccc

SEQ ID NO: 32307 - DNA, 40 bp, Homo sapiens
ggggatctcaaaggcttagaggatctctaaggcttagagg

SEQ ID NO: 32308 - DNA, 40 bp, Homo sapiens
ctctaagccttagagatcctctaagcctttgagatcccca

SEQ ID NO: 32309 - DNA, 40 bp, Homo sapiens
tggggatctcaaaggcttagaggatctctaaggcttagag

SEQ ID NO: 32310 - DNA, 40 bp, Homo sapiens
tctaagccttagagatcctctaagcctttgagatccccaa

SEQ ID NO: 32311 - DNA, 40 bp, Homo sapiens
ttggggatctcaaaggcttagaggatctctaaggcttaga

SEQ ID NO: 32312 - DNA, 40 bp, Homo sapiens
ctaagccttagagatcctctaagcctttgagatccccaaa

SEQ ID NO: 32313 - DNA, 40 bp, Homo sapiens
tttggggatctcaaaggcttagaggatctctaaggcttag

SEQ ID NO: 32314 - DNA, 40 bp, Homo sapiens
taagccttagagatcctctaagcctttgagatccccaaac

SEQ ID NO: 32315 - DNA, 40 bp, Homo sapiens
gtttggggatctcaaaggcttagaggatctctaaggctta

SEQ ID NO: 32316 - DNA, 40 bp, Homo sapiens
aagccttagagatcctctaagcctttgagatccccaaacc

SEQ ID NO: 32317 - DNA, 40 bp, Homo sapiens
ggtttggggatctcaaaggcttagaggatctctaaggctt

SEQ ID NO: 32318 - DNA, 40 bp, Homo sapiens
agccttagagatcctctaagcctttgagatccccaaaccc

SEQ ID NO: 32319 - DNA, 40 bp, Homo sapiens
gggtttggggatctcaaaggcttagaggatctctaaggct

SEQ ID NO: 32320 - DNA, 40 bp, Homo sapiens
gccttagagatcctctaagcctttgagatccccaaaccct

SEQ ID NO: 32321 - DNA, 40 bp, Homo sapiens
agggtttggggatctcaaaggcttagaggatctctaaggc

SEQ ID NO: 32322 - DNA, 40 bp, Homo sapiens
ccttagagatcctctaagcctttgagatccccaaaccctg

SEQ ID NO: 32323 - DNA, 40 bp, Homo sapiens
cagggtttggggatctcaaaggcttagaggatctctaagg

SEQ ID NO: 32324 - DNA, 40 bp, Homo sapiens
cttagagatcctctaagcctttgagatccccaaaccctgg

SEQ ID NO: 32325 - DNA, 40 bp, Homo sapiens
ccagggtttggggatctcaaaggcttagaggatctctaag

SEQ ID NO: 32326 - DNA, 40 bp, Homo sapiens
ttagagatcctctaagcctttgagatccccaaaccctgga

SEQ ID NO: 32327 - DNA, 40 bp, Homo sapiens
tccagggtttggggatctcaaaggcttagaggatctctaa

SEQ ID NO: 32328 - DNA, 40 bp, Homo sapiens
tagagatcctctaagcctttgagatccccaaaccctggac

SEQ ID NO: 32329 - DNA, 40 bp, Homo sapiens
gtccagggtttggggatctcaaaggcttagaggatctcta

SEQ ID NO: 32330 - DNA, 40 bp, Homo sapiens
agagatcctctaagcctttgagatccccaaaccctggact

SEQ ID NO: 32331 - DNA, 40 bp, Homo sapiens
agtccagggtttggggatctcaaaggcttagaggatctct

SEQ ID NO: 32332 - DNA, 40 bp, Homo sapiens
gagatcctctaagcctttgagatccccaaaccctggactg

SEQ ID NO: 32333 - DNA, 40 bp, Homo sapiens
cagtccagggtttggggatctcaaaggcttagaggatctc

SEQ ID NO: 32334 - DNA, 40 bp, Homo sapiens
agatcctctaagcctttgagatccccaaaccctggactgc

SEQ ID NO: 32335 - DNA, 40 bp, Homo sapiens
gcagtccagggtttggggatctcaaaggcttagaggatct

SEQ ID NO: 32336 - DNA, 40 bp, Homo sapiens
gatcctctaagcctttgagatccccaaaccctggactgcg

SEQ ID NO: 32337 - DNA, 40 bp, Homo sapiens
cgcagtccagggtttggggatctcaaaggcttagaggatc

SEQ ID NO: 32338 - DNA, 40 bp, Homo sapiens
atcctctaagcctttgagatccccaaaccctggactgcgg

SEQ ID NO: 32339 - DNA, 40 bp, Homo sapiens
ccgcagtccagggtttggggatctcaaaggcttagaggat

SEQ ID NO: 32340 - DNA, 40 bp, Homo sapiens
tcctctaagcctttgagatccccaaaccctggactgcgga

SEQ ID NO: 32341 - DNA, 40 bp, Homo sapiens
tccgcagtccagggtttggggatctcaaaggcttagagga

SEQ ID NO: 32342 - DNA, 40 bp, Homo sapiens
cctctaagcctttgagatccccaaaccctggactgcggac

SEQ ID NO: 32343 - DNA, 40 bp, Homo sapiens
gtccgcagtccagggtttggggatctcaaaggcttagagg

SEQ ID NO: 32344 - DNA, 40 bp, Homo sapiens
ctctaagcctttgagatccccaaaccctggactgcggact

SEQ ID NO: 32345 - DNA, 40 bp, Homo sapiens
agtccgcagtccagggtttggggatctcaaaggcttagag

SEQ ID NO: 32346 - DNA, 40 bp, Homo sapiens
tctaagcctttgagatccccaaaccctggactgcggactg

SEQ ID NO: 32347 - DNA, 40 bp, Homo sapiens
cagtccgcagtccagggtttggggatctcaaaggcttaga

SEQ ID NO: 32348 - DNA, 40 bp, Homo sapiens
ctaagcctttgagatccccaaaccctggactgcggactgg

SEQ ID NO: 32349 - DNA, 40 bp, Homo sapiens
ccagtccgcagtccagggtttggggatctcaaaggcttag

SEQ ID NO: 32350 - DNA, 40 bp, Homo sapiens
taagcctttgagatccccaaaccctggactgcggactggt

SEQ ID NO: 32351 - DNA, 40 bp, Homo sapiens
accagtccgcagtccagggtttggggatctcaaaggctta

SEQ ID NO: 32352 - DNA, 40 bp, Homo sapiens
aagcctttgagatccccaaaccctggactgcggactggta

SEQ ID NO: 32353 - DNA, 40 bp, Homo sapiens
taccagtccgcagtccagggtttggggatctcaaaggctt

SEQ ID NO: 32354 - DNA, 40 bp, Homo sapiens
agcctttgagatccccaaaccctggactgcggactggtac

SEQ ID NO: 32355 - DNA, 40 bp, Homo sapiens
gtaccagtccgcagtccagggtttggggatctcaaaggct

SEQ ID NO: 32356 - DNA, 40 bp, Homo sapiens
gcctttgagatccccaaaccctggactgcggactggtacc

SEQ ID NO: 32357 - DNA, 40 bp, Homo sapiens
ggtaccagtccgcagtccagggtttggggatctcaaaggc

SEQ ID NO: 32358 - DNA, 40 bp, Homo sapiens
cctttgagatccccaaaccctggactgcggactggtaccc

SEQ ID NO: 32359 - DNA, 40 bp, Homo sapiens
gggtaccagtccgcagtccagggtttggggatctcaaagg

SEQ ID NO: 32360 - DNA, 40 bp, Homo sapiens
ctttgagatccccaaaccctggactgcggactggtaccca

SEQ ID NO: 32361 - DNA, 40 bp, Homo sapiens
tgggtaccagtccgcagtccagggtttggggatctcaaag

SEQ ID NO: 32362 - DNA, 40 bp, Homo sapiens
tttgagatccccaaaccctggactgcggactggtacccac

SEQ ID NO: 32363 - DNA, 40 bp, Homo sapiens
gtgggtaccagtccgcagtccagggtttggggatctcaaa

SEQ ID NO: 32364 - DNA, 40 bp, Homo sapiens
ttgagatccccaaaccctggactgcggactggtacccacc

SEQ ID NO: 32365 - DNA, 40 bp, Homo sapiens
ggtgggtaccagtccgcagtccagggtttggggatctcaa

SEQ ID NO: 32366 - DNA, 40 bp, Homo sapiens
tgagatccccaaaccctggactgcggactggtacccacct

SEQ ID NO: 32367 - DNA, 40 bp, Homo sapiens
aggtgggtaccagtccgcagtccagggtttggggatctca

SEQ ID NO: 32368 - DNA, 40 bp, Homo sapiens
gagatccccaaaccctggactgcggactggtacccacctg

SEQ ID NO: 32369 - DNA, 40 bp, Homo sapiens
caggtgggtaccagtccgcagtccagggtttggggatctc

SEQ ID NO: 32370 - DNA, 40 bp, Homo sapiens
agatccccaaaccctggactgcggactggtacccacctgt

SEQ ID NO: 32371 - DNA, 40 bp, Homo sapiens
acaggtgggtaccagtccgcagtccagggtttggggatct

SEQ ID NO: 32372 - DNA, 40 bp, Homo sapiens
gatccccaaaccctggactgcggactggtacccacctgtg

SEQ ID NO: 32373 - DNA, 40 bp, Homo sapiens
cacaggtgggtaccagtccgcagtccagggtttggggatc

SEQ ID NO: 32374 - DNA, 40 bp, Homo sapiens
atccccaaaccctggactgcggactggtacccacctgtgt

SEQ ID NO: 32375 - DNA, 40 bp, Homo sapiens
acacaggtgggtaccagtccgcagtccagggtttggggat

SEQ ID NO: 32376 - DNA, 40 bp, Homo sapiens
tccccaaaccctggactgcggactggtacccacctgtgtg

SEQ ID NO: 32377 - DNA, 40 bp, Homo sapiens
cacacaggtgggtaccagtccgcagtccagggtttgggga

SEQ ID NO: 32378 - DNA, 40 bp, Homo sapiens
ccccaaaccctggactgcggactggtacccacctgtgtgg

SEQ ID NO: 32379 - DNA, 40 bp, Homo sapiens
ccacacaggtgggtaccagtccgcagtccagggtttgggg

SEQ ID NO: 32380 - DNA, 40 bp, Homo sapiens
cccaaaccctggactgcggactggtacccacctgtgtggc

SEQ ID NO: 32381 - DNA, 40 bp, Homo sapiens
gccacacaggtgggtaccagtccgcagtccagggtttggg

SEQ ID NO: 32382 - DNA, 40 bp, Homo sapiens
ccaaaccctggactgcggactggtacccacctgtgtggcc

SEQ ID NO: 32383 - DNA, 40 bp, Homo sapiens
ggccacacaggtgggtaccagtccgcagtccagggtttgg

SEQ ID NO: 32384 - DNA, 40 bp, Homo sapiens
caaaccctggactgcggactggtacccacctgtgtggcct

SEQ ID NO: 32385 - DNA, 40 bp, Homo sapiens
aggccacacaggtgggtaccagtccgcagtccagggtttg

SEQ ID NO: 32386 - DNA, 40 bp, Homo sapiens
aaaccctggactgcggactggtacccacctgtgtggcctg

SEQ ID NO: 32387 - DNA, 40 bp, Homo sapiens
caggccacacaggtgggtaccagtccgcagtccagggttt

SEQ ID NO: 32388 - DNA, 40 bp, Homo sapiens
aaccctggactgcggactggtacccacctgtgtggcctgt

SEQ ID NO: 32389 - DNA, 40 bp, Homo sapiens
acaggccacacaggtgggtaccagtccgcagtccagggtt

SEQ ID NO: 32390 - DNA, 40 bp, Homo sapiens
accctggactgcggactggtacccacctgtgtggcctgtg

SEQ ID NO: 32391 - DNA, 40 bp, Homo sapiens
cacaggccacacaggtgggtaccagtccgcagtccagggt

SEQ ID NO: 32392 - DNA, 40 bp, Homo sapiens
ccctggactgcggactggtacccacctgtgtggcctgtga

SEQ ID NO: 32393 - DNA, 40 bp, Homo sapiens
tcacaggccacacaggtgggtaccagtccgcagtccaggg

SEQ ID NO: 32394 - DNA, 40 bp, Homo sapiens
cctggactgcggactggtacccacctgtgtggcctgtgag

SEQ ID NO: 32395 - DNA, 40 bp, Homo sapiens
ctcacaggccacacaggtgggtaccagtccgcagtccagg

SEQ ID NO: 32396 - DNA, 40 bp, Homo sapiens
ctggactgcggactggtacccacctgtgtggcctgtgagg

SEQ ID NO: 32397 - DNA, 40 bp, Homo sapiens
cctcacaggccacacaggtgggtaccagtccgcagtccag

SEQ ID NO: 32398 - DNA, 40 bp, Homo sapiens
tggactgcggactggtacccacctgtgtggcctgtgagga

SEQ ID NO: 32399 - DNA, 40 bp, Homo sapiens
tcctcacaggccacacaggtgggtaccagtccgcagtcca

SEQ ID NO: 32400 - DNA, 40 bp, Homo sapiens
ggactgcggactggtacccacctgtgtggcctgtgaggaa

SEQ ID NO: 32401 - DNA, 40 bp, Homo sapiens
ttcctcacaggccacacaggtgggtaccagtccgcagtcc

SEQ ID NO: 32402 - DNA, 40 bp, Homo sapiens
gactgcggactggtacccacctgtgtggcctgtgaggaac

SEQ ID NO: 32403 - DNA, 40 bp, Homo sapiens
gttcctcacaggccacacaggtgggtaccagtccgcagtc

SEQ ID NO: 32404 - DNA, 40 bp, Homo sapiens
actgcggactggtacccacctgtgtggcctgtgaggaact

SEQ ID NO: 32405 - DNA, 40 bp, Homo sapiens
agttcctcacaggccacacaggtgggtaccagtccgcagt

SEQ ID NO: 32406 - DNA, 40 bp, Homo sapiens
ctgcggactggtacccacctgtgtggcctgtgaggaactg

SEQ ID NO: 32407 - DNA, 40 bp, Homo sapiens
cagttcctcacaggccacacaggtgggtaccagtccgcag

SEQ ID NO: 32408 - DNA, 40 bp, Homo sapiens
tgcggactggtacccacctgtgtggcctgtgaggaactgg

SEQ ID NO: 32409 - DNA, 40 bp, Homo sapiens
ccagttcctcacaggccacacaggtgggtaccagtccgca

SEQ ID NO: 32410 - DNA, 40 bp, Homo sapiens
gcggactggtacccacctgtgtggcctgtgaggaactggg

SEQ ID NO: 32411 - DNA, 40 bp, Homo sapiens
cccagttcctcacaggccacacaggtgggtaccagtccgc

SEQ ID NO: 32412 - DNA, 40 bp, Homo sapiens
cggactggtacccacctgtgtggcctgtgaggaactgggc

SEQ ID NO: 32413 - DNA, 40 bp, Homo sapiens
gcccagttcctcacaggccacacaggtgggtaccagtccg

SEQ ID NO: 32414 - DNA, 40 bp, Homo sapiens
ggactggtacccacctgtgtggcctgtgaggaactgggct

SEQ ID NO: 32415 - DNA, 40 bp, Homo sapiens
agcccagttcctcacaggccacacaggtgggtaccagtcc

SEQ ID NO: 32416 - DNA, 40 bp, Homo sapiens
gactggtacccacctgtgtggcctgtgaggaactgggctg

SEQ ID NO: 32417 - DNA, 40 bp, Homo sapiens
cagcccagttcctcacaggccacacaggtgggtaccagtc

SEQ ID NO: 32418 - DNA, 40 bp, Homo sapiens
actggtacccacctgtgtggcctgtgaggaactgggctgc

SEQ ID NO: 32419 - DNA, 40 bp, Homo sapiens
gcagcccagttcctcacaggccacacaggtgggtaccagt

SEQ ID NO: 32420 - DNA, 40 bp, Homo sapiens
ctggtacccacctgtgtggcctgtgaggaactgggctgca

SEQ ID NO: 32421 - DNA, 40 bp, Homo sapiens
tgcagcccagttcctcacaggccacacaggtgggtaccag

SEQ ID NO: 32422 - DNA, 40 bp, Homo sapiens
tggtacccacctgtgtggcctgtgaggaactgggctgcac

SEQ ID NO: 32423 - DNA, 40 bp, Homo sapiens
gtgcagcccagttcctcacaggccacacaggtgggtacca

SEQ ID NO: 32424 - DNA, 40 bp, Homo sapiens
ggtacccacctgtgtggcctgtgaggaactgggctgcaca

SEQ ID NO: 32425 - DNA, 40 bp, Homo sapiens
tgtgcagcccagttcctcacaggccacacaggtgggtacc

SEQ ID NO: 32426 - DNA, 40 bp, Homo sapiens
gtacccacctgtgtggcctgtgaggaactgggctgcacag

SEQ ID NO: 32427 - DNA, 40 bp, Homo sapiens
ctgtgcagcccagttcctcacaggccacacaggtgggtac

SEQ ID NO: 32428 - DNA, 40 bp, Homo sapiens
tacccacctgtgtggcctgtgaggaactgggctgcacagc

SEQ ID NO: 32429 - DNA, 40 bp, Homo sapiens
gctgtgcagcccagttcctcacaggccacacaggtgggta

SEQ ID NO: 32430 - DNA, 40 bp, Homo sapiens
acccacctgtgtggcctgtgaggaactgggctgcacagcc

SEQ ID NO: 32431 - DNA, 40 bp, Homo sapiens
ggctgtgcagcccagttcctcacaggccacacaggtgggt

SEQ ID NO: 32432 - DNA, 40 bp, Homo sapiens
cccacctgtgtggcctgtgaggaactgggctgcacagccg

SEQ ID NO: 32433 - DNA, 40 bp, Homo sapiens
cggctgtgcagcccagttcctcacaggccacacaggtggg

SEQ ID NO: 32434 - DNA, 40 bp, Homo sapiens
ccacctgtgtggcctgtgaggaactgggctgcacagccgg

SEQ ID NO: 32435 - DNA, 40 bp, Homo sapiens
ccggctgtgcagcccagttcctcacaggccacacaggtgg

SEQ ID NO: 32436 - DNA, 40 bp, Homo sapiens
cacctgtgtggcctgtgaggaactgggctgcacagccgga

SEQ ID NO: 32437 - DNA, 40 bp, Homo sapiens
tccggctgtgcagcccagttcctcacaggccacacaggtg

SEQ ID NO: 32438 - DNA, 40 bp, Homo sapiens
acctgtgtggcctgtgaggaactgggctgcacagccggaa

SEQ ID NO: 32439 - DNA, 40 bp, Homo sapiens
ttccggctgtgcagcccagttcctcacaggccacacaggt

SEQ ID NO: 32440 - DNA, 40 bp, Homo sapiens
cctgtgtggcctgtgaggaactgggctgcacagccggaag

SEQ ID NO: 32441 - DNA, 40 bp, Homo sapiens
cttccggctgtgcagcccagttcctcacaggccacacagg

SEQ ID NO: 32442 - DNA, 40 bp, Homo sapiens
ctgtgtggcctgtgaggaactgggctgcacagccggaagg

SEQ ID NO: 32443 - DNA, 40 bp, Homo sapiens
ccttccggctgtgcagcccagttcctcacaggccacacag

SEQ ID NO: 32444 - DNA, 40 bp, Homo sapiens
tgtgtggcctgtgaggaactgggctgcacagccggaagga

SEQ ID NO: 32445 - DNA, 40 bp, Homo sapiens
tccttccggctgtgcagcccagttcctcacaggccacaca

SEQ ID NO: 32446 - DNA, 40 bp, Homo sapiens
gtgtggcctgtgaggaactgggctgcacagccggaaggag

SEQ ID NO: 32447 - DNA, 40 bp, Homo sapiens
ctccttccggctgtgcagcccagttcctcacaggccacac

SEQ ID NO: 32448 - DNA, 40 bp, Homo sapiens
tgtggcctgtgaggaactgggctgcacagccggaaggagg

SEQ ID NO: 32449 - DNA, 40 bp, Homo sapiens
cctccttccggctgtgcagcccagttcctcacaggccaca

SEQ ID NO: 32450 - DNA, 40 bp, Homo sapiens
gtggcctgtgaggaactgggctgcacagccggaaggaggt

SEQ ID NO: 32451 - DNA, 40 bp, Homo sapiens
acctccttccggctgtgcagcccagttcctcacaggccac

SEQ ID NO: 32452 - DNA, 40 bp, Homo sapiens
tggcctgtgaggaactgggctgcacagccggaaggaggtg

SEQ ID NO: 32453 - DNA, 40 bp, Homo sapiens
cacctccttccggctgtgcagcccagttcctcacaggcca

SEQ ID NO: 32454 - DNA, 40 bp, Homo sapiens
ggcctgtgaggaactgggctgcacagccggaaggaggtga

SEQ ID NO: 32455 - DNA, 40 bp, Homo sapiens
tcacctccttccggctgtgcagcccagttcctcacaggcc

SEQ ID NO: 32456 - DNA, 40 bp, Homo sapiens
gcctgtgaggaactgggctgcacagccggaaggaggtgag

SEQ ID NO: 32457 - DNA, 40 bp, Homo sapiens
ctcacctccttccggctgtgcagcccagttcctcacaggc

SEQ ID NO: 32458 - DNA, 40 bp, Homo sapiens
cctgtgaggaactgggctgcacagccggaaggaggtgagc

SEQ ID NO: 32459 - DNA, 40 bp, Homo sapiens
gctcacctccttccggctgtgcagcccagttcctcacagg

SEQ ID NO: 32460 - DNA, 40 bp, Homo sapiens
ctgtgaggaactgggctgcacagccggaaggaggtgagca

SEQ ID NO: 32461 - DNA, 40 bp, Homo sapiens
tgctcacctccttccggctgtgcagcccagttcctcacag

SEQ ID NO: 32462 - DNA, 40 bp, Homo sapiens
tgtgaggaactgggctgcacagccggaaggaggtgagcat

SEQ ID NO: 32463 - DNA, 40 bp, Homo sapiens
atgctcacctccttccggctgtgcagcccagttcctcaca

SEQ ID NO: 32464 - DNA, 40 bp, Homo sapiens
gtgaggaactgggctgcacagccggaaggaggtgagcatt

SEQ ID NO: 32465 - DNA, 40 bp, Homo sapiens
aatgctcacctccttccggctgtgcagcccagttcctcac

SEQ ID NO: 32466 - DNA, 40 bp, Homo sapiens
tgaggaactgggctgcacagccggaaggaggtgagcatta

SEQ ID NO: 32467 - DNA, 40 bp, Homo sapiens
taatgctcacctccttccggctgtgcagcccagttcctca

SEQ ID NO: 32468 - DNA, 40 bp, Homo sapiens
gaggaactgggctgcacagccggaaggaggtgagcattac

SEQ ID NO: 32469 - DNA, 40 bp, Homo sapiens
gtaatgctcacctccttccggctgtgcagcccagttcctc

SEQ ID NO: 32470 - DNA, 40 bp, Homo sapiens
aggaactgggctgcacagccggaaggaggtgagcattact

SEQ ID NO: 32471 - DNA, 40 bp, Homo sapiens
agtaatgctcacctccttccggctgtgcagcccagttcct

SEQ ID NO: 32472 - DNA, 40 bp, Homo sapiens
ggaactgggctgcacagccggaaggaggtgagcattactt

SEQ ID NO: 32473 - DNA, 40 bp, Homo sapiens
aagtaatgctcacctccttccggctgtgcagcccagttcc

SEQ ID NO: 32474 - DNA, 40 bp, Homo sapiens
gaactgggctgcacagccggaaggaggtgagcattacttg

SEQ ID NO: 32475 - DNA, 40 bp, Homo sapiens
caagtaatgctcacctccttccggctgtgcagcccagttc

SEQ ID NO: 32476 - DNA, 40 bp, Homo sapiens
aactgggctgcacagccggaaggaggtgagcattacttgc

SEQ ID NO: 32477 - DNA, 40 bp, Homo sapiens
gcaagtaatgctcacctccttccggctgtgcagcccagtt

SEQ ID NO: 32478 - DNA, 40 bp, Homo sapiens
actgggctgcacagccggaaggaggtgagcattacttgcc

SEQ ID NO: 32479 - DNA, 40 bp, Homo sapiens
ggcaagtaatgctcacctccttccggctgtgcagcccagt

SEQ ID NO: 32480 - DNA, 40 bp, Homo sapiens
ctgggctgcacagccggaaggaggtgagcattacttgcct

SEQ ID NO: 32481 - DNA, 40 bp, Homo sapiens
aggcaagtaatgctcacctccttccggctgtgcagcccag

SEQ ID NO: 32482 - DNA, 40 bp, Homo sapiens
tgggctgcacagccggaaggaggtgagcattacttgcctt

SEQ ID NO: 32483 - DNA, 40 bp, Homo sapiens
aaggcaagtaatgctcacctccttccggctgtgcagccca

SEQ ID NO: 32484 - DNA, 40 bp, Homo sapiens
gggctgcacagccggaaggaggtgagcattacttgcctta

SEQ ID NO: 32485 - DNA, 40 bp, Homo sapiens
taaggcaagtaatgctcacctccttccggctgtgcagccc

SEQ ID NO: 32486 - DNA, 40 bp, Homo sapiens
ggctgcacagccggaaggaggtgagcattacttgccttag

SEQ ID NO: 32487 - DNA, 40 bp, Homo sapiens
ctaaggcaagtaatgctcacctccttccggctgtgcagcc

SEQ ID NO: 32488 - DNA, 40 bp, Homo sapiens
gctgcacagccggaaggaggtgagcattacttgccttagc

SEQ ID NO: 32489 - DNA, 40 bp, Homo sapiens
gctaaggcaagtaatgctcacctccttccggctgtgcagc

SEQ ID NO: 32490 - DNA, 40 bp, Homo sapiens
ctgcacagccggaaggaggtgagcattacttgccttagct

SEQ ID NO: 32491 - DNA, 40 bp, Homo sapiens
agctaaggcaagtaatgctcacctccttccggctgtgcag

SEQ ID NO: 32492 - DNA, 40 bp, Homo sapiens
tgcacagccggaaggaggtgagcattacttgccttagctc

SEQ ID NO: 32493 - DNA, 40 bp, Homo sapiens
gagctaaggcaagtaatgctcacctccttccggctgtgca

SEQ ID NO: 32494 - DNA, 40 bp, Homo sapiens
gcacagccggaaggaggtgagcattacttgccttagctcc

SEQ ID NO: 32495 - DNA, 40 bp, Homo sapiens
ggagctaaggcaagtaatgctcacctccttccggctgtgc

SEQ ID NO: 32496 - DNA, 40 bp, Homo sapiens
cacagccggaaggaggtgagcattacttgccttagctcct

SEQ ID NO: 32497 - DNA, 40 bp, Homo sapiens
aggagctaaggcaagtaatgctcacctccttccggctgtg

SEQ ID NO: 32498 - DNA, 40 bp, Homo sapiens
acagccggaaggaggtgagcattacttgccttagctcctg

SEQ ID NO: 32499 - DNA, 40 bp, Homo sapiens
caggagctaaggcaagtaatgctcacctccttccggctgt

SEQ ID NO: 32500 - DNA, 40 bp, Homo sapiens
cagccggaaggaggtgagcattacttgccttagctcctgt

SEQ ID NO: 32501 - DNA, 40 bp, Homo sapiens
acaggagctaaggcaagtaatgctcacctccttccggctg

SEQ ID NO: 32502 - DNA, 40 bp, Homo sapiens
agccggaaggaggtgagcattacttgccttagctcctgtc

SEQ ID NO: 32503 - DNA, 40 bp, Homo sapiens
gacaggagctaaggcaagtaatgctcacctccttccggct

SEQ ID NO: 32504 - DNA, 40 bp, Homo sapiens
gccggaaggaggtgagcattacttgccttagctcctgtca

SEQ ID NO: 32505 - DNA, 40 bp, Homo sapiens
tgacaggagctaaggcaagtaatgctcacctccttccggc

SEQ ID NO: 32506 - DNA, 40 bp, Homo sapiens
ccggaaggaggtgagcattacttgccttagctcctgtcag

SEQ ID NO: 32507 - DNA, 40 bp, Homo sapiens
ctgacaggagctaaggcaagtaatgctcacctccttccgg

SEQ ID NO: 32508 - DNA, 40 bp, Homo sapiens
cggaaggaggtgagcattacttgccttagctcctgtcaga

SEQ ID NO: 32509 - DNA, 40 bp, Homo sapiens
tctgacaggagctaaggcaagtaatgctcacctccttccg

SEQ ID NO: 32510 - DNA, 40 bp, Homo sapiens
ggaaggaggtgagcattacttgccttagctcctgtcagat

SEQ ID NO: 32511 - DNA, 40 bp, Homo sapiens
atctgacaggagctaaggcaagtaatgctcacctccttcc

SEQ ID NO: 32512 - DNA, 40 bp, Homo sapiens
gaaggaggtgagcattacttgccttagctcctgtcagatc

SEQ ID NO: 32513 - DNA, 40 bp, Homo sapiens
gatctgacaggagctaaggcaagtaatgctcacctccttc

SEQ ID NO: 32514 - DNA, 40 bp, Homo sapiens
aaggaggtgagcattacttgccttagctcctgtcagatcg

SEQ ID NO: 32515 - DNA, 40 bp, Homo sapiens
cgatctgacaggagctaaggcaagtaatgctcacctcctt

SEQ ID NO: 32516 - DNA, 40 bp, Homo sapiens
aggaggtgagcattacttgccttagctcctgtcagatcgg

SEQ ID NO: 32517 - DNA, 40 bp, Homo sapiens
ccgatctgacaggagctaaggcaagtaatgctcacctcct

SEQ ID NO: 32518 - DNA, 40 bp, Homo sapiens
ggaggtgagcattacttgccttagctcctgtcagatcggc

SEQ ID NO: 32519 - DNA, 40 bp, Homo sapiens
gccgatctgacaggagctaaggcaagtaatgctcacctcc

SEQ ID NO: 32520 - DNA, 40 bp, Homo sapiens
gaggtgagcattacttgccttagctcctgtcagatcggca

SEQ ID NO: 32521 - DNA, 40 bp, Homo sapiens
tgccgatctgacaggagctaaggcaagtaatgctcacctc

SEQ ID NO: 32522 - DNA, 40 bp, Homo sapiens
aggtgagcattacttgccttagctcctgtcagatcggcag

SEQ ID NO: 32523 - DNA, 40 bp, Homo sapiens
ctgccgatctgacaggagctaaggcaagtaatgctcacct

SEQ ID NO: 32524 - DNA, 40 bp, Homo sapiens
ggtgagcattacttgccttagctcctgtcagatcggcagc

SEQ ID NO: 32525 - DNA, 40 bp, Homo sapiens
gctgccgatctgacaggagctaaggcaagtaatgctcacc

SEQ ID NO: 32526 - DNA, 40 bp, Homo sapiens
gtgagcattacttgccttagctcctgtcagatcggcagca

SEQ ID NO: 32527 - DNA, 40 bp, Homo sapiens
tgctgccgatctgacaggagctaaggcaagtaatgctcac

SEQ ID NO: 32528 - DNA, 40 bp, Homo sapiens
tgagcattacttgccttagctcctgtcagatcggcagcat

SEQ ID NO: 32529 - DNA, 40 bp, Homo sapiens
atgctgccgatctgacaggagctaaggcaagtaatgctca

SEQ ID NO: 32530 - DNA, 40 bp, Homo sapiens
gagcattacttgccttagctcctgtcagatcggcagcatt

SEQ ID NO: 32531 - DNA, 40 bp, Homo sapiens
aatgctgccgatctgacaggagctaaggcaagtaatgctc

SEQ ID NO: 32532 - DNA, 40 bp, Homo sapiens
agcattacttgccttagctcctgtcagatcggcagcatta

SEQ ID NO: 32533 - DNA, 40 bp, Homo sapiens
taatgctgccgatctgacaggagctaaggcaagtaatgct

SEQ ID NO: 32534 - DNA, 40 bp, Homo sapiens
gcattacttgccttagctcctgtcagatcggcagcattag

SEQ ID NO: 32535 - DNA, 40 bp, Homo sapiens
ctaatgctgccgatctgacaggagctaaggcaagtaatgc

SEQ ID NO: 32536 - DNA, 40 bp, Homo sapiens
cattacttgccttagctcctgtcagatcggcagcattaga

SEQ ID NO: 32537 - DNA, 40 bp, Homo sapiens
tctaatgctgccgatctgacaggagctaaggcaagtaatg

SEQ ID NO: 32538 - DNA, 40 bp, Homo sapiens
attacttgccttagctcctgtcagatcggcagcattagat

SEQ ID NO: 32539 - DNA, 40 bp, Homo sapiens
atctaatgctgccgatctgacaggagctaaggcaagtaat

SEQ ID NO: 32540 - DNA, 40 bp, Homo sapiens
ttacttgccttagctcctgtcagatcggcagcattagatt

SEQ ID NO: 32541 - DNA, 40 bp, Homo sapiens
aatctaatgctgccgatctgacaggagctaaggcaagtaa

SEQ ID NO: 32542 - DNA, 40 bp, Homo sapiens
tacttgccttagctcctgtcagatcggcagcattagattc

SEQ ID NO: 32543 - DNA, 40 bp, Homo sapiens
gaatctaatgctgccgatctgacaggagctaaggcaagta

SEQ ID NO: 32544 - DNA, 40 bp, Homo sapiens
acttgccttagctcctgtcagatcggcagcattagattct

SEQ ID NO: 32545 - DNA, 40 bp, Homo sapiens
agaatctaatgctgccgatctgacaggagctaaggcaagt

SEQ ID NO: 32546 - DNA, 40 bp, Homo sapiens
cttgccttagctcctgtcagatcggcagcattagattcta

SEQ ID NO: 32547 - DNA, 40 bp, Homo sapiens
tagaatctaatgctgccgatctgacaggagctaaggcaag

SEQ ID NO: 32548 - DNA, 40 bp, Homo sapiens
ttgccttagctcctgtcagatcggcagcattagattctaa

SEQ ID NO: 32549 - DNA, 40 bp, Homo sapiens
ttagaatctaatgctgccgatctgacaggagctaaggcaa

SEQ ID NO: 32550 - DNA, 40 bp, Homo sapiens
tgccttagctcctgtcagatcggcagcattagattctaat

SEQ ID NO: 32551 - DNA, 40 bp, Homo sapiens
attagaatctaatgctgccgatctgacaggagctaaggca

SEQ ID NO: 32552 - DNA, 40 bp, Homo sapiens
gccttagctcctgtcagatcggcagcattagattctaata

SEQ ID NO: 32553 - DNA, 40 bp, Homo sapiens
tattagaatctaatgctgccgatctgacaggagctaaggc

SEQ ID NO: 32554 - DNA, 40 bp, Homo sapiens
ccttagctcctgtcagatcggcagcattagattctaatag

SEQ ID NO: 32555 - DNA, 40 bp, Homo sapiens
ctattagaatctaatgctgccgatctgacaggagctaagg

SEQ ID NO: 32556 - DNA, 40 bp, Homo sapiens
cttagctcctgtcagatcggcagcattagattctaatagg

SEQ ID NO: 32557 - DNA, 40 bp, Homo sapiens
cctattagaatctaatgctgccgatctgacaggagctaag

SEQ ID NO: 32558 - DNA, 40 bp, Homo sapiens
ttagctcctgtcagatcggcagcattagattctaatagga

SEQ ID NO: 32559 - DNA, 40 bp, Homo sapiens
tcctattagaatctaatgctgccgatctgacaggagctaa

SEQ ID NO: 32560 - DNA, 40 bp, Homo sapiens
tagctcctgtcagatcggcagcattagattctaataggag

SEQ ID NO: 32561 - DNA, 40 bp, Homo sapiens
ctcctattagaatctaatgctgccgatctgacaggagcta

SEQ ID NO: 32562 - DNA, 40 bp, Homo sapiens
agctcctgtcagatcggcagcattagattctaataggagc

SEQ ID NO: 32563 - DNA, 40 bp, Homo sapiens
gctcctattagaatctaatgctgccgatctgacaggagct

SEQ ID NO: 32564 - DNA, 40 bp, Homo sapiens
gctcctgtcagatcggcagcattagattctaataggagcg

SEQ ID NO: 32565 - DNA, 40 bp, Homo sapiens
cgctcctattagaatctaatgctgccgatctgacaggagc

SEQ ID NO: 32566 - DNA, 40 bp, Homo sapiens
ctcctgtcagatcggcagcattagattctaataggagcgt

SEQ ID NO: 32567 - DNA, 40 bp, Homo sapiens
acgctcctattagaatctaatgctgccgatctgacaggag

SEQ ID NO: 32568 - DNA, 40 bp, Homo sapiens
tcctgtcagatcggcagcattagattctaataggagcgtg

SEQ ID NO: 32569 - DNA, 40 bp, Homo sapiens
cacgctcctattagaatctaatgctgccgatctgacagga

SEQ ID NO: 32570 - DNA, 40 bp, Homo sapiens
cctgtcagatcggcagcattagattctaataggagcgtga

SEQ ID NO: 32571 - DNA, 40 bp, Homo sapiens
tcacgctcctattagaatctaatgctgccgatctgacagg

SEQ ID NO: 32572 - DNA, 40 bp, Homo sapiens
ctgtcagatcggcagcattagattctaataggagcgtgaa

SEQ ID NO: 32573 - DNA, 40 bp, Homo sapiens
ttcacgctcctattagaatctaatgctgccgatctgacag

SEQ ID NO: 32574 - DNA, 40 bp, Homo sapiens
tgtcagatcggcagcattagattctaataggagcgtgaac

SEQ ID NO: 32575 - DNA, 40 bp, Homo sapiens
gttcacgctcctattagaatctaatgctgccgatctgaca

SEQ ID NO: 32576 - DNA, 40 bp, Homo sapiens
gtcagatcggcagcattagattctaataggagcgtgaacc

SEQ ID NO: 32577 - DNA, 40 bp, Homo sapiens
ggttcacgctcctattagaatctaatgctgccgatctgac

SEQ ID NO: 32578 - DNA, 40 bp, Homo sapiens
tcagatcggcagcattagattctaataggagcgtgaaccg

SEQ ID NO: 32579 - DNA, 40 bp, Homo sapiens
cggttcacgctcctattagaatctaatgctgccgatctga

SEQ ID NO: 32580 - DNA, 40 bp, Homo sapiens
cagatcggcagcattagattctaataggagcgtgaaccgt

SEQ ID NO: 32581 - DNA, 40 bp, Homo sapiens
acggttcacgctcctattagaatctaatgctgccgatctg

SEQ ID NO: 32582 - DNA, 40 bp, Homo sapiens
agatcggcagcattagattctaataggagcgtgaaccgtg

SEQ ID NO: 32583 - DNA, 40 bp, Homo sapiens
cacggttcacgctcctattagaatctaatgctgccgatct

SEQ ID NO: 32584 - DNA, 40 bp, Homo sapiens
gatcggcagcattagattctaataggagcgtgaaccgtgt

SEQ ID NO: 32585 - DNA, 40 bp, Homo sapiens
acacggttcacgctcctattagaatctaatgctgccgatc

SEQ ID NO: 32586 - DNA, 40 bp, Homo sapiens
atcggcagcattagattctaataggagcgtgaaccgtgtt

SEQ ID NO: 32587 - DNA, 40 bp, Homo sapiens
aacacggttcacgctcctattagaatctaatgctgccgat

SEQ ID NO: 32588 - DNA, 40 bp, Homo sapiens
tcggcagcattagattctaataggagcgtgaaccgtgttg

SEQ ID NO: 32589 - DNA, 40 bp, Homo sapiens
caacacggttcacgctcctattagaatctaatgctgccga

SEQ ID NO: 32590 - DNA, 40 bp, Homo sapiens
cggcagcattagattctaataggagcgtgaaccgtgttgt

SEQ ID NO: 32591 - DNA, 40 bp, Homo sapiens
acaacacggttcacgctcctattagaatctaatgctgccg

SEQ ID NO: 32592 - DNA, 40 bp, Homo sapiens
ggcagcattagattctaataggagcgtgaaccgtgttgtg

SEQ ID NO: 32593 - DNA, 40 bp, Homo sapiens
cacaacacggttcacgctcctattagaatctaatgctgcc

SEQ ID NO: 32594 - DNA, 40 bp, Homo sapiens
gcagcattagattctaataggagcgtgaaccgtgttgtga

SEQ ID NO: 32595 - DNA, 40 bp, Homo sapiens
tcacaacacggttcacgctcctattagaatctaatgctgc

SEQ ID NO: 32596 - DNA, 40 bp, Homo sapiens
cagcattagattctaataggagcgtgaaccgtgttgtgaa

SEQ ID NO: 32597 - DNA, 40 bp, Homo sapiens
ttcacaacacggttcacgctcctattagaatctaatgctg

SEQ ID NO: 32598 - DNA, 40 bp, Homo sapiens
agcattagattctaataggagcgtgaaccgtgttgtgaac

SEQ ID NO: 32599 - DNA, 40 bp, Homo sapiens
gttcacaacacggttcacgctcctattagaatctaatgct

SEQ ID NO: 32600 - DNA, 40 bp, Homo sapiens
gcattagattctaataggagcgtgaaccgtgttgtgaact

SEQ ID NO: 32601 - DNA, 40 bp, Homo sapiens
agttcacaacacggttcacgctcctattagaatctaatgc

SEQ ID NO: 32602 - DNA, 40 bp, Homo sapiens
cattagattctaataggagcgtgaaccgtgttgtgaactg

SEQ ID NO: 32603 - DNA, 40 bp, Homo sapiens
cagttcacaacacggttcacgctcctattagaatctaatg

SEQ ID NO: 32604 - DNA, 40 bp, Homo sapiens
attagattctaataggagcgtgaaccgtgttgtgaactgc

SEQ ID NO: 32605 - DNA, 40 bp, Homo sapiens
gcagttcacaacacggttcacgctcctattagaatctaat

SEQ ID NO: 32606 - DNA, 40 bp, Homo sapiens
ttagattctaataggagcgtgaaccgtgttgtgaactgcc

SEQ ID NO: 32607 - DNA, 40 bp, Homo sapiens
ggcagttcacaacacggttcacgctcctattagaatctaa

SEQ ID NO: 32608 - DNA, 40 bp, Homo sapiens
tagattctaataggagcgtgaaccgtgttgtgaactgccc

SEQ ID NO: 32609 - DNA, 40 bp, Homo sapiens
gggcagttcacaacacggttcacgctcctattagaatcta

SEQ ID NO: 32610 - DNA, 40 bp, Homo sapiens
agattctaataggagcgtgaaccgtgttgtgaactgccca

SEQ ID NO: 32611 - DNA, 40 bp, Homo sapiens
tgggcagttcacaacacggttcacgctcctattagaatct

SEQ ID NO: 32612 - DNA, 40 bp, Homo sapiens
gattctaataggagcgtgaaccgtgttgtgaactgcccat

SEQ ID NO: 32613 - DNA, 40 bp, Homo sapiens
atgggcagttcacaacacggttcacgctcctattagaatc

SEQ ID NO: 32614 - DNA, 40 bp, Homo sapiens
attctaataggagcgtgaaccgtgttgtgaactgcccatg

SEQ ID NO: 32615 - DNA, 40 bp, Homo sapiens
catgggcagttcacaacacggttcacgctcctattagaat

SEQ ID NO: 32616 - DNA, 40 bp, Homo sapiens
ttctaataggagcgtgaaccgtgttgtgaactgcccatgc

SEQ ID NO: 32617 - DNA, 40 bp, Homo sapiens
gcatgggcagttcacaacacggttcacgctcctattagaa

SEQ ID NO: 32618 - DNA, 40 bp, Homo sapiens
tctaataggagcgtgaaccgtgttgtgaactgcccatgca

SEQ ID NO: 32619 - DNA, 40 bp, Homo sapiens
tgcatgggcagttcacaacacggttcacgctcctattaga

SEQ ID NO: 32620 - DNA, 40 bp, Homo sapiens
ctaataggagcgtgaaccgtgttgtgaactgcccatgcaa

SEQ ID NO: 32621 - DNA, 40 bp, Homo sapiens
ttgcatgggcagttcacaacacggttcacgctcctattag

SEQ ID NO: 32622 - DNA, 40 bp, Homo sapiens
taataggagcgtgaaccgtgttgtgaactgcccatgcaag

SEQ ID NO: 32623 - DNA, 40 bp, Homo sapiens
cttgcatgggcagttcacaacacggttcacgctcctatta

SEQ ID NO: 32624 - DNA, 40 bp, Homo sapiens
aataggagcgtgaaccgtgttgtgaactgcccatgcaagg

SEQ ID NO: 32625 - DNA, 40 bp, Homo sapiens
ccttgcatgggcagttcacaacacggttcacgctcctatt

SEQ ID NO: 32626 - DNA, 40 bp, Homo sapiens
ataggagcgtgaaccgtgttgtgaactgcccatgcaagga

SEQ ID NO: 32627 - DNA, 40 bp, Homo sapiens
tccttgcatgggcagttcacaacacggttcacgctcctat

SEQ ID NO: 32628 - DNA, 40 bp, Homo sapiens
taggagcgtgaaccgtgttgtgaactgcccatgcaaggat

SEQ ID NO: 32629 - DNA, 40 bp, Homo sapiens
atccttgcatgggcagttcacaacacggttcacgctccta

SEQ ID NO: 32630 - DNA, 40 bp, Homo sapiens
aggagcgtgaaccgtgttgtgaactgcccatgcaaggatc

SEQ ID NO: 32631 - DNA, 40 bp, Homo sapiens
gatccttgcatgggcagttcacaacacggttcacgctcct

SEQ ID NO: 32632 - DNA, 40 bp, Homo sapiens
ggagcgtgaaccgtgttgtgaactgcccatgcaaggatct

SEQ ID NO: 32633 - DNA, 40 bp, Homo sapiens
agatccttgcatgggcagttcacaacacggttcacgctcc

SEQ ID NO: 32634 - DNA, 40 bp, Homo sapiens
gagcgtgaaccgtgttgtgaactgcccatgcaaggatcta

SEQ ID NO: 32635 - DNA, 40 bp, Homo sapiens
tagatccttgcatgggcagttcacaacacggttcacgctc

SEQ ID NO: 32636 - DNA, 40 bp, Homo sapiens
agcgtgaaccgtgttgtgaactgcccatgcaaggatctag

SEQ ID NO: 32637 - DNA, 40 bp, Homo sapiens
ctagatccttgcatgggcagttcacaacacggttcacgct

SEQ ID NO: 32638 - DNA, 40 bp, Homo sapiens
gcgtgaaccgtgttgtgaactgcccatgcaaggatctagg

SEQ ID NO: 32639 - DNA, 40 bp, Homo sapiens
cctagatccttgcatgggcagttcacaacacggttcacgc

SEQ ID NO: 32640 - DNA, 40 bp, Homo sapiens
cgtgaaccgtgttgtgaactgcccatgcaaggatctaggt

SEQ ID NO: 32641 - DNA, 40 bp, Homo sapiens
acctagatccttgcatgggcagttcacaacacggttcacg

SEQ ID NO: 32642 - DNA, 40 bp, Homo sapiens
gtgaaccgtgttgtgaactgcccatgcaaggatctaggtt

SEQ ID NO: 32643 - DNA, 40 bp, Homo sapiens
aacctagatccttgcatgggcagttcacaacacggttcac

SEQ ID NO: 32644 - DNA, 40 bp, Homo sapiens
tgaaccgtgttgtgaactgcccatgcaaggatctaggttg

SEQ ID NO: 32645 - DNA, 40 bp, Homo sapiens
caacctagatccttgcatgggcagttcacaacacggttca

SEQ ID NO: 32646 - DNA, 40 bp, Homo sapiens
gaaccgtgttgtgaactgcccatgcaaggatctaggttgc

SEQ ID NO: 32647 - DNA, 40 bp, Homo sapiens
gcaacctagatccttgcatgggcagttcacaacacggttc

SEQ ID NO: 32648 - DNA, 40 bp, Homo sapiens
aaccgtgttgtgaactgcccatgcaaggatctaggttgca

SEQ ID NO: 32649 - DNA, 40 bp, Homo sapiens
tgcaacctagatccttgcatgggcagttcacaacacggtt

SEQ ID NO: 32650 - DNA, 40 bp, Homo sapiens
accgtgttgtgaactgcccatgcaaggatctaggttgcat

SEQ ID NO: 32651 - DNA, 40 bp, Homo sapiens
atgcaacctagatccttgcatgggcagttcacaacacggt

SEQ ID NO: 32652 - DNA, 40 bp, Homo sapiens
ccgtgttgtgaactgcccatgcaaggatctaggttgcata

SEQ ID NO: 32653 - DNA, 40 bp, Homo sapiens
tatgcaacctagatccttgcatgggcagttcacaacacgg

SEQ ID NO: 32654 - DNA, 40 bp, Homo sapiens
cgtgttgtgaactgcccatgcaaggatctaggttgcatac

SEQ ID NO: 32655 - DNA, 40 bp, Homo sapiens
gtatgcaacctagatccttgcatgggcagttcacaacacg

SEQ ID NO: 32656 - DNA, 40 bp, Homo sapiens
gtgttgtgaactgcccatgcaaggatctaggttgcatact

SEQ ID NO: 32657 - DNA, 40 bp, Homo sapiens
agtatgcaacctagatccttgcatgggcagttcacaacac

SEQ ID NO: 32658 - DNA, 40 bp, Homo sapiens
tgttgtgaactgcccatgcaaggatctaggttgcatactc

SEQ ID NO: 32659 - DNA, 40 bp, Homo sapiens
gagtatgcaacctagatccttgcatgggcagttcacaaca

SEQ ID NO: 32660 - DNA, 40 bp, Homo sapiens
gttgtgaactgcccatgcaaggatctaggttgcatactcc

SEQ ID NO: 32661 - DNA, 40 bp, Homo sapiens
ggagtatgcaacctagatccttgcatgggcagttcacaac

SEQ ID NO: 32662 - DNA, 40 bp, Homo sapiens
ttgtgaactgcccatgcaaggatctaggttgcatactcct

SEQ ID NO: 32663 - DNA, 40 bp, Homo sapiens
aggagtatgcaacctagatccttgcatgggcagttcacaa

SEQ ID NO: 32664 - DNA, 40 bp, Homo sapiens
tgtgaactgcccatgcaaggatctaggttgcatactcctt

SEQ ID NO: 32665 - DNA, 40 bp, Homo sapiens
aaggagtatgcaacctagatccttgcatgggcagttcaca

SEQ ID NO: 32666 - DNA, 40 bp, Homo sapiens
gtgaactgcccatgcaaggatctaggttgcatactcctta

SEQ ID NO: 32667 - DNA, 40 bp, Homo sapiens
taaggagtatgcaacctagatccttgcatgggcagttcac

SEQ ID NO: 32668 - DNA, 40 bp, Homo sapiens
tgaactgcccatgcaaggatctaggttgcatactccttag

SEQ ID NO: 32669 - DNA, 40 bp, Homo sapiens
ctaaggagtatgcaacctagatccttgcatgggcagttca

SEQ ID NO: 32670 - DNA, 40 bp, Homo sapiens
gaactgcccatgcaaggatctaggttgcatactccttagg

SEQ ID NO: 32671 - DNA, 40 bp, Homo sapiens
cctaaggagtatgcaacctagatccttgcatgggcagttc

SEQ ID NO: 32672 - DNA, 40 bp, Homo sapiens
aactgcccatgcaaggatctaggttgcatactccttagga

SEQ ID NO: 32673 - DNA, 40 bp, Homo sapiens
tcctaaggagtatgcaacctagatccttgcatgggcagtt

SEQ ID NO: 32674 - DNA, 40 bp, Homo sapiens
actgcccatgcaaggatctaggttgcatactccttaggag

SEQ ID NO: 32675 - DNA, 40 bp, Homo sapiens
ctcctaaggagtatgcaacctagatccttgcatgggcagt

SEQ ID NO: 32676 - DNA, 40 bp, Homo sapiens
ctgcccatgcaaggatctaggttgcatactccttaggaga

SEQ ID NO: 32677 - DNA, 40 bp, Homo sapiens
tctcctaaggagtatgcaacctagatccttgcatgggcag

SEQ ID NO: 32678 - DNA, 40 bp, Homo sapiens
tgcccatgcaaggatctaggttgcatactccttaggagaa

SEQ ID NO: 32679 - DNA, 40 bp, Homo sapiens
ttctcctaaggagtatgcaacctagatccttgcatgggca

SEQ ID NO: 32680 - DNA, 40 bp, Homo sapiens
gcccatgcaaggatctaggttgcatactccttaggagaat

SEQ ID NO: 32681 - DNA, 40 bp, Homo sapiens
attctcctaaggagtatgcaacctagatccttgcatgggc

SEQ ID NO: 32682 - DNA, 40 bp, Homo sapiens
cccatgcaaggatctaggttgcatactccttaggagaatc

SEQ ID NO: 32683 - DNA, 40 bp, Homo sapiens
gattctcctaaggagtatgcaacctagatccttgcatggg

SEQ ID NO: 32684 - DNA, 40 bp, Homo sapiens
ccatgcaaggatctaggttgcatactccttaggagaatct

SEQ ID NO: 32685 - DNA, 40 bp, Homo sapiens
agattctcctaaggagtatgcaacctagatccttgcatgg

SEQ ID NO: 32686 - DNA, 40 bp, Homo sapiens
catgcaaggatctaggttgcatactccttaggagaatcta

SEQ ID NO: 32687 - DNA, 40 bp, Homo sapiens
tagattctcctaaggagtatgcaacctagatccttgcatg

SEQ ID NO: 32688 - DNA, 40 bp, Homo sapiens
atgcaaggatctaggttgcatactccttaggagaatctaa

SEQ ID NO: 32689 - DNA, 40 bp, Homo sapiens
ttagattctcctaaggagtatgcaacctagatccttgcat

SEQ ID NO: 32690 - DNA, 40 bp, Homo sapiens
tgcaaggatctaggttgcatactccttaggagaatctaac

SEQ ID NO: 32691 - DNA, 40 bp, Homo sapiens
gttagattctcctaaggagtatgcaacctagatccttgca

SEQ ID NO: 32692 - DNA, 40 bp, Homo sapiens
gcaaggatctaggttgcatactccttaggagaatctaact

SEQ ID NO: 32693 - DNA, 40 bp, Homo sapiens
agttagattctcctaaggagtatgcaacctagatccttgc

SEQ ID NO: 32694 - DNA, 40 bp, Homo sapiens
caaggatctaggttgcatactccttaggagaatctaacta

SEQ ID NO: 32695 - DNA, 40 bp, Homo sapiens
tagttagattctcctaaggagtatgcaacctagatccttg

SEQ ID NO: 32696 - DNA, 40 bp, Homo sapiens
aaggatctaggttgcatactccttaggagaatctaactaa

SEQ ID NO: 32697 - DNA, 40 bp, Homo sapiens
ttagttagattctcctaaggagtatgcaacctagatcctt

SEQ ID NO: 32698 - DNA, 40 bp, Homo sapiens
aggatctaggttgcatactccttaggagaatctaactaat

SEQ ID NO: 32699 - DNA, 40 bp, Homo sapiens
attagttagattctcctaaggagtatgcaacctagatcct

SEQ ID NO: 32700 - DNA, 40 bp, Homo sapiens
ggatctaggttgcatactccttaggagaatctaactaatg

SEQ ID NO: 32701 - DNA, 40 bp, Homo sapiens
cattagttagattctcctaaggagtatgcaacctagatcc

SEQ ID NO: 32702 - DNA, 40 bp, Homo sapiens
gatctaggttgcatactccttaggagaatctaactaatgc

SEQ ID NO: 32703 - DNA, 40 bp, Homo sapiens
gcattagttagattctcctaaggagtatgcaacctagatc

SEQ ID NO: 32704 - DNA, 40 bp, Homo sapiens
atctaggttgcatactccttaggagaatctaactaatgct

SEQ ID NO: 32705 - DNA, 40 bp, Homo sapiens
agcattagttagattctcctaaggagtatgcaacctagat

SEQ ID NO: 32706 - DNA, 40 bp, Homo sapiens
tctaggttgcatactccttaggagaatctaactaatgctt

SEQ ID NO: 32707 - DNA, 40 bp, Homo sapiens
aagcattagttagattctcctaaggagtatgcaacctaga

SEQ ID NO: 32708 - DNA, 40 bp, Homo sapiens
ctaggttgcatactccttaggagaatctaactaatgcttg

SEQ ID NO: 32709 - DNA, 40 bp, Homo sapiens
caagcattagttagattctcctaaggagtatgcaacctag

SEQ ID NO: 32710 - DNA, 40 bp, Homo sapiens
taggttgcatactccttaggagaatctaactaatgcttga

SEQ ID NO: 32711 - DNA, 40 bp, Homo sapiens
tcaagcattagttagattctcctaaggagtatgcaaccta

SEQ ID NO: 32712 - DNA, 40 bp, Homo sapiens
aggttgcatactccttaggagaatctaactaatgcttgat

SEQ ID NO: 32713 - DNA, 40 bp, Homo sapiens
atcaagcattagttagattctcctaaggagtatgcaacct

SEQ ID NO: 32714 - DNA, 40 bp, Homo sapiens
ggttgcatactccttaggagaatctaactaatgcttgatg

SEQ ID NO: 32715 - DNA, 40 bp, Homo sapiens
catcaagcattagttagattctcctaaggagtatgcaacc

SEQ ID NO: 32716 - DNA, 40 bp, Homo sapiens
gttgcatactccttaggagaatctaactaatgcttgatgg

SEQ ID NO: 32717 - DNA, 40 bp, Homo sapiens
ccatcaagcattagttagattctcctaaggagtatgcaac

SEQ ID NO: 32718 - DNA, 40 bp, Homo sapiens
ttgcatactccttaggagaatctaactaatgcttgatggt

SEQ ID NO: 32719 - DNA, 40 bp, Homo sapiens
accatcaagcattagttagattctcctaaggagtatgcaa

SEQ ID NO: 32720 - DNA, 40 bp, Homo sapiens
tgcatactccttaggagaatctaactaatgcttgatggtc

SEQ ID NO: 32721 - DNA, 40 bp, Homo sapiens
gaccatcaagcattagttagattctcctaaggagtatgca

SEQ ID NO: 32722 - DNA, 40 bp, Homo sapiens
gcatactccttaggagaatctaactaatgcttgatggtct

SEQ ID NO: 32723 - DNA, 40 bp, Homo sapiens
agaccatcaagcattagttagattctcctaaggagtatgc

SEQ ID NO: 32724 - DNA, 40 bp, Homo sapiens
catactccttaggagaatctaactaatgcttgatggtctg

SEQ ID NO: 32725 - DNA, 40 bp, Homo sapiens
cagaccatcaagcattagttagattctcctaaggagtatg

SEQ ID NO: 32726 - DNA, 40 bp, Homo sapiens
atactccttaggagaatctaactaatgcttgatggtctga

SEQ ID NO: 32727 - DNA, 40 bp, Homo sapiens
tcagaccatcaagcattagttagattctcctaaggagtat

SEQ ID NO: 32728 - DNA, 40 bp, Homo sapiens
tactccttaggagaatctaactaatgcttgatggtctgag

SEQ ID NO: 32729 - DNA, 40 bp, Homo sapiens
ctcagaccatcaagcattagttagattctcctaaggagta

SEQ ID NO: 32730 - DNA, 40 bp, Homo sapiens
actccttaggagaatctaactaatgcttgatggtctgagg

SEQ ID NO: 32731 - DNA, 40 bp, Homo sapiens
cctcagaccatcaagcattagttagattctcctaaggagt

SEQ ID NO: 32732 - DNA, 40 bp, Homo sapiens
ctccttaggagaatctaactaatgcttgatggtctgaggt

SEQ ID NO: 32733 - DNA, 40 bp, Homo sapiens
acctcagaccatcaagcattagttagattctcctaaggag

SEQ ID NO: 32734 - DNA, 40 bp, Homo sapiens
tccttaggagaatctaactaatgcttgatggtctgaggtg

SEQ ID NO: 32735 - DNA, 40 bp, Homo sapiens
cacctcagaccatcaagcattagttagattctcctaagga

SEQ ID NO: 32736 - DNA, 40 bp, Homo sapiens
ccttaggagaatctaactaatgcttgatggtctgaggtga

SEQ ID NO: 32737 - DNA, 40 bp, Homo sapiens
tcacctcagaccatcaagcattagttagattctcctaagg

SEQ ID NO: 32738 - DNA, 40 bp, Homo sapiens
cttaggagaatctaactaatgcttgatggtctgaggtgaa

SEQ ID NO: 32739 - DNA, 40 bp, Homo sapiens
ttcacctcagaccatcaagcattagttagattctcctaag

SEQ ID NO: 32740 - DNA, 40 bp, Homo sapiens
ttaggagaatctaactaatgcttgatggtctgaggtgaaa

SEQ ID NO: 32741 - DNA, 40 bp, Homo sapiens
tttcacctcagaccatcaagcattagttagattctcctaa

SEQ ID NO: 32742 - DNA, 40 bp, Homo sapiens
taggagaatctaactaatgcttgatggtctgaggtgaaac

SEQ ID NO: 32743 - DNA, 40 bp, Homo sapiens
gtttcacctcagaccatcaagcattagttagattctccta

SEQ ID NO: 32744 - DNA, 40 bp, Homo sapiens
aggagaatctaactaatgcttgatggtctgaggtgaaaca

SEQ ID NO: 32745 - DNA, 40 bp, Homo sapiens
tgtttcacctcagaccatcaagcattagttagattctcct

SEQ ID NO: 32746 - DNA, 40 bp, Homo sapiens
ggagaatctaactaatgcttgatggtctgaggtgaaacag

SEQ ID NO: 32747 - DNA, 40 bp, Homo sapiens
ctgtttcacctcagaccatcaagcattagttagattctcc

SEQ ID NO: 32748 - DNA, 40 bp, Homo sapiens
gagaatctaactaatgcttgatggtctgaggtgaaacagt

SEQ ID NO: 32749 - DNA, 40 bp, Homo sapiens
actgtttcacctcagaccatcaagcattagttagattctc

SEQ ID NO: 32750 - DNA, 40 bp, Homo sapiens
agaatctaactaatgcttgatggtctgaggtgaaacagtt

SEQ ID NO: 32751 - DNA, 40 bp, Homo sapiens
aactgtttcacctcagaccatcaagcattagttagattct

SEQ ID NO: 32752 - DNA, 40 bp, Homo sapiens
gaatctaactaatgcttgatggtctgaggtgaaacagttt

SEQ ID NO: 32753 - DNA, 40 bp, Homo sapiens
aaactgtttcacctcagaccatcaagcattagttagattc

SEQ ID NO: 32754 - DNA, 40 bp, Homo sapiens
aatctaactaatgcttgatggtctgaggtgaaacagtttc

SEQ ID NO: 32755 - DNA, 40 bp, Homo sapiens
gaaactgtttcacctcagaccatcaagcattagttagatt

SEQ ID NO: 32756 - DNA, 40 bp, Homo sapiens
atctaactaatgcttgatggtctgaggtgaaacagtttca

SEQ ID NO: 32757 - DNA, 40 bp, Homo sapiens
tgaaactgtttcacctcagaccatcaagcattagttagat

SEQ ID NO: 32758 - DNA, 40 bp, Homo sapiens
tctaactaatgcttgatggtctgaggtgaaacagtttcat

SEQ ID NO: 32759 - DNA, 40 bp, Homo sapiens
atgaaactgtttcacctcagaccatcaagcattagttaga

SEQ ID NO: 32760 - DNA, 40 bp, Homo sapiens
ctaactaatgcttgatggtctgaggtgaaacagtttcatc

SEQ ID NO: 32761 - DNA, 40 bp, Homo sapiens
gatgaaactgtttcacctcagaccatcaagcattagttag

SEQ ID NO: 32762 - DNA, 40 bp, Homo sapiens
taactaatgcttgatggtctgaggtgaaacagtttcatcc

SEQ ID NO: 32763 - DNA, 40 bp, Homo sapiens
ggatgaaactgtttcacctcagaccatcaagcattagtta

SEQ ID NO: 32764 - DNA, 40 bp, Homo sapiens
aactaatgcttgatggtctgaggtgaaacagtttcatcct

SEQ ID NO: 32765 - DNA, 40 bp, Homo sapiens
aggatgaaactgtttcacctcagaccatcaagcattagtt

SEQ ID NO: 32766 - DNA, 40 bp, Homo sapiens
actaatgcttgatggtctgaggtgaaacagtttcatcctg

SEQ ID NO: 32767 - DNA, 40 bp, Homo sapiens
caggatgaaactgtttcacctcagaccatcaagcattagt

SEQ ID NO: 32768 - DNA, 40 bp, Homo sapiens
ctaatgcttgatggtctgaggtgaaacagtttcatcctga

SEQ ID NO: 32769 - DNA, 40 bp, Homo sapiens
tcaggatgaaactgtttcacctcagaccatcaagcattag

SEQ ID NO: 32770 - DNA, 40 bp, Homo sapiens
taatgcttgatggtctgaggtgaaacagtttcatcctgaa

SEQ ID NO: 32771 - DNA, 40 bp, Homo sapiens
ttcaggatgaaactgtttcacctcagaccatcaagcatta

SEQ ID NO: 32772 - DNA, 40 bp, Homo sapiens
aatgcttgatggtctgaggtgaaacagtttcatcctgaaa

SEQ ID NO: 32773 - DNA, 40 bp, Homo sapiens
tttcaggatgaaactgtttcacctcagaccatcaagcatt

SEQ ID NO: 32774 - DNA, 40 bp, Homo sapiens
atgcttgatggtctgaggtgaaacagtttcatcctgaaat

SEQ ID NO: 32775 - DNA, 40 bp, Homo sapiens
atttcaggatgaaactgtttcacctcagaccatcaagcat

SEQ ID NO: 32776 - DNA, 40 bp, Homo sapiens
tgcttgatggtctgaggtgaaacagtttcatcctgaaatc

SEQ ID NO: 32777 - DNA, 40 bp, Homo sapiens
gatttcaggatgaaactgtttcacctcagaccatcaagca

SEQ ID NO: 32778 - DNA, 40 bp, Homo sapiens
gcttgatggtctgaggtgaaacagtttcatcctgaaatca

SEQ ID NO: 32779 - DNA, 40 bp, Homo sapiens
tgatttcaggatgaaactgtttcacctcagaccatcaagc

SEQ ID NO: 32780 - DNA, 40 bp, Homo sapiens
cttgatggtctgaggtgaaacagtttcatcctgaaatcac

SEQ ID NO: 32781 - DNA, 40 bp, Homo sapiens
gtgatttcaggatgaaactgtttcacctcagaccatcaag

SEQ ID NO: 32782 - DNA, 40 bp, Homo sapiens
ttgatggtctgaggtgaaacagtttcatcctgaaatcacc

SEQ ID NO: 32783 - DNA, 40 bp, Homo sapiens
ggtgatttcaggatgaaactgtttcacctcagaccatcaa

SEQ ID NO: 32784 - DNA, 40 bp, Homo sapiens
tgatggtctgaggtgaaacagtttcatcctgaaatcaccc

SEQ ID NO: 32785 - DNA, 40 bp, Homo sapiens
gggtgatttcaggatgaaactgtttcacctcagaccatca

SEQ ID NO: 32786 - DNA, 40 bp, Homo sapiens
gatggtctgaggtgaaacagtttcatcctgaaatcacccc

SEQ ID NO: 32787 - DNA, 40 bp, Homo sapiens
ggggtgatttcaggatgaaactgtttcacctcagaccatc

SEQ ID NO: 32788 - DNA, 40 bp, Homo sapiens
atggtctgaggtgaaacagtttcatcctgaaatcaccccc

SEQ ID NO: 32789 - DNA, 40 bp, Homo sapiens
gggggtgatttcaggatgaaactgtttcacctcagaccat

SEQ ID NO: 32790 - DNA, 40 bp, Homo sapiens
tggtctgaggtgaaacagtttcatcctgaaatcaccccca

SEQ ID NO: 32791 - DNA, 40 bp, Homo sapiens
tgggggtgatttcaggatgaaactgtttcacctcagacca

SEQ ID NO: 32792 - DNA, 40 bp, Homo sapiens
ggtctgaggtgaaacagtttcatcctgaaatcacccccaa

SEQ ID NO: 32793 - DNA, 40 bp, Homo sapiens
ttgggggtgatttcaggatgaaactgtttcacctcagacc

SEQ ID NO: 32794 - DNA, 40 bp, Homo sapiens
gtctgaggtgaaacagtttcatcctgaaatcacccccaac

SEQ ID NO: 32795 - DNA, 40 bp, Homo sapiens
gttgggggtgatttcaggatgaaactgtttcacctcagac

SEQ ID NO: 32796 - DNA, 40 bp, Homo sapiens
tctgaggtgaaacagtttcatcctgaaatcacccccaact

SEQ ID NO: 32797 - DNA, 40 bp, Homo sapiens
agttgggggtgatttcaggatgaaactgtttcacctcaga

SEQ ID NO: 32798 - DNA, 40 bp, Homo sapiens
ctgaggtgaaacagtttcatcctgaaatcacccccaactc

SEQ ID NO: 32799 - DNA, 40 bp, Homo sapiens
gagttgggggtgatttcaggatgaaactgtttcacctcag

SEQ ID NO: 32800 - DNA, 40 bp, Homo sapiens
tgaggtgaaacagtttcatcctgaaatcacccccaactcg

SEQ ID NO: 32801 - DNA, 40 bp, Homo sapiens
cgagttgggggtgatttcaggatgaaactgtttcacctca

SEQ ID NO: 32802 - DNA, 40 bp, Homo sapiens
gaggtgaaacagtttcatcctgaaatcacccccaactcgg

SEQ ID NO: 32803 - DNA, 40 bp, Homo sapiens
ccgagttgggggtgatttcaggatgaaactgtttcacctc

SEQ ID NO: 32804 - DNA, 40 bp, Homo sapiens
aggtgaaacagtttcatcctgaaatcacccccaactcggt

SEQ ID NO: 32805 - DNA, 40 bp, Homo sapiens
accgagttgggggtgatttcaggatgaaactgtttcacct

SEQ ID NO: 32806 - DNA, 40 bp, Homo sapiens
ggtgaaacagtttcatcctgaaatcacccccaactcggtc

SEQ ID NO: 32807 - DNA, 40 bp, Homo sapiens
gaccgagttgggggtgatttcaggatgaaactgtttcacc

SEQ ID NO: 32808 - DNA, 40 bp, Homo sapiens
gtgaaacagtttcatcctgaaatcacccccaactcggtcc

SEQ ID NO: 32809 - DNA, 40 bp, Homo sapiens
ggaccgagttgggggtgatttcaggatgaaactgtttcac

SEQ ID NO: 32810 - DNA, 40 bp, Homo sapiens
tgaaacagtttcatcctgaaatcacccccaactcggtcct

SEQ ID NO: 32811 - DNA, 40 bp, Homo sapiens
aggaccgagttgggggtgatttcaggatgaaactgtttca

SEQ ID NO: 32812 - DNA, 40 bp, Homo sapiens
gaaacagtttcatcctgaaatcacccccaactcggtcctt

SEQ ID NO: 32813 - DNA, 40 bp, Homo sapiens
aaggaccgagttgggggtgatttcaggatgaaactgtttc

SEQ ID NO: 32814 - DNA, 40 bp, Homo sapiens
aaacagtttcatcctgaaatcacccccaactcggtccttg

SEQ ID NO: 32815 - DNA, 40 bp, Homo sapiens
caaggaccgagttgggggtgatttcaggatgaaactgttt

SEQ ID NO: 32816 - DNA, 40 bp, Homo sapiens
aacagtttcatcctgaaatcacccccaactcggtccttgg

SEQ ID NO: 32817 - DNA, 40 bp, Homo sapiens
ccaaggaccgagttgggggtgatttcaggatgaaactgtt

SEQ ID NO: 32818 - DNA, 40 bp, Homo sapiens
acagtttcatcctgaaatcacccccaactcggtccttgga

SEQ ID NO: 32819 - DNA, 40 bp, Homo sapiens
tccaaggaccgagttgggggtgatttcaggatgaaactgt

SEQ ID NO: 32820 - DNA, 40 bp, Homo sapiens
cagtttcatcctgaaatcacccccaactcggtccttggaa

SEQ ID NO: 32821 - DNA, 40 bp, Homo sapiens
ttccaaggaccgagttgggggtgatttcaggatgaaactg

SEQ ID NO: 32822 - DNA, 40 bp, Homo sapiens
agtttcatcctgaaatcacccccaactcggtccttggaaa

SEQ ID NO: 32823 - DNA, 40 bp, Homo sapiens
tttccaaggaccgagttgggggtgatttcaggatgaaact

SEQ ID NO: 32824 - DNA, 40 bp, Homo sapiens
gtttcatcctgaaatcacccccaactcggtccttggaaaa

SEQ ID NO: 32825 - DNA, 40 bp, Homo sapiens
ttttccaaggaccgagttgggggtgatttcaggatgaaac

SEQ ID NO: 32826 - DNA, 40 bp, Homo sapiens
tttcatcctgaaatcacccccaactcggtccttggaaaaa

SEQ ID NO: 32827 - DNA, 40 bp, Homo sapiens
tttttccaaggaccgagttgggggtgatttcaggatgaaa

SEQ ID NO: 32828 - DNA, 40 bp, Homo sapiens
ttcatcctgaaatcacccccaactcggtccttggaaaaat

SEQ ID NO: 32829 - DNA, 40 bp, Homo sapiens
atttttccaaggaccgagttgggggtgatttcaggatgaa

SEQ ID NO: 32830 - DNA, 40 bp, Homo sapiens
tcatcctgaaatcacccccaactcggtccttggaaaaatt

SEQ ID NO: 32831 - DNA, 40 bp, Homo sapiens
aatttttccaaggaccgagttgggggtgatttcaggatga

SEQ ID NO: 32832 - DNA, 40 bp, Homo sapiens
catcctgaaatcacccccaactcggtccttggaaaaattg

SEQ ID NO: 32833 - DNA, 40 bp, Homo sapiens
caatttttccaaggaccgagttgggggtgatttcaggatg

SEQ ID NO: 32834 - DNA, 40 bp, Homo sapiens
atcctgaaatcacccccaactcggtccttggaaaaattgt

SEQ ID NO: 32835 - DNA, 40 bp, Homo sapiens
acaatttttccaaggaccgagttgggggtgatttcaggat

SEQ ID NO: 32836 - DNA, 40 bp, Homo sapiens
tcctgaaatcacccccaactcggtccttggaaaaattgtc

SEQ ID NO: 32837 - DNA, 40 bp, Homo sapiens
gacaatttttccaaggaccgagttgggggtgatttcagga

SEQ ID NO: 32838 - DNA, 40 bp, Homo sapiens
cctgaaatcacccccaactcggtccttggaaaaattgtct

SEQ ID NO: 32839 - DNA, 40 bp, Homo sapiens
agacaatttttccaaggaccgagttgggggtgatttcagg

SEQ ID NO: 32840 - DNA, 40 bp, Homo sapiens
ctgaaatcacccccaactcggtccttggaaaaattgtctt

SEQ ID NO: 32841 - DNA, 40 bp, Homo sapiens
aagacaatttttccaaggaccgagttgggggtgatttcag

SEQ ID NO: 32842 - DNA, 40 bp, Homo sapiens
tgaaatcacccccaactcggtccttggaaaaattgtcttc

SEQ ID NO: 32843 - DNA, 40 bp, Homo sapiens
gaagacaatttttccaaggaccgagttgggggtgatttca

SEQ ID NO: 32844 - DNA, 40 bp, Homo sapiens
gaaatcacccccaactcggtccttggaaaaattgtcttcc

SEQ ID NO: 32845 - DNA, 40 bp, Homo sapiens
ggaagacaatttttccaaggaccgagttgggggtgatttc

SEQ ID NO: 32846 - DNA, 40 bp, Homo sapiens
aaatcacccccaactcggtccttggaaaaattgtcttcca

SEQ ID NO: 32847 - DNA, 40 bp, Homo sapiens
tggaagacaatttttccaaggaccgagttgggggtgattt

SEQ ID NO: 32848 - DNA, 40 bp, Homo sapiens
aatcacccccaactcggtccttggaaaaattgtcttccac

SEQ ID NO: 32849 - DNA, 40 bp, Homo sapiens
gtggaagacaatttttccaaggaccgagttgggggtgatt

SEQ ID NO: 32850 - DNA, 40 bp, Homo sapiens
atcacccccaactcggtccttggaaaaattgtcttccacg

SEQ ID NO: 32851 - DNA, 40 bp, Homo sapiens
cgtggaagacaatttttccaaggaccgagttgggggtgat

SEQ ID NO: 32852 - DNA, 40 bp, Homo sapiens
tcacccccaactcggtccttggaaaaattgtcttccacga

SEQ ID NO: 32853 - DNA, 40 bp, Homo sapiens
tcgtggaagacaatttttccaaggaccgagttgggggtga

SEQ ID NO: 32854 - DNA, 40 bp, Homo sapiens
cacccccaactcggtccttggaaaaattgtcttccacgaa

SEQ ID NO: 32855 - DNA, 40 bp, Homo sapiens
ttcgtggaagacaatttttccaaggaccgagttgggggtg

SEQ ID NO: 32856 - DNA, 40 bp, Homo sapiens
acccccaactcggtccttggaaaaattgtcttccacgaaa

SEQ ID NO: 32857 - DNA, 40 bp, Homo sapiens
tttcgtggaagacaatttttccaaggaccgagttgggggt

SEQ ID NO: 32858 - DNA, 40 bp, Homo sapiens
cccccaactcggtccttggaaaaattgtcttccacgaaac

SEQ ID NO: 32859 - DNA, 40 bp, Homo sapiens
gtttcgtggaagacaatttttccaaggaccgagttggggg

SEQ ID NO: 32860 - DNA, 40 bp, Homo sapiens
ccccaactcggtccttggaaaaattgtcttccacgaaact

SEQ ID NO: 32861 - DNA, 40 bp, Homo sapiens
agtttcgtggaagacaatttttccaaggaccgagttgggg

SEQ ID NO: 32862 - DNA, 40 bp, Homo sapiens
cccaactcggtccttggaaaaattgtcttccacgaaactg

SEQ ID NO: 32863 - DNA, 40 bp, Homo sapiens
cagtttcgtggaagacaatttttccaaggaccgagttggg

SEQ ID NO: 32864 - DNA, 40 bp, Homo sapiens
ccaactcggtccttggaaaaattgtcttccacgaaactgg

SEQ ID NO: 32865 - DNA, 40 bp, Homo sapiens
ccagtttcgtggaagacaatttttccaaggaccgagttgg

SEQ ID NO: 32866 - DNA, 40 bp, Homo sapiens
caactcggtccttggaaaaattgtcttccacgaaactggt

SEQ ID NO: 32867 - DNA, 40 bp, Homo sapiens
accagtttcgtggaagacaatttttccaaggaccgagttg

SEQ ID NO: 32868 - DNA, 40 bp, Homo sapiens
aactcggtccttggaaaaattgtcttccacgaaactggtc

SEQ ID NO: 32869 - DNA, 40 bp, Homo sapiens
gaccagtttcgtggaagacaatttttccaaggaccgagtt

SEQ ID NO: 32870 - DNA, 40 bp, Homo sapiens
actcggtccttggaaaaattgtcttccacgaaactggtcc

SEQ ID NO: 32871 - DNA, 40 bp, Homo sapiens
ggaccagtttcgtggaagacaatttttccaaggaccgagt

SEQ ID NO: 32872 - DNA, 40 bp, Homo sapiens
ctcggtccttggaaaaattgtcttccacgaaactggtccc

SEQ ID NO: 32873 - DNA, 40 bp, Homo sapiens
gggaccagtttcgtggaagacaatttttccaaggaccgag

SEQ ID NO: 32874 - DNA, 40 bp, Homo sapiens
tcggtccttggaaaaattgtcttccacgaaactggtccct

SEQ ID NO: 32875 - DNA, 40 bp, Homo sapiens
agggaccagtttcgtggaagacaatttttccaaggaccga

SEQ ID NO: 32876 - DNA, 40 bp, Homo sapiens
cggtccttggaaaaattgtcttccacgaaactggtccctg

SEQ ID NO: 32877 - DNA, 40 bp, Homo sapiens
cagggaccagtttcgtggaagacaatttttccaaggaccg

SEQ ID NO: 32878 - DNA, 40 bp, Homo sapiens
ggtccttggaaaaattgtcttccacgaaactggtccctga

SEQ ID NO: 32879 - DNA, 40 bp, Homo sapiens
tcagggaccagtttcgtggaagacaatttttccaaggacc

SEQ ID NO: 32880 - DNA, 40 bp, Homo sapiens
gtccttggaaaaattgtcttccacgaaactggtccctgat

SEQ ID NO: 32881 - DNA, 40 bp, Homo sapiens
atcagggaccagtttcgtggaagacaatttttccaaggac

SEQ ID NO: 32882 - DNA, 40 bp, Homo sapiens
tccttggaaaaattgtcttccacgaaactggtccctgatg

SEQ ID NO: 32883 - DNA, 40 bp, Homo sapiens
catcagggaccagtttcgtggaagacaatttttccaagga

SEQ ID NO: 32884 - DNA, 40 bp, Homo sapiens
ccttggaaaaattgtcttccacgaaactggtccctgatgc

SEQ ID NO: 32885 - DNA, 40 bp, Homo sapiens
gcatcagggaccagtttcgtggaagacaatttttccaagg

SEQ ID NO: 32886 - DNA, 40 bp, Homo sapiens
cttggaaaaattgtcttccacgaaactggtccctgatgcc

SEQ ID NO: 32887 - DNA, 40 bp, Homo sapiens
ggcatcagggaccagtttcgtggaagacaatttttccaag

SEQ ID NO: 32888 - DNA, 40 bp, Homo sapiens
ttggaaaaattgtcttccacgaaactggtccctgatgccg

SEQ ID NO: 32889 - DNA, 40 bp, Homo sapiens
cggcatcagggaccagtttcgtggaagacaatttttccaa

SEQ ID NO: 32890 - DNA, 40 bp, Homo sapiens
tggaaaaattgtcttccacgaaactggtccctgatgccgg

SEQ ID NO: 32891 - DNA, 40 bp, Homo sapiens
ccggcatcagggaccagtttcgtggaagacaatttttcca

SEQ ID NO: 32892 - DNA, 40 bp, Homo sapiens
ggaaaaattgtcttccacgaaactggtccctgatgccgga

SEQ ID NO: 32893 - DNA, 40 bp, Homo sapiens
tccggcatcagggaccagtttcgtggaagacaatttttcc

SEQ ID NO: 32894 - DNA, 40 bp, Homo sapiens
gaaaaattgtcttccacgaaactggtccctgatgccggaa

SEQ ID NO: 32895 - DNA, 40 bp, Homo sapiens
ttccggcatcagggaccagtttcgtggaagacaatttttc

SEQ ID NO: 32896 - DNA, 40 bp, Homo sapiens
aaaaattgtcttccacgaaactggtccctgatgccggaaa

SEQ ID NO: 32897 - DNA, 40 bp, Homo sapiens
tttccggcatcagggaccagtttcgtggaagacaattttt

SEQ ID NO: 32898 - DNA, 40 bp, Homo sapiens
aaaattgtcttccacgaaactggtccctgatgccggaaaa

SEQ ID NO: 32899 - DNA, 40 bp, Homo sapiens
ttttccggcatcagggaccagtttcgtggaagacaatttt

SEQ ID NO: 32900 - DNA, 40 bp, Homo sapiens
aaattgtcttccacgaaactggtccctgatgccggaaaag

SEQ ID NO: 32901 - DNA, 40 bp, Homo sapiens
cttttccggcatcagggaccagtttcgtggaagacaattt

SEQ ID NO: 32902 - DNA, 40 bp, Homo sapiens
aattgtcttccacgaaactggtccctgatgccggaaaagt

SEQ ID NO: 32903 - DNA, 40 bp, Homo sapiens
acttttccggcatcagggaccagtttcgtggaagacaatt

SEQ ID NO: 32904 - DNA, 40 bp, Homo sapiens
attgtcttccacgaaactggtccctgatgccggaaaagtt

SEQ ID NO: 32905 - DNA, 40 bp, Homo sapiens
aacttttccggcatcagggaccagtttcgtggaagacaat

SEQ ID NO: 32906 - DNA, 40 bp, Homo sapiens
ttgtcttccacgaaactggtccctgatgccggaaaagttg

SEQ ID NO: 32907 - DNA, 40 bp, Homo sapiens
caacttttccggcatcagggaccagtttcgtggaagacaa

SEQ ID NO: 32908 - DNA, 40 bp, Homo sapiens
tgtcttccacgaaactggtccctgatgccggaaaagttgg

SEQ ID NO: 32909 - DNA, 40 bp, Homo sapiens
ccaacttttccggcatcagggaccagtttcgtggaagaca

SEQ ID NO: 32910 - DNA, 40 bp, Homo sapiens
gtcttccacgaaactggtccctgatgccggaaaagttggg

SEQ ID NO: 32911 - DNA, 40 bp, Homo sapiens
cccaacttttccggcatcagggaccagtttcgtggaagac

SEQ ID NO: 32912 - DNA, 40 bp, Homo sapiens
tcttccacgaaactggtccctgatgccggaaaagttgggg

SEQ ID NO: 32913 - DNA, 40 bp, Homo sapiens
ccccaacttttccggcatcagggaccagtttcgtggaaga

SEQ ID NO: 32914 - DNA, 40 bp, Homo sapiens
cttccacgaaactggtccctgatgccggaaaagttgggga

SEQ ID NO: 32915 - DNA, 40 bp, Homo sapiens
tccccaacttttccggcatcagggaccagtttcgtggaag

SEQ ID NO: 32916 - DNA, 40 bp, Homo sapiens
ttccacgaaactggtccctgatgccggaaaagttggggac

SEQ ID NO: 32917 - DNA, 40 bp, Homo sapiens
gtccccaacttttccggcatcagggaccagtttcgtggaa

SEQ ID NO: 32918 - DNA, 40 bp, Homo sapiens
tccacgaaactggtccctgatgccggaaaagttggggacc

SEQ ID NO: 32919 - DNA, 40 bp, Homo sapiens
ggtccccaacttttccggcatcagggaccagtttcgtgga

SEQ ID NO: 32920 - DNA, 40 bp, Homo sapiens
ccacgaaactggtccctgatgccggaaaagttggggaccg

SEQ ID NO: 32921 - DNA, 40 bp, Homo sapiens
cggtccccaacttttccggcatcagggaccagtttcgtgg

SEQ ID NO: 32922 - DNA, 40 bp, Homo sapiens
cacgaaactggtccctgatgccggaaaagttggggaccgc

SEQ ID NO: 32923 - DNA, 40 bp, Homo sapiens
gcggtccccaacttttccggcatcagggaccagtttcgtg

SEQ ID NO: 32924 - DNA, 40 bp, Homo sapiens
acgaaactggtccctgatgccggaaaagttggggaccgct

SEQ ID NO: 32925 - DNA, 40 bp, Homo sapiens
agcggtccccaacttttccggcatcagggaccagtttcgt

SEQ ID NO: 32926 - DNA, 40 bp, Homo sapiens
cgaaactggtccctgatgccggaaaagttggggaccgctg

SEQ ID NO: 32927 - DNA, 40 bp, Homo sapiens
cagcggtccccaacttttccggcatcagggaccagtttcg

SEQ ID NO: 32928 - DNA, 40 bp, Homo sapiens
gaaactggtccctgatgccggaaaagttggggaccgctgt

SEQ ID NO: 32929 - DNA, 40 bp, Homo sapiens
acagcggtccccaacttttccggcatcagggaccagtttc

SEQ ID NO: 32930 - DNA, 40 bp, Homo sapiens
aaactggtccctgatgccggaaaagttggggaccgctgtt

SEQ ID NO: 32931 - DNA, 40 bp, Homo sapiens
aacagcggtccccaacttttccggcatcagggaccagttt

SEQ ID NO: 32932 - DNA, 40 bp, Homo sapiens
aactggtccctgatgccggaaaagttggggaccgctgttc

SEQ ID NO: 32933 - DNA, 40 bp, Homo sapiens
gaacagcggtccccaacttttccggcatcagggaccagtt

SEQ ID NO: 32934 - DNA, 40 bp, Homo sapiens
actggtccctgatgccggaaaagttggggaccgctgttct

SEQ ID NO: 32935 - DNA, 40 bp, Homo sapiens
agaacagcggtccccaacttttccggcatcagggaccagt

SEQ ID NO: 32936 - DNA, 40 bp, Homo sapiens
ctggtccctgatgccggaaaagttggggaccgctgttcta

SEQ ID NO: 32937 - DNA, 40 bp, Homo sapiens
tagaacagcggtccccaacttttccggcatcagggaccag

SEQ ID NO: 32938 - DNA, 40 bp, Homo sapiens
tggtccctgatgccggaaaagttggggaccgctgttctaa

SEQ ID NO: 32939 - DNA, 40 bp, Homo sapiens
ttagaacagcggtccccaacttttccggcatcagggacca

SEQ ID NO: 32940 - DNA, 40 bp, Homo sapiens
ggtccctgatgccggaaaagttggggaccgctgttctaag

SEQ ID NO: 32941 - DNA, 40 bp, Homo sapiens
cttagaacagcggtccccaacttttccggcatcagggacc

SEQ ID NO: 32942 - DNA, 40 bp, Homo sapiens
gtccctgatgccggaaaagttggggaccgctgttctaagc

SEQ ID NO: 32943 - DNA, 40 bp, Homo sapiens
gcttagaacagcggtccccaacttttccggcatcagggac

SEQ ID NO: 32944 - DNA, 40 bp, Homo sapiens
tccctgatgccggaaaagttggggaccgctgttctaagct

SEQ ID NO: 32945 - DNA, 40 bp, Homo sapiens
agcttagaacagcggtccccaacttttccggcatcaggga

SEQ ID NO: 32946 - DNA, 40 bp, Homo sapiens
ccctgatgccggaaaagttggggaccgctgttctaagcta

SEQ ID NO: 32947 - DNA, 40 bp, Homo sapiens
tagcttagaacagcggtccccaacttttccggcatcaggg

SEQ ID NO: 32948 - DNA, 40 bp, Homo sapiens
cctgatgccggaaaagttggggaccgctgttctaagctaa

SEQ ID NO: 32949 - DNA, 40 bp, Homo sapiens
ttagcttagaacagcggtccccaacttttccggcatcagg

SEQ ID NO: 32950 - DNA, 40 bp, Homo sapiens
ctgatgccggaaaagttggggaccgctgttctaagctaaa

SEQ ID NO: 32951 - DNA, 40 bp, Homo sapiens
tttagcttagaacagcggtccccaacttttccggcatcag

SEQ ID NO: 32952 - DNA, 40 bp, Homo sapiens
tgatgccggaaaagttggggaccgctgttctaagctaaag

SEQ ID NO: 32953 - DNA, 40 bp, Homo sapiens
ctttagcttagaacagcggtccccaacttttccggcatca

SEQ ID NO: 32954 - DNA, 40 bp, Homo sapiens
gatgccggaaaagttggggaccgctgttctaagctaaagt

SEQ ID NO: 32955 - DNA, 40 bp, Homo sapiens
actttagcttagaacagcggtccccaacttttccggcatc

SEQ ID NO: 32956 - DNA, 40 bp, Homo sapiens
atgccggaaaagttggggaccgctgttctaagctaaagtt

SEQ ID NO: 32957 - DNA, 40 bp, Homo sapiens
aactttagcttagaacagcggtccccaacttttccggcat

SEQ ID NO: 32958 - DNA, 40 bp, Homo sapiens
tgccggaaaagttggggaccgctgttctaagctaaagtta

SEQ ID NO: 32959 - DNA, 40 bp, Homo sapiens
taactttagcttagaacagcggtccccaacttttccggca

SEQ ID NO: 32960 - DNA, 40 bp, Homo sapiens
gccggaaaagttggggaccgctgttctaagctaaagttat

SEQ ID NO: 32961 - DNA, 40 bp, Homo sapiens
ataactttagcttagaacagcggtccccaacttttccggc

SEQ ID NO: 32962 - DNA, 40 bp, Homo sapiens
ccggaaaagttggggaccgctgttctaagctaaagttata

SEQ ID NO: 32963 - DNA, 40 bp, Homo sapiens
tataactttagcttagaacagcggtccccaacttttccgg

SEQ ID NO: 32964 - DNA, 40 bp, Homo sapiens
cggaaaagttggggaccgctgttctaagctaaagttatat

SEQ ID NO: 32965 - DNA, 40 bp, Homo sapiens
atataactttagcttagaacagcggtccccaacttttccg

SEQ ID NO: 32966 - DNA, 40 bp, Homo sapiens
ggaaaagttggggaccgctgttctaagctaaagttatatg

SEQ ID NO: 32967 - DNA, 40 bp, Homo sapiens
catataactttagcttagaacagcggtccccaacttttcc

SEQ ID NO: 32968 - DNA, 40 bp, Homo sapiens
gaaaagttggggaccgctgttctaagctaaagttatatgg

SEQ ID NO: 32969 - DNA, 40 bp, Homo sapiens
ccatataactttagcttagaacagcggtccccaacttttc

SEQ ID NO: 32970 - DNA, 40 bp, Homo sapiens
aaaagttggggaccgctgttctaagctaaagttatatgga

SEQ ID NO: 32971 - DNA, 40 bp, Homo sapiens
tccatataactttagcttagaacagcggtccccaactttt

SEQ ID NO: 32972 - DNA, 40 bp, Homo sapiens
aaagttggggaccgctgttctaagctaaagttatatggag

SEQ ID NO: 32973 - DNA, 40 bp, Homo sapiens
ctccatataactttagcttagaacagcggtccccaacttt

SEQ ID NO: 32974 - DNA, 40 bp, Homo sapiens
aagttggggaccgctgttctaagctaaagttatatggagc

SEQ ID NO: 32975 - DNA, 40 bp, Homo sapiens
gctccatataactttagcttagaacagcggtccccaactt

SEQ ID NO: 32976 - DNA, 40 bp, Homo sapiens
agttggggaccgctgttctaagctaaagttatatggagct

SEQ ID NO: 32977 - DNA, 40 bp, Homo sapiens
agctccatataactttagcttagaacagcggtccccaact

SEQ ID NO: 32978 - DNA, 40 bp, Homo sapiens
gttggggaccgctgttctaagctaaagttatatggagctc

SEQ ID NO: 32979 - DNA, 40 bp, Homo sapiens
gagctccatataactttagcttagaacagcggtccccaac

SEQ ID NO: 32980 - DNA, 40 bp, Homo sapiens
ttggggaccgctgttctaagctaaagttatatggagctcc

SEQ ID NO: 32981 - DNA, 40 bp, Homo sapiens
ggagctccatataactttagcttagaacagcggtccccaa

SEQ ID NO: 32982 - DNA, 40 bp, Homo sapiens
tggggaccgctgttctaagctaaagttatatggagctcct

SEQ ID NO: 32983 - DNA, 40 bp, Homo sapiens
aggagctccatataactttagcttagaacagcggtcccca

SEQ ID NO: 32984 - DNA, 40 bp, Homo sapiens
ggggaccgctgttctaagctaaagttatatggagctcctt

SEQ ID NO: 32985 - DNA, 40 bp, Homo sapiens
aaggagctccatataactttagcttagaacagcggtcccc

SEQ ID NO: 32986 - DNA, 40 bp, Homo sapiens
gggaccgctgttctaagctaaagttatatggagctccttg

SEQ ID NO: 32987 - DNA, 40 bp, Homo sapiens
caaggagctccatataactttagcttagaacagcggtccc

SEQ ID NO: 32988 - DNA, 40 bp, Homo sapiens
ggaccgctgttctaagctaaagttatatggagctccttgg

SEQ ID NO: 32989 - DNA, 40 bp, Homo sapiens
ccaaggagctccatataactttagcttagaacagcggtcc

SEQ ID NO: 32990 - DNA, 40 bp, Homo sapiens
gaccgctgttctaagctaaagttatatggagctccttggt

SEQ ID NO: 32991 - DNA, 40 bp, Homo sapiens
accaaggagctccatataactttagcttagaacagcggtc

SEQ ID NO: 32992 - DNA, 40 bp, Homo sapiens
accgctgttctaagctaaagttatatggagctccttggtt

SEQ ID NO: 32993 - DNA, 40 bp, Homo sapiens
aaccaaggagctccatataactttagcttagaacagcggt

SEQ ID NO: 32994 - DNA, 40 bp, Homo sapiens
ccgctgttctaagctaaagttatatggagctccttggttc

SEQ ID NO: 32995 - DNA, 40 bp, Homo sapiens
gaaccaaggagctccatataactttagcttagaacagcgg

SEQ ID NO: 32996 - DNA, 40 bp, Homo sapiens
cgctgttctaagctaaagttatatggagctccttggttct

SEQ ID NO: 32997 - DNA, 40 bp, Homo sapiens
agaaccaaggagctccatataactttagcttagaacagcg

SEQ ID NO: 32998 - DNA, 40 bp, Homo sapiens
gctgttctaagctaaagttatatggagctccttggttctg

SEQ ID NO: 32999 - DNA, 40 bp, Homo sapiens
cagaaccaaggagctccatataactttagcttagaacagc

SEQ ID NO: 33000 - DNA, 40 bp, Homo sapiens
ctgttctaagctaaagttatatggagctccttggttctgt

SEQ ID NO: 33001 - DNA, 40 bp, Homo sapiens
acagaaccaaggagctccatataactttagcttagaacag

SEQ ID NO: 33002 - DNA, 40 bp, Homo sapiens
tgttctaagctaaagttatatggagctccttggttctgtg

SEQ ID NO: 33003 - DNA, 40 bp, Homo sapiens
cacagaaccaaggagctccatataactttagcttagaaca

SEQ ID NO: 33004 - DNA, 40 bp, Homo sapiens
gttctaagctaaagttatatggagctccttggttctgtgt

SEQ ID NO: 33005 - DNA, 40 bp, Homo sapiens
acacagaaccaaggagctccatataactttagcttagaac

SEQ ID NO: 33006 - DNA, 40 bp, Homo sapiens
ttctaagctaaagttatatggagctccttggttctgtgtc

SEQ ID NO: 33007 - DNA, 40 bp, Homo sapiens
gacacagaaccaaggagctccatataactttagcttagaa

SEQ ID NO: 33008 - DNA, 40 bp, Homo sapiens
tctaagctaaagttatatggagctccttggttctgtgtcc

SEQ ID NO: 33009 - DNA, 40 bp, Homo sapiens
ggacacagaaccaaggagctccatataactttagcttaga

SEQ ID NO: 33010 - DNA, 40 bp, Homo sapiens
ctaagctaaagttatatggagctccttggttctgtgtcct

SEQ ID NO: 33011 - DNA, 40 bp, Homo sapiens
aggacacagaaccaaggagctccatataactttagcttag

SEQ ID NO: 33012 - DNA, 40 bp, Homo sapiens
taagctaaagttatatggagctccttggttctgtgtcctc

SEQ ID NO: 33013 - DNA, 40 bp, Homo sapiens
gaggacacagaaccaaggagctccatataactttagctta

SEQ ID NO: 33014 - DNA, 40 bp, Homo sapiens
aagctaaagttatatggagctccttggttctgtgtcctca

SEQ ID NO: 33015 - DNA, 40 bp, Homo sapiens
tgaggacacagaaccaaggagctccatataactttagctt

SEQ ID NO: 33016 - DNA, 40 bp, Homo sapiens
agctaaagttatatggagctccttggttctgtgtcctcaa

SEQ ID NO: 33017 - DNA, 40 bp, Homo sapiens
ttgaggacacagaaccaaggagctccatataactttagct

SEQ ID NO: 33018 - DNA, 40 bp, Homo sapiens
gctaaagttatatggagctccttggttctgtgtcctcaac

SEQ ID NO: 33019 - DNA, 40 bp, Homo sapiens
gttgaggacacagaaccaaggagctccatataactttagc

SEQ ID NO: 33020 - DNA, 40 bp, Homo sapiens
ctaaagttatatggagctccttggttctgtgtcctcaaca

SEQ ID NO: 33021 - DNA, 40 bp, Homo sapiens
tgttgaggacacagaaccaaggagctccatataactttag

SEQ ID NO: 33022 - DNA, 40 bp, Homo sapiens
taaagttatatggagctccttggttctgtgtcctcaacat

SEQ ID NO: 33023 - DNA, 40 bp, Homo sapiens
atgttgaggacacagaaccaaggagctccatataacttta

SEQ ID NO: 33024 - DNA, 40 bp, Homo sapiens
aaagttatatggagctccttggttctgtgtcctcaacatg

SEQ ID NO: 33025 - DNA, 40 bp, Homo sapiens
catgttgaggacacagaaccaaggagctccatataacttt

SEQ ID NO: 33026 - DNA, 40 bp, Homo sapiens
aagttatatggagctccttggttctgtgtcctcaacatgc

SEQ ID NO: 33027 - DNA, 40 bp, Homo sapiens
gcatgttgaggacacagaaccaaggagctccatataactt

SEQ ID NO: 33028 - DNA, 40 bp, Homo sapiens
agttatatggagctccttggttctgtgtcctcaacatgct

SEQ ID NO: 33029 - DNA, 40 bp, Homo sapiens
agcatgttgaggacacagaaccaaggagctccatataact

SEQ ID NO: 33030 - DNA, 40 bp, Homo sapiens
gttatatggagctccttggttctgtgtcctcaacatgctg

SEQ ID NO: 33031 - DNA, 40 bp, Homo sapiens
cagcatgttgaggacacagaaccaaggagctccatataac

SEQ ID NO: 33032 - DNA, 40 bp, Homo sapiens
ttatatggagctccttggttctgtgtcctcaacatgctgt

SEQ ID NO: 33033 - DNA, 40 bp, Homo sapiens
acagcatgttgaggacacagaaccaaggagctccatataa

SEQ ID NO: 33034 - DNA, 40 bp, Homo sapiens
tatatggagctccttggttctgtgtcctcaacatgctgtt

SEQ ID NO: 33035 - DNA, 40 bp, Homo sapiens
aacagcatgttgaggacacagaaccaaggagctccatata

SEQ ID NO: 33036 - DNA, 40 bp, Homo sapiens
atatggagctccttggttctgtgtcctcaacatgctgttc

SEQ ID NO: 33037 - DNA, 40 bp, Homo sapiens
gaacagcatgttgaggacacagaaccaaggagctccatat

SEQ ID NO: 33038 - DNA, 40 bp, Homo sapiens
tatggagctccttggttctgtgtcctcaacatgctgttct

SEQ ID NO: 33039 - DNA, 40 bp, Homo sapiens
agaacagcatgttgaggacacagaaccaaggagctccata

SEQ ID NO: 33040 - DNA, 40 bp, Homo sapiens
atggagctccttggttctgtgtcctcaacatgctgttcta

SEQ ID NO: 33041 - DNA, 40 bp, Homo sapiens
tagaacagcatgttgaggacacagaaccaaggagctccat

SEQ ID NO: 33042 - DNA, 40 bp, Homo sapiens
tggagctccttggttctgtgtcctcaacatgctgttctat

SEQ ID NO: 33043 - DNA, 40 bp, Homo sapiens
atagaacagcatgttgaggacacagaaccaaggagctcca

SEQ ID NO: 33044 - DNA, 40 bp, Homo sapiens
ggagctccttggttctgtgtcctcaacatgctgttctatg

SEQ ID NO: 33045 - DNA, 40 bp, Homo sapiens
catagaacagcatgttgaggacacagaaccaaggagctcc

SEQ ID NO: 33046 - DNA, 40 bp, Homo sapiens
gagctccttggttctgtgtcctcaacatgctgttctatgt

SEQ ID NO: 33047 - DNA, 40 bp, Homo sapiens
acatagaacagcatgttgaggacacagaaccaaggagctc

SEQ ID NO: 33048 - DNA, 40 bp, Homo sapiens
agctccttggttctgtgtcctcaacatgctgttctatgtt

SEQ ID NO: 33049 - DNA, 40 bp, Homo sapiens
aacatagaacagcatgttgaggacacagaaccaaggagct

SEQ ID NO: 33050 - DNA, 40 bp, Homo sapiens
gctccttggttctgtgtcctcaacatgctgttctatgttt

SEQ ID NO: 33051 - DNA, 40 bp, Homo sapiens
aaacatagaacagcatgttgaggacacagaaccaaggagc

SEQ ID NO: 33052 - DNA, 40 bp, Homo sapiens
ctccttggttctgtgtcctcaacatgctgttctatgtttt

SEQ ID NO: 33053 - DNA, 40 bp, Homo sapiens
aaaacatagaacagcatgttgaggacacagaaccaaggag

SEQ ID NO: 33054 - DNA, 40 bp, Homo sapiens
tccttggttctgtgtcctcaacatgctgttctatgttttt

SEQ ID NO: 33055 - DNA, 40 bp, Homo sapiens
aaaaacatagaacagcatgttgaggacacagaaccaagga

SEQ ID NO: 33056 - DNA, 40 bp, Homo sapiens
ccttggttctgtgtcctcaacatgctgttctatgtttttt

SEQ ID NO: 33057 - DNA, 40 bp, Homo sapiens
aaaaaacatagaacagcatgttgaggacacagaaccaagg

SEQ ID NO: 33058 - DNA, 40 bp, Homo sapiens
cttggttctgtgtcctcaacatgctgttctatgtttttta

SEQ ID NO: 33059 - DNA, 40 bp, Homo sapiens
taaaaaacatagaacagcatgttgaggacacagaaccaag

SEQ ID NO: 33060 - DNA, 40 bp, Homo sapiens
ttggttctgtgtcctcaacatgctgttctatgttttttac

SEQ ID NO: 33061 - DNA, 40 bp, Homo sapiens
gtaaaaaacatagaacagcatgttgaggacacagaaccaa

SEQ ID NO: 33062 - DNA, 40 bp, Homo sapiens
tggttctgtgtcctcaacatgctgttctatgttttttaca

SEQ ID NO: 33063 - DNA, 40 bp, Homo sapiens
tgtaaaaaacatagaacagcatgttgaggacacagaacca

SEQ ID NO: 33064 - DNA, 40 bp, Homo sapiens
ggttctgtgtcctcaacatgctgttctatgttttttacat

SEQ ID NO: 33065 - DNA, 40 bp, Homo sapiens
atgtaaaaaacatagaacagcatgttgaggacacagaacc

SEQ ID NO: 33066 - DNA, 40 bp, Homo sapiens
gttctgtgtcctcaacatgctgttctatgttttttacatt

SEQ ID NO: 33067 - DNA, 40 bp, Homo sapiens
aatgtaaaaaacatagaacagcatgttgaggacacagaac

SEQ ID NO: 33068 - DNA, 40 bp, Homo sapiens
ttctgtgtcctcaacatgctgttctatgttttttacattc

SEQ ID NO: 33069 - DNA, 40 bp, Homo sapiens
gaatgtaaaaaacatagaacagcatgttgaggacacagaa

SEQ ID NO: 33070 - DNA, 40 bp, Homo sapiens
tctgtgtcctcaacatgctgttctatgttttttacattct

SEQ ID NO: 33071 - DNA, 40 bp, Homo sapiens
agaatgtaaaaaacatagaacagcatgttgaggacacaga

SEQ ID NO: 33072 - DNA, 40 bp, Homo sapiens
ctgtgtcctcaacatgctgttctatgttttttacattctg

SEQ ID NO: 33073 - DNA, 40 bp, Homo sapiens
cagaatgtaaaaaacatagaacagcatgttgaggacacag

SEQ ID NO: 33074 - DNA, 40 bp, Homo sapiens
tgtgtcctcaacatgctgttctatgttttttacattctgt

SEQ ID NO: 33075 - DNA, 40 bp, Homo sapiens
acagaatgtaaaaaacatagaacagcatgttgaggacaca

SEQ ID NO: 33076 - DNA, 40 bp, Homo sapiens
gtgtcctcaacatgctgttctatgttttttacattctgtt

SEQ ID NO: 33077 - DNA, 40 bp, Homo sapiens
aacagaatgtaaaaaacatagaacagcatgttgaggacac

SEQ ID NO: 33078 - DNA, 40 bp, Homo sapiens
tgtcctcaacatgctgttctatgttttttacattctgttt

SEQ ID NO: 33079 - DNA, 40 bp, Homo sapiens
aaacagaatgtaaaaaacatagaacagcatgttgaggaca

SEQ ID NO: 33080 - DNA, 40 bp, Homo sapiens
gtcctcaacatgctgttctatgttttttacattctgtttg

SEQ ID NO: 33081 - DNA, 40 bp, Homo sapiens
caaacagaatgtaaaaaacatagaacagcatgttgaggac

SEQ ID NO: 33082 - DNA, 40 bp, Homo sapiens
tcctcaacatgctgttctatgttttttacattctgtttgc

SEQ ID NO: 33083 - DNA, 40 bp, Homo sapiens
gcaaacagaatgtaaaaaacatagaacagcatgttgagga

SEQ ID NO: 33084 - DNA, 40 bp, Homo sapiens
cctcaacatgctgttctatgttttttacattctgtttgct

SEQ ID NO: 33085 - DNA, 40 bp, Homo sapiens
agcaaacagaatgtaaaaaacatagaacagcatgttgagg

SEQ ID NO: 33086 - DNA, 40 bp, Homo sapiens
ctcaacatgctgttctatgttttttacattctgtttgctc

SEQ ID NO: 33087 - DNA, 40 bp, Homo sapiens
gagcaaacagaatgtaaaaaacatagaacagcatgttgag

SEQ ID NO: 33088 - DNA, 40 bp, Homo sapiens
tcaacatgctgttctatgttttttacattctgtttgctcc

SEQ ID NO: 33089 - DNA, 40 bp, Homo sapiens
ggagcaaacagaatgtaaaaaacatagaacagcatgttga

SEQ ID NO: 33090 - DNA, 40 bp, Homo sapiens
caacatgctgttctatgttttttacattctgtttgctcct

SEQ ID NO: 33091 - DNA, 40 bp, Homo sapiens
aggagcaaacagaatgtaaaaaacatagaacagcatgttg

SEQ ID NO: 33092 - DNA, 40 bp, Homo sapiens
aacatgctgttctatgttttttacattctgtttgctcctt

SEQ ID NO: 33093 - DNA, 40 bp, Homo sapiens
aaggagcaaacagaatgtaaaaaacatagaacagcatgtt

SEQ ID NO: 33094 - DNA, 40 bp, Homo sapiens
acatgctgttctatgttttttacattctgtttgctccttc

SEQ ID NO: 33095 - DNA, 40 bp, Homo sapiens
gaaggagcaaacagaatgtaaaaaacatagaacagcatgt

SEQ ID NO: 33096 - DNA, 40 bp, Homo sapiens
catgctgttctatgttttttacattctgtttgctccttcc

SEQ ID NO: 33097 - DNA, 40 bp, Homo sapiens
ggaaggagcaaacagaatgtaaaaaacatagaacagcatg

SEQ ID NO: 33098 - DNA, 40 bp, Homo sapiens
atgctgttctatgttttttacattctgtttgctccttcct

SEQ ID NO: 33099 - DNA, 40 bp, Homo sapiens
aggaaggagcaaacagaatgtaaaaaacatagaacagcat

SEQ ID NO: 33100 - DNA, 40 bp, Homo sapiens
tgctgttctatgttttttacattctgtttgctccttcctg

SEQ ID NO: 33101 - DNA, 40 bp, Homo sapiens
caggaaggagcaaacagaatgtaaaaaacatagaacagca

SEQ ID NO: 33102 - DNA, 40 bp, Homo sapiens
gctgttctatgttttttacattctgtttgctccttcctgc

SEQ ID NO: 33103 - DNA, 40 bp, Homo sapiens
gcaggaaggagcaaacagaatgtaaaaaacatagaacagc

SEQ ID NO: 33104 - DNA, 40 bp, Homo sapiens
ctgttctatgttttttacattctgtttgctccttcctgct

SEQ ID NO: 33105 - DNA, 40 bp, Homo sapiens
agcaggaaggagcaaacagaatgtaaaaaacatagaacag

SEQ ID NO: 33106 - DNA, 40 bp, Homo sapiens
tgttctatgttttttacattctgtttgctccttcctgctt

SEQ ID NO: 33107 - DNA, 40 bp, Homo sapiens
aagcaggaaggagcaaacagaatgtaaaaaacatagaaca

SEQ ID NO: 33108 - DNA, 40 bp, Homo sapiens
gttctatgttttttacattctgtttgctccttcctgcttg

SEQ ID NO: 33109 - DNA, 40 bp, Homo sapiens
caagcaggaaggagcaaacagaatgtaaaaaacatagaac

SEQ ID NO: 33110 - DNA, 40 bp, Homo sapiens
ttctatgttttttacattctgtttgctccttcctgcttgg

SEQ ID NO: 33111 - DNA, 40 bp, Homo sapiens
ccaagcaggaaggagcaaacagaatgtaaaaaacatagaa

SEQ ID NO: 33112 - DNA, 40 bp, Homo sapiens
tctatgttttttacattctgtttgctccttcctgcttgga

SEQ ID NO: 33113 - DNA, 40 bp, Homo sapiens
tccaagcaggaaggagcaaacagaatgtaaaaaacataga

SEQ ID NO: 33114 - DNA, 40 bp, Homo sapiens
ctatgttttttacattctgtttgctccttcctgcttggaa

SEQ ID NO: 33115 - DNA, 40 bp, Homo sapiens
ttccaagcaggaaggagcaaacagaatgtaaaaaacatag

SEQ ID NO: 33116 - DNA, 40 bp, Homo sapiens
tatgttttttacattctgtttgctccttcctgcttggaat

SEQ ID NO: 33117 - DNA, 40 bp, Homo sapiens
attccaagcaggaaggagcaaacagaatgtaaaaaacata

SEQ ID NO: 33118 - DNA, 40 bp, Homo sapiens
atgttttttacattctgtttgctccttcctgcttggaatg

SEQ ID NO: 33119 - DNA, 40 bp, Homo sapiens
cattccaagcaggaaggagcaaacagaatgtaaaaaacat

SEQ ID NO: 33120 - DNA, 40 bp, Homo sapiens
tgttttttacattctgtttgctccttcctgcttggaatgt

SEQ ID NO: 33121 - DNA, 40 bp, Homo sapiens
acattccaagcaggaaggagcaaacagaatgtaaaaaaca

SEQ ID NO: 33122 - DNA, 40 bp, Homo sapiens
gttttttacattctgtttgctccttcctgcttggaatgtc

SEQ ID NO: 33123 - DNA, 40 bp, Homo sapiens
gacattccaagcaggaaggagcaaacagaatgtaaaaaac

SEQ ID NO: 33124 - DNA, 40 bp, Homo sapiens
ttttttacattctgtttgctccttcctgcttggaatgtcc

SEQ ID NO: 33125 - DNA, 40 bp, Homo sapiens
ggacattccaagcaggaaggagcaaacagaatgtaaaaaa

SEQ ID NO: 33126 - DNA, 40 bp, Homo sapiens
tttttacattctgtttgctccttcctgcttggaatgtcct

SEQ ID NO: 33127 - DNA, 40 bp, Homo sapiens
aggacattccaagcaggaaggagcaaacagaatgtaaaaa

SEQ ID NO: 33128 - DNA, 40 bp, Homo sapiens
ttttacattctgtttgctccttcctgcttggaatgtcctt

SEQ ID NO: 33129 - DNA, 40 bp, Homo sapiens
aaggacattccaagcaggaaggagcaaacagaatgtaaaa

SEQ ID NO: 33130 - DNA, 40 bp, Homo sapiens
tttacattctgtttgctccttcctgcttggaatgtccttc

SEQ ID NO: 33131 - DNA, 40 bp, Homo sapiens
gaaggacattccaagcaggaaggagcaaacagaatgtaaa

SEQ ID NO: 33132 - DNA, 40 bp, Homo sapiens
ttacattctgtttgctccttcctgcttggaatgtccttcc

SEQ ID NO: 33133 - DNA, 40 bp, Homo sapiens
ggaaggacattccaagcaggaaggagcaaacagaatgtaa

SEQ ID NO: 33134 - DNA, 40 bp, Homo sapiens
tacattctgtttgctccttcctgcttggaatgtccttccc

SEQ ID NO: 33135 - DNA, 40 bp, Homo sapiens
gggaaggacattccaagcaggaaggagcaaacagaatgta

SEQ ID NO: 33136 - DNA, 40 bp, Homo sapiens
acattctgtttgctccttcctgcttggaatgtccttcccc

SEQ ID NO: 33137 - DNA, 40 bp, Homo sapiens
ggggaaggacattccaagcaggaaggagcaaacagaatgt

SEQ ID NO: 33138 - DNA, 40 bp, Homo sapiens
cattctgtttgctccttcctgcttggaatgtccttcccct

SEQ ID NO: 33139 - DNA, 40 bp, Homo sapiens
aggggaaggacattccaagcaggaaggagcaaacagaatg

SEQ ID NO: 33140 - DNA, 40 bp, Homo sapiens
attctgtttgctccttcctgcttggaatgtccttcccctc

SEQ ID NO: 33141 - DNA, 40 bp, Homo sapiens
gaggggaaggacattccaagcaggaaggagcaaacagaat

SEQ ID NO: 33142 - DNA, 40 bp, Homo sapiens
ttctgtttgctccttcctgcttggaatgtccttcccctcc

SEQ ID NO: 33143 - DNA, 40 bp, Homo sapiens
ggaggggaaggacattccaagcaggaaggagcaaacagaa

SEQ ID NO: 33144 - DNA, 40 bp, Homo sapiens
tctgtttgctccttcctgcttggaatgtccttcccctccc

SEQ ID NO: 33145 - DNA, 40 bp, Homo sapiens
gggaggggaaggacattccaagcaggaaggagcaaacaga

SEQ ID NO: 33146 - DNA, 40 bp, Homo sapiens
ctgtttgctccttcctgcttggaatgtccttcccctcccc

SEQ ID NO: 33147 - DNA, 40 bp, Homo sapiens
ggggaggggaaggacattccaagcaggaaggagcaaacag

SEQ ID NO: 33148 - DNA, 40 bp, Homo sapiens
tgtttgctccttcctgcttggaatgtccttcccctccccg

SEQ ID NO: 33149 - DNA, 40 bp, Homo sapiens
cggggaggggaaggacattccaagcaggaaggagcaaaca

SEQ ID NO: 33150 - DNA, 40 bp, Homo sapiens
gtttgctccttcctgcttggaatgtccttcccctccccgt

SEQ ID NO: 33151 - DNA, 40 bp, Homo sapiens
acggggaggggaaggacattccaagcaggaaggagcaaac

SEQ ID NO: 33152 - DNA, 40 bp, Homo sapiens
tttgctccttcctgcttggaatgtccttcccctccccgtc

SEQ ID NO: 33153 - DNA, 40 bp, Homo sapiens
gacggggaggggaaggacattccaagcaggaaggagcaaa

SEQ ID NO: 33154 - DNA, 40 bp, Homo sapiens
ttgctccttcctgcttggaatgtccttcccctccccgtct

SEQ ID NO: 33155 - DNA, 40 bp, Homo sapiens
agacggggaggggaaggacattccaagcaggaaggagcaa

SEQ ID NO: 33156 - DNA, 40 bp, Homo sapiens
tgctccttcctgcttggaatgtccttcccctccccgtctt

SEQ ID NO: 33157 - DNA, 40 bp, Homo sapiens
aagacggggaggggaaggacattccaagcaggaaggagca

SEQ ID NO: 33158 - DNA, 40 bp, Homo sapiens
gctccttcctgcttggaatgtccttcccctccccgtcttt

SEQ ID NO: 33159 - DNA, 40 bp, Homo sapiens
aaagacggggaggggaaggacattccaagcaggaaggagc

SEQ ID NO: 33160 - DNA, 40 bp, Homo sapiens
ctccttcctgcttggaatgtccttcccctccccgtctttc

SEQ ID NO: 33161 - DNA, 40 bp, Homo sapiens
gaaagacggggaggggaaggacattccaagcaggaaggag

SEQ ID NO: 33162 - DNA, 40 bp, Homo sapiens
tccttcctgcttggaatgtccttcccctccccgtctttct

SEQ ID NO: 33163 - DNA, 40 bp, Homo sapiens
agaaagacggggaggggaaggacattccaagcaggaagga

SEQ ID NO: 33164 - DNA, 40 bp, Homo sapiens
ccttcctgcttggaatgtccttcccctccccgtctttctt

SEQ ID NO: 33165 - DNA, 40 bp, Homo sapiens
aagaaagacggggaggggaaggacattccaagcaggaagg

SEQ ID NO: 33166 - DNA, 40 bp, Homo sapiens
cttcctgcttggaatgtccttcccctccccgtctttctta

SEQ ID NO: 33167 - DNA, 40 bp, Homo sapiens
taagaaagacggggaggggaaggacattccaagcaggaag

SEQ ID NO: 33168 - DNA, 40 bp, Homo sapiens
ttcctgcttggaatgtccttcccctccccgtctttcttaa

SEQ ID NO: 33169 - DNA, 40 bp, Homo sapiens
ttaagaaagacggggaggggaaggacattccaagcaggaa

SEQ ID NO: 33170 - DNA, 40 bp, Homo sapiens
tcctgcttggaatgtccttcccctccccgtctttcttaat

SEQ ID NO: 33171 - DNA, 40 bp, Homo sapiens
attaagaaagacggggaggggaaggacattccaagcagga

SEQ ID NO: 33172 - DNA, 40 bp, Homo sapiens
cctgcttggaatgtccttcccctccccgtctttcttaatg

SEQ ID NO: 33173 - DNA, 40 bp, Homo sapiens
cattaagaaagacggggaggggaaggacattccaagcagg

SEQ ID NO: 33174 - DNA, 40 bp, Homo sapiens
ctgcttggaatgtccttcccctccccgtctttcttaatgc

SEQ ID NO: 33175 - DNA, 40 bp, Homo sapiens
gcattaagaaagacggggaggggaaggacattccaagcag

SEQ ID NO: 33176 - DNA, 40 bp, Homo sapiens
tgcttggaatgtccttcccctccccgtctttcttaatgca

SEQ ID NO: 33177 - DNA, 40 bp, Homo sapiens
tgcattaagaaagacggggaggggaaggacattccaagca

SEQ ID NO: 33178 - DNA, 40 bp, Homo sapiens
gcttggaatgtccttcccctccccgtctttcttaatgcat

SEQ ID NO: 33179 - DNA, 40 bp, Homo sapiens
atgcattaagaaagacggggaggggaaggacattccaagc

SEQ ID NO: 33180 - DNA, 40 bp, Homo sapiens
cttggaatgtccttcccctccccgtctttcttaatgcata

SEQ ID NO: 33181 - DNA, 40 bp, Homo sapiens
tatgcattaagaaagacggggaggggaaggacattccaag

SEQ ID NO: 33182 - DNA, 40 bp, Homo sapiens
ttggaatgtccttcccctccccgtctttcttaatgcatac

SEQ ID NO: 33183 - DNA, 40 bp, Homo sapiens
gtatgcattaagaaagacggggaggggaaggacattccaa

SEQ ID NO: 33184 - DNA, 40 bp, Homo sapiens
tggaatgtccttcccctccccgtctttcttaatgcataca

SEQ ID NO: 33185 - DNA, 40 bp, Homo sapiens
tgtatgcattaagaaagacggggaggggaaggacattcca

SEQ ID NO: 33186 - DNA, 40 bp, Homo sapiens
ggaatgtccttcccctccccgtctttcttaatgcatacaa

SEQ ID NO: 33187 - DNA, 40 bp, Homo sapiens
ttgtatgcattaagaaagacggggaggggaaggacattcc

SEQ ID NO: 33188 - DNA, 40 bp, Homo sapiens
gaatgtccttcccctccccgtctttcttaatgcatacaaa

SEQ ID NO: 33189 - DNA, 40 bp, Homo sapiens
tttgtatgcattaagaaagacggggaggggaaggacattc

SEQ ID NO: 33190 - DNA, 40 bp, Homo sapiens
aatgtccttcccctccccgtctttcttaatgcatacaaag

SEQ ID NO: 33191 - DNA, 40 bp, Homo sapiens
ctttgtatgcattaagaaagacggggaggggaaggacatt

SEQ ID NO: 33192 - DNA, 40 bp, Homo sapiens
atgtccttcccctccccgtctttcttaatgcatacaaagt

SEQ ID NO: 33193 - DNA, 40 bp, Homo sapiens
actttgtatgcattaagaaagacggggaggggaaggacat

SEQ ID NO: 33194 - DNA, 40 bp, Homo sapiens
tgtccttcccctccccgtctttcttaatgcatacaaagtt

SEQ ID NO: 33195 - DNA, 40 bp, Homo sapiens
aactttgtatgcattaagaaagacggggaggggaaggaca

SEQ ID NO: 33196 - DNA, 40 bp, Homo sapiens
gtccttcccctccccgtctttcttaatgcatacaaagttg

SEQ ID NO: 33197 - DNA, 40 bp, Homo sapiens
caactttgtatgcattaagaaagacggggaggggaaggac

SEQ ID NO: 33198 - DNA, 40 bp, Homo sapiens
tccttcccctccccgtctttcttaatgcatacaaagttga

SEQ ID NO: 33199 - DNA, 40 bp, Homo sapiens
tcaactttgtatgcattaagaaagacggggaggggaagga

SEQ ID NO: 33200 - DNA, 40 bp, Homo sapiens
ccttcccctccccgtctttcttaatgcatacaaagttgat

SEQ ID NO: 33201 - DNA, 40 bp, Homo sapiens
atcaactttgtatgcattaagaaagacggggaggggaagg

SEQ ID NO: 33202 - DNA, 40 bp, Homo sapiens
cttcccctccccgtctttcttaatgcatacaaagttgatc

SEQ ID NO: 33203 - DNA, 40 bp, Homo sapiens
gatcaactttgtatgcattaagaaagacggggaggggaag

SEQ ID NO: 33204 - DNA, 40 bp, Homo sapiens
ttcccctccccgtctttcttaatgcatacaaagttgatct

SEQ ID NO: 33205 - DNA, 40 bp, Homo sapiens
agatcaactttgtatgcattaagaaagacggggaggggaa

SEQ ID NO: 33206 - DNA, 40 bp, Homo sapiens
tcccctccccgtctttcttaatgcatacaaagttgatctc

SEQ ID NO: 33207 - DNA, 40 bp, Homo sapiens
gagatcaactttgtatgcattaagaaagacggggagggga

SEQ ID NO: 33208 - DNA, 40 bp, Homo sapiens
cccctccccgtctttcttaatgcatacaaagttgatctct

SEQ ID NO: 33209 - DNA, 40 bp, Homo sapiens
agagatcaactttgtatgcattaagaaagacggggagggg

SEQ ID NO: 33210 - DNA, 40 bp, Homo sapiens
ccctccccgtctttcttaatgcatacaaagttgatctctc

SEQ ID NO: 33211 - DNA, 40 bp, Homo sapiens
gagagatcaactttgtatgcattaagaaagacggggaggg

SEQ ID NO: 33212 - DNA, 40 bp, Homo sapiens
cctccccgtctttcttaatgcatacaaagttgatctctcc

SEQ ID NO: 33213 - DNA, 40 bp, Homo sapiens
ggagagatcaactttgtatgcattaagaaagacggggagg

SEQ ID NO: 33214 - DNA, 40 bp, Homo sapiens
ctccccgtctttcttaatgcatacaaagttgatctctcct

SEQ ID NO: 33215 - DNA, 40 bp, Homo sapiens
aggagagatcaactttgtatgcattaagaaagacggggag

SEQ ID NO: 33216 - DNA, 40 bp, Homo sapiens
tccccgtctttcttaatgcatacaaagttgatctctcctg

SEQ ID NO: 33217 - DNA, 40 bp, Homo sapiens
caggagagatcaactttgtatgcattaagaaagacgggga

SEQ ID NO: 33218 - DNA, 40 bp, Homo sapiens
ccccgtctttcttaatgcatacaaagttgatctctcctgt

SEQ ID NO: 33219 - DNA, 40 bp, Homo sapiens
acaggagagatcaactttgtatgcattaagaaagacgggg

SEQ ID NO: 33220 - DNA, 40 bp, Homo sapiens
cccgtctttcttaatgcatacaaagttgatctctcctgtg

SEQ ID NO: 33221 - DNA, 40 bp, Homo sapiens
cacaggagagatcaactttgtatgcattaagaaagacggg

SEQ ID NO: 33222 - DNA, 40 bp, Homo sapiens
ccgtctttcttaatgcatacaaagttgatctctcctgtgt

SEQ ID NO: 33223 - DNA, 40 bp, Homo sapiens
acacaggagagatcaactttgtatgcattaagaaagacgg

SEQ ID NO: 33224 - DNA, 40 bp, Homo sapiens
cgtctttcttaatgcatacaaagttgatctctcctgtgtg

SEQ ID NO: 33225 - DNA, 40 bp, Homo sapiens
cacacaggagagatcaactttgtatgcattaagaaagacg

SEQ ID NO: 33226 - DNA, 40 bp, Homo sapiens
gtctttcttaatgcatacaaagttgatctctcctgtgtgc

SEQ ID NO: 33227 - DNA, 40 bp, Homo sapiens
gcacacaggagagatcaactttgtatgcattaagaaagac

SEQ ID NO: 33228 - DNA, 40 bp, Homo sapiens
tctttcttaatgcatacaaagttgatctctcctgtgtgcc

SEQ ID NO: 33229 - DNA, 40 bp, Homo sapiens
ggcacacaggagagatcaactttgtatgcattaagaaaga

SEQ ID NO: 33230 - DNA, 40 bp, Homo sapiens
ctttcttaatgcatacaaagttgatctctcctgtgtgcca

SEQ ID NO: 33231 - DNA, 40 bp, Homo sapiens
tggcacacaggagagatcaactttgtatgcattaagaaag

SEQ ID NO: 33232 - DNA, 40 bp, Homo sapiens
tttcttaatgcatacaaagttgatctctcctgtgtgccac

SEQ ID NO: 33233 - DNA, 40 bp, Homo sapiens
gtggcacacaggagagatcaactttgtatgcattaagaaa

SEQ ID NO: 33234 - DNA, 40 bp, Homo sapiens
ttcttaatgcatacaaagttgatctctcctgtgtgccacc

SEQ ID NO: 33235 - DNA, 40 bp, Homo sapiens
ggtggcacacaggagagatcaactttgtatgcattaagaa

SEQ ID NO: 33236 - DNA, 40 bp, Homo sapiens
tcttaatgcatacaaagttgatctctcctgtgtgccacca

SEQ ID NO: 33237 - DNA, 40 bp, Homo sapiens
tggtggcacacaggagagatcaactttgtatgcattaaga

SEQ ID NO: 33238 - DNA, 40 bp, Homo sapiens
cttaatgcatacaaagttgatctctcctgtgtgccaccat

SEQ ID NO: 33239 - DNA, 40 bp, Homo sapiens
atggtggcacacaggagagatcaactttgtatgcattaag

SEQ ID NO: 33240 - DNA, 40 bp, Homo sapiens
ttaatgcatacaaagttgatctctcctgtgtgccaccatt

SEQ ID NO: 33241 - DNA, 40 bp, Homo sapiens
aatggtggcacacaggagagatcaactttgtatgcattaa

SEQ ID NO: 33242 - DNA, 40 bp, Homo sapiens
taatgcatacaaagttgatctctcctgtgtgccaccattg

SEQ ID NO: 33243 - DNA, 40 bp, Homo sapiens
caatggtggcacacaggagagatcaactttgtatgcatta

SEQ ID NO: 33244 - DNA, 40 bp, Homo sapiens
aatgcatacaaagttgatctctcctgtgtgccaccattgt

SEQ ID NO: 33245 - DNA, 40 bp, Homo sapiens
acaatggtggcacacaggagagatcaactttgtatgcatt

SEQ ID NO: 33246 - DNA, 40 bp, Homo sapiens
atgcatacaaagttgatctctcctgtgtgccaccattgta

SEQ ID NO: 33247 - DNA, 40 bp, Homo sapiens
tacaatggtggcacacaggagagatcaactttgtatgcat

SEQ ID NO: 33248 - DNA, 40 bp, Homo sapiens
tgcatacaaagttgatctctcctgtgtgccaccattgtac

SEQ ID NO: 33249 - DNA, 40 bp, Homo sapiens
gtacaatggtggcacacaggagagatcaactttgtatgca

SEQ ID NO: 33250 - DNA, 40 bp, Homo sapiens
gcatacaaagttgatctctcctgtgtgccaccattgtact

SEQ ID NO: 33251 - DNA, 40 bp, Homo sapiens
agtacaatggtggcacacaggagagatcaactttgtatgc

SEQ ID NO: 33252 - DNA, 40 bp, Homo sapiens
catacaaagttgatctctcctgtgtgccaccattgtactt

SEQ ID NO: 33253 - DNA, 40 bp, Homo sapiens
aagtacaatggtggcacacaggagagatcaactttgtatg

SEQ ID NO: 33254 - DNA, 40 bp, Homo sapiens
atacaaagttgatctctcctgtgtgccaccattgtacttc

SEQ ID NO: 33255 - DNA, 40 bp, Homo sapiens
gaagtacaatggtggcacacaggagagatcaactttgtat

SEQ ID NO: 33256 - DNA, 40 bp, Homo sapiens
tacaaagttgatctctcctgtgtgccaccattgtacttcg

SEQ ID NO: 33257 - DNA, 40 bp, Homo sapiens
cgaagtacaatggtggcacacaggagagatcaactttgta

SEQ ID NO: 33258 - DNA, 40 bp, Homo sapiens
acaaagttgatctctcctgtgtgccaccattgtacttcgt

SEQ ID NO: 33259 - DNA, 40 bp, Homo sapiens
acgaagtacaatggtggcacacaggagagatcaactttgt

SEQ ID NO: 33260 - DNA, 40 bp, Homo sapiens
caaagttgatctctcctgtgtgccaccattgtacttcgtc

SEQ ID NO: 33261 - DNA, 40 bp, Homo sapiens
gacgaagtacaatggtggcacacaggagagatcaactttg

SEQ ID NO: 33262 - DNA, 40 bp, Homo sapiens
aaagttgatctctcctgtgtgccaccattgtacttcgtct

SEQ ID NO: 33263 - DNA, 40 bp, Homo sapiens
agacgaagtacaatggtggcacacaggagagatcaacttt

SEQ ID NO: 33264 - DNA, 40 bp, Homo sapiens
aagttgatctctcctgtgtgccaccattgtacttcgtctt

SEQ ID NO: 33265 - DNA, 40 bp, Homo sapiens
aagacgaagtacaatggtggcacacaggagagatcaactt

SEQ ID NO: 33266 - DNA, 40 bp, Homo sapiens
agttgatctctcctgtgtgccaccattgtacttcgtcttg

SEQ ID NO: 33267 - DNA, 40 bp, Homo sapiens
caagacgaagtacaatggtggcacacaggagagatcaact

SEQ ID NO: 33268 - DNA, 40 bp, Homo sapiens
gttgatctctcctgtgtgccaccattgtacttcgtcttgc

SEQ ID NO: 33269 - DNA, 40 bp, Homo sapiens
gcaagacgaagtacaatggtggcacacaggagagatcaac

SEQ ID NO: 33270 - DNA, 40 bp, Homo sapiens
ttgatctctcctgtgtgccaccattgtacttcgtcttgca

SEQ ID NO: 33271 - DNA, 40 bp, Homo sapiens
tgcaagacgaagtacaatggtggcacacaggagagatcaa

SEQ ID NO: 33272 - DNA, 40 bp, Homo sapiens
tgatctctcctgtgtgccaccattgtacttcgtcttgcat

SEQ ID NO: 33273 - DNA, 40 bp, Homo sapiens
atgcaagacgaagtacaatggtggcacacaggagagatca

SEQ ID NO: 33274 - DNA, 40 bp, Homo sapiens
gatctctcctgtgtgccaccattgtacttcgtcttgcata

SEQ ID NO: 33275 - DNA, 40 bp, Homo sapiens
tatgcaagacgaagtacaatggtggcacacaggagagatc

SEQ ID NO: 33276 - DNA, 40 bp, Homo sapiens
atctctcctgtgtgccaccattgtacttcgtcttgcatat

SEQ ID NO: 33277 - DNA, 40 bp, Homo sapiens
atatgcaagacgaagtacaatggtggcacacaggagagat

SEQ ID NO: 33278 - DNA, 40 bp, Homo sapiens
tctctcctgtgtgccaccattgtacttcgtcttgcatatg

SEQ ID NO: 33279 - DNA, 40 bp, Homo sapiens
catatgcaagacgaagtacaatggtggcacacaggagaga

SEQ ID NO: 33280 - DNA, 40 bp, Homo sapiens
ctctcctgtgtgccaccattgtacttcgtcttgcatatgg

SEQ ID NO: 33281 - DNA, 40 bp, Homo sapiens
ccatatgcaagacgaagtacaatggtggcacacaggagag

SEQ ID NO: 33282 - DNA, 40 bp, Homo sapiens
tctcctgtgtgccaccattgtacttcgtcttgcatatggt

SEQ ID NO: 33283 - DNA, 40 bp, Homo sapiens
accatatgcaagacgaagtacaatggtggcacacaggaga

SEQ ID NO: 33284 - DNA, 40 bp, Homo sapiens
ctcctgtgtgccaccattgtacttcgtcttgcatatggtg

SEQ ID NO: 33285 - DNA, 40 bp, Homo sapiens
caccatatgcaagacgaagtacaatggtggcacacaggag

SEQ ID NO: 33286 - DNA, 40 bp, Homo sapiens
tcctgtgtgccaccattgtacttcgtcttgcatatggtgt

SEQ ID NO: 33287 - DNA, 40 bp, Homo sapiens
acaccatatgcaagacgaagtacaatggtggcacacagga

SEQ ID NO: 33288 - DNA, 40 bp, Homo sapiens
cctgtgtgccaccattgtacttcgtcttgcatatggtgtt

SEQ ID NO: 33289 - DNA, 40 bp, Homo sapiens
aacaccatatgcaagacgaagtacaatggtggcacacagg

SEQ ID NO: 33290 - DNA, 40 bp, Homo sapiens
ctgtgtgccaccattgtacttcgtcttgcatatggtgtta

SEQ ID NO: 33291 - DNA, 40 bp, Homo sapiens
taacaccatatgcaagacgaagtacaatggtggcacacag

SEQ ID NO: 33292 - DNA, 40 bp, Homo sapiens
tgtgtgccaccattgtacttcgtcttgcatatggtgttac

SEQ ID NO: 33293 - DNA, 40 bp, Homo sapiens
gtaacaccatatgcaagacgaagtacaatggtggcacaca

SEQ ID NO: 33294 - DNA, 40 bp, Homo sapiens
gtgtgccaccattgtacttcgtcttgcatatggtgttaca

SEQ ID NO: 33295 - DNA, 40 bp, Homo sapiens
tgtaacaccatatgcaagacgaagtacaatggtggcacac

SEQ ID NO: 33296 - DNA, 40 bp, Homo sapiens
tgtgccaccattgtacttcgtcttgcatatggtgttacat

SEQ ID NO: 33297 - DNA, 40 bp, Homo sapiens
atgtaacaccatatgcaagacgaagtacaatggtggcaca

SEQ ID NO: 33298 - DNA, 40 bp, Homo sapiens
gtgccaccattgtacttcgtcttgcatatggtgttacatt

SEQ ID NO: 33299 - DNA, 40 bp, Homo sapiens
aatgtaacaccatatgcaagacgaagtacaatggtggcac

SEQ ID NO: 33300 - DNA, 40 bp, Homo sapiens
tgccaccattgtacttcgtcttgcatatggtgttacattc

SEQ ID NO: 33301 - DNA, 40 bp, Homo sapiens
gaatgtaacaccatatgcaagacgaagtacaatggtggca

SEQ ID NO: 33302 - DNA, 40 bp, Homo sapiens
gccaccattgtacttcgtcttgcatatggtgttacattca

SEQ ID NO: 33303 - DNA, 40 bp, Homo sapiens
tgaatgtaacaccatatgcaagacgaagtacaatggtggc

SEQ ID NO: 33304 - DNA, 40 bp, Homo sapiens
ccaccattgtacttcgtcttgcatatggtgttacattcat

SEQ ID NO: 33305 - DNA, 40 bp, Homo sapiens
atgaatgtaacaccatatgcaagacgaagtacaatggtgg

SEQ ID NO: 33306 - DNA, 40 bp, Homo sapiens
caccattgtacttcgtcttgcatatggtgttacattcatt

SEQ ID NO: 33307 - DNA, 40 bp, Homo sapiens
aatgaatgtaacaccatatgcaagacgaagtacaatggtg

SEQ ID NO: 33308 - DNA, 40 bp, Homo sapiens
accattgtacttcgtcttgcatatggtgttacattcattt

SEQ ID NO: 33309 - DNA, 40 bp, Homo sapiens
aaatgaatgtaacaccatatgcaagacgaagtacaatggt

SEQ ID NO: 33310 - DNA, 40 bp, Homo sapiens
ccattgtacttcgtcttgcatatggtgttacattcatttt

SEQ ID NO: 33311 - DNA, 40 bp, Homo sapiens
aaaatgaatgtaacaccatatgcaagacgaagtacaatgg

SEQ ID NO: 33312 - DNA, 40 bp, Homo sapiens
cattgtacttcgtcttgcatatggtgttacattcatttta

SEQ ID NO: 33313 - DNA, 40 bp, Homo sapiens
taaaatgaatgtaacaccatatgcaagacgaagtacaatg

SEQ ID NO: 33314 - DNA, 40 bp, Homo sapiens
attgtacttcgtcttgcatatggtgttacattcattttat

SEQ ID NO: 33315 - DNA, 40 bp, Homo sapiens
ataaaatgaatgtaacaccatatgcaagacgaagtacaat

SEQ ID NO: 33316 - DNA, 40 bp, Homo sapiens
ttgtacttcgtcttgcatatggtgttacattcattttatt

SEQ ID NO: 33317 - DNA, 40 bp, Homo sapiens
aataaaatgaatgtaacaccatatgcaagacgaagtacaa

SEQ ID NO: 33318 - DNA, 40 bp, Homo sapiens
tgtacttcgtcttgcatatggtgttacattcattttattt

SEQ ID NO: 33319 - DNA, 40 bp, Homo sapiens
aaataaaatgaatgtaacaccatatgcaagacgaagtaca

SEQ ID NO: 33320 - DNA, 40 bp, Homo sapiens
gtacttcgtcttgcatatggtgttacattcattttatttt

SEQ ID NO: 33321 - DNA, 40 bp, Homo sapiens
aaaataaaatgaatgtaacaccatatgcaagacgaagtac

SEQ ID NO: 33322 - DNA, 40 bp, Homo sapiens
tacttcgtcttgcatatggtgttacattcattttatttta

SEQ ID NO: 33323 - DNA, 40 bp, Homo sapiens
taaaataaaatgaatgtaacaccatatgcaagacgaagta

SEQ ID NO: 33324 - DNA, 40 bp, Homo sapiens
acttcgtcttgcatatggtgttacattcattttattttaa

SEQ ID NO: 33325 - DNA, 40 bp, Homo sapiens
ttaaaataaaatgaatgtaacaccatatgcaagacgaagt

SEQ ID NO: 33326 - DNA, 40 bp, Homo sapiens
cttcgtcttgcatatggtgttacattcattttattttaat

SEQ ID NO: 33327 - DNA, 40 bp, Homo sapiens
attaaaataaaatgaatgtaacaccatatgcaagacgaag

SEQ ID NO: 33328 - DNA, 40 bp, Homo sapiens
ttcgtcttgcatatggtgttacattcattttattttaatt

SEQ ID NO: 33329 - DNA, 40 bp, Homo sapiens
aattaaaataaaatgaatgtaacaccatatgcaagacgaa

SEQ ID NO: 33330 - DNA, 40 bp, Homo sapiens
tcgtcttgcatatggtgttacattcattttattttaatta

SEQ ID NO: 33331 - DNA, 40 bp, Homo sapiens
taattaaaataaaatgaatgtaacaccatatgcaagacga

SEQ ID NO: 33332 - DNA, 40 bp, Homo sapiens
cgtcttgcatatggtgttacattcattttattttaattat

SEQ ID NO: 33333 - DNA, 40 bp, Homo sapiens
ataattaaaataaaatgaatgtaacaccatatgcaagacg

SEQ ID NO: 33334 - DNA, 40 bp, Homo sapiens
gtcttgcatatggtgttacattcattttattttaattatt

SEQ ID NO: 33335 - DNA, 40 bp, Homo sapiens
aataattaaaataaaatgaatgtaacaccatatgcaagac

SEQ ID NO: 33336 - DNA, 40 bp, Homo sapiens
tcttgcatatggtgttacattcattttattttaattattt

SEQ ID NO: 33337 - DNA, 40 bp, Homo sapiens
aaataattaaaataaaatgaatgtaacaccatatgcaaga

SEQ ID NO: 33338 - DNA, 40 bp, Homo sapiens
cttgcatatggtgttacattcattttattttaattattta

SEQ ID NO: 33339 - DNA, 40 bp, Homo sapiens
taaataattaaaataaaatgaatgtaacaccatatgcaag

SEQ ID NO: 33340 - DNA, 40 bp, Homo sapiens
ttgcatatggtgttacattcattttattttaattatttat

SEQ ID NO: 33341 - DNA, 40 bp, Homo sapiens
ataaataattaaaataaaatgaatgtaacaccatatgcaa

SEQ ID NO: 33342 - DNA, 40 bp, Homo sapiens
tgcatatggtgttacattcattttattttaattatttatt

SEQ ID NO: 33343 - DNA, 40 bp, Homo sapiens
aataaataattaaaataaaatgaatgtaacaccatatgca

SEQ ID NO: 33344 - DNA, 40 bp, Homo sapiens
gcatatggtgttacattcattttattttaattatttattt

SEQ ID NO: 33345 - DNA, 40 bp, Homo sapiens
aaataaataattaaaataaaatgaatgtaacaccatatgc

SEQ ID NO: 33346 - DNA, 40 bp, Homo sapiens
catatggtgttacattcattttattttaattatttattta

SEQ ID NO: 33347 - DNA, 40 bp, Homo sapiens
taaataaataattaaaataaaatgaatgtaacaccatatg

SEQ ID NO: 33348 - DNA, 40 bp, Homo sapiens
atatggtgttacattcattttattttaattatttatttac

SEQ ID NO: 33349 - DNA, 40 bp, Homo sapiens
gtaaataaataattaaaataaaatgaatgtaacaccatat

SEQ ID NO: 33350 - DNA, 40 bp, Homo sapiens
tatggtgttacattcattttattttaattatttatttacg

SEQ ID NO: 33351 - DNA, 40 bp, Homo sapiens
cgtaaataaataattaaaataaaatgaatgtaacaccata

SEQ ID NO: 33352 - DNA, 40 bp, Homo sapiens
atggtgttacattcattttattttaattatttatttacgt

SEQ ID NO: 33353 - DNA, 40 bp, Homo sapiens
acgtaaataaataattaaaataaaatgaatgtaacaccat

SEQ ID NO: 33354 - DNA, 40 bp, Homo sapiens
tggtgttacattcattttattttaattatttatttacgtt

SEQ ID NO: 33355 - DNA, 40 bp, Homo sapiens
aacgtaaataaataattaaaataaaatgaatgtaacacca

SEQ ID NO: 33356 - DNA, 40 bp, Homo sapiens
ggtgttacattcattttattttaattatttatttacgttc

SEQ ID NO: 33357 - DNA, 40 bp, Homo sapiens
gaacgtaaataaataattaaaataaaatgaatgtaacacc

SEQ ID NO: 33358 - DNA, 40 bp, Homo sapiens
gtgttacattcattttattttaattatttatttacgttca

SEQ ID NO: 33359 - DNA, 40 bp, Homo sapiens
tgaacgtaaataaataattaaaataaaatgaatgtaacac

SEQ ID NO: 33360 - DNA, 40 bp, Homo sapiens
tgttacattcattttattttaattatttatttacgttcat

SEQ ID NO: 33361 - DNA, 40 bp, Homo sapiens
atgaacgtaaataaataattaaaataaaatgaatgtaaca

SEQ ID NO: 33362 - DNA, 40 bp, Homo sapiens
gttacattcattttattttaattatttatttacgttcatg

SEQ ID NO: 33363 - DNA, 40 bp, Homo sapiens
catgaacgtaaataaataattaaaataaaatgaatgtaac

SEQ ID NO: 33364 - DNA, 40 bp, Homo sapiens
ttacattcattttattttaattatttatttacgttcatgt

SEQ ID NO: 33365 - DNA, 40 bp, Homo sapiens
acatgaacgtaaataaataattaaaataaaatgaatgtaa

SEQ ID NO: 33366 - DNA, 40 bp, Homo sapiens
tacattcattttattttaattatttatttacgttcatgtc

SEQ ID NO: 33367 - DNA, 40 bp, Homo sapiens
gacatgaacgtaaataaataattaaaataaaatgaatgta

SEQ ID NO: 33368 - DNA, 40 bp, Homo sapiens
acattcattttattttaattatttatttacgttcatgtct

SEQ ID NO: 33369 - DNA, 40 bp, Homo sapiens
agacatgaacgtaaataaataattaaaataaaatgaatgt

SEQ ID NO: 33370 - DNA, 40 bp, Homo sapiens
cattcattttattttaattatttatttacgttcatgtctc

SEQ ID NO: 33371 - DNA, 40 bp, Homo sapiens
gagacatgaacgtaaataaataattaaaataaaatgaatg

SEQ ID NO: 33372 - DNA, 40 bp, Homo sapiens
attcattttattttaattatttatttacgttcatgtctct

SEQ ID NO: 33373 - DNA, 40 bp, Homo sapiens
agagacatgaacgtaaataaataattaaaataaaatgaat

SEQ ID NO: 33374 - DNA, 40 bp, Homo sapiens
ttcattttattttaattatttatttacgttcatgtctctt

SEQ ID NO: 33375 - DNA, 40 bp, Homo sapiens
aagagacatgaacgtaaataaataattaaaataaaatgaa

SEQ ID NO: 33376 - DNA, 40 bp, Homo sapiens
tcattttattttaattatttatttacgttcatgtctcttc

SEQ ID NO: 33377 - DNA, 40 bp, Homo sapiens
gaagagacatgaacgtaaataaataattaaaataaaatga

SEQ ID NO: 33378 - DNA, 40 bp, Homo sapiens
cattttattttaattatttatttacgttcatgtctcttcc

SEQ ID NO: 33379 - DNA, 40 bp, Homo sapiens
ggaagagacatgaacgtaaataaataattaaaataaaatg

SEQ ID NO: 33380 - DNA, 40 bp, Homo sapiens
attttattttaattatttatttacgttcatgtctcttcca

SEQ ID NO: 33381 - DNA, 40 bp, Homo sapiens
tggaagagacatgaacgtaaataaataattaaaataaaat

SEQ ID NO: 33382 - DNA, 40 bp, Homo sapiens
ttttattttaattatttatttacgttcatgtctcttccac

SEQ ID NO: 33383 - DNA, 40 bp, Homo sapiens
gtggaagagacatgaacgtaaataaataattaaaataaaa

SEQ ID NO: 33384 - DNA, 40 bp, Homo sapiens
tttattttaattatttatttacgttcatgtctcttccact

SEQ ID NO: 33385 - DNA, 40 bp, Homo sapiens
agtggaagagacatgaacgtaaataaataattaaaataaa

SEQ ID NO: 33386 - DNA, 40 bp, Homo sapiens
ttattttaattatttatttacgttcatgtctcttccactc

SEQ ID NO: 33387 - DNA, 40 bp, Homo sapiens
gagtggaagagacatgaacgtaaataaataattaaaataa

SEQ ID NO: 33388 - DNA, 40 bp, Homo sapiens
tattttaattatttatttacgttcatgtctcttccactca

SEQ ID NO: 33389 - DNA, 40 bp, Homo sapiens
tgagtggaagagacatgaacgtaaataaataattaaaata

SEQ ID NO: 33390 - DNA, 40 bp, Homo sapiens
attttaattatttatttacgttcatgtctcttccactcac

SEQ ID NO: 33391 - DNA, 40 bp, Homo sapiens
gtgagtggaagagacatgaacgtaaataaataattaaaat

SEQ ID NO: 33392 - DNA, 40 bp, Homo sapiens
ttttaattatttatttacgttcatgtctcttccactcacc

SEQ ID NO: 33393 - DNA, 40 bp, Homo sapiens
ggtgagtggaagagacatgaacgtaaataaataattaaaa

SEQ ID NO: 33394 - DNA, 40 bp, Homo sapiens
tttaattatttatttacgttcatgtctcttccactcacct

SEQ ID NO: 33395 - DNA, 40 bp, Homo sapiens
aggtgagtggaagagacatgaacgtaaataaataattaaa

SEQ ID NO: 33396 - DNA, 40 bp, Homo sapiens
ttaattatttatttacgttcatgtctcttccactcacctt

SEQ ID NO: 33397 - DNA, 40 bp, Homo sapiens
aaggtgagtggaagagacatgaacgtaaataaataattaa

SEQ ID NO: 33398 - DNA, 40 bp, Homo sapiens
taattatttatttacgttcatgtctcttccactcacctta

SEQ ID NO: 33399 - DNA, 40 bp, Homo sapiens
taaggtgagtggaagagacatgaacgtaaataaataatta

SEQ ID NO: 33400 - DNA, 40 bp, Homo sapiens
aattatttatttacgttcatgtctcttccactcaccttag

SEQ ID NO: 33401 - DNA, 40 bp, Homo sapiens
ctaaggtgagtggaagagacatgaacgtaaataaataatt

SEQ ID NO: 33402 - DNA, 40 bp, Homo sapiens
attatttatttacgttcatgtctcttccactcaccttagt

SEQ ID NO: 33403 - DNA, 40 bp, Homo sapiens
actaaggtgagtggaagagacatgaacgtaaataaataat

SEQ ID NO: 33404 - DNA, 40 bp, Homo sapiens
ttatttatttacgttcatgtctcttccactcaccttagtt

SEQ ID NO: 33405 - DNA, 40 bp, Homo sapiens
aactaaggtgagtggaagagacatgaacgtaaataaataa

SEQ ID NO: 33406 - DNA, 40 bp, Homo sapiens
tatttatttacgttcatgtctcttccactcaccttagttg

SEQ ID NO: 33407 - DNA, 40 bp, Homo sapiens
caactaaggtgagtggaagagacatgaacgtaaataaata

SEQ ID NO: 33408 - DNA, 40 bp, Homo sapiens
atttatttacgttcatgtctcttccactcaccttagttgc

SEQ ID NO: 33409 - DNA, 40 bp, Homo sapiens
gcaactaaggtgagtggaagagacatgaacgtaaataaat

SEQ ID NO: 33410 - DNA, 40 bp, Homo sapiens
tttatttacgttcatgtctcttccactcaccttagttgct

SEQ ID NO: 33411 - DNA, 40 bp, Homo sapiens
agcaactaaggtgagtggaagagacatgaacgtaaataaa

SEQ ID NO: 33412 - DNA, 40 bp, Homo sapiens
ttatttacgttcatgtctcttccactcaccttagttgctt

SEQ ID NO: 33413 - DNA, 40 bp, Homo sapiens
aagcaactaaggtgagtggaagagacatgaacgtaaataa

SEQ ID NO: 33414 - DNA, 40 bp, Homo sapiens
tatttacgttcatgtctcttccactcaccttagttgcttg

SEQ ID NO: 33415 - DNA, 40 bp, Homo sapiens
caagcaactaaggtgagtggaagagacatgaacgtaaata

SEQ ID NO: 33416 - DNA, 40 bp, Homo sapiens
atttacgttcatgtctcttccactcaccttagttgcttga

SEQ ID NO: 33417 - DNA, 40 bp, Homo sapiens
tcaagcaactaaggtgagtggaagagacatgaacgtaaat

SEQ ID NO: 33418 - DNA, 40 bp, Homo sapiens
tttacgttcatgtctcttccactcaccttagttgcttgag

SEQ ID NO: 33419 - DNA, 40 bp, Homo sapiens
ctcaagcaactaaggtgagtggaagagacatgaacgtaaa

SEQ ID NO: 33420 - DNA, 40 bp, Homo sapiens
ttacgttcatgtctcttccactcaccttagttgcttgagg

SEQ ID NO: 33421 - DNA, 40 bp, Homo sapiens
cctcaagcaactaaggtgagtggaagagacatgaacgtaa

SEQ ID NO: 33422 - DNA, 40 bp, Homo sapiens
tacgttcatgtctcttccactcaccttagttgcttgaggt

SEQ ID NO: 33423 - DNA, 40 bp, Homo sapiens
acctcaagcaactaaggtgagtggaagagacatgaacgta

SEQ ID NO: 33424 - DNA, 40 bp, Homo sapiens
acgttcatgtctcttccactcaccttagttgcttgaggtc

SEQ ID NO: 33425 - DNA, 40 bp, Homo sapiens
gacctcaagcaactaaggtgagtggaagagacatgaacgt

SEQ ID NO: 33426 - DNA, 40 bp, Homo sapiens
cgttcatgtctcttccactcaccttagttgcttgaggtca

SEQ ID NO: 33427 - DNA, 40 bp, Homo sapiens
tgacctcaagcaactaaggtgagtggaagagacatgaacg

SEQ ID NO: 33428 - DNA, 40 bp, Homo sapiens
gttcatgtctcttccactcaccttagttgcttgaggtcag

SEQ ID NO: 33429 - DNA, 40 bp, Homo sapiens
ctgacctcaagcaactaaggtgagtggaagagacatgaac

SEQ ID NO: 33430 - DNA, 40 bp, Homo sapiens
ttcatgtctcttccactcaccttagttgcttgaggtcaga

SEQ ID NO: 33431 - DNA, 40 bp, Homo sapiens
tctgacctcaagcaactaaggtgagtggaagagacatgaa

SEQ ID NO: 33432 - DNA, 40 bp, Homo sapiens
tcatgtctcttccactcaccttagttgcttgaggtcagaa

SEQ ID NO: 33433 - DNA, 40 bp, Homo sapiens
ttctgacctcaagcaactaaggtgagtggaagagacatga

SEQ ID NO: 33434 - DNA, 40 bp, Homo sapiens
catgtctcttccactcaccttagttgcttgaggtcagaaa

SEQ ID NO: 33435 - DNA, 40 bp, Homo sapiens
tttctgacctcaagcaactaaggtgagtggaagagacatg

SEQ ID NO: 33436 - DNA, 40 bp, Homo sapiens
atgtctcttccactcaccttagttgcttgaggtcagaaac

SEQ ID NO: 33437 - DNA, 40 bp, Homo sapiens
gtttctgacctcaagcaactaaggtgagtggaagagacat

SEQ ID NO: 33438 - DNA, 40 bp, Homo sapiens
tgtctcttccactcaccttagttgcttgaggtcagaaact

SEQ ID NO: 33439 - DNA, 40 bp, Homo sapiens
agtttctgacctcaagcaactaaggtgagtggaagagaca

SEQ ID NO: 33440 - DNA, 40 bp, Homo sapiens
gtctcttccactcaccttagttgcttgaggtcagaaacta

SEQ ID NO: 33441 - DNA, 40 bp, Homo sapiens
tagtttctgacctcaagcaactaaggtgagtggaagagac

SEQ ID NO: 33442 - DNA, 40 bp, Homo sapiens
tctcttccactcaccttagttgcttgaggtcagaaactat

SEQ ID NO: 33443 - DNA, 40 bp, Homo sapiens
atagtttctgacctcaagcaactaaggtgagtggaagaga

SEQ ID NO: 33444 - DNA, 40 bp, Homo sapiens
ctcttccactcaccttagttgcttgaggtcagaaactata

SEQ ID NO: 33445 - DNA, 40 bp, Homo sapiens
tatagtttctgacctcaagcaactaaggtgagtggaagag

SEQ ID NO: 33446 - DNA, 40 bp, Homo sapiens
tcttccactcaccttagttgcttgaggtcagaaactatat

SEQ ID NO: 33447 - DNA, 40 bp, Homo sapiens
atatagtttctgacctcaagcaactaaggtgagtggaaga

SEQ ID NO: 33448 - DNA, 40 bp, Homo sapiens
cttccactcaccttagttgcttgaggtcagaaactatata

SEQ ID NO: 33449 - DNA, 40 bp, Homo sapiens
tatatagtttctgacctcaagcaactaaggtgagtggaag

SEQ ID NO: 33450 - DNA, 40 bp, Homo sapiens
ttccactcaccttagttgcttgaggtcagaaactatataa

SEQ ID NO: 33451 - DNA, 40 bp, Homo sapiens
ttatatagtttctgacctcaagcaactaaggtgagtggaa

SEQ ID NO: 33452 - DNA, 40 bp, Homo sapiens
tccactcaccttagttgcttgaggtcagaaactatataat

SEQ ID NO: 33453 - DNA, 40 bp, Homo sapiens
attatatagtttctgacctcaagcaactaaggtgagtgga

SEQ ID NO: 33454 - DNA, 40 bp, Homo sapiens
ccactcaccttagttgcttgaggtcagaaactatataatg

SEQ ID NO: 33455 - DNA, 40 bp, Homo sapiens
cattatatagtttctgacctcaagcaactaaggtgagtgg

SEQ ID NO: 33456 - DNA, 40 bp, Homo sapiens
cactcaccttagttgcttgaggtcagaaactatataatgt

SEQ ID NO: 33457 - DNA, 40 bp, Homo sapiens
acattatatagtttctgacctcaagcaactaaggtgagtg

SEQ ID NO: 33458 - DNA, 40 bp, Homo sapiens
actcaccttagttgcttgaggtcagaaactatataatgtg

SEQ ID NO: 33459 - DNA, 40 bp, Homo sapiens
cacattatatagtttctgacctcaagcaactaaggtgagt

SEQ ID NO: 33460 - DNA, 40 bp, Homo sapiens
ctcaccttagttgcttgaggtcagaaactatataatgtgt

SEQ ID NO: 33461 - DNA, 40 bp, Homo sapiens
acacattatatagtttctgacctcaagcaactaaggtgag

SEQ ID NO: 33462 - DNA, 40 bp, Homo sapiens
tcaccttagttgcttgaggtcagaaactatataatgtgtg

SEQ ID NO: 33463 - DNA, 40 bp, Homo sapiens
cacacattatatagtttctgacctcaagcaactaaggtga

SEQ ID NO: 33464 - DNA, 40 bp, Homo sapiens
caccttagttgcttgaggtcagaaactatataatgtgtga

SEQ ID NO: 33465 - DNA, 40 bp, Homo sapiens
tcacacattatatagtttctgacctcaagcaactaaggtg

SEQ ID NO: 33466 - DNA, 40 bp, Homo sapiens
accttagttgcttgaggtcagaaactatataatgtgtgac

SEQ ID NO: 33467 - DNA, 40 bp, Homo sapiens
gtcacacattatatagtttctgacctcaagcaactaaggt

SEQ ID NO: 33468 - DNA, 40 bp, Homo sapiens
ccttagttgcttgaggtcagaaactatataatgtgtgaca

SEQ ID NO: 33469 - DNA, 40 bp, Homo sapiens
tgtcacacattatatagtttctgacctcaagcaactaagg

SEQ ID NO: 33470 - DNA, 40 bp, Homo sapiens
cttagttgcttgaggtcagaaactatataatgtgtgacac

SEQ ID NO: 33471 - DNA, 40 bp, Homo sapiens
gtgtcacacattatatagtttctgacctcaagcaactaag

SEQ ID NO: 33472 - DNA, 40 bp, Homo sapiens
ttagttgcttgaggtcagaaactatataatgtgtgacacg

SEQ ID NO: 33473 - DNA, 40 bp, Homo sapiens
cgtgtcacacattatatagtttctgacctcaagcaactaa

SEQ ID NO: 33474 - DNA, 40 bp, Homo sapiens
tagttgcttgaggtcagaaactatataatgtgtgacacgg

SEQ ID NO: 33475 - DNA, 40 bp, Homo sapiens
ccgtgtcacacattatatagtttctgacctcaagcaacta

SEQ ID NO: 33476 - DNA, 40 bp, Homo sapiens
agttgcttgaggtcagaaactatataatgtgtgacacgga

SEQ ID NO: 33477 - DNA, 40 bp, Homo sapiens
tccgtgtcacacattatatagtttctgacctcaagcaact

SEQ ID NO: 33478 - DNA, 40 bp, Homo sapiens
gttgcttgaggtcagaaactatataatgtgtgacacggaa

SEQ ID NO: 33479 - DNA, 40 bp, Homo sapiens
ttccgtgtcacacattatatagtttctgacctcaagcaac

SEQ ID NO: 33480 - DNA, 40 bp, Homo sapiens
ttgcttgaggtcagaaactatataatgtgtgacacggaat

SEQ ID NO: 33481 - DNA, 40 bp, Homo sapiens
attccgtgtcacacattatatagtttctgacctcaagcaa

SEQ ID NO: 33482 - DNA, 40 bp, Homo sapiens
tgcttgaggtcagaaactatataatgtgtgacacggaatg

SEQ ID NO: 33483 - DNA, 40 bp, Homo sapiens
cattccgtgtcacacattatatagtttctgacctcaagca

SEQ ID NO: 33484 - DNA, 40 bp, Homo sapiens
gcttgaggtcagaaactatataatgtgtgacacggaatgt

SEQ ID NO: 33485 - DNA, 40 bp, Homo sapiens
acattccgtgtcacacattatatagtttctgacctcaagc

SEQ ID NO: 33486 - DNA, 40 bp, Homo sapiens
cttgaggtcagaaactatataatgtgtgacacggaatgtg

SEQ ID NO: 33487 - DNA, 40 bp, Homo sapiens
cacattccgtgtcacacattatatagtttctgacctcaag

SEQ ID NO: 33488 - DNA, 40 bp, Homo sapiens
ttgaggtcagaaactatataatgtgtgacacggaatgtga

SEQ ID NO: 33489 - DNA, 40 bp, Homo sapiens
tcacattccgtgtcacacattatatagtttctgacctcaa

SEQ ID NO: 33490 - DNA, 40 bp, Homo sapiens
tgaggtcagaaactatataatgtgtgacacggaatgtgac

SEQ ID NO: 33491 - DNA, 40 bp, Homo sapiens
gtcacattccgtgtcacacattatatagtttctgacctca

SEQ ID NO: 33492 - DNA, 40 bp, Homo sapiens
gaggtcagaaactatataatgtgtgacacggaatgtgaca

SEQ ID NO: 33493 - DNA, 40 bp, Homo sapiens
tgtcacattccgtgtcacacattatatagtttctgacctc

SEQ ID NO: 33494 - DNA, 40 bp, Homo sapiens
aggtcagaaactatataatgtgtgacacggaatgtgacac

SEQ ID NO: 33495 - DNA, 40 bp, Homo sapiens
gtgtcacattccgtgtcacacattatatagtttctgacct

SEQ ID NO: 33496 - DNA, 40 bp, Homo sapiens
ggtcagaaactatataatgtgtgacacggaatgtgacacc

SEQ ID NO: 33497 - DNA, 40 bp, Homo sapiens
ggtgtcacattccgtgtcacacattatatagtttctgacc

SEQ ID NO: 33498 - DNA, 40 bp, Homo sapiens
gtcagaaactatataatgtgtgacacggaatgtgacacct

SEQ ID NO: 33499 - DNA, 40 bp, Homo sapiens
aggtgtcacattccgtgtcacacattatatagtttctgac

SEQ ID NO: 33500 - DNA, 40 bp, Homo sapiens
tcagaaactatataatgtgtgacacggaatgtgacaccta

SEQ ID NO: 33501 - DNA, 40 bp, Homo sapiens
taggtgtcacattccgtgtcacacattatatagtttctga

SEQ ID NO: 33502 - DNA, 40 bp, Homo sapiens
cagaaactatataatgtgtgacacggaatgtgacacctag

SEQ ID NO: 33503 - DNA, 40 bp, Homo sapiens
ctaggtgtcacattccgtgtcacacattatatagtttctg

SEQ ID NO: 33504 - DNA, 40 bp, Homo sapiens
agaaactatataatgtgtgacacggaatgtgacacctaga

SEQ ID NO: 33505 - DNA, 40 bp, Homo sapiens
tctaggtgtcacattccgtgtcacacattatatagtttct

SEQ ID NO: 33506 - DNA, 40 bp, Homo sapiens
gaaactatataatgtgtgacacggaatgtgacacctagat

SEQ ID NO: 33507 - DNA, 40 bp, Homo sapiens
atctaggtgtcacattccgtgtcacacattatatagtttc

SEQ ID NO: 33508 - DNA, 40 bp, Homo sapiens
aaactatataatgtgtgacacggaatgtgacacctagatt

SEQ ID NO: 33509 - DNA, 40 bp, Homo sapiens
aatctaggtgtcacattccgtgtcacacattatatagttt

SEQ ID NO: 33510 - DNA, 40 bp, Homo sapiens
aactatataatgtgtgacacggaatgtgacacctagattt

SEQ ID NO: 33511 - DNA, 40 bp, Homo sapiens
aaatctaggtgtcacattccgtgtcacacattatatagtt

SEQ ID NO: 33512 - DNA, 40 bp, Homo sapiens
actatataatgtgtgacacggaatgtgacacctagatttt

SEQ ID NO: 33513 - DNA, 40 bp, Homo sapiens
aaaatctaggtgtcacattccgtgtcacacattatatagt

SEQ ID NO: 33514 - DNA, 40 bp, Homo sapiens
ctatataatgtgtgacacggaatgtgacacctagattttc

SEQ ID NO: 33515 - DNA, 40 bp, Homo sapiens
gaaaatctaggtgtcacattccgtgtcacacattatatag

SEQ ID NO: 33516 - DNA, 40 bp, Homo sapiens
tatataatgtgtgacacggaatgtgacacctagattttca

SEQ ID NO: 33517 - DNA, 40 bp, Homo sapiens
tgaaaatctaggtgtcacattccgtgtcacacattatata

SEQ ID NO: 33518 - DNA, 40 bp, Homo sapiens
atataatgtgtgacacggaatgtgacacctagattttcaa

SEQ ID NO: 33519 - DNA, 40 bp, Homo sapiens
ttgaaaatctaggtgtcacattccgtgtcacacattatat

SEQ ID NO: 33520 - DNA, 40 bp, Homo sapiens
tataatgtgtgacacggaatgtgacacctagattttcaat

SEQ ID NO: 33521 - DNA, 40 bp, Homo sapiens
attgaaaatctaggtgtcacattccgtgtcacacattata

SEQ ID NO: 33522 - DNA, 40 bp, Homo sapiens
ataatgtgtgacacggaatgtgacacctagattttcaata

SEQ ID NO: 33523 - DNA, 40 bp, Homo sapiens
tattgaaaatctaggtgtcacattccgtgtcacacattat

SEQ ID NO: 33524 - DNA, 40 bp, Homo sapiens
taatgtgtgacacggaatgtgacacctagattttcaataa

SEQ ID NO: 33525 - DNA, 40 bp, Homo sapiens
ttattgaaaatctaggtgtcacattccgtgtcacacatta

SEQ ID NO: 33526 - DNA, 40 bp, Homo sapiens
aatgtgtgacacggaatgtgacacctagattttcaataag

SEQ ID NO: 33527 - DNA, 40 bp, Homo sapiens
cttattgaaaatctaggtgtcacattccgtgtcacacatt

SEQ ID NO: 33528 - DNA, 40 bp, Homo sapiens
atgtgtgacacggaatgtgacacctagattttcaataagt

SEQ ID NO: 33529 - DNA, 40 bp, Homo sapiens
acttattgaaaatctaggtgtcacattccgtgtcacacat

SEQ ID NO: 33530 - DNA, 40 bp, Homo sapiens
tgtgtgacacggaatgtgacacctagattttcaataagtg

SEQ ID NO: 33531 - DNA, 40 bp, Homo sapiens
cacttattgaaaatctaggtgtcacattccgtgtcacaca

SEQ ID NO: 33532 - DNA, 40 bp, Homo sapiens
gtgtgacacggaatgtgacacctagattttcaataagtgt

SEQ ID NO: 33533 - DNA, 40 bp, Homo sapiens
acacttattgaaaatctaggtgtcacattccgtgtcacac

SEQ ID NO: 33534 - DNA, 40 bp, Homo sapiens
tgtgacacggaatgtgacacctagattttcaataagtgtt

SEQ ID NO: 33535 - DNA, 40 bp, Homo sapiens
aacacttattgaaaatctaggtgtcacattccgtgtcaca

SEQ ID NO: 33536 - DNA, 40 bp, Homo sapiens
gtgacacggaatgtgacacctagattttcaataagtgttt

SEQ ID NO: 33537 - DNA, 40 bp, Homo sapiens
aaacacttattgaaaatctaggtgtcacattccgtgtcac

SEQ ID NO: 33538 - DNA, 40 bp, Homo sapiens
tgacacggaatgtgacacctagattttcaataagtgtttc

SEQ ID NO: 33539 - DNA, 40 bp, Homo sapiens
gaaacacttattgaaaatctaggtgtcacattccgtgtca

SEQ ID NO: 33540 - DNA, 40 bp, Homo sapiens
gacacggaatgtgacacctagattttcaataagtgtttct

SEQ ID NO: 33541 - DNA, 40 bp, Homo sapiens
agaaacacttattgaaaatctaggtgtcacattccgtgtc

SEQ ID NO: 33542 - DNA, 40 bp, Homo sapiens
acacggaatgtgacacctagattttcaataagtgtttcta

SEQ ID NO: 33543 - DNA, 40 bp, Homo sapiens
tagaaacacttattgaaaatctaggtgtcacattccgtgt

SEQ ID NO: 33544 - DNA, 40 bp, Homo sapiens
cacggaatgtgacacctagattttcaataagtgtttctat

SEQ ID NO: 33545 - DNA, 40 bp, Homo sapiens
atagaaacacttattgaaaatctaggtgtcacattccgtg

SEQ ID NO: 33546 - DNA, 40 bp, Homo sapiens
acggaatgtgacacctagattttcaataagtgtttctatg

SEQ ID NO: 33547 - DNA, 40 bp, Homo sapiens
catagaaacacttattgaaaatctaggtgtcacattccgt

SEQ ID NO: 33548 - DNA, 40 bp, Homo sapiens
cggaatgtgacacctagattttcaataagtgtttctatga

SEQ ID NO: 33549 - DNA, 40 bp, Homo sapiens
tcatagaaacacttattgaaaatctaggtgtcacattccg

SEQ ID NO: 33550 - DNA, 40 bp, Homo sapiens
ggaatgtgacacctagattttcaataagtgtttctatgat

SEQ ID NO: 33551 - DNA, 40 bp, Homo sapiens
atcatagaaacacttattgaaaatctaggtgtcacattcc

SEQ ID NO: 33552 - DNA, 40 bp, Homo sapiens
gaatgtgacacctagattttcaataagtgtttctatgata

SEQ ID NO: 33553 - DNA, 40 bp, Homo sapiens
tatcatagaaacacttattgaaaatctaggtgtcacattc

SEQ ID NO: 33554 - DNA, 40 bp, Homo sapiens
aatgtgacacctagattttcaataagtgtttctatgatac

SEQ ID NO: 33555 - DNA, 40 bp, Homo sapiens
gtatcatagaaacacttattgaaaatctaggtgtcacatt

SEQ ID NO: 33556 - DNA, 40 bp, Homo sapiens
atgtgacacctagattttcaataagtgtttctatgataca

SEQ ID NO: 33557 - DNA, 40 bp, Homo sapiens
tgtatcatagaaacacttattgaaaatctaggtgtcacat

SEQ ID NO: 33558 - DNA, 40 bp, Homo sapiens
tgtgacacctagattttcaataagtgtttctatgatacaa

SEQ ID NO: 33559 - DNA, 40 bp, Homo sapiens
ttgtatcatagaaacacttattgaaaatctaggtgtcaca

SEQ ID NO: 33560 - DNA, 40 bp, Homo sapiens
gtgacacctagattttcaataagtgtttctatgatacaag

SEQ ID NO: 33561 - DNA, 40 bp, Homo sapiens
cttgtatcatagaaacacttattgaaaatctaggtgtcac

SEQ ID NO: 33562 - DNA, 40 bp, Homo sapiens
tgacacctagattttcaataagtgtttctatgatacaagg

SEQ ID NO: 33563 - DNA, 40 bp, Homo sapiens
ccttgtatcatagaaacacttattgaaaatctaggtgtca

SEQ ID NO: 33564 - DNA, 40 bp, Homo sapiens
gacacctagattttcaataagtgtttctatgatacaaggg

SEQ ID NO: 33565 - DNA, 40 bp, Homo sapiens
cccttgtatcatagaaacacttattgaaaatctaggtgtc

SEQ ID NO: 33566 - DNA, 40 bp, Homo sapiens
acacctagattttcaataagtgtttctatgatacaaggga

SEQ ID NO: 33567 - DNA, 40 bp, Homo sapiens
tcccttgtatcatagaaacacttattgaaaatctaggtgt

SEQ ID NO: 33568 - DNA, 40 bp, Homo sapiens
cacctagattttcaataagtgtttctatgatacaagggag

SEQ ID NO: 33569 - DNA, 40 bp, Homo sapiens
ctcccttgtatcatagaaacacttattgaaaatctaggtg

SEQ ID NO: 33570 - DNA, 40 bp, Homo sapiens
acctagattttcaataagtgtttctatgatacaagggaga

SEQ ID NO: 33571 - DNA, 40 bp, Homo sapiens
tctcccttgtatcatagaaacacttattgaaaatctaggt

SEQ ID NO: 33572 - DNA, 40 bp, Homo sapiens
cctagattttcaataagtgtttctatgatacaagggagac

SEQ ID NO: 33573 - DNA, 40 bp, Homo sapiens
gtctcccttgtatcatagaaacacttattgaaaatctagg

SEQ ID NO: 33574 - DNA, 40 bp, Homo sapiens
ctagattttcaataagtgtttctatgatacaagggagact

SEQ ID NO: 33575 - DNA, 40 bp, Homo sapiens
agtctcccttgtatcatagaaacacttattgaaaatctag

SEQ ID NO: 33576 - DNA, 40 bp, Homo sapiens
tagattttcaataagtgtttctatgatacaagggagactg

SEQ ID NO: 33577 - DNA, 40 bp, Homo sapiens
cagtctcccttgtatcatagaaacacttattgaaaatcta

SEQ ID NO: 33578 - DNA, 40 bp, Homo sapiens
agattttcaataagtgtttctatgatacaagggagactga

SEQ ID NO: 33579 - DNA, 40 bp, Homo sapiens
tcagtctcccttgtatcatagaaacacttattgaaaatct

SEQ ID NO: 33580 - DNA, 40 bp, Homo sapiens
gattttcaataagtgtttctatgatacaagggagactgat

SEQ ID NO: 33581 - DNA, 40 bp, Homo sapiens
atcagtctcccttgtatcatagaaacacttattgaaaatc

SEQ ID NO: 33582 - DNA, 40 bp, Homo sapiens
attttcaataagtgtttctatgatacaagggagactgatg

SEQ ID NO: 33583 - DNA, 40 bp, Homo sapiens
catcagtctcccttgtatcatagaaacacttattgaaaat

SEQ ID NO: 33584 - DNA, 40 bp, Homo sapiens
ttttcaataagtgtttctatgatacaagggagactgatgt

SEQ ID NO: 33585 - DNA, 40 bp, Homo sapiens
acatcagtctcccttgtatcatagaaacacttattgaaaa

SEQ ID NO: 33586 - DNA, 40 bp, Homo sapiens
tttcaataagtgtttctatgatacaagggagactgatgtg

SEQ ID NO: 33587 - DNA, 40 bp, Homo sapiens
cacatcagtctcccttgtatcatagaaacacttattgaaa

SEQ ID NO: 33588 - DNA, 40 bp, Homo sapiens
ttcaataagtgtttctatgatacaagggagactgatgtgg

SEQ ID NO: 33589 - DNA, 40 bp, Homo sapiens
ccacatcagtctcccttgtatcatagaaacacttattgaa

SEQ ID NO: 33590 - DNA, 40 bp, Homo sapiens
tcaataagtgtttctatgatacaagggagactgatgtggg

SEQ ID NO: 33591 - DNA, 40 bp, Homo sapiens
cccacatcagtctcccttgtatcatagaaacacttattga

SEQ ID NO: 33592 - DNA, 40 bp, Homo sapiens
caataagtgtttctatgatacaagggagactgatgtgggt

SEQ ID NO: 33593 - DNA, 40 bp, Homo sapiens
acccacatcagtctcccttgtatcatagaaacacttattg

SEQ ID NO: 33594 - DNA, 40 bp, Homo sapiens
aataagtgtttctatgatacaagggagactgatgtgggta

SEQ ID NO: 33595 - DNA, 40 bp, Homo sapiens
tacccacatcagtctcccttgtatcatagaaacacttatt

SEQ ID NO: 33596 - DNA, 40 bp, Homo sapiens
ataagtgtttctatgatacaagggagactgatgtgggtag

SEQ ID NO: 33597 - DNA, 40 bp, Homo sapiens
ctacccacatcagtctcccttgtatcatagaaacacttat

SEQ ID NO: 33598 - DNA, 40 bp, Homo sapiens
taagtgtttctatgatacaagggagactgatgtgggtaga

SEQ ID NO: 33599 - DNA, 40 bp, Homo sapiens
tctacccacatcagtctcccttgtatcatagaaacactta

SEQ ID NO: 33600 - DNA, 40 bp, Homo sapiens
aagtgtttctatgatacaagggagactgatgtgggtagat

SEQ ID NO: 33601 - DNA, 40 bp, Homo sapiens
atctacccacatcagtctcccttgtatcatagaaacactt

SEQ ID NO: 33602 - DNA, 40 bp, Homo sapiens
agtgtttctatgatacaagggagactgatgtgggtagatg

SEQ ID NO: 33603 - DNA, 40 bp, Homo sapiens
catctacccacatcagtctcccttgtatcatagaaacact

SEQ ID NO: 33604 - DNA, 40 bp, Homo sapiens
gtgtttctatgatacaagggagactgatgtgggtagatgg

SEQ ID NO: 33605 - DNA, 40 bp, Homo sapiens
ccatctacccacatcagtctcccttgtatcatagaaacac

SEQ ID NO: 33606 - DNA, 40 bp, Homo sapiens
tgtttctatgatacaagggagactgatgtgggtagatggg

SEQ ID NO: 33607 - DNA, 40 bp, Homo sapiens
cccatctacccacatcagtctcccttgtatcatagaaaca

SEQ ID NO: 33608 - DNA, 40 bp, Homo sapiens
gtttctatgatacaagggagactgatgtgggtagatggga

SEQ ID NO: 33609 - DNA, 40 bp, Homo sapiens
tcccatctacccacatcagtctcccttgtatcatagaaac

SEQ ID NO: 33610 - DNA, 40 bp, Homo sapiens
tttctatgatacaagggagactgatgtgggtagatgggaa

SEQ ID NO: 33611 - DNA, 40 bp, Homo sapiens
ttcccatctacccacatcagtctcccttgtatcatagaaa

SEQ ID NO: 33612 - DNA, 40 bp, Homo sapiens
ttctatgatacaagggagactgatgtgggtagatgggaat

SEQ ID NO: 33613 - DNA, 40 bp, Homo sapiens
attcccatctacccacatcagtctcccttgtatcatagaa

SEQ ID NO: 33614 - DNA, 40 bp, Homo sapiens
tctatgatacaagggagactgatgtgggtagatgggaatg

SEQ ID NO: 33615 - DNA, 40 bp, Homo sapiens
cattcccatctacccacatcagtctcccttgtatcataga

SEQ ID NO: 33616 - DNA, 40 bp, Homo sapiens
ctatgatacaagggagactgatgtgggtagatgggaatga

SEQ ID NO: 33617 - DNA, 40 bp, Homo sapiens
tcattcccatctacccacatcagtctcccttgtatcatag

SEQ ID NO: 33618 - DNA, 40 bp, Homo sapiens
tatgatacaagggagactgatgtgggtagatgggaatgaa

SEQ ID NO: 33619 - DNA, 40 bp, Homo sapiens
ttcattcccatctacccacatcagtctcccttgtatcata

SEQ ID NO: 33620 - DNA, 40 bp, Homo sapiens
atgatacaagggagactgatgtgggtagatgggaatgaac

SEQ ID NO: 33621 - DNA, 40 bp, Homo sapiens
gttcattcccatctacccacatcagtctcccttgtatcat

SEQ ID NO: 33622 - DNA, 40 bp, Homo sapiens
tgatacaagggagactgatgtgggtagatgggaatgaact

SEQ ID NO: 33623 - DNA, 40 bp, Homo sapiens
agttcattcccatctacccacatcagtctcccttgtatca

SEQ ID NO: 33624 - DNA, 40 bp, Homo sapiens
gatacaagggagactgatgtgggtagatgggaatgaactc

SEQ ID NO: 33625 - DNA, 40 bp, Homo sapiens
gagttcattcccatctacccacatcagtctcccttgtatc

SEQ ID NO: 33626 - DNA, 40 bp, Homo sapiens
atacaagggagactgatgtgggtagatgggaatgaactca

SEQ ID NO: 33627 - DNA, 40 bp, Homo sapiens
tgagttcattcccatctacccacatcagtctcccttgtat

SEQ ID NO: 33628 - DNA, 40 bp, Homo sapiens
tacaagggagactgatgtgggtagatgggaatgaactcat

SEQ ID NO: 33629 - DNA, 40 bp, Homo sapiens
atgagttcattcccatctacccacatcagtctcccttgta

SEQ ID NO: 33630 - DNA, 40 bp, Homo sapiens
acaagggagactgatgtgggtagatgggaatgaactcatc

SEQ ID NO: 33631 - DNA, 40 bp, Homo sapiens
gatgagttcattcccatctacccacatcagtctcccttgt

SEQ ID NO: 33632 - DNA, 40 bp, Homo sapiens
caagggagactgatgtgggtagatgggaatgaactcatca

SEQ ID NO: 33633 - DNA, 40 bp, Homo sapiens
tgatgagttcattcccatctacccacatcagtctcccttg

SEQ ID NO: 33634 - DNA, 40 bp, Homo sapiens
aagggagactgatgtgggtagatgggaatgaactcatcaa

SEQ ID NO: 33635 - DNA, 40 bp, Homo sapiens
ttgatgagttcattcccatctacccacatcagtctccctt

SEQ ID NO: 33636 - DNA, 40 bp, Homo sapiens
agggagactgatgtgggtagatgggaatgaactcatcaac

SEQ ID NO: 33637 - DNA, 40 bp, Homo sapiens
gttgatgagttcattcccatctacccacatcagtctccct

SEQ ID NO: 33638 - DNA, 40 bp, Homo sapiens
gggagactgatgtgggtagatgggaatgaactcatcaacc

SEQ ID NO: 33639 - DNA, 40 bp, Homo sapiens
ggttgatgagttcattcccatctacccacatcagtctccc

SEQ ID NO: 33640 - DNA, 40 bp, Homo sapiens
ggagactgatgtgggtagatgggaatgaactcatcaacct

SEQ ID NO: 33641 - DNA, 40 bp, Homo sapiens
aggttgatgagttcattcccatctacccacatcagtctcc

SEQ ID NO: 33642 - DNA, 40 bp, Homo sapiens
gagactgatgtgggtagatgggaatgaactcatcaacctc

SEQ ID NO: 33643 - DNA, 40 bp, Homo sapiens
gaggttgatgagttcattcccatctacccacatcagtctc

SEQ ID NO: 33644 - DNA, 40 bp, Homo sapiens
agactgatgtgggtagatgggaatgaactcatcaacctct

SEQ ID NO: 33645 - DNA, 40 bp, Homo sapiens
agaggttgatgagttcattcccatctacccacatcagtct

SEQ ID NO: 33646 - DNA, 40 bp, Homo sapiens
gactgatgtgggtagatgggaatgaactcatcaacctctg

SEQ ID NO: 33647 - DNA, 40 bp, Homo sapiens
cagaggttgatgagttcattcccatctacccacatcagtc

SEQ ID NO: 33648 - DNA, 40 bp, Homo sapiens
actgatgtgggtagatgggaatgaactcatcaacctctgt

SEQ ID NO: 33649 - DNA, 40 bp, Homo sapiens
acagaggttgatgagttcattcccatctacccacatcagt

SEQ ID NO: 33650 - DNA, 40 bp, Homo sapiens
ctgatgtgggtagatgggaatgaactcatcaacctctgtt

SEQ ID NO: 33651 - DNA, 40 bp, Homo sapiens
aacagaggttgatgagttcattcccatctacccacatcag

SEQ ID NO: 33652 - DNA, 40 bp, Homo sapiens
tgatgtgggtagatgggaatgaactcatcaacctctgttt

SEQ ID NO: 33653 - DNA, 40 bp, Homo sapiens
aaacagaggttgatgagttcattcccatctacccacatca

SEQ ID NO: 33654 - DNA, 40 bp, Homo sapiens
gatgtgggtagatgggaatgaactcatcaacctctgttta

SEQ ID NO: 33655 - DNA, 40 bp, Homo sapiens
taaacagaggttgatgagttcattcccatctacccacatc

SEQ ID NO: 33656 - DNA, 40 bp, Homo sapiens
atgtgggtagatgggaatgaactcatcaacctctgtttac

SEQ ID NO: 33657 - DNA, 40 bp, Homo sapiens
gtaaacagaggttgatgagttcattcccatctacccacat

SEQ ID NO: 33658 - DNA, 40 bp, Homo sapiens
tgtgggtagatgggaatgaactcatcaacctctgtttaca

SEQ ID NO: 33659 - DNA, 40 bp, Homo sapiens
tgtaaacagaggttgatgagttcattcccatctacccaca

SEQ ID NO: 33660 - DNA, 40 bp, Homo sapiens
gtgggtagatgggaatgaactcatcaacctctgtttacat

SEQ ID NO: 33661 - DNA, 40 bp, Homo sapiens
atgtaaacagaggttgatgagttcattcccatctacccac

SEQ ID NO: 33662 - DNA, 40 bp, Homo sapiens
tgggtagatgggaatgaactcatcaacctctgtttacata

SEQ ID NO: 33663 - DNA, 40 bp, Homo sapiens
tatgtaaacagaggttgatgagttcattcccatctaccca

SEQ ID NO: 33664 - DNA, 40 bp, Homo sapiens
gggtagatgggaatgaactcatcaacctctgtttacatac

SEQ ID NO: 33665 - DNA, 40 bp, Homo sapiens
gtatgtaaacagaggttgatgagttcattcccatctaccc

SEQ ID NO: 33666 - DNA, 40 bp, Homo sapiens
ggtagatgggaatgaactcatcaacctctgtttacatacc

SEQ ID NO: 33667 - DNA, 40 bp, Homo sapiens
ggtatgtaaacagaggttgatgagttcattcccatctacc

SEQ ID NO: 33668 - DNA, 40 bp, Homo sapiens
gtagatgggaatgaactcatcaacctctgtttacataccc

SEQ ID NO: 33669 - DNA, 40 bp, Homo sapiens
gggtatgtaaacagaggttgatgagttcattcccatctac

SEQ ID NO: 33670 - DNA, 40 bp, Homo sapiens
tagatgggaatgaactcatcaacctctgtttacataccct

SEQ ID NO: 33671 - DNA, 40 bp, Homo sapiens
agggtatgtaaacagaggttgatgagttcattcccatcta

SEQ ID NO: 33672 - DNA, 40 bp, Homo sapiens
agatgggaatgaactcatcaacctctgtttacatacccta

SEQ ID NO: 33673 - DNA, 40 bp, Homo sapiens
tagggtatgtaaacagaggttgatgagttcattcccatct

SEQ ID NO: 33674 - DNA, 40 bp, Homo sapiens
gatgggaatgaactcatcaacctctgtttacataccctaa

SEQ ID NO: 33675 - DNA, 40 bp, Homo sapiens
ttagggtatgtaaacagaggttgatgagttcattcccatc

SEQ ID NO: 33676 - DNA, 40 bp, Homo sapiens
atgggaatgaactcatcaacctctgtttacataccctaaa

SEQ ID NO: 33677 - DNA, 40 bp, Homo sapiens
tttagggtatgtaaacagaggttgatgagttcattcccat

SEQ ID NO: 33678 - DNA, 40 bp, Homo sapiens
tgggaatgaactcatcaacctctgtttacataccctaaat

SEQ ID NO: 33679 - DNA, 40 bp, Homo sapiens
atttagggtatgtaaacagaggttgatgagttcattccca

SEQ ID NO: 33680 - DNA, 40 bp, Homo sapiens
gggaatgaactcatcaacctctgtttacataccctaaatt

SEQ ID NO: 33681 - DNA, 40 bp, Homo sapiens
aatttagggtatgtaaacagaggttgatgagttcattccc

SEQ ID NO: 33682 - DNA, 40 bp, Homo sapiens
ggaatgaactcatcaacctctgtttacataccctaaattc

SEQ ID NO: 33683 - DNA, 40 bp, Homo sapiens
gaatttagggtatgtaaacagaggttgatgagttcattcc

SEQ ID NO: 33684 - DNA, 40 bp, Homo sapiens
gaatgaactcatcaacctctgtttacataccctaaattcc

SEQ ID NO: 33685 - DNA, 40 bp, Homo sapiens
ggaatttagggtatgtaaacagaggttgatgagttcattc

SEQ ID NO: 33686 - DNA, 40 bp, Homo sapiens
aatgaactcatcaacctctgtttacataccctaaattccc

SEQ ID NO: 33687 - DNA, 40 bp, Homo sapiens
gggaatttagggtatgtaaacagaggttgatgagttcatt

SEQ ID NO: 33688 - DNA, 40 bp, Homo sapiens
atgaactcatcaacctctgtttacataccctaaattccct

SEQ ID NO: 33689 - DNA, 40 bp, Homo sapiens
agggaatttagggtatgtaaacagaggttgatgagttcat

SEQ ID NO: 33690 - DNA, 40 bp, Homo sapiens
tgaactcatcaacctctgtttacataccctaaattccctg

SEQ ID NO: 33691 - DNA, 40 bp, Homo sapiens
cagggaatttagggtatgtaaacagaggttgatgagttca

SEQ ID NO: 33692 - DNA, 40 bp, Homo sapiens
gaactcatcaacctctgtttacataccctaaattccctgt

SEQ ID NO: 33693 - DNA, 40 bp, Homo sapiens
acagggaatttagggtatgtaaacagaggttgatgagttc

SEQ ID NO: 33694 - DNA, 40 bp, Homo sapiens
aactcatcaacctctgtttacataccctaaattccctgtt

SEQ ID NO: 33695 - DNA, 40 bp, Homo sapiens
aacagggaatttagggtatgtaaacagaggttgatgagtt

SEQ ID NO: 33696 - DNA, 40 bp, Homo sapiens
actcatcaacctctgtttacataccctaaattccctgttt

SEQ ID NO: 33697 - DNA, 40 bp, Homo sapiens
aaacagggaatttagggtatgtaaacagaggttgatgagt

SEQ ID NO: 33698 - DNA, 40 bp, Homo sapiens
ctcatcaacctctgtttacataccctaaattccctgtttc

SEQ ID NO: 33699 - DNA, 40 bp, Homo sapiens
gaaacagggaatttagggtatgtaaacagaggttgatgag

SEQ ID NO: 33700 - DNA, 40 bp, Homo sapiens
tcatcaacctctgtttacataccctaaattccctgtttct

SEQ ID NO: 33701 - DNA, 40 bp, Homo sapiens
agaaacagggaatttagggtatgtaaacagaggttgatga

SEQ ID NO: 33702 - DNA, 40 bp, Homo sapiens
catcaacctctgtttacataccctaaattccctgtttctt

SEQ ID NO: 33703 - DNA, 40 bp, Homo sapiens
aagaaacagggaatttagggtatgtaaacagaggttgatg

SEQ ID NO: 33704 - DNA, 40 bp, Homo sapiens
atcaacctctgtttacataccctaaattccctgtttcttc

SEQ ID NO: 33705 - DNA, 40 bp, Homo sapiens
gaagaaacagggaatttagggtatgtaaacagaggttgat

SEQ ID NO: 33706 - DNA, 40 bp, Homo sapiens
tcaacctctgtttacataccctaaattccctgtttcttcc

SEQ ID NO: 33707 - DNA, 40 bp, Homo sapiens
ggaagaaacagggaatttagggtatgtaaacagaggttga

SEQ ID NO: 33708 - DNA, 40 bp, Homo sapiens
caacctctgtttacataccctaaattccctgtttcttccc

SEQ ID NO: 33709 - DNA, 40 bp, Homo sapiens
gggaagaaacagggaatttagggtatgtaaacagaggttg

SEQ ID NO: 33710 - DNA, 40 bp, Homo sapiens
aacctctgtttacataccctaaattccctgtttcttccct

SEQ ID NO: 33711 - DNA, 40 bp, Homo sapiens
agggaagaaacagggaatttagggtatgtaaacagaggtt

SEQ ID NO: 33712 - DNA, 40 bp, Homo sapiens
acctctgtttacataccctaaattccctgtttcttcccta

SEQ ID NO: 33713 - DNA, 40 bp, Homo sapiens
tagggaagaaacagggaatttagggtatgtaaacagaggt

SEQ ID NO: 33714 - DNA, 40 bp, Homo sapiens
cctctgtttacataccctaaattccctgtttcttccctat

SEQ ID NO: 33715 - DNA, 40 bp, Homo sapiens
atagggaagaaacagggaatttagggtatgtaaacagagg

SEQ ID NO: 33716 - DNA, 40 bp, Homo sapiens
ctctgtttacataccctaaattccctgtttcttccctatt

SEQ ID NO: 33717 - DNA, 40 bp, Homo sapiens
aatagggaagaaacagggaatttagggtatgtaaacagag

SEQ ID NO: 33718 - DNA, 40 bp, Homo sapiens
tctgtttacataccctaaattccctgtttcttccctatta

SEQ ID NO: 33719 - DNA, 40 bp, Homo sapiens
taatagggaagaaacagggaatttagggtatgtaaacaga

SEQ ID NO: 33720 - DNA, 40 bp, Homo sapiens
ctgtttacataccctaaattccctgtttcttccctattat

SEQ ID NO: 33721 - DNA, 40 bp, Homo sapiens
ataatagggaagaaacagggaatttagggtatgtaaacag

SEQ ID NO: 33722 - DNA, 40 bp, Homo sapiens
tgtttacataccctaaattccctgtttcttccctattata

SEQ ID NO: 33723 - DNA, 40 bp, Homo sapiens
tataatagggaagaaacagggaatttagggtatgtaaaca

SEQ ID NO: 33724 - DNA, 40 bp, Homo sapiens
gtttacataccctaaattccctgtttcttccctattataa

SEQ ID NO: 33725 - DNA, 40 bp, Homo sapiens
ttataatagggaagaaacagggaatttagggtatgtaaac

SEQ ID NO: 33726 - DNA, 40 bp, Homo sapiens
tttacataccctaaattccctgtttcttccctattataat

SEQ ID NO: 33727 - DNA, 40 bp, Homo sapiens
attataatagggaagaaacagggaatttagggtatgtaaa

SEQ ID NO: 33728 - DNA, 40 bp, Homo sapiens
ttacataccctaaattccctgtttcttccctattataatt

SEQ ID NO: 33729 - DNA, 40 bp, Homo sapiens
aattataatagggaagaaacagggaatttagggtatgtaa

SEQ ID NO: 33730 - DNA, 40 bp, Homo sapiens
tacataccctaaattccctgtttcttccctattataattc

SEQ ID NO: 33731 - DNA, 40 bp, Homo sapiens
gaattataatagggaagaaacagggaatttagggtatgta

SEQ ID NO: 33732 - DNA, 40 bp, Homo sapiens
acataccctaaattccctgtttcttccctattataattct

SEQ ID NO: 33733 - DNA, 40 bp, Homo sapiens
agaattataatagggaagaaacagggaatttagggtatgt

SEQ ID NO: 33734 - DNA, 40 bp, Homo sapiens
cataccctaaattccctgtttcttccctattataattctg

SEQ ID NO: 33735 - DNA, 40 bp, Homo sapiens
cagaattataatagggaagaaacagggaatttagggtatg

SEQ ID NO: 33736 - DNA, 40 bp, Homo sapiens
ataccctaaattccctgtttcttccctattataattctga

SEQ ID NO: 33737 - DNA, 40 bp, Homo sapiens
tcagaattataatagggaagaaacagggaatttagggtat

SEQ ID NO: 33738 - DNA, 40 bp, Homo sapiens
taccctaaattccctgtttcttccctattataattctgac

SEQ ID NO: 33739 - DNA, 40 bp, Homo sapiens
gtcagaattataatagggaagaaacagggaatttagggta

SEQ ID NO: 33740 - DNA, 40 bp, Homo sapiens
accctaaattccctgtttcttccctattataattctgaca

SEQ ID NO: 33741 - DNA, 40 bp, Homo sapiens
tgtcagaattataatagggaagaaacagggaatttagggt

SEQ ID NO: 33742 - DNA, 40 bp, Homo sapiens
ccctaaattccctgtttcttccctattataattctgacag

SEQ ID NO: 33743 - DNA, 40 bp, Homo sapiens
ctgtcagaattataatagggaagaaacagggaatttaggg

SEQ ID NO: 33744 - DNA, 40 bp, Homo sapiens
cctaaattccctgtttcttccctattataattctgacagt

SEQ ID NO: 33745 - DNA, 40 bp, Homo sapiens
actgtcagaattataatagggaagaaacagggaatttagg

SEQ ID NO: 33746 - DNA, 40 bp, Homo sapiens
ctaaattccctgtttcttccctattataattctgacagtc

SEQ ID NO: 33747 - DNA, 40 bp, Homo sapiens
gactgtcagaattataatagggaagaaacagggaatttag

SEQ ID NO: 33748 - DNA, 40 bp, Homo sapiens
taaattccctgtttcttccctattataattctgacagtct

SEQ ID NO: 33749 - DNA, 40 bp, Homo sapiens
agactgtcagaattataatagggaagaaacagggaattta

SEQ ID NO: 33750 - DNA, 40 bp, Homo sapiens
aaattccctgtttcttccctattataattctgacagtcta

SEQ ID NO: 33751 - DNA, 40 bp, Homo sapiens
tagactgtcagaattataatagggaagaaacagggaattt

SEQ ID NO: 33752 - DNA, 40 bp, Homo sapiens
aattccctgtttcttccctattataattctgacagtctac

SEQ ID NO: 33753 - DNA, 40 bp, Homo sapiens
gtagactgtcagaattataatagggaagaaacagggaatt

SEQ ID NO: 33754 - DNA, 40 bp, Homo sapiens
attccctgtttcttccctattataattctgacagtctaca

SEQ ID NO: 33755 - DNA, 40 bp, Homo sapiens
tgtagactgtcagaattataatagggaagaaacagggaat

SEQ ID NO: 33756 - DNA, 40 bp, Homo sapiens
ttccctgtttcttccctattataattctgacagtctacaa

SEQ ID NO: 33757 - DNA, 40 bp, Homo sapiens
ttgtagactgtcagaattataatagggaagaaacagggaa

SEQ ID NO: 33758 - DNA, 40 bp, Homo sapiens
tccctgtttcttccctattataattctgacagtctacaac

SEQ ID NO: 33759 - DNA, 40 bp, Homo sapiens
gttgtagactgtcagaattataatagggaagaaacaggga

SEQ ID NO: 33760 - DNA, 40 bp, Homo sapiens
ccctgtttcttccctattataattctgacagtctacaacc

SEQ ID NO: 33761 - DNA, 40 bp, Homo sapiens
ggttgtagactgtcagaattataatagggaagaaacaggg

SEQ ID NO: 33762 - DNA, 40 bp, Homo sapiens
cctgtttcttccctattataattctgacagtctacaaccg

SEQ ID NO: 33763 - DNA, 40 bp, Homo sapiens
cggttgtagactgtcagaattataatagggaagaaacagg

SEQ ID NO: 33764 - DNA, 40 bp, Homo sapiens
ctgtttcttccctattataattctgacagtctacaaccgt

SEQ ID NO: 33765 - DNA, 40 bp, Homo sapiens
acggttgtagactgtcagaattataatagggaagaaacag

SEQ ID NO: 33766 - DNA, 40 bp, Homo sapiens
tgtttcttccctattataattctgacagtctacaaccgtc

SEQ ID NO: 33767 - DNA, 40 bp, Homo sapiens
gacggttgtagactgtcagaattataatagggaagaaaca

SEQ ID NO: 33768 - DNA, 40 bp, Homo sapiens
gtttcttccctattataattctgacagtctacaaccgtct

SEQ ID NO: 33769 - DNA, 40 bp, Homo sapiens
agacggttgtagactgtcagaattataatagggaagaaac

SEQ ID NO: 33770 - DNA, 40 bp, Homo sapiens
tttcttccctattataattctgacagtctacaaccgtctt

SEQ ID NO: 33771 - DNA, 40 bp, Homo sapiens
aagacggttgtagactgtcagaattataatagggaagaaa

SEQ ID NO: 33772 - DNA, 40 bp, Homo sapiens
ttcttccctattataattctgacagtctacaaccgtcttt

SEQ ID NO: 33773 - DNA, 40 bp, Homo sapiens
aaagacggttgtagactgtcagaattataatagggaagaa

SEQ ID NO: 33774 - DNA, 40 bp, Homo sapiens
tcttccctattataattctgacagtctacaaccgtctttg

SEQ ID NO: 33775 - DNA, 40 bp, Homo sapiens
caaagacggttgtagactgtcagaattataatagggaaga

SEQ ID NO: 33776 - DNA, 40 bp, Homo sapiens
cttccctattataattctgacagtctacaaccgtctttga

SEQ ID NO: 33777 - DNA, 40 bp, Homo sapiens
tcaaagacggttgtagactgtcagaattataatagggaag

SEQ ID NO: 33778 - DNA, 40 bp, Homo sapiens
ttccctattataattctgacagtctacaaccgtctttgat

SEQ ID NO: 33779 - DNA, 40 bp, Homo sapiens
atcaaagacggttgtagactgtcagaattataatagggaa

SEQ ID NO: 33780 - DNA, 40 bp, Homo sapiens
tccctattataattctgacagtctacaaccgtctttgatg

SEQ ID NO: 33781 - DNA, 40 bp, Homo sapiens
catcaaagacggttgtagactgtcagaattataataggga

SEQ ID NO: 33782 - DNA, 40 bp, Homo sapiens
ccctattataattctgacagtctacaaccgtctttgatgg

SEQ ID NO: 33783 - DNA, 40 bp, Homo sapiens
ccatcaaagacggttgtagactgtcagaattataataggg

SEQ ID NO: 33784 - DNA, 40 bp, Homo sapiens
cctattataattctgacagtctacaaccgtctttgatggc

SEQ ID NO: 33785 - DNA, 40 bp, Homo sapiens
gccatcaaagacggttgtagactgtcagaattataatagg

SEQ ID NO: 33786 - DNA, 40 bp, Homo sapiens
ctattataattctgacagtctacaaccgtctttgatggct

SEQ ID NO: 33787 - DNA, 40 bp, Homo sapiens
agccatcaaagacggttgtagactgtcagaattataatag

SEQ ID NO: 33788 - DNA, 40 bp, Homo sapiens
tattataattctgacagtctacaaccgtctttgatggctt

SEQ ID NO: 33789 - DNA, 40 bp, Homo sapiens
aagccatcaaagacggttgtagactgtcagaattataata

SEQ ID NO: 33790 - DNA, 40 bp, Homo sapiens
attataattctgacagtctacaaccgtctttgatggctta

SEQ ID NO: 33791 - DNA, 40 bp, Homo sapiens
taagccatcaaagacggttgtagactgtcagaattataat

SEQ ID NO: 33792 - DNA, 40 bp, Homo sapiens
ttataattctgacagtctacaaccgtctttgatggcttat

SEQ ID NO: 33793 - DNA, 40 bp, Homo sapiens
ataagccatcaaagacggttgtagactgtcagaattataa

SEQ ID NO: 33794 - DNA, 40 bp, Homo sapiens
tataattctgacagtctacaaccgtctttgatggcttata

SEQ ID NO: 33795 - DNA, 40 bp, Homo sapiens
tataagccatcaaagacggttgtagactgtcagaattata

SEQ ID NO: 33796 - DNA, 40 bp, Homo sapiens
ataattctgacagtctacaaccgtctttgatggcttataa

SEQ ID NO: 33797 - DNA, 40 bp, Homo sapiens
ttataagccatcaaagacggttgtagactgtcagaattat

SEQ ID NO: 33798 - DNA, 40 bp, Homo sapiens
taattctgacagtctacaaccgtctttgatggcttataaa

SEQ ID NO: 33799 - DNA, 40 bp, Homo sapiens
tttataagccatcaaagacggttgtagactgtcagaatta

SEQ ID NO: 33800 - DNA, 40 bp, Homo sapiens
aattctgacagtctacaaccgtctttgatggcttataaac

SEQ ID NO: 33801 - DNA, 40 bp, Homo sapiens
gtttataagccatcaaagacggttgtagactgtcagaatt

SEQ ID NO: 33802 - DNA, 40 bp, Homo sapiens
attctgacagtctacaaccgtctttgatggcttataaacg

SEQ ID NO: 33803 - DNA, 40 bp, Homo sapiens
cgtttataagccatcaaagacggttgtagactgtcagaat

SEQ ID NO: 33804 - DNA, 40 bp, Homo sapiens
ttctgacagtctacaaccgtctttgatggcttataaacgg

SEQ ID NO: 33805 - DNA, 40 bp, Homo sapiens
ccgtttataagccatcaaagacggttgtagactgtcagaa

SEQ ID NO: 33806 - DNA, 40 bp, Homo sapiens
tctgacagtctacaaccgtctttgatggcttataaacgga

SEQ ID NO: 33807 - DNA, 40 bp, Homo sapiens
tccgtttataagccatcaaagacggttgtagactgtcaga

SEQ ID NO: 33808 - DNA, 40 bp, Homo sapiens
ctgacagtctacaaccgtctttgatggcttataaacggaa

SEQ ID NO: 33809 - DNA, 40 bp, Homo sapiens
ttccgtttataagccatcaaagacggttgtagactgtcag

SEQ ID NO: 33810 - DNA, 40 bp, Homo sapiens
tgacagtctacaaccgtctttgatggcttataaacggaaa

SEQ ID NO: 33811 - DNA, 40 bp, Homo sapiens
tttccgtttataagccatcaaagacggttgtagactgtca

SEQ ID NO: 33812 - DNA, 40 bp, Homo sapiens
gacagtctacaaccgtctttgatggcttataaacggaaag

SEQ ID NO: 33813 - DNA, 40 bp, Homo sapiens
ctttccgtttataagccatcaaagacggttgtagactgtc

SEQ ID NO: 33814 - DNA, 40 bp, Homo sapiens
acagtctacaaccgtctttgatggcttataaacggaaagt

SEQ ID NO: 33815 - DNA, 40 bp, Homo sapiens
actttccgtttataagccatcaaagacggttgtagactgt

SEQ ID NO: 33816 - DNA, 40 bp, Homo sapiens
cagtctacaaccgtctttgatggcttataaacggaaagtg

SEQ ID NO: 33817 - DNA, 40 bp, Homo sapiens
cactttccgtttataagccatcaaagacggttgtagactg

SEQ ID NO: 33818 - DNA, 40 bp, Homo sapiens
agtctacaaccgtctttgatggcttataaacggaaagtgc

SEQ ID NO: 33819 - DNA, 40 bp, Homo sapiens
gcactttccgtttataagccatcaaagacggttgtagact

SEQ ID NO: 33820 - DNA, 40 bp, Homo sapiens
gtctacaaccgtctttgatggcttataaacggaaagtgcg

SEQ ID NO: 33821 - DNA, 40 bp, Homo sapiens
cgcactttccgtttataagccatcaaagacggttgtagac

SEQ ID NO: 33822 - DNA, 40 bp, Homo sapiens
tctacaaccgtctttgatggcttataaacggaaagtgcgg

SEQ ID NO: 33823 - DNA, 40 bp, Homo sapiens
ccgcactttccgtttataagccatcaaagacggttgtaga

SEQ ID NO: 33824 - DNA, 40 bp, Homo sapiens
ctacaaccgtctttgatggcttataaacggaaagtgcgga

SEQ ID NO: 33825 - DNA, 40 bp, Homo sapiens
tccgcactttccgtttataagccatcaaagacggttgtag

SEQ ID NO: 33826 - DNA, 40 bp, Homo sapiens
tacaaccgtctttgatggcttataaacggaaagtgcggaa

SEQ ID NO: 33827 - DNA, 40 bp, Homo sapiens
ttccgcactttccgtttataagccatcaaagacggttgta

SEQ ID NO: 33828 - DNA, 40 bp, Homo sapiens
acaaccgtctttgatggcttataaacggaaagtgcggaac

SEQ ID NO: 33829 - DNA, 40 bp, Homo sapiens
gttccgcactttccgtttataagccatcaaagacggttgt

SEQ ID NO: 33830 - DNA, 40 bp, Homo sapiens
caaccgtctttgatggcttataaacggaaagtgcggaaca

SEQ ID NO: 33831 - DNA, 40 bp, Homo sapiens
tgttccgcactttccgtttataagccatcaaagacggttg

SEQ ID NO: 33832 - DNA, 40 bp, Homo sapiens
aaccgtctttgatggcttataaacggaaagtgcggaacac

SEQ ID NO: 33833 - DNA, 40 bp, Homo sapiens
gtgttccgcactttccgtttataagccatcaaagacggtt

SEQ ID NO: 33834 - DNA, 40 bp, Homo sapiens
accgtctttgatggcttataaacggaaagtgcggaacaca

SEQ ID NO: 33835 - DNA, 40 bp, Homo sapiens
tgtgttccgcactttccgtttataagccatcaaagacggt

SEQ ID NO: 33836 - DNA, 40 bp, Homo sapiens
ccgtctttgatggcttataaacggaaagtgcggaacacat

SEQ ID NO: 33837 - DNA, 40 bp, Homo sapiens
atgtgttccgcactttccgtttataagccatcaaagacgg

SEQ ID NO: 33838 - DNA, 40 bp, Homo sapiens
cgtctttgatggcttataaacggaaagtgcggaacacatc

SEQ ID NO: 33839 - DNA, 40 bp, Homo sapiens
gatgtgttccgcactttccgtttataagccatcaaagacg

SEQ ID NO: 33840 - DNA, 40 bp, Homo sapiens
gtctttgatggcttataaacggaaagtgcggaacacatca

SEQ ID NO: 33841 - DNA, 40 bp, Homo sapiens
tgatgtgttccgcactttccgtttataagccatcaaagac

SEQ ID NO: 33842 - DNA, 40 bp, Homo sapiens
tctttgatggcttataaacggaaagtgcggaacacatcat

SEQ ID NO: 33843 - DNA, 40 bp, Homo sapiens
atgatgtgttccgcactttccgtttataagccatcaaaga

SEQ ID NO: 33844 - DNA, 40 bp, Homo sapiens
ctttgatggcttataaacggaaagtgcggaacacatcatt

SEQ ID NO: 33845 - DNA, 40 bp, Homo sapiens
aatgatgtgttccgcactttccgtttataagccatcaaag

SEQ ID NO: 33846 - DNA, 40 bp, Homo sapiens
tttgatggcttataaacggaaagtgcggaacacatcattc

SEQ ID NO: 33847 - DNA, 40 bp, Homo sapiens
gaatgatgtgttccgcactttccgtttataagccatcaaa

SEQ ID NO: 33848 - DNA, 40 bp, Homo sapiens
ttgatggcttataaacggaaagtgcggaacacatcattct

SEQ ID NO: 33849 - DNA, 40 bp, Homo sapiens
agaatgatgtgttccgcactttccgtttataagccatcaa

SEQ ID NO: 33850 - DNA, 40 bp, Homo sapiens
tgatggcttataaacggaaagtgcggaacacatcattcta

SEQ ID NO: 33851 - DNA, 40 bp, Homo sapiens
tagaatgatgtgttccgcactttccgtttataagccatca

SEQ ID NO: 33852 - DNA, 40 bp, Homo sapiens
gatggcttataaacggaaagtgcggaacacatcattctac

SEQ ID NO: 33853 - DNA, 40 bp, Homo sapiens
gtagaatgatgtgttccgcactttccgtttataagccatc

SEQ ID NO: 33854 - DNA, 40 bp, Homo sapiens
atggcttataaacggaaagtgcggaacacatcattctaca

SEQ ID NO: 33855 - DNA, 40 bp, Homo sapiens
tgtagaatgatgtgttccgcactttccgtttataagccat

SEQ ID NO: 33856 - DNA, 40 bp, Homo sapiens
tggcttataaacggaaagtgcggaacacatcattctacag

SEQ ID NO: 33857 - DNA, 40 bp, Homo sapiens
ctgtagaatgatgtgttccgcactttccgtttataagcca

SEQ ID NO: 33858 - DNA, 40 bp, Homo sapiens
ggcttataaacggaaagtgcggaacacatcattctacagt

SEQ ID NO: 33859 - DNA, 40 bp, Homo sapiens
actgtagaatgatgtgttccgcactttccgtttataagcc

SEQ ID NO: 33860 - DNA, 40 bp, Homo sapiens
gcttataaacggaaagtgcggaacacatcattctacagtg

SEQ ID NO: 33861 - DNA, 40 bp, Homo sapiens
cactgtagaatgatgtgttccgcactttccgtttataagc

SEQ ID NO: 33862 - DNA, 40 bp, Homo sapiens
cttataaacggaaagtgcggaacacatcattctacagtga

SEQ ID NO: 33863 - DNA, 40 bp, Homo sapiens
tcactgtagaatgatgtgttccgcactttccgtttataag

SEQ ID NO: 33864 - DNA, 40 bp, Homo sapiens
ttataaacggaaagtgcggaacacatcattctacagtgaa

SEQ ID NO: 33865 - DNA, 40 bp, Homo sapiens
ttcactgtagaatgatgtgttccgcactttccgtttataa

SEQ ID NO: 33866 - DNA, 40 bp, Homo sapiens
tataaacggaaagtgcggaacacatcattctacagtgaat

SEQ ID NO: 33867 - DNA, 40 bp, Homo sapiens
attcactgtagaatgatgtgttccgcactttccgtttata

SEQ ID NO: 33868 - DNA, 40 bp, Homo sapiens
ataaacggaaagtgcggaacacatcattctacagtgaatt

SEQ ID NO: 33869 - DNA, 40 bp, Homo sapiens
aattcactgtagaatgatgtgttccgcactttccgtttat

SEQ ID NO: 33870 - DNA, 40 bp, Homo sapiens
taaacggaaagtgcggaacacatcattctacagtgaattt

SEQ ID NO: 33871 - DNA, 40 bp, Homo sapiens
aaattcactgtagaatgatgtgttccgcactttccgttta

SEQ ID NO: 33872 - DNA, 40 bp, Homo sapiens
aaacggaaagtgcggaacacatcattctacagtgaattta

SEQ ID NO: 33873 - DNA, 40 bp, Homo sapiens
taaattcactgtagaatgatgtgttccgcactttccgttt

SEQ ID NO: 33874 - DNA, 40 bp, Homo sapiens
aacggaaagtgcggaacacatcattctacagtgaatttaa

SEQ ID NO: 33875 - DNA, 40 bp, Homo sapiens
ttaaattcactgtagaatgatgtgttccgcactttccgtt

SEQ ID NO: 33876 - DNA, 40 bp, Homo sapiens
acggaaagtgcggaacacatcattctacagtgaatttaaa

SEQ ID NO: 33877 - DNA, 40 bp, Homo sapiens
tttaaattcactgtagaatgatgtgttccgcactttccgt

SEQ ID NO: 33878 - DNA, 40 bp, Homo sapiens
cggaaagtgcggaacacatcattctacagtgaatttaaat

SEQ ID NO: 33879 - DNA, 40 bp, Homo sapiens
atttaaattcactgtagaatgatgtgttccgcactttccg

SEQ ID NO: 33880 - DNA, 40 bp, Homo sapiens
ggaaagtgcggaacacatcattctacagtgaatttaaata

SEQ ID NO: 33881 - DNA, 40 bp, Homo sapiens
tatttaaattcactgtagaatgatgtgttccgcactttcc

SEQ ID NO: 33882 - DNA, 40 bp, Homo sapiens
gaaagtgcggaacacatcattctacagtgaatttaaataa

SEQ ID NO: 33883 - DNA, 40 bp, Homo sapiens
ttatttaaattcactgtagaatgatgtgttccgcactttc

SEQ ID NO: 33884 - DNA, 40 bp, Homo sapiens
aaagtgcggaacacatcattctacagtgaatttaaataac

SEQ ID NO: 33885 - DNA, 40 bp, Homo sapiens
gttatttaaattcactgtagaatgatgtgttccgcacttt

SEQ ID NO: 33886 - DNA, 40 bp, Homo sapiens
aagtgcggaacacatcattctacagtgaatttaaataacc

SEQ ID NO: 33887 - DNA, 40 bp, Homo sapiens
ggttatttaaattcactgtagaatgatgtgttccgcactt

SEQ ID NO: 33888 - DNA, 40 bp, Homo sapiens
agtgcggaacacatcattctacagtgaatttaaataacct

SEQ ID NO: 33889 - DNA, 40 bp, Homo sapiens
aggttatttaaattcactgtagaatgatgtgttccgcact

SEQ ID NO: 33890 - DNA, 40 bp, Homo sapiens
gtgcggaacacatcattctacagtgaatttaaataacctt

SEQ ID NO: 33891 - DNA, 40 bp, Homo sapiens
aaggttatttaaattcactgtagaatgatgtgttccgcac

SEQ ID NO: 33892 - DNA, 40 bp, Homo sapiens
tgcggaacacatcattctacagtgaatttaaataaccttt

SEQ ID NO: 33893 - DNA, 40 bp, Homo sapiens
aaaggttatttaaattcactgtagaatgatgtgttccgca

SEQ ID NO: 33894 - DNA, 40 bp, Homo sapiens
gcggaacacatcattctacagtgaatttaaataacctttc

SEQ ID NO: 33895 - DNA, 40 bp, Homo sapiens
gaaaggttatttaaattcactgtagaatgatgtgttccgc

SEQ ID NO: 33896 - DNA, 40 bp, Homo sapiens
cggaacacatcattctacagtgaatttaaataacctttcg

SEQ ID NO: 33897 - DNA, 40 bp, Homo sapiens
cgaaaggttatttaaattcactgtagaatgatgtgttccg

SEQ ID NO: 33898 - DNA, 40 bp, Homo sapiens
ggaacacatcattctacagtgaatttaaataacctttcgg

SEQ ID NO: 33899 - DNA, 40 bp, Homo sapiens
ccgaaaggttatttaaattcactgtagaatgatgtgttcc

SEQ ID NO: 33900 - DNA, 40 bp, Homo sapiens
gaacacatcattctacagtgaatttaaataacctttcgga

SEQ ID NO: 33901 - DNA, 40 bp, Homo sapiens
tccgaaaggttatttaaattcactgtagaatgatgtgttc

SEQ ID NO: 33902 - DNA, 40 bp, Homo sapiens
aacacatcattctacagtgaatttaaataacctttcggaa

SEQ ID NO: 33903 - DNA, 40 bp, Homo sapiens
ttccgaaaggttatttaaattcactgtagaatgatgtgtt

SEQ ID NO: 33904 - DNA, 40 bp, Homo sapiens
acacatcattctacagtgaatttaaataacctttcggaag

SEQ ID NO: 33905 - DNA, 40 bp, Homo sapiens
cttccgaaaggttatttaaattcactgtagaatgatgtgt

SEQ ID NO: 33906 - DNA, 40 bp, Homo sapiens
cacatcattctacagtgaatttaaataacctttcggaaga

SEQ ID NO: 33907 - DNA, 40 bp, Homo sapiens
tcttccgaaaggttatttaaattcactgtagaatgatgtg

SEQ ID NO: 33908 - DNA, 40 bp, Homo sapiens
acatcattctacagtgaatttaaataacctttcggaagag

SEQ ID NO: 33909 - DNA, 40 bp, Homo sapiens
ctcttccgaaaggttatttaaattcactgtagaatgatgt

SEQ ID NO: 33910 - DNA, 40 bp, Homo sapiens
catcattctacagtgaatttaaataacctttcggaagagt

SEQ ID NO: 33911 - DNA, 40 bp, Homo sapiens
actcttccgaaaggttatttaaattcactgtagaatgatg

SEQ ID NO: 33912 - DNA, 40 bp, Homo sapiens
atcattctacagtgaatttaaataacctttcggaagagta

SEQ ID NO: 33913 - DNA, 40 bp, Homo sapiens
tactcttccgaaaggttatttaaattcactgtagaatgat

SEQ ID NO: 33914 - DNA, 40 bp, Homo sapiens
tcattctacagtgaatttaaataacctttcggaagagtaa

SEQ ID NO: 33915 - DNA, 40 bp, Homo sapiens
ttactcttccgaaaggttatttaaattcactgtagaatga

SEQ ID NO: 33916 - DNA, 40 bp, Homo sapiens
cattctacagtgaatttaaataacctttcggaagagtaac

SEQ ID NO: 33917 - DNA, 40 bp, Homo sapiens
gttactcttccgaaaggttatttaaattcactgtagaatg

SEQ ID NO: 33918 - DNA, 40 bp, Homo sapiens
attctacagtgaatttaaataacctttcggaagagtaacg

SEQ ID NO: 33919 - DNA, 40 bp, Homo sapiens
cgttactcttccgaaaggttatttaaattcactgtagaat

SEQ ID NO: 33920 - DNA, 40 bp, Homo sapiens
ttctacagtgaatttaaataacctttcggaagagtaacgt

SEQ ID NO: 33921 - DNA, 40 bp, Homo sapiens
acgttactcttccgaaaggttatttaaattcactgtagaa

SEQ ID NO: 33922 - DNA, 40 bp, Homo sapiens
tctacagtgaatttaaataacctttcggaagagtaacgta

SEQ ID NO: 33923 - DNA, 40 bp, Homo sapiens
tacgttactcttccgaaaggttatttaaattcactgtaga

SEQ ID NO: 33924 - DNA, 40 bp, Homo sapiens
ctacagtgaatttaaataacctttcggaagagtaacgtaa

SEQ ID NO: 33925 - DNA, 40 bp, Homo sapiens
ttacgttactcttccgaaaggttatttaaattcactgtag

SEQ ID NO: 33926 - DNA, 40 bp, Homo sapiens
tacagtgaatttaaataacctttcggaagagtaacgtaaa

SEQ ID NO: 33927 - DNA, 40 bp, Homo sapiens
tttacgttactcttccgaaaggttatttaaattcactgta

SEQ ID NO: 33928 - DNA, 40 bp, Homo sapiens
acagtgaatttaaataacctttcggaagagtaacgtaaag

SEQ ID NO: 33929 - DNA, 40 bp, Homo sapiens
ctttacgttactcttccgaaaggttatttaaattcactgt

SEQ ID NO: 33930 - DNA, 40 bp, Homo sapiens
cagtgaatttaaataacctttcggaagagtaacgtaaagt

SEQ ID NO: 33931 - DNA, 40 bp, Homo sapiens
actttacgttactcttccgaaaggttatttaaattcactg

SEQ ID NO: 33932 - DNA, 40 bp, Homo sapiens
agtgaatttaaataacctttcggaagagtaacgtaaagta

SEQ ID NO: 33933 - DNA, 40 bp, Homo sapiens
tactttacgttactcttccgaaaggttatttaaattcact

SEQ ID NO: 33934 - DNA, 40 bp, Homo sapiens
gtgaatttaaataacctttcggaagagtaacgtaaagtac

SEQ ID NO: 33935 - DNA, 40 bp, Homo sapiens
gtactttacgttactcttccgaaaggttatttaaattcac

SEQ ID NO: 33936 - DNA, 40 bp, Homo sapiens
tgaatttaaataacctttcggaagagtaacgtaaagtact

SEQ ID NO: 33937 - DNA, 40 bp, Homo sapiens
agtactttacgttactcttccgaaaggttatttaaattca

SEQ ID NO: 33938 - DNA, 40 bp, Homo sapiens
gaatttaaataacctttcggaagagtaacgtaaagtactt

SEQ ID NO: 33939 - DNA, 40 bp, Homo sapiens
aagtactttacgttactcttccgaaaggttatttaaattc

SEQ ID NO: 33940 - DNA, 40 bp, Homo sapiens
aatttaaataacctttcggaagagtaacgtaaagtacttg

SEQ ID NO: 33941 - DNA, 40 bp, Homo sapiens
caagtactttacgttactcttccgaaaggttatttaaatt

SEQ ID NO: 33942 - DNA, 40 bp, Homo sapiens
atttaaataacctttcggaagagtaacgtaaagtacttga

SEQ ID NO: 33943 - DNA, 40 bp, Homo sapiens
tcaagtactttacgttactcttccgaaaggttatttaaat

SEQ ID NO: 33944 - DNA, 40 bp, Homo sapiens
tttaaataacctttcggaagagtaacgtaaagtacttgag

SEQ ID NO: 33945 - DNA, 40 bp, Homo sapiens
ctcaagtactttacgttactcttccgaaaggttatttaaa

SEQ ID NO: 33946 - DNA, 40 bp, Homo sapiens
ttaaataacctttcggaagagtaacgtaaagtacttgagc

SEQ ID NO: 33947 - DNA, 40 bp, Homo sapiens
gctcaagtactttacgttactcttccgaaaggttatttaa

SEQ ID NO: 33948 - DNA, 40 bp, Homo sapiens
taaataacctttcggaagagtaacgtaaagtacttgagca

SEQ ID NO: 33949 - DNA, 40 bp, Homo sapiens
tgctcaagtactttacgttactcttccgaaaggttattta

SEQ ID NO: 33950 - DNA, 40 bp, Homo sapiens
aaataacctttcggaagagtaacgtaaagtacttgagcat

SEQ ID NO: 33951 - DNA, 40 bp, Homo sapiens
atgctcaagtactttacgttactcttccgaaaggttattt

SEQ ID NO: 33952 - DNA, 40 bp, Homo sapiens
aataacctttcggaagagtaacgtaaagtacttgagcatt

SEQ ID NO: 33953 - DNA, 40 bp, Homo sapiens
aatgctcaagtactttacgttactcttccgaaaggttatt

SEQ ID NO: 33954 - DNA, 40 bp, Homo sapiens
ataacctttcggaagagtaacgtaaagtacttgagcatta

SEQ ID NO: 33955 - DNA, 40 bp, Homo sapiens
taatgctcaagtactttacgttactcttccgaaaggttat

SEQ ID NO: 33956 - DNA, 40 bp, Homo sapiens
taacctttcggaagagtaacgtaaagtacttgagcattaa

SEQ ID NO: 33957 - DNA, 40 bp, Homo sapiens
ttaatgctcaagtactttacgttactcttccgaaaggtta

SEQ ID NO: 33958 - DNA, 40 bp, Homo sapiens
aacctttcggaagagtaacgtaaagtacttgagcattaat

SEQ ID NO: 33959 - DNA, 40 bp, Homo sapiens
attaatgctcaagtactttacgttactcttccgaaaggtt

SEQ ID NO: 33960 - DNA, 40 bp, Homo sapiens
acctttcggaagagtaacgtaaagtacttgagcattaatt

SEQ ID NO: 33961 - DNA, 40 bp, Homo sapiens
aattaatgctcaagtactttacgttactcttccgaaaggt

SEQ ID NO: 33962 - DNA, 40 bp, Homo sapiens
cctttcggaagagtaacgtaaagtacttgagcattaattg

SEQ ID NO: 33963 - DNA, 40 bp, Homo sapiens
caattaatgctcaagtactttacgttactcttccgaaagg

SEQ ID NO: 33964 - DNA, 40 bp, Homo sapiens
ctttcggaagagtaacgtaaagtacttgagcattaattga

SEQ ID NO: 33965 - DNA, 40 bp, Homo sapiens
tcaattaatgctcaagtactttacgttactcttccgaaag

SEQ ID NO: 33966 - DNA, 40 bp, Homo sapiens
tttcggaagagtaacgtaaagtacttgagcattaattgag

SEQ ID NO: 33967 - DNA, 40 bp, Homo sapiens
ctcaattaatgctcaagtactttacgttactcttccgaaa

SEQ ID NO: 33968 - DNA, 40 bp, Homo sapiens
ttcggaagagtaacgtaaagtacttgagcattaattgagt

SEQ ID NO: 33969 - DNA, 40 bp, Homo sapiens
actcaattaatgctcaagtactttacgttactcttccgaa

SEQ ID NO: 33970 - DNA, 40 bp, Homo sapiens
tcggaagagtaacgtaaagtacttgagcattaattgagta

SEQ ID NO: 33971 - DNA, 40 bp, Homo sapiens
tactcaattaatgctcaagtactttacgttactcttccga

SEQ ID NO: 33972 - DNA, 40 bp, Homo sapiens
cggaagagtaacgtaaagtacttgagcattaattgagtaa

SEQ ID NO: 33973 - DNA, 40 bp, Homo sapiens
ttactcaattaatgctcaagtactttacgttactcttccg

SEQ ID NO: 33974 - DNA, 40 bp, Homo sapiens
ggaagagtaacgtaaagtacttgagcattaattgagtaaa

SEQ ID NO: 33975 - DNA, 40 bp, Homo sapiens
tttactcaattaatgctcaagtactttacgttactcttcc

SEQ ID NO: 33976 - DNA, 40 bp, Homo sapiens
gaagagtaacgtaaagtacttgagcattaattgagtaaaa

SEQ ID NO: 33977 - DNA, 40 bp, Homo sapiens
ttttactcaattaatgctcaagtactttacgttactcttc

SEQ ID NO: 33978 - DNA, 40 bp, Homo sapiens
aagagtaacgtaaagtacttgagcattaattgagtaaaag

SEQ ID NO: 33979 - DNA, 40 bp, Homo sapiens
cttttactcaattaatgctcaagtactttacgttactctt

SEQ ID NO: 33980 - DNA, 40 bp, Homo sapiens
agagtaacgtaaagtacttgagcattaattgagtaaaagt

SEQ ID NO: 33981 - DNA, 40 bp, Homo sapiens
acttttactcaattaatgctcaagtactttacgttactct

SEQ ID NO: 33982 - DNA, 40 bp, Homo sapiens
gagtaacgtaaagtacttgagcattaattgagtaaaagtt

SEQ ID NO: 33983 - DNA, 40 bp, Homo sapiens
aacttttactcaattaatgctcaagtactttacgttactc

SEQ ID NO: 33984 - DNA, 40 bp, Homo sapiens
agtaacgtaaagtacttgagcattaattgagtaaaagttt

SEQ ID NO: 33985 - DNA, 40 bp, Homo sapiens
aaacttttactcaattaatgctcaagtactttacgttact

SEQ ID NO: 33986 - DNA, 40 bp, Homo sapiens
gtaacgtaaagtacttgagcattaattgagtaaaagtttc

SEQ ID NO: 33987 - DNA, 40 bp, Homo sapiens
gaaacttttactcaattaatgctcaagtactttacgttac

SEQ ID NO: 33988 - DNA, 40 bp, Homo sapiens
taacgtaaagtacttgagcattaattgagtaaaagtttct

SEQ ID NO: 33989 - DNA, 40 bp, Homo sapiens
agaaacttttactcaattaatgctcaagtactttacgtta

SEQ ID NO: 33990 - DNA, 40 bp, Homo sapiens
aacgtaaagtacttgagcattaattgagtaaaagtttctc

SEQ ID NO: 33991 - DNA, 40 bp, Homo sapiens
gagaaacttttactcaattaatgctcaagtactttacgtt

SEQ ID NO: 33992 - DNA, 40 bp, Homo sapiens
acgtaaagtacttgagcattaattgagtaaaagtttctca

SEQ ID NO: 33993 - DNA, 40 bp, Homo sapiens
tgagaaacttttactcaattaatgctcaagtactttacgt

SEQ ID NO: 33994 - DNA, 40 bp, Homo sapiens
cgtaaagtacttgagcattaattgagtaaaagtttctcat

SEQ ID NO: 33995 - DNA, 40 bp, Homo sapiens
atgagaaacttttactcaattaatgctcaagtactttacg

SEQ ID NO: 33996 - DNA, 40 bp, Homo sapiens
gtaaagtacttgagcattaattgagtaaaagtttctcatc

SEQ ID NO: 33997 - DNA, 40 bp, Homo sapiens
gatgagaaacttttactcaattaatgctcaagtactttac

SEQ ID NO: 33998 - DNA, 40 bp, Homo sapiens
taaagtacttgagcattaattgagtaaaagtttctcatct

SEQ ID NO: 33999 - DNA, 40 bp, Homo sapiens
agatgagaaacttttactcaattaatgctcaagtacttta

SEQ ID NO: 34000 - DNA, 40 bp, Homo sapiens
aaagtacttgagcattaattgagtaaaagtttctcatctt

SEQ ID NO: 34001 - DNA, 40 bp, Homo sapiens
aagatgagaaacttttactcaattaatgctcaagtacttt

SEQ ID NO: 34002 - DNA, 40 bp, Homo sapiens
aagtacttgagcattaattgagtaaaagtttctcatcttt

SEQ ID NO: 34003 - DNA, 40 bp, Homo sapiens
aaagatgagaaacttttactcaattaatgctcaagtactt

SEQ ID NO: 34004 - DNA, 40 bp, Homo sapiens
agtacttgagcattaattgagtaaaagtttctcatctttt

SEQ ID NO: 34005 - DNA, 40 bp, Homo sapiens
aaaagatgagaaacttttactcaattaatgctcaagtact

SEQ ID NO: 34006 - DNA, 40 bp, Homo sapiens
gtacttgagcattaattgagtaaaagtttctcatcttttc

SEQ ID NO: 34007 - DNA, 40 bp, Homo sapiens
gaaaagatgagaaacttttactcaattaatgctcaagtac

SEQ ID NO: 34008 - DNA, 40 bp, Homo sapiens
tacttgagcattaattgagtaaaagtttctcatcttttcc

SEQ ID NO: 34009 - DNA, 40 bp, Homo sapiens
ggaaaagatgagaaacttttactcaattaatgctcaagta

SEQ ID NO: 34010 - DNA, 40 bp, Homo sapiens
acttgagcattaattgagtaaaagtttctcatcttttcct

SEQ ID NO: 34011 - DNA, 40 bp, Homo sapiens
aggaaaagatgagaaacttttactcaattaatgctcaagt

SEQ ID NO: 34012 - DNA, 40 bp, Homo sapiens
cttgagcattaattgagtaaaagtttctcatcttttccta

SEQ ID NO: 34013 - DNA, 40 bp, Homo sapiens
taggaaaagatgagaaacttttactcaattaatgctcaag

SEQ ID NO: 34014 - DNA, 40 bp, Homo sapiens
ttgagcattaattgagtaaaagtttctcatcttttcctac

SEQ ID NO: 34015 - DNA, 40 bp, Homo sapiens
gtaggaaaagatgagaaacttttactcaattaatgctcaa

SEQ ID NO: 34016 - DNA, 40 bp, Homo sapiens
tgagcattaattgagtaaaagtttctcatcttttcctaca

SEQ ID NO: 34017 - DNA, 40 bp, Homo sapiens
tgtaggaaaagatgagaaacttttactcaattaatgctca

SEQ ID NO: 34018 - DNA, 40 bp, Homo sapiens
gagcattaattgagtaaaagtttctcatcttttcctacag

SEQ ID NO: 34019 - DNA, 40 bp, Homo sapiens
ctgtaggaaaagatgagaaacttttactcaattaatgctc

SEQ ID NO: 34020 - DNA, 40 bp, Homo sapiens
agcattaattgagtaaaagtttctcatcttttcctacagg

SEQ ID NO: 34021 - DNA, 40 bp, Homo sapiens
cctgtaggaaaagatgagaaacttttactcaattaatgct

SEQ ID NO: 34022 - DNA, 40 bp, Homo sapiens
gcattaattgagtaaaagtttctcatcttttcctacaggt

SEQ ID NO: 34023 - DNA, 40 bp, Homo sapiens
acctgtaggaaaagatgagaaacttttactcaattaatgc

SEQ ID NO: 34024 - DNA, 40 bp, Homo sapiens
cattaattgagtaaaagtttctcatcttttcctacaggtg

SEQ ID NO: 34025 - DNA, 40 bp, Homo sapiens
cacctgtaggaaaagatgagaaacttttactcaattaatg

SEQ ID NO: 34026 - DNA, 40 bp, Homo sapiens
attaattgagtaaaagtttctcatcttttcctacaggtgt

SEQ ID NO: 34027 - DNA, 40 bp, Homo sapiens
acacctgtaggaaaagatgagaaacttttactcaattaat

SEQ ID NO: 34028 - DNA, 40 bp, Homo sapiens
ttaattgagtaaaagtttctcatcttttcctacaggtgtt

SEQ ID NO: 34029 - DNA, 40 bp, Homo sapiens
aacacctgtaggaaaagatgagaaacttttactcaattaa

SEQ ID NO: 34030 - DNA, 40 bp, Homo sapiens
taattgagtaaaagtttctcatcttttcctacaggtgtta

SEQ ID NO: 34031 - DNA, 40 bp, Homo sapiens
taacacctgtaggaaaagatgagaaacttttactcaatta

SEQ ID NO: 34032 - DNA, 40 bp, Homo sapiens
aattgagtaaaagtttctcatcttttcctacaggtgttat

SEQ ID NO: 34033 - DNA, 40 bp, Homo sapiens
ataacacctgtaggaaaagatgagaaacttttactcaatt

SEQ ID NO: 34034 - DNA, 40 bp, Homo sapiens
attgagtaaaagtttctcatcttttcctacaggtgttatt

SEQ ID NO: 34035 - DNA, 40 bp, Homo sapiens
aataacacctgtaggaaaagatgagaaacttttactcaat

SEQ ID NO: 34036 - DNA, 40 bp, Homo sapiens
ttgagtaaaagtttctcatcttttcctacaggtgttatta

SEQ ID NO: 34037 - DNA, 40 bp, Homo sapiens
taataacacctgtaggaaaagatgagaaacttttactcaa

SEQ ID NO: 34038 - DNA, 40 bp, Homo sapiens
tgagtaaaagtttctcatcttttcctacaggtgttattaa

SEQ ID NO: 34039 - DNA, 40 bp, Homo sapiens
ttaataacacctgtaggaaaagatgagaaacttttactca

SEQ ID NO: 34040 - DNA, 40 bp, Homo sapiens
gagtaaaagtttctcatcttttcctacaggtgttattaag

SEQ ID NO: 34041 - DNA, 40 bp, Homo sapiens
cttaataacacctgtaggaaaagatgagaaacttttactc

SEQ ID NO: 34042 - DNA, 40 bp, Homo sapiens
agtaaaagtttctcatcttttcctacaggtgttattaagc

SEQ ID NO: 34043 - DNA, 40 bp, Homo sapiens
gcttaataacacctgtaggaaaagatgagaaacttttact

SEQ ID NO: 34044 - DNA, 40 bp, Homo sapiens
gtaaaagtttctcatcttttcctacaggtgttattaagca

SEQ ID NO: 34045 - DNA, 40 bp, Homo sapiens
tgcttaataacacctgtaggaaaagatgagaaacttttac

SEQ ID NO: 34046 - DNA, 40 bp, Homo sapiens
taaaagtttctcatcttttcctacaggtgttattaagcag

SEQ ID NO: 34047 - DNA, 40 bp, Homo sapiens
ctgcttaataacacctgtaggaaaagatgagaaactttta

SEQ ID NO: 34048 - DNA, 40 bp, Homo sapiens
aaaagtttctcatcttttcctacaggtgttattaagcagt

SEQ ID NO: 34049 - DNA, 40 bp, Homo sapiens
actgcttaataacacctgtaggaaaagatgagaaactttt

SEQ ID NO: 34050 - DNA, 40 bp, Homo sapiens
aaagtttctcatcttttcctacaggtgttattaagcagta

SEQ ID NO: 34051 - DNA, 40 bp, Homo sapiens
tactgcttaataacacctgtaggaaaagatgagaaacttt

SEQ ID NO: 34052 - DNA, 40 bp, Homo sapiens
aagtttctcatcttttcctacaggtgttattaagcagtat

SEQ ID NO: 34053 - DNA, 40 bp, Homo sapiens
atactgcttaataacacctgtaggaaaagatgagaaactt

SEQ ID NO: 34054 - DNA, 40 bp, Homo sapiens
agtttctcatcttttcctacaggtgttattaagcagtatg

SEQ ID NO: 34055 - DNA, 40 bp, Homo sapiens
catactgcttaataacacctgtaggaaaagatgagaaact

SEQ ID NO: 34056 - DNA, 40 bp, Homo sapiens
gtttctcatcttttcctacaggtgttattaagcagtatgt

SEQ ID NO: 34057 - DNA, 40 bp, Homo sapiens
acatactgcttaataacacctgtaggaaaagatgagaaac

SEQ ID NO: 34058 - DNA, 40 bp, Homo sapiens
tttctcatcttttcctacaggtgttattaagcagtatgta

SEQ ID NO: 34059 - DNA, 40 bp, Homo sapiens
tacatactgcttaataacacctgtaggaaaagatgagaaa

SEQ ID NO: 34060 - DNA, 40 bp, Homo sapiens
ttctcatcttttcctacaggtgttattaagcagtatgtaa

SEQ ID NO: 34061 - DNA, 40 bp, Homo sapiens
ttacatactgcttaataacacctgtaggaaaagatgagaa

SEQ ID NO: 34062 - DNA, 40 bp, Homo sapiens
tctcatcttttcctacaggtgttattaagcagtatgtaaa

SEQ ID NO: 34063 - DNA, 40 bp, Homo sapiens
tttacatactgcttaataacacctgtaggaaaagatgaga

SEQ ID NO: 34064 - DNA, 40 bp, Homo sapiens
ctcatcttttcctacaggtgttattaagcagtatgtaaaa

SEQ ID NO: 34065 - DNA, 40 bp, Homo sapiens
ttttacatactgcttaataacacctgtaggaaaagatgag

SEQ ID NO: 34066 - DNA, 40 bp, Homo sapiens
tcatcttttcctacaggtgttattaagcagtatgtaaaaa

SEQ ID NO: 34067 - DNA, 40 bp, Homo sapiens
tttttacatactgcttaataacacctgtaggaaaagatga

SEQ ID NO: 34068 - DNA, 40 bp, Homo sapiens
catcttttcctacaggtgttattaagcagtatgtaaaaag

SEQ ID NO: 34069 - DNA, 40 bp, Homo sapiens
ctttttacatactgcttaataacacctgtaggaaaagatg

SEQ ID NO: 34070 - DNA, 40 bp, Homo sapiens
atcttttcctacaggtgttattaagcagtatgtaaaaagt

SEQ ID NO: 34071 - DNA, 40 bp, Homo sapiens
actttttacatactgcttaataacacctgtaggaaaagat

SEQ ID NO: 34072 - DNA, 40 bp, Homo sapiens
tcttttcctacaggtgttattaagcagtatgtaaaaagtc

SEQ ID NO: 34073 - DNA, 40 bp, Homo sapiens
gactttttacatactgcttaataacacctgtaggaaaaga

SEQ ID NO: 34074 - DNA, 40 bp, Homo sapiens
cttttcctacaggtgttattaagcagtatgtaaaaagtcc

SEQ ID NO: 34075 - DNA, 40 bp, Homo sapiens
ggactttttacatactgcttaataacacctgtaggaaaag

SEQ ID NO: 34076 - DNA, 40 bp, Homo sapiens
ttttcctacaggtgttattaagcagtatgtaaaaagtcct

SEQ ID NO: 34077 - DNA, 40 bp, Homo sapiens
aggactttttacatactgcttaataacacctgtaggaaaa

SEQ ID NO: 34078 - DNA, 40 bp, Homo sapiens
tttcctacaggtgttattaagcagtatgtaaaaagtcctt

SEQ ID NO: 34079 - DNA, 40 bp, Homo sapiens
aaggactttttacatactgcttaataacacctgtaggaaa

SEQ ID NO: 34080 - DNA, 40 bp, Homo sapiens
ttcctacaggtgttattaagcagtatgtaaaaagtcctta

SEQ ID NO: 34081 - DNA, 40 bp, Homo sapiens
taaggactttttacatactgcttaataacacctgtaggaa

SEQ ID NO: 34082 - DNA, 40 bp, Homo sapiens
tcctacaggtgttattaagcagtatgtaaaaagtccttac

SEQ ID NO: 34083 - DNA, 40 bp, Homo sapiens
gtaaggactttttacatactgcttaataacacctgtagga

SEQ ID NO: 34084 - DNA, 40 bp, Homo sapiens
cctacaggtgttattaagcagtatgtaaaaagtccttaca

SEQ ID NO: 34085 - DNA, 40 bp, Homo sapiens
tgtaaggactttttacatactgcttaataacacctgtagg

SEQ ID NO: 34086 - DNA, 40 bp, Homo sapiens
ctacaggtgttattaagcagtatgtaaaaagtccttacaa

SEQ ID NO: 34087 - DNA, 40 bp, Homo sapiens
ttgtaaggactttttacatactgcttaataacacctgtag

SEQ ID NO: 34088 - DNA, 40 bp, Homo sapiens
tacaggtgttattaagcagtatgtaaaaagtccttacaat

SEQ ID NO: 34089 - DNA, 40 bp, Homo sapiens
attgtaaggactttttacatactgcttaataacacctgta

SEQ ID NO: 34090 - DNA, 40 bp, Homo sapiens
acaggtgttattaagcagtatgtaaaaagtccttacaata

SEQ ID NO: 34091 - DNA, 40 bp, Homo sapiens
tattgtaaggactttttacatactgcttaataacacctgt

SEQ ID NO: 34092 - DNA, 40 bp, Homo sapiens
caggtgttattaagcagtatgtaaaaagtccttacaatac

SEQ ID NO: 34093 - DNA, 40 bp, Homo sapiens
gtattgtaaggactttttacatactgcttaataacacctg

SEQ ID NO: 34094 - DNA, 40 bp, Homo sapiens
aggtgttattaagcagtatgtaaaaagtccttacaatact

SEQ ID NO: 34095 - DNA, 40 bp, Homo sapiens
agtattgtaaggactttttacatactgcttaataacacct

SEQ ID NO: 34096 - DNA, 40 bp, Homo sapiens
ggtgttattaagcagtatgtaaaaagtccttacaatactt

SEQ ID NO: 34097 - DNA, 40 bp, Homo sapiens
aagtattgtaaggactttttacatactgcttaataacacc

SEQ ID NO: 34098 - DNA, 40 bp, Homo sapiens
gtgttattaagcagtatgtaaaaagtccttacaatactta

SEQ ID NO: 34099 - DNA, 40 bp, Homo sapiens
taagtattgtaaggactttttacatactgcttaataacac

SEQ ID NO: 34100 - DNA, 40 bp, Homo sapiens
tgttattaagcagtatgtaaaaagtccttacaatacttaa

SEQ ID NO: 34101 - DNA, 40 bp, Homo sapiens
ttaagtattgtaaggactttttacatactgcttaataaca

SEQ ID NO: 34102 - DNA, 40 bp, Homo sapiens
gttattaagcagtatgtaaaaagtccttacaatacttaat

SEQ ID NO: 34103 - DNA, 40 bp, Homo sapiens
attaagtattgtaaggactttttacatactgcttaataac

SEQ ID NO: 34104 - DNA, 40 bp, Homo sapiens
ttattaagcagtatgtaaaaagtccttacaatacttaata

SEQ ID NO: 34105 - DNA, 40 bp, Homo sapiens
tattaagtattgtaaggactttttacatactgcttaataa

SEQ ID NO: 34106 - DNA, 40 bp, Homo sapiens
tattaagcagtatgtaaaaagtccttacaatacttaatac

SEQ ID NO: 34107 - DNA, 40 bp, Homo sapiens
gtattaagtattgtaaggactttttacatactgcttaata

SEQ ID NO: 34108 - DNA, 40 bp, Homo sapiens
attaagcagtatgtaaaaagtccttacaatacttaataca

SEQ ID NO: 34109 - DNA, 40 bp, Homo sapiens
tgtattaagtattgtaaggactttttacatactgcttaat

SEQ ID NO: 34110 - DNA, 40 bp, Homo sapiens
ttaagcagtatgtaaaaagtccttacaatacttaatacat

SEQ ID NO: 34111 - DNA, 40 bp, Homo sapiens
atgtattaagtattgtaaggactttttacatactgcttaa

SEQ ID NO: 34112 - DNA, 40 bp, Homo sapiens
taagcagtatgtaaaaagtccttacaatacttaatacatt

SEQ ID NO: 34113 - DNA, 40 bp, Homo sapiens
aatgtattaagtattgtaaggactttttacatactgctta

SEQ ID NO: 34114 - DNA, 40 bp, Homo sapiens
aagcagtatgtaaaaagtccttacaatacttaatacatta

SEQ ID NO: 34115 - DNA, 40 bp, Homo sapiens
taatgtattaagtattgtaaggactttttacatactgctt

SEQ ID NO: 34116 - DNA, 40 bp, Homo sapiens
agcagtatgtaaaaagtccttacaatacttaatacattaa

SEQ ID NO: 34117 - DNA, 40 bp, Homo sapiens
ttaatgtattaagtattgtaaggactttttacatactgct

SEQ ID NO: 34118 - DNA, 40 bp, Homo sapiens
gcagtatgtaaaaagtccttacaatacttaatacattaag

SEQ ID NO: 34119 - DNA, 40 bp, Homo sapiens
cttaatgtattaagtattgtaaggactttttacatactgc

SEQ ID NO: 34120 - DNA, 40 bp, Homo sapiens
cagtatgtaaaaagtccttacaatacttaatacattaaga

SEQ ID NO: 34121 - DNA, 40 bp, Homo sapiens
tcttaatgtattaagtattgtaaggactttttacatactg

SEQ ID NO: 34122 - DNA, 40 bp, Homo sapiens
agtatgtaaaaagtccttacaatacttaatacattaagaa

SEQ ID NO: 34123 - DNA, 40 bp, Homo sapiens
ttcttaatgtattaagtattgtaaggactttttacatact

SEQ ID NO: 34124 - DNA, 40 bp, Homo sapiens
gtatgtaaaaagtccttacaatacttaatacattaagaaa

SEQ ID NO: 34125 - DNA, 40 bp, Homo sapiens
tttcttaatgtattaagtattgtaaggactttttacatac

SEQ ID NO: 34126 - DNA, 40 bp, Homo sapiens
tatgtaaaaagtccttacaatacttaatacattaagaaaa

SEQ ID NO: 34127 - DNA, 40 bp, Homo sapiens
ttttcttaatgtattaagtattgtaaggactttttacata

SEQ ID NO: 34128 - DNA, 40 bp, Homo sapiens
atgtaaaaagtccttacaatacttaatacattaagaaaac

SEQ ID NO: 34129 - DNA, 40 bp, Homo sapiens
gttttcttaatgtattaagtattgtaaggactttttacat

SEQ ID NO: 34130 - DNA, 40 bp, Homo sapiens
tgtaaaaagtccttacaatacttaatacattaagaaaaca

SEQ ID NO: 34131 - DNA, 40 bp, Homo sapiens
tgttttcttaatgtattaagtattgtaaggactttttaca

SEQ ID NO: 34132 - DNA, 40 bp, Homo sapiens
gtaaaaagtccttacaatacttaatacattaagaaaacat

SEQ ID NO: 34133 - DNA, 40 bp, Homo sapiens
atgttttcttaatgtattaagtattgtaaggactttttac

SEQ ID NO: 34134 - DNA, 40 bp, Homo sapiens
taaaaagtccttacaatacttaatacattaagaaaacata

SEQ ID NO: 34135 - DNA, 40 bp, Homo sapiens
tatgttttcttaatgtattaagtattgtaaggacttttta

SEQ ID NO: 34136 - DNA, 40 bp, Homo sapiens
aaaaagtccttacaatacttaatacattaagaaaacatac

SEQ ID NO: 34137 - DNA, 40 bp, Homo sapiens
gtatgttttcttaatgtattaagtattgtaaggacttttt

SEQ ID NO: 34138 - DNA, 40 bp, Homo sapiens
aaaagtccttacaatacttaatacattaagaaaacataca

SEQ ID NO: 34139 - DNA, 40 bp, Homo sapiens
tgtatgttttcttaatgtattaagtattgtaaggactttt

SEQ ID NO: 34140 - DNA, 40 bp, Homo sapiens
aaagtccttacaatacttaatacattaagaaaacatacaa

SEQ ID NO: 34141 - DNA, 40 bp, Homo sapiens
ttgtatgttttcttaatgtattaagtattgtaaggacttt

SEQ ID NO: 34142 - DNA, 40 bp, Homo sapiens
aagtccttacaatacttaatacattaagaaaacatacaat

SEQ ID NO: 34143 - DNA, 40 bp, Homo sapiens
attgtatgttttcttaatgtattaagtattgtaaggactt

SEQ ID NO: 34144 - DNA, 40 bp, Homo sapiens
agtccttacaatacttaatacattaagaaaacatacaatt

SEQ ID NO: 34145 - DNA, 40 bp, Homo sapiens
aattgtatgttttcttaatgtattaagtattgtaaggact

SEQ ID NO: 34146 - DNA, 40 bp, Homo sapiens
gtccttacaatacttaatacattaagaaaacatacaattt

SEQ ID NO: 34147 - DNA, 40 bp, Homo sapiens
aaattgtatgttttcttaatgtattaagtattgtaaggac

SEQ ID NO: 34148 - DNA, 40 bp, Homo sapiens
tccttacaatacttaatacattaagaaaacatacaatttc

SEQ ID NO: 34149 - DNA, 40 bp, Homo sapiens
gaaattgtatgttttcttaatgtattaagtattgtaagga

SEQ ID NO: 34150 - DNA, 40 bp, Homo sapiens
ccttacaatacttaatacattaagaaaacatacaatttca

SEQ ID NO: 34151 - DNA, 40 bp, Homo sapiens
tgaaattgtatgttttcttaatgtattaagtattgtaagg

SEQ ID NO: 34152 - DNA, 40 bp, Homo sapiens
cttacaatacttaatacattaagaaaacatacaatttcaa

SEQ ID NO: 34153 - DNA, 40 bp, Homo sapiens
ttgaaattgtatgttttcttaatgtattaagtattgtaag

SEQ ID NO: 34154 - DNA, 40 bp, Homo sapiens
ttacaatacttaatacattaagaaaacatacaatttcaag

SEQ ID NO: 34155 - DNA, 40 bp, Homo sapiens
cttgaaattgtatgttttcttaatgtattaagtattgtaa

SEQ ID NO: 34156 - DNA, 40 bp, Homo sapiens
tacaatacttaatacattaagaaaacatacaatttcaaga

SEQ ID NO: 34157 - DNA, 40 bp, Homo sapiens
tcttgaaattgtatgttttcttaatgtattaagtattgta

SEQ ID NO: 34158 - DNA, 40 bp, Homo sapiens
acaatacttaatacattaagaaaacatacaatttcaagag

SEQ ID NO: 34159 - DNA, 40 bp, Homo sapiens
ctcttgaaattgtatgttttcttaatgtattaagtattgt

SEQ ID NO: 34160 - DNA, 40 bp, Homo sapiens
caatacttaatacattaagaaaacatacaatttcaagagg

SEQ ID NO: 34161 - DNA, 40 bp, Homo sapiens
cctcttgaaattgtatgttttcttaatgtattaagtattg

SEQ ID NO: 34162 - DNA, 40 bp, Homo sapiens
aatacttaatacattaagaaaacatacaatttcaagagga

SEQ ID NO: 34163 - DNA, 40 bp, Homo sapiens
tcctcttgaaattgtatgttttcttaatgtattaagtatt

SEQ ID NO: 34164 - DNA, 40 bp, Homo sapiens
atacttaatacattaagaaaacatacaatttcaagaggaa

SEQ ID NO: 34165 - DNA, 40 bp, Homo sapiens
ttcctcttgaaattgtatgttttcttaatgtattaagtat

SEQ ID NO: 34166 - DNA, 40 bp, Homo sapiens
tacttaatacattaagaaaacatacaatttcaagaggaaa

SEQ ID NO: 34167 - DNA, 40 bp, Homo sapiens
tttcctcttgaaattgtatgttttcttaatgtattaagta

SEQ ID NO: 34168 - DNA, 40 bp, Homo sapiens
acttaatacattaagaaaacatacaatttcaagaggaaat

SEQ ID NO: 34169 - DNA, 40 bp, Homo sapiens
atttcctcttgaaattgtatgttttcttaatgtattaagt

SEQ ID NO: 34170 - DNA, 40 bp, Homo sapiens
cttaatacattaagaaaacatacaatttcaagaggaaatc

SEQ ID NO: 34171 - DNA, 40 bp, Homo sapiens
gatttcctcttgaaattgtatgttttcttaatgtattaag

SEQ ID NO: 34172 - DNA, 40 bp, Homo sapiens
ttaatacattaagaaaacatacaatttcaagaggaaatcc

SEQ ID NO: 34173 - DNA, 40 bp, Homo sapiens
ggatttcctcttgaaattgtatgttttcttaatgtattaa

SEQ ID NO: 34174 - DNA, 40 bp, Homo sapiens
taatacattaagaaaacatacaatttcaagaggaaatccc

SEQ ID NO: 34175 - DNA, 40 bp, Homo sapiens
gggatttcctcttgaaattgtatgttttcttaatgtatta

SEQ ID NO: 34176 - DNA, 40 bp, Homo sapiens
aatacattaagaaaacatacaatttcaagaggaaatcccc

SEQ ID NO: 34177 - DNA, 40 bp, Homo sapiens
ggggatttcctcttgaaattgtatgttttcttaatgtatt

SEQ ID NO: 34178 - DNA, 40 bp, Homo sapiens
atacattaagaaaacatacaatttcaagaggaaatccccg

SEQ ID NO: 34179 - DNA, 40 bp, Homo sapiens
cggggatttcctcttgaaattgtatgttttcttaatgtat

SEQ ID NO: 34180 - DNA, 40 bp, Homo sapiens
tacattaagaaaacatacaatttcaagaggaaatccccga

SEQ ID NO: 34181 - DNA, 40 bp, Homo sapiens
tcggggatttcctcttgaaattgtatgttttcttaatgta

SEQ ID NO: 34182 - DNA, 40 bp, Homo sapiens
acattaagaaaacatacaatttcaagaggaaatccccgag

SEQ ID NO: 34183 - DNA, 40 bp, Homo sapiens
ctcggggatttcctcttgaaattgtatgttttcttaatgt

SEQ ID NO: 34184 - DNA, 40 bp, Homo sapiens
cattaagaaaacatacaatttcaagaggaaatccccgagt

SEQ ID NO: 34185 - DNA, 40 bp, Homo sapiens
actcggggatttcctcttgaaattgtatgttttcttaatg

SEQ ID NO: 34186 - DNA, 40 bp, Homo sapiens
attaagaaaacatacaatttcaagaggaaatccccgagta

SEQ ID NO: 34187 - DNA, 40 bp, Homo sapiens
tactcggggatttcctcttgaaattgtatgttttcttaat

SEQ ID NO: 34188 - DNA, 40 bp, Homo sapiens
ttaagaaaacatacaatttcaagaggaaatccccgagtaa

SEQ ID NO: 34189 - DNA, 40 bp, Homo sapiens
ttactcggggatttcctcttgaaattgtatgttttcttaa

SEQ ID NO: 34190 - DNA, 40 bp, Homo sapiens
taagaaaacatacaatttcaagaggaaatccccgagtaat

SEQ ID NO: 34191 - DNA, 40 bp, Homo sapiens
attactcggggatttcctcttgaaattgtatgttttctta

SEQ ID NO: 34192 - DNA, 40 bp, Homo sapiens
aagaaaacatacaatttcaagaggaaatccccgagtaata

SEQ ID NO: 34193 - DNA, 40 bp, Homo sapiens
tattactcggggatttcctcttgaaattgtatgttttctt

SEQ ID NO: 34194 - DNA, 40 bp, Homo sapiens
agaaaacatacaatttcaagaggaaatccccgagtaatac

SEQ ID NO: 34195 - DNA, 40 bp, Homo sapiens
gtattactcggggatttcctcttgaaattgtatgttttct

SEQ ID NO: 34196 - DNA, 40 bp, Homo sapiens
gaaaacatacaatttcaagaggaaatccccgagtaataca

SEQ ID NO: 34197 - DNA, 40 bp, Homo sapiens
tgtattactcggggatttcctcttgaaattgtatgttttc

SEQ ID NO: 34198 - DNA, 40 bp, Homo sapiens
aaaacatacaatttcaagaggaaatccccgagtaatacat

SEQ ID NO: 34199 - DNA, 40 bp, Homo sapiens
atgtattactcggggatttcctcttgaaattgtatgtttt

SEQ ID NO: 34200 - DNA, 40 bp, Homo sapiens
aaacatacaatttcaagaggaaatccccgagtaatacatt

SEQ ID NO: 34201 - DNA, 40 bp, Homo sapiens
aatgtattactcggggatttcctcttgaaattgtatgttt

SEQ ID NO: 34202 - DNA, 40 bp, Homo sapiens
aacatacaatttcaagaggaaatccccgagtaatacatta

SEQ ID NO: 34203 - DNA, 40 bp, Homo sapiens
taatgtattactcggggatttcctcttgaaattgtatgtt

SEQ ID NO: 34204 - DNA, 40 bp, Homo sapiens
acatacaatttcaagaggaaatccccgagtaatacattat

SEQ ID NO: 34205 - DNA, 40 bp, Homo sapiens
ataatgtattactcggggatttcctcttgaaattgtatgt

SEQ ID NO: 34206 - DNA, 40 bp, Homo sapiens
catacaatttcaagaggaaatccccgagtaatacattatt

SEQ ID NO: 34207 - DNA, 40 bp, Homo sapiens
aataatgtattactcggggatttcctcttgaaattgtatg

SEQ ID NO: 34208 - DNA, 40 bp, Homo sapiens
atacaatttcaagaggaaatccccgagtaatacattattg

SEQ ID NO: 34209 - DNA, 40 bp, Homo sapiens
caataatgtattactcggggatttcctcttgaaattgtat

SEQ ID NO: 34210 - DNA, 40 bp, Homo sapiens
tacaatttcaagaggaaatccccgagtaatacattattga

SEQ ID NO: 34211 - DNA, 40 bp, Homo sapiens
tcaataatgtattactcggggatttcctcttgaaattgta

SEQ ID NO: 34212 - DNA, 40 bp, Homo sapiens
acaatttcaagaggaaatccccgagtaatacattattgac

SEQ ID NO: 34213 - DNA, 40 bp, Homo sapiens
gtcaataatgtattactcggggatttcctcttgaaattgt

SEQ ID NO: 34214 - DNA, 40 bp, Homo sapiens
caatttcaagaggaaatccccgagtaatacattattgaca

SEQ ID NO: 34215 - DNA, 40 bp, Homo sapiens
tgtcaataatgtattactcggggatttcctcttgaaattg

SEQ ID NO: 34216 - DNA, 40 bp, Homo sapiens
aatttcaagaggaaatccccgagtaatacattattgacat

SEQ ID NO: 34217 - DNA, 40 bp, Homo sapiens
atgtcaataatgtattactcggggatttcctcttgaaatt

SEQ ID NO: 34218 - DNA, 40 bp, Homo sapiens
atttcaagaggaaatccccgagtaatacattattgacatt

SEQ ID NO: 34219 - DNA, 40 bp, Homo sapiens
aatgtcaataatgtattactcggggatttcctcttgaaat

SEQ ID NO: 34220 - DNA, 40 bp, Homo sapiens
tttcaagaggaaatccccgagtaatacattattgacattt

SEQ ID NO: 34221 - DNA, 40 bp, Homo sapiens
aaatgtcaataatgtattactcggggatttcctcttgaaa

SEQ ID NO: 34222 - DNA, 40 bp, Homo sapiens
ttcaagaggaaatccccgagtaatacattattgacatttt

SEQ ID NO: 34223 - DNA, 40 bp, Homo sapiens
aaaatgtcaataatgtattactcggggatttcctcttgaa

SEQ ID NO: 34224 - DNA, 40 bp, Homo sapiens
tcaagaggaaatccccgagtaatacattattgacattttc

SEQ ID NO: 34225 - DNA, 40 bp, Homo sapiens
gaaaatgtcaataatgtattactcggggatttcctcttga

SEQ ID NO: 34226 - DNA, 40 bp, Homo sapiens
caagaggaaatccccgagtaatacattattgacattttca

SEQ ID NO: 34227 - DNA, 40 bp, Homo sapiens
tgaaaatgtcaataatgtattactcggggatttcctcttg

SEQ ID NO: 34228 - DNA, 40 bp, Homo sapiens
aagaggaaatccccgagtaatacattattgacattttcag

SEQ ID NO: 34229 - DNA, 40 bp, Homo sapiens
ctgaaaatgtcaataatgtattactcggggatttcctctt

SEQ ID NO: 34230 - DNA, 40 bp, Homo sapiens
agaggaaatccccgagtaatacattattgacattttcagc

SEQ ID NO: 34231 - DNA, 40 bp, Homo sapiens
gctgaaaatgtcaataatgtattactcggggatttcctct

SEQ ID NO: 34232 - DNA, 40 bp, Homo sapiens
gaggaaatccccgagtaatacattattgacattttcagca

SEQ ID NO: 34233 - DNA, 40 bp, Homo sapiens
tgctgaaaatgtcaataatgtattactcggggatttcctc

SEQ ID NO: 34234 - DNA, 40 bp, Homo sapiens
aggaaatccccgagtaatacattattgacattttcagcag

SEQ ID NO: 34235 - DNA, 40 bp, Homo sapiens
ctgctgaaaatgtcaataatgtattactcggggatttcct

SEQ ID NO: 34236 - DNA, 40 bp, Homo sapiens
ggaaatccccgagtaatacattattgacattttcagcagt

SEQ ID NO: 34237 - DNA, 40 bp, Homo sapiens
actgctgaaaatgtcaataatgtattactcggggatttcc

SEQ ID NO: 34238 - DNA, 40 bp, Homo sapiens
gaaatccccgagtaatacattattgacattttcagcagtt

SEQ ID NO: 34239 - DNA, 40 bp, Homo sapiens
aactgctgaaaatgtcaataatgtattactcggggatttc

SEQ ID NO: 34240 - DNA, 40 bp, Homo sapiens
aaatccccgagtaatacattattgacattttcagcagttc

SEQ ID NO: 34241 - DNA, 40 bp, Homo sapiens
gaactgctgaaaatgtcaataatgtattactcggggattt

SEQ ID NO: 34242 - DNA, 40 bp, Homo sapiens
aatccccgagtaatacattattgacattttcagcagttct

SEQ ID NO: 34243 - DNA, 40 bp, Homo sapiens
agaactgctgaaaatgtcaataatgtattactcggggatt

SEQ ID NO: 34244 - DNA, 40 bp, Homo sapiens
atccccgagtaatacattattgacattttcagcagttcta

SEQ ID NO: 34245 - DNA, 40 bp, Homo sapiens
tagaactgctgaaaatgtcaataatgtattactcggggat

SEQ ID NO: 34246 - DNA, 40 bp, Homo sapiens
tccccgagtaatacattattgacattttcagcagttctag

SEQ ID NO: 34247 - DNA, 40 bp, Homo sapiens
ctagaactgctgaaaatgtcaataatgtattactcgggga

SEQ ID NO: 34248 - DNA, 40 bp, Homo sapiens
ccccgagtaatacattattgacattttcagcagttctagt

SEQ ID NO: 34249 - DNA, 40 bp, Homo sapiens
actagaactgctgaaaatgtcaataatgtattactcgggg

SEQ ID NO: 34250 - DNA, 40 bp, Homo sapiens
cccgagtaatacattattgacattttcagcagttctagtt

SEQ ID NO: 34251 - DNA, 40 bp, Homo sapiens
aactagaactgctgaaaatgtcaataatgtattactcggg

SEQ ID NO: 34252 - DNA, 40 bp, Homo sapiens
ccgagtaatacattattgacattttcagcagttctagtta

SEQ ID NO: 34253 - DNA, 40 bp, Homo sapiens
taactagaactgctgaaaatgtcaataatgtattactcgg

SEQ ID NO: 34254 - DNA, 40 bp, Homo sapiens
cgagtaatacattattgacattttcagcagttctagttat

SEQ ID NO: 34255 - DNA, 40 bp, Homo sapiens
ataactagaactgctgaaaatgtcaataatgtattactcg

SEQ ID NO: 34256 - DNA, 40 bp, Homo sapiens
gagtaatacattattgacattttcagcagttctagttata

SEQ ID NO: 34257 - DNA, 40 bp, Homo sapiens
tataactagaactgctgaaaatgtcaataatgtattactc

SEQ ID NO: 34258 - DNA, 40 bp, Homo sapiens
agtaatacattattgacattttcagcagttctagttatat

SEQ ID NO: 34259 - DNA, 40 bp, Homo sapiens
atataactagaactgctgaaaatgtcaataatgtattact

SEQ ID NO: 34260 - DNA, 40 bp, Homo sapiens
gtaatacattattgacattttcagcagttctagttatatt

SEQ ID NO: 34261 - DNA, 40 bp, Homo sapiens
aatataactagaactgctgaaaatgtcaataatgtattac

SEQ ID NO: 34262 - DNA, 40 bp, Homo sapiens
taatacattattgacattttcagcagttctagttatattg

SEQ ID NO: 34263 - DNA, 40 bp, Homo sapiens
caatataactagaactgctgaaaatgtcaataatgtatta

SEQ ID NO: 34264 - DNA, 40 bp, Homo sapiens
aatacattattgacattttcagcagttctagttatattga

SEQ ID NO: 34265 - DNA, 40 bp, Homo sapiens
tcaatataactagaactgctgaaaatgtcaataatgtatt

SEQ ID NO: 34266 - DNA, 40 bp, Homo sapiens
atacattattgacattttcagcagttctagttatattgag

SEQ ID NO: 34267 - DNA, 40 bp, Homo sapiens
ctcaatataactagaactgctgaaaatgtcaataatgtat

SEQ ID NO: 34268 - DNA, 40 bp, Homo sapiens
tacattattgacattttcagcagttctagttatattgaga

SEQ ID NO: 34269 - DNA, 40 bp, Homo sapiens
tctcaatataactagaactgctgaaaatgtcaataatgta

SEQ ID NO: 34270 - DNA, 40 bp, Homo sapiens
acattattgacattttcagcagttctagttatattgagaa

SEQ ID NO: 34271 - DNA, 40 bp, Homo sapiens
ttctcaatataactagaactgctgaaaatgtcaataatgt

SEQ ID NO: 34272 - DNA, 40 bp, Homo sapiens
cattattgacattttcagcagttctagttatattgagaag

SEQ ID NO: 34273 - DNA, 40 bp, Homo sapiens
cttctcaatataactagaactgctgaaaatgtcaataatg

SEQ ID NO: 34274 - DNA, 40 bp, Homo sapiens
attattgacattttcagcagttctagttatattgagaaga

SEQ ID NO: 34275 - DNA, 40 bp, Homo sapiens
tcttctcaatataactagaactgctgaaaatgtcaataat

SEQ ID NO: 34276 - DNA, 40 bp, Homo sapiens
ttattgacattttcagcagttctagttatattgagaagag

SEQ ID NO: 34277 - DNA, 40 bp, Homo sapiens
ctcttctcaatataactagaactgctgaaaatgtcaataa

SEQ ID NO: 34278 - DNA, 40 bp, Homo sapiens
tattgacattttcagcagttctagttatattgagaagagc

SEQ ID NO: 34279 - DNA, 40 bp, Homo sapiens
gctcttctcaatataactagaactgctgaaaatgtcaata

SEQ ID NO: 34280 - DNA, 40 bp, Homo sapiens
attgacattttcagcagttctagttatattgagaagagca

SEQ ID NO: 34281 - DNA, 40 bp, Homo sapiens
tgctcttctcaatataactagaactgctgaaaatgtcaat

SEQ ID NO: 34282 - DNA, 40 bp, Homo sapiens
ttgacattttcagcagttctagttatattgagaagagcat

SEQ ID NO: 34283 - DNA, 40 bp, Homo sapiens
atgctcttctcaatataactagaactgctgaaaatgtcaa

SEQ ID NO: 34284 - DNA, 40 bp, Homo sapiens
tgacattttcagcagttctagttatattgagaagagcatc

SEQ ID NO: 34285 - DNA, 40 bp, Homo sapiens
gatgctcttctcaatataactagaactgctgaaaatgtca

SEQ ID NO: 34286 - DNA, 40 bp, Homo sapiens
gacattttcagcagttctagttatattgagaagagcatct

SEQ ID NO: 34287 - DNA, 40 bp, Homo sapiens
agatgctcttctcaatataactagaactgctgaaaatgtc

SEQ ID NO: 34288 - DNA, 40 bp, Homo sapiens
acattttcagcagttctagttatattgagaagagcatctc

SEQ ID NO: 34289 - DNA, 40 bp, Homo sapiens
gagatgctcttctcaatataactagaactgctgaaaatgt

SEQ ID NO: 34290 - DNA, 40 bp, Homo sapiens
cattttcagcagttctagttatattgagaagagcatctca

SEQ ID NO: 34291 - DNA, 40 bp, Homo sapiens
tgagatgctcttctcaatataactagaactgctgaaaatg

SEQ ID NO: 34292 - DNA, 40 bp, Homo sapiens
attttcagcagttctagttatattgagaagagcatctcat

SEQ ID NO: 34293 - DNA, 40 bp, Homo sapiens
atgagatgctcttctcaatataactagaactgctgaaaat

SEQ ID NO: 34294 - DNA, 40 bp, Homo sapiens
ttttcagcagttctagttatattgagaagagcatctcatg

SEQ ID NO: 34295 - DNA, 40 bp, Homo sapiens
catgagatgctcttctcaatataactagaactgctgaaaa

SEQ ID NO: 34296 - DNA, 40 bp, Homo sapiens
tttcagcagttctagttatattgagaagagcatctcatgg

SEQ ID NO: 34297 - DNA, 40 bp, Homo sapiens
ccatgagatgctcttctcaatataactagaactgctgaaa

SEQ ID NO: 34298 - DNA, 40 bp, Homo sapiens
ttcagcagttctagttatattgagaagagcatctcatgga

SEQ ID NO: 34299 - DNA, 40 bp, Homo sapiens
tccatgagatgctcttctcaatataactagaactgctgaa

SEQ ID NO: 34300 - DNA, 40 bp, Homo sapiens
tcagcagttctagttatattgagaagagcatctcatggaa

SEQ ID NO: 34301 - DNA, 40 bp, Homo sapiens
ttccatgagatgctcttctcaatataactagaactgctga

SEQ ID NO: 34302 - DNA, 40 bp, Homo sapiens
cagcagttctagttatattgagaagagcatctcatggaat

SEQ ID NO: 34303 - DNA, 40 bp, Homo sapiens
attccatgagatgctcttctcaatataactagaactgctg

SEQ ID NO: 34304 - DNA, 40 bp, Homo sapiens
agcagttctagttatattgagaagagcatctcatggaatt

SEQ ID NO: 34305 - DNA, 40 bp, Homo sapiens
aattccatgagatgctcttctcaatataactagaactgct

SEQ ID NO: 34306 - DNA, 40 bp, Homo sapiens
gcagttctagttatattgagaagagcatctcatggaattg

SEQ ID NO: 34307 - DNA, 40 bp, Homo sapiens
caattccatgagatgctcttctcaatataactagaactgc

SEQ ID NO: 34308 - DNA, 40 bp, Homo sapiens
cagttctagttatattgagaagagcatctcatggaattgg

SEQ ID NO: 34309 - DNA, 40 bp, Homo sapiens
ccaattccatgagatgctcttctcaatataactagaactg

SEQ ID NO: 34310 - DNA, 40 bp, Homo sapiens
agttctagttatattgagaagagcatctcatggaattggc

SEQ ID NO: 34311 - DNA, 40 bp, Homo sapiens
gccaattccatgagatgctcttctcaatataactagaact

SEQ ID NO: 34312 - DNA, 40 bp, Homo sapiens
gttctagttatattgagaagagcatctcatggaattggca

SEQ ID NO: 34313 - DNA, 40 bp, Homo sapiens
tgccaattccatgagatgctcttctcaatataactagaac

SEQ ID NO: 34314 - DNA, 40 bp, Homo sapiens
ttctagttatattgagaagagcatctcatggaattggcag

SEQ ID NO: 34315 - DNA, 40 bp, Homo sapiens
ctgccaattccatgagatgctcttctcaatataactagaa

SEQ ID NO: 34316 - DNA, 40 bp, Homo sapiens
tctagttatattgagaagagcatctcatggaattggcaga

SEQ ID NO: 34317 - DNA, 40 bp, Homo sapiens
tctgccaattccatgagatgctcttctcaatataactaga

SEQ ID NO: 34318 - DNA, 40 bp, Homo sapiens
ctagttatattgagaagagcatctcatggaattggcagaa

SEQ ID NO: 34319 - DNA, 40 bp, Homo sapiens
ttctgccaattccatgagatgctcttctcaatataactag

SEQ ID NO: 34320 - DNA, 40 bp, Homo sapiens
tagttatattgagaagagcatctcatggaattggcagaat

SEQ ID NO: 34321 - DNA, 40 bp, Homo sapiens
attctgccaattccatgagatgctcttctcaatataacta

SEQ ID NO: 34322 - DNA, 40 bp, Homo sapiens
agttatattgagaagagcatctcatggaattggcagaatg

SEQ ID NO: 34323 - DNA, 40 bp, Homo sapiens
cattctgccaattccatgagatgctcttctcaatataact

SEQ ID NO: 34324 - DNA, 40 bp, Homo sapiens
gttatattgagaagagcatctcatggaattggcagaatga

SEQ ID NO: 34325 - DNA, 40 bp, Homo sapiens
tcattctgccaattccatgagatgctcttctcaatataac

SEQ ID NO: 34326 - DNA, 40 bp, Homo sapiens
ttatattgagaagagcatctcatggaattggcagaatgaa

SEQ ID NO: 34327 - DNA, 40 bp, Homo sapiens
ttcattctgccaattccatgagatgctcttctcaatataa

SEQ ID NO: 34328 - DNA, 40 bp, Homo sapiens
tatattgagaagagcatctcatggaattggcagaatgaag

SEQ ID NO: 34329 - DNA, 40 bp, Homo sapiens
cttcattctgccaattccatgagatgctcttctcaatata

SEQ ID NO: 34330 - DNA, 40 bp, Homo sapiens
atattgagaagagcatctcatggaattggcagaatgaaga

SEQ ID NO: 34331 - DNA, 40 bp, Homo sapiens
tcttcattctgccaattccatgagatgctcttctcaatat

SEQ ID NO: 34332 - DNA, 40 bp, Homo sapiens
tattgagaagagcatctcatggaattggcagaatgaagat

SEQ ID NO: 34333 - DNA, 40 bp, Homo sapiens
atcttcattctgccaattccatgagatgctcttctcaata

SEQ ID NO: 34334 - DNA, 40 bp, Homo sapiens
attgagaagagcatctcatggaattggcagaatgaagatg

SEQ ID NO: 34335 - DNA, 40 bp, Homo sapiens
catcttcattctgccaattccatgagatgctcttctcaat

SEQ ID NO: 34336 - DNA, 40 bp, Homo sapiens
ttgagaagagcatctcatggaattggcagaatgaagatgg

SEQ ID NO: 34337 - DNA, 40 bp, Homo sapiens
ccatcttcattctgccaattccatgagatgctcttctcaa

SEQ ID NO: 34338 - DNA, 40 bp, Homo sapiens
tgagaagagcatctcatggaattggcagaatgaagatgga

SEQ ID NO: 34339 - DNA, 40 bp, Homo sapiens
tccatcttcattctgccaattccatgagatgctcttctca

SEQ ID NO: 34340 - DNA, 40 bp, Homo sapiens
gagaagagcatctcatggaattggcagaatgaagatggag

SEQ ID NO: 34341 - DNA, 40 bp, Homo sapiens
ctccatcttcattctgccaattccatgagatgctcttctc

SEQ ID NO: 34342 - DNA, 40 bp, Homo sapiens
agaagagcatctcatggaattggcagaatgaagatggaga

SEQ ID NO: 34343 - DNA, 40 bp, Homo sapiens
tctccatcttcattctgccaattccatgagatgctcttct

SEQ ID NO: 34344 - DNA, 40 bp, Homo sapiens
gaagagcatctcatggaattggcagaatgaagatggagat

SEQ ID NO: 34345 - DNA, 40 bp, Homo sapiens
atctccatcttcattctgccaattccatgagatgctcttc

SEQ ID NO: 34346 - DNA, 40 bp, Homo sapiens
aagagcatctcatggaattggcagaatgaagatggagatt

SEQ ID NO: 34347 - DNA, 40 bp, Homo sapiens
aatctccatcttcattctgccaattccatgagatgctctt

SEQ ID NO: 34348 - DNA, 40 bp, Homo sapiens
agagcatctcatggaattggcagaatgaagatggagatta

SEQ ID NO: 34349 - DNA, 40 bp, Homo sapiens
taatctccatcttcattctgccaattccatgagatgctct

SEQ ID NO: 34350 - DNA, 40 bp, Homo sapiens
gagcatctcatggaattggcagaatgaagatggagattaa

SEQ ID NO: 34351 - DNA, 40 bp, Homo sapiens
ttaatctccatcttcattctgccaattccatgagatgctc

SEQ ID NO: 34352 - DNA, 40 bp, Homo sapiens
agcatctcatggaattggcagaatgaagatggagattaaa

SEQ ID NO: 34353 - DNA, 40 bp, Homo sapiens
tttaatctccatcttcattctgccaattccatgagatgct

SEQ ID NO: 34354 - DNA, 40 bp, Homo sapiens
gcatctcatggaattggcagaatgaagatggagattaaat

SEQ ID NO: 34355 - DNA, 40 bp, Homo sapiens
atttaatctccatcttcattctgccaattccatgagatgc

SEQ ID NO: 34356 - DNA, 40 bp, Homo sapiens
catctcatggaattggcagaatgaagatggagattaaatg

SEQ ID NO: 34357 - DNA, 40 bp, Homo sapiens
catttaatctccatcttcattctgccaattccatgagatg

SEQ ID NO: 34358 - DNA, 40 bp, Homo sapiens
atctcatggaattggcagaatgaagatggagattaaatga

SEQ ID NO: 34359 - DNA, 40 bp, Homo sapiens
tcatttaatctccatcttcattctgccaattccatgagat

SEQ ID NO: 34360 - DNA, 40 bp, Homo sapiens
tctcatggaattggcagaatgaagatggagattaaatgag

SEQ ID NO: 34361 - DNA, 40 bp, Homo sapiens
ctcatttaatctccatcttcattctgccaattccatgaga

SEQ ID NO: 34362 - DNA, 40 bp, Homo sapiens
ctcatggaattggcagaatgaagatggagattaaatgaga

SEQ ID NO: 34363 - DNA, 40 bp, Homo sapiens
tctcatttaatctccatcttcattctgccaattccatgag

SEQ ID NO: 34364 - DNA, 40 bp, Homo sapiens
tcatggaattggcagaatgaagatggagattaaatgagat

SEQ ID NO: 34365 - DNA, 40 bp, Homo sapiens
atctcatttaatctccatcttcattctgccaattccatga

SEQ ID NO: 34366 - DNA, 40 bp, Homo sapiens
catggaattggcagaatgaagatggagattaaatgagatg

SEQ ID NO: 34367 - DNA, 40 bp, Homo sapiens
catctcatttaatctccatcttcattctgccaattccatg

SEQ ID NO: 34368 - DNA, 40 bp, Homo sapiens
atggaattggcagaatgaagatggagattaaatgagatga

SEQ ID NO: 34369 - DNA, 40 bp, Homo sapiens
tcatctcatttaatctccatcttcattctgccaattccat

SEQ ID NO: 34370 - DNA, 40 bp, Homo sapiens
tggaattggcagaatgaagatggagattaaatgagatgat

SEQ ID NO: 34371 - DNA, 40 bp, Homo sapiens
atcatctcatttaatctccatcttcattctgccaattcca

SEQ ID NO: 34372 - DNA, 40 bp, Homo sapiens
ggaattggcagaatgaagatggagattaaatgagatgatg

SEQ ID NO: 34373 - DNA, 40 bp, Homo sapiens
catcatctcatttaatctccatcttcattctgccaattcc

SEQ ID NO: 34374 - DNA, 40 bp, Homo sapiens
gaattggcagaatgaagatggagattaaatgagatgatgt

SEQ ID NO: 34375 - DNA, 40 bp, Homo sapiens
acatcatctcatttaatctccatcttcattctgccaattc

SEQ ID NO: 34376 - DNA, 40 bp, Homo sapiens
aattggcagaatgaagatggagattaaatgagatgatgtt

SEQ ID NO: 34377 - DNA, 40 bp, Homo sapiens
aacatcatctcatttaatctccatcttcattctgccaatt

SEQ ID NO: 34378 - DNA, 40 bp, Homo sapiens
attggcagaatgaagatggagattaaatgagatgatgttt

SEQ ID NO: 34379 - DNA, 40 bp, Homo sapiens
aaacatcatctcatttaatctccatcttcattctgccaat

SEQ ID NO: 34380 - DNA, 40 bp, Homo sapiens
ttggcagaatgaagatggagattaaatgagatgatgtttg

SEQ ID NO: 34381 - DNA, 40 bp, Homo sapiens
caaacatcatctcatttaatctccatcttcattctgccaa

SEQ ID NO: 34382 - DNA, 40 bp, Homo sapiens
tggcagaatgaagatggagattaaatgagatgatgtttgt

SEQ ID NO: 34383 - DNA, 40 bp, Homo sapiens
acaaacatcatctcatttaatctccatcttcattctgcca

SEQ ID NO: 34384 - DNA, 40 bp, Homo sapiens
ggcagaatgaagatggagattaaatgagatgatgtttgta

SEQ ID NO: 34385 - DNA, 40 bp, Homo sapiens
tacaaacatcatctcatttaatctccatcttcattctgcc

SEQ ID NO: 34386 - DNA, 40 bp, Homo sapiens
gcagaatgaagatggagattaaatgagatgatgtttgtaa

SEQ ID NO: 34387 - DNA, 40 bp, Homo sapiens
ttacaaacatcatctcatttaatctccatcttcattctgc

SEQ ID NO: 34388 - DNA, 40 bp, Homo sapiens
cagaatgaagatggagattaaatgagatgatgtttgtaat

SEQ ID NO: 34389 - DNA, 40 bp, Homo sapiens
attacaaacatcatctcatttaatctccatcttcattctg

SEQ ID NO: 34390 - DNA, 40 bp, Homo sapiens
agaatgaagatggagattaaatgagatgatgtttgtaata

SEQ ID NO: 34391 - DNA, 40 bp, Homo sapiens
tattacaaacatcatctcatttaatctccatcttcattct

SEQ ID NO: 34392 - DNA, 40 bp, Homo sapiens
gaatgaagatggagattaaatgagatgatgtttgtaatat

SEQ ID NO: 34393 - DNA, 40 bp, Homo sapiens
atattacaaacatcatctcatttaatctccatcttcattc

SEQ ID NO: 34394 - DNA, 40 bp, Homo sapiens
aatgaagatggagattaaatgagatgatgtttgtaatatg

SEQ ID NO: 34395 - DNA, 40 bp, Homo sapiens
catattacaaacatcatctcatttaatctccatcttcatt

SEQ ID NO: 34396 - DNA, 40 bp, Homo sapiens
atgaagatggagattaaatgagatgatgtttgtaatatgc

SEQ ID NO: 34397 - DNA, 40 bp, Homo sapiens
gcatattacaaacatcatctcatttaatctccatcttcat

SEQ ID NO: 34398 - DNA, 40 bp, Homo sapiens
tgaagatggagattaaatgagatgatgtttgtaatatgct

SEQ ID NO: 34399 - DNA, 40 bp, Homo sapiens
agcatattacaaacatcatctcatttaatctccatcttca

SEQ ID NO: 34400 - DNA, 40 bp, Homo sapiens
gaagatggagattaaatgagatgatgtttgtaatatgctt

SEQ ID NO: 34401 - DNA, 40 bp, Homo sapiens
aagcatattacaaacatcatctcatttaatctccatcttc

SEQ ID NO: 34402 - DNA, 40 bp, Homo sapiens
aagatggagattaaatgagatgatgtttgtaatatgctta

SEQ ID NO: 34403 - DNA, 40 bp, Homo sapiens
taagcatattacaaacatcatctcatttaatctccatctt

SEQ ID NO: 34404 - DNA, 40 bp, Homo sapiens
agatggagattaaatgagatgatgtttgtaatatgcttat

SEQ ID NO: 34405 - DNA, 40 bp, Homo sapiens
ataagcatattacaaacatcatctcatttaatctccatct

SEQ ID NO: 34406 - DNA, 40 bp, Homo sapiens
gatggagattaaatgagatgatgtttgtaatatgcttatg

SEQ ID NO: 34407 - DNA, 40 bp, Homo sapiens
cataagcatattacaaacatcatctcatttaatctccatc

SEQ ID NO: 34408 - DNA, 40 bp, Homo sapiens
atggagattaaatgagatgatgtttgtaatatgcttatga

SEQ ID NO: 34409 - DNA, 40 bp, Homo sapiens
tcataagcatattacaaacatcatctcatttaatctccat

SEQ ID NO: 34410 - DNA, 40 bp, Homo sapiens
tggagattaaatgagatgatgtttgtaatatgcttatgac

SEQ ID NO: 34411 - DNA, 40 bp, Homo sapiens
gtcataagcatattacaaacatcatctcatttaatctcca

SEQ ID NO: 34412 - DNA, 40 bp, Homo sapiens
ggagattaaatgagatgatgtttgtaatatgcttatgaca

SEQ ID NO: 34413 - DNA, 40 bp, Homo sapiens
tgtcataagcatattacaaacatcatctcatttaatctcc

SEQ ID NO: 34414 - DNA, 40 bp, Homo sapiens
gagattaaatgagatgatgtttgtaatatgcttatgacag

SEQ ID NO: 34415 - DNA, 40 bp, Homo sapiens
ctgtcataagcatattacaaacatcatctcatttaatctc

SEQ ID NO: 34416 - DNA, 40 bp, Homo sapiens
agattaaatgagatgatgtttgtaatatgcttatgacagt

SEQ ID NO: 34417 - DNA, 40 bp, Homo sapiens
actgtcataagcatattacaaacatcatctcatttaatct

SEQ ID NO: 34418 - DNA, 40 bp, Homo sapiens
gattaaatgagatgatgtttgtaatatgcttatgacagta

SEQ ID NO: 34419 - DNA, 40 bp, Homo sapiens
tactgtcataagcatattacaaacatcatctcatttaatc

SEQ ID NO: 34420 - DNA, 40 bp, Homo sapiens
attaaatgagatgatgtttgtaatatgcttatgacagtat

SEQ ID NO: 34421 - DNA, 40 bp, Homo sapiens
atactgtcataagcatattacaaacatcatctcatttaat

SEQ ID NO: 34422 - DNA, 40 bp, Homo sapiens
ttaaatgagatgatgtttgtaatatgcttatgacagtatc

SEQ ID NO: 34423 - DNA, 40 bp, Homo sapiens
gatactgtcataagcatattacaaacatcatctcatttaa

SEQ ID NO: 34424 - DNA, 40 bp, Homo sapiens
taaatgagatgatgtttgtaatatgcttatgacagtatct

SEQ ID NO: 34425 - DNA, 40 bp, Homo sapiens
agatactgtcataagcatattacaaacatcatctcattta

SEQ ID NO: 34426 - DNA, 40 bp, Homo sapiens
aaatgagatgatgtttgtaatatgcttatgacagtatctg

SEQ ID NO: 34427 - DNA, 40 bp, Homo sapiens
cagatactgtcataagcatattacaaacatcatctcattt

SEQ ID NO: 34428 - DNA, 40 bp, Homo sapiens
aatgagatgatgtttgtaatatgcttatgacagtatctgg

SEQ ID NO: 34429 - DNA, 40 bp, Homo sapiens
ccagatactgtcataagcatattacaaacatcatctcatt

SEQ ID NO: 34430 - DNA, 40 bp, Homo sapiens
atgagatgatgtttgtaatatgcttatgacagtatctggc

SEQ ID NO: 34431 - DNA, 40 bp, Homo sapiens
gccagatactgtcataagcatattacaaacatcatctcat

SEQ ID NO: 34432 - DNA, 40 bp, Homo sapiens
tgagatgatgtttgtaatatgcttatgacagtatctggca

SEQ ID NO: 34433 - DNA, 40 bp, Homo sapiens
tgccagatactgtcataagcatattacaaacatcatctca

SEQ ID NO: 34434 - DNA, 40 bp, Homo sapiens
gagatgatgtttgtaatatgcttatgacagtatctggcat

SEQ ID NO: 34435 - DNA, 40 bp, Homo sapiens
atgccagatactgtcataagcatattacaaacatcatctc

SEQ ID NO: 34436 - DNA, 40 bp, Homo sapiens
agatgatgtttgtaatatgcttatgacagtatctggcata

SEQ ID NO: 34437 - DNA, 40 bp, Homo sapiens
tatgccagatactgtcataagcatattacaaacatcatct

SEQ ID NO: 34438 - DNA, 40 bp, Homo sapiens
gatgatgtttgtaatatgcttatgacagtatctggcatat

SEQ ID NO: 34439 - DNA, 40 bp, Homo sapiens
atatgccagatactgtcataagcatattacaaacatcatc

SEQ ID NO: 34440 - DNA, 40 bp, Homo sapiens
atgatgtttgtaatatgcttatgacagtatctggcatata

SEQ ID NO: 34441 - DNA, 40 bp, Homo sapiens
tatatgccagatactgtcataagcatattacaaacatcat

SEQ ID NO: 34442 - DNA, 40 bp, Homo sapiens
tgatgtttgtaatatgcttatgacagtatctggcatataa

SEQ ID NO: 34443 - DNA, 40 bp, Homo sapiens
ttatatgccagatactgtcataagcatattacaaacatca

SEQ ID NO: 34444 - DNA, 40 bp, Homo sapiens
gatgtttgtaatatgcttatgacagtatctggcatataag

SEQ ID NO: 34445 - DNA, 40 bp, Homo sapiens
cttatatgccagatactgtcataagcatattacaaacatc

SEQ ID NO: 34446 - DNA, 40 bp, Homo sapiens
atgtttgtaatatgcttatgacagtatctggcatataagt

SEQ ID NO: 34447 - DNA, 40 bp, Homo sapiens
acttatatgccagatactgtcataagcatattacaaacat

SEQ ID NO: 34448 - DNA, 40 bp, Homo sapiens
tgtttgtaatatgcttatgacagtatctggcatataagta

SEQ ID NO: 34449 - DNA, 40 bp, Homo sapiens
tacttatatgccagatactgtcataagcatattacaaaca

SEQ ID NO: 34450 - DNA, 40 bp, Homo sapiens
gtttgtaatatgcttatgacagtatctggcatataagtaa

SEQ ID NO: 34451 - DNA, 40 bp, Homo sapiens
ttacttatatgccagatactgtcataagcatattacaaac

SEQ ID NO: 34452 - DNA, 40 bp, Homo sapiens
tttgtaatatgcttatgacagtatctggcatataagtaag

SEQ ID NO: 34453 - DNA, 40 bp, Homo sapiens
cttacttatatgccagatactgtcataagcatattacaaa

SEQ ID NO: 34454 - DNA, 40 bp, Homo sapiens
ttgtaatatgcttatgacagtatctggcatataagtaagg

SEQ ID NO: 34455 - DNA, 40 bp, Homo sapiens
ccttacttatatgccagatactgtcataagcatattacaa

SEQ ID NO: 34456 - DNA, 40 bp, Homo sapiens
tgtaatatgcttatgacagtatctggcatataagtaaggg

SEQ ID NO: 34457 - DNA, 40 bp, Homo sapiens
cccttacttatatgccagatactgtcataagcatattaca

SEQ ID NO: 34458 - DNA, 40 bp, Homo sapiens
gtaatatgcttatgacagtatctggcatataagtaagggc

SEQ ID NO: 34459 - DNA, 40 bp, Homo sapiens
gcccttacttatatgccagatactgtcataagcatattac

SEQ ID NO: 34460 - DNA, 40 bp, Homo sapiens
taatatgcttatgacagtatctggcatataagtaagggct

SEQ ID NO: 34461 - DNA, 40 bp, Homo sapiens
agcccttacttatatgccagatactgtcataagcatatta

SEQ ID NO: 34462 - DNA, 40 bp, Homo sapiens
aatatgcttatgacagtatctggcatataagtaagggctc

SEQ ID NO: 34463 - DNA, 40 bp, Homo sapiens
gagcccttacttatatgccagatactgtcataagcatatt

SEQ ID NO: 34464 - DNA, 40 bp, Homo sapiens
atatgcttatgacagtatctggcatataagtaagggctca

SEQ ID NO: 34465 - DNA, 40 bp, Homo sapiens
tgagcccttacttatatgccagatactgtcataagcatat

SEQ ID NO: 34466 - DNA, 40 bp, Homo sapiens
tatgcttatgacagtatctggcatataagtaagggctcag

SEQ ID NO: 34467 - DNA, 40 bp, Homo sapiens
ctgagcccttacttatatgccagatactgtcataagcata

SEQ ID NO: 34468 - DNA, 40 bp, Homo sapiens
atgcttatgacagtatctggcatataagtaagggctcagt

SEQ ID NO: 34469 - DNA, 40 bp, Homo sapiens
actgagcccttacttatatgccagatactgtcataagcat

SEQ ID NO: 34470 - DNA, 40 bp, Homo sapiens
tgcttatgacagtatctggcatataagtaagggctcagta

SEQ ID NO: 34471 - DNA, 40 bp, Homo sapiens
tactgagcccttacttatatgccagatactgtcataagca

SEQ ID NO: 34472 - DNA, 40 bp, Homo sapiens
gcttatgacagtatctggcatataagtaagggctcagtaa

SEQ ID NO: 34473 - DNA, 40 bp, Homo sapiens
ttactgagcccttacttatatgccagatactgtcataagc

SEQ ID NO: 34474 - DNA, 40 bp, Homo sapiens
cttatgacagtatctggcatataagtaagggctcagtaaa

SEQ ID NO: 34475 - DNA, 40 bp, Homo sapiens
tttactgagcccttacttatatgccagatactgtcataag

SEQ ID NO: 34476 - DNA, 40 bp, Homo sapiens
ttatgacagtatctggcatataagtaagggctcagtaaat

SEQ ID NO: 34477 - DNA, 40 bp, Homo sapiens
atttactgagcccttacttatatgccagatactgtcataa

SEQ ID NO: 34478 - DNA, 40 bp, Homo sapiens
tatgacagtatctggcatataagtaagggctcagtaaatg

SEQ ID NO: 34479 - DNA, 40 bp, Homo sapiens
catttactgagcccttacttatatgccagatactgtcata

SEQ ID NO: 34480 - DNA, 40 bp, Homo sapiens
atgacagtatctggcatataagtaagggctcagtaaatgt

SEQ ID NO: 34481 - DNA, 40 bp, Homo sapiens
acatttactgagcccttacttatatgccagatactgtcat

SEQ ID NO: 34482 - DNA, 40 bp, Homo sapiens
tgacagtatctggcatataagtaagggctcagtaaatgtt

SEQ ID NO: 34483 - DNA, 40 bp, Homo sapiens
aacatttactgagcccttacttatatgccagatactgtca

SEQ ID NO: 34484 - DNA, 40 bp, Homo sapiens
gacagtatctggcatataagtaagggctcagtaaatgttg

SEQ ID NO: 34485 - DNA, 40 bp, Homo sapiens
caacatttactgagcccttacttatatgccagatactgtc

SEQ ID NO: 34486 - DNA, 40 bp, Homo sapiens
acagtatctggcatataagtaagggctcagtaaatgttga

SEQ ID NO: 34487 - DNA, 40 bp, Homo sapiens
tcaacatttactgagcccttacttatatgccagatactgt

SEQ ID NO: 34488 - DNA, 40 bp, Homo sapiens
cagtatctggcatataagtaagggctcagtaaatgttgac

SEQ ID NO: 34489 - DNA, 40 bp, Homo sapiens
gtcaacatttactgagcccttacttatatgccagatactg

SEQ ID NO: 34490 - DNA, 40 bp, Homo sapiens
agtatctggcatataagtaagggctcagtaaatgttgact

SEQ ID NO: 34491 - DNA, 40 bp, Homo sapiens
agtcaacatttactgagcccttacttatatgccagatact

SEQ ID NO: 34492 - DNA, 40 bp, Homo sapiens
gtatctggcatataagtaagggctcagtaaatgttgactg

SEQ ID NO: 34493 - DNA, 40 bp, Homo sapiens
cagtcaacatttactgagcccttacttatatgccagatac

SEQ ID NO: 34494 - DNA, 40 bp, Homo sapiens
tatctggcatataagtaagggctcagtaaatgttgactgc

SEQ ID NO: 34495 - DNA, 40 bp, Homo sapiens
gcagtcaacatttactgagcccttacttatatgccagata

SEQ ID NO: 34496 - DNA, 40 bp, Homo sapiens
atctggcatataagtaagggctcagtaaatgttgactgct

SEQ ID NO: 34497 - DNA, 40 bp, Homo sapiens
agcagtcaacatttactgagcccttacttatatgccagat

SEQ ID NO: 34498 - DNA, 40 bp, Homo sapiens
tctggcatataagtaagggctcagtaaatgttgactgctg

SEQ ID NO: 34499 - DNA, 40 bp, Homo sapiens
cagcagtcaacatttactgagcccttacttatatgccaga

SEQ ID NO: 34500 - DNA, 40 bp, Homo sapiens
ctggcatataagtaagggctcagtaaatgttgactgctgt

SEQ ID NO: 34501 - DNA, 40 bp, Homo sapiens
acagcagtcaacatttactgagcccttacttatatgccag

SEQ ID NO: 34502 - DNA, 40 bp, Homo sapiens
tggcatataagtaagggctcagtaaatgttgactgctgta

SEQ ID NO: 34503 - DNA, 40 bp, Homo sapiens
tacagcagtcaacatttactgagcccttacttatatgcca

SEQ ID NO: 34504 - DNA, 40 bp, Homo sapiens
ggcatataagtaagggctcagtaaatgttgactgctgtaa

SEQ ID NO: 34505 - DNA, 40 bp, Homo sapiens
ttacagcagtcaacatttactgagcccttacttatatgcc

SEQ ID NO: 34506 - DNA, 40 bp, Homo sapiens
gcatataagtaagggctcagtaaatgttgactgctgtaat

SEQ ID NO: 34507 - DNA, 40 bp, Homo sapiens
attacagcagtcaacatttactgagcccttacttatatgc

SEQ ID NO: 34508 - DNA, 40 bp, Homo sapiens
catataagtaagggctcagtaaatgttgactgctgtaatt

SEQ ID NO: 34509 - DNA, 40 bp, Homo sapiens
aattacagcagtcaacatttactgagcccttacttatatg

SEQ ID NO: 34510 - DNA, 40 bp, Homo sapiens
atataagtaagggctcagtaaatgttgactgctgtaatta

SEQ ID NO: 34511 - DNA, 40 bp, Homo sapiens
taattacagcagtcaacatttactgagcccttacttatat

SEQ ID NO: 34512 - DNA, 40 bp, Homo sapiens
tataagtaagggctcagtaaatgttgactgctgtaattac

SEQ ID NO: 34513 - DNA, 40 bp, Homo sapiens
gtaattacagcagtcaacatttactgagcccttacttata

SEQ ID NO: 34514 - DNA, 40 bp, Homo sapiens
ataagtaagggctcagtaaatgttgactgctgtaattact

SEQ ID NO: 34515 - DNA, 40 bp, Homo sapiens
agtaattacagcagtcaacatttactgagcccttacttat

SEQ ID NO: 34516 - DNA, 40 bp, Homo sapiens
taagtaagggctcagtaaatgttgactgctgtaattacta

SEQ ID NO: 34517 - DNA, 40 bp, Homo sapiens
tagtaattacagcagtcaacatttactgagcccttactta

SEQ ID NO: 34518 - DNA, 40 bp, Homo sapiens
aagtaagggctcagtaaatgttgactgctgtaattactat

SEQ ID NO: 34519 - DNA, 40 bp, Homo sapiens
atagtaattacagcagtcaacatttactgagcccttactt

SEQ ID NO: 34520 - DNA, 40 bp, Homo sapiens
agtaagggctcagtaaatgttgactgctgtaattactatt

SEQ ID NO: 34521 - DNA, 40 bp, Homo sapiens
aatagtaattacagcagtcaacatttactgagcccttact

SEQ ID NO: 34522 - DNA, 40 bp, Homo sapiens
gtaagggctcagtaaatgttgactgctgtaattactatta

SEQ ID NO: 34523 - DNA, 40 bp, Homo sapiens
taatagtaattacagcagtcaacatttactgagcccttac

SEQ ID NO: 34524 - DNA, 40 bp, Homo sapiens
taagggctcagtaaatgttgactgctgtaattactattaa

SEQ ID NO: 34525 - DNA, 40 bp, Homo sapiens
ttaatagtaattacagcagtcaacatttactgagccctta

SEQ ID NO: 34526 - DNA, 40 bp, Homo sapiens
aagggctcagtaaatgttgactgctgtaattactattaat

SEQ ID NO: 34527 - DNA, 40 bp, Homo sapiens
attaatagtaattacagcagtcaacatttactgagccctt

SEQ ID NO: 34528 - DNA, 40 bp, Homo sapiens
agggctcagtaaatgttgactgctgtaattactattaata

SEQ ID NO: 34529 - DNA, 40 bp, Homo sapiens
tattaatagtaattacagcagtcaacatttactgagccct

SEQ ID NO: 34530 - DNA, 40 bp, Homo sapiens
gggctcagtaaatgttgactgctgtaattactattaatag

SEQ ID NO: 34531 - DNA, 40 bp, Homo sapiens
ctattaatagtaattacagcagtcaacatttactgagccc

SEQ ID NO: 34532 - DNA, 40 bp, Homo sapiens
ggctcagtaaatgttgactgctgtaattactattaatagt

SEQ ID NO: 34533 - DNA, 40 bp, Homo sapiens
actattaatagtaattacagcagtcaacatttactgagcc

SEQ ID NO: 34534 - DNA, 40 bp, Homo sapiens
gctcagtaaatgttgactgctgtaattactattaatagta

SEQ ID NO: 34535 - DNA, 40 bp, Homo sapiens
tactattaatagtaattacagcagtcaacatttactgagc

SEQ ID NO: 34536 - DNA, 40 bp, Homo sapiens
ctcagtaaatgttgactgctgtaattactattaatagtaa

SEQ ID NO: 34537 - DNA, 40 bp, Homo sapiens
ttactattaatagtaattacagcagtcaacatttactgag

SEQ ID NO: 34538 - DNA, 40 bp, Homo sapiens
tcagtaaatgttgactgctgtaattactattaatagtaat

SEQ ID NO: 34539 - DNA, 40 bp, Homo sapiens
attactattaatagtaattacagcagtcaacatttactga

SEQ ID NO: 34540 - DNA, 40 bp, Homo sapiens
cagtaaatgttgactgctgtaattactattaatagtaata

SEQ ID NO: 34541 - DNA, 40 bp, Homo sapiens
tattactattaatagtaattacagcagtcaacatttactg

SEQ ID NO: 34542 - DNA, 40 bp, Homo sapiens
agtaaatgttgactgctgtaattactattaatagtaatat

SEQ ID NO: 34543 - DNA, 40 bp, Homo sapiens
atattactattaatagtaattacagcagtcaacatttact

SEQ ID NO: 34544 - DNA, 40 bp, Homo sapiens
gtaaatgttgactgctgtaattactattaatagtaatatg

SEQ ID NO: 34545 - DNA, 40 bp, Homo sapiens
catattactattaatagtaattacagcagtcaacatttac

SEQ ID NO: 34546 - DNA, 40 bp, Homo sapiens
taaatgttgactgctgtaattactattaatagtaatatga

SEQ ID NO: 34547 - DNA, 40 bp, Homo sapiens
tcatattactattaatagtaattacagcagtcaacattta

SEQ ID NO: 34548 - DNA, 40 bp, Homo sapiens
aaatgttgactgctgtaattactattaatagtaatatgat

SEQ ID NO: 34549 - DNA, 40 bp, Homo sapiens
atcatattactattaatagtaattacagcagtcaacattt

SEQ ID NO: 34550 - DNA, 40 bp, Homo sapiens
aatgttgactgctgtaattactattaatagtaatatgatt

SEQ ID NO: 34551 - DNA, 40 bp, Homo sapiens
aatcatattactattaatagtaattacagcagtcaacatt

SEQ ID NO: 34552 - DNA, 40 bp, Homo sapiens
atgttgactgctgtaattactattaatagtaatatgatta

SEQ ID NO: 34553 - DNA, 40 bp, Homo sapiens
taatcatattactattaatagtaattacagcagtcaacat

SEQ ID NO: 34554 - DNA, 40 bp, Homo sapiens
tgttgactgctgtaattactattaatagtaatatgattac

SEQ ID NO: 34555 - DNA, 40 bp, Homo sapiens
gtaatcatattactattaatagtaattacagcagtcaaca

SEQ ID NO: 34556 - DNA, 40 bp, Homo sapiens
gttgactgctgtaattactattaatagtaatatgattacc

SEQ ID NO: 34557 - DNA, 40 bp, Homo sapiens
ggtaatcatattactattaatagtaattacagcagtcaac

SEQ ID NO: 34558 - DNA, 40 bp, Homo sapiens
ttgactgctgtaattactattaatagtaatatgattacct

SEQ ID NO: 34559 - DNA, 40 bp, Homo sapiens
aggtaatcatattactattaatagtaattacagcagtcaa

SEQ ID NO: 34560 - DNA, 40 bp, Homo sapiens
tgactgctgtaattactattaatagtaatatgattacctt

SEQ ID NO: 34561 - DNA, 40 bp, Homo sapiens
aaggtaatcatattactattaatagtaattacagcagtca

SEQ ID NO: 34562 - DNA, 40 bp, Homo sapiens
gactgctgtaattactattaatagtaatatgattaccttt

SEQ ID NO: 34563 - DNA, 40 bp, Homo sapiens
aaaggtaatcatattactattaatagtaattacagcagtc

SEQ ID NO: 34564 - DNA, 40 bp, Homo sapiens
actgctgtaattactattaatagtaatatgattaccttta

SEQ ID NO: 34565 - DNA, 40 bp, Homo sapiens
taaaggtaatcatattactattaatagtaattacagcagt

SEQ ID NO: 34566 - DNA, 40 bp, Homo sapiens
ctgctgtaattactattaatagtaatatgattacctttag

SEQ ID NO: 34567 - DNA, 40 bp, Homo sapiens
ctaaaggtaatcatattactattaatagtaattacagcag

SEQ ID NO: 34568 - DNA, 40 bp, Homo sapiens
tgctgtaattactattaatagtaatatgattacctttagt

SEQ ID NO: 34569 - DNA, 40 bp, Homo sapiens
actaaaggtaatcatattactattaatagtaattacagca

SEQ ID NO: 34570 - DNA, 40 bp, Homo sapiens
gctgtaattactattaatagtaatatgattacctttagta

SEQ ID NO: 34571 - DNA, 40 bp, Homo sapiens
tactaaaggtaatcatattactattaatagtaattacagc

SEQ ID NO: 34572 - DNA, 40 bp, Homo sapiens
ctgtaattactattaatagtaatatgattacctttagtaa

SEQ ID NO: 34573 - DNA, 40 bp, Homo sapiens
ttactaaaggtaatcatattactattaatagtaattacag

SEQ ID NO: 34574 - DNA, 40 bp, Homo sapiens
tgtaattactattaatagtaatatgattacctttagtaaa

SEQ ID NO: 34575 - DNA, 40 bp, Homo sapiens
tttactaaaggtaatcatattactattaatagtaattaca

SEQ ID NO: 34576 - DNA, 40 bp, Homo sapiens
gtaattactattaatagtaatatgattacctttagtaaaa

SEQ ID NO: 34577 - DNA, 40 bp, Homo sapiens
ttttactaaaggtaatcatattactattaatagtaattac

SEQ ID NO: 34578 - DNA, 40 bp, Homo sapiens
taattactattaatagtaatatgattacctttagtaaaag

SEQ ID NO: 34579 - DNA, 40 bp, Homo sapiens
cttttactaaaggtaatcatattactattaatagtaatta

SEQ ID NO: 34580 - DNA, 40 bp, Homo sapiens
aattactattaatagtaatatgattacctttagtaaaagt

SEQ ID NO: 34581 - DNA, 40 bp, Homo sapiens
acttttactaaaggtaatcatattactattaatagtaatt

SEQ ID NO: 34582 - DNA, 40 bp, Homo sapiens
attactattaatagtaatatgattacctttagtaaaagtt

SEQ ID NO: 34583 - DNA, 40 bp, Homo sapiens
aacttttactaaaggtaatcatattactattaatagtaat

SEQ ID NO: 34584 - DNA, 40 bp, Homo sapiens
ttactattaatagtaatatgattacctttagtaaaagtta

SEQ ID NO: 34585 - DNA, 40 bp, Homo sapiens
taacttttactaaaggtaatcatattactattaatagtaa

SEQ ID NO: 34586 - DNA, 40 bp, Homo sapiens
tactattaatagtaatatgattacctttagtaaaagttat

SEQ ID NO: 34587 - DNA, 40 bp, Homo sapiens
ataacttttactaaaggtaatcatattactattaatagta

SEQ ID NO: 34588 - DNA, 40 bp, Homo sapiens
actattaatagtaatatgattacctttagtaaaagttatt

SEQ ID NO: 34589 - DNA, 40 bp, Homo sapiens
aataacttttactaaaggtaatcatattactattaatagt

SEQ ID NO: 34590 - DNA, 40 bp, Homo sapiens
ctattaatagtaatatgattacctttagtaaaagttatta

SEQ ID NO: 34591 - DNA, 40 bp, Homo sapiens
taataacttttactaaaggtaatcatattactattaatag

SEQ ID NO: 34592 - DNA, 40 bp, Homo sapiens
tattaatagtaatatgattacctttagtaaaagttattag

SEQ ID NO: 34593 - DNA, 40 bp, Homo sapiens
ctaataacttttactaaaggtaatcatattactattaata

SEQ ID NO: 34594 - DNA, 40 bp, Homo sapiens
attaatagtaatatgattacctttagtaaaagttattagt

SEQ ID NO: 34595 - DNA, 40 bp, Homo sapiens
actaataacttttactaaaggtaatcatattactattaat

SEQ ID NO: 34596 - DNA, 40 bp, Homo sapiens
ttaatagtaatatgattacctttagtaaaagttattagtt

SEQ ID NO: 34597 - DNA, 40 bp, Homo sapiens
aactaataacttttactaaaggtaatcatattactattaa

SEQ ID NO: 34598 - DNA, 40 bp, Homo sapiens
taatagtaatatgattacctttagtaaaagttattagttt

SEQ ID NO: 34599 - DNA, 40 bp, Homo sapiens
aaactaataacttttactaaaggtaatcatattactatta

SEQ ID NO: 34600 - DNA, 40 bp, Homo sapiens
aatagtaatatgattacctttagtaaaagttattagtttc

SEQ ID NO: 34601 - DNA, 40 bp, Homo sapiens
gaaactaataacttttactaaaggtaatcatattactatt

SEQ ID NO: 34602 - DNA, 40 bp, Homo sapiens
atagtaatatgattacctttagtaaaagttattagtttct

SEQ ID NO: 34603 - DNA, 40 bp, Homo sapiens
agaaactaataacttttactaaaggtaatcatattactat

SEQ ID NO: 34604 - DNA, 40 bp, Homo sapiens
tagtaatatgattacctttagtaaaagttattagtttctt

SEQ ID NO: 34605 - DNA, 40 bp, Homo sapiens
aagaaactaataacttttactaaaggtaatcatattacta

SEQ ID NO: 34606 - DNA, 40 bp, Homo sapiens
agtaatatgattacctttagtaaaagttattagtttcttt

SEQ ID NO: 34607 - DNA, 40 bp, Homo sapiens
aaagaaactaataacttttactaaaggtaatcatattact

SEQ ID NO: 34608 - DNA, 40 bp, Homo sapiens
gtaatatgattacctttagtaaaagttattagtttcttta

SEQ ID NO: 34609 - DNA, 40 bp, Homo sapiens
taaagaaactaataacttttactaaaggtaatcatattac

SEQ ID NO: 34610 - DNA, 40 bp, Homo sapiens
taatatgattacctttagtaaaagttattagtttctttag

SEQ ID NO: 34611 - DNA, 40 bp, Homo sapiens
ctaaagaaactaataacttttactaaaggtaatcatatta

SEQ ID NO: 34612 - DNA, 40 bp, Homo sapiens
aatatgattacctttagtaaaagttattagtttctttagg

SEQ ID NO: 34613 - DNA, 40 bp, Homo sapiens
cctaaagaaactaataacttttactaaaggtaatcatatt

SEQ ID NO: 34614 - DNA, 40 bp, Homo sapiens
atatgattacctttagtaaaagttattagtttctttaggt

SEQ ID NO: 34615 - DNA, 40 bp, Homo sapiens
acctaaagaaactaataacttttactaaaggtaatcatat

SEQ ID NO: 34616 - DNA, 40 bp, Homo sapiens
tatgattacctttagtaaaagttattagtttctttaggtt

SEQ ID NO: 34617 - DNA, 40 bp, Homo sapiens
aacctaaagaaactaataacttttactaaaggtaatcata

SEQ ID NO: 34618 - DNA, 40 bp, Homo sapiens
atgattacctttagtaaaagttattagtttctttaggttt

SEQ ID NO: 34619 - DNA, 40 bp, Homo sapiens
aaacctaaagaaactaataacttttactaaaggtaatcat

SEQ ID NO: 34620 - DNA, 40 bp, Homo sapiens
tgattacctttagtaaaagttattagtttctttaggtttt

SEQ ID NO: 34621 - DNA, 40 bp, Homo sapiens
aaaacctaaagaaactaataacttttactaaaggtaatca

SEQ ID NO: 34622 - DNA, 40 bp, Homo sapiens
gattacctttagtaaaagttattagtttctttaggttttt

SEQ ID NO: 34623 - DNA, 40 bp, Homo sapiens
aaaaacctaaagaaactaataacttttactaaaggtaatc

SEQ ID NO: 34624 - DNA, 40 bp, Homo sapiens
attacctttagtaaaagttattagtttctttaggtttttt

SEQ ID NO: 34625 - DNA, 40 bp, Homo sapiens
aaaaaacctaaagaaactaataacttttactaaaggtaat

SEQ ID NO: 34626 - DNA, 40 bp, Homo sapiens
ttacctttagtaaaagttattagtttctttaggttttttg

SEQ ID NO: 34627 - DNA, 40 bp, Homo sapiens
caaaaaacctaaagaaactaataacttttactaaaggtaa

SEQ ID NO: 34628 - DNA, 40 bp, Homo sapiens
tacctttagtaaaagttattagtttctttaggttttttgt

SEQ ID NO: 34629 - DNA, 40 bp, Homo sapiens
acaaaaaacctaaagaaactaataacttttactaaaggta

SEQ ID NO: 34630 - DNA, 40 bp, Homo sapiens
acctttagtaaaagttattagtttctttaggttttttgtt

SEQ ID NO: 34631 - DNA, 40 bp, Homo sapiens
aacaaaaaacctaaagaaactaataacttttactaaaggt

SEQ ID NO: 34632 - DNA, 40 bp, Homo sapiens
cctttagtaaaagttattagtttctttaggttttttgttt

SEQ ID NO: 34633 - DNA, 40 bp, Homo sapiens
aaacaaaaaacctaaagaaactaataacttttactaaagg

SEQ ID NO: 34634 - DNA, 40 bp, Homo sapiens
ctttagtaaaagttattagtttctttaggttttttgttta

SEQ ID NO: 34635 - DNA, 40 bp, Homo sapiens
taaacaaaaaacctaaagaaactaataacttttactaaag

SEQ ID NO: 34636 - DNA, 40 bp, Homo sapiens
tttagtaaaagttattagtttctttaggttttttgtttac

SEQ ID NO: 34637 - DNA, 40 bp, Homo sapiens
gtaaacaaaaaacctaaagaaactaataacttttactaaa

SEQ ID NO: 34638 - DNA, 40 bp, Homo sapiens
ttagtaaaagttattagtttctttaggttttttgtttact

SEQ ID NO: 34639 - DNA, 40 bp, Homo sapiens
agtaaacaaaaaacctaaagaaactaataacttttactaa

SEQ ID NO: 34640 - DNA, 40 bp, Homo sapiens
tagtaaaagttattagtttctttaggttttttgtttacta

SEQ ID NO: 34641 - DNA, 40 bp, Homo sapiens
tagtaaacaaaaaacctaaagaaactaataacttttacta

SEQ ID NO: 34642 - DNA, 40 bp, Homo sapiens
agtaaaagttattagtttctttaggttttttgtttactac

SEQ ID NO: 34643 - DNA, 40 bp, Homo sapiens
gtagtaaacaaaaaacctaaagaaactaataacttttact

SEQ ID NO: 34644 - DNA, 40 bp, Homo sapiens
gtaaaagttattagtttctttaggttttttgtttactaca

SEQ ID NO: 34645 - DNA, 40 bp, Homo sapiens
tgtagtaaacaaaaaacctaaagaaactaataacttttac

SEQ ID NO: 34646 - DNA, 40 bp, Homo sapiens
taaaagttattagtttctttaggttttttgtttactacaa

SEQ ID NO: 34647 - DNA, 40 bp, Homo sapiens
ttgtagtaaacaaaaaacctaaagaaactaataactttta

SEQ ID NO: 34648 - DNA, 40 bp, Homo sapiens
aaaagttattagtttctttaggttttttgtttactacaat

SEQ ID NO: 34649 - DNA, 40 bp, Homo sapiens
attgtagtaaacaaaaaacctaaagaaactaataactttt

SEQ ID NO: 34650 - DNA, 40 bp, Homo sapiens
aaagttattagtttctttaggttttttgtttactacaata

SEQ ID NO: 34651 - DNA, 40 bp, Homo sapiens
tattgtagtaaacaaaaaacctaaagaaactaataacttt

SEQ ID NO: 34652 - DNA, 40 bp, Homo sapiens
aagttattagtttctttaggttttttgtttactacaatat

SEQ ID NO: 34653 - DNA, 40 bp, Homo sapiens
atattgtagtaaacaaaaaacctaaagaaactaataactt

SEQ ID NO: 34654 - DNA, 40 bp, Homo sapiens
agttattagtttctttaggttttttgtttactacaatata

SEQ ID NO: 34655 - DNA, 40 bp, Homo sapiens
tatattgtagtaaacaaaaaacctaaagaaactaataact

SEQ ID NO: 34656 - DNA, 40 bp, Homo sapiens
gttattagtttctttaggttttttgtttactacaatatag

SEQ ID NO: 34657 - DNA, 40 bp, Homo sapiens
ctatattgtagtaaacaaaaaacctaaagaaactaataac

SEQ ID NO: 34658 - DNA, 40 bp, Homo sapiens
ttattagtttctttaggttttttgtttactacaatatagt

SEQ ID NO: 34659 - DNA, 40 bp, Homo sapiens
actatattgtagtaaacaaaaaacctaaagaaactaataa

SEQ ID NO: 34660 - DNA, 40 bp, Homo sapiens
tattagtttctttaggttttttgtttactacaatatagta

SEQ ID NO: 34661 - DNA, 40 bp, Homo sapiens
tactatattgtagtaaacaaaaaacctaaagaaactaata

SEQ ID NO: 34662 - DNA, 40 bp, Homo sapiens
attagtttctttaggttttttgtttactacaatatagtaa

SEQ ID NO: 34663 - DNA, 40 bp, Homo sapiens
ttactatattgtagtaaacaaaaaacctaaagaaactaat

SEQ ID NO: 34664 - DNA, 40 bp, Homo sapiens
ttagtttctttaggttttttgtttactacaatatagtaaa

SEQ ID NO: 34665 - DNA, 40 bp, Homo sapiens
tttactatattgtagtaaacaaaaaacctaaagaaactaa

SEQ ID NO: 34666 - DNA, 40 bp, Homo sapiens
tagtttctttaggttttttgtttactacaatatagtaaac

SEQ ID NO: 34667 - DNA, 40 bp, Homo sapiens
gtttactatattgtagtaaacaaaaaacctaaagaaacta

SEQ ID NO: 34668 - DNA, 40 bp, Homo sapiens
agtttctttaggttttttgtttactacaatatagtaaaca

SEQ ID NO: 34669 - DNA, 40 bp, Homo sapiens
tgtttactatattgtagtaaacaaaaaacctaaagaaact

SEQ ID NO: 34670 - DNA, 40 bp, Homo sapiens
gtttctttaggttttttgtttactacaatatagtaaacaa

SEQ ID NO: 34671 - DNA, 40 bp, Homo sapiens
ttgtttactatattgtagtaaacaaaaaacctaaagaaac

SEQ ID NO: 34672 - DNA, 40 bp, Homo sapiens
tttctttaggttttttgtttactacaatatagtaaacaaa

SEQ ID NO: 34673 - DNA, 40 bp, Homo sapiens
tttgtttactatattgtagtaaacaaaaaacctaaagaaa

SEQ ID NO: 34674 - DNA, 40 bp, Homo sapiens
ttctttaggttttttgtttactacaatatagtaaacaaaa

SEQ ID NO: 34675 - DNA, 40 bp, Homo sapiens
ttttgtttactatattgtagtaaacaaaaaacctaaagaa

SEQ ID NO: 34676 - DNA, 40 bp, Homo sapiens
tctttaggttttttgtttactacaatatagtaaacaaaat

SEQ ID NO: 34677 - DNA, 40 bp, Homo sapiens
attttgtttactatattgtagtaaacaaaaaacctaaaga

SEQ ID NO: 34678 - DNA, 40 bp, Homo sapiens
ctttaggttttttgtttactacaatatagtaaacaaaatc

SEQ ID NO: 34679 - DNA, 40 bp, Homo sapiens
gattttgtttactatattgtagtaaacaaaaaacctaaag

SEQ ID NO: 34680 - DNA, 40 bp, Homo sapiens
tttaggttttttgtttactacaatatagtaaacaaaatct

SEQ ID NO: 34681 - DNA, 40 bp, Homo sapiens
agattttgtttactatattgtagtaaacaaaaaacctaaa

SEQ ID NO: 34682 - DNA, 40 bp, Homo sapiens
ttaggttttttgtttactacaatatagtaaacaaaatcta

SEQ ID NO: 34683 - DNA, 40 bp, Homo sapiens
tagattttgtttactatattgtagtaaacaaaaaacctaa

SEQ ID NO: 34684 - DNA, 40 bp, Homo sapiens
taggttttttgtttactacaatatagtaaacaaaatctat

SEQ ID NO: 34685 - DNA, 40 bp, Homo sapiens
atagattttgtttactatattgtagtaaacaaaaaaccta

SEQ ID NO: 34686 - DNA, 40 bp, Homo sapiens
aggttttttgtttactacaatatagtaaacaaaatctata

SEQ ID NO: 34687 - DNA, 40 bp, Homo sapiens
tatagattttgtttactatattgtagtaaacaaaaaacct

SEQ ID NO: 34688 - DNA, 40 bp, Homo sapiens
ggttttttgtttactacaatatagtaaacaaaatctatac

SEQ ID NO: 34689 - DNA, 40 bp, Homo sapiens
gtatagattttgtttactatattgtagtaaacaaaaaacc

SEQ ID NO: 34690 - DNA, 40 bp, Homo sapiens
gttttttgtttactacaatatagtaaacaaaatctatact

SEQ ID NO: 34691 - DNA, 40 bp, Homo sapiens
agtatagattttgtttactatattgtagtaaacaaaaaac

SEQ ID NO: 34692 - DNA, 40 bp, Homo sapiens
ttttttgtttactacaatatagtaaacaaaatctatactt

SEQ ID NO: 34693 - DNA, 40 bp, Homo sapiens
aagtatagattttgtttactatattgtagtaaacaaaaaa

SEQ ID NO: 34694 - DNA, 40 bp, Homo sapiens
tttttgtttactacaatatagtaaacaaaatctatacttg

SEQ ID NO: 34695 - DNA, 40 bp, Homo sapiens
caagtatagattttgtttactatattgtagtaaacaaaaa

SEQ ID NO: 34696 - DNA, 40 bp, Homo sapiens
ttttgtttactacaatatagtaaacaaaatctatacttgg

SEQ ID NO: 34697 - DNA, 40 bp, Homo sapiens
ccaagtatagattttgtttactatattgtagtaaacaaaa

SEQ ID NO: 34698 - DNA, 40 bp, Homo sapiens
tttgtttactacaatatagtaaacaaaatctatacttgga

SEQ ID NO: 34699 - DNA, 40 bp, Homo sapiens
tccaagtatagattttgtttactatattgtagtaaacaaa

SEQ ID NO: 34700 - DNA, 40 bp, Homo sapiens
ttgtttactacaatatagtaaacaaaatctatacttggaa

SEQ ID NO: 34701 - DNA, 40 bp, Homo sapiens
ttccaagtatagattttgtttactatattgtagtaaacaa

SEQ ID NO: 34702 - DNA, 40 bp, Homo sapiens
tgtttactacaatatagtaaacaaaatctatacttggaat

SEQ ID NO: 34703 - DNA, 40 bp, Homo sapiens
attccaagtatagattttgtttactatattgtagtaaaca

SEQ ID NO: 34704 - DNA, 40 bp, Homo sapiens
gtttactacaatatagtaaacaaaatctatacttggaatg

SEQ ID NO: 34705 - DNA, 40 bp, Homo sapiens
cattccaagtatagattttgtttactatattgtagtaaac

SEQ ID NO: 34706 - DNA, 40 bp, Homo sapiens
tttactacaatatagtaaacaaaatctatacttggaatgt

SEQ ID NO: 34707 - DNA, 40 bp, Homo sapiens
acattccaagtatagattttgtttactatattgtagtaaa

SEQ ID NO: 34708 - DNA, 40 bp, Homo sapiens
ttactacaatatagtaaacaaaatctatacttggaatgta

SEQ ID NO: 34709 - DNA, 40 bp, Homo sapiens
tacattccaagtatagattttgtttactatattgtagtaa

SEQ ID NO: 34710 - DNA, 40 bp, Homo sapiens
tactacaatatagtaaacaaaatctatacttggaatgtat

SEQ ID NO: 34711 - DNA, 40 bp, Homo sapiens
atacattccaagtatagattttgtttactatattgtagta

SEQ ID NO: 34712 - DNA, 40 bp, Homo sapiens
actacaatatagtaaacaaaatctatacttggaatgtata

SEQ ID NO: 34713 - DNA, 40 bp, Homo sapiens
tatacattccaagtatagattttgtttactatattgtagt

SEQ ID NO: 34714 - DNA, 40 bp, Homo sapiens
ctacaatatagtaaacaaaatctatacttggaatgtatat

SEQ ID NO: 34715 - DNA, 40 bp, Homo sapiens
atatacattccaagtatagattttgtttactatattgtag

SEQ ID NO: 34716 - DNA, 40 bp, Homo sapiens
tacaatatagtaaacaaaatctatacttggaatgtatata

SEQ ID NO: 34717 - DNA, 40 bp, Homo sapiens
tatatacattccaagtatagattttgtttactatattgta

SEQ ID NO: 34718 - DNA, 40 bp, Homo sapiens
acaatatagtaaacaaaatctatacttggaatgtatatat

SEQ ID NO: 34719 - DNA, 40 bp, Homo sapiens
atatatacattccaagtatagattttgtttactatattgt

SEQ ID NO: 34720 - DNA, 40 bp, Homo sapiens
caatatagtaaacaaaatctatacttggaatgtatatatt

SEQ ID NO: 34721 - DNA, 40 bp, Homo sapiens
aatatatacattccaagtatagattttgtttactatattg

SEQ ID NO: 34722 - DNA, 40 bp, Homo sapiens
aatatagtaaacaaaatctatacttggaatgtatatattg

SEQ ID NO: 34723 - DNA, 40 bp, Homo sapiens
caatatatacattccaagtatagattttgtttactatatt

SEQ ID NO: 34724 - DNA, 40 bp, Homo sapiens
atatagtaaacaaaatctatacttggaatgtatatattgt

SEQ ID NO: 34725 - DNA, 40 bp, Homo sapiens
acaatatatacattccaagtatagattttgtttactatat

SEQ ID NO: 34726 - DNA, 40 bp, Homo sapiens
tatagtaaacaaaatctatacttggaatgtatatattgtt

SEQ ID NO: 34727 - DNA, 40 bp, Homo sapiens
aacaatatatacattccaagtatagattttgtttactata

SEQ ID NO: 34728 - DNA, 40 bp, Homo sapiens
atagtaaacaaaatctatacttggaatgtatatattgttt

SEQ ID NO: 34729 - DNA, 40 bp, Homo sapiens
aaacaatatatacattccaagtatagattttgtttactat

SEQ ID NO: 34730 - DNA, 40 bp, Homo sapiens
tagtaaacaaaatctatacttggaatgtatatattgtttt

SEQ ID NO: 34731 - DNA, 40 bp, Homo sapiens
aaaacaatatatacattccaagtatagattttgtttacta

SEQ ID NO: 34732 - DNA, 40 bp, Homo sapiens
agtaaacaaaatctatacttggaatgtatatattgttttg

SEQ ID NO: 34733 - DNA, 40 bp, Homo sapiens
caaaacaatatatacattccaagtatagattttgtttact

SEQ ID NO: 34734 - DNA, 40 bp, Homo sapiens
gtaaacaaaatctatacttggaatgtatatattgttttgt

SEQ ID NO: 34735 - DNA, 40 bp, Homo sapiens
acaaaacaatatatacattccaagtatagattttgtttac

SEQ ID NO: 34736 - DNA, 40 bp, Homo sapiens
taaacaaaatctatacttggaatgtatatattgttttgtt

SEQ ID NO: 34737 - DNA, 40 bp, Homo sapiens
aacaaaacaatatatacattccaagtatagattttgttta

SEQ ID NO: 34738 - DNA, 40 bp, Homo sapiens
aaacaaaatctatacttggaatgtatatattgttttgttt

SEQ ID NO: 34739 - DNA, 40 bp, Homo sapiens
aaacaaaacaatatatacattccaagtatagattttgttt

SEQ ID NO: 34740 - DNA, 40 bp, Homo sapiens
aacaaaatctatacttggaatgtatatattgttttgtttt

SEQ ID NO: 34741 - DNA, 40 bp, Homo sapiens
aaaacaaaacaatatatacattccaagtatagattttgtt

SEQ ID NO: 34742 - DNA, 40 bp, Homo sapiens
acaaaatctatacttggaatgtatatattgttttgttttg

SEQ ID NO: 34743 - DNA, 40 bp, Homo sapiens
caaaacaaaacaatatatacattccaagtatagattttgt

SEQ ID NO: 34744 - DNA, 40 bp, Homo sapiens
caaaatctatacttggaatgtatatattgttttgttttga

SEQ ID NO: 34745 - DNA, 40 bp, Homo sapiens
tcaaaacaaaacaatatatacattccaagtatagattttg

SEQ ID NO: 34746 - DNA, 40 bp, Homo sapiens
aaaatctatacttggaatgtatatattgttttgttttgat

SEQ ID NO: 34747 - DNA, 40 bp, Homo sapiens
atcaaaacaaaacaatatatacattccaagtatagatttt

SEQ ID NO: 34748 - DNA, 40 bp, Homo sapiens
aaatctatacttggaatgtatatattgttttgttttgata

SEQ ID NO: 34749 - DNA, 40 bp, Homo sapiens
tatcaaaacaaaacaatatatacattccaagtatagattt

SEQ ID NO: 34750 - DNA, 40 bp, Homo sapiens
aatctatacttggaatgtatatattgttttgttttgatac

SEQ ID NO: 34751 - DNA, 40 bp, Homo sapiens
gtatcaaaacaaaacaatatatacattccaagtatagatt

SEQ ID NO: 34752 - DNA, 40 bp, Homo sapiens
atctatacttggaatgtatatattgttttgttttgataca

SEQ ID NO: 34753 - DNA, 40 bp, Homo sapiens
tgtatcaaaacaaaacaatatatacattccaagtatagat

SEQ ID NO: 34754 - DNA, 40 bp, Homo sapiens
tctatacttggaatgtatatattgttttgttttgatacat

SEQ ID NO: 34755 - DNA, 40 bp, Homo sapiens
atgtatcaaaacaaaacaatatatacattccaagtataga

SEQ ID NO: 34756 - DNA, 40 bp, Homo sapiens
ctatacttggaatgtatatattgttttgttttgatacatg

SEQ ID NO: 34757 - DNA, 40 bp, Homo sapiens
catgtatcaaaacaaaacaatatatacattccaagtatag

SEQ ID NO: 34758 - DNA, 40 bp, Homo sapiens
tatacttggaatgtatatattgttttgttttgatacatgg

SEQ ID NO: 34759 - DNA, 40 bp, Homo sapiens
ccatgtatcaaaacaaaacaatatatacattccaagtata

SEQ ID NO: 34760 - DNA, 40 bp, Homo sapiens
atacttggaatgtatatattgttttgttttgatacatgga

SEQ ID NO: 34761 - DNA, 40 bp, Homo sapiens
tccatgtatcaaaacaaaacaatatatacattccaagtat

SEQ ID NO: 34762 - DNA, 40 bp, Homo sapiens
tacttggaatgtatatattgttttgttttgatacatggaa

SEQ ID NO: 34763 - DNA, 40 bp, Homo sapiens
ttccatgtatcaaaacaaaacaatatatacattccaagta

SEQ ID NO: 34764 - DNA, 40 bp, Homo sapiens
acttggaatgtatatattgttttgttttgatacatggaat

SEQ ID NO: 34765 - DNA, 40 bp, Homo sapiens
attccatgtatcaaaacaaaacaatatatacattccaagt

SEQ ID NO: 34766 - DNA, 40 bp, Homo sapiens
cttggaatgtatatattgttttgttttgatacatggaata

SEQ ID NO: 34767 - DNA, 40 bp, Homo sapiens
tattccatgtatcaaaacaaaacaatatatacattccaag

SEQ ID NO: 34768 - DNA, 40 bp, Homo sapiens
ttggaatgtatatattgttttgttttgatacatggaatat

SEQ ID NO: 34769 - DNA, 40 bp, Homo sapiens
atattccatgtatcaaaacaaaacaatatatacattccaa

SEQ ID NO: 34770 - DNA, 40 bp, Homo sapiens
tggaatgtatatattgttttgttttgatacatggaatatg

SEQ ID NO: 34771 - DNA, 40 bp, Homo sapiens
catattccatgtatcaaaacaaaacaatatatacattcca

SEQ ID NO: 34772 - DNA, 40 bp, Homo sapiens
ggaatgtatatattgttttgttttgatacatggaatatgt

SEQ ID NO: 34773 - DNA, 40 bp, Homo sapiens
acatattccatgtatcaaaacaaaacaatatatacattcc

SEQ ID NO: 34774 - DNA, 40 bp, Homo sapiens
gaatgtatatattgttttgttttgatacatggaatatgtc

SEQ ID NO: 34775 - DNA, 40 bp, Homo sapiens
gacatattccatgtatcaaaacaaaacaatatatacattc

SEQ ID NO: 34776 - DNA, 40 bp, Homo sapiens
aatgtatatattgttttgttttgatacatggaatatgtct

SEQ ID NO: 34777 - DNA, 40 bp, Homo sapiens
agacatattccatgtatcaaaacaaaacaatatatacatt

SEQ ID NO: 34778 - DNA, 40 bp, Homo sapiens
atgtatatattgttttgttttgatacatggaatatgtctc

SEQ ID NO: 34779 - DNA, 40 bp, Homo sapiens
gagacatattccatgtatcaaaacaaaacaatatatacat

SEQ ID NO: 34780 - DNA, 40 bp, Homo sapiens
tgtatatattgttttgttttgatacatggaatatgtctct

SEQ ID NO: 34781 - DNA, 40 bp, Homo sapiens
agagacatattccatgtatcaaaacaaaacaatatataca

SEQ ID NO: 34782 - DNA, 40 bp, Homo sapiens
gtatatattgttttgttttgatacatggaatatgtctctg

SEQ ID NO: 34783 - DNA, 40 bp, Homo sapiens
cagagacatattccatgtatcaaaacaaaacaatatatac

SEQ ID NO: 34784 - DNA, 40 bp, Homo sapiens
tatatattgttttgttttgatacatggaatatgtctctgt

SEQ ID NO: 34785 - DNA, 40 bp, Homo sapiens
acagagacatattccatgtatcaaaacaaaacaatatata

SEQ ID NO: 34786 - DNA, 40 bp, Homo sapiens
atatattgttttgttttgatacatggaatatgtctctgtg

SEQ ID NO: 34787 - DNA, 40 bp, Homo sapiens
cacagagacatattccatgtatcaaaacaaaacaatatat

SEQ ID NO: 34788 - DNA, 40 bp, Homo sapiens
tatattgttttgttttgatacatggaatatgtctctgtgt

SEQ ID NO: 34789 - DNA, 40 bp, Homo sapiens
acacagagacatattccatgtatcaaaacaaaacaatata

SEQ ID NO: 34790 - DNA, 40 bp, Homo sapiens
atattgttttgttttgatacatggaatatgtctctgtgtc

SEQ ID NO: 34791 - DNA, 40 bp, Homo sapiens
gacacagagacatattccatgtatcaaaacaaaacaatat

SEQ ID NO: 34792 - DNA, 40 bp, Homo sapiens
tattgttttgttttgatacatggaatatgtctctgtgtca

SEQ ID NO: 34793 - DNA, 40 bp, Homo sapiens
tgacacagagacatattccatgtatcaaaacaaaacaata

SEQ ID NO: 34794 - DNA, 40 bp, Homo sapiens
attgttttgttttgatacatggaatatgtctctgtgtcag

SEQ ID NO: 34795 - DNA, 40 bp, Homo sapiens
ctgacacagagacatattccatgtatcaaaacaaaacaat

SEQ ID NO: 34796 - DNA, 40 bp, Homo sapiens
ttgttttgttttgatacatggaatatgtctctgtgtcaga

SEQ ID NO: 34797 - DNA, 40 bp, Homo sapiens
tctgacacagagacatattccatgtatcaaaacaaaacaa

SEQ ID NO: 34798 - DNA, 40 bp, Homo sapiens
tgttttgttttgatacatggaatatgtctctgtgtcagag

SEQ ID NO: 34799 - DNA, 40 bp, Homo sapiens
ctctgacacagagacatattccatgtatcaaaacaaaaca

SEQ ID NO: 34800 - DNA, 40 bp, Homo sapiens
gttttgttttgatacatggaatatgtctctgtgtcagagt

SEQ ID NO: 34801 - DNA, 40 bp, Homo sapiens
actctgacacagagacatattccatgtatcaaaacaaaac

SEQ ID NO: 34802 - DNA, 40 bp, Homo sapiens
ttttgttttgatacatggaatatgtctctgtgtcagagtc

SEQ ID NO: 34803 - DNA, 40 bp, Homo sapiens
gactctgacacagagacatattccatgtatcaaaacaaaa

SEQ ID NO: 34804 - DNA, 40 bp, Homo sapiens
tttgttttgatacatggaatatgtctctgtgtcagagtca

SEQ ID NO: 34805 - DNA, 40 bp, Homo sapiens
tgactctgacacagagacatattccatgtatcaaaacaaa

SEQ ID NO: 34806 - DNA, 40 bp, Homo sapiens
ttgttttgatacatggaatatgtctctgtgtcagagtcac

SEQ ID NO: 34807 - DNA, 40 bp, Homo sapiens
gtgactctgacacagagacatattccatgtatcaaaacaa

SEQ ID NO: 34808 - DNA, 40 bp, Homo sapiens
tgttttgatacatggaatatgtctctgtgtcagagtcact

SEQ ID NO: 34809 - DNA, 40 bp, Homo sapiens
agtgactctgacacagagacatattccatgtatcaaaaca

SEQ ID NO: 34810 - DNA, 40 bp, Homo sapiens
gttttgatacatggaatatgtctctgtgtcagagtcactg

SEQ ID NO: 34811 - DNA, 40 bp, Homo sapiens
cagtgactctgacacagagacatattccatgtatcaaaac

SEQ ID NO: 34812 - DNA, 40 bp, Homo sapiens
ttttgatacatggaatatgtctctgtgtcagagtcactgc

SEQ ID NO: 34813 - DNA, 40 bp, Homo sapiens
gcagtgactctgacacagagacatattccatgtatcaaaa

SEQ ID NO: 34814 - DNA, 40 bp, Homo sapiens
tttgatacatggaatatgtctctgtgtcagagtcactgcc

SEQ ID NO: 34815 - DNA, 40 bp, Homo sapiens
ggcagtgactctgacacagagacatattccatgtatcaaa

SEQ ID NO: 34816 - DNA, 40 bp, Homo sapiens
ttgatacatggaatatgtctctgtgtcagagtcactgcct

SEQ ID NO: 34817 - DNA, 40 bp, Homo sapiens
aggcagtgactctgacacagagacatattccatgtatcaa

SEQ ID NO: 34818 - DNA, 40 bp, Homo sapiens
tgatacatggaatatgtctctgtgtcagagtcactgcctg

SEQ ID NO: 34819 - DNA, 40 bp, Homo sapiens
caggcagtgactctgacacagagacatattccatgtatca

SEQ ID NO: 34820 - DNA, 40 bp, Homo sapiens
gatacatggaatatgtctctgtgtcagagtcactgcctga

SEQ ID NO: 34821 - DNA, 40 bp, Homo sapiens
tcaggcagtgactctgacacagagacatattccatgtatc

SEQ ID NO: 34822 - DNA, 40 bp, Homo sapiens
atacatggaatatgtctctgtgtcagagtcactgcctgag

SEQ ID NO: 34823 - DNA, 40 bp, Homo sapiens
ctcaggcagtgactctgacacagagacatattccatgtat

SEQ ID NO: 34824 - DNA, 40 bp, Homo sapiens
tacatggaatatgtctctgtgtcagagtcactgcctgagt

SEQ ID NO: 34825 - DNA, 40 bp, Homo sapiens
actcaggcagtgactctgacacagagacatattccatgta

SEQ ID NO: 34826 - DNA, 40 bp, Homo sapiens
acatggaatatgtctctgtgtcagagtcactgcctgagtt

SEQ ID NO: 34827 - DNA, 40 bp, Homo sapiens
aactcaggcagtgactctgacacagagacatattccatgt

SEQ ID NO: 34828 - DNA, 40 bp, Homo sapiens
catggaatatgtctctgtgtcagagtcactgcctgagttg

SEQ ID NO: 34829 - DNA, 40 bp, Homo sapiens
caactcaggcagtgactctgacacagagacatattccatg

SEQ ID NO: 34830 - DNA, 40 bp, Homo sapiens
atggaatatgtctctgtgtcagagtcactgcctgagttgg

SEQ ID NO: 34831 - DNA, 40 bp, Homo sapiens
ccaactcaggcagtgactctgacacagagacatattccat

SEQ ID NO: 34832 - DNA, 40 bp, Homo sapiens
tggaatatgtctctgtgtcagagtcactgcctgagttgga

SEQ ID NO: 34833 - DNA, 40 bp, Homo sapiens
tccaactcaggcagtgactctgacacagagacatattcca

SEQ ID NO: 34834 - DNA, 40 bp, Homo sapiens
ggaatatgtctctgtgtcagagtcactgcctgagttggaa

SEQ ID NO: 34835 - DNA, 40 bp, Homo sapiens
ttccaactcaggcagtgactctgacacagagacatattcc

SEQ ID NO: 34836 - DNA, 40 bp, Homo sapiens
gaatatgtctctgtgtcagagtcactgcctgagttggaaa

SEQ ID NO: 34837 - DNA, 40 bp, Homo sapiens
tttccaactcaggcagtgactctgacacagagacatattc

SEQ ID NO: 34838 - DNA, 40 bp, Homo sapiens
aatatgtctctgtgtcagagtcactgcctgagttggaaaa

SEQ ID NO: 34839 - DNA, 40 bp, Homo sapiens
ttttccaactcaggcagtgactctgacacagagacatatt

SEQ ID NO: 34840 - DNA, 40 bp, Homo sapiens
atatgtctctgtgtcagagtcactgcctgagttggaaaac

SEQ ID NO: 34841 - DNA, 40 bp, Homo sapiens
gttttccaactcaggcagtgactctgacacagagacatat

SEQ ID NO: 34842 - DNA, 40 bp, Homo sapiens
tatgtctctgtgtcagagtcactgcctgagttggaaaacc

SEQ ID NO: 34843 - DNA, 40 bp, Homo sapiens
ggttttccaactcaggcagtgactctgacacagagacata

SEQ ID NO: 34844 - DNA, 40 bp, Homo sapiens
atgtctctgtgtcagagtcactgcctgagttggaaaaccc

SEQ ID NO: 34845 - DNA, 40 bp, Homo sapiens
gggttttccaactcaggcagtgactctgacacagagacat

SEQ ID NO: 34846 - DNA, 40 bp, Homo sapiens
tgtctctgtgtcagagtcactgcctgagttggaaaaccca

SEQ ID NO: 34847 - DNA, 40 bp, Homo sapiens
tgggttttccaactcaggcagtgactctgacacagagaca

SEQ ID NO: 34848 - DNA, 40 bp, Homo sapiens
gtctctgtgtcagagtcactgcctgagttggaaaacccat

SEQ ID NO: 34849 - DNA, 40 bp, Homo sapiens
atgggttttccaactcaggcagtgactctgacacagagac

SEQ ID NO: 34850 - DNA, 40 bp, Homo sapiens
tctctgtgtcagagtcactgcctgagttggaaaacccata

SEQ ID NO: 34851 - DNA, 40 bp, Homo sapiens
tatgggttttccaactcaggcagtgactctgacacagaga

SEQ ID NO: 34852 - DNA, 40 bp, Homo sapiens
ctctgtgtcagagtcactgcctgagttggaaaacccatac

SEQ ID NO: 34853 - DNA, 40 bp, Homo sapiens
gtatgggttttccaactcaggcagtgactctgacacagag

SEQ ID NO: 34854 - DNA, 40 bp, Homo sapiens
tctgtgtcagagtcactgcctgagttggaaaacccatact

SEQ ID NO: 34855 - DNA, 40 bp, Homo sapiens
agtatgggttttccaactcaggcagtgactctgacacaga

SEQ ID NO: 34856 - DNA, 40 bp, Homo sapiens
ctgtgtcagagtcactgcctgagttggaaaacccatactc

SEQ ID NO: 34857 - DNA, 40 bp, Homo sapiens
gagtatgggttttccaactcaggcagtgactctgacacag

SEQ ID NO: 34858 - DNA, 40 bp, Homo sapiens
tgtgtcagagtcactgcctgagttggaaaacccatactcg

SEQ ID NO: 34859 - DNA, 40 bp, Homo sapiens
cgagtatgggttttccaactcaggcagtgactctgacaca

SEQ ID NO: 34860 - DNA, 40 bp, Homo sapiens
gtgtcagagtcactgcctgagttggaaaacccatactcga

SEQ ID NO: 34861 - DNA, 40 bp, Homo sapiens
tcgagtatgggttttccaactcaggcagtgactctgacac

SEQ ID NO: 34862 - DNA, 40 bp, Homo sapiens
tgtcagagtcactgcctgagttggaaaacccatactcgag

SEQ ID NO: 34863 - DNA, 40 bp, Homo sapiens
ctcgagtatgggttttccaactcaggcagtgactctgaca

SEQ ID NO: 34864 - DNA, 40 bp, Homo sapiens
gtcagagtcactgcctgagttggaaaacccatactcgagt

SEQ ID NO: 34865 - DNA, 40 bp, Homo sapiens
actcgagtatgggttttccaactcaggcagtgactctgac

SEQ ID NO: 34866 - DNA, 40 bp, Homo sapiens
tcagagtcactgcctgagttggaaaacccatactcgagta

SEQ ID NO: 34867 - DNA, 40 bp, Homo sapiens
tactcgagtatgggttttccaactcaggcagtgactctga

SEQ ID NO: 34868 - DNA, 40 bp, Homo sapiens
cagagtcactgcctgagttggaaaacccatactcgagtat

SEQ ID NO: 34869 - DNA, 40 bp, Homo sapiens
atactcgagtatgggttttccaactcaggcagtgactctg

SEQ ID NO: 34870 - DNA, 40 bp, Homo sapiens
agagtcactgcctgagttggaaaacccatactcgagtatg

SEQ ID NO: 34871 - DNA, 40 bp, Homo sapiens
catactcgagtatgggttttccaactcaggcagtgactct

SEQ ID NO: 34872 - DNA, 40 bp, Homo sapiens
gagtcactgcctgagttggaaaacccatactcgagtatgt

SEQ ID NO: 34873 - DNA, 40 bp, Homo sapiens
acatactcgagtatgggttttccaactcaggcagtgactc

SEQ ID NO: 34874 - DNA, 40 bp, Homo sapiens
agtcactgcctgagttggaaaacccatactcgagtatgtt

SEQ ID NO: 34875 - DNA, 40 bp, Homo sapiens
aacatactcgagtatgggttttccaactcaggcagtgact

SEQ ID NO: 34876 - DNA, 40 bp, Homo sapiens
gtcactgcctgagttggaaaacccatactcgagtatgtta

SEQ ID NO: 34877 - DNA, 40 bp, Homo sapiens
taacatactcgagtatgggttttccaactcaggcagtgac

SEQ ID NO: 34878 - DNA, 40 bp, Homo sapiens
tcactgcctgagttggaaaacccatactcgagtatgttaa

SEQ ID NO: 34879 - DNA, 40 bp, Homo sapiens
ttaacatactcgagtatgggttttccaactcaggcagtga

SEQ ID NO: 34880 - DNA, 40 bp, Homo sapiens
cactgcctgagttggaaaacccatactcgagtatgttaaa

SEQ ID NO: 34881 - DNA, 40 bp, Homo sapiens
tttaacatactcgagtatgggttttccaactcaggcagtg

SEQ ID NO: 34882 - DNA, 40 bp, Homo sapiens
actgcctgagttggaaaacccatactcgagtatgttaaaa

SEQ ID NO: 34883 - DNA, 40 bp, Homo sapiens
ttttaacatactcgagtatgggttttccaactcaggcagt

SEQ ID NO: 34884 - DNA, 40 bp, Homo sapiens
ctgcctgagttggaaaacccatactcgagtatgttaaaag

SEQ ID NO: 34885 - DNA, 40 bp, Homo sapiens
cttttaacatactcgagtatgggttttccaactcaggcag

SEQ ID NO: 34886 - DNA, 40 bp, Homo sapiens
tgcctgagttggaaaacccatactcgagtatgttaaaagg

SEQ ID NO: 34887 - DNA, 40 bp, Homo sapiens
ccttttaacatactcgagtatgggttttccaactcaggca

SEQ ID NO: 34888 - DNA, 40 bp, Homo sapiens
gcctgagttggaaaacccatactcgagtatgttaaaaggt

SEQ ID NO: 34889 - DNA, 40 bp, Homo sapiens
accttttaacatactcgagtatgggttttccaactcaggc

SEQ ID NO: 34890 - DNA, 40 bp, Homo sapiens
cctgagttggaaaacccatactcgagtatgttaaaaggtg

SEQ ID NO: 34891 - DNA, 40 bp, Homo sapiens
caccttttaacatactcgagtatgggttttccaactcagg

SEQ ID NO: 34892 - DNA, 40 bp, Homo sapiens
ctgagttggaaaacccatactcgagtatgttaaaaggtga

SEQ ID NO: 34893 - DNA, 40 bp, Homo sapiens
tcaccttttaacatactcgagtatgggttttccaactcag

SEQ ID NO: 34894 - DNA, 40 bp, Homo sapiens
tgagttggaaaacccatactcgagtatgttaaaaggtgaa

SEQ ID NO: 34895 - DNA, 40 bp, Homo sapiens
ttcaccttttaacatactcgagtatgggttttccaactca

SEQ ID NO: 34896 - DNA, 40 bp, Homo sapiens
gagttggaaaacccatactcgagtatgttaaaaggtgaac

SEQ ID NO: 34897 - DNA, 40 bp, Homo sapiens
gttcaccttttaacatactcgagtatgggttttccaactc

SEQ ID NO: 34898 - DNA, 40 bp, Homo sapiens
agttggaaaacccatactcgagtatgttaaaaggtgaaca

SEQ ID NO: 34899 - DNA, 40 bp, Homo sapiens
tgttcaccttttaacatactcgagtatgggttttccaact

SEQ ID NO: 34900 - DNA, 40 bp, Homo sapiens
gttggaaaacccatactcgagtatgttaaaaggtgaacac

SEQ ID NO: 34901 - DNA, 40 bp, Homo sapiens
gtgttcaccttttaacatactcgagtatgggttttccaac

SEQ ID NO: 34902 - DNA, 40 bp, Homo sapiens
ttggaaaacccatactcgagtatgttaaaaggtgaacaca

SEQ ID NO: 34903 - DNA, 40 bp, Homo sapiens
tgtgttcaccttttaacatactcgagtatgggttttccaa

SEQ ID NO: 34904 - DNA, 40 bp, Homo sapiens
tggaaaacccatactcgagtatgttaaaaggtgaacacac

SEQ ID NO: 34905 - DNA, 40 bp, Homo sapiens
gtgtgttcaccttttaacatactcgagtatgggttttcca

SEQ ID NO: 34906 - DNA, 40 bp, Homo sapiens
ggaaaacccatactcgagtatgttaaaaggtgaacacact

SEQ ID NO: 34907 - DNA, 40 bp, Homo sapiens
agtgtgttcaccttttaacatactcgagtatgggttttcc

SEQ ID NO: 34908 - DNA, 40 bp, Homo sapiens
gaaaacccatactcgagtatgttaaaaggtgaacacactg

SEQ ID NO: 34909 - DNA, 40 bp, Homo sapiens
cagtgtgttcaccttttaacatactcgagtatgggttttc

SEQ ID NO: 34910 - DNA, 40 bp, Homo sapiens
aaaacccatactcgagtatgttaaaaggtgaacacactga

SEQ ID NO: 34911 - DNA, 40 bp, Homo sapiens
tcagtgtgttcaccttttaacatactcgagtatgggtttt

SEQ ID NO: 34912 - DNA, 40 bp, Homo sapiens
aaacccatactcgagtatgttaaaaggtgaacacactgaa

SEQ ID NO: 34913 - DNA, 40 bp, Homo sapiens
ttcagtgtgttcaccttttaacatactcgagtatgggttt

SEQ ID NO: 34914 - DNA, 40 bp, Homo sapiens
aacccatactcgagtatgttaaaaggtgaacacactgaat

SEQ ID NO: 34915 - DNA, 40 bp, Homo sapiens
attcagtgtgttcaccttttaacatactcgagtatgggtt

SEQ ID NO: 34916 - DNA, 40 bp, Homo sapiens
acccatactcgagtatgttaaaaggtgaacacactgaata

SEQ ID NO: 34917 - DNA, 40 bp, Homo sapiens
tattcagtgtgttcaccttttaacatactcgagtatgggt

SEQ ID NO: 34918 - DNA, 40 bp, Homo sapiens
cccatactcgagtatgttaaaaggtgaacacactgaataa

SEQ ID NO: 34919 - DNA, 40 bp, Homo sapiens
ttattcagtgtgttcaccttttaacatactcgagtatggg

SEQ ID NO: 34920 - DNA, 40 bp, Homo sapiens
ccatactcgagtatgttaaaaggtgaacacactgaataat

SEQ ID NO: 34921 - DNA, 40 bp, Homo sapiens
attattcagtgtgttcaccttttaacatactcgagtatgg

SEQ ID NO: 34922 - DNA, 40 bp, Homo sapiens
catactcgagtatgttaaaaggtgaacacactgaataatt

SEQ ID NO: 34923 - DNA, 40 bp, Homo sapiens
aattattcagtgtgttcaccttttaacatactcgagtatg

SEQ ID NO: 34924 - DNA, 40 bp, Homo sapiens
atactcgagtatgttaaaaggtgaacacactgaataattt

SEQ ID NO: 34925 - DNA, 40 bp, Homo sapiens
aaattattcagtgtgttcaccttttaacatactcgagtat

SEQ ID NO: 34926 - DNA, 40 bp, Homo sapiens
tactcgagtatgttaaaaggtgaacacactgaataattta

SEQ ID NO: 34927 - DNA, 40 bp, Homo sapiens
taaattattcagtgtgttcaccttttaacatactcgagta

SEQ ID NO: 34928 - DNA, 40 bp, Homo sapiens
actcgagtatgttaaaaggtgaacacactgaataatttag

SEQ ID NO: 34929 - DNA, 40 bp, Homo sapiens
ctaaattattcagtgtgttcaccttttaacatactcgagt

SEQ ID NO: 34930 - DNA, 40 bp, Homo sapiens
ctcgagtatgttaaaaggtgaacacactgaataatttagt

SEQ ID NO: 34931 - DNA, 40 bp, Homo sapiens
actaaattattcagtgtgttcaccttttaacatactcgag

SEQ ID NO: 34932 - DNA, 40 bp, Homo sapiens
tcgagtatgttaaaaggtgaacacactgaataatttagtt

SEQ ID NO: 34933 - DNA, 40 bp, Homo sapiens
aactaaattattcagtgtgttcaccttttaacatactcga

SEQ ID NO: 34934 - DNA, 40 bp, Homo sapiens
cgagtatgttaaaaggtgaacacactgaataatttagtta

SEQ ID NO: 34935 - DNA, 40 bp, Homo sapiens
taactaaattattcagtgtgttcaccttttaacatactcg

SEQ ID NO: 34936 - DNA, 40 bp, Homo sapiens
gagtatgttaaaaggtgaacacactgaataatttagttat

SEQ ID NO: 34937 - DNA, 40 bp, Homo sapiens
ataactaaattattcagtgtgttcaccttttaacatactc

SEQ ID NO: 34938 - DNA, 40 bp, Homo sapiens
agtatgttaaaaggtgaacacactgaataatttagttatt

SEQ ID NO: 34939 - DNA, 40 bp, Homo sapiens
aataactaaattattcagtgtgttcaccttttaacatact

SEQ ID NO: 34940 - DNA, 40 bp, Homo sapiens
gtatgttaaaaggtgaacacactgaataatttagttatta

SEQ ID NO: 34941 - DNA, 40 bp, Homo sapiens
taataactaaattattcagtgtgttcaccttttaacatac

SEQ ID NO: 34942 - DNA, 40 bp, Homo sapiens
tatgttaaaaggtgaacacactgaataatttagttattaa

SEQ ID NO: 34943 - DNA, 40 bp, Homo sapiens
ttaataactaaattattcagtgtgttcaccttttaacata

SEQ ID NO: 34944 - DNA, 40 bp, Homo sapiens
atgttaaaaggtgaacacactgaataatttagttattaat

SEQ ID NO: 34945 - DNA, 40 bp, Homo sapiens
attaataactaaattattcagtgtgttcaccttttaacat

SEQ ID NO: 34946 - DNA, 40 bp, Homo sapiens
tgttaaaaggtgaacacactgaataatttagttattaatt

SEQ ID NO: 34947 - DNA, 40 bp, Homo sapiens
aattaataactaaattattcagtgtgttcaccttttaaca

SEQ ID NO: 34948 - DNA, 40 bp, Homo sapiens
gttaaaaggtgaacacactgaataatttagttattaatta

SEQ ID NO: 34949 - DNA, 40 bp, Homo sapiens
taattaataactaaattattcagtgtgttcaccttttaac

SEQ ID NO: 34950 - DNA, 40 bp, Homo sapiens
ttaaaaggtgaacacactgaataatttagttattaattat

SEQ ID NO: 34951 - DNA, 40 bp, Homo sapiens
ataattaataactaaattattcagtgtgttcaccttttaa

SEQ ID NO: 34952 - DNA, 40 bp, Homo sapiens
taaaaggtgaacacactgaataatttagttattaattata

SEQ ID NO: 34953 - DNA, 40 bp, Homo sapiens
tataattaataactaaattattcagtgtgttcacctttta

SEQ ID NO: 34954 - DNA, 40 bp, Homo sapiens
aaaaggtgaacacactgaataatttagttattaattataa

SEQ ID NO: 34955 - DNA, 40 bp, Homo sapiens
ttataattaataactaaattattcagtgtgttcacctttt

SEQ ID NO: 34956 - DNA, 40 bp, Homo sapiens
aaaggtgaacacactgaataatttagttattaattataat

SEQ ID NO: 34957 - DNA, 40 bp, Homo sapiens
attataattaataactaaattattcagtgtgttcaccttt

SEQ ID NO: 34958 - DNA, 40 bp, Homo sapiens
aaggtgaacacactgaataatttagttattaattataatg

SEQ ID NO: 34959 - DNA, 40 bp, Homo sapiens
cattataattaataactaaattattcagtgtgttcacctt

SEQ ID NO: 34960 - DNA, 40 bp, Homo sapiens
aggtgaacacactgaataatttagttattaattataatgg

SEQ ID NO: 34961 - DNA, 40 bp, Homo sapiens
ccattataattaataactaaattattcagtgtgttcacct

SEQ ID NO: 34962 - DNA, 40 bp, Homo sapiens
ggtgaacacactgaataatttagttattaattataatgga

SEQ ID NO: 34963 - DNA, 40 bp, Homo sapiens
tccattataattaataactaaattattcagtgtgttcacc

SEQ ID NO: 34964 - DNA, 40 bp, Homo sapiens
gtgaacacactgaataatttagttattaattataatggaa

SEQ ID NO: 34965 - DNA, 40 bp, Homo sapiens
ttccattataattaataactaaattattcagtgtgttcac

SEQ ID NO: 34966 - DNA, 40 bp, Homo sapiens
tgaacacactgaataatttagttattaattataatggaaa

SEQ ID NO: 34967 - DNA, 40 bp, Homo sapiens
tttccattataattaataactaaattattcagtgtgttca

SEQ ID NO: 34968 - DNA, 40 bp, Homo sapiens
gaacacactgaataatttagttattaattataatggaaaa

SEQ ID NO: 34969 - DNA, 40 bp, Homo sapiens
ttttccattataattaataactaaattattcagtgtgttc

SEQ ID NO: 34970 - DNA, 40 bp, Homo sapiens
aacacactgaataatttagttattaattataatggaaaaa

SEQ ID NO: 34971 - DNA, 40 bp, Homo sapiens
tttttccattataattaataactaaattattcagtgtgtt

SEQ ID NO: 34972 - DNA, 40 bp, Homo sapiens
acacactgaataatttagttattaattataatggaaaaat

SEQ ID NO: 34973 - DNA, 40 bp, Homo sapiens
atttttccattataattaataactaaattattcagtgtgt

SEQ ID NO: 34974 - DNA, 40 bp, Homo sapiens
cacactgaataatttagttattaattataatggaaaaatg

SEQ ID NO: 34975 - DNA, 40 bp, Homo sapiens
catttttccattataattaataactaaattattcagtgtg

SEQ ID NO: 34976 - DNA, 40 bp, Homo sapiens
acactgaataatttagttattaattataatggaaaaatga

SEQ ID NO: 34977 - DNA, 40 bp, Homo sapiens
tcatttttccattataattaataactaaattattcagtgt

SEQ ID NO: 34978 - DNA, 40 bp, Homo sapiens
cactgaataatttagttattaattataatggaaaaatgac

SEQ ID NO: 34979 - DNA, 40 bp, Homo sapiens
gtcatttttccattataattaataactaaattattcagtg

SEQ ID NO: 34980 - DNA, 40 bp, Homo sapiens
actgaataatttagttattaattataatggaaaaatgaca

SEQ ID NO: 34981 - DNA, 40 bp, Homo sapiens
tgtcatttttccattataattaataactaaattattcagt

SEQ ID NO: 34982 - DNA, 40 bp, Homo sapiens
ctgaataatttagttattaattataatggaaaaatgacaa

SEQ ID NO: 34983 - DNA, 40 bp, Homo sapiens
ttgtcatttttccattataattaataactaaattattcag

SEQ ID NO: 34984 - DNA, 40 bp, Homo sapiens
tgaataatttagttattaattataatggaaaaatgacaaa

SEQ ID NO: 34985 - DNA, 40 bp, Homo sapiens
tttgtcatttttccattataattaataactaaattattca

SEQ ID NO: 34986 - DNA, 40 bp, Homo sapiens
gaataatttagttattaattataatggaaaaatgacaaac

SEQ ID NO: 34987 - DNA, 40 bp, Homo sapiens
gtttgtcatttttccattataattaataactaaattattc

SEQ ID NO: 34988 - DNA, 40 bp, Homo sapiens
aataatttagttattaattataatggaaaaatgacaaact

SEQ ID NO: 34989 - DNA, 40 bp, Homo sapiens
agtttgtcatttttccattataattaataactaaattatt

SEQ ID NO: 34990 - DNA, 40 bp, Homo sapiens
ataatttagttattaattataatggaaaaatgacaaactt

SEQ ID NO: 34991 - DNA, 40 bp, Homo sapiens
aagtttgtcatttttccattataattaataactaaattat

SEQ ID NO: 34992 - DNA, 40 bp, Homo sapiens
taatttagttattaattataatggaaaaatgacaaacttg

SEQ ID NO: 34993 - DNA, 40 bp, Homo sapiens
caagtttgtcatttttccattataattaataactaaatta

SEQ ID NO: 34994 - DNA, 40 bp, Homo sapiens
aatttagttattaattataatggaaaaatgacaaacttga

SEQ ID NO: 34995 - DNA, 40 bp, Homo sapiens
tcaagtttgtcatttttccattataattaataactaaatt

SEQ ID NO: 34996 - DNA, 40 bp, Homo sapiens
atttagttattaattataatggaaaaatgacaaacttgat

SEQ ID NO: 34997 - DNA, 40 bp, Homo sapiens
atcaagtttgtcatttttccattataattaataactaaat

SEQ ID NO: 34998 - DNA, 40 bp, Homo sapiens
tttagttattaattataatggaaaaatgacaaacttgatg

SEQ ID NO: 34999 - DNA, 40 bp, Homo sapiens
catcaagtttgtcatttttccattataattaataactaaa

SEQ ID NO: 35000 - DNA, 40 bp, Homo sapiens
ttagttattaattataatggaaaaatgacaaacttgatgt

SEQ ID NO: 35001 - DNA, 40 bp, Homo sapiens
acatcaagtttgtcatttttccattataattaataactaa

SEQ ID NO: 35002 - DNA, 40 bp, Homo sapiens
tagttattaattataatggaaaaatgacaaacttgatgtt

SEQ ID NO: 35003 - DNA, 40 bp, Homo sapiens
aacatcaagtttgtcatttttccattataattaataacta

SEQ ID NO: 35004 - DNA, 40 bp, Homo sapiens
agttattaattataatggaaaaatgacaaacttgatgttc

SEQ ID NO: 35005 - DNA, 40 bp, Homo sapiens
gaacatcaagtttgtcatttttccattataattaataact

SEQ ID NO: 35006 - DNA, 40 bp, Homo sapiens
gttattaattataatggaaaaatgacaaacttgatgttct

SEQ ID NO: 35007 - DNA, 40 bp, Homo sapiens
agaacatcaagtttgtcatttttccattataattaataac

SEQ ID NO: 35008 - DNA, 40 bp, Homo sapiens
ttattaattataatggaaaaatgacaaacttgatgttctg

SEQ ID NO: 35009 - DNA, 40 bp, Homo sapiens
cagaacatcaagtttgtcatttttccattataattaataa

SEQ ID NO: 35010 - DNA, 40 bp, Homo sapiens
tattaattataatggaaaaatgacaaacttgatgttctgg

SEQ ID NO: 35011 - DNA, 40 bp, Homo sapiens
ccagaacatcaagtttgtcatttttccattataattaata

SEQ ID NO: 35012 - DNA, 40 bp, Homo sapiens
attaattataatggaaaaatgacaaacttgatgttctggt

SEQ ID NO: 35013 - DNA, 40 bp, Homo sapiens
accagaacatcaagtttgtcatttttccattataattaat

SEQ ID NO: 35014 - DNA, 40 bp, Homo sapiens
ttaattataatggaaaaatgacaaacttgatgttctggtt

SEQ ID NO: 35015 - DNA, 40 bp, Homo sapiens
aaccagaacatcaagtttgtcatttttccattataattaa

SEQ ID NO: 35016 - DNA, 40 bp, Homo sapiens
taattataatggaaaaatgacaaacttgatgttctggtta

SEQ ID NO: 35017 - DNA, 40 bp, Homo sapiens
taaccagaacatcaagtttgtcatttttccattataatta

SEQ ID NO: 35018 - DNA, 40 bp, Homo sapiens
aattataatggaaaaatgacaaacttgatgttctggttaa

SEQ ID NO: 35019 - DNA, 40 bp, Homo sapiens
ttaaccagaacatcaagtttgtcatttttccattataatt

SEQ ID NO: 35020 - DNA, 40 bp, Homo sapiens
attataatggaaaaatgacaaacttgatgttctggttaat

SEQ ID NO: 35021 - DNA, 40 bp, Homo sapiens
attaaccagaacatcaagtttgtcatttttccattataat

SEQ ID NO: 35022 - DNA, 40 bp, Homo sapiens
ttataatggaaaaatgacaaacttgatgttctggttaatg

SEQ ID NO: 35023 - DNA, 40 bp, Homo sapiens
cattaaccagaacatcaagtttgtcatttttccattataa

SEQ ID NO: 35024 - DNA, 40 bp, Homo sapiens
tataatggaaaaatgacaaacttgatgttctggttaatga

SEQ ID NO: 35025 - DNA, 40 bp, Homo sapiens
tcattaaccagaacatcaagtttgtcatttttccattata

SEQ ID NO: 35026 - DNA, 40 bp, Homo sapiens
ataatggaaaaatgacaaacttgatgttctggttaatgag

SEQ ID NO: 35027 - DNA, 40 bp, Homo sapiens
ctcattaaccagaacatcaagtttgtcatttttccattat

SEQ ID NO: 35028 - DNA, 40 bp, Homo sapiens
taatggaaaaatgacaaacttgatgttctggttaatgagg

SEQ ID NO: 35029 - DNA, 40 bp, Homo sapiens
cctcattaaccagaacatcaagtttgtcatttttccatta

SEQ ID NO: 35030 - DNA, 40 bp, Homo sapiens
aatggaaaaatgacaaacttgatgttctggttaatgaggt

SEQ ID NO: 35031 - DNA, 40 bp, Homo sapiens
acctcattaaccagaacatcaagtttgtcatttttccatt

SEQ ID NO: 35032 - DNA, 40 bp, Homo sapiens
atggaaaaatgacaaacttgatgttctggttaatgaggtt

SEQ ID NO: 35033 - DNA, 40 bp, Homo sapiens
aacctcattaaccagaacatcaagtttgtcatttttccat

SEQ ID NO: 35034 - DNA, 40 bp, Homo sapiens
tggaaaaatgacaaacttgatgttctggttaatgaggtta

SEQ ID NO: 35035 - DNA, 40 bp, Homo sapiens
taacctcattaaccagaacatcaagtttgtcatttttcca

SEQ ID NO: 35036 - DNA, 40 bp, Homo sapiens
ggaaaaatgacaaacttgatgttctggttaatgaggttat

SEQ ID NO: 35037 - DNA, 40 bp, Homo sapiens
ataacctcattaaccagaacatcaagtttgtcatttttcc

SEQ ID NO: 35038 - DNA, 40 bp, Homo sapiens
gaaaaatgacaaacttgatgttctggttaatgaggttatc

SEQ ID NO: 35039 - DNA, 40 bp, Homo sapiens
gataacctcattaaccagaacatcaagtttgtcatttttc

SEQ ID NO: 35040 - DNA, 40 bp, Homo sapiens
aaaaatgacaaacttgatgttctggttaatgaggttatct

SEQ ID NO: 35041 - DNA, 40 bp, Homo sapiens
agataacctcattaaccagaacatcaagtttgtcattttt

SEQ ID NO: 35042 - DNA, 40 bp, Homo sapiens
aaaatgacaaacttgatgttctggttaatgaggttatctt

SEQ ID NO: 35043 - DNA, 40 bp, Homo sapiens
aagataacctcattaaccagaacatcaagtttgtcatttt

SEQ ID NO: 35044 - DNA, 40 bp, Homo sapiens
aaatgacaaacttgatgttctggttaatgaggttatctta

SEQ ID NO: 35045 - DNA, 40 bp, Homo sapiens
taagataacctcattaaccagaacatcaagtttgtcattt

SEQ ID NO: 35046 - DNA, 40 bp, Homo sapiens
aatgacaaacttgatgttctggttaatgaggttatcttat

SEQ ID NO: 35047 - DNA, 40 bp, Homo sapiens
ataagataacctcattaaccagaacatcaagtttgtcatt

SEQ ID NO: 35048 - DNA, 40 bp, Homo sapiens
atgacaaacttgatgttctggttaatgaggttatcttatc

SEQ ID NO: 35049 - DNA, 40 bp, Homo sapiens
gataagataacctcattaaccagaacatcaagtttgtcat

SEQ ID NO: 35050 - DNA, 40 bp, Homo sapiens
tgacaaacttgatgttctggttaatgaggttatcttatct

SEQ ID NO: 35051 - DNA, 40 bp, Homo sapiens
agataagataacctcattaaccagaacatcaagtttgtca

SEQ ID NO: 35052 - DNA, 40 bp, Homo sapiens
gacaaacttgatgttctggttaatgaggttatcttatctt

SEQ ID NO: 35053 - DNA, 40 bp, Homo sapiens
aagataagataacctcattaaccagaacatcaagtttgtc

SEQ ID NO: 35054 - DNA, 40 bp, Homo sapiens
acaaacttgatgttctggttaatgaggttatcttatcttg

SEQ ID NO: 35055 - DNA, 40 bp, Homo sapiens
caagataagataacctcattaaccagaacatcaagtttgt

SEQ ID NO: 35056 - DNA, 40 bp, Homo sapiens
caaacttgatgttctggttaatgaggttatcttatcttga

SEQ ID NO: 35057 - DNA, 40 bp, Homo sapiens
tcaagataagataacctcattaaccagaacatcaagtttg

SEQ ID NO: 35058 - DNA, 40 bp, Homo sapiens
aaacttgatgttctggttaatgaggttatcttatcttgaa

SEQ ID NO: 35059 - DNA, 40 bp, Homo sapiens
ttcaagataagataacctcattaaccagaacatcaagttt

SEQ ID NO: 35060 - DNA, 40 bp, Homo sapiens
aacttgatgttctggttaatgaggttatcttatcttgaat

SEQ ID NO: 35061 - DNA, 40 bp, Homo sapiens
attcaagataagataacctcattaaccagaacatcaagtt

SEQ ID NO: 35062 - DNA, 40 bp, Homo sapiens
acttgatgttctggttaatgaggttatcttatcttgaatg

SEQ ID NO: 35063 - DNA, 40 bp, Homo sapiens
cattcaagataagataacctcattaaccagaacatcaagt

SEQ ID NO: 35064 - DNA, 40 bp, Homo sapiens
cttgatgttctggttaatgaggttatcttatcttgaatga

SEQ ID NO: 35065 - DNA, 40 bp, Homo sapiens
tcattcaagataagataacctcattaaccagaacatcaag

SEQ ID NO: 35066 - DNA, 40 bp, Homo sapiens
ttgatgttctggttaatgaggttatcttatcttgaatgag

SEQ ID NO: 35067 - DNA, 40 bp, Homo sapiens
ctcattcaagataagataacctcattaaccagaacatcaa

SEQ ID NO: 35068 - DNA, 40 bp, Homo sapiens
tgatgttctggttaatgaggttatcttatcttgaatgagt

SEQ ID NO: 35069 - DNA, 40 bp, Homo sapiens
actcattcaagataagataacctcattaaccagaacatca

SEQ ID NO: 35070 - DNA, 40 bp, Homo sapiens
gatgttctggttaatgaggttatcttatcttgaatgagtt

SEQ ID NO: 35071 - DNA, 40 bp, Homo sapiens
aactcattcaagataagataacctcattaaccagaacatc

SEQ ID NO: 35072 - DNA, 40 bp, Homo sapiens
atgttctggttaatgaggttatcttatcttgaatgagtta

SEQ ID NO: 35073 - DNA, 40 bp, Homo sapiens
taactcattcaagataagataacctcattaaccagaacat

SEQ ID NO: 35074 - DNA, 40 bp, Homo sapiens
tgttctggttaatgaggttatcttatcttgaatgagttag

SEQ ID NO: 35075 - DNA, 40 bp, Homo sapiens
ctaactcattcaagataagataacctcattaaccagaaca

SEQ ID NO: 35076 - DNA, 40 bp, Homo sapiens
gttctggttaatgaggttatcttatcttgaatgagttagc

SEQ ID NO: 35077 - DNA, 40 bp, Homo sapiens
gctaactcattcaagataagataacctcattaaccagaac

SEQ ID NO: 35078 - DNA, 40 bp, Homo sapiens
ttctggttaatgaggttatcttatcttgaatgagttagct

SEQ ID NO: 35079 - DNA, 40 bp, Homo sapiens
agctaactcattcaagataagataacctcattaaccagaa

SEQ ID NO: 35080 - DNA, 40 bp, Homo sapiens
tctggttaatgaggttatcttatcttgaatgagttagctt

SEQ ID NO: 35081 - DNA, 40 bp, Homo sapiens
aagctaactcattcaagataagataacctcattaaccaga

SEQ ID NO: 35082 - DNA, 40 bp, Homo sapiens
ctggttaatgaggttatcttatcttgaatgagttagcttt

SEQ ID NO: 35083 - DNA, 40 bp, Homo sapiens
aaagctaactcattcaagataagataacctcattaaccag

SEQ ID NO: 35084 - DNA, 40 bp, Homo sapiens
tggttaatgaggttatcttatcttgaatgagttagctttt

SEQ ID NO: 35085 - DNA, 40 bp, Homo sapiens
aaaagctaactcattcaagataagataacctcattaacca

SEQ ID NO: 35086 - DNA, 40 bp, Homo sapiens
ggttaatgaggttatcttatcttgaatgagttagctttta

SEQ ID NO: 35087 - DNA, 40 bp, Homo sapiens
taaaagctaactcattcaagataagataacctcattaacc

SEQ ID NO: 35088 - DNA, 40 bp, Homo sapiens
gttaatgaggttatcttatcttgaatgagttagcttttaa

SEQ ID NO: 35089 - DNA, 40 bp, Homo sapiens
ttaaaagctaactcattcaagataagataacctcattaac

SEQ ID NO: 35090 - DNA, 40 bp, Homo sapiens
ttaatgaggttatcttatcttgaatgagttagcttttaaa

SEQ ID NO: 35091 - DNA, 40 bp, Homo sapiens
tttaaaagctaactcattcaagataagataacctcattaa

SEQ ID NO: 35092 - DNA, 40 bp, Homo sapiens
taatgaggttatcttatcttgaatgagttagcttttaaat

SEQ ID NO: 35093 - DNA, 40 bp, Homo sapiens
atttaaaagctaactcattcaagataagataacctcatta

SEQ ID NO: 35094 - DNA, 40 bp, Homo sapiens
aatgaggttatcttatcttgaatgagttagcttttaaatt

SEQ ID NO: 35095 - DNA, 40 bp, Homo sapiens
aatttaaaagctaactcattcaagataagataacctcatt

SEQ ID NO: 35096 - DNA, 40 bp, Homo sapiens
atgaggttatcttatcttgaatgagttagcttttaaattc

SEQ ID NO: 35097 - DNA, 40 bp, Homo sapiens
gaatttaaaagctaactcattcaagataagataacctcat

SEQ ID NO: 35098 - DNA, 40 bp, Homo sapiens
tgaggttatcttatcttgaatgagttagcttttaaattcc

SEQ ID NO: 35099 - DNA, 40 bp, Homo sapiens
ggaatttaaaagctaactcattcaagataagataacctca

SEQ ID NO: 35100 - DNA, 40 bp, Homo sapiens
gaggttatcttatcttgaatgagttagcttttaaattcct

SEQ ID NO: 35101 - DNA, 40 bp, Homo sapiens
aggaatttaaaagctaactcattcaagataagataacctc

SEQ ID NO: 35102 - DNA, 40 bp, Homo sapiens
aggttatcttatcttgaatgagttagcttttaaattcctc

SEQ ID NO: 35103 - DNA, 40 bp, Homo sapiens
gaggaatttaaaagctaactcattcaagataagataacct

SEQ ID NO: 35104 - DNA, 40 bp, Homo sapiens
ggttatcttatcttgaatgagttagcttttaaattcctca

SEQ ID NO: 35105 - DNA, 40 bp, Homo sapiens
tgaggaatttaaaagctaactcattcaagataagataacc

SEQ ID NO: 35106 - DNA, 40 bp, Homo sapiens
gttatcttatcttgaatgagttagcttttaaattcctcaa

SEQ ID NO: 35107 - DNA, 40 bp, Homo sapiens
ttgaggaatttaaaagctaactcattcaagataagataac

SEQ ID NO: 35108 - DNA, 40 bp, Homo sapiens
ttatcttatcttgaatgagttagcttttaaattcctcaaa

SEQ ID NO: 35109 - DNA, 40 bp, Homo sapiens
tttgaggaatttaaaagctaactcattcaagataagataa

SEQ ID NO: 35110 - DNA, 40 bp, Homo sapiens
tatcttatcttgaatgagttagcttttaaattcctcaaaa

SEQ ID NO: 35111 - DNA, 40 bp, Homo sapiens
ttttgaggaatttaaaagctaactcattcaagataagata

SEQ ID NO: 35112 - DNA, 40 bp, Homo sapiens
atcttatcttgaatgagttagcttttaaattcctcaaaat

SEQ ID NO: 35113 - DNA, 40 bp, Homo sapiens
attttgaggaatttaaaagctaactcattcaagataagat

SEQ ID NO: 35114 - DNA, 40 bp, Homo sapiens
tcttatcttgaatgagttagcttttaaattcctcaaaata

SEQ ID NO: 35115 - DNA, 40 bp, Homo sapiens
tattttgaggaatttaaaagctaactcattcaagataaga

SEQ ID NO: 35116 - DNA, 40 bp, Homo sapiens
cttatcttgaatgagttagcttttaaattcctcaaaataa

SEQ ID NO: 35117 - DNA, 40 bp, Homo sapiens
ttattttgaggaatttaaaagctaactcattcaagataag

SEQ ID NO: 35118 - DNA, 40 bp, Homo sapiens
ttatcttgaatgagttagcttttaaattcctcaaaataaa

SEQ ID NO: 35119 - DNA, 40 bp, Homo sapiens
tttattttgaggaatttaaaagctaactcattcaagataa

SEQ ID NO: 35120 - DNA, 40 bp, Homo sapiens
tatcttgaatgagttagcttttaaattcctcaaaataaag

SEQ ID NO: 35121 - DNA, 40 bp, Homo sapiens
ctttattttgaggaatttaaaagctaactcattcaagata

SEQ ID NO: 35122 - DNA, 40 bp, Homo sapiens
atcttgaatgagttagcttttaaattcctcaaaataaagg

SEQ ID NO: 35123 - DNA, 40 bp, Homo sapiens
cctttattttgaggaatttaaaagctaactcattcaagat

SEQ ID NO: 35124 - DNA, 40 bp, Homo sapiens
tcttgaatgagttagcttttaaattcctcaaaataaaggc

SEQ ID NO: 35125 - DNA, 40 bp, Homo sapiens
gcctttattttgaggaatttaaaagctaactcattcaaga

SEQ ID NO: 35126 - DNA, 40 bp, Homo sapiens
cttgaatgagttagcttttaaattcctcaaaataaaggca

SEQ ID NO: 35127 - DNA, 40 bp, Homo sapiens
tgcctttattttgaggaatttaaaagctaactcattcaag

SEQ ID NO: 35128 - DNA, 40 bp, Homo sapiens
ttgaatgagttagcttttaaattcctcaaaataaaggcat

SEQ ID NO: 35129 - DNA, 40 bp, Homo sapiens
atgcctttattttgaggaatttaaaagctaactcattcaa

SEQ ID NO: 35130 - DNA, 40 bp, Homo sapiens
tgaatgagttagcttttaaattcctcaaaataaaggcatt

SEQ ID NO: 35131 - DNA, 40 bp, Homo sapiens
aatgcctttattttgaggaatttaaaagctaactcattca

SEQ ID NO: 35132 - DNA, 40 bp, Homo sapiens
gaatgagttagcttttaaattcctcaaaataaaggcattt

SEQ ID NO: 35133 - DNA, 40 bp, Homo sapiens
aaatgcctttattttgaggaatttaaaagctaactcattc

SEQ ID NO: 35134 - DNA, 40 bp, Homo sapiens
aatgagttagcttttaaattcctcaaaataaaggcattta

SEQ ID NO: 35135 - DNA, 40 bp, Homo sapiens
taaatgcctttattttgaggaatttaaaagctaactcatt

SEQ ID NO: 35136 - DNA, 40 bp, Homo sapiens
atgagttagcttttaaattcctcaaaataaaggcatttaa

SEQ ID NO: 35137 - DNA, 40 bp, Homo sapiens
ttaaatgcctttattttgaggaatttaaaagctaactcat

SEQ ID NO: 35138 - DNA, 40 bp, Homo sapiens
tgagttagcttttaaattcctcaaaataaaggcatttaat

SEQ ID NO: 35139 - DNA, 40 bp, Homo sapiens
attaaatgcctttattttgaggaatttaaaagctaactca

SEQ ID NO: 35140 - DNA, 40 bp, Homo sapiens
gagttagcttttaaattcctcaaaataaaggcatttaata

SEQ ID NO: 35141 - DNA, 40 bp, Homo sapiens
tattaaatgcctttattttgaggaatttaaaagctaactc

SEQ ID NO: 35142 - DNA, 40 bp, Homo sapiens
agttagcttttaaattcctcaaaataaaggcatttaataa

SEQ ID NO: 35143 - DNA, 40 bp, Homo sapiens
ttattaaatgcctttattttgaggaatttaaaagctaact

SEQ ID NO: 35144 - DNA, 40 bp, Homo sapiens
gttagcttttaaattcctcaaaataaaggcatttaataaa

SEQ ID NO: 35145 - DNA, 40 bp, Homo sapiens
tttattaaatgcctttattttgaggaatttaaaagctaac

SEQ ID NO: 35146 - DNA, 40 bp, Homo sapiens
ttagcttttaaattcctcaaaataaaggcatttaataaac

SEQ ID NO: 35147 - DNA, 40 bp, Homo sapiens
gtttattaaatgcctttattttgaggaatttaaaagctaa

SEQ ID NO: 35148 - DNA, 40 bp, Homo sapiens
tagcttttaaattcctcaaaataaaggcatttaataaacc

SEQ ID NO: 35149 - DNA, 40 bp, Homo sapiens
ggtttattaaatgcctttattttgaggaatttaaaagcta

SEQ ID NO: 35150 - DNA, 40 bp, Homo sapiens
agcttttaaattcctcaaaataaaggcatttaataaacca

SEQ ID NO: 35151 - DNA, 40 bp, Homo sapiens
tggtttattaaatgcctttattttgaggaatttaaaagct

SEQ ID NO: 35152 - DNA, 40 bp, Homo sapiens
gcttttaaattcctcaaaataaaggcatttaataaaccag

SEQ ID NO: 35153 - DNA, 40 bp, Homo sapiens
ctggtttattaaatgcctttattttgaggaatttaaaagc

SEQ ID NO: 35154 - DNA, 40 bp, Homo sapiens
cttttaaattcctcaaaataaaggcatttaataaaccagg

SEQ ID NO: 35155 - DNA, 40 bp, Homo sapiens
cctggtttattaaatgcctttattttgaggaatttaaaag

SEQ ID NO: 35156 - DNA, 40 bp, Homo sapiens
ttttaaattcctcaaaataaaggcatttaataaaccagga

SEQ ID NO: 35157 - DNA, 40 bp, Homo sapiens
tcctggtttattaaatgcctttattttgaggaatttaaaa

SEQ ID NO: 35158 - DNA, 40 bp, Homo sapiens
tttaaattcctcaaaataaaggcatttaataaaccaggaa

SEQ ID NO: 35159 - DNA, 40 bp, Homo sapiens
ttcctggtttattaaatgcctttattttgaggaatttaaa

SEQ ID NO: 35160 - DNA, 40 bp, Homo sapiens
ttaaattcctcaaaataaaggcatttaataaaccaggaaa

SEQ ID NO: 35161 - DNA, 40 bp, Homo sapiens
tttcctggtttattaaatgcctttattttgaggaatttaa

SEQ ID NO: 35162 - DNA, 40 bp, Homo sapiens
taaattcctcaaaataaaggcatttaataaaccaggaaac

SEQ ID NO: 35163 - DNA, 40 bp, Homo sapiens
gtttcctggtttattaaatgcctttattttgaggaattta

SEQ ID NO: 35164 - DNA, 40 bp, Homo sapiens
aaattcctcaaaataaaggcatttaataaaccaggaaaca

SEQ ID NO: 35165 - DNA, 40 bp, Homo sapiens
tgtttcctggtttattaaatgcctttattttgaggaattt

SEQ ID NO: 35166 - DNA, 40 bp, Homo sapiens
aattcctcaaaataaaggcatttaataaaccaggaaacac

SEQ ID NO: 35167 - DNA, 40 bp, Homo sapiens
gtgtttcctggtttattaaatgcctttattttgaggaatt

SEQ ID NO: 35168 - DNA, 40 bp, Homo sapiens
attcctcaaaataaaggcatttaataaaccaggaaacact

SEQ ID NO: 35169 - DNA, 40 bp, Homo sapiens
agtgtttcctggtttattaaatgcctttattttgaggaat

SEQ ID NO: 35170 - DNA, 40 bp, Homo sapiens
ttcctcaaaataaaggcatttaataaaccaggaaacactt

SEQ ID NO: 35171 - DNA, 40 bp, Homo sapiens
aagtgtttcctggtttattaaatgcctttattttgaggaa

SEQ ID NO: 35172 - DNA, 40 bp, Homo sapiens
tcctcaaaataaaggcatttaataaaccaggaaacacttc

SEQ ID NO: 35173 - DNA, 40 bp, Homo sapiens
gaagtgtttcctggtttattaaatgcctttattttgagga

SEQ ID NO: 35174 - DNA, 40 bp, Homo sapiens
cctcaaaataaaggcatttaataaaccaggaaacacttca

SEQ ID NO: 35175 - DNA, 40 bp, Homo sapiens
tgaagtgtttcctggtttattaaatgcctttattttgagg

SEQ ID NO: 35176 - DNA, 40 bp, Homo sapiens
ctcaaaataaaggcatttaataaaccaggaaacacttcat

SEQ ID NO: 35177 - DNA, 40 bp, Homo sapiens
atgaagtgtttcctggtttattaaatgcctttattttgag

SEQ ID NO: 35178 - DNA, 40 bp, Homo sapiens
tcaaaataaaggcatttaataaaccaggaaacacttcatt

SEQ ID NO: 35179 - DNA, 40 bp, Homo sapiens
aatgaagtgtttcctggtttattaaatgcctttattttga

SEQ ID NO: 35180 - DNA, 40 bp, Homo sapiens
caaaataaaggcatttaataaaccaggaaacacttcatta

SEQ ID NO: 35181 - DNA, 40 bp, Homo sapiens
taatgaagtgtttcctggtttattaaatgcctttattttg

SEQ ID NO: 35182 - DNA, 40 bp, Homo sapiens
aaaataaaggcatttaataaaccaggaaacacttcattaa

SEQ ID NO: 35183 - DNA, 40 bp, Homo sapiens
ttaatgaagtgtttcctggtttattaaatgcctttatttt

SEQ ID NO: 35184 - DNA, 40 bp, Homo sapiens
aaataaaggcatttaataaaccaggaaacacttcattaaa

SEQ ID NO: 35185 - DNA, 40 bp, Homo sapiens
tttaatgaagtgtttcctggtttattaaatgcctttattt

SEQ ID NO: 35186 - DNA, 40 bp, Homo sapiens
aataaaggcatttaataaaccaggaaacacttcattaaaa

SEQ ID NO: 35187 - DNA, 40 bp, Homo sapiens
ttttaatgaagtgtttcctggtttattaaatgcctttatt

SEQ ID NO: 35188 - DNA, 40 bp, Homo sapiens
ataaaggcatttaataaaccaggaaacacttcattaaaaa

SEQ ID NO: 35189 - DNA, 40 bp, Homo sapiens
tttttaatgaagtgtttcctggtttattaaatgcctttat

SEQ ID NO: 35190 - DNA, 40 bp, Homo sapiens
taaaggcatttaataaaccaggaaacacttcattaaaaaa

SEQ ID NO: 35191 - DNA, 40 bp, Homo sapiens
ttttttaatgaagtgtttcctggtttattaaatgccttta

SEQ ID NO: 35192 - DNA, 40 bp, Homo sapiens
aaaggcatttaataaaccaggaaacacttcattaaaaaaa

SEQ ID NO: 35193 - DNA, 40 bp, Homo sapiens
tttttttaatgaagtgtttcctggtttattaaatgccttt

SEQ ID NO: 35194 - DNA, 40 bp, Homo sapiens
aaggcatttaataaaccaggaaacacttcattaaaaaaat

SEQ ID NO: 35195 - DNA, 40 bp, Homo sapiens
atttttttaatgaagtgtttcctggtttattaaatgcctt

SEQ ID NO: 35196 - DNA, 40 bp, Homo sapiens
aggcatttaataaaccaggaaacacttcattaaaaaaatt

SEQ ID NO: 35197 - DNA, 40 bp, Homo sapiens
aatttttttaatgaagtgtttcctggtttattaaatgcct

SEQ ID NO: 35198 - DNA, 40 bp, Homo sapiens
ggcatttaataaaccaggaaacacttcattaaaaaaatta

SEQ ID NO: 35199 - DNA, 40 bp, Homo sapiens
taatttttttaatgaagtgtttcctggtttattaaatgcc

SEQ ID NO: 35200 - DNA, 40 bp, Homo sapiens
gcatttaataaaccaggaaacacttcattaaaaaaattat

SEQ ID NO: 35201 - DNA, 40 bp, Homo sapiens
ataatttttttaatgaagtgtttcctggtttattaaatgc

SEQ ID NO: 35202 - DNA, 40 bp, Homo sapiens
catttaataaaccaggaaacacttcattaaaaaaattatg

SEQ ID NO: 35203 - DNA, 40 bp, Homo sapiens
cataatttttttaatgaagtgtttcctggtttattaaatg

SEQ ID NO: 35204 - DNA, 40 bp, Homo sapiens
atttaataaaccaggaaacacttcattaaaaaaattatgc

SEQ ID NO: 35205 - DNA, 40 bp, Homo sapiens
gcataatttttttaatgaagtgtttcctggtttattaaat

SEQ ID NO: 35206 - DNA, 40 bp, Homo sapiens
tttaataaaccaggaaacacttcattaaaaaaattatgca

SEQ ID NO: 35207 - DNA, 40 bp, Homo sapiens
tgcataatttttttaatgaagtgtttcctggtttattaaa

SEQ ID NO: 35208 - DNA, 40 bp, Homo sapiens
ttaataaaccaggaaacacttcattaaaaaaattatgcaa

SEQ ID NO: 35209 - DNA, 40 bp, Homo sapiens
ttgcataatttttttaatgaagtgtttcctggtttattaa

SEQ ID NO: 35210 - DNA, 40 bp, Homo sapiens
taataaaccaggaaacacttcattaaaaaaattatgcaag

SEQ ID NO: 35211 - DNA, 40 bp, Homo sapiens
cttgcataatttttttaatgaagtgtttcctggtttatta

SEQ ID NO: 35212 - DNA, 40 bp, Homo sapiens
aataaaccaggaaacacttcattaaaaaaattatgcaagt

SEQ ID NO: 35213 - DNA, 40 bp, Homo sapiens
acttgcataatttttttaatgaagtgtttcctggtttatt

SEQ ID NO: 35214 - DNA, 40 bp, Homo sapiens
ataaaccaggaaacacttcattaaaaaaattatgcaagtc

SEQ ID NO: 35215 - DNA, 40 bp, Homo sapiens
gacttgcataatttttttaatgaagtgtttcctggtttat

SEQ ID NO: 35216 - DNA, 40 bp, Homo sapiens
taaaccaggaaacacttcattaaaaaaattatgcaagtca

SEQ ID NO: 35217 - DNA, 40 bp, Homo sapiens
tgacttgcataatttttttaatgaagtgtttcctggttta

SEQ ID NO: 35218 - DNA, 40 bp, Homo sapiens
aaaccaggaaacacttcattaaaaaaattatgcaagtcag

SEQ ID NO: 35219 - DNA, 40 bp, Homo sapiens
ctgacttgcataatttttttaatgaagtgtttcctggttt

SEQ ID NO: 35220 - DNA, 40 bp, Homo sapiens
aaccaggaaacacttcattaaaaaaattatgcaagtcagt

SEQ ID NO: 35221 - DNA, 40 bp, Homo sapiens
actgacttgcataatttttttaatgaagtgtttcctggtt

SEQ ID NO: 35222 - DNA, 40 bp, Homo sapiens
accaggaaacacttcattaaaaaaattatgcaagtcagtg

SEQ ID NO: 35223 - DNA, 40 bp, Homo sapiens
cactgacttgcataatttttttaatgaagtgtttcctggt

SEQ ID NO: 35224 - DNA, 40 bp, Homo sapiens
ccaggaaacacttcattaaaaaaattatgcaagtcagtgt

SEQ ID NO: 35225 - DNA, 40 bp, Homo sapiens
acactgacttgcataatttttttaatgaagtgtttcctgg

SEQ ID NO: 35226 - DNA, 40 bp, Homo sapiens
caggaaacacttcattaaaaaaattatgcaagtcagtgta

SEQ ID NO: 35227 - DNA, 40 bp, Homo sapiens
tacactgacttgcataatttttttaatgaagtgtttcctg

SEQ ID NO: 35228 - DNA, 40 bp, Homo sapiens
aggaaacacttcattaaaaaaattatgcaagtcagtgtaa

SEQ ID NO: 35229 - DNA, 40 bp, Homo sapiens
ttacactgacttgcataatttttttaatgaagtgtttcct

SEQ ID NO: 35230 - DNA, 40 bp, Homo sapiens
ggaaacacttcattaaaaaaattatgcaagtcagtgtaaa

SEQ ID NO: 35231 - DNA, 40 bp, Homo sapiens
tttacactgacttgcataatttttttaatgaagtgtttcc

SEQ ID NO: 35232 - DNA, 40 bp, Homo sapiens
gaaacacttcattaaaaaaattatgcaagtcagtgtaaaa

SEQ ID NO: 35233 - DNA, 40 bp, Homo sapiens
ttttacactgacttgcataatttttttaatgaagtgtttc

SEQ ID NO: 35234 - DNA, 40 bp, Homo sapiens
aaacacttcattaaaaaaattatgcaagtcagtgtaaaag

SEQ ID NO: 35235 - DNA, 40 bp, Homo sapiens
cttttacactgacttgcataatttttttaatgaagtgttt

SEQ ID NO: 35236 - DNA, 40 bp, Homo sapiens
aacacttcattaaaaaaattatgcaagtcagtgtaaaaga

SEQ ID NO: 35237 - DNA, 40 bp, Homo sapiens
tcttttacactgacttgcataatttttttaatgaagtgtt

SEQ ID NO: 35238 - DNA, 40 bp, Homo sapiens
acacttcattaaaaaaattatgcaagtcagtgtaaaagaa

SEQ ID NO: 35239 - DNA, 40 bp, Homo sapiens
ttcttttacactgacttgcataatttttttaatgaagtgt

SEQ ID NO: 35240 - DNA, 40 bp, Homo sapiens
cacttcattaaaaaaattatgcaagtcagtgtaaaagaag

SEQ ID NO: 35241 - DNA, 40 bp, Homo sapiens
cttcttttacactgacttgcataatttttttaatgaagtg

SEQ ID NO: 35242 - DNA, 40 bp, Homo sapiens
acttcattaaaaaaattatgcaagtcagtgtaaaagaaga

SEQ ID NO: 35243 - DNA, 40 bp, Homo sapiens
tcttcttttacactgacttgcataatttttttaatgaagt

SEQ ID NO: 35244 - DNA, 40 bp, Homo sapiens
cttcattaaaaaaattatgcaagtcagtgtaaaagaagat

SEQ ID NO: 35245 - DNA, 40 bp, Homo sapiens
atcttcttttacactgacttgcataatttttttaatgaag

SEQ ID NO: 35246 - DNA, 40 bp, Homo sapiens
ttcattaaaaaaattatgcaagtcagtgtaaaagaagatt

SEQ ID NO: 35247 - DNA, 40 bp, Homo sapiens
aatcttcttttacactgacttgcataatttttttaatgaa

SEQ ID NO: 35248 - DNA, 40 bp, Homo sapiens
tcattaaaaaaattatgcaagtcagtgtaaaagaagatta

SEQ ID NO: 35249 - DNA, 40 bp, Homo sapiens
taatcttcttttacactgacttgcataatttttttaatga

SEQ ID NO: 35250 - DNA, 40 bp, Homo sapiens
cattaaaaaaattatgcaagtcagtgtaaaagaagattaa

SEQ ID NO: 35251 - DNA, 40 bp, Homo sapiens
ttaatcttcttttacactgacttgcataatttttttaatg

SEQ ID NO: 35252 - DNA, 40 bp, Homo sapiens
attaaaaaaattatgcaagtcagtgtaaaagaagattaaa

SEQ ID NO: 35253 - DNA, 40 bp, Homo sapiens
tttaatcttcttttacactgacttgcataatttttttaat

SEQ ID NO: 35254 - DNA, 40 bp, Homo sapiens
ttaaaaaaattatgcaagtcagtgtaaaagaagattaaaa

SEQ ID NO: 35255 - DNA, 40 bp, Homo sapiens
ttttaatcttcttttacactgacttgcataatttttttaa

SEQ ID NO: 35256 - DNA, 40 bp, Homo sapiens
taaaaaaattatgcaagtcagtgtaaaagaagattaaaat

SEQ ID NO: 35257 - DNA, 40 bp, Homo sapiens
attttaatcttcttttacactgacttgcataattttttta

SEQ ID NO: 35258 - DNA, 40 bp, Homo sapiens
aaaaaaattatgcaagtcagtgtaaaagaagattaaaatt

SEQ ID NO: 35259 - DNA, 40 bp, Homo sapiens
aattttaatcttcttttacactgacttgcataattttttt

SEQ ID NO: 35260 - DNA, 40 bp, Homo sapiens
aaaaaattatgcaagtcagtgtaaaagaagattaaaattc

SEQ ID NO: 35261 - DNA, 40 bp, Homo sapiens
gaattttaatcttcttttacactgacttgcataatttttt

SEQ ID NO: 35262 - DNA, 40 bp, Homo sapiens
aaaaattatgcaagtcagtgtaaaagaagattaaaattcc

SEQ ID NO: 35263 - DNA, 40 bp, Homo sapiens
ggaattttaatcttcttttacactgacttgcataattttt

SEQ ID NO: 35264 - DNA, 40 bp, Homo sapiens
aaaattatgcaagtcagtgtaaaagaagattaaaattcca

SEQ ID NO: 35265 - DNA, 40 bp, Homo sapiens
tggaattttaatcttcttttacactgacttgcataatttt

SEQ ID NO: 35266 - DNA, 40 bp, Homo sapiens
aaattatgcaagtcagtgtaaaagaagattaaaattccac

SEQ ID NO: 35267 - DNA, 40 bp, Homo sapiens
gtggaattttaatcttcttttacactgacttgcataattt

SEQ ID NO: 35268 - DNA, 40 bp, Homo sapiens
aattatgcaagtcagtgtaaaagaagattaaaattccaca

SEQ ID NO: 35269 - DNA, 40 bp, Homo sapiens
tgtggaattttaatcttcttttacactgacttgcataatt

SEQ ID NO: 35270 - DNA, 40 bp, Homo sapiens
attatgcaagtcagtgtaaaagaagattaaaattccacat

SEQ ID NO: 35271 - DNA, 40 bp, Homo sapiens
atgtggaattttaatcttcttttacactgacttgcataat

SEQ ID NO: 35272 - DNA, 40 bp, Homo sapiens
ttatgcaagtcagtgtaaaagaagattaaaattccacatg

SEQ ID NO: 35273 - DNA, 40 bp, Homo sapiens
catgtggaattttaatcttcttttacactgacttgcataa

SEQ ID NO: 35274 - DNA, 40 bp, Homo sapiens
tatgcaagtcagtgtaaaagaagattaaaattccacatgg

SEQ ID NO: 35275 - DNA, 40 bp, Homo sapiens
ccatgtggaattttaatcttcttttacactgacttgcata

SEQ ID NO: 35276 - DNA, 40 bp, Homo sapiens
atgcaagtcagtgtaaaagaagattaaaattccacatggg

SEQ ID NO: 35277 - DNA, 40 bp, Homo sapiens
cccatgtggaattttaatcttcttttacactgacttgcat

SEQ ID NO: 35278 - DNA, 40 bp, Homo sapiens
tgcaagtcagtgtaaaagaagattaaaattccacatgggc

SEQ ID NO: 35279 - DNA, 40 bp, Homo sapiens
gcccatgtggaattttaatcttcttttacactgacttgca

SEQ ID NO: 35280 - DNA, 40 bp, Homo sapiens
gcaagtcagtgtaaaagaagattaaaattccacatgggca

SEQ ID NO: 35281 - DNA, 40 bp, Homo sapiens
tgcccatgtggaattttaatcttcttttacactgacttgc

SEQ ID NO: 35282 - DNA, 40 bp, Homo sapiens
caagtcagtgtaaaagaagattaaaattccacatgggcaa

SEQ ID NO: 35283 - DNA, 40 bp, Homo sapiens
ttgcccatgtggaattttaatcttcttttacactgacttg

SEQ ID NO: 35284 - DNA, 40 bp, Homo sapiens
aagtcagtgtaaaagaagattaaaattccacatgggcaaa

SEQ ID NO: 35285 - DNA, 40 bp, Homo sapiens
tttgcccatgtggaattttaatcttcttttacactgactt

SEQ ID NO: 35286 - DNA, 40 bp, Homo sapiens
agtcagtgtaaaagaagattaaaattccacatgggcaaag

SEQ ID NO: 35287 - DNA, 40 bp, Homo sapiens
ctttgcccatgtggaattttaatcttcttttacactgact

SEQ ID NO: 35288 - DNA, 40 bp, Homo sapiens
gtcagtgtaaaagaagattaaaattccacatgggcaaagg

SEQ ID NO: 35289 - DNA, 40 bp, Homo sapiens
cctttgcccatgtggaattttaatcttcttttacactgac

SEQ ID NO: 35290 - DNA, 40 bp, Homo sapiens
tcagtgtaaaagaagattaaaattccacatgggcaaagga

SEQ ID NO: 35291 - DNA, 40 bp, Homo sapiens
tcctttgcccatgtggaattttaatcttcttttacactga

SEQ ID NO: 35292 - DNA, 40 bp, Homo sapiens
cagtgtaaaagaagattaaaattccacatgggcaaaggac

SEQ ID NO: 35293 - DNA, 40 bp, Homo sapiens
gtcctttgcccatgtggaattttaatcttcttttacactg

SEQ ID NO: 35294 - DNA, 40 bp, Homo sapiens
agtgtaaaagaagattaaaattccacatgggcaaaggaca

SEQ ID NO: 35295 - DNA, 40 bp, Homo sapiens
tgtcctttgcccatgtggaattttaatcttcttttacact

SEQ ID NO: 35296 - DNA, 40 bp, Homo sapiens
gtgtaaaagaagattaaaattccacatgggcaaaggacac

SEQ ID NO: 35297 - DNA, 40 bp, Homo sapiens
gtgtcctttgcccatgtggaattttaatcttcttttacac

SEQ ID NO: 35298 - DNA, 40 bp, Homo sapiens
tgtaaaagaagattaaaattccacatgggcaaaggacaca

SEQ ID NO: 35299 - DNA, 40 bp, Homo sapiens
tgtgtcctttgcccatgtggaattttaatcttcttttaca

SEQ ID NO: 35300 - DNA, 40 bp, Homo sapiens
gtaaaagaagattaaaattccacatgggcaaaggacacac

SEQ ID NO: 35301 - DNA, 40 bp, Homo sapiens
gtgtgtcctttgcccatgtggaattttaatcttcttttac

SEQ ID NO: 35302 - DNA, 40 bp, Homo sapiens
taaaagaagattaaaattccacatgggcaaaggacacacg

SEQ ID NO: 35303 - DNA, 40 bp, Homo sapiens
cgtgtgtcctttgcccatgtggaattttaatcttctttta

SEQ ID NO: 35304 - DNA, 40 bp, Homo sapiens
aaaagaagattaaaattccacatgggcaaaggacacacgt

SEQ ID NO: 35305 - DNA, 40 bp, Homo sapiens
acgtgtgtcctttgcccatgtggaattttaatcttctttt

SEQ ID NO: 35306 - DNA, 40 bp, Homo sapiens
aaagaagattaaaattccacatgggcaaaggacacacgtt

SEQ ID NO: 35307 - DNA, 40 bp, Homo sapiens
aacgtgtgtcctttgcccatgtggaattttaatcttcttt

SEQ ID NO: 35308 - DNA, 40 bp, Homo sapiens
aagaagattaaaattccacatgggcaaaggacacacgttg

SEQ ID NO: 35309 - DNA, 40 bp, Homo sapiens
caacgtgtgtcctttgcccatgtggaattttaatcttctt

SEQ ID NO: 35310 - DNA, 40 bp, Homo sapiens
agaagattaaaattccacatgggcaaaggacacacgttgg

SEQ ID NO: 35311 - DNA, 40 bp, Homo sapiens
ccaacgtgtgtcctttgcccatgtggaattttaatcttct

SEQ ID NO: 35312 - DNA, 40 bp, Homo sapiens
gaagattaaaattccacatgggcaaaggacacacgttggc

SEQ ID NO: 35313 - DNA, 40 bp, Homo sapiens
gccaacgtgtgtcctttgcccatgtggaattttaatcttc

SEQ ID NO: 35314 - DNA, 40 bp, Homo sapiens
aagattaaaattccacatgggcaaaggacacacgttggcg

SEQ ID NO: 35315 - DNA, 40 bp, Homo sapiens
cgccaacgtgtgtcctttgcccatgtggaattttaatctt

SEQ ID NO: 35316 - DNA, 40 bp, Homo sapiens
agattaaaattccacatgggcaaaggacacacgttggcga

SEQ ID NO: 35317 - DNA, 40 bp, Homo sapiens
tcgccaacgtgtgtcctttgcccatgtggaattttaatct

SEQ ID NO: 35318 - DNA, 40 bp, Homo sapiens
gattaaaattccacatgggcaaaggacacacgttggcgat

SEQ ID NO: 35319 - DNA, 40 bp, Homo sapiens
atcgccaacgtgtgtcctttgcccatgtggaattttaatc

SEQ ID NO: 35320 - DNA, 40 bp, Homo sapiens
attaaaattccacatgggcaaaggacacacgttggcgata

SEQ ID NO: 35321 - DNA, 40 bp, Homo sapiens
tatcgccaacgtgtgtcctttgcccatgtggaattttaat

SEQ ID NO: 35322 - DNA, 40 bp, Homo sapiens
ttaaaattccacatgggcaaaggacacacgttggcgataa

SEQ ID NO: 35323 - DNA, 40 bp, Homo sapiens
ttatcgccaacgtgtgtcctttgcccatgtggaattttaa

SEQ ID NO: 35324 - DNA, 40 bp, Homo sapiens
taaaattccacatgggcaaaggacacacgttggcgataaa

SEQ ID NO: 35325 - DNA, 40 bp, Homo sapiens
tttatcgccaacgtgtgtcctttgcccatgtggaatttta

SEQ ID NO: 35326 - DNA, 40 bp, Homo sapiens
aaaattccacatgggcaaaggacacacgttggcgataaat

SEQ ID NO: 35327 - DNA, 40 bp, Homo sapiens
atttatcgccaacgtgtgtcctttgcccatgtggaatttt

SEQ ID NO: 35328 - DNA, 40 bp, Homo sapiens
aaattccacatgggcaaaggacacacgttggcgataaata

SEQ ID NO: 35329 - DNA, 40 bp, Homo sapiens
tatttatcgccaacgtgtgtcctttgcccatgtggaattt

SEQ ID NO: 35330 - DNA, 40 bp, Homo sapiens
aattccacatgggcaaaggacacacgttggcgataaatat

SEQ ID NO: 35331 - DNA, 40 bp, Homo sapiens
atatttatcgccaacgtgtgtcctttgcccatgtggaatt

SEQ ID NO: 35332 - DNA, 40 bp, Homo sapiens
attccacatgggcaaaggacacacgttggcgataaatatg

SEQ ID NO: 35333 - DNA, 40 bp, Homo sapiens
catatttatcgccaacgtgtgtcctttgcccatgtggaat

SEQ ID NO: 35334 - DNA, 40 bp, Homo sapiens
ttccacatgggcaaaggacacacgttggcgataaatatgc

SEQ ID NO: 35335 - DNA, 40 bp, Homo sapiens
gcatatttatcgccaacgtgtgtcctttgcccatgtggaa

SEQ ID NO: 35336 - DNA, 40 bp, Homo sapiens
tccacatgggcaaaggacacacgttggcgataaatatgca

SEQ ID NO: 35337 - DNA, 40 bp, Homo sapiens
tgcatatttatcgccaacgtgtgtcctttgcccatgtgga

SEQ ID NO: 35338 - DNA, 40 bp, Homo sapiens
ccacatgggcaaaggacacacgttggcgataaatatgcag

SEQ ID NO: 35339 - DNA, 40 bp, Homo sapiens
ctgcatatttatcgccaacgtgtgtcctttgcccatgtgg

SEQ ID NO: 35340 - DNA, 40 bp, Homo sapiens
cacatgggcaaaggacacacgttggcgataaatatgcaga

SEQ ID NO: 35341 - DNA, 40 bp, Homo sapiens
tctgcatatttatcgccaacgtgtgtcctttgcccatgtg

SEQ ID NO: 35342 - DNA, 40 bp, Homo sapiens
acatgggcaaaggacacacgttggcgataaatatgcagat

SEQ ID NO: 35343 - DNA, 40 bp, Homo sapiens
atctgcatatttatcgccaacgtgtgtcctttgcccatgt

SEQ ID NO: 35344 - DNA, 40 bp, Homo sapiens
catgggcaaaggacacacgttggcgataaatatgcagata

SEQ ID NO: 35345 - DNA, 40 bp, Homo sapiens
tatctgcatatttatcgccaacgtgtgtcctttgcccatg

SEQ ID NO: 35346 - DNA, 40 bp, Homo sapiens
atgggcaaaggacacacgttggcgataaatatgcagataa

SEQ ID NO: 35347 - DNA, 40 bp, Homo sapiens
ttatctgcatatttatcgccaacgtgtgtcctttgcccat

SEQ ID NO: 35348 - DNA, 40 bp, Homo sapiens
tgggcaaaggacacacgttggcgataaatatgcagataag

SEQ ID NO: 35349 - DNA, 40 bp, Homo sapiens
cttatctgcatatttatcgccaacgtgtgtcctttgccca

SEQ ID NO: 35350 - DNA, 40 bp, Homo sapiens
gggcaaaggacacacgttggcgataaatatgcagataaga

SEQ ID NO: 35351 - DNA, 40 bp, Homo sapiens
tcttatctgcatatttatcgccaacgtgtgtcctttgccc

SEQ ID NO: 35352 - DNA, 40 bp, Homo sapiens
ggcaaaggacacacgttggcgataaatatgcagataagaa

SEQ ID NO: 35353 - DNA, 40 bp, Homo sapiens
ttcttatctgcatatttatcgccaacgtgtgtcctttgcc

SEQ ID NO: 35354 - DNA, 40 bp, Homo sapiens
gcaaaggacacacgttggcgataaatatgcagataagaaa

SEQ ID NO: 35355 - DNA, 40 bp, Homo sapiens
tttcttatctgcatatttatcgccaacgtgtgtcctttgc

SEQ ID NO: 35356 - DNA, 40 bp, Homo sapiens
caaaggacacacgttggcgataaatatgcagataagaaaa

SEQ ID NO: 35357 - DNA, 40 bp, Homo sapiens
ttttcttatctgcatatttatcgccaacgtgtgtcctttg

SEQ ID NO: 35358 - DNA, 40 bp, Homo sapiens
aaaggacacacgttggcgataaatatgcagataagaaaaa

SEQ ID NO: 35359 - DNA, 40 bp, Homo sapiens
tttttcttatctgcatatttatcgccaacgtgtgtccttt

SEQ ID NO: 35360 - DNA, 40 bp, Homo sapiens
aaggacacacgttggcgataaatatgcagataagaaaaaa

SEQ ID NO: 35361 - DNA, 40 bp, Homo sapiens
ttttttcttatctgcatatttatcgccaacgtgtgtcctt

SEQ ID NO: 35362 - DNA, 40 bp, Homo sapiens
aggacacacgttggcgataaatatgcagataagaaaaaaa

SEQ ID NO: 35363 - DNA, 40 bp, Homo sapiens
tttttttcttatctgcatatttatcgccaacgtgtgtcct

SEQ ID NO: 35364 - DNA, 40 bp, Homo sapiens
ggacacacgttggcgataaatatgcagataagaaaaaaaa

SEQ ID NO: 35365 - DNA, 40 bp, Homo sapiens
ttttttttcttatctgcatatttatcgccaacgtgtgtcc

SEQ ID NO: 35366 - DNA, 40 bp, Homo sapiens
gacacacgttggcgataaatatgcagataagaaaaaaaac

SEQ ID NO: 35367 - DNA, 40 bp, Homo sapiens
gttttttttcttatctgcatatttatcgccaacgtgtgtc

SEQ ID NO: 35368 - DNA, 40 bp, Homo sapiens
acacacgttggcgataaatatgcagataagaaaaaaaacc

SEQ ID NO: 35369 - DNA, 40 bp, Homo sapiens
ggttttttttcttatctgcatatttatcgccaacgtgtgt

SEQ ID NO: 35370 - DNA, 40 bp, Homo sapiens
cacacgttggcgataaatatgcagataagaaaaaaaacct

SEQ ID NO: 35371 - DNA, 40 bp, Homo sapiens
aggttttttttcttatctgcatatttatcgccaacgtgtg

SEQ ID NO: 35372 - DNA, 40 bp, Homo sapiens
acacgttggcgataaatatgcagataagaaaaaaaaccta

SEQ ID NO: 35373 - DNA, 40 bp, Homo sapiens
taggttttttttcttatctgcatatttatcgccaacgtgt

SEQ ID NO: 35374 - DNA, 40 bp, Homo sapiens
cacgttggcgataaatatgcagataagaaaaaaaacctat

SEQ ID NO: 35375 - DNA, 40 bp, Homo sapiens
ataggttttttttcttatctgcatatttatcgccaacgtg

SEQ ID NO: 35376 - DNA, 40 bp, Homo sapiens
acgttggcgataaatatgcagataagaaaaaaaacctata

SEQ ID NO: 35377 - DNA, 40 bp, Homo sapiens
tataggttttttttcttatctgcatatttatcgccaacgt

SEQ ID NO: 35378 - DNA, 40 bp, Homo sapiens
cgttggcgataaatatgcagataagaaaaaaaacctatat

SEQ ID NO: 35379 - DNA, 40 bp, Homo sapiens
atataggttttttttcttatctgcatatttatcgccaacg

SEQ ID NO: 35380 - DNA, 40 bp, Homo sapiens
gttggcgataaatatgcagataagaaaaaaaacctatata

SEQ ID NO: 35381 - DNA, 40 bp, Homo sapiens
tatataggttttttttcttatctgcatatttatcgccaac

SEQ ID NO: 35382 - DNA, 40 bp, Homo sapiens
ttggcgataaatatgcagataagaaaaaaaacctatataa

SEQ ID NO: 35383 - DNA, 40 bp, Homo sapiens
ttatataggttttttttcttatctgcatatttatcgccaa

SEQ ID NO: 35384 - DNA, 40 bp, Homo sapiens
tggcgataaatatgcagataagaaaaaaaacctatataac

SEQ ID NO: 35385 - DNA, 40 bp, Homo sapiens
gttatataggttttttttcttatctgcatatttatcgcca

SEQ ID NO: 35386 - DNA, 40 bp, Homo sapiens
ggcgataaatatgcagataagaaaaaaaacctatataaca

SEQ ID NO: 35387 - DNA, 40 bp, Homo sapiens
tgttatataggttttttttcttatctgcatatttatcgcc

SEQ ID NO: 35388 - DNA, 40 bp, Homo sapiens
gcgataaatatgcagataagaaaaaaaacctatataacat

SEQ ID NO: 35389 - DNA, 40 bp, Homo sapiens
atgttatataggttttttttcttatctgcatatttatcgc

SEQ ID NO: 35390 - DNA, 40 bp, Homo sapiens
cgataaatatgcagataagaaaaaaaacctatataacatt

SEQ ID NO: 35391 - DNA, 40 bp, Homo sapiens
aatgttatataggttttttttcttatctgcatatttatcg

SEQ ID NO: 35392 - DNA, 40 bp, Homo sapiens
gataaatatgcagataagaaaaaaaacctatataacatta

SEQ ID NO: 35393 - DNA, 40 bp, Homo sapiens
taatgttatataggttttttttcttatctgcatatttatc

SEQ ID NO: 35394 - DNA, 40 bp, Homo sapiens
ataaatatgcagataagaaaaaaaacctatataacattat

SEQ ID NO: 35395 - DNA, 40 bp, Homo sapiens
ataatgttatataggttttttttcttatctgcatatttat

SEQ ID NO: 35396 - DNA, 40 bp, Homo sapiens
taaatatgcagataagaaaaaaaacctatataacattatt

SEQ ID NO: 35397 - DNA, 40 bp, Homo sapiens
aataatgttatataggttttttttcttatctgcatattta

SEQ ID NO: 35398 - DNA, 40 bp, Homo sapiens
aaatatgcagataagaaaaaaaacctatataacattatta

SEQ ID NO: 35399 - DNA, 40 bp, Homo sapiens
taataatgttatataggttttttttcttatctgcatattt

SEQ ID NO: 35400 - DNA, 40 bp, Homo sapiens
aatatgcagataagaaaaaaaacctatataacattattac

SEQ ID NO: 35401 - DNA, 40 bp, Homo sapiens
gtaataatgttatataggttttttttcttatctgcatatt

SEQ ID NO: 35402 - DNA, 40 bp, Homo sapiens
atatgcagataagaaaaaaaacctatataacattattact

SEQ ID NO: 35403 - DNA, 40 bp, Homo sapiens
agtaataatgttatataggttttttttcttatctgcatat

SEQ ID NO: 35404 - DNA, 40 bp, Homo sapiens
tatgcagataagaaaaaaaacctatataacattattactc

SEQ ID NO: 35405 - DNA, 40 bp, Homo sapiens
gagtaataatgttatataggttttttttcttatctgcata

SEQ ID NO: 35406 - DNA, 40 bp, Homo sapiens
atgcagataagaaaaaaaacctatataacattattactcc

SEQ ID NO: 35407 - DNA, 40 bp, Homo sapiens
ggagtaataatgttatataggttttttttcttatctgcat

SEQ ID NO: 35408 - DNA, 40 bp, Homo sapiens
tgcagataagaaaaaaaacctatataacattattactcct

SEQ ID NO: 35409 - DNA, 40 bp, Homo sapiens
aggagtaataatgttatataggttttttttcttatctgca

SEQ ID NO: 35410 - DNA, 40 bp, Homo sapiens
gcagataagaaaaaaaacctatataacattattactcctc

SEQ ID NO: 35411 - DNA, 40 bp, Homo sapiens
gaggagtaataatgttatataggttttttttcttatctgc

SEQ ID NO: 35412 - DNA, 40 bp, Homo sapiens
cagataagaaaaaaaacctatataacattattactcctca

SEQ ID NO: 35413 - DNA, 40 bp, Homo sapiens
tgaggagtaataatgttatataggttttttttcttatctg

SEQ ID NO: 35414 - DNA, 40 bp, Homo sapiens
agataagaaaaaaaacctatataacattattactcctcaa

SEQ ID NO: 35415 - DNA, 40 bp, Homo sapiens
ttgaggagtaataatgttatataggttttttttcttatct

SEQ ID NO: 35416 - DNA, 40 bp, Homo sapiens
gataagaaaaaaaacctatataacattattactcctcaaa

SEQ ID NO: 35417 - DNA, 40 bp, Homo sapiens
tttgaggagtaataatgttatataggttttttttcttatc

SEQ ID NO: 35418 - DNA, 40 bp, Homo sapiens
ataagaaaaaaaacctatataacattattactcctcaaag

SEQ ID NO: 35419 - DNA, 40 bp, Homo sapiens
ctttgaggagtaataatgttatataggttttttttcttat

SEQ ID NO: 35420 - DNA, 40 bp, Homo sapiens
taagaaaaaaaacctatataacattattactcctcaaaga

SEQ ID NO: 35421 - DNA, 40 bp, Homo sapiens
tctttgaggagtaataatgttatataggttttttttctta

SEQ ID NO: 35422 - DNA, 40 bp, Homo sapiens
aagaaaaaaaacctatataacattattactcctcaaagaa

SEQ ID NO: 35423 - DNA, 40 bp, Homo sapiens
ttctttgaggagtaataatgttatataggttttttttctt

SEQ ID NO: 35424 - DNA, 40 bp, Homo sapiens
agaaaaaaaacctatataacattattactcctcaaagaaa

SEQ ID NO: 35425 - DNA, 40 bp, Homo sapiens
tttctttgaggagtaataatgttatataggttttttttct

SEQ ID NO: 35426 - DNA, 40 bp, Homo sapiens
gaaaaaaaacctatataacattattactcctcaaagaaat

SEQ ID NO: 35427 - DNA, 40 bp, Homo sapiens
atttctttgaggagtaataatgttatataggttttttttc

SEQ ID NO: 35428 - DNA, 40 bp, Homo sapiens
aaaaaaaacctatataacattattactcctcaaagaaatt

SEQ ID NO: 35429 - DNA, 40 bp, Homo sapiens
aatttctttgaggagtaataatgttatataggtttttttt

SEQ ID NO: 35430 - DNA, 40 bp, Homo sapiens
aaaaaaacctatataacattattactcctcaaagaaattg

SEQ ID NO: 35431 - DNA, 40 bp, Homo sapiens
caatttctttgaggagtaataatgttatataggttttttt

SEQ ID NO: 35432 - DNA, 40 bp, Homo sapiens
aaaaaacctatataacattattactcctcaaagaaattgg

SEQ ID NO: 35433 - DNA, 40 bp, Homo sapiens
ccaatttctttgaggagtaataatgttatataggtttttt

SEQ ID NO: 35434 - DNA, 40 bp, Homo sapiens
aaaaacctatataacattattactcctcaaagaaattggt

SEQ ID NO: 35435 - DNA, 40 bp, Homo sapiens
accaatttctttgaggagtaataatgttatataggttttt

SEQ ID NO: 35436 - DNA, 40 bp, Homo sapiens
aaaacctatataacattattactcctcaaagaaattggta

SEQ ID NO: 35437 - DNA, 40 bp, Homo sapiens
taccaatttctttgaggagtaataatgttatataggtttt

SEQ ID NO: 35438 - DNA, 40 bp, Homo sapiens
aaacctatataacattattactcctcaaagaaattggtat

SEQ ID NO: 35439 - DNA, 40 bp, Homo sapiens
ataccaatttctttgaggagtaataatgttatataggttt

SEQ ID NO: 35440 - DNA, 40 bp, Homo sapiens
aacctatataacattattactcctcaaagaaattggtatg

SEQ ID NO: 35441 - DNA, 40 bp, Homo sapiens
cataccaatttctttgaggagtaataatgttatataggtt

SEQ ID NO: 35442 - DNA, 40 bp, Homo sapiens
acctatataacattattactcctcaaagaaattggtatga

SEQ ID NO: 35443 - DNA, 40 bp, Homo sapiens
tcataccaatttctttgaggagtaataatgttatataggt

SEQ ID NO: 35444 - DNA, 40 bp, Homo sapiens
cctatataacattattactcctcaaagaaattggtatgaa

SEQ ID NO: 35445 - DNA, 40 bp, Homo sapiens
ttcataccaatttctttgaggagtaataatgttatatagg

SEQ ID NO: 35446 - DNA, 40 bp, Homo sapiens
ctatataacattattactcctcaaagaaattggtatgaaa

SEQ ID NO: 35447 - DNA, 40 bp, Homo sapiens
tttcataccaatttctttgaggagtaataatgttatatag

SEQ ID NO: 35448 - DNA, 40 bp, Homo sapiens
tatataacattattactcctcaaagaaattggtatgaaaa

SEQ ID NO: 35449 - DNA, 40 bp, Homo sapiens
ttttcataccaatttctttgaggagtaataatgttatata

SEQ ID NO: 35450 - DNA, 40 bp, Homo sapiens
atataacattattactcctcaaagaaattggtatgaaaac

SEQ ID NO: 35451 - DNA, 40 bp, Homo sapiens
gttttcataccaatttctttgaggagtaataatgttatat

SEQ ID NO: 35452 - DNA, 40 bp, Homo sapiens
tataacattattactcctcaaagaaattggtatgaaaaca

SEQ ID NO: 35453 - DNA, 40 bp, Homo sapiens
tgttttcataccaatttctttgaggagtaataatgttata

SEQ ID NO: 35454 - DNA, 40 bp, Homo sapiens
ataacattattactcctcaaagaaattggtatgaaaacaa

SEQ ID NO: 35455 - DNA, 40 bp, Homo sapiens
ttgttttcataccaatttctttgaggagtaataatgttat

SEQ ID NO: 35456 - DNA, 40 bp, Homo sapiens
taacattattactcctcaaagaaattggtatgaaaacaat

SEQ ID NO: 35457 - DNA, 40 bp, Homo sapiens
attgttttcataccaatttctttgaggagtaataatgtta

SEQ ID NO: 35458 - DNA, 40 bp, Homo sapiens
aacattattactcctcaaagaaattggtatgaaaacaata

SEQ ID NO: 35459 - DNA, 40 bp, Homo sapiens
tattgttttcataccaatttctttgaggagtaataatgtt

SEQ ID NO: 35460 - DNA, 40 bp, Homo sapiens
acattattactcctcaaagaaattggtatgaaaacaataa

SEQ ID NO: 35461 - DNA, 40 bp, Homo sapiens
ttattgttttcataccaatttctttgaggagtaataatgt

SEQ ID NO: 35462 - DNA, 40 bp, Homo sapiens
cattattactcctcaaagaaattggtatgaaaacaataaa

SEQ ID NO: 35463 - DNA, 40 bp, Homo sapiens
tttattgttttcataccaatttctttgaggagtaataatg

SEQ ID NO: 35464 - DNA, 40 bp, Homo sapiens
attattactcctcaaagaaattggtatgaaaacaataaaa

SEQ ID NO: 35465 - DNA, 40 bp, Homo sapiens
ttttattgttttcataccaatttctttgaggagtaataat

SEQ ID NO: 35466 - DNA, 40 bp, Homo sapiens
ttattactcctcaaagaaattggtatgaaaacaataaaaa

SEQ ID NO: 35467 - DNA, 40 bp, Homo sapiens
tttttattgttttcataccaatttctttgaggagtaataa

SEQ ID NO: 35468 - DNA, 40 bp, Homo sapiens
tattactcctcaaagaaattggtatgaaaacaataaaaat

SEQ ID NO: 35469 - DNA, 40 bp, Homo sapiens
atttttattgttttcataccaatttctttgaggagtaata

SEQ ID NO: 35470 - DNA, 40 bp, Homo sapiens
attactcctcaaagaaattggtatgaaaacaataaaaatg

SEQ ID NO: 35471 - DNA, 40 bp, Homo sapiens
catttttattgttttcataccaatttctttgaggagtaat

SEQ ID NO: 35472 - DNA, 40 bp, Homo sapiens
ttactcctcaaagaaattggtatgaaaacaataaaaatgt

SEQ ID NO: 35473 - DNA, 40 bp, Homo sapiens
acatttttattgttttcataccaatttctttgaggagtaa

SEQ ID NO: 35474 - DNA, 40 bp, Homo sapiens
tactcctcaaagaaattggtatgaaaacaataaaaatgtg

SEQ ID NO: 35475 - DNA, 40 bp, Homo sapiens
cacatttttattgttttcataccaatttctttgaggagta

SEQ ID NO: 35476 - DNA, 40 bp, Homo sapiens
actcctcaaagaaattggtatgaaaacaataaaaatgtgt

SEQ ID NO: 35477 - DNA, 40 bp, Homo sapiens
acacatttttattgttttcataccaatttctttgaggagt

SEQ ID NO: 35478 - DNA, 40 bp, Homo sapiens
ctcctcaaagaaattggtatgaaaacaataaaaatgtgta

SEQ ID NO: 35479 - DNA, 40 bp, Homo sapiens
tacacatttttattgttttcataccaatttctttgaggag

SEQ ID NO: 35480 - DNA, 40 bp, Homo sapiens
tcctcaaagaaattggtatgaaaacaataaaaatgtgtag

SEQ ID NO: 35481 - DNA, 40 bp, Homo sapiens
ctacacatttttattgttttcataccaatttctttgagga

SEQ ID NO: 35482 - DNA, 40 bp, Homo sapiens
cctcaaagaaattggtatgaaaacaataaaaatgtgtagc

SEQ ID NO: 35483 - DNA, 40 bp, Homo sapiens
gctacacatttttattgttttcataccaatttctttgagg

SEQ ID NO: 35484 - DNA, 40 bp, Homo sapiens
ctcaaagaaattggtatgaaaacaataaaaatgtgtagct

SEQ ID NO: 35485 - DNA, 40 bp, Homo sapiens
agctacacatttttattgttttcataccaatttctttgag

SEQ ID NO: 35486 - DNA, 40 bp, Homo sapiens
tcaaagaaattggtatgaaaacaataaaaatgtgtagctt

SEQ ID NO: 35487 - DNA, 40 bp, Homo sapiens
aagctacacatttttattgttttcataccaatttctttga

SEQ ID NO: 35488 - DNA, 40 bp, Homo sapiens
caaagaaattggtatgaaaacaataaaaatgtgtagctta

SEQ ID NO: 35489 - DNA, 40 bp, Homo sapiens
taagctacacatttttattgttttcataccaatttctttg

SEQ ID NO: 35490 - DNA, 40 bp, Homo sapiens
aaagaaattggtatgaaaacaataaaaatgtgtagcttat

SEQ ID NO: 35491 - DNA, 40 bp, Homo sapiens
ataagctacacatttttattgttttcataccaatttcttt

SEQ ID NO: 35492 - DNA, 40 bp, Homo sapiens
aagaaattggtatgaaaacaataaaaatgtgtagcttatc

SEQ ID NO: 35493 - DNA, 40 bp, Homo sapiens
gataagctacacatttttattgttttcataccaatttctt

SEQ ID NO: 35494 - DNA, 40 bp, Homo sapiens
agaaattggtatgaaaacaataaaaatgtgtagcttatca

SEQ ID NO: 35495 - DNA, 40 bp, Homo sapiens
tgataagctacacatttttattgttttcataccaatttct

SEQ ID NO: 35496 - DNA, 40 bp, Homo sapiens
gaaattggtatgaaaacaataaaaatgtgtagcttatcaa

SEQ ID NO: 35497 - DNA, 40 bp, Homo sapiens
ttgataagctacacatttttattgttttcataccaatttc

SEQ ID NO: 35498 - DNA, 40 bp, Homo sapiens
aaattggtatgaaaacaataaaaatgtgtagcttatcaaa

SEQ ID NO: 35499 - DNA, 40 bp, Homo sapiens
tttgataagctacacatttttattgttttcataccaattt

SEQ ID NO: 35500 - DNA, 40 bp, Homo sapiens
aattggtatgaaaacaataaaaatgtgtagcttatcaaac

SEQ ID NO: 35501 - DNA, 40 bp, Homo sapiens
gtttgataagctacacatttttattgttttcataccaatt

SEQ ID NO: 35502 - DNA, 40 bp, Homo sapiens
attggtatgaaaacaataaaaatgtgtagcttatcaaacc

SEQ ID NO: 35503 - DNA, 40 bp, Homo sapiens
ggtttgataagctacacatttttattgttttcataccaat

SEQ ID NO: 35504 - DNA, 40 bp, Homo sapiens
ttggtatgaaaacaataaaaatgtgtagcttatcaaacca

SEQ ID NO: 35505 - DNA, 40 bp, Homo sapiens
tggtttgataagctacacatttttattgttttcataccaa

SEQ ID NO: 35506 - DNA, 40 bp, Homo sapiens
tggtatgaaaacaataaaaatgtgtagcttatcaaaccaa

SEQ ID NO: 35507 - DNA, 40 bp, Homo sapiens
ttggtttgataagctacacatttttattgttttcatacca

SEQ ID NO: 35508 - DNA, 40 bp, Homo sapiens
ggtatgaaaacaataaaaatgtgtagcttatcaaaccaac

SEQ ID NO: 35509 - DNA, 40 bp, Homo sapiens
gttggtttgataagctacacatttttattgttttcatacc

SEQ ID NO: 35510 - DNA, 40 bp, Homo sapiens
gtatgaaaacaataaaaatgtgtagcttatcaaaccaaca

SEQ ID NO: 35511 - DNA, 40 bp, Homo sapiens
tgttggtttgataagctacacatttttattgttttcatac

SEQ ID NO: 35512 - DNA, 40 bp, Homo sapiens
tatgaaaacaataaaaatgtgtagcttatcaaaccaacaa

SEQ ID NO: 35513 - DNA, 40 bp, Homo sapiens
ttgttggtttgataagctacacatttttattgttttcata

SEQ ID NO: 35514 - DNA, 40 bp, Homo sapiens
atgaaaacaataaaaatgtgtagcttatcaaaccaacaaa

SEQ ID NO: 35515 - DNA, 40 bp, Homo sapiens
tttgttggtttgataagctacacatttttattgttttcat

SEQ ID NO: 35516 - DNA, 40 bp, Homo sapiens
tgaaaacaataaaaatgtgtagcttatcaaaccaacaaaa

SEQ ID NO: 35517 - DNA, 40 bp, Homo sapiens
ttttgttggtttgataagctacacatttttattgttttca

SEQ ID NO: 35518 - DNA, 40 bp, Homo sapiens
gaaaacaataaaaatgtgtagcttatcaaaccaacaaaaa

SEQ ID NO: 35519 - DNA, 40 bp, Homo sapiens
tttttgttggtttgataagctacacatttttattgttttc

SEQ ID NO: 35520 - DNA, 40 bp, Homo sapiens
aaaacaataaaaatgtgtagcttatcaaaccaacaaaaat

SEQ ID NO: 35521 - DNA, 40 bp, Homo sapiens
atttttgttggtttgataagctacacatttttattgtttt

SEQ ID NO: 35522 - DNA, 40 bp, Homo sapiens
aaacaataaaaatgtgtagcttatcaaaccaacaaaaatt

SEQ ID NO: 35523 - DNA, 40 bp, Homo sapiens
aatttttgttggtttgataagctacacatttttattgttt

SEQ ID NO: 35524 - DNA, 40 bp, Homo sapiens
aacaataaaaatgtgtagcttatcaaaccaacaaaaattt

SEQ ID NO: 35525 - DNA, 40 bp, Homo sapiens
aaatttttgttggtttgataagctacacatttttattgtt

SEQ ID NO: 35526 - DNA, 40 bp, Homo sapiens
acaataaaaatgtgtagcttatcaaaccaacaaaaattta

SEQ ID NO: 35527 - DNA, 40 bp, Homo sapiens
taaatttttgttggtttgataagctacacatttttattgt

SEQ ID NO: 35528 - DNA, 40 bp, Homo sapiens
caataaaaatgtgtagcttatcaaaccaacaaaaatttaa

SEQ ID NO: 35529 - DNA, 40 bp, Homo sapiens
ttaaatttttgttggtttgataagctacacatttttattg

SEQ ID NO: 35530 - DNA, 40 bp, Homo sapiens
aataaaaatgtgtagcttatcaaaccaacaaaaatttaaa

SEQ ID NO: 35531 - DNA, 40 bp, Homo sapiens
tttaaatttttgttggtttgataagctacacatttttatt

SEQ ID NO: 35532 - DNA, 40 bp, Homo sapiens
ataaaaatgtgtagcttatcaaaccaacaaaaatttaaaa

SEQ ID NO: 35533 - DNA, 40 bp, Homo sapiens
ttttaaatttttgttggtttgataagctacacatttttat

SEQ ID NO: 35534 - DNA, 40 bp, Homo sapiens
taaaaatgtgtagcttatcaaaccaacaaaaatttaaaaa

SEQ ID NO: 35535 - DNA, 40 bp, Homo sapiens
tttttaaatttttgttggtttgataagctacacattttta

SEQ ID NO: 35536 - DNA, 40 bp, Homo sapiens
aaaaatgtgtagcttatcaaaccaacaaaaatttaaaaat

SEQ ID NO: 35537 - DNA, 40 bp, Homo sapiens
atttttaaatttttgttggtttgataagctacacattttt

SEQ ID NO: 35538 - DNA, 40 bp, Homo sapiens
aaaatgtgtagcttatcaaaccaacaaaaatttaaaaata

SEQ ID NO: 35539 - DNA, 40 bp, Homo sapiens
tatttttaaatttttgttggtttgataagctacacatttt

SEQ ID NO: 35540 - DNA, 40 bp, Homo sapiens
aaatgtgtagcttatcaaaccaacaaaaatttaaaaatat

SEQ ID NO: 35541 - DNA, 40 bp, Homo sapiens
atatttttaaatttttgttggtttgataagctacacattt

SEQ ID NO: 35542 - DNA, 40 bp, Homo sapiens
aatgtgtagcttatcaaaccaacaaaaatttaaaaatatg

SEQ ID NO: 35543 - DNA, 40 bp, Homo sapiens
catatttttaaatttttgttggtttgataagctacacatt

SEQ ID NO: 35544 - DNA, 40 bp, Homo sapiens
atgtgtagcttatcaaaccaacaaaaatttaaaaatatga

SEQ ID NO: 35545 - DNA, 40 bp, Homo sapiens
tcatatttttaaatttttgttggtttgataagctacacat

SEQ ID NO: 35546 - DNA, 40 bp, Homo sapiens
tgtgtagcttatcaaaccaacaaaaatttaaaaatatgaa

SEQ ID NO: 35547 - DNA, 40 bp, Homo sapiens
ttcatatttttaaatttttgttggtttgataagctacaca

SEQ ID NO: 35548 - DNA, 40 bp, Homo sapiens
gtgtagcttatcaaaccaacaaaaatttaaaaatatgaaa

SEQ ID NO: 35549 - DNA, 40 bp, Homo sapiens
tttcatatttttaaatttttgttggtttgataagctacac

SEQ ID NO: 35550 - DNA, 40 bp, Homo sapiens
tgtagcttatcaaaccaacaaaaatttaaaaatatgaaat

SEQ ID NO: 35551 - DNA, 40 bp, Homo sapiens
atttcatatttttaaatttttgttggtttgataagctaca

SEQ ID NO: 35552 - DNA, 40 bp, Homo sapiens
gtagcttatcaaaccaacaaaaatttaaaaatatgaaatc

SEQ ID NO: 35553 - DNA, 40 bp, Homo sapiens
gatttcatatttttaaatttttgttggtttgataagctac

SEQ ID NO: 35554 - DNA, 40 bp, Homo sapiens
tagcttatcaaaccaacaaaaatttaaaaatatgaaatcc

SEQ ID NO: 35555 - DNA, 40 bp, Homo sapiens
ggatttcatatttttaaatttttgttggtttgataagcta

SEQ ID NO: 35556 - DNA, 40 bp, Homo sapiens
agcttatcaaaccaacaaaaatttaaaaatatgaaatcca

SEQ ID NO: 35557 - DNA, 40 bp, Homo sapiens
tggatttcatatttttaaatttttgttggtttgataagct

SEQ ID NO: 35558 - DNA, 40 bp, Homo sapiens
gcttatcaaaccaacaaaaatttaaaaatatgaaatccat

SEQ ID NO: 35559 - DNA, 40 bp, Homo sapiens
atggatttcatatttttaaatttttgttggtttgataagc

SEQ ID NO: 35560 - DNA, 40 bp, Homo sapiens
cttatcaaaccaacaaaaatttaaaaatatgaaatccatt

SEQ ID NO: 35561 - DNA, 40 bp, Homo sapiens
aatggatttcatatttttaaatttttgttggtttgataag

SEQ ID NO: 35562 - DNA, 40 bp, Homo sapiens
ttatcaaaccaacaaaaatttaaaaatatgaaatccattt

SEQ ID NO: 35563 - DNA, 40 bp, Homo sapiens
aaatggatttcatatttttaaatttttgttggtttgataa

SEQ ID NO: 35564 - DNA, 40 bp, Homo sapiens
tatcaaaccaacaaaaatttaaaaatatgaaatccatttt

SEQ ID NO: 35565 - DNA, 40 bp, Homo sapiens
aaaatggatttcatatttttaaatttttgttggtttgata

SEQ ID NO: 35566 - DNA, 40 bp, Homo sapiens
atcaaaccaacaaaaatttaaaaatatgaaatccatttta

SEQ ID NO: 35567 - DNA, 40 bp, Homo sapiens
taaaatggatttcatatttttaaatttttgttggtttgat

SEQ ID NO: 35568 - DNA, 40 bp, Homo sapiens
tcaaaccaacaaaaatttaaaaatatgaaatccattttaa

SEQ ID NO: 35569 - DNA, 40 bp, Homo sapiens
ttaaaatggatttcatatttttaaatttttgttggtttga

SEQ ID NO: 35570 - DNA, 40 bp, Homo sapiens
caaaccaacaaaaatttaaaaatatgaaatccattttaag

SEQ ID NO: 35571 - DNA, 40 bp, Homo sapiens
cttaaaatggatttcatatttttaaatttttgttggtttg

SEQ ID NO: 35572 - DNA, 40 bp, Homo sapiens
aaaccaacaaaaatttaaaaatatgaaatccattttaagt

SEQ ID NO: 35573 - DNA, 40 bp, Homo sapiens
acttaaaatggatttcatatttttaaatttttgttggttt

SEQ ID NO: 35574 - DNA, 40 bp, Homo sapiens
aaccaacaaaaatttaaaaatatgaaatccattttaagta

SEQ ID NO: 35575 - DNA, 40 bp, Homo sapiens
tacttaaaatggatttcatatttttaaatttttgttggtt

SEQ ID NO: 35576 - DNA, 40 bp, Homo sapiens
accaacaaaaatttaaaaatatgaaatccattttaagtaa

SEQ ID NO: 35577 - DNA, 40 bp, Homo sapiens
ttacttaaaatggatttcatatttttaaatttttgttggt

SEQ ID NO: 35578 - DNA, 40 bp, Homo sapiens
ccaacaaaaatttaaaaatatgaaatccattttaagtaat

SEQ ID NO: 35579 - DNA, 40 bp, Homo sapiens
attacttaaaatggatttcatatttttaaatttttgttgg

SEQ ID NO: 35580 - DNA, 40 bp, Homo sapiens
caacaaaaatttaaaaatatgaaatccattttaagtaatg

SEQ ID NO: 35581 - DNA, 40 bp, Homo sapiens
cattacttaaaatggatttcatatttttaaatttttgttg

SEQ ID NO: 35582 - DNA, 40 bp, Homo sapiens
aacaaaaatttaaaaatatgaaatccattttaagtaatga

SEQ ID NO: 35583 - DNA, 40 bp, Homo sapiens
tcattacttaaaatggatttcatatttttaaatttttgtt

SEQ ID NO: 35584 - DNA, 40 bp, Homo sapiens
acaaaaatttaaaaatatgaaatccattttaagtaatgat

SEQ ID NO: 35585 - DNA, 40 bp, Homo sapiens
atcattacttaaaatggatttcatatttttaaatttttgt

SEQ ID NO: 35586 - DNA, 40 bp, Homo sapiens
caaaaatttaaaaatatgaaatccattttaagtaatgata

SEQ ID NO: 35587 - DNA, 40 bp, Homo sapiens
tatcattacttaaaatggatttcatatttttaaatttttg

SEQ ID NO: 35588 - DNA, 40 bp, Homo sapiens
aaaaatttaaaaatatgaaatccattttaagtaatgataa

SEQ ID NO: 35589 - DNA, 40 bp, Homo sapiens
ttatcattacttaaaatggatttcatatttttaaattttt

SEQ ID NO: 35590 - DNA, 40 bp, Homo sapiens
aaaatttaaaaatatgaaatccattttaagtaatgataaa

SEQ ID NO: 35591 - DNA, 40 bp, Homo sapiens
tttatcattacttaaaatggatttcatatttttaaatttt

SEQ ID NO: 35592 - DNA, 40 bp, Homo sapiens
aaatttaaaaatatgaaatccattttaagtaatgataaaa

SEQ ID NO: 35593 - DNA, 40 bp, Homo sapiens
ttttatcattacttaaaatggatttcatatttttaaattt

SEQ ID NO: 35594 - DNA, 40 bp, Homo sapiens
aatttaaaaatatgaaatccattttaagtaatgataaaat

SEQ ID NO: 35595 - DNA, 40 bp, Homo sapiens
attttatcattacttaaaatggatttcatatttttaaatt

SEQ ID NO: 35596 - DNA, 40 bp, Homo sapiens
atttaaaaatatgaaatccattttaagtaatgataaaatg

SEQ ID NO: 35597 - DNA, 40 bp, Homo sapiens
cattttatcattacttaaaatggatttcatatttttaaat

SEQ ID NO: 35598 - DNA, 40 bp, Homo sapiens
tttaaaaatatgaaatccattttaagtaatgataaaatgg

SEQ ID NO: 35599 - DNA, 40 bp, Homo sapiens
ccattttatcattacttaaaatggatttcatatttttaaa

SEQ ID NO: 35600 - DNA, 40 bp, Homo sapiens
ttaaaaatatgaaatccattttaagtaatgataaaatggg

SEQ ID NO: 35601 - DNA, 40 bp, Homo sapiens
cccattttatcattacttaaaatggatttcatatttttaa

SEQ ID NO: 35602 - DNA, 40 bp, Homo sapiens
taaaaatatgaaatccattttaagtaatgataaaatgggt

SEQ ID NO: 35603 - DNA, 40 bp, Homo sapiens
acccattttatcattacttaaaatggatttcatattttta

SEQ ID NO: 35604 - DNA, 40 bp, Homo sapiens
aaaaatatgaaatccattttaagtaatgataaaatgggtg

SEQ ID NO: 35605 - DNA, 40 bp, Homo sapiens
cacccattttatcattacttaaaatggatttcatattttt

SEQ ID NO: 35606 - DNA, 40 bp, Homo sapiens
aaaatatgaaatccattttaagtaatgataaaatgggtgc

SEQ ID NO: 35607 - DNA, 40 bp, Homo sapiens
gcacccattttatcattacttaaaatggatttcatatttt

SEQ ID NO: 35608 - DNA, 40 bp, Homo sapiens
aaatatgaaatccattttaagtaatgataaaatgggtgca

SEQ ID NO: 35609 - DNA, 40 bp, Homo sapiens
tgcacccattttatcattacttaaaatggatttcatattt

SEQ ID NO: 35610 - DNA, 40 bp, Homo sapiens
aatatgaaatccattttaagtaatgataaaatgggtgcac

SEQ ID NO: 35611 - DNA, 40 bp, Homo sapiens
gtgcacccattttatcattacttaaaatggatttcatatt

SEQ ID NO: 35612 - DNA, 40 bp, Homo sapiens
atatgaaatccattttaagtaatgataaaatgggtgcact

SEQ ID NO: 35613 - DNA, 40 bp, Homo sapiens
agtgcacccattttatcattacttaaaatggatttcatat

SEQ ID NO: 35614 - DNA, 40 bp, Homo sapiens
tatgaaatccattttaagtaatgataaaatgggtgcactc

SEQ ID NO: 35615 - DNA, 40 bp, Homo sapiens
gagtgcacccattttatcattacttaaaatggatttcata

SEQ ID NO: 35616 - DNA, 40 bp, Homo sapiens
atgaaatccattttaagtaatgataaaatgggtgcactct

SEQ ID NO: 35617 - DNA, 40 bp, Homo sapiens
agagtgcacccattttatcattacttaaaatggatttcat

SEQ ID NO: 35618 - DNA, 40 bp, Homo sapiens
tgaaatccattttaagtaatgataaaatgggtgcactctt

SEQ ID NO: 35619 - DNA, 40 bp, Homo sapiens
aagagtgcacccattttatcattacttaaaatggatttca

SEQ ID NO: 35620 - DNA, 40 bp, Homo sapiens
gaaatccattttaagtaatgataaaatgggtgcactctta

SEQ ID NO: 35621 - DNA, 40 bp, Homo sapiens
taagagtgcacccattttatcattacttaaaatggatttc

SEQ ID NO: 35622 - DNA, 40 bp, Homo sapiens
aaatccattttaagtaatgataaaatgggtgcactcttag

SEQ ID NO: 35623 - DNA, 40 bp, Homo sapiens
ctaagagtgcacccattttatcattacttaaaatggattt

SEQ ID NO: 35624 - DNA, 40 bp, Homo sapiens
aatccattttaagtaatgataaaatgggtgcactcttagt

SEQ ID NO: 35625 - DNA, 40 bp, Homo sapiens
actaagagtgcacccattttatcattacttaaaatggatt

SEQ ID NO: 35626 - DNA, 40 bp, Homo sapiens
atccattttaagtaatgataaaatgggtgcactcttagtg

SEQ ID NO: 35627 - DNA, 40 bp, Homo sapiens
cactaagagtgcacccattttatcattacttaaaatggat

SEQ ID NO: 35628 - DNA, 40 bp, Homo sapiens
tccattttaagtaatgataaaatgggtgcactcttagtgc

SEQ ID NO: 35629 - DNA, 40 bp, Homo sapiens
gcactaagagtgcacccattttatcattacttaaaatgga

SEQ ID NO: 35630 - DNA, 40 bp, Homo sapiens
ccattttaagtaatgataaaatgggtgcactcttagtgct

SEQ ID NO: 35631 - DNA, 40 bp, Homo sapiens
agcactaagagtgcacccattttatcattacttaaaatgg

SEQ ID NO: 35632 - DNA, 40 bp, Homo sapiens
cattttaagtaatgataaaatgggtgcactcttagtgctt

SEQ ID NO: 35633 - DNA, 40 bp, Homo sapiens
aagcactaagagtgcacccattttatcattacttaaaatg

SEQ ID NO: 35634 - DNA, 40 bp, Homo sapiens
attttaagtaatgataaaatgggtgcactcttagtgcttt

SEQ ID NO: 35635 - DNA, 40 bp, Homo sapiens
aaagcactaagagtgcacccattttatcattacttaaaat

SEQ ID NO: 35636 - DNA, 40 bp, Homo sapiens
ttttaagtaatgataaaatgggtgcactcttagtgcttta

SEQ ID NO: 35637 - DNA, 40 bp, Homo sapiens
taaagcactaagagtgcacccattttatcattacttaaaa

SEQ ID NO: 35638 - DNA, 40 bp, Homo sapiens
tttaagtaatgataaaatgggtgcactcttagtgctttat

SEQ ID NO: 35639 - DNA, 40 bp, Homo sapiens
ataaagcactaagagtgcacccattttatcattacttaaa

SEQ ID NO: 35640 - DNA, 40 bp, Homo sapiens
ttaagtaatgataaaatgggtgcactcttagtgctttata

SEQ ID NO: 35641 - DNA, 40 bp, Homo sapiens
tataaagcactaagagtgcacccattttatcattacttaa

SEQ ID NO: 35642 - DNA, 40 bp, Homo sapiens
taagtaatgataaaatgggtgcactcttagtgctttatag

SEQ ID NO: 35643 - DNA, 40 bp, Homo sapiens
ctataaagcactaagagtgcacccattttatcattactta

SEQ ID NO: 35644 - DNA, 40 bp, Homo sapiens
aagtaatgataaaatgggtgcactcttagtgctttataga

SEQ ID NO: 35645 - DNA, 40 bp, Homo sapiens
tctataaagcactaagagtgcacccattttatcattactt

SEQ ID NO: 35646 - DNA, 40 bp, Homo sapiens
agtaatgataaaatgggtgcactcttagtgctttatagaa

SEQ ID NO: 35647 - DNA, 40 bp, Homo sapiens
ttctataaagcactaagagtgcacccattttatcattact

SEQ ID NO: 35648 - DNA, 40 bp, Homo sapiens
gtaatgataaaatgggtgcactcttagtgctttatagaat

SEQ ID NO: 35649 - DNA, 40 bp, Homo sapiens
attctataaagcactaagagtgcacccattttatcattac

SEQ ID NO: 35650 - DNA, 40 bp, Homo sapiens
taatgataaaatgggtgcactcttagtgctttatagaata

SEQ ID NO: 35651 - DNA, 40 bp, Homo sapiens
tattctataaagcactaagagtgcacccattttatcatta

SEQ ID NO: 35652 - DNA, 40 bp, Homo sapiens
aatgataaaatgggtgcactcttagtgctttatagaatag

SEQ ID NO: 35653 - DNA, 40 bp, Homo sapiens
ctattctataaagcactaagagtgcacccattttatcatt

SEQ ID NO: 35654 - DNA, 40 bp, Homo sapiens
atgataaaatgggtgcactcttagtgctttatagaatagt

SEQ ID NO: 35655 - DNA, 40 bp, Homo sapiens
actattctataaagcactaagagtgcacccattttatcat

SEQ ID NO: 35656 - DNA, 40 bp, Homo sapiens
tgataaaatgggtgcactcttagtgctttatagaatagta

SEQ ID NO: 35657 - DNA, 40 bp, Homo sapiens
tactattctataaagcactaagagtgcacccattttatca

SEQ ID NO: 35658 - DNA, 40 bp, Homo sapiens
gataaaatgggtgcactcttagtgctttatagaatagtag

SEQ ID NO: 35659 - DNA, 40 bp, Homo sapiens
ctactattctataaagcactaagagtgcacccattttatc

SEQ ID NO: 35660 - DNA, 40 bp, Homo sapiens
ataaaatgggtgcactcttagtgctttatagaatagtagt

SEQ ID NO: 35661 - DNA, 40 bp, Homo sapiens
actactattctataaagcactaagagtgcacccattttat

SEQ ID NO: 35662 - DNA, 40 bp, Homo sapiens
taaaatgggtgcactcttagtgctttatagaatagtagta

SEQ ID NO: 35663 - DNA, 40 bp, Homo sapiens
tactactattctataaagcactaagagtgcacccatttta

SEQ ID NO: 35664 - DNA, 40 bp, Homo sapiens
aaaatgggtgcactcttagtgctttatagaatagtagtat

SEQ ID NO: 35665 - DNA, 40 bp, Homo sapiens
atactactattctataaagcactaagagtgcacccatttt

SEQ ID NO: 35666 - DNA, 40 bp, Homo sapiens
aaatgggtgcactcttagtgctttatagaatagtagtata

SEQ ID NO: 35667 - DNA, 40 bp, Homo sapiens
tatactactattctataaagcactaagagtgcacccattt

SEQ ID NO: 35668 - DNA, 40 bp, Homo sapiens
aatgggtgcactcttagtgctttatagaatagtagtataa

SEQ ID NO: 35669 - DNA, 40 bp, Homo sapiens
ttatactactattctataaagcactaagagtgcacccatt

SEQ ID NO: 35670 - DNA, 40 bp, Homo sapiens
atgggtgcactcttagtgctttatagaatagtagtataat

SEQ ID NO: 35671 - DNA, 40 bp, Homo sapiens
attatactactattctataaagcactaagagtgcacccat

SEQ ID NO: 35672 - DNA, 40 bp, Homo sapiens
tgggtgcactcttagtgctttatagaatagtagtataatg

SEQ ID NO: 35673 - DNA, 40 bp, Homo sapiens
cattatactactattctataaagcactaagagtgcaccca

SEQ ID NO: 35674 - DNA, 40 bp, Homo sapiens
gggtgcactcttagtgctttatagaatagtagtataatga

SEQ ID NO: 35675 - DNA, 40 bp, Homo sapiens
tcattatactactattctataaagcactaagagtgcaccc

SEQ ID NO: 35676 - DNA, 40 bp, Homo sapiens
ggtgcactcttagtgctttatagaatagtagtataatgaa

SEQ ID NO: 35677 - DNA, 40 bp, Homo sapiens
ttcattatactactattctataaagcactaagagtgcacc

SEQ ID NO: 35678 - DNA, 40 bp, Homo sapiens
gtgcactcttagtgctttatagaatagtagtataatgaac

SEQ ID NO: 35679 - DNA, 40 bp, Homo sapiens
gttcattatactactattctataaagcactaagagtgcac

SEQ ID NO: 35680 - DNA, 40 bp, Homo sapiens
tgcactcttagtgctttatagaatagtagtataatgaacc

SEQ ID NO: 35681 - DNA, 40 bp, Homo sapiens
ggttcattatactactattctataaagcactaagagtgca

SEQ ID NO: 35682 - DNA, 40 bp, Homo sapiens
gcactcttagtgctttatagaatagtagtataatgaacct

SEQ ID NO: 35683 - DNA, 40 bp, Homo sapiens
aggttcattatactactattctataaagcactaagagtgc

SEQ ID NO: 35684 - DNA, 40 bp, Homo sapiens
cactcttagtgctttatagaatagtagtataatgaacctc

SEQ ID NO: 35685 - DNA, 40 bp, Homo sapiens
gaggttcattatactactattctataaagcactaagagtg

SEQ ID NO: 35686 - DNA, 40 bp, Homo sapiens
actcttagtgctttatagaatagtagtataatgaacctca

SEQ ID NO: 35687 - DNA, 40 bp, Homo sapiens
tgaggttcattatactactattctataaagcactaagagt

SEQ ID NO: 35688 - DNA, 40 bp, Homo sapiens
ctcttagtgctttatagaatagtagtataatgaacctcat

SEQ ID NO: 35689 - DNA, 40 bp, Homo sapiens
atgaggttcattatactactattctataaagcactaagag

SEQ ID NO: 35690 - DNA, 40 bp, Homo sapiens
tcttagtgctttatagaatagtagtataatgaacctcatg

SEQ ID NO: 35691 - DNA, 40 bp, Homo sapiens
catgaggttcattatactactattctataaagcactaaga

SEQ ID NO: 35692 - DNA, 40 bp, Homo sapiens
cttagtgctttatagaatagtagtataatgaacctcatgt

SEQ ID NO: 35693 - DNA, 40 bp, Homo sapiens
acatgaggttcattatactactattctataaagcactaag

SEQ ID NO: 35694 - DNA, 40 bp, Homo sapiens
ttagtgctttatagaatagtagtataatgaacctcatgtg

SEQ ID NO: 35695 - DNA, 40 bp, Homo sapiens
cacatgaggttcattatactactattctataaagcactaa

SEQ ID NO: 35696 - DNA, 40 bp, Homo sapiens
tagtgctttatagaatagtagtataatgaacctcatgtgt

SEQ ID NO: 35697 - DNA, 40 bp, Homo sapiens
acacatgaggttcattatactactattctataaagcacta

SEQ ID NO: 35698 - DNA, 40 bp, Homo sapiens
agtgctttatagaatagtagtataatgaacctcatgtgtg

SEQ ID NO: 35699 - DNA, 40 bp, Homo sapiens
cacacatgaggttcattatactactattctataaagcact

SEQ ID NO: 35700 - DNA, 40 bp, Homo sapiens
gtgctttatagaatagtagtataatgaacctcatgtgtgt

SEQ ID NO: 35701 - DNA, 40 bp, Homo sapiens
acacacatgaggttcattatactactattctataaagcac

SEQ ID NO: 35702 - DNA, 40 bp, Homo sapiens
tgctttatagaatagtagtataatgaacctcatgtgtgta

SEQ ID NO: 35703 - DNA, 40 bp, Homo sapiens
tacacacatgaggttcattatactactattctataaagca

SEQ ID NO: 35704 - DNA, 40 bp, Homo sapiens
gctttatagaatagtagtataatgaacctcatgtgtgtac

SEQ ID NO: 35705 - DNA, 40 bp, Homo sapiens
gtacacacatgaggttcattatactactattctataaagc

SEQ ID NO: 35706 - DNA, 40 bp, Homo sapiens
ctttatagaatagtagtataatgaacctcatgtgtgtacc

SEQ ID NO: 35707 - DNA, 40 bp, Homo sapiens
ggtacacacatgaggttcattatactactattctataaag

SEQ ID NO: 35708 - DNA, 40 bp, Homo sapiens
tttatagaatagtagtataatgaacctcatgtgtgtacca

SEQ ID NO: 35709 - DNA, 40 bp, Homo sapiens
tggtacacacatgaggttcattatactactattctataaa

SEQ ID NO: 35710 - DNA, 40 bp, Homo sapiens
ttatagaatagtagtataatgaacctcatgtgtgtaccaa

SEQ ID NO: 35711 - DNA, 40 bp, Homo sapiens
ttggtacacacatgaggttcattatactactattctataa

SEQ ID NO: 35712 - DNA, 40 bp, Homo sapiens
tatagaatagtagtataatgaacctcatgtgtgtaccaac

SEQ ID NO: 35713 - DNA, 40 bp, Homo sapiens
gttggtacacacatgaggttcattatactactattctata

SEQ ID NO: 35714 - DNA, 40 bp, Homo sapiens
atagaatagtagtataatgaacctcatgtgtgtaccaacc

SEQ ID NO: 35715 - DNA, 40 bp, Homo sapiens
ggttggtacacacatgaggttcattatactactattctat

SEQ ID NO: 35716 - DNA, 40 bp, Homo sapiens
tagaatagtagtataatgaacctcatgtgtgtaccaacca

SEQ ID NO: 35717 - DNA, 40 bp, Homo sapiens
tggttggtacacacatgaggttcattatactactattcta

SEQ ID NO: 35718 - DNA, 40 bp, Homo sapiens
agaatagtagtataatgaacctcatgtgtgtaccaaccag

SEQ ID NO: 35719 - DNA, 40 bp, Homo sapiens
ctggttggtacacacatgaggttcattatactactattct

SEQ ID NO: 35720 - DNA, 40 bp, Homo sapiens
gaatagtagtataatgaacctcatgtgtgtaccaaccagc

SEQ ID NO: 35721 - DNA, 40 bp, Homo sapiens
gctggttggtacacacatgaggttcattatactactattc

SEQ ID NO: 35722 - DNA, 40 bp, Homo sapiens
aatagtagtataatgaacctcatgtgtgtaccaaccagct

SEQ ID NO: 35723 - DNA, 40 bp, Homo sapiens
agctggttggtacacacatgaggttcattatactactatt

SEQ ID NO: 35724 - DNA, 40 bp, Homo sapiens
atagtagtataatgaacctcatgtgtgtaccaaccagctc

SEQ ID NO: 35725 - DNA, 40 bp, Homo sapiens
gagctggttggtacacacatgaggttcattatactactat

SEQ ID NO: 35726 - DNA, 40 bp, Homo sapiens
tagtagtataatgaacctcatgtgtgtaccaaccagctct

SEQ ID NO: 35727 - DNA, 40 bp, Homo sapiens
agagctggttggtacacacatgaggttcattatactacta

SEQ ID NO: 35728 - DNA, 40 bp, Homo sapiens
agtagtataatgaacctcatgtgtgtaccaaccagctctt

SEQ ID NO: 35729 - DNA, 40 bp, Homo sapiens
aagagctggttggtacacacatgaggttcattatactact

SEQ ID NO: 35730 - DNA, 40 bp, Homo sapiens
gtagtataatgaacctcatgtgtgtaccaaccagctcttt

SEQ ID NO: 35731 - DNA, 40 bp, Homo sapiens
aaagagctggttggtacacacatgaggttcattatactac

SEQ ID NO: 35732 - DNA, 40 bp, Homo sapiens
tagtataatgaacctcatgtgtgtaccaaccagctctttc

SEQ ID NO: 35733 - DNA, 40 bp, Homo sapiens
gaaagagctggttggtacacacatgaggttcattatacta

SEQ ID NO: 35734 - DNA, 40 bp, Homo sapiens
agtataatgaacctcatgtgtgtaccaaccagctctttca

SEQ ID NO: 35735 - DNA, 40 bp, Homo sapiens
tgaaagagctggttggtacacacatgaggttcattatact

SEQ ID NO: 35736 - DNA, 40 bp, Homo sapiens
gtataatgaacctcatgtgtgtaccaaccagctctttcat

SEQ ID NO: 35737 - DNA, 40 bp, Homo sapiens
atgaaagagctggttggtacacacatgaggttcattatac

SEQ ID NO: 35738 - DNA, 40 bp, Homo sapiens
tataatgaacctcatgtgtgtaccaaccagctctttcata

SEQ ID NO: 35739 - DNA, 40 bp, Homo sapiens
tatgaaagagctggttggtacacacatgaggttcattata

SEQ ID NO: 35740 - DNA, 40 bp, Homo sapiens
ataatgaacctcatgtgtgtaccaaccagctctttcatat

SEQ ID NO: 35741 - DNA, 40 bp, Homo sapiens
atatgaaagagctggttggtacacacatgaggttcattat

SEQ ID NO: 35742 - DNA, 40 bp, Homo sapiens
taatgaacctcatgtgtgtaccaaccagctctttcatatc

SEQ ID NO: 35743 - DNA, 40 bp, Homo sapiens
gatatgaaagagctggttggtacacacatgaggttcatta

SEQ ID NO: 35744 - DNA, 40 bp, Homo sapiens
aatgaacctcatgtgtgtaccaaccagctctttcatatct

SEQ ID NO: 35745 - DNA, 40 bp, Homo sapiens
agatatgaaagagctggttggtacacacatgaggttcatt

SEQ ID NO: 35746 - DNA, 40 bp, Homo sapiens
atgaacctcatgtgtgtaccaaccagctctttcatatctt

SEQ ID NO: 35747 - DNA, 40 bp, Homo sapiens
aagatatgaaagagctggttggtacacacatgaggttcat

SEQ ID NO: 35748 - DNA, 40 bp, Homo sapiens
tgaacctcatgtgtgtaccaaccagctctttcatatctta

SEQ ID NO: 35749 - DNA, 40 bp, Homo sapiens
taagatatgaaagagctggttggtacacacatgaggttca

SEQ ID NO: 35750 - DNA, 40 bp, Homo sapiens
gaacctcatgtgtgtaccaaccagctctttcatatcttaa

SEQ ID NO: 35751 - DNA, 40 bp, Homo sapiens
ttaagatatgaaagagctggttggtacacacatgaggttc

SEQ ID NO: 35752 - DNA, 40 bp, Homo sapiens
aacctcatgtgtgtaccaaccagctctttcatatcttaac

SEQ ID NO: 35753 - DNA, 40 bp, Homo sapiens
gttaagatatgaaagagctggttggtacacacatgaggtt

SEQ ID NO: 35754 - DNA, 40 bp, Homo sapiens
acctcatgtgtgtaccaaccagctctttcatatcttaaca

SEQ ID NO: 35755 - DNA, 40 bp, Homo sapiens
tgttaagatatgaaagagctggttggtacacacatgaggt

SEQ ID NO: 35756 - DNA, 40 bp, Homo sapiens
cctcatgtgtgtaccaaccagctctttcatatcttaacat

SEQ ID NO: 35757 - DNA, 40 bp, Homo sapiens
atgttaagatatgaaagagctggttggtacacacatgagg

SEQ ID NO: 35758 - DNA, 40 bp, Homo sapiens
ctcatgtgtgtaccaaccagctctttcatatcttaacatt

SEQ ID NO: 35759 - DNA, 40 bp, Homo sapiens
aatgttaagatatgaaagagctggttggtacacacatgag

SEQ ID NO: 35760 - DNA, 40 bp, Homo sapiens
tcatgtgtgtaccaaccagctctttcatatcttaacattt

SEQ ID NO: 35761 - DNA, 40 bp, Homo sapiens
aaatgttaagatatgaaagagctggttggtacacacatga

SEQ ID NO: 35762 - DNA, 40 bp, Homo sapiens
catgtgtgtaccaaccagctctttcatatcttaacattta

SEQ ID NO: 35763 - DNA, 40 bp, Homo sapiens
taaatgttaagatatgaaagagctggttggtacacacatg

SEQ ID NO: 35764 - DNA, 40 bp, Homo sapiens
atgtgtgtaccaaccagctctttcatatcttaacatttag

SEQ ID NO: 35765 - DNA, 40 bp, Homo sapiens
ctaaatgttaagatatgaaagagctggttggtacacacat

SEQ ID NO: 35766 - DNA, 40 bp, Homo sapiens
tgtgtgtaccaaccagctctttcatatcttaacatttagc

SEQ ID NO: 35767 - DNA, 40 bp, Homo sapiens
gctaaatgttaagatatgaaagagctggttggtacacaca

SEQ ID NO: 35768 - DNA, 40 bp, Homo sapiens
gtgtgtaccaaccagctctttcatatcttaacatttagca

SEQ ID NO: 35769 - DNA, 40 bp, Homo sapiens
tgctaaatgttaagatatgaaagagctggttggtacacac

SEQ ID NO: 35770 - DNA, 40 bp, Homo sapiens
tgtgtaccaaccagctctttcatatcttaacatttagcaa

SEQ ID NO: 35771 - DNA, 40 bp, Homo sapiens
ttgctaaatgttaagatatgaaagagctggttggtacaca

SEQ ID NO: 35772 - DNA, 40 bp, Homo sapiens
gtgtaccaaccagctctttcatatcttaacatttagcaac

SEQ ID NO: 35773 - DNA, 40 bp, Homo sapiens
gttgctaaatgttaagatatgaaagagctggttggtacac

SEQ ID NO: 35774 - DNA, 40 bp, Homo sapiens
tgtaccaaccagctctttcatatcttaacatttagcaaca

SEQ ID NO: 35775 - DNA, 40 bp, Homo sapiens
tgttgctaaatgttaagatatgaaagagctggttggtaca

SEQ ID NO: 35776 - DNA, 40 bp, Homo sapiens
gtaccaaccagctctttcatatcttaacatttagcaacat

SEQ ID NO: 35777 - DNA, 40 bp, Homo sapiens
atgttgctaaatgttaagatatgaaagagctggttggtac

SEQ ID NO: 35778 - DNA, 40 bp, Homo sapiens
taccaaccagctctttcatatcttaacatttagcaacatt

SEQ ID NO: 35779 - DNA, 40 bp, Homo sapiens
aatgttgctaaatgttaagatatgaaagagctggttggta

SEQ ID NO: 35780 - DNA, 40 bp, Homo sapiens
accaaccagctctttcatatcttaacatttagcaacattt

SEQ ID NO: 35781 - DNA, 40 bp, Homo sapiens
aaatgttgctaaatgttaagatatgaaagagctggttggt

SEQ ID NO: 35782 - DNA, 40 bp, Homo sapiens
ccaaccagctctttcatatcttaacatttagcaacatttg

SEQ ID NO: 35783 - DNA, 40 bp, Homo sapiens
caaatgttgctaaatgttaagatatgaaagagctggttgg

SEQ ID NO: 35784 - DNA, 40 bp, Homo sapiens
caaccagctctttcatatcttaacatttagcaacatttga

SEQ ID NO: 35785 - DNA, 40 bp, Homo sapiens
tcaaatgttgctaaatgttaagatatgaaagagctggttg

SEQ ID NO: 35786 - DNA, 40 bp, Homo sapiens
aaccagctctttcatatcttaacatttagcaacatttgat

SEQ ID NO: 35787 - DNA, 40 bp, Homo sapiens
atcaaatgttgctaaatgttaagatatgaaagagctggtt

SEQ ID NO: 35788 - DNA, 40 bp, Homo sapiens
accagctctttcatatcttaacatttagcaacatttgatt

SEQ ID NO: 35789 - DNA, 40 bp, Homo sapiens
aatcaaatgttgctaaatgttaagatatgaaagagctggt

SEQ ID NO: 35790 - DNA, 40 bp, Homo sapiens
ccagctctttcatatcttaacatttagcaacatttgattt

SEQ ID NO: 35791 - DNA, 40 bp, Homo sapiens
aaatcaaatgttgctaaatgttaagatatgaaagagctgg

SEQ ID NO: 35792 - DNA, 40 bp, Homo sapiens
cagctctttcatatcttaacatttagcaacatttgattta

SEQ ID NO: 35793 - DNA, 40 bp, Homo sapiens
taaatcaaatgttgctaaatgttaagatatgaaagagctg

SEQ ID NO: 35794 - DNA, 40 bp, Homo sapiens
agctctttcatatcttaacatttagcaacatttgatttag

SEQ ID NO: 35795 - DNA, 40 bp, Homo sapiens
ctaaatcaaatgttgctaaatgttaagatatgaaagagct

SEQ ID NO: 35796 - DNA, 40 bp, Homo sapiens
gctctttcatatcttaacatttagcaacatttgatttagc

SEQ ID NO: 35797 - DNA, 40 bp, Homo sapiens
gctaaatcaaatgttgctaaatgttaagatatgaaagagc

SEQ ID NO: 35798 - DNA, 40 bp, Homo sapiens
ctctttcatatcttaacatttagcaacatttgatttagct

SEQ ID NO: 35799 - DNA, 40 bp, Homo sapiens
agctaaatcaaatgttgctaaatgttaagatatgaaagag

SEQ ID NO: 35800 - DNA, 40 bp, Homo sapiens
tctttcatatcttaacatttagcaacatttgatttagctc

SEQ ID NO: 35801 - DNA, 40 bp, Homo sapiens
gagctaaatcaaatgttgctaaatgttaagatatgaaaga

SEQ ID NO: 35802 - DNA, 40 bp, Homo sapiens
ctttcatatcttaacatttagcaacatttgatttagctct

SEQ ID NO: 35803 - DNA, 40 bp, Homo sapiens
agagctaaatcaaatgttgctaaatgttaagatatgaaag

SEQ ID NO: 35804 - DNA, 40 bp, Homo sapiens
tttcatatcttaacatttagcaacatttgatttagctctt

SEQ ID NO: 35805 - DNA, 40 bp, Homo sapiens
aagagctaaatcaaatgttgctaaatgttaagatatgaaa

SEQ ID NO: 35806 - DNA, 40 bp, Homo sapiens
ttcatatcttaacatttagcaacatttgatttagctcttt

SEQ ID NO: 35807 - DNA, 40 bp, Homo sapiens
aaagagctaaatcaaatgttgctaaatgttaagatatgaa

SEQ ID NO: 35808 - DNA, 40 bp, Homo sapiens
tcatatcttaacatttagcaacatttgatttagctctttc

SEQ ID NO: 35809 - DNA, 40 bp, Homo sapiens
gaaagagctaaatcaaatgttgctaaatgttaagatatga

SEQ ID NO: 35810 - DNA, 40 bp, Homo sapiens
catatcttaacatttagcaacatttgatttagctctttct

SEQ ID NO: 35811 - DNA, 40 bp, Homo sapiens
agaaagagctaaatcaaatgttgctaaatgttaagatatg

SEQ ID NO: 35812 - DNA, 40 bp, Homo sapiens
atatcttaacatttagcaacatttgatttagctctttctt

SEQ ID NO: 35813 - DNA, 40 bp, Homo sapiens
aagaaagagctaaatcaaatgttgctaaatgttaagatat

SEQ ID NO: 35814 - DNA, 40 bp, Homo sapiens
tatcttaacatttagcaacatttgatttagctctttcttt

SEQ ID NO: 35815 - DNA, 40 bp, Homo sapiens
aaagaaagagctaaatcaaatgttgctaaatgttaagata

SEQ ID NO: 35816 - DNA, 40 bp, Homo sapiens
atcttaacatttagcaacatttgatttagctctttctttt

SEQ ID NO: 35817 - DNA, 40 bp, Homo sapiens
aaaagaaagagctaaatcaaatgttgctaaatgttaagat

SEQ ID NO: 35818 - DNA, 40 bp, Homo sapiens
tcttaacatttagcaacatttgatttagctctttcttttt

SEQ ID NO: 35819 - DNA, 40 bp, Homo sapiens
aaaaagaaagagctaaatcaaatgttgctaaatgttaaga

SEQ ID NO: 35820 - DNA, 40 bp, Homo sapiens
cttaacatttagcaacatttgatttagctctttctttttt

SEQ ID NO: 35821 - DNA, 40 bp, Homo sapiens
aaaaaagaaagagctaaatcaaatgttgctaaatgttaag

SEQ ID NO: 35822 - DNA, 40 bp, Homo sapiens
ttaacatttagcaacatttgatttagctctttcttttttc

SEQ ID NO: 35823 - DNA, 40 bp, Homo sapiens
gaaaaaagaaagagctaaatcaaatgttgctaaatgttaa

SEQ ID NO: 35824 - DNA, 40 bp, Homo sapiens
taacatttagcaacatttgatttagctctttcttttttcc

SEQ ID NO: 35825 - DNA, 40 bp, Homo sapiens
ggaaaaaagaaagagctaaatcaaatgttgctaaatgtta

SEQ ID NO: 35826 - DNA, 40 bp, Homo sapiens
aacatttagcaacatttgatttagctctttcttttttcca

SEQ ID NO: 35827 - DNA, 40 bp, Homo sapiens
tggaaaaaagaaagagctaaatcaaatgttgctaaatgtt

SEQ ID NO: 35828 - DNA, 40 bp, Homo sapiens
acatttagcaacatttgatttagctctttcttttttccaa

SEQ ID NO: 35829 - DNA, 40 bp, Homo sapiens
ttggaaaaaagaaagagctaaatcaaatgttgctaaatgt

SEQ ID NO: 35830 - DNA, 40 bp, Homo sapiens
catttagcaacatttgatttagctctttcttttttccaag

SEQ ID NO: 35831 - DNA, 40 bp, Homo sapiens
cttggaaaaaagaaagagctaaatcaaatgttgctaaatg

SEQ ID NO: 35832 - DNA, 40 bp, Homo sapiens
atttagcaacatttgatttagctctttcttttttccaaga

SEQ ID NO: 35833 - DNA, 40 bp, Homo sapiens
tcttggaaaaaagaaagagctaaatcaaatgttgctaaat

SEQ ID NO: 35834 - DNA, 40 bp, Homo sapiens
tttagcaacatttgatttagctctttcttttttccaagat

SEQ ID NO: 35835 - DNA, 40 bp, Homo sapiens
atcttggaaaaaagaaagagctaaatcaaatgttgctaaa

SEQ ID NO: 35836 - DNA, 40 bp, Homo sapiens
ttagcaacatttgatttagctctttcttttttccaagata

SEQ ID NO: 35837 - DNA, 40 bp, Homo sapiens
tatcttggaaaaaagaaagagctaaatcaaatgttgctaa

SEQ ID NO: 35838 - DNA, 40 bp, Homo sapiens
tagcaacatttgatttagctctttcttttttccaagatag

SEQ ID NO: 35839 - DNA, 40 bp, Homo sapiens
ctatcttggaaaaaagaaagagctaaatcaaatgttgcta

SEQ ID NO: 35840 - DNA, 40 bp, Homo sapiens
agcaacatttgatttagctctttcttttttccaagataga

SEQ ID NO: 35841 - DNA, 40 bp, Homo sapiens
tctatcttggaaaaaagaaagagctaaatcaaatgttgct

SEQ ID NO: 35842 - DNA, 40 bp, Homo sapiens
gcaacatttgatttagctctttcttttttccaagatagaa

SEQ ID NO: 35843 - DNA, 40 bp, Homo sapiens
ttctatcttggaaaaaagaaagagctaaatcaaatgttgc

SEQ ID NO: 35844 - DNA, 40 bp, Homo sapiens
caacatttgatttagctctttcttttttccaagatagaaa

SEQ ID NO: 35845 - DNA, 40 bp, Homo sapiens
tttctatcttggaaaaaagaaagagctaaatcaaatgttg

SEQ ID NO: 35846 - DNA, 40 bp, Homo sapiens
aacatttgatttagctctttcttttttccaagatagaaaa

SEQ ID NO: 35847 - DNA, 40 bp, Homo sapiens
ttttctatcttggaaaaaagaaagagctaaatcaaatgtt

SEQ ID NO: 35848 - DNA, 40 bp, Homo sapiens
acatttgatttagctctttcttttttccaagatagaaaag

SEQ ID NO: 35849 - DNA, 40 bp, Homo sapiens
cttttctatcttggaaaaaagaaagagctaaatcaaatgt

SEQ ID NO: 35850 - DNA, 40 bp, Homo sapiens
catttgatttagctctttcttttttccaagatagaaaagt

SEQ ID NO: 35851 - DNA, 40 bp, Homo sapiens
acttttctatcttggaaaaaagaaagagctaaatcaaatg

SEQ ID NO: 35852 - DNA, 40 bp, Homo sapiens
atttgatttagctctttcttttttccaagatagaaaagtt

SEQ ID NO: 35853 - DNA, 40 bp, Homo sapiens
aacttttctatcttggaaaaaagaaagagctaaatcaaat

SEQ ID NO: 35854 - DNA, 40 bp, Homo sapiens
tttgatttagctctttcttttttccaagatagaaaagtta

SEQ ID NO: 35855 - DNA, 40 bp, Homo sapiens
taacttttctatcttggaaaaaagaaagagctaaatcaaa

SEQ ID NO: 35856 - DNA, 40 bp, Homo sapiens
ttgatttagctctttcttttttccaagatagaaaagttaa

SEQ ID NO: 35857 - DNA, 40 bp, Homo sapiens
ttaacttttctatcttggaaaaaagaaagagctaaatcaa

SEQ ID NO: 35858 - DNA, 40 bp, Homo sapiens
tgatttagctctttcttttttccaagatagaaaagttaat

SEQ ID NO: 35859 - DNA, 40 bp, Homo sapiens
attaacttttctatcttggaaaaaagaaagagctaaatca

SEQ ID NO: 35860 - DNA, 40 bp, Homo sapiens
gatttagctctttcttttttccaagatagaaaagttaata

SEQ ID NO: 35861 - DNA, 40 bp, Homo sapiens
tattaacttttctatcttggaaaaaagaaagagctaaatc

SEQ ID NO: 35862 - DNA, 40 bp, Homo sapiens
atttagctctttcttttttccaagatagaaaagttaatat

SEQ ID NO: 35863 - DNA, 40 bp, Homo sapiens
atattaacttttctatcttggaaaaaagaaagagctaaat

SEQ ID NO: 35864 - DNA, 40 bp, Homo sapiens
tttagctctttcttttttccaagatagaaaagttaatatt

SEQ ID NO: 35865 - DNA, 40 bp, Homo sapiens
aatattaacttttctatcttggaaaaaagaaagagctaaa

SEQ ID NO: 35866 - DNA, 40 bp, Homo sapiens
ttagctctttcttttttccaagatagaaaagttaatattg

SEQ ID NO: 35867 - DNA, 40 bp, Homo sapiens
caatattaacttttctatcttggaaaaaagaaagagctaa

SEQ ID NO: 35868 - DNA, 40 bp, Homo sapiens
tagctctttcttttttccaagatagaaaagttaatattgt

SEQ ID NO: 35869 - DNA, 40 bp, Homo sapiens
acaatattaacttttctatcttggaaaaaagaaagagcta

SEQ ID NO: 35870 - DNA, 40 bp, Homo sapiens
agctctttcttttttccaagatagaaaagttaatattgtt

SEQ ID NO: 35871 - DNA, 40 bp, Homo sapiens
aacaatattaacttttctatcttggaaaaaagaaagagct

SEQ ID NO: 35872 - DNA, 40 bp, Homo sapiens
gctctttcttttttccaagatagaaaagttaatattgttg

SEQ ID NO: 35873 - DNA, 40 bp, Homo sapiens
caacaatattaacttttctatcttggaaaaaagaaagagc

SEQ ID NO: 35874 - DNA, 40 bp, Homo sapiens
ctctttcttttttccaagatagaaaagttaatattgttga

SEQ ID NO: 35875 - DNA, 40 bp, Homo sapiens
tcaacaatattaacttttctatcttggaaaaaagaaagag

SEQ ID NO: 35876 - DNA, 40 bp, Homo sapiens
tctttcttttttccaagatagaaaagttaatattgttgaa

SEQ ID NO: 35877 - DNA, 40 bp, Homo sapiens
ttcaacaatattaacttttctatcttggaaaaaagaaaga

SEQ ID NO: 35878 - DNA, 40 bp, Homo sapiens
ctttcttttttccaagatagaaaagttaatattgttgaag

SEQ ID NO: 35879 - DNA, 40 bp, Homo sapiens
cttcaacaatattaacttttctatcttggaaaaaagaaag

SEQ ID NO: 35880 - DNA, 40 bp, Homo sapiens
tttcttttttccaagatagaaaagttaatattgttgaaga

SEQ ID NO: 35881 - DNA, 40 bp, Homo sapiens
tcttcaacaatattaacttttctatcttggaaaaaagaaa

SEQ ID NO: 35882 - DNA, 40 bp, Homo sapiens
ttcttttttccaagatagaaaagttaatattgttgaagac

SEQ ID NO: 35883 - DNA, 40 bp, Homo sapiens
gtcttcaacaatattaacttttctatcttggaaaaaagaa

SEQ ID NO: 35884 - DNA, 40 bp, Homo sapiens
tcttttttccaagatagaaaagttaatattgttgaagact

SEQ ID NO: 35885 - DNA, 40 bp, Homo sapiens
agtcttcaacaatattaacttttctatcttggaaaaaaga

SEQ ID NO: 35886 - DNA, 40 bp, Homo sapiens
cttttttccaagatagaaaagttaatattgttgaagactc

SEQ ID NO: 35887 - DNA, 40 bp, Homo sapiens
gagtcttcaacaatattaacttttctatcttggaaaaaag

SEQ ID NO: 35888 - DNA, 40 bp, Homo sapiens
ttttttccaagatagaaaagttaatattgttgaagactcc

SEQ ID NO: 35889 - DNA, 40 bp, Homo sapiens
ggagtcttcaacaatattaacttttctatcttggaaaaaa

SEQ ID NO: 35890 - DNA, 40 bp, Homo sapiens
tttttccaagatagaaaagttaatattgttgaagactcct

SEQ ID NO: 35891 - DNA, 40 bp, Homo sapiens
aggagtcttcaacaatattaacttttctatcttggaaaaa

SEQ ID NO: 35892 - DNA, 40 bp, Homo sapiens
ttttccaagatagaaaagttaatattgttgaagactcctg

SEQ ID NO: 35893 - DNA, 40 bp, Homo sapiens
caggagtcttcaacaatattaacttttctatcttggaaaa

SEQ ID NO: 35894 - DNA, 40 bp, Homo sapiens
tttccaagatagaaaagttaatattgttgaagactcctgc

SEQ ID NO: 35895 - DNA, 40 bp, Homo sapiens
gcaggagtcttcaacaatattaacttttctatcttggaaa

SEQ ID NO: 35896 - DNA, 40 bp, Homo sapiens
ttccaagatagaaaagttaatattgttgaagactcctgca

SEQ ID NO: 35897 - DNA, 40 bp, Homo sapiens
tgcaggagtcttcaacaatattaacttttctatcttggaa

SEQ ID NO: 35898 - DNA, 40 bp, Homo sapiens
tccaagatagaaaagttaatattgttgaagactcctgcat

SEQ ID NO: 35899 - DNA, 40 bp, Homo sapiens
atgcaggagtcttcaacaatattaacttttctatcttgga

SEQ ID NO: 35900 - DNA, 40 bp, Homo sapiens
ccaagatagaaaagttaatattgttgaagactcctgcatt

SEQ ID NO: 35901 - DNA, 40 bp, Homo sapiens
aatgcaggagtcttcaacaatattaacttttctatcttgg

SEQ ID NO: 35902 - DNA, 40 bp, Homo sapiens
caagatagaaaagttaatattgttgaagactcctgcattc

SEQ ID NO: 35903 - DNA, 40 bp, Homo sapiens
gaatgcaggagtcttcaacaatattaacttttctatcttg

SEQ ID NO: 35904 - DNA, 40 bp, Homo sapiens
aagatagaaaagttaatattgttgaagactcctgcattct

SEQ ID NO: 35905 - DNA, 40 bp, Homo sapiens
agaatgcaggagtcttcaacaatattaacttttctatctt

SEQ ID NO: 35906 - DNA, 40 bp, Homo sapiens
agatagaaaagttaatattgttgaagactcctgcattctt

SEQ ID NO: 35907 - DNA, 40 bp, Homo sapiens
aagaatgcaggagtcttcaacaatattaacttttctatct

SEQ ID NO: 35908 - DNA, 40 bp, Homo sapiens
gatagaaaagttaatattgttgaagactcctgcattcttt

SEQ ID NO: 35909 - DNA, 40 bp, Homo sapiens
aaagaatgcaggagtcttcaacaatattaacttttctatc

SEQ ID NO: 35910 - DNA, 40 bp, Homo sapiens
atagaaaagttaatattgttgaagactcctgcattctttt

SEQ ID NO: 35911 - DNA, 40 bp, Homo sapiens
aaaagaatgcaggagtcttcaacaatattaacttttctat

SEQ ID NO: 35912 - DNA, 40 bp, Homo sapiens
tagaaaagttaatattgttgaagactcctgcattcttttc

SEQ ID NO: 35913 - DNA, 40 bp, Homo sapiens
gaaaagaatgcaggagtcttcaacaatattaacttttcta

SEQ ID NO: 35914 - DNA, 40 bp, Homo sapiens
agaaaagttaatattgttgaagactcctgcattcttttcc

SEQ ID NO: 35915 - DNA, 40 bp, Homo sapiens
ggaaaagaatgcaggagtcttcaacaatattaacttttct

SEQ ID NO: 35916 - DNA, 40 bp, Homo sapiens
gaaaagttaatattgttgaagactcctgcattcttttccc

SEQ ID NO: 35917 - DNA, 40 bp, Homo sapiens
gggaaaagaatgcaggagtcttcaacaatattaacttttc

SEQ ID NO: 35918 - DNA, 40 bp, Homo sapiens
aaaagttaatattgttgaagactcctgcattcttttccct

SEQ ID NO: 35919 - DNA, 40 bp, Homo sapiens
agggaaaagaatgcaggagtcttcaacaatattaactttt

SEQ ID NO: 35920 - DNA, 40 bp, Homo sapiens
aaagttaatattgttgaagactcctgcattcttttcccta

SEQ ID NO: 35921 - DNA, 40 bp, Homo sapiens
tagggaaaagaatgcaggagtcttcaacaatattaacttt

SEQ ID NO: 35922 - DNA, 40 bp, Homo sapiens
aagttaatattgttgaagactcctgcattcttttccctag

SEQ ID NO: 35923 - DNA, 40 bp, Homo sapiens
ctagggaaaagaatgcaggagtcttcaacaatattaactt

SEQ ID NO: 35924 - DNA, 40 bp, Homo sapiens
agttaatattgttgaagactcctgcattcttttccctagt

SEQ ID NO: 35925 - DNA, 40 bp, Homo sapiens
actagggaaaagaatgcaggagtcttcaacaatattaact

SEQ ID NO: 35926 - DNA, 40 bp, Homo sapiens
gttaatattgttgaagactcctgcattcttttccctagtc

SEQ ID NO: 35927 - DNA, 40 bp, Homo sapiens
gactagggaaaagaatgcaggagtcttcaacaatattaac

SEQ ID NO: 35928 - DNA, 40 bp, Homo sapiens
ttaatattgttgaagactcctgcattcttttccctagtct

SEQ ID NO: 35929 - DNA, 40 bp, Homo sapiens
agactagggaaaagaatgcaggagtcttcaacaatattaa

SEQ ID NO: 35930 - DNA, 40 bp, Homo sapiens
taatattgttgaagactcctgcattcttttccctagtctt

SEQ ID NO: 35931 - DNA, 40 bp, Homo sapiens
aagactagggaaaagaatgcaggagtcttcaacaatatta

SEQ ID NO: 35932 - DNA, 40 bp, Homo sapiens
aatattgttgaagactcctgcattcttttccctagtctta

SEQ ID NO: 35933 - DNA, 40 bp, Homo sapiens
taagactagggaaaagaatgcaggagtcttcaacaatatt

SEQ ID NO: 35934 - DNA, 40 bp, Homo sapiens
atattgttgaagactcctgcattcttttccctagtcttat

SEQ ID NO: 35935 - DNA, 40 bp, Homo sapiens
ataagactagggaaaagaatgcaggagtcttcaacaatat

SEQ ID NO: 35936 - DNA, 40 bp, Homo sapiens
tattgttgaagactcctgcattcttttccctagtcttatt

SEQ ID NO: 35937 - DNA, 40 bp, Homo sapiens
aataagactagggaaaagaatgcaggagtcttcaacaata

SEQ ID NO: 35938 - DNA, 40 bp, Homo sapiens
attgttgaagactcctgcattcttttccctagtcttattt

SEQ ID NO: 35939 - DNA, 40 bp, Homo sapiens
aaataagactagggaaaagaatgcaggagtcttcaacaat

SEQ ID NO: 35940 - DNA, 40 bp, Homo sapiens
ttgttgaagactcctgcattcttttccctagtcttatttt

SEQ ID NO: 35941 - DNA, 40 bp, Homo sapiens
aaaataagactagggaaaagaatgcaggagtcttcaacaa

SEQ ID NO: 35942 - DNA, 40 bp, Homo sapiens
tgttgaagactcctgcattcttttccctagtcttattttc

SEQ ID NO: 35943 - DNA, 40 bp, Homo sapiens
gaaaataagactagggaaaagaatgcaggagtcttcaaca

SEQ ID NO: 35944 - DNA, 40 bp, Homo sapiens
gttgaagactcctgcattcttttccctagtcttattttct

SEQ ID NO: 35945 - DNA, 40 bp, Homo sapiens
agaaaataagactagggaaaagaatgcaggagtcttcaac

SEQ ID NO: 35946 - DNA, 40 bp, Homo sapiens
ttgaagactcctgcattcttttccctagtcttattttctt

SEQ ID NO: 35947 - DNA, 40 bp, Homo sapiens
aagaaaataagactagggaaaagaatgcaggagtcttcaa

SEQ ID NO: 35948 - DNA, 40 bp, Homo sapiens
tgaagactcctgcattcttttccctagtcttattttcttc

SEQ ID NO: 35949 - DNA, 40 bp, Homo sapiens
gaagaaaataagactagggaaaagaatgcaggagtcttca

SEQ ID NO: 35950 - DNA, 40 bp, Homo sapiens
gaagactcctgcattcttttccctagtcttattttcttcc

SEQ ID NO: 35951 - DNA, 40 bp, Homo sapiens
ggaagaaaataagactagggaaaagaatgcaggagtcttc

SEQ ID NO: 35952 - DNA, 40 bp, Homo sapiens
aagactcctgcattcttttccctagtcttattttcttccc

SEQ ID NO: 35953 - DNA, 40 bp, Homo sapiens
gggaagaaaataagactagggaaaagaatgcaggagtctt

SEQ ID NO: 35954 - DNA, 40 bp, Homo sapiens
agactcctgcattcttttccctagtcttattttcttccct

SEQ ID NO: 35955 - DNA, 40 bp, Homo sapiens
agggaagaaaataagactagggaaaagaatgcaggagtct

SEQ ID NO: 35956 - DNA, 40 bp, Homo sapiens
gactcctgcattcttttccctagtcttattttcttccctc

SEQ ID NO: 35957 - DNA, 40 bp, Homo sapiens
gagggaagaaaataagactagggaaaagaatgcaggagtc

SEQ ID NO: 35958 - DNA, 40 bp, Homo sapiens
actcctgcattcttttccctagtcttattttcttccctcc

SEQ ID NO: 35959 - DNA, 40 bp, Homo sapiens
ggagggaagaaaataagactagggaaaagaatgcaggagt

SEQ ID NO: 35960 - DNA, 40 bp, Homo sapiens
ctcctgcattcttttccctagtcttattttcttccctccc

SEQ ID NO: 35961 - DNA, 40 bp, Homo sapiens
gggagggaagaaaataagactagggaaaagaatgcaggag

SEQ ID NO: 35962 - DNA, 40 bp, Homo sapiens
tcctgcattcttttccctagtcttattttcttccctccca

SEQ ID NO: 35963 - DNA, 40 bp, Homo sapiens
tgggagggaagaaaataagactagggaaaagaatgcagga

SEQ ID NO: 35964 - DNA, 40 bp, Homo sapiens
cctgcattcttttccctagtcttattttcttccctcccat

SEQ ID NO: 35965 - DNA, 40 bp, Homo sapiens
atgggagggaagaaaataagactagggaaaagaatgcagg

SEQ ID NO: 35966 - DNA, 40 bp, Homo sapiens
ctgcattcttttccctagtcttattttcttccctcccata

SEQ ID NO: 35967 - DNA, 40 bp, Homo sapiens
tatgggagggaagaaaataagactagggaaaagaatgcag

SEQ ID NO: 35968 - DNA, 40 bp, Homo sapiens
tgcattcttttccctagtcttattttcttccctcccataa

SEQ ID NO: 35969 - DNA, 40 bp, Homo sapiens
ttatgggagggaagaaaataagactagggaaaagaatgca

SEQ ID NO: 35970 - DNA, 40 bp, Homo sapiens
gcattcttttccctagtcttattttcttccctcccataaa

SEQ ID NO: 35971 - DNA, 40 bp, Homo sapiens
tttatgggagggaagaaaataagactagggaaaagaatgc

SEQ ID NO: 35972 - DNA, 40 bp, Homo sapiens
cattcttttccctagtcttattttcttccctcccataaat

SEQ ID NO: 35973 - DNA, 40 bp, Homo sapiens
atttatgggagggaagaaaataagactagggaaaagaatg

SEQ ID NO: 35974 - DNA, 40 bp, Homo sapiens
attcttttccctagtcttattttcttccctcccataaatg

SEQ ID NO: 35975 - DNA, 40 bp, Homo sapiens
catttatgggagggaagaaaataagactagggaaaagaat

SEQ ID NO: 35976 - DNA, 40 bp, Homo sapiens
ttcttttccctagtcttattttcttccctcccataaatgt

SEQ ID NO: 35977 - DNA, 40 bp, Homo sapiens
acatttatgggagggaagaaaataagactagggaaaagaa

SEQ ID NO: 35978 - DNA, 40 bp, Homo sapiens
tcttttccctagtcttattttcttccctcccataaatgtg

SEQ ID NO: 35979 - DNA, 40 bp, Homo sapiens
cacatttatgggagggaagaaaataagactagggaaaaga

SEQ ID NO: 35980 - DNA, 40 bp, Homo sapiens
cttttccctagtcttattttcttccctcccataaatgtgt

SEQ ID NO: 35981 - DNA, 40 bp, Homo sapiens
acacatttatgggagggaagaaaataagactagggaaaag

SEQ ID NO: 35982 - DNA, 40 bp, Homo sapiens
ttttccctagtcttattttcttccctcccataaatgtgtt

SEQ ID NO: 35983 - DNA, 40 bp, Homo sapiens
aacacatttatgggagggaagaaaataagactagggaaaa

SEQ ID NO: 35984 - DNA, 40 bp, Homo sapiens
tttccctagtcttattttcttccctcccataaatgtgtta

SEQ ID NO: 35985 - DNA, 40 bp, Homo sapiens
taacacatttatgggagggaagaaaataagactagggaaa

SEQ ID NO: 35986 - DNA, 40 bp, Homo sapiens
ttccctagtcttattttcttccctcccataaatgtgttaa

SEQ ID NO: 35987 - DNA, 40 bp, Homo sapiens
ttaacacatttatgggagggaagaaaataagactagggaa

SEQ ID NO: 35988 - DNA, 40 bp, Homo sapiens
tccctagtcttattttcttccctcccataaatgtgttaaa

SEQ ID NO: 35989 - DNA, 40 bp, Homo sapiens
tttaacacatttatgggagggaagaaaataagactaggga

SEQ ID NO: 35990 - DNA, 40 bp, Homo sapiens
ccctagtcttattttcttccctcccataaatgtgttaaaa

SEQ ID NO: 35991 - DNA, 40 bp, Homo sapiens
ttttaacacatttatgggagggaagaaaataagactaggg

SEQ ID NO: 35992 - DNA, 40 bp, Homo sapiens
cctagtcttattttcttccctcccataaatgtgttaaaat

SEQ ID NO: 35993 - DNA, 40 bp, Homo sapiens
attttaacacatttatgggagggaagaaaataagactagg

SEQ ID NO: 35994 - DNA, 40 bp, Homo sapiens
ctagtcttattttcttccctcccataaatgtgttaaaatc

SEQ ID NO: 35995 - DNA, 40 bp, Homo sapiens
gattttaacacatttatgggagggaagaaaataagactag

SEQ ID NO: 35996 - DNA, 40 bp, Homo sapiens
tagtcttattttcttccctcccataaatgtgttaaaatct

SEQ ID NO: 35997 - DNA, 40 bp, Homo sapiens
agattttaacacatttatgggagggaagaaaataagacta

SEQ ID NO: 35998 - DNA, 40 bp, Homo sapiens
agtcttattttcttccctcccataaatgtgttaaaatctc

SEQ ID NO: 35999 - DNA, 40 bp, Homo sapiens
gagattttaacacatttatgggagggaagaaaataagact

SEQ ID NO: 36000 - DNA, 40 bp, Homo sapiens
gtcttattttcttccctcccataaatgtgttaaaatctct

SEQ ID NO: 36001 - DNA, 40 bp, Homo sapiens
agagattttaacacatttatgggagggaagaaaataagac

SEQ ID NO: 36002 - DNA, 40 bp, Homo sapiens
tcttattttcttccctcccataaatgtgttaaaatctctg

SEQ ID NO: 36003 - DNA, 40 bp, Homo sapiens
cagagattttaacacatttatgggagggaagaaaataaga

SEQ ID NO: 36004 - DNA, 40 bp, Homo sapiens
cttattttcttccctcccataaatgtgttaaaatctctgt

SEQ ID NO: 36005 - DNA, 40 bp, Homo sapiens
acagagattttaacacatttatgggagggaagaaaataag

SEQ ID NO: 36006 - DNA, 40 bp, Homo sapiens
ttattttcttccctcccataaatgtgttaaaatctctgtg

SEQ ID NO: 36007 - DNA, 40 bp, Homo sapiens
cacagagattttaacacatttatgggagggaagaaaataa

SEQ ID NO: 36008 - DNA, 40 bp, Homo sapiens
tattttcttccctcccataaatgtgttaaaatctctgtgt

SEQ ID NO: 36009 - DNA, 40 bp, Homo sapiens
acacagagattttaacacatttatgggagggaagaaaata

SEQ ID NO: 36010 - DNA, 40 bp, Homo sapiens
attttcttccctcccataaatgtgttaaaatctctgtgtg

SEQ ID NO: 36011 - DNA, 40 bp, Homo sapiens
cacacagagattttaacacatttatgggagggaagaaaat

SEQ ID NO: 36012 - DNA, 40 bp, Homo sapiens
ttttcttccctcccataaatgtgttaaaatctctgtgtgt

SEQ ID NO: 36013 - DNA, 40 bp, Homo sapiens
acacacagagattttaacacatttatgggagggaagaaaa

SEQ ID NO: 36014 - DNA, 40 bp, Homo sapiens
tttcttccctcccataaatgtgttaaaatctctgtgtgta

SEQ ID NO: 36015 - DNA, 40 bp, Homo sapiens
tacacacagagattttaacacatttatgggagggaagaaa

SEQ ID NO: 36016 - DNA, 40 bp, Homo sapiens
ttcttccctcccataaatgtgttaaaatctctgtgtgtat

SEQ ID NO: 36017 - DNA, 40 bp, Homo sapiens
atacacacagagattttaacacatttatgggagggaagaa

SEQ ID NO: 36018 - DNA, 40 bp, Homo sapiens
tcttccctcccataaatgtgttaaaatctctgtgtgtatt

SEQ ID NO: 36019 - DNA, 40 bp, Homo sapiens
aatacacacagagattttaacacatttatgggagggaaga

SEQ ID NO: 36020 - DNA, 40 bp, Homo sapiens
cttccctcccataaatgtgttaaaatctctgtgtgtattg

SEQ ID NO: 36021 - DNA, 40 bp, Homo sapiens
caatacacacagagattttaacacatttatgggagggaag

SEQ ID NO: 36022 - DNA, 40 bp, Homo sapiens
ttccctcccataaatgtgttaaaatctctgtgtgtattgt

SEQ ID NO: 36023 - DNA, 40 bp, Homo sapiens
acaatacacacagagattttaacacatttatgggagggaa

SEQ ID NO: 36024 - DNA, 40 bp, Homo sapiens
tccctcccataaatgtgttaaaatctctgtgtgtattgtt

SEQ ID NO: 36025 - DNA, 40 bp, Homo sapiens
aacaatacacacagagattttaacacatttatgggaggga

SEQ ID NO: 36026 - DNA, 40 bp, Homo sapiens
ccctcccataaatgtgttaaaatctctgtgtgtattgttt

SEQ ID NO: 36027 - DNA, 40 bp, Homo sapiens
aaacaatacacacagagattttaacacatttatgggaggg

SEQ ID NO: 36028 - DNA, 40 bp, Homo sapiens
cctcccataaatgtgttaaaatctctgtgtgtattgtttt

SEQ ID NO: 36029 - DNA, 40 bp, Homo sapiens
aaaacaatacacacagagattttaacacatttatgggagg

SEQ ID NO: 36030 - DNA, 40 bp, Homo sapiens
ctcccataaatgtgttaaaatctctgtgtgtattgttttg

SEQ ID NO: 36031 - DNA, 40 bp, Homo sapiens
caaaacaatacacacagagattttaacacatttatgggag

SEQ ID NO: 36032 - DNA, 40 bp, Homo sapiens
tcccataaatgtgttaaaatctctgtgtgtattgttttgg

SEQ ID NO: 36033 - DNA, 40 bp, Homo sapiens
ccaaaacaatacacacagagattttaacacatttatggga

SEQ ID NO: 36034 - DNA, 40 bp, Homo sapiens
cccataaatgtgttaaaatctctgtgtgtattgttttggt

SEQ ID NO: 36035 - DNA, 40 bp, Homo sapiens
accaaaacaatacacacagagattttaacacatttatggg

SEQ ID NO: 36036 - DNA, 40 bp, Homo sapiens
ccataaatgtgttaaaatctctgtgtgtattgttttggtt

SEQ ID NO: 36037 - DNA, 40 bp, Homo sapiens
aaccaaaacaatacacacagagattttaacacatttatgg

SEQ ID NO: 36038 - DNA, 40 bp, Homo sapiens
cataaatgtgttaaaatctctgtgtgtattgttttggttg

SEQ ID NO: 36039 - DNA, 40 bp, Homo sapiens
caaccaaaacaatacacacagagattttaacacatttatg

SEQ ID NO: 36040 - DNA, 40 bp, Homo sapiens
ataaatgtgttaaaatctctgtgtgtattgttttggttgt

SEQ ID NO: 36041 - DNA, 40 bp, Homo sapiens
acaaccaaaacaatacacacagagattttaacacatttat

SEQ ID NO: 36042 - DNA, 40 bp, Homo sapiens
taaatgtgttaaaatctctgtgtgtattgttttggttgta

SEQ ID NO: 36043 - DNA, 40 bp, Homo sapiens
tacaaccaaaacaatacacacagagattttaacacattta

SEQ ID NO: 36044 - DNA, 40 bp, Homo sapiens
aaatgtgttaaaatctctgtgtgtattgttttggttgtat

SEQ ID NO: 36045 - DNA, 40 bp, Homo sapiens
atacaaccaaaacaatacacacagagattttaacacattt

SEQ ID NO: 36046 - DNA, 40 bp, Homo sapiens
aatgtgttaaaatctctgtgtgtattgttttggttgtatt

SEQ ID NO: 36047 - DNA, 40 bp, Homo sapiens
aatacaaccaaaacaatacacacagagattttaacacatt

SEQ ID NO: 36048 - DNA, 40 bp, Homo sapiens
atgtgttaaaatctctgtgtgtattgttttggttgtattt

SEQ ID NO: 36049 - DNA, 40 bp, Homo sapiens
aaatacaaccaaaacaatacacacagagattttaacacat

SEQ ID NO: 36050 - DNA, 40 bp, Homo sapiens
tgtgttaaaatctctgtgtgtattgttttggttgtatttt

SEQ ID NO: 36051 - DNA, 40 bp, Homo sapiens
aaaatacaaccaaaacaatacacacagagattttaacaca

SEQ ID NO: 36052 - DNA, 40 bp, Homo sapiens
gtgttaaaatctctgtgtgtattgttttggttgtattttt

SEQ ID NO: 36053 - DNA, 40 bp, Homo sapiens
aaaaatacaaccaaaacaatacacacagagattttaacac

SEQ ID NO: 36054 - DNA, 40 bp, Homo sapiens
tgttaaaatctctgtgtgtattgttttggttgtattttta

SEQ ID NO: 36055 - DNA, 40 bp, Homo sapiens
taaaaatacaaccaaaacaatacacacagagattttaaca

SEQ ID NO: 36056 - DNA, 40 bp, Homo sapiens
gttaaaatctctgtgtgtattgttttggttgtatttttac

SEQ ID NO: 36057 - DNA, 40 bp, Homo sapiens
gtaaaaatacaaccaaaacaatacacacagagattttaac

SEQ ID NO: 36058 - DNA, 40 bp, Homo sapiens
ttaaaatctctgtgtgtattgttttggttgtatttttaca

SEQ ID NO: 36059 - DNA, 40 bp, Homo sapiens
tgtaaaaatacaaccaaaacaatacacacagagattttaa

SEQ ID NO: 36060 - DNA, 40 bp, Homo sapiens
taaaatctctgtgtgtattgttttggttgtatttttacat

SEQ ID NO: 36061 - DNA, 40 bp, Homo sapiens
atgtaaaaatacaaccaaaacaatacacacagagatttta

SEQ ID NO: 36062 - DNA, 40 bp, Homo sapiens
aaaatctctgtgtgtattgttttggttgtatttttacata

SEQ ID NO: 36063 - DNA, 40 bp, Homo sapiens
tatgtaaaaatacaaccaaaacaatacacacagagatttt

SEQ ID NO: 36064 - DNA, 40 bp, Homo sapiens
aaatctctgtgtgtattgttttggttgtatttttacataa

SEQ ID NO: 36065 - DNA, 40 bp, Homo sapiens
ttatgtaaaaatacaaccaaaacaatacacacagagattt

SEQ ID NO: 36066 - DNA, 40 bp, Homo sapiens
aatctctgtgtgtattgttttggttgtatttttacataaa

SEQ ID NO: 36067 - DNA, 40 bp, Homo sapiens
tttatgtaaaaatacaaccaaaacaatacacacagagatt

SEQ ID NO: 36068 - DNA, 40 bp, Homo sapiens
atctctgtgtgtattgttttggttgtatttttacataaaa

SEQ ID NO: 36069 - DNA, 40 bp, Homo sapiens
ttttatgtaaaaatacaaccaaaacaatacacacagagat

SEQ ID NO: 36070 - DNA, 40 bp, Homo sapiens
tctctgtgtgtattgttttggttgtatttttacataaaac

SEQ ID NO: 36071 - DNA, 40 bp, Homo sapiens
gttttatgtaaaaatacaaccaaaacaatacacacagaga

SEQ ID NO: 36072 - DNA, 40 bp, Homo sapiens
ctctgtgtgtattgttttggttgtatttttacataaaact

SEQ ID NO: 36073 - DNA, 40 bp, Homo sapiens
agttttatgtaaaaatacaaccaaaacaatacacacagag

SEQ ID NO: 36074 - DNA, 40 bp, Homo sapiens
tctgtgtgtattgttttggttgtatttttacataaaactt

SEQ ID NO: 36075 - DNA, 40 bp, Homo sapiens
aagttttatgtaaaaatacaaccaaaacaatacacacaga

SEQ ID NO: 36076 - DNA, 40 bp, Homo sapiens
ctgtgtgtattgttttggttgtatttttacataaaacttt

SEQ ID NO: 36077 - DNA, 40 bp, Homo sapiens
aaagttttatgtaaaaatacaaccaaaacaatacacacag

SEQ ID NO: 36078 - DNA, 40 bp, Homo sapiens
tgtgtgtattgttttggttgtatttttacataaaacttta

SEQ ID NO: 36079 - DNA, 40 bp, Homo sapiens
taaagttttatgtaaaaatacaaccaaaacaatacacaca

SEQ ID NO: 36080 - DNA, 40 bp, Homo sapiens
gtgtgtattgttttggttgtatttttacataaaactttac

SEQ ID NO: 36081 - DNA, 40 bp, Homo sapiens
gtaaagttttatgtaaaaatacaaccaaaacaatacacac

SEQ ID NO: 36082 - DNA, 40 bp, Homo sapiens
tgtgtattgttttggttgtatttttacataaaactttaca

SEQ ID NO: 36083 - DNA, 40 bp, Homo sapiens
tgtaaagttttatgtaaaaatacaaccaaaacaatacaca

SEQ ID NO: 36084 - DNA, 40 bp, Homo sapiens
gtgtattgttttggttgtatttttacataaaactttacat

SEQ ID NO: 36085 - DNA, 40 bp, Homo sapiens
atgtaaagttttatgtaaaaatacaaccaaaacaatacac

SEQ ID NO: 36086 - DNA, 40 bp, Homo sapiens
tgtattgttttggttgtatttttacataaaactttacata

SEQ ID NO: 36087 - DNA, 40 bp, Homo sapiens
tatgtaaagttttatgtaaaaatacaaccaaaacaataca

SEQ ID NO: 36088 - DNA, 40 bp, Homo sapiens
gtattgttttggttgtatttttacataaaactttacatat

SEQ ID NO: 36089 - DNA, 40 bp, Homo sapiens
atatgtaaagttttatgtaaaaatacaaccaaaacaatac

SEQ ID NO: 36090 - DNA, 40 bp, Homo sapiens
tattgttttggttgtatttttacataaaactttacatatt

SEQ ID NO: 36091 - DNA, 40 bp, Homo sapiens
aatatgtaaagttttatgtaaaaatacaaccaaaacaata

SEQ ID NO: 36092 - DNA, 40 bp, Homo sapiens
attgttttggttgtatttttacataaaactttacatatta

SEQ ID NO: 36093 - DNA, 40 bp, Homo sapiens
taatatgtaaagttttatgtaaaaatacaaccaaaacaat

SEQ ID NO: 36094 - DNA, 40 bp, Homo sapiens
ttgttttggttgtatttttacataaaactttacatattat

SEQ ID NO: 36095 - DNA, 40 bp, Homo sapiens
ataatatgtaaagttttatgtaaaaatacaaccaaaacaa

SEQ ID NO: 36096 - DNA, 40 bp, Homo sapiens
tgttttggttgtatttttacataaaactttacatattata

SEQ ID NO: 36097 - DNA, 40 bp, Homo sapiens
tataatatgtaaagttttatgtaaaaatacaaccaaaaca

SEQ ID NO: 36098 - DNA, 40 bp, Homo sapiens
gttttggttgtatttttacataaaactttacatattatat

SEQ ID NO: 36099 - DNA, 40 bp, Homo sapiens
atataatatgtaaagttttatgtaaaaatacaaccaaaac

SEQ ID NO: 36100 - DNA, 40 bp, Homo sapiens
ttttggttgtatttttacataaaactttacatattatata

SEQ ID NO: 36101 - DNA, 40 bp, Homo sapiens
tatataatatgtaaagttttatgtaaaaatacaaccaaaa

SEQ ID NO: 36102 - DNA, 40 bp, Homo sapiens
tttggttgtatttttacataaaactttacatattatataa

SEQ ID NO: 36103 - DNA, 40 bp, Homo sapiens
ttatataatatgtaaagttttatgtaaaaatacaaccaaa

SEQ ID NO: 36104 - DNA, 40 bp, Homo sapiens
ttggttgtatttttacataaaactttacatattatataaa

SEQ ID NO: 36105 - DNA, 40 bp, Homo sapiens
tttatataatatgtaaagttttatgtaaaaatacaaccaa

SEQ ID NO: 36106 - DNA, 40 bp, Homo sapiens
tggttgtatttttacataaaactttacatattatataaaa

SEQ ID NO: 36107 - DNA, 40 bp, Homo sapiens
ttttatataatatgtaaagttttatgtaaaaatacaacca

SEQ ID NO: 36108 - DNA, 40 bp, Homo sapiens
ggttgtatttttacataaaactttacatattatataaaat

SEQ ID NO: 36109 - DNA, 40 bp, Homo sapiens
attttatataatatgtaaagttttatgtaaaaatacaacc

SEQ ID NO: 36110 - DNA, 40 bp, Homo sapiens
gttgtatttttacataaaactttacatattatataaaatt

SEQ ID NO: 36111 - DNA, 40 bp, Homo sapiens
aattttatataatatgtaaagttttatgtaaaaatacaac

SEQ ID NO: 36112 - DNA, 40 bp, Homo sapiens
ttgtatttttacataaaactttacatattatataaaattt

SEQ ID NO: 36113 - DNA, 40 bp, Homo sapiens
aaattttatataatatgtaaagttttatgtaaaaatacaa

SEQ ID NO: 36114 - DNA, 40 bp, Homo sapiens
tgtatttttacataaaactttacatattatataaaattta

SEQ ID NO: 36115 - DNA, 40 bp, Homo sapiens
taaattttatataatatgtaaagttttatgtaaaaataca

SEQ ID NO: 36116 - DNA, 40 bp, Homo sapiens
gtatttttacataaaactttacatattatataaaatttaa

SEQ ID NO: 36117 - DNA, 40 bp, Homo sapiens
ttaaattttatataatatgtaaagttttatgtaaaaatac

SEQ ID NO: 36118 - DNA, 40 bp, Homo sapiens
tatttttacataaaactttacatattatataaaatttaat

SEQ ID NO: 36119 - DNA, 40 bp, Homo sapiens
attaaattttatataatatgtaaagttttatgtaaaaata

SEQ ID NO: 36120 - DNA, 40 bp, Homo sapiens
atttttacataaaactttacatattatataaaatttaatt

SEQ ID NO: 36121 - DNA, 40 bp, Homo sapiens
aattaaattttatataatatgtaaagttttatgtaaaaat

SEQ ID NO: 36122 - DNA, 40 bp, Homo sapiens
tttttacataaaactttacatattatataaaatttaattg

SEQ ID NO: 36123 - DNA, 40 bp, Homo sapiens
caattaaattttatataatatgtaaagttttatgtaaaaa

SEQ ID NO: 36124 - DNA, 40 bp, Homo sapiens
ttttacataaaactttacatattatataaaatttaattga

SEQ ID NO: 36125 - DNA, 40 bp, Homo sapiens
tcaattaaattttatataatatgtaaagttttatgtaaaa

SEQ ID NO: 36126 - DNA, 40 bp, Homo sapiens
tttacataaaactttacatattatataaaatttaattgaa

SEQ ID NO: 36127 - DNA, 40 bp, Homo sapiens
ttcaattaaattttatataatatgtaaagttttatgtaaa

SEQ ID NO: 36128 - DNA, 40 bp, Homo sapiens
ttacataaaactttacatattatataaaatttaattgaag

SEQ ID NO: 36129 - DNA, 40 bp, Homo sapiens
cttcaattaaattttatataatatgtaaagttttatgtaa

SEQ ID NO: 36130 - DNA, 40 bp, Homo sapiens
tacataaaactttacatattatataaaatttaattgaagg

SEQ ID NO: 36131 - DNA, 40 bp, Homo sapiens
ccttcaattaaattttatataatatgtaaagttttatgta

SEQ ID NO: 36132 - DNA, 40 bp, Homo sapiens
acataaaactttacatattatataaaatttaattgaaggt

SEQ ID NO: 36133 - DNA, 40 bp, Homo sapiens
accttcaattaaattttatataatatgtaaagttttatgt

SEQ ID NO: 36134 - DNA, 40 bp, Homo sapiens
cataaaactttacatattatataaaatttaattgaaggta

SEQ ID NO: 36135 - DNA, 40 bp, Homo sapiens
taccttcaattaaattttatataatatgtaaagttttatg

SEQ ID NO: 36136 - DNA, 40 bp, Homo sapiens
ataaaactttacatattatataaaatttaattgaaggtaa

SEQ ID NO: 36137 - DNA, 40 bp, Homo sapiens
ttaccttcaattaaattttatataatatgtaaagttttat

SEQ ID NO: 36138 - DNA, 40 bp, Homo sapiens
taaaactttacatattatataaaatttaattgaaggtaaa

SEQ ID NO: 36139 - DNA, 40 bp, Homo sapiens
tttaccttcaattaaattttatataatatgtaaagtttta

SEQ ID NO: 36140 - DNA, 40 bp, Homo sapiens
aaaactttacatattatataaaatttaattgaaggtaaaa

SEQ ID NO: 36141 - DNA, 40 bp, Homo sapiens
ttttaccttcaattaaattttatataatatgtaaagtttt

SEQ ID NO: 36142 - DNA, 40 bp, Homo sapiens
aaactttacatattatataaaatttaattgaaggtaaaat

SEQ ID NO: 36143 - DNA, 40 bp, Homo sapiens
attttaccttcaattaaattttatataatatgtaaagttt

SEQ ID NO: 36144 - DNA, 40 bp, Homo sapiens
aactttacatattatataaaatttaattgaaggtaaaatt

SEQ ID NO: 36145 - DNA, 40 bp, Homo sapiens
aattttaccttcaattaaattttatataatatgtaaagtt

SEQ ID NO: 36146 - DNA, 40 bp, Homo sapiens
actttacatattatataaaatttaattgaaggtaaaattt

SEQ ID NO: 36147 - DNA, 40 bp, Homo sapiens
aaattttaccttcaattaaattttatataatatgtaaagt

SEQ ID NO: 36148 - DNA, 40 bp, Homo sapiens
ctttacatattatataaaatttaattgaaggtaaaattta

SEQ ID NO: 36149 - DNA, 40 bp, Homo sapiens
taaattttaccttcaattaaattttatataatatgtaaag

SEQ ID NO: 36150 - DNA, 40 bp, Homo sapiens
tttacatattatataaaatttaattgaaggtaaaatttat

SEQ ID NO: 36151 - DNA, 40 bp, Homo sapiens
ataaattttaccttcaattaaattttatataatatgtaaa

SEQ ID NO: 36152 - DNA, 40 bp, Homo sapiens
ttacatattatataaaatttaattgaaggtaaaatttatt

SEQ ID NO: 36153 - DNA, 40 bp, Homo sapiens
aataaattttaccttcaattaaattttatataatatgtaa

SEQ ID NO: 36154 - DNA, 40 bp, Homo sapiens
tacatattatataaaatttaattgaaggtaaaatttatta

SEQ ID NO: 36155 - DNA, 40 bp, Homo sapiens
taataaattttaccttcaattaaattttatataatatgta

SEQ ID NO: 36156 - DNA, 40 bp, Homo sapiens
acatattatataaaatttaattgaaggtaaaatttattaa

SEQ ID NO: 36157 - DNA, 40 bp, Homo sapiens
ttaataaattttaccttcaattaaattttatataatatgt

SEQ ID NO: 36158 - DNA, 40 bp, Homo sapiens
catattatataaaatttaattgaaggtaaaatttattaaa

SEQ ID NO: 36159 - DNA, 40 bp, Homo sapiens
tttaataaattttaccttcaattaaattttatataatatg

SEQ ID NO: 36160 - DNA, 40 bp, Homo sapiens
atattatataaaatttaattgaaggtaaaatttattaaat

SEQ ID NO: 36161 - DNA, 40 bp, Homo sapiens
atttaataaattttaccttcaattaaattttatataatat

SEQ ID NO: 36162 - DNA, 40 bp, Homo sapiens
tattatataaaatttaattgaaggtaaaatttattaaatt

SEQ ID NO: 36163 - DNA, 40 bp, Homo sapiens
aatttaataaattttaccttcaattaaattttatataata

SEQ ID NO: 36164 - DNA, 40 bp, Homo sapiens
attatataaaatttaattgaaggtaaaatttattaaatta

SEQ ID NO: 36165 - DNA, 40 bp, Homo sapiens
taatttaataaattttaccttcaattaaattttatataat

SEQ ID NO: 36166 - DNA, 40 bp, Homo sapiens
ttatataaaatttaattgaaggtaaaatttattaaattat

SEQ ID NO: 36167 - DNA, 40 bp, Homo sapiens
ataatttaataaattttaccttcaattaaattttatataa

SEQ ID NO: 36168 - DNA, 40 bp, Homo sapiens
tatataaaatttaattgaaggtaaaatttattaaattatt

SEQ ID NO: 36169 - DNA, 40 bp, Homo sapiens
aataatttaataaattttaccttcaattaaattttatata

SEQ ID NO: 36170 - DNA, 40 bp, Homo sapiens
atataaaatttaattgaaggtaaaatttattaaattattc

SEQ ID NO: 36171 - DNA, 40 bp, Homo sapiens
gaataatttaataaattttaccttcaattaaattttatat

SEQ ID NO: 36172 - DNA, 40 bp, Homo sapiens
tataaaatttaattgaaggtaaaatttattaaattattct

SEQ ID NO: 36173 - DNA, 40 bp, Homo sapiens
agaataatttaataaattttaccttcaattaaattttata

SEQ ID NO: 36174 - DNA, 40 bp, Homo sapiens
ataaaatttaattgaaggtaaaatttattaaattattctt

SEQ ID NO: 36175 - DNA, 40 bp, Homo sapiens
aagaataatttaataaattttaccttcaattaaattttat

SEQ ID NO: 36176 - DNA, 40 bp, Homo sapiens
taaaatttaattgaaggtaaaatttattaaattattctta

SEQ ID NO: 36177 - DNA, 40 bp, Homo sapiens
taagaataatttaataaattttaccttcaattaaatttta

SEQ ID NO: 36178 - DNA, 40 bp, Homo sapiens
aaaatttaattgaaggtaaaatttattaaattattcttaa

SEQ ID NO: 36179 - DNA, 40 bp, Homo sapiens
ttaagaataatttaataaattttaccttcaattaaatttt

SEQ ID NO: 36180 - DNA, 40 bp, Homo sapiens
aaatttaattgaaggtaaaatttattaaattattcttaat

SEQ ID NO: 36181 - DNA, 40 bp, Homo sapiens
attaagaataatttaataaattttaccttcaattaaattt

SEQ ID NO: 36182 - DNA, 40 bp, Homo sapiens
aatttaattgaaggtaaaatttattaaattattcttaata

SEQ ID NO: 36183 - DNA, 40 bp, Homo sapiens
tattaagaataatttaataaattttaccttcaattaaatt

SEQ ID NO: 36184 - DNA, 40 bp, Homo sapiens
atttaattgaaggtaaaatttattaaattattcttaatat

SEQ ID NO: 36185 - DNA, 40 bp, Homo sapiens
atattaagaataatttaataaattttaccttcaattaaat

SEQ ID NO: 36186 - DNA, 40 bp, Homo sapiens
tttaattgaaggtaaaatttattaaattattcttaatata

SEQ ID NO: 36187 - DNA, 40 bp, Homo sapiens
tatattaagaataatttaataaattttaccttcaattaaa

SEQ ID NO: 36188 - DNA, 40 bp, Homo sapiens
ttaattgaaggtaaaatttattaaattattcttaatatat

SEQ ID NO: 36189 - DNA, 40 bp, Homo sapiens
atatattaagaataatttaataaattttaccttcaattaa

SEQ ID NO: 36190 - DNA, 40 bp, Homo sapiens
taattgaaggtaaaatttattaaattattcttaatatata

SEQ ID NO: 36191 - DNA, 40 bp, Homo sapiens
tatatattaagaataatttaataaattttaccttcaatta

SEQ ID NO: 36192 - DNA, 40 bp, Homo sapiens
aattgaaggtaaaatttattaaattattcttaatatatat

SEQ ID NO: 36193 - DNA, 40 bp, Homo sapiens
atatatattaagaataatttaataaattttaccttcaatt

SEQ ID NO: 36194 - DNA, 40 bp, Homo sapiens
attgaaggtaaaatttattaaattattcttaatatatatt

SEQ ID NO: 36195 - DNA, 40 bp, Homo sapiens
aatatatattaagaataatttaataaattttaccttcaat

SEQ ID NO: 36196 - DNA, 40 bp, Homo sapiens
ttgaaggtaaaatttattaaattattcttaatatatattg

SEQ ID NO: 36197 - DNA, 40 bp, Homo sapiens
caatatatattaagaataatttaataaattttaccttcaa

SEQ ID NO: 36198 - DNA, 40 bp, Homo sapiens
tgaaggtaaaatttattaaattattcttaatatatattgt

SEQ ID NO: 36199 - DNA, 40 bp, Homo sapiens
acaatatatattaagaataatttaataaattttaccttca

SEQ ID NO: 36200 - DNA, 40 bp, Homo sapiens
gaaggtaaaatttattaaattattcttaatatatattgta

SEQ ID NO: 36201 - DNA, 40 bp, Homo sapiens
tacaatatatattaagaataatttaataaattttaccttc

SEQ ID NO: 36202 - DNA, 40 bp, Homo sapiens
aaggtaaaatttattaaattattcttaatatatattgtaa

SEQ ID NO: 36203 - DNA, 40 bp, Homo sapiens
ttacaatatatattaagaataatttaataaattttacctt

SEQ ID NO: 36204 - DNA, 40 bp, Homo sapiens
aggtaaaatttattaaattattcttaatatatattgtaat

SEQ ID NO: 36205 - DNA, 40 bp, Homo sapiens
attacaatatatattaagaataatttaataaattttacct

SEQ ID NO: 36206 - DNA, 40 bp, Homo sapiens
ggtaaaatttattaaattattcttaatatatattgtaatt

SEQ ID NO: 36207 - DNA, 40 bp, Homo sapiens
aattacaatatatattaagaataatttaataaattttacc

SEQ ID NO: 36208 - DNA, 40 bp, Homo sapiens
gtaaaatttattaaattattcttaatatatattgtaattt

SEQ ID NO: 36209 - DNA, 40 bp, Homo sapiens
aaattacaatatatattaagaataatttaataaattttac

SEQ ID NO: 36210 - DNA, 40 bp, Homo sapiens
taaaatttattaaattattcttaatatatattgtaattta

SEQ ID NO: 36211 - DNA, 40 bp, Homo sapiens
taaattacaatatatattaagaataatttaataaatttta

SEQ ID NO: 36212 - DNA, 40 bp, Homo sapiens
aaaatttattaaattattcttaatatatattgtaatttaa

SEQ ID NO: 36213 - DNA, 40 bp, Homo sapiens
ttaaattacaatatatattaagaataatttaataaatttt

SEQ ID NO: 36214 - DNA, 40 bp, Homo sapiens
aaatttattaaattattcttaatatatattgtaatttaaa

SEQ ID NO: 36215 - DNA, 40 bp, Homo sapiens
tttaaattacaatatatattaagaataatttaataaattt

SEQ ID NO: 36216 - DNA, 40 bp, Homo sapiens
aatttattaaattattcttaatatatattgtaatttaaaa

SEQ ID NO: 36217 - DNA, 40 bp, Homo sapiens
ttttaaattacaatatatattaagaataatttaataaatt

SEQ ID NO: 36218 - DNA, 40 bp, Homo sapiens
atttattaaattattcttaatatatattgtaatttaaaaa

SEQ ID NO: 36219 - DNA, 40 bp, Homo sapiens
tttttaaattacaatatatattaagaataatttaataaat

SEQ ID NO: 36220 - DNA, 40 bp, Homo sapiens
tttattaaattattcttaatatatattgtaatttaaaaat

SEQ ID NO: 36221 - DNA, 40 bp, Homo sapiens
atttttaaattacaatatatattaagaataatttaataaa

SEQ ID NO: 36222 - DNA, 40 bp, Homo sapiens
ttattaaattattcttaatatatattgtaatttaaaaatt

SEQ ID NO: 36223 - DNA, 40 bp, Homo sapiens
aatttttaaattacaatatatattaagaataatttaataa

SEQ ID NO: 36224 - DNA, 40 bp, Homo sapiens
tattaaattattcttaatatatattgtaatttaaaaatta

SEQ ID NO: 36225 - DNA, 40 bp, Homo sapiens
taatttttaaattacaatatatattaagaataatttaata

SEQ ID NO: 36226 - DNA, 40 bp, Homo sapiens
attaaattattcttaatatatattgtaatttaaaaattaa

SEQ ID NO: 36227 - DNA, 40 bp, Homo sapiens
ttaatttttaaattacaatatatattaagaataatttaat

SEQ ID NO: 36228 - DNA, 40 bp, Homo sapiens
ttaaattattcttaatatatattgtaatttaaaaattaac

SEQ ID NO: 36229 - DNA, 40 bp, Homo sapiens
gttaatttttaaattacaatatatattaagaataatttaa

SEQ ID NO: 36230 - DNA, 40 bp, Homo sapiens
taaattattcttaatatatattgtaatttaaaaattaaca

SEQ ID NO: 36231 - DNA, 40 bp, Homo sapiens
tgttaatttttaaattacaatatatattaagaataattta

SEQ ID NO: 36232 - DNA, 40 bp, Homo sapiens
aaattattcttaatatatattgtaatttaaaaattaacag

SEQ ID NO: 36233 - DNA, 40 bp, Homo sapiens
ctgttaatttttaaattacaatatatattaagaataattt

SEQ ID NO: 36234 - DNA, 40 bp, Homo sapiens
aattattcttaatatatattgtaatttaaaaattaacagc

SEQ ID NO: 36235 - DNA, 40 bp, Homo sapiens
gctgttaatttttaaattacaatatatattaagaataatt

SEQ ID NO: 36236 - DNA, 40 bp, Homo sapiens
attattcttaatatatattgtaatttaaaaattaacagct

SEQ ID NO: 36237 - DNA, 40 bp, Homo sapiens
agctgttaatttttaaattacaatatatattaagaataat

SEQ ID NO: 36238 - DNA, 40 bp, Homo sapiens
ttattcttaatatatattgtaatttaaaaattaacagctt

SEQ ID NO: 36239 - DNA, 40 bp, Homo sapiens
aagctgttaatttttaaattacaatatatattaagaataa

SEQ ID NO: 36240 - DNA, 40 bp, Homo sapiens
tattcttaatatatattgtaatttaaaaattaacagcttc

SEQ ID NO: 36241 - DNA, 40 bp, Homo sapiens
gaagctgttaatttttaaattacaatatatattaagaata

SEQ ID NO: 36242 - DNA, 40 bp, Homo sapiens
attcttaatatatattgtaatttaaaaattaacagcttca

SEQ ID NO: 36243 - DNA, 40 bp, Homo sapiens
tgaagctgttaatttttaaattacaatatatattaagaat

SEQ ID NO: 36244 - DNA, 40 bp, Homo sapiens
ttcttaatatatattgtaatttaaaaattaacagcttcat

SEQ ID NO: 36245 - DNA, 40 bp, Homo sapiens
atgaagctgttaatttttaaattacaatatatattaagaa

SEQ ID NO: 36246 - DNA, 40 bp, Homo sapiens
tcttaatatatattgtaatttaaaaattaacagcttcatt

SEQ ID NO: 36247 - DNA, 40 bp, Homo sapiens
aatgaagctgttaatttttaaattacaatatatattaaga

SEQ ID NO: 36248 - DNA, 40 bp, Homo sapiens
cttaatatatattgtaatttaaaaattaacagcttcattg

SEQ ID NO: 36249 - DNA, 40 bp, Homo sapiens
caatgaagctgttaatttttaaattacaatatatattaag

SEQ ID NO: 36250 - DNA, 40 bp, Homo sapiens
ttaatatatattgtaatttaaaaattaacagcttcattgt

SEQ ID NO: 36251 - DNA, 40 bp, Homo sapiens
acaatgaagctgttaatttttaaattacaatatatattaa

SEQ ID NO: 36252 - DNA, 40 bp, Homo sapiens
taatatatattgtaatttaaaaattaacagcttcattgtc

SEQ ID NO: 36253 - DNA, 40 bp, Homo sapiens
gacaatgaagctgttaatttttaaattacaatatatatta

SEQ ID NO: 36254 - DNA, 40 bp, Homo sapiens
aatatatattgtaatttaaaaattaacagcttcattgtct

SEQ ID NO: 36255 - DNA, 40 bp, Homo sapiens
agacaatgaagctgttaatttttaaattacaatatatatt

SEQ ID NO: 36256 - DNA, 40 bp, Homo sapiens
atatatattgtaatttaaaaattaacagcttcattgtctt

SEQ ID NO: 36257 - DNA, 40 bp, Homo sapiens
aagacaatgaagctgttaatttttaaattacaatatatat

SEQ ID NO: 36258 - DNA, 40 bp, Homo sapiens
tatatattgtaatttaaaaattaacagcttcattgtcttg

SEQ ID NO: 36259 - DNA, 40 bp, Homo sapiens
caagacaatgaagctgttaatttttaaattacaatatata

SEQ ID NO: 36260 - DNA, 40 bp, Homo sapiens
atatattgtaatttaaaaattaacagcttcattgtcttga

SEQ ID NO: 36261 - DNA, 40 bp, Homo sapiens
tcaagacaatgaagctgttaatttttaaattacaatatat

SEQ ID NO: 36262 - DNA, 40 bp, Homo sapiens
tatattgtaatttaaaaattaacagcttcattgtcttgat

SEQ ID NO: 36263 - DNA, 40 bp, Homo sapiens
atcaagacaatgaagctgttaatttttaaattacaatata

SEQ ID NO: 36264 - DNA, 40 bp, Homo sapiens
atattgtaatttaaaaattaacagcttcattgtcttgata

SEQ ID NO: 36265 - DNA, 40 bp, Homo sapiens
tatcaagacaatgaagctgttaatttttaaattacaatat

SEQ ID NO: 36266 - DNA, 40 bp, Homo sapiens
tattgtaatttaaaaattaacagcttcattgtcttgataa

SEQ ID NO: 36267 - DNA, 40 bp, Homo sapiens
ttatcaagacaatgaagctgttaatttttaaattacaata

SEQ ID NO: 36268 - DNA, 40 bp, Homo sapiens
attgtaatttaaaaattaacagcttcattgtcttgataaa

SEQ ID NO: 36269 - DNA, 40 bp, Homo sapiens
tttatcaagacaatgaagctgttaatttttaaattacaat

SEQ ID NO: 36270 - DNA, 40 bp, Homo sapiens
ttgtaatttaaaaattaacagcttcattgtcttgataaaa

SEQ ID NO: 36271 - DNA, 40 bp, Homo sapiens
ttttatcaagacaatgaagctgttaatttttaaattacaa

SEQ ID NO: 36272 - DNA, 40 bp, Homo sapiens
tgtaatttaaaaattaacagcttcattgtcttgataaaat

SEQ ID NO: 36273 - DNA, 40 bp, Homo sapiens
attttatcaagacaatgaagctgttaatttttaaattaca

SEQ ID NO: 36274 - DNA, 40 bp, Homo sapiens
gtaatttaaaaattaacagcttcattgtcttgataaaatt

SEQ ID NO: 36275 - DNA, 40 bp, Homo sapiens
aattttatcaagacaatgaagctgttaatttttaaattac

SEQ ID NO: 36276 - DNA, 40 bp, Homo sapiens
taatttaaaaattaacagcttcattgtcttgataaaattt

SEQ ID NO: 36277 - DNA, 40 bp, Homo sapiens
aaattttatcaagacaatgaagctgttaatttttaaatta

SEQ ID NO: 36278 - DNA, 40 bp, Homo sapiens
aatttaaaaattaacagcttcattgtcttgataaaattta

SEQ ID NO: 36279 - DNA, 40 bp, Homo sapiens
taaattttatcaagacaatgaagctgttaatttttaaatt

SEQ ID NO: 36280 - DNA, 40 bp, Homo sapiens
atttaaaaattaacagcttcattgtcttgataaaatttat

SEQ ID NO: 36281 - DNA, 40 bp, Homo sapiens
ataaattttatcaagacaatgaagctgttaatttttaaat

SEQ ID NO: 36282 - DNA, 40 bp, Homo sapiens
tttaaaaattaacagcttcattgtcttgataaaatttatg

SEQ ID NO: 36283 - DNA, 40 bp, Homo sapiens
cataaattttatcaagacaatgaagctgttaatttttaaa

SEQ ID NO: 36284 - DNA, 40 bp, Homo sapiens
ttaaaaattaacagcttcattgtcttgataaaatttatgg

SEQ ID NO: 36285 - DNA, 40 bp, Homo sapiens
ccataaattttatcaagacaatgaagctgttaatttttaa

SEQ ID NO: 36286 - DNA, 40 bp, Homo sapiens
taaaaattaacagcttcattgtcttgataaaatttatggt

SEQ ID NO: 36287 - DNA, 40 bp, Homo sapiens
accataaattttatcaagacaatgaagctgttaattttta

SEQ ID NO: 36288 - DNA, 40 bp, Homo sapiens
aaaaattaacagcttcattgtcttgataaaatttatggta

SEQ ID NO: 36289 - DNA, 40 bp, Homo sapiens
taccataaattttatcaagacaatgaagctgttaattttt

SEQ ID NO: 36290 - DNA, 40 bp, Homo sapiens
aaaattaacagcttcattgtcttgataaaatttatggtat

SEQ ID NO: 36291 - DNA, 40 bp, Homo sapiens
ataccataaattttatcaagacaatgaagctgttaatttt

SEQ ID NO: 36292 - DNA, 40 bp, Homo sapiens
aaattaacagcttcattgtcttgataaaatttatggtatc

SEQ ID NO: 36293 - DNA, 40 bp, Homo sapiens
gataccataaattttatcaagacaatgaagctgttaattt

SEQ ID NO: 36294 - DNA, 40 bp, Homo sapiens
aattaacagcttcattgtcttgataaaatttatggtatct

SEQ ID NO: 36295 - DNA, 40 bp, Homo sapiens
agataccataaattttatcaagacaatgaagctgttaatt

SEQ ID NO: 36296 - DNA, 40 bp, Homo sapiens
attaacagcttcattgtcttgataaaatttatggtatctt

SEQ ID NO: 36297 - DNA, 40 bp, Homo sapiens
aagataccataaattttatcaagacaatgaagctgttaat

SEQ ID NO: 36298 - DNA, 40 bp, Homo sapiens
ttaacagcttcattgtcttgataaaatttatggtatctta

SEQ ID NO: 36299 - DNA, 40 bp, Homo sapiens
taagataccataaattttatcaagacaatgaagctgttaa

SEQ ID NO: 36300 - DNA, 40 bp, Homo sapiens
taacagcttcattgtcttgataaaatttatggtatcttaa

SEQ ID NO: 36301 - DNA, 40 bp, Homo sapiens
ttaagataccataaattttatcaagacaatgaagctgtta

SEQ ID NO: 36302 - DNA, 40 bp, Homo sapiens
aacagcttcattgtcttgataaaatttatggtatcttaaa

SEQ ID NO: 36303 - DNA, 40 bp, Homo sapiens
tttaagataccataaattttatcaagacaatgaagctgtt

SEQ ID NO: 36304 - DNA, 40 bp, Homo sapiens
acagcttcattgtcttgataaaatttatggtatcttaaac

SEQ ID NO: 36305 - DNA, 40 bp, Homo sapiens
gtttaagataccataaattttatcaagacaatgaagctgt

SEQ ID NO: 36306 - DNA, 40 bp, Homo sapiens
cagcttcattgtcttgataaaatttatggtatcttaaaca

SEQ ID NO: 36307 - DNA, 40 bp, Homo sapiens
tgtttaagataccataaattttatcaagacaatgaagctg

SEQ ID NO: 36308 - DNA, 40 bp, Homo sapiens
agcttcattgtcttgataaaatttatggtatcttaaacat

SEQ ID NO: 36309 - DNA, 40 bp, Homo sapiens
atgtttaagataccataaattttatcaagacaatgaagct

SEQ ID NO: 36310 - DNA, 40 bp, Homo sapiens
gcttcattgtcttgataaaatttatggtatcttaaacatg

SEQ ID NO: 36311 - DNA, 40 bp, Homo sapiens
catgtttaagataccataaattttatcaagacaatgaagc

SEQ ID NO: 36312 - DNA, 40 bp, Homo sapiens
cttcattgtcttgataaaatttatggtatcttaaacatgt

SEQ ID NO: 36313 - DNA, 40 bp, Homo sapiens
acatgtttaagataccataaattttatcaagacaatgaag

SEQ ID NO: 36314 - DNA, 40 bp, Homo sapiens
ttcattgtcttgataaaatttatggtatcttaaacatgtg

SEQ ID NO: 36315 - DNA, 40 bp, Homo sapiens
cacatgtttaagataccataaattttatcaagacaatgaa

SEQ ID NO: 36316 - DNA, 40 bp, Homo sapiens
tcattgtcttgataaaatttatggtatcttaaacatgtgc

SEQ ID NO: 36317 - DNA, 40 bp, Homo sapiens
gcacatgtttaagataccataaattttatcaagacaatga

SEQ ID NO: 36318 - DNA, 40 bp, Homo sapiens
cattgtcttgataaaatttatggtatcttaaacatgtgct

SEQ ID NO: 36319 - DNA, 40 bp, Homo sapiens
agcacatgtttaagataccataaattttatcaagacaatg

SEQ ID NO: 36320 - DNA, 40 bp, Homo sapiens
attgtcttgataaaatttatggtatcttaaacatgtgctt

SEQ ID NO: 36321 - DNA, 40 bp, Homo sapiens
aagcacatgtttaagataccataaattttatcaagacaat

SEQ ID NO: 36322 - DNA, 40 bp, Homo sapiens
ttgtcttgataaaatttatggtatcttaaacatgtgcttg

SEQ ID NO: 36323 - DNA, 40 bp, Homo sapiens
caagcacatgtttaagataccataaattttatcaagacaa

SEQ ID NO: 36324 - DNA, 40 bp, Homo sapiens
tgtcttgataaaatttatggtatcttaaacatgtgcttgt

SEQ ID NO: 36325 - DNA, 40 bp, Homo sapiens
acaagcacatgtttaagataccataaattttatcaagaca

SEQ ID NO: 36326 - DNA, 40 bp, Homo sapiens
gtcttgataaaatttatggtatcttaaacatgtgcttgtt

SEQ ID NO: 36327 - DNA, 40 bp, Homo sapiens
aacaagcacatgtttaagataccataaattttatcaagac

SEQ ID NO: 36328 - DNA, 40 bp, Homo sapiens
tcttgataaaatttatggtatcttaaacatgtgcttgttt

SEQ ID NO: 36329 - DNA, 40 bp, Homo sapiens
aaacaagcacatgtttaagataccataaattttatcaaga

SEQ ID NO: 36330 - DNA, 40 bp, Homo sapiens
cttgataaaatttatggtatcttaaacatgtgcttgtttt

SEQ ID NO: 36331 - DNA, 40 bp, Homo sapiens
aaaacaagcacatgtttaagataccataaattttatcaag

SEQ ID NO: 36332 - DNA, 40 bp, Homo sapiens
ttgataaaatttatggtatcttaaacatgtgcttgttttt

SEQ ID NO: 36333 - DNA, 40 bp, Homo sapiens
aaaaacaagcacatgtttaagataccataaattttatcaa

SEQ ID NO: 36334 - DNA, 40 bp, Homo sapiens
tgataaaatttatggtatcttaaacatgtgcttgtttttc

SEQ ID NO: 36335 - DNA, 40 bp, Homo sapiens
gaaaaacaagcacatgtttaagataccataaattttatca

SEQ ID NO: 36336 - DNA, 40 bp, Homo sapiens
gataaaatttatggtatcttaaacatgtgcttgtttttct

SEQ ID NO: 36337 - DNA, 40 bp, Homo sapiens
agaaaaacaagcacatgtttaagataccataaattttatc

SEQ ID NO: 36338 - DNA, 40 bp, Homo sapiens
ataaaatttatggtatcttaaacatgtgcttgtttttcta

SEQ ID NO: 36339 - DNA, 40 bp, Homo sapiens
tagaaaaacaagcacatgtttaagataccataaattttat

SEQ ID NO: 36340 - DNA, 40 bp, Homo sapiens
taaaatttatggtatcttaaacatgtgcttgtttttctaa

SEQ ID NO: 36341 - DNA, 40 bp, Homo sapiens
ttagaaaaacaagcacatgtttaagataccataaatttta

SEQ ID NO: 36342 - DNA, 40 bp, Homo sapiens
aaaatttatggtatcttaaacatgtgcttgtttttctaag

SEQ ID NO: 36343 - DNA, 40 bp, Homo sapiens
cttagaaaaacaagcacatgtttaagataccataaatttt

SEQ ID NO: 36344 - DNA, 40 bp, Homo sapiens
aaatttatggtatcttaaacatgtgcttgtttttctaaga

SEQ ID NO: 36345 - DNA, 40 bp, Homo sapiens
tcttagaaaaacaagcacatgtttaagataccataaattt

SEQ ID NO: 36346 - DNA, 40 bp, Homo sapiens
aatttatggtatcttaaacatgtgcttgtttttctaagag

SEQ ID NO: 36347 - DNA, 40 bp, Homo sapiens
ctcttagaaaaacaagcacatgtttaagataccataaatt

SEQ ID NO: 36348 - DNA, 40 bp, Homo sapiens
atttatggtatcttaaacatgtgcttgtttttctaagaga

SEQ ID NO: 36349 - DNA, 40 bp, Homo sapiens
tctcttagaaaaacaagcacatgtttaagataccataaat

SEQ ID NO: 36350 - DNA, 40 bp, Homo sapiens
tttatggtatcttaaacatgtgcttgtttttctaagagaa

SEQ ID NO: 36351 - DNA, 40 bp, Homo sapiens
ttctcttagaaaaacaagcacatgtttaagataccataaa

SEQ ID NO: 36352 - DNA, 40 bp, Homo sapiens
ttatggtatcttaaacatgtgcttgtttttctaagagaac

SEQ ID NO: 36353 - DNA, 40 bp, Homo sapiens
gttctcttagaaaaacaagcacatgtttaagataccataa

SEQ ID NO: 36354 - DNA, 40 bp, Homo sapiens
tatggtatcttaaacatgtgcttgtttttctaagagaaca

SEQ ID NO: 36355 - DNA, 40 bp, Homo sapiens
tgttctcttagaaaaacaagcacatgtttaagataccata

SEQ ID NO: 36356 - DNA, 40 bp, Homo sapiens
atggtatcttaaacatgtgcttgtttttctaagagaacat

SEQ ID NO: 36357 - DNA, 40 bp, Homo sapiens
atgttctcttagaaaaacaagcacatgtttaagataccat

SEQ ID NO: 36358 - DNA, 40 bp, Homo sapiens
tggtatcttaaacatgtgcttgtttttctaagagaacatt

SEQ ID NO: 36359 - DNA, 40 bp, Homo sapiens
aatgttctcttagaaaaacaagcacatgtttaagatacca

SEQ ID NO: 36360 - DNA, 40 bp, Homo sapiens
ggtatcttaaacatgtgcttgtttttctaagagaacattg

SEQ ID NO: 36361 - DNA, 40 bp, Homo sapiens
caatgttctcttagaaaaacaagcacatgtttaagatacc

SEQ ID NO: 36362 - DNA, 40 bp, Homo sapiens
gtatcttaaacatgtgcttgtttttctaagagaacattga

SEQ ID NO: 36363 - DNA, 40 bp, Homo sapiens
tcaatgttctcttagaaaaacaagcacatgtttaagatac

SEQ ID NO: 36364 - DNA, 40 bp, Homo sapiens
tatcttaaacatgtgcttgtttttctaagagaacattgaa

SEQ ID NO: 36365 - DNA, 40 bp, Homo sapiens
ttcaatgttctcttagaaaaacaagcacatgtttaagata

SEQ ID NO: 36366 - DNA, 40 bp, Homo sapiens
atcttaaacatgtgcttgtttttctaagagaacattgaaa

SEQ ID NO: 36367 - DNA, 40 bp, Homo sapiens
tttcaatgttctcttagaaaaacaagcacatgtttaagat

SEQ ID NO: 36368 - DNA, 40 bp, Homo sapiens
tcttaaacatgtgcttgtttttctaagagaacattgaaac

SEQ ID NO: 36369 - DNA, 40 bp, Homo sapiens
gtttcaatgttctcttagaaaaacaagcacatgtttaaga

SEQ ID NO: 36370 - DNA, 40 bp, Homo sapiens
cttaaacatgtgcttgtttttctaagagaacattgaaaca

SEQ ID NO: 36371 - DNA, 40 bp, Homo sapiens
tgtttcaatgttctcttagaaaaacaagcacatgtttaag

SEQ ID NO: 36372 - DNA, 40 bp, Homo sapiens
ttaaacatgtgcttgtttttctaagagaacattgaaacat

SEQ ID NO: 36373 - DNA, 40 bp, Homo sapiens
atgtttcaatgttctcttagaaaaacaagcacatgtttaa

SEQ ID NO: 36374 - DNA, 40 bp, Homo sapiens
taaacatgtgcttgtttttctaagagaacattgaaacata

SEQ ID NO: 36375 - DNA, 40 bp, Homo sapiens
tatgtttcaatgttctcttagaaaaacaagcacatgttta

SEQ ID NO: 36376 - DNA, 40 bp, Homo sapiens
aaacatgtgcttgtttttctaagagaacattgaaacatag

SEQ ID NO: 36377 - DNA, 40 bp, Homo sapiens
ctatgtttcaatgttctcttagaaaaacaagcacatgttt

SEQ ID NO: 36378 - DNA, 40 bp, Homo sapiens
aacatgtgcttgtttttctaagagaacattgaaacataga

SEQ ID NO: 36379 - DNA, 40 bp, Homo sapiens
tctatgtttcaatgttctcttagaaaaacaagcacatgtt

SEQ ID NO: 36380 - DNA, 40 bp, Homo sapiens
acatgtgcttgtttttctaagagaacattgaaacatagat

SEQ ID NO: 36381 - DNA, 40 bp, Homo sapiens
atctatgtttcaatgttctcttagaaaaacaagcacatgt

SEQ ID NO: 36382 - DNA, 40 bp, Homo sapiens
catgtgcttgtttttctaagagaacattgaaacatagatt

SEQ ID NO: 36383 - DNA, 40 bp, Homo sapiens
aatctatgtttcaatgttctcttagaaaaacaagcacatg

SEQ ID NO: 36384 - DNA, 40 bp, Homo sapiens
atgtgcttgtttttctaagagaacattgaaacatagattt

SEQ ID NO: 36385 - DNA, 40 bp, Homo sapiens
aaatctatgtttcaatgttctcttagaaaaacaagcacat

SEQ ID NO: 36386 - DNA, 40 bp, Homo sapiens
tgtgcttgtttttctaagagaacattgaaacatagatttt

SEQ ID NO: 36387 - DNA, 40 bp, Homo sapiens
aaaatctatgtttcaatgttctcttagaaaaacaagcaca

SEQ ID NO: 36388 - DNA, 40 bp, Homo sapiens
gtgcttgtttttctaagagaacattgaaacatagatttta

SEQ ID NO: 36389 - DNA, 40 bp, Homo sapiens
taaaatctatgtttcaatgttctcttagaaaaacaagcac

SEQ ID NO: 36390 - DNA, 40 bp, Homo sapiens
tgcttgtttttctaagagaacattgaaacatagattttaa

SEQ ID NO: 36391 - DNA, 40 bp, Homo sapiens
ttaaaatctatgtttcaatgttctcttagaaaaacaagca

SEQ ID NO: 36392 - DNA, 40 bp, Homo sapiens
gcttgtttttctaagagaacattgaaacatagattttaaa

SEQ ID NO: 36393 - DNA, 40 bp, Homo sapiens
tttaaaatctatgtttcaatgttctcttagaaaaacaagc

SEQ ID NO: 36394 - DNA, 40 bp, Homo sapiens
cttgtttttctaagagaacattgaaacatagattttaaaa

SEQ ID NO: 36395 - DNA, 40 bp, Homo sapiens
ttttaaaatctatgtttcaatgttctcttagaaaaacaag

SEQ ID NO: 36396 - DNA, 40 bp, Homo sapiens
ttgtttttctaagagaacattgaaacatagattttaaaac

SEQ ID NO: 36397 - DNA, 40 bp, Homo sapiens
gttttaaaatctatgtttcaatgttctcttagaaaaacaa

SEQ ID NO: 36398 - DNA, 40 bp, Homo sapiens
tgtttttctaagagaacattgaaacatagattttaaaaca

SEQ ID NO: 36399 - DNA, 40 bp, Homo sapiens
tgttttaaaatctatgtttcaatgttctcttagaaaaaca

SEQ ID NO: 36400 - DNA, 40 bp, Homo sapiens
gtttttctaagagaacattgaaacatagattttaaaacaa

SEQ ID NO: 36401 - DNA, 40 bp, Homo sapiens
ttgttttaaaatctatgtttcaatgttctcttagaaaaac

SEQ ID NO: 36402 - DNA, 40 bp, Homo sapiens
tttttctaagagaacattgaaacatagattttaaaacaaa

SEQ ID NO: 36403 - DNA, 40 bp, Homo sapiens
tttgttttaaaatctatgtttcaatgttctcttagaaaaa

SEQ ID NO: 36404 - DNA, 40 bp, Homo sapiens
ttttctaagagaacattgaaacatagattttaaaacaaat

SEQ ID NO: 36405 - DNA, 40 bp, Homo sapiens
atttgttttaaaatctatgtttcaatgttctcttagaaaa

SEQ ID NO: 36406 - DNA, 40 bp, Homo sapiens
tttctaagagaacattgaaacatagattttaaaacaaatt

SEQ ID NO: 36407 - DNA, 40 bp, Homo sapiens
aatttgttttaaaatctatgtttcaatgttctcttagaaa

SEQ ID NO: 36408 - DNA, 40 bp, Homo sapiens
ttctaagagaacattgaaacatagattttaaaacaaattg

SEQ ID NO: 36409 - DNA, 40 bp, Homo sapiens
caatttgttttaaaatctatgtttcaatgttctcttagaa

SEQ ID NO: 36410 - DNA, 40 bp, Homo sapiens
tctaagagaacattgaaacatagattttaaaacaaattgt

SEQ ID NO: 36411 - DNA, 40 bp, Homo sapiens
acaatttgttttaaaatctatgtttcaatgttctcttaga

SEQ ID NO: 36412 - DNA, 40 bp, Homo sapiens
ctaagagaacattgaaacatagattttaaaacaaattgtt

SEQ ID NO: 36413 - DNA, 40 bp, Homo sapiens
aacaatttgttttaaaatctatgtttcaatgttctcttag

SEQ ID NO: 36414 - DNA, 40 bp, Homo sapiens
taagagaacattgaaacatagattttaaaacaaattgttg

SEQ ID NO: 36415 - DNA, 40 bp, Homo sapiens
caacaatttgttttaaaatctatgtttcaatgttctctta

SEQ ID NO: 36416 - DNA, 40 bp, Homo sapiens
aagagaacattgaaacatagattttaaaacaaattgttga

SEQ ID NO: 36417 - DNA, 40 bp, Homo sapiens
tcaacaatttgttttaaaatctatgtttcaatgttctctt

SEQ ID NO: 36418 - DNA, 40 bp, Homo sapiens
agagaacattgaaacatagattttaaaacaaattgttgaa

SEQ ID NO: 36419 - DNA, 40 bp, Homo sapiens
ttcaacaatttgttttaaaatctatgtttcaatgttctct

SEQ ID NO: 36420 - DNA, 40 bp, Homo sapiens
gagaacattgaaacatagattttaaaacaaattgttgaaa

SEQ ID NO: 36421 - DNA, 40 bp, Homo sapiens
tttcaacaatttgttttaaaatctatgtttcaatgttctc

SEQ ID NO: 36422 - DNA, 40 bp, Homo sapiens
agaacattgaaacatagattttaaaacaaattgttgaaag

SEQ ID NO: 36423 - DNA, 40 bp, Homo sapiens
ctttcaacaatttgttttaaaatctatgtttcaatgttct

SEQ ID NO: 36424 - DNA, 40 bp, Homo sapiens
gaacattgaaacatagattttaaaacaaattgttgaaaga

SEQ ID NO: 36425 - DNA, 40 bp, Homo sapiens
tctttcaacaatttgttttaaaatctatgtttcaatgttc

SEQ ID NO: 36426 - DNA, 40 bp, Homo sapiens
aacattgaaacatagattttaaaacaaattgttgaaagat

SEQ ID NO: 36427 - DNA, 40 bp, Homo sapiens
atctttcaacaatttgttttaaaatctatgtttcaatgtt

SEQ ID NO: 36428 - DNA, 40 bp, Homo sapiens
acattgaaacatagattttaaaacaaattgttgaaagatt

SEQ ID NO: 36429 - DNA, 40 bp, Homo sapiens
aatctttcaacaatttgttttaaaatctatgtttcaatgt

SEQ ID NO: 36430 - DNA, 40 bp, Homo sapiens
cattgaaacatagattttaaaacaaattgttgaaagatta

SEQ ID NO: 36431 - DNA, 40 bp, Homo sapiens
taatctttcaacaatttgttttaaaatctatgtttcaatg

SEQ ID NO: 36432 - DNA, 40 bp, Homo sapiens
attgaaacatagattttaaaacaaattgttgaaagattaa

SEQ ID NO: 36433 - DNA, 40 bp, Homo sapiens
ttaatctttcaacaatttgttttaaaatctatgtttcaat

SEQ ID NO: 36434 - DNA, 40 bp, Homo sapiens
ttgaaacatagattttaaaacaaattgttgaaagattaaa

SEQ ID NO: 36435 - DNA, 40 bp, Homo sapiens
tttaatctttcaacaatttgttttaaaatctatgtttcaa

SEQ ID NO: 36436 - DNA, 40 bp, Homo sapiens
tgaaacatagattttaaaacaaattgttgaaagattaaaa

SEQ ID NO: 36437 - DNA, 40 bp, Homo sapiens
ttttaatctttcaacaatttgttttaaaatctatgtttca

SEQ ID NO: 36438 - DNA, 40 bp, Homo sapiens
gaaacatagattttaaaacaaattgttgaaagattaaaaa

SEQ ID NO: 36439 - DNA, 40 bp, Homo sapiens
tttttaatctttcaacaatttgttttaaaatctatgtttc

SEQ ID NO: 36440 - DNA, 40 bp, Homo sapiens
aaacatagattttaaaacaaattgttgaaagattaaaaaa

SEQ ID NO: 36441 - DNA, 40 bp, Homo sapiens
ttttttaatctttcaacaatttgttttaaaatctatgttt

SEQ ID NO: 36442 - DNA, 40 bp, Homo sapiens
aacatagattttaaaacaaattgttgaaagattaaaaaat

SEQ ID NO: 36443 - DNA, 40 bp, Homo sapiens
attttttaatctttcaacaatttgttttaaaatctatgtt

SEQ ID NO: 36444 - DNA, 40 bp, Homo sapiens
acatagattttaaaacaaattgttgaaagattaaaaaatc

SEQ ID NO: 36445 - DNA, 40 bp, Homo sapiens
gattttttaatctttcaacaatttgttttaaaatctatgt

SEQ ID NO: 36446 - DNA, 40 bp, Homo sapiens
catagattttaaaacaaattgttgaaagattaaaaaatct

SEQ ID NO: 36447 - DNA, 40 bp, Homo sapiens
agattttttaatctttcaacaatttgttttaaaatctatg

SEQ ID NO: 36448 - DNA, 40 bp, Homo sapiens
atagattttaaaacaaattgttgaaagattaaaaaatctg

SEQ ID NO: 36449 - DNA, 40 bp, Homo sapiens
cagattttttaatctttcaacaatttgttttaaaatctat

SEQ ID NO: 36450 - DNA, 40 bp, Homo sapiens
tagattttaaaacaaattgttgaaagattaaaaaatctgc

SEQ ID NO: 36451 - DNA, 40 bp, Homo sapiens
gcagattttttaatctttcaacaatttgttttaaaatcta

SEQ ID NO: 36452 - DNA, 40 bp, Homo sapiens
agattttaaaacaaattgttgaaagattaaaaaatctgcc

SEQ ID NO: 36453 - DNA, 40 bp, Homo sapiens
ggcagattttttaatctttcaacaatttgttttaaaatct

SEQ ID NO: 36454 - DNA, 40 bp, Homo sapiens
gattttaaaacaaattgttgaaagattaaaaaatctgcct

SEQ ID NO: 36455 - DNA, 40 bp, Homo sapiens
aggcagattttttaatctttcaacaatttgttttaaaatc

SEQ ID NO: 36456 - DNA, 40 bp, Homo sapiens
attttaaaacaaattgttgaaagattaaaaaatctgcctt

SEQ ID NO: 36457 - DNA, 40 bp, Homo sapiens
aaggcagattttttaatctttcaacaatttgttttaaaat

SEQ ID NO: 36458 - DNA, 40 bp, Homo sapiens
ttttaaaacaaattgttgaaagattaaaaaatctgccttt

SEQ ID NO: 36459 - DNA, 40 bp, Homo sapiens
aaaggcagattttttaatctttcaacaatttgttttaaaa

SEQ ID NO: 36460 - DNA, 40 bp, Homo sapiens
tttaaaacaaattgttgaaagattaaaaaatctgcctttg

SEQ ID NO: 36461 - DNA, 40 bp, Homo sapiens
caaaggcagattttttaatctttcaacaatttgttttaaa

SEQ ID NO: 36462 - DNA, 40 bp, Homo sapiens
ttaaaacaaattgttgaaagattaaaaaatctgcctttgc

SEQ ID NO: 36463 - DNA, 40 bp, Homo sapiens
gcaaaggcagattttttaatctttcaacaatttgttttaa

SEQ ID NO: 36464 - DNA, 40 bp, Homo sapiens
taaaacaaattgttgaaagattaaaaaatctgcctttgca

SEQ ID NO: 36465 - DNA, 40 bp, Homo sapiens
tgcaaaggcagattttttaatctttcaacaatttgtttta

SEQ ID NO: 36466 - DNA, 40 bp, Homo sapiens
aaaacaaattgttgaaagattaaaaaatctgcctttgcac

SEQ ID NO: 36467 - DNA, 40 bp, Homo sapiens
gtgcaaaggcagattttttaatctttcaacaatttgtttt

SEQ ID NO: 36468 - DNA, 40 bp, Homo sapiens
aaacaaattgttgaaagattaaaaaatctgcctttgcaca

SEQ ID NO: 36469 - DNA, 40 bp, Homo sapiens
tgtgcaaaggcagattttttaatctttcaacaatttgttt

SEQ ID NO: 36470 - DNA, 40 bp, Homo sapiens
aacaaattgttgaaagattaaaaaatctgcctttgcacac

SEQ ID NO: 36471 - DNA, 40 bp, Homo sapiens
gtgtgcaaaggcagattttttaatctttcaacaatttgtt

SEQ ID NO: 36472 - DNA, 40 bp, Homo sapiens
acaaattgttgaaagattaaaaaatctgcctttgcacact

SEQ ID NO: 36473 - DNA, 40 bp, Homo sapiens
agtgtgcaaaggcagattttttaatctttcaacaatttgt

SEQ ID NO: 36474 - DNA, 40 bp, Homo sapiens
caaattgttgaaagattaaaaaatctgcctttgcacactg

SEQ ID NO: 36475 - DNA, 40 bp, Homo sapiens
cagtgtgcaaaggcagattttttaatctttcaacaatttg

SEQ ID NO: 36476 - DNA, 40 bp, Homo sapiens
aaattgttgaaagattaaaaaatctgcctttgcacactgt

SEQ ID NO: 36477 - DNA, 40 bp, Homo sapiens
acagtgtgcaaaggcagattttttaatctttcaacaattt

SEQ ID NO: 36478 - DNA, 40 bp, Homo sapiens
aattgttgaaagattaaaaaatctgcctttgcacactgtt

SEQ ID NO: 36479 - DNA, 40 bp, Homo sapiens
aacagtgtgcaaaggcagattttttaatctttcaacaatt

SEQ ID NO: 36480 - DNA, 40 bp, Homo sapiens
attgttgaaagattaaaaaatctgcctttgcacactgtta

SEQ ID NO: 36481 - DNA, 40 bp, Homo sapiens
taacagtgtgcaaaggcagattttttaatctttcaacaat

SEQ ID NO: 36482 - DNA, 40 bp, Homo sapiens
ttgttgaaagattaaaaaatctgcctttgcacactgttac

SEQ ID NO: 36483 - DNA, 40 bp, Homo sapiens
gtaacagtgtgcaaaggcagattttttaatctttcaacaa

SEQ ID NO: 36484 - DNA, 40 bp, Homo sapiens
tgttgaaagattaaaaaatctgcctttgcacactgttaca

SEQ ID NO: 36485 - DNA, 40 bp, Homo sapiens
tgtaacagtgtgcaaaggcagattttttaatctttcaaca

SEQ ID NO: 36486 - DNA, 40 bp, Homo sapiens
gttgaaagattaaaaaatctgcctttgcacactgttacat

SEQ ID NO: 36487 - DNA, 40 bp, Homo sapiens
atgtaacagtgtgcaaaggcagattttttaatctttcaac

SEQ ID NO: 36488 - DNA, 40 bp, Homo sapiens
ttgaaagattaaaaaatctgcctttgcacactgttacatt

SEQ ID NO: 36489 - DNA, 40 bp, Homo sapiens
aatgtaacagtgtgcaaaggcagattttttaatctttcaa

SEQ ID NO: 36490 - DNA, 40 bp, Homo sapiens
tgaaagattaaaaaatctgcctttgcacactgttacattg

SEQ ID NO: 36491 - DNA, 40 bp, Homo sapiens
caatgtaacagtgtgcaaaggcagattttttaatctttca

SEQ ID NO: 36492 - DNA, 40 bp, Homo sapiens
gaaagattaaaaaatctgcctttgcacactgttacattga

SEQ ID NO: 36493 - DNA, 40 bp, Homo sapiens
tcaatgtaacagtgtgcaaaggcagattttttaatctttc

SEQ ID NO: 36494 - DNA, 40 bp, Homo sapiens
aaagattaaaaaatctgcctttgcacactgttacattgaa

SEQ ID NO: 36495 - DNA, 40 bp, Homo sapiens
ttcaatgtaacagtgtgcaaaggcagattttttaatcttt

SEQ ID NO: 36496 - DNA, 40 bp, Homo sapiens
aagattaaaaaatctgcctttgcacactgttacattgaaa

SEQ ID NO: 36497 - DNA, 40 bp, Homo sapiens
tttcaatgtaacagtgtgcaaaggcagattttttaatctt

SEQ ID NO: 36498 - DNA, 40 bp, Homo sapiens
agattaaaaaatctgcctttgcacactgttacattgaaag

SEQ ID NO: 36499 - DNA, 40 bp, Homo sapiens
ctttcaatgtaacagtgtgcaaaggcagattttttaatct

SEQ ID NO: 36500 - DNA, 40 bp, Homo sapiens
gattaaaaaatctgcctttgcacactgttacattgaaagt

SEQ ID NO: 36501 - DNA, 40 bp, Homo sapiens
actttcaatgtaacagtgtgcaaaggcagattttttaatc

SEQ ID NO: 36502 - DNA, 40 bp, Homo sapiens
attaaaaaatctgcctttgcacactgttacattgaaagtg

SEQ ID NO: 36503 - DNA, 40 bp, Homo sapiens
cactttcaatgtaacagtgtgcaaaggcagattttttaat

SEQ ID NO: 36504 - DNA, 40 bp, Homo sapiens
ttaaaaaatctgcctttgcacactgttacattgaaagtgg

SEQ ID NO: 36505 - DNA, 40 bp, Homo sapiens
ccactttcaatgtaacagtgtgcaaaggcagattttttaa

SEQ ID NO: 36506 - DNA, 40 bp, Homo sapiens
taaaaaatctgcctttgcacactgttacattgaaagtggg

SEQ ID NO: 36507 - DNA, 40 bp, Homo sapiens
cccactttcaatgtaacagtgtgcaaaggcagatttttta

SEQ ID NO: 36508 - DNA, 40 bp, Homo sapiens
aaaaaatctgcctttgcacactgttacattgaaagtgggg

SEQ ID NO: 36509 - DNA, 40 bp, Homo sapiens
ccccactttcaatgtaacagtgtgcaaaggcagatttttt

SEQ ID NO: 36510 - DNA, 40 bp, Homo sapiens
aaaaatctgcctttgcacactgttacattgaaagtggggc

SEQ ID NO: 36511 - DNA, 40 bp, Homo sapiens
gccccactttcaatgtaacagtgtgcaaaggcagattttt

SEQ ID NO: 36512 - DNA, 40 bp, Homo sapiens
aaaatctgcctttgcacactgttacattgaaagtggggca

SEQ ID NO: 36513 - DNA, 40 bp, Homo sapiens
tgccccactttcaatgtaacagtgtgcaaaggcagatttt

SEQ ID NO: 36514 - DNA, 40 bp, Homo sapiens
aaatctgcctttgcacactgttacattgaaagtggggcat

SEQ ID NO: 36515 - DNA, 40 bp, Homo sapiens
atgccccactttcaatgtaacagtgtgcaaaggcagattt

SEQ ID NO: 36516 - DNA, 40 bp, Homo sapiens
aatctgcctttgcacactgttacattgaaagtggggcatt

SEQ ID NO: 36517 - DNA, 40 bp, Homo sapiens
aatgccccactttcaatgtaacagtgtgcaaaggcagatt

SEQ ID NO: 36518 - DNA, 40 bp, Homo sapiens
atctgcctttgcacactgttacattgaaagtggggcattt

SEQ ID NO: 36519 - DNA, 40 bp, Homo sapiens
aaatgccccactttcaatgtaacagtgtgcaaaggcagat

SEQ ID NO: 36520 - DNA, 40 bp, Homo sapiens
tctgcctttgcacactgttacattgaaagtggggcatttg

SEQ ID NO: 36521 - DNA, 40 bp, Homo sapiens
caaatgccccactttcaatgtaacagtgtgcaaaggcaga

SEQ ID NO: 36522 - DNA, 40 bp, Homo sapiens
ctgcctttgcacactgttacattgaaagtggggcatttgt

SEQ ID NO: 36523 - DNA, 40 bp, Homo sapiens
acaaatgccccactttcaatgtaacagtgtgcaaaggcag

SEQ ID NO: 36524 - DNA, 40 bp, Homo sapiens
tgcctttgcacactgttacattgaaagtggggcatttgtc

SEQ ID NO: 36525 - DNA, 40 bp, Homo sapiens
gacaaatgccccactttcaatgtaacagtgtgcaaaggca

SEQ ID NO: 36526 - DNA, 40 bp, Homo sapiens
gcctttgcacactgttacattgaaagtggggcatttgtcg

SEQ ID NO: 36527 - DNA, 40 bp, Homo sapiens
cgacaaatgccccactttcaatgtaacagtgtgcaaaggc

SEQ ID NO: 36528 - DNA, 40 bp, Homo sapiens
cctttgcacactgttacattgaaagtggggcatttgtcgt

SEQ ID NO: 36529 - DNA, 40 bp, Homo sapiens
acgacaaatgccccactttcaatgtaacagtgtgcaaagg

SEQ ID NO: 36530 - DNA, 40 bp, Homo sapiens
ctttgcacactgttacattgaaagtggggcatttgtcgtg

SEQ ID NO: 36531 - DNA, 40 bp, Homo sapiens
cacgacaaatgccccactttcaatgtaacagtgtgcaaag

SEQ ID NO: 36532 - DNA, 40 bp, Homo sapiens
tttgcacactgttacattgaaagtggggcatttgtcgtga

SEQ ID NO: 36533 - DNA, 40 bp, Homo sapiens
tcacgacaaatgccccactttcaatgtaacagtgtgcaaa

SEQ ID NO: 36534 - DNA, 40 bp, Homo sapiens
ttgcacactgttacattgaaagtggggcatttgtcgtgaa

SEQ ID NO: 36535 - DNA, 40 bp, Homo sapiens
ttcacgacaaatgccccactttcaatgtaacagtgtgcaa

SEQ ID NO: 36536 - DNA, 40 bp, Homo sapiens
tgcacactgttacattgaaagtggggcatttgtcgtgaac

SEQ ID NO: 36537 - DNA, 40 bp, Homo sapiens
gttcacgacaaatgccccactttcaatgtaacagtgtgca

SEQ ID NO: 36538 - DNA, 40 bp, Homo sapiens
gcacactgttacattgaaagtggggcatttgtcgtgaaca

SEQ ID NO: 36539 - DNA, 40 bp, Homo sapiens
tgttcacgacaaatgccccactttcaatgtaacagtgtgc

SEQ ID NO: 36540 - DNA, 40 bp, Homo sapiens
cacactgttacattgaaagtggggcatttgtcgtgaacat

SEQ ID NO: 36541 - DNA, 40 bp, Homo sapiens
atgttcacgacaaatgccccactttcaatgtaacagtgtg

SEQ ID NO: 36542 - DNA, 40 bp, Homo sapiens
acactgttacattgaaagtggggcatttgtcgtgaacatt

SEQ ID NO: 36543 - DNA, 40 bp, Homo sapiens
aatgttcacgacaaatgccccactttcaatgtaacagtgt

SEQ ID NO: 36544 - DNA, 40 bp, Homo sapiens
cactgttacattgaaagtggggcatttgtcgtgaacattc

SEQ ID NO: 36545 - DNA, 40 bp, Homo sapiens
gaatgttcacgacaaatgccccactttcaatgtaacagtg

SEQ ID NO: 36546 - DNA, 40 bp, Homo sapiens
actgttacattgaaagtggggcatttgtcgtgaacattca

SEQ ID NO: 36547 - DNA, 40 bp, Homo sapiens
tgaatgttcacgacaaatgccccactttcaatgtaacagt

SEQ ID NO: 36548 - DNA, 40 bp, Homo sapiens
ctgttacattgaaagtggggcatttgtcgtgaacattcat

SEQ ID NO: 36549 - DNA, 40 bp, Homo sapiens
atgaatgttcacgacaaatgccccactttcaatgtaacag

SEQ ID NO: 36550 - DNA, 40 bp, Homo sapiens
tgttacattgaaagtggggcatttgtcgtgaacattcatt

SEQ ID NO: 36551 - DNA, 40 bp, Homo sapiens
aatgaatgttcacgacaaatgccccactttcaatgtaaca

SEQ ID NO: 36552 - DNA, 40 bp, Homo sapiens
gttacattgaaagtggggcatttgtcgtgaacattcattt

SEQ ID NO: 36553 - DNA, 40 bp, Homo sapiens
aaatgaatgttcacgacaaatgccccactttcaatgtaac

SEQ ID NO: 36554 - DNA, 40 bp, Homo sapiens
ttacattgaaagtggggcatttgtcgtgaacattcatttc

SEQ ID NO: 36555 - DNA, 40 bp, Homo sapiens
gaaatgaatgttcacgacaaatgccccactttcaatgtaa

SEQ ID NO: 36556 - DNA, 40 bp, Homo sapiens
tacattgaaagtggggcatttgtcgtgaacattcatttca

SEQ ID NO: 36557 - DNA, 40 bp, Homo sapiens
tgaaatgaatgttcacgacaaatgccccactttcaatgta

SEQ ID NO: 36558 - DNA, 40 bp, Homo sapiens
acattgaaagtggggcatttgtcgtgaacattcatttcaa

SEQ ID NO: 36559 - DNA, 40 bp, Homo sapiens
ttgaaatgaatgttcacgacaaatgccccactttcaatgt

SEQ ID NO: 36560 - DNA, 40 bp, Homo sapiens
cattgaaagtggggcatttgtcgtgaacattcatttcaaa

SEQ ID NO: 36561 - DNA, 40 bp, Homo sapiens
tttgaaatgaatgttcacgacaaatgccccactttcaatg

SEQ ID NO: 36562 - DNA, 40 bp, Homo sapiens
attgaaagtggggcatttgtcgtgaacattcatttcaaat

SEQ ID NO: 36563 - DNA, 40 bp, Homo sapiens
atttgaaatgaatgttcacgacaaatgccccactttcaat

SEQ ID NO: 36564 - DNA, 40 bp, Homo sapiens
ttgaaagtggggcatttgtcgtgaacattcatttcaaata

SEQ ID NO: 36565 - DNA, 40 bp, Homo sapiens
tatttgaaatgaatgttcacgacaaatgccccactttcaa

SEQ ID NO: 36566 - DNA, 40 bp, Homo sapiens
tgaaagtggggcatttgtcgtgaacattcatttcaaatat

SEQ ID NO: 36567 - DNA, 40 bp, Homo sapiens
atatttgaaatgaatgttcacgacaaatgccccactttca

SEQ ID NO: 36568 - DNA, 40 bp, Homo sapiens
gaaagtggggcatttgtcgtgaacattcatttcaaatatg

SEQ ID NO: 36569 - DNA, 40 bp, Homo sapiens
catatttgaaatgaatgttcacgacaaatgccccactttc

SEQ ID NO: 36570 - DNA, 40 bp, Homo sapiens
aaagtggggcatttgtcgtgaacattcatttcaaatatgt

SEQ ID NO: 36571 - DNA, 40 bp, Homo sapiens
acatatttgaaatgaatgttcacgacaaatgccccacttt

SEQ ID NO: 36572 - DNA, 40 bp, Homo sapiens
aagtggggcatttgtcgtgaacattcatttcaaatatgta

SEQ ID NO: 36573 - DNA, 40 bp, Homo sapiens
tacatatttgaaatgaatgttcacgacaaatgccccactt

SEQ ID NO: 36574 - DNA, 40 bp, Homo sapiens
agtggggcatttgtcgtgaacattcatttcaaatatgtag

SEQ ID NO: 36575 - DNA, 40 bp, Homo sapiens
ctacatatttgaaatgaatgttcacgacaaatgccccact

SEQ ID NO: 36576 - DNA, 40 bp, Homo sapiens
gtggggcatttgtcgtgaacattcatttcaaatatgtagt

SEQ ID NO: 36577 - DNA, 40 bp, Homo sapiens
actacatatttgaaatgaatgttcacgacaaatgccccac

SEQ ID NO: 36578 - DNA, 40 bp, Homo sapiens
tggggcatttgtcgtgaacattcatttcaaatatgtagta

SEQ ID NO: 36579 - DNA, 40 bp, Homo sapiens
tactacatatttgaaatgaatgttcacgacaaatgcccca

SEQ ID NO: 36580 - DNA, 40 bp, Homo sapiens
ggggcatttgtcgtgaacattcatttcaaatatgtagtat

SEQ ID NO: 36581 - DNA, 40 bp, Homo sapiens
atactacatatttgaaatgaatgttcacgacaaatgcccc

SEQ ID NO: 36582 - DNA, 40 bp, Homo sapiens
gggcatttgtcgtgaacattcatttcaaatatgtagtatc

SEQ ID NO: 36583 - DNA, 40 bp, Homo sapiens
gatactacatatttgaaatgaatgttcacgacaaatgccc

SEQ ID NO: 36584 - DNA, 40 bp, Homo sapiens
ggcatttgtcgtgaacattcatttcaaatatgtagtatct

SEQ ID NO: 36585 - DNA, 40 bp, Homo sapiens
agatactacatatttgaaatgaatgttcacgacaaatgcc

SEQ ID NO: 36586 - DNA, 40 bp, Homo sapiens
gcatttgtcgtgaacattcatttcaaatatgtagtatctt

SEQ ID NO: 36587 - DNA, 40 bp, Homo sapiens
aagatactacatatttgaaatgaatgttcacgacaaatgc

SEQ ID NO: 36588 - DNA, 40 bp, Homo sapiens
catttgtcgtgaacattcatttcaaatatgtagtatcttc

SEQ ID NO: 36589 - DNA, 40 bp, Homo sapiens
gaagatactacatatttgaaatgaatgttcacgacaaatg

SEQ ID NO: 36590 - DNA, 40 bp, Homo sapiens
atttgtcgtgaacattcatttcaaatatgtagtatcttca

SEQ ID NO: 36591 - DNA, 40 bp, Homo sapiens
tgaagatactacatatttgaaatgaatgttcacgacaaat

SEQ ID NO: 36592 - DNA, 40 bp, Homo sapiens
tttgtcgtgaacattcatttcaaatatgtagtatcttcag

SEQ ID NO: 36593 - DNA, 40 bp, Homo sapiens
ctgaagatactacatatttgaaatgaatgttcacgacaaa

SEQ ID NO: 36594 - DNA, 40 bp, Homo sapiens
ttgtcgtgaacattcatttcaaatatgtagtatcttcaga

SEQ ID NO: 36595 - DNA, 40 bp, Homo sapiens
tctgaagatactacatatttgaaatgaatgttcacgacaa

SEQ ID NO: 36596 - DNA, 40 bp, Homo sapiens
tgtcgtgaacattcatttcaaatatgtagtatcttcagaa

SEQ ID NO: 36597 - DNA, 40 bp, Homo sapiens
ttctgaagatactacatatttgaaatgaatgttcacgaca

SEQ ID NO: 36598 - DNA, 40 bp, Homo sapiens
gtcgtgaacattcatttcaaatatgtagtatcttcagaat

SEQ ID NO: 36599 - DNA, 40 bp, Homo sapiens
attctgaagatactacatatttgaaatgaatgttcacgac

SEQ ID NO: 36600 - DNA, 40 bp, Homo sapiens
tcgtgaacattcatttcaaatatgtagtatcttcagaata

SEQ ID NO: 36601 - DNA, 40 bp, Homo sapiens
tattctgaagatactacatatttgaaatgaatgttcacga

SEQ ID NO: 36602 - DNA, 40 bp, Homo sapiens
cgtgaacattcatttcaaatatgtagtatcttcagaatat

SEQ ID NO: 36603 - DNA, 40 bp, Homo sapiens
atattctgaagatactacatatttgaaatgaatgttcacg

SEQ ID NO: 36604 - DNA, 40 bp, Homo sapiens
gtgaacattcatttcaaatatgtagtatcttcagaatatt

SEQ ID NO: 36605 - DNA, 40 bp, Homo sapiens
aatattctgaagatactacatatttgaaatgaatgttcac

SEQ ID NO: 36606 - DNA, 40 bp, Homo sapiens
tgaacattcatttcaaatatgtagtatcttcagaatattt

SEQ ID NO: 36607 - DNA, 40 bp, Homo sapiens
aaatattctgaagatactacatatttgaaatgaatgttca

SEQ ID NO: 36608 - DNA, 40 bp, Homo sapiens
gaacattcatttcaaatatgtagtatcttcagaatatttg

SEQ ID NO: 36609 - DNA, 40 bp, Homo sapiens
caaatattctgaagatactacatatttgaaatgaatgttc

SEQ ID NO: 36610 - DNA, 40 bp, Homo sapiens
aacattcatttcaaatatgtagtatcttcagaatatttga

SEQ ID NO: 36611 - DNA, 40 bp, Homo sapiens
tcaaatattctgaagatactacatatttgaaatgaatgtt

SEQ ID NO: 36612 - DNA, 40 bp, Homo sapiens
acattcatttcaaatatgtagtatcttcagaatatttgag

SEQ ID NO: 36613 - DNA, 40 bp, Homo sapiens
ctcaaatattctgaagatactacatatttgaaatgaatgt

SEQ ID NO: 36614 - DNA, 40 bp, Homo sapiens
cattcatttcaaatatgtagtatcttcagaatatttgaga

SEQ ID NO: 36615 - DNA, 40 bp, Homo sapiens
tctcaaatattctgaagatactacatatttgaaatgaatg

SEQ ID NO: 36616 - DNA, 40 bp, Homo sapiens
attcatttcaaatatgtagtatcttcagaatatttgagaa

SEQ ID NO: 36617 - DNA, 40 bp, Homo sapiens
ttctcaaatattctgaagatactacatatttgaaatgaat

SEQ ID NO: 36618 - DNA, 40 bp, Homo sapiens
ttcatttcaaatatgtagtatcttcagaatatttgagaag

SEQ ID NO: 36619 - DNA, 40 bp, Homo sapiens
cttctcaaatattctgaagatactacatatttgaaatgaa

SEQ ID NO: 36620 - DNA, 40 bp, Homo sapiens
tcatttcaaatatgtagtatcttcagaatatttgagaagg

SEQ ID NO: 36621 - DNA, 40 bp, Homo sapiens
ccttctcaaatattctgaagatactacatatttgaaatga

SEQ ID NO: 36622 - DNA, 40 bp, Homo sapiens
catttcaaatatgtagtatcttcagaatatttgagaagga

SEQ ID NO: 36623 - DNA, 40 bp, Homo sapiens
tccttctcaaatattctgaagatactacatatttgaaatg

SEQ ID NO: 36624 - DNA, 40 bp, Homo sapiens
atttcaaatatgtagtatcttcagaatatttgagaaggat

SEQ ID NO: 36625 - DNA, 40 bp, Homo sapiens
atccttctcaaatattctgaagatactacatatttgaaat

SEQ ID NO: 36626 - DNA, 40 bp, Homo sapiens
tttcaaatatgtagtatcttcagaatatttgagaaggatt

SEQ ID NO: 36627 - DNA, 40 bp, Homo sapiens
aatccttctcaaatattctgaagatactacatatttgaaa

SEQ ID NO: 36628 - DNA, 40 bp, Homo sapiens
ttcaaatatgtagtatcttcagaatatttgagaaggattt

SEQ ID NO: 36629 - DNA, 40 bp, Homo sapiens
aaatccttctcaaatattctgaagatactacatatttgaa

SEQ ID NO: 36630 - DNA, 40 bp, Homo sapiens
tcaaatatgtagtatcttcagaatatttgagaaggatttg

SEQ ID NO: 36631 - DNA, 40 bp, Homo sapiens
caaatccttctcaaatattctgaagatactacatatttga

SEQ ID NO: 36632 - DNA, 40 bp, Homo sapiens
caaatatgtagtatcttcagaatatttgagaaggatttgt

SEQ ID NO: 36633 - DNA, 40 bp, Homo sapiens
acaaatccttctcaaatattctgaagatactacatatttg

SEQ ID NO: 36634 - DNA, 40 bp, Homo sapiens
aaatatgtagtatcttcagaatatttgagaaggatttgta

SEQ ID NO: 36635 - DNA, 40 bp, Homo sapiens
tacaaatccttctcaaatattctgaagatactacatattt

SEQ ID NO: 36636 - DNA, 40 bp, Homo sapiens
aatatgtagtatcttcagaatatttgagaaggatttgtat

SEQ ID NO: 36637 - DNA, 40 bp, Homo sapiens
atacaaatccttctcaaatattctgaagatactacatatt

SEQ ID NO: 36638 - DNA, 40 bp, Homo sapiens
atatgtagtatcttcagaatatttgagaaggatttgtatt

SEQ ID NO: 36639 - DNA, 40 bp, Homo sapiens
aatacaaatccttctcaaatattctgaagatactacatat

SEQ ID NO: 36640 - DNA, 40 bp, Homo sapiens
tatgtagtatcttcagaatatttgagaaggatttgtatta

SEQ ID NO: 36641 - DNA, 40 bp, Homo sapiens
taatacaaatccttctcaaatattctgaagatactacata

SEQ ID NO: 36642 - DNA, 40 bp, Homo sapiens
atgtagtatcttcagaatatttgagaaggatttgtattat

SEQ ID NO: 36643 - DNA, 40 bp, Homo sapiens
ataatacaaatccttctcaaatattctgaagatactacat

SEQ ID NO: 36644 - DNA, 40 bp, Homo sapiens
tgtagtatcttcagaatatttgagaaggatttgtattata

SEQ ID NO: 36645 - DNA, 40 bp, Homo sapiens
tataatacaaatccttctcaaatattctgaagatactaca

SEQ ID NO: 36646 - DNA, 40 bp, Homo sapiens
gtagtatcttcagaatatttgagaaggatttgtattatat

SEQ ID NO: 36647 - DNA, 40 bp, Homo sapiens
atataatacaaatccttctcaaatattctgaagatactac

SEQ ID NO: 36648 - DNA, 40 bp, Homo sapiens
tagtatcttcagaatatttgagaaggatttgtattatata

SEQ ID NO: 36649 - DNA, 40 bp, Homo sapiens
tatataatacaaatccttctcaaatattctgaagatacta

SEQ ID NO: 36650 - DNA, 40 bp, Homo sapiens
agtatcttcagaatatttgagaaggatttgtattatataa

SEQ ID NO: 36651 - DNA, 40 bp, Homo sapiens
ttatataatacaaatccttctcaaatattctgaagatact

SEQ ID NO: 36652 - DNA, 40 bp, Homo sapiens
gtatcttcagaatatttgagaaggatttgtattatataat

SEQ ID NO: 36653 - DNA, 40 bp, Homo sapiens
attatataatacaaatccttctcaaatattctgaagatac

SEQ ID NO: 36654 - DNA, 40 bp, Homo sapiens
tatcttcagaatatttgagaaggatttgtattatataatt

SEQ ID NO: 36655 - DNA, 40 bp, Homo sapiens
aattatataatacaaatccttctcaaatattctgaagata

SEQ ID NO: 36656 - DNA, 40 bp, Homo sapiens
atcttcagaatatttgagaaggatttgtattatataattg

SEQ ID NO: 36657 - DNA, 40 bp, Homo sapiens
caattatataatacaaatccttctcaaatattctgaagat

SEQ ID NO: 36658 - DNA, 40 bp, Homo sapiens
tcttcagaatatttgagaaggatttgtattatataattga

SEQ ID NO: 36659 - DNA, 40 bp, Homo sapiens
tcaattatataatacaaatccttctcaaatattctgaaga

SEQ ID NO: 36660 - DNA, 40 bp, Homo sapiens
cttcagaatatttgagaaggatttgtattatataattgaa

SEQ ID NO: 36661 - DNA, 40 bp, Homo sapiens
ttcaattatataatacaaatccttctcaaatattctgaag

SEQ ID NO: 36662 - DNA, 40 bp, Homo sapiens
ttcagaatatttgagaaggatttgtattatataattgaaa

SEQ ID NO: 36663 - DNA, 40 bp, Homo sapiens
tttcaattatataatacaaatccttctcaaatattctgaa

SEQ ID NO: 36664 - DNA, 40 bp, Homo sapiens
tcagaatatttgagaaggatttgtattatataattgaaaa

SEQ ID NO: 36665 - DNA, 40 bp, Homo sapiens
ttttcaattatataatacaaatccttctcaaatattctga

SEQ ID NO: 36666 - DNA, 40 bp, Homo sapiens
cagaatatttgagaaggatttgtattatataattgaaaaa

SEQ ID NO: 36667 - DNA, 40 bp, Homo sapiens
tttttcaattatataatacaaatccttctcaaatattctg

SEQ ID NO: 36668 - DNA, 40 bp, Homo sapiens
agaatatttgagaaggatttgtattatataattgaaaaat

SEQ ID NO: 36669 - DNA, 40 bp, Homo sapiens
atttttcaattatataatacaaatccttctcaaatattct

SEQ ID NO: 36670 - DNA, 40 bp, Homo sapiens
gaatatttgagaaggatttgtattatataattgaaaaatc

SEQ ID NO: 36671 - DNA, 40 bp, Homo sapiens
gatttttcaattatataatacaaatccttctcaaatattc

SEQ ID NO: 36672 - DNA, 40 bp, Homo sapiens
aatatttgagaaggatttgtattatataattgaaaaatct

SEQ ID NO: 36673 - DNA, 40 bp, Homo sapiens
agatttttcaattatataatacaaatccttctcaaatatt

SEQ ID NO: 36674 - DNA, 40 bp, Homo sapiens
atatttgagaaggatttgtattatataattgaaaaatctg

SEQ ID NO: 36675 - DNA, 40 bp, Homo sapiens
cagatttttcaattatataatacaaatccttctcaaatat

SEQ ID NO: 36676 - DNA, 40 bp, Homo sapiens
tatttgagaaggatttgtattatataattgaaaaatctgt

SEQ ID NO: 36677 - DNA, 40 bp, Homo sapiens
acagatttttcaattatataatacaaatccttctcaaata

SEQ ID NO: 36678 - DNA, 40 bp, Homo sapiens
atttgagaaggatttgtattatataattgaaaaatctgtt

SEQ ID NO: 36679 - DNA, 40 bp, Homo sapiens
aacagatttttcaattatataatacaaatccttctcaaat

SEQ ID NO: 36680 - DNA, 40 bp, Homo sapiens
tttgagaaggatttgtattatataattgaaaaatctgtta

SEQ ID NO: 36681 - DNA, 40 bp, Homo sapiens
taacagatttttcaattatataatacaaatccttctcaaa

SEQ ID NO: 36682 - DNA, 40 bp, Homo sapiens
ttgagaaggatttgtattatataattgaaaaatctgttaa

SEQ ID NO: 36683 - DNA, 40 bp, Homo sapiens
ttaacagatttttcaattatataatacaaatccttctcaa

SEQ ID NO: 36684 - DNA, 40 bp, Homo sapiens
tgagaaggatttgtattatataattgaaaaatctgttaaa

SEQ ID NO: 36685 - DNA, 40 bp, Homo sapiens
tttaacagatttttcaattatataatacaaatccttctca

SEQ ID NO: 36686 - DNA, 40 bp, Homo sapiens
gagaaggatttgtattatataattgaaaaatctgttaaat

SEQ ID NO: 36687 - DNA, 40 bp, Homo sapiens
atttaacagatttttcaattatataatacaaatccttctc

SEQ ID NO: 36688 - DNA, 40 bp, Homo sapiens
agaaggatttgtattatataattgaaaaatctgttaaatt

SEQ ID NO: 36689 - DNA, 40 bp, Homo sapiens
aatttaacagatttttcaattatataatacaaatccttct

SEQ ID NO: 36690 - DNA, 40 bp, Homo sapiens
gaaggatttgtattatataattgaaaaatctgttaaattg

SEQ ID NO: 36691 - DNA, 40 bp, Homo sapiens
caatttaacagatttttcaattatataatacaaatccttc

SEQ ID NO: 36692 - DNA, 40 bp, Homo sapiens
aaggatttgtattatataattgaaaaatctgttaaattgt

SEQ ID NO: 36693 - DNA, 40 bp, Homo sapiens
acaatttaacagatttttcaattatataatacaaatcctt

SEQ ID NO: 36694 - DNA, 40 bp, Homo sapiens
aggatttgtattatataattgaaaaatctgttaaattgta

SEQ ID NO: 36695 - DNA, 40 bp, Homo sapiens
tacaatttaacagatttttcaattatataatacaaatcct

SEQ ID NO: 36696 - DNA, 40 bp, Homo sapiens
ggatttgtattatataattgaaaaatctgttaaattgtat

SEQ ID NO: 36697 - DNA, 40 bp, Homo sapiens
atacaatttaacagatttttcaattatataatacaaatcc

SEQ ID NO: 36698 - DNA, 40 bp, Homo sapiens
gatttgtattatataattgaaaaatctgttaaattgtatt

SEQ ID NO: 36699 - DNA, 40 bp, Homo sapiens
aatacaatttaacagatttttcaattatataatacaaatc

SEQ ID NO: 36700 - DNA, 40 bp, Homo sapiens
atttgtattatataattgaaaaatctgttaaattgtattt

SEQ ID NO: 36701 - DNA, 40 bp, Homo sapiens
aaatacaatttaacagatttttcaattatataatacaaat

SEQ ID NO: 36702 - DNA, 40 bp, Homo sapiens
tttgtattatataattgaaaaatctgttaaattgtattta

SEQ ID NO: 36703 - DNA, 40 bp, Homo sapiens
taaatacaatttaacagatttttcaattatataatacaaa

SEQ ID NO: 36704 - DNA, 40 bp, Homo sapiens
ttgtattatataattgaaaaatctgttaaattgtatttat

SEQ ID NO: 36705 - DNA, 40 bp, Homo sapiens
ataaatacaatttaacagatttttcaattatataatacaa

SEQ ID NO: 36706 - DNA, 40 bp, Homo sapiens
tgtattatataattgaaaaatctgttaaattgtatttatg

SEQ ID NO: 36707 - DNA, 40 bp, Homo sapiens
cataaatacaatttaacagatttttcaattatataataca

SEQ ID NO: 36708 - DNA, 40 bp, Homo sapiens
gtattatataattgaaaaatctgttaaattgtatttatgt

SEQ ID NO: 36709 - DNA, 40 bp, Homo sapiens
acataaatacaatttaacagatttttcaattatataatac

SEQ ID NO: 36710 - DNA, 40 bp, Homo sapiens
tattatataattgaaaaatctgttaaattgtatttatgtt

SEQ ID NO: 36711 - DNA, 40 bp, Homo sapiens
aacataaatacaatttaacagatttttcaattatataata

SEQ ID NO: 36712 - DNA, 40 bp, Homo sapiens
attatataattgaaaaatctgttaaattgtatttatgtta

SEQ ID NO: 36713 - DNA, 40 bp, Homo sapiens
taacataaatacaatttaacagatttttcaattatataat

SEQ ID NO: 36714 - DNA, 40 bp, Homo sapiens
ttatataattgaaaaatctgttaaattgtatttatgttaa

SEQ ID NO: 36715 - DNA, 40 bp, Homo sapiens
ttaacataaatacaatttaacagatttttcaattatataa

SEQ ID NO: 36716 - DNA, 40 bp, Homo sapiens
tatataattgaaaaatctgttaaattgtatttatgttaac

SEQ ID NO: 36717 - DNA, 40 bp, Homo sapiens
gttaacataaatacaatttaacagatttttcaattatata

SEQ ID NO: 36718 - DNA, 40 bp, Homo sapiens
atataattgaaaaatctgttaaattgtatttatgttaact

SEQ ID NO: 36719 - DNA, 40 bp, Homo sapiens
agttaacataaatacaatttaacagatttttcaattatat

SEQ ID NO: 36720 - DNA, 40 bp, Homo sapiens
tataattgaaaaatctgttaaattgtatttatgttaactg

SEQ ID NO: 36721 - DNA, 40 bp, Homo sapiens
cagttaacataaatacaatttaacagatttttcaattata

SEQ ID NO: 36722 - DNA, 40 bp, Homo sapiens
ataattgaaaaatctgttaaattgtatttatgttaactgc

SEQ ID NO: 36723 - DNA, 40 bp, Homo sapiens
gcagttaacataaatacaatttaacagatttttcaattat

SEQ ID NO: 36724 - DNA, 40 bp, Homo sapiens
taattgaaaaatctgttaaattgtatttatgttaactgct

SEQ ID NO: 36725 - DNA, 40 bp, Homo sapiens
agcagttaacataaatacaatttaacagatttttcaatta

SEQ ID NO: 36726 - DNA, 40 bp, Homo sapiens
aattgaaaaatctgttaaattgtatttatgttaactgctt

SEQ ID NO: 36727 - DNA, 40 bp, Homo sapiens
aagcagttaacataaatacaatttaacagatttttcaatt

SEQ ID NO: 36728 - DNA, 40 bp, Homo sapiens
attgaaaaatctgttaaattgtatttatgttaactgctta

SEQ ID NO: 36729 - DNA, 40 bp, Homo sapiens
taagcagttaacataaatacaatttaacagatttttcaat

SEQ ID NO: 36730 - DNA, 40 bp, Homo sapiens
ttgaaaaatctgttaaattgtatttatgttaactgcttaa

SEQ ID NO: 36731 - DNA, 40 bp, Homo sapiens
ttaagcagttaacataaatacaatttaacagatttttcaa

SEQ ID NO: 36732 - DNA, 40 bp, Homo sapiens
tgaaaaatctgttaaattgtatttatgttaactgcttaat

SEQ ID NO: 36733 - DNA, 40 bp, Homo sapiens
attaagcagttaacataaatacaatttaacagatttttca

SEQ ID NO: 36734 - DNA, 40 bp, Homo sapiens
gaaaaatctgttaaattgtatttatgttaactgcttaatt

SEQ ID NO: 36735 - DNA, 40 bp, Homo sapiens
aattaagcagttaacataaatacaatttaacagatttttc

SEQ ID NO: 36736 - DNA, 40 bp, Homo sapiens
aaaaatctgttaaattgtatttatgttaactgcttaattc

SEQ ID NO: 36737 - DNA, 40 bp, Homo sapiens
gaattaagcagttaacataaatacaatttaacagattttt

SEQ ID NO: 36738 - DNA, 40 bp, Homo sapiens
aaaatctgttaaattgtatttatgttaactgcttaattct

SEQ ID NO: 36739 - DNA, 40 bp, Homo sapiens
agaattaagcagttaacataaatacaatttaacagatttt

SEQ ID NO: 36740 - DNA, 40 bp, Homo sapiens
aaatctgttaaattgtatttatgttaactgcttaattcta

SEQ ID NO: 36741 - DNA, 40 bp, Homo sapiens
tagaattaagcagttaacataaatacaatttaacagattt

SEQ ID NO: 36742 - DNA, 40 bp, Homo sapiens
aatctgttaaattgtatttatgttaactgcttaattctaa

SEQ ID NO: 36743 - DNA, 40 bp, Homo sapiens
ttagaattaagcagttaacataaatacaatttaacagatt

SEQ ID NO: 36744 - DNA, 40 bp, Homo sapiens
atctgttaaattgtatttatgttaactgcttaattctaat

SEQ ID NO: 36745 - DNA, 40 bp, Homo sapiens
attagaattaagcagttaacataaatacaatttaacagat

SEQ ID NO: 36746 - DNA, 40 bp, Homo sapiens
tctgttaaattgtatttatgttaactgcttaattctaata

SEQ ID NO: 36747 - DNA, 40 bp, Homo sapiens
tattagaattaagcagttaacataaatacaatttaacaga

SEQ ID NO: 36748 - DNA, 40 bp, Homo sapiens
ctgttaaattgtatttatgttaactgcttaattctaataa

SEQ ID NO: 36749 - DNA, 40 bp, Homo sapiens
ttattagaattaagcagttaacataaatacaatttaacag

SEQ ID NO: 36750 - DNA, 40 bp, Homo sapiens
tgttaaattgtatttatgttaactgcttaattctaataaa

SEQ ID NO: 36751 - DNA, 40 bp, Homo sapiens
tttattagaattaagcagttaacataaatacaatttaaca

SEQ ID NO: 36752 - DNA, 40 bp, Homo sapiens
gttaaattgtatttatgttaactgcttaattctaataaaa

SEQ ID NO: 36753 - DNA, 40 bp, Homo sapiens
ttttattagaattaagcagttaacataaatacaatttaac

SEQ ID NO: 36754 - DNA, 40 bp, Homo sapiens
ttaaattgtatttatgttaactgcttaattctaataaaat

SEQ ID NO: 36755 - DNA, 40 bp, Homo sapiens
attttattagaattaagcagttaacataaatacaatttaa

SEQ ID NO: 36756 - DNA, 40 bp, Homo sapiens
taaattgtatttatgttaactgcttaattctaataaaatt

SEQ ID NO: 36757 - DNA, 40 bp, Homo sapiens
aattttattagaattaagcagttaacataaatacaattta

SEQ ID NO: 36758 - DNA, 40 bp, Homo sapiens
aaattgtatttatgttaactgcttaattctaataaaattt

SEQ ID NO: 36759 - DNA, 40 bp, Homo sapiens
aaattttattagaattaagcagttaacataaatacaattt

SEQ ID NO: 36760 - DNA, 40 bp, Homo sapiens
aattgtatttatgttaactgcttaattctaataaaatttc

SEQ ID NO: 36761 - DNA, 40 bp, Homo sapiens
gaaattttattagaattaagcagttaacataaatacaatt

SEQ ID NO: 36762 - DNA, 40 bp, Homo sapiens
attgtatttatgttaactgcttaattctaataaaatttcc

SEQ ID NO: 36763 - DNA, 40 bp, Homo sapiens
ggaaattttattagaattaagcagttaacataaatacaat

SEQ ID NO: 36764 - DNA, 40 bp, Homo sapiens
ttgtatttatgttaactgcttaattctaataaaatttcca

SEQ ID NO: 36765 - DNA, 40 bp, Homo sapiens
tggaaattttattagaattaagcagttaacataaatacaa

SEQ ID NO: 36766 - DNA, 40 bp, Homo sapiens
tgtatttatgttaactgcttaattctaataaaatttccat

SEQ ID NO: 36767 - DNA, 40 bp, Homo sapiens
atggaaattttattagaattaagcagttaacataaataca

SEQ ID NO: 36768 - DNA, 40 bp, Homo sapiens
gtatttatgttaactgcttaattctaataaaatttccatt

SEQ ID NO: 36769 - DNA, 40 bp, Homo sapiens
aatggaaattttattagaattaagcagttaacataaatac

SEQ ID NO: 36770 - DNA, 40 bp, Homo sapiens
tatttatgttaactgcttaattctaataaaatttccattc

SEQ ID NO: 36771 - DNA, 40 bp, Homo sapiens
gaatggaaattttattagaattaagcagttaacataaata

SEQ ID NO: 36772 - DNA, 40 bp, Homo sapiens
atttatgttaactgcttaattctaataaaatttccattca

SEQ ID NO: 36773 - DNA, 40 bp, Homo sapiens
tgaatggaaattttattagaattaagcagttaacataaat

SEQ ID NO: 36774 - DNA, 40 bp, Homo sapiens
tttatgttaactgcttaattctaataaaatttccattcat

SEQ ID NO: 36775 - DNA, 40 bp, Homo sapiens
atgaatggaaattttattagaattaagcagttaacataaa

SEQ ID NO: 36776 - DNA, 40 bp, Homo sapiens
ttatgttaactgcttaattctaataaaatttccattcatt

SEQ ID NO: 36777 - DNA, 40 bp, Homo sapiens
aatgaatggaaattttattagaattaagcagttaacataa

SEQ ID NO: 36778 - DNA, 40 bp, Homo sapiens
tatgttaactgcttaattctaataaaatttccattcattt

SEQ ID NO: 36779 - DNA, 40 bp, Homo sapiens
aaatgaatggaaattttattagaattaagcagttaacata

SEQ ID NO: 36780 - DNA, 40 bp, Homo sapiens
atgttaactgcttaattctaataaaatttccattcatttt

SEQ ID NO: 36781 - DNA, 40 bp, Homo sapiens
aaaatgaatggaaattttattagaattaagcagttaacat

SEQ ID NO: 36782 - DNA, 40 bp, Homo sapiens
tgttaactgcttaattctaataaaatttccattcattttt

SEQ ID NO: 36783 - DNA, 40 bp, Homo sapiens
aaaaatgaatggaaattttattagaattaagcagttaaca

SEQ ID NO: 36784 - DNA, 40 bp, Homo sapiens
gttaactgcttaattctaataaaatttccattcatttttt

SEQ ID NO: 36785 - DNA, 40 bp, Homo sapiens
aaaaaatgaatggaaattttattagaattaagcagttaac

SEQ ID NO: 36786 - DNA, 40 bp, Homo sapiens
ttaactgcttaattctaataaaatttccattcatttttta

SEQ ID NO: 36787 - DNA, 40 bp, Homo sapiens
taaaaaatgaatggaaattttattagaattaagcagttaa

SEQ ID NO: 36788 - DNA, 40 bp, Homo sapiens
taactgcttaattctaataaaatttccattcattttttag

SEQ ID NO: 36789 - DNA, 40 bp, Homo sapiens
ctaaaaaatgaatggaaattttattagaattaagcagtta

SEQ ID NO: 36790 - DNA, 40 bp, Homo sapiens
aactgcttaattctaataaaatttccattcattttttagt

SEQ ID NO: 36791 - DNA, 40 bp, Homo sapiens
actaaaaaatgaatggaaattttattagaattaagcagtt

SEQ ID NO: 36792 - DNA, 40 bp, Homo sapiens
actgcttaattctaataaaatttccattcattttttagta

SEQ ID NO: 36793 - DNA, 40 bp, Homo sapiens
tactaaaaaatgaatggaaattttattagaattaagcagt

SEQ ID NO: 36794 - DNA, 40 bp, Homo sapiens
ctgcttaattctaataaaatttccattcattttttagtat

SEQ ID NO: 36795 - DNA, 40 bp, Homo sapiens
atactaaaaaatgaatggaaattttattagaattaagcag

SEQ ID NO: 36796 - DNA, 40 bp, Homo sapiens
tgcttaattctaataaaatttccattcattttttagtatc

SEQ ID NO: 36797 - DNA, 40 bp, Homo sapiens
gatactaaaaaatgaatggaaattttattagaattaagca

SEQ ID NO: 36798 - DNA, 40 bp, Homo sapiens
gcttaattctaataaaatttccattcattttttagtatct

SEQ ID NO: 36799 - DNA, 40 bp, Homo sapiens
agatactaaaaaatgaatggaaattttattagaattaagc

SEQ ID NO: 36800 - DNA, 40 bp, Homo sapiens
cttaattctaataaaatttccattcattttttagtatctg

SEQ ID NO: 36801 - DNA, 40 bp, Homo sapiens
cagatactaaaaaatgaatggaaattttattagaattaag

SEQ ID NO: 36802 - DNA, 40 bp, Homo sapiens
ttaattctaataaaatttccattcattttttagtatctgc

SEQ ID NO: 36803 - DNA, 40 bp, Homo sapiens
gcagatactaaaaaatgaatggaaattttattagaattaa

SEQ ID NO: 36804 - DNA, 40 bp, Homo sapiens
taattctaataaaatttccattcattttttagtatctgca

SEQ ID NO: 36805 - DNA, 40 bp, Homo sapiens
tgcagatactaaaaaatgaatggaaattttattagaatta

SEQ ID NO: 36806 - DNA, 40 bp, Homo sapiens
aattctaataaaatttccattcattttttagtatctgcat

SEQ ID NO: 36807 - DNA, 40 bp, Homo sapiens
atgcagatactaaaaaatgaatggaaattttattagaatt

SEQ ID NO: 36808 - DNA, 40 bp, Homo sapiens
attctaataaaatttccattcattttttagtatctgcata

SEQ ID NO: 36809 - DNA, 40 bp, Homo sapiens
tatgcagatactaaaaaatgaatggaaattttattagaat

SEQ ID NO: 36810 - DNA, 40 bp, Homo sapiens
ttctaataaaatttccattcattttttagtatctgcatat

SEQ ID NO: 36811 - DNA, 40 bp, Homo sapiens
atatgcagatactaaaaaatgaatggaaattttattagaa

SEQ ID NO: 36812 - DNA, 40 bp, Homo sapiens
tctaataaaatttccattcattttttagtatctgcatata

SEQ ID NO: 36813 - DNA, 40 bp, Homo sapiens
tatatgcagatactaaaaaatgaatggaaattttattaga

SEQ ID NO: 36814 - DNA, 40 bp, Homo sapiens
ctaataaaatttccattcattttttagtatctgcatatat

SEQ ID NO: 36815 - DNA, 40 bp, Homo sapiens
atatatgcagatactaaaaaatgaatggaaattttattag

SEQ ID NO: 36816 - DNA, 40 bp, Homo sapiens
taataaaatttccattcattttttagtatctgcatatatt

SEQ ID NO: 36817 - DNA, 40 bp, Homo sapiens
aatatatgcagatactaaaaaatgaatggaaattttatta

SEQ ID NO: 36818 - DNA, 40 bp, Homo sapiens
aataaaatttccattcattttttagtatctgcatatattt

SEQ ID NO: 36819 - DNA, 40 bp, Homo sapiens
aaatatatgcagatactaaaaaatgaatggaaattttatt

SEQ ID NO: 36820 - DNA, 40 bp, Homo sapiens
ataaaatttccattcattttttagtatctgcatatattta

SEQ ID NO: 36821 - DNA, 40 bp, Homo sapiens
taaatatatgcagatactaaaaaatgaatggaaattttat

SEQ ID NO: 36822 - DNA, 40 bp, Homo sapiens
taaaatttccattcattttttagtatctgcatatatttac

SEQ ID NO: 36823 - DNA, 40 bp, Homo sapiens
gtaaatatatgcagatactaaaaaatgaatggaaatttta

SEQ ID NO: 36824 - DNA, 40 bp, Homo sapiens
aaaatttccattcattttttagtatctgcatatatttaca

SEQ ID NO: 36825 - DNA, 40 bp, Homo sapiens
tgtaaatatatgcagatactaaaaaatgaatggaaatttt

SEQ ID NO: 36826 - DNA, 40 bp, Homo sapiens
aaatttccattcattttttagtatctgcatatatttacat

SEQ ID NO: 36827 - DNA, 40 bp, Homo sapiens
atgtaaatatatgcagatactaaaaaatgaatggaaattt

SEQ ID NO: 36828 - DNA, 40 bp, Homo sapiens
aatttccattcattttttagtatctgcatatatttacatc

SEQ ID NO: 36829 - DNA, 40 bp, Homo sapiens
gatgtaaatatatgcagatactaaaaaatgaatggaaatt

SEQ ID NO: 36830 - DNA, 40 bp, Homo sapiens
atttccattcattttttagtatctgcatatatttacatca

SEQ ID NO: 36831 - DNA, 40 bp, Homo sapiens
tgatgtaaatatatgcagatactaaaaaatgaatggaaat

SEQ ID NO: 36832 - DNA, 40 bp, Homo sapiens
tttccattcattttttagtatctgcatatatttacatcaa

SEQ ID NO: 36833 - DNA, 40 bp, Homo sapiens
ttgatgtaaatatatgcagatactaaaaaatgaatggaaa

SEQ ID NO: 36834 - DNA, 40 bp, Homo sapiens
ttccattcattttttagtatctgcatatatttacatcaaa

SEQ ID NO: 36835 - DNA, 40 bp, Homo sapiens
tttgatgtaaatatatgcagatactaaaaaatgaatggaa

SEQ ID NO: 36836 - DNA, 40 bp, Homo sapiens
tccattcattttttagtatctgcatatatttacatcaaat

SEQ ID NO: 36837 - DNA, 40 bp, Homo sapiens
atttgatgtaaatatatgcagatactaaaaaatgaatgga

SEQ ID NO: 36838 - DNA, 40 bp, Homo sapiens
ccattcattttttagtatctgcatatatttacatcaaatg

SEQ ID NO: 36839 - DNA, 40 bp, Homo sapiens
catttgatgtaaatatatgcagatactaaaaaatgaatgg

SEQ ID NO: 36840 - DNA, 40 bp, Homo sapiens
cattcattttttagtatctgcatatatttacatcaaatgg

SEQ ID NO: 36841 - DNA, 40 bp, Homo sapiens
ccatttgatgtaaatatatgcagatactaaaaaatgaatg

SEQ ID NO: 36842 - DNA, 40 bp, Homo sapiens
attcattttttagtatctgcatatatttacatcaaatgga

SEQ ID NO: 36843 - DNA, 40 bp, Homo sapiens
tccatttgatgtaaatatatgcagatactaaaaaatgaat

SEQ ID NO: 36844 - DNA, 40 bp, Homo sapiens
ttcattttttagtatctgcatatatttacatcaaatggat

SEQ ID NO: 36845 - DNA, 40 bp, Homo sapiens
atccatttgatgtaaatatatgcagatactaaaaaatgaa

SEQ ID NO: 36846 - DNA, 40 bp, Homo sapiens
tcattttttagtatctgcatatatttacatcaaatggatt

SEQ ID NO: 36847 - DNA, 40 bp, Homo sapiens
aatccatttgatgtaaatatatgcagatactaaaaaatga

SEQ ID NO: 36848 - DNA, 40 bp, Homo sapiens
cattttttagtatctgcatatatttacatcaaatggattc

SEQ ID NO: 36849 - DNA, 40 bp, Homo sapiens
gaatccatttgatgtaaatatatgcagatactaaaaaatg

SEQ ID NO: 36850 - DNA, 40 bp, Homo sapiens
attttttagtatctgcatatatttacatcaaatggattca

SEQ ID NO: 36851 - DNA, 40 bp, Homo sapiens
tgaatccatttgatgtaaatatatgcagatactaaaaaat

SEQ ID NO: 36852 - DNA, 40 bp, Homo sapiens
ttttttagtatctgcatatatttacatcaaatggattcat

SEQ ID NO: 36853 - DNA, 40 bp, Homo sapiens
atgaatccatttgatgtaaatatatgcagatactaaaaaa

SEQ ID NO: 36854 - DNA, 40 bp, Homo sapiens
tttttagtatctgcatatatttacatcaaatggattcatt

SEQ ID NO: 36855 - DNA, 40 bp, Homo sapiens
aatgaatccatttgatgtaaatatatgcagatactaaaaa

SEQ ID NO: 36856 - DNA, 40 bp, Homo sapiens
ttttagtatctgcatatatttacatcaaatggattcattc

SEQ ID NO: 36857 - DNA, 40 bp, Homo sapiens
gaatgaatccatttgatgtaaatatatgcagatactaaaa

SEQ ID NO: 36858 - DNA, 40 bp, Homo sapiens
tttagtatctgcatatatttacatcaaatggattcattca

SEQ ID NO: 36859 - DNA, 40 bp, Homo sapiens
tgaatgaatccatttgatgtaaatatatgcagatactaaa

SEQ ID NO: 36860 - DNA, 40 bp, Homo sapiens
ttagtatctgcatatatttacatcaaatggattcattcac

SEQ ID NO: 36861 - DNA, 40 bp, Homo sapiens
gtgaatgaatccatttgatgtaaatatatgcagatactaa

SEQ ID NO: 36862 - DNA, 40 bp, Homo sapiens
tagtatctgcatatatttacatcaaatggattcattcact

SEQ ID NO: 36863 - DNA, 40 bp, Homo sapiens
agtgaatgaatccatttgatgtaaatatatgcagatacta

SEQ ID NO: 36864 - DNA, 40 bp, Homo sapiens
agtatctgcatatatttacatcaaatggattcattcactt

SEQ ID NO: 36865 - DNA, 40 bp, Homo sapiens
aagtgaatgaatccatttgatgtaaatatatgcagatact

SEQ ID NO: 36866 - DNA, 40 bp, Homo sapiens
gtatctgcatatatttacatcaaatggattcattcactta

SEQ ID NO: 36867 - DNA, 40 bp, Homo sapiens
taagtgaatgaatccatttgatgtaaatatatgcagatac

SEQ ID NO: 36868 - DNA, 40 bp, Homo sapiens
tatctgcatatatttacatcaaatggattcattcacttat

SEQ ID NO: 36869 - DNA, 40 bp, Homo sapiens
ataagtgaatgaatccatttgatgtaaatatatgcagata

SEQ ID NO: 36870 - DNA, 40 bp, Homo sapiens
atctgcatatatttacatcaaatggattcattcacttatt

SEQ ID NO: 36871 - DNA, 40 bp, Homo sapiens
aataagtgaatgaatccatttgatgtaaatatatgcagat

SEQ ID NO: 36872 - DNA, 40 bp, Homo sapiens
tctgcatatatttacatcaaatggattcattcacttattt

SEQ ID NO: 36873 - DNA, 40 bp, Homo sapiens
aaataagtgaatgaatccatttgatgtaaatatatgcaga

SEQ ID NO: 36874 - DNA, 40 bp, Homo sapiens
ctgcatatatttacatcaaatggattcattcacttattta

SEQ ID NO: 36875 - DNA, 40 bp, Homo sapiens
taaataagtgaatgaatccatttgatgtaaatatatgcag

SEQ ID NO: 36876 - DNA, 40 bp, Homo sapiens
tgcatatatttacatcaaatggattcattcacttatttaa

SEQ ID NO: 36877 - DNA, 40 bp, Homo sapiens
ttaaataagtgaatgaatccatttgatgtaaatatatgca

SEQ ID NO: 36878 - DNA, 40 bp, Homo sapiens
gcatatatttacatcaaatggattcattcacttatttaag

SEQ ID NO: 36879 - DNA, 40 bp, Homo sapiens
cttaaataagtgaatgaatccatttgatgtaaatatatgc

SEQ ID NO: 36880 - DNA, 40 bp, Homo sapiens
catatatttacatcaaatggattcattcacttatttaaga

SEQ ID NO: 36881 - DNA, 40 bp, Homo sapiens
tcttaaataagtgaatgaatccatttgatgtaaatatatg

SEQ ID NO: 36882 - DNA, 40 bp, Homo sapiens
atatatttacatcaaatggattcattcacttatttaagag

SEQ ID NO: 36883 - DNA, 40 bp, Homo sapiens
ctcttaaataagtgaatgaatccatttgatgtaaatatat

SEQ ID NO: 36884 - DNA, 40 bp, Homo sapiens
tatatttacatcaaatggattcattcacttatttaagagg

SEQ ID NO: 36885 - DNA, 40 bp, Homo sapiens
cctcttaaataagtgaatgaatccatttgatgtaaatata

SEQ ID NO: 36886 - DNA, 40 bp, Homo sapiens
atatttacatcaaatggattcattcacttatttaagaggc

SEQ ID NO: 36887 - DNA, 40 bp, Homo sapiens
gcctcttaaataagtgaatgaatccatttgatgtaaatat

SEQ ID NO: 36888 - DNA, 40 bp, Homo sapiens
tatttacatcaaatggattcattcacttatttaagaggca

SEQ ID NO: 36889 - DNA, 40 bp, Homo sapiens
tgcctcttaaataagtgaatgaatccatttgatgtaaata

SEQ ID NO: 36890 - DNA, 40 bp, Homo sapiens
atttacatcaaatggattcattcacttatttaagaggcag

SEQ ID NO: 36891 - DNA, 40 bp, Homo sapiens
ctgcctcttaaataagtgaatgaatccatttgatgtaaat

SEQ ID NO: 36892 - DNA, 40 bp, Homo sapiens
tttacatcaaatggattcattcacttatttaagaggcagt

SEQ ID NO: 36893 - DNA, 40 bp, Homo sapiens
actgcctcttaaataagtgaatgaatccatttgatgtaaa

SEQ ID NO: 36894 - DNA, 40 bp, Homo sapiens
ttacatcaaatggattcattcacttatttaagaggcagta

SEQ ID NO: 36895 - DNA, 40 bp, Homo sapiens
tactgcctcttaaataagtgaatgaatccatttgatgtaa

SEQ ID NO: 36896 - DNA, 40 bp, Homo sapiens
tacatcaaatggattcattcacttatttaagaggcagtac

SEQ ID NO: 36897 - DNA, 40 bp, Homo sapiens
gtactgcctcttaaataagtgaatgaatccatttgatgta

SEQ ID NO: 36898 - DNA, 40 bp, Homo sapiens
acatcaaatggattcattcacttatttaagaggcagtact

SEQ ID NO: 36899 - DNA, 40 bp, Homo sapiens
agtactgcctcttaaataagtgaatgaatccatttgatgt

SEQ ID NO: 36900 - DNA, 40 bp, Homo sapiens
catcaaatggattcattcacttatttaagaggcagtacta

SEQ ID NO: 36901 - DNA, 40 bp, Homo sapiens
tagtactgcctcttaaataagtgaatgaatccatttgatg

SEQ ID NO: 36902 - DNA, 40 bp, Homo sapiens
atcaaatggattcattcacttatttaagaggcagtactaa

SEQ ID NO: 36903 - DNA, 40 bp, Homo sapiens
ttagtactgcctcttaaataagtgaatgaatccatttgat

SEQ ID NO: 36904 - DNA, 40 bp, Homo sapiens
tcaaatggattcattcacttatttaagaggcagtactaat

SEQ ID NO: 36905 - DNA, 40 bp, Homo sapiens
attagtactgcctcttaaataagtgaatgaatccatttga

SEQ ID NO: 36906 - DNA, 40 bp, Homo sapiens
caaatggattcattcacttatttaagaggcagtactaatt

SEQ ID NO: 36907 - DNA, 40 bp, Homo sapiens
aattagtactgcctcttaaataagtgaatgaatccatttg

SEQ ID NO: 36908 - DNA, 40 bp, Homo sapiens
aaatggattcattcacttatttaagaggcagtactaatta

SEQ ID NO: 36909 - DNA, 40 bp, Homo sapiens
taattagtactgcctcttaaataagtgaatgaatccattt

SEQ ID NO: 36910 - DNA, 40 bp, Homo sapiens
aatggattcattcacttatttaagaggcagtactaattac

SEQ ID NO: 36911 - DNA, 40 bp, Homo sapiens
gtaattagtactgcctcttaaataagtgaatgaatccatt

SEQ ID NO: 36912 - DNA, 40 bp, Homo sapiens
atggattcattcacttatttaagaggcagtactaattacc

SEQ ID NO: 36913 - DNA, 40 bp, Homo sapiens
ggtaattagtactgcctcttaaataagtgaatgaatccat

SEQ ID NO: 36914 - DNA, 40 bp, Homo sapiens
tggattcattcacttatttaagaggcagtactaattacct

SEQ ID NO: 36915 - DNA, 40 bp, Homo sapiens
aggtaattagtactgcctcttaaataagtgaatgaatcca

SEQ ID NO: 36916 - DNA, 40 bp, Homo sapiens
ggattcattcacttatttaagaggcagtactaattaccta

SEQ ID NO: 36917 - DNA, 40 bp, Homo sapiens
taggtaattagtactgcctcttaaataagtgaatgaatcc

SEQ ID NO: 36918 - DNA, 40 bp, Homo sapiens
gattcattcacttatttaagaggcagtactaattacctat

SEQ ID NO: 36919 - DNA, 40 bp, Homo sapiens
ataggtaattagtactgcctcttaaataagtgaatgaatc

SEQ ID NO: 36920 - DNA, 40 bp, Homo sapiens
attcattcacttatttaagaggcagtactaattacctata

SEQ ID NO: 36921 - DNA, 40 bp, Homo sapiens
tataggtaattagtactgcctcttaaataagtgaatgaat

SEQ ID NO: 36922 - DNA, 40 bp, Homo sapiens
ttcattcacttatttaagaggcagtactaattacctatag

SEQ ID NO: 36923 - DNA, 40 bp, Homo sapiens
ctataggtaattagtactgcctcttaaataagtgaatgaa

SEQ ID NO: 36924 - DNA, 40 bp, Homo sapiens
tcattcacttatttaagaggcagtactaattacctatagc

SEQ ID NO: 36925 - DNA, 40 bp, Homo sapiens
gctataggtaattagtactgcctcttaaataagtgaatga

SEQ ID NO: 36926 - DNA, 40 bp, Homo sapiens
cattcacttatttaagaggcagtactaattacctatagcg

SEQ ID NO: 36927 - DNA, 40 bp, Homo sapiens
cgctataggtaattagtactgcctcttaaataagtgaatg

SEQ ID NO: 36928 - DNA, 40 bp, Homo sapiens
attcacttatttaagaggcagtactaattacctatagcgt

SEQ ID NO: 36929 - DNA, 40 bp, Homo sapiens
acgctataggtaattagtactgcctcttaaataagtgaat

SEQ ID NO: 36930 - DNA, 40 bp, Homo sapiens
ttcacttatttaagaggcagtactaattacctatagcgtt

SEQ ID NO: 36931 - DNA, 40 bp, Homo sapiens
aacgctataggtaattagtactgcctcttaaataagtgaa

SEQ ID NO: 36932 - DNA, 40 bp, Homo sapiens
tcacttatttaagaggcagtactaattacctatagcgttc

SEQ ID NO: 36933 - DNA, 40 bp, Homo sapiens
gaacgctataggtaattagtactgcctcttaaataagtga

SEQ ID NO: 36934 - DNA, 40 bp, Homo sapiens
cacttatttaagaggcagtactaattacctatagcgttca

SEQ ID NO: 36935 - DNA, 40 bp, Homo sapiens
tgaacgctataggtaattagtactgcctcttaaataagtg

SEQ ID NO: 36936 - DNA, 40 bp, Homo sapiens
acttatttaagaggcagtactaattacctatagcgttcaa

SEQ ID NO: 36937 - DNA, 40 bp, Homo sapiens
ttgaacgctataggtaattagtactgcctcttaaataagt

SEQ ID NO: 36938 - DNA, 40 bp, Homo sapiens
cttatttaagaggcagtactaattacctatagcgttcaag

SEQ ID NO: 36939 - DNA, 40 bp, Homo sapiens
cttgaacgctataggtaattagtactgcctcttaaataag

SEQ ID NO: 36940 - DNA, 40 bp, Homo sapiens
ttatttaagaggcagtactaattacctatagcgttcaaga

SEQ ID NO: 36941 - DNA, 40 bp, Homo sapiens
tcttgaacgctataggtaattagtactgcctcttaaataa

SEQ ID NO: 36942 - DNA, 40 bp, Homo sapiens
tatttaagaggcagtactaattacctatagcgttcaagac

SEQ ID NO: 36943 - DNA, 40 bp, Homo sapiens
gtcttgaacgctataggtaattagtactgcctcttaaata

SEQ ID NO: 36944 - DNA, 40 bp, Homo sapiens
atttaagaggcagtactaattacctatagcgttcaagact

SEQ ID NO: 36945 - DNA, 40 bp, Homo sapiens
agtcttgaacgctataggtaattagtactgcctcttaaat

SEQ ID NO: 36946 - DNA, 40 bp, Homo sapiens
tttaagaggcagtactaattacctatagcgttcaagactg

SEQ ID NO: 36947 - DNA, 40 bp, Homo sapiens
cagtcttgaacgctataggtaattagtactgcctcttaaa

SEQ ID NO: 36948 - DNA, 40 bp, Homo sapiens
ttaagaggcagtactaattacctatagcgttcaagactgt

SEQ ID NO: 36949 - DNA, 40 bp, Homo sapiens
acagtcttgaacgctataggtaattagtactgcctcttaa

SEQ ID NO: 36950 - DNA, 40 bp, Homo sapiens
taagaggcagtactaattacctatagcgttcaagactgtt

SEQ ID NO: 36951 - DNA, 40 bp, Homo sapiens
aacagtcttgaacgctataggtaattagtactgcctctta

SEQ ID NO: 36952 - DNA, 40 bp, Homo sapiens
aagaggcagtactaattacctatagcgttcaagactgtta

SEQ ID NO: 36953 - DNA, 40 bp, Homo sapiens
taacagtcttgaacgctataggtaattagtactgcctctt

SEQ ID NO: 36954 - DNA, 40 bp, Homo sapiens
agaggcagtactaattacctatagcgttcaagactgttag

SEQ ID NO: 36955 - DNA, 40 bp, Homo sapiens
ctaacagtcttgaacgctataggtaattagtactgcctct

SEQ ID NO: 36956 - DNA, 40 bp, Homo sapiens
gaggcagtactaattacctatagcgttcaagactgttagg

SEQ ID NO: 36957 - DNA, 40 bp, Homo sapiens
cctaacagtcttgaacgctataggtaattagtactgcctc

SEQ ID NO: 36958 - DNA, 40 bp, Homo sapiens
aggcagtactaattacctatagcgttcaagactgttaggt

SEQ ID NO: 36959 - DNA, 40 bp, Homo sapiens
acctaacagtcttgaacgctataggtaattagtactgcct

SEQ ID NO: 36960 - DNA, 40 bp, Homo sapiens
ggcagtactaattacctatagcgttcaagactgttaggta

SEQ ID NO: 36961 - DNA, 40 bp, Homo sapiens
tacctaacagtcttgaacgctataggtaattagtactgcc

SEQ ID NO: 36962 - DNA, 40 bp, Homo sapiens
gcagtactaattacctatagcgttcaagactgttaggtag

SEQ ID NO: 36963 - DNA, 40 bp, Homo sapiens
ctacctaacagtcttgaacgctataggtaattagtactgc

SEQ ID NO: 36964 - DNA, 40 bp, Homo sapiens
cagtactaattacctatagcgttcaagactgttaggtaga

SEQ ID NO: 36965 - DNA, 40 bp, Homo sapiens
tctacctaacagtcttgaacgctataggtaattagtactg

SEQ ID NO: 36966 - DNA, 40 bp, Homo sapiens
agtactaattacctatagcgttcaagactgttaggtagag

SEQ ID NO: 36967 - DNA, 40 bp, Homo sapiens
ctctacctaacagtcttgaacgctataggtaattagtact

SEQ ID NO: 36968 - DNA, 40 bp, Homo sapiens
gtactaattacctatagcgttcaagactgttaggtagagg

SEQ ID NO: 36969 - DNA, 40 bp, Homo sapiens
cctctacctaacagtcttgaacgctataggtaattagtac

SEQ ID NO: 36970 - DNA, 40 bp, Homo sapiens
tactaattacctatagcgttcaagactgttaggtagaggg

SEQ ID NO: 36971 - DNA, 40 bp, Homo sapiens
ccctctacctaacagtcttgaacgctataggtaattagta

SEQ ID NO: 36972 - DNA, 40 bp, Homo sapiens
actaattacctatagcgttcaagactgttaggtagagggt

SEQ ID NO: 36973 - DNA, 40 bp, Homo sapiens
accctctacctaacagtcttgaacgctataggtaattagt

SEQ ID NO: 36974 - DNA, 40 bp, Homo sapiens
ctaattacctatagcgttcaagactgttaggtagagggtg

SEQ ID NO: 36975 - DNA, 40 bp, Homo sapiens
caccctctacctaacagtcttgaacgctataggtaattag

SEQ ID NO: 36976 - DNA, 40 bp, Homo sapiens
taattacctatagcgttcaagactgttaggtagagggtgt

SEQ ID NO: 36977 - DNA, 40 bp, Homo sapiens
acaccctctacctaacagtcttgaacgctataggtaatta

SEQ ID NO: 36978 - DNA, 40 bp, Homo sapiens
aattacctatagcgttcaagactgttaggtagagggtgtg

SEQ ID NO: 36979 - DNA, 40 bp, Homo sapiens
cacaccctctacctaacagtcttgaacgctataggtaatt

SEQ ID NO: 36980 - DNA, 40 bp, Homo sapiens
attacctatagcgttcaagactgttaggtagagggtgtgt

SEQ ID NO: 36981 - DNA, 40 bp, Homo sapiens
acacaccctctacctaacagtcttgaacgctataggtaat

SEQ ID NO: 36982 - DNA, 40 bp, Homo sapiens
ttacctatagcgttcaagactgttaggtagagggtgtgta

SEQ ID NO: 36983 - DNA, 40 bp, Homo sapiens
tacacaccctctacctaacagtcttgaacgctataggtaa

SEQ ID NO: 36984 - DNA, 40 bp, Homo sapiens
tacctatagcgttcaagactgttaggtagagggtgtgtag

SEQ ID NO: 36985 - DNA, 40 bp, Homo sapiens
ctacacaccctctacctaacagtcttgaacgctataggta

SEQ ID NO: 36986 - DNA, 40 bp, Homo sapiens
acctatagcgttcaagactgttaggtagagggtgtgtagt

SEQ ID NO: 36987 - DNA, 40 bp, Homo sapiens
actacacaccctctacctaacagtcttgaacgctataggt

SEQ ID NO: 36988 - DNA, 40 bp, Homo sapiens
cctatagcgttcaagactgttaggtagagggtgtgtagtg

SEQ ID NO: 36989 - DNA, 40 bp, Homo sapiens
cactacacaccctctacctaacagtcttgaacgctatagg

SEQ ID NO: 36990 - DNA, 40 bp, Homo sapiens
ctatagcgttcaagactgttaggtagagggtgtgtagtgg

SEQ ID NO: 36991 - DNA, 40 bp, Homo sapiens
ccactacacaccctctacctaacagtcttgaacgctatag

SEQ ID NO: 36992 - DNA, 40 bp, Homo sapiens
tatagcgttcaagactgttaggtagagggtgtgtagtggt

SEQ ID NO: 36993 - DNA, 40 bp, Homo sapiens
accactacacaccctctacctaacagtcttgaacgctata

SEQ ID NO: 36994 - DNA, 40 bp, Homo sapiens
atagcgttcaagactgttaggtagagggtgtgtagtggtg

SEQ ID NO: 36995 - DNA, 40 bp, Homo sapiens
caccactacacaccctctacctaacagtcttgaacgctat

SEQ ID NO: 36996 - DNA, 40 bp, Homo sapiens
tagcgttcaagactgttaggtagagggtgtgtagtggtga

SEQ ID NO: 36997 - DNA, 40 bp, Homo sapiens
tcaccactacacaccctctacctaacagtcttgaacgcta

SEQ ID NO: 36998 - DNA, 40 bp, Homo sapiens
agcgttcaagactgttaggtagagggtgtgtagtggtgag

SEQ ID NO: 36999 - DNA, 40 bp, Homo sapiens
ctcaccactacacaccctctacctaacagtcttgaacgct

SEQ ID NO: 37000 - DNA, 40 bp, Homo sapiens
gcgttcaagactgttaggtagagggtgtgtagtggtgagt

SEQ ID NO: 37001 - DNA, 40 bp, Homo sapiens
actcaccactacacaccctctacctaacagtcttgaacgc

SEQ ID NO: 37002 - DNA, 40 bp, Homo sapiens
cgttcaagactgttaggtagagggtgtgtagtggtgagta

SEQ ID NO: 37003 - DNA, 40 bp, Homo sapiens
tactcaccactacacaccctctacctaacagtcttgaacg

SEQ ID NO: 37004 - DNA, 40 bp, Homo sapiens
gttcaagactgttaggtagagggtgtgtagtggtgagtac

SEQ ID NO: 37005 - DNA, 40 bp, Homo sapiens
gtactcaccactacacaccctctacctaacagtcttgaac

SEQ ID NO: 37006 - DNA, 40 bp, Homo sapiens
ttcaagactgttaggtagagggtgtgtagtggtgagtaca

SEQ ID NO: 37007 - DNA, 40 bp, Homo sapiens
tgtactcaccactacacaccctctacctaacagtcttgaa

SEQ ID NO: 37008 - DNA, 40 bp, Homo sapiens
tcaagactgttaggtagagggtgtgtagtggtgagtacaa

SEQ ID NO: 37009 - DNA, 40 bp, Homo sapiens
ttgtactcaccactacacaccctctacctaacagtcttga

SEQ ID NO: 37010 - DNA, 40 bp, Homo sapiens
caagactgttaggtagagggtgtgtagtggtgagtacaac

SEQ ID NO: 37011 - DNA, 40 bp, Homo sapiens
gttgtactcaccactacacaccctctacctaacagtcttg

SEQ ID NO: 37012 - DNA, 40 bp, Homo sapiens
aagactgttaggtagagggtgtgtagtggtgagtacaaca

SEQ ID NO: 37013 - DNA, 40 bp, Homo sapiens
tgttgtactcaccactacacaccctctacctaacagtctt

SEQ ID NO: 37014 - DNA, 40 bp, Homo sapiens
agactgttaggtagagggtgtgtagtggtgagtacaacag

SEQ ID NO: 37015 - DNA, 40 bp, Homo sapiens
ctgttgtactcaccactacacaccctctacctaacagtct

SEQ ID NO: 37016 - DNA, 40 bp, Homo sapiens
gactgttaggtagagggtgtgtagtggtgagtacaacagg

SEQ ID NO: 37017 - DNA, 40 bp, Homo sapiens
cctgttgtactcaccactacacaccctctacctaacagtc

SEQ ID NO: 37018 - DNA, 40 bp, Homo sapiens
actgttaggtagagggtgtgtagtggtgagtacaacaggc

SEQ ID NO: 37019 - DNA, 40 bp, Homo sapiens
gcctgttgtactcaccactacacaccctctacctaacagt

SEQ ID NO: 37020 - DNA, 40 bp, Homo sapiens
ctgttaggtagagggtgtgtagtggtgagtacaacaggcg

SEQ ID NO: 37021 - DNA, 40 bp, Homo sapiens
cgcctgttgtactcaccactacacaccctctacctaacag

SEQ ID NO: 37022 - DNA, 40 bp, Homo sapiens
tgttaggtagagggtgtgtagtggtgagtacaacaggcgt

SEQ ID NO: 37023 - DNA, 40 bp, Homo sapiens
acgcctgttgtactcaccactacacaccctctacctaaca

SEQ ID NO: 37024 - DNA, 40 bp, Homo sapiens
gttaggtagagggtgtgtagtggtgagtacaacaggcgtg

SEQ ID NO: 37025 - DNA, 40 bp, Homo sapiens
cacgcctgttgtactcaccactacacaccctctacctaac

SEQ ID NO: 37026 - DNA, 40 bp, Homo sapiens
ttaggtagagggtgtgtagtggtgagtacaacaggcgtga

SEQ ID NO: 37027 - DNA, 40 bp, Homo sapiens
tcacgcctgttgtactcaccactacacaccctctacctaa

SEQ ID NO: 37028 - DNA, 40 bp, Homo sapiens
taggtagagggtgtgtagtggtgagtacaacaggcgtgag

SEQ ID NO: 37029 - DNA, 40 bp, Homo sapiens
ctcacgcctgttgtactcaccactacacaccctctaccta

SEQ ID NO: 37030 - DNA, 40 bp, Homo sapiens
aggtagagggtgtgtagtggtgagtacaacaggcgtgagc

SEQ ID NO: 37031 - DNA, 40 bp, Homo sapiens
gctcacgcctgttgtactcaccactacacaccctctacct

SEQ ID NO: 37032 - DNA, 40 bp, Homo sapiens
ggtagagggtgtgtagtggtgagtacaacaggcgtgagcc

SEQ ID NO: 37033 - DNA, 40 bp, Homo sapiens
ggctcacgcctgttgtactcaccactacacaccctctacc

SEQ ID NO: 37034 - DNA, 40 bp, Homo sapiens
gtagagggtgtgtagtggtgagtacaacaggcgtgagccc

SEQ ID NO: 37035 - DNA, 40 bp, Homo sapiens
gggctcacgcctgttgtactcaccactacacaccctctac

SEQ ID NO: 37036 - DNA, 40 bp, Homo sapiens
tagagggtgtgtagtggtgagtacaacaggcgtgagccct

SEQ ID NO: 37037 - DNA, 40 bp, Homo sapiens
agggctcacgcctgttgtactcaccactacacaccctcta

SEQ ID NO: 37038 - DNA, 40 bp, Homo sapiens
agagggtgtgtagtggtgagtacaacaggcgtgagcccta

SEQ ID NO: 37039 - DNA, 40 bp, Homo sapiens
tagggctcacgcctgttgtactcaccactacacaccctct

SEQ ID NO: 37040 - DNA, 40 bp, Homo sapiens
gagggtgtgtagtggtgagtacaacaggcgtgagccctac

SEQ ID NO: 37041 - DNA, 40 bp, Homo sapiens
gtagggctcacgcctgttgtactcaccactacacaccctc

SEQ ID NO: 37042 - DNA, 40 bp, Homo sapiens
agggtgtgtagtggtgagtacaacaggcgtgagccctacc

SEQ ID NO: 37043 - DNA, 40 bp, Homo sapiens
ggtagggctcacgcctgttgtactcaccactacacaccct

SEQ ID NO: 37044 - DNA, 40 bp, Homo sapiens
gggtgtgtagtggtgagtacaacaggcgtgagccctacca

SEQ ID NO: 37045 - DNA, 40 bp, Homo sapiens
tggtagggctcacgcctgttgtactcaccactacacaccc

SEQ ID NO: 37046 - DNA, 40 bp, Homo sapiens
ggtgtgtagtggtgagtacaacaggcgtgagccctaccaa

SEQ ID NO: 37047 - DNA, 40 bp, Homo sapiens
ttggtagggctcacgcctgttgtactcaccactacacacc

SEQ ID NO: 37048 - DNA, 40 bp, Homo sapiens
gtgtgtagtggtgagtacaacaggcgtgagccctaccaac

SEQ ID NO: 37049 - DNA, 40 bp, Homo sapiens
gttggtagggctcacgcctgttgtactcaccactacacac

SEQ ID NO: 37050 - DNA, 40 bp, Homo sapiens
tgtgtagtggtgagtacaacaggcgtgagccctaccaaca

SEQ ID NO: 37051 - DNA, 40 bp, Homo sapiens
tgttggtagggctcacgcctgttgtactcaccactacaca

SEQ ID NO: 37052 - DNA, 40 bp, Homo sapiens
gtgtagtggtgagtacaacaggcgtgagccctaccaacac

SEQ ID NO: 37053 - DNA, 40 bp, Homo sapiens
gtgttggtagggctcacgcctgttgtactcaccactacac

SEQ ID NO: 37054 - DNA, 40 bp, Homo sapiens
tgtagtggtgagtacaacaggcgtgagccctaccaacacg

SEQ ID NO: 37055 - DNA, 40 bp, Homo sapiens
cgtgttggtagggctcacgcctgttgtactcaccactaca

SEQ ID NO: 37056 - DNA, 40 bp, Homo sapiens
gtagtggtgagtacaacaggcgtgagccctaccaacacgg

SEQ ID NO: 37057 - DNA, 40 bp, Homo sapiens
ccgtgttggtagggctcacgcctgttgtactcaccactac

SEQ ID NO: 37058 - DNA, 40 bp, Homo sapiens
tagtggtgagtacaacaggcgtgagccctaccaacacgga

SEQ ID NO: 37059 - DNA, 40 bp, Homo sapiens
tccgtgttggtagggctcacgcctgttgtactcaccacta

SEQ ID NO: 37060 - DNA, 40 bp, Homo sapiens
agtggtgagtacaacaggcgtgagccctaccaacacggag

SEQ ID NO: 37061 - DNA, 40 bp, Homo sapiens
ctccgtgttggtagggctcacgcctgttgtactcaccact

SEQ ID NO: 37062 - DNA, 40 bp, Homo sapiens
gtggtgagtacaacaggcgtgagccctaccaacacggagt

SEQ ID NO: 37063 - DNA, 40 bp, Homo sapiens
actccgtgttggtagggctcacgcctgttgtactcaccac

SEQ ID NO: 37064 - DNA, 40 bp, Homo sapiens
tggtgagtacaacaggcgtgagccctaccaacacggagtt

SEQ ID NO: 37065 - DNA, 40 bp, Homo sapiens
aactccgtgttggtagggctcacgcctgttgtactcacca

SEQ ID NO: 37066 - DNA, 40 bp, Homo sapiens
ggtgagtacaacaggcgtgagccctaccaacacggagttt

SEQ ID NO: 37067 - DNA, 40 bp, Homo sapiens
aaactccgtgttggtagggctcacgcctgttgtactcacc

SEQ ID NO: 37068 - DNA, 40 bp, Homo sapiens
gtgagtacaacaggcgtgagccctaccaacacggagttta

SEQ ID NO: 37069 - DNA, 40 bp, Homo sapiens
taaactccgtgttggtagggctcacgcctgttgtactcac

SEQ ID NO: 37070 - DNA, 40 bp, Homo sapiens
tgagtacaacaggcgtgagccctaccaacacggagtttaa

SEQ ID NO: 37071 - DNA, 40 bp, Homo sapiens
ttaaactccgtgttggtagggctcacgcctgttgtactca

SEQ ID NO: 37072 - DNA, 40 bp, Homo sapiens
gagtacaacaggcgtgagccctaccaacacggagtttaaa

SEQ ID NO: 37073 - DNA, 40 bp, Homo sapiens
tttaaactccgtgttggtagggctcacgcctgttgtactc

SEQ ID NO: 37074 - DNA, 40 bp, Homo sapiens
agtacaacaggcgtgagccctaccaacacggagtttaaag

SEQ ID NO: 37075 - DNA, 40 bp, Homo sapiens
ctttaaactccgtgttggtagggctcacgcctgttgtact

SEQ ID NO: 37076 - DNA, 40 bp, Homo sapiens
gtacaacaggcgtgagccctaccaacacggagtttaaagc

SEQ ID NO: 37077 - DNA, 40 bp, Homo sapiens
gctttaaactccgtgttggtagggctcacgcctgttgtac

SEQ ID NO: 37078 - DNA, 40 bp, Homo sapiens
tacaacaggcgtgagccctaccaacacggagtttaaagcc

SEQ ID NO: 37079 - DNA, 40 bp, Homo sapiens
ggctttaaactccgtgttggtagggctcacgcctgttgta

SEQ ID NO: 37080 - DNA, 40 bp, Homo sapiens
acaacaggcgtgagccctaccaacacggagtttaaagcct

SEQ ID NO: 37081 - DNA, 40 bp, Homo sapiens
aggctttaaactccgtgttggtagggctcacgcctgttgt

SEQ ID NO: 37082 - DNA, 40 bp, Homo sapiens
caacaggcgtgagccctaccaacacggagtttaaagccta

SEQ ID NO: 37083 - DNA, 40 bp, Homo sapiens
taggctttaaactccgtgttggtagggctcacgcctgttg

SEQ ID NO: 37084 - DNA, 40 bp, Homo sapiens
aacaggcgtgagccctaccaacacggagtttaaagcctag

SEQ ID NO: 37085 - DNA, 40 bp, Homo sapiens
ctaggctttaaactccgtgttggtagggctcacgcctgtt

SEQ ID NO: 37086 - DNA, 40 bp, Homo sapiens
acaggcgtgagccctaccaacacggagtttaaagcctagt

SEQ ID NO: 37087 - DNA, 40 bp, Homo sapiens
actaggctttaaactccgtgttggtagggctcacgcctgt

SEQ ID NO: 37088 - DNA, 40 bp, Homo sapiens
caggcgtgagccctaccaacacggagtttaaagcctagta

SEQ ID NO: 37089 - DNA, 40 bp, Homo sapiens
tactaggctttaaactccgtgttggtagggctcacgcctg

SEQ ID NO: 37090 - DNA, 40 bp, Homo sapiens
aggcgtgagccctaccaacacggagtttaaagcctagtag

SEQ ID NO: 37091 - DNA, 40 bp, Homo sapiens
ctactaggctttaaactccgtgttggtagggctcacgcct

SEQ ID NO: 37092 - DNA, 40 bp, Homo sapiens
ggcgtgagccctaccaacacggagtttaaagcctagtaga

SEQ ID NO: 37093 - DNA, 40 bp, Homo sapiens
tctactaggctttaaactccgtgttggtagggctcacgcc

SEQ ID NO: 37094 - DNA, 40 bp, Homo sapiens
gcgtgagccctaccaacacggagtttaaagcctagtagag

SEQ ID NO: 37095 - DNA, 40 bp, Homo sapiens
ctctactaggctttaaactccgtgttggtagggctcacgc

SEQ ID NO: 37096 - DNA, 40 bp, Homo sapiens
cgtgagccctaccaacacggagtttaaagcctagtagagg

SEQ ID NO: 37097 - DNA, 40 bp, Homo sapiens
cctctactaggctttaaactccgtgttggtagggctcacg

SEQ ID NO: 37098 - DNA, 40 bp, Homo sapiens
gtgagccctaccaacacggagtttaaagcctagtagagga

SEQ ID NO: 37099 - DNA, 40 bp, Homo sapiens
tcctctactaggctttaaactccgtgttggtagggctcac

SEQ ID NO: 37100 - DNA, 40 bp, Homo sapiens
tgagccctaccaacacggagtttaaagcctagtagaggat

SEQ ID NO: 37101 - DNA, 40 bp, Homo sapiens
atcctctactaggctttaaactccgtgttggtagggctca

SEQ ID NO: 37102 - DNA, 40 bp, Homo sapiens
gagccctaccaacacggagtttaaagcctagtagaggata

SEQ ID NO: 37103 - DNA, 40 bp, Homo sapiens
tatcctctactaggctttaaactccgtgttggtagggctc

SEQ ID NO: 37104 - DNA, 40 bp, Homo sapiens
agccctaccaacacggagtttaaagcctagtagaggatat

SEQ ID NO: 37105 - DNA, 40 bp, Homo sapiens
atatcctctactaggctttaaactccgtgttggtagggct

SEQ ID NO: 37106 - DNA, 40 bp, Homo sapiens
gccctaccaacacggagtttaaagcctagtagaggatata

SEQ ID NO: 37107 - DNA, 40 bp, Homo sapiens
tatatcctctactaggctttaaactccgtgttggtagggc

SEQ ID NO: 37108 - DNA, 40 bp, Homo sapiens
ccctaccaacacggagtttaaagcctagtagaggatatag

SEQ ID NO: 37109 - DNA, 40 bp, Homo sapiens
ctatatcctctactaggctttaaactccgtgttggtaggg

SEQ ID NO: 37110 - DNA, 40 bp, Homo sapiens
cctaccaacacggagtttaaagcctagtagaggatataga

SEQ ID NO: 37111 - DNA, 40 bp, Homo sapiens
tctatatcctctactaggctttaaactccgtgttggtagg

SEQ ID NO: 37112 - DNA, 40 bp, Homo sapiens
ctaccaacacggagtttaaagcctagtagaggatatagac

SEQ ID NO: 37113 - DNA, 40 bp, Homo sapiens
gtctatatcctctactaggctttaaactccgtgttggtag

SEQ ID NO: 37114 - DNA, 40 bp, Homo sapiens
taccaacacggagtttaaagcctagtagaggatatagact

SEQ ID NO: 37115 - DNA, 40 bp, Homo sapiens
agtctatatcctctactaggctttaaactccgtgttggta

SEQ ID NO: 37116 - DNA, 40 bp, Homo sapiens
accaacacggagtttaaagcctagtagaggatatagactt

SEQ ID NO: 37117 - DNA, 40 bp, Homo sapiens
aagtctatatcctctactaggctttaaactccgtgttggt

SEQ ID NO: 37118 - DNA, 40 bp, Homo sapiens
ccaacacggagtttaaagcctagtagaggatatagactta

SEQ ID NO: 37119 - DNA, 40 bp, Homo sapiens
taagtctatatcctctactaggctttaaactccgtgttgg

SEQ ID NO: 37120 - DNA, 40 bp, Homo sapiens
caacacggagtttaaagcctagtagaggatatagacttaa

SEQ ID NO: 37121 - DNA, 40 bp, Homo sapiens
ttaagtctatatcctctactaggctttaaactccgtgttg

SEQ ID NO: 37122 - DNA, 40 bp, Homo sapiens
aacacggagtttaaagcctagtagaggatatagacttaaa

SEQ ID NO: 37123 - DNA, 40 bp, Homo sapiens
tttaagtctatatcctctactaggctttaaactccgtgtt

SEQ ID NO: 37124 - DNA, 40 bp, Homo sapiens
acacggagtttaaagcctagtagaggatatagacttaaac

SEQ ID NO: 37125 - DNA, 40 bp, Homo sapiens
gtttaagtctatatcctctactaggctttaaactccgtgt

SEQ ID NO: 37126 - DNA, 40 bp, Homo sapiens
cacggagtttaaagcctagtagaggatatagacttaaaca

SEQ ID NO: 37127 - DNA, 40 bp, Homo sapiens
tgtttaagtctatatcctctactaggctttaaactccgtg

SEQ ID NO: 37128 - DNA, 40 bp, Homo sapiens
acggagtttaaagcctagtagaggatatagacttaaacaa

SEQ ID NO: 37129 - DNA, 40 bp, Homo sapiens
ttgtttaagtctatatcctctactaggctttaaactccgt

SEQ ID NO: 37130 - DNA, 40 bp, Homo sapiens
cggagtttaaagcctagtagaggatatagacttaaacaat

SEQ ID NO: 37131 - DNA, 40 bp, Homo sapiens
attgtttaagtctatatcctctactaggctttaaactccg

SEQ ID NO: 37132 - DNA, 40 bp, Homo sapiens
ggagtttaaagcctagtagaggatatagacttaaacaatt

SEQ ID NO: 37133 - DNA, 40 bp, Homo sapiens
aattgtttaagtctatatcctctactaggctttaaactcc

SEQ ID NO: 37134 - DNA, 40 bp, Homo sapiens
gagtttaaagcctagtagaggatatagacttaaacaattt

SEQ ID NO: 37135 - DNA, 40 bp, Homo sapiens
aaattgtttaagtctatatcctctactaggctttaaactc

SEQ ID NO: 37136 - DNA, 40 bp, Homo sapiens
agtttaaagcctagtagaggatatagacttaaacaatttc

SEQ ID NO: 37137 - DNA, 40 bp, Homo sapiens
gaaattgtttaagtctatatcctctactaggctttaaact

SEQ ID NO: 37138 - DNA, 40 bp, Homo sapiens
gtttaaagcctagtagaggatatagacttaaacaatttca

SEQ ID NO: 37139 - DNA, 40 bp, Homo sapiens
tgaaattgtttaagtctatatcctctactaggctttaaac

SEQ ID NO: 37140 - DNA, 40 bp, Homo sapiens
tttaaagcctagtagaggatatagacttaaacaatttcac

SEQ ID NO: 37141 - DNA, 40 bp, Homo sapiens
gtgaaattgtttaagtctatatcctctactaggctttaaa

SEQ ID NO: 37142 - DNA, 40 bp, Homo sapiens
ttaaagcctagtagaggatatagacttaaacaatttcaca

SEQ ID NO: 37143 - DNA, 40 bp, Homo sapiens
tgtgaaattgtttaagtctatatcctctactaggctttaa

SEQ ID NO: 37144 - DNA, 40 bp, Homo sapiens
taaagcctagtagaggatatagacttaaacaatttcacaa

SEQ ID NO: 37145 - DNA, 40 bp, Homo sapiens
ttgtgaaattgtttaagtctatatcctctactaggcttta

SEQ ID NO: 37146 - DNA, 40 bp, Homo sapiens
aaagcctagtagaggatatagacttaaacaatttcacaag

SEQ ID NO: 37147 - DNA, 40 bp, Homo sapiens
cttgtgaaattgtttaagtctatatcctctactaggcttt

SEQ ID NO: 37148 - DNA, 40 bp, Homo sapiens
aagcctagtagaggatatagacttaaacaatttcacaagt

SEQ ID NO: 37149 - DNA, 40 bp, Homo sapiens
acttgtgaaattgtttaagtctatatcctctactaggctt

SEQ ID NO: 37150 - DNA, 40 bp, Homo sapiens
agcctagtagaggatatagacttaaacaatttcacaagta

SEQ ID NO: 37151 - DNA, 40 bp, Homo sapiens
tacttgtgaaattgtttaagtctatatcctctactaggct

SEQ ID NO: 37152 - DNA, 40 bp, Homo sapiens
gcctagtagaggatatagacttaaacaatttcacaagtaa

SEQ ID NO: 37153 - DNA, 40 bp, Homo sapiens
ttacttgtgaaattgtttaagtctatatcctctactaggc

SEQ ID NO: 37154 - DNA, 40 bp, Homo sapiens
cctagtagaggatatagacttaaacaatttcacaagtaaa

SEQ ID NO: 37155 - DNA, 40 bp, Homo sapiens
tttacttgtgaaattgtttaagtctatatcctctactagg

SEQ ID NO: 37156 - DNA, 40 bp, Homo sapiens
ctagtagaggatatagacttaaacaatttcacaagtaaat

SEQ ID NO: 37157 - DNA, 40 bp, Homo sapiens
atttacttgtgaaattgtttaagtctatatcctctactag

SEQ ID NO: 37158 - DNA, 40 bp, Homo sapiens
tagtagaggatatagacttaaacaatttcacaagtaaata

SEQ ID NO: 37159 - DNA, 40 bp, Homo sapiens
tatttacttgtgaaattgtttaagtctatatcctctacta

SEQ ID NO: 37160 - DNA, 40 bp, Homo sapiens
agtagaggatatagacttaaacaatttcacaagtaaatac

SEQ ID NO: 37161 - DNA, 40 bp, Homo sapiens
gtatttacttgtgaaattgtttaagtctatatcctctact

SEQ ID NO: 37162 - DNA, 40 bp, Homo sapiens
gtagaggatatagacttaaacaatttcacaagtaaataca

SEQ ID NO: 37163 - DNA, 40 bp, Homo sapiens
tgtatttacttgtgaaattgtttaagtctatatcctctac

SEQ ID NO: 37164 - DNA, 40 bp, Homo sapiens
tagaggatatagacttaaacaatttcacaagtaaatacat

SEQ ID NO: 37165 - DNA, 40 bp, Homo sapiens
atgtatttacttgtgaaattgtttaagtctatatcctcta

SEQ ID NO: 37166 - DNA, 40 bp, Homo sapiens
agaggatatagacttaaacaatttcacaagtaaatacata

SEQ ID NO: 37167 - DNA, 40 bp, Homo sapiens
tatgtatttacttgtgaaattgtttaagtctatatcctct

SEQ ID NO: 37168 - DNA, 40 bp, Homo sapiens
gaggatatagacttaaacaatttcacaagtaaatacataa

SEQ ID NO: 37169 - DNA, 40 bp, Homo sapiens
ttatgtatttacttgtgaaattgtttaagtctatatcctc

SEQ ID NO: 37170 - DNA, 40 bp, Homo sapiens
aggatatagacttaaacaatttcacaagtaaatacataat

SEQ ID NO: 37171 - DNA, 40 bp, Homo sapiens
attatgtatttacttgtgaaattgtttaagtctatatcct

SEQ ID NO: 37172 - DNA, 40 bp, Homo sapiens
ggatatagacttaaacaatttcacaagtaaatacataatt

SEQ ID NO: 37173 - DNA, 40 bp, Homo sapiens
aattatgtatttacttgtgaaattgtttaagtctatatcc

SEQ ID NO: 37174 - DNA, 40 bp, Homo sapiens
gatatagacttaaacaatttcacaagtaaatacataatta

SEQ ID NO: 37175 - DNA, 40 bp, Homo sapiens
taattatgtatttacttgtgaaattgtttaagtctatatc

SEQ ID NO: 37176 - DNA, 40 bp, Homo sapiens
atatagacttaaacaatttcacaagtaaatacataattac

SEQ ID NO: 37177 - DNA, 40 bp, Homo sapiens
gtaattatgtatttacttgtgaaattgtttaagtctatat

SEQ ID NO: 37178 - DNA, 40 bp, Homo sapiens
tatagacttaaacaatttcacaagtaaatacataattaca

SEQ ID NO: 37179 - DNA, 40 bp, Homo sapiens
tgtaattatgtatttacttgtgaaattgtttaagtctata

SEQ ID NO: 37180 - DNA, 40 bp, Homo sapiens
atagacttaaacaatttcacaagtaaatacataattacaa

SEQ ID NO: 37181 - DNA, 40 bp, Homo sapiens
ttgtaattatgtatttacttgtgaaattgtttaagtctat

SEQ ID NO: 37182 - DNA, 40 bp, Homo sapiens
tagacttaaacaatttcacaagtaaatacataattacaaa

SEQ ID NO: 37183 - DNA, 40 bp, Homo sapiens
tttgtaattatgtatttacttgtgaaattgtttaagtcta

SEQ ID NO: 37184 - DNA, 40 bp, Homo sapiens
agacttaaacaatttcacaagtaaatacataattacaaat

SEQ ID NO: 37185 - DNA, 40 bp, Homo sapiens
atttgtaattatgtatttacttgtgaaattgtttaagtct

SEQ ID NO: 37186 - DNA, 40 bp, Homo sapiens
gacttaaacaatttcacaagtaaatacataattacaaatt

SEQ ID NO: 37187 - DNA, 40 bp, Homo sapiens
aatttgtaattatgtatttacttgtgaaattgtttaagtc

SEQ ID NO: 37188 - DNA, 40 bp, Homo sapiens
acttaaacaatttcacaagtaaatacataattacaaatta

SEQ ID NO: 37189 - DNA, 40 bp, Homo sapiens
taatttgtaattatgtatttacttgtgaaattgtttaagt

SEQ ID NO: 37190 - DNA, 40 bp, Homo sapiens
cttaaacaatttcacaagtaaatacataattacaaattat

SEQ ID NO: 37191 - DNA, 40 bp, Homo sapiens
ataatttgtaattatgtatttacttgtgaaattgtttaag

SEQ ID NO: 37192 - DNA, 40 bp, Homo sapiens
ttaaacaatttcacaagtaaatacataattacaaattata

SEQ ID NO: 37193 - DNA, 40 bp, Homo sapiens
tataatttgtaattatgtatttacttgtgaaattgtttaa

SEQ ID NO: 37194 - DNA, 40 bp, Homo sapiens
taaacaatttcacaagtaaatacataattacaaattataa

SEQ ID NO: 37195 - DNA, 40 bp, Homo sapiens
ttataatttgtaattatgtatttacttgtgaaattgttta

SEQ ID NO: 37196 - DNA, 40 bp, Homo sapiens
aaacaatttcacaagtaaatacataattacaaattataat

SEQ ID NO: 37197 - DNA, 40 bp, Homo sapiens
attataatttgtaattatgtatttacttgtgaaattgttt

SEQ ID NO: 37198 - DNA, 40 bp, Homo sapiens
aacaatttcacaagtaaatacataattacaaattataata

SEQ ID NO: 37199 - DNA, 40 bp, Homo sapiens
tattataatttgtaattatgtatttacttgtgaaattgtt

SEQ ID NO: 37200 - DNA, 40 bp, Homo sapiens
acaatttcacaagtaaatacataattacaaattataatac

SEQ ID NO: 37201 - DNA, 40 bp, Homo sapiens
gtattataatttgtaattatgtatttacttgtgaaattgt

SEQ ID NO: 37202 - DNA, 40 bp, Homo sapiens
caatttcacaagtaaatacataattacaaattataataca

SEQ ID NO: 37203 - DNA, 40 bp, Homo sapiens
tgtattataatttgtaattatgtatttacttgtgaaattg

SEQ ID NO: 37204 - DNA, 40 bp, Homo sapiens
aatttcacaagtaaatacataattacaaattataatacat

SEQ ID NO: 37205 - DNA, 40 bp, Homo sapiens
atgtattataatttgtaattatgtatttacttgtgaaatt

SEQ ID NO: 37206 - DNA, 40 bp, Homo sapiens
atttcacaagtaaatacataattacaaattataatacatg

SEQ ID NO: 37207 - DNA, 40 bp, Homo sapiens
catgtattataatttgtaattatgtatttacttgtgaaat

SEQ ID NO: 37208 - DNA, 40 bp, Homo sapiens
tttcacaagtaaatacataattacaaattataatacatgc

SEQ ID NO: 37209 - DNA, 40 bp, Homo sapiens
gcatgtattataatttgtaattatgtatttacttgtgaaa

SEQ ID NO: 37210 - DNA, 40 bp, Homo sapiens
ttcacaagtaaatacataattacaaattataatacatgct

SEQ ID NO: 37211 - DNA, 40 bp, Homo sapiens
agcatgtattataatttgtaattatgtatttacttgtgaa

SEQ ID NO: 37212 - DNA, 40 bp, Homo sapiens
tcacaagtaaatacataattacaaattataatacatgcta

SEQ ID NO: 37213 - DNA, 40 bp, Homo sapiens
tagcatgtattataatttgtaattatgtatttacttgtga

SEQ ID NO: 37214 - DNA, 40 bp, Homo sapiens
cacaagtaaatacataattacaaattataatacatgctat

SEQ ID NO: 37215 - DNA, 40 bp, Homo sapiens
atagcatgtattataatttgtaattatgtatttacttgtg

SEQ ID NO: 37216 - DNA, 40 bp, Homo sapiens
acaagtaaatacataattacaaattataatacatgctatg

SEQ ID NO: 37217 - DNA, 40 bp, Homo sapiens
catagcatgtattataatttgtaattatgtatttacttgt

SEQ ID NO: 37218 - DNA, 40 bp, Homo sapiens
caagtaaatacataattacaaattataatacatgctatga

SEQ ID NO: 37219 - DNA, 40 bp, Homo sapiens
tcatagcatgtattataatttgtaattatgtatttacttg

SEQ ID NO: 37220 - DNA, 40 bp, Homo sapiens
aagtaaatacataattacaaattataatacatgctatgaa

SEQ ID NO: 37221 - DNA, 40 bp, Homo sapiens
ttcatagcatgtattataatttgtaattatgtatttactt

SEQ ID NO: 37222 - DNA, 40 bp, Homo sapiens
agtaaatacataattacaaattataatacatgctatgaag

SEQ ID NO: 37223 - DNA, 40 bp, Homo sapiens
cttcatagcatgtattataatttgtaattatgtatttact

SEQ ID NO: 37224 - DNA, 40 bp, Homo sapiens
gtaaatacataattacaaattataatacatgctatgaagg

SEQ ID NO: 37225 - DNA, 40 bp, Homo sapiens
ccttcatagcatgtattataatttgtaattatgtatttac

SEQ ID NO: 37226 - DNA, 40 bp, Homo sapiens
taaatacataattacaaattataatacatgctatgaagga

SEQ ID NO: 37227 - DNA, 40 bp, Homo sapiens
tccttcatagcatgtattataatttgtaattatgtattta

SEQ ID NO: 37228 - DNA, 40 bp, Homo sapiens
aaatacataattacaaattataatacatgctatgaaggaa

SEQ ID NO: 37229 - DNA, 40 bp, Homo sapiens
ttccttcatagcatgtattataatttgtaattatgtattt

SEQ ID NO: 37230 - DNA, 40 bp, Homo sapiens
aatacataattacaaattataatacatgctatgaaggaaa

SEQ ID NO: 37231 - DNA, 40 bp, Homo sapiens
tttccttcatagcatgtattataatttgtaattatgtatt

SEQ ID NO: 37232 - DNA, 40 bp, Homo sapiens
atacataattacaaattataatacatgctatgaaggaaac

SEQ ID NO: 37233 - DNA, 40 bp, Homo sapiens
gtttccttcatagcatgtattataatttgtaattatgtat

SEQ ID NO: 37234 - DNA, 40 bp, Homo sapiens
tacataattacaaattataatacatgctatgaaggaaaca

SEQ ID NO: 37235 - DNA, 40 bp, Homo sapiens
tgtttccttcatagcatgtattataatttgtaattatgta

SEQ ID NO: 37236 - DNA, 40 bp, Homo sapiens
acataattacaaattataatacatgctatgaaggaaacat

SEQ ID NO: 37237 - DNA, 40 bp, Homo sapiens
atgtttccttcatagcatgtattataatttgtaattatgt

SEQ ID NO: 37238 - DNA, 40 bp, Homo sapiens
cataattacaaattataatacatgctatgaaggaaacata

SEQ ID NO: 37239 - DNA, 40 bp, Homo sapiens
tatgtttccttcatagcatgtattataatttgtaattatg

SEQ ID NO: 37240 - DNA, 40 bp, Homo sapiens
ataattacaaattataatacatgctatgaaggaaacatag

SEQ ID NO: 37241 - DNA, 40 bp, Homo sapiens
ctatgtttccttcatagcatgtattataatttgtaattat

SEQ ID NO: 37242 - DNA, 40 bp, Homo sapiens
taattacaaattataatacatgctatgaaggaaacatagg

SEQ ID NO: 37243 - DNA, 40 bp, Homo sapiens
cctatgtttccttcatagcatgtattataatttgtaatta

SEQ ID NO: 37244 - DNA, 40 bp, Homo sapiens
aattacaaattataatacatgctatgaaggaaacatagga

SEQ ID NO: 37245 - DNA, 40 bp, Homo sapiens
tcctatgtttccttcatagcatgtattataatttgtaatt

SEQ ID NO: 37246 - DNA, 40 bp, Homo sapiens
attacaaattataatacatgctatgaaggaaacataggag

SEQ ID NO: 37247 - DNA, 40 bp, Homo sapiens
ctcctatgtttccttcatagcatgtattataatttgtaat

SEQ ID NO: 37248 - DNA, 40 bp, Homo sapiens
ttacaaattataatacatgctatgaaggaaacataggagg

SEQ ID NO: 37249 - DNA, 40 bp, Homo sapiens
cctcctatgtttccttcatagcatgtattataatttgtaa

SEQ ID NO: 37250 - DNA, 40 bp, Homo sapiens
tacaaattataatacatgctatgaaggaaacataggaggt

SEQ ID NO: 37251 - DNA, 40 bp, Homo sapiens
acctcctatgtttccttcatagcatgtattataatttgta

SEQ ID NO: 37252 - DNA, 40 bp, Homo sapiens
acaaattataatacatgctatgaaggaaacataggaggta

SEQ ID NO: 37253 - DNA, 40 bp, Homo sapiens
tacctcctatgtttccttcatagcatgtattataatttgt

SEQ ID NO: 37254 - DNA, 40 bp, Homo sapiens
caaattataatacatgctatgaaggaaacataggaggtac

SEQ ID NO: 37255 - DNA, 40 bp, Homo sapiens
gtacctcctatgtttccttcatagcatgtattataatttg

SEQ ID NO: 37256 - DNA, 40 bp, Homo sapiens
aaattataatacatgctatgaaggaaacataggaggtacc

SEQ ID NO: 37257 - DNA, 40 bp, Homo sapiens
ggtacctcctatgtttccttcatagcatgtattataattt

SEQ ID NO: 37258 - DNA, 40 bp, Homo sapiens
aattataatacatgctatgaaggaaacataggaggtacca

SEQ ID NO: 37259 - DNA, 40 bp, Homo sapiens
tggtacctcctatgtttccttcatagcatgtattataatt

SEQ ID NO: 37260 - DNA, 40 bp, Homo sapiens
attataatacatgctatgaaggaaacataggaggtaccag

SEQ ID NO: 37261 - DNA, 40 bp, Homo sapiens
ctggtacctcctatgtttccttcatagcatgtattataat

SEQ ID NO: 37262 - DNA, 40 bp, Homo sapiens
ttataatacatgctatgaaggaaacataggaggtaccaga

SEQ ID NO: 37263 - DNA, 40 bp, Homo sapiens
tctggtacctcctatgtttccttcatagcatgtattataa

SEQ ID NO: 37264 - DNA, 40 bp, Homo sapiens
tataatacatgctatgaaggaaacataggaggtaccagag

SEQ ID NO: 37265 - DNA, 40 bp, Homo sapiens
ctctggtacctcctatgtttccttcatagcatgtattata

SEQ ID NO: 37266 - DNA, 40 bp, Homo sapiens
ataatacatgctatgaaggaaacataggaggtaccagaga

SEQ ID NO: 37267 - DNA, 40 bp, Homo sapiens
tctctggtacctcctatgtttccttcatagcatgtattat

SEQ ID NO: 37268 - DNA, 40 bp, Homo sapiens
taatacatgctatgaaggaaacataggaggtaccagagaa

SEQ ID NO: 37269 - DNA, 40 bp, Homo sapiens
ttctctggtacctcctatgtttccttcatagcatgtatta

SEQ ID NO: 37270 - DNA, 40 bp, Homo sapiens
aatacatgctatgaaggaaacataggaggtaccagagaag

SEQ ID NO: 37271 - DNA, 40 bp, Homo sapiens
cttctctggtacctcctatgtttccttcatagcatgtatt

SEQ ID NO: 37272 - DNA, 40 bp, Homo sapiens
atacatgctatgaaggaaacataggaggtaccagagaagg

SEQ ID NO: 37273 - DNA, 40 bp, Homo sapiens
ccttctctggtacctcctatgtttccttcatagcatgtat

SEQ ID NO: 37274 - DNA, 40 bp, Homo sapiens
tacatgctatgaaggaaacataggaggtaccagagaagga

SEQ ID NO: 37275 - DNA, 40 bp, Homo sapiens
tccttctctggtacctcctatgtttccttcatagcatgta

SEQ ID NO: 37276 - DNA, 40 bp, Homo sapiens
acatgctatgaaggaaacataggaggtaccagagaaggaa

SEQ ID NO: 37277 - DNA, 40 bp, Homo sapiens
ttccttctctggtacctcctatgtttccttcatagcatgt

SEQ ID NO: 37278 - DNA, 40 bp, Homo sapiens
catgctatgaaggaaacataggaggtaccagagaaggaag

SEQ ID NO: 37279 - DNA, 40 bp, Homo sapiens
cttccttctctggtacctcctatgtttccttcatagcatg

SEQ ID NO: 37280 - DNA, 40 bp, Homo sapiens
atgctatgaaggaaacataggaggtaccagagaaggaaga

SEQ ID NO: 37281 - DNA, 40 bp, Homo sapiens
tcttccttctctggtacctcctatgtttccttcatagcat

SEQ ID NO: 37282 - DNA, 40 bp, Homo sapiens
tgctatgaaggaaacataggaggtaccagagaaggaagag

SEQ ID NO: 37283 - DNA, 40 bp, Homo sapiens
ctcttccttctctggtacctcctatgtttccttcatagca

SEQ ID NO: 37284 - DNA, 40 bp, Homo sapiens
gctatgaaggaaacataggaggtaccagagaaggaagagt

SEQ ID NO: 37285 - DNA, 40 bp, Homo sapiens
actcttccttctctggtacctcctatgtttccttcatagc

SEQ ID NO: 37286 - DNA, 40 bp, Homo sapiens
ctatgaaggaaacataggaggtaccagagaaggaagagtg

SEQ ID NO: 37287 - DNA, 40 bp, Homo sapiens
cactcttccttctctggtacctcctatgtttccttcatag

SEQ ID NO: 37288 - DNA, 40 bp, Homo sapiens
tatgaaggaaacataggaggtaccagagaaggaagagtgc

SEQ ID NO: 37289 - DNA, 40 bp, Homo sapiens
gcactcttccttctctggtacctcctatgtttccttcata

SEQ ID NO: 37290 - DNA, 40 bp, Homo sapiens
atgaaggaaacataggaggtaccagagaaggaagagtgct

SEQ ID NO: 37291 - DNA, 40 bp, Homo sapiens
agcactcttccttctctggtacctcctatgtttccttcat

SEQ ID NO: 37292 - DNA, 40 bp, Homo sapiens
tgaaggaaacataggaggtaccagagaaggaagagtgctt

SEQ ID NO: 37293 - DNA, 40 bp, Homo sapiens
aagcactcttccttctctggtacctcctatgtttccttca

SEQ ID NO: 37294 - DNA, 40 bp, Homo sapiens
gaaggaaacataggaggtaccagagaaggaagagtgcttt

SEQ ID NO: 37295 - DNA, 40 bp, Homo sapiens
aaagcactcttccttctctggtacctcctatgtttccttc

SEQ ID NO: 37296 - DNA, 40 bp, Homo sapiens
aaggaaacataggaggtaccagagaaggaagagtgctttg

SEQ ID NO: 37297 - DNA, 40 bp, Homo sapiens
caaagcactcttccttctctggtacctcctatgtttcctt

SEQ ID NO: 37298 - DNA, 40 bp, Homo sapiens
aggaaacataggaggtaccagagaaggaagagtgctttgc

SEQ ID NO: 37299 - DNA, 40 bp, Homo sapiens
gcaaagcactcttccttctctggtacctcctatgtttcct

SEQ ID NO: 37300 - DNA, 40 bp, Homo sapiens
ggaaacataggaggtaccagagaaggaagagtgctttgca

SEQ ID NO: 37301 - DNA, 40 bp, Homo sapiens
tgcaaagcactcttccttctctggtacctcctatgtttcc

SEQ ID NO: 37302 - DNA, 40 bp, Homo sapiens
gaaacataggaggtaccagagaaggaagagtgctttgcat

SEQ ID NO: 37303 - DNA, 40 bp, Homo sapiens
atgcaaagcactcttccttctctggtacctcctatgtttc

SEQ ID NO: 37304 - DNA, 40 bp, Homo sapiens
aaacataggaggtaccagagaaggaagagtgctttgcatt

SEQ ID NO: 37305 - DNA, 40 bp, Homo sapiens
aatgcaaagcactcttccttctctggtacctcctatgttt

SEQ ID NO: 37306 - DNA, 40 bp, Homo sapiens
aacataggaggtaccagagaaggaagagtgctttgcattt

SEQ ID NO: 37307 - DNA, 40 bp, Homo sapiens
aaatgcaaagcactcttccttctctggtacctcctatgtt

SEQ ID NO: 37308 - DNA, 40 bp, Homo sapiens
acataggaggtaccagagaaggaagagtgctttgcatttt

SEQ ID NO: 37309 - DNA, 40 bp, Homo sapiens
aaaatgcaaagcactcttccttctctggtacctcctatgt

SEQ ID NO: 37310 - DNA, 40 bp, Homo sapiens
cataggaggtaccagagaaggaagagtgctttgcattttt

SEQ ID NO: 37311 - DNA, 40 bp, Homo sapiens
aaaaatgcaaagcactcttccttctctggtacctcctatg

SEQ ID NO: 37312 - DNA, 40 bp, Homo sapiens
ataggaggtaccagagaaggaagagtgctttgcattttta

SEQ ID NO: 37313 - DNA, 40 bp, Homo sapiens
taaaaatgcaaagcactcttccttctctggtacctcctat

SEQ ID NO: 37314 - DNA, 40 bp, Homo sapiens
taggaggtaccagagaaggaagagtgctttgcatttttat

SEQ ID NO: 37315 - DNA, 40 bp, Homo sapiens
ataaaaatgcaaagcactcttccttctctggtacctccta

SEQ ID NO: 37316 - DNA, 40 bp, Homo sapiens
aggaggtaccagagaaggaagagtgctttgcatttttatt

SEQ ID NO: 37317 - DNA, 40 bp, Homo sapiens
aataaaaatgcaaagcactcttccttctctggtacctcct

SEQ ID NO: 37318 - DNA, 40 bp, Homo sapiens
ggaggtaccagagaaggaagagtgctttgcatttttattt

SEQ ID NO: 37319 - DNA, 40 bp, Homo sapiens
aaataaaaatgcaaagcactcttccttctctggtacctcc

SEQ ID NO: 37320 - DNA, 40 bp, Homo sapiens
gaggtaccagagaaggaagagtgctttgcatttttatttt

SEQ ID NO: 37321 - DNA, 40 bp, Homo sapiens
aaaataaaaatgcaaagcactcttccttctctggtacctc

SEQ ID NO: 37322 - DNA, 40 bp, Homo sapiens
aggtaccagagaaggaagagtgctttgcatttttattttt

SEQ ID NO: 37323 - DNA, 40 bp, Homo sapiens
aaaaataaaaatgcaaagcactcttccttctctggtacct

SEQ ID NO: 37324 - DNA, 40 bp, Homo sapiens
ggtaccagagaaggaagagtgctttgcatttttattttta

SEQ ID NO: 37325 - DNA, 40 bp, Homo sapiens
taaaaataaaaatgcaaagcactcttccttctctggtacc

SEQ ID NO: 37326 - DNA, 40 bp, Homo sapiens
gtaccagagaaggaagagtgctttgcatttttatttttaa

SEQ ID NO: 37327 - DNA, 40 bp, Homo sapiens
ttaaaaataaaaatgcaaagcactcttccttctctggtac

SEQ ID NO: 37328 - DNA, 40 bp, Homo sapiens
taccagagaaggaagagtgctttgcatttttatttttaag

SEQ ID NO: 37329 - DNA, 40 bp, Homo sapiens
cttaaaaataaaaatgcaaagcactcttccttctctggta

SEQ ID NO: 37330 - DNA, 40 bp, Homo sapiens
accagagaaggaagagtgctttgcatttttatttttaaga

SEQ ID NO: 37331 - DNA, 40 bp, Homo sapiens
tcttaaaaataaaaatgcaaagcactcttccttctctggt

SEQ ID NO: 37332 - DNA, 40 bp, Homo sapiens
ccagagaaggaagagtgctttgcatttttatttttaagac

SEQ ID NO: 37333 - DNA, 40 bp, Homo sapiens
gtcttaaaaataaaaatgcaaagcactcttccttctctgg

SEQ ID NO: 37334 - DNA, 40 bp, Homo sapiens
cagagaaggaagagtgctttgcatttttatttttaagacc

SEQ ID NO: 37335 - DNA, 40 bp, Homo sapiens
ggtcttaaaaataaaaatgcaaagcactcttccttctctg

SEQ ID NO: 37336 - DNA, 40 bp, Homo sapiens
agagaaggaagagtgctttgcatttttatttttaagaccg

SEQ ID NO: 37337 - DNA, 40 bp, Homo sapiens
cggtcttaaaaataaaaatgcaaagcactcttccttctct

SEQ ID NO: 37338 - DNA, 40 bp, Homo sapiens
gagaaggaagagtgctttgcatttttatttttaagaccga

SEQ ID NO: 37339 - DNA, 40 bp, Homo sapiens
tcggtcttaaaaataaaaatgcaaagcactcttccttctc

SEQ ID NO: 37340 - DNA, 40 bp, Homo sapiens
agaaggaagagtgctttgcatttttatttttaagaccgaa

SEQ ID NO: 37341 - DNA, 40 bp, Homo sapiens
ttcggtcttaaaaataaaaatgcaaagcactcttccttct

SEQ ID NO: 37342 - DNA, 40 bp, Homo sapiens
gaaggaagagtgctttgcatttttatttttaagaccgaag

SEQ ID NO: 37343 - DNA, 40 bp, Homo sapiens
cttcggtcttaaaaataaaaatgcaaagcactcttccttc

SEQ ID NO: 37344 - DNA, 40 bp, Homo sapiens
aaggaagagtgctttgcatttttatttttaagaccgaaga

SEQ ID NO: 37345 - DNA, 40 bp, Homo sapiens
tcttcggtcttaaaaataaaaatgcaaagcactcttcctt

SEQ ID NO: 37346 - DNA, 40 bp, Homo sapiens
aggaagagtgctttgcatttttatttttaagaccgaagag

SEQ ID NO: 37347 - DNA, 40 bp, Homo sapiens
ctcttcggtcttaaaaataaaaatgcaaagcactcttcct

SEQ ID NO: 37348 - DNA, 40 bp, Homo sapiens
ggaagagtgctttgcatttttatttttaagaccgaagagt

SEQ ID NO: 37349 - DNA, 40 bp, Homo sapiens
actcttcggtcttaaaaataaaaatgcaaagcactcttcc

SEQ ID NO: 37350 - DNA, 40 bp, Homo sapiens
gaagagtgctttgcatttttatttttaagaccgaagagtg

SEQ ID NO: 37351 - DNA, 40 bp, Homo sapiens
cactcttcggtcttaaaaataaaaatgcaaagcactcttc

SEQ ID NO: 37352 - DNA, 40 bp, Homo sapiens
aagagtgctttgcatttttatttttaagaccgaagagtgc

SEQ ID NO: 37353 - DNA, 40 bp, Homo sapiens
gcactcttcggtcttaaaaataaaaatgcaaagcactctt

SEQ ID NO: 37354 - DNA, 40 bp, Homo sapiens
agagtgctttgcatttttatttttaagaccgaagagtgct

SEQ ID NO: 37355 - DNA, 40 bp, Homo sapiens
agcactcttcggtcttaaaaataaaaatgcaaagcactct

SEQ ID NO: 37356 - DNA, 40 bp, Homo sapiens
gagtgctttgcatttttatttttaagaccgaagagtgcta

SEQ ID NO: 37357 - DNA, 40 bp, Homo sapiens
tagcactcttcggtcttaaaaataaaaatgcaaagcactc

SEQ ID NO: 37358 - DNA, 40 bp, Homo sapiens
agtgctttgcatttttatttttaagaccgaagagtgctat

SEQ ID NO: 37359 - DNA, 40 bp, Homo sapiens
atagcactcttcggtcttaaaaataaaaatgcaaagcact

SEQ ID NO: 37360 - DNA, 40 bp, Homo sapiens
gtgctttgcatttttatttttaagaccgaagagtgctatt

SEQ ID NO: 37361 - DNA, 40 bp, Homo sapiens
aatagcactcttcggtcttaaaaataaaaatgcaaagcac

SEQ ID NO: 37362 - DNA, 40 bp, Homo sapiens
tgctttgcatttttatttttaagaccgaagagtgctattg

SEQ ID NO: 37363 - DNA, 40 bp, Homo sapiens
caatagcactcttcggtcttaaaaataaaaatgcaaagca

SEQ ID NO: 37364 - DNA, 40 bp, Homo sapiens
gctttgcatttttatttttaagaccgaagagtgctattgg

SEQ ID NO: 37365 - DNA, 40 bp, Homo sapiens
ccaatagcactcttcggtcttaaaaataaaaatgcaaagc

SEQ ID NO: 37366 - DNA, 40 bp, Homo sapiens
ctttgcatttttatttttaagaccgaagagtgctattgga

SEQ ID NO: 37367 - DNA, 40 bp, Homo sapiens
tccaatagcactcttcggtcttaaaaataaaaatgcaaag

SEQ ID NO: 37368 - DNA, 40 bp, Homo sapiens
tttgcatttttatttttaagaccgaagagtgctattggag

SEQ ID NO: 37369 - DNA, 40 bp, Homo sapiens
ctccaatagcactcttcggtcttaaaaataaaaatgcaaa

SEQ ID NO: 37370 - DNA, 40 bp, Homo sapiens
ttgcatttttatttttaagaccgaagagtgctattggagg

SEQ ID NO: 37371 - DNA, 40 bp, Homo sapiens
cctccaatagcactcttcggtcttaaaaataaaaatgcaa

SEQ ID NO: 37372 - DNA, 40 bp, Homo sapiens
tgcatttttatttttaagaccgaagagtgctattggagga

SEQ ID NO: 37373 - DNA, 40 bp, Homo sapiens
tcctccaatagcactcttcggtcttaaaaataaaaatgca

SEQ ID NO: 37374 - DNA, 40 bp, Homo sapiens
gcatttttatttttaagaccgaagagtgctattggaggac

SEQ ID NO: 37375 - DNA, 40 bp, Homo sapiens
gtcctccaatagcactcttcggtcttaaaaataaaaatgc

SEQ ID NO: 37376 - DNA, 40 bp, Homo sapiens
catttttatttttaagaccgaagagtgctattggaggact

SEQ ID NO: 37377 - DNA, 40 bp, Homo sapiens
agtcctccaatagcactcttcggtcttaaaaataaaaatg

SEQ ID NO: 37378 - DNA, 40 bp, Homo sapiens
atttttatttttaagaccgaagagtgctattggaggactt

SEQ ID NO: 37379 - DNA, 40 bp, Homo sapiens
aagtcctccaatagcactcttcggtcttaaaaataaaaat

SEQ ID NO: 37380 - DNA, 40 bp, Homo sapiens
tttttatttttaagaccgaagagtgctattggaggacttt

SEQ ID NO: 37381 - DNA, 40 bp, Homo sapiens
aaagtcctccaatagcactcttcggtcttaaaaataaaaa

SEQ ID NO: 37382 - DNA, 40 bp, Homo sapiens
ttttatttttaagaccgaagagtgctattggaggactttg

SEQ ID NO: 37383 - DNA, 40 bp, Homo sapiens
caaagtcctccaatagcactcttcggtcttaaaaataaaa

SEQ ID NO: 37384 - DNA, 40 bp, Homo sapiens
tttatttttaagaccgaagagtgctattggaggactttga

SEQ ID NO: 37385 - DNA, 40 bp, Homo sapiens
tcaaagtcctccaatagcactcttcggtcttaaaaataaa

SEQ ID NO: 37386 - DNA, 40 bp, Homo sapiens
ttatttttaagaccgaagagtgctattggaggactttgag

SEQ ID NO: 37387 - DNA, 40 bp, Homo sapiens
ctcaaagtcctccaatagcactcttcggtcttaaaaataa

SEQ ID NO: 37388 - DNA, 40 bp, Homo sapiens
tatttttaagaccgaagagtgctattggaggactttgagc

SEQ ID NO: 37389 - DNA, 40 bp, Homo sapiens
gctcaaagtcctccaatagcactcttcggtcttaaaaata

SEQ ID NO: 37390 - DNA, 40 bp, Homo sapiens
atttttaagaccgaagagtgctattggaggactttgagca

SEQ ID NO: 37391 - DNA, 40 bp, Homo sapiens
tgctcaaagtcctccaatagcactcttcggtcttaaaaat

SEQ ID NO: 37392 - DNA, 40 bp, Homo sapiens
tttttaagaccgaagagtgctattggaggactttgagcaa

SEQ ID NO: 37393 - DNA, 40 bp, Homo sapiens
ttgctcaaagtcctccaatagcactcttcggtcttaaaaa

SEQ ID NO: 37394 - DNA, 40 bp, Homo sapiens
ttttaagaccgaagagtgctattggaggactttgagcaag

SEQ ID NO: 37395 - DNA, 40 bp, Homo sapiens
cttgctcaaagtcctccaatagcactcttcggtcttaaaa

SEQ ID NO: 37396 - DNA, 40 bp, Homo sapiens
tttaagaccgaagagtgctattggaggactttgagcaagt

SEQ ID NO: 37397 - DNA, 40 bp, Homo sapiens
acttgctcaaagtcctccaatagcactcttcggtcttaaa

SEQ ID NO: 37398 - DNA, 40 bp, Homo sapiens
ttaagaccgaagagtgctattggaggactttgagcaagtg

SEQ ID NO: 37399 - DNA, 40 bp, Homo sapiens
cacttgctcaaagtcctccaatagcactcttcggtcttaa

SEQ ID NO: 37400 - DNA, 40 bp, Homo sapiens
taagaccgaagagtgctattggaggactttgagcaagtga

SEQ ID NO: 37401 - DNA, 40 bp, Homo sapiens
tcacttgctcaaagtcctccaatagcactcttcggtctta

SEQ ID NO: 37402 - DNA, 40 bp, Homo sapiens
aagaccgaagagtgctattggaggactttgagcaagtgaa

SEQ ID NO: 37403 - DNA, 40 bp, Homo sapiens
ttcacttgctcaaagtcctccaatagcactcttcggtctt

SEQ ID NO: 37404 - DNA, 40 bp, Homo sapiens
agaccgaagagtgctattggaggactttgagcaagtgaat

SEQ ID NO: 37405 - DNA, 40 bp, Homo sapiens
attcacttgctcaaagtcctccaatagcactcttcggtct

SEQ ID NO: 37406 - DNA, 40 bp, Homo sapiens
gaccgaagagtgctattggaggactttgagcaagtgaatg

SEQ ID NO: 37407 - DNA, 40 bp, Homo sapiens
cattcacttgctcaaagtcctccaatagcactcttcggtc

SEQ ID NO: 37408 - DNA, 40 bp, Homo sapiens
accgaagagtgctattggaggactttgagcaagtgaatga

SEQ ID NO: 37409 - DNA, 40 bp, Homo sapiens
tcattcacttgctcaaagtcctccaatagcactcttcggt

SEQ ID NO: 37410 - DNA, 40 bp, Homo sapiens
ccgaagagtgctattggaggactttgagcaagtgaatgac

SEQ ID NO: 37411 - DNA, 40 bp, Homo sapiens
gtcattcacttgctcaaagtcctccaatagcactcttcgg

SEQ ID NO: 37412 - DNA, 40 bp, Homo sapiens
cgaagagtgctattggaggactttgagcaagtgaatgaca

SEQ ID NO: 37413 - DNA, 40 bp, Homo sapiens
tgtcattcacttgctcaaagtcctccaatagcactcttcg

SEQ ID NO: 37414 - DNA, 40 bp, Homo sapiens
gaagagtgctattggaggactttgagcaagtgaatgacat

SEQ ID NO: 37415 - DNA, 40 bp, Homo sapiens
atgtcattcacttgctcaaagtcctccaatagcactcttc

SEQ ID NO: 37416 - DNA, 40 bp, Homo sapiens
aagagtgctattggaggactttgagcaagtgaatgacatg

SEQ ID NO: 37417 - DNA, 40 bp, Homo sapiens
catgtcattcacttgctcaaagtcctccaatagcactctt

SEQ ID NO: 37418 - DNA, 40 bp, Homo sapiens
agagtgctattggaggactttgagcaagtgaatgacatga

SEQ ID NO: 37419 - DNA, 40 bp, Homo sapiens
tcatgtcattcacttgctcaaagtcctccaatagcactct

SEQ ID NO: 37420 - DNA, 40 bp, Homo sapiens
gagtgctattggaggactttgagcaagtgaatgacatgat

SEQ ID NO: 37421 - DNA, 40 bp, Homo sapiens
atcatgtcattcacttgctcaaagtcctccaatagcactc

SEQ ID NO: 37422 - DNA, 40 bp, Homo sapiens
agtgctattggaggactttgagcaagtgaatgacatgatc

SEQ ID NO: 37423 - DNA, 40 bp, Homo sapiens
gatcatgtcattcacttgctcaaagtcctccaatagcact

SEQ ID NO: 37424 - DNA, 40 bp, Homo sapiens
gtgctattggaggactttgagcaagtgaatgacatgatct

SEQ ID NO: 37425 - DNA, 40 bp, Homo sapiens
agatcatgtcattcacttgctcaaagtcctccaatagcac

SEQ ID NO: 37426 - DNA, 40 bp, Homo sapiens
tgctattggaggactttgagcaagtgaatgacatgatcta

SEQ ID NO: 37427 - DNA, 40 bp, Homo sapiens
tagatcatgtcattcacttgctcaaagtcctccaatagca

SEQ ID NO: 37428 - DNA, 40 bp, Homo sapiens
gctattggaggactttgagcaagtgaatgacatgatctaa

SEQ ID NO: 37429 - DNA, 40 bp, Homo sapiens
ttagatcatgtcattcacttgctcaaagtcctccaatagc

SEQ ID NO: 37430 - DNA, 40 bp, Homo sapiens
ctattggaggactttgagcaagtgaatgacatgatctaac

SEQ ID NO: 37431 - DNA, 40 bp, Homo sapiens
gttagatcatgtcattcacttgctcaaagtcctccaatag

SEQ ID NO: 37432 - DNA, 40 bp, Homo sapiens
tattggaggactttgagcaagtgaatgacatgatctaacc

SEQ ID NO: 37433 - DNA, 40 bp, Homo sapiens
ggttagatcatgtcattcacttgctcaaagtcctccaata

SEQ ID NO: 37434 - DNA, 40 bp, Homo sapiens
attggaggactttgagcaagtgaatgacatgatctaacct

SEQ ID NO: 37435 - DNA, 40 bp, Homo sapiens
aggttagatcatgtcattcacttgctcaaagtcctccaat

SEQ ID NO: 37436 - DNA, 40 bp, Homo sapiens
ttggaggactttgagcaagtgaatgacatgatctaaccta

SEQ ID NO: 37437 - DNA, 40 bp, Homo sapiens
taggttagatcatgtcattcacttgctcaaagtcctccaa

SEQ ID NO: 37438 - DNA, 40 bp, Homo sapiens
tggaggactttgagcaagtgaatgacatgatctaacctac

SEQ ID NO: 37439 - DNA, 40 bp, Homo sapiens
gtaggttagatcatgtcattcacttgctcaaagtcctcca

SEQ ID NO: 37440 - DNA, 40 bp, Homo sapiens
ggaggactttgagcaagtgaatgacatgatctaacctacc

SEQ ID NO: 37441 - DNA, 40 bp, Homo sapiens
ggtaggttagatcatgtcattcacttgctcaaagtcctcc

SEQ ID NO: 37442 - DNA, 40 bp, Homo sapiens
gaggactttgagcaagtgaatgacatgatctaacctacct

SEQ ID NO: 37443 - DNA, 40 bp, Homo sapiens
aggtaggttagatcatgtcattcacttgctcaaagtcctc

SEQ ID NO: 37444 - DNA, 40 bp, Homo sapiens
aggactttgagcaagtgaatgacatgatctaacctacctt

SEQ ID NO: 37445 - DNA, 40 bp, Homo sapiens
aaggtaggttagatcatgtcattcacttgctcaaagtcct

SEQ ID NO: 37446 - DNA, 40 bp, Homo sapiens
ggactttgagcaagtgaatgacatgatctaacctaccttc

SEQ ID NO: 37447 - DNA, 40 bp, Homo sapiens
gaaggtaggttagatcatgtcattcacttgctcaaagtcc

SEQ ID NO: 37448 - DNA, 40 bp, Homo sapiens
gactttgagcaagtgaatgacatgatctaacctaccttcg

SEQ ID NO: 37449 - DNA, 40 bp, Homo sapiens
cgaaggtaggttagatcatgtcattcacttgctcaaagtc

SEQ ID NO: 37450 - DNA, 40 bp, Homo sapiens
actttgagcaagtgaatgacatgatctaacctaccttcgt

SEQ ID NO: 37451 - DNA, 40 bp, Homo sapiens
acgaaggtaggttagatcatgtcattcacttgctcaaagt

SEQ ID NO: 37452 - DNA, 40 bp, Homo sapiens
ctttgagcaagtgaatgacatgatctaacctaccttcgtt

SEQ ID NO: 37453 - DNA, 40 bp, Homo sapiens
aacgaaggtaggttagatcatgtcattcacttgctcaaag

SEQ ID NO: 37454 - DNA, 40 bp, Homo sapiens
tttgagcaagtgaatgacatgatctaacctaccttcgttc

SEQ ID NO: 37455 - DNA, 40 bp, Homo sapiens
gaacgaaggtaggttagatcatgtcattcacttgctcaaa

SEQ ID NO: 37456 - DNA, 40 bp, Homo sapiens
ttgagcaagtgaatgacatgatctaacctaccttcgttca

SEQ ID NO: 37457 - DNA, 40 bp, Homo sapiens
tgaacgaaggtaggttagatcatgtcattcacttgctcaa

SEQ ID NO: 37458 - DNA, 40 bp, Homo sapiens
tgagcaagtgaatgacatgatctaacctaccttcgttcat

SEQ ID NO: 37459 - DNA, 40 bp, Homo sapiens
atgaacgaaggtaggttagatcatgtcattcacttgctca

SEQ ID NO: 37460 - DNA, 40 bp, Homo sapiens
gagcaagtgaatgacatgatctaacctaccttcgttcatt

SEQ ID NO: 37461 - DNA, 40 bp, Homo sapiens
aatgaacgaaggtaggttagatcatgtcattcacttgctc

SEQ ID NO: 37462 - DNA, 40 bp, Homo sapiens
agcaagtgaatgacatgatctaacctaccttcgttcattc

SEQ ID NO: 37463 - DNA, 40 bp, Homo sapiens
gaatgaacgaaggtaggttagatcatgtcattcacttgct

SEQ ID NO: 37464 - DNA, 40 bp, Homo sapiens
gcaagtgaatgacatgatctaacctaccttcgttcattca

SEQ ID NO: 37465 - DNA, 40 bp, Homo sapiens
tgaatgaacgaaggtaggttagatcatgtcattcacttgc

SEQ ID NO: 37466 - DNA, 40 bp, Homo sapiens
caagtgaatgacatgatctaacctaccttcgttcattcat

SEQ ID NO: 37467 - DNA, 40 bp, Homo sapiens
atgaatgaacgaaggtaggttagatcatgtcattcacttg

SEQ ID NO: 37468 - DNA, 40 bp, Homo sapiens
aagtgaatgacatgatctaacctaccttcgttcattcatt

SEQ ID NO: 37469 - DNA, 40 bp, Homo sapiens
aatgaatgaacgaaggtaggttagatcatgtcattcactt

SEQ ID NO: 37470 - DNA, 40 bp, Homo sapiens
agtgaatgacatgatctaacctaccttcgttcattcattc

SEQ ID NO: 37471 - DNA, 40 bp, Homo sapiens
gaatgaatgaacgaaggtaggttagatcatgtcattcact

SEQ ID NO: 37472 - DNA, 40 bp, Homo sapiens
gtgaatgacatgatctaacctaccttcgttcattcattca

SEQ ID NO: 37473 - DNA, 40 bp, Homo sapiens
tgaatgaatgaacgaaggtaggttagatcatgtcattcac

SEQ ID NO: 37474 - DNA, 40 bp, Homo sapiens
tgaatgacatgatctaacctaccttcgttcattcattcat

SEQ ID NO: 37475 - DNA, 40 bp, Homo sapiens
atgaatgaatgaacgaaggtaggttagatcatgtcattca

SEQ ID NO: 37476 - DNA, 40 bp, Homo sapiens
gaatgacatgatctaacctaccttcgttcattcattcatt

SEQ ID NO: 37477 - DNA, 40 bp, Homo sapiens
aatgaatgaatgaacgaaggtaggttagatcatgtcattc

SEQ ID NO: 37478 - DNA, 40 bp, Homo sapiens
aatgacatgatctaacctaccttcgttcattcattcattc

SEQ ID NO: 37479 - DNA, 40 bp, Homo sapiens
gaatgaatgaatgaacgaaggtaggttagatcatgtcatt

SEQ ID NO: 37480 - DNA, 40 bp, Homo sapiens
atgacatgatctaacctaccttcgttcattcattcattca

SEQ ID NO: 37481 - DNA, 40 bp, Homo sapiens
tgaatgaatgaatgaacgaaggtaggttagatcatgtcat

SEQ ID NO: 37482 - DNA, 40 bp, Homo sapiens
tgacatgatctaacctaccttcgttcattcattcattcat

SEQ ID NO: 37483 - DNA, 40 bp, Homo sapiens
atgaatgaatgaatgaacgaaggtaggttagatcatgtca

SEQ ID NO: 37484 - DNA, 40 bp, Homo sapiens
gacatgatctaacctaccttcgttcattcattcattcatt

SEQ ID NO: 37485 - DNA, 40 bp, Homo sapiens
aatgaatgaatgaatgaacgaaggtaggttagatcatgtc

SEQ ID NO: 37486 - DNA, 40 bp, Homo sapiens
acatgatctaacctaccttcgttcattcattcattcattc

SEQ ID NO: 37487 - DNA, 40 bp, Homo sapiens
gaatgaatgaatgaatgaacgaaggtaggttagatcatgt

SEQ ID NO: 37488 - DNA, 40 bp, Homo sapiens
catgatctaacctaccttcgttcattcattcattcattca

SEQ ID NO: 37489 - DNA, 40 bp, Homo sapiens
tgaatgaatgaatgaatgaacgaaggtaggttagatcatg

SEQ ID NO: 37490 - DNA, 40 bp, Homo sapiens
atgatctaacctaccttcgttcattcattcattcattcat

SEQ ID NO: 37491 - DNA, 40 bp, Homo sapiens
atgaatgaatgaatgaatgaacgaaggtaggttagatcat

SEQ ID NO: 37492 - DNA, 40 bp, Homo sapiens
tgatctaacctaccttcgttcattcattcattcattcatt

SEQ ID NO: 37493 - DNA, 40 bp, Homo sapiens
aatgaatgaatgaatgaatgaacgaaggtaggttagatca

SEQ ID NO: 37494 - DNA, 40 bp, Homo sapiens
gatctaacctaccttcgttcattcattcattcattcattt

SEQ ID NO: 37495 - DNA, 40 bp, Homo sapiens
aaatgaatgaatgaatgaatgaacgaaggtaggttagatc

SEQ ID NO: 37496 - DNA, 40 bp, Homo sapiens
atctaacctaccttcgttcattcattcattcattcatttt

SEQ ID NO: 37497 - DNA, 40 bp, Homo sapiens
aaaatgaatgaatgaatgaatgaacgaaggtaggttagat

SEQ ID NO: 37498 - DNA, 40 bp, Homo sapiens
tctaacctaccttcgttcattcattcattcattcattttc

SEQ ID NO: 37499 - DNA, 40 bp, Homo sapiens
gaaaatgaatgaatgaatgaatgaacgaaggtaggttaga

SEQ ID NO: 37500 - DNA, 40 bp, Homo sapiens
ctaacctaccttcgttcattcattcattcattcattttct

SEQ ID NO: 37501 - DNA, 40 bp, Homo sapiens
agaaaatgaatgaatgaatgaatgaacgaaggtaggttag

SEQ ID NO: 37502 - DNA, 40 bp, Homo sapiens
taacctaccttcgttcattcattcattcattcattttctt

SEQ ID NO: 37503 - DNA, 40 bp, Homo sapiens
aagaaaatgaatgaatgaatgaatgaacgaaggtaggtta

SEQ ID NO: 37504 - DNA, 40 bp, Homo sapiens
aacctaccttcgttcattcattcattcattcattttcttc

SEQ ID NO: 37505 - DNA, 40 bp, Homo sapiens
gaagaaaatgaatgaatgaatgaatgaacgaaggtaggtt

SEQ ID NO: 37506 - DNA, 40 bp, Homo sapiens
acctaccttcgttcattcattcattcattcattttcttcc

SEQ ID NO: 37507 - DNA, 40 bp, Homo sapiens
ggaagaaaatgaatgaatgaatgaatgaacgaaggtaggt

SEQ ID NO: 37508 - DNA, 40 bp, Homo sapiens
cctaccttcgttcattcattcattcattcattttcttcct

SEQ ID NO: 37509 - DNA, 40 bp, Homo sapiens
aggaagaaaatgaatgaatgaatgaatgaacgaaggtagg

SEQ ID NO: 37510 - DNA, 40 bp, Homo sapiens
ctaccttcgttcattcattcattcattcattttcttcctt

SEQ ID NO: 37511 - DNA, 40 bp, Homo sapiens
aaggaagaaaatgaatgaatgaatgaatgaacgaaggtag

SEQ ID NO: 37512 - DNA, 40 bp, Homo sapiens
taccttcgttcattcattcattcattcattttcttccttc

SEQ ID NO: 37513 - DNA, 40 bp, Homo sapiens
gaaggaagaaaatgaatgaatgaatgaatgaacgaaggta

SEQ ID NO: 37514 - DNA, 40 bp, Homo sapiens
accttcgttcattcattcattcattcattttcttccttcc

SEQ ID NO: 37515 - DNA, 40 bp, Homo sapiens
ggaaggaagaaaatgaatgaatgaatgaatgaacgaaggt

SEQ ID NO: 37516 - DNA, 40 bp, Homo sapiens
ccttcgttcattcattcattcattcattttcttccttcct

SEQ ID NO: 37517 - DNA, 40 bp, Homo sapiens
aggaaggaagaaaatgaatgaatgaatgaatgaacgaagg

SEQ ID NO: 37518 - DNA, 40 bp, Homo sapiens
cttcgttcattcattcattcattcattttcttccttcctg

SEQ ID NO: 37519 - DNA, 40 bp, Homo sapiens
caggaaggaagaaaatgaatgaatgaatgaatgaacgaag

SEQ ID NO: 37520 - DNA, 40 bp, Homo sapiens
ttcgttcattcattcattcattcattttcttccttcctgg

SEQ ID NO: 37521 - DNA, 40 bp, Homo sapiens
ccaggaaggaagaaaatgaatgaatgaatgaatgaacgaa

SEQ ID NO: 37522 - DNA, 40 bp, Homo sapiens
tcgttcattcattcattcattcattttcttccttcctggc

SEQ ID NO: 37523 - DNA, 40 bp, Homo sapiens
gccaggaaggaagaaaatgaatgaatgaatgaatgaacga

SEQ ID NO: 37524 - DNA, 40 bp, Homo sapiens
cgttcattcattcattcattcattttcttccttcctggct

SEQ ID NO: 37525 - DNA, 40 bp, Homo sapiens
agccaggaaggaagaaaatgaatgaatgaatgaatgaacg

SEQ ID NO: 37526 - DNA, 40 bp, Homo sapiens
gttcattcattcattcattcattttcttccttcctggctc

SEQ ID NO: 37527 - DNA, 40 bp, Homo sapiens
gagccaggaaggaagaaaatgaatgaatgaatgaatgaac

SEQ ID NO: 37528 - DNA, 40 bp, Homo sapiens
ttcattcattcattcattcattttcttccttcctggctca

SEQ ID NO: 37529 - DNA, 40 bp, Homo sapiens
tgagccaggaaggaagaaaatgaatgaatgaatgaatgaa

SEQ ID NO: 37530 - DNA, 40 bp, Homo sapiens
tcattcattcattcattcattttcttccttcctggctcaa

SEQ ID NO: 37531 - DNA, 40 bp, Homo sapiens
ttgagccaggaaggaagaaaatgaatgaatgaatgaatga

SEQ ID NO: 37532 - DNA, 40 bp, Homo sapiens
cattcattcattcattcattttcttccttcctggctcaag

SEQ ID NO: 37533 - DNA, 40 bp, Homo sapiens
cttgagccaggaaggaagaaaatgaatgaatgaatgaatg

SEQ ID NO: 37534 - DNA, 40 bp, Homo sapiens
attcattcattcattcattttcttccttcctggctcaagc

SEQ ID NO: 37535 - DNA, 40 bp, Homo sapiens
gcttgagccaggaaggaagaaaatgaatgaatgaatgaat

SEQ ID NO: 37536 - DNA, 40 bp, Homo sapiens
ttcattcattcattcattttcttccttcctggctcaagca

SEQ ID NO: 37537 - DNA, 40 bp, Homo sapiens
tgcttgagccaggaaggaagaaaatgaatgaatgaatgaa

SEQ ID NO: 37538 - DNA, 40 bp, Homo sapiens
tcattcattcattcattttcttccttcctggctcaagcag

SEQ ID NO: 37539 - DNA, 40 bp, Homo sapiens
ctgcttgagccaggaaggaagaaaatgaatgaatgaatga

SEQ ID NO: 37540 - DNA, 40 bp, Homo sapiens
cattcattcattcattttcttccttcctggctcaagcagt

SEQ ID NO: 37541 - DNA, 40 bp, Homo sapiens
actgcttgagccaggaaggaagaaaatgaatgaatgaatg

SEQ ID NO: 37542 - DNA, 40 bp, Homo sapiens
attcattcattcattttcttccttcctggctcaagcagtc

SEQ ID NO: 37543 - DNA, 40 bp, Homo sapiens
gactgcttgagccaggaaggaagaaaatgaatgaatgaat

SEQ ID NO: 37544 - DNA, 40 bp, Homo sapiens
ttcattcattcattttcttccttcctggctcaagcagtcc

SEQ ID NO: 37545 - DNA, 40 bp, Homo sapiens
ggactgcttgagccaggaaggaagaaaatgaatgaatgaa

SEQ ID NO: 37546 - DNA, 40 bp, Homo sapiens
tcattcattcattttcttccttcctggctcaagcagtcct

SEQ ID NO: 37547 - DNA, 40 bp, Homo sapiens
aggactgcttgagccaggaaggaagaaaatgaatgaatga

SEQ ID NO: 37548 - DNA, 40 bp, Homo sapiens
cattcattcattttcttccttcctggctcaagcagtcctc

SEQ ID NO: 37549 - DNA, 40 bp, Homo sapiens
gaggactgcttgagccaggaaggaagaaaatgaatgaatg

SEQ ID NO: 37550 - DNA, 40 bp, Homo sapiens
attcattcattttcttccttcctggctcaagcagtcctcc

SEQ ID NO: 37551 - DNA, 40 bp, Homo sapiens
ggaggactgcttgagccaggaaggaagaaaatgaatgaat

SEQ ID NO: 37552 - DNA, 40 bp, Homo sapiens
ttcattcattttcttccttcctggctcaagcagtcctccc

SEQ ID NO: 37553 - DNA, 40 bp, Homo sapiens
gggaggactgcttgagccaggaaggaagaaaatgaatgaa

SEQ ID NO: 37554 - DNA, 40 bp, Homo sapiens
tcattcattttcttccttcctggctcaagcagtcctccca

SEQ ID NO: 37555 - DNA, 40 bp, Homo sapiens
tgggaggactgcttgagccaggaaggaagaaaatgaatga

SEQ ID NO: 37556 - DNA, 40 bp, Homo sapiens
cattcattttcttccttcctggctcaagcagtcctcccac

SEQ ID NO: 37557 - DNA, 40 bp, Homo sapiens
gtgggaggactgcttgagccaggaaggaagaaaatgaatg

SEQ ID NO: 37558 - DNA, 40 bp, Homo sapiens
attcattttcttccttcctggctcaagcagtcctcccacc

SEQ ID NO: 37559 - DNA, 40 bp, Homo sapiens
ggtgggaggactgcttgagccaggaaggaagaaaatgaat

SEQ ID NO: 37560 - DNA, 40 bp, Homo sapiens
ttcattttcttccttcctggctcaagcagtcctcccacct

SEQ ID NO: 37561 - DNA, 40 bp, Homo sapiens
aggtgggaggactgcttgagccaggaaggaagaaaatgaa

SEQ ID NO: 37562 - DNA, 40 bp, Homo sapiens
tcattttcttccttcctggctcaagcagtcctcccacctg

SEQ ID NO: 37563 - DNA, 40 bp, Homo sapiens
caggtgggaggactgcttgagccaggaaggaagaaaatga

SEQ ID NO: 37564 - DNA, 40 bp, Homo sapiens
cattttcttccttcctggctcaagcagtcctcccacctga

SEQ ID NO: 37565 - DNA, 40 bp, Homo sapiens
tcaggtgggaggactgcttgagccaggaaggaagaaaatg

SEQ ID NO: 37566 - DNA, 40 bp, Homo sapiens
attttcttccttcctggctcaagcagtcctcccacctgag

SEQ ID NO: 37567 - DNA, 40 bp, Homo sapiens
ctcaggtgggaggactgcttgagccaggaaggaagaaaat

SEQ ID NO: 37568 - DNA, 40 bp, Homo sapiens
ttttcttccttcctggctcaagcagtcctcccacctgagc

SEQ ID NO: 37569 - DNA, 40 bp, Homo sapiens
gctcaggtgggaggactgcttgagccaggaaggaagaaaa

SEQ ID NO: 37570 - DNA, 40 bp, Homo sapiens
tttcttccttcctggctcaagcagtcctcccacctgagct

SEQ ID NO: 37571 - DNA, 40 bp, Homo sapiens
agctcaggtgggaggactgcttgagccaggaaggaagaaa

SEQ ID NO: 37572 - DNA, 40 bp, Homo sapiens
ttcttccttcctggctcaagcagtcctcccacctgagctc

SEQ ID NO: 37573 - DNA, 40 bp, Homo sapiens
gagctcaggtgggaggactgcttgagccaggaaggaagaa

SEQ ID NO: 37574 - DNA, 40 bp, Homo sapiens
tcttccttcctggctcaagcagtcctcccacctgagctcc

SEQ ID NO: 37575 - DNA, 40 bp, Homo sapiens
ggagctcaggtgggaggactgcttgagccaggaaggaaga

SEQ ID NO: 37576 - DNA, 40 bp, Homo sapiens
cttccttcctggctcaagcagtcctcccacctgagctccc

SEQ ID NO: 37577 - DNA, 40 bp, Homo sapiens
gggagctcaggtgggaggactgcttgagccaggaaggaag

SEQ ID NO: 37578 - DNA, 40 bp, Homo sapiens
ttccttcctggctcaagcagtcctcccacctgagctcccc

SEQ ID NO: 37579 - DNA, 40 bp, Homo sapiens
ggggagctcaggtgggaggactgcttgagccaggaaggaa

SEQ ID NO: 37580 - DNA, 40 bp, Homo sapiens
tccttcctggctcaagcagtcctcccacctgagctcccca

SEQ ID NO: 37581 - DNA, 40 bp, Homo sapiens
tggggagctcaggtgggaggactgcttgagccaggaagga

SEQ ID NO: 37582 - DNA, 40 bp, Homo sapiens
ccttcctggctcaagcagtcctcccacctgagctccccaa

SEQ ID NO: 37583 - DNA, 40 bp, Homo sapiens
ttggggagctcaggtgggaggactgcttgagccaggaagg

SEQ ID NO: 37584 - DNA, 40 bp, Homo sapiens
cttcctggctcaagcagtcctcccacctgagctccccaaa

SEQ ID NO: 37585 - DNA, 40 bp, Homo sapiens
tttggggagctcaggtgggaggactgcttgagccaggaag

SEQ ID NO: 37586 - DNA, 40 bp, Homo sapiens
ttcctggctcaagcagtcctcccacctgagctccccaaat

SEQ ID NO: 37587 - DNA, 40 bp, Homo sapiens
atttggggagctcaggtgggaggactgcttgagccaggaa

SEQ ID NO: 37588 - DNA, 40 bp, Homo sapiens
tcctggctcaagcagtcctcccacctgagctccccaaata

SEQ ID NO: 37589 - DNA, 40 bp, Homo sapiens
tatttggggagctcaggtgggaggactgcttgagccagga

SEQ ID NO: 37590 - DNA, 40 bp, Homo sapiens
cctggctcaagcagtcctcccacctgagctccccaaatag

SEQ ID NO: 37591 - DNA, 40 bp, Homo sapiens
ctatttggggagctcaggtgggaggactgcttgagccagg

SEQ ID NO: 37592 - DNA, 40 bp, Homo sapiens
ctggctcaagcagtcctcccacctgagctccccaaatagc

SEQ ID NO: 37593 - DNA, 40 bp, Homo sapiens
gctatttggggagctcaggtgggaggactgcttgagccag

SEQ ID NO: 37594 - DNA, 40 bp, Homo sapiens
tggctcaagcagtcctcccacctgagctccccaaatagct

SEQ ID NO: 37595 - DNA, 40 bp, Homo sapiens
agctatttggggagctcaggtgggaggactgcttgagcca

SEQ ID NO: 37596 - DNA, 40 bp, Homo sapiens
ggctcaagcagtcctcccacctgagctccccaaatagctg

SEQ ID NO: 37597 - DNA, 40 bp, Homo sapiens
cagctatttggggagctcaggtgggaggactgcttgagcc

SEQ ID NO: 37598 - DNA, 40 bp, Homo sapiens
gctcaagcagtcctcccacctgagctccccaaatagctgg

SEQ ID NO: 37599 - DNA, 40 bp, Homo sapiens
ccagctatttggggagctcaggtgggaggactgcttgagc

SEQ ID NO: 37600 - DNA, 40 bp, Homo sapiens
ctcaagcagtcctcccacctgagctccccaaatagctggg

SEQ ID NO: 37601 - DNA, 40 bp, Homo sapiens
cccagctatttggggagctcaggtgggaggactgcttgag

SEQ ID NO: 37602 - DNA, 40 bp, Homo sapiens
tcaagcagtcctcccacctgagctccccaaatagctggga

SEQ ID NO: 37603 - DNA, 40 bp, Homo sapiens
tcccagctatttggggagctcaggtgggaggactgcttga

SEQ ID NO: 37604 - DNA, 40 bp, Homo sapiens
caagcagtcctcccacctgagctccccaaatagctgggac

SEQ ID NO: 37605 - DNA, 40 bp, Homo sapiens
gtcccagctatttggggagctcaggtgggaggactgcttg

SEQ ID NO: 37606 - DNA, 40 bp, Homo sapiens
aagcagtcctcccacctgagctccccaaatagctgggact

SEQ ID NO: 37607 - DNA, 40 bp, Homo sapiens
agtcccagctatttggggagctcaggtgggaggactgctt

SEQ ID NO: 37608 - DNA, 40 bp, Homo sapiens
agcagtcctcccacctgagctccccaaatagctgggacta

SEQ ID NO: 37609 - DNA, 40 bp, Homo sapiens
tagtcccagctatttggggagctcaggtgggaggactgct

SEQ ID NO: 37610 - DNA, 40 bp, Homo sapiens
gcagtcctcccacctgagctccccaaatagctgggactac

SEQ ID NO: 37611 - DNA, 40 bp, Homo sapiens
gtagtcccagctatttggggagctcaggtgggaggactgc

SEQ ID NO: 37612 - DNA, 40 bp, Homo sapiens
cagtcctcccacctgagctccccaaatagctgggactaca

SEQ ID NO: 37613 - DNA, 40 bp, Homo sapiens
tgtagtcccagctatttggggagctcaggtgggaggactg

SEQ ID NO: 37614 - DNA, 40 bp, Homo sapiens
agtcctcccacctgagctccccaaatagctgggactacag

SEQ ID NO: 37615 - DNA, 40 bp, Homo sapiens
ctgtagtcccagctatttggggagctcaggtgggaggact

SEQ ID NO: 37616 - DNA, 40 bp, Homo sapiens
gtcctcccacctgagctccccaaatagctgggactacagg

SEQ ID NO: 37617 - DNA, 40 bp, Homo sapiens
cctgtagtcccagctatttggggagctcaggtgggaggac

SEQ ID NO: 37618 - DNA, 40 bp, Homo sapiens
tcctcccacctgagctccccaaatagctgggactacaggt

SEQ ID NO: 37619 - DNA, 40 bp, Homo sapiens
acctgtagtcccagctatttggggagctcaggtgggagga

SEQ ID NO: 37620 - DNA, 40 bp, Homo sapiens
cctcccacctgagctccccaaatagctgggactacaggta

SEQ ID NO: 37621 - DNA, 40 bp, Homo sapiens
tacctgtagtcccagctatttggggagctcaggtgggagg

SEQ ID NO: 37622 - DNA, 40 bp, Homo sapiens
ctcccacctgagctccccaaatagctgggactacaggtac

SEQ ID NO: 37623 - DNA, 40 bp, Homo sapiens
gtacctgtagtcccagctatttggggagctcaggtgggag

SEQ ID NO: 37624 - DNA, 40 bp, Homo sapiens
tcccacctgagctccccaaatagctgggactacaggtaca

SEQ ID NO: 37625 - DNA, 40 bp, Homo sapiens
tgtacctgtagtcccagctatttggggagctcaggtggga

SEQ ID NO: 37626 - DNA, 40 bp, Homo sapiens
cccacctgagctccccaaatagctgggactacaggtacac

SEQ ID NO: 37627 - DNA, 40 bp, Homo sapiens
gtgtacctgtagtcccagctatttggggagctcaggtggg

SEQ ID NO: 37628 - DNA, 40 bp, Homo sapiens
ccacctgagctccccaaatagctgggactacaggtacaca

SEQ ID NO: 37629 - DNA, 40 bp, Homo sapiens
tgtgtacctgtagtcccagctatttggggagctcaggtgg

SEQ ID NO: 37630 - DNA, 40 bp, Homo sapiens
cacctgagctccccaaatagctgggactacaggtacacac

SEQ ID NO: 37631 - DNA, 40 bp, Homo sapiens
gtgtgtacctgtagtcccagctatttggggagctcaggtg

SEQ ID NO: 37632 - DNA, 40 bp, Homo sapiens
acctgagctccccaaatagctgggactacaggtacacact

SEQ ID NO: 37633 - DNA, 40 bp, Homo sapiens
agtgtgtacctgtagtcccagctatttggggagctcaggt

SEQ ID NO: 37634 - DNA, 40 bp, Homo sapiens
cctgagctccccaaatagctgggactacaggtacacacta

SEQ ID NO: 37635 - DNA, 40 bp, Homo sapiens
tagtgtgtacctgtagtcccagctatttggggagctcagg

SEQ ID NO: 37636 - DNA, 40 bp, Homo sapiens
ctgagctccccaaatagctgggactacaggtacacactac

SEQ ID NO: 37637 - DNA, 40 bp, Homo sapiens
gtagtgtgtacctgtagtcccagctatttggggagctcag

SEQ ID NO: 37638 - DNA, 40 bp, Homo sapiens
tgagctccccaaatagctgggactacaggtacacactacc

SEQ ID NO: 37639 - DNA, 40 bp, Homo sapiens
ggtagtgtgtacctgtagtcccagctatttggggagctca

SEQ ID NO: 37640 - DNA, 40 bp, Homo sapiens
gagctccccaaatagctgggactacaggtacacactacca

SEQ ID NO: 37641 - DNA, 40 bp, Homo sapiens
tggtagtgtgtacctgtagtcccagctatttggggagctc

SEQ ID NO: 37642 - DNA, 40 bp, Homo sapiens
agctccccaaatagctgggactacaggtacacactaccac

SEQ ID NO: 37643 - DNA, 40 bp, Homo sapiens
gtggtagtgtgtacctgtagtcccagctatttggggagct

SEQ ID NO: 37644 - DNA, 40 bp, Homo sapiens
gctccccaaatagctgggactacaggtacacactaccaca

SEQ ID NO: 37645 - DNA, 40 bp, Homo sapiens
tgtggtagtgtgtacctgtagtcccagctatttggggagc

SEQ ID NO: 37646 - DNA, 40 bp, Homo sapiens
ctccccaaatagctgggactacaggtacacactaccacac

SEQ ID NO: 37647 - DNA, 40 bp, Homo sapiens
gtgtggtagtgtgtacctgtagtcccagctatttggggag

SEQ ID NO: 37648 - DNA, 40 bp, Homo sapiens
tccccaaatagctgggactacaggtacacactaccacacc

SEQ ID NO: 37649 - DNA, 40 bp, Homo sapiens
ggtgtggtagtgtgtacctgtagtcccagctatttgggga

SEQ ID NO: 37650 - DNA, 40 bp, Homo sapiens
ccccaaatagctgggactacaggtacacactaccacacct

SEQ ID NO: 37651 - DNA, 40 bp, Homo sapiens
aggtgtggtagtgtgtacctgtagtcccagctatttgggg

SEQ ID NO: 37652 - DNA, 40 bp, Homo sapiens
cccaaatagctgggactacaggtacacactaccacaccta

SEQ ID NO: 37653 - DNA, 40 bp, Homo sapiens
taggtgtggtagtgtgtacctgtagtcccagctatttggg

SEQ ID NO: 37654 - DNA, 40 bp, Homo sapiens
ccaaatagctgggactacaggtacacactaccacacctaa

SEQ ID NO: 37655 - DNA, 40 bp, Homo sapiens
ttaggtgtggtagtgtgtacctgtagtcccagctatttgg

SEQ ID NO: 37656 - DNA, 40 bp, Homo sapiens
caaatagctgggactacaggtacacactaccacacctaat

SEQ ID NO: 37657 - DNA, 40 bp, Homo sapiens
attaggtgtggtagtgtgtacctgtagtcccagctatttg

SEQ ID NO: 37658 - DNA, 40 bp, Homo sapiens
aaatagctgggactacaggtacacactaccacacctaatt

SEQ ID NO: 37659 - DNA, 40 bp, Homo sapiens
aattaggtgtggtagtgtgtacctgtagtcccagctattt

SEQ ID NO: 37660 - DNA, 40 bp, Homo sapiens
aatagctgggactacaggtacacactaccacacctaattt

SEQ ID NO: 37661 - DNA, 40 bp, Homo sapiens
aaattaggtgtggtagtgtgtacctgtagtcccagctatt

SEQ ID NO: 37662 - DNA, 40 bp, Homo sapiens
atagctgggactacaggtacacactaccacacctaatttt

SEQ ID NO: 37663 - DNA, 40 bp, Homo sapiens
aaaattaggtgtggtagtgtgtacctgtagtcccagctat

SEQ ID NO: 37664 - DNA, 40 bp, Homo sapiens
tagctgggactacaggtacacactaccacacctaattttt

SEQ ID NO: 37665 - DNA, 40 bp, Homo sapiens
aaaaattaggtgtggtagtgtgtacctgtagtcccagcta

SEQ ID NO: 37666 - DNA, 40 bp, Homo sapiens
agctgggactacaggtacacactaccacacctaatttttt

SEQ ID NO: 37667 - DNA, 40 bp, Homo sapiens
aaaaaattaggtgtggtagtgtgtacctgtagtcccagct

SEQ ID NO: 37668 - DNA, 40 bp, Homo sapiens
gctgggactacaggtacacactaccacacctaattttttt

SEQ ID NO: 37669 - DNA, 40 bp, Homo sapiens
aaaaaaattaggtgtggtagtgtgtacctgtagtcccagc

SEQ ID NO: 37670 - DNA, 40 bp, Homo sapiens
ctgggactacaggtacacactaccacacctaatttttttt

SEQ ID NO: 37671 - DNA, 40 bp, Homo sapiens
aaaaaaaattaggtgtggtagtgtgtacctgtagtcccag

SEQ ID NO: 37672 - DNA, 40 bp, Homo sapiens
tgggactacaggtacacactaccacacctaattttttttt

SEQ ID NO: 37673 - DNA, 40 bp, Homo sapiens
aaaaaaaaattaggtgtggtagtgtgtacctgtagtccca

SEQ ID NO: 37674 - DNA, 40 bp, Homo sapiens
gggactacaggtacacactaccacacctaatttttttttg

SEQ ID NO: 37675 - DNA, 40 bp, Homo sapiens
caaaaaaaaattaggtgtggtagtgtgtacctgtagtccc

SEQ ID NO: 37676 - DNA, 40 bp, Homo sapiens
ggactacaggtacacactaccacacctaatttttttttgt

SEQ ID NO: 37677 - DNA, 40 bp, Homo sapiens
acaaaaaaaaattaggtgtggtagtgtgtacctgtagtcc

SEQ ID NO: 37678 - DNA, 40 bp, Homo sapiens
gactacaggtacacactaccacacctaatttttttttgta

SEQ ID NO: 37679 - DNA, 40 bp, Homo sapiens
tacaaaaaaaaattaggtgtggtagtgtgtacctgtagtc

SEQ ID NO: 37680 - DNA, 40 bp, Homo sapiens
actacaggtacacactaccacacctaatttttttttgtat

SEQ ID NO: 37681 - DNA, 40 bp, Homo sapiens
atacaaaaaaaaattaggtgtggtagtgtgtacctgtagt

SEQ ID NO: 37682 - DNA, 40 bp, Homo sapiens
ctacaggtacacactaccacacctaatttttttttgtatt

SEQ ID NO: 37683 - DNA, 40 bp, Homo sapiens
aatacaaaaaaaaattaggtgtggtagtgtgtacctgtag

SEQ ID NO: 37684 - DNA, 40 bp, Homo sapiens
tacaggtacacactaccacacctaatttttttttgtattt

SEQ ID NO: 37685 - DNA, 40 bp, Homo sapiens
aaatacaaaaaaaaattaggtgtggtagtgtgtacctgta

SEQ ID NO: 37686 - DNA, 40 bp, Homo sapiens
acaggtacacactaccacacctaatttttttttgtatttt

SEQ ID NO: 37687 - DNA, 40 bp, Homo sapiens
aaaatacaaaaaaaaattaggtgtggtagtgtgtacctgt

SEQ ID NO: 37688 - DNA, 40 bp, Homo sapiens
caggtacacactaccacacctaatttttttttgtattttt

SEQ ID NO: 37689 - DNA, 40 bp, Homo sapiens
aaaaatacaaaaaaaaattaggtgtggtagtgtgtacctg

SEQ ID NO: 37690 - DNA, 40 bp, Homo sapiens
aggtacacactaccacacctaatttttttttgtatttttt

SEQ ID NO: 37691 - DNA, 40 bp, Homo sapiens
aaaaaatacaaaaaaaaattaggtgtggtagtgtgtacct

SEQ ID NO: 37692 - DNA, 40 bp, Homo sapiens
ggtacacactaccacacctaatttttttttgtattttttg

SEQ ID NO: 37693 - DNA, 40 bp, Homo sapiens
caaaaaatacaaaaaaaaattaggtgtggtagtgtgtacc

SEQ ID NO: 37694 - DNA, 40 bp, Homo sapiens
gtacacactaccacacctaatttttttttgtattttttgt

SEQ ID NO: 37695 - DNA, 40 bp, Homo sapiens
acaaaaaatacaaaaaaaaattaggtgtggtagtgtgtac

SEQ ID NO: 37696 - DNA, 40 bp, Homo sapiens
tacacactaccacacctaatttttttttgtattttttgta

SEQ ID NO: 37697 - DNA, 40 bp, Homo sapiens
tacaaaaaatacaaaaaaaaattaggtgtggtagtgtgta

SEQ ID NO: 37698 - DNA, 40 bp, Homo sapiens
acacactaccacacctaatttttttttgtattttttgtat

SEQ ID NO: 37699 - DNA, 40 bp, Homo sapiens
atacaaaaaatacaaaaaaaaattaggtgtggtagtgtgt

SEQ ID NO: 37700 - DNA, 40 bp, Homo sapiens
cacactaccacacctaatttttttttgtattttttgtatt

SEQ ID NO: 37701 - DNA, 40 bp, Homo sapiens
aatacaaaaaatacaaaaaaaaattaggtgtggtagtgtg

SEQ ID NO: 37702 - DNA, 40 bp, Homo sapiens
acactaccacacctaatttttttttgtattttttgtattt

SEQ ID NO: 37703 - DNA, 40 bp, Homo sapiens
aaatacaaaaaatacaaaaaaaaattaggtgtggtagtgt

SEQ ID NO: 37704 - DNA, 40 bp, Homo sapiens
cactaccacacctaatttttttttgtattttttgtatttt

SEQ ID NO: 37705 - DNA, 40 bp, Homo sapiens
aaaatacaaaaaatacaaaaaaaaattaggtgtggtagtg

SEQ ID NO: 37706 - DNA, 40 bp, Homo sapiens
actaccacacctaatttttttttgtattttttgtattttt

SEQ ID NO: 37707 - DNA, 40 bp, Homo sapiens
aaaaatacaaaaaatacaaaaaaaaattaggtgtggtagt

SEQ ID NO: 37708 - DNA, 40 bp, Homo sapiens
ctaccacacctaatttttttttgtattttttgtatttttg

SEQ ID NO: 37709 - DNA, 40 bp, Homo sapiens
caaaaatacaaaaaatacaaaaaaaaattaggtgtggtag

SEQ ID NO: 37710 - DNA, 40 bp, Homo sapiens
taccacacctaatttttttttgtattttttgtatttttga

SEQ ID NO: 37711 - DNA, 40 bp, Homo sapiens
tcaaaaatacaaaaaatacaaaaaaaaattaggtgtggta

SEQ ID NO: 37712 - DNA, 40 bp, Homo sapiens
accacacctaatttttttttgtattttttgtatttttgat

SEQ ID NO: 37713 - DNA, 40 bp, Homo sapiens
atcaaaaatacaaaaaatacaaaaaaaaattaggtgtggt

SEQ ID NO: 37714 - DNA, 40 bp, Homo sapiens
ccacacctaatttttttttgtattttttgtatttttgatg

SEQ ID NO: 37715 - DNA, 40 bp, Homo sapiens
catcaaaaatacaaaaaatacaaaaaaaaattaggtgtgg

SEQ ID NO: 37716 - DNA, 40 bp, Homo sapiens
cacacctaatttttttttgtattttttgtatttttgatgg

SEQ ID NO: 37717 - DNA, 40 bp, Homo sapiens
ccatcaaaaatacaaaaaatacaaaaaaaaattaggtgtg

SEQ ID NO: 37718 - DNA, 40 bp, Homo sapiens
acacctaatttttttttgtattttttgtatttttgatggg

SEQ ID NO: 37719 - DNA, 40 bp, Homo sapiens
cccatcaaaaatacaaaaaatacaaaaaaaaattaggtgt

SEQ ID NO: 37720 - DNA, 40 bp, Homo sapiens
cacctaatttttttttgtattttttgtatttttgatggga

SEQ ID NO: 37721 - DNA, 40 bp, Homo sapiens
tcccatcaaaaatacaaaaaatacaaaaaaaaattaggtg

SEQ ID NO: 37722 - DNA, 40 bp, Homo sapiens
acctaatttttttttgtattttttgtatttttgatgggat

SEQ ID NO: 37723 - DNA, 40 bp, Homo sapiens
atcccatcaaaaatacaaaaaatacaaaaaaaaattaggt

SEQ ID NO: 37724 - DNA, 40 bp, Homo sapiens
cctaatttttttttgtattttttgtatttttgatgggatt

SEQ ID NO: 37725 - DNA, 40 bp, Homo sapiens
aatcccatcaaaaatacaaaaaatacaaaaaaaaattagg

SEQ ID NO: 37726 - DNA, 40 bp, Homo sapiens
ctaatttttttttgtattttttgtatttttgatgggattt

SEQ ID NO: 37727 - DNA, 40 bp, Homo sapiens
aaatcccatcaaaaatacaaaaaatacaaaaaaaaattag

SEQ ID NO: 37728 - DNA, 40 bp, Homo sapiens
taatttttttttgtattttttgtatttttgatgggatttt

SEQ ID NO: 37729 - DNA, 40 bp, Homo sapiens
aaaatcccatcaaaaatacaaaaaatacaaaaaaaaatta

SEQ ID NO: 37730 - DNA, 40 bp, Homo sapiens
aatttttttttgtattttttgtatttttgatgggatttta

SEQ ID NO: 37731 - DNA, 40 bp, Homo sapiens
taaaatcccatcaaaaatacaaaaaatacaaaaaaaaatt

SEQ ID NO: 37732 - DNA, 40 bp, Homo sapiens
atttttttttgtattttttgtatttttgatgggattttac

SEQ ID NO: 37733 - DNA, 40 bp, Homo sapiens
gtaaaatcccatcaaaaatacaaaaaatacaaaaaaaaat

SEQ ID NO: 37734 - DNA, 40 bp, Homo sapiens
tttttttttgtattttttgtatttttgatgggattttacc

SEQ ID NO: 37735 - DNA, 40 bp, Homo sapiens
ggtaaaatcccatcaaaaatacaaaaaatacaaaaaaaaa

SEQ ID NO: 37736 - DNA, 40 bp, Homo sapiens
ttttttttgtattttttgtatttttgatgggattttacca

SEQ ID NO: 37737 - DNA, 40 bp, Homo sapiens
tggtaaaatcccatcaaaaatacaaaaaatacaaaaaaaa

SEQ ID NO: 37738 - DNA, 40 bp, Homo sapiens
tttttttgtattttttgtatttttgatgggattttaccat

SEQ ID NO: 37739 - DNA, 40 bp, Homo sapiens
atggtaaaatcccatcaaaaatacaaaaaatacaaaaaaa

SEQ ID NO: 37740 - DNA, 40 bp, Homo sapiens
ttttttgtattttttgtatttttgatgggattttaccatg

SEQ ID NO: 37741 - DNA, 40 bp, Homo sapiens
catggtaaaatcccatcaaaaatacaaaaaatacaaaaaa

SEQ ID NO: 37742 - DNA, 40 bp, Homo sapiens
tttttgtattttttgtatttttgatgggattttaccatgt

SEQ ID NO: 37743 - DNA, 40 bp, Homo sapiens
acatggtaaaatcccatcaaaaatacaaaaaatacaaaaa

SEQ ID NO: 37744 - DNA, 40 bp, Homo sapiens
ttttgtattttttgtatttttgatgggattttaccatgtt

SEQ ID NO: 37745 - DNA, 40 bp, Homo sapiens
aacatggtaaaatcccatcaaaaatacaaaaaatacaaaa

SEQ ID NO: 37746 - DNA, 40 bp, Homo sapiens
tttgtattttttgtatttttgatgggattttaccatgttg

SEQ ID NO: 37747 - DNA, 40 bp, Homo sapiens
caacatggtaaaatcccatcaaaaatacaaaaaatacaaa

SEQ ID NO: 37748 - DNA, 40 bp, Homo sapiens
ttgtattttttgtatttttgatgggattttaccatgttgg

SEQ ID NO: 37749 - DNA, 40 bp, Homo sapiens
ccaacatggtaaaatcccatcaaaaatacaaaaaatacaa

SEQ ID NO: 37750 - DNA, 40 bp, Homo sapiens
tgtattttttgtatttttgatgggattttaccatgttggc

SEQ ID NO: 37751 - DNA, 40 bp, Homo sapiens
gccaacatggtaaaatcccatcaaaaatacaaaaaataca

SEQ ID NO: 37752 - DNA, 40 bp, Homo sapiens
gtattttttgtatttttgatgggattttaccatgttggcc

SEQ ID NO: 37753 - DNA, 40 bp, Homo sapiens
ggccaacatggtaaaatcccatcaaaaatacaaaaaatac

SEQ ID NO: 37754 - DNA, 40 bp, Homo sapiens
tattttttgtatttttgatgggattttaccatgttggcca

SEQ ID NO: 37755 - DNA, 40 bp, Homo sapiens
tggccaacatggtaaaatcccatcaaaaatacaaaaaata

SEQ ID NO: 37756 - DNA, 40 bp, Homo sapiens
attttttgtatttttgatgggattttaccatgttggccag

SEQ ID NO: 37757 - DNA, 40 bp, Homo sapiens
ctggccaacatggtaaaatcccatcaaaaatacaaaaaat

SEQ ID NO: 37758 - DNA, 40 bp, Homo sapiens
ttttttgtatttttgatgggattttaccatgttggccagg

SEQ ID NO: 37759 - DNA, 40 bp, Homo sapiens
cctggccaacatggtaaaatcccatcaaaaatacaaaaaa

SEQ ID NO: 37760 - DNA, 40 bp, Homo sapiens
tttttgtatttttgatgggattttaccatgttggccaggc

SEQ ID NO: 37761 - DNA, 40 bp, Homo sapiens
gcctggccaacatggtaaaatcccatcaaaaatacaaaaa

SEQ ID NO: 37762 - DNA, 40 bp, Homo sapiens
ttttgtatttttgatgggattttaccatgttggccaggct

SEQ ID NO: 37763 - DNA, 40 bp, Homo sapiens
agcctggccaacatggtaaaatcccatcaaaaatacaaaa

SEQ ID NO: 37764 - DNA, 40 bp, Homo sapiens
tttgtatttttgatgggattttaccatgttggccaggctg

SEQ ID NO: 37765 - DNA, 40 bp, Homo sapiens
cagcctggccaacatggtaaaatcccatcaaaaatacaaa

SEQ ID NO: 37766 - DNA, 40 bp, Homo sapiens
ttgtatttttgatgggattttaccatgttggccaggctgg

SEQ ID NO: 37767 - DNA, 40 bp, Homo sapiens
ccagcctggccaacatggtaaaatcccatcaaaaatacaa

SEQ ID NO: 37768 - DNA, 40 bp, Homo sapiens
tgtatttttgatgggattttaccatgttggccaggctggt

SEQ ID NO: 37769 - DNA, 40 bp, Homo sapiens
accagcctggccaacatggtaaaatcccatcaaaaataca

SEQ ID NO: 37770 - DNA, 40 bp, Homo sapiens
gtatttttgatgggattttaccatgttggccaggctggtc

SEQ ID NO: 37771 - DNA, 40 bp, Homo sapiens
gaccagcctggccaacatggtaaaatcccatcaaaaatac

SEQ ID NO: 37772 - DNA, 40 bp, Homo sapiens
tatttttgatgggattttaccatgttggccaggctggtct

SEQ ID NO: 37773 - DNA, 40 bp, Homo sapiens
agaccagcctggccaacatggtaaaatcccatcaaaaata

SEQ ID NO: 37774 - DNA, 40 bp, Homo sapiens
atttttgatgggattttaccatgttggccaggctggtctt

SEQ ID NO: 37775 - DNA, 40 bp, Homo sapiens
aagaccagcctggccaacatggtaaaatcccatcaaaaat

SEQ ID NO: 37776 - DNA, 40 bp, Homo sapiens
tttttgatgggattttaccatgttggccaggctggtcttg

SEQ ID NO: 37777 - DNA, 40 bp, Homo sapiens
caagaccagcctggccaacatggtaaaatcccatcaaaaa

SEQ ID NO: 37778 - DNA, 40 bp, Homo sapiens
ttttgatgggattttaccatgttggccaggctggtcttga

SEQ ID NO: 37779 - DNA, 40 bp, Homo sapiens
tcaagaccagcctggccaacatggtaaaatcccatcaaaa

SEQ ID NO: 37780 - DNA, 40 bp, Homo sapiens
tttgatgggattttaccatgttggccaggctggtcttgaa

SEQ ID NO: 37781 - DNA, 40 bp, Homo sapiens
ttcaagaccagcctggccaacatggtaaaatcccatcaaa

SEQ ID NO: 37782 - DNA, 40 bp, Homo sapiens
ttgatgggattttaccatgttggccaggctggtcttgaac

SEQ ID NO: 37783 - DNA, 40 bp, Homo sapiens
gttcaagaccagcctggccaacatggtaaaatcccatcaa

SEQ ID NO: 37784 - DNA, 40 bp, Homo sapiens
tgatgggattttaccatgttggccaggctggtcttgaact

SEQ ID NO: 37785 - DNA, 40 bp, Homo sapiens
agttcaagaccagcctggccaacatggtaaaatcccatca

SEQ ID NO: 37786 - DNA, 40 bp, Homo sapiens
gatgggattttaccatgttggccaggctggtcttgaactc

SEQ ID NO: 37787 - DNA, 40 bp, Homo sapiens
gagttcaagaccagcctggccaacatggtaaaatcccatc

SEQ ID NO: 37788 - DNA, 40 bp, Homo sapiens
atgggattttaccatgttggccaggctggtcttgaactct

SEQ ID NO: 37789 - DNA, 40 bp, Homo sapiens
agagttcaagaccagcctggccaacatggtaaaatcccat

SEQ ID NO: 37790 - DNA, 40 bp, Homo sapiens
tgggattttaccatgttggccaggctggtcttgaactctt

SEQ ID NO: 37791 - DNA, 40 bp, Homo sapiens
aagagttcaagaccagcctggccaacatggtaaaatccca

SEQ ID NO: 37792 - DNA, 40 bp, Homo sapiens
gggattttaccatgttggccaggctggtcttgaactcttg

SEQ ID NO: 37793 - DNA, 40 bp, Homo sapiens
caagagttcaagaccagcctggccaacatggtaaaatccc

SEQ ID NO: 37794 - DNA, 40 bp, Homo sapiens
ggattttaccatgttggccaggctggtcttgaactcttga

SEQ ID NO: 37795 - DNA, 40 bp, Homo sapiens
tcaagagttcaagaccagcctggccaacatggtaaaatcc

SEQ ID NO: 37796 - DNA, 40 bp, Homo sapiens
gattttaccatgttggccaggctggtcttgaactcttgac

SEQ ID NO: 37797 - DNA, 40 bp, Homo sapiens
gtcaagagttcaagaccagcctggccaacatggtaaaatc

SEQ ID NO: 37798 - DNA, 40 bp, Homo sapiens
attttaccatgttggccaggctggtcttgaactcttgacc

SEQ ID NO: 37799 - DNA, 40 bp, Homo sapiens
ggtcaagagttcaagaccagcctggccaacatggtaaaat

SEQ ID NO: 37800 - DNA, 40 bp, Homo sapiens
ttttaccatgttggccaggctggtcttgaactcttgacct

SEQ ID NO: 37801 - DNA, 40 bp, Homo sapiens
aggtcaagagttcaagaccagcctggccaacatggtaaaa

SEQ ID NO: 37802 - DNA, 40 bp, Homo sapiens
tttaccatgttggccaggctggtcttgaactcttgacctc

SEQ ID NO: 37803 - DNA, 40 bp, Homo sapiens
gaggtcaagagttcaagaccagcctggccaacatggtaaa

SEQ ID NO: 37804 - DNA, 40 bp, Homo sapiens
ttaccatgttggccaggctggtcttgaactcttgacctca

SEQ ID NO: 37805 - DNA, 40 bp, Homo sapiens
tgaggtcaagagttcaagaccagcctggccaacatggtaa

SEQ ID NO: 37806 - DNA, 40 bp, Homo sapiens
taccatgttggccaggctggtcttgaactcttgacctcag

SEQ ID NO: 37807 - DNA, 40 bp, Homo sapiens
ctgaggtcaagagttcaagaccagcctggccaacatggta

SEQ ID NO: 37808 - DNA, 40 bp, Homo sapiens
accatgttggccaggctggtcttgaactcttgacctcagg

SEQ ID NO: 37809 - DNA, 40 bp, Homo sapiens
cctgaggtcaagagttcaagaccagcctggccaacatggt

SEQ ID NO: 37810 - DNA, 40 bp, Homo sapiens
ccatgttggccaggctggtcttgaactcttgacctcaggt

SEQ ID NO: 37811 - DNA, 40 bp, Homo sapiens
acctgaggtcaagagttcaagaccagcctggccaacatgg

SEQ ID NO: 37812 - DNA, 40 bp, Homo sapiens
catgttggccaggctggtcttgaactcttgacctcaggtg

SEQ ID NO: 37813 - DNA, 40 bp, Homo sapiens
cacctgaggtcaagagttcaagaccagcctggccaacatg

SEQ ID NO: 37814 - DNA, 40 bp, Homo sapiens
atgttggccaggctggtcttgaactcttgacctcaggtga

SEQ ID NO: 37815 - DNA, 40 bp, Homo sapiens
tcacctgaggtcaagagttcaagaccagcctggccaacat

SEQ ID NO: 37816 - DNA, 40 bp, Homo sapiens
tgttggccaggctggtcttgaactcttgacctcaggtgat

SEQ ID NO: 37817 - DNA, 40 bp, Homo sapiens
atcacctgaggtcaagagttcaagaccagcctggccaaca

SEQ ID NO: 37818 - DNA, 40 bp, Homo sapiens
gttggccaggctggtcttgaactcttgacctcaggtgatc

SEQ ID NO: 37819 - DNA, 40 bp, Homo sapiens
gatcacctgaggtcaagagttcaagaccagcctggccaac

SEQ ID NO: 37820 - DNA, 40 bp, Homo sapiens
ttggccaggctggtcttgaactcttgacctcaggtgatcc

SEQ ID NO: 37821 - DNA, 40 bp, Homo sapiens
ggatcacctgaggtcaagagttcaagaccagcctggccaa

SEQ ID NO: 37822 - DNA, 40 bp, Homo sapiens
tggccaggctggtcttgaactcttgacctcaggtgatcca

SEQ ID NO: 37823 - DNA, 40 bp, Homo sapiens
tggatcacctgaggtcaagagttcaagaccagcctggcca

SEQ ID NO: 37824 - DNA, 40 bp, Homo sapiens
ggccaggctggtcttgaactcttgacctcaggtgatccac

SEQ ID NO: 37825 - DNA, 40 bp, Homo sapiens
gtggatcacctgaggtcaagagttcaagaccagcctggcc

SEQ ID NO: 37826 - DNA, 40 bp, Homo sapiens
gccaggctggtcttgaactcttgacctcaggtgatccacc

SEQ ID NO: 37827 - DNA, 40 bp, Homo sapiens
ggtggatcacctgaggtcaagagttcaagaccagcctggc

SEQ ID NO: 37828 - DNA, 40 bp, Homo sapiens
ccaggctggtcttgaactcttgacctcaggtgatccacct

SEQ ID NO: 37829 - DNA, 40 bp, Homo sapiens
aggtggatcacctgaggtcaagagttcaagaccagcctgg

SEQ ID NO: 37830 - DNA, 40 bp, Homo sapiens
caggctggtcttgaactcttgacctcaggtgatccacctg

SEQ ID NO: 37831 - DNA, 40 bp, Homo sapiens
caggtggatcacctgaggtcaagagttcaagaccagcctg

SEQ ID NO: 37832 - DNA, 40 bp, Homo sapiens
aggctggtcttgaactcttgacctcaggtgatccacctgt

SEQ ID NO: 37833 - DNA, 40 bp, Homo sapiens
acaggtggatcacctgaggtcaagagttcaagaccagcct

SEQ ID NO: 37834 - DNA, 40 bp, Homo sapiens
ggctggtcttgaactcttgacctcaggtgatccacctgtc

SEQ ID NO: 37835 - DNA, 40 bp, Homo sapiens
gacaggtggatcacctgaggtcaagagttcaagaccagcc

SEQ ID NO: 37836 - DNA, 40 bp, Homo sapiens
gctggtcttgaactcttgacctcaggtgatccacctgtct

SEQ ID NO: 37837 - DNA, 40 bp, Homo sapiens
agacaggtggatcacctgaggtcaagagttcaagaccagc

SEQ ID NO: 37838 - DNA, 40 bp, Homo sapiens
ctggtcttgaactcttgacctcaggtgatccacctgtctc

SEQ ID NO: 37839 - DNA, 40 bp, Homo sapiens
gagacaggtggatcacctgaggtcaagagttcaagaccag

SEQ ID NO: 37840 - DNA, 40 bp, Homo sapiens
tggtcttgaactcttgacctcaggtgatccacctgtctcg

SEQ ID NO: 37841 - DNA, 40 bp, Homo sapiens
cgagacaggtggatcacctgaggtcaagagttcaagacca

SEQ ID NO: 37842 - DNA, 40 bp, Homo sapiens
ggtcttgaactcttgacctcaggtgatccacctgtctcgg

SEQ ID NO: 37843 - DNA, 40 bp, Homo sapiens
ccgagacaggtggatcacctgaggtcaagagttcaagacc

SEQ ID NO: 37844 - DNA, 40 bp, Homo sapiens
gtcttgaactcttgacctcaggtgatccacctgtctcggc

SEQ ID NO: 37845 - DNA, 40 bp, Homo sapiens
gccgagacaggtggatcacctgaggtcaagagttcaagac

SEQ ID NO: 37846 - DNA, 40 bp, Homo sapiens
tcttgaactcttgacctcaggtgatccacctgtctcggcc

SEQ ID NO: 37847 - DNA, 40 bp, Homo sapiens
ggccgagacaggtggatcacctgaggtcaagagttcaaga

SEQ ID NO: 37848 - DNA, 40 bp, Homo sapiens
cttgaactcttgacctcaggtgatccacctgtctcggcct

SEQ ID NO: 37849 - DNA, 40 bp, Homo sapiens
aggccgagacaggtggatcacctgaggtcaagagttcaag

SEQ ID NO: 37850 - DNA, 40 bp, Homo sapiens
ttgaactcttgacctcaggtgatccacctgtctcggcctc

SEQ ID NO: 37851 - DNA, 40 bp, Homo sapiens
gaggccgagacaggtggatcacctgaggtcaagagttcaa

SEQ ID NO: 37852 - DNA, 40 bp, Homo sapiens
tgaactcttgacctcaggtgatccacctgtctcggcctcc

SEQ ID NO: 37853 - DNA, 40 bp, Homo sapiens
ggaggccgagacaggtggatcacctgaggtcaagagttca

SEQ ID NO: 37854 - DNA, 40 bp, Homo sapiens
gaactcttgacctcaggtgatccacctgtctcggcctccc

SEQ ID NO: 37855 - DNA, 40 bp, Homo sapiens
gggaggccgagacaggtggatcacctgaggtcaagagttc

SEQ ID NO: 37856 - DNA, 40 bp, Homo sapiens
aactcttgacctcaggtgatccacctgtctcggcctccca

SEQ ID NO: 37857 - DNA, 40 bp, Homo sapiens
tgggaggccgagacaggtggatcacctgaggtcaagagtt

SEQ ID NO: 37858 - DNA, 40 bp, Homo sapiens
actcttgacctcaggtgatccacctgtctcggcctcccaa

SEQ ID NO: 37859 - DNA, 40 bp, Homo sapiens
ttgggaggccgagacaggtggatcacctgaggtcaagagt

SEQ ID NO: 37860 - DNA, 40 bp, Homo sapiens
ctcttgacctcaggtgatccacctgtctcggcctcccaag

SEQ ID NO: 37861 - DNA, 40 bp, Homo sapiens
cttgggaggccgagacaggtggatcacctgaggtcaagag

SEQ ID NO: 37862 - DNA, 40 bp, Homo sapiens
tcttgacctcaggtgatccacctgtctcggcctcccaagg

SEQ ID NO: 37863 - DNA, 40 bp, Homo sapiens
ccttgggaggccgagacaggtggatcacctgaggtcaaga

SEQ ID NO: 37864 - DNA, 40 bp, Homo sapiens
cttgacctcaggtgatccacctgtctcggcctcccaaggt

SEQ ID NO: 37865 - DNA, 40 bp, Homo sapiens
accttgggaggccgagacaggtggatcacctgaggtcaag

SEQ ID NO: 37866 - DNA, 40 bp, Homo sapiens
ttgacctcaggtgatccacctgtctcggcctcccaaggtg

SEQ ID NO: 37867 - DNA, 40 bp, Homo sapiens
caccttgggaggccgagacaggtggatcacctgaggtcaa

SEQ ID NO: 37868 - DNA, 40 bp, Homo sapiens
tgacctcaggtgatccacctgtctcggcctcccaaggtgt

SEQ ID NO: 37869 - DNA, 40 bp, Homo sapiens
acaccttgggaggccgagacaggtggatcacctgaggtca

SEQ ID NO: 37870 - DNA, 40 bp, Homo sapiens
gacctcaggtgatccacctgtctcggcctcccaaggtgtt

SEQ ID NO: 37871 - DNA, 40 bp, Homo sapiens
aacaccttgggaggccgagacaggtggatcacctgaggtc

SEQ ID NO: 37872 - DNA, 40 bp, Homo sapiens
acctcaggtgatccacctgtctcggcctcccaaggtgttg

SEQ ID NO: 37873 - DNA, 40 bp, Homo sapiens
caacaccttgggaggccgagacaggtggatcacctgaggt

SEQ ID NO: 37874 - DNA, 40 bp, Homo sapiens
cctcaggtgatccacctgtctcggcctcccaaggtgttgg

SEQ ID NO: 37875 - DNA, 40 bp, Homo sapiens
ccaacaccttgggaggccgagacaggtggatcacctgagg

SEQ ID NO: 37876 - DNA, 40 bp, Homo sapiens
ctcaggtgatccacctgtctcggcctcccaaggtgttggg

SEQ ID NO: 37877 - DNA, 40 bp, Homo sapiens
cccaacaccttgggaggccgagacaggtggatcacctgag

SEQ ID NO: 37878 - DNA, 40 bp, Homo sapiens
tcaggtgatccacctgtctcggcctcccaaggtgttggga

SEQ ID NO: 37879 - DNA, 40 bp, Homo sapiens
tcccaacaccttgggaggccgagacaggtggatcacctga

SEQ ID NO: 37880 - DNA, 40 bp, Homo sapiens
caggtgatccacctgtctcggcctcccaaggtgttgggat

SEQ ID NO: 37881 - DNA, 40 bp, Homo sapiens
atcccaacaccttgggaggccgagacaggtggatcacctg

SEQ ID NO: 37882 - DNA, 40 bp, Homo sapiens
aggtgatccacctgtctcggcctcccaaggtgttgggatt

SEQ ID NO: 37883 - DNA, 40 bp, Homo sapiens
aatcccaacaccttgggaggccgagacaggtggatcacct

SEQ ID NO: 37884 - DNA, 40 bp, Homo sapiens
ggtgatccacctgtctcggcctcccaaggtgttgggatta

SEQ ID NO: 37885 - DNA, 40 bp, Homo sapiens
taatcccaacaccttgggaggccgagacaggtggatcacc

SEQ ID NO: 37886 - DNA, 40 bp, Homo sapiens
gtgatccacctgtctcggcctcccaaggtgttgggattat

SEQ ID NO: 37887 - DNA, 40 bp, Homo sapiens
ataatcccaacaccttgggaggccgagacaggtggatcac

SEQ ID NO: 37888 - DNA, 40 bp, Homo sapiens
tgatccacctgtctcggcctcccaaggtgttgggattata

SEQ ID NO: 37889 - DNA, 40 bp, Homo sapiens
tataatcccaacaccttgggaggccgagacaggtggatca

SEQ ID NO: 37890 - DNA, 40 bp, Homo sapiens
gatccacctgtctcggcctcccaaggtgttgggattatag

SEQ ID NO: 37891 - DNA, 40 bp, Homo sapiens
ctataatcccaacaccttgggaggccgagacaggtggatc

SEQ ID NO: 37892 - DNA, 40 bp, Homo sapiens
atccacctgtctcggcctcccaaggtgttgggattatagg

SEQ ID NO: 37893 - DNA, 40 bp, Homo sapiens
cctataatcccaacaccttgggaggccgagacaggtggat

SEQ ID NO: 37894 - DNA, 40 bp, Homo sapiens
tccacctgtctcggcctcccaaggtgttgggattataggt

SEQ ID NO: 37895 - DNA, 40 bp, Homo sapiens
acctataatcccaacaccttgggaggccgagacaggtgga

SEQ ID NO: 37896 - DNA, 40 bp, Homo sapiens
ccacctgtctcggcctcccaaggtgttgggattataggtg

SEQ ID NO: 37897 - DNA, 40 bp, Homo sapiens
cacctataatcccaacaccttgggaggccgagacaggtgg

SEQ ID NO: 37898 - DNA, 40 bp, Homo sapiens
cacctgtctcggcctcccaaggtgttgggattataggtgc

SEQ ID NO: 37899 - DNA, 40 bp, Homo sapiens
gcacctataatcccaacaccttgggaggccgagacaggtg

SEQ ID NO: 37900 - DNA, 40 bp, Homo sapiens
acctgtctcggcctcccaaggtgttgggattataggtgcc

SEQ ID NO: 37901 - DNA, 40 bp, Homo sapiens
ggcacctataatcccaacaccttgggaggccgagacaggt

SEQ ID NO: 37902 - DNA, 40 bp, Homo sapiens
cctgtctcggcctcccaaggtgttgggattataggtgcct

SEQ ID NO: 37903 - DNA, 40 bp, Homo sapiens
aggcacctataatcccaacaccttgggaggccgagacagg

SEQ ID NO: 37904 - DNA, 40 bp, Homo sapiens
ctgtctcggcctcccaaggtgttgggattataggtgccta

SEQ ID NO: 37905 - DNA, 40 bp, Homo sapiens
taggcacctataatcccaacaccttgggaggccgagacag

SEQ ID NO: 37906 - DNA, 40 bp, Homo sapiens
tgtctcggcctcccaaggtgttgggattataggtgcctag

SEQ ID NO: 37907 - DNA, 40 bp, Homo sapiens
ctaggcacctataatcccaacaccttgggaggccgagaca

SEQ ID NO: 37908 - DNA, 40 bp, Homo sapiens
gtctcggcctcccaaggtgttgggattataggtgcctagc

SEQ ID NO: 37909 - DNA, 40 bp, Homo sapiens
gctaggcacctataatcccaacaccttgggaggccgagac

SEQ ID NO: 37910 - DNA, 40 bp, Homo sapiens
tctcggcctcccaaggtgttgggattataggtgcctagcc

SEQ ID NO: 37911 - DNA, 40 bp, Homo sapiens
ggctaggcacctataatcccaacaccttgggaggccgaga

SEQ ID NO: 37912 - DNA, 40 bp, Homo sapiens
ctcggcctcccaaggtgttgggattataggtgcctagccc

SEQ ID NO: 37913 - DNA, 40 bp, Homo sapiens
gggctaggcacctataatcccaacaccttgggaggccgag

SEQ ID NO: 37914 - DNA, 40 bp, Homo sapiens
tcggcctcccaaggtgttgggattataggtgcctagccca

SEQ ID NO: 37915 - DNA, 40 bp, Homo sapiens
tgggctaggcacctataatcccaacaccttgggaggccga

SEQ ID NO: 37916 - DNA, 40 bp, Homo sapiens
cggcctcccaaggtgttgggattataggtgcctagcccat

SEQ ID NO: 37917 - DNA, 40 bp, Homo sapiens
atgggctaggcacctataatcccaacaccttgggaggccg

SEQ ID NO: 37918 - DNA, 40 bp, Homo sapiens
ggcctcccaaggtgttgggattataggtgcctagcccatg

SEQ ID NO: 37919 - DNA, 40 bp, Homo sapiens
catgggctaggcacctataatcccaacaccttgggaggcc

SEQ ID NO: 37920 - DNA, 40 bp, Homo sapiens
gcctcccaaggtgttgggattataggtgcctagcccatgg

SEQ ID NO: 37921 - DNA, 40 bp, Homo sapiens
ccatgggctaggcacctataatcccaacaccttgggaggc

SEQ ID NO: 37922 - DNA, 40 bp, Homo sapiens
cctcccaaggtgttgggattataggtgcctagcccatggt

SEQ ID NO: 37923 - DNA, 40 bp, Homo sapiens
accatgggctaggcacctataatcccaacaccttgggagg

SEQ ID NO: 37924 - DNA, 40 bp, Homo sapiens
ctcccaaggtgttgggattataggtgcctagcccatggtg

SEQ ID NO: 37925 - DNA, 40 bp, Homo sapiens
caccatgggctaggcacctataatcccaacaccttgggag

SEQ ID NO: 37926 - DNA, 40 bp, Homo sapiens
tcccaaggtgttgggattataggtgcctagcccatggtgc

SEQ ID NO: 37927 - DNA, 40 bp, Homo sapiens
gcaccatgggctaggcacctataatcccaacaccttggga

SEQ ID NO: 37928 - DNA, 40 bp, Homo sapiens
cccaaggtgttgggattataggtgcctagcccatggtgcc

SEQ ID NO: 37929 - DNA, 40 bp, Homo sapiens
ggcaccatgggctaggcacctataatcccaacaccttggg

SEQ ID NO: 37930 - DNA, 40 bp, Homo sapiens
ccaaggtgttgggattataggtgcctagcccatggtgcct

SEQ ID NO: 37931 - DNA, 40 bp, Homo sapiens
aggcaccatgggctaggcacctataatcccaacaccttgg

SEQ ID NO: 37932 - DNA, 40 bp, Homo sapiens
caaggtgttgggattataggtgcctagcccatggtgccta

SEQ ID NO: 37933 - DNA, 40 bp, Homo sapiens
taggcaccatgggctaggcacctataatcccaacaccttg

SEQ ID NO: 37934 - DNA, 40 bp, Homo sapiens
aaggtgttgggattataggtgcctagcccatggtgcctag

SEQ ID NO: 37935 - DNA, 40 bp, Homo sapiens
ctaggcaccatgggctaggcacctataatcccaacacctt

SEQ ID NO: 37936 - DNA, 40 bp, Homo sapiens
aggtgttgggattataggtgcctagcccatggtgcctagc

SEQ ID NO: 37937 - DNA, 40 bp, Homo sapiens
gctaggcaccatgggctaggcacctataatcccaacacct

SEQ ID NO: 37938 - DNA, 40 bp, Homo sapiens
ggtgttgggattataggtgcctagcccatggtgcctagcc

SEQ ID NO: 37939 - DNA, 40 bp, Homo sapiens
ggctaggcaccatgggctaggcacctataatcccaacacc

SEQ ID NO: 37940 - DNA, 40 bp, Homo sapiens
gtgttgggattataggtgcctagcccatggtgcctagccc

SEQ ID NO: 37941 - DNA, 40 bp, Homo sapiens
gggctaggcaccatgggctaggcacctataatcccaacac

SEQ ID NO: 37942 - DNA, 40 bp, Homo sapiens
tgttgggattataggtgcctagcccatggtgcctagccct

SEQ ID NO: 37943 - DNA, 40 bp, Homo sapiens
agggctaggcaccatgggctaggcacctataatcccaaca

SEQ ID NO: 37944 - DNA, 40 bp, Homo sapiens
gttgggattataggtgcctagcccatggtgcctagcccta

SEQ ID NO: 37945 - DNA, 40 bp, Homo sapiens
tagggctaggcaccatgggctaggcacctataatcccaac

SEQ ID NO: 37946 - DNA, 40 bp, Homo sapiens
ttgggattataggtgcctagcccatggtgcctagccctaa

SEQ ID NO: 37947 - DNA, 40 bp, Homo sapiens
ttagggctaggcaccatgggctaggcacctataatcccaa

SEQ ID NO: 37948 - DNA, 40 bp, Homo sapiens
tgggattataggtgcctagcccatggtgcctagccctaac

SEQ ID NO: 37949 - DNA, 40 bp, Homo sapiens
gttagggctaggcaccatgggctaggcacctataatccca

SEQ ID NO: 37950 - DNA, 40 bp, Homo sapiens
gggattataggtgcctagcccatggtgcctagccctaacc

SEQ ID NO: 37951 - DNA, 40 bp, Homo sapiens
ggttagggctaggcaccatgggctaggcacctataatccc

SEQ ID NO: 37952 - DNA, 40 bp, Homo sapiens
ggattataggtgcctagcccatggtgcctagccctaacct

SEQ ID NO: 37953 - DNA, 40 bp, Homo sapiens
aggttagggctaggcaccatgggctaggcacctataatcc

SEQ ID NO: 37954 - DNA, 40 bp, Homo sapiens
gattataggtgcctagcccatggtgcctagccctaaccta

SEQ ID NO: 37955 - DNA, 40 bp, Homo sapiens
taggttagggctaggcaccatgggctaggcacctataatc

SEQ ID NO: 37956 - DNA, 40 bp, Homo sapiens
attataggtgcctagcccatggtgcctagccctaacctac

SEQ ID NO: 37957 - DNA, 40 bp, Homo sapiens
gtaggttagggctaggcaccatgggctaggcacctataat

SEQ ID NO: 37958 - DNA, 40 bp, Homo sapiens
ttataggtgcctagcccatggtgcctagccctaacctaca

SEQ ID NO: 37959 - DNA, 40 bp, Homo sapiens
tgtaggttagggctaggcaccatgggctaggcacctataa

SEQ ID NO: 37960 - DNA, 40 bp, Homo sapiens
tataggtgcctagcccatggtgcctagccctaacctacat

SEQ ID NO: 37961 - DNA, 40 bp, Homo sapiens
atgtaggttagggctaggcaccatgggctaggcacctata

SEQ ID NO: 37962 - DNA, 40 bp, Homo sapiens
ataggtgcctagcccatggtgcctagccctaacctacatt

SEQ ID NO: 37963 - DNA, 40 bp, Homo sapiens
aatgtaggttagggctaggcaccatgggctaggcacctat

SEQ ID NO: 37964 - DNA, 40 bp, Homo sapiens
taggtgcctagcccatggtgcctagccctaacctacattt

SEQ ID NO: 37965 - DNA, 40 bp, Homo sapiens
aaatgtaggttagggctaggcaccatgggctaggcaccta

SEQ ID NO: 37966 - DNA, 40 bp, Homo sapiens
aggtgcctagcccatggtgcctagccctaacctacattta

SEQ ID NO: 37967 - DNA, 40 bp, Homo sapiens
taaatgtaggttagggctaggcaccatgggctaggcacct

SEQ ID NO: 37968 - DNA, 40 bp, Homo sapiens
ggtgcctagcccatggtgcctagccctaacctacatttat

SEQ ID NO: 37969 - DNA, 40 bp, Homo sapiens
ataaatgtaggttagggctaggcaccatgggctaggcacc

SEQ ID NO: 37970 - DNA, 40 bp, Homo sapiens
gtgcctagcccatggtgcctagccctaacctacatttata

SEQ ID NO: 37971 - DNA, 40 bp, Homo sapiens
tataaatgtaggttagggctaggcaccatgggctaggcac

SEQ ID NO: 37972 - DNA, 40 bp, Homo sapiens
tgcctagcccatggtgcctagccctaacctacatttataa

SEQ ID NO: 37973 - DNA, 40 bp, Homo sapiens
ttataaatgtaggttagggctaggcaccatgggctaggca

SEQ ID NO: 37974 - DNA, 40 bp, Homo sapiens
gcctagcccatggtgcctagccctaacctacatttataaa

SEQ ID NO: 37975 - DNA, 40 bp, Homo sapiens
tttataaatgtaggttagggctaggcaccatgggctaggc

SEQ ID NO: 37976 - DNA, 40 bp, Homo sapiens
cctagcccatggtgcctagccctaacctacatttataaac

SEQ ID NO: 37977 - DNA, 40 bp, Homo sapiens
gtttataaatgtaggttagggctaggcaccatgggctagg

SEQ ID NO: 37978 - DNA, 40 bp, Homo sapiens
ctagcccatggtgcctagccctaacctacatttataaact

SEQ ID NO: 37979 - DNA, 40 bp, Homo sapiens
agtttataaatgtaggttagggctaggcaccatgggctag

SEQ ID NO: 37980 - DNA, 40 bp, Homo sapiens
tagcccatggtgcctagccctaacctacatttataaacta

SEQ ID NO: 37981 - DNA, 40 bp, Homo sapiens
tagtttataaatgtaggttagggctaggcaccatgggcta

SEQ ID NO: 37982 - DNA, 40 bp, Homo sapiens
agcccatggtgcctagccctaacctacatttataaactat

SEQ ID NO: 37983 - DNA, 40 bp, Homo sapiens
atagtttataaatgtaggttagggctaggcaccatgggct

SEQ ID NO: 37984 - DNA, 40 bp, Homo sapiens
gcccatggtgcctagccctaacctacatttataaactatc

SEQ ID NO: 37985 - DNA, 40 bp, Homo sapiens
gatagtttataaatgtaggttagggctaggcaccatgggc

SEQ ID NO: 37986 - DNA, 40 bp, Homo sapiens
cccatggtgcctagccctaacctacatttataaactatca

SEQ ID NO: 37987 - DNA, 40 bp, Homo sapiens
tgatagtttataaatgtaggttagggctaggcaccatggg

SEQ ID NO: 37988 - DNA, 40 bp, Homo sapiens
ccatggtgcctagccctaacctacatttataaactatcac

SEQ ID NO: 37989 - DNA, 40 bp, Homo sapiens
gtgatagtttataaatgtaggttagggctaggcaccatgg

SEQ ID NO: 37990 - DNA, 40 bp, Homo sapiens
catggtgcctagccctaacctacatttataaactatcact

SEQ ID NO: 37991 - DNA, 40 bp, Homo sapiens
agtgatagtttataaatgtaggttagggctaggcaccatg

SEQ ID NO: 37992 - DNA, 40 bp, Homo sapiens
atggtgcctagccctaacctacatttataaactatcactt

SEQ ID NO: 37993 - DNA, 40 bp, Homo sapiens
aagtgatagtttataaatgtaggttagggctaggcaccat

SEQ ID NO: 37994 - DNA, 40 bp, Homo sapiens
tggtgcctagccctaacctacatttataaactatcacttg

SEQ ID NO: 37995 - DNA, 40 bp, Homo sapiens
caagtgatagtttataaatgtaggttagggctaggcacca

SEQ ID NO: 37996 - DNA, 40 bp, Homo sapiens
ggtgcctagccctaacctacatttataaactatcacttgc

SEQ ID NO: 37997 - DNA, 40 bp, Homo sapiens
gcaagtgatagtttataaatgtaggttagggctaggcacc

SEQ ID NO: 37998 - DNA, 40 bp, Homo sapiens
gtgcctagccctaacctacatttataaactatcacttgct

SEQ ID NO: 37999 - DNA, 40 bp, Homo sapiens
agcaagtgatagtttataaatgtaggttagggctaggcac

SEQ ID NO: 38000 - DNA, 40 bp, Homo sapiens
tgcctagccctaacctacatttataaactatcacttgctg

SEQ ID NO: 38001 - DNA, 40 bp, Homo sapiens
cagcaagtgatagtttataaatgtaggttagggctaggca

SEQ ID NO: 38002 - DNA, 40 bp, Homo sapiens
gcctagccctaacctacatttataaactatcacttgctgc

SEQ ID NO: 38003 - DNA, 40 bp, Homo sapiens
gcagcaagtgatagtttataaatgtaggttagggctaggc

SEQ ID NO: 38004 - DNA, 40 bp, Homo sapiens
cctagccctaacctacatttataaactatcacttgctgct

SEQ ID NO: 38005 - DNA, 40 bp, Homo sapiens
agcagcaagtgatagtttataaatgtaggttagggctagg

SEQ ID NO: 38006 - DNA, 40 bp, Homo sapiens
ctagccctaacctacatttataaactatcacttgctgctg

SEQ ID NO: 38007 - DNA, 40 bp, Homo sapiens
cagcagcaagtgatagtttataaatgtaggttagggctag

SEQ ID NO: 38008 - DNA, 40 bp, Homo sapiens
tagccctaacctacatttataaactatcacttgctgctgt

SEQ ID NO: 38009 - DNA, 40 bp, Homo sapiens
acagcagcaagtgatagtttataaatgtaggttagggcta

SEQ ID NO: 38010 - DNA, 40 bp, Homo sapiens
agccctaacctacatttataaactatcacttgctgctgtg

SEQ ID NO: 38011 - DNA, 40 bp, Homo sapiens
cacagcagcaagtgatagtttataaatgtaggttagggct

SEQ ID NO: 38012 - DNA, 40 bp, Homo sapiens
gccctaacctacatttataaactatcacttgctgctgtgt

SEQ ID NO: 38013 - DNA, 40 bp, Homo sapiens
acacagcagcaagtgatagtttataaatgtaggttagggc

SEQ ID NO: 38014 - DNA, 40 bp, Homo sapiens
ccctaacctacatttataaactatcacttgctgctgtgtg

SEQ ID NO: 38015 - DNA, 40 bp, Homo sapiens
cacacagcagcaagtgatagtttataaatgtaggttaggg

SEQ ID NO: 38016 - DNA, 40 bp, Homo sapiens
cctaacctacatttataaactatcacttgctgctgtgtgg

SEQ ID NO: 38017 - DNA, 40 bp, Homo sapiens
ccacacagcagcaagtgatagtttataaatgtaggttagg

SEQ ID NO: 38018 - DNA, 40 bp, Homo sapiens
ctaacctacatttataaactatcacttgctgctgtgtgga

SEQ ID NO: 38019 - DNA, 40 bp, Homo sapiens
tccacacagcagcaagtgatagtttataaatgtaggttag

SEQ ID NO: 38020 - DNA, 40 bp, Homo sapiens
taacctacatttataaactatcacttgctgctgtgtggag

SEQ ID NO: 38021 - DNA, 40 bp, Homo sapiens
ctccacacagcagcaagtgatagtttataaatgtaggtta

SEQ ID NO: 38022 - DNA, 40 bp, Homo sapiens
aacctacatttataaactatcacttgctgctgtgtggaga

SEQ ID NO: 38023 - DNA, 40 bp, Homo sapiens
tctccacacagcagcaagtgatagtttataaatgtaggtt

SEQ ID NO: 38024 - DNA, 40 bp, Homo sapiens
acctacatttataaactatcacttgctgctgtgtggagac

SEQ ID NO: 38025 - DNA, 40 bp, Homo sapiens
gtctccacacagcagcaagtgatagtttataaatgtaggt

SEQ ID NO: 38026 - DNA, 40 bp, Homo sapiens
cctacatttataaactatcacttgctgctgtgtggagact

SEQ ID NO: 38027 - DNA, 40 bp, Homo sapiens
agtctccacacagcagcaagtgatagtttataaatgtagg

SEQ ID NO: 38028 - DNA, 40 bp, Homo sapiens
ctacatttataaactatcacttgctgctgtgtggagacta

SEQ ID NO: 38029 - DNA, 40 bp, Homo sapiens
tagtctccacacagcagcaagtgatagtttataaatgtag

SEQ ID NO: 38030 - DNA, 40 bp, Homo sapiens
tacatttataaactatcacttgctgctgtgtggagactat

SEQ ID NO: 38031 - DNA, 40 bp, Homo sapiens
atagtctccacacagcagcaagtgatagtttataaatgta

SEQ ID NO: 38032 - DNA, 40 bp, Homo sapiens
acatttataaactatcacttgctgctgtgtggagactata

SEQ ID NO: 38033 - DNA, 40 bp, Homo sapiens
tatagtctccacacagcagcaagtgatagtttataaatgt

SEQ ID NO: 38034 - DNA, 40 bp, Homo sapiens
catttataaactatcacttgctgctgtgtggagactatat

SEQ ID NO: 38035 - DNA, 40 bp, Homo sapiens
atatagtctccacacagcagcaagtgatagtttataaatg

SEQ ID NO: 38036 - DNA, 40 bp, Homo sapiens
atttataaactatcacttgctgctgtgtggagactatatt

SEQ ID NO: 38037 - DNA, 40 bp, Homo sapiens
aatatagtctccacacagcagcaagtgatagtttataaat

SEQ ID NO: 38038 - DNA, 40 bp, Homo sapiens
tttataaactatcacttgctgctgtgtggagactatattg

SEQ ID NO: 38039 - DNA, 40 bp, Homo sapiens
caatatagtctccacacagcagcaagtgatagtttataaa

SEQ ID NO: 38040 - DNA, 40 bp, Homo sapiens
ttataaactatcacttgctgctgtgtggagactatattgt

SEQ ID NO: 38041 - DNA, 40 bp, Homo sapiens
acaatatagtctccacacagcagcaagtgatagtttataa

SEQ ID NO: 38042 - DNA, 40 bp, Homo sapiens
tataaactatcacttgctgctgtgtggagactatattgtg

SEQ ID NO: 38043 - DNA, 40 bp, Homo sapiens
cacaatatagtctccacacagcagcaagtgatagtttata

SEQ ID NO: 38044 - DNA, 40 bp, Homo sapiens
ataaactatcacttgctgctgtgtggagactatattgtga

SEQ ID NO: 38045 - DNA, 40 bp, Homo sapiens
tcacaatatagtctccacacagcagcaagtgatagtttat

SEQ ID NO: 38046 - DNA, 40 bp, Homo sapiens
taaactatcacttgctgctgtgtggagactatattgtgag

SEQ ID NO: 38047 - DNA, 40 bp, Homo sapiens
ctcacaatatagtctccacacagcagcaagtgatagttta

SEQ ID NO: 38048 - DNA, 40 bp, Homo sapiens
aaactatcacttgctgctgtgtggagactatattgtgaga

SEQ ID NO: 38049 - DNA, 40 bp, Homo sapiens
tctcacaatatagtctccacacagcagcaagtgatagttt

SEQ ID NO: 38050 - DNA, 40 bp, Homo sapiens
aactatcacttgctgctgtgtggagactatattgtgagat

SEQ ID NO: 38051 - DNA, 40 bp, Homo sapiens
atctcacaatatagtctccacacagcagcaagtgatagtt

SEQ ID NO: 38052 - DNA, 40 bp, Homo sapiens
actatcacttgctgctgtgtggagactatattgtgagatt

SEQ ID NO: 38053 - DNA, 40 bp, Homo sapiens
aatctcacaatatagtctccacacagcagcaagtgatagt

SEQ ID NO: 38054 - DNA, 40 bp, Homo sapiens
ctatcacttgctgctgtgtggagactatattgtgagatta

SEQ ID NO: 38055 - DNA, 40 bp, Homo sapiens
taatctcacaatatagtctccacacagcagcaagtgatag

SEQ ID NO: 38056 - DNA, 40 bp, Homo sapiens
tatcacttgctgctgtgtggagactatattgtgagattaa

SEQ ID NO: 38057 - DNA, 40 bp, Homo sapiens
ttaatctcacaatatagtctccacacagcagcaagtgata

SEQ ID NO: 38058 - DNA, 40 bp, Homo sapiens
atcacttgctgctgtgtggagactatattgtgagattaac

SEQ ID NO: 38059 - DNA, 40 bp, Homo sapiens
gttaatctcacaatatagtctccacacagcagcaagtgat

SEQ ID NO: 38060 - DNA, 40 bp, Homo sapiens
tcacttgctgctgtgtggagactatattgtgagattaaca

SEQ ID NO: 38061 - DNA, 40 bp, Homo sapiens
tgttaatctcacaatatagtctccacacagcagcaagtga

SEQ ID NO: 38062 - DNA, 40 bp, Homo sapiens
cacttgctgctgtgtggagactatattgtgagattaacag

SEQ ID NO: 38063 - DNA, 40 bp, Homo sapiens
ctgttaatctcacaatatagtctccacacagcagcaagtg

SEQ ID NO: 38064 - DNA, 40 bp, Homo sapiens
acttgctgctgtgtggagactatattgtgagattaacagc

SEQ ID NO: 38065 - DNA, 40 bp, Homo sapiens
gctgttaatctcacaatatagtctccacacagcagcaagt

SEQ ID NO: 38066 - DNA, 40 bp, Homo sapiens
cttgctgctgtgtggagactatattgtgagattaacagca

SEQ ID NO: 38067 - DNA, 40 bp, Homo sapiens
tgctgttaatctcacaatatagtctccacacagcagcaag

SEQ ID NO: 38068 - DNA, 40 bp, Homo sapiens
ttgctgctgtgtggagactatattgtgagattaacagcag

SEQ ID NO: 38069 - DNA, 40 bp, Homo sapiens
ctgctgttaatctcacaatatagtctccacacagcagcaa

SEQ ID NO: 38070 - DNA, 40 bp, Homo sapiens
tgctgctgtgtggagactatattgtgagattaacagcagg

SEQ ID NO: 38071 - DNA, 40 bp, Homo sapiens
cctgctgttaatctcacaatatagtctccacacagcagca

SEQ ID NO: 38072 - DNA, 40 bp, Homo sapiens
gctgctgtgtggagactatattgtgagattaacagcaggg

SEQ ID NO: 38073 - DNA, 40 bp, Homo sapiens
ccctgctgttaatctcacaatatagtctccacacagcagc

SEQ ID NO: 38074 - DNA, 40 bp, Homo sapiens
ctgctgtgtggagactatattgtgagattaacagcaggga

SEQ ID NO: 38075 - DNA, 40 bp, Homo sapiens
tccctgctgttaatctcacaatatagtctccacacagcag

SEQ ID NO: 38076 - DNA, 40 bp, Homo sapiens
tgctgtgtggagactatattgtgagattaacagcagggat

SEQ ID NO: 38077 - DNA, 40 bp, Homo sapiens
atccctgctgttaatctcacaatatagtctccacacagca

SEQ ID NO: 38078 - DNA, 40 bp, Homo sapiens
gctgtgtggagactatattgtgagattaacagcagggata

SEQ ID NO: 38079 - DNA, 40 bp, Homo sapiens
tatccctgctgttaatctcacaatatagtctccacacagc

SEQ ID NO: 38080 - DNA, 40 bp, Homo sapiens
ctgtgtggagactatattgtgagattaacagcagggatac

SEQ ID NO: 38081 - DNA, 40 bp, Homo sapiens
gtatccctgctgttaatctcacaatatagtctccacacag

SEQ ID NO: 38082 - DNA, 40 bp, Homo sapiens
tgtgtggagactatattgtgagattaacagcagggatacc

SEQ ID NO: 38083 - DNA, 40 bp, Homo sapiens
ggtatccctgctgttaatctcacaatatagtctccacaca

SEQ ID NO: 38084 - DNA, 40 bp, Homo sapiens
gtgtggagactatattgtgagattaacagcagggatacct

SEQ ID NO: 38085 - DNA, 40 bp, Homo sapiens
aggtatccctgctgttaatctcacaatatagtctccacac

SEQ ID NO: 38086 - DNA, 40 bp, Homo sapiens
tgtggagactatattgtgagattaacagcagggatacctg

SEQ ID NO: 38087 - DNA, 40 bp, Homo sapiens
caggtatccctgctgttaatctcacaatatagtctccaca

SEQ ID NO: 38088 - DNA, 40 bp, Homo sapiens
gtggagactatattgtgagattaacagcagggatacctgc

SEQ ID NO: 38089 - DNA, 40 bp, Homo sapiens
gcaggtatccctgctgttaatctcacaatatagtctccac

SEQ ID NO: 38090 - DNA, 40 bp, Homo sapiens
tggagactatattgtgagattaacagcagggatacctgct

SEQ ID NO: 38091 - DNA, 40 bp, Homo sapiens
agcaggtatccctgctgttaatctcacaatatagtctcca

SEQ ID NO: 38092 - DNA, 40 bp, Homo sapiens
ggagactatattgtgagattaacagcagggatacctgcta

SEQ ID NO: 38093 - DNA, 40 bp, Homo sapiens
tagcaggtatccctgctgttaatctcacaatatagtctcc

SEQ ID NO: 38094 - DNA, 40 bp, Homo sapiens
gagactatattgtgagattaacagcagggatacctgctag

SEQ ID NO: 38095 - DNA, 40 bp, Homo sapiens
ctagcaggtatccctgctgttaatctcacaatatagtctc

SEQ ID NO: 38096 - DNA, 40 bp, Homo sapiens
agactatattgtgagattaacagcagggatacctgctagg

SEQ ID NO: 38097 - DNA, 40 bp, Homo sapiens
cctagcaggtatccctgctgttaatctcacaatatagtct

SEQ ID NO: 38098 - DNA, 40 bp, Homo sapiens
gactatattgtgagattaacagcagggatacctgctagga

SEQ ID NO: 38099 - DNA, 40 bp, Homo sapiens
tcctagcaggtatccctgctgttaatctcacaatatagtc

SEQ ID NO: 38100 - DNA, 40 bp, Homo sapiens
actatattgtgagattaacagcagggatacctgctaggaa

SEQ ID NO: 38101 - DNA, 40 bp, Homo sapiens
ttcctagcaggtatccctgctgttaatctcacaatatagt

SEQ ID NO: 38102 - DNA, 40 bp, Homo sapiens
ctatattgtgagattaacagcagggatacctgctaggaag

SEQ ID NO: 38103 - DNA, 40 bp, Homo sapiens
cttcctagcaggtatccctgctgttaatctcacaatatag

SEQ ID NO: 38104 - DNA, 40 bp, Homo sapiens
tatattgtgagattaacagcagggatacctgctaggaagc

SEQ ID NO: 38105 - DNA, 40 bp, Homo sapiens
gcttcctagcaggtatccctgctgttaatctcacaatata

SEQ ID NO: 38106 - DNA, 40 bp, Homo sapiens
atattgtgagattaacagcagggatacctgctaggaagca

SEQ ID NO: 38107 - DNA, 40 bp, Homo sapiens
tgcttcctagcaggtatccctgctgttaatctcacaatat

SEQ ID NO: 38108 - DNA, 40 bp, Homo sapiens
tattgtgagattaacagcagggatacctgctaggaagcaa

SEQ ID NO: 38109 - DNA, 40 bp, Homo sapiens
ttgcttcctagcaggtatccctgctgttaatctcacaata

SEQ ID NO: 38110 - DNA, 40 bp, Homo sapiens
attgtgagattaacagcagggatacctgctaggaagcaat

SEQ ID NO: 38111 - DNA, 40 bp, Homo sapiens
attgcttcctagcaggtatccctgctgttaatctcacaat

SEQ ID NO: 38112 - DNA, 40 bp, Homo sapiens
ttgtgagattaacagcagggatacctgctaggaagcaatt

SEQ ID NO: 38113 - DNA, 40 bp, Homo sapiens
aattgcttcctagcaggtatccctgctgttaatctcacaa

SEQ ID NO: 38114 - DNA, 40 bp, Homo sapiens
tgtgagattaacagcagggatacctgctaggaagcaattg

SEQ ID NO: 38115 - DNA, 40 bp, Homo sapiens
caattgcttcctagcaggtatccctgctgttaatctcaca

SEQ ID NO: 38116 - DNA, 40 bp, Homo sapiens
gtgagattaacagcagggatacctgctaggaagcaattgc

SEQ ID NO: 38117 - DNA, 40 bp, Homo sapiens
gcaattgcttcctagcaggtatccctgctgttaatctcac

SEQ ID NO: 38118 - DNA, 40 bp, Homo sapiens
tgagattaacagcagggatacctgctaggaagcaattgct

SEQ ID NO: 38119 - DNA, 40 bp, Homo sapiens
agcaattgcttcctagcaggtatccctgctgttaatctca

SEQ ID NO: 38120 - DNA, 40 bp, Homo sapiens
gagattaacagcagggatacctgctaggaagcaattgctg

SEQ ID NO: 38121 - DNA, 40 bp, Homo sapiens
cagcaattgcttcctagcaggtatccctgctgttaatctc

SEQ ID NO: 38122 - DNA, 40 bp, Homo sapiens
agattaacagcagggatacctgctaggaagcaattgctgc

SEQ ID NO: 38123 - DNA, 40 bp, Homo sapiens
gcagcaattgcttcctagcaggtatccctgctgttaatct

SEQ ID NO: 38124 - DNA, 40 bp, Homo sapiens
gattaacagcagggatacctgctaggaagcaattgctgca

SEQ ID NO: 38125 - DNA, 40 bp, Homo sapiens
tgcagcaattgcttcctagcaggtatccctgctgttaatc

SEQ ID NO: 38126 - DNA, 40 bp, Homo sapiens
attaacagcagggatacctgctaggaagcaattgctgcag

SEQ ID NO: 38127 - DNA, 40 bp, Homo sapiens
ctgcagcaattgcttcctagcaggtatccctgctgttaat

SEQ ID NO: 38128 - DNA, 40 bp, Homo sapiens
ttaacagcagggatacctgctaggaagcaattgctgcaga

SEQ ID NO: 38129 - DNA, 40 bp, Homo sapiens
tctgcagcaattgcttcctagcaggtatccctgctgttaa

SEQ ID NO: 38130 - DNA, 40 bp, Homo sapiens
taacagcagggatacctgctaggaagcaattgctgcagat

SEQ ID NO: 38131 - DNA, 40 bp, Homo sapiens
atctgcagcaattgcttcctagcaggtatccctgctgtta

SEQ ID NO: 38132 - DNA, 40 bp, Homo sapiens
aacagcagggatacctgctaggaagcaattgctgcagatt

SEQ ID NO: 38133 - DNA, 40 bp, Homo sapiens
aatctgcagcaattgcttcctagcaggtatccctgctgtt

SEQ ID NO: 38134 - DNA, 40 bp, Homo sapiens
acagcagggatacctgctaggaagcaattgctgcagattg

SEQ ID NO: 38135 - DNA, 40 bp, Homo sapiens
caatctgcagcaattgcttcctagcaggtatccctgctgt

SEQ ID NO: 38136 - DNA, 40 bp, Homo sapiens
cagcagggatacctgctaggaagcaattgctgcagattgc

SEQ ID NO: 38137 - DNA, 40 bp, Homo sapiens
gcaatctgcagcaattgcttcctagcaggtatccctgctg

SEQ ID NO: 38138 - DNA, 40 bp, Homo sapiens
agcagggatacctgctaggaagcaattgctgcagattgcc

SEQ ID NO: 38139 - DNA, 40 bp, Homo sapiens
ggcaatctgcagcaattgcttcctagcaggtatccctgct

SEQ ID NO: 38140 - DNA, 40 bp, Homo sapiens
gcagggatacctgctaggaagcaattgctgcagattgcct

SEQ ID NO: 38141 - DNA, 40 bp, Homo sapiens
aggcaatctgcagcaattgcttcctagcaggtatccctgc

SEQ ID NO: 38142 - DNA, 40 bp, Homo sapiens
cagggatacctgctaggaagcaattgctgcagattgcctg

SEQ ID NO: 38143 - DNA, 40 bp, Homo sapiens
caggcaatctgcagcaattgcttcctagcaggtatccctg

SEQ ID NO: 38144 - DNA, 40 bp, Homo sapiens
agggatacctgctaggaagcaattgctgcagattgcctga

SEQ ID NO: 38145 - DNA, 40 bp, Homo sapiens
tcaggcaatctgcagcaattgcttcctagcaggtatccct

SEQ ID NO: 38146 - DNA, 40 bp, Homo sapiens
gggatacctgctaggaagcaattgctgcagattgcctgag

SEQ ID NO: 38147 - DNA, 40 bp, Homo sapiens
ctcaggcaatctgcagcaattgcttcctagcaggtatccc

SEQ ID NO: 38148 - DNA, 40 bp, Homo sapiens
ggatacctgctaggaagcaattgctgcagattgcctgaga

SEQ ID NO: 38149 - DNA, 40 bp, Homo sapiens
tctcaggcaatctgcagcaattgcttcctagcaggtatcc

SEQ ID NO: 38150 - DNA, 40 bp, Homo sapiens
gatacctgctaggaagcaattgctgcagattgcctgagac

SEQ ID NO: 38151 - DNA, 40 bp, Homo sapiens
gtctcaggcaatctgcagcaattgcttcctagcaggtatc

SEQ ID NO: 38152 - DNA, 40 bp, Homo sapiens
atacctgctaggaagcaattgctgcagattgcctgagaca

SEQ ID NO: 38153 - DNA, 40 bp, Homo sapiens
tgtctcaggcaatctgcagcaattgcttcctagcaggtat

SEQ ID NO: 38154 - DNA, 40 bp, Homo sapiens
tacctgctaggaagcaattgctgcagattgcctgagacaa

SEQ ID NO: 38155 - DNA, 40 bp, Homo sapiens
ttgtctcaggcaatctgcagcaattgcttcctagcaggta

SEQ ID NO: 38156 - DNA, 40 bp, Homo sapiens
acctgctaggaagcaattgctgcagattgcctgagacaaa

SEQ ID NO: 38157 - DNA, 40 bp, Homo sapiens
tttgtctcaggcaatctgcagcaattgcttcctagcaggt

SEQ ID NO: 38158 - DNA, 40 bp, Homo sapiens
cctgctaggaagcaattgctgcagattgcctgagacaaaa

SEQ ID NO: 38159 - DNA, 40 bp, Homo sapiens
ttttgtctcaggcaatctgcagcaattgcttcctagcagg

SEQ ID NO: 38160 - DNA, 40 bp, Homo sapiens
ctgctaggaagcaattgctgcagattgcctgagacaaaat

SEQ ID NO: 38161 - DNA, 40 bp, Homo sapiens
attttgtctcaggcaatctgcagcaattgcttcctagcag

SEQ ID NO: 38162 - DNA, 40 bp, Homo sapiens
tgctaggaagcaattgctgcagattgcctgagacaaaata

SEQ ID NO: 38163 - DNA, 40 bp, Homo sapiens
tattttgtctcaggcaatctgcagcaattgcttcctagca

SEQ ID NO: 38164 - DNA, 40 bp, Homo sapiens
gctaggaagcaattgctgcagattgcctgagacaaaatag

SEQ ID NO: 38165 - DNA, 40 bp, Homo sapiens
ctattttgtctcaggcaatctgcagcaattgcttcctagc

SEQ ID NO: 38166 - DNA, 40 bp, Homo sapiens
ctaggaagcaattgctgcagattgcctgagacaaaatagt

SEQ ID NO: 38167 - DNA, 40 bp, Homo sapiens
actattttgtctcaggcaatctgcagcaattgcttcctag

SEQ ID NO: 38168 - DNA, 40 bp, Homo sapiens
taggaagcaattgctgcagattgcctgagacaaaatagtt

SEQ ID NO: 38169 - DNA, 40 bp, Homo sapiens
aactattttgtctcaggcaatctgcagcaattgcttccta

SEQ ID NO: 38170 - DNA, 40 bp, Homo sapiens
aggaagcaattgctgcagattgcctgagacaaaatagtta

SEQ ID NO: 38171 - DNA, 40 bp, Homo sapiens
taactattttgtctcaggcaatctgcagcaattgcttcct

SEQ ID NO: 38172 - DNA, 40 bp, Homo sapiens
ggaagcaattgctgcagattgcctgagacaaaatagttat

SEQ ID NO: 38173 - DNA, 40 bp, Homo sapiens
ataactattttgtctcaggcaatctgcagcaattgcttcc

SEQ ID NO: 38174 - DNA, 40 bp, Homo sapiens
gaagcaattgctgcagattgcctgagacaaaatagttatc

SEQ ID NO: 38175 - DNA, 40 bp, Homo sapiens
gataactattttgtctcaggcaatctgcagcaattgcttc

SEQ ID NO: 38176 - DNA, 40 bp, Homo sapiens
aagcaattgctgcagattgcctgagacaaaatagttatca

SEQ ID NO: 38177 - DNA, 40 bp, Homo sapiens
tgataactattttgtctcaggcaatctgcagcaattgctt

SEQ ID NO: 38178 - DNA, 40 bp, Homo sapiens
agcaattgctgcagattgcctgagacaaaatagttatcat

SEQ ID NO: 38179 - DNA, 40 bp, Homo sapiens
atgataactattttgtctcaggcaatctgcagcaattgct

SEQ ID NO: 38180 - DNA, 40 bp, Homo sapiens
gcaattgctgcagattgcctgagacaaaatagttatcatg

SEQ ID NO: 38181 - DNA, 40 bp, Homo sapiens
catgataactattttgtctcaggcaatctgcagcaattgc

SEQ ID NO: 38182 - DNA, 40 bp, Homo sapiens
caattgctgcagattgcctgagacaaaatagttatcatgg

SEQ ID NO: 38183 - DNA, 40 bp, Homo sapiens
ccatgataactattttgtctcaggcaatctgcagcaattg

SEQ ID NO: 38184 - DNA, 40 bp, Homo sapiens
aattgctgcagattgcctgagacaaaatagttatcatgga

SEQ ID NO: 38185 - DNA, 40 bp, Homo sapiens
tccatgataactattttgtctcaggcaatctgcagcaatt

SEQ ID NO: 38186 - DNA, 40 bp, Homo sapiens
attgctgcagattgcctgagacaaaatagttatcatggac

SEQ ID NO: 38187 - DNA, 40 bp, Homo sapiens
gtccatgataactattttgtctcaggcaatctgcagcaat

SEQ ID NO: 38188 - DNA, 40 bp, Homo sapiens
ttgctgcagattgcctgagacaaaatagttatcatggact

SEQ ID NO: 38189 - DNA, 40 bp, Homo sapiens
agtccatgataactattttgtctcaggcaatctgcagcaa

SEQ ID NO: 38190 - DNA, 40 bp, Homo sapiens
tgctgcagattgcctgagacaaaatagttatcatggacta

SEQ ID NO: 38191 - DNA, 40 bp, Homo sapiens
tagtccatgataactattttgtctcaggcaatctgcagca

SEQ ID NO: 38192 - DNA, 40 bp, Homo sapiens
gctgcagattgcctgagacaaaatagttatcatggactag

SEQ ID NO: 38193 - DNA, 40 bp, Homo sapiens
ctagtccatgataactattttgtctcaggcaatctgcagc

SEQ ID NO: 38194 - DNA, 40 bp, Homo sapiens
ctgcagattgcctgagacaaaatagttatcatggactagg

SEQ ID NO: 38195 - DNA, 40 bp, Homo sapiens
cctagtccatgataactattttgtctcaggcaatctgcag

SEQ ID NO: 38196 - DNA, 40 bp, Homo sapiens
tgcagattgcctgagacaaaatagttatcatggactaggg

SEQ ID NO: 38197 - DNA, 40 bp, Homo sapiens
ccctagtccatgataactattttgtctcaggcaatctgca

SEQ ID NO: 38198 - DNA, 40 bp, Homo sapiens
gcagattgcctgagacaaaatagttatcatggactagggg

SEQ ID NO: 38199 - DNA, 40 bp, Homo sapiens
cccctagtccatgataactattttgtctcaggcaatctgc

SEQ ID NO: 38200 - DNA, 40 bp, Homo sapiens
cagattgcctgagacaaaatagttatcatggactaggggg

SEQ ID NO: 38201 - DNA, 40 bp, Homo sapiens
ccccctagtccatgataactattttgtctcaggcaatctg

SEQ ID NO: 38202 - DNA, 40 bp, Homo sapiens
agattgcctgagacaaaatagttatcatggactaggggga

SEQ ID NO: 38203 - DNA, 40 bp, Homo sapiens
tccccctagtccatgataactattttgtctcaggcaatct

SEQ ID NO: 38204 - DNA, 40 bp, Homo sapiens
gattgcctgagacaaaatagttatcatggactagggggat

SEQ ID NO: 38205 - DNA, 40 bp, Homo sapiens
atccccctagtccatgataactattttgtctcaggcaatc

SEQ ID NO: 38206 - DNA, 40 bp, Homo sapiens
attgcctgagacaaaatagttatcatggactagggggatg

SEQ ID NO: 38207 - DNA, 40 bp, Homo sapiens
catccccctagtccatgataactattttgtctcaggcaat

SEQ ID NO: 38208 - DNA, 40 bp, Homo sapiens
ttgcctgagacaaaatagttatcatggactagggggatgg

SEQ ID NO: 38209 - DNA, 40 bp, Homo sapiens
ccatccccctagtccatgataactattttgtctcaggcaa

SEQ ID NO: 38210 - DNA, 40 bp, Homo sapiens
tgcctgagacaaaatagttatcatggactagggggatggt

SEQ ID NO: 38211 - DNA, 40 bp, Homo sapiens
accatccccctagtccatgataactattttgtctcaggca

SEQ ID NO: 38212 - DNA, 40 bp, Homo sapiens
gcctgagacaaaatagttatcatggactagggggatggtg

SEQ ID NO: 38213 - DNA, 40 bp, Homo sapiens
caccatccccctagtccatgataactattttgtctcaggc

SEQ ID NO: 38214 - DNA, 40 bp, Homo sapiens
cctgagacaaaatagttatcatggactagggggatggtgg

SEQ ID NO: 38215 - DNA, 40 bp, Homo sapiens
ccaccatccccctagtccatgataactattttgtctcagg

SEQ ID NO: 38216 - DNA, 40 bp, Homo sapiens
ctgagacaaaatagttatcatggactagggggatggtggt

SEQ ID NO: 38217 - DNA, 40 bp, Homo sapiens
accaccatccccctagtccatgataactattttgtctcag

SEQ ID NO: 38218 - DNA, 40 bp, Homo sapiens
tgagacaaaatagttatcatggactagggggatggtggtg

SEQ ID NO: 38219 - DNA, 40 bp, Homo sapiens
caccaccatccccctagtccatgataactattttgtctca

SEQ ID NO: 38220 - DNA, 40 bp, Homo sapiens
gagacaaaatagttatcatggactagggggatggtggtgg

SEQ ID NO: 38221 - DNA, 40 bp, Homo sapiens
ccaccaccatccccctagtccatgataactattttgtctc

SEQ ID NO: 38222 - DNA, 40 bp, Homo sapiens
agacaaaatagttatcatggactagggggatggtggtggt

SEQ ID NO: 38223 - DNA, 40 bp, Homo sapiens
accaccaccatccccctagtccatgataactattttgtct

SEQ ID NO: 38224 - DNA, 40 bp, Homo sapiens
gacaaaatagttatcatggactagggggatggtggtggtg

SEQ ID NO: 38225 - DNA, 40 bp, Homo sapiens
caccaccaccatccccctagtccatgataactattttgtc

SEQ ID NO: 38226 - DNA, 40 bp, Homo sapiens
acaaaatagttatcatggactagggggatggtggtggtgg

SEQ ID NO: 38227 - DNA, 40 bp, Homo sapiens
ccaccaccaccatccccctagtccatgataactattttgt

SEQ ID NO: 38228 - DNA, 40 bp, Homo sapiens
caaaatagttatcatggactagggggatggtggtggtggt

SEQ ID NO: 38229 - DNA, 40 bp, Homo sapiens
accaccaccaccatccccctagtccatgataactattttg

SEQ ID NO: 38230 - DNA, 40 bp, Homo sapiens
aaaatagttatcatggactagggggatggtggtggtggtg

SEQ ID NO: 38231 - DNA, 40 bp, Homo sapiens
caccaccaccaccatccccctagtccatgataactatttt

SEQ ID NO: 38232 - DNA, 40 bp, Homo sapiens
aaatagttatcatggactagggggatggtggtggtggtgg

SEQ ID NO: 38233 - DNA, 40 bp, Homo sapiens
ccaccaccaccaccatccccctagtccatgataactattt

SEQ ID NO: 38234 - DNA, 40 bp, Homo sapiens
aatagttatcatggactagggggatggtggtggtggtggt

SEQ ID NO: 38235 - DNA, 40 bp, Homo sapiens
accaccaccaccaccatccccctagtccatgataactatt

SEQ ID NO: 38236 - DNA, 40 bp, Homo sapiens
atagttatcatggactagggggatggtggtggtggtggtg

SEQ ID NO: 38237 - DNA, 40 bp, Homo sapiens
caccaccaccaccaccatccccctagtccatgataactat

SEQ ID NO: 38238 - DNA, 40 bp, Homo sapiens
tagttatcatggactagggggatggtggtggtggtggtgg

SEQ ID NO: 38239 - DNA, 40 bp, Homo sapiens
ccaccaccaccaccaccatccccctagtccatgataacta

SEQ ID NO: 38240 - DNA, 40 bp, Homo sapiens
agttatcatggactagggggatggtggtggtggtggtggt

SEQ ID NO: 38241 - DNA, 40 bp, Homo sapiens
accaccaccaccaccaccatccccctagtccatgataact

SEQ ID NO: 38242 - DNA, 40 bp, Homo sapiens
gttatcatggactagggggatggtggtggtggtggtggta

SEQ ID NO: 38243 - DNA, 40 bp, Homo sapiens
taccaccaccaccaccaccatccccctagtccatgataac

SEQ ID NO: 38244 - DNA, 40 bp, Homo sapiens
ttatcatggactagggggatggtggtggtggtggtggtag

SEQ ID NO: 38245 - DNA, 40 bp, Homo sapiens
ctaccaccaccaccaccaccatccccctagtccatgataa

SEQ ID NO: 38246 - DNA, 40 bp, Homo sapiens
tatcatggactagggggatggtggtggtggtggtggtagg

SEQ ID NO: 38247 - DNA, 40 bp, Homo sapiens
cctaccaccaccaccaccaccatccccctagtccatgata

SEQ ID NO: 38248 - DNA, 40 bp, Homo sapiens
atcatggactagggggatggtggtggtggtggtggtaggt

SEQ ID NO: 38249 - DNA, 40 bp, Homo sapiens
acctaccaccaccaccaccaccatccccctagtccatgat

SEQ ID NO: 38250 - DNA, 40 bp, Homo sapiens
tcatggactagggggatggtggtggtggtggtggtaggtg

SEQ ID NO: 38251 - DNA, 40 bp, Homo sapiens
cacctaccaccaccaccaccaccatccccctagtccatga

SEQ ID NO: 38252 - DNA, 40 bp, Homo sapiens
catggactagggggatggtggtggtggtggtggtaggtgg

SEQ ID NO: 38253 - DNA, 40 bp, Homo sapiens
ccacctaccaccaccaccaccaccatccccctagtccatg

SEQ ID NO: 38254 - DNA, 40 bp, Homo sapiens
atggactagggggatggtggtggtggtggtggtaggtggt

SEQ ID NO: 38255 - DNA, 40 bp, Homo sapiens
accacctaccaccaccaccaccaccatccccctagtccat

SEQ ID NO: 38256 - DNA, 40 bp, Homo sapiens
tggactagggggatggtggtggtggtggtggtaggtggtt

SEQ ID NO: 38257 - DNA, 40 bp, Homo sapiens
aaccacctaccaccaccaccaccaccatccccctagtcca

SEQ ID NO: 38258 - DNA, 40 bp, Homo sapiens
ggactagggggatggtggtggtggtggtggtaggtggttg

SEQ ID NO: 38259 - DNA, 40 bp, Homo sapiens
caaccacctaccaccaccaccaccaccatccccctagtcc

SEQ ID NO: 38260 - DNA, 40 bp, Homo sapiens
gactagggggatggtggtggtggtggtggtaggtggttgg

SEQ ID NO: 38261 - DNA, 40 bp, Homo sapiens
ccaaccacctaccaccaccaccaccaccatccccctagtc

SEQ ID NO: 38262 - DNA, 40 bp, Homo sapiens
actagggggatggtggtggtggtggtggtaggtggttgga

SEQ ID NO: 38263 - DNA, 40 bp, Homo sapiens
tccaaccacctaccaccaccaccaccaccatccccctagt

SEQ ID NO: 38264 - DNA, 40 bp, Homo sapiens
ctagggggatggtggtggtggtggtggtaggtggttggat

SEQ ID NO: 38265 - DNA, 40 bp, Homo sapiens
atccaaccacctaccaccaccaccaccaccatccccctag

SEQ ID NO: 38266 - DNA, 40 bp, Homo sapiens
tagggggatggtggtggtggtggtggtaggtggttggatg

SEQ ID NO: 38267 - DNA, 40 bp, Homo sapiens
catccaaccacctaccaccaccaccaccaccatcccccta

SEQ ID NO: 38268 - DNA, 40 bp, Homo sapiens
agggggatggtggtggtggtggtggtaggtggttggatgt

SEQ ID NO: 38269 - DNA, 40 bp, Homo sapiens
acatccaaccacctaccaccaccaccaccaccatccccct

SEQ ID NO: 38270 - DNA, 40 bp, Homo sapiens
gggggatggtggtggtggtggtggtaggtggttggatgta

SEQ ID NO: 38271 - DNA, 40 bp, Homo sapiens
tacatccaaccacctaccaccaccaccaccaccatccccc

SEQ ID NO: 38272 - DNA, 40 bp, Homo sapiens
ggggatggtggtggtggtggtggtaggtggttggatgtag

SEQ ID NO: 38273 - DNA, 40 bp, Homo sapiens
ctacatccaaccacctaccaccaccaccaccaccatcccc

SEQ ID NO: 38274 - DNA, 40 bp, Homo sapiens
gggatggtggtggtggtggtggtaggtggttggatgtagg

SEQ ID NO: 38275 - DNA, 40 bp, Homo sapiens
cctacatccaaccacctaccaccaccaccaccaccatccc

SEQ ID NO: 38276 - DNA, 40 bp, Homo sapiens
ggatggtggtggtggtggtggtaggtggttggatgtagga

SEQ ID NO: 38277 - DNA, 40 bp, Homo sapiens
tcctacatccaaccacctaccaccaccaccaccaccatcc

SEQ ID NO: 38278 - DNA, 40 bp, Homo sapiens
gatggtggtggtggtggtggtaggtggttggatgtaggat

SEQ ID NO: 38279 - DNA, 40 bp, Homo sapiens
atcctacatccaaccacctaccaccaccaccaccaccatc

SEQ ID NO: 38280 - DNA, 40 bp, Homo sapiens
atggtggtggtggtggtggtaggtggttggatgtaggata

SEQ ID NO: 38281 - DNA, 40 bp, Homo sapiens
tatcctacatccaaccacctaccaccaccaccaccaccat

SEQ ID NO: 38282 - DNA, 40 bp, Homo sapiens
tggtggtggtggtggtggtaggtggttggatgtaggatat

SEQ ID NO: 38283 - DNA, 40 bp, Homo sapiens
atatcctacatccaaccacctaccaccaccaccaccacca

SEQ ID NO: 38284 - DNA, 40 bp, Homo sapiens
ggtggtggtggtggtggtaggtggttggatgtaggatata

SEQ ID NO: 38285 - DNA, 40 bp, Homo sapiens
tatatcctacatccaaccacctaccaccaccaccaccacc

SEQ ID NO: 38286 - DNA, 40 bp, Homo sapiens
gtggtggtggtggtggtaggtggttggatgtaggatatat

SEQ ID NO: 38287 - DNA, 40 bp, Homo sapiens
atatatcctacatccaaccacctaccaccaccaccaccac

SEQ ID NO: 38288 - DNA, 40 bp, Homo sapiens
tggtggtggtggtggtaggtggttggatgtaggatatatt

SEQ ID NO: 38289 - DNA, 40 bp, Homo sapiens
aatatatcctacatccaaccacctaccaccaccaccacca

SEQ ID NO: 38290 - DNA, 40 bp, Homo sapiens
ggtggtggtggtggtaggtggttggatgtaggatatattt

SEQ ID NO: 38291 - DNA, 40 bp, Homo sapiens
aaatatatcctacatccaaccacctaccaccaccaccacc

SEQ ID NO: 38292 - DNA, 40 bp, Homo sapiens
gtggtggtggtggtaggtggttggatgtaggatatatttt

SEQ ID NO: 38293 - DNA, 40 bp, Homo sapiens
aaaatatatcctacatccaaccacctaccaccaccaccac

SEQ ID NO: 38294 - DNA, 40 bp, Homo sapiens
tggtggtggtggtaggtggttggatgtaggatatattttg

SEQ ID NO: 38295 - DNA, 40 bp, Homo sapiens
caaaatatatcctacatccaaccacctaccaccaccacca

SEQ ID NO: 38296 - DNA, 40 bp, Homo sapiens
ggtggtggtggtaggtggttggatgtaggatatattttga

SEQ ID NO: 38297 - DNA, 40 bp, Homo sapiens
tcaaaatatatcctacatccaaccacctaccaccaccacc

SEQ ID NO: 38298 - DNA, 40 bp, Homo sapiens
gtggtggtggtaggtggttggatgtaggatatattttgaa

SEQ ID NO: 38299 - DNA, 40 bp, Homo sapiens
ttcaaaatatatcctacatccaaccacctaccaccaccac

SEQ ID NO: 38300 - DNA, 40 bp, Homo sapiens
tggtggtggtaggtggttggatgtaggatatattttgaag

SEQ ID NO: 38301 - DNA, 40 bp, Homo sapiens
cttcaaaatatatcctacatccaaccacctaccaccacca

SEQ ID NO: 38302 - DNA, 40 bp, Homo sapiens
ggtggtggtaggtggttggatgtaggatatattttgaaga

SEQ ID NO: 38303 - DNA, 40 bp, Homo sapiens
tcttcaaaatatatcctacatccaaccacctaccaccacc

SEQ ID NO: 38304 - DNA, 40 bp, Homo sapiens
gtggtggtaggtggttggatgtaggatatattttgaagat

SEQ ID NO: 38305 - DNA, 40 bp, Homo sapiens
atcttcaaaatatatcctacatccaaccacctaccaccac

SEQ ID NO: 38306 - DNA, 40 bp, Homo sapiens
tggtggtaggtggttggatgtaggatatattttgaagata

SEQ ID NO: 38307 - DNA, 40 bp, Homo sapiens
tatcttcaaaatatatcctacatccaaccacctaccacca

SEQ ID NO: 38308 - DNA, 40 bp, Homo sapiens
ggtggtaggtggttggatgtaggatatattttgaagatag

SEQ ID NO: 38309 - DNA, 40 bp, Homo sapiens
ctatcttcaaaatatatcctacatccaaccacctaccacc

SEQ ID NO: 38310 - DNA, 40 bp, Homo sapiens
gtggtaggtggttggatgtaggatatattttgaagatagg

SEQ ID NO: 38311 - DNA, 40 bp, Homo sapiens
cctatcttcaaaatatatcctacatccaaccacctaccac

SEQ ID NO: 38312 - DNA, 40 bp, Homo sapiens
tggtaggtggttggatgtaggatatattttgaagataggt

SEQ ID NO: 38313 - DNA, 40 bp, Homo sapiens
acctatcttcaaaatatatcctacatccaaccacctacca

SEQ ID NO: 38314 - DNA, 40 bp, Homo sapiens
ggtaggtggttggatgtaggatatattttgaagataggta

SEQ ID NO: 38315 - DNA, 40 bp, Homo sapiens
tacctatcttcaaaatatatcctacatccaaccacctacc

SEQ ID NO: 38316 - DNA, 40 bp, Homo sapiens
gtaggtggttggatgtaggatatattttgaagataggtaa

SEQ ID NO: 38317 - DNA, 40 bp, Homo sapiens
ttacctatcttcaaaatatatcctacatccaaccacctac

SEQ ID NO: 38318 - DNA, 40 bp, Homo sapiens
taggtggttggatgtaggatatattttgaagataggtaaa

SEQ ID NO: 38319 - DNA, 40 bp, Homo sapiens
tttacctatcttcaaaatatatcctacatccaaccaccta

SEQ ID NO: 38320 - DNA, 40 bp, Homo sapiens
aggtggttggatgtaggatatattttgaagataggtaaat

SEQ ID NO: 38321 - DNA, 40 bp, Homo sapiens
atttacctatcttcaaaatatatcctacatccaaccacct

SEQ ID NO: 38322 - DNA, 40 bp, Homo sapiens
ggtggttggatgtaggatatattttgaagataggtaaatg

SEQ ID NO: 38323 - DNA, 40 bp, Homo sapiens
catttacctatcttcaaaatatatcctacatccaaccacc

SEQ ID NO: 38324 - DNA, 40 bp, Homo sapiens
gtggttggatgtaggatatattttgaagataggtaaatgg

SEQ ID NO: 38325 - DNA, 40 bp, Homo sapiens
ccatttacctatcttcaaaatatatcctacatccaaccac

SEQ ID NO: 38326 - DNA, 40 bp, Homo sapiens
tggttggatgtaggatatattttgaagataggtaaatggt

SEQ ID NO: 38327 - DNA, 40 bp, Homo sapiens
accatttacctatcttcaaaatatatcctacatccaacca

SEQ ID NO: 38328 - DNA, 40 bp, Homo sapiens
ggttggatgtaggatatattttgaagataggtaaatggtg

SEQ ID NO: 38329 - DNA, 40 bp, Homo sapiens
caccatttacctatcttcaaaatatatcctacatccaacc

SEQ ID NO: 38330 - DNA, 40 bp, Homo sapiens
gttggatgtaggatatattttgaagataggtaaatggtgc

SEQ ID NO: 38331 - DNA, 40 bp, Homo sapiens
gcaccatttacctatcttcaaaatatatcctacatccaac

SEQ ID NO: 38332 - DNA, 40 bp, Homo sapiens
ttggatgtaggatatattttgaagataggtaaatggtgca

SEQ ID NO: 38333 - DNA, 40 bp, Homo sapiens
tgcaccatttacctatcttcaaaatatatcctacatccaa

SEQ ID NO: 38334 - DNA, 40 bp, Homo sapiens
tggatgtaggatatattttgaagataggtaaatggtgcaa

SEQ ID NO: 38335 - DNA, 40 bp, Homo sapiens
ttgcaccatttacctatcttcaaaatatatcctacatcca

SEQ ID NO: 38336 - DNA, 40 bp, Homo sapiens
ggatgtaggatatattttgaagataggtaaatggtgcaag

SEQ ID NO: 38337 - DNA, 40 bp, Homo sapiens
cttgcaccatttacctatcttcaaaatatatcctacatcc

SEQ ID NO: 38338 - DNA, 40 bp, Homo sapiens
gatgtaggatatattttgaagataggtaaatggtgcaaga

SEQ ID NO: 38339 - DNA, 40 bp, Homo sapiens
tcttgcaccatttacctatcttcaaaatatatcctacatc

SEQ ID NO: 38340 - DNA, 40 bp, Homo sapiens
atgtaggatatattttgaagataggtaaatggtgcaagat

SEQ ID NO: 38341 - DNA, 40 bp, Homo sapiens
atcttgcaccatttacctatcttcaaaatatatcctacat

SEQ ID NO: 38342 - DNA, 40 bp, Homo sapiens
tgtaggatatattttgaagataggtaaatggtgcaagatt

SEQ ID NO: 38343 - DNA, 40 bp, Homo sapiens
aatcttgcaccatttacctatcttcaaaatatatcctaca

SEQ ID NO: 38344 - DNA, 40 bp, Homo sapiens
gtaggatatattttgaagataggtaaatggtgcaagatta

SEQ ID NO: 38345 - DNA, 40 bp, Homo sapiens
taatcttgcaccatttacctatcttcaaaatatatcctac

SEQ ID NO: 38346 - DNA, 40 bp, Homo sapiens
taggatatattttgaagataggtaaatggtgcaagattat

SEQ ID NO: 38347 - DNA, 40 bp, Homo sapiens
ataatcttgcaccatttacctatcttcaaaatatatccta

SEQ ID NO: 38348 - DNA, 40 bp, Homo sapiens
aggatatattttgaagataggtaaatggtgcaagattatg

SEQ ID NO: 38349 - DNA, 40 bp, Homo sapiens
cataatcttgcaccatttacctatcttcaaaatatatcct

SEQ ID NO: 38350 - DNA, 40 bp, Homo sapiens
ggatatattttgaagataggtaaatggtgcaagattatgg

SEQ ID NO: 38351 - DNA, 40 bp, Homo sapiens
ccataatcttgcaccatttacctatcttcaaaatatatcc

SEQ ID NO: 38352 - DNA, 40 bp, Homo sapiens
gatatattttgaagataggtaaatggtgcaagattatggg

SEQ ID NO: 38353 - DNA, 40 bp, Homo sapiens
cccataatcttgcaccatttacctatcttcaaaatatatc

SEQ ID NO: 38354 - DNA, 40 bp, Homo sapiens
atatattttgaagataggtaaatggtgcaagattatgggt

SEQ ID NO: 38355 - DNA, 40 bp, Homo sapiens
acccataatcttgcaccatttacctatcttcaaaatatat

SEQ ID NO: 38356 - DNA, 40 bp, Homo sapiens
tatattttgaagataggtaaatggtgcaagattatgggtc

SEQ ID NO: 38357 - DNA, 40 bp, Homo sapiens
gacccataatcttgcaccatttacctatcttcaaaatata

SEQ ID NO: 38358 - DNA, 40 bp, Homo sapiens
atattttgaagataggtaaatggtgcaagattatgggtca

SEQ ID NO: 38359 - DNA, 40 bp, Homo sapiens
tgacccataatcttgcaccatttacctatcttcaaaatat

SEQ ID NO: 38360 - DNA, 40 bp, Homo sapiens
tattttgaagataggtaaatggtgcaagattatgggtcag

SEQ ID NO: 38361 - DNA, 40 bp, Homo sapiens
ctgacccataatcttgcaccatttacctatcttcaaaata

SEQ ID NO: 38362 - DNA, 40 bp, Homo sapiens
attttgaagataggtaaatggtgcaagattatgggtcagt

SEQ ID NO: 38363 - DNA, 40 bp, Homo sapiens
actgacccataatcttgcaccatttacctatcttcaaaat

SEQ ID NO: 38364 - DNA, 40 bp, Homo sapiens
ttttgaagataggtaaatggtgcaagattatgggtcagtt

SEQ ID NO: 38365 - DNA, 40 bp, Homo sapiens
aactgacccataatcttgcaccatttacctatcttcaaaa

SEQ ID NO: 38366 - DNA, 40 bp, Homo sapiens
tttgaagataggtaaatggtgcaagattatgggtcagttt

SEQ ID NO: 38367 - DNA, 40 bp, Homo sapiens
aaactgacccataatcttgcaccatttacctatcttcaaa

SEQ ID NO: 38368 - DNA, 40 bp, Homo sapiens
ttgaagataggtaaatggtgcaagattatgggtcagtttt

SEQ ID NO: 38369 - DNA, 40 bp, Homo sapiens
aaaactgacccataatcttgcaccatttacctatcttcaa

SEQ ID NO: 38370 - DNA, 40 bp, Homo sapiens
tgaagataggtaaatggtgcaagattatgggtcagtttta

SEQ ID NO: 38371 - DNA, 40 bp, Homo sapiens
taaaactgacccataatcttgcaccatttacctatcttca

SEQ ID NO: 38372 - DNA, 40 bp, Homo sapiens
gaagataggtaaatggtgcaagattatgggtcagttttaa

SEQ ID NO: 38373 - DNA, 40 bp, Homo sapiens
ttaaaactgacccataatcttgcaccatttacctatcttc

SEQ ID NO: 38374 - DNA, 40 bp, Homo sapiens
aagataggtaaatggtgcaagattatgggtcagttttaaa

SEQ ID NO: 38375 - DNA, 40 bp, Homo sapiens
tttaaaactgacccataatcttgcaccatttacctatctt

SEQ ID NO: 38376 - DNA, 40 bp, Homo sapiens
agataggtaaatggtgcaagattatgggtcagttttaaat

SEQ ID NO: 38377 - DNA, 40 bp, Homo sapiens
atttaaaactgacccataatcttgcaccatttacctatct

SEQ ID NO: 38378 - DNA, 40 bp, Homo sapiens
gataggtaaatggtgcaagattatgggtcagttttaaatg

SEQ ID NO: 38379 - DNA, 40 bp, Homo sapiens
catttaaaactgacccataatcttgcaccatttacctatc

SEQ ID NO: 38380 - DNA, 40 bp, Homo sapiens
ataggtaaatggtgcaagattatgggtcagttttaaatgc

SEQ ID NO: 38381 - DNA, 40 bp, Homo sapiens
gcatttaaaactgacccataatcttgcaccatttacctat

SEQ ID NO: 38382 - DNA, 40 bp, Homo sapiens
taggtaaatggtgcaagattatgggtcagttttaaatgct

SEQ ID NO: 38383 - DNA, 40 bp, Homo sapiens
agcatttaaaactgacccataatcttgcaccatttaccta

SEQ ID NO: 38384 - DNA, 40 bp, Homo sapiens
aggtaaatggtgcaagattatgggtcagttttaaatgctt

SEQ ID NO: 38385 - DNA, 40 bp, Homo sapiens
aagcatttaaaactgacccataatcttgcaccatttacct

SEQ ID NO: 38386 - DNA, 40 bp, Homo sapiens
ggtaaatggtgcaagattatgggtcagttttaaatgctta

SEQ ID NO: 38387 - DNA, 40 bp, Homo sapiens
taagcatttaaaactgacccataatcttgcaccatttacc

SEQ ID NO: 38388 - DNA, 40 bp, Homo sapiens
gtaaatggtgcaagattatgggtcagttttaaatgcttaa

SEQ ID NO: 38389 - DNA, 40 bp, Homo sapiens
ttaagcatttaaaactgacccataatcttgcaccatttac

SEQ ID NO: 38390 - DNA, 40 bp, Homo sapiens
taaatggtgcaagattatgggtcagttttaaatgcttaag

SEQ ID NO: 38391 - DNA, 40 bp, Homo sapiens
cttaagcatttaaaactgacccataatcttgcaccattta

SEQ ID NO: 38392 - DNA, 40 bp, Homo sapiens
aaatggtgcaagattatgggtcagttttaaatgcttaagt

SEQ ID NO: 38393 - DNA, 40 bp, Homo sapiens
acttaagcatttaaaactgacccataatcttgcaccattt

SEQ ID NO: 38394 - DNA, 40 bp, Homo sapiens
aatggtgcaagattatgggtcagttttaaatgcttaagta

SEQ ID NO: 38395 - DNA, 40 bp, Homo sapiens
tacttaagcatttaaaactgacccataatcttgcaccatt

SEQ ID NO: 38396 - DNA, 40 bp, Homo sapiens
atggtgcaagattatgggtcagttttaaatgcttaagtaa

SEQ ID NO: 38397 - DNA, 40 bp, Homo sapiens
ttacttaagcatttaaaactgacccataatcttgcaccat

SEQ ID NO: 38398 - DNA, 40 bp, Homo sapiens
tggtgcaagattatgggtcagttttaaatgcttaagtaaa

SEQ ID NO: 38399 - DNA, 40 bp, Homo sapiens
tttacttaagcatttaaaactgacccataatcttgcacca

SEQ ID NO: 38400 - DNA, 40 bp, Homo sapiens
ggtgcaagattatgggtcagttttaaatgcttaagtaaat

SEQ ID NO: 38401 - DNA, 40 bp, Homo sapiens
atttacttaagcatttaaaactgacccataatcttgcacc

SEQ ID NO: 38402 - DNA, 40 bp, Homo sapiens
gtgcaagattatgggtcagttttaaatgcttaagtaaatt

SEQ ID NO: 38403 - DNA, 40 bp, Homo sapiens
aatttacttaagcatttaaaactgacccataatcttgcac

SEQ ID NO: 38404 - DNA, 40 bp, Homo sapiens
tgcaagattatgggtcagttttaaatgcttaagtaaattt

SEQ ID NO: 38405 - DNA, 40 bp, Homo sapiens
aaatttacttaagcatttaaaactgacccataatcttgca

SEQ ID NO: 38406 - DNA, 40 bp, Homo sapiens
gcaagattatgggtcagttttaaatgcttaagtaaatttt

SEQ ID NO: 38407 - DNA, 40 bp, Homo sapiens
aaaatttacttaagcatttaaaactgacccataatcttgc

SEQ ID NO: 38408 - DNA, 40 bp, Homo sapiens
caagattatgggtcagttttaaatgcttaagtaaattttc

SEQ ID NO: 38409 - DNA, 40 bp, Homo sapiens
gaaaatttacttaagcatttaaaactgacccataatcttg

SEQ ID NO: 38410 - DNA, 40 bp, Homo sapiens
aagattatgggtcagttttaaatgcttaagtaaattttct

SEQ ID NO: 38411 - DNA, 40 bp, Homo sapiens
agaaaatttacttaagcatttaaaactgacccataatctt

SEQ ID NO: 38412 - DNA, 40 bp, Homo sapiens
agattatgggtcagttttaaatgcttaagtaaattttctt

SEQ ID NO: 38413 - DNA, 40 bp, Homo sapiens
aagaaaatttacttaagcatttaaaactgacccataatct

SEQ ID NO: 38414 - DNA, 40 bp, Homo sapiens
gattatgggtcagttttaaatgcttaagtaaattttcttt

SEQ ID NO: 38415 - DNA, 40 bp, Homo sapiens
aaagaaaatttacttaagcatttaaaactgacccataatc

SEQ ID NO: 38416 - DNA, 40 bp, Homo sapiens
attatgggtcagttttaaatgcttaagtaaattttctttg

SEQ ID NO: 38417 - DNA, 40 bp, Homo sapiens
caaagaaaatttacttaagcatttaaaactgacccataat

SEQ ID NO: 38418 - DNA, 40 bp, Homo sapiens
ttatgggtcagttttaaatgcttaagtaaattttctttgt

SEQ ID NO: 38419 - DNA, 40 bp, Homo sapiens
acaaagaaaatttacttaagcatttaaaactgacccataa

SEQ ID NO: 38420 - DNA, 40 bp, Homo sapiens
tatgggtcagttttaaatgcttaagtaaattttctttgta

SEQ ID NO: 38421 - DNA, 40 bp, Homo sapiens
tacaaagaaaatttacttaagcatttaaaactgacccata

SEQ ID NO: 38422 - DNA, 40 bp, Homo sapiens
atgggtcagttttaaatgcttaagtaaattttctttgtaa

SEQ ID NO: 38423 - DNA, 40 bp, Homo sapiens
ttacaaagaaaatttacttaagcatttaaaactgacccat

SEQ ID NO: 38424 - DNA, 40 bp, Homo sapiens
tgggtcagttttaaatgcttaagtaaattttctttgtaag

SEQ ID NO: 38425 - DNA, 40 bp, Homo sapiens
cttacaaagaaaatttacttaagcatttaaaactgaccca

SEQ ID NO: 38426 - DNA, 40 bp, Homo sapiens
gggtcagttttaaatgcttaagtaaattttctttgtaaga

SEQ ID NO: 38427 - DNA, 40 bp, Homo sapiens
tcttacaaagaaaatttacttaagcatttaaaactgaccc

SEQ ID NO: 38428 - DNA, 40 bp, Homo sapiens
ggtcagttttaaatgcttaagtaaattttctttgtaagac

SEQ ID NO: 38429 - DNA, 40 bp, Homo sapiens
gtcttacaaagaaaatttacttaagcatttaaaactgacc

SEQ ID NO: 38430 - DNA, 40 bp, Homo sapiens
gtcagttttaaatgcttaagtaaattttctttgtaagaca

SEQ ID NO: 38431 - DNA, 40 bp, Homo sapiens
tgtcttacaaagaaaatttacttaagcatttaaaactgac

SEQ ID NO: 38432 - DNA, 40 bp, Homo sapiens
tcagttttaaatgcttaagtaaattttctttgtaagacat

SEQ ID NO: 38433 - DNA, 40 bp, Homo sapiens
atgtcttacaaagaaaatttacttaagcatttaaaactga

SEQ ID NO: 38434 - DNA, 40 bp, Homo sapiens
cagttttaaatgcttaagtaaattttctttgtaagacatt

SEQ ID NO: 38435 - DNA, 40 bp, Homo sapiens
aatgtcttacaaagaaaatttacttaagcatttaaaactg

SEQ ID NO: 38436 - DNA, 40 bp, Homo sapiens
agttttaaatgcttaagtaaattttctttgtaagacattt

SEQ ID NO: 38437 - DNA, 40 bp, Homo sapiens
aaatgtcttacaaagaaaatttacttaagcatttaaaact

SEQ ID NO: 38438 - DNA, 40 bp, Homo sapiens
gttttaaatgcttaagtaaattttctttgtaagacatttt

SEQ ID NO: 38439 - DNA, 40 bp, Homo sapiens
aaaatgtcttacaaagaaaatttacttaagcatttaaaac

SEQ ID NO: 38440 - DNA, 40 bp, Homo sapiens
ttttaaatgcttaagtaaattttctttgtaagacatttta

SEQ ID NO: 38441 - DNA, 40 bp, Homo sapiens
taaaatgtcttacaaagaaaatttacttaagcatttaaaa

SEQ ID NO: 38442 - DNA, 40 bp, Homo sapiens
tttaaatgcttaagtaaattttctttgtaagacattttag

SEQ ID NO: 38443 - DNA, 40 bp, Homo sapiens
ctaaaatgtcttacaaagaaaatttacttaagcatttaaa

SEQ ID NO: 38444 - DNA, 40 bp, Homo sapiens
ttaaatgcttaagtaaattttctttgtaagacattttagg

SEQ ID NO: 38445 - DNA, 40 bp, Homo sapiens
cctaaaatgtcttacaaagaaaatttacttaagcatttaa

SEQ ID NO: 38446 - DNA, 40 bp, Homo sapiens
taaatgcttaagtaaattttctttgtaagacattttagga

SEQ ID NO: 38447 - DNA, 40 bp, Homo sapiens
tcctaaaatgtcttacaaagaaaatttacttaagcattta

SEQ ID NO: 38448 - DNA, 40 bp, Homo sapiens
aaatgcttaagtaaattttctttgtaagacattttaggat

SEQ ID NO: 38449 - DNA, 40 bp, Homo sapiens
atcctaaaatgtcttacaaagaaaatttacttaagcattt

SEQ ID NO: 38450 - DNA, 40 bp, Homo sapiens
aatgcttaagtaaattttctttgtaagacattttaggatg

SEQ ID NO: 38451 - DNA, 40 bp, Homo sapiens
catcctaaaatgtcttacaaagaaaatttacttaagcatt

SEQ ID NO: 38452 - DNA, 40 bp, Homo sapiens
atgcttaagtaaattttctttgtaagacattttaggatgc

SEQ ID NO: 38453 - DNA, 40 bp, Homo sapiens
gcatcctaaaatgtcttacaaagaaaatttacttaagcat

SEQ ID NO: 38454 - DNA, 40 bp, Homo sapiens
tgcttaagtaaattttctttgtaagacattttaggatgcc

SEQ ID NO: 38455 - DNA, 40 bp, Homo sapiens
ggcatcctaaaatgtcttacaaagaaaatttacttaagca

SEQ ID NO: 38456 - DNA, 40 bp, Homo sapiens
gcttaagtaaattttctttgtaagacattttaggatgcca

SEQ ID NO: 38457 - DNA, 40 bp, Homo sapiens
tggcatcctaaaatgtcttacaaagaaaatttacttaagc

SEQ ID NO: 38458 - DNA, 40 bp, Homo sapiens
cttaagtaaattttctttgtaagacattttaggatgccat

SEQ ID NO: 38459 - DNA, 40 bp, Homo sapiens
atggcatcctaaaatgtcttacaaagaaaatttacttaag

SEQ ID NO: 38460 - DNA, 40 bp, Homo sapiens
ttaagtaaattttctttgtaagacattttaggatgccatg

SEQ ID NO: 38461 - DNA, 40 bp, Homo sapiens
catggcatcctaaaatgtcttacaaagaaaatttacttaa

SEQ ID NO: 38462 - DNA, 40 bp, Homo sapiens
taagtaaattttctttgtaagacattttaggatgccatgt

SEQ ID NO: 38463 - DNA, 40 bp, Homo sapiens
acatggcatcctaaaatgtcttacaaagaaaatttactta

SEQ ID NO: 38464 - DNA, 40 bp, Homo sapiens
aagtaaattttctttgtaagacattttaggatgccatgtt

SEQ ID NO: 38465 - DNA, 40 bp, Homo sapiens
aacatggcatcctaaaatgtcttacaaagaaaatttactt

SEQ ID NO: 38466 - DNA, 40 bp, Homo sapiens
agtaaattttctttgtaagacattttaggatgccatgtta

SEQ ID NO: 38467 - DNA, 40 bp, Homo sapiens
taacatggcatcctaaaatgtcttacaaagaaaatttact

SEQ ID NO: 38468 - DNA, 40 bp, Homo sapiens
gtaaattttctttgtaagacattttaggatgccatgttaa

SEQ ID NO: 38469 - DNA, 40 bp, Homo sapiens
ttaacatggcatcctaaaatgtcttacaaagaaaatttac

SEQ ID NO: 38470 - DNA, 40 bp, Homo sapiens
taaattttctttgtaagacattttaggatgccatgttaag

SEQ ID NO: 38471 - DNA, 40 bp, Homo sapiens
cttaacatggcatcctaaaatgtcttacaaagaaaattta

SEQ ID NO: 38472 - DNA, 40 bp, Homo sapiens
aaattttctttgtaagacattttaggatgccatgttaaga

SEQ ID NO: 38473 - DNA, 40 bp, Homo sapiens
tcttaacatggcatcctaaaatgtcttacaaagaaaattt

SEQ ID NO: 38474 - DNA, 40 bp, Homo sapiens
aattttctttgtaagacattttaggatgccatgttaagaa

SEQ ID NO: 38475 - DNA, 40 bp, Homo sapiens
ttcttaacatggcatcctaaaatgtcttacaaagaaaatt

SEQ ID NO: 38476 - DNA, 40 bp, Homo sapiens
attttctttgtaagacattttaggatgccatgttaagaat

SEQ ID NO: 38477 - DNA, 40 bp, Homo sapiens
attcttaacatggcatcctaaaatgtcttacaaagaaaat

SEQ ID NO: 38478 - DNA, 40 bp, Homo sapiens
ttttctttgtaagacattttaggatgccatgttaagaatc

SEQ ID NO: 38479 - DNA, 40 bp, Homo sapiens
gattcttaacatggcatcctaaaatgtcttacaaagaaaa

SEQ ID NO: 38480 - DNA, 40 bp, Homo sapiens
tttctttgtaagacattttaggatgccatgttaagaatct

SEQ ID NO: 38481 - DNA, 40 bp, Homo sapiens
agattcttaacatggcatcctaaaatgtcttacaaagaaa

SEQ ID NO: 38482 - DNA, 40 bp, Homo sapiens
ttctttgtaagacattttaggatgccatgttaagaatctc

SEQ ID NO: 38483 - DNA, 40 bp, Homo sapiens
gagattcttaacatggcatcctaaaatgtcttacaaagaa

SEQ ID NO: 38484 - DNA, 40 bp, Homo sapiens
tctttgtaagacattttaggatgccatgttaagaatctct

SEQ ID NO: 38485 - DNA, 40 bp, Homo sapiens
agagattcttaacatggcatcctaaaatgtcttacaaaga

SEQ ID NO: 38486 - DNA, 40 bp, Homo sapiens
ctttgtaagacattttaggatgccatgttaagaatctctt

SEQ ID NO: 38487 - DNA, 40 bp, Homo sapiens
aagagattcttaacatggcatcctaaaatgtcttacaaag

SEQ ID NO: 38488 - DNA, 40 bp, Homo sapiens
tttgtaagacattttaggatgccatgttaagaatctcttt

SEQ ID NO: 38489 - DNA, 40 bp, Homo sapiens
aaagagattcttaacatggcatcctaaaatgtcttacaaa

SEQ ID NO: 38490 - DNA, 40 bp, Homo sapiens
ttgtaagacattttaggatgccatgttaagaatctcttta

SEQ ID NO: 38491 - DNA, 40 bp, Homo sapiens
taaagagattcttaacatggcatcctaaaatgtcttacaa

SEQ ID NO: 38492 - DNA, 40 bp, Homo sapiens
tgtaagacattttaggatgccatgttaagaatctctttat

SEQ ID NO: 38493 - DNA, 40 bp, Homo sapiens
ataaagagattcttaacatggcatcctaaaatgtcttaca

SEQ ID NO: 38494 - DNA, 40 bp, Homo sapiens
gtaagacattttaggatgccatgttaagaatctctttata

SEQ ID NO: 38495 - DNA, 40 bp, Homo sapiens
tataaagagattcttaacatggcatcctaaaatgtcttac

SEQ ID NO: 38496 - DNA, 40 bp, Homo sapiens
taagacattttaggatgccatgttaagaatctctttataa

SEQ ID NO: 38497 - DNA, 40 bp, Homo sapiens
ttataaagagattcttaacatggcatcctaaaatgtctta

SEQ ID NO: 38498 - DNA, 40 bp, Homo sapiens
aagacattttaggatgccatgttaagaatctctttataac

SEQ ID NO: 38499 - DNA, 40 bp, Homo sapiens
gttataaagagattcttaacatggcatcctaaaatgtctt

SEQ ID NO: 38500 - DNA, 40 bp, Homo sapiens
agacattttaggatgccatgttaagaatctctttataact

SEQ ID NO: 38501 - DNA, 40 bp, Homo sapiens
agttataaagagattcttaacatggcatcctaaaatgtct

SEQ ID NO: 38502 - DNA, 40 bp, Homo sapiens
gacattttaggatgccatgttaagaatctctttataactg

SEQ ID NO: 38503 - DNA, 40 bp, Homo sapiens
cagttataaagagattcttaacatggcatcctaaaatgtc

SEQ ID NO: 38504 - DNA, 40 bp, Homo sapiens
acattttaggatgccatgttaagaatctctttataactgt

SEQ ID NO: 38505 - DNA, 40 bp, Homo sapiens
acagttataaagagattcttaacatggcatcctaaaatgt

SEQ ID NO: 38506 - DNA, 40 bp, Homo sapiens
cattttaggatgccatgttaagaatctctttataactgtc

SEQ ID NO: 38507 - DNA, 40 bp, Homo sapiens
gacagttataaagagattcttaacatggcatcctaaaatg

SEQ ID NO: 38508 - DNA, 40 bp, Homo sapiens
attttaggatgccatgttaagaatctctttataactgtca

SEQ ID NO: 38509 - DNA, 40 bp, Homo sapiens
tgacagttataaagagattcttaacatggcatcctaaaat

SEQ ID NO: 38510 - DNA, 40 bp, Homo sapiens
ttttaggatgccatgttaagaatctctttataactgtcat

SEQ ID NO: 38511 - DNA, 40 bp, Homo sapiens
atgacagttataaagagattcttaacatggcatcctaaaa

SEQ ID NO: 38512 - DNA, 40 bp, Homo sapiens
tttaggatgccatgttaagaatctctttataactgtcatt

SEQ ID NO: 38513 - DNA, 40 bp, Homo sapiens
aatgacagttataaagagattcttaacatggcatcctaaa

SEQ ID NO: 38514 - DNA, 40 bp, Homo sapiens
ttaggatgccatgttaagaatctctttataactgtcattt

SEQ ID NO: 38515 - DNA, 40 bp, Homo sapiens
aaatgacagttataaagagattcttaacatggcatcctaa

SEQ ID NO: 38516 - DNA, 40 bp, Homo sapiens
taggatgccatgttaagaatctctttataactgtcattta

SEQ ID NO: 38517 - DNA, 40 bp, Homo sapiens
taaatgacagttataaagagattcttaacatggcatccta

SEQ ID NO: 38518 - DNA, 40 bp, Homo sapiens
aggatgccatgttaagaatctctttataactgtcatttaa

SEQ ID NO: 38519 - DNA, 40 bp, Homo sapiens
ttaaatgacagttataaagagattcttaacatggcatcct

SEQ ID NO: 38520 - DNA, 40 bp, Homo sapiens
ggatgccatgttaagaatctctttataactgtcatttaaa

SEQ ID NO: 38521 - DNA, 40 bp, Homo sapiens
tttaaatgacagttataaagagattcttaacatggcatcc

SEQ ID NO: 38522 - DNA, 40 bp, Homo sapiens
gatgccatgttaagaatctctttataactgtcatttaaaa

SEQ ID NO: 38523 - DNA, 40 bp, Homo sapiens
ttttaaatgacagttataaagagattcttaacatggcatc

SEQ ID NO: 38524 - DNA, 40 bp, Homo sapiens
atgccatgttaagaatctctttataactgtcatttaaaaa

SEQ ID NO: 38525 - DNA, 40 bp, Homo sapiens
tttttaaatgacagttataaagagattcttaacatggcat

SEQ ID NO: 38526 - DNA, 40 bp, Homo sapiens
tgccatgttaagaatctctttataactgtcatttaaaaaa

SEQ ID NO: 38527 - DNA, 40 bp, Homo sapiens
ttttttaaatgacagttataaagagattcttaacatggca

SEQ ID NO: 38528 - DNA, 40 bp, Homo sapiens
gccatgttaagaatctctttataactgtcatttaaaaaaa

SEQ ID NO: 38529 - DNA, 40 bp, Homo sapiens
tttttttaaatgacagttataaagagattcttaacatggc

SEQ ID NO: 38530 - DNA, 40 bp, Homo sapiens
ccatgttaagaatctctttataactgtcatttaaaaaaaa

SEQ ID NO: 38531 - DNA, 40 bp, Homo sapiens
ttttttttaaatgacagttataaagagattcttaacatgg

SEQ ID NO: 38532 - DNA, 40 bp, Homo sapiens
catgttaagaatctctttataactgtcatttaaaaaaaaa

SEQ ID NO: 38533 - DNA, 40 bp, Homo sapiens
tttttttttaaatgacagttataaagagattcttaacatg

SEQ ID NO: 38534 - DNA, 40 bp, Homo sapiens
atgttaagaatctctttataactgtcatttaaaaaaaaac

SEQ ID NO: 38535 - DNA, 40 bp, Homo sapiens
gtttttttttaaatgacagttataaagagattcttaacat

SEQ ID NO: 38536 - DNA, 40 bp, Homo sapiens
tgttaagaatctctttataactgtcatttaaaaaaaaacc

SEQ ID NO: 38537 - DNA, 40 bp, Homo sapiens
ggtttttttttaaatgacagttataaagagattcttaaca

SEQ ID NO: 38538 - DNA, 40 bp, Homo sapiens
gttaagaatctctttataactgtcatttaaaaaaaaacca

SEQ ID NO: 38539 - DNA, 40 bp, Homo sapiens
tggtttttttttaaatgacagttataaagagattcttaac

SEQ ID NO: 38540 - DNA, 40 bp, Homo sapiens
ttaagaatctctttataactgtcatttaaaaaaaaaccac

SEQ ID NO: 38541 - DNA, 40 bp, Homo sapiens
gtggtttttttttaaatgacagttataaagagattcttaa

SEQ ID NO: 38542 - DNA, 40 bp, Homo sapiens
taagaatctctttataactgtcatttaaaaaaaaaccaca

SEQ ID NO: 38543 - DNA, 40 bp, Homo sapiens
tgtggtttttttttaaatgacagttataaagagattctta

SEQ ID NO: 38544 - DNA, 40 bp, Homo sapiens
aagaatctctttataactgtcatttaaaaaaaaaccacat

SEQ ID NO: 38545 - DNA, 40 bp, Homo sapiens
atgtggtttttttttaaatgacagttataaagagattctt

SEQ ID NO: 38546 - DNA, 40 bp, Homo sapiens
agaatctctttataactgtcatttaaaaaaaaaccacata

SEQ ID NO: 38547 - DNA, 40 bp, Homo sapiens
tatgtggtttttttttaaatgacagttataaagagattct

SEQ ID NO: 38548 - DNA, 40 bp, Homo sapiens
gaatctctttataactgtcatttaaaaaaaaaccacatat

SEQ ID NO: 38549 - DNA, 40 bp, Homo sapiens
atatgtggtttttttttaaatgacagttataaagagattc

SEQ ID NO: 38550 - DNA, 40 bp, Homo sapiens
aatctctttataactgtcatttaaaaaaaaaccacatatt

SEQ ID NO: 38551 - DNA, 40 bp, Homo sapiens
aatatgtggtttttttttaaatgacagttataaagagatt

SEQ ID NO: 38552 - DNA, 40 bp, Homo sapiens
atctctttataactgtcatttaaaaaaaaaccacatattt

SEQ ID NO: 38553 - DNA, 40 bp, Homo sapiens
aaatatgtggtttttttttaaatgacagttataaagagat

SEQ ID NO: 38554 - DNA, 40 bp, Homo sapiens
tctctttataactgtcatttaaaaaaaaaccacatatttt

SEQ ID NO: 38555 - DNA, 40 bp, Homo sapiens
aaaatatgtggtttttttttaaatgacagttataaagaga

SEQ ID NO: 38556 - DNA, 40 bp, Homo sapiens
ctctttataactgtcatttaaaaaaaaaccacatattttc

SEQ ID NO: 38557 - DNA, 40 bp, Homo sapiens
gaaaatatgtggtttttttttaaatgacagttataaagag

SEQ ID NO: 38558 - DNA, 40 bp, Homo sapiens
tctttataactgtcatttaaaaaaaaaccacatattttct

SEQ ID NO: 38559 - DNA, 40 bp, Homo sapiens
agaaaatatgtggtttttttttaaatgacagttataaaga

SEQ ID NO: 38560 - DNA, 40 bp, Homo sapiens
ctttataactgtcatttaaaaaaaaaccacatattttctt

SEQ ID NO: 38561 - DNA, 40 bp, Homo sapiens
aagaaaatatgtggtttttttttaaatgacagttataaag

SEQ ID NO: 38562 - DNA, 40 bp, Homo sapiens
tttataactgtcatttaaaaaaaaaccacatattttctta

SEQ ID NO: 38563 - DNA, 40 bp, Homo sapiens
taagaaaatatgtggtttttttttaaatgacagttataaa

SEQ ID NO: 38564 - DNA, 40 bp, Homo sapiens
ttataactgtcatttaaaaaaaaaccacatattttcttag

SEQ ID NO: 38565 - DNA, 40 bp, Homo sapiens
ctaagaaaatatgtggtttttttttaaatgacagttataa

SEQ ID NO: 38566 - DNA, 40 bp, Homo sapiens
tataactgtcatttaaaaaaaaaccacatattttcttagc

SEQ ID NO: 38567 - DNA, 40 bp, Homo sapiens
gctaagaaaatatgtggtttttttttaaatgacagttata

SEQ ID NO: 38568 - DNA, 40 bp, Homo sapiens
ataactgtcatttaaaaaaaaaccacatattttcttagca

SEQ ID NO: 38569 - DNA, 40 bp, Homo sapiens
tgctaagaaaatatgtggtttttttttaaatgacagttat

SEQ ID NO: 38570 - DNA, 40 bp, Homo sapiens
taactgtcatttaaaaaaaaaccacatattttcttagcat

SEQ ID NO: 38571 - DNA, 40 bp, Homo sapiens
atgctaagaaaatatgtggtttttttttaaatgacagtta

SEQ ID NO: 38572 - DNA, 40 bp, Homo sapiens
aactgtcatttaaaaaaaaaccacatattttcttagcata

SEQ ID NO: 38573 - DNA, 40 bp, Homo sapiens
tatgctaagaaaatatgtggtttttttttaaatgacagtt

SEQ ID NO: 38574 - DNA, 40 bp, Homo sapiens
actgtcatttaaaaaaaaaccacatattttcttagcataa

SEQ ID NO: 38575 - DNA, 40 bp, Homo sapiens
ttatgctaagaaaatatgtggtttttttttaaatgacagt

SEQ ID NO: 38576 - DNA, 40 bp, Homo sapiens
ctgtcatttaaaaaaaaaccacatattttcttagcataat

SEQ ID NO: 38577 - DNA, 40 bp, Homo sapiens
attatgctaagaaaatatgtggtttttttttaaatgacag

SEQ ID NO: 38578 - DNA, 40 bp, Homo sapiens
tgtcatttaaaaaaaaaccacatattttcttagcataatt

SEQ ID NO: 38579 - DNA, 40 bp, Homo sapiens
aattatgctaagaaaatatgtggtttttttttaaatgaca

SEQ ID NO: 38580 - DNA, 40 bp, Homo sapiens
gtcatttaaaaaaaaaccacatattttcttagcataattt

SEQ ID NO: 38581 - DNA, 40 bp, Homo sapiens
aaattatgctaagaaaatatgtggtttttttttaaatgac

SEQ ID NO: 38582 - DNA, 40 bp, Homo sapiens
tcatttaaaaaaaaaccacatattttcttagcataatttc

SEQ ID NO: 38583 - DNA, 40 bp, Homo sapiens
gaaattatgctaagaaaatatgtggtttttttttaaatga

SEQ ID NO: 38584 - DNA, 40 bp, Homo sapiens
catttaaaaaaaaaccacatattttcttagcataatttcc

SEQ ID NO: 38585 - DNA, 40 bp, Homo sapiens
ggaaattatgctaagaaaatatgtggtttttttttaaatg

SEQ ID NO: 38586 - DNA, 40 bp, Homo sapiens
atttaaaaaaaaaccacatattttcttagcataatttccc

SEQ ID NO: 38587 - DNA, 40 bp, Homo sapiens
gggaaattatgctaagaaaatatgtggtttttttttaaat

SEQ ID NO: 38588 - DNA, 40 bp, Homo sapiens
tttaaaaaaaaaccacatattttcttagcataatttccca

SEQ ID NO: 38589 - DNA, 40 bp, Homo sapiens
tgggaaattatgctaagaaaatatgtggtttttttttaaa

SEQ ID NO: 38590 - DNA, 40 bp, Homo sapiens
ttaaaaaaaaaccacatattttcttagcataatttcccat

SEQ ID NO: 38591 - DNA, 40 bp, Homo sapiens
atgggaaattatgctaagaaaatatgtggtttttttttaa

SEQ ID NO: 38592 - DNA, 40 bp, Homo sapiens
taaaaaaaaaccacatattttcttagcataatttcccata

SEQ ID NO: 38593 - DNA, 40 bp, Homo sapiens
tatgggaaattatgctaagaaaatatgtggttttttttta

SEQ ID NO: 38594 - DNA, 40 bp, Homo sapiens
aaaaaaaaaccacatattttcttagcataatttcccatag

SEQ ID NO: 38595 - DNA, 40 bp, Homo sapiens
ctatgggaaattatgctaagaaaatatgtggttttttttt

SEQ ID NO: 38596 - DNA, 40 bp, Homo sapiens
aaaaaaaaccacatattttcttagcataatttcccatagt

SEQ ID NO: 38597 - DNA, 40 bp, Homo sapiens
actatgggaaattatgctaagaaaatatgtggtttttttt

SEQ ID NO: 38598 - DNA, 40 bp, Homo sapiens
aaaaaaaccacatattttcttagcataatttcccatagta

SEQ ID NO: 38599 - DNA, 40 bp, Homo sapiens
tactatgggaaattatgctaagaaaatatgtggttttttt

SEQ ID NO: 38600 - DNA, 40 bp, Homo sapiens
aaaaaaccacatattttcttagcataatttcccatagtaa

SEQ ID NO: 38601 - DNA, 40 bp, Homo sapiens
ttactatgggaaattatgctaagaaaatatgtggtttttt

SEQ ID NO: 38602 - DNA, 40 bp, Homo sapiens
aaaaaccacatattttcttagcataatttcccatagtaac

SEQ ID NO: 38603 - DNA, 40 bp, Homo sapiens
gttactatgggaaattatgctaagaaaatatgtggttttt

SEQ ID NO: 38604 - DNA, 40 bp, Homo sapiens
aaaaccacatattttcttagcataatttcccatagtaaca

SEQ ID NO: 38605 - DNA, 40 bp, Homo sapiens
tgttactatgggaaattatgctaagaaaatatgtggtttt

SEQ ID NO: 38606 - DNA, 40 bp, Homo sapiens
aaaccacatattttcttagcataatttcccatagtaacat

SEQ ID NO: 38607 - DNA, 40 bp, Homo sapiens
atgttactatgggaaattatgctaagaaaatatgtggttt

SEQ ID NO: 38608 - DNA, 40 bp, Homo sapiens
aaccacatattttcttagcataatttcccatagtaacatt

SEQ ID NO: 38609 - DNA, 40 bp, Homo sapiens
aatgttactatgggaaattatgctaagaaaatatgtggtt

SEQ ID NO: 38610 - DNA, 40 bp, Homo sapiens
accacatattttcttagcataatttcccatagtaacatta

SEQ ID NO: 38611 - DNA, 40 bp, Homo sapiens
taatgttactatgggaaattatgctaagaaaatatgtggt

SEQ ID NO: 38612 - DNA, 40 bp, Homo sapiens
ccacatattttcttagcataatttcccatagtaacattac

SEQ ID NO: 38613 - DNA, 40 bp, Homo sapiens
gtaatgttactatgggaaattatgctaagaaaatatgtgg

SEQ ID NO: 38614 - DNA, 40 bp, Homo sapiens
cacatattttcttagcataatttcccatagtaacattact

SEQ ID NO: 38615 - DNA, 40 bp, Homo sapiens
agtaatgttactatgggaaattatgctaagaaaatatgtg

SEQ ID NO: 38616 - DNA, 40 bp, Homo sapiens
acatattttcttagcataatttcccatagtaacattacta

SEQ ID NO: 38617 - DNA, 40 bp, Homo sapiens
tagtaatgttactatgggaaattatgctaagaaaatatgt

SEQ ID NO: 38618 - DNA, 40 bp, Homo sapiens
catattttcttagcataatttcccatagtaacattactat

SEQ ID NO: 38619 - DNA, 40 bp, Homo sapiens
atagtaatgttactatgggaaattatgctaagaaaatatg

SEQ ID NO: 38620 - DNA, 40 bp, Homo sapiens
atattttcttagcataatttcccatagtaacattactatg

SEQ ID NO: 38621 - DNA, 40 bp, Homo sapiens
catagtaatgttactatgggaaattatgctaagaaaatat

SEQ ID NO: 38622 - DNA, 40 bp, Homo sapiens
tattttcttagcataatttcccatagtaacattactatgt

SEQ ID NO: 38623 - DNA, 40 bp, Homo sapiens
acatagtaatgttactatgggaaattatgctaagaaaata

SEQ ID NO: 38624 - DNA, 40 bp, Homo sapiens
attttcttagcataatttcccatagtaacattactatgtc

SEQ ID NO: 38625 - DNA, 40 bp, Homo sapiens
gacatagtaatgttactatgggaaattatgctaagaaaat

SEQ ID NO: 38626 - DNA, 40 bp, Homo sapiens
ttttcttagcataatttcccatagtaacattactatgtca

SEQ ID NO: 38627 - DNA, 40 bp, Homo sapiens
tgacatagtaatgttactatgggaaattatgctaagaaaa

SEQ ID NO: 38628 - DNA, 40 bp, Homo sapiens
tttcttagcataatttcccatagtaacattactatgtcaa

SEQ ID NO: 38629 - DNA, 40 bp, Homo sapiens
ttgacatagtaatgttactatgggaaattatgctaagaaa

SEQ ID NO: 38630 - DNA, 40 bp, Homo sapiens
ttcttagcataatttcccatagtaacattactatgtcaaa

SEQ ID NO: 38631 - DNA, 40 bp, Homo sapiens
tttgacatagtaatgttactatgggaaattatgctaagaa

SEQ ID NO: 38632 - DNA, 40 bp, Homo sapiens
tcttagcataatttcccatagtaacattactatgtcaaag

SEQ ID NO: 38633 - DNA, 40 bp, Homo sapiens
ctttgacatagtaatgttactatgggaaattatgctaaga

SEQ ID NO: 38634 - DNA, 40 bp, Homo sapiens
cttagcataatttcccatagtaacattactatgtcaaagg

SEQ ID NO: 38635 - DNA, 40 bp, Homo sapiens
cctttgacatagtaatgttactatgggaaattatgctaag

SEQ ID NO: 38636 - DNA, 40 bp, Homo sapiens
ttagcataatttcccatagtaacattactatgtcaaaggc

SEQ ID NO: 38637 - DNA, 40 bp, Homo sapiens
gcctttgacatagtaatgttactatgggaaattatgctaa

SEQ ID NO: 38638 - DNA, 40 bp, Homo sapiens
tagcataatttcccatagtaacattactatgtcaaaggct

SEQ ID NO: 38639 - DNA, 40 bp, Homo sapiens
agcctttgacatagtaatgttactatgggaaattatgcta

SEQ ID NO: 38640 - DNA, 40 bp, Homo sapiens
agcataatttcccatagtaacattactatgtcaaaggcta

SEQ ID NO: 38641 - DNA, 40 bp, Homo sapiens
tagcctttgacatagtaatgttactatgggaaattatgct

SEQ ID NO: 38642 - DNA, 40 bp, Homo sapiens
gcataatttcccatagtaacattactatgtcaaaggctat

SEQ ID NO: 38643 - DNA, 40 bp, Homo sapiens
atagcctttgacatagtaatgttactatgggaaattatgc

SEQ ID NO: 38644 - DNA, 40 bp, Homo sapiens
cataatttcccatagtaacattactatgtcaaaggctatg

SEQ ID NO: 38645 - DNA, 40 bp, Homo sapiens
catagcctttgacatagtaatgttactatgggaaattatg

SEQ ID NO: 38646 - DNA, 40 bp, Homo sapiens
ataatttcccatagtaacattactatgtcaaaggctatga

SEQ ID NO: 38647 - DNA, 40 bp, Homo sapiens
tcatagcctttgacatagtaatgttactatgggaaattat

SEQ ID NO: 38648 - DNA, 40 bp, Homo sapiens
taatttcccatagtaacattactatgtcaaaggctatgaa

SEQ ID NO: 38649 - DNA, 40 bp, Homo sapiens
ttcatagcctttgacatagtaatgttactatgggaaatta

SEQ ID NO: 38650 - DNA, 40 bp, Homo sapiens
aatttcccatagtaacattactatgtcaaaggctatgaac

SEQ ID NO: 38651 - DNA, 40 bp, Homo sapiens
gttcatagcctttgacatagtaatgttactatgggaaatt

SEQ ID NO: 38652 - DNA, 40 bp, Homo sapiens
atttcccatagtaacattactatgtcaaaggctatgaaca

SEQ ID NO: 38653 - DNA, 40 bp, Homo sapiens
tgttcatagcctttgacatagtaatgttactatgggaaat

SEQ ID NO: 38654 - DNA, 40 bp, Homo sapiens
tttcccatagtaacattactatgtcaaaggctatgaacat

SEQ ID NO: 38655 - DNA, 40 bp, Homo sapiens
atgttcatagcctttgacatagtaatgttactatgggaaa

SEQ ID NO: 38656 - DNA, 40 bp, Homo sapiens
ttcccatagtaacattactatgtcaaaggctatgaacatt

SEQ ID NO: 38657 - DNA, 40 bp, Homo sapiens
aatgttcatagcctttgacatagtaatgttactatgggaa

SEQ ID NO: 38658 - DNA, 40 bp, Homo sapiens
tcccatagtaacattactatgtcaaaggctatgaacattt

SEQ ID NO: 38659 - DNA, 40 bp, Homo sapiens
aaatgttcatagcctttgacatagtaatgttactatggga

SEQ ID NO: 38660 - DNA, 40 bp, Homo sapiens
cccatagtaacattactatgtcaaaggctatgaacatttg

SEQ ID NO: 38661 - DNA, 40 bp, Homo sapiens
caaatgttcatagcctttgacatagtaatgttactatggg

SEQ ID NO: 38662 - DNA, 40 bp, Homo sapiens
ccatagtaacattactatgtcaaaggctatgaacatttga

SEQ ID NO: 38663 - DNA, 40 bp, Homo sapiens
tcaaatgttcatagcctttgacatagtaatgttactatgg

SEQ ID NO: 38664 - DNA, 40 bp, Homo sapiens
catagtaacattactatgtcaaaggctatgaacatttgaa

SEQ ID NO: 38665 - DNA, 40 bp, Homo sapiens
ttcaaatgttcatagcctttgacatagtaatgttactatg

SEQ ID NO: 38666 - DNA, 40 bp, Homo sapiens
atagtaacattactatgtcaaaggctatgaacatttgaat

SEQ ID NO: 38667 - DNA, 40 bp, Homo sapiens
attcaaatgttcatagcctttgacatagtaatgttactat

SEQ ID NO: 38668 - DNA, 40 bp, Homo sapiens
tagtaacattactatgtcaaaggctatgaacatttgaatg

SEQ ID NO: 38669 - DNA, 40 bp, Homo sapiens
cattcaaatgttcatagcctttgacatagtaatgttacta

SEQ ID NO: 38670 - DNA, 40 bp, Homo sapiens
agtaacattactatgtcaaaggctatgaacatttgaatga

SEQ ID NO: 38671 - DNA, 40 bp, Homo sapiens
tcattcaaatgttcatagcctttgacatagtaatgttact

SEQ ID NO: 38672 - DNA, 40 bp, Homo sapiens
gtaacattactatgtcaaaggctatgaacatttgaatgac

SEQ ID NO: 38673 - DNA, 40 bp, Homo sapiens
gtcattcaaatgttcatagcctttgacatagtaatgttac

SEQ ID NO: 38674 - DNA, 40 bp, Homo sapiens
taacattactatgtcaaaggctatgaacatttgaatgact

SEQ ID NO: 38675 - DNA, 40 bp, Homo sapiens
agtcattcaaatgttcatagcctttgacatagtaatgtta

SEQ ID NO: 38676 - DNA, 40 bp, Homo sapiens
aacattactatgtcaaaggctatgaacatttgaatgactt

SEQ ID NO: 38677 - DNA, 40 bp, Homo sapiens
aagtcattcaaatgttcatagcctttgacatagtaatgtt

SEQ ID NO: 38678 - DNA, 40 bp, Homo sapiens
acattactatgtcaaaggctatgaacatttgaatgacttt

SEQ ID NO: 38679 - DNA, 40 bp, Homo sapiens
aaagtcattcaaatgttcatagcctttgacatagtaatgt

SEQ ID NO: 38680 - DNA, 40 bp, Homo sapiens
cattactatgtcaaaggctatgaacatttgaatgacttta

SEQ ID NO: 38681 - DNA, 40 bp, Homo sapiens
taaagtcattcaaatgttcatagcctttgacatagtaatg

SEQ ID NO: 38682 - DNA, 40 bp, Homo sapiens
attactatgtcaaaggctatgaacatttgaatgactttag

SEQ ID NO: 38683 - DNA, 40 bp, Homo sapiens
ctaaagtcattcaaatgttcatagcctttgacatagtaat

SEQ ID NO: 38684 - DNA, 40 bp, Homo sapiens
ttactatgtcaaaggctatgaacatttgaatgactttaga

SEQ ID NO: 38685 - DNA, 40 bp, Homo sapiens
tctaaagtcattcaaatgttcatagcctttgacatagtaa

SEQ ID NO: 38686 - DNA, 40 bp, Homo sapiens
tactatgtcaaaggctatgaacatttgaatgactttagat

SEQ ID NO: 38687 - DNA, 40 bp, Homo sapiens
atctaaagtcattcaaatgttcatagcctttgacatagta

SEQ ID NO: 38688 - DNA, 40 bp, Homo sapiens
actatgtcaaaggctatgaacatttgaatgactttagata

SEQ ID NO: 38689 - DNA, 40 bp, Homo sapiens
tatctaaagtcattcaaatgttcatagcctttgacatagt

SEQ ID NO: 38690 - DNA, 40 bp, Homo sapiens
ctatgtcaaaggctatgaacatttgaatgactttagataa

SEQ ID NO: 38691 - DNA, 40 bp, Homo sapiens
ttatctaaagtcattcaaatgttcatagcctttgacatag

SEQ ID NO: 38692 - DNA, 40 bp, Homo sapiens
tatgtcaaaggctatgaacatttgaatgactttagataaa

SEQ ID NO: 38693 - DNA, 40 bp, Homo sapiens
tttatctaaagtcattcaaatgttcatagcctttgacata

SEQ ID NO: 38694 - DNA, 40 bp, Homo sapiens
atgtcaaaggctatgaacatttgaatgactttagataaat

SEQ ID NO: 38695 - DNA, 40 bp, Homo sapiens
atttatctaaagtcattcaaatgttcatagcctttgacat

SEQ ID NO: 38696 - DNA, 40 bp, Homo sapiens
tgtcaaaggctatgaacatttgaatgactttagataaata

SEQ ID NO: 38697 - DNA, 40 bp, Homo sapiens
tatttatctaaagtcattcaaatgttcatagcctttgaca

SEQ ID NO: 38698 - DNA, 40 bp, Homo sapiens
gtcaaaggctatgaacatttgaatgactttagataaatac

SEQ ID NO: 38699 - DNA, 40 bp, Homo sapiens
gtatttatctaaagtcattcaaatgttcatagcctttgac

SEQ ID NO: 38700 - DNA, 40 bp, Homo sapiens
tcaaaggctatgaacatttgaatgactttagataaatact

SEQ ID NO: 38701 - DNA, 40 bp, Homo sapiens
agtatttatctaaagtcattcaaatgttcatagcctttga

SEQ ID NO: 38702 - DNA, 40 bp, Homo sapiens
caaaggctatgaacatttgaatgactttagataaatactg

SEQ ID NO: 38703 - DNA, 40 bp, Homo sapiens
cagtatttatctaaagtcattcaaatgttcatagcctttg

SEQ ID NO: 38704 - DNA, 40 bp, Homo sapiens
aaaggctatgaacatttgaatgactttagataaatactgt

SEQ ID NO: 38705 - DNA, 40 bp, Homo sapiens
acagtatttatctaaagtcattcaaatgttcatagccttt

SEQ ID NO: 38706 - DNA, 40 bp, Homo sapiens
aaggctatgaacatttgaatgactttagataaatactgta

SEQ ID NO: 38707 - DNA, 40 bp, Homo sapiens
tacagtatttatctaaagtcattcaaatgttcatagcctt

SEQ ID NO: 38708 - DNA, 40 bp, Homo sapiens
aggctatgaacatttgaatgactttagataaatactgtaa

SEQ ID NO: 38709 - DNA, 40 bp, Homo sapiens
ttacagtatttatctaaagtcattcaaatgttcatagcct

SEQ ID NO: 38710 - DNA, 40 bp, Homo sapiens
ggctatgaacatttgaatgactttagataaatactgtaat

SEQ ID NO: 38711 - DNA, 40 bp, Homo sapiens
attacagtatttatctaaagtcattcaaatgttcatagcc

SEQ ID NO: 38712 - DNA, 40 bp, Homo sapiens
gctatgaacatttgaatgactttagataaatactgtaatt

SEQ ID NO: 38713 - DNA, 40 bp, Homo sapiens
aattacagtatttatctaaagtcattcaaatgttcatagc

SEQ ID NO: 38714 - DNA, 40 bp, Homo sapiens
ctatgaacatttgaatgactttagataaatactgtaattg

SEQ ID NO: 38715 - DNA, 40 bp, Homo sapiens
caattacagtatttatctaaagtcattcaaatgttcatag

SEQ ID NO: 38716 - DNA, 40 bp, Homo sapiens
tatgaacatttgaatgactttagataaatactgtaattgc

SEQ ID NO: 38717 - DNA, 40 bp, Homo sapiens
gcaattacagtatttatctaaagtcattcaaatgttcata

SEQ ID NO: 38718 - DNA, 40 bp, Homo sapiens
atgaacatttgaatgactttagataaatactgtaattgct

SEQ ID NO: 38719 - DNA, 40 bp, Homo sapiens
agcaattacagtatttatctaaagtcattcaaatgttcat

SEQ ID NO: 38720 - DNA, 40 bp, Homo sapiens
tgaacatttgaatgactttagataaatactgtaattgctt

SEQ ID NO: 38721 - DNA, 40 bp, Homo sapiens
aagcaattacagtatttatctaaagtcattcaaatgttca

SEQ ID NO: 38722 - DNA, 40 bp, Homo sapiens
gaacatttgaatgactttagataaatactgtaattgcttt

SEQ ID NO: 38723 - DNA, 40 bp, Homo sapiens
aaagcaattacagtatttatctaaagtcattcaaatgttc

SEQ ID NO: 38724 - DNA, 40 bp, Homo sapiens
aacatttgaatgactttagataaatactgtaattgctttc

SEQ ID NO: 38725 - DNA, 40 bp, Homo sapiens
gaaagcaattacagtatttatctaaagtcattcaaatgtt

SEQ ID NO: 38726 - DNA, 40 bp, Homo sapiens
acatttgaatgactttagataaatactgtaattgctttcc

SEQ ID NO: 38727 - DNA, 40 bp, Homo sapiens
ggaaagcaattacagtatttatctaaagtcattcaaatgt

SEQ ID NO: 38728 - DNA, 40 bp, Homo sapiens
catttgaatgactttagataaatactgtaattgctttcca

SEQ ID NO: 38729 - DNA, 40 bp, Homo sapiens
tggaaagcaattacagtatttatctaaagtcattcaaatg

SEQ ID NO: 38730 - DNA, 40 bp, Homo sapiens
atttgaatgactttagataaatactgtaattgctttccaa

SEQ ID NO: 38731 - DNA, 40 bp, Homo sapiens
ttggaaagcaattacagtatttatctaaagtcattcaaat

SEQ ID NO: 38732 - DNA, 40 bp, Homo sapiens
tttgaatgactttagataaatactgtaattgctttccaaa

SEQ ID NO: 38733 - DNA, 40 bp, Homo sapiens
tttggaaagcaattacagtatttatctaaagtcattcaaa

SEQ ID NO: 38734 - DNA, 40 bp, Homo sapiens
ttgaatgactttagataaatactgtaattgctttccaaaa

SEQ ID NO: 38735 - DNA, 40 bp, Homo sapiens
ttttggaaagcaattacagtatttatctaaagtcattcaa

SEQ ID NO: 38736 - DNA, 40 bp, Homo sapiens
tgaatgactttagataaatactgtaattgctttccaaaaa

SEQ ID NO: 38737 - DNA, 40 bp, Homo sapiens
tttttggaaagcaattacagtatttatctaaagtcattca

SEQ ID NO: 38738 - DNA, 40 bp, Homo sapiens
gaatgactttagataaatactgtaattgctttccaaaaat

SEQ ID NO: 38739 - DNA, 40 bp, Homo sapiens
atttttggaaagcaattacagtatttatctaaagtcattc

SEQ ID NO: 38740 - DNA, 40 bp, Homo sapiens
aatgactttagataaatactgtaattgctttccaaaaata

SEQ ID NO: 38741 - DNA, 40 bp, Homo sapiens
tatttttggaaagcaattacagtatttatctaaagtcatt

SEQ ID NO: 38742 - DNA, 40 bp, Homo sapiens
atgactttagataaatactgtaattgctttccaaaaatat

SEQ ID NO: 38743 - DNA, 40 bp, Homo sapiens
atatttttggaaagcaattacagtatttatctaaagtcat

SEQ ID NO: 38744 - DNA, 40 bp, Homo sapiens
tgactttagataaatactgtaattgctttccaaaaatatt

SEQ ID NO: 38745 - DNA, 40 bp, Homo sapiens
aatatttttggaaagcaattacagtatttatctaaagtca

SEQ ID NO: 38746 - DNA, 40 bp, Homo sapiens
gactttagataaatactgtaattgctttccaaaaatattg

SEQ ID NO: 38747 - DNA, 40 bp, Homo sapiens
caatatttttggaaagcaattacagtatttatctaaagtc

SEQ ID NO: 38748 - DNA, 40 bp, Homo sapiens
actttagataaatactgtaattgctttccaaaaatattgt

SEQ ID NO: 38749 - DNA, 40 bp, Homo sapiens
acaatatttttggaaagcaattacagtatttatctaaagt

SEQ ID NO: 38750 - DNA, 40 bp, Homo sapiens
ctttagataaatactgtaattgctttccaaaaatattgtg

SEQ ID NO: 38751 - DNA, 40 bp, Homo sapiens
cacaatatttttggaaagcaattacagtatttatctaaag

SEQ ID NO: 38752 - DNA, 40 bp, Homo sapiens
tttagataaatactgtaattgctttccaaaaatattgtgc

SEQ ID NO: 38753 - DNA, 40 bp, Homo sapiens
gcacaatatttttggaaagcaattacagtatttatctaaa

SEQ ID NO: 38754 - DNA, 40 bp, Homo sapiens
ttagataaatactgtaattgctttccaaaaatattgtgct

SEQ ID NO: 38755 - DNA, 40 bp, Homo sapiens
agcacaatatttttggaaagcaattacagtatttatctaa

SEQ ID NO: 38756 - DNA, 40 bp, Homo sapiens
tagataaatactgtaattgctttccaaaaatattgtgctt

SEQ ID NO: 38757 - DNA, 40 bp, Homo sapiens
aagcacaatatttttggaaagcaattacagtatttatcta

SEQ ID NO: 38758 - DNA, 40 bp, Homo sapiens
agataaatactgtaattgctttccaaaaatattgtgctta

SEQ ID NO: 38759 - DNA, 40 bp, Homo sapiens
taagcacaatatttttggaaagcaattacagtatttatct

SEQ ID NO: 38760 - DNA, 40 bp, Homo sapiens
gataaatactgtaattgctttccaaaaatattgtgcttat

SEQ ID NO: 38761 - DNA, 40 bp, Homo sapiens
ataagcacaatatttttggaaagcaattacagtatttatc

SEQ ID NO: 38762 - DNA, 40 bp, Homo sapiens
ataaatactgtaattgctttccaaaaatattgtgcttatt

SEQ ID NO: 38763 - DNA, 40 bp, Homo sapiens
aataagcacaatatttttggaaagcaattacagtatttat

SEQ ID NO: 38764 - DNA, 40 bp, Homo sapiens
taaatactgtaattgctttccaaaaatattgtgcttatta

SEQ ID NO: 38765 - DNA, 40 bp, Homo sapiens
taataagcacaatatttttggaaagcaattacagtattta

SEQ ID NO: 38766 - DNA, 40 bp, Homo sapiens
aaatactgtaattgctttccaaaaatattgtgcttattat

SEQ ID NO: 38767 - DNA, 40 bp, Homo sapiens
ataataagcacaatatttttggaaagcaattacagtattt

SEQ ID NO: 38768 - DNA, 40 bp, Homo sapiens
aatactgtaattgctttccaaaaatattgtgcttattatg

SEQ ID NO: 38769 - DNA, 40 bp, Homo sapiens
cataataagcacaatatttttggaaagcaattacagtatt

SEQ ID NO: 38770 - DNA, 40 bp, Homo sapiens
atactgtaattgctttccaaaaatattgtgcttattatgt

SEQ ID NO: 38771 - DNA, 40 bp, Homo sapiens
acataataagcacaatatttttggaaagcaattacagtat

SEQ ID NO: 38772 - DNA, 40 bp, Homo sapiens
tactgtaattgctttccaaaaatattgtgcttattatgtc

SEQ ID NO: 38773 - DNA, 40 bp, Homo sapiens
gacataataagcacaatatttttggaaagcaattacagta

SEQ ID NO: 38774 - DNA, 40 bp, Homo sapiens
actgtaattgctttccaaaaatattgtgcttattatgtca

SEQ ID NO: 38775 - DNA, 40 bp, Homo sapiens
tgacataataagcacaatatttttggaaagcaattacagt

SEQ ID NO: 38776 - DNA, 40 bp, Homo sapiens
ctgtaattgctttccaaaaatattgtgcttattatgtcac

SEQ ID NO: 38777 - DNA, 40 bp, Homo sapiens
gtgacataataagcacaatatttttggaaagcaattacag

SEQ ID NO: 38778 - DNA, 40 bp, Homo sapiens
tgtaattgctttccaaaaatattgtgcttattatgtcacc

SEQ ID NO: 38779 - DNA, 40 bp, Homo sapiens
ggtgacataataagcacaatatttttggaaagcaattaca

SEQ ID NO: 38780 - DNA, 40 bp, Homo sapiens
gtaattgctttccaaaaatattgtgcttattatgtcacca

SEQ ID NO: 38781 - DNA, 40 bp, Homo sapiens
tggtgacataataagcacaatatttttggaaagcaattac

SEQ ID NO: 38782 - DNA, 40 bp, Homo sapiens
taattgctttccaaaaatattgtgcttattatgtcaccag

SEQ ID NO: 38783 - DNA, 40 bp, Homo sapiens
ctggtgacataataagcacaatatttttggaaagcaatta

SEQ ID NO: 38784 - DNA, 40 bp, Homo sapiens
aattgctttccaaaaatattgtgcttattatgtcaccaga

SEQ ID NO: 38785 - DNA, 40 bp, Homo sapiens
tctggtgacataataagcacaatatttttggaaagcaatt

SEQ ID NO: 38786 - DNA, 40 bp, Homo sapiens
attgctttccaaaaatattgtgcttattatgtcaccagaa

SEQ ID NO: 38787 - DNA, 40 bp, Homo sapiens
ttctggtgacataataagcacaatatttttggaaagcaat

SEQ ID NO: 38788 - DNA, 40 bp, Homo sapiens
ttgctttccaaaaatattgtgcttattatgtcaccagaaa

SEQ ID NO: 38789 - DNA, 40 bp, Homo sapiens
tttctggtgacataataagcacaatatttttggaaagcaa

SEQ ID NO: 38790 - DNA, 40 bp, Homo sapiens
tgctttccaaaaatattgtgcttattatgtcaccagaaat

SEQ ID NO: 38791 - DNA, 40 bp, Homo sapiens
atttctggtgacataataagcacaatatttttggaaagca

SEQ ID NO: 38792 - DNA, 40 bp, Homo sapiens
gctttccaaaaatattgtgcttattatgtcaccagaaatg

SEQ ID NO: 38793 - DNA, 40 bp, Homo sapiens
catttctggtgacataataagcacaatatttttggaaagc

SEQ ID NO: 38794 - DNA, 40 bp, Homo sapiens
ctttccaaaaatattgtgcttattatgtcaccagaaatgt

SEQ ID NO: 38795 - DNA, 40 bp, Homo sapiens
acatttctggtgacataataagcacaatatttttggaaag

SEQ ID NO: 38796 - DNA, 40 bp, Homo sapiens
tttccaaaaatattgtgcttattatgtcaccagaaatgtt

SEQ ID NO: 38797 - DNA, 40 bp, Homo sapiens
aacatttctggtgacataataagcacaatatttttggaaa

SEQ ID NO: 38798 - DNA, 40 bp, Homo sapiens
ttccaaaaatattgtgcttattatgtcaccagaaatgttt

SEQ ID NO: 38799 - DNA, 40 bp, Homo sapiens
aaacatttctggtgacataataagcacaatatttttggaa

SEQ ID NO: 38800 - DNA, 40 bp, Homo sapiens
tccaaaaatattgtgcttattatgtcaccagaaatgtttg

SEQ ID NO: 38801 - DNA, 40 bp, Homo sapiens
caaacatttctggtgacataataagcacaatatttttgga

SEQ ID NO: 38802 - DNA, 40 bp, Homo sapiens
ccaaaaatattgtgcttattatgtcaccagaaatgtttga

SEQ ID NO: 38803 - DNA, 40 bp, Homo sapiens
tcaaacatttctggtgacataataagcacaatatttttgg

SEQ ID NO: 38804 - DNA, 40 bp, Homo sapiens
caaaaatattgtgcttattatgtcaccagaaatgtttgaa

SEQ ID NO: 38805 - DNA, 40 bp, Homo sapiens
ttcaaacatttctggtgacataataagcacaatatttttg

SEQ ID NO: 38806 - DNA, 40 bp, Homo sapiens
aaaaatattgtgcttattatgtcaccagaaatgtttgaat

SEQ ID NO: 38807 - DNA, 40 bp, Homo sapiens
attcaaacatttctggtgacataataagcacaatattttt

SEQ ID NO: 38808 - DNA, 40 bp, Homo sapiens
aaaatattgtgcttattatgtcaccagaaatgtttgaatt

SEQ ID NO: 38809 - DNA, 40 bp, Homo sapiens
aattcaaacatttctggtgacataataagcacaatatttt

SEQ ID NO: 38810 - DNA, 40 bp, Homo sapiens
aaatattgtgcttattatgtcaccagaaatgtttgaattc

SEQ ID NO: 38811 - DNA, 40 bp, Homo sapiens
gaattcaaacatttctggtgacataataagcacaatattt

SEQ ID NO: 38812 - DNA, 40 bp, Homo sapiens
aatattgtgcttattatgtcaccagaaatgtttgaattct

SEQ ID NO: 38813 - DNA, 40 bp, Homo sapiens
agaattcaaacatttctggtgacataataagcacaatatt

SEQ ID NO: 38814 - DNA, 40 bp, Homo sapiens
atattgtgcttattatgtcaccagaaatgtttgaattctg

SEQ ID NO: 38815 - DNA, 40 bp, Homo sapiens
cagaattcaaacatttctggtgacataataagcacaatat

SEQ ID NO: 38816 - DNA, 40 bp, Homo sapiens
tattgtgcttattatgtcaccagaaatgtttgaattctgt

SEQ ID NO: 38817 - DNA, 40 bp, Homo sapiens
acagaattcaaacatttctggtgacataataagcacaata

SEQ ID NO: 38818 - DNA, 40 bp, Homo sapiens
attgtgcttattatgtcaccagaaatgtttgaattctgtc

SEQ ID NO: 38819 - DNA, 40 bp, Homo sapiens
gacagaattcaaacatttctggtgacataataagcacaat

SEQ ID NO: 38820 - DNA, 40 bp, Homo sapiens
ttgtgcttattatgtcaccagaaatgtttgaattctgtct

SEQ ID NO: 38821 - DNA, 40 bp, Homo sapiens
agacagaattcaaacatttctggtgacataataagcacaa

SEQ ID NO: 38822 - DNA, 40 bp, Homo sapiens
tgtgcttattatgtcaccagaaatgtttgaattctgtcta

SEQ ID NO: 38823 - DNA, 40 bp, Homo sapiens
tagacagaattcaaacatttctggtgacataataagcaca

SEQ ID NO: 38824 - DNA, 40 bp, Homo sapiens
gtgcttattatgtcaccagaaatgtttgaattctgtctac

SEQ ID NO: 38825 - DNA, 40 bp, Homo sapiens
gtagacagaattcaaacatttctggtgacataataagcac

SEQ ID NO: 38826 - DNA, 40 bp, Homo sapiens
tgcttattatgtcaccagaaatgtttgaattctgtctaca

SEQ ID NO: 38827 - DNA, 40 bp, Homo sapiens
tgtagacagaattcaaacatttctggtgacataataagca

SEQ ID NO: 38828 - DNA, 40 bp, Homo sapiens
gcttattatgtcaccagaaatgtttgaattctgtctacaa

SEQ ID NO: 38829 - DNA, 40 bp, Homo sapiens
ttgtagacagaattcaaacatttctggtgacataataagc

SEQ ID NO: 38830 - DNA, 40 bp, Homo sapiens
cttattatgtcaccagaaatgtttgaattctgtctacaat

SEQ ID NO: 38831 - DNA, 40 bp, Homo sapiens
attgtagacagaattcaaacatttctggtgacataataag

SEQ ID NO: 38832 - DNA, 40 bp, Homo sapiens
ttattatgtcaccagaaatgtttgaattctgtctacaatt

SEQ ID NO: 38833 - DNA, 40 bp, Homo sapiens
aattgtagacagaattcaaacatttctggtgacataataa

SEQ ID NO: 38834 - DNA, 40 bp, Homo sapiens
tattatgtcaccagaaatgtttgaattctgtctacaattc

SEQ ID NO: 38835 - DNA, 40 bp, Homo sapiens
gaattgtagacagaattcaaacatttctggtgacataata

SEQ ID NO: 38836 - DNA, 40 bp, Homo sapiens
attatgtcaccagaaatgtttgaattctgtctacaattca

SEQ ID NO: 38837 - DNA, 40 bp, Homo sapiens
tgaattgtagacagaattcaaacatttctggtgacataat

SEQ ID NO: 38838 - DNA, 40 bp, Homo sapiens
ttatgtcaccagaaatgtttgaattctgtctacaattcag

SEQ ID NO: 38839 - DNA, 40 bp, Homo sapiens
ctgaattgtagacagaattcaaacatttctggtgacataa

SEQ ID NO: 38840 - DNA, 40 bp, Homo sapiens
tatgtcaccagaaatgtttgaattctgtctacaattcagt

SEQ ID NO: 38841 - DNA, 40 bp, Homo sapiens
actgaattgtagacagaattcaaacatttctggtgacata

SEQ ID NO: 38842 - DNA, 40 bp, Homo sapiens
atgtcaccagaaatgtttgaattctgtctacaattcagtc

SEQ ID NO: 38843 - DNA, 40 bp, Homo sapiens
gactgaattgtagacagaattcaaacatttctggtgacat

SEQ ID NO: 38844 - DNA, 40 bp, Homo sapiens
tgtcaccagaaatgtttgaattctgtctacaattcagtct

SEQ ID NO: 38845 - DNA, 40 bp, Homo sapiens
agactgaattgtagacagaattcaaacatttctggtgaca

SEQ ID NO: 38846 - DNA, 40 bp, Homo sapiens
gtcaccagaaatgtttgaattctgtctacaattcagtctt

SEQ ID NO: 38847 - DNA, 40 bp, Homo sapiens
aagactgaattgtagacagaattcaaacatttctggtgac

SEQ ID NO: 38848 - DNA, 40 bp, Homo sapiens
tcaccagaaatgtttgaattctgtctacaattcagtcttg

SEQ ID NO: 38849 - DNA, 40 bp, Homo sapiens
caagactgaattgtagacagaattcaaacatttctggtga

SEQ ID NO: 38850 - DNA, 40 bp, Homo sapiens
caccagaaatgtttgaattctgtctacaattcagtcttgc

SEQ ID NO: 38851 - DNA, 40 bp, Homo sapiens
gcaagactgaattgtagacagaattcaaacatttctggtg

SEQ ID NO: 38852 - DNA, 40 bp, Homo sapiens
accagaaatgtttgaattctgtctacaattcagtcttgcc

SEQ ID NO: 38853 - DNA, 40 bp, Homo sapiens
ggcaagactgaattgtagacagaattcaaacatttctggt

SEQ ID NO: 38854 - DNA, 40 bp, Homo sapiens
ccagaaatgtttgaattctgtctacaattcagtcttgcca

SEQ ID NO: 38855 - DNA, 40 bp, Homo sapiens
tggcaagactgaattgtagacagaattcaaacatttctgg

SEQ ID NO: 38856 - DNA, 40 bp, Homo sapiens
cagaaatgtttgaattctgtctacaattcagtcttgccag

SEQ ID NO: 38857 - DNA, 40 bp, Homo sapiens
ctggcaagactgaattgtagacagaattcaaacatttctg

SEQ ID NO: 38858 - DNA, 40 bp, Homo sapiens
agaaatgtttgaattctgtctacaattcagtcttgccagt

SEQ ID NO: 38859 - DNA, 40 bp, Homo sapiens
actggcaagactgaattgtagacagaattcaaacatttct

SEQ ID NO: 38860 - DNA, 40 bp, Homo sapiens
gaaatgtttgaattctgtctacaattcagtcttgccagta

SEQ ID NO: 38861 - DNA, 40 bp, Homo sapiens
tactggcaagactgaattgtagacagaattcaaacatttc

SEQ ID NO: 38862 - DNA, 40 bp, Homo sapiens
aaatgtttgaattctgtctacaattcagtcttgccagtat

SEQ ID NO: 38863 - DNA, 40 bp, Homo sapiens
atactggcaagactgaattgtagacagaattcaaacattt

SEQ ID NO: 38864 - DNA, 40 bp, Homo sapiens
aatgtttgaattctgtctacaattcagtcttgccagtata

SEQ ID NO: 38865 - DNA, 40 bp, Homo sapiens
tatactggcaagactgaattgtagacagaattcaaacatt

SEQ ID NO: 38866 - DNA, 40 bp, Homo sapiens
atgtttgaattctgtctacaattcagtcttgccagtatag

SEQ ID NO: 38867 - DNA, 40 bp, Homo sapiens
ctatactggcaagactgaattgtagacagaattcaaacat

SEQ ID NO: 38868 - DNA, 40 bp, Homo sapiens
tgtttgaattctgtctacaattcagtcttgccagtatagt

SEQ ID NO: 38869 - DNA, 40 bp, Homo sapiens
actatactggcaagactgaattgtagacagaattcaaaca

SEQ ID NO: 38870 - DNA, 40 bp, Homo sapiens
gtttgaattctgtctacaattcagtcttgccagtatagta

SEQ ID NO: 38871 - DNA, 40 bp, Homo sapiens
tactatactggcaagactgaattgtagacagaattcaaac

SEQ ID NO: 38872 - DNA, 40 bp, Homo sapiens
tttgaattctgtctacaattcagtcttgccagtatagtac

SEQ ID NO: 38873 - DNA, 40 bp, Homo sapiens
gtactatactggcaagactgaattgtagacagaattcaaa

SEQ ID NO: 38874 - DNA, 40 bp, Homo sapiens
ttgaattctgtctacaattcagtcttgccagtatagtaca

SEQ ID NO: 38875 - DNA, 40 bp, Homo sapiens
tgtactatactggcaagactgaattgtagacagaattcaa

SEQ ID NO: 38876 - DNA, 40 bp, Homo sapiens
tgaattctgtctacaattcagtcttgccagtatagtacat

SEQ ID NO: 38877 - DNA, 40 bp, Homo sapiens
atgtactatactggcaagactgaattgtagacagaattca

SEQ ID NO: 38878 - DNA, 40 bp, Homo sapiens
gaattctgtctacaattcagtcttgccagtatagtacatt

SEQ ID NO: 38879 - DNA, 40 bp, Homo sapiens
aatgtactatactggcaagactgaattgtagacagaattc

SEQ ID NO: 38880 - DNA, 40 bp, Homo sapiens
aattctgtctacaattcagtcttgccagtatagtacattt

SEQ ID NO: 38881 - DNA, 40 bp, Homo sapiens
aaatgtactatactggcaagactgaattgtagacagaatt

SEQ ID NO: 38882 - DNA, 40 bp, Homo sapiens
attctgtctacaattcagtcttgccagtatagtacatttc

SEQ ID NO: 38883 - DNA, 40 bp, Homo sapiens
gaaatgtactatactggcaagactgaattgtagacagaat

SEQ ID NO: 38884 - DNA, 40 bp, Homo sapiens
ttctgtctacaattcagtcttgccagtatagtacatttca

SEQ ID NO: 38885 - DNA, 40 bp, Homo sapiens
tgaaatgtactatactggcaagactgaattgtagacagaa

SEQ ID NO: 38886 - DNA, 40 bp, Homo sapiens
tctgtctacaattcagtcttgccagtatagtacatttcat

SEQ ID NO: 38887 - DNA, 40 bp, Homo sapiens
atgaaatgtactatactggcaagactgaattgtagacaga

SEQ ID NO: 38888 - DNA, 40 bp, Homo sapiens
ctgtctacaattcagtcttgccagtatagtacatttcatt

SEQ ID NO: 38889 - DNA, 40 bp, Homo sapiens
aatgaaatgtactatactggcaagactgaattgtagacag

SEQ ID NO: 38890 - DNA, 40 bp, Homo sapiens
tgtctacaattcagtcttgccagtatagtacatttcattt

SEQ ID NO: 38891 - DNA, 40 bp, Homo sapiens
aaatgaaatgtactatactggcaagactgaattgtagaca

SEQ ID NO: 38892 - DNA, 40 bp, Homo sapiens
gtctacaattcagtcttgccagtatagtacatttcattta

SEQ ID NO: 38893 - DNA, 40 bp, Homo sapiens
taaatgaaatgtactatactggcaagactgaattgtagac

SEQ ID NO: 38894 - DNA, 40 bp, Homo sapiens
tctacaattcagtcttgccagtatagtacatttcatttag

SEQ ID NO: 38895 - DNA, 40 bp, Homo sapiens
ctaaatgaaatgtactatactggcaagactgaattgtaga

SEQ ID NO: 38896 - DNA, 40 bp, Homo sapiens
ctacaattcagtcttgccagtatagtacatttcatttaga

SEQ ID NO: 38897 - DNA, 40 bp, Homo sapiens
tctaaatgaaatgtactatactggcaagactgaattgtag

SEQ ID NO: 38898 - DNA, 40 bp, Homo sapiens
tacaattcagtcttgccagtatagtacatttcatttagaa

SEQ ID NO: 38899 - DNA, 40 bp, Homo sapiens
ttctaaatgaaatgtactatactggcaagactgaattgta

SEQ ID NO: 38900 - DNA, 40 bp, Homo sapiens
acaattcagtcttgccagtatagtacatttcatttagaaa

SEQ ID NO: 38901 - DNA, 40 bp, Homo sapiens
tttctaaatgaaatgtactatactggcaagactgaattgt

SEQ ID NO: 38902 - DNA, 40 bp, Homo sapiens
caattcagtcttgccagtatagtacatttcatttagaaaa

SEQ ID NO: 38903 - DNA, 40 bp, Homo sapiens
ttttctaaatgaaatgtactatactggcaagactgaattg

SEQ ID NO: 38904 - DNA, 40 bp, Homo sapiens
aattcagtcttgccagtatagtacatttcatttagaaaaa

SEQ ID NO: 38905 - DNA, 40 bp, Homo sapiens
tttttctaaatgaaatgtactatactggcaagactgaatt

SEQ ID NO: 38906 - DNA, 40 bp, Homo sapiens
attcagtcttgccagtatagtacatttcatttagaaaaat

SEQ ID NO: 38907 - DNA, 40 bp, Homo sapiens
atttttctaaatgaaatgtactatactggcaagactgaat

SEQ ID NO: 38908 - DNA, 40 bp, Homo sapiens
ttcagtcttgccagtatagtacatttcatttagaaaaatt

SEQ ID NO: 38909 - DNA, 40 bp, Homo sapiens
aatttttctaaatgaaatgtactatactggcaagactgaa

SEQ ID NO: 38910 - DNA, 40 bp, Homo sapiens
tcagtcttgccagtatagtacatttcatttagaaaaattt

SEQ ID NO: 38911 - DNA, 40 bp, Homo sapiens
aaatttttctaaatgaaatgtactatactggcaagactga

SEQ ID NO: 38912 - DNA, 40 bp, Homo sapiens
cagtcttgccagtatagtacatttcatttagaaaaatttt

SEQ ID NO: 38913 - DNA, 40 bp, Homo sapiens
aaaatttttctaaatgaaatgtactatactggcaagactg

SEQ ID NO: 38914 - DNA, 40 bp, Homo sapiens
agtcttgccagtatagtacatttcatttagaaaaattttt

SEQ ID NO: 38915 - DNA, 40 bp, Homo sapiens
aaaaatttttctaaatgaaatgtactatactggcaagact

SEQ ID NO: 38916 - DNA, 40 bp, Homo sapiens
gtcttgccagtatagtacatttcatttagaaaaatttttt

SEQ ID NO: 38917 - DNA, 40 bp, Homo sapiens
aaaaaatttttctaaatgaaatgtactatactggcaagac

SEQ ID NO: 38918 - DNA, 40 bp, Homo sapiens
tcttgccagtatagtacatttcatttagaaaaatttttta

SEQ ID NO: 38919 - DNA, 40 bp, Homo sapiens
taaaaaatttttctaaatgaaatgtactatactggcaaga

SEQ ID NO: 38920 - DNA, 40 bp, Homo sapiens
cttgccagtatagtacatttcatttagaaaaattttttac

SEQ ID NO: 38921 - DNA, 40 bp, Homo sapiens
gtaaaaaatttttctaaatgaaatgtactatactggcaag

SEQ ID NO: 38922 - DNA, 40 bp, Homo sapiens
ttgccagtatagtacatttcatttagaaaaattttttact

SEQ ID NO: 38923 - DNA, 40 bp, Homo sapiens
agtaaaaaatttttctaaatgaaatgtactatactggcaa

SEQ ID NO: 38924 - DNA, 40 bp, Homo sapiens
tgccagtatagtacatttcatttagaaaaattttttacta

SEQ ID NO: 38925 - DNA, 40 bp, Homo sapiens
tagtaaaaaatttttctaaatgaaatgtactatactggca

SEQ ID NO: 38926 - DNA, 40 bp, Homo sapiens
gccagtatagtacatttcatttagaaaaattttttactat

SEQ ID NO: 38927 - DNA, 40 bp, Homo sapiens
atagtaaaaaatttttctaaatgaaatgtactatactggc

SEQ ID NO: 38928 - DNA, 40 bp, Homo sapiens
ccagtatagtacatttcatttagaaaaattttttactatg

SEQ ID NO: 38929 - DNA, 40 bp, Homo sapiens
catagtaaaaaatttttctaaatgaaatgtactatactgg

SEQ ID NO: 38930 - DNA, 40 bp, Homo sapiens
cagtatagtacatttcatttagaaaaattttttactatgt

SEQ ID NO: 38931 - DNA, 40 bp, Homo sapiens
acatagtaaaaaatttttctaaatgaaatgtactatactg

SEQ ID NO: 38932 - DNA, 40 bp, Homo sapiens
agtatagtacatttcatttagaaaaattttttactatgta

SEQ ID NO: 38933 - DNA, 40 bp, Homo sapiens
tacatagtaaaaaatttttctaaatgaaatgtactatact

SEQ ID NO: 38934 - DNA, 40 bp, Homo sapiens
gtatagtacatttcatttagaaaaattttttactatgtag

SEQ ID NO: 38935 - DNA, 40 bp, Homo sapiens
ctacatagtaaaaaatttttctaaatgaaatgtactatac

SEQ ID NO: 38936 - DNA, 40 bp, Homo sapiens
tatagtacatttcatttagaaaaattttttactatgtaga

SEQ ID NO: 38937 - DNA, 40 bp, Homo sapiens
tctacatagtaaaaaatttttctaaatgaaatgtactata

SEQ ID NO: 38938 - DNA, 40 bp, Homo sapiens
atagtacatttcatttagaaaaattttttactatgtagat

SEQ ID NO: 38939 - DNA, 40 bp, Homo sapiens
atctacatagtaaaaaatttttctaaatgaaatgtactat

SEQ ID NO: 38940 - DNA, 40 bp, Homo sapiens
tagtacatttcatttagaaaaattttttactatgtagatg

SEQ ID NO: 38941 - DNA, 40 bp, Homo sapiens
catctacatagtaaaaaatttttctaaatgaaatgtacta

SEQ ID NO: 38942 - DNA, 40 bp, Homo sapiens
agtacatttcatttagaaaaattttttactatgtagatgg

SEQ ID NO: 38943 - DNA, 40 bp, Homo sapiens
ccatctacatagtaaaaaatttttctaaatgaaatgtact

SEQ ID NO: 38944 - DNA, 40 bp, Homo sapiens
gtacatttcatttagaaaaattttttactatgtagatgga

SEQ ID NO: 38945 - DNA, 40 bp, Homo sapiens
tccatctacatagtaaaaaatttttctaaatgaaatgtac

SEQ ID NO: 38946 - DNA, 40 bp, Homo sapiens
tacatttcatttagaaaaattttttactatgtagatggaa

SEQ ID NO: 38947 - DNA, 40 bp, Homo sapiens
ttccatctacatagtaaaaaatttttctaaatgaaatgta

SEQ ID NO: 38948 - DNA, 40 bp, Homo sapiens
acatttcatttagaaaaattttttactatgtagatggaaa

SEQ ID NO: 38949 - DNA, 40 bp, Homo sapiens
tttccatctacatagtaaaaaatttttctaaatgaaatgt

SEQ ID NO: 38950 - DNA, 40 bp, Homo sapiens
catttcatttagaaaaattttttactatgtagatggaaaa

SEQ ID NO: 38951 - DNA, 40 bp, Homo sapiens
ttttccatctacatagtaaaaaatttttctaaatgaaatg

SEQ ID NO: 38952 - DNA, 40 bp, Homo sapiens
atttcatttagaaaaattttttactatgtagatggaaaaa

SEQ ID NO: 38953 - DNA, 40 bp, Homo sapiens
tttttccatctacatagtaaaaaatttttctaaatgaaat

SEQ ID NO: 38954 - DNA, 40 bp, Homo sapiens
tttcatttagaaaaattttttactatgtagatggaaaaaa

SEQ ID NO: 38955 - DNA, 40 bp, Homo sapiens
ttttttccatctacatagtaaaaaatttttctaaatgaaa

SEQ ID NO: 38956 - DNA, 40 bp, Homo sapiens
ttcatttagaaaaattttttactatgtagatggaaaaaat

SEQ ID NO: 38957 - DNA, 40 bp, Homo sapiens
attttttccatctacatagtaaaaaatttttctaaatgaa

SEQ ID NO: 38958 - DNA, 40 bp, Homo sapiens
tcatttagaaaaattttttactatgtagatggaaaaaata

SEQ ID NO: 38959 - DNA, 40 bp, Homo sapiens
tattttttccatctacatagtaaaaaatttttctaaatga

SEQ ID NO: 38960 - DNA, 40 bp, Homo sapiens
catttagaaaaattttttactatgtagatggaaaaaataa

SEQ ID NO: 38961 - DNA, 40 bp, Homo sapiens
ttattttttccatctacatagtaaaaaatttttctaaatg

SEQ ID NO: 38962 - DNA, 40 bp, Homo sapiens
atttagaaaaattttttactatgtagatggaaaaaataat

SEQ ID NO: 38963 - DNA, 40 bp, Homo sapiens
attattttttccatctacatagtaaaaaatttttctaaat

SEQ ID NO: 38964 - DNA, 40 bp, Homo sapiens
tttagaaaaattttttactatgtagatggaaaaaataata

SEQ ID NO: 38965 - DNA, 40 bp, Homo sapiens
tattattttttccatctacatagtaaaaaatttttctaaa

SEQ ID NO: 38966 - DNA, 40 bp, Homo sapiens
ttagaaaaattttttactatgtagatggaaaaaataatat

SEQ ID NO: 38967 - DNA, 40 bp, Homo sapiens
atattattttttccatctacatagtaaaaaatttttctaa

SEQ ID NO: 38968 - DNA, 40 bp, Homo sapiens
tagaaaaattttttactatgtagatggaaaaaataatatt

SEQ ID NO: 38969 - DNA, 40 bp, Homo sapiens
aatattattttttccatctacatagtaaaaaatttttcta

SEQ ID NO: 38970 - DNA, 40 bp, Homo sapiens
agaaaaattttttactatgtagatggaaaaaataatattt

SEQ ID NO: 38971 - DNA, 40 bp, Homo sapiens
aaatattattttttccatctacatagtaaaaaatttttct

SEQ ID NO: 38972 - DNA, 40 bp, Homo sapiens
gaaaaattttttactatgtagatggaaaaaataatatttt

SEQ ID NO: 38973 - DNA, 40 bp, Homo sapiens
aaaatattattttttccatctacatagtaaaaaatttttc

SEQ ID NO: 38974 - DNA, 40 bp, Homo sapiens
aaaaattttttactatgtagatggaaaaaataatatttta

SEQ ID NO: 38975 - DNA, 40 bp, Homo sapiens
taaaatattattttttccatctacatagtaaaaaattttt

SEQ ID NO: 38976 - DNA, 40 bp, Homo sapiens
aaaattttttactatgtagatggaaaaaataatattttag

SEQ ID NO: 38977 - DNA, 40 bp, Homo sapiens
ctaaaatattattttttccatctacatagtaaaaaatttt

SEQ ID NO: 38978 - DNA, 40 bp, Homo sapiens
aaattttttactatgtagatggaaaaaataatattttagc

SEQ ID NO: 38979 - DNA, 40 bp, Homo sapiens
gctaaaatattattttttccatctacatagtaaaaaattt

SEQ ID NO: 38980 - DNA, 40 bp, Homo sapiens
aattttttactatgtagatggaaaaaataatattttagct

SEQ ID NO: 38981 - DNA, 40 bp, Homo sapiens
agctaaaatattattttttccatctacatagtaaaaaatt

SEQ ID NO: 38982 - DNA, 40 bp, Homo sapiens
attttttactatgtagatggaaaaaataatattttagctg

SEQ ID NO: 38983 - DNA, 40 bp, Homo sapiens
cagctaaaatattattttttccatctacatagtaaaaaat

SEQ ID NO: 38984 - DNA, 40 bp, Homo sapiens
ttttttactatgtagatggaaaaaataatattttagctgg

SEQ ID NO: 38985 - DNA, 40 bp, Homo sapiens
ccagctaaaatattattttttccatctacatagtaaaaaa

SEQ ID NO: 38986 - DNA, 40 bp, Homo sapiens
tttttactatgtagatggaaaaaataatattttagctggg

SEQ ID NO: 38987 - DNA, 40 bp, Homo sapiens
cccagctaaaatattattttttccatctacatagtaaaaa

SEQ ID NO: 38988 - DNA, 40 bp, Homo sapiens
ttttactatgtagatggaaaaaataatattttagctggga

SEQ ID NO: 38989 - DNA, 40 bp, Homo sapiens
tcccagctaaaatattattttttccatctacatagtaaaa

SEQ ID NO: 38990 - DNA, 40 bp, Homo sapiens
tttactatgtagatggaaaaaataatattttagctgggag

SEQ ID NO: 38991 - DNA, 40 bp, Homo sapiens
ctcccagctaaaatattattttttccatctacatagtaaa

SEQ ID NO: 38992 - DNA, 40 bp, Homo sapiens
ttactatgtagatggaaaaaataatattttagctgggagt

SEQ ID NO: 38993 - DNA, 40 bp, Homo sapiens
actcccagctaaaatattattttttccatctacatagtaa

SEQ ID NO: 38994 - DNA, 40 bp, Homo sapiens
tactatgtagatggaaaaaataatattttagctgggagtg

SEQ ID NO: 38995 - DNA, 40 bp, Homo sapiens
cactcccagctaaaatattattttttccatctacatagta

SEQ ID NO: 38996 - DNA, 40 bp, Homo sapiens
actatgtagatggaaaaaataatattttagctgggagtgg

SEQ ID NO: 38997 - DNA, 40 bp, Homo sapiens
ccactcccagctaaaatattattttttccatctacatagt

SEQ ID NO: 38998 - DNA, 40 bp, Homo sapiens
ctatgtagatggaaaaaataatattttagctgggagtggg

SEQ ID NO: 38999 - DNA, 40 bp, Homo sapiens
cccactcccagctaaaatattattttttccatctacatag

SEQ ID NO: 39000 - DNA, 40 bp, Homo sapiens
tatgtagatggaaaaaataatattttagctgggagtgggg

SEQ ID NO: 39001 - DNA, 40 bp, Homo sapiens
ccccactcccagctaaaatattattttttccatctacata

SEQ ID NO: 39002 - DNA, 40 bp, Homo sapiens
atgtagatggaaaaaataatattttagctgggagtggggg

SEQ ID NO: 39003 - DNA, 40 bp, Homo sapiens
cccccactcccagctaaaatattattttttccatctacat

SEQ ID NO: 39004 - DNA, 40 bp, Homo sapiens
tgtagatggaaaaaataatattttagctgggagtgggggg

SEQ ID NO: 39005 - DNA, 40 bp, Homo sapiens
ccccccactcccagctaaaatattattttttccatctaca

SEQ ID NO: 39006 - DNA, 40 bp, Homo sapiens
gtagatggaaaaaataatattttagctgggagtgggggga

SEQ ID NO: 39007 - DNA, 40 bp, Homo sapiens
tccccccactcccagctaaaatattattttttccatctac

SEQ ID NO: 39008 - DNA, 40 bp, Homo sapiens
tagatggaaaaaataatattttagctgggagtggggggac

SEQ ID NO: 39009 - DNA, 40 bp, Homo sapiens
gtccccccactcccagctaaaatattattttttccatcta

SEQ ID NO: 39010 - DNA, 40 bp, Homo sapiens
agatggaaaaaataatattttagctgggagtggggggact

SEQ ID NO: 39011 - DNA, 40 bp, Homo sapiens
agtccccccactcccagctaaaatattattttttccatct

SEQ ID NO: 39012 - DNA, 40 bp, Homo sapiens
gatggaaaaaataatattttagctgggagtggggggacta

SEQ ID NO: 39013 - DNA, 40 bp, Homo sapiens
tagtccccccactcccagctaaaatattattttttccatc

SEQ ID NO: 39014 - DNA, 40 bp, Homo sapiens
atggaaaaaataatattttagctgggagtggggggactat

SEQ ID NO: 39015 - DNA, 40 bp, Homo sapiens
atagtccccccactcccagctaaaatattattttttccat

SEQ ID NO: 39016 - DNA, 40 bp, Homo sapiens
tggaaaaaataatattttagctgggagtggggggactatg

SEQ ID NO: 39017 - DNA, 40 bp, Homo sapiens
catagtccccccactcccagctaaaatattattttttcca

SEQ ID NO: 39018 - DNA, 40 bp, Homo sapiens
ggaaaaaataatattttagctgggagtggggggactatgg

SEQ ID NO: 39019 - DNA, 40 bp, Homo sapiens
ccatagtccccccactcccagctaaaatattattttttcc

SEQ ID NO: 39020 - DNA, 40 bp, Homo sapiens
gaaaaaataatattttagctgggagtggggggactatggg

SEQ ID NO: 39021 - DNA, 40 bp, Homo sapiens
cccatagtccccccactcccagctaaaatattattttttc

SEQ ID NO: 39022 - DNA, 40 bp, Homo sapiens
aaaaaataatattttagctgggagtggggggactatgggg

SEQ ID NO: 39023 - DNA, 40 bp, Homo sapiens
ccccatagtccccccactcccagctaaaatattatttttt

SEQ ID NO: 39024 - DNA, 40 bp, Homo sapiens
aaaaataatattttagctgggagtggggggactatgggga

SEQ ID NO: 39025 - DNA, 40 bp, Homo sapiens
tccccatagtccccccactcccagctaaaatattattttt

SEQ ID NO: 39026 - DNA, 40 bp, Homo sapiens
aaaataatattttagctgggagtggggggactatggggaa

SEQ ID NO: 39027 - DNA, 40 bp, Homo sapiens
ttccccatagtccccccactcccagctaaaatattatttt

SEQ ID NO: 39028 - DNA, 40 bp, Homo sapiens
aaataatattttagctgggagtggggggactatggggaat

SEQ ID NO: 39029 - DNA, 40 bp, Homo sapiens
attccccatagtccccccactcccagctaaaatattattt

SEQ ID NO: 39030 - DNA, 40 bp, Homo sapiens
aataatattttagctgggagtggggggactatggggaata

SEQ ID NO: 39031 - DNA, 40 bp, Homo sapiens
tattccccatagtccccccactcccagctaaaatattatt

SEQ ID NO: 39032 - DNA, 40 bp, Homo sapiens
ataatattttagctgggagtggggggactatggggaataa

SEQ ID NO: 39033 - DNA, 40 bp, Homo sapiens
ttattccccatagtccccccactcccagctaaaatattat

SEQ ID NO: 39034 - DNA, 40 bp, Homo sapiens
taatattttagctgggagtggggggactatggggaataac

SEQ ID NO: 39035 - DNA, 40 bp, Homo sapiens
gttattccccatagtccccccactcccagctaaaatatta

SEQ ID NO: 39036 - DNA, 40 bp, Homo sapiens
aatattttagctgggagtggggggactatggggaataact

SEQ ID NO: 39037 - DNA, 40 bp, Homo sapiens
agttattccccatagtccccccactcccagctaaaatatt

SEQ ID NO: 39038 - DNA, 40 bp, Homo sapiens
atattttagctgggagtggggggactatggggaataactt

SEQ ID NO: 39039 - DNA, 40 bp, Homo sapiens
aagttattccccatagtccccccactcccagctaaaatat

SEQ ID NO: 39040 - DNA, 40 bp, Homo sapiens
tattttagctgggagtggggggactatggggaataacttt

SEQ ID NO: 39041 - DNA, 40 bp, Homo sapiens
aaagttattccccatagtccccccactcccagctaaaata

SEQ ID NO: 39042 - DNA, 40 bp, Homo sapiens
attttagctgggagtggggggactatggggaataactttc

SEQ ID NO: 39043 - DNA, 40 bp, Homo sapiens
gaaagttattccccatagtccccccactcccagctaaaat

SEQ ID NO: 39044 - DNA, 40 bp, Homo sapiens
ttttagctgggagtggggggactatggggaataactttcc

SEQ ID NO: 39045 - DNA, 40 bp, Homo sapiens
ggaaagttattccccatagtccccccactcccagctaaaa

SEQ ID NO: 39046 - DNA, 40 bp, Homo sapiens
tttagctgggagtggggggactatggggaataactttcct

SEQ ID NO: 39047 - DNA, 40 bp, Homo sapiens
aggaaagttattccccatagtccccccactcccagctaaa

SEQ ID NO: 39048 - DNA, 40 bp, Homo sapiens
ttagctgggagtggggggactatggggaataactttcctt

SEQ ID NO: 39049 - DNA, 40 bp, Homo sapiens
aaggaaagttattccccatagtccccccactcccagctaa

SEQ ID NO: 39050 - DNA, 40 bp, Homo sapiens
tagctgggagtggggggactatggggaataactttccttc

SEQ ID NO: 39051 - DNA, 40 bp, Homo sapiens
gaaggaaagttattccccatagtccccccactcccagcta

SEQ ID NO: 39052 - DNA, 40 bp, Homo sapiens
agctgggagtggggggactatggggaataactttccttca

SEQ ID NO: 39053 - DNA, 40 bp, Homo sapiens
tgaaggaaagttattccccatagtccccccactcccagct

SEQ ID NO: 39054 - DNA, 40 bp, Homo sapiens
gctgggagtggggggactatggggaataactttccttcat

SEQ ID NO: 39055 - DNA, 40 bp, Homo sapiens
atgaaggaaagttattccccatagtccccccactcccagc

SEQ ID NO: 39056 - DNA, 40 bp, Homo sapiens
ctgggagtggggggactatggggaataactttccttcatt

SEQ ID NO: 39057 - DNA, 40 bp, Homo sapiens
aatgaaggaaagttattccccatagtccccccactcccag

SEQ ID NO: 39058 - DNA, 40 bp, Homo sapiens
tgggagtggggggactatggggaataactttccttcattt

SEQ ID NO: 39059 - DNA, 40 bp, Homo sapiens
aaatgaaggaaagttattccccatagtccccccactccca

SEQ ID NO: 39060 - DNA, 40 bp, Homo sapiens
gggagtggggggactatggggaataactttccttcattta

SEQ ID NO: 39061 - DNA, 40 bp, Homo sapiens
taaatgaaggaaagttattccccatagtccccccactccc

SEQ ID NO: 39062 - DNA, 40 bp, Homo sapiens
ggagtggggggactatggggaataactttccttcatttaa

SEQ ID NO: 39063 - DNA, 40 bp, Homo sapiens
ttaaatgaaggaaagttattccccatagtccccccactcc

SEQ ID NO: 39064 - DNA, 40 bp, Homo sapiens
gagtggggggactatggggaataactttccttcatttaat

SEQ ID NO: 39065 - DNA, 40 bp, Homo sapiens
attaaatgaaggaaagttattccccatagtccccccactc

SEQ ID NO: 39066 - DNA, 40 bp, Homo sapiens
agtggggggactatggggaataactttccttcatttaata

SEQ ID NO: 39067 - DNA, 40 bp, Homo sapiens
tattaaatgaaggaaagttattccccatagtccccccact

SEQ ID NO: 39068 - DNA, 40 bp, Homo sapiens
gtggggggactatggggaataactttccttcatttaatat

SEQ ID NO: 39069 - DNA, 40 bp, Homo sapiens
atattaaatgaaggaaagttattccccatagtccccccac

SEQ ID NO: 39070 - DNA, 40 bp, Homo sapiens
tggggggactatggggaataactttccttcatttaatatt

SEQ ID NO: 39071 - DNA, 40 bp, Homo sapiens
aatattaaatgaaggaaagttattccccatagtcccccca

SEQ ID NO: 39072 - DNA, 40 bp, Homo sapiens
ggggggactatggggaataactttccttcatttaatattt

SEQ ID NO: 39073 - DNA, 40 bp, Homo sapiens
aaatattaaatgaaggaaagttattccccatagtcccccc

SEQ ID NO: 39074 - DNA, 40 bp, Homo sapiens
gggggactatggggaataactttccttcatttaatatttt

SEQ ID NO: 39075 - DNA, 40 bp, Homo sapiens
aaaatattaaatgaaggaaagttattccccatagtccccc

SEQ ID NO: 39076 - DNA, 40 bp, Homo sapiens
ggggactatggggaataactttccttcatttaatatttta

SEQ ID NO: 39077 - DNA, 40 bp, Homo sapiens
taaaatattaaatgaaggaaagttattccccatagtcccc

SEQ ID NO: 39078 - DNA, 40 bp, Homo sapiens
gggactatggggaataactttccttcatttaatattttat

SEQ ID NO: 39079 - DNA, 40 bp, Homo sapiens
ataaaatattaaatgaaggaaagttattccccatagtccc

SEQ ID NO: 39080 - DNA, 40 bp, Homo sapiens
ggactatggggaataactttccttcatttaatattttatt

SEQ ID NO: 39081 - DNA, 40 bp, Homo sapiens
aataaaatattaaatgaaggaaagttattccccatagtcc

SEQ ID NO: 39082 - DNA, 40 bp, Homo sapiens
gactatggggaataactttccttcatttaatattttattg

SEQ ID NO: 39083 - DNA, 40 bp, Homo sapiens
caataaaatattaaatgaaggaaagttattccccatagtc

SEQ ID NO: 39084 - DNA, 40 bp, Homo sapiens
actatggggaataactttccttcatttaatattttattgt

SEQ ID NO: 39085 - DNA, 40 bp, Homo sapiens
acaataaaatattaaatgaaggaaagttattccccatagt

SEQ ID NO: 39086 - DNA, 40 bp, Homo sapiens
ctatggggaataactttccttcatttaatattttattgtg

SEQ ID NO: 39087 - DNA, 40 bp, Homo sapiens
cacaataaaatattaaatgaaggaaagttattccccatag

SEQ ID NO: 39088 - DNA, 40 bp, Homo sapiens
tatggggaataactttccttcatttaatattttattgtga

SEQ ID NO: 39089 - DNA, 40 bp, Homo sapiens
tcacaataaaatattaaatgaaggaaagttattccccata

SEQ ID NO: 39090 - DNA, 40 bp, Homo sapiens
atggggaataactttccttcatttaatattttattgtgag

SEQ ID NO: 39091 - DNA, 40 bp, Homo sapiens
ctcacaataaaatattaaatgaaggaaagttattccccat

SEQ ID NO: 39092 - DNA, 40 bp, Homo sapiens
tggggaataactttccttcatttaatattttattgtgagt

SEQ ID NO: 39093 - DNA, 40 bp, Homo sapiens
actcacaataaaatattaaatgaaggaaagttattcccca

SEQ ID NO: 39094 - DNA, 40 bp, Homo sapiens
ggggaataactttccttcatttaatattttattgtgagtt

SEQ ID NO: 39095 - DNA, 40 bp, Homo sapiens
aactcacaataaaatattaaatgaaggaaagttattcccc

SEQ ID NO: 39096 - DNA, 40 bp, Homo sapiens
gggaataactttccttcatttaatattttattgtgagtta

SEQ ID NO: 39097 - DNA, 40 bp, Homo sapiens
taactcacaataaaatattaaatgaaggaaagttattccc

SEQ ID NO: 39098 - DNA, 40 bp, Homo sapiens
ggaataactttccttcatttaatattttattgtgagttag

SEQ ID NO: 39099 - DNA, 40 bp, Homo sapiens
ctaactcacaataaaatattaaatgaaggaaagttattcc

SEQ ID NO: 39100 - DNA, 40 bp, Homo sapiens
gaataactttccttcatttaatattttattgtgagttagt

SEQ ID NO: 39101 - DNA, 40 bp, Homo sapiens
actaactcacaataaaatattaaatgaaggaaagttattc

SEQ ID NO: 39102 - DNA, 40 bp, Homo sapiens
aataactttccttcatttaatattttattgtgagttagtt

SEQ ID NO: 39103 - DNA, 40 bp, Homo sapiens
aactaactcacaataaaatattaaatgaaggaaagttatt

SEQ ID NO: 39104 - DNA, 40 bp, Homo sapiens
ataactttccttcatttaatattttattgtgagttagttt

SEQ ID NO: 39105 - DNA, 40 bp, Homo sapiens
aaactaactcacaataaaatattaaatgaaggaaagttat

SEQ ID NO: 39106 - DNA, 40 bp, Homo sapiens
taactttccttcatttaatattttattgtgagttagttta

SEQ ID NO: 39107 - DNA, 40 bp, Homo sapiens
taaactaactcacaataaaatattaaatgaaggaaagtta

SEQ ID NO: 39108 - DNA, 40 bp, Homo sapiens
aactttccttcatttaatattttattgtgagttagtttaa

SEQ ID NO: 39109 - DNA, 40 bp, Homo sapiens
ttaaactaactcacaataaaatattaaatgaaggaaagtt

SEQ ID NO: 39110 - DNA, 40 bp, Homo sapiens
actttccttcatttaatattttattgtgagttagtttaag

SEQ ID NO: 39111 - DNA, 40 bp, Homo sapiens
cttaaactaactcacaataaaatattaaatgaaggaaagt

SEQ ID NO: 39112 - DNA, 40 bp, Homo sapiens
ctttccttcatttaatattttattgtgagttagtttaagt

SEQ ID NO: 39113 - DNA, 40 bp, Homo sapiens
acttaaactaactcacaataaaatattaaatgaaggaaag

SEQ ID NO: 39114 - DNA, 40 bp, Homo sapiens
tttccttcatttaatattttattgtgagttagtttaagtt

SEQ ID NO: 39115 - DNA, 40 bp, Homo sapiens
aacttaaactaactcacaataaaatattaaatgaaggaaa

SEQ ID NO: 39116 - DNA, 40 bp, Homo sapiens
ttccttcatttaatattttattgtgagttagtttaagtta

SEQ ID NO: 39117 - DNA, 40 bp, Homo sapiens
taacttaaactaactcacaataaaatattaaatgaaggaa

SEQ ID NO: 39118 - DNA, 40 bp, Homo sapiens
tccttcatttaatattttattgtgagttagtttaagttac

SEQ ID NO: 39119 - DNA, 40 bp, Homo sapiens
gtaacttaaactaactcacaataaaatattaaatgaagga

SEQ ID NO: 39120 - DNA, 40 bp, Homo sapiens
ccttcatttaatattttattgtgagttagtttaagttact

SEQ ID NO: 39121 - DNA, 40 bp, Homo sapiens
agtaacttaaactaactcacaataaaatattaaatgaagg

SEQ ID NO: 39122 - DNA, 40 bp, Homo sapiens
cttcatttaatattttattgtgagttagtttaagttactt

SEQ ID NO: 39123 - DNA, 40 bp, Homo sapiens
aagtaacttaaactaactcacaataaaatattaaatgaag

SEQ ID NO: 39124 - DNA, 40 bp, Homo sapiens
ttcatttaatattttattgtgagttagtttaagttacttt

SEQ ID NO: 39125 - DNA, 40 bp, Homo sapiens
aaagtaacttaaactaactcacaataaaatattaaatgaa

SEQ ID NO: 39126 - DNA, 40 bp, Homo sapiens
tcatttaatattttattgtgagttagtttaagttacttta

SEQ ID NO: 39127 - DNA, 40 bp, Homo sapiens
taaagtaacttaaactaactcacaataaaatattaaatga

SEQ ID NO: 39128 - DNA, 40 bp, Homo sapiens
catttaatattttattgtgagttagtttaagttactttat

SEQ ID NO: 39129 - DNA, 40 bp, Homo sapiens
ataaagtaacttaaactaactcacaataaaatattaaatg

SEQ ID NO: 39130 - DNA, 40 bp, Homo sapiens
atttaatattttattgtgagttagtttaagttactttatt

SEQ ID NO: 39131 - DNA, 40 bp, Homo sapiens
aataaagtaacttaaactaactcacaataaaatattaaat

SEQ ID NO: 39132 - DNA, 40 bp, Homo sapiens
tttaatattttattgtgagttagtttaagttactttattt

SEQ ID NO: 39133 - DNA, 40 bp, Homo sapiens
aaataaagtaacttaaactaactcacaataaaatattaaa

SEQ ID NO: 39134 - DNA, 40 bp, Homo sapiens
ttaatattttattgtgagttagtttaagttactttatttt

SEQ ID NO: 39135 - DNA, 40 bp, Homo sapiens
aaaataaagtaacttaaactaactcacaataaaatattaa

SEQ ID NO: 39136 - DNA, 40 bp, Homo sapiens
taatattttattgtgagttagtttaagttactttatttta

SEQ ID NO: 39137 - DNA, 40 bp, Homo sapiens
taaaataaagtaacttaaactaactcacaataaaatatta

SEQ ID NO: 39138 - DNA, 40 bp, Homo sapiens
aatattttattgtgagttagtttaagttactttattttat

SEQ ID NO: 39139 - DNA, 40 bp, Homo sapiens
ataaaataaagtaacttaaactaactcacaataaaatatt

SEQ ID NO: 39140 - DNA, 40 bp, Homo sapiens
atattttattgtgagttagtttaagttactttattttatc

SEQ ID NO: 39141 - DNA, 40 bp, Homo sapiens
gataaaataaagtaacttaaactaactcacaataaaatat

SEQ ID NO: 39142 - DNA, 40 bp, Homo sapiens
tattttattgtgagttagtttaagttactttattttatcg

SEQ ID NO: 39143 - DNA, 40 bp, Homo sapiens
cgataaaataaagtaacttaaactaactcacaataaaata

SEQ ID NO: 39144 - DNA, 40 bp, Homo sapiens
attttattgtgagttagtttaagttactttattttatcgt

SEQ ID NO: 39145 - DNA, 40 bp, Homo sapiens
acgataaaataaagtaacttaaactaactcacaataaaat

SEQ ID NO: 39146 - DNA, 40 bp, Homo sapiens
ttttattgtgagttagtttaagttactttattttatcgta

SEQ ID NO: 39147 - DNA, 40 bp, Homo sapiens
tacgataaaataaagtaacttaaactaactcacaataaaa

SEQ ID NO: 39148 - DNA, 40 bp, Homo sapiens
tttattgtgagttagtttaagttactttattttatcgtag

SEQ ID NO: 39149 - DNA, 40 bp, Homo sapiens
ctacgataaaataaagtaacttaaactaactcacaataaa

SEQ ID NO: 39150 - DNA, 40 bp, Homo sapiens
ttattgtgagttagtttaagttactttattttatcgtagt

SEQ ID NO: 39151 - DNA, 40 bp, Homo sapiens
actacgataaaataaagtaacttaaactaactcacaataa

SEQ ID NO: 39152 - DNA, 40 bp, Homo sapiens
tattgtgagttagtttaagttactttattttatcgtagtt

SEQ ID NO: 39153 - DNA, 40 bp, Homo sapiens
aactacgataaaataaagtaacttaaactaactcacaata

SEQ ID NO: 39154 - DNA, 40 bp, Homo sapiens
attgtgagttagtttaagttactttattttatcgtagttt

SEQ ID NO: 39155 - DNA, 40 bp, Homo sapiens
aaactacgataaaataaagtaacttaaactaactcacaat

SEQ ID NO: 39156 - DNA, 40 bp, Homo sapiens
ttgtgagttagtttaagttactttattttatcgtagtttc

SEQ ID NO: 39157 - DNA, 40 bp, Homo sapiens
gaaactacgataaaataaagtaacttaaactaactcacaa

SEQ ID NO: 39158 - DNA, 40 bp, Homo sapiens
tgtgagttagtttaagttactttattttatcgtagtttcc

SEQ ID NO: 39159 - DNA, 40 bp, Homo sapiens
ggaaactacgataaaataaagtaacttaaactaactcaca

SEQ ID NO: 39160 - DNA, 40 bp, Homo sapiens
gtgagttagtttaagttactttattttatcgtagtttcct

SEQ ID NO: 39161 - DNA, 40 bp, Homo sapiens
aggaaactacgataaaataaagtaacttaaactaactcac

SEQ ID NO: 39162 - DNA, 40 bp, Homo sapiens
tgagttagtttaagttactttattttatcgtagtttccta

SEQ ID NO: 39163 - DNA, 40 bp, Homo sapiens
taggaaactacgataaaataaagtaacttaaactaactca

SEQ ID NO: 39164 - DNA, 40 bp, Homo sapiens
gagttagtttaagttactttattttatcgtagtttcctaa

SEQ ID NO: 39165 - DNA, 40 bp, Homo sapiens
ttaggaaactacgataaaataaagtaacttaaactaactc

SEQ ID NO: 39166 - DNA, 40 bp, Homo sapiens
agttagtttaagttactttattttatcgtagtttcctaag

SEQ ID NO: 39167 - DNA, 40 bp, Homo sapiens
cttaggaaactacgataaaataaagtaacttaaactaact

SEQ ID NO: 39168 - DNA, 40 bp, Homo sapiens
gttagtttaagttactttattttatcgtagtttcctaagg

SEQ ID NO: 39169 - DNA, 40 bp, Homo sapiens
ccttaggaaactacgataaaataaagtaacttaaactaac

SEQ ID NO: 39170 - DNA, 40 bp, Homo sapiens
ttagtttaagttactttattttatcgtagtttcctaaggc

SEQ ID NO: 39171 - DNA, 40 bp, Homo sapiens
gccttaggaaactacgataaaataaagtaacttaaactaa

SEQ ID NO: 39172 - DNA, 40 bp, Homo sapiens
tagtttaagttactttattttatcgtagtttcctaaggct

SEQ ID NO: 39173 - DNA, 40 bp, Homo sapiens
agccttaggaaactacgataaaataaagtaacttaaacta

SEQ ID NO: 39174 - DNA, 40 bp, Homo sapiens
agtttaagttactttattttatcgtagtttcctaaggcta

SEQ ID NO: 39175 - DNA, 40 bp, Homo sapiens
tagccttaggaaactacgataaaataaagtaacttaaact

SEQ ID NO: 39176 - DNA, 40 bp, Homo sapiens
gtttaagttactttattttatcgtagtttcctaaggctac

SEQ ID NO: 39177 - DNA, 40 bp, Homo sapiens
gtagccttaggaaactacgataaaataaagtaacttaaac

SEQ ID NO: 39178 - DNA, 40 bp, Homo sapiens
tttaagttactttattttatcgtagtttcctaaggctaca

SEQ ID NO: 39179 - DNA, 40 bp, Homo sapiens
tgtagccttaggaaactacgataaaataaagtaacttaaa

SEQ ID NO: 39180 - DNA, 40 bp, Homo sapiens
ttaagttactttattttatcgtagtttcctaaggctacaa

SEQ ID NO: 39181 - DNA, 40 bp, Homo sapiens
ttgtagccttaggaaactacgataaaataaagtaacttaa

SEQ ID NO: 39182 - DNA, 40 bp, Homo sapiens
taagttactttattttatcgtagtttcctaaggctacaaa

SEQ ID NO: 39183 - DNA, 40 bp, Homo sapiens
tttgtagccttaggaaactacgataaaataaagtaactta

SEQ ID NO: 39184 - DNA, 40 bp, Homo sapiens
aagttactttattttatcgtagtttcctaaggctacaaat

SEQ ID NO: 39185 - DNA, 40 bp, Homo sapiens
atttgtagccttaggaaactacgataaaataaagtaactt

SEQ ID NO: 39186 - DNA, 40 bp, Homo sapiens
agttactttattttatcgtagtttcctaaggctacaaatt

SEQ ID NO: 39187 - DNA, 40 bp, Homo sapiens
aatttgtagccttaggaaactacgataaaataaagtaact

SEQ ID NO: 39188 - DNA, 40 bp, Homo sapiens
gttactttattttatcgtagtttcctaaggctacaaatta

SEQ ID NO: 39189 - DNA, 40 bp, Homo sapiens
taatttgtagccttaggaaactacgataaaataaagtaac

SEQ ID NO: 39190 - DNA, 40 bp, Homo sapiens
ttactttattttatcgtagtttcctaaggctacaaattag

SEQ ID NO: 39191 - DNA, 40 bp, Homo sapiens
ctaatttgtagccttaggaaactacgataaaataaagtaa

SEQ ID NO: 39192 - DNA, 40 bp, Homo sapiens
tactttattttatcgtagtttcctaaggctacaaattagt

SEQ ID NO: 39193 - DNA, 40 bp, Homo sapiens
actaatttgtagccttaggaaactacgataaaataaagta

SEQ ID NO: 39194 - DNA, 40 bp, Homo sapiens
actttattttatcgtagtttcctaaggctacaaattagta

SEQ ID NO: 39195 - DNA, 40 bp, Homo sapiens
tactaatttgtagccttaggaaactacgataaaataaagt

SEQ ID NO: 39196 - DNA, 40 bp, Homo sapiens
ctttattttatcgtagtttcctaaggctacaaattagtaa

SEQ ID NO: 39197 - DNA, 40 bp, Homo sapiens
ttactaatttgtagccttaggaaactacgataaaataaag

SEQ ID NO: 39198 - DNA, 40 bp, Homo sapiens
tttattttatcgtagtttcctaaggctacaaattagtaac

SEQ ID NO: 39199 - DNA, 40 bp, Homo sapiens
gttactaatttgtagccttaggaaactacgataaaataaa

SEQ ID NO: 39200 - DNA, 40 bp, Homo sapiens
ttattttatcgtagtttcctaaggctacaaattagtaacc

SEQ ID NO: 39201 - DNA, 40 bp, Homo sapiens
ggttactaatttgtagccttaggaaactacgataaaataa

SEQ ID NO: 39202 - DNA, 40 bp, Homo sapiens
tattttatcgtagtttcctaaggctacaaattagtaacct

SEQ ID NO: 39203 - DNA, 40 bp, Homo sapiens
aggttactaatttgtagccttaggaaactacgataaaata

SEQ ID NO: 39204 - DNA, 40 bp, Homo sapiens
attttatcgtagtttcctaaggctacaaattagtaacctt

SEQ ID NO: 39205 - DNA, 40 bp, Homo sapiens
aaggttactaatttgtagccttaggaaactacgataaaat

SEQ ID NO: 39206 - DNA, 40 bp, Homo sapiens
ttttatcgtagtttcctaaggctacaaattagtaaccttg

SEQ ID NO: 39207 - DNA, 40 bp, Homo sapiens
caaggttactaatttgtagccttaggaaactacgataaaa

SEQ ID NO: 39208 - DNA, 40 bp, Homo sapiens
tttatcgtagtttcctaaggctacaaattagtaaccttgg

SEQ ID NO: 39209 - DNA, 40 bp, Homo sapiens
ccaaggttactaatttgtagccttaggaaactacgataaa

SEQ ID NO: 39210 - DNA, 40 bp, Homo sapiens
ttatcgtagtttcctaaggctacaaattagtaaccttggt

SEQ ID NO: 39211 - DNA, 40 bp, Homo sapiens
accaaggttactaatttgtagccttaggaaactacgataa

SEQ ID NO: 39212 - DNA, 40 bp, Homo sapiens
tatcgtagtttcctaaggctacaaattagtaaccttggta

SEQ ID NO: 39213 - DNA, 40 bp, Homo sapiens
taccaaggttactaatttgtagccttaggaaactacgata

SEQ ID NO: 39214 - DNA, 40 bp, Homo sapiens
atcgtagtttcctaaggctacaaattagtaaccttggtaa

SEQ ID NO: 39215 - DNA, 40 bp, Homo sapiens
ttaccaaggttactaatttgtagccttaggaaactacgat

SEQ ID NO: 39216 - DNA, 40 bp, Homo sapiens
tcgtagtttcctaaggctacaaattagtaaccttggtaac

SEQ ID NO: 39217 - DNA, 40 bp, Homo sapiens
gttaccaaggttactaatttgtagccttaggaaactacga

SEQ ID NO: 39218 - DNA, 40 bp, Homo sapiens
cgtagtttcctaaggctacaaattagtaaccttggtaact

SEQ ID NO: 39219 - DNA, 40 bp, Homo sapiens
agttaccaaggttactaatttgtagccttaggaaactacg

SEQ ID NO: 39220 - DNA, 40 bp, Homo sapiens
gtagtttcctaaggctacaaattagtaaccttggtaactt

SEQ ID NO: 39221 - DNA, 40 bp, Homo sapiens
aagttaccaaggttactaatttgtagccttaggaaactac

SEQ ID NO: 39222 - DNA, 40 bp, Homo sapiens
tagtttcctaaggctacaaattagtaaccttggtaactta

SEQ ID NO: 39223 - DNA, 40 bp, Homo sapiens
taagttaccaaggttactaatttgtagccttaggaaacta

SEQ ID NO: 39224 - DNA, 40 bp, Homo sapiens
agtttcctaaggctacaaattagtaaccttggtaacttat

SEQ ID NO: 39225 - DNA, 40 bp, Homo sapiens
ataagttaccaaggttactaatttgtagccttaggaaact

SEQ ID NO: 39226 - DNA, 40 bp, Homo sapiens
gtttcctaaggctacaaattagtaaccttggtaacttatg

SEQ ID NO: 39227 - DNA, 40 bp, Homo sapiens
cataagttaccaaggttactaatttgtagccttaggaaac

SEQ ID NO: 39228 - DNA, 40 bp, Homo sapiens
tttcctaaggctacaaattagtaaccttggtaacttatgt

SEQ ID NO: 39229 - DNA, 40 bp, Homo sapiens
acataagttaccaaggttactaatttgtagccttaggaaa

SEQ ID NO: 39230 - DNA, 40 bp, Homo sapiens
ttcctaaggctacaaattagtaaccttggtaacttatgta

SEQ ID NO: 39231 - DNA, 40 bp, Homo sapiens
tacataagttaccaaggttactaatttgtagccttaggaa

SEQ ID NO: 39232 - DNA, 40 bp, Homo sapiens
tcctaaggctacaaattagtaaccttggtaacttatgtac

SEQ ID NO: 39233 - DNA, 40 bp, Homo sapiens
gtacataagttaccaaggttactaatttgtagccttagga

SEQ ID NO: 39234 - DNA, 40 bp, Homo sapiens
cctaaggctacaaattagtaaccttggtaacttatgtacc

SEQ ID NO: 39235 - DNA, 40 bp, Homo sapiens
ggtacataagttaccaaggttactaatttgtagccttagg

SEQ ID NO: 39236 - DNA, 40 bp, Homo sapiens
ctaaggctacaaattagtaaccttggtaacttatgtacct

SEQ ID NO: 39237 - DNA, 40 bp, Homo sapiens
aggtacataagttaccaaggttactaatttgtagccttag

SEQ ID NO: 39238 - DNA, 40 bp, Homo sapiens
taaggctacaaattagtaaccttggtaacttatgtaccta

SEQ ID NO: 39239 - DNA, 40 bp, Homo sapiens
taggtacataagttaccaaggttactaatttgtagcctta

SEQ ID NO: 39240 - DNA, 40 bp, Homo sapiens
aaggctacaaattagtaaccttggtaacttatgtacctaa

SEQ ID NO: 39241 - DNA, 40 bp, Homo sapiens
ttaggtacataagttaccaaggttactaatttgtagcctt

SEQ ID NO: 39242 - DNA, 40 bp, Homo sapiens
aggctacaaattagtaaccttggtaacttatgtacctaat

SEQ ID NO: 39243 - DNA, 40 bp, Homo sapiens
attaggtacataagttaccaaggttactaatttgtagcct

SEQ ID NO: 39244 - DNA, 40 bp, Homo sapiens
ggctacaaattagtaaccttggtaacttatgtacctaatt

SEQ ID NO: 39245 - DNA, 40 bp, Homo sapiens
aattaggtacataagttaccaaggttactaatttgtagcc

SEQ ID NO: 39246 - DNA, 40 bp, Homo sapiens
gctacaaattagtaaccttggtaacttatgtacctaattt

SEQ ID NO: 39247 - DNA, 40 bp, Homo sapiens
aaattaggtacataagttaccaaggttactaatttgtagc

SEQ ID NO: 39248 - DNA, 40 bp, Homo sapiens
ctacaaattagtaaccttggtaacttatgtacctaattta

SEQ ID NO: 39249 - DNA, 40 bp, Homo sapiens
taaattaggtacataagttaccaaggttactaatttgtag

SEQ ID NO: 39250 - DNA, 40 bp, Homo sapiens
tacaaattagtaaccttggtaacttatgtacctaatttaa

SEQ ID NO: 39251 - DNA, 40 bp, Homo sapiens
ttaaattaggtacataagttaccaaggttactaatttgta

SEQ ID NO: 39252 - DNA, 40 bp, Homo sapiens
acaaattagtaaccttggtaacttatgtacctaatttaaa

SEQ ID NO: 39253 - DNA, 40 bp, Homo sapiens
tttaaattaggtacataagttaccaaggttactaatttgt

SEQ ID NO: 39254 - DNA, 40 bp, Homo sapiens
caaattagtaaccttggtaacttatgtacctaatttaaaa

SEQ ID NO: 39255 - DNA, 40 bp, Homo sapiens
ttttaaattaggtacataagttaccaaggttactaatttg

SEQ ID NO: 39256 - DNA, 40 bp, Homo sapiens
aaattagtaaccttggtaacttatgtacctaatttaaaag

SEQ ID NO: 39257 - DNA, 40 bp, Homo sapiens
cttttaaattaggtacataagttaccaaggttactaattt

SEQ ID NO: 39258 - DNA, 40 bp, Homo sapiens
aattagtaaccttggtaacttatgtacctaatttaaaagt

SEQ ID NO: 39259 - DNA, 40 bp, Homo sapiens
acttttaaattaggtacataagttaccaaggttactaatt

SEQ ID NO: 39260 - DNA, 40 bp, Homo sapiens
attagtaaccttggtaacttatgtacctaatttaaaagtt

SEQ ID NO: 39261 - DNA, 40 bp, Homo sapiens
aacttttaaattaggtacataagttaccaaggttactaat

SEQ ID NO: 39262 - DNA, 40 bp, Homo sapiens
ttagtaaccttggtaacttatgtacctaatttaaaagttt

SEQ ID NO: 39263 - DNA, 40 bp, Homo sapiens
aaacttttaaattaggtacataagttaccaaggttactaa

SEQ ID NO: 39264 - DNA, 40 bp, Homo sapiens
tagtaaccttggtaacttatgtacctaatttaaaagttta

SEQ ID NO: 39265 - DNA, 40 bp, Homo sapiens
taaacttttaaattaggtacataagttaccaaggttacta

SEQ ID NO: 39266 - DNA, 40 bp, Homo sapiens
agtaaccttggtaacttatgtacctaatttaaaagtttac

SEQ ID NO: 39267 - DNA, 40 bp, Homo sapiens
gtaaacttttaaattaggtacataagttaccaaggttact

SEQ ID NO: 39268 - DNA, 40 bp, Homo sapiens
gtaaccttggtaacttatgtacctaatttaaaagtttact

SEQ ID NO: 39269 - DNA, 40 bp, Homo sapiens
agtaaacttttaaattaggtacataagttaccaaggttac

SEQ ID NO: 39270 - DNA, 40 bp, Homo sapiens
taaccttggtaacttatgtacctaatttaaaagtttactt

SEQ ID NO: 39271 - DNA, 40 bp, Homo sapiens
aagtaaacttttaaattaggtacataagttaccaaggtta

SEQ ID NO: 39272 - DNA, 40 bp, Homo sapiens
aaccttggtaacttatgtacctaatttaaaagtttacttt

SEQ ID NO: 39273 - DNA, 40 bp, Homo sapiens
aaagtaaacttttaaattaggtacataagttaccaaggtt

SEQ ID NO: 39274 - DNA, 40 bp, Homo sapiens
accttggtaacttatgtacctaatttaaaagtttactttt

SEQ ID NO: 39275 - DNA, 40 bp, Homo sapiens
aaaagtaaacttttaaattaggtacataagttaccaaggt

SEQ ID NO: 39276 - DNA, 40 bp, Homo sapiens
ccttggtaacttatgtacctaatttaaaagtttacttttt

SEQ ID NO: 39277 - DNA, 40 bp, Homo sapiens
aaaaagtaaacttttaaattaggtacataagttaccaagg

SEQ ID NO: 39278 - DNA, 40 bp, Homo sapiens
cttggtaacttatgtacctaatttaaaagtttactttttt

SEQ ID NO: 39279 - DNA, 40 bp, Homo sapiens
aaaaaagtaaacttttaaattaggtacataagttaccaag

SEQ ID NO: 39280 - DNA, 40 bp, Homo sapiens
ttggtaacttatgtacctaatttaaaagtttacttttttg

SEQ ID NO: 39281 - DNA, 40 bp, Homo sapiens
caaaaaagtaaacttttaaattaggtacataagttaccaa

SEQ ID NO: 39282 - DNA, 40 bp, Homo sapiens
tggtaacttatgtacctaatttaaaagtttacttttttga

SEQ ID NO: 39283 - DNA, 40 bp, Homo sapiens
tcaaaaaagtaaacttttaaattaggtacataagttacca

SEQ ID NO: 39284 - DNA, 40 bp, Homo sapiens
ggtaacttatgtacctaatttaaaagtttacttttttgaa

SEQ ID NO: 39285 - DNA, 40 bp, Homo sapiens
ttcaaaaaagtaaacttttaaattaggtacataagttacc

SEQ ID NO: 39286 - DNA, 40 bp, Homo sapiens
gtaacttatgtacctaatttaaaagtttacttttttgaaa

SEQ ID NO: 39287 - DNA, 40 bp, Homo sapiens
tttcaaaaaagtaaacttttaaattaggtacataagttac

SEQ ID NO: 39288 - DNA, 40 bp, Homo sapiens
taacttatgtacctaatttaaaagtttacttttttgaaag

SEQ ID NO: 39289 - DNA, 40 bp, Homo sapiens
ctttcaaaaaagtaaacttttaaattaggtacataagtta

SEQ ID NO: 39290 - DNA, 40 bp, Homo sapiens
aacttatgtacctaatttaaaagtttacttttttgaaagg

SEQ ID NO: 39291 - DNA, 40 bp, Homo sapiens
cctttcaaaaaagtaaacttttaaattaggtacataagtt

SEQ ID NO: 39292 - DNA, 40 bp, Homo sapiens
acttatgtacctaatttaaaagtttacttttttgaaaggc

SEQ ID NO: 39293 - DNA, 40 bp, Homo sapiens
gcctttcaaaaaagtaaacttttaaattaggtacataagt

SEQ ID NO: 39294 - DNA, 40 bp, Homo sapiens
cttatgtacctaatttaaaagtttacttttttgaaaggct

SEQ ID NO: 39295 - DNA, 40 bp, Homo sapiens
agcctttcaaaaaagtaaacttttaaattaggtacataag

SEQ ID NO: 39296 - DNA, 40 bp, Homo sapiens
ttatgtacctaatttaaaagtttacttttttgaaaggctg

SEQ ID NO: 39297 - DNA, 40 bp, Homo sapiens
cagcctttcaaaaaagtaaacttttaaattaggtacataa

SEQ ID NO: 39298 - DNA, 40 bp, Homo sapiens
tatgtacctaatttaaaagtttacttttttgaaaggctgg

SEQ ID NO: 39299 - DNA, 40 bp, Homo sapiens
ccagcctttcaaaaaagtaaacttttaaattaggtacata

SEQ ID NO: 39300 - DNA, 40 bp, Homo sapiens
atgtacctaatttaaaagtttacttttttgaaaggctgga

SEQ ID NO: 39301 - DNA, 40 bp, Homo sapiens
tccagcctttcaaaaaagtaaacttttaaattaggtacat

SEQ ID NO: 39302 - DNA, 40 bp, Homo sapiens
tgtacctaatttaaaagtttacttttttgaaaggctggaa

SEQ ID NO: 39303 - DNA, 40 bp, Homo sapiens
ttccagcctttcaaaaaagtaaacttttaaattaggtaca

SEQ ID NO: 39304 - DNA, 40 bp, Homo sapiens
gtacctaatttaaaagtttacttttttgaaaggctggaaa

SEQ ID NO: 39305 - DNA, 40 bp, Homo sapiens
tttccagcctttcaaaaaagtaaacttttaaattaggtac

SEQ ID NO: 39306 - DNA, 40 bp, Homo sapiens
tacctaatttaaaagtttacttttttgaaaggctggaaat

SEQ ID NO: 39307 - DNA, 40 bp, Homo sapiens
atttccagcctttcaaaaaagtaaacttttaaattaggta

SEQ ID NO: 39308 - DNA, 40 bp, Homo sapiens
acctaatttaaaagtttacttttttgaaaggctggaaata

SEQ ID NO: 39309 - DNA, 40 bp, Homo sapiens
tatttccagcctttcaaaaaagtaaacttttaaattaggt

SEQ ID NO: 39310 - DNA, 40 bp, Homo sapiens
cctaatttaaaagtttacttttttgaaaggctggaaatac

SEQ ID NO: 39311 - DNA, 40 bp, Homo sapiens
gtatttccagcctttcaaaaaagtaaacttttaaattagg

SEQ ID NO: 39312 - DNA, 40 bp, Homo sapiens
ctaatttaaaagtttacttttttgaaaggctggaaatact

SEQ ID NO: 39313 - DNA, 40 bp, Homo sapiens
agtatttccagcctttcaaaaaagtaaacttttaaattag

SEQ ID NO: 39314 - DNA, 40 bp, Homo sapiens
taatttaaaagtttacttttttgaaaggctggaaatacta

SEQ ID NO: 39315 - DNA, 40 bp, Homo sapiens
tagtatttccagcctttcaaaaaagtaaacttttaaatta

SEQ ID NO: 39316 - DNA, 40 bp, Homo sapiens
aatttaaaagtttacttttttgaaaggctggaaatactaa

SEQ ID NO: 39317 - DNA, 40 bp, Homo sapiens
ttagtatttccagcctttcaaaaaagtaaacttttaaatt

SEQ ID NO: 39318 - DNA, 40 bp, Homo sapiens
atttaaaagtttacttttttgaaaggctggaaatactaat

SEQ ID NO: 39319 - DNA, 40 bp, Homo sapiens
attagtatttccagcctttcaaaaaagtaaacttttaaat

SEQ ID NO: 39320 - DNA, 40 bp, Homo sapiens
tttaaaagtttacttttttgaaaggctggaaatactaatt

SEQ ID NO: 39321 - DNA, 40 bp, Homo sapiens
aattagtatttccagcctttcaaaaaagtaaacttttaaa

SEQ ID NO: 39322 - DNA, 40 bp, Homo sapiens
ttaaaagtttacttttttgaaaggctggaaatactaatta

SEQ ID NO: 39323 - DNA, 40 bp, Homo sapiens
taattagtatttccagcctttcaaaaaagtaaacttttaa

SEQ ID NO: 39324 - DNA, 40 bp, Homo sapiens
taaaagtttacttttttgaaaggctggaaatactaattaa

SEQ ID NO: 39325 - DNA, 40 bp, Homo sapiens
ttaattagtatttccagcctttcaaaaaagtaaactttta

SEQ ID NO: 39326 - DNA, 40 bp, Homo sapiens
aaaagtttacttttttgaaaggctggaaatactaattaaa

SEQ ID NO: 39327 - DNA, 40 bp, Homo sapiens
tttaattagtatttccagcctttcaaaaaagtaaactttt

SEQ ID NO: 39328 - DNA, 40 bp, Homo sapiens
aaagtttacttttttgaaaggctggaaatactaattaaaa

SEQ ID NO: 39329 - DNA, 40 bp, Homo sapiens
ttttaattagtatttccagcctttcaaaaaagtaaacttt

SEQ ID NO: 39330 - DNA, 40 bp, Homo sapiens
aagtttacttttttgaaaggctggaaatactaattaaaaa

SEQ ID NO: 39331 - DNA, 40 bp, Homo sapiens
tttttaattagtatttccagcctttcaaaaaagtaaactt

SEQ ID NO: 39332 - DNA, 40 bp, Homo sapiens
agtttacttttttgaaaggctggaaatactaattaaaaac

SEQ ID NO: 39333 - DNA, 40 bp, Homo sapiens
gtttttaattagtatttccagcctttcaaaaaagtaaact

SEQ ID NO: 39334 - DNA, 40 bp, Homo sapiens
gtttacttttttgaaaggctggaaatactaattaaaaacg

SEQ ID NO: 39335 - DNA, 40 bp, Homo sapiens
cgtttttaattagtatttccagcctttcaaaaaagtaaac

SEQ ID NO: 39336 - DNA, 40 bp, Homo sapiens
tttacttttttgaaaggctggaaatactaattaaaaacgt

SEQ ID NO: 39337 - DNA, 40 bp, Homo sapiens
acgtttttaattagtatttccagcctttcaaaaaagtaaa

SEQ ID NO: 39338 - DNA, 40 bp, Homo sapiens
ttacttttttgaaaggctggaaatactaattaaaaacgta

SEQ ID NO: 39339 - DNA, 40 bp, Homo sapiens
tacgtttttaattagtatttccagcctttcaaaaaagtaa

SEQ ID NO: 39340 - DNA, 40 bp, Homo sapiens
tacttttttgaaaggctggaaatactaattaaaaacgtaa

SEQ ID NO: 39341 - DNA, 40 bp, Homo sapiens
ttacgtttttaattagtatttccagcctttcaaaaaagta

SEQ ID NO: 39342 - DNA, 40 bp, Homo sapiens
acttttttgaaaggctggaaatactaattaaaaacgtaac

SEQ ID NO: 39343 - DNA, 40 bp, Homo sapiens
gttacgtttttaattagtatttccagcctttcaaaaaagt

SEQ ID NO: 39344 - DNA, 40 bp, Homo sapiens
cttttttgaaaggctggaaatactaattaaaaacgtaaca

SEQ ID NO: 39345 - DNA, 40 bp, Homo sapiens
tgttacgtttttaattagtatttccagcctttcaaaaaag

SEQ ID NO: 39346 - DNA, 40 bp, Homo sapiens
ttttttgaaaggctggaaatactaattaaaaacgtaacac

SEQ ID NO: 39347 - DNA, 40 bp, Homo sapiens
gtgttacgtttttaattagtatttccagcctttcaaaaaa

SEQ ID NO: 39348 - DNA, 40 bp, Homo sapiens
tttttgaaaggctggaaatactaattaaaaacgtaacacc

SEQ ID NO: 39349 - DNA, 40 bp, Homo sapiens
ggtgttacgtttttaattagtatttccagcctttcaaaaa

SEQ ID NO: 39350 - DNA, 40 bp, Homo sapiens
ttttgaaaggctggaaatactaattaaaaacgtaacacct

SEQ ID NO: 39351 - DNA, 40 bp, Homo sapiens
aggtgttacgtttttaattagtatttccagcctttcaaaa

SEQ ID NO: 39352 - DNA, 40 bp, Homo sapiens
tttgaaaggctggaaatactaattaaaaacgtaacacctt

SEQ ID NO: 39353 - DNA, 40 bp, Homo sapiens
aaggtgttacgtttttaattagtatttccagcctttcaaa

SEQ ID NO: 39354 - DNA, 40 bp, Homo sapiens
ttgaaaggctggaaatactaattaaaaacgtaacaccttc

SEQ ID NO: 39355 - DNA, 40 bp, Homo sapiens
gaaggtgttacgtttttaattagtatttccagcctttcaa

SEQ ID NO: 39356 - DNA, 40 bp, Homo sapiens
tgaaaggctggaaatactaattaaaaacgtaacaccttca

SEQ ID NO: 39357 - DNA, 40 bp, Homo sapiens
tgaaggtgttacgtttttaattagtatttccagcctttca

SEQ ID NO: 39358 - DNA, 40 bp, Homo sapiens
gaaaggctggaaatactaattaaaaacgtaacaccttcat

SEQ ID NO: 39359 - DNA, 40 bp, Homo sapiens
atgaaggtgttacgtttttaattagtatttccagcctttc

SEQ ID NO: 39360 - DNA, 40 bp, Homo sapiens
aaaggctggaaatactaattaaaaacgtaacaccttcatc

SEQ ID NO: 39361 - DNA, 40 bp, Homo sapiens
gatgaaggtgttacgtttttaattagtatttccagccttt

SEQ ID NO: 39362 - DNA, 40 bp, Homo sapiens
aaggctggaaatactaattaaaaacgtaacaccttcatcc

SEQ ID NO: 39363 - DNA, 40 bp, Homo sapiens
ggatgaaggtgttacgtttttaattagtatttccagcctt

SEQ ID NO: 39364 - DNA, 40 bp, Homo sapiens
aggctggaaatactaattaaaaacgtaacaccttcatcct

SEQ ID NO: 39365 - DNA, 40 bp, Homo sapiens
aggatgaaggtgttacgtttttaattagtatttccagcct

SEQ ID NO: 39366 - DNA, 40 bp, Homo sapiens
ggctggaaatactaattaaaaacgtaacaccttcatcctt

SEQ ID NO: 39367 - DNA, 40 bp, Homo sapiens
aaggatgaaggtgttacgtttttaattagtatttccagcc

SEQ ID NO: 39368 - DNA, 40 bp, Homo sapiens
gctggaaatactaattaaaaacgtaacaccttcatccttg

SEQ ID NO: 39369 - DNA, 40 bp, Homo sapiens
caaggatgaaggtgttacgtttttaattagtatttccagc

SEQ ID NO: 39370 - DNA, 40 bp, Homo sapiens
ctggaaatactaattaaaaacgtaacaccttcatccttgt

SEQ ID NO: 39371 - DNA, 40 bp, Homo sapiens
acaaggatgaaggtgttacgtttttaattagtatttccag

SEQ ID NO: 39372 - DNA, 40 bp, Homo sapiens
tggaaatactaattaaaaacgtaacaccttcatccttgtc

SEQ ID NO: 39373 - DNA, 40 bp, Homo sapiens
gacaaggatgaaggtgttacgtttttaattagtatttcca

SEQ ID NO: 39374 - DNA, 40 bp, Homo sapiens
ggaaatactaattaaaaacgtaacaccttcatccttgtct

SEQ ID NO: 39375 - DNA, 40 bp, Homo sapiens
agacaaggatgaaggtgttacgtttttaattagtatttcc

SEQ ID NO: 39376 - DNA, 40 bp, Homo sapiens
gaaatactaattaaaaacgtaacaccttcatccttgtctt

SEQ ID NO: 39377 - DNA, 40 bp, Homo sapiens
aagacaaggatgaaggtgttacgtttttaattagtatttc

SEQ ID NO: 39378 - DNA, 40 bp, Homo sapiens
aaatactaattaaaaacgtaacaccttcatccttgtcttt

SEQ ID NO: 39379 - DNA, 40 bp, Homo sapiens
aaagacaaggatgaaggtgttacgtttttaattagtattt

SEQ ID NO: 39380 - DNA, 40 bp, Homo sapiens
aatactaattaaaaacgtaacaccttcatccttgtctttg

SEQ ID NO: 39381 - DNA, 40 bp, Homo sapiens
caaagacaaggatgaaggtgttacgtttttaattagtatt

SEQ ID NO: 39382 - DNA, 40 bp, Homo sapiens
atactaattaaaaacgtaacaccttcatccttgtctttgc

SEQ ID NO: 39383 - DNA, 40 bp, Homo sapiens
gcaaagacaaggatgaaggtgttacgtttttaattagtat

SEQ ID NO: 39384 - DNA, 40 bp, Homo sapiens
tactaattaaaaacgtaacaccttcatccttgtctttgct

SEQ ID NO: 39385 - DNA, 40 bp, Homo sapiens
agcaaagacaaggatgaaggtgttacgtttttaattagta

SEQ ID NO: 39386 - DNA, 40 bp, Homo sapiens
actaattaaaaacgtaacaccttcatccttgtctttgctc

SEQ ID NO: 39387 - DNA, 40 bp, Homo sapiens
gagcaaagacaaggatgaaggtgttacgtttttaattagt

SEQ ID NO: 39388 - DNA, 40 bp, Homo sapiens
ctaattaaaaacgtaacaccttcatccttgtctttgctcc

SEQ ID NO: 39389 - DNA, 40 bp, Homo sapiens
ggagcaaagacaaggatgaaggtgttacgtttttaattag

SEQ ID NO: 39390 - DNA, 40 bp, Homo sapiens
taattaaaaacgtaacaccttcatccttgtctttgctcca

SEQ ID NO: 39391 - DNA, 40 bp, Homo sapiens
tggagcaaagacaaggatgaaggtgttacgtttttaatta

SEQ ID NO: 39392 - DNA, 40 bp, Homo sapiens
aattaaaaacgtaacaccttcatccttgtctttgctccat

SEQ ID NO: 39393 - DNA, 40 bp, Homo sapiens
atggagcaaagacaaggatgaaggtgttacgtttttaatt

SEQ ID NO: 39394 - DNA, 40 bp, Homo sapiens
attaaaaacgtaacaccttcatccttgtctttgctccatt

SEQ ID NO: 39395 - DNA, 40 bp, Homo sapiens
aatggagcaaagacaaggatgaaggtgttacgtttttaat

SEQ ID NO: 39396 - DNA, 40 bp, Homo sapiens
ttaaaaacgtaacaccttcatccttgtctttgctccatta

SEQ ID NO: 39397 - DNA, 40 bp, Homo sapiens
taatggagcaaagacaaggatgaaggtgttacgtttttaa

SEQ ID NO: 39398 - DNA, 40 bp, Homo sapiens
taaaaacgtaacaccttcatccttgtctttgctccattat

SEQ ID NO: 39399 - DNA, 40 bp, Homo sapiens
ataatggagcaaagacaaggatgaaggtgttacgttttta

SEQ ID NO: 39400 - DNA, 40 bp, Homo sapiens
aaaaacgtaacaccttcatccttgtctttgctccattatt

SEQ ID NO: 39401 - DNA, 40 bp, Homo sapiens
aataatggagcaaagacaaggatgaaggtgttacgttttt

SEQ ID NO: 39402 - DNA, 40 bp, Homo sapiens
aaaacgtaacaccttcatccttgtctttgctccattatta

SEQ ID NO: 39403 - DNA, 40 bp, Homo sapiens
taataatggagcaaagacaaggatgaaggtgttacgtttt

SEQ ID NO: 39404 - DNA, 40 bp, Homo sapiens
aaacgtaacaccttcatccttgtctttgctccattattaa

SEQ ID NO: 39405 - DNA, 40 bp, Homo sapiens
ttaataatggagcaaagacaaggatgaaggtgttacgttt

SEQ ID NO: 39406 - DNA, 40 bp, Homo sapiens
aacgtaacaccttcatccttgtctttgctccattattaac

SEQ ID NO: 39407 - DNA, 40 bp, Homo sapiens
gttaataatggagcaaagacaaggatgaaggtgttacgtt

SEQ ID NO: 39408 - DNA, 40 bp, Homo sapiens
acgtaacaccttcatccttgtctttgctccattattaact

SEQ ID NO: 39409 - DNA, 40 bp, Homo sapiens
agttaataatggagcaaagacaaggatgaaggtgttacgt

SEQ ID NO: 39410 - DNA, 40 bp, Homo sapiens
cgtaacaccttcatccttgtctttgctccattattaacta

SEQ ID NO: 39411 - DNA, 40 bp, Homo sapiens
tagttaataatggagcaaagacaaggatgaaggtgttacg

SEQ ID NO: 39412 - DNA, 40 bp, Homo sapiens
gtaacaccttcatccttgtctttgctccattattaactag

SEQ ID NO: 39413 - DNA, 40 bp, Homo sapiens
ctagttaataatggagcaaagacaaggatgaaggtgttac

SEQ ID NO: 39414 - DNA, 40 bp, Homo sapiens
taacaccttcatccttgtctttgctccattattaactagt

SEQ ID NO: 39415 - DNA, 40 bp, Homo sapiens
actagttaataatggagcaaagacaaggatgaaggtgtta

SEQ ID NO: 39416 - DNA, 40 bp, Homo sapiens
aacaccttcatccttgtctttgctccattattaactagtt

SEQ ID NO: 39417 - DNA, 40 bp, Homo sapiens
aactagttaataatggagcaaagacaaggatgaaggtgtt

SEQ ID NO: 39418 - DNA, 40 bp, Homo sapiens
acaccttcatccttgtctttgctccattattaactagttt

SEQ ID NO: 39419 - DNA, 40 bp, Homo sapiens
aaactagttaataatggagcaaagacaaggatgaaggtgt

SEQ ID NO: 39420 - DNA, 40 bp, Homo sapiens
caccttcatccttgtctttgctccattattaactagtttc

SEQ ID NO: 39421 - DNA, 40 bp, Homo sapiens
gaaactagttaataatggagcaaagacaaggatgaaggtg

SEQ ID NO: 39422 - DNA, 40 bp, Homo sapiens
accttcatccttgtctttgctccattattaactagtttca

SEQ ID NO: 39423 - DNA, 40 bp, Homo sapiens
tgaaactagttaataatggagcaaagacaaggatgaaggt

SEQ ID NO: 39424 - DNA, 40 bp, Homo sapiens
ccttcatccttgtctttgctccattattaactagtttcat

SEQ ID NO: 39425 - DNA, 40 bp, Homo sapiens
atgaaactagttaataatggagcaaagacaaggatgaagg

SEQ ID NO: 39426 - DNA, 40 bp, Homo sapiens
cttcatccttgtctttgctccattattaactagtttcatt

SEQ ID NO: 39427 - DNA, 40 bp, Homo sapiens
aatgaaactagttaataatggagcaaagacaaggatgaag

SEQ ID NO: 39428 - DNA, 40 bp, Homo sapiens
ttcatccttgtctttgctccattattaactagtttcatta

SEQ ID NO: 39429 - DNA, 40 bp, Homo sapiens
taatgaaactagttaataatggagcaaagacaaggatgaa

SEQ ID NO: 39430 - DNA, 40 bp, Homo sapiens
tcatccttgtctttgctccattattaactagtttcattac

SEQ ID NO: 39431 - DNA, 40 bp, Homo sapiens
gtaatgaaactagttaataatggagcaaagacaaggatga

SEQ ID NO: 39432 - DNA, 40 bp, Homo sapiens
catccttgtctttgctccattattaactagtttcattaca

SEQ ID NO: 39433 - DNA, 40 bp, Homo sapiens
tgtaatgaaactagttaataatggagcaaagacaaggatg

SEQ ID NO: 39434 - DNA, 40 bp, Homo sapiens
atccttgtctttgctccattattaactagtttcattacag

SEQ ID NO: 39435 - DNA, 40 bp, Homo sapiens
ctgtaatgaaactagttaataatggagcaaagacaaggat

SEQ ID NO: 39436 - DNA, 40 bp, Homo sapiens
tccttgtctttgctccattattaactagtttcattacaga

SEQ ID NO: 39437 - DNA, 40 bp, Homo sapiens
tctgtaatgaaactagttaataatggagcaaagacaagga

SEQ ID NO: 39438 - DNA, 40 bp, Homo sapiens
ccttgtctttgctccattattaactagtttcattacagaa

SEQ ID NO: 39439 - DNA, 40 bp, Homo sapiens
ttctgtaatgaaactagttaataatggagcaaagacaagg

SEQ ID NO: 39440 - DNA, 40 bp, Homo sapiens
cttgtctttgctccattattaactagtttcattacagaat

SEQ ID NO: 39441 - DNA, 40 bp, Homo sapiens
attctgtaatgaaactagttaataatggagcaaagacaag

SEQ ID NO: 39442 - DNA, 40 bp, Homo sapiens
ttgtctttgctccattattaactagtttcattacagaatc

SEQ ID NO: 39443 - DNA, 40 bp, Homo sapiens
gattctgtaatgaaactagttaataatggagcaaagacaa

SEQ ID NO: 39444 - DNA, 40 bp, Homo sapiens
tgtctttgctccattattaactagtttcattacagaatct

SEQ ID NO: 39445 - DNA, 40 bp, Homo sapiens
agattctgtaatgaaactagttaataatggagcaaagaca

SEQ ID NO: 39446 - DNA, 40 bp, Homo sapiens
gtctttgctccattattaactagtttcattacagaatctc

SEQ ID NO: 39447 - DNA, 40 bp, Homo sapiens
gagattctgtaatgaaactagttaataatggagcaaagac

SEQ ID NO: 39448 - DNA, 40 bp, Homo sapiens
tctttgctccattattaactagtttcattacagaatctct

SEQ ID NO: 39449 - DNA, 40 bp, Homo sapiens
agagattctgtaatgaaactagttaataatggagcaaaga

SEQ ID NO: 39450 - DNA, 40 bp, Homo sapiens
ctttgctccattattaactagtttcattacagaatctctg

SEQ ID NO: 39451 - DNA, 40 bp, Homo sapiens
cagagattctgtaatgaaactagttaataatggagcaaag

SEQ ID NO: 39452 - DNA, 40 bp, Homo sapiens
tttgctccattattaactagtttcattacagaatctctgt

SEQ ID NO: 39453 - DNA, 40 bp, Homo sapiens
acagagattctgtaatgaaactagttaataatggagcaaa

SEQ ID NO: 39454 - DNA, 40 bp, Homo sapiens
ttgctccattattaactagtttcattacagaatctctgtg

SEQ ID NO: 39455 - DNA, 40 bp, Homo sapiens
cacagagattctgtaatgaaactagttaataatggagcaa

SEQ ID NO: 39456 - DNA, 40 bp, Homo sapiens
tgctccattattaactagtttcattacagaatctctgtgt

SEQ ID NO: 39457 - DNA, 40 bp, Homo sapiens
acacagagattctgtaatgaaactagttaataatggagca

SEQ ID NO: 39458 - DNA, 40 bp, Homo sapiens
gctccattattaactagtttcattacagaatctctgtgtt

SEQ ID NO: 39459 - DNA, 40 bp, Homo sapiens
aacacagagattctgtaatgaaactagttaataatggagc

SEQ ID NO: 39460 - DNA, 40 bp, Homo sapiens
ctccattattaactagtttcattacagaatctctgtgttt

SEQ ID NO: 39461 - DNA, 40 bp, Homo sapiens
aaacacagagattctgtaatgaaactagttaataatggag

SEQ ID NO: 39462 - DNA, 40 bp, Homo sapiens
tccattattaactagtttcattacagaatctctgtgtttt

SEQ ID NO: 39463 - DNA, 40 bp, Homo sapiens
aaaacacagagattctgtaatgaaactagttaataatgga

SEQ ID NO: 39464 - DNA, 40 bp, Homo sapiens
ccattattaactagtttcattacagaatctctgtgtttta

SEQ ID NO: 39465 - DNA, 40 bp, Homo sapiens
taaaacacagagattctgtaatgaaactagttaataatgg

SEQ ID NO: 39466 - DNA, 40 bp, Homo sapiens
cattattaactagtttcattacagaatctctgtgttttaa

SEQ ID NO: 39467 - DNA, 40 bp, Homo sapiens
ttaaaacacagagattctgtaatgaaactagttaataatg

SEQ ID NO: 39468 - DNA, 40 bp, Homo sapiens
attattaactagtttcattacagaatctctgtgttttaaa

SEQ ID NO: 39469 - DNA, 40 bp, Homo sapiens
tttaaaacacagagattctgtaatgaaactagttaataat

SEQ ID NO: 39470 - DNA, 40 bp, Homo sapiens
ttattaactagtttcattacagaatctctgtgttttaaaa

SEQ ID NO: 39471 - DNA, 40 bp, Homo sapiens
ttttaaaacacagagattctgtaatgaaactagttaataa

SEQ ID NO: 39472 - DNA, 40 bp, Homo sapiens
tattaactagtttcattacagaatctctgtgttttaaaat

SEQ ID NO: 39473 - DNA, 40 bp, Homo sapiens
attttaaaacacagagattctgtaatgaaactagttaata

SEQ ID NO: 39474 - DNA, 40 bp, Homo sapiens
attaactagtttcattacagaatctctgtgttttaaaatc

SEQ ID NO: 39475 - DNA, 40 bp, Homo sapiens
gattttaaaacacagagattctgtaatgaaactagttaat

SEQ ID NO: 39476 - DNA, 40 bp, Homo sapiens
ttaactagtttcattacagaatctctgtgttttaaaatca

SEQ ID NO: 39477 - DNA, 40 bp, Homo sapiens
tgattttaaaacacagagattctgtaatgaaactagttaa

SEQ ID NO: 39478 - DNA, 40 bp, Homo sapiens
taactagtttcattacagaatctctgtgttttaaaatcag

SEQ ID NO: 39479 - DNA, 40 bp, Homo sapiens
ctgattttaaaacacagagattctgtaatgaaactagtta

SEQ ID NO: 39480 - DNA, 40 bp, Homo sapiens
aactagtttcattacagaatctctgtgttttaaaatcaga

SEQ ID NO: 39481 - DNA, 40 bp, Homo sapiens
tctgattttaaaacacagagattctgtaatgaaactagtt

SEQ ID NO: 39482 - DNA, 40 bp, Homo sapiens
actagtttcattacagaatctctgtgttttaaaatcagat

SEQ ID NO: 39483 - DNA, 40 bp, Homo sapiens
atctgattttaaaacacagagattctgtaatgaaactagt

SEQ ID NO: 39484 - DNA, 40 bp, Homo sapiens
ctagtttcattacagaatctctgtgttttaaaatcagatg

SEQ ID NO: 39485 - DNA, 40 bp, Homo sapiens
catctgattttaaaacacagagattctgtaatgaaactag

SEQ ID NO: 39486 - DNA, 40 bp, Homo sapiens
tagtttcattacagaatctctgtgttttaaaatcagatgg

SEQ ID NO: 39487 - DNA, 40 bp, Homo sapiens
ccatctgattttaaaacacagagattctgtaatgaaacta

SEQ ID NO: 39488 - DNA, 40 bp, Homo sapiens
agtttcattacagaatctctgtgttttaaaatcagatggg

SEQ ID NO: 39489 - DNA, 40 bp, Homo sapiens
cccatctgattttaaaacacagagattctgtaatgaaact

SEQ ID NO: 39490 - DNA, 40 bp, Homo sapiens
gtttcattacagaatctctgtgttttaaaatcagatgggt

SEQ ID NO: 39491 - DNA, 40 bp, Homo sapiens
acccatctgattttaaaacacagagattctgtaatgaaac

SEQ ID NO: 39492 - DNA, 40 bp, Homo sapiens
tttcattacagaatctctgtgttttaaaatcagatgggtt

SEQ ID NO: 39493 - DNA, 40 bp, Homo sapiens
aacccatctgattttaaaacacagagattctgtaatgaaa

SEQ ID NO: 39494 - DNA, 40 bp, Homo sapiens
ttcattacagaatctctgtgttttaaaatcagatgggttt

SEQ ID NO: 39495 - DNA, 40 bp, Homo sapiens
aaacccatctgattttaaaacacagagattctgtaatgaa

SEQ ID NO: 39496 - DNA, 40 bp, Homo sapiens
tcattacagaatctctgtgttttaaaatcagatgggtttt

SEQ ID NO: 39497 - DNA, 40 bp, Homo sapiens
aaaacccatctgattttaaaacacagagattctgtaatga

SEQ ID NO: 39498 - DNA, 40 bp, Homo sapiens
cattacagaatctctgtgttttaaaatcagatgggttttc

SEQ ID NO: 39499 - DNA, 40 bp, Homo sapiens
gaaaacccatctgattttaaaacacagagattctgtaatg

SEQ ID NO: 39500 - DNA, 40 bp, Homo sapiens
attacagaatctctgtgttttaaaatcagatgggttttca

SEQ ID NO: 39501 - DNA, 40 bp, Homo sapiens
tgaaaacccatctgattttaaaacacagagattctgtaat

SEQ ID NO: 39502 - DNA, 40 bp, Homo sapiens
ttacagaatctctgtgttttaaaatcagatgggttttcat

SEQ ID NO: 39503 - DNA, 40 bp, Homo sapiens
atgaaaacccatctgattttaaaacacagagattctgtaa

SEQ ID NO: 39504 - DNA, 40 bp, Homo sapiens
tacagaatctctgtgttttaaaatcagatgggttttcata

SEQ ID NO: 39505 - DNA, 40 bp, Homo sapiens
tatgaaaacccatctgattttaaaacacagagattctgta

SEQ ID NO: 39506 - DNA, 40 bp, Homo sapiens
acagaatctctgtgttttaaaatcagatgggttttcataa

SEQ ID NO: 39507 - DNA, 40 bp, Homo sapiens
ttatgaaaacccatctgattttaaaacacagagattctgt

SEQ ID NO: 39508 - DNA, 40 bp, Homo sapiens
cagaatctctgtgttttaaaatcagatgggttttcataac

SEQ ID NO: 39509 - DNA, 40 bp, Homo sapiens
gttatgaaaacccatctgattttaaaacacagagattctg

SEQ ID NO: 39510 - DNA, 40 bp, Homo sapiens
agaatctctgtgttttaaaatcagatgggttttcataacc

SEQ ID NO: 39511 - DNA, 40 bp, Homo sapiens
ggttatgaaaacccatctgattttaaaacacagagattct

SEQ ID NO: 39512 - DNA, 40 bp, Homo sapiens
gaatctctgtgttttaaaatcagatgggttttcataacca

SEQ ID NO: 39513 - DNA, 40 bp, Homo sapiens
tggttatgaaaacccatctgattttaaaacacagagattc

SEQ ID NO: 39514 - DNA, 40 bp, Homo sapiens
aatctctgtgttttaaaatcagatgggttttcataaccag

SEQ ID NO: 39515 - DNA, 40 bp, Homo sapiens
ctggttatgaaaacccatctgattttaaaacacagagatt

SEQ ID NO: 39516 - DNA, 40 bp, Homo sapiens
atctctgtgttttaaaatcagatgggttttcataaccagt

SEQ ID NO: 39517 - DNA, 40 bp, Homo sapiens
actggttatgaaaacccatctgattttaaaacacagagat

SEQ ID NO: 39518 - DNA, 40 bp, Homo sapiens
tctctgtgttttaaaatcagatgggttttcataaccagta

SEQ ID NO: 39519 - DNA, 40 bp, Homo sapiens
tactggttatgaaaacccatctgattttaaaacacagaga

SEQ ID NO: 39520 - DNA, 40 bp, Homo sapiens
ctctgtgttttaaaatcagatgggttttcataaccagtac

SEQ ID NO: 39521 - DNA, 40 bp, Homo sapiens
gtactggttatgaaaacccatctgattttaaaacacagag

SEQ ID NO: 39522 - DNA, 40 bp, Homo sapiens
tctgtgttttaaaatcagatgggttttcataaccagtact

SEQ ID NO: 39523 - DNA, 40 bp, Homo sapiens
agtactggttatgaaaacccatctgattttaaaacacaga

SEQ ID NO: 39524 - DNA, 40 bp, Homo sapiens
ctgtgttttaaaatcagatgggttttcataaccagtactt

SEQ ID NO: 39525 - DNA, 40 bp, Homo sapiens
aagtactggttatgaaaacccatctgattttaaaacacag

SEQ ID NO: 39526 - DNA, 40 bp, Homo sapiens
tgtgttttaaaatcagatgggttttcataaccagtacttt

SEQ ID NO: 39527 - DNA, 40 bp, Homo sapiens
aaagtactggttatgaaaacccatctgattttaaaacaca

SEQ ID NO: 39528 - DNA, 40 bp, Homo sapiens
gtgttttaaaatcagatgggttttcataaccagtactttc

SEQ ID NO: 39529 - DNA, 40 bp, Homo sapiens
gaaagtactggttatgaaaacccatctgattttaaaacac

SEQ ID NO: 39530 - DNA, 40 bp, Homo sapiens
tgttttaaaatcagatgggttttcataaccagtactttct

SEQ ID NO: 39531 - DNA, 40 bp, Homo sapiens
agaaagtactggttatgaaaacccatctgattttaaaaca

SEQ ID NO: 39532 - DNA, 40 bp, Homo sapiens
gttttaaaatcagatgggttttcataaccagtactttctc

SEQ ID NO: 39533 - DNA, 40 bp, Homo sapiens
gagaaagtactggttatgaaaacccatctgattttaaaac

SEQ ID NO: 39534 - DNA, 40 bp, Homo sapiens
ttttaaaatcagatgggttttcataaccagtactttctca

SEQ ID NO: 39535 - DNA, 40 bp, Homo sapiens
tgagaaagtactggttatgaaaacccatctgattttaaaa

SEQ ID NO: 39536 - DNA, 40 bp, Homo sapiens
tttaaaatcagatgggttttcataaccagtactttctcag

SEQ ID NO: 39537 - DNA, 40 bp, Homo sapiens
ctgagaaagtactggttatgaaaacccatctgattttaaa

SEQ ID NO: 39538 - DNA, 40 bp, Homo sapiens
ttaaaatcagatgggttttcataaccagtactttctcaga

SEQ ID NO: 39539 - DNA, 40 bp, Homo sapiens
tctgagaaagtactggttatgaaaacccatctgattttaa

SEQ ID NO: 39540 - DNA, 40 bp, Homo sapiens
taaaatcagatgggttttcataaccagtactttctcagag

SEQ ID NO: 39541 - DNA, 40 bp, Homo sapiens
ctctgagaaagtactggttatgaaaacccatctgatttta

SEQ ID NO: 39542 - DNA, 40 bp, Homo sapiens
aaaatcagatgggttttcataaccagtactttctcagagt

SEQ ID NO: 39543 - DNA, 40 bp, Homo sapiens
actctgagaaagtactggttatgaaaacccatctgatttt

SEQ ID NO: 39544 - DNA, 40 bp, Homo sapiens
aaatcagatgggttttcataaccagtactttctcagagtg

SEQ ID NO: 39545 - DNA, 40 bp, Homo sapiens
cactctgagaaagtactggttatgaaaacccatctgattt

SEQ ID NO: 39546 - DNA, 40 bp, Homo sapiens
aatcagatgggttttcataaccagtactttctcagagtgg

SEQ ID NO: 39547 - DNA, 40 bp, Homo sapiens
ccactctgagaaagtactggttatgaaaacccatctgatt

SEQ ID NO: 39548 - DNA, 40 bp, Homo sapiens
atcagatgggttttcataaccagtactttctcagagtggt

SEQ ID NO: 39549 - DNA, 40 bp, Homo sapiens
accactctgagaaagtactggttatgaaaacccatctgat

SEQ ID NO: 39550 - DNA, 40 bp, Homo sapiens
tcagatgggttttcataaccagtactttctcagagtggta

SEQ ID NO: 39551 - DNA, 40 bp, Homo sapiens
taccactctgagaaagtactggttatgaaaacccatctga

SEQ ID NO: 39552 - DNA, 40 bp, Homo sapiens
cagatgggttttcataaccagtactttctcagagtggtaa

SEQ ID NO: 39553 - DNA, 40 bp, Homo sapiens
ttaccactctgagaaagtactggttatgaaaacccatctg

SEQ ID NO: 39554 - DNA, 40 bp, Homo sapiens
agatgggttttcataaccagtactttctcagagtggtaaa

SEQ ID NO: 39555 - DNA, 40 bp, Homo sapiens
tttaccactctgagaaagtactggttatgaaaacccatct

SEQ ID NO: 39556 - DNA, 40 bp, Homo sapiens
gatgggttttcataaccagtactttctcagagtggtaaat

SEQ ID NO: 39557 - DNA, 40 bp, Homo sapiens
atttaccactctgagaaagtactggttatgaaaacccatc

SEQ ID NO: 39558 - DNA, 40 bp, Homo sapiens
atgggttttcataaccagtactttctcagagtggtaaatt

SEQ ID NO: 39559 - DNA, 40 bp, Homo sapiens
aatttaccactctgagaaagtactggttatgaaaacccat

SEQ ID NO: 39560 - DNA, 40 bp, Homo sapiens
tgggttttcataaccagtactttctcagagtggtaaattt

SEQ ID NO: 39561 - DNA, 40 bp, Homo sapiens
aaatttaccactctgagaaagtactggttatgaaaaccca

SEQ ID NO: 39562 - DNA, 40 bp, Homo sapiens
gggttttcataaccagtactttctcagagtggtaaattta

SEQ ID NO: 39563 - DNA, 40 bp, Homo sapiens
taaatttaccactctgagaaagtactggttatgaaaaccc

SEQ ID NO: 39564 - DNA, 40 bp, Homo sapiens
ggttttcataaccagtactttctcagagtggtaaatttaa

SEQ ID NO: 39565 - DNA, 40 bp, Homo sapiens
ttaaatttaccactctgagaaagtactggttatgaaaacc

SEQ ID NO: 39566 - DNA, 40 bp, Homo sapiens
gttttcataaccagtactttctcagagtggtaaatttaaa

SEQ ID NO: 39567 - DNA, 40 bp, Homo sapiens
tttaaatttaccactctgagaaagtactggttatgaaaac

SEQ ID NO: 39568 - DNA, 40 bp, Homo sapiens
ttttcataaccagtactttctcagagtggtaaatttaaaa

SEQ ID NO: 39569 - DNA, 40 bp, Homo sapiens
ttttaaatttaccactctgagaaagtactggttatgaaaa

SEQ ID NO: 39570 - DNA, 40 bp, Homo sapiens
tttcataaccagtactttctcagagtggtaaatttaaaaa

SEQ ID NO: 39571 - DNA, 40 bp, Homo sapiens
tttttaaatttaccactctgagaaagtactggttatgaaa

SEQ ID NO: 39572 - DNA, 40 bp, Homo sapiens
ttcataaccagtactttctcagagtggtaaatttaaaaaa

SEQ ID NO: 39573 - DNA, 40 bp, Homo sapiens
ttttttaaatttaccactctgagaaagtactggttatgaa

SEQ ID NO: 39574 - DNA, 40 bp, Homo sapiens
tcataaccagtactttctcagagtggtaaatttaaaaaaa

SEQ ID NO: 39575 - DNA, 40 bp, Homo sapiens
tttttttaaatttaccactctgagaaagtactggttatga

SEQ ID NO: 39576 - DNA, 40 bp, Homo sapiens
cataaccagtactttctcagagtggtaaatttaaaaaaat

SEQ ID NO: 39577 - DNA, 40 bp, Homo sapiens
atttttttaaatttaccactctgagaaagtactggttatg

SEQ ID NO: 39578 - DNA, 40 bp, Homo sapiens
ataaccagtactttctcagagtggtaaatttaaaaaaata

SEQ ID NO: 39579 - DNA, 40 bp, Homo sapiens
tatttttttaaatttaccactctgagaaagtactggttat

SEQ ID NO: 39580 - DNA, 40 bp, Homo sapiens
taaccagtactttctcagagtggtaaatttaaaaaaatat

SEQ ID NO: 39581 - DNA, 40 bp, Homo sapiens
atatttttttaaatttaccactctgagaaagtactggtta

SEQ ID NO: 39582 - DNA, 40 bp, Homo sapiens
aaccagtactttctcagagtggtaaatttaaaaaaatata

SEQ ID NO: 39583 - DNA, 40 bp, Homo sapiens
tatatttttttaaatttaccactctgagaaagtactggtt

SEQ ID NO: 39584 - DNA, 40 bp, Homo sapiens
accagtactttctcagagtggtaaatttaaaaaaatatat

SEQ ID NO: 39585 - DNA, 40 bp, Homo sapiens
atatatttttttaaatttaccactctgagaaagtactggt

SEQ ID NO: 39586 - DNA, 40 bp, Homo sapiens
ccagtactttctcagagtggtaaatttaaaaaaatatata

SEQ ID NO: 39587 - DNA, 40 bp, Homo sapiens
tatatatttttttaaatttaccactctgagaaagtactgg

SEQ ID NO: 39588 - DNA, 40 bp, Homo sapiens
cagtactttctcagagtggtaaatttaaaaaaatatataa

SEQ ID NO: 39589 - DNA, 40 bp, Homo sapiens
ttatatatttttttaaatttaccactctgagaaagtactg

SEQ ID NO: 39590 - DNA, 40 bp, Homo sapiens
agtactttctcagagtggtaaatttaaaaaaatatataaa

SEQ ID NO: 39591 - DNA, 40 bp, Homo sapiens
tttatatatttttttaaatttaccactctgagaaagtact

SEQ ID NO: 39592 - DNA, 40 bp, Homo sapiens
gtactttctcagagtggtaaatttaaaaaaatatataaag

SEQ ID NO: 39593 - DNA, 40 bp, Homo sapiens
ctttatatatttttttaaatttaccactctgagaaagtac

SEQ ID NO: 39594 - DNA, 40 bp, Homo sapiens
tactttctcagagtggtaaatttaaaaaaatatataaaga

SEQ ID NO: 39595 - DNA, 40 bp, Homo sapiens
tctttatatatttttttaaatttaccactctgagaaagta

SEQ ID NO: 39596 - DNA, 40 bp, Homo sapiens
actttctcagagtggtaaatttaaaaaaatatataaagag

SEQ ID NO: 39597 - DNA, 40 bp, Homo sapiens
ctctttatatatttttttaaatttaccactctgagaaagt

SEQ ID NO: 39598 - DNA, 40 bp, Homo sapiens
ctttctcagagtggtaaatttaaaaaaatatataaagaga

SEQ ID NO: 39599 - DNA, 40 bp, Homo sapiens
tctctttatatatttttttaaatttaccactctgagaaag

SEQ ID NO: 39600 - DNA, 40 bp, Homo sapiens
tttctcagagtggtaaatttaaaaaaatatataaagagaa

SEQ ID NO: 39601 - DNA, 40 bp, Homo sapiens
ttctctttatatatttttttaaatttaccactctgagaaa

SEQ ID NO: 39602 - DNA, 40 bp, Homo sapiens
ttctcagagtggtaaatttaaaaaaatatataaagagaat

SEQ ID NO: 39603 - DNA, 40 bp, Homo sapiens
attctctttatatatttttttaaatttaccactctgagaa

SEQ ID NO: 39604 - DNA, 40 bp, Homo sapiens
tctcagagtggtaaatttaaaaaaatatataaagagaata

SEQ ID NO: 39605 - DNA, 40 bp, Homo sapiens
tattctctttatatatttttttaaatttaccactctgaga

SEQ ID NO: 39606 - DNA, 40 bp, Homo sapiens
ctcagagtggtaaatttaaaaaaatatataaagagaataa

SEQ ID NO: 39607 - DNA, 40 bp, Homo sapiens
ttattctctttatatatttttttaaatttaccactctgag

SEQ ID NO: 39608 - DNA, 40 bp, Homo sapiens
tcagagtggtaaatttaaaaaaatatataaagagaataaa

SEQ ID NO: 39609 - DNA, 40 bp, Homo sapiens
tttattctctttatatatttttttaaatttaccactctga

SEQ ID NO: 39610 - DNA, 40 bp, Homo sapiens
cagagtggtaaatttaaaaaaatatataaagagaataaat

SEQ ID NO: 39611 - DNA, 40 bp, Homo sapiens
atttattctctttatatatttttttaaatttaccactctg

SEQ ID NO: 39612 - DNA, 40 bp, Homo sapiens
agagtggtaaatttaaaaaaatatataaagagaataaata

SEQ ID NO: 39613 - DNA, 40 bp, Homo sapiens
tatttattctctttatatatttttttaaatttaccactct

SEQ ID NO: 39614 - DNA, 40 bp, Homo sapiens
gagtggtaaatttaaaaaaatatataaagagaataaataa

SEQ ID NO: 39615 - DNA, 40 bp, Homo sapiens
ttatttattctctttatatatttttttaaatttaccactc

SEQ ID NO: 39616 - DNA, 40 bp, Homo sapiens
agtggtaaatttaaaaaaatatataaagagaataaataat

SEQ ID NO: 39617 - DNA, 40 bp, Homo sapiens
attatttattctctttatatatttttttaaatttaccact

SEQ ID NO: 39618 - DNA, 40 bp, Homo sapiens
gtggtaaatttaaaaaaatatataaagagaataaataata

SEQ ID NO: 39619 - DNA, 40 bp, Homo sapiens
tattatttattctctttatatatttttttaaatttaccac

SEQ ID NO: 39620 - DNA, 40 bp, Homo sapiens
tggtaaatttaaaaaaatatataaagagaataaataatat

SEQ ID NO: 39621 - DNA, 40 bp, Homo sapiens
atattatttattctctttatatatttttttaaatttacca

SEQ ID NO: 39622 - DNA, 40 bp, Homo sapiens
ggtaaatttaaaaaaatatataaagagaataaataatatt

SEQ ID NO: 39623 - DNA, 40 bp, Homo sapiens
aatattatttattctctttatatatttttttaaatttacc

SEQ ID NO: 39624 - DNA, 40 bp, Homo sapiens
gtaaatttaaaaaaatatataaagagaataaataatattt

SEQ ID NO: 39625 - DNA, 40 bp, Homo sapiens
aaatattatttattctctttatatatttttttaaatttac

SEQ ID NO: 39626 - DNA, 40 bp, Homo sapiens
taaatttaaaaaaatatataaagagaataaataatatttg

SEQ ID NO: 39627 - DNA, 40 bp, Homo sapiens
caaatattatttattctctttatatatttttttaaattta

SEQ ID NO: 39628 - DNA, 40 bp, Homo sapiens
aaatttaaaaaaatatataaagagaataaataatatttgt

SEQ ID NO: 39629 - DNA, 40 bp, Homo sapiens
acaaatattatttattctctttatatatttttttaaattt

SEQ ID NO: 39630 - DNA, 40 bp, Homo sapiens
aatttaaaaaaatatataaagagaataaataatatttgtt

SEQ ID NO: 39631 - DNA, 40 bp, Homo sapiens
aacaaatattatttattctctttatatatttttttaaatt

SEQ ID NO: 39632 - DNA, 40 bp, Homo sapiens
atttaaaaaaatatataaagagaataaataatatttgttg

SEQ ID NO: 39633 - DNA, 40 bp, Homo sapiens
caacaaatattatttattctctttatatatttttttaaat

SEQ ID NO: 39634 - DNA, 40 bp, Homo sapiens
tttaaaaaaatatataaagagaataaataatatttgttga

SEQ ID NO: 39635 - DNA, 40 bp, Homo sapiens
tcaacaaatattatttattctctttatatatttttttaaa

SEQ ID NO: 39636 - DNA, 40 bp, Homo sapiens
ttaaaaaaatatataaagagaataaataatatttgttgag

SEQ ID NO: 39637 - DNA, 40 bp, Homo sapiens
ctcaacaaatattatttattctctttatatatttttttaa

SEQ ID NO: 39638 - DNA, 40 bp, Homo sapiens
taaaaaaatatataaagagaataaataatatttgttgaga

SEQ ID NO: 39639 - DNA, 40 bp, Homo sapiens
tctcaacaaatattatttattctctttatatattttttta

SEQ ID NO: 39640 - DNA, 40 bp, Homo sapiens
aaaaaaatatataaagagaataaataatatttgttgagaa

SEQ ID NO: 39641 - DNA, 40 bp, Homo sapiens
ttctcaacaaatattatttattctctttatatattttttt

SEQ ID NO: 39642 - DNA, 40 bp, Homo sapiens
aaaaaatatataaagagaataaataatatttgttgagaat

SEQ ID NO: 39643 - DNA, 40 bp, Homo sapiens
attctcaacaaatattatttattctctttatatatttttt

SEQ ID NO: 39644 - DNA, 40 bp, Homo sapiens
aaaaatatataaagagaataaataatatttgttgagaata

SEQ ID NO: 39645 - DNA, 40 bp, Homo sapiens
tattctcaacaaatattatttattctctttatatattttt

SEQ ID NO: 39646 - DNA, 40 bp, Homo sapiens
aaaatatataaagagaataaataatatttgttgagaatac

SEQ ID NO: 39647 - DNA, 40 bp, Homo sapiens
gtattctcaacaaatattatttattctctttatatatttt

SEQ ID NO: 39648 - DNA, 40 bp, Homo sapiens
aaatatataaagagaataaataatatttgttgagaatact

SEQ ID NO: 39649 - DNA, 40 bp, Homo sapiens
agtattctcaacaaatattatttattctctttatatattt

SEQ ID NO: 39650 - DNA, 40 bp, Homo sapiens
aatatataaagagaataaataatatttgttgagaatactt

SEQ ID NO: 39651 - DNA, 40 bp, Homo sapiens
aagtattctcaacaaatattatttattctctttatatatt

SEQ ID NO: 39652 - DNA, 40 bp, Homo sapiens
atatataaagagaataaataatatttgttgagaatacttc

SEQ ID NO: 39653 - DNA, 40 bp, Homo sapiens
gaagtattctcaacaaatattatttattctctttatatat

SEQ ID NO: 39654 - DNA, 40 bp, Homo sapiens
tatataaagagaataaataatatttgttgagaatacttca

SEQ ID NO: 39655 - DNA, 40 bp, Homo sapiens
tgaagtattctcaacaaatattatttattctctttatata

SEQ ID NO: 39656 - DNA, 40 bp, Homo sapiens
atataaagagaataaataatatttgttgagaatacttcaa

SEQ ID NO: 39657 - DNA, 40 bp, Homo sapiens
ttgaagtattctcaacaaatattatttattctctttatat

SEQ ID NO: 39658 - DNA, 40 bp, Homo sapiens
tataaagagaataaataatatttgttgagaatacttcaaa

SEQ ID NO: 39659 - DNA, 40 bp, Homo sapiens
tttgaagtattctcaacaaatattatttattctctttata

SEQ ID NO: 39660 - DNA, 40 bp, Homo sapiens
ataaagagaataaataatatttgttgagaatacttcaaat

SEQ ID NO: 39661 - DNA, 40 bp, Homo sapiens
atttgaagtattctcaacaaatattatttattctctttat

SEQ ID NO: 39662 - DNA, 40 bp, Homo sapiens
taaagagaataaataatatttgttgagaatacttcaaata

SEQ ID NO: 39663 - DNA, 40 bp, Homo sapiens
tatttgaagtattctcaacaaatattatttattctcttta

SEQ ID NO: 39664 - DNA, 40 bp, Homo sapiens
aaagagaataaataatatttgttgagaatacttcaaataa

SEQ ID NO: 39665 - DNA, 40 bp, Homo sapiens
ttatttgaagtattctcaacaaatattatttattctcttt

SEQ ID NO: 39666 - DNA, 40 bp, Homo sapiens
aagagaataaataatatttgttgagaatacttcaaataat

SEQ ID NO: 39667 - DNA, 40 bp, Homo sapiens
attatttgaagtattctcaacaaatattatttattctctt

SEQ ID NO: 39668 - DNA, 40 bp, Homo sapiens
agagaataaataatatttgttgagaatacttcaaataatg

SEQ ID NO: 39669 - DNA, 40 bp, Homo sapiens
cattatttgaagtattctcaacaaatattatttattctct

SEQ ID NO: 39670 - DNA, 40 bp, Homo sapiens
gagaataaataatatttgttgagaatacttcaaataatgt

SEQ ID NO: 39671 - DNA, 40 bp, Homo sapiens
acattatttgaagtattctcaacaaatattatttattctc

SEQ ID NO: 39672 - DNA, 40 bp, Homo sapiens
agaataaataatatttgttgagaatacttcaaataatgtg

SEQ ID NO: 39673 - DNA, 40 bp, Homo sapiens
cacattatttgaagtattctcaacaaatattatttattct

SEQ ID NO: 39674 - DNA, 40 bp, Homo sapiens
gaataaataatatttgttgagaatacttcaaataatgtga

SEQ ID NO: 39675 - DNA, 40 bp, Homo sapiens
tcacattatttgaagtattctcaacaaatattatttattc

SEQ ID NO: 39676 - DNA, 40 bp, Homo sapiens
aataaataatatttgttgagaatacttcaaataatgtgaa

SEQ ID NO: 39677 - DNA, 40 bp, Homo sapiens
ttcacattatttgaagtattctcaacaaatattatttatt

SEQ ID NO: 39678 - DNA, 40 bp, Homo sapiens
ataaataatatttgttgagaatacttcaaataatgtgaag

SEQ ID NO: 39679 - DNA, 40 bp, Homo sapiens
cttcacattatttgaagtattctcaacaaatattatttat

SEQ ID NO: 39680 - DNA, 40 bp, Homo sapiens
taaataatatttgttgagaatacttcaaataatgtgaaga

SEQ ID NO: 39681 - DNA, 40 bp, Homo sapiens
tcttcacattatttgaagtattctcaacaaatattattta

SEQ ID NO: 39682 - DNA, 40 bp, Homo sapiens
aaataatatttgttgagaatacttcaaataatgtgaagag

SEQ ID NO: 39683 - DNA, 40 bp, Homo sapiens
ctcttcacattatttgaagtattctcaacaaatattattt

SEQ ID NO: 39684 - DNA, 40 bp, Homo sapiens
aataatatttgttgagaatacttcaaataatgtgaagagt

SEQ ID NO: 39685 - DNA, 40 bp, Homo sapiens
actcttcacattatttgaagtattctcaacaaatattatt

SEQ ID NO: 39686 - DNA, 40 bp, Homo sapiens
ataatatttgttgagaatacttcaaataatgtgaagagtt

SEQ ID NO: 39687 - DNA, 40 bp, Homo sapiens
aactcttcacattatttgaagtattctcaacaaatattat

SEQ ID NO: 39688 - DNA, 40 bp, Homo sapiens
taatatttgttgagaatacttcaaataatgtgaagagtta

SEQ ID NO: 39689 - DNA, 40 bp, Homo sapiens
taactcttcacattatttgaagtattctcaacaaatatta

SEQ ID NO: 39690 - DNA, 40 bp, Homo sapiens
aatatttgttgagaatacttcaaataatgtgaagagttat

SEQ ID NO: 39691 - DNA, 40 bp, Homo sapiens
ataactcttcacattatttgaagtattctcaacaaatatt

SEQ ID NO: 39692 - DNA, 40 bp, Homo sapiens
atatttgttgagaatacttcaaataatgtgaagagttatt

SEQ ID NO: 39693 - DNA, 40 bp, Homo sapiens
aataactcttcacattatttgaagtattctcaacaaatat

SEQ ID NO: 39694 - DNA, 40 bp, Homo sapiens
tatttgttgagaatacttcaaataatgtgaagagttatta

SEQ ID NO: 39695 - DNA, 40 bp, Homo sapiens
taataactcttcacattatttgaagtattctcaacaaata

SEQ ID NO: 39696 - DNA, 40 bp, Homo sapiens
atttgttgagaatacttcaaataatgtgaagagttattaa

SEQ ID NO: 39697 - DNA, 40 bp, Homo sapiens
ttaataactcttcacattatttgaagtattctcaacaaat

SEQ ID NO: 39698 - DNA, 40 bp, Homo sapiens
tttgttgagaatacttcaaataatgtgaagagttattaac

SEQ ID NO: 39699 - DNA, 40 bp, Homo sapiens
gttaataactcttcacattatttgaagtattctcaacaaa

SEQ ID NO: 39700 - DNA, 40 bp, Homo sapiens
ttgttgagaatacttcaaataatgtgaagagttattaact

SEQ ID NO: 39701 - DNA, 40 bp, Homo sapiens
agttaataactcttcacattatttgaagtattctcaacaa

SEQ ID NO: 39702 - DNA, 40 bp, Homo sapiens
tgttgagaatacttcaaataatgtgaagagttattaactt

SEQ ID NO: 39703 - DNA, 40 bp, Homo sapiens
aagttaataactcttcacattatttgaagtattctcaaca

SEQ ID NO: 39704 - DNA, 40 bp, Homo sapiens
gttgagaatacttcaaataatgtgaagagttattaactta

SEQ ID NO: 39705 - DNA, 40 bp, Homo sapiens
taagttaataactcttcacattatttgaagtattctcaac

SEQ ID NO: 39706 - DNA, 40 bp, Homo sapiens
ttgagaatacttcaaataatgtgaagagttattaacttac

SEQ ID NO: 39707 - DNA, 40 bp, Homo sapiens
gtaagttaataactcttcacattatttgaagtattctcaa

SEQ ID NO: 39708 - DNA, 40 bp, Homo sapiens
tgagaatacttcaaataatgtgaagagttattaacttaca

SEQ ID NO: 39709 - DNA, 40 bp, Homo sapiens
tgtaagttaataactcttcacattatttgaagtattctca

SEQ ID NO: 39710 - DNA, 40 bp, Homo sapiens
gagaatacttcaaataatgtgaagagttattaacttacag

SEQ ID NO: 39711 - DNA, 40 bp, Homo sapiens
ctgtaagttaataactcttcacattatttgaagtattctc

SEQ ID NO: 39712 - DNA, 40 bp, Homo sapiens
agaatacttcaaataatgtgaagagttattaacttacagc

SEQ ID NO: 39713 - DNA, 40 bp, Homo sapiens
gctgtaagttaataactcttcacattatttgaagtattct

SEQ ID NO: 39714 - DNA, 40 bp, Homo sapiens
gaatacttcaaataatgtgaagagttattaacttacagca

SEQ ID NO: 39715 - DNA, 40 bp, Homo sapiens
tgctgtaagttaataactcttcacattatttgaagtattc

SEQ ID NO: 39716 - DNA, 40 bp, Homo sapiens
aatacttcaaataatgtgaagagttattaacttacagcag

SEQ ID NO: 39717 - DNA, 40 bp, Homo sapiens
ctgctgtaagttaataactcttcacattatttgaagtatt

SEQ ID NO: 39718 - DNA, 40 bp, Homo sapiens
atacttcaaataatgtgaagagttattaacttacagcagg

SEQ ID NO: 39719 - DNA, 40 bp, Homo sapiens
cctgctgtaagttaataactcttcacattatttgaagtat

SEQ ID NO: 39720 - DNA, 40 bp, Homo sapiens
tacttcaaataatgtgaagagttattaacttacagcagga

SEQ ID NO: 39721 - DNA, 40 bp, Homo sapiens
tcctgctgtaagttaataactcttcacattatttgaagta

SEQ ID NO: 39722 - DNA, 40 bp, Homo sapiens
acttcaaataatgtgaagagttattaacttacagcaggag

SEQ ID NO: 39723 - DNA, 40 bp, Homo sapiens
ctcctgctgtaagttaataactcttcacattatttgaagt

SEQ ID NO: 39724 - DNA, 40 bp, Homo sapiens
cttcaaataatgtgaagagttattaacttacagcaggagt

SEQ ID NO: 39725 - DNA, 40 bp, Homo sapiens
actcctgctgtaagttaataactcttcacattatttgaag

SEQ ID NO: 39726 - DNA, 40 bp, Homo sapiens
ttcaaataatgtgaagagttattaacttacagcaggagtt

SEQ ID NO: 39727 - DNA, 40 bp, Homo sapiens
aactcctgctgtaagttaataactcttcacattatttgaa

SEQ ID NO: 39728 - DNA, 40 bp, Homo sapiens
tcaaataatgtgaagagttattaacttacagcaggagttg

SEQ ID NO: 39729 - DNA, 40 bp, Homo sapiens
caactcctgctgtaagttaataactcttcacattatttga

SEQ ID NO: 39730 - DNA, 40 bp, Homo sapiens
caaataatgtgaagagttattaacttacagcaggagttgg

SEQ ID NO: 39731 - DNA, 40 bp, Homo sapiens
ccaactcctgctgtaagttaataactcttcacattatttg

SEQ ID NO: 39732 - DNA, 40 bp, Homo sapiens
aaataatgtgaagagttattaacttacagcaggagttggc

SEQ ID NO: 39733 - DNA, 40 bp, Homo sapiens
gccaactcctgctgtaagttaataactcttcacattattt

SEQ ID NO: 39734 - DNA, 40 bp, Homo sapiens
aataatgtgaagagttattaacttacagcaggagttggca

SEQ ID NO: 39735 - DNA, 40 bp, Homo sapiens
tgccaactcctgctgtaagttaataactcttcacattatt

SEQ ID NO: 39736 - DNA, 40 bp, Homo sapiens
ataatgtgaagagttattaacttacagcaggagttggcaa

SEQ ID NO: 39737 - DNA, 40 bp, Homo sapiens
ttgccaactcctgctgtaagttaataactcttcacattat

SEQ ID NO: 39738 - DNA, 40 bp, Homo sapiens
taatgtgaagagttattaacttacagcaggagttggcaaa

SEQ ID NO: 39739 - DNA, 40 bp, Homo sapiens
tttgccaactcctgctgtaagttaataactcttcacatta

SEQ ID NO: 39740 - DNA, 40 bp, Homo sapiens
aatgtgaagagttattaacttacagcaggagttggcaaac

SEQ ID NO: 39741 - DNA, 40 bp, Homo sapiens
gtttgccaactcctgctgtaagttaataactcttcacatt

SEQ ID NO: 39742 - DNA, 40 bp, Homo sapiens
atgtgaagagttattaacttacagcaggagttggcaaact

SEQ ID NO: 39743 - DNA, 40 bp, Homo sapiens
agtttgccaactcctgctgtaagttaataactcttcacat

SEQ ID NO: 39744 - DNA, 40 bp, Homo sapiens
tgtgaagagttattaacttacagcaggagttggcaaactt

SEQ ID NO: 39745 - DNA, 40 bp, Homo sapiens
aagtttgccaactcctgctgtaagttaataactcttcaca

SEQ ID NO: 39746 - DNA, 40 bp, Homo sapiens
gtgaagagttattaacttacagcaggagttggcaaacttt

SEQ ID NO: 39747 - DNA, 40 bp, Homo sapiens
aaagtttgccaactcctgctgtaagttaataactcttcac

SEQ ID NO: 39748 - DNA, 40 bp, Homo sapiens
tgaagagttattaacttacagcaggagttggcaaactttt

SEQ ID NO: 39749 - DNA, 40 bp, Homo sapiens
aaaagtttgccaactcctgctgtaagttaataactcttca

SEQ ID NO: 39750 - DNA, 40 bp, Homo sapiens
gaagagttattaacttacagcaggagttggcaaacttttc

SEQ ID NO: 39751 - DNA, 40 bp, Homo sapiens
gaaaagtttgccaactcctgctgtaagttaataactcttc

SEQ ID NO: 39752 - DNA, 40 bp, Homo sapiens
aagagttattaacttacagcaggagttggcaaacttttct

SEQ ID NO: 39753 - DNA, 40 bp, Homo sapiens
agaaaagtttgccaactcctgctgtaagttaataactctt

SEQ ID NO: 39754 - DNA, 40 bp, Homo sapiens
agagttattaacttacagcaggagttggcaaacttttcta

SEQ ID NO: 39755 - DNA, 40 bp, Homo sapiens
tagaaaagtttgccaactcctgctgtaagttaataactct

SEQ ID NO: 39756 - DNA, 40 bp, Homo sapiens
gagttattaacttacagcaggagttggcaaacttttctat

SEQ ID NO: 39757 - DNA, 40 bp, Homo sapiens
atagaaaagtttgccaactcctgctgtaagttaataactc

SEQ ID NO: 39758 - DNA, 40 bp, Homo sapiens
agttattaacttacagcaggagttggcaaacttttctata

SEQ ID NO: 39759 - DNA, 40 bp, Homo sapiens
tatagaaaagtttgccaactcctgctgtaagttaataact

SEQ ID NO: 39760 - DNA, 40 bp, Homo sapiens
gttattaacttacagcaggagttggcaaacttttctataa

SEQ ID NO: 39761 - DNA, 40 bp, Homo sapiens
ttatagaaaagtttgccaactcctgctgtaagttaataac

SEQ ID NO: 39762 - DNA, 40 bp, Homo sapiens
ttattaacttacagcaggagttggcaaacttttctataaa

SEQ ID NO: 39763 - DNA, 40 bp, Homo sapiens
tttatagaaaagtttgccaactcctgctgtaagttaataa

SEQ ID NO: 39764 - DNA, 40 bp, Homo sapiens
tattaacttacagcaggagttggcaaacttttctataaag

SEQ ID NO: 39765 - DNA, 40 bp, Homo sapiens
ctttatagaaaagtttgccaactcctgctgtaagttaata

SEQ ID NO: 39766 - DNA, 40 bp, Homo sapiens
attaacttacagcaggagttggcaaacttttctataaagg

SEQ ID NO: 39767 - DNA, 40 bp, Homo sapiens
cctttatagaaaagtttgccaactcctgctgtaagttaat

SEQ ID NO: 39768 - DNA, 40 bp, Homo sapiens
ttaacttacagcaggagttggcaaacttttctataaaggg

SEQ ID NO: 39769 - DNA, 40 bp, Homo sapiens
ccctttatagaaaagtttgccaactcctgctgtaagttaa

SEQ ID NO: 39770 - DNA, 40 bp, Homo sapiens
taacttacagcaggagttggcaaacttttctataaagggc

SEQ ID NO: 39771 - DNA, 40 bp, Homo sapiens
gccctttatagaaaagtttgccaactcctgctgtaagtta

SEQ ID NO: 39772 - DNA, 40 bp, Homo sapiens
aacttacagcaggagttggcaaacttttctataaagggcc

SEQ ID NO: 39773 - DNA, 40 bp, Homo sapiens
ggccctttatagaaaagtttgccaactcctgctgtaagtt

SEQ ID NO: 39774 - DNA, 40 bp, Homo sapiens
acttacagcaggagttggcaaacttttctataaagggcca

SEQ ID NO: 39775 - DNA, 40 bp, Homo sapiens
tggccctttatagaaaagtttgccaactcctgctgtaagt

SEQ ID NO: 39776 - DNA, 40 bp, Homo sapiens
cttacagcaggagttggcaaacttttctataaagggccat

SEQ ID NO: 39777 - DNA, 40 bp, Homo sapiens
atggccctttatagaaaagtttgccaactcctgctgtaag

SEQ ID NO: 39778 - DNA, 40 bp, Homo sapiens
ttacagcaggagttggcaaacttttctataaagggccata

SEQ ID NO: 39779 - DNA, 40 bp, Homo sapiens
tatggccctttatagaaaagtttgccaactcctgctgtaa

SEQ ID NO: 39780 - DNA, 40 bp, Homo sapiens
tacagcaggagttggcaaacttttctataaagggccatat

SEQ ID NO: 39781 - DNA, 40 bp, Homo sapiens
atatggccctttatagaaaagtttgccaactcctgctgta

SEQ ID NO: 39782 - DNA, 40 bp, Homo sapiens
acagcaggagttggcaaacttttctataaagggccatatg

SEQ ID NO: 39783 - DNA, 40 bp, Homo sapiens
catatggccctttatagaaaagtttgccaactcctgctgt

SEQ ID NO: 39784 - DNA, 40 bp, Homo sapiens
cagcaggagttggcaaacttttctataaagggccatatgg

SEQ ID NO: 39785 - DNA, 40 bp, Homo sapiens
ccatatggccctttatagaaaagtttgccaactcctgctg

SEQ ID NO: 39786 - DNA, 40 bp, Homo sapiens
agcaggagttggcaaacttttctataaagggccatatggg

SEQ ID NO: 39787 - DNA, 40 bp, Homo sapiens
cccatatggccctttatagaaaagtttgccaactcctgct

SEQ ID NO: 39788 - DNA, 40 bp, Homo sapiens
gcaggagttggcaaacttttctataaagggccatatgggt

SEQ ID NO: 39789 - DNA, 40 bp, Homo sapiens
acccatatggccctttatagaaaagtttgccaactcctgc

SEQ ID NO: 39790 - DNA, 40 bp, Homo sapiens
caggagttggcaaacttttctataaagggccatatgggtc

SEQ ID NO: 39791 - DNA, 40 bp, Homo sapiens
gacccatatggccctttatagaaaagtttgccaactcctg

SEQ ID NO: 39792 - DNA, 40 bp, Homo sapiens
aggagttggcaaacttttctataaagggccatatgggtct

SEQ ID NO: 39793 - DNA, 40 bp, Homo sapiens
agacccatatggccctttatagaaaagtttgccaactcct

SEQ ID NO: 39794 - DNA, 40 bp, Homo sapiens
ggagttggcaaacttttctataaagggccatatgggtctt

SEQ ID NO: 39795 - DNA, 40 bp, Homo sapiens
aagacccatatggccctttatagaaaagtttgccaactcc

SEQ ID NO: 39796 - DNA, 40 bp, Homo sapiens
gagttggcaaacttttctataaagggccatatgggtcttt

SEQ ID NO: 39797 - DNA, 40 bp, Homo sapiens
aaagacccatatggccctttatagaaaagtttgccaactc

SEQ ID NO: 39798 - DNA, 40 bp, Homo sapiens
agttggcaaacttttctataaagggccatatgggtctttg

SEQ ID NO: 39799 - DNA, 40 bp, Homo sapiens
caaagacccatatggccctttatagaaaagtttgccaact

SEQ ID NO: 39800 - DNA, 40 bp, Homo sapiens
gttggcaaacttttctataaagggccatatgggtctttgt

SEQ ID NO: 39801 - DNA, 40 bp, Homo sapiens
acaaagacccatatggccctttatagaaaagtttgccaac

SEQ ID NO: 39802 - DNA, 40 bp, Homo sapiens
ttggcaaacttttctataaagggccatatgggtctttgtc

SEQ ID NO: 39803 - DNA, 40 bp, Homo sapiens
gacaaagacccatatggccctttatagaaaagtttgccaa

SEQ ID NO: 39804 - DNA, 40 bp, Homo sapiens
tggcaaacttttctataaagggccatatgggtctttgtca

SEQ ID NO: 39805 - DNA, 40 bp, Homo sapiens
tgacaaagacccatatggccctttatagaaaagtttgcca

SEQ ID NO: 39806 - DNA, 40 bp, Homo sapiens
ggcaaacttttctataaagggccatatgggtctttgtcac

SEQ ID NO: 39807 - DNA, 40 bp, Homo sapiens
gtgacaaagacccatatggccctttatagaaaagtttgcc

SEQ ID NO: 39808 - DNA, 40 bp, Homo sapiens
gcaaacttttctataaagggccatatgggtctttgtcaca

SEQ ID NO: 39809 - DNA, 40 bp, Homo sapiens
tgtgacaaagacccatatggccctttatagaaaagtttgc

SEQ ID NO: 39810 - DNA, 40 bp, Homo sapiens
caaacttttctataaagggccatatgggtctttgtcacaa

SEQ ID NO: 39811 - DNA, 40 bp, Homo sapiens
ttgtgacaaagacccatatggccctttatagaaaagtttg

SEQ ID NO: 39812 - DNA, 40 bp, Homo sapiens
aaacttttctataaagggccatatgggtctttgtcacaaa

SEQ ID NO: 39813 - DNA, 40 bp, Homo sapiens
tttgtgacaaagacccatatggccctttatagaaaagttt

SEQ ID NO: 39814 - DNA, 40 bp, Homo sapiens
aacttttctataaagggccatatgggtctttgtcacaaag

SEQ ID NO: 39815 - DNA, 40 bp, Homo sapiens
ctttgtgacaaagacccatatggccctttatagaaaagtt

SEQ ID NO: 39816 - DNA, 40 bp, Homo sapiens
acttttctataaagggccatatgggtctttgtcacaaagt

SEQ ID NO: 39817 - DNA, 40 bp, Homo sapiens
actttgtgacaaagacccatatggccctttatagaaaagt

SEQ ID NO: 39818 - DNA, 40 bp, Homo sapiens
cttttctataaagggccatatgggtctttgtcacaaagtc

SEQ ID NO: 39819 - DNA, 40 bp, Homo sapiens
gactttgtgacaaagacccatatggccctttatagaaaag

SEQ ID NO: 39820 - DNA, 40 bp, Homo sapiens
ttttctataaagggccatatgggtctttgtcacaaagtct

SEQ ID NO: 39821 - DNA, 40 bp, Homo sapiens
agactttgtgacaaagacccatatggccctttatagaaaa

SEQ ID NO: 39822 - DNA, 40 bp, Homo sapiens
tttctataaagggccatatgggtctttgtcacaaagtctt

SEQ ID NO: 39823 - DNA, 40 bp, Homo sapiens
aagactttgtgacaaagacccatatggccctttatagaaa

SEQ ID NO: 39824 - DNA, 40 bp, Homo sapiens
ttctataaagggccatatgggtctttgtcacaaagtcttg

SEQ ID NO: 39825 - DNA, 40 bp, Homo sapiens
caagactttgtgacaaagacccatatggccctttatagaa

SEQ ID NO: 39826 - DNA, 40 bp, Homo sapiens
tctataaagggccatatgggtctttgtcacaaagtcttgg

SEQ ID NO: 39827 - DNA, 40 bp, Homo sapiens
ccaagactttgtgacaaagacccatatggccctttataga

SEQ ID NO: 39828 - DNA, 40 bp, Homo sapiens
ctataaagggccatatgggtctttgtcacaaagtcttggg

SEQ ID NO: 39829 - DNA, 40 bp, Homo sapiens
cccaagactttgtgacaaagacccatatggccctttatag

SEQ ID NO: 39830 - DNA, 40 bp, Homo sapiens
tataaagggccatatgggtctttgtcacaaagtcttgggt

SEQ ID NO: 39831 - DNA, 40 bp, Homo sapiens
acccaagactttgtgacaaagacccatatggccctttata

SEQ ID NO: 39832 - DNA, 40 bp, Homo sapiens
ataaagggccatatgggtctttgtcacaaagtcttgggtt

SEQ ID NO: 39833 - DNA, 40 bp, Homo sapiens
aacccaagactttgtgacaaagacccatatggccctttat

SEQ ID NO: 39834 - DNA, 40 bp, Homo sapiens
taaagggccatatgggtctttgtcacaaagtcttgggttt

SEQ ID NO: 39835 - DNA, 40 bp, Homo sapiens
aaacccaagactttgtgacaaagacccatatggcccttta

SEQ ID NO: 39836 - DNA, 40 bp, Homo sapiens
aaagggccatatgggtctttgtcacaaagtcttgggtttt

SEQ ID NO: 39837 - DNA, 40 bp, Homo sapiens
aaaacccaagactttgtgacaaagacccatatggcccttt

SEQ ID NO: 39838 - DNA, 40 bp, Homo sapiens
aagggccatatgggtctttgtcacaaagtcttgggttttt

SEQ ID NO: 39839 - DNA, 40 bp, Homo sapiens
aaaaacccaagactttgtgacaaagacccatatggccctt

SEQ ID NO: 39840 - DNA, 40 bp, Homo sapiens
agggccatatgggtctttgtcacaaagtcttgggtttttg

SEQ ID NO: 39841 - DNA, 40 bp, Homo sapiens
caaaaacccaagactttgtgacaaagacccatatggccct

SEQ ID NO: 39842 - DNA, 40 bp, Homo sapiens
gggccatatgggtctttgtcacaaagtcttgggtttttgt

SEQ ID NO: 39843 - DNA, 40 bp, Homo sapiens
acaaaaacccaagactttgtgacaaagacccatatggccc

SEQ ID NO: 39844 - DNA, 40 bp, Homo sapiens
ggccatatgggtctttgtcacaaagtcttgggtttttgtt

SEQ ID NO: 39845 - DNA, 40 bp, Homo sapiens
aacaaaaacccaagactttgtgacaaagacccatatggcc

SEQ ID NO: 39846 - DNA, 40 bp, Homo sapiens
gccatatgggtctttgtcacaaagtcttgggtttttgttt

SEQ ID NO: 39847 - DNA, 40 bp, Homo sapiens
aaacaaaaacccaagactttgtgacaaagacccatatggc

SEQ ID NO: 39848 - DNA, 40 bp, Homo sapiens
ccatatgggtctttgtcacaaagtcttgggtttttgtttt

SEQ ID NO: 39849 - DNA, 40 bp, Homo sapiens
aaaacaaaaacccaagactttgtgacaaagacccatatgg

SEQ ID NO: 39850 - DNA, 40 bp, Homo sapiens
catatgggtctttgtcacaaagtcttgggtttttgttttt

SEQ ID NO: 39851 - DNA, 40 bp, Homo sapiens
aaaaacaaaaacccaagactttgtgacaaagacccatatg

SEQ ID NO: 39852 - DNA, 40 bp, Homo sapiens
atatgggtctttgtcacaaagtcttgggtttttgtttttg

SEQ ID NO: 39853 - DNA, 40 bp, Homo sapiens
caaaaacaaaaacccaagactttgtgacaaagacccatat

SEQ ID NO: 39854 - DNA, 40 bp, Homo sapiens
tatgggtctttgtcacaaagtcttgggtttttgtttttgt

SEQ ID NO: 39855 - DNA, 40 bp, Homo sapiens
acaaaaacaaaaacccaagactttgtgacaaagacccata

SEQ ID NO: 39856 - DNA, 40 bp, Homo sapiens
atgggtctttgtcacaaagtcttgggtttttgtttttgtt

SEQ ID NO: 39857 - DNA, 40 bp, Homo sapiens
aacaaaaacaaaaacccaagactttgtgacaaagacccat

SEQ ID NO: 39858 - DNA, 40 bp, Homo sapiens
tgggtctttgtcacaaagtcttgggtttttgtttttgttt

SEQ ID NO: 39859 - DNA, 40 bp, Homo sapiens
aaacaaaaacaaaaacccaagactttgtgacaaagaccca

SEQ ID NO: 39860 - DNA, 40 bp, Homo sapiens
gggtctttgtcacaaagtcttgggtttttgtttttgtttt

SEQ ID NO: 39861 - DNA, 40 bp, Homo sapiens
aaaacaaaaacaaaaacccaagactttgtgacaaagaccc

SEQ ID NO: 39862 - DNA, 40 bp, Homo sapiens
ggtctttgtcacaaagtcttgggtttttgtttttgttttt

SEQ ID NO: 39863 - DNA, 40 bp, Homo sapiens
aaaaacaaaaacaaaaacccaagactttgtgacaaagacc

SEQ ID NO: 39864 - DNA, 40 bp, Homo sapiens
gtctttgtcacaaagtcttgggtttttgtttttgtttttt

SEQ ID NO: 39865 - DNA, 40 bp, Homo sapiens
aaaaaacaaaaacaaaaacccaagactttgtgacaaagac

SEQ ID NO: 39866 - DNA, 40 bp, Homo sapiens
tctttgtcacaaagtcttgggtttttgtttttgttttttt

SEQ ID NO: 39867 - DNA, 40 bp, Homo sapiens
aaaaaaacaaaaacaaaaacccaagactttgtgacaaaga

SEQ ID NO: 39868 - DNA, 40 bp, Homo sapiens
ctttgtcacaaagtcttgggtttttgtttttgttttttta

SEQ ID NO: 39869 - DNA, 40 bp, Homo sapiens
taaaaaaacaaaaacaaaaacccaagactttgtgacaaag

SEQ ID NO: 39870 - DNA, 40 bp, Homo sapiens
tttgtcacaaagtcttgggtttttgtttttgtttttttaa

SEQ ID NO: 39871 - DNA, 40 bp, Homo sapiens
ttaaaaaaacaaaaacaaaaacccaagactttgtgacaaa

SEQ ID NO: 39872 - DNA, 40 bp, Homo sapiens
ttgtcacaaagtcttgggtttttgtttttgtttttttaaa

SEQ ID NO: 39873 - DNA, 40 bp, Homo sapiens
tttaaaaaaacaaaaacaaaaacccaagactttgtgacaa

SEQ ID NO: 39874 - DNA, 40 bp, Homo sapiens
tgtcacaaagtcttgggtttttgtttttgtttttttaaac

SEQ ID NO: 39875 - DNA, 40 bp, Homo sapiens
gtttaaaaaaacaaaaacaaaaacccaagactttgtgaca

SEQ ID NO: 39876 - DNA, 40 bp, Homo sapiens
gtcacaaagtcttgggtttttgtttttgtttttttaaaca

SEQ ID NO: 39877 - DNA, 40 bp, Homo sapiens
tgtttaaaaaaacaaaaacaaaaacccaagactttgtgac

SEQ ID NO: 39878 - DNA, 40 bp, Homo sapiens
tcacaaagtcttgggtttttgtttttgtttttttaaacag

SEQ ID NO: 39879 - DNA, 40 bp, Homo sapiens
ctgtttaaaaaaacaaaaacaaaaacccaagactttgtga

SEQ ID NO: 39880 - DNA, 40 bp, Homo sapiens
cacaaagtcttgggtttttgtttttgtttttttaaacagc

SEQ ID NO: 39881 - DNA, 40 bp, Homo sapiens
gctgtttaaaaaaacaaaaacaaaaacccaagactttgtg

SEQ ID NO: 39882 - DNA, 40 bp, Homo sapiens
acaaagtcttgggtttttgtttttgtttttttaaacagct

SEQ ID NO: 39883 - DNA, 40 bp, Homo sapiens
agctgtttaaaaaaacaaaaacaaaaacccaagactttgt

SEQ ID NO: 39884 - DNA, 40 bp, Homo sapiens
caaagtcttgggtttttgtttttgtttttttaaacagcta

SEQ ID NO: 39885 - DNA, 40 bp, Homo sapiens
tagctgtttaaaaaaacaaaaacaaaaacccaagactttg

SEQ ID NO: 39886 - DNA, 40 bp, Homo sapiens
aaagtcttgggtttttgtttttgtttttttaaacagctat

SEQ ID NO: 39887 - DNA, 40 bp, Homo sapiens
atagctgtttaaaaaaacaaaaacaaaaacccaagacttt

SEQ ID NO: 39888 - DNA, 40 bp, Homo sapiens
aagtcttgggtttttgtttttgtttttttaaacagctatt

SEQ ID NO: 39889 - DNA, 40 bp, Homo sapiens
aatagctgtttaaaaaaacaaaaacaaaaacccaagactt

SEQ ID NO: 39890 - DNA, 40 bp, Homo sapiens
agtcttgggtttttgtttttgtttttttaaacagctattt

SEQ ID NO: 39891 - DNA, 40 bp, Homo sapiens
aaatagctgtttaaaaaaacaaaaacaaaaacccaagact

SEQ ID NO: 39892 - DNA, 40 bp, Homo sapiens
gtcttgggtttttgtttttgtttttttaaacagctattta

SEQ ID NO: 39893 - DNA, 40 bp, Homo sapiens
taaatagctgtttaaaaaaacaaaaacaaaaacccaagac

SEQ ID NO: 39894 - DNA, 40 bp, Homo sapiens
tcttgggtttttgtttttgtttttttaaacagctatttaa

SEQ ID NO: 39895 - DNA, 40 bp, Homo sapiens
ttaaatagctgtttaaaaaaacaaaaacaaaaacccaaga

SEQ ID NO: 39896 - DNA, 40 bp, Homo sapiens
cttgggtttttgtttttgtttttttaaacagctatttaac

SEQ ID NO: 39897 - DNA, 40 bp, Homo sapiens
gttaaatagctgtttaaaaaaacaaaaacaaaaacccaag

SEQ ID NO: 39898 - DNA, 40 bp, Homo sapiens
ttgggtttttgtttttgtttttttaaacagctatttaact

SEQ ID NO: 39899 - DNA, 40 bp, Homo sapiens
agttaaatagctgtttaaaaaaacaaaaacaaaaacccaa

SEQ ID NO: 39900 - DNA, 40 bp, Homo sapiens
tgggtttttgtttttgtttttttaaacagctatttaacta

SEQ ID NO: 39901 - DNA, 40 bp, Homo sapiens
tagttaaatagctgtttaaaaaaacaaaaacaaaaaccca

SEQ ID NO: 39902 - DNA, 40 bp, Homo sapiens
gggtttttgtttttgtttttttaaacagctatttaactat

SEQ ID NO: 39903 - DNA, 40 bp, Homo sapiens
atagttaaatagctgtttaaaaaaacaaaaacaaaaaccc

SEQ ID NO: 39904 - DNA, 40 bp, Homo sapiens
ggtttttgtttttgtttttttaaacagctatttaactatt

SEQ ID NO: 39905 - DNA, 40 bp, Homo sapiens
aatagttaaatagctgtttaaaaaaacaaaaacaaaaacc

SEQ ID NO: 39906 - DNA, 40 bp, Homo sapiens
gtttttgtttttgtttttttaaacagctatttaactattc

SEQ ID NO: 39907 - DNA, 40 bp, Homo sapiens
gaatagttaaatagctgtttaaaaaaacaaaaacaaaaac

SEQ ID NO: 39908 - DNA, 40 bp, Homo sapiens
tttttgtttttgtttttttaaacagctatttaactattcc

SEQ ID NO: 39909 - DNA, 40 bp, Homo sapiens
ggaatagttaaatagctgtttaaaaaaacaaaaacaaaaa

SEQ ID NO: 39910 - DNA, 40 bp, Homo sapiens
ttttgtttttgtttttttaaacagctatttaactattcct

SEQ ID NO: 39911 - DNA, 40 bp, Homo sapiens
aggaatagttaaatagctgtttaaaaaaacaaaaacaaaa

SEQ ID NO: 39912 - DNA, 40 bp, Homo sapiens
tttgtttttgtttttttaaacagctatttaactattccta

SEQ ID NO: 39913 - DNA, 40 bp, Homo sapiens
taggaatagttaaatagctgtttaaaaaaacaaaaacaaa

SEQ ID NO: 39914 - DNA, 40 bp, Homo sapiens
ttgtttttgtttttttaaacagctatttaactattcctag

SEQ ID NO: 39915 - DNA, 40 bp, Homo sapiens
ctaggaatagttaaatagctgtttaaaaaaacaaaaacaa

SEQ ID NO: 39916 - DNA, 40 bp, Homo sapiens
tgtttttgtttttttaaacagctatttaactattcctagc

SEQ ID NO: 39917 - DNA, 40 bp, Homo sapiens
gctaggaatagttaaatagctgtttaaaaaaacaaaaaca

SEQ ID NO: 39918 - DNA, 40 bp, Homo sapiens
gtttttgtttttttaaacagctatttaactattcctagct

SEQ ID NO: 39919 - DNA, 40 bp, Homo sapiens
agctaggaatagttaaatagctgtttaaaaaaacaaaaac

SEQ ID NO: 39920 - DNA, 40 bp, Homo sapiens
tttttgtttttttaaacagctatttaactattcctagcta

SEQ ID NO: 39921 - DNA, 40 bp, Homo sapiens
tagctaggaatagttaaatagctgtttaaaaaaacaaaaa

SEQ ID NO: 39922 - DNA, 40 bp, Homo sapiens
ttttgtttttttaaacagctatttaactattcctagctaa

SEQ ID NO: 39923 - DNA, 40 bp, Homo sapiens
ttagctaggaatagttaaatagctgtttaaaaaaacaaaa

SEQ ID NO: 39924 - DNA, 40 bp, Homo sapiens
tttgtttttttaaacagctatttaactattcctagctaat

SEQ ID NO: 39925 - DNA, 40 bp, Homo sapiens
attagctaggaatagttaaatagctgtttaaaaaaacaaa

SEQ ID NO: 39926 - DNA, 40 bp, Homo sapiens
ttgtttttttaaacagctatttaactattcctagctaatg

SEQ ID NO: 39927 - DNA, 40 bp, Homo sapiens
cattagctaggaatagttaaatagctgtttaaaaaaacaa

SEQ ID NO: 39928 - DNA, 40 bp, Homo sapiens
tgtttttttaaacagctatttaactattcctagctaatgg

SEQ ID NO: 39929 - DNA, 40 bp, Homo sapiens
ccattagctaggaatagttaaatagctgtttaaaaaaaca

SEQ ID NO: 39930 - DNA, 40 bp, Homo sapiens
gtttttttaaacagctatttaactattcctagctaatggg

SEQ ID NO: 39931 - DNA, 40 bp, Homo sapiens
cccattagctaggaatagttaaatagctgtttaaaaaaac

SEQ ID NO: 39932 - DNA, 40 bp, Homo sapiens
tttttttaaacagctatttaactattcctagctaatgggc

SEQ ID NO: 39933 - DNA, 40 bp, Homo sapiens
gcccattagctaggaatagttaaatagctgtttaaaaaaa

SEQ ID NO: 39934 - DNA, 40 bp, Homo sapiens
ttttttaaacagctatttaactattcctagctaatgggca

SEQ ID NO: 39935 - DNA, 40 bp, Homo sapiens
tgcccattagctaggaatagttaaatagctgtttaaaaaa

SEQ ID NO: 39936 - DNA, 40 bp, Homo sapiens
tttttaaacagctatttaactattcctagctaatgggcaa

SEQ ID NO: 39937 - DNA, 40 bp, Homo sapiens
ttgcccattagctaggaatagttaaatagctgtttaaaaa

SEQ ID NO: 39938 - DNA, 40 bp, Homo sapiens
ttttaaacagctatttaactattcctagctaatgggcaat

SEQ ID NO: 39939 - DNA, 40 bp, Homo sapiens
attgcccattagctaggaatagttaaatagctgtttaaaa

SEQ ID NO: 39940 - DNA, 40 bp, Homo sapiens
tttaaacagctatttaactattcctagctaatgggcaata

SEQ ID NO: 39941 - DNA, 40 bp, Homo sapiens
tattgcccattagctaggaatagttaaatagctgtttaaa

SEQ ID NO: 39942 - DNA, 40 bp, Homo sapiens
ttaaacagctatttaactattcctagctaatgggcaatac

SEQ ID NO: 39943 - DNA, 40 bp, Homo sapiens
gtattgcccattagctaggaatagttaaatagctgtttaa

SEQ ID NO: 39944 - DNA, 40 bp, Homo sapiens
taaacagctatttaactattcctagctaatgggcaataca

SEQ ID NO: 39945 - DNA, 40 bp, Homo sapiens
tgtattgcccattagctaggaatagttaaatagctgttta

SEQ ID NO: 39946 - DNA, 40 bp, Homo sapiens
aaacagctatttaactattcctagctaatgggcaatacaa

SEQ ID NO: 39947 - DNA, 40 bp, Homo sapiens
ttgtattgcccattagctaggaatagttaaatagctgttt

SEQ ID NO: 39948 - DNA, 40 bp, Homo sapiens
aacagctatttaactattcctagctaatgggcaatacaaa

SEQ ID NO: 39949 - DNA, 40 bp, Homo sapiens
tttgtattgcccattagctaggaatagttaaatagctgtt

SEQ ID NO: 39950 - DNA, 40 bp, Homo sapiens
acagctatttaactattcctagctaatgggcaatacaaaa

SEQ ID NO: 39951 - DNA, 40 bp, Homo sapiens
ttttgtattgcccattagctaggaatagttaaatagctgt

SEQ ID NO: 39952 - DNA, 40 bp, Homo sapiens
cagctatttaactattcctagctaatgggcaatacaaaaa

SEQ ID NO: 39953 - DNA, 40 bp, Homo sapiens
tttttgtattgcccattagctaggaatagttaaatagctg

SEQ ID NO: 39954 - DNA, 40 bp, Homo sapiens
agctatttaactattcctagctaatgggcaatacaaaaac

SEQ ID NO: 39955 - DNA, 40 bp, Homo sapiens
gtttttgtattgcccattagctaggaatagttaaatagct

SEQ ID NO: 39956 - DNA, 40 bp, Homo sapiens
gctatttaactattcctagctaatgggcaatacaaaaaca

SEQ ID NO: 39957 - DNA, 40 bp, Homo sapiens
tgtttttgtattgcccattagctaggaatagttaaatagc

SEQ ID NO: 39958 - DNA, 40 bp, Homo sapiens
ctatttaactattcctagctaatgggcaatacaaaaacag

SEQ ID NO: 39959 - DNA, 40 bp, Homo sapiens
ctgtttttgtattgcccattagctaggaatagttaaatag

SEQ ID NO: 39960 - DNA, 40 bp, Homo sapiens
tatttaactattcctagctaatgggcaatacaaaaacagt

SEQ ID NO: 39961 - DNA, 40 bp, Homo sapiens
actgtttttgtattgcccattagctaggaatagttaaata

SEQ ID NO: 39962 - DNA, 40 bp, Homo sapiens
atttaactattcctagctaatgggcaatacaaaaacagtg

SEQ ID NO: 39963 - DNA, 40 bp, Homo sapiens
cactgtttttgtattgcccattagctaggaatagttaaat

SEQ ID NO: 39964 - DNA, 40 bp, Homo sapiens
tttaactattcctagctaatgggcaatacaaaaacagtgg

SEQ ID NO: 39965 - DNA, 40 bp, Homo sapiens
ccactgtttttgtattgcccattagctaggaatagttaaa

SEQ ID NO: 39966 - DNA, 40 bp, Homo sapiens
ttaactattcctagctaatgggcaatacaaaaacagtggg

SEQ ID NO: 39967 - DNA, 40 bp, Homo sapiens
cccactgtttttgtattgcccattagctaggaatagttaa

SEQ ID NO: 39968 - DNA, 40 bp, Homo sapiens
taactattcctagctaatgggcaatacaaaaacagtgggc

SEQ ID NO: 39969 - DNA, 40 bp, Homo sapiens
gcccactgtttttgtattgcccattagctaggaatagtta

SEQ ID NO: 39970 - DNA, 40 bp, Homo sapiens
aactattcctagctaatgggcaatacaaaaacagtgggca

SEQ ID NO: 39971 - DNA, 40 bp, Homo sapiens
tgcccactgtttttgtattgcccattagctaggaatagtt

SEQ ID NO: 39972 - DNA, 40 bp, Homo sapiens
actattcctagctaatgggcaatacaaaaacagtgggcaa

SEQ ID NO: 39973 - DNA, 40 bp, Homo sapiens
ttgcccactgtttttgtattgcccattagctaggaatagt

SEQ ID NO: 39974 - DNA, 40 bp, Homo sapiens
ctattcctagctaatgggcaatacaaaaacagtgggcaag

SEQ ID NO: 39975 - DNA, 40 bp, Homo sapiens
cttgcccactgtttttgtattgcccattagctaggaatag

SEQ ID NO: 39976 - DNA, 40 bp, Homo sapiens
tattcctagctaatgggcaatacaaaaacagtgggcaaga

SEQ ID NO: 39977 - DNA, 40 bp, Homo sapiens
tcttgcccactgtttttgtattgcccattagctaggaata

SEQ ID NO: 39978 - DNA, 40 bp, Homo sapiens
attcctagctaatgggcaatacaaaaacagtgggcaagat

SEQ ID NO: 39979 - DNA, 40 bp, Homo sapiens
atcttgcccactgtttttgtattgcccattagctaggaat

SEQ ID NO: 39980 - DNA, 40 bp, Homo sapiens
ttcctagctaatgggcaatacaaaaacagtgggcaagatt

SEQ ID NO: 39981 - DNA, 40 bp, Homo sapiens
aatcttgcccactgtttttgtattgcccattagctaggaa

SEQ ID NO: 39982 - DNA, 40 bp, Homo sapiens
tcctagctaatgggcaatacaaaaacagtgggcaagattt

SEQ ID NO: 39983 - DNA, 40 bp, Homo sapiens
aaatcttgcccactgtttttgtattgcccattagctagga

SEQ ID NO: 39984 - DNA, 40 bp, Homo sapiens
cctagctaatgggcaatacaaaaacagtgggcaagatttg

SEQ ID NO: 39985 - DNA, 40 bp, Homo sapiens
caaatcttgcccactgtttttgtattgcccattagctagg

SEQ ID NO: 39986 - DNA, 40 bp, Homo sapiens
ctagctaatgggcaatacaaaaacagtgggcaagatttgg

SEQ ID NO: 39987 - DNA, 40 bp, Homo sapiens
ccaaatcttgcccactgtttttgtattgcccattagctag

SEQ ID NO: 39988 - DNA, 40 bp, Homo sapiens
tagctaatgggcaatacaaaaacagtgggcaagatttggc

SEQ ID NO: 39989 - DNA, 40 bp, Homo sapiens
gccaaatcttgcccactgtttttgtattgcccattagcta

SEQ ID NO: 39990 - DNA, 40 bp, Homo sapiens
agctaatgggcaatacaaaaacagtgggcaagatttggcc

SEQ ID NO: 39991 - DNA, 40 bp, Homo sapiens
ggccaaatcttgcccactgtttttgtattgcccattagct

SEQ ID NO: 39992 - DNA, 40 bp, Homo sapiens
gctaatgggcaatacaaaaacagtgggcaagatttggcct

SEQ ID NO: 39993 - DNA, 40 bp, Homo sapiens
aggccaaatcttgcccactgtttttgtattgcccattagc

SEQ ID NO: 39994 - DNA, 40 bp, Homo sapiens
ctaatgggcaatacaaaaacagtgggcaagatttggcctg

SEQ ID NO: 39995 - DNA, 40 bp, Homo sapiens
caggccaaatcttgcccactgtttttgtattgcccattag

SEQ ID NO: 39996 - DNA, 40 bp, Homo sapiens
taatgggcaatacaaaaacagtgggcaagatttggcctgt

SEQ ID NO: 39997 - DNA, 40 bp, Homo sapiens
acaggccaaatcttgcccactgtttttgtattgcccatta

SEQ ID NO: 39998 - DNA, 40 bp, Homo sapiens
aatgggcaatacaaaaacagtgggcaagatttggcctgtg

SEQ ID NO: 39999 - DNA, 40 bp, Homo sapiens
cacaggccaaatcttgcccactgtttttgtattgcccatt

SEQ ID NO: 40000 - DNA, 40 bp, Homo sapiens
atgggcaatacaaaaacagtgggcaagatttggcctgtgg

SEQ ID NO: 40001 - DNA, 40 bp, Homo sapiens
ccacaggccaaatcttgcccactgtttttgtattgcccat

SEQ ID NO: 40002 - DNA, 40 bp, Homo sapiens
tgggcaatacaaaaacagtgggcaagatttggcctgtggg

SEQ ID NO: 40003 - DNA, 40 bp, Homo sapiens
cccacaggccaaatcttgcccactgtttttgtattgccca

SEQ ID NO: 40004 - DNA, 40 bp, Homo sapiens
gggcaatacaaaaacagtgggcaagatttggcctgtgggc

SEQ ID NO: 40005 - DNA, 40 bp, Homo sapiens
gcccacaggccaaatcttgcccactgtttttgtattgccc

SEQ ID NO: 40006 - DNA, 40 bp, Homo sapiens
ggcaatacaaaaacagtgggcaagatttggcctgtgggca

SEQ ID NO: 40007 - DNA, 40 bp, Homo sapiens
tgcccacaggccaaatcttgcccactgtttttgtattgcc

SEQ ID NO: 40008 - DNA, 40 bp, Homo sapiens
gcaatacaaaaacagtgggcaagatttggcctgtgggcag

SEQ ID NO: 40009 - DNA, 40 bp, Homo sapiens
ctgcccacaggccaaatcttgcccactgtttttgtattgc

SEQ ID NO: 40010 - DNA, 40 bp, Homo sapiens
caatacaaaaacagtgggcaagatttggcctgtgggcagt

SEQ ID NO: 40011 - DNA, 40 bp, Homo sapiens
actgcccacaggccaaatcttgcccactgtttttgtattg

SEQ ID NO: 40012 - DNA, 40 bp, Homo sapiens
aatacaaaaacagtgggcaagatttggcctgtgggcagta

SEQ ID NO: 40013 - DNA, 40 bp, Homo sapiens
tactgcccacaggccaaatcttgcccactgtttttgtatt

SEQ ID NO: 40014 - DNA, 40 bp, Homo sapiens
atacaaaaacagtgggcaagatttggcctgtgggcagtag

SEQ ID NO: 40015 - DNA, 40 bp, Homo sapiens
ctactgcccacaggccaaatcttgcccactgtttttgtat

SEQ ID NO: 40016 - DNA, 40 bp, Homo sapiens
tacaaaaacagtgggcaagatttggcctgtgggcagtagc

SEQ ID NO: 40017 - DNA, 40 bp, Homo sapiens
gctactgcccacaggccaaatcttgcccactgtttttgta

SEQ ID NO: 40018 - DNA, 40 bp, Homo sapiens
acaaaaacagtgggcaagatttggcctgtgggcagtagct

SEQ ID NO: 40019 - DNA, 40 bp, Homo sapiens
agctactgcccacaggccaaatcttgcccactgtttttgt

SEQ ID NO: 40020 - DNA, 40 bp, Homo sapiens
caaaaacagtgggcaagatttggcctgtgggcagtagctt

SEQ ID NO: 40021 - DNA, 40 bp, Homo sapiens
aagctactgcccacaggccaaatcttgcccactgtttttg

SEQ ID NO: 40022 - DNA, 40 bp, Homo sapiens
aaaaacagtgggcaagatttggcctgtgggcagtagcttg

SEQ ID NO: 40023 - DNA, 40 bp, Homo sapiens
caagctactgcccacaggccaaatcttgcccactgttttt

SEQ ID NO: 40024 - DNA, 40 bp, Homo sapiens
aaaacagtgggcaagatttggcctgtgggcagtagcttgc

SEQ ID NO: 40025 - DNA, 40 bp, Homo sapiens
gcaagctactgcccacaggccaaatcttgcccactgtttt

SEQ ID NO: 40026 - DNA, 40 bp, Homo sapiens
aaacagtgggcaagatttggcctgtgggcagtagcttgct

SEQ ID NO: 40027 - DNA, 40 bp, Homo sapiens
agcaagctactgcccacaggccaaatcttgcccactgttt

SEQ ID NO: 40028 - DNA, 40 bp, Homo sapiens
aacagtgggcaagatttggcctgtgggcagtagcttgctg

SEQ ID NO: 40029 - DNA, 40 bp, Homo sapiens
cagcaagctactgcccacaggccaaatcttgcccactgtt

SEQ ID NO: 40030 - DNA, 40 bp, Homo sapiens
acagtgggcaagatttggcctgtgggcagtagcttgctga

SEQ ID NO: 40031 - DNA, 40 bp, Homo sapiens
tcagcaagctactgcccacaggccaaatcttgcccactgt

SEQ ID NO: 40032 - DNA, 40 bp, Homo sapiens
cagtgggcaagatttggcctgtgggcagtagcttgctgaa

SEQ ID NO: 40033 - DNA, 40 bp, Homo sapiens
ttcagcaagctactgcccacaggccaaatcttgcccactg

SEQ ID NO: 40034 - DNA, 40 bp, Homo sapiens
agtgggcaagatttggcctgtgggcagtagcttgctgaaa

SEQ ID NO: 40035 - DNA, 40 bp, Homo sapiens
tttcagcaagctactgcccacaggccaaatcttgcccact

SEQ ID NO: 40036 - DNA, 40 bp, Homo sapiens
gtgggcaagatttggcctgtgggcagtagcttgctgaaac

SEQ ID NO: 40037 - DNA, 40 bp, Homo sapiens
gtttcagcaagctactgcccacaggccaaatcttgcccac

SEQ ID NO: 40038 - DNA, 40 bp, Homo sapiens
tgggcaagatttggcctgtgggcagtagcttgctgaaacc

SEQ ID NO: 40039 - DNA, 40 bp, Homo sapiens
ggtttcagcaagctactgcccacaggccaaatcttgccca

SEQ ID NO: 40040 - DNA, 40 bp, Homo sapiens
gggcaagatttggcctgtgggcagtagcttgctgaaacct

SEQ ID NO: 40041 - DNA, 40 bp, Homo sapiens
aggtttcagcaagctactgcccacaggccaaatcttgccc

SEQ ID NO: 40042 - DNA, 40 bp, Homo sapiens
ggcaagatttggcctgtgggcagtagcttgctgaaacctt

SEQ ID NO: 40043 - DNA, 40 bp, Homo sapiens
aaggtttcagcaagctactgcccacaggccaaatcttgcc

SEQ ID NO: 40044 - DNA, 40 bp, Homo sapiens
gcaagatttggcctgtgggcagtagcttgctgaaacctta

SEQ ID NO: 40045 - DNA, 40 bp, Homo sapiens
taaggtttcagcaagctactgcccacaggccaaatcttgc

SEQ ID NO: 40046 - DNA, 40 bp, Homo sapiens
caagatttggcctgtgggcagtagcttgctgaaaccttat

SEQ ID NO: 40047 - DNA, 40 bp, Homo sapiens
ataaggtttcagcaagctactgcccacaggccaaatcttg

SEQ ID NO: 40048 - DNA, 40 bp, Homo sapiens
aagatttggcctgtgggcagtagcttgctgaaaccttatt

SEQ ID NO: 40049 - DNA, 40 bp, Homo sapiens
aataaggtttcagcaagctactgcccacaggccaaatctt

SEQ ID NO: 40050 - DNA, 40 bp, Homo sapiens
agatttggcctgtgggcagtagcttgctgaaaccttattt

SEQ ID NO: 40051 - DNA, 40 bp, Homo sapiens
aaataaggtttcagcaagctactgcccacaggccaaatct

SEQ ID NO: 40052 - DNA, 40 bp, Homo sapiens
gatttggcctgtgggcagtagcttgctgaaaccttattta

SEQ ID NO: 40053 - DNA, 40 bp, Homo sapiens
taaataaggtttcagcaagctactgcccacaggccaaatc

SEQ ID NO: 40054 - DNA, 40 bp, Homo sapiens
atttggcctgtgggcagtagcttgctgaaaccttatttag

SEQ ID NO: 40055 - DNA, 40 bp, Homo sapiens
ctaaataaggtttcagcaagctactgcccacaggccaaat

SEQ ID NO: 40056 - DNA, 40 bp, Homo sapiens
tttggcctgtgggcagtagcttgctgaaaccttatttaga

SEQ ID NO: 40057 - DNA, 40 bp, Homo sapiens
tctaaataaggtttcagcaagctactgcccacaggccaaa

SEQ ID NO: 40058 - DNA, 40 bp, Homo sapiens
ttggcctgtgggcagtagcttgctgaaaccttatttagac

SEQ ID NO: 40059 - DNA, 40 bp, Homo sapiens
gtctaaataaggtttcagcaagctactgcccacaggccaa

SEQ ID NO: 40060 - DNA, 40 bp, Homo sapiens
tggcctgtgggcagtagcttgctgaaaccttatttagact

SEQ ID NO: 40061 - DNA, 40 bp, Homo sapiens
agtctaaataaggtttcagcaagctactgcccacaggcca

SEQ ID NO: 40062 - DNA, 40 bp, Homo sapiens
ggcctgtgggcagtagcttgctgaaaccttatttagactc

SEQ ID NO: 40063 - DNA, 40 bp, Homo sapiens
gagtctaaataaggtttcagcaagctactgcccacaggcc

SEQ ID NO: 40064 - DNA, 40 bp, Homo sapiens
gcctgtgggcagtagcttgctgaaaccttatttagactct

SEQ ID NO: 40065 - DNA, 40 bp, Homo sapiens
agagtctaaataaggtttcagcaagctactgcccacaggc

SEQ ID NO: 40066 - DNA, 40 bp, Homo sapiens
cctgtgggcagtagcttgctgaaaccttatttagactcta

SEQ ID NO: 40067 - DNA, 40 bp, Homo sapiens
tagagtctaaataaggtttcagcaagctactgcccacagg

SEQ ID NO: 40068 - DNA, 40 bp, Homo sapiens
ctgtgggcagtagcttgctgaaaccttatttagactctaa

SEQ ID NO: 40069 - DNA, 40 bp, Homo sapiens
ttagagtctaaataaggtttcagcaagctactgcccacag

SEQ ID NO: 40070 - DNA, 40 bp, Homo sapiens
tgtgggcagtagcttgctgaaaccttatttagactctaaa

SEQ ID NO: 40071 - DNA, 40 bp, Homo sapiens
tttagagtctaaataaggtttcagcaagctactgcccaca

SEQ ID NO: 40072 - DNA, 40 bp, Homo sapiens
gtgggcagtagcttgctgaaaccttatttagactctaaat

SEQ ID NO: 40073 - DNA, 40 bp, Homo sapiens
atttagagtctaaataaggtttcagcaagctactgcccac

SEQ ID NO: 40074 - DNA, 40 bp, Homo sapiens
tgggcagtagcttgctgaaaccttatttagactctaaatt

SEQ ID NO: 40075 - DNA, 40 bp, Homo sapiens
aatttagagtctaaataaggtttcagcaagctactgccca

SEQ ID NO: 40076 - DNA, 40 bp, Homo sapiens
gggcagtagcttgctgaaaccttatttagactctaaattt

SEQ ID NO: 40077 - DNA, 40 bp, Homo sapiens
aaatttagagtctaaataaggtttcagcaagctactgccc

SEQ ID NO: 40078 - DNA, 40 bp, Homo sapiens
ggcagtagcttgctgaaaccttatttagactctaaatttt

SEQ ID NO: 40079 - DNA, 40 bp, Homo sapiens
aaaatttagagtctaaataaggtttcagcaagctactgcc

SEQ ID NO: 40080 - DNA, 40 bp, Homo sapiens
gcagtagcttgctgaaaccttatttagactctaaattttt

SEQ ID NO: 40081 - DNA, 40 bp, Homo sapiens
aaaaatttagagtctaaataaggtttcagcaagctactgc

SEQ ID NO: 40082 - DNA, 40 bp, Homo sapiens
cagtagcttgctgaaaccttatttagactctaaatttttt

SEQ ID NO: 40083 - DNA, 40 bp, Homo sapiens
aaaaaatttagagtctaaataaggtttcagcaagctactg

SEQ ID NO: 40084 - DNA, 40 bp, Homo sapiens
agtagcttgctgaaaccttatttagactctaaattttttg

SEQ ID NO: 40085 - DNA, 40 bp, Homo sapiens
caaaaaatttagagtctaaataaggtttcagcaagctact

SEQ ID NO: 40086 - DNA, 40 bp, Homo sapiens
gtagcttgctgaaaccttatttagactctaaattttttga

SEQ ID NO: 40087 - DNA, 40 bp, Homo sapiens
tcaaaaaatttagagtctaaataaggtttcagcaagctac

SEQ ID NO: 40088 - DNA, 40 bp, Homo sapiens
tagcttgctgaaaccttatttagactctaaattttttgaa

SEQ ID NO: 40089 - DNA, 40 bp, Homo sapiens
ttcaaaaaatttagagtctaaataaggtttcagcaagcta

SEQ ID NO: 40090 - DNA, 40 bp, Homo sapiens
agcttgctgaaaccttatttagactctaaattttttgaaa

SEQ ID NO: 40091 - DNA, 40 bp, Homo sapiens
tttcaaaaaatttagagtctaaataaggtttcagcaagct

SEQ ID NO: 40092 - DNA, 40 bp, Homo sapiens
gcttgctgaaaccttatttagactctaaattttttgaaag

SEQ ID NO: 40093 - DNA, 40 bp, Homo sapiens
ctttcaaaaaatttagagtctaaataaggtttcagcaagc

SEQ ID NO: 40094 - DNA, 40 bp, Homo sapiens
cttgctgaaaccttatttagactctaaattttttgaaaga

SEQ ID NO: 40095 - DNA, 40 bp, Homo sapiens
tctttcaaaaaatttagagtctaaataaggtttcagcaag

SEQ ID NO: 40096 - DNA, 40 bp, Homo sapiens
ttgctgaaaccttatttagactctaaattttttgaaagag

SEQ ID NO: 40097 - DNA, 40 bp, Homo sapiens
ctctttcaaaaaatttagagtctaaataaggtttcagcaa

SEQ ID NO: 40098 - DNA, 40 bp, Homo sapiens
tgctgaaaccttatttagactctaaattttttgaaagagt

SEQ ID NO: 40099 - DNA, 40 bp, Homo sapiens
actctttcaaaaaatttagagtctaaataaggtttcagca

SEQ ID NO: 40100 - DNA, 40 bp, Homo sapiens
gctgaaaccttatttagactctaaattttttgaaagagtc

SEQ ID NO: 40101 - DNA, 40 bp, Homo sapiens
gactctttcaaaaaatttagagtctaaataaggtttcagc

SEQ ID NO: 40102 - DNA, 40 bp, Homo sapiens
ctgaaaccttatttagactctaaattttttgaaagagtct

SEQ ID NO: 40103 - DNA, 40 bp, Homo sapiens
agactctttcaaaaaatttagagtctaaataaggtttcag

SEQ ID NO: 40104 - DNA, 40 bp, Homo sapiens
tgaaaccttatttagactctaaattttttgaaagagtcta

SEQ ID NO: 40105 - DNA, 40 bp, Homo sapiens
tagactctttcaaaaaatttagagtctaaataaggtttca

SEQ ID NO: 40106 - DNA, 40 bp, Homo sapiens
gaaaccttatttagactctaaattttttgaaagagtctac

SEQ ID NO: 40107 - DNA, 40 bp, Homo sapiens
gtagactctttcaaaaaatttagagtctaaataaggtttc

SEQ ID NO: 40108 - DNA, 40 bp, Homo sapiens
aaaccttatttagactctaaattttttgaaagagtctaca

SEQ ID NO: 40109 - DNA, 40 bp, Homo sapiens
tgtagactctttcaaaaaatttagagtctaaataaggttt

SEQ ID NO: 40110 - DNA, 40 bp, Homo sapiens
aaccttatttagactctaaattttttgaaagagtctacat

SEQ ID NO: 40111 - DNA, 40 bp, Homo sapiens
atgtagactctttcaaaaaatttagagtctaaataaggtt

SEQ ID NO: 40112 - DNA, 40 bp, Homo sapiens
accttatttagactctaaattttttgaaagagtctacatt

SEQ ID NO: 40113 - DNA, 40 bp, Homo sapiens
aatgtagactctttcaaaaaatttagagtctaaataaggt

SEQ ID NO: 40114 - DNA, 40 bp, Homo sapiens
ccttatttagactctaaattttttgaaagagtctacattg

SEQ ID NO: 40115 - DNA, 40 bp, Homo sapiens
caatgtagactctttcaaaaaatttagagtctaaataagg

SEQ ID NO: 40116 - DNA, 40 bp, Homo sapiens
cttatttagactctaaattttttgaaagagtctacattga

SEQ ID NO: 40117 - DNA, 40 bp, Homo sapiens
tcaatgtagactctttcaaaaaatttagagtctaaataag

SEQ ID NO: 40118 - DNA, 40 bp, Homo sapiens
ttatttagactctaaattttttgaaagagtctacattgat

SEQ ID NO: 40119 - DNA, 40 bp, Homo sapiens
atcaatgtagactctttcaaaaaatttagagtctaaataa

SEQ ID NO: 40120 - DNA, 40 bp, Homo sapiens
tatttagactctaaattttttgaaagagtctacattgatg

SEQ ID NO: 40121 - DNA, 40 bp, Homo sapiens
catcaatgtagactctttcaaaaaatttagagtctaaata

SEQ ID NO: 40122 - DNA, 40 bp, Homo sapiens
atttagactctaaattttttgaaagagtctacattgatgc

SEQ ID NO: 40123 - DNA, 40 bp, Homo sapiens
gcatcaatgtagactctttcaaaaaatttagagtctaaat

SEQ ID NO: 40124 - DNA, 40 bp, Homo sapiens
tttagactctaaattttttgaaagagtctacattgatgca

SEQ ID NO: 40125 - DNA, 40 bp, Homo sapiens
tgcatcaatgtagactctttcaaaaaatttagagtctaaa

SEQ ID NO: 40126 - DNA, 40 bp, Homo sapiens
ttagactctaaattttttgaaagagtctacattgatgcat

SEQ ID NO: 40127 - DNA, 40 bp, Homo sapiens
atgcatcaatgtagactctttcaaaaaatttagagtctaa

SEQ ID NO: 40128 - DNA, 40 bp, Homo sapiens
tagactctaaattttttgaaagagtctacattgatgcata

SEQ ID NO: 40129 - DNA, 40 bp, Homo sapiens
tatgcatcaatgtagactctttcaaaaaatttagagtcta

SEQ ID NO: 40130 - DNA, 40 bp, Homo sapiens
agactctaaattttttgaaagagtctacattgatgcatat

SEQ ID NO: 40131 - DNA, 40 bp, Homo sapiens
atatgcatcaatgtagactctttcaaaaaatttagagtct

SEQ ID NO: 40132 - DNA, 40 bp, Homo sapiens
gactctaaattttttgaaagagtctacattgatgcatatt

SEQ ID NO: 40133 - DNA, 40 bp, Homo sapiens
aatatgcatcaatgtagactctttcaaaaaatttagagtc

SEQ ID NO: 40134 - DNA, 40 bp, Homo sapiens
actctaaattttttgaaagagtctacattgatgcatattt

SEQ ID NO: 40135 - DNA, 40 bp, Homo sapiens
aaatatgcatcaatgtagactctttcaaaaaatttagagt

SEQ ID NO: 40136 - DNA, 40 bp, Homo sapiens
ctctaaattttttgaaagagtctacattgatgcatatttt

SEQ ID NO: 40137 - DNA, 40 bp, Homo sapiens
aaaatatgcatcaatgtagactctttcaaaaaatttagag

SEQ ID NO: 40138 - DNA, 40 bp, Homo sapiens
tctaaattttttgaaagagtctacattgatgcatattttt

SEQ ID NO: 40139 - DNA, 40 bp, Homo sapiens
aaaaatatgcatcaatgtagactctttcaaaaaatttaga

SEQ ID NO: 40140 - DNA, 40 bp, Homo sapiens
ctaaattttttgaaagagtctacattgatgcatatttttt

SEQ ID NO: 40141 - DNA, 40 bp, Homo sapiens
aaaaaatatgcatcaatgtagactctttcaaaaaatttag

SEQ ID NO: 40142 - DNA, 40 bp, Homo sapiens
taaattttttgaaagagtctacattgatgcatattttttt

SEQ ID NO: 40143 - DNA, 40 bp, Homo sapiens
aaaaaaatatgcatcaatgtagactctttcaaaaaattta

SEQ ID NO: 40144 - DNA, 40 bp, Homo sapiens
aaattttttgaaagagtctacattgatgcatatttttttt

SEQ ID NO: 40145 - DNA, 40 bp, Homo sapiens
aaaaaaaatatgcatcaatgtagactctttcaaaaaattt

SEQ ID NO: 40146 - DNA, 40 bp, Homo sapiens
aattttttgaaagagtctacattgatgcatattttttttt

SEQ ID NO: 40147 - DNA, 40 bp, Homo sapiens
aaaaaaaaatatgcatcaatgtagactctttcaaaaaatt

SEQ ID NO: 40148 - DNA, 40 bp, Homo sapiens
attttttgaaagagtctacattgatgcatatttttttttc

SEQ ID NO: 40149 - DNA, 40 bp, Homo sapiens
gaaaaaaaaatatgcatcaatgtagactctttcaaaaaat

SEQ ID NO: 40150 - DNA, 40 bp, Homo sapiens
ttttttgaaagagtctacattgatgcatatttttttttct

SEQ ID NO: 40151 - DNA, 40 bp, Homo sapiens
agaaaaaaaaatatgcatcaatgtagactctttcaaaaaa

SEQ ID NO: 40152 - DNA, 40 bp, Homo sapiens
tttttgaaagagtctacattgatgcatatttttttttctt

SEQ ID NO: 40153 - DNA, 40 bp, Homo sapiens
aagaaaaaaaaatatgcatcaatgtagactctttcaaaaa

SEQ ID NO: 40154 - DNA, 40 bp, Homo sapiens
ttttgaaagagtctacattgatgcatatttttttttcttc

SEQ ID NO: 40155 - DNA, 40 bp, Homo sapiens
gaagaaaaaaaaatatgcatcaatgtagactctttcaaaa

SEQ ID NO: 40156 - DNA, 40 bp, Homo sapiens
tttgaaagagtctacattgatgcatatttttttttcttcc

SEQ ID NO: 40157 - DNA, 40 bp, Homo sapiens
ggaagaaaaaaaaatatgcatcaatgtagactctttcaaa

SEQ ID NO: 40158 - DNA, 40 bp, Homo sapiens
ttgaaagagtctacattgatgcatatttttttttcttcct

SEQ ID NO: 40159 - DNA, 40 bp, Homo sapiens
aggaagaaaaaaaaatatgcatcaatgtagactctttcaa

SEQ ID NO: 40160 - DNA, 40 bp, Homo sapiens
tgaaagagtctacattgatgcatatttttttttcttcctc

SEQ ID NO: 40161 - DNA, 40 bp, Homo sapiens
gaggaagaaaaaaaaatatgcatcaatgtagactctttca

SEQ ID NO: 40162 - DNA, 40 bp, Homo sapiens
gaaagagtctacattgatgcatatttttttttcttcctcc

SEQ ID NO: 40163 - DNA, 40 bp, Homo sapiens
ggaggaagaaaaaaaaatatgcatcaatgtagactctttc

SEQ ID NO: 40164 - DNA, 40 bp, Homo sapiens
aaagagtctacattgatgcatatttttttttcttcctcca

SEQ ID NO: 40165 - DNA, 40 bp, Homo sapiens
tggaggaagaaaaaaaaatatgcatcaatgtagactcttt

SEQ ID NO: 40166 - DNA, 40 bp, Homo sapiens
aagagtctacattgatgcatatttttttttcttcctccaa

SEQ ID NO: 40167 - DNA, 40 bp, Homo sapiens
ttggaggaagaaaaaaaaatatgcatcaatgtagactctt

SEQ ID NO: 40168 - DNA, 40 bp, Homo sapiens
agagtctacattgatgcatatttttttttcttcctccaaa

SEQ ID NO: 40169 - DNA, 40 bp, Homo sapiens
tttggaggaagaaaaaaaaatatgcatcaatgtagactct

SEQ ID NO: 40170 - DNA, 40 bp, Homo sapiens
gagtctacattgatgcatatttttttttcttcctccaaat

SEQ ID NO: 40171 - DNA, 40 bp, Homo sapiens
atttggaggaagaaaaaaaaatatgcatcaatgtagactc

SEQ ID NO: 40172 - DNA, 40 bp, Homo sapiens
agtctacattgatgcatatttttttttcttcctccaaata

SEQ ID NO: 40173 - DNA, 40 bp, Homo sapiens
tatttggaggaagaaaaaaaaatatgcatcaatgtagact

SEQ ID NO: 40174 - DNA, 40 bp, Homo sapiens
gtctacattgatgcatatttttttttcttcctccaaatac

SEQ ID NO: 40175 - DNA, 40 bp, Homo sapiens
gtatttggaggaagaaaaaaaaatatgcatcaatgtagac

SEQ ID NO: 40176 - DNA, 40 bp, Homo sapiens
tctacattgatgcatatttttttttcttcctccaaataca

SEQ ID NO: 40177 - DNA, 40 bp, Homo sapiens
tgtatttggaggaagaaaaaaaaatatgcatcaatgtaga

SEQ ID NO: 40178 - DNA, 40 bp, Homo sapiens
ctacattgatgcatatttttttttcttcctccaaatacag

SEQ ID NO: 40179 - DNA, 40 bp, Homo sapiens
ctgtatttggaggaagaaaaaaaaatatgcatcaatgtag

SEQ ID NO: 40180 - DNA, 40 bp, Homo sapiens
tacattgatgcatatttttttttcttcctccaaatacagt

SEQ ID NO: 40181 - DNA, 40 bp, Homo sapiens
actgtatttggaggaagaaaaaaaaatatgcatcaatgta

SEQ ID NO: 40182 - DNA, 40 bp, Homo sapiens
acattgatgcatatttttttttcttcctccaaatacagtt

SEQ ID NO: 40183 - DNA, 40 bp, Homo sapiens
aactgtatttggaggaagaaaaaaaaatatgcatcaatgt

SEQ ID NO: 40184 - DNA, 40 bp, Homo sapiens
cattgatgcatatttttttttcttcctccaaatacagttg

SEQ ID NO: 40185 - DNA, 40 bp, Homo sapiens
caactgtatttggaggaagaaaaaaaaatatgcatcaatg

SEQ ID NO: 40186 - DNA, 40 bp, Homo sapiens
attgatgcatatttttttttcttcctccaaatacagttga

SEQ ID NO: 40187 - DNA, 40 bp, Homo sapiens
tcaactgtatttggaggaagaaaaaaaaatatgcatcaat

SEQ ID NO: 40188 - DNA, 40 bp, Homo sapiens
ttgatgcatatttttttttcttcctccaaatacagttgac

SEQ ID NO: 40189 - DNA, 40 bp, Homo sapiens
gtcaactgtatttggaggaagaaaaaaaaatatgcatcaa

SEQ ID NO: 40190 - DNA, 40 bp, Homo sapiens
tgatgcatatttttttttcttcctccaaatacagttgacc

SEQ ID NO: 40191 - DNA, 40 bp, Homo sapiens
ggtcaactgtatttggaggaagaaaaaaaaatatgcatca

SEQ ID NO: 40192 - DNA, 40 bp, Homo sapiens
gatgcatatttttttttcttcctccaaatacagttgaccc

SEQ ID NO: 40193 - DNA, 40 bp, Homo sapiens
gggtcaactgtatttggaggaagaaaaaaaaatatgcatc

SEQ ID NO: 40194 - DNA, 40 bp, Homo sapiens
atgcatatttttttttcttcctccaaatacagttgaccct

SEQ ID NO: 40195 - DNA, 40 bp, Homo sapiens
agggtcaactgtatttggaggaagaaaaaaaaatatgcat

SEQ ID NO: 40196 - DNA, 40 bp, Homo sapiens
tgcatatttttttttcttcctccaaatacagttgaccctt

SEQ ID NO: 40197 - DNA, 40 bp, Homo sapiens
aagggtcaactgtatttggaggaagaaaaaaaaatatgca

SEQ ID NO: 40198 - DNA, 40 bp, Homo sapiens
gcatatttttttttcttcctccaaatacagttgacccttg

SEQ ID NO: 40199 - DNA, 40 bp, Homo sapiens
caagggtcaactgtatttggaggaagaaaaaaaaatatgc

SEQ ID NO: 40200 - DNA, 40 bp, Homo sapiens
catatttttttttcttcctccaaatacagttgacccttga

SEQ ID NO: 40201 - DNA, 40 bp, Homo sapiens
tcaagggtcaactgtatttggaggaagaaaaaaaaatatg

SEQ ID NO: 40202 - DNA, 40 bp, Homo sapiens
atatttttttttcttcctccaaatacagttgacccttgaa

SEQ ID NO: 40203 - DNA, 40 bp, Homo sapiens
ttcaagggtcaactgtatttggaggaagaaaaaaaaatat

SEQ ID NO: 40204 - DNA, 40 bp, Homo sapiens
tatttttttttcttcctccaaatacagttgacccttgaac

SEQ ID NO: 40205 - DNA, 40 bp, Homo sapiens
gttcaagggtcaactgtatttggaggaagaaaaaaaaata

SEQ ID NO: 40206 - DNA, 40 bp, Homo sapiens
atttttttttcttcctccaaatacagttgacccttgaaca

SEQ ID NO: 40207 - DNA, 40 bp, Homo sapiens
tgttcaagggtcaactgtatttggaggaagaaaaaaaaat

SEQ ID NO: 40208 - DNA, 40 bp, Homo sapiens
tttttttttcttcctccaaatacagttgacccttgaacaa

SEQ ID NO: 40209 - DNA, 40 bp, Homo sapiens
ttgttcaagggtcaactgtatttggaggaagaaaaaaaaa

SEQ ID NO: 40210 - DNA, 40 bp, Homo sapiens
ttttttttcttcctccaaatacagttgacccttgaacaac

SEQ ID NO: 40211 - DNA, 40 bp, Homo sapiens
gttgttcaagggtcaactgtatttggaggaagaaaaaaaa

SEQ ID NO: 40212 - DNA, 40 bp, Homo sapiens
tttttttcttcctccaaatacagttgacccttgaacaaca

SEQ ID NO: 40213 - DNA, 40 bp, Homo sapiens
tgttgttcaagggtcaactgtatttggaggaagaaaaaaa

SEQ ID NO: 40214 - DNA, 40 bp, Homo sapiens
ttttttcttcctccaaatacagttgacccttgaacaacat

SEQ ID NO: 40215 - DNA, 40 bp, Homo sapiens
atgttgttcaagggtcaactgtatttggaggaagaaaaaa

SEQ ID NO: 40216 - DNA, 40 bp, Homo sapiens
tttttcttcctccaaatacagttgacccttgaacaacatg

SEQ ID NO: 40217 - DNA, 40 bp, Homo sapiens
catgttgttcaagggtcaactgtatttggaggaagaaaaa

SEQ ID NO: 40218 - DNA, 40 bp, Homo sapiens
ttttcttcctccaaatacagttgacccttgaacaacatgc

SEQ ID NO: 40219 - DNA, 40 bp, Homo sapiens
gcatgttgttcaagggtcaactgtatttggaggaagaaaa

SEQ ID NO: 40220 - DNA, 40 bp, Homo sapiens
tttcttcctccaaatacagttgacccttgaacaacatgcg

SEQ ID NO: 40221 - DNA, 40 bp, Homo sapiens
cgcatgttgttcaagggtcaactgtatttggaggaagaaa

SEQ ID NO: 40222 - DNA, 40 bp, Homo sapiens
ttcttcctccaaatacagttgacccttgaacaacatgcgt

SEQ ID NO: 40223 - DNA, 40 bp, Homo sapiens
acgcatgttgttcaagggtcaactgtatttggaggaagaa

SEQ ID NO: 40224 - DNA, 40 bp, Homo sapiens
tcttcctccaaatacagttgacccttgaacaacatgcgtt

SEQ ID NO: 40225 - DNA, 40 bp, Homo sapiens
aacgcatgttgttcaagggtcaactgtatttggaggaaga

SEQ ID NO: 40226 - DNA, 40 bp, Homo sapiens
cttcctccaaatacagttgacccttgaacaacatgcgttt

SEQ ID NO: 40227 - DNA, 40 bp, Homo sapiens
aaacgcatgttgttcaagggtcaactgtatttggaggaag

SEQ ID NO: 40228 - DNA, 40 bp, Homo sapiens
ttcctccaaatacagttgacccttgaacaacatgcgtttg

SEQ ID NO: 40229 - DNA, 40 bp, Homo sapiens
caaacgcatgttgttcaagggtcaactgtatttggaggaa

SEQ ID NO: 40230 - DNA, 40 bp, Homo sapiens
tcctccaaatacagttgacccttgaacaacatgcgtttga

SEQ ID NO: 40231 - DNA, 40 bp, Homo sapiens
tcaaacgcatgttgttcaagggtcaactgtatttggagga

SEQ ID NO: 40232 - DNA, 40 bp, Homo sapiens
cctccaaatacagttgacccttgaacaacatgcgtttgag

SEQ ID NO: 40233 - DNA, 40 bp, Homo sapiens
ctcaaacgcatgttgttcaagggtcaactgtatttggagg

SEQ ID NO: 40234 - DNA, 40 bp, Homo sapiens
ctccaaatacagttgacccttgaacaacatgcgtttgagt

SEQ ID NO: 40235 - DNA, 40 bp, Homo sapiens
actcaaacgcatgttgttcaagggtcaactgtatttggag

SEQ ID NO: 40236 - DNA, 40 bp, Homo sapiens
tccaaatacagttgacccttgaacaacatgcgtttgagtg

SEQ ID NO: 40237 - DNA, 40 bp, Homo sapiens
cactcaaacgcatgttgttcaagggtcaactgtatttgga

SEQ ID NO: 40238 - DNA, 40 bp, Homo sapiens
ccaaatacagttgacccttgaacaacatgcgtttgagtga

SEQ ID NO: 40239 - DNA, 40 bp, Homo sapiens
tcactcaaacgcatgttgttcaagggtcaactgtatttgg

SEQ ID NO: 40240 - DNA, 40 bp, Homo sapiens
caaatacagttgacccttgaacaacatgcgtttgagtgac

SEQ ID NO: 40241 - DNA, 40 bp, Homo sapiens
gtcactcaaacgcatgttgttcaagggtcaactgtatttg

SEQ ID NO: 40242 - DNA, 40 bp, Homo sapiens
aaatacagttgacccttgaacaacatgcgtttgagtgacc

SEQ ID NO: 40243 - DNA, 40 bp, Homo sapiens
ggtcactcaaacgcatgttgttcaagggtcaactgtattt

SEQ ID NO: 40244 - DNA, 40 bp, Homo sapiens
aatacagttgacccttgaacaacatgcgtttgagtgacca

SEQ ID NO: 40245 - DNA, 40 bp, Homo sapiens
tggtcactcaaacgcatgttgttcaagggtcaactgtatt

SEQ ID NO: 40246 - DNA, 40 bp, Homo sapiens
atacagttgacccttgaacaacatgcgtttgagtgaccat

SEQ ID NO: 40247 - DNA, 40 bp, Homo sapiens
atggtcactcaaacgcatgttgttcaagggtcaactgtat

SEQ ID NO: 40248 - DNA, 40 bp, Homo sapiens
tacagttgacccttgaacaacatgcgtttgagtgaccatg

SEQ ID NO: 40249 - DNA, 40 bp, Homo sapiens
catggtcactcaaacgcatgttgttcaagggtcaactgta

SEQ ID NO: 40250 - DNA, 40 bp, Homo sapiens
acagttgacccttgaacaacatgcgtttgagtgaccatgg

SEQ ID NO: 40251 - DNA, 40 bp, Homo sapiens
ccatggtcactcaaacgcatgttgttcaagggtcaactgt

SEQ ID NO: 40252 - DNA, 40 bp, Homo sapiens
cagttgacccttgaacaacatgcgtttgagtgaccatggg

SEQ ID NO: 40253 - DNA, 40 bp, Homo sapiens
cccatggtcactcaaacgcatgttgttcaagggtcaactg

SEQ ID NO: 40254 - DNA, 40 bp, Homo sapiens
agttgacccttgaacaacatgcgtttgagtgaccatgggt

SEQ ID NO: 40255 - DNA, 40 bp, Homo sapiens
acccatggtcactcaaacgcatgttgttcaagggtcaact

SEQ ID NO: 40256 - DNA, 40 bp, Homo sapiens
gttgacccttgaacaacatgcgtttgagtgaccatgggtc

SEQ ID NO: 40257 - DNA, 40 bp, Homo sapiens
gacccatggtcactcaaacgcatgttgttcaagggtcaac

SEQ ID NO: 40258 - DNA, 40 bp, Homo sapiens
ttgacccttgaacaacatgcgtttgagtgaccatgggtcc

SEQ ID NO: 40259 - DNA, 40 bp, Homo sapiens
ggacccatggtcactcaaacgcatgttgttcaagggtcaa

SEQ ID NO: 40260 - DNA, 40 bp, Homo sapiens
tgacccttgaacaacatgcgtttgagtgaccatgggtcca

SEQ ID NO: 40261 - DNA, 40 bp, Homo sapiens
tggacccatggtcactcaaacgcatgttgttcaagggtca

SEQ ID NO: 40262 - DNA, 40 bp, Homo sapiens
gacccttgaacaacatgcgtttgagtgaccatgggtccac

SEQ ID NO: 40263 - DNA, 40 bp, Homo sapiens
gtggacccatggtcactcaaacgcatgttgttcaagggtc

SEQ ID NO: 40264 - DNA, 40 bp, Homo sapiens
acccttgaacaacatgcgtttgagtgaccatgggtccact

SEQ ID NO: 40265 - DNA, 40 bp, Homo sapiens
agtggacccatggtcactcaaacgcatgttgttcaagggt

SEQ ID NO: 40266 - DNA, 40 bp, Homo sapiens
cccttgaacaacatgcgtttgagtgaccatgggtccactt

SEQ ID NO: 40267 - DNA, 40 bp, Homo sapiens
aagtggacccatggtcactcaaacgcatgttgttcaaggg

SEQ ID NO: 40268 - DNA, 40 bp, Homo sapiens
ccttgaacaacatgcgtttgagtgaccatgggtccacttg

SEQ ID NO: 40269 - DNA, 40 bp, Homo sapiens
caagtggacccatggtcactcaaacgcatgttgttcaagg

SEQ ID NO: 40270 - DNA, 40 bp, Homo sapiens
cttgaacaacatgcgtttgagtgaccatgggtccacttgt

SEQ ID NO: 40271 - DNA, 40 bp, Homo sapiens
acaagtggacccatggtcactcaaacgcatgttgttcaag

SEQ ID NO: 40272 - DNA, 40 bp, Homo sapiens
ttgaacaacatgcgtttgagtgaccatgggtccacttgtg

SEQ ID NO: 40273 - DNA, 40 bp, Homo sapiens
cacaagtggacccatggtcactcaaacgcatgttgttcaa

SEQ ID NO: 40274 - DNA, 40 bp, Homo sapiens
tgaacaacatgcgtttgagtgaccatgggtccacttgtga

SEQ ID NO: 40275 - DNA, 40 bp, Homo sapiens
tcacaagtggacccatggtcactcaaacgcatgttgttca

SEQ ID NO: 40276 - DNA, 40 bp, Homo sapiens
gaacaacatgcgtttgagtgaccatgggtccacttgtgat

SEQ ID NO: 40277 - DNA, 40 bp, Homo sapiens
atcacaagtggacccatggtcactcaaacgcatgttgttc

SEQ ID NO: 40278 - DNA, 40 bp, Homo sapiens
aacaacatgcgtttgagtgaccatgggtccacttgtgata

SEQ ID NO: 40279 - DNA, 40 bp, Homo sapiens
tatcacaagtggacccatggtcactcaaacgcatgttgtt

SEQ ID NO: 40280 - DNA, 40 bp, Homo sapiens
acaacatgcgtttgagtgaccatgggtccacttgtgatac

SEQ ID NO: 40281 - DNA, 40 bp, Homo sapiens
gtatcacaagtggacccatggtcactcaaacgcatgttgt

SEQ ID NO: 40282 - DNA, 40 bp, Homo sapiens
caacatgcgtttgagtgaccatgggtccacttgtgataca

SEQ ID NO: 40283 - DNA, 40 bp, Homo sapiens
tgtatcacaagtggacccatggtcactcaaacgcatgttg

SEQ ID NO: 40284 - DNA, 40 bp, Homo sapiens
aacatgcgtttgagtgaccatgggtccacttgtgatacac

SEQ ID NO: 40285 - DNA, 40 bp, Homo sapiens
gtgtatcacaagtggacccatggtcactcaaacgcatgtt

SEQ ID NO: 40286 - DNA, 40 bp, Homo sapiens
acatgcgtttgagtgaccatgggtccacttgtgatacacg

SEQ ID NO: 40287 - DNA, 40 bp, Homo sapiens
cgtgtatcacaagtggacccatggtcactcaaacgcatgt

SEQ ID NO: 40288 - DNA, 40 bp, Homo sapiens
catgcgtttgagtgaccatgggtccacttgtgatacacgt

SEQ ID NO: 40289 - DNA, 40 bp, Homo sapiens
acgtgtatcacaagtggacccatggtcactcaaacgcatg

SEQ ID NO: 40290 - DNA, 40 bp, Homo sapiens
atgcgtttgagtgaccatgggtccacttgtgatacacgtt

SEQ ID NO: 40291 - DNA, 40 bp, Homo sapiens
aacgtgtatcacaagtggacccatggtcactcaaacgcat

SEQ ID NO: 40292 - DNA, 40 bp, Homo sapiens
tgcgtttgagtgaccatgggtccacttgtgatacacgttt

SEQ ID NO: 40293 - DNA, 40 bp, Homo sapiens
aaacgtgtatcacaagtggacccatggtcactcaaacgca

SEQ ID NO: 40294 - DNA, 40 bp, Homo sapiens
gcgtttgagtgaccatgggtccacttgtgatacacgtttt

SEQ ID NO: 40295 - DNA, 40 bp, Homo sapiens
aaaacgtgtatcacaagtggacccatggtcactcaaacgc

SEQ ID NO: 40296 - DNA, 40 bp, Homo sapiens
cgtttgagtgaccatgggtccacttgtgatacacgttttt

SEQ ID NO: 40297 - DNA, 40 bp, Homo sapiens
aaaaacgtgtatcacaagtggacccatggtcactcaaacg

SEQ ID NO: 40298 - DNA, 40 bp, Homo sapiens
gtttgagtgaccatgggtccacttgtgatacacgtttttt

SEQ ID NO: 40299 - DNA, 40 bp, Homo sapiens
aaaaaacgtgtatcacaagtggacccatggtcactcaaac

SEQ ID NO: 40300 - DNA, 40 bp, Homo sapiens
tttgagtgaccatgggtccacttgtgatacacgttttttt

SEQ ID NO: 40301 - DNA, 40 bp, Homo sapiens
aaaaaaacgtgtatcacaagtggacccatggtcactcaaa

SEQ ID NO: 40302 - DNA, 40 bp, Homo sapiens
ttgagtgaccatgggtccacttgtgatacacgtttttttc

SEQ ID NO: 40303 - DNA, 40 bp, Homo sapiens
gaaaaaaacgtgtatcacaagtggacccatggtcactcaa

SEQ ID NO: 40304 - DNA, 40 bp, Homo sapiens
tgagtgaccatgggtccacttgtgatacacgtttttttcc

SEQ ID NO: 40305 - DNA, 40 bp, Homo sapiens
ggaaaaaaacgtgtatcacaagtggacccatggtcactca

SEQ ID NO: 40306 - DNA, 40 bp, Homo sapiens
gagtgaccatgggtccacttgtgatacacgtttttttccc

SEQ ID NO: 40307 - DNA, 40 bp, Homo sapiens
gggaaaaaaacgtgtatcacaagtggacccatggtcactc

SEQ ID NO: 40308 - DNA, 40 bp, Homo sapiens
agtgaccatgggtccacttgtgatacacgtttttttccca

SEQ ID NO: 40309 - DNA, 40 bp, Homo sapiens
tgggaaaaaaacgtgtatcacaagtggacccatggtcact

SEQ ID NO: 40310 - DNA, 40 bp, Homo sapiens
gtgaccatgggtccacttgtgatacacgtttttttcccaa

SEQ ID NO: 40311 - DNA, 40 bp, Homo sapiens
ttgggaaaaaaacgtgtatcacaagtggacccatggtcac

SEQ ID NO: 40312 - DNA, 40 bp, Homo sapiens
tgaccatgggtccacttgtgatacacgtttttttcccaac

SEQ ID NO: 40313 - DNA, 40 bp, Homo sapiens
gttgggaaaaaaacgtgtatcacaagtggacccatggtca

SEQ ID NO: 40314 - DNA, 40 bp, Homo sapiens
gaccatgggtccacttgtgatacacgtttttttcccaacc

SEQ ID NO: 40315 - DNA, 40 bp, Homo sapiens
ggttgggaaaaaaacgtgtatcacaagtggacccatggtc

SEQ ID NO: 40316 - DNA, 40 bp, Homo sapiens
accatgggtccacttgtgatacacgtttttttcccaacca

SEQ ID NO: 40317 - DNA, 40 bp, Homo sapiens
tggttgggaaaaaaacgtgtatcacaagtggacccatggt

SEQ ID NO: 40318 - DNA, 40 bp, Homo sapiens
ccatgggtccacttgtgatacacgtttttttcccaaccaa

SEQ ID NO: 40319 - DNA, 40 bp, Homo sapiens
ttggttgggaaaaaaacgtgtatcacaagtggacccatgg

SEQ ID NO: 40320 - DNA, 40 bp, Homo sapiens
catgggtccacttgtgatacacgtttttttcccaaccaaa

SEQ ID NO: 40321 - DNA, 40 bp, Homo sapiens
tttggttgggaaaaaaacgtgtatcacaagtggacccatg

SEQ ID NO: 40322 - DNA, 40 bp, Homo sapiens
atgggtccacttgtgatacacgtttttttcccaaccaaat

SEQ ID NO: 40323 - DNA, 40 bp, Homo sapiens
atttggttgggaaaaaaacgtgtatcacaagtggacccat

SEQ ID NO: 40324 - DNA, 40 bp, Homo sapiens
tgggtccacttgtgatacacgtttttttcccaaccaaatg

SEQ ID NO: 40325 - DNA, 40 bp, Homo sapiens
catttggttgggaaaaaaacgtgtatcacaagtggaccca

SEQ ID NO: 40326 - DNA, 40 bp, Homo sapiens
gggtccacttgtgatacacgtttttttcccaaccaaatgc

SEQ ID NO: 40327 - DNA, 40 bp, Homo sapiens
gcatttggttgggaaaaaaacgtgtatcacaagtggaccc

SEQ ID NO: 40328 - DNA, 40 bp, Homo sapiens
ggtccacttgtgatacacgtttttttcccaaccaaatgca

SEQ ID NO: 40329 - DNA, 40 bp, Homo sapiens
tgcatttggttgggaaaaaaacgtgtatcacaagtggacc

SEQ ID NO: 40330 - DNA, 40 bp, Homo sapiens
gtccacttgtgatacacgtttttttcccaaccaaatgcag

SEQ ID NO: 40331 - DNA, 40 bp, Homo sapiens
ctgcatttggttgggaaaaaaacgtgtatcacaagtggac

SEQ ID NO: 40332 - DNA, 40 bp, Homo sapiens
tccacttgtgatacacgtttttttcccaaccaaatgcaga

SEQ ID NO: 40333 - DNA, 40 bp, Homo sapiens
tctgcatttggttgggaaaaaaacgtgtatcacaagtgga

SEQ ID NO: 40334 - DNA, 40 bp, Homo sapiens
ccacttgtgatacacgtttttttcccaaccaaatgcagat

SEQ ID NO: 40335 - DNA, 40 bp, Homo sapiens
atctgcatttggttgggaaaaaaacgtgtatcacaagtgg

SEQ ID NO: 40336 - DNA, 40 bp, Homo sapiens
cacttgtgatacacgtttttttcccaaccaaatgcagata

SEQ ID NO: 40337 - DNA, 40 bp, Homo sapiens
tatctgcatttggttgggaaaaaaacgtgtatcacaagtg

SEQ ID NO: 40338 - DNA, 40 bp, Homo sapiens
acttgtgatacacgtttttttcccaaccaaatgcagatat

SEQ ID NO: 40339 - DNA, 40 bp, Homo sapiens
atatctgcatttggttgggaaaaaaacgtgtatcacaagt

SEQ ID NO: 40340 - DNA, 40 bp, Homo sapiens
cttgtgatacacgtttttttcccaaccaaatgcagatatg

SEQ ID NO: 40341 - DNA, 40 bp, Homo sapiens
catatctgcatttggttgggaaaaaaacgtgtatcacaag

SEQ ID NO: 40342 - DNA, 40 bp, Homo sapiens
ttgtgatacacgtttttttcccaaccaaatgcagatatgg

SEQ ID NO: 40343 - DNA, 40 bp, Homo sapiens
ccatatctgcatttggttgggaaaaaaacgtgtatcacaa

SEQ ID NO: 40344 - DNA, 40 bp, Homo sapiens
tgtgatacacgtttttttcccaaccaaatgcagatatgga

SEQ ID NO: 40345 - DNA, 40 bp, Homo sapiens
tccatatctgcatttggttgggaaaaaaacgtgtatcaca

SEQ ID NO: 40346 - DNA, 40 bp, Homo sapiens
gtgatacacgtttttttcccaaccaaatgcagatatggag

SEQ ID NO: 40347 - DNA, 40 bp, Homo sapiens
ctccatatctgcatttggttgggaaaaaaacgtgtatcac

SEQ ID NO: 40348 - DNA, 40 bp, Homo sapiens
tgatacacgtttttttcccaaccaaatgcagatatggagg

SEQ ID NO: 40349 - DNA, 40 bp, Homo sapiens
cctccatatctgcatttggttgggaaaaaaacgtgtatca

SEQ ID NO: 40350 - DNA, 40 bp, Homo sapiens
gatacacgtttttttcccaaccaaatgcagatatggaggg

SEQ ID NO: 40351 - DNA, 40 bp, Homo sapiens
ccctccatatctgcatttggttgggaaaaaaacgtgtatc

SEQ ID NO: 40352 - DNA, 40 bp, Homo sapiens
atacacgtttttttcccaaccaaatgcagatatggagggc

SEQ ID NO: 40353 - DNA, 40 bp, Homo sapiens
gccctccatatctgcatttggttgggaaaaaaacgtgtat

SEQ ID NO: 40354 - DNA, 40 bp, Homo sapiens
tacacgtttttttcccaaccaaatgcagatatggagggct

SEQ ID NO: 40355 - DNA, 40 bp, Homo sapiens
agccctccatatctgcatttggttgggaaaaaaacgtgta

SEQ ID NO: 40356 - DNA, 40 bp, Homo sapiens
acacgtttttttcccaaccaaatgcagatatggagggctg

SEQ ID NO: 40357 - DNA, 40 bp, Homo sapiens
cagccctccatatctgcatttggttgggaaaaaaacgtgt

SEQ ID NO: 40358 - DNA, 40 bp, Homo sapiens
cacgtttttttcccaaccaaatgcagatatggagggctga

SEQ ID NO: 40359 - DNA, 40 bp, Homo sapiens
tcagccctccatatctgcatttggttgggaaaaaaacgtg

SEQ ID NO: 40360 - DNA, 40 bp, Homo sapiens
acgtttttttcccaaccaaatgcagatatggagggctgac

SEQ ID NO: 40361 - DNA, 40 bp, Homo sapiens
gtcagccctccatatctgcatttggttgggaaaaaaacgt

SEQ ID NO: 40362 - DNA, 40 bp, Homo sapiens
cgtttttttcccaaccaaatgcagatatggagggctgact

SEQ ID NO: 40363 - DNA, 40 bp, Homo sapiens
agtcagccctccatatctgcatttggttgggaaaaaaacg

SEQ ID NO: 40364 - DNA, 40 bp, Homo sapiens
gtttttttcccaaccaaatgcagatatggagggctgactt

SEQ ID NO: 40365 - DNA, 40 bp, Homo sapiens
aagtcagccctccatatctgcatttggttgggaaaaaaac

SEQ ID NO: 40366 - DNA, 40 bp, Homo sapiens
tttttttcccaaccaaatgcagatatggagggctgacttt

SEQ ID NO: 40367 - DNA, 40 bp, Homo sapiens
aaagtcagccctccatatctgcatttggttgggaaaaaaa

SEQ ID NO: 40368 - DNA, 40 bp, Homo sapiens
ttttttcccaaccaaatgcagatatggagggctgactttt

SEQ ID NO: 40369 - DNA, 40 bp, Homo sapiens
aaaagtcagccctccatatctgcatttggttgggaaaaaa

SEQ ID NO: 40370 - DNA, 40 bp, Homo sapiens
tttttcccaaccaaatgcagatatggagggctgacttttc

SEQ ID NO: 40371 - DNA, 40 bp, Homo sapiens
gaaaagtcagccctccatatctgcatttggttgggaaaaa

SEQ ID NO: 40372 - DNA, 40 bp, Homo sapiens
ttttcccaaccaaatgcagatatggagggctgacttttca

SEQ ID NO: 40373 - DNA, 40 bp, Homo sapiens
tgaaaagtcagccctccatatctgcatttggttgggaaaa

SEQ ID NO: 40374 - DNA, 40 bp, Homo sapiens
tttcccaaccaaatgcagatatggagggctgacttttcat

SEQ ID NO: 40375 - DNA, 40 bp, Homo sapiens
atgaaaagtcagccctccatatctgcatttggttgggaaa

SEQ ID NO: 40376 - DNA, 40 bp, Homo sapiens
ttcccaaccaaatgcagatatggagggctgacttttcata

SEQ ID NO: 40377 - DNA, 40 bp, Homo sapiens
tatgaaaagtcagccctccatatctgcatttggttgggaa

SEQ ID NO: 40378 - DNA, 40 bp, Homo sapiens
tcccaaccaaatgcagatatggagggctgacttttcatat

SEQ ID NO: 40379 - DNA, 40 bp, Homo sapiens
atatgaaaagtcagccctccatatctgcatttggttggga

SEQ ID NO: 40380 - DNA, 40 bp, Homo sapiens
cccaaccaaatgcagatatggagggctgacttttcatata

SEQ ID NO: 40381 - DNA, 40 bp, Homo sapiens
tatatgaaaagtcagccctccatatctgcatttggttggg

SEQ ID NO: 40382 - DNA, 40 bp, Homo sapiens
ccaaccaaatgcagatatggagggctgacttttcatatac

SEQ ID NO: 40383 - DNA, 40 bp, Homo sapiens
gtatatgaaaagtcagccctccatatctgcatttggttgg

SEQ ID NO: 40384 - DNA, 40 bp, Homo sapiens
caaccaaatgcagatatggagggctgacttttcatatacc

SEQ ID NO: 40385 - DNA, 40 bp, Homo sapiens
ggtatatgaaaagtcagccctccatatctgcatttggttg

SEQ ID NO: 40386 - DNA, 40 bp, Homo sapiens
aaccaaatgcagatatggagggctgacttttcatatacct

SEQ ID NO: 40387 - DNA, 40 bp, Homo sapiens
aggtatatgaaaagtcagccctccatatctgcatttggtt

SEQ ID NO: 40388 - DNA, 40 bp, Homo sapiens
accaaatgcagatatggagggctgacttttcatatacctg

SEQ ID NO: 40389 - DNA, 40 bp, Homo sapiens
caggtatatgaaaagtcagccctccatatctgcatttggt

SEQ ID NO: 40390 - DNA, 40 bp, Homo sapiens
ccaaatgcagatatggagggctgacttttcatatacctgg

SEQ ID NO: 40391 - DNA, 40 bp, Homo sapiens
ccaggtatatgaaaagtcagccctccatatctgcatttgg

SEQ ID NO: 40392 - DNA, 40 bp, Homo sapiens
caaatgcagatatggagggctgacttttcatatacctgga

SEQ ID NO: 40393 - DNA, 40 bp, Homo sapiens
tccaggtatatgaaaagtcagccctccatatctgcatttg

SEQ ID NO: 40394 - DNA, 40 bp, Homo sapiens
aaatgcagatatggagggctgacttttcatatacctggat

SEQ ID NO: 40395 - DNA, 40 bp, Homo sapiens
atccaggtatatgaaaagtcagccctccatatctgcattt

SEQ ID NO: 40396 - DNA, 40 bp, Homo sapiens
aatgcagatatggagggctgacttttcatatacctggatg

SEQ ID NO: 40397 - DNA, 40 bp, Homo sapiens
catccaggtatatgaaaagtcagccctccatatctgcatt

SEQ ID NO: 40398 - DNA, 40 bp, Homo sapiens
atgcagatatggagggctgacttttcatatacctggatgt

SEQ ID NO: 40399 - DNA, 40 bp, Homo sapiens
acatccaggtatatgaaaagtcagccctccatatctgcat

SEQ ID NO: 40400 - DNA, 40 bp, Homo sapiens
tgcagatatggagggctgacttttcatatacctggatgtt

SEQ ID NO: 40401 - DNA, 40 bp, Homo sapiens
aacatccaggtatatgaaaagtcagccctccatatctgca

SEQ ID NO: 40402 - DNA, 40 bp, Homo sapiens
gcagatatggagggctgacttttcatatacctggatgttc

SEQ ID NO: 40403 - DNA, 40 bp, Homo sapiens
gaacatccaggtatatgaaaagtcagccctccatatctgc

SEQ ID NO: 40404 - DNA, 40 bp, Homo sapiens
cagatatggagggctgacttttcatatacctggatgttcc

SEQ ID NO: 40405 - DNA, 40 bp, Homo sapiens
ggaacatccaggtatatgaaaagtcagccctccatatctg

SEQ ID NO: 40406 - DNA, 40 bp, Homo sapiens
agatatggagggctgacttttcatatacctggatgttcct

SEQ ID NO: 40407 - DNA, 40 bp, Homo sapiens
aggaacatccaggtatatgaaaagtcagccctccatatct

SEQ ID NO: 40408 - DNA, 40 bp, Homo sapiens
gatatggagggctgacttttcatatacctggatgttcctg

SEQ ID NO: 40409 - DNA, 40 bp, Homo sapiens
caggaacatccaggtatatgaaaagtcagccctccatatc

SEQ ID NO: 40410 - DNA, 40 bp, Homo sapiens
atatggagggctgacttttcatatacctggatgttcctgg

SEQ ID NO: 40411 - DNA, 40 bp, Homo sapiens
ccaggaacatccaggtatatgaaaagtcagccctccatat

SEQ ID NO: 40412 - DNA, 40 bp, Homo sapiens
tatggagggctgacttttcatatacctggatgttcctggg

SEQ ID NO: 40413 - DNA, 40 bp, Homo sapiens
cccaggaacatccaggtatatgaaaagtcagccctccata

SEQ ID NO: 40414 - DNA, 40 bp, Homo sapiens
atggagggctgacttttcatatacctggatgttcctgggc

SEQ ID NO: 40415 - DNA, 40 bp, Homo sapiens
gcccaggaacatccaggtatatgaaaagtcagccctccat

SEQ ID NO: 40416 - DNA, 40 bp, Homo sapiens
tggagggctgacttttcatatacctggatgttcctgggcc

SEQ ID NO: 40417 - DNA, 40 bp, Homo sapiens
ggcccaggaacatccaggtatatgaaaagtcagccctcca

SEQ ID NO: 40418 - DNA, 40 bp, Homo sapiens
ggagggctgacttttcatatacctggatgttcctgggcca

SEQ ID NO: 40419 - DNA, 40 bp, Homo sapiens
tggcccaggaacatccaggtatatgaaaagtcagccctcc

SEQ ID NO: 40420 - DNA, 40 bp, Homo sapiens
gagggctgacttttcatatacctggatgttcctgggccaa

SEQ ID NO: 40421 - DNA, 40 bp, Homo sapiens
ttggcccaggaacatccaggtatatgaaaagtcagccctc

SEQ ID NO: 40422 - DNA, 40 bp, Homo sapiens
agggctgacttttcatatacctggatgttcctgggccaac

SEQ ID NO: 40423 - DNA, 40 bp, Homo sapiens
gttggcccaggaacatccaggtatatgaaaagtcagccct

SEQ ID NO: 40424 - DNA, 40 bp, Homo sapiens
gggctgacttttcatatacctggatgttcctgggccaact

SEQ ID NO: 40425 - DNA, 40 bp, Homo sapiens
agttggcccaggaacatccaggtatatgaaaagtcagccc

SEQ ID NO: 40426 - DNA, 40 bp, Homo sapiens
ggctgacttttcatatacctggatgttcctgggccaactg

SEQ ID NO: 40427 - DNA, 40 bp, Homo sapiens
cagttggcccaggaacatccaggtatatgaaaagtcagcc

SEQ ID NO: 40428 - DNA, 40 bp, Homo sapiens
gctgacttttcatatacctggatgttcctgggccaactgt

SEQ ID NO: 40429 - DNA, 40 bp, Homo sapiens
acagttggcccaggaacatccaggtatatgaaaagtcagc

SEQ ID NO: 40430 - DNA, 40 bp, Homo sapiens
ctgacttttcatatacctggatgttcctgggccaactgta

SEQ ID NO: 40431 - DNA, 40 bp, Homo sapiens
tacagttggcccaggaacatccaggtatatgaaaagtcag

SEQ ID NO: 40432 - DNA, 40 bp, Homo sapiens
tgacttttcatatacctggatgttcctgggccaactgtag

SEQ ID NO: 40433 - DNA, 40 bp, Homo sapiens
ctacagttggcccaggaacatccaggtatatgaaaagtca

SEQ ID NO: 40434 - DNA, 40 bp, Homo sapiens
gacttttcatatacctggatgttcctgggccaactgtagg

SEQ ID NO: 40435 - DNA, 40 bp, Homo sapiens
cctacagttggcccaggaacatccaggtatatgaaaagtc

SEQ ID NO: 40436 - DNA, 40 bp, Homo sapiens
acttttcatatacctggatgttcctgggccaactgtagga

SEQ ID NO: 40437 - DNA, 40 bp, Homo sapiens
tcctacagttggcccaggaacatccaggtatatgaaaagt

SEQ ID NO: 40438 - DNA, 40 bp, Homo sapiens
cttttcatatacctggatgttcctgggccaactgtaggac

SEQ ID NO: 40439 - DNA, 40 bp, Homo sapiens
gtcctacagttggcccaggaacatccaggtatatgaaaag

SEQ ID NO: 40440 - DNA, 40 bp, Homo sapiens
ttttcatatacctggatgttcctgggccaactgtaggact

SEQ ID NO: 40441 - DNA, 40 bp, Homo sapiens
agtcctacagttggcccaggaacatccaggtatatgaaaa

SEQ ID NO: 40442 - DNA, 40 bp, Homo sapiens
tttcatatacctggatgttcctgggccaactgtaggacta

SEQ ID NO: 40443 - DNA, 40 bp, Homo sapiens
tagtcctacagttggcccaggaacatccaggtatatgaaa

SEQ ID NO: 40444 - DNA, 40 bp, Homo sapiens
ttcatatacctggatgttcctgggccaactgtaggactag

SEQ ID NO: 40445 - DNA, 40 bp, Homo sapiens
ctagtcctacagttggcccaggaacatccaggtatatgaa

SEQ ID NO: 40446 - DNA, 40 bp, Homo sapiens
tcatatacctggatgttcctgggccaactgtaggactaga

SEQ ID NO: 40447 - DNA, 40 bp, Homo sapiens
tctagtcctacagttggcccaggaacatccaggtatatga

SEQ ID NO: 40448 - DNA, 40 bp, Homo sapiens
catatacctggatgttcctgggccaactgtaggactagag

SEQ ID NO: 40449 - DNA, 40 bp, Homo sapiens
ctctagtcctacagttggcccaggaacatccaggtatatg

SEQ ID NO: 40450 - DNA, 40 bp, Homo sapiens
atatacctggatgttcctgggccaactgtaggactagagg

SEQ ID NO: 40451 - DNA, 40 bp, Homo sapiens
cctctagtcctacagttggcccaggaacatccaggtatat

SEQ ID NO: 40452 - DNA, 40 bp, Homo sapiens
tatacctggatgttcctgggccaactgtaggactagaggc

SEQ ID NO: 40453 - DNA, 40 bp, Homo sapiens
gcctctagtcctacagttggcccaggaacatccaggtata

SEQ ID NO: 40454 - DNA, 40 bp, Homo sapiens
atacctggatgttcctgggccaactgtaggactagaggct

SEQ ID NO: 40455 - DNA, 40 bp, Homo sapiens
agcctctagtcctacagttggcccaggaacatccaggtat

SEQ ID NO: 40456 - DNA, 40 bp, Homo sapiens
tacctggatgttcctgggccaactgtaggactagaggctg

SEQ ID NO: 40457 - DNA, 40 bp, Homo sapiens
cagcctctagtcctacagttggcccaggaacatccaggta

SEQ ID NO: 40458 - DNA, 40 bp, Homo sapiens
acctggatgttcctgggccaactgtaggactagaggctgg

SEQ ID NO: 40459 - DNA, 40 bp, Homo sapiens
ccagcctctagtcctacagttggcccaggaacatccaggt

SEQ ID NO: 40460 - DNA, 40 bp, Homo sapiens
cctggatgttcctgggccaactgtaggactagaggctggg

SEQ ID NO: 40461 - DNA, 40 bp, Homo sapiens
cccagcctctagtcctacagttggcccaggaacatccagg

SEQ ID NO: 40462 - DNA, 40 bp, Homo sapiens
ctggatgttcctgggccaactgtaggactagaggctgggg

SEQ ID NO: 40463 - DNA, 40 bp, Homo sapiens
ccccagcctctagtcctacagttggcccaggaacatccag

SEQ ID NO: 40464 - DNA, 40 bp, Homo sapiens
tggatgttcctgggccaactgtaggactagaggctggggg

SEQ ID NO: 40465 - DNA, 40 bp, Homo sapiens
cccccagcctctagtcctacagttggcccaggaacatcca

SEQ ID NO: 40466 - DNA, 40 bp, Homo sapiens
ggatgttcctgggccaactgtaggactagaggctgggggg

SEQ ID NO: 40467 - DNA, 40 bp, Homo sapiens
ccccccagcctctagtcctacagttggcccaggaacatcc

SEQ ID NO: 40468 - DNA, 40 bp, Homo sapiens
gatgttcctgggccaactgtaggactagaggctggggggg

SEQ ID NO: 40469 - DNA, 40 bp, Homo sapiens
cccccccagcctctagtcctacagttggcccaggaacatc

SEQ ID NO: 40470 - DNA, 40 bp, Homo sapiens
atgttcctgggccaactgtaggactagaggctgggggggt

SEQ ID NO: 40471 - DNA, 40 bp, Homo sapiens
acccccccagcctctagtcctacagttggcccaggaacat

SEQ ID NO: 40472 - DNA, 40 bp, Homo sapiens
tgttcctgggccaactgtaggactagaggctgggggggtc

SEQ ID NO: 40473 - DNA, 40 bp, Homo sapiens
gacccccccagcctctagtcctacagttggcccaggaaca

SEQ ID NO: 40474 - DNA, 40 bp, Homo sapiens
gttcctgggccaactgtaggactagaggctgggggggtct

SEQ ID NO: 40475 - DNA, 40 bp, Homo sapiens
agacccccccagcctctagtcctacagttggcccaggaac

SEQ ID NO: 40476 - DNA, 40 bp, Homo sapiens
ttcctgggccaactgtaggactagaggctgggggggtctt

SEQ ID NO: 40477 - DNA, 40 bp, Homo sapiens
aagacccccccagcctctagtcctacagttggcccaggaa

SEQ ID NO: 40478 - DNA, 40 bp, Homo sapiens
tcctgggccaactgtaggactagaggctgggggggtcttg

SEQ ID NO: 40479 - DNA, 40 bp, Homo sapiens
caagacccccccagcctctagtcctacagttggcccagga

SEQ ID NO: 40480 - DNA, 40 bp, Homo sapiens
cctgggccaactgtaggactagaggctgggggggtcttgg

SEQ ID NO: 40481 - DNA, 40 bp, Homo sapiens
ccaagacccccccagcctctagtcctacagttggcccagg

SEQ ID NO: 40482 - DNA, 40 bp, Homo sapiens
ctgggccaactgtaggactagaggctgggggggtcttgga

SEQ ID NO: 40483 - DNA, 40 bp, Homo sapiens
tccaagacccccccagcctctagtcctacagttggcccag

SEQ ID NO: 40484 - DNA, 40 bp, Homo sapiens
tgggccaactgtaggactagaggctgggggggtcttggaa

SEQ ID NO: 40485 - DNA, 40 bp, Homo sapiens
ttccaagacccccccagcctctagtcctacagttggccca

SEQ ID NO: 40486 - DNA, 40 bp, Homo sapiens
gggccaactgtaggactagaggctgggggggtcttggaac

SEQ ID NO: 40487 - DNA, 40 bp, Homo sapiens
gttccaagacccccccagcctctagtcctacagttggccc

SEQ ID NO: 40488 - DNA, 40 bp, Homo sapiens
ggccaactgtaggactagaggctgggggggtcttggaacc

SEQ ID NO: 40489 - DNA, 40 bp, Homo sapiens
ggttccaagacccccccagcctctagtcctacagttggcc

SEQ ID NO: 40490 - DNA, 40 bp, Homo sapiens
gccaactgtaggactagaggctgggggggtcttggaacca

SEQ ID NO: 40491 - DNA, 40 bp, Homo sapiens
tggttccaagacccccccagcctctagtcctacagttggc

SEQ ID NO: 40492 - DNA, 40 bp, Homo sapiens
ccaactgtaggactagaggctgggggggtcttggaaccaa

SEQ ID NO: 40493 - DNA, 40 bp, Homo sapiens
ttggttccaagacccccccagcctctagtcctacagttgg

SEQ ID NO: 40494 - DNA, 40 bp, Homo sapiens
caactgtaggactagaggctgggggggtcttggaaccaat

SEQ ID NO: 40495 - DNA, 40 bp, Homo sapiens
attggttccaagacccccccagcctctagtcctacagttg

SEQ ID NO: 40496 - DNA, 40 bp, Homo sapiens
aactgtaggactagaggctgggggggtcttggaaccaatg

SEQ ID NO: 40497 - DNA, 40 bp, Homo sapiens
cattggttccaagacccccccagcctctagtcctacagtt

SEQ ID NO: 40498 - DNA, 40 bp, Homo sapiens
actgtaggactagaggctgggggggtcttggaaccaatgc

SEQ ID NO: 40499 - DNA, 40 bp, Homo sapiens
gcattggttccaagacccccccagcctctagtcctacagt

SEQ ID NO: 40500 - DNA, 40 bp, Homo sapiens
ctgtaggactagaggctgggggggtcttggaaccaatgcc

SEQ ID NO: 40501 - DNA, 40 bp, Homo sapiens
ggcattggttccaagacccccccagcctctagtcctacag

SEQ ID NO: 40502 - DNA, 40 bp, Homo sapiens
tgtaggactagaggctgggggggtcttggaaccaatgccg

SEQ ID NO: 40503 - DNA, 40 bp, Homo sapiens
cggcattggttccaagacccccccagcctctagtcctaca

SEQ ID NO: 40504 - DNA, 40 bp, Homo sapiens
gtaggactagaggctgggggggtcttggaaccaatgccgt

SEQ ID NO: 40505 - DNA, 40 bp, Homo sapiens
acggcattggttccaagacccccccagcctctagtcctac

SEQ ID NO: 40506 - DNA, 40 bp, Homo sapiens
taggactagaggctgggggggtcttggaaccaatgccgtg

SEQ ID NO: 40507 - DNA, 40 bp, Homo sapiens
cacggcattggttccaagacccccccagcctctagtccta

SEQ ID NO: 40508 - DNA, 40 bp, Homo sapiens
aggactagaggctgggggggtcttggaaccaatgccgtgt

SEQ ID NO: 40509 - DNA, 40 bp, Homo sapiens
acacggcattggttccaagacccccccagcctctagtcct

SEQ ID NO: 40510 - DNA, 40 bp, Homo sapiens
ggactagaggctgggggggtcttggaaccaatgccgtgtg

SEQ ID NO: 40511 - DNA, 40 bp, Homo sapiens
cacacggcattggttccaagacccccccagcctctagtcc

SEQ ID NO: 40512 - DNA, 40 bp, Homo sapiens
gactagaggctgggggggtcttggaaccaatgccgtgtgt

SEQ ID NO: 40513 - DNA, 40 bp, Homo sapiens
acacacggcattggttccaagacccccccagcctctagtc

SEQ ID NO: 40514 - DNA, 40 bp, Homo sapiens
actagaggctgggggggtcttggaaccaatgccgtgtgta

SEQ ID NO: 40515 - DNA, 40 bp, Homo sapiens
tacacacggcattggttccaagacccccccagcctctagt

SEQ ID NO: 40516 - DNA, 40 bp, Homo sapiens
ctagaggctgggggggtcttggaaccaatgccgtgtgtat

SEQ ID NO: 40517 - DNA, 40 bp, Homo sapiens
atacacacggcattggttccaagacccccccagcctctag

SEQ ID NO: 40518 - DNA, 40 bp, Homo sapiens
tagaggctgggggggtcttggaaccaatgccgtgtgtata

SEQ ID NO: 40519 - DNA, 40 bp, Homo sapiens
tatacacacggcattggttccaagacccccccagcctcta

SEQ ID NO: 40520 - DNA, 40 bp, Homo sapiens
agaggctgggggggtcttggaaccaatgccgtgtgtatac

SEQ ID NO: 40521 - DNA, 40 bp, Homo sapiens
gtatacacacggcattggttccaagacccccccagcctct

SEQ ID NO: 40522 - DNA, 40 bp, Homo sapiens
gaggctgggggggtcttggaaccaatgccgtgtgtatacc

SEQ ID NO: 40523 - DNA, 40 bp, Homo sapiens
ggtatacacacggcattggttccaagacccccccagcctc

SEQ ID NO: 40524 - DNA, 40 bp, Homo sapiens
aggctgggggggtcttggaaccaatgccgtgtgtatacca

SEQ ID NO: 40525 - DNA, 40 bp, Homo sapiens
tggtatacacacggcattggttccaagacccccccagcct

SEQ ID NO: 40526 - DNA, 40 bp, Homo sapiens
ggctgggggggtcttggaaccaatgccgtgtgtataccag

SEQ ID NO: 40527 - DNA, 40 bp, Homo sapiens
ctggtatacacacggcattggttccaagacccccccagcc

SEQ ID NO: 40528 - DNA, 40 bp, Homo sapiens
gctgggggggtcttggaaccaatgccgtgtgtataccagg

SEQ ID NO: 40529 - DNA, 40 bp, Homo sapiens
cctggtatacacacggcattggttccaagacccccccagc

SEQ ID NO: 40530 - DNA, 40 bp, Homo sapiens
ctgggggggtcttggaaccaatgccgtgtgtataccaggg

SEQ ID NO: 40531 - DNA, 40 bp, Homo sapiens
ccctggtatacacacggcattggttccaagacccccccag

SEQ ID NO: 40532 - DNA, 40 bp, Homo sapiens
tgggggggtcttggaaccaatgccgtgtgtataccaggga

SEQ ID NO: 40533 - DNA, 40 bp, Homo sapiens
tccctggtatacacacggcattggttccaagaccccccca

SEQ ID NO: 40534 - DNA, 40 bp, Homo sapiens
gggggggtcttggaaccaatgccgtgtgtataccagggat

SEQ ID NO: 40535 - DNA, 40 bp, Homo sapiens
atccctggtatacacacggcattggttccaagaccccccc

SEQ ID NO: 40536 - DNA, 40 bp, Homo sapiens
ggggggtcttggaaccaatgccgtgtgtataccagggatg

SEQ ID NO: 40537 - DNA, 40 bp, Homo sapiens
catccctggtatacacacggcattggttccaagacccccc

SEQ ID NO: 40538 - DNA, 40 bp, Homo sapiens
gggggtcttggaaccaatgccgtgtgtataccagggatga

SEQ ID NO: 40539 - DNA, 40 bp, Homo sapiens
tcatccctggtatacacacggcattggttccaagaccccc

SEQ ID NO: 40540 - DNA, 40 bp, Homo sapiens
ggggtcttggaaccaatgccgtgtgtataccagggatgac

SEQ ID NO: 40541 - DNA, 40 bp, Homo sapiens
gtcatccctggtatacacacggcattggttccaagacccc

SEQ ID NO: 40542 - DNA, 40 bp, Homo sapiens
gggtcttggaaccaatgccgtgtgtataccagggatgact

SEQ ID NO: 40543 - DNA, 40 bp, Homo sapiens
agtcatccctggtatacacacggcattggttccaagaccc

SEQ ID NO: 40544 - DNA, 40 bp, Homo sapiens
ggtcttggaaccaatgccgtgtgtataccagggatgactg

SEQ ID NO: 40545 - DNA, 40 bp, Homo sapiens
cagtcatccctggtatacacacggcattggttccaagacc

SEQ ID NO: 40546 - DNA, 40 bp, Homo sapiens
gtcttggaaccaatgccgtgtgtataccagggatgactgt

SEQ ID NO: 40547 - DNA, 40 bp, Homo sapiens
acagtcatccctggtatacacacggcattggttccaagac

SEQ ID NO: 40548 - DNA, 40 bp, Homo sapiens
tcttggaaccaatgccgtgtgtataccagggatgactgtt

SEQ ID NO: 40549 - DNA, 40 bp, Homo sapiens
aacagtcatccctggtatacacacggcattggttccaaga

SEQ ID NO: 40550 - DNA, 40 bp, Homo sapiens
cttggaaccaatgccgtgtgtataccagggatgactgttt

SEQ ID NO: 40551 - DNA, 40 bp, Homo sapiens
aaacagtcatccctggtatacacacggcattggttccaag

SEQ ID NO: 40552 - DNA, 40 bp, Homo sapiens
ttggaaccaatgccgtgtgtataccagggatgactgtttc

SEQ ID NO: 40553 - DNA, 40 bp, Homo sapiens
gaaacagtcatccctggtatacacacggcattggttccaa

SEQ ID NO: 40554 - DNA, 40 bp, Homo sapiens
tggaaccaatgccgtgtgtataccagggatgactgtttct

SEQ ID NO: 40555 - DNA, 40 bp, Homo sapiens
agaaacagtcatccctggtatacacacggcattggttcca

SEQ ID NO: 40556 - DNA, 40 bp, Homo sapiens
ggaaccaatgccgtgtgtataccagggatgactgtttctt

SEQ ID NO: 40557 - DNA, 40 bp, Homo sapiens
aagaaacagtcatccctggtatacacacggcattggttcc

SEQ ID NO: 40558 - DNA, 40 bp, Homo sapiens
gaaccaatgccgtgtgtataccagggatgactgtttctta

SEQ ID NO: 40559 - DNA, 40 bp, Homo sapiens
taagaaacagtcatccctggtatacacacggcattggttc

SEQ ID NO: 40560 - DNA, 40 bp, Homo sapiens
aaccaatgccgtgtgtataccagggatgactgtttcttat

SEQ ID NO: 40561 - DNA, 40 bp, Homo sapiens
ataagaaacagtcatccctggtatacacacggcattggtt

SEQ ID NO: 40562 - DNA, 40 bp, Homo sapiens
accaatgccgtgtgtataccagggatgactgtttcttatg

SEQ ID NO: 40563 - DNA, 40 bp, Homo sapiens
cataagaaacagtcatccctggtatacacacggcattggt

SEQ ID NO: 40564 - DNA, 40 bp, Homo sapiens
ccaatgccgtgtgtataccagggatgactgtttcttatgg

SEQ ID NO: 40565 - DNA, 40 bp, Homo sapiens
ccataagaaacagtcatccctggtatacacacggcattgg

SEQ ID NO: 40566 - DNA, 40 bp, Homo sapiens
caatgccgtgtgtataccagggatgactgtttcttatggc

SEQ ID NO: 40567 - DNA, 40 bp, Homo sapiens
gccataagaaacagtcatccctggtatacacacggcattg

SEQ ID NO: 40568 - DNA, 40 bp, Homo sapiens
aatgccgtgtgtataccagggatgactgtttcttatggcc

SEQ ID NO: 40569 - DNA, 40 bp, Homo sapiens
ggccataagaaacagtcatccctggtatacacacggcatt

SEQ ID NO: 40570 - DNA, 40 bp, Homo sapiens
atgccgtgtgtataccagggatgactgtttcttatggcct

SEQ ID NO: 40571 - DNA, 40 bp, Homo sapiens
aggccataagaaacagtcatccctggtatacacacggcat

SEQ ID NO: 40572 - DNA, 40 bp, Homo sapiens
tgccgtgtgtataccagggatgactgtttcttatggcctg

SEQ ID NO: 40573 - DNA, 40 bp, Homo sapiens
caggccataagaaacagtcatccctggtatacacacggca

SEQ ID NO: 40574 - DNA, 40 bp, Homo sapiens
gccgtgtgtataccagggatgactgtttcttatggcctga

SEQ ID NO: 40575 - DNA, 40 bp, Homo sapiens
tcaggccataagaaacagtcatccctggtatacacacggc

SEQ ID NO: 40576 - DNA, 40 bp, Homo sapiens
ccgtgtgtataccagggatgactgtttcttatggcctgac

SEQ ID NO: 40577 - DNA, 40 bp, Homo sapiens
gtcaggccataagaaacagtcatccctggtatacacacgg

SEQ ID NO: 40578 - DNA, 40 bp, Homo sapiens
cgtgtgtataccagggatgactgtttcttatggcctgacc

SEQ ID NO: 40579 - DNA, 40 bp, Homo sapiens
ggtcaggccataagaaacagtcatccctggtatacacacg

SEQ ID NO: 40580 - DNA, 40 bp, Homo sapiens
gtgtgtataccagggatgactgtttcttatggcctgacct

SEQ ID NO: 40581 - DNA, 40 bp, Homo sapiens
aggtcaggccataagaaacagtcatccctggtatacacac

SEQ ID NO: 40582 - DNA, 40 bp, Homo sapiens
tgtgtataccagggatgactgtttcttatggcctgacctg

SEQ ID NO: 40583 - DNA, 40 bp, Homo sapiens
caggtcaggccataagaaacagtcatccctggtatacaca

SEQ ID NO: 40584 - DNA, 40 bp, Homo sapiens
gtgtataccagggatgactgtttcttatggcctgacctga

SEQ ID NO: 40585 - DNA, 40 bp, Homo sapiens
tcaggtcaggccataagaaacagtcatccctggtatacac

SEQ ID NO: 40586 - DNA, 40 bp, Homo sapiens
tgtataccagggatgactgtttcttatggcctgacctgaa

SEQ ID NO: 40587 - DNA, 40 bp, Homo sapiens
ttcaggtcaggccataagaaacagtcatccctggtataca

SEQ ID NO: 40588 - DNA, 40 bp, Homo sapiens
gtataccagggatgactgtttcttatggcctgacctgaag

SEQ ID NO: 40589 - DNA, 40 bp, Homo sapiens
cttcaggtcaggccataagaaacagtcatccctggtatac

SEQ ID NO: 40590 - DNA, 40 bp, Homo sapiens
tataccagggatgactgtttcttatggcctgacctgaagt

SEQ ID NO: 40591 - DNA, 40 bp, Homo sapiens
acttcaggtcaggccataagaaacagtcatccctggtata

SEQ ID NO: 40592 - DNA, 40 bp, Homo sapiens
ataccagggatgactgtttcttatggcctgacctgaagtt

SEQ ID NO: 40593 - DNA, 40 bp, Homo sapiens
aacttcaggtcaggccataagaaacagtcatccctggtat

SEQ ID NO: 40594 - DNA, 40 bp, Homo sapiens
taccagggatgactgtttcttatggcctgacctgaagttg

SEQ ID NO: 40595 - DNA, 40 bp, Homo sapiens
caacttcaggtcaggccataagaaacagtcatccctggta

SEQ ID NO: 40596 - DNA, 40 bp, Homo sapiens
accagggatgactgtttcttatggcctgacctgaagttgg

SEQ ID NO: 40597 - DNA, 40 bp, Homo sapiens
ccaacttcaggtcaggccataagaaacagtcatccctggt

SEQ ID NO: 40598 - DNA, 40 bp, Homo sapiens
ccagggatgactgtttcttatggcctgacctgaagttgga

SEQ ID NO: 40599 - DNA, 40 bp, Homo sapiens
tccaacttcaggtcaggccataagaaacagtcatccctgg

SEQ ID NO: 40600 - DNA, 40 bp, Homo sapiens
cagggatgactgtttcttatggcctgacctgaagttggaa

SEQ ID NO: 40601 - DNA, 40 bp, Homo sapiens
ttccaacttcaggtcaggccataagaaacagtcatccctg

SEQ ID NO: 40602 - DNA, 40 bp, Homo sapiens
agggatgactgtttcttatggcctgacctgaagttggaac

SEQ ID NO: 40603 - DNA, 40 bp, Homo sapiens
gttccaacttcaggtcaggccataagaaacagtcatccct

SEQ ID NO: 40604 - DNA, 40 bp, Homo sapiens
gggatgactgtttcttatggcctgacctgaagttggaaca

SEQ ID NO: 40605 - DNA, 40 bp, Homo sapiens
tgttccaacttcaggtcaggccataagaaacagtcatccc

SEQ ID NO: 40606 - DNA, 40 bp, Homo sapiens
ggatgactgtttcttatggcctgacctgaagttggaacag

SEQ ID NO: 40607 - DNA, 40 bp, Homo sapiens
ctgttccaacttcaggtcaggccataagaaacagtcatcc

SEQ ID NO: 40608 - DNA, 40 bp, Homo sapiens
gatgactgtttcttatggcctgacctgaagttggaacaga

SEQ ID NO: 40609 - DNA, 40 bp, Homo sapiens
tctgttccaacttcaggtcaggccataagaaacagtcatc

SEQ ID NO: 40610 - DNA, 40 bp, Homo sapiens
atgactgtttcttatggcctgacctgaagttggaacagaa

SEQ ID NO: 40611 - DNA, 40 bp, Homo sapiens
ttctgttccaacttcaggtcaggccataagaaacagtcat

SEQ ID NO: 40612 - DNA, 40 bp, Homo sapiens
tgactgtttcttatggcctgacctgaagttggaacagaat

SEQ ID NO: 40613 - DNA, 40 bp, Homo sapiens
attctgttccaacttcaggtcaggccataagaaacagtca

SEQ ID NO: 40614 - DNA, 40 bp, Homo sapiens
gactgtttcttatggcctgacctgaagttggaacagaatc

SEQ ID NO: 40615 - DNA, 40 bp, Homo sapiens
gattctgttccaacttcaggtcaggccataagaaacagtc

SEQ ID NO: 40616 - DNA, 40 bp, Homo sapiens
actgtttcttatggcctgacctgaagttggaacagaatct

SEQ ID NO: 40617 - DNA, 40 bp, Homo sapiens
agattctgttccaacttcaggtcaggccataagaaacagt

SEQ ID NO: 40618 - DNA, 40 bp, Homo sapiens
ctgtttcttatggcctgacctgaagttggaacagaatctt

SEQ ID NO: 40619 - DNA, 40 bp, Homo sapiens
aagattctgttccaacttcaggtcaggccataagaaacag

SEQ ID NO: 40620 - DNA, 40 bp, Homo sapiens
tgtttcttatggcctgacctgaagttggaacagaatcttt

SEQ ID NO: 40621 - DNA, 40 bp, Homo sapiens
aaagattctgttccaacttcaggtcaggccataagaaaca

SEQ ID NO: 40622 - DNA, 40 bp, Homo sapiens
gtttcttatggcctgacctgaagttggaacagaatcttta

SEQ ID NO: 40623 - DNA, 40 bp, Homo sapiens
taaagattctgttccaacttcaggtcaggccataagaaac

SEQ ID NO: 40624 - DNA, 40 bp, Homo sapiens
tttcttatggcctgacctgaagttggaacagaatctttat

SEQ ID NO: 40625 - DNA, 40 bp, Homo sapiens
ataaagattctgttccaacttcaggtcaggccataagaaa

SEQ ID NO: 40626 - DNA, 40 bp, Homo sapiens
ttcttatggcctgacctgaagttggaacagaatctttatt

SEQ ID NO: 40627 - DNA, 40 bp, Homo sapiens
aataaagattctgttccaacttcaggtcaggccataagaa

SEQ ID NO: 40628 - DNA, 40 bp, Homo sapiens
tcttatggcctgacctgaagttggaacagaatctttatta

SEQ ID NO: 40629 - DNA, 40 bp, Homo sapiens
taataaagattctgttccaacttcaggtcaggccataaga

SEQ ID NO: 40630 - DNA, 40 bp, Homo sapiens
cttatggcctgacctgaagttggaacagaatctttattaa

SEQ ID NO: 40631 - DNA, 40 bp, Homo sapiens
ttaataaagattctgttccaacttcaggtcaggccataag

SEQ ID NO: 40632 - DNA, 40 bp, Homo sapiens
ttatggcctgacctgaagttggaacagaatctttattaat

SEQ ID NO: 40633 - DNA, 40 bp, Homo sapiens
attaataaagattctgttccaacttcaggtcaggccataa

SEQ ID NO: 40634 - DNA, 40 bp, Homo sapiens
tatggcctgacctgaagttggaacagaatctttattaata

SEQ ID NO: 40635 - DNA, 40 bp, Homo sapiens
tattaataaagattctgttccaacttcaggtcaggccata

SEQ ID NO: 40636 - DNA, 40 bp, Homo sapiens
atggcctgacctgaagttggaacagaatctttattaatat

SEQ ID NO: 40637 - DNA, 40 bp, Homo sapiens
atattaataaagattctgttccaacttcaggtcaggccat

SEQ ID NO: 40638 - DNA, 40 bp, Homo sapiens
tggcctgacctgaagttggaacagaatctttattaatata

SEQ ID NO: 40639 - DNA, 40 bp, Homo sapiens
tatattaataaagattctgttccaacttcaggtcaggcca

SEQ ID NO: 40640 - DNA, 40 bp, Homo sapiens
ggcctgacctgaagttggaacagaatctttattaatatat

SEQ ID NO: 40641 - DNA, 40 bp, Homo sapiens
atatattaataaagattctgttccaacttcaggtcaggcc

SEQ ID NO: 40642 - DNA, 40 bp, Homo sapiens
gcctgacctgaagttggaacagaatctttattaatatata

SEQ ID NO: 40643 - DNA, 40 bp, Homo sapiens
tatatattaataaagattctgttccaacttcaggtcaggc

SEQ ID NO: 40644 - DNA, 40 bp, Homo sapiens
cctgacctgaagttggaacagaatctttattaatatataa

SEQ ID NO: 40645 - DNA, 40 bp, Homo sapiens
ttatatattaataaagattctgttccaacttcaggtcagg

SEQ ID NO: 40646 - DNA, 40 bp, Homo sapiens
ctgacctgaagttggaacagaatctttattaatatataat

SEQ ID NO: 40647 - DNA, 40 bp, Homo sapiens
attatatattaataaagattctgttccaacttcaggtcag

SEQ ID NO: 40648 - DNA, 40 bp, Homo sapiens
tgacctgaagttggaacagaatctttattaatatataatt

SEQ ID NO: 40649 - DNA, 40 bp, Homo sapiens
aattatatattaataaagattctgttccaacttcaggtca

SEQ ID NO: 40650 - DNA, 40 bp, Homo sapiens
gacctgaagttggaacagaatctttattaatatataattt

SEQ ID NO: 40651 - DNA, 40 bp, Homo sapiens
aaattatatattaataaagattctgttccaacttcaggtc

SEQ ID NO: 40652 - DNA, 40 bp, Homo sapiens
acctgaagttggaacagaatctttattaatatataatttt

SEQ ID NO: 40653 - DNA, 40 bp, Homo sapiens
aaaattatatattaataaagattctgttccaacttcaggt

SEQ ID NO: 40654 - DNA, 40 bp, Homo sapiens
cctgaagttggaacagaatctttattaatatataattttt

SEQ ID NO: 40655 - DNA, 40 bp, Homo sapiens
aaaaattatatattaataaagattctgttccaacttcagg

SEQ ID NO: 40656 - DNA, 40 bp, Homo sapiens
ctgaagttggaacagaatctttattaatatataatttttg

SEQ ID NO: 40657 - DNA, 40 bp, Homo sapiens
caaaaattatatattaataaagattctgttccaacttcag

SEQ ID NO: 40658 - DNA, 40 bp, Homo sapiens
tgaagttggaacagaatctttattaatatataatttttgt

SEQ ID NO: 40659 - DNA, 40 bp, Homo sapiens
acaaaaattatatattaataaagattctgttccaacttca

SEQ ID NO: 40660 - DNA, 40 bp, Homo sapiens
gaagttggaacagaatctttattaatatataatttttgtt

SEQ ID NO: 40661 - DNA, 40 bp, Homo sapiens
aacaaaaattatatattaataaagattctgttccaacttc

SEQ ID NO: 40662 - DNA, 40 bp, Homo sapiens
aagttggaacagaatctttattaatatataatttttgttg

SEQ ID NO: 40663 - DNA, 40 bp, Homo sapiens
caacaaaaattatatattaataaagattctgttccaactt

SEQ ID NO: 40664 - DNA, 40 bp, Homo sapiens
agttggaacagaatctttattaatatataatttttgttgc

SEQ ID NO: 40665 - DNA, 40 bp, Homo sapiens
gcaacaaaaattatatattaataaagattctgttccaact

SEQ ID NO: 40666 - DNA, 40 bp, Homo sapiens
gttggaacagaatctttattaatatataatttttgttgcg

SEQ ID NO: 40667 - DNA, 40 bp, Homo sapiens
cgcaacaaaaattatatattaataaagattctgttccaac

SEQ ID NO: 40668 - DNA, 40 bp, Homo sapiens
ttggaacagaatctttattaatatataatttttgttgcgt

SEQ ID NO: 40669 - DNA, 40 bp, Homo sapiens
acgcaacaaaaattatatattaataaagattctgttccaa

SEQ ID NO: 40670 - DNA, 40 bp, Homo sapiens
tggaacagaatctttattaatatataatttttgttgcgtt

SEQ ID NO: 40671 - DNA, 40 bp, Homo sapiens
aacgcaacaaaaattatatattaataaagattctgttcca

SEQ ID NO: 40672 - DNA, 40 bp, Homo sapiens
ggaacagaatctttattaatatataatttttgttgcgttt

SEQ ID NO: 40673 - DNA, 40 bp, Homo sapiens
aaacgcaacaaaaattatatattaataaagattctgttcc

SEQ ID NO: 40674 - DNA, 40 bp, Homo sapiens
gaacagaatctttattaatatataatttttgttgcgtttg

SEQ ID NO: 40675 - DNA, 40 bp, Homo sapiens
caaacgcaacaaaaattatatattaataaagattctgttc

SEQ ID NO: 40676 - DNA, 40 bp, Homo sapiens
aacagaatctttattaatatataatttttgttgcgtttgt

SEQ ID NO: 40677 - DNA, 40 bp, Homo sapiens
acaaacgcaacaaaaattatatattaataaagattctgtt

SEQ ID NO: 40678 - DNA, 40 bp, Homo sapiens
acagaatctttattaatatataatttttgttgcgtttgtt

SEQ ID NO: 40679 - DNA, 40 bp, Homo sapiens
aacaaacgcaacaaaaattatatattaataaagattctgt

SEQ ID NO: 40680 - DNA, 40 bp, Homo sapiens
cagaatctttattaatatataatttttgttgcgtttgttt

SEQ ID NO: 40681 - DNA, 40 bp, Homo sapiens
aaacaaacgcaacaaaaattatatattaataaagattctg

SEQ ID NO: 40682 - DNA, 40 bp, Homo sapiens
agaatctttattaatatataatttttgttgcgtttgtttt

SEQ ID NO: 40683 - DNA, 40 bp, Homo sapiens
aaaacaaacgcaacaaaaattatatattaataaagattct

SEQ ID NO: 40684 - DNA, 40 bp, Homo sapiens
gaatctttattaatatataatttttgttgcgtttgttttc

SEQ ID NO: 40685 - DNA, 40 bp, Homo sapiens
gaaaacaaacgcaacaaaaattatatattaataaagattc

SEQ ID NO: 40686 - DNA, 40 bp, Homo sapiens
aatctttattaatatataatttttgttgcgtttgttttct

SEQ ID NO: 40687 - DNA, 40 bp, Homo sapiens
agaaaacaaacgcaacaaaaattatatattaataaagatt

SEQ ID NO: 40688 - DNA, 40 bp, Homo sapiens
atctttattaatatataatttttgttgcgtttgttttctc

SEQ ID NO: 40689 - DNA, 40 bp, Homo sapiens
gagaaaacaaacgcaacaaaaattatatattaataaagat

SEQ ID NO: 40690 - DNA, 40 bp, Homo sapiens
tctttattaatatataatttttgttgcgtttgttttctct

SEQ ID NO: 40691 - DNA, 40 bp, Homo sapiens
agagaaaacaaacgcaacaaaaattatatattaataaaga

SEQ ID NO: 40692 - DNA, 40 bp, Homo sapiens
ctttattaatatataatttttgttgcgtttgttttctctt

SEQ ID NO: 40693 - DNA, 40 bp, Homo sapiens
aagagaaaacaaacgcaacaaaaattatatattaataaag

SEQ ID NO: 40694 - DNA, 40 bp, Homo sapiens
tttattaatatataatttttgttgcgtttgttttctcttt

SEQ ID NO: 40695 - DNA, 40 bp, Homo sapiens
aaagagaaaacaaacgcaacaaaaattatatattaataaa

SEQ ID NO: 40696 - DNA, 40 bp, Homo sapiens
ttattaatatataatttttgttgcgtttgttttctcttta

SEQ ID NO: 40697 - DNA, 40 bp, Homo sapiens
taaagagaaaacaaacgcaacaaaaattatatattaataa

SEQ ID NO: 40698 - DNA, 40 bp, Homo sapiens
tattaatatataatttttgttgcgtttgttttctctttat

SEQ ID NO: 40699 - DNA, 40 bp, Homo sapiens
ataaagagaaaacaaacgcaacaaaaattatatattaata

SEQ ID NO: 40700 - DNA, 40 bp, Homo sapiens
attaatatataatttttgttgcgtttgttttctctttata

SEQ ID NO: 40701 - DNA, 40 bp, Homo sapiens
tataaagagaaaacaaacgcaacaaaaattatatattaat

SEQ ID NO: 40702 - DNA, 40 bp, Homo sapiens
ttaatatataatttttgttgcgtttgttttctctttatat

SEQ ID NO: 40703 - DNA, 40 bp, Homo sapiens
atataaagagaaaacaaacgcaacaaaaattatatattaa

SEQ ID NO: 40704 - DNA, 40 bp, Homo sapiens
taatatataatttttgttgcgtttgttttctctttatatt

SEQ ID NO: 40705 - DNA, 40 bp, Homo sapiens
aatataaagagaaaacaaacgcaacaaaaattatatatta

SEQ ID NO: 40706 - DNA, 40 bp, Homo sapiens
aatatataatttttgttgcgtttgttttctctttatattt

SEQ ID NO: 40707 - DNA, 40 bp, Homo sapiens
aaatataaagagaaaacaaacgcaacaaaaattatatatt

SEQ ID NO: 40708 - DNA, 40 bp, Homo sapiens
atatataatttttgttgcgtttgttttctctttatattta

SEQ ID NO: 40709 - DNA, 40 bp, Homo sapiens
taaatataaagagaaaacaaacgcaacaaaaattatatat

SEQ ID NO: 40710 - DNA, 40 bp, Homo sapiens
tatataatttttgttgcgtttgttttctctttatatttat

SEQ ID NO: 40711 - DNA, 40 bp, Homo sapiens
ataaatataaagagaaaacaaacgcaacaaaaattatata

SEQ ID NO: 40712 - DNA, 40 bp, Homo sapiens
atataatttttgttgcgtttgttttctctttatatttatc

SEQ ID NO: 40713 - DNA, 40 bp, Homo sapiens
gataaatataaagagaaaacaaacgcaacaaaaattatat

SEQ ID NO: 40714 - DNA, 40 bp, Homo sapiens
tataatttttgttgcgtttgttttctctttatatttatcc

SEQ ID NO: 40715 - DNA, 40 bp, Homo sapiens
ggataaatataaagagaaaacaaacgcaacaaaaattata

SEQ ID NO: 40716 - DNA, 40 bp, Homo sapiens
ataatttttgttgcgtttgttttctctttatatttatcca

SEQ ID NO: 40717 - DNA, 40 bp, Homo sapiens
tggataaatataaagagaaaacaaacgcaacaaaaattat

SEQ ID NO: 40718 - DNA, 40 bp, Homo sapiens
taatttttgttgcgtttgttttctctttatatttatccat

SEQ ID NO: 40719 - DNA, 40 bp, Homo sapiens
atggataaatataaagagaaaacaaacgcaacaaaaatta

SEQ ID NO: 40720 - DNA, 40 bp, Homo sapiens
aatttttgttgcgtttgttttctctttatatttatccatt

SEQ ID NO: 40721 - DNA, 40 bp, Homo sapiens
aatggataaatataaagagaaaacaaacgcaacaaaaatt

SEQ ID NO: 40722 - DNA, 40 bp, Homo sapiens
atttttgttgcgtttgttttctctttatatttatccattc

SEQ ID NO: 40723 - DNA, 40 bp, Homo sapiens
gaatggataaatataaagagaaaacaaacgcaacaaaaat

SEQ ID NO: 40724 - DNA, 40 bp, Homo sapiens
tttttgttgcgtttgttttctctttatatttatccattct

SEQ ID NO: 40725 - DNA, 40 bp, Homo sapiens
agaatggataaatataaagagaaaacaaacgcaacaaaaa

SEQ ID NO: 40726 - DNA, 40 bp, Homo sapiens
ttttgttgcgtttgttttctctttatatttatccattctt

SEQ ID NO: 40727 - DNA, 40 bp, Homo sapiens
aagaatggataaatataaagagaaaacaaacgcaacaaaa

SEQ ID NO: 40728 - DNA, 40 bp, Homo sapiens
tttgttgcgtttgttttctctttatatttatccattcttt

SEQ ID NO: 40729 - DNA, 40 bp, Homo sapiens
aaagaatggataaatataaagagaaaacaaacgcaacaaa

SEQ ID NO: 40730 - DNA, 40 bp, Homo sapiens
ttgttgcgtttgttttctctttatatttatccattctttt

SEQ ID NO: 40731 - DNA, 40 bp, Homo sapiens
aaaagaatggataaatataaagagaaaacaaacgcaacaa

SEQ ID NO: 40732 - DNA, 40 bp, Homo sapiens
tgttgcgtttgttttctctttatatttatccattcttttt

SEQ ID NO: 40733 - DNA, 40 bp, Homo sapiens
aaaaagaatggataaatataaagagaaaacaaacgcaaca

SEQ ID NO: 40734 - DNA, 40 bp, Homo sapiens
gttgcgtttgttttctctttatatttatccattcttttta

SEQ ID NO: 40735 - DNA, 40 bp, Homo sapiens
taaaaagaatggataaatataaagagaaaacaaacgcaac

SEQ ID NO: 40736 - DNA, 40 bp, Homo sapiens
ttgcgtttgttttctctttatatttatccattctttttag

SEQ ID NO: 40737 - DNA, 40 bp, Homo sapiens
ctaaaaagaatggataaatataaagagaaaacaaacgcaa

SEQ ID NO: 40738 - DNA, 40 bp, Homo sapiens
tgcgtttgttttctctttatatttatccattctttttaga

SEQ ID NO: 40739 - DNA, 40 bp, Homo sapiens
tctaaaaagaatggataaatataaagagaaaacaaacgca

SEQ ID NO: 40740 - DNA, 40 bp, Homo sapiens
gcgtttgttttctctttatatttatccattctttttagat

SEQ ID NO: 40741 - DNA, 40 bp, Homo sapiens
atctaaaaagaatggataaatataaagagaaaacaaacgc

SEQ ID NO: 40742 - DNA, 40 bp, Homo sapiens
cgtttgttttctctttatatttatccattctttttagatc

SEQ ID NO: 40743 - DNA, 40 bp, Homo sapiens
gatctaaaaagaatggataaatataaagagaaaacaaacg

SEQ ID NO: 40744 - DNA, 40 bp, Homo sapiens
gtttgttttctctttatatttatccattctttttagatcg

SEQ ID NO: 40745 - DNA, 40 bp, Homo sapiens
cgatctaaaaagaatggataaatataaagagaaaacaaac

SEQ ID NO: 40746 - DNA, 40 bp, Homo sapiens
tttgttttctctttatatttatccattctttttagatcgt

SEQ ID NO: 40747 - DNA, 40 bp, Homo sapiens
acgatctaaaaagaatggataaatataaagagaaaacaaa

SEQ ID NO: 40748 - DNA, 40 bp, Homo sapiens
ttgttttctctttatatttatccattctttttagatcgta

SEQ ID NO: 40749 - DNA, 40 bp, Homo sapiens
tacgatctaaaaagaatggataaatataaagagaaaacaa

SEQ ID NO: 40750 - DNA, 40 bp, Homo sapiens
tgttttctctttatatttatccattctttttagatcgtat

SEQ ID NO: 40751 - DNA, 40 bp, Homo sapiens
atacgatctaaaaagaatggataaatataaagagaaaaca

SEQ ID NO: 40752 - DNA, 40 bp, Homo sapiens
gttttctctttatatttatccattctttttagatcgtatt

SEQ ID NO: 40753 - DNA, 40 bp, Homo sapiens
aatacgatctaaaaagaatggataaatataaagagaaaac

SEQ ID NO: 40754 - DNA, 40 bp, Homo sapiens
ttttctctttatatttatccattctttttagatcgtattt

SEQ ID NO: 40755 - DNA, 40 bp, Homo sapiens
aaatacgatctaaaaagaatggataaatataaagagaaaa

SEQ ID NO: 40756 - DNA, 40 bp, Homo sapiens
tttctctttatatttatccattctttttagatcgtatttc

SEQ ID NO: 40757 - DNA, 40 bp, Homo sapiens
gaaatacgatctaaaaagaatggataaatataaagagaaa

SEQ ID NO: 40758 - DNA, 40 bp, Homo sapiens
ttctctttatatttatccattctttttagatcgtatttca

SEQ ID NO: 40759 - DNA, 40 bp, Homo sapiens
tgaaatacgatctaaaaagaatggataaatataaagagaa

SEQ ID NO: 40760 - DNA, 40 bp, Homo sapiens
tctctttatatttatccattctttttagatcgtatttcat

SEQ ID NO: 40761 - DNA, 40 bp, Homo sapiens
atgaaatacgatctaaaaagaatggataaatataaagaga

SEQ ID NO: 40762 - DNA, 40 bp, Homo sapiens
ctctttatatttatccattctttttagatcgtatttcatt

SEQ ID NO: 40763 - DNA, 40 bp, Homo sapiens
aatgaaatacgatctaaaaagaatggataaatataaagag

SEQ ID NO: 40764 - DNA, 40 bp, Homo sapiens
tctttatatttatccattctttttagatcgtatttcattt

SEQ ID NO: 40765 - DNA, 40 bp, Homo sapiens
aaatgaaatacgatctaaaaagaatggataaatataaaga

SEQ ID NO: 40766 - DNA, 40 bp, Homo sapiens
ctttatatttatccattctttttagatcgtatttcattta

SEQ ID NO: 40767 - DNA, 40 bp, Homo sapiens
taaatgaaatacgatctaaaaagaatggataaatataaag

SEQ ID NO: 40768 - DNA, 40 bp, Homo sapiens
tttatatttatccattctttttagatcgtatttcatttaa

SEQ ID NO: 40769 - DNA, 40 bp, Homo sapiens
ttaaatgaaatacgatctaaaaagaatggataaatataaa

SEQ ID NO: 40770 - DNA, 40 bp, Homo sapiens
ttatatttatccattctttttagatcgtatttcatttaac

SEQ ID NO: 40771 - DNA, 40 bp, Homo sapiens
gttaaatgaaatacgatctaaaaagaatggataaatataa

SEQ ID NO: 40772 - DNA, 40 bp, Homo sapiens
tatatttatccattctttttagatcgtatttcatttaaca

SEQ ID NO: 40773 - DNA, 40 bp, Homo sapiens
tgttaaatgaaatacgatctaaaaagaatggataaatata

SEQ ID NO: 40774 - DNA, 40 bp, Homo sapiens
atatttatccattctttttagatcgtatttcatttaacac

SEQ ID NO: 40775 - DNA, 40 bp, Homo sapiens
gtgttaaatgaaatacgatctaaaaagaatggataaatat

SEQ ID NO: 40776 - DNA, 40 bp, Homo sapiens
tatttatccattctttttagatcgtatttcatttaacact

SEQ ID NO: 40777 - DNA, 40 bp, Homo sapiens
agtgttaaatgaaatacgatctaaaaagaatggataaata

SEQ ID NO: 40778 - DNA, 40 bp, Homo sapiens
atttatccattctttttagatcgtatttcatttaacactt

SEQ ID NO: 40779 - DNA, 40 bp, Homo sapiens
aagtgttaaatgaaatacgatctaaaaagaatggataaat

SEQ ID NO: 40780 - DNA, 40 bp, Homo sapiens
tttatccattctttttagatcgtatttcatttaacacttt

SEQ ID NO: 40781 - DNA, 40 bp, Homo sapiens
aaagtgttaaatgaaatacgatctaaaaagaatggataaa

SEQ ID NO: 40782 - DNA, 40 bp, Homo sapiens
ttatccattctttttagatcgtatttcatttaacactttt

SEQ ID NO: 40783 - DNA, 40 bp, Homo sapiens
aaaagtgttaaatgaaatacgatctaaaaagaatggataa

SEQ ID NO: 40784 - DNA, 40 bp, Homo sapiens
tatccattctttttagatcgtatttcatttaacacttttt

SEQ ID NO: 40785 - DNA, 40 bp, Homo sapiens
aaaaagtgttaaatgaaatacgatctaaaaagaatggata

SEQ ID NO: 40786 - DNA, 40 bp, Homo sapiens
atccattctttttagatcgtatttcatttaacactttttc

SEQ ID NO: 40787 - DNA, 40 bp, Homo sapiens
gaaaaagtgttaaatgaaatacgatctaaaaagaatggat

SEQ ID NO: 40788 - DNA, 40 bp, Homo sapiens
tccattctttttagatcgtatttcatttaacactttttct

SEQ ID NO: 40789 - DNA, 40 bp, Homo sapiens
agaaaaagtgttaaatgaaatacgatctaaaaagaatgga

SEQ ID NO: 40790 - DNA, 40 bp, Homo sapiens
ccattctttttagatcgtatttcatttaacactttttctt

SEQ ID NO: 40791 - DNA, 40 bp, Homo sapiens
aagaaaaagtgttaaatgaaatacgatctaaaaagaatgg

SEQ ID NO: 40792 - DNA, 40 bp, Homo sapiens
cattctttttagatcgtatttcatttaacactttttcttc

SEQ ID NO: 40793 - DNA, 40 bp, Homo sapiens
gaagaaaaagtgttaaatgaaatacgatctaaaaagaatg

SEQ ID NO: 40794 - DNA, 40 bp, Homo sapiens
attctttttagatcgtatttcatttaacactttttcttct

SEQ ID NO: 40795 - DNA, 40 bp, Homo sapiens
agaagaaaaagtgttaaatgaaatacgatctaaaaagaat

SEQ ID NO: 40796 - DNA, 40 bp, Homo sapiens
ttctttttagatcgtatttcatttaacactttttcttctt

SEQ ID NO: 40797 - DNA, 40 bp, Homo sapiens
aagaagaaaaagtgttaaatgaaatacgatctaaaaagaa

SEQ ID NO: 40798 - DNA, 40 bp, Homo sapiens
tctttttagatcgtatttcatttaacactttttcttcttt

SEQ ID NO: 40799 - DNA, 40 bp, Homo sapiens
aaagaagaaaaagtgttaaatgaaatacgatctaaaaaga

SEQ ID NO: 40800 - DNA, 40 bp, Homo sapiens
ctttttagatcgtatttcatttaacactttttcttcttta

SEQ ID NO: 40801 - DNA, 40 bp, Homo sapiens
taaagaagaaaaagtgttaaatgaaatacgatctaaaaag

SEQ ID NO: 40802 - DNA, 40 bp, Homo sapiens
tttttagatcgtatttcatttaacactttttcttctttag

SEQ ID NO: 40803 - DNA, 40 bp, Homo sapiens
ctaaagaagaaaaagtgttaaatgaaatacgatctaaaaa

SEQ ID NO: 40804 - DNA, 40 bp, Homo sapiens
ttttagatcgtatttcatttaacactttttcttctttagt

SEQ ID NO: 40805 - DNA, 40 bp, Homo sapiens
actaaagaagaaaaagtgttaaatgaaatacgatctaaaa

SEQ ID NO: 40806 - DNA, 40 bp, Homo sapiens
tttagatcgtatttcatttaacactttttcttctttagtt

SEQ ID NO: 40807 - DNA, 40 bp, Homo sapiens
aactaaagaagaaaaagtgttaaatgaaatacgatctaaa

SEQ ID NO: 40808 - DNA, 40 bp, Homo sapiens
ttagatcgtatttcatttaacactttttcttctttagttt

SEQ ID NO: 40809 - DNA, 40 bp, Homo sapiens
aaactaaagaagaaaaagtgttaaatgaaatacgatctaa

SEQ ID NO: 40810 - DNA, 40 bp, Homo sapiens
tagatcgtatttcatttaacactttttcttctttagtttt

SEQ ID NO: 40811 - DNA, 40 bp, Homo sapiens
aaaactaaagaagaaaaagtgttaaatgaaatacgatcta

SEQ ID NO: 40812 - DNA, 40 bp, Homo sapiens
agatcgtatttcatttaacactttttcttctttagttttt

SEQ ID NO: 40813 - DNA, 40 bp, Homo sapiens
aaaaactaaagaagaaaaagtgttaaatgaaatacgatct

SEQ ID NO: 40814 - DNA, 40 bp, Homo sapiens
gatcgtatttcatttaacactttttcttctttagttttta

SEQ ID NO: 40815 - DNA, 40 bp, Homo sapiens
taaaaactaaagaagaaaaagtgttaaatgaaatacgatc

SEQ ID NO: 40816 - DNA, 40 bp, Homo sapiens
atcgtatttcatttaacactttttcttctttagtttttac

SEQ ID NO: 40817 - DNA, 40 bp, Homo sapiens
gtaaaaactaaagaagaaaaagtgttaaatgaaatacgat

SEQ ID NO: 40818 - DNA, 40 bp, Homo sapiens
tcgtatttcatttaacactttttcttctttagtttttacc

SEQ ID NO: 40819 - DNA, 40 bp, Homo sapiens
ggtaaaaactaaagaagaaaaagtgttaaatgaaatacga

SEQ ID NO: 40820 - DNA, 40 bp, Homo sapiens
cgtatttcatttaacactttttcttctttagtttttacca

SEQ ID NO: 40821 - DNA, 40 bp, Homo sapiens
tggtaaaaactaaagaagaaaaagtgttaaatgaaatacg

SEQ ID NO: 40822 - DNA, 40 bp, Homo sapiens
gtatttcatttaacactttttcttctttagtttttaccaa

SEQ ID NO: 40823 - DNA, 40 bp, Homo sapiens
ttggtaaaaactaaagaagaaaaagtgttaaatgaaatac

SEQ ID NO: 40824 - DNA, 40 bp, Homo sapiens
tatttcatttaacactttttcttctttagtttttaccaag

SEQ ID NO: 40825 - DNA, 40 bp, Homo sapiens
cttggtaaaaactaaagaagaaaaagtgttaaatgaaata

SEQ ID NO: 40826 - DNA, 40 bp, Homo sapiens
atttcatttaacactttttcttctttagtttttaccaagt

SEQ ID NO: 40827 - DNA, 40 bp, Homo sapiens
acttggtaaaaactaaagaagaaaaagtgttaaatgaaat

SEQ ID NO: 40828 - DNA, 40 bp, Homo sapiens
tttcatttaacactttttcttctttagtttttaccaagtt

SEQ ID NO: 40829 - DNA, 40 bp, Homo sapiens
aacttggtaaaaactaaagaagaaaaagtgttaaatgaaa

SEQ ID NO: 40830 - DNA, 40 bp, Homo sapiens
ttcatttaacactttttcttctttagtttttaccaagttg

SEQ ID NO: 40831 - DNA, 40 bp, Homo sapiens
caacttggtaaaaactaaagaagaaaaagtgttaaatgaa

SEQ ID NO: 40832 - DNA, 40 bp, Homo sapiens
tcatttaacactttttcttctttagtttttaccaagttgc

SEQ ID NO: 40833 - DNA, 40 bp, Homo sapiens
gcaacttggtaaaaactaaagaagaaaaagtgttaaatga

SEQ ID NO: 40834 - DNA, 40 bp, Homo sapiens
catttaacactttttcttctttagtttttaccaagttgca

SEQ ID NO: 40835 - DNA, 40 bp, Homo sapiens
tgcaacttggtaaaaactaaagaagaaaaagtgttaaatg

SEQ ID NO: 40836 - DNA, 40 bp, Homo sapiens
atttaacactttttcttctttagtttttaccaagttgcac

SEQ ID NO: 40837 - DNA, 40 bp, Homo sapiens
gtgcaacttggtaaaaactaaagaagaaaaagtgttaaat

SEQ ID NO: 40838 - DNA, 40 bp, Homo sapiens
tttaacactttttcttctttagtttttaccaagttgcact

SEQ ID NO: 40839 - DNA, 40 bp, Homo sapiens
agtgcaacttggtaaaaactaaagaagaaaaagtgttaaa

SEQ ID NO: 40840 - DNA, 40 bp, Homo sapiens
ttaacactttttcttctttagtttttaccaagttgcactg

SEQ ID NO: 40841 - DNA, 40 bp, Homo sapiens
cagtgcaacttggtaaaaactaaagaagaaaaagtgttaa

SEQ ID NO: 40842 - DNA, 40 bp, Homo sapiens
taacactttttcttctttagtttttaccaagttgcactga

SEQ ID NO: 40843 - DNA, 40 bp, Homo sapiens
tcagtgcaacttggtaaaaactaaagaagaaaaagtgtta

SEQ ID NO: 40844 - DNA, 40 bp, Homo sapiens
aacactttttcttctttagtttttaccaagttgcactgaa

SEQ ID NO: 40845 - DNA, 40 bp, Homo sapiens
ttcagtgcaacttggtaaaaactaaagaagaaaaagtgtt

SEQ ID NO: 40846 - DNA, 40 bp, Homo sapiens
acactttttcttctttagtttttaccaagttgcactgaaa

SEQ ID NO: 40847 - DNA, 40 bp, Homo sapiens
tttcagtgcaacttggtaaaaactaaagaagaaaaagtgt

SEQ ID NO: 40848 - DNA, 40 bp, Homo sapiens
cactttttcttctttagtttttaccaagttgcactgaaaa

SEQ ID NO: 40849 - DNA, 40 bp, Homo sapiens
ttttcagtgcaacttggtaaaaactaaagaagaaaaagtg

SEQ ID NO: 40850 - DNA, 40 bp, Homo sapiens
actttttcttctttagtttttaccaagttgcactgaaaat

SEQ ID NO: 40851 - DNA, 40 bp, Homo sapiens
attttcagtgcaacttggtaaaaactaaagaagaaaaagt

SEQ ID NO: 40852 - DNA, 40 bp, Homo sapiens
ctttttcttctttagtttttaccaagttgcactgaaaata

SEQ ID NO: 40853 - DNA, 40 bp, Homo sapiens
tattttcagtgcaacttggtaaaaactaaagaagaaaaag

SEQ ID NO: 40854 - DNA, 40 bp, Homo sapiens
tttttcttctttagtttttaccaagttgcactgaaaatag

SEQ ID NO: 40855 - DNA, 40 bp, Homo sapiens
ctattttcagtgcaacttggtaaaaactaaagaagaaaaa

SEQ ID NO: 40856 - DNA, 40 bp, Homo sapiens
ttttcttctttagtttttaccaagttgcactgaaaatagc

SEQ ID NO: 40857 - DNA, 40 bp, Homo sapiens
gctattttcagtgcaacttggtaaaaactaaagaagaaaa

SEQ ID NO: 40858 - DNA, 40 bp, Homo sapiens
tttcttctttagtttttaccaagttgcactgaaaatagct

SEQ ID NO: 40859 - DNA, 40 bp, Homo sapiens
agctattttcagtgcaacttggtaaaaactaaagaagaaa

SEQ ID NO: 40860 - DNA, 40 bp, Homo sapiens
ttcttctttagtttttaccaagttgcactgaaaatagctc

SEQ ID NO: 40861 - DNA, 40 bp, Homo sapiens
gagctattttcagtgcaacttggtaaaaactaaagaagaa

SEQ ID NO: 40862 - DNA, 40 bp, Homo sapiens
tcttctttagtttttaccaagttgcactgaaaatagctca

SEQ ID NO: 40863 - DNA, 40 bp, Homo sapiens
tgagctattttcagtgcaacttggtaaaaactaaagaaga

SEQ ID NO: 40864 - DNA, 40 bp, Homo sapiens
cttctttagtttttaccaagttgcactgaaaatagctcag

SEQ ID NO: 40865 - DNA, 40 bp, Homo sapiens
ctgagctattttcagtgcaacttggtaaaaactaaagaag

SEQ ID NO: 40866 - DNA, 40 bp, Homo sapiens
ttctttagtttttaccaagttgcactgaaaatagctcagt

SEQ ID NO: 40867 - DNA, 40 bp, Homo sapiens
actgagctattttcagtgcaacttggtaaaaactaaagaa

SEQ ID NO: 40868 - DNA, 40 bp, Homo sapiens
tctttagtttttaccaagttgcactgaaaatagctcagtg

SEQ ID NO: 40869 - DNA, 40 bp, Homo sapiens
cactgagctattttcagtgcaacttggtaaaaactaaaga

SEQ ID NO: 40870 - DNA, 40 bp, Homo sapiens
ctttagtttttaccaagttgcactgaaaatagctcagtga

SEQ ID NO: 40871 - DNA, 40 bp, Homo sapiens
tcactgagctattttcagtgcaacttggtaaaaactaaag

SEQ ID NO: 40872 - DNA, 40 bp, Homo sapiens
tttagtttttaccaagttgcactgaaaatagctcagtgac

SEQ ID NO: 40873 - DNA, 40 bp, Homo sapiens
gtcactgagctattttcagtgcaacttggtaaaaactaaa

SEQ ID NO: 40874 - DNA, 40 bp, Homo sapiens
ttagtttttaccaagttgcactgaaaatagctcagtgact

SEQ ID NO: 40875 - DNA, 40 bp, Homo sapiens
agtcactgagctattttcagtgcaacttggtaaaaactaa

SEQ ID NO: 40876 - DNA, 40 bp, Homo sapiens
tagtttttaccaagttgcactgaaaatagctcagtgacta

SEQ ID NO: 40877 - DNA, 40 bp, Homo sapiens
tagtcactgagctattttcagtgcaacttggtaaaaacta

SEQ ID NO: 40878 - DNA, 40 bp, Homo sapiens
agtttttaccaagttgcactgaaaatagctcagtgactaa

SEQ ID NO: 40879 - DNA, 40 bp, Homo sapiens
ttagtcactgagctattttcagtgcaacttggtaaaaact

SEQ ID NO: 40880 - DNA, 40 bp, Homo sapiens
gtttttaccaagttgcactgaaaatagctcagtgactaat

SEQ ID NO: 40881 - DNA, 40 bp, Homo sapiens
attagtcactgagctattttcagtgcaacttggtaaaaac

SEQ ID NO: 40882 - DNA, 40 bp, Homo sapiens
tttttaccaagttgcactgaaaatagctcagtgactaatt

SEQ ID NO: 40883 - DNA, 40 bp, Homo sapiens
aattagtcactgagctattttcagtgcaacttggtaaaaa

SEQ ID NO: 40884 - DNA, 40 bp, Homo sapiens
ttttaccaagttgcactgaaaatagctcagtgactaattg

SEQ ID NO: 40885 - DNA, 40 bp, Homo sapiens
caattagtcactgagctattttcagtgcaacttggtaaaa

SEQ ID NO: 40886 - DNA, 40 bp, Homo sapiens
tttaccaagttgcactgaaaatagctcagtgactaattgc

SEQ ID NO: 40887 - DNA, 40 bp, Homo sapiens
gcaattagtcactgagctattttcagtgcaacttggtaaa

SEQ ID NO: 40888 - DNA, 40 bp, Homo sapiens
ttaccaagttgcactgaaaatagctcagtgactaattgca

SEQ ID NO: 40889 - DNA, 40 bp, Homo sapiens
tgcaattagtcactgagctattttcagtgcaacttggtaa

SEQ ID NO: 40890 - DNA, 40 bp, Homo sapiens
taccaagttgcactgaaaatagctcagtgactaattgcac

SEQ ID NO: 40891 - DNA, 40 bp, Homo sapiens
gtgcaattagtcactgagctattttcagtgcaacttggta

SEQ ID NO: 40892 - DNA, 40 bp, Homo sapiens
accaagttgcactgaaaatagctcagtgactaattgcact

SEQ ID NO: 40893 - DNA, 40 bp, Homo sapiens
agtgcaattagtcactgagctattttcagtgcaacttggt

SEQ ID NO: 40894 - DNA, 40 bp, Homo sapiens
ccaagttgcactgaaaatagctcagtgactaattgcactt

SEQ ID NO: 40895 - DNA, 40 bp, Homo sapiens
aagtgcaattagtcactgagctattttcagtgcaacttgg

SEQ ID NO: 40896 - DNA, 40 bp, Homo sapiens
caagttgcactgaaaatagctcagtgactaattgcacttc

SEQ ID NO: 40897 - DNA, 40 bp, Homo sapiens
gaagtgcaattagtcactgagctattttcagtgcaacttg

SEQ ID NO: 40898 - DNA, 40 bp, Homo sapiens
aagttgcactgaaaatagctcagtgactaattgcacttct

SEQ ID NO: 40899 - DNA, 40 bp, Homo sapiens
agaagtgcaattagtcactgagctattttcagtgcaactt

SEQ ID NO: 40900 - DNA, 40 bp, Homo sapiens
agttgcactgaaaatagctcagtgactaattgcacttcta

SEQ ID NO: 40901 - DNA, 40 bp, Homo sapiens
tagaagtgcaattagtcactgagctattttcagtgcaact

SEQ ID NO: 40902 - DNA, 40 bp, Homo sapiens
gttgcactgaaaatagctcagtgactaattgcacttctaa

SEQ ID NO: 40903 - DNA, 40 bp, Homo sapiens
ttagaagtgcaattagtcactgagctattttcagtgcaac

SEQ ID NO: 40904 - DNA, 40 bp, Homo sapiens
ttgcactgaaaatagctcagtgactaattgcacttctaag

SEQ ID NO: 40905 - DNA, 40 bp, Homo sapiens
cttagaagtgcaattagtcactgagctattttcagtgcaa

SEQ ID NO: 40906 - DNA, 40 bp, Homo sapiens
tgcactgaaaatagctcagtgactaattgcacttctaaga

SEQ ID NO: 40907 - DNA, 40 bp, Homo sapiens
tcttagaagtgcaattagtcactgagctattttcagtgca

SEQ ID NO: 40908 - DNA, 40 bp, Homo sapiens
gcactgaaaatagctcagtgactaattgcacttctaagag

SEQ ID NO: 40909 - DNA, 40 bp, Homo sapiens
ctcttagaagtgcaattagtcactgagctattttcagtgc

SEQ ID NO: 40910 - DNA, 40 bp, Homo sapiens
cactgaaaatagctcagtgactaattgcacttctaagagt

SEQ ID NO: 40911 - DNA, 40 bp, Homo sapiens
actcttagaagtgcaattagtcactgagctattttcagtg

SEQ ID NO: 40912 - DNA, 40 bp, Homo sapiens
actgaaaatagctcagtgactaattgcacttctaagagtg

SEQ ID NO: 40913 - DNA, 40 bp, Homo sapiens
cactcttagaagtgcaattagtcactgagctattttcagt

SEQ ID NO: 40914 - DNA, 40 bp, Homo sapiens
ctgaaaatagctcagtgactaattgcacttctaagagtga

SEQ ID NO: 40915 - DNA, 40 bp, Homo sapiens
tcactcttagaagtgcaattagtcactgagctattttcag

SEQ ID NO: 40916 - DNA, 40 bp, Homo sapiens
tgaaaatagctcagtgactaattgcacttctaagagtgag

SEQ ID NO: 40917 - DNA, 40 bp, Homo sapiens
ctcactcttagaagtgcaattagtcactgagctattttca

SEQ ID NO: 40918 - DNA, 40 bp, Homo sapiens
gaaaatagctcagtgactaattgcacttctaagagtgagg

SEQ ID NO: 40919 - DNA, 40 bp, Homo sapiens
cctcactcttagaagtgcaattagtcactgagctattttc

SEQ ID NO: 40920 - DNA, 40 bp, Homo sapiens
aaaatagctcagtgactaattgcacttctaagagtgagga

SEQ ID NO: 40921 - DNA, 40 bp, Homo sapiens
tcctcactcttagaagtgcaattagtcactgagctatttt

SEQ ID NO: 40922 - DNA, 40 bp, Homo sapiens
aaatagctcagtgactaattgcacttctaagagtgaggac

SEQ ID NO: 40923 - DNA, 40 bp, Homo sapiens
gtcctcactcttagaagtgcaattagtcactgagctattt

SEQ ID NO: 40924 - DNA, 40 bp, Homo sapiens
aatagctcagtgactaattgcacttctaagagtgaggacc

SEQ ID NO: 40925 - DNA, 40 bp, Homo sapiens
ggtcctcactcttagaagtgcaattagtcactgagctatt

SEQ ID NO: 40926 - DNA, 40 bp, Homo sapiens
atagctcagtgactaattgcacttctaagagtgaggaccc

SEQ ID NO: 40927 - DNA, 40 bp, Homo sapiens
gggtcctcactcttagaagtgcaattagtcactgagctat

SEQ ID NO: 40928 - DNA, 40 bp, Homo sapiens
tagctcagtgactaattgcacttctaagagtgaggaccct

SEQ ID NO: 40929 - DNA, 40 bp, Homo sapiens
agggtcctcactcttagaagtgcaattagtcactgagcta

SEQ ID NO: 40930 - DNA, 40 bp, Homo sapiens
agctcagtgactaattgcacttctaagagtgaggacccta

SEQ ID NO: 40931 - DNA, 40 bp, Homo sapiens
tagggtcctcactcttagaagtgcaattagtcactgagct

SEQ ID NO: 40932 - DNA, 40 bp, Homo sapiens
gctcagtgactaattgcacttctaagagtgaggaccctag

SEQ ID NO: 40933 - DNA, 40 bp, Homo sapiens
ctagggtcctcactcttagaagtgcaattagtcactgagc

SEQ ID NO: 40934 - DNA, 40 bp, Homo sapiens
ctcagtgactaattgcacttctaagagtgaggaccctagt

SEQ ID NO: 40935 - DNA, 40 bp, Homo sapiens
actagggtcctcactcttagaagtgcaattagtcactgag

SEQ ID NO: 40936 - DNA, 40 bp, Homo sapiens
tcagtgactaattgcacttctaagagtgaggaccctagtt

SEQ ID NO: 40937 - DNA, 40 bp, Homo sapiens
aactagggtcctcactcttagaagtgcaattagtcactga

SEQ ID NO: 40938 - DNA, 40 bp, Homo sapiens
cagtgactaattgcacttctaagagtgaggaccctagtta

SEQ ID NO: 40939 - DNA, 40 bp, Homo sapiens
taactagggtcctcactcttagaagtgcaattagtcactg

SEQ ID NO: 40940 - DNA, 40 bp, Homo sapiens
agtgactaattgcacttctaagagtgaggaccctagttaa

SEQ ID NO: 40941 - DNA, 40 bp, Homo sapiens
ttaactagggtcctcactcttagaagtgcaattagtcact

SEQ ID NO: 40942 - DNA, 40 bp, Homo sapiens
gtgactaattgcacttctaagagtgaggaccctagttaaa

SEQ ID NO: 40943 - DNA, 40 bp, Homo sapiens
tttaactagggtcctcactcttagaagtgcaattagtcac

SEQ ID NO: 40944 - DNA, 40 bp, Homo sapiens
tgactaattgcacttctaagagtgaggaccctagttaaaa

SEQ ID NO: 40945 - DNA, 40 bp, Homo sapiens
ttttaactagggtcctcactcttagaagtgcaattagtca

SEQ ID NO: 40946 - DNA, 40 bp, Homo sapiens
gactaattgcacttctaagagtgaggaccctagttaaaat

SEQ ID NO: 40947 - DNA, 40 bp, Homo sapiens
attttaactagggtcctcactcttagaagtgcaattagtc

SEQ ID NO: 40948 - DNA, 40 bp, Homo sapiens
actaattgcacttctaagagtgaggaccctagttaaaatt

SEQ ID NO: 40949 - DNA, 40 bp, Homo sapiens
aattttaactagggtcctcactcttagaagtgcaattagt

SEQ ID NO: 40950 - DNA, 40 bp, Homo sapiens
ctaattgcacttctaagagtgaggaccctagttaaaatta

SEQ ID NO: 40951 - DNA, 40 bp, Homo sapiens
taattttaactagggtcctcactcttagaagtgcaattag

SEQ ID NO: 40952 - DNA, 40 bp, Homo sapiens
taattgcacttctaagagtgaggaccctagttaaaattaa

SEQ ID NO: 40953 - DNA, 40 bp, Homo sapiens
ttaattttaactagggtcctcactcttagaagtgcaatta

SEQ ID NO: 40954 - DNA, 40 bp, Homo sapiens
aattgcacttctaagagtgaggaccctagttaaaattaac

SEQ ID NO: 40955 - DNA, 40 bp, Homo sapiens
gttaattttaactagggtcctcactcttagaagtgcaatt

SEQ ID NO: 40956 - DNA, 40 bp, Homo sapiens
attgcacttctaagagtgaggaccctagttaaaattaact

SEQ ID NO: 40957 - DNA, 40 bp, Homo sapiens
agttaattttaactagggtcctcactcttagaagtgcaat

SEQ ID NO: 40958 - DNA, 40 bp, Homo sapiens
ttgcacttctaagagtgaggaccctagttaaaattaactc

SEQ ID NO: 40959 - DNA, 40 bp, Homo sapiens
gagttaattttaactagggtcctcactcttagaagtgcaa

SEQ ID NO: 40960 - DNA, 40 bp, Homo sapiens
tgcacttctaagagtgaggaccctagttaaaattaactct

SEQ ID NO: 40961 - DNA, 40 bp, Homo sapiens
agagttaattttaactagggtcctcactcttagaagtgca

SEQ ID NO: 40962 - DNA, 40 bp, Homo sapiens
gcacttctaagagtgaggaccctagttaaaattaactcta

SEQ ID NO: 40963 - DNA, 40 bp, Homo sapiens
tagagttaattttaactagggtcctcactcttagaagtgc

SEQ ID NO: 40964 - DNA, 40 bp, Homo sapiens
cacttctaagagtgaggaccctagttaaaattaactctaa

SEQ ID NO: 40965 - DNA, 40 bp, Homo sapiens
ttagagttaattttaactagggtcctcactcttagaagtg

SEQ ID NO: 40966 - DNA, 40 bp, Homo sapiens
acttctaagagtgaggaccctagttaaaattaactctaaa

SEQ ID NO: 40967 - DNA, 40 bp, Homo sapiens
tttagagttaattttaactagggtcctcactcttagaagt

SEQ ID NO: 40968 - DNA, 40 bp, Homo sapiens
cttctaagagtgaggaccctagttaaaattaactctaaaa

SEQ ID NO: 40969 - DNA, 40 bp, Homo sapiens
ttttagagttaattttaactagggtcctcactcttagaag

SEQ ID NO: 40970 - DNA, 40 bp, Homo sapiens
ttctaagagtgaggaccctagttaaaattaactctaaaaa

SEQ ID NO: 40971 - DNA, 40 bp, Homo sapiens
tttttagagttaattttaactagggtcctcactcttagaa

SEQ ID NO: 40972 - DNA, 40 bp, Homo sapiens
tctaagagtgaggaccctagttaaaattaactctaaaaat

SEQ ID NO: 40973 - DNA, 40 bp, Homo sapiens
atttttagagttaattttaactagggtcctcactcttaga

SEQ ID NO: 40974 - DNA, 40 bp, Homo sapiens
ctaagagtgaggaccctagttaaaattaactctaaaaata

SEQ ID NO: 40975 - DNA, 40 bp, Homo sapiens
tatttttagagttaattttaactagggtcctcactcttag

SEQ ID NO: 40976 - DNA, 40 bp, Homo sapiens
taagagtgaggaccctagttaaaattaactctaaaaatac

SEQ ID NO: 40977 - DNA, 40 bp, Homo sapiens
gtatttttagagttaattttaactagggtcctcactctta

SEQ ID NO: 40978 - DNA, 40 bp, Homo sapiens
aagagtgaggaccctagttaaaattaactctaaaaatact

SEQ ID NO: 40979 - DNA, 40 bp, Homo sapiens
agtatttttagagttaattttaactagggtcctcactctt

SEQ ID NO: 40980 - DNA, 40 bp, Homo sapiens
agagtgaggaccctagttaaaattaactctaaaaatactg

SEQ ID NO: 40981 - DNA, 40 bp, Homo sapiens
cagtatttttagagttaattttaactagggtcctcactct

SEQ ID NO: 40982 - DNA, 40 bp, Homo sapiens
gagtgaggaccctagttaaaattaactctaaaaatactga

SEQ ID NO: 40983 - DNA, 40 bp, Homo sapiens
tcagtatttttagagttaattttaactagggtcctcactc

SEQ ID NO: 40984 - DNA, 40 bp, Homo sapiens
agtgaggaccctagttaaaattaactctaaaaatactgaa

SEQ ID NO: 40985 - DNA, 40 bp, Homo sapiens
ttcagtatttttagagttaattttaactagggtcctcact

SEQ ID NO: 40986 - DNA, 40 bp, Homo sapiens
gtgaggaccctagttaaaattaactctaaaaatactgaat

SEQ ID NO: 40987 - DNA, 40 bp, Homo sapiens
attcagtatttttagagttaattttaactagggtcctcac

SEQ ID NO: 40988 - DNA, 40 bp, Homo sapiens
tgaggaccctagttaaaattaactctaaaaatactgaatt

SEQ ID NO: 40989 - DNA, 40 bp, Homo sapiens
aattcagtatttttagagttaattttaactagggtcctca

SEQ ID NO: 40990 - DNA, 40 bp, Homo sapiens
gaggaccctagttaaaattaactctaaaaatactgaattt

SEQ ID NO: 40991 - DNA, 40 bp, Homo sapiens
aaattcagtatttttagagttaattttaactagggtcctc

SEQ ID NO: 40992 - DNA, 40 bp, Homo sapiens
aggaccctagttaaaattaactctaaaaatactgaatttt

SEQ ID NO: 40993 - DNA, 40 bp, Homo sapiens
aaaattcagtatttttagagttaattttaactagggtcct

SEQ ID NO: 40994 - DNA, 40 bp, Homo sapiens
ggaccctagttaaaattaactctaaaaatactgaattttt

SEQ ID NO: 40995 - DNA, 40 bp, Homo sapiens
aaaaattcagtatttttagagttaattttaactagggtcc

SEQ ID NO: 40996 - DNA, 40 bp, Homo sapiens
gaccctagttaaaattaactctaaaaatactgaattttta

SEQ ID NO: 40997 - DNA, 40 bp, Homo sapiens
taaaaattcagtatttttagagttaattttaactagggtc

SEQ ID NO: 40998 - DNA, 40 bp, Homo sapiens
accctagttaaaattaactctaaaaatactgaatttttaa

SEQ ID NO: 40999 - DNA, 40 bp, Homo sapiens
ttaaaaattcagtatttttagagttaattttaactagggt

SEQ ID NO: 41000 - DNA, 40 bp, Homo sapiens
ccctagttaaaattaactctaaaaatactgaatttttaac

SEQ ID NO: 41001 - DNA, 40 bp, Homo sapiens
gttaaaaattcagtatttttagagttaattttaactaggg

SEQ ID NO: 41002 - DNA, 40 bp, Homo sapiens
cctagttaaaattaactctaaaaatactgaatttttaacc

SEQ ID NO: 41003 - DNA, 40 bp, Homo sapiens
ggttaaaaattcagtatttttagagttaattttaactagg

SEQ ID NO: 41004 - DNA, 40 bp, Homo sapiens
ctagttaaaattaactctaaaaatactgaatttttaacct

SEQ ID NO: 41005 - DNA, 40 bp, Homo sapiens
aggttaaaaattcagtatttttagagttaattttaactag

SEQ ID NO: 41006 - DNA, 40 bp, Homo sapiens
tagttaaaattaactctaaaaatactgaatttttaaccta

SEQ ID NO: 41007 - DNA, 40 bp, Homo sapiens
taggttaaaaattcagtatttttagagttaattttaacta

SEQ ID NO: 41008 - DNA, 40 bp, Homo sapiens
agttaaaattaactctaaaaatactgaatttttaacctaa

SEQ ID NO: 41009 - DNA, 40 bp, Homo sapiens
ttaggttaaaaattcagtatttttagagttaattttaact

SEQ ID NO: 41010 - DNA, 40 bp, Homo sapiens
gttaaaattaactctaaaaatactgaatttttaacctaaa

SEQ ID NO: 41011 - DNA, 40 bp, Homo sapiens
tttaggttaaaaattcagtatttttagagttaattttaac

SEQ ID NO: 41012 - DNA, 40 bp, Homo sapiens
ttaaaattaactctaaaaatactgaatttttaacctaaac

SEQ ID NO: 41013 - DNA, 40 bp, Homo sapiens
gtttaggttaaaaattcagtatttttagagttaattttaa

SEQ ID NO: 41014 - DNA, 40 bp, Homo sapiens
taaaattaactctaaaaatactgaatttttaacctaaacc

SEQ ID NO: 41015 - DNA, 40 bp, Homo sapiens
ggtttaggttaaaaattcagtatttttagagttaatttta

SEQ ID NO: 41016 - DNA, 40 bp, Homo sapiens
aaaattaactctaaaaatactgaatttttaacctaaacct

SEQ ID NO: 41017 - DNA, 40 bp, Homo sapiens
aggtttaggttaaaaattcagtatttttagagttaatttt

SEQ ID NO: 41018 - DNA, 40 bp, Homo sapiens
aaattaactctaaaaatactgaatttttaacctaaacctt

SEQ ID NO: 41019 - DNA, 40 bp, Homo sapiens
aaggtttaggttaaaaattcagtatttttagagttaattt

SEQ ID NO: 41020 - DNA, 40 bp, Homo sapiens
aattaactctaaaaatactgaatttttaacctaaaccttt

SEQ ID NO: 41021 - DNA, 40 bp, Homo sapiens
aaaggtttaggttaaaaattcagtatttttagagttaatt

SEQ ID NO: 41022 - DNA, 40 bp, Homo sapiens
attaactctaaaaatactgaatttttaacctaaacctttt

SEQ ID NO: 41023 - DNA, 40 bp, Homo sapiens
aaaaggtttaggttaaaaattcagtatttttagagttaat

SEQ ID NO: 41024 - DNA, 40 bp, Homo sapiens
ttaactctaaaaatactgaatttttaacctaaacctttta

SEQ ID NO: 41025 - DNA, 40 bp, Homo sapiens
taaaaggtttaggttaaaaattcagtatttttagagttaa

SEQ ID NO: 41026 - DNA, 40 bp, Homo sapiens
taactctaaaaatactgaatttttaacctaaaccttttat

SEQ ID NO: 41027 - DNA, 40 bp, Homo sapiens
ataaaaggtttaggttaaaaattcagtatttttagagtta

SEQ ID NO: 41028 - DNA, 40 bp, Homo sapiens
aactctaaaaatactgaatttttaacctaaaccttttatt

SEQ ID NO: 41029 - DNA, 40 bp, Homo sapiens
aataaaaggtttaggttaaaaattcagtatttttagagtt

SEQ ID NO: 41030 - DNA, 40 bp, Homo sapiens
actctaaaaatactgaatttttaacctaaaccttttattt

SEQ ID NO: 41031 - DNA, 40 bp, Homo sapiens
aaataaaaggtttaggttaaaaattcagtatttttagagt

SEQ ID NO: 41032 - DNA, 40 bp, Homo sapiens
ctctaaaaatactgaatttttaacctaaaccttttatttc

SEQ ID NO: 41033 - DNA, 40 bp, Homo sapiens
gaaataaaaggtttaggttaaaaattcagtatttttagag

SEQ ID NO: 41034 - DNA, 40 bp, Homo sapiens
tctaaaaatactgaatttttaacctaaaccttttatttct

SEQ ID NO: 41035 - DNA, 40 bp, Homo sapiens
agaaataaaaggtttaggttaaaaattcagtatttttaga

SEQ ID NO: 41036 - DNA, 40 bp, Homo sapiens
ctaaaaatactgaatttttaacctaaaccttttatttcta

SEQ ID NO: 41037 - DNA, 40 bp, Homo sapiens
tagaaataaaaggtttaggttaaaaattcagtatttttag

SEQ ID NO: 41038 - DNA, 40 bp, Homo sapiens
taaaaatactgaatttttaacctaaaccttttatttctaa

SEQ ID NO: 41039 - DNA, 40 bp, Homo sapiens
ttagaaataaaaggtttaggttaaaaattcagtattttta

SEQ ID NO: 41040 - DNA, 40 bp, Homo sapiens
aaaaatactgaatttttaacctaaaccttttatttctaat

SEQ ID NO: 41041 - DNA, 40 bp, Homo sapiens
attagaaataaaaggtttaggttaaaaattcagtattttt

SEQ ID NO: 41042 - DNA, 40 bp, Homo sapiens
aaaatactgaatttttaacctaaaccttttatttctaatc

SEQ ID NO: 41043 - DNA, 40 bp, Homo sapiens
gattagaaataaaaggtttaggttaaaaattcagtatttt

SEQ ID NO: 41044 - DNA, 40 bp, Homo sapiens
aaatactgaatttttaacctaaaccttttatttctaatca

SEQ ID NO: 41045 - DNA, 40 bp, Homo sapiens
tgattagaaataaaaggtttaggttaaaaattcagtattt

SEQ ID NO: 41046 - DNA, 40 bp, Homo sapiens
aatactgaatttttaacctaaaccttttatttctaatcaa

SEQ ID NO: 41047 - DNA, 40 bp, Homo sapiens
ttgattagaaataaaaggtttaggttaaaaattcagtatt

SEQ ID NO: 41048 - DNA, 40 bp, Homo sapiens
atactgaatttttaacctaaaccttttatttctaatcaac

SEQ ID NO: 41049 - DNA, 40 bp, Homo sapiens
gttgattagaaataaaaggtttaggttaaaaattcagtat

SEQ ID NO: 41050 - DNA, 40 bp, Homo sapiens
tactgaatttttaacctaaaccttttatttctaatcaaca

SEQ ID NO: 41051 - DNA, 40 bp, Homo sapiens
tgttgattagaaataaaaggtttaggttaaaaattcagta

SEQ ID NO: 41052 - DNA, 40 bp, Homo sapiens
actgaatttttaacctaaaccttttatttctaatcaacag

SEQ ID NO: 41053 - DNA, 40 bp, Homo sapiens
ctgttgattagaaataaaaggtttaggttaaaaattcagt

SEQ ID NO: 41054 - DNA, 40 bp, Homo sapiens
ctgaatttttaacctaaaccttttatttctaatcaacagt

SEQ ID NO: 41055 - DNA, 40 bp, Homo sapiens
actgttgattagaaataaaaggtttaggttaaaaattcag

SEQ ID NO: 41056 - DNA, 40 bp, Homo sapiens
tgaatttttaacctaaaccttttatttctaatcaacagta

SEQ ID NO: 41057 - DNA, 40 bp, Homo sapiens
tactgttgattagaaataaaaggtttaggttaaaaattca

SEQ ID NO: 41058 - DNA, 40 bp, Homo sapiens
gaatttttaacctaaaccttttatttctaatcaacagtat

SEQ ID NO: 41059 - DNA, 40 bp, Homo sapiens
atactgttgattagaaataaaaggtttaggttaaaaattc

SEQ ID NO: 41060 - DNA, 40 bp, Homo sapiens
aatttttaacctaaaccttttatttctaatcaacagtatt

SEQ ID NO: 41061 - DNA, 40 bp, Homo sapiens
aatactgttgattagaaataaaaggtttaggttaaaaatt

SEQ ID NO: 41062 - DNA, 40 bp, Homo sapiens
atttttaacctaaaccttttatttctaatcaacagtatta

SEQ ID NO: 41063 - DNA, 40 bp, Homo sapiens
taatactgttgattagaaataaaaggtttaggttaaaaat

SEQ ID NO: 41064 - DNA, 40 bp, Homo sapiens
tttttaacctaaaccttttatttctaatcaacagtattat

SEQ ID NO: 41065 - DNA, 40 bp, Homo sapiens
ataatactgttgattagaaataaaaggtttaggttaaaaa

SEQ ID NO: 41066 - DNA, 40 bp, Homo sapiens
ttttaacctaaaccttttatttctaatcaacagtattatt

SEQ ID NO: 41067 - DNA, 40 bp, Homo sapiens
aataatactgttgattagaaataaaaggtttaggttaaaa

SEQ ID NO: 41068 - DNA, 40 bp, Homo sapiens
tttaacctaaaccttttatttctaatcaacagtattattt

SEQ ID NO: 41069 - DNA, 40 bp, Homo sapiens
aaataatactgttgattagaaataaaaggtttaggttaaa

SEQ ID NO: 41070 - DNA, 40 bp, Homo sapiens
ttaacctaaaccttttatttctaatcaacagtattattta

SEQ ID NO: 41071 - DNA, 40 bp, Homo sapiens
taaataatactgttgattagaaataaaaggtttaggttaa

SEQ ID NO: 41072 - DNA, 40 bp, Homo sapiens
taacctaaaccttttatttctaatcaacagtattatttat

SEQ ID NO: 41073 - DNA, 40 bp, Homo sapiens
ataaataatactgttgattagaaataaaaggtttaggtta

SEQ ID NO: 41074 - DNA, 40 bp, Homo sapiens
aacctaaaccttttatttctaatcaacagtattatttatg

SEQ ID NO: 41075 - DNA, 40 bp, Homo sapiens
cataaataatactgttgattagaaataaaaggtttaggtt

SEQ ID NO: 41076 - DNA, 40 bp, Homo sapiens
acctaaaccttttatttctaatcaacagtattatttatga

SEQ ID NO: 41077 - DNA, 40 bp, Homo sapiens
tcataaataatactgttgattagaaataaaaggtttaggt

SEQ ID NO: 41078 - DNA, 40 bp, Homo sapiens
cctaaaccttttatttctaatcaacagtattatttatgag

SEQ ID NO: 41079 - DNA, 40 bp, Homo sapiens
ctcataaataatactgttgattagaaataaaaggtttagg

SEQ ID NO: 41080 - DNA, 40 bp, Homo sapiens
ctaaaccttttatttctaatcaacagtattatttatgagt

SEQ ID NO: 41081 - DNA, 40 bp, Homo sapiens
actcataaataatactgttgattagaaataaaaggtttag

SEQ ID NO: 41082 - DNA, 40 bp, Homo sapiens
taaaccttttatttctaatcaacagtattatttatgagta

SEQ ID NO: 41083 - DNA, 40 bp, Homo sapiens
tactcataaataatactgttgattagaaataaaaggttta

SEQ ID NO: 41084 - DNA, 40 bp, Homo sapiens
aaaccttttatttctaatcaacagtattatttatgagtag

SEQ ID NO: 41085 - DNA, 40 bp, Homo sapiens
ctactcataaataatactgttgattagaaataaaaggttt

SEQ ID NO: 41086 - DNA, 40 bp, Homo sapiens
aaccttttatttctaatcaacagtattatttatgagtagg

SEQ ID NO: 41087 - DNA, 40 bp, Homo sapiens
cctactcataaataatactgttgattagaaataaaaggtt

SEQ ID NO: 41088 - DNA, 40 bp, Homo sapiens
accttttatttctaatcaacagtattatttatgagtaggt

SEQ ID NO: 41089 - DNA, 40 bp, Homo sapiens
acctactcataaataatactgttgattagaaataaaaggt

SEQ ID NO: 41090 - DNA, 40 bp, Homo sapiens
ccttttatttctaatcaacagtattatttatgagtaggtt

SEQ ID NO: 41091 - DNA, 40 bp, Homo sapiens
aacctactcataaataatactgttgattagaaataaaagg

SEQ ID NO: 41092 - DNA, 40 bp, Homo sapiens
cttttatttctaatcaacagtattatttatgagtaggtta

SEQ ID NO: 41093 - DNA, 40 bp, Homo sapiens
taacctactcataaataatactgttgattagaaataaaag

SEQ ID NO: 41094 - DNA, 40 bp, Homo sapiens
ttttatttctaatcaacagtattatttatgagtaggttat

SEQ ID NO: 41095 - DNA, 40 bp, Homo sapiens
ataacctactcataaataatactgttgattagaaataaaa

SEQ ID NO: 41096 - DNA, 40 bp, Homo sapiens
tttatttctaatcaacagtattatttatgagtaggttata

SEQ ID NO: 41097 - DNA, 40 bp, Homo sapiens
tataacctactcataaataatactgttgattagaaataaa

SEQ ID NO: 41098 - DNA, 40 bp, Homo sapiens
ttatttctaatcaacagtattatttatgagtaggttatag

SEQ ID NO: 41099 - DNA, 40 bp, Homo sapiens
ctataacctactcataaataatactgttgattagaaataa

SEQ ID NO: 41100 - DNA, 40 bp, Homo sapiens
tatttctaatcaacagtattatttatgagtaggttataga

SEQ ID NO: 41101 - DNA, 40 bp, Homo sapiens
tctataacctactcataaataatactgttgattagaaata

SEQ ID NO: 41102 - DNA, 40 bp, Homo sapiens
atttctaatcaacagtattatttatgagtaggttatagat

SEQ ID NO: 41103 - DNA, 40 bp, Homo sapiens
atctataacctactcataaataatactgttgattagaaat

SEQ ID NO: 41104 - DNA, 40 bp, Homo sapiens
tttctaatcaacagtattatttatgagtaggttatagatt

SEQ ID NO: 41105 - DNA, 40 bp, Homo sapiens
aatctataacctactcataaataatactgttgattagaaa

SEQ ID NO: 41106 - DNA, 40 bp, Homo sapiens
ttctaatcaacagtattatttatgagtaggttatagatta

SEQ ID NO: 41107 - DNA, 40 bp, Homo sapiens
taatctataacctactcataaataatactgttgattagaa

SEQ ID NO: 41108 - DNA, 40 bp, Homo sapiens
tctaatcaacagtattatttatgagtaggttatagattac

SEQ ID NO: 41109 - DNA, 40 bp, Homo sapiens
gtaatctataacctactcataaataatactgttgattaga

SEQ ID NO: 41110 - DNA, 40 bp, Homo sapiens
ctaatcaacagtattatttatgagtaggttatagattact

SEQ ID NO: 41111 - DNA, 40 bp, Homo sapiens
agtaatctataacctactcataaataatactgttgattag

SEQ ID NO: 41112 - DNA, 40 bp, Homo sapiens
taatcaacagtattatttatgagtaggttatagattactt

SEQ ID NO: 41113 - DNA, 40 bp, Homo sapiens
aagtaatctataacctactcataaataatactgttgatta

SEQ ID NO: 41114 - DNA, 40 bp, Homo sapiens
aatcaacagtattatttatgagtaggttatagattacttt

SEQ ID NO: 41115 - DNA, 40 bp, Homo sapiens
aaagtaatctataacctactcataaataatactgttgatt

SEQ ID NO: 41116 - DNA, 40 bp, Homo sapiens
atcaacagtattatttatgagtaggttatagattactttg

SEQ ID NO: 41117 - DNA, 40 bp, Homo sapiens
caaagtaatctataacctactcataaataatactgttgat

SEQ ID NO: 41118 - DNA, 40 bp, Homo sapiens
tcaacagtattatttatgagtaggttatagattactttga

SEQ ID NO: 41119 - DNA, 40 bp, Homo sapiens
tcaaagtaatctataacctactcataaataatactgttga

SEQ ID NO: 41120 - DNA, 40 bp, Homo sapiens
caacagtattatttatgagtaggttatagattactttgaa

SEQ ID NO: 41121 - DNA, 40 bp, Homo sapiens
ttcaaagtaatctataacctactcataaataatactgttg

SEQ ID NO: 41122 - DNA, 40 bp, Homo sapiens
aacagtattatttatgagtaggttatagattactttgaaa

SEQ ID NO: 41123 - DNA, 40 bp, Homo sapiens
tttcaaagtaatctataacctactcataaataatactgtt

SEQ ID NO: 41124 - DNA, 40 bp, Homo sapiens
acagtattatttatgagtaggttatagattactttgaaac

SEQ ID NO: 41125 - DNA, 40 bp, Homo sapiens
gtttcaaagtaatctataacctactcataaataatactgt

SEQ ID NO: 41126 - DNA, 40 bp, Homo sapiens
cagtattatttatgagtaggttatagattactttgaaacg

SEQ ID NO: 41127 - DNA, 40 bp, Homo sapiens
cgtttcaaagtaatctataacctactcataaataatactg

SEQ ID NO: 41128 - DNA, 40 bp, Homo sapiens
agtattatttatgagtaggttatagattactttgaaacgg

SEQ ID NO: 41129 - DNA, 40 bp, Homo sapiens
ccgtttcaaagtaatctataacctactcataaataatact

SEQ ID NO: 41130 - DNA, 40 bp, Homo sapiens
gtattatttatgagtaggttatagattactttgaaacgga

SEQ ID NO: 41131 - DNA, 40 bp, Homo sapiens
tccgtttcaaagtaatctataacctactcataaataatac

SEQ ID NO: 41132 - DNA, 40 bp, Homo sapiens
tattatttatgagtaggttatagattactttgaaacggaa

SEQ ID NO: 41133 - DNA, 40 bp, Homo sapiens
ttccgtttcaaagtaatctataacctactcataaataata

SEQ ID NO: 41134 - DNA, 40 bp, Homo sapiens
attatttatgagtaggttatagattactttgaaacggaat

SEQ ID NO: 41135 - DNA, 40 bp, Homo sapiens
attccgtttcaaagtaatctataacctactcataaataat

SEQ ID NO: 41136 - DNA, 40 bp, Homo sapiens
ttatttatgagtaggttatagattactttgaaacggaatg

SEQ ID NO: 41137 - DNA, 40 bp, Homo sapiens
cattccgtttcaaagtaatctataacctactcataaataa

SEQ ID NO: 41138 - DNA, 40 bp, Homo sapiens
tatttatgagtaggttatagattactttgaaacggaatgt

SEQ ID NO: 41139 - DNA, 40 bp, Homo sapiens
acattccgtttcaaagtaatctataacctactcataaata

SEQ ID NO: 41140 - DNA, 40 bp, Homo sapiens
atttatgagtaggttatagattactttgaaacggaatgtg

SEQ ID NO: 41141 - DNA, 40 bp, Homo sapiens
cacattccgtttcaaagtaatctataacctactcataaat

SEQ ID NO: 41142 - DNA, 40 bp, Homo sapiens
tttatgagtaggttatagattactttgaaacggaatgtgt

SEQ ID NO: 41143 - DNA, 40 bp, Homo sapiens
acacattccgtttcaaagtaatctataacctactcataaa

SEQ ID NO: 41144 - DNA, 40 bp, Homo sapiens
ttatgagtaggttatagattactttgaaacggaatgtgtc

SEQ ID NO: 41145 - DNA, 40 bp, Homo sapiens
gacacattccgtttcaaagtaatctataacctactcataa

SEQ ID NO: 41146 - DNA, 40 bp, Homo sapiens
tatgagtaggttatagattactttgaaacggaatgtgtct

SEQ ID NO: 41147 - DNA, 40 bp, Homo sapiens
agacacattccgtttcaaagtaatctataacctactcata

SEQ ID NO: 41148 - DNA, 40 bp, Homo sapiens
atgagtaggttatagattactttgaaacggaatgtgtctc

SEQ ID NO: 41149 - DNA, 40 bp, Homo sapiens
gagacacattccgtttcaaagtaatctataacctactcat

SEQ ID NO: 41150 - DNA, 40 bp, Homo sapiens
tgagtaggttatagattactttgaaacggaatgtgtctca

SEQ ID NO: 41151 - DNA, 40 bp, Homo sapiens
tgagacacattccgtttcaaagtaatctataacctactca

SEQ ID NO: 41152 - DNA, 40 bp, Homo sapiens
gagtaggttatagattactttgaaacggaatgtgtctcag

SEQ ID NO: 41153 - DNA, 40 bp, Homo sapiens
ctgagacacattccgtttcaaagtaatctataacctactc

SEQ ID NO: 41154 - DNA, 40 bp, Homo sapiens
agtaggttatagattactttgaaacggaatgtgtctcaga

SEQ ID NO: 41155 - DNA, 40 bp, Homo sapiens
tctgagacacattccgtttcaaagtaatctataacctact

SEQ ID NO: 41156 - DNA, 40 bp, Homo sapiens
gtaggttatagattactttgaaacggaatgtgtctcagaa

SEQ ID NO: 41157 - DNA, 40 bp, Homo sapiens
ttctgagacacattccgtttcaaagtaatctataacctac

SEQ ID NO: 41158 - DNA, 40 bp, Homo sapiens
taggttatagattactttgaaacggaatgtgtctcagaac

SEQ ID NO: 41159 - DNA, 40 bp, Homo sapiens
gttctgagacacattccgtttcaaagtaatctataaccta

SEQ ID NO: 41160 - DNA, 40 bp, Homo sapiens
aggttatagattactttgaaacggaatgtgtctcagaact

SEQ ID NO: 41161 - DNA, 40 bp, Homo sapiens
agttctgagacacattccgtttcaaagtaatctataacct

SEQ ID NO: 41162 - DNA, 40 bp, Homo sapiens
ggttatagattactttgaaacggaatgtgtctcagaactt

SEQ ID NO: 41163 - DNA, 40 bp, Homo sapiens
aagttctgagacacattccgtttcaaagtaatctataacc

SEQ ID NO: 41164 - DNA, 40 bp, Homo sapiens
gttatagattactttgaaacggaatgtgtctcagaacttt

SEQ ID NO: 41165 - DNA, 40 bp, Homo sapiens
aaagttctgagacacattccgtttcaaagtaatctataac

SEQ ID NO: 41166 - DNA, 40 bp, Homo sapiens
ttatagattactttgaaacggaatgtgtctcagaactttg

SEQ ID NO: 41167 - DNA, 40 bp, Homo sapiens
caaagttctgagacacattccgtttcaaagtaatctataa

SEQ ID NO: 41168 - DNA, 40 bp, Homo sapiens
tatagattactttgaaacggaatgtgtctcagaactttgc

SEQ ID NO: 41169 - DNA, 40 bp, Homo sapiens
gcaaagttctgagacacattccgtttcaaagtaatctata

SEQ ID NO: 41170 - DNA, 40 bp, Homo sapiens
atagattactttgaaacggaatgtgtctcagaactttgct

SEQ ID NO: 41171 - DNA, 40 bp, Homo sapiens
agcaaagttctgagacacattccgtttcaaagtaatctat

SEQ ID NO: 41172 - DNA, 40 bp, Homo sapiens
tagattactttgaaacggaatgtgtctcagaactttgcta

SEQ ID NO: 41173 - DNA, 40 bp, Homo sapiens
tagcaaagttctgagacacattccgtttcaaagtaatcta

SEQ ID NO: 41174 - DNA, 40 bp, Homo sapiens
agattactttgaaacggaatgtgtctcagaactttgctat

SEQ ID NO: 41175 - DNA, 40 bp, Homo sapiens
atagcaaagttctgagacacattccgtttcaaagtaatct

SEQ ID NO: 41176 - DNA, 40 bp, Homo sapiens
gattactttgaaacggaatgtgtctcagaactttgctatc

SEQ ID NO: 41177 - DNA, 40 bp, Homo sapiens
gatagcaaagttctgagacacattccgtttcaaagtaatc

SEQ ID NO: 41178 - DNA, 40 bp, Homo sapiens
attactttgaaacggaatgtgtctcagaactttgctatcg

SEQ ID NO: 41179 - DNA, 40 bp, Homo sapiens
cgatagcaaagttctgagacacattccgtttcaaagtaat

SEQ ID NO: 41180 - DNA, 40 bp, Homo sapiens
ttactttgaaacggaatgtgtctcagaactttgctatcga

SEQ ID NO: 41181 - DNA, 40 bp, Homo sapiens
tcgatagcaaagttctgagacacattccgtttcaaagtaa

SEQ ID NO: 41182 - DNA, 40 bp, Homo sapiens
tactttgaaacggaatgtgtctcagaactttgctatcgat

SEQ ID NO: 41183 - DNA, 40 bp, Homo sapiens
atcgatagcaaagttctgagacacattccgtttcaaagta

SEQ ID NO: 41184 - DNA, 40 bp, Homo sapiens
actttgaaacggaatgtgtctcagaactttgctatcgata

SEQ ID NO: 41185 - DNA, 40 bp, Homo sapiens
tatcgatagcaaagttctgagacacattccgtttcaaagt

SEQ ID NO: 41186 - DNA, 40 bp, Homo sapiens
ctttgaaacggaatgtgtctcagaactttgctatcgatat

SEQ ID NO: 41187 - DNA, 40 bp, Homo sapiens
atatcgatagcaaagttctgagacacattccgtttcaaag

SEQ ID NO: 41188 - DNA, 40 bp, Homo sapiens
tttgaaacggaatgtgtctcagaactttgctatcgatatt

SEQ ID NO: 41189 - DNA, 40 bp, Homo sapiens
aatatcgatagcaaagttctgagacacattccgtttcaaa

SEQ ID NO: 41190 - DNA, 40 bp, Homo sapiens
ttgaaacggaatgtgtctcagaactttgctatcgatattt

SEQ ID NO: 41191 - DNA, 40 bp, Homo sapiens
aaatatcgatagcaaagttctgagacacattccgtttcaa

SEQ ID NO: 41192 - DNA, 40 bp, Homo sapiens
tgaaacggaatgtgtctcagaactttgctatcgatatttt

SEQ ID NO: 41193 - DNA, 40 bp, Homo sapiens
aaaatatcgatagcaaagttctgagacacattccgtttca

SEQ ID NO: 41194 - DNA, 40 bp, Homo sapiens
gaaacggaatgtgtctcagaactttgctatcgatattttt

SEQ ID NO: 41195 - DNA, 40 bp, Homo sapiens
aaaaatatcgatagcaaagttctgagacacattccgtttc

SEQ ID NO: 41196 - DNA, 40 bp, Homo sapiens
aaacggaatgtgtctcagaactttgctatcgatattttta

SEQ ID NO: 41197 - DNA, 40 bp, Homo sapiens
taaaaatatcgatagcaaagttctgagacacattccgttt

SEQ ID NO: 41198 - DNA, 40 bp, Homo sapiens
aacggaatgtgtctcagaactttgctatcgatatttttaa

SEQ ID NO: 41199 - DNA, 40 bp, Homo sapiens
ttaaaaatatcgatagcaaagttctgagacacattccgtt

SEQ ID NO: 41200 - DNA, 40 bp, Homo sapiens
acggaatgtgtctcagaactttgctatcgatatttttaag

SEQ ID NO: 41201 - DNA, 40 bp, Homo sapiens
cttaaaaatatcgatagcaaagttctgagacacattccgt

SEQ ID NO: 41202 - DNA, 40 bp, Homo sapiens
cggaatgtgtctcagaactttgctatcgatatttttaagg

SEQ ID NO: 41203 - DNA, 40 bp, Homo sapiens
ccttaaaaatatcgatagcaaagttctgagacacattccg

SEQ ID NO: 41204 - DNA, 40 bp, Homo sapiens
ggaatgtgtctcagaactttgctatcgatatttttaaggt

SEQ ID NO: 41205 - DNA, 40 bp, Homo sapiens
accttaaaaatatcgatagcaaagttctgagacacattcc

SEQ ID NO: 41206 - DNA, 40 bp, Homo sapiens
gaatgtgtctcagaactttgctatcgatatttttaaggtc

SEQ ID NO: 41207 - DNA, 40 bp, Homo sapiens
gaccttaaaaatatcgatagcaaagttctgagacacattc

SEQ ID NO: 41208 - DNA, 40 bp, Homo sapiens
aatgtgtctcagaactttgctatcgatatttttaaggtct

SEQ ID NO: 41209 - DNA, 40 bp, Homo sapiens
agaccttaaaaatatcgatagcaaagttctgagacacatt

SEQ ID NO: 41210 - DNA, 40 bp, Homo sapiens
atgtgtctcagaactttgctatcgatatttttaaggtctg

SEQ ID NO: 41211 - DNA, 40 bp, Homo sapiens
cagaccttaaaaatatcgatagcaaagttctgagacacat

SEQ ID NO: 41212 - DNA, 40 bp, Homo sapiens
tgtgtctcagaactttgctatcgatatttttaaggtctgg

SEQ ID NO: 41213 - DNA, 40 bp, Homo sapiens
ccagaccttaaaaatatcgatagcaaagttctgagacaca

SEQ ID NO: 41214 - DNA, 40 bp, Homo sapiens
gtgtctcagaactttgctatcgatatttttaaggtctggt

SEQ ID NO: 41215 - DNA, 40 bp, Homo sapiens
accagaccttaaaaatatcgatagcaaagttctgagacac

SEQ ID NO: 41216 - DNA, 40 bp, Homo sapiens
tgtctcagaactttgctatcgatatttttaaggtctggta

SEQ ID NO: 41217 - DNA, 40 bp, Homo sapiens
taccagaccttaaaaatatcgatagcaaagttctgagaca

SEQ ID NO: 41218 - DNA, 40 bp, Homo sapiens
gtctcagaactttgctatcgatatttttaaggtctggtag

SEQ ID NO: 41219 - DNA, 40 bp, Homo sapiens
ctaccagaccttaaaaatatcgatagcaaagttctgagac

SEQ ID NO: 41220 - DNA, 40 bp, Homo sapiens
tctcagaactttgctatcgatatttttaaggtctggtagg

SEQ ID NO: 41221 - DNA, 40 bp, Homo sapiens
cctaccagaccttaaaaatatcgatagcaaagttctgaga

SEQ ID NO: 41222 - DNA, 40 bp, Homo sapiens
ctcagaactttgctatcgatatttttaaggtctggtaggg

SEQ ID NO: 41223 - DNA, 40 bp, Homo sapiens
ccctaccagaccttaaaaatatcgatagcaaagttctgag

SEQ ID NO: 41224 - DNA, 40 bp, Homo sapiens
tcagaactttgctatcgatatttttaaggtctggtaggga

SEQ ID NO: 41225 - DNA, 40 bp, Homo sapiens
tccctaccagaccttaaaaatatcgatagcaaagttctga

SEQ ID NO: 41226 - DNA, 40 bp, Homo sapiens
cagaactttgctatcgatatttttaaggtctggtagggaa

SEQ ID NO: 41227 - DNA, 40 bp, Homo sapiens
ttccctaccagaccttaaaaatatcgatagcaaagttctg

SEQ ID NO: 41228 - DNA, 40 bp, Homo sapiens
agaactttgctatcgatatttttaaggtctggtagggaaa

SEQ ID NO: 41229 - DNA, 40 bp, Homo sapiens
tttccctaccagaccttaaaaatatcgatagcaaagttct

SEQ ID NO: 41230 - DNA, 40 bp, Homo sapiens
gaactttgctatcgatatttttaaggtctggtagggaaaa

SEQ ID NO: 41231 - DNA, 40 bp, Homo sapiens
ttttccctaccagaccttaaaaatatcgatagcaaagttc

SEQ ID NO: 41232 - DNA, 40 bp, Homo sapiens
aactttgctatcgatatttttaaggtctggtagggaaaag

SEQ ID NO: 41233 - DNA, 40 bp, Homo sapiens
cttttccctaccagaccttaaaaatatcgatagcaaagtt

SEQ ID NO: 41234 - DNA, 40 bp, Homo sapiens
actttgctatcgatatttttaaggtctggtagggaaaaga

SEQ ID NO: 41235 - DNA, 40 bp, Homo sapiens
tcttttccctaccagaccttaaaaatatcgatagcaaagt

SEQ ID NO: 41236 - DNA, 40 bp, Homo sapiens
ctttgctatcgatatttttaaggtctggtagggaaaagat

SEQ ID NO: 41237 - DNA, 40 bp, Homo sapiens
atcttttccctaccagaccttaaaaatatcgatagcaaag

SEQ ID NO: 41238 - DNA, 40 bp, Homo sapiens
tttgctatcgatatttttaaggtctggtagggaaaagata

SEQ ID NO: 41239 - DNA, 40 bp, Homo sapiens
tatcttttccctaccagaccttaaaaatatcgatagcaaa

SEQ ID NO: 41240 - DNA, 40 bp, Homo sapiens
ttgctatcgatatttttaaggtctggtagggaaaagataa

SEQ ID NO: 41241 - DNA, 40 bp, Homo sapiens
ttatcttttccctaccagaccttaaaaatatcgatagcaa

SEQ ID NO: 41242 - DNA, 40 bp, Homo sapiens
tgctatcgatatttttaaggtctggtagggaaaagataat

SEQ ID NO: 41243 - DNA, 40 bp, Homo sapiens
attatcttttccctaccagaccttaaaaatatcgatagca

SEQ ID NO: 41244 - DNA, 40 bp, Homo sapiens
gctatcgatatttttaaggtctggtagggaaaagataata

SEQ ID NO: 41245 - DNA, 40 bp, Homo sapiens
tattatcttttccctaccagaccttaaaaatatcgatagc

SEQ ID NO: 41246 - DNA, 40 bp, Homo sapiens
ctatcgatatttttaaggtctggtagggaaaagataatag

SEQ ID NO: 41247 - DNA, 40 bp, Homo sapiens
ctattatcttttccctaccagaccttaaaaatatcgatag

SEQ ID NO: 41248 - DNA, 40 bp, Homo sapiens
tatcgatatttttaaggtctggtagggaaaagataatagg

SEQ ID NO: 41249 - DNA, 40 bp, Homo sapiens
cctattatcttttccctaccagaccttaaaaatatcgata

SEQ ID NO: 41250 - DNA, 40 bp, Homo sapiens
atcgatatttttaaggtctggtagggaaaagataatagga

SEQ ID NO: 41251 - DNA, 40 bp, Homo sapiens
tcctattatcttttccctaccagaccttaaaaatatcgat

SEQ ID NO: 41252 - DNA, 40 bp, Homo sapiens
tcgatatttttaaggtctggtagggaaaagataataggaa

SEQ ID NO: 41253 - DNA, 40 bp, Homo sapiens
ttcctattatcttttccctaccagaccttaaaaatatcga

SEQ ID NO: 41254 - DNA, 40 bp, Homo sapiens
cgatatttttaaggtctggtagggaaaagataataggaat

SEQ ID NO: 41255 - DNA, 40 bp, Homo sapiens
attcctattatcttttccctaccagaccttaaaaatatcg

SEQ ID NO: 41256 - DNA, 40 bp, Homo sapiens
gatatttttaaggtctggtagggaaaagataataggaatg

SEQ ID NO: 41257 - DNA, 40 bp, Homo sapiens
cattcctattatcttttccctaccagaccttaaaaatatc

SEQ ID NO: 41258 - DNA, 40 bp, Homo sapiens
atatttttaaggtctggtagggaaaagataataggaatga

SEQ ID NO: 41259 - DNA, 40 bp, Homo sapiens
tcattcctattatcttttccctaccagaccttaaaaatat

SEQ ID NO: 41260 - DNA, 40 bp, Homo sapiens
tatttttaaggtctggtagggaaaagataataggaatgag

SEQ ID NO: 41261 - DNA, 40 bp, Homo sapiens
ctcattcctattatcttttccctaccagaccttaaaaata

SEQ ID NO: 41262 - DNA, 40 bp, Homo sapiens
atttttaaggtctggtagggaaaagataataggaatgaga

SEQ ID NO: 41263 - DNA, 40 bp, Homo sapiens
tctcattcctattatcttttccctaccagaccttaaaaat

SEQ ID NO: 41264 - DNA, 40 bp, Homo sapiens
tttttaaggtctggtagggaaaagataataggaatgagat

SEQ ID NO: 41265 - DNA, 40 bp, Homo sapiens
atctcattcctattatcttttccctaccagaccttaaaaa

SEQ ID NO: 41266 - DNA, 40 bp, Homo sapiens
ttttaaggtctggtagggaaaagataataggaatgagatt

SEQ ID NO: 41267 - DNA, 40 bp, Homo sapiens
aatctcattcctattatcttttccctaccagaccttaaaa

SEQ ID NO: 41268 - DNA, 40 bp, Homo sapiens
tttaaggtctggtagggaaaagataataggaatgagattt

SEQ ID NO: 41269 - DNA, 40 bp, Homo sapiens
aaatctcattcctattatcttttccctaccagaccttaaa

SEQ ID NO: 41270 - DNA, 40 bp, Homo sapiens
ttaaggtctggtagggaaaagataataggaatgagattta

SEQ ID NO: 41271 - DNA, 40 bp, Homo sapiens
taaatctcattcctattatcttttccctaccagaccttaa

SEQ ID NO: 41272 - DNA, 40 bp, Homo sapiens
taaggtctggtagggaaaagataataggaatgagatttat

SEQ ID NO: 41273 - DNA, 40 bp, Homo sapiens
ataaatctcattcctattatcttttccctaccagacctta

SEQ ID NO: 41274 - DNA, 40 bp, Homo sapiens
aaggtctggtagggaaaagataataggaatgagatttatc

SEQ ID NO: 41275 - DNA, 40 bp, Homo sapiens
gataaatctcattcctattatcttttccctaccagacctt

SEQ ID NO: 41276 - DNA, 40 bp, Homo sapiens
aggtctggtagggaaaagataataggaatgagatttatca

SEQ ID NO: 41277 - DNA, 40 bp, Homo sapiens
tgataaatctcattcctattatcttttccctaccagacct

SEQ ID NO: 41278 - DNA, 40 bp, Homo sapiens
ggtctggtagggaaaagataataggaatgagatttatcag

SEQ ID NO: 41279 - DNA, 40 bp, Homo sapiens
ctgataaatctcattcctattatcttttccctaccagacc

SEQ ID NO: 41280 - DNA, 40 bp, Homo sapiens
gtctggtagggaaaagataataggaatgagatttatcagt

SEQ ID NO: 41281 - DNA, 40 bp, Homo sapiens
actgataaatctcattcctattatcttttccctaccagac

SEQ ID NO: 41282 - DNA, 40 bp, Homo sapiens
tctggtagggaaaagataataggaatgagatttatcagtg

SEQ ID NO: 41283 - DNA, 40 bp, Homo sapiens
cactgataaatctcattcctattatcttttccctaccaga

SEQ ID NO: 41284 - DNA, 40 bp, Homo sapiens
ctggtagggaaaagataataggaatgagatttatcagtga

SEQ ID NO: 41285 - DNA, 40 bp, Homo sapiens
tcactgataaatctcattcctattatcttttccctaccag

SEQ ID NO: 41286 - DNA, 40 bp, Homo sapiens
tggtagggaaaagataataggaatgagatttatcagtgaa

SEQ ID NO: 41287 - DNA, 40 bp, Homo sapiens
ttcactgataaatctcattcctattatcttttccctacca

SEQ ID NO: 41288 - DNA, 40 bp, Homo sapiens
ggtagggaaaagataataggaatgagatttatcagtgaat

SEQ ID NO: 41289 - DNA, 40 bp, Homo sapiens
attcactgataaatctcattcctattatcttttccctacc

SEQ ID NO: 41290 - DNA, 40 bp, Homo sapiens
gtagggaaaagataataggaatgagatttatcagtgaata

SEQ ID NO: 41291 - DNA, 40 bp, Homo sapiens
tattcactgataaatctcattcctattatcttttccctac

SEQ ID NO: 41292 - DNA, 40 bp, Homo sapiens
tagggaaaagataataggaatgagatttatcagtgaatag

SEQ ID NO: 41293 - DNA, 40 bp, Homo sapiens
ctattcactgataaatctcattcctattatcttttcccta

SEQ ID NO: 41294 - DNA, 40 bp, Homo sapiens
agggaaaagataataggaatgagatttatcagtgaatagg

SEQ ID NO: 41295 - DNA, 40 bp, Homo sapiens
cctattcactgataaatctcattcctattatcttttccct

SEQ ID NO: 41296 - DNA, 40 bp, Homo sapiens
gggaaaagataataggaatgagatttatcagtgaataggg

SEQ ID NO: 41297 - DNA, 40 bp, Homo sapiens
ccctattcactgataaatctcattcctattatcttttccc

SEQ ID NO: 41298 - DNA, 40 bp, Homo sapiens
ggaaaagataataggaatgagatttatcagtgaatagggg

SEQ ID NO: 41299 - DNA, 40 bp, Homo sapiens
cccctattcactgataaatctcattcctattatcttttcc

SEQ ID NO: 41300 - DNA, 40 bp, Homo sapiens
gaaaagataataggaatgagatttatcagtgaatagggga

SEQ ID NO: 41301 - DNA, 40 bp, Homo sapiens
tcccctattcactgataaatctcattcctattatcttttc

SEQ ID NO: 41302 - DNA, 40 bp, Homo sapiens
aaaagataataggaatgagatttatcagtgaataggggac

SEQ ID NO: 41303 - DNA, 40 bp, Homo sapiens
gtcccctattcactgataaatctcattcctattatctttt

SEQ ID NO: 41304 - DNA, 40 bp, Homo sapiens
aaagataataggaatgagatttatcagtgaataggggact

SEQ ID NO: 41305 - DNA, 40 bp, Homo sapiens
agtcccctattcactgataaatctcattcctattatcttt

SEQ ID NO: 41306 - DNA, 40 bp, Homo sapiens
aagataataggaatgagatttatcagtgaataggggactg

SEQ ID NO: 41307 - DNA, 40 bp, Homo sapiens
cagtcccctattcactgataaatctcattcctattatctt

SEQ ID NO: 41308 - DNA, 40 bp, Homo sapiens
agataataggaatgagatttatcagtgaataggggactgc

SEQ ID NO: 41309 - DNA, 40 bp, Homo sapiens
gcagtcccctattcactgataaatctcattcctattatct

SEQ ID NO: 41310 - DNA, 40 bp, Homo sapiens
gataataggaatgagatttatcagtgaataggggactgct

SEQ ID NO: 41311 - DNA, 40 bp, Homo sapiens
agcagtcccctattcactgataaatctcattcctattatc

SEQ ID NO: 41312 - DNA, 40 bp, Homo sapiens
ataataggaatgagatttatcagtgaataggggactgctt

SEQ ID NO: 41313 - DNA, 40 bp, Homo sapiens
aagcagtcccctattcactgataaatctcattcctattat

SEQ ID NO: 41314 - DNA, 40 bp, Homo sapiens
taataggaatgagatttatcagtgaataggggactgcttt

SEQ ID NO: 41315 - DNA, 40 bp, Homo sapiens
aaagcagtcccctattcactgataaatctcattcctatta

SEQ ID NO: 41316 - DNA, 40 bp, Homo sapiens
aataggaatgagatttatcagtgaataggggactgctttc

SEQ ID NO: 41317 - DNA, 40 bp, Homo sapiens
gaaagcagtcccctattcactgataaatctcattcctatt

SEQ ID NO: 41318 - DNA, 40 bp, Homo sapiens
ataggaatgagatttatcagtgaataggggactgctttcc

SEQ ID NO: 41319 - DNA, 40 bp, Homo sapiens
ggaaagcagtcccctattcactgataaatctcattcctat

SEQ ID NO: 41320 - DNA, 40 bp, Homo sapiens
taggaatgagatttatcagtgaataggggactgctttccc

SEQ ID NO: 41321 - DNA, 40 bp, Homo sapiens
gggaaagcagtcccctattcactgataaatctcattccta

SEQ ID NO: 41322 - DNA, 40 bp, Homo sapiens
aggaatgagatttatcagtgaataggggactgctttccca

SEQ ID NO: 41323 - DNA, 40 bp, Homo sapiens
tgggaaagcagtcccctattcactgataaatctcattcct

SEQ ID NO: 41324 - DNA, 40 bp, Homo sapiens
ggaatgagatttatcagtgaataggggactgctttcccag

SEQ ID NO: 41325 - DNA, 40 bp, Homo sapiens
ctgggaaagcagtcccctattcactgataaatctcattcc

SEQ ID NO: 41326 - DNA, 40 bp, Homo sapiens
gaatgagatttatcagtgaataggggactgctttcccagt

SEQ ID NO: 41327 - DNA, 40 bp, Homo sapiens
actgggaaagcagtcccctattcactgataaatctcattc

SEQ ID NO: 41328 - DNA, 40 bp, Homo sapiens
aatgagatttatcagtgaataggggactgctttcccagtt

SEQ ID NO: 41329 - DNA, 40 bp, Homo sapiens
aactgggaaagcagtcccctattcactgataaatctcatt

SEQ ID NO: 41330 - DNA, 40 bp, Homo sapiens
atgagatttatcagtgaataggggactgctttcccagttt

SEQ ID NO: 41331 - DNA, 40 bp, Homo sapiens
aaactgggaaagcagtcccctattcactgataaatctcat

SEQ ID NO: 41332 - DNA, 40 bp, Homo sapiens
tgagatttatcagtgaataggggactgctttcccagtttc

SEQ ID NO: 41333 - DNA, 40 bp, Homo sapiens
gaaactgggaaagcagtcccctattcactgataaatctca

SEQ ID NO: 41334 - DNA, 40 bp, Homo sapiens
gagatttatcagtgaataggggactgctttcccagtttct

SEQ ID NO: 41335 - DNA, 40 bp, Homo sapiens
agaaactgggaaagcagtcccctattcactgataaatctc

SEQ ID NO: 41336 - DNA, 40 bp, Homo sapiens
agatttatcagtgaataggggactgctttcccagtttctc

SEQ ID NO: 41337 - DNA, 40 bp, Homo sapiens
gagaaactgggaaagcagtcccctattcactgataaatct

SEQ ID NO: 41338 - DNA, 40 bp, Homo sapiens
gatttatcagtgaataggggactgctttcccagtttctcg

SEQ ID NO: 41339 - DNA, 40 bp, Homo sapiens
cgagaaactgggaaagcagtcccctattcactgataaatc

SEQ ID NO: 41340 - DNA, 40 bp, Homo sapiens
atttatcagtgaataggggactgctttcccagtttctcgg

SEQ ID NO: 41341 - DNA, 40 bp, Homo sapiens
ccgagaaactgggaaagcagtcccctattcactgataaat

SEQ ID NO: 41342 - DNA, 40 bp, Homo sapiens
tttatcagtgaataggggactgctttcccagtttctcggt

SEQ ID NO: 41343 - DNA, 40 bp, Homo sapiens
accgagaaactgggaaagcagtcccctattcactgataaa

SEQ ID NO: 41344 - DNA, 40 bp, Homo sapiens
ttatcagtgaataggggactgctttcccagtttctcggtc

SEQ ID NO: 41345 - DNA, 40 bp, Homo sapiens
gaccgagaaactgggaaagcagtcccctattcactgataa

SEQ ID NO: 41346 - DNA, 40 bp, Homo sapiens
tatcagtgaataggggactgctttcccagtttctcggtcg

SEQ ID NO: 41347 - DNA, 40 bp, Homo sapiens
cgaccgagaaactgggaaagcagtcccctattcactgata

SEQ ID NO: 41348 - DNA, 40 bp, Homo sapiens
atcagtgaataggggactgctttcccagtttctcggtcgc

SEQ ID NO: 41349 - DNA, 40 bp, Homo sapiens
gcgaccgagaaactgggaaagcagtcccctattcactgat

SEQ ID NO: 41350 - DNA, 40 bp, Homo sapiens
tcagtgaataggggactgctttcccagtttctcggtcgca

SEQ ID NO: 41351 - DNA, 40 bp, Homo sapiens
tgcgaccgagaaactgggaaagcagtcccctattcactga

SEQ ID NO: 41352 - DNA, 40 bp, Homo sapiens
cagtgaataggggactgctttcccagtttctcggtcgcac

SEQ ID NO: 41353 - DNA, 40 bp, Homo sapiens
gtgcgaccgagaaactgggaaagcagtcccctattcactg

SEQ ID NO: 41354 - DNA, 40 bp, Homo sapiens
agtgaataggggactgctttcccagtttctcggtcgcact

SEQ ID NO: 41355 - DNA, 40 bp, Homo sapiens
agtgcgaccgagaaactgggaaagcagtcccctattcact

SEQ ID NO: 41356 - DNA, 40 bp, Homo sapiens
gtgaataggggactgctttcccagtttctcggtcgcactg

SEQ ID NO: 41357 - DNA, 40 bp, Homo sapiens
cagtgcgaccgagaaactgggaaagcagtcccctattcac

SEQ ID NO: 41358 - DNA, 40 bp, Homo sapiens
tgaataggggactgctttcccagtttctcggtcgcactgg

SEQ ID NO: 41359 - DNA, 40 bp, Homo sapiens
ccagtgcgaccgagaaactgggaaagcagtcccctattca

SEQ ID NO: 41360 - DNA, 40 bp, Homo sapiens
gaataggggactgctttcccagtttctcggtcgcactggt

SEQ ID NO: 41361 - DNA, 40 bp, Homo sapiens
accagtgcgaccgagaaactgggaaagcagtcccctattc

SEQ ID NO: 41362 - DNA, 40 bp, Homo sapiens
aataggggactgctttcccagtttctcggtcgcactggtg

SEQ ID NO: 41363 - DNA, 40 bp, Homo sapiens
caccagtgcgaccgagaaactgggaaagcagtcccctatt

SEQ ID NO: 41364 - DNA, 40 bp, Homo sapiens
ataggggactgctttcccagtttctcggtcgcactggtgt

SEQ ID NO: 41365 - DNA, 40 bp, Homo sapiens
acaccagtgcgaccgagaaactgggaaagcagtcccctat

SEQ ID NO: 41366 - DNA, 40 bp, Homo sapiens
taggggactgctttcccagtttctcggtcgcactggtgta

SEQ ID NO: 41367 - DNA, 40 bp, Homo sapiens
tacaccagtgcgaccgagaaactgggaaagcagtccccta

SEQ ID NO: 41368 - DNA, 40 bp, Homo sapiens
aggggactgctttcccagtttctcggtcgcactggtgtat

SEQ ID NO: 41369 - DNA, 40 bp, Homo sapiens
atacaccagtgcgaccgagaaactgggaaagcagtcccct

SEQ ID NO: 41370 - DNA, 40 bp, Homo sapiens
ggggactgctttcccagtttctcggtcgcactggtgtatt

SEQ ID NO: 41371 - DNA, 40 bp, Homo sapiens
aatacaccagtgcgaccgagaaactgggaaagcagtcccc

SEQ ID NO: 41372 - DNA, 40 bp, Homo sapiens
gggactgctttcccagtttctcggtcgcactggtgtattc

SEQ ID NO: 41373 - DNA, 40 bp, Homo sapiens
gaatacaccagtgcgaccgagaaactgggaaagcagtccc

SEQ ID NO: 41374 - DNA, 40 bp, Homo sapiens
ggactgctttcccagtttctcggtcgcactggtgtattca

SEQ ID NO: 41375 - DNA, 40 bp, Homo sapiens
tgaatacaccagtgcgaccgagaaactgggaaagcagtcc

SEQ ID NO: 41376 - DNA, 40 bp, Homo sapiens
gactgctttcccagtttctcggtcgcactggtgtattcac

SEQ ID NO: 41377 - DNA, 40 bp, Homo sapiens
gtgaatacaccagtgcgaccgagaaactgggaaagcagtc

SEQ ID NO: 41378 - DNA, 40 bp, Homo sapiens
actgctttcccagtttctcggtcgcactggtgtattcacc

SEQ ID NO: 41379 - DNA, 40 bp, Homo sapiens
ggtgaatacaccagtgcgaccgagaaactgggaaagcagt

SEQ ID NO: 41380 - DNA, 40 bp, Homo sapiens
ctgctttcccagtttctcggtcgcactggtgtattcacca

SEQ ID NO: 41381 - DNA, 40 bp, Homo sapiens
tggtgaatacaccagtgcgaccgagaaactgggaaagcag

SEQ ID NO: 41382 - DNA, 40 bp, Homo sapiens
tgctttcccagtttctcggtcgcactggtgtattcaccat

SEQ ID NO: 41383 - DNA, 40 bp, Homo sapiens
atggtgaatacaccagtgcgaccgagaaactgggaaagca

SEQ ID NO: 41384 - DNA, 40 bp, Homo sapiens
gctttcccagtttctcggtcgcactggtgtattcaccatg

SEQ ID NO: 41385 - DNA, 40 bp, Homo sapiens
catggtgaatacaccagtgcgaccgagaaactgggaaagc

SEQ ID NO: 41386 - DNA, 40 bp, Homo sapiens
ctttcccagtttctcggtcgcactggtgtattcaccatgg

SEQ ID NO: 41387 - DNA, 40 bp, Homo sapiens
ccatggtgaatacaccagtgcgaccgagaaactgggaaag

SEQ ID NO: 41388 - DNA, 40 bp, Homo sapiens
tttcccagtttctcggtcgcactggtgtattcaccatgga

SEQ ID NO: 41389 - DNA, 40 bp, Homo sapiens
tccatggtgaatacaccagtgcgaccgagaaactgggaaa

SEQ ID NO: 41390 - DNA, 40 bp, Homo sapiens
ttcccagtttctcggtcgcactggtgtattcaccatggaa

SEQ ID NO: 41391 - DNA, 40 bp, Homo sapiens
ttccatggtgaatacaccagtgcgaccgagaaactgggaa

SEQ ID NO: 41392 - DNA, 40 bp, Homo sapiens
tcccagtttctcggtcgcactggtgtattcaccatggaag

SEQ ID NO: 41393 - DNA, 40 bp, Homo sapiens
cttccatggtgaatacaccagtgcgaccgagaaactggga

SEQ ID NO: 41394 - DNA, 40 bp, Homo sapiens
cccagtttctcggtcgcactggtgtattcaccatggaagc

SEQ ID NO: 41395 - DNA, 40 bp, Homo sapiens
gcttccatggtgaatacaccagtgcgaccgagaaactggg

SEQ ID NO: 41396 - DNA, 40 bp, Homo sapiens
ccagtttctcggtcgcactggtgtattcaccatggaagca

SEQ ID NO: 41397 - DNA, 40 bp, Homo sapiens
tgcttccatggtgaatacaccagtgcgaccgagaaactgg

SEQ ID NO: 41398 - DNA, 40 bp, Homo sapiens
cagtttctcggtcgcactggtgtattcaccatggaagcat

SEQ ID NO: 41399 - DNA, 40 bp, Homo sapiens
atgcttccatggtgaatacaccagtgcgaccgagaaactg

SEQ ID NO: 41400 - DNA, 40 bp, Homo sapiens
agtttctcggtcgcactggtgtattcaccatggaagcatc

SEQ ID NO: 41401 - DNA, 40 bp, Homo sapiens
gatgcttccatggtgaatacaccagtgcgaccgagaaact

SEQ ID NO: 41402 - DNA, 40 bp, Homo sapiens
gtttctcggtcgcactggtgtattcaccatggaagcatct

SEQ ID NO: 41403 - DNA, 40 bp, Homo sapiens
agatgcttccatggtgaatacaccagtgcgaccgagaaac

SEQ ID NO: 41404 - DNA, 40 bp, Homo sapiens
tttctcggtcgcactggtgtattcaccatggaagcatctt

SEQ ID NO: 41405 - DNA, 40 bp, Homo sapiens
aagatgcttccatggtgaatacaccagtgcgaccgagaaa

SEQ ID NO: 41406 - DNA, 40 bp, Homo sapiens
ttctcggtcgcactggtgtattcaccatggaagcatctta

SEQ ID NO: 41407 - DNA, 40 bp, Homo sapiens
taagatgcttccatggtgaatacaccagtgcgaccgagaa

SEQ ID NO: 41408 - DNA, 40 bp, Homo sapiens
tctcggtcgcactggtgtattcaccatggaagcatcttat

SEQ ID NO: 41409 - DNA, 40 bp, Homo sapiens
ataagatgcttccatggtgaatacaccagtgcgaccgaga

SEQ ID NO: 41410 - DNA, 40 bp, Homo sapiens
ctcggtcgcactggtgtattcaccatggaagcatcttatg

SEQ ID NO: 41411 - DNA, 40 bp, Homo sapiens
cataagatgcttccatggtgaatacaccagtgcgaccgag

SEQ ID NO: 41412 - DNA, 40 bp, Homo sapiens
tcggtcgcactggtgtattcaccatggaagcatcttatga

SEQ ID NO: 41413 - DNA, 40 bp, Homo sapiens
tcataagatgcttccatggtgaatacaccagtgcgaccga

SEQ ID NO: 41414 - DNA, 40 bp, Homo sapiens
cggtcgcactggtgtattcaccatggaagcatcttatgaa

SEQ ID NO: 41415 - DNA, 40 bp, Homo sapiens
ttcataagatgcttccatggtgaatacaccagtgcgaccg

SEQ ID NO: 41416 - DNA, 40 bp, Homo sapiens
ggtcgcactggtgtattcaccatggaagcatcttatgaaa

SEQ ID NO: 41417 - DNA, 40 bp, Homo sapiens
tttcataagatgcttccatggtgaatacaccagtgcgacc

SEQ ID NO: 41418 - DNA, 40 bp, Homo sapiens
gtcgcactggtgtattcaccatggaagcatcttatgaaat

SEQ ID NO: 41419 - DNA, 40 bp, Homo sapiens
atttcataagatgcttccatggtgaatacaccagtgcgac

SEQ ID NO: 41420 - DNA, 40 bp, Homo sapiens
tcgcactggtgtattcaccatggaagcatcttatgaaata

SEQ ID NO: 41421 - DNA, 40 bp, Homo sapiens
tatttcataagatgcttccatggtgaatacaccagtgcga

SEQ ID NO: 41422 - DNA, 40 bp, Homo sapiens
cgcactggtgtattcaccatggaagcatcttatgaaatat

SEQ ID NO: 41423 - DNA, 40 bp, Homo sapiens
atatttcataagatgcttccatggtgaatacaccagtgcg

SEQ ID NO: 41424 - DNA, 40 bp, Homo sapiens
gcactggtgtattcaccatggaagcatcttatgaaatatg

SEQ ID NO: 41425 - DNA, 40 bp, Homo sapiens
catatttcataagatgcttccatggtgaatacaccagtgc

SEQ ID NO: 41426 - DNA, 40 bp, Homo sapiens
cactggtgtattcaccatggaagcatcttatgaaatatgt

SEQ ID NO: 41427 - DNA, 40 bp, Homo sapiens
acatatttcataagatgcttccatggtgaatacaccagtg

SEQ ID NO: 41428 - DNA, 40 bp, Homo sapiens
actggtgtattcaccatggaagcatcttatgaaatatgta

SEQ ID NO: 41429 - DNA, 40 bp, Homo sapiens
tacatatttcataagatgcttccatggtgaatacaccagt

SEQ ID NO: 41430 - DNA, 40 bp, Homo sapiens
ctggtgtattcaccatggaagcatcttatgaaatatgtac

SEQ ID NO: 41431 - DNA, 40 bp, Homo sapiens
gtacatatttcataagatgcttccatggtgaatacaccag

SEQ ID NO: 41432 - DNA, 40 bp, Homo sapiens
tggtgtattcaccatggaagcatcttatgaaatatgtaca

SEQ ID NO: 41433 - DNA, 40 bp, Homo sapiens
tgtacatatttcataagatgcttccatggtgaatacacca

SEQ ID NO: 41434 - DNA, 40 bp, Homo sapiens
ggtgtattcaccatggaagcatcttatgaaatatgtacat

SEQ ID NO: 41435 - DNA, 40 bp, Homo sapiens
atgtacatatttcataagatgcttccatggtgaatacacc

SEQ ID NO: 41436 - DNA, 40 bp, Homo sapiens
gtgtattcaccatggaagcatcttatgaaatatgtacata

SEQ ID NO: 41437 - DNA, 40 bp, Homo sapiens
tatgtacatatttcataagatgcttccatggtgaatacac

SEQ ID NO: 41438 - DNA, 40 bp, Homo sapiens
tgtattcaccatggaagcatcttatgaaatatgtacataa

SEQ ID NO: 41439 - DNA, 40 bp, Homo sapiens
ttatgtacatatttcataagatgcttccatggtgaataca

SEQ ID NO: 41440 - DNA, 40 bp, Homo sapiens
gtattcaccatggaagcatcttatgaaatatgtacataaa

SEQ ID NO: 41441 - DNA, 40 bp, Homo sapiens
tttatgtacatatttcataagatgcttccatggtgaatac

SEQ ID NO: 41442 - DNA, 40 bp, Homo sapiens
tattcaccatggaagcatcttatgaaatatgtacataaac

SEQ ID NO: 41443 - DNA, 40 bp, Homo sapiens
gtttatgtacatatttcataagatgcttccatggtgaata

SEQ ID NO: 41444 - DNA, 40 bp, Homo sapiens
attcaccatggaagcatcttatgaaatatgtacataaact

SEQ ID NO: 41445 - DNA, 40 bp, Homo sapiens
agtttatgtacatatttcataagatgcttccatggtgaat

SEQ ID NO: 41446 - DNA, 40 bp, Homo sapiens
ttcaccatggaagcatcttatgaaatatgtacataaacta

SEQ ID NO: 41447 - DNA, 40 bp, Homo sapiens
tagtttatgtacatatttcataagatgcttccatggtgaa

SEQ ID NO: 41448 - DNA, 40 bp, Homo sapiens
tcaccatggaagcatcttatgaaatatgtacataaactac

SEQ ID NO: 41449 - DNA, 40 bp, Homo sapiens
gtagtttatgtacatatttcataagatgcttccatggtga

SEQ ID NO: 41450 - DNA, 40 bp, Homo sapiens
caccatggaagcatcttatgaaatatgtacataaactact

SEQ ID NO: 41451 - DNA, 40 bp, Homo sapiens
agtagtttatgtacatatttcataagatgcttccatggtg

SEQ ID NO: 41452 - DNA, 40 bp, Homo sapiens
accatggaagcatcttatgaaatatgtacataaactacta

SEQ ID NO: 41453 - DNA, 40 bp, Homo sapiens
tagtagtttatgtacatatttcataagatgcttccatggt

SEQ ID NO: 41454 - DNA, 40 bp, Homo sapiens
ccatggaagcatcttatgaaatatgtacataaactactaa

SEQ ID NO: 41455 - DNA, 40 bp, Homo sapiens
ttagtagtttatgtacatatttcataagatgcttccatgg

SEQ ID NO: 41456 - DNA, 40 bp, Homo sapiens
catggaagcatcttatgaaatatgtacataaactactaat

SEQ ID NO: 41457 - DNA, 40 bp, Homo sapiens
attagtagtttatgtacatatttcataagatgcttccatg

SEQ ID NO: 41458 - DNA, 40 bp, Homo sapiens
atggaagcatcttatgaaatatgtacataaactactaata

SEQ ID NO: 41459 - DNA, 40 bp, Homo sapiens
tattagtagtttatgtacatatttcataagatgcttccat

SEQ ID NO: 41460 - DNA, 40 bp, Homo sapiens
tggaagcatcttatgaaatatgtacataaactactaatat

SEQ ID NO: 41461 - DNA, 40 bp, Homo sapiens
atattagtagtttatgtacatatttcataagatgcttcca

SEQ ID NO: 41462 - DNA, 40 bp, Homo sapiens
ggaagcatcttatgaaatatgtacataaactactaatatc

SEQ ID NO: 41463 - DNA, 40 bp, Homo sapiens
gatattagtagtttatgtacatatttcataagatgcttcc

SEQ ID NO: 41464 - DNA, 40 bp, Homo sapiens
gaagcatcttatgaaatatgtacataaactactaatatcc

SEQ ID NO: 41465 - DNA, 40 bp, Homo sapiens
ggatattagtagtttatgtacatatttcataagatgcttc

SEQ ID NO: 41466 - DNA, 40 bp, Homo sapiens
aagcatcttatgaaatatgtacataaactactaatatccc

SEQ ID NO: 41467 - DNA, 40 bp, Homo sapiens
gggatattagtagtttatgtacatatttcataagatgctt

SEQ ID NO: 41468 - DNA, 40 bp, Homo sapiens
agcatcttatgaaatatgtacataaactactaatatccca

SEQ ID NO: 41469 - DNA, 40 bp, Homo sapiens
tgggatattagtagtttatgtacatatttcataagatgct

SEQ ID NO: 41470 - DNA, 40 bp, Homo sapiens
gcatcttatgaaatatgtacataaactactaatatcccac

SEQ ID NO: 41471 - DNA, 40 bp, Homo sapiens
gtgggatattagtagtttatgtacatatttcataagatgc

SEQ ID NO: 41472 - DNA, 40 bp, Homo sapiens
catcttatgaaatatgtacataaactactaatatcccaca

SEQ ID NO: 41473 - DNA, 40 bp, Homo sapiens
tgtgggatattagtagtttatgtacatatttcataagatg

SEQ ID NO: 41474 - DNA, 40 bp, Homo sapiens
atcttatgaaatatgtacataaactactaatatcccacat

SEQ ID NO: 41475 - DNA, 40 bp, Homo sapiens
atgtgggatattagtagtttatgtacatatttcataagat

SEQ ID NO: 41476 - DNA, 40 bp, Homo sapiens
tcttatgaaatatgtacataaactactaatatcccacatt

SEQ ID NO: 41477 - DNA, 40 bp, Homo sapiens
aatgtgggatattagtagtttatgtacatatttcataaga

SEQ ID NO: 41478 - DNA, 40 bp, Homo sapiens
cttatgaaatatgtacataaactactaatatcccacatta

SEQ ID NO: 41479 - DNA, 40 bp, Homo sapiens
taatgtgggatattagtagtttatgtacatatttcataag

SEQ ID NO: 41480 - DNA, 40 bp, Homo sapiens
ttatgaaatatgtacataaactactaatatcccacattac

SEQ ID NO: 41481 - DNA, 40 bp, Homo sapiens
gtaatgtgggatattagtagtttatgtacatatttcataa

SEQ ID NO: 41482 - DNA, 40 bp, Homo sapiens
tatgaaatatgtacataaactactaatatcccacattaca

SEQ ID NO: 41483 - DNA, 40 bp, Homo sapiens
tgtaatgtgggatattagtagtttatgtacatatttcata

SEQ ID NO: 41484 - DNA, 40 bp, Homo sapiens
atgaaatatgtacataaactactaatatcccacattacag

SEQ ID NO: 41485 - DNA, 40 bp, Homo sapiens
ctgtaatgtgggatattagtagtttatgtacatatttcat

SEQ ID NO: 41486 - DNA, 40 bp, Homo sapiens
tgaaatatgtacataaactactaatatcccacattacagg

SEQ ID NO: 41487 - DNA, 40 bp, Homo sapiens
cctgtaatgtgggatattagtagtttatgtacatatttca

SEQ ID NO: 41488 - DNA, 40 bp, Homo sapiens
gaaatatgtacataaactactaatatcccacattacaggt

SEQ ID NO: 41489 - DNA, 40 bp, Homo sapiens
acctgtaatgtgggatattagtagtttatgtacatatttc

SEQ ID NO: 41490 - DNA, 40 bp, Homo sapiens
aaatatgtacataaactactaatatcccacattacaggtt

SEQ ID NO: 41491 - DNA, 40 bp, Homo sapiens
aacctgtaatgtgggatattagtagtttatgtacatattt

SEQ ID NO: 41492 - DNA, 40 bp, Homo sapiens
aatatgtacataaactactaatatcccacattacaggttg

SEQ ID NO: 41493 - DNA, 40 bp, Homo sapiens
caacctgtaatgtgggatattagtagtttatgtacatatt

SEQ ID NO: 41494 - DNA, 40 bp, Homo sapiens
atatgtacataaactactaatatcccacattacaggttga

SEQ ID NO: 41495 - DNA, 40 bp, Homo sapiens
tcaacctgtaatgtgggatattagtagtttatgtacatat

SEQ ID NO: 41496 - DNA, 40 bp, Homo sapiens
tatgtacataaactactaatatcccacattacaggttgac

SEQ ID NO: 41497 - DNA, 40 bp, Homo sapiens
gtcaacctgtaatgtgggatattagtagtttatgtacata

SEQ ID NO: 41498 - DNA, 40 bp, Homo sapiens
atgtacataaactactaatatcccacattacaggttgact

SEQ ID NO: 41499 - DNA, 40 bp, Homo sapiens
agtcaacctgtaatgtgggatattagtagtttatgtacat

SEQ ID NO: 41500 - DNA, 40 bp, Homo sapiens
tgtacataaactactaatatcccacattacaggttgacta

SEQ ID NO: 41501 - DNA, 40 bp, Homo sapiens
tagtcaacctgtaatgtgggatattagtagtttatgtaca

SEQ ID NO: 41502 - DNA, 40 bp, Homo sapiens
gtacataaactactaatatcccacattacaggttgactat

SEQ ID NO: 41503 - DNA, 40 bp, Homo sapiens
atagtcaacctgtaatgtgggatattagtagtttatgtac

SEQ ID NO: 41504 - DNA, 40 bp, Homo sapiens
tacataaactactaatatcccacattacaggttgactatt

SEQ ID NO: 41505 - DNA, 40 bp, Homo sapiens
aatagtcaacctgtaatgtgggatattagtagtttatgta

SEQ ID NO: 41506 - DNA, 40 bp, Homo sapiens
acataaactactaatatcccacattacaggttgactattc

SEQ ID NO: 41507 - DNA, 40 bp, Homo sapiens
gaatagtcaacctgtaatgtgggatattagtagtttatgt

SEQ ID NO: 41508 - DNA, 40 bp, Homo sapiens
cataaactactaatatcccacattacaggttgactattct

SEQ ID NO: 41509 - DNA, 40 bp, Homo sapiens
agaatagtcaacctgtaatgtgggatattagtagtttatg

SEQ ID NO: 41510 - DNA, 40 bp, Homo sapiens
ataaactactaatatcccacattacaggttgactattctt

SEQ ID NO: 41511 - DNA, 40 bp, Homo sapiens
aagaatagtcaacctgtaatgtgggatattagtagtttat

SEQ ID NO: 41512 - DNA, 40 bp, Homo sapiens
taaactactaatatcccacattacaggttgactattcttt

SEQ ID NO: 41513 - DNA, 40 bp, Homo sapiens
aaagaatagtcaacctgtaatgtgggatattagtagttta

SEQ ID NO: 41514 - DNA, 40 bp, Homo sapiens
aaactactaatatcccacattacaggttgactattcttta

SEQ ID NO: 41515 - DNA, 40 bp, Homo sapiens
taaagaatagtcaacctgtaatgtgggatattagtagttt

SEQ ID NO: 41516 - DNA, 40 bp, Homo sapiens
aactactaatatcccacattacaggttgactattctttat

SEQ ID NO: 41517 - DNA, 40 bp, Homo sapiens
ataaagaatagtcaacctgtaatgtgggatattagtagtt

SEQ ID NO: 41518 - DNA, 40 bp, Homo sapiens
actactaatatcccacattacaggttgactattctttatc

SEQ ID NO: 41519 - DNA, 40 bp, Homo sapiens
gataaagaatagtcaacctgtaatgtgggatattagtagt

SEQ ID NO: 41520 - DNA, 40 bp, Homo sapiens
ctactaatatcccacattacaggttgactattctttatct

SEQ ID NO: 41521 - DNA, 40 bp, Homo sapiens
agataaagaatagtcaacctgtaatgtgggatattagtag

SEQ ID NO: 41522 - DNA, 40 bp, Homo sapiens
tactaatatcccacattacaggttgactattctttatctg

SEQ ID NO: 41523 - DNA, 40 bp, Homo sapiens
cagataaagaatagtcaacctgtaatgtgggatattagta

SEQ ID NO: 41524 - DNA, 40 bp, Homo sapiens
actaatatcccacattacaggttgactattctttatctga

SEQ ID NO: 41525 - DNA, 40 bp, Homo sapiens
tcagataaagaatagtcaacctgtaatgtgggatattagt

SEQ ID NO: 41526 - DNA, 40 bp, Homo sapiens
ctaatatcccacattacaggttgactattctttatctgaa

SEQ ID NO: 41527 - DNA, 40 bp, Homo sapiens
ttcagataaagaatagtcaacctgtaatgtgggatattag

SEQ ID NO: 41528 - DNA, 40 bp, Homo sapiens
taatatcccacattacaggttgactattctttatctgaaa

SEQ ID NO: 41529 - DNA, 40 bp, Homo sapiens
tttcagataaagaatagtcaacctgtaatgtgggatatta

SEQ ID NO: 41530 - DNA, 40 bp, Homo sapiens
aatatcccacattacaggttgactattctttatctgaaat

SEQ ID NO: 41531 - DNA, 40 bp, Homo sapiens
atttcagataaagaatagtcaacctgtaatgtgggatatt

SEQ ID NO: 41532 - DNA, 40 bp, Homo sapiens
atatcccacattacaggttgactattctttatctgaaatg

SEQ ID NO: 41533 - DNA, 40 bp, Homo sapiens
catttcagataaagaatagtcaacctgtaatgtgggatat

SEQ ID NO: 41534 - DNA, 40 bp, Homo sapiens
tatcccacattacaggttgactattctttatctgaaatgc

SEQ ID NO: 41535 - DNA, 40 bp, Homo sapiens
gcatttcagataaagaatagtcaacctgtaatgtgggata

SEQ ID NO: 41536 - DNA, 40 bp, Homo sapiens
atcccacattacaggttgactattctttatctgaaatgct

SEQ ID NO: 41537 - DNA, 40 bp, Homo sapiens
agcatttcagataaagaatagtcaacctgtaatgtgggat

SEQ ID NO: 41538 - DNA, 40 bp, Homo sapiens
tcccacattacaggttgactattctttatctgaaatgctt

SEQ ID NO: 41539 - DNA, 40 bp, Homo sapiens
aagcatttcagataaagaatagtcaacctgtaatgtggga

SEQ ID NO: 41540 - DNA, 40 bp, Homo sapiens
cccacattacaggttgactattctttatctgaaatgctta

SEQ ID NO: 41541 - DNA, 40 bp, Homo sapiens
taagcatttcagataaagaatagtcaacctgtaatgtggg

SEQ ID NO: 41542 - DNA, 40 bp, Homo sapiens
ccacattacaggttgactattctttatctgaaatgcttag

SEQ ID NO: 41543 - DNA, 40 bp, Homo sapiens
ctaagcatttcagataaagaatagtcaacctgtaatgtgg

SEQ ID NO: 41544 - DNA, 40 bp, Homo sapiens
cacattacaggttgactattctttatctgaaatgcttagg

SEQ ID NO: 41545 - DNA, 40 bp, Homo sapiens
cctaagcatttcagataaagaatagtcaacctgtaatgtg

SEQ ID NO: 41546 - DNA, 40 bp, Homo sapiens
acattacaggttgactattctttatctgaaatgcttagga

SEQ ID NO: 41547 - DNA, 40 bp, Homo sapiens
tcctaagcatttcagataaagaatagtcaacctgtaatgt

SEQ ID NO: 41548 - DNA, 40 bp, Homo sapiens
cattacaggttgactattctttatctgaaatgcttaggac

SEQ ID NO: 41549 - DNA, 40 bp, Homo sapiens
gtcctaagcatttcagataaagaatagtcaacctgtaatg

SEQ ID NO: 41550 - DNA, 40 bp, Homo sapiens
attacaggttgactattctttatctgaaatgcttaggacc

SEQ ID NO: 41551 - DNA, 40 bp, Homo sapiens
ggtcctaagcatttcagataaagaatagtcaacctgtaat

SEQ ID NO: 41552 - DNA, 40 bp, Homo sapiens
ttacaggttgactattctttatctgaaatgcttaggacct

SEQ ID NO: 41553 - DNA, 40 bp, Homo sapiens
aggtcctaagcatttcagataaagaatagtcaacctgtaa

SEQ ID NO: 41554 - DNA, 40 bp, Homo sapiens
tacaggttgactattctttatctgaaatgcttaggaccta

SEQ ID NO: 41555 - DNA, 40 bp, Homo sapiens
taggtcctaagcatttcagataaagaatagtcaacctgta

SEQ ID NO: 41556 - DNA, 40 bp, Homo sapiens
acaggttgactattctttatctgaaatgcttaggacctag

SEQ ID NO: 41557 - DNA, 40 bp, Homo sapiens
ctaggtcctaagcatttcagataaagaatagtcaacctgt

SEQ ID NO: 41558 - DNA, 40 bp, Homo sapiens
caggttgactattctttatctgaaatgcttaggacctaga

SEQ ID NO: 41559 - DNA, 40 bp, Homo sapiens
tctaggtcctaagcatttcagataaagaatagtcaacctg

SEQ ID NO: 41560 - DNA, 40 bp, Homo sapiens
aggttgactattctttatctgaaatgcttaggacctagaa

SEQ ID NO: 41561 - DNA, 40 bp, Homo sapiens
ttctaggtcctaagcatttcagataaagaatagtcaacct

SEQ ID NO: 41562 - DNA, 40 bp, Homo sapiens
ggttgactattctttatctgaaatgcttaggacctagaag

SEQ ID NO: 41563 - DNA, 40 bp, Homo sapiens
cttctaggtcctaagcatttcagataaagaatagtcaacc

SEQ ID NO: 41564 - DNA, 40 bp, Homo sapiens
gttgactattctttatctgaaatgcttaggacctagaagt

SEQ ID NO: 41565 - DNA, 40 bp, Homo sapiens
acttctaggtcctaagcatttcagataaagaatagtcaac

SEQ ID NO: 41566 - DNA, 40 bp, Homo sapiens
ttgactattctttatctgaaatgcttaggacctagaagta

SEQ ID NO: 41567 - DNA, 40 bp, Homo sapiens
tacttctaggtcctaagcatttcagataaagaatagtcaa

SEQ ID NO: 41568 - DNA, 40 bp, Homo sapiens
tgactattctttatctgaaatgcttaggacctagaagtat

SEQ ID NO: 41569 - DNA, 40 bp, Homo sapiens
atacttctaggtcctaagcatttcagataaagaatagtca

SEQ ID NO: 41570 - DNA, 40 bp, Homo sapiens
gactattctttatctgaaatgcttaggacctagaagtatt

SEQ ID NO: 41571 - DNA, 40 bp, Homo sapiens
aatacttctaggtcctaagcatttcagataaagaatagtc

SEQ ID NO: 41572 - DNA, 40 bp, Homo sapiens
actattctttatctgaaatgcttaggacctagaagtattt

SEQ ID NO: 41573 - DNA, 40 bp, Homo sapiens
aaatacttctaggtcctaagcatttcagataaagaatagt

SEQ ID NO: 41574 - DNA, 40 bp, Homo sapiens
ctattctttatctgaaatgcttaggacctagaagtatttt

SEQ ID NO: 41575 - DNA, 40 bp, Homo sapiens
aaaatacttctaggtcctaagcatttcagataaagaatag

SEQ ID NO: 41576 - DNA, 40 bp, Homo sapiens
tattctttatctgaaatgcttaggacctagaagtattttt

SEQ ID NO: 41577 - DNA, 40 bp, Homo sapiens
aaaaatacttctaggtcctaagcatttcagataaagaata

SEQ ID NO: 41578 - DNA, 40 bp, Homo sapiens
attctttatctgaaatgcttaggacctagaagtatttttg

SEQ ID NO: 41579 - DNA, 40 bp, Homo sapiens
caaaaatacttctaggtcctaagcatttcagataaagaat

SEQ ID NO: 41580 - DNA, 40 bp, Homo sapiens
ttctttatctgaaatgcttaggacctagaagtatttttgg

SEQ ID NO: 41581 - DNA, 40 bp, Homo sapiens
ccaaaaatacttctaggtcctaagcatttcagataaagaa

SEQ ID NO: 41582 - DNA, 40 bp, Homo sapiens
tctttatctgaaatgcttaggacctagaagtatttttgga

SEQ ID NO: 41583 - DNA, 40 bp, Homo sapiens
tccaaaaatacttctaggtcctaagcatttcagataaaga

SEQ ID NO: 41584 - DNA, 40 bp, Homo sapiens
ctttatctgaaatgcttaggacctagaagtatttttggat

SEQ ID NO: 41585 - DNA, 40 bp, Homo sapiens
atccaaaaatacttctaggtcctaagcatttcagataaag

SEQ ID NO: 41586 - DNA, 40 bp, Homo sapiens
tttatctgaaatgcttaggacctagaagtatttttggatt

SEQ ID NO: 41587 - DNA, 40 bp, Homo sapiens
aatccaaaaatacttctaggtcctaagcatttcagataaa

SEQ ID NO: 41588 - DNA, 40 bp, Homo sapiens
ttatctgaaatgcttaggacctagaagtatttttggattt

SEQ ID NO: 41589 - DNA, 40 bp, Homo sapiens
aaatccaaaaatacttctaggtcctaagcatttcagataa

SEQ ID NO: 41590 - DNA, 40 bp, Homo sapiens
tatctgaaatgcttaggacctagaagtatttttggatttt

SEQ ID NO: 41591 - DNA, 40 bp, Homo sapiens
aaaatccaaaaatacttctaggtcctaagcatttcagata

SEQ ID NO: 41592 - DNA, 40 bp, Homo sapiens
atctgaaatgcttaggacctagaagtatttttggattttg

SEQ ID NO: 41593 - DNA, 40 bp, Homo sapiens
caaaatccaaaaatacttctaggtcctaagcatttcagat

SEQ ID NO: 41594 - DNA, 40 bp, Homo sapiens
tctgaaatgcttaggacctagaagtatttttggattttgg

SEQ ID NO: 41595 - DNA, 40 bp, Homo sapiens
ccaaaatccaaaaatacttctaggtcctaagcatttcaga

SEQ ID NO: 41596 - DNA, 40 bp, Homo sapiens
ctgaaatgcttaggacctagaagtatttttggattttggt

SEQ ID NO: 41597 - DNA, 40 bp, Homo sapiens
accaaaatccaaaaatacttctaggtcctaagcatttcag

SEQ ID NO: 41598 - DNA, 40 bp, Homo sapiens
tgaaatgcttaggacctagaagtatttttggattttggtt

SEQ ID NO: 41599 - DNA, 40 bp, Homo sapiens
aaccaaaatccaaaaatacttctaggtcctaagcatttca

SEQ ID NO: 41600 - DNA, 40 bp, Homo sapiens
gaaatgcttaggacctagaagtatttttggattttggttt

SEQ ID NO: 41601 - DNA, 40 bp, Homo sapiens
aaaccaaaatccaaaaatacttctaggtcctaagcatttc

SEQ ID NO: 41602 - DNA, 40 bp, Homo sapiens
aaatgcttaggacctagaagtatttttggattttggtttt

SEQ ID NO: 41603 - DNA, 40 bp, Homo sapiens
aaaaccaaaatccaaaaatacttctaggtcctaagcattt

SEQ ID NO: 41604 - DNA, 40 bp, Homo sapiens
aatgcttaggacctagaagtatttttggattttggttttt

SEQ ID NO: 41605 - DNA, 40 bp, Homo sapiens
aaaaaccaaaatccaaaaatacttctaggtcctaagcatt

SEQ ID NO: 41606 - DNA, 40 bp, Homo sapiens
atgcttaggacctagaagtatttttggattttggtttttc

SEQ ID NO: 41607 - DNA, 40 bp, Homo sapiens
gaaaaaccaaaatccaaaaatacttctaggtcctaagcat

SEQ ID NO: 41608 - DNA, 40 bp, Homo sapiens
tgcttaggacctagaagtatttttggattttggtttttca

SEQ ID NO: 41609 - DNA, 40 bp, Homo sapiens
tgaaaaaccaaaatccaaaaatacttctaggtcctaagca

SEQ ID NO: 41610 - DNA, 40 bp, Homo sapiens
gcttaggacctagaagtatttttggattttggtttttcag

SEQ ID NO: 41611 - DNA, 40 bp, Homo sapiens
ctgaaaaaccaaaatccaaaaatacttctaggtcctaagc

SEQ ID NO: 41612 - DNA, 40 bp, Homo sapiens
cttaggacctagaagtatttttggattttggtttttcaga

SEQ ID NO: 41613 - DNA, 40 bp, Homo sapiens
tctgaaaaaccaaaatccaaaaatacttctaggtcctaag

SEQ ID NO: 41614 - DNA, 40 bp, Homo sapiens
ttaggacctagaagtatttttggattttggtttttcagag

SEQ ID NO: 41615 - DNA, 40 bp, Homo sapiens
ctctgaaaaaccaaaatccaaaaatacttctaggtcctaa

SEQ ID NO: 41616 - DNA, 40 bp, Homo sapiens
taggacctagaagtatttttggattttggtttttcagagt

SEQ ID NO: 41617 - DNA, 40 bp, Homo sapiens
actctgaaaaaccaaaatccaaaaatacttctaggtccta

SEQ ID NO: 41618 - DNA, 40 bp, Homo sapiens
aggacctagaagtatttttggattttggtttttcagagta

SEQ ID NO: 41619 - DNA, 40 bp, Homo sapiens
tactctgaaaaaccaaaatccaaaaatacttctaggtcct

SEQ ID NO: 41620 - DNA, 40 bp, Homo sapiens
ggacctagaagtatttttggattttggtttttcagagtag

SEQ ID NO: 41621 - DNA, 40 bp, Homo sapiens
ctactctgaaaaaccaaaatccaaaaatacttctaggtcc

SEQ ID NO: 41622 - DNA, 40 bp, Homo sapiens
gacctagaagtatttttggattttggtttttcagagtagg

SEQ ID NO: 41623 - DNA, 40 bp, Homo sapiens
cctactctgaaaaaccaaaatccaaaaatacttctaggtc

SEQ ID NO: 41624 - DNA, 40 bp, Homo sapiens
acctagaagtatttttggattttggtttttcagagtaggg

SEQ ID NO: 41625 - DNA, 40 bp, Homo sapiens
ccctactctgaaaaaccaaaatccaaaaatacttctaggt

SEQ ID NO: 41626 - DNA, 40 bp, Homo sapiens
cctagaagtatttttggattttggtttttcagagtaggga

SEQ ID NO: 41627 - DNA, 40 bp, Homo sapiens
tccctactctgaaaaaccaaaatccaaaaatacttctagg

SEQ ID NO: 41628 - DNA, 40 bp, Homo sapiens
ctagaagtatttttggattttggtttttcagagtagggat

SEQ ID NO: 41629 - DNA, 40 bp, Homo sapiens
atccctactctgaaaaaccaaaatccaaaaatacttctag

SEQ ID NO: 41630 - DNA, 40 bp, Homo sapiens
tagaagtatttttggattttggtttttcagagtagggata

SEQ ID NO: 41631 - DNA, 40 bp, Homo sapiens
tatccctactctgaaaaaccaaaatccaaaaatacttcta

SEQ ID NO: 41632 - DNA, 40 bp, Homo sapiens
agaagtatttttggattttggtttttcagagtagggatac

SEQ ID NO: 41633 - DNA, 40 bp, Homo sapiens
gtatccctactctgaaaaaccaaaatccaaaaatacttct

SEQ ID NO: 41634 - DNA, 40 bp, Homo sapiens
gaagtatttttggattttggtttttcagagtagggatact

SEQ ID NO: 41635 - DNA, 40 bp, Homo sapiens
agtatccctactctgaaaaaccaaaatccaaaaatacttc

SEQ ID NO: 41636 - DNA, 40 bp, Homo sapiens
aagtatttttggattttggtttttcagagtagggatactc

SEQ ID NO: 41637 - DNA, 40 bp, Homo sapiens
gagtatccctactctgaaaaaccaaaatccaaaaatactt

SEQ ID NO: 41638 - DNA, 40 bp, Homo sapiens
agtatttttggattttggtttttcagagtagggatactca

SEQ ID NO: 41639 - DNA, 40 bp, Homo sapiens
tgagtatccctactctgaaaaaccaaaatccaaaaatact

SEQ ID NO: 41640 - DNA, 40 bp, Homo sapiens
gtatttttggattttggtttttcagagtagggatactcag

SEQ ID NO: 41641 - DNA, 40 bp, Homo sapiens
ctgagtatccctactctgaaaaaccaaaatccaaaaatac

SEQ ID NO: 41642 - DNA, 40 bp, Homo sapiens
tatttttggattttggtttttcagagtagggatactcagc

SEQ ID NO: 41643 - DNA, 40 bp, Homo sapiens
gctgagtatccctactctgaaaaaccaaaatccaaaaata

SEQ ID NO: 41644 - DNA, 40 bp, Homo sapiens
atttttggattttggtttttcagagtagggatactcagcc

SEQ ID NO: 41645 - DNA, 40 bp, Homo sapiens
ggctgagtatccctactctgaaaaaccaaaatccaaaaat

SEQ ID NO: 41646 - DNA, 40 bp, Homo sapiens
tttttggattttggtttttcagagtagggatactcagcct

SEQ ID NO: 41647 - DNA, 40 bp, Homo sapiens
aggctgagtatccctactctgaaaaaccaaaatccaaaaa

SEQ ID NO: 41648 - DNA, 40 bp, Homo sapiens
ttttggattttggtttttcagagtagggatactcagccta

SEQ ID NO: 41649 - DNA, 40 bp, Homo sapiens
taggctgagtatccctactctgaaaaaccaaaatccaaaa

SEQ ID NO: 41650 - DNA, 40 bp, Homo sapiens
tttggattttggtttttcagagtagggatactcagcctac

SEQ ID NO: 41651 - DNA, 40 bp, Homo sapiens
gtaggctgagtatccctactctgaaaaaccaaaatccaaa

SEQ ID NO: 41652 - DNA, 40 bp, Homo sapiens
ttggattttggtttttcagagtagggatactcagcctaca

SEQ ID NO: 41653 - DNA, 40 bp, Homo sapiens
tgtaggctgagtatccctactctgaaaaaccaaaatccaa

SEQ ID NO: 41654 - DNA, 40 bp, Homo sapiens
tggattttggtttttcagagtagggatactcagcctacat

SEQ ID NO: 41655 - DNA, 40 bp, Homo sapiens
atgtaggctgagtatccctactctgaaaaaccaaaatcca

SEQ ID NO: 41656 - DNA, 40 bp, Homo sapiens
ggattttggtttttcagagtagggatactcagcctacatt

SEQ ID NO: 41657 - DNA, 40 bp, Homo sapiens
aatgtaggctgagtatccctactctgaaaaaccaaaatcc

SEQ ID NO: 41658 - DNA, 40 bp, Homo sapiens
gattttggtttttcagagtagggatactcagcctacattg

SEQ ID NO: 41659 - DNA, 40 bp, Homo sapiens
caatgtaggctgagtatccctactctgaaaaaccaaaatc

SEQ ID NO: 41660 - DNA, 40 bp, Homo sapiens
attttggtttttcagagtagggatactcagcctacattgg

SEQ ID NO: 41661 - DNA, 40 bp, Homo sapiens
ccaatgtaggctgagtatccctactctgaaaaaccaaaat

SEQ ID NO: 41662 - DNA, 40 bp, Homo sapiens
ttttggtttttcagagtagggatactcagcctacattggt

SEQ ID NO: 41663 - DNA, 40 bp, Homo sapiens
accaatgtaggctgagtatccctactctgaaaaaccaaaa

SEQ ID NO: 41664 - DNA, 40 bp, Homo sapiens
tttggtttttcagagtagggatactcagcctacattggta

SEQ ID NO: 41665 - DNA, 40 bp, Homo sapiens
taccaatgtaggctgagtatccctactctgaaaaaccaaa

SEQ ID NO: 41666 - DNA, 40 bp, Homo sapiens
ttggtttttcagagtagggatactcagcctacattggtaa

SEQ ID NO: 41667 - DNA, 40 bp, Homo sapiens
ttaccaatgtaggctgagtatccctactctgaaaaaccaa

SEQ ID NO: 41668 - DNA, 40 bp, Homo sapiens
tggtttttcagagtagggatactcagcctacattggtaag

SEQ ID NO: 41669 - DNA, 40 bp, Homo sapiens
cttaccaatgtaggctgagtatccctactctgaaaaacca

SEQ ID NO: 41670 - DNA, 40 bp, Homo sapiens
ggtttttcagagtagggatactcagcctacattggtaagt

SEQ ID NO: 41671 - DNA, 40 bp, Homo sapiens
acttaccaatgtaggctgagtatccctactctgaaaaacc

SEQ ID NO: 41672 - DNA, 40 bp, Homo sapiens
gtttttcagagtagggatactcagcctacattggtaagta

SEQ ID NO: 41673 - DNA, 40 bp, Homo sapiens
tacttaccaatgtaggctgagtatccctactctgaaaaac

SEQ ID NO: 41674 - DNA, 40 bp, Homo sapiens
tttttcagagtagggatactcagcctacattggtaagtaa

SEQ ID NO: 41675 - DNA, 40 bp, Homo sapiens
ttacttaccaatgtaggctgagtatccctactctgaaaaa

SEQ ID NO: 41676 - DNA, 40 bp, Homo sapiens
ttttcagagtagggatactcagcctacattggtaagtaaa

SEQ ID NO: 41677 - DNA, 40 bp, Homo sapiens
tttacttaccaatgtaggctgagtatccctactctgaaaa

SEQ ID NO: 41678 - DNA, 40 bp, Homo sapiens
tttcagagtagggatactcagcctacattggtaagtaaag

SEQ ID NO: 41679 - DNA, 40 bp, Homo sapiens
ctttacttaccaatgtaggctgagtatccctactctgaaa

SEQ ID NO: 41680 - DNA, 40 bp, Homo sapiens
ttcagagtagggatactcagcctacattggtaagtaaaga

SEQ ID NO: 41681 - DNA, 40 bp, Homo sapiens
tctttacttaccaatgtaggctgagtatccctactctgaa

SEQ ID NO: 41682 - DNA, 40 bp, Homo sapiens
tcagagtagggatactcagcctacattggtaagtaaagaa

SEQ ID NO: 41683 - DNA, 40 bp, Homo sapiens
ttctttacttaccaatgtaggctgagtatccctactctga

SEQ ID NO: 41684 - DNA, 40 bp, Homo sapiens
cagagtagggatactcagcctacattggtaagtaaagaat

SEQ ID NO: 41685 - DNA, 40 bp, Homo sapiens
attctttacttaccaatgtaggctgagtatccctactctg

SEQ ID NO: 41686 - DNA, 40 bp, Homo sapiens
agagtagggatactcagcctacattggtaagtaaagaatg

SEQ ID NO: 41687 - DNA, 40 bp, Homo sapiens
cattctttacttaccaatgtaggctgagtatccctactct

SEQ ID NO: 41688 - DNA, 40 bp, Homo sapiens
gagtagggatactcagcctacattggtaagtaaagaatgt

SEQ ID NO: 41689 - DNA, 40 bp, Homo sapiens
acattctttacttaccaatgtaggctgagtatccctactc

SEQ ID NO: 41690 - DNA, 40 bp, Homo sapiens
agtagggatactcagcctacattggtaagtaaagaatgtg

SEQ ID NO: 41691 - DNA, 40 bp, Homo sapiens
cacattctttacttaccaatgtaggctgagtatccctact

SEQ ID NO: 41692 - DNA, 40 bp, Homo sapiens
gtagggatactcagcctacattggtaagtaaagaatgtga

SEQ ID NO: 41693 - DNA, 40 bp, Homo sapiens
tcacattctttacttaccaatgtaggctgagtatccctac

SEQ ID NO: 41694 - DNA, 40 bp, Homo sapiens
tagggatactcagcctacattggtaagtaaagaatgtgag

SEQ ID NO: 41695 - DNA, 40 bp, Homo sapiens
ctcacattctttacttaccaatgtaggctgagtatcccta

SEQ ID NO: 41696 - DNA, 40 bp, Homo sapiens
agggatactcagcctacattggtaagtaaagaatgtgagg

SEQ ID NO: 41697 - DNA, 40 bp, Homo sapiens
cctcacattctttacttaccaatgtaggctgagtatccct

SEQ ID NO: 41698 - DNA, 40 bp, Homo sapiens
gggatactcagcctacattggtaagtaaagaatgtgaggt

SEQ ID NO: 41699 - DNA, 40 bp, Homo sapiens
acctcacattctttacttaccaatgtaggctgagtatccc

SEQ ID NO: 41700 - DNA, 40 bp, Homo sapiens
ggatactcagcctacattggtaagtaaagaatgtgaggtg

SEQ ID NO: 41701 - DNA, 40 bp, Homo sapiens
cacctcacattctttacttaccaatgtaggctgagtatcc

SEQ ID NO: 41702 - DNA, 40 bp, Homo sapiens
gatactcagcctacattggtaagtaaagaatgtgaggtga

SEQ ID NO: 41703 - DNA, 40 bp, Homo sapiens
tcacctcacattctttacttaccaatgtaggctgagtatc

SEQ ID NO: 41704 - DNA, 40 bp, Homo sapiens
atactcagcctacattggtaagtaaagaatgtgaggtgac

SEQ ID NO: 41705 - DNA, 40 bp, Homo sapiens
gtcacctcacattctttacttaccaatgtaggctgagtat

SEQ ID NO: 41706 - DNA, 40 bp, Homo sapiens
tactcagcctacattggtaagtaaagaatgtgaggtgaca

SEQ ID NO: 41707 - DNA, 40 bp, Homo sapiens
tgtcacctcacattctttacttaccaatgtaggctgagta

SEQ ID NO: 41708 - DNA, 40 bp, Homo sapiens
actcagcctacattggtaagtaaagaatgtgaggtgacag

SEQ ID NO: 41709 - DNA, 40 bp, Homo sapiens
ctgtcacctcacattctttacttaccaatgtaggctgagt

SEQ ID NO: 41710 - DNA, 40 bp, Homo sapiens
ctcagcctacattggtaagtaaagaatgtgaggtgacagg

SEQ ID NO: 41711 - DNA, 40 bp, Homo sapiens
cctgtcacctcacattctttacttaccaatgtaggctgag

SEQ ID NO: 41712 - DNA, 40 bp, Homo sapiens
tcagcctacattggtaagtaaagaatgtgaggtgacaggc

SEQ ID NO: 41713 - DNA, 40 bp, Homo sapiens
gcctgtcacctcacattctttacttaccaatgtaggctga

SEQ ID NO: 41714 - DNA, 40 bp, Homo sapiens
cagcctacattggtaagtaaagaatgtgaggtgacaggct

SEQ ID NO: 41715 - DNA, 40 bp, Homo sapiens
agcctgtcacctcacattctttacttaccaatgtaggctg

SEQ ID NO: 41716 - DNA, 40 bp, Homo sapiens
agcctacattggtaagtaaagaatgtgaggtgacaggctg

SEQ ID NO: 41717 - DNA, 40 bp, Homo sapiens
cagcctgtcacctcacattctttacttaccaatgtaggct

SEQ ID NO: 41718 - DNA, 40 bp, Homo sapiens
gcctacattggtaagtaaagaatgtgaggtgacaggctgg

SEQ ID NO: 41719 - DNA, 40 bp, Homo sapiens
ccagcctgtcacctcacattctttacttaccaatgtaggc

SEQ ID NO: 41720 - DNA, 40 bp, Homo sapiens
cctacattggtaagtaaagaatgtgaggtgacaggctggg

SEQ ID NO: 41721 - DNA, 40 bp, Homo sapiens
cccagcctgtcacctcacattctttacttaccaatgtagg

SEQ ID NO: 41722 - DNA, 40 bp, Homo sapiens
ctacattggtaagtaaagaatgtgaggtgacaggctgggc

SEQ ID NO: 41723 - DNA, 40 bp, Homo sapiens
gcccagcctgtcacctcacattctttacttaccaatgtag

SEQ ID NO: 41724 - DNA, 40 bp, Homo sapiens
tacattggtaagtaaagaatgtgaggtgacaggctgggcg

SEQ ID NO: 41725 - DNA, 40 bp, Homo sapiens
cgcccagcctgtcacctcacattctttacttaccaatgta

SEQ ID NO: 41726 - DNA, 40 bp, Homo sapiens
acattggtaagtaaagaatgtgaggtgacaggctgggcgc

SEQ ID NO: 41727 - DNA, 40 bp, Homo sapiens
gcgcccagcctgtcacctcacattctttacttaccaatgt

SEQ ID NO: 41728 - DNA, 40 bp, Homo sapiens
cattggtaagtaaagaatgtgaggtgacaggctgggcgcg

SEQ ID NO: 41729 - DNA, 40 bp, Homo sapiens
cgcgcccagcctgtcacctcacattctttacttaccaatg

SEQ ID NO: 41730 - DNA, 40 bp, Homo sapiens
attggtaagtaaagaatgtgaggtgacaggctgggcgcga

SEQ ID NO: 41731 - DNA, 40 bp, Homo sapiens
tcgcgcccagcctgtcacctcacattctttacttaccaat

SEQ ID NO: 41732 - DNA, 40 bp, Homo sapiens
ttggtaagtaaagaatgtgaggtgacaggctgggcgcgat

SEQ ID NO: 41733 - DNA, 40 bp, Homo sapiens
atcgcgcccagcctgtcacctcacattctttacttaccaa

SEQ ID NO: 41734 - DNA, 40 bp, Homo sapiens
tggtaagtaaagaatgtgaggtgacaggctgggcgcgatg

SEQ ID NO: 41735 - DNA, 40 bp, Homo sapiens
catcgcgcccagcctgtcacctcacattctttacttacca

SEQ ID NO: 41736 - DNA, 40 bp, Homo sapiens
ggtaagtaaagaatgtgaggtgacaggctgggcgcgatgg

SEQ ID NO: 41737 - DNA, 40 bp, Homo sapiens
ccatcgcgcccagcctgtcacctcacattctttacttacc

SEQ ID NO: 41738 - DNA, 40 bp, Homo sapiens
gtaagtaaagaatgtgaggtgacaggctgggcgcgatggt

SEQ ID NO: 41739 - DNA, 40 bp, Homo sapiens
accatcgcgcccagcctgtcacctcacattctttacttac

SEQ ID NO: 41740 - DNA, 40 bp, Homo sapiens
taagtaaagaatgtgaggtgacaggctgggcgcgatggtt

SEQ ID NO: 41741 - DNA, 40 bp, Homo sapiens
aaccatcgcgcccagcctgtcacctcacattctttactta

SEQ ID NO: 41742 - DNA, 40 bp, Homo sapiens
aagtaaagaatgtgaggtgacaggctgggcgcgatggttg

SEQ ID NO: 41743 - DNA, 40 bp, Homo sapiens
caaccatcgcgcccagcctgtcacctcacattctttactt

SEQ ID NO: 41744 - DNA, 40 bp, Homo sapiens
agtaaagaatgtgaggtgacaggctgggcgcgatggttga

SEQ ID NO: 41745 - DNA, 40 bp, Homo sapiens
tcaaccatcgcgcccagcctgtcacctcacattctttact

SEQ ID NO: 41746 - DNA, 40 bp, Homo sapiens
gtaaagaatgtgaggtgacaggctgggcgcgatggttgac

SEQ ID NO: 41747 - DNA, 40 bp, Homo sapiens
gtcaaccatcgcgcccagcctgtcacctcacattctttac

SEQ ID NO: 41748 - DNA, 40 bp, Homo sapiens
taaagaatgtgaggtgacaggctgggcgcgatggttgacg

SEQ ID NO: 41749 - DNA, 40 bp, Homo sapiens
cgtcaaccatcgcgcccagcctgtcacctcacattcttta

SEQ ID NO: 41750 - DNA, 40 bp, Homo sapiens
aaagaatgtgaggtgacaggctgggcgcgatggttgacgc

SEQ ID NO: 41751 - DNA, 40 bp, Homo sapiens
gcgtcaaccatcgcgcccagcctgtcacctcacattcttt

SEQ ID NO: 41752 - DNA, 40 bp, Homo sapiens
aagaatgtgaggtgacaggctgggcgcgatggttgacgcc

SEQ ID NO: 41753 - DNA, 40 bp, Homo sapiens
ggcgtcaaccatcgcgcccagcctgtcacctcacattctt

SEQ ID NO: 41754 - DNA, 40 bp, Homo sapiens
agaatgtgaggtgacaggctgggcgcgatggttgacgcct

SEQ ID NO: 41755 - DNA, 40 bp, Homo sapiens
aggcgtcaaccatcgcgcccagcctgtcacctcacattct

SEQ ID NO: 41756 - DNA, 40 bp, Homo sapiens
gaatgtgaggtgacaggctgggcgcgatggttgacgcctg

SEQ ID NO: 41757 - DNA, 40 bp, Homo sapiens
caggcgtcaaccatcgcgcccagcctgtcacctcacattc

SEQ ID NO: 41758 - DNA, 40 bp, Homo sapiens
aatgtgaggtgacaggctgggcgcgatggttgacgcctgt

SEQ ID NO: 41759 - DNA, 40 bp, Homo sapiens
acaggcgtcaaccatcgcgcccagcctgtcacctcacatt

SEQ ID NO: 41760 - DNA, 40 bp, Homo sapiens
atgtgaggtgacaggctgggcgcgatggttgacgcctgta

SEQ ID NO: 41761 - DNA, 40 bp, Homo sapiens
tacaggcgtcaaccatcgcgcccagcctgtcacctcacat

SEQ ID NO: 41762 - DNA, 40 bp, Homo sapiens
tgtgaggtgacaggctgggcgcgatggttgacgcctgtaa

SEQ ID NO: 41763 - DNA, 40 bp, Homo sapiens
ttacaggcgtcaaccatcgcgcccagcctgtcacctcaca

SEQ ID NO: 41764 - DNA, 40 bp, Homo sapiens
gtgaggtgacaggctgggcgcgatggttgacgcctgtaat

SEQ ID NO: 41765 - DNA, 40 bp, Homo sapiens
attacaggcgtcaaccatcgcgcccagcctgtcacctcac

SEQ ID NO: 41766 - DNA, 40 bp, Homo sapiens
tgaggtgacaggctgggcgcgatggttgacgcctgtaatc

SEQ ID NO: 41767 - DNA, 40 bp, Homo sapiens
gattacaggcgtcaaccatcgcgcccagcctgtcacctca

SEQ ID NO: 41768 - DNA, 40 bp, Homo sapiens
gaggtgacaggctgggcgcgatggttgacgcctgtaatcc

SEQ ID NO: 41769 - DNA, 40 bp, Homo sapiens
ggattacaggcgtcaaccatcgcgcccagcctgtcacctc

SEQ ID NO: 41770 - DNA, 40 bp, Homo sapiens
aggtgacaggctgggcgcgatggttgacgcctgtaatccc

SEQ ID NO: 41771 - DNA, 40 bp, Homo sapiens
gggattacaggcgtcaaccatcgcgcccagcctgtcacct

SEQ ID NO: 41772 - DNA, 40 bp, Homo sapiens
ggtgacaggctgggcgcgatggttgacgcctgtaatccca

SEQ ID NO: 41773 - DNA, 40 bp, Homo sapiens
tgggattacaggcgtcaaccatcgcgcccagcctgtcacc

SEQ ID NO: 41774 - DNA, 40 bp, Homo sapiens
gtgacaggctgggcgcgatggttgacgcctgtaatcccag

SEQ ID NO: 41775 - DNA, 40 bp, Homo sapiens
ctgggattacaggcgtcaaccatcgcgcccagcctgtcac

SEQ ID NO: 41776 - DNA, 40 bp, Homo sapiens
tgacaggctgggcgcgatggttgacgcctgtaatcccagc

SEQ ID NO: 41777 - DNA, 40 bp, Homo sapiens
gctgggattacaggcgtcaaccatcgcgcccagcctgtca

SEQ ID NO: 41778 - DNA, 40 bp, Homo sapiens
gacaggctgggcgcgatggttgacgcctgtaatcccagca

SEQ ID NO: 41779 - DNA, 40 bp, Homo sapiens
tgctgggattacaggcgtcaaccatcgcgcccagcctgtc

SEQ ID NO: 41780 - DNA, 40 bp, Homo sapiens
acaggctgggcgcgatggttgacgcctgtaatcccagcac

SEQ ID NO: 41781 - DNA, 40 bp, Homo sapiens
gtgctgggattacaggcgtcaaccatcgcgcccagcctgt

SEQ ID NO: 41782 - DNA, 40 bp, Homo sapiens
caggctgggcgcgatggttgacgcctgtaatcccagcact

SEQ ID NO: 41783 - DNA, 40 bp, Homo sapiens
agtgctgggattacaggcgtcaaccatcgcgcccagcctg

SEQ ID NO: 41784 - DNA, 40 bp, Homo sapiens
aggctgggcgcgatggttgacgcctgtaatcccagcactt

SEQ ID NO: 41785 - DNA, 40 bp, Homo sapiens
aagtgctgggattacaggcgtcaaccatcgcgcccagcct

SEQ ID NO: 41786 - DNA, 40 bp, Homo sapiens
ggctgggcgcgatggttgacgcctgtaatcccagcacttt

SEQ ID NO: 41787 - DNA, 40 bp, Homo sapiens
aaagtgctgggattacaggcgtcaaccatcgcgcccagcc

SEQ ID NO: 41788 - DNA, 40 bp, Homo sapiens
gctgggcgcgatggttgacgcctgtaatcccagcactttg

SEQ ID NO: 41789 - DNA, 40 bp, Homo sapiens
caaagtgctgggattacaggcgtcaaccatcgcgcccagc

SEQ ID NO: 41790 - DNA, 40 bp, Homo sapiens
ctgggcgcgatggttgacgcctgtaatcccagcactttgg

SEQ ID NO: 41791 - DNA, 40 bp, Homo sapiens
ccaaagtgctgggattacaggcgtcaaccatcgcgcccag

SEQ ID NO: 41792 - DNA, 40 bp, Homo sapiens
tgggcgcgatggttgacgcctgtaatcccagcactttggg

SEQ ID NO: 41793 - DNA, 40 bp, Homo sapiens
cccaaagtgctgggattacaggcgtcaaccatcgcgccca

SEQ ID NO: 41794 - DNA, 40 bp, Homo sapiens
gggcgcgatggttgacgcctgtaatcccagcactttggga

SEQ ID NO: 41795 - DNA, 40 bp, Homo sapiens
tcccaaagtgctgggattacaggcgtcaaccatcgcgccc

SEQ ID NO: 41796 - DNA, 40 bp, Homo sapiens
ggcgcgatggttgacgcctgtaatcccagcactttgggag

SEQ ID NO: 41797 - DNA, 40 bp, Homo sapiens
ctcccaaagtgctgggattacaggcgtcaaccatcgcgcc

SEQ ID NO: 41798 - DNA, 40 bp, Homo sapiens
gcgcgatggttgacgcctgtaatcccagcactttgggagg

SEQ ID NO: 41799 - DNA, 40 bp, Homo sapiens
cctcccaaagtgctgggattacaggcgtcaaccatcgcgc

SEQ ID NO: 41800 - DNA, 40 bp, Homo sapiens
cgcgatggttgacgcctgtaatcccagcactttgggaggc

SEQ ID NO: 41801 - DNA, 40 bp, Homo sapiens
gcctcccaaagtgctgggattacaggcgtcaaccatcgcg

SEQ ID NO: 41802 - DNA, 40 bp, Homo sapiens
gcgatggttgacgcctgtaatcccagcactttgggaggcc

SEQ ID NO: 41803 - DNA, 40 bp, Homo sapiens
ggcctcccaaagtgctgggattacaggcgtcaaccatcgc

SEQ ID NO: 41804 - DNA, 40 bp, Homo sapiens
cgatggttgacgcctgtaatcccagcactttgggaggccg

SEQ ID NO: 41805 - DNA, 40 bp, Homo sapiens
cggcctcccaaagtgctgggattacaggcgtcaaccatcg

SEQ ID NO: 41806 - DNA, 40 bp, Homo sapiens
gatggttgacgcctgtaatcccagcactttgggaggccga

SEQ ID NO: 41807 - DNA, 40 bp, Homo sapiens
tcggcctcccaaagtgctgggattacaggcgtcaaccatc

SEQ ID NO: 41808 - DNA, 40 bp, Homo sapiens
atggttgacgcctgtaatcccagcactttgggaggccgag

SEQ ID NO: 41809 - DNA, 40 bp, Homo sapiens
ctcggcctcccaaagtgctgggattacaggcgtcaaccat

SEQ ID NO: 41810 - DNA, 40 bp, Homo sapiens
tggttgacgcctgtaatcccagcactttgggaggccgagg

SEQ ID NO: 41811 - DNA, 40 bp, Homo sapiens
cctcggcctcccaaagtgctgggattacaggcgtcaacca

SEQ ID NO: 41812 - DNA, 40 bp, Homo sapiens
ggttgacgcctgtaatcccagcactttgggaggccgaggc

SEQ ID NO: 41813 - DNA, 40 bp, Homo sapiens
gcctcggcctcccaaagtgctgggattacaggcgtcaacc

SEQ ID NO: 41814 - DNA, 40 bp, Homo sapiens
gttgacgcctgtaatcccagcactttgggaggccgaggcg

SEQ ID NO: 41815 - DNA, 40 bp, Homo sapiens
cgcctcggcctcccaaagtgctgggattacaggcgtcaac

SEQ ID NO: 41816 - DNA, 40 bp, Homo sapiens
ttgacgcctgtaatcccagcactttgggaggccgaggcgg

SEQ ID NO: 41817 - DNA, 40 bp, Homo sapiens
ccgcctcggcctcccaaagtgctgggattacaggcgtcaa

SEQ ID NO: 41818 - DNA, 40 bp, Homo sapiens
tgacgcctgtaatcccagcactttgggaggccgaggcgga

SEQ ID NO: 41819 - DNA, 40 bp, Homo sapiens
tccgcctcggcctcccaaagtgctgggattacaggcgtca

SEQ ID NO: 41820 - DNA, 40 bp, Homo sapiens
gacgcctgtaatcccagcactttgggaggccgaggcggat

SEQ ID NO: 41821 - DNA, 40 bp, Homo sapiens
atccgcctcggcctcccaaagtgctgggattacaggcgtc

SEQ ID NO: 41822 - DNA, 40 bp, Homo sapiens
acgcctgtaatcccagcactttgggaggccgaggcggatc

SEQ ID NO: 41823 - DNA, 40 bp, Homo sapiens
gatccgcctcggcctcccaaagtgctgggattacaggcgt

SEQ ID NO: 41824 - DNA, 40 bp, Homo sapiens
cgcctgtaatcccagcactttgggaggccgaggcggatca

SEQ ID NO: 41825 - DNA, 40 bp, Homo sapiens
tgatccgcctcggcctcccaaagtgctgggattacaggcg

SEQ ID NO: 41826 - DNA, 40 bp, Homo sapiens
gcctgtaatcccagcactttgggaggccgaggcggatcac

SEQ ID NO: 41827 - DNA, 40 bp, Homo sapiens
gtgatccgcctcggcctcccaaagtgctgggattacaggc

SEQ ID NO: 41828 - DNA, 40 bp, Homo sapiens
cctgtaatcccagcactttgggaggccgaggcggatcacc

SEQ ID NO: 41829 - DNA, 40 bp, Homo sapiens
ggtgatccgcctcggcctcccaaagtgctgggattacagg

SEQ ID NO: 41830 - DNA, 40 bp, Homo sapiens
ctgtaatcccagcactttgggaggccgaggcggatcacct

SEQ ID NO: 41831 - DNA, 40 bp, Homo sapiens
aggtgatccgcctcggcctcccaaagtgctgggattacag

SEQ ID NO: 41832 - DNA, 40 bp, Homo sapiens
tgtaatcccagcactttgggaggccgaggcggatcacctg

SEQ ID NO: 41833 - DNA, 40 bp, Homo sapiens
caggtgatccgcctcggcctcccaaagtgctgggattaca

SEQ ID NO: 41834 - DNA, 40 bp, Homo sapiens
gtaatcccagcactttgggaggccgaggcggatcacctga

SEQ ID NO: 41835 - DNA, 40 bp, Homo sapiens
tcaggtgatccgcctcggcctcccaaagtgctgggattac

SEQ ID NO: 41836 - DNA, 40 bp, Homo sapiens
taatcccagcactttgggaggccgaggcggatcacctgag

SEQ ID NO: 41837 - DNA, 40 bp, Homo sapiens
ctcaggtgatccgcctcggcctcccaaagtgctgggatta

SEQ ID NO: 41838 - DNA, 40 bp, Homo sapiens
aatcccagcactttgggaggccgaggcggatcacctgagg

SEQ ID NO: 41839 - DNA, 40 bp, Homo sapiens
cctcaggtgatccgcctcggcctcccaaagtgctgggatt

SEQ ID NO: 41840 - DNA, 40 bp, Homo sapiens
atcccagcactttgggaggccgaggcggatcacctgaggt

SEQ ID NO: 41841 - DNA, 40 bp, Homo sapiens
acctcaggtgatccgcctcggcctcccaaagtgctgggat

SEQ ID NO: 41842 - DNA, 40 bp, Homo sapiens
tcccagcactttgggaggccgaggcggatcacctgaggtc

SEQ ID NO: 41843 - DNA, 40 bp, Homo sapiens
gacctcaggtgatccgcctcggcctcccaaagtgctggga

SEQ ID NO: 41844 - DNA, 40 bp, Homo sapiens
cccagcactttgggaggccgaggcggatcacctgaggtca

SEQ ID NO: 41845 - DNA, 40 bp, Homo sapiens
tgacctcaggtgatccgcctcggcctcccaaagtgctggg

SEQ ID NO: 41846 - DNA, 40 bp, Homo sapiens
ccagcactttgggaggccgaggcggatcacctgaggtcag

SEQ ID NO: 41847 - DNA, 40 bp, Homo sapiens
ctgacctcaggtgatccgcctcggcctcccaaagtgctgg

SEQ ID NO: 41848 - DNA, 40 bp, Homo sapiens
cagcactttgggaggccgaggcggatcacctgaggtcagg

SEQ ID NO: 41849 - DNA, 40 bp, Homo sapiens
cctgacctcaggtgatccgcctcggcctcccaaagtgctg

SEQ ID NO: 41850 - DNA, 40 bp, Homo sapiens
agcactttgggaggccgaggcggatcacctgaggtcagga

SEQ ID NO: 41851 - DNA, 40 bp, Homo sapiens
tcctgacctcaggtgatccgcctcggcctcccaaagtgct

SEQ ID NO: 41852 - DNA, 40 bp, Homo sapiens
gcactttgggaggccgaggcggatcacctgaggtcaggag

SEQ ID NO: 41853 - DNA, 40 bp, Homo sapiens
ctcctgacctcaggtgatccgcctcggcctcccaaagtgc

SEQ ID NO: 41854 - DNA, 40 bp, Homo sapiens
cactttgggaggccgaggcggatcacctgaggtcaggagt

SEQ ID NO: 41855 - DNA, 40 bp, Homo sapiens
actcctgacctcaggtgatccgcctcggcctcccaaagtg

SEQ ID NO: 41856 - DNA, 40 bp, Homo sapiens
actttgggaggccgaggcggatcacctgaggtcaggagtt

SEQ ID NO: 41857 - DNA, 40 bp, Homo sapiens
aactcctgacctcaggtgatccgcctcggcctcccaaagt

SEQ ID NO: 41858 - DNA, 40 bp, Homo sapiens
ctttgggaggccgaggcggatcacctgaggtcaggagttg

SEQ ID NO: 41859 - DNA, 40 bp, Homo sapiens
caactcctgacctcaggtgatccgcctcggcctcccaaag

SEQ ID NO: 41860 - DNA, 40 bp, Homo sapiens
tttgggaggccgaggcggatcacctgaggtcaggagttga

SEQ ID NO: 41861 - DNA, 40 bp, Homo sapiens
tcaactcctgacctcaggtgatccgcctcggcctcccaaa

SEQ ID NO: 41862 - DNA, 40 bp, Homo sapiens
ttgggaggccgaggcggatcacctgaggtcaggagttgaa

SEQ ID NO: 41863 - DNA, 40 bp, Homo sapiens
ttcaactcctgacctcaggtgatccgcctcggcctcccaa

SEQ ID NO: 41864 - DNA, 40 bp, Homo sapiens
tgggaggccgaggcggatcacctgaggtcaggagttgaag

SEQ ID NO: 41865 - DNA, 40 bp, Homo sapiens
cttcaactcctgacctcaggtgatccgcctcggcctccca

SEQ ID NO: 41866 - DNA, 40 bp, Homo sapiens
gggaggccgaggcggatcacctgaggtcaggagttgaaga

SEQ ID NO: 41867 - DNA, 40 bp, Homo sapiens
tcttcaactcctgacctcaggtgatccgcctcggcctccc

SEQ ID NO: 41868 - DNA, 40 bp, Homo sapiens
ggaggccgaggcggatcacctgaggtcaggagttgaagac

SEQ ID NO: 41869 - DNA, 40 bp, Homo sapiens
gtcttcaactcctgacctcaggtgatccgcctcggcctcc

SEQ ID NO: 41870 - DNA, 40 bp, Homo sapiens
gaggccgaggcggatcacctgaggtcaggagttgaagacc

SEQ ID NO: 41871 - DNA, 40 bp, Homo sapiens
ggtcttcaactcctgacctcaggtgatccgcctcggcctc

SEQ ID NO: 41872 - DNA, 40 bp, Homo sapiens
aggccgaggcggatcacctgaggtcaggagttgaagacca

SEQ ID NO: 41873 - DNA, 40 bp, Homo sapiens
tggtcttcaactcctgacctcaggtgatccgcctcggcct

SEQ ID NO: 41874 - DNA, 40 bp, Homo sapiens
ggccgaggcggatcacctgaggtcaggagttgaagaccag

SEQ ID NO: 41875 - DNA, 40 bp, Homo sapiens
ctggtcttcaactcctgacctcaggtgatccgcctcggcc

SEQ ID NO: 41876 - DNA, 40 bp, Homo sapiens
gccgaggcggatcacctgaggtcaggagttgaagaccagc

SEQ ID NO: 41877 - DNA, 40 bp, Homo sapiens
gctggtcttcaactcctgacctcaggtgatccgcctcggc

SEQ ID NO: 41878 - DNA, 40 bp, Homo sapiens
ccgaggcggatcacctgaggtcaggagttgaagaccagcc

SEQ ID NO: 41879 - DNA, 40 bp, Homo sapiens
ggctggtcttcaactcctgacctcaggtgatccgcctcgg

SEQ ID NO: 41880 - DNA, 40 bp, Homo sapiens
cgaggcggatcacctgaggtcaggagttgaagaccagcct

SEQ ID NO: 41881 - DNA, 40 bp, Homo sapiens
aggctggtcttcaactcctgacctcaggtgatccgcctcg

SEQ ID NO: 41882 - DNA, 40 bp, Homo sapiens
gaggcggatcacctgaggtcaggagttgaagaccagcctg

SEQ ID NO: 41883 - DNA, 40 bp, Homo sapiens
caggctggtcttcaactcctgacctcaggtgatccgcctc

SEQ ID NO: 41884 - DNA, 40 bp, Homo sapiens
aggcggatcacctgaggtcaggagttgaagaccagcctgg

SEQ ID NO: 41885 - DNA, 40 bp, Homo sapiens
ccaggctggtcttcaactcctgacctcaggtgatccgcct

SEQ ID NO: 41886 - DNA, 40 bp, Homo sapiens
ggcggatcacctgaggtcaggagttgaagaccagcctggc

SEQ ID NO: 41887 - DNA, 40 bp, Homo sapiens
gccaggctggtcttcaactcctgacctcaggtgatccgcc

SEQ ID NO: 41888 - DNA, 40 bp, Homo sapiens
gcggatcacctgaggtcaggagttgaagaccagcctggcc

SEQ ID NO: 41889 - DNA, 40 bp, Homo sapiens
ggccaggctggtcttcaactcctgacctcaggtgatccgc

SEQ ID NO: 41890 - DNA, 40 bp, Homo sapiens
cggatcacctgaggtcaggagttgaagaccagcctggcca

SEQ ID NO: 41891 - DNA, 40 bp, Homo sapiens
tggccaggctggtcttcaactcctgacctcaggtgatccg

SEQ ID NO: 41892 - DNA, 40 bp, Homo sapiens
ggatcacctgaggtcaggagttgaagaccagcctggccaa

SEQ ID NO: 41893 - DNA, 40 bp, Homo sapiens
ttggccaggctggtcttcaactcctgacctcaggtgatcc

SEQ ID NO: 41894 - DNA, 40 bp, Homo sapiens
gatcacctgaggtcaggagttgaagaccagcctggccaat

SEQ ID NO: 41895 - DNA, 40 bp, Homo sapiens
attggccaggctggtcttcaactcctgacctcaggtgatc

SEQ ID NO: 41896 - DNA, 40 bp, Homo sapiens
atcacctgaggtcaggagttgaagaccagcctggccaatc

SEQ ID NO: 41897 - DNA, 40 bp, Homo sapiens
gattggccaggctggtcttcaactcctgacctcaggtgat

SEQ ID NO: 41898 - DNA, 40 bp, Homo sapiens
tcacctgaggtcaggagttgaagaccagcctggccaatct

SEQ ID NO: 41899 - DNA, 40 bp, Homo sapiens
agattggccaggctggtcttcaactcctgacctcaggtga

SEQ ID NO: 41900 - DNA, 40 bp, Homo sapiens
cacctgaggtcaggagttgaagaccagcctggccaatctg

SEQ ID NO: 41901 - DNA, 40 bp, Homo sapiens
cagattggccaggctggtcttcaactcctgacctcaggtg

SEQ ID NO: 41902 - DNA, 40 bp, Homo sapiens
acctgaggtcaggagttgaagaccagcctggccaatctgt

SEQ ID NO: 41903 - DNA, 40 bp, Homo sapiens
acagattggccaggctggtcttcaactcctgacctcaggt

SEQ ID NO: 41904 - DNA, 40 bp, Homo sapiens
cctgaggtcaggagttgaagaccagcctggccaatctgta

SEQ ID NO: 41905 - DNA, 40 bp, Homo sapiens
tacagattggccaggctggtcttcaactcctgacctcagg

SEQ ID NO: 41906 - DNA, 40 bp, Homo sapiens
ctgaggtcaggagttgaagaccagcctggccaatctgtac

SEQ ID NO: 41907 - DNA, 40 bp, Homo sapiens
gtacagattggccaggctggtcttcaactcctgacctcag

SEQ ID NO: 41908 - DNA, 40 bp, Homo sapiens
tgaggtcaggagttgaagaccagcctggccaatctgtact

SEQ ID NO: 41909 - DNA, 40 bp, Homo sapiens
agtacagattggccaggctggtcttcaactcctgacctca

SEQ ID NO: 41910 - DNA, 40 bp, Homo sapiens
gaggtcaggagttgaagaccagcctggccaatctgtacta

SEQ ID NO: 41911 - DNA, 40 bp, Homo sapiens
tagtacagattggccaggctggtcttcaactcctgacctc

SEQ ID NO: 41912 - DNA, 40 bp, Homo sapiens
aggtcaggagttgaagaccagcctggccaatctgtactaa

SEQ ID NO: 41913 - DNA, 40 bp, Homo sapiens
ttagtacagattggccaggctggtcttcaactcctgacct

SEQ ID NO: 41914 - DNA, 40 bp, Homo sapiens
ggtcaggagttgaagaccagcctggccaatctgtactaaa

SEQ ID NO: 41915 - DNA, 40 bp, Homo sapiens
tttagtacagattggccaggctggtcttcaactcctgacc

SEQ ID NO: 41916 - DNA, 40 bp, Homo sapiens
gtcaggagttgaagaccagcctggccaatctgtactaaaa

SEQ ID NO: 41917 - DNA, 40 bp, Homo sapiens
ttttagtacagattggccaggctggtcttcaactcctgac

SEQ ID NO: 41918 - DNA, 40 bp, Homo sapiens
tcaggagttgaagaccagcctggccaatctgtactaaaaa

SEQ ID NO: 41919 - DNA, 40 bp, Homo sapiens
tttttagtacagattggccaggctggtcttcaactcctga

SEQ ID NO: 41920 - DNA, 40 bp, Homo sapiens
caggagttgaagaccagcctggccaatctgtactaaaaat

SEQ ID NO: 41921 - DNA, 40 bp, Homo sapiens
atttttagtacagattggccaggctggtcttcaactcctg

SEQ ID NO: 41922 - DNA, 40 bp, Homo sapiens
aggagttgaagaccagcctggccaatctgtactaaaaata

SEQ ID NO: 41923 - DNA, 40 bp, Homo sapiens
tatttttagtacagattggccaggctggtcttcaactcct

SEQ ID NO: 41924 - DNA, 40 bp, Homo sapiens
ggagttgaagaccagcctggccaatctgtactaaaaatac

SEQ ID NO: 41925 - DNA, 40 bp, Homo sapiens
gtatttttagtacagattggccaggctggtcttcaactcc

SEQ ID NO: 41926 - DNA, 40 bp, Homo sapiens
gagttgaagaccagcctggccaatctgtactaaaaataca

SEQ ID NO: 41927 - DNA, 40 bp, Homo sapiens
tgtatttttagtacagattggccaggctggtcttcaactc

SEQ ID NO: 41928 - DNA, 40 bp, Homo sapiens
agttgaagaccagcctggccaatctgtactaaaaatacaa

SEQ ID NO: 41929 - DNA, 40 bp, Homo sapiens
ttgtatttttagtacagattggccaggctggtcttcaact

SEQ ID NO: 41930 - DNA, 40 bp, Homo sapiens
gttgaagaccagcctggccaatctgtactaaaaatacaaa

SEQ ID NO: 41931 - DNA, 40 bp, Homo sapiens
tttgtatttttagtacagattggccaggctggtcttcaac

SEQ ID NO: 41932 - DNA, 40 bp, Homo sapiens
ttgaagaccagcctggccaatctgtactaaaaatacaaaa

SEQ ID NO: 41933 - DNA, 40 bp, Homo sapiens
ttttgtatttttagtacagattggccaggctggtcttcaa

SEQ ID NO: 41934 - DNA, 40 bp, Homo sapiens
tgaagaccagcctggccaatctgtactaaaaatacaaaaa

SEQ ID NO: 41935 - DNA, 40 bp, Homo sapiens
tttttgtatttttagtacagattggccaggctggtcttca

SEQ ID NO: 41936 - DNA, 40 bp, Homo sapiens
gaagaccagcctggccaatctgtactaaaaatacaaaaat

SEQ ID NO: 41937 - DNA, 40 bp, Homo sapiens
atttttgtatttttagtacagattggccaggctggtcttc

SEQ ID NO: 41938 - DNA, 40 bp, Homo sapiens
aagaccagcctggccaatctgtactaaaaatacaaaaatt

SEQ ID NO: 41939 - DNA, 40 bp, Homo sapiens
aatttttgtatttttagtacagattggccaggctggtctt

SEQ ID NO: 41940 - DNA, 40 bp, Homo sapiens
agaccagcctggccaatctgtactaaaaatacaaaaatta

SEQ ID NO: 41941 - DNA, 40 bp, Homo sapiens
taatttttgtatttttagtacagattggccaggctggtct

SEQ ID NO: 41942 - DNA, 40 bp, Homo sapiens
gaccagcctggccaatctgtactaaaaatacaaaaattag

SEQ ID NO: 41943 - DNA, 40 bp, Homo sapiens
ctaatttttgtatttttagtacagattggccaggctggtc

SEQ ID NO: 41944 - DNA, 40 bp, Homo sapiens
accagcctggccaatctgtactaaaaatacaaaaattagc

SEQ ID NO: 41945 - DNA, 40 bp, Homo sapiens
gctaatttttgtatttttagtacagattggccaggctggt

SEQ ID NO: 41946 - DNA, 40 bp, Homo sapiens
ccagcctggccaatctgtactaaaaatacaaaaattagct

SEQ ID NO: 41947 - DNA, 40 bp, Homo sapiens
agctaatttttgtatttttagtacagattggccaggctgg

SEQ ID NO: 41948 - DNA, 40 bp, Homo sapiens
cagcctggccaatctgtactaaaaatacaaaaattagctg

SEQ ID NO: 41949 - DNA, 40 bp, Homo sapiens
cagctaatttttgtatttttagtacagattggccaggctg

SEQ ID NO: 41950 - DNA, 40 bp, Homo sapiens
agcctggccaatctgtactaaaaatacaaaaattagctgg

SEQ ID NO: 41951 - DNA, 40 bp, Homo sapiens
ccagctaatttttgtatttttagtacagattggccaggct

SEQ ID NO: 41952 - DNA, 40 bp, Homo sapiens
gcctggccaatctgtactaaaaatacaaaaattagctgga

SEQ ID NO: 41953 - DNA, 40 bp, Homo sapiens
tccagctaatttttgtatttttagtacagattggccaggc

SEQ ID NO: 41954 - DNA, 40 bp, Homo sapiens
cctggccaatctgtactaaaaatacaaaaattagctggac

SEQ ID NO: 41955 - DNA, 40 bp, Homo sapiens
gtccagctaatttttgtatttttagtacagattggccagg

SEQ ID NO: 41956 - DNA, 40 bp, Homo sapiens
ctggccaatctgtactaaaaatacaaaaattagctggaca

SEQ ID NO: 41957 - DNA, 40 bp, Homo sapiens
tgtccagctaatttttgtatttttagtacagattggccag

SEQ ID NO: 41958 - DNA, 40 bp, Homo sapiens
tggccaatctgtactaaaaatacaaaaattagctggacac

SEQ ID NO: 41959 - DNA, 40 bp, Homo sapiens
gtgtccagctaatttttgtatttttagtacagattggcca

SEQ ID NO: 41960 - DNA, 40 bp, Homo sapiens
ggccaatctgtactaaaaatacaaaaattagctggacaca

SEQ ID NO: 41961 - DNA, 40 bp, Homo sapiens
tgtgtccagctaatttttgtatttttagtacagattggcc

SEQ ID NO: 41962 - DNA, 40 bp, Homo sapiens
gccaatctgtactaaaaatacaaaaattagctggacacag

SEQ ID NO: 41963 - DNA, 40 bp, Homo sapiens
ctgtgtccagctaatttttgtatttttagtacagattggc

SEQ ID NO: 41964 - DNA, 40 bp, Homo sapiens
ccaatctgtactaaaaatacaaaaattagctggacacagt

SEQ ID NO: 41965 - DNA, 40 bp, Homo sapiens
actgtgtccagctaatttttgtatttttagtacagattgg

SEQ ID NO: 41966 - DNA, 40 bp, Homo sapiens
caatctgtactaaaaatacaaaaattagctggacacagtg

SEQ ID NO: 41967 - DNA, 40 bp, Homo sapiens
cactgtgtccagctaatttttgtatttttagtacagattg

SEQ ID NO: 41968 - DNA, 40 bp, Homo sapiens
aatctgtactaaaaatacaaaaattagctggacacagtgg

SEQ ID NO: 41969 - DNA, 40 bp, Homo sapiens
ccactgtgtccagctaatttttgtatttttagtacagatt

SEQ ID NO: 41970 - DNA, 40 bp, Homo sapiens
atctgtactaaaaatacaaaaattagctggacacagtggc

SEQ ID NO: 41971 - DNA, 40 bp, Homo sapiens
gccactgtgtccagctaatttttgtatttttagtacagat

SEQ ID NO: 41972 - DNA, 40 bp, Homo sapiens
tctgtactaaaaatacaaaaattagctggacacagtggca

SEQ ID NO: 41973 - DNA, 40 bp, Homo sapiens
tgccactgtgtccagctaatttttgtatttttagtacaga

SEQ ID NO: 41974 - DNA, 40 bp, Homo sapiens
ctgtactaaaaatacaaaaattagctggacacagtggcac

SEQ ID NO: 41975 - DNA, 40 bp, Homo sapiens
gtgccactgtgtccagctaatttttgtatttttagtacag

SEQ ID NO: 41976 - DNA, 40 bp, Homo sapiens
tgtactaaaaatacaaaaattagctggacacagtggcacg

SEQ ID NO: 41977 - DNA, 40 bp, Homo sapiens
cgtgccactgtgtccagctaatttttgtatttttagtaca

SEQ ID NO: 41978 - DNA, 40 bp, Homo sapiens
gtactaaaaatacaaaaattagctggacacagtggcacgt

SEQ ID NO: 41979 - DNA, 40 bp, Homo sapiens
acgtgccactgtgtccagctaatttttgtatttttagtac

SEQ ID NO: 41980 - DNA, 40 bp, Homo sapiens
tactaaaaatacaaaaattagctggacacagtggcacgtg

SEQ ID NO: 41981 - DNA, 40 bp, Homo sapiens
cacgtgccactgtgtccagctaatttttgtatttttagta

SEQ ID NO: 41982 - DNA, 40 bp, Homo sapiens
actaaaaatacaaaaattagctggacacagtggcacgtgc

SEQ ID NO: 41983 - DNA, 40 bp, Homo sapiens
gcacgtgccactgtgtccagctaatttttgtatttttagt

SEQ ID NO: 41984 - DNA, 40 bp, Homo sapiens
ctaaaaatacaaaaattagctggacacagtggcacgtgcc

SEQ ID NO: 41985 - DNA, 40 bp, Homo sapiens
ggcacgtgccactgtgtccagctaatttttgtatttttag

SEQ ID NO: 41986 - DNA, 40 bp, Homo sapiens
taaaaatacaaaaattagctggacacagtggcacgtgcca

SEQ ID NO: 41987 - DNA, 40 bp, Homo sapiens
tggcacgtgccactgtgtccagctaatttttgtattttta

SEQ ID NO: 41988 - DNA, 40 bp, Homo sapiens
aaaaatacaaaaattagctggacacagtggcacgtgccag

SEQ ID NO: 41989 - DNA, 40 bp, Homo sapiens
ctggcacgtgccactgtgtccagctaatttttgtattttt

SEQ ID NO: 41990 - DNA, 40 bp, Homo sapiens
aaaatacaaaaattagctggacacagtggcacgtgccagt

SEQ ID NO: 41991 - DNA, 40 bp, Homo sapiens
actggcacgtgccactgtgtccagctaatttttgtatttt

SEQ ID NO: 41992 - DNA, 40 bp, Homo sapiens
aaatacaaaaattagctggacacagtggcacgtgccagta

SEQ ID NO: 41993 - DNA, 40 bp, Homo sapiens
tactggcacgtgccactgtgtccagctaatttttgtattt

SEQ ID NO: 41994 - DNA, 40 bp, Homo sapiens
aatacaaaaattagctggacacagtggcacgtgccagtag

SEQ ID NO: 41995 - DNA, 40 bp, Homo sapiens
ctactggcacgtgccactgtgtccagctaatttttgtatt

SEQ ID NO: 41996 - DNA, 40 bp, Homo sapiens
atacaaaaattagctggacacagtggcacgtgccagtagt

SEQ ID NO: 41997 - DNA, 40 bp, Homo sapiens
actactggcacgtgccactgtgtccagctaatttttgtat

SEQ ID NO: 41998 - DNA, 40 bp, Homo sapiens
tacaaaaattagctggacacagtggcacgtgccagtagtc

SEQ ID NO: 41999 - DNA, 40 bp, Homo sapiens
gactactggcacgtgccactgtgtccagctaatttttgta

SEQ ID NO: 42000 - DNA, 40 bp, Homo sapiens
acaaaaattagctggacacagtggcacgtgccagtagtcc

SEQ ID NO: 42001 - DNA, 40 bp, Homo sapiens
ggactactggcacgtgccactgtgtccagctaatttttgt

SEQ ID NO: 42002 - DNA, 40 bp, Homo sapiens
caaaaattagctggacacagtggcacgtgccagtagtccc

SEQ ID NO: 42003 - DNA, 40 bp, Homo sapiens
gggactactggcacgtgccactgtgtccagctaatttttg

SEQ ID NO: 42004 - DNA, 40 bp, Homo sapiens
aaaaattagctggacacagtggcacgtgccagtagtccca

SEQ ID NO: 42005 - DNA, 40 bp, Homo sapiens
tgggactactggcacgtgccactgtgtccagctaattttt

SEQ ID NO: 42006 - DNA, 40 bp, Homo sapiens
aaaattagctggacacagtggcacgtgccagtagtcccag

SEQ ID NO: 42007 - DNA, 40 bp, Homo sapiens
ctgggactactggcacgtgccactgtgtccagctaatttt

SEQ ID NO: 42008 - DNA, 40 bp, Homo sapiens
aaattagctggacacagtggcacgtgccagtagtcccagc

SEQ ID NO: 42009 - DNA, 40 bp, Homo sapiens
gctgggactactggcacgtgccactgtgtccagctaattt

SEQ ID NO: 42010 - DNA, 40 bp, Homo sapiens
aattagctggacacagtggcacgtgccagtagtcccagct

SEQ ID NO: 42011 - DNA, 40 bp, Homo sapiens
agctgggactactggcacgtgccactgtgtccagctaatt

SEQ ID NO: 42012 - DNA, 40 bp, Homo sapiens
attagctggacacagtggcacgtgccagtagtcccagcta

SEQ ID NO: 42013 - DNA, 40 bp, Homo sapiens
tagctgggactactggcacgtgccactgtgtccagctaat

SEQ ID NO: 42014 - DNA, 40 bp, Homo sapiens
ttagctggacacagtggcacgtgccagtagtcccagctac

SEQ ID NO: 42015 - DNA, 40 bp, Homo sapiens
gtagctgggactactggcacgtgccactgtgtccagctaa

SEQ ID NO: 42016 - DNA, 40 bp, Homo sapiens
tagctggacacagtggcacgtgccagtagtcccagctact

SEQ ID NO: 42017 - DNA, 40 bp, Homo sapiens
agtagctgggactactggcacgtgccactgtgtccagcta

SEQ ID NO: 42018 - DNA, 40 bp, Homo sapiens
agctggacacagtggcacgtgccagtagtcccagctactc

SEQ ID NO: 42019 - DNA, 40 bp, Homo sapiens
gagtagctgggactactggcacgtgccactgtgtccagct

SEQ ID NO: 42020 - DNA, 40 bp, Homo sapiens
gctggacacagtggcacgtgccagtagtcccagctactca

SEQ ID NO: 42021 - DNA, 40 bp, Homo sapiens
tgagtagctgggactactggcacgtgccactgtgtccagc

SEQ ID NO: 42022 - DNA, 40 bp, Homo sapiens
ctggacacagtggcacgtgccagtagtcccagctactcag

SEQ ID NO: 42023 - DNA, 40 bp, Homo sapiens
ctgagtagctgggactactggcacgtgccactgtgtccag

SEQ ID NO: 42024 - DNA, 40 bp, Homo sapiens
tggacacagtggcacgtgccagtagtcccagctactcagg

SEQ ID NO: 42025 - DNA, 40 bp, Homo sapiens
cctgagtagctgggactactggcacgtgccactgtgtcca

SEQ ID NO: 42026 - DNA, 40 bp, Homo sapiens
ggacacagtggcacgtgccagtagtcccagctactcagga

SEQ ID NO: 42027 - DNA, 40 bp, Homo sapiens
tcctgagtagctgggactactggcacgtgccactgtgtcc

SEQ ID NO: 42028 - DNA, 40 bp, Homo sapiens
gacacagtggcacgtgccagtagtcccagctactcaggag

SEQ ID NO: 42029 - DNA, 40 bp, Homo sapiens
ctcctgagtagctgggactactggcacgtgccactgtgtc

SEQ ID NO: 42030 - DNA, 40 bp, Homo sapiens
acacagtggcacgtgccagtagtcccagctactcaggagg

SEQ ID NO: 42031 - DNA, 40 bp, Homo sapiens
cctcctgagtagctgggactactggcacgtgccactgtgt

SEQ ID NO: 42032 - DNA, 40 bp, Homo sapiens
cacagtggcacgtgccagtagtcccagctactcaggaggc

SEQ ID NO: 42033 - DNA, 40 bp, Homo sapiens
gcctcctgagtagctgggactactggcacgtgccactgtg

SEQ ID NO: 42034 - DNA, 40 bp, Homo sapiens
acagtggcacgtgccagtagtcccagctactcaggaggct

SEQ ID NO: 42035 - DNA, 40 bp, Homo sapiens
agcctcctgagtagctgggactactggcacgtgccactgt

SEQ ID NO: 42036 - DNA, 40 bp, Homo sapiens
cagtggcacgtgccagtagtcccagctactcaggaggctg

SEQ ID NO: 42037 - DNA, 40 bp, Homo sapiens
cagcctcctgagtagctgggactactggcacgtgccactg

SEQ ID NO: 42038 - DNA, 40 bp, Homo sapiens
agtggcacgtgccagtagtcccagctactcaggaggctga

SEQ ID NO: 42039 - DNA, 40 bp, Homo sapiens
tcagcctcctgagtagctgggactactggcacgtgccact

SEQ ID NO: 42040 - DNA, 40 bp, Homo sapiens
gtggcacgtgccagtagtcccagctactcaggaggctgag

SEQ ID NO: 42041 - DNA, 40 bp, Homo sapiens
ctcagcctcctgagtagctgggactactggcacgtgccac

SEQ ID NO: 42042 - DNA, 40 bp, Homo sapiens
tggcacgtgccagtagtcccagctactcaggaggctgagg

SEQ ID NO: 42043 - DNA, 40 bp, Homo sapiens
cctcagcctcctgagtagctgggactactggcacgtgcca

SEQ ID NO: 42044 - DNA, 40 bp, Homo sapiens
ggcacgtgccagtagtcccagctactcaggaggctgaggt

SEQ ID NO: 42045 - DNA, 40 bp, Homo sapiens
acctcagcctcctgagtagctgggactactggcacgtgcc

SEQ ID NO: 42046 - DNA, 40 bp, Homo sapiens
gcacgtgccagtagtcccagctactcaggaggctgaggta

SEQ ID NO: 42047 - DNA, 40 bp, Homo sapiens
tacctcagcctcctgagtagctgggactactggcacgtgc

SEQ ID NO: 42048 - DNA, 40 bp, Homo sapiens
cacgtgccagtagtcccagctactcaggaggctgaggtag

SEQ ID NO: 42049 - DNA, 40 bp, Homo sapiens
ctacctcagcctcctgagtagctgggactactggcacgtg

SEQ ID NO: 42050 - DNA, 40 bp, Homo sapiens
acgtgccagtagtcccagctactcaggaggctgaggtagg

SEQ ID NO: 42051 - DNA, 40 bp, Homo sapiens
cctacctcagcctcctgagtagctgggactactggcacgt

SEQ ID NO: 42052 - DNA, 40 bp, Homo sapiens
cgtgccagtagtcccagctactcaggaggctgaggtagga

SEQ ID NO: 42053 - DNA, 40 bp, Homo sapiens
tcctacctcagcctcctgagtagctgggactactggcacg

SEQ ID NO: 42054 - DNA, 40 bp, Homo sapiens
gtgccagtagtcccagctactcaggaggctgaggtaggag

SEQ ID NO: 42055 - DNA, 40 bp, Homo sapiens
ctcctacctcagcctcctgagtagctgggactactggcac

SEQ ID NO: 42056 - DNA, 40 bp, Homo sapiens
tgccagtagtcccagctactcaggaggctgaggtaggaga

SEQ ID NO: 42057 - DNA, 40 bp, Homo sapiens
tctcctacctcagcctcctgagtagctgggactactggca

SEQ ID NO: 42058 - DNA, 40 bp, Homo sapiens
gccagtagtcccagctactcaggaggctgaggtaggagaa

SEQ ID NO: 42059 - DNA, 40 bp, Homo sapiens
ttctcctacctcagcctcctgagtagctgggactactggc

SEQ ID NO: 42060 - DNA, 40 bp, Homo sapiens
ccagtagtcccagctactcaggaggctgaggtaggagaat

SEQ ID NO: 42061 - DNA, 40 bp, Homo sapiens
attctcctacctcagcctcctgagtagctgggactactgg

SEQ ID NO: 42062 - DNA, 40 bp, Homo sapiens
cagtagtcccagctactcaggaggctgaggtaggagaatc

SEQ ID NO: 42063 - DNA, 40 bp, Homo sapiens
gattctcctacctcagcctcctgagtagctgggactactg

SEQ ID NO: 42064 - DNA, 40 bp, Homo sapiens
agtagtcccagctactcaggaggctgaggtaggagaatcg

SEQ ID NO: 42065 - DNA, 40 bp, Homo sapiens
cgattctcctacctcagcctcctgagtagctgggactact

SEQ ID NO: 42066 - DNA, 40 bp, Homo sapiens
gtagtcccagctactcaggaggctgaggtaggagaatcgc

SEQ ID NO: 42067 - DNA, 40 bp, Homo sapiens
gcgattctcctacctcagcctcctgagtagctgggactac

SEQ ID NO: 42068 - DNA, 40 bp, Homo sapiens
tagtcccagctactcaggaggctgaggtaggagaatcgct

SEQ ID NO: 42069 - DNA, 40 bp, Homo sapiens
agcgattctcctacctcagcctcctgagtagctgggacta

SEQ ID NO: 42070 - DNA, 40 bp, Homo sapiens
agtcccagctactcaggaggctgaggtaggagaatcgctt

SEQ ID NO: 42071 - DNA, 40 bp, Homo sapiens
aagcgattctcctacctcagcctcctgagtagctgggact

SEQ ID NO: 42072 - DNA, 40 bp, Homo sapiens
gtcccagctactcaggaggctgaggtaggagaatcgcttg

SEQ ID NO: 42073 - DNA, 40 bp, Homo sapiens
caagcgattctcctacctcagcctcctgagtagctgggac

SEQ ID NO: 42074 - DNA, 40 bp, Homo sapiens
tcccagctactcaggaggctgaggtaggagaatcgcttga

SEQ ID NO: 42075 - DNA, 40 bp, Homo sapiens
tcaagcgattctcctacctcagcctcctgagtagctggga

SEQ ID NO: 42076 - DNA, 40 bp, Homo sapiens
cccagctactcaggaggctgaggtaggagaatcgcttgaa

SEQ ID NO: 42077 - DNA, 40 bp, Homo sapiens
ttcaagcgattctcctacctcagcctcctgagtagctggg

SEQ ID NO: 42078 - DNA, 40 bp, Homo sapiens
ccagctactcaggaggctgaggtaggagaatcgcttgaac

SEQ ID NO: 42079 - DNA, 40 bp, Homo sapiens
gttcaagcgattctcctacctcagcctcctgagtagctgg

SEQ ID NO: 42080 - DNA, 40 bp, Homo sapiens
cagctactcaggaggctgaggtaggagaatcgcttgaacc

SEQ ID NO: 42081 - DNA, 40 bp, Homo sapiens
ggttcaagcgattctcctacctcagcctcctgagtagctg

SEQ ID NO: 42082 - DNA, 40 bp, Homo sapiens
agctactcaggaggctgaggtaggagaatcgcttgaacct

SEQ ID NO: 42083 - DNA, 40 bp, Homo sapiens
aggttcaagcgattctcctacctcagcctcctgagtagct

SEQ ID NO: 42084 - DNA, 40 bp, Homo sapiens
gctactcaggaggctgaggtaggagaatcgcttgaacctg

SEQ ID NO: 42085 - DNA, 40 bp, Homo sapiens
caggttcaagcgattctcctacctcagcctcctgagtagc

SEQ ID NO: 42086 - DNA, 40 bp, Homo sapiens
ctactcaggaggctgaggtaggagaatcgcttgaacctgg

SEQ ID NO: 42087 - DNA, 40 bp, Homo sapiens
ccaggttcaagcgattctcctacctcagcctcctgagtag

SEQ ID NO: 42088 - DNA, 40 bp, Homo sapiens
tactcaggaggctgaggtaggagaatcgcttgaacctggg

SEQ ID NO: 42089 - DNA, 40 bp, Homo sapiens
cccaggttcaagcgattctcctacctcagcctcctgagta

SEQ ID NO: 42090 - DNA, 40 bp, Homo sapiens
actcaggaggctgaggtaggagaatcgcttgaacctggga

SEQ ID NO: 42091 - DNA, 40 bp, Homo sapiens
tcccaggttcaagcgattctcctacctcagcctcctgagt

SEQ ID NO: 42092 - DNA, 40 bp, Homo sapiens
ctcaggaggctgaggtaggagaatcgcttgaacctgggag

SEQ ID NO: 42093 - DNA, 40 bp, Homo sapiens
ctcccaggttcaagcgattctcctacctcagcctcctgag

SEQ ID NO: 42094 - DNA, 40 bp, Homo sapiens
tcaggaggctgaggtaggagaatcgcttgaacctgggagg

SEQ ID NO: 42095 - DNA, 40 bp, Homo sapiens
cctcccaggttcaagcgattctcctacctcagcctcctga

SEQ ID NO: 42096 - DNA, 40 bp, Homo sapiens
caggaggctgaggtaggagaatcgcttgaacctgggaggc

SEQ ID NO: 42097 - DNA, 40 bp, Homo sapiens
gcctcccaggttcaagcgattctcctacctcagcctcctg

SEQ ID NO: 42098 - DNA, 40 bp, Homo sapiens
aggaggctgaggtaggagaatcgcttgaacctgggaggcg

SEQ ID NO: 42099 - DNA, 40 bp, Homo sapiens
cgcctcccaggttcaagcgattctcctacctcagcctcct

SEQ ID NO: 42100 - DNA, 40 bp, Homo sapiens
ggaggctgaggtaggagaatcgcttgaacctgggaggcgg

SEQ ID NO: 42101 - DNA, 40 bp, Homo sapiens
ccgcctcccaggttcaagcgattctcctacctcagcctcc

SEQ ID NO: 42102 - DNA, 40 bp, Homo sapiens
gaggctgaggtaggagaatcgcttgaacctgggaggcgga

SEQ ID NO: 42103 - DNA, 40 bp, Homo sapiens
tccgcctcccaggttcaagcgattctcctacctcagcctc

SEQ ID NO: 42104 - DNA, 40 bp, Homo sapiens
aggctgaggtaggagaatcgcttgaacctgggaggcggag

SEQ ID NO: 42105 - DNA, 40 bp, Homo sapiens
ctccgcctcccaggttcaagcgattctcctacctcagcct

SEQ ID NO: 42106 - DNA, 40 bp, Homo sapiens
ggctgaggtaggagaatcgcttgaacctgggaggcggagg

SEQ ID NO: 42107 - DNA, 40 bp, Homo sapiens
cctccgcctcccaggttcaagcgattctcctacctcagcc

SEQ ID NO: 42108 - DNA, 40 bp, Homo sapiens
gctgaggtaggagaatcgcttgaacctgggaggcggaggt

SEQ ID NO: 42109 - DNA, 40 bp, Homo sapiens
acctccgcctcccaggttcaagcgattctcctacctcagc

SEQ ID NO: 42110 - DNA, 40 bp, Homo sapiens
ctgaggtaggagaatcgcttgaacctgggaggcggaggtt

SEQ ID NO: 42111 - DNA, 40 bp, Homo sapiens
aacctccgcctcccaggttcaagcgattctcctacctcag

SEQ ID NO: 42112 - DNA, 40 bp, Homo sapiens
tgaggtaggagaatcgcttgaacctgggaggcggaggttg

SEQ ID NO: 42113 - DNA, 40 bp, Homo sapiens
caacctccgcctcccaggttcaagcgattctcctacctca

SEQ ID NO: 42114 - DNA, 40 bp, Homo sapiens
gaggtaggagaatcgcttgaacctgggaggcggaggttgc

SEQ ID NO: 42115 - DNA, 40 bp, Homo sapiens
gcaacctccgcctcccaggttcaagcgattctcctacctc

SEQ ID NO: 42116 - DNA, 40 bp, Homo sapiens
aggtaggagaatcgcttgaacctgggaggcggaggttgca

SEQ ID NO: 42117 - DNA, 40 bp, Homo sapiens
tgcaacctccgcctcccaggttcaagcgattctcctacct

SEQ ID NO: 42118 - DNA, 40 bp, Homo sapiens
ggtaggagaatcgcttgaacctgggaggcggaggttgcag

SEQ ID NO: 42119 - DNA, 40 bp, Homo sapiens
ctgcaacctccgcctcccaggttcaagcgattctcctacc

SEQ ID NO: 42120 - DNA, 40 bp, Homo sapiens
gtaggagaatcgcttgaacctgggaggcggaggttgcagt

SEQ ID NO: 42121 - DNA, 40 bp, Homo sapiens
actgcaacctccgcctcccaggttcaagcgattctcctac

SEQ ID NO: 42122 - DNA, 40 bp, Homo sapiens
taggagaatcgcttgaacctgggaggcggaggttgcagtg

SEQ ID NO: 42123 - DNA, 40 bp, Homo sapiens
cactgcaacctccgcctcccaggttcaagcgattctccta

SEQ ID NO: 42124 - DNA, 40 bp, Homo sapiens
aggagaatcgcttgaacctgggaggcggaggttgcagtga

SEQ ID NO: 42125 - DNA, 40 bp, Homo sapiens
tcactgcaacctccgcctcccaggttcaagcgattctcct

SEQ ID NO: 42126 - DNA, 40 bp, Homo sapiens
ggagaatcgcttgaacctgggaggcggaggttgcagtgac

SEQ ID NO: 42127 - DNA, 40 bp, Homo sapiens
gtcactgcaacctccgcctcccaggttcaagcgattctcc

SEQ ID NO: 42128 - DNA, 40 bp, Homo sapiens
gagaatcgcttgaacctgggaggcggaggttgcagtgact

SEQ ID NO: 42129 - DNA, 40 bp, Homo sapiens
agtcactgcaacctccgcctcccaggttcaagcgattctc

SEQ ID NO: 42130 - DNA, 40 bp, Homo sapiens
agaatcgcttgaacctgggaggcggaggttgcagtgactc

SEQ ID NO: 42131 - DNA, 40 bp, Homo sapiens
gagtcactgcaacctccgcctcccaggttcaagcgattct

SEQ ID NO: 42132 - DNA, 40 bp, Homo sapiens
gaatcgcttgaacctgggaggcggaggttgcagtgactcg

SEQ ID NO: 42133 - DNA, 40 bp, Homo sapiens
cgagtcactgcaacctccgcctcccaggttcaagcgattc

SEQ ID NO: 42134 - DNA, 40 bp, Homo sapiens
aatcgcttgaacctgggaggcggaggttgcagtgactcga

SEQ ID NO: 42135 - DNA, 40 bp, Homo sapiens
tcgagtcactgcaacctccgcctcccaggttcaagcgatt

SEQ ID NO: 42136 - DNA, 40 bp, Homo sapiens
atcgcttgaacctgggaggcggaggttgcagtgactcgag

SEQ ID NO: 42137 - DNA, 40 bp, Homo sapiens
ctcgagtcactgcaacctccgcctcccaggttcaagcgat

SEQ ID NO: 42138 - DNA, 40 bp, Homo sapiens
tcgcttgaacctgggaggcggaggttgcagtgactcgaga

SEQ ID NO: 42139 - DNA, 40 bp, Homo sapiens
tctcgagtcactgcaacctccgcctcccaggttcaagcga

SEQ ID NO: 42140 - DNA, 40 bp, Homo sapiens
cgcttgaacctgggaggcggaggttgcagtgactcgagat

SEQ ID NO: 42141 - DNA, 40 bp, Homo sapiens
atctcgagtcactgcaacctccgcctcccaggttcaagcg

SEQ ID NO: 42142 - DNA, 40 bp, Homo sapiens
gcttgaacctgggaggcggaggttgcagtgactcgagatc

SEQ ID NO: 42143 - DNA, 40 bp, Homo sapiens
gatctcgagtcactgcaacctccgcctcccaggttcaagc

SEQ ID NO: 42144 - DNA, 40 bp, Homo sapiens
cttgaacctgggaggcggaggttgcagtgactcgagatcg

SEQ ID NO: 42145 - DNA, 40 bp, Homo sapiens
cgatctcgagtcactgcaacctccgcctcccaggttcaag

SEQ ID NO: 42146 - DNA, 40 bp, Homo sapiens
ttgaacctgggaggcggaggttgcagtgactcgagatcgt

SEQ ID NO: 42147 - DNA, 40 bp, Homo sapiens
acgatctcgagtcactgcaacctccgcctcccaggttcaa

SEQ ID NO: 42148 - DNA, 40 bp, Homo sapiens
tgaacctgggaggcggaggttgcagtgactcgagatcgtg

SEQ ID NO: 42149 - DNA, 40 bp, Homo sapiens
cacgatctcgagtcactgcaacctccgcctcccaggttca

SEQ ID NO: 42150 - DNA, 40 bp, Homo sapiens
gaacctgggaggcggaggttgcagtgactcgagatcgtgt

SEQ ID NO: 42151 - DNA, 40 bp, Homo sapiens
acacgatctcgagtcactgcaacctccgcctcccaggttc

SEQ ID NO: 42152 - DNA, 40 bp, Homo sapiens
aacctgggaggcggaggttgcagtgactcgagatcgtgtc

SEQ ID NO: 42153 - DNA, 40 bp, Homo sapiens
gacacgatctcgagtcactgcaacctccgcctcccaggtt

SEQ ID NO: 42154 - DNA, 40 bp, Homo sapiens
acctgggaggcggaggttgcagtgactcgagatcgtgtca

SEQ ID NO: 42155 - DNA, 40 bp, Homo sapiens
tgacacgatctcgagtcactgcaacctccgcctcccaggt

SEQ ID NO: 42156 - DNA, 40 bp, Homo sapiens
cctgggaggcggaggttgcagtgactcgagatcgtgtcac

SEQ ID NO: 42157 - DNA, 40 bp, Homo sapiens
gtgacacgatctcgagtcactgcaacctccgcctcccagg

SEQ ID NO: 42158 - DNA, 40 bp, Homo sapiens
ctgggaggcggaggttgcagtgactcgagatcgtgtcact

SEQ ID NO: 42159 - DNA, 40 bp, Homo sapiens
agtgacacgatctcgagtcactgcaacctccgcctcccag

SEQ ID NO: 42160 - DNA, 40 bp, Homo sapiens
tgggaggcggaggttgcagtgactcgagatcgtgtcactg

SEQ ID NO: 42161 - DNA, 40 bp, Homo sapiens
cagtgacacgatctcgagtcactgcaacctccgcctccca

SEQ ID NO: 42162 - DNA, 40 bp, Homo sapiens
gggaggcggaggttgcagtgactcgagatcgtgtcactgc

SEQ ID NO: 42163 - DNA, 40 bp, Homo sapiens
gcagtgacacgatctcgagtcactgcaacctccgcctccc

SEQ ID NO: 42164 - DNA, 40 bp, Homo sapiens
ggaggcggaggttgcagtgactcgagatcgtgtcactgcc

SEQ ID NO: 42165 - DNA, 40 bp, Homo sapiens
ggcagtgacacgatctcgagtcactgcaacctccgcctcc

SEQ ID NO: 42166 - DNA, 40 bp, Homo sapiens
gaggcggaggttgcagtgactcgagatcgtgtcactgccc

SEQ ID NO: 42167 - DNA, 40 bp, Homo sapiens
gggcagtgacacgatctcgagtcactgcaacctccgcctc

SEQ ID NO: 42168 - DNA, 40 bp, Homo sapiens
aggcggaggttgcagtgactcgagatcgtgtcactgccct

SEQ ID NO: 42169 - DNA, 40 bp, Homo sapiens
agggcagtgacacgatctcgagtcactgcaacctccgcct

SEQ ID NO: 42170 - DNA, 40 bp, Homo sapiens
ggcggaggttgcagtgactcgagatcgtgtcactgccctc

SEQ ID NO: 42171 - DNA, 40 bp, Homo sapiens
gagggcagtgacacgatctcgagtcactgcaacctccgcc

SEQ ID NO: 42172 - DNA, 40 bp, Homo sapiens
gcggaggttgcagtgactcgagatcgtgtcactgccctcc

SEQ ID NO: 42173 - DNA, 40 bp, Homo sapiens
ggagggcagtgacacgatctcgagtcactgcaacctccgc

SEQ ID NO: 42174 - DNA, 40 bp, Homo sapiens
cggaggttgcagtgactcgagatcgtgtcactgccctcca

SEQ ID NO: 42175 - DNA, 40 bp, Homo sapiens
tggagggcagtgacacgatctcgagtcactgcaacctccg

SEQ ID NO: 42176 - DNA, 40 bp, Homo sapiens
ggaggttgcagtgactcgagatcgtgtcactgccctccag

SEQ ID NO: 42177 - DNA, 40 bp, Homo sapiens
ctggagggcagtgacacgatctcgagtcactgcaacctcc

SEQ ID NO: 42178 - DNA, 40 bp, Homo sapiens
gaggttgcagtgactcgagatcgtgtcactgccctccagc

SEQ ID NO: 42179 - DNA, 40 bp, Homo sapiens
gctggagggcagtgacacgatctcgagtcactgcaacctc

SEQ ID NO: 42180 - DNA, 40 bp, Homo sapiens
aggttgcagtgactcgagatcgtgtcactgccctccagcc

SEQ ID NO: 42181 - DNA, 40 bp, Homo sapiens
ggctggagggcagtgacacgatctcgagtcactgcaacct

SEQ ID NO: 42182 - DNA, 40 bp, Homo sapiens
ggttgcagtgactcgagatcgtgtcactgccctccagcct

SEQ ID NO: 42183 - DNA, 40 bp, Homo sapiens
aggctggagggcagtgacacgatctcgagtcactgcaacc

SEQ ID NO: 42184 - DNA, 40 bp, Homo sapiens
gttgcagtgactcgagatcgtgtcactgccctccagccta

SEQ ID NO: 42185 - DNA, 40 bp, Homo sapiens
taggctggagggcagtgacacgatctcgagtcactgcaac

SEQ ID NO: 42186 - DNA, 40 bp, Homo sapiens
ttgcagtgactcgagatcgtgtcactgccctccagcctag

SEQ ID NO: 42187 - DNA, 40 bp, Homo sapiens
ctaggctggagggcagtgacacgatctcgagtcactgcaa

SEQ ID NO: 42188 - DNA, 40 bp, Homo sapiens
tgcagtgactcgagatcgtgtcactgccctccagcctagg

SEQ ID NO: 42189 - DNA, 40 bp, Homo sapiens
cctaggctggagggcagtgacacgatctcgagtcactgca

SEQ ID NO: 42190 - DNA, 40 bp, Homo sapiens
gcagtgactcgagatcgtgtcactgccctccagcctaggc

SEQ ID NO: 42191 - DNA, 40 bp, Homo sapiens
gcctaggctggagggcagtgacacgatctcgagtcactgc

SEQ ID NO: 42192 - DNA, 40 bp, Homo sapiens
cagtgactcgagatcgtgtcactgccctccagcctaggca

SEQ ID NO: 42193 - DNA, 40 bp, Homo sapiens
tgcctaggctggagggcagtgacacgatctcgagtcactg

SEQ ID NO: 42194 - DNA, 40 bp, Homo sapiens
agtgactcgagatcgtgtcactgccctccagcctaggcaa

SEQ ID NO: 42195 - DNA, 40 bp, Homo sapiens
ttgcctaggctggagggcagtgacacgatctcgagtcact

SEQ ID NO: 42196 - DNA, 40 bp, Homo sapiens
gtgactcgagatcgtgtcactgccctccagcctaggcaac

SEQ ID NO: 42197 - DNA, 40 bp, Homo sapiens
gttgcctaggctggagggcagtgacacgatctcgagtcac

SEQ ID NO: 42198 - DNA, 40 bp, Homo sapiens
tgactcgagatcgtgtcactgccctccagcctaggcaaca

SEQ ID NO: 42199 - DNA, 40 bp, Homo sapiens
tgttgcctaggctggagggcagtgacacgatctcgagtca

SEQ ID NO: 42200 - DNA, 40 bp, Homo sapiens
gactcgagatcgtgtcactgccctccagcctaggcaacag

SEQ ID NO: 42201 - DNA, 40 bp, Homo sapiens
ctgttgcctaggctggagggcagtgacacgatctcgagtc

SEQ ID NO: 42202 - DNA, 40 bp, Homo sapiens
actcgagatcgtgtcactgccctccagcctaggcaacaga

SEQ ID NO: 42203 - DNA, 40 bp, Homo sapiens
tctgttgcctaggctggagggcagtgacacgatctcgagt

SEQ ID NO: 42204 - DNA, 40 bp, Homo sapiens
ctcgagatcgtgtcactgccctccagcctaggcaacagag

SEQ ID NO: 42205 - DNA, 40 bp, Homo sapiens
ctctgttgcctaggctggagggcagtgacacgatctcgag

SEQ ID NO: 42206 - DNA, 40 bp, Homo sapiens
tcgagatcgtgtcactgccctccagcctaggcaacagagc

SEQ ID NO: 42207 - DNA, 40 bp, Homo sapiens
gctctgttgcctaggctggagggcagtgacacgatctcga

SEQ ID NO: 42208 - DNA, 40 bp, Homo sapiens
cgagatcgtgtcactgccctccagcctaggcaacagagca

SEQ ID NO: 42209 - DNA, 40 bp, Homo sapiens
tgctctgttgcctaggctggagggcagtgacacgatctcg

SEQ ID NO: 42210 - DNA, 40 bp, Homo sapiens
gagatcgtgtcactgccctccagcctaggcaacagagcaa

SEQ ID NO: 42211 - DNA, 40 bp, Homo sapiens
ttgctctgttgcctaggctggagggcagtgacacgatctc

SEQ ID NO: 42212 - DNA, 40 bp, Homo sapiens
agatcgtgtcactgccctccagcctaggcaacagagcaag

SEQ ID NO: 42213 - DNA, 40 bp, Homo sapiens
cttgctctgttgcctaggctggagggcagtgacacgatct

SEQ ID NO: 42214 - DNA, 40 bp, Homo sapiens
gatcgtgtcactgccctccagcctaggcaacagagcaaga

SEQ ID NO: 42215 - DNA, 40 bp, Homo sapiens
tcttgctctgttgcctaggctggagggcagtgacacgatc

SEQ ID NO: 42216 - DNA, 40 bp, Homo sapiens
atcgtgtcactgccctccagcctaggcaacagagcaagac

SEQ ID NO: 42217 - DNA, 40 bp, Homo sapiens
gtcttgctctgttgcctaggctggagggcagtgacacgat

SEQ ID NO: 42218 - DNA, 40 bp, Homo sapiens
tcgtgtcactgccctccagcctaggcaacagagcaagact

SEQ ID NO: 42219 - DNA, 40 bp, Homo sapiens
agtcttgctctgttgcctaggctggagggcagtgacacga

SEQ ID NO: 42220 - DNA, 40 bp, Homo sapiens
cgtgtcactgccctccagcctaggcaacagagcaagactc

SEQ ID NO: 42221 - DNA, 40 bp, Homo sapiens
gagtcttgctctgttgcctaggctggagggcagtgacacg

SEQ ID NO: 42222 - DNA, 40 bp, Homo sapiens
gtgtcactgccctccagcctaggcaacagagcaagactcc

SEQ ID NO: 42223 - DNA, 40 bp, Homo sapiens
ggagtcttgctctgttgcctaggctggagggcagtgacac

SEQ ID NO: 42224 - DNA, 40 bp, Homo sapiens
tgtcactgccctccagcctaggcaacagagcaagactcca

SEQ ID NO: 42225 - DNA, 40 bp, Homo sapiens
tggagtcttgctctgttgcctaggctggagggcagtgaca

SEQ ID NO: 42226 - DNA, 40 bp, Homo sapiens
gtcactgccctccagcctaggcaacagagcaagactccat

SEQ ID NO: 42227 - DNA, 40 bp, Homo sapiens
atggagtcttgctctgttgcctaggctggagggcagtgac

SEQ ID NO: 42228 - DNA, 40 bp, Homo sapiens
tcactgccctccagcctaggcaacagagcaagactccatc

SEQ ID NO: 42229 - DNA, 40 bp, Homo sapiens
gatggagtcttgctctgttgcctaggctggagggcagtga

SEQ ID NO: 42230 - DNA, 40 bp, Homo sapiens
cactgccctccagcctaggcaacagagcaagactccatct

SEQ ID NO: 42231 - DNA, 40 bp, Homo sapiens
agatggagtcttgctctgttgcctaggctggagggcagtg

SEQ ID NO: 42232 - DNA, 40 bp, Homo sapiens
actgccctccagcctaggcaacagagcaagactccatctc

SEQ ID NO: 42233 - DNA, 40 bp, Homo sapiens
gagatggagtcttgctctgttgcctaggctggagggcagt

SEQ ID NO: 42234 - DNA, 40 bp, Homo sapiens
ctgccctccagcctaggcaacagagcaagactccatctca

SEQ ID NO: 42235 - DNA, 40 bp, Homo sapiens
tgagatggagtcttgctctgttgcctaggctggagggcag

SEQ ID NO: 42236 - DNA, 40 bp, Homo sapiens
tgccctccagcctaggcaacagagcaagactccatctcaa

SEQ ID NO: 42237 - DNA, 40 bp, Homo sapiens
ttgagatggagtcttgctctgttgcctaggctggagggca

SEQ ID NO: 42238 - DNA, 40 bp, Homo sapiens
gccctccagcctaggcaacagagcaagactccatctcaaa

SEQ ID NO: 42239 - DNA, 40 bp, Homo sapiens
tttgagatggagtcttgctctgttgcctaggctggagggc

SEQ ID NO: 42240 - DNA, 40 bp, Homo sapiens
ccctccagcctaggcaacagagcaagactccatctcaaaa

SEQ ID NO: 42241 - DNA, 40 bp, Homo sapiens
ttttgagatggagtcttgctctgttgcctaggctggaggg

SEQ ID NO: 42242 - DNA, 40 bp, Homo sapiens
cctccagcctaggcaacagagcaagactccatctcaaaaa

SEQ ID NO: 42243 - DNA, 40 bp, Homo sapiens
tttttgagatggagtcttgctctgttgcctaggctggagg

SEQ ID NO: 42244 - DNA, 40 bp, Homo sapiens
ctccagcctaggcaacagagcaagactccatctcaaaaaa

SEQ ID NO: 42245 - DNA, 40 bp, Homo sapiens
ttttttgagatggagtcttgctctgttgcctaggctggag

SEQ ID NO: 42246 - DNA, 40 bp, Homo sapiens
tccagcctaggcaacagagcaagactccatctcaaaaaaa

SEQ ID NO: 42247 - DNA, 40 bp, Homo sapiens
tttttttgagatggagtcttgctctgttgcctaggctgga

SEQ ID NO: 42248 - DNA, 40 bp, Homo sapiens
ccagcctaggcaacagagcaagactccatctcaaaaaaaa

SEQ ID NO: 42249 - DNA, 40 bp, Homo sapiens
ttttttttgagatggagtcttgctctgttgcctaggctgg

SEQ ID NO: 42250 - DNA, 40 bp, Homo sapiens
cagcctaggcaacagagcaagactccatctcaaaaaaaaa

SEQ ID NO: 42251 - DNA, 40 bp, Homo sapiens
tttttttttgagatggagtcttgctctgttgcctaggctg

SEQ ID NO: 42252 - DNA, 40 bp, Homo sapiens
agcctaggcaacagagcaagactccatctcaaaaaaaaaa

SEQ ID NO: 42253 - DNA, 40 bp, Homo sapiens
ttttttttttgagatggagtcttgctctgttgcctaggct

SEQ ID NO: 42254 - DNA, 40 bp, Homo sapiens
gcctaggcaacagagcaagactccatctcaaaaaaaaaaa

SEQ ID NO: 42255 - DNA, 40 bp, Homo sapiens
tttttttttttgagatggagtcttgctctgttgcctaggc

SEQ ID NO: 42256 - DNA, 40 bp, Homo sapiens
cctaggcaacagagcaagactccatctcaaaaaaaaaaaa

SEQ ID NO: 42257 - DNA, 40 bp, Homo sapiens
ttttttttttttgagatggagtcttgctctgttgcctagg

SEQ ID NO: 42258 - DNA, 40 bp, Homo sapiens
ctaggcaacagagcaagactccatctcaaaaaaaaaaaaa

SEQ ID NO: 42259 - DNA, 40 bp, Homo sapiens
tttttttttttttgagatggagtcttgctctgttgcctag

SEQ ID NO: 42260 - DNA, 40 bp, Homo sapiens
taggcaacagagcaagactccatctcaaaaaaaaaaaaaa

SEQ ID NO: 42261 - DNA, 40 bp, Homo sapiens
ttttttttttttttgagatggagtcttgctctgttgccta

SEQ ID NO: 42262 - DNA, 40 bp, Homo sapiens
aggcaacagagcaagactccatctcaaaaaaaaaaaaaaa

SEQ ID NO: 42263 - DNA, 40 bp, Homo sapiens
tttttttttttttttgagatggagtcttgctctgttgcct

SEQ ID NO: 42264 - DNA, 40 bp, Homo sapiens
ggcaacagagcaagactccatctcaaaaaaaaaaaaaaaa

SEQ ID NO: 42265 - DNA, 40 bp, Homo sapiens
ttttttttttttttttgagatggagtcttgctctgttgcc

SEQ ID NO: 42266 - DNA, 40 bp, Homo sapiens
gcaacagagcaagactccatctcaaaaaaaaaaaaaaaaa

SEQ ID NO: 42267 - DNA, 40 bp, Homo sapiens
tttttttttttttttttgagatggagtcttgctctgttgc

SEQ ID NO: 42268 - DNA, 40 bp, Homo sapiens
caacagagcaagactccatctcaaaaaaaaaaaaaaaaaa

SEQ ID NO: 42269 - DNA, 40 bp, Homo sapiens
ttttttttttttttttttgagatggagtcttgctctgttg

SEQ ID NO: 42270 - DNA, 40 bp, Homo sapiens
aacagagcaagactccatctcaaaaaaaaaaaaaaaaaaa

SEQ ID NO: 42271 - DNA, 40 bp, Homo sapiens
tttttttttttttttttttgagatggagtcttgctctgtt

SEQ ID NO: 42272 - DNA, 40 bp, Homo sapiens
acagagcaagactccatctcaaaaaaaaaaaaaaaaaaaa

SEQ ID NO: 42273 - DNA, 40 bp, Homo sapiens
ttttttttttttttttttttgagatggagtcttgctctgt

SEQ ID NO: 42274 - DNA, 40 bp, Homo sapiens
cagagcaagactccatctcaaaaaaaaaaaaaaaaaaaaa

SEQ ID NO: 42275 - DNA, 40 bp, Homo sapiens
tttttttttttttttttttttgagatggagtcttgctctg

SEQ ID NO: 42276 - DNA, 40 bp, Homo sapiens
agagcaagactccatctcaaaaaaaaaaaaaaaaaaaaaa

SEQ ID NO: 42277 - DNA, 40 bp, Homo sapiens
ttttttttttttttttttttttgagatggagtcttgctct

SEQ ID NO: 42278 - DNA, 40 bp, Homo sapiens
gagcaagactccatctcaaaaaaaaaaaaaaaaaaaaaaa

SEQ ID NO: 42279 - DNA, 40 bp, Homo sapiens
tttttttttttttttttttttttgagatggagtcttgctc

SEQ ID NO: 42280 - DNA, 40 bp, Homo sapiens
agcaagactccatctcaaaaaaaaaaaaaaaaaaaaaaaa

SEQ ID NO: 42281 - DNA, 40 bp, Homo sapiens
ttttttttttttttttttttttttgagatggagtcttgct

SEQ ID NO: 42282 - DNA, 40 bp, Homo sapiens
gcaagactccatctcaaaaaaaaaaaaaaaaaaaaaaaaa

SEQ ID NO: 42283 - DNA, 40 bp, Homo sapiens
tttttttttttttttttttttttttgagatggagtcttgc

SEQ ID NO: 42284 - DNA, 40 bp, Homo sapiens
caagactccatctcaaaaaaaaaaaaaaaaaaaaaaaaaa

SEQ ID NO: 42285 - DNA, 40 bp, Homo sapiens
ttttttttttttttttttttttttttgagatggagtcttg

SEQ ID NO: 42286 - DNA, 40 bp, Homo sapiens
aagactccatctcaaaaaaaaaaaaaaaaaaaaaaaaaaa

SEQ ID NO: 42287 - DNA, 40 bp, Homo sapiens
tttttttttttttttttttttttttttgagatggagtctt

SEQ ID NO: 42288 - DNA, 40 bp, Homo sapiens
agactccatctcaaaaaaaaaaaaaaaaaaaaaaaaaaag

SEQ ID NO: 42289 - DNA, 40 bp, Homo sapiens
ctttttttttttttttttttttttttttgagatggagtct

SEQ ID NO: 42290 - DNA, 40 bp, Homo sapiens
gactccatctcaaaaaaaaaaaaaaaaaaaaaaaaaaaga

SEQ ID NO: 42291 - DNA, 40 bp, Homo sapiens
tctttttttttttttttttttttttttttgagatggagtc

SEQ ID NO: 42292 - DNA, 40 bp, Homo sapiens
actccatctcaaaaaaaaaaaaaaaaaaaaaaaaaaagaa

SEQ ID NO: 42293 - DNA, 40 bp, Homo sapiens
ttctttttttttttttttttttttttttttgagatggagt

SEQ ID NO: 42294 - DNA, 40 bp, Homo sapiens
ctccatctcaaaaaaaaaaaaaaaaaaaaaaaaaaagaat

SEQ ID NO: 42295 - DNA, 40 bp, Homo sapiens
attctttttttttttttttttttttttttttgagatggag

SEQ ID NO: 42296 - DNA, 40 bp, Homo sapiens
tccatctcaaaaaaaaaaaaaaaaaaaaaaaaaaagaatg

SEQ ID NO: 42297 - DNA, 40 bp, Homo sapiens
cattctttttttttttttttttttttttttttgagatgga

SEQ ID NO: 42298 - DNA, 40 bp, Homo sapiens
ccatctcaaaaaaaaaaaaaaaaaaaaaaaaaaagaatgt

SEQ ID NO: 42299 - DNA, 40 bp, Homo sapiens
acattctttttttttttttttttttttttttttgagatgg

SEQ ID NO: 42300 - DNA, 40 bp, Homo sapiens
catctcaaaaaaaaaaaaaaaaaaaaaaaaaaagaatgtg

SEQ ID NO: 42301 - DNA, 40 bp, Homo sapiens
cacattctttttttttttttttttttttttttttgagatg

SEQ ID NO: 42302 - DNA, 40 bp, Homo sapiens
atctcaaaaaaaaaaaaaaaaaaaaaaaaaaagaatgtga

SEQ ID NO: 42303 - DNA, 40 bp, Homo sapiens
tcacattctttttttttttttttttttttttttttgagat

SEQ ID NO: 42304 - DNA, 40 bp, Homo sapiens
tctcaaaaaaaaaaaaaaaaaaaaaaaaaaagaatgtgag

SEQ ID NO: 42305 - DNA, 40 bp, Homo sapiens
ctcacattctttttttttttttttttttttttttttgaga

SEQ ID NO: 42306 - DNA, 40 bp, Homo sapiens
ctcaaaaaaaaaaaaaaaaaaaaaaaaaaagaatgtgagg

SEQ ID NO: 42307 - DNA, 40 bp, Homo sapiens
cctcacattctttttttttttttttttttttttttttgag

SEQ ID NO: 42308 - DNA, 40 bp, Homo sapiens
tcaaaaaaaaaaaaaaaaaaaaaaaaaaagaatgtgaggt

SEQ ID NO: 42309 - DNA, 40 bp, Homo sapiens
acctcacattctttttttttttttttttttttttttttga

SEQ ID NO: 42310 - DNA, 40 bp, Homo sapiens
caaaaaaaaaaaaaaaaaaaaaaaaaaagaatgtgaggtg

SEQ ID NO: 42311 - DNA, 40 bp, Homo sapiens
cacctcacattctttttttttttttttttttttttttttg

SEQ ID NO: 42312 - DNA, 40 bp, Homo sapiens
aaaaaaaaaaaaaaaaaaaaaaaaaaagaatgtgaggtgg

SEQ ID NO: 42313 - DNA, 40 bp, Homo sapiens
ccacctcacattcttttttttttttttttttttttttttt

SEQ ID NO: 42314 - DNA, 40 bp, Homo sapiens
aaaaaaaaaaaaaaaaaaaaaaaaaagaatgtgaggtggc

SEQ ID NO: 42315 - DNA, 40 bp, Homo sapiens
gccacctcacattctttttttttttttttttttttttttt

SEQ ID NO: 42316 - DNA, 40 bp, Homo sapiens
aaaaaaaaaaaaaaaaaaaaaaaaagaatgtgaggtggca

SEQ ID NO: 42317 - DNA, 40 bp, Homo sapiens
tgccacctcacattcttttttttttttttttttttttttt

SEQ ID NO: 42318 - DNA, 40 bp, Homo sapiens
aaaaaaaaaaaaaaaaaaaaaaaagaatgtgaggtggcag

SEQ ID NO: 42319 - DNA, 40 bp, Homo sapiens
ctgccacctcacattctttttttttttttttttttttttt

SEQ ID NO: 42320 - DNA, 40 bp, Homo sapiens
aaaaaaaaaaaaaaaaaaaaaaagaatgtgaggtggcagc

SEQ ID NO: 42321 - DNA, 40 bp, Homo sapiens
gctgccacctcacattcttttttttttttttttttttttt

SEQ ID NO: 42322 - DNA, 40 bp, Homo sapiens
aaaaaaaaaaaaaaaaaaaaaagaatgtgaggtggcagca

SEQ ID NO: 42323 - DNA, 40 bp, Homo sapiens
tgctgccacctcacattctttttttttttttttttttttt

SEQ ID NO: 42324 - DNA, 40 bp, Homo sapiens
aaaaaaaaaaaaaaaaaaaaagaatgtgaggtggcagcaa

SEQ ID NO: 42325 - DNA, 40 bp, Homo sapiens
ttgctgccacctcacattcttttttttttttttttttttt

SEQ ID NO: 42326 - DNA, 40 bp, Homo sapiens
aaaaaaaaaaaaaaaaaaaagaatgtgaggtggcagcaat

SEQ ID NO: 42327 - DNA, 40 bp, Homo sapiens
attgctgccacctcacattctttttttttttttttttttt

SEQ ID NO: 42328 - DNA, 40 bp, Homo sapiens
aaaaaaaaaaaaaaaaaaagaatgtgaggtggcagcaata

SEQ ID NO: 42329 - DNA, 40 bp, Homo sapiens
tattgctgccacctcacattcttttttttttttttttttt

SEQ ID NO: 42330 - DNA, 40 bp, Homo sapiens
aaaaaaaaaaaaaaaaaagaatgtgaggtggcagcaatag

SEQ ID NO: 42331 - DNA, 40 bp, Homo sapiens
ctattgctgccacctcacattctttttttttttttttttt

SEQ ID NO: 42332 - DNA, 40 bp, Homo sapiens
aaaaaaaaaaaaaaaaagaatgtgaggtggcagcaatagg

SEQ ID NO: 42333 - DNA, 40 bp, Homo sapiens
cctattgctgccacctcacattcttttttttttttttttt

SEQ ID NO: 42334 - DNA, 40 bp, Homo sapiens
aaaaaaaaaaaaaaaagaatgtgaggtggcagcaataggt

SEQ ID NO: 42335 - DNA, 40 bp, Homo sapiens
acctattgctgccacctcacattctttttttttttttttt

SEQ ID NO: 42336 - DNA, 40 bp, Homo sapiens
aaaaaaaaaaaaaaagaatgtgaggtggcagcaataggta

SEQ ID NO: 42337 - DNA, 40 bp, Homo sapiens
tacctattgctgccacctcacattcttttttttttttttt

SEQ ID NO: 42338 - DNA, 40 bp, Homo sapiens
aaaaaaaaaaaaaagaatgtgaggtggcagcaataggtag

SEQ ID NO: 42339 - DNA, 40 bp, Homo sapiens
ctacctattgctgccacctcacattctttttttttttttt

SEQ ID NO: 42340 - DNA, 40 bp, Homo sapiens
aaaaaaaaaaaaagaatgtgaggtggcagcaataggtagg

SEQ ID NO: 42341 - DNA, 40 bp, Homo sapiens
cctacctattgctgccacctcacattcttttttttttttt

SEQ ID NO: 42342 - DNA, 40 bp, Homo sapiens
aaaaaaaaaaaagaatgtgaggtggcagcaataggtagga

SEQ ID NO: 42343 - DNA, 40 bp, Homo sapiens
tcctacctattgctgccacctcacattctttttttttttt

SEQ ID NO: 42344 - DNA, 40 bp, Homo sapiens
aaaaaaaaaaagaatgtgaggtggcagcaataggtaggaa

SEQ ID NO: 42345 - DNA, 40 bp, Homo sapiens
ttcctacctattgctgccacctcacattcttttttttttt

SEQ ID NO: 42346 - DNA, 40 bp, Homo sapiens
aaaaaaaaaagaatgtgaggtggcagcaataggtaggaag

SEQ ID NO: 42347 - DNA, 40 bp, Homo sapiens
cttcctacctattgctgccacctcacattctttttttttt

SEQ ID NO: 42348 - DNA, 40 bp, Homo sapiens
aaaaaaaaagaatgtgaggtggcagcaataggtaggaaga

SEQ ID NO: 42349 - DNA, 40 bp, Homo sapiens
tcttcctacctattgctgccacctcacattcttttttttt

SEQ ID NO: 42350 - DNA, 40 bp, Homo sapiens
aaaaaaaagaatgtgaggtggcagcaataggtaggaagag

SEQ ID NO: 42351 - DNA, 40 bp, Homo sapiens
ctcttcctacctattgctgccacctcacattctttttttt

SEQ ID NO: 42352 - DNA, 40 bp, Homo sapiens
aaaaaaagaatgtgaggtggcagcaataggtaggaagagt

SEQ ID NO: 42353 - DNA, 40 bp, Homo sapiens
actcttcctacctattgctgccacctcacattcttttttt

SEQ ID NO: 42354 - DNA, 40 bp, Homo sapiens
aaaaaagaatgtgaggtggcagcaataggtaggaagagtc

SEQ ID NO: 42355 - DNA, 40 bp, Homo sapiens
gactcttcctacctattgctgccacctcacattctttttt

SEQ ID NO: 42356 - DNA, 40 bp, Homo sapiens
aaaaagaatgtgaggtggcagcaataggtaggaagagtct

SEQ ID NO: 42357 - DNA, 40 bp, Homo sapiens
agactcttcctacctattgctgccacctcacattcttttt

SEQ ID NO: 42358 - DNA, 40 bp, Homo sapiens
aaaagaatgtgaggtggcagcaataggtaggaagagtctt

SEQ ID NO: 42359 - DNA, 40 bp, Homo sapiens
aagactcttcctacctattgctgccacctcacattctttt

SEQ ID NO: 42360 - DNA, 40 bp, Homo sapiens
aaagaatgtgaggtggcagcaataggtaggaagagtcttt

SEQ ID NO: 42361 - DNA, 40 bp, Homo sapiens
aaagactcttcctacctattgctgccacctcacattcttt

SEQ ID NO: 42362 - DNA, 40 bp, Homo sapiens
aagaatgtgaggtggcagcaataggtaggaagagtctttg

SEQ ID NO: 42363 - DNA, 40 bp, Homo sapiens
caaagactcttcctacctattgctgccacctcacattctt

SEQ ID NO: 42364 - DNA, 40 bp, Homo sapiens
agaatgtgaggtggcagcaataggtaggaagagtctttgg

SEQ ID NO: 42365 - DNA, 40 bp, Homo sapiens
ccaaagactcttcctacctattgctgccacctcacattct

SEQ ID NO: 42366 - DNA, 40 bp, Homo sapiens
gaatgtgaggtggcagcaataggtaggaagagtctttggt

SEQ ID NO: 42367 - DNA, 40 bp, Homo sapiens
accaaagactcttcctacctattgctgccacctcacattc

SEQ ID NO: 42368 - DNA, 40 bp, Homo sapiens
aatgtgaggtggcagcaataggtaggaagagtctttggtc

SEQ ID NO: 42369 - DNA, 40 bp, Homo sapiens
gaccaaagactcttcctacctattgctgccacctcacatt

SEQ ID NO: 42370 - DNA, 40 bp, Homo sapiens
atgtgaggtggcagcaataggtaggaagagtctttggtca

SEQ ID NO: 42371 - DNA, 40 bp, Homo sapiens
tgaccaaagactcttcctacctattgctgccacctcacat

SEQ ID NO: 42372 - DNA, 40 bp, Homo sapiens
tgtgaggtggcagcaataggtaggaagagtctttggtcag

SEQ ID NO: 42373 - DNA, 40 bp, Homo sapiens
ctgaccaaagactcttcctacctattgctgccacctcaca

SEQ ID NO: 42374 - DNA, 40 bp, Homo sapiens
gtgaggtggcagcaataggtaggaagagtctttggtcagc

SEQ ID NO: 42375 - DNA, 40 bp, Homo sapiens
gctgaccaaagactcttcctacctattgctgccacctcac

SEQ ID NO: 42376 - DNA, 40 bp, Homo sapiens
tgaggtggcagcaataggtaggaagagtctttggtcagct

SEQ ID NO: 42377 - DNA, 40 bp, Homo sapiens
agctgaccaaagactcttcctacctattgctgccacctca

SEQ ID NO: 42378 - DNA, 40 bp, Homo sapiens
gaggtggcagcaataggtaggaagagtctttggtcagctt

SEQ ID NO: 42379 - DNA, 40 bp, Homo sapiens
aagctgaccaaagactcttcctacctattgctgccacctc

SEQ ID NO: 42380 - DNA, 40 bp, Homo sapiens
aggtggcagcaataggtaggaagagtctttggtcagcttt

SEQ ID NO: 42381 - DNA, 40 bp, Homo sapiens
aaagctgaccaaagactcttcctacctattgctgccacct

SEQ ID NO: 42382 - DNA, 40 bp, Homo sapiens
ggtggcagcaataggtaggaagagtctttggtcagcttta

SEQ ID NO: 42383 - DNA, 40 bp, Homo sapiens
taaagctgaccaaagactcttcctacctattgctgccacc

SEQ ID NO: 42384 - DNA, 40 bp, Homo sapiens
gtggcagcaataggtaggaagagtctttggtcagctttac

SEQ ID NO: 42385 - DNA, 40 bp, Homo sapiens
gtaaagctgaccaaagactcttcctacctattgctgccac

SEQ ID NO: 42386 - DNA, 40 bp, Homo sapiens
tggcagcaataggtaggaagagtctttggtcagctttaca

SEQ ID NO: 42387 - DNA, 40 bp, Homo sapiens
tgtaaagctgaccaaagactcttcctacctattgctgcca

SEQ ID NO: 42388 - DNA, 40 bp, Homo sapiens
ggcagcaataggtaggaagagtctttggtcagctttacat

SEQ ID NO: 42389 - DNA, 40 bp, Homo sapiens
atgtaaagctgaccaaagactcttcctacctattgctgcc

SEQ ID NO: 42390 - DNA, 40 bp, Homo sapiens
gcagcaataggtaggaagagtctttggtcagctttacatg

SEQ ID NO: 42391 - DNA, 40 bp, Homo sapiens
catgtaaagctgaccaaagactcttcctacctattgctgc

SEQ ID NO: 42392 - DNA, 40 bp, Homo sapiens
cagcaataggtaggaagagtctttggtcagctttacatgc

SEQ ID NO: 42393 - DNA, 40 bp, Homo sapiens
gcatgtaaagctgaccaaagactcttcctacctattgctg

SEQ ID NO: 42394 - DNA, 40 bp, Homo sapiens
agcaataggtaggaagagtctttggtcagctttacatgct

SEQ ID NO: 42395 - DNA, 40 bp, Homo sapiens
agcatgtaaagctgaccaaagactcttcctacctattgct

SEQ ID NO: 42396 - DNA, 40 bp, Homo sapiens
gcaataggtaggaagagtctttggtcagctttacatgctc

SEQ ID NO: 42397 - DNA, 40 bp, Homo sapiens
gagcatgtaaagctgaccaaagactcttcctacctattgc

SEQ ID NO: 42398 - DNA, 40 bp, Homo sapiens
caataggtaggaagagtctttggtcagctttacatgctct

SEQ ID NO: 42399 - DNA, 40 bp, Homo sapiens
agagcatgtaaagctgaccaaagactcttcctacctattg

SEQ ID NO: 42400 - DNA, 40 bp, Homo sapiens
aataggtaggaagagtctttggtcagctttacatgctctg

SEQ ID NO: 42401 - DNA, 40 bp, Homo sapiens
cagagcatgtaaagctgaccaaagactcttcctacctatt

SEQ ID NO: 42402 - DNA, 40 bp, Homo sapiens
ataggtaggaagagtctttggtcagctttacatgctctgt

SEQ ID NO: 42403 - DNA, 40 bp, Homo sapiens
acagagcatgtaaagctgaccaaagactcttcctacctat

SEQ ID NO: 42404 - DNA, 40 bp, Homo sapiens
taggtaggaagagtctttggtcagctttacatgctctgta

SEQ ID NO: 42405 - DNA, 40 bp, Homo sapiens
tacagagcatgtaaagctgaccaaagactcttcctaccta

SEQ ID NO: 42406 - DNA, 40 bp, Homo sapiens
aggtaggaagagtctttggtcagctttacatgctctgtag

SEQ ID NO: 42407 - DNA, 40 bp, Homo sapiens
ctacagagcatgtaaagctgaccaaagactcttcctacct

SEQ ID NO: 42408 - DNA, 40 bp, Homo sapiens
ggtaggaagagtctttggtcagctttacatgctctgtagc

SEQ ID NO: 42409 - DNA, 40 bp, Homo sapiens
gctacagagcatgtaaagctgaccaaagactcttcctacc

SEQ ID NO: 42410 - DNA, 40 bp, Homo sapiens
gtaggaagagtctttggtcagctttacatgctctgtagcc

SEQ ID NO: 42411 - DNA, 40 bp, Homo sapiens
ggctacagagcatgtaaagctgaccaaagactcttcctac

SEQ ID NO: 42412 - DNA, 40 bp, Homo sapiens
taggaagagtctttggtcagctttacatgctctgtagcca

SEQ ID NO: 42413 - DNA, 40 bp, Homo sapiens
tggctacagagcatgtaaagctgaccaaagactcttccta

SEQ ID NO: 42414 - DNA, 40 bp, Homo sapiens
aggaagagtctttggtcagctttacatgctctgtagccat

SEQ ID NO: 42415 - DNA, 40 bp, Homo sapiens
atggctacagagcatgtaaagctgaccaaagactcttcct

SEQ ID NO: 42416 - DNA, 40 bp, Homo sapiens
ggaagagtctttggtcagctttacatgctctgtagccatg

SEQ ID NO: 42417 - DNA, 40 bp, Homo sapiens
catggctacagagcatgtaaagctgaccaaagactcttcc

SEQ ID NO: 42418 - DNA, 40 bp, Homo sapiens
gaagagtctttggtcagctttacatgctctgtagccatgc

SEQ ID NO: 42419 - DNA, 40 bp, Homo sapiens
gcatggctacagagcatgtaaagctgaccaaagactcttc

SEQ ID NO: 42420 - DNA, 40 bp, Homo sapiens
aagagtctttggtcagctttacatgctctgtagccatgcc

SEQ ID NO: 42421 - DNA, 40 bp, Homo sapiens
ggcatggctacagagcatgtaaagctgaccaaagactctt

SEQ ID NO: 42422 - DNA, 40 bp, Homo sapiens
agagtctttggtcagctttacatgctctgtagccatgcct

SEQ ID NO: 42423 - DNA, 40 bp, Homo sapiens
aggcatggctacagagcatgtaaagctgaccaaagactct

SEQ ID NO: 42424 - DNA, 40 bp, Homo sapiens
gagtctttggtcagctttacatgctctgtagccatgcctg

SEQ ID NO: 42425 - DNA, 40 bp, Homo sapiens
caggcatggctacagagcatgtaaagctgaccaaagactc

SEQ ID NO: 42426 - DNA, 40 bp, Homo sapiens
agtctttggtcagctttacatgctctgtagccatgcctgg

SEQ ID NO: 42427 - DNA, 40 bp, Homo sapiens
ccaggcatggctacagagcatgtaaagctgaccaaagact

SEQ ID NO: 42428 - DNA, 40 bp, Homo sapiens
gtctttggtcagctttacatgctctgtagccatgcctggg

SEQ ID NO: 42429 - DNA, 40 bp, Homo sapiens
cccaggcatggctacagagcatgtaaagctgaccaaagac

SEQ ID NO: 42430 - DNA, 40 bp, Homo sapiens
tctttggtcagctttacatgctctgtagccatgcctgggt

SEQ ID NO: 42431 - DNA, 40 bp, Homo sapiens
acccaggcatggctacagagcatgtaaagctgaccaaaga

SEQ ID NO: 42432 - DNA, 40 bp, Homo sapiens
ctttggtcagctttacatgctctgtagccatgcctgggta

SEQ ID NO: 42433 - DNA, 40 bp, Homo sapiens
tacccaggcatggctacagagcatgtaaagctgaccaaag

SEQ ID NO: 42434 - DNA, 40 bp, Homo sapiens
tttggtcagctttacatgctctgtagccatgcctgggtaa

SEQ ID NO: 42435 - DNA, 40 bp, Homo sapiens
ttacccaggcatggctacagagcatgtaaagctgaccaaa

SEQ ID NO: 42436 - DNA, 40 bp, Homo sapiens
ttggtcagctttacatgctctgtagccatgcctgggtaat

SEQ ID NO: 42437 - DNA, 40 bp, Homo sapiens
attacccaggcatggctacagagcatgtaaagctgaccaa

SEQ ID NO: 42438 - DNA, 40 bp, Homo sapiens
tggtcagctttacatgctctgtagccatgcctgggtaatg

SEQ ID NO: 42439 - DNA, 40 bp, Homo sapiens
cattacccaggcatggctacagagcatgtaaagctgacca

SEQ ID NO: 42440 - DNA, 40 bp, Homo sapiens
ggtcagctttacatgctctgtagccatgcctgggtaatgg

SEQ ID NO: 42441 - DNA, 40 bp, Homo sapiens
ccattacccaggcatggctacagagcatgtaaagctgacc

SEQ ID NO: 42442 - DNA, 40 bp, Homo sapiens
gtcagctttacatgctctgtagccatgcctgggtaatggg

SEQ ID NO: 42443 - DNA, 40 bp, Homo sapiens
cccattacccaggcatggctacagagcatgtaaagctgac

SEQ ID NO: 42444 - DNA, 40 bp, Homo sapiens
tcagctttacatgctctgtagccatgcctgggtaatgggt

SEQ ID NO: 42445 - DNA, 40 bp, Homo sapiens
acccattacccaggcatggctacagagcatgtaaagctga

SEQ ID NO: 42446 - DNA, 40 bp, Homo sapiens
cagctttacatgctctgtagccatgcctgggtaatgggtt

SEQ ID NO: 42447 - DNA, 40 bp, Homo sapiens
aacccattacccaggcatggctacagagcatgtaaagctg

SEQ ID NO: 42448 - DNA, 40 bp, Homo sapiens
agctttacatgctctgtagccatgcctgggtaatgggttg

SEQ ID NO: 42449 - DNA, 40 bp, Homo sapiens
caacccattacccaggcatggctacagagcatgtaaagct

SEQ ID NO: 42450 - DNA, 40 bp, Homo sapiens
gctttacatgctctgtagccatgcctgggtaatgggttga

SEQ ID NO: 42451 - DNA, 40 bp, Homo sapiens
tcaacccattacccaggcatggctacagagcatgtaaagc

SEQ ID NO: 42452 - DNA, 40 bp, Homo sapiens
ctttacatgctctgtagccatgcctgggtaatgggttgac

SEQ ID NO: 42453 - DNA, 40 bp, Homo sapiens
gtcaacccattacccaggcatggctacagagcatgtaaag

SEQ ID NO: 42454 - DNA, 40 bp, Homo sapiens
tttacatgctctgtagccatgcctgggtaatgggttgact

SEQ ID NO: 42455 - DNA, 40 bp, Homo sapiens
agtcaacccattacccaggcatggctacagagcatgtaaa

SEQ ID NO: 42456 - DNA, 40 bp, Homo sapiens
ttacatgctctgtagccatgcctgggtaatgggttgactc

SEQ ID NO: 42457 - DNA, 40 bp, Homo sapiens
gagtcaacccattacccaggcatggctacagagcatgtaa

SEQ ID NO: 42458 - DNA, 40 bp, Homo sapiens
tacatgctctgtagccatgcctgggtaatgggttgactct

SEQ ID NO: 42459 - DNA, 40 bp, Homo sapiens
agagtcaacccattacccaggcatggctacagagcatgta

SEQ ID NO: 42460 - DNA, 40 bp, Homo sapiens
acatgctctgtagccatgcctgggtaatgggttgactcta

SEQ ID NO: 42461 - DNA, 40 bp, Homo sapiens
tagagtcaacccattacccaggcatggctacagagcatgt

SEQ ID NO: 42462 - DNA, 40 bp, Homo sapiens
catgctctgtagccatgcctgggtaatgggttgactctaa

SEQ ID NO: 42463 - DNA, 40 bp, Homo sapiens
ttagagtcaacccattacccaggcatggctacagagcatg

SEQ ID NO: 42464 - DNA, 40 bp, Homo sapiens
atgctctgtagccatgcctgggtaatgggttgactctaag

SEQ ID NO: 42465 - DNA, 40 bp, Homo sapiens
cttagagtcaacccattacccaggcatggctacagagcat

SEQ ID NO: 42466 - DNA, 40 bp, Homo sapiens
tgctctgtagccatgcctgggtaatgggttgactctaaga

SEQ ID NO: 42467 - DNA, 40 bp, Homo sapiens
tcttagagtcaacccattacccaggcatggctacagagca

SEQ ID NO: 42468 - DNA, 40 bp, Homo sapiens
gctctgtagccatgcctgggtaatgggttgactctaagac

SEQ ID NO: 42469 - DNA, 40 bp, Homo sapiens
gtcttagagtcaacccattacccaggcatggctacagagc

SEQ ID NO: 42470 - DNA, 40 bp, Homo sapiens
ctctgtagccatgcctgggtaatgggttgactctaagact

SEQ ID NO: 42471 - DNA, 40 bp, Homo sapiens
agtcttagagtcaacccattacccaggcatggctacagag

SEQ ID NO: 42472 - DNA, 40 bp, Homo sapiens
tctgtagccatgcctgggtaatgggttgactctaagactc

SEQ ID NO: 42473 - DNA, 40 bp, Homo sapiens
gagtcttagagtcaacccattacccaggcatggctacaga

SEQ ID NO: 42474 - DNA, 40 bp, Homo sapiens
ctgtagccatgcctgggtaatgggttgactctaagactct

SEQ ID NO: 42475 - DNA, 40 bp, Homo sapiens
agagtcttagagtcaacccattacccaggcatggctacag

SEQ ID NO: 42476 - DNA, 40 bp, Homo sapiens
tgtagccatgcctgggtaatgggttgactctaagactctg

SEQ ID NO: 42477 - DNA, 40 bp, Homo sapiens
cagagtcttagagtcaacccattacccaggcatggctaca

SEQ ID NO: 42478 - DNA, 40 bp, Homo sapiens
gtagccatgcctgggtaatgggttgactctaagactctgt

SEQ ID NO: 42479 - DNA, 40 bp, Homo sapiens
acagagtcttagagtcaacccattacccaggcatggctac

SEQ ID NO: 42480 - DNA, 40 bp, Homo sapiens
tagccatgcctgggtaatgggttgactctaagactctgtg

SEQ ID NO: 42481 - DNA, 40 bp, Homo sapiens
cacagagtcttagagtcaacccattacccaggcatggcta

SEQ ID NO: 42482 - DNA, 40 bp, Homo sapiens
agccatgcctgggtaatgggttgactctaagactctgtgc

SEQ ID NO: 42483 - DNA, 40 bp, Homo sapiens
gcacagagtcttagagtcaacccattacccaggcatggct

SEQ ID NO: 42484 - DNA, 40 bp, Homo sapiens
gccatgcctgggtaatgggttgactctaagactctgtgct

SEQ ID NO: 42485 - DNA, 40 bp, Homo sapiens
agcacagagtcttagagtcaacccattacccaggcatggc

SEQ ID NO: 42486 - DNA, 40 bp, Homo sapiens
ccatgcctgggtaatgggttgactctaagactctgtgctt

SEQ ID NO: 42487 - DNA, 40 bp, Homo sapiens
aagcacagagtcttagagtcaacccattacccaggcatgg

SEQ ID NO: 42488 - DNA, 40 bp, Homo sapiens
catgcctgggtaatgggttgactctaagactctgtgcttt

SEQ ID NO: 42489 - DNA, 40 bp, Homo sapiens
aaagcacagagtcttagagtcaacccattacccaggcatg

SEQ ID NO: 42490 - DNA, 40 bp, Homo sapiens
atgcctgggtaatgggttgactctaagactctgtgctttg

SEQ ID NO: 42491 - DNA, 40 bp, Homo sapiens
caaagcacagagtcttagagtcaacccattacccaggcat

SEQ ID NO: 42492 - DNA, 40 bp, Homo sapiens
tgcctgggtaatgggttgactctaagactctgtgctttgc

SEQ ID NO: 42493 - DNA, 40 bp, Homo sapiens
gcaaagcacagagtcttagagtcaacccattacccaggca

SEQ ID NO: 42494 - DNA, 40 bp, Homo sapiens
gcctgggtaatgggttgactctaagactctgtgctttgct

SEQ ID NO: 42495 - DNA, 40 bp, Homo sapiens
agcaaagcacagagtcttagagtcaacccattacccaggc

SEQ ID NO: 42496 - DNA, 40 bp, Homo sapiens
cctgggtaatgggttgactctaagactctgtgctttgctc

SEQ ID NO: 42497 - DNA, 40 bp, Homo sapiens
gagcaaagcacagagtcttagagtcaacccattacccagg

SEQ ID NO: 42498 - DNA, 40 bp, Homo sapiens
ctgggtaatgggttgactctaagactctgtgctttgctcc

SEQ ID NO: 42499 - DNA, 40 bp, Homo sapiens
ggagcaaagcacagagtcttagagtcaacccattacccag

SEQ ID NO: 42500 - DNA, 40 bp, Homo sapiens
tgggtaatgggttgactctaagactctgtgctttgctccc

SEQ ID NO: 42501 - DNA, 40 bp, Homo sapiens
gggagcaaagcacagagtcttagagtcaacccattaccca

SEQ ID NO: 42502 - DNA, 40 bp, Homo sapiens
gggtaatgggttgactctaagactctgtgctttgctccca

SEQ ID NO: 42503 - DNA, 40 bp, Homo sapiens
tgggagcaaagcacagagtcttagagtcaacccattaccc

SEQ ID NO: 42504 - DNA, 40 bp, Homo sapiens
ggtaatgggttgactctaagactctgtgctttgctcccac

SEQ ID NO: 42505 - DNA, 40 bp, Homo sapiens
gtgggagcaaagcacagagtcttagagtcaacccattacc

SEQ ID NO: 42506 - DNA, 40 bp, Homo sapiens
gtaatgggttgactctaagactctgtgctttgctcccacc

SEQ ID NO: 42507 - DNA, 40 bp, Homo sapiens
ggtgggagcaaagcacagagtcttagagtcaacccattac

SEQ ID NO: 42508 - DNA, 40 bp, Homo sapiens
taatgggttgactctaagactctgtgctttgctcccacct

SEQ ID NO: 42509 - DNA, 40 bp, Homo sapiens
aggtgggagcaaagcacagagtcttagagtcaacccatta

SEQ ID NO: 42510 - DNA, 40 bp, Homo sapiens
aatgggttgactctaagactctgtgctttgctcccacctc

SEQ ID NO: 42511 - DNA, 40 bp, Homo sapiens
gaggtgggagcaaagcacagagtcttagagtcaacccatt

SEQ ID NO: 42512 - DNA, 40 bp, Homo sapiens
atgggttgactctaagactctgtgctttgctcccacctcc

SEQ ID NO: 42513 - DNA, 40 bp, Homo sapiens
ggaggtgggagcaaagcacagagtcttagagtcaacccat

SEQ ID NO: 42514 - DNA, 40 bp, Homo sapiens
tgggttgactctaagactctgtgctttgctcccacctcct

SEQ ID NO: 42515 - DNA, 40 bp, Homo sapiens
aggaggtgggagcaaagcacagagtcttagagtcaaccca

SEQ ID NO: 42516 - DNA, 40 bp, Homo sapiens
gggttgactctaagactctgtgctttgctcccacctcctg

SEQ ID NO: 42517 - DNA, 40 bp, Homo sapiens
caggaggtgggagcaaagcacagagtcttagagtcaaccc

SEQ ID NO: 42518 - DNA, 40 bp, Homo sapiens
ggttgactctaagactctgtgctttgctcccacctcctgc

SEQ ID NO: 42519 - DNA, 40 bp, Homo sapiens
gcaggaggtgggagcaaagcacagagtcttagagtcaacc

SEQ ID NO: 42520 - DNA, 40 bp, Homo sapiens
gttgactctaagactctgtgctttgctcccacctcctgct

SEQ ID NO: 42521 - DNA, 40 bp, Homo sapiens
agcaggaggtgggagcaaagcacagagtcttagagtcaac

SEQ ID NO: 42522 - DNA, 40 bp, Homo sapiens
ttgactctaagactctgtgctttgctcccacctcctgctt

SEQ ID NO: 42523 - DNA, 40 bp, Homo sapiens
aagcaggaggtgggagcaaagcacagagtcttagagtcaa

SEQ ID NO: 42524 - DNA, 40 bp, Homo sapiens
tgactctaagactctgtgctttgctcccacctcctgcttt

SEQ ID NO: 42525 - DNA, 40 bp, Homo sapiens
aaagcaggaggtgggagcaaagcacagagtcttagagtca

SEQ ID NO: 42526 - DNA, 40 bp, Homo sapiens
gactctaagactctgtgctttgctcccacctcctgctttt

SEQ ID NO: 42527 - DNA, 40 bp, Homo sapiens
aaaagcaggaggtgggagcaaagcacagagtcttagagtc

SEQ ID NO: 42528 - DNA, 40 bp, Homo sapiens
actctaagactctgtgctttgctcccacctcctgcttttt

SEQ ID NO: 42529 - DNA, 40 bp, Homo sapiens
aaaaagcaggaggtgggagcaaagcacagagtcttagagt

SEQ ID NO: 42530 - DNA, 40 bp, Homo sapiens
ctctaagactctgtgctttgctcccacctcctgctttttc

SEQ ID NO: 42531 - DNA, 40 bp, Homo sapiens
gaaaaagcaggaggtgggagcaaagcacagagtcttagag

SEQ ID NO: 42532 - DNA, 40 bp, Homo sapiens
tctaagactctgtgctttgctcccacctcctgctttttca

SEQ ID NO: 42533 - DNA, 40 bp, Homo sapiens
tgaaaaagcaggaggtgggagcaaagcacagagtcttaga

SEQ ID NO: 42534 - DNA, 40 bp, Homo sapiens
ctaagactctgtgctttgctcccacctcctgctttttcat

SEQ ID NO: 42535 - DNA, 40 bp, Homo sapiens
atgaaaaagcaggaggtgggagcaaagcacagagtcttag

SEQ ID NO: 42536 - DNA, 40 bp, Homo sapiens
taagactctgtgctttgctcccacctcctgctttttcatt

SEQ ID NO: 42537 - DNA, 40 bp, Homo sapiens
aatgaaaaagcaggaggtgggagcaaagcacagagtctta

SEQ ID NO: 42538 - DNA, 40 bp, Homo sapiens
aagactctgtgctttgctcccacctcctgctttttcatta

SEQ ID NO: 42539 - DNA, 40 bp, Homo sapiens
taatgaaaaagcaggaggtgggagcaaagcacagagtctt

SEQ ID NO: 42540 - DNA, 40 bp, Homo sapiens
agactctgtgctttgctcccacctcctgctttttcattac

SEQ ID NO: 42541 - DNA, 40 bp, Homo sapiens
gtaatgaaaaagcaggaggtgggagcaaagcacagagtct

SEQ ID NO: 42542 - DNA, 40 bp, Homo sapiens
gactctgtgctttgctcccacctcctgctttttcattact

SEQ ID NO: 42543 - DNA, 40 bp, Homo sapiens
agtaatgaaaaagcaggaggtgggagcaaagcacagagtc

SEQ ID NO: 42544 - DNA, 40 bp, Homo sapiens
actctgtgctttgctcccacctcctgctttttcattactc

SEQ ID NO: 42545 - DNA, 40 bp, Homo sapiens
gagtaatgaaaaagcaggaggtgggagcaaagcacagagt

SEQ ID NO: 42546 - DNA, 40 bp, Homo sapiens
ctctgtgctttgctcccacctcctgctttttcattactct

SEQ ID NO: 42547 - DNA, 40 bp, Homo sapiens
agagtaatgaaaaagcaggaggtgggagcaaagcacagag

SEQ ID NO: 42548 - DNA, 40 bp, Homo sapiens
tctgtgctttgctcccacctcctgctttttcattactctt

SEQ ID NO: 42549 - DNA, 40 bp, Homo sapiens
aagagtaatgaaaaagcaggaggtgggagcaaagcacaga

SEQ ID NO: 42550 - DNA, 40 bp, Homo sapiens
ctgtgctttgctcccacctcctgctttttcattactcttt

SEQ ID NO: 42551 - DNA, 40 bp, Homo sapiens
aaagagtaatgaaaaagcaggaggtgggagcaaagcacag

SEQ ID NO: 42552 - DNA, 40 bp, Homo sapiens
tgtgctttgctcccacctcctgctttttcattactcttta

SEQ ID NO: 42553 - DNA, 40 bp, Homo sapiens
taaagagtaatgaaaaagcaggaggtgggagcaaagcaca

SEQ ID NO: 42554 - DNA, 40 bp, Homo sapiens
gtgctttgctcccacctcctgctttttcattactctttag

SEQ ID NO: 42555 - DNA, 40 bp, Homo sapiens
ctaaagagtaatgaaaaagcaggaggtgggagcaaagcac

SEQ ID NO: 42556 - DNA, 40 bp, Homo sapiens
tgctttgctcccacctcctgctttttcattactctttaga

SEQ ID NO: 42557 - DNA, 40 bp, Homo sapiens
tctaaagagtaatgaaaaagcaggaggtgggagcaaagca

SEQ ID NO: 42558 - DNA, 40 bp, Homo sapiens
gctttgctcccacctcctgctttttcattactctttagaa

SEQ ID NO: 42559 - DNA, 40 bp, Homo sapiens
ttctaaagagtaatgaaaaagcaggaggtgggagcaaagc

SEQ ID NO: 42560 - DNA, 40 bp, Homo sapiens
ctttgctcccacctcctgctttttcattactctttagaat

SEQ ID NO: 42561 - DNA, 40 bp, Homo sapiens
attctaaagagtaatgaaaaagcaggaggtgggagcaaag

SEQ ID NO: 42562 - DNA, 40 bp, Homo sapiens
tttgctcccacctcctgctttttcattactctttagaatg

SEQ ID NO: 42563 - DNA, 40 bp, Homo sapiens
cattctaaagagtaatgaaaaagcaggaggtgggagcaaa

SEQ ID NO: 42564 - DNA, 40 bp, Homo sapiens
ttgctcccacctcctgctttttcattactctttagaatgg

SEQ ID NO: 42565 - DNA, 40 bp, Homo sapiens
ccattctaaagagtaatgaaaaagcaggaggtgggagcaa

SEQ ID NO: 42566 - DNA, 40 bp, Homo sapiens
tgctcccacctcctgctttttcattactctttagaatggt

SEQ ID NO: 42567 - DNA, 40 bp, Homo sapiens
accattctaaagagtaatgaaaaagcaggaggtgggagca

SEQ ID NO: 42568 - DNA, 40 bp, Homo sapiens
gctcccacctcctgctttttcattactctttagaatggtt

SEQ ID NO: 42569 - DNA, 40 bp, Homo sapiens
aaccattctaaagagtaatgaaaaagcaggaggtgggagc

SEQ ID NO: 42570 - DNA, 40 bp, Homo sapiens
ctcccacctcctgctttttcattactctttagaatggttt

SEQ ID NO: 42571 - DNA, 40 bp, Homo sapiens
aaaccattctaaagagtaatgaaaaagcaggaggtgggag

SEQ ID NO: 42572 - DNA, 40 bp, Homo sapiens
tcccacctcctgctttttcattactctttagaatggtttt

SEQ ID NO: 42573 - DNA, 40 bp, Homo sapiens
aaaaccattctaaagagtaatgaaaaagcaggaggtggga

SEQ ID NO: 42574 - DNA, 40 bp, Homo sapiens
cccacctcctgctttttcattactctttagaatggttttt

SEQ ID NO: 42575 - DNA, 40 bp, Homo sapiens
aaaaaccattctaaagagtaatgaaaaagcaggaggtggg

SEQ ID NO: 42576 - DNA, 40 bp, Homo sapiens
ccacctcctgctttttcattactctttagaatggttttta

SEQ ID NO: 42577 - DNA, 40 bp, Homo sapiens
taaaaaccattctaaagagtaatgaaaaagcaggaggtgg

SEQ ID NO: 42578 - DNA, 40 bp, Homo sapiens
cacctcctgctttttcattactctttagaatggtttttaa

SEQ ID NO: 42579 - DNA, 40 bp, Homo sapiens
ttaaaaaccattctaaagagtaatgaaaaagcaggaggtg

SEQ ID NO: 42580 - DNA, 40 bp, Homo sapiens
acctcctgctttttcattactctttagaatggtttttaat

SEQ ID NO: 42581 - DNA, 40 bp, Homo sapiens
attaaaaaccattctaaagagtaatgaaaaagcaggaggt

SEQ ID NO: 42582 - DNA, 40 bp, Homo sapiens
cctcctgctttttcattactctttagaatggtttttaatt

SEQ ID NO: 42583 - DNA, 40 bp, Homo sapiens
aattaaaaaccattctaaagagtaatgaaaaagcaggagg

SEQ ID NO: 42584 - DNA, 40 bp, Homo sapiens
ctcctgctttttcattactctttagaatggtttttaattt

SEQ ID NO: 42585 - DNA, 40 bp, Homo sapiens
aaattaaaaaccattctaaagagtaatgaaaaagcaggag

SEQ ID NO: 42586 - DNA, 40 bp, Homo sapiens
tcctgctttttcattactctttagaatggtttttaatttg

SEQ ID NO: 42587 - DNA, 40 bp, Homo sapiens
caaattaaaaaccattctaaagagtaatgaaaaagcagga

SEQ ID NO: 42588 - DNA, 40 bp, Homo sapiens
cctgctttttcattactctttagaatggtttttaatttgt

SEQ ID NO: 42589 - DNA, 40 bp, Homo sapiens
acaaattaaaaaccattctaaagagtaatgaaaaagcagg

SEQ ID NO: 42590 - DNA, 40 bp, Homo sapiens
ctgctttttcattactctttagaatggtttttaatttgtg

SEQ ID NO: 42591 - DNA, 40 bp, Homo sapiens
cacaaattaaaaaccattctaaagagtaatgaaaaagcag

SEQ ID NO: 42592 - DNA, 40 bp, Homo sapiens
tgctttttcattactctttagaatggtttttaatttgtga

SEQ ID NO: 42593 - DNA, 40 bp, Homo sapiens
tcacaaattaaaaaccattctaaagagtaatgaaaaagca

SEQ ID NO: 42594 - DNA, 40 bp, Homo sapiens
gctttttcattactctttagaatggtttttaatttgtgat

SEQ ID NO: 42595 - DNA, 40 bp, Homo sapiens
atcacaaattaaaaaccattctaaagagtaatgaaaaagc

SEQ ID NO: 42596 - DNA, 40 bp, Homo sapiens
ctttttcattactctttagaatggtttttaatttgtgatc

SEQ ID NO: 42597 - DNA, 40 bp, Homo sapiens
gatcacaaattaaaaaccattctaaagagtaatgaaaaag

SEQ ID NO: 42598 - DNA, 40 bp, Homo sapiens
tttttcattactctttagaatggtttttaatttgtgatct

SEQ ID NO: 42599 - DNA, 40 bp, Homo sapiens
agatcacaaattaaaaaccattctaaagagtaatgaaaaa

SEQ ID NO: 42600 - DNA, 40 bp, Homo sapiens
ttttcattactctttagaatggtttttaatttgtgatcta

SEQ ID NO: 42601 - DNA, 40 bp, Homo sapiens
tagatcacaaattaaaaaccattctaaagagtaatgaaaa

SEQ ID NO: 42602 - DNA, 40 bp, Homo sapiens
tttcattactctttagaatggtttttaatttgtgatctat

SEQ ID NO: 42603 - DNA, 40 bp, Homo sapiens
atagatcacaaattaaaaaccattctaaagagtaatgaaa

SEQ ID NO: 42604 - DNA, 40 bp, Homo sapiens
ttcattactctttagaatggtttttaatttgtgatctata

SEQ ID NO: 42605 - DNA, 40 bp, Homo sapiens
tatagatcacaaattaaaaaccattctaaagagtaatgaa

SEQ ID NO: 42606 - DNA, 40 bp, Homo sapiens
tcattactctttagaatggtttttaatttgtgatctatag

SEQ ID NO: 42607 - DNA, 40 bp, Homo sapiens
ctatagatcacaaattaaaaaccattctaaagagtaatga

SEQ ID NO: 42608 - DNA, 40 bp, Homo sapiens
cattactctttagaatggtttttaatttgtgatctatagg

SEQ ID NO: 42609 - DNA, 40 bp, Homo sapiens
cctatagatcacaaattaaaaaccattctaaagagtaatg

SEQ ID NO: 42610 - DNA, 40 bp, Homo sapiens
attactctttagaatggtttttaatttgtgatctatagga

SEQ ID NO: 42611 - DNA, 40 bp, Homo sapiens
tcctatagatcacaaattaaaaaccattctaaagagtaat

SEQ ID NO: 42612 - DNA, 40 bp, Homo sapiens
ttactctttagaatggtttttaatttgtgatctataggag

SEQ ID NO: 42613 - DNA, 40 bp, Homo sapiens
ctcctatagatcacaaattaaaaaccattctaaagagtaa

SEQ ID NO: 42614 - DNA, 40 bp, Homo sapiens
tactctttagaatggtttttaatttgtgatctataggagt

SEQ ID NO: 42615 - DNA, 40 bp, Homo sapiens
actcctatagatcacaaattaaaaaccattctaaagagta

SEQ ID NO: 42616 - DNA, 40 bp, Homo sapiens
actctttagaatggtttttaatttgtgatctataggagtt

SEQ ID NO: 42617 - DNA, 40 bp, Homo sapiens
aactcctatagatcacaaattaaaaaccattctaaagagt

SEQ ID NO: 42618 - DNA, 40 bp, Homo sapiens
ctctttagaatggtttttaatttgtgatctataggagttc

SEQ ID NO: 42619 - DNA, 40 bp, Homo sapiens
gaactcctatagatcacaaattaaaaaccattctaaagag

SEQ ID NO: 42620 - DNA, 40 bp, Homo sapiens
tctttagaatggtttttaatttgtgatctataggagttct

SEQ ID NO: 42621 - DNA, 40 bp, Homo sapiens
agaactcctatagatcacaaattaaaaaccattctaaaga

SEQ ID NO: 42622 - DNA, 40 bp, Homo sapiens
ctttagaatggtttttaatttgtgatctataggagttctt

SEQ ID NO: 42623 - DNA, 40 bp, Homo sapiens
aagaactcctatagatcacaaattaaaaaccattctaaag

SEQ ID NO: 42624 - DNA, 40 bp, Homo sapiens
tttagaatggtttttaatttgtgatctataggagttcttt

SEQ ID NO: 42625 - DNA, 40 bp, Homo sapiens
aaagaactcctatagatcacaaattaaaaaccattctaaa

SEQ ID NO: 42626 - DNA, 40 bp, Homo sapiens
ttagaatggtttttaatttgtgatctataggagttctttc

SEQ ID NO: 42627 - DNA, 40 bp, Homo sapiens
gaaagaactcctatagatcacaaattaaaaaccattctaa

SEQ ID NO: 42628 - DNA, 40 bp, Homo sapiens
tagaatggtttttaatttgtgatctataggagttctttca

SEQ ID NO: 42629 - DNA, 40 bp, Homo sapiens
tgaaagaactcctatagatcacaaattaaaaaccattcta

SEQ ID NO: 42630 - DNA, 40 bp, Homo sapiens
agaatggtttttaatttgtgatctataggagttctttcaa

SEQ ID NO: 42631 - DNA, 40 bp, Homo sapiens
ttgaaagaactcctatagatcacaaattaaaaaccattct

SEQ ID NO: 42632 - DNA, 40 bp, Homo sapiens
gaatggtttttaatttgtgatctataggagttctttcaag

SEQ ID NO: 42633 - DNA, 40 bp, Homo sapiens
cttgaaagaactcctatagatcacaaattaaaaaccattc

SEQ ID NO: 42634 - DNA, 40 bp, Homo sapiens
aatggtttttaatttgtgatctataggagttctttcaagt

SEQ ID NO: 42635 - DNA, 40 bp, Homo sapiens
acttgaaagaactcctatagatcacaaattaaaaaccatt

SEQ ID NO: 42636 - DNA, 40 bp, Homo sapiens
atggtttttaatttgtgatctataggagttctttcaagta

SEQ ID NO: 42637 - DNA, 40 bp, Homo sapiens
tacttgaaagaactcctatagatcacaaattaaaaaccat

SEQ ID NO: 42638 - DNA, 40 bp, Homo sapiens
tggtttttaatttgtgatctataggagttctttcaagtat

SEQ ID NO: 42639 - DNA, 40 bp, Homo sapiens
atacttgaaagaactcctatagatcacaaattaaaaacca

SEQ ID NO: 42640 - DNA, 40 bp, Homo sapiens
ggtttttaatttgtgatctataggagttctttcaagtatt

SEQ ID NO: 42641 - DNA, 40 bp, Homo sapiens
aatacttgaaagaactcctatagatcacaaattaaaaacc

SEQ ID NO: 42642 - DNA, 40 bp, Homo sapiens
gtttttaatttgtgatctataggagttctttcaagtattt

SEQ ID NO: 42643 - DNA, 40 bp, Homo sapiens
aaatacttgaaagaactcctatagatcacaaattaaaaac

SEQ ID NO: 42644 - DNA, 40 bp, Homo sapiens
tttttaatttgtgatctataggagttctttcaagtattta

SEQ ID NO: 42645 - DNA, 40 bp, Homo sapiens
taaatacttgaaagaactcctatagatcacaaattaaaaa

SEQ ID NO: 42646 - DNA, 40 bp, Homo sapiens
ttttaatttgtgatctataggagttctttcaagtatttaa

SEQ ID NO: 42647 - DNA, 40 bp, Homo sapiens
ttaaatacttgaaagaactcctatagatcacaaattaaaa

SEQ ID NO: 42648 - DNA, 40 bp, Homo sapiens
tttaatttgtgatctataggagttctttcaagtatttaat

SEQ ID NO: 42649 - DNA, 40 bp, Homo sapiens
attaaatacttgaaagaactcctatagatcacaaattaaa

SEQ ID NO: 42650 - DNA, 40 bp, Homo sapiens
ttaatttgtgatctataggagttctttcaagtatttaata

SEQ ID NO: 42651 - DNA, 40 bp, Homo sapiens
tattaaatacttgaaagaactcctatagatcacaaattaa

SEQ ID NO: 42652 - DNA, 40 bp, Homo sapiens
taatttgtgatctataggagttctttcaagtatttaataa

SEQ ID NO: 42653 - DNA, 40 bp, Homo sapiens
ttattaaatacttgaaagaactcctatagatcacaaatta

SEQ ID NO: 42654 - DNA, 40 bp, Homo sapiens
aatttgtgatctataggagttctttcaagtatttaataag

SEQ ID NO: 42655 - DNA, 40 bp, Homo sapiens
cttattaaatacttgaaagaactcctatagatcacaaatt

SEQ ID NO: 42656 - DNA, 40 bp, Homo sapiens
atttgtgatctataggagttctttcaagtatttaataaga

SEQ ID NO: 42657 - DNA, 40 bp, Homo sapiens
tcttattaaatacttgaaagaactcctatagatcacaaat

SEQ ID NO: 42658 - DNA, 40 bp, Homo sapiens
tttgtgatctataggagttctttcaagtatttaataagag

SEQ ID NO: 42659 - DNA, 40 bp, Homo sapiens
ctcttattaaatacttgaaagaactcctatagatcacaaa

SEQ ID NO: 42660 - DNA, 40 bp, Homo sapiens
ttgtgatctataggagttctttcaagtatttaataagaga

SEQ ID NO: 42661 - DNA, 40 bp, Homo sapiens
tctcttattaaatacttgaaagaactcctatagatcacaa

SEQ ID NO: 42662 - DNA, 40 bp, Homo sapiens
tgtgatctataggagttctttcaagtatttaataagagaa

SEQ ID NO: 42663 - DNA, 40 bp, Homo sapiens
ttctcttattaaatacttgaaagaactcctatagatcaca

SEQ ID NO: 42664 - DNA, 40 bp, Homo sapiens
gtgatctataggagttctttcaagtatttaataagagaat

SEQ ID NO: 42665 - DNA, 40 bp, Homo sapiens
attctcttattaaatacttgaaagaactcctatagatcac

SEQ ID NO: 42666 - DNA, 40 bp, Homo sapiens
tgatctataggagttctttcaagtatttaataagagaata

SEQ ID NO: 42667 - DNA, 40 bp, Homo sapiens
tattctcttattaaatacttgaaagaactcctatagatca

SEQ ID NO: 42668 - DNA, 40 bp, Homo sapiens
gatctataggagttctttcaagtatttaataagagaatag

SEQ ID NO: 42669 - DNA, 40 bp, Homo sapiens
ctattctcttattaaatacttgaaagaactcctatagatc

SEQ ID NO: 42670 - DNA, 40 bp, Homo sapiens
atctataggagttctttcaagtatttaataagagaatagg

SEQ ID NO: 42671 - DNA, 40 bp, Homo sapiens
cctattctcttattaaatacttgaaagaactcctatagat

SEQ ID NO: 42672 - DNA, 40 bp, Homo sapiens
tctataggagttctttcaagtatttaataagagaataggc

SEQ ID NO: 42673 - DNA, 40 bp, Homo sapiens
gcctattctcttattaaatacttgaaagaactcctataga

SEQ ID NO: 42674 - DNA, 40 bp, Homo sapiens
ctataggagttctttcaagtatttaataagagaataggct

SEQ ID NO: 42675 - DNA, 40 bp, Homo sapiens
agcctattctcttattaaatacttgaaagaactcctatag

SEQ ID NO: 42676 - DNA, 40 bp, Homo sapiens
tataggagttctttcaagtatttaataagagaataggcta

SEQ ID NO: 42677 - DNA, 40 bp, Homo sapiens
tagcctattctcttattaaatacttgaaagaactcctata

SEQ ID NO: 42678 - DNA, 40 bp, Homo sapiens
ataggagttctttcaagtatttaataagagaataggctaa

SEQ ID NO: 42679 - DNA, 40 bp, Homo sapiens
ttagcctattctcttattaaatacttgaaagaactcctat

SEQ ID NO: 42680 - DNA, 40 bp, Homo sapiens
taggagttctttcaagtatttaataagagaataggctaaa

SEQ ID NO: 42681 - DNA, 40 bp, Homo sapiens
tttagcctattctcttattaaatacttgaaagaactccta

SEQ ID NO: 42682 - DNA, 40 bp, Homo sapiens
aggagttctttcaagtatttaataagagaataggctaaat

SEQ ID NO: 42683 - DNA, 40 bp, Homo sapiens
atttagcctattctcttattaaatacttgaaagaactcct

SEQ ID NO: 42684 - DNA, 40 bp, Homo sapiens
ggagttctttcaagtatttaataagagaataggctaaatt

SEQ ID NO: 42685 - DNA, 40 bp, Homo sapiens
aatttagcctattctcttattaaatacttgaaagaactcc

SEQ ID NO: 42686 - DNA, 40 bp, Homo sapiens
gagttctttcaagtatttaataagagaataggctaaatta

SEQ ID NO: 42687 - DNA, 40 bp, Homo sapiens
taatttagcctattctcttattaaatacttgaaagaactc

SEQ ID NO: 42688 - DNA, 40 bp, Homo sapiens
agttctttcaagtatttaataagagaataggctaaattaa

SEQ ID NO: 42689 - DNA, 40 bp, Homo sapiens
ttaatttagcctattctcttattaaatacttgaaagaact

SEQ ID NO: 42690 - DNA, 40 bp, Homo sapiens
gttctttcaagtatttaataagagaataggctaaattaag

SEQ ID NO: 42691 - DNA, 40 bp, Homo sapiens
cttaatttagcctattctcttattaaatacttgaaagaac

SEQ ID NO: 42692 - DNA, 40 bp, Homo sapiens
ttctttcaagtatttaataagagaataggctaaattaagt

SEQ ID NO: 42693 - DNA, 40 bp, Homo sapiens
acttaatttagcctattctcttattaaatacttgaaagaa

SEQ ID NO: 42694 - DNA, 40 bp, Homo sapiens
tctttcaagtatttaataagagaataggctaaattaagta

SEQ ID NO: 42695 - DNA, 40 bp, Homo sapiens
tacttaatttagcctattctcttattaaatacttgaaaga

SEQ ID NO: 42696 - DNA, 40 bp, Homo sapiens
ctttcaagtatttaataagagaataggctaaattaagtaa

SEQ ID NO: 42697 - DNA, 40 bp, Homo sapiens
ttacttaatttagcctattctcttattaaatacttgaaag

SEQ ID NO: 42698 - DNA, 40 bp, Homo sapiens
tttcaagtatttaataagagaataggctaaattaagtaaa

SEQ ID NO: 42699 - DNA, 40 bp, Homo sapiens
tttacttaatttagcctattctcttattaaatacttgaaa

SEQ ID NO: 42700 - DNA, 40 bp, Homo sapiens
ttcaagtatttaataagagaataggctaaattaagtaaat

SEQ ID NO: 42701 - DNA, 40 bp, Homo sapiens
atttacttaatttagcctattctcttattaaatacttgaa

SEQ ID NO: 42702 - DNA, 40 bp, Homo sapiens
tcaagtatttaataagagaataggctaaattaagtaaatg

SEQ ID NO: 42703 - DNA, 40 bp, Homo sapiens
catttacttaatttagcctattctcttattaaatacttga

SEQ ID NO: 42704 - DNA, 40 bp, Homo sapiens
caagtatttaataagagaataggctaaattaagtaaatgt

SEQ ID NO: 42705 - DNA, 40 bp, Homo sapiens
acatttacttaatttagcctattctcttattaaatacttg

SEQ ID NO: 42706 - DNA, 40 bp, Homo sapiens
aagtatttaataagagaataggctaaattaagtaaatgtc

SEQ ID NO: 42707 - DNA, 40 bp, Homo sapiens
gacatttacttaatttagcctattctcttattaaatactt

SEQ ID NO: 42708 - DNA, 40 bp, Homo sapiens
agtatttaataagagaataggctaaattaagtaaatgtca

SEQ ID NO: 42709 - DNA, 40 bp, Homo sapiens
tgacatttacttaatttagcctattctcttattaaatact

SEQ ID NO: 42710 - DNA, 40 bp, Homo sapiens
gtatttaataagagaataggctaaattaagtaaatgtcaa

SEQ ID NO: 42711 - DNA, 40 bp, Homo sapiens
ttgacatttacttaatttagcctattctcttattaaatac

SEQ ID NO: 42712 - DNA, 40 bp, Homo sapiens
tatttaataagagaataggctaaattaagtaaatgtcaac

SEQ ID NO: 42713 - DNA, 40 bp, Homo sapiens
gttgacatttacttaatttagcctattctcttattaaata

SEQ ID NO: 42714 - DNA, 40 bp, Homo sapiens
atttaataagagaataggctaaattaagtaaatgtcaact

SEQ ID NO: 42715 - DNA, 40 bp, Homo sapiens
agttgacatttacttaatttagcctattctcttattaaat

SEQ ID NO: 42716 - DNA, 40 bp, Homo sapiens
tttaataagagaataggctaaattaagtaaatgtcaactg

SEQ ID NO: 42717 - DNA, 40 bp, Homo sapiens
cagttgacatttacttaatttagcctattctcttattaaa

SEQ ID NO: 42718 - DNA, 40 bp, Homo sapiens
ttaataagagaataggctaaattaagtaaatgtcaactga

SEQ ID NO: 42719 - DNA, 40 bp, Homo sapiens
tcagttgacatttacttaatttagcctattctcttattaa

SEQ ID NO: 42720 - DNA, 40 bp, Homo sapiens
taataagagaataggctaaattaagtaaatgtcaactgaa

SEQ ID NO: 42721 - DNA, 40 bp, Homo sapiens
ttcagttgacatttacttaatttagcctattctcttatta

SEQ ID NO: 42722 - DNA, 40 bp, Homo sapiens
aataagagaataggctaaattaagtaaatgtcaactgaat

SEQ ID NO: 42723 - DNA, 40 bp, Homo sapiens
attcagttgacatttacttaatttagcctattctcttatt

SEQ ID NO: 42724 - DNA, 40 bp, Homo sapiens
ataagagaataggctaaattaagtaaatgtcaactgaatg

SEQ ID NO: 42725 - DNA, 40 bp, Homo sapiens
cattcagttgacatttacttaatttagcctattctcttat

SEQ ID NO: 42726 - DNA, 40 bp, Homo sapiens
taagagaataggctaaattaagtaaatgtcaactgaatgc

SEQ ID NO: 42727 - DNA, 40 bp, Homo sapiens
gcattcagttgacatttacttaatttagcctattctctta

SEQ ID NO: 42728 - DNA, 40 bp, Homo sapiens
aagagaataggctaaattaagtaaatgtcaactgaatgct

SEQ ID NO: 42729 - DNA, 40 bp, Homo sapiens
agcattcagttgacatttacttaatttagcctattctctt

SEQ ID NO: 42730 - DNA, 40 bp, Homo sapiens
agagaataggctaaattaagtaaatgtcaactgaatgctc

SEQ ID NO: 42731 - DNA, 40 bp, Homo sapiens
gagcattcagttgacatttacttaatttagcctattctct

SEQ ID NO: 42732 - DNA, 40 bp, Homo sapiens
gagaataggctaaattaagtaaatgtcaactgaatgctca

SEQ ID NO: 42733 - DNA, 40 bp, Homo sapiens
tgagcattcagttgacatttacttaatttagcctattctc

SEQ ID NO: 42734 - DNA, 40 bp, Homo sapiens
agaataggctaaattaagtaaatgtcaactgaatgctcaa

SEQ ID NO: 42735 - DNA, 40 bp, Homo sapiens
ttgagcattcagttgacatttacttaatttagcctattct

SEQ ID NO: 42736 - DNA, 40 bp, Homo sapiens
gaataggctaaattaagtaaatgtcaactgaatgctcaaa

SEQ ID NO: 42737 - DNA, 40 bp, Homo sapiens
tttgagcattcagttgacatttacttaatttagcctattc

SEQ ID NO: 42738 - DNA, 40 bp, Homo sapiens
aataggctaaattaagtaaatgtcaactgaatgctcaaat

SEQ ID NO: 42739 - DNA, 40 bp, Homo sapiens
atttgagcattcagttgacatttacttaatttagcctatt

SEQ ID NO: 42740 - DNA, 40 bp, Homo sapiens
ataggctaaattaagtaaatgtcaactgaatgctcaaatc

SEQ ID NO: 42741 - DNA, 40 bp, Homo sapiens
gatttgagcattcagttgacatttacttaatttagcctat

SEQ ID NO: 42742 - DNA, 40 bp, Homo sapiens
taggctaaattaagtaaatgtcaactgaatgctcaaatct

SEQ ID NO: 42743 - DNA, 40 bp, Homo sapiens
agatttgagcattcagttgacatttacttaatttagccta

SEQ ID NO: 42744 - DNA, 40 bp, Homo sapiens
aggctaaattaagtaaatgtcaactgaatgctcaaatctc

SEQ ID NO: 42745 - DNA, 40 bp, Homo sapiens
gagatttgagcattcagttgacatttacttaatttagcct

SEQ ID NO: 42746 - DNA, 40 bp, Homo sapiens
ggctaaattaagtaaatgtcaactgaatgctcaaatctct

SEQ ID NO: 42747 - DNA, 40 bp, Homo sapiens
agagatttgagcattcagttgacatttacttaatttagcc

SEQ ID NO: 42748 - DNA, 40 bp, Homo sapiens
gctaaattaagtaaatgtcaactgaatgctcaaatctcta

SEQ ID NO: 42749 - DNA, 40 bp, Homo sapiens
tagagatttgagcattcagttgacatttacttaatttagc

SEQ ID NO: 42750 - DNA, 40 bp, Homo sapiens
ctaaattaagtaaatgtcaactgaatgctcaaatctctac

SEQ ID NO: 42751 - DNA, 40 bp, Homo sapiens
gtagagatttgagcattcagttgacatttacttaatttag

SEQ ID NO: 42752 - DNA, 40 bp, Homo sapiens
taaattaagtaaatgtcaactgaatgctcaaatctctact

SEQ ID NO: 42753 - DNA, 40 bp, Homo sapiens
agtagagatttgagcattcagttgacatttacttaattta

SEQ ID NO: 42754 - DNA, 40 bp, Homo sapiens
aaattaagtaaatgtcaactgaatgctcaaatctctacta

SEQ ID NO: 42755 - DNA, 40 bp, Homo sapiens
tagtagagatttgagcattcagttgacatttacttaattt

SEQ ID NO: 42756 - DNA, 40 bp, Homo sapiens
aattaagtaaatgtcaactgaatgctcaaatctctactaa

SEQ ID NO: 42757 - DNA, 40 bp, Homo sapiens
ttagtagagatttgagcattcagttgacatttacttaatt

SEQ ID NO: 42758 - DNA, 40 bp, Homo sapiens
attaagtaaatgtcaactgaatgctcaaatctctactaaa

SEQ ID NO: 42759 - DNA, 40 bp, Homo sapiens
tttagtagagatttgagcattcagttgacatttacttaat

SEQ ID NO: 42760 - DNA, 40 bp, Homo sapiens
ttaagtaaatgtcaactgaatgctcaaatctctactaaag

SEQ ID NO: 42761 - DNA, 40 bp, Homo sapiens
ctttagtagagatttgagcattcagttgacatttacttaa

SEQ ID NO: 42762 - DNA, 40 bp, Homo sapiens
taagtaaatgtcaactgaatgctcaaatctctactaaaga

SEQ ID NO: 42763 - DNA, 40 bp, Homo sapiens
tctttagtagagatttgagcattcagttgacatttactta

SEQ ID NO: 42764 - DNA, 40 bp, Homo sapiens
aagtaaatgtcaactgaatgctcaaatctctactaaagag

SEQ ID NO: 42765 - DNA, 40 bp, Homo sapiens
ctctttagtagagatttgagcattcagttgacatttactt

SEQ ID NO: 42766 - DNA, 40 bp, Homo sapiens
agtaaatgtcaactgaatgctcaaatctctactaaagagc

SEQ ID NO: 42767 - DNA, 40 bp, Homo sapiens
gctctttagtagagatttgagcattcagttgacatttact

SEQ ID NO: 42768 - DNA, 40 bp, Homo sapiens
gtaaatgtcaactgaatgctcaaatctctactaaagagcc

SEQ ID NO: 42769 - DNA, 40 bp, Homo sapiens
ggctctttagtagagatttgagcattcagttgacatttac

SEQ ID NO: 42770 - DNA, 40 bp, Homo sapiens
taaatgtcaactgaatgctcaaatctctactaaagagcct

SEQ ID NO: 42771 - DNA, 40 bp, Homo sapiens
aggctctttagtagagatttgagcattcagttgacattta

SEQ ID NO: 42772 - DNA, 40 bp, Homo sapiens
aaatgtcaactgaatgctcaaatctctactaaagagcctc

SEQ ID NO: 42773 - DNA, 40 bp, Homo sapiens
gaggctctttagtagagatttgagcattcagttgacattt

SEQ ID NO: 42774 - DNA, 40 bp, Homo sapiens
aatgtcaactgaatgctcaaatctctactaaagagcctct

SEQ ID NO: 42775 - DNA, 40 bp, Homo sapiens
agaggctctttagtagagatttgagcattcagttgacatt

SEQ ID NO: 42776 - DNA, 40 bp, Homo sapiens
atgtcaactgaatgctcaaatctctactaaagagcctctt

SEQ ID NO: 42777 - DNA, 40 bp, Homo sapiens
aagaggctctttagtagagatttgagcattcagttgacat

SEQ ID NO: 42778 - DNA, 40 bp, Homo sapiens
tgtcaactgaatgctcaaatctctactaaagagcctctta

SEQ ID NO: 42779 - DNA, 40 bp, Homo sapiens
taagaggctctttagtagagatttgagcattcagttgaca

SEQ ID NO: 42780 - DNA, 40 bp, Homo sapiens
gtcaactgaatgctcaaatctctactaaagagcctcttat

SEQ ID NO: 42781 - DNA, 40 bp, Homo sapiens
ataagaggctctttagtagagatttgagcattcagttgac

SEQ ID NO: 42782 - DNA, 40 bp, Homo sapiens
tcaactgaatgctcaaatctctactaaagagcctcttatt

SEQ ID NO: 42783 - DNA, 40 bp, Homo sapiens
aataagaggctctttagtagagatttgagcattcagttga

SEQ ID NO: 42784 - DNA, 40 bp, Homo sapiens
caactgaatgctcaaatctctactaaagagcctcttattt

SEQ ID NO: 42785 - DNA, 40 bp, Homo sapiens
aaataagaggctctttagtagagatttgagcattcagttg

SEQ ID NO: 42786 - DNA, 40 bp, Homo sapiens
aactgaatgctcaaatctctactaaagagcctcttattta

SEQ ID NO: 42787 - DNA, 40 bp, Homo sapiens
taaataagaggctctttagtagagatttgagcattcagtt

SEQ ID NO: 42788 - DNA, 40 bp, Homo sapiens
actgaatgctcaaatctctactaaagagcctcttatttag

SEQ ID NO: 42789 - DNA, 40 bp, Homo sapiens
ctaaataagaggctctttagtagagatttgagcattcagt

SEQ ID NO: 42790 - DNA, 40 bp, Homo sapiens
ctgaatgctcaaatctctactaaagagcctcttatttaga

SEQ ID NO: 42791 - DNA, 40 bp, Homo sapiens
tctaaataagaggctctttagtagagatttgagcattcag

SEQ ID NO: 42792 - DNA, 40 bp, Homo sapiens
tgaatgctcaaatctctactaaagagcctcttatttagaa

SEQ ID NO: 42793 - DNA, 40 bp, Homo sapiens
ttctaaataagaggctctttagtagagatttgagcattca

SEQ ID NO: 42794 - DNA, 40 bp, Homo sapiens
gaatgctcaaatctctactaaagagcctcttatttagaaa

SEQ ID NO: 42795 - DNA, 40 bp, Homo sapiens
tttctaaataagaggctctttagtagagatttgagcattc

SEQ ID NO: 42796 - DNA, 40 bp, Homo sapiens
aatgctcaaatctctactaaagagcctcttatttagaaaa

SEQ ID NO: 42797 - DNA, 40 bp, Homo sapiens
ttttctaaataagaggctctttagtagagatttgagcatt

SEQ ID NO: 42798 - DNA, 40 bp, Homo sapiens
atgctcaaatctctactaaagagcctcttatttagaaaat

SEQ ID NO: 42799 - DNA, 40 bp, Homo sapiens
attttctaaataagaggctctttagtagagatttgagcat

SEQ ID NO: 42800 - DNA, 40 bp, Homo sapiens
tgctcaaatctctactaaagagcctcttatttagaaaata

SEQ ID NO: 42801 - DNA, 40 bp, Homo sapiens
tattttctaaataagaggctctttagtagagatttgagca

SEQ ID NO: 42802 - DNA, 40 bp, Homo sapiens
gctcaaatctctactaaagagcctcttatttagaaaataa

SEQ ID NO: 42803 - DNA, 40 bp, Homo sapiens
ttattttctaaataagaggctctttagtagagatttgagc

SEQ ID NO: 42804 - DNA, 40 bp, Homo sapiens
ctcaaatctctactaaagagcctcttatttagaaaataaa

SEQ ID NO: 42805 - DNA, 40 bp, Homo sapiens
tttattttctaaataagaggctctttagtagagatttgag

SEQ ID NO: 42806 - DNA, 40 bp, Homo sapiens
tcaaatctctactaaagagcctcttatttagaaaataaat

SEQ ID NO: 42807 - DNA, 40 bp, Homo sapiens
atttattttctaaataagaggctctttagtagagatttga

SEQ ID NO: 42808 - DNA, 40 bp, Homo sapiens
caaatctctactaaagagcctcttatttagaaaataaata

SEQ ID NO: 42809 - DNA, 40 bp, Homo sapiens
tatttattttctaaataagaggctctttagtagagatttg

SEQ ID NO: 42810 - DNA, 40 bp, Homo sapiens
aaatctctactaaagagcctcttatttagaaaataaatat

SEQ ID NO: 42811 - DNA, 40 bp, Homo sapiens
atatttattttctaaataagaggctctttagtagagattt

SEQ ID NO: 42812 - DNA, 40 bp, Homo sapiens
aatctctactaaagagcctcttatttagaaaataaatatc

SEQ ID NO: 42813 - DNA, 40 bp, Homo sapiens
gatatttattttctaaataagaggctctttagtagagatt

SEQ ID NO: 42814 - DNA, 40 bp, Homo sapiens
atctctactaaagagcctcttatttagaaaataaatatcc

SEQ ID NO: 42815 - DNA, 40 bp, Homo sapiens
ggatatttattttctaaataagaggctctttagtagagat

SEQ ID NO: 42816 - DNA, 40 bp, Homo sapiens
tctctactaaagagcctcttatttagaaaataaatatcca

SEQ ID NO: 42817 - DNA, 40 bp, Homo sapiens
tggatatttattttctaaataagaggctctttagtagaga

SEQ ID NO: 42818 - DNA, 40 bp, Homo sapiens
ctctactaaagagcctcttatttagaaaataaatatccat

SEQ ID NO: 42819 - DNA, 40 bp, Homo sapiens
atggatatttattttctaaataagaggctctttagtagag

SEQ ID NO: 42820 - DNA, 40 bp, Homo sapiens
tctactaaagagcctcttatttagaaaataaatatccatc

SEQ ID NO: 42821 - DNA, 40 bp, Homo sapiens
gatggatatttattttctaaataagaggctctttagtaga

SEQ ID NO: 42822 - DNA, 40 bp, Homo sapiens
ctactaaagagcctcttatttagaaaataaatatccatct

SEQ ID NO: 42823 - DNA, 40 bp, Homo sapiens
agatggatatttattttctaaataagaggctctttagtag

SEQ ID NO: 42824 - DNA, 40 bp, Homo sapiens
tactaaagagcctcttatttagaaaataaatatccatctt

SEQ ID NO: 42825 - DNA, 40 bp, Homo sapiens
aagatggatatttattttctaaataagaggctctttagta

SEQ ID NO: 42826 - DNA, 40 bp, Homo sapiens
actaaagagcctcttatttagaaaataaatatccatcttt

SEQ ID NO: 42827 - DNA, 40 bp, Homo sapiens
aaagatggatatttattttctaaataagaggctctttagt

SEQ ID NO: 42828 - DNA, 40 bp, Homo sapiens
ctaaagagcctcttatttagaaaataaatatccatctttt

SEQ ID NO: 42829 - DNA, 40 bp, Homo sapiens
aaaagatggatatttattttctaaataagaggctctttag

SEQ ID NO: 42830 - DNA, 40 bp, Homo sapiens
taaagagcctcttatttagaaaataaatatccatcttttt

SEQ ID NO: 42831 - DNA, 40 bp, Homo sapiens
aaaaagatggatatttattttctaaataagaggctcttta

SEQ ID NO: 42832 - DNA, 40 bp, Homo sapiens
aaagagcctcttatttagaaaataaatatccatctttttt

SEQ ID NO: 42833 - DNA, 40 bp, Homo sapiens
aaaaaagatggatatttattttctaaataagaggctcttt

SEQ ID NO: 42834 - DNA, 40 bp, Homo sapiens
aagagcctcttatttagaaaataaatatccatcttttttt

SEQ ID NO: 42835 - DNA, 40 bp, Homo sapiens
aaaaaaagatggatatttattttctaaataagaggctctt

SEQ ID NO: 42836 - DNA, 40 bp, Homo sapiens
agagcctcttatttagaaaataaatatccatctttttttt

SEQ ID NO: 42837 - DNA, 40 bp, Homo sapiens
aaaaaaaagatggatatttattttctaaataagaggctct

SEQ ID NO: 42838 - DNA, 40 bp, Homo sapiens
gagcctcttatttagaaaataaatatccatcttttttttc

SEQ ID NO: 42839 - DNA, 40 bp, Homo sapiens
gaaaaaaaagatggatatttattttctaaataagaggctc

SEQ ID NO: 42840 - DNA, 40 bp, Homo sapiens
agcctcttatttagaaaataaatatccatcttttttttct

SEQ ID NO: 42841 - DNA, 40 bp, Homo sapiens
agaaaaaaaagatggatatttattttctaaataagaggct

SEQ ID NO: 42842 - DNA, 40 bp, Homo sapiens
gcctcttatttagaaaataaatatccatcttttttttctg

SEQ ID NO: 42843 - DNA, 40 bp, Homo sapiens
cagaaaaaaaagatggatatttattttctaaataagaggc

SEQ ID NO: 42844 - DNA, 40 bp, Homo sapiens
cctcttatttagaaaataaatatccatcttttttttctga

SEQ ID NO: 42845 - DNA, 40 bp, Homo sapiens
tcagaaaaaaaagatggatatttattttctaaataagagg

SEQ ID NO: 42846 - DNA, 40 bp, Homo sapiens
ctcttatttagaaaataaatatccatcttttttttctgac

SEQ ID NO: 42847 - DNA, 40 bp, Homo sapiens
gtcagaaaaaaaagatggatatttattttctaaataagag

SEQ ID NO: 42848 - DNA, 40 bp, Homo sapiens
tcttatttagaaaataaatatccatcttttttttctgact

SEQ ID NO: 42849 - DNA, 40 bp, Homo sapiens
agtcagaaaaaaaagatggatatttattttctaaataaga

SEQ ID NO: 42850 - DNA, 40 bp, Homo sapiens
cttatttagaaaataaatatccatcttttttttctgactg

SEQ ID NO: 42851 - DNA, 40 bp, Homo sapiens
cagtcagaaaaaaaagatggatatttattttctaaataag

SEQ ID NO: 42852 - DNA, 40 bp, Homo sapiens
ttatttagaaaataaatatccatcttttttttctgactgg

SEQ ID NO: 42853 - DNA, 40 bp, Homo sapiens
ccagtcagaaaaaaaagatggatatttattttctaaataa

SEQ ID NO: 42854 - DNA, 40 bp, Homo sapiens
tatttagaaaataaatatccatcttttttttctgactggt

SEQ ID NO: 42855 - DNA, 40 bp, Homo sapiens
accagtcagaaaaaaaagatggatatttattttctaaata

SEQ ID NO: 42856 - DNA, 40 bp, Homo sapiens
atttagaaaataaatatccatcttttttttctgactggtg

SEQ ID NO: 42857 - DNA, 40 bp, Homo sapiens
caccagtcagaaaaaaaagatggatatttattttctaaat

SEQ ID NO: 42858 - DNA, 40 bp, Homo sapiens
tttagaaaataaatatccatcttttttttctgactggtga

SEQ ID NO: 42859 - DNA, 40 bp, Homo sapiens
tcaccagtcagaaaaaaaagatggatatttattttctaaa

SEQ ID NO: 42860 - DNA, 40 bp, Homo sapiens
ttagaaaataaatatccatcttttttttctgactggtgag

SEQ ID NO: 42861 - DNA, 40 bp, Homo sapiens
ctcaccagtcagaaaaaaaagatggatatttattttctaa

SEQ ID NO: 42862 - DNA, 40 bp, Homo sapiens
tagaaaataaatatccatcttttttttctgactggtgaga

SEQ ID NO: 42863 - DNA, 40 bp, Homo sapiens
tctcaccagtcagaaaaaaaagatggatatttattttcta

SEQ ID NO: 42864 - DNA, 40 bp, Homo sapiens
agaaaataaatatccatcttttttttctgactggtgagat

SEQ ID NO: 42865 - DNA, 40 bp, Homo sapiens
atctcaccagtcagaaaaaaaagatggatatttattttct

SEQ ID NO: 42866 - DNA, 40 bp, Homo sapiens
gaaaataaatatccatcttttttttctgactggtgagata

SEQ ID NO: 42867 - DNA, 40 bp, Homo sapiens
tatctcaccagtcagaaaaaaaagatggatatttattttc

SEQ ID NO: 42868 - DNA, 40 bp, Homo sapiens
aaaataaatatccatcttttttttctgactggtgagataa

SEQ ID NO: 42869 - DNA, 40 bp, Homo sapiens
ttatctcaccagtcagaaaaaaaagatggatatttatttt

SEQ ID NO: 42870 - DNA, 40 bp, Homo sapiens
aaataaatatccatcttttttttctgactggtgagataat

SEQ ID NO: 42871 - DNA, 40 bp, Homo sapiens
attatctcaccagtcagaaaaaaaagatggatatttattt

SEQ ID NO: 42872 - DNA, 40 bp, Homo sapiens
aataaatatccatcttttttttctgactggtgagataatt

SEQ ID NO: 42873 - DNA, 40 bp, Homo sapiens
aattatctcaccagtcagaaaaaaaagatggatatttatt

SEQ ID NO: 42874 - DNA, 40 bp, Homo sapiens
ataaatatccatcttttttttctgactggtgagataatta

SEQ ID NO: 42875 - DNA, 40 bp, Homo sapiens
taattatctcaccagtcagaaaaaaaagatggatatttat

SEQ ID NO: 42876 - DNA, 40 bp, Homo sapiens
taaatatccatcttttttttctgactggtgagataattaa

SEQ ID NO: 42877 - DNA, 40 bp, Homo sapiens
ttaattatctcaccagtcagaaaaaaaagatggatattta

SEQ ID NO: 42878 - DNA, 40 bp, Homo sapiens
aaatatccatcttttttttctgactggtgagataattaat

SEQ ID NO: 42879 - DNA, 40 bp, Homo sapiens
attaattatctcaccagtcagaaaaaaaagatggatattt

SEQ ID NO: 42880 - DNA, 40 bp, Homo sapiens
aatatccatcttttttttctgactggtgagataattaatt

SEQ ID NO: 42881 - DNA, 40 bp, Homo sapiens
aattaattatctcaccagtcagaaaaaaaagatggatatt

SEQ ID NO: 42882 - DNA, 40 bp, Homo sapiens
atatccatcttttttttctgactggtgagataattaattt

SEQ ID NO: 42883 - DNA, 40 bp, Homo sapiens
aaattaattatctcaccagtcagaaaaaaaagatggatat

SEQ ID NO: 42884 - DNA, 40 bp, Homo sapiens
tatccatcttttttttctgactggtgagataattaatttt

SEQ ID NO: 42885 - DNA, 40 bp, Homo sapiens
aaaattaattatctcaccagtcagaaaaaaaagatggata

SEQ ID NO: 42886 - DNA, 40 bp, Homo sapiens
atccatcttttttttctgactggtgagataattaattttt

SEQ ID NO: 42887 - DNA, 40 bp, Homo sapiens
aaaaattaattatctcaccagtcagaaaaaaaagatggat

SEQ ID NO: 42888 - DNA, 40 bp, Homo sapiens
tccatcttttttttctgactggtgagataattaattttta

SEQ ID NO: 42889 - DNA, 40 bp, Homo sapiens
taaaaattaattatctcaccagtcagaaaaaaaagatgga

SEQ ID NO: 42890 - DNA, 40 bp, Homo sapiens
ccatcttttttttctgactggtgagataattaatttttat

SEQ ID NO: 42891 - DNA, 40 bp, Homo sapiens
ataaaaattaattatctcaccagtcagaaaaaaaagatgg

SEQ ID NO: 42892 - DNA, 40 bp, Homo sapiens
catcttttttttctgactggtgagataattaatttttatt

SEQ ID NO: 42893 - DNA, 40 bp, Homo sapiens
aataaaaattaattatctcaccagtcagaaaaaaaagatg

SEQ ID NO: 42894 - DNA, 40 bp, Homo sapiens
atcttttttttctgactggtgagataattaatttttatta

SEQ ID NO: 42895 - DNA, 40 bp, Homo sapiens
taataaaaattaattatctcaccagtcagaaaaaaaagat

SEQ ID NO: 42896 - DNA, 40 bp, Homo sapiens
tcttttttttctgactggtgagataattaatttttattac

SEQ ID NO: 42897 - DNA, 40 bp, Homo sapiens
gtaataaaaattaattatctcaccagtcagaaaaaaaaga

SEQ ID NO: 42898 - DNA, 40 bp, Homo sapiens
cttttttttctgactggtgagataattaatttttattaca

SEQ ID NO: 42899 - DNA, 40 bp, Homo sapiens
tgtaataaaaattaattatctcaccagtcagaaaaaaaag

SEQ ID NO: 42900 - DNA, 40 bp, Homo sapiens
ttttttttctgactggtgagataattaatttttattacag

SEQ ID NO: 42901 - DNA, 40 bp, Homo sapiens
ctgtaataaaaattaattatctcaccagtcagaaaaaaaa

SEQ ID NO: 42902 - DNA, 40 bp, Homo sapiens
tttttttctgactggtgagataattaatttttattacaga

SEQ ID NO: 42903 - DNA, 40 bp, Homo sapiens
tctgtaataaaaattaattatctcaccagtcagaaaaaaa

SEQ ID NO: 42904 - DNA, 40 bp, Homo sapiens
ttttttctgactggtgagataattaatttttattacagat

SEQ ID NO: 42905 - DNA, 40 bp, Homo sapiens
atctgtaataaaaattaattatctcaccagtcagaaaaaa

SEQ ID NO: 42906 - DNA, 40 bp, Homo sapiens
tttttctgactggtgagataattaatttttattacagatg

SEQ ID NO: 42907 - DNA, 40 bp, Homo sapiens
catctgtaataaaaattaattatctcaccagtcagaaaaa

SEQ ID NO: 42908 - DNA, 40 bp, Homo sapiens
ttttctgactggtgagataattaatttttattacagatgg

SEQ ID NO: 42909 - DNA, 40 bp, Homo sapiens
ccatctgtaataaaaattaattatctcaccagtcagaaaa

SEQ ID NO: 42910 - DNA, 40 bp, Homo sapiens
tttctgactggtgagataattaatttttattacagatggt

SEQ ID NO: 42911 - DNA, 40 bp, Homo sapiens
accatctgtaataaaaattaattatctcaccagtcagaaa

SEQ ID NO: 42912 - DNA, 40 bp, Homo sapiens
ttctgactggtgagataattaatttttattacagatggtt

SEQ ID NO: 42913 - DNA, 40 bp, Homo sapiens
aaccatctgtaataaaaattaattatctcaccagtcagaa

SEQ ID NO: 42914 - DNA, 40 bp, Homo sapiens
tctgactggtgagataattaatttttattacagatggttt

SEQ ID NO: 42915 - DNA, 40 bp, Homo sapiens
aaaccatctgtaataaaaattaattatctcaccagtcaga

SEQ ID NO: 42916 - DNA, 40 bp, Homo sapiens
ctgactggtgagataattaatttttattacagatggtttg

SEQ ID NO: 42917 - DNA, 40 bp, Homo sapiens
caaaccatctgtaataaaaattaattatctcaccagtcag

SEQ ID NO: 42918 - DNA, 40 bp, Homo sapiens
tgactggtgagataattaatttttattacagatggtttgg

SEQ ID NO: 42919 - DNA, 40 bp, Homo sapiens
ccaaaccatctgtaataaaaattaattatctcaccagtca

SEQ ID NO: 42920 - DNA, 40 bp, Homo sapiens
gactggtgagataattaatttttattacagatggtttgga

SEQ ID NO: 42921 - DNA, 40 bp, Homo sapiens
tccaaaccatctgtaataaaaattaattatctcaccagtc

SEQ ID NO: 42922 - DNA, 40 bp, Homo sapiens
actggtgagataattaatttttattacagatggtttggaa

SEQ ID NO: 42923 - DNA, 40 bp, Homo sapiens
ttccaaaccatctgtaataaaaattaattatctcaccagt

SEQ ID NO: 42924 - DNA, 40 bp, Homo sapiens
ctggtgagataattaatttttattacagatggtttggaaa

SEQ ID NO: 42925 - DNA, 40 bp, Homo sapiens
tttccaaaccatctgtaataaaaattaattatctcaccag

SEQ ID NO: 42926 - DNA, 40 bp, Homo sapiens
tggtgagataattaatttttattacagatggtttggaaaa

SEQ ID NO: 42927 - DNA, 40 bp, Homo sapiens
ttttccaaaccatctgtaataaaaattaattatctcacca

SEQ ID NO: 42928 - DNA, 40 bp, Homo sapiens
ggtgagataattaatttttattacagatggtttggaaaat

SEQ ID NO: 42929 - DNA, 40 bp, Homo sapiens
attttccaaaccatctgtaataaaaattaattatctcacc

SEQ ID NO: 42930 - DNA, 40 bp, Homo sapiens
gtgagataattaatttttattacagatggtttggaaaata

SEQ ID NO: 42931 - DNA, 40 bp, Homo sapiens
tattttccaaaccatctgtaataaaaattaattatctcac

SEQ ID NO: 42932 - DNA, 40 bp, Homo sapiens
tgagataattaatttttattacagatggtttggaaaatac

SEQ ID NO: 42933 - DNA, 40 bp, Homo sapiens
gtattttccaaaccatctgtaataaaaattaattatctca

SEQ ID NO: 42934 - DNA, 40 bp, Homo sapiens
gagataattaatttttattacagatggtttggaaaatacc

SEQ ID NO: 42935 - DNA, 40 bp, Homo sapiens
ggtattttccaaaccatctgtaataaaaattaattatctc

SEQ ID NO: 42936 - DNA, 40 bp, Homo sapiens
agataattaatttttattacagatggtttggaaaatacca

SEQ ID NO: 42937 - DNA, 40 bp, Homo sapiens
tggtattttccaaaccatctgtaataaaaattaattatct

SEQ ID NO: 42938 - DNA, 40 bp, Homo sapiens
gataattaatttttattacagatggtttggaaaataccat

SEQ ID NO: 42939 - DNA, 40 bp, Homo sapiens
atggtattttccaaaccatctgtaataaaaattaattatc

SEQ ID NO: 42940 - DNA, 40 bp, Homo sapiens
ataattaatttttattacagatggtttggaaaataccata

SEQ ID NO: 42941 - DNA, 40 bp, Homo sapiens
tatggtattttccaaaccatctgtaataaaaattaattat

SEQ ID NO: 42942 - DNA, 40 bp, Homo sapiens
taattaatttttattacagatggtttggaaaataccatat

SEQ ID NO: 42943 - DNA, 40 bp, Homo sapiens
atatggtattttccaaaccatctgtaataaaaattaatta

SEQ ID NO: 42944 - DNA, 40 bp, Homo sapiens
aattaatttttattacagatggtttggaaaataccatatg

SEQ ID NO: 42945 - DNA, 40 bp, Homo sapiens
catatggtattttccaaaccatctgtaataaaaattaatt

SEQ ID NO: 42946 - DNA, 40 bp, Homo sapiens
attaatttttattacagatggtttggaaaataccatatgc

SEQ ID NO: 42947 - DNA, 40 bp, Homo sapiens
gcatatggtattttccaaaccatctgtaataaaaattaat

SEQ ID NO: 42948 - DNA, 40 bp, Homo sapiens
ttaatttttattacagatggtttggaaaataccatatgct

SEQ ID NO: 42949 - DNA, 40 bp, Homo sapiens
agcatatggtattttccaaaccatctgtaataaaaattaa

SEQ ID NO: 42950 - DNA, 40 bp, Homo sapiens
taatttttattacagatggtttggaaaataccatatgctt

SEQ ID NO: 42951 - DNA, 40 bp, Homo sapiens
aagcatatggtattttccaaaccatctgtaataaaaatta

SEQ ID NO: 42952 - DNA, 40 bp, Homo sapiens
aatttttattacagatggtttggaaaataccatatgcttt

SEQ ID NO: 42953 - DNA, 40 bp, Homo sapiens
aaagcatatggtattttccaaaccatctgtaataaaaatt

SEQ ID NO: 42954 - DNA, 40 bp, Homo sapiens
atttttattacagatggtttggaaaataccatatgcttta

SEQ ID NO: 42955 - DNA, 40 bp, Homo sapiens
taaagcatatggtattttccaaaccatctgtaataaaaat

SEQ ID NO: 42956 - DNA, 40 bp, Homo sapiens
tttttattacagatggtttggaaaataccatatgctttaa

SEQ ID NO: 42957 - DNA, 40 bp, Homo sapiens
ttaaagcatatggtattttccaaaccatctgtaataaaaa

SEQ ID NO: 42958 - DNA, 40 bp, Homo sapiens
ttttattacagatggtttggaaaataccatatgctttaaa

SEQ ID NO: 42959 - DNA, 40 bp, Homo sapiens
tttaaagcatatggtattttccaaaccatctgtaataaaa

SEQ ID NO: 42960 - DNA, 40 bp, Homo sapiens
tttattacagatggtttggaaaataccatatgctttaaaa

SEQ ID NO: 42961 - DNA, 40 bp, Homo sapiens
ttttaaagcatatggtattttccaaaccatctgtaataaa

SEQ ID NO: 42962 - DNA, 40 bp, Homo sapiens
ttattacagatggtttggaaaataccatatgctttaaaag

SEQ ID NO: 42963 - DNA, 40 bp, Homo sapiens
cttttaaagcatatggtattttccaaaccatctgtaataa

SEQ ID NO: 42964 - DNA, 40 bp, Homo sapiens
tattacagatggtttggaaaataccatatgctttaaaaga

SEQ ID NO: 42965 - DNA, 40 bp, Homo sapiens
tcttttaaagcatatggtattttccaaaccatctgtaata

SEQ ID NO: 42966 - DNA, 40 bp, Homo sapiens
attacagatggtttggaaaataccatatgctttaaaagat

SEQ ID NO: 42967 - DNA, 40 bp, Homo sapiens
atcttttaaagcatatggtattttccaaaccatctgtaat

SEQ ID NO: 42968 - DNA, 40 bp, Homo sapiens
ttacagatggtttggaaaataccatatgctttaaaagata

SEQ ID NO: 42969 - DNA, 40 bp, Homo sapiens
tatcttttaaagcatatggtattttccaaaccatctgtaa

SEQ ID NO: 42970 - DNA, 40 bp, Homo sapiens
tacagatggtttggaaaataccatatgctttaaaagataa

SEQ ID NO: 42971 - DNA, 40 bp, Homo sapiens
ttatcttttaaagcatatggtattttccaaaccatctgta

SEQ ID NO: 42972 - DNA, 40 bp, Homo sapiens
acagatggtttggaaaataccatatgctttaaaagataag

SEQ ID NO: 42973 - DNA, 40 bp, Homo sapiens
cttatcttttaaagcatatggtattttccaaaccatctgt

SEQ ID NO: 42974 - DNA, 40 bp, Homo sapiens
cagatggtttggaaaataccatatgctttaaaagataagc

SEQ ID NO: 42975 - DNA, 40 bp, Homo sapiens
gcttatcttttaaagcatatggtattttccaaaccatctg

SEQ ID NO: 42976 - DNA, 40 bp, Homo sapiens
agatggtttggaaaataccatatgctttaaaagataagca

SEQ ID NO: 42977 - DNA, 40 bp, Homo sapiens
tgcttatcttttaaagcatatggtattttccaaaccatct

SEQ ID NO: 42978 - DNA, 40 bp, Homo sapiens
gatggtttggaaaataccatatgctttaaaagataagcac

SEQ ID NO: 42979 - DNA, 40 bp, Homo sapiens
gtgcttatcttttaaagcatatggtattttccaaaccatc

SEQ ID NO: 42980 - DNA, 40 bp, Homo sapiens
atggtttggaaaataccatatgctttaaaagataagcaca

SEQ ID NO: 42981 - DNA, 40 bp, Homo sapiens
tgtgcttatcttttaaagcatatggtattttccaaaccat

SEQ ID NO: 42982 - DNA, 40 bp, Homo sapiens
tggtttggaaaataccatatgctttaaaagataagcacaa

SEQ ID NO: 42983 - DNA, 40 bp, Homo sapiens
ttgtgcttatcttttaaagcatatggtattttccaaacca

SEQ ID NO: 42984 - DNA, 40 bp, Homo sapiens
ggtttggaaaataccatatgctttaaaagataagcacaaa

SEQ ID NO: 42985 - DNA, 40 bp, Homo sapiens
tttgtgcttatcttttaaagcatatggtattttccaaacc

SEQ ID NO: 42986 - DNA, 40 bp, Homo sapiens
gtttggaaaataccatatgctttaaaagataagcacaaaa

SEQ ID NO: 42987 - DNA, 40 bp, Homo sapiens
ttttgtgcttatcttttaaagcatatggtattttccaaac

SEQ ID NO: 42988 - DNA, 40 bp, Homo sapiens
tttggaaaataccatatgctttaaaagataagcacaaaat

SEQ ID NO: 42989 - DNA, 40 bp, Homo sapiens
attttgtgcttatcttttaaagcatatggtattttccaaa

SEQ ID NO: 42990 - DNA, 40 bp, Homo sapiens
ttggaaaataccatatgctttaaaagataagcacaaaatt

SEQ ID NO: 42991 - DNA, 40 bp, Homo sapiens
aattttgtgcttatcttttaaagcatatggtattttccaa

SEQ ID NO: 42992 - DNA, 40 bp, Homo sapiens
tggaaaataccatatgctttaaaagataagcacaaaatta

SEQ ID NO: 42993 - DNA, 40 bp, Homo sapiens
taattttgtgcttatcttttaaagcatatggtattttcca

SEQ ID NO: 42994 - DNA, 40 bp, Homo sapiens
ggaaaataccatatgctttaaaagataagcacaaaattat

SEQ ID NO: 42995 - DNA, 40 bp, Homo sapiens
ataattttgtgcttatcttttaaagcatatggtattttcc

SEQ ID NO: 42996 - DNA, 40 bp, Homo sapiens
gaaaataccatatgctttaaaagataagcacaaaattata

SEQ ID NO: 42997 - DNA, 40 bp, Homo sapiens
tataattttgtgcttatcttttaaagcatatggtattttc

SEQ ID NO: 42998 - DNA, 40 bp, Homo sapiens
aaaataccatatgctttaaaagataagcacaaaattatag

SEQ ID NO: 42999 - DNA, 40 bp, Homo sapiens
ctataattttgtgcttatcttttaaagcatatggtatttt

SEQ ID NO: 43000 - DNA, 40 bp, Homo sapiens
aaataccatatgctttaaaagataagcacaaaattatagt

SEQ ID NO: 43001 - DNA, 40 bp, Homo sapiens
actataattttgtgcttatcttttaaagcatatggtattt

SEQ ID NO: 43002 - DNA, 40 bp, Homo sapiens
aataccatatgctttaaaagataagcacaaaattatagtc

SEQ ID NO: 43003 - DNA, 40 bp, Homo sapiens
gactataattttgtgcttatcttttaaagcatatggtatt

SEQ ID NO: 43004 - DNA, 40 bp, Homo sapiens
ataccatatgctttaaaagataagcacaaaattatagtct

SEQ ID NO: 43005 - DNA, 40 bp, Homo sapiens
agactataattttgtgcttatcttttaaagcatatggtat

SEQ ID NO: 43006 - DNA, 40 bp, Homo sapiens
taccatatgctttaaaagataagcacaaaattatagtcta

SEQ ID NO: 43007 - DNA, 40 bp, Homo sapiens
tagactataattttgtgcttatcttttaaagcatatggta

SEQ ID NO: 43008 - DNA, 40 bp, Homo sapiens
accatatgctttaaaagataagcacaaaattatagtctaa

SEQ ID NO: 43009 - DNA, 40 bp, Homo sapiens
ttagactataattttgtgcttatcttttaaagcatatggt

SEQ ID NO: 43010 - DNA, 40 bp, Homo sapiens
ccatatgctttaaaagataagcacaaaattatagtctaat

SEQ ID NO: 43011 - DNA, 40 bp, Homo sapiens
attagactataattttgtgcttatcttttaaagcatatgg

SEQ ID NO: 43012 - DNA, 40 bp, Homo sapiens
catatgctttaaaagataagcacaaaattatagtctaata

SEQ ID NO: 43013 - DNA, 40 bp, Homo sapiens
tattagactataattttgtgcttatcttttaaagcatatg

SEQ ID NO: 43014 - DNA, 40 bp, Homo sapiens
atatgctttaaaagataagcacaaaattatagtctaatat

SEQ ID NO: 43015 - DNA, 40 bp, Homo sapiens
atattagactataattttgtgcttatcttttaaagcatat

SEQ ID NO: 43016 - DNA, 40 bp, Homo sapiens
tatgctttaaaagataagcacaaaattatagtctaatatg

SEQ ID NO: 43017 - DNA, 40 bp, Homo sapiens
catattagactataattttgtgcttatcttttaaagcata

SEQ ID NO: 43018 - DNA, 40 bp, Homo sapiens
atgctttaaaagataagcacaaaattatagtctaatatgt

SEQ ID NO: 43019 - DNA, 40 bp, Homo sapiens
acatattagactataattttgtgcttatcttttaaagcat

SEQ ID NO: 43020 - DNA, 40 bp, Homo sapiens
tgctttaaaagataagcacaaaattatagtctaatatgta

SEQ ID NO: 43021 - DNA, 40 bp, Homo sapiens
tacatattagactataattttgtgcttatcttttaaagca

SEQ ID NO: 43022 - DNA, 40 bp, Homo sapiens
gctttaaaagataagcacaaaattatagtctaatatgtag

SEQ ID NO: 43023 - DNA, 40 bp, Homo sapiens
ctacatattagactataattttgtgcttatcttttaaagc

SEQ ID NO: 43024 - DNA, 40 bp, Homo sapiens
ctttaaaagataagcacaaaattatagtctaatatgtagg

SEQ ID NO: 43025 - DNA, 40 bp, Homo sapiens
cctacatattagactataattttgtgcttatcttttaaag

SEQ ID NO: 43026 - DNA, 40 bp, Homo sapiens
tttaaaagataagcacaaaattatagtctaatatgtaggt

SEQ ID NO: 43027 - DNA, 40 bp, Homo sapiens
acctacatattagactataattttgtgcttatcttttaaa

SEQ ID NO: 43028 - DNA, 40 bp, Homo sapiens
ttaaaagataagcacaaaattatagtctaatatgtaggtt

SEQ ID NO: 43029 - DNA, 40 bp, Homo sapiens
aacctacatattagactataattttgtgcttatcttttaa

SEQ ID NO: 43030 - DNA, 40 bp, Homo sapiens
taaaagataagcacaaaattatagtctaatatgtaggttt

SEQ ID NO: 43031 - DNA, 40 bp, Homo sapiens
aaacctacatattagactataattttgtgcttatctttta

SEQ ID NO: 43032 - DNA, 40 bp, Homo sapiens
aaaagataagcacaaaattatagtctaatatgtaggtttt

SEQ ID NO: 43033 - DNA, 40 bp, Homo sapiens
aaaacctacatattagactataattttgtgcttatctttt

SEQ ID NO: 43034 - DNA, 40 bp, Homo sapiens
aaagataagcacaaaattatagtctaatatgtaggttttc

SEQ ID NO: 43035 - DNA, 40 bp, Homo sapiens
gaaaacctacatattagactataattttgtgcttatcttt

SEQ ID NO: 43036 - DNA, 40 bp, Homo sapiens
aagataagcacaaaattatagtctaatatgtaggttttca

SEQ ID NO: 43037 - DNA, 40 bp, Homo sapiens
tgaaaacctacatattagactataattttgtgcttatctt

SEQ ID NO: 43038 - DNA, 40 bp, Homo sapiens
agataagcacaaaattatagtctaatatgtaggttttcat

SEQ ID NO: 43039 - DNA, 40 bp, Homo sapiens
atgaaaacctacatattagactataattttgtgcttatct

SEQ ID NO: 43040 - DNA, 40 bp, Homo sapiens
gataagcacaaaattatagtctaatatgtaggttttcata

SEQ ID NO: 43041 - DNA, 40 bp, Homo sapiens
tatgaaaacctacatattagactataattttgtgcttatc

SEQ ID NO: 43042 - DNA, 40 bp, Homo sapiens
ataagcacaaaattatagtctaatatgtaggttttcatac

SEQ ID NO: 43043 - DNA, 40 bp, Homo sapiens
gtatgaaaacctacatattagactataattttgtgcttat

SEQ ID NO: 43044 - DNA, 40 bp, Homo sapiens
taagcacaaaattatagtctaatatgtaggttttcatact

SEQ ID NO: 43045 - DNA, 40 bp, Homo sapiens
agtatgaaaacctacatattagactataattttgtgctta

SEQ ID NO: 43046 - DNA, 40 bp, Homo sapiens
aagcacaaaattatagtctaatatgtaggttttcatactt

SEQ ID NO: 43047 - DNA, 40 bp, Homo sapiens
aagtatgaaaacctacatattagactataattttgtgctt

SEQ ID NO: 43048 - DNA, 40 bp, Homo sapiens
agcacaaaattatagtctaatatgtaggttttcatacttt

SEQ ID NO: 43049 - DNA, 40 bp, Homo sapiens
aaagtatgaaaacctacatattagactataattttgtgct

SEQ ID NO: 43050 - DNA, 40 bp, Homo sapiens
gcacaaaattatagtctaatatgtaggttttcatacttta

SEQ ID NO: 43051 - DNA, 40 bp, Homo sapiens
taaagtatgaaaacctacatattagactataattttgtgc

SEQ ID NO: 43052 - DNA, 40 bp, Homo sapiens
cacaaaattatagtctaatatgtaggttttcatactttaa

SEQ ID NO: 43053 - DNA, 40 bp, Homo sapiens
ttaaagtatgaaaacctacatattagactataattttgtg

SEQ ID NO: 43054 - DNA, 40 bp, Homo sapiens
acaaaattatagtctaatatgtaggttttcatactttaaa

SEQ ID NO: 43055 - DNA, 40 bp, Homo sapiens
tttaaagtatgaaaacctacatattagactataattttgt

SEQ ID NO: 43056 - DNA, 40 bp, Homo sapiens
caaaattatagtctaatatgtaggttttcatactttaaaa

SEQ ID NO: 43057 - DNA, 40 bp, Homo sapiens
ttttaaagtatgaaaacctacatattagactataattttg

SEQ ID NO: 43058 - DNA, 40 bp, Homo sapiens
aaaattatagtctaatatgtaggttttcatactttaaaaa

SEQ ID NO: 43059 - DNA, 40 bp, Homo sapiens
tttttaaagtatgaaaacctacatattagactataatttt

SEQ ID NO: 43060 - DNA, 40 bp, Homo sapiens
aaattatagtctaatatgtaggttttcatactttaaaaaa

SEQ ID NO: 43061 - DNA, 40 bp, Homo sapiens
ttttttaaagtatgaaaacctacatattagactataattt

SEQ ID NO: 43062 - DNA, 40 bp, Homo sapiens
aattatagtctaatatgtaggttttcatactttaaaaaat

SEQ ID NO: 43063 - DNA, 40 bp, Homo sapiens
attttttaaagtatgaaaacctacatattagactataatt

SEQ ID NO: 43064 - DNA, 40 bp, Homo sapiens
attatagtctaatatgtaggttttcatactttaaaaaatt

SEQ ID NO: 43065 - DNA, 40 bp, Homo sapiens
aattttttaaagtatgaaaacctacatattagactataat

SEQ ID NO: 43066 - DNA, 40 bp, Homo sapiens
ttatagtctaatatgtaggttttcatactttaaaaaattg

SEQ ID NO: 43067 - DNA, 40 bp, Homo sapiens
caattttttaaagtatgaaaacctacatattagactataa

SEQ ID NO: 43068 - DNA, 40 bp, Homo sapiens
tatagtctaatatgtaggttttcatactttaaaaaattga

SEQ ID NO: 43069 - DNA, 40 bp, Homo sapiens
tcaattttttaaagtatgaaaacctacatattagactata

SEQ ID NO: 43070 - DNA, 40 bp, Homo sapiens
atagtctaatatgtaggttttcatactttaaaaaattgaa

SEQ ID NO: 43071 - DNA, 40 bp, Homo sapiens
ttcaattttttaaagtatgaaaacctacatattagactat

SEQ ID NO: 43072 - DNA, 40 bp, Homo sapiens
tagtctaatatgtaggttttcatactttaaaaaattgaaa

SEQ ID NO: 43073 - DNA, 40 bp, Homo sapiens
tttcaattttttaaagtatgaaaacctacatattagacta

SEQ ID NO: 43074 - DNA, 40 bp, Homo sapiens
agtctaatatgtaggttttcatactttaaaaaattgaaaa

SEQ ID NO: 43075 - DNA, 40 bp, Homo sapiens
ttttcaattttttaaagtatgaaaacctacatattagact

SEQ ID NO: 43076 - DNA, 40 bp, Homo sapiens
gtctaatatgtaggttttcatactttaaaaaattgaaaac

SEQ ID NO: 43077 - DNA, 40 bp, Homo sapiens
gttttcaattttttaaagtatgaaaacctacatattagac

SEQ ID NO: 43078 - DNA, 40 bp, Homo sapiens
tctaatatgtaggttttcatactttaaaaaattgaaaacc

SEQ ID NO: 43079 - DNA, 40 bp, Homo sapiens
ggttttcaattttttaaagtatgaaaacctacatattaga

SEQ ID NO: 43080 - DNA, 40 bp, Homo sapiens
ctaatatgtaggttttcatactttaaaaaattgaaaacca

SEQ ID NO: 43081 - DNA, 40 bp, Homo sapiens
tggttttcaattttttaaagtatgaaaacctacatattag

SEQ ID NO: 43082 - DNA, 40 bp, Homo sapiens
taatatgtaggttttcatactttaaaaaattgaaaaccaa

SEQ ID NO: 43083 - DNA, 40 bp, Homo sapiens
ttggttttcaattttttaaagtatgaaaacctacatatta

SEQ ID NO: 43084 - DNA, 40 bp, Homo sapiens
aatatgtaggttttcatactttaaaaaattgaaaaccaaa

SEQ ID NO: 43085 - DNA, 40 bp, Homo sapiens
tttggttttcaattttttaaagtatgaaaacctacatatt

SEQ ID NO: 43086 - DNA, 40 bp, Homo sapiens
atatgtaggttttcatactttaaaaaattgaaaaccaaag

SEQ ID NO: 43087 - DNA, 40 bp, Homo sapiens
ctttggttttcaattttttaaagtatgaaaacctacatat

SEQ ID NO: 43088 - DNA, 40 bp, Homo sapiens
tatgtaggttttcatactttaaaaaattgaaaaccaaaga

SEQ ID NO: 43089 - DNA, 40 bp, Homo sapiens
tctttggttttcaattttttaaagtatgaaaacctacata

SEQ ID NO: 43090 - DNA, 40 bp, Homo sapiens
atgtaggttttcatactttaaaaaattgaaaaccaaagaa

SEQ ID NO: 43091 - DNA, 40 bp, Homo sapiens
ttctttggttttcaattttttaaagtatgaaaacctacat

SEQ ID NO: 43092 - DNA, 40 bp, Homo sapiens
tgtaggttttcatactttaaaaaattgaaaaccaaagaaa

SEQ ID NO: 43093 - DNA, 40 bp, Homo sapiens
tttctttggttttcaattttttaaagtatgaaaacctaca

SEQ ID NO: 43094 - DNA, 40 bp, Homo sapiens
gtaggttttcatactttaaaaaattgaaaaccaaagaaaa

SEQ ID NO: 43095 - DNA, 40 bp, Homo sapiens
ttttctttggttttcaattttttaaagtatgaaaacctac

SEQ ID NO: 43096 - DNA, 40 bp, Homo sapiens
taggttttcatactttaaaaaattgaaaaccaaagaaaaa

SEQ ID NO: 43097 - DNA, 40 bp, Homo sapiens
tttttctttggttttcaattttttaaagtatgaaaaccta

SEQ ID NO: 43098 - DNA, 40 bp, Homo sapiens
aggttttcatactttaaaaaattgaaaaccaaagaaaaac

SEQ ID NO: 43099 - DNA, 40 bp, Homo sapiens
gtttttctttggttttcaattttttaaagtatgaaaacct

SEQ ID NO: 43100 - DNA, 40 bp, Homo sapiens
ggttttcatactttaaaaaattgaaaaccaaagaaaaaca

SEQ ID NO: 43101 - DNA, 40 bp, Homo sapiens
tgtttttctttggttttcaattttttaaagtatgaaaacc

SEQ ID NO: 43102 - DNA, 40 bp, Homo sapiens
gttttcatactttaaaaaattgaaaaccaaagaaaaacat

SEQ ID NO: 43103 - DNA, 40 bp, Homo sapiens
atgtttttctttggttttcaattttttaaagtatgaaaac

SEQ ID NO: 43104 - DNA, 40 bp, Homo sapiens
ttttcatactttaaaaaattgaaaaccaaagaaaaacatt

SEQ ID NO: 43105 - DNA, 40 bp, Homo sapiens
aatgtttttctttggttttcaattttttaaagtatgaaaa

SEQ ID NO: 43106 - DNA, 40 bp, Homo sapiens
tttcatactttaaaaaattgaaaaccaaagaaaaacattt

SEQ ID NO: 43107 - DNA, 40 bp, Homo sapiens
aaatgtttttctttggttttcaattttttaaagtatgaaa

SEQ ID NO: 43108 - DNA, 40 bp, Homo sapiens
ttcatactttaaaaaattgaaaaccaaagaaaaacattta

SEQ ID NO: 43109 - DNA, 40 bp, Homo sapiens
taaatgtttttctttggttttcaattttttaaagtatgaa

SEQ ID NO: 43110 - DNA, 40 bp, Homo sapiens
tcatactttaaaaaattgaaaaccaaagaaaaacatttaa

SEQ ID NO: 43111 - DNA, 40 bp, Homo sapiens
ttaaatgtttttctttggttttcaattttttaaagtatga

SEQ ID NO: 43112 - DNA, 40 bp, Homo sapiens
catactttaaaaaattgaaaaccaaagaaaaacatttaac

SEQ ID NO: 43113 - DNA, 40 bp, Homo sapiens
gttaaatgtttttctttggttttcaattttttaaagtatg

SEQ ID NO: 43114 - DNA, 40 bp, Homo sapiens
atactttaaaaaattgaaaaccaaagaaaaacatttaaca

SEQ ID NO: 43115 - DNA, 40 bp, Homo sapiens
tgttaaatgtttttctttggttttcaattttttaaagtat

SEQ ID NO: 43116 - DNA, 40 bp, Homo sapiens
tactttaaaaaattgaaaaccaaagaaaaacatttaacat

SEQ ID NO: 43117 - DNA, 40 bp, Homo sapiens
atgttaaatgtttttctttggttttcaattttttaaagta

SEQ ID NO: 43118 - DNA, 40 bp, Homo sapiens
actttaaaaaattgaaaaccaaagaaaaacatttaacata

SEQ ID NO: 43119 - DNA, 40 bp, Homo sapiens
tatgttaaatgtttttctttggttttcaattttttaaagt

SEQ ID NO: 43120 - DNA, 40 bp, Homo sapiens
ctttaaaaaattgaaaaccaaagaaaaacatttaacatag

SEQ ID NO: 43121 - DNA, 40 bp, Homo sapiens
ctatgttaaatgtttttctttggttttcaattttttaaag

SEQ ID NO: 43122 - DNA, 40 bp, Homo sapiens
tttaaaaaattgaaaaccaaagaaaaacatttaacatagc

SEQ ID NO: 43123 - DNA, 40 bp, Homo sapiens
gctatgttaaatgtttttctttggttttcaattttttaaa

SEQ ID NO: 43124 - DNA, 40 bp, Homo sapiens
ttaaaaaattgaaaaccaaagaaaaacatttaacatagca

SEQ ID NO: 43125 - DNA, 40 bp, Homo sapiens
tgctatgttaaatgtttttctttggttttcaattttttaa

SEQ ID NO: 43126 - DNA, 40 bp, Homo sapiens
taaaaaattgaaaaccaaagaaaaacatttaacatagcat

SEQ ID NO: 43127 - DNA, 40 bp, Homo sapiens
atgctatgttaaatgtttttctttggttttcaatttttta

SEQ ID NO: 43128 - DNA, 40 bp, Homo sapiens
aaaaaattgaaaaccaaagaaaaacatttaacatagcatc

SEQ ID NO: 43129 - DNA, 40 bp, Homo sapiens
gatgctatgttaaatgtttttctttggttttcaatttttt

SEQ ID NO: 43130 - DNA, 40 bp, Homo sapiens
aaaaattgaaaaccaaagaaaaacatttaacatagcatct

SEQ ID NO: 43131 - DNA, 40 bp, Homo sapiens
agatgctatgttaaatgtttttctttggttttcaattttt

SEQ ID NO: 43132 - DNA, 40 bp, Homo sapiens
aaaattgaaaaccaaagaaaaacatttaacatagcatcta

SEQ ID NO: 43133 - DNA, 40 bp, Homo sapiens
tagatgctatgttaaatgtttttctttggttttcaatttt

SEQ ID NO: 43134 - DNA, 40 bp, Homo sapiens
aaattgaaaaccaaagaaaaacatttaacatagcatctag

SEQ ID NO: 43135 - DNA, 40 bp, Homo sapiens
ctagatgctatgttaaatgtttttctttggttttcaattt

SEQ ID NO: 43136 - DNA, 40 bp, Homo sapiens
aattgaaaaccaaagaaaaacatttaacatagcatctagt

SEQ ID NO: 43137 - DNA, 40 bp, Homo sapiens
actagatgctatgttaaatgtttttctttggttttcaatt

SEQ ID NO: 43138 - DNA, 40 bp, Homo sapiens
attgaaaaccaaagaaaaacatttaacatagcatctagta

SEQ ID NO: 43139 - DNA, 40 bp, Homo sapiens
tactagatgctatgttaaatgtttttctttggttttcaat

SEQ ID NO: 43140 - DNA, 40 bp, Homo sapiens
ttgaaaaccaaagaaaaacatttaacatagcatctagtac

SEQ ID NO: 43141 - DNA, 40 bp, Homo sapiens
gtactagatgctatgttaaatgtttttctttggttttcaa

SEQ ID NO: 43142 - DNA, 40 bp, Homo sapiens
tgaaaaccaaagaaaaacatttaacatagcatctagtaca

SEQ ID NO: 43143 - DNA, 40 bp, Homo sapiens
tgtactagatgctatgttaaatgtttttctttggttttca

SEQ ID NO: 43144 - DNA, 40 bp, Homo sapiens
gaaaaccaaagaaaaacatttaacatagcatctagtacaa

SEQ ID NO: 43145 - DNA, 40 bp, Homo sapiens
ttgtactagatgctatgttaaatgtttttctttggttttc

SEQ ID NO: 43146 - DNA, 40 bp, Homo sapiens
aaaaccaaagaaaaacatttaacatagcatctagtacaaa

SEQ ID NO: 43147 - DNA, 40 bp, Homo sapiens
tttgtactagatgctatgttaaatgtttttctttggtttt

SEQ ID NO: 43148 - DNA, 40 bp, Homo sapiens
aaaccaaagaaaaacatttaacatagcatctagtacaaag

SEQ ID NO: 43149 - DNA, 40 bp, Homo sapiens
ctttgtactagatgctatgttaaatgtttttctttggttt

SEQ ID NO: 43150 - DNA, 40 bp, Homo sapiens
aaccaaagaaaaacatttaacatagcatctagtacaaaga

SEQ ID NO: 43151 - DNA, 40 bp, Homo sapiens
tctttgtactagatgctatgttaaatgtttttctttggtt

SEQ ID NO: 43152 - DNA, 40 bp, Homo sapiens
accaaagaaaaacatttaacatagcatctagtacaaagaa

SEQ ID NO: 43153 - DNA, 40 bp, Homo sapiens
ttctttgtactagatgctatgttaaatgtttttctttggt

SEQ ID NO: 43154 - DNA, 40 bp, Homo sapiens
ccaaagaaaaacatttaacatagcatctagtacaaagaaa

SEQ ID NO: 43155 - DNA, 40 bp, Homo sapiens
tttctttgtactagatgctatgttaaatgtttttctttgg

SEQ ID NO: 43156 - DNA, 40 bp, Homo sapiens
caaagaaaaacatttaacatagcatctagtacaaagaaaa

SEQ ID NO: 43157 - DNA, 40 bp, Homo sapiens
ttttctttgtactagatgctatgttaaatgtttttctttg

SEQ ID NO: 43158 - DNA, 40 bp, Homo sapiens
aaagaaaaacatttaacatagcatctagtacaaagaaaag

SEQ ID NO: 43159 - DNA, 40 bp, Homo sapiens
cttttctttgtactagatgctatgttaaatgtttttcttt

SEQ ID NO: 43160 - DNA, 40 bp, Homo sapiens
aagaaaaacatttaacatagcatctagtacaaagaaaaga

SEQ ID NO: 43161 - DNA, 40 bp, Homo sapiens
tcttttctttgtactagatgctatgttaaatgtttttctt

SEQ ID NO: 43162 - DNA, 40 bp, Homo sapiens
agaaaaacatttaacatagcatctagtacaaagaaaagag

SEQ ID NO: 43163 - DNA, 40 bp, Homo sapiens
ctcttttctttgtactagatgctatgttaaatgtttttct

SEQ ID NO: 43164 - DNA, 40 bp, Homo sapiens
gaaaaacatttaacatagcatctagtacaaagaaaagaga

SEQ ID NO: 43165 - DNA, 40 bp, Homo sapiens
tctcttttctttgtactagatgctatgttaaatgtttttc

SEQ ID NO: 43166 - DNA, 40 bp, Homo sapiens
aaaaacatttaacatagcatctagtacaaagaaaagagat

SEQ ID NO: 43167 - DNA, 40 bp, Homo sapiens
atctcttttctttgtactagatgctatgttaaatgttttt

SEQ ID NO: 43168 - DNA, 40 bp, Homo sapiens
aaaacatttaacatagcatctagtacaaagaaaagagata

SEQ ID NO: 43169 - DNA, 40 bp, Homo sapiens
tatctcttttctttgtactagatgctatgttaaatgtttt

SEQ ID NO: 43170 - DNA, 40 bp, Homo sapiens
aaacatttaacatagcatctagtacaaagaaaagagataa

SEQ ID NO: 43171 - DNA, 40 bp, Homo sapiens
ttatctcttttctttgtactagatgctatgttaaatgttt

SEQ ID NO: 43172 - DNA, 40 bp, Homo sapiens
aacatttaacatagcatctagtacaaagaaaagagataag

SEQ ID NO: 43173 - DNA, 40 bp, Homo sapiens
cttatctcttttctttgtactagatgctatgttaaatgtt

SEQ ID NO: 43174 - DNA, 40 bp, Homo sapiens
acatttaacatagcatctagtacaaagaaaagagataagc

SEQ ID NO: 43175 - DNA, 40 bp, Homo sapiens
gcttatctcttttctttgtactagatgctatgttaaatgt

SEQ ID NO: 43176 - DNA, 40 bp, Homo sapiens
catttaacatagcatctagtacaaagaaaagagataagca

SEQ ID NO: 43177 - DNA, 40 bp, Homo sapiens
tgcttatctcttttctttgtactagatgctatgttaaatg

SEQ ID NO: 43178 - DNA, 40 bp, Homo sapiens
atttaacatagcatctagtacaaagaaaagagataagcaa

SEQ ID NO: 43179 - DNA, 40 bp, Homo sapiens
ttgcttatctcttttctttgtactagatgctatgttaaat

SEQ ID NO: 43180 - DNA, 40 bp, Homo sapiens
tttaacatagcatctagtacaaagaaaagagataagcaag

SEQ ID NO: 43181 - DNA, 40 bp, Homo sapiens
cttgcttatctcttttctttgtactagatgctatgttaaa

SEQ ID NO: 43182 - DNA, 40 bp, Homo sapiens
ttaacatagcatctagtacaaagaaaagagataagcaaga

SEQ ID NO: 43183 - DNA, 40 bp, Homo sapiens
tcttgcttatctcttttctttgtactagatgctatgttaa

SEQ ID NO: 43184 - DNA, 40 bp, Homo sapiens
taacatagcatctagtacaaagaaaagagataagcaagag

SEQ ID NO: 43185 - DNA, 40 bp, Homo sapiens
ctcttgcttatctcttttctttgtactagatgctatgtta

SEQ ID NO: 43186 - DNA, 40 bp, Homo sapiens
aacatagcatctagtacaaagaaaagagataagcaagaga

SEQ ID NO: 43187 - DNA, 40 bp, Homo sapiens
tctcttgcttatctcttttctttgtactagatgctatgtt

SEQ ID NO: 43188 - DNA, 40 bp, Homo sapiens
acatagcatctagtacaaagaaaagagataagcaagagat

SEQ ID NO: 43189 - DNA, 40 bp, Homo sapiens
atctcttgcttatctcttttctttgtactagatgctatgt

SEQ ID NO: 43190 - DNA, 40 bp, Homo sapiens
catagcatctagtacaaagaaaagagataagcaagagata

SEQ ID NO: 43191 - DNA, 40 bp, Homo sapiens
tatctcttgcttatctcttttctttgtactagatgctatg

SEQ ID NO: 43192 - DNA, 40 bp, Homo sapiens
atagcatctagtacaaagaaaagagataagcaagagataa

SEQ ID NO: 43193 - DNA, 40 bp, Homo sapiens
ttatctcttgcttatctcttttctttgtactagatgctat

SEQ ID NO: 43194 - DNA, 40 bp, Homo sapiens
tagcatctagtacaaagaaaagagataagcaagagataaa

SEQ ID NO: 43195 - DNA, 40 bp, Homo sapiens
tttatctcttgcttatctcttttctttgtactagatgcta

SEQ ID NO: 43196 - DNA, 40 bp, Homo sapiens
agcatctagtacaaagaaaagagataagcaagagataaat

SEQ ID NO: 43197 - DNA, 40 bp, Homo sapiens
atttatctcttgcttatctcttttctttgtactagatgct

SEQ ID NO: 43198 - DNA, 40 bp, Homo sapiens
gcatctagtacaaagaaaagagataagcaagagataaatg

SEQ ID NO: 43199 - DNA, 40 bp, Homo sapiens
catttatctcttgcttatctcttttctttgtactagatgc

SEQ ID NO: 43200 - DNA, 40 bp, Homo sapiens
catctagtacaaagaaaagagataagcaagagataaatgt

SEQ ID NO: 43201 - DNA, 40 bp, Homo sapiens
acatttatctcttgcttatctcttttctttgtactagatg

SEQ ID NO: 43202 - DNA, 40 bp, Homo sapiens
atctagtacaaagaaaagagataagcaagagataaatgtc

SEQ ID NO: 43203 - DNA, 40 bp, Homo sapiens
gacatttatctcttgcttatctcttttctttgtactagat

SEQ ID NO: 43204 - DNA, 40 bp, Homo sapiens
tctagtacaaagaaaagagataagcaagagataaatgtct

SEQ ID NO: 43205 - DNA, 40 bp, Homo sapiens
agacatttatctcttgcttatctcttttctttgtactaga

SEQ ID NO: 43206 - DNA, 40 bp, Homo sapiens
ctagtacaaagaaaagagataagcaagagataaatgtctt

SEQ ID NO: 43207 - DNA, 40 bp, Homo sapiens
aagacatttatctcttgcttatctcttttctttgtactag

SEQ ID NO: 43208 - DNA, 40 bp, Homo sapiens
tagtacaaagaaaagagataagcaagagataaatgtcttt

SEQ ID NO: 43209 - DNA, 40 bp, Homo sapiens
aaagacatttatctcttgcttatctcttttctttgtacta

SEQ ID NO: 43210 - DNA, 40 bp, Homo sapiens
agtacaaagaaaagagataagcaagagataaatgtctttt

SEQ ID NO: 43211 - DNA, 40 bp, Homo sapiens
aaaagacatttatctcttgcttatctcttttctttgtact

SEQ ID NO: 43212 - DNA, 40 bp, Homo sapiens
gtacaaagaaaagagataagcaagagataaatgtcttttt

SEQ ID NO: 43213 - DNA, 40 bp, Homo sapiens
aaaaagacatttatctcttgcttatctcttttctttgtac

SEQ ID NO: 43214 - DNA, 40 bp, Homo sapiens
tacaaagaaaagagataagcaagagataaatgtctttttt

SEQ ID NO: 43215 - DNA, 40 bp, Homo sapiens
aaaaaagacatttatctcttgcttatctcttttctttgta

SEQ ID NO: 43216 - DNA, 40 bp, Homo sapiens
acaaagaaaagagataagcaagagataaatgtcttttttg

SEQ ID NO: 43217 - DNA, 40 bp, Homo sapiens
caaaaaagacatttatctcttgcttatctcttttctttgt

SEQ ID NO: 43218 - DNA, 40 bp, Homo sapiens
caaagaaaagagataagcaagagataaatgtcttttttgg

SEQ ID NO: 43219 - DNA, 40 bp, Homo sapiens
ccaaaaaagacatttatctcttgcttatctcttttctttg

SEQ ID NO: 43220 - DNA, 40 bp, Homo sapiens
aaagaaaagagataagcaagagataaatgtcttttttggg

SEQ ID NO: 43221 - DNA, 40 bp, Homo sapiens
cccaaaaaagacatttatctcttgcttatctcttttcttt

SEQ ID NO: 43222 - DNA, 40 bp, Homo sapiens
aagaaaagagataagcaagagataaatgtcttttttggga

SEQ ID NO: 43223 - DNA, 40 bp, Homo sapiens
tcccaaaaaagacatttatctcttgcttatctcttttctt

SEQ ID NO: 43224 - DNA, 40 bp, Homo sapiens
agaaaagagataagcaagagataaatgtcttttttgggac

SEQ ID NO: 43225 - DNA, 40 bp, Homo sapiens
gtcccaaaaaagacatttatctcttgcttatctcttttct

SEQ ID NO: 43226 - DNA, 40 bp, Homo sapiens
gaaaagagataagcaagagataaatgtcttttttgggaca

SEQ ID NO: 43227 - DNA, 40 bp, Homo sapiens
tgtcccaaaaaagacatttatctcttgcttatctcttttc

SEQ ID NO: 43228 - DNA, 40 bp, Homo sapiens
aaaagagataagcaagagataaatgtcttttttgggacag

SEQ ID NO: 43229 - DNA, 40 bp, Homo sapiens
ctgtcccaaaaaagacatttatctcttgcttatctctttt

SEQ ID NO: 43230 - DNA, 40 bp, Homo sapiens
aaagagataagcaagagataaatgtcttttttgggacaga

SEQ ID NO: 43231 - DNA, 40 bp, Homo sapiens
tctgtcccaaaaaagacatttatctcttgcttatctcttt

SEQ ID NO: 43232 - DNA, 40 bp, Homo sapiens
aagagataagcaagagataaatgtcttttttgggacagag

SEQ ID NO: 43233 - DNA, 40 bp, Homo sapiens
ctctgtcccaaaaaagacatttatctcttgcttatctctt

SEQ ID NO: 43234 - DNA, 40 bp, Homo sapiens
agagataagcaagagataaatgtcttttttgggacagagt

SEQ ID NO: 43235 - DNA, 40 bp, Homo sapiens
actctgtcccaaaaaagacatttatctcttgcttatctct

SEQ ID NO: 43236 - DNA, 40 bp, Homo sapiens
gagataagcaagagataaatgtcttttttgggacagagtt

SEQ ID NO: 43237 - DNA, 40 bp, Homo sapiens
aactctgtcccaaaaaagacatttatctcttgcttatctc

SEQ ID NO: 43238 - DNA, 40 bp, Homo sapiens
agataagcaagagataaatgtcttttttgggacagagttt

SEQ ID NO: 43239 - DNA, 40 bp, Homo sapiens
aaactctgtcccaaaaaagacatttatctcttgcttatct

SEQ ID NO: 43240 - DNA, 40 bp, Homo sapiens
gataagcaagagataaatgtcttttttgggacagagtttt

SEQ ID NO: 43241 - DNA, 40 bp, Homo sapiens
aaaactctgtcccaaaaaagacatttatctcttgcttatc

SEQ ID NO: 43242 - DNA, 40 bp, Homo sapiens
ataagcaagagataaatgtcttttttgggacagagttttg

SEQ ID NO: 43243 - DNA, 40 bp, Homo sapiens
caaaactctgtcccaaaaaagacatttatctcttgcttat

SEQ ID NO: 43244 - DNA, 40 bp, Homo sapiens
taagcaagagataaatgtcttttttgggacagagttttgc

SEQ ID NO: 43245 - DNA, 40 bp, Homo sapiens
gcaaaactctgtcccaaaaaagacatttatctcttgctta

SEQ ID NO: 43246 - DNA, 40 bp, Homo sapiens
aagcaagagataaatgtcttttttgggacagagttttgct

SEQ ID NO: 43247 - DNA, 40 bp, Homo sapiens
agcaaaactctgtcccaaaaaagacatttatctcttgctt

SEQ ID NO: 43248 - DNA, 40 bp, Homo sapiens
agcaagagataaatgtcttttttgggacagagttttgctg

SEQ ID NO: 43249 - DNA, 40 bp, Homo sapiens
cagcaaaactctgtcccaaaaaagacatttatctcttgct

SEQ ID NO: 43250 - DNA, 40 bp, Homo sapiens
gcaagagataaatgtcttttttgggacagagttttgctgt

SEQ ID NO: 43251 - DNA, 40 bp, Homo sapiens
acagcaaaactctgtcccaaaaaagacatttatctcttgc

SEQ ID NO: 43252 - DNA, 40 bp, Homo sapiens
caagagataaatgtcttttttgggacagagttttgctgtt

SEQ ID NO: 43253 - DNA, 40 bp, Homo sapiens
aacagcaaaactctgtcccaaaaaagacatttatctcttg

SEQ ID NO: 43254 - DNA, 40 bp, Homo sapiens
aagagataaatgtcttttttgggacagagttttgctgttg

SEQ ID NO: 43255 - DNA, 40 bp, Homo sapiens
caacagcaaaactctgtcccaaaaaagacatttatctctt

SEQ ID NO: 43256 - DNA, 40 bp, Homo sapiens
agagataaatgtcttttttgggacagagttttgctgttgt

SEQ ID NO: 43257 - DNA, 40 bp, Homo sapiens
acaacagcaaaactctgtcccaaaaaagacatttatctct

SEQ ID NO: 43258 - DNA, 40 bp, Homo sapiens
gagataaatgtcttttttgggacagagttttgctgttgtt

SEQ ID NO: 43259 - DNA, 40 bp, Homo sapiens
aacaacagcaaaactctgtcccaaaaaagacatttatctc

SEQ ID NO: 43260 - DNA, 40 bp, Homo sapiens
agataaatgtcttttttgggacagagttttgctgttgttg

SEQ ID NO: 43261 - DNA, 40 bp, Homo sapiens
caacaacagcaaaactctgtcccaaaaaagacatttatct

SEQ ID NO: 43262 - DNA, 40 bp, Homo sapiens
gataaatgtcttttttgggacagagttttgctgttgttgc

SEQ ID NO: 43263 - DNA, 40 bp, Homo sapiens
gcaacaacagcaaaactctgtcccaaaaaagacatttatc

SEQ ID NO: 43264 - DNA, 40 bp, Homo sapiens
ataaatgtcttttttgggacagagttttgctgttgttgcc

SEQ ID NO: 43265 - DNA, 40 bp, Homo sapiens
ggcaacaacagcaaaactctgtcccaaaaaagacatttat

SEQ ID NO: 43266 - DNA, 40 bp, Homo sapiens
taaatgtcttttttgggacagagttttgctgttgttgccc

SEQ ID NO: 43267 - DNA, 40 bp, Homo sapiens
gggcaacaacagcaaaactctgtcccaaaaaagacattta

SEQ ID NO: 43268 - DNA, 40 bp, Homo sapiens
aaatgtcttttttgggacagagttttgctgttgttgccca

SEQ ID NO: 43269 - DNA, 40 bp, Homo sapiens
tgggcaacaacagcaaaactctgtcccaaaaaagacattt

SEQ ID NO: 43270 - DNA, 40 bp, Homo sapiens
aatgtcttttttgggacagagttttgctgttgttgcccag

SEQ ID NO: 43271 - DNA, 40 bp, Homo sapiens
ctgggcaacaacagcaaaactctgtcccaaaaaagacatt

SEQ ID NO: 43272 - DNA, 40 bp, Homo sapiens
atgtcttttttgggacagagttttgctgttgttgcccagg

SEQ ID NO: 43273 - DNA, 40 bp, Homo sapiens
cctgggcaacaacagcaaaactctgtcccaaaaaagacat

SEQ ID NO: 43274 - DNA, 40 bp, Homo sapiens
tgtcttttttgggacagagttttgctgttgttgcccaggc

SEQ ID NO: 43275 - DNA, 40 bp, Homo sapiens
gcctgggcaacaacagcaaaactctgtcccaaaaaagaca

SEQ ID NO: 43276 - DNA, 40 bp, Homo sapiens
gtcttttttgggacagagttttgctgttgttgcccaggct

SEQ ID NO: 43277 - DNA, 40 bp, Homo sapiens
agcctgggcaacaacagcaaaactctgtcccaaaaaagac

SEQ ID NO: 43278 - DNA, 40 bp, Homo sapiens
tcttttttgggacagagttttgctgttgttgcccaggctg

SEQ ID NO: 43279 - DNA, 40 bp, Homo sapiens
cagcctgggcaacaacagcaaaactctgtcccaaaaaaga

SEQ ID NO: 43280 - DNA, 40 bp, Homo sapiens
cttttttgggacagagttttgctgttgttgcccaggctgg

SEQ ID NO: 43281 - DNA, 40 bp, Homo sapiens
ccagcctgggcaacaacagcaaaactctgtcccaaaaaag

SEQ ID NO: 43282 - DNA, 40 bp, Homo sapiens
ttttttgggacagagttttgctgttgttgcccaggctgga

SEQ ID NO: 43283 - DNA, 40 bp, Homo sapiens
tccagcctgggcaacaacagcaaaactctgtcccaaaaaa

SEQ ID NO: 43284 - DNA, 40 bp, Homo sapiens
tttttgggacagagttttgctgttgttgcccaggctggag

SEQ ID NO: 43285 - DNA, 40 bp, Homo sapiens
ctccagcctgggcaacaacagcaaaactctgtcccaaaaa

SEQ ID NO: 43286 - DNA, 40 bp, Homo sapiens
ttttgggacagagttttgctgttgttgcccaggctggagt

SEQ ID NO: 43287 - DNA, 40 bp, Homo sapiens
actccagcctgggcaacaacagcaaaactctgtcccaaaa

SEQ ID NO: 43288 - DNA, 40 bp, Homo sapiens
tttgggacagagttttgctgttgttgcccaggctggagtg

SEQ ID NO: 43289 - DNA, 40 bp, Homo sapiens
cactccagcctgggcaacaacagcaaaactctgtcccaaa

SEQ ID NO: 43290 - DNA, 40 bp, Homo sapiens
ttgggacagagttttgctgttgttgcccaggctggagtgc

SEQ ID NO: 43291 - DNA, 40 bp, Homo sapiens
gcactccagcctgggcaacaacagcaaaactctgtcccaa

SEQ ID NO: 43292 - DNA, 40 bp, Homo sapiens
tgggacagagttttgctgttgttgcccaggctggagtgca

SEQ ID NO: 43293 - DNA, 40 bp, Homo sapiens
tgcactccagcctgggcaacaacagcaaaactctgtccca

SEQ ID NO: 43294 - DNA, 40 bp, Homo sapiens
gggacagagttttgctgttgttgcccaggctggagtgcaa

SEQ ID NO: 43295 - DNA, 40 bp, Homo sapiens
ttgcactccagcctgggcaacaacagcaaaactctgtccc

SEQ ID NO: 43296 - DNA, 40 bp, Homo sapiens
ggacagagttttgctgttgttgcccaggctggagtgcaat

SEQ ID NO: 43297 - DNA, 40 bp, Homo sapiens
attgcactccagcctgggcaacaacagcaaaactctgtcc

SEQ ID NO: 43298 - DNA, 40 bp, Homo sapiens
gacagagttttgctgttgttgcccaggctggagtgcaatg

SEQ ID NO: 43299 - DNA, 40 bp, Homo sapiens
cattgcactccagcctgggcaacaacagcaaaactctgtc

SEQ ID NO: 43300 - DNA, 40 bp, Homo sapiens
acagagttttgctgttgttgcccaggctggagtgcaatgg

SEQ ID NO: 43301 - DNA, 40 bp, Homo sapiens
ccattgcactccagcctgggcaacaacagcaaaactctgt

SEQ ID NO: 43302 - DNA, 40 bp, Homo sapiens
cagagttttgctgttgttgcccaggctggagtgcaatggc

SEQ ID NO: 43303 - DNA, 40 bp, Homo sapiens
gccattgcactccagcctgggcaacaacagcaaaactctg

SEQ ID NO: 43304 - DNA, 40 bp, Homo sapiens
agagttttgctgttgttgcccaggctggagtgcaatggca

SEQ ID NO: 43305 - DNA, 40 bp, Homo sapiens
tgccattgcactccagcctgggcaacaacagcaaaactct

SEQ ID NO: 43306 - DNA, 40 bp, Homo sapiens
gagttttgctgttgttgcccaggctggagtgcaatggcac

SEQ ID NO: 43307 - DNA, 40 bp, Homo sapiens
gtgccattgcactccagcctgggcaacaacagcaaaactc

SEQ ID NO: 43308 - DNA, 40 bp, Homo sapiens
agttttgctgttgttgcccaggctggagtgcaatggcaca

SEQ ID NO: 43309 - DNA, 40 bp, Homo sapiens
tgtgccattgcactccagcctgggcaacaacagcaaaact

SEQ ID NO: 43310 - DNA, 40 bp, Homo sapiens
gttttgctgttgttgcccaggctggagtgcaatggcacaa

SEQ ID NO: 43311 - DNA, 40 bp, Homo sapiens
ttgtgccattgcactccagcctgggcaacaacagcaaaac

SEQ ID NO: 43312 - DNA, 40 bp, Homo sapiens
ttttgctgttgttgcccaggctggagtgcaatggcacaat

SEQ ID NO: 43313 - DNA, 40 bp, Homo sapiens
attgtgccattgcactccagcctgggcaacaacagcaaaa

SEQ ID NO: 43314 - DNA, 40 bp, Homo sapiens
tttgctgttgttgcccaggctggagtgcaatggcacaatc

SEQ ID NO: 43315 - DNA, 40 bp, Homo sapiens
gattgtgccattgcactccagcctgggcaacaacagcaaa

SEQ ID NO: 43316 - DNA, 40 bp, Homo sapiens
ttgctgttgttgcccaggctggagtgcaatggcacaatct

SEQ ID NO: 43317 - DNA, 40 bp, Homo sapiens
agattgtgccattgcactccagcctgggcaacaacagcaa

SEQ ID NO: 43318 - DNA, 40 bp, Homo sapiens
tgctgttgttgcccaggctggagtgcaatggcacaatctc

SEQ ID NO: 43319 - DNA, 40 bp, Homo sapiens
gagattgtgccattgcactccagcctgggcaacaacagca

SEQ ID NO: 43320 - DNA, 40 bp, Homo sapiens
gctgttgttgcccaggctggagtgcaatggcacaatctca

SEQ ID NO: 43321 - DNA, 40 bp, Homo sapiens
tgagattgtgccattgcactccagcctgggcaacaacagc

SEQ ID NO: 43322 - DNA, 40 bp, Homo sapiens
ctgttgttgcccaggctggagtgcaatggcacaatctcag

SEQ ID NO: 43323 - DNA, 40 bp, Homo sapiens
ctgagattgtgccattgcactccagcctgggcaacaacag

SEQ ID NO: 43324 - DNA, 40 bp, Homo sapiens
tgttgttgcccaggctggagtgcaatggcacaatctcagc

SEQ ID NO: 43325 - DNA, 40 bp, Homo sapiens
gctgagattgtgccattgcactccagcctgggcaacaaca

SEQ ID NO: 43326 - DNA, 40 bp, Homo sapiens
gttgttgcccaggctggagtgcaatggcacaatctcagct

SEQ ID NO: 43327 - DNA, 40 bp, Homo sapiens
agctgagattgtgccattgcactccagcctgggcaacaac

SEQ ID NO: 43328 - DNA, 40 bp, Homo sapiens
ttgttgcccaggctggagtgcaatggcacaatctcagctc

SEQ ID NO: 43329 - DNA, 40 bp, Homo sapiens
gagctgagattgtgccattgcactccagcctgggcaacaa

SEQ ID NO: 43330 - DNA, 40 bp, Homo sapiens
tgttgcccaggctggagtgcaatggcacaatctcagctca

SEQ ID NO: 43331 - DNA, 40 bp, Homo sapiens
tgagctgagattgtgccattgcactccagcctgggcaaca

SEQ ID NO: 43332 - DNA, 40 bp, Homo sapiens
gttgcccaggctggagtgcaatggcacaatctcagctcac

SEQ ID NO: 43333 - DNA, 40 bp, Homo sapiens
gtgagctgagattgtgccattgcactccagcctgggcaac

SEQ ID NO: 43334 - DNA, 40 bp, Homo sapiens
ttgcccaggctggagtgcaatggcacaatctcagctcacc

SEQ ID NO: 43335 - DNA, 40 bp, Homo sapiens
ggtgagctgagattgtgccattgcactccagcctgggcaa

SEQ ID NO: 43336 - DNA, 40 bp, Homo sapiens
tgcccaggctggagtgcaatggcacaatctcagctcaccg

SEQ ID NO: 43337 - DNA, 40 bp, Homo sapiens
cggtgagctgagattgtgccattgcactccagcctgggca

SEQ ID NO: 43338 - DNA, 40 bp, Homo sapiens
gcccaggctggagtgcaatggcacaatctcagctcaccgt

SEQ ID NO: 43339 - DNA, 40 bp, Homo sapiens
acggtgagctgagattgtgccattgcactccagcctgggc

SEQ ID NO: 43340 - DNA, 40 bp, Homo sapiens
cccaggctggagtgcaatggcacaatctcagctcaccgta

SEQ ID NO: 43341 - DNA, 40 bp, Homo sapiens
tacggtgagctgagattgtgccattgcactccagcctggg

SEQ ID NO: 43342 - DNA, 40 bp, Homo sapiens
ccaggctggagtgcaatggcacaatctcagctcaccgtaa

SEQ ID NO: 43343 - DNA, 40 bp, Homo sapiens
ttacggtgagctgagattgtgccattgcactccagcctgg

SEQ ID NO: 43344 - DNA, 40 bp, Homo sapiens
caggctggagtgcaatggcacaatctcagctcaccgtaac

SEQ ID NO: 43345 - DNA, 40 bp, Homo sapiens
gttacggtgagctgagattgtgccattgcactccagcctg

SEQ ID NO: 43346 - DNA, 40 bp, Homo sapiens
aggctggagtgcaatggcacaatctcagctcaccgtaacc

SEQ ID NO: 43347 - DNA, 40 bp, Homo sapiens
ggttacggtgagctgagattgtgccattgcactccagcct

SEQ ID NO: 43348 - DNA, 40 bp, Homo sapiens
ggctggagtgcaatggcacaatctcagctcaccgtaacct

SEQ ID NO: 43349 - DNA, 40 bp, Homo sapiens
aggttacggtgagctgagattgtgccattgcactccagcc

SEQ ID NO: 43350 - DNA, 40 bp, Homo sapiens
gctggagtgcaatggcacaatctcagctcaccgtaacctc

SEQ ID NO: 43351 - DNA, 40 bp, Homo sapiens
gaggttacggtgagctgagattgtgccattgcactccagc

SEQ ID NO: 43352 - DNA, 40 bp, Homo sapiens
ctggagtgcaatggcacaatctcagctcaccgtaacctcc

SEQ ID NO: 43353 - DNA, 40 bp, Homo sapiens
ggaggttacggtgagctgagattgtgccattgcactccag

SEQ ID NO: 43354 - DNA, 40 bp, Homo sapiens
tggagtgcaatggcacaatctcagctcaccgtaacctcca

SEQ ID NO: 43355 - DNA, 40 bp, Homo sapiens
tggaggttacggtgagctgagattgtgccattgcactcca

SEQ ID NO: 43356 - DNA, 40 bp, Homo sapiens
ggagtgcaatggcacaatctcagctcaccgtaacctccac

SEQ ID NO: 43357 - DNA, 40 bp, Homo sapiens
gtggaggttacggtgagctgagattgtgccattgcactcc

SEQ ID NO: 43358 - DNA, 40 bp, Homo sapiens
gagtgcaatggcacaatctcagctcaccgtaacctccacc

SEQ ID NO: 43359 - DNA, 40 bp, Homo sapiens
ggtggaggttacggtgagctgagattgtgccattgcactc

SEQ ID NO: 43360 - DNA, 40 bp, Homo sapiens
agtgcaatggcacaatctcagctcaccgtaacctccacct

SEQ ID NO: 43361 - DNA, 40 bp, Homo sapiens
aggtggaggttacggtgagctgagattgtgccattgcact

SEQ ID NO: 43362 - DNA, 40 bp, Homo sapiens
gtgcaatggcacaatctcagctcaccgtaacctccacctc

SEQ ID NO: 43363 - DNA, 40 bp, Homo sapiens
gaggtggaggttacggtgagctgagattgtgccattgcac

SEQ ID NO: 43364 - DNA, 40 bp, Homo sapiens
tgcaatggcacaatctcagctcaccgtaacctccacctcc

SEQ ID NO: 43365 - DNA, 40 bp, Homo sapiens
ggaggtggaggttacggtgagctgagattgtgccattgca

SEQ ID NO: 43366 - DNA, 40 bp, Homo sapiens
gcaatggcacaatctcagctcaccgtaacctccacctccc

SEQ ID NO: 43367 - DNA, 40 bp, Homo sapiens
gggaggtggaggttacggtgagctgagattgtgccattgc

SEQ ID NO: 43368 - DNA, 40 bp, Homo sapiens
caatggcacaatctcagctcaccgtaacctccacctcccg

SEQ ID NO: 43369 - DNA, 40 bp, Homo sapiens
cgggaggtggaggttacggtgagctgagattgtgccattg

SEQ ID NO: 43370 - DNA, 40 bp, Homo sapiens
aatggcacaatctcagctcaccgtaacctccacctcccgg

SEQ ID NO: 43371 - DNA, 40 bp, Homo sapiens
ccgggaggtggaggttacggtgagctgagattgtgccatt

SEQ ID NO: 43372 - DNA, 40 bp, Homo sapiens
atggcacaatctcagctcaccgtaacctccacctcccggg

SEQ ID NO: 43373 - DNA, 40 bp, Homo sapiens
cccgggaggtggaggttacggtgagctgagattgtgccat

SEQ ID NO: 43374 - DNA, 40 bp, Homo sapiens
tggcacaatctcagctcaccgtaacctccacctcccgggt

SEQ ID NO: 43375 - DNA, 40 bp, Homo sapiens
acccgggaggtggaggttacggtgagctgagattgtgcca

SEQ ID NO: 43376 - DNA, 40 bp, Homo sapiens
ggcacaatctcagctcaccgtaacctccacctcccgggtt

SEQ ID NO: 43377 - DNA, 40 bp, Homo sapiens
aacccgggaggtggaggttacggtgagctgagattgtgcc

SEQ ID NO: 43378 - DNA, 40 bp, Homo sapiens
gcacaatctcagctcaccgtaacctccacctcccgggttc

SEQ ID NO: 43379 - DNA, 40 bp, Homo sapiens
gaacccgggaggtggaggttacggtgagctgagattgtgc

SEQ ID NO: 43380 - DNA, 40 bp, Homo sapiens
cacaatctcagctcaccgtaacctccacctcccgggttca

SEQ ID NO: 43381 - DNA, 40 bp, Homo sapiens
tgaacccgggaggtggaggttacggtgagctgagattgtg

SEQ ID NO: 43382 - DNA, 40 bp, Homo sapiens
acaatctcagctcaccgtaacctccacctcccgggttcaa

SEQ ID NO: 43383 - DNA, 40 bp, Homo sapiens
ttgaacccgggaggtggaggttacggtgagctgagattgt

SEQ ID NO: 43384 - DNA, 40 bp, Homo sapiens
caatctcagctcaccgtaacctccacctcccgggttcaag

SEQ ID NO: 43385 - DNA, 40 bp, Homo sapiens
cttgaacccgggaggtggaggttacggtgagctgagattg

SEQ ID NO: 43386 - DNA, 40 bp, Homo sapiens
aatctcagctcaccgtaacctccacctcccgggttcaagt

SEQ ID NO: 43387 - DNA, 40 bp, Homo sapiens
acttgaacccgggaggtggaggttacggtgagctgagatt

SEQ ID NO: 43388 - DNA, 40 bp, Homo sapiens
atctcagctcaccgtaacctccacctcccgggttcaagtg

SEQ ID NO: 43389 - DNA, 40 bp, Homo sapiens
cacttgaacccgggaggtggaggttacggtgagctgagat

SEQ ID NO: 43390 - DNA, 40 bp, Homo sapiens
tctcagctcaccgtaacctccacctcccgggttcaagtga

SEQ ID NO: 43391 - DNA, 40 bp, Homo sapiens
tcacttgaacccgggaggtggaggttacggtgagctgaga

SEQ ID NO: 43392 - DNA, 40 bp, Homo sapiens
ctcagctcaccgtaacctccacctcccgggttcaagtgat

SEQ ID NO: 43393 - DNA, 40 bp, Homo sapiens
atcacttgaacccgggaggtggaggttacggtgagctgag

SEQ ID NO: 43394 - DNA, 40 bp, Homo sapiens
tcagctcaccgtaacctccacctcccgggttcaagtgatt

SEQ ID NO: 43395 - DNA, 40 bp, Homo sapiens
aatcacttgaacccgggaggtggaggttacggtgagctga

SEQ ID NO: 43396 - DNA, 40 bp, Homo sapiens
cagctcaccgtaacctccacctcccgggttcaagtgattc

SEQ ID NO: 43397 - DNA, 40 bp, Homo sapiens
gaatcacttgaacccgggaggtggaggttacggtgagctg

SEQ ID NO: 43398 - DNA, 40 bp, Homo sapiens
agctcaccgtaacctccacctcccgggttcaagtgattct

SEQ ID NO: 43399 - DNA, 40 bp, Homo sapiens
agaatcacttgaacccgggaggtggaggttacggtgagct

SEQ ID NO: 43400 - DNA, 40 bp, Homo sapiens
gctcaccgtaacctccacctcccgggttcaagtgattctc

SEQ ID NO: 43401 - DNA, 40 bp, Homo sapiens
gagaatcacttgaacccgggaggtggaggttacggtgagc

SEQ ID NO: 43402 - DNA, 40 bp, Homo sapiens
ctcaccgtaacctccacctcccgggttcaagtgattctcc

SEQ ID NO: 43403 - DNA, 40 bp, Homo sapiens
ggagaatcacttgaacccgggaggtggaggttacggtgag

SEQ ID NO: 43404 - DNA, 40 bp, Homo sapiens
tcaccgtaacctccacctcccgggttcaagtgattctcct

SEQ ID NO: 43405 - DNA, 40 bp, Homo sapiens
aggagaatcacttgaacccgggaggtggaggttacggtga

SEQ ID NO: 43406 - DNA, 40 bp, Homo sapiens
caccgtaacctccacctcccgggttcaagtgattctcctg

SEQ ID NO: 43407 - DNA, 40 bp, Homo sapiens
caggagaatcacttgaacccgggaggtggaggttacggtg

SEQ ID NO: 43408 - DNA, 40 bp, Homo sapiens
accgtaacctccacctcccgggttcaagtgattctcctgc

SEQ ID NO: 43409 - DNA, 40 bp, Homo sapiens
gcaggagaatcacttgaacccgggaggtggaggttacggt

SEQ ID NO: 43410 - DNA, 40 bp, Homo sapiens
ccgtaacctccacctcccgggttcaagtgattctcctgcc

SEQ ID NO: 43411 - DNA, 40 bp, Homo sapiens
ggcaggagaatcacttgaacccgggaggtggaggttacgg

SEQ ID NO: 43412 - DNA, 40 bp, Homo sapiens
cgtaacctccacctcccgggttcaagtgattctcctgcct

SEQ ID NO: 43413 - DNA, 40 bp, Homo sapiens
aggcaggagaatcacttgaacccgggaggtggaggttacg

SEQ ID NO: 43414 - DNA, 40 bp, Homo sapiens
gtaacctccacctcccgggttcaagtgattctcctgcctc

SEQ ID NO: 43415 - DNA, 40 bp, Homo sapiens
gaggcaggagaatcacttgaacccgggaggtggaggttac

SEQ ID NO: 43416 - DNA, 40 bp, Homo sapiens
taacctccacctcccgggttcaagtgattctcctgcctca

SEQ ID NO: 43417 - DNA, 40 bp, Homo sapiens
tgaggcaggagaatcacttgaacccgggaggtggaggtta

SEQ ID NO: 43418 - DNA, 40 bp, Homo sapiens
aacctccacctcccgggttcaagtgattctcctgcctcag

SEQ ID NO: 43419 - DNA, 40 bp, Homo sapiens
ctgaggcaggagaatcacttgaacccgggaggtggaggtt

SEQ ID NO: 43420 - DNA, 40 bp, Homo sapiens
acctccacctcccgggttcaagtgattctcctgcctcagc

SEQ ID NO: 43421 - DNA, 40 bp, Homo sapiens
gctgaggcaggagaatcacttgaacccgggaggtggaggt

SEQ ID NO: 43422 - DNA, 40 bp, Homo sapiens
cctccacctcccgggttcaagtgattctcctgcctcagcc

SEQ ID NO: 43423 - DNA, 40 bp, Homo sapiens
ggctgaggcaggagaatcacttgaacccgggaggtggagg

SEQ ID NO: 43424 - DNA, 40 bp, Homo sapiens
ctccacctcccgggttcaagtgattctcctgcctcagcct

SEQ ID NO: 43425 - DNA, 40 bp, Homo sapiens
aggctgaggcaggagaatcacttgaacccgggaggtggag

SEQ ID NO: 43426 - DNA, 40 bp, Homo sapiens
tccacctcccgggttcaagtgattctcctgcctcagcctc

SEQ ID NO: 43427 - DNA, 40 bp, Homo sapiens
gaggctgaggcaggagaatcacttgaacccgggaggtgga

SEQ ID NO: 43428 - DNA, 40 bp, Homo sapiens
ccacctcccgggttcaagtgattctcctgcctcagcctcc

SEQ ID NO: 43429 - DNA, 40 bp, Homo sapiens
ggaggctgaggcaggagaatcacttgaacccgggaggtgg

SEQ ID NO: 43430 - DNA, 40 bp, Homo sapiens
cacctcccgggttcaagtgattctcctgcctcagcctccc

SEQ ID NO: 43431 - DNA, 40 bp, Homo sapiens
gggaggctgaggcaggagaatcacttgaacccgggaggtg

SEQ ID NO: 43432 - DNA, 40 bp, Homo sapiens
acctcccgggttcaagtgattctcctgcctcagcctcccg

SEQ ID NO: 43433 - DNA, 40 bp, Homo sapiens
cgggaggctgaggcaggagaatcacttgaacccgggaggt

SEQ ID NO: 43434 - DNA, 40 bp, Homo sapiens
cctcccgggttcaagtgattctcctgcctcagcctcccga

SEQ ID NO: 43435 - DNA, 40 bp, Homo sapiens
tcgggaggctgaggcaggagaatcacttgaacccgggagg

SEQ ID NO: 43436 - DNA, 40 bp, Homo sapiens
ctcccgggttcaagtgattctcctgcctcagcctcccgag

SEQ ID NO: 43437 - DNA, 40 bp, Homo sapiens
ctcgggaggctgaggcaggagaatcacttgaacccgggag

SEQ ID NO: 43438 - DNA, 40 bp, Homo sapiens
tcccgggttcaagtgattctcctgcctcagcctcccgagt

SEQ ID NO: 43439 - DNA, 40 bp, Homo sapiens
actcgggaggctgaggcaggagaatcacttgaacccggga

SEQ ID NO: 43440 - DNA, 40 bp, Homo sapiens
cccgggttcaagtgattctcctgcctcagcctcccgagta

SEQ ID NO: 43441 - DNA, 40 bp, Homo sapiens
tactcgggaggctgaggcaggagaatcacttgaacccggg

SEQ ID NO: 43442 - DNA, 40 bp, Homo sapiens
ccgggttcaagtgattctcctgcctcagcctcccgagtag

SEQ ID NO: 43443 - DNA, 40 bp, Homo sapiens
ctactcgggaggctgaggcaggagaatcacttgaacccgg

SEQ ID NO: 43444 - DNA, 40 bp, Homo sapiens
cgggttcaagtgattctcctgcctcagcctcccgagtagc

SEQ ID NO: 43445 - DNA, 40 bp, Homo sapiens
gctactcgggaggctgaggcaggagaatcacttgaacccg

SEQ ID NO: 43446 - DNA, 40 bp, Homo sapiens
gggttcaagtgattctcctgcctcagcctcccgagtagct

SEQ ID NO: 43447 - DNA, 40 bp, Homo sapiens
agctactcgggaggctgaggcaggagaatcacttgaaccc

SEQ ID NO: 43448 - DNA, 40 bp, Homo sapiens
ggttcaagtgattctcctgcctcagcctcccgagtagctg

SEQ ID NO: 43449 - DNA, 40 bp, Homo sapiens
cagctactcgggaggctgaggcaggagaatcacttgaacc

SEQ ID NO: 43450 - DNA, 40 bp, Homo sapiens
gttcaagtgattctcctgcctcagcctcccgagtagctgg

SEQ ID NO: 43451 - DNA, 40 bp, Homo sapiens
ccagctactcgggaggctgaggcaggagaatcacttgaac

SEQ ID NO: 43452 - DNA, 40 bp, Homo sapiens
ttcaagtgattctcctgcctcagcctcccgagtagctggg

SEQ ID NO: 43453 - DNA, 40 bp, Homo sapiens
cccagctactcgggaggctgaggcaggagaatcacttgaa

SEQ ID NO: 43454 - DNA, 40 bp, Homo sapiens
tcaagtgattctcctgcctcagcctcccgagtagctggga

SEQ ID NO: 43455 - DNA, 40 bp, Homo sapiens
tcccagctactcgggaggctgaggcaggagaatcacttga

SEQ ID NO: 43456 - DNA, 40 bp, Homo sapiens
caagtgattctcctgcctcagcctcccgagtagctgggat

SEQ ID NO: 43457 - DNA, 40 bp, Homo sapiens
atcccagctactcgggaggctgaggcaggagaatcacttg

SEQ ID NO: 43458 - DNA, 40 bp, Homo sapiens
aagtgattctcctgcctcagcctcccgagtagctgggatt

SEQ ID NO: 43459 - DNA, 40 bp, Homo sapiens
aatcccagctactcgggaggctgaggcaggagaatcactt

SEQ ID NO: 43460 - DNA, 40 bp, Homo sapiens
agtgattctcctgcctcagcctcccgagtagctgggatta

SEQ ID NO: 43461 - DNA, 40 bp, Homo sapiens
taatcccagctactcgggaggctgaggcaggagaatcact

SEQ ID NO: 43462 - DNA, 40 bp, Homo sapiens
gtgattctcctgcctcagcctcccgagtagctgggattac

SEQ ID NO: 43463 - DNA, 40 bp, Homo sapiens
gtaatcccagctactcgggaggctgaggcaggagaatcac

SEQ ID NO: 43464 - DNA, 40 bp, Homo sapiens
tgattctcctgcctcagcctcccgagtagctgggattaca

SEQ ID NO: 43465 - DNA, 40 bp, Homo sapiens
tgtaatcccagctactcgggaggctgaggcaggagaatca

SEQ ID NO: 43466 - DNA, 40 bp, Homo sapiens
gattctcctgcctcagcctcccgagtagctgggattacag

SEQ ID NO: 43467 - DNA, 40 bp, Homo sapiens
ctgtaatcccagctactcgggaggctgaggcaggagaatc

SEQ ID NO: 43468 - DNA, 40 bp, Homo sapiens
attctcctgcctcagcctcccgagtagctgggattacagt

SEQ ID NO: 43469 - DNA, 40 bp, Homo sapiens
actgtaatcccagctactcgggaggctgaggcaggagaat

SEQ ID NO: 43470 - DNA, 40 bp, Homo sapiens
ttctcctgcctcagcctcccgagtagctgggattacagtc

SEQ ID NO: 43471 - DNA, 40 bp, Homo sapiens
gactgtaatcccagctactcgggaggctgaggcaggagaa

SEQ ID NO: 43472 - DNA, 40 bp, Homo sapiens
tctcctgcctcagcctcccgagtagctgggattacagtca

SEQ ID NO: 43473 - DNA, 40 bp, Homo sapiens
tgactgtaatcccagctactcgggaggctgaggcaggaga

SEQ ID NO: 43474 - DNA, 40 bp, Homo sapiens
ctcctgcctcagcctcccgagtagctgggattacagtcat

SEQ ID NO: 43475 - DNA, 40 bp, Homo sapiens
atgactgtaatcccagctactcgggaggctgaggcaggag

SEQ ID NO: 43476 - DNA, 40 bp, Homo sapiens
tcctgcctcagcctcccgagtagctgggattacagtcatg

SEQ ID NO: 43477 - DNA, 40 bp, Homo sapiens
catgactgtaatcccagctactcgggaggctgaggcagga

SEQ ID NO: 43478 - DNA, 40 bp, Homo sapiens
cctgcctcagcctcccgagtagctgggattacagtcatgc

SEQ ID NO: 43479 - DNA, 40 bp, Homo sapiens
gcatgactgtaatcccagctactcgggaggctgaggcagg

SEQ ID NO: 43480 - DNA, 40 bp, Homo sapiens
ctgcctcagcctcccgagtagctgggattacagtcatgca

SEQ ID NO: 43481 - DNA, 40 bp, Homo sapiens
tgcatgactgtaatcccagctactcgggaggctgaggcag

SEQ ID NO: 43482 - DNA, 40 bp, Homo sapiens
tgcctcagcctcccgagtagctgggattacagtcatgcac

SEQ ID NO: 43483 - DNA, 40 bp, Homo sapiens
gtgcatgactgtaatcccagctactcgggaggctgaggca

SEQ ID NO: 43484 - DNA, 40 bp, Homo sapiens
gcctcagcctcccgagtagctgggattacagtcatgcacc

SEQ ID NO: 43485 - DNA, 40 bp, Homo sapiens
ggtgcatgactgtaatcccagctactcgggaggctgaggc

SEQ ID NO: 43486 - DNA, 40 bp, Homo sapiens
cctcagcctcccgagtagctgggattacagtcatgcacca

SEQ ID NO: 43487 - DNA, 40 bp, Homo sapiens
tggtgcatgactgtaatcccagctactcgggaggctgagg

SEQ ID NO: 43488 - DNA, 40 bp, Homo sapiens
ctcagcctcccgagtagctgggattacagtcatgcaccac

SEQ ID NO: 43489 - DNA, 40 bp, Homo sapiens
gtggtgcatgactgtaatcccagctactcgggaggctgag

SEQ ID NO: 43490 - DNA, 40 bp, Homo sapiens
tcagcctcccgagtagctgggattacagtcatgcaccacc

SEQ ID NO: 43491 - DNA, 40 bp, Homo sapiens
ggtggtgcatgactgtaatcccagctactcgggaggctga

SEQ ID NO: 43492 - DNA, 40 bp, Homo sapiens
cagcctcccgagtagctgggattacagtcatgcaccacca

SEQ ID NO: 43493 - DNA, 40 bp, Homo sapiens
tggtggtgcatgactgtaatcccagctactcgggaggctg

SEQ ID NO: 43494 - DNA, 40 bp, Homo sapiens
agcctcccgagtagctgggattacagtcatgcaccaccag

SEQ ID NO: 43495 - DNA, 40 bp, Homo sapiens
ctggtggtgcatgactgtaatcccagctactcgggaggct

SEQ ID NO: 43496 - DNA, 40 bp, Homo sapiens
gcctcccgagtagctgggattacagtcatgcaccaccagg

SEQ ID NO: 43497 - DNA, 40 bp, Homo sapiens
cctggtggtgcatgactgtaatcccagctactcgggaggc

SEQ ID NO: 43498 - DNA, 40 bp, Homo sapiens
cctcccgagtagctgggattacagtcatgcaccaccaggc

SEQ ID NO: 43499 - DNA, 40 bp, Homo sapiens
gcctggtggtgcatgactgtaatcccagctactcgggagg

SEQ ID NO: 43500 - DNA, 40 bp, Homo sapiens
ctcccgagtagctgggattacagtcatgcaccaccaggcc

SEQ ID NO: 43501 - DNA, 40 bp, Homo sapiens
ggcctggtggtgcatgactgtaatcccagctactcgggag

SEQ ID NO: 43502 - DNA, 40 bp, Homo sapiens
tcccgagtagctgggattacagtcatgcaccaccaggccc

SEQ ID NO: 43503 - DNA, 40 bp, Homo sapiens
gggcctggtggtgcatgactgtaatcccagctactcggga

SEQ ID NO: 43504 - DNA, 40 bp, Homo sapiens
cccgagtagctgggattacagtcatgcaccaccaggccca

SEQ ID NO: 43505 - DNA, 40 bp, Homo sapiens
tgggcctggtggtgcatgactgtaatcccagctactcggg

SEQ ID NO: 43506 - DNA, 40 bp, Homo sapiens
ccgagtagctgggattacagtcatgcaccaccaggcccag

SEQ ID NO: 43507 - DNA, 40 bp, Homo sapiens
ctgggcctggtggtgcatgactgtaatcccagctactcgg

SEQ ID NO: 43508 - DNA, 40 bp, Homo sapiens
cgagtagctgggattacagtcatgcaccaccaggcccagg

SEQ ID NO: 43509 - DNA, 40 bp, Homo sapiens
cctgggcctggtggtgcatgactgtaatcccagctactcg

SEQ ID NO: 43510 - DNA, 40 bp, Homo sapiens
gagtagctgggattacagtcatgcaccaccaggcccaggt

SEQ ID NO: 43511 - DNA, 40 bp, Homo sapiens
acctgggcctggtggtgcatgactgtaatcccagctactc

SEQ ID NO: 43512 - DNA, 40 bp, Homo sapiens
agtagctgggattacagtcatgcaccaccaggcccaggta

SEQ ID NO: 43513 - DNA, 40 bp, Homo sapiens
tacctgggcctggtggtgcatgactgtaatcccagctact

SEQ ID NO: 43514 - DNA, 40 bp, Homo sapiens
gtagctgggattacagtcatgcaccaccaggcccaggtaa

SEQ ID NO: 43515 - DNA, 40 bp, Homo sapiens
ttacctgggcctggtggtgcatgactgtaatcccagctac

SEQ ID NO: 43516 - DNA, 40 bp, Homo sapiens
tagctgggattacagtcatgcaccaccaggcccaggtaat

SEQ ID NO: 43517 - DNA, 40 bp, Homo sapiens
attacctgggcctggtggtgcatgactgtaatcccagcta

SEQ ID NO: 43518 - DNA, 40 bp, Homo sapiens
agctgggattacagtcatgcaccaccaggcccaggtaatt

SEQ ID NO: 43519 - DNA, 40 bp, Homo sapiens
aattacctgggcctggtggtgcatgactgtaatcccagct

SEQ ID NO: 43520 - DNA, 40 bp, Homo sapiens
gctgggattacagtcatgcaccaccaggcccaggtaattt

SEQ ID NO: 43521 - DNA, 40 bp, Homo sapiens
aaattacctgggcctggtggtgcatgactgtaatcccagc

SEQ ID NO: 43522 - DNA, 40 bp, Homo sapiens
ctgggattacagtcatgcaccaccaggcccaggtaatttt

SEQ ID NO: 43523 - DNA, 40 bp, Homo sapiens
aaaattacctgggcctggtggtgcatgactgtaatcccag

SEQ ID NO: 43524 - DNA, 40 bp, Homo sapiens
tgggattacagtcatgcaccaccaggcccaggtaattttg

SEQ ID NO: 43525 - DNA, 40 bp, Homo sapiens
caaaattacctgggcctggtggtgcatgactgtaatccca

SEQ ID NO: 43526 - DNA, 40 bp, Homo sapiens
gggattacagtcatgcaccaccaggcccaggtaattttgt

SEQ ID NO: 43527 - DNA, 40 bp, Homo sapiens
acaaaattacctgggcctggtggtgcatgactgtaatccc

SEQ ID NO: 43528 - DNA, 40 bp, Homo sapiens
ggattacagtcatgcaccaccaggcccaggtaattttgta

SEQ ID NO: 43529 - DNA, 40 bp, Homo sapiens
tacaaaattacctgggcctggtggtgcatgactgtaatcc

SEQ ID NO: 43530 - DNA, 40 bp, Homo sapiens
gattacagtcatgcaccaccaggcccaggtaattttgtat

SEQ ID NO: 43531 - DNA, 40 bp, Homo sapiens
atacaaaattacctgggcctggtggtgcatgactgtaatc

SEQ ID NO: 43532 - DNA, 40 bp, Homo sapiens
attacagtcatgcaccaccaggcccaggtaattttgtatg

SEQ ID NO: 43533 - DNA, 40 bp, Homo sapiens
catacaaaattacctgggcctggtggtgcatgactgtaat

SEQ ID NO: 43534 - DNA, 40 bp, Homo sapiens
ttacagtcatgcaccaccaggcccaggtaattttgtatgt

SEQ ID NO: 43535 - DNA, 40 bp, Homo sapiens
acatacaaaattacctgggcctggtggtgcatgactgtaa

SEQ ID NO: 43536 - DNA, 40 bp, Homo sapiens
tacagtcatgcaccaccaggcccaggtaattttgtatgtt

SEQ ID NO: 43537 - DNA, 40 bp, Homo sapiens
aacatacaaaattacctgggcctggtggtgcatgactgta

SEQ ID NO: 43538 - DNA, 40 bp, Homo sapiens
acagtcatgcaccaccaggcccaggtaattttgtatgttt

SEQ ID NO: 43539 - DNA, 40 bp, Homo sapiens
aaacatacaaaattacctgggcctggtggtgcatgactgt

SEQ ID NO: 43540 - DNA, 40 bp, Homo sapiens
cagtcatgcaccaccaggcccaggtaattttgtatgttta

SEQ ID NO: 43541 - DNA, 40 bp, Homo sapiens
taaacatacaaaattacctgggcctggtggtgcatgactg

SEQ ID NO: 43542 - DNA, 40 bp, Homo sapiens
agtcatgcaccaccaggcccaggtaattttgtatgtttag

SEQ ID NO: 43543 - DNA, 40 bp, Homo sapiens
ctaaacatacaaaattacctgggcctggtggtgcatgact

SEQ ID NO: 43544 - DNA, 40 bp, Homo sapiens
gtcatgcaccaccaggcccaggtaattttgtatgtttagt

SEQ ID NO: 43545 - DNA, 40 bp, Homo sapiens
actaaacatacaaaattacctgggcctggtggtgcatgac

SEQ ID NO: 43546 - DNA, 40 bp, Homo sapiens
tcatgcaccaccaggcccaggtaattttgtatgtttagta

SEQ ID NO: 43547 - DNA, 40 bp, Homo sapiens
tactaaacatacaaaattacctgggcctggtggtgcatga

SEQ ID NO: 43548 - DNA, 40 bp, Homo sapiens
catgcaccaccaggcccaggtaattttgtatgtttagtag

SEQ ID NO: 43549 - DNA, 40 bp, Homo sapiens
ctactaaacatacaaaattacctgggcctggtggtgcatg

SEQ ID NO: 43550 - DNA, 40 bp, Homo sapiens
atgcaccaccaggcccaggtaattttgtatgtttagtaga

SEQ ID NO: 43551 - DNA, 40 bp, Homo sapiens
tctactaaacatacaaaattacctgggcctggtggtgcat

SEQ ID NO: 43552 - DNA, 40 bp, Homo sapiens
tgcaccaccaggcccaggtaattttgtatgtttagtagag

SEQ ID NO: 43553 - DNA, 40 bp, Homo sapiens
ctctactaaacatacaaaattacctgggcctggtggtgca

SEQ ID NO: 43554 - DNA, 40 bp, Homo sapiens
gcaccaccaggcccaggtaattttgtatgtttagtagaga

SEQ ID NO: 43555 - DNA, 40 bp, Homo sapiens
tctctactaaacatacaaaattacctgggcctggtggtgc

SEQ ID NO: 43556 - DNA, 40 bp, Homo sapiens
caccaccaggcccaggtaattttgtatgtttagtagagat

SEQ ID NO: 43557 - DNA, 40 bp, Homo sapiens
atctctactaaacatacaaaattacctgggcctggtggtg

SEQ ID NO: 43558 - DNA, 40 bp, Homo sapiens
accaccaggcccaggtaattttgtatgtttagtagagatg

SEQ ID NO: 43559 - DNA, 40 bp, Homo sapiens
catctctactaaacatacaaaattacctgggcctggtggt

SEQ ID NO: 43560 - DNA, 40 bp, Homo sapiens
ccaccaggcccaggtaattttgtatgtttagtagagatgg

SEQ ID NO: 43561 - DNA, 40 bp, Homo sapiens
ccatctctactaaacatacaaaattacctgggcctggtgg

SEQ ID NO: 43562 - DNA, 40 bp, Homo sapiens
caccaggcccaggtaattttgtatgtttagtagagatggg

SEQ ID NO: 43563 - DNA, 40 bp, Homo sapiens
cccatctctactaaacatacaaaattacctgggcctggtg

SEQ ID NO: 43564 - DNA, 40 bp, Homo sapiens
accaggcccaggtaattttgtatgtttagtagagatgggg

SEQ ID NO: 43565 - DNA, 40 bp, Homo sapiens
ccccatctctactaaacatacaaaattacctgggcctggt

SEQ ID NO: 43566 - DNA, 40 bp, Homo sapiens
ccaggcccaggtaattttgtatgtttagtagagatggggt

SEQ ID NO: 43567 - DNA, 40 bp, Homo sapiens
accccatctctactaaacatacaaaattacctgggcctgg

SEQ ID NO: 43568 - DNA, 40 bp, Homo sapiens
caggcccaggtaattttgtatgtttagtagagatggggtt

SEQ ID NO: 43569 - DNA, 40 bp, Homo sapiens
aaccccatctctactaaacatacaaaattacctgggcctg

SEQ ID NO: 43570 - DNA, 40 bp, Homo sapiens
aggcccaggtaattttgtatgtttagtagagatggggttt

SEQ ID NO: 43571 - DNA, 40 bp, Homo sapiens
aaaccccatctctactaaacatacaaaattacctgggcct

SEQ ID NO: 43572 - DNA, 40 bp, Homo sapiens
ggcccaggtaattttgtatgtttagtagagatggggtttc

SEQ ID NO: 43573 - DNA, 40 bp, Homo sapiens
gaaaccccatctctactaaacatacaaaattacctgggcc

SEQ ID NO: 43574 - DNA, 40 bp, Homo sapiens
gcccaggtaattttgtatgtttagtagagatggggtttct

SEQ ID NO: 43575 - DNA, 40 bp, Homo sapiens
agaaaccccatctctactaaacatacaaaattacctgggc

SEQ ID NO: 43576 - DNA, 40 bp, Homo sapiens
cccaggtaattttgtatgtttagtagagatggggtttctc

SEQ ID NO: 43577 - DNA, 40 bp, Homo sapiens
gagaaaccccatctctactaaacatacaaaattacctggg

SEQ ID NO: 43578 - DNA, 40 bp, Homo sapiens
ccaggtaattttgtatgtttagtagagatggggtttctcc

SEQ ID NO: 43579 - DNA, 40 bp, Homo sapiens
ggagaaaccccatctctactaaacatacaaaattacctgg

SEQ ID NO: 43580 - DNA, 40 bp, Homo sapiens
caggtaattttgtatgtttagtagagatggggtttctccg

SEQ ID NO: 43581 - DNA, 40 bp, Homo sapiens
cggagaaaccccatctctactaaacatacaaaattacctg

SEQ ID NO: 43582 - DNA, 40 bp, Homo sapiens
aggtaattttgtatgtttagtagagatggggtttctccgt

SEQ ID NO: 43583 - DNA, 40 bp, Homo sapiens
acggagaaaccccatctctactaaacatacaaaattacct

SEQ ID NO: 43584 - DNA, 40 bp, Homo sapiens
ggtaattttgtatgtttagtagagatggggtttctccgtg

SEQ ID NO: 43585 - DNA, 40 bp, Homo sapiens
cacggagaaaccccatctctactaaacatacaaaattacc

SEQ ID NO: 43586 - DNA, 40 bp, Homo sapiens
gtaattttgtatgtttagtagagatggggtttctccgtgt

SEQ ID NO: 43587 - DNA, 40 bp, Homo sapiens
acacggagaaaccccatctctactaaacatacaaaattac

SEQ ID NO: 43588 - DNA, 40 bp, Homo sapiens
taattttgtatgtttagtagagatggggtttctccgtgtt

SEQ ID NO: 43589 - DNA, 40 bp, Homo sapiens
aacacggagaaaccccatctctactaaacatacaaaatta

SEQ ID NO: 43590 - DNA, 40 bp, Homo sapiens
aattttgtatgtttagtagagatggggtttctccgtgttg

SEQ ID NO: 43591 - DNA, 40 bp, Homo sapiens
caacacggagaaaccccatctctactaaacatacaaaatt

SEQ ID NO: 43592 - DNA, 40 bp, Homo sapiens
attttgtatgtttagtagagatggggtttctccgtgttgg

SEQ ID NO: 43593 - DNA, 40 bp, Homo sapiens
ccaacacggagaaaccccatctctactaaacatacaaaat

SEQ ID NO: 43594 - DNA, 40 bp, Homo sapiens
ttttgtatgtttagtagagatggggtttctccgtgttggt

SEQ ID NO: 43595 - DNA, 40 bp, Homo sapiens
accaacacggagaaaccccatctctactaaacatacaaaa

SEQ ID NO: 43596 - DNA, 40 bp, Homo sapiens
tttgtatgtttagtagagatggggtttctccgtgttggtc

SEQ ID NO: 43597 - DNA, 40 bp, Homo sapiens
gaccaacacggagaaaccccatctctactaaacatacaaa

SEQ ID NO: 43598 - DNA, 40 bp, Homo sapiens
ttgtatgtttagtagagatggggtttctccgtgttggtca

SEQ ID NO: 43599 - DNA, 40 bp, Homo sapiens
tgaccaacacggagaaaccccatctctactaaacatacaa

SEQ ID NO: 43600 - DNA, 40 bp, Homo sapiens
tgtatgtttagtagagatggggtttctccgtgttggtcag

SEQ ID NO: 43601 - DNA, 40 bp, Homo sapiens
ctgaccaacacggagaaaccccatctctactaaacataca

SEQ ID NO: 43602 - DNA, 40 bp, Homo sapiens
gtatgtttagtagagatggggtttctccgtgttggtcagg

SEQ ID NO: 43603 - DNA, 40 bp, Homo sapiens
cctgaccaacacggagaaaccccatctctactaaacatac

SEQ ID NO: 43604 - DNA, 40 bp, Homo sapiens
tatgtttagtagagatggggtttctccgtgttggtcaggc

SEQ ID NO: 43605 - DNA, 40 bp, Homo sapiens
gcctgaccaacacggagaaaccccatctctactaaacata

SEQ ID NO: 43606 - DNA, 40 bp, Homo sapiens
atgtttagtagagatggggtttctccgtgttggtcaggct

SEQ ID NO: 43607 - DNA, 40 bp, Homo sapiens
agcctgaccaacacggagaaaccccatctctactaaacat

SEQ ID NO: 43608 - DNA, 40 bp, Homo sapiens
tgtttagtagagatggggtttctccgtgttggtcaggctg

SEQ ID NO: 43609 - DNA, 40 bp, Homo sapiens
cagcctgaccaacacggagaaaccccatctctactaaaca

SEQ ID NO: 43610 - DNA, 40 bp, Homo sapiens
gtttagtagagatggggtttctccgtgttggtcaggctga

SEQ ID NO: 43611 - DNA, 40 bp, Homo sapiens
tcagcctgaccaacacggagaaaccccatctctactaaac

SEQ ID NO: 43612 - DNA, 40 bp, Homo sapiens
tttagtagagatggggtttctccgtgttggtcaggctgat

SEQ ID NO: 43613 - DNA, 40 bp, Homo sapiens
atcagcctgaccaacacggagaaaccccatctctactaaa

SEQ ID NO: 43614 - DNA, 40 bp, Homo sapiens
ttagtagagatggggtttctccgtgttggtcaggctgatc

SEQ ID NO: 43615 - DNA, 40 bp, Homo sapiens
gatcagcctgaccaacacggagaaaccccatctctactaa

SEQ ID NO: 43616 - DNA, 40 bp, Homo sapiens
tagtagagatggggtttctccgtgttggtcaggctgatct

SEQ ID NO: 43617 - DNA, 40 bp, Homo sapiens
agatcagcctgaccaacacggagaaaccccatctctacta

SEQ ID NO: 43618 - DNA, 40 bp, Homo sapiens
agtagagatggggtttctccgtgttggtcaggctgatctc

SEQ ID NO: 43619 - DNA, 40 bp, Homo sapiens
gagatcagcctgaccaacacggagaaaccccatctctact

SEQ ID NO: 43620 - DNA, 40 bp, Homo sapiens
gtagagatggggtttctccgtgttggtcaggctgatctca

SEQ ID NO: 43621 - DNA, 40 bp, Homo sapiens
tgagatcagcctgaccaacacggagaaaccccatctctac

SEQ ID NO: 43622 - DNA, 40 bp, Homo sapiens
tagagatggggtttctccgtgttggtcaggctgatctcaa

SEQ ID NO: 43623 - DNA, 40 bp, Homo sapiens
ttgagatcagcctgaccaacacggagaaaccccatctcta

SEQ ID NO: 43624 - DNA, 40 bp, Homo sapiens
agagatggggtttctccgtgttggtcaggctgatctcaaa

SEQ ID NO: 43625 - DNA, 40 bp, Homo sapiens
tttgagatcagcctgaccaacacggagaaaccccatctct

SEQ ID NO: 43626 - DNA, 40 bp, Homo sapiens
gagatggggtttctccgtgttggtcaggctgatctcaaac

SEQ ID NO: 43627 - DNA, 40 bp, Homo sapiens
gtttgagatcagcctgaccaacacggagaaaccccatctc

SEQ ID NO: 43628 - DNA, 40 bp, Homo sapiens
agatggggtttctccgtgttggtcaggctgatctcaaact

SEQ ID NO: 43629 - DNA, 40 bp, Homo sapiens
agtttgagatcagcctgaccaacacggagaaaccccatct

SEQ ID NO: 43630 - DNA, 40 bp, Homo sapiens
gatggggtttctccgtgttggtcaggctgatctcaaactc

SEQ ID NO: 43631 - DNA, 40 bp, Homo sapiens
gagtttgagatcagcctgaccaacacggagaaaccccatc

SEQ ID NO: 43632 - DNA, 40 bp, Homo sapiens
atggggtttctccgtgttggtcaggctgatctcaaactcc

SEQ ID NO: 43633 - DNA, 40 bp, Homo sapiens
ggagtttgagatcagcctgaccaacacggagaaaccccat

SEQ ID NO: 43634 - DNA, 40 bp, Homo sapiens
tggggtttctccgtgttggtcaggctgatctcaaactccc

SEQ ID NO: 43635 - DNA, 40 bp, Homo sapiens
gggagtttgagatcagcctgaccaacacggagaaacccca

SEQ ID NO: 43636 - DNA, 40 bp, Homo sapiens
ggggtttctccgtgttggtcaggctgatctcaaactcccg

SEQ ID NO: 43637 - DNA, 40 bp, Homo sapiens
cgggagtttgagatcagcctgaccaacacggagaaacccc

SEQ ID NO: 43638 - DNA, 40 bp, Homo sapiens
gggtttctccgtgttggtcaggctgatctcaaactcccga

SEQ ID NO: 43639 - DNA, 40 bp, Homo sapiens
tcgggagtttgagatcagcctgaccaacacggagaaaccc

SEQ ID NO: 43640 - DNA, 40 bp, Homo sapiens
ggtttctccgtgttggtcaggctgatctcaaactcccgac

SEQ ID NO: 43641 - DNA, 40 bp, Homo sapiens
gtcgggagtttgagatcagcctgaccaacacggagaaacc

SEQ ID NO: 43642 - DNA, 40 bp, Homo sapiens
gtttctccgtgttggtcaggctgatctcaaactcccgacc

SEQ ID NO: 43643 - DNA, 40 bp, Homo sapiens
ggtcgggagtttgagatcagcctgaccaacacggagaaac

SEQ ID NO: 43644 - DNA, 40 bp, Homo sapiens
tttctccgtgttggtcaggctgatctcaaactcccgacct

SEQ ID NO: 43645 - DNA, 40 bp, Homo sapiens
aggtcgggagtttgagatcagcctgaccaacacggagaaa

SEQ ID NO: 43646 - DNA, 40 bp, Homo sapiens
ttctccgtgttggtcaggctgatctcaaactcccgacctc

SEQ ID NO: 43647 - DNA, 40 bp, Homo sapiens
gaggtcgggagtttgagatcagcctgaccaacacggagaa

SEQ ID NO: 43648 - DNA, 40 bp, Homo sapiens
tctccgtgttggtcaggctgatctcaaactcccgacctca

SEQ ID NO: 43649 - DNA, 40 bp, Homo sapiens
tgaggtcgggagtttgagatcagcctgaccaacacggaga

SEQ ID NO: 43650 - DNA, 40 bp, Homo sapiens
ctccgtgttggtcaggctgatctcaaactcccgacctcag

SEQ ID NO: 43651 - DNA, 40 bp, Homo sapiens
ctgaggtcgggagtttgagatcagcctgaccaacacggag

SEQ ID NO: 43652 - DNA, 40 bp, Homo sapiens
tccgtgttggtcaggctgatctcaaactcccgacctcagg

SEQ ID NO: 43653 - DNA, 40 bp, Homo sapiens
cctgaggtcgggagtttgagatcagcctgaccaacacgga

SEQ ID NO: 43654 - DNA, 40 bp, Homo sapiens
ccgtgttggtcaggctgatctcaaactcccgacctcaggt

SEQ ID NO: 43655 - DNA, 40 bp, Homo sapiens
acctgaggtcgggagtttgagatcagcctgaccaacacgg

SEQ ID NO: 43656 - DNA, 40 bp, Homo sapiens
cgtgttggtcaggctgatctcaaactcccgacctcaggtg

SEQ ID NO: 43657 - DNA, 40 bp, Homo sapiens
cacctgaggtcgggagtttgagatcagcctgaccaacacg

SEQ ID NO: 43658 - DNA, 40 bp, Homo sapiens
gtgttggtcaggctgatctcaaactcccgacctcaggtga

SEQ ID NO: 43659 - DNA, 40 bp, Homo sapiens
tcacctgaggtcgggagtttgagatcagcctgaccaacac

SEQ ID NO: 43660 - DNA, 40 bp, Homo sapiens
tgttggtcaggctgatctcaaactcccgacctcaggtgat

SEQ ID NO: 43661 - DNA, 40 bp, Homo sapiens
atcacctgaggtcgggagtttgagatcagcctgaccaaca

SEQ ID NO: 43662 - DNA, 40 bp, Homo sapiens
gttggtcaggctgatctcaaactcccgacctcaggtgatc

SEQ ID NO: 43663 - DNA, 40 bp, Homo sapiens
gatcacctgaggtcgggagtttgagatcagcctgaccaac

SEQ ID NO: 43664 - DNA, 40 bp, Homo sapiens
ttggtcaggctgatctcaaactcccgacctcaggtgatct

SEQ ID NO: 43665 - DNA, 40 bp, Homo sapiens
agatcacctgaggtcgggagtttgagatcagcctgaccaa

SEQ ID NO: 43666 - DNA, 40 bp, Homo sapiens
tggtcaggctgatctcaaactcccgacctcaggtgatctg

SEQ ID NO: 43667 - DNA, 40 bp, Homo sapiens
cagatcacctgaggtcgggagtttgagatcagcctgacca

SEQ ID NO: 43668 - DNA, 40 bp, Homo sapiens
ggtcaggctgatctcaaactcccgacctcaggtgatctgc

SEQ ID NO: 43669 - DNA, 40 bp, Homo sapiens
gcagatcacctgaggtcgggagtttgagatcagcctgacc

SEQ ID NO: 43670 - DNA, 40 bp, Homo sapiens
gtcaggctgatctcaaactcccgacctcaggtgatctgcc

SEQ ID NO: 43671 - DNA, 40 bp, Homo sapiens
ggcagatcacctgaggtcgggagtttgagatcagcctgac

SEQ ID NO: 43672 - DNA, 40 bp, Homo sapiens
tcaggctgatctcaaactcccgacctcaggtgatctgccc

SEQ ID NO: 43673 - DNA, 40 bp, Homo sapiens
gggcagatcacctgaggtcgggagtttgagatcagcctga

SEQ ID NO: 43674 - DNA, 40 bp, Homo sapiens
caggctgatctcaaactcccgacctcaggtgatctgccca

SEQ ID NO: 43675 - DNA, 40 bp, Homo sapiens
tgggcagatcacctgaggtcgggagtttgagatcagcctg

SEQ ID NO: 43676 - DNA, 40 bp, Homo sapiens
aggctgatctcaaactcccgacctcaggtgatctgcccac

SEQ ID NO: 43677 - DNA, 40 bp, Homo sapiens
gtgggcagatcacctgaggtcgggagtttgagatcagcct

SEQ ID NO: 43678 - DNA, 40 bp, Homo sapiens
ggctgatctcaaactcccgacctcaggtgatctgcccacc

SEQ ID NO: 43679 - DNA, 40 bp, Homo sapiens
ggtgggcagatcacctgaggtcgggagtttgagatcagcc

SEQ ID NO: 43680 - DNA, 40 bp, Homo sapiens
gctgatctcaaactcccgacctcaggtgatctgcccacct

SEQ ID NO: 43681 - DNA, 40 bp, Homo sapiens
aggtgggcagatcacctgaggtcgggagtttgagatcagc

SEQ ID NO: 43682 - DNA, 40 bp, Homo sapiens
ctgatctcaaactcccgacctcaggtgatctgcccacctt

SEQ ID NO: 43683 - DNA, 40 bp, Homo sapiens
aaggtgggcagatcacctgaggtcgggagtttgagatcag

SEQ ID NO: 43684 - DNA, 40 bp, Homo sapiens
tgatctcaaactcccgacctcaggtgatctgcccaccttg

SEQ ID NO: 43685 - DNA, 40 bp, Homo sapiens
caaggtgggcagatcacctgaggtcgggagtttgagatca

SEQ ID NO: 43686 - DNA, 40 bp, Homo sapiens
gatctcaaactcccgacctcaggtgatctgcccaccttgg

SEQ ID NO: 43687 - DNA, 40 bp, Homo sapiens
ccaaggtgggcagatcacctgaggtcgggagtttgagatc

SEQ ID NO: 43688 - DNA, 40 bp, Homo sapiens
atctcaaactcccgacctcaggtgatctgcccaccttggc

SEQ ID NO: 43689 - DNA, 40 bp, Homo sapiens
gccaaggtgggcagatcacctgaggtcgggagtttgagat

SEQ ID NO: 43690 - DNA, 40 bp, Homo sapiens
tctcaaactcccgacctcaggtgatctgcccaccttggcc

SEQ ID NO: 43691 - DNA, 40 bp, Homo sapiens
ggccaaggtgggcagatcacctgaggtcgggagtttgaga

SEQ ID NO: 43692 - DNA, 40 bp, Homo sapiens
ctcaaactcccgacctcaggtgatctgcccaccttggcct

SEQ ID NO: 43693 - DNA, 40 bp, Homo sapiens
aggccaaggtgggcagatcacctgaggtcgggagtttgag

SEQ ID NO: 43694 - DNA, 40 bp, Homo sapiens
tcaaactcccgacctcaggtgatctgcccaccttggcctc

SEQ ID NO: 43695 - DNA, 40 bp, Homo sapiens
gaggccaaggtgggcagatcacctgaggtcgggagtttga

SEQ ID NO: 43696 - DNA, 40 bp, Homo sapiens
caaactcccgacctcaggtgatctgcccaccttggcctcc

SEQ ID NO: 43697 - DNA, 40 bp, Homo sapiens
ggaggccaaggtgggcagatcacctgaggtcgggagtttg

SEQ ID NO: 43698 - DNA, 40 bp, Homo sapiens
aaactcccgacctcaggtgatctgcccaccttggcctccc

SEQ ID NO: 43699 - DNA, 40 bp, Homo sapiens
gggaggccaaggtgggcagatcacctgaggtcgggagttt

SEQ ID NO: 43700 - DNA, 40 bp, Homo sapiens
aactcccgacctcaggtgatctgcccaccttggcctccca

SEQ ID NO: 43701 - DNA, 40 bp, Homo sapiens
tgggaggccaaggtgggcagatcacctgaggtcgggagtt

SEQ ID NO: 43702 - DNA, 40 bp, Homo sapiens
actcccgacctcaggtgatctgcccaccttggcctcccaa

SEQ ID NO: 43703 - DNA, 40 bp, Homo sapiens
ttgggaggccaaggtgggcagatcacctgaggtcgggagt

SEQ ID NO: 43704 - DNA, 40 bp, Homo sapiens
ctcccgacctcaggtgatctgcccaccttggcctcccaaa

SEQ ID NO: 43705 - DNA, 40 bp, Homo sapiens
tttgggaggccaaggtgggcagatcacctgaggtcgggag

SEQ ID NO: 43706 - DNA, 40 bp, Homo sapiens
tcccgacctcaggtgatctgcccaccttggcctcccaaag

SEQ ID NO: 43707 - DNA, 40 bp, Homo sapiens
ctttgggaggccaaggtgggcagatcacctgaggtcggga

SEQ ID NO: 43708 - DNA, 40 bp, Homo sapiens
cccgacctcaggtgatctgcccaccttggcctcccaaagt

SEQ ID NO: 43709 - DNA, 40 bp, Homo sapiens
actttgggaggccaaggtgggcagatcacctgaggtcggg

SEQ ID NO: 43710 - DNA, 40 bp, Homo sapiens
ccgacctcaggtgatctgcccaccttggcctcccaaagtg

SEQ ID NO: 43711 - DNA, 40 bp, Homo sapiens
cactttgggaggccaaggtgggcagatcacctgaggtcgg

SEQ ID NO: 43712 - DNA, 40 bp, Homo sapiens
cgacctcaggtgatctgcccaccttggcctcccaaagtgc

SEQ ID NO: 43713 - DNA, 40 bp, Homo sapiens
gcactttgggaggccaaggtgggcagatcacctgaggtcg

SEQ ID NO: 43714 - DNA, 40 bp, Homo sapiens
gacctcaggtgatctgcccaccttggcctcccaaagtgct

SEQ ID NO: 43715 - DNA, 40 bp, Homo sapiens
agcactttgggaggccaaggtgggcagatcacctgaggtc

SEQ ID NO: 43716 - DNA, 40 bp, Homo sapiens
acctcaggtgatctgcccaccttggcctcccaaagtgctg

SEQ ID NO: 43717 - DNA, 40 bp, Homo sapiens
cagcactttgggaggccaaggtgggcagatcacctgaggt

SEQ ID NO: 43718 - DNA, 40 bp, Homo sapiens
cctcaggtgatctgcccaccttggcctcccaaagtgctgg

SEQ ID NO: 43719 - DNA, 40 bp, Homo sapiens
ccagcactttgggaggccaaggtgggcagatcacctgagg

SEQ ID NO: 43720 - DNA, 40 bp, Homo sapiens
ctcaggtgatctgcccaccttggcctcccaaagtgctggg

SEQ ID NO: 43721 - DNA, 40 bp, Homo sapiens
cccagcactttgggaggccaaggtgggcagatcacctgag

SEQ ID NO: 43722 - DNA, 40 bp, Homo sapiens
tcaggtgatctgcccaccttggcctcccaaagtgctggga

SEQ ID NO: 43723 - DNA, 40 bp, Homo sapiens
tcccagcactttgggaggccaaggtgggcagatcacctga

SEQ ID NO: 43724 - DNA, 40 bp, Homo sapiens
caggtgatctgcccaccttggcctcccaaagtgctgggat

SEQ ID NO: 43725 - DNA, 40 bp, Homo sapiens
atcccagcactttgggaggccaaggtgggcagatcacctg

SEQ ID NO: 43726 - DNA, 40 bp, Homo sapiens
aggtgatctgcccaccttggcctcccaaagtgctgggatt

SEQ ID NO: 43727 - DNA, 40 bp, Homo sapiens
aatcccagcactttgggaggccaaggtgggcagatcacct

SEQ ID NO: 43728 - DNA, 40 bp, Homo sapiens
ggtgatctgcccaccttggcctcccaaagtgctgggatta

SEQ ID NO: 43729 - DNA, 40 bp, Homo sapiens
taatcccagcactttgggaggccaaggtgggcagatcacc

SEQ ID NO: 43730 - DNA, 40 bp, Homo sapiens
gtgatctgcccaccttggcctcccaaagtgctgggattac

SEQ ID NO: 43731 - DNA, 40 bp, Homo sapiens
gtaatcccagcactttgggaggccaaggtgggcagatcac

SEQ ID NO: 43732 - DNA, 40 bp, Homo sapiens
tgatctgcccaccttggcctcccaaagtgctgggattaca

SEQ ID NO: 43733 - DNA, 40 bp, Homo sapiens
tgtaatcccagcactttgggaggccaaggtgggcagatca

SEQ ID NO: 43734 - DNA, 40 bp, Homo sapiens
gatctgcccaccttggcctcccaaagtgctgggattacag

SEQ ID NO: 43735 - DNA, 40 bp, Homo sapiens
ctgtaatcccagcactttgggaggccaaggtgggcagatc

SEQ ID NO: 43736 - DNA, 40 bp, Homo sapiens
atctgcccaccttggcctcccaaagtgctgggattacaga

SEQ ID NO: 43737 - DNA, 40 bp, Homo sapiens
tctgtaatcccagcactttgggaggccaaggtgggcagat

SEQ ID NO: 43738 - DNA, 40 bp, Homo sapiens
tctgcccaccttggcctcccaaagtgctgggattacagac

SEQ ID NO: 43739 - DNA, 40 bp, Homo sapiens
gtctgtaatcccagcactttgggaggccaaggtgggcaga

SEQ ID NO: 43740 - DNA, 40 bp, Homo sapiens
ctgcccaccttggcctcccaaagtgctgggattacagaca

SEQ ID NO: 43741 - DNA, 40 bp, Homo sapiens
tgtctgtaatcccagcactttgggaggccaaggtgggcag

SEQ ID NO: 43742 - DNA, 40 bp, Homo sapiens
tgcccaccttggcctcccaaagtgctgggattacagacat

SEQ ID NO: 43743 - DNA, 40 bp, Homo sapiens
atgtctgtaatcccagcactttgggaggccaaggtgggca

SEQ ID NO: 43744 - DNA, 40 bp, Homo sapiens
gcccaccttggcctcccaaagtgctgggattacagacatg

SEQ ID NO: 43745 - DNA, 40 bp, Homo sapiens
catgtctgtaatcccagcactttgggaggccaaggtgggc

SEQ ID NO: 43746 - DNA, 40 bp, Homo sapiens
cccaccttggcctcccaaagtgctgggattacagacatga

SEQ ID NO: 43747 - DNA, 40 bp, Homo sapiens
tcatgtctgtaatcccagcactttgggaggccaaggtggg

SEQ ID NO: 43748 - DNA, 40 bp, Homo sapiens
ccaccttggcctcccaaagtgctgggattacagacatgag

SEQ ID NO: 43749 - DNA, 40 bp, Homo sapiens
ctcatgtctgtaatcccagcactttgggaggccaaggtgg

SEQ ID NO: 43750 - DNA, 40 bp, Homo sapiens
caccttggcctcccaaagtgctgggattacagacatgagc

SEQ ID NO: 43751 - DNA, 40 bp, Homo sapiens
gctcatgtctgtaatcccagcactttgggaggccaaggtg

SEQ ID NO: 43752 - DNA, 40 bp, Homo sapiens
accttggcctcccaaagtgctgggattacagacatgagcc

SEQ ID NO: 43753 - DNA, 40 bp, Homo sapiens
ggctcatgtctgtaatcccagcactttgggaggccaaggt

SEQ ID NO: 43754 - DNA, 40 bp, Homo sapiens
ccttggcctcccaaagtgctgggattacagacatgagcca

SEQ ID NO: 43755 - DNA, 40 bp, Homo sapiens
tggctcatgtctgtaatcccagcactttgggaggccaagg

SEQ ID NO: 43756 - DNA, 40 bp, Homo sapiens
cttggcctcccaaagtgctgggattacagacatgagccat

SEQ ID NO: 43757 - DNA, 40 bp, Homo sapiens
atggctcatgtctgtaatcccagcactttgggaggccaag

SEQ ID NO: 43758 - DNA, 40 bp, Homo sapiens
ttggcctcccaaagtgctgggattacagacatgagccatc

SEQ ID NO: 43759 - DNA, 40 bp, Homo sapiens
gatggctcatgtctgtaatcccagcactttgggaggccaa

SEQ ID NO: 43760 - DNA, 40 bp, Homo sapiens
tggcctcccaaagtgctgggattacagacatgagccatcg

SEQ ID NO: 43761 - DNA, 40 bp, Homo sapiens
cgatggctcatgtctgtaatcccagcactttgggaggcca

SEQ ID NO: 43762 - DNA, 40 bp, Homo sapiens
ggcctcccaaagtgctgggattacagacatgagccatcgc

SEQ ID NO: 43763 - DNA, 40 bp, Homo sapiens
gcgatggctcatgtctgtaatcccagcactttgggaggcc

SEQ ID NO: 43764 - DNA, 40 bp, Homo sapiens
gcctcccaaagtgctgggattacagacatgagccatcgca

SEQ ID NO: 43765 - DNA, 40 bp, Homo sapiens
tgcgatggctcatgtctgtaatcccagcactttgggaggc

SEQ ID NO: 43766 - DNA, 40 bp, Homo sapiens
cctcccaaagtgctgggattacagacatgagccatcgcac

SEQ ID NO: 43767 - DNA, 40 bp, Homo sapiens
gtgcgatggctcatgtctgtaatcccagcactttgggagg

SEQ ID NO: 43768 - DNA, 40 bp, Homo sapiens
ctcccaaagtgctgggattacagacatgagccatcgcacc

SEQ ID NO: 43769 - DNA, 40 bp, Homo sapiens
ggtgcgatggctcatgtctgtaatcccagcactttgggag

SEQ ID NO: 43770 - DNA, 40 bp, Homo sapiens
tcccaaagtgctgggattacagacatgagccatcgcaccc

SEQ ID NO: 43771 - DNA, 40 bp, Homo sapiens
gggtgcgatggctcatgtctgtaatcccagcactttggga

SEQ ID NO: 43772 - DNA, 40 bp, Homo sapiens
cccaaagtgctgggattacagacatgagccatcgcacccg

SEQ ID NO: 43773 - DNA, 40 bp, Homo sapiens
cgggtgcgatggctcatgtctgtaatcccagcactttggg

SEQ ID NO: 43774 - DNA, 40 bp, Homo sapiens
ccaaagtgctgggattacagacatgagccatcgcacccgg

SEQ ID NO: 43775 - DNA, 40 bp, Homo sapiens
ccgggtgcgatggctcatgtctgtaatcccagcactttgg

SEQ ID NO: 43776 - DNA, 40 bp, Homo sapiens
caaagtgctgggattacagacatgagccatcgcacccggc

SEQ ID NO: 43777 - DNA, 40 bp, Homo sapiens
gccgggtgcgatggctcatgtctgtaatcccagcactttg

SEQ ID NO: 43778 - DNA, 40 bp, Homo sapiens
aaagtgctgggattacagacatgagccatcgcacccggcc

SEQ ID NO: 43779 - DNA, 40 bp, Homo sapiens
ggccgggtgcgatggctcatgtctgtaatcccagcacttt

SEQ ID NO: 43780 - DNA, 40 bp, Homo sapiens
aagtgctgggattacagacatgagccatcgcacccggcca

SEQ ID NO: 43781 - DNA, 40 bp, Homo sapiens
tggccgggtgcgatggctcatgtctgtaatcccagcactt

SEQ ID NO: 43782 - DNA, 40 bp, Homo sapiens
agtgctgggattacagacatgagccatcgcacccggccaa

SEQ ID NO: 43783 - DNA, 40 bp, Homo sapiens
ttggccgggtgcgatggctcatgtctgtaatcccagcact

SEQ ID NO: 43784 - DNA, 40 bp, Homo sapiens
gtgctgggattacagacatgagccatcgcacccggccaag

SEQ ID NO: 43785 - DNA, 40 bp, Homo sapiens
cttggccgggtgcgatggctcatgtctgtaatcccagcac

SEQ ID NO: 43786 - DNA, 40 bp, Homo sapiens
tgctgggattacagacatgagccatcgcacccggccaaga

SEQ ID NO: 43787 - DNA, 40 bp, Homo sapiens
tcttggccgggtgcgatggctcatgtctgtaatcccagca

SEQ ID NO: 43788 - DNA, 40 bp, Homo sapiens
gctgggattacagacatgagccatcgcacccggccaagat

SEQ ID NO: 43789 - DNA, 40 bp, Homo sapiens
atcttggccgggtgcgatggctcatgtctgtaatcccagc

SEQ ID NO: 43790 - DNA, 40 bp, Homo sapiens
ctgggattacagacatgagccatcgcacccggccaagata

SEQ ID NO: 43791 - DNA, 40 bp, Homo sapiens
tatcttggccgggtgcgatggctcatgtctgtaatcccag

SEQ ID NO: 43792 - DNA, 40 bp, Homo sapiens
tgggattacagacatgagccatcgcacccggccaagataa

SEQ ID NO: 43793 - DNA, 40 bp, Homo sapiens
ttatcttggccgggtgcgatggctcatgtctgtaatccca

SEQ ID NO: 43794 - DNA, 40 bp, Homo sapiens
gggattacagacatgagccatcgcacccggccaagataaa

SEQ ID NO: 43795 - DNA, 40 bp, Homo sapiens
tttatcttggccgggtgcgatggctcatgtctgtaatccc

SEQ ID NO: 43796 - DNA, 40 bp, Homo sapiens
ggattacagacatgagccatcgcacccggccaagataaat

SEQ ID NO: 43797 - DNA, 40 bp, Homo sapiens
atttatcttggccgggtgcgatggctcatgtctgtaatcc

SEQ ID NO: 43798 - DNA, 40 bp, Homo sapiens
gattacagacatgagccatcgcacccggccaagataaatg

SEQ ID NO: 43799 - DNA, 40 bp, Homo sapiens
catttatcttggccgggtgcgatggctcatgtctgtaatc

SEQ ID NO: 43800 - DNA, 40 bp, Homo sapiens
attacagacatgagccatcgcacccggccaagataaatgt

SEQ ID NO: 43801 - DNA, 40 bp, Homo sapiens
acatttatcttggccgggtgcgatggctcatgtctgtaat

SEQ ID NO: 43802 - DNA, 40 bp, Homo sapiens
ttacagacatgagccatcgcacccggccaagataaatgtc

SEQ ID NO: 43803 - DNA, 40 bp, Homo sapiens
gacatttatcttggccgggtgcgatggctcatgtctgtaa

SEQ ID NO: 43804 - DNA, 40 bp, Homo sapiens
tacagacatgagccatcgcacccggccaagataaatgtct

SEQ ID NO: 43805 - DNA, 40 bp, Homo sapiens
agacatttatcttggccgggtgcgatggctcatgtctgta

SEQ ID NO: 43806 - DNA, 40 bp, Homo sapiens
acagacatgagccatcgcacccggccaagataaatgtctt

SEQ ID NO: 43807 - DNA, 40 bp, Homo sapiens
aagacatttatcttggccgggtgcgatggctcatgtctgt

SEQ ID NO: 43808 - DNA, 40 bp, Homo sapiens
cagacatgagccatcgcacccggccaagataaatgtcttt

SEQ ID NO: 43809 - DNA, 40 bp, Homo sapiens
aaagacatttatcttggccgggtgcgatggctcatgtctg

SEQ ID NO: 43810 - DNA, 40 bp, Homo sapiens
agacatgagccatcgcacccggccaagataaatgtctttt

SEQ ID NO: 43811 - DNA, 40 bp, Homo sapiens
aaaagacatttatcttggccgggtgcgatggctcatgtct

SEQ ID NO: 43812 - DNA, 40 bp, Homo sapiens
gacatgagccatcgcacccggccaagataaatgtctttta

SEQ ID NO: 43813 - DNA, 40 bp, Homo sapiens
taaaagacatttatcttggccgggtgcgatggctcatgtc

SEQ ID NO: 43814 - DNA, 40 bp, Homo sapiens
acatgagccatcgcacccggccaagataaatgtcttttaa

SEQ ID NO: 43815 - DNA, 40 bp, Homo sapiens
ttaaaagacatttatcttggccgggtgcgatggctcatgt

SEQ ID NO: 43816 - DNA, 40 bp, Homo sapiens
catgagccatcgcacccggccaagataaatgtcttttaaa

SEQ ID NO: 43817 - DNA, 40 bp, Homo sapiens
tttaaaagacatttatcttggccgggtgcgatggctcatg

SEQ ID NO: 43818 - DNA, 40 bp, Homo sapiens
atgagccatcgcacccggccaagataaatgtcttttaaat

SEQ ID NO: 43819 - DNA, 40 bp, Homo sapiens
atttaaaagacatttatcttggccgggtgcgatggctcat

SEQ ID NO: 43820 - DNA, 40 bp, Homo sapiens
tgagccatcgcacccggccaagataaatgtcttttaaatt

SEQ ID NO: 43821 - DNA, 40 bp, Homo sapiens
aatttaaaagacatttatcttggccgggtgcgatggctca

SEQ ID NO: 43822 - DNA, 40 bp, Homo sapiens
gagccatcgcacccggccaagataaatgtcttttaaatta

SEQ ID NO: 43823 - DNA, 40 bp, Homo sapiens
taatttaaaagacatttatcttggccgggtgcgatggctc

SEQ ID NO: 43824 - DNA, 40 bp, Homo sapiens
agccatcgcacccggccaagataaatgtcttttaaattat

SEQ ID NO: 43825 - DNA, 40 bp, Homo sapiens
ataatttaaaagacatttatcttggccgggtgcgatggct

SEQ ID NO: 43826 - DNA, 40 bp, Homo sapiens
gccatcgcacccggccaagataaatgtcttttaaattatc

SEQ ID NO: 43827 - DNA, 40 bp, Homo sapiens
gataatttaaaagacatttatcttggccgggtgcgatggc

SEQ ID NO: 43828 - DNA, 40 bp, Homo sapiens
ccatcgcacccggccaagataaatgtcttttaaattatct

SEQ ID NO: 43829 - DNA, 40 bp, Homo sapiens
agataatttaaaagacatttatcttggccgggtgcgatgg

SEQ ID NO: 43830 - DNA, 40 bp, Homo sapiens
catcgcacccggccaagataaatgtcttttaaattatctc

SEQ ID NO: 43831 - DNA, 40 bp, Homo sapiens
gagataatttaaaagacatttatcttggccgggtgcgatg

SEQ ID NO: 43832 - DNA, 40 bp, Homo sapiens
atcgcacccggccaagataaatgtcttttaaattatctcc

SEQ ID NO: 43833 - DNA, 40 bp, Homo sapiens
ggagataatttaaaagacatttatcttggccgggtgcgat

SEQ ID NO: 43834 - DNA, 40 bp, Homo sapiens
tcgcacccggccaagataaatgtcttttaaattatctcca

SEQ ID NO: 43835 - DNA, 40 bp, Homo sapiens
tggagataatttaaaagacatttatcttggccgggtgcga

SEQ ID NO: 43836 - DNA, 40 bp, Homo sapiens
cgcacccggccaagataaatgtcttttaaattatctccat

SEQ ID NO: 43837 - DNA, 40 bp, Homo sapiens
atggagataatttaaaagacatttatcttggccgggtgcg

SEQ ID NO: 43838 - DNA, 40 bp, Homo sapiens
gcacccggccaagataaatgtcttttaaattatctccatt

SEQ ID NO: 43839 - DNA, 40 bp, Homo sapiens
aatggagataatttaaaagacatttatcttggccgggtgc

SEQ ID NO: 43840 - DNA, 40 bp, Homo sapiens
cacccggccaagataaatgtcttttaaattatctccatta

SEQ ID NO: 43841 - DNA, 40 bp, Homo sapiens
taatggagataatttaaaagacatttatcttggccgggtg

SEQ ID NO: 43842 - DNA, 40 bp, Homo sapiens
acccggccaagataaatgtcttttaaattatctccattaa

SEQ ID NO: 43843 - DNA, 40 bp, Homo sapiens
ttaatggagataatttaaaagacatttatcttggccgggt

SEQ ID NO: 43844 - DNA, 40 bp, Homo sapiens
cccggccaagataaatgtcttttaaattatctccattaaa

SEQ ID NO: 43845 - DNA, 40 bp, Homo sapiens
tttaatggagataatttaaaagacatttatcttggccggg

SEQ ID NO: 43846 - DNA, 40 bp, Homo sapiens
ccggccaagataaatgtcttttaaattatctccattaaag

SEQ ID NO: 43847 - DNA, 40 bp, Homo sapiens
ctttaatggagataatttaaaagacatttatcttggccgg

SEQ ID NO: 43848 - DNA, 40 bp, Homo sapiens
cggccaagataaatgtcttttaaattatctccattaaaga

SEQ ID NO: 43849 - DNA, 40 bp, Homo sapiens
tctttaatggagataatttaaaagacatttatcttggccg

SEQ ID NO: 43850 - DNA, 40 bp, Homo sapiens
ggccaagataaatgtcttttaaattatctccattaaagac

SEQ ID NO: 43851 - DNA, 40 bp, Homo sapiens
gtctttaatggagataatttaaaagacatttatcttggcc

SEQ ID NO: 43852 - DNA, 40 bp, Homo sapiens
gccaagataaatgtcttttaaattatctccattaaagaca

SEQ ID NO: 43853 - DNA, 40 bp, Homo sapiens
tgtctttaatggagataatttaaaagacatttatcttggc

SEQ ID NO: 43854 - DNA, 40 bp, Homo sapiens
ccaagataaatgtcttttaaattatctccattaaagacat

SEQ ID NO: 43855 - DNA, 40 bp, Homo sapiens
atgtctttaatggagataatttaaaagacatttatcttgg

SEQ ID NO: 43856 - DNA, 40 bp, Homo sapiens
caagataaatgtcttttaaattatctccattaaagacata

SEQ ID NO: 43857 - DNA, 40 bp, Homo sapiens
tatgtctttaatggagataatttaaaagacatttatcttg

SEQ ID NO: 43858 - DNA, 40 bp, Homo sapiens
aagataaatgtcttttaaattatctccattaaagacataa

SEQ ID NO: 43859 - DNA, 40 bp, Homo sapiens
ttatgtctttaatggagataatttaaaagacatttatctt

SEQ ID NO: 43860 - DNA, 40 bp, Homo sapiens
agataaatgtcttttaaattatctccattaaagacataac

SEQ ID NO: 43861 - DNA, 40 bp, Homo sapiens
gttatgtctttaatggagataatttaaaagacatttatct

SEQ ID NO: 43862 - DNA, 40 bp, Homo sapiens
gataaatgtcttttaaattatctccattaaagacataacc

SEQ ID NO: 43863 - DNA, 40 bp, Homo sapiens
ggttatgtctttaatggagataatttaaaagacatttatc

SEQ ID NO: 43864 - DNA, 40 bp, Homo sapiens
ataaatgtcttttaaattatctccattaaagacataacct

SEQ ID NO: 43865 - DNA, 40 bp, Homo sapiens
aggttatgtctttaatggagataatttaaaagacatttat

SEQ ID NO: 43866 - DNA, 40 bp, Homo sapiens
taaatgtcttttaaattatctccattaaagacataacctt

SEQ ID NO: 43867 - DNA, 40 bp, Homo sapiens
aaggttatgtctttaatggagataatttaaaagacattta

SEQ ID NO: 43868 - DNA, 40 bp, Homo sapiens
aaatgtcttttaaattatctccattaaagacataaccttt

SEQ ID NO: 43869 - DNA, 40 bp, Homo sapiens
aaaggttatgtctttaatggagataatttaaaagacattt

SEQ ID NO: 43870 - DNA, 40 bp, Homo sapiens
aatgtcttttaaattatctccattaaagacataaccttta

SEQ ID NO: 43871 - DNA, 40 bp, Homo sapiens
taaaggttatgtctttaatggagataatttaaaagacatt

SEQ ID NO: 43872 - DNA, 40 bp, Homo sapiens
atgtcttttaaattatctccattaaagacataacctttat

SEQ ID NO: 43873 - DNA, 40 bp, Homo sapiens
ataaaggttatgtctttaatggagataatttaaaagacat

SEQ ID NO: 43874 - DNA, 40 bp, Homo sapiens
tgtcttttaaattatctccattaaagacataacctttata

SEQ ID NO: 43875 - DNA, 40 bp, Homo sapiens
tataaaggttatgtctttaatggagataatttaaaagaca

SEQ ID NO: 43876 - DNA, 40 bp, Homo sapiens
gtcttttaaattatctccattaaagacataacctttataa

SEQ ID NO: 43877 - DNA, 40 bp, Homo sapiens
ttataaaggttatgtctttaatggagataatttaaaagac

SEQ ID NO: 43878 - DNA, 40 bp, Homo sapiens
tcttttaaattatctccattaaagacataacctttataac

SEQ ID NO: 43879 - DNA, 40 bp, Homo sapiens
gttataaaggttatgtctttaatggagataatttaaaaga

SEQ ID NO: 43880 - DNA, 40 bp, Homo sapiens
cttttaaattatctccattaaagacataacctttataaca

SEQ ID NO: 43881 - DNA, 40 bp, Homo sapiens
tgttataaaggttatgtctttaatggagataatttaaaag

SEQ ID NO: 43882 - DNA, 40 bp, Homo sapiens
ttttaaattatctccattaaagacataacctttataacat

SEQ ID NO: 43883 - DNA, 40 bp, Homo sapiens
atgttataaaggttatgtctttaatggagataatttaaaa

SEQ ID NO: 43884 - DNA, 40 bp, Homo sapiens
tttaaattatctccattaaagacataacctttataacatt

SEQ ID NO: 43885 - DNA, 40 bp, Homo sapiens
aatgttataaaggttatgtctttaatggagataatttaaa

SEQ ID NO: 43886 - DNA, 40 bp, Homo sapiens
ttaaattatctccattaaagacataacctttataacattt

SEQ ID NO: 43887 - DNA, 40 bp, Homo sapiens
aaatgttataaaggttatgtctttaatggagataatttaa

SEQ ID NO: 43888 - DNA, 40 bp, Homo sapiens
taaattatctccattaaagacataacctttataacatttt

SEQ ID NO: 43889 - DNA, 40 bp, Homo sapiens
aaaatgttataaaggttatgtctttaatggagataattta

SEQ ID NO: 43890 - DNA, 40 bp, Homo sapiens
aaattatctccattaaagacataacctttataacattttg

SEQ ID NO: 43891 - DNA, 40 bp, Homo sapiens
caaaatgttataaaggttatgtctttaatggagataattt

SEQ ID NO: 43892 - DNA, 40 bp, Homo sapiens
aattatctccattaaagacataacctttataacattttga

SEQ ID NO: 43893 - DNA, 40 bp, Homo sapiens
tcaaaatgttataaaggttatgtctttaatggagataatt

SEQ ID NO: 43894 - DNA, 40 bp, Homo sapiens
attatctccattaaagacataacctttataacattttgat

SEQ ID NO: 43895 - DNA, 40 bp, Homo sapiens
atcaaaatgttataaaggttatgtctttaatggagataat

SEQ ID NO: 43896 - DNA, 40 bp, Homo sapiens
ttatctccattaaagacataacctttataacattttgatg

SEQ ID NO: 43897 - DNA, 40 bp, Homo sapiens
catcaaaatgttataaaggttatgtctttaatggagataa

SEQ ID NO: 43898 - DNA, 40 bp, Homo sapiens
tatctccattaaagacataacctttataacattttgatgt

SEQ ID NO: 43899 - DNA, 40 bp, Homo sapiens
acatcaaaatgttataaaggttatgtctttaatggagata

SEQ ID NO: 43900 - DNA, 40 bp, Homo sapiens
atctccattaaagacataacctttataacattttgatgta

SEQ ID NO: 43901 - DNA, 40 bp, Homo sapiens
tacatcaaaatgttataaaggttatgtctttaatggagat

SEQ ID NO: 43902 - DNA, 40 bp, Homo sapiens
tctccattaaagacataacctttataacattttgatgtat

SEQ ID NO: 43903 - DNA, 40 bp, Homo sapiens
atacatcaaaatgttataaaggttatgtctttaatggaga

SEQ ID NO: 43904 - DNA, 40 bp, Homo sapiens
ctccattaaagacataacctttataacattttgatgtata

SEQ ID NO: 43905 - DNA, 40 bp, Homo sapiens
tatacatcaaaatgttataaaggttatgtctttaatggag

SEQ ID NO: 43906 - DNA, 40 bp, Homo sapiens
tccattaaagacataacctttataacattttgatgtatat

SEQ ID NO: 43907 - DNA, 40 bp, Homo sapiens
atatacatcaaaatgttataaaggttatgtctttaatgga

SEQ ID NO: 43908 - DNA, 40 bp, Homo sapiens
ccattaaagacataacctttataacattttgatgtatata

SEQ ID NO: 43909 - DNA, 40 bp, Homo sapiens
tatatacatcaaaatgttataaaggttatgtctttaatgg

SEQ ID NO: 43910 - DNA, 40 bp, Homo sapiens
cattaaagacataacctttataacattttgatgtatatat

SEQ ID NO: 43911 - DNA, 40 bp, Homo sapiens
atatatacatcaaaatgttataaaggttatgtctttaatg

SEQ ID NO: 43912 - DNA, 40 bp, Homo sapiens
attaaagacataacctttataacattttgatgtatatatt

SEQ ID NO: 43913 - DNA, 40 bp, Homo sapiens
aatatatacatcaaaatgttataaaggttatgtctttaat

SEQ ID NO: 43914 - DNA, 40 bp, Homo sapiens
ttaaagacataacctttataacattttgatgtatatatta

SEQ ID NO: 43915 - DNA, 40 bp, Homo sapiens
taatatatacatcaaaatgttataaaggttatgtctttaa

SEQ ID NO: 43916 - DNA, 40 bp, Homo sapiens
taaagacataacctttataacattttgatgtatatattac

SEQ ID NO: 43917 - DNA, 40 bp, Homo sapiens
gtaatatatacatcaaaatgttataaaggttatgtcttta

SEQ ID NO: 43918 - DNA, 40 bp, Homo sapiens
aaagacataacctttataacattttgatgtatatattacc

SEQ ID NO: 43919 - DNA, 40 bp, Homo sapiens
ggtaatatatacatcaaaatgttataaaggttatgtcttt

SEQ ID NO: 43920 - DNA, 40 bp, Homo sapiens
aagacataacctttataacattttgatgtatatattacca

SEQ ID NO: 43921 - DNA, 40 bp, Homo sapiens
tggtaatatatacatcaaaatgttataaaggttatgtctt

SEQ ID NO: 43922 - DNA, 40 bp, Homo sapiens
agacataacctttataacattttgatgtatatattaccag

SEQ ID NO: 43923 - DNA, 40 bp, Homo sapiens
ctggtaatatatacatcaaaatgttataaaggttatgtct

SEQ ID NO: 43924 - DNA, 40 bp, Homo sapiens
gacataacctttataacattttgatgtatatattaccagt

SEQ ID NO: 43925 - DNA, 40 bp, Homo sapiens
actggtaatatatacatcaaaatgttataaaggttatgtc

SEQ ID NO: 43926 - DNA, 40 bp, Homo sapiens
acataacctttataacattttgatgtatatattaccagtt

SEQ ID NO: 43927 - DNA, 40 bp, Homo sapiens
aactggtaatatatacatcaaaatgttataaaggttatgt

SEQ ID NO: 43928 - DNA, 40 bp, Homo sapiens
cataacctttataacattttgatgtatatattaccagttt

SEQ ID NO: 43929 - DNA, 40 bp, Homo sapiens
aaactggtaatatatacatcaaaatgttataaaggttatg

SEQ ID NO: 43930 - DNA, 40 bp, Homo sapiens
ataacctttataacattttgatgtatatattaccagtttt

SEQ ID NO: 43931 - DNA, 40 bp, Homo sapiens
aaaactggtaatatatacatcaaaatgttataaaggttat

SEQ ID NO: 43932 - DNA, 40 bp, Homo sapiens
taacctttataacattttgatgtatatattaccagttttt

SEQ ID NO: 43933 - DNA, 40 bp, Homo sapiens
aaaaactggtaatatatacatcaaaatgttataaaggtta

SEQ ID NO: 43934 - DNA, 40 bp, Homo sapiens
aacctttataacattttgatgtatatattaccagttttta

SEQ ID NO: 43935 - DNA, 40 bp, Homo sapiens
taaaaactggtaatatatacatcaaaatgttataaaggtt

SEQ ID NO: 43936 - DNA, 40 bp, Homo sapiens
acctttataacattttgatgtatatattaccagtttttaa

SEQ ID NO: 43937 - DNA, 40 bp, Homo sapiens
ttaaaaactggtaatatatacatcaaaatgttataaaggt

SEQ ID NO: 43938 - DNA, 40 bp, Homo sapiens
cctttataacattttgatgtatatattaccagtttttaaa

SEQ ID NO: 43939 - DNA, 40 bp, Homo sapiens
tttaaaaactggtaatatatacatcaaaatgttataaagg

SEQ ID NO: 43940 - DNA, 40 bp, Homo sapiens
ctttataacattttgatgtatatattaccagtttttaaac

SEQ ID NO: 43941 - DNA, 40 bp, Homo sapiens
gtttaaaaactggtaatatatacatcaaaatgttataaag

SEQ ID NO: 43942 - DNA, 40 bp, Homo sapiens
tttataacattttgatgtatatattaccagtttttaaaca

SEQ ID NO: 43943 - DNA, 40 bp, Homo sapiens
tgtttaaaaactggtaatatatacatcaaaatgttataaa

SEQ ID NO: 43944 - DNA, 40 bp, Homo sapiens
ttataacattttgatgtatatattaccagtttttaaacac

SEQ ID NO: 43945 - DNA, 40 bp, Homo sapiens
gtgtttaaaaactggtaatatatacatcaaaatgttataa

SEQ ID NO: 43946 - DNA, 40 bp, Homo sapiens
tataacattttgatgtatatattaccagtttttaaacaca

SEQ ID NO: 43947 - DNA, 40 bp, Homo sapiens
tgtgtttaaaaactggtaatatatacatcaaaatgttata

SEQ ID NO: 43948 - DNA, 40 bp, Homo sapiens
ataacattttgatgtatatattaccagtttttaaacacat

SEQ ID NO: 43949 - DNA, 40 bp, Homo sapiens
atgtgtttaaaaactggtaatatatacatcaaaatgttat

SEQ ID NO: 43950 - DNA, 40 bp, Homo sapiens
taacattttgatgtatatattaccagtttttaaacacata

SEQ ID NO: 43951 - DNA, 40 bp, Homo sapiens
tatgtgtttaaaaactggtaatatatacatcaaaatgtta

SEQ ID NO: 43952 - DNA, 40 bp, Homo sapiens
aacattttgatgtatatattaccagtttttaaacacatag

SEQ ID NO: 43953 - DNA, 40 bp, Homo sapiens
ctatgtgtttaaaaactggtaatatatacatcaaaatgtt

SEQ ID NO: 43954 - DNA, 40 bp, Homo sapiens
acattttgatgtatatattaccagtttttaaacacatagt

SEQ ID NO: 43955 - DNA, 40 bp, Homo sapiens
actatgtgtttaaaaactggtaatatatacatcaaaatgt

SEQ ID NO: 43956 - DNA, 40 bp, Homo sapiens
cattttgatgtatatattaccagtttttaaacacatagta

SEQ ID NO: 43957 - DNA, 40 bp, Homo sapiens
tactatgtgtttaaaaactggtaatatatacatcaaaatg

SEQ ID NO: 43958 - DNA, 40 bp, Homo sapiens
attttgatgtatatattaccagtttttaaacacatagtag

SEQ ID NO: 43959 - DNA, 40 bp, Homo sapiens
ctactatgtgtttaaaaactggtaatatatacatcaaaat

SEQ ID NO: 43960 - DNA, 40 bp, Homo sapiens
ttttgatgtatatattaccagtttttaaacacatagtaga

SEQ ID NO: 43961 - DNA, 40 bp, Homo sapiens
tctactatgtgtttaaaaactggtaatatatacatcaaaa

SEQ ID NO: 43962 - DNA, 40 bp, Homo sapiens
tttgatgtatatattaccagtttttaaacacatagtagat

SEQ ID NO: 43963 - DNA, 40 bp, Homo sapiens
atctactatgtgtttaaaaactggtaatatatacatcaaa

SEQ ID NO: 43964 - DNA, 40 bp, Homo sapiens
ttgatgtatatattaccagtttttaaacacatagtagatt

SEQ ID NO: 43965 - DNA, 40 bp, Homo sapiens
aatctactatgtgtttaaaaactggtaatatatacatcaa

SEQ ID NO: 43966 - DNA, 40 bp, Homo sapiens
tgatgtatatattaccagtttttaaacacatagtagattt

SEQ ID NO: 43967 - DNA, 40 bp, Homo sapiens
aaatctactatgtgtttaaaaactggtaatatatacatca

SEQ ID NO: 43968 - DNA, 40 bp, Homo sapiens
gatgtatatattaccagtttttaaacacatagtagatttg

SEQ ID NO: 43969 - DNA, 40 bp, Homo sapiens
caaatctactatgtgtttaaaaactggtaatatatacatc

SEQ ID NO: 43970 - DNA, 40 bp, Homo sapiens
atgtatatattaccagtttttaaacacatagtagatttgt

SEQ ID NO: 43971 - DNA, 40 bp, Homo sapiens
acaaatctactatgtgtttaaaaactggtaatatatacat

SEQ ID NO: 43972 - DNA, 40 bp, Homo sapiens
tgtatatattaccagtttttaaacacatagtagatttgta

SEQ ID NO: 43973 - DNA, 40 bp, Homo sapiens
tacaaatctactatgtgtttaaaaactggtaatatataca

SEQ ID NO: 43974 - DNA, 40 bp, Homo sapiens
gtatatattaccagtttttaaacacatagtagatttgtat

SEQ ID NO: 43975 - DNA, 40 bp, Homo sapiens
atacaaatctactatgtgtttaaaaactggtaatatatac

SEQ ID NO: 43976 - DNA, 40 bp, Homo sapiens
tatatattaccagtttttaaacacatagtagatttgtata

SEQ ID NO: 43977 - DNA, 40 bp, Homo sapiens
tatacaaatctactatgtgtttaaaaactggtaatatata

SEQ ID NO: 43978 - DNA, 40 bp, Homo sapiens
atatattaccagtttttaaacacatagtagatttgtataa

SEQ ID NO: 43979 - DNA, 40 bp, Homo sapiens
ttatacaaatctactatgtgtttaaaaactggtaatatat

SEQ ID NO: 43980 - DNA, 40 bp, Homo sapiens
tatattaccagtttttaaacacatagtagatttgtataaa

SEQ ID NO: 43981 - DNA, 40 bp, Homo sapiens
tttatacaaatctactatgtgtttaaaaactggtaatata

SEQ ID NO: 43982 - DNA, 40 bp, Homo sapiens
atattaccagtttttaaacacatagtagatttgtataaat

SEQ ID NO: 43983 - DNA, 40 bp, Homo sapiens
atttatacaaatctactatgtgtttaaaaactggtaatat

SEQ ID NO: 43984 - DNA, 40 bp, Homo sapiens
tattaccagtttttaaacacatagtagatttgtataaata

SEQ ID NO: 43985 - DNA, 40 bp, Homo sapiens
tatttatacaaatctactatgtgtttaaaaactggtaata

SEQ ID NO: 43986 - DNA, 40 bp, Homo sapiens
attaccagtttttaaacacatagtagatttgtataaatac

SEQ ID NO: 43987 - DNA, 40 bp, Homo sapiens
gtatttatacaaatctactatgtgtttaaaaactggtaat

SEQ ID NO: 43988 - DNA, 40 bp, Homo sapiens
ttaccagtttttaaacacatagtagatttgtataaataca

SEQ ID NO: 43989 - DNA, 40 bp, Homo sapiens
tgtatttatacaaatctactatgtgtttaaaaactggtaa

SEQ ID NO: 43990 - DNA, 40 bp, Homo sapiens
taccagtttttaaacacatagtagatttgtataaatacat

SEQ ID NO: 43991 - DNA, 40 bp, Homo sapiens
atgtatttatacaaatctactatgtgtttaaaaactggta

SEQ ID NO: 43992 - DNA, 40 bp, Homo sapiens
accagtttttaaacacatagtagatttgtataaatacata

SEQ ID NO: 43993 - DNA, 40 bp, Homo sapiens
tatgtatttatacaaatctactatgtgtttaaaaactggt

SEQ ID NO: 43994 - DNA, 40 bp, Homo sapiens
ccagtttttaaacacatagtagatttgtataaatacataa

SEQ ID NO: 43995 - DNA, 40 bp, Homo sapiens
ttatgtatttatacaaatctactatgtgtttaaaaactgg

SEQ ID NO: 43996 - DNA, 40 bp, Homo sapiens
cagtttttaaacacatagtagatttgtataaatacataaa

SEQ ID NO: 43997 - DNA, 40 bp, Homo sapiens
tttatgtatttatacaaatctactatgtgtttaaaaactg

SEQ ID NO: 43998 - DNA, 40 bp, Homo sapiens
agtttttaaacacatagtagatttgtataaatacataaac

SEQ ID NO: 43999 - DNA, 40 bp, Homo sapiens
gtttatgtatttatacaaatctactatgtgtttaaaaact

SEQ ID NO: 44000 - DNA, 40 bp, Homo sapiens
gtttttaaacacatagtagatttgtataaatacataaaca

SEQ ID NO: 44001 - DNA, 40 bp, Homo sapiens
tgtttatgtatttatacaaatctactatgtgtttaaaaac

SEQ ID NO: 44002 - DNA, 40 bp, Homo sapiens
tttttaaacacatagtagatttgtataaatacataaacac

SEQ ID NO: 44003 - DNA, 40 bp, Homo sapiens
gtgtttatgtatttatacaaatctactatgtgtttaaaaa

SEQ ID NO: 44004 - DNA, 40 bp, Homo sapiens
ttttaaacacatagtagatttgtataaatacataaacaca

SEQ ID NO: 44005 - DNA, 40 bp, Homo sapiens
tgtgtttatgtatttatacaaatctactatgtgtttaaaa

SEQ ID NO: 44006 - DNA, 40 bp, Homo sapiens
tttaaacacatagtagatttgtataaatacataaacacat

SEQ ID NO: 44007 - DNA, 40 bp, Homo sapiens
atgtgtttatgtatttatacaaatctactatgtgtttaaa

SEQ ID NO: 44008 - DNA, 40 bp, Homo sapiens
ttaaacacatagtagatttgtataaatacataaacacata

SEQ ID NO: 44009 - DNA, 40 bp, Homo sapiens
tatgtgtttatgtatttatacaaatctactatgtgtttaa

SEQ ID NO: 44010 - DNA, 40 bp, Homo sapiens
taaacacatagtagatttgtataaatacataaacacatat

SEQ ID NO: 44011 - DNA, 40 bp, Homo sapiens
atatgtgtttatgtatttatacaaatctactatgtgttta

SEQ ID NO: 44012 - DNA, 40 bp, Homo sapiens
aaacacatagtagatttgtataaatacataaacacatatt

SEQ ID NO: 44013 - DNA, 40 bp, Homo sapiens
aatatgtgtttatgtatttatacaaatctactatgtgttt

SEQ ID NO: 44014 - DNA, 40 bp, Homo sapiens
aacacatagtagatttgtataaatacataaacacatatta

SEQ ID NO: 44015 - DNA, 40 bp, Homo sapiens
taatatgtgtttatgtatttatacaaatctactatgtgtt

SEQ ID NO: 44016 - DNA, 40 bp, Homo sapiens
acacatagtagatttgtataaatacataaacacatattat

SEQ ID NO: 44017 - DNA, 40 bp, Homo sapiens
ataatatgtgtttatgtatttatacaaatctactatgtgt

SEQ ID NO: 44018 - DNA, 40 bp, Homo sapiens
cacatagtagatttgtataaatacataaacacatattatt

SEQ ID NO: 44019 - DNA, 40 bp, Homo sapiens
aataatatgtgtttatgtatttatacaaatctactatgtg

SEQ ID NO: 44020 - DNA, 40 bp, Homo sapiens
acatagtagatttgtataaatacataaacacatattattg

SEQ ID NO: 44021 - DNA, 40 bp, Homo sapiens
caataatatgtgtttatgtatttatacaaatctactatgt

SEQ ID NO: 44022 - DNA, 40 bp, Homo sapiens
catagtagatttgtataaatacataaacacatattattgt

SEQ ID NO: 44023 - DNA, 40 bp, Homo sapiens
acaataatatgtgtttatgtatttatacaaatctactatg

SEQ ID NO: 44024 - DNA, 40 bp, Homo sapiens
atagtagatttgtataaatacataaacacatattattgtg

SEQ ID NO: 44025 - DNA, 40 bp, Homo sapiens
cacaataatatgtgtttatgtatttatacaaatctactat

SEQ ID NO: 44026 - DNA, 40 bp, Homo sapiens
tagtagatttgtataaatacataaacacatattattgtga

SEQ ID NO: 44027 - DNA, 40 bp, Homo sapiens
tcacaataatatgtgtttatgtatttatacaaatctacta

SEQ ID NO: 44028 - DNA, 40 bp, Homo sapiens
agtagatttgtataaatacataaacacatattattgtgat

SEQ ID NO: 44029 - DNA, 40 bp, Homo sapiens
atcacaataatatgtgtttatgtatttatacaaatctact

SEQ ID NO: 44030 - DNA, 40 bp, Homo sapiens
gtagatttgtataaatacataaacacatattattgtgatc

SEQ ID NO: 44031 - DNA, 40 bp, Homo sapiens
gatcacaataatatgtgtttatgtatttatacaaatctac

SEQ ID NO: 44032 - DNA, 40 bp, Homo sapiens
tagatttgtataaatacataaacacatattattgtgatca

SEQ ID NO: 44033 - DNA, 40 bp, Homo sapiens
tgatcacaataatatgtgtttatgtatttatacaaatcta

SEQ ID NO: 44034 - DNA, 40 bp, Homo sapiens
agatttgtataaatacataaacacatattattgtgatcat

SEQ ID NO: 44035 - DNA, 40 bp, Homo sapiens
atgatcacaataatatgtgtttatgtatttatacaaatct

SEQ ID NO: 44036 - DNA, 40 bp, Homo sapiens
gatttgtataaatacataaacacatattattgtgatcatg

SEQ ID NO: 44037 - DNA, 40 bp, Homo sapiens
catgatcacaataatatgtgtttatgtatttatacaaatc

SEQ ID NO: 44038 - DNA, 40 bp, Homo sapiens
atttgtataaatacataaacacatattattgtgatcatgc

SEQ ID NO: 44039 - DNA, 40 bp, Homo sapiens
gcatgatcacaataatatgtgtttatgtatttatacaaat

SEQ ID NO: 44040 - DNA, 40 bp, Homo sapiens
tttgtataaatacataaacacatattattgtgatcatgct

SEQ ID NO: 44041 - DNA, 40 bp, Homo sapiens
agcatgatcacaataatatgtgtttatgtatttatacaaa

SEQ ID NO: 44042 - DNA, 40 bp, Homo sapiens
ttgtataaatacataaacacatattattgtgatcatgctg

SEQ ID NO: 44043 - DNA, 40 bp, Homo sapiens
cagcatgatcacaataatatgtgtttatgtatttatacaa

SEQ ID NO: 44044 - DNA, 40 bp, Homo sapiens
tgtataaatacataaacacatattattgtgatcatgctgc

SEQ ID NO: 44045 - DNA, 40 bp, Homo sapiens
gcagcatgatcacaataatatgtgtttatgtatttataca

SEQ ID NO: 44046 - DNA, 40 bp, Homo sapiens
gtataaatacataaacacatattattgtgatcatgctgca

SEQ ID NO: 44047 - DNA, 40 bp, Homo sapiens
tgcagcatgatcacaataatatgtgtttatgtatttatac

SEQ ID NO: 44048 - DNA, 40 bp, Homo sapiens
tataaatacataaacacatattattgtgatcatgctgcac

SEQ ID NO: 44049 - DNA, 40 bp, Homo sapiens
gtgcagcatgatcacaataatatgtgtttatgtatttata

SEQ ID NO: 44050 - DNA, 40 bp, Homo sapiens
ataaatacataaacacatattattgtgatcatgctgcact

SEQ ID NO: 44051 - DNA, 40 bp, Homo sapiens
agtgcagcatgatcacaataatatgtgtttatgtatttat

SEQ ID NO: 44052 - DNA, 40 bp, Homo sapiens
taaatacataaacacatattattgtgatcatgctgcactt

SEQ ID NO: 44053 - DNA, 40 bp, Homo sapiens
aagtgcagcatgatcacaataatatgtgtttatgtattta

SEQ ID NO: 44054 - DNA, 40 bp, Homo sapiens
aaatacataaacacatattattgtgatcatgctgcactta

SEQ ID NO: 44055 - DNA, 40 bp, Homo sapiens
taagtgcagcatgatcacaataatatgtgtttatgtattt

SEQ ID NO: 44056 - DNA, 40 bp, Homo sapiens
aatacataaacacatattattgtgatcatgctgcacttag

SEQ ID NO: 44057 - DNA, 40 bp, Homo sapiens
ctaagtgcagcatgatcacaataatatgtgtttatgtatt

SEQ ID NO: 44058 - DNA, 40 bp, Homo sapiens
atacataaacacatattattgtgatcatgctgcacttaga

SEQ ID NO: 44059 - DNA, 40 bp, Homo sapiens
tctaagtgcagcatgatcacaataatatgtgtttatgtat

SEQ ID NO: 44060 - DNA, 40 bp, Homo sapiens
tacataaacacatattattgtgatcatgctgcacttagac

SEQ ID NO: 44061 - DNA, 40 bp, Homo sapiens
gtctaagtgcagcatgatcacaataatatgtgtttatgta

SEQ ID NO: 44062 - DNA, 40 bp, Homo sapiens
acataaacacatattattgtgatcatgctgcacttagaca

SEQ ID NO: 44063 - DNA, 40 bp, Homo sapiens
tgtctaagtgcagcatgatcacaataatatgtgtttatgt

SEQ ID NO: 44064 - DNA, 40 bp, Homo sapiens
cataaacacatattattgtgatcatgctgcacttagacat

SEQ ID NO: 44065 - DNA, 40 bp, Homo sapiens
atgtctaagtgcagcatgatcacaataatatgtgtttatg

SEQ ID NO: 44066 - DNA, 40 bp, Homo sapiens
ataaacacatattattgtgatcatgctgcacttagacatc

SEQ ID NO: 44067 - DNA, 40 bp, Homo sapiens
gatgtctaagtgcagcatgatcacaataatatgtgtttat

SEQ ID NO: 44068 - DNA, 40 bp, Homo sapiens
taaacacatattattgtgatcatgctgcacttagacatct

SEQ ID NO: 44069 - DNA, 40 bp, Homo sapiens
agatgtctaagtgcagcatgatcacaataatatgtgttta

SEQ ID NO: 44070 - DNA, 40 bp, Homo sapiens
aaacacatattattgtgatcatgctgcacttagacatctt

SEQ ID NO: 44071 - DNA, 40 bp, Homo sapiens
aagatgtctaagtgcagcatgatcacaataatatgtgttt

SEQ ID NO: 44072 - DNA, 40 bp, Homo sapiens
aacacatattattgtgatcatgctgcacttagacatcttt

SEQ ID NO: 44073 - DNA, 40 bp, Homo sapiens
aaagatgtctaagtgcagcatgatcacaataatatgtgtt

SEQ ID NO: 44074 - DNA, 40 bp, Homo sapiens
acacatattattgtgatcatgctgcacttagacatcttta

SEQ ID NO: 44075 - DNA, 40 bp, Homo sapiens
taaagatgtctaagtgcagcatgatcacaataatatgtgt

SEQ ID NO: 44076 - DNA, 40 bp, Homo sapiens
cacatattattgtgatcatgctgcacttagacatctttat

SEQ ID NO: 44077 - DNA, 40 bp, Homo sapiens
ataaagatgtctaagtgcagcatgatcacaataatatgtg

SEQ ID NO: 44078 - DNA, 40 bp, Homo sapiens
acatattattgtgatcatgctgcacttagacatctttata

SEQ ID NO: 44079 - DNA, 40 bp, Homo sapiens
tataaagatgtctaagtgcagcatgatcacaataatatgt

SEQ ID NO: 44080 - DNA, 40 bp, Homo sapiens
catattattgtgatcatgctgcacttagacatctttatat

SEQ ID NO: 44081 - DNA, 40 bp, Homo sapiens
atataaagatgtctaagtgcagcatgatcacaataatatg

SEQ ID NO: 44082 - DNA, 40 bp, Homo sapiens
atattattgtgatcatgctgcacttagacatctttatatt

SEQ ID NO: 44083 - DNA, 40 bp, Homo sapiens
aatataaagatgtctaagtgcagcatgatcacaataatat

SEQ ID NO: 44084 - DNA, 40 bp, Homo sapiens
tattattgtgatcatgctgcacttagacatctttatattc

SEQ ID NO: 44085 - DNA, 40 bp, Homo sapiens
gaatataaagatgtctaagtgcagcatgatcacaataata

SEQ ID NO: 44086 - DNA, 40 bp, Homo sapiens
attattgtgatcatgctgcacttagacatctttatattct

SEQ ID NO: 44087 - DNA, 40 bp, Homo sapiens
agaatataaagatgtctaagtgcagcatgatcacaataat

SEQ ID NO: 44088 - DNA, 40 bp, Homo sapiens
ttattgtgatcatgctgcacttagacatctttatattctc

SEQ ID NO: 44089 - DNA, 40 bp, Homo sapiens
gagaatataaagatgtctaagtgcagcatgatcacaataa

SEQ ID NO: 44090 - DNA, 40 bp, Homo sapiens
tattgtgatcatgctgcacttagacatctttatattctcc

SEQ ID NO: 44091 - DNA, 40 bp, Homo sapiens
ggagaatataaagatgtctaagtgcagcatgatcacaata

SEQ ID NO: 44092 - DNA, 40 bp, Homo sapiens
attgtgatcatgctgcacttagacatctttatattctcct

SEQ ID NO: 44093 - DNA, 40 bp, Homo sapiens
aggagaatataaagatgtctaagtgcagcatgatcacaat

SEQ ID NO: 44094 - DNA, 40 bp, Homo sapiens
ttgtgatcatgctgcacttagacatctttatattctcctt

SEQ ID NO: 44095 - DNA, 40 bp, Homo sapiens
aaggagaatataaagatgtctaagtgcagcatgatcacaa

SEQ ID NO: 44096 - DNA, 40 bp, Homo sapiens
tgtgatcatgctgcacttagacatctttatattctcctta

SEQ ID NO: 44097 - DNA, 40 bp, Homo sapiens
taaggagaatataaagatgtctaagtgcagcatgatcaca

SEQ ID NO: 44098 - DNA, 40 bp, Homo sapiens
gtgatcatgctgcacttagacatctttatattctccttat

SEQ ID NO: 44099 - DNA, 40 bp, Homo sapiens
ataaggagaatataaagatgtctaagtgcagcatgatcac

SEQ ID NO: 44100 - DNA, 40 bp, Homo sapiens
tgatcatgctgcacttagacatctttatattctccttata

SEQ ID NO: 44101 - DNA, 40 bp, Homo sapiens
tataaggagaatataaagatgtctaagtgcagcatgatca

SEQ ID NO: 44102 - DNA, 40 bp, Homo sapiens
gatcatgctgcacttagacatctttatattctccttatac

SEQ ID NO: 44103 - DNA, 40 bp, Homo sapiens
gtataaggagaatataaagatgtctaagtgcagcatgatc

SEQ ID NO: 44104 - DNA, 40 bp, Homo sapiens
atcatgctgcacttagacatctttatattctccttatact

SEQ ID NO: 44105 - DNA, 40 bp, Homo sapiens
agtataaggagaatataaagatgtctaagtgcagcatgat

SEQ ID NO: 44106 - DNA, 40 bp, Homo sapiens
tcatgctgcacttagacatctttatattctccttatactg

SEQ ID NO: 44107 - DNA, 40 bp, Homo sapiens
cagtataaggagaatataaagatgtctaagtgcagcatga

SEQ ID NO: 44108 - DNA, 40 bp, Homo sapiens
catgctgcacttagacatctttatattctccttatactgt

SEQ ID NO: 44109 - DNA, 40 bp, Homo sapiens
acagtataaggagaatataaagatgtctaagtgcagcatg

SEQ ID NO: 44110 - DNA, 40 bp, Homo sapiens
atgctgcacttagacatctttatattctccttatactgta

SEQ ID NO: 44111 - DNA, 40 bp, Homo sapiens
tacagtataaggagaatataaagatgtctaagtgcagcat

SEQ ID NO: 44112 - DNA, 40 bp, Homo sapiens
tgctgcacttagacatctttatattctccttatactgtaa

SEQ ID NO: 44113 - DNA, 40 bp, Homo sapiens
ttacagtataaggagaatataaagatgtctaagtgcagca

SEQ ID NO: 44114 - DNA, 40 bp, Homo sapiens
gctgcacttagacatctttatattctccttatactgtaaa

SEQ ID NO: 44115 - DNA, 40 bp, Homo sapiens
tttacagtataaggagaatataaagatgtctaagtgcagc

SEQ ID NO: 44116 - DNA, 40 bp, Homo sapiens
ctgcacttagacatctttatattctccttatactgtaaac

SEQ ID NO: 44117 - DNA, 40 bp, Homo sapiens
gtttacagtataaggagaatataaagatgtctaagtgcag

SEQ ID NO: 44118 - DNA, 40 bp, Homo sapiens
tgcacttagacatctttatattctccttatactgtaaaca

SEQ ID NO: 44119 - DNA, 40 bp, Homo sapiens
tgtttacagtataaggagaatataaagatgtctaagtgca

SEQ ID NO: 44120 - DNA, 40 bp, Homo sapiens
gcacttagacatctttatattctccttatactgtaaacat

SEQ ID NO: 44121 - DNA, 40 bp, Homo sapiens
atgtttacagtataaggagaatataaagatgtctaagtgc

SEQ ID NO: 44122 - DNA, 40 bp, Homo sapiens
cacttagacatctttatattctccttatactgtaaacatt

SEQ ID NO: 44123 - DNA, 40 bp, Homo sapiens
aatgtttacagtataaggagaatataaagatgtctaagtg

SEQ ID NO: 44124 - DNA, 40 bp, Homo sapiens
acttagacatctttatattctccttatactgtaaacattt

SEQ ID NO: 44125 - DNA, 40 bp, Homo sapiens
aaatgtttacagtataaggagaatataaagatgtctaagt

SEQ ID NO: 44126 - DNA, 40 bp, Homo sapiens
cttagacatctttatattctccttatactgtaaacatttt

SEQ ID NO: 44127 - DNA, 40 bp, Homo sapiens
aaaatgtttacagtataaggagaatataaagatgtctaag

SEQ ID NO: 44128 - DNA, 40 bp, Homo sapiens
ttagacatctttatattctccttatactgtaaacattttg

SEQ ID NO: 44129 - DNA, 40 bp, Homo sapiens
caaaatgtttacagtataaggagaatataaagatgtctaa

SEQ ID NO: 44130 - DNA, 40 bp, Homo sapiens
tagacatctttatattctccttatactgtaaacattttga

SEQ ID NO: 44131 - DNA, 40 bp, Homo sapiens
tcaaaatgtttacagtataaggagaatataaagatgtcta

SEQ ID NO: 44132 - DNA, 40 bp, Homo sapiens
agacatctttatattctccttatactgtaaacattttgaa

SEQ ID NO: 44133 - DNA, 40 bp, Homo sapiens
ttcaaaatgtttacagtataaggagaatataaagatgtct

SEQ ID NO: 44134 - DNA, 40 bp, Homo sapiens
gacatctttatattctccttatactgtaaacattttgaaa

SEQ ID NO: 44135 - DNA, 40 bp, Homo sapiens
tttcaaaatgtttacagtataaggagaatataaagatgtc

SEQ ID NO: 44136 - DNA, 40 bp, Homo sapiens
acatctttatattctccttatactgtaaacattttgaaat

SEQ ID NO: 44137 - DNA, 40 bp, Homo sapiens
atttcaaaatgtttacagtataaggagaatataaagatgt

SEQ ID NO: 44138 - DNA, 40 bp, Homo sapiens
catctttatattctccttatactgtaaacattttgaaata

SEQ ID NO: 44139 - DNA, 40 bp, Homo sapiens
tatttcaaaatgtttacagtataaggagaatataaagatg

SEQ ID NO: 44140 - DNA, 40 bp, Homo sapiens
atctttatattctccttatactgtaaacattttgaaatac

SEQ ID NO: 44141 - DNA, 40 bp, Homo sapiens
gtatttcaaaatgtttacagtataaggagaatataaagat

SEQ ID NO: 44142 - DNA, 40 bp, Homo sapiens
tctttatattctccttatactgtaaacattttgaaatact

SEQ ID NO: 44143 - DNA, 40 bp, Homo sapiens
agtatttcaaaatgtttacagtataaggagaatataaaga

SEQ ID NO: 44144 - DNA, 40 bp, Homo sapiens
ctttatattctccttatactgtaaacattttgaaatactt

SEQ ID NO: 44145 - DNA, 40 bp, Homo sapiens
aagtatttcaaaatgtttacagtataaggagaatataaag

SEQ ID NO: 44146 - DNA, 40 bp, Homo sapiens
tttatattctccttatactgtaaacattttgaaatacttt

SEQ ID NO: 44147 - DNA, 40 bp, Homo sapiens
aaagtatttcaaaatgtttacagtataaggagaatataaa

SEQ ID NO: 44148 - DNA, 40 bp, Homo sapiens
ttatattctccttatactgtaaacattttgaaatacttta

SEQ ID NO: 44149 - DNA, 40 bp, Homo sapiens
taaagtatttcaaaatgtttacagtataaggagaatataa

SEQ ID NO: 44150 - DNA, 40 bp, Homo sapiens
tatattctccttatactgtaaacattttgaaatactttac

SEQ ID NO: 44151 - DNA, 40 bp, Homo sapiens
gtaaagtatttcaaaatgtttacagtataaggagaatata

SEQ ID NO: 44152 - DNA, 40 bp, Homo sapiens
atattctccttatactgtaaacattttgaaatactttact

SEQ ID NO: 44153 - DNA, 40 bp, Homo sapiens
agtaaagtatttcaaaatgtttacagtataaggagaatat

SEQ ID NO: 44154 - DNA, 40 bp, Homo sapiens
tattctccttatactgtaaacattttgaaatactttacta

SEQ ID NO: 44155 - DNA, 40 bp, Homo sapiens
tagtaaagtatttcaaaatgtttacagtataaggagaata

SEQ ID NO: 44156 - DNA, 40 bp, Homo sapiens
attctccttatactgtaaacattttgaaatactttactaa

SEQ ID NO: 44157 - DNA, 40 bp, Homo sapiens
ttagtaaagtatttcaaaatgtttacagtataaggagaat

SEQ ID NO: 44158 - DNA, 40 bp, Homo sapiens
ttctccttatactgtaaacattttgaaatactttactaac

SEQ ID NO: 44159 - DNA, 40 bp, Homo sapiens
gttagtaaagtatttcaaaatgtttacagtataaggagaa

SEQ ID NO: 44160 - DNA, 40 bp, Homo sapiens
tctccttatactgtaaacattttgaaatactttactaaca

SEQ ID NO: 44161 - DNA, 40 bp, Homo sapiens
tgttagtaaagtatttcaaaatgtttacagtataaggaga

SEQ ID NO: 44162 - DNA, 40 bp, Homo sapiens
ctccttatactgtaaacattttgaaatactttactaacaa

SEQ ID NO: 44163 - DNA, 40 bp, Homo sapiens
ttgttagtaaagtatttcaaaatgtttacagtataaggag

SEQ ID NO: 44164 - DNA, 40 bp, Homo sapiens
tccttatactgtaaacattttgaaatactttactaacaac

SEQ ID NO: 44165 - DNA, 40 bp, Homo sapiens
gttgttagtaaagtatttcaaaatgtttacagtataagga

SEQ ID NO: 44166 - DNA, 40 bp, Homo sapiens
ccttatactgtaaacattttgaaatactttactaacaaca

SEQ ID NO: 44167 - DNA, 40 bp, Homo sapiens
tgttgttagtaaagtatttcaaaatgtttacagtataagg

SEQ ID NO: 44168 - DNA, 40 bp, Homo sapiens
cttatactgtaaacattttgaaatactttactaacaacat

SEQ ID NO: 44169 - DNA, 40 bp, Homo sapiens
atgttgttagtaaagtatttcaaaatgtttacagtataag

SEQ ID NO: 44170 - DNA, 40 bp, Homo sapiens
ttatactgtaaacattttgaaatactttactaacaacatt

SEQ ID NO: 44171 - DNA, 40 bp, Homo sapiens
aatgttgttagtaaagtatttcaaaatgtttacagtataa

SEQ ID NO: 44172 - DNA, 40 bp, Homo sapiens
tatactgtaaacattttgaaatactttactaacaacattt

SEQ ID NO: 44173 - DNA, 40 bp, Homo sapiens
aaatgttgttagtaaagtatttcaaaatgtttacagtata

SEQ ID NO: 44174 - DNA, 40 bp, Homo sapiens
atactgtaaacattttgaaatactttactaacaacatttg

SEQ ID NO: 44175 - DNA, 40 bp, Homo sapiens
caaatgttgttagtaaagtatttcaaaatgtttacagtat

SEQ ID NO: 44176 - DNA, 40 bp, Homo sapiens
tactgtaaacattttgaaatactttactaacaacatttgt

SEQ ID NO: 44177 - DNA, 40 bp, Homo sapiens
acaaatgttgttagtaaagtatttcaaaatgtttacagta

SEQ ID NO: 44178 - DNA, 40 bp, Homo sapiens
actgtaaacattttgaaatactttactaacaacatttgta

SEQ ID NO: 44179 - DNA, 40 bp, Homo sapiens
tacaaatgttgttagtaaagtatttcaaaatgtttacagt

SEQ ID NO: 44180 - DNA, 40 bp, Homo sapiens
ctgtaaacattttgaaatactttactaacaacatttgtaa

SEQ ID NO: 44181 - DNA, 40 bp, Homo sapiens
ttacaaatgttgttagtaaagtatttcaaaatgtttacag

SEQ ID NO: 44182 - DNA, 40 bp, Homo sapiens
tgtaaacattttgaaatactttactaacaacatttgtaat

SEQ ID NO: 44183 - DNA, 40 bp, Homo sapiens
attacaaatgttgttagtaaagtatttcaaaatgtttaca

SEQ ID NO: 44184 - DNA, 40 bp, Homo sapiens
gtaaacattttgaaatactttactaacaacatttgtaatg

SEQ ID NO: 44185 - DNA, 40 bp, Homo sapiens
cattacaaatgttgttagtaaagtatttcaaaatgtttac

SEQ ID NO: 44186 - DNA, 40 bp, Homo sapiens
taaacattttgaaatactttactaacaacatttgtaatga

SEQ ID NO: 44187 - DNA, 40 bp, Homo sapiens
tcattacaaatgttgttagtaaagtatttcaaaatgttta

SEQ ID NO: 44188 - DNA, 40 bp, Homo sapiens
aaacattttgaaatactttactaacaacatttgtaatgac

SEQ ID NO: 44189 - DNA, 40 bp, Homo sapiens
gtcattacaaatgttgttagtaaagtatttcaaaatgttt

SEQ ID NO: 44190 - DNA, 40 bp, Homo sapiens
aacattttgaaatactttactaacaacatttgtaatgacc

SEQ ID NO: 44191 - DNA, 40 bp, Homo sapiens
ggtcattacaaatgttgttagtaaagtatttcaaaatgtt

SEQ ID NO: 44192 - DNA, 40 bp, Homo sapiens
acattttgaaatactttactaacaacatttgtaatgacca

SEQ ID NO: 44193 - DNA, 40 bp, Homo sapiens
tggtcattacaaatgttgttagtaaagtatttcaaaatgt

SEQ ID NO: 44194 - DNA, 40 bp, Homo sapiens
cattttgaaatactttactaacaacatttgtaatgaccat

SEQ ID NO: 44195 - DNA, 40 bp, Homo sapiens
atggtcattacaaatgttgttagtaaagtatttcaaaatg

SEQ ID NO: 44196 - DNA, 40 bp, Homo sapiens
attttgaaatactttactaacaacatttgtaatgaccatt

SEQ ID NO: 44197 - DNA, 40 bp, Homo sapiens
aatggtcattacaaatgttgttagtaaagtatttcaaaat

SEQ ID NO: 44198 - DNA, 40 bp, Homo sapiens
ttttgaaatactttactaacaacatttgtaatgaccattc

SEQ ID NO: 44199 - DNA, 40 bp, Homo sapiens
gaatggtcattacaaatgttgttagtaaagtatttcaaaa

SEQ ID NO: 44200 - DNA, 40 bp, Homo sapiens
tttgaaatactttactaacaacatttgtaatgaccattct

SEQ ID NO: 44201 - DNA, 40 bp, Homo sapiens
agaatggtcattacaaatgttgttagtaaagtatttcaaa

SEQ ID NO: 44202 - DNA, 40 bp, Homo sapiens
ttgaaatactttactaacaacatttgtaatgaccattctt

SEQ ID NO: 44203 - DNA, 40 bp, Homo sapiens
aagaatggtcattacaaatgttgttagtaaagtatttcaa

SEQ ID NO: 44204 - DNA, 40 bp, Homo sapiens
tgaaatactttactaacaacatttgtaatgaccattcttt

SEQ ID NO: 44205 - DNA, 40 bp, Homo sapiens
aaagaatggtcattacaaatgttgttagtaaagtatttca

SEQ ID NO: 44206 - DNA, 40 bp, Homo sapiens
gaaatactttactaacaacatttgtaatgaccattctttc

SEQ ID NO: 44207 - DNA, 40 bp, Homo sapiens
gaaagaatggtcattacaaatgttgttagtaaagtatttc

SEQ ID NO: 44208 - DNA, 40 bp, Homo sapiens
aaatactttactaacaacatttgtaatgaccattctttct

SEQ ID NO: 44209 - DNA, 40 bp, Homo sapiens
agaaagaatggtcattacaaatgttgttagtaaagtattt

SEQ ID NO: 44210 - DNA, 40 bp, Homo sapiens
aatactttactaacaacatttgtaatgaccattctttctc

SEQ ID NO: 44211 - DNA, 40 bp, Homo sapiens
gagaaagaatggtcattacaaatgttgttagtaaagtatt

SEQ ID NO: 44212 - DNA, 40 bp, Homo sapiens
atactttactaacaacatttgtaatgaccattctttctct

SEQ ID NO: 44213 - DNA, 40 bp, Homo sapiens
agagaaagaatggtcattacaaatgttgttagtaaagtat

SEQ ID NO: 44214 - DNA, 40 bp, Homo sapiens
tactttactaacaacatttgtaatgaccattctttctctc

SEQ ID NO: 44215 - DNA, 40 bp, Homo sapiens
gagagaaagaatggtcattacaaatgttgttagtaaagta

SEQ ID NO: 44216 - DNA, 40 bp, Homo sapiens
actttactaacaacatttgtaatgaccattctttctctct

SEQ ID NO: 44217 - DNA, 40 bp, Homo sapiens
agagagaaagaatggtcattacaaatgttgttagtaaagt

SEQ ID NO: 44218 - DNA, 40 bp, Homo sapiens
ctttactaacaacatttgtaatgaccattctttctctctt

SEQ ID NO: 44219 - DNA, 40 bp, Homo sapiens
aagagagaaagaatggtcattacaaatgttgttagtaaag

SEQ ID NO: 44220 - DNA, 40 bp, Homo sapiens
tttactaacaacatttgtaatgaccattctttctctcttt

SEQ ID NO: 44221 - DNA, 40 bp, Homo sapiens
aaagagagaaagaatggtcattacaaatgttgttagtaaa

SEQ ID NO: 44222 - DNA, 40 bp, Homo sapiens
ttactaacaacatttgtaatgaccattctttctctctttc

SEQ ID NO: 44223 - DNA, 40 bp, Homo sapiens
gaaagagagaaagaatggtcattacaaatgttgttagtaa

SEQ ID NO: 44224 - DNA, 40 bp, Homo sapiens
tactaacaacatttgtaatgaccattctttctctctttct

SEQ ID NO: 44225 - DNA, 40 bp, Homo sapiens
agaaagagagaaagaatggtcattacaaatgttgttagta

SEQ ID NO: 44226 - DNA, 40 bp, Homo sapiens
actaacaacatttgtaatgaccattctttctctctttctc

SEQ ID NO: 44227 - DNA, 40 bp, Homo sapiens
gagaaagagagaaagaatggtcattacaaatgttgttagt

SEQ ID NO: 44228 - DNA, 40 bp, Homo sapiens
ctaacaacatttgtaatgaccattctttctctctttctcc

SEQ ID NO: 44229 - DNA, 40 bp, Homo sapiens
ggagaaagagagaaagaatggtcattacaaatgttgttag

SEQ ID NO: 44230 - DNA, 40 bp, Homo sapiens
taacaacatttgtaatgaccattctttctctctttctccc

SEQ ID NO: 44231 - DNA, 40 bp, Homo sapiens
gggagaaagagagaaagaatggtcattacaaatgttgtta

SEQ ID NO: 44232 - DNA, 40 bp, Homo sapiens
aacaacatttgtaatgaccattctttctctctttctccct

SEQ ID NO: 44233 - DNA, 40 bp, Homo sapiens
agggagaaagagagaaagaatggtcattacaaatgttgtt

SEQ ID NO: 44234 - DNA, 40 bp, Homo sapiens
acaacatttgtaatgaccattctttctctctttctccctc

SEQ ID NO: 44235 - DNA, 40 bp, Homo sapiens
gagggagaaagagagaaagaatggtcattacaaatgttgt

SEQ ID NO: 44236 - DNA, 40 bp, Homo sapiens
caacatttgtaatgaccattctttctctctttctccctct

SEQ ID NO: 44237 - DNA, 40 bp, Homo sapiens
agagggagaaagagagaaagaatggtcattacaaatgttg

SEQ ID NO: 44238 - DNA, 40 bp, Homo sapiens
aacatttgtaatgaccattctttctctctttctccctctg

SEQ ID NO: 44239 - DNA, 40 bp, Homo sapiens
cagagggagaaagagagaaagaatggtcattacaaatgtt

SEQ ID NO: 44240 - DNA, 40 bp, Homo sapiens
acatttgtaatgaccattctttctctctttctccctctga

SEQ ID NO: 44241 - DNA, 40 bp, Homo sapiens
tcagagggagaaagagagaaagaatggtcattacaaatgt

SEQ ID NO: 44242 - DNA, 40 bp, Homo sapiens
catttgtaatgaccattctttctctctttctccctctgat

SEQ ID NO: 44243 - DNA, 40 bp, Homo sapiens
atcagagggagaaagagagaaagaatggtcattacaaatg

SEQ ID NO: 44244 - DNA, 40 bp, Homo sapiens
atttgtaatgaccattctttctctctttctccctctgata

SEQ ID NO: 44245 - DNA, 40 bp, Homo sapiens
tatcagagggagaaagagagaaagaatggtcattacaaat

SEQ ID NO: 44246 - DNA, 40 bp, Homo sapiens
tttgtaatgaccattctttctctctttctccctctgatag

SEQ ID NO: 44247 - DNA, 40 bp, Homo sapiens
ctatcagagggagaaagagagaaagaatggtcattacaaa

SEQ ID NO: 44248 - DNA, 40 bp, Homo sapiens
ttgtaatgaccattctttctctctttctccctctgataga

SEQ ID NO: 44249 - DNA, 40 bp, Homo sapiens
tctatcagagggagaaagagagaaagaatggtcattacaa

SEQ ID NO: 44250 - DNA, 40 bp, Homo sapiens
tgtaatgaccattctttctctctttctccctctgatagaa

SEQ ID NO: 44251 - DNA, 40 bp, Homo sapiens
ttctatcagagggagaaagagagaaagaatggtcattaca

SEQ ID NO: 44252 - DNA, 40 bp, Homo sapiens
gtaatgaccattctttctctctttctccctctgatagaat

SEQ ID NO: 44253 - DNA, 40 bp, Homo sapiens
attctatcagagggagaaagagagaaagaatggtcattac

SEQ ID NO: 44254 - DNA, 40 bp, Homo sapiens
taatgaccattctttctctctttctccctctgatagaatg

SEQ ID NO: 44255 - DNA, 40 bp, Homo sapiens
cattctatcagagggagaaagagagaaagaatggtcatta

SEQ ID NO: 44256 - DNA, 40 bp, Homo sapiens
aatgaccattctttctctctttctccctctgatagaatgg

SEQ ID NO: 44257 - DNA, 40 bp, Homo sapiens
ccattctatcagagggagaaagagagaaagaatggtcatt

SEQ ID NO: 44258 - DNA, 40 bp, Homo sapiens
atgaccattctttctctctttctccctctgatagaatggt

SEQ ID NO: 44259 - DNA, 40 bp, Homo sapiens
accattctatcagagggagaaagagagaaagaatggtcat

SEQ ID NO: 44260 - DNA, 40 bp, Homo sapiens
tgaccattctttctctctttctccctctgatagaatggtc

SEQ ID NO: 44261 - DNA, 40 bp, Homo sapiens
gaccattctatcagagggagaaagagagaaagaatggtca

SEQ ID NO: 44262 - DNA, 40 bp, Homo sapiens
gaccattctttctctctttctccctctgatagaatggtct

SEQ ID NO: 44263 - DNA, 40 bp, Homo sapiens
agaccattctatcagagggagaaagagagaaagaatggtc

SEQ ID NO: 44264 - DNA, 40 bp, Homo sapiens
accattctttctctctttctccctctgatagaatggtcta

SEQ ID NO: 44265 - DNA, 40 bp, Homo sapiens
tagaccattctatcagagggagaaagagagaaagaatggt

SEQ ID NO: 44266 - DNA, 40 bp, Homo sapiens
ccattctttctctctttctccctctgatagaatggtctac

SEQ ID NO: 44267 - DNA, 40 bp, Homo sapiens
gtagaccattctatcagagggagaaagagagaaagaatgg

SEQ ID NO: 44268 - DNA, 40 bp, Homo sapiens
cattctttctctctttctccctctgatagaatggtctaca

SEQ ID NO: 44269 - DNA, 40 bp, Homo sapiens
tgtagaccattctatcagagggagaaagagagaaagaatg

SEQ ID NO: 44270 - DNA, 40 bp, Homo sapiens
attctttctctctttctccctctgatagaatggtctacag

SEQ ID NO: 44271 - DNA, 40 bp, Homo sapiens
ctgtagaccattctatcagagggagaaagagagaaagaat

SEQ ID NO: 44272 - DNA, 40 bp, Homo sapiens
ttctttctctctttctccctctgatagaatggtctacaga

SEQ ID NO: 44273 - DNA, 40 bp, Homo sapiens
tctgtagaccattctatcagagggagaaagagagaaagaa

SEQ ID NO: 44274 - DNA, 40 bp, Homo sapiens
tctttctctctttctccctctgatagaatggtctacagag

SEQ ID NO: 44275 - DNA, 40 bp, Homo sapiens
ctctgtagaccattctatcagagggagaaagagagaaaga

SEQ ID NO: 44276 - DNA, 40 bp, Homo sapiens
ctttctctctttctccctctgatagaatggtctacagagt

SEQ ID NO: 44277 - DNA, 40 bp, Homo sapiens
actctgtagaccattctatcagagggagaaagagagaaag

SEQ ID NO: 44278 - DNA, 40 bp, Homo sapiens
tttctctctttctccctctgatagaatggtctacagagta

SEQ ID NO: 44279 - DNA, 40 bp, Homo sapiens
tactctgtagaccattctatcagagggagaaagagagaaa

SEQ ID NO: 44280 - DNA, 40 bp, Homo sapiens
ttctctctttctccctctgatagaatggtctacagagtaa

SEQ ID NO: 44281 - DNA, 40 bp, Homo sapiens
ttactctgtagaccattctatcagagggagaaagagagaa

SEQ ID NO: 44282 - DNA, 40 bp, Homo sapiens
tctctctttctccctctgatagaatggtctacagagtaat

SEQ ID NO: 44283 - DNA, 40 bp, Homo sapiens
attactctgtagaccattctatcagagggagaaagagaga

SEQ ID NO: 44284 - DNA, 40 bp, Homo sapiens
ctctctttctccctctgatagaatggtctacagagtaatt

SEQ ID NO: 44285 - DNA, 40 bp, Homo sapiens
aattactctgtagaccattctatcagagggagaaagagag

SEQ ID NO: 44286 - DNA, 40 bp, Homo sapiens
tctctttctccctctgatagaatggtctacagagtaattc

SEQ ID NO: 44287 - DNA, 40 bp, Homo sapiens
gaattactctgtagaccattctatcagagggagaaagaga

SEQ ID NO: 44288 - DNA, 40 bp, Homo sapiens
ctctttctccctctgatagaatggtctacagagtaattca

SEQ ID NO: 44289 - DNA, 40 bp, Homo sapiens
tgaattactctgtagaccattctatcagagggagaaagag

SEQ ID NO: 44290 - DNA, 40 bp, Homo sapiens
tctttctccctctgatagaatggtctacagagtaattcat

SEQ ID NO: 44291 - DNA, 40 bp, Homo sapiens
atgaattactctgtagaccattctatcagagggagaaaga

SEQ ID NO: 44292 - DNA, 40 bp, Homo sapiens
ctttctccctctgatagaatggtctacagagtaattcata

SEQ ID NO: 44293 - DNA, 40 bp, Homo sapiens
tatgaattactctgtagaccattctatcagagggagaaag

SEQ ID NO: 44294 - DNA, 40 bp, Homo sapiens
tttctccctctgatagaatggtctacagagtaattcataa

SEQ ID NO: 44295 - DNA, 40 bp, Homo sapiens
ttatgaattactctgtagaccattctatcagagggagaaa

SEQ ID NO: 44296 - DNA, 40 bp, Homo sapiens
ttctccctctgatagaatggtctacagagtaattcataaa

SEQ ID NO: 44297 - DNA, 40 bp, Homo sapiens
tttatgaattactctgtagaccattctatcagagggagaa

SEQ ID NO: 44298 - DNA, 40 bp, Homo sapiens
tctccctctgatagaatggtctacagagtaattcataaac

SEQ ID NO: 44299 - DNA, 40 bp, Homo sapiens
gtttatgaattactctgtagaccattctatcagagggaga

SEQ ID NO: 44300 - DNA, 40 bp, Homo sapiens
ctccctctgatagaatggtctacagagtaattcataaact

SEQ ID NO: 44301 - DNA, 40 bp, Homo sapiens
agtttatgaattactctgtagaccattctatcagagggag

SEQ ID NO: 44302 - DNA, 40 bp, Homo sapiens
tccctctgatagaatggtctacagagtaattcataaacta

SEQ ID NO: 44303 - DNA, 40 bp, Homo sapiens
tagtttatgaattactctgtagaccattctatcagaggga

SEQ ID NO: 44304 - DNA, 40 bp, Homo sapiens
ccctctgatagaatggtctacagagtaattcataaactaa

SEQ ID NO: 44305 - DNA, 40 bp, Homo sapiens
ttagtttatgaattactctgtagaccattctatcagaggg

SEQ ID NO: 44306 - DNA, 40 bp, Homo sapiens
cctctgatagaatggtctacagagtaattcataaactaaa

SEQ ID NO: 44307 - DNA, 40 bp, Homo sapiens
tttagtttatgaattactctgtagaccattctatcagagg

SEQ ID NO: 44308 - DNA, 40 bp, Homo sapiens
ctctgatagaatggtctacagagtaattcataaactaaac

SEQ ID NO: 44309 - DNA, 40 bp, Homo sapiens
gtttagtttatgaattactctgtagaccattctatcagag

SEQ ID NO: 44310 - DNA, 40 bp, Homo sapiens
tctgatagaatggtctacagagtaattcataaactaaaca

SEQ ID NO: 44311 - DNA, 40 bp, Homo sapiens
tgtttagtttatgaattactctgtagaccattctatcaga

SEQ ID NO: 44312 - DNA, 40 bp, Homo sapiens
ctgatagaatggtctacagagtaattcataaactaaacat

SEQ ID NO: 44313 - DNA, 40 bp, Homo sapiens
atgtttagtttatgaattactctgtagaccattctatcag

SEQ ID NO: 44314 - DNA, 40 bp, Homo sapiens
tgatagaatggtctacagagtaattcataaactaaacata

SEQ ID NO: 44315 - DNA, 40 bp, Homo sapiens
tatgtttagtttatgaattactctgtagaccattctatca

SEQ ID NO: 44316 - DNA, 40 bp, Homo sapiens
gatagaatggtctacagagtaattcataaactaaacatac

SEQ ID NO: 44317 - DNA, 40 bp, Homo sapiens
gtatgtttagtttatgaattactctgtagaccattctatc

SEQ ID NO: 44318 - DNA, 40 bp, Homo sapiens
atagaatggtctacagagtaattcataaactaaacatact

SEQ ID NO: 44319 - DNA, 40 bp, Homo sapiens
agtatgtttagtttatgaattactctgtagaccattctat

SEQ ID NO: 44320 - DNA, 40 bp, Homo sapiens
tagaatggtctacagagtaattcataaactaaacatactt

SEQ ID NO: 44321 - DNA, 40 bp, Homo sapiens
aagtatgtttagtttatgaattactctgtagaccattcta

SEQ ID NO: 44322 - DNA, 40 bp, Homo sapiens
agaatggtctacagagtaattcataaactaaacatacttt

SEQ ID NO: 44323 - DNA, 40 bp, Homo sapiens
aaagtatgtttagtttatgaattactctgtagaccattct

SEQ ID NO: 44324 - DNA, 40 bp, Homo sapiens
gaatggtctacagagtaattcataaactaaacatacttta

SEQ ID NO: 44325 - DNA, 40 bp, Homo sapiens
taaagtatgtttagtttatgaattactctgtagaccattc

SEQ ID NO: 44326 - DNA, 40 bp, Homo sapiens
aatggtctacagagtaattcataaactaaacatactttag

SEQ ID NO: 44327 - DNA, 40 bp, Homo sapiens
ctaaagtatgtttagtttatgaattactctgtagaccatt

SEQ ID NO: 44328 - DNA, 40 bp, Homo sapiens
atggtctacagagtaattcataaactaaacatactttaga

SEQ ID NO: 44329 - DNA, 40 bp, Homo sapiens
tctaaagtatgtttagtttatgaattactctgtagaccat

SEQ ID NO: 44330 - DNA, 40 bp, Homo sapiens
tggtctacagagtaattcataaactaaacatactttagag

SEQ ID NO: 44331 - DNA, 40 bp, Homo sapiens
ctctaaagtatgtttagtttatgaattactctgtagacca

SEQ ID NO: 44332 - DNA, 40 bp, Homo sapiens
ggtctacagagtaattcataaactaaacatactttagagg

SEQ ID NO: 44333 - DNA, 40 bp, Homo sapiens
cctctaaagtatgtttagtttatgaattactctgtagacc

SEQ ID NO: 44334 - DNA, 40 bp, Homo sapiens
gtctacagagtaattcataaactaaacatactttagaggc

SEQ ID NO: 44335 - DNA, 40 bp, Homo sapiens
gcctctaaagtatgtttagtttatgaattactctgtagac

SEQ ID NO: 44336 - DNA, 40 bp, Homo sapiens
tctacagagtaattcataaactaaacatactttagaggct

SEQ ID NO: 44337 - DNA, 40 bp, Homo sapiens
agcctctaaagtatgtttagtttatgaattactctgtaga

SEQ ID NO: 44338 - DNA, 40 bp, Homo sapiens
ctacagagtaattcataaactaaacatactttagaggctg

SEQ ID NO: 44339 - DNA, 40 bp, Homo sapiens
cagcctctaaagtatgtttagtttatgaattactctgtag

SEQ ID NO: 44340 - DNA, 40 bp, Homo sapiens
tacagagtaattcataaactaaacatactttagaggctgg

SEQ ID NO: 44341 - DNA, 40 bp, Homo sapiens
ccagcctctaaagtatgtttagtttatgaattactctgta

SEQ ID NO: 44342 - DNA, 40 bp, Homo sapiens
acagagtaattcataaactaaacatactttagaggctggg

SEQ ID NO: 44343 - DNA, 40 bp, Homo sapiens
cccagcctctaaagtatgtttagtttatgaattactctgt

SEQ ID NO: 44344 - DNA, 40 bp, Homo sapiens
cagagtaattcataaactaaacatactttagaggctgggc

SEQ ID NO: 44345 - DNA, 40 bp, Homo sapiens
gcccagcctctaaagtatgtttagtttatgaattactctg

SEQ ID NO: 44346 - DNA, 40 bp, Homo sapiens
agagtaattcataaactaaacatactttagaggctgggcg

SEQ ID NO: 44347 - DNA, 40 bp, Homo sapiens
cgcccagcctctaaagtatgtttagtttatgaattactct

SEQ ID NO: 44348 - DNA, 40 bp, Homo sapiens
gagtaattcataaactaaacatactttagaggctgggcgc

SEQ ID NO: 44349 - DNA, 40 bp, Homo sapiens
gcgcccagcctctaaagtatgtttagtttatgaattactc

SEQ ID NO: 44350 - DNA, 40 bp, Homo sapiens
agtaattcataaactaaacatactttagaggctgggcgca

SEQ ID NO: 44351 - DNA, 40 bp, Homo sapiens
tgcgcccagcctctaaagtatgtttagtttatgaattact

SEQ ID NO: 44352 - DNA, 40 bp, Homo sapiens
gtaattcataaactaaacatactttagaggctgggcgcag

SEQ ID NO: 44353 - DNA, 40 bp, Homo sapiens
ctgcgcccagcctctaaagtatgtttagtttatgaattac

SEQ ID NO: 44354 - DNA, 40 bp, Homo sapiens
taattcataaactaaacatactttagaggctgggcgcagt

SEQ ID NO: 44355 - DNA, 40 bp, Homo sapiens
actgcgcccagcctctaaagtatgtttagtttatgaatta

SEQ ID NO: 44356 - DNA, 40 bp, Homo sapiens
aattcataaactaaacatactttagaggctgggcgcagtg

SEQ ID NO: 44357 - DNA, 40 bp, Homo sapiens
cactgcgcccagcctctaaagtatgtttagtttatgaatt

SEQ ID NO: 44358 - DNA, 40 bp, Homo sapiens
attcataaactaaacatactttagaggctgggcgcagtgg

SEQ ID NO: 44359 - DNA, 40 bp, Homo sapiens
ccactgcgcccagcctctaaagtatgtttagtttatgaat

SEQ ID NO: 44360 - DNA, 40 bp, Homo sapiens
ttcataaactaaacatactttagaggctgggcgcagtggc

SEQ ID NO: 44361 - DNA, 40 bp, Homo sapiens
gccactgcgcccagcctctaaagtatgtttagtttatgaa

SEQ ID NO: 44362 - DNA, 40 bp, Homo sapiens
tcataaactaaacatactttagaggctgggcgcagtggct

SEQ ID NO: 44363 - DNA, 40 bp, Homo sapiens
agccactgcgcccagcctctaaagtatgtttagtttatga

SEQ ID NO: 44364 - DNA, 40 bp, Homo sapiens
cataaactaaacatactttagaggctgggcgcagtggctc

SEQ ID NO: 44365 - DNA, 40 bp, Homo sapiens
gagccactgcgcccagcctctaaagtatgtttagtttatg

SEQ ID NO: 44366 - DNA, 40 bp, Homo sapiens
ataaactaaacatactttagaggctgggcgcagtggctca

SEQ ID NO: 44367 - DNA, 40 bp, Homo sapiens
tgagccactgcgcccagcctctaaagtatgtttagtttat

SEQ ID NO: 44368 - DNA, 40 bp, Homo sapiens
taaactaaacatactttagaggctgggcgcagtggctcat

SEQ ID NO: 44369 - DNA, 40 bp, Homo sapiens
atgagccactgcgcccagcctctaaagtatgtttagttta

SEQ ID NO: 44370 - DNA, 40 bp, Homo sapiens
aaactaaacatactttagaggctgggcgcagtggctcatg

SEQ ID NO: 44371 - DNA, 40 bp, Homo sapiens
catgagccactgcgcccagcctctaaagtatgtttagttt

SEQ ID NO: 44372 - DNA, 40 bp, Homo sapiens
aactaaacatactttagaggctgggcgcagtggctcatgc

SEQ ID NO: 44373 - DNA, 40 bp, Homo sapiens
gcatgagccactgcgcccagcctctaaagtatgtttagtt

SEQ ID NO: 44374 - DNA, 40 bp, Homo sapiens
actaaacatactttagaggctgggcgcagtggctcatgcc

SEQ ID NO: 44375 - DNA, 40 bp, Homo sapiens
ggcatgagccactgcgcccagcctctaaagtatgtttagt

SEQ ID NO: 44376 - DNA, 40 bp, Homo sapiens
ctaaacatactttagaggctgggcgcagtggctcatgcct

SEQ ID NO: 44377 - DNA, 40 bp, Homo sapiens
aggcatgagccactgcgcccagcctctaaagtatgtttag

SEQ ID NO: 44378 - DNA, 40 bp, Homo sapiens
taaacatactttagaggctgggcgcagtggctcatgcctg

SEQ ID NO: 44379 - DNA, 40 bp, Homo sapiens
caggcatgagccactgcgcccagcctctaaagtatgttta

SEQ ID NO: 44380 - DNA, 40 bp, Homo sapiens
aaacatactttagaggctgggcgcagtggctcatgcctgt

SEQ ID NO: 44381 - DNA, 40 bp, Homo sapiens
acaggcatgagccactgcgcccagcctctaaagtatgttt

SEQ ID NO: 44382 - DNA, 40 bp, Homo sapiens
aacatactttagaggctgggcgcagtggctcatgcctgta

SEQ ID NO: 44383 - DNA, 40 bp, Homo sapiens
tacaggcatgagccactgcgcccagcctctaaagtatgtt

SEQ ID NO: 44384 - DNA, 40 bp, Homo sapiens
acatactttagaggctgggcgcagtggctcatgcctgtaa

SEQ ID NO: 44385 - DNA, 40 bp, Homo sapiens
ttacaggcatgagccactgcgcccagcctctaaagtatgt

SEQ ID NO: 44386 - DNA, 40 bp, Homo sapiens
catactttagaggctgggcgcagtggctcatgcctgtaat

SEQ ID NO: 44387 - DNA, 40 bp, Homo sapiens
attacaggcatgagccactgcgcccagcctctaaagtatg

SEQ ID NO: 44388 - DNA, 40 bp, Homo sapiens
atactttagaggctgggcgcagtggctcatgcctgtaatc

SEQ ID NO: 44389 - DNA, 40 bp, Homo sapiens
gattacaggcatgagccactgcgcccagcctctaaagtat

SEQ ID NO: 44390 - DNA, 40 bp, Homo sapiens
tactttagaggctgggcgcagtggctcatgcctgtaatcc

SEQ ID NO: 44391 - DNA, 40 bp, Homo sapiens
ggattacaggcatgagccactgcgcccagcctctaaagta

SEQ ID NO: 44392 - DNA, 40 bp, Homo sapiens
actttagaggctgggcgcagtggctcatgcctgtaatccc

SEQ ID NO: 44393 - DNA, 40 bp, Homo sapiens
gggattacaggcatgagccactgcgcccagcctctaaagt

SEQ ID NO: 44394 - DNA, 40 bp, Homo sapiens
ctttagaggctgggcgcagtggctcatgcctgtaatccca

SEQ ID NO: 44395 - DNA, 40 bp, Homo sapiens
tgggattacaggcatgagccactgcgcccagcctctaaag

SEQ ID NO: 44396 - DNA, 40 bp, Homo sapiens
tttagaggctgggcgcagtggctcatgcctgtaatcccag

SEQ ID NO: 44397 - DNA, 40 bp, Homo sapiens
ctgggattacaggcatgagccactgcgcccagcctctaaa

SEQ ID NO: 44398 - DNA, 40 bp, Homo sapiens
ttagaggctgggcgcagtggctcatgcctgtaatcccagc

SEQ ID NO: 44399 - DNA, 40 bp, Homo sapiens
gctgggattacaggcatgagccactgcgcccagcctctaa

SEQ ID NO: 44400 - DNA, 40 bp, Homo sapiens
tagaggctgggcgcagtggctcatgcctgtaatcccagca

SEQ ID NO: 44401 - DNA, 40 bp, Homo sapiens
tgctgggattacaggcatgagccactgcgcccagcctcta

SEQ ID NO: 44402 - DNA, 40 bp, Homo sapiens
agaggctgggcgcagtggctcatgcctgtaatcccagcac

SEQ ID NO: 44403 - DNA, 40 bp, Homo sapiens
gtgctgggattacaggcatgagccactgcgcccagcctct

SEQ ID NO: 44404 - DNA, 40 bp, Homo sapiens
gaggctgggcgcagtggctcatgcctgtaatcccagcact

SEQ ID NO: 44405 - DNA, 40 bp, Homo sapiens
agtgctgggattacaggcatgagccactgcgcccagcctc

SEQ ID NO: 44406 - DNA, 40 bp, Homo sapiens
aggctgggcgcagtggctcatgcctgtaatcccagcactt

SEQ ID NO: 44407 - DNA, 40 bp, Homo sapiens
aagtgctgggattacaggcatgagccactgcgcccagcct

SEQ ID NO: 44408 - DNA, 40 bp, Homo sapiens
ggctgggcgcagtggctcatgcctgtaatcccagcacttt

SEQ ID NO: 44409 - DNA, 40 bp, Homo sapiens
aaagtgctgggattacaggcatgagccactgcgcccagcc

SEQ ID NO: 44410 - DNA, 40 bp, Homo sapiens
gctgggcgcagtggctcatgcctgtaatcccagcactttg

SEQ ID NO: 44411 - DNA, 40 bp, Homo sapiens
caaagtgctgggattacaggcatgagccactgcgcccagc

SEQ ID NO: 44412 - DNA, 40 bp, Homo sapiens
ctgggcgcagtggctcatgcctgtaatcccagcactttga

SEQ ID NO: 44413 - DNA, 40 bp, Homo sapiens
tcaaagtgctgggattacaggcatgagccactgcgcccag

SEQ ID NO: 44414 - DNA, 40 bp, Homo sapiens
tgggcgcagtggctcatgcctgtaatcccagcactttgag

SEQ ID NO: 44415 - DNA, 40 bp, Homo sapiens
ctcaaagtgctgggattacaggcatgagccactgcgccca

SEQ ID NO: 44416 - DNA, 40 bp, Homo sapiens
gggcgcagtggctcatgcctgtaatcccagcactttgaga

SEQ ID NO: 44417 - DNA, 40 bp, Homo sapiens
tctcaaagtgctgggattacaggcatgagccactgcgccc

SEQ ID NO: 44418 - DNA, 40 bp, Homo sapiens
ggcgcagtggctcatgcctgtaatcccagcactttgagag

SEQ ID NO: 44419 - DNA, 40 bp, Homo sapiens
ctctcaaagtgctgggattacaggcatgagccactgcgcc

SEQ ID NO: 44420 - DNA, 40 bp, Homo sapiens
gcgcagtggctcatgcctgtaatcccagcactttgagagg

SEQ ID NO: 44421 - DNA, 40 bp, Homo sapiens
cctctcaaagtgctgggattacaggcatgagccactgcgc

SEQ ID NO: 44422 - DNA, 40 bp, Homo sapiens
cgcagtggctcatgcctgtaatcccagcactttgagaggc

SEQ ID NO: 44423 - DNA, 40 bp, Homo sapiens
gcctctcaaagtgctgggattacaggcatgagccactgcg

SEQ ID NO: 44424 - DNA, 40 bp, Homo sapiens
gcagtggctcatgcctgtaatcccagcactttgagaggct

SEQ ID NO: 44425 - DNA, 40 bp, Homo sapiens
agcctctcaaagtgctgggattacaggcatgagccactgc

SEQ ID NO: 44426 - DNA, 40 bp, Homo sapiens
cagtggctcatgcctgtaatcccagcactttgagaggctg

SEQ ID NO: 44427 - DNA, 40 bp, Homo sapiens
cagcctctcaaagtgctgggattacaggcatgagccactg

SEQ ID NO: 44428 - DNA, 40 bp, Homo sapiens
agtggctcatgcctgtaatcccagcactttgagaggctga

SEQ ID NO: 44429 - DNA, 40 bp, Homo sapiens
tcagcctctcaaagtgctgggattacaggcatgagccact

SEQ ID NO: 44430 - DNA, 40 bp, Homo sapiens
gtggctcatgcctgtaatcccagcactttgagaggctgag

SEQ ID NO: 44431 - DNA, 40 bp, Homo sapiens
ctcagcctctcaaagtgctgggattacaggcatgagccac

SEQ ID NO: 44432 - DNA, 40 bp, Homo sapiens
tggctcatgcctgtaatcccagcactttgagaggctgagg

SEQ ID NO: 44433 - DNA, 40 bp, Homo sapiens
cctcagcctctcaaagtgctgggattacaggcatgagcca

SEQ ID NO: 44434 - DNA, 40 bp, Homo sapiens
ggctcatgcctgtaatcccagcactttgagaggctgaggc

SEQ ID NO: 44435 - DNA, 40 bp, Homo sapiens
gcctcagcctctcaaagtgctgggattacaggcatgagcc

SEQ ID NO: 44436 - DNA, 40 bp, Homo sapiens
gctcatgcctgtaatcccagcactttgagaggctgaggcg

SEQ ID NO: 44437 - DNA, 40 bp, Homo sapiens
cgcctcagcctctcaaagtgctgggattacaggcatgagc

SEQ ID NO: 44438 - DNA, 40 bp, Homo sapiens
ctcatgcctgtaatcccagcactttgagaggctgaggcgt

SEQ ID NO: 44439 - DNA, 40 bp, Homo sapiens
acgcctcagcctctcaaagtgctgggattacaggcatgag

SEQ ID NO: 44440 - DNA, 40 bp, Homo sapiens
tcatgcctgtaatcccagcactttgagaggctgaggcgtg

SEQ ID NO: 44441 - DNA, 40 bp, Homo sapiens
cacgcctcagcctctcaaagtgctgggattacaggcatga

SEQ ID NO: 44442 - DNA, 40 bp, Homo sapiens
catgcctgtaatcccagcactttgagaggctgaggcgtgc

SEQ ID NO: 44443 - DNA, 40 bp, Homo sapiens
gcacgcctcagcctctcaaagtgctgggattacaggcatg

SEQ ID NO: 44444 - DNA, 40 bp, Homo sapiens
atgcctgtaatcccagcactttgagaggctgaggcgtgca

SEQ ID NO: 44445 - DNA, 40 bp, Homo sapiens
tgcacgcctcagcctctcaaagtgctgggattacaggcat

SEQ ID NO: 44446 - DNA, 40 bp, Homo sapiens
tgcctgtaatcccagcactttgagaggctgaggcgtgcag

SEQ ID NO: 44447 - DNA, 40 bp, Homo sapiens
ctgcacgcctcagcctctcaaagtgctgggattacaggca

SEQ ID NO: 44448 - DNA, 40 bp, Homo sapiens
gcctgtaatcccagcactttgagaggctgaggcgtgcaga

SEQ ID NO: 44449 - DNA, 40 bp, Homo sapiens
tctgcacgcctcagcctctcaaagtgctgggattacaggc

SEQ ID NO: 44450 - DNA, 40 bp, Homo sapiens
cctgtaatcccagcactttgagaggctgaggcgtgcagat

SEQ ID NO: 44451 - DNA, 40 bp, Homo sapiens
atctgcacgcctcagcctctcaaagtgctgggattacagg

SEQ ID NO: 44452 - DNA, 40 bp, Homo sapiens
ctgtaatcccagcactttgagaggctgaggcgtgcagatc

SEQ ID NO: 44453 - DNA, 40 bp, Homo sapiens
gatctgcacgcctcagcctctcaaagtgctgggattacag

SEQ ID NO: 44454 - DNA, 40 bp, Homo sapiens
tgtaatcccagcactttgagaggctgaggcgtgcagatca

SEQ ID NO: 44455 - DNA, 40 bp, Homo sapiens
tgatctgcacgcctcagcctctcaaagtgctgggattaca

SEQ ID NO: 44456 - DNA, 40 bp, Homo sapiens
gtaatcccagcactttgagaggctgaggcgtgcagatcac

SEQ ID NO: 44457 - DNA, 40 bp, Homo sapiens
gtgatctgcacgcctcagcctctcaaagtgctgggattac

SEQ ID NO: 44458 - DNA, 40 bp, Homo sapiens
taatcccagcactttgagaggctgaggcgtgcagatcacg

SEQ ID NO: 44459 - DNA, 40 bp, Homo sapiens
cgtgatctgcacgcctcagcctctcaaagtgctgggatta

SEQ ID NO: 44460 - DNA, 40 bp, Homo sapiens
aatcccagcactttgagaggctgaggcgtgcagatcacga

SEQ ID NO: 44461 - DNA, 40 bp, Homo sapiens
tcgtgatctgcacgcctcagcctctcaaagtgctgggatt

SEQ ID NO: 44462 - DNA, 40 bp, Homo sapiens
atcccagcactttgagaggctgaggcgtgcagatcacgag

SEQ ID NO: 44463 - DNA, 40 bp, Homo sapiens
ctcgtgatctgcacgcctcagcctctcaaagtgctgggat

SEQ ID NO: 44464 - DNA, 40 bp, Homo sapiens
tcccagcactttgagaggctgaggcgtgcagatcacgagg

SEQ ID NO: 44465 - DNA, 40 bp, Homo sapiens
cctcgtgatctgcacgcctcagcctctcaaagtgctggga

SEQ ID NO: 44466 - DNA, 40 bp, Homo sapiens
cccagcactttgagaggctgaggcgtgcagatcacgaggt

SEQ ID NO: 44467 - DNA, 40 bp, Homo sapiens
acctcgtgatctgcacgcctcagcctctcaaagtgctggg

SEQ ID NO: 44468 - DNA, 40 bp, Homo sapiens
ccagcactttgagaggctgaggcgtgcagatcacgaggtc

SEQ ID NO: 44469 - DNA, 40 bp, Homo sapiens
gacctcgtgatctgcacgcctcagcctctcaaagtgctgg

SEQ ID NO: 44470 - DNA, 40 bp, Homo sapiens
cagcactttgagaggctgaggcgtgcagatcacgaggtca

SEQ ID NO: 44471 - DNA, 40 bp, Homo sapiens
tgacctcgtgatctgcacgcctcagcctctcaaagtgctg

SEQ ID NO: 44472 - DNA, 40 bp, Homo sapiens
agcactttgagaggctgaggcgtgcagatcacgaggtcag

SEQ ID NO: 44473 - DNA, 40 bp, Homo sapiens
ctgacctcgtgatctgcacgcctcagcctctcaaagtgct

SEQ ID NO: 44474 - DNA, 40 bp, Homo sapiens
gcactttgagaggctgaggcgtgcagatcacgaggtcagg

SEQ ID NO: 44475 - DNA, 40 bp, Homo sapiens
cctgacctcgtgatctgcacgcctcagcctctcaaagtgc

SEQ ID NO: 44476 - DNA, 40 bp, Homo sapiens
cactttgagaggctgaggcgtgcagatcacgaggtcagga

SEQ ID NO: 44477 - DNA, 40 bp, Homo sapiens
tcctgacctcgtgatctgcacgcctcagcctctcaaagtg

SEQ ID NO: 44478 - DNA, 40 bp, Homo sapiens
actttgagaggctgaggcgtgcagatcacgaggtcaggag

SEQ ID NO: 44479 - DNA, 40 bp, Homo sapiens
ctcctgacctcgtgatctgcacgcctcagcctctcaaagt

SEQ ID NO: 44480 - DNA, 40 bp, Homo sapiens
ctttgagaggctgaggcgtgcagatcacgaggtcaggagt

SEQ ID NO: 44481 - DNA, 40 bp, Homo sapiens
actcctgacctcgtgatctgcacgcctcagcctctcaaag

SEQ ID NO: 44482 - DNA, 40 bp, Homo sapiens
tttgagaggctgaggcgtgcagatcacgaggtcaggagtt

SEQ ID NO: 44483 - DNA, 40 bp, Homo sapiens
aactcctgacctcgtgatctgcacgcctcagcctctcaaa

SEQ ID NO: 44484 - DNA, 40 bp, Homo sapiens
ttgagaggctgaggcgtgcagatcacgaggtcaggagtta

SEQ ID NO: 44485 - DNA, 40 bp, Homo sapiens
taactcctgacctcgtgatctgcacgcctcagcctctcaa

SEQ ID NO: 44486 - DNA, 40 bp, Homo sapiens
tgagaggctgaggcgtgcagatcacgaggtcaggagttag

SEQ ID NO: 44487 - DNA, 40 bp, Homo sapiens
ctaactcctgacctcgtgatctgcacgcctcagcctctca

SEQ ID NO: 44488 - DNA, 40 bp, Homo sapiens
gagaggctgaggcgtgcagatcacgaggtcaggagttaga

SEQ ID NO: 44489 - DNA, 40 bp, Homo sapiens
tctaactcctgacctcgtgatctgcacgcctcagcctctc

SEQ ID NO: 44490 - DNA, 40 bp, Homo sapiens
agaggctgaggcgtgcagatcacgaggtcaggagttagag

SEQ ID NO: 44491 - DNA, 40 bp, Homo sapiens
ctctaactcctgacctcgtgatctgcacgcctcagcctct

SEQ ID NO: 44492 - DNA, 40 bp, Homo sapiens
gaggctgaggcgtgcagatcacgaggtcaggagttagaga

SEQ ID NO: 44493 - DNA, 40 bp, Homo sapiens
tctctaactcctgacctcgtgatctgcacgcctcagcctc

SEQ ID NO: 44494 - DNA, 40 bp, Homo sapiens
aggctgaggcgtgcagatcacgaggtcaggagttagagac

SEQ ID NO: 44495 - DNA, 40 bp, Homo sapiens
gtctctaactcctgacctcgtgatctgcacgcctcagcct

SEQ ID NO: 44496 - DNA, 40 bp, Homo sapiens
ggctgaggcgtgcagatcacgaggtcaggagttagagacc

SEQ ID NO: 44497 - DNA, 40 bp, Homo sapiens
ggtctctaactcctgacctcgtgatctgcacgcctcagcc

SEQ ID NO: 44498 - DNA, 40 bp, Homo sapiens
gctgaggcgtgcagatcacgaggtcaggagttagagacca

SEQ ID NO: 44499 - DNA, 40 bp, Homo sapiens
tggtctctaactcctgacctcgtgatctgcacgcctcagc

SEQ ID NO: 44500 - DNA, 40 bp, Homo sapiens
ctgaggcgtgcagatcacgaggtcaggagttagagaccag

SEQ ID NO: 44501 - DNA, 40 bp, Homo sapiens
ctggtctctaactcctgacctcgtgatctgcacgcctcag

SEQ ID NO: 44502 - DNA, 40 bp, Homo sapiens
tgaggcgtgcagatcacgaggtcaggagttagagaccagc

SEQ ID NO: 44503 - DNA, 40 bp, Homo sapiens
gctggtctctaactcctgacctcgtgatctgcacgcctca

SEQ ID NO: 44504 - DNA, 40 bp, Homo sapiens
gaggcgtgcagatcacgaggtcaggagttagagaccagcc

SEQ ID NO: 44505 - DNA, 40 bp, Homo sapiens
ggctggtctctaactcctgacctcgtgatctgcacgcctc

SEQ ID NO: 44506 - DNA, 40 bp, Homo sapiens
aggcgtgcagatcacgaggtcaggagttagagaccagcct

SEQ ID NO: 44507 - DNA, 40 bp, Homo sapiens
aggctggtctctaactcctgacctcgtgatctgcacgcct

SEQ ID NO: 44508 - DNA, 40 bp, Homo sapiens
ggcgtgcagatcacgaggtcaggagttagagaccagcctg

SEQ ID NO: 44509 - DNA, 40 bp, Homo sapiens
caggctggtctctaactcctgacctcgtgatctgcacgcc

SEQ ID NO: 44510 - DNA, 40 bp, Homo sapiens
gcgtgcagatcacgaggtcaggagttagagaccagcctga

SEQ ID NO: 44511 - DNA, 40 bp, Homo sapiens
tcaggctggtctctaactcctgacctcgtgatctgcacgc

SEQ ID NO: 44512 - DNA, 40 bp, Homo sapiens
cgtgcagatcacgaggtcaggagttagagaccagcctgac

SEQ ID NO: 44513 - DNA, 40 bp, Homo sapiens
gtcaggctggtctctaactcctgacctcgtgatctgcacg

SEQ ID NO: 44514 - DNA, 40 bp, Homo sapiens
gtgcagatcacgaggtcaggagttagagaccagcctgact

SEQ ID NO: 44515 - DNA, 40 bp, Homo sapiens
agtcaggctggtctctaactcctgacctcgtgatctgcac

SEQ ID NO: 44516 - DNA, 40 bp, Homo sapiens
tgcagatcacgaggtcaggagttagagaccagcctgacta

SEQ ID NO: 44517 - DNA, 40 bp, Homo sapiens
tagtcaggctggtctctaactcctgacctcgtgatctgca

SEQ ID NO: 44518 - DNA, 40 bp, Homo sapiens
gcagatcacgaggtcaggagttagagaccagcctgactaa

SEQ ID NO: 44519 - DNA, 40 bp, Homo sapiens
ttagtcaggctggtctctaactcctgacctcgtgatctgc

SEQ ID NO: 44520 - DNA, 40 bp, Homo sapiens
cagatcacgaggtcaggagttagagaccagcctgactaac

SEQ ID NO: 44521 - DNA, 40 bp, Homo sapiens
gttagtcaggctggtctctaactcctgacctcgtgatctg

SEQ ID NO: 44522 - DNA, 40 bp, Homo sapiens
agatcacgaggtcaggagttagagaccagcctgactaaca

SEQ ID NO: 44523 - DNA, 40 bp, Homo sapiens
tgttagtcaggctggtctctaactcctgacctcgtgatct

SEQ ID NO: 44524 - DNA, 40 bp, Homo sapiens
gatcacgaggtcaggagttagagaccagcctgactaacat

SEQ ID NO: 44525 - DNA, 40 bp, Homo sapiens
atgttagtcaggctggtctctaactcctgacctcgtgatc

SEQ ID NO: 44526 - DNA, 40 bp, Homo sapiens
atcacgaggtcaggagttagagaccagcctgactaacatg

SEQ ID NO: 44527 - DNA, 40 bp, Homo sapiens
catgttagtcaggctggtctctaactcctgacctcgtgat

SEQ ID NO: 44528 - DNA, 40 bp, Homo sapiens
tcacgaggtcaggagttagagaccagcctgactaacatgg

SEQ ID NO: 44529 - DNA, 40 bp, Homo sapiens
ccatgttagtcaggctggtctctaactcctgacctcgtga

SEQ ID NO: 44530 - DNA, 40 bp, Homo sapiens
cacgaggtcaggagttagagaccagcctgactaacatggt

SEQ ID NO: 44531 - DNA, 40 bp, Homo sapiens
accatgttagtcaggctggtctctaactcctgacctcgtg

SEQ ID NO: 44532 - DNA, 40 bp, Homo sapiens
acgaggtcaggagttagagaccagcctgactaacatggtg

SEQ ID NO: 44533 - DNA, 40 bp, Homo sapiens
caccatgttagtcaggctggtctctaactcctgacctcgt

SEQ ID NO: 44534 - DNA, 40 bp, Homo sapiens
cgaggtcaggagttagagaccagcctgactaacatggtga

SEQ ID NO: 44535 - DNA, 40 bp, Homo sapiens
tcaccatgttagtcaggctggtctctaactcctgacctcg

SEQ ID NO: 44536 - DNA, 40 bp, Homo sapiens
gaggtcaggagttagagaccagcctgactaacatggtgaa

SEQ ID NO: 44537 - DNA, 40 bp, Homo sapiens
ttcaccatgttagtcaggctggtctctaactcctgacctc

SEQ ID NO: 44538 - DNA, 40 bp, Homo sapiens
aggtcaggagttagagaccagcctgactaacatggtgaaa

SEQ ID NO: 44539 - DNA, 40 bp, Homo sapiens
tttcaccatgttagtcaggctggtctctaactcctgacct

SEQ ID NO: 44540 - DNA, 40 bp, Homo sapiens
ggtcaggagttagagaccagcctgactaacatggtgaaac

SEQ ID NO: 44541 - DNA, 40 bp, Homo sapiens
gtttcaccatgttagtcaggctggtctctaactcctgacc

SEQ ID NO: 44542 - DNA, 40 bp, Homo sapiens
gtcaggagttagagaccagcctgactaacatggtgaaacc

SEQ ID NO: 44543 - DNA, 40 bp, Homo sapiens
ggtttcaccatgttagtcaggctggtctctaactcctgac

SEQ ID NO: 44544 - DNA, 40 bp, Homo sapiens
tcaggagttagagaccagcctgactaacatggtgaaaccc

SEQ ID NO: 44545 - DNA, 40 bp, Homo sapiens
gggtttcaccatgttagtcaggctggtctctaactcctga

SEQ ID NO: 44546 - DNA, 40 bp, Homo sapiens
caggagttagagaccagcctgactaacatggtgaaacccc

SEQ ID NO: 44547 - DNA, 40 bp, Homo sapiens
ggggtttcaccatgttagtcaggctggtctctaactcctg

SEQ ID NO: 44548 - DNA, 40 bp, Homo sapiens
aggagttagagaccagcctgactaacatggtgaaacccca

SEQ ID NO: 44549 - DNA, 40 bp, Homo sapiens
tggggtttcaccatgttagtcaggctggtctctaactcct

SEQ ID NO: 44550 - DNA, 40 bp, Homo sapiens
ggagttagagaccagcctgactaacatggtgaaaccccat

SEQ ID NO: 44551 - DNA, 40 bp, Homo sapiens
atggggtttcaccatgttagtcaggctggtctctaactcc

SEQ ID NO: 44552 - DNA, 40 bp, Homo sapiens
gagttagagaccagcctgactaacatggtgaaaccccatc

SEQ ID NO: 44553 - DNA, 40 bp, Homo sapiens
gatggggtttcaccatgttagtcaggctggtctctaactc

SEQ ID NO: 44554 - DNA, 40 bp, Homo sapiens
agttagagaccagcctgactaacatggtgaaaccccatct

SEQ ID NO: 44555 - DNA, 40 bp, Homo sapiens
agatggggtttcaccatgttagtcaggctggtctctaact

SEQ ID NO: 44556 - DNA, 40 bp, Homo sapiens
gttagagaccagcctgactaacatggtgaaaccccatctc

SEQ ID NO: 44557 - DNA, 40 bp, Homo sapiens
gagatggggtttcaccatgttagtcaggctggtctctaac

SEQ ID NO: 44558 - DNA, 40 bp, Homo sapiens
ttagagaccagcctgactaacatggtgaaaccccatctct

SEQ ID NO: 44559 - DNA, 40 bp, Homo sapiens
agagatggggtttcaccatgttagtcaggctggtctctaa

SEQ ID NO: 44560 - DNA, 40 bp, Homo sapiens
tagagaccagcctgactaacatggtgaaaccccatctcta

SEQ ID NO: 44561 - DNA, 40 bp, Homo sapiens
tagagatggggtttcaccatgttagtcaggctggtctcta

SEQ ID NO: 44562 - DNA, 40 bp, Homo sapiens
agagaccagcctgactaacatggtgaaaccccatctctac

SEQ ID NO: 44563 - DNA, 40 bp, Homo sapiens
gtagagatggggtttcaccatgttagtcaggctggtctct

SEQ ID NO: 44564 - DNA, 40 bp, Homo sapiens
gagaccagcctgactaacatggtgaaaccccatctctact

SEQ ID NO: 44565 - DNA, 40 bp, Homo sapiens
agtagagatggggtttcaccatgttagtcaggctggtctc

SEQ ID NO: 44566 - DNA, 40 bp, Homo sapiens
agaccagcctgactaacatggtgaaaccccatctctacta

SEQ ID NO: 44567 - DNA, 40 bp, Homo sapiens
tagtagagatggggtttcaccatgttagtcaggctggtct

SEQ ID NO: 44568 - DNA, 40 bp, Homo sapiens
gaccagcctgactaacatggtgaaaccccatctctactaa

SEQ ID NO: 44569 - DNA, 40 bp, Homo sapiens
ttagtagagatggggtttcaccatgttagtcaggctggtc

SEQ ID NO: 44570 - DNA, 40 bp, Homo sapiens
accagcctgactaacatggtgaaaccccatctctactaaa

SEQ ID NO: 44571 - DNA, 40 bp, Homo sapiens
tttagtagagatggggtttcaccatgttagtcaggctggt

SEQ ID NO: 44572 - DNA, 40 bp, Homo sapiens
ccagcctgactaacatggtgaaaccccatctctactaaaa

SEQ ID NO: 44573 - DNA, 40 bp, Homo sapiens
ttttagtagagatggggtttcaccatgttagtcaggctgg

SEQ ID NO: 44574 - DNA, 40 bp, Homo sapiens
cagcctgactaacatggtgaaaccccatctctactaaaaa

SEQ ID NO: 44575 - DNA, 40 bp, Homo sapiens
tttttagtagagatggggtttcaccatgttagtcaggctg

SEQ ID NO: 44576 - DNA, 40 bp, Homo sapiens
agcctgactaacatggtgaaaccccatctctactaaaaaa

SEQ ID NO: 44577 - DNA, 40 bp, Homo sapiens
ttttttagtagagatggggtttcaccatgttagtcaggct

SEQ ID NO: 44578 - DNA, 40 bp, Homo sapiens
gcctgactaacatggtgaaaccccatctctactaaaaaaa

SEQ ID NO: 44579 - DNA, 40 bp, Homo sapiens
tttttttagtagagatggggtttcaccatgttagtcaggc

SEQ ID NO: 44580 - DNA, 40 bp, Homo sapiens
cctgactaacatggtgaaaccccatctctactaaaaaaac

SEQ ID NO: 44581 - DNA, 40 bp, Homo sapiens
gtttttttagtagagatggggtttcaccatgttagtcagg

SEQ ID NO: 44582 - DNA, 40 bp, Homo sapiens
ctgactaacatggtgaaaccccatctctactaaaaaaaca

SEQ ID NO: 44583 - DNA, 40 bp, Homo sapiens
tgtttttttagtagagatggggtttcaccatgttagtcag

SEQ ID NO: 44584 - DNA, 40 bp, Homo sapiens
tgactaacatggtgaaaccccatctctactaaaaaaacag

SEQ ID NO: 44585 - DNA, 40 bp, Homo sapiens
ctgtttttttagtagagatggggtttcaccatgttagtca

SEQ ID NO: 44586 - DNA, 40 bp, Homo sapiens
gactaacatggtgaaaccccatctctactaaaaaaacagt

SEQ ID NO: 44587 - DNA, 40 bp, Homo sapiens
actgtttttttagtagagatggggtttcaccatgttagtc

SEQ ID NO: 44588 - DNA, 40 bp, Homo sapiens
actaacatggtgaaaccccatctctactaaaaaaacagta

SEQ ID NO: 44589 - DNA, 40 bp, Homo sapiens
tactgtttttttagtagagatggggtttcaccatgttagt

SEQ ID NO: 44590 - DNA, 40 bp, Homo sapiens
ctaacatggtgaaaccccatctctactaaaaaaacagtac

SEQ ID NO: 44591 - DNA, 40 bp, Homo sapiens
gtactgtttttttagtagagatggggtttcaccatgttag

SEQ ID NO: 44592 - DNA, 40 bp, Homo sapiens
taacatggtgaaaccccatctctactaaaaaaacagtaca

SEQ ID NO: 44593 - DNA, 40 bp, Homo sapiens
tgtactgtttttttagtagagatggggtttcaccatgtta

SEQ ID NO: 44594 - DNA, 40 bp, Homo sapiens
aacatggtgaaaccccatctctactaaaaaaacagtacaa

SEQ ID NO: 44595 - DNA, 40 bp, Homo sapiens
ttgtactgtttttttagtagagatggggtttcaccatgtt

SEQ ID NO: 44596 - DNA, 40 bp, Homo sapiens
acatggtgaaaccccatctctactaaaaaaacagtacaaa

SEQ ID NO: 44597 - DNA, 40 bp, Homo sapiens
tttgtactgtttttttagtagagatggggtttcaccatgt

SEQ ID NO: 44598 - DNA, 40 bp, Homo sapiens
catggtgaaaccccatctctactaaaaaaacagtacaaaa

SEQ ID NO: 44599 - DNA, 40 bp, Homo sapiens
ttttgtactgtttttttagtagagatggggtttcaccatg

SEQ ID NO: 44600 - DNA, 40 bp, Homo sapiens
atggtgaaaccccatctctactaaaaaaacagtacaaaaa

SEQ ID NO: 44601 - DNA, 40 bp, Homo sapiens
tttttgtactgtttttttagtagagatggggtttcaccat

SEQ ID NO: 44602 - DNA, 40 bp, Homo sapiens
tggtgaaaccccatctctactaaaaaaacagtacaaaaat

SEQ ID NO: 44603 - DNA, 40 bp, Homo sapiens
atttttgtactgtttttttagtagagatggggtttcacca

SEQ ID NO: 44604 - DNA, 40 bp, Homo sapiens
ggtgaaaccccatctctactaaaaaaacagtacaaaaatt

SEQ ID NO: 44605 - DNA, 40 bp, Homo sapiens
aatttttgtactgtttttttagtagagatggggtttcacc

SEQ ID NO: 44606 - DNA, 40 bp, Homo sapiens
gtgaaaccccatctctactaaaaaaacagtacaaaaatta

SEQ ID NO: 44607 - DNA, 40 bp, Homo sapiens
taatttttgtactgtttttttagtagagatggggtttcac

SEQ ID NO: 44608 - DNA, 40 bp, Homo sapiens
tgaaaccccatctctactaaaaaaacagtacaaaaattag

SEQ ID NO: 44609 - DNA, 40 bp, Homo sapiens
ctaatttttgtactgtttttttagtagagatggggtttca

SEQ ID NO: 44610 - DNA, 40 bp, Homo sapiens
gaaaccccatctctactaaaaaaacagtacaaaaattagc

SEQ ID NO: 44611 - DNA, 40 bp, Homo sapiens
gctaatttttgtactgtttttttagtagagatggggtttc

SEQ ID NO: 44612 - DNA, 40 bp, Homo sapiens
aaaccccatctctactaaaaaaacagtacaaaaattagcc

SEQ ID NO: 44613 - DNA, 40 bp, Homo sapiens
ggctaatttttgtactgtttttttagtagagatggggttt

SEQ ID NO: 44614 - DNA, 40 bp, Homo sapiens
aaccccatctctactaaaaaaacagtacaaaaattagccg

SEQ ID NO: 44615 - DNA, 40 bp, Homo sapiens
cggctaatttttgtactgtttttttagtagagatggggtt

SEQ ID NO: 44616 - DNA, 40 bp, Homo sapiens
accccatctctactaaaaaaacagtacaaaaattagccgg

SEQ ID NO: 44617 - DNA, 40 bp, Homo sapiens
ccggctaatttttgtactgtttttttagtagagatggggt

SEQ ID NO: 44618 - DNA, 40 bp, Homo sapiens
ccccatctctactaaaaaaacagtacaaaaattagccggg

SEQ ID NO: 44619 - DNA, 40 bp, Homo sapiens
cccggctaatttttgtactgtttttttagtagagatgggg

SEQ ID NO: 44620 - DNA, 40 bp, Homo sapiens
cccatctctactaaaaaaacagtacaaaaattagccgggc

SEQ ID NO: 44621 - DNA, 40 bp, Homo sapiens
gcccggctaatttttgtactgtttttttagtagagatggg

SEQ ID NO: 44622 - DNA, 40 bp, Homo sapiens
ccatctctactaaaaaaacagtacaaaaattagccgggcg

SEQ ID NO: 44623 - DNA, 40 bp, Homo sapiens
cgcccggctaatttttgtactgtttttttagtagagatgg

SEQ ID NO: 44624 - DNA, 40 bp, Homo sapiens
catctctactaaaaaaacagtacaaaaattagccgggcgt

SEQ ID NO: 44625 - DNA, 40 bp, Homo sapiens
acgcccggctaatttttgtactgtttttttagtagagatg

SEQ ID NO: 44626 - DNA, 40 bp, Homo sapiens
atctctactaaaaaaacagtacaaaaattagccgggcgtg

SEQ ID NO: 44627 - DNA, 40 bp, Homo sapiens
cacgcccggctaatttttgtactgtttttttagtagagat

SEQ ID NO: 44628 - DNA, 40 bp, Homo sapiens
tctctactaaaaaaacagtacaaaaattagccgggcgtgg

SEQ ID NO: 44629 - DNA, 40 bp, Homo sapiens
ccacgcccggctaatttttgtactgtttttttagtagaga

SEQ ID NO: 44630 - DNA, 40 bp, Homo sapiens
ctctactaaaaaaacagtacaaaaattagccgggcgtggt

SEQ ID NO: 44631 - DNA, 40 bp, Homo sapiens
accacgcccggctaatttttgtactgtttttttagtagag

SEQ ID NO: 44632 - DNA, 40 bp, Homo sapiens
tctactaaaaaaacagtacaaaaattagccgggcgtggtg

SEQ ID NO: 44633 - DNA, 40 bp, Homo sapiens
caccacgcccggctaatttttgtactgtttttttagtaga

SEQ ID NO: 44634 - DNA, 40 bp, Homo sapiens
ctactaaaaaaacagtacaaaaattagccgggcgtggtgg

SEQ ID NO: 44635 - DNA, 40 bp, Homo sapiens
ccaccacgcccggctaatttttgtactgtttttttagtag

SEQ ID NO: 44636 - DNA, 40 bp, Homo sapiens
tactaaaaaaacagtacaaaaattagccgggcgtggtggc

SEQ ID NO: 44637 - DNA, 40 bp, Homo sapiens
gccaccacgcccggctaatttttgtactgtttttttagta

SEQ ID NO: 44638 - DNA, 40 bp, Homo sapiens
actaaaaaaacagtacaaaaattagccgggcgtggtggcg

SEQ ID NO: 44639 - DNA, 40 bp, Homo sapiens
cgccaccacgcccggctaatttttgtactgtttttttagt

SEQ ID NO: 44640 - DNA, 40 bp, Homo sapiens
ctaaaaaaacagtacaaaaattagccgggcgtggtggcgt

SEQ ID NO: 44641 - DNA, 40 bp, Homo sapiens
acgccaccacgcccggctaatttttgtactgtttttttag

SEQ ID NO: 44642 - DNA, 40 bp, Homo sapiens
taaaaaaacagtacaaaaattagccgggcgtggtggcgtg

SEQ ID NO: 44643 - DNA, 40 bp, Homo sapiens
cacgccaccacgcccggctaatttttgtactgttttttta

SEQ ID NO: 44644 - DNA, 40 bp, Homo sapiens
aaaaaaacagtacaaaaattagccgggcgtggtggcgtgc

SEQ ID NO: 44645 - DNA, 40 bp, Homo sapiens
gcacgccaccacgcccggctaatttttgtactgttttttt

SEQ ID NO: 44646 - DNA, 40 bp, Homo sapiens
aaaaaacagtacaaaaattagccgggcgtggtggcgtgca

SEQ ID NO: 44647 - DNA, 40 bp, Homo sapiens
tgcacgccaccacgcccggctaatttttgtactgtttttt

SEQ ID NO: 44648 - DNA, 40 bp, Homo sapiens
aaaaacagtacaaaaattagccgggcgtggtggcgtgcac

SEQ ID NO: 44649 - DNA, 40 bp, Homo sapiens
gtgcacgccaccacgcccggctaatttttgtactgttttt

SEQ ID NO: 44650 - DNA, 40 bp, Homo sapiens
aaaacagtacaaaaattagccgggcgtggtggcgtgcacc

SEQ ID NO: 44651 - DNA, 40 bp, Homo sapiens
ggtgcacgccaccacgcccggctaatttttgtactgtttt

SEQ ID NO: 44652 - DNA, 40 bp, Homo sapiens
aaacagtacaaaaattagccgggcgtggtggcgtgcacct

SEQ ID NO: 44653 - DNA, 40 bp, Homo sapiens
aggtgcacgccaccacgcccggctaatttttgtactgttt

SEQ ID NO: 44654 - DNA, 40 bp, Homo sapiens
aacagtacaaaaattagccgggcgtggtggcgtgcaccta

SEQ ID NO: 44655 - DNA, 40 bp, Homo sapiens
taggtgcacgccaccacgcccggctaatttttgtactgtt

SEQ ID NO: 44656 - DNA, 40 bp, Homo sapiens
acagtacaaaaattagccgggcgtggtggcgtgcacctag

SEQ ID NO: 44657 - DNA, 40 bp, Homo sapiens
ctaggtgcacgccaccacgcccggctaatttttgtactgt

SEQ ID NO: 44658 - DNA, 40 bp, Homo sapiens
cagtacaaaaattagccgggcgtggtggcgtgcacctaga

SEQ ID NO: 44659 - DNA, 40 bp, Homo sapiens
tctaggtgcacgccaccacgcccggctaatttttgtactg

SEQ ID NO: 44660 - DNA, 40 bp, Homo sapiens
agtacaaaaattagccgggcgtggtggcgtgcacctagaa

SEQ ID NO: 44661 - DNA, 40 bp, Homo sapiens
ttctaggtgcacgccaccacgcccggctaatttttgtact

SEQ ID NO: 44662 - DNA, 40 bp, Homo sapiens
gtacaaaaattagccgggcgtggtggcgtgcacctagaat

SEQ ID NO: 44663 - DNA, 40 bp, Homo sapiens
attctaggtgcacgccaccacgcccggctaatttttgtac

SEQ ID NO: 44664 - DNA, 40 bp, Homo sapiens
tacaaaaattagccgggcgtggtggcgtgcacctagaatc

SEQ ID NO: 44665 - DNA, 40 bp, Homo sapiens
gattctaggtgcacgccaccacgcccggctaatttttgta

SEQ ID NO: 44666 - DNA, 40 bp, Homo sapiens
acaaaaattagccgggcgtggtggcgtgcacctagaatcc

SEQ ID NO: 44667 - DNA, 40 bp, Homo sapiens
ggattctaggtgcacgccaccacgcccggctaatttttgt

SEQ ID NO: 44668 - DNA, 40 bp, Homo sapiens
caaaaattagccgggcgtggtggcgtgcacctagaatccc

SEQ ID NO: 44669 - DNA, 40 bp, Homo sapiens
gggattctaggtgcacgccaccacgcccggctaatttttg

SEQ ID NO: 44670 - DNA, 40 bp, Homo sapiens
aaaaattagccgggcgtggtggcgtgcacctagaatccca

SEQ ID NO: 44671 - DNA, 40 bp, Homo sapiens
tgggattctaggtgcacgccaccacgcccggctaattttt

SEQ ID NO: 44672 - DNA, 40 bp, Homo sapiens
aaaattagccgggcgtggtggcgtgcacctagaatcccag

SEQ ID NO: 44673 - DNA, 40 bp, Homo sapiens
ctgggattctaggtgcacgccaccacgcccggctaatttt

SEQ ID NO: 44674 - DNA, 40 bp, Homo sapiens
aaattagccgggcgtggtggcgtgcacctagaatcccagc

SEQ ID NO: 44675 - DNA, 40 bp, Homo sapiens
gctgggattctaggtgcacgccaccacgcccggctaattt

SEQ ID NO: 44676 - DNA, 40 bp, Homo sapiens
aattagccgggcgtggtggcgtgcacctagaatcccagct

SEQ ID NO: 44677 - DNA, 40 bp, Homo sapiens
agctgggattctaggtgcacgccaccacgcccggctaatt

SEQ ID NO: 44678 - DNA, 40 bp, Homo sapiens
attagccgggcgtggtggcgtgcacctagaatcccagcta

SEQ ID NO: 44679 - DNA, 40 bp, Homo sapiens
tagctgggattctaggtgcacgccaccacgcccggctaat

SEQ ID NO: 44680 - DNA, 40 bp, Homo sapiens
ttagccgggcgtggtggcgtgcacctagaatcccagctac

SEQ ID NO: 44681 - DNA, 40 bp, Homo sapiens
gtagctgggattctaggtgcacgccaccacgcccggctaa

SEQ ID NO: 44682 - DNA, 40 bp, Homo sapiens
tagccgggcgtggtggcgtgcacctagaatcccagctact

SEQ ID NO: 44683 - DNA, 40 bp, Homo sapiens
agtagctgggattctaggtgcacgccaccacgcccggcta

SEQ ID NO: 44684 - DNA, 40 bp, Homo sapiens
agccgggcgtggtggcgtgcacctagaatcccagctactc

SEQ ID NO: 44685 - DNA, 40 bp, Homo sapiens
gagtagctgggattctaggtgcacgccaccacgcccggct

SEQ ID NO: 44686 - DNA, 40 bp, Homo sapiens
gccgggcgtggtggcgtgcacctagaatcccagctactca

SEQ ID NO: 44687 - DNA, 40 bp, Homo sapiens
tgagtagctgggattctaggtgcacgccaccacgcccggc

SEQ ID NO: 44688 - DNA, 40 bp, Homo sapiens
ccgggcgtggtggcgtgcacctagaatcccagctactcaa

SEQ ID NO: 44689 - DNA, 40 bp, Homo sapiens
ttgagtagctgggattctaggtgcacgccaccacgcccgg

SEQ ID NO: 44690 - DNA, 40 bp, Homo sapiens
cgggcgtggtggcgtgcacctagaatcccagctactcaag

SEQ ID NO: 44691 - DNA, 40 bp, Homo sapiens
cttgagtagctgggattctaggtgcacgccaccacgcccg

SEQ ID NO: 44692 - DNA, 40 bp, Homo sapiens
gggcgtggtggcgtgcacctagaatcccagctactcaaga

SEQ ID NO: 44693 - DNA, 40 bp, Homo sapiens
tcttgagtagctgggattctaggtgcacgccaccacgccc

SEQ ID NO: 44694 - DNA, 40 bp, Homo sapiens
ggcgtggtggcgtgcacctagaatcccagctactcaagag

SEQ ID NO: 44695 - DNA, 40 bp, Homo sapiens
ctcttgagtagctgggattctaggtgcacgccaccacgcc

SEQ ID NO: 44696 - DNA, 40 bp, Homo sapiens
gcgtggtggcgtgcacctagaatcccagctactcaagagg

SEQ ID NO: 44697 - DNA, 40 bp, Homo sapiens
cctcttgagtagctgggattctaggtgcacgccaccacgc

SEQ ID NO: 44698 - DNA, 40 bp, Homo sapiens
cgtggtggcgtgcacctagaatcccagctactcaagaggc

SEQ ID NO: 44699 - DNA, 40 bp, Homo sapiens
gcctcttgagtagctgggattctaggtgcacgccaccacg

SEQ ID NO: 44700 - DNA, 40 bp, Homo sapiens
gtggtggcgtgcacctagaatcccagctactcaagaggct

SEQ ID NO: 44701 - DNA, 40 bp, Homo sapiens
agcctcttgagtagctgggattctaggtgcacgccaccac

SEQ ID NO: 44702 - DNA, 40 bp, Homo sapiens
tggtggcgtgcacctagaatcccagctactcaagaggctg

SEQ ID NO: 44703 - DNA, 40 bp, Homo sapiens
cagcctcttgagtagctgggattctaggtgcacgccacca

SEQ ID NO: 44704 - DNA, 40 bp, Homo sapiens
ggtggcgtgcacctagaatcccagctactcaagaggctga

SEQ ID NO: 44705 - DNA, 40 bp, Homo sapiens
tcagcctcttgagtagctgggattctaggtgcacgccacc

SEQ ID NO: 44706 - DNA, 40 bp, Homo sapiens
gtggcgtgcacctagaatcccagctactcaagaggctgag

SEQ ID NO: 44707 - DNA, 40 bp, Homo sapiens
ctcagcctcttgagtagctgggattctaggtgcacgccac

SEQ ID NO: 44708 - DNA, 40 bp, Homo sapiens
tggcgtgcacctagaatcccagctactcaagaggctgagg

SEQ ID NO: 44709 - DNA, 40 bp, Homo sapiens
cctcagcctcttgagtagctgggattctaggtgcacgcca

SEQ ID NO: 44710 - DNA, 40 bp, Homo sapiens
ggcgtgcacctagaatcccagctactcaagaggctgaggc

SEQ ID NO: 44711 - DNA, 40 bp, Homo sapiens
gcctcagcctcttgagtagctgggattctaggtgcacgcc

SEQ ID NO: 44712 - DNA, 40 bp, Homo sapiens
gcgtgcacctagaatcccagctactcaagaggctgaggca

SEQ ID NO: 44713 - DNA, 40 bp, Homo sapiens
tgcctcagcctcttgagtagctgggattctaggtgcacgc

SEQ ID NO: 44714 - DNA, 40 bp, Homo sapiens
cgtgcacctagaatcccagctactcaagaggctgaggcag

SEQ ID NO: 44715 - DNA, 40 bp, Homo sapiens
ctgcctcagcctcttgagtagctgggattctaggtgcacg

SEQ ID NO: 44716 - DNA, 40 bp, Homo sapiens
gtgcacctagaatcccagctactcaagaggctgaggcagg

SEQ ID NO: 44717 - DNA, 40 bp, Homo sapiens
cctgcctcagcctcttgagtagctgggattctaggtgcac

SEQ ID NO: 44718 - DNA, 40 bp, Homo sapiens
tgcacctagaatcccagctactcaagaggctgaggcagga

SEQ ID NO: 44719 - DNA, 40 bp, Homo sapiens
tcctgcctcagcctcttgagtagctgggattctaggtgca

SEQ ID NO: 44720 - DNA, 40 bp, Homo sapiens
gcacctagaatcccagctactcaagaggctgaggcaggag

SEQ ID NO: 44721 - DNA, 40 bp, Homo sapiens
ctcctgcctcagcctcttgagtagctgggattctaggtgc

SEQ ID NO: 44722 - DNA, 40 bp, Homo sapiens
cacctagaatcccagctactcaagaggctgaggcaggaga

SEQ ID NO: 44723 - DNA, 40 bp, Homo sapiens
tctcctgcctcagcctcttgagtagctgggattctaggtg

SEQ ID NO: 44724 - DNA, 40 bp, Homo sapiens
acctagaatcccagctactcaagaggctgaggcaggagaa

SEQ ID NO: 44725 - DNA, 40 bp, Homo sapiens
ttctcctgcctcagcctcttgagtagctgggattctaggt

SEQ ID NO: 44726 - DNA, 40 bp, Homo sapiens
cctagaatcccagctactcaagaggctgaggcaggagaat

SEQ ID NO: 44727 - DNA, 40 bp, Homo sapiens
attctcctgcctcagcctcttgagtagctgggattctagg

SEQ ID NO: 44728 - DNA, 40 bp, Homo sapiens
ctagaatcccagctactcaagaggctgaggcaggagaatc

SEQ ID NO: 44729 - DNA, 40 bp, Homo sapiens
gattctcctgcctcagcctcttgagtagctgggattctag

SEQ ID NO: 44730 - DNA, 40 bp, Homo sapiens
tagaatcccagctactcaagaggctgaggcaggagaatca

SEQ ID NO: 44731 - DNA, 40 bp, Homo sapiens
tgattctcctgcctcagcctcttgagtagctgggattcta

SEQ ID NO: 44732 - DNA, 40 bp, Homo sapiens
agaatcccagctactcaagaggctgaggcaggagaatcac

SEQ ID NO: 44733 - DNA, 40 bp, Homo sapiens
gtgattctcctgcctcagcctcttgagtagctgggattct

SEQ ID NO: 44734 - DNA, 40 bp, Homo sapiens
gaatcccagctactcaagaggctgaggcaggagaatcact

SEQ ID NO: 44735 - DNA, 40 bp, Homo sapiens
agtgattctcctgcctcagcctcttgagtagctgggattc

SEQ ID NO: 44736 - DNA, 40 bp, Homo sapiens
aatcccagctactcaagaggctgaggcaggagaatcactc

SEQ ID NO: 44737 - DNA, 40 bp, Homo sapiens
gagtgattctcctgcctcagcctcttgagtagctgggatt

SEQ ID NO: 44738 - DNA, 40 bp, Homo sapiens
atcccagctactcaagaggctgaggcaggagaatcactcg

SEQ ID NO: 44739 - DNA, 40 bp, Homo sapiens
cgagtgattctcctgcctcagcctcttgagtagctgggat

SEQ ID NO: 44740 - DNA, 40 bp, Homo sapiens
tcccagctactcaagaggctgaggcaggagaatcactcga

SEQ ID NO: 44741 - DNA, 40 bp, Homo sapiens
tcgagtgattctcctgcctcagcctcttgagtagctggga

SEQ ID NO: 44742 - DNA, 40 bp, Homo sapiens
cccagctactcaagaggctgaggcaggagaatcactcgag

SEQ ID NO: 44743 - DNA, 40 bp, Homo sapiens
ctcgagtgattctcctgcctcagcctcttgagtagctggg

SEQ ID NO: 44744 - DNA, 40 bp, Homo sapiens
ccagctactcaagaggctgaggcaggagaatcactcgagc

SEQ ID NO: 44745 - DNA, 40 bp, Homo sapiens
gctcgagtgattctcctgcctcagcctcttgagtagctgg

SEQ ID NO: 44746 - DNA, 40 bp, Homo sapiens
cagctactcaagaggctgaggcaggagaatcactcgagcc

SEQ ID NO: 44747 - DNA, 40 bp, Homo sapiens
ggctcgagtgattctcctgcctcagcctcttgagtagctg

SEQ ID NO: 44748 - DNA, 40 bp, Homo sapiens
agctactcaagaggctgaggcaggagaatcactcgagccc

SEQ ID NO: 44749 - DNA, 40 bp, Homo sapiens
gggctcgagtgattctcctgcctcagcctcttgagtagct

SEQ ID NO: 44750 - DNA, 40 bp, Homo sapiens
gctactcaagaggctgaggcaggagaatcactcgagccca

SEQ ID NO: 44751 - DNA, 40 bp, Homo sapiens
tgggctcgagtgattctcctgcctcagcctcttgagtagc

SEQ ID NO: 44752 - DNA, 40 bp, Homo sapiens
ctactcaagaggctgaggcaggagaatcactcgagcccag

SEQ ID NO: 44753 - DNA, 40 bp, Homo sapiens
ctgggctcgagtgattctcctgcctcagcctcttgagtag

SEQ ID NO: 44754 - DNA, 40 bp, Homo sapiens
tactcaagaggctgaggcaggagaatcactcgagcccagg

SEQ ID NO: 44755 - DNA, 40 bp, Homo sapiens
cctgggctcgagtgattctcctgcctcagcctcttgagta

SEQ ID NO: 44756 - DNA, 40 bp, Homo sapiens
actcaagaggctgaggcaggagaatcactcgagcccagga

SEQ ID NO: 44757 - DNA, 40 bp, Homo sapiens
tcctgggctcgagtgattctcctgcctcagcctcttgagt

SEQ ID NO: 44758 - DNA, 40 bp, Homo sapiens
ctcaagaggctgaggcaggagaatcactcgagcccaggag

SEQ ID NO: 44759 - DNA, 40 bp, Homo sapiens
ctcctgggctcgagtgattctcctgcctcagcctcttgag

SEQ ID NO: 44760 - DNA, 40 bp, Homo sapiens
tcaagaggctgaggcaggagaatcactcgagcccaggagg

SEQ ID NO: 44761 - DNA, 40 bp, Homo sapiens
cctcctgggctcgagtgattctcctgcctcagcctcttga

SEQ ID NO: 44762 - DNA, 40 bp, Homo sapiens
caagaggctgaggcaggagaatcactcgagcccaggaggc

SEQ ID NO: 44763 - DNA, 40 bp, Homo sapiens
gcctcctgggctcgagtgattctcctgcctcagcctcttg

SEQ ID NO: 44764 - DNA, 40 bp, Homo sapiens
aagaggctgaggcaggagaatcactcgagcccaggaggca

SEQ ID NO: 44765 - DNA, 40 bp, Homo sapiens
tgcctcctgggctcgagtgattctcctgcctcagcctctt

SEQ ID NO: 44766 - DNA, 40 bp, Homo sapiens
agaggctgaggcaggagaatcactcgagcccaggaggcag

SEQ ID NO: 44767 - DNA, 40 bp, Homo sapiens
ctgcctcctgggctcgagtgattctcctgcctcagcctct

SEQ ID NO: 44768 - DNA, 40 bp, Homo sapiens
gaggctgaggcaggagaatcactcgagcccaggaggcaga

SEQ ID NO: 44769 - DNA, 40 bp, Homo sapiens
tctgcctcctgggctcgagtgattctcctgcctcagcctc

SEQ ID NO: 44770 - DNA, 40 bp, Homo sapiens
aggctgaggcaggagaatcactcgagcccaggaggcagag

SEQ ID NO: 44771 - DNA, 40 bp, Homo sapiens
ctctgcctcctgggctcgagtgattctcctgcctcagcct

SEQ ID NO: 44772 - DNA, 40 bp, Homo sapiens
ggctgaggcaggagaatcactcgagcccaggaggcagagg

SEQ ID NO: 44773 - DNA, 40 bp, Homo sapiens
cctctgcctcctgggctcgagtgattctcctgcctcagcc

SEQ ID NO: 44774 - DNA, 40 bp, Homo sapiens
gctgaggcaggagaatcactcgagcccaggaggcagaggt

SEQ ID NO: 44775 - DNA, 40 bp, Homo sapiens
acctctgcctcctgggctcgagtgattctcctgcctcagc

SEQ ID NO: 44776 - DNA, 40 bp, Homo sapiens
ctgaggcaggagaatcactcgagcccaggaggcagaggtt

SEQ ID NO: 44777 - DNA, 40 bp, Homo sapiens
aacctctgcctcctgggctcgagtgattctcctgcctcag

SEQ ID NO: 44778 - DNA, 40 bp, Homo sapiens
tgaggcaggagaatcactcgagcccaggaggcagaggttg

SEQ ID NO: 44779 - DNA, 40 bp, Homo sapiens
caacctctgcctcctgggctcgagtgattctcctgcctca

SEQ ID NO: 44780 - DNA, 40 bp, Homo sapiens
gaggcaggagaatcactcgagcccaggaggcagaggttgt

SEQ ID NO: 44781 - DNA, 40 bp, Homo sapiens
acaacctctgcctcctgggctcgagtgattctcctgcctc

SEQ ID NO: 44782 - DNA, 40 bp, Homo sapiens
aggcaggagaatcactcgagcccaggaggcagaggttgta

SEQ ID NO: 44783 - DNA, 40 bp, Homo sapiens
tacaacctctgcctcctgggctcgagtgattctcctgcct

SEQ ID NO: 44784 - DNA, 40 bp, Homo sapiens
ggcaggagaatcactcgagcccaggaggcagaggttgtag

SEQ ID NO: 44785 - DNA, 40 bp, Homo sapiens
ctacaacctctgcctcctgggctcgagtgattctcctgcc

SEQ ID NO: 44786 - DNA, 40 bp, Homo sapiens
gcaggagaatcactcgagcccaggaggcagaggttgtagt

SEQ ID NO: 44787 - DNA, 40 bp, Homo sapiens
actacaacctctgcctcctgggctcgagtgattctcctgc

SEQ ID NO: 44788 - DNA, 40 bp, Homo sapiens
caggagaatcactcgagcccaggaggcagaggttgtagtg

SEQ ID NO: 44789 - DNA, 40 bp, Homo sapiens
cactacaacctctgcctcctgggctcgagtgattctcctg

SEQ ID NO: 44790 - DNA, 40 bp, Homo sapiens
aggagaatcactcgagcccaggaggcagaggttgtagtga

SEQ ID NO: 44791 - DNA, 40 bp, Homo sapiens
tcactacaacctctgcctcctgggctcgagtgattctcct

SEQ ID NO: 44792 - DNA, 40 bp, Homo sapiens
ggagaatcactcgagcccaggaggcagaggttgtagtgag

SEQ ID NO: 44793 - DNA, 40 bp, Homo sapiens
ctcactacaacctctgcctcctgggctcgagtgattctcc

SEQ ID NO: 44794 - DNA, 40 bp, Homo sapiens
gagaatcactcgagcccaggaggcagaggttgtagtgagc

SEQ ID NO: 44795 - DNA, 40 bp, Homo sapiens
gctcactacaacctctgcctcctgggctcgagtgattctc

SEQ ID NO: 44796 - DNA, 40 bp, Homo sapiens
agaatcactcgagcccaggaggcagaggttgtagtgagcc

SEQ ID NO: 44797 - DNA, 40 bp, Homo sapiens
ggctcactacaacctctgcctcctgggctcgagtgattct

SEQ ID NO: 44798 - DNA, 40 bp, Homo sapiens
gaatcactcgagcccaggaggcagaggttgtagtgagccg

SEQ ID NO: 44799 - DNA, 40 bp, Homo sapiens
cggctcactacaacctctgcctcctgggctcgagtgattc

SEQ ID NO: 44800 - DNA, 40 bp, Homo sapiens
aatcactcgagcccaggaggcagaggttgtagtgagccga

SEQ ID NO: 44801 - DNA, 40 bp, Homo sapiens
tcggctcactacaacctctgcctcctgggctcgagtgatt

SEQ ID NO: 44802 - DNA, 40 bp, Homo sapiens
atcactcgagcccaggaggcagaggttgtagtgagccgag

SEQ ID NO: 44803 - DNA, 40 bp, Homo sapiens
ctcggctcactacaacctctgcctcctgggctcgagtgat

SEQ ID NO: 44804 - DNA, 40 bp, Homo sapiens
tcactcgagcccaggaggcagaggttgtagtgagccgaga

SEQ ID NO: 44805 - DNA, 40 bp, Homo sapiens
tctcggctcactacaacctctgcctcctgggctcgagtga

SEQ ID NO: 44806 - DNA, 40 bp, Homo sapiens
cactcgagcccaggaggcagaggttgtagtgagccgagat

SEQ ID NO: 44807 - DNA, 40 bp, Homo sapiens
atctcggctcactacaacctctgcctcctgggctcgagtg

SEQ ID NO: 44808 - DNA, 40 bp, Homo sapiens
actcgagcccaggaggcagaggttgtagtgagccgagatt

SEQ ID NO: 44809 - DNA, 40 bp, Homo sapiens
aatctcggctcactacaacctctgcctcctgggctcgagt

SEQ ID NO: 44810 - DNA, 40 bp, Homo sapiens
ctcgagcccaggaggcagaggttgtagtgagccgagattg

SEQ ID NO: 44811 - DNA, 40 bp, Homo sapiens
caatctcggctcactacaacctctgcctcctgggctcgag

SEQ ID NO: 44812 - DNA, 40 bp, Homo sapiens
tcgagcccaggaggcagaggttgtagtgagccgagattgc

SEQ ID NO: 44813 - DNA, 40 bp, Homo sapiens
gcaatctcggctcactacaacctctgcctcctgggctcga

SEQ ID NO: 44814 - DNA, 40 bp, Homo sapiens
cgagcccaggaggcagaggttgtagtgagccgagattgca

SEQ ID NO: 44815 - DNA, 40 bp, Homo sapiens
tgcaatctcggctcactacaacctctgcctcctgggctcg

SEQ ID NO: 44816 - DNA, 40 bp, Homo sapiens
gagcccaggaggcagaggttgtagtgagccgagattgcac

SEQ ID NO: 44817 - DNA, 40 bp, Homo sapiens
gtgcaatctcggctcactacaacctctgcctcctgggctc

SEQ ID NO: 44818 - DNA, 40 bp, Homo sapiens
agcccaggaggcagaggttgtagtgagccgagattgcacc

SEQ ID NO: 44819 - DNA, 40 bp, Homo sapiens
ggtgcaatctcggctcactacaacctctgcctcctgggct

SEQ ID NO: 44820 - DNA, 40 bp, Homo sapiens
gcccaggaggcagaggttgtagtgagccgagattgcacca

SEQ ID NO: 44821 - DNA, 40 bp, Homo sapiens
tggtgcaatctcggctcactacaacctctgcctcctgggc

SEQ ID NO: 44822 - DNA, 40 bp, Homo sapiens
cccaggaggcagaggttgtagtgagccgagattgcaccac

SEQ ID NO: 44823 - DNA, 40 bp, Homo sapiens
gtggtgcaatctcggctcactacaacctctgcctcctggg

SEQ ID NO: 44824 - DNA, 40 bp, Homo sapiens
ccaggaggcagaggttgtagtgagccgagattgcaccaca

SEQ ID NO: 44825 - DNA, 40 bp, Homo sapiens
tgtggtgcaatctcggctcactacaacctctgcctcctgg

SEQ ID NO: 44826 - DNA, 40 bp, Homo sapiens
caggaggcagaggttgtagtgagccgagattgcaccacag

SEQ ID NO: 44827 - DNA, 40 bp, Homo sapiens
ctgtggtgcaatctcggctcactacaacctctgcctcctg

SEQ ID NO: 44828 - DNA, 40 bp, Homo sapiens
aggaggcagaggttgtagtgagccgagattgcaccacagc

SEQ ID NO: 44829 - DNA, 40 bp, Homo sapiens
gctgtggtgcaatctcggctcactacaacctctgcctcct

SEQ ID NO: 44830 - DNA, 40 bp, Homo sapiens
ggaggcagaggttgtagtgagccgagattgcaccacagca

SEQ ID NO: 44831 - DNA, 40 bp, Homo sapiens
tgctgtggtgcaatctcggctcactacaacctctgcctcc

SEQ ID NO: 44832 - DNA, 40 bp, Homo sapiens
gaggcagaggttgtagtgagccgagattgcaccacagcac

SEQ ID NO: 44833 - DNA, 40 bp, Homo sapiens
gtgctgtggtgcaatctcggctcactacaacctctgcctc

SEQ ID NO: 44834 - DNA, 40 bp, Homo sapiens
aggcagaggttgtagtgagccgagattgcaccacagcact

SEQ ID NO: 44835 - DNA, 40 bp, Homo sapiens
agtgctgtggtgcaatctcggctcactacaacctctgcct

SEQ ID NO: 44836 - DNA, 40 bp, Homo sapiens
ggcagaggttgtagtgagccgagattgcaccacagcactc

SEQ ID NO: 44837 - DNA, 40 bp, Homo sapiens
gagtgctgtggtgcaatctcggctcactacaacctctgcc

SEQ ID NO: 44838 - DNA, 40 bp, Homo sapiens
gcagaggttgtagtgagccgagattgcaccacagcactcc

SEQ ID NO: 44839 - DNA, 40 bp, Homo sapiens
ggagtgctgtggtgcaatctcggctcactacaacctctgc

SEQ ID NO: 44840 - DNA, 40 bp, Homo sapiens
cagaggttgtagtgagccgagattgcaccacagcactcca

SEQ ID NO: 44841 - DNA, 40 bp, Homo sapiens
tggagtgctgtggtgcaatctcggctcactacaacctctg

SEQ ID NO: 44842 - DNA, 40 bp, Homo sapiens
agaggttgtagtgagccgagattgcaccacagcactccag

SEQ ID NO: 44843 - DNA, 40 bp, Homo sapiens
ctggagtgctgtggtgcaatctcggctcactacaacctct

SEQ ID NO: 44844 - DNA, 40 bp, Homo sapiens
gaggttgtagtgagccgagattgcaccacagcactccagc

SEQ ID NO: 44845 - DNA, 40 bp, Homo sapiens
gctggagtgctgtggtgcaatctcggctcactacaacctc

SEQ ID NO: 44846 - DNA, 40 bp, Homo sapiens
aggttgtagtgagccgagattgcaccacagcactccagcc

SEQ ID NO: 44847 - DNA, 40 bp, Homo sapiens
ggctggagtgctgtggtgcaatctcggctcactacaacct

SEQ ID NO: 44848 - DNA, 40 bp, Homo sapiens
ggttgtagtgagccgagattgcaccacagcactccagcct

SEQ ID NO: 44849 - DNA, 40 bp, Homo sapiens
aggctggagtgctgtggtgcaatctcggctcactacaacc

SEQ ID NO: 44850 - DNA, 40 bp, Homo sapiens
gttgtagtgagccgagattgcaccacagcactccagcctg

SEQ ID NO: 44851 - DNA, 40 bp, Homo sapiens
caggctggagtgctgtggtgcaatctcggctcactacaac

SEQ ID NO: 44852 - DNA, 40 bp, Homo sapiens
ttgtagtgagccgagattgcaccacagcactccagcctgg

SEQ ID NO: 44853 - DNA, 40 bp, Homo sapiens
ccaggctggagtgctgtggtgcaatctcggctcactacaa

SEQ ID NO: 44854 - DNA, 40 bp, Homo sapiens
tgtagtgagccgagattgcaccacagcactccagcctggg

SEQ ID NO: 44855 - DNA, 40 bp, Homo sapiens
cccaggctggagtgctgtggtgcaatctcggctcactaca

SEQ ID NO: 44856 - DNA, 40 bp, Homo sapiens
gtagtgagccgagattgcaccacagcactccagcctgggc

SEQ ID NO: 44857 - DNA, 40 bp, Homo sapiens
gcccaggctggagtgctgtggtgcaatctcggctcactac

SEQ ID NO: 44858 - DNA, 40 bp, Homo sapiens
tagtgagccgagattgcaccacagcactccagcctgggcg

SEQ ID NO: 44859 - DNA, 40 bp, Homo sapiens
cgcccaggctggagtgctgtggtgcaatctcggctcacta

SEQ ID NO: 44860 - DNA, 40 bp, Homo sapiens
agtgagccgagattgcaccacagcactccagcctgggcga

SEQ ID NO: 44861 - DNA, 40 bp, Homo sapiens
tcgcccaggctggagtgctgtggtgcaatctcggctcact

SEQ ID NO: 44862 - DNA, 40 bp, Homo sapiens
gtgagccgagattgcaccacagcactccagcctgggcgac

SEQ ID NO: 44863 - DNA, 40 bp, Homo sapiens
gtcgcccaggctggagtgctgtggtgcaatctcggctcac

SEQ ID NO: 44864 - DNA, 40 bp, Homo sapiens
tgagccgagattgcaccacagcactccagcctgggcgaca

SEQ ID NO: 44865 - DNA, 40 bp, Homo sapiens
tgtcgcccaggctggagtgctgtggtgcaatctcggctca

SEQ ID NO: 44866 - DNA, 40 bp, Homo sapiens
gagccgagattgcaccacagcactccagcctgggcgacag

SEQ ID NO: 44867 - DNA, 40 bp, Homo sapiens
ctgtcgcccaggctggagtgctgtggtgcaatctcggctc

SEQ ID NO: 44868 - DNA, 40 bp, Homo sapiens
agccgagattgcaccacagcactccagcctgggcgacaga

SEQ ID NO: 44869 - DNA, 40 bp, Homo sapiens
tctgtcgcccaggctggagtgctgtggtgcaatctcggct

SEQ ID NO: 44870 - DNA, 40 bp, Homo sapiens
gccgagattgcaccacagcactccagcctgggcgacagag

SEQ ID NO: 44871 - DNA, 40 bp, Homo sapiens
ctctgtcgcccaggctggagtgctgtggtgcaatctcggc

SEQ ID NO: 44872 - DNA, 40 bp, Homo sapiens
ccgagattgcaccacagcactccagcctgggcgacagagc

SEQ ID NO: 44873 - DNA, 40 bp, Homo sapiens
gctctgtcgcccaggctggagtgctgtggtgcaatctcgg

SEQ ID NO: 44874 - DNA, 40 bp, Homo sapiens
cgagattgcaccacagcactccagcctgggcgacagagcg

SEQ ID NO: 44875 - DNA, 40 bp, Homo sapiens
cgctctgtcgcccaggctggagtgctgtggtgcaatctcg

SEQ ID NO: 44876 - DNA, 40 bp, Homo sapiens
gagattgcaccacagcactccagcctgggcgacagagcga

SEQ ID NO: 44877 - DNA, 40 bp, Homo sapiens
tcgctctgtcgcccaggctggagtgctgtggtgcaatctc

SEQ ID NO: 44878 - DNA, 40 bp, Homo sapiens
agattgcaccacagcactccagcctgggcgacagagcgag

SEQ ID NO: 44879 - DNA, 40 bp, Homo sapiens
ctcgctctgtcgcccaggctggagtgctgtggtgcaatct

SEQ ID NO: 44880 - DNA, 40 bp, Homo sapiens
gattgcaccacagcactccagcctgggcgacagagcgaga

SEQ ID NO: 44881 - DNA, 40 bp, Homo sapiens
tctcgctctgtcgcccaggctggagtgctgtggtgcaatc

SEQ ID NO: 44882 - DNA, 40 bp, Homo sapiens
attgcaccacagcactccagcctgggcgacagagcgagac

SEQ ID NO: 44883 - DNA, 40 bp, Homo sapiens
gtctcgctctgtcgcccaggctggagtgctgtggtgcaat

SEQ ID NO: 44884 - DNA, 40 bp, Homo sapiens
ttgcaccacagcactccagcctgggcgacagagcgagact

SEQ ID NO: 44885 - DNA, 40 bp, Homo sapiens
agtctcgctctgtcgcccaggctggagtgctgtggtgcaa

SEQ ID NO: 44886 - DNA, 40 bp, Homo sapiens
tgcaccacagcactccagcctgggcgacagagcgagactc

SEQ ID NO: 44887 - DNA, 40 bp, Homo sapiens
gagtctcgctctgtcgcccaggctggagtgctgtggtgca

SEQ ID NO: 44888 - DNA, 40 bp, Homo sapiens
gcaccacagcactccagcctgggcgacagagcgagactcc

SEQ ID NO: 44889 - DNA, 40 bp, Homo sapiens
ggagtctcgctctgtcgcccaggctggagtgctgtggtgc

SEQ ID NO: 44890 - DNA, 40 bp, Homo sapiens
caccacagcactccagcctgggcgacagagcgagactcca

SEQ ID NO: 44891 - DNA, 40 bp, Homo sapiens
tggagtctcgctctgtcgcccaggctggagtgctgtggtg

SEQ ID NO: 44892 - DNA, 40 bp, Homo sapiens
accacagcactccagcctgggcgacagagcgagactccat

SEQ ID NO: 44893 - DNA, 40 bp, Homo sapiens
atggagtctcgctctgtcgcccaggctggagtgctgtggt

SEQ ID NO: 44894 - DNA, 40 bp, Homo sapiens
ccacagcactccagcctgggcgacagagcgagactccatc

SEQ ID NO: 44895 - DNA, 40 bp, Homo sapiens
gatggagtctcgctctgtcgcccaggctggagtgctgtgg

SEQ ID NO: 44896 - DNA, 40 bp, Homo sapiens
cacagcactccagcctgggcgacagagcgagactccatct

SEQ ID NO: 44897 - DNA, 40 bp, Homo sapiens
agatggagtctcgctctgtcgcccaggctggagtgctgtg

SEQ ID NO: 44898 - DNA, 40 bp, Homo sapiens
acagcactccagcctgggcgacagagcgagactccatctc

SEQ ID NO: 44899 - DNA, 40 bp, Homo sapiens
gagatggagtctcgctctgtcgcccaggctggagtgctgt

SEQ ID NO: 44900 - DNA, 40 bp, Homo sapiens
cagcactccagcctgggcgacagagcgagactccatctca

SEQ ID NO: 44901 - DNA, 40 bp, Homo sapiens
tgagatggagtctcgctctgtcgcccaggctggagtgctg

SEQ ID NO: 44902 - DNA, 40 bp, Homo sapiens
agcactccagcctgggcgacagagcgagactccatctcaa

SEQ ID NO: 44903 - DNA, 40 bp, Homo sapiens
ttgagatggagtctcgctctgtcgcccaggctggagtgct

SEQ ID NO: 44904 - DNA, 40 bp, Homo sapiens
gcactccagcctgggcgacagagcgagactccatctcaaa

SEQ ID NO: 44905 - DNA, 40 bp, Homo sapiens
tttgagatggagtctcgctctgtcgcccaggctggagtgc

SEQ ID NO: 44906 - DNA, 40 bp, Homo sapiens
cactccagcctgggcgacagagcgagactccatctcaaaa

SEQ ID NO: 44907 - DNA, 40 bp, Homo sapiens
ttttgagatggagtctcgctctgtcgcccaggctggagtg

SEQ ID NO: 44908 - DNA, 40 bp, Homo sapiens
actccagcctgggcgacagagcgagactccatctcaaaaa

SEQ ID NO: 44909 - DNA, 40 bp, Homo sapiens
tttttgagatggagtctcgctctgtcgcccaggctggagt

SEQ ID NO: 44910 - DNA, 40 bp, Homo sapiens
ctccagcctgggcgacagagcgagactccatctcaaaaaa

SEQ ID NO: 44911 - DNA, 40 bp, Homo sapiens
ttttttgagatggagtctcgctctgtcgcccaggctggag

SEQ ID NO: 44912 - DNA, 40 bp, Homo sapiens
tccagcctgggcgacagagcgagactccatctcaaaaaaa

SEQ ID NO: 44913 - DNA, 40 bp, Homo sapiens
tttttttgagatggagtctcgctctgtcgcccaggctgga

SEQ ID NO: 44914 - DNA, 40 bp, Homo sapiens
ccagcctgggcgacagagcgagactccatctcaaaaaaaa

SEQ ID NO: 44915 - DNA, 40 bp, Homo sapiens
ttttttttgagatggagtctcgctctgtcgcccaggctgg

SEQ ID NO: 44916 - DNA, 40 bp, Homo sapiens
cagcctgggcgacagagcgagactccatctcaaaaaaaaa

SEQ ID NO: 44917 - DNA, 40 bp, Homo sapiens
tttttttttgagatggagtctcgctctgtcgcccaggctg

SEQ ID NO: 44918 - DNA, 40 bp, Homo sapiens
agcctgggcgacagagcgagactccatctcaaaaaaaaaa

SEQ ID NO: 44919 - DNA, 40 bp, Homo sapiens
ttttttttttgagatggagtctcgctctgtcgcccaggct

SEQ ID NO: 44920 - DNA, 40 bp, Homo sapiens
gcctgggcgacagagcgagactccatctcaaaaaaaaaaa

SEQ ID NO: 44921 - DNA, 40 bp, Homo sapiens
tttttttttttgagatggagtctcgctctgtcgcccaggc

SEQ ID NO: 44922 - DNA, 40 bp, Homo sapiens
cctgggcgacagagcgagactccatctcaaaaaaaaaaaa

SEQ ID NO: 44923 - DNA, 40 bp, Homo sapiens
ttttttttttttgagatggagtctcgctctgtcgcccagg

SEQ ID NO: 44924 - DNA, 40 bp, Homo sapiens
ctgggcgacagagcgagactccatctcaaaaaaaaaaaaa

SEQ ID NO: 44925 - DNA, 40 bp, Homo sapiens
tttttttttttttgagatggagtctcgctctgtcgcccag

SEQ ID NO: 44926 - DNA, 40 bp, Homo sapiens
tgggcgacagagcgagactccatctcaaaaaaaaaaaaaa

SEQ ID NO: 44927 - DNA, 40 bp, Homo sapiens
ttttttttttttttgagatggagtctcgctctgtcgccca

SEQ ID NO: 44928 - DNA, 40 bp, Homo sapiens
gggcgacagagcgagactccatctcaaaaaaaaaaaaaaa

SEQ ID NO: 44929 - DNA, 40 bp, Homo sapiens
tttttttttttttttgagatggagtctcgctctgtcgccc

SEQ ID NO: 44930 - DNA, 40 bp, Homo sapiens
ggcgacagagcgagactccatctcaaaaaaaaaaaaaaaa

SEQ ID NO: 44931 - DNA, 40 bp, Homo sapiens
ttttttttttttttttgagatggagtctcgctctgtcgcc

SEQ ID NO: 44932 - DNA, 40 bp, Homo sapiens
gcgacagagcgagactccatctcaaaaaaaaaaaaaaaag

SEQ ID NO: 44933 - DNA, 40 bp, Homo sapiens
cttttttttttttttttgagatggagtctcgctctgtcgc

SEQ ID NO: 44934 - DNA, 40 bp, Homo sapiens
cgacagagcgagactccatctcaaaaaaaaaaaaaaaaga

SEQ ID NO: 44935 - DNA, 40 bp, Homo sapiens
tcttttttttttttttttgagatggagtctcgctctgtcg

SEQ ID NO: 44936 - DNA, 40 bp, Homo sapiens
gacagagcgagactccatctcaaaaaaaaaaaaaaaagat

SEQ ID NO: 44937 - DNA, 40 bp, Homo sapiens
atcttttttttttttttttgagatggagtctcgctctgtc

SEQ ID NO: 44938 - DNA, 40 bp, Homo sapiens
acagagcgagactccatctcaaaaaaaaaaaaaaaagata

SEQ ID NO: 44939 - DNA, 40 bp, Homo sapiens
tatcttttttttttttttttgagatggagtctcgctctgt

SEQ ID NO: 44940 - DNA, 40 bp, Homo sapiens
cagagcgagactccatctcaaaaaaaaaaaaaaaagatac

SEQ ID NO: 44941 - DNA, 40 bp, Homo sapiens
gtatcttttttttttttttttgagatggagtctcgctctg

SEQ ID NO: 44942 - DNA, 40 bp, Homo sapiens
agagcgagactccatctcaaaaaaaaaaaaaaaagataca

SEQ ID NO: 44943 - DNA, 40 bp, Homo sapiens
tgtatcttttttttttttttttgagatggagtctcgctct

SEQ ID NO: 44944 - DNA, 40 bp, Homo sapiens
gagcgagactccatctcaaaaaaaaaaaaaaaagatacat

SEQ ID NO: 44945 - DNA, 40 bp, Homo sapiens
atgtatcttttttttttttttttgagatggagtctcgctc

SEQ ID NO: 44946 - DNA, 40 bp, Homo sapiens
agcgagactccatctcaaaaaaaaaaaaaaaagatacatt

SEQ ID NO: 44947 - DNA, 40 bp, Homo sapiens
aatgtatcttttttttttttttttgagatggagtctcgct

SEQ ID NO: 44948 - DNA, 40 bp, Homo sapiens
gcgagactccatctcaaaaaaaaaaaaaaaagatacatta

SEQ ID NO: 44949 - DNA, 40 bp, Homo sapiens
taatgtatcttttttttttttttttgagatggagtctcgc

SEQ ID NO: 44950 - DNA, 40 bp, Homo sapiens
cgagactccatctcaaaaaaaaaaaaaaaagatacattaa

SEQ ID NO: 44951 - DNA, 40 bp, Homo sapiens
ttaatgtatcttttttttttttttttgagatggagtctcg

SEQ ID NO: 44952 - DNA, 40 bp, Homo sapiens
gagactccatctcaaaaaaaaaaaaaaaagatacattaat

SEQ ID NO: 44953 - DNA, 40 bp, Homo sapiens
attaatgtatcttttttttttttttttgagatggagtctc

SEQ ID NO: 44954 - DNA, 40 bp, Homo sapiens
agactccatctcaaaaaaaaaaaaaaaagatacattaata

SEQ ID NO: 44955 - DNA, 40 bp, Homo sapiens
tattaatgtatcttttttttttttttttgagatggagtct

SEQ ID NO: 44956 - DNA, 40 bp, Homo sapiens
gactccatctcaaaaaaaaaaaaaaaagatacattaatac

SEQ ID NO: 44957 - DNA, 40 bp, Homo sapiens
gtattaatgtatcttttttttttttttttgagatggagtc

SEQ ID NO: 44958 - DNA, 40 bp, Homo sapiens
actccatctcaaaaaaaaaaaaaaaagatacattaatact

SEQ ID NO: 44959 - DNA, 40 bp, Homo sapiens
agtattaatgtatcttttttttttttttttgagatggagt

SEQ ID NO: 44960 - DNA, 40 bp, Homo sapiens
ctccatctcaaaaaaaaaaaaaaaagatacattaatacta

SEQ ID NO: 44961 - DNA, 40 bp, Homo sapiens
tagtattaatgtatcttttttttttttttttgagatggag

SEQ ID NO: 44962 - DNA, 40 bp, Homo sapiens
tccatctcaaaaaaaaaaaaaaaagatacattaatactat

SEQ ID NO: 44963 - DNA, 40 bp, Homo sapiens
atagtattaatgtatcttttttttttttttttgagatgga

SEQ ID NO: 44964 - DNA, 40 bp, Homo sapiens
ccatctcaaaaaaaaaaaaaaaagatacattaatactata

SEQ ID NO: 44965 - DNA, 40 bp, Homo sapiens
tatagtattaatgtatcttttttttttttttttgagatgg

SEQ ID NO: 44966 - DNA, 40 bp, Homo sapiens
catctcaaaaaaaaaaaaaaaagatacattaatactatag

SEQ ID NO: 44967 - DNA, 40 bp, Homo sapiens
ctatagtattaatgtatcttttttttttttttttgagatg

SEQ ID NO: 44968 - DNA, 40 bp, Homo sapiens
atctcaaaaaaaaaaaaaaaagatacattaatactatagc

SEQ ID NO: 44969 - DNA, 40 bp, Homo sapiens
gctatagtattaatgtatcttttttttttttttttgagat

SEQ ID NO: 44970 - DNA, 40 bp, Homo sapiens
tctcaaaaaaaaaaaaaaaagatacattaatactatagcc

SEQ ID NO: 44971 - DNA, 40 bp, Homo sapiens
ggctatagtattaatgtatcttttttttttttttttgaga

SEQ ID NO: 44972 - DNA, 40 bp, Homo sapiens
ctcaaaaaaaaaaaaaaaagatacattaatactatagcct

SEQ ID NO: 44973 - DNA, 40 bp, Homo sapiens
aggctatagtattaatgtatcttttttttttttttttgag

SEQ ID NO: 44974 - DNA, 40 bp, Homo sapiens
tcaaaaaaaaaaaaaaaagatacattaatactatagccta

SEQ ID NO: 44975 - DNA, 40 bp, Homo sapiens
taggctatagtattaatgtatcttttttttttttttttga

SEQ ID NO: 44976 - DNA, 40 bp, Homo sapiens
caaaaaaaaaaaaaaaagatacattaatactatagcctac

SEQ ID NO: 44977 - DNA, 40 bp, Homo sapiens
gtaggctatagtattaatgtatcttttttttttttttttg

SEQ ID NO: 44978 - DNA, 40 bp, Homo sapiens
aaaaaaaaaaaaaaaagatacattaatactatagcctaca

SEQ ID NO: 44979 - DNA, 40 bp, Homo sapiens
tgtaggctatagtattaatgtatctttttttttttttttt

SEQ ID NO: 44980 - DNA, 40 bp, Homo sapiens
aaaaaaaaaaaaaaagatacattaatactatagcctacat

SEQ ID NO: 44981 - DNA, 40 bp, Homo sapiens
atgtaggctatagtattaatgtatcttttttttttttttt

SEQ ID NO: 44982 - DNA, 40 bp, Homo sapiens
aaaaaaaaaaaaaagatacattaatactatagcctacatg

SEQ ID NO: 44983 - DNA, 40 bp, Homo sapiens
catgtaggctatagtattaatgtatctttttttttttttt

SEQ ID NO: 44984 - DNA, 40 bp, Homo sapiens
aaaaaaaaaaaaagatacattaatactatagcctacatgt

SEQ ID NO: 44985 - DNA, 40 bp, Homo sapiens
acatgtaggctatagtattaatgtatcttttttttttttt

SEQ ID NO: 44986 - DNA, 40 bp, Homo sapiens
aaaaaaaaaaaagatacattaatactatagcctacatgtg

SEQ ID NO: 44987 - DNA, 40 bp, Homo sapiens
cacatgtaggctatagtattaatgtatctttttttttttt

SEQ ID NO: 44988 - DNA, 40 bp, Homo sapiens
aaaaaaaaaaagatacattaatactatagcctacatgtgg

SEQ ID NO: 44989 - DNA, 40 bp, Homo sapiens
ccacatgtaggctatagtattaatgtatcttttttttttt

SEQ ID NO: 44990 - DNA, 40 bp, Homo sapiens
aaaaaaaaaagatacattaatactatagcctacatgtgga

SEQ ID NO: 44991 - DNA, 40 bp, Homo sapiens
tccacatgtaggctatagtattaatgtatctttttttttt

SEQ ID NO: 44992 - DNA, 40 bp, Homo sapiens
aaaaaaaaagatacattaatactatagcctacatgtggaa

SEQ ID NO: 44993 - DNA, 40 bp, Homo sapiens
ttccacatgtaggctatagtattaatgtatcttttttttt

SEQ ID NO: 44994 - DNA, 40 bp, Homo sapiens
aaaaaaaagatacattaatactatagcctacatgtggaac

SEQ ID NO: 44995 - DNA, 40 bp, Homo sapiens
gttccacatgtaggctatagtattaatgtatctttttttt

SEQ ID NO: 44996 - DNA, 40 bp, Homo sapiens
aaaaaaagatacattaatactatagcctacatgtggaaca

SEQ ID NO: 44997 - DNA, 40 bp, Homo sapiens
tgttccacatgtaggctatagtattaatgtatcttttttt

SEQ ID NO: 44998 - DNA, 40 bp, Homo sapiens
aaaaaagatacattaatactatagcctacatgtggaacat

SEQ ID NO: 44999 - DNA, 40 bp, Homo sapiens
atgttccacatgtaggctatagtattaatgtatctttttt

SEQ ID NO: 45000 - DNA, 40 bp, Homo sapiens
aaaaagatacattaatactatagcctacatgtggaacatt

SEQ ID NO: 45001 - DNA, 40 bp, Homo sapiens
aatgttccacatgtaggctatagtattaatgtatcttttt

SEQ ID NO: 45002 - DNA, 40 bp, Homo sapiens
aaaagatacattaatactatagcctacatgtggaacatta

SEQ ID NO: 45003 - DNA, 40 bp, Homo sapiens
taatgttccacatgtaggctatagtattaatgtatctttt

SEQ ID NO: 45004 - DNA, 40 bp, Homo sapiens
aaagatacattaatactatagcctacatgtggaacattaa

SEQ ID NO: 45005 - DNA, 40 bp, Homo sapiens
ttaatgttccacatgtaggctatagtattaatgtatcttt

SEQ ID NO: 45006 - DNA, 40 bp, Homo sapiens
aagatacattaatactatagcctacatgtggaacattaag

SEQ ID NO: 45007 - DNA, 40 bp, Homo sapiens
cttaatgttccacatgtaggctatagtattaatgtatctt

SEQ ID NO: 45008 - DNA, 40 bp, Homo sapiens
agatacattaatactatagcctacatgtggaacattaaga

SEQ ID NO: 45009 - DNA, 40 bp, Homo sapiens
tcttaatgttccacatgtaggctatagtattaatgtatct

SEQ ID NO: 45010 - DNA, 40 bp, Homo sapiens
gatacattaatactatagcctacatgtggaacattaagaa

SEQ ID NO: 45011 - DNA, 40 bp, Homo sapiens
ttcttaatgttccacatgtaggctatagtattaatgtatc

SEQ ID NO: 45012 - DNA, 40 bp, Homo sapiens
atacattaatactatagcctacatgtggaacattaagaaa

SEQ ID NO: 45013 - DNA, 40 bp, Homo sapiens
tttcttaatgttccacatgtaggctatagtattaatgtat

SEQ ID NO: 45014 - DNA, 40 bp, Homo sapiens
tacattaatactatagcctacatgtggaacattaagaaaa

SEQ ID NO: 45015 - DNA, 40 bp, Homo sapiens
ttttcttaatgttccacatgtaggctatagtattaatgta

SEQ ID NO: 45016 - DNA, 40 bp, Homo sapiens
acattaatactatagcctacatgtggaacattaagaaaat

SEQ ID NO: 45017 - DNA, 40 bp, Homo sapiens
attttcttaatgttccacatgtaggctatagtattaatgt

SEQ ID NO: 45018 - DNA, 40 bp, Homo sapiens
cattaatactatagcctacatgtggaacattaagaaaata

SEQ ID NO: 45019 - DNA, 40 bp, Homo sapiens
tattttcttaatgttccacatgtaggctatagtattaatg

SEQ ID NO: 45020 - DNA, 40 bp, Homo sapiens
attaatactatagcctacatgtggaacattaagaaaataa

SEQ ID NO: 45021 - DNA, 40 bp, Homo sapiens
ttattttcttaatgttccacatgtaggctatagtattaat

SEQ ID NO: 45022 - DNA, 40 bp, Homo sapiens
ttaatactatagcctacatgtggaacattaagaaaataat

SEQ ID NO: 45023 - DNA, 40 bp, Homo sapiens
attattttcttaatgttccacatgtaggctatagtattaa

SEQ ID NO: 45024 - DNA, 40 bp, Homo sapiens
taatactatagcctacatgtggaacattaagaaaataatt

SEQ ID NO: 45025 - DNA, 40 bp, Homo sapiens
aattattttcttaatgttccacatgtaggctatagtatta

SEQ ID NO: 45026 - DNA, 40 bp, Homo sapiens
aatactatagcctacatgtggaacattaagaaaataattg

SEQ ID NO: 45027 - DNA, 40 bp, Homo sapiens
caattattttcttaatgttccacatgtaggctatagtatt

SEQ ID NO: 45028 - DNA, 40 bp, Homo sapiens
atactatagcctacatgtggaacattaagaaaataattgc

SEQ ID NO: 45029 - DNA, 40 bp, Homo sapiens
gcaattattttcttaatgttccacatgtaggctatagtat

SEQ ID NO: 45030 - DNA, 40 bp, Homo sapiens
tactatagcctacatgtggaacattaagaaaataattgct

SEQ ID NO: 45031 - DNA, 40 bp, Homo sapiens
agcaattattttcttaatgttccacatgtaggctatagta

SEQ ID NO: 45032 - DNA, 40 bp, Homo sapiens
actatagcctacatgtggaacattaagaaaataattgctt

SEQ ID NO: 45033 - DNA, 40 bp, Homo sapiens
aagcaattattttcttaatgttccacatgtaggctatagt

SEQ ID NO: 45034 - DNA, 40 bp, Homo sapiens
ctatagcctacatgtggaacattaagaaaataattgcttt

SEQ ID NO: 45035 - DNA, 40 bp, Homo sapiens
aaagcaattattttcttaatgttccacatgtaggctatag

SEQ ID NO: 45036 - DNA, 40 bp, Homo sapiens
tatagcctacatgtggaacattaagaaaataattgctttt

SEQ ID NO: 45037 - DNA, 40 bp, Homo sapiens
aaaagcaattattttcttaatgttccacatgtaggctata

SEQ ID NO: 45038 - DNA, 40 bp, Homo sapiens
atagcctacatgtggaacattaagaaaataattgctttta

SEQ ID NO: 45039 - DNA, 40 bp, Homo sapiens
taaaagcaattattttcttaatgttccacatgtaggctat

SEQ ID NO: 45040 - DNA, 40 bp, Homo sapiens
tagcctacatgtggaacattaagaaaataattgcttttat

SEQ ID NO: 45041 - DNA, 40 bp, Homo sapiens
ataaaagcaattattttcttaatgttccacatgtaggcta

SEQ ID NO: 45042 - DNA, 40 bp, Homo sapiens
agcctacatgtggaacattaagaaaataattgcttttatg

SEQ ID NO: 45043 - DNA, 40 bp, Homo sapiens
cataaaagcaattattttcttaatgttccacatgtaggct

SEQ ID NO: 45044 - DNA, 40 bp, Homo sapiens
gcctacatgtggaacattaagaaaataattgcttttatgt

SEQ ID NO: 45045 - DNA, 40 bp, Homo sapiens
acataaaagcaattattttcttaatgttccacatgtaggc

SEQ ID NO: 45046 - DNA, 40 bp, Homo sapiens
cctacatgtggaacattaagaaaataattgcttttatgtt

SEQ ID NO: 45047 - DNA, 40 bp, Homo sapiens
aacataaaagcaattattttcttaatgttccacatgtagg

SEQ ID NO: 45048 - DNA, 40 bp, Homo sapiens
ctacatgtggaacattaagaaaataattgcttttatgttt

SEQ ID NO: 45049 - DNA, 40 bp, Homo sapiens
aaacataaaagcaattattttcttaatgttccacatgtag

SEQ ID NO: 45050 - DNA, 40 bp, Homo sapiens
tacatgtggaacattaagaaaataattgcttttatgttta

SEQ ID NO: 45051 - DNA, 40 bp, Homo sapiens
taaacataaaagcaattattttcttaatgttccacatgta

SEQ ID NO: 45052 - DNA, 40 bp, Homo sapiens
acatgtggaacattaagaaaataattgcttttatgtttat

SEQ ID NO: 45053 - DNA, 40 bp, Homo sapiens
ataaacataaaagcaattattttcttaatgttccacatgt

SEQ ID NO: 45054 - DNA, 40 bp, Homo sapiens
catgtggaacattaagaaaataattgcttttatgtttatg

SEQ ID NO: 45055 - DNA, 40 bp, Homo sapiens
cataaacataaaagcaattattttcttaatgttccacatg

SEQ ID NO: 45056 - DNA, 40 bp, Homo sapiens
atgtggaacattaagaaaataattgcttttatgtttatgc

SEQ ID NO: 45057 - DNA, 40 bp, Homo sapiens
gcataaacataaaagcaattattttcttaatgttccacat

SEQ ID NO: 45058 - DNA, 40 bp, Homo sapiens
tgtggaacattaagaaaataattgcttttatgtttatgct

SEQ ID NO: 45059 - DNA, 40 bp, Homo sapiens
agcataaacataaaagcaattattttcttaatgttccaca

SEQ ID NO: 45060 - DNA, 40 bp, Homo sapiens
gtggaacattaagaaaataattgcttttatgtttatgctt

SEQ ID NO: 45061 - DNA, 40 bp, Homo sapiens
aagcataaacataaaagcaattattttcttaatgttccac

SEQ ID NO: 45062 - DNA, 40 bp, Homo sapiens
tggaacattaagaaaataattgcttttatgtttatgcttt

SEQ ID NO: 45063 - DNA, 40 bp, Homo sapiens
aaagcataaacataaaagcaattattttcttaatgttcca

SEQ ID NO: 45064 - DNA, 40 bp, Homo sapiens
ggaacattaagaaaataattgcttttatgtttatgcttta

SEQ ID NO: 45065 - DNA, 40 bp, Homo sapiens
taaagcataaacataaaagcaattattttcttaatgttcc

SEQ ID NO: 45066 - DNA, 40 bp, Homo sapiens
gaacattaagaaaataattgcttttatgtttatgctttat

SEQ ID NO: 45067 - DNA, 40 bp, Homo sapiens
ataaagcataaacataaaagcaattattttcttaatgttc

SEQ ID NO: 45068 - DNA, 40 bp, Homo sapiens
aacattaagaaaataattgcttttatgtttatgctttata

SEQ ID NO: 45069 - DNA, 40 bp, Homo sapiens
tataaagcataaacataaaagcaattattttcttaatgtt

SEQ ID NO: 45070 - DNA, 40 bp, Homo sapiens
acattaagaaaataattgcttttatgtttatgctttatac

SEQ ID NO: 45071 - DNA, 40 bp, Homo sapiens
gtataaagcataaacataaaagcaattattttcttaatgt

SEQ ID NO: 45072 - DNA, 40 bp, Homo sapiens
cattaagaaaataattgcttttatgtttatgctttatacc

SEQ ID NO: 45073 - DNA, 40 bp, Homo sapiens
ggtataaagcataaacataaaagcaattattttcttaatg

SEQ ID NO: 45074 - DNA, 40 bp, Homo sapiens
attaagaaaataattgcttttatgtttatgctttatacct

SEQ ID NO: 45075 - DNA, 40 bp, Homo sapiens
aggtataaagcataaacataaaagcaattattttcttaat

SEQ ID NO: 45076 - DNA, 40 bp, Homo sapiens
ttaagaaaataattgcttttatgtttatgctttatacctg

SEQ ID NO: 45077 - DNA, 40 bp, Homo sapiens
caggtataaagcataaacataaaagcaattattttcttaa

SEQ ID NO: 45078 - DNA, 40 bp, Homo sapiens
taagaaaataattgcttttatgtttatgctttatacctgt

SEQ ID NO: 45079 - DNA, 40 bp, Homo sapiens
acaggtataaagcataaacataaaagcaattattttctta

SEQ ID NO: 45080 - DNA, 40 bp, Homo sapiens
aagaaaataattgcttttatgtttatgctttatacctgtt

SEQ ID NO: 45081 - DNA, 40 bp, Homo sapiens
aacaggtataaagcataaacataaaagcaattattttctt

SEQ ID NO: 45082 - DNA, 40 bp, Homo sapiens
agaaaataattgcttttatgtttatgctttatacctgttg

SEQ ID NO: 45083 - DNA, 40 bp, Homo sapiens
caacaggtataaagcataaacataaaagcaattattttct

SEQ ID NO: 45084 - DNA, 40 bp, Homo sapiens
gaaaataattgcttttatgtttatgctttatacctgttgt

SEQ ID NO: 45085 - DNA, 40 bp, Homo sapiens
acaacaggtataaagcataaacataaaagcaattattttc

SEQ ID NO: 45086 - DNA, 40 bp, Homo sapiens
aaaataattgcttttatgtttatgctttatacctgttgtt

SEQ ID NO: 45087 - DNA, 40 bp, Homo sapiens
aacaacaggtataaagcataaacataaaagcaattatttt

SEQ ID NO: 45088 - DNA, 40 bp, Homo sapiens
aaataattgcttttatgtttatgctttatacctgttgtta

SEQ ID NO: 45089 - DNA, 40 bp, Homo sapiens
taacaacaggtataaagcataaacataaaagcaattattt

SEQ ID NO: 45090 - DNA, 40 bp, Homo sapiens
aataattgcttttatgtttatgctttatacctgttgttag

SEQ ID NO: 45091 - DNA, 40 bp, Homo sapiens
ctaacaacaggtataaagcataaacataaaagcaattatt

SEQ ID NO: 45092 - DNA, 40 bp, Homo sapiens
ataattgcttttatgtttatgctttatacctgttgttagc

SEQ ID NO: 45093 - DNA, 40 bp, Homo sapiens
gctaacaacaggtataaagcataaacataaaagcaattat

SEQ ID NO: 45094 - DNA, 40 bp, Homo sapiens
taattgcttttatgtttatgctttatacctgttgttagcc

SEQ ID NO: 45095 - DNA, 40 bp, Homo sapiens
ggctaacaacaggtataaagcataaacataaaagcaatta

SEQ ID NO: 45096 - DNA, 40 bp, Homo sapiens
aattgcttttatgtttatgctttatacctgttgttagccc

SEQ ID NO: 45097 - DNA, 40 bp, Homo sapiens
gggctaacaacaggtataaagcataaacataaaagcaatt

SEQ ID NO: 45098 - DNA, 40 bp, Homo sapiens
attgcttttatgtttatgctttatacctgttgttagccct

SEQ ID NO: 45099 - DNA, 40 bp, Homo sapiens
agggctaacaacaggtataaagcataaacataaaagcaat

SEQ ID NO: 45100 - DNA, 40 bp, Homo sapiens
ttgcttttatgtttatgctttatacctgttgttagccctg

SEQ ID NO: 45101 - DNA, 40 bp, Homo sapiens
cagggctaacaacaggtataaagcataaacataaaagcaa

SEQ ID NO: 45102 - DNA, 40 bp, Homo sapiens
tgcttttatgtttatgctttatacctgttgttagccctgc

SEQ ID NO: 45103 - DNA, 40 bp, Homo sapiens
gcagggctaacaacaggtataaagcataaacataaaagca

SEQ ID NO: 45104 - DNA, 40 bp, Homo sapiens
gcttttatgtttatgctttatacctgttgttagccctgct

SEQ ID NO: 45105 - DNA, 40 bp, Homo sapiens
agcagggctaacaacaggtataaagcataaacataaaagc

SEQ ID NO: 45106 - DNA, 40 bp, Homo sapiens
cttttatgtttatgctttatacctgttgttagccctgctt

SEQ ID NO: 45107 - DNA, 40 bp, Homo sapiens
aagcagggctaacaacaggtataaagcataaacataaaag

SEQ ID NO: 45108 - DNA, 40 bp, Homo sapiens
ttttatgtttatgctttatacctgttgttagccctgcttc

SEQ ID NO: 45109 - DNA, 40 bp, Homo sapiens
gaagcagggctaacaacaggtataaagcataaacataaaa

SEQ ID NO: 45110 - DNA, 40 bp, Homo sapiens
tttatgtttatgctttatacctgttgttagccctgcttct

SEQ ID NO: 45111 - DNA, 40 bp, Homo sapiens
agaagcagggctaacaacaggtataaagcataaacataaa

SEQ ID NO: 45112 - DNA, 40 bp, Homo sapiens
ttatgtttatgctttatacctgttgttagccctgcttctt

SEQ ID NO: 45113 - DNA, 40 bp, Homo sapiens
aagaagcagggctaacaacaggtataaagcataaacataa

SEQ ID NO: 45114 - DNA, 40 bp, Homo sapiens
tatgtttatgctttatacctgttgttagccctgcttctta

SEQ ID NO: 45115 - DNA, 40 bp, Homo sapiens
taagaagcagggctaacaacaggtataaagcataaacata

SEQ ID NO: 45116 - DNA, 40 bp, Homo sapiens
atgtttatgctttatacctgttgttagccctgcttcttat

SEQ ID NO: 45117 - DNA, 40 bp, Homo sapiens
ataagaagcagggctaacaacaggtataaagcataaacat

SEQ ID NO: 45118 - DNA, 40 bp, Homo sapiens
tgtttatgctttatacctgttgttagccctgcttcttatt

SEQ ID NO: 45119 - DNA, 40 bp, Homo sapiens
aataagaagcagggctaacaacaggtataaagcataaaca

SEQ ID NO: 45120 - DNA, 40 bp, Homo sapiens
gtttatgctttatacctgttgttagccctgcttcttattt

SEQ ID NO: 45121 - DNA, 40 bp, Homo sapiens
aaataagaagcagggctaacaacaggtataaagcataaac

SEQ ID NO: 45122 - DNA, 40 bp, Homo sapiens
tttatgctttatacctgttgttagccctgcttcttatttc

SEQ ID NO: 45123 - DNA, 40 bp, Homo sapiens
gaaataagaagcagggctaacaacaggtataaagcataaa

SEQ ID NO: 45124 - DNA, 40 bp, Homo sapiens
ttatgctttatacctgttgttagccctgcttcttatttca

SEQ ID NO: 45125 - DNA, 40 bp, Homo sapiens
tgaaataagaagcagggctaacaacaggtataaagcataa

SEQ ID NO: 45126 - DNA, 40 bp, Homo sapiens
tatgctttatacctgttgttagccctgcttcttatttcat

SEQ ID NO: 45127 - DNA, 40 bp, Homo sapiens
atgaaataagaagcagggctaacaacaggtataaagcata

SEQ ID NO: 45128 - DNA, 40 bp, Homo sapiens
atgctttatacctgttgttagccctgcttcttatttcatg

SEQ ID NO: 45129 - DNA, 40 bp, Homo sapiens
catgaaataagaagcagggctaacaacaggtataaagcat

SEQ ID NO: 45130 - DNA, 40 bp, Homo sapiens
tgctttatacctgttgttagccctgcttcttatttcatga

SEQ ID NO: 45131 - DNA, 40 bp, Homo sapiens
tcatgaaataagaagcagggctaacaacaggtataaagca

SEQ ID NO: 45132 - DNA, 40 bp, Homo sapiens
gctttatacctgttgttagccctgcttcttatttcatgat

SEQ ID NO: 45133 - DNA, 40 bp, Homo sapiens
atcatgaaataagaagcagggctaacaacaggtataaagc

SEQ ID NO: 45134 - DNA, 40 bp, Homo sapiens
ctttatacctgttgttagccctgcttcttatttcatgatt

SEQ ID NO: 45135 - DNA, 40 bp, Homo sapiens
aatcatgaaataagaagcagggctaacaacaggtataaag

SEQ ID NO: 45136 - DNA, 40 bp, Homo sapiens
tttatacctgttgttagccctgcttcttatttcatgattt

SEQ ID NO: 45137 - DNA, 40 bp, Homo sapiens
aaatcatgaaataagaagcagggctaacaacaggtataaa

SEQ ID NO: 45138 - DNA, 40 bp, Homo sapiens
ttatacctgttgttagccctgcttcttatttcatgatttc

SEQ ID NO: 45139 - DNA, 40 bp, Homo sapiens
gaaatcatgaaataagaagcagggctaacaacaggtataa

SEQ ID NO: 45140 - DNA, 40 bp, Homo sapiens
tatacctgttgttagccctgcttcttatttcatgatttca

SEQ ID NO: 45141 - DNA, 40 bp, Homo sapiens
tgaaatcatgaaataagaagcagggctaacaacaggtata

SEQ ID NO: 45142 - DNA, 40 bp, Homo sapiens
atacctgttgttagccctgcttcttatttcatgatttcat

SEQ ID NO: 45143 - DNA, 40 bp, Homo sapiens
atgaaatcatgaaataagaagcagggctaacaacaggtat

SEQ ID NO: 45144 - DNA, 40 bp, Homo sapiens
tacctgttgttagccctgcttcttatttcatgatttcatg

SEQ ID NO: 45145 - DNA, 40 bp, Homo sapiens
catgaaatcatgaaataagaagcagggctaacaacaggta

SEQ ID NO: 45146 - DNA, 40 bp, Homo sapiens
acctgttgttagccctgcttcttatttcatgatttcatgg

SEQ ID NO: 45147 - DNA, 40 bp, Homo sapiens
ccatgaaatcatgaaataagaagcagggctaacaacaggt

SEQ ID NO: 45148 - DNA, 40 bp, Homo sapiens
cctgttgttagccctgcttcttatttcatgatttcatggc

SEQ ID NO: 45149 - DNA, 40 bp, Homo sapiens
gccatgaaatcatgaaataagaagcagggctaacaacagg

SEQ ID NO: 45150 - DNA, 40 bp, Homo sapiens
ctgttgttagccctgcttcttatttcatgatttcatggct

SEQ ID NO: 45151 - DNA, 40 bp, Homo sapiens
agccatgaaatcatgaaataagaagcagggctaacaacag

SEQ ID NO: 45152 - DNA, 40 bp, Homo sapiens
tgttgttagccctgcttcttatttcatgatttcatggctt

SEQ ID NO: 45153 - DNA, 40 bp, Homo sapiens
aagccatgaaatcatgaaataagaagcagggctaacaaca

SEQ ID NO: 45154 - DNA, 40 bp, Homo sapiens
gttgttagccctgcttcttatttcatgatttcatggcttc

SEQ ID NO: 45155 - DNA, 40 bp, Homo sapiens
gaagccatgaaatcatgaaataagaagcagggctaacaac

SEQ ID NO: 45156 - DNA, 40 bp, Homo sapiens
ttgttagccctgcttcttatttcatgatttcatggcttca

SEQ ID NO: 45157 - DNA, 40 bp, Homo sapiens
tgaagccatgaaatcatgaaataagaagcagggctaacaa

SEQ ID NO: 45158 - DNA, 40 bp, Homo sapiens
tgttagccctgcttcttatttcatgatttcatggcttcac

SEQ ID NO: 45159 - DNA, 40 bp, Homo sapiens
gtgaagccatgaaatcatgaaataagaagcagggctaaca

SEQ ID NO: 45160 - DNA, 40 bp, Homo sapiens
gttagccctgcttcttatttcatgatttcatggcttcaca

SEQ ID NO: 45161 - DNA, 40 bp, Homo sapiens
tgtgaagccatgaaatcatgaaataagaagcagggctaac

SEQ ID NO: 45162 - DNA, 40 bp, Homo sapiens
ttagccctgcttcttatttcatgatttcatggcttcacat

SEQ ID NO: 45163 - DNA, 40 bp, Homo sapiens
atgtgaagccatgaaatcatgaaataagaagcagggctaa

SEQ ID NO: 45164 - DNA, 40 bp, Homo sapiens
tagccctgcttcttatttcatgatttcatggcttcacatt

SEQ ID NO: 45165 - DNA, 40 bp, Homo sapiens
aatgtgaagccatgaaatcatgaaataagaagcagggcta

SEQ ID NO: 45166 - DNA, 40 bp, Homo sapiens
agccctgcttcttatttcatgatttcatggcttcacattg

SEQ ID NO: 45167 - DNA, 40 bp, Homo sapiens
caatgtgaagccatgaaatcatgaaataagaagcagggct

SEQ ID NO: 45168 - DNA, 40 bp, Homo sapiens
gccctgcttcttatttcatgatttcatggcttcacattgt

SEQ ID NO: 45169 - DNA, 40 bp, Homo sapiens
acaatgtgaagccatgaaatcatgaaataagaagcagggc

SEQ ID NO: 45170 - DNA, 40 bp, Homo sapiens
ccctgcttcttatttcatgatttcatggcttcacattgta

SEQ ID NO: 45171 - DNA, 40 bp, Homo sapiens
tacaatgtgaagccatgaaatcatgaaataagaagcaggg

SEQ ID NO: 45172 - DNA, 40 bp, Homo sapiens
cctgcttcttatttcatgatttcatggcttcacattgtaa

SEQ ID NO: 45173 - DNA, 40 bp, Homo sapiens
ttacaatgtgaagccatgaaatcatgaaataagaagcagg

SEQ ID NO: 45174 - DNA, 40 bp, Homo sapiens
ctgcttcttatttcatgatttcatggcttcacattgtaac

SEQ ID NO: 45175 - DNA, 40 bp, Homo sapiens
gttacaatgtgaagccatgaaatcatgaaataagaagcag

SEQ ID NO: 45176 - DNA, 40 bp, Homo sapiens
tgcttcttatttcatgatttcatggcttcacattgtaaca

SEQ ID NO: 45177 - DNA, 40 bp, Homo sapiens
tgttacaatgtgaagccatgaaatcatgaaataagaagca

SEQ ID NO: 45178 - DNA, 40 bp, Homo sapiens
gcttcttatttcatgatttcatggcttcacattgtaacat

SEQ ID NO: 45179 - DNA, 40 bp, Homo sapiens
atgttacaatgtgaagccatgaaatcatgaaataagaagc

SEQ ID NO: 45180 - DNA, 40 bp, Homo sapiens
cttcttatttcatgatttcatggcttcacattgtaacatc

SEQ ID NO: 45181 - DNA, 40 bp, Homo sapiens
gatgttacaatgtgaagccatgaaatcatgaaataagaag

SEQ ID NO: 45182 - DNA, 40 bp, Homo sapiens
ttcttatttcatgatttcatggcttcacattgtaacatcc

SEQ ID NO: 45183 - DNA, 40 bp, Homo sapiens
ggatgttacaatgtgaagccatgaaatcatgaaataagaa

SEQ ID NO: 45184 - DNA, 40 bp, Homo sapiens
tcttatttcatgatttcatggcttcacattgtaacatccc

SEQ ID NO: 45185 - DNA, 40 bp, Homo sapiens
gggatgttacaatgtgaagccatgaaatcatgaaataaga

SEQ ID NO: 45186 - DNA, 40 bp, Homo sapiens
cttatttcatgatttcatggcttcacattgtaacatccct

SEQ ID NO: 45187 - DNA, 40 bp, Homo sapiens
agggatgttacaatgtgaagccatgaaatcatgaaataag

SEQ ID NO: 45188 - DNA, 40 bp, Homo sapiens
ttatttcatgatttcatggcttcacattgtaacatccctt

SEQ ID NO: 45189 - DNA, 40 bp, Homo sapiens
aagggatgttacaatgtgaagccatgaaatcatgaaataa

SEQ ID NO: 45190 - DNA, 40 bp, Homo sapiens
tatttcatgatttcatggcttcacattgtaacatcccttt

SEQ ID NO: 45191 - DNA, 40 bp, Homo sapiens
aaagggatgttacaatgtgaagccatgaaatcatgaaata

SEQ ID NO: 45192 - DNA, 40 bp, Homo sapiens
atttcatgatttcatggcttcacattgtaacatcccttta

SEQ ID NO: 45193 - DNA, 40 bp, Homo sapiens
taaagggatgttacaatgtgaagccatgaaatcatgaaat

SEQ ID NO: 45194 - DNA, 40 bp, Homo sapiens
tttcatgatttcatggcttcacattgtaacatccctttac

SEQ ID NO: 45195 - DNA, 40 bp, Homo sapiens
gtaaagggatgttacaatgtgaagccatgaaatcatgaaa

SEQ ID NO: 45196 - DNA, 40 bp, Homo sapiens
ttcatgatttcatggcttcacattgtaacatccctttacc

SEQ ID NO: 45197 - DNA, 40 bp, Homo sapiens
ggtaaagggatgttacaatgtgaagccatgaaatcatgaa

SEQ ID NO: 45198 - DNA, 40 bp, Homo sapiens
tcatgatttcatggcttcacattgtaacatccctttacca

SEQ ID NO: 45199 - DNA, 40 bp, Homo sapiens
tggtaaagggatgttacaatgtgaagccatgaaatcatga

SEQ ID NO: 45200 - DNA, 40 bp, Homo sapiens
catgatttcatggcttcacattgtaacatccctttaccat

SEQ ID NO: 45201 - DNA, 40 bp, Homo sapiens
atggtaaagggatgttacaatgtgaagccatgaaatcatg

SEQ ID NO: 45202 - DNA, 40 bp, Homo sapiens
atgatttcatggcttcacattgtaacatccctttaccata

SEQ ID NO: 45203 - DNA, 40 bp, Homo sapiens
tatggtaaagggatgttacaatgtgaagccatgaaatcat

SEQ ID NO: 45204 - DNA, 40 bp, Homo sapiens
tgatttcatggcttcacattgtaacatccctttaccatat

SEQ ID NO: 45205 - DNA, 40 bp, Homo sapiens
atatggtaaagggatgttacaatgtgaagccatgaaatca

SEQ ID NO: 45206 - DNA, 40 bp, Homo sapiens
gatttcatggcttcacattgtaacatccctttaccatatt

SEQ ID NO: 45207 - DNA, 40 bp, Homo sapiens
aatatggtaaagggatgttacaatgtgaagccatgaaatc

SEQ ID NO: 45208 - DNA, 40 bp, Homo sapiens
atttcatggcttcacattgtaacatccctttaccatattt

SEQ ID NO: 45209 - DNA, 40 bp, Homo sapiens
aaatatggtaaagggatgttacaatgtgaagccatgaaat

SEQ ID NO: 45210 - DNA, 40 bp, Homo sapiens
tttcatggcttcacattgtaacatccctttaccatatttt

SEQ ID NO: 45211 - DNA, 40 bp, Homo sapiens
aaaatatggtaaagggatgttacaatgtgaagccatgaaa

SEQ ID NO: 45212 - DNA, 40 bp, Homo sapiens
ttcatggcttcacattgtaacatccctttaccatattttt

SEQ ID NO: 45213 - DNA, 40 bp, Homo sapiens
aaaaatatggtaaagggatgttacaatgtgaagccatgaa

SEQ ID NO: 45214 - DNA, 40 bp, Homo sapiens
tcatggcttcacattgtaacatccctttaccatatttttt

SEQ ID NO: 45215 - DNA, 40 bp, Homo sapiens
aaaaaatatggtaaagggatgttacaatgtgaagccatga

SEQ ID NO: 45216 - DNA, 40 bp, Homo sapiens
catggcttcacattgtaacatccctttaccatattttttg

SEQ ID NO: 45217 - DNA, 40 bp, Homo sapiens
caaaaaatatggtaaagggatgttacaatgtgaagccatg

SEQ ID NO: 45218 - DNA, 40 bp, Homo sapiens
atggcttcacattgtaacatccctttaccatattttttga

SEQ ID NO: 45219 - DNA, 40 bp, Homo sapiens
tcaaaaaatatggtaaagggatgttacaatgtgaagccat

SEQ ID NO: 45220 - DNA, 40 bp, Homo sapiens
tggcttcacattgtaacatccctttaccatattttttgag

SEQ ID NO: 45221 - DNA, 40 bp, Homo sapiens
ctcaaaaaatatggtaaagggatgttacaatgtgaagcca

SEQ ID NO: 45222 - DNA, 40 bp, Homo sapiens
ggcttcacattgtaacatccctttaccatattttttgagg

SEQ ID NO: 45223 - DNA, 40 bp, Homo sapiens
cctcaaaaaatatggtaaagggatgttacaatgtgaagcc

SEQ ID NO: 45224 - DNA, 40 bp, Homo sapiens
gcttcacattgtaacatccctttaccatattttttgagga

SEQ ID NO: 45225 - DNA, 40 bp, Homo sapiens
tcctcaaaaaatatggtaaagggatgttacaatgtgaagc

SEQ ID NO: 45226 - DNA, 40 bp, Homo sapiens
cttcacattgtaacatccctttaccatattttttgaggac

SEQ ID NO: 45227 - DNA, 40 bp, Homo sapiens
gtcctcaaaaaatatggtaaagggatgttacaatgtgaag

SEQ ID NO: 45228 - DNA, 40 bp, Homo sapiens
ttcacattgtaacatccctttaccatattttttgaggact

SEQ ID NO: 45229 - DNA, 40 bp, Homo sapiens
agtcctcaaaaaatatggtaaagggatgttacaatgtgaa

SEQ ID NO: 45230 - DNA, 40 bp, Homo sapiens
tcacattgtaacatccctttaccatattttttgaggactg

SEQ ID NO: 45231 - DNA, 40 bp, Homo sapiens
cagtcctcaaaaaatatggtaaagggatgttacaatgtga

SEQ ID NO: 45232 - DNA, 40 bp, Homo sapiens
cacattgtaacatccctttaccatattttttgaggactgt

SEQ ID NO: 45233 - DNA, 40 bp, Homo sapiens
acagtcctcaaaaaatatggtaaagggatgttacaatgtg

SEQ ID NO: 45234 - DNA, 40 bp, Homo sapiens
acattgtaacatccctttaccatattttttgaggactgtt

SEQ ID NO: 45235 - DNA, 40 bp, Homo sapiens
aacagtcctcaaaaaatatggtaaagggatgttacaatgt

SEQ ID NO: 45236 - DNA, 40 bp, Homo sapiens
cattgtaacatccctttaccatattttttgaggactgttt

SEQ ID NO: 45237 - DNA, 40 bp, Homo sapiens
aaacagtcctcaaaaaatatggtaaagggatgttacaatg

SEQ ID NO: 45238 - DNA, 40 bp, Homo sapiens
attgtaacatccctttaccatattttttgaggactgtttt

SEQ ID NO: 45239 - DNA, 40 bp, Homo sapiens
aaaacagtcctcaaaaaatatggtaaagggatgttacaat

SEQ ID NO: 45240 - DNA, 40 bp, Homo sapiens
ttgtaacatccctttaccatattttttgaggactgttttg

SEQ ID NO: 45241 - DNA, 40 bp, Homo sapiens
caaaacagtcctcaaaaaatatggtaaagggatgttacaa

SEQ ID NO: 45242 - DNA, 40 bp, Homo sapiens
tgtaacatccctttaccatattttttgaggactgttttgg

SEQ ID NO: 45243 - DNA, 40 bp, Homo sapiens
ccaaaacagtcctcaaaaaatatggtaaagggatgttaca

SEQ ID NO: 45244 - DNA, 40 bp, Homo sapiens
gtaacatccctttaccatattttttgaggactgttttggc

SEQ ID NO: 45245 - DNA, 40 bp, Homo sapiens
gccaaaacagtcctcaaaaaatatggtaaagggatgttac

SEQ ID NO: 45246 - DNA, 40 bp, Homo sapiens
taacatccctttaccatattttttgaggactgttttggca

SEQ ID NO: 45247 - DNA, 40 bp, Homo sapiens
tgccaaaacagtcctcaaaaaatatggtaaagggatgtta

SEQ ID NO: 45248 - DNA, 40 bp, Homo sapiens
aacatccctttaccatattttttgaggactgttttggcag

SEQ ID NO: 45249 - DNA, 40 bp, Homo sapiens
ctgccaaaacagtcctcaaaaaatatggtaaagggatgtt

SEQ ID NO: 45250 - DNA, 40 bp, Homo sapiens
acatccctttaccatattttttgaggactgttttggcaga

SEQ ID NO: 45251 - DNA, 40 bp, Homo sapiens
tctgccaaaacagtcctcaaaaaatatggtaaagggatgt

SEQ ID NO: 45252 - DNA, 40 bp, Homo sapiens
catccctttaccatattttttgaggactgttttggcagaa

SEQ ID NO: 45253 - DNA, 40 bp, Homo sapiens
ttctgccaaaacagtcctcaaaaaatatggtaaagggatg

SEQ ID NO: 45254 - DNA, 40 bp, Homo sapiens
atccctttaccatattttttgaggactgttttggcagaat

SEQ ID NO: 45255 - DNA, 40 bp, Homo sapiens
attctgccaaaacagtcctcaaaaaatatggtaaagggat

SEQ ID NO: 45256 - DNA, 40 bp, Homo sapiens
tccctttaccatattttttgaggactgttttggcagaatg

SEQ ID NO: 45257 - DNA, 40 bp, Homo sapiens
cattctgccaaaacagtcctcaaaaaatatggtaaaggga

SEQ ID NO: 45258 - DNA, 40 bp, Homo sapiens
ccctttaccatattttttgaggactgttttggcagaatgt

SEQ ID NO: 45259 - DNA, 40 bp, Homo sapiens
acattctgccaaaacagtcctcaaaaaatatggtaaaggg

SEQ ID NO: 45260 - DNA, 40 bp, Homo sapiens
cctttaccatattttttgaggactgttttggcagaatgtg

SEQ ID NO: 45261 - DNA, 40 bp, Homo sapiens
cacattctgccaaaacagtcctcaaaaaatatggtaaagg

SEQ ID NO: 45262 - DNA, 40 bp, Homo sapiens
ctttaccatattttttgaggactgttttggcagaatgtgt

SEQ ID NO: 45263 - DNA, 40 bp, Homo sapiens
acacattctgccaaaacagtcctcaaaaaatatggtaaag

SEQ ID NO: 45264 - DNA, 40 bp, Homo sapiens
tttaccatattttttgaggactgttttggcagaatgtgtg

SEQ ID NO: 45265 - DNA, 40 bp, Homo sapiens
cacacattctgccaaaacagtcctcaaaaaatatggtaaa

SEQ ID NO: 45266 - DNA, 40 bp, Homo sapiens
ttaccatattttttgaggactgttttggcagaatgtgtga

SEQ ID NO: 45267 - DNA, 40 bp, Homo sapiens
tcacacattctgccaaaacagtcctcaaaaaatatggtaa

SEQ ID NO: 45268 - DNA, 40 bp, Homo sapiens
taccatattttttgaggactgttttggcagaatgtgtgaa

SEQ ID NO: 45269 - DNA, 40 bp, Homo sapiens
ttcacacattctgccaaaacagtcctcaaaaaatatggta

SEQ ID NO: 45270 - DNA, 40 bp, Homo sapiens
accatattttttgaggactgttttggcagaatgtgtgaaa

SEQ ID NO: 45271 - DNA, 40 bp, Homo sapiens
tttcacacattctgccaaaacagtcctcaaaaaatatggt

SEQ ID NO: 45272 - DNA, 40 bp, Homo sapiens
ccatattttttgaggactgttttggcagaatgtgtgaaat

SEQ ID NO: 45273 - DNA, 40 bp, Homo sapiens
atttcacacattctgccaaaacagtcctcaaaaaatatgg

SEQ ID NO: 45274 - DNA, 40 bp, Homo sapiens
catattttttgaggactgttttggcagaatgtgtgaaatc

SEQ ID NO: 45275 - DNA, 40 bp, Homo sapiens
gatttcacacattctgccaaaacagtcctcaaaaaatatg

SEQ ID NO: 45276 - DNA, 40 bp, Homo sapiens
atattttttgaggactgttttggcagaatgtgtgaaatct

SEQ ID NO: 45277 - DNA, 40 bp, Homo sapiens
agatttcacacattctgccaaaacagtcctcaaaaaatat

SEQ ID NO: 45278 - DNA, 40 bp, Homo sapiens
tattttttgaggactgttttggcagaatgtgtgaaatctt

SEQ ID NO: 45279 - DNA, 40 bp, Homo sapiens
aagatttcacacattctgccaaaacagtcctcaaaaaata

SEQ ID NO: 45280 - DNA, 40 bp, Homo sapiens
attttttgaggactgttttggcagaatgtgtgaaatcttg

SEQ ID NO: 45281 - DNA, 40 bp, Homo sapiens
caagatttcacacattctgccaaaacagtcctcaaaaaat

SEQ ID NO: 45282 - DNA, 40 bp, Homo sapiens
ttttttgaggactgttttggcagaatgtgtgaaatcttga

SEQ ID NO: 45283 - DNA, 40 bp, Homo sapiens
tcaagatttcacacattctgccaaaacagtcctcaaaaaa

SEQ ID NO: 45284 - DNA, 40 bp, Homo sapiens
tttttgaggactgttttggcagaatgtgtgaaatcttgag

SEQ ID NO: 45285 - DNA, 40 bp, Homo sapiens
ctcaagatttcacacattctgccaaaacagtcctcaaaaa

SEQ ID NO: 45286 - DNA, 40 bp, Homo sapiens
ttttgaggactgttttggcagaatgtgtgaaatcttgagc

SEQ ID NO: 45287 - DNA, 40 bp, Homo sapiens
gctcaagatttcacacattctgccaaaacagtcctcaaaa

SEQ ID NO: 45288 - DNA, 40 bp, Homo sapiens
tttgaggactgttttggcagaatgtgtgaaatcttgagca

SEQ ID NO: 45289 - DNA, 40 bp, Homo sapiens
tgctcaagatttcacacattctgccaaaacagtcctcaaa

SEQ ID NO: 45290 - DNA, 40 bp, Homo sapiens
ttgaggactgttttggcagaatgtgtgaaatcttgagcag

SEQ ID NO: 45291 - DNA, 40 bp, Homo sapiens
ctgctcaagatttcacacattctgccaaaacagtcctcaa

SEQ ID NO: 45292 - DNA, 40 bp, Homo sapiens
tgaggactgttttggcagaatgtgtgaaatcttgagcaga

SEQ ID NO: 45293 - DNA, 40 bp, Homo sapiens
tctgctcaagatttcacacattctgccaaaacagtcctca

SEQ ID NO: 45294 - DNA, 40 bp, Homo sapiens
gaggactgttttggcagaatgtgtgaaatcttgagcagaa

SEQ ID NO: 45295 - DNA, 40 bp, Homo sapiens
ttctgctcaagatttcacacattctgccaaaacagtcctc

SEQ ID NO: 45296 - DNA, 40 bp, Homo sapiens
aggactgttttggcagaatgtgtgaaatcttgagcagaag

SEQ ID NO: 45297 - DNA, 40 bp, Homo sapiens
cttctgctcaagatttcacacattctgccaaaacagtcct

SEQ ID NO: 45298 - DNA, 40 bp, Homo sapiens
ggactgttttggcagaatgtgtgaaatcttgagcagaagt

SEQ ID NO: 45299 - DNA, 40 bp, Homo sapiens
acttctgctcaagatttcacacattctgccaaaacagtcc

SEQ ID NO: 45300 - DNA, 40 bp, Homo sapiens
gactgttttggcagaatgtgtgaaatcttgagcagaagta

SEQ ID NO: 45301 - DNA, 40 bp, Homo sapiens
tacttctgctcaagatttcacacattctgccaaaacagtc

SEQ ID NO: 45302 - DNA, 40 bp, Homo sapiens
actgttttggcagaatgtgtgaaatcttgagcagaagtat

SEQ ID NO: 45303 - DNA, 40 bp, Homo sapiens
atacttctgctcaagatttcacacattctgccaaaacagt

SEQ ID NO: 45304 - DNA, 40 bp, Homo sapiens
ctgttttggcagaatgtgtgaaatcttgagcagaagtatt

SEQ ID NO: 45305 - DNA, 40 bp, Homo sapiens
aatacttctgctcaagatttcacacattctgccaaaacag

SEQ ID NO: 45306 - DNA, 40 bp, Homo sapiens
tgttttggcagaatgtgtgaaatcttgagcagaagtatta

SEQ ID NO: 45307 - DNA, 40 bp, Homo sapiens
taatacttctgctcaagatttcacacattctgccaaaaca

SEQ ID NO: 45308 - DNA, 40 bp, Homo sapiens
gttttggcagaatgtgtgaaatcttgagcagaagtattac

SEQ ID NO: 45309 - DNA, 40 bp, Homo sapiens
gtaatacttctgctcaagatttcacacattctgccaaaac

SEQ ID NO: 45310 - DNA, 40 bp, Homo sapiens
ttttggcagaatgtgtgaaatcttgagcagaagtattacc

SEQ ID NO: 45311 - DNA, 40 bp, Homo sapiens
ggtaatacttctgctcaagatttcacacattctgccaaaa

SEQ ID NO: 45312 - DNA, 40 bp, Homo sapiens
tttggcagaatgtgtgaaatcttgagcagaagtattaccc

SEQ ID NO: 45313 - DNA, 40 bp, Homo sapiens
gggtaatacttctgctcaagatttcacacattctgccaaa

SEQ ID NO: 45314 - DNA, 40 bp, Homo sapiens
ttggcagaatgtgtgaaatcttgagcagaagtattaccca

SEQ ID NO: 45315 - DNA, 40 bp, Homo sapiens
tgggtaatacttctgctcaagatttcacacattctgccaa

SEQ ID NO: 45316 - DNA, 40 bp, Homo sapiens
tggcagaatgtgtgaaatcttgagcagaagtattacccaa

SEQ ID NO: 45317 - DNA, 40 bp, Homo sapiens
ttgggtaatacttctgctcaagatttcacacattctgcca

SEQ ID NO: 45318 - DNA, 40 bp, Homo sapiens
ggcagaatgtgtgaaatcttgagcagaagtattacccaaa

SEQ ID NO: 45319 - DNA, 40 bp, Homo sapiens
tttgggtaatacttctgctcaagatttcacacattctgcc

SEQ ID NO: 45320 - DNA, 40 bp, Homo sapiens
gcagaatgtgtgaaatcttgagcagaagtattacccaaaa

SEQ ID NO: 45321 - DNA, 40 bp, Homo sapiens
ttttgggtaatacttctgctcaagatttcacacattctgc

SEQ ID NO: 45322 - DNA, 40 bp, Homo sapiens
cagaatgtgtgaaatcttgagcagaagtattacccaaaag

SEQ ID NO: 45323 - DNA, 40 bp, Homo sapiens
cttttgggtaatacttctgctcaagatttcacacattctg

SEQ ID NO: 45324 - DNA, 40 bp, Homo sapiens
agaatgtgtgaaatcttgagcagaagtattacccaaaagt

SEQ ID NO: 45325 - DNA, 40 bp, Homo sapiens
acttttgggtaatacttctgctcaagatttcacacattct

SEQ ID NO: 45326 - DNA, 40 bp, Homo sapiens
gaatgtgtgaaatcttgagcagaagtattacccaaaagtc

SEQ ID NO: 45327 - DNA, 40 bp, Homo sapiens
gacttttgggtaatacttctgctcaagatttcacacattc

SEQ ID NO: 45328 - DNA, 40 bp, Homo sapiens
aatgtgtgaaatcttgagcagaagtattacccaaaagtca

SEQ ID NO: 45329 - DNA, 40 bp, Homo sapiens
tgacttttgggtaatacttctgctcaagatttcacacatt

SEQ ID NO: 45330 - DNA, 40 bp, Homo sapiens
atgtgtgaaatcttgagcagaagtattacccaaaagtcag

SEQ ID NO: 45331 - DNA, 40 bp, Homo sapiens
ctgacttttgggtaatacttctgctcaagatttcacacat

SEQ ID NO: 45332 - DNA, 40 bp, Homo sapiens
tgtgtgaaatcttgagcagaagtattacccaaaagtcaga

SEQ ID NO: 45333 - DNA, 40 bp, Homo sapiens
tctgacttttgggtaatacttctgctcaagatttcacaca

SEQ ID NO: 45334 - DNA, 40 bp, Homo sapiens
gtgtgaaatcttgagcagaagtattacccaaaagtcagaa

SEQ ID NO: 45335 - DNA, 40 bp, Homo sapiens
ttctgacttttgggtaatacttctgctcaagatttcacac

SEQ ID NO: 45336 - DNA, 40 bp, Homo sapiens
tgtgaaatcttgagcagaagtattacccaaaagtcagaag

SEQ ID NO: 45337 - DNA, 40 bp, Homo sapiens
cttctgacttttgggtaatacttctgctcaagatttcaca

SEQ ID NO: 45338 - DNA, 40 bp, Homo sapiens
gtgaaatcttgagcagaagtattacccaaaagtcagaaga

SEQ ID NO: 45339 - DNA, 40 bp, Homo sapiens
tcttctgacttttgggtaatacttctgctcaagatttcac

SEQ ID NO: 45340 - DNA, 40 bp, Homo sapiens
tgaaatcttgagcagaagtattacccaaaagtcagaagaa

SEQ ID NO: 45341 - DNA, 40 bp, Homo sapiens
ttcttctgacttttgggtaatacttctgctcaagatttca

SEQ ID NO: 45342 - DNA, 40 bp, Homo sapiens
gaaatcttgagcagaagtattacccaaaagtcagaagaaa

SEQ ID NO: 45343 - DNA, 40 bp, Homo sapiens
tttcttctgacttttgggtaatacttctgctcaagatttc

SEQ ID NO: 45344 - DNA, 40 bp, Homo sapiens
aaatcttgagcagaagtattacccaaaagtcagaagaaaa

SEQ ID NO: 45345 - DNA, 40 bp, Homo sapiens
ttttcttctgacttttgggtaatacttctgctcaagattt

SEQ ID NO: 45346 - DNA, 40 bp, Homo sapiens
aatcttgagcagaagtattacccaaaagtcagaagaaaat

SEQ ID NO: 45347 - DNA, 40 bp, Homo sapiens
attttcttctgacttttgggtaatacttctgctcaagatt

SEQ ID NO: 45348 - DNA, 40 bp, Homo sapiens
atcttgagcagaagtattacccaaaagtcagaagaaaatc

SEQ ID NO: 45349 - DNA, 40 bp, Homo sapiens
gattttcttctgacttttgggtaatacttctgctcaagat

SEQ ID NO: 45350 - DNA, 40 bp, Homo sapiens
tcttgagcagaagtattacccaaaagtcagaagaaaatca

SEQ ID NO: 45351 - DNA, 40 bp, Homo sapiens
tgattttcttctgacttttgggtaatacttctgctcaaga

SEQ ID NO: 45352 - DNA, 40 bp, Homo sapiens
cttgagcagaagtattacccaaaagtcagaagaaaatcag

SEQ ID NO: 45353 - DNA, 40 bp, Homo sapiens
ctgattttcttctgacttttgggtaatacttctgctcaag

SEQ ID NO: 45354 - DNA, 40 bp, Homo sapiens
ttgagcagaagtattacccaaaagtcagaagaaaatcaga

SEQ ID NO: 45355 - DNA, 40 bp, Homo sapiens
tctgattttcttctgacttttgggtaatacttctgctcaa

SEQ ID NO: 45356 - DNA, 40 bp, Homo sapiens
tgagcagaagtattacccaaaagtcagaagaaaatcagat

SEQ ID NO: 45357 - DNA, 40 bp, Homo sapiens
atctgattttcttctgacttttgggtaatacttctgctca

SEQ ID NO: 45358 - DNA, 40 bp, Homo sapiens
gagcagaagtattacccaaaagtcagaagaaaatcagatt

SEQ ID NO: 45359 - DNA, 40 bp, Homo sapiens
aatctgattttcttctgacttttgggtaatacttctgctc

SEQ ID NO: 45360 - DNA, 40 bp, Homo sapiens
agcagaagtattacccaaaagtcagaagaaaatcagattt

SEQ ID NO: 45361 - DNA, 40 bp, Homo sapiens
aaatctgattttcttctgacttttgggtaatacttctgct

SEQ ID NO: 45362 - DNA, 40 bp, Homo sapiens
gcagaagtattacccaaaagtcagaagaaaatcagatttt

SEQ ID NO: 45363 - DNA, 40 bp, Homo sapiens
aaaatctgattttcttctgacttttgggtaatacttctgc

SEQ ID NO: 45364 - DNA, 40 bp, Homo sapiens
cagaagtattacccaaaagtcagaagaaaatcagattttt

SEQ ID NO: 45365 - DNA, 40 bp, Homo sapiens
aaaaatctgattttcttctgacttttgggtaatacttctg

SEQ ID NO: 45366 - DNA, 40 bp, Homo sapiens
agaagtattacccaaaagtcagaagaaaatcagattttta

SEQ ID NO: 45367 - DNA, 40 bp, Homo sapiens
taaaaatctgattttcttctgacttttgggtaatacttct

SEQ ID NO: 45368 - DNA, 40 bp, Homo sapiens
gaagtattacccaaaagtcagaagaaaatcagatttttat

SEQ ID NO: 45369 - DNA, 40 bp, Homo sapiens
ataaaaatctgattttcttctgacttttgggtaatacttc

SEQ ID NO: 45370 - DNA, 40 bp, Homo sapiens
aagtattacccaaaagtcagaagaaaatcagatttttatt

SEQ ID NO: 45371 - DNA, 40 bp, Homo sapiens
aataaaaatctgattttcttctgacttttgggtaatactt

SEQ ID NO: 45372 - DNA, 40 bp, Homo sapiens
agtattacccaaaagtcagaagaaaatcagatttttattt

SEQ ID NO: 45373 - DNA, 40 bp, Homo sapiens
aaataaaaatctgattttcttctgacttttgggtaatact

SEQ ID NO: 45374 - DNA, 40 bp, Homo sapiens
gtattacccaaaagtcagaagaaaatcagatttttatttc

SEQ ID NO: 45375 - DNA, 40 bp, Homo sapiens
gaaataaaaatctgattttcttctgacttttgggtaatac

SEQ ID NO: 45376 - DNA, 40 bp, Homo sapiens
tattacccaaaagtcagaagaaaatcagatttttatttca

SEQ ID NO: 45377 - DNA, 40 bp, Homo sapiens
tgaaataaaaatctgattttcttctgacttttgggtaata

SEQ ID NO: 45378 - DNA, 40 bp, Homo sapiens
attacccaaaagtcagaagaaaatcagatttttatttcaa

SEQ ID NO: 45379 - DNA, 40 bp, Homo sapiens
ttgaaataaaaatctgattttcttctgacttttgggtaat

SEQ ID NO: 45380 - DNA, 40 bp, Homo sapiens
ttacccaaaagtcagaagaaaatcagatttttatttcaag

SEQ ID NO: 45381 - DNA, 40 bp, Homo sapiens
cttgaaataaaaatctgattttcttctgacttttgggtaa

SEQ ID NO: 45382 - DNA, 40 bp, Homo sapiens
tacccaaaagtcagaagaaaatcagatttttatttcaaga

SEQ ID NO: 45383 - DNA, 40 bp, Homo sapiens
tcttgaaataaaaatctgattttcttctgacttttgggta

SEQ ID NO: 45384 - DNA, 40 bp, Homo sapiens
acccaaaagtcagaagaaaatcagatttttatttcaagat

SEQ ID NO: 45385 - DNA, 40 bp, Homo sapiens
atcttgaaataaaaatctgattttcttctgacttttgggt

SEQ ID NO: 45386 - DNA, 40 bp, Homo sapiens
cccaaaagtcagaagaaaatcagatttttatttcaagatt

SEQ ID NO: 45387 - DNA, 40 bp, Homo sapiens
aatcttgaaataaaaatctgattttcttctgacttttggg

SEQ ID NO: 45388 - DNA, 40 bp, Homo sapiens
ccaaaagtcagaagaaaatcagatttttatttcaagattc

SEQ ID NO: 45389 - DNA, 40 bp, Homo sapiens
gaatcttgaaataaaaatctgattttcttctgacttttgg

SEQ ID NO: 45390 - DNA, 40 bp, Homo sapiens
caaaagtcagaagaaaatcagatttttatttcaagattct

SEQ ID NO: 45391 - DNA, 40 bp, Homo sapiens
agaatcttgaaataaaaatctgattttcttctgacttttg

SEQ ID NO: 45392 - DNA, 40 bp, Homo sapiens
aaaagtcagaagaaaatcagatttttatttcaagattctg

SEQ ID NO: 45393 - DNA, 40 bp, Homo sapiens
cagaatcttgaaataaaaatctgattttcttctgactttt

SEQ ID NO: 45394 - DNA, 40 bp, Homo sapiens
aaagtcagaagaaaatcagatttttatttcaagattctgt

SEQ ID NO: 45395 - DNA, 40 bp, Homo sapiens
acagaatcttgaaataaaaatctgattttcttctgacttt

SEQ ID NO: 45396 - DNA, 40 bp, Homo sapiens
aagtcagaagaaaatcagatttttatttcaagattctgtt

SEQ ID NO: 45397 - DNA, 40 bp, Homo sapiens
aacagaatcttgaaataaaaatctgattttcttctgactt

SEQ ID NO: 45398 - DNA, 40 bp, Homo sapiens
agtcagaagaaaatcagatttttatttcaagattctgtta

SEQ ID NO: 45399 - DNA, 40 bp, Homo sapiens
taacagaatcttgaaataaaaatctgattttcttctgact

SEQ ID NO: 45400 - DNA, 40 bp, Homo sapiens
gtcagaagaaaatcagatttttatttcaagattctgttaa

SEQ ID NO: 45401 - DNA, 40 bp, Homo sapiens
ttaacagaatcttgaaataaaaatctgattttcttctgac

SEQ ID NO: 45402 - DNA, 40 bp, Homo sapiens
tcagaagaaaatcagatttttatttcaagattctgttaaa

SEQ ID NO: 45403 - DNA, 40 bp, Homo sapiens
tttaacagaatcttgaaataaaaatctgattttcttctga

SEQ ID NO: 45404 - DNA, 40 bp, Homo sapiens
cagaagaaaatcagatttttatttcaagattctgttaaag

SEQ ID NO: 45405 - DNA, 40 bp, Homo sapiens
ctttaacagaatcttgaaataaaaatctgattttcttctg

SEQ ID NO: 45406 - DNA, 40 bp, Homo sapiens
agaagaaaatcagatttttatttcaagattctgttaaagt

SEQ ID NO: 45407 - DNA, 40 bp, Homo sapiens
actttaacagaatcttgaaataaaaatctgattttcttct

SEQ ID NO: 45408 - DNA, 40 bp, Homo sapiens
gaagaaaatcagatttttatttcaagattctgttaaagtt

SEQ ID NO: 45409 - DNA, 40 bp, Homo sapiens
aactttaacagaatcttgaaataaaaatctgattttcttc

SEQ ID NO: 45410 - DNA, 40 bp, Homo sapiens
aagaaaatcagatttttatttcaagattctgttaaagtta

SEQ ID NO: 45411 - DNA, 40 bp, Homo sapiens
taactttaacagaatcttgaaataaaaatctgattttctt

SEQ ID NO: 45412 - DNA, 40 bp, Homo sapiens
agaaaatcagatttttatttcaagattctgttaaagttac

SEQ ID NO: 45413 - DNA, 40 bp, Homo sapiens
gtaactttaacagaatcttgaaataaaaatctgattttct

SEQ ID NO: 45414 - DNA, 40 bp, Homo sapiens
gaaaatcagatttttatttcaagattctgttaaagttacc

SEQ ID NO: 45415 - DNA, 40 bp, Homo sapiens
ggtaactttaacagaatcttgaaataaaaatctgattttc

SEQ ID NO: 45416 - DNA, 40 bp, Homo sapiens
aaaatcagatttttatttcaagattctgttaaagttaccc

SEQ ID NO: 45417 - DNA, 40 bp, Homo sapiens
gggtaactttaacagaatcttgaaataaaaatctgatttt

SEQ ID NO: 45418 - DNA, 40 bp, Homo sapiens
aaatcagatttttatttcaagattctgttaaagttaccca

SEQ ID NO: 45419 - DNA, 40 bp, Homo sapiens
tgggtaactttaacagaatcttgaaataaaaatctgattt

SEQ ID NO: 45420 - DNA, 40 bp, Homo sapiens
aatcagatttttatttcaagattctgttaaagttacccac

SEQ ID NO: 45421 - DNA, 40 bp, Homo sapiens
gtgggtaactttaacagaatcttgaaataaaaatctgatt

SEQ ID NO: 45422 - DNA, 40 bp, Homo sapiens
atcagatttttatttcaagattctgttaaagttacccact

SEQ ID NO: 45423 - DNA, 40 bp, Homo sapiens
agtgggtaactttaacagaatcttgaaataaaaatctgat

SEQ ID NO: 45424 - DNA, 40 bp, Homo sapiens
tcagatttttatttcaagattctgttaaagttacccactc

SEQ ID NO: 45425 - DNA, 40 bp, Homo sapiens
gagtgggtaactttaacagaatcttgaaataaaaatctga

SEQ ID NO: 45426 - DNA, 40 bp, Homo sapiens
cagatttttatttcaagattctgttaaagttacccactcc

SEQ ID NO: 45427 - DNA, 40 bp, Homo sapiens
ggagtgggtaactttaacagaatcttgaaataaaaatctg

SEQ ID NO: 45428 - DNA, 40 bp, Homo sapiens
agatttttatttcaagattctgttaaagttacccactccc

SEQ ID NO: 45429 - DNA, 40 bp, Homo sapiens
gggagtgggtaactttaacagaatcttgaaataaaaatct

SEQ ID NO: 45430 - DNA, 40 bp, Homo sapiens
gatttttatttcaagattctgttaaagttacccactccct

SEQ ID NO: 45431 - DNA, 40 bp, Homo sapiens
agggagtgggtaactttaacagaatcttgaaataaaaatc

SEQ ID NO: 45432 - DNA, 40 bp, Homo sapiens
atttttatttcaagattctgttaaagttacccactccctt

SEQ ID NO: 45433 - DNA, 40 bp, Homo sapiens
aagggagtgggtaactttaacagaatcttgaaataaaaat

SEQ ID NO: 45434 - DNA, 40 bp, Homo sapiens
tttttatttcaagattctgttaaagttacccactcccttc

SEQ ID NO: 45435 - DNA, 40 bp, Homo sapiens
gaagggagtgggtaactttaacagaatcttgaaataaaaa

SEQ ID NO: 45436 - DNA, 40 bp, Homo sapiens
ttttatttcaagattctgttaaagttacccactcccttct

SEQ ID NO: 45437 - DNA, 40 bp, Homo sapiens
agaagggagtgggtaactttaacagaatcttgaaataaaa

SEQ ID NO: 45438 - DNA, 40 bp, Homo sapiens
tttatttcaagattctgttaaagttacccactcccttctt

SEQ ID NO: 45439 - DNA, 40 bp, Homo sapiens
aagaagggagtgggtaactttaacagaatcttgaaataaa

SEQ ID NO: 45440 - DNA, 40 bp, Homo sapiens
ttatttcaagattctgttaaagttacccactcccttcttt

SEQ ID NO: 45441 - DNA, 40 bp, Homo sapiens
aaagaagggagtgggtaactttaacagaatcttgaaataa

SEQ ID NO: 45442 - DNA, 40 bp, Homo sapiens
tatttcaagattctgttaaagttacccactcccttctttt

SEQ ID NO: 45443 - DNA, 40 bp, Homo sapiens
aaaagaagggagtgggtaactttaacagaatcttgaaata

SEQ ID NO: 45444 - DNA, 40 bp, Homo sapiens
atttcaagattctgttaaagttacccactcccttctttta

SEQ ID NO: 45445 - DNA, 40 bp, Homo sapiens
taaaagaagggagtgggtaactttaacagaatcttgaaat

SEQ ID NO: 45446 - DNA, 40 bp, Homo sapiens
tttcaagattctgttaaagttacccactcccttcttttac

SEQ ID NO: 45447 - DNA, 40 bp, Homo sapiens
gtaaaagaagggagtgggtaactttaacagaatcttgaaa

SEQ ID NO: 45448 - DNA, 40 bp, Homo sapiens
ttcaagattctgttaaagttacccactcccttcttttact

SEQ ID NO: 45449 - DNA, 40 bp, Homo sapiens
agtaaaagaagggagtgggtaactttaacagaatcttgaa

SEQ ID NO: 45450 - DNA, 40 bp, Homo sapiens
tcaagattctgttaaagttacccactcccttcttttactt

SEQ ID NO: 45451 - DNA, 40 bp, Homo sapiens
aagtaaaagaagggagtgggtaactttaacagaatcttga

SEQ ID NO: 45452 - DNA, 40 bp, Homo sapiens
caagattctgttaaagttacccactcccttcttttactta

SEQ ID NO: 45453 - DNA, 40 bp, Homo sapiens
taagtaaaagaagggagtgggtaactttaacagaatcttg

SEQ ID NO: 45454 - DNA, 40 bp, Homo sapiens
aagattctgttaaagttacccactcccttcttttacttaa

SEQ ID NO: 45455 - DNA, 40 bp, Homo sapiens
ttaagtaaaagaagggagtgggtaactttaacagaatctt

SEQ ID NO: 45456 - DNA, 40 bp, Homo sapiens
agattctgttaaagttacccactcccttcttttacttaat

SEQ ID NO: 45457 - DNA, 40 bp, Homo sapiens
attaagtaaaagaagggagtgggtaactttaacagaatct

SEQ ID NO: 45458 - DNA, 40 bp, Homo sapiens
gattctgttaaagttacccactcccttcttttacttaatc

SEQ ID NO: 45459 - DNA, 40 bp, Homo sapiens
gattaagtaaaagaagggagtgggtaactttaacagaatc

SEQ ID NO: 45460 - DNA, 40 bp, Homo sapiens
attctgttaaagttacccactcccttcttttacttaatct

SEQ ID NO: 45461 - DNA, 40 bp, Homo sapiens
agattaagtaaaagaagggagtgggtaactttaacagaat

SEQ ID NO: 45462 - DNA, 40 bp, Homo sapiens
ttctgttaaagttacccactcccttcttttacttaatctt

SEQ ID NO: 45463 - DNA, 40 bp, Homo sapiens
aagattaagtaaaagaagggagtgggtaactttaacagaa

SEQ ID NO: 45464 - DNA, 40 bp, Homo sapiens
tctgttaaagttacccactcccttcttttacttaatctta

SEQ ID NO: 45465 - DNA, 40 bp, Homo sapiens
taagattaagtaaaagaagggagtgggtaactttaacaga

SEQ ID NO: 45466 - DNA, 40 bp, Homo sapiens
ctgttaaagttacccactcccttcttttacttaatcttat

SEQ ID NO: 45467 - DNA, 40 bp, Homo sapiens
ataagattaagtaaaagaagggagtgggtaactttaacag

SEQ ID NO: 45468 - DNA, 40 bp, Homo sapiens
tgttaaagttacccactcccttcttttacttaatcttata

SEQ ID NO: 45469 - DNA, 40 bp, Homo sapiens
tataagattaagtaaaagaagggagtgggtaactttaaca

SEQ ID NO: 45470 - DNA, 40 bp, Homo sapiens
gttaaagttacccactcccttcttttacttaatcttatag

SEQ ID NO: 45471 - DNA, 40 bp, Homo sapiens
ctataagattaagtaaaagaagggagtgggtaactttaac

SEQ ID NO: 45472 - DNA, 40 bp, Homo sapiens
ttaaagttacccactcccttcttttacttaatcttatagt

SEQ ID NO: 45473 - DNA, 40 bp, Homo sapiens
actataagattaagtaaaagaagggagtgggtaactttaa

SEQ ID NO: 45474 - DNA, 40 bp, Homo sapiens
taaagttacccactcccttcttttacttaatcttatagtt

SEQ ID NO: 45475 - DNA, 40 bp, Homo sapiens
aactataagattaagtaaaagaagggagtgggtaacttta

SEQ ID NO: 45476 - DNA, 40 bp, Homo sapiens
aaagttacccactcccttcttttacttaatcttatagttg

SEQ ID NO: 45477 - DNA, 40 bp, Homo sapiens
caactataagattaagtaaaagaagggagtgggtaacttt

SEQ ID NO: 45478 - DNA, 40 bp, Homo sapiens
aagttacccactcccttcttttacttaatcttatagttgc

SEQ ID NO: 45479 - DNA, 40 bp, Homo sapiens
gcaactataagattaagtaaaagaagggagtgggtaactt

SEQ ID NO: 45480 - DNA, 40 bp, Homo sapiens
agttacccactcccttcttttacttaatcttatagttgca

SEQ ID NO: 45481 - DNA, 40 bp, Homo sapiens
tgcaactataagattaagtaaaagaagggagtgggtaact

SEQ ID NO: 45482 - DNA, 40 bp, Homo sapiens
gttacccactcccttcttttacttaatcttatagttgcag

SEQ ID NO: 45483 - DNA, 40 bp, Homo sapiens
ctgcaactataagattaagtaaaagaagggagtgggtaac

SEQ ID NO: 45484 - DNA, 40 bp, Homo sapiens
ttacccactcccttcttttacttaatcttatagttgcagt

SEQ ID NO: 45485 - DNA, 40 bp, Homo sapiens
actgcaactataagattaagtaaaagaagggagtgggtaa

SEQ ID NO: 45486 - DNA, 40 bp, Homo sapiens
tacccactcccttcttttacttaatcttatagttgcagtt

SEQ ID NO: 45487 - DNA, 40 bp, Homo sapiens
aactgcaactataagattaagtaaaagaagggagtgggta

SEQ ID NO: 45488 - DNA, 40 bp, Homo sapiens
acccactcccttcttttacttaatcttatagttgcagttc

SEQ ID NO: 45489 - DNA, 40 bp, Homo sapiens
gaactgcaactataagattaagtaaaagaagggagtgggt

SEQ ID NO: 45490 - DNA, 40 bp, Homo sapiens
cccactcccttcttttacttaatcttatagttgcagttct

SEQ ID NO: 45491 - DNA, 40 bp, Homo sapiens
agaactgcaactataagattaagtaaaagaagggagtggg

SEQ ID NO: 45492 - DNA, 40 bp, Homo sapiens
ccactcccttcttttacttaatcttatagttgcagttctc

SEQ ID NO: 45493 - DNA, 40 bp, Homo sapiens
gagaactgcaactataagattaagtaaaagaagggagtgg

SEQ ID NO: 45494 - DNA, 40 bp, Homo sapiens
cactcccttcttttacttaatcttatagttgcagttctct

SEQ ID NO: 45495 - DNA, 40 bp, Homo sapiens
agagaactgcaactataagattaagtaaaagaagggagtg

SEQ ID NO: 45496 - DNA, 40 bp, Homo sapiens
actcccttcttttacttaatcttatagttgcagttctctc

SEQ ID NO: 45497 - DNA, 40 bp, Homo sapiens
gagagaactgcaactataagattaagtaaaagaagggagt

SEQ ID NO: 45498 - DNA, 40 bp, Homo sapiens
ctcccttcttttacttaatcttatagttgcagttctctct

SEQ ID NO: 45499 - DNA, 40 bp, Homo sapiens
agagagaactgcaactataagattaagtaaaagaagggag

SEQ ID NO: 45500 - DNA, 40 bp, Homo sapiens
tcccttcttttacttaatcttatagttgcagttctctctc

SEQ ID NO: 45501 - DNA, 40 bp, Homo sapiens
gagagagaactgcaactataagattaagtaaaagaaggga

SEQ ID NO: 45502 - DNA, 40 bp, Homo sapiens
cccttcttttacttaatcttatagttgcagttctctctct

SEQ ID NO: 45503 - DNA, 40 bp, Homo sapiens
agagagagaactgcaactataagattaagtaaaagaaggg

SEQ ID NO: 45504 - DNA, 40 bp, Homo sapiens
ccttcttttacttaatcttatagttgcagttctctctctt

SEQ ID NO: 45505 - DNA, 40 bp, Homo sapiens
aagagagagaactgcaactataagattaagtaaaagaagg

SEQ ID NO: 45506 - DNA, 40 bp, Homo sapiens
cttcttttacttaatcttatagttgcagttctctctcttt

SEQ ID NO: 45507 - DNA, 40 bp, Homo sapiens
aaagagagagaactgcaactataagattaagtaaaagaag

SEQ ID NO: 45508 - DNA, 40 bp, Homo sapiens
ttcttttacttaatcttatagttgcagttctctctctttt

SEQ ID NO: 45509 - DNA, 40 bp, Homo sapiens
aaaagagagagaactgcaactataagattaagtaaaagaa

SEQ ID NO: 45510 - DNA, 40 bp, Homo sapiens
tcttttacttaatcttatagttgcagttctctctcttttt

SEQ ID NO: 45511 - DNA, 40 bp, Homo sapiens
aaaaagagagagaactgcaactataagattaagtaaaaga

SEQ ID NO: 45512 - DNA, 40 bp, Homo sapiens
cttttacttaatcttatagttgcagttctctctcttttta

SEQ ID NO: 45513 - DNA, 40 bp, Homo sapiens
taaaaagagagagaactgcaactataagattaagtaaaag

SEQ ID NO: 45514 - DNA, 40 bp, Homo sapiens
ttttacttaatcttatagttgcagttctctctctttttag

SEQ ID NO: 45515 - DNA, 40 bp, Homo sapiens
ctaaaaagagagagaactgcaactataagattaagtaaaa

SEQ ID NO: 45516 - DNA, 40 bp, Homo sapiens
tttacttaatcttatagttgcagttctctctctttttaga

SEQ ID NO: 45517 - DNA, 40 bp, Homo sapiens
tctaaaaagagagagaactgcaactataagattaagtaaa

SEQ ID NO: 45518 - DNA, 40 bp, Homo sapiens
ttacttaatcttatagttgcagttctctctctttttagaa

SEQ ID NO: 45519 - DNA, 40 bp, Homo sapiens
ttctaaaaagagagagaactgcaactataagattaagtaa

SEQ ID NO: 45520 - DNA, 40 bp, Homo sapiens
tacttaatcttatagttgcagttctctctctttttagaaa

SEQ ID NO: 45521 - DNA, 40 bp, Homo sapiens
tttctaaaaagagagagaactgcaactataagattaagta

SEQ ID NO: 45522 - DNA, 40 bp, Homo sapiens
acttaatcttatagttgcagttctctctctttttagaaaa

SEQ ID NO: 45523 - DNA, 40 bp, Homo sapiens
ttttctaaaaagagagagaactgcaactataagattaagt

SEQ ID NO: 45524 - DNA, 40 bp, Homo sapiens
cttaatcttatagttgcagttctctctctttttagaaaag

SEQ ID NO: 45525 - DNA, 40 bp, Homo sapiens
cttttctaaaaagagagagaactgcaactataagattaag

SEQ ID NO: 45526 - DNA, 40 bp, Homo sapiens
ttaatcttatagttgcagttctctctctttttagaaaaga

SEQ ID NO: 45527 - DNA, 40 bp, Homo sapiens
tcttttctaaaaagagagagaactgcaactataagattaa

SEQ ID NO: 45528 - DNA, 40 bp, Homo sapiens
taatcttatagttgcagttctctctctttttagaaaagaa

SEQ ID NO: 45529 - DNA, 40 bp, Homo sapiens
ttcttttctaaaaagagagagaactgcaactataagatta

SEQ ID NO: 45530 - DNA, 40 bp, Homo sapiens
aatcttatagttgcagttctctctctttttagaaaagaaa

SEQ ID NO: 45531 - DNA, 40 bp, Homo sapiens
tttcttttctaaaaagagagagaactgcaactataagatt

SEQ ID NO: 45532 - DNA, 40 bp, Homo sapiens
atcttatagttgcagttctctctctttttagaaaagaaaa

SEQ ID NO: 45533 - DNA, 40 bp, Homo sapiens
ttttcttttctaaaaagagagagaactgcaactataagat

SEQ ID NO: 45534 - DNA, 40 bp, Homo sapiens
tcttatagttgcagttctctctctttttagaaaagaaaaa

SEQ ID NO: 45535 - DNA, 40 bp, Homo sapiens
tttttcttttctaaaaagagagagaactgcaactataaga

SEQ ID NO: 45536 - DNA, 40 bp, Homo sapiens
cttatagttgcagttctctctctttttagaaaagaaaaaa

SEQ ID NO: 45537 - DNA, 40 bp, Homo sapiens
ttttttcttttctaaaaagagagagaactgcaactataag

SEQ ID NO: 45538 - DNA, 40 bp, Homo sapiens
ttatagttgcagttctctctctttttagaaaagaaaaaag

SEQ ID NO: 45539 - DNA, 40 bp, Homo sapiens
cttttttcttttctaaaaagagagagaactgcaactataa

SEQ ID NO: 45540 - DNA, 40 bp, Homo sapiens
tatagttgcagttctctctctttttagaaaagaaaaaaga

SEQ ID NO: 45541 - DNA, 40 bp, Homo sapiens
tcttttttcttttctaaaaagagagagaactgcaactata

SEQ ID NO: 45542 - DNA, 40 bp, Homo sapiens
atagttgcagttctctctctttttagaaaagaaaaaagag

SEQ ID NO: 45543 - DNA, 40 bp, Homo sapiens
ctcttttttcttttctaaaaagagagagaactgcaactat

SEQ ID NO: 45544 - DNA, 40 bp, Homo sapiens
tagttgcagttctctctctttttagaaaagaaaaaagagg

SEQ ID NO: 45545 - DNA, 40 bp, Homo sapiens
cctcttttttcttttctaaaaagagagagaactgcaacta

SEQ ID NO: 45546 - DNA, 40 bp, Homo sapiens
agttgcagttctctctctttttagaaaagaaaaaagaggc

SEQ ID NO: 45547 - DNA, 40 bp, Homo sapiens
gcctcttttttcttttctaaaaagagagagaactgcaact

SEQ ID NO: 45548 - DNA, 40 bp, Homo sapiens
gttgcagttctctctctttttagaaaagaaaaaagaggcc

SEQ ID NO: 45549 - DNA, 40 bp, Homo sapiens
ggcctcttttttcttttctaaaaagagagagaactgcaac

SEQ ID NO: 45550 - DNA, 40 bp, Homo sapiens
ttgcagttctctctctttttagaaaagaaaaaagaggccc

SEQ ID NO: 45551 - DNA, 40 bp, Homo sapiens
gggcctcttttttcttttctaaaaagagagagaactgcaa

SEQ ID NO: 45552 - DNA, 40 bp, Homo sapiens
tgcagttctctctctttttagaaaagaaaaaagaggcccc

SEQ ID NO: 45553 - DNA, 40 bp, Homo sapiens
ggggcctcttttttcttttctaaaaagagagagaactgca

SEQ ID NO: 45554 - DNA, 40 bp, Homo sapiens
gcagttctctctctttttagaaaagaaaaaagaggcccct

SEQ ID NO: 45555 - DNA, 40 bp, Homo sapiens
aggggcctcttttttcttttctaaaaagagagagaactgc

SEQ ID NO: 45556 - DNA, 40 bp, Homo sapiens
cagttctctctctttttagaaaagaaaaaagaggcccctc

SEQ ID NO: 45557 - DNA, 40 bp, Homo sapiens
gaggggcctcttttttcttttctaaaaagagagagaactg

SEQ ID NO: 45558 - DNA, 40 bp, Homo sapiens
agttctctctctttttagaaaagaaaaaagaggcccctca

SEQ ID NO: 45559 - DNA, 40 bp, Homo sapiens
tgaggggcctcttttttcttttctaaaaagagagagaact

SEQ ID NO: 45560 - DNA, 40 bp, Homo sapiens
gttctctctctttttagaaaagaaaaaagaggcccctcag

SEQ ID NO: 45561 - DNA, 40 bp, Homo sapiens
ctgaggggcctcttttttcttttctaaaaagagagagaac

SEQ ID NO: 45562 - DNA, 40 bp, Homo sapiens
ttctctctctttttagaaaagaaaaaagaggcccctcagg

SEQ ID NO: 45563 - DNA, 40 bp, Homo sapiens
cctgaggggcctcttttttcttttctaaaaagagagagaa

SEQ ID NO: 45564 - DNA, 40 bp, Homo sapiens
tctctctctttttagaaaagaaaaaagaggcccctcagga

SEQ ID NO: 45565 - DNA, 40 bp, Homo sapiens
tcctgaggggcctcttttttcttttctaaaaagagagaga

SEQ ID NO: 45566 - DNA, 40 bp, Homo sapiens
ctctctctttttagaaaagaaaaaagaggcccctcaggat

SEQ ID NO: 45567 - DNA, 40 bp, Homo sapiens
atcctgaggggcctcttttttcttttctaaaaagagagag

SEQ ID NO: 45568 - DNA, 40 bp, Homo sapiens
tctctctttttagaaaagaaaaaagaggcccctcaggatt

SEQ ID NO: 45569 - DNA, 40 bp, Homo sapiens
aatcctgaggggcctcttttttcttttctaaaaagagaga

SEQ ID NO: 45570 - DNA, 40 bp, Homo sapiens
ctctctttttagaaaagaaaaaagaggcccctcaggattt

SEQ ID NO: 45571 - DNA, 40 bp, Homo sapiens
aaatcctgaggggcctcttttttcttttctaaaaagagag

SEQ ID NO: 45572 - DNA, 40 bp, Homo sapiens
tctctttttagaaaagaaaaaagaggcccctcaggatttg

SEQ ID NO: 45573 - DNA, 40 bp, Homo sapiens
caaatcctgaggggcctcttttttcttttctaaaaagaga

SEQ ID NO: 45574 - DNA, 40 bp, Homo sapiens
ctctttttagaaaagaaaaaagaggcccctcaggatttgc

SEQ ID NO: 45575 - DNA, 40 bp, Homo sapiens
gcaaatcctgaggggcctcttttttcttttctaaaaagag

SEQ ID NO: 45576 - DNA, 40 bp, Homo sapiens
tctttttagaaaagaaaaaagaggcccctcaggatttgca

SEQ ID NO: 45577 - DNA, 40 bp, Homo sapiens
tgcaaatcctgaggggcctcttttttcttttctaaaaaga

SEQ ID NO: 45578 - DNA, 40 bp, Homo sapiens
ctttttagaaaagaaaaaagaggcccctcaggatttgcag

SEQ ID NO: 45579 - DNA, 40 bp, Homo sapiens
ctgcaaatcctgaggggcctcttttttcttttctaaaaag

SEQ ID NO: 45580 - DNA, 40 bp, Homo sapiens
tttttagaaaagaaaaaagaggcccctcaggatttgcaga

SEQ ID NO: 45581 - DNA, 40 bp, Homo sapiens
tctgcaaatcctgaggggcctcttttttcttttctaaaaa

SEQ ID NO: 45582 - DNA, 40 bp, Homo sapiens
ttttagaaaagaaaaaagaggcccctcaggatttgcagat

SEQ ID NO: 45583 - DNA, 40 bp, Homo sapiens
atctgcaaatcctgaggggcctcttttttcttttctaaaa

SEQ ID NO: 45584 - DNA, 40 bp, Homo sapiens
tttagaaaagaaaaaagaggcccctcaggatttgcagatg

SEQ ID NO: 45585 - DNA, 40 bp, Homo sapiens
catctgcaaatcctgaggggcctcttttttcttttctaaa

SEQ ID NO: 45586 - DNA, 40 bp, Homo sapiens
ttagaaaagaaaaaagaggcccctcaggatttgcagatga

SEQ ID NO: 45587 - DNA, 40 bp, Homo sapiens
tcatctgcaaatcctgaggggcctcttttttcttttctaa

SEQ ID NO: 45588 - DNA, 40 bp, Homo sapiens
tagaaaagaaaaaagaggcccctcaggatttgcagatgaa

SEQ ID NO: 45589 - DNA, 40 bp, Homo sapiens
ttcatctgcaaatcctgaggggcctcttttttcttttcta

SEQ ID NO: 45590 - DNA, 40 bp, Homo sapiens
agaaaagaaaaaagaggcccctcaggatttgcagatgaaa

SEQ ID NO: 45591 - DNA, 40 bp, Homo sapiens
tttcatctgcaaatcctgaggggcctcttttttcttttct

SEQ ID NO: 45592 - DNA, 40 bp, Homo sapiens
gaaaagaaaaaagaggcccctcaggatttgcagatgaaac

SEQ ID NO: 45593 - DNA, 40 bp, Homo sapiens
gtttcatctgcaaatcctgaggggcctcttttttcttttc

SEQ ID NO: 45594 - DNA, 40 bp, Homo sapiens
aaaagaaaaaagaggcccctcaggatttgcagatgaaaca

SEQ ID NO: 45595 - DNA, 40 bp, Homo sapiens
tgtttcatctgcaaatcctgaggggcctcttttttctttt

SEQ ID NO: 45596 - DNA, 40 bp, Homo sapiens
aaagaaaaaagaggcccctcaggatttgcagatgaaacaa

SEQ ID NO: 45597 - DNA, 40 bp, Homo sapiens
ttgtttcatctgcaaatcctgaggggcctcttttttcttt

SEQ ID NO: 45598 - DNA, 40 bp, Homo sapiens
aagaaaaaagaggcccctcaggatttgcagatgaaacaat

SEQ ID NO: 45599 - DNA, 40 bp, Homo sapiens
attgtttcatctgcaaatcctgaggggcctcttttttctt

SEQ ID NO: 45600 - DNA, 40 bp, Homo sapiens
agaaaaaagaggcccctcaggatttgcagatgaaacaata

SEQ ID NO: 45601 - DNA, 40 bp, Homo sapiens
tattgtttcatctgcaaatcctgaggggcctcttttttct

SEQ ID NO: 45602 - DNA, 40 bp, Homo sapiens
gaaaaaagaggcccctcaggatttgcagatgaaacaatat

SEQ ID NO: 45603 - DNA, 40 bp, Homo sapiens
atattgtttcatctgcaaatcctgaggggcctcttttttc

SEQ ID NO: 45604 - DNA, 40 bp, Homo sapiens
aaaaaagaggcccctcaggatttgcagatgaaacaatatt

SEQ ID NO: 45605 - DNA, 40 bp, Homo sapiens
aatattgtttcatctgcaaatcctgaggggcctctttttt

SEQ ID NO: 45606 - DNA, 40 bp, Homo sapiens
aaaaagaggcccctcaggatttgcagatgaaacaatattg

SEQ ID NO: 45607 - DNA, 40 bp, Homo sapiens
caatattgtttcatctgcaaatcctgaggggcctcttttt

SEQ ID NO: 45608 - DNA, 40 bp, Homo sapiens
aaaagaggcccctcaggatttgcagatgaaacaatattgc

SEQ ID NO: 45609 - DNA, 40 bp, Homo sapiens
gcaatattgtttcatctgcaaatcctgaggggcctctttt

SEQ ID NO: 45610 - DNA, 40 bp, Homo sapiens
aaagaggcccctcaggatttgcagatgaaacaatattgct

SEQ ID NO: 45611 - DNA, 40 bp, Homo sapiens
agcaatattgtttcatctgcaaatcctgaggggcctcttt

SEQ ID NO: 45612 - DNA, 40 bp, Homo sapiens
aagaggcccctcaggatttgcagatgaaacaatattgctc

SEQ ID NO: 45613 - DNA, 40 bp, Homo sapiens
gagcaatattgtttcatctgcaaatcctgaggggcctctt

SEQ ID NO: 45614 - DNA, 40 bp, Homo sapiens
agaggcccctcaggatttgcagatgaaacaatattgctct

SEQ ID NO: 45615 - DNA, 40 bp, Homo sapiens
agagcaatattgtttcatctgcaaatcctgaggggcctct

SEQ ID NO: 45616 - DNA, 40 bp, Homo sapiens
gaggcccctcaggatttgcagatgaaacaatattgctctt

SEQ ID NO: 45617 - DNA, 40 bp, Homo sapiens
aagagcaatattgtttcatctgcaaatcctgaggggcctc

SEQ ID NO: 45618 - DNA, 40 bp, Homo sapiens
aggcccctcaggatttgcagatgaaacaatattgctcttt

SEQ ID NO: 45619 - DNA, 40 bp, Homo sapiens
aaagagcaatattgtttcatctgcaaatcctgaggggcct

SEQ ID NO: 45620 - DNA, 40 bp, Homo sapiens
ggcccctcaggatttgcagatgaaacaatattgctcttta

SEQ ID NO: 45621 - DNA, 40 bp, Homo sapiens
taaagagcaatattgtttcatctgcaaatcctgaggggcc

SEQ ID NO: 45622 - DNA, 40 bp, Homo sapiens
gcccctcaggatttgcagatgaaacaatattgctctttag

SEQ ID NO: 45623 - DNA, 40 bp, Homo sapiens
ctaaagagcaatattgtttcatctgcaaatcctgaggggc

SEQ ID NO: 45624 - DNA, 40 bp, Homo sapiens
cccctcaggatttgcagatgaaacaatattgctctttaga

SEQ ID NO: 45625 - DNA, 40 bp, Homo sapiens
tctaaagagcaatattgtttcatctgcaaatcctgagggg

SEQ ID NO: 45626 - DNA, 40 bp, Homo sapiens
ccctcaggatttgcagatgaaacaatattgctctttagag

SEQ ID NO: 45627 - DNA, 40 bp, Homo sapiens
ctctaaagagcaatattgtttcatctgcaaatcctgaggg

SEQ ID NO: 45628 - DNA, 40 bp, Homo sapiens
cctcaggatttgcagatgaaacaatattgctctttagaga

SEQ ID NO: 45629 - DNA, 40 bp, Homo sapiens
tctctaaagagcaatattgtttcatctgcaaatcctgagg

SEQ ID NO: 45630 - DNA, 40 bp, Homo sapiens
ctcaggatttgcagatgaaacaatattgctctttagagat

SEQ ID NO: 45631 - DNA, 40 bp, Homo sapiens
atctctaaagagcaatattgtttcatctgcaaatcctgag

SEQ ID NO: 45632 - DNA, 40 bp, Homo sapiens
tcaggatttgcagatgaaacaatattgctctttagagata

SEQ ID NO: 45633 - DNA, 40 bp, Homo sapiens
tatctctaaagagcaatattgtttcatctgcaaatcctga

SEQ ID NO: 45634 - DNA, 40 bp, Homo sapiens
caggatttgcagatgaaacaatattgctctttagagatat

SEQ ID NO: 45635 - DNA, 40 bp, Homo sapiens
atatctctaaagagcaatattgtttcatctgcaaatcctg

SEQ ID NO: 45636 - DNA, 40 bp, Homo sapiens
aggatttgcagatgaaacaatattgctctttagagatatc

SEQ ID NO: 45637 - DNA, 40 bp, Homo sapiens
gatatctctaaagagcaatattgtttcatctgcaaatcct

SEQ ID NO: 45638 - DNA, 40 bp, Homo sapiens
ggatttgcagatgaaacaatattgctctttagagatatcc

SEQ ID NO: 45639 - DNA, 40 bp, Homo sapiens
ggatatctctaaagagcaatattgtttcatctgcaaatcc

SEQ ID NO: 45640 - DNA, 40 bp, Homo sapiens
gatttgcagatgaaacaatattgctctttagagatatcca

SEQ ID NO: 45641 - DNA, 40 bp, Homo sapiens
tggatatctctaaagagcaatattgtttcatctgcaaatc

SEQ ID NO: 45642 - DNA, 40 bp, Homo sapiens
atttgcagatgaaacaatattgctctttagagatatccat

SEQ ID NO: 45643 - DNA, 40 bp, Homo sapiens
atggatatctctaaagagcaatattgtttcatctgcaaat

SEQ ID NO: 45644 - DNA, 40 bp, Homo sapiens
tttgcagatgaaacaatattgctctttagagatatccatc

SEQ ID NO: 45645 - DNA, 40 bp, Homo sapiens
gatggatatctctaaagagcaatattgtttcatctgcaaa

SEQ ID NO: 45646 - DNA, 40 bp, Homo sapiens
ttgcagatgaaacaatattgctctttagagatatccatct

SEQ ID NO: 45647 - DNA, 40 bp, Homo sapiens
agatggatatctctaaagagcaatattgtttcatctgcaa

SEQ ID NO: 45648 - DNA, 40 bp, Homo sapiens
tgcagatgaaacaatattgctctttagagatatccatctg

SEQ ID NO: 45649 - DNA, 40 bp, Homo sapiens
cagatggatatctctaaagagcaatattgtttcatctgca

SEQ ID NO: 45650 - DNA, 40 bp, Homo sapiens
gcagatgaaacaatattgctctttagagatatccatctgg

SEQ ID NO: 45651 - DNA, 40 bp, Homo sapiens
ccagatggatatctctaaagagcaatattgtttcatctgc

SEQ ID NO: 45652 - DNA, 40 bp, Homo sapiens
cagatgaaacaatattgctctttagagatatccatctggc

SEQ ID NO: 45653 - DNA, 40 bp, Homo sapiens
gccagatggatatctctaaagagcaatattgtttcatctg

SEQ ID NO: 45654 - DNA, 40 bp, Homo sapiens
agatgaaacaatattgctctttagagatatccatctggct

SEQ ID NO: 45655 - DNA, 40 bp, Homo sapiens
agccagatggatatctctaaagagcaatattgtttcatct

SEQ ID NO: 45656 - DNA, 40 bp, Homo sapiens
gatgaaacaatattgctctttagagatatccatctggctg

SEQ ID NO: 45657 - DNA, 40 bp, Homo sapiens
cagccagatggatatctctaaagagcaatattgtttcatc

SEQ ID NO: 45658 - DNA, 40 bp, Homo sapiens
atgaaacaatattgctctttagagatatccatctggctgt

SEQ ID NO: 45659 - DNA, 40 bp, Homo sapiens
acagccagatggatatctctaaagagcaatattgtttcat

SEQ ID NO: 45660 - DNA, 40 bp, Homo sapiens
tgaaacaatattgctctttagagatatccatctggctgtt

SEQ ID NO: 45661 - DNA, 40 bp, Homo sapiens
aacagccagatggatatctctaaagagcaatattgtttca

SEQ ID NO: 45662 - DNA, 40 bp, Homo sapiens
gaaacaatattgctctttagagatatccatctggctgtta

SEQ ID NO: 45663 - DNA, 40 bp, Homo sapiens
taacagccagatggatatctctaaagagcaatattgtttc

SEQ ID NO: 45664 - DNA, 40 bp, Homo sapiens
aaacaatattgctctttagagatatccatctggctgttag

SEQ ID NO: 45665 - DNA, 40 bp, Homo sapiens
ctaacagccagatggatatctctaaagagcaatattgttt

SEQ ID NO: 45666 - DNA, 40 bp, Homo sapiens
aacaatattgctctttagagatatccatctggctgttaga

SEQ ID NO: 45667 - DNA, 40 bp, Homo sapiens
tctaacagccagatggatatctctaaagagcaatattgtt

SEQ ID NO: 45668 - DNA, 40 bp, Homo sapiens
acaatattgctctttagagatatccatctggctgttagat

SEQ ID NO: 45669 - DNA, 40 bp, Homo sapiens
atctaacagccagatggatatctctaaagagcaatattgt

SEQ ID NO: 45670 - DNA, 40 bp, Homo sapiens
caatattgctctttagagatatccatctggctgttagatt

SEQ ID NO: 45671 - DNA, 40 bp, Homo sapiens
aatctaacagccagatggatatctctaaagagcaatattg

SEQ ID NO: 45672 - DNA, 40 bp, Homo sapiens
aatattgctctttagagatatccatctggctgttagatta

SEQ ID NO: 45673 - DNA, 40 bp, Homo sapiens
taatctaacagccagatggatatctctaaagagcaatatt

SEQ ID NO: 45674 - DNA, 40 bp, Homo sapiens
atattgctctttagagatatccatctggctgttagattat

SEQ ID NO: 45675 - DNA, 40 bp, Homo sapiens
ataatctaacagccagatggatatctctaaagagcaatat

SEQ ID NO: 45676 - DNA, 40 bp, Homo sapiens
tattgctctttagagatatccatctggctgttagattatt

SEQ ID NO: 45677 - DNA, 40 bp, Homo sapiens
aataatctaacagccagatggatatctctaaagagcaata

SEQ ID NO: 45678 - DNA, 40 bp, Homo sapiens
attgctctttagagatatccatctggctgttagattattt

SEQ ID NO: 45679 - DNA, 40 bp, Homo sapiens
aaataatctaacagccagatggatatctctaaagagcaat

SEQ ID NO: 45680 - DNA, 40 bp, Homo sapiens
ttgctctttagagatatccatctggctgttagattatttt

SEQ ID NO: 45681 - DNA, 40 bp, Homo sapiens
aaaataatctaacagccagatggatatctctaaagagcaa

SEQ ID NO: 45682 - DNA, 40 bp, Homo sapiens
tgctctttagagatatccatctggctgttagattattttt

SEQ ID NO: 45683 - DNA, 40 bp, Homo sapiens
aaaaataatctaacagccagatggatatctctaaagagca

SEQ ID NO: 45684 - DNA, 40 bp, Homo sapiens
gctctttagagatatccatctggctgttagattatttttc

SEQ ID NO: 45685 - DNA, 40 bp, Homo sapiens
gaaaaataatctaacagccagatggatatctctaaagagc

SEQ ID NO: 45686 - DNA, 40 bp, Homo sapiens
ctctttagagatatccatctggctgttagattatttttcc

SEQ ID NO: 45687 - DNA, 40 bp, Homo sapiens
ggaaaaataatctaacagccagatggatatctctaaagag

SEQ ID NO: 45688 - DNA, 40 bp, Homo sapiens
tctttagagatatccatctggctgttagattatttttcca

SEQ ID NO: 45689 - DNA, 40 bp, Homo sapiens
tggaaaaataatctaacagccagatggatatctctaaaga

SEQ ID NO: 45690 - DNA, 40 bp, Homo sapiens
ctttagagatatccatctggctgttagattatttttccac

SEQ ID NO: 45691 - DNA, 40 bp, Homo sapiens
gtggaaaaataatctaacagccagatggatatctctaaag

SEQ ID NO: 45692 - DNA, 40 bp, Homo sapiens
tttagagatatccatctggctgttagattatttttccaca

SEQ ID NO: 45693 - DNA, 40 bp, Homo sapiens
tgtggaaaaataatctaacagccagatggatatctctaaa

SEQ ID NO: 45694 - DNA, 40 bp, Homo sapiens
ttagagatatccatctggctgttagattatttttccacag

SEQ ID NO: 45695 - DNA, 40 bp, Homo sapiens
ctgtggaaaaataatctaacagccagatggatatctctaa

SEQ ID NO: 45696 - DNA, 40 bp, Homo sapiens
tagagatatccatctggctgttagattatttttccacagt

SEQ ID NO: 45697 - DNA, 40 bp, Homo sapiens
actgtggaaaaataatctaacagccagatggatatctcta

SEQ ID NO: 45698 - DNA, 40 bp, Homo sapiens
agagatatccatctggctgttagattatttttccacagtt

SEQ ID NO: 45699 - DNA, 40 bp, Homo sapiens
aactgtggaaaaataatctaacagccagatggatatctct

SEQ ID NO: 45700 - DNA, 40 bp, Homo sapiens
gagatatccatctggctgttagattatttttccacagttt

SEQ ID NO: 45701 - DNA, 40 bp, Homo sapiens
aaactgtggaaaaataatctaacagccagatggatatctc

SEQ ID NO: 45702 - DNA, 40 bp, Homo sapiens
agatatccatctggctgttagattatttttccacagtttt

SEQ ID NO: 45703 - DNA, 40 bp, Homo sapiens
aaaactgtggaaaaataatctaacagccagatggatatct

SEQ ID NO: 45704 - DNA, 40 bp, Homo sapiens
gatatccatctggctgttagattatttttccacagttttc

SEQ ID NO: 45705 - DNA, 40 bp, Homo sapiens
gaaaactgtggaaaaataatctaacagccagatggatatc

SEQ ID NO: 45706 - DNA, 40 bp, Homo sapiens
atatccatctggctgttagattatttttccacagttttca

SEQ ID NO: 45707 - DNA, 40 bp, Homo sapiens
tgaaaactgtggaaaaataatctaacagccagatggatat

SEQ ID NO: 45708 - DNA, 40 bp, Homo sapiens
tatccatctggctgttagattatttttccacagttttcag

SEQ ID NO: 45709 - DNA, 40 bp, Homo sapiens
ctgaaaactgtggaaaaataatctaacagccagatggata

SEQ ID NO: 45710 - DNA, 40 bp, Homo sapiens
atccatctggctgttagattatttttccacagttttcaga

SEQ ID NO: 45711 - DNA, 40 bp, Homo sapiens
tctgaaaactgtggaaaaataatctaacagccagatggat

SEQ ID NO: 45712 - DNA, 40 bp, Homo sapiens
tccatctggctgttagattatttttccacagttttcagaa

SEQ ID NO: 45713 - DNA, 40 bp, Homo sapiens
ttctgaaaactgtggaaaaataatctaacagccagatgga

SEQ ID NO: 45714 - DNA, 40 bp, Homo sapiens
ccatctggctgttagattatttttccacagttttcagaag

SEQ ID NO: 45715 - DNA, 40 bp, Homo sapiens
cttctgaaaactgtggaaaaataatctaacagccagatgg

SEQ ID NO: 45716 - DNA, 40 bp, Homo sapiens
catctggctgttagattatttttccacagttttcagaagt

SEQ ID NO: 45717 - DNA, 40 bp, Homo sapiens
acttctgaaaactgtggaaaaataatctaacagccagatg

SEQ ID NO: 45718 - DNA, 40 bp, Homo sapiens
atctggctgttagattatttttccacagttttcagaagtg

SEQ ID NO: 45719 - DNA, 40 bp, Homo sapiens
cacttctgaaaactgtggaaaaataatctaacagccagat

SEQ ID NO: 45720 - DNA, 40 bp, Homo sapiens
tctggctgttagattatttttccacagttttcagaagtgg

SEQ ID NO: 45721 - DNA, 40 bp, Homo sapiens
ccacttctgaaaactgtggaaaaataatctaacagccaga

SEQ ID NO: 45722 - DNA, 40 bp, Homo sapiens
ctggctgttagattatttttccacagttttcagaagtgga

SEQ ID NO: 45723 - DNA, 40 bp, Homo sapiens
tccacttctgaaaactgtggaaaaataatctaacagccag

SEQ ID NO: 45724 - DNA, 40 bp, Homo sapiens
tggctgttagattatttttccacagttttcagaagtggat

SEQ ID NO: 45725 - DNA, 40 bp, Homo sapiens
atccacttctgaaaactgtggaaaaataatctaacagcca

SEQ ID NO: 45726 - DNA, 40 bp, Homo sapiens
ggctgttagattatttttccacagttttcagaagtggatg

SEQ ID NO: 45727 - DNA, 40 bp, Homo sapiens
catccacttctgaaaactgtggaaaaataatctaacagcc

SEQ ID NO: 45728 - DNA, 40 bp, Homo sapiens
gctgttagattatttttccacagttttcagaagtggatga

SEQ ID NO: 45729 - DNA, 40 bp, Homo sapiens
tcatccacttctgaaaactgtggaaaaataatctaacagc

SEQ ID NO: 45730 - DNA, 40 bp, Homo sapiens
ctgttagattatttttccacagttttcagaagtggatgag

SEQ ID NO: 45731 - DNA, 40 bp, Homo sapiens
ctcatccacttctgaaaactgtggaaaaataatctaacag

SEQ ID NO: 45732 - DNA, 40 bp, Homo sapiens
tgttagattatttttccacagttttcagaagtggatgagg

SEQ ID NO: 45733 - DNA, 40 bp, Homo sapiens
cctcatccacttctgaaaactgtggaaaaataatctaaca

SEQ ID NO: 45734 - DNA, 40 bp, Homo sapiens
gttagattatttttccacagttttcagaagtggatgaggc

SEQ ID NO: 45735 - DNA, 40 bp, Homo sapiens
gcctcatccacttctgaaaactgtggaaaaataatctaac

SEQ ID NO: 45736 - DNA, 40 bp, Homo sapiens
ttagattatttttccacagttttcagaagtggatgaggcc

SEQ ID NO: 45737 - DNA, 40 bp, Homo sapiens
ggcctcatccacttctgaaaactgtggaaaaataatctaa

SEQ ID NO: 45738 - DNA, 40 bp, Homo sapiens
tagattatttttccacagttttcagaagtggatgaggcca

SEQ ID NO: 45739 - DNA, 40 bp, Homo sapiens
tggcctcatccacttctgaaaactgtggaaaaataatcta

SEQ ID NO: 45740 - DNA, 40 bp, Homo sapiens
agattatttttccacagttttcagaagtggatgaggccat

SEQ ID NO: 45741 - DNA, 40 bp, Homo sapiens
atggcctcatccacttctgaaaactgtggaaaaataatct

SEQ ID NO: 45742 - DNA, 40 bp, Homo sapiens
gattatttttccacagttttcagaagtggatgaggccatt

SEQ ID NO: 45743 - DNA, 40 bp, Homo sapiens
aatggcctcatccacttctgaaaactgtggaaaaataatc

SEQ ID NO: 45744 - DNA, 40 bp, Homo sapiens
attatttttccacagttttcagaagtggatgaggccatta

SEQ ID NO: 45745 - DNA, 40 bp, Homo sapiens
taatggcctcatccacttctgaaaactgtggaaaaataat

SEQ ID NO: 45746 - DNA, 40 bp, Homo sapiens
ttatttttccacagttttcagaagtggatgaggccattag

SEQ ID NO: 45747 - DNA, 40 bp, Homo sapiens
ctaatggcctcatccacttctgaaaactgtggaaaaataa

SEQ ID NO: 45748 - DNA, 40 bp, Homo sapiens
tatttttccacagttttcagaagtggatgaggccattaga

SEQ ID NO: 45749 - DNA, 40 bp, Homo sapiens
tctaatggcctcatccacttctgaaaactgtggaaaaata

SEQ ID NO: 45750 - DNA, 40 bp, Homo sapiens
atttttccacagttttcagaagtggatgaggccattagaa

SEQ ID NO: 45751 - DNA, 40 bp, Homo sapiens
ttctaatggcctcatccacttctgaaaactgtggaaaaat

SEQ ID NO: 45752 - DNA, 40 bp, Homo sapiens
tttttccacagttttcagaagtggatgaggccattagaat

SEQ ID NO: 45753 - DNA, 40 bp, Homo sapiens
attctaatggcctcatccacttctgaaaactgtggaaaaa

SEQ ID NO: 45754 - DNA, 40 bp, Homo sapiens
ttttccacagttttcagaagtggatgaggccattagaatc

SEQ ID NO: 45755 - DNA, 40 bp, Homo sapiens
gattctaatggcctcatccacttctgaaaactgtggaaaa

SEQ ID NO: 45756 - DNA, 40 bp, Homo sapiens
tttccacagttttcagaagtggatgaggccattagaatct

SEQ ID NO: 45757 - DNA, 40 bp, Homo sapiens
agattctaatggcctcatccacttctgaaaactgtggaaa

SEQ ID NO: 45758 - DNA, 40 bp, Homo sapiens
ttccacagttttcagaagtggatgaggccattagaatctt

SEQ ID NO: 45759 - DNA, 40 bp, Homo sapiens
aagattctaatggcctcatccacttctgaaaactgtggaa

SEQ ID NO: 45760 - DNA, 40 bp, Homo sapiens
tccacagttttcagaagtggatgaggccattagaatcttg

SEQ ID NO: 45761 - DNA, 40 bp, Homo sapiens
caagattctaatggcctcatccacttctgaaaactgtgga

SEQ ID NO: 45762 - DNA, 40 bp, Homo sapiens
ccacagttttcagaagtggatgaggccattagaatcttga

SEQ ID NO: 45763 - DNA, 40 bp, Homo sapiens
tcaagattctaatggcctcatccacttctgaaaactgtgg

SEQ ID NO: 45764 - DNA, 40 bp, Homo sapiens
cacagttttcagaagtggatgaggccattagaatcttgag

SEQ ID NO: 45765 - DNA, 40 bp, Homo sapiens
ctcaagattctaatggcctcatccacttctgaaaactgtg

SEQ ID NO: 45766 - DNA, 40 bp, Homo sapiens
acagttttcagaagtggatgaggccattagaatcttgagt

SEQ ID NO: 45767 - DNA, 40 bp, Homo sapiens
actcaagattctaatggcctcatccacttctgaaaactgt

SEQ ID NO: 45768 - DNA, 40 bp, Homo sapiens
cagttttcagaagtggatgaggccattagaatcttgagta

SEQ ID NO: 45769 - DNA, 40 bp, Homo sapiens
tactcaagattctaatggcctcatccacttctgaaaactg

SEQ ID NO: 45770 - DNA, 40 bp, Homo sapiens
agttttcagaagtggatgaggccattagaatcttgagtat

SEQ ID NO: 45771 - DNA, 40 bp, Homo sapiens
atactcaagattctaatggcctcatccacttctgaaaact

SEQ ID NO: 45772 - DNA, 40 bp, Homo sapiens
gttttcagaagtggatgaggccattagaatcttgagtatt

SEQ ID NO: 45773 - DNA, 40 bp, Homo sapiens
aatactcaagattctaatggcctcatccacttctgaaaac

SEQ ID NO: 45774 - DNA, 40 bp, Homo sapiens
ttttcagaagtggatgaggccattagaatcttgagtattg

SEQ ID NO: 45775 - DNA, 40 bp, Homo sapiens
caatactcaagattctaatggcctcatccacttctgaaaa

SEQ ID NO: 45776 - DNA, 40 bp, Homo sapiens
tttcagaagtggatgaggccattagaatcttgagtattgc

SEQ ID NO: 45777 - DNA, 40 bp, Homo sapiens
gcaatactcaagattctaatggcctcatccacttctgaaa

SEQ ID NO: 45778 - DNA, 40 bp, Homo sapiens
ttcagaagtggatgaggccattagaatcttgagtattgcc

SEQ ID NO: 45779 - DNA, 40 bp, Homo sapiens
ggcaatactcaagattctaatggcctcatccacttctgaa

SEQ ID NO: 45780 - DNA, 40 bp, Homo sapiens
tcagaagtggatgaggccattagaatcttgagtattgccc

SEQ ID NO: 45781 - DNA, 40 bp, Homo sapiens
gggcaatactcaagattctaatggcctcatccacttctga

SEQ ID NO: 45782 - DNA, 40 bp, Homo sapiens
cagaagtggatgaggccattagaatcttgagtattgccca

SEQ ID NO: 45783 - DNA, 40 bp, Homo sapiens
tgggcaatactcaagattctaatggcctcatccacttctg

SEQ ID NO: 45784 - DNA, 40 bp, Homo sapiens
agaagtggatgaggccattagaatcttgagtattgcccat

SEQ ID NO: 45785 - DNA, 40 bp, Homo sapiens
atgggcaatactcaagattctaatggcctcatccacttct

SEQ ID NO: 45786 - DNA, 40 bp, Homo sapiens
gaagtggatgaggccattagaatcttgagtattgcccatt

SEQ ID NO: 45787 - DNA, 40 bp, Homo sapiens
aatgggcaatactcaagattctaatggcctcatccacttc

SEQ ID NO: 45788 - DNA, 40 bp, Homo sapiens
aagtggatgaggccattagaatcttgagtattgcccattt

SEQ ID NO: 45789 - DNA, 40 bp, Homo sapiens
aaatgggcaatactcaagattctaatggcctcatccactt

SEQ ID NO: 45790 - DNA, 40 bp, Homo sapiens
agtggatgaggccattagaatcttgagtattgcccatttc

SEQ ID NO: 45791 - DNA, 40 bp, Homo sapiens
gaaatgggcaatactcaagattctaatggcctcatccact

SEQ ID NO: 45792 - DNA, 40 bp, Homo sapiens
gtggatgaggccattagaatcttgagtattgcccatttcc

SEQ ID NO: 45793 - DNA, 40 bp, Homo sapiens
ggaaatgggcaatactcaagattctaatggcctcatccac

SEQ ID NO: 45794 - DNA, 40 bp, Homo sapiens
tggatgaggccattagaatcttgagtattgcccatttcct

SEQ ID NO: 45795 - DNA, 40 bp, Homo sapiens
aggaaatgggcaatactcaagattctaatggcctcatcca

SEQ ID NO: 45796 - DNA, 40 bp, Homo sapiens
ggatgaggccattagaatcttgagtattgcccatttcctt

SEQ ID NO: 45797 - DNA, 40 bp, Homo sapiens
aaggaaatgggcaatactcaagattctaatggcctcatcc

SEQ ID NO: 45798 - DNA, 40 bp, Homo sapiens
gatgaggccattagaatcttgagtattgcccatttcctta

SEQ ID NO: 45799 - DNA, 40 bp, Homo sapiens
taaggaaatgggcaatactcaagattctaatggcctcatc

SEQ ID NO: 45800 - DNA, 40 bp, Homo sapiens
atgaggccattagaatcttgagtattgcccatttccttat

SEQ ID NO: 45801 - DNA, 40 bp, Homo sapiens
ataaggaaatgggcaatactcaagattctaatggcctcat

SEQ ID NO: 45802 - DNA, 40 bp, Homo sapiens
tgaggccattagaatcttgagtattgcccatttccttatg

SEQ ID NO: 45803 - DNA, 40 bp, Homo sapiens
cataaggaaatgggcaatactcaagattctaatggcctca

SEQ ID NO: 45804 - DNA, 40 bp, Homo sapiens
gaggccattagaatcttgagtattgcccatttccttatgt

SEQ ID NO: 45805 - DNA, 40 bp, Homo sapiens
acataaggaaatgggcaatactcaagattctaatggcctc

SEQ ID NO: 45806 - DNA, 40 bp, Homo sapiens
aggccattagaatcttgagtattgcccatttccttatgtg

SEQ ID NO: 45807 - DNA, 40 bp, Homo sapiens
cacataaggaaatgggcaatactcaagattctaatggcct

SEQ ID NO: 45808 - DNA, 40 bp, Homo sapiens
ggccattagaatcttgagtattgcccatttccttatgtgt

SEQ ID NO: 45809 - DNA, 40 bp, Homo sapiens
acacataaggaaatgggcaatactcaagattctaatggcc

SEQ ID NO: 45810 - DNA, 40 bp, Homo sapiens
gccattagaatcttgagtattgcccatttccttatgtgtg

SEQ ID NO: 45811 - DNA, 40 bp, Homo sapiens
cacacataaggaaatgggcaatactcaagattctaatggc

SEQ ID NO: 45812 - DNA, 40 bp, Homo sapiens
ccattagaatcttgagtattgcccatttccttatgtgtgc

SEQ ID NO: 45813 - DNA, 40 bp, Homo sapiens
gcacacataaggaaatgggcaatactcaagattctaatgg

SEQ ID NO: 45814 - DNA, 40 bp, Homo sapiens
cattagaatcttgagtattgcccatttccttatgtgtgcc

SEQ ID NO: 45815 - DNA, 40 bp, Homo sapiens
ggcacacataaggaaatgggcaatactcaagattctaatg

SEQ ID NO: 45816 - DNA, 40 bp, Homo sapiens
attagaatcttgagtattgcccatttccttatgtgtgcct

SEQ ID NO: 45817 - DNA, 40 bp, Homo sapiens
aggcacacataaggaaatgggcaatactcaagattctaat

SEQ ID NO: 45818 - DNA, 40 bp, Homo sapiens
ttagaatcttgagtattgcccatttccttatgtgtgcctt

SEQ ID NO: 45819 - DNA, 40 bp, Homo sapiens
aaggcacacataaggaaatgggcaatactcaagattctaa

SEQ ID NO: 45820 - DNA, 40 bp, Homo sapiens
tagaatcttgagtattgcccatttccttatgtgtgccttt

SEQ ID NO: 45821 - DNA, 40 bp, Homo sapiens
aaaggcacacataaggaaatgggcaatactcaagattcta

SEQ ID NO: 45822 - DNA, 40 bp, Homo sapiens
agaatcttgagtattgcccatttccttatgtgtgcctttg

SEQ ID NO: 45823 - DNA, 40 bp, Homo sapiens
caaaggcacacataaggaaatgggcaatactcaagattct

SEQ ID NO: 45824 - DNA, 40 bp, Homo sapiens
gaatcttgagtattgcccatttccttatgtgtgcctttga

SEQ ID NO: 45825 - DNA, 40 bp, Homo sapiens
tcaaaggcacacataaggaaatgggcaatactcaagattc

SEQ ID NO: 45826 - DNA, 40 bp, Homo sapiens
aatcttgagtattgcccatttccttatgtgtgcctttgac

SEQ ID NO: 45827 - DNA, 40 bp, Homo sapiens
gtcaaaggcacacataaggaaatgggcaatactcaagatt

SEQ ID NO: 45828 - DNA, 40 bp, Homo sapiens
atcttgagtattgcccatttccttatgtgtgcctttgact

SEQ ID NO: 45829 - DNA, 40 bp, Homo sapiens
agtcaaaggcacacataaggaaatgggcaatactcaagat

SEQ ID NO: 45830 - DNA, 40 bp, Homo sapiens
tcttgagtattgcccatttccttatgtgtgcctttgacta

SEQ ID NO: 45831 - DNA, 40 bp, Homo sapiens
tagtcaaaggcacacataaggaaatgggcaatactcaaga

SEQ ID NO: 45832 - DNA, 40 bp, Homo sapiens
cttgagtattgcccatttccttatgtgtgcctttgactat

SEQ ID NO: 45833 - DNA, 40 bp, Homo sapiens
atagtcaaaggcacacataaggaaatgggcaatactcaag

SEQ ID NO: 45834 - DNA, 40 bp, Homo sapiens
ttgagtattgcccatttccttatgtgtgcctttgactata

SEQ ID NO: 45835 - DNA, 40 bp, Homo sapiens
tatagtcaaaggcacacataaggaaatgggcaatactcaa

SEQ ID NO: 45836 - DNA, 40 bp, Homo sapiens
tgagtattgcccatttccttatgtgtgcctttgactatag

SEQ ID NO: 45837 - DNA, 40 bp, Homo sapiens
ctatagtcaaaggcacacataaggaaatgggcaatactca

SEQ ID NO: 45838 - DNA, 40 bp, Homo sapiens
gagtattgcccatttccttatgtgtgcctttgactataga

SEQ ID NO: 45839 - DNA, 40 bp, Homo sapiens
tctatagtcaaaggcacacataaggaaatgggcaatactc

SEQ ID NO: 45840 - DNA, 40 bp, Homo sapiens
agtattgcccatttccttatgtgtgcctttgactatagat

SEQ ID NO: 45841 - DNA, 40 bp, Homo sapiens
atctatagtcaaaggcacacataaggaaatgggcaatact

SEQ ID NO: 45842 - DNA, 40 bp, Homo sapiens
gtattgcccatttccttatgtgtgcctttgactatagata

SEQ ID NO: 45843 - DNA, 40 bp, Homo sapiens
tatctatagtcaaaggcacacataaggaaatgggcaatac

SEQ ID NO: 45844 - DNA, 40 bp, Homo sapiens
tattgcccatttccttatgtgtgcctttgactatagataa

SEQ ID NO: 45845 - DNA, 40 bp, Homo sapiens
ttatctatagtcaaaggcacacataaggaaatgggcaata

SEQ ID NO: 45846 - DNA, 40 bp, Homo sapiens
attgcccatttccttatgtgtgcctttgactatagataaa

SEQ ID NO: 45847 - DNA, 40 bp, Homo sapiens
tttatctatagtcaaaggcacacataaggaaatgggcaat

SEQ ID NO: 45848 - DNA, 40 bp, Homo sapiens
ttgcccatttccttatgtgtgcctttgactatagataaaa

SEQ ID NO: 45849 - DNA, 40 bp, Homo sapiens
ttttatctatagtcaaaggcacacataaggaaatgggcaa

SEQ ID NO: 45850 - DNA, 40 bp, Homo sapiens
tgcccatttccttatgtgtgcctttgactatagataaaat

SEQ ID NO: 45851 - DNA, 40 bp, Homo sapiens
attttatctatagtcaaaggcacacataaggaaatgggca

SEQ ID NO: 45852 - DNA, 40 bp, Homo sapiens
gcccatttccttatgtgtgcctttgactatagataaaata

SEQ ID NO: 45853 - DNA, 40 bp, Homo sapiens
tattttatctatagtcaaaggcacacataaggaaatgggc

SEQ ID NO: 45854 - DNA, 40 bp, Homo sapiens
cccatttccttatgtgtgcctttgactatagataaaatag

SEQ ID NO: 45855 - DNA, 40 bp, Homo sapiens
ctattttatctatagtcaaaggcacacataaggaaatggg

SEQ ID NO: 45856 - DNA, 40 bp, Homo sapiens
ccatttccttatgtgtgcctttgactatagataaaataga

SEQ ID NO: 45857 - DNA, 40 bp, Homo sapiens
tctattttatctatagtcaaaggcacacataaggaaatgg

SEQ ID NO: 45858 - DNA, 40 bp, Homo sapiens
catttccttatgtgtgcctttgactatagataaaatagat

SEQ ID NO: 45859 - DNA, 40 bp, Homo sapiens
atctattttatctatagtcaaaggcacacataaggaaatg

SEQ ID NO: 45860 - DNA, 40 bp, Homo sapiens
atttccttatgtgtgcctttgactatagataaaatagatg

SEQ ID NO: 45861 - DNA, 40 bp, Homo sapiens
catctattttatctatagtcaaaggcacacataaggaaat

SEQ ID NO: 45862 - DNA, 40 bp, Homo sapiens
tttccttatgtgtgcctttgactatagataaaatagatgc

SEQ ID NO: 45863 - DNA, 40 bp, Homo sapiens
gcatctattttatctatagtcaaaggcacacataaggaaa

SEQ ID NO: 45864 - DNA, 40 bp, Homo sapiens
ttccttatgtgtgcctttgactatagataaaatagatgca

SEQ ID NO: 45865 - DNA, 40 bp, Homo sapiens
tgcatctattttatctatagtcaaaggcacacataaggaa

SEQ ID NO: 45866 - DNA, 40 bp, Homo sapiens
tccttatgtgtgcctttgactatagataaaatagatgcat

SEQ ID NO: 45867 - DNA, 40 bp, Homo sapiens
atgcatctattttatctatagtcaaaggcacacataagga

SEQ ID NO: 45868 - DNA, 40 bp, Homo sapiens
ccttatgtgtgcctttgactatagataaaatagatgcatg

SEQ ID NO: 45869 - DNA, 40 bp, Homo sapiens
catgcatctattttatctatagtcaaaggcacacataagg

SEQ ID NO: 45870 - DNA, 40 bp, Homo sapiens
cttatgtgtgcctttgactatagataaaatagatgcatga

SEQ ID NO: 45871 - DNA, 40 bp, Homo sapiens
tcatgcatctattttatctatagtcaaaggcacacataag

SEQ ID NO: 45872 - DNA, 40 bp, Homo sapiens
ttatgtgtgcctttgactatagataaaatagatgcatgac

SEQ ID NO: 45873 - DNA, 40 bp, Homo sapiens
gtcatgcatctattttatctatagtcaaaggcacacataa

SEQ ID NO: 45874 - DNA, 40 bp, Homo sapiens
tatgtgtgcctttgactatagataaaatagatgcatgaca

SEQ ID NO: 45875 - DNA, 40 bp, Homo sapiens
tgtcatgcatctattttatctatagtcaaaggcacacata

SEQ ID NO: 45876 - DNA, 40 bp, Homo sapiens
atgtgtgcctttgactatagataaaatagatgcatgacaa

SEQ ID NO: 45877 - DNA, 40 bp, Homo sapiens
ttgtcatgcatctattttatctatagtcaaaggcacacat

SEQ ID NO: 45878 - DNA, 40 bp, Homo sapiens
tgtgtgcctttgactatagataaaatagatgcatgacaat

SEQ ID NO: 45879 - DNA, 40 bp, Homo sapiens
attgtcatgcatctattttatctatagtcaaaggcacaca

SEQ ID NO: 45880 - DNA, 40 bp, Homo sapiens
gtgtgcctttgactatagataaaatagatgcatgacaatt

SEQ ID NO: 45881 - DNA, 40 bp, Homo sapiens
aattgtcatgcatctattttatctatagtcaaaggcacac

SEQ ID NO: 45882 - DNA, 40 bp, Homo sapiens
tgtgcctttgactatagataaaatagatgcatgacaatta

SEQ ID NO: 45883 - DNA, 40 bp, Homo sapiens
taattgtcatgcatctattttatctatagtcaaaggcaca

SEQ ID NO: 45884 - DNA, 40 bp, Homo sapiens
gtgcctttgactatagataaaatagatgcatgacaattat

SEQ ID NO: 45885 - DNA, 40 bp, Homo sapiens
ataattgtcatgcatctattttatctatagtcaaaggcac

SEQ ID NO: 45886 - DNA, 40 bp, Homo sapiens
tgcctttgactatagataaaatagatgcatgacaattatt

SEQ ID NO: 45887 - DNA, 40 bp, Homo sapiens
aataattgtcatgcatctattttatctatagtcaaaggca

SEQ ID NO: 45888 - DNA, 40 bp, Homo sapiens
gcctttgactatagataaaatagatgcatgacaattattt

SEQ ID NO: 45889 - DNA, 40 bp, Homo sapiens
aaataattgtcatgcatctattttatctatagtcaaaggc

SEQ ID NO: 45890 - DNA, 40 bp, Homo sapiens
cctttgactatagataaaatagatgcatgacaattattta

SEQ ID NO: 45891 - DNA, 40 bp, Homo sapiens
taaataattgtcatgcatctattttatctatagtcaaagg

SEQ ID NO: 45892 - DNA, 40 bp, Homo sapiens
ctttgactatagataaaatagatgcatgacaattatttat

SEQ ID NO: 45893 - DNA, 40 bp, Homo sapiens
ataaataattgtcatgcatctattttatctatagtcaaag

SEQ ID NO: 45894 - DNA, 40 bp, Homo sapiens
tttgactatagataaaatagatgcatgacaattatttata

SEQ ID NO: 45895 - DNA, 40 bp, Homo sapiens
tataaataattgtcatgcatctattttatctatagtcaaa

SEQ ID NO: 45896 - DNA, 40 bp, Homo sapiens
ttgactatagataaaatagatgcatgacaattatttataa

SEQ ID NO: 45897 - DNA, 40 bp, Homo sapiens
ttataaataattgtcatgcatctattttatctatagtcaa

SEQ ID NO: 45898 - DNA, 40 bp, Homo sapiens
tgactatagataaaatagatgcatgacaattatttataag

SEQ ID NO: 45899 - DNA, 40 bp, Homo sapiens
cttataaataattgtcatgcatctattttatctatagtca

SEQ ID NO: 45900 - DNA, 40 bp, Homo sapiens
gactatagataaaatagatgcatgacaattatttataagt

SEQ ID NO: 45901 - DNA, 40 bp, Homo sapiens
acttataaataattgtcatgcatctattttatctatagtc

SEQ ID NO: 45902 - DNA, 40 bp, Homo sapiens
actatagataaaatagatgcatgacaattatttataagtt

SEQ ID NO: 45903 - DNA, 40 bp, Homo sapiens
aacttataaataattgtcatgcatctattttatctatagt

SEQ ID NO: 45904 - DNA, 40 bp, Homo sapiens
ctatagataaaatagatgcatgacaattatttataagttg

SEQ ID NO: 45905 - DNA, 40 bp, Homo sapiens
caacttataaataattgtcatgcatctattttatctatag

SEQ ID NO: 45906 - DNA, 40 bp, Homo sapiens
tatagataaaatagatgcatgacaattatttataagttga

SEQ ID NO: 45907 - DNA, 40 bp, Homo sapiens
tcaacttataaataattgtcatgcatctattttatctata

SEQ ID NO: 45908 - DNA, 40 bp, Homo sapiens
atagataaaatagatgcatgacaattatttataagttgat

SEQ ID NO: 45909 - DNA, 40 bp, Homo sapiens
atcaacttataaataattgtcatgcatctattttatctat

SEQ ID NO: 45910 - DNA, 40 bp, Homo sapiens
tagataaaatagatgcatgacaattatttataagttgatt

SEQ ID NO: 45911 - DNA, 40 bp, Homo sapiens
aatcaacttataaataattgtcatgcatctattttatcta

SEQ ID NO: 45912 - DNA, 40 bp, Homo sapiens
agataaaatagatgcatgacaattatttataagttgattg

SEQ ID NO: 45913 - DNA, 40 bp, Homo sapiens
caatcaacttataaataattgtcatgcatctattttatct

SEQ ID NO: 45914 - DNA, 40 bp, Homo sapiens
gataaaatagatgcatgacaattatttataagttgattga

SEQ ID NO: 45915 - DNA, 40 bp, Homo sapiens
tcaatcaacttataaataattgtcatgcatctattttatc

SEQ ID NO: 45916 - DNA, 40 bp, Homo sapiens
ataaaatagatgcatgacaattatttataagttgattgat

SEQ ID NO: 45917 - DNA, 40 bp, Homo sapiens
atcaatcaacttataaataattgtcatgcatctattttat

SEQ ID NO: 45918 - DNA, 40 bp, Homo sapiens
taaaatagatgcatgacaattatttataagttgattgatt

SEQ ID NO: 45919 - DNA, 40 bp, Homo sapiens
aatcaatcaacttataaataattgtcatgcatctatttta

SEQ ID NO: 45920 - DNA, 40 bp, Homo sapiens
aaaatagatgcatgacaattatttataagttgattgattt

SEQ ID NO: 45921 - DNA, 40 bp, Homo sapiens
aaatcaatcaacttataaataattgtcatgcatctatttt

SEQ ID NO: 45922 - DNA, 40 bp, Homo sapiens
aaatagatgcatgacaattatttataagttgattgatttt

SEQ ID NO: 45923 - DNA, 40 bp, Homo sapiens
aaaatcaatcaacttataaataattgtcatgcatctattt

SEQ ID NO: 45924 - DNA, 40 bp, Homo sapiens
aatagatgcatgacaattatttataagttgattgattttt

SEQ ID NO: 45925 - DNA, 40 bp, Homo sapiens
aaaaatcaatcaacttataaataattgtcatgcatctatt

SEQ ID NO: 45926 - DNA, 40 bp, Homo sapiens
atagatgcatgacaattatttataagttgattgatttttc

SEQ ID NO: 45927 - DNA, 40 bp, Homo sapiens
gaaaaatcaatcaacttataaataattgtcatgcatctat

SEQ ID NO: 45928 - DNA, 40 bp, Homo sapiens
tagatgcatgacaattatttataagttgattgatttttct

SEQ ID NO: 45929 - DNA, 40 bp, Homo sapiens
agaaaaatcaatcaacttataaataattgtcatgcatcta

SEQ ID NO: 45930 - DNA, 40 bp, Homo sapiens
agatgcatgacaattatttataagttgattgatttttctt

SEQ ID NO: 45931 - DNA, 40 bp, Homo sapiens
aagaaaaatcaatcaacttataaataattgtcatgcatct

SEQ ID NO: 45932 - DNA, 40 bp, Homo sapiens
gatgcatgacaattatttataagttgattgatttttcttg

SEQ ID NO: 45933 - DNA, 40 bp, Homo sapiens
caagaaaaatcaatcaacttataaataattgtcatgcatc

SEQ ID NO: 45934 - DNA, 40 bp, Homo sapiens
atgcatgacaattatttataagttgattgatttttcttgt

SEQ ID NO: 45935 - DNA, 40 bp, Homo sapiens
acaagaaaaatcaatcaacttataaataattgtcatgcat

SEQ ID NO: 45936 - DNA, 40 bp, Homo sapiens
tgcatgacaattatttataagttgattgatttttcttgtc

SEQ ID NO: 45937 - DNA, 40 bp, Homo sapiens
gacaagaaaaatcaatcaacttataaataattgtcatgca

SEQ ID NO: 45938 - DNA, 40 bp, Homo sapiens
gcatgacaattatttataagttgattgatttttcttgtca

SEQ ID NO: 45939 - DNA, 40 bp, Homo sapiens
tgacaagaaaaatcaatcaacttataaataattgtcatgc

SEQ ID NO: 45940 - DNA, 40 bp, Homo sapiens
catgacaattatttataagttgattgatttttcttgtcat

SEQ ID NO: 45941 - DNA, 40 bp, Homo sapiens
atgacaagaaaaatcaatcaacttataaataattgtcatg

SEQ ID NO: 45942 - DNA, 40 bp, Homo sapiens
atgacaattatttataagttgattgatttttcttgtcatt

SEQ ID NO: 45943 - DNA, 40 bp, Homo sapiens
aatgacaagaaaaatcaatcaacttataaataattgtcat

SEQ ID NO: 45944 - DNA, 40 bp, Homo sapiens
tgacaattatttataagttgattgatttttcttgtcattt

SEQ ID NO: 45945 - DNA, 40 bp, Homo sapiens
aaatgacaagaaaaatcaatcaacttataaataattgtca

SEQ ID NO: 45946 - DNA, 40 bp, Homo sapiens
gacaattatttataagttgattgatttttcttgtcattta

SEQ ID NO: 45947 - DNA, 40 bp, Homo sapiens
taaatgacaagaaaaatcaatcaacttataaataattgtc

SEQ ID NO: 45948 - DNA, 40 bp, Homo sapiens
acaattatttataagttgattgatttttcttgtcatttaa

SEQ ID NO: 45949 - DNA, 40 bp, Homo sapiens
ttaaatgacaagaaaaatcaatcaacttataaataattgt

SEQ ID NO: 45950 - DNA, 40 bp, Homo sapiens
caattatttataagttgattgatttttcttgtcatttaaa

SEQ ID NO: 45951 - DNA, 40 bp, Homo sapiens
tttaaatgacaagaaaaatcaatcaacttataaataattg

SEQ ID NO: 45952 - DNA, 40 bp, Homo sapiens
aattatttataagttgattgatttttcttgtcatttaaat

SEQ ID NO: 45953 - DNA, 40 bp, Homo sapiens
atttaaatgacaagaaaaatcaatcaacttataaataatt

SEQ ID NO: 45954 - DNA, 40 bp, Homo sapiens
attatttataagttgattgatttttcttgtcatttaaatc

SEQ ID NO: 45955 - DNA, 40 bp, Homo sapiens
gatttaaatgacaagaaaaatcaatcaacttataaataat

SEQ ID NO: 45956 - DNA, 40 bp, Homo sapiens
ttatttataagttgattgatttttcttgtcatttaaatca

SEQ ID NO: 45957 - DNA, 40 bp, Homo sapiens
tgatttaaatgacaagaaaaatcaatcaacttataaataa

SEQ ID NO: 45958 - DNA, 40 bp, Homo sapiens
tatttataagttgattgatttttcttgtcatttaaatcat

SEQ ID NO: 45959 - DNA, 40 bp, Homo sapiens
atgatttaaatgacaagaaaaatcaatcaacttataaata

SEQ ID NO: 45960 - DNA, 40 bp, Homo sapiens
atttataagttgattgatttttcttgtcatttaaatcatc

SEQ ID NO: 45961 - DNA, 40 bp, Homo sapiens
gatgatttaaatgacaagaaaaatcaatcaacttataaat

SEQ ID NO: 45962 - DNA, 40 bp, Homo sapiens
tttataagttgattgatttttcttgtcatttaaatcatct

SEQ ID NO: 45963 - DNA, 40 bp, Homo sapiens
agatgatttaaatgacaagaaaaatcaatcaacttataaa

SEQ ID NO: 45964 - DNA, 40 bp, Homo sapiens
ttataagttgattgatttttcttgtcatttaaatcatctt

SEQ ID NO: 45965 - DNA, 40 bp, Homo sapiens
aagatgatttaaatgacaagaaaaatcaatcaacttataa

SEQ ID NO: 45966 - DNA, 40 bp, Homo sapiens
tataagttgattgatttttcttgtcatttaaatcatcttg

SEQ ID NO: 45967 - DNA, 40 bp, Homo sapiens
caagatgatttaaatgacaagaaaaatcaatcaacttata

SEQ ID NO: 45968 - DNA, 40 bp, Homo sapiens
ataagttgattgatttttcttgtcatttaaatcatcttga

SEQ ID NO: 45969 - DNA, 40 bp, Homo sapiens
tcaagatgatttaaatgacaagaaaaatcaatcaacttat

SEQ ID NO: 45970 - DNA, 40 bp, Homo sapiens
taagttgattgatttttcttgtcatttaaatcatcttgaa

SEQ ID NO: 45971 - DNA, 40 bp, Homo sapiens
ttcaagatgatttaaatgacaagaaaaatcaatcaactta

SEQ ID NO: 45972 - DNA, 40 bp, Homo sapiens
aagttgattgatttttcttgtcatttaaatcatcttgaat

SEQ ID NO: 45973 - DNA, 40 bp, Homo sapiens
attcaagatgatttaaatgacaagaaaaatcaatcaactt

SEQ ID NO: 45974 - DNA, 40 bp, Homo sapiens
agttgattgatttttcttgtcatttaaatcatcttgaata

SEQ ID NO: 45975 - DNA, 40 bp, Homo sapiens
tattcaagatgatttaaatgacaagaaaaatcaatcaact

SEQ ID NO: 45976 - DNA, 40 bp, Homo sapiens
gttgattgatttttcttgtcatttaaatcatcttgaataa

SEQ ID NO: 45977 - DNA, 40 bp, Homo sapiens
ttattcaagatgatttaaatgacaagaaaaatcaatcaac

SEQ ID NO: 45978 - DNA, 40 bp, Homo sapiens
ttgattgatttttcttgtcatttaaatcatcttgaataat

SEQ ID NO: 45979 - DNA, 40 bp, Homo sapiens
attattcaagatgatttaaatgacaagaaaaatcaatcaa

SEQ ID NO: 45980 - DNA, 40 bp, Homo sapiens
tgattgatttttcttgtcatttaaatcatcttgaataata

SEQ ID NO: 45981 - DNA, 40 bp, Homo sapiens
tattattcaagatgatttaaatgacaagaaaaatcaatca

SEQ ID NO: 45982 - DNA, 40 bp, Homo sapiens
gattgatttttcttgtcatttaaatcatcttgaataatag

SEQ ID NO: 45983 - DNA, 40 bp, Homo sapiens
ctattattcaagatgatttaaatgacaagaaaaatcaatc

SEQ ID NO: 45984 - DNA, 40 bp, Homo sapiens
attgatttttcttgtcatttaaatcatcttgaataataga

SEQ ID NO: 45985 - DNA, 40 bp, Homo sapiens
tctattattcaagatgatttaaatgacaagaaaaatcaat

SEQ ID NO: 45986 - DNA, 40 bp, Homo sapiens
ttgatttttcttgtcatttaaatcatcttgaataatagag

SEQ ID NO: 45987 - DNA, 40 bp, Homo sapiens
ctctattattcaagatgatttaaatgacaagaaaaatcaa

SEQ ID NO: 45988 - DNA, 40 bp, Homo sapiens
tgatttttcttgtcatttaaatcatcttgaataatagagt

SEQ ID NO: 45989 - DNA, 40 bp, Homo sapiens
actctattattcaagatgatttaaatgacaagaaaaatca

SEQ ID NO: 45990 - DNA, 40 bp, Homo sapiens
gatttttcttgtcatttaaatcatcttgaataatagagtt

SEQ ID NO: 45991 - DNA, 40 bp, Homo sapiens
aactctattattcaagatgatttaaatgacaagaaaaatc

SEQ ID NO: 45992 - DNA, 40 bp, Homo sapiens
atttttcttgtcatttaaatcatcttgaataatagagttg

SEQ ID NO: 45993 - DNA, 40 bp, Homo sapiens
caactctattattcaagatgatttaaatgacaagaaaaat

SEQ ID NO: 45994 - DNA, 40 bp, Homo sapiens
tttttcttgtcatttaaatcatcttgaataatagagttgg

SEQ ID NO: 45995 - DNA, 40 bp, Homo sapiens
ccaactctattattcaagatgatttaaatgacaagaaaaa

SEQ ID NO: 45996 - DNA, 40 bp, Homo sapiens
ttttcttgtcatttaaatcatcttgaataatagagttggt

SEQ ID NO: 45997 - DNA, 40 bp, Homo sapiens
accaactctattattcaagatgatttaaatgacaagaaaa

SEQ ID NO: 45998 - DNA, 40 bp, Homo sapiens
tttcttgtcatttaaatcatcttgaataatagagttggta

SEQ ID NO: 45999 - DNA, 40 bp, Homo sapiens
taccaactctattattcaagatgatttaaatgacaagaaa

SEQ ID NO: 46000 - DNA, 40 bp, Homo sapiens
ttcttgtcatttaaatcatcttgaataatagagttggtag

SEQ ID NO: 46001 - DNA, 40 bp, Homo sapiens
ctaccaactctattattcaagatgatttaaatgacaagaa

SEQ ID NO: 46002 - DNA, 40 bp, Homo sapiens
tcttgtcatttaaatcatcttgaataatagagttggtaga

SEQ ID NO: 46003 - DNA, 40 bp, Homo sapiens
tctaccaactctattattcaagatgatttaaatgacaaga

SEQ ID NO: 46004 - DNA, 40 bp, Homo sapiens
cttgtcatttaaatcatcttgaataatagagttggtagag

SEQ ID NO: 46005 - DNA, 40 bp, Homo sapiens
ctctaccaactctattattcaagatgatttaaatgacaag

SEQ ID NO: 46006 - DNA, 40 bp, Homo sapiens
ttgtcatttaaatcatcttgaataatagagttggtagagc

SEQ ID NO: 46007 - DNA, 40 bp, Homo sapiens
gctctaccaactctattattcaagatgatttaaatgacaa

SEQ ID NO: 46008 - DNA, 40 bp, Homo sapiens
tgtcatttaaatcatcttgaataatagagttggtagagct

SEQ ID NO: 46009 - DNA, 40 bp, Homo sapiens
agctctaccaactctattattcaagatgatttaaatgaca

SEQ ID NO: 46010 - DNA, 40 bp, Homo sapiens
gtcatttaaatcatcttgaataatagagttggtagagcta

SEQ ID NO: 46011 - DNA, 40 bp, Homo sapiens
tagctctaccaactctattattcaagatgatttaaatgac

SEQ ID NO: 46012 - DNA, 40 bp, Homo sapiens
tcatttaaatcatcttgaataatagagttggtagagctat

SEQ ID NO: 46013 - DNA, 40 bp, Homo sapiens
atagctctaccaactctattattcaagatgatttaaatga

SEQ ID NO: 46014 - DNA, 40 bp, Homo sapiens
catttaaatcatcttgaataatagagttggtagagctatc

SEQ ID NO: 46015 - DNA, 40 bp, Homo sapiens
gatagctctaccaactctattattcaagatgatttaaatg

SEQ ID NO: 46016 - DNA, 40 bp, Homo sapiens
atttaaatcatcttgaataatagagttggtagagctatcc

SEQ ID NO: 46017 - DNA, 40 bp, Homo sapiens
ggatagctctaccaactctattattcaagatgatttaaat

SEQ ID NO: 46018 - DNA, 40 bp, Homo sapiens
tttaaatcatcttgaataatagagttggtagagctatccc

SEQ ID NO: 46019 - DNA, 40 bp, Homo sapiens
gggatagctctaccaactctattattcaagatgatttaaa

SEQ ID NO: 46020 - DNA, 40 bp, Homo sapiens
ttaaatcatcttgaataatagagttggtagagctatccca

SEQ ID NO: 46021 - DNA, 40 bp, Homo sapiens
tgggatagctctaccaactctattattcaagatgatttaa

SEQ ID NO: 46022 - DNA, 40 bp, Homo sapiens
taaatcatcttgaataatagagttggtagagctatcccat

SEQ ID NO: 46023 - DNA, 40 bp, Homo sapiens
atgggatagctctaccaactctattattcaagatgattta

SEQ ID NO: 46024 - DNA, 40 bp, Homo sapiens
aaatcatcttgaataatagagttggtagagctatcccatt

SEQ ID NO: 46025 - DNA, 40 bp, Homo sapiens
aatgggatagctctaccaactctattattcaagatgattt

SEQ ID NO: 46026 - DNA, 40 bp, Homo sapiens
aatcatcttgaataatagagttggtagagctatcccattt

SEQ ID NO: 46027 - DNA, 40 bp, Homo sapiens
aaatgggatagctctaccaactctattattcaagatgatt

SEQ ID NO: 46028 - DNA, 40 bp, Homo sapiens
atcatcttgaataatagagttggtagagctatcccatttt

SEQ ID NO: 46029 - DNA, 40 bp, Homo sapiens
aaaatgggatagctctaccaactctattattcaagatgat

SEQ ID NO: 46030 - DNA, 40 bp, Homo sapiens
tcatcttgaataatagagttggtagagctatcccattttt

SEQ ID NO: 46031 - DNA, 40 bp, Homo sapiens
aaaaatgggatagctctaccaactctattattcaagatga

SEQ ID NO: 46032 - DNA, 40 bp, Homo sapiens
catcttgaataatagagttggtagagctatcccatttttg

SEQ ID NO: 46033 - DNA, 40 bp, Homo sapiens
caaaaatgggatagctctaccaactctattattcaagatg

SEQ ID NO: 46034 - DNA, 40 bp, Homo sapiens
atcttgaataatagagttggtagagctatcccatttttga

SEQ ID NO: 46035 - DNA, 40 bp, Homo sapiens
tcaaaaatgggatagctctaccaactctattattcaagat

SEQ ID NO: 46036 - DNA, 40 bp, Homo sapiens
tcttgaataatagagttggtagagctatcccatttttgaa

SEQ ID NO: 46037 - DNA, 40 bp, Homo sapiens
ttcaaaaatgggatagctctaccaactctattattcaaga

SEQ ID NO: 46038 - DNA, 40 bp, Homo sapiens
cttgaataatagagttggtagagctatcccatttttgaaa

SEQ ID NO: 46039 - DNA, 40 bp, Homo sapiens
tttcaaaaatgggatagctctaccaactctattattcaag

SEQ ID NO: 46040 - DNA, 40 bp, Homo sapiens
ttgaataatagagttggtagagctatcccatttttgaaat

SEQ ID NO: 46041 - DNA, 40 bp, Homo sapiens
atttcaaaaatgggatagctctaccaactctattattcaa

SEQ ID NO: 46042 - DNA, 40 bp, Homo sapiens
tgaataatagagttggtagagctatcccatttttgaaatt

SEQ ID NO: 46043 - DNA, 40 bp, Homo sapiens
aatttcaaaaatgggatagctctaccaactctattattca

SEQ ID NO: 46044 - DNA, 40 bp, Homo sapiens
gaataatagagttggtagagctatcccatttttgaaatta

SEQ ID NO: 46045 - DNA, 40 bp, Homo sapiens
taatttcaaaaatgggatagctctaccaactctattattc

SEQ ID NO: 46046 - DNA, 40 bp, Homo sapiens
aataatagagttggtagagctatcccatttttgaaattat

SEQ ID NO: 46047 - DNA, 40 bp, Homo sapiens
ataatttcaaaaatgggatagctctaccaactctattatt

SEQ ID NO: 46048 - DNA, 40 bp, Homo sapiens
ataatagagttggtagagctatcccatttttgaaattatt

SEQ ID NO: 46049 - DNA, 40 bp, Homo sapiens
aataatttcaaaaatgggatagctctaccaactctattat

SEQ ID NO: 46050 - DNA, 40 bp, Homo sapiens
taatagagttggtagagctatcccatttttgaaattattt

SEQ ID NO: 46051 - DNA, 40 bp, Homo sapiens
aaataatttcaaaaatgggatagctctaccaactctatta

SEQ ID NO: 46052 - DNA, 40 bp, Homo sapiens
aatagagttggtagagctatcccatttttgaaattatttt

SEQ ID NO: 46053 - DNA, 40 bp, Homo sapiens
aaaataatttcaaaaatgggatagctctaccaactctatt

SEQ ID NO: 46054 - DNA, 40 bp, Homo sapiens
atagagttggtagagctatcccatttttgaaattattttg

SEQ ID NO: 46055 - DNA, 40 bp, Homo sapiens
caaaataatttcaaaaatgggatagctctaccaactctat

SEQ ID NO: 46056 - DNA, 40 bp, Homo sapiens
tagagttggtagagctatcccatttttgaaattattttgt

SEQ ID NO: 46057 - DNA, 40 bp, Homo sapiens
acaaaataatttcaaaaatgggatagctctaccaactcta

SEQ ID NO: 46058 - DNA, 40 bp, Homo sapiens
agagttggtagagctatcccatttttgaaattattttgtt

SEQ ID NO: 46059 - DNA, 40 bp, Homo sapiens
aacaaaataatttcaaaaatgggatagctctaccaactct

SEQ ID NO: 46060 - DNA, 40 bp, Homo sapiens
gagttggtagagctatcccatttttgaaattattttgttt

SEQ ID NO: 46061 - DNA, 40 bp, Homo sapiens
aaacaaaataatttcaaaaatgggatagctctaccaactc

SEQ ID NO: 46062 - DNA, 40 bp, Homo sapiens
agttggtagagctatcccatttttgaaattattttgtttt

SEQ ID NO: 46063 - DNA, 40 bp, Homo sapiens
aaaacaaaataatttcaaaaatgggatagctctaccaact

SEQ ID NO: 46064 - DNA, 40 bp, Homo sapiens
gttggtagagctatcccatttttgaaattattttgttttg

SEQ ID NO: 46065 - DNA, 40 bp, Homo sapiens
caaaacaaaataatttcaaaaatgggatagctctaccaac

SEQ ID NO: 46066 - DNA, 40 bp, Homo sapiens
ttggtagagctatcccatttttgaaattattttgttttgt

SEQ ID NO: 46067 - DNA, 40 bp, Homo sapiens
acaaaacaaaataatttcaaaaatgggatagctctaccaa

SEQ ID NO: 46068 - DNA, 40 bp, Homo sapiens
tggtagagctatcccatttttgaaattattttgttttgtc

SEQ ID NO: 46069 - DNA, 40 bp, Homo sapiens
gacaaaacaaaataatttcaaaaatgggatagctctacca

SEQ ID NO: 46070 - DNA, 40 bp, Homo sapiens
ggtagagctatcccatttttgaaattattttgttttgtca

SEQ ID NO: 46071 - DNA, 40 bp, Homo sapiens
tgacaaaacaaaataatttcaaaaatgggatagctctacc

SEQ ID NO: 46072 - DNA, 40 bp, Homo sapiens
gtagagctatcccatttttgaaattattttgttttgtcaa

SEQ ID NO: 46073 - DNA, 40 bp, Homo sapiens
ttgacaaaacaaaataatttcaaaaatgggatagctctac

SEQ ID NO: 46074 - DNA, 40 bp, Homo sapiens
tagagctatcccatttttgaaattattttgttttgtcaat

SEQ ID NO: 46075 - DNA, 40 bp, Homo sapiens
attgacaaaacaaaataatttcaaaaatgggatagctcta

SEQ ID NO: 46076 - DNA, 40 bp, Homo sapiens
agagctatcccatttttgaaattattttgttttgtcaata

SEQ ID NO: 46077 - DNA, 40 bp, Homo sapiens
tattgacaaaacaaaataatttcaaaaatgggatagctct

SEQ ID NO: 46078 - DNA, 40 bp, Homo sapiens
gagctatcccatttttgaaattattttgttttgtcaataa

SEQ ID NO: 46079 - DNA, 40 bp, Homo sapiens
ttattgacaaaacaaaataatttcaaaaatgggatagctc

SEQ ID NO: 46080 - DNA, 40 bp, Homo sapiens
agctatcccatttttgaaattattttgttttgtcaataac

SEQ ID NO: 46081 - DNA, 40 bp, Homo sapiens
gttattgacaaaacaaaataatttcaaaaatgggatagct

SEQ ID NO: 46082 - DNA, 40 bp, Homo sapiens
gctatcccatttttgaaattattttgttttgtcaataact

SEQ ID NO: 46083 - DNA, 40 bp, Homo sapiens
agttattgacaaaacaaaataatttcaaaaatgggatagc

SEQ ID NO: 46084 - DNA, 40 bp, Homo sapiens
ctatcccatttttgaaattattttgttttgtcaataactt

SEQ ID NO: 46085 - DNA, 40 bp, Homo sapiens
aagttattgacaaaacaaaataatttcaaaaatgggatag

SEQ ID NO: 46086 - DNA, 40 bp, Homo sapiens
tatcccatttttgaaattattttgttttgtcaataacttt

SEQ ID NO: 46087 - DNA, 40 bp, Homo sapiens
aaagttattgacaaaacaaaataatttcaaaaatgggata

SEQ ID NO: 46088 - DNA, 40 bp, Homo sapiens
atcccatttttgaaattattttgttttgtcaataactttt

SEQ ID NO: 46089 - DNA, 40 bp, Homo sapiens
aaaagttattgacaaaacaaaataatttcaaaaatgggat

SEQ ID NO: 46090 - DNA, 40 bp, Homo sapiens
tcccatttttgaaattattttgttttgtcaataacttttt

SEQ ID NO: 46091 - DNA, 40 bp, Homo sapiens
aaaaagttattgacaaaacaaaataatttcaaaaatggga

SEQ ID NO: 46092 - DNA, 40 bp, Homo sapiens
cccatttttgaaattattttgttttgtcaataactttttg

SEQ ID NO: 46093 - DNA, 40 bp, Homo sapiens
caaaaagttattgacaaaacaaaataatttcaaaaatggg

SEQ ID NO: 46094 - DNA, 40 bp, Homo sapiens
ccatttttgaaattattttgttttgtcaataactttttgt

SEQ ID NO: 46095 - DNA, 40 bp, Homo sapiens
acaaaaagttattgacaaaacaaaataatttcaaaaatgg

SEQ ID NO: 46096 - DNA, 40 bp, Homo sapiens
catttttgaaattattttgttttgtcaataactttttgtt

SEQ ID NO: 46097 - DNA, 40 bp, Homo sapiens
aacaaaaagttattgacaaaacaaaataatttcaaaaatg

SEQ ID NO: 46098 - DNA, 40 bp, Homo sapiens
atttttgaaattattttgttttgtcaataactttttgtta

SEQ ID NO: 46099 - DNA, 40 bp, Homo sapiens
taacaaaaagttattgacaaaacaaaataatttcaaaaat

SEQ ID NO: 46100 - DNA, 40 bp, Homo sapiens
tttttgaaattattttgttttgtcaataactttttgttac

SEQ ID NO: 46101 - DNA, 40 bp, Homo sapiens
gtaacaaaaagttattgacaaaacaaaataatttcaaaaa

SEQ ID NO: 46102 - DNA, 40 bp, Homo sapiens
ttttgaaattattttgttttgtcaataactttttgttacc

SEQ ID NO: 46103 - DNA, 40 bp, Homo sapiens
ggtaacaaaaagttattgacaaaacaaaataatttcaaaa

SEQ ID NO: 46104 - DNA, 40 bp, Homo sapiens
tttgaaattattttgttttgtcaataactttttgttacca

SEQ ID NO: 46105 - DNA, 40 bp, Homo sapiens
tggtaacaaaaagttattgacaaaacaaaataatttcaaa

SEQ ID NO: 46106 - DNA, 40 bp, Homo sapiens
ttgaaattattttgttttgtcaataactttttgttaccag

SEQ ID NO: 46107 - DNA, 40 bp, Homo sapiens
ctggtaacaaaaagttattgacaaaacaaaataatttcaa

SEQ ID NO: 46108 - DNA, 40 bp, Homo sapiens
tgaaattattttgttttgtcaataactttttgttaccagc

SEQ ID NO: 46109 - DNA, 40 bp, Homo sapiens
gctggtaacaaaaagttattgacaaaacaaaataatttca

SEQ ID NO: 46110 - DNA, 40 bp, Homo sapiens
gaaattattttgttttgtcaataactttttgttaccagca

SEQ ID NO: 46111 - DNA, 40 bp, Homo sapiens
tgctggtaacaaaaagttattgacaaaacaaaataatttc

SEQ ID NO: 46112 - DNA, 40 bp, Homo sapiens
aaattattttgttttgtcaataactttttgttaccagcat

SEQ ID NO: 46113 - DNA, 40 bp, Homo sapiens
atgctggtaacaaaaagttattgacaaaacaaaataattt

SEQ ID NO: 46114 - DNA, 40 bp, Homo sapiens
aattattttgttttgtcaataactttttgttaccagcatg

SEQ ID NO: 46115 - DNA, 40 bp, Homo sapiens
catgctggtaacaaaaagttattgacaaaacaaaataatt

SEQ ID NO: 46116 - DNA, 40 bp, Homo sapiens
attattttgttttgtcaataactttttgttaccagcatgt

SEQ ID NO: 46117 - DNA, 40 bp, Homo sapiens
acatgctggtaacaaaaagttattgacaaaacaaaataat

SEQ ID NO: 46118 - DNA, 40 bp, Homo sapiens
ttattttgttttgtcaataactttttgttaccagcatgta

SEQ ID NO: 46119 - DNA, 40 bp, Homo sapiens
tacatgctggtaacaaaaagttattgacaaaacaaaataa

SEQ ID NO: 46120 - DNA, 40 bp, Homo sapiens
tattttgttttgtcaataactttttgttaccagcatgtac

SEQ ID NO: 46121 - DNA, 40 bp, Homo sapiens
gtacatgctggtaacaaaaagttattgacaaaacaaaata

SEQ ID NO: 46122 - DNA, 40 bp, Homo sapiens
attttgttttgtcaataactttttgttaccagcatgtaca

SEQ ID NO: 46123 - DNA, 40 bp, Homo sapiens
tgtacatgctggtaacaaaaagttattgacaaaacaaaat

SEQ ID NO: 46124 - DNA, 40 bp, Homo sapiens
ttttgttttgtcaataactttttgttaccagcatgtacac

SEQ ID NO: 46125 - DNA, 40 bp, Homo sapiens
gtgtacatgctggtaacaaaaagttattgacaaaacaaaa

SEQ ID NO: 46126 - DNA, 40 bp, Homo sapiens
tttgttttgtcaataactttttgttaccagcatgtacact

SEQ ID NO: 46127 - DNA, 40 bp, Homo sapiens
agtgtacatgctggtaacaaaaagttattgacaaaacaaa

SEQ ID NO: 46128 - DNA, 40 bp, Homo sapiens
ttgttttgtcaataactttttgttaccagcatgtacactt

SEQ ID NO: 46129 - DNA, 40 bp, Homo sapiens
aagtgtacatgctggtaacaaaaagttattgacaaaacaa

SEQ ID NO: 46130 - DNA, 40 bp, Homo sapiens
tgttttgtcaataactttttgttaccagcatgtacacttg

SEQ ID NO: 46131 - DNA, 40 bp, Homo sapiens
caagtgtacatgctggtaacaaaaagttattgacaaaaca

SEQ ID NO: 46132 - DNA, 40 bp, Homo sapiens
gttttgtcaataactttttgttaccagcatgtacacttgc

SEQ ID NO: 46133 - DNA, 40 bp, Homo sapiens
gcaagtgtacatgctggtaacaaaaagttattgacaaaac

SEQ ID NO: 46134 - DNA, 40 bp, Homo sapiens
ttttgtcaataactttttgttaccagcatgtacacttgca

SEQ ID NO: 46135 - DNA, 40 bp, Homo sapiens
tgcaagtgtacatgctggtaacaaaaagttattgacaaaa

SEQ ID NO: 46136 - DNA, 40 bp, Homo sapiens
tttgtcaataactttttgttaccagcatgtacacttgcat

SEQ ID NO: 46137 - DNA, 40 bp, Homo sapiens
atgcaagtgtacatgctggtaacaaaaagttattgacaaa

SEQ ID NO: 46138 - DNA, 40 bp, Homo sapiens
ttgtcaataactttttgttaccagcatgtacacttgcatt

SEQ ID NO: 46139 - DNA, 40 bp, Homo sapiens
aatgcaagtgtacatgctggtaacaaaaagttattgacaa

SEQ ID NO: 46140 - DNA, 40 bp, Homo sapiens
tgtcaataactttttgttaccagcatgtacacttgcattg

SEQ ID NO: 46141 - DNA, 40 bp, Homo sapiens
caatgcaagtgtacatgctggtaacaaaaagttattgaca

SEQ ID NO: 46142 - DNA, 40 bp, Homo sapiens
gtcaataactttttgttaccagcatgtacacttgcattgt

SEQ ID NO: 46143 - DNA, 40 bp, Homo sapiens
acaatgcaagtgtacatgctggtaacaaaaagttattgac

SEQ ID NO: 46144 - DNA, 40 bp, Homo sapiens
tcaataactttttgttaccagcatgtacacttgcattgtt

SEQ ID NO: 46145 - DNA, 40 bp, Homo sapiens
aacaatgcaagtgtacatgctggtaacaaaaagttattga

SEQ ID NO: 46146 - DNA, 40 bp, Homo sapiens
caataactttttgttaccagcatgtacacttgcattgttg

SEQ ID NO: 46147 - DNA, 40 bp, Homo sapiens
caacaatgcaagtgtacatgctggtaacaaaaagttattg

SEQ ID NO: 46148 - DNA, 40 bp, Homo sapiens
aataactttttgttaccagcatgtacacttgcattgttga

SEQ ID NO: 46149 - DNA, 40 bp, Homo sapiens
tcaacaatgcaagtgtacatgctggtaacaaaaagttatt

SEQ ID NO: 46150 - DNA, 40 bp, Homo sapiens
ataactttttgttaccagcatgtacacttgcattgttgac

SEQ ID NO: 46151 - DNA, 40 bp, Homo sapiens
gtcaacaatgcaagtgtacatgctggtaacaaaaagttat

SEQ ID NO: 46152 - DNA, 40 bp, Homo sapiens
taactttttgttaccagcatgtacacttgcattgttgact

SEQ ID NO: 46153 - DNA, 40 bp, Homo sapiens
agtcaacaatgcaagtgtacatgctggtaacaaaaagtta

SEQ ID NO: 46154 - DNA, 40 bp, Homo sapiens
aactttttgttaccagcatgtacacttgcattgttgactc

SEQ ID NO: 46155 - DNA, 40 bp, Homo sapiens
gagtcaacaatgcaagtgtacatgctggtaacaaaaagtt

SEQ ID NO: 46156 - DNA, 40 bp, Homo sapiens
actttttgttaccagcatgtacacttgcattgttgactct

SEQ ID NO: 46157 - DNA, 40 bp, Homo sapiens
agagtcaacaatgcaagtgtacatgctggtaacaaaaagt

SEQ ID NO: 46158 - DNA, 40 bp, Homo sapiens
ctttttgttaccagcatgtacacttgcattgttgactctc

SEQ ID NO: 46159 - DNA, 40 bp, Homo sapiens
gagagtcaacaatgcaagtgtacatgctggtaacaaaaag

SEQ ID NO: 46160 - DNA, 40 bp, Homo sapiens
tttttgttaccagcatgtacacttgcattgttgactctcc

SEQ ID NO: 46161 - DNA, 40 bp, Homo sapiens
ggagagtcaacaatgcaagtgtacatgctggtaacaaaaa

SEQ ID NO: 46162 - DNA, 40 bp, Homo sapiens
ttttgttaccagcatgtacacttgcattgttgactctcca

SEQ ID NO: 46163 - DNA, 40 bp, Homo sapiens
tggagagtcaacaatgcaagtgtacatgctggtaacaaaa

SEQ ID NO: 46164 - DNA, 40 bp, Homo sapiens
tttgttaccagcatgtacacttgcattgttgactctccat

SEQ ID NO: 46165 - DNA, 40 bp, Homo sapiens
atggagagtcaacaatgcaagtgtacatgctggtaacaaa

SEQ ID NO: 46166 - DNA, 40 bp, Homo sapiens
ttgttaccagcatgtacacttgcattgttgactctccata

SEQ ID NO: 46167 - DNA, 40 bp, Homo sapiens
tatggagagtcaacaatgcaagtgtacatgctggtaacaa

SEQ ID NO: 46168 - DNA, 40 bp, Homo sapiens
tgttaccagcatgtacacttgcattgttgactctccatat

SEQ ID NO: 46169 - DNA, 40 bp, Homo sapiens
atatggagagtcaacaatgcaagtgtacatgctggtaaca

SEQ ID NO: 46170 - DNA, 40 bp, Homo sapiens
gttaccagcatgtacacttgcattgttgactctccatata

SEQ ID NO: 46171 - DNA, 40 bp, Homo sapiens
tatatggagagtcaacaatgcaagtgtacatgctggtaac

SEQ ID NO: 46172 - DNA, 40 bp, Homo sapiens
ttaccagcatgtacacttgcattgttgactctccatataa

SEQ ID NO: 46173 - DNA, 40 bp, Homo sapiens
ttatatggagagtcaacaatgcaagtgtacatgctggtaa

SEQ ID NO: 46174 - DNA, 40 bp, Homo sapiens
taccagcatgtacacttgcattgttgactctccatataat

SEQ ID NO: 46175 - DNA, 40 bp, Homo sapiens
attatatggagagtcaacaatgcaagtgtacatgctggta

SEQ ID NO: 46176 - DNA, 40 bp, Homo sapiens
accagcatgtacacttgcattgttgactctccatataata

SEQ ID NO: 46177 - DNA, 40 bp, Homo sapiens
tattatatggagagtcaacaatgcaagtgtacatgctggt

SEQ ID NO: 46178 - DNA, 40 bp, Homo sapiens
ccagcatgtacacttgcattgttgactctccatataatac

SEQ ID NO: 46179 - DNA, 40 bp, Homo sapiens
gtattatatggagagtcaacaatgcaagtgtacatgctgg

SEQ ID NO: 46180 - DNA, 40 bp, Homo sapiens
cagcatgtacacttgcattgttgactctccatataatacc

SEQ ID NO: 46181 - DNA, 40 bp, Homo sapiens
ggtattatatggagagtcaacaatgcaagtgtacatgctg

SEQ ID NO: 46182 - DNA, 40 bp, Homo sapiens
agcatgtacacttgcattgttgactctccatataatacct

SEQ ID NO: 46183 - DNA, 40 bp, Homo sapiens
aggtattatatggagagtcaacaatgcaagtgtacatgct

SEQ ID NO: 46184 - DNA, 40 bp, Homo sapiens
gcatgtacacttgcattgttgactctccatataatacctt

SEQ ID NO: 46185 - DNA, 40 bp, Homo sapiens
aaggtattatatggagagtcaacaatgcaagtgtacatgc

SEQ ID NO: 46186 - DNA, 40 bp, Homo sapiens
catgtacacttgcattgttgactctccatataataccttt

SEQ ID NO: 46187 - DNA, 40 bp, Homo sapiens
aaaggtattatatggagagtcaacaatgcaagtgtacatg

SEQ ID NO: 46188 - DNA, 40 bp, Homo sapiens
atgtacacttgcattgttgactctccatataataccttta

SEQ ID NO: 46189 - DNA, 40 bp, Homo sapiens
taaaggtattatatggagagtcaacaatgcaagtgtacat

SEQ ID NO: 46190 - DNA, 40 bp, Homo sapiens
tgtacacttgcattgttgactctccatataatacctttaa

SEQ ID NO: 46191 - DNA, 40 bp, Homo sapiens
ttaaaggtattatatggagagtcaacaatgcaagtgtaca

SEQ ID NO: 46192 - DNA, 40 bp, Homo sapiens
gtacacttgcattgttgactctccatataatacctttaaa

SEQ ID NO: 46193 - DNA, 40 bp, Homo sapiens
tttaaaggtattatatggagagtcaacaatgcaagtgtac

SEQ ID NO: 46194 - DNA, 40 bp, Homo sapiens
tacacttgcattgttgactctccatataatacctttaaaa

SEQ ID NO: 46195 - DNA, 40 bp, Homo sapiens
ttttaaaggtattatatggagagtcaacaatgcaagtgta

SEQ ID NO: 46196 - DNA, 40 bp, Homo sapiens
acacttgcattgttgactctccatataatacctttaaaaa

SEQ ID NO: 46197 - DNA, 40 bp, Homo sapiens
tttttaaaggtattatatggagagtcaacaatgcaagtgt

SEQ ID NO: 46198 - DNA, 40 bp, Homo sapiens
cacttgcattgttgactctccatataatacctttaaaaaa

SEQ ID NO: 46199 - DNA, 40 bp, Homo sapiens
ttttttaaaggtattatatggagagtcaacaatgcaagtg

SEQ ID NO: 46200 - DNA, 40 bp, Homo sapiens
acttgcattgttgactctccatataatacctttaaaaaat

SEQ ID NO: 46201 - DNA, 40 bp, Homo sapiens
attttttaaaggtattatatggagagtcaacaatgcaagt

SEQ ID NO: 46202 - DNA, 40 bp, Homo sapiens
cttgcattgttgactctccatataatacctttaaaaaatt

SEQ ID NO: 46203 - DNA, 40 bp, Homo sapiens
aattttttaaaggtattatatggagagtcaacaatgcaag

SEQ ID NO: 46204 - DNA, 40 bp, Homo sapiens
ttgcattgttgactctccatataatacctttaaaaaattt

SEQ ID NO: 46205 - DNA, 40 bp, Homo sapiens
aaattttttaaaggtattatatggagagtcaacaatgcaa

SEQ ID NO: 46206 - DNA, 40 bp, Homo sapiens
tgcattgttgactctccatataatacctttaaaaaatttt

SEQ ID NO: 46207 - DNA, 40 bp, Homo sapiens
aaaattttttaaaggtattatatggagagtcaacaatgca

SEQ ID NO: 46208 - DNA, 40 bp, Homo sapiens
gcattgttgactctccatataatacctttaaaaaattttt

SEQ ID NO: 46209 - DNA, 40 bp, Homo sapiens
aaaaattttttaaaggtattatatggagagtcaacaatgc

SEQ ID NO: 46210 - DNA, 40 bp, Homo sapiens
cattgttgactctccatataatacctttaaaaaatttttt

SEQ ID NO: 46211 - DNA, 40 bp, Homo sapiens
aaaaaattttttaaaggtattatatggagagtcaacaatg

SEQ ID NO: 46212 - DNA, 40 bp, Homo sapiens
attgttgactctccatataatacctttaaaaaattttttt

SEQ ID NO: 46213 - DNA, 40 bp, Homo sapiens
aaaaaaattttttaaaggtattatatggagagtcaacaat

SEQ ID NO: 46214 - DNA, 40 bp, Homo sapiens
ttgttgactctccatataatacctttaaaaaatttttttt

SEQ ID NO: 46215 - DNA, 40 bp, Homo sapiens
aaaaaaaattttttaaaggtattatatggagagtcaacaa

SEQ ID NO: 46216 - DNA, 40 bp, Homo sapiens
tgttgactctccatataatacctttaaaaaattttttttt

SEQ ID NO: 46217 - DNA, 40 bp, Homo sapiens
aaaaaaaaattttttaaaggtattatatggagagtcaaca

SEQ ID NO: 46218 - DNA, 40 bp, Homo sapiens
gttgactctccatataatacctttaaaaaatttttttttg

SEQ ID NO: 46219 - DNA, 40 bp, Homo sapiens
caaaaaaaaattttttaaaggtattatatggagagtcaac

SEQ ID NO: 46220 - DNA, 40 bp, Homo sapiens
ttgactctccatataatacctttaaaaaatttttttttgt

SEQ ID NO: 46221 - DNA, 40 bp, Homo sapiens
acaaaaaaaaattttttaaaggtattatatggagagtcaa

SEQ ID NO: 46222 - DNA, 40 bp, Homo sapiens
tgactctccatataatacctttaaaaaatttttttttgtg

SEQ ID NO: 46223 - DNA, 40 bp, Homo sapiens
cacaaaaaaaaattttttaaaggtattatatggagagtca

SEQ ID NO: 46224 - DNA, 40 bp, Homo sapiens
gactctccatataatacctttaaaaaatttttttttgtgg

SEQ ID NO: 46225 - DNA, 40 bp, Homo sapiens
ccacaaaaaaaaattttttaaaggtattatatggagagtc

SEQ ID NO: 46226 - DNA, 40 bp, Homo sapiens
actctccatataatacctttaaaaaatttttttttgtggt

SEQ ID NO: 46227 - DNA, 40 bp, Homo sapiens
accacaaaaaaaaattttttaaaggtattatatggagagt

SEQ ID NO: 46228 - DNA, 40 bp, Homo sapiens
ctctccatataatacctttaaaaaatttttttttgtggta

SEQ ID NO: 46229 - DNA, 40 bp, Homo sapiens
taccacaaaaaaaaattttttaaaggtattatatggagag

SEQ ID NO: 46230 - DNA, 40 bp, Homo sapiens
tctccatataatacctttaaaaaatttttttttgtggtaa

SEQ ID NO: 46231 - DNA, 40 bp, Homo sapiens
ttaccacaaaaaaaaattttttaaaggtattatatggaga

SEQ ID NO: 46232 - DNA, 40 bp, Homo sapiens
ctccatataatacctttaaaaaatttttttttgtggtaaa

SEQ ID NO: 46233 - DNA, 40 bp, Homo sapiens
tttaccacaaaaaaaaattttttaaaggtattatatggag

SEQ ID NO: 46234 - DNA, 40 bp, Homo sapiens
tccatataatacctttaaaaaatttttttttgtggtaaaa

SEQ ID NO: 46235 - DNA, 40 bp, Homo sapiens
ttttaccacaaaaaaaaattttttaaaggtattatatgga

SEQ ID NO: 46236 - DNA, 40 bp, Homo sapiens
ccatataatacctttaaaaaatttttttttgtggtaaaat

SEQ ID NO: 46237 - DNA, 40 bp, Homo sapiens
attttaccacaaaaaaaaattttttaaaggtattatatgg

SEQ ID NO: 46238 - DNA, 40 bp, Homo sapiens
catataatacctttaaaaaatttttttttgtggtaaaata

SEQ ID NO: 46239 - DNA, 40 bp, Homo sapiens
tattttaccacaaaaaaaaattttttaaaggtattatatg

SEQ ID NO: 46240 - DNA, 40 bp, Homo sapiens
atataatacctttaaaaaatttttttttgtggtaaaatat

SEQ ID NO: 46241 - DNA, 40 bp, Homo sapiens
atattttaccacaaaaaaaaattttttaaaggtattatat

SEQ ID NO: 46242 - DNA, 40 bp, Homo sapiens
tataatacctttaaaaaatttttttttgtggtaaaatatg

SEQ ID NO: 46243 - DNA, 40 bp, Homo sapiens
catattttaccacaaaaaaaaattttttaaaggtattata

SEQ ID NO: 46244 - DNA, 40 bp, Homo sapiens
ataatacctttaaaaaatttttttttgtggtaaaatatgc

SEQ ID NO: 46245 - DNA, 40 bp, Homo sapiens
gcatattttaccacaaaaaaaaattttttaaaggtattat

SEQ ID NO: 46246 - DNA, 40 bp, Homo sapiens
taatacctttaaaaaatttttttttgtggtaaaatatgca

SEQ ID NO: 46247 - DNA, 40 bp, Homo sapiens
tgcatattttaccacaaaaaaaaattttttaaaggtatta

SEQ ID NO: 46248 - DNA, 40 bp, Homo sapiens
aatacctttaaaaaatttttttttgtggtaaaatatgcat

SEQ ID NO: 46249 - DNA, 40 bp, Homo sapiens
atgcatattttaccacaaaaaaaaattttttaaaggtatt

SEQ ID NO: 46250 - DNA, 40 bp, Homo sapiens
atacctttaaaaaatttttttttgtggtaaaatatgcata

SEQ ID NO: 46251 - DNA, 40 bp, Homo sapiens
tatgcatattttaccacaaaaaaaaattttttaaaggtat

SEQ ID NO: 46252 - DNA, 40 bp, Homo sapiens
tacctttaaaaaatttttttttgtggtaaaatatgcataa

SEQ ID NO: 46253 - DNA, 40 bp, Homo sapiens
ttatgcatattttaccacaaaaaaaaattttttaaaggta

SEQ ID NO: 46254 - DNA, 40 bp, Homo sapiens
acctttaaaaaatttttttttgtggtaaaatatgcataac

SEQ ID NO: 46255 - DNA, 40 bp, Homo sapiens
gttatgcatattttaccacaaaaaaaaattttttaaaggt

SEQ ID NO: 46256 - DNA, 40 bp, Homo sapiens
cctttaaaaaatttttttttgtggtaaaatatgcataaca

SEQ ID NO: 46257 - DNA, 40 bp, Homo sapiens
tgttatgcatattttaccacaaaaaaaaattttttaaagg

SEQ ID NO: 46258 - DNA, 40 bp, Homo sapiens
ctttaaaaaatttttttttgtggtaaaatatgcataacat

SEQ ID NO: 46259 - DNA, 40 bp, Homo sapiens
atgttatgcatattttaccacaaaaaaaaattttttaaag

SEQ ID NO: 46260 - DNA, 40 bp, Homo sapiens
tttaaaaaatttttttttgtggtaaaatatgcataacata

SEQ ID NO: 46261 - DNA, 40 bp, Homo sapiens
tatgttatgcatattttaccacaaaaaaaaattttttaaa

SEQ ID NO: 46262 - DNA, 40 bp, Homo sapiens
ttaaaaaatttttttttgtggtaaaatatgcataacataa

SEQ ID NO: 46263 - DNA, 40 bp, Homo sapiens
ttatgttatgcatattttaccacaaaaaaaaattttttaa

SEQ ID NO: 46264 - DNA, 40 bp, Homo sapiens
taaaaaatttttttttgtggtaaaatatgcataacataaa

SEQ ID NO: 46265 - DNA, 40 bp, Homo sapiens
tttatgttatgcatattttaccacaaaaaaaaatttttta

SEQ ID NO: 46266 - DNA, 40 bp, Homo sapiens
aaaaaatttttttttgtggtaaaatatgcataacataaag

SEQ ID NO: 46267 - DNA, 40 bp, Homo sapiens
ctttatgttatgcatattttaccacaaaaaaaaatttttt

SEQ ID NO: 46268 - DNA, 40 bp, Homo sapiens
aaaaatttttttttgtggtaaaatatgcataacataaagt

SEQ ID NO: 46269 - DNA, 40 bp, Homo sapiens
actttatgttatgcatattttaccacaaaaaaaaattttt

SEQ ID NO: 46270 - DNA, 40 bp, Homo sapiens
aaaatttttttttgtggtaaaatatgcataacataaagtt

SEQ ID NO: 46271 - DNA, 40 bp, Homo sapiens
aactttatgttatgcatattttaccacaaaaaaaaatttt

SEQ ID NO: 46272 - DNA, 40 bp, Homo sapiens
aaatttttttttgtggtaaaatatgcataacataaagttt

SEQ ID NO: 46273 - DNA, 40 bp, Homo sapiens
aaactttatgttatgcatattttaccacaaaaaaaaattt

SEQ ID NO: 46274 - DNA, 40 bp, Homo sapiens
aatttttttttgtggtaaaatatgcataacataaagttta

SEQ ID NO: 46275 - DNA, 40 bp, Homo sapiens
taaactttatgttatgcatattttaccacaaaaaaaaatt

SEQ ID NO: 46276 - DNA, 40 bp, Homo sapiens
atttttttttgtggtaaaatatgcataacataaagtttac

SEQ ID NO: 46277 - DNA, 40 bp, Homo sapiens
gtaaactttatgttatgcatattttaccacaaaaaaaaat

SEQ ID NO: 46278 - DNA, 40 bp, Homo sapiens
tttttttttgtggtaaaatatgcataacataaagtttacc

SEQ ID NO: 46279 - DNA, 40 bp, Homo sapiens
ggtaaactttatgttatgcatattttaccacaaaaaaaaa

SEQ ID NO: 46280 - DNA, 40 bp, Homo sapiens
ttttttttgtggtaaaatatgcataacataaagtttacca

SEQ ID NO: 46281 - DNA, 40 bp, Homo sapiens
tggtaaactttatgttatgcatattttaccacaaaaaaaa

SEQ ID NO: 46282 - DNA, 40 bp, Homo sapiens
tttttttgtggtaaaatatgcataacataaagtttaccat

SEQ ID NO: 46283 - DNA, 40 bp, Homo sapiens
atggtaaactttatgttatgcatattttaccacaaaaaaa

SEQ ID NO: 46284 - DNA, 40 bp, Homo sapiens
ttttttgtggtaaaatatgcataacataaagtttaccatg

SEQ ID NO: 46285 - DNA, 40 bp, Homo sapiens
catggtaaactttatgttatgcatattttaccacaaaaaa

SEQ ID NO: 46286 - DNA, 40 bp, Homo sapiens
tttttgtggtaaaatatgcataacataaagtttaccatgg

SEQ ID NO: 46287 - DNA, 40 bp, Homo sapiens
ccatggtaaactttatgttatgcatattttaccacaaaaa

SEQ ID NO: 46288 - DNA, 40 bp, Homo sapiens
ttttgtggtaaaatatgcataacataaagtttaccatggt

SEQ ID NO: 46289 - DNA, 40 bp, Homo sapiens
accatggtaaactttatgttatgcatattttaccacaaaa

SEQ ID NO: 46290 - DNA, 40 bp, Homo sapiens
tttgtggtaaaatatgcataacataaagtttaccatggta

SEQ ID NO: 46291 - DNA, 40 bp, Homo sapiens
taccatggtaaactttatgttatgcatattttaccacaaa

SEQ ID NO: 46292 - DNA, 40 bp, Homo sapiens
ttgtggtaaaatatgcataacataaagtttaccatggtag

SEQ ID NO: 46293 - DNA, 40 bp, Homo sapiens
ctaccatggtaaactttatgttatgcatattttaccacaa

SEQ ID NO: 46294 - DNA, 40 bp, Homo sapiens
tgtggtaaaatatgcataacataaagtttaccatggtagt

SEQ ID NO: 46295 - DNA, 40 bp, Homo sapiens
actaccatggtaaactttatgttatgcatattttaccaca

SEQ ID NO: 46296 - DNA, 40 bp, Homo sapiens
gtggtaaaatatgcataacataaagtttaccatggtagtt

SEQ ID NO: 46297 - DNA, 40 bp, Homo sapiens
aactaccatggtaaactttatgttatgcatattttaccac

SEQ ID NO: 46298 - DNA, 40 bp, Homo sapiens
tggtaaaatatgcataacataaagtttaccatggtagttt

SEQ ID NO: 46299 - DNA, 40 bp, Homo sapiens
aaactaccatggtaaactttatgttatgcatattttacca

SEQ ID NO: 46300 - DNA, 40 bp, Homo sapiens
ggtaaaatatgcataacataaagtttaccatggtagtttt

SEQ ID NO: 46301 - DNA, 40 bp, Homo sapiens
aaaactaccatggtaaactttatgttatgcatattttacc

SEQ ID NO: 46302 - DNA, 40 bp, Homo sapiens
gtaaaatatgcataacataaagtttaccatggtagttttc

SEQ ID NO: 46303 - DNA, 40 bp, Homo sapiens
gaaaactaccatggtaaactttatgttatgcatattttac

SEQ ID NO: 46304 - DNA, 40 bp, Homo sapiens
taaaatatgcataacataaagtttaccatggtagttttct

SEQ ID NO: 46305 - DNA, 40 bp, Homo sapiens
agaaaactaccatggtaaactttatgttatgcatatttta

SEQ ID NO: 46306 - DNA, 40 bp, Homo sapiens
aaaatatgcataacataaagtttaccatggtagttttctt

SEQ ID NO: 46307 - DNA, 40 bp, Homo sapiens
aagaaaactaccatggtaaactttatgttatgcatatttt

SEQ ID NO: 46308 - DNA, 40 bp, Homo sapiens
aaatatgcataacataaagtttaccatggtagttttcttt

SEQ ID NO: 46309 - DNA, 40 bp, Homo sapiens
aaagaaaactaccatggtaaactttatgttatgcatattt

SEQ ID NO: 46310 - DNA, 40 bp, Homo sapiens
aatatgcataacataaagtttaccatggtagttttctttc

SEQ ID NO: 46311 - DNA, 40 bp, Homo sapiens
gaaagaaaactaccatggtaaactttatgttatgcatatt

SEQ ID NO: 46312 - DNA, 40 bp, Homo sapiens
atatgcataacataaagtttaccatggtagttttctttca

SEQ ID NO: 46313 - DNA, 40 bp, Homo sapiens
tgaaagaaaactaccatggtaaactttatgttatgcatat

SEQ ID NO: 46314 - DNA, 40 bp, Homo sapiens
tatgcataacataaagtttaccatggtagttttctttcat

SEQ ID NO: 46315 - DNA, 40 bp, Homo sapiens
atgaaagaaaactaccatggtaaactttatgttatgcata

SEQ ID NO: 46316 - DNA, 40 bp, Homo sapiens
atgcataacataaagtttaccatggtagttttctttcatt

SEQ ID NO: 46317 - DNA, 40 bp, Homo sapiens
aatgaaagaaaactaccatggtaaactttatgttatgcat

SEQ ID NO: 46318 - DNA, 40 bp, Homo sapiens
tgcataacataaagtttaccatggtagttttctttcattt

SEQ ID NO: 46319 - DNA, 40 bp, Homo sapiens
aaatgaaagaaaactaccatggtaaactttatgttatgca

SEQ ID NO: 46320 - DNA, 40 bp, Homo sapiens
gcataacataaagtttaccatggtagttttctttcatttg

SEQ ID NO: 46321 - DNA, 40 bp, Homo sapiens
caaatgaaagaaaactaccatggtaaactttatgttatgc

SEQ ID NO: 46322 - DNA, 40 bp, Homo sapiens
cataacataaagtttaccatggtagttttctttcatttgt

SEQ ID NO: 46323 - DNA, 40 bp, Homo sapiens
acaaatgaaagaaaactaccatggtaaactttatgttatg

SEQ ID NO: 46324 - DNA, 40 bp, Homo sapiens
ataacataaagtttaccatggtagttttctttcatttgtt

SEQ ID NO: 46325 - DNA, 40 bp, Homo sapiens
aacaaatgaaagaaaactaccatggtaaactttatgttat

SEQ ID NO: 46326 - DNA, 40 bp, Homo sapiens
taacataaagtttaccatggtagttttctttcatttgttt

SEQ ID NO: 46327 - DNA, 40 bp, Homo sapiens
aaacaaatgaaagaaaactaccatggtaaactttatgtta

SEQ ID NO: 46328 - DNA, 40 bp, Homo sapiens
aacataaagtttaccatggtagttttctttcatttgtttt

SEQ ID NO: 46329 - DNA, 40 bp, Homo sapiens
aaaacaaatgaaagaaaactaccatggtaaactttatgtt

SEQ ID NO: 46330 - DNA, 40 bp, Homo sapiens
acataaagtttaccatggtagttttctttcatttgttttg

SEQ ID NO: 46331 - DNA, 40 bp, Homo sapiens
caaaacaaatgaaagaaaactaccatggtaaactttatgt

SEQ ID NO: 46332 - DNA, 40 bp, Homo sapiens
cataaagtttaccatggtagttttctttcatttgttttgt

SEQ ID NO: 46333 - DNA, 40 bp, Homo sapiens
acaaaacaaatgaaagaaaactaccatggtaaactttatg

SEQ ID NO: 46334 - DNA, 40 bp, Homo sapiens
ataaagtttaccatggtagttttctttcatttgttttgtt

SEQ ID NO: 46335 - DNA, 40 bp, Homo sapiens
aacaaaacaaatgaaagaaaactaccatggtaaactttat

SEQ ID NO: 46336 - DNA, 40 bp, Homo sapiens
taaagtttaccatggtagttttctttcatttgttttgttt

SEQ ID NO: 46337 - DNA, 40 bp, Homo sapiens
aaacaaaacaaatgaaagaaaactaccatggtaaacttta

SEQ ID NO: 46338 - DNA, 40 bp, Homo sapiens
aaagtttaccatggtagttttctttcatttgttttgtttt

SEQ ID NO: 46339 - DNA, 40 bp, Homo sapiens
aaaacaaaacaaatgaaagaaaactaccatggtaaacttt

SEQ ID NO: 46340 - DNA, 40 bp, Homo sapiens
aagtttaccatggtagttttctttcatttgttttgttttt

SEQ ID NO: 46341 - DNA, 40 bp, Homo sapiens
aaaaacaaaacaaatgaaagaaaactaccatggtaaactt

SEQ ID NO: 46342 - DNA, 40 bp, Homo sapiens
agtttaccatggtagttttctttcatttgttttgtttttg

SEQ ID NO: 46343 - DNA, 40 bp, Homo sapiens
caaaaacaaaacaaatgaaagaaaactaccatggtaaact

SEQ ID NO: 46344 - DNA, 40 bp, Homo sapiens
gtttaccatggtagttttctttcatttgttttgtttttgt

SEQ ID NO: 46345 - DNA, 40 bp, Homo sapiens
acaaaaacaaaacaaatgaaagaaaactaccatggtaaac

SEQ ID NO: 46346 - DNA, 40 bp, Homo sapiens
tttaccatggtagttttctttcatttgttttgtttttgtt

SEQ ID NO: 46347 - DNA, 40 bp, Homo sapiens
aacaaaaacaaaacaaatgaaagaaaactaccatggtaaa

SEQ ID NO: 46348 - DNA, 40 bp, Homo sapiens
ttaccatggtagttttctttcatttgttttgtttttgttt

SEQ ID NO: 46349 - DNA, 40 bp, Homo sapiens
aaacaaaaacaaaacaaatgaaagaaaactaccatggtaa

SEQ ID NO: 46350 - DNA, 40 bp, Homo sapiens
taccatggtagttttctttcatttgttttgtttttgtttt

SEQ ID NO: 46351 - DNA, 40 bp, Homo sapiens
aaaacaaaaacaaaacaaatgaaagaaaactaccatggta

SEQ ID NO: 46352 - DNA, 40 bp, Homo sapiens
accatggtagttttctttcatttgttttgtttttgttttt

SEQ ID NO: 46353 - DNA, 40 bp, Homo sapiens
aaaaacaaaaacaaaacaaatgaaagaaaactaccatggt

SEQ ID NO: 46354 - DNA, 40 bp, Homo sapiens
ccatggtagttttctttcatttgttttgtttttgtttttt

SEQ ID NO: 46355 - DNA, 40 bp, Homo sapiens
aaaaaacaaaaacaaaacaaatgaaagaaaactaccatgg

SEQ ID NO: 46356 - DNA, 40 bp, Homo sapiens
catggtagttttctttcatttgttttgtttttgttttttt

SEQ ID NO: 46357 - DNA, 40 bp, Homo sapiens
aaaaaaacaaaaacaaaacaaatgaaagaaaactaccatg

SEQ ID NO: 46358 - DNA, 40 bp, Homo sapiens
atggtagttttctttcatttgttttgtttttgtttttttg

SEQ ID NO: 46359 - DNA, 40 bp, Homo sapiens
caaaaaaacaaaaacaaaacaaatgaaagaaaactaccat

SEQ ID NO: 46360 - DNA, 40 bp, Homo sapiens
tggtagttttctttcatttgttttgtttttgtttttttga

SEQ ID NO: 46361 - DNA, 40 bp, Homo sapiens
tcaaaaaaacaaaaacaaaacaaatgaaagaaaactacca

SEQ ID NO: 46362 - DNA, 40 bp, Homo sapiens
ggtagttttctttcatttgttttgtttttgtttttttgag

SEQ ID NO: 46363 - DNA, 40 bp, Homo sapiens
ctcaaaaaaacaaaaacaaaacaaatgaaagaaaactacc

SEQ ID NO: 46364 - DNA, 40 bp, Homo sapiens
gtagttttctttcatttgttttgtttttgtttttttgaga

SEQ ID NO: 46365 - DNA, 40 bp, Homo sapiens
tctcaaaaaaacaaaaacaaaacaaatgaaagaaaactac

SEQ ID NO: 46366 - DNA, 40 bp, Homo sapiens
tagttttctttcatttgttttgtttttgtttttttgagac

SEQ ID NO: 46367 - DNA, 40 bp, Homo sapiens
gtctcaaaaaaacaaaaacaaaacaaatgaaagaaaacta

SEQ ID NO: 46368 - DNA, 40 bp, Homo sapiens
agttttctttcatttgttttgtttttgtttttttgagacg

SEQ ID NO: 46369 - DNA, 40 bp, Homo sapiens
cgtctcaaaaaaacaaaaacaaaacaaatgaaagaaaact

SEQ ID NO: 46370 - DNA, 40 bp, Homo sapiens
gttttctttcatttgttttgtttttgtttttttgagacgg

SEQ ID NO: 46371 - DNA, 40 bp, Homo sapiens
ccgtctcaaaaaaacaaaaacaaaacaaatgaaagaaaac

SEQ ID NO: 46372 - DNA, 40 bp, Homo sapiens
ttttctttcatttgttttgtttttgtttttttgagacgga

SEQ ID NO: 46373 - DNA, 40 bp, Homo sapiens
tccgtctcaaaaaaacaaaaacaaaacaaatgaaagaaaa

SEQ ID NO: 46374 - DNA, 40 bp, Homo sapiens
tttctttcatttgttttgtttttgtttttttgagacggag

SEQ ID NO: 46375 - DNA, 40 bp, Homo sapiens
ctccgtctcaaaaaaacaaaaacaaaacaaatgaaagaaa

SEQ ID NO: 46376 - DNA, 40 bp, Homo sapiens
ttctttcatttgttttgtttttgtttttttgagacggagc

SEQ ID NO: 46377 - DNA, 40 bp, Homo sapiens
gctccgtctcaaaaaaacaaaaacaaaacaaatgaaagaa

SEQ ID NO: 46378 - DNA, 40 bp, Homo sapiens
tctttcatttgttttgtttttgtttttttgagacggagcc

SEQ ID NO: 46379 - DNA, 40 bp, Homo sapiens
ggctccgtctcaaaaaaacaaaaacaaaacaaatgaaaga

SEQ ID NO: 46380 - DNA, 40 bp, Homo sapiens
ctttcatttgttttgtttttgtttttttgagacggagcct

SEQ ID NO: 46381 - DNA, 40 bp, Homo sapiens
aggctccgtctcaaaaaaacaaaaacaaaacaaatgaaag

SEQ ID NO: 46382 - DNA, 40 bp, Homo sapiens
tttcatttgttttgtttttgtttttttgagacggagcctt

SEQ ID NO: 46383 - DNA, 40 bp, Homo sapiens
aaggctccgtctcaaaaaaacaaaaacaaaacaaatgaaa

SEQ ID NO: 46384 - DNA, 40 bp, Homo sapiens
ttcatttgttttgtttttgtttttttgagacggagccttg

SEQ ID NO: 46385 - DNA, 40 bp, Homo sapiens
caaggctccgtctcaaaaaaacaaaaacaaaacaaatgaa

SEQ ID NO: 46386 - DNA, 40 bp, Homo sapiens
tcatttgttttgtttttgtttttttgagacggagccttgc

SEQ ID NO: 46387 - DNA, 40 bp, Homo sapiens
gcaaggctccgtctcaaaaaaacaaaaacaaaacaaatga

SEQ ID NO: 46388 - DNA, 40 bp, Homo sapiens
catttgttttgtttttgtttttttgagacggagccttgct

SEQ ID NO: 46389 - DNA, 40 bp, Homo sapiens
agcaaggctccgtctcaaaaaaacaaaaacaaaacaaatg

SEQ ID NO: 46390 - DNA, 40 bp, Homo sapiens
atttgttttgtttttgtttttttgagacggagccttgctc

SEQ ID NO: 46391 - DNA, 40 bp, Homo sapiens
gagcaaggctccgtctcaaaaaaacaaaaacaaaacaaat

SEQ ID NO: 46392 - DNA, 40 bp, Homo sapiens
tttgttttgtttttgtttttttgagacggagccttgctct

SEQ ID NO: 46393 - DNA, 40 bp, Homo sapiens
agagcaaggctccgtctcaaaaaaacaaaaacaaaacaaa

SEQ ID NO: 46394 - DNA, 40 bp, Homo sapiens
ttgttttgtttttgtttttttgagacggagccttgctctg

SEQ ID NO: 46395 - DNA, 40 bp, Homo sapiens
cagagcaaggctccgtctcaaaaaaacaaaaacaaaacaa

SEQ ID NO: 46396 - DNA, 40 bp, Homo sapiens
tgttttgtttttgtttttttgagacggagccttgctctgt

SEQ ID NO: 46397 - DNA, 40 bp, Homo sapiens
acagagcaaggctccgtctcaaaaaaacaaaaacaaaaca

SEQ ID NO: 46398 - DNA, 40 bp, Homo sapiens
gttttgtttttgtttttttgagacggagccttgctctgtt

SEQ ID NO: 46399 - DNA, 40 bp, Homo sapiens
aacagagcaaggctccgtctcaaaaaaacaaaaacaaaac

SEQ ID NO: 46400 - DNA, 40 bp, Homo sapiens
ttttgtttttgtttttttgagacggagccttgctctgttg

SEQ ID NO: 46401 - DNA, 40 bp, Homo sapiens
caacagagcaaggctccgtctcaaaaaaacaaaaacaaaa

SEQ ID NO: 46402 - DNA, 40 bp, Homo sapiens
tttgtttttgtttttttgagacggagccttgctctgttgc

SEQ ID NO: 46403 - DNA, 40 bp, Homo sapiens
gcaacagagcaaggctccgtctcaaaaaaacaaaaacaaa

SEQ ID NO: 46404 - DNA, 40 bp, Homo sapiens
ttgtttttgtttttttgagacggagccttgctctgttgcc

SEQ ID NO: 46405 - DNA, 40 bp, Homo sapiens
ggcaacagagcaaggctccgtctcaaaaaaacaaaaacaa

SEQ ID NO: 46406 - DNA, 40 bp, Homo sapiens
tgtttttgtttttttgagacggagccttgctctgttgcca

SEQ ID NO: 46407 - DNA, 40 bp, Homo sapiens
tggcaacagagcaaggctccgtctcaaaaaaacaaaaaca

SEQ ID NO: 46408 - DNA, 40 bp, Homo sapiens
gtttttgtttttttgagacggagccttgctctgttgccag

SEQ ID NO: 46409 - DNA, 40 bp, Homo sapiens
ctggcaacagagcaaggctccgtctcaaaaaaacaaaaac

SEQ ID NO: 46410 - DNA, 40 bp, Homo sapiens
tttttgtttttttgagacggagccttgctctgttgccagg

SEQ ID NO: 46411 - DNA, 40 bp, Homo sapiens
cctggcaacagagcaaggctccgtctcaaaaaaacaaaaa

SEQ ID NO: 46412 - DNA, 40 bp, Homo sapiens
ttttgtttttttgagacggagccttgctctgttgccaggc

SEQ ID NO: 46413 - DNA, 40 bp, Homo sapiens
gcctggcaacagagcaaggctccgtctcaaaaaaacaaaa

SEQ ID NO: 46414 - DNA, 40 bp, Homo sapiens
tttgtttttttgagacggagccttgctctgttgccaggct

SEQ ID NO: 46415 - DNA, 40 bp, Homo sapiens
agcctggcaacagagcaaggctccgtctcaaaaaaacaaa

SEQ ID NO: 46416 - DNA, 40 bp, Homo sapiens
ttgtttttttgagacggagccttgctctgttgccaggctg

SEQ ID NO: 46417 - DNA, 40 bp, Homo sapiens
cagcctggcaacagagcaaggctccgtctcaaaaaaacaa

SEQ ID NO: 46418 - DNA, 40 bp, Homo sapiens
tgtttttttgagacggagccttgctctgttgccaggctgg

SEQ ID NO: 46419 - DNA, 40 bp, Homo sapiens
ccagcctggcaacagagcaaggctccgtctcaaaaaaaca

SEQ ID NO: 46420 - DNA, 40 bp, Homo sapiens
gtttttttgagacggagccttgctctgttgccaggctgga

SEQ ID NO: 46421 - DNA, 40 bp, Homo sapiens
tccagcctggcaacagagcaaggctccgtctcaaaaaaac

SEQ ID NO: 46422 - DNA, 40 bp, Homo sapiens
tttttttgagacggagccttgctctgttgccaggctggag

SEQ ID NO: 46423 - DNA, 40 bp, Homo sapiens
ctccagcctggcaacagagcaaggctccgtctcaaaaaaa

SEQ ID NO: 46424 - DNA, 40 bp, Homo sapiens
ttttttgagacggagccttgctctgttgccaggctggagt

SEQ ID NO: 46425 - DNA, 40 bp, Homo sapiens
actccagcctggcaacagagcaaggctccgtctcaaaaaa

SEQ ID NO: 46426 - DNA, 40 bp, Homo sapiens
tttttgagacggagccttgctctgttgccaggctggagtg

SEQ ID NO: 46427 - DNA, 40 bp, Homo sapiens
cactccagcctggcaacagagcaaggctccgtctcaaaaa

SEQ ID NO: 46428 - DNA, 40 bp, Homo sapiens
ttttgagacggagccttgctctgttgccaggctggagtgc

SEQ ID NO: 46429 - DNA, 40 bp, Homo sapiens
gcactccagcctggcaacagagcaaggctccgtctcaaaa

SEQ ID NO: 46430 - DNA, 40 bp, Homo sapiens
tttgagacggagccttgctctgttgccaggctggagtgca

SEQ ID NO: 46431 - DNA, 40 bp, Homo sapiens
tgcactccagcctggcaacagagcaaggctccgtctcaaa

SEQ ID NO: 46432 - DNA, 40 bp, Homo sapiens
ttgagacggagccttgctctgttgccaggctggagtgcag

SEQ ID NO: 46433 - DNA, 40 bp, Homo sapiens
ctgcactccagcctggcaacagagcaaggctccgtctcaa

SEQ ID NO: 46434 - DNA, 40 bp, Homo sapiens
tgagacggagccttgctctgttgccaggctggagtgcagt

SEQ ID NO: 46435 - DNA, 40 bp, Homo sapiens
actgcactccagcctggcaacagagcaaggctccgtctca

SEQ ID NO: 46436 - DNA, 40 bp, Homo sapiens
gagacggagccttgctctgttgccaggctggagtgcagtg

SEQ ID NO: 46437 - DNA, 40 bp, Homo sapiens
cactgcactccagcctggcaacagagcaaggctccgtctc

SEQ ID NO: 46438 - DNA, 40 bp, Homo sapiens
agacggagccttgctctgttgccaggctggagtgcagtgg

SEQ ID NO: 46439 - DNA, 40 bp, Homo sapiens
ccactgcactccagcctggcaacagagcaaggctccgtct

SEQ ID NO: 46440 - DNA, 40 bp, Homo sapiens
gacggagccttgctctgttgccaggctggagtgcagtgga

SEQ ID NO: 46441 - DNA, 40 bp, Homo sapiens
tccactgcactccagcctggcaacagagcaaggctccgtc

SEQ ID NO: 46442 - DNA, 40 bp, Homo sapiens
acggagccttgctctgttgccaggctggagtgcagtggag

SEQ ID NO: 46443 - DNA, 40 bp, Homo sapiens
ctccactgcactccagcctggcaacagagcaaggctccgt

SEQ ID NO: 46444 - DNA, 40 bp, Homo sapiens
cggagccttgctctgttgccaggctggagtgcagtggagc

SEQ ID NO: 46445 - DNA, 40 bp, Homo sapiens
gctccactgcactccagcctggcaacagagcaaggctccg

SEQ ID NO: 46446 - DNA, 40 bp, Homo sapiens
ggagccttgctctgttgccaggctggagtgcagtggagcg

SEQ ID NO: 46447 - DNA, 40 bp, Homo sapiens
cgctccactgcactccagcctggcaacagagcaaggctcc

SEQ ID NO: 46448 - DNA, 40 bp, Homo sapiens
gagccttgctctgttgccaggctggagtgcagtggagcga

SEQ ID NO: 46449 - DNA, 40 bp, Homo sapiens
tcgctccactgcactccagcctggcaacagagcaaggctc

SEQ ID NO: 46450 - DNA, 40 bp, Homo sapiens
agccttgctctgttgccaggctggagtgcagtggagcgat

SEQ ID NO: 46451 - DNA, 40 bp, Homo sapiens
atcgctccactgcactccagcctggcaacagagcaaggct

SEQ ID NO: 46452 - DNA, 40 bp, Homo sapiens
gccttgctctgttgccaggctggagtgcagtggagcgatc

SEQ ID NO: 46453 - DNA, 40 bp, Homo sapiens
gatcgctccactgcactccagcctggcaacagagcaaggc

SEQ ID NO: 46454 - DNA, 40 bp, Homo sapiens
ccttgctctgttgccaggctggagtgcagtggagcgatct

SEQ ID NO: 46455 - DNA, 40 bp, Homo sapiens
agatcgctccactgcactccagcctggcaacagagcaagg

SEQ ID NO: 46456 - DNA, 40 bp, Homo sapiens
cttgctctgttgccaggctggagtgcagtggagcgatctt

SEQ ID NO: 46457 - DNA, 40 bp, Homo sapiens
aagatcgctccactgcactccagcctggcaacagagcaag

SEQ ID NO: 46458 - DNA, 40 bp, Homo sapiens
ttgctctgttgccaggctggagtgcagtggagcgatcttg

SEQ ID NO: 46459 - DNA, 40 bp, Homo sapiens
caagatcgctccactgcactccagcctggcaacagagcaa

SEQ ID NO: 46460 - DNA, 40 bp, Homo sapiens
tgctctgttgccaggctggagtgcagtggagcgatcttgg

SEQ ID NO: 46461 - DNA, 40 bp, Homo sapiens
ccaagatcgctccactgcactccagcctggcaacagagca

SEQ ID NO: 46462 - DNA, 40 bp, Homo sapiens
gctctgttgccaggctggagtgcagtggagcgatcttggc

SEQ ID NO: 46463 - DNA, 40 bp, Homo sapiens
gccaagatcgctccactgcactccagcctggcaacagagc

SEQ ID NO: 46464 - DNA, 40 bp, Homo sapiens
ctctgttgccaggctggagtgcagtggagcgatcttggct

SEQ ID NO: 46465 - DNA, 40 bp, Homo sapiens
agccaagatcgctccactgcactccagcctggcaacagag

SEQ ID NO: 46466 - DNA, 40 bp, Homo sapiens
tctgttgccaggctggagtgcagtggagcgatcttggctc

SEQ ID NO: 46467 - DNA, 40 bp, Homo sapiens
gagccaagatcgctccactgcactccagcctggcaacaga

SEQ ID NO: 46468 - DNA, 40 bp, Homo sapiens
ctgttgccaggctggagtgcagtggagcgatcttggctca

SEQ ID NO: 46469 - DNA, 40 bp, Homo sapiens
tgagccaagatcgctccactgcactccagcctggcaacag

SEQ ID NO: 46470 - DNA, 40 bp, Homo sapiens
tgttgccaggctggagtgcagtggagcgatcttggctcac

SEQ ID NO: 46471 - DNA, 40 bp, Homo sapiens
gtgagccaagatcgctccactgcactccagcctggcaaca

SEQ ID NO: 46472 - DNA, 40 bp, Homo sapiens
gttgccaggctggagtgcagtggagcgatcttggctcact

SEQ ID NO: 46473 - DNA, 40 bp, Homo sapiens
agtgagccaagatcgctccactgcactccagcctggcaac

SEQ ID NO: 46474 - DNA, 40 bp, Homo sapiens
ttgccaggctggagtgcagtggagcgatcttggctcactg

SEQ ID NO: 46475 - DNA, 40 bp, Homo sapiens
cagtgagccaagatcgctccactgcactccagcctggcaa

SEQ ID NO: 46476 - DNA, 40 bp, Homo sapiens
tgccaggctggagtgcagtggagcgatcttggctcactgc

SEQ ID NO: 46477 - DNA, 40 bp, Homo sapiens
gcagtgagccaagatcgctccactgcactccagcctggca

SEQ ID NO: 46478 - DNA, 40 bp, Homo sapiens
gccaggctggagtgcagtggagcgatcttggctcactgca

SEQ ID NO: 46479 - DNA, 40 bp, Homo sapiens
tgcagtgagccaagatcgctccactgcactccagcctggc

SEQ ID NO: 46480 - DNA, 40 bp, Homo sapiens
ccaggctggagtgcagtggagcgatcttggctcactgcaa

SEQ ID NO: 46481 - DNA, 40 bp, Homo sapiens
ttgcagtgagccaagatcgctccactgcactccagcctgg

SEQ ID NO: 46482 - DNA, 40 bp, Homo sapiens
caggctggagtgcagtggagcgatcttggctcactgcaac

SEQ ID NO: 46483 - DNA, 40 bp, Homo sapiens
gttgcagtgagccaagatcgctccactgcactccagcctg

SEQ ID NO: 46484 - DNA, 40 bp, Homo sapiens
aggctggagtgcagtggagcgatcttggctcactgcaacc

SEQ ID NO: 46485 - DNA, 40 bp, Homo sapiens
ggttgcagtgagccaagatcgctccactgcactccagcct

SEQ ID NO: 46486 - DNA, 40 bp, Homo sapiens
ggctggagtgcagtggagcgatcttggctcactgcaacct

SEQ ID NO: 46487 - DNA, 40 bp, Homo sapiens
aggttgcagtgagccaagatcgctccactgcactccagcc

SEQ ID NO: 46488 - DNA, 40 bp, Homo sapiens
gctggagtgcagtggagcgatcttggctcactgcaacctc

SEQ ID NO: 46489 - DNA, 40 bp, Homo sapiens
gaggttgcagtgagccaagatcgctccactgcactccagc

SEQ ID NO: 46490 - DNA, 40 bp, Homo sapiens
ctggagtgcagtggagcgatcttggctcactgcaacctcc

SEQ ID NO: 46491 - DNA, 40 bp, Homo sapiens
ggaggttgcagtgagccaagatcgctccactgcactccag

SEQ ID NO: 46492 - DNA, 40 bp, Homo sapiens
tggagtgcagtggagcgatcttggctcactgcaacctccg

SEQ ID NO: 46493 - DNA, 40 bp, Homo sapiens
cggaggttgcagtgagccaagatcgctccactgcactcca

SEQ ID NO: 46494 - DNA, 40 bp, Homo sapiens
ggagtgcagtggagcgatcttggctcactgcaacctccgc

SEQ ID NO: 46495 - DNA, 40 bp, Homo sapiens
gcggaggttgcagtgagccaagatcgctccactgcactcc

SEQ ID NO: 46496 - DNA, 40 bp, Homo sapiens
gagtgcagtggagcgatcttggctcactgcaacctccgcc

SEQ ID NO: 46497 - DNA, 40 bp, Homo sapiens
ggcggaggttgcagtgagccaagatcgctccactgcactc

SEQ ID NO: 46498 - DNA, 40 bp, Homo sapiens
agtgcagtggagcgatcttggctcactgcaacctccgcct

SEQ ID NO: 46499 - DNA, 40 bp, Homo sapiens
aggcggaggttgcagtgagccaagatcgctccactgcact

SEQ ID NO: 46500 - DNA, 40 bp, Homo sapiens
gtgcagtggagcgatcttggctcactgcaacctccgcctc

SEQ ID NO: 46501 - DNA, 40 bp, Homo sapiens
gaggcggaggttgcagtgagccaagatcgctccactgcac

SEQ ID NO: 46502 - DNA, 40 bp, Homo sapiens
tgcagtggagcgatcttggctcactgcaacctccgcctcc

SEQ ID NO: 46503 - DNA, 40 bp, Homo sapiens
ggaggcggaggttgcagtgagccaagatcgctccactgca

SEQ ID NO: 46504 - DNA, 40 bp, Homo sapiens
gcagtggagcgatcttggctcactgcaacctccgcctccc

SEQ ID NO: 46505 - DNA, 40 bp, Homo sapiens
gggaggcggaggttgcagtgagccaagatcgctccactgc

SEQ ID NO: 46506 - DNA, 40 bp, Homo sapiens
cagtggagcgatcttggctcactgcaacctccgcctcccg

SEQ ID NO: 46507 - DNA, 40 bp, Homo sapiens
cgggaggcggaggttgcagtgagccaagatcgctccactg

SEQ ID NO: 46508 - DNA, 40 bp, Homo sapiens
agtggagcgatcttggctcactgcaacctccgcctcccgg

SEQ ID NO: 46509 - DNA, 40 bp, Homo sapiens
ccgggaggcggaggttgcagtgagccaagatcgctccact

SEQ ID NO: 46510 - DNA, 40 bp, Homo sapiens
gtggagcgatcttggctcactgcaacctccgcctcccggg

SEQ ID NO: 46511 - DNA, 40 bp, Homo sapiens
cccgggaggcggaggttgcagtgagccaagatcgctccac

SEQ ID NO: 46512 - DNA, 40 bp, Homo sapiens
tggagcgatcttggctcactgcaacctccgcctcccgggt

SEQ ID NO: 46513 - DNA, 40 bp, Homo sapiens
acccgggaggcggaggttgcagtgagccaagatcgctcca

SEQ ID NO: 46514 - DNA, 40 bp, Homo sapiens
ggagcgatcttggctcactgcaacctccgcctcccgggtt

SEQ ID NO: 46515 - DNA, 40 bp, Homo sapiens
aacccgggaggcggaggttgcagtgagccaagatcgctcc

SEQ ID NO: 46516 - DNA, 40 bp, Homo sapiens
gagcgatcttggctcactgcaacctccgcctcccgggttc

SEQ ID NO: 46517 - DNA, 40 bp, Homo sapiens
gaacccgggaggcggaggttgcagtgagccaagatcgctc

SEQ ID NO: 46518 - DNA, 40 bp, Homo sapiens
agcgatcttggctcactgcaacctccgcctcccgggttca

SEQ ID NO: 46519 - DNA, 40 bp, Homo sapiens
tgaacccgggaggcggaggttgcagtgagccaagatcgct

SEQ ID NO: 46520 - DNA, 40 bp, Homo sapiens
gcgatcttggctcactgcaacctccgcctcccgggttcaa

SEQ ID NO: 46521 - DNA, 40 bp, Homo sapiens
ttgaacccgggaggcggaggttgcagtgagccaagatcgc

SEQ ID NO: 46522 - DNA, 40 bp, Homo sapiens
cgatcttggctcactgcaacctccgcctcccgggttcaag

SEQ ID NO: 46523 - DNA, 40 bp, Homo sapiens
cttgaacccgggaggcggaggttgcagtgagccaagatcg

SEQ ID NO: 46524 - DNA, 40 bp, Homo sapiens
gatcttggctcactgcaacctccgcctcccgggttcaagc

SEQ ID NO: 46525 - DNA, 40 bp, Homo sapiens
gcttgaacccgggaggcggaggttgcagtgagccaagatc

SEQ ID NO: 46526 - DNA, 40 bp, Homo sapiens
atcttggctcactgcaacctccgcctcccgggttcaagca

SEQ ID NO: 46527 - DNA, 40 bp, Homo sapiens
tgcttgaacccgggaggcggaggttgcagtgagccaagat

SEQ ID NO: 46528 - DNA, 40 bp, Homo sapiens
tcttggctcactgcaacctccgcctcccgggttcaagcaa

SEQ ID NO: 46529 - DNA, 40 bp, Homo sapiens
ttgcttgaacccgggaggcggaggttgcagtgagccaaga

SEQ ID NO: 46530 - DNA, 40 bp, Homo sapiens
cttggctcactgcaacctccgcctcccgggttcaagcaat

SEQ ID NO: 46531 - DNA, 40 bp, Homo sapiens
attgcttgaacccgggaggcggaggttgcagtgagccaag

SEQ ID NO: 46532 - DNA, 40 bp, Homo sapiens
ttggctcactgcaacctccgcctcccgggttcaagcaatt

SEQ ID NO: 46533 - DNA, 40 bp, Homo sapiens
aattgcttgaacccgggaggcggaggttgcagtgagccaa

SEQ ID NO: 46534 - DNA, 40 bp, Homo sapiens
tggctcactgcaacctccgcctcccgggttcaagcaattc

SEQ ID NO: 46535 - DNA, 40 bp, Homo sapiens
gaattgcttgaacccgggaggcggaggttgcagtgagcca

SEQ ID NO: 46536 - DNA, 40 bp, Homo sapiens
ggctcactgcaacctccgcctcccgggttcaagcaattcc

SEQ ID NO: 46537 - DNA, 40 bp, Homo sapiens
ggaattgcttgaacccgggaggcggaggttgcagtgagcc

SEQ ID NO: 46538 - DNA, 40 bp, Homo sapiens
gctcactgcaacctccgcctcccgggttcaagcaattccc

SEQ ID NO: 46539 - DNA, 40 bp, Homo sapiens
gggaattgcttgaacccgggaggcggaggttgcagtgagc

SEQ ID NO: 46540 - DNA, 40 bp, Homo sapiens
ctcactgcaacctccgcctcccgggttcaagcaattcccc

SEQ ID NO: 46541 - DNA, 40 bp, Homo sapiens
ggggaattgcttgaacccgggaggcggaggttgcagtgag

SEQ ID NO: 46542 - DNA, 40 bp, Homo sapiens
tcactgcaacctccgcctcccgggttcaagcaattcccct

SEQ ID NO: 46543 - DNA, 40 bp, Homo sapiens
aggggaattgcttgaacccgggaggcggaggttgcagtga

SEQ ID NO: 46544 - DNA, 40 bp, Homo sapiens
cactgcaacctccgcctcccgggttcaagcaattcccctg

SEQ ID NO: 46545 - DNA, 40 bp, Homo sapiens
caggggaattgcttgaacccgggaggcggaggttgcagtg

SEQ ID NO: 46546 - DNA, 40 bp, Homo sapiens
actgcaacctccgcctcccgggttcaagcaattcccctgc

SEQ ID NO: 46547 - DNA, 40 bp, Homo sapiens
gcaggggaattgcttgaacccgggaggcggaggttgcagt

SEQ ID NO: 46548 - DNA, 40 bp, Homo sapiens
ctgcaacctccgcctcccgggttcaagcaattcccctgcc

SEQ ID NO: 46549 - DNA, 40 bp, Homo sapiens
ggcaggggaattgcttgaacccgggaggcggaggttgcag

SEQ ID NO: 46550 - DNA, 40 bp, Homo sapiens
tgcaacctccgcctcccgggttcaagcaattcccctgcct

SEQ ID NO: 46551 - DNA, 40 bp, Homo sapiens
aggcaggggaattgcttgaacccgggaggcggaggttgca

SEQ ID NO: 46552 - DNA, 40 bp, Homo sapiens
gcaacctccgcctcccgggttcaagcaattcccctgcctc

SEQ ID NO: 46553 - DNA, 40 bp, Homo sapiens
gaggcaggggaattgcttgaacccgggaggcggaggttgc

SEQ ID NO: 46554 - DNA, 40 bp, Homo sapiens
caacctccgcctcccgggttcaagcaattcccctgcctca

SEQ ID NO: 46555 - DNA, 40 bp, Homo sapiens
tgaggcaggggaattgcttgaacccgggaggcggaggttg

SEQ ID NO: 46556 - DNA, 40 bp, Homo sapiens
aacctccgcctcccgggttcaagcaattcccctgcctcag

SEQ ID NO: 46557 - DNA, 40 bp, Homo sapiens
ctgaggcaggggaattgcttgaacccgggaggcggaggtt

SEQ ID NO: 46558 - DNA, 40 bp, Homo sapiens
acctccgcctcccgggttcaagcaattcccctgcctcagc

SEQ ID NO: 46559 - DNA, 40 bp, Homo sapiens
gctgaggcaggggaattgcttgaacccgggaggcggaggt

SEQ ID NO: 46560 - DNA, 40 bp, Homo sapiens
cctccgcctcccgggttcaagcaattcccctgcctcagcc

SEQ ID NO: 46561 - DNA, 40 bp, Homo sapiens
ggctgaggcaggggaattgcttgaacccgggaggcggagg

SEQ ID NO: 46562 - DNA, 40 bp, Homo sapiens
ctccgcctcccgggttcaagcaattcccctgcctcagcct

SEQ ID NO: 46563 - DNA, 40 bp, Homo sapiens
aggctgaggcaggggaattgcttgaacccgggaggcggag

SEQ ID NO: 46564 - DNA, 40 bp, Homo sapiens
tccgcctcccgggttcaagcaattcccctgcctcagcctc

SEQ ID NO: 46565 - DNA, 40 bp, Homo sapiens
gaggctgaggcaggggaattgcttgaacccgggaggcgga

SEQ ID NO: 46566 - DNA, 40 bp, Homo sapiens
ccgcctcccgggttcaagcaattcccctgcctcagcctcc

SEQ ID NO: 46567 - DNA, 40 bp, Homo sapiens
ggaggctgaggcaggggaattgcttgaacccgggaggcgg

SEQ ID NO: 46568 - DNA, 40 bp, Homo sapiens
cgcctcccgggttcaagcaattcccctgcctcagcctcct

SEQ ID NO: 46569 - DNA, 40 bp, Homo sapiens
aggaggctgaggcaggggaattgcttgaacccgggaggcg

SEQ ID NO: 46570 - DNA, 40 bp, Homo sapiens
gcctcccgggttcaagcaattcccctgcctcagcctcctg

SEQ ID NO: 46571 - DNA, 40 bp, Homo sapiens
caggaggctgaggcaggggaattgcttgaacccgggaggc

SEQ ID NO: 46572 - DNA, 40 bp, Homo sapiens
cctcccgggttcaagcaattcccctgcctcagcctcctga

SEQ ID NO: 46573 - DNA, 40 bp, Homo sapiens
tcaggaggctgaggcaggggaattgcttgaacccgggagg

SEQ ID NO: 46574 - DNA, 40 bp, Homo sapiens
ctcccgggttcaagcaattcccctgcctcagcctcctgag

SEQ ID NO: 46575 - DNA, 40 bp, Homo sapiens
ctcaggaggctgaggcaggggaattgcttgaacccgggag

SEQ ID NO: 46576 - DNA, 40 bp, Homo sapiens
tcccgggttcaagcaattcccctgcctcagcctcctgagt

SEQ ID NO: 46577 - DNA, 40 bp, Homo sapiens
actcaggaggctgaggcaggggaattgcttgaacccggga

SEQ ID NO: 46578 - DNA, 40 bp, Homo sapiens
cccgggttcaagcaattcccctgcctcagcctcctgagta

SEQ ID NO: 46579 - DNA, 40 bp, Homo sapiens
tactcaggaggctgaggcaggggaattgcttgaacccggg

SEQ ID NO: 46580 - DNA, 40 bp, Homo sapiens
ccgggttcaagcaattcccctgcctcagcctcctgagtag

SEQ ID NO: 46581 - DNA, 40 bp, Homo sapiens
ctactcaggaggctgaggcaggggaattgcttgaacccgg

SEQ ID NO: 46582 - DNA, 40 bp, Homo sapiens
cgggttcaagcaattcccctgcctcagcctcctgagtagc

SEQ ID NO: 46583 - DNA, 40 bp, Homo sapiens
gctactcaggaggctgaggcaggggaattgcttgaacccg

SEQ ID NO: 46584 - DNA, 40 bp, Homo sapiens
gggttcaagcaattcccctgcctcagcctcctgagtagct

SEQ ID NO: 46585 - DNA, 40 bp, Homo sapiens
agctactcaggaggctgaggcaggggaattgcttgaaccc

SEQ ID NO: 46586 - DNA, 40 bp, Homo sapiens
ggttcaagcaattcccctgcctcagcctcctgagtagctg

SEQ ID NO: 46587 - DNA, 40 bp, Homo sapiens
cagctactcaggaggctgaggcaggggaattgcttgaacc

SEQ ID NO: 46588 - DNA, 40 bp, Homo sapiens
gttcaagcaattcccctgcctcagcctcctgagtagctgg

SEQ ID NO: 46589 - DNA, 40 bp, Homo sapiens
ccagctactcaggaggctgaggcaggggaattgcttgaac

SEQ ID NO: 46590 - DNA, 40 bp, Homo sapiens
ttcaagcaattcccctgcctcagcctcctgagtagctggg

SEQ ID NO: 46591 - DNA, 40 bp, Homo sapiens
cccagctactcaggaggctgaggcaggggaattgcttgaa

SEQ ID NO: 46592 - DNA, 40 bp, Homo sapiens
tcaagcaattcccctgcctcagcctcctgagtagctggga

SEQ ID NO: 46593 - DNA, 40 bp, Homo sapiens
tcccagctactcaggaggctgaggcaggggaattgcttga

SEQ ID NO: 46594 - DNA, 40 bp, Homo sapiens
caagcaattcccctgcctcagcctcctgagtagctgggac

SEQ ID NO: 46595 - DNA, 40 bp, Homo sapiens
gtcccagctactcaggaggctgaggcaggggaattgcttg

SEQ ID NO: 46596 - DNA, 40 bp, Homo sapiens
aagcaattcccctgcctcagcctcctgagtagctgggact

SEQ ID NO: 46597 - DNA, 40 bp, Homo sapiens
agtcccagctactcaggaggctgaggcaggggaattgctt

SEQ ID NO: 46598 - DNA, 40 bp, Homo sapiens
agcaattcccctgcctcagcctcctgagtagctgggacta

SEQ ID NO: 46599 - DNA, 40 bp, Homo sapiens
tagtcccagctactcaggaggctgaggcaggggaattgct

SEQ ID NO: 46600 - DNA, 40 bp, Homo sapiens
gcaattcccctgcctcagcctcctgagtagctgggactac

SEQ ID NO: 46601 - DNA, 40 bp, Homo sapiens
gtagtcccagctactcaggaggctgaggcaggggaattgc

SEQ ID NO: 46602 - DNA, 40 bp, Homo sapiens
caattcccctgcctcagcctcctgagtagctgggactaca

SEQ ID NO: 46603 - DNA, 40 bp, Homo sapiens
tgtagtcccagctactcaggaggctgaggcaggggaattg

SEQ ID NO: 46604 - DNA, 40 bp, Homo sapiens
aattcccctgcctcagcctcctgagtagctgggactacag

SEQ ID NO: 46605 - DNA, 40 bp, Homo sapiens
ctgtagtcccagctactcaggaggctgaggcaggggaatt

SEQ ID NO: 46606 - DNA, 40 bp, Homo sapiens
attcccctgcctcagcctcctgagtagctgggactacagg

SEQ ID NO: 46607 - DNA, 40 bp, Homo sapiens
cctgtagtcccagctactcaggaggctgaggcaggggaat

SEQ ID NO: 46608 - DNA, 40 bp, Homo sapiens
ttcccctgcctcagcctcctgagtagctgggactacaggc

SEQ ID NO: 46609 - DNA, 40 bp, Homo sapiens
gcctgtagtcccagctactcaggaggctgaggcaggggaa

SEQ ID NO: 46610 - DNA, 40 bp, Homo sapiens
tcccctgcctcagcctcctgagtagctgggactacaggcg

SEQ ID NO: 46611 - DNA, 40 bp, Homo sapiens
cgcctgtagtcccagctactcaggaggctgaggcagggga

SEQ ID NO: 46612 - DNA, 40 bp, Homo sapiens
cccctgcctcagcctcctgagtagctgggactacaggcgc

SEQ ID NO: 46613 - DNA, 40 bp, Homo sapiens
gcgcctgtagtcccagctactcaggaggctgaggcagggg

SEQ ID NO: 46614 - DNA, 40 bp, Homo sapiens
ccctgcctcagcctcctgagtagctgggactacaggcgcc

SEQ ID NO: 46615 - DNA, 40 bp, Homo sapiens
ggcgcctgtagtcccagctactcaggaggctgaggcaggg

SEQ ID NO: 46616 - DNA, 40 bp, Homo sapiens
cctgcctcagcctcctgagtagctgggactacaggcgccc

SEQ ID NO: 46617 - DNA, 40 bp, Homo sapiens
gggcgcctgtagtcccagctactcaggaggctgaggcagg

SEQ ID NO: 46618 - DNA, 40 bp, Homo sapiens
ctgcctcagcctcctgagtagctgggactacaggcgcccg

SEQ ID NO: 46619 - DNA, 40 bp, Homo sapiens
cgggcgcctgtagtcccagctactcaggaggctgaggcag

SEQ ID NO: 46620 - DNA, 40 bp, Homo sapiens
tgcctcagcctcctgagtagctgggactacaggcgcccgc

SEQ ID NO: 46621 - DNA, 40 bp, Homo sapiens
gcgggcgcctgtagtcccagctactcaggaggctgaggca

SEQ ID NO: 46622 - DNA, 40 bp, Homo sapiens
gcctcagcctcctgagtagctgggactacaggcgcccgcc

SEQ ID NO: 46623 - DNA, 40 bp, Homo sapiens
ggcgggcgcctgtagtcccagctactcaggaggctgaggc

SEQ ID NO: 46624 - DNA, 40 bp, Homo sapiens
cctcagcctcctgagtagctgggactacaggcgcccgcca

SEQ ID NO: 46625 - DNA, 40 bp, Homo sapiens
tggcgggcgcctgtagtcccagctactcaggaggctgagg

SEQ ID NO: 46626 - DNA, 40 bp, Homo sapiens
ctcagcctcctgagtagctgggactacaggcgcccgccac

SEQ ID NO: 46627 - DNA, 40 bp, Homo sapiens
gtggcgggcgcctgtagtcccagctactcaggaggctgag

SEQ ID NO: 46628 - DNA, 40 bp, Homo sapiens
tcagcctcctgagtagctgggactacaggcgcccgccacc

SEQ ID NO: 46629 - DNA, 40 bp, Homo sapiens
ggtggcgggcgcctgtagtcccagctactcaggaggctga

SEQ ID NO: 46630 - DNA, 40 bp, Homo sapiens
cagcctcctgagtagctgggactacaggcgcccgccacca

SEQ ID NO: 46631 - DNA, 40 bp, Homo sapiens
tggtggcgggcgcctgtagtcccagctactcaggaggctg

SEQ ID NO: 46632 - DNA, 40 bp, Homo sapiens
agcctcctgagtagctgggactacaggcgcccgccaccac

SEQ ID NO: 46633 - DNA, 40 bp, Homo sapiens
gtggtggcgggcgcctgtagtcccagctactcaggaggct

SEQ ID NO: 46634 - DNA, 40 bp, Homo sapiens
gcctcctgagtagctgggactacaggcgcccgccaccacg

SEQ ID NO: 46635 - DNA, 40 bp, Homo sapiens
cgtggtggcgggcgcctgtagtcccagctactcaggaggc

SEQ ID NO: 46636 - DNA, 40 bp, Homo sapiens
cctcctgagtagctgggactacaggcgcccgccaccacgc

SEQ ID NO: 46637 - DNA, 40 bp, Homo sapiens
gcgtggtggcgggcgcctgtagtcccagctactcaggagg

SEQ ID NO: 46638 - DNA, 40 bp, Homo sapiens
ctcctgagtagctgggactacaggcgcccgccaccacgcc

SEQ ID NO: 46639 - DNA, 40 bp, Homo sapiens
ggcgtggtggcgggcgcctgtagtcccagctactcaggag

SEQ ID NO: 46640 - DNA, 40 bp, Homo sapiens
tcctgagtagctgggactacaggcgcccgccaccacgccc

SEQ ID NO: 46641 - DNA, 40 bp, Homo sapiens
gggcgtggtggcgggcgcctgtagtcccagctactcagga

SEQ ID NO: 46642 - DNA, 40 bp, Homo sapiens
cctgagtagctgggactacaggcgcccgccaccacgcccg

SEQ ID NO: 46643 - DNA, 40 bp, Homo sapiens
cgggcgtggtggcgggcgcctgtagtcccagctactcagg

SEQ ID NO: 46644 - DNA, 40 bp, Homo sapiens
ctgagtagctgggactacaggcgcccgccaccacgcccgg

SEQ ID NO: 46645 - DNA, 40 bp, Homo sapiens
ccgggcgtggtggcgggcgcctgtagtcccagctactcag

SEQ ID NO: 46646 - DNA, 40 bp, Homo sapiens
tgagtagctgggactacaggcgcccgccaccacgcccggc

SEQ ID NO: 46647 - DNA, 40 bp, Homo sapiens
gccgggcgtggtggcgggcgcctgtagtcccagctactca

SEQ ID NO: 46648 - DNA, 40 bp, Homo sapiens
gagtagctgggactacaggcgcccgccaccacgcccggct

SEQ ID NO: 46649 - DNA, 40 bp, Homo sapiens
agccgggcgtggtggcgggcgcctgtagtcccagctactc

SEQ ID NO: 46650 - DNA, 40 bp, Homo sapiens; identical to SEQ ID NO: 10934

SEQ ID NO: 46651 - DNA, 40 bp, Homo sapiens; identical to SEQ ID NO: 10935

SEQ ID NO: 46652 - DNA, 40 bp, Homo sapiens; identical to SEQ ID NO: 10936

SEQ ID NO: 46653 - DNA, 40 bp, Homo sapiens; identical to SEQ ID NO: 10937

SEQ ID NO: 46654 - DNA, 40 bp, Homo sapiens; identical to SEQ ID NO: 10938

SEQ ID NO: 46655 - DNA, 40 bp, Homo sapiens; identical to SEQ ID NO: 10939

SEQ ID NO: 46656 - DNA, 40 bp, Homo sapiens
agctgggactacaggcgcccgccaccacgcccggctaata

SEQ ID NO: 46657 - DNA, 40 bp, Homo sapiens
tattagccgggcgtggtggcgggcgcctgtagtcccagct

SEQ ID NO: 46658 - DNA, 40 bp, Homo sapiens
gctgggactacaggcgcccgccaccacgcccggctaatat

SEQ ID NO: 46659 - DNA, 40 bp, Homo sapiens
atattagccgggcgtggtggcgggcgcctgtagtcccagc

SEQ ID NO: 46660 - DNA, 40 bp, Homo sapiens
ctgggactacaggcgcccgccaccacgcccggctaatatt

SEQ ID NO: 46661 - DNA, 40 bp, Homo sapiens
aatattagccgggcgtggtggcgggcgcctgtagtcccag

SEQ ID NO: 46662 - DNA, 40 bp, Homo sapiens
tgggactacaggcgcccgccaccacgcccggctaatattt

SEQ ID NO: 46663 - DNA, 40 bp, Homo sapiens
aaatattagccgggcgtggtggcgggcgcctgtagtccca

SEQ ID NO: 46664 - DNA, 40 bp, Homo sapiens
gggactacaggcgcccgccaccacgcccggctaatatttt

SEQ ID NO: 46665 - DNA, 40 bp, Homo sapiens
aaaatattagccgggcgtggtggcgggcgcctgtagtccc

SEQ ID NO: 46666 - DNA, 40 bp, Homo sapiens
ggactacaggcgcccgccaccacgcccggctaatattttg

SEQ ID NO: 46667 - DNA, 40 bp, Homo sapiens
caaaatattagccgggcgtggtggcgggcgcctgtagtcc

SEQ ID NO: 46668 - DNA, 40 bp, Homo sapiens
gactacaggcgcccgccaccacgcccggctaatattttgt

SEQ ID NO: 46669 - DNA, 40 bp, Homo sapiens
acaaaatattagccgggcgtggtggcgggcgcctgtagtc

SEQ ID NO: 46670 - DNA, 40 bp, Homo sapiens
actacaggcgcccgccaccacgcccggctaatattttgta

SEQ ID NO: 46671 - DNA, 40 bp, Homo sapiens
tacaaaatattagccgggcgtggtggcgggcgcctgtagt

SEQ ID NO: 46672 - DNA, 40 bp, Homo sapiens
ctacaggcgcccgccaccacgcccggctaatattttgtat

SEQ ID NO: 46673 - DNA, 40 bp, Homo sapiens
atacaaaatattagccgggcgtggtggcgggcgcctgtag

SEQ ID NO: 46674 - DNA, 40 bp, Homo sapiens
tacaggcgcccgccaccacgcccggctaatattttgtatt

SEQ ID NO: 46675 - DNA, 40 bp, Homo sapiens
aatacaaaatattagccgggcgtggtggcgggcgcctgta

SEQ ID NO: 46676 - DNA, 40 bp, Homo sapiens
acaggcgcccgccaccacgcccggctaatattttgtattt

SEQ ID NO: 46677 - DNA, 40 bp, Homo sapiens
aaatacaaaatattagccgggcgtggtggcgggcgcctgt

SEQ ID NO: 46678 - DNA, 40 bp, Homo sapiens
caggcgcccgccaccacgcccggctaatattttgtatttt

SEQ ID NO: 46679 - DNA, 40 bp, Homo sapiens
aaaatacaaaatattagccgggcgtggtggcgggcgcctg

SEQ ID NO: 46680 - DNA, 40 bp, Homo sapiens
aggcgcccgccaccacgcccggctaatattttgtatttta

SEQ ID NO: 46681 - DNA, 40 bp, Homo sapiens
taaaatacaaaatattagccgggcgtggtggcgggcgcct

SEQ ID NO: 46682 - DNA, 40 bp, Homo sapiens
ggcgcccgccaccacgcccggctaatattttgtattttaa

SEQ ID NO: 46683 - DNA, 40 bp, Homo sapiens
ttaaaatacaaaatattagccgggcgtggtggcgggcgcc

SEQ ID NO: 46684 - DNA, 40 bp, Homo sapiens
gcgcccgccaccacgcccggctaatattttgtattttaat

SEQ ID NO: 46685 - DNA, 40 bp, Homo sapiens
attaaaatacaaaatattagccgggcgtggtggcgggcgc

SEQ ID NO: 46686 - DNA, 40 bp, Homo sapiens
cgcccgccaccacgcccggctaatattttgtattttaata

SEQ ID NO: 46687 - DNA, 40 bp, Homo sapiens
tattaaaatacaaaatattagccgggcgtggtggcgggcg

SEQ ID NO: 46688 - DNA, 40 bp, Homo sapiens
gcccgccaccacgcccggctaatattttgtattttaatag

SEQ ID NO: 46689 - DNA, 40 bp, Homo sapiens
ctattaaaatacaaaatattagccgggcgtggtggcgggc

SEQ ID NO: 46690 - DNA, 40 bp, Homo sapiens
cccgccaccacgcccggctaatattttgtattttaataga

SEQ ID NO: 46691 - DNA, 40 bp, Homo sapiens
tctattaaaatacaaaatattagccgggcgtggtggcggg

SEQ ID NO: 46692 - DNA, 40 bp, Homo sapiens
ccgccaccacgcccggctaatattttgtattttaatagag

SEQ ID NO: 46693 - DNA, 40 bp, Homo sapiens
ctctattaaaatacaaaatattagccgggcgtggtggcgg

SEQ ID NO: 46694 - DNA, 40 bp, Homo sapiens
cgccaccacgcccggctaatattttgtattttaatagaga

SEQ ID NO: 46695 - DNA, 40 bp, Homo sapiens
tctctattaaaatacaaaatattagccgggcgtggtggcg

SEQ ID NO: 46696 - DNA, 40 bp, Homo sapiens
gccaccacgcccggctaatattttgtattttaatagagat

SEQ ID NO: 46697 - DNA, 40 bp, Homo sapiens
atctctattaaaatacaaaatattagccgggcgtggtggc

SEQ ID NO: 46698 - DNA, 40 bp, Homo sapiens
ccaccacgcccggctaatattttgtattttaatagagatg

SEQ ID NO: 46699 - DNA, 40 bp, Homo sapiens
catctctattaaaatacaaaatattagccgggcgtggtgg

SEQ ID NO: 46700 - DNA, 40 bp, Homo sapiens
caccacgcccggctaatattttgtattttaatagagatgg

SEQ ID NO: 46701 - DNA, 40 bp, Homo sapiens
ccatctctattaaaatacaaaatattagccgggcgtggtg

SEQ ID NO: 46702 - DNA, 40 bp, Homo sapiens
accacgcccggctaatattttgtattttaatagagatggg

SEQ ID NO: 46703 - DNA, 40 bp, Homo sapiens
cccatctctattaaaatacaaaatattagccgggcgtggt

SEQ ID NO: 46704 - DNA, 40 bp, Homo sapiens
ccacgcccggctaatattttgtattttaatagagatgggg

SEQ ID NO: 46705 - DNA, 40 bp, Homo sapiens
ccccatctctattaaaatacaaaatattagccgggcgtgg

SEQ ID NO: 46706 - DNA, 40 bp, Homo sapiens
cacgcccggctaatattttgtattttaatagagatggggt

SEQ ID NO: 46707 - DNA, 40 bp, Homo sapiens
accccatctctattaaaatacaaaatattagccgggcgtg

SEQ ID NO: 46708 - DNA, 40 bp, Homo sapiens
acgcccggctaatattttgtattttaatagagatggggtt

SEQ ID NO: 46709 - DNA, 40 bp, Homo sapiens
aaccccatctctattaaaatacaaaatattagccgggcgt

SEQ ID NO: 46710 - DNA, 40 bp, Homo sapiens
cgcccggctaatattttgtattttaatagagatggggttt

SEQ ID NO: 46711 - DNA, 40 bp, Homo sapiens
aaaccccatctctattaaaatacaaaatattagccgggcg

SEQ ID NO: 46712 - DNA, 40 bp, Homo sapiens
gcccggctaatattttgtattttaatagagatggggtttc

SEQ ID NO: 46713 - DNA, 40 bp, Homo sapiens
gaaaccccatctctattaaaatacaaaatattagccgggc

SEQ ID NO: 46714 - DNA, 40 bp, Homo sapiens
cccggctaatattttgtattttaatagagatggggtttca

SEQ ID NO: 46715 - DNA, 40 bp, Homo sapiens
tgaaaccccatctctattaaaatacaaaatattagccggg

SEQ ID NO: 46716 - DNA, 40 bp, Homo sapiens
ccggctaatattttgtattttaatagagatggggtttcac

SEQ ID NO: 46717 - DNA, 40 bp, Homo sapiens
gtgaaaccccatctctattaaaatacaaaatattagccgg

SEQ ID NO: 46718 - DNA, 40 bp, Homo sapiens
cggctaatattttgtattttaatagagatggggtttcacc

SEQ ID NO: 46719 - DNA, 40 bp, Homo sapiens
ggtgaaaccccatctctattaaaatacaaaatattagccg

SEQ ID NO: 46720 - DNA, 40 bp, Homo sapiens
ggctaatattttgtattttaatagagatggggtttcacca

SEQ ID NO: 46721 - DNA, 40 bp, Homo sapiens
tggtgaaaccccatctctattaaaatacaaaatattagcc

SEQ ID NO: 46722 - DNA, 40 bp, Homo sapiens
gctaatattttgtattttaatagagatggggtttcaccat

SEQ ID NO: 46723 - DNA, 40 bp, Homo sapiens
atggtgaaaccccatctctattaaaatacaaaatattagc

SEQ ID NO: 46724 - DNA, 40 bp, Homo sapiens
ctaatattttgtattttaatagagatggggtttcaccatg

SEQ ID NO: 46725 - DNA, 40 bp, Homo sapiens
catggtgaaaccccatctctattaaaatacaaaatattag

SEQ ID NO: 46726 - DNA, 40 bp, Homo sapiens
taatattttgtattttaatagagatggggtttcaccatgt

SEQ ID NO: 46727 - DNA, 40 bp, Homo sapiens
acatggtgaaaccccatctctattaaaatacaaaatatta

SEQ ID NO: 46728 - DNA, 40 bp, Homo sapiens
aatattttgtattttaatagagatggggtttcaccatgtt

SEQ ID NO: 46729 - DNA, 40 bp, Homo sapiens
aacatggtgaaaccccatctctattaaaatacaaaatatt

SEQ ID NO: 46730 - DNA, 40 bp, Homo sapiens
atattttgtattttaatagagatggggtttcaccatgttg

SEQ ID NO: 46731 - DNA, 40 bp, Homo sapiens
caacatggtgaaaccccatctctattaaaatacaaaatat

SEQ ID NO: 46732 - DNA, 40 bp, Homo sapiens
tattttgtattttaatagagatggggtttcaccatgttgg

SEQ ID NO: 46733 - DNA, 40 bp, Homo sapiens
ccaacatggtgaaaccccatctctattaaaatacaaaata

SEQ ID NO: 46734 - DNA, 40 bp, Homo sapiens
attttgtattttaatagagatggggtttcaccatgttggc

SEQ ID NO: 46735 - DNA, 40 bp, Homo sapiens
gccaacatggtgaaaccccatctctattaaaatacaaaat

SEQ ID NO: 46736 - DNA, 40 bp, Homo sapiens
ttttgtattttaatagagatggggtttcaccatgttggcc

SEQ ID NO: 46737 - DNA, 40 bp, Homo sapiens
ggccaacatggtgaaaccccatctctattaaaatacaaaa

SEQ ID NO: 46738 - DNA, 40 bp, Homo sapiens
tttgtattttaatagagatggggtttcaccatgttggcca

SEQ ID NO: 46739 - DNA, 40 bp, Homo sapiens
tggccaacatggtgaaaccccatctctattaaaatacaaa

SEQ ID NO: 46740 - DNA, 40 bp, Homo sapiens
ttgtattttaatagagatggggtttcaccatgttggccag

SEQ ID NO: 46741 - DNA, 40 bp, Homo sapiens
ctggccaacatggtgaaaccccatctctattaaaatacaa

SEQ ID NO: 46742 - DNA, 40 bp, Homo sapiens
tgtattttaatagagatggggtttcaccatgttggccagg

SEQ ID NO: 46743 - DNA, 40 bp, Homo sapiens
cctggccaacatggtgaaaccccatctctattaaaataca

SEQ ID NO: 46744 - DNA, 40 bp, Homo sapiens
gtattttaatagagatggggtttcaccatgttggccagga

SEQ ID NO: 46745 - DNA, 40 bp, Homo sapiens
tcctggccaacatggtgaaaccccatctctattaaaatac

SEQ ID NO: 46746 - DNA, 40 bp, Homo sapiens
tattttaatagagatggggtttcaccatgttggccaggat

SEQ ID NO: 46747 - DNA, 40 bp, Homo sapiens
atcctggccaacatggtgaaaccccatctctattaaaata

SEQ ID NO: 46748 - DNA, 40 bp, Homo sapiens
attttaatagagatggggtttcaccatgttggccaggatg

SEQ ID NO: 46749 - DNA, 40 bp, Homo sapiens
catcctggccaacatggtgaaaccccatctctattaaaat

SEQ ID NO: 46750 - DNA, 40 bp, Homo sapiens
ttttaatagagatggggtttcaccatgttggccaggatgt

SEQ ID NO: 46751 - DNA, 40 bp, Homo sapiens
acatcctggccaacatggtgaaaccccatctctattaaaa

SEQ ID NO: 46752 - DNA, 40 bp, Homo sapiens
tttaatagagatggggtttcaccatgttggccaggatgtt

SEQ ID NO: 46753 - DNA, 40 bp, Homo sapiens
aacatcctggccaacatggtgaaaccccatctctattaaa

SEQ ID NO: 46754 - DNA, 40 bp, Homo sapiens
ttaatagagatggggtttcaccatgttggccaggatgttc

SEQ ID NO: 46755 - DNA, 40 bp, Homo sapiens
gaacatcctggccaacatggtgaaaccccatctctattaa

SEQ ID NO: 46756 - DNA, 40 bp, Homo sapiens
taatagagatggggtttcaccatgttggccaggatgttct

SEQ ID NO: 46757 - DNA, 40 bp, Homo sapiens
agaacatcctggccaacatggtgaaaccccatctctatta

SEQ ID NO: 46758 - DNA, 40 bp, Homo sapiens
aatagagatggggtttcaccatgttggccaggatgttctt

SEQ ID NO: 46759 - DNA, 40 bp, Homo sapiens
aagaacatcctggccaacatggtgaaaccccatctctatt

SEQ ID NO: 46760 - DNA, 40 bp, Homo sapiens
atagagatggggtttcaccatgttggccaggatgttcttg

SEQ ID NO: 46761 - DNA, 40 bp, Homo sapiens
caagaacatcctggccaacatggtgaaaccccatctctat

SEQ ID NO: 46762 - DNA, 40 bp, Homo sapiens
tagagatggggtttcaccatgttggccaggatgttcttga

SEQ ID NO: 46763 - DNA, 40 bp, Homo sapiens
tcaagaacatcctggccaacatggtgaaaccccatctcta

SEQ ID NO: 46764 - DNA, 40 bp, Homo sapiens
agagatggggtttcaccatgttggccaggatgttcttgat

SEQ ID NO: 46765 - DNA, 40 bp, Homo sapiens
atcaagaacatcctggccaacatggtgaaaccccatctct

SEQ ID NO: 46766 - DNA, 40 bp, Homo sapiens
gagatggggtttcaccatgttggccaggatgttcttgatc

SEQ ID NO: 46767 - DNA, 40 bp, Homo sapiens
gatcaagaacatcctggccaacatggtgaaaccccatctc

SEQ ID NO: 46768 - DNA, 40 bp, Homo sapiens
agatggggtttcaccatgttggccaggatgttcttgatct

SEQ ID NO: 46769 - DNA, 40 bp, Homo sapiens
agatcaagaacatcctggccaacatggtgaaaccccatct

SEQ ID NO: 46770 - DNA, 40 bp, Homo sapiens
gatggggtttcaccatgttggccaggatgttcttgatctc

SEQ ID NO: 46771 - DNA, 40 bp, Homo sapiens
gagatcaagaacatcctggccaacatggtgaaaccccatc

SEQ ID NO: 46772 - DNA, 40 bp, Homo sapiens
atggggtttcaccatgttggccaggatgttcttgatctcc

SEQ ID NO: 46773 - DNA, 40 bp, Homo sapiens
ggagatcaagaacatcctggccaacatggtgaaaccccat

SEQ ID NO: 46774 - DNA, 40 bp, Homo sapiens
tggggtttcaccatgttggccaggatgttcttgatctcct

SEQ ID NO: 46775 - DNA, 40 bp, Homo sapiens
aggagatcaagaacatcctggccaacatggtgaaacccca

SEQ ID NO: 46776 - DNA, 40 bp, Homo sapiens
ggggtttcaccatgttggccaggatgttcttgatctcctg

SEQ ID NO: 46777 - DNA, 40 bp, Homo sapiens
caggagatcaagaacatcctggccaacatggtgaaacccc

SEQ ID NO: 46778 - DNA, 40 bp, Homo sapiens
gggtttcaccatgttggccaggatgttcttgatctcctga

SEQ ID NO: 46779 - DNA, 40 bp, Homo sapiens
tcaggagatcaagaacatcctggccaacatggtgaaaccc

SEQ ID NO: 46780 - DNA, 40 bp, Homo sapiens
ggtttcaccatgttggccaggatgttcttgatctcctgac

SEQ ID NO: 46781 - DNA, 40 bp, Homo sapiens
gtcaggagatcaagaacatcctggccaacatggtgaaacc

SEQ ID NO: 46782 - DNA, 40 bp, Homo sapiens
gtttcaccatgttggccaggatgttcttgatctcctgacc

SEQ ID NO: 46783 - DNA, 40 bp, Homo sapiens
ggtcaggagatcaagaacatcctggccaacatggtgaaac

SEQ ID NO: 46784 - DNA, 40 bp, Homo sapiens
tttcaccatgttggccaggatgttcttgatctcctgacct

SEQ ID NO: 46785 - DNA, 40 bp, Homo sapiens
aggtcaggagatcaagaacatcctggccaacatggtgaaa

SEQ ID NO: 46786 - DNA, 40 bp, Homo sapiens
ttcaccatgttggccaggatgttcttgatctcctgacctc

SEQ ID NO: 46787 - DNA, 40 bp, Homo sapiens
gaggtcaggagatcaagaacatcctggccaacatggtgaa

SEQ ID NO: 46788 - DNA, 40 bp, Homo sapiens
tcaccatgttggccaggatgttcttgatctcctgacctca

SEQ ID NO: 46789 - DNA, 40 bp, Homo sapiens
tgaggtcaggagatcaagaacatcctggccaacatggtga

SEQ ID NO: 46790 - DNA, 40 bp, Homo sapiens
caccatgttggccaggatgttcttgatctcctgacctcat

SEQ ID NO: 46791 - DNA, 40 bp, Homo sapiens
atgaggtcaggagatcaagaacatcctggccaacatggtg

SEQ ID NO: 46792 - DNA, 40 bp, Homo sapiens
accatgttggccaggatgttcttgatctcctgacctcatg

SEQ ID NO: 46793 - DNA, 40 bp, Homo sapiens
catgaggtcaggagatcaagaacatcctggccaacatggt

SEQ ID NO: 46794 - DNA, 40 bp, Homo sapiens
ccatgttggccaggatgttcttgatctcctgacctcatga

SEQ ID NO: 46795 - DNA, 40 bp, Homo sapiens
tcatgaggtcaggagatcaagaacatcctggccaacatgg

SEQ ID NO: 46796 - DNA, 40 bp, Homo sapiens
catgttggccaggatgttcttgatctcctgacctcatgat

SEQ ID NO: 46797 - DNA, 40 bp, Homo sapiens
atcatgaggtcaggagatcaagaacatcctggccaacatg

SEQ ID NO: 46798 - DNA, 40 bp, Homo sapiens
atgttggccaggatgttcttgatctcctgacctcatgatc

SEQ ID NO: 46799 - DNA, 40 bp, Homo sapiens
gatcatgaggtcaggagatcaagaacatcctggccaacat

SEQ ID NO: 46800 - DNA, 40 bp, Homo sapiens
tgttggccaggatgttcttgatctcctgacctcatgatcc

SEQ ID NO: 46801 - DNA, 40 bp, Homo sapiens
ggatcatgaggtcaggagatcaagaacatcctggccaaca

SEQ ID NO: 46802 - DNA, 40 bp, Homo sapiens
gttggccaggatgttcttgatctcctgacctcatgatccg

SEQ ID NO: 46803 - DNA, 40 bp, Homo sapiens
cggatcatgaggtcaggagatcaagaacatcctggccaac

SEQ ID NO: 46804 - DNA, 40 bp, Homo sapiens
ttggccaggatgttcttgatctcctgacctcatgatccgc

SEQ ID NO: 46805 - DNA, 40 bp, Homo sapiens
gcggatcatgaggtcaggagatcaagaacatcctggccaa

SEQ ID NO: 46806 - DNA, 40 bp, Homo sapiens
tggccaggatgttcttgatctcctgacctcatgatccgcc

SEQ ID NO: 46807 - DNA, 40 bp, Homo sapiens
ggcggatcatgaggtcaggagatcaagaacatcctggcca

SEQ ID NO: 46808 - DNA, 40 bp, Homo sapiens
ggccaggatgttcttgatctcctgacctcatgatccgccc

SEQ ID NO: 46809 - DNA, 40 bp, Homo sapiens
gggcggatcatgaggtcaggagatcaagaacatcctggcc

SEQ ID NO: 46810 - DNA, 40 bp, Homo sapiens
gccaggatgttcttgatctcctgacctcatgatccgccca

SEQ ID NO: 46811 - DNA, 40 bp, Homo sapiens
tgggcggatcatgaggtcaggagatcaagaacatcctggc

SEQ ID NO: 46812 - DNA, 40 bp, Homo sapiens
ccaggatgttcttgatctcctgacctcatgatccgcccac

SEQ ID NO: 46813 - DNA, 40 bp, Homo sapiens
gtgggcggatcatgaggtcaggagatcaagaacatcctgg

SEQ ID NO: 46814 - DNA, 40 bp, Homo sapiens
caggatgttcttgatctcctgacctcatgatccgcccacc

SEQ ID NO: 46815 - DNA, 40 bp, Homo sapiens
ggtgggcggatcatgaggtcaggagatcaagaacatcctg

SEQ ID NO: 46816 - DNA, 40 bp, Homo sapiens
aggatgttcttgatctcctgacctcatgatccgcccacct

SEQ ID NO: 46817 - DNA, 40 bp, Homo sapiens
aggtgggcggatcatgaggtcaggagatcaagaacatcct

SEQ ID NO: 46818 - DNA, 40 bp, Homo sapiens
ggatgttcttgatctcctgacctcatgatccgcccacctc

SEQ ID NO: 46819 - DNA, 40 bp, Homo sapiens
gaggtgggcggatcatgaggtcaggagatcaagaacatcc

SEQ ID NO: 46820 - DNA, 40 bp, Homo sapiens
gatgttcttgatctcctgacctcatgatccgcccacctcg

SEQ ID NO: 46821 - DNA, 40 bp, Homo sapiens
cgaggtgggcggatcatgaggtcaggagatcaagaacatc

SEQ ID NO: 46822 - DNA, 40 bp, Homo sapiens
atgttcttgatctcctgacctcatgatccgcccacctcgg

SEQ ID NO: 46823 - DNA, 40 bp, Homo sapiens
ccgaggtgggcggatcatgaggtcaggagatcaagaacat

SEQ ID NO: 46824 - DNA, 40 bp, Homo sapiens
tgttcttgatctcctgacctcatgatccgcccacctcggc

SEQ ID NO: 46825 - DNA, 40 bp, Homo sapiens
gccgaggtgggcggatcatgaggtcaggagatcaagaaca

SEQ ID NO: 46826 - DNA, 40 bp, Homo sapiens
gttcttgatctcctgacctcatgatccgcccacctcggcc

SEQ ID NO: 46827 - DNA, 40 bp, Homo sapiens
ggccgaggtgggcggatcatgaggtcaggagatcaagaac

SEQ ID NO: 46828 - DNA, 40 bp, Homo sapiens
ttcttgatctcctgacctcatgatccgcccacctcggcct

SEQ ID NO: 46829 - DNA, 40 bp, Homo sapiens
aggccgaggtgggcggatcatgaggtcaggagatcaagaa

SEQ ID NO: 46830 - DNA, 40 bp, Homo sapiens
tcttgatctcctgacctcatgatccgcccacctcggcctc

SEQ ID NO: 46831 - DNA, 40 bp, Homo sapiens
gaggccgaggtgggcggatcatgaggtcaggagatcaaga

SEQ ID NO: 46832 - DNA, 40 bp, Homo sapiens
cttgatctcctgacctcatgatccgcccacctcggcctcc

SEQ ID NO: 46833 - DNA, 40 bp, Homo sapiens
ggaggccgaggtgggcggatcatgaggtcaggagatcaag

SEQ ID NO: 46834 - DNA, 40 bp, Homo sapiens
ttgatctcctgacctcatgatccgcccacctcggcctccc

SEQ ID NO: 46835 - DNA, 40 bp, Homo sapiens
gggaggccgaggtgggcggatcatgaggtcaggagatcaa

SEQ ID NO: 46836 - DNA, 40 bp, Homo sapiens
tgatctcctgacctcatgatccgcccacctcggcctccca

SEQ ID NO: 46837 - DNA, 40 bp, Homo sapiens
tgggaggccgaggtgggcggatcatgaggtcaggagatca

SEQ ID NO: 46838 - DNA, 40 bp, Homo sapiens
gatctcctgacctcatgatccgcccacctcggcctcccaa

SEQ ID NO: 46839 - DNA, 40 bp, Homo sapiens
ttgggaggccgaggtgggcggatcatgaggtcaggagatc

SEQ ID NO: 46840 - DNA, 40 bp, Homo sapiens
atctcctgacctcatgatccgcccacctcggcctcccaaa

SEQ ID NO: 46841 - DNA, 40 bp, Homo sapiens
tttgggaggccgaggtgggcggatcatgaggtcaggagat

SEQ ID NO: 46842 - DNA, 40 bp, Homo sapiens
tctcctgacctcatgatccgcccacctcggcctcccaaag

SEQ ID NO: 46843 - DNA, 40 bp, Homo sapiens
ctttgggaggccgaggtgggcggatcatgaggtcaggaga

SEQ ID NO: 46844 - DNA, 40 bp, Homo sapiens
ctcctgacctcatgatccgcccacctcggcctcccaaagt

SEQ ID NO: 46845 - DNA, 40 bp, Homo sapiens
actttgggaggccgaggtgggcggatcatgaggtcaggag

SEQ ID NO: 46846 - DNA, 40 bp, Homo sapiens
tcctgacctcatgatccgcccacctcggcctcccaaagtg

SEQ ID NO: 46847 - DNA, 40 bp, Homo sapiens
cactttgggaggccgaggtgggcggatcatgaggtcagga

SEQ ID NO: 46848 - DNA, 40 bp, Homo sapiens
cctgacctcatgatccgcccacctcggcctcccaaagtgt

SEQ ID NO: 46849 - DNA, 40 bp, Homo sapiens
acactttgggaggccgaggtgggcggatcatgaggtcagg

SEQ ID NO: 46850 - DNA, 40 bp, Homo sapiens
ctgacctcatgatccgcccacctcggcctcccaaagtgtt

SEQ ID NO: 46851 - DNA, 40 bp, Homo sapiens
aacactttgggaggccgaggtgggcggatcatgaggtcag

SEQ ID NO: 46852 - DNA, 40 bp, Homo sapiens
tgacctcatgatccgcccacctcggcctcccaaagtgttg

SEQ ID NO: 46853 - DNA, 40 bp, Homo sapiens
caacactttgggaggccgaggtgggcggatcatgaggtca

SEQ ID NO: 46854 - DNA, 40 bp, Homo sapiens
gacctcatgatccgcccacctcggcctcccaaagtgttgg

SEQ ID NO: 46855 - DNA, 40 bp, Homo sapiens
ccaacactttgggaggccgaggtgggcggatcatgaggtc

SEQ ID NO: 46856 - DNA, 40 bp, Homo sapiens
acctcatgatccgcccacctcggcctcccaaagtgttggg

SEQ ID NO: 46857 - DNA, 40 bp, Homo sapiens
cccaacactttgggaggccgaggtgggcggatcatgaggt

SEQ ID NO: 46858 - DNA, 40 bp, Homo sapiens
cctcatgatccgcccacctcggcctcccaaagtgttggga

SEQ ID NO: 46859 - DNA, 40 bp, Homo sapiens
tcccaacactttgggaggccgaggtgggcggatcatgagg

SEQ ID NO: 46860 - DNA, 40 bp, Homo sapiens
ctcatgatccgcccacctcggcctcccaaagtgttgggat

SEQ ID NO: 46861 - DNA, 40 bp, Homo sapiens
atcccaacactttgggaggccgaggtgggcggatcatgag

SEQ ID NO: 46862 - DNA, 40 bp, Homo sapiens
tcatgatccgcccacctcggcctcccaaagtgttgggatt

SEQ ID NO: 46863 - DNA, 40 bp, Homo sapiens
aatcccaacactttgggaggccgaggtgggcggatcatga

SEQ ID NO: 46864 - DNA, 40 bp, Homo sapiens
catgatccgcccacctcggcctcccaaagtgttgggattg

SEQ ID NO: 46865 - DNA, 40 bp, Homo sapiens
caatcccaacactttgggaggccgaggtgggcggatcatg

SEQ ID NO: 46866 - DNA, 40 bp, Homo sapiens
atgatccgcccacctcggcctcccaaagtgttgggattgc

SEQ ID NO: 46867 - DNA, 40 bp, Homo sapiens
gcaatcccaacactttgggaggccgaggtgggcggatcat

SEQ ID NO: 46868 - DNA, 40 bp, Homo sapiens
tgatccgcccacctcggcctcccaaagtgttgggattgca

SEQ ID NO: 46869 - DNA, 40 bp, Homo sapiens
tgcaatcccaacactttgggaggccgaggtgggcggatca

SEQ ID NO: 46870 - DNA, 40 bp, Homo sapiens
gatccgcccacctcggcctcccaaagtgttgggattgcaa

SEQ ID NO: 46871 - DNA, 40 bp, Homo sapiens
ttgcaatcccaacactttgggaggccgaggtgggcggatc

SEQ ID NO: 46872 - DNA, 40 bp, Homo sapiens
atccgcccacctcggcctcccaaagtgttgggattgcaag

SEQ ID NO: 46873 - DNA, 40 bp, Homo sapiens
cttgcaatcccaacactttgggaggccgaggtgggcggat

SEQ ID NO: 46874 - DNA, 40 bp, Homo sapiens
tccgcccacctcggcctcccaaagtgttgggattgcaagt

SEQ ID NO: 46875 - DNA, 40 bp, Homo sapiens
acttgcaatcccaacactttgggaggccgaggtgggcgga

SEQ ID NO: 46876 - DNA, 40 bp, Homo sapiens
ccgcccacctcggcctcccaaagtgttgggattgcaagtg

SEQ ID NO: 46877 - DNA, 40 bp, Homo sapiens
cacttgcaatcccaacactttgggaggccgaggtgggcgg

SEQ ID NO: 46878 - DNA, 40 bp, Homo sapiens
cgcccacctcggcctcccaaagtgttgggattgcaagtgt

SEQ ID NO: 46879 - DNA, 40 bp, Homo sapiens
acacttgcaatcccaacactttgggaggccgaggtgggcg

SEQ ID NO: 46880 - DNA, 40 bp, Homo sapiens
gcccacctcggcctcccaaagtgttgggattgcaagtgtg

SEQ ID NO: 46881 - DNA, 40 bp, Homo sapiens
cacacttgcaatcccaacactttgggaggccgaggtgggc

SEQ ID NO: 46882 - DNA, 40 bp, Homo sapiens
cccacctcggcctcccaaagtgttgggattgcaagtgtga

SEQ ID NO: 46883 - DNA, 40 bp, Homo sapiens
tcacacttgcaatcccaacactttgggaggccgaggtggg

SEQ ID NO: 46884 - DNA, 40 bp, Homo sapiens
ccacctcggcctcccaaagtgttgggattgcaagtgtgag

SEQ ID NO: 46885 - DNA, 40 bp, Homo sapiens
ctcacacttgcaatcccaacactttgggaggccgaggtgg

SEQ ID NO: 46886 - DNA, 40 bp, Homo sapiens
cacctcggcctcccaaagtgttgggattgcaagtgtgagc

SEQ ID NO: 46887 - DNA, 40 bp, Homo sapiens
gctcacacttgcaatcccaacactttgggaggccgaggtg

SEQ ID NO: 46888 - DNA, 40 bp, Homo sapiens
acctcggcctcccaaagtgttgggattgcaagtgtgagcc

SEQ ID NO: 46889 - DNA, 40 bp, Homo sapiens
ggctcacacttgcaatcccaacactttgggaggccgaggt

SEQ ID NO: 46890 - DNA, 40 bp, Homo sapiens
cctcggcctcccaaagtgttgggattgcaagtgtgagcca

SEQ ID NO: 46891 - DNA, 40 bp, Homo sapiens
tggctcacacttgcaatcccaacactttgggaggccgagg

SEQ ID NO: 46892 - DNA, 40 bp, Homo sapiens
ctcggcctcccaaagtgttgggattgcaagtgtgagccac

SEQ ID NO: 46893 - DNA, 40 bp, Homo sapiens
gtggctcacacttgcaatcccaacactttgggaggccgag

SEQ ID NO: 46894 - DNA, 40 bp, Homo sapiens
tcggcctcccaaagtgttgggattgcaagtgtgagccacc

SEQ ID NO: 46895 - DNA, 40 bp, Homo sapiens
ggtggctcacacttgcaatcccaacactttgggaggccga

SEQ ID NO: 46896 - DNA, 40 bp, Homo sapiens
cggcctcccaaagtgttgggattgcaagtgtgagccaccg

SEQ ID NO: 46897 - DNA, 40 bp, Homo sapiens
cggtggctcacacttgcaatcccaacactttgggaggccg

SEQ ID NO: 46898 - DNA, 40 bp, Homo sapiens
ggcctcccaaagtgttgggattgcaagtgtgagccaccgc

SEQ ID NO: 46899 - DNA, 40 bp, Homo sapiens
gcggtggctcacacttgcaatcccaacactttgggaggcc

SEQ ID NO: 46900 - DNA, 40 bp, Homo sapiens
gcctcccaaagtgttgggattgcaagtgtgagccaccgcg

SEQ ID NO: 46901 - DNA, 40 bp, Homo sapiens
cgcggtggctcacacttgcaatcccaacactttgggaggc

SEQ ID NO: 46902 - DNA, 40 bp, Homo sapiens
cctcccaaagtgttgggattgcaagtgtgagccaccgcgc

SEQ ID NO: 46903 - DNA, 40 bp, Homo sapiens
gcgcggtggctcacacttgcaatcccaacactttgggagg

SEQ ID NO: 46904 - DNA, 40 bp, Homo sapiens
ctcccaaagtgttgggattgcaagtgtgagccaccgcgcc

SEQ ID NO: 46905 - DNA, 40 bp, Homo sapiens
ggcgcggtggctcacacttgcaatcccaacactttgggag

SEQ ID NO: 46906 - DNA, 40 bp, Homo sapiens
tcccaaagtgttgggattgcaagtgtgagccaccgcgcct

SEQ ID NO: 46907 - DNA, 40 bp, Homo sapiens
aggcgcggtggctcacacttgcaatcccaacactttggga

SEQ ID NO: 46908 - DNA, 40 bp, Homo sapiens
cccaaagtgttgggattgcaagtgtgagccaccgcgccta

SEQ ID NO: 46909 - DNA, 40 bp, Homo sapiens
taggcgcggtggctcacacttgcaatcccaacactttggg

SEQ ID NO: 46910 - DNA, 40 bp, Homo sapiens
ccaaagtgttgggattgcaagtgtgagccaccgcgcctag

SEQ ID NO: 46911 - DNA, 40 bp, Homo sapiens
ctaggcgcggtggctcacacttgcaatcccaacactttgg

SEQ ID NO: 46912 - DNA, 40 bp, Homo sapiens
caaagtgttgggattgcaagtgtgagccaccgcgcctaga

SEQ ID NO: 46913 - DNA, 40 bp, Homo sapiens
tctaggcgcggtggctcacacttgcaatcccaacactttg

SEQ ID NO: 46914 - DNA, 40 bp, Homo sapiens
aaagtgttgggattgcaagtgtgagccaccgcgcctagac

SEQ ID NO: 46915 - DNA, 40 bp, Homo sapiens
gtctaggcgcggtggctcacacttgcaatcccaacacttt

SEQ ID NO: 46916 - DNA, 40 bp, Homo sapiens
aagtgttgggattgcaagtgtgagccaccgcgcctagacc

SEQ ID NO: 46917 - DNA, 40 bp, Homo sapiens
ggtctaggcgcggtggctcacacttgcaatcccaacactt

SEQ ID NO: 46918 - DNA, 40 bp, Homo sapiens
agtgttgggattgcaagtgtgagccaccgcgcctagacca

SEQ ID NO: 46919 - DNA, 40 bp, Homo sapiens
tggtctaggcgcggtggctcacacttgcaatcccaacact

SEQ ID NO: 46920 - DNA, 40 bp, Homo sapiens
gtgttgggattgcaagtgtgagccaccgcgcctagaccat

SEQ ID NO: 46921 - DNA, 40 bp, Homo sapiens
atggtctaggcgcggtggctcacacttgcaatcccaacac

SEQ ID NO: 46922 - DNA, 40 bp, Homo sapiens
tgttgggattgcaagtgtgagccaccgcgcctagaccatg

SEQ ID NO: 46923 - DNA, 40 bp, Homo sapiens
catggtctaggcgcggtggctcacacttgcaatcccaaca

SEQ ID NO: 46924 - DNA, 40 bp, Homo sapiens
gttgggattgcaagtgtgagccaccgcgcctagaccatgg

SEQ ID NO: 46925 - DNA, 40 bp, Homo sapiens
ccatggtctaggcgcggtggctcacacttgcaatcccaac

SEQ ID NO: 46926 - DNA, 40 bp, Homo sapiens
ttgggattgcaagtgtgagccaccgcgcctagaccatggt

SEQ ID NO: 46927 - DNA, 40 bp, Homo sapiens
accatggtctaggcgcggtggctcacacttgcaatcccaa

SEQ ID NO: 46928 - DNA, 40 bp, Homo sapiens
tgggattgcaagtgtgagccaccgcgcctagaccatggta

SEQ ID NO: 46929 - DNA, 40 bp, Homo sapiens
taccatggtctaggcgcggtggctcacacttgcaatccca

SEQ ID NO: 46930 - DNA, 40 bp, Homo sapiens
gggattgcaagtgtgagccaccgcgcctagaccatggtag

SEQ ID NO: 46931 - DNA, 40 bp, Homo sapiens
ctaccatggtctaggcgcggtggctcacacttgcaatccc

SEQ ID NO: 46932 - DNA, 40 bp, Homo sapiens
ggattgcaagtgtgagccaccgcgcctagaccatggtagt

SEQ ID NO: 46933 - DNA, 40 bp, Homo sapiens
actaccatggtctaggcgcggtggctcacacttgcaatcc

SEQ ID NO: 46934 - DNA, 40 bp, Homo sapiens
gattgcaagtgtgagccaccgcgcctagaccatggtagtt

SEQ ID NO: 46935 - DNA, 40 bp, Homo sapiens
aactaccatggtctaggcgcggtggctcacacttgcaatc

SEQ ID NO: 46936 - DNA, 40 bp, Homo sapiens
attgcaagtgtgagccaccgcgcctagaccatggtagtta

SEQ ID NO: 46937 - DNA, 40 bp, Homo sapiens
taactaccatggtctaggcgcggtggctcacacttgcaat

SEQ ID NO: 46938 - DNA, 40 bp, Homo sapiens
ttgcaagtgtgagccaccgcgcctagaccatggtagttaa

SEQ ID NO: 46939 - DNA, 40 bp, Homo sapiens
ttaactaccatggtctaggcgcggtggctcacacttgcaa

SEQ ID NO: 46940 - DNA, 40 bp, Homo sapiens
tgcaagtgtgagccaccgcgcctagaccatggtagttaat

SEQ ID NO: 46941 - DNA, 40 bp, Homo sapiens
attaactaccatggtctaggcgcggtggctcacacttgca

SEQ ID NO: 46942 - DNA, 40 bp, Homo sapiens
gcaagtgtgagccaccgcgcctagaccatggtagttaatt

SEQ ID NO: 46943 - DNA, 40 bp, Homo sapiens
aattaactaccatggtctaggcgcggtggctcacacttgc

SEQ ID NO: 46944 - DNA, 40 bp, Homo sapiens
caagtgtgagccaccgcgcctagaccatggtagttaattt

SEQ ID NO: 46945 - DNA, 40 bp, Homo sapiens
aaattaactaccatggtctaggcgcggtggctcacacttg

SEQ ID NO: 46946 - DNA, 40 bp, Homo sapiens
aagtgtgagccaccgcgcctagaccatggtagttaatttt

SEQ ID NO: 46947 - DNA, 40 bp, Homo sapiens
aaaattaactaccatggtctaggcgcggtggctcacactt

SEQ ID NO: 46948 - DNA, 40 bp, Homo sapiens
agtgtgagccaccgcgcctagaccatggtagttaatttta

SEQ ID NO: 46949 - DNA, 40 bp, Homo sapiens
taaaattaactaccatggtctaggcgcggtggctcacact

SEQ ID NO: 46950 - DNA, 40 bp, Homo sapiens
gtgtgagccaccgcgcctagaccatggtagttaattttaa

SEQ ID NO: 46951 - DNA, 40 bp, Homo sapiens
ttaaaattaactaccatggtctaggcgcggtggctcacac

SEQ ID NO: 46952 - DNA, 40 bp, Homo sapiens
tgtgagccaccgcgcctagaccatggtagttaattttaag

SEQ ID NO: 46953 - DNA, 40 bp, Homo sapiens
cttaaaattaactaccatggtctaggcgcggtggctcaca

SEQ ID NO: 46954 - DNA, 40 bp, Homo sapiens
gtgagccaccgcgcctagaccatggtagttaattttaagt

SEQ ID NO: 46955 - DNA, 40 bp, Homo sapiens
acttaaaattaactaccatggtctaggcgcggtggctcac

SEQ ID NO: 46956 - DNA, 40 bp, Homo sapiens
tgagccaccgcgcctagaccatggtagttaattttaagtg

SEQ ID NO: 46957 - DNA, 40 bp, Homo sapiens
cacttaaaattaactaccatggtctaggcgcggtggctca

SEQ ID NO: 46958 - DNA, 40 bp, Homo sapiens
gagccaccgcgcctagaccatggtagttaattttaagtgt

SEQ ID NO: 46959 - DNA, 40 bp, Homo sapiens
acacttaaaattaactaccatggtctaggcgcggtggctc

SEQ ID NO: 46960 - DNA, 40 bp, Homo sapiens
agccaccgcgcctagaccatggtagttaattttaagtgtt

SEQ ID NO: 46961 - DNA, 40 bp, Homo sapiens
aacacttaaaattaactaccatggtctaggcgcggtggct

SEQ ID NO: 46962 - DNA, 40 bp, Homo sapiens
gccaccgcgcctagaccatggtagttaattttaagtgttc

SEQ ID NO: 46963 - DNA, 40 bp, Homo sapiens
gaacacttaaaattaactaccatggtctaggcgcggtggc

SEQ ID NO: 46964 - DNA, 40 bp, Homo sapiens
ccaccgcgcctagaccatggtagttaattttaagtgttca

SEQ ID NO: 46965 - DNA, 40 bp, Homo sapiens
tgaacacttaaaattaactaccatggtctaggcgcggtgg

SEQ ID NO: 46966 - DNA, 40 bp, Homo sapiens
caccgcgcctagaccatggtagttaattttaagtgttcaa

SEQ ID NO: 46967 - DNA, 40 bp, Homo sapiens
ttgaacacttaaaattaactaccatggtctaggcgcggtg

SEQ ID NO: 46968 - DNA, 40 bp, Homo sapiens
accgcgcctagaccatggtagttaattttaagtgttcaat

SEQ ID NO: 46969 - DNA, 40 bp, Homo sapiens
attgaacacttaaaattaactaccatggtctaggcgcggt

SEQ ID NO: 46970 - DNA, 40 bp, Homo sapiens
ccgcgcctagaccatggtagttaattttaagtgttcaatt

SEQ ID NO: 46971 - DNA, 40 bp, Homo sapiens
aattgaacacttaaaattaactaccatggtctaggcgcgg

SEQ ID NO: 46972 - DNA, 40 bp, Homo sapiens
cgcgcctagaccatggtagttaattttaagtgttcaattc

SEQ ID NO: 46973 - DNA, 40 bp, Homo sapiens
gaattgaacacttaaaattaactaccatggtctaggcgcg

SEQ ID NO: 46974 - DNA, 40 bp, Homo sapiens
gcgcctagaccatggtagttaattttaagtgttcaattca

SEQ ID NO: 46975 - DNA, 40 bp, Homo sapiens
tgaattgaacacttaaaattaactaccatggtctaggcgc

SEQ ID NO: 46976 - DNA, 40 bp, Homo sapiens
cgcctagaccatggtagttaattttaagtgttcaattcag

SEQ ID NO: 46977 - DNA, 40 bp, Homo sapiens
ctgaattgaacacttaaaattaactaccatggtctaggcg

SEQ ID NO: 46978 - DNA, 40 bp, Homo sapiens
gcctagaccatggtagttaattttaagtgttcaattcagt

SEQ ID NO: 46979 - DNA, 40 bp, Homo sapiens
actgaattgaacacttaaaattaactaccatggtctaggc

SEQ ID NO: 46980 - DNA, 40 bp, Homo sapiens
cctagaccatggtagttaattttaagtgttcaattcagtg

SEQ ID NO: 46981 - DNA, 40 bp, Homo sapiens
cactgaattgaacacttaaaattaactaccatggtctagg

SEQ ID NO: 46982 - DNA, 40 bp, Homo sapiens
ctagaccatggtagttaattttaagtgttcaattcagtga

SEQ ID NO: 46983 - DNA, 40 bp, Homo sapiens
tcactgaattgaacacttaaaattaactaccatggtctag

SEQ ID NO: 46984 - DNA, 40 bp, Homo sapiens
tagaccatggtagttaattttaagtgttcaattcagtgac

SEQ ID NO: 46985 - DNA, 40 bp, Homo sapiens
gtcactgaattgaacacttaaaattaactaccatggtcta

SEQ ID NO: 46986 - DNA, 40 bp, Homo sapiens
agaccatggtagttaattttaagtgttcaattcagtgacc

SEQ ID NO: 46987 - DNA, 40 bp, Homo sapiens
ggtcactgaattgaacacttaaaattaactaccatggtct

SEQ ID NO: 46988 - DNA, 40 bp, Homo sapiens
gaccatggtagttaattttaagtgttcaattcagtgacct

SEQ ID NO: 46989 - DNA, 40 bp, Homo sapiens
aggtcactgaattgaacacttaaaattaactaccatggtc

SEQ ID NO: 46990 - DNA, 40 bp, Homo sapiens
accatggtagttaattttaagtgttcaattcagtgacctt

SEQ ID NO: 46991 - DNA, 40 bp, Homo sapiens
aaggtcactgaattgaacacttaaaattaactaccatggt

SEQ ID NO: 46992 - DNA, 40 bp, Homo sapiens
ccatggtagttaattttaagtgttcaattcagtgacctta

SEQ ID NO: 46993 - DNA, 40 bp, Homo sapiens
taaggtcactgaattgaacacttaaaattaactaccatgg

SEQ ID NO: 46994 - DNA, 40 bp, Homo sapiens
catggtagttaattttaagtgttcaattcagtgaccttaa

SEQ ID NO: 46995 - DNA, 40 bp, Homo sapiens
ttaaggtcactgaattgaacacttaaaattaactaccatg

SEQ ID NO: 46996 - DNA, 40 bp, Homo sapiens
atggtagttaattttaagtgttcaattcagtgaccttaag

SEQ ID NO: 46997 - DNA, 40 bp, Homo sapiens
cttaaggtcactgaattgaacacttaaaattaactaccat

SEQ ID NO: 46998 - DNA, 40 bp, Homo sapiens
tggtagttaattttaagtgttcaattcagtgaccttaagt

SEQ ID NO: 46999 - DNA, 40 bp, Homo sapiens
acttaaggtcactgaattgaacacttaaaattaactacca

SEQ ID NO: 47000 - DNA, 40 bp, Homo sapiens
ggtagttaattttaagtgttcaattcagtgaccttaagtg

SEQ ID NO: 47001 - DNA, 40 bp, Homo sapiens
cacttaaggtcactgaattgaacacttaaaattaactacc

SEQ ID NO: 47002 - DNA, 40 bp, Homo sapiens
gtagttaattttaagtgttcaattcagtgaccttaagtgt

SEQ ID NO: 47003 - DNA, 40 bp, Homo sapiens
acacttaaggtcactgaattgaacacttaaaattaactac

SEQ ID NO: 47004 - DNA, 40 bp, Homo sapiens
tagttaattttaagtgttcaattcagtgaccttaagtgtg

SEQ ID NO: 47005 - DNA, 40 bp, Homo sapiens
cacacttaaggtcactgaattgaacacttaaaattaacta

SEQ ID NO: 47006 - DNA, 40 bp, Homo sapiens
agttaattttaagtgttcaattcagtgaccttaagtgtgt

SEQ ID NO: 47007 - DNA, 40 bp, Homo sapiens
acacacttaaggtcactgaattgaacacttaaaattaact

SEQ ID NO: 47008 - DNA, 40 bp, Homo sapiens
gttaattttaagtgttcaattcagtgaccttaagtgtgtt

SEQ ID NO: 47009 - DNA, 40 bp, Homo sapiens
aacacacttaaggtcactgaattgaacacttaaaattaac

SEQ ID NO: 47010 - DNA, 40 bp, Homo sapiens
ttaattttaagtgttcaattcagtgaccttaagtgtgttc

SEQ ID NO: 47011 - DNA, 40 bp, Homo sapiens
gaacacacttaaggtcactgaattgaacacttaaaattaa

SEQ ID NO: 47012 - DNA, 40 bp, Homo sapiens
taattttaagtgttcaattcagtgaccttaagtgtgttca

SEQ ID NO: 47013 - DNA, 40 bp, Homo sapiens
tgaacacacttaaggtcactgaattgaacacttaaaatta

SEQ ID NO: 47014 - DNA, 40 bp, Homo sapiens
aattttaagtgttcaattcagtgaccttaagtgtgttcat

SEQ ID NO: 47015 - DNA, 40 bp, Homo sapiens
atgaacacacttaaggtcactgaattgaacacttaaaatt

SEQ ID NO: 47016 - DNA, 40 bp, Homo sapiens
attttaagtgttcaattcagtgaccttaagtgtgttcata

SEQ ID NO: 47017 - DNA, 40 bp, Homo sapiens
tatgaacacacttaaggtcactgaattgaacacttaaaat

SEQ ID NO: 47018 - DNA, 40 bp, Homo sapiens
ttttaagtgttcaattcagtgaccttaagtgtgttcataa

SEQ ID NO: 47019 - DNA, 40 bp, Homo sapiens
ttatgaacacacttaaggtcactgaattgaacacttaaaa

SEQ ID NO: 47020 - DNA, 40 bp, Homo sapiens
tttaagtgttcaattcagtgaccttaagtgtgttcataat

SEQ ID NO: 47021 - DNA, 40 bp, Homo sapiens
attatgaacacacttaaggtcactgaattgaacacttaaa

SEQ ID NO: 47022 - DNA, 40 bp, Homo sapiens
ttaagtgttcaattcagtgaccttaagtgtgttcataatg

SEQ ID NO: 47023 - DNA, 40 bp, Homo sapiens
cattatgaacacacttaaggtcactgaattgaacacttaa

SEQ ID NO: 47024 - DNA, 40 bp, Homo sapiens
taagtgttcaattcagtgaccttaagtgtgttcataatgt

SEQ ID NO: 47025 - DNA, 40 bp, Homo sapiens
acattatgaacacacttaaggtcactgaattgaacactta

SEQ ID NO: 47026 - DNA, 40 bp, Homo sapiens
aagtgttcaattcagtgaccttaagtgtgttcataatgtt

SEQ ID NO: 47027 - DNA, 40 bp, Homo sapiens
aacattatgaacacacttaaggtcactgaattgaacactt

SEQ ID NO: 47028 - DNA, 40 bp, Homo sapiens
agtgttcaattcagtgaccttaagtgtgttcataatgttg

SEQ ID NO: 47029 - DNA, 40 bp, Homo sapiens
caacattatgaacacacttaaggtcactgaattgaacact

SEQ ID NO: 47030 - DNA, 40 bp, Homo sapiens
gtgttcaattcagtgaccttaagtgtgttcataatgttgt

SEQ ID NO: 47031 - DNA, 40 bp, Homo sapiens
acaacattatgaacacacttaaggtcactgaattgaacac

SEQ ID NO: 47032 - DNA, 40 bp, Homo sapiens
tgttcaattcagtgaccttaagtgtgttcataatgttgtg

SEQ ID NO: 47033 - DNA, 40 bp, Homo sapiens
cacaacattatgaacacacttaaggtcactgaattgaaca

SEQ ID NO: 47034 - DNA, 40 bp, Homo sapiens
gttcaattcagtgaccttaagtgtgttcataatgttgtgc

SEQ ID NO: 47035 - DNA, 40 bp, Homo sapiens
gcacaacattatgaacacacttaaggtcactgaattgaac

SEQ ID NO: 47036 - DNA, 40 bp, Homo sapiens
ttcaattcagtgaccttaagtgtgttcataatgttgtgca

SEQ ID NO: 47037 - DNA, 40 bp, Homo sapiens
tgcacaacattatgaacacacttaaggtcactgaattgaa

SEQ ID NO: 47038 - DNA, 40 bp, Homo sapiens
tcaattcagtgaccttaagtgtgttcataatgttgtgcaa

SEQ ID NO: 47039 - DNA, 40 bp, Homo sapiens
ttgcacaacattatgaacacacttaaggtcactgaattga

SEQ ID NO: 47040 - DNA, 40 bp, Homo sapiens
caattcagtgaccttaagtgtgttcataatgttgtgcaac

SEQ ID NO: 47041 - DNA, 40 bp, Homo sapiens
gttgcacaacattatgaacacacttaaggtcactgaattg

SEQ ID NO: 47042 - DNA, 40 bp, Homo sapiens
aattcagtgaccttaagtgtgttcataatgttgtgcaacc

SEQ ID NO: 47043 - DNA, 40 bp, Homo sapiens
ggttgcacaacattatgaacacacttaaggtcactgaatt

SEQ ID NO: 47044 - DNA, 40 bp, Homo sapiens
attcagtgaccttaagtgtgttcataatgttgtgcaacca

SEQ ID NO: 47045 - DNA, 40 bp, Homo sapiens
tggttgcacaacattatgaacacacttaaggtcactgaat

SEQ ID NO: 47046 - DNA, 40 bp, Homo sapiens
ttcagtgaccttaagtgtgttcataatgttgtgcaaccat

SEQ ID NO: 47047 - DNA, 40 bp, Homo sapiens
atggttgcacaacattatgaacacacttaaggtcactgaa

SEQ ID NO: 47048 - DNA, 40 bp, Homo sapiens
tcagtgaccttaagtgtgttcataatgttgtgcaaccatc

SEQ ID NO: 47049 - DNA, 40 bp, Homo sapiens
gatggttgcacaacattatgaacacacttaaggtcactga

SEQ ID NO: 47050 - DNA, 40 bp, Homo sapiens
cagtgaccttaagtgtgttcataatgttgtgcaaccatca

SEQ ID NO: 47051 - DNA, 40 bp, Homo sapiens
tgatggttgcacaacattatgaacacacttaaggtcactg

SEQ ID NO: 47052 - DNA, 40 bp, Homo sapiens
agtgaccttaagtgtgttcataatgttgtgcaaccatcac

SEQ ID NO: 47053 - DNA, 40 bp, Homo sapiens
gtgatggttgcacaacattatgaacacacttaaggtcact

SEQ ID NO: 47054 - DNA, 40 bp, Homo sapiens
gtgaccttaagtgtgttcataatgttgtgcaaccatcacc

SEQ ID NO: 47055 - DNA, 40 bp, Homo sapiens
ggtgatggttgcacaacattatgaacacacttaaggtcac

SEQ ID NO: 47056 - DNA, 40 bp, Homo sapiens
tgaccttaagtgtgttcataatgttgtgcaaccatcacca

SEQ ID NO: 47057 - DNA, 40 bp, Homo sapiens
tggtgatggttgcacaacattatgaacacacttaaggtca

SEQ ID NO: 47058 - DNA, 40 bp, Homo sapiens
gaccttaagtgtgttcataatgttgtgcaaccatcaccat

SEQ ID NO: 47059 - DNA, 40 bp, Homo sapiens
atggtgatggttgcacaacattatgaacacacttaaggtc

SEQ ID NO: 47060 - DNA, 40 bp, Homo sapiens
accttaagtgtgttcataatgttgtgcaaccatcaccatg

SEQ ID NO: 47061 - DNA, 40 bp, Homo sapiens
catggtgatggttgcacaacattatgaacacacttaaggt

SEQ ID NO: 47062 - DNA, 40 bp, Homo sapiens
ccttaagtgtgttcataatgttgtgcaaccatcaccatgt

SEQ ID NO: 47063 - DNA, 40 bp, Homo sapiens
acatggtgatggttgcacaacattatgaacacacttaagg

SEQ ID NO: 47064 - DNA, 40 bp, Homo sapiens
cttaagtgtgttcataatgttgtgcaaccatcaccatgtt

SEQ ID NO: 47065 - DNA, 40 bp, Homo sapiens
aacatggtgatggttgcacaacattatgaacacacttaag

SEQ ID NO: 47066 - DNA, 40 bp, Homo sapiens
ttaagtgtgttcataatgttgtgcaaccatcaccatgttg

SEQ ID NO: 47067 - DNA, 40 bp, Homo sapiens
caacatggtgatggttgcacaacattatgaacacacttaa

SEQ ID NO: 47068 - DNA, 40 bp, Homo sapiens
taagtgtgttcataatgttgtgcaaccatcaccatgttgt

SEQ ID NO: 47069 - DNA, 40 bp, Homo sapiens
acaacatggtgatggttgcacaacattatgaacacactta

SEQ ID NO: 47070 - DNA, 40 bp, Homo sapiens
aagtgtgttcataatgttgtgcaaccatcaccatgttgtc

SEQ ID NO: 47071 - DNA, 40 bp, Homo sapiens
gacaacatggtgatggttgcacaacattatgaacacactt

SEQ ID NO: 47072 - DNA, 40 bp, Homo sapiens
agtgtgttcataatgttgtgcaaccatcaccatgttgtct

SEQ ID NO: 47073 - DNA, 40 bp, Homo sapiens
agacaacatggtgatggttgcacaacattatgaacacact

SEQ ID NO: 47074 - DNA, 40 bp, Homo sapiens
gtgtgttcataatgttgtgcaaccatcaccatgttgtcta

SEQ ID NO: 47075 - DNA, 40 bp, Homo sapiens
tagacaacatggtgatggttgcacaacattatgaacacac

SEQ ID NO: 47076 - DNA, 40 bp, Homo sapiens
tgtgttcataatgttgtgcaaccatcaccatgttgtctaa

SEQ ID NO: 47077 - DNA, 40 bp, Homo sapiens
ttagacaacatggtgatggttgcacaacattatgaacaca

SEQ ID NO: 47078 - DNA, 40 bp, Homo sapiens
gtgttcataatgttgtgcaaccatcaccatgttgtctaac

SEQ ID NO: 47079 - DNA, 40 bp, Homo sapiens
gttagacaacatggtgatggttgcacaacattatgaacac

SEQ ID NO: 47080 - DNA, 40 bp, Homo sapiens
tgttcataatgttgtgcaaccatcaccatgttgtctaacc

SEQ ID NO: 47081 - DNA, 40 bp, Homo sapiens
ggttagacaacatggtgatggttgcacaacattatgaaca

SEQ ID NO: 47082 - DNA, 40 bp, Homo sapiens
gttcataatgttgtgcaaccatcaccatgttgtctaacca

SEQ ID NO: 47083 - DNA, 40 bp, Homo sapiens
tggttagacaacatggtgatggttgcacaacattatgaac

SEQ ID NO: 47084 - DNA, 40 bp, Homo sapiens
ttcataatgttgtgcaaccatcaccatgttgtctaaccat

SEQ ID NO: 47085 - DNA, 40 bp, Homo sapiens
atggttagacaacatggtgatggttgcacaacattatgaa

SEQ ID NO: 47086 - DNA, 40 bp, Homo sapiens
tcataatgttgtgcaaccatcaccatgttgtctaaccatt

SEQ ID NO: 47087 - DNA, 40 bp, Homo sapiens
aatggttagacaacatggtgatggttgcacaacattatga

SEQ ID NO: 47088 - DNA, 40 bp, Homo sapiens
cataatgttgtgcaaccatcaccatgttgtctaaccatta

SEQ ID NO: 47089 - DNA, 40 bp, Homo sapiens
taatggttagacaacatggtgatggttgcacaacattatg

SEQ ID NO: 47090 - DNA, 40 bp, Homo sapiens
ataatgttgtgcaaccatcaccatgttgtctaaccattag

SEQ ID NO: 47091 - DNA, 40 bp, Homo sapiens
ctaatggttagacaacatggtgatggttgcacaacattat

SEQ ID NO: 47092 - DNA, 40 bp, Homo sapiens
taatgttgtgcaaccatcaccatgttgtctaaccattagc

SEQ ID NO: 47093 - DNA, 40 bp, Homo sapiens
gctaatggttagacaacatggtgatggttgcacaacatta

SEQ ID NO: 47094 - DNA, 40 bp, Homo sapiens
aatgttgtgcaaccatcaccatgttgtctaaccattagca

SEQ ID NO: 47095 - DNA, 40 bp, Homo sapiens
tgctaatggttagacaacatggtgatggttgcacaacatt

SEQ ID NO: 47096 - DNA, 40 bp, Homo sapiens
atgttgtgcaaccatcaccatgttgtctaaccattagcac

SEQ ID NO: 47097 - DNA, 40 bp, Homo sapiens
gtgctaatggttagacaacatggtgatggttgcacaacat

SEQ ID NO: 47098 - DNA, 40 bp, Homo sapiens
tgttgtgcaaccatcaccatgttgtctaaccattagcact

SEQ ID NO: 47099 - DNA, 40 bp, Homo sapiens
agtgctaatggttagacaacatggtgatggttgcacaaca

SEQ ID NO: 47100 - DNA, 40 bp, Homo sapiens
gttgtgcaaccatcaccatgttgtctaaccattagcacta

SEQ ID NO: 47101 - DNA, 40 bp, Homo sapiens
tagtgctaatggttagacaacatggtgatggttgcacaac

SEQ ID NO: 47102 - DNA, 40 bp, Homo sapiens
ttgtgcaaccatcaccatgttgtctaaccattagcactat

SEQ ID NO: 47103 - DNA, 40 bp, Homo sapiens
atagtgctaatggttagacaacatggtgatggttgcacaa

SEQ ID NO: 47104 - DNA, 40 bp, Homo sapiens
tgtgcaaccatcaccatgttgtctaaccattagcactatc

SEQ ID NO: 47105 - DNA, 40 bp, Homo sapiens
gatagtgctaatggttagacaacatggtgatggttgcaca

SEQ ID NO: 47106 - DNA, 40 bp, Homo sapiens
gtgcaaccatcaccatgttgtctaaccattagcactatct

SEQ ID NO: 47107 - DNA, 40 bp, Homo sapiens
agatagtgctaatggttagacaacatggtgatggttgcac

SEQ ID NO: 47108 - DNA, 40 bp, Homo sapiens
tgcaaccatcaccatgttgtctaaccattagcactatctg

SEQ ID NO: 47109 - DNA, 40 bp, Homo sapiens
cagatagtgctaatggttagacaacatggtgatggttgca

SEQ ID NO: 47110 - DNA, 40 bp, Homo sapiens
gcaaccatcaccatgttgtctaaccattagcactatctgt

SEQ ID NO: 47111 - DNA, 40 bp, Homo sapiens
acagatagtgctaatggttagacaacatggtgatggttgc

SEQ ID NO: 47112 - DNA, 40 bp, Homo sapiens
caaccatcaccatgttgtctaaccattagcactatctgtt

SEQ ID NO: 47113 - DNA, 40 bp, Homo sapiens
aacagatagtgctaatggttagacaacatggtgatggttg

SEQ ID NO: 47114 - DNA, 40 bp, Homo sapiens
aaccatcaccatgttgtctaaccattagcactatctgttt

SEQ ID NO: 47115 - DNA, 40 bp, Homo sapiens
aaacagatagtgctaatggttagacaacatggtgatggtt

SEQ ID NO: 47116 - DNA, 40 bp, Homo sapiens
accatcaccatgttgtctaaccattagcactatctgtttt

SEQ ID NO: 47117 - DNA, 40 bp, Homo sapiens
aaaacagatagtgctaatggttagacaacatggtgatggt

SEQ ID NO: 47118 - DNA, 40 bp, Homo sapiens
ccatcaccatgttgtctaaccattagcactatctgttttg

SEQ ID NO: 47119 - DNA, 40 bp, Homo sapiens
caaaacagatagtgctaatggttagacaacatggtgatgg

SEQ ID NO: 47120 - DNA, 40 bp, Homo sapiens
catcaccatgttgtctaaccattagcactatctgttttga

SEQ ID NO: 47121 - DNA, 40 bp, Homo sapiens
tcaaaacagatagtgctaatggttagacaacatggtgatg

SEQ ID NO: 47122 - DNA, 40 bp, Homo sapiens
atcaccatgttgtctaaccattagcactatctgttttgag

SEQ ID NO: 47123 - DNA, 40 bp, Homo sapiens
ctcaaaacagatagtgctaatggttagacaacatggtgat

SEQ ID NO: 47124 - DNA, 40 bp, Homo sapiens
tcaccatgttgtctaaccattagcactatctgttttgaga

SEQ ID NO: 47125 - DNA, 40 bp, Homo sapiens
tctcaaaacagatagtgctaatggttagacaacatggtga

SEQ ID NO: 47126 - DNA, 40 bp, Homo sapiens
caccatgttgtctaaccattagcactatctgttttgagaa

SEQ ID NO: 47127 - DNA, 40 bp, Homo sapiens
ttctcaaaacagatagtgctaatggttagacaacatggtg

SEQ ID NO: 47128 - DNA, 40 bp, Homo sapiens
accatgttgtctaaccattagcactatctgttttgagaac

SEQ ID NO: 47129 - DNA, 40 bp, Homo sapiens
gttctcaaaacagatagtgctaatggttagacaacatggt

SEQ ID NO: 47130 - DNA, 40 bp, Homo sapiens
ccatgttgtctaaccattagcactatctgttttgagaact

SEQ ID NO: 47131 - DNA, 40 bp, Homo sapiens
agttctcaaaacagatagtgctaatggttagacaacatgg

SEQ ID NO: 47132 - DNA, 40 bp, Homo sapiens
catgttgtctaaccattagcactatctgttttgagaactt

SEQ ID NO: 47133 - DNA, 40 bp, Homo sapiens
aagttctcaaaacagatagtgctaatggttagacaacatg

SEQ ID NO: 47134 - DNA, 40 bp, Homo sapiens
atgttgtctaaccattagcactatctgttttgagaacttt

SEQ ID NO: 47135 - DNA, 40 bp, Homo sapiens
aaagttctcaaaacagatagtgctaatggttagacaacat

SEQ ID NO: 47136 - DNA, 40 bp, Homo sapiens
tgttgtctaaccattagcactatctgttttgagaactttt

SEQ ID NO: 47137 - DNA, 40 bp, Homo sapiens
aaaagttctcaaaacagatagtgctaatggttagacaaca

SEQ ID NO: 47138 - DNA, 40 bp, Homo sapiens
gttgtctaaccattagcactatctgttttgagaacttttt

SEQ ID NO: 47139 - DNA, 40 bp, Homo sapiens
aaaaagttctcaaaacagatagtgctaatggttagacaac

SEQ ID NO: 47140 - DNA, 40 bp, Homo sapiens
ttgtctaaccattagcactatctgttttgagaactttttt

SEQ ID NO: 47141 - DNA, 40 bp, Homo sapiens
aaaaaagttctcaaaacagatagtgctaatggttagacaa

SEQ ID NO: 47142 - DNA, 40 bp, Homo sapiens
tgtctaaccattagcactatctgttttgagaacttttttt

SEQ ID NO: 47143 - DNA, 40 bp, Homo sapiens
aaaaaaagttctcaaaacagatagtgctaatggttagaca

SEQ ID NO: 47144 - DNA, 40 bp, Homo sapiens
gtctaaccattagcactatctgttttgagaactttttttt

SEQ ID NO: 47145 - DNA, 40 bp, Homo sapiens
aaaaaaaagttctcaaaacagatagtgctaatggttagac

SEQ ID NO: 47146 - DNA, 40 bp, Homo sapiens
tctaaccattagcactatctgttttgagaactttttttta

SEQ ID NO: 47147 - DNA, 40 bp, Homo sapiens
taaaaaaaagttctcaaaacagatagtgctaatggttaga

SEQ ID NO: 47148 - DNA, 40 bp, Homo sapiens
ctaaccattagcactatctgttttgagaacttttttttat

SEQ ID NO: 47149 - DNA, 40 bp, Homo sapiens
ataaaaaaaagttctcaaaacagatagtgctaatggttag

SEQ ID NO: 47150 - DNA, 40 bp, Homo sapiens
taaccattagcactatctgttttgagaacttttttttatc

SEQ ID NO: 47151 - DNA, 40 bp, Homo sapiens
gataaaaaaaagttctcaaaacagatagtgctaatggtta

SEQ ID NO: 47152 - DNA, 40 bp, Homo sapiens
aaccattagcactatctgttttgagaacttttttttatca

SEQ ID NO: 47153 - DNA, 40 bp, Homo sapiens
tgataaaaaaaagttctcaaaacagatagtgctaatggtt

SEQ ID NO: 47154 - DNA, 40 bp, Homo sapiens
accattagcactatctgttttgagaacttttttttatcat

SEQ ID NO: 47155 - DNA, 40 bp, Homo sapiens
atgataaaaaaaagttctcaaaacagatagtgctaatggt

SEQ ID NO: 47156 - DNA, 40 bp, Homo sapiens
ccattagcactatctgttttgagaacttttttttatcatc

SEQ ID NO: 47157 - DNA, 40 bp, Homo sapiens
gatgataaaaaaaagttctcaaaacagatagtgctaatgg

SEQ ID NO: 47158 - DNA, 40 bp, Homo sapiens
cattagcactatctgttttgagaacttttttttatcatcc

SEQ ID NO: 47159 - DNA, 40 bp, Homo sapiens
ggatgataaaaaaaagttctcaaaacagatagtgctaatg

SEQ ID NO: 47160 - DNA, 40 bp, Homo sapiens
attagcactatctgttttgagaacttttttttatcatccc

SEQ ID NO: 47161 - DNA, 40 bp, Homo sapiens
gggatgataaaaaaaagttctcaaaacagatagtgctaat

SEQ ID NO: 47162 - DNA, 40 bp, Homo sapiens
ttagcactatctgttttgagaacttttttttatcatccca

SEQ ID NO: 47163 - DNA, 40 bp, Homo sapiens
tgggatgataaaaaaaagttctcaaaacagatagtgctaa

SEQ ID NO: 47164 - DNA, 40 bp, Homo sapiens
tagcactatctgttttgagaacttttttttatcatcccaa

SEQ ID NO: 47165 - DNA, 40 bp, Homo sapiens
ttgggatgataaaaaaaagttctcaaaacagatagtgcta

SEQ ID NO: 47166 - DNA, 40 bp, Homo sapiens
agcactatctgttttgagaacttttttttatcatcccaaa

SEQ ID NO: 47167 - DNA, 40 bp, Homo sapiens
tttgggatgataaaaaaaagttctcaaaacagatagtgct

SEQ ID NO: 47168 - DNA, 40 bp, Homo sapiens
gcactatctgttttgagaacttttttttatcatcccaaat

SEQ ID NO: 47169 - DNA, 40 bp, Homo sapiens
atttgggatgataaaaaaaagttctcaaaacagatagtgc

SEQ ID NO: 47170 - DNA, 40 bp, Homo sapiens
cactatctgttttgagaacttttttttatcatcccaaatt

SEQ ID NO: 47171 - DNA, 40 bp, Homo sapiens
aatttgggatgataaaaaaaagttctcaaaacagatagtg

SEQ ID NO: 47172 - DNA, 40 bp, Homo sapiens
actatctgttttgagaacttttttttatcatcccaaatta

SEQ ID NO: 47173 - DNA, 40 bp, Homo sapiens
taatttgggatgataaaaaaaagttctcaaaacagatagt

SEQ ID NO: 47174 - DNA, 40 bp, Homo sapiens
ctatctgttttgagaacttttttttatcatcccaaattag

SEQ ID NO: 47175 - DNA, 40 bp, Homo sapiens
ctaatttgggatgataaaaaaaagttctcaaaacagatag

SEQ ID NO: 47176 - DNA, 40 bp, Homo sapiens
tatctgttttgagaacttttttttatcatcccaaattaga

SEQ ID NO: 47177 - DNA, 40 bp, Homo sapiens
tctaatttgggatgataaaaaaaagttctcaaaacagata

SEQ ID NO: 47178 - DNA, 40 bp, Homo sapiens
atctgttttgagaacttttttttatcatcccaaattagaa

SEQ ID NO: 47179 - DNA, 40 bp, Homo sapiens
ttctaatttgggatgataaaaaaaagttctcaaaacagat

SEQ ID NO: 47180 - DNA, 40 bp, Homo sapiens
tctgttttgagaacttttttttatcatcccaaattagaat

SEQ ID NO: 47181 - DNA, 40 bp, Homo sapiens
attctaatttgggatgataaaaaaaagttctcaaaacaga

SEQ ID NO: 47182 - DNA, 40 bp, Homo sapiens
ctgttttgagaacttttttttatcatcccaaattagaatt

SEQ ID NO: 47183 - DNA, 40 bp, Homo sapiens
aattctaatttgggatgataaaaaaaagttctcaaaacag

SEQ ID NO: 47184 - DNA, 40 bp, Homo sapiens
tgttttgagaacttttttttatcatcccaaattagaattc

SEQ ID NO: 47185 - DNA, 40 bp, Homo sapiens
gaattctaatttgggatgataaaaaaaagttctcaaaaca

SEQ ID NO: 47186 - DNA, 40 bp, Homo sapiens
gttttgagaacttttttttatcatcccaaattagaattct

SEQ ID NO: 47187 - DNA, 40 bp, Homo sapiens
agaattctaatttgggatgataaaaaaaagttctcaaaac

SEQ ID NO: 47188 - DNA, 40 bp, Homo sapiens
ttttgagaacttttttttatcatcccaaattagaattctg

SEQ ID NO: 47189 - DNA, 40 bp, Homo sapiens
cagaattctaatttgggatgataaaaaaaagttctcaaaa

SEQ ID NO: 47190 - DNA, 40 bp, Homo sapiens
tttgagaacttttttttatcatcccaaattagaattctgt

SEQ ID NO: 47191 - DNA, 40 bp, Homo sapiens
acagaattctaatttgggatgataaaaaaaagttctcaaa

SEQ ID NO: 47192 - DNA, 40 bp, Homo sapiens
ttgagaacttttttttatcatcccaaattagaattctgta

SEQ ID NO: 47193 - DNA, 40 bp, Homo sapiens
tacagaattctaatttgggatgataaaaaaaagttctcaa

SEQ ID NO: 47194 - DNA, 40 bp, Homo sapiens
tgagaacttttttttatcatcccaaattagaattctgtac

SEQ ID NO: 47195 - DNA, 40 bp, Homo sapiens
gtacagaattctaatttgggatgataaaaaaaagttctca

SEQ ID NO: 47196 - DNA, 40 bp, Homo sapiens
gagaacttttttttatcatcccaaattagaattctgtacc

SEQ ID NO: 47197 - DNA, 40 bp, Homo sapiens
ggtacagaattctaatttgggatgataaaaaaaagttctc

SEQ ID NO: 47198 - DNA, 40 bp, Homo sapiens
agaacttttttttatcatcccaaattagaattctgtacct

SEQ ID NO: 47199 - DNA, 40 bp, Homo sapiens
aggtacagaattctaatttgggatgataaaaaaaagttct

SEQ ID NO: 47200 - DNA, 40 bp, Homo sapiens
gaacttttttttatcatcccaaattagaattctgtacctg

SEQ ID NO: 47201 - DNA, 40 bp, Homo sapiens
caggtacagaattctaatttgggatgataaaaaaaagttc

SEQ ID NO: 47202 - DNA, 40 bp, Homo sapiens
aacttttttttatcatcccaaattagaattctgtacctgt

SEQ ID NO: 47203 - DNA, 40 bp, Homo sapiens
acaggtacagaattctaatttgggatgataaaaaaaagtt

SEQ ID NO: 47204 - DNA, 40 bp, Homo sapiens
acttttttttatcatcccaaattagaattctgtacctgtc

SEQ ID NO: 47205 - DNA, 40 bp, Homo sapiens
gacaggtacagaattctaatttgggatgataaaaaaaagt

SEQ ID NO: 47206 - DNA, 40 bp, Homo sapiens
cttttttttatcatcccaaattagaattctgtacctgtca

SEQ ID NO: 47207 - DNA, 40 bp, Homo sapiens
tgacaggtacagaattctaatttgggatgataaaaaaaag

SEQ ID NO: 47208 - DNA, 40 bp, Homo sapiens
ttttttttatcatcccaaattagaattctgtacctgtcaa

SEQ ID NO: 47209 - DNA, 40 bp, Homo sapiens
ttgacaggtacagaattctaatttgggatgataaaaaaaa

SEQ ID NO: 47210 - DNA, 40 bp, Homo sapiens
tttttttatcatcccaaattagaattctgtacctgtcaaa

SEQ ID NO: 47211 - DNA, 40 bp, Homo sapiens
tttgacaggtacagaattctaatttgggatgataaaaaaa

SEQ ID NO: 47212 - DNA, 40 bp, Homo sapiens
ttttttatcatcccaaattagaattctgtacctgtcaaat

SEQ ID NO: 47213 - DNA, 40 bp, Homo sapiens
atttgacaggtacagaattctaatttgggatgataaaaaa

SEQ ID NO: 47214 - DNA, 40 bp, Homo sapiens
tttttatcatcccaaattagaattctgtacctgtcaaata

SEQ ID NO: 47215 - DNA, 40 bp, Homo sapiens
tatttgacaggtacagaattctaatttgggatgataaaaa

SEQ ID NO: 47216 - DNA, 40 bp, Homo sapiens
ttttatcatcccaaattagaattctgtacctgtcaaatag

SEQ ID NO: 47217 - DNA, 40 bp, Homo sapiens
ctatttgacaggtacagaattctaatttgggatgataaaa

SEQ ID NO: 47218 - DNA, 40 bp, Homo sapiens
tttatcatcccaaattagaattctgtacctgtcaaatagt

SEQ ID NO: 47219 - DNA, 40 bp, Homo sapiens
actatttgacaggtacagaattctaatttgggatgataaa

SEQ ID NO: 47220 - DNA, 40 bp, Homo sapiens
ttatcatcccaaattagaattctgtacctgtcaaatagtc

SEQ ID NO: 47221 - DNA, 40 bp, Homo sapiens
gactatttgacaggtacagaattctaatttgggatgataa

SEQ ID NO: 47222 - DNA, 40 bp, Homo sapiens
tatcatcccaaattagaattctgtacctgtcaaatagtcc

SEQ ID NO: 47223 - DNA, 40 bp, Homo sapiens
ggactatttgacaggtacagaattctaatttgggatgata

SEQ ID NO: 47224 - DNA, 40 bp, Homo sapiens
atcatcccaaattagaattctgtacctgtcaaatagtccc

SEQ ID NO: 47225 - DNA, 40 bp, Homo sapiens
gggactatttgacaggtacagaattctaatttgggatgat

SEQ ID NO: 47226 - DNA, 40 bp, Homo sapiens
tcatcccaaattagaattctgtacctgtcaaatagtcccc

SEQ ID NO: 47227 - DNA, 40 bp, Homo sapiens
ggggactatttgacaggtacagaattctaatttgggatga

SEQ ID NO: 47228 - DNA, 40 bp, Homo sapiens
catcccaaattagaattctgtacctgtcaaatagtcccca

SEQ ID NO: 47229 - DNA, 40 bp, Homo sapiens
tggggactatttgacaggtacagaattctaatttgggatg

SEQ ID NO: 47230 - DNA, 40 bp, Homo sapiens
atcccaaattagaattctgtacctgtcaaatagtccccag

SEQ ID NO: 47231 - DNA, 40 bp, Homo sapiens
ctggggactatttgacaggtacagaattctaatttgggat

SEQ ID NO: 47232 - DNA, 40 bp, Homo sapiens
tcccaaattagaattctgtacctgtcaaatagtccccagt

SEQ ID NO: 47233 - DNA, 40 bp, Homo sapiens
actggggactatttgacaggtacagaattctaatttggga

SEQ ID NO: 47234 - DNA, 40 bp, Homo sapiens
cccaaattagaattctgtacctgtcaaatagtccccagta

SEQ ID NO: 47235 - DNA, 40 bp, Homo sapiens
tactggggactatttgacaggtacagaattctaatttggg

SEQ ID NO: 47236 - DNA, 40 bp, Homo sapiens
ccaaattagaattctgtacctgtcaaatagtccccagtaa

SEQ ID NO: 47237 - DNA, 40 bp, Homo sapiens
ttactggggactatttgacaggtacagaattctaatttgg

SEQ ID NO: 47238 - DNA, 40 bp, Homo sapiens
caaattagaattctgtacctgtcaaatagtccccagtaat

SEQ ID NO: 47239 - DNA, 40 bp, Homo sapiens
attactggggactatttgacaggtacagaattctaatttg

SEQ ID NO: 47240 - DNA, 40 bp, Homo sapiens
aaattagaattctgtacctgtcaaatagtccccagtaatc

SEQ ID NO: 47241 - DNA, 40 bp, Homo sapiens
gattactggggactatttgacaggtacagaattctaattt

SEQ ID NO: 47242 - DNA, 40 bp, Homo sapiens
aattagaattctgtacctgtcaaatagtccccagtaatcc

SEQ ID NO: 47243 - DNA, 40 bp, Homo sapiens
ggattactggggactatttgacaggtacagaattctaatt

SEQ ID NO: 47244 - DNA, 40 bp, Homo sapiens
attagaattctgtacctgtcaaatagtccccagtaatcct

SEQ ID NO: 47245 - DNA, 40 bp, Homo sapiens
aggattactggggactatttgacaggtacagaattctaat

SEQ ID NO: 47246 - DNA, 40 bp, Homo sapiens
ttagaattctgtacctgtcaaatagtccccagtaatcctc

SEQ ID NO: 47247 - DNA, 40 bp, Homo sapiens
gaggattactggggactatttgacaggtacagaattctaa

SEQ ID NO: 47248 - DNA, 40 bp, Homo sapiens
tagaattctgtacctgtcaaatagtccccagtaatcctcc

SEQ ID NO: 47249 - DNA, 40 bp, Homo sapiens
ggaggattactggggactatttgacaggtacagaattcta

SEQ ID NO: 47250 - DNA, 40 bp, Homo sapiens
agaattctgtacctgtcaaatagtccccagtaatcctccc

SEQ ID NO: 47251 - DNA, 40 bp, Homo sapiens
gggaggattactggggactatttgacaggtacagaattct

SEQ ID NO: 47252 - DNA, 40 bp, Homo sapiens
gaattctgtacctgtcaaatagtccccagtaatcctccct

SEQ ID NO: 47253 - DNA, 40 bp, Homo sapiens
agggaggattactggggactatttgacaggtacagaattc

SEQ ID NO: 47254 - DNA, 40 bp, Homo sapiens
aattctgtacctgtcaaatagtccccagtaatcctccctc

SEQ ID NO: 47255 - DNA, 40 bp, Homo sapiens
gagggaggattactggggactatttgacaggtacagaatt

SEQ ID NO: 47256 - DNA, 40 bp, Homo sapiens
attctgtacctgtcaaatagtccccagtaatcctccctcc

SEQ ID NO: 47257 - DNA, 40 bp, Homo sapiens
ggagggaggattactggggactatttgacaggtacagaat

SEQ ID NO: 47258 - DNA, 40 bp, Homo sapiens
ttctgtacctgtcaaatagtccccagtaatcctccctccc

SEQ ID NO: 47259 - DNA, 40 bp, Homo sapiens
gggagggaggattactggggactatttgacaggtacagaa

SEQ ID NO: 47260 - DNA, 40 bp, Homo sapiens
tctgtacctgtcaaatagtccccagtaatcctccctcccc

SEQ ID NO: 47261 - DNA, 40 bp, Homo sapiens
ggggagggaggattactggggactatttgacaggtacaga

SEQ ID NO: 47262 - DNA, 40 bp, Homo sapiens
ctgtacctgtcaaatagtccccagtaatcctccctccccc

SEQ ID NO: 47263 - DNA, 40 bp, Homo sapiens
gggggagggaggattactggggactatttgacaggtacag

SEQ ID NO: 47264 - DNA, 40 bp, Homo sapiens
tgtacctgtcaaatagtccccagtaatcctccctccccca

SEQ ID NO: 47265 - DNA, 40 bp, Homo sapiens
tgggggagggaggattactggggactatttgacaggtaca

SEQ ID NO: 47266 - DNA, 40 bp, Homo sapiens
gtacctgtcaaatagtccccagtaatcctccctcccccag

SEQ ID NO: 47267 - DNA, 40 bp, Homo sapiens
ctgggggagggaggattactggggactatttgacaggtac

SEQ ID NO: 47268 - DNA, 40 bp, Homo sapiens
tacctgtcaaatagtccccagtaatcctccctcccccagc

SEQ ID NO: 47269 - DNA, 40 bp, Homo sapiens
gctgggggagggaggattactggggactatttgacaggta

SEQ ID NO: 47270 - DNA, 40 bp, Homo sapiens
acctgtcaaatagtccccagtaatcctccctcccccagcc

SEQ ID NO: 47271 - DNA, 40 bp, Homo sapiens
ggctgggggagggaggattactggggactatttgacaggt

SEQ ID NO: 47272 - DNA, 40 bp, Homo sapiens
cctgtcaaatagtccccagtaatcctccctcccccagccc

SEQ ID NO: 47273 - DNA, 40 bp, Homo sapiens
gggctgggggagggaggattactggggactatttgacagg

SEQ ID NO: 47274 - DNA, 40 bp, Homo sapiens
ctgtcaaatagtccccagtaatcctccctcccccagcccc

SEQ ID NO: 47275 - DNA, 40 bp, Homo sapiens
ggggctgggggagggaggattactggggactatttgacag

SEQ ID NO: 47276 - DNA, 40 bp, Homo sapiens
tgtcaaatagtccccagtaatcctccctcccccagcccct

SEQ ID NO: 47277 - DNA, 40 bp, Homo sapiens
aggggctgggggagggaggattactggggactatttgaca

SEQ ID NO: 47278 - DNA, 40 bp, Homo sapiens
gtcaaatagtccccagtaatcctccctcccccagcccctg

SEQ ID NO: 47279 - DNA, 40 bp, Homo sapiens
caggggctgggggagggaggattactggggactatttgac

SEQ ID NO: 47280 - DNA, 40 bp, Homo sapiens
tcaaatagtccccagtaatcctccctcccccagcccctgg

SEQ ID NO: 47281 - DNA, 40 bp, Homo sapiens
ccaggggctgggggagggaggattactggggactatttga

SEQ ID NO: 47282 - DNA, 40 bp, Homo sapiens
caaatagtccccagtaatcctccctcccccagcccctggt

SEQ ID NO: 47283 - DNA, 40 bp, Homo sapiens
accaggggctgggggagggaggattactggggactatttg

SEQ ID NO: 47284 - DNA, 40 bp, Homo sapiens
aaatagtccccagtaatcctccctcccccagcccctggta

SEQ ID NO: 47285 - DNA, 40 bp, Homo sapiens
taccaggggctgggggagggaggattactggggactattt

SEQ ID NO: 47286 - DNA, 40 bp, Homo sapiens
aatagtccccagtaatcctccctcccccagcccctggtaa

SEQ ID NO: 47287 - DNA, 40 bp, Homo sapiens
ttaccaggggctgggggagggaggattactggggactatt

SEQ ID NO: 47288 - DNA, 40 bp, Homo sapiens
atagtccccagtaatcctccctcccccagcccctggtaat

SEQ ID NO: 47289 - DNA, 40 bp, Homo sapiens
attaccaggggctgggggagggaggattactggggactat

SEQ ID NO: 47290 - DNA, 40 bp, Homo sapiens
tagtccccagtaatcctccctcccccagcccctggtaatc

SEQ ID NO: 47291 - DNA, 40 bp, Homo sapiens
gattaccaggggctgggggagggaggattactggggacta

SEQ ID NO: 47292 - DNA, 40 bp, Homo sapiens
agtccccagtaatcctccctcccccagcccctggtaatct

SEQ ID NO: 47293 - DNA, 40 bp, Homo sapiens
agattaccaggggctgggggagggaggattactggggact

SEQ ID NO: 47294 - DNA, 40 bp, Homo sapiens
gtccccagtaatcctccctcccccagcccctggtaatctg

SEQ ID NO: 47295 - DNA, 40 bp, Homo sapiens
cagattaccaggggctgggggagggaggattactggggac

SEQ ID NO: 47296 - DNA, 40 bp, Homo sapiens
tccccagtaatcctccctcccccagcccctggtaatctgt

SEQ ID NO: 47297 - DNA, 40 bp, Homo sapiens
acagattaccaggggctgggggagggaggattactgggga

SEQ ID NO: 47298 - DNA, 40 bp, Homo sapiens
ccccagtaatcctccctcccccagcccctggtaatctgta

SEQ ID NO: 47299 - DNA, 40 bp, Homo sapiens
tacagattaccaggggctgggggagggaggattactgggg

SEQ ID NO: 47300 - DNA, 40 bp, Homo sapiens
cccagtaatcctccctcccccagcccctggtaatctgtag

SEQ ID NO: 47301 - DNA, 40 bp, Homo sapiens
ctacagattaccaggggctgggggagggaggattactggg

SEQ ID NO: 47302 - DNA, 40 bp, Homo sapiens
ccagtaatcctccctcccccagcccctggtaatctgtagt

SEQ ID NO: 47303 - DNA, 40 bp, Homo sapiens
actacagattaccaggggctgggggagggaggattactgg

SEQ ID NO: 47304 - DNA, 40 bp, Homo sapiens
cagtaatcctccctcccccagcccctggtaatctgtagtc

SEQ ID NO: 47305 - DNA, 40 bp, Homo sapiens
gactacagattaccaggggctgggggagggaggattactg

SEQ ID NO: 47306 - DNA, 40 bp, Homo sapiens
agtaatcctccctcccccagcccctggtaatctgtagtct

SEQ ID NO: 47307 - DNA, 40 bp, Homo sapiens
agactacagattaccaggggctgggggagggaggattact

SEQ ID NO: 47308 - DNA, 40 bp, Homo sapiens
gtaatcctccctcccccagcccctggtaatctgtagtcta

SEQ ID NO: 47309 - DNA, 40 bp, Homo sapiens
tagactacagattaccaggggctgggggagggaggattac

SEQ ID NO: 47310 - DNA, 40 bp, Homo sapiens
taatcctccctcccccagcccctggtaatctgtagtctac

SEQ ID NO: 47311 - DNA, 40 bp, Homo sapiens
gtagactacagattaccaggggctgggggagggaggatta

SEQ ID NO: 47312 - DNA, 40 bp, Homo sapiens
aatcctccctcccccagcccctggtaatctgtagtctact

SEQ ID NO: 47313 - DNA, 40 bp, Homo sapiens
agtagactacagattaccaggggctgggggagggaggatt

SEQ ID NO: 47314 - DNA, 40 bp, Homo sapiens
atcctccctcccccagcccctggtaatctgtagtctactt

SEQ ID NO: 47315 - DNA, 40 bp, Homo sapiens
aagtagactacagattaccaggggctgggggagggaggat

SEQ ID NO: 47316 - DNA, 40 bp, Homo sapiens
tcctccctcccccagcccctggtaatctgtagtctacttt

SEQ ID NO: 47317 - DNA, 40 bp, Homo sapiens
aaagtagactacagattaccaggggctgggggagggagga

SEQ ID NO: 47318 - DNA, 40 bp, Homo sapiens
cctccctcccccagcccctggtaatctgtagtctactttt

SEQ ID NO: 47319 - DNA, 40 bp, Homo sapiens
aaaagtagactacagattaccaggggctgggggagggagg

SEQ ID NO: 47320 - DNA, 40 bp, Homo sapiens
ctccctcccccagcccctggtaatctgtagtctacttttc

SEQ ID NO: 47321 - DNA, 40 bp, Homo sapiens
gaaaagtagactacagattaccaggggctgggggagggag

SEQ ID NO: 47322 - DNA, 40 bp, Homo sapiens
tccctcccccagcccctggtaatctgtagtctacttttcg

SEQ ID NO: 47323 - DNA, 40 bp, Homo sapiens
cgaaaagtagactacagattaccaggggctgggggaggga

SEQ ID NO: 47324 - DNA, 40 bp, Homo sapiens
ccctcccccagcccctggtaatctgtagtctacttttcgt

SEQ ID NO: 47325 - DNA, 40 bp, Homo sapiens
acgaaaagtagactacagattaccaggggctgggggaggg

SEQ ID NO: 47326 - DNA, 40 bp, Homo sapiens
cctcccccagcccctggtaatctgtagtctacttttcgtc

SEQ ID NO: 47327 - DNA, 40 bp, Homo sapiens
gacgaaaagtagactacagattaccaggggctgggggagg

SEQ ID NO: 47328 - DNA, 40 bp, Homo sapiens
ctcccccagcccctggtaatctgtagtctacttttcgtct

SEQ ID NO: 47329 - DNA, 40 bp, Homo sapiens
agacgaaaagtagactacagattaccaggggctgggggag

SEQ ID NO: 47330 - DNA, 40 bp, Homo sapiens
tcccccagcccctggtaatctgtagtctacttttcgtctt

SEQ ID NO: 47331 - DNA, 40 bp, Homo sapiens
aagacgaaaagtagactacagattaccaggggctggggga

SEQ ID NO: 47332 - DNA, 40 bp, Homo sapiens
cccccagcccctggtaatctgtagtctacttttcgtcttt

SEQ ID NO: 47333 - DNA, 40 bp, Homo sapiens
aaagacgaaaagtagactacagattaccaggggctggggg

SEQ ID NO: 47334 - DNA, 40 bp, Homo sapiens
ccccagcccctggtaatctgtagtctacttttcgtctttt

SEQ ID NO: 47335 - DNA, 40 bp, Homo sapiens
aaaagacgaaaagtagactacagattaccaggggctgggg

SEQ ID NO: 47336 - DNA, 40 bp, Homo sapiens
cccagcccctggtaatctgtagtctacttttcgtcttttt

SEQ ID NO: 47337 - DNA, 40 bp, Homo sapiens
aaaaagacgaaaagtagactacagattaccaggggctggg

SEQ ID NO: 47338 - DNA, 40 bp, Homo sapiens
ccagcccctggtaatctgtagtctacttttcgtctttttg

SEQ ID NO: 47339 - DNA, 40 bp, Homo sapiens
caaaaagacgaaaagtagactacagattaccaggggctgg

SEQ ID NO: 47340 - DNA, 40 bp, Homo sapiens
cagcccctggtaatctgtagtctacttttcgtctttttga

SEQ ID NO: 47341 - DNA, 40 bp, Homo sapiens
tcaaaaagacgaaaagtagactacagattaccaggggctg

SEQ ID NO: 47342 - DNA, 40 bp, Homo sapiens
agcccctggtaatctgtagtctacttttcgtctttttgaa

SEQ ID NO: 47343 - DNA, 40 bp, Homo sapiens
ttcaaaaagacgaaaagtagactacagattaccaggggct

SEQ ID NO: 47344 - DNA, 40 bp, Homo sapiens
gcccctggtaatctgtagtctacttttcgtctttttgaat

SEQ ID NO: 47345 - DNA, 40 bp, Homo sapiens
attcaaaaagacgaaaagtagactacagattaccaggggc

SEQ ID NO: 47346 - DNA, 40 bp, Homo sapiens
cccctggtaatctgtagtctacttttcgtctttttgaatt

SEQ ID NO: 47347 - DNA, 40 bp, Homo sapiens
aattcaaaaagacgaaaagtagactacagattaccagggg

SEQ ID NO: 47348 - DNA, 40 bp, Homo sapiens
ccctggtaatctgtagtctacttttcgtctttttgaattt

SEQ ID NO: 47349 - DNA, 40 bp, Homo sapiens
aaattcaaaaagacgaaaagtagactacagattaccaggg

SEQ ID NO: 47350 - DNA, 40 bp, Homo sapiens
cctggtaatctgtagtctacttttcgtctttttgaatttg

SEQ ID NO: 47351 - DNA, 40 bp, Homo sapiens
caaattcaaaaagacgaaaagtagactacagattaccagg

SEQ ID NO: 47352 - DNA, 40 bp, Homo sapiens
ctggtaatctgtagtctacttttcgtctttttgaatttgc

SEQ ID NO: 47353 - DNA, 40 bp, Homo sapiens
gcaaattcaaaaagacgaaaagtagactacagattaccag

SEQ ID NO: 47354 - DNA, 40 bp, Homo sapiens
tggtaatctgtagtctacttttcgtctttttgaatttgcc

SEQ ID NO: 47355 - DNA, 40 bp, Homo sapiens
ggcaaattcaaaaagacgaaaagtagactacagattacca

SEQ ID NO: 47356 - DNA, 40 bp, Homo sapiens
ggtaatctgtagtctacttttcgtctttttgaatttgcct

SEQ ID NO: 47357 - DNA, 40 bp, Homo sapiens
aggcaaattcaaaaagacgaaaagtagactacagattacc

SEQ ID NO: 47358 - DNA, 40 bp, Homo sapiens
gtaatctgtagtctacttttcgtctttttgaatttgccta

SEQ ID NO: 47359 - DNA, 40 bp, Homo sapiens
taggcaaattcaaaaagacgaaaagtagactacagattac

SEQ ID NO: 47360 - DNA, 40 bp, Homo sapiens
taatctgtagtctacttttcgtctttttgaatttgcctat

SEQ ID NO: 47361 - DNA, 40 bp, Homo sapiens
ataggcaaattcaaaaagacgaaaagtagactacagatta

SEQ ID NO: 47362 - DNA, 40 bp, Homo sapiens
aatctgtagtctacttttcgtctttttgaatttgcctatt

SEQ ID NO: 47363 - DNA, 40 bp, Homo sapiens
aataggcaaattcaaaaagacgaaaagtagactacagatt

SEQ ID NO: 47364 - DNA, 40 bp, Homo sapiens
atctgtagtctacttttcgtctttttgaatttgcctattt

SEQ ID NO: 47365 - DNA, 40 bp, Homo sapiens
aaataggcaaattcaaaaagacgaaaagtagactacagat

SEQ ID NO: 47366 - DNA, 40 bp, Homo sapiens
tctgtagtctacttttcgtctttttgaatttgcctatttt

SEQ ID NO: 47367 - DNA, 40 bp, Homo sapiens
aaaataggcaaattcaaaaagacgaaaagtagactacaga

SEQ ID NO: 47368 - DNA, 40 bp, Homo sapiens
ctgtagtctacttttcgtctttttgaatttgcctatttta

SEQ ID NO: 47369 - DNA, 40 bp, Homo sapiens
taaaataggcaaattcaaaaagacgaaaagtagactacag

SEQ ID NO: 47370 - DNA, 40 bp, Homo sapiens
tgtagtctacttttcgtctttttgaatttgcctattttag

SEQ ID NO: 47371 - DNA, 40 bp, Homo sapiens
ctaaaataggcaaattcaaaaagacgaaaagtagactaca

SEQ ID NO: 47372 - DNA, 40 bp, Homo sapiens
gtagtctacttttcgtctttttgaatttgcctattttagg

SEQ ID NO: 47373 - DNA, 40 bp, Homo sapiens
cctaaaataggcaaattcaaaaagacgaaaagtagactac

SEQ ID NO: 47374 - DNA, 40 bp, Homo sapiens
tagtctacttttcgtctttttgaatttgcctattttaggt

SEQ ID NO: 47375 - DNA, 40 bp, Homo sapiens
acctaaaataggcaaattcaaaaagacgaaaagtagacta

SEQ ID NO: 47376 - DNA, 40 bp, Homo sapiens
agtctacttttcgtctttttgaatttgcctattttaggtt

SEQ ID NO: 47377 - DNA, 40 bp, Homo sapiens
aacctaaaataggcaaattcaaaaagacgaaaagtagact

SEQ ID NO: 47378 - DNA, 40 bp, Homo sapiens
gtctacttttcgtctttttgaatttgcctattttaggttc

SEQ ID NO: 47379 - DNA, 40 bp, Homo sapiens
gaacctaaaataggcaaattcaaaaagacgaaaagtagac

SEQ ID NO: 47380 - DNA, 40 bp, Homo sapiens
tctacttttcgtctttttgaatttgcctattttaggttcc

SEQ ID NO: 47381 - DNA, 40 bp, Homo sapiens
ggaacctaaaataggcaaattcaaaaagacgaaaagtaga

SEQ ID NO: 47382 - DNA, 40 bp, Homo sapiens
ctacttttcgtctttttgaatttgcctattttaggttcct

SEQ ID NO: 47383 - DNA, 40 bp, Homo sapiens
aggaacctaaaataggcaaattcaaaaagacgaaaagtag

SEQ ID NO: 47384 - DNA, 40 bp, Homo sapiens
tacttttcgtctttttgaatttgcctattttaggttcctc

SEQ ID NO: 47385 - DNA, 40 bp, Homo sapiens
gaggaacctaaaataggcaaattcaaaaagacgaaaagta

SEQ ID NO: 47386 - DNA, 40 bp, Homo sapiens
acttttcgtctttttgaatttgcctattttaggttcctca

SEQ ID NO: 47387 - DNA, 40 bp, Homo sapiens
tgaggaacctaaaataggcaaattcaaaaagacgaaaagt

SEQ ID NO: 47388 - DNA, 40 bp, Homo sapiens
cttttcgtctttttgaatttgcctattttaggttcctcat

SEQ ID NO: 47389 - DNA, 40 bp, Homo sapiens
atgaggaacctaaaataggcaaattcaaaaagacgaaaag

SEQ ID NO: 47390 - DNA, 40 bp, Homo sapiens
ttttcgtctttttgaatttgcctattttaggttcctcata

SEQ ID NO: 47391 - DNA, 40 bp, Homo sapiens
tatgaggaacctaaaataggcaaattcaaaaagacgaaaa

SEQ ID NO: 47392 - DNA, 40 bp, Homo sapiens
tttcgtctttttgaatttgcctattttaggttcctcatat

SEQ ID NO: 47393 - DNA, 40 bp, Homo sapiens
atatgaggaacctaaaataggcaaattcaaaaagacgaaa

SEQ ID NO: 47394 - DNA, 40 bp, Homo sapiens
ttcgtctttttgaatttgcctattttaggttcctcatata

SEQ ID NO: 47395 - DNA, 40 bp, Homo sapiens
tatatgaggaacctaaaataggcaaattcaaaaagacgaa

SEQ ID NO: 47396 - DNA, 40 bp, Homo sapiens
tcgtctttttgaatttgcctattttaggttcctcatataa

SEQ ID NO: 47397 - DNA, 40 bp, Homo sapiens
ttatatgaggaacctaaaataggcaaattcaaaaagacga

SEQ ID NO: 47398 - DNA, 40 bp, Homo sapiens
cgtctttttgaatttgcctattttaggttcctcatataag

SEQ ID NO: 47399 - DNA, 40 bp, Homo sapiens
cttatatgaggaacctaaaataggcaaattcaaaaagacg

SEQ ID NO: 47400 - DNA, 40 bp, Homo sapiens
gtctttttgaatttgcctattttaggttcctcatataagt

SEQ ID NO: 47401 - DNA, 40 bp, Homo sapiens
acttatatgaggaacctaaaataggcaaattcaaaaagac

SEQ ID NO: 47402 - DNA, 40 bp, Homo sapiens
tctttttgaatttgcctattttaggttcctcatataagtg

SEQ ID NO: 47403 - DNA, 40 bp, Homo sapiens
cacttatatgaggaacctaaaataggcaaattcaaaaaga

SEQ ID NO: 47404 - DNA, 40 bp, Homo sapiens
ctttttgaatttgcctattttaggttcctcatataagtgg

SEQ ID NO: 47405 - DNA, 40 bp, Homo sapiens
ccacttatatgaggaacctaaaataggcaaattcaaaaag

SEQ ID NO: 47406 - DNA, 40 bp, Homo sapiens
tttttgaatttgcctattttaggttcctcatataagtgga

SEQ ID NO: 47407 - DNA, 40 bp, Homo sapiens
tccacttatatgaggaacctaaaataggcaaattcaaaaa

SEQ ID NO: 47408 - DNA, 40 bp, Homo sapiens
ttttgaatttgcctattttaggttcctcatataagtggaa

SEQ ID NO: 47409 - DNA, 40 bp, Homo sapiens
ttccacttatatgaggaacctaaaataggcaaattcaaaa

SEQ ID NO: 47410 - DNA, 40 bp, Homo sapiens
tttgaatttgcctattttaggttcctcatataagtggaat

SEQ ID NO: 47411 - DNA, 40 bp, Homo sapiens
attccacttatatgaggaacctaaaataggcaaattcaaa

SEQ ID NO: 47412 - DNA, 40 bp, Homo sapiens
ttgaatttgcctattttaggttcctcatataagtggaatt

SEQ ID NO: 47413 - DNA, 40 bp, Homo sapiens
aattccacttatatgaggaacctaaaataggcaaattcaa

SEQ ID NO: 47414 - DNA, 40 bp, Homo sapiens
tgaatttgcctattttaggttcctcatataagtggaatta

SEQ ID NO: 47415 - DNA, 40 bp, Homo sapiens
taattccacttatatgaggaacctaaaataggcaaattca

SEQ ID NO: 47416 - DNA, 40 bp, Homo sapiens
gaatttgcctattttaggttcctcatataagtggaattat

SEQ ID NO: 47417 - DNA, 40 bp, Homo sapiens
ataattccacttatatgaggaacctaaaataggcaaattc

SEQ ID NO: 47418 - DNA, 40 bp, Homo sapiens
aatttgcctattttaggttcctcatataagtggaattatg

SEQ ID NO: 47419 - DNA, 40 bp, Homo sapiens
cataattccacttatatgaggaacctaaaataggcaaatt

SEQ ID NO: 47420 - DNA, 40 bp, Homo sapiens
atttgcctattttaggttcctcatataagtggaattatgt

SEQ ID NO: 47421 - DNA, 40 bp, Homo sapiens
acataattccacttatatgaggaacctaaaataggcaaat

SEQ ID NO: 47422 - DNA, 40 bp, Homo sapiens
tttgcctattttaggttcctcatataagtggaattatgtg

SEQ ID NO: 47423 - DNA, 40 bp, Homo sapiens
cacataattccacttatatgaggaacctaaaataggcaaa

SEQ ID NO: 47424 - DNA, 40 bp, Homo sapiens
ttgcctattttaggttcctcatataagtggaattatgtgg

SEQ ID NO: 47425 - DNA, 40 bp, Homo sapiens
ccacataattccacttatatgaggaacctaaaataggcaa

SEQ ID NO: 47426 - DNA, 40 bp, Homo sapiens
tgcctattttaggttcctcatataagtggaattatgtggt

SEQ ID NO: 47427 - DNA, 40 bp, Homo sapiens
accacataattccacttatatgaggaacctaaaataggca

SEQ ID NO: 47428 - DNA, 40 bp, Homo sapiens
gcctattttaggttcctcatataagtggaattatgtggta

SEQ ID NO: 47429 - DNA, 40 bp, Homo sapiens
taccacataattccacttatatgaggaacctaaaataggc

SEQ ID NO: 47430 - DNA, 40 bp, Homo sapiens
cctattttaggttcctcatataagtggaattatgtggtat

SEQ ID NO: 47431 - DNA, 40 bp, Homo sapiens
ataccacataattccacttatatgaggaacctaaaatagg

SEQ ID NO: 47432 - DNA, 40 bp, Homo sapiens
ctattttaggttcctcatataagtggaattatgtggtatt

SEQ ID NO: 47433 - DNA, 40 bp, Homo sapiens
aataccacataattccacttatatgaggaacctaaaatag

SEQ ID NO: 47434 - DNA, 40 bp, Homo sapiens
tattttaggttcctcatataagtggaattatgtggtattt

SEQ ID NO: 47435 - DNA, 40 bp, Homo sapiens
aaataccacataattccacttatatgaggaacctaaaata

SEQ ID NO: 47436 - DNA, 40 bp, Homo sapiens
attttaggttcctcatataagtggaattatgtggtatttg

SEQ ID NO: 47437 - DNA, 40 bp, Homo sapiens
caaataccacataattccacttatatgaggaacctaaaat

SEQ ID NO: 47438 - DNA, 40 bp, Homo sapiens
ttttaggttcctcatataagtggaattatgtggtatttgt

SEQ ID NO: 47439 - DNA, 40 bp, Homo sapiens
acaaataccacataattccacttatatgaggaacctaaaa

SEQ ID NO: 47440 - DNA, 40 bp, Homo sapiens
tttaggttcctcatataagtggaattatgtggtatttgtc

SEQ ID NO: 47441 - DNA, 40 bp, Homo sapiens
gacaaataccacataattccacttatatgaggaacctaaa

SEQ ID NO: 47442 - DNA, 40 bp, Homo sapiens
ttaggttcctcatataagtggaattatgtggtatttgtcc

SEQ ID NO: 47443 - DNA, 40 bp, Homo sapiens
ggacaaataccacataattccacttatatgaggaacctaa

SEQ ID NO: 47444 - DNA, 40 bp, Homo sapiens
taggttcctcatataagtggaattatgtggtatttgtcct

SEQ ID NO: 47445 - DNA, 40 bp, Homo sapiens
aggacaaataccacataattccacttatatgaggaaccta

SEQ ID NO: 47446 - DNA, 40 bp, Homo sapiens
aggttcctcatataagtggaattatgtggtatttgtcctt

SEQ ID NO: 47447 - DNA, 40 bp, Homo sapiens
aaggacaaataccacataattccacttatatgaggaacct

SEQ ID NO: 47448 - DNA, 40 bp, Homo sapiens
ggttcctcatataagtggaattatgtggtatttgtccttt

SEQ ID NO: 47449 - DNA, 40 bp, Homo sapiens
aaaggacaaataccacataattccacttatatgaggaacc

SEQ ID NO: 47450 - DNA, 40 bp, Homo sapiens
gttcctcatataagtggaattatgtggtatttgtcctttt

SEQ ID NO: 47451 - DNA, 40 bp, Homo sapiens
aaaaggacaaataccacataattccacttatatgaggaac

SEQ ID NO: 47452 - DNA, 40 bp, Homo sapiens
ttcctcatataagtggaattatgtggtatttgtccttttg

SEQ ID NO: 47453 - DNA, 40 bp, Homo sapiens
caaaaggacaaataccacataattccacttatatgaggaa

SEQ ID NO: 47454 - DNA, 40 bp, Homo sapiens
tcctcatataagtggaattatgtggtatttgtccttttgt

SEQ ID NO: 47455 - DNA, 40 bp, Homo sapiens
acaaaaggacaaataccacataattccacttatatgagga

SEQ ID NO: 47456 - DNA, 40 bp, Homo sapiens
cctcatataagtggaattatgtggtatttgtccttttgtg

SEQ ID NO: 47457 - DNA, 40 bp, Homo sapiens
cacaaaaggacaaataccacataattccacttatatgagg

SEQ ID NO: 47458 - DNA, 40 bp, Homo sapiens
ctcatataagtggaattatgtggtatttgtccttttgtgt

SEQ ID NO: 47459 - DNA, 40 bp, Homo sapiens
acacaaaaggacaaataccacataattccacttatatgag

SEQ ID NO: 47460 - DNA, 40 bp, Homo sapiens
tcatataagtggaattatgtggtatttgtccttttgtgtt

SEQ ID NO: 47461 - DNA, 40 bp, Homo sapiens
aacacaaaaggacaaataccacataattccacttatatga

SEQ ID NO: 47462 - DNA, 40 bp, Homo sapiens
catataagtggaattatgtggtatttgtccttttgtgttg

SEQ ID NO: 47463 - DNA, 40 bp, Homo sapiens
caacacaaaaggacaaataccacataattccacttatatg

SEQ ID NO: 47464 - DNA, 40 bp, Homo sapiens
atataagtggaattatgtggtatttgtccttttgtgttgg

SEQ ID NO: 47465 - DNA, 40 bp, Homo sapiens
ccaacacaaaaggacaaataccacataattccacttatat

SEQ ID NO: 47466 - DNA, 40 bp, Homo sapiens
tataagtggaattatgtggtatttgtccttttgtgttggc

SEQ ID NO: 47467 - DNA, 40 bp, Homo sapiens
gccaacacaaaaggacaaataccacataattccacttata

SEQ ID NO: 47468 - DNA, 40 bp, Homo sapiens
ataagtggaattatgtggtatttgtccttttgtgttggct

SEQ ID NO: 47469 - DNA, 40 bp, Homo sapiens
agccaacacaaaaggacaaataccacataattccacttat

SEQ ID NO: 47470 - DNA, 40 bp, Homo sapiens
taagtggaattatgtggtatttgtccttttgtgttggctt

SEQ ID NO: 47471 - DNA, 40 bp, Homo sapiens
aagccaacacaaaaggacaaataccacataattccactta

SEQ ID NO: 47472 - DNA, 40 bp, Homo sapiens
aagtggaattatgtggtatttgtccttttgtgttggctta

SEQ ID NO: 47473 - DNA, 40 bp, Homo sapiens
taagccaacacaaaaggacaaataccacataattccactt

SEQ ID NO: 47474 - DNA, 40 bp, Homo sapiens
agtggaattatgtggtatttgtccttttgtgttggcttac

SEQ ID NO: 47475 - DNA, 40 bp, Homo sapiens
gtaagccaacacaaaaggacaaataccacataattccact

SEQ ID NO: 47476 - DNA, 40 bp, Homo sapiens
gtggaattatgtggtatttgtccttttgtgttggcttact

SEQ ID NO: 47477 - DNA, 40 bp, Homo sapiens
agtaagccaacacaaaaggacaaataccacataattccac

SEQ ID NO: 47478 - DNA, 40 bp, Homo sapiens
tggaattatgtggtatttgtccttttgtgttggcttactt

SEQ ID NO: 47479 - DNA, 40 bp, Homo sapiens
aagtaagccaacacaaaaggacaaataccacataattcca

SEQ ID NO: 47480 - DNA, 40 bp, Homo sapiens
ggaattatgtggtatttgtccttttgtgttggcttacttc

SEQ ID NO: 47481 - DNA, 40 bp, Homo sapiens
gaagtaagccaacacaaaaggacaaataccacataattcc

SEQ ID NO: 47482 - DNA, 40 bp, Homo sapiens
gaattatgtggtatttgtccttttgtgttggcttacttca

SEQ ID NO: 47483 - DNA, 40 bp, Homo sapiens
tgaagtaagccaacacaaaaggacaaataccacataattc

SEQ ID NO: 47484 - DNA, 40 bp, Homo sapiens
aattatgtggtatttgtccttttgtgttggcttacttcat

SEQ ID NO: 47485 - DNA, 40 bp, Homo sapiens
atgaagtaagccaacacaaaaggacaaataccacataatt

SEQ ID NO: 47486 - DNA, 40 bp, Homo sapiens
attatgtggtatttgtccttttgtgttggcttacttcatt

SEQ ID NO: 47487 - DNA, 40 bp, Homo sapiens
aatgaagtaagccaacacaaaaggacaaataccacataat

SEQ ID NO: 47488 - DNA, 40 bp, Homo sapiens
ttatgtggtatttgtccttttgtgttggcttacttcattt

SEQ ID NO: 47489 - DNA, 40 bp, Homo sapiens
aaatgaagtaagccaacacaaaaggacaaataccacataa

SEQ ID NO: 47490 - DNA, 40 bp, Homo sapiens
tatgtggtatttgtccttttgtgttggcttacttcattta

SEQ ID NO: 47491 - DNA, 40 bp, Homo sapiens
taaatgaagtaagccaacacaaaaggacaaataccacata

SEQ ID NO: 47492 - DNA, 40 bp, Homo sapiens
atgtggtatttgtccttttgtgttggcttacttcatttag

SEQ ID NO: 47493 - DNA, 40 bp, Homo sapiens
ctaaatgaagtaagccaacacaaaaggacaaataccacat

SEQ ID NO: 47494 - DNA, 40 bp, Homo sapiens
tgtggtatttgtccttttgtgttggcttacttcatttagc

SEQ ID NO: 47495 - DNA, 40 bp, Homo sapiens
gctaaatgaagtaagccaacacaaaaggacaaataccaca

SEQ ID NO: 47496 - DNA, 40 bp, Homo sapiens
gtggtatttgtccttttgtgttggcttacttcatttagca

SEQ ID NO: 47497 - DNA, 40 bp, Homo sapiens
tgctaaatgaagtaagccaacacaaaaggacaaataccac

SEQ ID NO: 47498 - DNA, 40 bp, Homo sapiens
tggtatttgtccttttgtgttggcttacttcatttagcat

SEQ ID NO: 47499 - DNA, 40 bp, Homo sapiens
atgctaaatgaagtaagccaacacaaaaggacaaatacca

SEQ ID NO: 47500 - DNA, 40 bp, Homo sapiens
ggtatttgtccttttgtgttggcttacttcatttagcata

SEQ ID NO: 47501 - DNA, 40 bp, Homo sapiens
tatgctaaatgaagtaagccaacacaaaaggacaaatacc

SEQ ID NO: 47502 - DNA, 40 bp, Homo sapiens
gtatttgtccttttgtgttggcttacttcatttagcataa

SEQ ID NO: 47503 - DNA, 40 bp, Homo sapiens
ttatgctaaatgaagtaagccaacacaaaaggacaaatac

SEQ ID NO: 47504 - DNA, 40 bp, Homo sapiens
tatttgtccttttgtgttggcttacttcatttagcataat

SEQ ID NO: 47505 - DNA, 40 bp, Homo sapiens
attatgctaaatgaagtaagccaacacaaaaggacaaata

SEQ ID NO: 47506 - DNA, 40 bp, Homo sapiens
atttgtccttttgtgttggcttacttcatttagcataatg

SEQ ID NO: 47507 - DNA, 40 bp, Homo sapiens
cattatgctaaatgaagtaagccaacacaaaaggacaaat

SEQ ID NO: 47508 - DNA, 40 bp, Homo sapiens
tttgtccttttgtgttggcttacttcatttagcataatgt

SEQ ID NO: 47509 - DNA, 40 bp, Homo sapiens
acattatgctaaatgaagtaagccaacacaaaaggacaaa

SEQ ID NO: 47510 - DNA, 40 bp, Homo sapiens
ttgtccttttgtgttggcttacttcatttagcataatgtt

SEQ ID NO: 47511 - DNA, 40 bp, Homo sapiens
aacattatgctaaatgaagtaagccaacacaaaaggacaa

SEQ ID NO: 47512 - DNA, 40 bp, Homo sapiens
tgtccttttgtgttggcttacttcatttagcataatgttt

SEQ ID NO: 47513 - DNA, 40 bp, Homo sapiens
aaacattatgctaaatgaagtaagccaacacaaaaggaca

SEQ ID NO: 47514 - DNA, 40 bp, Homo sapiens
gtccttttgtgttggcttacttcatttagcataatgtttt

SEQ ID NO: 47515 - DNA, 40 bp, Homo sapiens
aaaacattatgctaaatgaagtaagccaacacaaaaggac

SEQ ID NO: 47516 - DNA, 40 bp, Homo sapiens
tccttttgtgttggcttacttcatttagcataatgttttc

SEQ ID NO: 47517 - DNA, 40 bp, Homo sapiens
gaaaacattatgctaaatgaagtaagccaacacaaaagga

SEQ ID NO: 47518 - DNA, 40 bp, Homo sapiens
ccttttgtgttggcttacttcatttagcataatgttttca

SEQ ID NO: 47519 - DNA, 40 bp, Homo sapiens
tgaaaacattatgctaaatgaagtaagccaacacaaaagg

SEQ ID NO: 47520 - DNA, 40 bp, Homo sapiens
cttttgtgttggcttacttcatttagcataatgttttcaa

SEQ ID NO: 47521 - DNA, 40 bp, Homo sapiens
ttgaaaacattatgctaaatgaagtaagccaacacaaaag

SEQ ID NO: 47522 - DNA, 40 bp, Homo sapiens
ttttgtgttggcttacttcatttagcataatgttttcaag

SEQ ID NO: 47523 - DNA, 40 bp, Homo sapiens
cttgaaaacattatgctaaatgaagtaagccaacacaaaa

SEQ ID NO: 47524 - DNA, 40 bp, Homo sapiens
tttgtgttggcttacttcatttagcataatgttttcaagg

SEQ ID NO: 47525 - DNA, 40 bp, Homo sapiens
ccttgaaaacattatgctaaatgaagtaagccaacacaaa

SEQ ID NO: 47526 - DNA, 40 bp, Homo sapiens
ttgtgttggcttacttcatttagcataatgttttcaaggt

SEQ ID NO: 47527 - DNA, 40 bp, Homo sapiens
accttgaaaacattatgctaaatgaagtaagccaacacaa

SEQ ID NO: 47528 - DNA, 40 bp, Homo sapiens
tgtgttggcttacttcatttagcataatgttttcaaggtt

SEQ ID NO: 47529 - DNA, 40 bp, Homo sapiens
aaccttgaaaacattatgctaaatgaagtaagccaacaca

SEQ ID NO: 47530 - DNA, 40 bp, Homo sapiens
gtgttggcttacttcatttagcataatgttttcaaggttc

SEQ ID NO: 47531 - DNA, 40 bp, Homo sapiens
gaaccttgaaaacattatgctaaatgaagtaagccaacac

SEQ ID NO: 47532 - DNA, 40 bp, Homo sapiens
tgttggcttacttcatttagcataatgttttcaaggttca

SEQ ID NO: 47533 - DNA, 40 bp, Homo sapiens
tgaaccttgaaaacattatgctaaatgaagtaagccaaca

SEQ ID NO: 47534 - DNA, 40 bp, Homo sapiens
gttggcttacttcatttagcataatgttttcaaggttcat

SEQ ID NO: 47535 - DNA, 40 bp, Homo sapiens
atgaaccttgaaaacattatgctaaatgaagtaagccaac

SEQ ID NO: 47536 - DNA, 40 bp, Homo sapiens
ttggcttacttcatttagcataatgttttcaaggttcatc

SEQ ID NO: 47537 - DNA, 40 bp, Homo sapiens
gatgaaccttgaaaacattatgctaaatgaagtaagccaa

SEQ ID NO: 47538 - DNA, 40 bp, Homo sapiens
tggcttacttcatttagcataatgttttcaaggttcatct

SEQ ID NO: 47539 - DNA, 40 bp, Homo sapiens
agatgaaccttgaaaacattatgctaaatgaagtaagcca

SEQ ID NO: 47540 - DNA, 40 bp, Homo sapiens
ggcttacttcatttagcataatgttttcaaggttcatctg

SEQ ID NO: 47541 - DNA, 40 bp, Homo sapiens
cagatgaaccttgaaaacattatgctaaatgaagtaagcc

SEQ ID NO: 47542 - DNA, 40 bp, Homo sapiens
gcttacttcatttagcataatgttttcaaggttcatctgt

SEQ ID NO: 47543 - DNA, 40 bp, Homo sapiens
acagatgaaccttgaaaacattatgctaaatgaagtaagc

SEQ ID NO: 47544 - DNA, 40 bp, Homo sapiens
cttacttcatttagcataatgttttcaaggttcatctgtg

SEQ ID NO: 47545 - DNA, 40 bp, Homo sapiens
cacagatgaaccttgaaaacattatgctaaatgaagtaag

SEQ ID NO: 47546 - DNA, 40 bp, Homo sapiens
ttacttcatttagcataatgttttcaaggttcatctgtgt

SEQ ID NO: 47547 - DNA, 40 bp, Homo sapiens
acacagatgaaccttgaaaacattatgctaaatgaagtaa

SEQ ID NO: 47548 - DNA, 40 bp, Homo sapiens
tacttcatttagcataatgttttcaaggttcatctgtgtt

SEQ ID NO: 47549 - DNA, 40 bp, Homo sapiens
aacacagatgaaccttgaaaacattatgctaaatgaagta

SEQ ID NO: 47550 - DNA, 40 bp, Homo sapiens
acttcatttagcataatgttttcaaggttcatctgtgttg

SEQ ID NO: 47551 - DNA, 40 bp, Homo sapiens
caacacagatgaaccttgaaaacattatgctaaatgaagt

SEQ ID NO: 47552 - DNA, 40 bp, Homo sapiens
cttcatttagcataatgttttcaaggttcatctgtgttgt

SEQ ID NO: 47553 - DNA, 40 bp, Homo sapiens
acaacacagatgaaccttgaaaacattatgctaaatgaag

SEQ ID NO: 47554 - DNA, 40 bp, Homo sapiens
ttcatttagcataatgttttcaaggttcatctgtgttgta

SEQ ID NO: 47555 - DNA, 40 bp, Homo sapiens
tacaacacagatgaaccttgaaaacattatgctaaatgaa

SEQ ID NO: 47556 - DNA, 40 bp, Homo sapiens
tcatttagcataatgttttcaaggttcatctgtgttgtag

SEQ ID NO: 47557 - DNA, 40 bp, Homo sapiens
ctacaacacagatgaaccttgaaaacattatgctaaatga

SEQ ID NO: 47558 - DNA, 40 bp, Homo sapiens
catttagcataatgttttcaaggttcatctgtgttgtagc

SEQ ID NO: 47559 - DNA, 40 bp, Homo sapiens
gctacaacacagatgaaccttgaaaacattatgctaaatg

SEQ ID NO: 47560 - DNA, 40 bp, Homo sapiens
atttagcataatgttttcaaggttcatctgtgttgtagca

SEQ ID NO: 47561 - DNA, 40 bp, Homo sapiens
tgctacaacacagatgaaccttgaaaacattatgctaaat

SEQ ID NO: 47562 - DNA, 40 bp, Homo sapiens
tttagcataatgttttcaaggttcatctgtgttgtagcat

SEQ ID NO: 47563 - DNA, 40 bp, Homo sapiens
atgctacaacacagatgaaccttgaaaacattatgctaaa

SEQ ID NO: 47564 - DNA, 40 bp, Homo sapiens
ttagcataatgttttcaaggttcatctgtgttgtagcatg

SEQ ID NO: 47565 - DNA, 40 bp, Homo sapiens
catgctacaacacagatgaaccttgaaaacattatgctaa

SEQ ID NO: 47566 - DNA, 40 bp, Homo sapiens
tagcataatgttttcaaggttcatctgtgttgtagcatgt

SEQ ID NO: 47567 - DNA, 40 bp, Homo sapiens
acatgctacaacacagatgaaccttgaaaacattatgcta

SEQ ID NO: 47568 - DNA, 40 bp, Homo sapiens
agcataatgttttcaaggttcatctgtgttgtagcatgta

SEQ ID NO: 47569 - DNA, 40 bp, Homo sapiens
tacatgctacaacacagatgaaccttgaaaacattatgct

SEQ ID NO: 47570 - DNA, 40 bp, Homo sapiens
gcataatgttttcaaggttcatctgtgttgtagcatgtat

SEQ ID NO: 47571 - DNA, 40 bp, Homo sapiens
atacatgctacaacacagatgaaccttgaaaacattatgc

SEQ ID NO: 47572 - DNA, 40 bp, Homo sapiens
cataatgttttcaaggttcatctgtgttgtagcatgtata

SEQ ID NO: 47573 - DNA, 40 bp, Homo sapiens
tatacatgctacaacacagatgaaccttgaaaacattatg

SEQ ID NO: 47574 - DNA, 40 bp, Homo sapiens
ataatgttttcaaggttcatctgtgttgtagcatgtatat

SEQ ID NO: 47575 - DNA, 40 bp, Homo sapiens
atatacatgctacaacacagatgaaccttgaaaacattat

SEQ ID NO: 47576 - DNA, 40 bp, Homo sapiens
taatgttttcaaggttcatctgtgttgtagcatgtatata

SEQ ID NO: 47577 - DNA, 40 bp, Homo sapiens
tatatacatgctacaacacagatgaaccttgaaaacatta

SEQ ID NO: 47578 - DNA, 40 bp, Homo sapiens
aatgttttcaaggttcatctgtgttgtagcatgtatatac

SEQ ID NO: 47579 - DNA, 40 bp, Homo sapiens
gtatatacatgctacaacacagatgaaccttgaaaacatt

SEQ ID NO: 47580 - DNA, 40 bp, Homo sapiens
atgttttcaaggttcatctgtgttgtagcatgtatataca

SEQ ID NO: 47581 - DNA, 40 bp, Homo sapiens
tgtatatacatgctacaacacagatgaaccttgaaaacat

SEQ ID NO: 47582 - DNA, 40 bp, Homo sapiens
tgttttcaaggttcatctgtgttgtagcatgtatatacag

SEQ ID NO: 47583 - DNA, 40 bp, Homo sapiens
ctgtatatacatgctacaacacagatgaaccttgaaaaca

SEQ ID NO: 47584 - DNA, 40 bp, Homo sapiens
gttttcaaggttcatctgtgttgtagcatgtatatacagg

SEQ ID NO: 47585 - DNA, 40 bp, Homo sapiens
cctgtatatacatgctacaacacagatgaaccttgaaaac

SEQ ID NO: 47586 - DNA, 40 bp, Homo sapiens
ttttcaaggttcatctgtgttgtagcatgtatatacaggt

SEQ ID NO: 47587 - DNA, 40 bp, Homo sapiens
acctgtatatacatgctacaacacagatgaaccttgaaaa

SEQ ID NO: 47588 - DNA, 40 bp, Homo sapiens
tttcaaggttcatctgtgttgtagcatgtatatacaggtt

SEQ ID NO: 47589 - DNA, 40 bp, Homo sapiens
aacctgtatatacatgctacaacacagatgaaccttgaaa

SEQ ID NO: 47590 - DNA, 40 bp, Homo sapiens
ttcaaggttcatctgtgttgtagcatgtatatacaggttg

SEQ ID NO: 47591 - DNA, 40 bp, Homo sapiens
caacctgtatatacatgctacaacacagatgaaccttgaa

SEQ ID NO: 47592 - DNA, 40 bp, Homo sapiens
tcaaggttcatctgtgttgtagcatgtatatacaggttga

SEQ ID NO: 47593 - DNA, 40 bp, Homo sapiens
tcaacctgtatatacatgctacaacacagatgaaccttga

SEQ ID NO: 47594 - DNA, 40 bp, Homo sapiens
caaggttcatctgtgttgtagcatgtatatacaggttgaa

SEQ ID NO: 47595 - DNA, 40 bp, Homo sapiens
ttcaacctgtatatacatgctacaacacagatgaaccttg

SEQ ID NO: 47596 - DNA, 40 bp, Homo sapiens
aaggttcatctgtgttgtagcatgtatatacaggttgaag

SEQ ID NO: 47597 - DNA, 40 bp, Homo sapiens
cttcaacctgtatatacatgctacaacacagatgaacctt

SEQ ID NO: 47598 - DNA, 40 bp, Homo sapiens
aggttcatctgtgttgtagcatgtatatacaggttgaagc

SEQ ID NO: 47599 - DNA, 40 bp, Homo sapiens
gcttcaacctgtatatacatgctacaacacagatgaacct

SEQ ID NO: 47600 - DNA, 40 bp, Homo sapiens
ggttcatctgtgttgtagcatgtatatacaggttgaagca

SEQ ID NO: 47601 - DNA, 40 bp, Homo sapiens
tgcttcaacctgtatatacatgctacaacacagatgaacc

SEQ ID NO: 47602 - DNA, 40 bp, Homo sapiens
gttcatctgtgttgtagcatgtatatacaggttgaagcat

SEQ ID NO: 47603 - DNA, 40 bp, Homo sapiens
atgcttcaacctgtatatacatgctacaacacagatgaac

SEQ ID NO: 47604 - DNA, 40 bp, Homo sapiens
ttcatctgtgttgtagcatgtatatacaggttgaagcatc

SEQ ID NO: 47605 - DNA, 40 bp, Homo sapiens
gatgcttcaacctgtatatacatgctacaacacagatgaa

SEQ ID NO: 47606 - DNA, 40 bp, Homo sapiens
tcatctgtgttgtagcatgtatatacaggttgaagcatcc

SEQ ID NO: 47607 - DNA, 40 bp, Homo sapiens
ggatgcttcaacctgtatatacatgctacaacacagatga

SEQ ID NO: 47608 - DNA, 40 bp, Homo sapiens
catctgtgttgtagcatgtatatacaggttgaagcatccg

SEQ ID NO: 47609 - DNA, 40 bp, Homo sapiens
cggatgcttcaacctgtatatacatgctacaacacagatg

SEQ ID NO: 47610 - DNA, 40 bp, Homo sapiens
atctgtgttgtagcatgtatatacaggttgaagcatccgt

SEQ ID NO: 47611 - DNA, 40 bp, Homo sapiens
acggatgcttcaacctgtatatacatgctacaacacagat

SEQ ID NO: 47612 - DNA, 40 bp, Homo sapiens
tctgtgttgtagcatgtatatacaggttgaagcatccgtt

SEQ ID NO: 47613 - DNA, 40 bp, Homo sapiens
aacggatgcttcaacctgtatatacatgctacaacacaga

SEQ ID NO: 47614 - DNA, 40 bp, Homo sapiens
ctgtgttgtagcatgtatatacaggttgaagcatccgtta

SEQ ID NO: 47615 - DNA, 40 bp, Homo sapiens
taacggatgcttcaacctgtatatacatgctacaacacag

SEQ ID NO: 47616 - DNA, 40 bp, Homo sapiens
tgtgttgtagcatgtatatacaggttgaagcatccgttat

SEQ ID NO: 47617 - DNA, 40 bp, Homo sapiens
ataacggatgcttcaacctgtatatacatgctacaacaca

SEQ ID NO: 47618 - DNA, 40 bp, Homo sapiens
gtgttgtagcatgtatatacaggttgaagcatccgttatc

SEQ ID NO: 47619 - DNA, 40 bp, Homo sapiens
gataacggatgcttcaacctgtatatacatgctacaacac

SEQ ID NO: 47620 - DNA, 40 bp, Homo sapiens
tgttgtagcatgtatatacaggttgaagcatccgttatcc

SEQ ID NO: 47621 - DNA, 40 bp, Homo sapiens
ggataacggatgcttcaacctgtatatacatgctacaaca

SEQ ID NO: 47622 - DNA, 40 bp, Homo sapiens
gttgtagcatgtatatacaggttgaagcatccgttatcca

SEQ ID NO: 47623 - DNA, 40 bp, Homo sapiens
tggataacggatgcttcaacctgtatatacatgctacaac

SEQ ID NO: 47624 - DNA, 40 bp, Homo sapiens
ttgtagcatgtatatacaggttgaagcatccgttatccaa

SEQ ID NO: 47625 - DNA, 40 bp, Homo sapiens
ttggataacggatgcttcaacctgtatatacatgctacaa

SEQ ID NO: 47626 - DNA, 40 bp, Homo sapiens
tgtagcatgtatatacaggttgaagcatccgttatccaaa

SEQ ID NO: 47627 - DNA, 40 bp, Homo sapiens
tttggataacggatgcttcaacctgtatatacatgctaca

SEQ ID NO: 47628 - DNA, 40 bp, Homo sapiens
gtagcatgtatatacaggttgaagcatccgttatccaaaa

SEQ ID NO: 47629 - DNA, 40 bp, Homo sapiens
ttttggataacggatgcttcaacctgtatatacatgctac

SEQ ID NO: 47630 - DNA, 40 bp, Homo sapiens
tagcatgtatatacaggttgaagcatccgttatccaaaat

SEQ ID NO: 47631 - DNA, 40 bp, Homo sapiens
attttggataacggatgcttcaacctgtatatacatgcta

SEQ ID NO: 47632 - DNA, 40 bp, Homo sapiens
agcatgtatatacaggttgaagcatccgttatccaaaatg

SEQ ID NO: 47633 - DNA, 40 bp, Homo sapiens
cattttggataacggatgcttcaacctgtatatacatgct

SEQ ID NO: 47634 - DNA, 40 bp, Homo sapiens
gcatgtatatacaggttgaagcatccgttatccaaaatgg

SEQ ID NO: 47635 - DNA, 40 bp, Homo sapiens
ccattttggataacggatgcttcaacctgtatatacatgc

SEQ ID NO: 47636 - DNA, 40 bp, Homo sapiens
catgtatatacaggttgaagcatccgttatccaaaatggt

SEQ ID NO: 47637 - DNA, 40 bp, Homo sapiens
accattttggataacggatgcttcaacctgtatatacatg

SEQ ID NO: 47638 - DNA, 40 bp, Homo sapiens
atgtatatacaggttgaagcatccgttatccaaaatggtt

SEQ ID NO: 47639 - DNA, 40 bp, Homo sapiens
aaccattttggataacggatgcttcaacctgtatatacat

SEQ ID NO: 47640 - DNA, 40 bp, Homo sapiens
tgtatatacaggttgaagcatccgttatccaaaatggttg

SEQ ID NO: 47641 - DNA, 40 bp, Homo sapiens
caaccattttggataacggatgcttcaacctgtatataca

SEQ ID NO: 47642 - DNA, 40 bp, Homo sapiens
gtatatacaggttgaagcatccgttatccaaaatggttgt

SEQ ID NO: 47643 - DNA, 40 bp, Homo sapiens
acaaccattttggataacggatgcttcaacctgtatatac

SEQ ID NO: 47644 - DNA, 40 bp, Homo sapiens
tatatacaggttgaagcatccgttatccaaaatggttgtg

SEQ ID NO: 47645 - DNA, 40 bp, Homo sapiens
cacaaccattttggataacggatgcttcaacctgtatata

SEQ ID NO: 47646 - DNA, 40 bp, Homo sapiens
atatacaggttgaagcatccgttatccaaaatggttgtga

SEQ ID NO: 47647 - DNA, 40 bp, Homo sapiens
tcacaaccattttggataacggatgcttcaacctgtatat

SEQ ID NO: 47648 - DNA, 40 bp, Homo sapiens
tatacaggttgaagcatccgttatccaaaatggttgtgac

SEQ ID NO: 47649 - DNA, 40 bp, Homo sapiens
gtcacaaccattttggataacggatgcttcaacctgtata

SEQ ID NO: 47650 - DNA, 40 bp, Homo sapiens
atacaggttgaagcatccgttatccaaaatggttgtgacc

SEQ ID NO: 47651 - DNA, 40 bp, Homo sapiens
ggtcacaaccattttggataacggatgcttcaacctgtat

SEQ ID NO: 47652 - DNA, 40 bp, Homo sapiens
tacaggttgaagcatccgttatccaaaatggttgtgacca

SEQ ID NO: 47653 - DNA, 40 bp, Homo sapiens
tggtcacaaccattttggataacggatgcttcaacctgta

SEQ ID NO: 47654 - DNA, 40 bp, Homo sapiens
acaggttgaagcatccgttatccaaaatggttgtgaccag

SEQ ID NO: 47655 - DNA, 40 bp, Homo sapiens
ctggtcacaaccattttggataacggatgcttcaacctgt

SEQ ID NO: 47656 - DNA, 40 bp, Homo sapiens
caggttgaagcatccgttatccaaaatggttgtgaccaga

SEQ ID NO: 47657 - DNA, 40 bp, Homo sapiens
tctggtcacaaccattttggataacggatgcttcaacctg

SEQ ID NO: 47658 - DNA, 40 bp, Homo sapiens
aggttgaagcatccgttatccaaaatggttgtgaccagaa

SEQ ID NO: 47659 - DNA, 40 bp, Homo sapiens
ttctggtcacaaccattttggataacggatgcttcaacct

SEQ ID NO: 47660 - DNA, 40 bp, Homo sapiens
ggttgaagcatccgttatccaaaatggttgtgaccagaag

SEQ ID NO: 47661 - DNA, 40 bp, Homo sapiens
cttctggtcacaaccattttggataacggatgcttcaacc

SEQ ID NO: 47662 - DNA, 40 bp, Homo sapiens
gttgaagcatccgttatccaaaatggttgtgaccagaagt

SEQ ID NO: 47663 - DNA, 40 bp, Homo sapiens
acttctggtcacaaccattttggataacggatgcttcaac

SEQ ID NO: 47664 - DNA, 40 bp, Homo sapiens
ttgaagcatccgttatccaaaatggttgtgaccagaagtg

SEQ ID NO: 47665 - DNA, 40 bp, Homo sapiens
cacttctggtcacaaccattttggataacggatgcttcaa

SEQ ID NO: 47666 - DNA, 40 bp, Homo sapiens
tgaagcatccgttatccaaaatggttgtgaccagaagtgg

SEQ ID NO: 47667 - DNA, 40 bp, Homo sapiens
ccacttctggtcacaaccattttggataacggatgcttca

SEQ ID NO: 47668 - DNA, 40 bp, Homo sapiens
gaagcatccgttatccaaaatggttgtgaccagaagtggt

SEQ ID NO: 47669 - DNA, 40 bp, Homo sapiens
accacttctggtcacaaccattttggataacggatgcttc

SEQ ID NO: 47670 - DNA, 40 bp, Homo sapiens
aagcatccgttatccaaaatggttgtgaccagaagtggtt

SEQ ID NO: 47671 - DNA, 40 bp, Homo sapiens
aaccacttctggtcacaaccattttggataacggatgctt

SEQ ID NO: 47672 - DNA, 40 bp, Homo sapiens
agcatccgttatccaaaatggttgtgaccagaagtggttt

SEQ ID NO: 47673 - DNA, 40 bp, Homo sapiens
aaaccacttctggtcacaaccattttggataacggatgct

SEQ ID NO: 47674 - DNA, 40 bp, Homo sapiens
gcatccgttatccaaaatggttgtgaccagaagtggtttg

SEQ ID NO: 47675 - DNA, 40 bp, Homo sapiens
caaaccacttctggtcacaaccattttggataacggatgc

SEQ ID NO: 47676 - DNA, 40 bp, Homo sapiens
catccgttatccaaaatggttgtgaccagaagtggtttgg

SEQ ID NO: 47677 - DNA, 40 bp, Homo sapiens
ccaaaccacttctggtcacaaccattttggataacggatg

SEQ ID NO: 47678 - DNA, 40 bp, Homo sapiens
atccgttatccaaaatggttgtgaccagaagtggtttgga

SEQ ID NO: 47679 - DNA, 40 bp, Homo sapiens
tccaaaccacttctggtcacaaccattttggataacggat

SEQ ID NO: 47680 - DNA, 40 bp, Homo sapiens
tccgttatccaaaatggttgtgaccagaagtggtttggat

SEQ ID NO: 47681 - DNA, 40 bp, Homo sapiens
atccaaaccacttctggtcacaaccattttggataacgga

SEQ ID NO: 47682 - DNA, 40 bp, Homo sapiens
ccgttatccaaaatggttgtgaccagaagtggtttggatt

SEQ ID NO: 47683 - DNA, 40 bp, Homo sapiens
aatccaaaccacttctggtcacaaccattttggataacgg

SEQ ID NO: 47684 - DNA, 40 bp, Homo sapiens
cgttatccaaaatggttgtgaccagaagtggtttggattt

SEQ ID NO: 47685 - DNA, 40 bp, Homo sapiens
aaatccaaaccacttctggtcacaaccattttggataacg

SEQ ID NO: 47686 - DNA, 40 bp, Homo sapiens
gttatccaaaatggttgtgaccagaagtggtttggatttc

SEQ ID NO: 47687 - DNA, 40 bp, Homo sapiens
gaaatccaaaccacttctggtcacaaccattttggataac

SEQ ID NO: 47688 - DNA, 40 bp, Homo sapiens
ttatccaaaatggttgtgaccagaagtggtttggatttca

SEQ ID NO: 47689 - DNA, 40 bp, Homo sapiens
tgaaatccaaaccacttctggtcacaaccattttggataa

SEQ ID NO: 47690 - DNA, 40 bp, Homo sapiens
tatccaaaatggttgtgaccagaagtggtttggatttcag

SEQ ID NO: 47691 - DNA, 40 bp, Homo sapiens
ctgaaatccaaaccacttctggtcacaaccattttggata

SEQ ID NO: 47692 - DNA, 40 bp, Homo sapiens
atccaaaatggttgtgaccagaagtggtttggatttcaga

SEQ ID NO: 47693 - DNA, 40 bp, Homo sapiens
tctgaaatccaaaccacttctggtcacaaccattttggat

SEQ ID NO: 47694 - DNA, 40 bp, Homo sapiens
tccaaaatggttgtgaccagaagtggtttggatttcagat

SEQ ID NO: 47695 - DNA, 40 bp, Homo sapiens
atctgaaatccaaaccacttctggtcacaaccattttgga

SEQ ID NO: 47696 - DNA, 40 bp, Homo sapiens
ccaaaatggttgtgaccagaagtggtttggatttcagatt

SEQ ID NO: 47697 - DNA, 40 bp, Homo sapiens
aatctgaaatccaaaccacttctggtcacaaccattttgg

SEQ ID NO: 47698 - DNA, 40 bp, Homo sapiens
caaaatggttgtgaccagaagtggtttggatttcagattt

SEQ ID NO: 47699 - DNA, 40 bp, Homo sapiens
aaatctgaaatccaaaccacttctggtcacaaccattttg

SEQ ID NO: 47700 - DNA, 40 bp, Homo sapiens
aaaatggttgtgaccagaagtggtttggatttcagatttt

SEQ ID NO: 47701 - DNA, 40 bp, Homo sapiens
aaaatctgaaatccaaaccacttctggtcacaaccatttt

SEQ ID NO: 47702 - DNA, 40 bp, Homo sapiens
aaatggttgtgaccagaagtggtttggatttcagattttt

SEQ ID NO: 47703 - DNA, 40 bp, Homo sapiens
aaaaatctgaaatccaaaccacttctggtcacaaccattt

SEQ ID NO: 47704 - DNA, 40 bp, Homo sapiens
aatggttgtgaccagaagtggtttggatttcagatttttt

SEQ ID NO: 47705 - DNA, 40 bp, Homo sapiens
aaaaaatctgaaatccaaaccacttctggtcacaaccatt

SEQ ID NO: 47706 - DNA, 40 bp, Homo sapiens
atggttgtgaccagaagtggtttggatttcagattttttt

SEQ ID NO: 47707 - DNA, 40 bp, Homo sapiens
aaaaaaatctgaaatccaaaccacttctggtcacaaccat

SEQ ID NO: 47708 - DNA, 40 bp, Homo sapiens
tggttgtgaccagaagtggtttggatttcagatttttttt

SEQ ID NO: 47709 - DNA, 40 bp, Homo sapiens
aaaaaaaatctgaaatccaaaccacttctggtcacaacca

SEQ ID NO: 47710 - DNA, 40 bp, Homo sapiens
ggttgtgaccagaagtggtttggatttcagattttttttt

SEQ ID NO: 47711 - DNA, 40 bp, Homo sapiens
aaaaaaaaatctgaaatccaaaccacttctggtcacaacc

SEQ ID NO: 47712 - DNA, 40 bp, Homo sapiens
gttgtgaccagaagtggtttggatttcagatttttttttt

SEQ ID NO: 47713 - DNA, 40 bp, Homo sapiens
aaaaaaaaaatctgaaatccaaaccacttctggtcacaac

SEQ ID NO: 47714 - DNA, 40 bp, Homo sapiens
ttgtgaccagaagtggtttggatttcagattttttttttg

SEQ ID NO: 47715 - DNA, 40 bp, Homo sapiens
caaaaaaaaaatctgaaatccaaaccacttctggtcacaa

SEQ ID NO: 47716 - DNA, 40 bp, Homo sapiens
tgtgaccagaagtggtttggatttcagattttttttttgg

SEQ ID NO: 47717 - DNA, 40 bp, Homo sapiens
ccaaaaaaaaaatctgaaatccaaaccacttctggtcaca

SEQ ID NO: 47718 - DNA, 40 bp, Homo sapiens
gtgaccagaagtggtttggatttcagattttttttttgga

SEQ ID NO: 47719 - DNA, 40 bp, Homo sapiens
tccaaaaaaaaaatctgaaatccaaaccacttctggtcac

SEQ ID NO: 47720 - DNA, 40 bp, Homo sapiens
tgaccagaagtggtttggatttcagattttttttttggat

SEQ ID NO: 47721 - DNA, 40 bp, Homo sapiens
atccaaaaaaaaaatctgaaatccaaaccacttctggtca

SEQ ID NO: 47722 - DNA, 40 bp, Homo sapiens
gaccagaagtggtttggatttcagattttttttttggatt

SEQ ID NO: 47723 - DNA, 40 bp, Homo sapiens
aatccaaaaaaaaaatctgaaatccaaaccacttctggtc

SEQ ID NO: 47724 - DNA, 40 bp, Homo sapiens
accagaagtggtttggatttcagattttttttttggattt

SEQ ID NO: 47725 - DNA, 40 bp, Homo sapiens
aaatccaaaaaaaaaatctgaaatccaaaccacttctggt

SEQ ID NO: 47726 - DNA, 40 bp, Homo sapiens
ccagaagtggtttggatttcagattttttttttggatttt

SEQ ID NO: 47727 - DNA, 40 bp, Homo sapiens
aaaatccaaaaaaaaaatctgaaatccaaaccacttctgg

SEQ ID NO: 47728 - DNA, 40 bp, Homo sapiens
cagaagtggtttggatttcagattttttttttggattttg

SEQ ID NO: 47729 - DNA, 40 bp, Homo sapiens
caaaatccaaaaaaaaaatctgaaatccaaaccacttctg

SEQ ID NO: 47730 - DNA, 40 bp, Homo sapiens
agaagtggtttggatttcagattttttttttggattttgg

SEQ ID NO: 47731 - DNA, 40 bp, Homo sapiens
ccaaaatccaaaaaaaaaatctgaaatccaaaccacttct

SEQ ID NO: 47732 - DNA, 40 bp, Homo sapiens
gaagtggtttggatttcagattttttttttggattttgga

SEQ ID NO: 47733 - DNA, 40 bp, Homo sapiens
tccaaaatccaaaaaaaaaatctgaaatccaaaccacttc

SEQ ID NO: 47734 - DNA, 40 bp, Homo sapiens
aagtggtttggatttcagattttttttttggattttggaa

SEQ ID NO: 47735 - DNA, 40 bp, Homo sapiens
ttccaaaatccaaaaaaaaaatctgaaatccaaaccactt

SEQ ID NO: 47736 - DNA, 40 bp, Homo sapiens
agtggtttggatttcagattttttttttggattttggaat

SEQ ID NO: 47737 - DNA, 40 bp, Homo sapiens
attccaaaatccaaaaaaaaaatctgaaatccaaaccact

SEQ ID NO: 47738 - DNA, 40 bp, Homo sapiens
gtggtttggatttcagattttttttttggattttggaata

SEQ ID NO: 47739 - DNA, 40 bp, Homo sapiens
tattccaaaatccaaaaaaaaaatctgaaatccaaaccac

SEQ ID NO: 47740 - DNA, 40 bp, Homo sapiens
tggtttggatttcagattttttttttggattttggaatat

SEQ ID NO: 47741 - DNA, 40 bp, Homo sapiens
atattccaaaatccaaaaaaaaaatctgaaatccaaacca

SEQ ID NO: 47742 - DNA, 40 bp, Homo sapiens
ggtttggatttcagattttttttttggattttggaatatt

SEQ ID NO: 47743 - DNA, 40 bp, Homo sapiens
aatattccaaaatccaaaaaaaaaatctgaaatccaaacc

SEQ ID NO: 47744 - DNA, 40 bp, Homo sapiens
gtttggatttcagattttttttttggattttggaatattc

SEQ ID NO: 47745 - DNA, 40 bp, Homo sapiens
gaatattccaaaatccaaaaaaaaaatctgaaatccaaac

SEQ ID NO: 47746 - DNA, 40 bp, Homo sapiens
tttggatttcagattttttttttggattttggaatattca

SEQ ID NO: 47747 - DNA, 40 bp, Homo sapiens
tgaatattccaaaatccaaaaaaaaaatctgaaatccaaa

SEQ ID NO: 47748 - DNA, 40 bp, Homo sapiens
ttggatttcagattttttttttggattttggaatattcat

SEQ ID NO: 47749 - DNA, 40 bp, Homo sapiens
atgaatattccaaaatccaaaaaaaaaatctgaaatccaa

SEQ ID NO: 47750 - DNA, 40 bp, Homo sapiens
tggatttcagattttttttttggattttggaatattcata

SEQ ID NO: 47751 - DNA, 40 bp, Homo sapiens
tatgaatattccaaaatccaaaaaaaaaatctgaaatcca

SEQ ID NO: 47752 - DNA, 40 bp, Homo sapiens
ggatttcagattttttttttggattttggaatattcatag

SEQ ID NO: 47753 - DNA, 40 bp, Homo sapiens
ctatgaatattccaaaatccaaaaaaaaaatctgaaatcc

SEQ ID NO: 47754 - DNA, 40 bp, Homo sapiens
gatttcagattttttttttggattttggaatattcataga

SEQ ID NO: 47755 - DNA, 40 bp, Homo sapiens
tctatgaatattccaaaatccaaaaaaaaaatctgaaatc

SEQ ID NO: 47756 - DNA, 40 bp, Homo sapiens
atttcagattttttttttggattttggaatattcatagat

SEQ ID NO: 47757 - DNA, 40 bp, Homo sapiens
atctatgaatattccaaaatccaaaaaaaaaatctgaaat

SEQ ID NO: 47758 - DNA, 40 bp, Homo sapiens
tttcagattttttttttggattttggaatattcatagata

SEQ ID NO: 47759 - DNA, 40 bp, Homo sapiens
tatctatgaatattccaaaatccaaaaaaaaaatctgaaa

SEQ ID NO: 47760 - DNA, 40 bp, Homo sapiens
ttcagattttttttttggattttggaatattcatagatac

SEQ ID NO: 47761 - DNA, 40 bp, Homo sapiens
gtatctatgaatattccaaaatccaaaaaaaaaatctgaa

SEQ ID NO: 47762 - DNA, 40 bp, Homo sapiens
tcagattttttttttggattttggaatattcatagatact

SEQ ID NO: 47763 - DNA, 40 bp, Homo sapiens
agtatctatgaatattccaaaatccaaaaaaaaaatctga

SEQ ID NO: 47764 - DNA, 40 bp, Homo sapiens
cagattttttttttggattttggaatattcatagatactt

SEQ ID NO: 47765 - DNA, 40 bp, Homo sapiens
aagtatctatgaatattccaaaatccaaaaaaaaaatctg

SEQ ID NO: 47766 - DNA, 40 bp, Homo sapiens
agattttttttttggattttggaatattcatagatactta

SEQ ID NO: 47767 - DNA, 40 bp, Homo sapiens
taagtatctatgaatattccaaaatccaaaaaaaaaatct

SEQ ID NO: 47768 - DNA, 40 bp, Homo sapiens
gattttttttttggattttggaatattcatagatacttaa

SEQ ID NO: 47769 - DNA, 40 bp, Homo sapiens
ttaagtatctatgaatattccaaaatccaaaaaaaaaatc

SEQ ID NO: 47770 - DNA, 40 bp, Homo sapiens
attttttttttggattttggaatattcatagatacttaac

SEQ ID NO: 47771 - DNA, 40 bp, Homo sapiens
gttaagtatctatgaatattccaaaatccaaaaaaaaaat

SEQ ID NO: 47772 - DNA, 40 bp, Homo sapiens
ttttttttttggattttggaatattcatagatacttaact

SEQ ID NO: 47773 - DNA, 40 bp, Homo sapiens
agttaagtatctatgaatattccaaaatccaaaaaaaaaa

SEQ ID NO: 47774 - DNA, 40 bp, Homo sapiens
tttttttttggattttggaatattcatagatacttaactg

SEQ ID NO: 47775 - DNA, 40 bp, Homo sapiens
cagttaagtatctatgaatattccaaaatccaaaaaaaaa

SEQ ID NO: 47776 - DNA, 40 bp, Homo sapiens
ttttttttggattttggaatattcatagatacttaactgg

SEQ ID NO: 47777 - DNA, 40 bp, Homo sapiens
ccagttaagtatctatgaatattccaaaatccaaaaaaaa

SEQ ID NO: 47778 - DNA, 40 bp, Homo sapiens
tttttttggattttggaatattcatagatacttaactggt

SEQ ID NO: 47779 - DNA, 40 bp, Homo sapiens
accagttaagtatctatgaatattccaaaatccaaaaaaa

SEQ ID NO: 47780 - DNA, 40 bp, Homo sapiens
ttttttggattttggaatattcatagatacttaactggtt

SEQ ID NO: 47781 - DNA, 40 bp, Homo sapiens
aaccagttaagtatctatgaatattccaaaatccaaaaaa

SEQ ID NO: 47782 - DNA, 40 bp, Homo sapiens
tttttggattttggaatattcatagatacttaactggttc

SEQ ID NO: 47783 - DNA, 40 bp, Homo sapiens
gaaccagttaagtatctatgaatattccaaaatccaaaaa

SEQ ID NO: 47784 - DNA, 40 bp, Homo sapiens
ttttggattttggaatattcatagatacttaactggttca

SEQ ID NO: 47785 - DNA, 40 bp, Homo sapiens
tgaaccagttaagtatctatgaatattccaaaatccaaaa

SEQ ID NO: 47786 - DNA, 40 bp, Homo sapiens
tttggattttggaatattcatagatacttaactggttcag

SEQ ID NO: 47787 - DNA, 40 bp, Homo sapiens
ctgaaccagttaagtatctatgaatattccaaaatccaaa

SEQ ID NO: 47788 - DNA, 40 bp, Homo sapiens
ttggattttggaatattcatagatacttaactggttcagc

SEQ ID NO: 47789 - DNA, 40 bp, Homo sapiens
gctgaaccagttaagtatctatgaatattccaaaatccaa

SEQ ID NO: 47790 - DNA, 40 bp, Homo sapiens
tggattttggaatattcatagatacttaactggttcagca

SEQ ID NO: 47791 - DNA, 40 bp, Homo sapiens
tgctgaaccagttaagtatctatgaatattccaaaatcca

SEQ ID NO: 47792 - DNA, 40 bp, Homo sapiens
ggattttggaatattcatagatacttaactggttcagcat

SEQ ID NO: 47793 - DNA, 40 bp, Homo sapiens
atgctgaaccagttaagtatctatgaatattccaaaatcc

SEQ ID NO: 47794 - DNA, 40 bp, Homo sapiens
gattttggaatattcatagatacttaactggttcagcatc

SEQ ID NO: 47795 - DNA, 40 bp, Homo sapiens
gatgctgaaccagttaagtatctatgaatattccaaaatc

SEQ ID NO: 47796 - DNA, 40 bp, Homo sapiens
attttggaatattcatagatacttaactggttcagcatcc

SEQ ID NO: 47797 - DNA, 40 bp, Homo sapiens
ggatgctgaaccagttaagtatctatgaatattccaaaat

SEQ ID NO: 47798 - DNA, 40 bp, Homo sapiens
ttttggaatattcatagatacttaactggttcagcatccc

SEQ ID NO: 47799 - DNA, 40 bp, Homo sapiens
gggatgctgaaccagttaagtatctatgaatattccaaaa

SEQ ID NO: 47800 - DNA, 40 bp, Homo sapiens
tttggaatattcatagatacttaactggttcagcatccct

SEQ ID NO: 47801 - DNA, 40 bp, Homo sapiens
agggatgctgaaccagttaagtatctatgaatattccaaa

SEQ ID NO: 47802 - DNA, 40 bp, Homo sapiens
ttggaatattcatagatacttaactggttcagcatccctc

SEQ ID NO: 47803 - DNA, 40 bp, Homo sapiens
gagggatgctgaaccagttaagtatctatgaatattccaa

SEQ ID NO: 47804 - DNA, 40 bp, Homo sapiens
tggaatattcatagatacttaactggttcagcatccctcg

SEQ ID NO: 47805 - DNA, 40 bp, Homo sapiens
cgagggatgctgaaccagttaagtatctatgaatattcca

SEQ ID NO: 47806 - DNA, 40 bp, Homo sapiens
ggaatattcatagatacttaactggttcagcatccctcgt

SEQ ID NO: 47807 - DNA, 40 bp, Homo sapiens
acgagggatgctgaaccagttaagtatctatgaatattcc

SEQ ID NO: 47808 - DNA, 40 bp, Homo sapiens
gaatattcatagatacttaactggttcagcatccctcgtc

SEQ ID NO: 47809 - DNA, 40 bp, Homo sapiens
gacgagggatgctgaaccagttaagtatctatgaatattc

SEQ ID NO: 47810 - DNA, 40 bp, Homo sapiens
aatattcatagatacttaactggttcagcatccctcgtcc

SEQ ID NO: 47811 - DNA, 40 bp, Homo sapiens
ggacgagggatgctgaaccagttaagtatctatgaatatt

SEQ ID NO: 47812 - DNA, 40 bp, Homo sapiens
atattcatagatacttaactggttcagcatccctcgtcca

SEQ ID NO: 47813 - DNA, 40 bp, Homo sapiens
tggacgagggatgctgaaccagttaagtatctatgaatat

SEQ ID NO: 47814 - DNA, 40 bp, Homo sapiens
tattcatagatacttaactggttcagcatccctcgtccaa

SEQ ID NO: 47815 - DNA, 40 bp, Homo sapiens
ttggacgagggatgctgaaccagttaagtatctatgaata

SEQ ID NO: 47816 - DNA, 40 bp, Homo sapiens
attcatagatacttaactggttcagcatccctcgtccaaa

SEQ ID NO: 47817 - DNA, 40 bp, Homo sapiens
tttggacgagggatgctgaaccagttaagtatctatgaat

SEQ ID NO: 47818 - DNA, 40 bp, Homo sapiens
ttcatagatacttaactggttcagcatccctcgtccaaaa

SEQ ID NO: 47819 - DNA, 40 bp, Homo sapiens
ttttggacgagggatgctgaaccagttaagtatctatgaa

SEQ ID NO: 47820 - DNA, 40 bp, Homo sapiens
tcatagatacttaactggttcagcatccctcgtccaaaaa

SEQ ID NO: 47821 - DNA, 40 bp, Homo sapiens
tttttggacgagggatgctgaaccagttaagtatctatga

SEQ ID NO: 47822 - DNA, 40 bp, Homo sapiens
catagatacttaactggttcagcatccctcgtccaaaaat

SEQ ID NO: 47823 - DNA, 40 bp, Homo sapiens
atttttggacgagggatgctgaaccagttaagtatctatg

SEQ ID NO: 47824 - DNA, 40 bp, Homo sapiens
atagatacttaactggttcagcatccctcgtccaaaaatc

SEQ ID NO: 47825 - DNA, 40 bp, Homo sapiens
gatttttggacgagggatgctgaaccagttaagtatctat

SEQ ID NO: 47826 - DNA, 40 bp, Homo sapiens
tagatacttaactggttcagcatccctcgtccaaaaatcc

SEQ ID NO: 47827 - DNA, 40 bp, Homo sapiens
ggatttttggacgagggatgctgaaccagttaagtatcta

SEQ ID NO: 47828 - DNA, 40 bp, Homo sapiens
agatacttaactggttcagcatccctcgtccaaaaatcca

SEQ ID NO: 47829 - DNA, 40 bp, Homo sapiens
tggatttttggacgagggatgctgaaccagttaagtatct

SEQ ID NO: 47830 - DNA, 40 bp, Homo sapiens
gatacttaactggttcagcatccctcgtccaaaaatccaa

SEQ ID NO: 47831 - DNA, 40 bp, Homo sapiens
ttggatttttggacgagggatgctgaaccagttaagtatc

SEQ ID NO: 47832 - DNA, 40 bp, Homo sapiens
atacttaactggttcagcatccctcgtccaaaaatccaaa

SEQ ID NO: 47833 - DNA, 40 bp, Homo sapiens
tttggatttttggacgagggatgctgaaccagttaagtat

SEQ ID NO: 47834 - DNA, 40 bp, Homo sapiens
tacttaactggttcagcatccctcgtccaaaaatccaaaa

SEQ ID NO: 47835 - DNA, 40 bp, Homo sapiens
ttttggatttttggacgagggatgctgaaccagttaagta

SEQ ID NO: 47836 - DNA, 40 bp, Homo sapiens
acttaactggttcagcatccctcgtccaaaaatccaaaat

SEQ ID NO: 47837 - DNA, 40 bp, Homo sapiens
attttggatttttggacgagggatgctgaaccagttaagt

SEQ ID NO: 47838 - DNA, 40 bp, Homo sapiens
cttaactggttcagcatccctcgtccaaaaatccaaaatc

SEQ ID NO: 47839 - DNA, 40 bp, Homo sapiens
gattttggatttttggacgagggatgctgaaccagttaag

SEQ ID NO: 47840 - DNA, 40 bp, Homo sapiens
ttaactggttcagcatccctcgtccaaaaatccaaaatca

SEQ ID NO: 47841 - DNA, 40 bp, Homo sapiens
tgattttggatttttggacgagggatgctgaaccagttaa

SEQ ID NO: 47842 - DNA, 40 bp, Homo sapiens
taactggttcagcatccctcgtccaaaaatccaaaatcag

SEQ ID NO: 47843 - DNA, 40 bp, Homo sapiens
ctgattttggatttttggacgagggatgctgaaccagtta

SEQ ID NO: 47844 - DNA, 40 bp, Homo sapiens
aactggttcagcatccctcgtccaaaaatccaaaatcaga

SEQ ID NO: 47845 - DNA, 40 bp, Homo sapiens
tctgattttggatttttggacgagggatgctgaaccagtt

SEQ ID NO: 47846 - DNA, 40 bp, Homo sapiens
actggttcagcatccctcgtccaaaaatccaaaatcagat

SEQ ID NO: 47847 - DNA, 40 bp, Homo sapiens
atctgattttggatttttggacgagggatgctgaaccagt

SEQ ID NO: 47848 - DNA, 40 bp, Homo sapiens
ctggttcagcatccctcgtccaaaaatccaaaatcagatg

SEQ ID NO: 47849 - DNA, 40 bp, Homo sapiens
catctgattttggatttttggacgagggatgctgaaccag

SEQ ID NO: 47850 - DNA, 40 bp, Homo sapiens
tggttcagcatccctcgtccaaaaatccaaaatcagatgg

SEQ ID NO: 47851 - DNA, 40 bp, Homo sapiens
ccatctgattttggatttttggacgagggatgctgaacca

SEQ ID NO: 47852 - DNA, 40 bp, Homo sapiens
ggttcagcatccctcgtccaaaaatccaaaatcagatgga

SEQ ID NO: 47853 - DNA, 40 bp, Homo sapiens
tccatctgattttggatttttggacgagggatgctgaacc

SEQ ID NO: 47854 - DNA, 40 bp, Homo sapiens
gttcagcatccctcgtccaaaaatccaaaatcagatggag

SEQ ID NO: 47855 - DNA, 40 bp, Homo sapiens
ctccatctgattttggatttttggacgagggatgctgaac

SEQ ID NO: 47856 - DNA, 40 bp, Homo sapiens
ttcagcatccctcgtccaaaaatccaaaatcagatggagc

SEQ ID NO: 47857 - DNA, 40 bp, Homo sapiens
gctccatctgattttggatttttggacgagggatgctgaa

SEQ ID NO: 47858 - DNA, 40 bp, Homo sapiens
tcagcatccctcgtccaaaaatccaaaatcagatggagct

SEQ ID NO: 47859 - DNA, 40 bp, Homo sapiens
agctccatctgattttggatttttggacgagggatgctga

SEQ ID NO: 47860 - DNA, 40 bp, Homo sapiens
cagcatccctcgtccaaaaatccaaaatcagatggagctc

SEQ ID NO: 47861 - DNA, 40 bp, Homo sapiens
gagctccatctgattttggatttttggacgagggatgctg

SEQ ID NO: 47862 - DNA, 40 bp, Homo sapiens
agcatccctcgtccaaaaatccaaaatcagatggagctca

SEQ ID NO: 47863 - DNA, 40 bp, Homo sapiens
tgagctccatctgattttggatttttggacgagggatgct

SEQ ID NO: 47864 - DNA, 40 bp, Homo sapiens
gcatccctcgtccaaaaatccaaaatcagatggagctcag

SEQ ID NO: 47865 - DNA, 40 bp, Homo sapiens
ctgagctccatctgattttggatttttggacgagggatgc

SEQ ID NO: 47866 - DNA, 40 bp, Homo sapiens
catccctcgtccaaaaatccaaaatcagatggagctcagt

SEQ ID NO: 47867 - DNA, 40 bp, Homo sapiens
actgagctccatctgattttggatttttggacgagggatg

SEQ ID NO: 47868 - DNA, 40 bp, Homo sapiens
atccctcgtccaaaaatccaaaatcagatggagctcagtg

SEQ ID NO: 47869 - DNA, 40 bp, Homo sapiens
cactgagctccatctgattttggatttttggacgagggat

SEQ ID NO: 47870 - DNA, 40 bp, Homo sapiens
tccctcgtccaaaaatccaaaatcagatggagctcagtgg

SEQ ID NO: 47871 - DNA, 40 bp, Homo sapiens
ccactgagctccatctgattttggatttttggacgaggga

SEQ ID NO: 47872 - DNA, 40 bp, Homo sapiens
ccctcgtccaaaaatccaaaatcagatggagctcagtggc

SEQ ID NO: 47873 - DNA, 40 bp, Homo sapiens
gccactgagctccatctgattttggatttttggacgaggg

SEQ ID NO: 47874 - DNA, 40 bp, Homo sapiens
cctcgtccaaaaatccaaaatcagatggagctcagtggct

SEQ ID NO: 47875 - DNA, 40 bp, Homo sapiens
agccactgagctccatctgattttggatttttggacgagg

SEQ ID NO: 47876 - DNA, 40 bp, Homo sapiens
ctcgtccaaaaatccaaaatcagatggagctcagtggctc

SEQ ID NO: 47877 - DNA, 40 bp, Homo sapiens
gagccactgagctccatctgattttggatttttggacgag

SEQ ID NO: 47878 - DNA, 40 bp, Homo sapiens
tcgtccaaaaatccaaaatcagatggagctcagtggctca

SEQ ID NO: 47879 - DNA, 40 bp, Homo sapiens
tgagccactgagctccatctgattttggatttttggacga

SEQ ID NO: 47880 - DNA, 40 bp, Homo sapiens
cgtccaaaaatccaaaatcagatggagctcagtggctcat

SEQ ID NO: 47881 - DNA, 40 bp, Homo sapiens
atgagccactgagctccatctgattttggatttttggacg

SEQ ID NO: 47882 - DNA, 40 bp, Homo sapiens
gtccaaaaatccaaaatcagatggagctcagtggctcatg

SEQ ID NO: 47883 - DNA, 40 bp, Homo sapiens
catgagccactgagctccatctgattttggatttttggac

SEQ ID NO: 47884 - DNA, 40 bp, Homo sapiens
tccaaaaatccaaaatcagatggagctcagtggctcatgc

SEQ ID NO: 47885 - DNA, 40 bp, Homo sapiens
gcatgagccactgagctccatctgattttggatttttgga

SEQ ID NO: 47886 - DNA, 40 bp, Homo sapiens
ccaaaaatccaaaatcagatggagctcagtggctcatgct

SEQ ID NO: 47887 - DNA, 40 bp, Homo sapiens
agcatgagccactgagctccatctgattttggatttttgg

SEQ ID NO: 47888 - DNA, 40 bp, Homo sapiens
caaaaatccaaaatcagatggagctcagtggctcatgctt

SEQ ID NO: 47889 - DNA, 40 bp, Homo sapiens
aagcatgagccactgagctccatctgattttggatttttg

SEQ ID NO: 47890 - DNA, 40 bp, Homo sapiens
aaaaatccaaaatcagatggagctcagtggctcatgcttg

SEQ ID NO: 47891 - DNA, 40 bp, Homo sapiens
caagcatgagccactgagctccatctgattttggattttt

SEQ ID NO: 47892 - DNA, 40 bp, Homo sapiens
aaaatccaaaatcagatggagctcagtggctcatgcttgt

SEQ ID NO: 47893 - DNA, 40 bp, Homo sapiens
acaagcatgagccactgagctccatctgattttggatttt

SEQ ID NO: 47894 - DNA, 40 bp, Homo sapiens
aaatccaaaatcagatggagctcagtggctcatgcttgta

SEQ ID NO: 47895 - DNA, 40 bp, Homo sapiens
tacaagcatgagccactgagctccatctgattttggattt

SEQ ID NO: 47896 - DNA, 40 bp, Homo sapiens
aatccaaaatcagatggagctcagtggctcatgcttgtaa

SEQ ID NO: 47897 - DNA, 40 bp, Homo sapiens
ttacaagcatgagccactgagctccatctgattttggatt

SEQ ID NO: 47898 - DNA, 40 bp, Homo sapiens
atccaaaatcagatggagctcagtggctcatgcttgtaat

SEQ ID NO: 47899 - DNA, 40 bp, Homo sapiens
attacaagcatgagccactgagctccatctgattttggat

SEQ ID NO: 47900 - DNA, 40 bp, Homo sapiens
tccaaaatcagatggagctcagtggctcatgcttgtaatc

SEQ ID NO: 47901 - DNA, 40 bp, Homo sapiens
gattacaagcatgagccactgagctccatctgattttgga

SEQ ID NO: 47902 - DNA, 40 bp, Homo sapiens
ccaaaatcagatggagctcagtggctcatgcttgtaatcc

SEQ ID NO: 47903 - DNA, 40 bp, Homo sapiens
ggattacaagcatgagccactgagctccatctgattttgg

SEQ ID NO: 47904 - DNA, 40 bp, Homo sapiens
caaaatcagatggagctcagtggctcatgcttgtaatccc

SEQ ID NO: 47905 - DNA, 40 bp, Homo sapiens
gggattacaagcatgagccactgagctccatctgattttg

SEQ ID NO: 47906 - DNA, 40 bp, Homo sapiens
aaaatcagatggagctcagtggctcatgcttgtaatccca

SEQ ID NO: 47907 - DNA, 40 bp, Homo sapiens
tgggattacaagcatgagccactgagctccatctgatttt

SEQ ID NO: 47908 - DNA, 40 bp, Homo sapiens
aaatcagatggagctcagtggctcatgcttgtaatcccaa

SEQ ID NO: 47909 - DNA, 40 bp, Homo sapiens
ttgggattacaagcatgagccactgagctccatctgattt

SEQ ID NO: 47910 - DNA, 40 bp, Homo sapiens
aatcagatggagctcagtggctcatgcttgtaatcccaac

SEQ ID NO: 47911 - DNA, 40 bp, Homo sapiens
gttgggattacaagcatgagccactgagctccatctgatt

SEQ ID NO: 47912 - DNA, 40 bp, Homo sapiens
atcagatggagctcagtggctcatgcttgtaatcccaaca

SEQ ID NO: 47913 - DNA, 40 bp, Homo sapiens
tgttgggattacaagcatgagccactgagctccatctgat

SEQ ID NO: 47914 - DNA, 40 bp, Homo sapiens
tcagatggagctcagtggctcatgcttgtaatcccaacac

SEQ ID NO: 47915 - DNA, 40 bp, Homo sapiens
gtgttgggattacaagcatgagccactgagctccatctga

SEQ ID NO: 47916 - DNA, 40 bp, Homo sapiens
cagatggagctcagtggctcatgcttgtaatcccaacacg

SEQ ID NO: 47917 - DNA, 40 bp, Homo sapiens
cgtgttgggattacaagcatgagccactgagctccatctg

SEQ ID NO: 47918 - DNA, 40 bp, Homo sapiens
agatggagctcagtggctcatgcttgtaatcccaacacgt

SEQ ID NO: 47919 - DNA, 40 bp, Homo sapiens
acgtgttgggattacaagcatgagccactgagctccatct

SEQ ID NO: 47920 - DNA, 40 bp, Homo sapiens
gatggagctcagtggctcatgcttgtaatcccaacacgtt

SEQ ID NO: 47921 - DNA, 40 bp, Homo sapiens
aacgtgttgggattacaagcatgagccactgagctccatc

SEQ ID NO: 47922 - DNA, 40 bp, Homo sapiens
atggagctcagtggctcatgcttgtaatcccaacacgttg

SEQ ID NO: 47923 - DNA, 40 bp, Homo sapiens
caacgtgttgggattacaagcatgagccactgagctccat

SEQ ID NO: 47924 - DNA, 40 bp, Homo sapiens
tggagctcagtggctcatgcttgtaatcccaacacgttgg

SEQ ID NO: 47925 - DNA, 40 bp, Homo sapiens
ccaacgtgttgggattacaagcatgagccactgagctcca

SEQ ID NO: 47926 - DNA, 40 bp, Homo sapiens
ggagctcagtggctcatgcttgtaatcccaacacgttggg

SEQ ID NO: 47927 - DNA, 40 bp, Homo sapiens
cccaacgtgttgggattacaagcatgagccactgagctcc

SEQ ID NO: 47928 - DNA, 40 bp, Homo sapiens
gagctcagtggctcatgcttgtaatcccaacacgttgggt

SEQ ID NO: 47929 - DNA, 40 bp, Homo sapiens
acccaacgtgttgggattacaagcatgagccactgagctc

SEQ ID NO: 47930 - DNA, 40 bp, Homo sapiens
agctcagtggctcatgcttgtaatcccaacacgttgggtg

SEQ ID NO: 47931 - DNA, 40 bp, Homo sapiens
cacccaacgtgttgggattacaagcatgagccactgagct

SEQ ID NO: 47932 - DNA, 40 bp, Homo sapiens
gctcagtggctcatgcttgtaatcccaacacgttgggtgg

SEQ ID NO: 47933 - DNA, 40 bp, Homo sapiens
ccacccaacgtgttgggattacaagcatgagccactgagc

SEQ ID NO: 47934 - DNA, 40 bp, Homo sapiens
ctcagtggctcatgcttgtaatcccaacacgttgggtggc

SEQ ID NO: 47935 - DNA, 40 bp, Homo sapiens
gccacccaacgtgttgggattacaagcatgagccactgag

SEQ ID NO: 47936 - DNA, 40 bp, Homo sapiens
tcagtggctcatgcttgtaatcccaacacgttgggtggcc

SEQ ID NO: 47937 - DNA, 40 bp, Homo sapiens
ggccacccaacgtgttgggattacaagcatgagccactga

SEQ ID NO: 47938 - DNA, 40 bp, Homo sapiens
cagtggctcatgcttgtaatcccaacacgttgggtggcca

SEQ ID NO: 47939 - DNA, 40 bp, Homo sapiens
tggccacccaacgtgttgggattacaagcatgagccactg

SEQ ID NO: 47940 - DNA, 40 bp, Homo sapiens
agtggctcatgcttgtaatcccaacacgttgggtggccaa

SEQ ID NO: 47941 - DNA, 40 bp, Homo sapiens
ttggccacccaacgtgttgggattacaagcatgagccact

SEQ ID NO: 47942 - DNA, 40 bp, Homo sapiens
gtggctcatgcttgtaatcccaacacgttgggtggccaag

SEQ ID NO: 47943 - DNA, 40 bp, Homo sapiens
cttggccacccaacgtgttgggattacaagcatgagccac

SEQ ID NO: 47944 - DNA, 40 bp, Homo sapiens
tggctcatgcttgtaatcccaacacgttgggtggccaagg

SEQ ID NO: 47945 - DNA, 40 bp, Homo sapiens
ccttggccacccaacgtgttgggattacaagcatgagcca

SEQ ID NO: 47946 - DNA, 40 bp, Homo sapiens
ggctcatgcttgtaatcccaacacgttgggtggccaaggc

SEQ ID NO: 47947 - DNA, 40 bp, Homo sapiens
gccttggccacccaacgtgttgggattacaagcatgagcc

SEQ ID NO: 47948 - DNA, 40 bp, Homo sapiens
gctcatgcttgtaatcccaacacgttgggtggccaaggca

SEQ ID NO: 47949 - DNA, 40 bp, Homo sapiens
tgccttggccacccaacgtgttgggattacaagcatgagc

SEQ ID NO: 47950 - DNA, 40 bp, Homo sapiens
ctcatgcttgtaatcccaacacgttgggtggccaaggcag

SEQ ID NO: 47951 - DNA, 40 bp, Homo sapiens
ctgccttggccacccaacgtgttgggattacaagcatgag

SEQ ID NO: 47952 - DNA, 40 bp, Homo sapiens
tcatgcttgtaatcccaacacgttgggtggccaaggcagg

SEQ ID NO: 47953 - DNA, 40 bp, Homo sapiens
cctgccttggccacccaacgtgttgggattacaagcatga

SEQ ID NO: 47954 - DNA, 40 bp, Homo sapiens
catgcttgtaatcccaacacgttgggtggccaaggcagga

SEQ ID NO: 47955 - DNA, 40 bp, Homo sapiens
tcctgccttggccacccaacgtgttgggattacaagcatg

SEQ ID NO: 47956 - DNA, 40 bp, Homo sapiens
atgcttgtaatcccaacacgttgggtggccaaggcaggag

SEQ ID NO: 47957 - DNA, 40 bp, Homo sapiens
ctcctgccttggccacccaacgtgttgggattacaagcat

SEQ ID NO: 47958 - DNA, 40 bp, Homo sapiens
tgcttgtaatcccaacacgttgggtggccaaggcaggagg

SEQ ID NO: 47959 - DNA, 40 bp, Homo sapiens
cctcctgccttggccacccaacgtgttgggattacaagca

SEQ ID NO: 47960 - DNA, 40 bp, Homo sapiens
gcttgtaatcccaacacgttgggtggccaaggcaggagga

SEQ ID NO: 47961 - DNA, 40 bp, Homo sapiens
tcctcctgccttggccacccaacgtgttgggattacaagc

SEQ ID NO: 47962 - DNA, 40 bp, Homo sapiens
cttgtaatcccaacacgttgggtggccaaggcaggaggat

SEQ ID NO: 47963 - DNA, 40 bp, Homo sapiens
atcctcctgccttggccacccaacgtgttgggattacaag

SEQ ID NO: 47964 - DNA, 40 bp, Homo sapiens
ttgtaatcccaacacgttgggtggccaaggcaggaggatc

SEQ ID NO: 47965 - DNA, 40 bp, Homo sapiens
gatcctcctgccttggccacccaacgtgttgggattacaa

SEQ ID NO: 47966 - DNA, 40 bp, Homo sapiens
tgtaatcccaacacgttgggtggccaaggcaggaggatcg

SEQ ID NO: 47967 - DNA, 40 bp, Homo sapiens
cgatcctcctgccttggccacccaacgtgttgggattaca

SEQ ID NO: 47968 - DNA, 40 bp, Homo sapiens
gtaatcccaacacgttgggtggccaaggcaggaggatcgc

SEQ ID NO: 47969 - DNA, 40 bp, Homo sapiens
gcgatcctcctgccttggccacccaacgtgttgggattac

SEQ ID NO: 47970 - DNA, 40 bp, Homo sapiens
taatcccaacacgttgggtggccaaggcaggaggatcgct

SEQ ID NO: 47971 - DNA, 40 bp, Homo sapiens
agcgatcctcctgccttggccacccaacgtgttgggatta

SEQ ID NO: 47972 - DNA, 40 bp, Homo sapiens
aatcccaacacgttgggtggccaaggcaggaggatcgctt

SEQ ID NO: 47973 - DNA, 40 bp, Homo sapiens
aagcgatcctcctgccttggccacccaacgtgttgggatt

SEQ ID NO: 47974 - DNA, 40 bp, Homo sapiens
atcccaacacgttgggtggccaaggcaggaggatcgcttg

SEQ ID NO: 47975 - DNA, 40 bp, Homo sapiens
caagcgatcctcctgccttggccacccaacgtgttgggat

SEQ ID NO: 47976 - DNA, 40 bp, Homo sapiens
tcccaacacgttgggtggccaaggcaggaggatcgcttga

SEQ ID NO: 47977 - DNA, 40 bp, Homo sapiens
tcaagcgatcctcctgccttggccacccaacgtgttggga

SEQ ID NO: 47978 - DNA, 40 bp, Homo sapiens
cccaacacgttgggtggccaaggcaggaggatcgcttgag

SEQ ID NO: 47979 - DNA, 40 bp, Homo sapiens
ctcaagcgatcctcctgccttggccacccaacgtgttggg

SEQ ID NO: 47980 - DNA, 40 bp, Homo sapiens
ccaacacgttgggtggccaaggcaggaggatcgcttgagc

SEQ ID NO: 47981 - DNA, 40 bp, Homo sapiens
gctcaagcgatcctcctgccttggccacccaacgtgttgg

SEQ ID NO: 47982 - DNA, 40 bp, Homo sapiens
caacacgttgggtggccaaggcaggaggatcgcttgagcc

SEQ ID NO: 47983 - DNA, 40 bp, Homo sapiens
ggctcaagcgatcctcctgccttggccacccaacgtgttg

SEQ ID NO: 47984 - DNA, 40 bp, Homo sapiens
aacacgttgggtggccaaggcaggaggatcgcttgagccc

SEQ ID NO: 47985 - DNA, 40 bp, Homo sapiens
gggctcaagcgatcctcctgccttggccacccaacgtgtt

SEQ ID NO: 47986 - DNA, 40 bp, Homo sapiens
acacgttgggtggccaaggcaggaggatcgcttgagccca

SEQ ID NO: 47987 - DNA, 40 bp, Homo sapiens
tgggctcaagcgatcctcctgccttggccacccaacgtgt

SEQ ID NO: 47988 - DNA, 40 bp, Homo sapiens
cacgttgggtggccaaggcaggaggatcgcttgagcccag

SEQ ID NO: 47989 - DNA, 40 bp, Homo sapiens
ctgggctcaagcgatcctcctgccttggccacccaacgtg

SEQ ID NO: 47990 - DNA, 40 bp, Homo sapiens
acgttgggtggccaaggcaggaggatcgcttgagcccagg

SEQ ID NO: 47991 - DNA, 40 bp, Homo sapiens
cctgggctcaagcgatcctcctgccttggccacccaacgt

SEQ ID NO: 47992 - DNA, 40 bp, Homo sapiens
cgttgggtggccaaggcaggaggatcgcttgagcccagga

SEQ ID NO: 47993 - DNA, 40 bp, Homo sapiens
tcctgggctcaagcgatcctcctgccttggccacccaacg

SEQ ID NO: 47994 - DNA, 40 bp, Homo sapiens
gttgggtggccaaggcaggaggatcgcttgagcccaggag

SEQ ID NO: 47995 - DNA, 40 bp, Homo sapiens
ctcctgggctcaagcgatcctcctgccttggccacccaac

SEQ ID NO: 47996 - DNA, 40 bp, Homo sapiens
ttgggtggccaaggcaggaggatcgcttgagcccaggagt

SEQ ID NO: 47997 - DNA, 40 bp, Homo sapiens
actcctgggctcaagcgatcctcctgccttggccacccaa

SEQ ID NO: 47998 - DNA, 40 bp, Homo sapiens
tgggtggccaaggcaggaggatcgcttgagcccaggagtt

SEQ ID NO: 47999 - DNA, 40 bp, Homo sapiens
aactcctgggctcaagcgatcctcctgccttggccaccca

SEQ ID NO: 48000 - DNA, 40 bp, Homo sapiens
gggtggccaaggcaggaggatcgcttgagcccaggagttc

SEQ ID NO: 48001 - DNA, 40 bp, Homo sapiens
gaactcctgggctcaagcgatcctcctgccttggccaccc

SEQ ID NO: 48002 - DNA, 40 bp, Homo sapiens
ggtggccaaggcaggaggatcgcttgagcccaggagttca

SEQ ID NO: 48003 - DNA, 40 bp, Homo sapiens
tgaactcctgggctcaagcgatcctcctgccttggccacc

SEQ ID NO: 48004 - DNA, 40 bp, Homo sapiens
gtggccaaggcaggaggatcgcttgagcccaggagttcaa

SEQ ID NO: 48005 - DNA, 40 bp, Homo sapiens
ttgaactcctgggctcaagcgatcctcctgccttggccac

SEQ ID NO: 48006 - DNA, 40 bp, Homo sapiens
tggccaaggcaggaggatcgcttgagcccaggagttcaac

SEQ ID NO: 48007 - DNA, 40 bp, Homo sapiens
gttgaactcctgggctcaagcgatcctcctgccttggcca

SEQ ID NO: 48008 - DNA, 40 bp, Homo sapiens
ggccaaggcaggaggatcgcttgagcccaggagttcaacc

SEQ ID NO: 48009 - DNA, 40 bp, Homo sapiens
ggttgaactcctgggctcaagcgatcctcctgccttggcc

SEQ ID NO: 48010 - DNA, 40 bp, Homo sapiens
gccaaggcaggaggatcgcttgagcccaggagttcaacca

SEQ ID NO: 48011 - DNA, 40 bp, Homo sapiens
tggttgaactcctgggctcaagcgatcctcctgccttggc

SEQ ID NO: 48012 - DNA, 40 bp, Homo sapiens
ccaaggcaggaggatcgcttgagcccaggagttcaaccag

SEQ ID NO: 48013 - DNA, 40 bp, Homo sapiens
ctggttgaactcctgggctcaagcgatcctcctgccttgg

SEQ ID NO: 48014 - DNA, 40 bp, Homo sapiens
caaggcaggaggatcgcttgagcccaggagttcaaccagc

SEQ ID NO: 48015 - DNA, 40 bp, Homo sapiens
gctggttgaactcctgggctcaagcgatcctcctgccttg

SEQ ID NO: 48016 - DNA, 40 bp, Homo sapiens
aaggcaggaggatcgcttgagcccaggagttcaaccagcc

SEQ ID NO: 48017 - DNA, 40 bp, Homo sapiens
ggctggttgaactcctgggctcaagcgatcctcctgcctt

SEQ ID NO: 48018 - DNA, 40 bp, Homo sapiens
aggcaggaggatcgcttgagcccaggagttcaaccagcct

SEQ ID NO: 48019 - DNA, 40 bp, Homo sapiens
aggctggttgaactcctgggctcaagcgatcctcctgcct

SEQ ID NO: 48020 - DNA, 40 bp, Homo sapiens
ggcaggaggatcgcttgagcccaggagttcaaccagcctg

SEQ ID NO: 48021 - DNA, 40 bp, Homo sapiens
caggctggttgaactcctgggctcaagcgatcctcctgcc

SEQ ID NO: 48022 - DNA, 40 bp, Homo sapiens
gcaggaggatcgcttgagcccaggagttcaaccagcctga

SEQ ID NO: 48023 - DNA, 40 bp, Homo sapiens
tcaggctggttgaactcctgggctcaagcgatcctcctgc

SEQ ID NO: 48024 - DNA, 40 bp, Homo sapiens
caggaggatcgcttgagcccaggagttcaaccagcctgag

SEQ ID NO: 48025 - DNA, 40 bp, Homo sapiens
ctcaggctggttgaactcctgggctcaagcgatcctcctg

SEQ ID NO: 48026 - DNA, 40 bp, Homo sapiens
aggaggatcgcttgagcccaggagttcaaccagcctgagc

SEQ ID NO: 48027 - DNA, 40 bp, Homo sapiens
gctcaggctggttgaactcctgggctcaagcgatcctcct

SEQ ID NO: 48028 - DNA, 40 bp, Homo sapiens
ggaggatcgcttgagcccaggagttcaaccagcctgagca

SEQ ID NO: 48029 - DNA, 40 bp, Homo sapiens
tgctcaggctggttgaactcctgggctcaagcgatcctcc

SEQ ID NO: 48030 - DNA, 40 bp, Homo sapiens
gaggatcgcttgagcccaggagttcaaccagcctgagcaa

SEQ ID NO: 48031 - DNA, 40 bp, Homo sapiens
ttgctcaggctggttgaactcctgggctcaagcgatcctc

SEQ ID NO: 48032 - DNA, 40 bp, Homo sapiens
aggatcgcttgagcccaggagttcaaccagcctgagcaac

SEQ ID NO: 48033 - DNA, 40 bp, Homo sapiens
gttgctcaggctggttgaactcctgggctcaagcgatcct

SEQ ID NO: 48034 - DNA, 40 bp, Homo sapiens
ggatcgcttgagcccaggagttcaaccagcctgagcaaca

SEQ ID NO: 48035 - DNA, 40 bp, Homo sapiens
tgttgctcaggctggttgaactcctgggctcaagcgatcc

SEQ ID NO: 48036 - DNA, 40 bp, Homo sapiens
gatcgcttgagcccaggagttcaaccagcctgagcaacac

SEQ ID NO: 48037 - DNA, 40 bp, Homo sapiens
gtgttgctcaggctggttgaactcctgggctcaagcgatc

SEQ ID NO: 48038 - DNA, 40 bp, Homo sapiens
atcgcttgagcccaggagttcaaccagcctgagcaacaca

SEQ ID NO: 48039 - DNA, 40 bp, Homo sapiens
tgtgttgctcaggctggttgaactcctgggctcaagcgat

SEQ ID NO: 48040 - DNA, 40 bp, Homo sapiens
tcgcttgagcccaggagttcaaccagcctgagcaacacaa

SEQ ID NO: 48041 - DNA, 40 bp, Homo sapiens
ttgtgttgctcaggctggttgaactcctgggctcaagcga

SEQ ID NO: 48042 - DNA, 40 bp, Homo sapiens
cgcttgagcccaggagttcaaccagcctgagcaacacaag

SEQ ID NO: 48043 - DNA, 40 bp, Homo sapiens
cttgtgttgctcaggctggttgaactcctgggctcaagcg

SEQ ID NO: 48044 - DNA, 40 bp, Homo sapiens
gcttgagcccaggagttcaaccagcctgagcaacacaaga

SEQ ID NO: 48045 - DNA, 40 bp, Homo sapiens
tcttgtgttgctcaggctggttgaactcctgggctcaagc

SEQ ID NO: 48046 - DNA, 40 bp, Homo sapiens
cttgagcccaggagttcaaccagcctgagcaacacaagac

SEQ ID NO: 48047 - DNA, 40 bp, Homo sapiens
gtcttgtgttgctcaggctggttgaactcctgggctcaag

SEQ ID NO: 48048 - DNA, 40 bp, Homo sapiens
ttgagcccaggagttcaaccagcctgagcaacacaagacc

SEQ ID NO: 48049 - DNA, 40 bp, Homo sapiens
ggtcttgtgttgctcaggctggttgaactcctgggctcaa

SEQ ID NO: 48050 - DNA, 40 bp, Homo sapiens
tgagcccaggagttcaaccagcctgagcaacacaagaccc

SEQ ID NO: 48051 - DNA, 40 bp, Homo sapiens
gggtcttgtgttgctcaggctggttgaactcctgggctca

SEQ ID NO: 48052 - DNA, 40 bp, Homo sapiens
gagcccaggagttcaaccagcctgagcaacacaagaccct

SEQ ID NO: 48053 - DNA, 40 bp, Homo sapiens
agggtcttgtgttgctcaggctggttgaactcctgggctc

SEQ ID NO: 48054 - DNA, 40 bp, Homo sapiens
agcccaggagttcaaccagcctgagcaacacaagacccta

SEQ ID NO: 48055 - DNA, 40 bp, Homo sapiens
tagggtcttgtgttgctcaggctggttgaactcctgggct

SEQ ID NO: 48056 - DNA, 40 bp, Homo sapiens
gcccaggagttcaaccagcctgagcaacacaagaccctat

SEQ ID NO: 48057 - DNA, 40 bp, Homo sapiens
atagggtcttgtgttgctcaggctggttgaactcctgggc

SEQ ID NO: 48058 - DNA, 40 bp, Homo sapiens
cccaggagttcaaccagcctgagcaacacaagaccctatc

SEQ ID NO: 48059 - DNA, 40 bp, Homo sapiens
gatagggtcttgtgttgctcaggctggttgaactcctggg

SEQ ID NO: 48060 - DNA, 40 bp, Homo sapiens
ccaggagttcaaccagcctgagcaacacaagaccctatct

SEQ ID NO: 48061 - DNA, 40 bp, Homo sapiens
agatagggtcttgtgttgctcaggctggttgaactcctgg

SEQ ID NO: 48062 - DNA, 40 bp, Homo sapiens
caggagttcaaccagcctgagcaacacaagaccctatctc

SEQ ID NO: 48063 - DNA, 40 bp, Homo sapiens
gagatagggtcttgtgttgctcaggctggttgaactcctg

SEQ ID NO: 48064 - DNA, 40 bp, Homo sapiens
aggagttcaaccagcctgagcaacacaagaccctatctct

SEQ ID NO: 48065 - DNA, 40 bp, Homo sapiens
agagatagggtcttgtgttgctcaggctggttgaactcct

SEQ ID NO: 48066 - DNA, 40 bp, Homo sapiens
ggagttcaaccagcctgagcaacacaagaccctatctctc

SEQ ID NO: 48067 - DNA, 40 bp, Homo sapiens
gagagatagggtcttgtgttgctcaggctggttgaactcc

SEQ ID NO: 48068 - DNA, 40 bp, Homo sapiens
gagttcaaccagcctgagcaacacaagaccctatctctcc

SEQ ID NO: 48069 - DNA, 40 bp, Homo sapiens
ggagagatagggtcttgtgttgctcaggctggttgaactc

SEQ ID NO: 48070 - DNA, 40 bp, Homo sapiens
agttcaaccagcctgagcaacacaagaccctatctctcca

SEQ ID NO: 48071 - DNA, 40 bp, Homo sapiens
tggagagatagggtcttgtgttgctcaggctggttgaact

SEQ ID NO: 48072 - DNA, 40 bp, Homo sapiens
gttcaaccagcctgagcaacacaagaccctatctctccaa

SEQ ID NO: 48073 - DNA, 40 bp, Homo sapiens
ttggagagatagggtcttgtgttgctcaggctggttgaac

SEQ ID NO: 48074 - DNA, 40 bp, Homo sapiens
ttcaaccagcctgagcaacacaagaccctatctctccaaa

SEQ ID NO: 48075 - DNA, 40 bp, Homo sapiens
tttggagagatagggtcttgtgttgctcaggctggttgaa

SEQ ID NO: 48076 - DNA, 40 bp, Homo sapiens
tcaaccagcctgagcaacacaagaccctatctctccaaaa

SEQ ID NO: 48077 - DNA, 40 bp, Homo sapiens
ttttggagagatagggtcttgtgttgctcaggctggttga

SEQ ID NO: 48078 - DNA, 40 bp, Homo sapiens
caaccagcctgagcaacacaagaccctatctctccaaaaa

SEQ ID NO: 48079 - DNA, 40 bp, Homo sapiens
tttttggagagatagggtcttgtgttgctcaggctggttg

SEQ ID NO: 48080 - DNA, 40 bp, Homo sapiens
aaccagcctgagcaacacaagaccctatctctccaaaaaa

SEQ ID NO: 48081 - DNA, 40 bp, Homo sapiens
ttttttggagagatagggtcttgtgttgctcaggctggtt

SEQ ID NO: 48082 - DNA, 40 bp, Homo sapiens
accagcctgagcaacacaagaccctatctctccaaaaaaa

SEQ ID NO: 48083 - DNA, 40 bp, Homo sapiens
tttttttggagagatagggtcttgtgttgctcaggctggt

SEQ ID NO: 48084 - DNA, 40 bp, Homo sapiens
ccagcctgagcaacacaagaccctatctctccaaaaaaaa

SEQ ID NO: 48085 - DNA, 40 bp, Homo sapiens
ttttttttggagagatagggtcttgtgttgctcaggctgg

SEQ ID NO: 48086 - DNA, 40 bp, Homo sapiens
cagcctgagcaacacaagaccctatctctccaaaaaaaaa

SEQ ID NO: 48087 - DNA, 40 bp, Homo sapiens
tttttttttggagagatagggtcttgtgttgctcaggctg

SEQ ID NO: 48088 - DNA, 40 bp, Homo sapiens
agcctgagcaacacaagaccctatctctccaaaaaaaaaa

SEQ ID NO: 48089 - DNA, 40 bp, Homo sapiens
ttttttttttggagagatagggtcttgtgttgctcaggct

SEQ ID NO: 48090 - DNA, 40 bp, Homo sapiens
gcctgagcaacacaagaccctatctctccaaaaaaaaaaa

SEQ ID NO: 48091 - DNA, 40 bp, Homo sapiens
tttttttttttggagagatagggtcttgtgttgctcaggc

SEQ ID NO: 48092 - DNA, 40 bp, Homo sapiens
cctgagcaacacaagaccctatctctccaaaaaaaaaaaa

SEQ ID NO: 48093 - DNA, 40 bp, Homo sapiens
ttttttttttttggagagatagggtcttgtgttgctcagg

SEQ ID NO: 48094 - DNA, 40 bp, Homo sapiens
ctgagcaacacaagaccctatctctccaaaaaaaaaaaaa

SEQ ID NO: 48095 - DNA, 40 bp, Homo sapiens
tttttttttttttggagagatagggtcttgtgttgctcag

SEQ ID NO: 48096 - DNA, 40 bp, Homo sapiens
tgagcaacacaagaccctatctctccaaaaaaaaaaaaaa

SEQ ID NO: 48097 - DNA, 40 bp, Homo sapiens
ttttttttttttttggagagatagggtcttgtgttgctca

SEQ ID NO: 48098 - DNA, 40 bp, Homo sapiens
gagcaacacaagaccctatctctccaaaaaaaaaaaaaaa

SEQ ID NO: 48099 - DNA, 40 bp, Homo sapiens
tttttttttttttttggagagatagggtcttgtgttgctc

SEQ ID NO: 48100 - DNA, 40 bp, Homo sapiens
agcaacacaagaccctatctctccaaaaaaaaaaaaaaaa

SEQ ID NO: 48101 - DNA, 40 bp, Homo sapiens
ttttttttttttttttggagagatagggtcttgtgttgct

SEQ ID NO: 48102 - DNA, 40 bp, Homo sapiens
gcaacacaagaccctatctctccaaaaaaaaaaaaaaaaa

SEQ ID NO: 48103 - DNA, 40 bp, Homo sapiens
tttttttttttttttttggagagatagggtcttgtgttgc

SEQ ID NO: 48104 - DNA, 40 bp, Homo sapiens
caacacaagaccctatctctccaaaaaaaaaaaaaaaaaa

SEQ ID NO: 48105 - DNA, 40 bp, Homo sapiens
ttttttttttttttttttggagagatagggtcttgtgttg

SEQ ID NO: 48106 - DNA, 40 bp, Homo sapiens
aacacaagaccctatctctccaaaaaaaaaaaaaaaaaaa

SEQ ID NO: 48107 - DNA, 40 bp, Homo sapiens
tttttttttttttttttttggagagatagggtcttgtgtt

SEQ ID NO: 48108 - DNA, 40 bp, Homo sapiens
acacaagaccctatctctccaaaaaaaaaaaaaaaaaaaa

SEQ ID NO: 48109 - DNA, 40 bp, Homo sapiens
ttttttttttttttttttttggagagatagggtcttgtgt

SEQ ID NO: 48110 - DNA, 40 bp, Homo sapiens
cacaagaccctatctctccaaaaaaaaaaaaaaaaaaaaa

SEQ ID NO: 48111 - DNA, 40 bp, Homo sapiens
tttttttttttttttttttttggagagatagggtcttgtg

SEQ ID NO: 48112 - DNA, 40 bp, Homo sapiens
acaagaccctatctctccaaaaaaaaaaaaaaaaaaaaaa

SEQ ID NO: 48113 - DNA, 40 bp, Homo sapiens
ttttttttttttttttttttttggagagatagggtcttgt

SEQ ID NO: 48114 - DNA, 40 bp, Homo sapiens
caagaccctatctctccaaaaaaaaaaaaaaaaaaaaaaa

SEQ ID NO: 48115 - DNA, 40 bp, Homo sapiens
tttttttttttttttttttttttggagagatagggtcttg

SEQ ID NO: 48116 - DNA, 40 bp, Homo sapiens
aagaccctatctctccaaaaaaaaaaaaaaaaaaaaaaag

SEQ ID NO: 48117 - DNA, 40 bp, Homo sapiens
ctttttttttttttttttttttttggagagatagggtctt

SEQ ID NO: 48118 - DNA, 40 bp, Homo sapiens
agaccctatctctccaaaaaaaaaaaaaaaaaaaaaaaga

SEQ ID NO: 48119 - DNA, 40 bp, Homo sapiens
tctttttttttttttttttttttttggagagatagggtct

SEQ ID NO: 48120 - DNA, 40 bp, Homo sapiens
gaccctatctctccaaaaaaaaaaaaaaaaaaaaaaagat

SEQ ID NO: 48121 - DNA, 40 bp, Homo sapiens
atctttttttttttttttttttttttggagagatagggtc

SEQ ID NO: 48122 - DNA, 40 bp, Homo sapiens
accctatctctccaaaaaaaaaaaaaaaaaaaaaaagatg

SEQ ID NO: 48123 - DNA, 40 bp, Homo sapiens
catctttttttttttttttttttttttggagagatagggt

SEQ ID NO: 48124 - DNA, 40 bp, Homo sapiens
ccctatctctccaaaaaaaaaaaaaaaaaaaaaaagatga

SEQ ID NO: 48125 - DNA, 40 bp, Homo sapiens
tcatctttttttttttttttttttttttggagagataggg

SEQ ID NO: 48126 - DNA, 40 bp, Homo sapiens
cctatctctccaaaaaaaaaaaaaaaaaaaaaaagatgaa

SEQ ID NO: 48127 - DNA, 40 bp, Homo sapiens
ttcatctttttttttttttttttttttttggagagatagg

SEQ ID NO: 48128 - DNA, 40 bp, Homo sapiens
ctatctctccaaaaaaaaaaaaaaaaaaaaaaagatgaaa

SEQ ID NO: 48129 - DNA, 40 bp, Homo sapiens
tttcatctttttttttttttttttttttttggagagatag

SEQ ID NO: 48130 - DNA, 40 bp, Homo sapiens
tatctctccaaaaaaaaaaaaaaaaaaaaaaagatgaaag

SEQ ID NO: 48131 - DNA, 40 bp, Homo sapiens
ctttcatctttttttttttttttttttttttggagagata

SEQ ID NO: 48132 - DNA, 40 bp, Homo sapiens
atctctccaaaaaaaaaaaaaaaaaaaaaaagatgaaaga

SEQ ID NO: 48133 - DNA, 40 bp, Homo sapiens
tctttcatctttttttttttttttttttttttggagagat

SEQ ID NO: 48134 - DNA, 40 bp, Homo sapiens
tctctccaaaaaaaaaaaaaaaaaaaaaaagatgaaagaa

SEQ ID NO: 48135 - DNA, 40 bp, Homo sapiens
ttctttcatctttttttttttttttttttttttggagaga

SEQ ID NO: 48136 - DNA, 40 bp, Homo sapiens
ctctccaaaaaaaaaaaaaaaaaaaaaaagatgaaagaaa

SEQ ID NO: 48137 - DNA, 40 bp, Homo sapiens
tttctttcatctttttttttttttttttttttttggagag

SEQ ID NO: 48138 - DNA, 40 bp, Homo sapiens
tctccaaaaaaaaaaaaaaaaaaaaaaagatgaaagaaaa

SEQ ID NO: 48139 - DNA, 40 bp, Homo sapiens
ttttctttcatctttttttttttttttttttttttggaga

SEQ ID NO: 48140 - DNA, 40 bp, Homo sapiens
ctccaaaaaaaaaaaaaaaaaaaaaaagatgaaagaaaaa

SEQ ID NO: 48141 - DNA, 40 bp, Homo sapiens
tttttctttcatctttttttttttttttttttttttggag

SEQ ID NO: 48142 - DNA, 40 bp, Homo sapiens
tccaaaaaaaaaaaaaaaaaaaaaaagatgaaagaaaaaa

SEQ ID NO: 48143 - DNA, 40 bp, Homo sapiens
ttttttctttcatctttttttttttttttttttttttgga

SEQ ID NO: 48144 - DNA, 40 bp, Homo sapiens
ccaaaaaaaaaaaaaaaaaaaaaaagatgaaagaaaaaaa

SEQ ID NO: 48145 - DNA, 40 bp, Homo sapiens
tttttttctttcatctttttttttttttttttttttttgg

SEQ ID NO: 48146 - DNA, 40 bp, Homo sapiens
caaaaaaaaaaaaaaaaaaaaaaagatgaaagaaaaaaaa

SEQ ID NO: 48147 - DNA, 40 bp, Homo sapiens
ttttttttctttcatctttttttttttttttttttttttg

SEQ ID NO: 48148 - DNA, 40 bp, Homo sapiens
aaaaaaaaaaaaaaaaaaaaaaagatgaaagaaaaaaaaa

SEQ ID NO: 48149 - DNA, 40 bp, Homo sapiens
tttttttttctttcatcttttttttttttttttttttttt

SEQ ID NO: 48150 - DNA, 40 bp, Homo sapiens
aaaaaaaaaaaaaaaaaaaaaagatgaaagaaaaaaaaat

SEQ ID NO: 48151 - DNA, 40 bp, Homo sapiens
atttttttttctttcatctttttttttttttttttttttt

SEQ ID NO: 48152 - DNA, 40 bp, Homo sapiens
aaaaaaaaaaaaaaaaaaaaagatgaaagaaaaaaaaatc

SEQ ID NO: 48153 - DNA, 40 bp, Homo sapiens
gatttttttttctttcatcttttttttttttttttttttt

SEQ ID NO: 48154 - DNA, 40 bp, Homo sapiens
aaaaaaaaaaaaaaaaaaaagatgaaagaaaaaaaaatcc

SEQ ID NO: 48155 - DNA, 40 bp, Homo sapiens
ggatttttttttctttcatctttttttttttttttttttt

SEQ ID NO: 48156 - DNA, 40 bp, Homo sapiens
aaaaaaaaaaaaaaaaaaagatgaaagaaaaaaaaatcca

SEQ ID NO: 48157 - DNA, 40 bp, Homo sapiens
tggatttttttttctttcatcttttttttttttttttttt

SEQ ID NO: 48158 - DNA, 40 bp, Homo sapiens
aaaaaaaaaaaaaaaaaagatgaaagaaaaaaaaatccaa

SEQ ID NO: 48159 - DNA, 40 bp, Homo sapiens
ttggatttttttttctttcatctttttttttttttttttt

SEQ ID NO: 48160 - DNA, 40 bp, Homo sapiens
aaaaaaaaaaaaaaaaagatgaaagaaaaaaaaatccaaa

SEQ ID NO: 48161 - DNA, 40 bp, Homo sapiens
tttggatttttttttctttcatcttttttttttttttttt

SEQ ID NO: 48162 - DNA, 40 bp, Homo sapiens
aaaaaaaaaaaaaaaagatgaaagaaaaaaaaatccaaaa

SEQ ID NO: 48163 - DNA, 40 bp, Homo sapiens
ttttggatttttttttctttcatctttttttttttttttt

SEQ ID NO: 48164 - DNA, 40 bp, Homo sapiens
aaaaaaaaaaaaaaagatgaaagaaaaaaaaatccaaaat

SEQ ID NO: 48165 - DNA, 40 bp, Homo sapiens
attttggatttttttttctttcatcttttttttttttttt

SEQ ID NO: 48166 - DNA, 40 bp, Homo sapiens
aaaaaaaaaaaaaagatgaaagaaaaaaaaatccaaaatc

SEQ ID NO: 48167 - DNA, 40 bp, Homo sapiens
gattttggatttttttttctttcatctttttttttttttt

SEQ ID NO: 48168 - DNA, 40 bp, Homo sapiens
aaaaaaaaaaaaagatgaaagaaaaaaaaatccaaaatca

SEQ ID NO: 48169 - DNA, 40 bp, Homo sapiens
tgattttggatttttttttctttcatcttttttttttttt

SEQ ID NO: 48170 - DNA, 40 bp, Homo sapiens
aaaaaaaaaaaagatgaaagaaaaaaaaatccaaaatcaa

SEQ ID NO: 48171 - DNA, 40 bp, Homo sapiens
ttgattttggatttttttttctttcatctttttttttttt

SEQ ID NO: 48172 - DNA, 40 bp, Homo sapiens
aaaaaaaaaaagatgaaagaaaaaaaaatccaaaatcaaa

SEQ ID NO: 48173 - DNA, 40 bp, Homo sapiens
tttgattttggatttttttttctttcatcttttttttttt

SEQ ID NO: 48174 - DNA, 40 bp, Homo sapiens
aaaaaaaaaagatgaaagaaaaaaaaatccaaaatcaaat

SEQ ID NO: 48175 - DNA, 40 bp, Homo sapiens
atttgattttggatttttttttctttcatctttttttttt

SEQ ID NO: 48176 - DNA, 40 bp, Homo sapiens
aaaaaaaaagatgaaagaaaaaaaaatccaaaatcaaatg

SEQ ID NO: 48177 - DNA, 40 bp, Homo sapiens
catttgattttggatttttttttctttcatcttttttttt

SEQ ID NO: 48178 - DNA, 40 bp, Homo sapiens
aaaaaaaagatgaaagaaaaaaaaatccaaaatcaaatgc

SEQ ID NO: 48179 - DNA, 40 bp, Homo sapiens
gcatttgattttggatttttttttctttcatctttttttt

SEQ ID NO: 48180 - DNA, 40 bp, Homo sapiens
aaaaaaagatgaaagaaaaaaaaatccaaaatcaaatgct

SEQ ID NO: 48181 - DNA, 40 bp, Homo sapiens
agcatttgattttggatttttttttctttcatcttttttt

SEQ ID NO: 48182 - DNA, 40 bp, Homo sapiens
aaaaaagatgaaagaaaaaaaaatccaaaatcaaatgctc

SEQ ID NO: 48183 - DNA, 40 bp, Homo sapiens
gagcatttgattttggatttttttttctttcatctttttt

SEQ ID NO: 48184 - DNA, 40 bp, Homo sapiens
aaaaagatgaaagaaaaaaaaatccaaaatcaaatgctcc

SEQ ID NO: 48185 - DNA, 40 bp, Homo sapiens
ggagcatttgattttggatttttttttctttcatcttttt

SEQ ID NO: 48186 - DNA, 40 bp, Homo sapiens
aaaagatgaaagaaaaaaaaatccaaaatcaaatgctcca

SEQ ID NO: 48187 - DNA, 40 bp, Homo sapiens
tggagcatttgattttggatttttttttctttcatctttt

SEQ ID NO: 48188 - DNA, 40 bp, Homo sapiens
aaagatgaaagaaaaaaaaatccaaaatcaaatgctccag

SEQ ID NO: 48189 - DNA, 40 bp, Homo sapiens
ctggagcatttgattttggatttttttttctttcatcttt

SEQ ID NO: 48190 - DNA, 40 bp, Homo sapiens
aagatgaaagaaaaaaaaatccaaaatcaaatgctccagt

SEQ ID NO: 48191 - DNA, 40 bp, Homo sapiens
actggagcatttgattttggatttttttttctttcatctt

SEQ ID NO: 48192 - DNA, 40 bp, Homo sapiens
agatgaaagaaaaaaaaatccaaaatcaaatgctccagtg

SEQ ID NO: 48193 - DNA, 40 bp, Homo sapiens
cactggagcatttgattttggatttttttttctttcatct

SEQ ID NO: 48194 - DNA, 40 bp, Homo sapiens
gatgaaagaaaaaaaaatccaaaatcaaatgctccagtga

SEQ ID NO: 48195 - DNA, 40 bp, Homo sapiens
tcactggagcatttgattttggatttttttttctttcatc

SEQ ID NO: 48196 - DNA, 40 bp, Homo sapiens
atgaaagaaaaaaaaatccaaaatcaaatgctccagtgag

SEQ ID NO: 48197 - DNA, 40 bp, Homo sapiens
ctcactggagcatttgattttggatttttttttctttcat

SEQ ID NO: 48198 - DNA, 40 bp, Homo sapiens
tgaaagaaaaaaaaatccaaaatcaaatgctccagtgagc

SEQ ID NO: 48199 - DNA, 40 bp, Homo sapiens
gctcactggagcatttgattttggatttttttttctttca

SEQ ID NO: 48200 - DNA, 40 bp, Homo sapiens
gaaagaaaaaaaaatccaaaatcaaatgctccagtgagca

SEQ ID NO: 48201 - DNA, 40 bp, Homo sapiens
tgctcactggagcatttgattttggatttttttttctttc

SEQ ID NO: 48202 - DNA, 40 bp, Homo sapiens
aaagaaaaaaaaatccaaaatcaaatgctccagtgagcat

SEQ ID NO: 48203 - DNA, 40 bp, Homo sapiens
atgctcactggagcatttgattttggatttttttttcttt

SEQ ID NO: 48204 - DNA, 40 bp, Homo sapiens
aagaaaaaaaaatccaaaatcaaatgctccagtgagcatt

SEQ ID NO: 48205 - DNA, 40 bp, Homo sapiens
aatgctcactggagcatttgattttggatttttttttctt

SEQ ID NO: 48206 - DNA, 40 bp, Homo sapiens
agaaaaaaaaatccaaaatcaaatgctccagtgagcattt

SEQ ID NO: 48207 - DNA, 40 bp, Homo sapiens
aaatgctcactggagcatttgattttggatttttttttct

SEQ ID NO: 48208 - DNA, 40 bp, Homo sapiens
gaaaaaaaaatccaaaatcaaatgctccagtgagcatttc

SEQ ID NO: 48209 - DNA, 40 bp, Homo sapiens
gaaatgctcactggagcatttgattttggatttttttttc

SEQ ID NO: 48210 - DNA, 40 bp, Homo sapiens
aaaaaaaaatccaaaatcaaatgctccagtgagcatttcc

SEQ ID NO: 48211 - DNA, 40 bp, Homo sapiens
ggaaatgctcactggagcatttgattttggattttttttt

SEQ ID NO: 48212 - DNA, 40 bp, Homo sapiens
aaaaaaaatccaaaatcaaatgctccagtgagcatttcct

SEQ ID NO: 48213 - DNA, 40 bp, Homo sapiens
aggaaatgctcactggagcatttgattttggatttttttt

SEQ ID NO: 48214 - DNA, 40 bp, Homo sapiens
aaaaaaatccaaaatcaaatgctccagtgagcatttcctt

SEQ ID NO: 48215 - DNA, 40 bp, Homo sapiens
aaggaaatgctcactggagcatttgattttggattttttt

SEQ ID NO: 48216 - DNA, 40 bp, Homo sapiens
aaaaaatccaaaatcaaatgctccagtgagcatttccttt

SEQ ID NO: 48217 - DNA, 40 bp, Homo sapiens
aaaggaaatgctcactggagcatttgattttggatttttt

SEQ ID NO: 48218 - DNA, 40 bp, Homo sapiens
aaaaatccaaaatcaaatgctccagtgagcatttcctttt

SEQ ID NO: 48219 - DNA, 40 bp, Homo sapiens
aaaaggaaatgctcactggagcatttgattttggattttt

SEQ ID NO: 48220 - DNA, 40 bp, Homo sapiens
aaaatccaaaatcaaatgctccagtgagcatttcctttta

SEQ ID NO: 48221 - DNA, 40 bp, Homo sapiens
taaaaggaaatgctcactggagcatttgattttggatttt

SEQ ID NO: 48222 - DNA, 40 bp, Homo sapiens
aaatccaaaatcaaatgctccagtgagcatttccttttag

SEQ ID NO: 48223 - DNA, 40 bp, Homo sapiens
ctaaaaggaaatgctcactggagcatttgattttggattt

SEQ ID NO: 48224 - DNA, 40 bp, Homo sapiens
aatccaaaatcaaatgctccagtgagcatttccttttagc

SEQ ID NO: 48225 - DNA, 40 bp, Homo sapiens
gctaaaaggaaatgctcactggagcatttgattttggatt

SEQ ID NO: 48226 - DNA, 40 bp, Homo sapiens
atccaaaatcaaatgctccagtgagcatttccttttagca

SEQ ID NO: 48227 - DNA, 40 bp, Homo sapiens
tgctaaaaggaaatgctcactggagcatttgattttggat

SEQ ID NO: 48228 - DNA, 40 bp, Homo sapiens
tccaaaatcaaatgctccagtgagcatttccttttagcat

SEQ ID NO: 48229 - DNA, 40 bp, Homo sapiens
atgctaaaaggaaatgctcactggagcatttgattttgga

SEQ ID NO: 48230 - DNA, 40 bp, Homo sapiens
ccaaaatcaaatgctccagtgagcatttccttttagcatc

SEQ ID NO: 48231 - DNA, 40 bp, Homo sapiens
gatgctaaaaggaaatgctcactggagcatttgattttgg

SEQ ID NO: 48232 - DNA, 40 bp, Homo sapiens
caaaatcaaatgctccagtgagcatttccttttagcatca

SEQ ID NO: 48233 - DNA, 40 bp, Homo sapiens
tgatgctaaaaggaaatgctcactggagcatttgattttg

SEQ ID NO: 48234 - DNA, 40 bp, Homo sapiens
aaaatcaaatgctccagtgagcatttccttttagcatcat

SEQ ID NO: 48235 - DNA, 40 bp, Homo sapiens
atgatgctaaaaggaaatgctcactggagcatttgatttt

SEQ ID NO: 48236 - DNA, 40 bp, Homo sapiens
aaatcaaatgctccagtgagcatttccttttagcatcatg

SEQ ID NO: 48237 - DNA, 40 bp, Homo sapiens
catgatgctaaaaggaaatgctcactggagcatttgattt

SEQ ID NO: 48238 - DNA, 40 bp, Homo sapiens
aatcaaatgctccagtgagcatttccttttagcatcatgt

SEQ ID NO: 48239 - DNA, 40 bp, Homo sapiens
acatgatgctaaaaggaaatgctcactggagcatttgatt

SEQ ID NO: 48240 - DNA, 40 bp, Homo sapiens
atcaaatgctccagtgagcatttccttttagcatcatgtc

SEQ ID NO: 48241 - DNA, 40 bp, Homo sapiens
gacatgatgctaaaaggaaatgctcactggagcatttgat

SEQ ID NO: 48242 - DNA, 40 bp, Homo sapiens
tcaaatgctccagtgagcatttccttttagcatcatgtca

SEQ ID NO: 48243 - DNA, 40 bp, Homo sapiens
tgacatgatgctaaaaggaaatgctcactggagcatttga

SEQ ID NO: 48244 - DNA, 40 bp, Homo sapiens
caaatgctccagtgagcatttccttttagcatcatgtcag

SEQ ID NO: 48245 - DNA, 40 bp, Homo sapiens
ctgacatgatgctaaaaggaaatgctcactggagcatttg

SEQ ID NO: 48246 - DNA, 40 bp, Homo sapiens
aaatgctccagtgagcatttccttttagcatcatgtcagg

SEQ ID NO: 48247 - DNA, 40 bp, Homo sapiens
cctgacatgatgctaaaaggaaatgctcactggagcattt

SEQ ID NO: 48248 - DNA, 40 bp, Homo sapiens
aatgctccagtgagcatttccttttagcatcatgtcaggc

SEQ ID NO: 48249 - DNA, 40 bp, Homo sapiens
gcctgacatgatgctaaaaggaaatgctcactggagcatt

SEQ ID NO: 48250 - DNA, 40 bp, Homo sapiens
atgctccagtgagcatttccttttagcatcatgtcaggct

SEQ ID NO: 48251 - DNA, 40 bp, Homo sapiens
agcctgacatgatgctaaaaggaaatgctcactggagcat

SEQ ID NO: 48252 - DNA, 40 bp, Homo sapiens
tgctccagtgagcatttccttttagcatcatgtcaggctc

SEQ ID NO: 48253 - DNA, 40 bp, Homo sapiens
gagcctgacatgatgctaaaaggaaatgctcactggagca

SEQ ID NO: 48254 - DNA, 40 bp, Homo sapiens
gctccagtgagcatttccttttagcatcatgtcaggctct

SEQ ID NO: 48255 - DNA, 40 bp, Homo sapiens
agagcctgacatgatgctaaaaggaaatgctcactggagc

SEQ ID NO: 48256 - DNA, 40 bp, Homo sapiens
ctccagtgagcatttccttttagcatcatgtcaggctcta

SEQ ID NO: 48257 - DNA, 40 bp, Homo sapiens
tagagcctgacatgatgctaaaaggaaatgctcactggag

SEQ ID NO: 48258 - DNA, 40 bp, Homo sapiens
tccagtgagcatttccttttagcatcatgtcaggctctaa

SEQ ID NO: 48259 - DNA, 40 bp, Homo sapiens
ttagagcctgacatgatgctaaaaggaaatgctcactgga

SEQ ID NO: 48260 - DNA, 40 bp, Homo sapiens
ccagtgagcatttccttttagcatcatgtcaggctctaaa

SEQ ID NO: 48261 - DNA, 40 bp, Homo sapiens
tttagagcctgacatgatgctaaaaggaaatgctcactgg

SEQ ID NO: 48262 - DNA, 40 bp, Homo sapiens
cagtgagcatttccttttagcatcatgtcaggctctaaaa

SEQ ID NO: 48263 - DNA, 40 bp, Homo sapiens
ttttagagcctgacatgatgctaaaaggaaatgctcactg

SEQ ID NO: 48264 - DNA, 40 bp, Homo sapiens
agtgagcatttccttttagcatcatgtcaggctctaaaag

SEQ ID NO: 48265 - DNA, 40 bp, Homo sapiens
cttttagagcctgacatgatgctaaaaggaaatgctcact

SEQ ID NO: 48266 - DNA, 40 bp, Homo sapiens
gtgagcatttccttttagcatcatgtcaggctctaaaagt

SEQ ID NO: 48267 - DNA, 40 bp, Homo sapiens
acttttagagcctgacatgatgctaaaaggaaatgctcac

SEQ ID NO: 48268 - DNA, 40 bp, Homo sapiens
tgagcatttccttttagcatcatgtcaggctctaaaagtt

SEQ ID NO: 48269 - DNA, 40 bp, Homo sapiens
aacttttagagcctgacatgatgctaaaaggaaatgctca

SEQ ID NO: 48270 - DNA, 40 bp, Homo sapiens
gagcatttccttttagcatcatgtcaggctctaaaagtta

SEQ ID NO: 48271 - DNA, 40 bp, Homo sapiens
taacttttagagcctgacatgatgctaaaaggaaatgctc

SEQ ID NO: 48272 - DNA, 40 bp, Homo sapiens
agcatttccttttagcatcatgtcaggctctaaaagttac

SEQ ID NO: 48273 - DNA, 40 bp, Homo sapiens
gtaacttttagagcctgacatgatgctaaaaggaaatgct

SEQ ID NO: 48274 - DNA, 40 bp, Homo sapiens
gcatttccttttagcatcatgtcaggctctaaaagttaca

SEQ ID NO: 48275 - DNA, 40 bp, Homo sapiens
tgtaacttttagagcctgacatgatgctaaaaggaaatgc

SEQ ID NO: 48276 - DNA, 40 bp, Homo sapiens
catttccttttagcatcatgtcaggctctaaaagttacag

SEQ ID NO: 48277 - DNA, 40 bp, Homo sapiens
ctgtaacttttagagcctgacatgatgctaaaaggaaatg

SEQ ID NO: 48278 - DNA, 40 bp, Homo sapiens
atttccttttagcatcatgtcaggctctaaaagttacagg

SEQ ID NO: 48279 - DNA, 40 bp, Homo sapiens
cctgtaacttttagagcctgacatgatgctaaaaggaaat

SEQ ID NO: 48280 - DNA, 40 bp, Homo sapiens
tttccttttagcatcatgtcaggctctaaaagttacaggt

SEQ ID NO: 48281 - DNA, 40 bp, Homo sapiens
acctgtaacttttagagcctgacatgatgctaaaaggaaa

SEQ ID NO: 48282 - DNA, 40 bp, Homo sapiens
ttccttttagcatcatgtcaggctctaaaagttacaggtt

SEQ ID NO: 48283 - DNA, 40 bp, Homo sapiens
aacctgtaacttttagagcctgacatgatgctaaaaggaa

SEQ ID NO: 48284 - DNA, 40 bp, Homo sapiens
tccttttagcatcatgtcaggctctaaaagttacaggttt

SEQ ID NO: 48285 - DNA, 40 bp, Homo sapiens
aaacctgtaacttttagagcctgacatgatgctaaaagga

SEQ ID NO: 48286 - DNA, 40 bp, Homo sapiens
ccttttagcatcatgtcaggctctaaaagttacaggtttt

SEQ ID NO: 48287 - DNA, 40 bp, Homo sapiens
aaaacctgtaacttttagagcctgacatgatgctaaaagg

SEQ ID NO: 48288 - DNA, 40 bp, Homo sapiens
cttttagcatcatgtcaggctctaaaagttacaggttttg

SEQ ID NO: 48289 - DNA, 40 bp, Homo sapiens
caaaacctgtaacttttagagcctgacatgatgctaaaag

SEQ ID NO: 48290 - DNA, 40 bp, Homo sapiens
ttttagcatcatgtcaggctctaaaagttacaggttttgg

SEQ ID NO: 48291 - DNA, 40 bp, Homo sapiens
ccaaaacctgtaacttttagagcctgacatgatgctaaaa

SEQ ID NO: 48292 - DNA, 40 bp, Homo sapiens
tttagcatcatgtcaggctctaaaagttacaggttttgga

SEQ ID NO: 48293 - DNA, 40 bp, Homo sapiens
tccaaaacctgtaacttttagagcctgacatgatgctaaa

SEQ ID NO: 48294 - DNA, 40 bp, Homo sapiens
ttagcatcatgtcaggctctaaaagttacaggttttggag

SEQ ID NO: 48295 - DNA, 40 bp, Homo sapiens
ctccaaaacctgtaacttttagagcctgacatgatgctaa

SEQ ID NO: 48296 - DNA, 40 bp, Homo sapiens
tagcatcatgtcaggctctaaaagttacaggttttggagc

SEQ ID NO: 48297 - DNA, 40 bp, Homo sapiens
gctccaaaacctgtaacttttagagcctgacatgatgcta

SEQ ID NO: 48298 - DNA, 40 bp, Homo sapiens
agcatcatgtcaggctctaaaagttacaggttttggagca

SEQ ID NO: 48299 - DNA, 40 bp, Homo sapiens
tgctccaaaacctgtaacttttagagcctgacatgatgct

SEQ ID NO: 48300 - DNA, 40 bp, Homo sapiens
gcatcatgtcaggctctaaaagttacaggttttggagcat

SEQ ID NO: 48301 - DNA, 40 bp, Homo sapiens
atgctccaaaacctgtaacttttagagcctgacatgatgc

SEQ ID NO: 48302 - DNA, 40 bp, Homo sapiens
catcatgtcaggctctaaaagttacaggttttggagcatt

SEQ ID NO: 48303 - DNA, 40 bp, Homo sapiens
aatgctccaaaacctgtaacttttagagcctgacatgatg

SEQ ID NO: 48304 - DNA, 40 bp, Homo sapiens
atcatgtcaggctctaaaagttacaggttttggagcattt

SEQ ID NO: 48305 - DNA, 40 bp, Homo sapiens
aaatgctccaaaacctgtaacttttagagcctgacatgat

SEQ ID NO: 48306 - DNA, 40 bp, Homo sapiens
tcatgtcaggctctaaaagttacaggttttggagcatttt

SEQ ID NO: 48307 - DNA, 40 bp, Homo sapiens
aaaatgctccaaaacctgtaacttttagagcctgacatga

SEQ ID NO: 48308 - DNA, 40 bp, Homo sapiens
catgtcaggctctaaaagttacaggttttggagcattttg

SEQ ID NO: 48309 - DNA, 40 bp, Homo sapiens
caaaatgctccaaaacctgtaacttttagagcctgacatg

SEQ ID NO: 48310 - DNA, 40 bp, Homo sapiens
atgtcaggctctaaaagttacaggttttggagcattttgg

SEQ ID NO: 48311 - DNA, 40 bp, Homo sapiens
ccaaaatgctccaaaacctgtaacttttagagcctgacat

SEQ ID NO: 48312 - DNA, 40 bp, Homo sapiens
tgtcaggctctaaaagttacaggttttggagcattttgga

SEQ ID NO: 48313 - DNA, 40 bp, Homo sapiens
tccaaaatgctccaaaacctgtaacttttagagcctgaca

SEQ ID NO: 48314 - DNA, 40 bp, Homo sapiens
gtcaggctctaaaagttacaggttttggagcattttggat

SEQ ID NO: 48315 - DNA, 40 bp, Homo sapiens
atccaaaatgctccaaaacctgtaacttttagagcctgac

SEQ ID NO: 48316 - DNA, 40 bp, Homo sapiens
tcaggctctaaaagttacaggttttggagcattttggatt

SEQ ID NO: 48317 - DNA, 40 bp, Homo sapiens
aatccaaaatgctccaaaacctgtaacttttagagcctga

SEQ ID NO: 48318 - DNA, 40 bp, Homo sapiens
caggctctaaaagttacaggttttggagcattttggattt

SEQ ID NO: 48319 - DNA, 40 bp, Homo sapiens
aaatccaaaatgctccaaaacctgtaacttttagagcctg

SEQ ID NO: 48320 - DNA, 40 bp, Homo sapiens
aggctctaaaagttacaggttttggagcattttggatttc

SEQ ID NO: 48321 - DNA, 40 bp, Homo sapiens
gaaatccaaaatgctccaaaacctgtaacttttagagcct

SEQ ID NO: 48322 - DNA, 40 bp, Homo sapiens
ggctctaaaagttacaggttttggagcattttggatttca

SEQ ID NO: 48323 - DNA, 40 bp, Homo sapiens
tgaaatccaaaatgctccaaaacctgtaacttttagagcc

SEQ ID NO: 48324 - DNA, 40 bp, Homo sapiens
gctctaaaagttacaggttttggagcattttggatttcag

SEQ ID NO: 48325 - DNA, 40 bp, Homo sapiens
ctgaaatccaaaatgctccaaaacctgtaacttttagagc

SEQ ID NO: 48326 - DNA, 40 bp, Homo sapiens
ctctaaaagttacaggttttggagcattttggatttcaga

SEQ ID NO: 48327 - DNA, 40 bp, Homo sapiens
tctgaaatccaaaatgctccaaaacctgtaacttttagag

SEQ ID NO: 48328 - DNA, 40 bp, Homo sapiens
tctaaaagttacaggttttggagcattttggatttcagat

SEQ ID NO: 48329 - DNA, 40 bp, Homo sapiens
atctgaaatccaaaatgctccaaaacctgtaacttttaga

SEQ ID NO: 48330 - DNA, 40 bp, Homo sapiens
ctaaaagttacaggttttggagcattttggatttcagatt

SEQ ID NO: 48331 - DNA, 40 bp, Homo sapiens
aatctgaaatccaaaatgctccaaaacctgtaacttttag

SEQ ID NO: 48332 - DNA, 40 bp, Homo sapiens
taaaagttacaggttttggagcattttggatttcagattt

SEQ ID NO: 48333 - DNA, 40 bp, Homo sapiens
aaatctgaaatccaaaatgctccaaaacctgtaactttta

SEQ ID NO: 48334 - DNA, 40 bp, Homo sapiens
aaaagttacaggttttggagcattttggatttcagatttt

SEQ ID NO: 48335 - DNA, 40 bp, Homo sapiens
aaaatctgaaatccaaaatgctccaaaacctgtaactttt

SEQ ID NO: 48336 - DNA, 40 bp, Homo sapiens
aaagttacaggttttggagcattttggatttcagattttt

SEQ ID NO: 48337 - DNA, 40 bp, Homo sapiens
aaaaatctgaaatccaaaatgctccaaaacctgtaacttt

SEQ ID NO: 48338 - DNA, 40 bp, Homo sapiens
aagttacaggttttggagcattttggatttcagatttttg

SEQ ID NO: 48339 - DNA, 40 bp, Homo sapiens
caaaaatctgaaatccaaaatgctccaaaacctgtaactt

SEQ ID NO: 48340 - DNA, 40 bp, Homo sapiens
agttacaggttttggagcattttggatttcagatttttgg

SEQ ID NO: 48341 - DNA, 40 bp, Homo sapiens
ccaaaaatctgaaatccaaaatgctccaaaacctgtaact

SEQ ID NO: 48342 - DNA, 40 bp, Homo sapiens
gttacaggttttggagcattttggatttcagatttttgga

SEQ ID NO: 48343 - DNA, 40 bp, Homo sapiens
tccaaaaatctgaaatccaaaatgctccaaaacctgtaac

SEQ ID NO: 48344 - DNA, 40 bp, Homo sapiens
ttacaggttttggagcattttggatttcagatttttggat

SEQ ID NO: 48345 - DNA, 40 bp, Homo sapiens
atccaaaaatctgaaatccaaaatgctccaaaacctgtaa

SEQ ID NO: 48346 - DNA, 40 bp, Homo sapiens
tacaggttttggagcattttggatttcagatttttggatt

SEQ ID NO: 48347 - DNA, 40 bp, Homo sapiens
aatccaaaaatctgaaatccaaaatgctccaaaacctgta

SEQ ID NO: 48348 - DNA, 40 bp, Homo sapiens
acaggttttggagcattttggatttcagatttttggatta

SEQ ID NO: 48349 - DNA, 40 bp, Homo sapiens
taatccaaaaatctgaaatccaaaatgctccaaaacctgt

SEQ ID NO: 48350 - DNA, 40 bp, Homo sapiens
caggttttggagcattttggatttcagatttttggattaa

SEQ ID NO: 48351 - DNA, 40 bp, Homo sapiens
ttaatccaaaaatctgaaatccaaaatgctccaaaacctg

SEQ ID NO: 48352 - DNA, 40 bp, Homo sapiens
aggttttggagcattttggatttcagatttttggattaac

SEQ ID NO: 48353 - DNA, 40 bp, Homo sapiens
gttaatccaaaaatctgaaatccaaaatgctccaaaacct

SEQ ID NO: 48354 - DNA, 40 bp, Homo sapiens
ggttttggagcattttggatttcagatttttggattaacc

SEQ ID NO: 48355 - DNA, 40 bp, Homo sapiens
ggttaatccaaaaatctgaaatccaaaatgctccaaaacc

SEQ ID NO: 48356 - DNA, 40 bp, Homo sapiens
gttttggagcattttggatttcagatttttggattaacct

SEQ ID NO: 48357 - DNA, 40 bp, Homo sapiens
aggttaatccaaaaatctgaaatccaaaatgctccaaaac

SEQ ID NO: 48358 - DNA, 40 bp, Homo sapiens
ttttggagcattttggatttcagatttttggattaacctg

SEQ ID NO: 48359 - DNA, 40 bp, Homo sapiens
caggttaatccaaaaatctgaaatccaaaatgctccaaaa

SEQ ID NO: 48360 - DNA, 40 bp, Homo sapiens
tttggagcattttggatttcagatttttggattaacctgc

SEQ ID NO: 48361 - DNA, 40 bp, Homo sapiens
gcaggttaatccaaaaatctgaaatccaaaatgctccaaa

SEQ ID NO: 48362 - DNA, 40 bp, Homo sapiens
ttggagcattttggatttcagatttttggattaacctgca

SEQ ID NO: 48363 - DNA, 40 bp, Homo sapiens
tgcaggttaatccaaaaatctgaaatccaaaatgctccaa

SEQ ID NO: 48364 - DNA, 40 bp, Homo sapiens
tggagcattttggatttcagatttttggattaacctgcat

SEQ ID NO: 48365 - DNA, 40 bp, Homo sapiens
atgcaggttaatccaaaaatctgaaatccaaaatgctcca

SEQ ID NO: 48366 - DNA, 40 bp, Homo sapiens
ggagcattttggatttcagatttttggattaacctgcatt

SEQ ID NO: 48367 - DNA, 40 bp, Homo sapiens
aatgcaggttaatccaaaaatctgaaatccaaaatgctcc

SEQ ID NO: 48368 - DNA, 40 bp, Homo sapiens
gagcattttggatttcagatttttggattaacctgcatta

SEQ ID NO: 48369 - DNA, 40 bp, Homo sapiens
taatgcaggttaatccaaaaatctgaaatccaaaatgctc

SEQ ID NO: 48370 - DNA, 40 bp, Homo sapiens
agcattttggatttcagatttttggattaacctgcattaa

SEQ ID NO: 48371 - DNA, 40 bp, Homo sapiens
ttaatgcaggttaatccaaaaatctgaaatccaaaatgct

SEQ ID NO: 48372 - DNA, 40 bp, Homo sapiens
gcattttggatttcagatttttggattaacctgcattaat

SEQ ID NO: 48373 - DNA, 40 bp, Homo sapiens
attaatgcaggttaatccaaaaatctgaaatccaaaatgc

SEQ ID NO: 48374 - DNA, 40 bp, Homo sapiens
cattttggatttcagatttttggattaacctgcattaatg

SEQ ID NO: 48375 - DNA, 40 bp, Homo sapiens
cattaatgcaggttaatccaaaaatctgaaatccaaaatg

SEQ ID NO: 48376 - DNA, 40 bp, Homo sapiens
attttggatttcagatttttggattaacctgcattaatgc

SEQ ID NO: 48377 - DNA, 40 bp, Homo sapiens
gcattaatgcaggttaatccaaaaatctgaaatccaaaat

SEQ ID NO: 48378 - DNA, 40 bp, Homo sapiens
ttttggatttcagatttttggattaacctgcattaatgct

SEQ ID NO: 48379 - DNA, 40 bp, Homo sapiens
agcattaatgcaggttaatccaaaaatctgaaatccaaaa

SEQ ID NO: 48380 - DNA, 40 bp, Homo sapiens
tttggatttcagatttttggattaacctgcattaatgctc

SEQ ID NO: 48381 - DNA, 40 bp, Homo sapiens
gagcattaatgcaggttaatccaaaaatctgaaatccaaa

SEQ ID NO: 48382 - DNA, 40 bp, Homo sapiens
ttggatttcagatttttggattaacctgcattaatgctca

SEQ ID NO: 48383 - DNA, 40 bp, Homo sapiens
tgagcattaatgcaggttaatccaaaaatctgaaatccaa

SEQ ID NO: 48384 - DNA, 40 bp, Homo sapiens
tggatttcagatttttggattaacctgcattaatgctcaa

SEQ ID NO: 48385 - DNA, 40 bp, Homo sapiens
ttgagcattaatgcaggttaatccaaaaatctgaaatcca

SEQ ID NO: 48386 - DNA, 40 bp, Homo sapiens
ggatttcagatttttggattaacctgcattaatgctcaac

SEQ ID NO: 48387 - DNA, 40 bp, Homo sapiens
gttgagcattaatgcaggttaatccaaaaatctgaaatcc

SEQ ID NO: 48388 - DNA, 40 bp, Homo sapiens
gatttcagatttttggattaacctgcattaatgctcaacc

SEQ ID NO: 48389 - DNA, 40 bp, Homo sapiens
ggttgagcattaatgcaggttaatccaaaaatctgaaatc

SEQ ID NO: 48390 - DNA, 40 bp, Homo sapiens
atttcagatttttggattaacctgcattaatgctcaacct

SEQ ID NO: 48391 - DNA, 40 bp, Homo sapiens
aggttgagcattaatgcaggttaatccaaaaatctgaaat

SEQ ID NO: 48392 - DNA, 40 bp, Homo sapiens
tttcagatttttggattaacctgcattaatgctcaaccta

SEQ ID NO: 48393 - DNA, 40 bp, Homo sapiens
taggttgagcattaatgcaggttaatccaaaaatctgaaa

SEQ ID NO: 48394 - DNA, 40 bp, Homo sapiens
ttcagatttttggattaacctgcattaatgctcaacctat

SEQ ID NO: 48395 - DNA, 40 bp, Homo sapiens
ataggttgagcattaatgcaggttaatccaaaaatctgaa

SEQ ID NO: 48396 - DNA, 40 bp, Homo sapiens
tcagatttttggattaacctgcattaatgctcaacctata

SEQ ID NO: 48397 - DNA, 40 bp, Homo sapiens
tataggttgagcattaatgcaggttaatccaaaaatctga

SEQ ID NO: 48398 - DNA, 40 bp, Homo sapiens
cagatttttggattaacctgcattaatgctcaacctatat

SEQ ID NO: 48399 - DNA, 40 bp, Homo sapiens
atataggttgagcattaatgcaggttaatccaaaaatctg

SEQ ID NO: 48400 - DNA, 40 bp, Homo sapiens
agatttttggattaacctgcattaatgctcaacctatatg

SEQ ID NO: 48401 - DNA, 40 bp, Homo sapiens
catataggttgagcattaatgcaggttaatccaaaaatct

SEQ ID NO: 48402 - DNA, 40 bp, Homo sapiens
gatttttggattaacctgcattaatgctcaacctatatga

SEQ ID NO: 48403 - DNA, 40 bp, Homo sapiens
tcatataggttgagcattaatgcaggttaatccaaaaatc

SEQ ID NO: 48404 - DNA, 40 bp, Homo sapiens
atttttggattaacctgcattaatgctcaacctatatgaa

SEQ ID NO: 48405 - DNA, 40 bp, Homo sapiens
ttcatataggttgagcattaatgcaggttaatccaaaaat

SEQ ID NO: 48406 - DNA, 40 bp, Homo sapiens
tttttggattaacctgcattaatgctcaacctatatgaaa

SEQ ID NO: 48407 - DNA, 40 bp, Homo sapiens
tttcatataggttgagcattaatgcaggttaatccaaaaa

SEQ ID NO: 48408 - DNA, 40 bp, Homo sapiens
ttttggattaacctgcattaatgctcaacctatatgaaat

SEQ ID NO: 48409 - DNA, 40 bp, Homo sapiens
atttcatataggttgagcattaatgcaggttaatccaaaa

SEQ ID NO: 48410 - DNA, 40 bp, Homo sapiens
tttggattaacctgcattaatgctcaacctatatgaaatt

SEQ ID NO: 48411 - DNA, 40 bp, Homo sapiens
aatttcatataggttgagcattaatgcaggttaatccaaa

SEQ ID NO: 48412 - DNA, 40 bp, Homo sapiens
ttggattaacctgcattaatgctcaacctatatgaaattt

SEQ ID NO: 48413 - DNA, 40 bp, Homo sapiens
aaatttcatataggttgagcattaatgcaggttaatccaa

SEQ ID NO: 48414 - DNA, 40 bp, Homo sapiens
tggattaacctgcattaatgctcaacctatatgaaatttt

SEQ ID NO: 48415 - DNA, 40 bp, Homo sapiens
aaaatttcatataggttgagcattaatgcaggttaatcca

SEQ ID NO: 48416 - DNA, 40 bp, Homo sapiens
ggattaacctgcattaatgctcaacctatatgaaatttta

SEQ ID NO: 48417 - DNA, 40 bp, Homo sapiens
taaaatttcatataggttgagcattaatgcaggttaatcc

SEQ ID NO: 48418 - DNA, 40 bp, Homo sapiens
gattaacctgcattaatgctcaacctatatgaaattttat

SEQ ID NO: 48419 - DNA, 40 bp, Homo sapiens
ataaaatttcatataggttgagcattaatgcaggttaatc

SEQ ID NO: 48420 - DNA, 40 bp, Homo sapiens
attaacctgcattaatgctcaacctatatgaaattttatt

SEQ ID NO: 48421 - DNA, 40 bp, Homo sapiens
aataaaatttcatataggttgagcattaatgcaggttaat

SEQ ID NO: 48422 - DNA, 40 bp, Homo sapiens
ttaacctgcattaatgctcaacctatatgaaattttattc

SEQ ID NO: 48423 - DNA, 40 bp, Homo sapiens
gaataaaatttcatataggttgagcattaatgcaggttaa

SEQ ID NO: 48424 - DNA, 40 bp, Homo sapiens
taacctgcattaatgctcaacctatatgaaattttattcc

SEQ ID NO: 48425 - DNA, 40 bp, Homo sapiens
ggaataaaatttcatataggttgagcattaatgcaggtta

SEQ ID NO: 48426 - DNA, 40 bp, Homo sapiens
aacctgcattaatgctcaacctatatgaaattttattcct

SEQ ID NO: 48427 - DNA, 40 bp, Homo sapiens
aggaataaaatttcatataggttgagcattaatgcaggtt

SEQ ID NO: 48428 - DNA, 40 bp, Homo sapiens
acctgcattaatgctcaacctatatgaaattttattcctt

SEQ ID NO: 48429 - DNA, 40 bp, Homo sapiens
aaggaataaaatttcatataggttgagcattaatgcaggt

SEQ ID NO: 48430 - DNA, 40 bp, Homo sapiens
cctgcattaatgctcaacctatatgaaattttattccttt

SEQ ID NO: 48431 - DNA, 40 bp, Homo sapiens
aaaggaataaaatttcatataggttgagcattaatgcagg

SEQ ID NO: 48432 - DNA, 40 bp, Homo sapiens
ctgcattaatgctcaacctatatgaaattttattcctttt

SEQ ID NO: 48433 - DNA, 40 bp, Homo sapiens
aaaaggaataaaatttcatataggttgagcattaatgcag

SEQ ID NO: 48434 - DNA, 40 bp, Homo sapiens
tgcattaatgctcaacctatatgaaattttattccttttt

SEQ ID NO: 48435 - DNA, 40 bp, Homo sapiens
aaaaaggaataaaatttcatataggttgagcattaatgca

SEQ ID NO: 48436 - DNA, 40 bp, Homo sapiens
gcattaatgctcaacctatatgaaattttattccttttta

SEQ ID NO: 48437 - DNA, 40 bp, Homo sapiens
taaaaaggaataaaatttcatataggttgagcattaatgc

SEQ ID NO: 48438 - DNA, 40 bp, Homo sapiens
cattaatgctcaacctatatgaaattttattcctttttat

SEQ ID NO: 48439 - DNA, 40 bp, Homo sapiens
ataaaaaggaataaaatttcatataggttgagcattaatg

SEQ ID NO: 48440 - DNA, 40 bp, Homo sapiens
attaatgctcaacctatatgaaattttattcctttttatg

SEQ ID NO: 48441 - DNA, 40 bp, Homo sapiens
cataaaaaggaataaaatttcatataggttgagcattaat

SEQ ID NO: 48442 - DNA, 40 bp, Homo sapiens
ttaatgctcaacctatatgaaattttattcctttttatgg

SEQ ID NO: 48443 - DNA, 40 bp, Homo sapiens
ccataaaaaggaataaaatttcatataggttgagcattaa

SEQ ID NO: 48444 - DNA, 40 bp, Homo sapiens
taatgctcaacctatatgaaattttattcctttttatggc

SEQ ID NO: 48445 - DNA, 40 bp, Homo sapiens
gccataaaaaggaataaaatttcatataggttgagcatta

SEQ ID NO: 48446 - DNA, 40 bp, Homo sapiens
aatgctcaacctatatgaaattttattcctttttatggct

SEQ ID NO: 48447 - DNA, 40 bp, Homo sapiens
agccataaaaaggaataaaatttcatataggttgagcatt

SEQ ID NO: 48448 - DNA, 40 bp, Homo sapiens
atgctcaacctatatgaaattttattcctttttatggctg

SEQ ID NO: 48449 - DNA, 40 bp, Homo sapiens
cagccataaaaaggaataaaatttcatataggttgagcat

SEQ ID NO: 48450 - DNA, 40 bp, Homo sapiens
tgctcaacctatatgaaattttattcctttttatggctga

SEQ ID NO: 48451 - DNA, 40 bp, Homo sapiens
tcagccataaaaaggaataaaatttcatataggttgagca

SEQ ID NO: 48452 - DNA, 40 bp, Homo sapiens
gctcaacctatatgaaattttattcctttttatggctgaa

SEQ ID NO: 48453 - DNA, 40 bp, Homo sapiens
ttcagccataaaaaggaataaaatttcatataggttgagc

SEQ ID NO: 48454 - DNA, 40 bp, Homo sapiens
ctcaacctatatgaaattttattcctttttatggctgaat

SEQ ID NO: 48455 - DNA, 40 bp, Homo sapiens
attcagccataaaaaggaataaaatttcatataggttgag

SEQ ID NO: 48456 - DNA, 40 bp, Homo sapiens
tcaacctatatgaaattttattcctttttatggctgaata

SEQ ID NO: 48457 - DNA, 40 bp, Homo sapiens
tattcagccataaaaaggaataaaatttcatataggttga

SEQ ID NO: 48458 - DNA, 40 bp, Homo sapiens
caacctatatgaaattttattcctttttatggctgaataa

SEQ ID NO: 48459 - DNA, 40 bp, Homo sapiens
ttattcagccataaaaaggaataaaatttcatataggttg

SEQ ID NO: 48460 - DNA, 40 bp, Homo sapiens
aacctatatgaaattttattcctttttatggctgaataat

SEQ ID NO: 48461 - DNA, 40 bp, Homo sapiens
attattcagccataaaaaggaataaaatttcatataggtt

SEQ ID NO: 48462 - DNA, 40 bp, Homo sapiens
acctatatgaaattttattcctttttatggctgaataatg

SEQ ID NO: 48463 - DNA, 40 bp, Homo sapiens
cattattcagccataaaaaggaataaaatttcatataggt

SEQ ID NO: 48464 - DNA, 40 bp, Homo sapiens
cctatatgaaattttattcctttttatggctgaataatgt

SEQ ID NO: 48465 - DNA, 40 bp, Homo sapiens
acattattcagccataaaaaggaataaaatttcatatagg

SEQ ID NO: 48466 - DNA, 40 bp, Homo sapiens
ctatatgaaattttattcctttttatggctgaataatgtt

SEQ ID NO: 48467 - DNA, 40 bp, Homo sapiens
aacattattcagccataaaaaggaataaaatttcatatag

SEQ ID NO: 48468 - DNA, 40 bp, Homo sapiens
tatatgaaattttattcctttttatggctgaataatgttc

SEQ ID NO: 48469 - DNA, 40 bp, Homo sapiens
gaacattattcagccataaaaaggaataaaatttcatata

SEQ ID NO: 48470 - DNA, 40 bp, Homo sapiens
atatgaaattttattcctttttatggctgaataatgttcc

SEQ ID NO: 48471 - DNA, 40 bp, Homo sapiens
ggaacattattcagccataaaaaggaataaaatttcatat

SEQ ID NO: 48472 - DNA, 40 bp, Homo sapiens
tatgaaattttattcctttttatggctgaataatgttcca

SEQ ID NO: 48473 - DNA, 40 bp, Homo sapiens
tggaacattattcagccataaaaaggaataaaatttcata

SEQ ID NO: 48474 - DNA, 40 bp, Homo sapiens
atgaaattttattcctttttatggctgaataatgttccac

SEQ ID NO: 48475 - DNA, 40 bp, Homo sapiens
gtggaacattattcagccataaaaaggaataaaatttcat

SEQ ID NO: 48476 - DNA, 40 bp, Homo sapiens
tgaaattttattcctttttatggctgaataatgttccact

SEQ ID NO: 48477 - DNA, 40 bp, Homo sapiens
agtggaacattattcagccataaaaaggaataaaatttca

SEQ ID NO: 48478 - DNA, 40 bp, Homo sapiens
gaaattttattcctttttatggctgaataatgttccactg

SEQ ID NO: 48479 - DNA, 40 bp, Homo sapiens
cagtggaacattattcagccataaaaaggaataaaatttc

SEQ ID NO: 48480 - DNA, 40 bp, Homo sapiens
aaattttattcctttttatggctgaataatgttccactgt

SEQ ID NO: 48481 - DNA, 40 bp, Homo sapiens
acagtggaacattattcagccataaaaaggaataaaattt

SEQ ID NO: 48482 - DNA, 40 bp, Homo sapiens
aattttattcctttttatggctgaataatgttccactgta

SEQ ID NO: 48483 - DNA, 40 bp, Homo sapiens
tacagtggaacattattcagccataaaaaggaataaaatt

SEQ ID NO: 48484 - DNA, 40 bp, Homo sapiens
attttattcctttttatggctgaataatgttccactgtat

SEQ ID NO: 48485 - DNA, 40 bp, Homo sapiens
atacagtggaacattattcagccataaaaaggaataaaat

SEQ ID NO: 48486 - DNA, 40 bp, Homo sapiens
ttttattcctttttatggctgaataatgttccactgtatg

SEQ ID NO: 48487 - DNA, 40 bp, Homo sapiens
catacagtggaacattattcagccataaaaaggaataaaa

SEQ ID NO: 48488 - DNA, 40 bp, Homo sapiens
tttattcctttttatggctgaataatgttccactgtatgt

SEQ ID NO: 48489 - DNA, 40 bp, Homo sapiens
acatacagtggaacattattcagccataaaaaggaataaa

SEQ ID NO: 48490 - DNA, 40 bp, Homo sapiens
ttattcctttttatggctgaataatgttccactgtatgta

SEQ ID NO: 48491 - DNA, 40 bp, Homo sapiens
tacatacagtggaacattattcagccataaaaaggaataa

SEQ ID NO: 48492 - DNA, 40 bp, Homo sapiens
tattcctttttatggctgaataatgttccactgtatgtat

SEQ ID NO: 48493 - DNA, 40 bp, Homo sapiens
atacatacagtggaacattattcagccataaaaaggaata

SEQ ID NO: 48494 - DNA, 40 bp, Homo sapiens
attcctttttatggctgaataatgttccactgtatgtata

SEQ ID NO: 48495 - DNA, 40 bp, Homo sapiens
tatacatacagtggaacattattcagccataaaaaggaat

SEQ ID NO: 48496 - DNA, 40 bp, Homo sapiens
ttcctttttatggctgaataatgttccactgtatgtatat

SEQ ID NO: 48497 - DNA, 40 bp, Homo sapiens
atatacatacagtggaacattattcagccataaaaaggaa

SEQ ID NO: 48498 - DNA, 40 bp, Homo sapiens
tcctttttatggctgaataatgttccactgtatgtatata

SEQ ID NO: 48499 - DNA, 40 bp, Homo sapiens
tatatacatacagtggaacattattcagccataaaaagga

SEQ ID NO: 48500 - DNA, 40 bp, Homo sapiens
cctttttatggctgaataatgttccactgtatgtatatac

SEQ ID NO: 48501 - DNA, 40 bp, Homo sapiens
gtatatacatacagtggaacattattcagccataaaaagg

SEQ ID NO: 48502 - DNA, 40 bp, Homo sapiens
ctttttatggctgaataatgttccactgtatgtatatact

SEQ ID NO: 48503 - DNA, 40 bp, Homo sapiens
agtatatacatacagtggaacattattcagccataaaaag

SEQ ID NO: 48504 - DNA, 40 bp, Homo sapiens
tttttatggctgaataatgttccactgtatgtatatacta

SEQ ID NO: 48505 - DNA, 40 bp, Homo sapiens
tagtatatacatacagtggaacattattcagccataaaaa

SEQ ID NO: 48506 - DNA, 40 bp, Homo sapiens
ttttatggctgaataatgttccactgtatgtatatactac

SEQ ID NO: 48507 - DNA, 40 bp, Homo sapiens
gtagtatatacatacagtggaacattattcagccataaaa

SEQ ID NO: 48508 - DNA, 40 bp, Homo sapiens
tttatggctgaataatgttccactgtatgtatatactaca

SEQ ID NO: 48509 - DNA, 40 bp, Homo sapiens
tgtagtatatacatacagtggaacattattcagccataaa

SEQ ID NO: 48510 - DNA, 40 bp, Homo sapiens
ttatggctgaataatgttccactgtatgtatatactacat

SEQ ID NO: 48511 - DNA, 40 bp, Homo sapiens
atgtagtatatacatacagtggaacattattcagccataa

SEQ ID NO: 48512 - DNA, 40 bp, Homo sapiens
tatggctgaataatgttccactgtatgtatatactacatt

SEQ ID NO: 48513 - DNA, 40 bp, Homo sapiens
aatgtagtatatacatacagtggaacattattcagccata

SEQ ID NO: 48514 - DNA, 40 bp, Homo sapiens
atggctgaataatgttccactgtatgtatatactacattt

SEQ ID NO: 48515 - DNA, 40 bp, Homo sapiens
aaatgtagtatatacatacagtggaacattattcagccat

SEQ ID NO: 48516 - DNA, 40 bp, Homo sapiens
tggctgaataatgttccactgtatgtatatactacatttt

SEQ ID NO: 48517 - DNA, 40 bp, Homo sapiens
aaaatgtagtatatacatacagtggaacattattcagcca

SEQ ID NO: 48518 - DNA, 40 bp, Homo sapiens
ggctgaataatgttccactgtatgtatatactacattttg

SEQ ID NO: 48519 - DNA, 40 bp, Homo sapiens
caaaatgtagtatatacatacagtggaacattattcagcc

SEQ ID NO: 48520 - DNA, 40 bp, Homo sapiens
gctgaataatgttccactgtatgtatatactacattttgt

SEQ ID NO: 48521 - DNA, 40 bp, Homo sapiens
acaaaatgtagtatatacatacagtggaacattattcagc

SEQ ID NO: 48522 - DNA, 40 bp, Homo sapiens
ctgaataatgttccactgtatgtatatactacattttgtt

SEQ ID NO: 48523 - DNA, 40 bp, Homo sapiens
aacaaaatgtagtatatacatacagtggaacattattcag

SEQ ID NO: 48524 - DNA, 40 bp, Homo sapiens
tgaataatgttccactgtatgtatatactacattttgttt

SEQ ID NO: 48525 - DNA, 40 bp, Homo sapiens
aaacaaaatgtagtatatacatacagtggaacattattca

SEQ ID NO: 48526 - DNA, 40 bp, Homo sapiens
gaataatgttccactgtatgtatatactacattttgttta

SEQ ID NO: 48527 - DNA, 40 bp, Homo sapiens
taaacaaaatgtagtatatacatacagtggaacattattc

SEQ ID NO: 48528 - DNA, 40 bp, Homo sapiens
aataatgttccactgtatgtatatactacattttgtttat

SEQ ID NO: 48529 - DNA, 40 bp, Homo sapiens
ataaacaaaatgtagtatatacatacagtggaacattatt

SEQ ID NO: 48530 - DNA, 40 bp, Homo sapiens
ataatgttccactgtatgtatatactacattttgtttatc

SEQ ID NO: 48531 - DNA, 40 bp, Homo sapiens
gataaacaaaatgtagtatatacatacagtggaacattat

SEQ ID NO: 48532 - DNA, 40 bp, Homo sapiens
taatgttccactgtatgtatatactacattttgtttatcc

SEQ ID NO: 48533 - DNA, 40 bp, Homo sapiens
ggataaacaaaatgtagtatatacatacagtggaacatta

SEQ ID NO: 48534 - DNA, 40 bp, Homo sapiens
aatgttccactgtatgtatatactacattttgtttatcca

SEQ ID NO: 48535 - DNA, 40 bp, Homo sapiens
tggataaacaaaatgtagtatatacatacagtggaacatt

SEQ ID NO: 48536 - DNA, 40 bp, Homo sapiens
atgttccactgtatgtatatactacattttgtttatccat

SEQ ID NO: 48537 - DNA, 40 bp, Homo sapiens
atggataaacaaaatgtagtatatacatacagtggaacat

SEQ ID NO: 48538 - DNA, 40 bp, Homo sapiens
tgttccactgtatgtatatactacattttgtttatccatt

SEQ ID NO: 48539 - DNA, 40 bp, Homo sapiens
aatggataaacaaaatgtagtatatacatacagtggaaca

SEQ ID NO: 48540 - DNA, 40 bp, Homo sapiens
gttccactgtatgtatatactacattttgtttatccattc

SEQ ID NO: 48541 - DNA, 40 bp, Homo sapiens
gaatggataaacaaaatgtagtatatacatacagtggaac

SEQ ID NO: 48542 - DNA, 40 bp, Homo sapiens
ttccactgtatgtatatactacattttgtttatccattca

SEQ ID NO: 48543 - DNA, 40 bp, Homo sapiens
tgaatggataaacaaaatgtagtatatacatacagtggaa

SEQ ID NO: 48544 - DNA, 40 bp, Homo sapiens
tccactgtatgtatatactacattttgtttatccattcat

SEQ ID NO: 48545 - DNA, 40 bp, Homo sapiens
atgaatggataaacaaaatgtagtatatacatacagtgga

SEQ ID NO: 48546 - DNA, 40 bp, Homo sapiens
ccactgtatgtatatactacattttgtttatccattcatc

SEQ ID NO: 48547 - DNA, 40 bp, Homo sapiens
gatgaatggataaacaaaatgtagtatatacatacagtgg

SEQ ID NO: 48548 - DNA, 40 bp, Homo sapiens
cactgtatgtatatactacattttgtttatccattcatct

SEQ ID NO: 48549 - DNA, 40 bp, Homo sapiens
agatgaatggataaacaaaatgtagtatatacatacagtg

SEQ ID NO: 48550 - DNA, 40 bp, Homo sapiens
actgtatgtatatactacattttgtttatccattcatctg

SEQ ID NO: 48551 - DNA, 40 bp, Homo sapiens
cagatgaatggataaacaaaatgtagtatatacatacagt

SEQ ID NO: 48552 - DNA, 40 bp, Homo sapiens
ctgtatgtatatactacattttgtttatccattcatctgt

SEQ ID NO: 48553 - DNA, 40 bp, Homo sapiens
acagatgaatggataaacaaaatgtagtatatacatacag

SEQ ID NO: 48554 - DNA, 40 bp, Homo sapiens
tgtatgtatatactacattttgtttatccattcatctgtt

SEQ ID NO: 48555 - DNA, 40 bp, Homo sapiens
aacagatgaatggataaacaaaatgtagtatatacataca

SEQ ID NO: 48556 - DNA, 40 bp, Homo sapiens
gtatgtatatactacattttgtttatccattcatctgtta

SEQ ID NO: 48557 - DNA, 40 bp, Homo sapiens
taacagatgaatggataaacaaaatgtagtatatacatac

SEQ ID NO: 48558 - DNA, 40 bp, Homo sapiens
tatgtatatactacattttgtttatccattcatctgttaa

SEQ ID NO: 48559 - DNA, 40 bp, Homo sapiens
ttaacagatgaatggataaacaaaatgtagtatatacata

SEQ ID NO: 48560 - DNA, 40 bp, Homo sapiens
atgtatatactacattttgtttatccattcatctgttaac

SEQ ID NO: 48561 - DNA, 40 bp, Homo sapiens
gttaacagatgaatggataaacaaaatgtagtatatacat

SEQ ID NO: 48562 - DNA, 40 bp, Homo sapiens
tgtatatactacattttgtttatccattcatctgttaaca

SEQ ID NO: 48563 - DNA, 40 bp, Homo sapiens
tgttaacagatgaatggataaacaaaatgtagtatataca

SEQ ID NO: 48564 - DNA, 40 bp, Homo sapiens
gtatatactacattttgtttatccattcatctgttaacag

SEQ ID NO: 48565 - DNA, 40 bp, Homo sapiens
ctgttaacagatgaatggataaacaaaatgtagtatatac

SEQ ID NO: 48566 - DNA, 40 bp, Homo sapiens
tatatactacattttgtttatccattcatctgttaacaga

SEQ ID NO: 48567 - DNA, 40 bp, Homo sapiens
tctgttaacagatgaatggataaacaaaatgtagtatata

SEQ ID NO: 48568 - DNA, 40 bp, Homo sapiens
atatactacattttgtttatccattcatctgttaacagac

SEQ ID NO: 48569 - DNA, 40 bp, Homo sapiens
gtctgttaacagatgaatggataaacaaaatgtagtatat

SEQ ID NO: 48570 - DNA, 40 bp, Homo sapiens
tatactacattttgtttatccattcatctgttaacagaca

SEQ ID NO: 48571 - DNA, 40 bp, Homo sapiens
tgtctgttaacagatgaatggataaacaaaatgtagtata

SEQ ID NO: 48572 - DNA, 40 bp, Homo sapiens
atactacattttgtttatccattcatctgttaacagacac

SEQ ID NO: 48573 - DNA, 40 bp, Homo sapiens
gtgtctgttaacagatgaatggataaacaaaatgtagtat

SEQ ID NO: 48574 - DNA, 40 bp, Homo sapiens
tactacattttgtttatccattcatctgttaacagacact

SEQ ID NO: 48575 - DNA, 40 bp, Homo sapiens
agtgtctgttaacagatgaatggataaacaaaatgtagta

SEQ ID NO: 48576 - DNA, 40 bp, Homo sapiens
actacattttgtttatccattcatctgttaacagacactt

SEQ ID NO: 48577 - DNA, 40 bp, Homo sapiens
aagtgtctgttaacagatgaatggataaacaaaatgtagt

SEQ ID NO: 48578 - DNA, 40 bp, Homo sapiens
ctacattttgtttatccattcatctgttaacagacactta

SEQ ID NO: 48579 - DNA, 40 bp, Homo sapiens
taagtgtctgttaacagatgaatggataaacaaaatgtag

SEQ ID NO: 48580 - DNA, 40 bp, Homo sapiens
tacattttgtttatccattcatctgttaacagacacttaa

SEQ ID NO: 48581 - DNA, 40 bp, Homo sapiens
ttaagtgtctgttaacagatgaatggataaacaaaatgta

SEQ ID NO: 48582 - DNA, 40 bp, Homo sapiens
acattttgtttatccattcatctgttaacagacacttaag

SEQ ID NO: 48583 - DNA, 40 bp, Homo sapiens
cttaagtgtctgttaacagatgaatggataaacaaaatgt

SEQ ID NO: 48584 - DNA, 40 bp, Homo sapiens
cattttgtttatccattcatctgttaacagacacttaagt

SEQ ID NO: 48585 - DNA, 40 bp, Homo sapiens
acttaagtgtctgttaacagatgaatggataaacaaaatg

SEQ ID NO: 48586 - DNA, 40 bp, Homo sapiens
attttgtttatccattcatctgttaacagacacttaagtt

SEQ ID NO: 48587 - DNA, 40 bp, Homo sapiens
aacttaagtgtctgttaacagatgaatggataaacaaaat

SEQ ID NO: 48588 - DNA, 40 bp, Homo sapiens
ttttgtttatccattcatctgttaacagacacttaagtta

SEQ ID NO: 48589 - DNA, 40 bp, Homo sapiens
taacttaagtgtctgttaacagatgaatggataaacaaaa

SEQ ID NO: 48590 - DNA, 40 bp, Homo sapiens
tttgtttatccattcatctgttaacagacacttaagttat

SEQ ID NO: 48591 - DNA, 40 bp, Homo sapiens
ataacttaagtgtctgttaacagatgaatggataaacaaa

SEQ ID NO: 48592 - DNA, 40 bp, Homo sapiens
ttgtttatccattcatctgttaacagacacttaagttatt

SEQ ID NO: 48593 - DNA, 40 bp, Homo sapiens
aataacttaagtgtctgttaacagatgaatggataaacaa

SEQ ID NO: 48594 - DNA, 40 bp, Homo sapiens
tgtttatccattcatctgttaacagacacttaagttattt

SEQ ID NO: 48595 - DNA, 40 bp, Homo sapiens
aaataacttaagtgtctgttaacagatgaatggataaaca

SEQ ID NO: 48596 - DNA, 40 bp, Homo sapiens
gtttatccattcatctgttaacagacacttaagttatttc

SEQ ID NO: 48597 - DNA, 40 bp, Homo sapiens
gaaataacttaagtgtctgttaacagatgaatggataaac

SEQ ID NO: 48598 - DNA, 40 bp, Homo sapiens
tttatccattcatctgttaacagacacttaagttatttcc

SEQ ID NO: 48599 - DNA, 40 bp, Homo sapiens
ggaaataacttaagtgtctgttaacagatgaatggataaa

SEQ ID NO: 48600 - DNA, 40 bp, Homo sapiens
ttatccattcatctgttaacagacacttaagttatttcca

SEQ ID NO: 48601 - DNA, 40 bp, Homo sapiens
tggaaataacttaagtgtctgttaacagatgaatggataa

SEQ ID NO: 48602 - DNA, 40 bp, Homo sapiens
tatccattcatctgttaacagacacttaagttatttccac

SEQ ID NO: 48603 - DNA, 40 bp, Homo sapiens
gtggaaataacttaagtgtctgttaacagatgaatggata

SEQ ID NO: 48604 - DNA, 40 bp, Homo sapiens
atccattcatctgttaacagacacttaagttatttccaca

SEQ ID NO: 48605 - DNA, 40 bp, Homo sapiens
tgtggaaataacttaagtgtctgttaacagatgaatggat

SEQ ID NO: 48606 - DNA, 40 bp, Homo sapiens
tccattcatctgttaacagacacttaagttatttccacat

SEQ ID NO: 48607 - DNA, 40 bp, Homo sapiens
atgtggaaataacttaagtgtctgttaacagatgaatgga

SEQ ID NO: 48608 - DNA, 40 bp, Homo sapiens
ccattcatctgttaacagacacttaagttatttccacatt

SEQ ID NO: 48609 - DNA, 40 bp, Homo sapiens
aatgtggaaataacttaagtgtctgttaacagatgaatgg

SEQ ID NO: 48610 - DNA, 40 bp, Homo sapiens
cattcatctgttaacagacacttaagttatttccacattt

SEQ ID NO: 48611 - DNA, 40 bp, Homo sapiens
aaatgtggaaataacttaagtgtctgttaacagatgaatg

SEQ ID NO: 48612 - DNA, 40 bp, Homo sapiens
attcatctgttaacagacacttaagttatttccacatttt

SEQ ID NO: 48613 - DNA, 40 bp, Homo sapiens
aaaatgtggaaataacttaagtgtctgttaacagatgaat

SEQ ID NO: 48614 - DNA, 40 bp, Homo sapiens
ttcatctgttaacagacacttaagttatttccacattttg

SEQ ID NO: 48615 - DNA, 40 bp, Homo sapiens
caaaatgtggaaataacttaagtgtctgttaacagatgaa

SEQ ID NO: 48616 - DNA, 40 bp, Homo sapiens
tcatctgttaacagacacttaagttatttccacattttgg

SEQ ID NO: 48617 - DNA, 40 bp, Homo sapiens
ccaaaatgtggaaataacttaagtgtctgttaacagatga

SEQ ID NO: 48618 - DNA, 40 bp, Homo sapiens
catctgttaacagacacttaagttatttccacattttggg

SEQ ID NO: 48619 - DNA, 40 bp, Homo sapiens
cccaaaatgtggaaataacttaagtgtctgttaacagatg

SEQ ID NO: 48620 - DNA, 40 bp, Homo sapiens
atctgttaacagacacttaagttatttccacattttgggt

SEQ ID NO: 48621 - DNA, 40 bp, Homo sapiens
acccaaaatgtggaaataacttaagtgtctgttaacagat

SEQ ID NO: 48622 - DNA, 40 bp, Homo sapiens
tctgttaacagacacttaagttatttccacattttgggta

SEQ ID NO: 48623 - DNA, 40 bp, Homo sapiens
tacccaaaatgtggaaataacttaagtgtctgttaacaga

SEQ ID NO: 48624 - DNA, 40 bp, Homo sapiens
ctgttaacagacacttaagttatttccacattttgggtat

SEQ ID NO: 48625 - DNA, 40 bp, Homo sapiens
atacccaaaatgtggaaataacttaagtgtctgttaacag

SEQ ID NO: 48626 - DNA, 40 bp, Homo sapiens
tgttaacagacacttaagttatttccacattttgggtatt

SEQ ID NO: 48627 - DNA, 40 bp, Homo sapiens
aatacccaaaatgtggaaataacttaagtgtctgttaaca

SEQ ID NO: 48628 - DNA, 40 bp, Homo sapiens
gttaacagacacttaagttatttccacattttgggtatta

SEQ ID NO: 48629 - DNA, 40 bp, Homo sapiens
taatacccaaaatgtggaaataacttaagtgtctgttaac

SEQ ID NO: 48630 - DNA, 40 bp, Homo sapiens
ttaacagacacttaagttatttccacattttgggtattat

SEQ ID NO: 48631 - DNA, 40 bp, Homo sapiens
ataatacccaaaatgtggaaataacttaagtgtctgttaa

SEQ ID NO: 48632 - DNA, 40 bp, Homo sapiens
taacagacacttaagttatttccacattttgggtattata

SEQ ID NO: 48633 - DNA, 40 bp, Homo sapiens
tataatacccaaaatgtggaaataacttaagtgtctgtta

SEQ ID NO: 48634 - DNA, 40 bp, Homo sapiens
aacagacacttaagttatttccacattttgggtattataa

SEQ ID NO: 48635 - DNA, 40 bp, Homo sapiens
ttataatacccaaaatgtggaaataacttaagtgtctgtt

SEQ ID NO: 48636 - DNA, 40 bp, Homo sapiens
acagacacttaagttatttccacattttgggtattataaa

SEQ ID NO: 48637 - DNA, 40 bp, Homo sapiens
tttataatacccaaaatgtggaaataacttaagtgtctgt

SEQ ID NO: 48638 - DNA, 40 bp, Homo sapiens
cagacacttaagttatttccacattttgggtattataaat

SEQ ID NO: 48639 - DNA, 40 bp, Homo sapiens
atttataatacccaaaatgtggaaataacttaagtgtctg

SEQ ID NO: 48640 - DNA, 40 bp, Homo sapiens
agacacttaagttatttccacattttgggtattataaata

SEQ ID NO: 48641 - DNA, 40 bp, Homo sapiens
tatttataatacccaaaatgtggaaataacttaagtgtct

SEQ ID NO: 48642 - DNA, 40 bp, Homo sapiens
gacacttaagttatttccacattttgggtattataaatag

SEQ ID NO: 48643 - DNA, 40 bp, Homo sapiens
ctatttataatacccaaaatgtggaaataacttaagtgtc

SEQ ID NO: 48644 - DNA, 40 bp, Homo sapiens
acacttaagttatttccacattttgggtattataaatagt

SEQ ID NO: 48645 - DNA, 40 bp, Homo sapiens
actatttataatacccaaaatgtggaaataacttaagtgt

SEQ ID NO: 48646 - DNA, 40 bp, Homo sapiens
cacttaagttatttccacattttgggtattataaatagtg

SEQ ID NO: 48647 - DNA, 40 bp, Homo sapiens
cactatttataatacccaaaatgtggaaataacttaagtg

SEQ ID NO: 48648 - DNA, 40 bp, Homo sapiens
acttaagttatttccacattttgggtattataaatagtgc

SEQ ID NO: 48649 - DNA, 40 bp, Homo sapiens
gcactatttataatacccaaaatgtggaaataacttaagt

SEQ ID NO: 48650 - DNA, 40 bp, Homo sapiens
cttaagttatttccacattttgggtattataaatagtgct

SEQ ID NO: 48651 - DNA, 40 bp, Homo sapiens
agcactatttataatacccaaaatgtggaaataacttaag

SEQ ID NO: 48652 - DNA, 40 bp, Homo sapiens
ttaagttatttccacattttgggtattataaatagtgctg

SEQ ID NO: 48653 - DNA, 40 bp, Homo sapiens
cagcactatttataatacccaaaatgtggaaataacttaa

SEQ ID NO: 48654 - DNA, 40 bp, Homo sapiens
taagttatttccacattttgggtattataaatagtgctgc

SEQ ID NO: 48655 - DNA, 40 bp, Homo sapiens
gcagcactatttataatacccaaaatgtggaaataactta

SEQ ID NO: 48656 - DNA, 40 bp, Homo sapiens
aagttatttccacattttgggtattataaatagtgctgct

SEQ ID NO: 48657 - DNA, 40 bp, Homo sapiens
agcagcactatttataatacccaaaatgtggaaataactt

SEQ ID NO: 48658 - DNA, 40 bp, Homo sapiens
agttatttccacattttgggtattataaatagtgctgctg

SEQ ID NO: 48659 - DNA, 40 bp, Homo sapiens
cagcagcactatttataatacccaaaatgtggaaataact

SEQ ID NO: 48660 - DNA, 40 bp, Homo sapiens
gttatttccacattttgggtattataaatagtgctgctgc

SEQ ID NO: 48661 - DNA, 40 bp, Homo sapiens
gcagcagcactatttataatacccaaaatgtggaaataac

SEQ ID NO: 48662 - DNA, 40 bp, Homo sapiens
ttatttccacattttgggtattataaatagtgctgctgcg

SEQ ID NO: 48663 - DNA, 40 bp, Homo sapiens
cgcagcagcactatttataatacccaaaatgtggaaataa

SEQ ID NO: 48664 - DNA, 40 bp, Homo sapiens
tatttccacattttgggtattataaatagtgctgctgcga

SEQ ID NO: 48665 - DNA, 40 bp, Homo sapiens
tcgcagcagcactatttataatacccaaaatgtggaaata

SEQ ID NO: 48666 - DNA, 40 bp, Homo sapiens
atttccacattttgggtattataaatagtgctgctgcgaa

SEQ ID NO: 48667 - DNA, 40 bp, Homo sapiens
ttcgcagcagcactatttataatacccaaaatgtggaaat

SEQ ID NO: 48668 - DNA, 40 bp, Homo sapiens
tttccacattttgggtattataaatagtgctgctgcgaac

SEQ ID NO: 48669 - DNA, 40 bp, Homo sapiens
gttcgcagcagcactatttataatacccaaaatgtggaaa

SEQ ID NO: 48670 - DNA, 40 bp, Homo sapiens
ttccacattttgggtattataaatagtgctgctgcgaaca

SEQ ID NO: 48671 - DNA, 40 bp, Homo sapiens
tgttcgcagcagcactatttataatacccaaaatgtggaa

SEQ ID NO: 48672 - DNA, 40 bp, Homo sapiens
tccacattttgggtattataaatagtgctgctgcgaacat

SEQ ID NO: 48673 - DNA, 40 bp, Homo sapiens
atgttcgcagcagcactatttataatacccaaaatgtgga

SEQ ID NO: 48674 - DNA, 40 bp, Homo sapiens
ccacattttgggtattataaatagtgctgctgcgaacatt

SEQ ID NO: 48675 - DNA, 40 bp, Homo sapiens
aatgttcgcagcagcactatttataatacccaaaatgtgg

SEQ ID NO: 48676 - DNA, 40 bp, Homo sapiens
cacattttgggtattataaatagtgctgctgcgaacattg

SEQ ID NO: 48677 - DNA, 40 bp, Homo sapiens
caatgttcgcagcagcactatttataatacccaaaatgtg

SEQ ID NO: 48678 - DNA, 40 bp, Homo sapiens
acattttgggtattataaatagtgctgctgcgaacattgg

SEQ ID NO: 48679 - DNA, 40 bp, Homo sapiens
ccaatgttcgcagcagcactatttataatacccaaaatgt

SEQ ID NO: 48680 - DNA, 40 bp, Homo sapiens
cattttgggtattataaatagtgctgctgcgaacattggt

SEQ ID NO: 48681 - DNA, 40 bp, Homo sapiens
accaatgttcgcagcagcactatttataatacccaaaatg

SEQ ID NO: 48682 - DNA, 40 bp, Homo sapiens
attttgggtattataaatagtgctgctgcgaacattggtg

SEQ ID NO: 48683 - DNA, 40 bp, Homo sapiens
caccaatgttcgcagcagcactatttataatacccaaaat

SEQ ID NO: 48684 - DNA, 40 bp, Homo sapiens
ttttgggtattataaatagtgctgctgcgaacattggtgt

SEQ ID NO: 48685 - DNA, 40 bp, Homo sapiens
acaccaatgttcgcagcagcactatttataatacccaaaa

SEQ ID NO: 48686 - DNA, 40 bp, Homo sapiens
tttgggtattataaatagtgctgctgcgaacattggtgta

SEQ ID NO: 48687 - DNA, 40 bp, Homo sapiens
tacaccaatgttcgcagcagcactatttataatacccaaa

SEQ ID NO: 48688 - DNA, 40 bp, Homo sapiens
ttgggtattataaatagtgctgctgcgaacattggtgtac

SEQ ID NO: 48689 - DNA, 40 bp, Homo sapiens
gtacaccaatgttcgcagcagcactatttataatacccaa

SEQ ID NO: 48690 - DNA, 40 bp, Homo sapiens
tgggtattataaatagtgctgctgcgaacattggtgtaca

SEQ ID NO: 48691 - DNA, 40 bp, Homo sapiens
tgtacaccaatgttcgcagcagcactatttataataccca

SEQ ID NO: 48692 - DNA, 40 bp, Homo sapiens
gggtattataaatagtgctgctgcgaacattggtgtacat

SEQ ID NO: 48693 - DNA, 40 bp, Homo sapiens
atgtacaccaatgttcgcagcagcactatttataataccc

SEQ ID NO: 48694 - DNA, 40 bp, Homo sapiens
ggtattataaatagtgctgctgcgaacattggtgtacatg

SEQ ID NO: 48695 - DNA, 40 bp, Homo sapiens
catgtacaccaatgttcgcagcagcactatttataatacc

SEQ ID NO: 48696 - DNA, 40 bp, Homo sapiens
gtattataaatagtgctgctgcgaacattggtgtacatgt

SEQ ID NO: 48697 - DNA, 40 bp, Homo sapiens
acatgtacaccaatgttcgcagcagcactatttataatac

SEQ ID NO: 48698 - DNA, 40 bp, Homo sapiens
tattataaatagtgctgctgcgaacattggtgtacatgta

SEQ ID NO: 48699 - DNA, 40 bp, Homo sapiens
tacatgtacaccaatgttcgcagcagcactatttataata

SEQ ID NO: 48700 - DNA, 40 bp, Homo sapiens
attataaatagtgctgctgcgaacattggtgtacatgtat

SEQ ID NO: 48701 - DNA, 40 bp, Homo sapiens
atacatgtacaccaatgttcgcagcagcactatttataat

SEQ ID NO: 48702 - DNA, 40 bp, Homo sapiens
ttataaatagtgctgctgcgaacattggtgtacatgtatc

SEQ ID NO: 48703 - DNA, 40 bp, Homo sapiens
gatacatgtacaccaatgttcgcagcagcactatttataa

SEQ ID NO: 48704 - DNA, 40 bp, Homo sapiens
tataaatagtgctgctgcgaacattggtgtacatgtatct

SEQ ID NO: 48705 - DNA, 40 bp, Homo sapiens
agatacatgtacaccaatgttcgcagcagcactatttata

SEQ ID NO: 48706 - DNA, 40 bp, Homo sapiens
ataaatagtgctgctgcgaacattggtgtacatgtatctg

SEQ ID NO: 48707 - DNA, 40 bp, Homo sapiens
cagatacatgtacaccaatgttcgcagcagcactatttat

SEQ ID NO: 48708 - DNA, 40 bp, Homo sapiens
taaatagtgctgctgcgaacattggtgtacatgtatctgt

SEQ ID NO: 48709 - DNA, 40 bp, Homo sapiens
acagatacatgtacaccaatgttcgcagcagcactattta

SEQ ID NO: 48710 - DNA, 40 bp, Homo sapiens
aaatagtgctgctgcgaacattggtgtacatgtatctgtt

SEQ ID NO: 48711 - DNA, 40 bp, Homo sapiens
aacagatacatgtacaccaatgttcgcagcagcactattt

SEQ ID NO: 48712 - DNA, 40 bp, Homo sapiens
aatagtgctgctgcgaacattggtgtacatgtatctgttt

SEQ ID NO: 48713 - DNA, 40 bp, Homo sapiens
aaacagatacatgtacaccaatgttcgcagcagcactatt

SEQ ID NO: 48714 - DNA, 40 bp, Homo sapiens
atagtgctgctgcgaacattggtgtacatgtatctgtttg

SEQ ID NO: 48715 - DNA, 40 bp, Homo sapiens
caaacagatacatgtacaccaatgttcgcagcagcactat

SEQ ID NO: 48716 - DNA, 40 bp, Homo sapiens
tagtgctgctgcgaacattggtgtacatgtatctgtttga

SEQ ID NO: 48717 - DNA, 40 bp, Homo sapiens
tcaaacagatacatgtacaccaatgttcgcagcagcacta

SEQ ID NO: 48718 - DNA, 40 bp, Homo sapiens
agtgctgctgcgaacattggtgtacatgtatctgtttgag

SEQ ID NO: 48719 - DNA, 40 bp, Homo sapiens
ctcaaacagatacatgtacaccaatgttcgcagcagcact

SEQ ID NO: 48720 - DNA, 40 bp, Homo sapiens
gtgctgctgcgaacattggtgtacatgtatctgtttgagt

SEQ ID NO: 48721 - DNA, 40 bp, Homo sapiens
actcaaacagatacatgtacaccaatgttcgcagcagcac

SEQ ID NO: 48722 - DNA, 40 bp, Homo sapiens
tgctgctgcgaacattggtgtacatgtatctgtttgagtc

SEQ ID NO: 48723 - DNA, 40 bp, Homo sapiens
gactcaaacagatacatgtacaccaatgttcgcagcagca

SEQ ID NO: 48724 - DNA, 40 bp, Homo sapiens
gctgctgcgaacattggtgtacatgtatctgtttgagtcc

SEQ ID NO: 48725 - DNA, 40 bp, Homo sapiens
ggactcaaacagatacatgtacaccaatgttcgcagcagc

SEQ ID NO: 48726 - DNA, 40 bp, Homo sapiens
ctgctgcgaacattggtgtacatgtatctgtttgagtccc

SEQ ID NO: 48727 - DNA, 40 bp, Homo sapiens
gggactcaaacagatacatgtacaccaatgttcgcagcag

SEQ ID NO: 48728 - DNA, 40 bp, Homo sapiens
tgctgcgaacattggtgtacatgtatctgtttgagtccct

SEQ ID NO: 48729 - DNA, 40 bp, Homo sapiens
agggactcaaacagatacatgtacaccaatgttcgcagca

SEQ ID NO: 48730 - DNA, 40 bp, Homo sapiens
gctgcgaacattggtgtacatgtatctgtttgagtccctg

SEQ ID NO: 48731 - DNA, 40 bp, Homo sapiens
cagggactcaaacagatacatgtacaccaatgttcgcagc

SEQ ID NO: 48732 - DNA, 40 bp, Homo sapiens
ctgcgaacattggtgtacatgtatctgtttgagtccctgt

SEQ ID NO: 48733 - DNA, 40 bp, Homo sapiens
acagggactcaaacagatacatgtacaccaatgttcgcag

SEQ ID NO: 48734 - DNA, 40 bp, Homo sapiens
tgcgaacattggtgtacatgtatctgtttgagtccctgtt

SEQ ID NO: 48735 - DNA, 40 bp, Homo sapiens
aacagggactcaaacagatacatgtacaccaatgttcgca

SEQ ID NO: 48736 - DNA, 40 bp, Homo sapiens
gcgaacattggtgtacatgtatctgtttgagtccctgttt

SEQ ID NO: 48737 - DNA, 40 bp, Homo sapiens
aaacagggactcaaacagatacatgtacaccaatgttcgc

SEQ ID NO: 48738 - DNA, 40 bp, Homo sapiens
cgaacattggtgtacatgtatctgtttgagtccctgtttt

SEQ ID NO: 48739 - DNA, 40 bp, Homo sapiens
aaaacagggactcaaacagatacatgtacaccaatgttcg

SEQ ID NO: 48740 - DNA, 40 bp, Homo sapiens
gaacattggtgtacatgtatctgtttgagtccctgttttt

SEQ ID NO: 48741 - DNA, 40 bp, Homo sapiens
aaaaacagggactcaaacagatacatgtacaccaatgttc

SEQ ID NO: 48742 - DNA, 40 bp, Homo sapiens
aacattggtgtacatgtatctgtttgagtccctgttttta

SEQ ID NO: 48743 - DNA, 40 bp, Homo sapiens
taaaaacagggactcaaacagatacatgtacaccaatgtt

SEQ ID NO: 48744 - DNA, 40 bp, Homo sapiens
acattggtgtacatgtatctgtttgagtccctgtttttag

SEQ ID NO: 48745 - DNA, 40 bp, Homo sapiens
ctaaaaacagggactcaaacagatacatgtacaccaatgt

SEQ ID NO: 48746 - DNA, 40 bp, Homo sapiens
cattggtgtacatgtatctgtttgagtccctgtttttagt

SEQ ID NO: 48747 - DNA, 40 bp, Homo sapiens
actaaaaacagggactcaaacagatacatgtacaccaatg

SEQ ID NO: 48748 - DNA, 40 bp, Homo sapiens
attggtgtacatgtatctgtttgagtccctgtttttagtt

SEQ ID NO: 48749 - DNA, 40 bp, Homo sapiens
aactaaaaacagggactcaaacagatacatgtacaccaat

SEQ ID NO: 48750 - DNA, 40 bp, Homo sapiens
ttggtgtacatgtatctgtttgagtccctgtttttagtta

SEQ ID NO: 48751 - DNA, 40 bp, Homo sapiens
taactaaaaacagggactcaaacagatacatgtacaccaa

SEQ ID NO: 48752 - DNA, 40 bp, Homo sapiens
tggtgtacatgtatctgtttgagtccctgtttttagttat

SEQ ID NO: 48753 - DNA, 40 bp, Homo sapiens
ataactaaaaacagggactcaaacagatacatgtacacca

SEQ ID NO: 48754 - DNA, 40 bp, Homo sapiens
ggtgtacatgtatctgtttgagtccctgtttttagttatt

SEQ ID NO: 48755 - DNA, 40 bp, Homo sapiens
aataactaaaaacagggactcaaacagatacatgtacacc

SEQ ID NO: 48756 - DNA, 40 bp, Homo sapiens
gtgtacatgtatctgtttgagtccctgtttttagttattt

SEQ ID NO: 48757 - DNA, 40 bp, Homo sapiens
aaataactaaaaacagggactcaaacagatacatgtacac

SEQ ID NO: 48758 - DNA, 40 bp, Homo sapiens
tgtacatgtatctgtttgagtccctgtttttagttatttt

SEQ ID NO: 48759 - DNA, 40 bp, Homo sapiens
aaaataactaaaaacagggactcaaacagatacatgtaca

SEQ ID NO: 48760 - DNA, 40 bp, Homo sapiens
gtacatgtatctgtttgagtccctgtttttagttattttg

SEQ ID NO: 48761 - DNA, 40 bp, Homo sapiens
caaaataactaaaaacagggactcaaacagatacatgtac

SEQ ID NO: 48762 - DNA, 40 bp, Homo sapiens
tacatgtatctgtttgagtccctgtttttagttattttgg

SEQ ID NO: 48763 - DNA, 40 bp, Homo sapiens
ccaaaataactaaaaacagggactcaaacagatacatgta

SEQ ID NO: 48764 - DNA, 40 bp, Homo sapiens
acatgtatctgtttgagtccctgtttttagttattttggt

SEQ ID NO: 48765 - DNA, 40 bp, Homo sapiens
accaaaataactaaaaacagggactcaaacagatacatgt

SEQ ID NO: 48766 - DNA, 40 bp, Homo sapiens
catgtatctgtttgagtccctgtttttagttattttggtt

SEQ ID NO: 48767 - DNA, 40 bp, Homo sapiens
aaccaaaataactaaaaacagggactcaaacagatacatg

SEQ ID NO: 48768 - DNA, 40 bp, Homo sapiens
atgtatctgtttgagtccctgtttttagttattttggtta

SEQ ID NO: 48769 - DNA, 40 bp, Homo sapiens
taaccaaaataactaaaaacagggactcaaacagatacat

SEQ ID NO: 48770 - DNA, 40 bp, Homo sapiens
tgtatctgtttgagtccctgtttttagttattttggttat

SEQ ID NO: 48771 - DNA, 40 bp, Homo sapiens
ataaccaaaataactaaaaacagggactcaaacagataca

SEQ ID NO: 48772 - DNA, 40 bp, Homo sapiens
gtatctgtttgagtccctgtttttagttattttggttata

SEQ ID NO: 48773 - DNA, 40 bp, Homo sapiens
tataaccaaaataactaaaaacagggactcaaacagatac

SEQ ID NO: 48774 - DNA, 40 bp, Homo sapiens
tatctgtttgagtccctgtttttagttattttggttatat

SEQ ID NO: 48775 - DNA, 40 bp, Homo sapiens
atataaccaaaataactaaaaacagggactcaaacagata

SEQ ID NO: 48776 - DNA, 40 bp, Homo sapiens
atctgtttgagtccctgtttttagttattttggttatata

SEQ ID NO: 48777 - DNA, 40 bp, Homo sapiens
tatataaccaaaataactaaaaacagggactcaaacagat

SEQ ID NO: 48778 - DNA, 40 bp, Homo sapiens
tctgtttgagtccctgtttttagttattttggttatatac

SEQ ID NO: 48779 - DNA, 40 bp, Homo sapiens
gtatataaccaaaataactaaaaacagggactcaaacaga

SEQ ID NO: 48780 - DNA, 40 bp, Homo sapiens
ctgtttgagtccctgtttttagttattttggttatatacc

SEQ ID NO: 48781 - DNA, 40 bp, Homo sapiens
ggtatataaccaaaataactaaaaacagggactcaaacag

SEQ ID NO: 48782 - DNA, 40 bp, Homo sapiens
tgtttgagtccctgtttttagttattttggttatatacct

SEQ ID NO: 48783 - DNA, 40 bp, Homo sapiens
aggtatataaccaaaataactaaaaacagggactcaaaca

SEQ ID NO: 48784 - DNA, 40 bp, Homo sapiens
gtttgagtccctgtttttagttattttggttatataccta

SEQ ID NO: 48785 - DNA, 40 bp, Homo sapiens
taggtatataaccaaaataactaaaaacagggactcaaac

SEQ ID NO: 48786 - DNA, 40 bp, Homo sapiens
tttgagtccctgtttttagttattttggttatatacctag

SEQ ID NO: 48787 - DNA, 40 bp, Homo sapiens
ctaggtatataaccaaaataactaaaaacagggactcaaa

SEQ ID NO: 48788 - DNA, 40 bp, Homo sapiens
ttgagtccctgtttttagttattttggttatatacctagg

SEQ ID NO: 48789 - DNA, 40 bp, Homo sapiens
cctaggtatataaccaaaataactaaaaacagggactcaa

SEQ ID NO: 48790 - DNA, 40 bp, Homo sapiens
tgagtccctgtttttagttattttggttatatacctagga

SEQ ID NO: 48791 - DNA, 40 bp, Homo sapiens
tcctaggtatataaccaaaataactaaaaacagggactca

SEQ ID NO: 48792 - DNA, 40 bp, Homo sapiens
gagtccctgtttttagttattttggttatatacctaggaa

SEQ ID NO: 48793 - DNA, 40 bp, Homo sapiens
ttcctaggtatataaccaaaataactaaaaacagggactc

SEQ ID NO: 48794 - DNA, 40 bp, Homo sapiens
agtccctgtttttagttattttggttatatacctaggaat

SEQ ID NO: 48795 - DNA, 40 bp, Homo sapiens
attcctaggtatataaccaaaataactaaaaacagggact

SEQ ID NO: 48796 - DNA, 40 bp, Homo sapiens
gtccctgtttttagttattttggttatatacctaggaatg

SEQ ID NO: 48797 - DNA, 40 bp, Homo sapiens
cattcctaggtatataaccaaaataactaaaaacagggac

SEQ ID NO: 48798 - DNA, 40 bp, Homo sapiens
tccctgtttttagttattttggttatatacctaggaatgg

SEQ ID NO: 48799 - DNA, 40 bp, Homo sapiens
ccattcctaggtatataaccaaaataactaaaaacaggga

SEQ ID NO: 48800 - DNA, 40 bp, Homo sapiens
ccctgtttttagttattttggttatatacctaggaatgga

SEQ ID NO: 48801 - DNA, 40 bp, Homo sapiens
tccattcctaggtatataaccaaaataactaaaaacaggg

SEQ ID NO: 48802 - DNA, 40 bp, Homo sapiens
cctgtttttagttattttggttatatacctaggaatggaa

SEQ ID NO: 48803 - DNA, 40 bp, Homo sapiens
ttccattcctaggtatataaccaaaataactaaaaacagg

SEQ ID NO: 48804 - DNA, 40 bp, Homo sapiens
ctgtttttagttattttggttatatacctaggaatggaat

SEQ ID NO: 48805 - DNA, 40 bp, Homo sapiens
attccattcctaggtatataaccaaaataactaaaaacag

SEQ ID NO: 48806 - DNA, 40 bp, Homo sapiens
tgtttttagttattttggttatatacctaggaatggaatt

SEQ ID NO: 48807 - DNA, 40 bp, Homo sapiens
aattccattcctaggtatataaccaaaataactaaaaaca

SEQ ID NO: 48808 - DNA, 40 bp, Homo sapiens
gtttttagttattttggttatatacctaggaatggaattg

SEQ ID NO: 48809 - DNA, 40 bp, Homo sapiens
caattccattcctaggtatataaccaaaataactaaaaac

SEQ ID NO: 48810 - DNA, 40 bp, Homo sapiens
tttttagttattttggttatatacctaggaatggaattgc

SEQ ID NO: 48811 - DNA, 40 bp, Homo sapiens
gcaattccattcctaggtatataaccaaaataactaaaaa

SEQ ID NO: 48812 - DNA, 40 bp, Homo sapiens
ttttagttattttggttatatacctaggaatggaattgct

SEQ ID NO: 48813 - DNA, 40 bp, Homo sapiens
agcaattccattcctaggtatataaccaaaataactaaaa

SEQ ID NO: 48814 - DNA, 40 bp, Homo sapiens
tttagttattttggttatatacctaggaatggaattgctg

SEQ ID NO: 48815 - DNA, 40 bp, Homo sapiens
cagcaattccattcctaggtatataaccaaaataactaaa

SEQ ID NO: 48816 - DNA, 40 bp, Homo sapiens
ttagttattttggttatatacctaggaatggaattgctga

SEQ ID NO: 48817 - DNA, 40 bp, Homo sapiens
tcagcaattccattcctaggtatataaccaaaataactaa

SEQ ID NO: 48818 - DNA, 40 bp, Homo sapiens
tagttattttggttatatacctaggaatggaattgctgat

SEQ ID NO: 48819 - DNA, 40 bp, Homo sapiens
atcagcaattccattcctaggtatataaccaaaataacta

SEQ ID NO: 48820 - DNA, 40 bp, Homo sapiens
agttattttggttatatacctaggaatggaattgctgatc

SEQ ID NO: 48821 - DNA, 40 bp, Homo sapiens
gatcagcaattccattcctaggtatataaccaaaataact

SEQ ID NO: 48822 - DNA, 40 bp, Homo sapiens
gttattttggttatatacctaggaatggaattgctgatca

SEQ ID NO: 48823 - DNA, 40 bp, Homo sapiens
tgatcagcaattccattcctaggtatataaccaaaataac

SEQ ID NO: 48824 - DNA, 40 bp, Homo sapiens
ttattttggttatatacctaggaatggaattgctgatcat

SEQ ID NO: 48825 - DNA, 40 bp, Homo sapiens
atgatcagcaattccattcctaggtatataaccaaaataa

SEQ ID NO: 48826 - DNA, 40 bp, Homo sapiens
tattttggttatatacctaggaatggaattgctgatcata

SEQ ID NO: 48827 - DNA, 40 bp, Homo sapiens
tatgatcagcaattccattcctaggtatataaccaaaata

SEQ ID NO: 48828 - DNA, 40 bp, Homo sapiens
attttggttatatacctaggaatggaattgctgatcatat

SEQ ID NO: 48829 - DNA, 40 bp, Homo sapiens
atatgatcagcaattccattcctaggtatataaccaaaat

SEQ ID NO: 48830 - DNA, 40 bp, Homo sapiens
ttttggttatatacctaggaatggaattgctgatcatatg

SEQ ID NO: 48831 - DNA, 40 bp, Homo sapiens
catatgatcagcaattccattcctaggtatataaccaaaa

SEQ ID NO: 48832 - DNA, 40 bp, Homo sapiens
tttggttatatacctaggaatggaattgctgatcatatgg

SEQ ID NO: 48833 - DNA, 40 bp, Homo sapiens
ccatatgatcagcaattccattcctaggtatataaccaaa

SEQ ID NO: 48834 - DNA, 40 bp, Homo sapiens
ttggttatatacctaggaatggaattgctgatcatatggt

SEQ ID NO: 48835 - DNA, 40 bp, Homo sapiens
accatatgatcagcaattccattcctaggtatataaccaa

SEQ ID NO: 48836 - DNA, 40 bp, Homo sapiens
tggttatatacctaggaatggaattgctgatcatatggta

SEQ ID NO: 48837 - DNA, 40 bp, Homo sapiens
taccatatgatcagcaattccattcctaggtatataacca

SEQ ID NO: 48838 - DNA, 40 bp, Homo sapiens
ggttatatacctaggaatggaattgctgatcatatggtaa

SEQ ID NO: 48839 - DNA, 40 bp, Homo sapiens
ttaccatatgatcagcaattccattcctaggtatataacc

SEQ ID NO: 48840 - DNA, 40 bp, Homo sapiens
gttatatacctaggaatggaattgctgatcatatggtaat

SEQ ID NO: 48841 - DNA, 40 bp, Homo sapiens
attaccatatgatcagcaattccattcctaggtatataac

SEQ ID NO: 48842 - DNA, 40 bp, Homo sapiens
ttatatacctaggaatggaattgctgatcatatggtaatt

SEQ ID NO: 48843 - DNA, 40 bp, Homo sapiens
aattaccatatgatcagcaattccattcctaggtatataa

SEQ ID NO: 48844 - DNA, 40 bp, Homo sapiens
tatatacctaggaatggaattgctgatcatatggtaattc

SEQ ID NO: 48845 - DNA, 40 bp, Homo sapiens
gaattaccatatgatcagcaattccattcctaggtatata

SEQ ID NO: 48846 - DNA, 40 bp, Homo sapiens
atatacctaggaatggaattgctgatcatatggtaattct

SEQ ID NO: 48847 - DNA, 40 bp, Homo sapiens
agaattaccatatgatcagcaattccattcctaggtatat

SEQ ID NO: 48848 - DNA, 40 bp, Homo sapiens
tatacctaggaatggaattgctgatcatatggtaattctg

SEQ ID NO: 48849 - DNA, 40 bp, Homo sapiens
cagaattaccatatgatcagcaattccattcctaggtata

SEQ ID NO: 48850 - DNA, 40 bp, Homo sapiens
atacctaggaatggaattgctgatcatatggtaattctgt

SEQ ID NO: 48851 - DNA, 40 bp, Homo sapiens
acagaattaccatatgatcagcaattccattcctaggtat

SEQ ID NO: 48852 - DNA, 40 bp, Homo sapiens
tacctaggaatggaattgctgatcatatggtaattctgtg

SEQ ID NO: 48853 - DNA, 40 bp, Homo sapiens
cacagaattaccatatgatcagcaattccattcctaggta

SEQ ID NO: 48854 - DNA, 40 bp, Homo sapiens
acctaggaatggaattgctgatcatatggtaattctgtgt

SEQ ID NO: 48855 - DNA, 40 bp, Homo sapiens
acacagaattaccatatgatcagcaattccattcctaggt

SEQ ID NO: 48856 - DNA, 40 bp, Homo sapiens
cctaggaatggaattgctgatcatatggtaattctgtgtt

SEQ ID NO: 48857 - DNA, 40 bp, Homo sapiens
aacacagaattaccatatgatcagcaattccattcctagg

SEQ ID NO: 48858 - DNA, 40 bp, Homo sapiens
ctaggaatggaattgctgatcatatggtaattctgtgttt

SEQ ID NO: 48859 - DNA, 40 bp, Homo sapiens
aaacacagaattaccatatgatcagcaattccattcctag

SEQ ID NO: 48860 - DNA, 40 bp, Homo sapiens
taggaatggaattgctgatcatatggtaattctgtgttta

SEQ ID NO: 48861 - DNA, 40 bp, Homo sapiens
taaacacagaattaccatatgatcagcaattccattccta

SEQ ID NO: 48862 - DNA, 40 bp, Homo sapiens
aggaatggaattgctgatcatatggtaattctgtgtttaa

SEQ ID NO: 48863 - DNA, 40 bp, Homo sapiens
ttaaacacagaattaccatatgatcagcaattccattcct

SEQ ID NO: 48864 - DNA, 40 bp, Homo sapiens
ggaatggaattgctgatcatatggtaattctgtgtttaac

SEQ ID NO: 48865 - DNA, 40 bp, Homo sapiens
gttaaacacagaattaccatatgatcagcaattccattcc

SEQ ID NO: 48866 - DNA, 40 bp, Homo sapiens
gaatggaattgctgatcatatggtaattctgtgtttaact

SEQ ID NO: 48867 - DNA, 40 bp, Homo sapiens
agttaaacacagaattaccatatgatcagcaattccattc

SEQ ID NO: 48868 - DNA, 40 bp, Homo sapiens
aatggaattgctgatcatatggtaattctgtgtttaactt

SEQ ID NO: 48869 - DNA, 40 bp, Homo sapiens
aagttaaacacagaattaccatatgatcagcaattccatt

SEQ ID NO: 48870 - DNA, 40 bp, Homo sapiens
atggaattgctgatcatatggtaattctgtgtttaacttt

SEQ ID NO: 48871 - DNA, 40 bp, Homo sapiens
aaagttaaacacagaattaccatatgatcagcaattccat

SEQ ID NO: 48872 - DNA, 40 bp, Homo sapiens
tggaattgctgatcatatggtaattctgtgtttaactttt

SEQ ID NO: 48873 - DNA, 40 bp, Homo sapiens
aaaagttaaacacagaattaccatatgatcagcaattcca

SEQ ID NO: 48874 - DNA, 40 bp, Homo sapiens
ggaattgctgatcatatggtaattctgtgtttaacttttt

SEQ ID NO: 48875 - DNA, 40 bp, Homo sapiens
aaaaagttaaacacagaattaccatatgatcagcaattcc

SEQ ID NO: 48876 - DNA, 40 bp, Homo sapiens
gaattgctgatcatatggtaattctgtgtttaactttttg

SEQ ID NO: 48877 - DNA, 40 bp, Homo sapiens
caaaaagttaaacacagaattaccatatgatcagcaattc

SEQ ID NO: 48878 - DNA, 40 bp, Homo sapiens
aattgctgatcatatggtaattctgtgtttaactttttga

SEQ ID NO: 48879 - DNA, 40 bp, Homo sapiens
tcaaaaagttaaacacagaattaccatatgatcagcaatt

SEQ ID NO: 48880 - DNA, 40 bp, Homo sapiens
attgctgatcatatggtaattctgtgtttaactttttgag

SEQ ID NO: 48881 - DNA, 40 bp, Homo sapiens
ctcaaaaagttaaacacagaattaccatatgatcagcaat

SEQ ID NO: 48882 - DNA, 40 bp, Homo sapiens
ttgctgatcatatggtaattctgtgtttaactttttgagg

SEQ ID NO: 48883 - DNA, 40 bp, Homo sapiens
cctcaaaaagttaaacacagaattaccatatgatcagcaa

SEQ ID NO: 48884 - DNA, 40 bp, Homo sapiens
tgctgatcatatggtaattctgtgtttaactttttgagga

SEQ ID NO: 48885 - DNA, 40 bp, Homo sapiens
tcctcaaaaagttaaacacagaattaccatatgatcagca

SEQ ID NO: 48886 - DNA, 40 bp, Homo sapiens
gctgatcatatggtaattctgtgtttaactttttgaggaa

SEQ ID NO: 48887 - DNA, 40 bp, Homo sapiens
ttcctcaaaaagttaaacacagaattaccatatgatcagc

SEQ ID NO: 48888 - DNA, 40 bp, Homo sapiens
ctgatcatatggtaattctgtgtttaactttttgaggaac

SEQ ID NO: 48889 - DNA, 40 bp, Homo sapiens
gttcctcaaaaagttaaacacagaattaccatatgatcag

SEQ ID NO: 48890 - DNA, 40 bp, Homo sapiens
tgatcatatggtaattctgtgtttaactttttgaggaact

SEQ ID NO: 48891 - DNA, 40 bp, Homo sapiens
agttcctcaaaaagttaaacacagaattaccatatgatca

SEQ ID NO: 48892 - DNA, 40 bp, Homo sapiens
gatcatatggtaattctgtgtttaactttttgaggaacta

SEQ ID NO: 48893 - DNA, 40 bp, Homo sapiens
tagttcctcaaaaagttaaacacagaattaccatatgatc

SEQ ID NO: 48894 - DNA, 40 bp, Homo sapiens
atcatatggtaattctgtgtttaactttttgaggaactac

SEQ ID NO: 48895 - DNA, 40 bp, Homo sapiens
gtagttcctcaaaaagttaaacacagaattaccatatgat

SEQ ID NO: 48896 - DNA, 40 bp, Homo sapiens
tcatatggtaattctgtgtttaactttttgaggaactacc

SEQ ID NO: 48897 - DNA, 40 bp, Homo sapiens
ggtagttcctcaaaaagttaaacacagaattaccatatga

SEQ ID NO: 48898 - DNA, 40 bp, Homo sapiens
catatggtaattctgtgtttaactttttgaggaactacca

SEQ ID NO: 48899 - DNA, 40 bp, Homo sapiens
tggtagttcctcaaaaagttaaacacagaattaccatatg

SEQ ID NO: 48900 - DNA, 40 bp, Homo sapiens
atatggtaattctgtgtttaactttttgaggaactaccac

SEQ ID NO: 48901 - DNA, 40 bp, Homo sapiens
gtggtagttcctcaaaaagttaaacacagaattaccatat

SEQ ID NO: 48902 - DNA, 40 bp, Homo sapiens
tatggtaattctgtgtttaactttttgaggaactaccact

SEQ ID NO: 48903 - DNA, 40 bp, Homo sapiens
agtggtagttcctcaaaaagttaaacacagaattaccata

SEQ ID NO: 48904 - DNA, 40 bp, Homo sapiens
atggtaattctgtgtttaactttttgaggaactaccactg

SEQ ID NO: 48905 - DNA, 40 bp, Homo sapiens
cagtggtagttcctcaaaaagttaaacacagaattaccat

SEQ ID NO: 48906 - DNA, 40 bp, Homo sapiens
tggtaattctgtgtttaactttttgaggaactaccactgt

SEQ ID NO: 48907 - DNA, 40 bp, Homo sapiens
acagtggtagttcctcaaaaagttaaacacagaattacca

SEQ ID NO: 48908 - DNA, 40 bp, Homo sapiens
ggtaattctgtgtttaactttttgaggaactaccactgtt

SEQ ID NO: 48909 - DNA, 40 bp, Homo sapiens
aacagtggtagttcctcaaaaagttaaacacagaattacc

SEQ ID NO: 48910 - DNA, 40 bp, Homo sapiens
gtaattctgtgtttaactttttgaggaactaccactgttt

SEQ ID NO: 48911 - DNA, 40 bp, Homo sapiens
aaacagtggtagttcctcaaaaagttaaacacagaattac

SEQ ID NO: 48912 - DNA, 40 bp, Homo sapiens
taattctgtgtttaactttttgaggaactaccactgtttt

SEQ ID NO: 48913 - DNA, 40 bp, Homo sapiens
aaaacagtggtagttcctcaaaaagttaaacacagaatta

SEQ ID NO: 48914 - DNA, 40 bp, Homo sapiens
aattctgtgtttaactttttgaggaactaccactgttttc

SEQ ID NO: 48915 - DNA, 40 bp, Homo sapiens
gaaaacagtggtagttcctcaaaaagttaaacacagaatt

SEQ ID NO: 48916 - DNA, 40 bp, Homo sapiens
attctgtgtttaactttttgaggaactaccactgttttcc

SEQ ID NO: 48917 - DNA, 40 bp, Homo sapiens
ggaaaacagtggtagttcctcaaaaagttaaacacagaat

SEQ ID NO: 48918 - DNA, 40 bp, Homo sapiens
ttctgtgtttaactttttgaggaactaccactgttttcca

SEQ ID NO: 48919 - DNA, 40 bp, Homo sapiens
tggaaaacagtggtagttcctcaaaaagttaaacacagaa

SEQ ID NO: 48920 - DNA, 40 bp, Homo sapiens
tctgtgtttaactttttgaggaactaccactgttttccac

SEQ ID NO: 48921 - DNA, 40 bp, Homo sapiens
gtggaaaacagtggtagttcctcaaaaagttaaacacaga

SEQ ID NO: 48922 - DNA, 40 bp, Homo sapiens
ctgtgtttaactttttgaggaactaccactgttttccaca

SEQ ID NO: 48923 - DNA, 40 bp, Homo sapiens
tgtggaaaacagtggtagttcctcaaaaagttaaacacag

SEQ ID NO: 48924 - DNA, 40 bp, Homo sapiens
tgtgtttaactttttgaggaactaccactgttttccacaa

SEQ ID NO: 48925 - DNA, 40 bp, Homo sapiens
ttgtggaaaacagtggtagttcctcaaaaagttaaacaca

SEQ ID NO: 48926 - DNA, 40 bp, Homo sapiens
gtgtttaactttttgaggaactaccactgttttccacaat

SEQ ID NO: 48927 - DNA, 40 bp, Homo sapiens
attgtggaaaacagtggtagttcctcaaaaagttaaacac

SEQ ID NO: 48928 - DNA, 40 bp, Homo sapiens
tgtttaactttttgaggaactaccactgttttccacaatg

SEQ ID NO: 48929 - DNA, 40 bp, Homo sapiens
cattgtggaaaacagtggtagttcctcaaaaagttaaaca

SEQ ID NO: 48930 - DNA, 40 bp, Homo sapiens
gtttaactttttgaggaactaccactgttttccacaatgg

SEQ ID NO: 48931 - DNA, 40 bp, Homo sapiens
ccattgtggaaaacagtggtagttcctcaaaaagttaaac

SEQ ID NO: 48932 - DNA, 40 bp, Homo sapiens
tttaactttttgaggaactaccactgttttccacaatggc

SEQ ID NO: 48933 - DNA, 40 bp, Homo sapiens
gccattgtggaaaacagtggtagttcctcaaaaagttaaa

SEQ ID NO: 48934 - DNA, 40 bp, Homo sapiens
ttaactttttgaggaactaccactgttttccacaatggca

SEQ ID NO: 48935 - DNA, 40 bp, Homo sapiens
tgccattgtggaaaacagtggtagttcctcaaaaagttaa

SEQ ID NO: 48936 - DNA, 40 bp, Homo sapiens
taactttttgaggaactaccactgttttccacaatggcat

SEQ ID NO: 48937 - DNA, 40 bp, Homo sapiens
atgccattgtggaaaacagtggtagttcctcaaaaagtta

SEQ ID NO: 48938 - DNA, 40 bp, Homo sapiens
aactttttgaggaactaccactgttttccacaatggcatc

SEQ ID NO: 48939 - DNA, 40 bp, Homo sapiens
gatgccattgtggaaaacagtggtagttcctcaaaaagtt

SEQ ID NO: 48940 - DNA, 40 bp, Homo sapiens
actttttgaggaactaccactgttttccacaatggcatca

SEQ ID NO: 48941 - DNA, 40 bp, Homo sapiens
tgatgccattgtggaaaacagtggtagttcctcaaaaagt

SEQ ID NO: 48942 - DNA, 40 bp, Homo sapiens
ctttttgaggaactaccactgttttccacaatggcatcac

SEQ ID NO: 48943 - DNA, 40 bp, Homo sapiens
gtgatgccattgtggaaaacagtggtagttcctcaaaaag

SEQ ID NO: 48944 - DNA, 40 bp, Homo sapiens
tttttgaggaactaccactgttttccacaatggcatcacc

SEQ ID NO: 48945 - DNA, 40 bp, Homo sapiens
ggtgatgccattgtggaaaacagtggtagttcctcaaaaa

SEQ ID NO: 48946 - DNA, 40 bp, Homo sapiens
ttttgaggaactaccactgttttccacaatggcatcacca

SEQ ID NO: 48947 - DNA, 40 bp, Homo sapiens
tggtgatgccattgtggaaaacagtggtagttcctcaaaa

SEQ ID NO: 48948 - DNA, 40 bp, Homo sapiens
tttgaggaactaccactgttttccacaatggcatcaccat

SEQ ID NO: 48949 - DNA, 40 bp, Homo sapiens
atggtgatgccattgtggaaaacagtggtagttcctcaaa

SEQ ID NO: 48950 - DNA, 40 bp, Homo sapiens
ttgaggaactaccactgttttccacaatggcatcaccatt

SEQ ID NO: 48951 - DNA, 40 bp, Homo sapiens
aatggtgatgccattgtggaaaacagtggtagttcctcaa

SEQ ID NO: 48952 - DNA, 40 bp, Homo sapiens
tgaggaactaccactgttttccacaatggcatcaccattt

SEQ ID NO: 48953 - DNA, 40 bp, Homo sapiens
aaatggtgatgccattgtggaaaacagtggtagttcctca

SEQ ID NO: 48954 - DNA, 40 bp, Homo sapiens
gaggaactaccactgttttccacaatggcatcaccatttt

SEQ ID NO: 48955 - DNA, 40 bp, Homo sapiens
aaaatggtgatgccattgtggaaaacagtggtagttcctc

SEQ ID NO: 48956 - DNA, 40 bp, Homo sapiens
aggaactaccactgttttccacaatggcatcaccatttta

SEQ ID NO: 48957 - DNA, 40 bp, Homo sapiens
taaaatggtgatgccattgtggaaaacagtggtagttcct

SEQ ID NO: 48958 - DNA, 40 bp, Homo sapiens
ggaactaccactgttttccacaatggcatcaccattttac

SEQ ID NO: 48959 - DNA, 40 bp, Homo sapiens
gtaaaatggtgatgccattgtggaaaacagtggtagttcc

SEQ ID NO: 48960 - DNA, 40 bp, Homo sapiens
gaactaccactgttttccacaatggcatcaccattttaca

SEQ ID NO: 48961 - DNA, 40 bp, Homo sapiens
tgtaaaatggtgatgccattgtggaaaacagtggtagttc

SEQ ID NO: 48962 - DNA, 40 bp, Homo sapiens
aactaccactgttttccacaatggcatcaccattttacat

SEQ ID NO: 48963 - DNA, 40 bp, Homo sapiens
atgtaaaatggtgatgccattgtggaaaacagtggtagtt

SEQ ID NO: 48964 - DNA, 40 bp, Homo sapiens
actaccactgttttccacaatggcatcaccattttacatt

SEQ ID NO: 48965 - DNA, 40 bp, Homo sapiens
aatgtaaaatggtgatgccattgtggaaaacagtggtagt

SEQ ID NO: 48966 - DNA, 40 bp, Homo sapiens
ctaccactgttttccacaatggcatcaccattttacattc

SEQ ID NO: 48967 - DNA, 40 bp, Homo sapiens
gaatgtaaaatggtgatgccattgtggaaaacagtggtag

SEQ ID NO: 48968 - DNA, 40 bp, Homo sapiens
taccactgttttccacaatggcatcaccattttacattcc

SEQ ID NO: 48969 - DNA, 40 bp, Homo sapiens
ggaatgtaaaatggtgatgccattgtggaaaacagtggta

SEQ ID NO: 48970 - DNA, 40 bp, Homo sapiens
accactgttttccacaatggcatcaccattttacattccc

SEQ ID NO: 48971 - DNA, 40 bp, Homo sapiens
gggaatgtaaaatggtgatgccattgtggaaaacagtggt

SEQ ID NO: 48972 - DNA, 40 bp, Homo sapiens
ccactgttttccacaatggcatcaccattttacattccca

SEQ ID NO: 48973 - DNA, 40 bp, Homo sapiens
tgggaatgtaaaatggtgatgccattgtggaaaacagtgg

SEQ ID NO: 48974 - DNA, 40 bp, Homo sapiens
cactgttttccacaatggcatcaccattttacattcccac

SEQ ID NO: 48975 - DNA, 40 bp, Homo sapiens
gtgggaatgtaaaatggtgatgccattgtggaaaacagtg

SEQ ID NO: 48976 - DNA, 40 bp, Homo sapiens
actgttttccacaatggcatcaccattttacattcccacc

SEQ ID NO: 48977 - DNA, 40 bp, Homo sapiens
ggtgggaatgtaaaatggtgatgccattgtggaaaacagt

SEQ ID NO: 48978 - DNA, 40 bp, Homo sapiens
ctgttttccacaatggcatcaccattttacattcccacca

SEQ ID NO: 48979 - DNA, 40 bp, Homo sapiens
tggtgggaatgtaaaatggtgatgccattgtggaaaacag

SEQ ID NO: 48980 - DNA, 40 bp, Homo sapiens
tgttttccacaatggcatcaccattttacattcccaccag

SEQ ID NO: 48981 - DNA, 40 bp, Homo sapiens
ctggtgggaatgtaaaatggtgatgccattgtggaaaaca

SEQ ID NO: 48982 - DNA, 40 bp, Homo sapiens
gttttccacaatggcatcaccattttacattcccaccagc

SEQ ID NO: 48983 - DNA, 40 bp, Homo sapiens
gctggtgggaatgtaaaatggtgatgccattgtggaaaac

SEQ ID NO: 48984 - DNA, 40 bp, Homo sapiens
ttttccacaatggcatcaccattttacattcccaccagca

SEQ ID NO: 48985 - DNA, 40 bp, Homo sapiens
tgctggtgggaatgtaaaatggtgatgccattgtggaaaa

SEQ ID NO: 48986 - DNA, 40 bp, Homo sapiens
tttccacaatggcatcaccattttacattcccaccagcaa

SEQ ID NO: 48987 - DNA, 40 bp, Homo sapiens
ttgctggtgggaatgtaaaatggtgatgccattgtggaaa

SEQ ID NO: 48988 - DNA, 40 bp, Homo sapiens
ttccacaatggcatcaccattttacattcccaccagcaat

SEQ ID NO: 48989 - DNA, 40 bp, Homo sapiens
attgctggtgggaatgtaaaatggtgatgccattgtggaa

SEQ ID NO: 48990 - DNA, 40 bp, Homo sapiens
tccacaatggcatcaccattttacattcccaccagcaatg

SEQ ID NO: 48991 - DNA, 40 bp, Homo sapiens
cattgctggtgggaatgtaaaatggtgatgccattgtgga

SEQ ID NO: 48992 - DNA, 40 bp, Homo sapiens
ccacaatggcatcaccattttacattcccaccagcaatgc

SEQ ID NO: 48993 - DNA, 40 bp, Homo sapiens
gcattgctggtgggaatgtaaaatggtgatgccattgtgg

SEQ ID NO: 48994 - DNA, 40 bp, Homo sapiens
cacaatggcatcaccattttacattcccaccagcaatgca

SEQ ID NO: 48995 - DNA, 40 bp, Homo sapiens
tgcattgctggtgggaatgtaaaatggtgatgccattgtg

SEQ ID NO: 48996 - DNA, 40 bp, Homo sapiens
acaatggcatcaccattttacattcccaccagcaatgcac

SEQ ID NO: 48997 - DNA, 40 bp, Homo sapiens
gtgcattgctggtgggaatgtaaaatggtgatgccattgt

SEQ ID NO: 48998 - DNA, 40 bp, Homo sapiens
caatggcatcaccattttacattcccaccagcaatgcaca

SEQ ID NO: 48999 - DNA, 40 bp, Homo sapiens
tgtgcattgctggtgggaatgtaaaatggtgatgccattg

SEQ ID NO: 49000 - DNA, 40 bp, Homo sapiens
aatggcatcaccattttacattcccaccagcaatgcacaa

SEQ ID NO: 49001 - DNA, 40 bp, Homo sapiens
ttgtgcattgctggtgggaatgtaaaatggtgatgccatt

SEQ ID NO: 49002 - DNA, 40 bp, Homo sapiens
atggcatcaccattttacattcccaccagcaatgcacaaa

SEQ ID NO: 49003 - DNA, 40 bp, Homo sapiens
tttgtgcattgctggtgggaatgtaaaatggtgatgccat

SEQ ID NO: 49004 - DNA, 40 bp, Homo sapiens
tggcatcaccattttacattcccaccagcaatgcacaaag

SEQ ID NO: 49005 - DNA, 40 bp, Homo sapiens
ctttgtgcattgctggtgggaatgtaaaatggtgatgcca

SEQ ID NO: 49006 - DNA, 40 bp, Homo sapiens
ggcatcaccattttacattcccaccagcaatgcacaaaga

SEQ ID NO: 49007 - DNA, 40 bp, Homo sapiens
tctttgtgcattgctggtgggaatgtaaaatggtgatgcc

SEQ ID NO: 49008 - DNA, 40 bp, Homo sapiens
gcatcaccattttacattcccaccagcaatgcacaaagat

SEQ ID NO: 49009 - DNA, 40 bp, Homo sapiens
atctttgtgcattgctggtgggaatgtaaaatggtgatgc

SEQ ID NO: 49010 - DNA, 40 bp, Homo sapiens
catcaccattttacattcccaccagcaatgcacaaagatt

SEQ ID NO: 49011 - DNA, 40 bp, Homo sapiens
aatctttgtgcattgctggtgggaatgtaaaatggtgatg

SEQ ID NO: 49012 - DNA, 40 bp, Homo sapiens
atcaccattttacattcccaccagcaatgcacaaagattt

SEQ ID NO: 49013 - DNA, 40 bp, Homo sapiens
aaatctttgtgcattgctggtgggaatgtaaaatggtgat

SEQ ID NO: 49014 - DNA, 40 bp, Homo sapiens
tcaccattttacattcccaccagcaatgcacaaagatttc

SEQ ID NO: 49015 - DNA, 40 bp, Homo sapiens
gaaatctttgtgcattgctggtgggaatgtaaaatggtga

SEQ ID NO: 49016 - DNA, 40 bp, Homo sapiens
caccattttacattcccaccagcaatgcacaaagatttca

SEQ ID NO: 49017 - DNA, 40 bp, Homo sapiens
tgaaatctttgtgcattgctggtgggaatgtaaaatggtg

SEQ ID NO: 49018 - DNA, 40 bp, Homo sapiens
accattttacattcccaccagcaatgcacaaagatttcag

SEQ ID NO: 49019 - DNA, 40 bp, Homo sapiens
ctgaaatctttgtgcattgctggtgggaatgtaaaatggt

SEQ ID NO: 49020 - DNA, 40 bp, Homo sapiens
ccattttacattcccaccagcaatgcacaaagatttcagt

SEQ ID NO: 49021 - DNA, 40 bp, Homo sapiens
actgaaatctttgtgcattgctggtgggaatgtaaaatgg

SEQ ID NO: 49022 - DNA, 40 bp, Homo sapiens
cattttacattcccaccagcaatgcacaaagatttcagtg

SEQ ID NO: 49023 - DNA, 40 bp, Homo sapiens
cactgaaatctttgtgcattgctggtgggaatgtaaaatg

SEQ ID NO: 49024 - DNA, 40 bp, Homo sapiens
attttacattcccaccagcaatgcacaaagatttcagtgt

SEQ ID NO: 49025 - DNA, 40 bp, Homo sapiens
acactgaaatctttgtgcattgctggtgggaatgtaaaat

SEQ ID NO: 49026 - DNA, 40 bp, Homo sapiens
ttttacattcccaccagcaatgcacaaagatttcagtgtc

SEQ ID NO: 49027 - DNA, 40 bp, Homo sapiens
gacactgaaatctttgtgcattgctggtgggaatgtaaaa

SEQ ID NO: 49028 - DNA, 40 bp, Homo sapiens
tttacattcccaccagcaatgcacaaagatttcagtgtct

SEQ ID NO: 49029 - DNA, 40 bp, Homo sapiens
agacactgaaatctttgtgcattgctggtgggaatgtaaa

SEQ ID NO: 49030 - DNA, 40 bp, Homo sapiens
ttacattcccaccagcaatgcacaaagatttcagtgtctg

SEQ ID NO: 49031 - DNA, 40 bp, Homo sapiens
cagacactgaaatctttgtgcattgctggtgggaatgtaa

SEQ ID NO: 49032 - DNA, 40 bp, Homo sapiens
tacattcccaccagcaatgcacaaagatttcagtgtctgt

SEQ ID NO: 49033 - DNA, 40 bp, Homo sapiens
acagacactgaaatctttgtgcattgctggtgggaatgta

SEQ ID NO: 49034 - DNA, 40 bp, Homo sapiens
acattcccaccagcaatgcacaaagatttcagtgtctgta

SEQ ID NO: 49035 - DNA, 40 bp, Homo sapiens
tacagacactgaaatctttgtgcattgctggtgggaatgt

SEQ ID NO: 49036 - DNA, 40 bp, Homo sapiens
cattcccaccagcaatgcacaaagatttcagtgtctgtat

SEQ ID NO: 49037 - DNA, 40 bp, Homo sapiens
atacagacactgaaatctttgtgcattgctggtgggaatg

SEQ ID NO: 49038 - DNA, 40 bp, Homo sapiens
attcccaccagcaatgcacaaagatttcagtgtctgtatc

SEQ ID NO: 49039 - DNA, 40 bp, Homo sapiens
gatacagacactgaaatctttgtgcattgctggtgggaat

SEQ ID NO: 49040 - DNA, 40 bp, Homo sapiens
ttcccaccagcaatgcacaaagatttcagtgtctgtatcc

SEQ ID NO: 49041 - DNA, 40 bp, Homo sapiens
ggatacagacactgaaatctttgtgcattgctggtgggaa

SEQ ID NO: 49042 - DNA, 40 bp, Homo sapiens
tcccaccagcaatgcacaaagatttcagtgtctgtatcct

SEQ ID NO: 49043 - DNA, 40 bp, Homo sapiens
aggatacagacactgaaatctttgtgcattgctggtggga

SEQ ID NO: 49044 - DNA, 40 bp, Homo sapiens
cccaccagcaatgcacaaagatttcagtgtctgtatcctt

SEQ ID NO: 49045 - DNA, 40 bp, Homo sapiens
aaggatacagacactgaaatctttgtgcattgctggtggg

SEQ ID NO: 49046 - DNA, 40 bp, Homo sapiens
ccaccagcaatgcacaaagatttcagtgtctgtatccttg

SEQ ID NO: 49047 - DNA, 40 bp, Homo sapiens
caaggatacagacactgaaatctttgtgcattgctggtgg

SEQ ID NO: 49048 - DNA, 40 bp, Homo sapiens
caccagcaatgcacaaagatttcagtgtctgtatccttgc

SEQ ID NO: 49049 - DNA, 40 bp, Homo sapiens
gcaaggatacagacactgaaatctttgtgcattgctggtg

SEQ ID NO: 49050 - DNA, 40 bp, Homo sapiens
accagcaatgcacaaagatttcagtgtctgtatccttgct

SEQ ID NO: 49051 - DNA, 40 bp, Homo sapiens
agcaaggatacagacactgaaatctttgtgcattgctggt

SEQ ID NO: 49052 - DNA, 40 bp, Homo sapiens
ccagcaatgcacaaagatttcagtgtctgtatccttgcta

SEQ ID NO: 49053 - DNA, 40 bp, Homo sapiens
tagcaaggatacagacactgaaatctttgtgcattgctgg

SEQ ID NO: 49054 - DNA, 40 bp, Homo sapiens
cagcaatgcacaaagatttcagtgtctgtatccttgctaa

SEQ ID NO: 49055 - DNA, 40 bp, Homo sapiens
ttagcaaggatacagacactgaaatctttgtgcattgctg

SEQ ID NO: 49056 - DNA, 40 bp, Homo sapiens
agcaatgcacaaagatttcagtgtctgtatccttgctaac

SEQ ID NO: 49057 - DNA, 40 bp, Homo sapiens
gttagcaaggatacagacactgaaatctttgtgcattgct

SEQ ID NO: 49058 - DNA, 40 bp, Homo sapiens
gcaatgcacaaagatttcagtgtctgtatccttgctaaca

SEQ ID NO: 49059 - DNA, 40 bp, Homo sapiens
tgttagcaaggatacagacactgaaatctttgtgcattgc

SEQ ID NO: 49060 - DNA, 40 bp, Homo sapiens
caatgcacaaagatttcagtgtctgtatccttgctaacac

SEQ ID NO: 49061 - DNA, 40 bp, Homo sapiens
gtgttagcaaggatacagacactgaaatctttgtgcattg

SEQ ID NO: 49062 - DNA, 40 bp, Homo sapiens
aatgcacaaagatttcagtgtctgtatccttgctaacact

SEQ ID NO: 49063 - DNA, 40 bp, Homo sapiens
agtgttagcaaggatacagacactgaaatctttgtgcatt

SEQ ID NO: 49064 - DNA, 40 bp, Homo sapiens
atgcacaaagatttcagtgtctgtatccttgctaacactt

SEQ ID NO: 49065 - DNA, 40 bp, Homo sapiens
aagtgttagcaaggatacagacactgaaatctttgtgcat

SEQ ID NO: 49066 - DNA, 40 bp, Homo sapiens
tgcacaaagatttcagtgtctgtatccttgctaacactta

SEQ ID NO: 49067 - DNA, 40 bp, Homo sapiens
taagtgttagcaaggatacagacactgaaatctttgtgca

SEQ ID NO: 49068 - DNA, 40 bp, Homo sapiens
gcacaaagatttcagtgtctgtatccttgctaacacttat

SEQ ID NO: 49069 - DNA, 40 bp, Homo sapiens
ataagtgttagcaaggatacagacactgaaatctttgtgc

SEQ ID NO: 49070 - DNA, 40 bp, Homo sapiens
cacaaagatttcagtgtctgtatccttgctaacacttatt

SEQ ID NO: 49071 - DNA, 40 bp, Homo sapiens
aataagtgttagcaaggatacagacactgaaatctttgtg

SEQ ID NO: 49072 - DNA, 40 bp, Homo sapiens
acaaagatttcagtgtctgtatccttgctaacacttattt

SEQ ID NO: 49073 - DNA, 40 bp, Homo sapiens
aaataagtgttagcaaggatacagacactgaaatctttgt

SEQ ID NO: 49074 - DNA, 40 bp, Homo sapiens
caaagatttcagtgtctgtatccttgctaacacttatttt

SEQ ID NO: 49075 - DNA, 40 bp, Homo sapiens
aaaataagtgttagcaaggatacagacactgaaatctttg

SEQ ID NO: 49076 - DNA, 40 bp, Homo sapiens
aaagatttcagtgtctgtatccttgctaacacttattttc

SEQ ID NO: 49077 - DNA, 40 bp, Homo sapiens
gaaaataagtgttagcaaggatacagacactgaaatcttt

SEQ ID NO: 49078 - DNA, 40 bp, Homo sapiens
aagatttcagtgtctgtatccttgctaacacttattttcc

SEQ ID NO: 49079 - DNA, 40 bp, Homo sapiens
ggaaaataagtgttagcaaggatacagacactgaaatctt

SEQ ID NO: 49080 - DNA, 40 bp, Homo sapiens
agatttcagtgtctgtatccttgctaacacttattttcca

SEQ ID NO: 49081 - DNA, 40 bp, Homo sapiens
tggaaaataagtgttagcaaggatacagacactgaaatct

SEQ ID NO: 49082 - DNA, 40 bp, Homo sapiens
gatttcagtgtctgtatccttgctaacacttattttccat

SEQ ID NO: 49083 - DNA, 40 bp, Homo sapiens
atggaaaataagtgttagcaaggatacagacactgaaatc

SEQ ID NO: 49084 - DNA, 40 bp, Homo sapiens
atttcagtgtctgtatccttgctaacacttattttccatt

SEQ ID NO: 49085 - DNA, 40 bp, Homo sapiens
aatggaaaataagtgttagcaaggatacagacactgaaat

SEQ ID NO: 49086 - DNA, 40 bp, Homo sapiens
tttcagtgtctgtatccttgctaacacttattttccattt

SEQ ID NO: 49087 - DNA, 40 bp, Homo sapiens
aaatggaaaataagtgttagcaaggatacagacactgaaa

SEQ ID NO: 49088 - DNA, 40 bp, Homo sapiens
ttcagtgtctgtatccttgctaacacttattttccatttt

SEQ ID NO: 49089 - DNA, 40 bp, Homo sapiens
aaaatggaaaataagtgttagcaaggatacagacactgaa

SEQ ID NO: 49090 - DNA, 40 bp, Homo sapiens
tcagtgtctgtatccttgctaacacttattttccattttt

SEQ ID NO: 49091 - DNA, 40 bp, Homo sapiens
aaaaatggaaaataagtgttagcaaggatacagacactga

SEQ ID NO: 49092 - DNA, 40 bp, Homo sapiens
cagtgtctgtatccttgctaacacttattttccatttttt

SEQ ID NO: 49093 - DNA, 40 bp, Homo sapiens
aaaaaatggaaaataagtgttagcaaggatacagacactg

SEQ ID NO: 49094 - DNA, 40 bp, Homo sapiens
agtgtctgtatccttgctaacacttattttccattttttg

SEQ ID NO: 49095 - DNA, 40 bp, Homo sapiens
caaaaaatggaaaataagtgttagcaaggatacagacact

SEQ ID NO: 49096 - DNA, 40 bp, Homo sapiens
gtgtctgtatccttgctaacacttattttccattttttga

SEQ ID NO: 49097 - DNA, 40 bp, Homo sapiens
tcaaaaaatggaaaataagtgttagcaaggatacagacac

SEQ ID NO: 49098 - DNA, 40 bp, Homo sapiens
tgtctgtatccttgctaacacttattttccattttttgag

SEQ ID NO: 49099 - DNA, 40 bp, Homo sapiens
ctcaaaaaatggaaaataagtgttagcaaggatacagaca

SEQ ID NO: 49100 - DNA, 40 bp, Homo sapiens
gtctgtatccttgctaacacttattttccattttttgagt

SEQ ID NO: 49101 - DNA, 40 bp, Homo sapiens
actcaaaaaatggaaaataagtgttagcaaggatacagac

SEQ ID NO: 49102 - DNA, 40 bp, Homo sapiens
tctgtatccttgctaacacttattttccattttttgagtt

SEQ ID NO: 49103 - DNA, 40 bp, Homo sapiens
aactcaaaaaatggaaaataagtgttagcaaggatacaga

SEQ ID NO: 49104 - DNA, 40 bp, Homo sapiens
ctgtatccttgctaacacttattttccattttttgagttt

SEQ ID NO: 49105 - DNA, 40 bp, Homo sapiens
aaactcaaaaaatggaaaataagtgttagcaaggatacag

SEQ ID NO: 49106 - DNA, 40 bp, Homo sapiens
tgtatccttgctaacacttattttccattttttgagtttt

SEQ ID NO: 49107 - DNA, 40 bp, Homo sapiens
aaaactcaaaaaatggaaaataagtgttagcaaggataca

SEQ ID NO: 49108 - DNA, 40 bp, Homo sapiens
gtatccttgctaacacttattttccattttttgagttttt

SEQ ID NO: 49109 - DNA, 40 bp, Homo sapiens
aaaaactcaaaaaatggaaaataagtgttagcaaggatac

SEQ ID NO: 49110 - DNA, 40 bp, Homo sapiens
tatccttgctaacacttattttccattttttgagtttttt

SEQ ID NO: 49111 - DNA, 40 bp, Homo sapiens
aaaaaactcaaaaaatggaaaataagtgttagcaaggata

SEQ ID NO: 49112 - DNA, 40 bp, Homo sapiens
atccttgctaacacttattttccattttttgagttttttt

SEQ ID NO: 49113 - DNA, 40 bp, Homo sapiens
aaaaaaactcaaaaaatggaaaataagtgttagcaaggat

SEQ ID NO: 49114 - DNA, 40 bp, Homo sapiens
tccttgctaacacttattttccattttttgagtttttttg

SEQ ID NO: 49115 - DNA, 40 bp, Homo sapiens
caaaaaaactcaaaaaatggaaaataagtgttagcaagga

SEQ ID NO: 49116 - DNA, 40 bp, Homo sapiens
ccttgctaacacttattttccattttttgagtttttttgt

SEQ ID NO: 49117 - DNA, 40 bp, Homo sapiens
acaaaaaaactcaaaaaatggaaaataagtgttagcaagg

SEQ ID NO: 49118 - DNA, 40 bp, Homo sapiens
cttgctaacacttattttccattttttgagtttttttgtt

SEQ ID NO: 49119 - DNA, 40 bp, Homo sapiens
aacaaaaaaactcaaaaaatggaaaataagtgttagcaag

SEQ ID NO: 49120 - DNA, 40 bp, Homo sapiens
ttgctaacacttattttccattttttgagtttttttgttt

SEQ ID NO: 49121 - DNA, 40 bp, Homo sapiens
aaacaaaaaaactcaaaaaatggaaaataagtgttagcaa

SEQ ID NO: 49122 - DNA, 40 bp, Homo sapiens
tgctaacacttattttccattttttgagtttttttgtttt

SEQ ID NO: 49123 - DNA, 40 bp, Homo sapiens
aaaacaaaaaaactcaaaaaatggaaaataagtgttagca

SEQ ID NO: 49124 - DNA, 40 bp, Homo sapiens
gctaacacttattttccattttttgagtttttttgttttg

SEQ ID NO: 49125 - DNA, 40 bp, Homo sapiens
caaaacaaaaaaactcaaaaaatggaaaataagtgttagc

SEQ ID NO: 49126 - DNA, 40 bp, Homo sapiens
ctaacacttattttccattttttgagtttttttgttttgt

SEQ ID NO: 49127 - DNA, 40 bp, Homo sapiens
acaaaacaaaaaaactcaaaaaatggaaaataagtgttag

SEQ ID NO: 49128 - DNA, 40 bp, Homo sapiens
taacacttattttccattttttgagtttttttgttttgtt

SEQ ID NO: 49129 - DNA, 40 bp, Homo sapiens
aacaaaacaaaaaaactcaaaaaatggaaaataagtgtta

SEQ ID NO: 49130 - DNA, 40 bp, Homo sapiens
aacacttattttccattttttgagtttttttgttttgttt

SEQ ID NO: 49131 - DNA, 40 bp, Homo sapiens
aaacaaaacaaaaaaactcaaaaaatggaaaataagtgtt

SEQ ID NO: 49132 - DNA, 40 bp, Homo sapiens
acacttattttccattttttgagtttttttgttttgtttt

SEQ ID NO: 49133 - DNA, 40 bp, Homo sapiens
aaaacaaaacaaaaaaactcaaaaaatggaaaataagtgt

SEQ ID NO: 49134 - DNA, 40 bp, Homo sapiens
cacttattttccattttttgagtttttttgttttgttttt

SEQ ID NO: 49135 - DNA, 40 bp, Homo sapiens
aaaaacaaaacaaaaaaactcaaaaaatggaaaataagtg

SEQ ID NO: 49136 - DNA, 40 bp, Homo sapiens
acttattttccattttttgagtttttttgttttgtttttt

SEQ ID NO: 49137 - DNA, 40 bp, Homo sapiens
aaaaaacaaaacaaaaaaactcaaaaaatggaaaataagt

SEQ ID NO: 49138 - DNA, 40 bp, Homo sapiens
cttattttccattttttgagtttttttgttttgttttttt

SEQ ID NO: 49139 - DNA, 40 bp, Homo sapiens
aaaaaaacaaaacaaaaaaactcaaaaaatggaaaataag

SEQ ID NO: 49140 - DNA, 40 bp, Homo sapiens
ttattttccattttttgagtttttttgttttgttttttta

SEQ ID NO: 49141 - DNA, 40 bp, Homo sapiens
taaaaaaacaaaacaaaaaaactcaaaaaatggaaaataa

SEQ ID NO: 49142 - DNA, 40 bp, Homo sapiens
tattttccattttttgagtttttttgttttgtttttttaa

SEQ ID NO: 49143 - DNA, 40 bp, Homo sapiens
ttaaaaaaacaaaacaaaaaaactcaaaaaatggaaaata

SEQ ID NO: 49144 - DNA, 40 bp, Homo sapiens
attttccattttttgagtttttttgttttgtttttttaat

SEQ ID NO: 49145 - DNA, 40 bp, Homo sapiens
attaaaaaaacaaaacaaaaaaactcaaaaaatggaaaat

SEQ ID NO: 49146 - DNA, 40 bp, Homo sapiens
ttttccattttttgagtttttttgttttgtttttttaata

SEQ ID NO: 49147 - DNA, 40 bp, Homo sapiens
tattaaaaaaacaaaacaaaaaaactcaaaaaatggaaaa

SEQ ID NO: 49148 - DNA, 40 bp, Homo sapiens
tttccattttttgagtttttttgttttgtttttttaataa

SEQ ID NO: 49149 - DNA, 40 bp, Homo sapiens
ttattaaaaaaacaaaacaaaaaaactcaaaaaatggaaa

SEQ ID NO: 49150 - DNA, 40 bp, Homo sapiens
ttccattttttgagtttttttgttttgtttttttaataat

SEQ ID NO: 49151 - DNA, 40 bp, Homo sapiens
attattaaaaaaacaaaacaaaaaaactcaaaaaatggaa

SEQ ID NO: 49152 - DNA, 40 bp, Homo sapiens
tccattttttgagtttttttgttttgtttttttaataata

SEQ ID NO: 49153 - DNA, 40 bp, Homo sapiens
tattattaaaaaaacaaaacaaaaaaactcaaaaaatgga

SEQ ID NO: 49154 - DNA, 40 bp, Homo sapiens
ccattttttgagtttttttgttttgtttttttaataatag

SEQ ID NO: 49155 - DNA, 40 bp, Homo sapiens
ctattattaaaaaaacaaaacaaaaaaactcaaaaaatgg

SEQ ID NO: 49156 - DNA, 40 bp, Homo sapiens
cattttttgagtttttttgttttgtttttttaataatagc

SEQ ID NO: 49157 - DNA, 40 bp, Homo sapiens
gctattattaaaaaaacaaaacaaaaaaactcaaaaaatg

SEQ ID NO: 49158 - DNA, 40 bp, Homo sapiens
attttttgagtttttttgttttgtttttttaataatagcc

SEQ ID NO: 49159 - DNA, 40 bp, Homo sapiens
ggctattattaaaaaaacaaaacaaaaaaactcaaaaaat

SEQ ID NO: 49160 - DNA, 40 bp, Homo sapiens
ttttttgagtttttttgttttgtttttttaataatagcca

SEQ ID NO: 49161 - DNA, 40 bp, Homo sapiens
tggctattattaaaaaaacaaaacaaaaaaactcaaaaaa

SEQ ID NO: 49162 - DNA, 40 bp, Homo sapiens
tttttgagtttttttgttttgtttttttaataatagccaa

SEQ ID NO: 49163 - DNA, 40 bp, Homo sapiens
ttggctattattaaaaaaacaaaacaaaaaaactcaaaaa

SEQ ID NO: 49164 - DNA, 40 bp, Homo sapiens
ttttgagtttttttgttttgtttttttaataatagccaat

SEQ ID NO: 49165 - DNA, 40 bp, Homo sapiens
attggctattattaaaaaaacaaaacaaaaaaactcaaaa

SEQ ID NO: 49166 - DNA, 40 bp, Homo sapiens
tttgagtttttttgttttgtttttttaataatagccaatc

SEQ ID NO: 49167 - DNA, 40 bp, Homo sapiens
gattggctattattaaaaaaacaaaacaaaaaaactcaaa

SEQ ID NO: 49168 - DNA, 40 bp, Homo sapiens
ttgagtttttttgttttgtttttttaataatagccaatcc

SEQ ID NO: 49169 - DNA, 40 bp, Homo sapiens
ggattggctattattaaaaaaacaaaacaaaaaaactcaa

SEQ ID NO: 49170 - DNA, 40 bp, Homo sapiens
tgagtttttttgttttgtttttttaataatagccaatcct

SEQ ID NO: 49171 - DNA, 40 bp, Homo sapiens
aggattggctattattaaaaaaacaaaacaaaaaaactca

SEQ ID NO: 49172 - DNA, 40 bp, Homo sapiens
gagtttttttgttttgtttttttaataatagccaatccta

SEQ ID NO: 49173 - DNA, 40 bp, Homo sapiens
taggattggctattattaaaaaaacaaaacaaaaaaactc

SEQ ID NO: 49174 - DNA, 40 bp, Homo sapiens
agtttttttgttttgtttttttaataatagccaatcctaa

SEQ ID NO: 49175 - DNA, 40 bp, Homo sapiens
ttaggattggctattattaaaaaaacaaaacaaaaaaact

SEQ ID NO: 49176 - DNA, 40 bp, Homo sapiens
gtttttttgttttgtttttttaataatagccaatcctaat

SEQ ID NO: 49177 - DNA, 40 bp, Homo sapiens
attaggattggctattattaaaaaaacaaaacaaaaaaac

SEQ ID NO: 49178 - DNA, 40 bp, Homo sapiens
tttttttgttttgtttttttaataatagccaatcctaatg

SEQ ID NO: 49179 - DNA, 40 bp, Homo sapiens
cattaggattggctattattaaaaaaacaaaacaaaaaaa

SEQ ID NO: 49180 - DNA, 40 bp, Homo sapiens
ttttttgttttgtttttttaataatagccaatcctaatgg

SEQ ID NO: 49181 - DNA, 40 bp, Homo sapiens
ccattaggattggctattattaaaaaaacaaaacaaaaaa

SEQ ID NO: 49182 - DNA, 40 bp, Homo sapiens
tttttgttttgtttttttaataatagccaatcctaatggg

SEQ ID NO: 49183 - DNA, 40 bp, Homo sapiens
cccattaggattggctattattaaaaaaacaaaacaaaaa

SEQ ID NO: 49184 - DNA, 40 bp, Homo sapiens
ttttgttttgtttttttaataatagccaatcctaatgggt

SEQ ID NO: 49185 - DNA, 40 bp, Homo sapiens
acccattaggattggctattattaaaaaaacaaaacaaaa

SEQ ID NO: 49186 - DNA, 40 bp, Homo sapiens
tttgttttgtttttttaataatagccaatcctaatgggta

SEQ ID NO: 49187 - DNA, 40 bp, Homo sapiens
tacccattaggattggctattattaaaaaaacaaaacaaa

SEQ ID NO: 49188 - DNA, 40 bp, Homo sapiens
ttgttttgtttttttaataatagccaatcctaatgggtat

SEQ ID NO: 49189 - DNA, 40 bp, Homo sapiens
atacccattaggattggctattattaaaaaaacaaaacaa

SEQ ID NO: 49190 - DNA, 40 bp, Homo sapiens
tgttttgtttttttaataatagccaatcctaatgggtatg

SEQ ID NO: 49191 - DNA, 40 bp, Homo sapiens
catacccattaggattggctattattaaaaaaacaaaaca

SEQ ID NO: 49192 - DNA, 40 bp, Homo sapiens
gttttgtttttttaataatagccaatcctaatgggtatgt

SEQ ID NO: 49193 - DNA, 40 bp, Homo sapiens
acatacccattaggattggctattattaaaaaaacaaaac

SEQ ID NO: 49194 - DNA, 40 bp, Homo sapiens
ttttgtttttttaataatagccaatcctaatgggtatgtg

SEQ ID NO: 49195 - DNA, 40 bp, Homo sapiens
cacatacccattaggattggctattattaaaaaaacaaaa

SEQ ID NO: 49196 - DNA, 40 bp, Homo sapiens
tttgtttttttaataatagccaatcctaatgggtatgtgg

SEQ ID NO: 49197 - DNA, 40 bp, Homo sapiens
ccacatacccattaggattggctattattaaaaaaacaaa

SEQ ID NO: 49198 - DNA, 40 bp, Homo sapiens
ttgtttttttaataatagccaatcctaatgggtatgtggt

SEQ ID NO: 49199 - DNA, 40 bp, Homo sapiens
accacatacccattaggattggctattattaaaaaaacaa

SEQ ID NO: 49200 - DNA, 40 bp, Homo sapiens
tgtttttttaataatagccaatcctaatgggtatgtggta

SEQ ID NO: 49201 - DNA, 40 bp, Homo sapiens
taccacatacccattaggattggctattattaaaaaaaca

SEQ ID NO: 49202 - DNA, 40 bp, Homo sapiens
gtttttttaataatagccaatcctaatgggtatgtggtag

SEQ ID NO: 49203 - DNA, 40 bp, Homo sapiens
ctaccacatacccattaggattggctattattaaaaaaac

SEQ ID NO: 49204 - DNA, 40 bp, Homo sapiens
tttttttaataatagccaatcctaatgggtatgtggtagc

SEQ ID NO: 49205 - DNA, 40 bp, Homo sapiens
gctaccacatacccattaggattggctattattaaaaaaa

SEQ ID NO: 49206 - DNA, 40 bp, Homo sapiens
ttttttaataatagccaatcctaatgggtatgtggtagca

SEQ ID NO: 49207 - DNA, 40 bp, Homo sapiens
tgctaccacatacccattaggattggctattattaaaaaa

SEQ ID NO: 49208 - DNA, 40 bp, Homo sapiens
tttttaataatagccaatcctaatgggtatgtggtagcat

SEQ ID NO: 49209 - DNA, 40 bp, Homo sapiens
atgctaccacatacccattaggattggctattattaaaaa

SEQ ID NO: 49210 - DNA, 40 bp, Homo sapiens
ttttaataatagccaatcctaatgggtatgtggtagcatc

SEQ ID NO: 49211 - DNA, 40 bp, Homo sapiens
gatgctaccacatacccattaggattggctattattaaaa

SEQ ID NO: 49212 - DNA, 40 bp, Homo sapiens
tttaataatagccaatcctaatgggtatgtggtagcatct

SEQ ID NO: 49213 - DNA, 40 bp, Homo sapiens
agatgctaccacatacccattaggattggctattattaaa

SEQ ID NO: 49214 - DNA, 40 bp, Homo sapiens
ttaataatagccaatcctaatgggtatgtggtagcatctc

SEQ ID NO: 49215 - DNA, 40 bp, Homo sapiens
gagatgctaccacatacccattaggattggctattattaa

SEQ ID NO: 49216 - DNA, 40 bp, Homo sapiens
taataatagccaatcctaatgggtatgtggtagcatctca

SEQ ID NO: 49217 - DNA, 40 bp, Homo sapiens
tgagatgctaccacatacccattaggattggctattatta

SEQ ID NO: 49218 - DNA, 40 bp, Homo sapiens
aataatagccaatcctaatgggtatgtggtagcatctcat

SEQ ID NO: 49219 - DNA, 40 bp, Homo sapiens
atgagatgctaccacatacccattaggattggctattatt

SEQ ID NO: 49220 - DNA, 40 bp, Homo sapiens
ataatagccaatcctaatgggtatgtggtagcatctcatg

SEQ ID NO: 49221 - DNA, 40 bp, Homo sapiens
catgagatgctaccacatacccattaggattggctattat

SEQ ID NO: 49222 - DNA, 40 bp, Homo sapiens
taatagccaatcctaatgggtatgtggtagcatctcatgg

SEQ ID NO: 49223 - DNA, 40 bp, Homo sapiens
ccatgagatgctaccacatacccattaggattggctatta

SEQ ID NO: 49224 - DNA, 40 bp, Homo sapiens
aatagccaatcctaatgggtatgtggtagcatctcatggt

SEQ ID NO: 49225 - DNA, 40 bp, Homo sapiens
accatgagatgctaccacatacccattaggattggctatt

SEQ ID NO: 49226 - DNA, 40 bp, Homo sapiens
atagccaatcctaatgggtatgtggtagcatctcatggtt

SEQ ID NO: 49227 - DNA, 40 bp, Homo sapiens
aaccatgagatgctaccacatacccattaggattggctat

SEQ ID NO: 49228 - DNA, 40 bp, Homo sapiens
tagccaatcctaatgggtatgtggtagcatctcatggttt

SEQ ID NO: 49229 - DNA, 40 bp, Homo sapiens
aaaccatgagatgctaccacatacccattaggattggcta

SEQ ID NO: 49230 - DNA, 40 bp, Homo sapiens
agccaatcctaatgggtatgtggtagcatctcatggtttt

SEQ ID NO: 49231 - DNA, 40 bp, Homo sapiens
aaaaccatgagatgctaccacatacccattaggattggct

SEQ ID NO: 49232 - DNA, 40 bp, Homo sapiens
gccaatcctaatgggtatgtggtagcatctcatggttttg

SEQ ID NO: 49233 - DNA, 40 bp, Homo sapiens
caaaaccatgagatgctaccacatacccattaggattggc

SEQ ID NO: 49234 - DNA, 40 bp, Homo sapiens
ccaatcctaatgggtatgtggtagcatctcatggttttga

SEQ ID NO: 49235 - DNA, 40 bp, Homo sapiens
tcaaaaccatgagatgctaccacatacccattaggattgg

SEQ ID NO: 49236 - DNA, 40 bp, Homo sapiens
caatcctaatgggtatgtggtagcatctcatggttttgat

SEQ ID NO: 49237 - DNA, 40 bp, Homo sapiens
atcaaaaccatgagatgctaccacatacccattaggattg

SEQ ID NO: 49238 - DNA, 40 bp, Homo sapiens
aatcctaatgggtatgtggtagcatctcatggttttgatt

SEQ ID NO: 49239 - DNA, 40 bp, Homo sapiens
aatcaaaaccatgagatgctaccacatacccattaggatt

SEQ ID NO: 49240 - DNA, 40 bp, Homo sapiens
atcctaatgggtatgtggtagcatctcatggttttgattt

SEQ ID NO: 49241 - DNA, 40 bp, Homo sapiens
aaatcaaaaccatgagatgctaccacatacccattaggat

SEQ ID NO: 49242 - DNA, 40 bp, Homo sapiens
tcctaatgggtatgtggtagcatctcatggttttgatttt

SEQ ID NO: 49243 - DNA, 40 bp, Homo sapiens
aaaatcaaaaccatgagatgctaccacatacccattagga

SEQ ID NO: 49244 - DNA, 40 bp, Homo sapiens
cctaatgggtatgtggtagcatctcatggttttgatttta

SEQ ID NO: 49245 - DNA, 40 bp, Homo sapiens
taaaatcaaaaccatgagatgctaccacatacccattagg

SEQ ID NO: 49246 - DNA, 40 bp, Homo sapiens
ctaatgggtatgtggtagcatctcatggttttgattttat

SEQ ID NO: 49247 - DNA, 40 bp, Homo sapiens
ataaaatcaaaaccatgagatgctaccacatacccattag

SEQ ID NO: 49248 - DNA, 40 bp, Homo sapiens
taatgggtatgtggtagcatctcatggttttgattttatt

SEQ ID NO: 49249 - DNA, 40 bp, Homo sapiens
aataaaatcaaaaccatgagatgctaccacatacccatta

SEQ ID NO: 49250 - DNA, 40 bp, Homo sapiens
aatgggtatgtggtagcatctcatggttttgattttattt

SEQ ID NO: 49251 - DNA, 40 bp, Homo sapiens
aaataaaatcaaaaccatgagatgctaccacatacccatt

SEQ ID NO: 49252 - DNA, 40 bp, Homo sapiens
atgggtatgtggtagcatctcatggttttgattttatttt

SEQ ID NO: 49253 - DNA, 40 bp, Homo sapiens
aaaataaaatcaaaaccatgagatgctaccacatacccat

SEQ ID NO: 49254 - DNA, 40 bp, Homo sapiens
tgggtatgtggtagcatctcatggttttgattttattttc

SEQ ID NO: 49255 - DNA, 40 bp, Homo sapiens
gaaaataaaatcaaaaccatgagatgctaccacataccca

SEQ ID NO: 49256 - DNA, 40 bp, Homo sapiens
gggtatgtggtagcatctcatggttttgattttattttcc

SEQ ID NO: 49257 - DNA, 40 bp, Homo sapiens
ggaaaataaaatcaaaaccatgagatgctaccacataccc

SEQ ID NO: 49258 - DNA, 40 bp, Homo sapiens
ggtatgtggtagcatctcatggttttgattttattttcct

SEQ ID NO: 49259 - DNA, 40 bp, Homo sapiens
aggaaaataaaatcaaaaccatgagatgctaccacatacc

SEQ ID NO: 49260 - DNA, 40 bp, Homo sapiens
gtatgtggtagcatctcatggttttgattttattttcctg

SEQ ID NO: 49261 - DNA, 40 bp, Homo sapiens
caggaaaataaaatcaaaaccatgagatgctaccacatac

SEQ ID NO: 49262 - DNA, 40 bp, Homo sapiens
tatgtggtagcatctcatggttttgattttattttcctga

SEQ ID NO: 49263 - DNA, 40 bp, Homo sapiens
tcaggaaaataaaatcaaaaccatgagatgctaccacata

SEQ ID NO: 49264 - DNA, 40 bp, Homo sapiens
atgtggtagcatctcatggttttgattttattttcctgac

SEQ ID NO: 49265 - DNA, 40 bp, Homo sapiens
gtcaggaaaataaaatcaaaaccatgagatgctaccacat

SEQ ID NO: 49266 - DNA, 40 bp, Homo sapiens
tgtggtagcatctcatggttttgattttattttcctgact

SEQ ID NO: 49267 - DNA, 40 bp, Homo sapiens
agtcaggaaaataaaatcaaaaccatgagatgctaccaca

SEQ ID NO: 49268 - DNA, 40 bp, Homo sapiens
gtggtagcatctcatggttttgattttattttcctgacta

SEQ ID NO: 49269 - DNA, 40 bp, Homo sapiens
tagtcaggaaaataaaatcaaaaccatgagatgctaccac

SEQ ID NO: 49270 - DNA, 40 bp, Homo sapiens
tggtagcatctcatggttttgattttattttcctgactat

SEQ ID NO: 49271 - DNA, 40 bp, Homo sapiens
atagtcaggaaaataaaatcaaaaccatgagatgctacca

SEQ ID NO: 49272 - DNA, 40 bp, Homo sapiens
ggtagcatctcatggttttgattttattttcctgactatt

SEQ ID NO: 49273 - DNA, 40 bp, Homo sapiens
aatagtcaggaaaataaaatcaaaaccatgagatgctacc

SEQ ID NO: 49274 - DNA, 40 bp, Homo sapiens
gtagcatctcatggttttgattttattttcctgactattg

SEQ ID NO: 49275 - DNA, 40 bp, Homo sapiens
caatagtcaggaaaataaaatcaaaaccatgagatgctac

SEQ ID NO: 49276 - DNA, 40 bp, Homo sapiens
tagcatctcatggttttgattttattttcctgactattga

SEQ ID NO: 49277 - DNA, 40 bp, Homo sapiens
tcaatagtcaggaaaataaaatcaaaaccatgagatgcta

SEQ ID NO: 49278 - DNA, 40 bp, Homo sapiens
agcatctcatggttttgattttattttcctgactattgat

SEQ ID NO: 49279 - DNA, 40 bp, Homo sapiens
atcaatagtcaggaaaataaaatcaaaaccatgagatgct

SEQ ID NO: 49280 - DNA, 40 bp, Homo sapiens
gcatctcatggttttgattttattttcctgactattgatg

SEQ ID NO: 49281 - DNA, 40 bp, Homo sapiens
catcaatagtcaggaaaataaaatcaaaaccatgagatgc

SEQ ID NO: 49282 - DNA, 40 bp, Homo sapiens
catctcatggttttgattttattttcctgactattgatga

SEQ ID NO: 49283 - DNA, 40 bp, Homo sapiens
tcatcaatagtcaggaaaataaaatcaaaaccatgagatg

SEQ ID NO: 49284 - DNA, 40 bp, Homo sapiens
atctcatggttttgattttattttcctgactattgatgat

SEQ ID NO: 49285 - DNA, 40 bp, Homo sapiens
atcatcaatagtcaggaaaataaaatcaaaaccatgagat

SEQ ID NO: 49286 - DNA, 40 bp, Homo sapiens
tctcatggttttgattttattttcctgactattgatgatg

SEQ ID NO: 49287 - DNA, 40 bp, Homo sapiens
catcatcaatagtcaggaaaataaaatcaaaaccatgaga

SEQ ID NO: 49288 - DNA, 40 bp, Homo sapiens
ctcatggttttgattttattttcctgactattgatgatgt

SEQ ID NO: 49289 - DNA, 40 bp, Homo sapiens
acatcatcaatagtcaggaaaataaaatcaaaaccatgag

SEQ ID NO: 49290 - DNA, 40 bp, Homo sapiens
tcatggttttgattttattttcctgactattgatgatgtt

SEQ ID NO: 49291 - DNA, 40 bp, Homo sapiens
aacatcatcaatagtcaggaaaataaaatcaaaaccatga

SEQ ID NO: 49292 - DNA, 40 bp, Homo sapiens
catggttttgattttattttcctgactattgatgatgttg

SEQ ID NO: 49293 - DNA, 40 bp, Homo sapiens
caacatcatcaatagtcaggaaaataaaatcaaaaccatg

SEQ ID NO: 49294 - DNA, 40 bp, Homo sapiens
atggttttgattttattttcctgactattgatgatgttga

SEQ ID NO: 49295 - DNA, 40 bp, Homo sapiens
tcaacatcatcaatagtcaggaaaataaaatcaaaaccat

SEQ ID NO: 49296 - DNA, 40 bp, Homo sapiens
tggttttgattttattttcctgactattgatgatgttgag

SEQ ID NO: 49297 - DNA, 40 bp, Homo sapiens
ctcaacatcatcaatagtcaggaaaataaaatcaaaacca

SEQ ID NO: 49298 - DNA, 40 bp, Homo sapiens
ggttttgattttattttcctgactattgatgatgttgagc

SEQ ID NO: 49299 - DNA, 40 bp, Homo sapiens
gctcaacatcatcaatagtcaggaaaataaaatcaaaacc

SEQ ID NO: 49300 - DNA, 40 bp, Homo sapiens
gttttgattttattttcctgactattgatgatgttgagca

SEQ ID NO: 49301 - DNA, 40 bp, Homo sapiens
tgctcaacatcatcaatagtcaggaaaataaaatcaaaac

SEQ ID NO: 49302 - DNA, 40 bp, Homo sapiens
ttttgattttattttcctgactattgatgatgttgagcat

SEQ ID NO: 49303 - DNA, 40 bp, Homo sapiens
atgctcaacatcatcaatagtcaggaaaataaaatcaaaa

SEQ ID NO: 49304 - DNA, 40 bp, Homo sapiens
tttgattttattttcctgactattgatgatgttgagcatc

SEQ ID NO: 49305 - DNA, 40 bp, Homo sapiens
gatgctcaacatcatcaatagtcaggaaaataaaatcaaa

SEQ ID NO: 49306 - DNA, 40 bp, Homo sapiens
ttgattttattttcctgactattgatgatgttgagcatct

SEQ ID NO: 49307 - DNA, 40 bp, Homo sapiens
agatgctcaacatcatcaatagtcaggaaaataaaatcaa

SEQ ID NO: 49308 - DNA, 40 bp, Homo sapiens
tgattttattttcctgactattgatgatgttgagcatctt

SEQ ID NO: 49309 - DNA, 40 bp, Homo sapiens
aagatgctcaacatcatcaatagtcaggaaaataaaatca

SEQ ID NO: 49310 - DNA, 40 bp, Homo sapiens
gattttattttcctgactattgatgatgttgagcatcttt

SEQ ID NO: 49311 - DNA, 40 bp, Homo sapiens
aaagatgctcaacatcatcaatagtcaggaaaataaaatc

SEQ ID NO: 49312 - DNA, 40 bp, Homo sapiens
attttattttcctgactattgatgatgttgagcatctttt

SEQ ID NO: 49313 - DNA, 40 bp, Homo sapiens
aaaagatgctcaacatcatcaatagtcaggaaaataaaat

SEQ ID NO: 49314 - DNA, 40 bp, Homo sapiens
ttttattttcctgactattgatgatgttgagcatcttttc

SEQ ID NO: 49315 - DNA, 40 bp, Homo sapiens
gaaaagatgctcaacatcatcaatagtcaggaaaataaaa

SEQ ID NO: 49316 - DNA, 40 bp, Homo sapiens
tttattttcctgactattgatgatgttgagcatcttttca

SEQ ID NO: 49317 - DNA, 40 bp, Homo sapiens
tgaaaagatgctcaacatcatcaatagtcaggaaaataaa

SEQ ID NO: 49318 - DNA, 40 bp, Homo sapiens
ttattttcctgactattgatgatgttgagcatcttttcag

SEQ ID NO: 49319 - DNA, 40 bp, Homo sapiens
ctgaaaagatgctcaacatcatcaatagtcaggaaaataa

SEQ ID NO: 49320 - DNA, 40 bp, Homo sapiens
tattttcctgactattgatgatgttgagcatcttttcagg

SEQ ID NO: 49321 - DNA, 40 bp, Homo sapiens
cctgaaaagatgctcaacatcatcaatagtcaggaaaata

SEQ ID NO: 49322 - DNA, 40 bp, Homo sapiens
attttcctgactattgatgatgttgagcatcttttcaggt

SEQ ID NO: 49323 - DNA, 40 bp, Homo sapiens
acctgaaaagatgctcaacatcatcaatagtcaggaaaat

SEQ ID NO: 49324 - DNA, 40 bp, Homo sapiens
ttttcctgactattgatgatgttgagcatcttttcaggtg

SEQ ID NO: 49325 - DNA, 40 bp, Homo sapiens
cacctgaaaagatgctcaacatcatcaatagtcaggaaaa

SEQ ID NO: 49326 - DNA, 40 bp, Homo sapiens
tttcctgactattgatgatgttgagcatcttttcaggtgc

SEQ ID NO: 49327 - DNA, 40 bp, Homo sapiens
gcacctgaaaagatgctcaacatcatcaatagtcaggaaa

SEQ ID NO: 49328 - DNA, 40 bp, Homo sapiens
ttcctgactattgatgatgttgagcatcttttcaggtgct

SEQ ID NO: 49329 - DNA, 40 bp, Homo sapiens
agcacctgaaaagatgctcaacatcatcaatagtcaggaa

SEQ ID NO: 49330 - DNA, 40 bp, Homo sapiens
tcctgactattgatgatgttgagcatcttttcaggtgctt

SEQ ID NO: 49331 - DNA, 40 bp, Homo sapiens
aagcacctgaaaagatgctcaacatcatcaatagtcagga

SEQ ID NO: 49332 - DNA, 40 bp, Homo sapiens
cctgactattgatgatgttgagcatcttttcaggtgctta

SEQ ID NO: 49333 - DNA, 40 bp, Homo sapiens
taagcacctgaaaagatgctcaacatcatcaatagtcagg

SEQ ID NO: 49334 - DNA, 40 bp, Homo sapiens
ctgactattgatgatgttgagcatcttttcaggtgcttag

SEQ ID NO: 49335 - DNA, 40 bp, Homo sapiens
ctaagcacctgaaaagatgctcaacatcatcaatagtcag

SEQ ID NO: 49336 - DNA, 40 bp, Homo sapiens
tgactattgatgatgttgagcatcttttcaggtgcttagt

SEQ ID NO: 49337 - DNA, 40 bp, Homo sapiens
actaagcacctgaaaagatgctcaacatcatcaatagtca

SEQ ID NO: 49338 - DNA, 40 bp, Homo sapiens
gactattgatgatgttgagcatcttttcaggtgcttagtg

SEQ ID NO: 49339 - DNA, 40 bp, Homo sapiens
cactaagcacctgaaaagatgctcaacatcatcaatagtc

SEQ ID NO: 49340 - DNA, 40 bp, Homo sapiens
actattgatgatgttgagcatcttttcaggtgcttagtgg

SEQ ID NO: 49341 - DNA, 40 bp, Homo sapiens
ccactaagcacctgaaaagatgctcaacatcatcaatagt

SEQ ID NO: 49342 - DNA, 40 bp, Homo sapiens
ctattgatgatgttgagcatcttttcaggtgcttagtggc

SEQ ID NO: 49343 - DNA, 40 bp, Homo sapiens
gccactaagcacctgaaaagatgctcaacatcatcaatag

SEQ ID NO: 49344 - DNA, 40 bp, Homo sapiens
tattgatgatgttgagcatcttttcaggtgcttagtggcc

SEQ ID NO: 49345 - DNA, 40 bp, Homo sapiens
ggccactaagcacctgaaaagatgctcaacatcatcaata

SEQ ID NO: 49346 - DNA, 40 bp, Homo sapiens
attgatgatgttgagcatcttttcaggtgcttagtggcca

SEQ ID NO: 49347 - DNA, 40 bp, Homo sapiens
tggccactaagcacctgaaaagatgctcaacatcatcaat

SEQ ID NO: 49348 - DNA, 40 bp, Homo sapiens
ttgatgatgttgagcatcttttcaggtgcttagtggccat

SEQ ID NO: 49349 - DNA, 40 bp, Homo sapiens
atggccactaagcacctgaaaagatgctcaacatcatcaa

SEQ ID NO: 49350 - DNA, 40 bp, Homo sapiens
tgatgatgttgagcatcttttcaggtgcttagtggccatt

SEQ ID NO: 49351 - DNA, 40 bp, Homo sapiens
aatggccactaagcacctgaaaagatgctcaacatcatca

SEQ ID NO: 49352 - DNA, 40 bp, Homo sapiens
gatgatgttgagcatcttttcaggtgcttagtggccattt

SEQ ID NO: 49353 - DNA, 40 bp, Homo sapiens
aaatggccactaagcacctgaaaagatgctcaacatcatc

SEQ ID NO: 49354 - DNA, 40 bp, Homo sapiens
atgatgttgagcatcttttcaggtgcttagtggccatttg

SEQ ID NO: 49355 - DNA, 40 bp, Homo sapiens
caaatggccactaagcacctgaaaagatgctcaacatcat

SEQ ID NO: 49356 - DNA, 40 bp, Homo sapiens
tgatgttgagcatcttttcaggtgcttagtggccatttgt

SEQ ID NO: 49357 - DNA, 40 bp, Homo sapiens
acaaatggccactaagcacctgaaaagatgctcaacatca

SEQ ID NO: 49358 - DNA, 40 bp, Homo sapiens
gatgttgagcatcttttcaggtgcttagtggccatttgtc

SEQ ID NO: 49359 - DNA, 40 bp, Homo sapiens
gacaaatggccactaagcacctgaaaagatgctcaacatc

SEQ ID NO: 49360 - DNA, 40 bp, Homo sapiens
atgttgagcatcttttcaggtgcttagtggccatttgtcc

SEQ ID NO: 49361 - DNA, 40 bp, Homo sapiens
ggacaaatggccactaagcacctgaaaagatgctcaacat

SEQ ID NO: 49362 - DNA, 40 bp, Homo sapiens
tgttgagcatcttttcaggtgcttagtggccatttgtccg

SEQ ID NO: 49363 - DNA, 40 bp, Homo sapiens
cggacaaatggccactaagcacctgaaaagatgctcaaca

SEQ ID NO: 49364 - DNA, 40 bp, Homo sapiens
gttgagcatcttttcaggtgcttagtggccatttgtccgt

SEQ ID NO: 49365 - DNA, 40 bp, Homo sapiens
acggacaaatggccactaagcacctgaaaagatgctcaac

SEQ ID NO: 49366 - DNA, 40 bp, Homo sapiens
ttgagcatcttttcaggtgcttagtggccatttgtccgtc

SEQ ID NO: 49367 - DNA, 40 bp, Homo sapiens
gacggacaaatggccactaagcacctgaaaagatgctcaa

SEQ ID NO: 49368 - DNA, 40 bp, Homo sapiens
tgagcatcttttcaggtgcttagtggccatttgtccgtca

SEQ ID NO: 49369 - DNA, 40 bp, Homo sapiens
tgacggacaaatggccactaagcacctgaaaagatgctca

SEQ ID NO: 49370 - DNA, 40 bp, Homo sapiens
gagcatcttttcaggtgcttagtggccatttgtccgtcat

SEQ ID NO: 49371 - DNA, 40 bp, Homo sapiens
atgacggacaaatggccactaagcacctgaaaagatgctc

SEQ ID NO: 49372 - DNA, 40 bp, Homo sapiens
agcatcttttcaggtgcttagtggccatttgtccgtcatc

SEQ ID NO: 49373 - DNA, 40 bp, Homo sapiens
gatgacggacaaatggccactaagcacctgaaaagatgct

SEQ ID NO: 49374 - DNA, 40 bp, Homo sapiens
gcatcttttcaggtgcttagtggccatttgtccgtcatct

SEQ ID NO: 49375 - DNA, 40 bp, Homo sapiens
agatgacggacaaatggccactaagcacctgaaaagatgc

SEQ ID NO: 49376 - DNA, 40 bp, Homo sapiens
catcttttcaggtgcttagtggccatttgtccgtcatctt

SEQ ID NO: 49377 - DNA, 40 bp, Homo sapiens
aagatgacggacaaatggccactaagcacctgaaaagatg

SEQ ID NO: 49378 - DNA, 40 bp, Homo sapiens
atcttttcaggtgcttagtggccatttgtccgtcatcttt

SEQ ID NO: 49379 - DNA, 40 bp, Homo sapiens
aaagatgacggacaaatggccactaagcacctgaaaagat

SEQ ID NO: 49380 - DNA, 40 bp, Homo sapiens
tcttttcaggtgcttagtggccatttgtccgtcatctttg

SEQ ID NO: 49381 - DNA, 40 bp, Homo sapiens
caaagatgacggacaaatggccactaagcacctgaaaaga

SEQ ID NO: 49382 - DNA, 40 bp, Homo sapiens
cttttcaggtgcttagtggccatttgtccgtcatctttgg

SEQ ID NO: 49383 - DNA, 40 bp, Homo sapiens
ccaaagatgacggacaaatggccactaagcacctgaaaag

SEQ ID NO: 49384 - DNA, 40 bp, Homo sapiens
ttttcaggtgcttagtggccatttgtccgtcatctttgga

SEQ ID NO: 49385 - DNA, 40 bp, Homo sapiens
tccaaagatgacggacaaatggccactaagcacctgaaaa

SEQ ID NO: 49386 - DNA, 40 bp, Homo sapiens
tttcaggtgcttagtggccatttgtccgtcatctttggag

SEQ ID NO: 49387 - DNA, 40 bp, Homo sapiens
ctccaaagatgacggacaaatggccactaagcacctgaaa

SEQ ID NO: 49388 - DNA, 40 bp, Homo sapiens
ttcaggtgcttagtggccatttgtccgtcatctttggagc

SEQ ID NO: 49389 - DNA, 40 bp, Homo sapiens
gctccaaagatgacggacaaatggccactaagcacctgaa

SEQ ID NO: 49390 - DNA, 40 bp, Homo sapiens
tcaggtgcttagtggccatttgtccgtcatctttggagca

SEQ ID NO: 49391 - DNA, 40 bp, Homo sapiens
tgctccaaagatgacggacaaatggccactaagcacctga

SEQ ID NO: 49392 - DNA, 40 bp, Homo sapiens
caggtgcttagtggccatttgtccgtcatctttggagcag

SEQ ID NO: 49393 - DNA, 40 bp, Homo sapiens
ctgctccaaagatgacggacaaatggccactaagcacctg

SEQ ID NO: 49394 - DNA, 40 bp, Homo sapiens
aggtgcttagtggccatttgtccgtcatctttggagcagg

SEQ ID NO: 49395 - DNA, 40 bp, Homo sapiens
cctgctccaaagatgacggacaaatggccactaagcacct

SEQ ID NO: 49396 - DNA, 40 bp, Homo sapiens
ggtgcttagtggccatttgtccgtcatctttggagcagga

SEQ ID NO: 49397 - DNA, 40 bp, Homo sapiens
tcctgctccaaagatgacggacaaatggccactaagcacc

SEQ ID NO: 49398 - DNA, 40 bp, Homo sapiens
gtgcttagtggccatttgtccgtcatctttggagcaggaa

SEQ ID NO: 49399 - DNA, 40 bp, Homo sapiens
ttcctgctccaaagatgacggacaaatggccactaagcac

SEQ ID NO: 49400 - DNA, 40 bp, Homo sapiens
tgcttagtggccatttgtccgtcatctttggagcaggaac

SEQ ID NO: 49401 - DNA, 40 bp, Homo sapiens
gttcctgctccaaagatgacggacaaatggccactaagca

SEQ ID NO: 49402 - DNA, 40 bp, Homo sapiens
gcttagtggccatttgtccgtcatctttggagcaggaaca

SEQ ID NO: 49403 - DNA, 40 bp, Homo sapiens
tgttcctgctccaaagatgacggacaaatggccactaagc

SEQ ID NO: 49404 - DNA, 40 bp, Homo sapiens
cttagtggccatttgtccgtcatctttggagcaggaacaa

SEQ ID NO: 49405 - DNA, 40 bp, Homo sapiens
ttgttcctgctccaaagatgacggacaaatggccactaag

SEQ ID NO: 49406 - DNA, 40 bp, Homo sapiens
ttagtggccatttgtccgtcatctttggagcaggaacaat

SEQ ID NO: 49407 - DNA, 40 bp, Homo sapiens
attgttcctgctccaaagatgacggacaaatggccactaa

SEQ ID NO: 49408 - DNA, 40 bp, Homo sapiens
tagtggccatttgtccgtcatctttggagcaggaacaatg

SEQ ID NO: 49409 - DNA, 40 bp, Homo sapiens
cattgttcctgctccaaagatgacggacaaatggccacta

SEQ ID NO: 49410 - DNA, 40 bp, Homo sapiens
agtggccatttgtccgtcatctttggagcaggaacaatgt

SEQ ID NO: 49411 - DNA, 40 bp, Homo sapiens
acattgttcctgctccaaagatgacggacaaatggccact

SEQ ID NO: 49412 - DNA, 40 bp, Homo sapiens
gtggccatttgtccgtcatctttggagcaggaacaatgtc

SEQ ID NO: 49413 - DNA, 40 bp, Homo sapiens
gacattgttcctgctccaaagatgacggacaaatggccac

SEQ ID NO: 49414 - DNA, 40 bp, Homo sapiens
tggccatttgtccgtcatctttggagcaggaacaatgtct

SEQ ID NO: 49415 - DNA, 40 bp, Homo sapiens
agacattgttcctgctccaaagatgacggacaaatggcca

SEQ ID NO: 49416 - DNA, 40 bp, Homo sapiens
ggccatttgtccgtcatctttggagcaggaacaatgtctt

SEQ ID NO: 49417 - DNA, 40 bp, Homo sapiens
aagacattgttcctgctccaaagatgacggacaaatggcc

SEQ ID NO: 49418 - DNA, 40 bp, Homo sapiens
gccatttgtccgtcatctttggagcaggaacaatgtcttt

SEQ ID NO: 49419 - DNA, 40 bp, Homo sapiens
aaagacattgttcctgctccaaagatgacggacaaatggc

SEQ ID NO: 49420 - DNA, 40 bp, Homo sapiens
ccatttgtccgtcatctttggagcaggaacaatgtctttt

SEQ ID NO: 49421 - DNA, 40 bp, Homo sapiens
aaaagacattgttcctgctccaaagatgacggacaaatgg

SEQ ID NO: 49422 - DNA, 40 bp, Homo sapiens
catttgtccgtcatctttggagcaggaacaatgtcttttc

SEQ ID NO: 49423 - DNA, 40 bp, Homo sapiens
gaaaagacattgttcctgctccaaagatgacggacaaatg

SEQ ID NO: 49424 - DNA, 40 bp, Homo sapiens
atttgtccgtcatctttggagcaggaacaatgtcttttca

SEQ ID NO: 49425 - DNA, 40 bp, Homo sapiens
tgaaaagacattgttcctgctccaaagatgacggacaaat

SEQ ID NO: 49426 - DNA, 40 bp, Homo sapiens
tttgtccgtcatctttggagcaggaacaatgtcttttcaa

SEQ ID NO: 49427 - DNA, 40 bp, Homo sapiens
ttgaaaagacattgttcctgctccaaagatgacggacaaa

SEQ ID NO: 49428 - DNA, 40 bp, Homo sapiens
ttgtccgtcatctttggagcaggaacaatgtcttttcaag

SEQ ID NO: 49429 - DNA, 40 bp, Homo sapiens
cttgaaaagacattgttcctgctccaaagatgacggacaa

SEQ ID NO: 49430 - DNA, 40 bp, Homo sapiens
tgtccgtcatctttggagcaggaacaatgtcttttcaagt

SEQ ID NO: 49431 - DNA, 40 bp, Homo sapiens
acttgaaaagacattgttcctgctccaaagatgacggaca

SEQ ID NO: 49432 - DNA, 40 bp, Homo sapiens
gtccgtcatctttggagcaggaacaatgtcttttcaagtc

SEQ ID NO: 49433 - DNA, 40 bp, Homo sapiens
gacttgaaaagacattgttcctgctccaaagatgacggac

SEQ ID NO: 49434 - DNA, 40 bp, Homo sapiens
tccgtcatctttggagcaggaacaatgtcttttcaagtcc

SEQ ID NO: 49435 - DNA, 40 bp, Homo sapiens
ggacttgaaaagacattgttcctgctccaaagatgacgga

SEQ ID NO: 49436 - DNA, 40 bp, Homo sapiens
ccgtcatctttggagcaggaacaatgtcttttcaagtcct

SEQ ID NO: 49437 - DNA, 40 bp, Homo sapiens
aggacttgaaaagacattgttcctgctccaaagatgacgg

SEQ ID NO: 49438 - DNA, 40 bp, Homo sapiens
cgtcatctttggagcaggaacaatgtcttttcaagtcctt

SEQ ID NO: 49439 - DNA, 40 bp, Homo sapiens
aaggacttgaaaagacattgttcctgctccaaagatgacg

SEQ ID NO: 49440 - DNA, 40 bp, Homo sapiens
gtcatctttggagcaggaacaatgtcttttcaagtccttt

SEQ ID NO: 49441 - DNA, 40 bp, Homo sapiens
aaaggacttgaaaagacattgttcctgctccaaagatgac

SEQ ID NO: 49442 - DNA, 40 bp, Homo sapiens
tcatctttggagcaggaacaatgtcttttcaagtcctttg

SEQ ID NO: 49443 - DNA, 40 bp, Homo sapiens
caaaggacttgaaaagacattgttcctgctccaaagatga

SEQ ID NO: 49444 - DNA, 40 bp, Homo sapiens
catctttggagcaggaacaatgtcttttcaagtcctttgc

SEQ ID NO: 49445 - DNA, 40 bp, Homo sapiens
gcaaaggacttgaaaagacattgttcctgctccaaagatg

SEQ ID NO: 49446 - DNA, 40 bp, Homo sapiens
atctttggagcaggaacaatgtcttttcaagtcctttgcc

SEQ ID NO: 49447 - DNA, 40 bp, Homo sapiens
ggcaaaggacttgaaaagacattgttcctgctccaaagat

SEQ ID NO: 49448 - DNA, 40 bp, Homo sapiens
tctttggagcaggaacaatgtcttttcaagtcctttgccc

SEQ ID NO: 49449 - DNA, 40 bp, Homo sapiens
gggcaaaggacttgaaaagacattgttcctgctccaaaga

SEQ ID NO: 49450 - DNA, 40 bp, Homo sapiens
ctttggagcaggaacaatgtcttttcaagtcctttgccca

SEQ ID NO: 49451 - DNA, 40 bp, Homo sapiens
tgggcaaaggacttgaaaagacattgttcctgctccaaag

SEQ ID NO: 49452 - DNA, 40 bp, Homo sapiens
tttggagcaggaacaatgtcttttcaagtcctttgcccat

SEQ ID NO: 49453 - DNA, 40 bp, Homo sapiens
atgggcaaaggacttgaaaagacattgttcctgctccaaa

SEQ ID NO: 49454 - DNA, 40 bp, Homo sapiens
ttggagcaggaacaatgtcttttcaagtcctttgcccatt

SEQ ID NO: 49455 - DNA, 40 bp, Homo sapiens
aatgggcaaaggacttgaaaagacattgttcctgctccaa

SEQ ID NO: 49456 - DNA, 40 bp, Homo sapiens
tggagcaggaacaatgtcttttcaagtcctttgcccattt

SEQ ID NO: 49457 - DNA, 40 bp, Homo sapiens
aaatgggcaaaggacttgaaaagacattgttcctgctcca

SEQ ID NO: 49458 - DNA, 40 bp, Homo sapiens
ggagcaggaacaatgtcttttcaagtcctttgcccatttt

SEQ ID NO: 49459 - DNA, 40 bp, Homo sapiens
aaaatgggcaaaggacttgaaaagacattgttcctgctcc

SEQ ID NO: 49460 - DNA, 40 bp, Homo sapiens
gagcaggaacaatgtcttttcaagtcctttgcccattttt

SEQ ID NO: 49461 - DNA, 40 bp, Homo sapiens
aaaaatgggcaaaggacttgaaaagacattgttcctgctc

SEQ ID NO: 49462 - DNA, 40 bp, Homo sapiens
agcaggaacaatgtcttttcaagtcctttgcccattttta

SEQ ID NO: 49463 - DNA, 40 bp, Homo sapiens
taaaaatgggcaaaggacttgaaaagacattgttcctgct

SEQ ID NO: 49464 - DNA, 40 bp, Homo sapiens
gcaggaacaatgtcttttcaagtcctttgcccatttttaa

SEQ ID NO: 49465 - DNA, 40 bp, Homo sapiens
ttaaaaatgggcaaaggacttgaaaagacattgttcctgc

SEQ ID NO: 49466 - DNA, 40 bp, Homo sapiens
caggaacaatgtcttttcaagtcctttgcccatttttaaa

SEQ ID NO: 49467 - DNA, 40 bp, Homo sapiens
tttaaaaatgggcaaaggacttgaaaagacattgttcctg

SEQ ID NO: 49468 - DNA, 40 bp, Homo sapiens
aggaacaatgtcttttcaagtcctttgcccatttttaaat

SEQ ID NO: 49469 - DNA, 40 bp, Homo sapiens
atttaaaaatgggcaaaggacttgaaaagacattgttcct

SEQ ID NO: 49470 - DNA, 40 bp, Homo sapiens
ggaacaatgtcttttcaagtcctttgcccatttttaaatt

SEQ ID NO: 49471 - DNA, 40 bp, Homo sapiens
aatttaaaaatgggcaaaggacttgaaaagacattgttcc

SEQ ID NO: 49472 - DNA, 40 bp, Homo sapiens
gaacaatgtcttttcaagtcctttgcccatttttaaattg

SEQ ID NO: 49473 - DNA, 40 bp, Homo sapiens
caatttaaaaatgggcaaaggacttgaaaagacattgttc

SEQ ID NO: 49474 - DNA, 40 bp, Homo sapiens
aacaatgtcttttcaagtcctttgcccatttttaaattga

SEQ ID NO: 49475 - DNA, 40 bp, Homo sapiens
tcaatttaaaaatgggcaaaggacttgaaaagacattgtt

SEQ ID NO: 49476 - DNA, 40 bp, Homo sapiens
acaatgtcttttcaagtcctttgcccatttttaaattgaa

SEQ ID NO: 49477 - DNA, 40 bp, Homo sapiens
ttcaatttaaaaatgggcaaaggacttgaaaagacattgt

SEQ ID NO: 49478 - DNA, 40 bp, Homo sapiens
caatgtcttttcaagtcctttgcccatttttaaattgaat

SEQ ID NO: 49479 - DNA, 40 bp, Homo sapiens
attcaatttaaaaatgggcaaaggacttgaaaagacattg

SEQ ID NO: 49480 - DNA, 40 bp, Homo sapiens
aatgtcttttcaagtcctttgcccatttttaaattgaatt

SEQ ID NO: 49481 - DNA, 40 bp, Homo sapiens
aattcaatttaaaaatgggcaaaggacttgaaaagacatt

SEQ ID NO: 49482 - DNA, 40 bp, Homo sapiens
atgtcttttcaagtcctttgcccatttttaaattgaattt

SEQ ID NO: 49483 - DNA, 40 bp, Homo sapiens
aaattcaatttaaaaatgggcaaaggacttgaaaagacat

SEQ ID NO: 49484 - DNA, 40 bp, Homo sapiens
tgtcttttcaagtcctttgcccatttttaaattgaatttt

SEQ ID NO: 49485 - DNA, 40 bp, Homo sapiens
aaaattcaatttaaaaatgggcaaaggacttgaaaagaca

SEQ ID NO: 49486 - DNA, 40 bp, Homo sapiens
gtcttttcaagtcctttgcccatttttaaattgaattttt

SEQ ID NO: 49487 - DNA, 40 bp, Homo sapiens
aaaaattcaatttaaaaatgggcaaaggacttgaaaagac

SEQ ID NO: 49488 - DNA, 40 bp, Homo sapiens
tcttttcaagtcctttgcccatttttaaattgaatttttt

SEQ ID NO: 49489 - DNA, 40 bp, Homo sapiens
aaaaaattcaatttaaaaatgggcaaaggacttgaaaaga

SEQ ID NO: 49490 - DNA, 40 bp, Homo sapiens
cttttcaagtcctttgcccatttttaaattgaattttttg

SEQ ID NO: 49491 - DNA, 40 bp, Homo sapiens
caaaaaattcaatttaaaaatgggcaaaggacttgaaaag

SEQ ID NO: 49492 - DNA, 40 bp, Homo sapiens
ttttcaagtcctttgcccatttttaaattgaattttttgt

SEQ ID NO: 49493 - DNA, 40 bp, Homo sapiens
acaaaaaattcaatttaaaaatgggcaaaggacttgaaaa

SEQ ID NO: 49494 - DNA, 40 bp, Homo sapiens
tttcaagtcctttgcccatttttaaattgaattttttgtt

SEQ ID NO: 49495 - DNA, 40 bp, Homo sapiens
aacaaaaaattcaatttaaaaatgggcaaaggacttgaaa

SEQ ID NO: 49496 - DNA, 40 bp, Homo sapiens
ttcaagtcctttgcccatttttaaattgaattttttgttg

SEQ ID NO: 49497 - DNA, 40 bp, Homo sapiens
caacaaaaaattcaatttaaaaatgggcaaaggacttgaa

SEQ ID NO: 49498 - DNA, 40 bp, Homo sapiens
tcaagtcctttgcccatttttaaattgaattttttgttgt

SEQ ID NO: 49499 - DNA, 40 bp, Homo sapiens
acaacaaaaaattcaatttaaaaatgggcaaaggacttga

SEQ ID NO: 49500 - DNA, 40 bp, Homo sapiens
caagtcctttgcccatttttaaattgaattttttgttgtt

SEQ ID NO: 49501 - DNA, 40 bp, Homo sapiens
aacaacaaaaaattcaatttaaaaatgggcaaaggacttg

SEQ ID NO: 49502 - DNA, 40 bp, Homo sapiens
aagtcctttgcccatttttaaattgaattttttgttgttg

SEQ ID NO: 49503 - DNA, 40 bp, Homo sapiens
caacaacaaaaaattcaatttaaaaatgggcaaaggactt

SEQ ID NO: 49504 - DNA, 40 bp, Homo sapiens
agtcctttgcccatttttaaattgaattttttgttgttga

SEQ ID NO: 49505 - DNA, 40 bp, Homo sapiens
tcaacaacaaaaaattcaatttaaaaatgggcaaaggact

SEQ ID NO: 49506 - DNA, 40 bp, Homo sapiens
gtcctttgcccatttttaaattgaattttttgttgttgag

SEQ ID NO: 49507 - DNA, 40 bp, Homo sapiens
ctcaacaacaaaaaattcaatttaaaaatgggcaaaggac

SEQ ID NO: 49508 - DNA, 40 bp, Homo sapiens
tcctttgcccatttttaaattgaattttttgttgttgagt

SEQ ID NO: 49509 - DNA, 40 bp, Homo sapiens
actcaacaacaaaaaattcaatttaaaaatgggcaaagga

SEQ ID NO: 49510 - DNA, 40 bp, Homo sapiens
cctttgcccatttttaaattgaattttttgttgttgagtt

SEQ ID NO: 49511 - DNA, 40 bp, Homo sapiens
aactcaacaacaaaaaattcaatttaaaaatgggcaaagg

SEQ ID NO: 49512 - DNA, 40 bp, Homo sapiens
ctttgcccatttttaaattgaattttttgttgttgagttg

SEQ ID NO: 49513 - DNA, 40 bp, Homo sapiens
caactcaacaacaaaaaattcaatttaaaaatgggcaaag

SEQ ID NO: 49514 - DNA, 40 bp, Homo sapiens
tttgcccatttttaaattgaattttttgttgttgagttgt

SEQ ID NO: 49515 - DNA, 40 bp, Homo sapiens
acaactcaacaacaaaaaattcaatttaaaaatgggcaaa

SEQ ID NO: 49516 - DNA, 40 bp, Homo sapiens
ttgcccatttttaaattgaattttttgttgttgagttgta

SEQ ID NO: 49517 - DNA, 40 bp, Homo sapiens
tacaactcaacaacaaaaaattcaatttaaaaatgggcaa

SEQ ID NO: 49518 - DNA, 40 bp, Homo sapiens
tgcccatttttaaattgaattttttgttgttgagttgtat

SEQ ID NO: 49519 - DNA, 40 bp, Homo sapiens
atacaactcaacaacaaaaaattcaatttaaaaatgggca

SEQ ID NO: 49520 - DNA, 40 bp, Homo sapiens
gcccatttttaaattgaattttttgttgttgagttgtata

SEQ ID NO: 49521 - DNA, 40 bp, Homo sapiens
tatacaactcaacaacaaaaaattcaatttaaaaatgggc

SEQ ID NO: 49522 - DNA, 40 bp, Homo sapiens
cccatttttaaattgaattttttgttgttgagttgtatat

SEQ ID NO: 49523 - DNA, 40 bp, Homo sapiens
atatacaactcaacaacaaaaaattcaatttaaaaatggg

SEQ ID NO: 49524 - DNA, 40 bp, Homo sapiens
ccatttttaaattgaattttttgttgttgagttgtatata

SEQ ID NO: 49525 - DNA, 40 bp, Homo sapiens
tatatacaactcaacaacaaaaaattcaatttaaaaatgg

SEQ ID NO: 49526 - DNA, 40 bp, Homo sapiens
catttttaaattgaattttttgttgttgagttgtatataa

SEQ ID NO: 49527 - DNA, 40 bp, Homo sapiens
ttatatacaactcaacaacaaaaaattcaatttaaaaatg

SEQ ID NO: 49528 - DNA, 40 bp, Homo sapiens
atttttaaattgaattttttgttgttgagttgtatataac

SEQ ID NO: 49529 - DNA, 40 bp, Homo sapiens
gttatatacaactcaacaacaaaaaattcaatttaaaaat

SEQ ID NO: 49530 - DNA, 40 bp, Homo sapiens
tttttaaattgaattttttgttgttgagttgtatataaca

SEQ ID NO: 49531 - DNA, 40 bp, Homo sapiens
tgttatatacaactcaacaacaaaaaattcaatttaaaaa

SEQ ID NO: 49532 - DNA, 40 bp, Homo sapiens
ttttaaattgaattttttgttgttgagttgtatataacac

SEQ ID NO: 49533 - DNA, 40 bp, Homo sapiens
gtgttatatacaactcaacaacaaaaaattcaatttaaaa

SEQ ID NO: 49534 - DNA, 40 bp, Homo sapiens
tttaaattgaattttttgttgttgagttgtatataacacc

SEQ ID NO: 49535 - DNA, 40 bp, Homo sapiens
ggtgttatatacaactcaacaacaaaaaattcaatttaaa

SEQ ID NO: 49536 - DNA, 40 bp, Homo sapiens
ttaaattgaattttttgttgttgagttgtatataacacct

SEQ ID NO: 49537 - DNA, 40 bp, Homo sapiens
aggtgttatatacaactcaacaacaaaaaattcaatttaa

SEQ ID NO: 49538 - DNA, 40 bp, Homo sapiens
taaattgaattttttgttgttgagttgtatataacacctt

SEQ ID NO: 49539 - DNA, 40 bp, Homo sapiens
aaggtgttatatacaactcaacaacaaaaaattcaattta

SEQ ID NO: 49540 - DNA, 40 bp, Homo sapiens
aaattgaattttttgttgttgagttgtatataacaccttt

SEQ ID NO: 49541 - DNA, 40 bp, Homo sapiens
aaaggtgttatatacaactcaacaacaaaaaattcaattt

SEQ ID NO: 49542 - DNA, 40 bp, Homo sapiens
aattgaattttttgttgttgagttgtatataacacctttt

SEQ ID NO: 49543 - DNA, 40 bp, Homo sapiens
aaaaggtgttatatacaactcaacaacaaaaaattcaatt

SEQ ID NO: 49544 - DNA, 40 bp, Homo sapiens
attgaattttttgttgttgagttgtatataacaccttttt

SEQ ID NO: 49545 - DNA, 40 bp, Homo sapiens
aaaaaggtgttatatacaactcaacaacaaaaaattcaat

SEQ ID NO: 49546 - DNA, 40 bp, Homo sapiens
ttgaattttttgttgttgagttgtatataacacctttttt

SEQ ID NO: 49547 - DNA, 40 bp, Homo sapiens
aaaaaaggtgttatatacaactcaacaacaaaaaattcaa

SEQ ID NO: 49548 - DNA, 40 bp, Homo sapiens
tgaattttttgttgttgagttgtatataacaccttttttg

SEQ ID NO: 49549 - DNA, 40 bp, Homo sapiens
caaaaaaggtgttatatacaactcaacaacaaaaaattca

SEQ ID NO: 49550 - DNA, 40 bp, Homo sapiens
gaattttttgttgttgagttgtatataacaccttttttga

SEQ ID NO: 49551 - DNA, 40 bp, Homo sapiens
tcaaaaaaggtgttatatacaactcaacaacaaaaaattc

SEQ ID NO: 49552 - DNA, 40 bp, Homo sapiens
aattttttgttgttgagttgtatataacaccttttttgaa

SEQ ID NO: 49553 - DNA, 40 bp, Homo sapiens
ttcaaaaaaggtgttatatacaactcaacaacaaaaaatt

SEQ ID NO: 49554 - DNA, 40 bp, Homo sapiens
attttttgttgttgagttgtatataacaccttttttgaag

SEQ ID NO: 49555 - DNA, 40 bp, Homo sapiens
cttcaaaaaaggtgttatatacaactcaacaacaaaaaat

SEQ ID NO: 49556 - DNA, 40 bp, Homo sapiens
ttttttgttgttgagttgtatataacaccttttttgaagt

SEQ ID NO: 49557 - DNA, 40 bp, Homo sapiens
acttcaaaaaaggtgttatatacaactcaacaacaaaaaa

SEQ ID NO: 49558 - DNA, 40 bp, Homo sapiens
tttttgttgttgagttgtatataacaccttttttgaagta

SEQ ID NO: 49559 - DNA, 40 bp, Homo sapiens
tacttcaaaaaaggtgttatatacaactcaacaacaaaaa

SEQ ID NO: 49560 - DNA, 40 bp, Homo sapiens
ttttgttgttgagttgtatataacaccttttttgaagtaa

SEQ ID NO: 49561 - DNA, 40 bp, Homo sapiens
ttacttcaaaaaaggtgttatatacaactcaacaacaaaa

SEQ ID NO: 49562 - DNA, 40 bp, Homo sapiens
tttgttgttgagttgtatataacaccttttttgaagtaaa

SEQ ID NO: 49563 - DNA, 40 bp, Homo sapiens
tttacttcaaaaaaggtgttatatacaactcaacaacaaa

SEQ ID NO: 49564 - DNA, 40 bp, Homo sapiens
ttgttgttgagttgtatataacaccttttttgaagtaaaa

SEQ ID NO: 49565 - DNA, 40 bp, Homo sapiens
ttttacttcaaaaaaggtgttatatacaactcaacaacaa

SEQ ID NO: 49566 - DNA, 40 bp, Homo sapiens
tgttgttgagttgtatataacaccttttttgaagtaaaag

SEQ ID NO: 49567 - DNA, 40 bp, Homo sapiens
cttttacttcaaaaaaggtgttatatacaactcaacaaca

SEQ ID NO: 49568 - DNA, 40 bp, Homo sapiens
gttgttgagttgtatataacaccttttttgaagtaaaagg

SEQ ID NO: 49569 - DNA, 40 bp, Homo sapiens
ccttttacttcaaaaaaggtgttatatacaactcaacaac

SEQ ID NO: 49570 - DNA, 40 bp, Homo sapiens
ttgttgagttgtatataacaccttttttgaagtaaaaggt

SEQ ID NO: 49571 - DNA, 40 bp, Homo sapiens
accttttacttcaaaaaaggtgttatatacaactcaacaa

SEQ ID NO: 49572 - DNA, 40 bp, Homo sapiens
tgttgagttgtatataacaccttttttgaagtaaaaggtg

SEQ ID NO: 49573 - DNA, 40 bp, Homo sapiens
caccttttacttcaaaaaaggtgttatatacaactcaaca

SEQ ID NO: 49574 - DNA, 40 bp, Homo sapiens
gttgagttgtatataacaccttttttgaagtaaaaggtgc

SEQ ID NO: 49575 - DNA, 40 bp, Homo sapiens
gcaccttttacttcaaaaaaggtgttatatacaactcaac

SEQ ID NO: 49576 - DNA, 40 bp, Homo sapiens
ttgagttgtatataacaccttttttgaagtaaaaggtgca

SEQ ID NO: 49577 - DNA, 40 bp, Homo sapiens
tgcaccttttacttcaaaaaaggtgttatatacaactcaa

SEQ ID NO: 49578 - DNA, 40 bp, Homo sapiens
tgagttgtatataacaccttttttgaagtaaaaggtgcac

SEQ ID NO: 49579 - DNA, 40 bp, Homo sapiens
gtgcaccttttacttcaaaaaaggtgttatatacaactca

SEQ ID NO: 49580 - DNA, 40 bp, Homo sapiens
gagttgtatataacaccttttttgaagtaaaaggtgcact

SEQ ID NO: 49581 - DNA, 40 bp, Homo sapiens
agtgcaccttttacttcaaaaaaggtgttatatacaactc

SEQ ID NO: 49582 - DNA, 40 bp, Homo sapiens
agttgtatataacaccttttttgaagtaaaaggtgcactg

SEQ ID NO: 49583 - DNA, 40 bp, Homo sapiens
cagtgcaccttttacttcaaaaaaggtgttatatacaact

SEQ ID NO: 49584 - DNA, 40 bp, Homo sapiens
gttgtatataacaccttttttgaagtaaaaggtgcactgt

SEQ ID NO: 49585 - DNA, 40 bp, Homo sapiens
acagtgcaccttttacttcaaaaaaggtgttatatacaac

SEQ ID NO: 49586 - DNA, 40 bp, Homo sapiens
ttgtatataacaccttttttgaagtaaaaggtgcactgta

SEQ ID NO: 49587 - DNA, 40 bp, Homo sapiens
tacagtgcaccttttacttcaaaaaaggtgttatatacaa

SEQ ID NO: 49588 - DNA, 40 bp, Homo sapiens
tgtatataacaccttttttgaagtaaaaggtgcactgtaa

SEQ ID NO: 49589 - DNA, 40 bp, Homo sapiens
ttacagtgcaccttttacttcaaaaaaggtgttatataca

SEQ ID NO: 49590 - DNA, 40 bp, Homo sapiens
gtatataacaccttttttgaagtaaaaggtgcactgtaat

SEQ ID NO: 49591 - DNA, 40 bp, Homo sapiens
attacagtgcaccttttacttcaaaaaaggtgttatatac

SEQ ID NO: 49592 - DNA, 40 bp, Homo sapiens
tatataacaccttttttgaagtaaaaggtgcactgtaata

SEQ ID NO: 49593 - DNA, 40 bp, Homo sapiens
tattacagtgcaccttttacttcaaaaaaggtgttatata

SEQ ID NO: 49594 - DNA, 40 bp, Homo sapiens
atataacaccttttttgaagtaaaaggtgcactgtaataa

SEQ ID NO: 49595 - DNA, 40 bp, Homo sapiens
ttattacagtgcaccttttacttcaaaaaaggtgttatat

SEQ ID NO: 49596 - DNA, 40 bp, Homo sapiens
tataacaccttttttgaagtaaaaggtgcactgtaataat

SEQ ID NO: 49597 - DNA, 40 bp, Homo sapiens
attattacagtgcaccttttacttcaaaaaaggtgttata

SEQ ID NO: 49598 - DNA, 40 bp, Homo sapiens
ataacaccttttttgaagtaaaaggtgcactgtaataatc

SEQ ID NO: 49599 - DNA, 40 bp, Homo sapiens
gattattacagtgcaccttttacttcaaaaaaggtgttat

SEQ ID NO: 49600 - DNA, 40 bp, Homo sapiens
taacaccttttttgaagtaaaaggtgcactgtaataatcc

SEQ ID NO: 49601 - DNA, 40 bp, Homo sapiens
ggattattacagtgcaccttttacttcaaaaaaggtgtta

SEQ ID NO: 49602 - DNA, 40 bp, Homo sapiens
aacaccttttttgaagtaaaaggtgcactgtaataatcca

SEQ ID NO: 49603 - DNA, 40 bp, Homo sapiens
tggattattacagtgcaccttttacttcaaaaaaggtgtt

SEQ ID NO: 49604 - DNA, 40 bp, Homo sapiens
acaccttttttgaagtaaaaggtgcactgtaataatccag

SEQ ID NO: 49605 - DNA, 40 bp, Homo sapiens
ctggattattacagtgcaccttttacttcaaaaaaggtgt

SEQ ID NO: 49606 - DNA, 40 bp, Homo sapiens
caccttttttgaagtaaaaggtgcactgtaataatccaga

SEQ ID NO: 49607 - DNA, 40 bp, Homo sapiens
tctggattattacagtgcaccttttacttcaaaaaaggtg

SEQ ID NO: 49608 - DNA, 40 bp, Homo sapiens
accttttttgaagtaaaaggtgcactgtaataatccagac

SEQ ID NO: 49609 - DNA, 40 bp, Homo sapiens
gtctggattattacagtgcaccttttacttcaaaaaaggt

SEQ ID NO: 49610 - DNA, 40 bp, Homo sapiens
ccttttttgaagtaaaaggtgcactgtaataatccagact

SEQ ID NO: 49611 - DNA, 40 bp, Homo sapiens
agtctggattattacagtgcaccttttacttcaaaaaagg

SEQ ID NO: 49612 - DNA, 40 bp, Homo sapiens
cttttttgaagtaaaaggtgcactgtaataatccagactg

SEQ ID NO: 49613 - DNA, 40 bp, Homo sapiens
cagtctggattattacagtgcaccttttacttcaaaaaag

SEQ ID NO: 49614 - DNA, 40 bp, Homo sapiens
ttttttgaagtaaaaggtgcactgtaataatccagactgt

SEQ ID NO: 49615 - DNA, 40 bp, Homo sapiens
acagtctggattattacagtgcaccttttacttcaaaaaa

SEQ ID NO: 49616 - DNA, 40 bp, Homo sapiens
tttttgaagtaaaaggtgcactgtaataatccagactgtg

SEQ ID NO: 49617 - DNA, 40 bp, Homo sapiens
cacagtctggattattacagtgcaccttttacttcaaaaa

SEQ ID NO: 49618 - DNA, 40 bp, Homo sapiens
ttttgaagtaaaaggtgcactgtaataatccagactgtgt

SEQ ID NO: 49619 - DNA, 40 bp, Homo sapiens
acacagtctggattattacagtgcaccttttacttcaaaa

SEQ ID NO: 49620 - DNA, 40 bp, Homo sapiens
tttgaagtaaaaggtgcactgtaataatccagactgtgtt

SEQ ID NO: 49621 - DNA, 40 bp, Homo sapiens
aacacagtctggattattacagtgcaccttttacttcaaa

SEQ ID NO: 49622 - DNA, 40 bp, Homo sapiens
ttgaagtaaaaggtgcactgtaataatccagactgtgttt

SEQ ID NO: 49623 - DNA, 40 bp, Homo sapiens
aaacacagtctggattattacagtgcaccttttacttcaa

SEQ ID NO: 49624 - DNA, 40 bp, Homo sapiens
tgaagtaaaaggtgcactgtaataatccagactgtgtttc

SEQ ID NO: 49625 - DNA, 40 bp, Homo sapiens
gaaacacagtctggattattacagtgcaccttttacttca

SEQ ID NO: 49626 - DNA, 40 bp, Homo sapiens
gaagtaaaaggtgcactgtaataatccagactgtgtttct

SEQ ID NO: 49627 - DNA, 40 bp, Homo sapiens
agaaacacagtctggattattacagtgcaccttttacttc

SEQ ID NO: 49628 - DNA, 40 bp, Homo sapiens
aagtaaaaggtgcactgtaataatccagactgtgtttctc

SEQ ID NO: 49629 - DNA, 40 bp, Homo sapiens
gagaaacacagtctggattattacagtgcaccttttactt

SEQ ID NO: 49630 - DNA, 40 bp, Homo sapiens
agtaaaaggtgcactgtaataatccagactgtgtttctcc

SEQ ID NO: 49631 - DNA, 40 bp, Homo sapiens
ggagaaacacagtctggattattacagtgcaccttttact

SEQ ID NO: 49632 - DNA, 40 bp, Homo sapiens
gtaaaaggtgcactgtaataatccagactgtgtttctccc

SEQ ID NO: 49633 - DNA, 40 bp, Homo sapiens
gggagaaacacagtctggattattacagtgcaccttttac

SEQ ID NO: 49634 - DNA, 40 bp, Homo sapiens
taaaaggtgcactgtaataatccagactgtgtttctccct

SEQ ID NO: 49635 - DNA, 40 bp, Homo sapiens
agggagaaacacagtctggattattacagtgcacctttta

SEQ ID NO: 49636 - DNA, 40 bp, Homo sapiens
aaaaggtgcactgtaataatccagactgtgtttctccctt

SEQ ID NO: 49637 - DNA, 40 bp, Homo sapiens
aagggagaaacacagtctggattattacagtgcacctttt

SEQ ID NO: 49638 - DNA, 40 bp, Homo sapiens
aaaggtgcactgtaataatccagactgtgtttctcccttc

SEQ ID NO: 49639 - DNA, 40 bp, Homo sapiens
gaagggagaaacacagtctggattattacagtgcaccttt

SEQ ID NO: 49640 - DNA, 40 bp, Homo sapiens
aaggtgcactgtaataatccagactgtgtttctcccttct

SEQ ID NO: 49641 - DNA, 40 bp, Homo sapiens
agaagggagaaacacagtctggattattacagtgcacctt

SEQ ID NO: 49642 - DNA, 40 bp, Homo sapiens
aggtgcactgtaataatccagactgtgtttctcccttctc

SEQ ID NO: 49643 - DNA, 40 bp, Homo sapiens
gagaagggagaaacacagtctggattattacagtgcacct

SEQ ID NO: 49644 - DNA, 40 bp, Homo sapiens
ggtgcactgtaataatccagactgtgtttctcccttctca

SEQ ID NO: 49645 - DNA, 40 bp, Homo sapiens
tgagaagggagaaacacagtctggattattacagtgcacc

SEQ ID NO: 49646 - DNA, 40 bp, Homo sapiens
gtgcactgtaataatccagactgtgtttctcccttctcag

SEQ ID NO: 49647 - DNA, 40 bp, Homo sapiens
ctgagaagggagaaacacagtctggattattacagtgcac

SEQ ID NO: 49648 - DNA, 40 bp, Homo sapiens
tgcactgtaataatccagactgtgtttctcccttctcagg

SEQ ID NO: 49649 - DNA, 40 bp, Homo sapiens
cctgagaagggagaaacacagtctggattattacagtgca

SEQ ID NO: 49650 - DNA, 40 bp, Homo sapiens
gcactgtaataatccagactgtgtttctcccttctcagga

SEQ ID NO: 49651 - DNA, 40 bp, Homo sapiens
tcctgagaagggagaaacacagtctggattattacagtgc

SEQ ID NO: 49652 - DNA, 40 bp, Homo sapiens
cactgtaataatccagactgtgtttctcccttctcaggat

SEQ ID NO: 49653 - DNA, 40 bp, Homo sapiens
atcctgagaagggagaaacacagtctggattattacagtg

SEQ ID NO: 49654 - DNA, 40 bp, Homo sapiens
actgtaataatccagactgtgtttctcccttctcaggatt

SEQ ID NO: 49655 - DNA, 40 bp, Homo sapiens
aatcctgagaagggagaaacacagtctggattattacagt

SEQ ID NO: 49656 - DNA, 40 bp, Homo sapiens
ctgtaataatccagactgtgtttctcccttctcaggattc

SEQ ID NO: 49657 - DNA, 40 bp, Homo sapiens
gaatcctgagaagggagaaacacagtctggattattacag

SEQ ID NO: 49658 - DNA, 40 bp, Homo sapiens
tgtaataatccagactgtgtttctcccttctcaggattcc

SEQ ID NO: 49659 - DNA, 40 bp, Homo sapiens
ggaatcctgagaagggagaaacacagtctggattattaca

SEQ ID NO: 49660 - DNA, 40 bp, Homo sapiens
gtaataatccagactgtgtttctcccttctcaggattcct

SEQ ID NO: 49661 - DNA, 40 bp, Homo sapiens
aggaatcctgagaagggagaaacacagtctggattattac

SEQ ID NO: 49662 - DNA, 40 bp, Homo sapiens
taataatccagactgtgtttctcccttctcaggattccta

SEQ ID NO: 49663 - DNA, 40 bp, Homo sapiens
taggaatcctgagaagggagaaacacagtctggattatta

SEQ ID NO: 49664 - DNA, 40 bp, Homo sapiens
aataatccagactgtgtttctcccttctcaggattcctac

SEQ ID NO: 49665 - DNA, 40 bp, Homo sapiens
gtaggaatcctgagaagggagaaacacagtctggattatt

SEQ ID NO: 49666 - DNA, 40 bp, Homo sapiens
ataatccagactgtgtttctcccttctcaggattcctaca

SEQ ID NO: 49667 - DNA, 40 bp, Homo sapiens
tgtaggaatcctgagaagggagaaacacagtctggattat

SEQ ID NO: 49668 - DNA, 40 bp, Homo sapiens
taatccagactgtgtttctcccttctcaggattcctacag

SEQ ID NO: 49669 - DNA, 40 bp, Homo sapiens
ctgtaggaatcctgagaagggagaaacacagtctggatta

SEQ ID NO: 49670 - DNA, 40 bp, Homo sapiens
aatccagactgtgtttctcccttctcaggattcctacagg

SEQ ID NO: 49671 - DNA, 40 bp, Homo sapiens
cctgtaggaatcctgagaagggagaaacacagtctggatt

SEQ ID NO: 49672 - DNA, 40 bp, Homo sapiens
atccagactgtgtttctcccttctcaggattcctacagga

SEQ ID NO: 49673 - DNA, 40 bp, Homo sapiens
tcctgtaggaatcctgagaagggagaaacacagtctggat

SEQ ID NO: 49674 - DNA, 40 bp, Homo sapiens
tccagactgtgtttctcccttctcaggattcctacaggaa

SEQ ID NO: 49675 - DNA, 40 bp, Homo sapiens
ttcctgtaggaatcctgagaagggagaaacacagtctgga

SEQ ID NO: 49676 - DNA, 40 bp, Homo sapiens
ccagactgtgtttctcccttctcaggattcctacaggaag

SEQ ID NO: 49677 - DNA, 40 bp, Homo sapiens
cttcctgtaggaatcctgagaagggagaaacacagtctgg

SEQ ID NO: 49678 - DNA, 40 bp, Homo sapiens
cagactgtgtttctcccttctcaggattcctacaggaagc

SEQ ID NO: 49679 - DNA, 40 bp, Homo sapiens
gcttcctgtaggaatcctgagaagggagaaacacagtctg

SEQ ID NO: 49680 - DNA, 40 bp, Homo sapiens
agactgtgtttctcccttctcaggattcctacaggaagca

SEQ ID NO: 49681 - DNA, 40 bp, Homo sapiens
tgcttcctgtaggaatcctgagaagggagaaacacagtct

SEQ ID NO: 49682 - DNA, 40 bp, Homo sapiens
gactgtgtttctcccttctcaggattcctacaggaagcaa

SEQ ID NO: 49683 - DNA, 40 bp, Homo sapiens
ttgcttcctgtaggaatcctgagaagggagaaacacagtc

SEQ ID NO: 49684 - DNA, 40 bp, Homo sapiens
actgtgtttctcccttctcaggattcctacaggaagcaag

SEQ ID NO: 49685 - DNA, 40 bp, Homo sapiens
cttgcttcctgtaggaatcctgagaagggagaaacacagt

SEQ ID NO: 49686 - DNA, 40 bp, Homo sapiens
ctgtgtttctcccttctcaggattcctacaggaagcaagt

SEQ ID NO: 49687 - DNA, 40 bp, Homo sapiens
acttgcttcctgtaggaatcctgagaagggagaaacacag

SEQ ID NO: 49688 - DNA, 40 bp, Homo sapiens
tgtgtttctcccttctcaggattcctacaggaagcaagta

SEQ ID NO: 49689 - DNA, 40 bp, Homo sapiens
tacttgcttcctgtaggaatcctgagaagggagaaacaca

SEQ ID NO: 49690 - DNA, 40 bp, Homo sapiens
gtgtttctcccttctcaggattcctacaggaagcaagtag

SEQ ID NO: 49691 - DNA, 40 bp, Homo sapiens
ctacttgcttcctgtaggaatcctgagaagggagaaacac

SEQ ID NO: 49692 - DNA, 40 bp, Homo sapiens
tgtttctcccttctcaggattcctacaggaagcaagtagt

SEQ ID NO: 49693 - DNA, 40 bp, Homo sapiens
actacttgcttcctgtaggaatcctgagaagggagaaaca

SEQ ID NO: 49694 - DNA, 40 bp, Homo sapiens
gtttctcccttctcaggattcctacaggaagcaagtagta

SEQ ID NO: 49695 - DNA, 40 bp, Homo sapiens
tactacttgcttcctgtaggaatcctgagaagggagaaac

SEQ ID NO: 49696 - DNA, 40 bp, Homo sapiens
tttctcccttctcaggattcctacaggaagcaagtagtaa

SEQ ID NO: 49697 - DNA, 40 bp, Homo sapiens
ttactacttgcttcctgtaggaatcctgagaagggagaaa

SEQ ID NO: 49698 - DNA, 40 bp, Homo sapiens
ttctcccttctcaggattcctacaggaagcaagtagtaat

SEQ ID NO: 49699 - DNA, 40 bp, Homo sapiens
attactacttgcttcctgtaggaatcctgagaagggagaa

SEQ ID NO: 49700 - DNA, 40 bp, Homo sapiens
tctcccttctcaggattcctacaggaagcaagtagtaatt

SEQ ID NO: 49701 - DNA, 40 bp, Homo sapiens
aattactacttgcttcctgtaggaatcctgagaagggaga

SEQ ID NO: 49702 - DNA, 40 bp, Homo sapiens
ctcccttctcaggattcctacaggaagcaagtagtaattg

SEQ ID NO: 49703 - DNA, 40 bp, Homo sapiens
caattactacttgcttcctgtaggaatcctgagaagggag

SEQ ID NO: 49704 - DNA, 40 bp, Homo sapiens
tcccttctcaggattcctacaggaagcaagtagtaattga

SEQ ID NO: 49705 - DNA, 40 bp, Homo sapiens
tcaattactacttgcttcctgtaggaatcctgagaaggga

SEQ ID NO: 49706 - DNA, 40 bp, Homo sapiens
cccttctcaggattcctacaggaagcaagtagtaattgat

SEQ ID NO: 49707 - DNA, 40 bp, Homo sapiens
atcaattactacttgcttcctgtaggaatcctgagaaggg

SEQ ID NO: 49708 - DNA, 40 bp, Homo sapiens
ccttctcaggattcctacaggaagcaagtagtaattgatg

SEQ ID NO: 49709 - DNA, 40 bp, Homo sapiens
catcaattactacttgcttcctgtaggaatcctgagaagg

SEQ ID NO: 49710 - DNA, 40 bp, Homo sapiens
cttctcaggattcctacaggaagcaagtagtaattgatgg

SEQ ID NO: 49711 - DNA, 40 bp, Homo sapiens
ccatcaattactacttgcttcctgtaggaatcctgagaag

SEQ ID NO: 49712 - DNA, 40 bp, Homo sapiens
ttctcaggattcctacaggaagcaagtagtaattgatgga

SEQ ID NO: 49713 - DNA, 40 bp, Homo sapiens
tccatcaattactacttgcttcctgtaggaatcctgagaa

SEQ ID NO: 49714 - DNA, 40 bp, Homo sapiens
tctcaggattcctacaggaagcaagtagtaattgatggag

SEQ ID NO: 49715 - DNA, 40 bp, Homo sapiens
ctccatcaattactacttgcttcctgtaggaatcctgaga

SEQ ID NO: 49716 - DNA, 40 bp, Homo sapiens
ctcaggattcctacaggaagcaagtagtaattgatggaga

SEQ ID NO: 49717 - DNA, 40 bp, Homo sapiens
tctccatcaattactacttgcttcctgtaggaatcctgag

SEQ ID NO: 49718 - DNA, 40 bp, Homo sapiens
tcaggattcctacaggaagcaagtagtaattgatggagaa

SEQ ID NO: 49719 - DNA, 40 bp, Homo sapiens
ttctccatcaattactacttgcttcctgtaggaatcctga

SEQ ID NO: 49720 - DNA, 40 bp, Homo sapiens
caggattcctacaggaagcaagtagtaattgatggagaaa

SEQ ID NO: 49721 - DNA, 40 bp, Homo sapiens
tttctccatcaattactacttgcttcctgtaggaatcctg

SEQ ID NO: 49722 - DNA, 40 bp, Homo sapiens
aggattcctacaggaagcaagtagtaattgatggagaaac

SEQ ID NO: 49723 - DNA, 40 bp, Homo sapiens
gtttctccatcaattactacttgcttcctgtaggaatcct

SEQ ID NO: 49724 - DNA, 40 bp, Homo sapiens
ggattcctacaggaagcaagtagtaattgatggagaaacc

SEQ ID NO: 49725 - DNA, 40 bp, Homo sapiens
ggtttctccatcaattactacttgcttcctgtaggaatcc

SEQ ID NO: 49726 - DNA, 40 bp, Homo sapiens
gattcctacaggaagcaagtagtaattgatggagaaacct

SEQ ID NO: 49727 - DNA, 40 bp, Homo sapiens
aggtttctccatcaattactacttgcttcctgtaggaatc

SEQ ID NO: 49728 - DNA, 40 bp, Homo sapiens
attcctacaggaagcaagtagtaattgatggagaaacctg

SEQ ID NO: 49729 - DNA, 40 bp, Homo sapiens
caggtttctccatcaattactacttgcttcctgtaggaat

SEQ ID NO: 49730 - DNA, 40 bp, Homo sapiens
ttcctacaggaagcaagtagtaattgatggagaaacctgt

SEQ ID NO: 49731 - DNA, 40 bp, Homo sapiens
acaggtttctccatcaattactacttgcttcctgtaggaa

SEQ ID NO: 49732 - DNA, 40 bp, Homo sapiens
tcctacaggaagcaagtagtaattgatggagaaacctgtc

SEQ ID NO: 49733 - DNA, 40 bp, Homo sapiens
gacaggtttctccatcaattactacttgcttcctgtagga

SEQ ID NO: 49734 - DNA, 40 bp, Homo sapiens
cctacaggaagcaagtagtaattgatggagaaacctgtct

SEQ ID NO: 49735 - DNA, 40 bp, Homo sapiens
agacaggtttctccatcaattactacttgcttcctgtagg

SEQ ID NO: 49736 - DNA, 40 bp, Homo sapiens
ctacaggaagcaagtagtaattgatggagaaacctgtctc

SEQ ID NO: 49737 - DNA, 40 bp, Homo sapiens
gagacaggtttctccatcaattactacttgcttcctgtag

SEQ ID NO: 49738 - DNA, 40 bp, Homo sapiens
tacaggaagcaagtagtaattgatggagaaacctgtctct

SEQ ID NO: 49739 - DNA, 40 bp, Homo sapiens
agagacaggtttctccatcaattactacttgcttcctgta

SEQ ID NO: 49740 - DNA, 40 bp, Homo sapiens
acaggaagcaagtagtaattgatggagaaacctgtctctt

SEQ ID NO: 49741 - DNA, 40 bp, Homo sapiens
aagagacaggtttctccatcaattactacttgcttcctgt

SEQ ID NO: 49742 - DNA, 40 bp, Homo sapiens
caggaagcaagtagtaattgatggagaaacctgtctcttg

SEQ ID NO: 49743 - DNA, 40 bp, Homo sapiens
caagagacaggtttctccatcaattactacttgcttcctg

SEQ ID NO: 49744 - DNA, 40 bp, Homo sapiens
aggaagcaagtagtaattgatggagaaacctgtctcttgg

SEQ ID NO: 49745 - DNA, 40 bp, Homo sapiens
ccaagagacaggtttctccatcaattactacttgcttcct

SEQ ID NO: 49746 - DNA, 40 bp, Homo sapiens
ggaagcaagtagtaattgatggagaaacctgtctcttgga

SEQ ID NO: 49747 - DNA, 40 bp, Homo sapiens
tccaagagacaggtttctccatcaattactacttgcttcc

SEQ ID NO: 49748 - DNA, 40 bp, Homo sapiens
gaagcaagtagtaattgatggagaaacctgtctcttggat

SEQ ID NO: 49749 - DNA, 40 bp, Homo sapiens
atccaagagacaggtttctccatcaattactacttgcttc

SEQ ID NO: 49750 - DNA, 40 bp, Homo sapiens
aagcaagtagtaattgatggagaaacctgtctcttggata

SEQ ID NO: 49751 - DNA, 40 bp, Homo sapiens
tatccaagagacaggtttctccatcaattactacttgctt

SEQ ID NO: 49752 - DNA, 40 bp, Homo sapiens
agcaagtagtaattgatggagaaacctgtctcttggatat

SEQ ID NO: 49753 - DNA, 40 bp, Homo sapiens
atatccaagagacaggtttctccatcaattactacttgct

SEQ ID NO: 49754 - DNA, 40 bp, Homo sapiens
gcaagtagtaattgatggagaaacctgtctcttggatatt

SEQ ID NO: 49755 - DNA, 40 bp, Homo sapiens
aatatccaagagacaggtttctccatcaattactacttgc

SEQ ID NO: 49756 - DNA, 40 bp, Homo sapiens
caagtagtaattgatggagaaacctgtctcttggatattc

SEQ ID NO: 49757 - DNA, 40 bp, Homo sapiens
gaatatccaagagacaggtttctccatcaattactacttg

SEQ ID NO: 49758 - DNA, 40 bp, Homo sapiens
aagtagtaattgatggagaaacctgtctcttggatattct

SEQ ID NO: 49759 - DNA, 40 bp, Homo sapiens
agaatatccaagagacaggtttctccatcaattactactt

SEQ ID NO: 49760 - DNA, 40 bp, Homo sapiens
agtagtaattgatggagaaacctgtctcttggatattctc

SEQ ID NO: 49761 - DNA, 40 bp, Homo sapiens
gagaatatccaagagacaggtttctccatcaattactact

SEQ ID NO: 49762 - DNA, 40 bp, Homo sapiens
gtagtaattgatggagaaacctgtctcttggatattctcg

SEQ ID NO: 49763 - DNA, 40 bp, Homo sapiens
cgagaatatccaagagacaggtttctccatcaattactac

SEQ ID NO: 49764 - DNA, 40 bp, Homo sapiens
tagtaattgatggagaaacctgtctcttggatattctcga

SEQ ID NO: 49765 - DNA, 40 bp, Homo sapiens
tcgagaatatccaagagacaggtttctccatcaattacta

SEQ ID NO: 49766 - DNA, 40 bp, Homo sapiens
agtaattgatggagaaacctgtctcttggatattctcgac

SEQ ID NO: 49767 - DNA, 40 bp, Homo sapiens
gtcgagaatatccaagagacaggtttctccatcaattact

SEQ ID NO: 49768 - DNA, 40 bp, Homo sapiens
gtaattgatggagaaacctgtctcttggatattctcgaca

SEQ ID NO: 49769 - DNA, 40 bp, Homo sapiens
tgtcgagaatatccaagagacaggtttctccatcaattac

SEQ ID NO: 49770 - DNA, 40 bp, Homo sapiens
taattgatggagaaacctgtctcttggatattctcgacac

SEQ ID NO: 49771 - DNA, 40 bp, Homo sapiens
gtgtcgagaatatccaagagacaggtttctccatcaatta

SEQ ID NO: 49772 - DNA, 40 bp, Homo sapiens
aattgatggagaaacctgtctcttggatattctcgacaca

SEQ ID NO: 49773 - DNA, 40 bp, Homo sapiens
tgtgtcgagaatatccaagagacaggtttctccatcaatt

SEQ ID NO: 49774 - DNA, 40 bp, Homo sapiens
attgatggagaaacctgtctcttggatattctcgacacag

SEQ ID NO: 49775 - DNA, 40 bp, Homo sapiens
ctgtgtcgagaatatccaagagacaggtttctccatcaat

SEQ ID NO: 49776 - DNA, 40 bp, Homo sapiens
ttgatggagaaacctgtctcttggatattctcgacacagc

SEQ ID NO: 49777 - DNA, 40 bp, Homo sapiens
gctgtgtcgagaatatccaagagacaggtttctccatcaa

SEQ ID NO: 49778 - DNA, 40 bp, Homo sapiens
tgatggagaaacctgtctcttggatattctcgacacagca

SEQ ID NO: 49779 - DNA, 40 bp, Homo sapiens
tgctgtgtcgagaatatccaagagacaggtttctccatca

SEQ ID NO: 49780 - DNA, 40 bp, Homo sapiens
gatggagaaacctgtctcttggatattctcgacacagcag

SEQ ID NO: 49781 - DNA, 40 bp, Homo sapiens
ctgctgtgtcgagaatatccaagagacaggtttctccatc

SEQ ID NO: 49782 - DNA, 40 bp, Homo sapiens
atggagaaacctgtctcttggatattctcgacacagcagg

SEQ ID NO: 49783 - DNA, 40 bp, Homo sapiens
cctgctgtgtcgagaatatccaagagacaggtttctccat

SEQ ID NO: 49784 - DNA, 40 bp, Homo sapiens
tggagaaacctgtctcttggatattctcgacacagcaggt

SEQ ID NO: 49785 - DNA, 40 bp, Homo sapiens
acctgctgtgtcgagaatatccaagagacaggtttctcca

SEQ ID NO: 49786 - DNA, 40 bp, Homo sapiens
ggagaaacctgtctcttggatattctcgacacagcaggtc

SEQ ID NO: 49787 - DNA, 40 bp, Homo sapiens
gacctgctgtgtcgagaatatccaagagacaggtttctcc

SEQ ID NO: 49788 - DNA, 40 bp, Homo sapiens
gagaaacctgtctcttggatattctcgacacagcaggtca

SEQ ID NO: 49789 - DNA, 40 bp, Homo sapiens
tgacctgctgtgtcgagaatatccaagagacaggtttctc

SEQ ID NO: 49790 - DNA, 40 bp, Homo sapiens
agaaacctgtctcttggatattctcgacacagcaggtcaa

SEQ ID NO: 49791 - DNA, 40 bp, Homo sapiens
ttgacctgctgtgtcgagaatatccaagagacaggtttct

SEQ ID NO: 49792 - DNA, 40 bp, Homo sapiens
gaaacctgtctcttggatattctcgacacagcaggtcaag

SEQ ID NO: 49793 - DNA, 40 bp, Homo sapiens
cttgacctgctgtgtcgagaatatccaagagacaggtttc

SEQ ID NO: 49794 - DNA, 40 bp, Homo sapiens
aaacctgtctcttggatattctcgacacagcaggtcaaga

SEQ ID NO: 49795 - DNA, 40 bp, Homo sapiens
tcttgacctgctgtgtcgagaatatccaagagacaggttt

SEQ ID NO: 49796 - DNA, 40 bp, Homo sapiens
aacctgtctcttggatattctcgacacagcaggtcaagag

SEQ ID NO: 49797 - DNA, 40 bp, Homo sapiens
ctcttgacctgctgtgtcgagaatatccaagagacaggtt

SEQ ID NO: 49798 - DNA, 40 bp, Homo sapiens
acctgtctcttggatattctcgacacagcaggtcaagagg

SEQ ID NO: 49799 - DNA, 40 bp, Homo sapiens
cctcttgacctgctgtgtcgagaatatccaagagacaggt

SEQ ID NO: 49800 - DNA, 40 bp, Homo sapiens
cctgtctcttggatattctcgacacagcaggtcaagagga

SEQ ID NO: 49801 - DNA, 40 bp, Homo sapiens
tcctcttgacctgctgtgtcgagaatatccaagagacagg

SEQ ID NO: 49802 - DNA, 40 bp, Homo sapiens
ctgtctcttggatattctcgacacagcaggtcaagaggag

SEQ ID NO: 49803 - DNA, 40 bp, Homo sapiens
ctcctcttgacctgctgtgtcgagaatatccaagagacag

SEQ ID NO: 49804 - DNA, 40 bp, Homo sapiens
tgtctcttggatattctcgacacagcaggtcaagaggagt

SEQ ID NO: 49805 - DNA, 40 bp, Homo sapiens
actcctcttgacctgctgtgtcgagaatatccaagagaca

SEQ ID NO: 49806 - DNA, 40 bp, Homo sapiens
gtctcttggatattctcgacacagcaggtcaagaggagta

SEQ ID NO: 49807 - DNA, 40 bp, Homo sapiens
tactcctcttgacctgctgtgtcgagaatatccaagagac

SEQ ID NO: 49808 - DNA, 40 bp, Homo sapiens
tctcttggatattctcgacacagcaggtcaagaggagtac

SEQ ID NO: 49809 - DNA, 40 bp, Homo sapiens
gtactcctcttgacctgctgtgtcgagaatatccaagaga

SEQ ID NO: 49810 - DNA, 40 bp, Homo sapiens
ctcttggatattctcgacacagcaggtcaagaggagtaca

SEQ ID NO: 49811 - DNA, 40 bp, Homo sapiens
tgtactcctcttgacctgctgtgtcgagaatatccaagag

SEQ ID NO: 49812 - DNA, 40 bp, Homo sapiens
tcttggatattctcgacacagcaggtcaagaggagtacag

SEQ ID NO: 49813 - DNA, 40 bp, Homo sapiens
ctgtactcctcttgacctgctgtgtcgagaatatccaaga

SEQ ID NO: 49814 - DNA, 40 bp, Homo sapiens
cttggatattctcgacacagcaggtcaagaggagtacagt

SEQ ID NO: 49815 - DNA, 40 bp, Homo sapiens
actgtactcctcttgacctgctgtgtcgagaatatccaag

SEQ ID NO: 49816 - DNA, 40 bp, Homo sapiens
ttggatattctcgacacagcaggtcaagaggagtacagtg

SEQ ID NO: 49817 - DNA, 40 bp, Homo sapiens
cactgtactcctcttgacctgctgtgtcgagaatatccaa

SEQ ID NO: 49818 - DNA, 40 bp, Homo sapiens
tggatattctcgacacagcaggtcaagaggagtacagtgc

SEQ ID NO: 49819 - DNA, 40 bp, Homo sapiens
gcactgtactcctcttgacctgctgtgtcgagaatatcca

SEQ ID NO: 49820 - DNA, 40 bp, Homo sapiens
ggatattctcgacacagcaggtcaagaggagtacagtgca

SEQ ID NO: 49821 - DNA, 40 bp, Homo sapiens
tgcactgtactcctcttgacctgctgtgtcgagaatatcc

SEQ ID NO: 49822 - DNA, 40 bp, Homo sapiens
gatattctcgacacagcaggtcaagaggagtacagtgcaa

SEQ ID NO: 49823 - DNA, 40 bp, Homo sapiens
ttgcactgtactcctcttgacctgctgtgtcgagaatatc

SEQ ID NO: 49824 - DNA, 40 bp, Homo sapiens
atattctcgacacagcaggtcaagaggagtacagtgcaat

SEQ ID NO: 49825 - DNA, 40 bp, Homo sapiens
attgcactgtactcctcttgacctgctgtgtcgagaatat

SEQ ID NO: 49826 - DNA, 40 bp, Homo sapiens
tattctcgacacagcaggtcaagaggagtacagtgcaatg

SEQ ID NO: 49827 - DNA, 40 bp, Homo sapiens
cattgcactgtactcctcttgacctgctgtgtcgagaata

SEQ ID NO: 49828 - DNA, 40 bp, Homo sapiens
attctcgacacagcaggtcaagaggagtacagtgcaatga

SEQ ID NO: 49829 - DNA, 40 bp, Homo sapiens
tcattgcactgtactcctcttgacctgctgtgtcgagaat

SEQ ID NO: 49830 - DNA, 40 bp, Homo sapiens
ttctcgacacagcaggtcaagaggagtacagtgcaatgag

SEQ ID NO: 49831 - DNA, 40 bp, Homo sapiens
ctcattgcactgtactcctcttgacctgctgtgtcgagaa

SEQ ID NO: 49832 - DNA, 40 bp, Homo sapiens
tctcgacacagcaggtcaagaggagtacagtgcaatgagg

SEQ ID NO: 49833 - DNA, 40 bp, Homo sapiens
cctcattgcactgtactcctcttgacctgctgtgtcgaga

SEQ ID NO: 49834 - DNA, 40 bp, Homo sapiens
ctcgacacagcaggtcaagaggagtacagtgcaatgaggg

SEQ ID NO: 49835 - DNA, 40 bp, Homo sapiens
ccctcattgcactgtactcctcttgacctgctgtgtcgag

SEQ ID NO: 49836 - DNA, 40 bp, Homo sapiens
tcgacacagcaggtcaagaggagtacagtgcaatgaggga

SEQ ID NO: 49837 - DNA, 40 bp, Homo sapiens
tccctcattgcactgtactcctcttgacctgctgtgtcga

SEQ ID NO: 49838 - DNA, 40 bp, Homo sapiens
cgacacagcaggtcaagaggagtacagtgcaatgagggac

SEQ ID NO: 49839 - DNA, 40 bp, Homo sapiens
gtccctcattgcactgtactcctcttgacctgctgtgtcg

SEQ ID NO: 49840 - DNA, 40 bp, Homo sapiens
gacacagcaggtcaagaggagtacagtgcaatgagggacc

SEQ ID NO: 49841 - DNA, 40 bp, Homo sapiens
ggtccctcattgcactgtactcctcttgacctgctgtgtc

SEQ ID NO: 49842 - DNA, 40 bp, Homo sapiens
acacagcaggtcaagaggagtacagtgcaatgagggacca

SEQ ID NO: 49843 - DNA, 40 bp, Homo sapiens
tggtccctcattgcactgtactcctcttgacctgctgtgt

SEQ ID NO: 49844 - DNA, 40 bp, Homo sapiens
cacagcaggtcaagaggagtacagtgcaatgagggaccag

SEQ ID NO: 49845 - DNA, 40 bp, Homo sapiens
ctggtccctcattgcactgtactcctcttgacctgctgtg

SEQ ID NO: 49846 - DNA, 40 bp, Homo sapiens
acagcaggtcaagaggagtacagtgcaatgagggaccagt

SEQ ID NO: 49847 - DNA, 40 bp, Homo sapiens
actggtccctcattgcactgtactcctcttgacctgctgt

SEQ ID NO: 49848 - DNA, 40 bp, Homo sapiens
cagcaggtcaagaggagtacagtgcaatgagggaccagta

SEQ ID NO: 49849 - DNA, 40 bp, Homo sapiens
tactggtccctcattgcactgtactcctcttgacctgctg

SEQ ID NO: 49850 - DNA, 40 bp, Homo sapiens
agcaggtcaagaggagtacagtgcaatgagggaccagtac

SEQ ID NO: 49851 - DNA, 40 bp, Homo sapiens
gtactggtccctcattgcactgtactcctcttgacctgct

SEQ ID NO: 49852 - DNA, 40 bp, Homo sapiens
gcaggtcaagaggagtacagtgcaatgagggaccagtaca

SEQ ID NO: 49853 - DNA, 40 bp, Homo sapiens
tgtactggtccctcattgcactgtactcctcttgacctgc

SEQ ID NO: 49854 - DNA, 40 bp, Homo sapiens
caggtcaagaggagtacagtgcaatgagggaccagtacat

SEQ ID NO: 49855 - DNA, 40 bp, Homo sapiens
atgtactggtccctcattgcactgtactcctcttgacctg

SEQ ID NO: 49856 - DNA, 40 bp, Homo sapiens
aggtcaagaggagtacagtgcaatgagggaccagtacatg

SEQ ID NO: 49857 - DNA, 40 bp, Homo sapiens
catgtactggtccctcattgcactgtactcctcttgacct

SEQ ID NO: 49858 - DNA, 40 bp, Homo sapiens
ggtcaagaggagtacagtgcaatgagggaccagtacatga

SEQ ID NO: 49859 - DNA, 40 bp, Homo sapiens
tcatgtactggtccctcattgcactgtactcctcttgacc

SEQ ID NO: 49860 - DNA, 40 bp, Homo sapiens
gtcaagaggagtacagtgcaatgagggaccagtacatgag

SEQ ID NO: 49861 - DNA, 40 bp, Homo sapiens
ctcatgtactggtccctcattgcactgtactcctcttgac

SEQ ID NO: 49862 - DNA, 40 bp, Homo sapiens
tcaagaggagtacagtgcaatgagggaccagtacatgagg

SEQ ID NO: 49863 - DNA, 40 bp, Homo sapiens
cctcatgtactggtccctcattgcactgtactcctcttga

SEQ ID NO: 49864 - DNA, 40 bp, Homo sapiens
caagaggagtacagtgcaatgagggaccagtacatgagga

SEQ ID NO: 49865 - DNA, 40 bp, Homo sapiens
tcctcatgtactggtccctcattgcactgtactcctcttg

SEQ ID NO: 49866 - DNA, 40 bp, Homo sapiens
aagaggagtacagtgcaatgagggaccagtacatgaggac

SEQ ID NO: 49867 - DNA, 40 bp, Homo sapiens
gtcctcatgtactggtccctcattgcactgtactcctctt

SEQ ID NO: 49868 - DNA, 40 bp, Homo sapiens
agaggagtacagtgcaatgagggaccagtacatgaggact

SEQ ID NO: 49869 - DNA, 40 bp, Homo sapiens
agtcctcatgtactggtccctcattgcactgtactcctct

SEQ ID NO: 49870 - DNA, 40 bp, Homo sapiens
gaggagtacagtgcaatgagggaccagtacatgaggactg

SEQ ID NO: 49871 - DNA, 40 bp, Homo sapiens
cagtcctcatgtactggtccctcattgcactgtactcctc

SEQ ID NO: 49872 - DNA, 40 bp, Homo sapiens
aggagtacagtgcaatgagggaccagtacatgaggactgg

SEQ ID NO: 49873 - DNA, 40 bp, Homo sapiens
ccagtcctcatgtactggtccctcattgcactgtactcct

SEQ ID NO: 49874 - DNA, 40 bp, Homo sapiens
ggagtacagtgcaatgagggaccagtacatgaggactggg

SEQ ID NO: 49875 - DNA, 40 bp, Homo sapiens
cccagtcctcatgtactggtccctcattgcactgtactcc

SEQ ID NO: 49876 - DNA, 40 bp, Homo sapiens
gagtacagtgcaatgagggaccagtacatgaggactgggg

SEQ ID NO: 49877 - DNA, 40 bp, Homo sapiens
ccccagtcctcatgtactggtccctcattgcactgtactc

SEQ ID NO: 49878 - DNA, 40 bp, Homo sapiens
agtacagtgcaatgagggaccagtacatgaggactgggga

SEQ ID NO: 49879 - DNA, 40 bp, Homo sapiens
tccccagtcctcatgtactggtccctcattgcactgtact

SEQ ID NO: 49880 - DNA, 40 bp, Homo sapiens
gtacagtgcaatgagggaccagtacatgaggactggggag

SEQ ID NO: 49881 - DNA, 40 bp, Homo sapiens
ctccccagtcctcatgtactggtccctcattgcactgtac

SEQ ID NO: 49882 - DNA, 40 bp, Homo sapiens
tacagtgcaatgagggaccagtacatgaggactggggagg

SEQ ID NO: 49883 - DNA, 40 bp, Homo sapiens
cctccccagtcctcatgtactggtccctcattgcactgta

SEQ ID NO: 49884 - DNA, 40 bp, Homo sapiens
acagtgcaatgagggaccagtacatgaggactggggaggg

SEQ ID NO: 49885 - DNA, 40 bp, Homo sapiens
ccctccccagtcctcatgtactggtccctcattgcactgt

SEQ ID NO: 49886 - DNA, 40 bp, Homo sapiens
cagtgcaatgagggaccagtacatgaggactggggagggc

SEQ ID NO: 49887 - DNA, 40 bp, Homo sapiens
gccctccccagtcctcatgtactggtccctcattgcactg

SEQ ID NO: 49888 - DNA, 40 bp, Homo sapiens
agtgcaatgagggaccagtacatgaggactggggagggct

SEQ ID NO: 49889 - DNA, 40 bp, Homo sapiens
agccctccccagtcctcatgtactggtccctcattgcact

SEQ ID NO: 49890 - DNA, 40 bp, Homo sapiens
gtgcaatgagggaccagtacatgaggactggggagggctt

SEQ ID NO: 49891 - DNA, 40 bp, Homo sapiens
aagccctccccagtcctcatgtactggtccctcattgcac

SEQ ID NO: 49892 - DNA, 40 bp, Homo sapiens
tgcaatgagggaccagtacatgaggactggggagggcttt

SEQ ID NO: 49893 - DNA, 40 bp, Homo sapiens
aaagccctccccagtcctcatgtactggtccctcattgca

SEQ ID NO: 49894 - DNA, 40 bp, Homo sapiens
gcaatgagggaccagtacatgaggactggggagggctttc

SEQ ID NO: 49895 - DNA, 40 bp, Homo sapiens
gaaagccctccccagtcctcatgtactggtccctcattgc

SEQ ID NO: 49896 - DNA, 40 bp, Homo sapiens
caatgagggaccagtacatgaggactggggagggctttct

SEQ ID NO: 49897 - DNA, 40 bp, Homo sapiens
agaaagccctccccagtcctcatgtactggtccctcattg

SEQ ID NO: 49898 - DNA, 40 bp, Homo sapiens
aatgagggaccagtacatgaggactggggagggctttctt

SEQ ID NO: 49899 - DNA, 40 bp, Homo sapiens
aagaaagccctccccagtcctcatgtactggtccctcatt

SEQ ID NO: 49900 - DNA, 40 bp, Homo sapiens
atgagggaccagtacatgaggactggggagggctttcttt

SEQ ID NO: 49901 - DNA, 40 bp, Homo sapiens
aaagaaagccctccccagtcctcatgtactggtccctcat

SEQ ID NO: 49902 - DNA, 40 bp, Homo sapiens
tgagggaccagtacatgaggactggggagggctttctttg

SEQ ID NO: 49903 - DNA, 40 bp, Homo sapiens
caaagaaagccctccccagtcctcatgtactggtccctca

SEQ ID NO: 49904 - DNA, 40 bp, Homo sapiens
gagggaccagtacatgaggactggggagggctttctttgt

SEQ ID NO: 49905 - DNA, 40 bp, Homo sapiens
acaaagaaagccctccccagtcctcatgtactggtccctc

SEQ ID NO: 49906 - DNA, 40 bp, Homo sapiens
agggaccagtacatgaggactggggagggctttctttgtg

SEQ ID NO: 49907 - DNA, 40 bp, Homo sapiens
cacaaagaaagccctccccagtcctcatgtactggtccct

SEQ ID NO: 49908 - DNA, 40 bp, Homo sapiens
gggaccagtacatgaggactggggagggctttctttgtgt

SEQ ID NO: 49909 - DNA, 40 bp, Homo sapiens
acacaaagaaagccctccccagtcctcatgtactggtccc

SEQ ID NO: 49910 - DNA, 40 bp, Homo sapiens
ggaccagtacatgaggactggggagggctttctttgtgta

SEQ ID NO: 49911 - DNA, 40 bp, Homo sapiens
tacacaaagaaagccctccccagtcctcatgtactggtcc

SEQ ID NO: 49912 - DNA, 40 bp, Homo sapiens
gaccagtacatgaggactggggagggctttctttgtgtat

SEQ ID NO: 49913 - DNA, 40 bp, Homo sapiens
atacacaaagaaagccctccccagtcctcatgtactggtc

SEQ ID NO: 49914 - DNA, 40 bp, Homo sapiens
accagtacatgaggactggggagggctttctttgtgtatt

SEQ ID NO: 49915 - DNA, 40 bp, Homo sapiens
aatacacaaagaaagccctccccagtcctcatgtactggt

SEQ ID NO: 49916 - DNA, 40 bp, Homo sapiens
ccagtacatgaggactggggagggctttctttgtgtattt

SEQ ID NO: 49917 - DNA, 40 bp, Homo sapiens
aaatacacaaagaaagccctccccagtcctcatgtactgg

SEQ ID NO: 49918 - DNA, 40 bp, Homo sapiens
cagtacatgaggactggggagggctttctttgtgtatttg

SEQ ID NO: 49919 - DNA, 40 bp, Homo sapiens
caaatacacaaagaaagccctccccagtcctcatgtactg

SEQ ID NO: 49920 - DNA, 40 bp, Homo sapiens
agtacatgaggactggggagggctttctttgtgtatttgc

SEQ ID NO: 49921 - DNA, 40 bp, Homo sapiens
gcaaatacacaaagaaagccctccccagtcctcatgtact

SEQ ID NO: 49922 - DNA, 40 bp, Homo sapiens
gtacatgaggactggggagggctttctttgtgtatttgcc

SEQ ID NO: 49923 - DNA, 40 bp, Homo sapiens
ggcaaatacacaaagaaagccctccccagtcctcatgtac

SEQ ID NO: 49924 - DNA, 40 bp, Homo sapiens
tacatgaggactggggagggctttctttgtgtatttgcca

SEQ ID NO: 49925 - DNA, 40 bp, Homo sapiens
tggcaaatacacaaagaaagccctccccagtcctcatgta

SEQ ID NO: 49926 - DNA, 40 bp, Homo sapiens
acatgaggactggggagggctttctttgtgtatttgccat

SEQ ID NO: 49927 - DNA, 40 bp, Homo sapiens
atggcaaatacacaaagaaagccctccccagtcctcatgt

SEQ ID NO: 49928 - DNA, 40 bp, Homo sapiens
catgaggactggggagggctttctttgtgtatttgccata

SEQ ID NO: 49929 - DNA, 40 bp, Homo sapiens
tatggcaaatacacaaagaaagccctccccagtcctcatg

SEQ ID NO: 49930 - DNA, 40 bp, Homo sapiens
atgaggactggggagggctttctttgtgtatttgccataa

SEQ ID NO: 49931 - DNA, 40 bp, Homo sapiens
ttatggcaaatacacaaagaaagccctccccagtcctcat

SEQ ID NO: 49932 - DNA, 40 bp, Homo sapiens
tgaggactggggagggctttctttgtgtatttgccataaa

SEQ ID NO: 49933 - DNA, 40 bp, Homo sapiens
tttatggcaaatacacaaagaaagccctccccagtcctca

SEQ ID NO: 49934 - DNA, 40 bp, Homo sapiens
gaggactggggagggctttctttgtgtatttgccataaat

SEQ ID NO: 49935 - DNA, 40 bp, Homo sapiens
atttatggcaaatacacaaagaaagccctccccagtcctc

SEQ ID NO: 49936 - DNA, 40 bp, Homo sapiens
aggactggggagggctttctttgtgtatttgccataaata

SEQ ID NO: 49937 - DNA, 40 bp, Homo sapiens
tatttatggcaaatacacaaagaaagccctccccagtcct

SEQ ID NO: 49938 - DNA, 40 bp, Homo sapiens
ggactggggagggctttctttgtgtatttgccataaataa

SEQ ID NO: 49939 - DNA, 40 bp, Homo sapiens
ttatttatggcaaatacacaaagaaagccctccccagtcc

SEQ ID NO: 49940 - DNA, 40 bp, Homo sapiens
gactggggagggctttctttgtgtatttgccataaataat

SEQ ID NO: 49941 - DNA, 40 bp, Homo sapiens
attatttatggcaaatacacaaagaaagccctccccagtc

SEQ ID NO: 49942 - DNA, 40 bp, Homo sapiens
actggggagggctttctttgtgtatttgccataaataata

SEQ ID NO: 49943 - DNA, 40 bp, Homo sapiens
tattatttatggcaaatacacaaagaaagccctccccagt

SEQ ID NO: 49944 - DNA, 40 bp, Homo sapiens
ctggggagggctttctttgtgtatttgccataaataatac

SEQ ID NO: 49945 - DNA, 40 bp, Homo sapiens
gtattatttatggcaaatacacaaagaaagccctccccag

SEQ ID NO: 49946 - DNA, 40 bp, Homo sapiens
tggggagggctttctttgtgtatttgccataaataatact

SEQ ID NO: 49947 - DNA, 40 bp, Homo sapiens
agtattatttatggcaaatacacaaagaaagccctcccca

SEQ ID NO: 49948 - DNA, 40 bp, Homo sapiens
ggggagggctttctttgtgtatttgccataaataatacta

SEQ ID NO: 49949 - DNA, 40 bp, Homo sapiens
tagtattatttatggcaaatacacaaagaaagccctcccc

SEQ ID NO: 49950 - DNA, 40 bp, Homo sapiens
gggagggctttctttgtgtatttgccataaataatactaa

SEQ ID NO: 49951 - DNA, 40 bp, Homo sapiens
ttagtattatttatggcaaatacacaaagaaagccctccc

SEQ ID NO: 49952 - DNA, 40 bp, Homo sapiens
ggagggctttctttgtgtatttgccataaataatactaaa

SEQ ID NO: 49953 - DNA, 40 bp, Homo sapiens
tttagtattatttatggcaaatacacaaagaaagccctcc

SEQ ID NO: 49954 - DNA, 40 bp, Homo sapiens
gagggctttctttgtgtatttgccataaataatactaaat

SEQ ID NO: 49955 - DNA, 40 bp, Homo sapiens
atttagtattatttatggcaaatacacaaagaaagccctc

SEQ ID NO: 49956 - DNA, 40 bp, Homo sapiens
agggctttctttgtgtatttgccataaataatactaaatc

SEQ ID NO: 49957 - DNA, 40 bp, Homo sapiens
gatttagtattatttatggcaaatacacaaagaaagccct

SEQ ID NO: 49958 - DNA, 40 bp, Homo sapiens
gggctttctttgtgtatttgccataaataatactaaatca

SEQ ID NO: 49959 - DNA, 40 bp, Homo sapiens
tgatttagtattatttatggcaaatacacaaagaaagccc

SEQ ID NO: 49960 - DNA, 40 bp, Homo sapiens
ggctttctttgtgtatttgccataaataatactaaatcat

SEQ ID NO: 49961 - DNA, 40 bp, Homo sapiens
atgatttagtattatttatggcaaatacacaaagaaagcc

SEQ ID NO: 49962 - DNA, 40 bp, Homo sapiens
gctttctttgtgtatttgccataaataatactaaatcatt

SEQ ID NO: 49963 - DNA, 40 bp, Homo sapiens
aatgatttagtattatttatggcaaatacacaaagaaagc

SEQ ID NO: 49964 - DNA, 40 bp, Homo sapiens
ctttctttgtgtatttgccataaataatactaaatcattt

SEQ ID NO: 49965 - DNA, 40 bp, Homo sapiens
aaatgatttagtattatttatggcaaatacacaaagaaag

SEQ ID NO: 49966 - DNA, 40 bp, Homo sapiens
tttctttgtgtatttgccataaataatactaaatcatttg

SEQ ID NO: 49967 - DNA, 40 bp, Homo sapiens
caaatgatttagtattatttatggcaaatacacaaagaaa

SEQ ID NO: 49968 - DNA, 40 bp, Homo sapiens
ttctttgtgtatttgccataaataatactaaatcatttga

SEQ ID NO: 49969 - DNA, 40 bp, Homo sapiens
tcaaatgatttagtattatttatggcaaatacacaaagaa

SEQ ID NO: 49970 - DNA, 40 bp, Homo sapiens
tctttgtgtatttgccataaataatactaaatcatttgaa

SEQ ID NO: 49971 - DNA, 40 bp, Homo sapiens
ttcaaatgatttagtattatttatggcaaatacacaaaga

SEQ ID NO: 49972 - DNA, 40 bp, Homo sapiens
ctttgtgtatttgccataaataatactaaatcatttgaag

SEQ ID NO: 49973 - DNA, 40 bp, Homo sapiens
cttcaaatgatttagtattatttatggcaaatacacaaag

SEQ ID NO: 49974 - DNA, 40 bp, Homo sapiens
tttgtgtatttgccataaataatactaaatcatttgaaga

SEQ ID NO: 49975 - DNA, 40 bp, Homo sapiens
tcttcaaatgatttagtattatttatggcaaatacacaaa

SEQ ID NO: 49976 - DNA, 40 bp, Homo sapiens
ttgtgtatttgccataaataatactaaatcatttgaagat

SEQ ID NO: 49977 - DNA, 40 bp, Homo sapiens
atcttcaaatgatttagtattatttatggcaaatacacaa

SEQ ID NO: 49978 - DNA, 40 bp, Homo sapiens
tgtgtatttgccataaataatactaaatcatttgaagata

SEQ ID NO: 49979 - DNA, 40 bp, Homo sapiens
tatcttcaaatgatttagtattatttatggcaaatacaca

SEQ ID NO: 49980 - DNA, 40 bp, Homo sapiens
gtgtatttgccataaataatactaaatcatttgaagatat

SEQ ID NO: 49981 - DNA, 40 bp, Homo sapiens
atatcttcaaatgatttagtattatttatggcaaatacac

SEQ ID NO: 49982 - DNA, 40 bp, Homo sapiens
tgtatttgccataaataatactaaatcatttgaagatatt

SEQ ID NO: 49983 - DNA, 40 bp, Homo sapiens
aatatcttcaaatgatttagtattatttatggcaaataca

SEQ ID NO: 49984 - DNA, 40 bp, Homo sapiens
gtatttgccataaataatactaaatcatttgaagatattc

SEQ ID NO: 49985 - DNA, 40 bp, Homo sapiens
gaatatcttcaaatgatttagtattatttatggcaaatac

SEQ ID NO: 49986 - DNA, 40 bp, Homo sapiens
tatttgccataaataatactaaatcatttgaagatattca

SEQ ID NO: 49987 - DNA, 40 bp, Homo sapiens
tgaatatcttcaaatgatttagtattatttatggcaaata

SEQ ID NO: 49988 - DNA, 40 bp, Homo sapiens
atttgccataaataatactaaatcatttgaagatattcac

SEQ ID NO: 49989 - DNA, 40 bp, Homo sapiens
gtgaatatcttcaaatgatttagtattatttatggcaaat

SEQ ID NO: 49990 - DNA, 40 bp, Homo sapiens
tttgccataaataatactaaatcatttgaagatattcacc

SEQ ID NO: 49991 - DNA, 40 bp, Homo sapiens
ggtgaatatcttcaaatgatttagtattatttatggcaaa

SEQ ID NO: 49992 - DNA, 40 bp, Homo sapiens
ttgccataaataatactaaatcatttgaagatattcacca

SEQ ID NO: 49993 - DNA, 40 bp, Homo sapiens
tggtgaatatcttcaaatgatttagtattatttatggcaa

SEQ ID NO: 49994 - DNA, 40 bp, Homo sapiens
tgccataaataatactaaatcatttgaagatattcaccat

SEQ ID NO: 49995 - DNA, 40 bp, Homo sapiens
atggtgaatatcttcaaatgatttagtattatttatggca

SEQ ID NO: 49996 - DNA, 40 bp, Homo sapiens
gccataaataatactaaatcatttgaagatattcaccatt

SEQ ID NO: 49997 - DNA, 40 bp, Homo sapiens
aatggtgaatatcttcaaatgatttagtattatttatggc

SEQ ID NO: 49998 - DNA, 40 bp, Homo sapiens
ccataaataatactaaatcatttgaagatattcaccatta

SEQ ID NO: 49999 - DNA, 40 bp, Homo sapiens
taatggtgaatatcttcaaatgatttagtattatttatgg

SEQ ID NO: 50000 - DNA, 40 bp, Homo sapiens
cataaataatactaaatcatttgaagatattcaccattat

SEQ ID NO: 50001 - DNA, 40 bp, Homo sapiens
ataatggtgaatatcttcaaatgatttagtattatttatg

SEQ ID NO: 50002 - DNA, 40 bp, Homo sapiens
ataaataatactaaatcatttgaagatattcaccattata

SEQ ID NO: 50003 - DNA, 40 bp, Homo sapiens
tataatggtgaatatcttcaaatgatttagtattatttat

SEQ ID NO: 50004 - DNA, 40 bp, Homo sapiens
taaataatactaaatcatttgaagatattcaccattatag

SEQ ID NO: 50005 - DNA, 40 bp, Homo sapiens
ctataatggtgaatatcttcaaatgatttagtattattta

SEQ ID NO: 50006 - DNA, 40 bp, Homo sapiens
aaataatactaaatcatttgaagatattcaccattatagg

SEQ ID NO: 50007 - DNA, 40 bp, Homo sapiens
cctataatggtgaatatcttcaaatgatttagtattattt

SEQ ID NO: 50008 - DNA, 40 bp, Homo sapiens
aataatactaaatcatttgaagatattcaccattataggt

SEQ ID NO: 50009 - DNA, 40 bp, Homo sapiens
acctataatggtgaatatcttcaaatgatttagtattatt

SEQ ID NO: 50010 - DNA, 40 bp, Homo sapiens
ataatactaaatcatttgaagatattcaccattataggtg

SEQ ID NO: 50011 - DNA, 40 bp, Homo sapiens
cacctataatggtgaatatcttcaaatgatttagtattat

SEQ ID NO: 50012 - DNA, 40 bp, Homo sapiens
taatactaaatcatttgaagatattcaccattataggtgg

SEQ ID NO: 50013 - DNA, 40 bp, Homo sapiens
ccacctataatggtgaatatcttcaaatgatttagtatta

SEQ ID NO: 50014 - DNA, 40 bp, Homo sapiens
aatactaaatcatttgaagatattcaccattataggtggg

SEQ ID NO: 50015 - DNA, 40 bp, Homo sapiens
cccacctataatggtgaatatcttcaaatgatttagtatt

SEQ ID NO: 50016 - DNA, 40 bp, Homo sapiens
atactaaatcatttgaagatattcaccattataggtgggt

SEQ ID NO: 50017 - DNA, 40 bp, Homo sapiens
acccacctataatggtgaatatcttcaaatgatttagtat

SEQ ID NO: 50018 - DNA, 40 bp, Homo sapiens
tactaaatcatttgaagatattcaccattataggtgggtt

SEQ ID NO: 50019 - DNA, 40 bp, Homo sapiens
aacccacctataatggtgaatatcttcaaatgatttagta

SEQ ID NO: 50020 - DNA, 40 bp, Homo sapiens
actaaatcatttgaagatattcaccattataggtgggttt

SEQ ID NO: 50021 - DNA, 40 bp, Homo sapiens
aaacccacctataatggtgaatatcttcaaatgatttagt

SEQ ID NO: 50022 - DNA, 40 bp, Homo sapiens
ctaaatcatttgaagatattcaccattataggtgggttta

SEQ ID NO: 50023 - DNA, 40 bp, Homo sapiens
taaacccacctataatggtgaatatcttcaaatgatttag

SEQ ID NO: 50024 - DNA, 40 bp, Homo sapiens
taaatcatttgaagatattcaccattataggtgggtttaa

SEQ ID NO: 50025 - DNA, 40 bp, Homo sapiens
ttaaacccacctataatggtgaatatcttcaaatgattta

SEQ ID NO: 50026 - DNA, 40 bp, Homo sapiens
aaatcatttgaagatattcaccattataggtgggtttaaa

SEQ ID NO: 50027 - DNA, 40 bp, Homo sapiens
tttaaacccacctataatggtgaatatcttcaaatgattt

SEQ ID NO: 50028 - DNA, 40 bp, Homo sapiens
aatcatttgaagatattcaccattataggtgggtttaaat

SEQ ID NO: 50029 - DNA, 40 bp, Homo sapiens
atttaaacccacctataatggtgaatatcttcaaatgatt

SEQ ID NO: 50030 - DNA, 40 bp, Homo sapiens
atcatttgaagatattcaccattataggtgggtttaaatt

SEQ ID NO: 50031 - DNA, 40 bp, Homo sapiens
aatttaaacccacctataatggtgaatatcttcaaatgat

SEQ ID NO: 50032 - DNA, 40 bp, Homo sapiens
tcatttgaagatattcaccattataggtgggtttaaattg

SEQ ID NO: 50033 - DNA, 40 bp, Homo sapiens
caatttaaacccacctataatggtgaatatcttcaaatga

SEQ ID NO: 50034 - DNA, 40 bp, Homo sapiens
catttgaagatattcaccattataggtgggtttaaattga

SEQ ID NO: 50035 - DNA, 40 bp, Homo sapiens
tcaatttaaacccacctataatggtgaatatcttcaaatg

SEQ ID NO: 50036 - DNA, 40 bp, Homo sapiens
atttgaagatattcaccattataggtgggtttaaattgaa

SEQ ID NO: 50037 - DNA, 40 bp, Homo sapiens
ttcaatttaaacccacctataatggtgaatatcttcaaat

SEQ ID NO: 50038 - DNA, 40 bp, Homo sapiens
tttgaagatattcaccattataggtgggtttaaattgaat

SEQ ID NO: 50039 - DNA, 40 bp, Homo sapiens
attcaatttaaacccacctataatggtgaatatcttcaaa

SEQ ID NO: 50040 - DNA, 40 bp, Homo sapiens
ttgaagatattcaccattataggtgggtttaaattgaata

SEQ ID NO: 50041 - DNA, 40 bp, Homo sapiens
tattcaatttaaacccacctataatggtgaatatcttcaa

SEQ ID NO: 50042 - DNA, 40 bp, Homo sapiens
tgaagatattcaccattataggtgggtttaaattgaatat

SEQ ID NO: 50043 - DNA, 40 bp, Homo sapiens
atattcaatttaaacccacctataatggtgaatatcttca

SEQ ID NO: 50044 - DNA, 40 bp, Homo sapiens
gaagatattcaccattataggtgggtttaaattgaatata

SEQ ID NO: 50045 - DNA, 40 bp, Homo sapiens
tatattcaatttaaacccacctataatggtgaatatcttc

SEQ ID NO: 50046 - DNA, 40 bp, Homo sapiens
aagatattcaccattataggtgggtttaaattgaatataa

SEQ ID NO: 50047 - DNA, 40 bp, Homo sapiens
ttatattcaatttaaacccacctataatggtgaatatctt

SEQ ID NO: 50048 - DNA, 40 bp, Homo sapiens
agatattcaccattataggtgggtttaaattgaatataat

SEQ ID NO: 50049 - DNA, 40 bp, Homo sapiens
attatattcaatttaaacccacctataatggtgaatatct

SEQ ID NO: 50050 - DNA, 40 bp, Homo sapiens
gatattcaccattataggtgggtttaaattgaatataata

SEQ ID NO: 50051 - DNA, 40 bp, Homo sapiens
tattatattcaatttaaacccacctataatggtgaatatc

SEQ ID NO: 50052 - DNA, 40 bp, Homo sapiens
atattcaccattataggtgggtttaaattgaatataataa

SEQ ID NO: 50053 - DNA, 40 bp, Homo sapiens
ttattatattcaatttaaacccacctataatggtgaatat

SEQ ID NO: 50054 - DNA, 40 bp, Homo sapiens
tattcaccattataggtgggtttaaattgaatataataag

SEQ ID NO: 50055 - DNA, 40 bp, Homo sapiens
cttattatattcaatttaaacccacctataatggtgaata

SEQ ID NO: 50056 - DNA, 40 bp, Homo sapiens
attcaccattataggtgggtttaaattgaatataataagc

SEQ ID NO: 50057 - DNA, 40 bp, Homo sapiens
gcttattatattcaatttaaacccacctataatggtgaat

SEQ ID NO: 50058 - DNA, 40 bp, Homo sapiens
ttcaccattataggtgggtttaaattgaatataataagct

SEQ ID NO: 50059 - DNA, 40 bp, Homo sapiens
agcttattatattcaatttaaacccacctataatggtgaa

SEQ ID NO: 50060 - DNA, 40 bp, Homo sapiens
tcaccattataggtgggtttaaattgaatataataagctg

SEQ ID NO: 50061 - DNA, 40 bp, Homo sapiens
cagcttattatattcaatttaaacccacctataatggtga

SEQ ID NO: 50062 - DNA, 40 bp, Homo sapiens
caccattataggtgggtttaaattgaatataataagctga

SEQ ID NO: 50063 - DNA, 40 bp, Homo sapiens
tcagcttattatattcaatttaaacccacctataatggtg

SEQ ID NO: 50064 - DNA, 40 bp, Homo sapiens
accattataggtgggtttaaattgaatataataagctgac

SEQ ID NO: 50065 - DNA, 40 bp, Homo sapiens
gtcagcttattatattcaatttaaacccacctataatggt

SEQ ID NO: 50066 - DNA, 40 bp, Homo sapiens
ccattataggtgggtttaaattgaatataataagctgaca

SEQ ID NO: 50067 - DNA, 40 bp, Homo sapiens
tgtcagcttattatattcaatttaaacccacctataatgg

SEQ ID NO: 50068 - DNA, 40 bp, Homo sapiens
cattataggtgggtttaaattgaatataataagctgacat

SEQ ID NO: 50069 - DNA, 40 bp, Homo sapiens
atgtcagcttattatattcaatttaaacccacctataatg

SEQ ID NO: 50070 - DNA, 40 bp, Homo sapiens
attataggtgggtttaaattgaatataataagctgacatt

SEQ ID NO: 50071 - DNA, 40 bp, Homo sapiens
aatgtcagcttattatattcaatttaaacccacctataat

SEQ ID NO: 50072 - DNA, 40 bp, Homo sapiens
ttataggtgggtttaaattgaatataataagctgacatta

SEQ ID NO: 50073 - DNA, 40 bp, Homo sapiens
taatgtcagcttattatattcaatttaaacccacctataa

SEQ ID NO: 50074 - DNA, 40 bp, Homo sapiens
tataggtgggtttaaattgaatataataagctgacattaa

SEQ ID NO: 50075 - DNA, 40 bp, Homo sapiens
ttaatgtcagcttattatattcaatttaaacccacctata

SEQ ID NO: 50076 - DNA, 40 bp, Homo sapiens
ataggtgggtttaaattgaatataataagctgacattaag

SEQ ID NO: 50077 - DNA, 40 bp, Homo sapiens
cttaatgtcagcttattatattcaatttaaacccacctat

SEQ ID NO: 50078 - DNA, 40 bp, Homo sapiens
taggtgggtttaaattgaatataataagctgacattaagg

SEQ ID NO: 50079 - DNA, 40 bp, Homo sapiens
ccttaatgtcagcttattatattcaatttaaacccaccta

SEQ ID NO: 50080 - DNA, 40 bp, Homo sapiens
aggtgggtttaaattgaatataataagctgacattaagga

SEQ ID NO: 50081 - DNA, 40 bp, Homo sapiens
tccttaatgtcagcttattatattcaatttaaacccacct

SEQ ID NO: 50082 - DNA, 40 bp, Homo sapiens
ggtgggtttaaattgaatataataagctgacattaaggag

SEQ ID NO: 50083 - DNA, 40 bp, Homo sapiens
ctccttaatgtcagcttattatattcaatttaaacccacc

SEQ ID NO: 50084 - DNA, 40 bp, Homo sapiens
gtgggtttaaattgaatataataagctgacattaaggagt

SEQ ID NO: 50085 - DNA, 40 bp, Homo sapiens
actccttaatgtcagcttattatattcaatttaaacccac

SEQ ID NO: 50086 - DNA, 40 bp, Homo sapiens
tgggtttaaattgaatataataagctgacattaaggagta

SEQ ID NO: 50087 - DNA, 40 bp, Homo sapiens
tactccttaatgtcagcttattatattcaatttaaaccca

SEQ ID NO: 50088 - DNA, 40 bp, Homo sapiens
gggtttaaattgaatataataagctgacattaaggagtaa

SEQ ID NO: 50089 - DNA, 40 bp, Homo sapiens
ttactccttaatgtcagcttattatattcaatttaaaccc

SEQ ID NO: 50090 - DNA, 40 bp, Homo sapiens
ggtttaaattgaatataataagctgacattaaggagtaat

SEQ ID NO: 50091 - DNA, 40 bp, Homo sapiens
attactccttaatgtcagcttattatattcaatttaaacc

SEQ ID NO: 50092 - DNA, 40 bp, Homo sapiens
gtttaaattgaatataataagctgacattaaggagtaatt

SEQ ID NO: 50093 - DNA, 40 bp, Homo sapiens
aattactccttaatgtcagcttattatattcaatttaaac

SEQ ID NO: 50094 - DNA, 40 bp, Homo sapiens
tttaaattgaatataataagctgacattaaggagtaatta

SEQ ID NO: 50095 - DNA, 40 bp, Homo sapiens
taattactccttaatgtcagcttattatattcaatttaaa

SEQ ID NO: 50096 - DNA, 40 bp, Homo sapiens
ttaaattgaatataataagctgacattaaggagtaattat

SEQ ID NO: 50097 - DNA, 40 bp, Homo sapiens
ataattactccttaatgtcagcttattatattcaatttaa

SEQ ID NO: 50098 - DNA, 40 bp, Homo sapiens
taaattgaatataataagctgacattaaggagtaattata

SEQ ID NO: 50099 - DNA, 40 bp, Homo sapiens
tataattactccttaatgtcagcttattatattcaattta

SEQ ID NO: 50100 - DNA, 40 bp, Homo sapiens
aaattgaatataataagctgacattaaggagtaattatag

SEQ ID NO: 50101 - DNA, 40 bp, Homo sapiens
ctataattactccttaatgtcagcttattatattcaattt

SEQ ID NO: 50102 - DNA, 40 bp, Homo sapiens
aattgaatataataagctgacattaaggagtaattatagt

SEQ ID NO: 50103 - DNA, 40 bp, Homo sapiens
actataattactccttaatgtcagcttattatattcaatt

SEQ ID NO: 50104 - DNA, 40 bp, Homo sapiens
attgaatataataagctgacattaaggagtaattatagtt

SEQ ID NO: 50105 - DNA, 40 bp, Homo sapiens
aactataattactccttaatgtcagcttattatattcaat

SEQ ID NO: 50106 - DNA, 40 bp, Homo sapiens
ttgaatataataagctgacattaaggagtaattatagttt

SEQ ID NO: 50107 - DNA, 40 bp, Homo sapiens
aaactataattactccttaatgtcagcttattatattcaa

SEQ ID NO: 50108 - DNA, 40 bp, Homo sapiens
tgaatataataagctgacattaaggagtaattatagtttt

SEQ ID NO: 50109 - DNA, 40 bp, Homo sapiens
aaaactataattactccttaatgtcagcttattatattca

SEQ ID NO: 50110 - DNA, 40 bp, Homo sapiens
gaatataataagctgacattaaggagtaattatagttttt

SEQ ID NO: 50111 - DNA, 40 bp, Homo sapiens
aaaaactataattactccttaatgtcagcttattatattc

SEQ ID NO: 50112 - DNA, 40 bp, Homo sapiens
aatataataagctgacattaaggagtaattatagttttta

SEQ ID NO: 50113 - DNA, 40 bp, Homo sapiens
taaaaactataattactccttaatgtcagcttattatatt

SEQ ID NO: 50114 - DNA, 40 bp, Homo sapiens
atataataagctgacattaaggagtaattatagtttttat

SEQ ID NO: 50115 - DNA, 40 bp, Homo sapiens
ataaaaactataattactccttaatgtcagcttattatat

SEQ ID NO: 50116 - DNA, 40 bp, Homo sapiens
tataataagctgacattaaggagtaattatagtttttatt

SEQ ID NO: 50117 - DNA, 40 bp, Homo sapiens
aataaaaactataattactccttaatgtcagcttattata

SEQ ID NO: 50118 - DNA, 40 bp, Homo sapiens
ataataagctgacattaaggagtaattatagtttttattt

SEQ ID NO: 50119 - DNA, 40 bp, Homo sapiens
aaataaaaactataattactccttaatgtcagcttattat

SEQ ID NO: 50120 - DNA, 40 bp, Homo sapiens
taataagctgacattaaggagtaattatagtttttatttt

SEQ ID NO: 50121 - DNA, 40 bp, Homo sapiens
aaaataaaaactataattactccttaatgtcagcttatta

SEQ ID NO: 50122 - DNA, 40 bp, Homo sapiens
aataagctgacattaaggagtaattatagtttttattttt

SEQ ID NO: 50123 - DNA, 40 bp, Homo sapiens
aaaaataaaaactataattactccttaatgtcagcttatt

SEQ ID NO: 50124 - DNA, 40 bp, Homo sapiens
ataagctgacattaaggagtaattatagtttttatttttt

SEQ ID NO: 50125 - DNA, 40 bp, Homo sapiens
aaaaaataaaaactataattactccttaatgtcagcttat

SEQ ID NO: 50126 - DNA, 40 bp, Homo sapiens
taagctgacattaaggagtaattatagtttttattttttg

SEQ ID NO: 50127 - DNA, 40 bp, Homo sapiens
caaaaaataaaaactataattactccttaatgtcagctta

SEQ ID NO: 50128 - DNA, 40 bp, Homo sapiens
aagctgacattaaggagtaattatagtttttattttttga

SEQ ID NO: 50129 - DNA, 40 bp, Homo sapiens
tcaaaaaataaaaactataattactccttaatgtcagctt

SEQ ID NO: 50130 - DNA, 40 bp, Homo sapiens
agctgacattaaggagtaattatagtttttattttttgag

SEQ ID NO: 50131 - DNA, 40 bp, Homo sapiens
ctcaaaaaataaaaactataattactccttaatgtcagct

SEQ ID NO: 50132 - DNA, 40 bp, Homo sapiens
gctgacattaaggagtaattatagtttttattttttgagt

SEQ ID NO: 50133 - DNA, 40 bp, Homo sapiens
actcaaaaaataaaaactataattactccttaatgtcagc

SEQ ID NO: 50134 - DNA, 40 bp, Homo sapiens
ctgacattaaggagtaattatagtttttattttttgagtc

SEQ ID NO: 50135 - DNA, 40 bp, Homo sapiens
gactcaaaaaataaaaactataattactccttaatgtcag

SEQ ID NO: 50136 - DNA, 40 bp, Homo sapiens
tgacattaaggagtaattatagtttttattttttgagtct

SEQ ID NO: 50137 - DNA, 40 bp, Homo sapiens
agactcaaaaaataaaaactataattactccttaatgtca

SEQ ID NO: 50138 - DNA, 40 bp, Homo sapiens
gacattaaggagtaattatagtttttattttttgagtctt

SEQ ID NO: 50139 - DNA, 40 bp, Homo sapiens
aagactcaaaaaataaaaactataattactccttaatgtc

SEQ ID NO: 50140 - DNA, 40 bp, Homo sapiens
acattaaggagtaattatagtttttattttttgagtcttt

SEQ ID NO: 50141 - DNA, 40 bp, Homo sapiens
aaagactcaaaaaataaaaactataattactccttaatgt

SEQ ID NO: 50142 - DNA, 40 bp, Homo sapiens
cattaaggagtaattatagtttttattttttgagtctttg

SEQ ID NO: 50143 - DNA, 40 bp, Homo sapiens
caaagactcaaaaaataaaaactataattactccttaatg

SEQ ID NO: 50144 - DNA, 40 bp, Homo sapiens
attaaggagtaattatagtttttattttttgagtctttgc

SEQ ID NO: 50145 - DNA, 40 bp, Homo sapiens
gcaaagactcaaaaaataaaaactataattactccttaat

SEQ ID NO: 50146 - DNA, 40 bp, Homo sapiens
ttaaggagtaattatagtttttattttttgagtctttgct

SEQ ID NO: 50147 - DNA, 40 bp, Homo sapiens
agcaaagactcaaaaaataaaaactataattactccttaa

SEQ ID NO: 50148 - DNA, 40 bp, Homo sapiens
taaggagtaattatagtttttattttttgagtctttgcta

SEQ ID NO: 50149 - DNA, 40 bp, Homo sapiens
tagcaaagactcaaaaaataaaaactataattactcctta

SEQ ID NO: 50150 - DNA, 40 bp, Homo sapiens
aaggagtaattatagtttttattttttgagtctttgctaa

SEQ ID NO: 50151 - DNA, 40 bp, Homo sapiens
ttagcaaagactcaaaaaataaaaactataattactcctt

SEQ ID NO: 50152 - DNA, 40 bp, Homo sapiens
aggagtaattatagtttttattttttgagtctttgctaat

SEQ ID NO: 50153 - DNA, 40 bp, Homo sapiens
attagcaaagactcaaaaaataaaaactataattactcct

SEQ ID NO: 50154 - DNA, 40 bp, Homo sapiens
ggagtaattatagtttttattttttgagtctttgctaatg

SEQ ID NO: 50155 - DNA, 40 bp, Homo sapiens
cattagcaaagactcaaaaaataaaaactataattactcc

SEQ ID NO: 50156 - DNA, 40 bp, Homo sapiens
gagtaattatagtttttattttttgagtctttgctaatgc

SEQ ID NO: 50157 - DNA, 40 bp, Homo sapiens
gcattagcaaagactcaaaaaataaaaactataattactc

SEQ ID NO: 50158 - DNA, 40 bp, Homo sapiens
agtaattatagtttttattttttgagtctttgctaatgcc

SEQ ID NO: 50159 - DNA, 40 bp, Homo sapiens
ggcattagcaaagactcaaaaaataaaaactataattact

SEQ ID NO: 50160 - DNA, 40 bp, Homo sapiens
gtaattatagtttttattttttgagtctttgctaatgcca

SEQ ID NO: 50161 - DNA, 40 bp, Homo sapiens
tggcattagcaaagactcaaaaaataaaaactataattac

SEQ ID NO: 50162 - DNA, 40 bp, Homo sapiens
taattatagtttttattttttgagtctttgctaatgccat

SEQ ID NO: 50163 - DNA, 40 bp, Homo sapiens
atggcattagcaaagactcaaaaaataaaaactataatta

SEQ ID NO: 50164 - DNA, 40 bp, Homo sapiens
aattatagtttttattttttgagtctttgctaatgccatg

SEQ ID NO: 50165 - DNA, 40 bp, Homo sapiens
catggcattagcaaagactcaaaaaataaaaactataatt

SEQ ID NO: 50166 - DNA, 40 bp, Homo sapiens
attatagtttttattttttgagtctttgctaatgccatgc

SEQ ID NO: 50167 - DNA, 40 bp, Homo sapiens
gcatggcattagcaaagactcaaaaaataaaaactataat

SEQ ID NO: 50168 - DNA, 40 bp, Homo sapiens
ttatagtttttattttttgagtctttgctaatgccatgca

SEQ ID NO: 50169 - DNA, 40 bp, Homo sapiens
tgcatggcattagcaaagactcaaaaaataaaaactataa

SEQ ID NO: 50170 - DNA, 40 bp, Homo sapiens
tatagtttttattttttgagtctttgctaatgccatgcat

SEQ ID NO: 50171 - DNA, 40 bp, Homo sapiens
atgcatggcattagcaaagactcaaaaaataaaaactata

SEQ ID NO: 50172 - DNA, 40 bp, Homo sapiens
atagtttttattttttgagtctttgctaatgccatgcata

SEQ ID NO: 50173 - DNA, 40 bp, Homo sapiens
tatgcatggcattagcaaagactcaaaaaataaaaactat

SEQ ID NO: 50174 - DNA, 40 bp, Homo sapiens
tagtttttattttttgagtctttgctaatgccatgcatat

SEQ ID NO: 50175 - DNA, 40 bp, Homo sapiens
atatgcatggcattagcaaagactcaaaaaataaaaacta

SEQ ID NO: 50176 - DNA, 40 bp, Homo sapiens
agtttttattttttgagtctttgctaatgccatgcatata

SEQ ID NO: 50177 - DNA, 40 bp, Homo sapiens
tatatgcatggcattagcaaagactcaaaaaataaaaact

SEQ ID NO: 50178 - DNA, 40 bp, Homo sapiens
gtttttattttttgagtctttgctaatgccatgcatataa

SEQ ID NO: 50179 - DNA, 40 bp, Homo sapiens
ttatatgcatggcattagcaaagactcaaaaaataaaaac

SEQ ID NO: 50180 - DNA, 40 bp, Homo sapiens
tttttattttttgagtctttgctaatgccatgcatataat

SEQ ID NO: 50181 - DNA, 40 bp, Homo sapiens
attatatgcatggcattagcaaagactcaaaaaataaaaa

SEQ ID NO: 50182 - DNA, 40 bp, Homo sapiens
ttttattttttgagtctttgctaatgccatgcatataata

SEQ ID NO: 50183 - DNA, 40 bp, Homo sapiens
tattatatgcatggcattagcaaagactcaaaaaataaaa

SEQ ID NO: 50184 - DNA, 40 bp, Homo sapiens
tttattttttgagtctttgctaatgccatgcatataatat

SEQ ID NO: 50185 - DNA, 40 bp, Homo sapiens
atattatatgcatggcattagcaaagactcaaaaaataaa

SEQ ID NO: 50186 - DNA, 40 bp, Homo sapiens
ttattttttgagtctttgctaatgccatgcatataatatt

SEQ ID NO: 50187 - DNA, 40 bp, Homo sapiens
aatattatatgcatggcattagcaaagactcaaaaaataa

SEQ ID NO: 50188 - DNA, 40 bp, Homo sapiens
tattttttgagtctttgctaatgccatgcatataatattt

SEQ ID NO: 50189 - DNA, 40 bp, Homo sapiens
aaatattatatgcatggcattagcaaagactcaaaaaata

SEQ ID NO: 50190 - DNA, 40 bp, Homo sapiens
attttttgagtctttgctaatgccatgcatataatattta

SEQ ID NO: 50191 - DNA, 40 bp, Homo sapiens
taaatattatatgcatggcattagcaaagactcaaaaaat

SEQ ID NO: 50192 - DNA, 40 bp, Homo sapiens
ttttttgagtctttgctaatgccatgcatataatatttaa

SEQ ID NO: 50193 - DNA, 40 bp, Homo sapiens
ttaaatattatatgcatggcattagcaaagactcaaaaaa

SEQ ID NO: 50194 - DNA, 40 bp, Homo sapiens
tttttgagtctttgctaatgccatgcatataatatttaat

SEQ ID NO: 50195 - DNA, 40 bp, Homo sapiens
attaaatattatatgcatggcattagcaaagactcaaaaa

SEQ ID NO: 50196 - DNA, 40 bp, Homo sapiens
ttttgagtctttgctaatgccatgcatataatatttaata

SEQ ID NO: 50197 - DNA, 40 bp, Homo sapiens
tattaaatattatatgcatggcattagcaaagactcaaaa

SEQ ID NO: 50198 - DNA, 40 bp, Homo sapiens
tttgagtctttgctaatgccatgcatataatatttaataa

SEQ ID NO: 50199 - DNA, 40 bp, Homo sapiens
ttattaaatattatatgcatggcattagcaaagactcaaa

SEQ ID NO: 50200 - DNA, 40 bp, Homo sapiens
ttgagtctttgctaatgccatgcatataatatttaataaa

SEQ ID NO: 50201 - DNA, 40 bp, Homo sapiens
tttattaaatattatatgcatggcattagcaaagactcaa

SEQ ID NO: 50202 - DNA, 40 bp, Homo sapiens
tgagtctttgctaatgccatgcatataatatttaataaaa

SEQ ID NO: 50203 - DNA, 40 bp, Homo sapiens
ttttattaaatattatatgcatggcattagcaaagactca

SEQ ID NO: 50204 - DNA, 40 bp, Homo sapiens
gagtctttgctaatgccatgcatataatatttaataaaaa

SEQ ID NO: 50205 - DNA, 40 bp, Homo sapiens
tttttattaaatattatatgcatggcattagcaaagactc

SEQ ID NO: 50206 - DNA, 40 bp, Homo sapiens
agtctttgctaatgccatgcatataatatttaataaaaat

SEQ ID NO: 50207 - DNA, 40 bp, Homo sapiens
atttttattaaatattatatgcatggcattagcaaagact

SEQ ID NO: 50208 - DNA, 40 bp, Homo sapiens
gtctttgctaatgccatgcatataatatttaataaaaatt

SEQ ID NO: 50209 - DNA, 40 bp, Homo sapiens
aatttttattaaatattatatgcatggcattagcaaagac

SEQ ID NO: 50210 - DNA, 40 bp, Homo sapiens
tctttgctaatgccatgcatataatatttaataaaaattt

SEQ ID NO: 50211 - DNA, 40 bp, Homo sapiens
aaatttttattaaatattatatgcatggcattagcaaaga

SEQ ID NO: 50212 - DNA, 40 bp, Homo sapiens
ctttgctaatgccatgcatataatatttaataaaaatttt

SEQ ID NO: 50213 - DNA, 40 bp, Homo sapiens
aaaatttttattaaatattatatgcatggcattagcaaag

SEQ ID NO: 50214 - DNA, 40 bp, Homo sapiens
tttgctaatgccatgcatataatatttaataaaaattttt

SEQ ID NO: 50215 - DNA, 40 bp, Homo sapiens
aaaaatttttattaaatattatatgcatggcattagcaaa

SEQ ID NO: 50216 - DNA, 40 bp, Homo sapiens
ttgctaatgccatgcatataatatttaataaaaattttta

SEQ ID NO: 50217 - DNA, 40 bp, Homo sapiens
taaaaatttttattaaatattatatgcatggcattagcaa

SEQ ID NO: 50218 - DNA, 40 bp, Homo sapiens
tgctaatgccatgcatataatatttaataaaaatttttaa

SEQ ID NO: 50219 - DNA, 40 bp, Homo sapiens
ttaaaaatttttattaaatattatatgcatggcattagca

SEQ ID NO: 50220 - DNA, 40 bp, Homo sapiens
gctaatgccatgcatataatatttaataaaaatttttaaa

SEQ ID NO: 50221 - DNA, 40 bp, Homo sapiens
tttaaaaatttttattaaatattatatgcatggcattagc

SEQ ID NO: 50222 - DNA, 40 bp, Homo sapiens
ctaatgccatgcatataatatttaataaaaatttttaaat

SEQ ID NO: 50223 - DNA, 40 bp, Homo sapiens
atttaaaaatttttattaaatattatatgcatggcattag

SEQ ID NO: 50224 - DNA, 40 bp, Homo sapiens
taatgccatgcatataatatttaataaaaatttttaaata

SEQ ID NO: 50225 - DNA, 40 bp, Homo sapiens
tatttaaaaatttttattaaatattatatgcatggcatta

SEQ ID NO: 50226 - DNA, 40 bp, Homo sapiens
aatgccatgcatataatatttaataaaaatttttaaataa

SEQ ID NO: 50227 - DNA, 40 bp, Homo sapiens
ttatttaaaaatttttattaaatattatatgcatggcatt

SEQ ID NO: 50228 - DNA, 40 bp, Homo sapiens
atgccatgcatataatatttaataaaaatttttaaataat

SEQ ID NO: 50229 - DNA, 40 bp, Homo sapiens
attatttaaaaatttttattaaatattatatgcatggcat

SEQ ID NO: 50230 - DNA, 40 bp, Homo sapiens
tgccatgcatataatatttaataaaaatttttaaataatg

SEQ ID NO: 50231 - DNA, 40 bp, Homo sapiens
cattatttaaaaatttttattaaatattatatgcatggca

SEQ ID NO: 50232 - DNA, 40 bp, Homo sapiens
gccatgcatataatatttaataaaaatttttaaataatgt

SEQ ID NO: 50233 - DNA, 40 bp, Homo sapiens
acattatttaaaaatttttattaaatattatatgcatggc

SEQ ID NO: 50234 - DNA, 40 bp, Homo sapiens
ccatgcatataatatttaataaaaatttttaaataatgtt

SEQ ID NO: 50235 - DNA, 40 bp, Homo sapiens
aacattatttaaaaatttttattaaatattatatgcatgg

SEQ ID NO: 50236 - DNA, 40 bp, Homo sapiens
catgcatataatatttaataaaaatttttaaataatgttt

SEQ ID NO: 50237 - DNA, 40 bp, Homo sapiens
aaacattatttaaaaatttttattaaatattatatgcatg

SEQ ID NO: 50238 - DNA, 40 bp, Homo sapiens
atgcatataatatttaataaaaatttttaaataatgttta

SEQ ID NO: 50239 - DNA, 40 bp, Homo sapiens
taaacattatttaaaaatttttattaaatattatatgcat

SEQ ID NO: 50240 - DNA, 40 bp, Homo sapiens
tgcatataatatttaataaaaatttttaaataatgtttat

SEQ ID NO: 50241 - DNA, 40 bp, Homo sapiens
ataaacattatttaaaaatttttattaaatattatatgca

SEQ ID NO: 50242 - DNA, 40 bp, Homo sapiens
gcatataatatttaataaaaatttttaaataatgtttatg

SEQ ID NO: 50243 - DNA, 40 bp, Homo sapiens
cataaacattatttaaaaatttttattaaatattatatgc

SEQ ID NO: 50244 - DNA, 40 bp, Homo sapiens
catataatatttaataaaaatttttaaataatgtttatga

SEQ ID NO: 50245 - DNA, 40 bp, Homo sapiens
tcataaacattatttaaaaatttttattaaatattatatg

SEQ ID NO: 50246 - DNA, 40 bp, Homo sapiens
atataatatttaataaaaatttttaaataatgtttatgag

SEQ ID NO: 50247 - DNA, 40 bp, Homo sapiens
ctcataaacattatttaaaaatttttattaaatattatat

SEQ ID NO: 50248 - DNA, 40 bp, Homo sapiens
tataatatttaataaaaatttttaaataatgtttatgagg

SEQ ID NO: 50249 - DNA, 40 bp, Homo sapiens
cctcataaacattatttaaaaatttttattaaatattata

SEQ ID NO: 50250 - DNA, 40 bp, Homo sapiens
ataatatttaataaaaatttttaaataatgtttatgaggt

SEQ ID NO: 50251 - DNA, 40 bp, Homo sapiens
acctcataaacattatttaaaaatttttattaaatattat

SEQ ID NO: 50252 - DNA, 40 bp, Homo sapiens
taatatttaataaaaatttttaaataatgtttatgaggta

SEQ ID NO: 50253 - DNA, 40 bp, Homo sapiens
tacctcataaacattatttaaaaatttttattaaatatta

SEQ ID NO: 50254 - DNA, 40 bp, Homo sapiens
aatatttaataaaaatttttaaataatgtttatgaggtag

SEQ ID NO: 50255 - DNA, 40 bp, Homo sapiens
ctacctcataaacattatttaaaaatttttattaaatatt

SEQ ID NO: 50256 - DNA, 40 bp, Homo sapiens
atatttaataaaaatttttaaataatgtttatgaggtagg

SEQ ID NO: 50257 - DNA, 40 bp, Homo sapiens
cctacctcataaacattatttaaaaatttttattaaatat

SEQ ID NO: 50258 - DNA, 40 bp, Homo sapiens
tatttaataaaaatttttaaataatgtttatgaggtaggt

SEQ ID NO: 50259 - DNA, 40 bp, Homo sapiens
acctacctcataaacattatttaaaaatttttattaaata

SEQ ID NO: 50260 - DNA, 40 bp, Homo sapiens
atttaataaaaatttttaaataatgtttatgaggtaggta

SEQ ID NO: 50261 - DNA, 40 bp, Homo sapiens
tacctacctcataaacattatttaaaaatttttattaaat

SEQ ID NO: 50262 - DNA, 40 bp, Homo sapiens
tttaataaaaatttttaaataatgtttatgaggtaggtaa

SEQ ID NO: 50263 - DNA, 40 bp, Homo sapiens
ttacctacctcataaacattatttaaaaatttttattaaa

SEQ ID NO: 50264 - DNA, 40 bp, Homo sapiens
ttaataaaaatttttaaataatgtttatgaggtaggtaat

SEQ ID NO: 50265 - DNA, 40 bp, Homo sapiens
attacctacctcataaacattatttaaaaatttttattaa

SEQ ID NO: 50266 - DNA, 40 bp, Homo sapiens
taataaaaatttttaaataatgtttatgaggtaggtaata

SEQ ID NO: 50267 - DNA, 40 bp, Homo sapiens
tattacctacctcataaacattatttaaaaatttttatta

SEQ ID NO: 50268 - DNA, 40 bp, Homo sapiens
aataaaaatttttaaataatgtttatgaggtaggtaatat

SEQ ID NO: 50269 - DNA, 40 bp, Homo sapiens
atattacctacctcataaacattatttaaaaatttttatt

SEQ ID NO: 50270 - DNA, 40 bp, Homo sapiens
ataaaaatttttaaataatgtttatgaggtaggtaatatc

SEQ ID NO: 50271 - DNA, 40 bp, Homo sapiens
gatattacctacctcataaacattatttaaaaatttttat

SEQ ID NO: 50272 - DNA, 40 bp, Homo sapiens
taaaaatttttaaataatgtttatgaggtaggtaatatcc

SEQ ID NO: 50273 - DNA, 40 bp, Homo sapiens
ggatattacctacctcataaacattatttaaaaattttta

SEQ ID NO: 50274 - DNA, 40 bp, Homo sapiens
aaaaatttttaaataatgtttatgaggtaggtaatatccc

SEQ ID NO: 50275 - DNA, 40 bp, Homo sapiens
gggatattacctacctcataaacattatttaaaaattttt

SEQ ID NO: 50276 - DNA, 40 bp, Homo sapiens
aaaatttttaaataatgtttatgaggtaggtaatatccct

SEQ ID NO: 50277 - DNA, 40 bp, Homo sapiens
agggatattacctacctcataaacattatttaaaaatttt

SEQ ID NO: 50278 - DNA, 40 bp, Homo sapiens
aaatttttaaataatgtttatgaggtaggtaatatccctg

SEQ ID NO: 50279 - DNA, 40 bp, Homo sapiens
cagggatattacctacctcataaacattatttaaaaattt

SEQ ID NO: 50280 - DNA, 40 bp, Homo sapiens
aatttttaaataatgtttatgaggtaggtaatatccctgt

SEQ ID NO: 50281 - DNA, 40 bp, Homo sapiens
acagggatattacctacctcataaacattatttaaaaatt

SEQ ID NO: 50282 - DNA, 40 bp, Homo sapiens
atttttaaataatgtttatgaggtaggtaatatccctgtt

SEQ ID NO: 50283 - DNA, 40 bp, Homo sapiens
aacagggatattacctacctcataaacattatttaaaaat

SEQ ID NO: 50284 - DNA, 40 bp, Homo sapiens
tttttaaataatgtttatgaggtaggtaatatccctgttt

SEQ ID NO: 50285 - DNA, 40 bp, Homo sapiens
aaacagggatattacctacctcataaacattatttaaaaa

SEQ ID NO: 50286 - DNA, 40 bp, Homo sapiens
ttttaaataatgtttatgaggtaggtaatatccctgtttt

SEQ ID NO: 50287 - DNA, 40 bp, Homo sapiens
aaaacagggatattacctacctcataaacattatttaaaa

SEQ ID NO: 50288 - DNA, 40 bp, Homo sapiens
tttaaataatgtttatgaggtaggtaatatccctgtttta

SEQ ID NO: 50289 - DNA, 40 bp, Homo sapiens
taaaacagggatattacctacctcataaacattatttaaa

SEQ ID NO: 50290 - DNA, 40 bp, Homo sapiens
ttaaataatgtttatgaggtaggtaatatccctgttttat

SEQ ID NO: 50291 - DNA, 40 bp, Homo sapiens
ataaaacagggatattacctacctcataaacattatttaa

SEQ ID NO: 50292 - DNA, 40 bp, Homo sapiens
taaataatgtttatgaggtaggtaatatccctgttttata

SEQ ID NO: 50293 - DNA, 40 bp, Homo sapiens
tataaaacagggatattacctacctcataaacattattta

SEQ ID NO: 50294 - DNA, 40 bp, Homo sapiens
aaataatgtttatgaggtaggtaatatccctgttttataa

SEQ ID NO: 50295 - DNA, 40 bp, Homo sapiens
ttataaaacagggatattacctacctcataaacattattt

SEQ ID NO: 50296 - DNA, 40 bp, Homo sapiens
aataatgtttatgaggtaggtaatatccctgttttataaa

SEQ ID NO: 50297 - DNA, 40 bp, Homo sapiens
tttataaaacagggatattacctacctcataaacattatt

SEQ ID NO: 50298 - DNA, 40 bp, Homo sapiens
ataatgtttatgaggtaggtaatatccctgttttataaat

SEQ ID NO: 50299 - DNA, 40 bp, Homo sapiens
atttataaaacagggatattacctacctcataaacattat

SEQ ID NO: 50300 - DNA, 40 bp, Homo sapiens
taatgtttatgaggtaggtaatatccctgttttataaatg

SEQ ID NO: 50301 - DNA, 40 bp, Homo sapiens
catttataaaacagggatattacctacctcataaacatta

SEQ ID NO: 50302 - DNA, 40 bp, Homo sapiens
aatgtttatgaggtaggtaatatccctgttttataaatga

SEQ ID NO: 50303 - DNA, 40 bp, Homo sapiens
tcatttataaaacagggatattacctacctcataaacatt

SEQ ID NO: 50304 - DNA, 40 bp, Homo sapiens
atgtttatgaggtaggtaatatccctgttttataaatgaa

SEQ ID NO: 50305 - DNA, 40 bp, Homo sapiens
ttcatttataaaacagggatattacctacctcataaacat

SEQ ID NO: 50306 - DNA, 40 bp, Homo sapiens
tgtttatgaggtaggtaatatccctgttttataaatgaag

SEQ ID NO: 50307 - DNA, 40 bp, Homo sapiens
cttcatttataaaacagggatattacctacctcataaaca

SEQ ID NO: 50308 - DNA, 40 bp, Homo sapiens
gtttatgaggtaggtaatatccctgttttataaatgaagt

SEQ ID NO: 50309 - DNA, 40 bp, Homo sapiens
acttcatttataaaacagggatattacctacctcataaac

SEQ ID NO: 50310 - DNA, 40 bp, Homo sapiens
tttatgaggtaggtaatatccctgttttataaatgaagtt

SEQ ID NO: 50311 - DNA, 40 bp, Homo sapiens
aacttcatttataaaacagggatattacctacctcataaa

SEQ ID NO: 50312 - DNA, 40 bp, Homo sapiens
ttatgaggtaggtaatatccctgttttataaatgaagttc

SEQ ID NO: 50313 - DNA, 40 bp, Homo sapiens
gaacttcatttataaaacagggatattacctacctcataa

SEQ ID NO: 50314 - DNA, 40 bp, Homo sapiens
tatgaggtaggtaatatccctgttttataaatgaagttct

SEQ ID NO: 50315 - DNA, 40 bp, Homo sapiens
agaacttcatttataaaacagggatattacctacctcata

SEQ ID NO: 50316 - DNA, 40 bp, Homo sapiens
atgaggtaggtaatatccctgttttataaatgaagttctt

SEQ ID NO: 50317 - DNA, 40 bp, Homo sapiens
aagaacttcatttataaaacagggatattacctacctcat

SEQ ID NO: 50318 - DNA, 40 bp, Homo sapiens
tgaggtaggtaatatccctgttttataaatgaagttcttg

SEQ ID NO: 50319 - DNA, 40 bp, Homo sapiens
caagaacttcatttataaaacagggatattacctacctca

SEQ ID NO: 50320 - DNA, 40 bp, Homo sapiens
gaggtaggtaatatccctgttttataaatgaagttcttgg

SEQ ID NO: 50321 - DNA, 40 bp, Homo sapiens
ccaagaacttcatttataaaacagggatattacctacctc

SEQ ID NO: 50322 - DNA, 40 bp, Homo sapiens
aggtaggtaatatccctgttttataaatgaagttcttggg

SEQ ID NO: 50323 - DNA, 40 bp, Homo sapiens
cccaagaacttcatttataaaacagggatattacctacct

SEQ ID NO: 50324 - DNA, 40 bp, Homo sapiens
ggtaggtaatatccctgttttataaatgaagttcttgggg

SEQ ID NO: 50325 - DNA, 40 bp, Homo sapiens
ccccaagaacttcatttataaaacagggatattacctacc

SEQ ID NO: 50326 - DNA, 40 bp, Homo sapiens
gtaggtaatatccctgttttataaatgaagttcttggggg

SEQ ID NO: 50327 - DNA, 40 bp, Homo sapiens
cccccaagaacttcatttataaaacagggatattacctac

SEQ ID NO: 50328 - DNA, 40 bp, Homo sapiens
taggtaatatccctgttttataaatgaagttcttggggga

SEQ ID NO: 50329 - DNA, 40 bp, Homo sapiens
tcccccaagaacttcatttataaaacagggatattaccta

SEQ ID NO: 50330 - DNA, 40 bp, Homo sapiens
aggtaatatccctgttttataaatgaagttcttgggggat

SEQ ID NO: 50331 - DNA, 40 bp, Homo sapiens
atcccccaagaacttcatttataaaacagggatattacct

SEQ ID NO: 50332 - DNA, 40 bp, Homo sapiens
ggtaatatccctgttttataaatgaagttcttgggggatt

SEQ ID NO: 50333 - DNA, 40 bp, Homo sapiens
aatcccccaagaacttcatttataaaacagggatattacc

SEQ ID NO: 50334 - DNA, 40 bp, Homo sapiens
gtaatatccctgttttataaatgaagttcttgggggatta

SEQ ID NO: 50335 - DNA, 40 bp, Homo sapiens
taatcccccaagaacttcatttataaaacagggatattac

SEQ ID NO: 50336 - DNA, 40 bp, Homo sapiens
taatatccctgttttataaatgaagttcttgggggattag

SEQ ID NO: 50337 - DNA, 40 bp, Homo sapiens
ctaatcccccaagaacttcatttataaaacagggatatta

SEQ ID NO: 50338 - DNA, 40 bp, Homo sapiens
aatatccctgttttataaatgaagttcttgggggattaga

SEQ ID NO: 50339 - DNA, 40 bp, Homo sapiens
tctaatcccccaagaacttcatttataaaacagggatatt

SEQ ID NO: 50340 - DNA, 40 bp, Homo sapiens
atatccctgttttataaatgaagttcttgggggattagag

SEQ ID NO: 50341 - DNA, 40 bp, Homo sapiens
ctctaatcccccaagaacttcatttataaaacagggatat

SEQ ID NO: 50342 - DNA, 40 bp, Homo sapiens
tatccctgttttataaatgaagttcttgggggattagagc

SEQ ID NO: 50343 - DNA, 40 bp, Homo sapiens
gctctaatcccccaagaacttcatttataaaacagggata

SEQ ID NO: 50344 - DNA, 40 bp, Homo sapiens
atccctgttttataaatgaagttcttgggggattagagca

SEQ ID NO: 50345 - DNA, 40 bp, Homo sapiens
tgctctaatcccccaagaacttcatttataaaacagggat

SEQ ID NO: 50346 - DNA, 40 bp, Homo sapiens
tccctgttttataaatgaagttcttgggggattagagcag

SEQ ID NO: 50347 - DNA, 40 bp, Homo sapiens
ctgctctaatcccccaagaacttcatttataaaacaggga

SEQ ID NO: 50348 - DNA, 40 bp, Homo sapiens
ccctgttttataaatgaagttcttgggggattagagcagt

SEQ ID NO: 50349 - DNA, 40 bp, Homo sapiens
actgctctaatcccccaagaacttcatttataaaacaggg

SEQ ID NO: 50350 - DNA, 40 bp, Homo sapiens
cctgttttataaatgaagttcttgggggattagagcagtg

SEQ ID NO: 50351 - DNA, 40 bp, Homo sapiens
cactgctctaatcccccaagaacttcatttataaaacagg

SEQ ID NO: 50352 - DNA, 40 bp, Homo sapiens
ctgttttataaatgaagttcttgggggattagagcagtgg

SEQ ID NO: 50353 - DNA, 40 bp, Homo sapiens
ccactgctctaatcccccaagaacttcatttataaaacag

SEQ ID NO: 50354 - DNA, 40 bp, Homo sapiens
tgttttataaatgaagttcttgggggattagagcagtgga

SEQ ID NO: 50355 - DNA, 40 bp, Homo sapiens
tccactgctctaatcccccaagaacttcatttataaaaca

SEQ ID NO: 50356 - DNA, 40 bp, Homo sapiens
gttttataaatgaagttcttgggggattagagcagtggag

SEQ ID NO: 50357 - DNA, 40 bp, Homo sapiens
ctccactgctctaatcccccaagaacttcatttataaaac

SEQ ID NO: 50358 - DNA, 40 bp, Homo sapiens
ttttataaatgaagttcttgggggattagagcagtggagt

SEQ ID NO: 50359 - DNA, 40 bp, Homo sapiens
actccactgctctaatcccccaagaacttcatttataaaa

SEQ ID NO: 50360 - DNA, 40 bp, Homo sapiens
tttataaatgaagttcttgggggattagagcagtggagta

SEQ ID NO: 50361 - DNA, 40 bp, Homo sapiens
tactccactgctctaatcccccaagaacttcatttataaa

SEQ ID NO: 50362 - DNA, 40 bp, Homo sapiens
ttataaatgaagttcttgggggattagagcagtggagtaa

SEQ ID NO: 50363 - DNA, 40 bp, Homo sapiens
ttactccactgctctaatcccccaagaacttcatttataa

SEQ ID NO: 50364 - DNA, 40 bp, Homo sapiens
tataaatgaagttcttgggggattagagcagtggagtaac

SEQ ID NO: 50365 - DNA, 40 bp, Homo sapiens
gttactccactgctctaatcccccaagaacttcatttata

SEQ ID NO: 50366 - DNA, 40 bp, Homo sapiens
ataaatgaagttcttgggggattagagcagtggagtaact

SEQ ID NO: 50367 - DNA, 40 bp, Homo sapiens
agttactccactgctctaatcccccaagaacttcatttat

SEQ ID NO: 50368 - DNA, 40 bp, Homo sapiens
taaatgaagttcttgggggattagagcagtggagtaactt

SEQ ID NO: 50369 - DNA, 40 bp, Homo sapiens
aagttactccactgctctaatcccccaagaacttcattta

SEQ ID NO: 50370 - DNA, 40 bp, Homo sapiens
aaatgaagttcttgggggattagagcagtggagtaacttg

SEQ ID NO: 50371 - DNA, 40 bp, Homo sapiens
caagttactccactgctctaatcccccaagaacttcattt

SEQ ID NO: 50372 - DNA, 40 bp, Homo sapiens
aatgaagttcttgggggattagagcagtggagtaacttgc

SEQ ID NO: 50373 - DNA, 40 bp, Homo sapiens
gcaagttactccactgctctaatcccccaagaacttcatt

SEQ ID NO: 50374 - DNA, 40 bp, Homo sapiens
atgaagttcttgggggattagagcagtggagtaacttgct

SEQ ID NO: 50375 - DNA, 40 bp, Homo sapiens
agcaagttactccactgctctaatcccccaagaacttcat

SEQ ID NO: 50376 - DNA, 40 bp, Homo sapiens
tgaagttcttgggggattagagcagtggagtaacttgctc

SEQ ID NO: 50377 - DNA, 40 bp, Homo sapiens
gagcaagttactccactgctctaatcccccaagaacttca

SEQ ID NO: 50378 - DNA, 40 bp, Homo sapiens
gaagttcttgggggattagagcagtggagtaacttgctcc

SEQ ID NO: 50379 - DNA, 40 bp, Homo sapiens
ggagcaagttactccactgctctaatcccccaagaacttc

SEQ ID NO: 50380 - DNA, 40 bp, Homo sapiens
aagttcttgggggattagagcagtggagtaacttgctcca

SEQ ID NO: 50381 - DNA, 40 bp, Homo sapiens
tggagcaagttactccactgctctaatcccccaagaactt

SEQ ID NO: 50382 - DNA, 40 bp, Homo sapiens
agttcttgggggattagagcagtggagtaacttgctccag

SEQ ID NO: 50383 - DNA, 40 bp, Homo sapiens
ctggagcaagttactccactgctctaatcccccaagaact

SEQ ID NO: 50384 - DNA, 40 bp, Homo sapiens
gttcttgggggattagagcagtggagtaacttgctccaga

SEQ ID NO: 50385 - DNA, 40 bp, Homo sapiens
tctggagcaagttactccactgctctaatcccccaagaac

SEQ ID NO: 50386 - DNA, 40 bp, Homo sapiens
ttcttgggggattagagcagtggagtaacttgctccagac

SEQ ID NO: 50387 - DNA, 40 bp, Homo sapiens
gtctggagcaagttactccactgctctaatcccccaagaa

SEQ ID NO: 50388 - DNA, 40 bp, Homo sapiens
tcttgggggattagagcagtggagtaacttgctccagact

SEQ ID NO: 50389 - DNA, 40 bp, Homo sapiens
agtctggagcaagttactccactgctctaatcccccaaga

SEQ ID NO: 50390 - DNA, 40 bp, Homo sapiens
cttgggggattagagcagtggagtaacttgctccagactg

SEQ ID NO: 50391 - DNA, 40 bp, Homo sapiens
cagtctggagcaagttactccactgctctaatcccccaag

SEQ ID NO: 50392 - DNA, 40 bp, Homo sapiens
ttgggggattagagcagtggagtaacttgctccagactgc

SEQ ID NO: 50393 - DNA, 40 bp, Homo sapiens
gcagtctggagcaagttactccactgctctaatcccccaa

SEQ ID NO: 50394 - DNA, 40 bp, Homo sapiens
tgggggattagagcagtggagtaacttgctccagactgca

SEQ ID NO: 50395 - DNA, 40 bp, Homo sapiens
tgcagtctggagcaagttactccactgctctaatccccca

SEQ ID NO: 50396 - DNA, 40 bp, Homo sapiens
gggggattagagcagtggagtaacttgctccagactgcat

SEQ ID NO: 50397 - DNA, 40 bp, Homo sapiens
atgcagtctggagcaagttactccactgctctaatccccc

SEQ ID NO: 50398 - DNA, 40 bp, Homo sapiens
ggggattagagcagtggagtaacttgctccagactgcatc

SEQ ID NO: 50399 - DNA, 40 bp, Homo sapiens
gatgcagtctggagcaagttactccactgctctaatcccc

SEQ ID NO: 50400 - DNA, 40 bp, Homo sapiens
gggattagagcagtggagtaacttgctccagactgcatcg

SEQ ID NO: 50401 - DNA, 40 bp, Homo sapiens
cgatgcagtctggagcaagttactccactgctctaatccc

SEQ ID NO: 50402 - DNA, 40 bp, Homo sapiens
ggattagagcagtggagtaacttgctccagactgcatcgg

SEQ ID NO: 50403 - DNA, 40 bp, Homo sapiens
ccgatgcagtctggagcaagttactccactgctctaatcc

SEQ ID NO: 50404 - DNA, 40 bp, Homo sapiens
gattagagcagtggagtaacttgctccagactgcatcggt

SEQ ID NO: 50405 - DNA, 40 bp, Homo sapiens
accgatgcagtctggagcaagttactccactgctctaatc

SEQ ID NO: 50406 - DNA, 40 bp, Homo sapiens
attagagcagtggagtaacttgctccagactgcatcggta

SEQ ID NO: 50407 - DNA, 40 bp, Homo sapiens
taccgatgcagtctggagcaagttactccactgctctaat

SEQ ID NO: 50408 - DNA, 40 bp, Homo sapiens
ttagagcagtggagtaacttgctccagactgcatcggtag

SEQ ID NO: 50409 - DNA, 40 bp, Homo sapiens
ctaccgatgcagtctggagcaagttactccactgctctaa

SEQ ID NO: 50410 - DNA, 40 bp, Homo sapiens
tagagcagtggagtaacttgctccagactgcatcggtagt

SEQ ID NO: 50411 - DNA, 40 bp, Homo sapiens
actaccgatgcagtctggagcaagttactccactgctcta

SEQ ID NO: 50412 - DNA, 40 bp, Homo sapiens
agagcagtggagtaacttgctccagactgcatcggtagtg

SEQ ID NO: 50413 - DNA, 40 bp, Homo sapiens
cactaccgatgcagtctggagcaagttactccactgctct

SEQ ID NO: 50414 - DNA, 40 bp, Homo sapiens
gagcagtggagtaacttgctccagactgcatcggtagtgg

SEQ ID NO: 50415 - DNA, 40 bp, Homo sapiens
ccactaccgatgcagtctggagcaagttactccactgctc

SEQ ID NO: 50416 - DNA, 40 bp, Homo sapiens
agcagtggagtaacttgctccagactgcatcggtagtggt

SEQ ID NO: 50417 - DNA, 40 bp, Homo sapiens
accactaccgatgcagtctggagcaagttactccactgct

SEQ ID NO: 50418 - DNA, 40 bp, Homo sapiens
gcagtggagtaacttgctccagactgcatcggtagtggtg

SEQ ID NO: 50419 - DNA, 40 bp, Homo sapiens
caccactaccgatgcagtctggagcaagttactccactgc

SEQ ID NO: 50420 - DNA, 40 bp, Homo sapiens
cagtggagtaacttgctccagactgcatcggtagtggtgg

SEQ ID NO: 50421 - DNA, 40 bp, Homo sapiens
ccaccactaccgatgcagtctggagcaagttactccactg

SEQ ID NO: 50422 - DNA, 40 bp, Homo sapiens
agtggagtaacttgctccagactgcatcggtagtggtggt

SEQ ID NO: 50423 - DNA, 40 bp, Homo sapiens
accaccactaccgatgcagtctggagcaagttactccact

SEQ ID NO: 50424 - DNA, 40 bp, Homo sapiens
gtggagtaacttgctccagactgcatcggtagtggtggtg

SEQ ID NO: 50425 - DNA, 40 bp, Homo sapiens
caccaccactaccgatgcagtctggagcaagttactccac

SEQ ID NO: 50426 - DNA, 40 bp, Homo sapiens
tggagtaacttgctccagactgcatcggtagtggtggtgc

SEQ ID NO: 50427 - DNA, 40 bp, Homo sapiens
gcaccaccactaccgatgcagtctggagcaagttactcca

SEQ ID NO: 50428 - DNA, 40 bp, Homo sapiens
ggagtaacttgctccagactgcatcggtagtggtggtgct

SEQ ID NO: 50429 - DNA, 40 bp, Homo sapiens
agcaccaccactaccgatgcagtctggagcaagttactcc

SEQ ID NO: 50430 - DNA, 40 bp, Homo sapiens
gagtaacttgctccagactgcatcggtagtggtggtgctg

SEQ ID NO: 50431 - DNA, 40 bp, Homo sapiens
cagcaccaccactaccgatgcagtctggagcaagttactc

SEQ ID NO: 50432 - DNA, 40 bp, Homo sapiens
agtaacttgctccagactgcatcggtagtggtggtgctgg

SEQ ID NO: 50433 - DNA, 40 bp, Homo sapiens
ccagcaccaccactaccgatgcagtctggagcaagttact

SEQ ID NO: 50434 - DNA, 40 bp, Homo sapiens
gtaacttgctccagactgcatcggtagtggtggtgctggg

SEQ ID NO: 50435 - DNA, 40 bp, Homo sapiens
cccagcaccaccactaccgatgcagtctggagcaagttac

SEQ ID NO: 50436 - DNA, 40 bp, Homo sapiens
taacttgctccagactgcatcggtagtggtggtgctggga

SEQ ID NO: 50437 - DNA, 40 bp, Homo sapiens
tcccagcaccaccactaccgatgcagtctggagcaagtta

SEQ ID NO: 50438 - DNA, 40 bp, Homo sapiens
aacttgctccagactgcatcggtagtggtggtgctgggat

SEQ ID NO: 50439 - DNA, 40 bp, Homo sapiens
atcccagcaccaccactaccgatgcagtctggagcaagtt

SEQ ID NO: 50440 - DNA, 40 bp, Homo sapiens
acttgctccagactgcatcggtagtggtggtgctgggatt

SEQ ID NO: 50441 - DNA, 40 bp, Homo sapiens
aatcccagcaccaccactaccgatgcagtctggagcaagt

SEQ ID NO: 50442 - DNA, 40 bp, Homo sapiens
cttgctccagactgcatcggtagtggtggtgctgggattg

SEQ ID NO: 50443 - DNA, 40 bp, Homo sapiens
caatcccagcaccaccactaccgatgcagtctggagcaag

SEQ ID NO: 50444 - DNA, 40 bp, Homo sapiens
ttgctccagactgcatcggtagtggtggtgctgggattga

SEQ ID NO: 50445 - DNA, 40 bp, Homo sapiens
tcaatcccagcaccaccactaccgatgcagtctggagcaa

SEQ ID NO: 50446 - DNA, 40 bp, Homo sapiens
tgctccagactgcatcggtagtggtggtgctgggattgaa

SEQ ID NO: 50447 - DNA, 40 bp, Homo sapiens
ttcaatcccagcaccaccactaccgatgcagtctggagca

SEQ ID NO: 50448 - DNA, 40 bp, Homo sapiens
gctccagactgcatcggtagtggtggtgctgggattgaaa

SEQ ID NO: 50449 - DNA, 40 bp, Homo sapiens
tttcaatcccagcaccaccactaccgatgcagtctggagc

SEQ ID NO: 50450 - DNA, 40 bp, Homo sapiens
ctccagactgcatcggtagtggtggtgctgggattgaaac

SEQ ID NO: 50451 - DNA, 40 bp, Homo sapiens
gtttcaatcccagcaccaccactaccgatgcagtctggag

SEQ ID NO: 50452 - DNA, 40 bp, Homo sapiens
tccagactgcatcggtagtggtggtgctgggattgaaacc

SEQ ID NO: 50453 - DNA, 40 bp, Homo sapiens
ggtttcaatcccagcaccaccactaccgatgcagtctgga

SEQ ID NO: 50454 - DNA, 40 bp, Homo sapiens
ccagactgcatcggtagtggtggtgctgggattgaaacct

SEQ ID NO: 50455 - DNA, 40 bp, Homo sapiens
aggtttcaatcccagcaccaccactaccgatgcagtctgg

SEQ ID NO: 50456 - DNA, 40 bp, Homo sapiens
cagactgcatcggtagtggtggtgctgggattgaaaccta

SEQ ID NO: 50457 - DNA, 40 bp, Homo sapiens
taggtttcaatcccagcaccaccactaccgatgcagtctg

SEQ ID NO: 50458 - DNA, 40 bp, Homo sapiens
agactgcatcggtagtggtggtgctgggattgaaacctag

SEQ ID NO: 50459 - DNA, 40 bp, Homo sapiens
ctaggtttcaatcccagcaccaccactaccgatgcagtct

SEQ ID NO: 50460 - DNA, 40 bp, Homo sapiens
gactgcatcggtagtggtggtgctgggattgaaacctagg

SEQ ID NO: 50461 - DNA, 40 bp, Homo sapiens
cctaggtttcaatcccagcaccaccactaccgatgcagtc

SEQ ID NO: 50462 - DNA, 40 bp, Homo sapiens
actgcatcggtagtggtggtgctgggattgaaacctaggc

SEQ ID NO: 50463 - DNA, 40 bp, Homo sapiens
gcctaggtttcaatcccagcaccaccactaccgatgcagt

SEQ ID NO: 50464 - DNA, 40 bp, Homo sapiens
ctgcatcggtagtggtggtgctgggattgaaacctaggcc

SEQ ID NO: 50465 - DNA, 40 bp, Homo sapiens
ggcctaggtttcaatcccagcaccaccactaccgatgcag

SEQ ID NO: 50466 - DNA, 40 bp, Homo sapiens
tgcatcggtagtggtggtgctgggattgaaacctaggcct

SEQ ID NO: 50467 - DNA, 40 bp, Homo sapiens
aggcctaggtttcaatcccagcaccaccactaccgatgca

SEQ ID NO: 50468 - DNA, 40 bp, Homo sapiens
gcatcggtagtggtggtgctgggattgaaacctaggcctg

SEQ ID NO: 50469 - DNA, 40 bp, Homo sapiens
caggcctaggtttcaatcccagcaccaccactaccgatgc

SEQ ID NO: 50470 - DNA, 40 bp, Homo sapiens
catcggtagtggtggtgctgggattgaaacctaggcctgt

SEQ ID NO: 50471 - DNA, 40 bp, Homo sapiens
acaggcctaggtttcaatcccagcaccaccactaccgatg

SEQ ID NO: 50472 - DNA, 40 bp, Homo sapiens
atcggtagtggtggtgctgggattgaaacctaggcctgtt

SEQ ID NO: 50473 - DNA, 40 bp, Homo sapiens
aacaggcctaggtttcaatcccagcaccaccactaccgat

SEQ ID NO: 50474 - DNA, 40 bp, Homo sapiens
tcggtagtggtggtgctgggattgaaacctaggcctgttt

SEQ ID NO: 50475 - DNA, 40 bp, Homo sapiens
aaacaggcctaggtttcaatcccagcaccaccactaccga

SEQ ID NO: 50476 - DNA, 40 bp, Homo sapiens
cggtagtggtggtgctgggattgaaacctaggcctgtttg

SEQ ID NO: 50477 - DNA, 40 bp, Homo sapiens
caaacaggcctaggtttcaatcccagcaccaccactaccg

SEQ ID NO: 50478 - DNA, 40 bp, Homo sapiens
ggtagtggtggtgctgggattgaaacctaggcctgtttga

SEQ ID NO: 50479 - DNA, 40 bp, Homo sapiens
tcaaacaggcctaggtttcaatcccagcaccaccactacc

SEQ ID NO: 50480 - DNA, 40 bp, Homo sapiens
gtagtggtggtgctgggattgaaacctaggcctgtttgac

SEQ ID NO: 50481 - DNA, 40 bp, Homo sapiens
gtcaaacaggcctaggtttcaatcccagcaccaccactac

SEQ ID NO: 50482 - DNA, 40 bp, Homo sapiens
tagtggtggtgctgggattgaaacctaggcctgtttgact

SEQ ID NO: 50483 - DNA, 40 bp, Homo sapiens
agtcaaacaggcctaggtttcaatcccagcaccaccacta

SEQ ID NO: 50484 - DNA, 40 bp, Homo sapiens
agtggtggtgctgggattgaaacctaggcctgtttgactc

SEQ ID NO: 50485 - DNA, 40 bp, Homo sapiens
gagtcaaacaggcctaggtttcaatcccagcaccaccact

SEQ ID NO: 50486 - DNA, 40 bp, Homo sapiens
gtggtggtgctgggattgaaacctaggcctgtttgactcc

SEQ ID NO: 50487 - DNA, 40 bp, Homo sapiens
ggagtcaaacaggcctaggtttcaatcccagcaccaccac

SEQ ID NO: 50488 - DNA, 40 bp, Homo sapiens
tggtggtgctgggattgaaacctaggcctgtttgactcca

SEQ ID NO: 50489 - DNA, 40 bp, Homo sapiens
tggagtcaaacaggcctaggtttcaatcccagcaccacca

SEQ ID NO: 50490 - DNA, 40 bp, Homo sapiens
ggtggtgctgggattgaaacctaggcctgtttgactccac

SEQ ID NO: 50491 - DNA, 40 bp, Homo sapiens
gtggagtcaaacaggcctaggtttcaatcccagcaccacc

SEQ ID NO: 50492 - DNA, 40 bp, Homo sapiens
gtggtgctgggattgaaacctaggcctgtttgactccaca

SEQ ID NO: 50493 - DNA, 40 bp, Homo sapiens
tgtggagtcaaacaggcctaggtttcaatcccagcaccac

SEQ ID NO: 50494 - DNA, 40 bp, Homo sapiens
tggtgctgggattgaaacctaggcctgtttgactccacag

SEQ ID NO: 50495 - DNA, 40 bp, Homo sapiens
ctgtggagtcaaacaggcctaggtttcaatcccagcacca

SEQ ID NO: 50496 - DNA, 40 bp, Homo sapiens
ggtgctgggattgaaacctaggcctgtttgactccacagc

SEQ ID NO: 50497 - DNA, 40 bp, Homo sapiens
gctgtggagtcaaacaggcctaggtttcaatcccagcacc

SEQ ID NO: 50498 - DNA, 40 bp, Homo sapiens
gtgctgggattgaaacctaggcctgtttgactccacagcc

SEQ ID NO: 50499 - DNA, 40 bp, Homo sapiens
ggctgtggagtcaaacaggcctaggtttcaatcccagcac

SEQ ID NO: 50500 - DNA, 40 bp, Homo sapiens
tgctgggattgaaacctaggcctgtttgactccacagcct

SEQ ID NO: 50501 - DNA, 40 bp, Homo sapiens
aggctgtggagtcaaacaggcctaggtttcaatcccagca

SEQ ID NO: 50502 - DNA, 40 bp, Homo sapiens
gctgggattgaaacctaggcctgtttgactccacagcctt

SEQ ID NO: 50503 - DNA, 40 bp, Homo sapiens
aaggctgtggagtcaaacaggcctaggtttcaatcccagc

SEQ ID NO: 50504 - DNA, 40 bp, Homo sapiens
ctgggattgaaacctaggcctgtttgactccacagccttc

SEQ ID NO: 50505 - DNA, 40 bp, Homo sapiens
gaaggctgtggagtcaaacaggcctaggtttcaatcccag

SEQ ID NO: 50506 - DNA, 40 bp, Homo sapiens
tgggattgaaacctaggcctgtttgactccacagccttct

SEQ ID NO: 50507 - DNA, 40 bp, Homo sapiens
agaaggctgtggagtcaaacaggcctaggtttcaatccca

SEQ ID NO: 50508 - DNA, 40 bp, Homo sapiens
gggattgaaacctaggcctgtttgactccacagccttctg

SEQ ID NO: 50509 - DNA, 40 bp, Homo sapiens
cagaaggctgtggagtcaaacaggcctaggtttcaatccc

SEQ ID NO: 50510 - DNA, 40 bp, Homo sapiens
ggattgaaacctaggcctgtttgactccacagccttctgt

SEQ ID NO: 50511 - DNA, 40 bp, Homo sapiens
acagaaggctgtggagtcaaacaggcctaggtttcaatcc

SEQ ID NO: 50512 - DNA, 40 bp, Homo sapiens
gattgaaacctaggcctgtttgactccacagccttctgta

SEQ ID NO: 50513 - DNA, 40 bp, Homo sapiens
tacagaaggctgtggagtcaaacaggcctaggtttcaatc

SEQ ID NO: 50514 - DNA, 40 bp, Homo sapiens
attgaaacctaggcctgtttgactccacagccttctgtac

SEQ ID NO: 50515 - DNA, 40 bp, Homo sapiens
gtacagaaggctgtggagtcaaacaggcctaggtttcaat

SEQ ID NO: 50516 - DNA, 40 bp, Homo sapiens
ttgaaacctaggcctgtttgactccacagccttctgtact

SEQ ID NO: 50517 - DNA, 40 bp, Homo sapiens
agtacagaaggctgtggagtcaaacaggcctaggtttcaa

SEQ ID NO: 50518 - DNA, 40 bp, Homo sapiens
tgaaacctaggcctgtttgactccacagccttctgtactc

SEQ ID NO: 50519 - DNA, 40 bp, Homo sapiens
gagtacagaaggctgtggagtcaaacaggcctaggtttca

SEQ ID NO: 50520 - DNA, 40 bp, Homo sapiens
gaaacctaggcctgtttgactccacagccttctgtactct

SEQ ID NO: 50521 - DNA, 40 bp, Homo sapiens
agagtacagaaggctgtggagtcaaacaggcctaggtttc

SEQ ID NO: 50522 - DNA, 40 bp, Homo sapiens
aaacctaggcctgtttgactccacagccttctgtactctt

SEQ ID NO: 50523 - DNA, 40 bp, Homo sapiens
aagagtacagaaggctgtggagtcaaacaggcctaggttt

SEQ ID NO: 50524 - DNA, 40 bp, Homo sapiens
aacctaggcctgtttgactccacagccttctgtactcttg

SEQ ID NO: 50525 - DNA, 40 bp, Homo sapiens
caagagtacagaaggctgtggagtcaaacaggcctaggtt

SEQ ID NO: 50526 - DNA, 40 bp, Homo sapiens
acctaggcctgtttgactccacagccttctgtactcttga

SEQ ID NO: 50527 - DNA, 40 bp, Homo sapiens
tcaagagtacagaaggctgtggagtcaaacaggcctaggt

SEQ ID NO: 50528 - DNA, 40 bp, Homo sapiens
cctaggcctgtttgactccacagccttctgtactcttgac

SEQ ID NO: 50529 - DNA, 40 bp, Homo sapiens
gtcaagagtacagaaggctgtggagtcaaacaggcctagg

SEQ ID NO: 50530 - DNA, 40 bp, Homo sapiens
ctaggcctgtttgactccacagccttctgtactcttgact

SEQ ID NO: 50531 - DNA, 40 bp, Homo sapiens
agtcaagagtacagaaggctgtggagtcaaacaggcctag

SEQ ID NO: 50532 - DNA, 40 bp, Homo sapiens
taggcctgtttgactccacagccttctgtactcttgacta

SEQ ID NO: 50533 - DNA, 40 bp, Homo sapiens
tagtcaagagtacagaaggctgtggagtcaaacaggccta

SEQ ID NO: 50534 - DNA, 40 bp, Homo sapiens
aggcctgtttgactccacagccttctgtactcttgactat

SEQ ID NO: 50535 - DNA, 40 bp, Homo sapiens
atagtcaagagtacagaaggctgtggagtcaaacaggcct

SEQ ID NO: 50536 - DNA, 40 bp, Homo sapiens
ggcctgtttgactccacagccttctgtactcttgactatt

SEQ ID NO: 50537 - DNA, 40 bp, Homo sapiens
aatagtcaagagtacagaaggctgtggagtcaaacaggcc

SEQ ID NO: 50538 - DNA, 40 bp, Homo sapiens
gcctgtttgactccacagccttctgtactcttgactattc

SEQ ID NO: 50539 - DNA, 40 bp, Homo sapiens
gaatagtcaagagtacagaaggctgtggagtcaaacaggc

SEQ ID NO: 50540 - DNA, 40 bp, Homo sapiens
cctgtttgactccacagccttctgtactcttgactattct

SEQ ID NO: 50541 - DNA, 40 bp, Homo sapiens
agaatagtcaagagtacagaaggctgtggagtcaaacagg

SEQ ID NO: 50542 - DNA, 40 bp, Homo sapiens
ctgtttgactccacagccttctgtactcttgactattcta

SEQ ID NO: 50543 - DNA, 40 bp, Homo sapiens
tagaatagtcaagagtacagaaggctgtggagtcaaacag

SEQ ID NO: 50544 - DNA, 40 bp, Homo sapiens
tgtttgactccacagccttctgtactcttgactattctac

SEQ ID NO: 50545 - DNA, 40 bp, Homo sapiens
gtagaatagtcaagagtacagaaggctgtggagtcaaaca

SEQ ID NO: 50546 - DNA, 40 bp, Homo sapiens
gtttgactccacagccttctgtactcttgactattctaca

SEQ ID NO: 50547 - DNA, 40 bp, Homo sapiens
tgtagaatagtcaagagtacagaaggctgtggagtcaaac

SEQ ID NO: 50548 - DNA, 40 bp, Homo sapiens
tttgactccacagccttctgtactcttgactattctacaa

SEQ ID NO: 50549 - DNA, 40 bp, Homo sapiens
ttgtagaatagtcaagagtacagaaggctgtggagtcaaa

SEQ ID NO: 50550 - DNA, 40 bp, Homo sapiens
ttgactccacagccttctgtactcttgactattctacaaa

SEQ ID NO: 50551 - DNA, 40 bp, Homo sapiens
tttgtagaatagtcaagagtacagaaggctgtggagtcaa

SEQ ID NO: 50552 - DNA, 40 bp, Homo sapiens
tgactccacagccttctgtactcttgactattctacaaaa

SEQ ID NO: 50553 - DNA, 40 bp, Homo sapiens
ttttgtagaatagtcaagagtacagaaggctgtggagtca

SEQ ID NO: 50554 - DNA, 40 bp, Homo sapiens
gactccacagccttctgtactcttgactattctacaaaag

SEQ ID NO: 50555 - DNA, 40 bp, Homo sapiens
cttttgtagaatagtcaagagtacagaaggctgtggagtc

SEQ ID NO: 50556 - DNA, 40 bp, Homo sapiens
actccacagccttctgtactcttgactattctacaaaagc

SEQ ID NO: 50557 - DNA, 40 bp, Homo sapiens
gcttttgtagaatagtcaagagtacagaaggctgtggagt

SEQ ID NO: 50558 - DNA, 40 bp, Homo sapiens
ctccacagccttctgtactcttgactattctacaaaagca

SEQ ID NO: 50559 - DNA, 40 bp, Homo sapiens
tgcttttgtagaatagtcaagagtacagaaggctgtggag

SEQ ID NO: 50560 - DNA, 40 bp, Homo sapiens
tccacagccttctgtactcttgactattctacaaaagcaa

SEQ ID NO: 50561 - DNA, 40 bp, Homo sapiens
ttgcttttgtagaatagtcaagagtacagaaggctgtgga

SEQ ID NO: 50562 - DNA, 40 bp, Homo sapiens
ccacagccttctgtactcttgactattctacaaaagcaag

SEQ ID NO: 50563 - DNA, 40 bp, Homo sapiens
cttgcttttgtagaatagtcaagagtacagaaggctgtgg

SEQ ID NO: 50564 - DNA, 40 bp, Homo sapiens
cacagccttctgtactcttgactattctacaaaagcaaga

SEQ ID NO: 50565 - DNA, 40 bp, Homo sapiens
tcttgcttttgtagaatagtcaagagtacagaaggctgtg

SEQ ID NO: 50566 - DNA, 40 bp, Homo sapiens
acagccttctgtactcttgactattctacaaaagcaagac

SEQ ID NO: 50567 - DNA, 40 bp, Homo sapiens
gtcttgcttttgtagaatagtcaagagtacagaaggctgt

SEQ ID NO: 50568 - DNA, 40 bp, Homo sapiens
cagccttctgtactcttgactattctacaaaagcaagact

SEQ ID NO: 50569 - DNA, 40 bp, Homo sapiens
agtcttgcttttgtagaatagtcaagagtacagaaggctg

SEQ ID NO: 50570 - DNA, 40 bp, Homo sapiens
agccttctgtactcttgactattctacaaaagcaagactt

SEQ ID NO: 50571 - DNA, 40 bp, Homo sapiens
aagtcttgcttttgtagaatagtcaagagtacagaaggct

SEQ ID NO: 50572 - DNA, 40 bp, Homo sapiens
gccttctgtactcttgactattctacaaaagcaagacttt

SEQ ID NO: 50573 - DNA, 40 bp, Homo sapiens
aaagtcttgcttttgtagaatagtcaagagtacagaaggc

SEQ ID NO: 50574 - DNA, 40 bp, Homo sapiens
ccttctgtactcttgactattctacaaaagcaagacttta

SEQ ID NO: 50575 - DNA, 40 bp, Homo sapiens
taaagtcttgcttttgtagaatagtcaagagtacagaagg

SEQ ID NO: 50576 - DNA, 40 bp, Homo sapiens
cttctgtactcttgactattctacaaaagcaagactttaa

SEQ ID NO: 50577 - DNA, 40 bp, Homo sapiens
ttaaagtcttgcttttgtagaatagtcaagagtacagaag

SEQ ID NO: 50578 - DNA, 40 bp, Homo sapiens
ttctgtactcttgactattctacaaaagcaagactttaaa

SEQ ID NO: 50579 - DNA, 40 bp, Homo sapiens
tttaaagtcttgcttttgtagaatagtcaagagtacagaa

SEQ ID NO: 50580 - DNA, 40 bp, Homo sapiens
tctgtactcttgactattctacaaaagcaagactttaaac

SEQ ID NO: 50581 - DNA, 40 bp, Homo sapiens
gtttaaagtcttgcttttgtagaatagtcaagagtacaga

SEQ ID NO: 50582 - DNA, 40 bp, Homo sapiens
ctgtactcttgactattctacaaaagcaagactttaaact

SEQ ID NO: 50583 - DNA, 40 bp, Homo sapiens
agtttaaagtcttgcttttgtagaatagtcaagagtacag

SEQ ID NO: 50584 - DNA, 40 bp, Homo sapiens
tgtactcttgactattctacaaaagcaagactttaaactt

SEQ ID NO: 50585 - DNA, 40 bp, Homo sapiens
aagtttaaagtcttgcttttgtagaatagtcaagagtaca

SEQ ID NO: 50586 - DNA, 40 bp, Homo sapiens
gtactcttgactattctacaaaagcaagactttaaacttt

SEQ ID NO: 50587 - DNA, 40 bp, Homo sapiens
aaagtttaaagtcttgcttttgtagaatagtcaagagtac

SEQ ID NO: 50588 - DNA, 40 bp, Homo sapiens
tactcttgactattctacaaaagcaagactttaaactttt

SEQ ID NO: 50589 - DNA, 40 bp, Homo sapiens
aaaagtttaaagtcttgcttttgtagaatagtcaagagta

SEQ ID NO: 50590 - DNA, 40 bp, Homo sapiens
actcttgactattctacaaaagcaagactttaaacttttt

SEQ ID NO: 50591 - DNA, 40 bp, Homo sapiens
aaaaagtttaaagtcttgcttttgtagaatagtcaagagt

SEQ ID NO: 50592 - DNA, 40 bp, Homo sapiens
ctcttgactattctacaaaagcaagactttaaacttttta

SEQ ID NO: 50593 - DNA, 40 bp, Homo sapiens
taaaaagtttaaagtcttgcttttgtagaatagtcaagag

SEQ ID NO: 50594 - DNA, 40 bp, Homo sapiens
tcttgactattctacaaaagcaagactttaaactttttag

SEQ ID NO: 50595 - DNA, 40 bp, Homo sapiens
ctaaaaagtttaaagtcttgcttttgtagaatagtcaaga

SEQ ID NO: 50596 - DNA, 40 bp, Homo sapiens
cttgactattctacaaaagcaagactttaaactttttaga

SEQ ID NO: 50597 - DNA, 40 bp, Homo sapiens
tctaaaaagtttaaagtcttgcttttgtagaatagtcaag

SEQ ID NO: 50598 - DNA, 40 bp, Homo sapiens
ttgactattctacaaaagcaagactttaaactttttagat

SEQ ID NO: 50599 - DNA, 40 bp, Homo sapiens
atctaaaaagtttaaagtcttgcttttgtagaatagtcaa

SEQ ID NO: 50600 - DNA, 40 bp, Homo sapiens
tgactattctacaaaagcaagactttaaactttttagata

SEQ ID NO: 50601 - DNA, 40 bp, Homo sapiens
tatctaaaaagtttaaagtcttgcttttgtagaatagtca

SEQ ID NO: 50602 - DNA, 40 bp, Homo sapiens
gactattctacaaaagcaagactttaaactttttagatac

SEQ ID NO: 50603 - DNA, 40 bp, Homo sapiens
gtatctaaaaagtttaaagtcttgcttttgtagaatagtc

SEQ ID NO: 50604 - DNA, 40 bp, Homo sapiens
actattctacaaaagcaagactttaaactttttagataca

SEQ ID NO: 50605 - DNA, 40 bp, Homo sapiens
tgtatctaaaaagtttaaagtcttgcttttgtagaatagt

SEQ ID NO: 50606 - DNA, 40 bp, Homo sapiens
ctattctacaaaagcaagactttaaactttttagatacat

SEQ ID NO: 50607 - DNA, 40 bp, Homo sapiens
atgtatctaaaaagtttaaagtcttgcttttgtagaatag

SEQ ID NO: 50608 - DNA, 40 bp, Homo sapiens
tattctacaaaagcaagactttaaactttttagatacatc

SEQ ID NO: 50609 - DNA, 40 bp, Homo sapiens
gatgtatctaaaaagtttaaagtcttgcttttgtagaata

SEQ ID NO: 50610 - DNA, 40 bp, Homo sapiens
attctacaaaagcaagactttaaactttttagatacatca

SEQ ID NO: 50611 - DNA, 40 bp, Homo sapiens
tgatgtatctaaaaagtttaaagtcttgcttttgtagaat

SEQ ID NO: 50612 - DNA, 40 bp, Homo sapiens
ttctacaaaagcaagactttaaactttttagatacatcat

SEQ ID NO: 50613 - DNA, 40 bp, Homo sapiens
atgatgtatctaaaaagtttaaagtcttgcttttgtagaa

SEQ ID NO: 50614 - DNA, 40 bp, Homo sapiens
tctacaaaagcaagactttaaactttttagatacatcatt

SEQ ID NO: 50615 - DNA, 40 bp, Homo sapiens
aatgatgtatctaaaaagtttaaagtcttgcttttgtaga

SEQ ID NO: 50616 - DNA, 40 bp, Homo sapiens
ctacaaaagcaagactttaaactttttagatacatcatta

SEQ ID NO: 50617 - DNA, 40 bp, Homo sapiens
taatgatgtatctaaaaagtttaaagtcttgcttttgtag

SEQ ID NO: 50618 - DNA, 40 bp, Homo sapiens
tacaaaagcaagactttaaactttttagatacatcattaa

SEQ ID NO: 50619 - DNA, 40 bp, Homo sapiens
ttaatgatgtatctaaaaagtttaaagtcttgcttttgta

SEQ ID NO: 50620 - DNA, 40 bp, Homo sapiens
acaaaagcaagactttaaactttttagatacatcattaaa

SEQ ID NO: 50621 - DNA, 40 bp, Homo sapiens
tttaatgatgtatctaaaaagtttaaagtcttgcttttgt

SEQ ID NO: 50622 - DNA, 40 bp, Homo sapiens
caaaagcaagactttaaactttttagatacatcattaaaa

SEQ ID NO: 50623 - DNA, 40 bp, Homo sapiens
ttttaatgatgtatctaaaaagtttaaagtcttgcttttg

SEQ ID NO: 50624 - DNA, 40 bp, Homo sapiens
aaaagcaagactttaaactttttagatacatcattaaaaa

SEQ ID NO: 50625 - DNA, 40 bp, Homo sapiens
tttttaatgatgtatctaaaaagtttaaagtcttgctttt

SEQ ID NO: 50626 - DNA, 40 bp, Homo sapiens
aaagcaagactttaaactttttagatacatcattaaaaaa

SEQ ID NO: 50627 - DNA, 40 bp, Homo sapiens
ttttttaatgatgtatctaaaaagtttaaagtcttgcttt

SEQ ID NO: 50628 - DNA, 40 bp, Homo sapiens
aagcaagactttaaactttttagatacatcattaaaaaag

SEQ ID NO: 50629 - DNA, 40 bp, Homo sapiens
cttttttaatgatgtatctaaaaagtttaaagtcttgctt

SEQ ID NO: 50630 - DNA, 40 bp, Homo sapiens
agcaagactttaaactttttagatacatcattaaaaaaga

SEQ ID NO: 50631 - DNA, 40 bp, Homo sapiens
tcttttttaatgatgtatctaaaaagtttaaagtcttgct

SEQ ID NO: 50632 - DNA, 40 bp, Homo sapiens
gcaagactttaaactttttagatacatcattaaaaaagaa

SEQ ID NO: 50633 - DNA, 40 bp, Homo sapiens
ttcttttttaatgatgtatctaaaaagtttaaagtcttgc

SEQ ID NO: 50634 - DNA, 40 bp, Homo sapiens
caagactttaaactttttagatacatcattaaaaaagaaa

SEQ ID NO: 50635 - DNA, 40 bp, Homo sapiens
tttcttttttaatgatgtatctaaaaagtttaaagtcttg

SEQ ID NO: 50636 - DNA, 40 bp, Homo sapiens
aagactttaaactttttagatacatcattaaaaaagaaaa

SEQ ID NO: 50637 - DNA, 40 bp, Homo sapiens
ttttcttttttaatgatgtatctaaaaagtttaaagtctt

SEQ ID NO: 50638 - DNA, 40 bp, Homo sapiens
agactttaaactttttagatacatcattaaaaaagaaaac

SEQ ID NO: 50639 - DNA, 40 bp, Homo sapiens
gttttcttttttaatgatgtatctaaaaagtttaaagtct

SEQ ID NO: 50640 - DNA, 40 bp, Homo sapiens
gactttaaactttttagatacatcattaaaaaagaaaacc

SEQ ID NO: 50641 - DNA, 40 bp, Homo sapiens
ggttttcttttttaatgatgtatctaaaaagtttaaagtc

SEQ ID NO: 50642 - DNA, 40 bp, Homo sapiens
actttaaactttttagatacatcattaaaaaagaaaacca

SEQ ID NO: 50643 - DNA, 40 bp, Homo sapiens
tggttttcttttttaatgatgtatctaaaaagtttaaagt

SEQ ID NO: 50644 - DNA, 40 bp, Homo sapiens
ctttaaactttttagatacatcattaaaaaagaaaaccat

SEQ ID NO: 50645 - DNA, 40 bp, Homo sapiens
atggttttcttttttaatgatgtatctaaaaagtttaaag

SEQ ID NO: 50646 - DNA, 40 bp, Homo sapiens
tttaaactttttagatacatcattaaaaaagaaaaccata

SEQ ID NO: 50647 - DNA, 40 bp, Homo sapiens
tatggttttcttttttaatgatgtatctaaaaagtttaaa

SEQ ID NO: 50648 - DNA, 40 bp, Homo sapiens
ttaaactttttagatacatcattaaaaaagaaaaccataa

SEQ ID NO: 50649 - DNA, 40 bp, Homo sapiens
ttatggttttcttttttaatgatgtatctaaaaagtttaa

SEQ ID NO: 50650 - DNA, 40 bp, Homo sapiens
taaactttttagatacatcattaaaaaagaaaaccataaa

SEQ ID NO: 50651 - DNA, 40 bp, Homo sapiens
tttatggttttcttttttaatgatgtatctaaaaagttta

SEQ ID NO: 50652 - DNA, 40 bp, Homo sapiens
aaactttttagatacatcattaaaaaagaaaaccataaaa

SEQ ID NO: 50653 - DNA, 40 bp, Homo sapiens
ttttatggttttcttttttaatgatgtatctaaaaagttt

SEQ ID NO: 50654 - DNA, 40 bp, Homo sapiens
aactttttagatacatcattaaaaaagaaaaccataaaaa

SEQ ID NO: 50655 - DNA, 40 bp, Homo sapiens
tttttatggttttcttttttaatgatgtatctaaaaagtt

SEQ ID NO: 50656 - DNA, 40 bp, Homo sapiens
actttttagatacatcattaaaaaagaaaaccataaaaaa

SEQ ID NO: 50657 - DNA, 40 bp, Homo sapiens
ttttttatggttttcttttttaatgatgtatctaaaaagt

SEQ ID NO: 50658 - DNA, 40 bp, Homo sapiens
ctttttagatacatcattaaaaaagaaaaccataaaaaag

SEQ ID NO: 50659 - DNA, 40 bp, Homo sapiens
cttttttatggttttcttttttaatgatgtatctaaaaag

SEQ ID NO: 50660 - DNA, 40 bp, Homo sapiens
tttttagatacatcattaaaaaagaaaaccataaaaaaga

SEQ ID NO: 50661 - DNA, 40 bp, Homo sapiens
tcttttttatggttttcttttttaatgatgtatctaaaaa

SEQ ID NO: 50662 - DNA, 40 bp, Homo sapiens
ttttagatacatcattaaaaaagaaaaccataaaaaagaa

SEQ ID NO: 50663 - DNA, 40 bp, Homo sapiens
ttcttttttatggttttcttttttaatgatgtatctaaaa

SEQ ID NO: 50664 - DNA, 40 bp, Homo sapiens
tttagatacatcattaaaaaagaaaaccataaaaaagaat

SEQ ID NO: 50665 - DNA, 40 bp, Homo sapiens
attcttttttatggttttcttttttaatgatgtatctaaa

SEQ ID NO: 50666 - DNA, 40 bp, Homo sapiens
ttagatacatcattaaaaaagaaaaccataaaaaagaata

SEQ ID NO: 50667 - DNA, 40 bp, Homo sapiens
tattcttttttatggttttcttttttaatgatgtatctaa

SEQ ID NO: 50668 - DNA, 40 bp, Homo sapiens
tagatacatcattaaaaaagaaaaccataaaaaagaatat

SEQ ID NO: 50669 - DNA, 40 bp, Homo sapiens
atattcttttttatggttttcttttttaatgatgtatcta

SEQ ID NO: 50670 - DNA, 40 bp, Homo sapiens
agatacatcattaaaaaagaaaaccataaaaaagaatatg

SEQ ID NO: 50671 - DNA, 40 bp, Homo sapiens
catattcttttttatggttttcttttttaatgatgtatct

SEQ ID NO: 50672 - DNA, 40 bp, Homo sapiens
gatacatcattaaaaaagaaaaccataaaaaagaatatga

SEQ ID NO: 50673 - DNA, 40 bp, Homo sapiens
tcatattcttttttatggttttcttttttaatgatgtatc

SEQ ID NO: 50674 - DNA, 40 bp, Homo sapiens
atacatcattaaaaaagaaaaccataaaaaagaatatgaa

SEQ ID NO: 50675 - DNA, 40 bp, Homo sapiens
ttcatattcttttttatggttttcttttttaatgatgtat

SEQ ID NO: 50676 - DNA, 40 bp, Homo sapiens
tacatcattaaaaaagaaaaccataaaaaagaatatgaaa

SEQ ID NO: 50677 - DNA, 40 bp, Homo sapiens
tttcatattcttttttatggttttcttttttaatgatgta

SEQ ID NO: 50678 - DNA, 40 bp, Homo sapiens
acatcattaaaaaagaaaaccataaaaaagaatatgaaaa

SEQ ID NO: 50679 - DNA, 40 bp, Homo sapiens
ttttcatattcttttttatggttttcttttttaatgatgt

SEQ ID NO: 50680 - DNA, 40 bp, Homo sapiens
catcattaaaaaagaaaaccataaaaaagaatatgaaaag

SEQ ID NO: 50681 - DNA, 40 bp, Homo sapiens
cttttcatattcttttttatggttttcttttttaatgatg

SEQ ID NO: 50682 - DNA, 40 bp, Homo sapiens
atcattaaaaaagaaaaccataaaaaagaatatgaaaaga

SEQ ID NO: 50683 - DNA, 40 bp, Homo sapiens
tcttttcatattcttttttatggttttcttttttaatgat

SEQ ID NO: 50684 - DNA, 40 bp, Homo sapiens
tcattaaaaaagaaaaccataaaaaagaatatgaaaagat

SEQ ID NO: 50685 - DNA, 40 bp, Homo sapiens
atcttttcatattcttttttatggttttcttttttaatga

SEQ ID NO: 50686 - DNA, 40 bp, Homo sapiens
cattaaaaaagaaaaccataaaaaagaatatgaaaagatg

SEQ ID NO: 50687 - DNA, 40 bp, Homo sapiens
catcttttcatattcttttttatggttttcttttttaatg

SEQ ID NO: 50688 - DNA, 40 bp, Homo sapiens
attaaaaaagaaaaccataaaaaagaatatgaaaagatga

SEQ ID NO: 50689 - DNA, 40 bp, Homo sapiens
tcatcttttcatattcttttttatggttttcttttttaat

SEQ ID NO: 50690 - DNA, 40 bp, Homo sapiens
ttaaaaaagaaaaccataaaaaagaatatgaaaagatgat

SEQ ID NO: 50691 - DNA, 40 bp, Homo sapiens
atcatcttttcatattcttttttatggttttcttttttaa

SEQ ID NO: 50692 - DNA, 40 bp, Homo sapiens
taaaaaagaaaaccataaaaaagaatatgaaaagatgatt

SEQ ID NO: 50693 - DNA, 40 bp, Homo sapiens
aatcatcttttcatattcttttttatggttttctttttta

SEQ ID NO: 50694 - DNA, 40 bp, Homo sapiens
aaaaaagaaaaccataaaaaagaatatgaaaagatgattt

SEQ ID NO: 50695 - DNA, 40 bp, Homo sapiens
aaatcatcttttcatattcttttttatggttttctttttt

SEQ ID NO: 50696 - DNA, 40 bp, Homo sapiens
aaaaagaaaaccataaaaaagaatatgaaaagatgatttg

SEQ ID NO: 50697 - DNA, 40 bp, Homo sapiens
caaatcatcttttcatattcttttttatggttttcttttt

SEQ ID NO: 50698 - DNA, 40 bp, Homo sapiens
aaaagaaaaccataaaaaagaatatgaaaagatgatttga

SEQ ID NO: 50699 - DNA, 40 bp, Homo sapiens
tcaaatcatcttttcatattcttttttatggttttctttt

SEQ ID NO: 50700 - DNA, 40 bp, Homo sapiens
aaagaaaaccataaaaaagaatatgaaaagatgatttgag

SEQ ID NO: 50701 - DNA, 40 bp, Homo sapiens
ctcaaatcatcttttcatattcttttttatggttttcttt

SEQ ID NO: 50702 - DNA, 40 bp, Homo sapiens
aagaaaaccataaaaaagaatatgaaaagatgatttgaga

SEQ ID NO: 50703 - DNA, 40 bp, Homo sapiens
tctcaaatcatcttttcatattcttttttatggttttctt

SEQ ID NO: 50704 - DNA, 40 bp, Homo sapiens
agaaaaccataaaaaagaatatgaaaagatgatttgagat

SEQ ID NO: 50705 - DNA, 40 bp, Homo sapiens
atctcaaatcatcttttcatattcttttttatggttttct

SEQ ID NO: 50706 - DNA, 40 bp, Homo sapiens
gaaaaccataaaaaagaatatgaaaagatgatttgagatg

SEQ ID NO: 50707 - DNA, 40 bp, Homo sapiens
catctcaaatcatcttttcatattcttttttatggttttc

SEQ ID NO: 50708 - DNA, 40 bp, Homo sapiens
aaaaccataaaaaagaatatgaaaagatgatttgagatgg

SEQ ID NO: 50709 - DNA, 40 bp, Homo sapiens
ccatctcaaatcatcttttcatattcttttttatggtttt

SEQ ID NO: 50710 - DNA, 40 bp, Homo sapiens
aaaccataaaaaagaatatgaaaagatgatttgagatggt

SEQ ID NO: 50711 - DNA, 40 bp, Homo sapiens
accatctcaaatcatcttttcatattcttttttatggttt

SEQ ID NO: 50712 - DNA, 40 bp, Homo sapiens
aaccataaaaaagaatatgaaaagatgatttgagatggtg

SEQ ID NO: 50713 - DNA, 40 bp, Homo sapiens
caccatctcaaatcatcttttcatattcttttttatggtt

SEQ ID NO: 50714 - DNA, 40 bp, Homo sapiens
accataaaaaagaatatgaaaagatgatttgagatggtgt

SEQ ID NO: 50715 - DNA, 40 bp, Homo sapiens
acaccatctcaaatcatcttttcatattcttttttatggt

SEQ ID NO: 50716 - DNA, 40 bp, Homo sapiens
ccataaaaaagaatatgaaaagatgatttgagatggtgtc

SEQ ID NO: 50717 - DNA, 40 bp, Homo sapiens
gacaccatctcaaatcatcttttcatattcttttttatgg

SEQ ID NO: 50718 - DNA, 40 bp, Homo sapiens
cataaaaaagaatatgaaaagatgatttgagatggtgtca

SEQ ID NO: 50719 - DNA, 40 bp, Homo sapiens
tgacaccatctcaaatcatcttttcatattcttttttatg

SEQ ID NO: 50720 - DNA, 40 bp, Homo sapiens
ataaaaaagaatatgaaaagatgatttgagatggtgtcac

SEQ ID NO: 50721 - DNA, 40 bp, Homo sapiens
gtgacaccatctcaaatcatcttttcatattcttttttat

SEQ ID NO: 50722 - DNA, 40 bp, Homo sapiens
taaaaaagaatatgaaaagatgatttgagatggtgtcact

SEQ ID NO: 50723 - DNA, 40 bp, Homo sapiens
agtgacaccatctcaaatcatcttttcatattctttttta

SEQ ID NO: 50724 - DNA, 40 bp, Homo sapiens
aaaaaagaatatgaaaagatgatttgagatggtgtcactt

SEQ ID NO: 50725 - DNA, 40 bp, Homo sapiens
aagtgacaccatctcaaatcatcttttcatattctttttt

SEQ ID NO: 50726 - DNA, 40 bp, Homo sapiens
aaaaagaatatgaaaagatgatttgagatggtgtcacttt

SEQ ID NO: 50727 - DNA, 40 bp, Homo sapiens
aaagtgacaccatctcaaatcatcttttcatattcttttt

SEQ ID NO: 50728 - DNA, 40 bp, Homo sapiens
aaaagaatatgaaaagatgatttgagatggtgtcacttta

SEQ ID NO: 50729 - DNA, 40 bp, Homo sapiens
taaagtgacaccatctcaaatcatcttttcatattctttt

SEQ ID NO: 50730 - DNA, 40 bp, Homo sapiens
aaagaatatgaaaagatgatttgagatggtgtcactttaa

SEQ ID NO: 50731 - DNA, 40 bp, Homo sapiens
ttaaagtgacaccatctcaaatcatcttttcatattcttt

SEQ ID NO: 50732 - DNA, 40 bp, Homo sapiens
aagaatatgaaaagatgatttgagatggtgtcactttaac

SEQ ID NO: 50733 - DNA, 40 bp, Homo sapiens
gttaaagtgacaccatctcaaatcatcttttcatattctt

SEQ ID NO: 50734 - DNA, 40 bp, Homo sapiens
agaatatgaaaagatgatttgagatggtgtcactttaaca

SEQ ID NO: 50735 - DNA, 40 bp, Homo sapiens
tgttaaagtgacaccatctcaaatcatcttttcatattct

SEQ ID NO: 50736 - DNA, 40 bp, Homo sapiens
gaatatgaaaagatgatttgagatggtgtcactttaacag

SEQ ID NO: 50737 - DNA, 40 bp, Homo sapiens
ctgttaaagtgacaccatctcaaatcatcttttcatattc

SEQ ID NO: 50738 - DNA, 40 bp, Homo sapiens
aatatgaaaagatgatttgagatggtgtcactttaacagt

SEQ ID NO: 50739 - DNA, 40 bp, Homo sapiens
actgttaaagtgacaccatctcaaatcatcttttcatatt

SEQ ID NO: 50740 - DNA, 40 bp, Homo sapiens
atatgaaaagatgatttgagatggtgtcactttaacagtc

SEQ ID NO: 50741 - DNA, 40 bp, Homo sapiens
gactgttaaagtgacaccatctcaaatcatcttttcatat

SEQ ID NO: 50742 - DNA, 40 bp, Homo sapiens
tatgaaaagatgatttgagatggtgtcactttaacagtct

SEQ ID NO: 50743 - DNA, 40 bp, Homo sapiens
agactgttaaagtgacaccatctcaaatcatcttttcata

SEQ ID NO: 50744 - DNA, 40 bp, Homo sapiens
atgaaaagatgatttgagatggtgtcactttaacagtctt

SEQ ID NO: 50745 - DNA, 40 bp, Homo sapiens
aagactgttaaagtgacaccatctcaaatcatcttttcat

SEQ ID NO: 50746 - DNA, 40 bp, Homo sapiens
tgaaaagatgatttgagatggtgtcactttaacagtctta

SEQ ID NO: 50747 - DNA, 40 bp, Homo sapiens
taagactgttaaagtgacaccatctcaaatcatcttttca

SEQ ID NO: 50748 - DNA, 40 bp, Homo sapiens
gaaaagatgatttgagatggtgtcactttaacagtcttaa

SEQ ID NO: 50749 - DNA, 40 bp, Homo sapiens
ttaagactgttaaagtgacaccatctcaaatcatcttttc

SEQ ID NO: 50750 - DNA, 40 bp, Homo sapiens
aaaagatgatttgagatggtgtcactttaacagtcttaaa

SEQ ID NO: 50751 - DNA, 40 bp, Homo sapiens
tttaagactgttaaagtgacaccatctcaaatcatctttt

SEQ ID NO: 50752 - DNA, 40 bp, Homo sapiens
aaagatgatttgagatggtgtcactttaacagtcttaaaa

SEQ ID NO: 50753 - DNA, 40 bp, Homo sapiens
ttttaagactgttaaagtgacaccatctcaaatcatcttt

SEQ ID NO: 50754 - DNA, 40 bp, Homo sapiens
aagatgatttgagatggtgtcactttaacagtcttaaaag

SEQ ID NO: 50755 - DNA, 40 bp, Homo sapiens
cttttaagactgttaaagtgacaccatctcaaatcatctt

SEQ ID NO: 50756 - DNA, 40 bp, Homo sapiens
agatgatttgagatggtgtcactttaacagtcttaaaagc

SEQ ID NO: 50757 - DNA, 40 bp, Homo sapiens
gcttttaagactgttaaagtgacaccatctcaaatcatct

SEQ ID NO: 50758 - DNA, 40 bp, Homo sapiens
gatgatttgagatggtgtcactttaacagtcttaaaagca

SEQ ID NO: 50759 - DNA, 40 bp, Homo sapiens
tgcttttaagactgttaaagtgacaccatctcaaatcatc

SEQ ID NO: 50760 - DNA, 40 bp, Homo sapiens
atgatttgagatggtgtcactttaacagtcttaaaagcaa

SEQ ID NO: 50761 - DNA, 40 bp, Homo sapiens
ttgcttttaagactgttaaagtgacaccatctcaaatcat

SEQ ID NO: 50762 - DNA, 40 bp, Homo sapiens
tgatttgagatggtgtcactttaacagtcttaaaagcaat

SEQ ID NO: 50763 - DNA, 40 bp, Homo sapiens
attgcttttaagactgttaaagtgacaccatctcaaatca

SEQ ID NO: 50764 - DNA, 40 bp, Homo sapiens
gatttgagatggtgtcactttaacagtcttaaaagcaatc

SEQ ID NO: 50765 - DNA, 40 bp, Homo sapiens
gattgcttttaagactgttaaagtgacaccatctcaaatc

SEQ ID NO: 50766 - DNA, 40 bp, Homo sapiens
atttgagatggtgtcactttaacagtcttaaaagcaatcg

SEQ ID NO: 50767 - DNA, 40 bp, Homo sapiens
cgattgcttttaagactgttaaagtgacaccatctcaaat

SEQ ID NO: 50768 - DNA, 40 bp, Homo sapiens
tttgagatggtgtcactttaacagtcttaaaagcaatcgt

SEQ ID NO: 50769 - DNA, 40 bp, Homo sapiens
acgattgcttttaagactgttaaagtgacaccatctcaaa

SEQ ID NO: 50770 - DNA, 40 bp, Homo sapiens
ttgagatggtgtcactttaacagtcttaaaagcaatcgtg

SEQ ID NO: 50771 - DNA, 40 bp, Homo sapiens
cacgattgcttttaagactgttaaagtgacaccatctcaa

SEQ ID NO: 50772 - DNA, 40 bp, Homo sapiens
tgagatggtgtcactttaacagtcttaaaagcaatcgtgt

SEQ ID NO: 50773 - DNA, 40 bp, Homo sapiens
acacgattgcttttaagactgttaaagtgacaccatctca

SEQ ID NO: 50774 - DNA, 40 bp, Homo sapiens
gagatggtgtcactttaacagtcttaaaagcaatcgtgtg

SEQ ID NO: 50775 - DNA, 40 bp, Homo sapiens
cacacgattgcttttaagactgttaaagtgacaccatctc

SEQ ID NO: 50776 - DNA, 40 bp, Homo sapiens
agatggtgtcactttaacagtcttaaaagcaatcgtgtgt

SEQ ID NO: 50777 - DNA, 40 bp, Homo sapiens
acacacgattgcttttaagactgttaaagtgacaccatct

SEQ ID NO: 50778 - DNA, 40 bp, Homo sapiens
gatggtgtcactttaacagtcttaaaagcaatcgtgtgta

SEQ ID NO: 50779 - DNA, 40 bp, Homo sapiens
tacacacgattgcttttaagactgttaaagtgacaccatc

SEQ ID NO: 50780 - DNA, 40 bp, Homo sapiens
atggtgtcactttaacagtcttaaaagcaatcgtgtgtat

SEQ ID NO: 50781 - DNA, 40 bp, Homo sapiens
atacacacgattgcttttaagactgttaaagtgacaccat

SEQ ID NO: 50782 - DNA, 40 bp, Homo sapiens
tggtgtcactttaacagtcttaaaagcaatcgtgtgtata

SEQ ID NO: 50783 - DNA, 40 bp, Homo sapiens
tatacacacgattgcttttaagactgttaaagtgacacca

SEQ ID NO: 50784 - DNA, 40 bp, Homo sapiens
ggtgtcactttaacagtcttaaaagcaatcgtgtgtatag

SEQ ID NO: 50785 - DNA, 40 bp, Homo sapiens
ctatacacacgattgcttttaagactgttaaagtgacacc

SEQ ID NO: 50786 - DNA, 40 bp, Homo sapiens
gtgtcactttaacagtcttaaaagcaatcgtgtgtatagc

SEQ ID NO: 50787 - DNA, 40 bp, Homo sapiens
gctatacacacgattgcttttaagactgttaaagtgacac

SEQ ID NO: 50788 - DNA, 40 bp, Homo sapiens
tgtcactttaacagtcttaaaagcaatcgtgtgtatagca

SEQ ID NO: 50789 - DNA, 40 bp, Homo sapiens
tgctatacacacgattgcttttaagactgttaaagtgaca

SEQ ID NO: 50790 - DNA, 40 bp, Homo sapiens
gtcactttaacagtcttaaaagcaatcgtgtgtatagcat

SEQ ID NO: 50791 - DNA, 40 bp, Homo sapiens
atgctatacacacgattgcttttaagactgttaaagtgac

SEQ ID NO: 50792 - DNA, 40 bp, Homo sapiens
tcactttaacagtcttaaaagcaatcgtgtgtatagcata

SEQ ID NO: 50793 - DNA, 40 bp, Homo sapiens
tatgctatacacacgattgcttttaagactgttaaagtga

SEQ ID NO: 50794 - DNA, 40 bp, Homo sapiens
cactttaacagtcttaaaagcaatcgtgtgtatagcatag

SEQ ID NO: 50795 - DNA, 40 bp, Homo sapiens
ctatgctatacacacgattgcttttaagactgttaaagtg

SEQ ID NO: 50796 - DNA, 40 bp, Homo sapiens
actttaacagtcttaaaagcaatcgtgtgtatagcataga

SEQ ID NO: 50797 - DNA, 40 bp, Homo sapiens
tctatgctatacacacgattgcttttaagactgttaaagt

SEQ ID NO: 50798 - DNA, 40 bp, Homo sapiens
ctttaacagtcttaaaagcaatcgtgtgtatagcatagaa

SEQ ID NO: 50799 - DNA, 40 bp, Homo sapiens
ttctatgctatacacacgattgcttttaagactgttaaag

SEQ ID NO: 50800 - DNA, 40 bp, Homo sapiens
tttaacagtcttaaaagcaatcgtgtgtatagcatagaat

SEQ ID NO: 50801 - DNA, 40 bp, Homo sapiens
attctatgctatacacacgattgcttttaagactgttaaa

SEQ ID NO: 50802 - DNA, 40 bp, Homo sapiens
ttaacagtcttaaaagcaatcgtgtgtatagcatagaatt

SEQ ID NO: 50803 - DNA, 40 bp, Homo sapiens
aattctatgctatacacacgattgcttttaagactgttaa

SEQ ID NO: 50804 - DNA, 40 bp, Homo sapiens
taacagtcttaaaagcaatcgtgtgtatagcatagaattg

SEQ ID NO: 50805 - DNA, 40 bp, Homo sapiens
caattctatgctatacacacgattgcttttaagactgtta

SEQ ID NO: 50806 - DNA, 40 bp, Homo sapiens
aacagtcttaaaagcaatcgtgtgtatagcatagaattgc

SEQ ID NO: 50807 - DNA, 40 bp, Homo sapiens
gcaattctatgctatacacacgattgcttttaagactgtt

SEQ ID NO: 50808 - DNA, 40 bp, Homo sapiens
acagtcttaaaagcaatcgtgtgtatagcatagaattgct

SEQ ID NO: 50809 - DNA, 40 bp, Homo sapiens
agcaattctatgctatacacacgattgcttttaagactgt

SEQ ID NO: 50810 - DNA, 40 bp, Homo sapiens
cagtcttaaaagcaatcgtgtgtatagcatagaattgctt

SEQ ID NO: 50811 - DNA, 40 bp, Homo sapiens
aagcaattctatgctatacacacgattgcttttaagactg

SEQ ID NO: 50812 - DNA, 40 bp, Homo sapiens
agtcttaaaagcaatcgtgtgtatagcatagaattgcttg

SEQ ID NO: 50813 - DNA, 40 bp, Homo sapiens
caagcaattctatgctatacacacgattgcttttaagact

SEQ ID NO: 50814 - DNA, 40 bp, Homo sapiens
gtcttaaaagcaatcgtgtgtatagcatagaattgcttgg

SEQ ID NO: 50815 - DNA, 40 bp, Homo sapiens
ccaagcaattctatgctatacacacgattgcttttaagac

SEQ ID NO: 50816 - DNA, 40 bp, Homo sapiens
tcttaaaagcaatcgtgtgtatagcatagaattgcttgga

SEQ ID NO: 50817 - DNA, 40 bp, Homo sapiens
tccaagcaattctatgctatacacacgattgcttttaaga

SEQ ID NO: 50818 - DNA, 40 bp, Homo sapiens
cttaaaagcaatcgtgtgtatagcatagaattgcttggat

SEQ ID NO: 50819 - DNA, 40 bp, Homo sapiens
atccaagcaattctatgctatacacacgattgcttttaag

SEQ ID NO: 50820 - DNA, 40 bp, Homo sapiens
ttaaaagcaatcgtgtgtatagcatagaattgcttggatt

SEQ ID NO: 50821 - DNA, 40 bp, Homo sapiens
aatccaagcaattctatgctatacacacgattgcttttaa

SEQ ID NO: 50822 - DNA, 40 bp, Homo sapiens
taaaagcaatcgtgtgtatagcatagaattgcttggattg

SEQ ID NO: 50823 - DNA, 40 bp, Homo sapiens
caatccaagcaattctatgctatacacacgattgctttta

SEQ ID NO: 50824 - DNA, 40 bp, Homo sapiens
aaaagcaatcgtgtgtatagcatagaattgcttggattgg

SEQ ID NO: 50825 - DNA, 40 bp, Homo sapiens
ccaatccaagcaattctatgctatacacacgattgctttt

SEQ ID NO: 50826 - DNA, 40 bp, Homo sapiens
aaagcaatcgtgtgtatagcatagaattgcttggattgga

SEQ ID NO: 50827 - DNA, 40 bp, Homo sapiens
tccaatccaagcaattctatgctatacacacgattgcttt

SEQ ID NO: 50828 - DNA, 40 bp, Homo sapiens
aagcaatcgtgtgtatagcatagaattgcttggattggat

SEQ ID NO: 50829 - DNA, 40 bp, Homo sapiens
atccaatccaagcaattctatgctatacacacgattgctt

SEQ ID NO: 50830 - DNA, 40 bp, Homo sapiens
agcaatcgtgtgtatagcatagaattgcttggattggata

SEQ ID NO: 50831 - DNA, 40 bp, Homo sapiens
tatccaatccaagcaattctatgctatacacacgattgct

SEQ ID NO: 50832 - DNA, 40 bp, Homo sapiens
gcaatcgtgtgtatagcatagaattgcttggattggataa

SEQ ID NO: 50833 - DNA, 40 bp, Homo sapiens
ttatccaatccaagcaattctatgctatacacacgattgc

SEQ ID NO: 50834 - DNA, 40 bp, Homo sapiens
caatcgtgtgtatagcatagaattgcttggattggataaa

SEQ ID NO: 50835 - DNA, 40 bp, Homo sapiens
tttatccaatccaagcaattctatgctatacacacgattg

SEQ ID NO: 50836 - DNA, 40 bp, Homo sapiens
aatcgtgtgtatagcatagaattgcttggattggataaac

SEQ ID NO: 50837 - DNA, 40 bp, Homo sapiens
gtttatccaatccaagcaattctatgctatacacacgatt

SEQ ID NO: 50838 - DNA, 40 bp, Homo sapiens
atcgtgtgtatagcatagaattgcttggattggataaaca

SEQ ID NO: 50839 - DNA, 40 bp, Homo sapiens
tgtttatccaatccaagcaattctatgctatacacacgat

SEQ ID NO: 50840 - DNA, 40 bp, Homo sapiens
tcgtgtgtatagcatagaattgcttggattggataaacag

SEQ ID NO: 50841 - DNA, 40 bp, Homo sapiens
ctgtttatccaatccaagcaattctatgctatacacacga

SEQ ID NO: 50842 - DNA, 40 bp, Homo sapiens
cgtgtgtatagcatagaattgcttggattggataaacagt

SEQ ID NO: 50843 - DNA, 40 bp, Homo sapiens
actgtttatccaatccaagcaattctatgctatacacacg

SEQ ID NO: 50844 - DNA, 40 bp, Homo sapiens
gtgtgtatagcatagaattgcttggattggataaacagtg

SEQ ID NO: 50845 - DNA, 40 bp, Homo sapiens
cactgtttatccaatccaagcaattctatgctatacacac

SEQ ID NO: 50846 - DNA, 40 bp, Homo sapiens
tgtgtatagcatagaattgcttggattggataaacagtgg

SEQ ID NO: 50847 - DNA, 40 bp, Homo sapiens
ccactgtttatccaatccaagcaattctatgctatacaca

SEQ ID NO: 50848 - DNA, 40 bp, Homo sapiens
gtgtatagcatagaattgcttggattggataaacagtggc

SEQ ID NO: 50849 - DNA, 40 bp, Homo sapiens
gccactgtttatccaatccaagcaattctatgctatacac

SEQ ID NO: 50850 - DNA, 40 bp, Homo sapiens
tgtatagcatagaattgcttggattggataaacagtggca

SEQ ID NO: 50851 - DNA, 40 bp, Homo sapiens
tgccactgtttatccaatccaagcaattctatgctataca

SEQ ID NO: 50852 - DNA, 40 bp, Homo sapiens
gtatagcatagaattgcttggattggataaacagtggcat

SEQ ID NO: 50853 - DNA, 40 bp, Homo sapiens
atgccactgtttatccaatccaagcaattctatgctatac

SEQ ID NO: 50854 - DNA, 40 bp, Homo sapiens
tatagcatagaattgcttggattggataaacagtggcatt

SEQ ID NO: 50855 - DNA, 40 bp, Homo sapiens
aatgccactgtttatccaatccaagcaattctatgctata

SEQ ID NO: 50856 - DNA, 40 bp, Homo sapiens
atagcatagaattgcttggattggataaacagtggcatta

SEQ ID NO: 50857 - DNA, 40 bp, Homo sapiens
taatgccactgtttatccaatccaagcaattctatgctat

SEQ ID NO: 50858 - DNA, 40 bp, Homo sapiens
tagcatagaattgcttggattggataaacagtggcattat

SEQ ID NO: 50859 - DNA, 40 bp, Homo sapiens
ataatgccactgtttatccaatccaagcaattctatgcta

SEQ ID NO: 50860 - DNA, 40 bp, Homo sapiens
agcatagaattgcttggattggataaacagtggcattata

SEQ ID NO: 50861 - DNA, 40 bp, Homo sapiens
tataatgccactgtttatccaatccaagcaattctatgct

SEQ ID NO: 50862 - DNA, 40 bp, Homo sapiens
gcatagaattgcttggattggataaacagtggcattatat

SEQ ID NO: 50863 - DNA, 40 bp, Homo sapiens
atataatgccactgtttatccaatccaagcaattctatgc

SEQ ID NO: 50864 - DNA, 40 bp, Homo sapiens
catagaattgcttggattggataaacagtggcattatata

SEQ ID NO: 50865 - DNA, 40 bp, Homo sapiens
tatataatgccactgtttatccaatccaagcaattctatg

SEQ ID NO: 50866 - DNA, 40 bp, Homo sapiens
atagaattgcttggattggataaacagtggcattatatat

SEQ ID NO: 50867 - DNA, 40 bp, Homo sapiens
atatataatgccactgtttatccaatccaagcaattctat

SEQ ID NO: 50868 - DNA, 40 bp, Homo sapiens
tagaattgcttggattggataaacagtggcattatatatt

SEQ ID NO: 50869 - DNA, 40 bp, Homo sapiens
aatatataatgccactgtttatccaatccaagcaattcta

SEQ ID NO: 50870 - DNA, 40 bp, Homo sapiens
agaattgcttggattggataaacagtggcattatatattt

SEQ ID NO: 50871 - DNA, 40 bp, Homo sapiens
aaatatataatgccactgtttatccaatccaagcaattct

SEQ ID NO: 50872 - DNA, 40 bp, Homo sapiens
gaattgcttggattggataaacagtggcattatatatttt

SEQ ID NO: 50873 - DNA, 40 bp, Homo sapiens
aaaatatataatgccactgtttatccaatccaagcaattc

SEQ ID NO: 50874 - DNA, 40 bp, Homo sapiens
aattgcttggattggataaacagtggcattatatatttta

SEQ ID NO: 50875 - DNA, 40 bp, Homo sapiens
taaaatatataatgccactgtttatccaatccaagcaatt

SEQ ID NO: 50876 - DNA, 40 bp, Homo sapiens
attgcttggattggataaacagtggcattatatattttaa

SEQ ID NO: 50877 - DNA, 40 bp, Homo sapiens
ttaaaatatataatgccactgtttatccaatccaagcaat

SEQ ID NO: 50878 - DNA, 40 bp, Homo sapiens
ttgcttggattggataaacagtggcattatatattttaaa

SEQ ID NO: 50879 - DNA, 40 bp, Homo sapiens
tttaaaatatataatgccactgtttatccaatccaagcaa

SEQ ID NO: 50880 - DNA, 40 bp, Homo sapiens
tgcttggattggataaacagtggcattatatattttaaaa

SEQ ID NO: 50881 - DNA, 40 bp, Homo sapiens
ttttaaaatatataatgccactgtttatccaatccaagca

SEQ ID NO: 50882 - DNA, 40 bp, Homo sapiens
gcttggattggataaacagtggcattatatattttaaaaa

SEQ ID NO: 50883 - DNA, 40 bp, Homo sapiens
tttttaaaatatataatgccactgtttatccaatccaagc

SEQ ID NO: 50884 - DNA, 40 bp, Homo sapiens
cttggattggataaacagtggcattatatattttaaaaaa

SEQ ID NO: 50885 - DNA, 40 bp, Homo sapiens
ttttttaaaatatataatgccactgtttatccaatccaag

SEQ ID NO: 50886 - DNA, 40 bp, Homo sapiens
ttggattggataaacagtggcattatatattttaaaaaat

SEQ ID NO: 50887 - DNA, 40 bp, Homo sapiens
attttttaaaatatataatgccactgtttatccaatccaa

SEQ ID NO: 50888 - DNA, 40 bp, Homo sapiens
tggattggataaacagtggcattatatattttaaaaaata

SEQ ID NO: 50889 - DNA, 40 bp, Homo sapiens
tattttttaaaatatataatgccactgtttatccaatcca

SEQ ID NO: 50890 - DNA, 40 bp, Homo sapiens
ggattggataaacagtggcattatatattttaaaaaataa

SEQ ID NO: 50891 - DNA, 40 bp, Homo sapiens
ttattttttaaaatatataatgccactgtttatccaatcc

SEQ ID NO: 50892 - DNA, 40 bp, Homo sapiens
gattggataaacagtggcattatatattttaaaaaataaa

SEQ ID NO: 50893 - DNA, 40 bp, Homo sapiens
tttattttttaaaatatataatgccactgtttatccaatc

SEQ ID NO: 50894 - DNA, 40 bp, Homo sapiens
attggataaacagtggcattatatattttaaaaaataaaa

SEQ ID NO: 50895 - DNA, 40 bp, Homo sapiens
ttttattttttaaaatatataatgccactgtttatccaat

SEQ ID NO: 50896 - DNA, 40 bp, Homo sapiens
ttggataaacagtggcattatatattttaaaaaataaaag

SEQ ID NO: 50897 - DNA, 40 bp, Homo sapiens
cttttattttttaaaatatataatgccactgtttatccaa

SEQ ID NO: 50898 - DNA, 40 bp, Homo sapiens
tggataaacagtggcattatatattttaaaaaataaaagt

SEQ ID NO: 50899 - DNA, 40 bp, Homo sapiens
acttttattttttaaaatatataatgccactgtttatcca

SEQ ID NO: 50900 - DNA, 40 bp, Homo sapiens
ggataaacagtggcattatatattttaaaaaataaaagtt

SEQ ID NO: 50901 - DNA, 40 bp, Homo sapiens
aacttttattttttaaaatatataatgccactgtttatcc

SEQ ID NO: 50902 - DNA, 40 bp, Homo sapiens
gataaacagtggcattatatattttaaaaaataaaagttt

SEQ ID NO: 50903 - DNA, 40 bp, Homo sapiens
aaacttttattttttaaaatatataatgccactgtttatc

SEQ ID NO: 50904 - DNA, 40 bp, Homo sapiens
ataaacagtggcattatatattttaaaaaataaaagtttt

SEQ ID NO: 50905 - DNA, 40 bp, Homo sapiens
aaaacttttattttttaaaatatataatgccactgtttat

SEQ ID NO: 50906 - DNA, 40 bp, Homo sapiens
taaacagtggcattatatattttaaaaaataaaagttttg

SEQ ID NO: 50907 - DNA, 40 bp, Homo sapiens
caaaacttttattttttaaaatatataatgccactgttta

SEQ ID NO: 50908 - DNA, 40 bp, Homo sapiens
aaacagtggcattatatattttaaaaaataaaagttttga

SEQ ID NO: 50909 - DNA, 40 bp, Homo sapiens
tcaaaacttttattttttaaaatatataatgccactgttt

SEQ ID NO: 50910 - DNA, 40 bp, Homo sapiens
aacagtggcattatatattttaaaaaataaaagttttgaa

SEQ ID NO: 50911 - DNA, 40 bp, Homo sapiens
ttcaaaacttttattttttaaaatatataatgccactgtt

SEQ ID NO: 50912 - DNA, 40 bp, Homo sapiens
acagtggcattatatattttaaaaaataaaagttttgaaa

SEQ ID NO: 50913 - DNA, 40 bp, Homo sapiens
tttcaaaacttttattttttaaaatatataatgccactgt

SEQ ID NO: 50914 - DNA, 40 bp, Homo sapiens
cagtggcattatatattttaaaaaataaaagttttgaaag

SEQ ID NO: 50915 - DNA, 40 bp, Homo sapiens
ctttcaaaacttttattttttaaaatatataatgccactg

SEQ ID NO: 50916 - DNA, 40 bp, Homo sapiens
agtggcattatatattttaaaaaataaaagttttgaaaga

SEQ ID NO: 50917 - DNA, 40 bp, Homo sapiens
tctttcaaaacttttattttttaaaatatataatgccact

SEQ ID NO: 50918 - DNA, 40 bp, Homo sapiens
gtggcattatatattttaaaaaataaaagttttgaaagat

SEQ ID NO: 50919 - DNA, 40 bp, Homo sapiens
atctttcaaaacttttattttttaaaatatataatgccac

SEQ ID NO: 50920 - DNA, 40 bp, Homo sapiens
tggcattatatattttaaaaaataaaagttttgaaagatt

SEQ ID NO: 50921 - DNA, 40 bp, Homo sapiens
aatctttcaaaacttttattttttaaaatatataatgcca

SEQ ID NO: 50922 - DNA, 40 bp, Homo sapiens
ggcattatatattttaaaaaataaaagttttgaaagattg

SEQ ID NO: 50923 - DNA, 40 bp, Homo sapiens
caatctttcaaaacttttattttttaaaatatataatgcc

SEQ ID NO: 50924 - DNA, 40 bp, Homo sapiens
gcattatatattttaaaaaataaaagttttgaaagattga

SEQ ID NO: 50925 - DNA, 40 bp, Homo sapiens
tcaatctttcaaaacttttattttttaaaatatataatgc

SEQ ID NO: 50926 - DNA, 40 bp, Homo sapiens
cattatatattttaaaaaataaaagttttgaaagattgaa

SEQ ID NO: 50927 - DNA, 40 bp, Homo sapiens
ttcaatctttcaaaacttttattttttaaaatatataatg

SEQ ID NO: 50928 - DNA, 40 bp, Homo sapiens
attatatattttaaaaaataaaagttttgaaagattgaag

SEQ ID NO: 50929 - DNA, 40 bp, Homo sapiens
cttcaatctttcaaaacttttattttttaaaatatataat

SEQ ID NO: 50930 - DNA, 40 bp, Homo sapiens
ttatatattttaaaaaataaaagttttgaaagattgaaga

SEQ ID NO: 50931 - DNA, 40 bp, Homo sapiens
tcttcaatctttcaaaacttttattttttaaaatatataa

SEQ ID NO: 50932 - DNA, 40 bp, Homo sapiens
tatatattttaaaaaataaaagttttgaaagattgaagaa

SEQ ID NO: 50933 - DNA, 40 bp, Homo sapiens
ttcttcaatctttcaaaacttttattttttaaaatatata

SEQ ID NO: 50934 - DNA, 40 bp, Homo sapiens
atatattttaaaaaataaaagttttgaaagattgaagaat

SEQ ID NO: 50935 - DNA, 40 bp, Homo sapiens
attcttcaatctttcaaaacttttattttttaaaatatat

SEQ ID NO: 50936 - DNA, 40 bp, Homo sapiens
tatattttaaaaaataaaagttttgaaagattgaagaatt

SEQ ID NO: 50937 - DNA, 40 bp, Homo sapiens
aattcttcaatctttcaaaacttttattttttaaaatata

SEQ ID NO: 50938 - DNA, 40 bp, Homo sapiens
atattttaaaaaataaaagttttgaaagattgaagaattt

SEQ ID NO: 50939 - DNA, 40 bp, Homo sapiens
aaattcttcaatctttcaaaacttttattttttaaaatat

SEQ ID NO: 50940 - DNA, 40 bp, Homo sapiens
tattttaaaaaataaaagttttgaaagattgaagaatttg

SEQ ID NO: 50941 - DNA, 40 bp, Homo sapiens
caaattcttcaatctttcaaaacttttattttttaaaata

SEQ ID NO: 50942 - DNA, 40 bp, Homo sapiens
attttaaaaaataaaagttttgaaagattgaagaatttgg

SEQ ID NO: 50943 - DNA, 40 bp, Homo sapiens
ccaaattcttcaatctttcaaaacttttattttttaaaat

SEQ ID NO: 50944 - DNA, 40 bp, Homo sapiens
ttttaaaaaataaaagttttgaaagattgaagaatttggg

SEQ ID NO: 50945 - DNA, 40 bp, Homo sapiens
cccaaattcttcaatctttcaaaacttttattttttaaaa

SEQ ID NO: 50946 - DNA, 40 bp, Homo sapiens
tttaaaaaataaaagttttgaaagattgaagaatttgggc

SEQ ID NO: 50947 - DNA, 40 bp, Homo sapiens
gcccaaattcttcaatctttcaaaacttttattttttaaa

SEQ ID NO: 50948 - DNA, 40 bp, Homo sapiens
ttaaaaaataaaagttttgaaagattgaagaatttgggca

SEQ ID NO: 50949 - DNA, 40 bp, Homo sapiens
tgcccaaattcttcaatctttcaaaacttttattttttaa

SEQ ID NO: 50950 - DNA, 40 bp, Homo sapiens
taaaaaataaaagttttgaaagattgaagaatttgggcat

SEQ ID NO: 50951 - DNA, 40 bp, Homo sapiens
atgcccaaattcttcaatctttcaaaacttttatttttta

SEQ ID NO: 50952 - DNA, 40 bp, Homo sapiens
aaaaaataaaagttttgaaagattgaagaatttgggcatt

SEQ ID NO: 50953 - DNA, 40 bp, Homo sapiens
aatgcccaaattcttcaatctttcaaaacttttatttttt

SEQ ID NO: 50954 - DNA, 40 bp, Homo sapiens
aaaaataaaagttttgaaagattgaagaatttgggcatta

SEQ ID NO: 50955 - DNA, 40 bp, Homo sapiens
taatgcccaaattcttcaatctttcaaaacttttattttt

SEQ ID NO: 50956 - DNA, 40 bp, Homo sapiens
aaaataaaagttttgaaagattgaagaatttgggcattac

SEQ ID NO: 50957 - DNA, 40 bp, Homo sapiens
gtaatgcccaaattcttcaatctttcaaaacttttatttt

SEQ ID NO: 50958 - DNA, 40 bp, Homo sapiens
aaataaaagttttgaaagattgaagaatttgggcattaca

SEQ ID NO: 50959 - DNA, 40 bp, Homo sapiens
tgtaatgcccaaattcttcaatctttcaaaacttttattt

SEQ ID NO: 50960 - DNA, 40 bp, Homo sapiens
aataaaagttttgaaagattgaagaatttgggcattacag

SEQ ID NO: 50961 - DNA, 40 bp, Homo sapiens
ctgtaatgcccaaattcttcaatctttcaaaacttttatt

SEQ ID NO: 50962 - DNA, 40 bp, Homo sapiens
ataaaagttttgaaagattgaagaatttgggcattacagt

SEQ ID NO: 50963 - DNA, 40 bp, Homo sapiens
actgtaatgcccaaattcttcaatctttcaaaacttttat

SEQ ID NO: 50964 - DNA, 40 bp, Homo sapiens
taaaagttttgaaagattgaagaatttgggcattacagtt

SEQ ID NO: 50965 - DNA, 40 bp, Homo sapiens
aactgtaatgcccaaattcttcaatctttcaaaactttta

SEQ ID NO: 50966 - DNA, 40 bp, Homo sapiens
aaaagttttgaaagattgaagaatttgggcattacagttc

SEQ ID NO: 50967 - DNA, 40 bp, Homo sapiens
gaactgtaatgcccaaattcttcaatctttcaaaactttt

SEQ ID NO: 50968 - DNA, 40 bp, Homo sapiens
aaagttttgaaagattgaagaatttgggcattacagttct

SEQ ID NO: 50969 - DNA, 40 bp, Homo sapiens
agaactgtaatgcccaaattcttcaatctttcaaaacttt

SEQ ID NO: 50970 - DNA, 40 bp, Homo sapiens
aagttttgaaagattgaagaatttgggcattacagttctc

SEQ ID NO: 50971 - DNA, 40 bp, Homo sapiens
gagaactgtaatgcccaaattcttcaatctttcaaaactt

SEQ ID NO: 50972 - DNA, 40 bp, Homo sapiens
agttttgaaagattgaagaatttgggcattacagttctct

SEQ ID NO: 50973 - DNA, 40 bp, Homo sapiens
agagaactgtaatgcccaaattcttcaatctttcaaaact

SEQ ID NO: 50974 - DNA, 40 bp, Homo sapiens
gttttgaaagattgaagaatttgggcattacagttctctt

SEQ ID NO: 50975 - DNA, 40 bp, Homo sapiens
aagagaactgtaatgcccaaattcttcaatctttcaaaac

SEQ ID NO: 50976 - DNA, 40 bp, Homo sapiens
ttttgaaagattgaagaatttgggcattacagttctctta

SEQ ID NO: 50977 - DNA, 40 bp, Homo sapiens
taagagaactgtaatgcccaaattcttcaatctttcaaaa

SEQ ID NO: 50978 - DNA, 40 bp, Homo sapiens
tttgaaagattgaagaatttgggcattacagttctcttaa

SEQ ID NO: 50979 - DNA, 40 bp, Homo sapiens
ttaagagaactgtaatgcccaaattcttcaatctttcaaa

SEQ ID NO: 50980 - DNA, 40 bp, Homo sapiens
ttgaaagattgaagaatttgggcattacagttctcttaaa

SEQ ID NO: 50981 - DNA, 40 bp, Homo sapiens
tttaagagaactgtaatgcccaaattcttcaatctttcaa

SEQ ID NO: 50982 - DNA, 40 bp, Homo sapiens
tgaaagattgaagaatttgggcattacagttctcttaaat

SEQ ID NO: 50983 - DNA, 40 bp, Homo sapiens
atttaagagaactgtaatgcccaaattcttcaatctttca

SEQ ID NO: 50984 - DNA, 40 bp, Homo sapiens
gaaagattgaagaatttgggcattacagttctcttaaatc

SEQ ID NO: 50985 - DNA, 40 bp, Homo sapiens
gatttaagagaactgtaatgcccaaattcttcaatctttc

SEQ ID NO: 50986 - DNA, 40 bp, Homo sapiens
aaagattgaagaatttgggcattacagttctcttaaatct

SEQ ID NO: 50987 - DNA, 40 bp, Homo sapiens
agatttaagagaactgtaatgcccaaattcttcaatcttt

SEQ ID NO: 50988 - DNA, 40 bp, Homo sapiens
aagattgaagaatttgggcattacagttctcttaaatctg

SEQ ID NO: 50989 - DNA, 40 bp, Homo sapiens
cagatttaagagaactgtaatgcccaaattcttcaatctt

SEQ ID NO: 50990 - DNA, 40 bp, Homo sapiens
agattgaagaatttgggcattacagttctcttaaatctga

SEQ ID NO: 50991 - DNA, 40 bp, Homo sapiens
tcagatttaagagaactgtaatgcccaaattcttcaatct

SEQ ID NO: 50992 - DNA, 40 bp, Homo sapiens
gattgaagaatttgggcattacagttctcttaaatctgac

SEQ ID NO: 50993 - DNA, 40 bp, Homo sapiens
gtcagatttaagagaactgtaatgcccaaattcttcaatc

SEQ ID NO: 50994 - DNA, 40 bp, Homo sapiens
attgaagaatttgggcattacagttctcttaaatctgaca

SEQ ID NO: 50995 - DNA, 40 bp, Homo sapiens
tgtcagatttaagagaactgtaatgcccaaattcttcaat

SEQ ID NO: 50996 - DNA, 40 bp, Homo sapiens
ttgaagaatttgggcattacagttctcttaaatctgacaa

SEQ ID NO: 50997 - DNA, 40 bp, Homo sapiens
ttgtcagatttaagagaactgtaatgcccaaattcttcaa

SEQ ID NO: 50998 - DNA, 40 bp, Homo sapiens
tgaagaatttgggcattacagttctcttaaatctgacaaa

SEQ ID NO: 50999 - DNA, 40 bp, Homo sapiens
tttgtcagatttaagagaactgtaatgcccaaattcttca

SEQ ID NO: 51000 - DNA, 40 bp, Homo sapiens
gaagaatttgggcattacagttctcttaaatctgacaaag

SEQ ID NO: 51001 - DNA, 40 bp, Homo sapiens
ctttgtcagatttaagagaactgtaatgcccaaattcttc

SEQ ID NO: 51002 - DNA, 40 bp, Homo sapiens
aagaatttgggcattacagttctcttaaatctgacaaagc

SEQ ID NO: 51003 - DNA, 40 bp, Homo sapiens
gctttgtcagatttaagagaactgtaatgcccaaattctt

SEQ ID NO: 51004 - DNA, 40 bp, Homo sapiens
agaatttgggcattacagttctcttaaatctgacaaagct

SEQ ID NO: 51005 - DNA, 40 bp, Homo sapiens
agctttgtcagatttaagagaactgtaatgcccaaattct

SEQ ID NO: 51006 - DNA, 40 bp, Homo sapiens
gaatttgggcattacagttctcttaaatctgacaaagctg

SEQ ID NO: 51007 - DNA, 40 bp, Homo sapiens
cagctttgtcagatttaagagaactgtaatgcccaaattc

SEQ ID NO: 51008 - DNA, 40 bp, Homo sapiens
aatttgggcattacagttctcttaaatctgacaaagctgc

SEQ ID NO: 51009 - DNA, 40 bp, Homo sapiens
gcagctttgtcagatttaagagaactgtaatgcccaaatt

SEQ ID NO: 51010 - DNA, 40 bp, Homo sapiens
atttgggcattacagttctcttaaatctgacaaagctgca

SEQ ID NO: 51011 - DNA, 40 bp, Homo sapiens
tgcagctttgtcagatttaagagaactgtaatgcccaaat

SEQ ID NO: 51012 - DNA, 40 bp, Homo sapiens
tttgggcattacagttctcttaaatctgacaaagctgcat

SEQ ID NO: 51013 - DNA, 40 bp, Homo sapiens
atgcagctttgtcagatttaagagaactgtaatgcccaaa

SEQ ID NO: 51014 - DNA, 40 bp, Homo sapiens
ttgggcattacagttctcttaaatctgacaaagctgcata

SEQ ID NO: 51015 - DNA, 40 bp, Homo sapiens
tatgcagctttgtcagatttaagagaactgtaatgcccaa

SEQ ID NO: 51016 - DNA, 40 bp, Homo sapiens
tgggcattacagttctcttaaatctgacaaagctgcataa

SEQ ID NO: 51017 - DNA, 40 bp, Homo sapiens
ttatgcagctttgtcagatttaagagaactgtaatgccca

SEQ ID NO: 51018 - DNA, 40 bp, Homo sapiens
gggcattacagttctcttaaatctgacaaagctgcataaa

SEQ ID NO: 51019 - DNA, 40 bp, Homo sapiens
tttatgcagctttgtcagatttaagagaactgtaatgccc

SEQ ID NO: 51020 - DNA, 40 bp, Homo sapiens
ggcattacagttctcttaaatctgacaaagctgcataaaa

SEQ ID NO: 51021 - DNA, 40 bp, Homo sapiens
ttttatgcagctttgtcagatttaagagaactgtaatgcc

SEQ ID NO: 51022 - DNA, 40 bp, Homo sapiens
gcattacagttctcttaaatctgacaaagctgcataaaac

SEQ ID NO: 51023 - DNA, 40 bp, Homo sapiens
gttttatgcagctttgtcagatttaagagaactgtaatgc

SEQ ID NO: 51024 - DNA, 40 bp, Homo sapiens
cattacagttctcttaaatctgacaaagctgcataaaact

SEQ ID NO: 51025 - DNA, 40 bp, Homo sapiens
agttttatgcagctttgtcagatttaagagaactgtaatg

SEQ ID NO: 51026 - DNA, 40 bp, Homo sapiens
attacagttctcttaaatctgacaaagctgcataaaacta

SEQ ID NO: 51027 - DNA, 40 bp, Homo sapiens
tagttttatgcagctttgtcagatttaagagaactgtaat

SEQ ID NO: 51028 - DNA, 40 bp, Homo sapiens
ttacagttctcttaaatctgacaaagctgcataaaactat

SEQ ID NO: 51029 - DNA, 40 bp, Homo sapiens
atagttttatgcagctttgtcagatttaagagaactgtaa

SEQ ID NO: 51030 - DNA, 40 bp, Homo sapiens
tacagttctcttaaatctgacaaagctgcataaaactatt

SEQ ID NO: 51031 - DNA, 40 bp, Homo sapiens
aatagttttatgcagctttgtcagatttaagagaactgta

SEQ ID NO: 51032 - DNA, 40 bp, Homo sapiens
acagttctcttaaatctgacaaagctgcataaaactatta

SEQ ID NO: 51033 - DNA, 40 bp, Homo sapiens
taatagttttatgcagctttgtcagatttaagagaactgt

SEQ ID NO: 51034 - DNA, 40 bp, Homo sapiens
cagttctcttaaatctgacaaagctgcataaaactattaa

SEQ ID NO: 51035 - DNA, 40 bp, Homo sapiens
ttaatagttttatgcagctttgtcagatttaagagaactg

SEQ ID NO: 51036 - DNA, 40 bp, Homo sapiens
agttctcttaaatctgacaaagctgcataaaactattaaa

SEQ ID NO: 51037 - DNA, 40 bp, Homo sapiens
tttaatagttttatgcagctttgtcagatttaagagaact

SEQ ID NO: 51038 - DNA, 40 bp, Homo sapiens
gttctcttaaatctgacaaagctgcataaaactattaaaa

SEQ ID NO: 51039 - DNA, 40 bp, Homo sapiens
ttttaatagttttatgcagctttgtcagatttaagagaac

SEQ ID NO: 51040 - DNA, 40 bp, Homo sapiens
ttctcttaaatctgacaaagctgcataaaactattaaaat

SEQ ID NO: 51041 - DNA, 40 bp, Homo sapiens
attttaatagttttatgcagctttgtcagatttaagagaa

SEQ ID NO: 51042 - DNA, 40 bp, Homo sapiens
tctcttaaatctgacaaagctgcataaaactattaaaata

SEQ ID NO: 51043 - DNA, 40 bp, Homo sapiens
tattttaatagttttatgcagctttgtcagatttaagaga

SEQ ID NO: 51044 - DNA, 40 bp, Homo sapiens
ctcttaaatctgacaaagctgcataaaactattaaaataa

SEQ ID NO: 51045 - DNA, 40 bp, Homo sapiens
ttattttaatagttttatgcagctttgtcagatttaagag

SEQ ID NO: 51046 - DNA, 40 bp, Homo sapiens
tcttaaatctgacaaagctgcataaaactattaaaataat

SEQ ID NO: 51047 - DNA, 40 bp, Homo sapiens
attattttaatagttttatgcagctttgtcagatttaaga

SEQ ID NO: 51048 - DNA, 40 bp, Homo sapiens
cttaaatctgacaaagctgcataaaactattaaaataatc

SEQ ID NO: 51049 - DNA, 40 bp, Homo sapiens
gattattttaatagttttatgcagctttgtcagatttaag

SEQ ID NO: 51050 - DNA, 40 bp, Homo sapiens
ttaaatctgacaaagctgcataaaactattaaaataatca

SEQ ID NO: 51051 - DNA, 40 bp, Homo sapiens
tgattattttaatagttttatgcagctttgtcagatttaa

SEQ ID NO: 51052 - DNA, 40 bp, Homo sapiens
taaatctgacaaagctgcataaaactattaaaataatcat

SEQ ID NO: 51053 - DNA, 40 bp, Homo sapiens
atgattattttaatagttttatgcagctttgtcagattta

SEQ ID NO: 51054 - DNA, 40 bp, Homo sapiens
aaatctgacaaagctgcataaaactattaaaataatcatt

SEQ ID NO: 51055 - DNA, 40 bp, Homo sapiens
aatgattattttaatagttttatgcagctttgtcagattt

SEQ ID NO: 51056 - DNA, 40 bp, Homo sapiens
aatctgacaaagctgcataaaactattaaaataatcatta

SEQ ID NO: 51057 - DNA, 40 bp, Homo sapiens
taatgattattttaatagttttatgcagctttgtcagatt

SEQ ID NO: 51058 - DNA, 40 bp, Homo sapiens
atctgacaaagctgcataaaactattaaaataatcattat

SEQ ID NO: 51059 - DNA, 40 bp, Homo sapiens
ataatgattattttaatagttttatgcagctttgtcagat

SEQ ID NO: 51060 - DNA, 40 bp, Homo sapiens
tctgacaaagctgcataaaactattaaaataatcattatt

SEQ ID NO: 51061 - DNA, 40 bp, Homo sapiens
aataatgattattttaatagttttatgcagctttgtcaga

SEQ ID NO: 51062 - DNA, 40 bp, Homo sapiens
ctgacaaagctgcataaaactattaaaataatcattatta

SEQ ID NO: 51063 - DNA, 40 bp, Homo sapiens
taataatgattattttaatagttttatgcagctttgtcag

SEQ ID NO: 51064 - DNA, 40 bp, Homo sapiens
tgacaaagctgcataaaactattaaaataatcattattat

SEQ ID NO: 51065 - DNA, 40 bp, Homo sapiens
ataataatgattattttaatagttttatgcagctttgtca

SEQ ID NO: 51066 - DNA, 40 bp, Homo sapiens
gacaaagctgcataaaactattaaaataatcattattata

SEQ ID NO: 51067 - DNA, 40 bp, Homo sapiens
tataataatgattattttaatagttttatgcagctttgtc

SEQ ID NO: 51068 - DNA, 40 bp, Homo sapiens
acaaagctgcataaaactattaaaataatcattattatac

SEQ ID NO: 51069 - DNA, 40 bp, Homo sapiens
gtataataatgattattttaatagttttatgcagctttgt

SEQ ID NO: 51070 - DNA, 40 bp, Homo sapiens
caaagctgcataaaactattaaaataatcattattatact

SEQ ID NO: 51071 - DNA, 40 bp, Homo sapiens
agtataataatgattattttaatagttttatgcagctttg

SEQ ID NO: 51072 - DNA, 40 bp, Homo sapiens
aaagctgcataaaactattaaaataatcattattatacta

SEQ ID NO: 51073 - DNA, 40 bp, Homo sapiens
tagtataataatgattattttaatagttttatgcagcttt

SEQ ID NO: 51074 - DNA, 40 bp, Homo sapiens
aagctgcataaaactattaaaataatcattattatactat

SEQ ID NO: 51075 - DNA, 40 bp, Homo sapiens
atagtataataatgattattttaatagttttatgcagctt

SEQ ID NO: 51076 - DNA, 40 bp, Homo sapiens
agctgcataaaactattaaaataatcattattatactatt

SEQ ID NO: 51077 - DNA, 40 bp, Homo sapiens
aatagtataataatgattattttaatagttttatgcagct

SEQ ID NO: 51078 - DNA, 40 bp, Homo sapiens
gctgcataaaactattaaaataatcattattatactattt

SEQ ID NO: 51079 - DNA, 40 bp, Homo sapiens
aaatagtataataatgattattttaatagttttatgcagc

SEQ ID NO: 51080 - DNA, 40 bp, Homo sapiens
ctgcataaaactattaaaataatcattattatactatttt

SEQ ID NO: 51081 - DNA, 40 bp, Homo sapiens
aaaatagtataataatgattattttaatagttttatgcag

SEQ ID NO: 51082 - DNA, 40 bp, Homo sapiens
tgcataaaactattaaaataatcattattatactatttta

SEQ ID NO: 51083 - DNA, 40 bp, Homo sapiens
taaaatagtataataatgattattttaatagttttatgca

SEQ ID NO: 51084 - DNA, 40 bp, Homo sapiens
gcataaaactattaaaataatcattattatactattttat

SEQ ID NO: 51085 - DNA, 40 bp, Homo sapiens
ataaaatagtataataatgattattttaatagttttatgc

SEQ ID NO: 51086 - DNA, 40 bp, Homo sapiens
cataaaactattaaaataatcattattatactattttata

SEQ ID NO: 51087 - DNA, 40 bp, Homo sapiens
tataaaatagtataataatgattattttaatagttttatg

SEQ ID NO: 51088 - DNA, 40 bp, Homo sapiens
ataaaactattaaaataatcattattatactattttatat

SEQ ID NO: 51089 - DNA, 40 bp, Homo sapiens
atataaaatagtataataatgattattttaatagttttat

SEQ ID NO: 51090 - DNA, 40 bp, Homo sapiens
taaaactattaaaataatcattattatactattttatatt

SEQ ID NO: 51091 - DNA, 40 bp, Homo sapiens
aatataaaatagtataataatgattattttaatagtttta

SEQ ID NO: 51092 - DNA, 40 bp, Homo sapiens
aaaactattaaaataatcattattatactattttatattc

SEQ ID NO: 51093 - DNA, 40 bp, Homo sapiens
gaatataaaatagtataataatgattattttaatagtttt

SEQ ID NO: 51094 - DNA, 40 bp, Homo sapiens
aaactattaaaataatcattattatactattttatattct

SEQ ID NO: 51095 - DNA, 40 bp, Homo sapiens
agaatataaaatagtataataatgattattttaatagttt

SEQ ID NO: 51096 - DNA, 40 bp, Homo sapiens
aactattaaaataatcattattatactattttatattcta

SEQ ID NO: 51097 - DNA, 40 bp, Homo sapiens
tagaatataaaatagtataataatgattattttaatagtt

SEQ ID NO: 51098 - DNA, 40 bp, Homo sapiens
actattaaaataatcattattatactattttatattctat

SEQ ID NO: 51099 - DNA, 40 bp, Homo sapiens
atagaatataaaatagtataataatgattattttaatagt

SEQ ID NO: 51100 - DNA, 40 bp, Homo sapiens
ctattaaaataatcattattatactattttatattctatt

SEQ ID NO: 51101 - DNA, 40 bp, Homo sapiens
aatagaatataaaatagtataataatgattattttaatag

SEQ ID NO: 51102 - DNA, 40 bp, Homo sapiens
tattaaaataatcattattatactattttatattctattt

SEQ ID NO: 51103 - DNA, 40 bp, Homo sapiens
aaatagaatataaaatagtataataatgattattttaata

SEQ ID NO: 51104 - DNA, 40 bp, Homo sapiens
attaaaataatcattattatactattttatattctatttc

SEQ ID NO: 51105 - DNA, 40 bp, Homo sapiens
gaaatagaatataaaatagtataataatgattattttaat

SEQ ID NO: 51106 - DNA, 40 bp, Homo sapiens
ttaaaataatcattattatactattttatattctatttct

SEQ ID NO: 51107 - DNA, 40 bp, Homo sapiens
agaaatagaatataaaatagtataataatgattattttaa

SEQ ID NO: 51108 - DNA, 40 bp, Homo sapiens
taaaataatcattattatactattttatattctatttctt

SEQ ID NO: 51109 - DNA, 40 bp, Homo sapiens
aagaaatagaatataaaatagtataataatgattatttta

SEQ ID NO: 51110 - DNA, 40 bp, Homo sapiens
aaaataatcattattatactattttatattctatttcttt

SEQ ID NO: 51111 - DNA, 40 bp, Homo sapiens
aaagaaatagaatataaaatagtataataatgattatttt

SEQ ID NO: 51112 - DNA, 40 bp, Homo sapiens
aaataatcattattatactattttatattctatttctttg

SEQ ID NO: 51113 - DNA, 40 bp, Homo sapiens
caaagaaatagaatataaaatagtataataatgattattt

SEQ ID NO: 51114 - DNA, 40 bp, Homo sapiens
aataatcattattatactattttatattctatttctttga

SEQ ID NO: 51115 - DNA, 40 bp, Homo sapiens
tcaaagaaatagaatataaaatagtataataatgattatt

SEQ ID NO: 51116 - DNA, 40 bp, Homo sapiens
ataatcattattatactattttatattctatttctttgag

SEQ ID NO: 51117 - DNA, 40 bp, Homo sapiens
ctcaaagaaatagaatataaaatagtataataatgattat

SEQ ID NO: 51118 - DNA, 40 bp, Homo sapiens
taatcattattatactattttatattctatttctttgagg

SEQ ID NO: 51119 - DNA, 40 bp, Homo sapiens
cctcaaagaaatagaatataaaatagtataataatgatta

SEQ ID NO: 51120 - DNA, 40 bp, Homo sapiens
aatcattattatactattttatattctatttctttgaggg

SEQ ID NO: 51121 - DNA, 40 bp, Homo sapiens
ccctcaaagaaatagaatataaaatagtataataatgatt

SEQ ID NO: 51122 - DNA, 40 bp, Homo sapiens
atcattattatactattttatattctatttctttgagggt

SEQ ID NO: 51123 - DNA, 40 bp, Homo sapiens
accctcaaagaaatagaatataaaatagtataataatgat

SEQ ID NO: 51124 - DNA, 40 bp, Homo sapiens
tcattattatactattttatattctatttctttgagggtt

SEQ ID NO: 51125 - DNA, 40 bp, Homo sapiens
aaccctcaaagaaatagaatataaaatagtataataatga

SEQ ID NO: 51126 - DNA, 40 bp, Homo sapiens
cattattatactattttatattctatttctttgagggttt

SEQ ID NO: 51127 - DNA, 40 bp, Homo sapiens
aaaccctcaaagaaatagaatataaaatagtataataatg

SEQ ID NO: 51128 - DNA, 40 bp, Homo sapiens
attattatactattttatattctatttctttgagggttta

SEQ ID NO: 51129 - DNA, 40 bp, Homo sapiens
taaaccctcaaagaaatagaatataaaatagtataataat

SEQ ID NO: 51130 - DNA, 40 bp, Homo sapiens
ttattatactattttatattctatttctttgagggtttag

SEQ ID NO: 51131 - DNA, 40 bp, Homo sapiens
ctaaaccctcaaagaaatagaatataaaatagtataataa

SEQ ID NO: 51132 - DNA, 40 bp, Homo sapiens
tattatactattttatattctatttctttgagggtttagt

SEQ ID NO: 51133 - DNA, 40 bp, Homo sapiens
actaaaccctcaaagaaatagaatataaaatagtataata

SEQ ID NO: 51134 - DNA, 40 bp, Homo sapiens
attatactattttatattctatttctttgagggtttagtt

SEQ ID NO: 51135 - DNA, 40 bp, Homo sapiens
aactaaaccctcaaagaaatagaatataaaatagtataat

SEQ ID NO: 51136 - DNA, 40 bp, Homo sapiens
ttatactattttatattctatttctttgagggtttagttt

SEQ ID NO: 51137 - DNA, 40 bp, Homo sapiens
aaactaaaccctcaaagaaatagaatataaaatagtataa

SEQ ID NO: 51138 - DNA, 40 bp, Homo sapiens
tatactattttatattctatttctttgagggtttagtttt

SEQ ID NO: 51139 - DNA, 40 bp, Homo sapiens
aaaactaaaccctcaaagaaatagaatataaaatagtata

SEQ ID NO: 51140 - DNA, 40 bp, Homo sapiens
atactattttatattctatttctttgagggtttagttttc

SEQ ID NO: 51141 - DNA, 40 bp, Homo sapiens
gaaaactaaaccctcaaagaaatagaatataaaatagtat

SEQ ID NO: 51142 - DNA, 40 bp, Homo sapiens
tactattttatattctatttctttgagggtttagttttcc

SEQ ID NO: 51143 - DNA, 40 bp, Homo sapiens
ggaaaactaaaccctcaaagaaatagaatataaaatagta

SEQ ID NO: 51144 - DNA, 40 bp, Homo sapiens
actattttatattctatttctttgagggtttagttttcca

SEQ ID NO: 51145 - DNA, 40 bp, Homo sapiens
tggaaaactaaaccctcaaagaaatagaatataaaatagt

SEQ ID NO: 51146 - DNA, 40 bp, Homo sapiens
ctattttatattctatttctttgagggtttagttttccaa

SEQ ID NO: 51147 - DNA, 40 bp, Homo sapiens
ttggaaaactaaaccctcaaagaaatagaatataaaatag

SEQ ID NO: 51148 - DNA, 40 bp, Homo sapiens
tattttatattctatttctttgagggtttagttttccaaa

SEQ ID NO: 51149 - DNA, 40 bp, Homo sapiens
tttggaaaactaaaccctcaaagaaatagaatataaaata

SEQ ID NO: 51150 - DNA, 40 bp, Homo sapiens
attttatattctatttctttgagggtttagttttccaaaa

SEQ ID NO: 51151 - DNA, 40 bp, Homo sapiens
ttttggaaaactaaaccctcaaagaaatagaatataaaat

SEQ ID NO: 51152 - DNA, 40 bp, Homo sapiens
ttttatattctatttctttgagggtttagttttccaaaaa

SEQ ID NO: 51153 - DNA, 40 bp, Homo sapiens
tttttggaaaactaaaccctcaaagaaatagaatataaaa

SEQ ID NO: 51154 - DNA, 40 bp, Homo sapiens
tttatattctatttctttgagggtttagttttccaaaaac

SEQ ID NO: 51155 - DNA, 40 bp, Homo sapiens
gtttttggaaaactaaaccctcaaagaaatagaatataaa

SEQ ID NO: 51156 - DNA, 40 bp, Homo sapiens
ttatattctatttctttgagggtttagttttccaaaaact

SEQ ID NO: 51157 - DNA, 40 bp, Homo sapiens
agtttttggaaaactaaaccctcaaagaaatagaatataa

SEQ ID NO: 51158 - DNA, 40 bp, Homo sapiens
tatattctatttctttgagggtttagttttccaaaaacta

SEQ ID NO: 51159 - DNA, 40 bp, Homo sapiens
tagtttttggaaaactaaaccctcaaagaaatagaatata

SEQ ID NO: 51160 - DNA, 40 bp, Homo sapiens
atattctatttctttgagggtttagttttccaaaaactac

SEQ ID NO: 51161 - DNA, 40 bp, Homo sapiens
gtagtttttggaaaactaaaccctcaaagaaatagaatat

SEQ ID NO: 51162 - DNA, 40 bp, Homo sapiens
tattctatttctttgagggtttagttttccaaaaactaca

SEQ ID NO: 51163 - DNA, 40 bp, Homo sapiens
tgtagtttttggaaaactaaaccctcaaagaaatagaata

SEQ ID NO: 51164 - DNA, 40 bp, Homo sapiens
attctatttctttgagggtttagttttccaaaaactacat

SEQ ID NO: 51165 - DNA, 40 bp, Homo sapiens
atgtagtttttggaaaactaaaccctcaaagaaatagaat

SEQ ID NO: 51166 - DNA, 40 bp, Homo sapiens
ttctatttctttgagggtttagttttccaaaaactacata

SEQ ID NO: 51167 - DNA, 40 bp, Homo sapiens
tatgtagtttttggaaaactaaaccctcaaagaaatagaa

SEQ ID NO: 51168 - DNA, 40 bp, Homo sapiens
tctatttctttgagggtttagttttccaaaaactacatat

SEQ ID NO: 51169 - DNA, 40 bp, Homo sapiens
atatgtagtttttggaaaactaaaccctcaaagaaataga

SEQ ID NO: 51170 - DNA, 40 bp, Homo sapiens
ctatttctttgagggtttagttttccaaaaactacatatt

SEQ ID NO: 51171 - DNA, 40 bp, Homo sapiens
aatatgtagtttttggaaaactaaaccctcaaagaaatag

SEQ ID NO: 51172 - DNA, 40 bp, Homo sapiens
tatttctttgagggtttagttttccaaaaactacatatta

SEQ ID NO: 51173 - DNA, 40 bp, Homo sapiens
taatatgtagtttttggaaaactaaaccctcaaagaaata

SEQ ID NO: 51174 - DNA, 40 bp, Homo sapiens
atttctttgagggtttagttttccaaaaactacatattaa

SEQ ID NO: 51175 - DNA, 40 bp, Homo sapiens
ttaatatgtagtttttggaaaactaaaccctcaaagaaat

SEQ ID NO: 51176 - DNA, 40 bp, Homo sapiens
tttctttgagggtttagttttccaaaaactacatattaag

SEQ ID NO: 51177 - DNA, 40 bp, Homo sapiens
cttaatatgtagtttttggaaaactaaaccctcaaagaaa

SEQ ID NO: 51178 - DNA, 40 bp, Homo sapiens
ttctttgagggtttagttttccaaaaactacatattaagc

SEQ ID NO: 51179 - DNA, 40 bp, Homo sapiens
gcttaatatgtagtttttggaaaactaaaccctcaaagaa

SEQ ID NO: 51180 - DNA, 40 bp, Homo sapiens
tctttgagggtttagttttccaaaaactacatattaagca

SEQ ID NO: 51181 - DNA, 40 bp, Homo sapiens
tgcttaatatgtagtttttggaaaactaaaccctcaaaga

SEQ ID NO: 51182 - DNA, 40 bp, Homo sapiens
ctttgagggtttagttttccaaaaactacatattaagcaa

SEQ ID NO: 51183 - DNA, 40 bp, Homo sapiens
ttgcttaatatgtagtttttggaaaactaaaccctcaaag

SEQ ID NO: 51184 - DNA, 40 bp, Homo sapiens
tttgagggtttagttttccaaaaactacatattaagcaaa

SEQ ID NO: 51185 - DNA, 40 bp, Homo sapiens
tttgcttaatatgtagtttttggaaaactaaaccctcaaa

SEQ ID NO: 51186 - DNA, 40 bp, Homo sapiens
ttgagggtttagttttccaaaaactacatattaagcaaat

SEQ ID NO: 51187 - DNA, 40 bp, Homo sapiens
atttgcttaatatgtagtttttggaaaactaaaccctcaa

SEQ ID NO: 51188 - DNA, 40 bp, Homo sapiens
tgagggtttagttttccaaaaactacatattaagcaaatg

SEQ ID NO: 51189 - DNA, 40 bp, Homo sapiens
catttgcttaatatgtagtttttggaaaactaaaccctca

SEQ ID NO: 51190 - DNA, 40 bp, Homo sapiens
gagggtttagttttccaaaaactacatattaagcaaatga

SEQ ID NO: 51191 - DNA, 40 bp, Homo sapiens
tcatttgcttaatatgtagtttttggaaaactaaaccctc

SEQ ID NO: 51192 - DNA, 40 bp, Homo sapiens
agggtttagttttccaaaaactacatattaagcaaatgaa

SEQ ID NO: 51193 - DNA, 40 bp, Homo sapiens
ttcatttgcttaatatgtagtttttggaaaactaaaccct

SEQ ID NO: 51194 - DNA, 40 bp, Homo sapiens
gggtttagttttccaaaaactacatattaagcaaatgaat

SEQ ID NO: 51195 - DNA, 40 bp, Homo sapiens
attcatttgcttaatatgtagtttttggaaaactaaaccc

SEQ ID NO: 51196 - DNA, 40 bp, Homo sapiens
ggtttagttttccaaaaactacatattaagcaaatgaatc

SEQ ID NO: 51197 - DNA, 40 bp, Homo sapiens
gattcatttgcttaatatgtagtttttggaaaactaaacc

SEQ ID NO: 51198 - DNA, 40 bp, Homo sapiens
gtttagttttccaaaaactacatattaagcaaatgaatca

SEQ ID NO: 51199 - DNA, 40 bp, Homo sapiens
tgattcatttgcttaatatgtagtttttggaaaactaaac

SEQ ID NO: 51200 - DNA, 40 bp, Homo sapiens
tttagttttccaaaaactacatattaagcaaatgaatcac

SEQ ID NO: 51201 - DNA, 40 bp, Homo sapiens
gtgattcatttgcttaatatgtagtttttggaaaactaaa

SEQ ID NO: 51202 - DNA, 40 bp, Homo sapiens
ttagttttccaaaaactacatattaagcaaatgaatcact

SEQ ID NO: 51203 - DNA, 40 bp, Homo sapiens
agtgattcatttgcttaatatgtagtttttggaaaactaa

SEQ ID NO: 51204 - DNA, 40 bp, Homo sapiens
tagttttccaaaaactacatattaagcaaatgaatcactc

SEQ ID NO: 51205 - DNA, 40 bp, Homo sapiens
gagtgattcatttgcttaatatgtagtttttggaaaacta

SEQ ID NO: 51206 - DNA, 40 bp, Homo sapiens
agttttccaaaaactacatattaagcaaatgaatcactca

SEQ ID NO: 51207 - DNA, 40 bp, Homo sapiens
tgagtgattcatttgcttaatatgtagtttttggaaaact

SEQ ID NO: 51208 - DNA, 40 bp, Homo sapiens
gttttccaaaaactacatattaagcaaatgaatcactcag

SEQ ID NO: 51209 - DNA, 40 bp, Homo sapiens
ctgagtgattcatttgcttaatatgtagtttttggaaaac

SEQ ID NO: 51210 - DNA, 40 bp, Homo sapiens
ttttccaaaaactacatattaagcaaatgaatcactcagt

SEQ ID NO: 51211 - DNA, 40 bp, Homo sapiens
actgagtgattcatttgcttaatatgtagtttttggaaaa

SEQ ID NO: 51212 - DNA, 40 bp, Homo sapiens
tttccaaaaactacatattaagcaaatgaatcactcagtg

SEQ ID NO: 51213 - DNA, 40 bp, Homo sapiens
cactgagtgattcatttgcttaatatgtagtttttggaaa

SEQ ID NO: 51214 - DNA, 40 bp, Homo sapiens
ttccaaaaactacatattaagcaaatgaatcactcagtgg

SEQ ID NO: 51215 - DNA, 40 bp, Homo sapiens
ccactgagtgattcatttgcttaatatgtagtttttggaa

SEQ ID NO: 51216 - DNA, 40 bp, Homo sapiens
tccaaaaactacatattaagcaaatgaatcactcagtggc

SEQ ID NO: 51217 - DNA, 40 bp, Homo sapiens
gccactgagtgattcatttgcttaatatgtagtttttgga

SEQ ID NO: 51218 - DNA, 40 bp, Homo sapiens
ccaaaaactacatattaagcaaatgaatcactcagtggct

SEQ ID NO: 51219 - DNA, 40 bp, Homo sapiens
agccactgagtgattcatttgcttaatatgtagtttttgg

SEQ ID NO: 51220 - DNA, 40 bp, Homo sapiens
caaaaactacatattaagcaaatgaatcactcagtggcta

SEQ ID NO: 51221 - DNA, 40 bp, Homo sapiens
tagccactgagtgattcatttgcttaatatgtagtttttg

SEQ ID NO: 51222 - DNA, 40 bp, Homo sapiens
aaaaactacatattaagcaaatgaatcactcagtggctat

SEQ ID NO: 51223 - DNA, 40 bp, Homo sapiens
atagccactgagtgattcatttgcttaatatgtagttttt

SEQ ID NO: 51224 - DNA, 40 bp, Homo sapiens
aaaactacatattaagcaaatgaatcactcagtggctatg

SEQ ID NO: 51225 - DNA, 40 bp, Homo sapiens
catagccactgagtgattcatttgcttaatatgtagtttt

SEQ ID NO: 51226 - DNA, 40 bp, Homo sapiens
aaactacatattaagcaaatgaatcactcagtggctatgt

SEQ ID NO: 51227 - DNA, 40 bp, Homo sapiens
acatagccactgagtgattcatttgcttaatatgtagttt

SEQ ID NO: 51228 - DNA, 40 bp, Homo sapiens
aactacatattaagcaaatgaatcactcagtggctatgtc

SEQ ID NO: 51229 - DNA, 40 bp, Homo sapiens
gacatagccactgagtgattcatttgcttaatatgtagtt

SEQ ID NO: 51230 - DNA, 40 bp, Homo sapiens
actacatattaagcaaatgaatcactcagtggctatgtca

SEQ ID NO: 51231 - DNA, 40 bp, Homo sapiens
tgacatagccactgagtgattcatttgcttaatatgtagt

SEQ ID NO: 51232 - DNA, 40 bp, Homo sapiens
ctacatattaagcaaatgaatcactcagtggctatgtcat

SEQ ID NO: 51233 - DNA, 40 bp, Homo sapiens
atgacatagccactgagtgattcatttgcttaatatgtag

SEQ ID NO: 51234 - DNA, 40 bp, Homo sapiens
tacatattaagcaaatgaatcactcagtggctatgtcata

SEQ ID NO: 51235 - DNA, 40 bp, Homo sapiens
tatgacatagccactgagtgattcatttgcttaatatgta

SEQ ID NO: 51236 - DNA, 40 bp, Homo sapiens
acatattaagcaaatgaatcactcagtggctatgtcatat

SEQ ID NO: 51237 - DNA, 40 bp, Homo sapiens
atatgacatagccactgagtgattcatttgcttaatatgt

SEQ ID NO: 51238 - DNA, 40 bp, Homo sapiens
catattaagcaaatgaatcactcagtggctatgtcatata

SEQ ID NO: 51239 - DNA, 40 bp, Homo sapiens
tatatgacatagccactgagtgattcatttgcttaatatg

SEQ ID NO: 51240 - DNA, 40 bp, Homo sapiens
atattaagcaaatgaatcactcagtggctatgtcatataa

SEQ ID NO: 51241 - DNA, 40 bp, Homo sapiens
ttatatgacatagccactgagtgattcatttgcttaatat

SEQ ID NO: 51242 - DNA, 40 bp, Homo sapiens
tattaagcaaatgaatcactcagtggctatgtcatataat

SEQ ID NO: 51243 - DNA, 40 bp, Homo sapiens
attatatgacatagccactgagtgattcatttgcttaata

SEQ ID NO: 51244 - DNA, 40 bp, Homo sapiens
attaagcaaatgaatcactcagtggctatgtcatataata

SEQ ID NO: 51245 - DNA, 40 bp, Homo sapiens
tattatatgacatagccactgagtgattcatttgcttaat

SEQ ID NO: 51246 - DNA, 40 bp, Homo sapiens
ttaagcaaatgaatcactcagtggctatgtcatataataa

SEQ ID NO: 51247 - DNA, 40 bp, Homo sapiens
ttattatatgacatagccactgagtgattcatttgcttaa

SEQ ID NO: 51248 - DNA, 40 bp, Homo sapiens
taagcaaatgaatcactcagtggctatgtcatataataac

SEQ ID NO: 51249 - DNA, 40 bp, Homo sapiens
gttattatatgacatagccactgagtgattcatttgctta

SEQ ID NO: 51250 - DNA, 40 bp, Homo sapiens
aagcaaatgaatcactcagtggctatgtcatataataacg

SEQ ID NO: 51251 - DNA, 40 bp, Homo sapiens
cgttattatatgacatagccactgagtgattcatttgctt

SEQ ID NO: 51252 - DNA, 40 bp, Homo sapiens
agcaaatgaatcactcagtggctatgtcatataataacga

SEQ ID NO: 51253 - DNA, 40 bp, Homo sapiens
tcgttattatatgacatagccactgagtgattcatttgct

SEQ ID NO: 51254 - DNA, 40 bp, Homo sapiens
gcaaatgaatcactcagtggctatgtcatataataacgag

SEQ ID NO: 51255 - DNA, 40 bp, Homo sapiens
ctcgttattatatgacatagccactgagtgattcatttgc

SEQ ID NO: 51256 - DNA, 40 bp, Homo sapiens
caaatgaatcactcagtggctatgtcatataataacgagt

SEQ ID NO: 51257 - DNA, 40 bp, Homo sapiens
actcgttattatatgacatagccactgagtgattcatttg

SEQ ID NO: 51258 - DNA, 40 bp, Homo sapiens
aaatgaatcactcagtggctatgtcatataataacgagtt

SEQ ID NO: 51259 - DNA, 40 bp, Homo sapiens
aactcgttattatatgacatagccactgagtgattcattt

SEQ ID NO: 51260 - DNA, 40 bp, Homo sapiens
aatgaatcactcagtggctatgtcatataataacgagtta

SEQ ID NO: 51261 - DNA, 40 bp, Homo sapiens
taactcgttattatatgacatagccactgagtgattcatt

SEQ ID NO: 51262 - DNA, 40 bp, Homo sapiens
atgaatcactcagtggctatgtcatataataacgagttag

SEQ ID NO: 51263 - DNA, 40 bp, Homo sapiens
ctaactcgttattatatgacatagccactgagtgattcat

SEQ ID NO: 51264 - DNA, 40 bp, Homo sapiens
tgaatcactcagtggctatgtcatataataacgagttagc

SEQ ID NO: 51265 - DNA, 40 bp, Homo sapiens
gctaactcgttattatatgacatagccactgagtgattca

SEQ ID NO: 51266 - DNA, 40 bp, Homo sapiens
gaatcactcagtggctatgtcatataataacgagttagcc

SEQ ID NO: 51267 - DNA, 40 bp, Homo sapiens
ggctaactcgttattatatgacatagccactgagtgattc

SEQ ID NO: 51268 - DNA, 40 bp, Homo sapiens
aatcactcagtggctatgtcatataataacgagttagcct

SEQ ID NO: 51269 - DNA, 40 bp, Homo sapiens
aggctaactcgttattatatgacatagccactgagtgatt

SEQ ID NO: 51270 - DNA, 40 bp, Homo sapiens
atcactcagtggctatgtcatataataacgagttagccta

SEQ ID NO: 51271 - DNA, 40 bp, Homo sapiens
taggctaactcgttattatatgacatagccactgagtgat

SEQ ID NO: 51272 - DNA, 40 bp, Homo sapiens
tcactcagtggctatgtcatataataacgagttagcctag

SEQ ID NO: 51273 - DNA, 40 bp, Homo sapiens
ctaggctaactcgttattatatgacatagccactgagtga

SEQ ID NO: 51274 - DNA, 40 bp, Homo sapiens
cactcagtggctatgtcatataataacgagttagcctagt

SEQ ID NO: 51275 - DNA, 40 bp, Homo sapiens
actaggctaactcgttattatatgacatagccactgagtg

SEQ ID NO: 51276 - DNA, 40 bp, Homo sapiens
actcagtggctatgtcatataataacgagttagcctagtt

SEQ ID NO: 51277 - DNA, 40 bp, Homo sapiens
aactaggctaactcgttattatatgacatagccactgagt

SEQ ID NO: 51278 - DNA, 40 bp, Homo sapiens
ctcagtggctatgtcatataataacgagttagcctagtta

SEQ ID NO: 51279 - DNA, 40 bp, Homo sapiens
taactaggctaactcgttattatatgacatagccactgag

SEQ ID NO: 51280 - DNA, 40 bp, Homo sapiens
tcagtggctatgtcatataataacgagttagcctagttat

SEQ ID NO: 51281 - DNA, 40 bp, Homo sapiens
ataactaggctaactcgttattatatgacatagccactga

SEQ ID NO: 51282 - DNA, 40 bp, Homo sapiens
cagtggctatgtcatataataacgagttagcctagttata

SEQ ID NO: 51283 - DNA, 40 bp, Homo sapiens
tataactaggctaactcgttattatatgacatagccactg

SEQ ID NO: 51284 - DNA, 40 bp, Homo sapiens
agtggctatgtcatataataacgagttagcctagttataa

SEQ ID NO: 51285 - DNA, 40 bp, Homo sapiens
ttataactaggctaactcgttattatatgacatagccact

SEQ ID NO: 51286 - DNA, 40 bp, Homo sapiens
gtggctatgtcatataataacgagttagcctagttataag

SEQ ID NO: 51287 - DNA, 40 bp, Homo sapiens
cttataactaggctaactcgttattatatgacatagccac

SEQ ID NO: 51288 - DNA, 40 bp, Homo sapiens
tggctatgtcatataataacgagttagcctagttataaga

SEQ ID NO: 51289 - DNA, 40 bp, Homo sapiens
tcttataactaggctaactcgttattatatgacatagcca

SEQ ID NO: 51290 - DNA, 40 bp, Homo sapiens
ggctatgtcatataataacgagttagcctagttataagaa

SEQ ID NO: 51291 - DNA, 40 bp, Homo sapiens
ttcttataactaggctaactcgttattatatgacatagcc

SEQ ID NO: 51292 - DNA, 40 bp, Homo sapiens
gctatgtcatataataacgagttagcctagttataagaag

SEQ ID NO: 51293 - DNA, 40 bp, Homo sapiens
cttcttataactaggctaactcgttattatatgacatagc

SEQ ID NO: 51294 - DNA, 40 bp, Homo sapiens
ctatgtcatataataacgagttagcctagttataagaagt

SEQ ID NO: 51295 - DNA, 40 bp, Homo sapiens
acttcttataactaggctaactcgttattatatgacatag

SEQ ID NO: 51296 - DNA, 40 bp, Homo sapiens
tatgtcatataataacgagttagcctagttataagaagtt

SEQ ID NO: 51297 - DNA, 40 bp, Homo sapiens
aacttcttataactaggctaactcgttattatatgacata

SEQ ID NO: 51298 - DNA, 40 bp, Homo sapiens
atgtcatataataacgagttagcctagttataagaagttt

SEQ ID NO: 51299 - DNA, 40 bp, Homo sapiens
aaacttcttataactaggctaactcgttattatatgacat

SEQ ID NO: 51300 - DNA, 40 bp, Homo sapiens
tgtcatataataacgagttagcctagttataagaagttta

SEQ ID NO: 51301 - DNA, 40 bp, Homo sapiens
taaacttcttataactaggctaactcgttattatatgaca

SEQ ID NO: 51302 - DNA, 40 bp, Homo sapiens
gtcatataataacgagttagcctagttataagaagtttaa

SEQ ID NO: 51303 - DNA, 40 bp, Homo sapiens
ttaaacttcttataactaggctaactcgttattatatgac

SEQ ID NO: 51304 - DNA, 40 bp, Homo sapiens
tcatataataacgagttagcctagttataagaagtttaac

SEQ ID NO: 51305 - DNA, 40 bp, Homo sapiens
gttaaacttcttataactaggctaactcgttattatatga

SEQ ID NO: 51306 - DNA, 40 bp, Homo sapiens
catataataacgagttagcctagttataagaagtttaaca

SEQ ID NO: 51307 - DNA, 40 bp, Homo sapiens
tgttaaacttcttataactaggctaactcgttattatatg

SEQ ID NO: 51308 - DNA, 40 bp, Homo sapiens
atataataacgagttagcctagttataagaagtttaacat

SEQ ID NO: 51309 - DNA, 40 bp, Homo sapiens
atgttaaacttcttataactaggctaactcgttattatat

SEQ ID NO: 51310 - DNA, 40 bp, Homo sapiens
tataataacgagttagcctagttataagaagtttaacatt

SEQ ID NO: 51311 - DNA, 40 bp, Homo sapiens
aatgttaaacttcttataactaggctaactcgttattata

SEQ ID NO: 51312 - DNA, 40 bp, Homo sapiens
ataataacgagttagcctagttataagaagtttaacattt

SEQ ID NO: 51313 - DNA, 40 bp, Homo sapiens
aaatgttaaacttcttataactaggctaactcgttattat

SEQ ID NO: 51314 - DNA, 40 bp, Homo sapiens
taataacgagttagcctagttataagaagtttaacatttt

SEQ ID NO: 51315 - DNA, 40 bp, Homo sapiens
aaaatgttaaacttcttataactaggctaactcgttatta

SEQ ID NO: 51316 - DNA, 40 bp, Homo sapiens
aataacgagttagcctagttataagaagtttaacatttta

SEQ ID NO: 51317 - DNA, 40 bp, Homo sapiens
taaaatgttaaacttcttataactaggctaactcgttatt

SEQ ID NO: 51318 - DNA, 40 bp, Homo sapiens
ataacgagttagcctagttataagaagtttaacattttat

SEQ ID NO: 51319 - DNA, 40 bp, Homo sapiens
ataaaatgttaaacttcttataactaggctaactcgttat

SEQ ID NO: 51320 - DNA, 40 bp, Homo sapiens
taacgagttagcctagttataagaagtttaacattttatt

SEQ ID NO: 51321 - DNA, 40 bp, Homo sapiens
aataaaatgttaaacttcttataactaggctaactcgtta

SEQ ID NO: 51322 - DNA, 40 bp, Homo sapiens
aacgagttagcctagttataagaagtttaacattttattt

SEQ ID NO: 51323 - DNA, 40 bp, Homo sapiens
aaataaaatgttaaacttcttataactaggctaactcgtt

SEQ ID NO: 51324 - DNA, 40 bp, Homo sapiens
acgagttagcctagttataagaagtttaacattttattta

SEQ ID NO: 51325 - DNA, 40 bp, Homo sapiens
taaataaaatgttaaacttcttataactaggctaactcgt

SEQ ID NO: 51326 - DNA, 40 bp, Homo sapiens
cgagttagcctagttataagaagtttaacattttatttaa

SEQ ID NO: 51327 - DNA, 40 bp, Homo sapiens
ttaaataaaatgttaaacttcttataactaggctaactcg

SEQ ID NO: 51328 - DNA, 40 bp, Homo sapiens
gagttagcctagttataagaagtttaacattttatttaag

SEQ ID NO: 51329 - DNA, 40 bp, Homo sapiens
cttaaataaaatgttaaacttcttataactaggctaactc

SEQ ID NO: 51330 - DNA, 40 bp, Homo sapiens
agttagcctagttataagaagtttaacattttatttaaga

SEQ ID NO: 51331 - DNA, 40 bp, Homo sapiens
tcttaaataaaatgttaaacttcttataactaggctaact

SEQ ID NO: 51332 - DNA, 40 bp, Homo sapiens
gttagcctagttataagaagtttaacattttatttaagaa

SEQ ID NO: 51333 - DNA, 40 bp, Homo sapiens
ttcttaaataaaatgttaaacttcttataactaggctaac

SEQ ID NO: 51334 - DNA, 40 bp, Homo sapiens
ttagcctagttataagaagtttaacattttatttaagaac

SEQ ID NO: 51335 - DNA, 40 bp, Homo sapiens
gttcttaaataaaatgttaaacttcttataactaggctaa

SEQ ID NO: 51336 - DNA, 40 bp, Homo sapiens
tagcctagttataagaagtttaacattttatttaagaaca

SEQ ID NO: 51337 - DNA, 40 bp, Homo sapiens
tgttcttaaataaaatgttaaacttcttataactaggcta

SEQ ID NO: 51338 - DNA, 40 bp, Homo sapiens
agcctagttataagaagtttaacattttatttaagaacat

SEQ ID NO: 51339 - DNA, 40 bp, Homo sapiens
atgttcttaaataaaatgttaaacttcttataactaggct

SEQ ID NO: 51340 - DNA, 40 bp, Homo sapiens
gcctagttataagaagtttaacattttatttaagaacatt

SEQ ID NO: 51341 - DNA, 40 bp, Homo sapiens
aatgttcttaaataaaatgttaaacttcttataactaggc

SEQ ID NO: 51342 - DNA, 40 bp, Homo sapiens
cctagttataagaagtttaacattttatttaagaacattg

SEQ ID NO: 51343 - DNA, 40 bp, Homo sapiens
caatgttcttaaataaaatgttaaacttcttataactagg

SEQ ID NO: 51344 - DNA, 40 bp, Homo sapiens
ctagttataagaagtttaacattttatttaagaacattgt

SEQ ID NO: 51345 - DNA, 40 bp, Homo sapiens
acaatgttcttaaataaaatgttaaacttcttataactag

SEQ ID NO: 51346 - DNA, 40 bp, Homo sapiens
tagttataagaagtttaacattttatttaagaacattgtt

SEQ ID NO: 51347 - DNA, 40 bp, Homo sapiens
aacaatgttcttaaataaaatgttaaacttcttataacta

SEQ ID NO: 51348 - DNA, 40 bp, Homo sapiens
agttataagaagtttaacattttatttaagaacattgtta

SEQ ID NO: 51349 - DNA, 40 bp, Homo sapiens
taacaatgttcttaaataaaatgttaaacttcttataact

SEQ ID NO: 51350 - DNA, 40 bp, Homo sapiens
gttataagaagtttaacattttatttaagaacattgttac

SEQ ID NO: 51351 - DNA, 40 bp, Homo sapiens
gtaacaatgttcttaaataaaatgttaaacttcttataac

SEQ ID NO: 51352 - DNA, 40 bp, Homo sapiens
ttataagaagtttaacattttatttaagaacattgttaca

SEQ ID NO: 51353 - DNA, 40 bp, Homo sapiens
tgtaacaatgttcttaaataaaatgttaaacttcttataa

SEQ ID NO: 51354 - DNA, 40 bp, Homo sapiens
tataagaagtttaacattttatttaagaacattgttacag

SEQ ID NO: 51355 - DNA, 40 bp, Homo sapiens
ctgtaacaatgttcttaaataaaatgttaaacttcttata

SEQ ID NO: 51356 - DNA, 40 bp, Homo sapiens
ataagaagtttaacattttatttaagaacattgttacagc

SEQ ID NO: 51357 - DNA, 40 bp, Homo sapiens
gctgtaacaatgttcttaaataaaatgttaaacttcttat

SEQ ID NO: 51358 - DNA, 40 bp, Homo sapiens
taagaagtttaacattttatttaagaacattgttacagca

SEQ ID NO: 51359 - DNA, 40 bp, Homo sapiens
tgctgtaacaatgttcttaaataaaatgttaaacttctta

SEQ ID NO: 51360 - DNA, 40 bp, Homo sapiens
aagaagtttaacattttatttaagaacattgttacagcat

SEQ ID NO: 51361 - DNA, 40 bp, Homo sapiens
atgctgtaacaatgttcttaaataaaatgttaaacttctt

SEQ ID NO: 51362 - DNA, 40 bp, Homo sapiens
agaagtttaacattttatttaagaacattgttacagcatg

SEQ ID NO: 51363 - DNA, 40 bp, Homo sapiens
catgctgtaacaatgttcttaaataaaatgttaaacttct

SEQ ID NO: 51364 - DNA, 40 bp, Homo sapiens
gaagtttaacattttatttaagaacattgttacagcatgt

SEQ ID NO: 51365 - DNA, 40 bp, Homo sapiens
acatgctgtaacaatgttcttaaataaaatgttaaacttc

SEQ ID NO: 51366 - DNA, 40 bp, Homo sapiens
aagtttaacattttatttaagaacattgttacagcatgtt

SEQ ID NO: 51367 - DNA, 40 bp, Homo sapiens
aacatgctgtaacaatgttcttaaataaaatgttaaactt

SEQ ID NO: 51368 - DNA, 40 bp, Homo sapiens
agtttaacattttatttaagaacattgttacagcatgttt

SEQ ID NO: 51369 - DNA, 40 bp, Homo sapiens
aaacatgctgtaacaatgttcttaaataaaatgttaaact

SEQ ID NO: 51370 - DNA, 40 bp, Homo sapiens
gtttaacattttatttaagaacattgttacagcatgttta

SEQ ID NO: 51371 - DNA, 40 bp, Homo sapiens
taaacatgctgtaacaatgttcttaaataaaatgttaaac

SEQ ID NO: 51372 - DNA, 40 bp, Homo sapiens
tttaacattttatttaagaacattgttacagcatgtttac

SEQ ID NO: 51373 - DNA, 40 bp, Homo sapiens
gtaaacatgctgtaacaatgttcttaaataaaatgttaaa

SEQ ID NO: 51374 - DNA, 40 bp, Homo sapiens
ttaacattttatttaagaacattgttacagcatgtttact

SEQ ID NO: 51375 - DNA, 40 bp, Homo sapiens
agtaaacatgctgtaacaatgttcttaaataaaatgttaa

SEQ ID NO: 51376 - DNA, 40 bp, Homo sapiens
taacattttatttaagaacattgttacagcatgtttactg

SEQ ID NO: 51377 - DNA, 40 bp, Homo sapiens
cagtaaacatgctgtaacaatgttcttaaataaaatgtta

SEQ ID NO: 51378 - DNA, 40 bp, Homo sapiens
aacattttatttaagaacattgttacagcatgtttactgt

SEQ ID NO: 51379 - DNA, 40 bp, Homo sapiens
acagtaaacatgctgtaacaatgttcttaaataaaatgtt

SEQ ID NO: 51380 - DNA, 40 bp, Homo sapiens
acattttatttaagaacattgttacagcatgtttactgta

SEQ ID NO: 51381 - DNA, 40 bp, Homo sapiens
tacagtaaacatgctgtaacaatgttcttaaataaaatgt

SEQ ID NO: 51382 - DNA, 40 bp, Homo sapiens
cattttatttaagaacattgttacagcatgtttactgtat

SEQ ID NO: 51383 - DNA, 40 bp, Homo sapiens
atacagtaaacatgctgtaacaatgttcttaaataaaatg

SEQ ID NO: 51384 - DNA, 40 bp, Homo sapiens
attttatttaagaacattgttacagcatgtttactgtata

SEQ ID NO: 51385 - DNA, 40 bp, Homo sapiens
tatacagtaaacatgctgtaacaatgttcttaaataaaat

SEQ ID NO: 51386 - DNA, 40 bp, Homo sapiens
ttttatttaagaacattgttacagcatgtttactgtatag

SEQ ID NO: 51387 - DNA, 40 bp, Homo sapiens
ctatacagtaaacatgctgtaacaatgttcttaaataaaa

SEQ ID NO: 51388 - DNA, 40 bp, Homo sapiens
tttatttaagaacattgttacagcatgtttactgtatagt

SEQ ID NO: 51389 - DNA, 40 bp, Homo sapiens
actatacagtaaacatgctgtaacaatgttcttaaataaa

SEQ ID NO: 51390 - DNA, 40 bp, Homo sapiens
ttatttaagaacattgttacagcatgtttactgtatagtc

SEQ ID NO: 51391 - DNA, 40 bp, Homo sapiens
gactatacagtaaacatgctgtaacaatgttcttaaataa

SEQ ID NO: 51392 - DNA, 40 bp, Homo sapiens
tatttaagaacattgttacagcatgtttactgtatagtct

SEQ ID NO: 51393 - DNA, 40 bp, Homo sapiens
agactatacagtaaacatgctgtaacaatgttcttaaata

SEQ ID NO: 51394 - DNA, 40 bp, Homo sapiens
atttaagaacattgttacagcatgtttactgtatagtcta

SEQ ID NO: 51395 - DNA, 40 bp, Homo sapiens
tagactatacagtaaacatgctgtaacaatgttcttaaat

SEQ ID NO: 51396 - DNA, 40 bp, Homo sapiens
tttaagaacattgttacagcatgtttactgtatagtctag

SEQ ID NO: 51397 - DNA, 40 bp, Homo sapiens
ctagactatacagtaaacatgctgtaacaatgttcttaaa

SEQ ID NO: 51398 - DNA, 40 bp, Homo sapiens
ttaagaacattgttacagcatgtttactgtatagtctagt

SEQ ID NO: 51399 - DNA, 40 bp, Homo sapiens
actagactatacagtaaacatgctgtaacaatgttcttaa

SEQ ID NO: 51400 - DNA, 40 bp, Homo sapiens
taagaacattgttacagcatgtttactgtatagtctagta

SEQ ID NO: 51401 - DNA, 40 bp, Homo sapiens
tactagactatacagtaaacatgctgtaacaatgttctta

SEQ ID NO: 51402 - DNA, 40 bp, Homo sapiens
aagaacattgttacagcatgtttactgtatagtctagtaa

SEQ ID NO: 51403 - DNA, 40 bp, Homo sapiens
ttactagactatacagtaaacatgctgtaacaatgttctt

SEQ ID NO: 51404 - DNA, 40 bp, Homo sapiens
agaacattgttacagcatgtttactgtatagtctagtaat

SEQ ID NO: 51405 - DNA, 40 bp, Homo sapiens
attactagactatacagtaaacatgctgtaacaatgttct

SEQ ID NO: 51406 - DNA, 40 bp, Homo sapiens
gaacattgttacagcatgtttactgtatagtctagtaata

SEQ ID NO: 51407 - DNA, 40 bp, Homo sapiens
tattactagactatacagtaaacatgctgtaacaatgttc

SEQ ID NO: 51408 - DNA, 40 bp, Homo sapiens
aacattgttacagcatgtttactgtatagtctagtaatag

SEQ ID NO: 51409 - DNA, 40 bp, Homo sapiens
ctattactagactatacagtaaacatgctgtaacaatgtt

SEQ ID NO: 51410 - DNA, 40 bp, Homo sapiens
acattgttacagcatgtttactgtatagtctagtaataga

SEQ ID NO: 51411 - DNA, 40 bp, Homo sapiens
tctattactagactatacagtaaacatgctgtaacaatgt

SEQ ID NO: 51412 - DNA, 40 bp, Homo sapiens
cattgttacagcatgtttactgtatagtctagtaatagag

SEQ ID NO: 51413 - DNA, 40 bp, Homo sapiens
ctctattactagactatacagtaaacatgctgtaacaatg

SEQ ID NO: 51414 - DNA, 40 bp, Homo sapiens
attgttacagcatgtttactgtatagtctagtaatagagg

SEQ ID NO: 51415 - DNA, 40 bp, Homo sapiens
cctctattactagactatacagtaaacatgctgtaacaat

SEQ ID NO: 51416 - DNA, 40 bp, Homo sapiens
ttgttacagcatgtttactgtatagtctagtaatagagga

SEQ ID NO: 51417 - DNA, 40 bp, Homo sapiens
tcctctattactagactatacagtaaacatgctgtaacaa

SEQ ID NO: 51418 - DNA, 40 bp, Homo sapiens
tgttacagcatgtttactgtatagtctagtaatagaggaa

SEQ ID NO: 51419 - DNA, 40 bp, Homo sapiens
ttcctctattactagactatacagtaaacatgctgtaaca

SEQ ID NO: 51420 - DNA, 40 bp, Homo sapiens
gttacagcatgtttactgtatagtctagtaatagaggaaa

SEQ ID NO: 51421 - DNA, 40 bp, Homo sapiens
tttcctctattactagactatacagtaaacatgctgtaac

SEQ ID NO: 51422 - DNA, 40 bp, Homo sapiens
ttacagcatgtttactgtatagtctagtaatagaggaaaa

SEQ ID NO: 51423 - DNA, 40 bp, Homo sapiens
ttttcctctattactagactatacagtaaacatgctgtaa

SEQ ID NO: 51424 - DNA, 40 bp, Homo sapiens
tacagcatgtttactgtatagtctagtaatagaggaaaag

SEQ ID NO: 51425 - DNA, 40 bp, Homo sapiens
cttttcctctattactagactatacagtaaacatgctgta

SEQ ID NO: 51426 - DNA, 40 bp, Homo sapiens
acagcatgtttactgtatagtctagtaatagaggaaaaga

SEQ ID NO: 51427 - DNA, 40 bp, Homo sapiens
tcttttcctctattactagactatacagtaaacatgctgt

SEQ ID NO: 51428 - DNA, 40 bp, Homo sapiens
cagcatgtttactgtatagtctagtaatagaggaaaagac

SEQ ID NO: 51429 - DNA, 40 bp, Homo sapiens
gtcttttcctctattactagactatacagtaaacatgctg

SEQ ID NO: 51430 - DNA, 40 bp, Homo sapiens
agcatgtttactgtatagtctagtaatagaggaaaagaca

SEQ ID NO: 51431 - DNA, 40 bp, Homo sapiens
tgtcttttcctctattactagactatacagtaaacatgct

SEQ ID NO: 51432 - DNA, 40 bp, Homo sapiens
gcatgtttactgtatagtctagtaatagaggaaaagacat

SEQ ID NO: 51433 - DNA, 40 bp, Homo sapiens
atgtcttttcctctattactagactatacagtaaacatgc

SEQ ID NO: 51434 - DNA, 40 bp, Homo sapiens
catgtttactgtatagtctagtaatagaggaaaagacatt

SEQ ID NO: 51435 - DNA, 40 bp, Homo sapiens
aatgtcttttcctctattactagactatacagtaaacatg

SEQ ID NO: 51436 - DNA, 40 bp, Homo sapiens
atgtttactgtatagtctagtaatagaggaaaagacattt

SEQ ID NO: 51437 - DNA, 40 bp, Homo sapiens
aaatgtcttttcctctattactagactatacagtaaacat

SEQ ID NO: 51438 - DNA, 40 bp, Homo sapiens
tgtttactgtatagtctagtaatagaggaaaagacatttg

SEQ ID NO: 51439 - DNA, 40 bp, Homo sapiens
caaatgtcttttcctctattactagactatacagtaaaca

SEQ ID NO: 51440 - DNA, 40 bp, Homo sapiens
gtttactgtatagtctagtaatagaggaaaagacatttgg

SEQ ID NO: 51441 - DNA, 40 bp, Homo sapiens
ccaaatgtcttttcctctattactagactatacagtaaac

SEQ ID NO: 51442 - DNA, 40 bp, Homo sapiens
tttactgtatagtctagtaatagaggaaaagacatttggg

SEQ ID NO: 51443 - DNA, 40 bp, Homo sapiens
cccaaatgtcttttcctctattactagactatacagtaaa

SEQ ID NO: 51444 - DNA, 40 bp, Homo sapiens
ttactgtatagtctagtaatagaggaaaagacatttgggt

SEQ ID NO: 51445 - DNA, 40 bp, Homo sapiens
acccaaatgtcttttcctctattactagactatacagtaa

SEQ ID NO: 51446 - DNA, 40 bp, Homo sapiens
tactgtatagtctagtaatagaggaaaagacatttgggtg

SEQ ID NO: 51447 - DNA, 40 bp, Homo sapiens
cacccaaatgtcttttcctctattactagactatacagta

SEQ ID NO: 51448 - DNA, 40 bp, Homo sapiens
actgtatagtctagtaatagaggaaaagacatttgggtgg

SEQ ID NO: 51449 - DNA, 40 bp, Homo sapiens
ccacccaaatgtcttttcctctattactagactatacagt

SEQ ID NO: 51450 - DNA, 40 bp, Homo sapiens
ctgtatagtctagtaatagaggaaaagacatttgggtggg

SEQ ID NO: 51451 - DNA, 40 bp, Homo sapiens
cccacccaaatgtcttttcctctattactagactatacag

SEQ ID NO: 51452 - DNA, 40 bp, Homo sapiens
tgtatagtctagtaatagaggaaaagacatttgggtgggt

SEQ ID NO: 51453 - DNA, 40 bp, Homo sapiens
acccacccaaatgtcttttcctctattactagactataca

SEQ ID NO: 51454 - DNA, 40 bp, Homo sapiens
gtatagtctagtaatagaggaaaagacatttgggtgggtg

SEQ ID NO: 51455 - DNA, 40 bp, Homo sapiens
cacccacccaaatgtcttttcctctattactagactatac

SEQ ID NO: 51456 - DNA, 40 bp, Homo sapiens
tatagtctagtaatagaggaaaagacatttgggtgggtgg

SEQ ID NO: 51457 - DNA, 40 bp, Homo sapiens
ccacccacccaaatgtcttttcctctattactagactata

SEQ ID NO: 51458 - DNA, 40 bp, Homo sapiens
atagtctagtaatagaggaaaagacatttgggtgggtggt

SEQ ID NO: 51459 - DNA, 40 bp, Homo sapiens
accacccacccaaatgtcttttcctctattactagactat

SEQ ID NO: 51460 - DNA, 40 bp, Homo sapiens
tagtctagtaatagaggaaaagacatttgggtgggtggta

SEQ ID NO: 51461 - DNA, 40 bp, Homo sapiens
taccacccacccaaatgtcttttcctctattactagacta

SEQ ID NO: 51462 - DNA, 40 bp, Homo sapiens
agtctagtaatagaggaaaagacatttgggtgggtggtag

SEQ ID NO: 51463 - DNA, 40 bp, Homo sapiens
ctaccacccacccaaatgtcttttcctctattactagact

SEQ ID NO: 51464 - DNA, 40 bp, Homo sapiens
gtctagtaatagaggaaaagacatttgggtgggtggtagt

SEQ ID NO: 51465 - DNA, 40 bp, Homo sapiens
actaccacccacccaaatgtcttttcctctattactagac

SEQ ID NO: 51466 - DNA, 40 bp, Homo sapiens
tctagtaatagaggaaaagacatttgggtgggtggtagtg

SEQ ID NO: 51467 - DNA, 40 bp, Homo sapiens
cactaccacccacccaaatgtcttttcctctattactaga

SEQ ID NO: 51468 - DNA, 40 bp, Homo sapiens
ctagtaatagaggaaaagacatttgggtgggtggtagtgg

SEQ ID NO: 51469 - DNA, 40 bp, Homo sapiens
ccactaccacccacccaaatgtcttttcctctattactag

SEQ ID NO: 51470 - DNA, 40 bp, Homo sapiens
tagtaatagaggaaaagacatttgggtgggtggtagtggt

SEQ ID NO: 51471 - DNA, 40 bp, Homo sapiens
accactaccacccacccaaatgtcttttcctctattacta

SEQ ID NO: 51472 - DNA, 40 bp, Homo sapiens
agtaatagaggaaaagacatttgggtgggtggtagtggta

SEQ ID NO: 51473 - DNA, 40 bp, Homo sapiens
taccactaccacccacccaaatgtcttttcctctattact

SEQ ID NO: 51474 - DNA, 40 bp, Homo sapiens
gtaatagaggaaaagacatttgggtgggtggtagtggtag

SEQ ID NO: 51475 - DNA, 40 bp, Homo sapiens
ctaccactaccacccacccaaatgtcttttcctctattac

SEQ ID NO: 51476 - DNA, 40 bp, Homo sapiens
taatagaggaaaagacatttgggtgggtggtagtggtagt

SEQ ID NO: 51477 - DNA, 40 bp, Homo sapiens
actaccactaccacccacccaaatgtcttttcctctatta

SEQ ID NO: 51478 - DNA, 40 bp, Homo sapiens
aatagaggaaaagacatttgggtgggtggtagtggtagta

SEQ ID NO: 51479 - DNA, 40 bp, Homo sapiens
tactaccactaccacccacccaaatgtcttttcctctatt

SEQ ID NO: 51480 - DNA, 40 bp, Homo sapiens
atagaggaaaagacatttgggtgggtggtagtggtagtat

SEQ ID NO: 51481 - DNA, 40 bp, Homo sapiens
atactaccactaccacccacccaaatgtcttttcctctat

SEQ ID NO: 51482 - DNA, 40 bp, Homo sapiens
tagaggaaaagacatttgggtgggtggtagtggtagtatt

SEQ ID NO: 51483 - DNA, 40 bp, Homo sapiens
aatactaccactaccacccacccaaatgtcttttcctcta

SEQ ID NO: 51484 - DNA, 40 bp, Homo sapiens
agaggaaaagacatttgggtgggtggtagtggtagtattt

SEQ ID NO: 51485 - DNA, 40 bp, Homo sapiens
aaatactaccactaccacccacccaaatgtcttttcctct

SEQ ID NO: 51486 - DNA, 40 bp, Homo sapiens
gaggaaaagacatttgggtgggtggtagtggtagtatttt

SEQ ID NO: 51487 - DNA, 40 bp, Homo sapiens
aaaatactaccactaccacccacccaaatgtcttttcctc

SEQ ID NO: 51488 - DNA, 40 bp, Homo sapiens
aggaaaagacatttgggtgggtggtagtggtagtattttt

SEQ ID NO: 51489 - DNA, 40 bp, Homo sapiens
aaaaatactaccactaccacccacccaaatgtcttttcct

SEQ ID NO: 51490 - DNA, 40 bp, Homo sapiens
ggaaaagacatttgggtgggtggtagtggtagtattttta

SEQ ID NO: 51491 - DNA, 40 bp, Homo sapiens
taaaaatactaccactaccacccacccaaatgtcttttcc

SEQ ID NO: 51492 - DNA, 40 bp, Homo sapiens
gaaaagacatttgggtgggtggtagtggtagtatttttat

SEQ ID NO: 51493 - DNA, 40 bp, Homo sapiens
ataaaaatactaccactaccacccacccaaatgtcttttc

SEQ ID NO: 51494 - DNA, 40 bp, Homo sapiens
aaaagacatttgggtgggtggtagtggtagtatttttata

SEQ ID NO: 51495 - DNA, 40 bp, Homo sapiens
tataaaaatactaccactaccacccacccaaatgtctttt

SEQ ID NO: 51496 - DNA, 40 bp, Homo sapiens
aaagacatttgggtgggtggtagtggtagtatttttatag

SEQ ID NO: 51497 - DNA, 40 bp, Homo sapiens
ctataaaaatactaccactaccacccacccaaatgtcttt

SEQ ID NO: 51498 - DNA, 40 bp, Homo sapiens
aagacatttgggtgggtggtagtggtagtatttttataga

SEQ ID NO: 51499 - DNA, 40 bp, Homo sapiens
tctataaaaatactaccactaccacccacccaaatgtctt

SEQ ID NO: 51500 - DNA, 40 bp, Homo sapiens
agacatttgggtgggtggtagtggtagtatttttatagag

SEQ ID NO: 51501 - DNA, 40 bp, Homo sapiens
ctctataaaaatactaccactaccacccacccaaatgtct

SEQ ID NO: 51502 - DNA, 40 bp, Homo sapiens
gacatttgggtgggtggtagtggtagtatttttatagagg

SEQ ID NO: 51503 - DNA, 40 bp, Homo sapiens
cctctataaaaatactaccactaccacccacccaaatgtc

SEQ ID NO: 51504 - DNA, 40 bp, Homo sapiens
acatttgggtgggtggtagtggtagtatttttatagagga

SEQ ID NO: 51505 - DNA, 40 bp, Homo sapiens
tcctctataaaaatactaccactaccacccacccaaatgt

SEQ ID NO: 51506 - DNA, 40 bp, Homo sapiens
catttgggtgggtggtagtggtagtatttttatagaggag

SEQ ID NO: 51507 - DNA, 40 bp, Homo sapiens
ctcctctataaaaatactaccactaccacccacccaaatg

SEQ ID NO: 51508 - DNA, 40 bp, Homo sapiens
atttgggtgggtggtagtggtagtatttttatagaggagt

SEQ ID NO: 51509 - DNA, 40 bp, Homo sapiens
actcctctataaaaatactaccactaccacccacccaaat

SEQ ID NO: 51510 - DNA, 40 bp, Homo sapiens
tttgggtgggtggtagtggtagtatttttatagaggagtt

SEQ ID NO: 51511 - DNA, 40 bp, Homo sapiens
aactcctctataaaaatactaccactaccacccacccaaa

SEQ ID NO: 51512 - DNA, 40 bp, Homo sapiens
ttgggtgggtggtagtggtagtatttttatagaggagtta

SEQ ID NO: 51513 - DNA, 40 bp, Homo sapiens
taactcctctataaaaatactaccactaccacccacccaa

SEQ ID NO: 51514 - DNA, 40 bp, Homo sapiens
tgggtgggtggtagtggtagtatttttatagaggagttac

SEQ ID NO: 51515 - DNA, 40 bp, Homo sapiens
gtaactcctctataaaaatactaccactaccacccaccca

SEQ ID NO: 51516 - DNA, 40 bp, Homo sapiens
gggtgggtggtagtggtagtatttttatagaggagttacc

SEQ ID NO: 51517 - DNA, 40 bp, Homo sapiens
ggtaactcctctataaaaatactaccactaccacccaccc

SEQ ID NO: 51518 - DNA, 40 bp, Homo sapiens
ggtgggtggtagtggtagtatttttatagaggagttacca

SEQ ID NO: 51519 - DNA, 40 bp, Homo sapiens
tggtaactcctctataaaaatactaccactaccacccacc

SEQ ID NO: 51520 - DNA, 40 bp, Homo sapiens
gtgggtggtagtggtagtatttttatagaggagttaccaa

SEQ ID NO: 51521 - DNA, 40 bp, Homo sapiens
ttggtaactcctctataaaaatactaccactaccacccac

SEQ ID NO: 51522 - DNA, 40 bp, Homo sapiens
tgggtggtagtggtagtatttttatagaggagttaccaaa

SEQ ID NO: 51523 - DNA, 40 bp, Homo sapiens
tttggtaactcctctataaaaatactaccactaccaccca

SEQ ID NO: 51524 - DNA, 40 bp, Homo sapiens
gggtggtagtggtagtatttttatagaggagttaccaaat

SEQ ID NO: 51525 - DNA, 40 bp, Homo sapiens
atttggtaactcctctataaaaatactaccactaccaccc

SEQ ID NO: 51526 - DNA, 40 bp, Homo sapiens
ggtggtagtggtagtatttttatagaggagttaccaaatt

SEQ ID NO: 51527 - DNA, 40 bp, Homo sapiens
aatttggtaactcctctataaaaatactaccactaccacc

SEQ ID NO: 51528 - DNA, 40 bp, Homo sapiens
gtggtagtggtagtatttttatagaggagttaccaaattt

SEQ ID NO: 51529 - DNA, 40 bp, Homo sapiens
aaatttggtaactcctctataaaaatactaccactaccac

SEQ ID NO: 51530 - DNA, 40 bp, Homo sapiens
tggtagtggtagtatttttatagaggagttaccaaatttc

SEQ ID NO: 51531 - DNA, 40 bp, Homo sapiens
gaaatttggtaactcctctataaaaatactaccactacca

SEQ ID NO: 51532 - DNA, 40 bp, Homo sapiens
ggtagtggtagtatttttatagaggagttaccaaatttca

SEQ ID NO: 51533 - DNA, 40 bp, Homo sapiens
tgaaatttggtaactcctctataaaaatactaccactacc

SEQ ID NO: 51534 - DNA, 40 bp, Homo sapiens
gtagtggtagtatttttatagaggagttaccaaatttcag

SEQ ID NO: 51535 - DNA, 40 bp, Homo sapiens
ctgaaatttggtaactcctctataaaaatactaccactac

SEQ ID NO: 51536 - DNA, 40 bp, Homo sapiens
tagtggtagtatttttatagaggagttaccaaatttcagc

SEQ ID NO: 51537 - DNA, 40 bp, Homo sapiens
gctgaaatttggtaactcctctataaaaatactaccacta

SEQ ID NO: 51538 - DNA, 40 bp, Homo sapiens
agtggtagtatttttatagaggagttaccaaatttcagct

SEQ ID NO: 51539 - DNA, 40 bp, Homo sapiens
agctgaaatttggtaactcctctataaaaatactaccact

SEQ ID NO: 51540 - DNA, 40 bp, Homo sapiens
gtggtagtatttttatagaggagttaccaaatttcagctc

SEQ ID NO: 51541 - DNA, 40 bp, Homo sapiens
gagctgaaatttggtaactcctctataaaaatactaccac

SEQ ID NO: 51542 - DNA, 40 bp, Homo sapiens
tggtagtatttttatagaggagttaccaaatttcagctct

SEQ ID NO: 51543 - DNA, 40 bp, Homo sapiens
agagctgaaatttggtaactcctctataaaaatactacca

SEQ ID NO: 51544 - DNA, 40 bp, Homo sapiens
ggtagtatttttatagaggagttaccaaatttcagctcta

SEQ ID NO: 51545 - DNA, 40 bp, Homo sapiens
tagagctgaaatttggtaactcctctataaaaatactacc

SEQ ID NO: 51546 - DNA, 40 bp, Homo sapiens
gtagtatttttatagaggagttaccaaatttcagctctat

SEQ ID NO: 51547 - DNA, 40 bp, Homo sapiens
atagagctgaaatttggtaactcctctataaaaatactac

SEQ ID NO: 51548 - DNA, 40 bp, Homo sapiens
tagtatttttatagaggagttaccaaatttcagctctatt

SEQ ID NO: 51549 - DNA, 40 bp, Homo sapiens
aatagagctgaaatttggtaactcctctataaaaatacta

SEQ ID NO: 51550 - DNA, 40 bp, Homo sapiens
agtatttttatagaggagttaccaaatttcagctctatta

SEQ ID NO: 51551 - DNA, 40 bp, Homo sapiens
taatagagctgaaatttggtaactcctctataaaaatact

SEQ ID NO: 51552 - DNA, 40 bp, Homo sapiens
gtatttttatagaggagttaccaaatttcagctctattat

SEQ ID NO: 51553 - DNA, 40 bp, Homo sapiens
ataatagagctgaaatttggtaactcctctataaaaatac

SEQ ID NO: 51554 - DNA, 40 bp, Homo sapiens
tatttttatagaggagttaccaaatttcagctctattatc

SEQ ID NO: 51555 - DNA, 40 bp, Homo sapiens
gataatagagctgaaatttggtaactcctctataaaaata

SEQ ID NO: 51556 - DNA, 40 bp, Homo sapiens
atttttatagaggagttaccaaatttcagctctattatcc

SEQ ID NO: 51557 - DNA, 40 bp, Homo sapiens
ggataatagagctgaaatttggtaactcctctataaaaat

SEQ ID NO: 51558 - DNA, 40 bp, Homo sapiens
tttttatagaggagttaccaaatttcagctctattatcca

SEQ ID NO: 51559 - DNA, 40 bp, Homo sapiens
tggataatagagctgaaatttggtaactcctctataaaaa

SEQ ID NO: 51560 - DNA, 40 bp, Homo sapiens
ttttatagaggagttaccaaatttcagctctattatccaa

SEQ ID NO: 51561 - DNA, 40 bp, Homo sapiens
ttggataatagagctgaaatttggtaactcctctataaaa

SEQ ID NO: 51562 - DNA, 40 bp, Homo sapiens
tttatagaggagttaccaaatttcagctctattatccaag

SEQ ID NO: 51563 - DNA, 40 bp, Homo sapiens
cttggataatagagctgaaatttggtaactcctctataaa

SEQ ID NO: 51564 - DNA, 40 bp, Homo sapiens
ttatagaggagttaccaaatttcagctctattatccaagt

SEQ ID NO: 51565 - DNA, 40 bp, Homo sapiens
acttggataatagagctgaaatttggtaactcctctataa

SEQ ID NO: 51566 - DNA, 40 bp, Homo sapiens
tatagaggagttaccaaatttcagctctattatccaagtt

SEQ ID NO: 51567 - DNA, 40 bp, Homo sapiens
aacttggataatagagctgaaatttggtaactcctctata

SEQ ID NO: 51568 - DNA, 40 bp, Homo sapiens
atagaggagttaccaaatttcagctctattatccaagttt

SEQ ID NO: 51569 - DNA, 40 bp, Homo sapiens
aaacttggataatagagctgaaatttggtaactcctctat

SEQ ID NO: 51570 - DNA, 40 bp, Homo sapiens
tagaggagttaccaaatttcagctctattatccaagttta

SEQ ID NO: 51571 - DNA, 40 bp, Homo sapiens
taaacttggataatagagctgaaatttggtaactcctcta

SEQ ID NO: 51572 - DNA, 40 bp, Homo sapiens
agaggagttaccaaatttcagctctattatccaagtttac

SEQ ID NO: 51573 - DNA, 40 bp, Homo sapiens
gtaaacttggataatagagctgaaatttggtaactcctct

SEQ ID NO: 51574 - DNA, 40 bp, Homo sapiens
gaggagttaccaaatttcagctctattatccaagtttacc

SEQ ID NO: 51575 - DNA, 40 bp, Homo sapiens
ggtaaacttggataatagagctgaaatttggtaactcctc

SEQ ID NO: 51576 - DNA, 40 bp, Homo sapiens
aggagttaccaaatttcagctctattatccaagtttaccc

SEQ ID NO: 51577 - DNA, 40 bp, Homo sapiens
gggtaaacttggataatagagctgaaatttggtaactcct

SEQ ID NO: 51578 - DNA, 40 bp, Homo sapiens
ggagttaccaaatttcagctctattatccaagtttaccca

SEQ ID NO: 51579 - DNA, 40 bp, Homo sapiens
tgggtaaacttggataatagagctgaaatttggtaactcc

SEQ ID NO: 51580 - DNA, 40 bp, Homo sapiens
gagttaccaaatttcagctctattatccaagtttacccag

SEQ ID NO: 51581 - DNA, 40 bp, Homo sapiens
ctgggtaaacttggataatagagctgaaatttggtaactc

SEQ ID NO: 51582 - DNA, 40 bp, Homo sapiens
agttaccaaatttcagctctattatccaagtttacccagc

SEQ ID NO: 51583 - DNA, 40 bp, Homo sapiens
gctgggtaaacttggataatagagctgaaatttggtaact

SEQ ID NO: 51584 - DNA, 40 bp, Homo sapiens
gttaccaaatttcagctctattatccaagtttacccagct

SEQ ID NO: 51585 - DNA, 40 bp, Homo sapiens
agctgggtaaacttggataatagagctgaaatttggtaac

SEQ ID NO: 51586 - DNA, 40 bp, Homo sapiens
ttaccaaatttcagctctattatccaagtttacccagcta

SEQ ID NO: 51587 - DNA, 40 bp, Homo sapiens
tagctgggtaaacttggataatagagctgaaatttggtaa

SEQ ID NO: 51588 - DNA, 40 bp, Homo sapiens
taccaaatttcagctctattatccaagtttacccagctaa

SEQ ID NO: 51589 - DNA, 40 bp, Homo sapiens
ttagctgggtaaacttggataatagagctgaaatttggta

SEQ ID NO: 51590 - DNA, 40 bp, Homo sapiens
accaaatttcagctctattatccaagtttacccagctaat

SEQ ID NO: 51591 - DNA, 40 bp, Homo sapiens
attagctgggtaaacttggataatagagctgaaatttggt

SEQ ID NO: 51592 - DNA, 40 bp, Homo sapiens
ccaaatttcagctctattatccaagtttacccagctaatg

SEQ ID NO: 51593 - DNA, 40 bp, Homo sapiens
cattagctgggtaaacttggataatagagctgaaatttgg

SEQ ID NO: 51594 - DNA, 40 bp, Homo sapiens
caaatttcagctctattatccaagtttacccagctaatgg

SEQ ID NO: 51595 - DNA, 40 bp, Homo sapiens
ccattagctgggtaaacttggataatagagctgaaatttg

SEQ ID NO: 51596 - DNA, 40 bp, Homo sapiens
aaatttcagctctattatccaagtttacccagctaatggt

SEQ ID NO: 51597 - DNA, 40 bp, Homo sapiens
accattagctgggtaaacttggataatagagctgaaattt

SEQ ID NO: 51598 - DNA, 40 bp, Homo sapiens
aatttcagctctattatccaagtttacccagctaatggtg

SEQ ID NO: 51599 - DNA, 40 bp, Homo sapiens
caccattagctgggtaaacttggataatagagctgaaatt

SEQ ID NO: 51600 - DNA, 40 bp, Homo sapiens
atttcagctctattatccaagtttacccagctaatggtgt

SEQ ID NO: 51601 - DNA, 40 bp, Homo sapiens
acaccattagctgggtaaacttggataatagagctgaaat

SEQ ID NO: 51602 - DNA, 40 bp, Homo sapiens
tttcagctctattatccaagtttacccagctaatggtgtt

SEQ ID NO: 51603 - DNA, 40 bp, Homo sapiens
aacaccattagctgggtaaacttggataatagagctgaaa

SEQ ID NO: 51604 - DNA, 40 bp, Homo sapiens
ttcagctctattatccaagtttacccagctaatggtgttc

SEQ ID NO: 51605 - DNA, 40 bp, Homo sapiens
gaacaccattagctgggtaaacttggataatagagctgaa

SEQ ID NO: 51606 - DNA, 40 bp, Homo sapiens
tcagctctattatccaagtttacccagctaatggtgttcg

SEQ ID NO: 51607 - DNA, 40 bp, Homo sapiens
cgaacaccattagctgggtaaacttggataatagagctga

SEQ ID NO: 51608 - DNA, 40 bp, Homo sapiens
cagctctattatccaagtttacccagctaatggtgttcgg

SEQ ID NO: 51609 - DNA, 40 bp, Homo sapiens
ccgaacaccattagctgggtaaacttggataatagagctg

SEQ ID NO: 51610 - DNA, 40 bp, Homo sapiens
agctctattatccaagtttacccagctaatggtgttcgga

SEQ ID NO: 51611 - DNA, 40 bp, Homo sapiens
tccgaacaccattagctgggtaaacttggataatagagct

SEQ ID NO: 51612 - DNA, 40 bp, Homo sapiens
gctctattatccaagtttacccagctaatggtgttcggaa

SEQ ID NO: 51613 - DNA, 40 bp, Homo sapiens
ttccgaacaccattagctgggtaaacttggataatagagc

SEQ ID NO: 51614 - DNA, 40 bp, Homo sapiens
ctctattatccaagtttacccagctaatggtgttcggaac

SEQ ID NO: 51615 - DNA, 40 bp, Homo sapiens
gttccgaacaccattagctgggtaaacttggataatagag

SEQ ID NO: 51616 - DNA, 40 bp, Homo sapiens
tctattatccaagtttacccagctaatggtgttcggaacc

SEQ ID NO: 51617 - DNA, 40 bp, Homo sapiens
ggttccgaacaccattagctgggtaaacttggataataga

SEQ ID NO: 51618 - DNA, 40 bp, Homo sapiens
ctattatccaagtttacccagctaatggtgttcggaaccg

SEQ ID NO: 51619 - DNA, 40 bp, Homo sapiens
cggttccgaacaccattagctgggtaaacttggataatag

SEQ ID NO: 51620 - DNA, 40 bp, Homo sapiens
tattatccaagtttacccagctaatggtgttcggaaccgg

SEQ ID NO: 51621 - DNA, 40 bp, Homo sapiens
ccggttccgaacaccattagctgggtaaacttggataata

SEQ ID NO: 51622 - DNA, 40 bp, Homo sapiens
attatccaagtttacccagctaatggtgttcggaaccggg

SEQ ID NO: 51623 - DNA, 40 bp, Homo sapiens
cccggttccgaacaccattagctgggtaaacttggataat

SEQ ID NO: 51624 - DNA, 40 bp, Homo sapiens
ttatccaagtttacccagctaatggtgttcggaaccggga

SEQ ID NO: 51625 - DNA, 40 bp, Homo sapiens
tcccggttccgaacaccattagctgggtaaacttggataa

SEQ ID NO: 51626 - DNA, 40 bp, Homo sapiens
tatccaagtttacccagctaatggtgttcggaaccgggaa

SEQ ID NO: 51627 - DNA, 40 bp, Homo sapiens
ttcccggttccgaacaccattagctgggtaaacttggata

SEQ ID NO: 51628 - DNA, 40 bp, Homo sapiens
atccaagtttacccagctaatggtgttcggaaccgggaat

SEQ ID NO: 51629 - DNA, 40 bp, Homo sapiens
attcccggttccgaacaccattagctgggtaaacttggat

SEQ ID NO: 51630 - DNA, 40 bp, Homo sapiens
tccaagtttacccagctaatggtgttcggaaccgggaatt

SEQ ID NO: 51631 - DNA, 40 bp, Homo sapiens
aattcccggttccgaacaccattagctgggtaaacttgga

SEQ ID NO: 51632 - DNA, 40 bp, Homo sapiens
ccaagtttacccagctaatggtgttcggaaccgggaattt

SEQ ID NO: 51633 - DNA, 40 bp, Homo sapiens
aaattcccggttccgaacaccattagctgggtaaacttgg

SEQ ID NO: 51634 - DNA, 40 bp, Homo sapiens
caagtttacccagctaatggtgttcggaaccgggaatttg

SEQ ID NO: 51635 - DNA, 40 bp, Homo sapiens
caaattcccggttccgaacaccattagctgggtaaacttg

SEQ ID NO: 51636 - DNA, 40 bp, Homo sapiens
aagtttacccagctaatggtgttcggaaccgggaatttga

SEQ ID NO: 51637 - DNA, 40 bp, Homo sapiens
tcaaattcccggttccgaacaccattagctgggtaaactt

SEQ ID NO: 51638 - DNA, 40 bp, Homo sapiens
agtttacccagctaatggtgttcggaaccgggaatttgag

SEQ ID NO: 51639 - DNA, 40 bp, Homo sapiens
ctcaaattcccggttccgaacaccattagctgggtaaact

SEQ ID NO: 51640 - DNA, 40 bp, Homo sapiens
gtttacccagctaatggtgttcggaaccgggaatttgagc

SEQ ID NO: 51641 - DNA, 40 bp, Homo sapiens
gctcaaattcccggttccgaacaccattagctgggtaaac

SEQ ID NO: 51642 - DNA, 40 bp, Homo sapiens
tttacccagctaatggtgttcggaaccgggaatttgagcc

SEQ ID NO: 51643 - DNA, 40 bp, Homo sapiens
ggctcaaattcccggttccgaacaccattagctgggtaaa

SEQ ID NO: 51644 - DNA, 40 bp, Homo sapiens
ttacccagctaatggtgttcggaaccgggaatttgagcca

SEQ ID NO: 51645 - DNA, 40 bp, Homo sapiens
tggctcaaattcccggttccgaacaccattagctgggtaa

SEQ ID NO: 51646 - DNA, 40 bp, Homo sapiens
tacccagctaatggtgttcggaaccgggaatttgagccaa

SEQ ID NO: 51647 - DNA, 40 bp, Homo sapiens
ttggctcaaattcccggttccgaacaccattagctgggta

SEQ ID NO: 51648 - DNA, 40 bp, Homo sapiens
acccagctaatggtgttcggaaccgggaatttgagccaat

SEQ ID NO: 51649 - DNA, 40 bp, Homo sapiens
attggctcaaattcccggttccgaacaccattagctgggt

SEQ ID NO: 51650 - DNA, 40 bp, Homo sapiens
cccagctaatggtgttcggaaccgggaatttgagccaatt

SEQ ID NO: 51651 - DNA, 40 bp, Homo sapiens
aattggctcaaattcccggttccgaacaccattagctggg

SEQ ID NO: 51652 - DNA, 40 bp, Homo sapiens
ccagctaatggtgttcggaaccgggaatttgagccaattc

SEQ ID NO: 51653 - DNA, 40 bp, Homo sapiens
gaattggctcaaattcccggttccgaacaccattagctgg

SEQ ID NO: 51654 - DNA, 40 bp, Homo sapiens
cagctaatggtgttcggaaccgggaatttgagccaattct

SEQ ID NO: 51655 - DNA, 40 bp, Homo sapiens
agaattggctcaaattcccggttccgaacaccattagctg

SEQ ID NO: 51656 - DNA, 40 bp, Homo sapiens
agctaatggtgttcggaaccgggaatttgagccaattctg

SEQ ID NO: 51657 - DNA, 40 bp, Homo sapiens
cagaattggctcaaattcccggttccgaacaccattagct

SEQ ID NO: 51658 - DNA, 40 bp, Homo sapiens
gctaatggtgttcggaaccgggaatttgagccaattctga

SEQ ID NO: 51659 - DNA, 40 bp, Homo sapiens
tcagaattggctcaaattcccggttccgaacaccattagc

SEQ ID NO: 51660 - DNA, 40 bp, Homo sapiens
ctaatggtgttcggaaccgggaatttgagccaattctgac

SEQ ID NO: 51661 - DNA, 40 bp, Homo sapiens
gtcagaattggctcaaattcccggttccgaacaccattag

SEQ ID NO: 51662 - DNA, 40 bp, Homo sapiens
taatggtgttcggaaccgggaatttgagccaattctgact

SEQ ID NO: 51663 - DNA, 40 bp, Homo sapiens
agtcagaattggctcaaattcccggttccgaacaccatta

SEQ ID NO: 51664 - DNA, 40 bp, Homo sapiens
aatggtgttcggaaccgggaatttgagccaattctgactc

SEQ ID NO: 51665 - DNA, 40 bp, Homo sapiens
gagtcagaattggctcaaattcccggttccgaacaccatt

SEQ ID NO: 51666 - DNA, 40 bp, Homo sapiens
atggtgttcggaaccgggaatttgagccaattctgactct

SEQ ID NO: 51667 - DNA, 40 bp, Homo sapiens
agagtcagaattggctcaaattcccggttccgaacaccat

SEQ ID NO: 51668 - DNA, 40 bp, Homo sapiens
tggtgttcggaaccgggaatttgagccaattctgactctg

SEQ ID NO: 51669 - DNA, 40 bp, Homo sapiens
cagagtcagaattggctcaaattcccggttccgaacacca

SEQ ID NO: 51670 - DNA, 40 bp, Homo sapiens
ggtgttcggaaccgggaatttgagccaattctgactctgt

SEQ ID NO: 51671 - DNA, 40 bp, Homo sapiens
acagagtcagaattggctcaaattcccggttccgaacacc

SEQ ID NO: 51672 - DNA, 40 bp, Homo sapiens
gtgttcggaaccgggaatttgagccaattctgactctgtt

SEQ ID NO: 51673 - DNA, 40 bp, Homo sapiens
aacagagtcagaattggctcaaattcccggttccgaacac

SEQ ID NO: 51674 - DNA, 40 bp, Homo sapiens
tgttcggaaccgggaatttgagccaattctgactctgttg

SEQ ID NO: 51675 - DNA, 40 bp, Homo sapiens
caacagagtcagaattggctcaaattcccggttccgaaca

SEQ ID NO: 51676 - DNA, 40 bp, Homo sapiens
gttcggaaccgggaatttgagccaattctgactctgttgt

SEQ ID NO: 51677 - DNA, 40 bp, Homo sapiens
acaacagagtcagaattggctcaaattcccggttccgaac

SEQ ID NO: 51678 - DNA, 40 bp, Homo sapiens
ttcggaaccgggaatttgagccaattctgactctgttgtc

SEQ ID NO: 51679 - DNA, 40 bp, Homo sapiens
gacaacagagtcagaattggctcaaattcccggttccgaa

SEQ ID NO: 51680 - DNA, 40 bp, Homo sapiens
tcggaaccgggaatttgagccaattctgactctgttgtct

SEQ ID NO: 51681 - DNA, 40 bp, Homo sapiens
agacaacagagtcagaattggctcaaattcccggttccga

SEQ ID NO: 51682 - DNA, 40 bp, Homo sapiens
cggaaccgggaatttgagccaattctgactctgttgtctg

SEQ ID NO: 51683 - DNA, 40 bp, Homo sapiens
cagacaacagagtcagaattggctcaaattcccggttccg

SEQ ID NO: 51684 - DNA, 40 bp, Homo sapiens
ggaaccgggaatttgagccaattctgactctgttgtctgc

SEQ ID NO: 51685 - DNA, 40 bp, Homo sapiens
gcagacaacagagtcagaattggctcaaattcccggttcc

SEQ ID NO: 51686 - DNA, 40 bp, Homo sapiens
gaaccgggaatttgagccaattctgactctgttgtctgct

SEQ ID NO: 51687 - DNA, 40 bp, Homo sapiens
agcagacaacagagtcagaattggctcaaattcccggttc

SEQ ID NO: 51688 - DNA, 40 bp, Homo sapiens
aaccgggaatttgagccaattctgactctgttgtctgctc

SEQ ID NO: 51689 - DNA, 40 bp, Homo sapiens
gagcagacaacagagtcagaattggctcaaattcccggtt

SEQ ID NO: 51690 - DNA, 40 bp, Homo sapiens
accgggaatttgagccaattctgactctgttgtctgctct

SEQ ID NO: 51691 - DNA, 40 bp, Homo sapiens
agagcagacaacagagtcagaattggctcaaattcccggt

SEQ ID NO: 51692 - DNA, 40 bp, Homo sapiens
ccgggaatttgagccaattctgactctgttgtctgctctg

SEQ ID NO: 51693 - DNA, 40 bp, Homo sapiens
cagagcagacaacagagtcagaattggctcaaattcccgg

SEQ ID NO: 51694 - DNA, 40 bp, Homo sapiens
cgggaatttgagccaattctgactctgttgtctgctctgc

SEQ ID NO: 51695 - DNA, 40 bp, Homo sapiens
gcagagcagacaacagagtcagaattggctcaaattcccg

SEQ ID NO: 51696 - DNA, 40 bp, Homo sapiens
gggaatttgagccaattctgactctgttgtctgctctgct

SEQ ID NO: 51697 - DNA, 40 bp, Homo sapiens
agcagagcagacaacagagtcagaattggctcaaattccc

SEQ ID NO: 51698 - DNA, 40 bp, Homo sapiens
ggaatttgagccaattctgactctgttgtctgctctgctc

SEQ ID NO: 51699 - DNA, 40 bp, Homo sapiens
gagcagagcagacaacagagtcagaattggctcaaattcc

SEQ ID NO: 51700 - DNA, 40 bp, Homo sapiens
gaatttgagccaattctgactctgttgtctgctctgctcc

SEQ ID NO: 51701 - DNA, 40 bp, Homo sapiens
ggagcagagcagacaacagagtcagaattggctcaaattc

SEQ ID NO: 51702 - DNA, 40 bp, Homo sapiens
aatttgagccaattctgactctgttgtctgctctgctcct

SEQ ID NO: 51703 - DNA, 40 bp, Homo sapiens
aggagcagagcagacaacagagtcagaattggctcaaatt

SEQ ID NO: 51704 - DNA, 40 bp, Homo sapiens
atttgagccaattctgactctgttgtctgctctgctcctt

SEQ ID NO: 51705 - DNA, 40 bp, Homo sapiens
aaggagcagagcagacaacagagtcagaattggctcaaat

SEQ ID NO: 51706 - DNA, 40 bp, Homo sapiens
tttgagccaattctgactctgttgtctgctctgctccttc

SEQ ID NO: 51707 - DNA, 40 bp, Homo sapiens
gaaggagcagagcagacaacagagtcagaattggctcaaa

SEQ ID NO: 51708 - DNA, 40 bp, Homo sapiens
ttgagccaattctgactctgttgtctgctctgctccttct

SEQ ID NO: 51709 - DNA, 40 bp, Homo sapiens
agaaggagcagagcagacaacagagtcagaattggctcaa

SEQ ID NO: 51710 - DNA, 40 bp, Homo sapiens
tgagccaattctgactctgttgtctgctctgctccttctt

SEQ ID NO: 51711 - DNA, 40 bp, Homo sapiens
aagaaggagcagagcagacaacagagtcagaattggctca

SEQ ID NO: 51712 - DNA, 40 bp, Homo sapiens
gagccaattctgactctgttgtctgctctgctccttcttt

SEQ ID NO: 51713 - DNA, 40 bp, Homo sapiens
aaagaaggagcagagcagacaacagagtcagaattggctc

SEQ ID NO: 51714 - DNA, 40 bp, Homo sapiens
agccaattctgactctgttgtctgctctgctccttctttt

SEQ ID NO: 51715 - DNA, 40 bp, Homo sapiens
aaaagaaggagcagagcagacaacagagtcagaattggct

SEQ ID NO: 51716 - DNA, 40 bp, Homo sapiens
gccaattctgactctgttgtctgctctgctccttcttttg

SEQ ID NO: 51717 - DNA, 40 bp, Homo sapiens
caaaagaaggagcagagcagacaacagagtcagaattggc

SEQ ID NO: 51718 - DNA, 40 bp, Homo sapiens
ccaattctgactctgttgtctgctctgctccttcttttgt

SEQ ID NO: 51719 - DNA, 40 bp, Homo sapiens
acaaaagaaggagcagagcagacaacagagtcagaattgg

SEQ ID NO: 51720 - DNA, 40 bp, Homo sapiens
caattctgactctgttgtctgctctgctccttcttttgtg

SEQ ID NO: 51721 - DNA, 40 bp, Homo sapiens
cacaaaagaaggagcagagcagacaacagagtcagaattg

SEQ ID NO: 51722 - DNA, 40 bp, Homo sapiens
aattctgactctgttgtctgctctgctccttcttttgtgc

SEQ ID NO: 51723 - DNA, 40 bp, Homo sapiens
gcacaaaagaaggagcagagcagacaacagagtcagaatt

SEQ ID NO: 51724 - DNA, 40 bp, Homo sapiens
attctgactctgttgtctgctctgctccttcttttgtgct

SEQ ID NO: 51725 - DNA, 40 bp, Homo sapiens
agcacaaaagaaggagcagagcagacaacagagtcagaat

SEQ ID NO: 51726 - DNA, 40 bp, Homo sapiens
ttctgactctgttgtctgctctgctccttcttttgtgctg

SEQ ID NO: 51727 - DNA, 40 bp, Homo sapiens
cagcacaaaagaaggagcagagcagacaacagagtcagaa

SEQ ID NO: 51728 - DNA, 40 bp, Homo sapiens
tctgactctgttgtctgctctgctccttcttttgtgctgt

SEQ ID NO: 51729 - DNA, 40 bp, Homo sapiens
acagcacaaaagaaggagcagagcagacaacagagtcaga

SEQ ID NO: 51730 - DNA, 40 bp, Homo sapiens
ctgactctgttgtctgctctgctccttcttttgtgctgtg

SEQ ID NO: 51731 - DNA, 40 bp, Homo sapiens
cacagcacaaaagaaggagcagagcagacaacagagtcag

SEQ ID NO: 51732 - DNA, 40 bp, Homo sapiens
tgactctgttgtctgctctgctccttcttttgtgctgtgt

SEQ ID NO: 51733 - DNA, 40 bp, Homo sapiens
acacagcacaaaagaaggagcagagcagacaacagagtca

SEQ ID NO: 51734 - DNA, 40 bp, Homo sapiens
gactctgttgtctgctctgctccttcttttgtgctgtgtc

SEQ ID NO: 51735 - DNA, 40 bp, Homo sapiens
gacacagcacaaaagaaggagcagagcagacaacagagtc

SEQ ID NO: 51736 - DNA, 40 bp, Homo sapiens
actctgttgtctgctctgctccttcttttgtgctgtgtct

SEQ ID NO: 51737 - DNA, 40 bp, Homo sapiens
agacacagcacaaaagaaggagcagagcagacaacagagt

SEQ ID NO: 51738 - DNA, 40 bp, Homo sapiens
ctctgttgtctgctctgctccttcttttgtgctgtgtctt

SEQ ID NO: 51739 - DNA, 40 bp, Homo sapiens
aagacacagcacaaaagaaggagcagagcagacaacagag

SEQ ID NO: 51740 - DNA, 40 bp, Homo sapiens
tctgttgtctgctctgctccttcttttgtgctgtgtcttt

SEQ ID NO: 51741 - DNA, 40 bp, Homo sapiens
aaagacacagcacaaaagaaggagcagagcagacaacaga

SEQ ID NO: 51742 - DNA, 40 bp, Homo sapiens
ctgttgtctgctctgctccttcttttgtgctgtgtctttg

SEQ ID NO: 51743 - DNA, 40 bp, Homo sapiens
caaagacacagcacaaaagaaggagcagagcagacaacag

SEQ ID NO: 51744 - DNA, 40 bp, Homo sapiens
tgttgtctgctctgctccttcttttgtgctgtgtctttga

SEQ ID NO: 51745 - DNA, 40 bp, Homo sapiens
tcaaagacacagcacaaaagaaggagcagagcagacaaca

SEQ ID NO: 51746 - DNA, 40 bp, Homo sapiens
gttgtctgctctgctccttcttttgtgctgtgtctttgaa

SEQ ID NO: 51747 - DNA, 40 bp, Homo sapiens
ttcaaagacacagcacaaaagaaggagcagagcagacaac

SEQ ID NO: 51748 - DNA, 40 bp, Homo sapiens
ttgtctgctctgctccttcttttgtgctgtgtctttgaaa

SEQ ID NO: 51749 - DNA, 40 bp, Homo sapiens
tttcaaagacacagcacaaaagaaggagcagagcagacaa

SEQ ID NO: 51750 - DNA, 40 bp, Homo sapiens
tgtctgctctgctccttcttttgtgctgtgtctttgaaag

SEQ ID NO: 51751 - DNA, 40 bp, Homo sapiens
ctttcaaagacacagcacaaaagaaggagcagagcagaca

SEQ ID NO: 51752 - DNA, 40 bp, Homo sapiens
gtctgctctgctccttcttttgtgctgtgtctttgaaagt

SEQ ID NO: 51753 - DNA, 40 bp, Homo sapiens
actttcaaagacacagcacaaaagaaggagcagagcagac

SEQ ID NO: 51754 - DNA, 40 bp, Homo sapiens
tctgctctgctccttcttttgtgctgtgtctttgaaagtc

SEQ ID NO: 51755 - DNA, 40 bp, Homo sapiens
gactttcaaagacacagcacaaaagaaggagcagagcaga

SEQ ID NO: 51756 - DNA, 40 bp, Homo sapiens
ctgctctgctccttcttttgtgctgtgtctttgaaagtca

SEQ ID NO: 51757 - DNA, 40 bp, Homo sapiens
tgactttcaaagacacagcacaaaagaaggagcagagcag

SEQ ID NO: 51758 - DNA, 40 bp, Homo sapiens
tgctctgctccttcttttgtgctgtgtctttgaaagtcac

SEQ ID NO: 51759 - DNA, 40 bp, Homo sapiens
gtgactttcaaagacacagcacaaaagaaggagcagagca

SEQ ID NO: 51760 - DNA, 40 bp, Homo sapiens
gctctgctccttcttttgtgctgtgtctttgaaagtcacc

SEQ ID NO: 51761 - DNA, 40 bp, Homo sapiens
ggtgactttcaaagacacagcacaaaagaaggagcagagc

SEQ ID NO: 51762 - DNA, 40 bp, Homo sapiens
ctctgctccttcttttgtgctgtgtctttgaaagtcacct

SEQ ID NO: 51763 - DNA, 40 bp, Homo sapiens
aggtgactttcaaagacacagcacaaaagaaggagcagag

SEQ ID NO: 51764 - DNA, 40 bp, Homo sapiens
tctgctccttcttttgtgctgtgtctttgaaagtcaccta

SEQ ID NO: 51765 - DNA, 40 bp, Homo sapiens
taggtgactttcaaagacacagcacaaaagaaggagcaga

SEQ ID NO: 51766 - DNA, 40 bp, Homo sapiens
ctgctccttcttttgtgctgtgtctttgaaagtcacctaa

SEQ ID NO: 51767 - DNA, 40 bp, Homo sapiens
ttaggtgactttcaaagacacagcacaaaagaaggagcag

SEQ ID NO: 51768 - DNA, 40 bp, Homo sapiens
tgctccttcttttgtgctgtgtctttgaaagtcacctaaa

SEQ ID NO: 51769 - DNA, 40 bp, Homo sapiens
tttaggtgactttcaaagacacagcacaaaagaaggagca

SEQ ID NO: 51770 - DNA, 40 bp, Homo sapiens
gctccttcttttgtgctgtgtctttgaaagtcacctaaaa

SEQ ID NO: 51771 - DNA, 40 bp, Homo sapiens
ttttaggtgactttcaaagacacagcacaaaagaaggagc

SEQ ID NO: 51772 - DNA, 40 bp, Homo sapiens
ctccttcttttgtgctgtgtctttgaaagtcacctaaaat

SEQ ID NO: 51773 - DNA, 40 bp, Homo sapiens
attttaggtgactttcaaagacacagcacaaaagaaggag

SEQ ID NO: 51774 - DNA, 40 bp, Homo sapiens
tccttcttttgtgctgtgtctttgaaagtcacctaaaatt

SEQ ID NO: 51775 - DNA, 40 bp, Homo sapiens
aattttaggtgactttcaaagacacagcacaaaagaagga

SEQ ID NO: 51776 - DNA, 40 bp, Homo sapiens
ccttcttttgtgctgtgtctttgaaagtcacctaaaattg

SEQ ID NO: 51777 - DNA, 40 bp, Homo sapiens
caattttaggtgactttcaaagacacagcacaaaagaagg

SEQ ID NO: 51778 - DNA, 40 bp, Homo sapiens
cttcttttgtgctgtgtctttgaaagtcacctaaaattgt

SEQ ID NO: 51779 - DNA, 40 bp, Homo sapiens
acaattttaggtgactttcaaagacacagcacaaaagaag

SEQ ID NO: 51780 - DNA, 40 bp, Homo sapiens
ttcttttgtgctgtgtctttgaaagtcacctaaaattgtg

SEQ ID NO: 51781 - DNA, 40 bp, Homo sapiens
cacaattttaggtgactttcaaagacacagcacaaaagaa

SEQ ID NO: 51782 - DNA, 40 bp, Homo sapiens
tcttttgtgctgtgtctttgaaagtcacctaaaattgtga

SEQ ID NO: 51783 - DNA, 40 bp, Homo sapiens
tcacaattttaggtgactttcaaagacacagcacaaaaga

SEQ ID NO: 51784 - DNA, 40 bp, Homo sapiens
cttttgtgctgtgtctttgaaagtcacctaaaattgtgag

SEQ ID NO: 51785 - DNA, 40 bp, Homo sapiens
ctcacaattttaggtgactttcaaagacacagcacaaaag

SEQ ID NO: 51786 - DNA, 40 bp, Homo sapiens
ttttgtgctgtgtctttgaaagtcacctaaaattgtgagg

SEQ ID NO: 51787 - DNA, 40 bp, Homo sapiens
cctcacaattttaggtgactttcaaagacacagcacaaaa

SEQ ID NO: 51788 - DNA, 40 bp, Homo sapiens
tttgtgctgtgtctttgaaagtcacctaaaattgtgaggg

SEQ ID NO: 51789 - DNA, 40 bp, Homo sapiens
ccctcacaattttaggtgactttcaaagacacagcacaaa

SEQ ID NO: 51790 - DNA, 40 bp, Homo sapiens
ttgtgctgtgtctttgaaagtcacctaaaattgtgaggga

SEQ ID NO: 51791 - DNA, 40 bp, Homo sapiens
tccctcacaattttaggtgactttcaaagacacagcacaa

SEQ ID NO: 51792 - DNA, 40 bp, Homo sapiens
tgtgctgtgtctttgaaagtcacctaaaattgtgagggaa

SEQ ID NO: 51793 - DNA, 40 bp, Homo sapiens
ttccctcacaattttaggtgactttcaaagacacagcaca

SEQ ID NO: 51794 - DNA, 40 bp, Homo sapiens
gtgctgtgtctttgaaagtcacctaaaattgtgagggaat

SEQ ID NO: 51795 - DNA, 40 bp, Homo sapiens
attccctcacaattttaggtgactttcaaagacacagcac

SEQ ID NO: 51796 - DNA, 40 bp, Homo sapiens
tgctgtgtctttgaaagtcacctaaaattgtgagggaatg

SEQ ID NO: 51797 - DNA, 40 bp, Homo sapiens
cattccctcacaattttaggtgactttcaaagacacagca

SEQ ID NO: 51798 - DNA, 40 bp, Homo sapiens
gctgtgtctttgaaagtcacctaaaattgtgagggaatgt

SEQ ID NO: 51799 - DNA, 40 bp, Homo sapiens
acattccctcacaattttaggtgactttcaaagacacagc

SEQ ID NO: 51800 - DNA, 40 bp, Homo sapiens
ctgtgtctttgaaagtcacctaaaattgtgagggaatgta

SEQ ID NO: 51801 - DNA, 40 bp, Homo sapiens
tacattccctcacaattttaggtgactttcaaagacacag

SEQ ID NO: 51802 - DNA, 40 bp, Homo sapiens
tgtgtctttgaaagtcacctaaaattgtgagggaatgtaa

SEQ ID NO: 51803 - DNA, 40 bp, Homo sapiens
ttacattccctcacaattttaggtgactttcaaagacaca

SEQ ID NO: 51804 - DNA, 40 bp, Homo sapiens
gtgtctttgaaagtcacctaaaattgtgagggaatgtaat

SEQ ID NO: 51805 - DNA, 40 bp, Homo sapiens
attacattccctcacaattttaggtgactttcaaagacac

SEQ ID NO: 51806 - DNA, 40 bp, Homo sapiens
tgtctttgaaagtcacctaaaattgtgagggaatgtaatt

SEQ ID NO: 51807 - DNA, 40 bp, Homo sapiens
aattacattccctcacaattttaggtgactttcaaagaca

SEQ ID NO: 51808 - DNA, 40 bp, Homo sapiens
gtctttgaaagtcacctaaaattgtgagggaatgtaattt

SEQ ID NO: 51809 - DNA, 40 bp, Homo sapiens
aaattacattccctcacaattttaggtgactttcaaagac

SEQ ID NO: 51810 - DNA, 40 bp, Homo sapiens
tctttgaaagtcacctaaaattgtgagggaatgtaatttc

SEQ ID NO: 51811 - DNA, 40 bp, Homo sapiens
gaaattacattccctcacaattttaggtgactttcaaaga

SEQ ID NO: 51812 - DNA, 40 bp, Homo sapiens
ctttgaaagtcacctaaaattgtgagggaatgtaatttca

SEQ ID NO: 51813 - DNA, 40 bp, Homo sapiens
tgaaattacattccctcacaattttaggtgactttcaaag

SEQ ID NO: 51814 - DNA, 40 bp, Homo sapiens
tttgaaagtcacctaaaattgtgagggaatgtaatttcac

SEQ ID NO: 51815 - DNA, 40 bp, Homo sapiens
gtgaaattacattccctcacaattttaggtgactttcaaa

SEQ ID NO: 51816 - DNA, 40 bp, Homo sapiens
ttgaaagtcacctaaaattgtgagggaatgtaatttcacc

SEQ ID NO: 51817 - DNA, 40 bp, Homo sapiens
ggtgaaattacattccctcacaattttaggtgactttcaa

SEQ ID NO: 51818 - DNA, 40 bp, Homo sapiens
tgaaagtcacctaaaattgtgagggaatgtaatttcaccc

SEQ ID NO: 51819 - DNA, 40 bp, Homo sapiens
gggtgaaattacattccctcacaattttaggtgactttca

SEQ ID NO: 51820 - DNA, 40 bp, Homo sapiens
gaaagtcacctaaaattgtgagggaatgtaatttcacccc

SEQ ID NO: 51821 - DNA, 40 bp, Homo sapiens
ggggtgaaattacattccctcacaattttaggtgactttc

SEQ ID NO: 51822 - DNA, 40 bp, Homo sapiens
aaagtcacctaaaattgtgagggaatgtaatttcacccca

SEQ ID NO: 51823 - DNA, 40 bp, Homo sapiens
tggggtgaaattacattccctcacaattttaggtgacttt

SEQ ID NO: 51824 - DNA, 40 bp, Homo sapiens
aagtcacctaaaattgtgagggaatgtaatttcaccccaa

SEQ ID NO: 51825 - DNA, 40 bp, Homo sapiens
ttggggtgaaattacattccctcacaattttaggtgactt

SEQ ID NO: 51826 - DNA, 40 bp, Homo sapiens
agtcacctaaaattgtgagggaatgtaatttcaccccaaa

SEQ ID NO: 51827 - DNA, 40 bp, Homo sapiens
tttggggtgaaattacattccctcacaattttaggtgact

SEQ ID NO: 51828 - DNA, 40 bp, Homo sapiens
gtcacctaaaattgtgagggaatgtaatttcaccccaaat

SEQ ID NO: 51829 - DNA, 40 bp, Homo sapiens
atttggggtgaaattacattccctcacaattttaggtgac

SEQ ID NO: 51830 - DNA, 40 bp, Homo sapiens
tcacctaaaattgtgagggaatgtaatttcaccccaaatt

SEQ ID NO: 51831 - DNA, 40 bp, Homo sapiens
aatttggggtgaaattacattccctcacaattttaggtga

SEQ ID NO: 51832 - DNA, 40 bp, Homo sapiens
cacctaaaattgtgagggaatgtaatttcaccccaaattt

SEQ ID NO: 51833 - DNA, 40 bp, Homo sapiens
aaatttggggtgaaattacattccctcacaattttaggtg

SEQ ID NO: 51834 - DNA, 40 bp, Homo sapiens
acctaaaattgtgagggaatgtaatttcaccccaaattta

SEQ ID NO: 51835 - DNA, 40 bp, Homo sapiens
taaatttggggtgaaattacattccctcacaattttaggt

SEQ ID NO: 51836 - DNA, 40 bp, Homo sapiens
cctaaaattgtgagggaatgtaatttcaccccaaatttag

SEQ ID NO: 51837 - DNA, 40 bp, Homo sapiens
ctaaatttggggtgaaattacattccctcacaattttagg

SEQ ID NO: 51838 - DNA, 40 bp, Homo sapiens
ctaaaattgtgagggaatgtaatttcaccccaaatttaga

SEQ ID NO: 51839 - DNA, 40 bp, Homo sapiens
tctaaatttggggtgaaattacattccctcacaattttag

SEQ ID NO: 51840 - DNA, 40 bp, Homo sapiens
taaaattgtgagggaatgtaatttcaccccaaatttagag

SEQ ID NO: 51841 - DNA, 40 bp, Homo sapiens
ctctaaatttggggtgaaattacattccctcacaatttta

SEQ ID NO: 51842 - DNA, 40 bp, Homo sapiens
aaaattgtgagggaatgtaatttcaccccaaatttagagt

SEQ ID NO: 51843 - DNA, 40 bp, Homo sapiens
actctaaatttggggtgaaattacattccctcacaatttt

SEQ ID NO: 51844 - DNA, 40 bp, Homo sapiens
aaattgtgagggaatgtaatttcaccccaaatttagagtt

SEQ ID NO: 51845 - DNA, 40 bp, Homo sapiens
aactctaaatttggggtgaaattacattccctcacaattt

SEQ ID NO: 51846 - DNA, 40 bp, Homo sapiens
aattgtgagggaatgtaatttcaccccaaatttagagttt

SEQ ID NO: 51847 - DNA, 40 bp, Homo sapiens
aaactctaaatttggggtgaaattacattccctcacaatt

SEQ ID NO: 51848 - DNA, 40 bp, Homo sapiens
attgtgagggaatgtaatttcaccccaaatttagagttta

SEQ ID NO: 51849 - DNA, 40 bp, Homo sapiens
taaactctaaatttggggtgaaattacattccctcacaat

SEQ ID NO: 51850 - DNA, 40 bp, Homo sapiens
ttgtgagggaatgtaatttcaccccaaatttagagtttat

SEQ ID NO: 51851 - DNA, 40 bp, Homo sapiens
ataaactctaaatttggggtgaaattacattccctcacaa

SEQ ID NO: 51852 - DNA, 40 bp, Homo sapiens
tgtgagggaatgtaatttcaccccaaatttagagtttatg

SEQ ID NO: 51853 - DNA, 40 bp, Homo sapiens
cataaactctaaatttggggtgaaattacattccctcaca

SEQ ID NO: 51854 - DNA, 40 bp, Homo sapiens
gtgagggaatgtaatttcaccccaaatttagagtttatgc

SEQ ID NO: 51855 - DNA, 40 bp, Homo sapiens
gcataaactctaaatttggggtgaaattacattccctcac

SEQ ID NO: 51856 - DNA, 40 bp, Homo sapiens
tgagggaatgtaatttcaccccaaatttagagtttatgca

SEQ ID NO: 51857 - DNA, 40 bp, Homo sapiens
tgcataaactctaaatttggggtgaaattacattccctca

SEQ ID NO: 51858 - DNA, 40 bp, Homo sapiens
gagggaatgtaatttcaccccaaatttagagtttatgcac

SEQ ID NO: 51859 - DNA, 40 bp, Homo sapiens
gtgcataaactctaaatttggggtgaaattacattccctc

SEQ ID NO: 51860 - DNA, 40 bp, Homo sapiens
agggaatgtaatttcaccccaaatttagagtttatgcact

SEQ ID NO: 51861 - DNA, 40 bp, Homo sapiens
agtgcataaactctaaatttggggtgaaattacattccct

SEQ ID NO: 51862 - DNA, 40 bp, Homo sapiens
gggaatgtaatttcaccccaaatttagagtttatgcactt

SEQ ID NO: 51863 - DNA, 40 bp, Homo sapiens
aagtgcataaactctaaatttggggtgaaattacattccc

SEQ ID NO: 51864 - DNA, 40 bp, Homo sapiens
ggaatgtaatttcaccccaaatttagagtttatgcacttg

SEQ ID NO: 51865 - DNA, 40 bp, Homo sapiens
caagtgcataaactctaaatttggggtgaaattacattcc

SEQ ID NO: 51866 - DNA, 40 bp, Homo sapiens
gaatgtaatttcaccccaaatttagagtttatgcacttgt

SEQ ID NO: 51867 - DNA, 40 bp, Homo sapiens
acaagtgcataaactctaaatttggggtgaaattacattc

SEQ ID NO: 51868 - DNA, 40 bp, Homo sapiens
aatgtaatttcaccccaaatttagagtttatgcacttgtt

SEQ ID NO: 51869 - DNA, 40 bp, Homo sapiens
aacaagtgcataaactctaaatttggggtgaaattacatt

SEQ ID NO: 51870 - DNA, 40 bp, Homo sapiens
atgtaatttcaccccaaatttagagtttatgcacttgtta

SEQ ID NO: 51871 - DNA, 40 bp, Homo sapiens
taacaagtgcataaactctaaatttggggtgaaattacat

SEQ ID NO: 51872 - DNA, 40 bp, Homo sapiens
tgtaatttcaccccaaatttagagtttatgcacttgttat

SEQ ID NO: 51873 - DNA, 40 bp, Homo sapiens
ataacaagtgcataaactctaaatttggggtgaaattaca

SEQ ID NO: 51874 - DNA, 40 bp, Homo sapiens
gtaatttcaccccaaatttagagtttatgcacttgttata

SEQ ID NO: 51875 - DNA, 40 bp, Homo sapiens
tataacaagtgcataaactctaaatttggggtgaaattac

SEQ ID NO: 51876 - DNA, 40 bp, Homo sapiens
taatttcaccccaaatttagagtttatgcacttgttatat

SEQ ID NO: 51877 - DNA, 40 bp, Homo sapiens
atataacaagtgcataaactctaaatttggggtgaaatta

SEQ ID NO: 51878 - DNA, 40 bp, Homo sapiens
aatttcaccccaaatttagagtttatgcacttgttatatt

SEQ ID NO: 51879 - DNA, 40 bp, Homo sapiens
aatataacaagtgcataaactctaaatttggggtgaaatt

SEQ ID NO: 51880 - DNA, 40 bp, Homo sapiens
atttcaccccaaatttagagtttatgcacttgttatattg

SEQ ID NO: 51881 - DNA, 40 bp, Homo sapiens
caatataacaagtgcataaactctaaatttggggtgaaat

SEQ ID NO: 51882 - DNA, 40 bp, Homo sapiens
tttcaccccaaatttagagtttatgcacttgttatattga

SEQ ID NO: 51883 - DNA, 40 bp, Homo sapiens
tcaatataacaagtgcataaactctaaatttggggtgaaa

SEQ ID NO: 51884 - DNA, 40 bp, Homo sapiens
ttcaccccaaatttagagtttatgcacttgttatattgaa

SEQ ID NO: 51885 - DNA, 40 bp, Homo sapiens
ttcaatataacaagtgcataaactctaaatttggggtgaa

SEQ ID NO: 51886 - DNA, 40 bp, Homo sapiens
tcaccccaaatttagagtttatgcacttgttatattgaaa

SEQ ID NO: 51887 - DNA, 40 bp, Homo sapiens
tttcaatataacaagtgcataaactctaaatttggggtga

SEQ ID NO: 51888 - DNA, 40 bp, Homo sapiens
caccccaaatttagagtttatgcacttgttatattgaaaa

SEQ ID NO: 51889 - DNA, 40 bp, Homo sapiens
ttttcaatataacaagtgcataaactctaaatttggggtg

SEQ ID NO: 51890 - DNA, 40 bp, Homo sapiens
accccaaatttagagtttatgcacttgttatattgaaaat

SEQ ID NO: 51891 - DNA, 40 bp, Homo sapiens
attttcaatataacaagtgcataaactctaaatttggggt

SEQ ID NO: 51892 - DNA, 40 bp, Homo sapiens
ccccaaatttagagtttatgcacttgttatattgaaaatg

SEQ ID NO: 51893 - DNA, 40 bp, Homo sapiens
cattttcaatataacaagtgcataaactctaaatttgggg

SEQ ID NO: 51894 - DNA, 40 bp, Homo sapiens
cccaaatttagagtttatgcacttgttatattgaaaatga

SEQ ID NO: 51895 - DNA, 40 bp, Homo sapiens
tcattttcaatataacaagtgcataaactctaaatttggg

SEQ ID NO: 51896 - DNA, 40 bp, Homo sapiens
ccaaatttagagtttatgcacttgttatattgaaaatgat

SEQ ID NO: 51897 - DNA, 40 bp, Homo sapiens
atcattttcaatataacaagtgcataaactctaaatttgg

SEQ ID NO: 51898 - DNA, 40 bp, Homo sapiens
caaatttagagtttatgcacttgttatattgaaaatgatt

SEQ ID NO: 51899 - DNA, 40 bp, Homo sapiens
aatcattttcaatataacaagtgcataaactctaaatttg

SEQ ID NO: 51900 - DNA, 40 bp, Homo sapiens
aaatttagagtttatgcacttgttatattgaaaatgatta

SEQ ID NO: 51901 - DNA, 40 bp, Homo sapiens
taatcattttcaatataacaagtgcataaactctaaattt

SEQ ID NO: 51902 - DNA, 40 bp, Homo sapiens
aatttagagtttatgcacttgttatattgaaaatgattaa

SEQ ID NO: 51903 - DNA, 40 bp, Homo sapiens
ttaatcattttcaatataacaagtgcataaactctaaatt

SEQ ID NO: 51904 - DNA, 40 bp, Homo sapiens
atttagagtttatgcacttgttatattgaaaatgattaac

SEQ ID NO: 51905 - DNA, 40 bp, Homo sapiens
gttaatcattttcaatataacaagtgcataaactctaaat

SEQ ID NO: 51906 - DNA, 40 bp, Homo sapiens
tttagagtttatgcacttgttatattgaaaatgattaaca

SEQ ID NO: 51907 - DNA, 40 bp, Homo sapiens
tgttaatcattttcaatataacaagtgcataaactctaaa

SEQ ID NO: 51908 - DNA, 40 bp, Homo sapiens
ttagagtttatgcacttgttatattgaaaatgattaacat

SEQ ID NO: 51909 - DNA, 40 bp, Homo sapiens
atgttaatcattttcaatataacaagtgcataaactctaa

SEQ ID NO: 51910 - DNA, 40 bp, Homo sapiens
tagagtttatgcacttgttatattgaaaatgattaacatg

SEQ ID NO: 51911 - DNA, 40 bp, Homo sapiens
catgttaatcattttcaatataacaagtgcataaactcta

SEQ ID NO: 51912 - DNA, 40 bp, Homo sapiens
agagtttatgcacttgttatattgaaaatgattaacatgt

SEQ ID NO: 51913 - DNA, 40 bp, Homo sapiens
acatgttaatcattttcaatataacaagtgcataaactct

SEQ ID NO: 51914 - DNA, 40 bp, Homo sapiens
gagtttatgcacttgttatattgaaaatgattaacatgta

SEQ ID NO: 51915 - DNA, 40 bp, Homo sapiens
tacatgttaatcattttcaatataacaagtgcataaactc

SEQ ID NO: 51916 - DNA, 40 bp, Homo sapiens
agtttatgcacttgttatattgaaaatgattaacatgtag

SEQ ID NO: 51917 - DNA, 40 bp, Homo sapiens
ctacatgttaatcattttcaatataacaagtgcataaact

SEQ ID NO: 51918 - DNA, 40 bp, Homo sapiens
gtttatgcacttgttatattgaaaatgattaacatgtaga

SEQ ID NO: 51919 - DNA, 40 bp, Homo sapiens
tctacatgttaatcattttcaatataacaagtgcataaac

SEQ ID NO: 51920 - DNA, 40 bp, Homo sapiens
tttatgcacttgttatattgaaaatgattaacatgtagaa

SEQ ID NO: 51921 - DNA, 40 bp, Homo sapiens
ttctacatgttaatcattttcaatataacaagtgcataaa

SEQ ID NO: 51922 - DNA, 40 bp, Homo sapiens
ttatgcacttgttatattgaaaatgattaacatgtagaag

SEQ ID NO: 51923 - DNA, 40 bp, Homo sapiens
cttctacatgttaatcattttcaatataacaagtgcataa

SEQ ID NO: 51924 - DNA, 40 bp, Homo sapiens
tatgcacttgttatattgaaaatgattaacatgtagaagg

SEQ ID NO: 51925 - DNA, 40 bp, Homo sapiens
ccttctacatgttaatcattttcaatataacaagtgcata

SEQ ID NO: 51926 - DNA, 40 bp, Homo sapiens
atgcacttgttatattgaaaatgattaacatgtagaaggg

SEQ ID NO: 51927 - DNA, 40 bp, Homo sapiens
cccttctacatgttaatcattttcaatataacaagtgcat

SEQ ID NO: 51928 - DNA, 40 bp, Homo sapiens
tgcacttgttatattgaaaatgattaacatgtagaagggc

SEQ ID NO: 51929 - DNA, 40 bp, Homo sapiens
gcccttctacatgttaatcattttcaatataacaagtgca

SEQ ID NO: 51930 - DNA, 40 bp, Homo sapiens
gcacttgttatattgaaaatgattaacatgtagaagggct

SEQ ID NO: 51931 - DNA, 40 bp, Homo sapiens
agcccttctacatgttaatcattttcaatataacaagtgc

SEQ ID NO: 51932 - DNA, 40 bp, Homo sapiens
cacttgttatattgaaaatgattaacatgtagaagggctt

SEQ ID NO: 51933 - DNA, 40 bp, Homo sapiens
aagcccttctacatgttaatcattttcaatataacaagtg

SEQ ID NO: 51934 - DNA, 40 bp, Homo sapiens
acttgttatattgaaaatgattaacatgtagaagggcttt

SEQ ID NO: 51935 - DNA, 40 bp, Homo sapiens
aaagcccttctacatgttaatcattttcaatataacaagt

SEQ ID NO: 51936 - DNA, 40 bp, Homo sapiens
cttgttatattgaaaatgattaacatgtagaagggctttt

SEQ ID NO: 51937 - DNA, 40 bp, Homo sapiens
aaaagcccttctacatgttaatcattttcaatataacaag

SEQ ID NO: 51938 - DNA, 40 bp, Homo sapiens
ttgttatattgaaaatgattaacatgtagaagggctttta

SEQ ID NO: 51939 - DNA, 40 bp, Homo sapiens
taaaagcccttctacatgttaatcattttcaatataacaa

SEQ ID NO: 51940 - DNA, 40 bp, Homo sapiens
tgttatattgaaaatgattaacatgtagaagggcttttaa

SEQ ID NO: 51941 - DNA, 40 bp, Homo sapiens
ttaaaagcccttctacatgttaatcattttcaatataaca

SEQ ID NO: 51942 - DNA, 40 bp, Homo sapiens
gttatattgaaaatgattaacatgtagaagggcttttaat

SEQ ID NO: 51943 - DNA, 40 bp, Homo sapiens
attaaaagcccttctacatgttaatcattttcaatataac

SEQ ID NO: 51944 - DNA, 40 bp, Homo sapiens
ttatattgaaaatgattaacatgtagaagggcttttaatg

SEQ ID NO: 51945 - DNA, 40 bp, Homo sapiens
cattaaaagcccttctacatgttaatcattttcaatataa

SEQ ID NO: 51946 - DNA, 40 bp, Homo sapiens
tatattgaaaatgattaacatgtagaagggcttttaatgg

SEQ ID NO: 51947 - DNA, 40 bp, Homo sapiens
ccattaaaagcccttctacatgttaatcattttcaatata

SEQ ID NO: 51948 - DNA, 40 bp, Homo sapiens
atattgaaaatgattaacatgtagaagggcttttaatgga

SEQ ID NO: 51949 - DNA, 40 bp, Homo sapiens
tccattaaaagcccttctacatgttaatcattttcaatat

SEQ ID NO: 51950 - DNA, 40 bp, Homo sapiens
tattgaaaatgattaacatgtagaagggcttttaatggaa

SEQ ID NO: 51951 - DNA, 40 bp, Homo sapiens
ttccattaaaagcccttctacatgttaatcattttcaata

SEQ ID NO: 51952 - DNA, 40 bp, Homo sapiens
attgaaaatgattaacatgtagaagggcttttaatggaat

SEQ ID NO: 51953 - DNA, 40 bp, Homo sapiens
attccattaaaagcccttctacatgttaatcattttcaat

SEQ ID NO: 51954 - DNA, 40 bp, Homo sapiens
ttgaaaatgattaacatgtagaagggcttttaatggaata

SEQ ID NO: 51955 - DNA, 40 bp, Homo sapiens
tattccattaaaagcccttctacatgttaatcattttcaa

SEQ ID NO: 51956 - DNA, 40 bp, Homo sapiens
tgaaaatgattaacatgtagaagggcttttaatggaataa

SEQ ID NO: 51957 - DNA, 40 bp, Homo sapiens
ttattccattaaaagcccttctacatgttaatcattttca

SEQ ID NO: 51958 - DNA, 40 bp, Homo sapiens
gaaaatgattaacatgtagaagggcttttaatggaataag

SEQ ID NO: 51959 - DNA, 40 bp, Homo sapiens
cttattccattaaaagcccttctacatgttaatcattttc

SEQ ID NO: 51960 - DNA, 40 bp, Homo sapiens
aaaatgattaacatgtagaagggcttttaatggaataagt

SEQ ID NO: 51961 - DNA, 40 bp, Homo sapiens
acttattccattaaaagcccttctacatgttaatcatttt

SEQ ID NO: 51962 - DNA, 40 bp, Homo sapiens
aaatgattaacatgtagaagggcttttaatggaataagtg

SEQ ID NO: 51963 - DNA, 40 bp, Homo sapiens
cacttattccattaaaagcccttctacatgttaatcattt

SEQ ID NO: 51964 - DNA, 40 bp, Homo sapiens
aatgattaacatgtagaagggcttttaatggaataagtgg

SEQ ID NO: 51965 - DNA, 40 bp, Homo sapiens
ccacttattccattaaaagcccttctacatgttaatcatt

SEQ ID NO: 51966 - DNA, 40 bp, Homo sapiens
atgattaacatgtagaagggcttttaatggaataagtggt

SEQ ID NO: 51967 - DNA, 40 bp, Homo sapiens
accacttattccattaaaagcccttctacatgttaatcat

SEQ ID NO: 51968 - DNA, 40 bp, Homo sapiens
tgattaacatgtagaagggcttttaatggaataagtggtg

SEQ ID NO: 51969 - DNA, 40 bp, Homo sapiens
caccacttattccattaaaagcccttctacatgttaatca

SEQ ID NO: 51970 - DNA, 40 bp, Homo sapiens
gattaacatgtagaagggcttttaatggaataagtggtgt

SEQ ID NO: 51971 - DNA, 40 bp, Homo sapiens
acaccacttattccattaaaagcccttctacatgttaatc

SEQ ID NO: 51972 - DNA, 40 bp, Homo sapiens
attaacatgtagaagggcttttaatggaataagtggtgta

SEQ ID NO: 51973 - DNA, 40 bp, Homo sapiens
tacaccacttattccattaaaagcccttctacatgttaat

SEQ ID NO: 51974 - DNA, 40 bp, Homo sapiens
ttaacatgtagaagggcttttaatggaataagtggtgtag

SEQ ID NO: 51975 - DNA, 40 bp, Homo sapiens
ctacaccacttattccattaaaagcccttctacatgttaa

SEQ ID NO: 51976 - DNA, 40 bp, Homo sapiens
taacatgtagaagggcttttaatggaataagtggtgtagt

SEQ ID NO: 51977 - DNA, 40 bp, Homo sapiens
actacaccacttattccattaaaagcccttctacatgtta

SEQ ID NO: 51978 - DNA, 40 bp, Homo sapiens
aacatgtagaagggcttttaatggaataagtggtgtagta

SEQ ID NO: 51979 - DNA, 40 bp, Homo sapiens
tactacaccacttattccattaaaagcccttctacatgtt

SEQ ID NO: 51980 - DNA, 40 bp, Homo sapiens
acatgtagaagggcttttaatggaataagtggtgtagtaa

SEQ ID NO: 51981 - DNA, 40 bp, Homo sapiens
ttactacaccacttattccattaaaagcccttctacatgt

SEQ ID NO: 51982 - DNA, 40 bp, Homo sapiens
catgtagaagggcttttaatggaataagtggtgtagtaac

SEQ ID NO: 51983 - DNA, 40 bp, Homo sapiens
gttactacaccacttattccattaaaagcccttctacatg

SEQ ID NO: 51984 - DNA, 40 bp, Homo sapiens
atgtagaagggcttttaatggaataagtggtgtagtaact

SEQ ID NO: 51985 - DNA, 40 bp, Homo sapiens
agttactacaccacttattccattaaaagcccttctacat

SEQ ID NO: 51986 - DNA, 40 bp, Homo sapiens
tgtagaagggcttttaatggaataagtggtgtagtaactt

SEQ ID NO: 51987 - DNA, 40 bp, Homo sapiens
aagttactacaccacttattccattaaaagcccttctaca

SEQ ID NO: 51988 - DNA, 40 bp, Homo sapiens
gtagaagggcttttaatggaataagtggtgtagtaacttc

SEQ ID NO: 51989 - DNA, 40 bp, Homo sapiens
gaagttactacaccacttattccattaaaagcccttctac

SEQ ID NO: 51990 - DNA, 40 bp, Homo sapiens
tagaagggcttttaatggaataagtggtgtagtaacttca

SEQ ID NO: 51991 - DNA, 40 bp, Homo sapiens
tgaagttactacaccacttattccattaaaagcccttcta

SEQ ID NO: 51992 - DNA, 40 bp, Homo sapiens
agaagggcttttaatggaataagtggtgtagtaacttcag

SEQ ID NO: 51993 - DNA, 40 bp, Homo sapiens
ctgaagttactacaccacttattccattaaaagcccttct

SEQ ID NO: 51994 - DNA, 40 bp, Homo sapiens
gaagggcttttaatggaataagtggtgtagtaacttcagt

SEQ ID NO: 51995 - DNA, 40 bp, Homo sapiens
actgaagttactacaccacttattccattaaaagcccttc

SEQ ID NO: 51996 - DNA, 40 bp, Homo sapiens
aagggcttttaatggaataagtggtgtagtaacttcagtg

SEQ ID NO: 51997 - DNA, 40 bp, Homo sapiens
cactgaagttactacaccacttattccattaaaagccctt

SEQ ID NO: 51998 - DNA, 40 bp, Homo sapiens
agggcttttaatggaataagtggtgtagtaacttcagtgt

SEQ ID NO: 51999 - DNA, 40 bp, Homo sapiens
acactgaagttactacaccacttattccattaaaagccct

SEQ ID NO: 52000 - DNA, 40 bp, Homo sapiens
gggcttttaatggaataagtggtgtagtaacttcagtgtt

SEQ ID NO: 52001 - DNA, 40 bp, Homo sapiens
aacactgaagttactacaccacttattccattaaaagccc

SEQ ID NO: 52002 - DNA, 40 bp, Homo sapiens
ggcttttaatggaataagtggtgtagtaacttcagtgttg

SEQ ID NO: 52003 - DNA, 40 bp, Homo sapiens
caacactgaagttactacaccacttattccattaaaagcc

SEQ ID NO: 52004 - DNA, 40 bp, Homo sapiens
gcttttaatggaataagtggtgtagtaacttcagtgttgc

SEQ ID NO: 52005 - DNA, 40 bp, Homo sapiens
gcaacactgaagttactacaccacttattccattaaaagc

SEQ ID NO: 52006 - DNA, 40 bp, Homo sapiens
cttttaatggaataagtggtgtagtaacttcagtgttgcc

SEQ ID NO: 52007 - DNA, 40 bp, Homo sapiens
ggcaacactgaagttactacaccacttattccattaaaag

SEQ ID NO: 52008 - DNA, 40 bp, Homo sapiens
ttttaatggaataagtggtgtagtaacttcagtgttgcct

SEQ ID NO: 52009 - DNA, 40 bp, Homo sapiens
aggcaacactgaagttactacaccacttattccattaaaa

SEQ ID NO: 52010 - DNA, 40 bp, Homo sapiens
tttaatggaataagtggtgtagtaacttcagtgttgccta

SEQ ID NO: 52011 - DNA, 40 bp, Homo sapiens
taggcaacactgaagttactacaccacttattccattaaa

SEQ ID NO: 52012 - DNA, 40 bp, Homo sapiens
ttaatggaataagtggtgtagtaacttcagtgttgcctac

SEQ ID NO: 52013 - DNA, 40 bp, Homo sapiens
gtaggcaacactgaagttactacaccacttattccattaa

SEQ ID NO: 52014 - DNA, 40 bp, Homo sapiens
taatggaataagtggtgtagtaacttcagtgttgcctacc

SEQ ID NO: 52015 - DNA, 40 bp, Homo sapiens
ggtaggcaacactgaagttactacaccacttattccatta

SEQ ID NO: 52016 - DNA, 40 bp, Homo sapiens
aatggaataagtggtgtagtaacttcagtgttgcctacct

SEQ ID NO: 52017 - DNA, 40 bp, Homo sapiens
aggtaggcaacactgaagttactacaccacttattccatt

SEQ ID NO: 52018 - DNA, 40 bp, Homo sapiens
atggaataagtggtgtagtaacttcagtgttgcctaccta

SEQ ID NO: 52019 - DNA, 40 bp, Homo sapiens
taggtaggcaacactgaagttactacaccacttattccat

SEQ ID NO: 52020 - DNA, 40 bp, Homo sapiens
tggaataagtggtgtagtaacttcagtgttgcctacctag

SEQ ID NO: 52021 - DNA, 40 bp, Homo sapiens
ctaggtaggcaacactgaagttactacaccacttattcca

SEQ ID NO: 52022 - DNA, 40 bp, Homo sapiens
ggaataagtggtgtagtaacttcagtgttgcctacctaga

SEQ ID NO: 52023 - DNA, 40 bp, Homo sapiens
tctaggtaggcaacactgaagttactacaccacttattcc

SEQ ID NO: 52024 - DNA, 40 bp, Homo sapiens
gaataagtggtgtagtaacttcagtgttgcctacctagaa

SEQ ID NO: 52025 - DNA, 40 bp, Homo sapiens
ttctaggtaggcaacactgaagttactacaccacttattc

SEQ ID NO: 52026 - DNA, 40 bp, Homo sapiens
aataagtggtgtagtaacttcagtgttgcctacctagaaa

SEQ ID NO: 52027 - DNA, 40 bp, Homo sapiens
tttctaggtaggcaacactgaagttactacaccacttatt

SEQ ID NO: 52028 - DNA, 40 bp, Homo sapiens
ataagtggtgtagtaacttcagtgttgcctacctagaaat

SEQ ID NO: 52029 - DNA, 40 bp, Homo sapiens
atttctaggtaggcaacactgaagttactacaccacttat

SEQ ID NO: 52030 - DNA, 40 bp, Homo sapiens
taagtggtgtagtaacttcagtgttgcctacctagaaatc

SEQ ID NO: 52031 - DNA, 40 bp, Homo sapiens
gatttctaggtaggcaacactgaagttactacaccactta

SEQ ID NO: 52032 - DNA, 40 bp, Homo sapiens
aagtggtgtagtaacttcagtgttgcctacctagaaatca

SEQ ID NO: 52033 - DNA, 40 bp, Homo sapiens
tgatttctaggtaggcaacactgaagttactacaccactt

SEQ ID NO: 52034 - DNA, 40 bp, Homo sapiens
agtggtgtagtaacttcagtgttgcctacctagaaatcaa

SEQ ID NO: 52035 - DNA, 40 bp, Homo sapiens
ttgatttctaggtaggcaacactgaagttactacaccact

SEQ ID NO: 52036 - DNA, 40 bp, Homo sapiens
gtggtgtagtaacttcagtgttgcctacctagaaatcaaa

SEQ ID NO: 52037 - DNA, 40 bp, Homo sapiens
tttgatttctaggtaggcaacactgaagttactacaccac

SEQ ID NO: 52038 - DNA, 40 bp, Homo sapiens
tggtgtagtaacttcagtgttgcctacctagaaatcaaaa

SEQ ID NO: 52039 - DNA, 40 bp, Homo sapiens
ttttgatttctaggtaggcaacactgaagttactacacca

SEQ ID NO: 52040 - DNA, 40 bp, Homo sapiens
ggtgtagtaacttcagtgttgcctacctagaaatcaaaat

SEQ ID NO: 52041 - DNA, 40 bp, Homo sapiens
attttgatttctaggtaggcaacactgaagttactacacc

SEQ ID NO: 52042 - DNA, 40 bp, Homo sapiens
gtgtagtaacttcagtgttgcctacctagaaatcaaaatc

SEQ ID NO: 52043 - DNA, 40 bp, Homo sapiens
gattttgatttctaggtaggcaacactgaagttactacac

SEQ ID NO: 52044 - DNA, 40 bp, Homo sapiens
tgtagtaacttcagtgttgcctacctagaaatcaaaatct

SEQ ID NO: 52045 - DNA, 40 bp, Homo sapiens
agattttgatttctaggtaggcaacactgaagttactaca

SEQ ID NO: 52046 - DNA, 40 bp, Homo sapiens
gtagtaacttcagtgttgcctacctagaaatcaaaatctt

SEQ ID NO: 52047 - DNA, 40 bp, Homo sapiens
aagattttgatttctaggtaggcaacactgaagttactac

SEQ ID NO: 52048 - DNA, 40 bp, Homo sapiens
tagtaacttcagtgttgcctacctagaaatcaaaatcttt

SEQ ID NO: 52049 - DNA, 40 bp, Homo sapiens
aaagattttgatttctaggtaggcaacactgaagttacta

SEQ ID NO: 52050 - DNA, 40 bp, Homo sapiens
agtaacttcagtgttgcctacctagaaatcaaaatctttc

SEQ ID NO: 52051 - DNA, 40 bp, Homo sapiens
gaaagattttgatttctaggtaggcaacactgaagttact

SEQ ID NO: 52052 - DNA, 40 bp, Homo sapiens
gtaacttcagtgttgcctacctagaaatcaaaatctttct

SEQ ID NO: 52053 - DNA, 40 bp, Homo sapiens
agaaagattttgatttctaggtaggcaacactgaagttac

SEQ ID NO: 52054 - DNA, 40 bp, Homo sapiens
taacttcagtgttgcctacctagaaatcaaaatctttcta

SEQ ID NO: 52055 - DNA, 40 bp, Homo sapiens
tagaaagattttgatttctaggtaggcaacactgaagtta

SEQ ID NO: 52056 - DNA, 40 bp, Homo sapiens
aacttcagtgttgcctacctagaaatcaaaatctttctag

SEQ ID NO: 52057 - DNA, 40 bp, Homo sapiens
ctagaaagattttgatttctaggtaggcaacactgaagtt

SEQ ID NO: 52058 - DNA, 40 bp, Homo sapiens
acttcagtgttgcctacctagaaatcaaaatctttctagt

SEQ ID NO: 52059 - DNA, 40 bp, Homo sapiens
actagaaagattttgatttctaggtaggcaacactgaagt

SEQ ID NO: 52060 - DNA, 40 bp, Homo sapiens
cttcagtgttgcctacctagaaatcaaaatctttctagtt

SEQ ID NO: 52061 - DNA, 40 bp, Homo sapiens
aactagaaagattttgatttctaggtaggcaacactgaag

SEQ ID NO: 52062 - DNA, 40 bp, Homo sapiens
ttcagtgttgcctacctagaaatcaaaatctttctagttg

SEQ ID NO: 52063 - DNA, 40 bp, Homo sapiens
caactagaaagattttgatttctaggtaggcaacactgaa

SEQ ID NO: 52064 - DNA, 40 bp, Homo sapiens
tcagtgttgcctacctagaaatcaaaatctttctagttgt

SEQ ID NO: 52065 - DNA, 40 bp, Homo sapiens
acaactagaaagattttgatttctaggtaggcaacactga

SEQ ID NO: 52066 - DNA, 40 bp, Homo sapiens
cagtgttgcctacctagaaatcaaaatctttctagttgtc

SEQ ID NO: 52067 - DNA, 40 bp, Homo sapiens
gacaactagaaagattttgatttctaggtaggcaacactg

SEQ ID NO: 52068 - DNA, 40 bp, Homo sapiens
agtgttgcctacctagaaatcaaaatctttctagttgtcc

SEQ ID NO: 52069 - DNA, 40 bp, Homo sapiens
ggacaactagaaagattttgatttctaggtaggcaacact

SEQ ID NO: 52070 - DNA, 40 bp, Homo sapiens
gtgttgcctacctagaaatcaaaatctttctagttgtcca

SEQ ID NO: 52071 - DNA, 40 bp, Homo sapiens
tggacaactagaaagattttgatttctaggtaggcaacac

SEQ ID NO: 52072 - DNA, 40 bp, Homo sapiens
tgttgcctacctagaaatcaaaatctttctagttgtccac

SEQ ID NO: 52073 - DNA, 40 bp, Homo sapiens
gtggacaactagaaagattttgatttctaggtaggcaaca

SEQ ID NO: 52074 - DNA, 40 bp, Homo sapiens
gttgcctacctagaaatcaaaatctttctagttgtccact

SEQ ID NO: 52075 - DNA, 40 bp, Homo sapiens
agtggacaactagaaagattttgatttctaggtaggcaac

SEQ ID NO: 52076 - DNA, 40 bp, Homo sapiens
ttgcctacctagaaatcaaaatctttctagttgtccactt

SEQ ID NO: 52077 - DNA, 40 bp, Homo sapiens
aagtggacaactagaaagattttgatttctaggtaggcaa

SEQ ID NO: 52078 - DNA, 40 bp, Homo sapiens
tgcctacctagaaatcaaaatctttctagttgtccacttt

SEQ ID NO: 52079 - DNA, 40 bp, Homo sapiens
aaagtggacaactagaaagattttgatttctaggtaggca

SEQ ID NO: 52080 - DNA, 40 bp, Homo sapiens
gcctacctagaaatcaaaatctttctagttgtccactttg

SEQ ID NO: 52081 - DNA, 40 bp, Homo sapiens
caaagtggacaactagaaagattttgatttctaggtaggc

SEQ ID NO: 52082 - DNA, 40 bp, Homo sapiens
cctacctagaaatcaaaatctttctagttgtccactttgt

SEQ ID NO: 52083 - DNA, 40 bp, Homo sapiens
acaaagtggacaactagaaagattttgatttctaggtagg

SEQ ID NO: 52084 - DNA, 40 bp, Homo sapiens
ctacctagaaatcaaaatctttctagttgtccactttgtt

SEQ ID NO: 52085 - DNA, 40 bp, Homo sapiens
aacaaagtggacaactagaaagattttgatttctaggtag

SEQ ID NO: 52086 - DNA, 40 bp, Homo sapiens
tacctagaaatcaaaatctttctagttgtccactttgttt

SEQ ID NO: 52087 - DNA, 40 bp, Homo sapiens
aaacaaagtggacaactagaaagattttgatttctaggta

SEQ ID NO: 52088 - DNA, 40 bp, Homo sapiens
acctagaaatcaaaatctttctagttgtccactttgtttt

SEQ ID NO: 52089 - DNA, 40 bp, Homo sapiens
aaaacaaagtggacaactagaaagattttgatttctaggt

SEQ ID NO: 52090 - DNA, 40 bp, Homo sapiens
cctagaaatcaaaatctttctagttgtccactttgttttt

SEQ ID NO: 52091 - DNA, 40 bp, Homo sapiens
aaaaacaaagtggacaactagaaagattttgatttctagg

SEQ ID NO: 52092 - DNA, 40 bp, Homo sapiens
ctagaaatcaaaatctttctagttgtccactttgtttttt

SEQ ID NO: 52093 - DNA, 40 bp, Homo sapiens
aaaaaacaaagtggacaactagaaagattttgatttctag

SEQ ID NO: 52094 - DNA, 40 bp, Homo sapiens
tagaaatcaaaatctttctagttgtccactttgttttttg

SEQ ID NO: 52095 - DNA, 40 bp, Homo sapiens
caaaaaacaaagtggacaactagaaagattttgatttcta

SEQ ID NO: 52096 - DNA, 40 bp, Homo sapiens
agaaatcaaaatctttctagttgtccactttgttttttga

SEQ ID NO: 52097 - DNA, 40 bp, Homo sapiens
tcaaaaaacaaagtggacaactagaaagattttgatttct

SEQ ID NO: 52098 - DNA, 40 bp, Homo sapiens
gaaatcaaaatctttctagttgtccactttgttttttgaa

SEQ ID NO: 52099 - DNA, 40 bp, Homo sapiens
ttcaaaaaacaaagtggacaactagaaagattttgatttc

SEQ ID NO: 52100 - DNA, 40 bp, Homo sapiens
aaatcaaaatctttctagttgtccactttgttttttgaaa

SEQ ID NO: 52101 - DNA, 40 bp, Homo sapiens
tttcaaaaaacaaagtggacaactagaaagattttgattt

SEQ ID NO: 52102 - DNA, 40 bp, Homo sapiens
aatcaaaatctttctagttgtccactttgttttttgaaaa

SEQ ID NO: 52103 - DNA, 40 bp, Homo sapiens
ttttcaaaaaacaaagtggacaactagaaagattttgatt

SEQ ID NO: 52104 - DNA, 40 bp, Homo sapiens
atcaaaatctttctagttgtccactttgttttttgaaaaa

SEQ ID NO: 52105 - DNA, 40 bp, Homo sapiens
tttttcaaaaaacaaagtggacaactagaaagattttgat

SEQ ID NO: 52106 - DNA, 40 bp, Homo sapiens
tcaaaatctttctagttgtccactttgttttttgaaaaag

SEQ ID NO: 52107 - DNA, 40 bp, Homo sapiens
ctttttcaaaaaacaaagtggacaactagaaagattttga

SEQ ID NO: 52108 - DNA, 40 bp, Homo sapiens
caaaatctttctagttgtccactttgttttttgaaaaagt

SEQ ID NO: 52109 - DNA, 40 bp, Homo sapiens
actttttcaaaaaacaaagtggacaactagaaagattttg

SEQ ID NO: 52110 - DNA, 40 bp, Homo sapiens
aaaatctttctagttgtccactttgttttttgaaaaagta

SEQ ID NO: 52111 - DNA, 40 bp, Homo sapiens
tactttttcaaaaaacaaagtggacaactagaaagatttt

SEQ ID NO: 52112 - DNA, 40 bp, Homo sapiens
aaatctttctagttgtccactttgttttttgaaaaagtaa

SEQ ID NO: 52113 - DNA, 40 bp, Homo sapiens
ttactttttcaaaaaacaaagtggacaactagaaagattt

SEQ ID NO: 52114 - DNA, 40 bp, Homo sapiens
aatctttctagttgtccactttgttttttgaaaaagtaat

SEQ ID NO: 52115 - DNA, 40 bp, Homo sapiens
attactttttcaaaaaacaaagtggacaactagaaagatt

SEQ ID NO: 52116 - DNA, 40 bp, Homo sapiens
atctttctagttgtccactttgttttttgaaaaagtaata

SEQ ID NO: 52117 - DNA, 40 bp, Homo sapiens
tattactttttcaaaaaacaaagtggacaactagaaagat

SEQ ID NO: 52118 - DNA, 40 bp, Homo sapiens
tctttctagttgtccactttgttttttgaaaaagtaatat

SEQ ID NO: 52119 - DNA, 40 bp, Homo sapiens
atattactttttcaaaaaacaaagtggacaactagaaaga

SEQ ID NO: 52120 - DNA, 40 bp, Homo sapiens
ctttctagttgtccactttgttttttgaaaaagtaatatg

SEQ ID NO: 52121 - DNA, 40 bp, Homo sapiens
catattactttttcaaaaaacaaagtggacaactagaaag

SEQ ID NO: 52122 - DNA, 40 bp, Homo sapiens
tttctagttgtccactttgttttttgaaaaagtaatatga

SEQ ID NO: 52123 - DNA, 40 bp, Homo sapiens
tcatattactttttcaaaaaacaaagtggacaactagaaa

SEQ ID NO: 52124 - DNA, 40 bp, Homo sapiens
ttctagttgtccactttgttttttgaaaaagtaatatgaa

SEQ ID NO: 52125 - DNA, 40 bp, Homo sapiens
ttcatattactttttcaaaaaacaaagtggacaactagaa

SEQ ID NO: 52126 - DNA, 40 bp, Homo sapiens
tctagttgtccactttgttttttgaaaaagtaatatgaaa

SEQ ID NO: 52127 - DNA, 40 bp, Homo sapiens
tttcatattactttttcaaaaaacaaagtggacaactaga

SEQ ID NO: 52128 - DNA, 40 bp, Homo sapiens
ctagttgtccactttgttttttgaaaaagtaatatgaaaa

SEQ ID NO: 52129 - DNA, 40 bp, Homo sapiens
ttttcatattactttttcaaaaaacaaagtggacaactag

SEQ ID NO: 52130 - DNA, 40 bp, Homo sapiens
tagttgtccactttgttttttgaaaaagtaatatgaaaat

SEQ ID NO: 52131 - DNA, 40 bp, Homo sapiens
attttcatattactttttcaaaaaacaaagtggacaacta

SEQ ID NO: 52132 - DNA, 40 bp, Homo sapiens
agttgtccactttgttttttgaaaaagtaatatgaaaatt

SEQ ID NO: 52133 - DNA, 40 bp, Homo sapiens
aattttcatattactttttcaaaaaacaaagtggacaact

SEQ ID NO: 52134 - DNA, 40 bp, Homo sapiens
gttgtccactttgttttttgaaaaagtaatatgaaaatta

SEQ ID NO: 52135 - DNA, 40 bp, Homo sapiens
taattttcatattactttttcaaaaaacaaagtggacaac

SEQ ID NO: 52136 - DNA, 40 bp, Homo sapiens
ttgtccactttgttttttgaaaaagtaatatgaaaattat

SEQ ID NO: 52137 - DNA, 40 bp, Homo sapiens
ataattttcatattactttttcaaaaaacaaagtggacaa

SEQ ID NO: 52138 - DNA, 40 bp, Homo sapiens
tgtccactttgttttttgaaaaagtaatatgaaaattatg

SEQ ID NO: 52139 - DNA, 40 bp, Homo sapiens
cataattttcatattactttttcaaaaaacaaagtggaca

SEQ ID NO: 52140 - DNA, 40 bp, Homo sapiens
gtccactttgttttttgaaaaagtaatatgaaaattatgt

SEQ ID NO: 52141 - DNA, 40 bp, Homo sapiens
acataattttcatattactttttcaaaaaacaaagtggac

SEQ ID NO: 52142 - DNA, 40 bp, Homo sapiens
tccactttgttttttgaaaaagtaatatgaaaattatgtt

SEQ ID NO: 52143 - DNA, 40 bp, Homo sapiens
aacataattttcatattactttttcaaaaaacaaagtgga

SEQ ID NO: 52144 - DNA, 40 bp, Homo sapiens
ccactttgttttttgaaaaagtaatatgaaaattatgtta

SEQ ID NO: 52145 - DNA, 40 bp, Homo sapiens
taacataattttcatattactttttcaaaaaacaaagtgg

SEQ ID NO: 52146 - DNA, 40 bp, Homo sapiens
cactttgttttttgaaaaagtaatatgaaaattatgttaa

SEQ ID NO: 52147 - DNA, 40 bp, Homo sapiens
ttaacataattttcatattactttttcaaaaaacaaagtg

SEQ ID NO: 52148 - DNA, 40 bp, Homo sapiens
actttgttttttgaaaaagtaatatgaaaattatgttaat

SEQ ID NO: 52149 - DNA, 40 bp, Homo sapiens
attaacataattttcatattactttttcaaaaaacaaagt

SEQ ID NO: 52150 - DNA, 40 bp, Homo sapiens
ctttgttttttgaaaaagtaatatgaaaattatgttaatg

SEQ ID NO: 52151 - DNA, 40 bp, Homo sapiens
cattaacataattttcatattactttttcaaaaaacaaag

SEQ ID NO: 52152 - DNA, 40 bp, Homo sapiens
tttgttttttgaaaaagtaatatgaaaattatgttaatgc

SEQ ID NO: 52153 - DNA, 40 bp, Homo sapiens
gcattaacataattttcatattactttttcaaaaaacaaa

SEQ ID NO: 52154 - DNA, 40 bp, Homo sapiens
ttgttttttgaaaaagtaatatgaaaattatgttaatgct

SEQ ID NO: 52155 - DNA, 40 bp, Homo sapiens
agcattaacataattttcatattactttttcaaaaaacaa

SEQ ID NO: 52156 - DNA, 40 bp, Homo sapiens
tgttttttgaaaaagtaatatgaaaattatgttaatgctt

SEQ ID NO: 52157 - DNA, 40 bp, Homo sapiens
aagcattaacataattttcatattactttttcaaaaaaca

SEQ ID NO: 52158 - DNA, 40 bp, Homo sapiens
gttttttgaaaaagtaatatgaaaattatgttaatgcttt

SEQ ID NO: 52159 - DNA, 40 bp, Homo sapiens
aaagcattaacataattttcatattactttttcaaaaaac

SEQ ID NO: 52160 - DNA, 40 bp, Homo sapiens
ttttttgaaaaagtaatatgaaaattatgttaatgcttta

SEQ ID NO: 52161 - DNA, 40 bp, Homo sapiens
taaagcattaacataattttcatattactttttcaaaaaa

SEQ ID NO: 52162 - DNA, 40 bp, Homo sapiens
tttttgaaaaagtaatatgaaaattatgttaatgctttaa

SEQ ID NO: 52163 - DNA, 40 bp, Homo sapiens
ttaaagcattaacataattttcatattactttttcaaaaa

SEQ ID NO: 52164 - DNA, 40 bp, Homo sapiens
ttttgaaaaagtaatatgaaaattatgttaatgctttaat

SEQ ID NO: 52165 - DNA, 40 bp, Homo sapiens
attaaagcattaacataattttcatattactttttcaaaa

SEQ ID NO: 52166 - DNA, 40 bp, Homo sapiens
tttgaaaaagtaatatgaaaattatgttaatgctttaatt

SEQ ID NO: 52167 - DNA, 40 bp, Homo sapiens
aattaaagcattaacataattttcatattactttttcaaa

SEQ ID NO: 52168 - DNA, 40 bp, Homo sapiens
ttgaaaaagtaatatgaaaattatgttaatgctttaattc

SEQ ID NO: 52169 - DNA, 40 bp, Homo sapiens
gaattaaagcattaacataattttcatattactttttcaa

SEQ ID NO: 52170 - DNA, 40 bp, Homo sapiens
tgaaaaagtaatatgaaaattatgttaatgctttaattca

SEQ ID NO: 52171 - DNA, 40 bp, Homo sapiens
tgaattaaagcattaacataattttcatattactttttca

SEQ ID NO: 52172 - DNA, 40 bp, Homo sapiens
gaaaaagtaatatgaaaattatgttaatgctttaattcag

SEQ ID NO: 52173 - DNA, 40 bp, Homo sapiens
ctgaattaaagcattaacataattttcatattactttttc

SEQ ID NO: 52174 - DNA, 40 bp, Homo sapiens
aaaaagtaatatgaaaattatgttaatgctttaattcagg

SEQ ID NO: 52175 - DNA, 40 bp, Homo sapiens
cctgaattaaagcattaacataattttcatattacttttt

SEQ ID NO: 52176 - DNA, 40 bp, Homo sapiens
aaaagtaatatgaaaattatgttaatgctttaattcaggt

SEQ ID NO: 52177 - DNA, 40 bp, Homo sapiens
acctgaattaaagcattaacataattttcatattactttt

SEQ ID NO: 52178 - DNA, 40 bp, Homo sapiens
aaagtaatatgaaaattatgttaatgctttaattcaggtt

SEQ ID NO: 52179 - DNA, 40 bp, Homo sapiens
aacctgaattaaagcattaacataattttcatattacttt

SEQ ID NO: 52180 - DNA, 40 bp, Homo sapiens
aagtaatatgaaaattatgttaatgctttaattcaggttt

SEQ ID NO: 52181 - DNA, 40 bp, Homo sapiens
aaacctgaattaaagcattaacataattttcatattactt

SEQ ID NO: 52182 - DNA, 40 bp, Homo sapiens
agtaatatgaaaattatgttaatgctttaattcaggtttt

SEQ ID NO: 52183 - DNA, 40 bp, Homo sapiens
aaaacctgaattaaagcattaacataattttcatattact

SEQ ID NO: 52184 - DNA, 40 bp, Homo sapiens
gtaatatgaaaattatgttaatgctttaattcaggttttt

SEQ ID NO: 52185 - DNA, 40 bp, Homo sapiens
aaaaacctgaattaaagcattaacataattttcatattac

SEQ ID NO: 52186 - DNA, 40 bp, Homo sapiens
taatatgaaaattatgttaatgctttaattcaggtttttg

SEQ ID NO: 52187 - DNA, 40 bp, Homo sapiens
caaaaacctgaattaaagcattaacataattttcatatta

SEQ ID NO: 52188 - DNA, 40 bp, Homo sapiens
aatatgaaaattatgttaatgctttaattcaggtttttgt

SEQ ID NO: 52189 - DNA, 40 bp, Homo sapiens
acaaaaacctgaattaaagcattaacataattttcatatt

SEQ ID NO: 52190 - DNA, 40 bp, Homo sapiens
atatgaaaattatgttaatgctttaattcaggtttttgta

SEQ ID NO: 52191 - DNA, 40 bp, Homo sapiens
tacaaaaacctgaattaaagcattaacataattttcatat

SEQ ID NO: 52192 - DNA, 40 bp, Homo sapiens
tatgaaaattatgttaatgctttaattcaggtttttgtaa

SEQ ID NO: 52193 - DNA, 40 bp, Homo sapiens
ttacaaaaacctgaattaaagcattaacataattttcata

SEQ ID NO: 52194 - DNA, 40 bp, Homo sapiens
atgaaaattatgttaatgctttaattcaggtttttgtaaa

SEQ ID NO: 52195 - DNA, 40 bp, Homo sapiens
tttacaaaaacctgaattaaagcattaacataattttcat

SEQ ID NO: 52196 - DNA, 40 bp, Homo sapiens
tgaaaattatgttaatgctttaattcaggtttttgtaaaa

SEQ ID NO: 52197 - DNA, 40 bp, Homo sapiens
ttttacaaaaacctgaattaaagcattaacataattttca

SEQ ID NO: 52198 - DNA, 40 bp, Homo sapiens
gaaaattatgttaatgctttaattcaggtttttgtaaaat

SEQ ID NO: 52199 - DNA, 40 bp, Homo sapiens
attttacaaaaacctgaattaaagcattaacataattttc

SEQ ID NO: 52200 - DNA, 40 bp, Homo sapiens
aaaattatgttaatgctttaattcaggtttttgtaaaata

SEQ ID NO: 52201 - DNA, 40 bp, Homo sapiens
tattttacaaaaacctgaattaaagcattaacataatttt

SEQ ID NO: 52202 - DNA, 40 bp, Homo sapiens
aaattatgttaatgctttaattcaggtttttgtaaaatat

SEQ ID NO: 52203 - DNA, 40 bp, Homo sapiens
atattttacaaaaacctgaattaaagcattaacataattt

SEQ ID NO: 52204 - DNA, 40 bp, Homo sapiens
aattatgttaatgctttaattcaggtttttgtaaaatatt

SEQ ID NO: 52205 - DNA, 40 bp, Homo sapiens
aatattttacaaaaacctgaattaaagcattaacataatt

SEQ ID NO: 52206 - DNA, 40 bp, Homo sapiens
attatgttaatgctttaattcaggtttttgtaaaatattt

SEQ ID NO: 52207 - DNA, 40 bp, Homo sapiens
aaatattttacaaaaacctgaattaaagcattaacataat

SEQ ID NO: 52208 - DNA, 40 bp, Homo sapiens
ttatgttaatgctttaattcaggtttttgtaaaatatttt

SEQ ID NO: 52209 - DNA, 40 bp, Homo sapiens
aaaatattttacaaaaacctgaattaaagcattaacataa

SEQ ID NO: 52210 - DNA, 40 bp, Homo sapiens
tatgttaatgctttaattcaggtttttgtaaaatattttt

SEQ ID NO: 52211 - DNA, 40 bp, Homo sapiens
aaaaatattttacaaaaacctgaattaaagcattaacata

SEQ ID NO: 52212 - DNA, 40 bp, Homo sapiens
atgttaatgctttaattcaggtttttgtaaaatatttttt

SEQ ID NO: 52213 - DNA, 40 bp, Homo sapiens
aaaaaatattttacaaaaacctgaattaaagcattaacat

SEQ ID NO: 52214 - DNA, 40 bp, Homo sapiens
tgttaatgctttaattcaggtttttgtaaaatatttttta

SEQ ID NO: 52215 - DNA, 40 bp, Homo sapiens
taaaaaatattttacaaaaacctgaattaaagcattaaca

SEQ ID NO: 52216 - DNA, 40 bp, Homo sapiens
gttaatgctttaattcaggtttttgtaaaatattttttat

SEQ ID NO: 52217 - DNA, 40 bp, Homo sapiens
ataaaaaatattttacaaaaacctgaattaaagcattaac

SEQ ID NO: 52218 - DNA, 40 bp, Homo sapiens
ttaatgctttaattcaggtttttgtaaaatattttttatc

SEQ ID NO: 52219 - DNA, 40 bp, Homo sapiens
gataaaaaatattttacaaaaacctgaattaaagcattaa

SEQ ID NO: 52220 - DNA, 40 bp, Homo sapiens
taatgctttaattcaggtttttgtaaaatattttttatct

SEQ ID NO: 52221 - DNA, 40 bp, Homo sapiens
agataaaaaatattttacaaaaacctgaattaaagcatta

SEQ ID NO: 52222 - DNA, 40 bp, Homo sapiens
aatgctttaattcaggtttttgtaaaatattttttatctt

SEQ ID NO: 52223 - DNA, 40 bp, Homo sapiens
aagataaaaaatattttacaaaaacctgaattaaagcatt

SEQ ID NO: 52224 - DNA, 40 bp, Homo sapiens
atgctttaattcaggtttttgtaaaatattttttatcttt

SEQ ID NO: 52225 - DNA, 40 bp, Homo sapiens
aaagataaaaaatattttacaaaaacctgaattaaagcat

SEQ ID NO: 52226 - DNA, 40 bp, Homo sapiens
tgctttaattcaggtttttgtaaaatattttttatcttta

SEQ ID NO: 52227 - DNA, 40 bp, Homo sapiens
taaagataaaaaatattttacaaaaacctgaattaaagca

SEQ ID NO: 52228 - DNA, 40 bp, Homo sapiens
gctttaattcaggtttttgtaaaatattttttatctttac

SEQ ID NO: 52229 - DNA, 40 bp, Homo sapiens
gtaaagataaaaaatattttacaaaaacctgaattaaagc

SEQ ID NO: 52230 - DNA, 40 bp, Homo sapiens
ctttaattcaggtttttgtaaaatattttttatctttaca

SEQ ID NO: 52231 - DNA, 40 bp, Homo sapiens
tgtaaagataaaaaatattttacaaaaacctgaattaaag

SEQ ID NO: 52232 - DNA, 40 bp, Homo sapiens
tttaattcaggtttttgtaaaatattttttatctttacac

SEQ ID NO: 52233 - DNA, 40 bp, Homo sapiens
gtgtaaagataaaaaatattttacaaaaacctgaattaaa

SEQ ID NO: 52234 - DNA, 40 bp, Homo sapiens
ttaattcaggtttttgtaaaatattttttatctttacaca

SEQ ID NO: 52235 - DNA, 40 bp, Homo sapiens
tgtgtaaagataaaaaatattttacaaaaacctgaattaa

SEQ ID NO: 52236 - DNA, 40 bp, Homo sapiens
taattcaggtttttgtaaaatattttttatctttacacat

SEQ ID NO: 52237 - DNA, 40 bp, Homo sapiens
atgtgtaaagataaaaaatattttacaaaaacctgaatta

SEQ ID NO: 52238 - DNA, 40 bp, Homo sapiens
aattcaggtttttgtaaaatattttttatctttacacatt

SEQ ID NO: 52239 - DNA, 40 bp, Homo sapiens
aatgtgtaaagataaaaaatattttacaaaaacctgaatt

SEQ ID NO: 52240 - DNA, 40 bp, Homo sapiens
attcaggtttttgtaaaatattttttatctttacacattt

SEQ ID NO: 52241 - DNA, 40 bp, Homo sapiens
aaatgtgtaaagataaaaaatattttacaaaaacctgaat

SEQ ID NO: 52242 - DNA, 40 bp, Homo sapiens
ttcaggtttttgtaaaatattttttatctttacacattta

SEQ ID NO: 52243 - DNA, 40 bp, Homo sapiens
taaatgtgtaaagataaaaaatattttacaaaaacctgaa

SEQ ID NO: 52244 - DNA, 40 bp, Homo sapiens
tcaggtttttgtaaaatattttttatctttacacatttaa

SEQ ID NO: 52245 - DNA, 40 bp, Homo sapiens
ttaaatgtgtaaagataaaaaatattttacaaaaacctga

SEQ ID NO: 52246 - DNA, 40 bp, Homo sapiens
caggtttttgtaaaatattttttatctttacacatttaac

SEQ ID NO: 52247 - DNA, 40 bp, Homo sapiens
gttaaatgtgtaaagataaaaaatattttacaaaaacctg

SEQ ID NO: 52248 - DNA, 40 bp, Homo sapiens
aggtttttgtaaaatattttttatctttacacatttaaca

SEQ ID NO: 52249 - DNA, 40 bp, Homo sapiens
tgttaaatgtgtaaagataaaaaatattttacaaaaacct

SEQ ID NO: 52250 - DNA, 40 bp, Homo sapiens
ggtttttgtaaaatattttttatctttacacatttaacat

SEQ ID NO: 52251 - DNA, 40 bp, Homo sapiens
atgttaaatgtgtaaagataaaaaatattttacaaaaacc

SEQ ID NO: 52252 - DNA, 40 bp, Homo sapiens
gtttttgtaaaatattttttatctttacacatttaacata

SEQ ID NO: 52253 - DNA, 40 bp, Homo sapiens
tatgttaaatgtgtaaagataaaaaatattttacaaaaac

SEQ ID NO: 52254 - DNA, 40 bp, Homo sapiens
tttttgtaaaatattttttatctttacacatttaacatac

SEQ ID NO: 52255 - DNA, 40 bp, Homo sapiens
gtatgttaaatgtgtaaagataaaaaatattttacaaaaa

SEQ ID NO: 52256 - DNA, 40 bp, Homo sapiens
ttttgtaaaatattttttatctttacacatttaacatacg

SEQ ID NO: 52257 - DNA, 40 bp, Homo sapiens
cgtatgttaaatgtgtaaagataaaaaatattttacaaaa

SEQ ID NO: 52258 - DNA, 40 bp, Homo sapiens
tttgtaaaatattttttatctttacacatttaacatacgt

SEQ ID NO: 52259 - DNA, 40 bp, Homo sapiens
acgtatgttaaatgtgtaaagataaaaaatattttacaaa

SEQ ID NO: 52260 - DNA, 40 bp, Homo sapiens
ttgtaaaatattttttatctttacacatttaacatacgtt

SEQ ID NO: 52261 - DNA, 40 bp, Homo sapiens
aacgtatgttaaatgtgtaaagataaaaaatattttacaa

SEQ ID NO: 52262 - DNA, 40 bp, Homo sapiens
tgtaaaatattttttatctttacacatttaacatacgttt

SEQ ID NO: 52263 - DNA, 40 bp, Homo sapiens
aaacgtatgttaaatgtgtaaagataaaaaatattttaca

SEQ ID NO: 52264 - DNA, 40 bp, Homo sapiens
gtaaaatattttttatctttacacatttaacatacgtttc

SEQ ID NO: 52265 - DNA, 40 bp, Homo sapiens
gaaacgtatgttaaatgtgtaaagataaaaaatattttac

SEQ ID NO: 52266 - DNA, 40 bp, Homo sapiens
taaaatattttttatctttacacatttaacatacgtttct

SEQ ID NO: 52267 - DNA, 40 bp, Homo sapiens
agaaacgtatgttaaatgtgtaaagataaaaaatatttta

SEQ ID NO: 52268 - DNA, 40 bp, Homo sapiens
aaaatattttttatctttacacatttaacatacgtttcta

SEQ ID NO: 52269 - DNA, 40 bp, Homo sapiens
tagaaacgtatgttaaatgtgtaaagataaaaaatatttt

SEQ ID NO: 52270 - DNA, 40 bp, Homo sapiens
aaatattttttatctttacacatttaacatacgtttctaa

SEQ ID NO: 52271 - DNA, 40 bp, Homo sapiens
ttagaaacgtatgttaaatgtgtaaagataaaaaatattt

SEQ ID NO: 52272 - DNA, 40 bp, Homo sapiens
aatattttttatctttacacatttaacatacgtttctaaa

SEQ ID NO: 52273 - DNA, 40 bp, Homo sapiens
tttagaaacgtatgttaaatgtgtaaagataaaaaatatt

SEQ ID NO: 52274 - DNA, 40 bp, Homo sapiens
atattttttatctttacacatttaacatacgtttctaaaa

SEQ ID NO: 52275 - DNA, 40 bp, Homo sapiens
ttttagaaacgtatgttaaatgtgtaaagataaaaaatat

SEQ ID NO: 52276 - DNA, 40 bp, Homo sapiens
tattttttatctttacacatttaacatacgtttctaaaat

SEQ ID NO: 52277 - DNA, 40 bp, Homo sapiens
attttagaaacgtatgttaaatgtgtaaagataaaaaata

SEQ ID NO: 52278 - DNA, 40 bp, Homo sapiens
attttttatctttacacatttaacatacgtttctaaaatt

SEQ ID NO: 52279 - DNA, 40 bp, Homo sapiens
aattttagaaacgtatgttaaatgtgtaaagataaaaaat

SEQ ID NO: 52280 - DNA, 40 bp, Homo sapiens
ttttttatctttacacatttaacatacgtttctaaaatta

SEQ ID NO: 52281 - DNA, 40 bp, Homo sapiens
taattttagaaacgtatgttaaatgtgtaaagataaaaaa

SEQ ID NO: 52282 - DNA, 40 bp, Homo sapiens
tttttatctttacacatttaacatacgtttctaaaattat

SEQ ID NO: 52283 - DNA, 40 bp, Homo sapiens
ataattttagaaacgtatgttaaatgtgtaaagataaaaa

SEQ ID NO: 52284 - DNA, 40 bp, Homo sapiens
ttttatctttacacatttaacatacgtttctaaaattata

SEQ ID NO: 52285 - DNA, 40 bp, Homo sapiens
tataattttagaaacgtatgttaaatgtgtaaagataaaa

SEQ ID NO: 52286 - DNA, 40 bp, Homo sapiens
tttatctttacacatttaacatacgtttctaaaattatag

SEQ ID NO: 52287 - DNA, 40 bp, Homo sapiens
ctataattttagaaacgtatgttaaatgtgtaaagataaa

SEQ ID NO: 52288 - DNA, 40 bp, Homo sapiens
ttatctttacacatttaacatacgtttctaaaattatagt

SEQ ID NO: 52289 - DNA, 40 bp, Homo sapiens
actataattttagaaacgtatgttaaatgtgtaaagataa

SEQ ID NO: 52290 - DNA, 40 bp, Homo sapiens
tatctttacacatttaacatacgtttctaaaattatagtc

SEQ ID NO: 52291 - DNA, 40 bp, Homo sapiens
gactataattttagaaacgtatgttaaatgtgtaaagata

SEQ ID NO: 52292 - DNA, 40 bp, Homo sapiens
atctttacacatttaacatacgtttctaaaattatagtct

SEQ ID NO: 52293 - DNA, 40 bp, Homo sapiens
agactataattttagaaacgtatgttaaatgtgtaaagat

SEQ ID NO: 52294 - DNA, 40 bp, Homo sapiens
tctttacacatttaacatacgtttctaaaattatagtctg

SEQ ID NO: 52295 - DNA, 40 bp, Homo sapiens
cagactataattttagaaacgtatgttaaatgtgtaaaga

SEQ ID NO: 52296 - DNA, 40 bp, Homo sapiens
ctttacacatttaacatacgtttctaaaattatagtctgt

SEQ ID NO: 52297 - DNA, 40 bp, Homo sapiens
acagactataattttagaaacgtatgttaaatgtgtaaag

SEQ ID NO: 52298 - DNA, 40 bp, Homo sapiens
tttacacatttaacatacgtttctaaaattatagtctgtt

SEQ ID NO: 52299 - DNA, 40 bp, Homo sapiens
aacagactataattttagaaacgtatgttaaatgtgtaaa

SEQ ID NO: 52300 - DNA, 40 bp, Homo sapiens
ttacacatttaacatacgtttctaaaattatagtctgtta

SEQ ID NO: 52301 - DNA, 40 bp, Homo sapiens
taacagactataattttagaaacgtatgttaaatgtgtaa

SEQ ID NO: 52302 - DNA, 40 bp, Homo sapiens
tacacatttaacatacgtttctaaaattatagtctgttat

SEQ ID NO: 52303 - DNA, 40 bp, Homo sapiens
ataacagactataattttagaaacgtatgttaaatgtgta

SEQ ID NO: 52304 - DNA, 40 bp, Homo sapiens
acacatttaacatacgtttctaaaattatagtctgttata

SEQ ID NO: 52305 - DNA, 40 bp, Homo sapiens
tataacagactataattttagaaacgtatgttaaatgtgt

SEQ ID NO: 52306 - DNA, 40 bp, Homo sapiens
cacatttaacatacgtttctaaaattatagtctgttatat

SEQ ID NO: 52307 - DNA, 40 bp, Homo sapiens
atataacagactataattttagaaacgtatgttaaatgtg

SEQ ID NO: 52308 - DNA, 40 bp, Homo sapiens
acatttaacatacgtttctaaaattatagtctgttatata

SEQ ID NO: 52309 - DNA, 40 bp, Homo sapiens
tatataacagactataattttagaaacgtatgttaaatgt

SEQ ID NO: 52310 - DNA, 40 bp, Homo sapiens
catttaacatacgtttctaaaattatagtctgttatatag

SEQ ID NO: 52311 - DNA, 40 bp, Homo sapiens
ctatataacagactataattttagaaacgtatgttaaatg

SEQ ID NO: 52312 - DNA, 40 bp, Homo sapiens
atttaacatacgtttctaaaattatagtctgttatatagc

SEQ ID NO: 52313 - DNA, 40 bp, Homo sapiens
gctatataacagactataattttagaaacgtatgttaaat

SEQ ID NO: 52314 - DNA, 40 bp, Homo sapiens
tttaacatacgtttctaaaattatagtctgttatatagca

SEQ ID NO: 52315 - DNA, 40 bp, Homo sapiens
tgctatataacagactataattttagaaacgtatgttaaa

SEQ ID NO: 52316 - DNA, 40 bp, Homo sapiens
ttaacatacgtttctaaaattatagtctgttatatagcac

SEQ ID NO: 52317 - DNA, 40 bp, Homo sapiens
gtgctatataacagactataattttagaaacgtatgttaa

SEQ ID NO: 52318 - DNA, 40 bp, Homo sapiens
taacatacgtttctaaaattatagtctgttatatagcact

SEQ ID NO: 52319 - DNA, 40 bp, Homo sapiens
agtgctatataacagactataattttagaaacgtatgtta

SEQ ID NO: 52320 - DNA, 40 bp, Homo sapiens
aacatacgtttctaaaattatagtctgttatatagcactt

SEQ ID NO: 52321 - DNA, 40 bp, Homo sapiens
aagtgctatataacagactataattttagaaacgtatgtt

SEQ ID NO: 52322 - DNA, 40 bp, Homo sapiens
acatacgtttctaaaattatagtctgttatatagcacttt

SEQ ID NO: 52323 - DNA, 40 bp, Homo sapiens
aaagtgctatataacagactataattttagaaacgtatgt

SEQ ID NO: 52324 - DNA, 40 bp, Homo sapiens
catacgtttctaaaattatagtctgttatatagcactttg

SEQ ID NO: 52325 - DNA, 40 bp, Homo sapiens
caaagtgctatataacagactataattttagaaacgtatg

SEQ ID NO: 52326 - DNA, 40 bp, Homo sapiens
atacgtttctaaaattatagtctgttatatagcactttgg

SEQ ID NO: 52327 - DNA, 40 bp, Homo sapiens
ccaaagtgctatataacagactataattttagaaacgtat

SEQ ID NO: 52328 - DNA, 40 bp, Homo sapiens
tacgtttctaaaattatagtctgttatatagcactttggg

SEQ ID NO: 52329 - DNA, 40 bp, Homo sapiens
cccaaagtgctatataacagactataattttagaaacgta

SEQ ID NO: 52330 - DNA, 40 bp, Homo sapiens
acgtttctaaaattatagtctgttatatagcactttgggt

SEQ ID NO: 52331 - DNA, 40 bp, Homo sapiens
acccaaagtgctatataacagactataattttagaaacgt

SEQ ID NO: 52332 - DNA, 40 bp, Homo sapiens
cgtttctaaaattatagtctgttatatagcactttgggtc

SEQ ID NO: 52333 - DNA, 40 bp, Homo sapiens
gacccaaagtgctatataacagactataattttagaaacg

SEQ ID NO: 52334 - DNA, 40 bp, Homo sapiens
gtttctaaaattatagtctgttatatagcactttgggtct

SEQ ID NO: 52335 - DNA, 40 bp, Homo sapiens
agacccaaagtgctatataacagactataattttagaaac

SEQ ID NO: 52336 - DNA, 40 bp, Homo sapiens
tttctaaaattatagtctgttatatagcactttgggtcta

SEQ ID NO: 52337 - DNA, 40 bp, Homo sapiens
tagacccaaagtgctatataacagactataattttagaaa

SEQ ID NO: 52338 - DNA, 40 bp, Homo sapiens
ttctaaaattatagtctgttatatagcactttgggtctag

SEQ ID NO: 52339 - DNA, 40 bp, Homo sapiens
ctagacccaaagtgctatataacagactataattttagaa

SEQ ID NO: 52340 - DNA, 40 bp, Homo sapiens
tctaaaattatagtctgttatatagcactttgggtctaga

SEQ ID NO: 52341 - DNA, 40 bp, Homo sapiens
tctagacccaaagtgctatataacagactataattttaga

SEQ ID NO: 52342 - DNA, 40 bp, Homo sapiens
ctaaaattatagtctgttatatagcactttgggtctagaa

SEQ ID NO: 52343 - DNA, 40 bp, Homo sapiens
ttctagacccaaagtgctatataacagactataattttag

SEQ ID NO: 52344 - DNA, 40 bp, Homo sapiens
taaaattatagtctgttatatagcactttgggtctagaat

SEQ ID NO: 52345 - DNA, 40 bp, Homo sapiens
attctagacccaaagtgctatataacagactataatttta

SEQ ID NO: 52346 - DNA, 40 bp, Homo sapiens
aaaattatagtctgttatatagcactttgggtctagaatt

SEQ ID NO: 52347 - DNA, 40 bp, Homo sapiens
aattctagacccaaagtgctatataacagactataatttt

SEQ ID NO: 52348 - DNA, 40 bp, Homo sapiens
aaattatagtctgttatatagcactttgggtctagaattt

SEQ ID NO: 52349 - DNA, 40 bp, Homo sapiens
aaattctagacccaaagtgctatataacagactataattt

SEQ ID NO: 52350 - DNA, 40 bp, Homo sapiens
aattatagtctgttatatagcactttgggtctagaatttt

SEQ ID NO: 52351 - DNA, 40 bp, Homo sapiens
aaaattctagacccaaagtgctatataacagactataatt

SEQ ID NO: 52352 - DNA, 40 bp, Homo sapiens
attatagtctgttatatagcactttgggtctagaattttt

SEQ ID NO: 52353 - DNA, 40 bp, Homo sapiens
aaaaattctagacccaaagtgctatataacagactataat

SEQ ID NO: 52354 - DNA, 40 bp, Homo sapiens
ttatagtctgttatatagcactttgggtctagaatttttc

SEQ ID NO: 52355 - DNA, 40 bp, Homo sapiens
gaaaaattctagacccaaagtgctatataacagactataa

SEQ ID NO: 52356 - DNA, 40 bp, Homo sapiens
tatagtctgttatatagcactttgggtctagaatttttca

SEQ ID NO: 52357 - DNA, 40 bp, Homo sapiens
tgaaaaattctagacccaaagtgctatataacagactata

SEQ ID NO: 52358 - DNA, 40 bp, Homo sapiens
atagtctgttatatagcactttgggtctagaatttttcag

SEQ ID NO: 52359 - DNA, 40 bp, Homo sapiens
ctgaaaaattctagacccaaagtgctatataacagactat

SEQ ID NO: 52360 - DNA, 40 bp, Homo sapiens
tagtctgttatatagcactttgggtctagaatttttcagt

SEQ ID NO: 52361 - DNA, 40 bp, Homo sapiens
actgaaaaattctagacccaaagtgctatataacagacta

SEQ ID NO: 52362 - DNA, 40 bp, Homo sapiens
agtctgttatatagcactttgggtctagaatttttcagta

SEQ ID NO: 52363 - DNA, 40 bp, Homo sapiens
tactgaaaaattctagacccaaagtgctatataacagact

SEQ ID NO: 52364 - DNA, 40 bp, Homo sapiens
gtctgttatatagcactttgggtctagaatttttcagtag

SEQ ID NO: 52365 - DNA, 40 bp, Homo sapiens
ctactgaaaaattctagacccaaagtgctatataacagac

SEQ ID NO: 52366 - DNA, 40 bp, Homo sapiens
tctgttatatagcactttgggtctagaatttttcagtagt

SEQ ID NO: 52367 - DNA, 40 bp, Homo sapiens
actactgaaaaattctagacccaaagtgctatataacaga

SEQ ID NO: 52368 - DNA, 40 bp, Homo sapiens
ctgttatatagcactttgggtctagaatttttcagtagtt

SEQ ID NO: 52369 - DNA, 40 bp, Homo sapiens
aactactgaaaaattctagacccaaagtgctatataacag

SEQ ID NO: 52370 - DNA, 40 bp, Homo sapiens
tgttatatagcactttgggtctagaatttttcagtagttt

SEQ ID NO: 52371 - DNA, 40 bp, Homo sapiens
aaactactgaaaaattctagacccaaagtgctatataaca

SEQ ID NO: 52372 - DNA, 40 bp, Homo sapiens
gttatatagcactttgggtctagaatttttcagtagtttc

SEQ ID NO: 52373 - DNA, 40 bp, Homo sapiens
gaaactactgaaaaattctagacccaaagtgctatataac

SEQ ID NO: 52374 - DNA, 40 bp, Homo sapiens
ttatatagcactttgggtctagaatttttcagtagtttct

SEQ ID NO: 52375 - DNA, 40 bp, Homo sapiens
agaaactactgaaaaattctagacccaaagtgctatataa

SEQ ID NO: 52376 - DNA, 40 bp, Homo sapiens
tatatagcactttgggtctagaatttttcagtagtttctg

SEQ ID NO: 52377 - DNA, 40 bp, Homo sapiens
cagaaactactgaaaaattctagacccaaagtgctatata

SEQ ID NO: 52378 - DNA, 40 bp, Homo sapiens
atatagcactttgggtctagaatttttcagtagtttctgt

SEQ ID NO: 52379 - DNA, 40 bp, Homo sapiens
acagaaactactgaaaaattctagacccaaagtgctatat

SEQ ID NO: 52380 - DNA, 40 bp, Homo sapiens
tatagcactttgggtctagaatttttcagtagtttctgtt

SEQ ID NO: 52381 - DNA, 40 bp, Homo sapiens
aacagaaactactgaaaaattctagacccaaagtgctata

SEQ ID NO: 52382 - DNA, 40 bp, Homo sapiens
atagcactttgggtctagaatttttcagtagtttctgttt

SEQ ID NO: 52383 - DNA, 40 bp, Homo sapiens
aaacagaaactactgaaaaattctagacccaaagtgctat

SEQ ID NO: 52384 - DNA, 40 bp, Homo sapiens
tagcactttgggtctagaatttttcagtagtttctgtttt

SEQ ID NO: 52385 - DNA, 40 bp, Homo sapiens
aaaacagaaactactgaaaaattctagacccaaagtgcta

SEQ ID NO: 52386 - DNA, 40 bp, Homo sapiens
agcactttgggtctagaatttttcagtagtttctgtttta

SEQ ID NO: 52387 - DNA, 40 bp, Homo sapiens
taaaacagaaactactgaaaaattctagacccaaagtgct

SEQ ID NO: 52388 - DNA, 40 bp, Homo sapiens
gcactttgggtctagaatttttcagtagtttctgttttac

SEQ ID NO: 52389 - DNA, 40 bp, Homo sapiens
gtaaaacagaaactactgaaaaattctagacccaaagtgc

SEQ ID NO: 52390 - DNA, 40 bp, Homo sapiens
cactttgggtctagaatttttcagtagtttctgttttact

SEQ ID NO: 52391 - DNA, 40 bp, Homo sapiens
agtaaaacagaaactactgaaaaattctagacccaaagtg

SEQ ID NO: 52392 - DNA, 40 bp, Homo sapiens
actttgggtctagaatttttcagtagtttctgttttacta

SEQ ID NO: 52393 - DNA, 40 bp, Homo sapiens
tagtaaaacagaaactactgaaaaattctagacccaaagt

SEQ ID NO: 52394 - DNA, 40 bp, Homo sapiens
ctttgggtctagaatttttcagtagtttctgttttactat

SEQ ID NO: 52395 - DNA, 40 bp, Homo sapiens
atagtaaaacagaaactactgaaaaattctagacccaaag

SEQ ID NO: 52396 - DNA, 40 bp, Homo sapiens
tttgggtctagaatttttcagtagtttctgttttactatt

SEQ ID NO: 52397 - DNA, 40 bp, Homo sapiens
aatagtaaaacagaaactactgaaaaattctagacccaaa

SEQ ID NO: 52398 - DNA, 40 bp, Homo sapiens
ttgggtctagaatttttcagtagtttctgttttactatta

SEQ ID NO: 52399 - DNA, 40 bp, Homo sapiens
taatagtaaaacagaaactactgaaaaattctagacccaa

SEQ ID NO: 52400 - DNA, 40 bp, Homo sapiens
tgggtctagaatttttcagtagtttctgttttactattat

SEQ ID NO: 52401 - DNA, 40 bp, Homo sapiens
ataatagtaaaacagaaactactgaaaaattctagaccca

SEQ ID NO: 52402 - DNA, 40 bp, Homo sapiens
gggtctagaatttttcagtagtttctgttttactattatg

SEQ ID NO: 52403 - DNA, 40 bp, Homo sapiens
cataatagtaaaacagaaactactgaaaaattctagaccc

SEQ ID NO: 52404 - DNA, 40 bp, Homo sapiens
ggtctagaatttttcagtagtttctgttttactattatga

SEQ ID NO: 52405 - DNA, 40 bp, Homo sapiens
tcataatagtaaaacagaaactactgaaaaattctagacc

SEQ ID NO: 52406 - DNA, 40 bp, Homo sapiens
gtctagaatttttcagtagtttctgttttactattatgat

SEQ ID NO: 52407 - DNA, 40 bp, Homo sapiens
atcataatagtaaaacagaaactactgaaaaattctagac

SEQ ID NO: 52408 - DNA, 40 bp, Homo sapiens
tctagaatttttcagtagtttctgttttactattatgatc

SEQ ID NO: 52409 - DNA, 40 bp, Homo sapiens
gatcataatagtaaaacagaaactactgaaaaattctaga

SEQ ID NO: 52410 - DNA, 40 bp, Homo sapiens
ctagaatttttcagtagtttctgttttactattatgatct

SEQ ID NO: 52411 - DNA, 40 bp, Homo sapiens
agatcataatagtaaaacagaaactactgaaaaattctag

SEQ ID NO: 52412 - DNA, 40 bp, Homo sapiens
tagaatttttcagtagtttctgttttactattatgatcta

SEQ ID NO: 52413 - DNA, 40 bp, Homo sapiens
tagatcataatagtaaaacagaaactactgaaaaattcta

SEQ ID NO: 52414 - DNA, 40 bp, Homo sapiens
agaatttttcagtagtttctgttttactattatgatctac

SEQ ID NO: 52415 - DNA, 40 bp, Homo sapiens
gtagatcataatagtaaaacagaaactactgaaaaattct

SEQ ID NO: 52416 - DNA, 40 bp, Homo sapiens
gaatttttcagtagtttctgttttactattatgatctacc

SEQ ID NO: 52417 - DNA, 40 bp, Homo sapiens
ggtagatcataatagtaaaacagaaactactgaaaaattc

SEQ ID NO: 52418 - DNA, 40 bp, Homo sapiens
aatttttcagtagtttctgttttactattatgatctacct

SEQ ID NO: 52419 - DNA, 40 bp, Homo sapiens
aggtagatcataatagtaaaacagaaactactgaaaaatt

SEQ ID NO: 52420 - DNA, 40 bp, Homo sapiens
atttttcagtagtttctgttttactattatgatctacctg

SEQ ID NO: 52421 - DNA, 40 bp, Homo sapiens
caggtagatcataatagtaaaacagaaactactgaaaaat

SEQ ID NO: 52422 - DNA, 40 bp, Homo sapiens
tttttcagtagtttctgttttactattatgatctacctgc

SEQ ID NO: 52423 - DNA, 40 bp, Homo sapiens
gcaggtagatcataatagtaaaacagaaactactgaaaaa

SEQ ID NO: 52424 - DNA, 40 bp, Homo sapiens
ttttcagtagtttctgttttactattatgatctacctgca

SEQ ID NO: 52425 - DNA, 40 bp, Homo sapiens
tgcaggtagatcataatagtaaaacagaaactactgaaaa

SEQ ID NO: 52426 - DNA, 40 bp, Homo sapiens
tttcagtagtttctgttttactattatgatctacctgcat

SEQ ID NO: 52427 - DNA, 40 bp, Homo sapiens
atgcaggtagatcataatagtaaaacagaaactactgaaa

SEQ ID NO: 52428 - DNA, 40 bp, Homo sapiens
ttcagtagtttctgttttactattatgatctacctgcata

SEQ ID NO: 52429 - DNA, 40 bp, Homo sapiens
tatgcaggtagatcataatagtaaaacagaaactactgaa

SEQ ID NO: 52430 - DNA, 40 bp, Homo sapiens
tcagtagtttctgttttactattatgatctacctgcatat

SEQ ID NO: 52431 - DNA, 40 bp, Homo sapiens
atatgcaggtagatcataatagtaaaacagaaactactga

SEQ ID NO: 52432 - DNA, 40 bp, Homo sapiens
cagtagtttctgttttactattatgatctacctgcatatt

SEQ ID NO: 52433 - DNA, 40 bp, Homo sapiens
aatatgcaggtagatcataatagtaaaacagaaactactg

SEQ ID NO: 52434 - DNA, 40 bp, Homo sapiens
agtagtttctgttttactattatgatctacctgcatatta

SEQ ID NO: 52435 - DNA, 40 bp, Homo sapiens
taatatgcaggtagatcataatagtaaaacagaaactact

SEQ ID NO: 52436 - DNA, 40 bp, Homo sapiens
gtagtttctgttttactattatgatctacctgcatattaa

SEQ ID NO: 52437 - DNA, 40 bp, Homo sapiens
ttaatatgcaggtagatcataatagtaaaacagaaactac

SEQ ID NO: 52438 - DNA, 40 bp, Homo sapiens
tagtttctgttttactattatgatctacctgcatattaac

SEQ ID NO: 52439 - DNA, 40 bp, Homo sapiens
gttaatatgcaggtagatcataatagtaaaacagaaacta

SEQ ID NO: 52440 - DNA, 40 bp, Homo sapiens
agtttctgttttactattatgatctacctgcatattaacc

SEQ ID NO: 52441 - DNA, 40 bp, Homo sapiens
ggttaatatgcaggtagatcataatagtaaaacagaaact

SEQ ID NO: 52442 - DNA, 40 bp, Homo sapiens
gtttctgttttactattatgatctacctgcatattaacct

SEQ ID NO: 52443 - DNA, 40 bp, Homo sapiens
aggttaatatgcaggtagatcataatagtaaaacagaaac

SEQ ID NO: 52444 - DNA, 40 bp, Homo sapiens
tttctgttttactattatgatctacctgcatattaaccta

SEQ ID NO: 52445 - DNA, 40 bp, Homo sapiens
taggttaatatgcaggtagatcataatagtaaaacagaaa

SEQ ID NO: 52446 - DNA, 40 bp, Homo sapiens
ttctgttttactattatgatctacctgcatattaacctat

SEQ ID NO: 52447 - DNA, 40 bp, Homo sapiens
ataggttaatatgcaggtagatcataatagtaaaacagaa

SEQ ID NO: 52448 - DNA, 40 bp, Homo sapiens
tctgttttactattatgatctacctgcatattaacctatt

SEQ ID NO: 52449 - DNA, 40 bp, Homo sapiens
aataggttaatatgcaggtagatcataatagtaaaacaga

SEQ ID NO: 52450 - DNA, 40 bp, Homo sapiens
ctgttttactattatgatctacctgcatattaacctatta

SEQ ID NO: 52451 - DNA, 40 bp, Homo sapiens
taataggttaatatgcaggtagatcataatagtaaaacag

SEQ ID NO: 52452 - DNA, 40 bp, Homo sapiens
tgttttactattatgatctacctgcatattaacctattag

SEQ ID NO: 52453 - DNA, 40 bp, Homo sapiens
ctaataggttaatatgcaggtagatcataatagtaaaaca

SEQ ID NO: 52454 - DNA, 40 bp, Homo sapiens
gttttactattatgatctacctgcatattaacctattagg

SEQ ID NO: 52455 - DNA, 40 bp, Homo sapiens
cctaataggttaatatgcaggtagatcataatagtaaaac

SEQ ID NO: 52456 - DNA, 40 bp, Homo sapiens
ttttactattatgatctacctgcatattaacctattaggt

SEQ ID NO: 52457 - DNA, 40 bp, Homo sapiens
acctaataggttaatatgcaggtagatcataatagtaaaa

SEQ ID NO: 52458 - DNA, 40 bp, Homo sapiens
tttactattatgatctacctgcatattaacctattaggtt

SEQ ID NO: 52459 - DNA, 40 bp, Homo sapiens
aacctaataggttaatatgcaggtagatcataatagtaaa

SEQ ID NO: 52460 - DNA, 40 bp, Homo sapiens
ttactattatgatctacctgcatattaacctattaggtta

SEQ ID NO: 52461 - DNA, 40 bp, Homo sapiens
taacctaataggttaatatgcaggtagatcataatagtaa

SEQ ID NO: 52462 - DNA, 40 bp, Homo sapiens
tactattatgatctacctgcatattaacctattaggttat

SEQ ID NO: 52463 - DNA, 40 bp, Homo sapiens
ataacctaataggttaatatgcaggtagatcataatagta

SEQ ID NO: 52464 - DNA, 40 bp, Homo sapiens
actattatgatctacctgcatattaacctattaggttata

SEQ ID NO: 52465 - DNA, 40 bp, Homo sapiens
tataacctaataggttaatatgcaggtagatcataatagt

SEQ ID NO: 52466 - DNA, 40 bp, Homo sapiens
ctattatgatctacctgcatattaacctattaggttatag

SEQ ID NO: 52467 - DNA, 40 bp, Homo sapiens
ctataacctaataggttaatatgcaggtagatcataatag

SEQ ID NO: 52468 - DNA, 40 bp, Homo sapiens
tattatgatctacctgcatattaacctattaggttatagt

SEQ ID NO: 52469 - DNA, 40 bp, Homo sapiens
actataacctaataggttaatatgcaggtagatcataata

SEQ ID NO: 52470 - DNA, 40 bp, Homo sapiens
attatgatctacctgcatattaacctattaggttatagtt

SEQ ID NO: 52471 - DNA, 40 bp, Homo sapiens
aactataacctaataggttaatatgcaggtagatcataat

SEQ ID NO: 52472 - DNA, 40 bp, Homo sapiens
ttatgatctacctgcatattaacctattaggttatagttt

SEQ ID NO: 52473 - DNA, 40 bp, Homo sapiens
aaactataacctaataggttaatatgcaggtagatcataa

SEQ ID NO: 52474 - DNA, 40 bp, Homo sapiens
tatgatctacctgcatattaacctattaggttatagtttt

SEQ ID NO: 52475 - DNA, 40 bp, Homo sapiens
aaaactataacctaataggttaatatgcaggtagatcata

SEQ ID NO: 52476 - DNA, 40 bp, Homo sapiens
atgatctacctgcatattaacctattaggttatagtttta

SEQ ID NO: 52477 - DNA, 40 bp, Homo sapiens
taaaactataacctaataggttaatatgcaggtagatcat

SEQ ID NO: 52478 - DNA, 40 bp, Homo sapiens
tgatctacctgcatattaacctattaggttatagttttac

SEQ ID NO: 52479 - DNA, 40 bp, Homo sapiens
gtaaaactataacctaataggttaatatgcaggtagatca

SEQ ID NO: 52480 - DNA, 40 bp, Homo sapiens
gatctacctgcatattaacctattaggttatagttttact

SEQ ID NO: 52481 - DNA, 40 bp, Homo sapiens
agtaaaactataacctaataggttaatatgcaggtagatc

SEQ ID NO: 52482 - DNA, 40 bp, Homo sapiens
atctacctgcatattaacctattaggttatagttttacta

SEQ ID NO: 52483 - DNA, 40 bp, Homo sapiens
tagtaaaactataacctaataggttaatatgcaggtagat

SEQ ID NO: 52484 - DNA, 40 bp, Homo sapiens
tctacctgcatattaacctattaggttatagttttactat

SEQ ID NO: 52485 - DNA, 40 bp, Homo sapiens
atagtaaaactataacctaataggttaatatgcaggtaga

SEQ ID NO: 52486 - DNA, 40 bp, Homo sapiens
ctacctgcatattaacctattaggttatagttttactata

SEQ ID NO: 52487 - DNA, 40 bp, Homo sapiens
tatagtaaaactataacctaataggttaatatgcaggtag

SEQ ID NO: 52488 - DNA, 40 bp, Homo sapiens
tacctgcatattaacctattaggttatagttttactatac

SEQ ID NO: 52489 - DNA, 40 bp, Homo sapiens
gtatagtaaaactataacctaataggttaatatgcaggta

SEQ ID NO: 52490 - DNA, 40 bp, Homo sapiens
acctgcatattaacctattaggttatagttttactatact

SEQ ID NO: 52491 - DNA, 40 bp, Homo sapiens
agtatagtaaaactataacctaataggttaatatgcaggt

SEQ ID NO: 52492 - DNA, 40 bp, Homo sapiens
cctgcatattaacctattaggttatagttttactatactt

SEQ ID NO: 52493 - DNA, 40 bp, Homo sapiens
aagtatagtaaaactataacctaataggttaatatgcagg

SEQ ID NO: 52494 - DNA, 40 bp, Homo sapiens
ctgcatattaacctattaggttatagttttactatacttc

SEQ ID NO: 52495 - DNA, 40 bp, Homo sapiens
gaagtatagtaaaactataacctaataggttaatatgcag

SEQ ID NO: 52496 - DNA, 40 bp, Homo sapiens
tgcatattaacctattaggttatagttttactatacttct

SEQ ID NO: 52497 - DNA, 40 bp, Homo sapiens
agaagtatagtaaaactataacctaataggttaatatgca

SEQ ID NO: 52498 - DNA, 40 bp, Homo sapiens
gcatattaacctattaggttatagttttactatacttcta

SEQ ID NO: 52499 - DNA, 40 bp, Homo sapiens
tagaagtatagtaaaactataacctaataggttaatatgc

SEQ ID NO: 52500 - DNA, 40 bp, Homo sapiens
catattaacctattaggttatagttttactatacttctag

SEQ ID NO: 52501 - DNA, 40 bp, Homo sapiens
ctagaagtatagtaaaactataacctaataggttaatatg

SEQ ID NO: 52502 - DNA, 40 bp, Homo sapiens
atattaacctattaggttatagttttactatacttctagg

SEQ ID NO: 52503 - DNA, 40 bp, Homo sapiens
cctagaagtatagtaaaactataacctaataggttaatat

SEQ ID NO: 52504 - DNA, 40 bp, Homo sapiens
tattaacctattaggttatagttttactatacttctaggt

SEQ ID NO: 52505 - DNA, 40 bp, Homo sapiens
acctagaagtatagtaaaactataacctaataggttaata

SEQ ID NO: 52506 - DNA, 40 bp, Homo sapiens
attaacctattaggttatagttttactatacttctaggta

SEQ ID NO: 52507 - DNA, 40 bp, Homo sapiens
tacctagaagtatagtaaaactataacctaataggttaat

SEQ ID NO: 52508 - DNA, 40 bp, Homo sapiens
ttaacctattaggttatagttttactatacttctaggtat

SEQ ID NO: 52509 - DNA, 40 bp, Homo sapiens
atacctagaagtatagtaaaactataacctaataggttaa

SEQ ID NO: 52510 - DNA, 40 bp, Homo sapiens
taacctattaggttatagttttactatacttctaggtatt

SEQ ID NO: 52511 - DNA, 40 bp, Homo sapiens
aatacctagaagtatagtaaaactataacctaataggtta

SEQ ID NO: 52512 - DNA, 40 bp, Homo sapiens
aacctattaggttatagttttactatacttctaggtattt

SEQ ID NO: 52513 - DNA, 40 bp, Homo sapiens
aaatacctagaagtatagtaaaactataacctaataggtt

SEQ ID NO: 52514 - DNA, 40 bp, Homo sapiens
acctattaggttatagttttactatacttctaggtatttg

SEQ ID NO: 52515 - DNA, 40 bp, Homo sapiens
caaatacctagaagtatagtaaaactataacctaataggt

SEQ ID NO: 52516 - DNA, 40 bp, Homo sapiens
cctattaggttatagttttactatacttctaggtatttga

SEQ ID NO: 52517 - DNA, 40 bp, Homo sapiens
tcaaatacctagaagtatagtaaaactataacctaatagg

SEQ ID NO: 52518 - DNA, 40 bp, Homo sapiens
ctattaggttatagttttactatacttctaggtatttgat

SEQ ID NO: 52519 - DNA, 40 bp, Homo sapiens
atcaaatacctagaagtatagtaaaactataacctaatag

SEQ ID NO: 52520 - DNA, 40 bp, Homo sapiens
tattaggttatagttttactatacttctaggtatttgatc

SEQ ID NO: 52521 - DNA, 40 bp, Homo sapiens
gatcaaatacctagaagtatagtaaaactataacctaata

SEQ ID NO: 52522 - DNA, 40 bp, Homo sapiens
attaggttatagttttactatacttctaggtatttgatct

SEQ ID NO: 52523 - DNA, 40 bp, Homo sapiens
agatcaaatacctagaagtatagtaaaactataacctaat

SEQ ID NO: 52524 - DNA, 40 bp, Homo sapiens
ttaggttatagttttactatacttctaggtatttgatctt

SEQ ID NO: 52525 - DNA, 40 bp, Homo sapiens
aagatcaaatacctagaagtatagtaaaactataacctaa

SEQ ID NO: 52526 - DNA, 40 bp, Homo sapiens
taggttatagttttactatacttctaggtatttgatcttt

SEQ ID NO: 52527 - DNA, 40 bp, Homo sapiens
aaagatcaaatacctagaagtatagtaaaactataaccta

SEQ ID NO: 52528 - DNA, 40 bp, Homo sapiens
aggttatagttttactatacttctaggtatttgatctttt

SEQ ID NO: 52529 - DNA, 40 bp, Homo sapiens
aaaagatcaaatacctagaagtatagtaaaactataacct

SEQ ID NO: 52530 - DNA, 40 bp, Homo sapiens
ggttatagttttactatacttctaggtatttgatcttttg

SEQ ID NO: 52531 - DNA, 40 bp, Homo sapiens
caaaagatcaaatacctagaagtatagtaaaactataacc

SEQ ID NO: 52532 - DNA, 40 bp, Homo sapiens
gttatagttttactatacttctaggtatttgatcttttga

SEQ ID NO: 52533 - DNA, 40 bp, Homo sapiens
tcaaaagatcaaatacctagaagtatagtaaaactataac

SEQ ID NO: 52534 - DNA, 40 bp, Homo sapiens
ttatagttttactatacttctaggtatttgatcttttgag

SEQ ID NO: 52535 - DNA, 40 bp, Homo sapiens
ctcaaaagatcaaatacctagaagtatagtaaaactataa

SEQ ID NO: 52536 - DNA, 40 bp, Homo sapiens
tatagttttactatacttctaggtatttgatcttttgaga

SEQ ID NO: 52537 - DNA, 40 bp, Homo sapiens
tctcaaaagatcaaatacctagaagtatagtaaaactata

SEQ ID NO: 52538 - DNA, 40 bp, Homo sapiens
atagttttactatacttctaggtatttgatcttttgagag

SEQ ID NO: 52539 - DNA, 40 bp, Homo sapiens
ctctcaaaagatcaaatacctagaagtatagtaaaactat

SEQ ID NO: 52540 - DNA, 40 bp, Homo sapiens
tagttttactatacttctaggtatttgatcttttgagaga

SEQ ID NO: 52541 - DNA, 40 bp, Homo sapiens
tctctcaaaagatcaaatacctagaagtatagtaaaacta

SEQ ID NO: 52542 - DNA, 40 bp, Homo sapiens
agttttactatacttctaggtatttgatcttttgagagag

SEQ ID NO: 52543 - DNA, 40 bp, Homo sapiens
ctctctcaaaagatcaaatacctagaagtatagtaaaact

SEQ ID NO: 52544 - DNA, 40 bp, Homo sapiens
gttttactatacttctaggtatttgatcttttgagagaga

SEQ ID NO: 52545 - DNA, 40 bp, Homo sapiens
tctctctcaaaagatcaaatacctagaagtatagtaaaac

SEQ ID NO: 52546 - DNA, 40 bp, Homo sapiens
ttttactatacttctaggtatttgatcttttgagagagat

SEQ ID NO: 52547 - DNA, 40 bp, Homo sapiens
atctctctcaaaagatcaaatacctagaagtatagtaaaa

SEQ ID NO: 52548 - DNA, 40 bp, Homo sapiens
tttactatacttctaggtatttgatcttttgagagagata

SEQ ID NO: 52549 - DNA, 40 bp, Homo sapiens
tatctctctcaaaagatcaaatacctagaagtatagtaaa

SEQ ID NO: 52550 - DNA, 40 bp, Homo sapiens
ttactatacttctaggtatttgatcttttgagagagatac

SEQ ID NO: 52551 - DNA, 40 bp, Homo sapiens
gtatctctctcaaaagatcaaatacctagaagtatagtaa

SEQ ID NO: 52552 - DNA, 40 bp, Homo sapiens
tactatacttctaggtatttgatcttttgagagagataca

SEQ ID NO: 52553 - DNA, 40 bp, Homo sapiens
tgtatctctctcaaaagatcaaatacctagaagtatagta

SEQ ID NO: 52554 - DNA, 40 bp, Homo sapiens
actatacttctaggtatttgatcttttgagagagatacaa

SEQ ID NO: 52555 - DNA, 40 bp, Homo sapiens
ttgtatctctctcaaaagatcaaatacctagaagtatagt

SEQ ID NO: 52556 - DNA, 40 bp, Homo sapiens
ctatacttctaggtatttgatcttttgagagagatacaag

SEQ ID NO: 52557 - DNA, 40 bp, Homo sapiens
cttgtatctctctcaaaagatcaaatacctagaagtatag

SEQ ID NO: 52558 - DNA, 40 bp, Homo sapiens
tatacttctaggtatttgatcttttgagagagatacaagg

SEQ ID NO: 52559 - DNA, 40 bp, Homo sapiens
ccttgtatctctctcaaaagatcaaatacctagaagtata

SEQ ID NO: 52560 - DNA, 40 bp, Homo sapiens
atacttctaggtatttgatcttttgagagagatacaaggt

SEQ ID NO: 52561 - DNA, 40 bp, Homo sapiens
accttgtatctctctcaaaagatcaaatacctagaagtat

SEQ ID NO: 52562 - DNA, 40 bp, Homo sapiens
tacttctaggtatttgatcttttgagagagatacaaggtt

SEQ ID NO: 52563 - DNA, 40 bp, Homo sapiens
aaccttgtatctctctcaaaagatcaaatacctagaagta

SEQ ID NO: 52564 - DNA, 40 bp, Homo sapiens
acttctaggtatttgatcttttgagagagatacaaggttt

SEQ ID NO: 52565 - DNA, 40 bp, Homo sapiens
aaaccttgtatctctctcaaaagatcaaatacctagaagt

SEQ ID NO: 52566 - DNA, 40 bp, Homo sapiens
cttctaggtatttgatcttttgagagagatacaaggtttc

SEQ ID NO: 52567 - DNA, 40 bp, Homo sapiens
gaaaccttgtatctctctcaaaagatcaaatacctagaag

SEQ ID NO: 52568 - DNA, 40 bp, Homo sapiens
ttctaggtatttgatcttttgagagagatacaaggtttct

SEQ ID NO: 52569 - DNA, 40 bp, Homo sapiens
agaaaccttgtatctctctcaaaagatcaaatacctagaa

SEQ ID NO: 52570 - DNA, 40 bp, Homo sapiens
tctaggtatttgatcttttgagagagatacaaggtttctg

SEQ ID NO: 52571 - DNA, 40 bp, Homo sapiens
cagaaaccttgtatctctctcaaaagatcaaatacctaga

SEQ ID NO: 52572 - DNA, 40 bp, Homo sapiens
ctaggtatttgatcttttgagagagatacaaggtttctgt

SEQ ID NO: 52573 - DNA, 40 bp, Homo sapiens
acagaaaccttgtatctctctcaaaagatcaaatacctag

SEQ ID NO: 52574 - DNA, 40 bp, Homo sapiens
taggtatttgatcttttgagagagatacaaggtttctgtt

SEQ ID NO: 52575 - DNA, 40 bp, Homo sapiens
aacagaaaccttgtatctctctcaaaagatcaaataccta

SEQ ID NO: 52576 - DNA, 40 bp, Homo sapiens
aggtatttgatcttttgagagagatacaaggtttctgttt

SEQ ID NO: 52577 - DNA, 40 bp, Homo sapiens
aaacagaaaccttgtatctctctcaaaagatcaaatacct

SEQ ID NO: 52578 - DNA, 40 bp, Homo sapiens
ggtatttgatcttttgagagagatacaaggtttctgttta

SEQ ID NO: 52579 - DNA, 40 bp, Homo sapiens
taaacagaaaccttgtatctctctcaaaagatcaaatacc

SEQ ID NO: 52580 - DNA, 40 bp, Homo sapiens
gtatttgatcttttgagagagatacaaggtttctgtttaa

SEQ ID NO: 52581 - DNA, 40 bp, Homo sapiens
ttaaacagaaaccttgtatctctctcaaaagatcaaatac

SEQ ID NO: 52582 - DNA, 40 bp, Homo sapiens
tatttgatcttttgagagagatacaaggtttctgtttaaa

SEQ ID NO: 52583 - DNA, 40 bp, Homo sapiens
tttaaacagaaaccttgtatctctctcaaaagatcaaata

SEQ ID NO: 52584 - DNA, 40 bp, Homo sapiens
atttgatcttttgagagagatacaaggtttctgtttaaaa

SEQ ID NO: 52585 - DNA, 40 bp, Homo sapiens
ttttaaacagaaaccttgtatctctctcaaaagatcaaat

SEQ ID NO: 52586 - DNA, 40 bp, Homo sapiens
tttgatcttttgagagagatacaaggtttctgtttaaaaa

SEQ ID NO: 52587 - DNA, 40 bp, Homo sapiens
tttttaaacagaaaccttgtatctctctcaaaagatcaaa

SEQ ID NO: 52588 - DNA, 40 bp, Homo sapiens
ttgatcttttgagagagatacaaggtttctgtttaaaaag

SEQ ID NO: 52589 - DNA, 40 bp, Homo sapiens
ctttttaaacagaaaccttgtatctctctcaaaagatcaa

SEQ ID NO: 52590 - DNA, 40 bp, Homo sapiens
tgatcttttgagagagatacaaggtttctgtttaaaaagg

SEQ ID NO: 52591 - DNA, 40 bp, Homo sapiens
cctttttaaacagaaaccttgtatctctctcaaaagatca

SEQ ID NO: 52592 - DNA, 40 bp, Homo sapiens
gatcttttgagagagatacaaggtttctgtttaaaaaggt

SEQ ID NO: 52593 - DNA, 40 bp, Homo sapiens
acctttttaaacagaaaccttgtatctctctcaaaagatc

SEQ ID NO: 52594 - DNA, 40 bp, Homo sapiens
atcttttgagagagatacaaggtttctgtttaaaaaggta

SEQ ID NO: 52595 - DNA, 40 bp, Homo sapiens
tacctttttaaacagaaaccttgtatctctctcaaaagat

SEQ ID NO: 52596 - DNA, 40 bp, Homo sapiens
tcttttgagagagatacaaggtttctgtttaaaaaggtaa

SEQ ID NO: 52597 - DNA, 40 bp, Homo sapiens
ttacctttttaaacagaaaccttgtatctctctcaaaaga

SEQ ID NO: 52598 - DNA, 40 bp, Homo sapiens
cttttgagagagatacaaggtttctgtttaaaaaggtaaa

SEQ ID NO: 52599 - DNA, 40 bp, Homo sapiens
tttacctttttaaacagaaaccttgtatctctctcaaaag

SEQ ID NO: 52600 - DNA, 40 bp, Homo sapiens
ttttgagagagatacaaggtttctgtttaaaaaggtaaag

SEQ ID NO: 52601 - DNA, 40 bp, Homo sapiens
ctttacctttttaaacagaaaccttgtatctctctcaaaa

SEQ ID NO: 52602 - DNA, 40 bp, Homo sapiens
tttgagagagatacaaggtttctgtttaaaaaggtaaaga

SEQ ID NO: 52603 - DNA, 40 bp, Homo sapiens
tctttacctttttaaacagaaaccttgtatctctctcaaa

SEQ ID NO: 52604 - DNA, 40 bp, Homo sapiens
ttgagagagatacaaggtttctgtttaaaaaggtaaagaa

SEQ ID NO: 52605 - DNA, 40 bp, Homo sapiens
ttctttacctttttaaacagaaaccttgtatctctctcaa

SEQ ID NO: 52606 - DNA, 40 bp, Homo sapiens
tgagagagatacaaggtttctgtttaaaaaggtaaagaaa

SEQ ID NO: 52607 - DNA, 40 bp, Homo sapiens
tttctttacctttttaaacagaaaccttgtatctctctca

SEQ ID NO: 52608 - DNA, 40 bp, Homo sapiens
gagagagatacaaggtttctgtttaaaaaggtaaagaaac

SEQ ID NO: 52609 - DNA, 40 bp, Homo sapiens
gtttctttacctttttaaacagaaaccttgtatctctctc

SEQ ID NO: 52610 - DNA, 40 bp, Homo sapiens
agagagatacaaggtttctgtttaaaaaggtaaagaaaca

SEQ ID NO: 52611 - DNA, 40 bp, Homo sapiens
tgtttctttacctttttaaacagaaaccttgtatctctct

SEQ ID NO: 52612 - DNA, 40 bp, Homo sapiens
gagagatacaaggtttctgtttaaaaaggtaaagaaacaa

SEQ ID NO: 52613 - DNA, 40 bp, Homo sapiens
ttgtttctttacctttttaaacagaaaccttgtatctctc

SEQ ID NO: 52614 - DNA, 40 bp, Homo sapiens
agagatacaaggtttctgtttaaaaaggtaaagaaacaaa

SEQ ID NO: 52615 - DNA, 40 bp, Homo sapiens
tttgtttctttacctttttaaacagaaaccttgtatctct

SEQ ID NO: 52616 - DNA, 40 bp, Homo sapiens
gagatacaaggtttctgtttaaaaaggtaaagaaacaaaa

SEQ ID NO: 52617 - DNA, 40 bp, Homo sapiens
ttttgtttctttacctttttaaacagaaaccttgtatctc

SEQ ID NO: 52618 - DNA, 40 bp, Homo sapiens
agatacaaggtttctgtttaaaaaggtaaagaaacaaaat

SEQ ID NO: 52619 - DNA, 40 bp, Homo sapiens
attttgtttctttacctttttaaacagaaaccttgtatct

SEQ ID NO: 52620 - DNA, 40 bp, Homo sapiens
gatacaaggtttctgtttaaaaaggtaaagaaacaaaata

SEQ ID NO: 52621 - DNA, 40 bp, Homo sapiens
tattttgtttctttacctttttaaacagaaaccttgtatc

SEQ ID NO: 52622 - DNA, 40 bp, Homo sapiens
atacaaggtttctgtttaaaaaggtaaagaaacaaaataa

SEQ ID NO: 52623 - DNA, 40 bp, Homo sapiens
ttattttgtttctttacctttttaaacagaaaccttgtat

SEQ ID NO: 52624 - DNA, 40 bp, Homo sapiens
tacaaggtttctgtttaaaaaggtaaagaaacaaaataac

SEQ ID NO: 52625 - DNA, 40 bp, Homo sapiens
gttattttgtttctttacctttttaaacagaaaccttgta

SEQ ID NO: 52626 - DNA, 40 bp, Homo sapiens
acaaggtttctgtttaaaaaggtaaagaaacaaaataact

SEQ ID NO: 52627 - DNA, 40 bp, Homo sapiens
agttattttgtttctttacctttttaaacagaaaccttgt

SEQ ID NO: 52628 - DNA, 40 bp, Homo sapiens
caaggtttctgtttaaaaaggtaaagaaacaaaataacta

SEQ ID NO: 52629 - DNA, 40 bp, Homo sapiens
tagttattttgtttctttacctttttaaacagaaaccttg

SEQ ID NO: 52630 - DNA, 40 bp, Homo sapiens
aaggtttctgtttaaaaaggtaaagaaacaaaataactag

SEQ ID NO: 52631 - DNA, 40 bp, Homo sapiens
ctagttattttgtttctttacctttttaaacagaaacctt

SEQ ID NO: 52632 - DNA, 40 bp, Homo sapiens
aggtttctgtttaaaaaggtaaagaaacaaaataactagt

SEQ ID NO: 52633 - DNA, 40 bp, Homo sapiens
actagttattttgtttctttacctttttaaacagaaacct

SEQ ID NO: 52634 - DNA, 40 bp, Homo sapiens
ggtttctgtttaaaaaggtaaagaaacaaaataactagta

SEQ ID NO: 52635 - DNA, 40 bp, Homo sapiens
tactagttattttgtttctttacctttttaaacagaaacc

SEQ ID NO: 52636 - DNA, 40 bp, Homo sapiens
gtttctgtttaaaaaggtaaagaaacaaaataactagtag

SEQ ID NO: 52637 - DNA, 40 bp, Homo sapiens
ctactagttattttgtttctttacctttttaaacagaaac

SEQ ID NO: 52638 - DNA, 40 bp, Homo sapiens
tttctgtttaaaaaggtaaagaaacaaaataactagtaga

SEQ ID NO: 52639 - DNA, 40 bp, Homo sapiens
tctactagttattttgtttctttacctttttaaacagaaa

SEQ ID NO: 52640 - DNA, 40 bp, Homo sapiens
ttctgtttaaaaaggtaaagaaacaaaataactagtagaa

SEQ ID NO: 52641 - DNA, 40 bp, Homo sapiens
ttctactagttattttgtttctttacctttttaaacagaa

SEQ ID NO: 52642 - DNA, 40 bp, Homo sapiens
tctgtttaaaaaggtaaagaaacaaaataactagtagaag

SEQ ID NO: 52643 - DNA, 40 bp, Homo sapiens
cttctactagttattttgtttctttacctttttaaacaga

SEQ ID NO: 52644 - DNA, 40 bp, Homo sapiens
ctgtttaaaaaggtaaagaaacaaaataactagtagaaga

SEQ ID NO: 52645 - DNA, 40 bp, Homo sapiens
tcttctactagttattttgtttctttacctttttaaacag

SEQ ID NO: 52646 - DNA, 40 bp, Homo sapiens
tgtttaaaaaggtaaagaaacaaaataactagtagaagaa

SEQ ID NO: 52647 - DNA, 40 bp, Homo sapiens
ttcttctactagttattttgtttctttacctttttaaaca

SEQ ID NO: 52648 - DNA, 40 bp, Homo sapiens
gtttaaaaaggtaaagaaacaaaataactagtagaagaag

SEQ ID NO: 52649 - DNA, 40 bp, Homo sapiens
cttcttctactagttattttgtttctttacctttttaaac

SEQ ID NO: 52650 - DNA, 40 bp, Homo sapiens
tttaaaaaggtaaagaaacaaaataactagtagaagaagg

SEQ ID NO: 52651 - DNA, 40 bp, Homo sapiens
ccttcttctactagttattttgtttctttacctttttaaa

SEQ ID NO: 52652 - DNA, 40 bp, Homo sapiens
ttaaaaaggtaaagaaacaaaataactagtagaagaagga

SEQ ID NO: 52653 - DNA, 40 bp, Homo sapiens
tccttcttctactagttattttgtttctttacctttttaa

SEQ ID NO: 52654 - DNA, 40 bp, Homo sapiens
taaaaaggtaaagaaacaaaataactagtagaagaaggaa

SEQ ID NO: 52655 - DNA, 40 bp, Homo sapiens
ttccttcttctactagttattttgtttctttaccttttta

SEQ ID NO: 52656 - DNA, 40 bp, Homo sapiens
aaaaaggtaaagaaacaaaataactagtagaagaaggaag

SEQ ID NO: 52657 - DNA, 40 bp, Homo sapiens
cttccttcttctactagttattttgtttctttaccttttt

SEQ ID NO: 52658 - DNA, 40 bp, Homo sapiens
aaaaggtaaagaaacaaaataactagtagaagaaggaagg

SEQ ID NO: 52659 - DNA, 40 bp, Homo sapiens
ccttccttcttctactagttattttgtttctttacctttt

SEQ ID NO: 52660 - DNA, 40 bp, Homo sapiens
aaaggtaaagaaacaaaataactagtagaagaaggaagga

SEQ ID NO: 52661 - DNA, 40 bp, Homo sapiens
tccttccttcttctactagttattttgtttctttaccttt

SEQ ID NO: 52662 - DNA, 40 bp, Homo sapiens
aaggtaaagaaacaaaataactagtagaagaaggaaggaa

SEQ ID NO: 52663 - DNA, 40 bp, Homo sapiens
ttccttccttcttctactagttattttgtttctttacctt

SEQ ID NO: 52664 - DNA, 40 bp, Homo sapiens
aggtaaagaaacaaaataactagtagaagaaggaaggaaa

SEQ ID NO: 52665 - DNA, 40 bp, Homo sapiens
tttccttccttcttctactagttattttgtttctttacct

SEQ ID NO: 52666 - DNA, 40 bp, Homo sapiens
ggtaaagaaacaaaataactagtagaagaaggaaggaaaa

SEQ ID NO: 52667 - DNA, 40 bp, Homo sapiens
ttttccttccttcttctactagttattttgtttctttacc

SEQ ID NO: 52668 - DNA, 40 bp, Homo sapiens
gtaaagaaacaaaataactagtagaagaaggaaggaaaat

SEQ ID NO: 52669 - DNA, 40 bp, Homo sapiens
attttccttccttcttctactagttattttgtttctttac

SEQ ID NO: 52670 - DNA, 40 bp, Homo sapiens
taaagaaacaaaataactagtagaagaaggaaggaaaatt

SEQ ID NO: 52671 - DNA, 40 bp, Homo sapiens
aattttccttccttcttctactagttattttgtttcttta

SEQ ID NO: 52672 - DNA, 40 bp, Homo sapiens
aaagaaacaaaataactagtagaagaaggaaggaaaattt

SEQ ID NO: 52673 - DNA, 40 bp, Homo sapiens
aaattttccttccttcttctactagttattttgtttcttt

SEQ ID NO: 52674 - DNA, 40 bp, Homo sapiens
aagaaacaaaataactagtagaagaaggaaggaaaatttg

SEQ ID NO: 52675 - DNA, 40 bp, Homo sapiens
caaattttccttccttcttctactagttattttgtttctt

SEQ ID NO: 52676 - DNA, 40 bp, Homo sapiens
agaaacaaaataactagtagaagaaggaaggaaaatttgg

SEQ ID NO: 52677 - DNA, 40 bp, Homo sapiens
ccaaattttccttccttcttctactagttattttgtttct

SEQ ID NO: 52678 - DNA, 40 bp, Homo sapiens
gaaacaaaataactagtagaagaaggaaggaaaatttggt

SEQ ID NO: 52679 - DNA, 40 bp, Homo sapiens
accaaattttccttccttcttctactagttattttgtttc

SEQ ID NO: 52680 - DNA, 40 bp, Homo sapiens
aaacaaaataactagtagaagaaggaaggaaaatttggtg

SEQ ID NO: 52681 - DNA, 40 bp, Homo sapiens
caccaaattttccttccttcttctactagttattttgttt

SEQ ID NO: 52682 - DNA, 40 bp, Homo sapiens
aacaaaataactagtagaagaaggaaggaaaatttggtgt

SEQ ID NO: 52683 - DNA, 40 bp, Homo sapiens
acaccaaattttccttccttcttctactagttattttgtt

SEQ ID NO: 52684 - DNA, 40 bp, Homo sapiens
acaaaataactagtagaagaaggaaggaaaatttggtgta

SEQ ID NO: 52685 - DNA, 40 bp, Homo sapiens
tacaccaaattttccttccttcttctactagttattttgt

SEQ ID NO: 52686 - DNA, 40 bp, Homo sapiens
caaaataactagtagaagaaggaaggaaaatttggtgtag

SEQ ID NO: 52687 - DNA, 40 bp, Homo sapiens
ctacaccaaattttccttccttcttctactagttattttg

SEQ ID NO: 52688 - DNA, 40 bp, Homo sapiens
aaaataactagtagaagaaggaaggaaaatttggtgtagt

SEQ ID NO: 52689 - DNA, 40 bp, Homo sapiens
actacaccaaattttccttccttcttctactagttatttt

SEQ ID NO: 52690 - DNA, 40 bp, Homo sapiens
aaataactagtagaagaaggaaggaaaatttggtgtagtg

SEQ ID NO: 52691 - DNA, 40 bp, Homo sapiens
cactacaccaaattttccttccttcttctactagttattt

SEQ ID NO: 52692 - DNA, 40 bp, Homo sapiens
aataactagtagaagaaggaaggaaaatttggtgtagtgg

SEQ ID NO: 52693 - DNA, 40 bp, Homo sapiens
ccactacaccaaattttccttccttcttctactagttatt

SEQ ID NO: 52694 - DNA, 40 bp, Homo sapiens
ataactagtagaagaaggaaggaaaatttggtgtagtgga

SEQ ID NO: 52695 - DNA, 40 bp, Homo sapiens
tccactacaccaaattttccttccttcttctactagttat

SEQ ID NO: 52696 - DNA, 40 bp, Homo sapiens
taactagtagaagaaggaaggaaaatttggtgtagtggaa

SEQ ID NO: 52697 - DNA, 40 bp, Homo sapiens
ttccactacaccaaattttccttccttcttctactagtta

SEQ ID NO: 52698 - DNA, 40 bp, Homo sapiens
aactagtagaagaaggaaggaaaatttggtgtagtggaaa

SEQ ID NO: 52699 - DNA, 40 bp, Homo sapiens
tttccactacaccaaattttccttccttcttctactagtt

SEQ ID NO: 52700 - DNA, 40 bp, Homo sapiens
actagtagaagaaggaaggaaaatttggtgtagtggaaac

SEQ ID NO: 52701 - DNA, 40 bp, Homo sapiens
gtttccactacaccaaattttccttccttcttctactagt

SEQ ID NO: 52702 - DNA, 40 bp, Homo sapiens
ctagtagaagaaggaaggaaaatttggtgtagtggaaact

SEQ ID NO: 52703 - DNA, 40 bp, Homo sapiens
agtttccactacaccaaattttccttccttcttctactag

SEQ ID NO: 52704 - DNA, 40 bp, Homo sapiens
tagtagaagaaggaaggaaaatttggtgtagtggaaacta

SEQ ID NO: 52705 - DNA, 40 bp, Homo sapiens
tagtttccactacaccaaattttccttccttcttctacta

SEQ ID NO: 52706 - DNA, 40 bp, Homo sapiens
agtagaagaaggaaggaaaatttggtgtagtggaaactag

SEQ ID NO: 52707 - DNA, 40 bp, Homo sapiens
ctagtttccactacaccaaattttccttccttcttctact

SEQ ID NO: 52708 - DNA, 40 bp, Homo sapiens
gtagaagaaggaaggaaaatttggtgtagtggaaactagg

SEQ ID NO: 52709 - DNA, 40 bp, Homo sapiens
cctagtttccactacaccaaattttccttccttcttctac

SEQ ID NO: 52710 - DNA, 40 bp, Homo sapiens
tagaagaaggaaggaaaatttggtgtagtggaaactagga

SEQ ID NO: 52711 - DNA, 40 bp, Homo sapiens
tcctagtttccactacaccaaattttccttccttcttcta

SEQ ID NO: 52712 - DNA, 40 bp, Homo sapiens
agaagaaggaaggaaaatttggtgtagtggaaactaggaa

SEQ ID NO: 52713 - DNA, 40 bp, Homo sapiens
ttcctagtttccactacaccaaattttccttccttcttct

SEQ ID NO: 52714 - DNA, 40 bp, Homo sapiens
gaagaaggaaggaaaatttggtgtagtggaaactaggaat

SEQ ID NO: 52715 - DNA, 40 bp, Homo sapiens
attcctagtttccactacaccaaattttccttccttcttc

SEQ ID NO: 52716 - DNA, 40 bp, Homo sapiens
aagaaggaaggaaaatttggtgtagtggaaactaggaatt

SEQ ID NO: 52717 - DNA, 40 bp, Homo sapiens
aattcctagtttccactacaccaaattttccttccttctt

SEQ ID NO: 52718 - DNA, 40 bp, Homo sapiens
agaaggaaggaaaatttggtgtagtggaaactaggaatta

SEQ ID NO: 52719 - DNA, 40 bp, Homo sapiens
taattcctagtttccactacaccaaattttccttccttct

SEQ ID NO: 52720 - DNA, 40 bp, Homo sapiens
gaaggaaggaaaatttggtgtagtggaaactaggaattac

SEQ ID NO: 52721 - DNA, 40 bp, Homo sapiens
gtaattcctagtttccactacaccaaattttccttccttc

SEQ ID NO: 52722 - DNA, 40 bp, Homo sapiens
aaggaaggaaaatttggtgtagtggaaactaggaattaca

SEQ ID NO: 52723 - DNA, 40 bp, Homo sapiens
tgtaattcctagtttccactacaccaaattttccttcctt

SEQ ID NO: 52724 - DNA, 40 bp, Homo sapiens
aggaaggaaaatttggtgtagtggaaactaggaattacat

SEQ ID NO: 52725 - DNA, 40 bp, Homo sapiens
atgtaattcctagtttccactacaccaaattttccttcct

SEQ ID NO: 52726 - DNA, 40 bp, Homo sapiens
ggaaggaaaatttggtgtagtggaaactaggaattacatt

SEQ ID NO: 52727 - DNA, 40 bp, Homo sapiens
aatgtaattcctagtttccactacaccaaattttccttcc

SEQ ID NO: 52728 - DNA, 40 bp, Homo sapiens
gaaggaaaatttggtgtagtggaaactaggaattacattg

SEQ ID NO: 52729 - DNA, 40 bp, Homo sapiens
caatgtaattcctagtttccactacaccaaattttccttc

SEQ ID NO: 52730 - DNA, 40 bp, Homo sapiens
aaggaaaatttggtgtagtggaaactaggaattacattgt

SEQ ID NO: 52731 - DNA, 40 bp, Homo sapiens
acaatgtaattcctagtttccactacaccaaattttcctt

SEQ ID NO: 52732 - DNA, 40 bp, Homo sapiens
aggaaaatttggtgtagtggaaactaggaattacattgtt

SEQ ID NO: 52733 - DNA, 40 bp, Homo sapiens
aacaatgtaattcctagtttccactacaccaaattttcct

SEQ ID NO: 52734 - DNA, 40 bp, Homo sapiens
ggaaaatttggtgtagtggaaactaggaattacattgttt

SEQ ID NO: 52735 - DNA, 40 bp, Homo sapiens
aaacaatgtaattcctagtttccactacaccaaattttcc

SEQ ID NO: 52736 - DNA, 40 bp, Homo sapiens
gaaaatttggtgtagtggaaactaggaattacattgtttt

SEQ ID NO: 52737 - DNA, 40 bp, Homo sapiens
aaaacaatgtaattcctagtttccactacaccaaattttc

SEQ ID NO: 52738 - DNA, 40 bp, Homo sapiens
aaaatttggtgtagtggaaactaggaattacattgttttc

SEQ ID NO: 52739 - DNA, 40 bp, Homo sapiens
gaaaacaatgtaattcctagtttccactacaccaaatttt

SEQ ID NO: 52740 - DNA, 40 bp, Homo sapiens
aaatttggtgtagtggaaactaggaattacattgttttct

SEQ ID NO: 52741 - DNA, 40 bp, Homo sapiens
agaaaacaatgtaattcctagtttccactacaccaaattt

SEQ ID NO: 52742 - DNA, 40 bp, Homo sapiens
aatttggtgtagtggaaactaggaattacattgttttctt

SEQ ID NO: 52743 - DNA, 40 bp, Homo sapiens
aagaaaacaatgtaattcctagtttccactacaccaaatt

SEQ ID NO: 52744 - DNA, 40 bp, Homo sapiens
atttggtgtagtggaaactaggaattacattgttttcttt

SEQ ID NO: 52745 - DNA, 40 bp, Homo sapiens
aaagaaaacaatgtaattcctagtttccactacaccaaat

SEQ ID NO: 52746 - DNA, 40 bp, Homo sapiens
tttggtgtagtggaaactaggaattacattgttttctttc

SEQ ID NO: 52747 - DNA, 40 bp, Homo sapiens
gaaagaaaacaatgtaattcctagtttccactacaccaaa

SEQ ID NO: 52748 - DNA, 40 bp, Homo sapiens
ttggtgtagtggaaactaggaattacattgttttctttca

SEQ ID NO: 52749 - DNA, 40 bp, Homo sapiens
tgaaagaaaacaatgtaattcctagtttccactacaccaa

SEQ ID NO: 52750 - DNA, 40 bp, Homo sapiens
tggtgtagtggaaactaggaattacattgttttctttcag

SEQ ID NO: 52751 - DNA, 40 bp, Homo sapiens
ctgaaagaaaacaatgtaattcctagtttccactacacca

SEQ ID NO: 52752 - DNA, 40 bp, Homo sapiens
ggtgtagtggaaactaggaattacattgttttctttcagc

SEQ ID NO: 52753 - DNA, 40 bp, Homo sapiens
gctgaaagaaaacaatgtaattcctagtttccactacacc

SEQ ID NO: 52754 - DNA, 40 bp, Homo sapiens
gtgtagtggaaactaggaattacattgttttctttcagcc

SEQ ID NO: 52755 - DNA, 40 bp, Homo sapiens
ggctgaaagaaaacaatgtaattcctagtttccactacac

SEQ ID NO: 52756 - DNA, 40 bp, Homo sapiens
tgtagtggaaactaggaattacattgttttctttcagcca

SEQ ID NO: 52757 - DNA, 40 bp, Homo sapiens
tggctgaaagaaaacaatgtaattcctagtttccactaca

SEQ ID NO: 52758 - DNA, 40 bp, Homo sapiens
gtagtggaaactaggaattacattgttttctttcagccaa

SEQ ID NO: 52759 - DNA, 40 bp, Homo sapiens
ttggctgaaagaaaacaatgtaattcctagtttccactac

SEQ ID NO: 52760 - DNA, 40 bp, Homo sapiens
tagtggaaactaggaattacattgttttctttcagccaaa

SEQ ID NO: 52761 - DNA, 40 bp, Homo sapiens
tttggctgaaagaaaacaatgtaattcctagtttccacta

SEQ ID NO: 52762 - DNA, 40 bp, Homo sapiens
agtggaaactaggaattacattgttttctttcagccaaat

SEQ ID NO: 52763 - DNA, 40 bp, Homo sapiens
atttggctgaaagaaaacaatgtaattcctagtttccact

SEQ ID NO: 52764 - DNA, 40 bp, Homo sapiens
gtggaaactaggaattacattgttttctttcagccaaatt

SEQ ID NO: 52765 - DNA, 40 bp, Homo sapiens
aatttggctgaaagaaaacaatgtaattcctagtttccac

SEQ ID NO: 52766 - DNA, 40 bp, Homo sapiens
tggaaactaggaattacattgttttctttcagccaaattt

SEQ ID NO: 52767 - DNA, 40 bp, Homo sapiens
aaatttggctgaaagaaaacaatgtaattcctagtttcca

SEQ ID NO: 52768 - DNA, 40 bp, Homo sapiens
ggaaactaggaattacattgttttctttcagccaaatttt

SEQ ID NO: 52769 - DNA, 40 bp, Homo sapiens
aaaatttggctgaaagaaaacaatgtaattcctagtttcc

SEQ ID NO: 52770 - DNA, 40 bp, Homo sapiens
gaaactaggaattacattgttttctttcagccaaatttta

SEQ ID NO: 52771 - DNA, 40 bp, Homo sapiens
taaaatttggctgaaagaaaacaatgtaattcctagtttc

SEQ ID NO: 52772 - DNA, 40 bp, Homo sapiens
aaactaggaattacattgttttctttcagccaaattttat

SEQ ID NO: 52773 - DNA, 40 bp, Homo sapiens
ataaaatttggctgaaagaaaacaatgtaattcctagttt

SEQ ID NO: 52774 - DNA, 40 bp, Homo sapiens
aactaggaattacattgttttctttcagccaaattttatg

SEQ ID NO: 52775 - DNA, 40 bp, Homo sapiens
cataaaatttggctgaaagaaaacaatgtaattcctagtt

SEQ ID NO: 52776 - DNA, 40 bp, Homo sapiens
actaggaattacattgttttctttcagccaaattttatga

SEQ ID NO: 52777 - DNA, 40 bp, Homo sapiens
tcataaaatttggctgaaagaaaacaatgtaattcctagt

SEQ ID NO: 52778 - DNA, 40 bp, Homo sapiens
ctaggaattacattgttttctttcagccaaattttatgac

SEQ ID NO: 52779 - DNA, 40 bp, Homo sapiens
gtcataaaatttggctgaaagaaaacaatgtaattcctag

SEQ ID NO: 52780 - DNA, 40 bp, Homo sapiens
taggaattacattgttttctttcagccaaattttatgaca

SEQ ID NO: 52781 - DNA, 40 bp, Homo sapiens
tgtcataaaatttggctgaaagaaaacaatgtaattccta

SEQ ID NO: 52782 - DNA, 40 bp, Homo sapiens
aggaattacattgttttctttcagccaaattttatgacaa

SEQ ID NO: 52783 - DNA, 40 bp, Homo sapiens
ttgtcataaaatttggctgaaagaaaacaatgtaattcct

SEQ ID NO: 52784 - DNA, 40 bp, Homo sapiens
ggaattacattgttttctttcagccaaattttatgacaaa

SEQ ID NO: 52785 - DNA, 40 bp, Homo sapiens
tttgtcataaaatttggctgaaagaaaacaatgtaattcc

SEQ ID NO: 52786 - DNA, 40 bp, Homo sapiens
gaattacattgttttctttcagccaaattttatgacaaaa

SEQ ID NO: 52787 - DNA, 40 bp, Homo sapiens
ttttgtcataaaatttggctgaaagaaaacaatgtaattc

SEQ ID NO: 52788 - DNA, 40 bp, Homo sapiens
aattacattgttttctttcagccaaattttatgacaaaag

SEQ ID NO: 52789 - DNA, 40 bp, Homo sapiens
cttttgtcataaaatttggctgaaagaaaacaatgtaatt

SEQ ID NO: 52790 - DNA, 40 bp, Homo sapiens
attacattgttttctttcagccaaattttatgacaaaagt

SEQ ID NO: 52791 - DNA, 40 bp, Homo sapiens
acttttgtcataaaatttggctgaaagaaaacaatgtaat

SEQ ID NO: 52792 - DNA, 40 bp, Homo sapiens
ttacattgttttctttcagccaaattttatgacaaaagtt

SEQ ID NO: 52793 - DNA, 40 bp, Homo sapiens
aacttttgtcataaaatttggctgaaagaaaacaatgtaa

SEQ ID NO: 52794 - DNA, 40 bp, Homo sapiens
tacattgttttctttcagccaaattttatgacaaaagttg

SEQ ID NO: 52795 - DNA, 40 bp, Homo sapiens
caacttttgtcataaaatttggctgaaagaaaacaatgta

SEQ ID NO: 52796 - DNA, 40 bp, Homo sapiens
acattgttttctttcagccaaattttatgacaaaagttgt

SEQ ID NO: 52797 - DNA, 40 bp, Homo sapiens
acaacttttgtcataaaatttggctgaaagaaaacaatgt

SEQ ID NO: 52798 - DNA, 40 bp, Homo sapiens
cattgttttctttcagccaaattttatgacaaaagttgtg

SEQ ID NO: 52799 - DNA, 40 bp, Homo sapiens
cacaacttttgtcataaaatttggctgaaagaaaacaatg

SEQ ID NO: 52800 - DNA, 40 bp, Homo sapiens
attgttttctttcagccaaattttatgacaaaagttgtgg

SEQ ID NO: 52801 - DNA, 40 bp, Homo sapiens
ccacaacttttgtcataaaatttggctgaaagaaaacaat

SEQ ID NO: 52802 - DNA, 40 bp, Homo sapiens
ttgttttctttcagccaaattttatgacaaaagttgtgga

SEQ ID NO: 52803 - DNA, 40 bp, Homo sapiens
tccacaacttttgtcataaaatttggctgaaagaaaacaa

SEQ ID NO: 52804 - DNA, 40 bp, Homo sapiens
tgttttctttcagccaaattttatgacaaaagttgtggac

SEQ ID NO: 52805 - DNA, 40 bp, Homo sapiens
gtccacaacttttgtcataaaatttggctgaaagaaaaca

SEQ ID NO: 52806 - DNA, 40 bp, Homo sapiens
gttttctttcagccaaattttatgacaaaagttgtggaca

SEQ ID NO: 52807 - DNA, 40 bp, Homo sapiens
tgtccacaacttttgtcataaaatttggctgaaagaaaac

SEQ ID NO: 52808 - DNA, 40 bp, Homo sapiens
ttttctttcagccaaattttatgacaaaagttgtggacag

SEQ ID NO: 52809 - DNA, 40 bp, Homo sapiens
ctgtccacaacttttgtcataaaatttggctgaaagaaaa

SEQ ID NO: 52810 - DNA, 40 bp, Homo sapiens
tttctttcagccaaattttatgacaaaagttgtggacagg

SEQ ID NO: 52811 - DNA, 40 bp, Homo sapiens
cctgtccacaacttttgtcataaaatttggctgaaagaaa

SEQ ID NO: 52812 - DNA, 40 bp, Homo sapiens
ttctttcagccaaattttatgacaaaagttgtggacaggt

SEQ ID NO: 52813 - DNA, 40 bp, Homo sapiens
acctgtccacaacttttgtcataaaatttggctgaaagaa

SEQ ID NO: 52814 - DNA, 40 bp, Homo sapiens
tctttcagccaaattttatgacaaaagttgtggacaggtt

SEQ ID NO: 52815 - DNA, 40 bp, Homo sapiens
aacctgtccacaacttttgtcataaaatttggctgaaaga

SEQ ID NO: 52816 - DNA, 40 bp, Homo sapiens
ctttcagccaaattttatgacaaaagttgtggacaggttt

SEQ ID NO: 52817 - DNA, 40 bp, Homo sapiens
aaacctgtccacaacttttgtcataaaatttggctgaaag

SEQ ID NO: 52818 - DNA, 40 bp, Homo sapiens
tttcagccaaattttatgacaaaagttgtggacaggtttt

SEQ ID NO: 52819 - DNA, 40 bp, Homo sapiens
aaaacctgtccacaacttttgtcataaaatttggctgaaa

SEQ ID NO: 52820 - DNA, 40 bp, Homo sapiens
ttcagccaaattttatgacaaaagttgtggacaggttttg

SEQ ID NO: 52821 - DNA, 40 bp, Homo sapiens
caaaacctgtccacaacttttgtcataaaatttggctgaa

SEQ ID NO: 52822 - DNA, 40 bp, Homo sapiens
tcagccaaattttatgacaaaagttgtggacaggttttga

SEQ ID NO: 52823 - DNA, 40 bp, Homo sapiens
tcaaaacctgtccacaacttttgtcataaaatttggctga

SEQ ID NO: 52824 - DNA, 40 bp, Homo sapiens
cagccaaattttatgacaaaagttgtggacaggttttgaa

SEQ ID NO: 52825 - DNA, 40 bp, Homo sapiens
ttcaaaacctgtccacaacttttgtcataaaatttggctg

SEQ ID NO: 52826 - DNA, 40 bp, Homo sapiens
agccaaattttatgacaaaagttgtggacaggttttgaaa

SEQ ID NO: 52827 - DNA, 40 bp, Homo sapiens
tttcaaaacctgtccacaacttttgtcataaaatttggct

SEQ ID NO: 52828 - DNA, 40 bp, Homo sapiens
gccaaattttatgacaaaagttgtggacaggttttgaaag

SEQ ID NO: 52829 - DNA, 40 bp, Homo sapiens
ctttcaaaacctgtccacaacttttgtcataaaatttggc

SEQ ID NO: 52830 - DNA, 40 bp, Homo sapiens
ccaaattttatgacaaaagttgtggacaggttttgaaaga

SEQ ID NO: 52831 - DNA, 40 bp, Homo sapiens
tctttcaaaacctgtccacaacttttgtcataaaatttgg

SEQ ID NO: 52832 - DNA, 40 bp, Homo sapiens
caaattttatgacaaaagttgtggacaggttttgaaagat

SEQ ID NO: 52833 - DNA, 40 bp, Homo sapiens
atctttcaaaacctgtccacaacttttgtcataaaatttg

SEQ ID NO: 52834 - DNA, 40 bp, Homo sapiens
aaattttatgacaaaagttgtggacaggttttgaaagata

SEQ ID NO: 52835 - DNA, 40 bp, Homo sapiens
tatctttcaaaacctgtccacaacttttgtcataaaattt

SEQ ID NO: 52836 - DNA, 40 bp, Homo sapiens
aattttatgacaaaagttgtggacaggttttgaaagatat

SEQ ID NO: 52837 - DNA, 40 bp, Homo sapiens
atatctttcaaaacctgtccacaacttttgtcataaaatt

SEQ ID NO: 52838 - DNA, 40 bp, Homo sapiens
attttatgacaaaagttgtggacaggttttgaaagatatt

SEQ ID NO: 52839 - DNA, 40 bp, Homo sapiens
aatatctttcaaaacctgtccacaacttttgtcataaaat

SEQ ID NO: 52840 - DNA, 40 bp, Homo sapiens
ttttatgacaaaagttgtggacaggttttgaaagatattt

SEQ ID NO: 52841 - DNA, 40 bp, Homo sapiens
aaatatctttcaaaacctgtccacaacttttgtcataaaa

SEQ ID NO: 52842 - DNA, 40 bp, Homo sapiens
tttatgacaaaagttgtggacaggttttgaaagatatttg

SEQ ID NO: 52843 - DNA, 40 bp, Homo sapiens
caaatatctttcaaaacctgtccacaacttttgtcataaa

SEQ ID NO: 52844 - DNA, 40 bp, Homo sapiens
ttatgacaaaagttgtggacaggttttgaaagatatttgt

SEQ ID NO: 52845 - DNA, 40 bp, Homo sapiens
acaaatatctttcaaaacctgtccacaacttttgtcataa

SEQ ID NO: 52846 - DNA, 40 bp, Homo sapiens
tatgacaaaagttgtggacaggttttgaaagatatttgtg

SEQ ID NO: 52847 - DNA, 40 bp, Homo sapiens
cacaaatatctttcaaaacctgtccacaacttttgtcata

SEQ ID NO: 52848 - DNA, 40 bp, Homo sapiens
atgacaaaagttgtggacaggttttgaaagatatttgtgt

SEQ ID NO: 52849 - DNA, 40 bp, Homo sapiens
acacaaatatctttcaaaacctgtccacaacttttgtcat

SEQ ID NO: 52850 - DNA, 40 bp, Homo sapiens
tgacaaaagttgtggacaggttttgaaagatatttgtgtt

SEQ ID NO: 52851 - DNA, 40 bp, Homo sapiens
aacacaaatatctttcaaaacctgtccacaacttttgtca

SEQ ID NO: 52852 - DNA, 40 bp, Homo sapiens
gacaaaagttgtggacaggttttgaaagatatttgtgtta

SEQ ID NO: 52853 - DNA, 40 bp, Homo sapiens
taacacaaatatctttcaaaacctgtccacaacttttgtc

SEQ ID NO: 52854 - DNA, 40 bp, Homo sapiens
acaaaagttgtggacaggttttgaaagatatttgtgttac

SEQ ID NO: 52855 - DNA, 40 bp, Homo sapiens
gtaacacaaatatctttcaaaacctgtccacaacttttgt

SEQ ID NO: 52856 - DNA, 40 bp, Homo sapiens
caaaagttgtggacaggttttgaaagatatttgtgttact

SEQ ID NO: 52857 - DNA, 40 bp, Homo sapiens
agtaacacaaatatctttcaaaacctgtccacaacttttg

SEQ ID NO: 52858 - DNA, 40 bp, Homo sapiens
aaaagttgtggacaggttttgaaagatatttgtgttacta

SEQ ID NO: 52859 - DNA, 40 bp, Homo sapiens
tagtaacacaaatatctttcaaaacctgtccacaactttt

SEQ ID NO: 52860 - DNA, 40 bp, Homo sapiens
aaagttgtggacaggttttgaaagatatttgtgttactaa

SEQ ID NO: 52861 - DNA, 40 bp, Homo sapiens
ttagtaacacaaatatctttcaaaacctgtccacaacttt

SEQ ID NO: 52862 - DNA, 40 bp, Homo sapiens
aagttgtggacaggttttgaaagatatttgtgttactaat

SEQ ID NO: 52863 - DNA, 40 bp, Homo sapiens
attagtaacacaaatatctttcaaaacctgtccacaactt

SEQ ID NO: 52864 - DNA, 40 bp, Homo sapiens
agttgtggacaggttttgaaagatatttgtgttactaatg

SEQ ID NO: 52865 - DNA, 40 bp, Homo sapiens
cattagtaacacaaatatctttcaaaacctgtccacaact

SEQ ID NO: 52866 - DNA, 40 bp, Homo sapiens
gttgtggacaggttttgaaagatatttgtgttactaatga

SEQ ID NO: 52867 - DNA, 40 bp, Homo sapiens
tcattagtaacacaaatatctttcaaaacctgtccacaac

SEQ ID NO: 52868 - DNA, 40 bp, Homo sapiens
ttgtggacaggttttgaaagatatttgtgttactaatgac

SEQ ID NO: 52869 - DNA, 40 bp, Homo sapiens
gtcattagtaacacaaatatctttcaaaacctgtccacaa

SEQ ID NO: 52870 - DNA, 40 bp, Homo sapiens
tgtggacaggttttgaaagatatttgtgttactaatgact

SEQ ID NO: 52871 - DNA, 40 bp, Homo sapiens
agtcattagtaacacaaatatctttcaaaacctgtccaca

SEQ ID NO: 52872 - DNA, 40 bp, Homo sapiens
gtggacaggttttgaaagatatttgtgttactaatgactg

SEQ ID NO: 52873 - DNA, 40 bp, Homo sapiens
cagtcattagtaacacaaatatctttcaaaacctgtccac

SEQ ID NO: 52874 - DNA, 40 bp, Homo sapiens
tggacaggttttgaaagatatttgtgttactaatgactgt

SEQ ID NO: 52875 - DNA, 40 bp, Homo sapiens
acagtcattagtaacacaaatatctttcaaaacctgtcca

SEQ ID NO: 52876 - DNA, 40 bp, Homo sapiens
ggacaggttttgaaagatatttgtgttactaatgactgtg

SEQ ID NO: 52877 - DNA, 40 bp, Homo sapiens
cacagtcattagtaacacaaatatctttcaaaacctgtcc

SEQ ID NO: 52878 - DNA, 40 bp, Homo sapiens
gacaggttttgaaagatatttgtgttactaatgactgtgc

SEQ ID NO: 52879 - DNA, 40 bp, Homo sapiens
gcacagtcattagtaacacaaatatctttcaaaacctgtc

SEQ ID NO: 52880 - DNA, 40 bp, Homo sapiens
acaggttttgaaagatatttgtgttactaatgactgtgct

SEQ ID NO: 52881 - DNA, 40 bp, Homo sapiens
agcacagtcattagtaacacaaatatctttcaaaacctgt

SEQ ID NO: 52882 - DNA, 40 bp, Homo sapiens
caggttttgaaagatatttgtgttactaatgactgtgcta

SEQ ID NO: 52883 - DNA, 40 bp, Homo sapiens
tagcacagtcattagtaacacaaatatctttcaaaacctg

SEQ ID NO: 52884 - DNA, 40 bp, Homo sapiens
aggttttgaaagatatttgtgttactaatgactgtgctat

SEQ ID NO: 52885 - DNA, 40 bp, Homo sapiens
atagcacagtcattagtaacacaaatatctttcaaaacct

SEQ ID NO: 52886 - DNA, 40 bp, Homo sapiens
ggttttgaaagatatttgtgttactaatgactgtgctata

SEQ ID NO: 52887 - DNA, 40 bp, Homo sapiens
tatagcacagtcattagtaacacaaatatctttcaaaacc

SEQ ID NO: 52888 - DNA, 40 bp, Homo sapiens
gttttgaaagatatttgtgttactaatgactgtgctataa

SEQ ID NO: 52889 - DNA, 40 bp, Homo sapiens
ttatagcacagtcattagtaacacaaatatctttcaaaac

SEQ ID NO: 52890 - DNA, 40 bp, Homo sapiens
ttttgaaagatatttgtgttactaatgactgtgctataac

SEQ ID NO: 52891 - DNA, 40 bp, Homo sapiens
gttatagcacagtcattagtaacacaaatatctttcaaaa

SEQ ID NO: 52892 - DNA, 40 bp, Homo sapiens
tttgaaagatatttgtgttactaatgactgtgctataact

SEQ ID NO: 52893 - DNA, 40 bp, Homo sapiens
agttatagcacagtcattagtaacacaaatatctttcaaa

SEQ ID NO: 52894 - DNA, 40 bp, Homo sapiens
ttgaaagatatttgtgttactaatgactgtgctataactt

SEQ ID NO: 52895 - DNA, 40 bp, Homo sapiens
aagttatagcacagtcattagtaacacaaatatctttcaa

SEQ ID NO: 52896 - DNA, 40 bp, Homo sapiens
tgaaagatatttgtgttactaatgactgtgctataacttt

SEQ ID NO: 52897 - DNA, 40 bp, Homo sapiens
aaagttatagcacagtcattagtaacacaaatatctttca

SEQ ID NO: 52898 - DNA, 40 bp, Homo sapiens
gaaagatatttgtgttactaatgactgtgctataactttt

SEQ ID NO: 52899 - DNA, 40 bp, Homo sapiens
aaaagttatagcacagtcattagtaacacaaatatctttc

SEQ ID NO: 52900 - DNA, 40 bp, Homo sapiens
aaagatatttgtgttactaatgactgtgctataacttttt

SEQ ID NO: 52901 - DNA, 40 bp, Homo sapiens
aaaaagttatagcacagtcattagtaacacaaatatcttt

SEQ ID NO: 52902 - DNA, 40 bp, Homo sapiens
aagatatttgtgttactaatgactgtgctataactttttt

SEQ ID NO: 52903 - DNA, 40 bp, Homo sapiens
aaaaaagttatagcacagtcattagtaacacaaatatctt

SEQ ID NO: 52904 - DNA, 40 bp, Homo sapiens
agatatttgtgttactaatgactgtgctataacttttttt

SEQ ID NO: 52905 - DNA, 40 bp, Homo sapiens
aaaaaaagttatagcacagtcattagtaacacaaatatct

SEQ ID NO: 52906 - DNA, 40 bp, Homo sapiens
gatatttgtgttactaatgactgtgctataactttttttt

SEQ ID NO: 52907 - DNA, 40 bp, Homo sapiens
aaaaaaaagttatagcacagtcattagtaacacaaatatc

SEQ ID NO: 52908 - DNA, 40 bp, Homo sapiens
atatttgtgttactaatgactgtgctataacttttttttc

SEQ ID NO: 52909 - DNA, 40 bp, Homo sapiens
gaaaaaaaagttatagcacagtcattagtaacacaaatat

SEQ ID NO: 52910 - DNA, 40 bp, Homo sapiens
tatttgtgttactaatgactgtgctataacttttttttct

SEQ ID NO: 52911 - DNA, 40 bp, Homo sapiens
agaaaaaaaagttatagcacagtcattagtaacacaaata

SEQ ID NO: 52912 - DNA, 40 bp, Homo sapiens
atttgtgttactaatgactgtgctataacttttttttctt

SEQ ID NO: 52913 - DNA, 40 bp, Homo sapiens
aagaaaaaaaagttatagcacagtcattagtaacacaaat

SEQ ID NO: 52914 - DNA, 40 bp, Homo sapiens
tttgtgttactaatgactgtgctataacttttttttcttt

SEQ ID NO: 52915 - DNA, 40 bp, Homo sapiens
aaagaaaaaaaagttatagcacagtcattagtaacacaaa

SEQ ID NO: 52916 - DNA, 40 bp, Homo sapiens
ttgtgttactaatgactgtgctataacttttttttctttc

SEQ ID NO: 52917 - DNA, 40 bp, Homo sapiens
gaaagaaaaaaaagttatagcacagtcattagtaacacaa

SEQ ID NO: 52918 - DNA, 40 bp, Homo sapiens
tgtgttactaatgactgtgctataacttttttttctttcc

SEQ ID NO: 52919 - DNA, 40 bp, Homo sapiens
ggaaagaaaaaaaagttatagcacagtcattagtaacaca

SEQ ID NO: 52920 - DNA, 40 bp, Homo sapiens
gtgttactaatgactgtgctataacttttttttctttccc

SEQ ID NO: 52921 - DNA, 40 bp, Homo sapiens
gggaaagaaaaaaaagttatagcacagtcattagtaacac

SEQ ID NO: 52922 - DNA, 40 bp, Homo sapiens
tgttactaatgactgtgctataacttttttttctttccca

SEQ ID NO: 52923 - DNA, 40 bp, Homo sapiens
tgggaaagaaaaaaaagttatagcacagtcattagtaaca

SEQ ID NO: 52924 - DNA, 40 bp, Homo sapiens
gttactaatgactgtgctataacttttttttctttcccag

SEQ ID NO: 52925 - DNA, 40 bp, Homo sapiens
ctgggaaagaaaaaaaagttatagcacagtcattagtaac

SEQ ID NO: 52926 - DNA, 40 bp, Homo sapiens
ttactaatgactgtgctataacttttttttctttcccaga

SEQ ID NO: 52927 - DNA, 40 bp, Homo sapiens
tctgggaaagaaaaaaaagttatagcacagtcattagtaa

SEQ ID NO: 52928 - DNA, 40 bp, Homo sapiens
tactaatgactgtgctataacttttttttctttcccagag

SEQ ID NO: 52929 - DNA, 40 bp, Homo sapiens
ctctgggaaagaaaaaaaagttatagcacagtcattagta

SEQ ID NO: 52930 - DNA, 40 bp, Homo sapiens
actaatgactgtgctataacttttttttctttcccagaga

SEQ ID NO: 52931 - DNA, 40 bp, Homo sapiens
tctctgggaaagaaaaaaaagttatagcacagtcattagt

SEQ ID NO: 52932 - DNA, 40 bp, Homo sapiens
ctaatgactgtgctataacttttttttctttcccagagaa

SEQ ID NO: 52933 - DNA, 40 bp, Homo sapiens
ttctctgggaaagaaaaaaaagttatagcacagtcattag

SEQ ID NO: 52934 - DNA, 40 bp, Homo sapiens
taatgactgtgctataacttttttttctttcccagagaac

SEQ ID NO: 52935 - DNA, 40 bp, Homo sapiens
gttctctgggaaagaaaaaaaagttatagcacagtcatta

SEQ ID NO: 52936 - DNA, 40 bp, Homo sapiens
aatgactgtgctataacttttttttctttcccagagaaca

SEQ ID NO: 52937 - DNA, 40 bp, Homo sapiens
tgttctctgggaaagaaaaaaaagttatagcacagtcatt

SEQ ID NO: 52938 - DNA, 40 bp, Homo sapiens
atgactgtgctataacttttttttctttcccagagaacaa

SEQ ID NO: 52939 - DNA, 40 bp, Homo sapiens
ttgttctctgggaaagaaaaaaaagttatagcacagtcat

SEQ ID NO: 52940 - DNA, 40 bp, Homo sapiens
tgactgtgctataacttttttttctttcccagagaacaaa

SEQ ID NO: 52941 - DNA, 40 bp, Homo sapiens
tttgttctctgggaaagaaaaaaaagttatagcacagtca

SEQ ID NO: 52942 - DNA, 40 bp, Homo sapiens
gactgtgctataacttttttttctttcccagagaacaaat

SEQ ID NO: 52943 - DNA, 40 bp, Homo sapiens
atttgttctctgggaaagaaaaaaaagttatagcacagtc

SEQ ID NO: 52944 - DNA, 40 bp, Homo sapiens
actgtgctataacttttttttctttcccagagaacaaatt

SEQ ID NO: 52945 - DNA, 40 bp, Homo sapiens
aatttgttctctgggaaagaaaaaaaagttatagcacagt

SEQ ID NO: 52946 - DNA, 40 bp, Homo sapiens
ctgtgctataacttttttttctttcccagagaacaaatta

SEQ ID NO: 52947 - DNA, 40 bp, Homo sapiens
taatttgttctctgggaaagaaaaaaaagttatagcacag

SEQ ID NO: 52948 - DNA, 40 bp, Homo sapiens
tgtgctataacttttttttctttcccagagaacaaattaa

SEQ ID NO: 52949 - DNA, 40 bp, Homo sapiens
ttaatttgttctctgggaaagaaaaaaaagttatagcaca

SEQ ID NO: 52950 - DNA, 40 bp, Homo sapiens
gtgctataacttttttttctttcccagagaacaaattaaa

SEQ ID NO: 52951 - DNA, 40 bp, Homo sapiens
tttaatttgttctctgggaaagaaaaaaaagttatagcac

SEQ ID NO: 52952 - DNA, 40 bp, Homo sapiens
tgctataacttttttttctttcccagagaacaaattaaaa

SEQ ID NO: 52953 - DNA, 40 bp, Homo sapiens
ttttaatttgttctctgggaaagaaaaaaaagttatagca

SEQ ID NO: 52954 - DNA, 40 bp, Homo sapiens
gctataacttttttttctttcccagagaacaaattaaaag

SEQ ID NO: 52955 - DNA, 40 bp, Homo sapiens
cttttaatttgttctctgggaaagaaaaaaaagttatagc

SEQ ID NO: 52956 - DNA, 40 bp, Homo sapiens
ctataacttttttttctttcccagagaacaaattaaaaga

SEQ ID NO: 52957 - DNA, 40 bp, Homo sapiens
tcttttaatttgttctctgggaaagaaaaaaaagttatag

SEQ ID NO: 52958 - DNA, 40 bp, Homo sapiens
tataacttttttttctttcccagagaacaaattaaaagag

SEQ ID NO: 52959 - DNA, 40 bp, Homo sapiens
ctcttttaatttgttctctgggaaagaaaaaaaagttata

SEQ ID NO: 52960 - DNA, 40 bp, Homo sapiens
ataacttttttttctttcccagagaacaaattaaaagagt

SEQ ID NO: 52961 - DNA, 40 bp, Homo sapiens
actcttttaatttgttctctgggaaagaaaaaaaagttat

SEQ ID NO: 52962 - DNA, 40 bp, Homo sapiens
taacttttttttctttcccagagaacaaattaaaagagtt

SEQ ID NO: 52963 - DNA, 40 bp, Homo sapiens
aactcttttaatttgttctctgggaaagaaaaaaaagtta

SEQ ID NO: 52964 - DNA, 40 bp, Homo sapiens
aacttttttttctttcccagagaacaaattaaaagagtta

SEQ ID NO: 52965 - DNA, 40 bp, Homo sapiens
taactcttttaatttgttctctgggaaagaaaaaaaagtt

SEQ ID NO: 52966 - DNA, 40 bp, Homo sapiens
acttttttttctttcccagagaacaaattaaaagagttaa

SEQ ID NO: 52967 - DNA, 40 bp, Homo sapiens
ttaactcttttaatttgttctctgggaaagaaaaaaaagt

SEQ ID NO: 52968 - DNA, 40 bp, Homo sapiens
cttttttttctttcccagagaacaaattaaaagagttaag

SEQ ID NO: 52969 - DNA, 40 bp, Homo sapiens
cttaactcttttaatttgttctctgggaaagaaaaaaaag

SEQ ID NO: 52970 - DNA, 40 bp, Homo sapiens
ttttttttctttcccagagaacaaattaaaagagttaagg

SEQ ID NO: 52971 - DNA, 40 bp, Homo sapiens
ccttaactcttttaatttgttctctgggaaagaaaaaaaa

SEQ ID NO: 52972 - DNA, 40 bp, Homo sapiens
tttttttctttcccagagaacaaattaaaagagttaagga

SEQ ID NO: 52973 - DNA, 40 bp, Homo sapiens
tccttaactcttttaatttgttctctgggaaagaaaaaaa

SEQ ID NO: 52974 - DNA, 40 bp, Homo sapiens
ttttttctttcccagagaacaaattaaaagagttaaggac

SEQ ID NO: 52975 - DNA, 40 bp, Homo sapiens
gtccttaactcttttaatttgttctctgggaaagaaaaaa

SEQ ID NO: 52976 - DNA, 40 bp, Homo sapiens
tttttctttcccagagaacaaattaaaagagttaaggact

SEQ ID NO: 52977 - DNA, 40 bp, Homo sapiens
agtccttaactcttttaatttgttctctgggaaagaaaaa

SEQ ID NO: 52978 - DNA, 40 bp, Homo sapiens
ttttctttcccagagaacaaattaaaagagttaaggactc

SEQ ID NO: 52979 - DNA, 40 bp, Homo sapiens
gagtccttaactcttttaatttgttctctgggaaagaaaa

SEQ ID NO: 52980 - DNA, 40 bp, Homo sapiens
tttctttcccagagaacaaattaaaagagttaaggactct

SEQ ID NO: 52981 - DNA, 40 bp, Homo sapiens
agagtccttaactcttttaatttgttctctgggaaagaaa

SEQ ID NO: 52982 - DNA, 40 bp, Homo sapiens
ttctttcccagagaacaaattaaaagagttaaggactctg

SEQ ID NO: 52983 - DNA, 40 bp, Homo sapiens
cagagtccttaactcttttaatttgttctctgggaaagaa

SEQ ID NO: 52984 - DNA, 40 bp, Homo sapiens
tctttcccagagaacaaattaaaagagttaaggactctga

SEQ ID NO: 52985 - DNA, 40 bp, Homo sapiens
tcagagtccttaactcttttaatttgttctctgggaaaga

SEQ ID NO: 52986 - DNA, 40 bp, Homo sapiens
ctttcccagagaacaaattaaaagagttaaggactctgaa

SEQ ID NO: 52987 - DNA, 40 bp, Homo sapiens
ttcagagtccttaactcttttaatttgttctctgggaaag

SEQ ID NO: 52988 - DNA, 40 bp, Homo sapiens
tttcccagagaacaaattaaaagagttaaggactctgaag

SEQ ID NO: 52989 - DNA, 40 bp, Homo sapiens
cttcagagtccttaactcttttaatttgttctctgggaaa

SEQ ID NO: 52990 - DNA, 40 bp, Homo sapiens
ttcccagagaacaaattaaaagagttaaggactctgaaga

SEQ ID NO: 52991 - DNA, 40 bp, Homo sapiens
tcttcagagtccttaactcttttaatttgttctctgggaa

SEQ ID NO: 52992 - DNA, 40 bp, Homo sapiens
tcccagagaacaaattaaaagagttaaggactctgaagat

SEQ ID NO: 52993 - DNA, 40 bp, Homo sapiens
atcttcagagtccttaactcttttaatttgttctctggga

SEQ ID NO: 52994 - DNA, 40 bp, Homo sapiens
cccagagaacaaattaaaagagttaaggactctgaagatg

SEQ ID NO: 52995 - DNA, 40 bp, Homo sapiens
catcttcagagtccttaactcttttaatttgttctctggg

SEQ ID NO: 52996 - DNA, 40 bp, Homo sapiens
ccagagaacaaattaaaagagttaaggactctgaagatgt

SEQ ID NO: 52997 - DNA, 40 bp, Homo sapiens
acatcttcagagtccttaactcttttaatttgttctctgg

SEQ ID NO: 52998 - DNA, 40 bp, Homo sapiens
cagagaacaaattaaaagagttaaggactctgaagatgta

SEQ ID NO: 52999 - DNA, 40 bp, Homo sapiens
tacatcttcagagtccttaactcttttaatttgttctctg

SEQ ID NO: 53000 - DNA, 40 bp, Homo sapiens
agagaacaaattaaaagagttaaggactctgaagatgtac

SEQ ID NO: 53001 - DNA, 40 bp, Homo sapiens
gtacatcttcagagtccttaactcttttaatttgttctct

SEQ ID NO: 53002 - DNA, 40 bp, Homo sapiens
gagaacaaattaaaagagttaaggactctgaagatgtacc

SEQ ID NO: 53003 - DNA, 40 bp, Homo sapiens
ggtacatcttcagagtccttaactcttttaatttgttctc

SEQ ID NO: 53004 - DNA, 40 bp, Homo sapiens
agaacaaattaaaagagttaaggactctgaagatgtacct

SEQ ID NO: 53005 - DNA, 40 bp, Homo sapiens
aggtacatcttcagagtccttaactcttttaatttgttct

SEQ ID NO: 53006 - DNA, 40 bp, Homo sapiens
gaacaaattaaaagagttaaggactctgaagatgtaccta

SEQ ID NO: 53007 - DNA, 40 bp, Homo sapiens
taggtacatcttcagagtccttaactcttttaatttgttc

SEQ ID NO: 53008 - DNA, 40 bp, Homo sapiens
aacaaattaaaagagttaaggactctgaagatgtacctat

SEQ ID NO: 53009 - DNA, 40 bp, Homo sapiens
ataggtacatcttcagagtccttaactcttttaatttgtt

SEQ ID NO: 53010 - DNA, 40 bp, Homo sapiens
acaaattaaaagagttaaggactctgaagatgtacctatg

SEQ ID NO: 53011 - DNA, 40 bp, Homo sapiens
cataggtacatcttcagagtccttaactcttttaatttgt

SEQ ID NO: 53012 - DNA, 40 bp, Homo sapiens
caaattaaaagagttaaggactctgaagatgtacctatgg

SEQ ID NO: 53013 - DNA, 40 bp, Homo sapiens
ccataggtacatcttcagagtccttaactcttttaatttg

SEQ ID NO: 53014 - DNA, 40 bp, Homo sapiens
aaattaaaagagttaaggactctgaagatgtacctatggt

SEQ ID NO: 53015 - DNA, 40 bp, Homo sapiens
accataggtacatcttcagagtccttaactcttttaattt

SEQ ID NO: 53016 - DNA, 40 bp, Homo sapiens
aattaaaagagttaaggactctgaagatgtacctatggtc

SEQ ID NO: 53017 - DNA, 40 bp, Homo sapiens
gaccataggtacatcttcagagtccttaactcttttaatt

SEQ ID NO: 53018 - DNA, 40 bp, Homo sapiens
attaaaagagttaaggactctgaagatgtacctatggtcc

SEQ ID NO: 53019 - DNA, 40 bp, Homo sapiens
ggaccataggtacatcttcagagtccttaactcttttaat

SEQ ID NO: 53020 - DNA, 40 bp, Homo sapiens
ttaaaagagttaaggactctgaagatgtacctatggtcct

SEQ ID NO: 53021 - DNA, 40 bp, Homo sapiens
aggaccataggtacatcttcagagtccttaactcttttaa

SEQ ID NO: 53022 - DNA, 40 bp, Homo sapiens
taaaagagttaaggactctgaagatgtacctatggtccta

SEQ ID NO: 53023 - DNA, 40 bp, Homo sapiens
taggaccataggtacatcttcagagtccttaactctttta

SEQ ID NO: 53024 - DNA, 40 bp, Homo sapiens
aaaagagttaaggactctgaagatgtacctatggtcctag

SEQ ID NO: 53025 - DNA, 40 bp, Homo sapiens
ctaggaccataggtacatcttcagagtccttaactctttt

SEQ ID NO: 53026 - DNA, 40 bp, Homo sapiens
aaagagttaaggactctgaagatgtacctatggtcctagt

SEQ ID NO: 53027 - DNA, 40 bp, Homo sapiens
actaggaccataggtacatcttcagagtccttaactcttt

SEQ ID NO: 53028 - DNA, 40 bp, Homo sapiens
aagagttaaggactctgaagatgtacctatggtcctagta

SEQ ID NO: 53029 - DNA, 40 bp, Homo sapiens
tactaggaccataggtacatcttcagagtccttaactctt

SEQ ID NO: 53030 - DNA, 40 bp, Homo sapiens
agagttaaggactctgaagatgtacctatggtcctagtag

SEQ ID NO: 53031 - DNA, 40 bp, Homo sapiens
ctactaggaccataggtacatcttcagagtccttaactct

SEQ ID NO: 53032 - DNA, 40 bp, Homo sapiens
gagttaaggactctgaagatgtacctatggtcctagtagg

SEQ ID NO: 53033 - DNA, 40 bp, Homo sapiens
cctactaggaccataggtacatcttcagagtccttaactc

SEQ ID NO: 53034 - DNA, 40 bp, Homo sapiens
agttaaggactctgaagatgtacctatggtcctagtagga

SEQ ID NO: 53035 - DNA, 40 bp, Homo sapiens
tcctactaggaccataggtacatcttcagagtccttaact

SEQ ID NO: 53036 - DNA, 40 bp, Homo sapiens
gttaaggactctgaagatgtacctatggtcctagtaggaa

SEQ ID NO: 53037 - DNA, 40 bp, Homo sapiens
ttcctactaggaccataggtacatcttcagagtccttaac

SEQ ID NO: 53038 - DNA, 40 bp, Homo sapiens
ttaaggactctgaagatgtacctatggtcctagtaggaaa

SEQ ID NO: 53039 - DNA, 40 bp, Homo sapiens
tttcctactaggaccataggtacatcttcagagtccttaa

SEQ ID NO: 53040 - DNA, 40 bp, Homo sapiens
taaggactctgaagatgtacctatggtcctagtaggaaat

SEQ ID NO: 53041 - DNA, 40 bp, Homo sapiens
atttcctactaggaccataggtacatcttcagagtcctta

SEQ ID NO: 53042 - DNA, 40 bp, Homo sapiens
aaggactctgaagatgtacctatggtcctagtaggaaata

SEQ ID NO: 53043 - DNA, 40 bp, Homo sapiens
tatttcctactaggaccataggtacatcttcagagtcctt

SEQ ID NO: 53044 - DNA, 40 bp, Homo sapiens
aggactctgaagatgtacctatggtcctagtaggaaataa

SEQ ID NO: 53045 - DNA, 40 bp, Homo sapiens
ttatttcctactaggaccataggtacatcttcagagtcct

SEQ ID NO: 53046 - DNA, 40 bp, Homo sapiens
ggactctgaagatgtacctatggtcctagtaggaaataaa

SEQ ID NO: 53047 - DNA, 40 bp, Homo sapiens
tttatttcctactaggaccataggtacatcttcagagtcc

SEQ ID NO: 53048 - DNA, 40 bp, Homo sapiens
gactctgaagatgtacctatggtcctagtaggaaataaat

SEQ ID NO: 53049 - DNA, 40 bp, Homo sapiens
atttatttcctactaggaccataggtacatcttcagagtc

SEQ ID NO: 53050 - DNA, 40 bp, Homo sapiens
actctgaagatgtacctatggtcctagtaggaaataaatg

SEQ ID NO: 53051 - DNA, 40 bp, Homo sapiens
catttatttcctactaggaccataggtacatcttcagagt

SEQ ID NO: 53052 - DNA, 40 bp, Homo sapiens
ctctgaagatgtacctatggtcctagtaggaaataaatgt

SEQ ID NO: 53053 - DNA, 40 bp, Homo sapiens
acatttatttcctactaggaccataggtacatcttcagag

SEQ ID NO: 53054 - DNA, 40 bp, Homo sapiens
tctgaagatgtacctatggtcctagtaggaaataaatgtg

SEQ ID NO: 53055 - DNA, 40 bp, Homo sapiens
cacatttatttcctactaggaccataggtacatcttcaga

SEQ ID NO: 53056 - DNA, 40 bp, Homo sapiens
ctgaagatgtacctatggtcctagtaggaaataaatgtga

SEQ ID NO: 53057 - DNA, 40 bp, Homo sapiens
tcacatttatttcctactaggaccataggtacatcttcag

SEQ ID NO: 53058 - DNA, 40 bp, Homo sapiens
tgaagatgtacctatggtcctagtaggaaataaatgtgat

SEQ ID NO: 53059 - DNA, 40 bp, Homo sapiens
atcacatttatttcctactaggaccataggtacatcttca

SEQ ID NO: 53060 - DNA, 40 bp, Homo sapiens
gaagatgtacctatggtcctagtaggaaataaatgtgatt

SEQ ID NO: 53061 - DNA, 40 bp, Homo sapiens
aatcacatttatttcctactaggaccataggtacatcttc

SEQ ID NO: 53062 - DNA, 40 bp, Homo sapiens
aagatgtacctatggtcctagtaggaaataaatgtgattt

SEQ ID NO: 53063 - DNA, 40 bp, Homo sapiens
aaatcacatttatttcctactaggaccataggtacatctt

SEQ ID NO: 53064 - DNA, 40 bp, Homo sapiens
agatgtacctatggtcctagtaggaaataaatgtgatttg

SEQ ID NO: 53065 - DNA, 40 bp, Homo sapiens
caaatcacatttatttcctactaggaccataggtacatct

SEQ ID NO: 53066 - DNA, 40 bp, Homo sapiens
gatgtacctatggtcctagtaggaaataaatgtgatttgc

SEQ ID NO: 53067 - DNA, 40 bp, Homo sapiens
gcaaatcacatttatttcctactaggaccataggtacatc

SEQ ID NO: 53068 - DNA, 40 bp, Homo sapiens
atgtacctatggtcctagtaggaaataaatgtgatttgcc

SEQ ID NO: 53069 - DNA, 40 bp, Homo sapiens
ggcaaatcacatttatttcctactaggaccataggtacat

SEQ ID NO: 53070 - DNA, 40 bp, Homo sapiens
tgtacctatggtcctagtaggaaataaatgtgatttgcct

SEQ ID NO: 53071 - DNA, 40 bp, Homo sapiens
aggcaaatcacatttatttcctactaggaccataggtaca

SEQ ID NO: 53072 - DNA, 40 bp, Homo sapiens
gtacctatggtcctagtaggaaataaatgtgatttgcctt

SEQ ID NO: 53073 - DNA, 40 bp, Homo sapiens
aaggcaaatcacatttatttcctactaggaccataggtac

SEQ ID NO: 53074 - DNA, 40 bp, Homo sapiens
tacctatggtcctagtaggaaataaatgtgatttgccttc

SEQ ID NO: 53075 - DNA, 40 bp, Homo sapiens
gaaggcaaatcacatttatttcctactaggaccataggta

SEQ ID NO: 53076 - DNA, 40 bp, Homo sapiens
acctatggtcctagtaggaaataaatgtgatttgccttct

SEQ ID NO: 53077 - DNA, 40 bp, Homo sapiens
agaaggcaaatcacatttatttcctactaggaccataggt

SEQ ID NO: 53078 - DNA, 40 bp, Homo sapiens
cctatggtcctagtaggaaataaatgtgatttgccttcta

SEQ ID NO: 53079 - DNA, 40 bp, Homo sapiens
tagaaggcaaatcacatttatttcctactaggaccatagg

SEQ ID NO: 53080 - DNA, 40 bp, Homo sapiens
ctatggtcctagtaggaaataaatgtgatttgccttctag

SEQ ID NO: 53081 - DNA, 40 bp, Homo sapiens
ctagaaggcaaatcacatttatttcctactaggaccatag

SEQ ID NO: 53082 - DNA, 40 bp, Homo sapiens
tatggtcctagtaggaaataaatgtgatttgccttctaga

SEQ ID NO: 53083 - DNA, 40 bp, Homo sapiens
tctagaaggcaaatcacatttatttcctactaggaccata

SEQ ID NO: 53084 - DNA, 40 bp, Homo sapiens
atggtcctagtaggaaataaatgtgatttgccttctagaa

SEQ ID NO: 53085 - DNA, 40 bp, Homo sapiens
ttctagaaggcaaatcacatttatttcctactaggaccat

SEQ ID NO: 53086 - DNA, 40 bp, Homo sapiens
tggtcctagtaggaaataaatgtgatttgccttctagaac

SEQ ID NO: 53087 - DNA, 40 bp, Homo sapiens
gttctagaaggcaaatcacatttatttcctactaggacca

SEQ ID NO: 53088 - DNA, 40 bp, Homo sapiens
ggtcctagtaggaaataaatgtgatttgccttctagaaca

SEQ ID NO: 53089 - DNA, 40 bp, Homo sapiens
tgttctagaaggcaaatcacatttatttcctactaggacc

SEQ ID NO: 53090 - DNA, 40 bp, Homo sapiens
gtcctagtaggaaataaatgtgatttgccttctagaacag

SEQ ID NO: 53091 - DNA, 40 bp, Homo sapiens
ctgttctagaaggcaaatcacatttatttcctactaggac

SEQ ID NO: 53092 - DNA, 40 bp, Homo sapiens
tcctagtaggaaataaatgtgatttgccttctagaacagt

SEQ ID NO: 53093 - DNA, 40 bp, Homo sapiens
actgttctagaaggcaaatcacatttatttcctactagga

SEQ ID NO: 53094 - DNA, 40 bp, Homo sapiens
cctagtaggaaataaatgtgatttgccttctagaacagta

SEQ ID NO: 53095 - DNA, 40 bp, Homo sapiens
tactgttctagaaggcaaatcacatttatttcctactagg

SEQ ID NO: 53096 - DNA, 40 bp, Homo sapiens
ctagtaggaaataaatgtgatttgccttctagaacagtag

SEQ ID NO: 53097 - DNA, 40 bp, Homo sapiens
ctactgttctagaaggcaaatcacatttatttcctactag

SEQ ID NO: 53098 - DNA, 40 bp, Homo sapiens
tagtaggaaataaatgtgatttgccttctagaacagtaga

SEQ ID NO: 53099 - DNA, 40 bp, Homo sapiens
tctactgttctagaaggcaaatcacatttatttcctacta

SEQ ID NO: 53100 - DNA, 40 bp, Homo sapiens
agtaggaaataaatgtgatttgccttctagaacagtagac

SEQ ID NO: 53101 - DNA, 40 bp, Homo sapiens
gtctactgttctagaaggcaaatcacatttatttcctact

SEQ ID NO: 53102 - DNA, 40 bp, Homo sapiens
gtaggaaataaatgtgatttgccttctagaacagtagaca

SEQ ID NO: 53103 - DNA, 40 bp, Homo sapiens
tgtctactgttctagaaggcaaatcacatttatttcctac

SEQ ID NO: 53104 - DNA, 40 bp, Homo sapiens
taggaaataaatgtgatttgccttctagaacagtagacac

SEQ ID NO: 53105 - DNA, 40 bp, Homo sapiens
gtgtctactgttctagaaggcaaatcacatttatttccta

SEQ ID NO: 53106 - DNA, 40 bp, Homo sapiens
aggaaataaatgtgatttgccttctagaacagtagacaca

SEQ ID NO: 53107 - DNA, 40 bp, Homo sapiens
tgtgtctactgttctagaaggcaaatcacatttatttcct

SEQ ID NO: 53108 - DNA, 40 bp, Homo sapiens
ggaaataaatgtgatttgccttctagaacagtagacacaa

SEQ ID NO: 53109 - DNA, 40 bp, Homo sapiens
ttgtgtctactgttctagaaggcaaatcacatttatttcc

SEQ ID NO: 53110 - DNA, 40 bp, Homo sapiens
gaaataaatgtgatttgccttctagaacagtagacacaaa

SEQ ID NO: 53111 - DNA, 40 bp, Homo sapiens
tttgtgtctactgttctagaaggcaaatcacatttatttc

SEQ ID NO: 53112 - DNA, 40 bp, Homo sapiens
aaataaatgtgatttgccttctagaacagtagacacaaaa

SEQ ID NO: 53113 - DNA, 40 bp, Homo sapiens
ttttgtgtctactgttctagaaggcaaatcacatttattt

SEQ ID NO: 53114 - DNA, 40 bp, Homo sapiens
aataaatgtgatttgccttctagaacagtagacacaaaac

SEQ ID NO: 53115 - DNA, 40 bp, Homo sapiens
gttttgtgtctactgttctagaaggcaaatcacatttatt

SEQ ID NO: 53116 - DNA, 40 bp, Homo sapiens
ataaatgtgatttgccttctagaacagtagacacaaaaca

SEQ ID NO: 53117 - DNA, 40 bp, Homo sapiens
tgttttgtgtctactgttctagaaggcaaatcacatttat

SEQ ID NO: 53118 - DNA, 40 bp, Homo sapiens
taaatgtgatttgccttctagaacagtagacacaaaacag

SEQ ID NO: 53119 - DNA, 40 bp, Homo sapiens
ctgttttgtgtctactgttctagaaggcaaatcacattta

SEQ ID NO: 53120 - DNA, 40 bp, Homo sapiens
aaatgtgatttgccttctagaacagtagacacaaaacagg

SEQ ID NO: 53121 - DNA, 40 bp, Homo sapiens
cctgttttgtgtctactgttctagaaggcaaatcacattt

SEQ ID NO: 53122 - DNA, 40 bp, Homo sapiens
aatgtgatttgccttctagaacagtagacacaaaacaggc

SEQ ID NO: 53123 - DNA, 40 bp, Homo sapiens
gcctgttttgtgtctactgttctagaaggcaaatcacatt

SEQ ID NO: 53124 - DNA, 40 bp, Homo sapiens
atgtgatttgccttctagaacagtagacacaaaacaggct

SEQ ID NO: 53125 - DNA, 40 bp, Homo sapiens
agcctgttttgtgtctactgttctagaaggcaaatcacat

SEQ ID NO: 53126 - DNA, 40 bp, Homo sapiens
tgtgatttgccttctagaacagtagacacaaaacaggctc

SEQ ID NO: 53127 - DNA, 40 bp, Homo sapiens
gagcctgttttgtgtctactgttctagaaggcaaatcaca

SEQ ID NO: 53128 - DNA, 40 bp, Homo sapiens
gtgatttgccttctagaacagtagacacaaaacaggctca

SEQ ID NO: 53129 - DNA, 40 bp, Homo sapiens
tgagcctgttttgtgtctactgttctagaaggcaaatcac

SEQ ID NO: 53130 - DNA, 40 bp, Homo sapiens
tgatttgccttctagaacagtagacacaaaacaggctcag

SEQ ID NO: 53131 - DNA, 40 bp, Homo sapiens
ctgagcctgttttgtgtctactgttctagaaggcaaatca

SEQ ID NO: 53132 - DNA, 40 bp, Homo sapiens
gatttgccttctagaacagtagacacaaaacaggctcagg

SEQ ID NO: 53133 - DNA, 40 bp, Homo sapiens
cctgagcctgttttgtgtctactgttctagaaggcaaatc

SEQ ID NO: 53134 - DNA, 40 bp, Homo sapiens
atttgccttctagaacagtagacacaaaacaggctcagga

SEQ ID NO: 53135 - DNA, 40 bp, Homo sapiens
tcctgagcctgttttgtgtctactgttctagaaggcaaat

SEQ ID NO: 53136 - DNA, 40 bp, Homo sapiens
tttgccttctagaacagtagacacaaaacaggctcaggac

SEQ ID NO: 53137 - DNA, 40 bp, Homo sapiens
gtcctgagcctgttttgtgtctactgttctagaaggcaaa

SEQ ID NO: 53138 - DNA, 40 bp, Homo sapiens
ttgccttctagaacagtagacacaaaacaggctcaggact

SEQ ID NO: 53139 - DNA, 40 bp, Homo sapiens
agtcctgagcctgttttgtgtctactgttctagaaggcaa

SEQ ID NO: 53140 - DNA, 40 bp, Homo sapiens
tgccttctagaacagtagacacaaaacaggctcaggactt

SEQ ID NO: 53141 - DNA, 40 bp, Homo sapiens
aagtcctgagcctgttttgtgtctactgttctagaaggca

SEQ ID NO: 53142 - DNA, 40 bp, Homo sapiens
gccttctagaacagtagacacaaaacaggctcaggactta

SEQ ID NO: 53143 - DNA, 40 bp, Homo sapiens
taagtcctgagcctgttttgtgtctactgttctagaaggc

SEQ ID NO: 53144 - DNA, 40 bp, Homo sapiens
ccttctagaacagtagacacaaaacaggctcaggacttag

SEQ ID NO: 53145 - DNA, 40 bp, Homo sapiens
ctaagtcctgagcctgttttgtgtctactgttctagaagg

SEQ ID NO: 53146 - DNA, 40 bp, Homo sapiens
cttctagaacagtagacacaaaacaggctcaggacttagc

SEQ ID NO: 53147 - DNA, 40 bp, Homo sapiens
gctaagtcctgagcctgttttgtgtctactgttctagaag

SEQ ID NO: 53148 - DNA, 40 bp, Homo sapiens
ttctagaacagtagacacaaaacaggctcaggacttagca

SEQ ID NO: 53149 - DNA, 40 bp, Homo sapiens
tgctaagtcctgagcctgttttgtgtctactgttctagaa

SEQ ID NO: 53150 - DNA, 40 bp, Homo sapiens
tctagaacagtagacacaaaacaggctcaggacttagcaa

SEQ ID NO: 53151 - DNA, 40 bp, Homo sapiens
ttgctaagtcctgagcctgttttgtgtctactgttctaga

SEQ ID NO: 53152 - DNA, 40 bp, Homo sapiens
ctagaacagtagacacaaaacaggctcaggacttagcaag

SEQ ID NO: 53153 - DNA, 40 bp, Homo sapiens
cttgctaagtcctgagcctgttttgtgtctactgttctag

SEQ ID NO: 53154 - DNA, 40 bp, Homo sapiens
tagaacagtagacacaaaacaggctcaggacttagcaaga

SEQ ID NO: 53155 - DNA, 40 bp, Homo sapiens
tcttgctaagtcctgagcctgttttgtgtctactgttcta

SEQ ID NO: 53156 - DNA, 40 bp, Homo sapiens
agaacagtagacacaaaacaggctcaggacttagcaagaa

SEQ ID NO: 53157 - DNA, 40 bp, Homo sapiens
ttcttgctaagtcctgagcctgttttgtgtctactgttct

SEQ ID NO: 53158 - DNA, 40 bp, Homo sapiens
gaacagtagacacaaaacaggctcaggacttagcaagaag

SEQ ID NO: 53159 - DNA, 40 bp, Homo sapiens
cttcttgctaagtcctgagcctgttttgtgtctactgttc

SEQ ID NO: 53160 - DNA, 40 bp, Homo sapiens
aacagtagacacaaaacaggctcaggacttagcaagaagt

SEQ ID NO: 53161 - DNA, 40 bp, Homo sapiens
acttcttgctaagtcctgagcctgttttgtgtctactgtt

SEQ ID NO: 53162 - DNA, 40 bp, Homo sapiens
acagtagacacaaaacaggctcaggacttagcaagaagtt

SEQ ID NO: 53163 - DNA, 40 bp, Homo sapiens
aacttcttgctaagtcctgagcctgttttgtgtctactgt

SEQ ID NO: 53164 - DNA, 40 bp, Homo sapiens
cagtagacacaaaacaggctcaggacttagcaagaagtta

SEQ ID NO: 53165 - DNA, 40 bp, Homo sapiens
taacttcttgctaagtcctgagcctgttttgtgtctactg

SEQ ID NO: 53166 - DNA, 40 bp, Homo sapiens
agtagacacaaaacaggctcaggacttagcaagaagttat

SEQ ID NO: 53167 - DNA, 40 bp, Homo sapiens
ataacttcttgctaagtcctgagcctgttttgtgtctact

SEQ ID NO: 53168 - DNA, 40 bp, Homo sapiens
gtagacacaaaacaggctcaggacttagcaagaagttatg

SEQ ID NO: 53169 - DNA, 40 bp, Homo sapiens
cataacttcttgctaagtcctgagcctgttttgtgtctac

SEQ ID NO: 53170 - DNA, 40 bp, Homo sapiens
tagacacaaaacaggctcaggacttagcaagaagttatgg

SEQ ID NO: 53171 - DNA, 40 bp, Homo sapiens
ccataacttcttgctaagtcctgagcctgttttgtgtcta

SEQ ID NO: 53172 - DNA, 40 bp, Homo sapiens
agacacaaaacaggctcaggacttagcaagaagttatgga

SEQ ID NO: 53173 - DNA, 40 bp, Homo sapiens
tccataacttcttgctaagtcctgagcctgttttgtgtct

SEQ ID NO: 53174 - DNA, 40 bp, Homo sapiens
gacacaaaacaggctcaggacttagcaagaagttatggaa

SEQ ID NO: 53175 - DNA, 40 bp, Homo sapiens
ttccataacttcttgctaagtcctgagcctgttttgtgtc

SEQ ID NO: 53176 - DNA, 40 bp, Homo sapiens
acacaaaacaggctcaggacttagcaagaagttatggaat

SEQ ID NO: 53177 - DNA, 40 bp, Homo sapiens
attccataacttcttgctaagtcctgagcctgttttgtgt

SEQ ID NO: 53178 - DNA, 40 bp, Homo sapiens
cacaaaacaggctcaggacttagcaagaagttatggaatt

SEQ ID NO: 53179 - DNA, 40 bp, Homo sapiens
aattccataacttcttgctaagtcctgagcctgttttgtg

SEQ ID NO: 53180 - DNA, 40 bp, Homo sapiens
acaaaacaggctcaggacttagcaagaagttatggaattc

SEQ ID NO: 53181 - DNA, 40 bp, Homo sapiens
gaattccataacttcttgctaagtcctgagcctgttttgt

SEQ ID NO: 53182 - DNA, 40 bp, Homo sapiens
caaaacaggctcaggacttagcaagaagttatggaattcc

SEQ ID NO: 53183 - DNA, 40 bp, Homo sapiens
ggaattccataacttcttgctaagtcctgagcctgttttg

SEQ ID NO: 53184 - DNA, 40 bp, Homo sapiens
aaaacaggctcaggacttagcaagaagttatggaattcct

SEQ ID NO: 53185 - DNA, 40 bp, Homo sapiens
aggaattccataacttcttgctaagtcctgagcctgtttt

SEQ ID NO: 53186 - DNA, 40 bp, Homo sapiens
aaacaggctcaggacttagcaagaagttatggaattcctt

SEQ ID NO: 53187 - DNA, 40 bp, Homo sapiens
aaggaattccataacttcttgctaagtcctgagcctgttt

SEQ ID NO: 53188 - DNA, 40 bp, Homo sapiens
aacaggctcaggacttagcaagaagttatggaattccttt

SEQ ID NO: 53189 - DNA, 40 bp, Homo sapiens
aaaggaattccataacttcttgctaagtcctgagcctgtt

SEQ ID NO: 53190 - DNA, 40 bp, Homo sapiens
acaggctcaggacttagcaagaagttatggaattcctttt

SEQ ID NO: 53191 - DNA, 40 bp, Homo sapiens
aaaaggaattccataacttcttgctaagtcctgagcctgt

SEQ ID NO: 53192 - DNA, 40 bp, Homo sapiens
caggctcaggacttagcaagaagttatggaattcctttta

SEQ ID NO: 53193 - DNA, 40 bp, Homo sapiens
taaaaggaattccataacttcttgctaagtcctgagcctg

SEQ ID NO: 53194 - DNA, 40 bp, Homo sapiens
aggctcaggacttagcaagaagttatggaattccttttat

SEQ ID NO: 53195 - DNA, 40 bp, Homo sapiens
ataaaaggaattccataacttcttgctaagtcctgagcct

SEQ ID NO: 53196 - DNA, 40 bp, Homo sapiens
ggctcaggacttagcaagaagttatggaattccttttatt

SEQ ID NO: 53197 - DNA, 40 bp, Homo sapiens
aataaaaggaattccataacttcttgctaagtcctgagcc

SEQ ID NO: 53198 - DNA, 40 bp, Homo sapiens
gctcaggacttagcaagaagttatggaattccttttattg

SEQ ID NO: 53199 - DNA, 40 bp, Homo sapiens
caataaaaggaattccataacttcttgctaagtcctgagc

SEQ ID NO: 53200 - DNA, 40 bp, Homo sapiens
ctcaggacttagcaagaagttatggaattccttttattga

SEQ ID NO: 53201 - DNA, 40 bp, Homo sapiens
tcaataaaaggaattccataacttcttgctaagtcctgag

SEQ ID NO: 53202 - DNA, 40 bp, Homo sapiens
tcaggacttagcaagaagttatggaattccttttattgaa

SEQ ID NO: 53203 - DNA, 40 bp, Homo sapiens
ttcaataaaaggaattccataacttcttgctaagtcctga

SEQ ID NO: 53204 - DNA, 40 bp, Homo sapiens
caggacttagcaagaagttatggaattccttttattgaaa

SEQ ID NO: 53205 - DNA, 40 bp, Homo sapiens
tttcaataaaaggaattccataacttcttgctaagtcctg

SEQ ID NO: 53206 - DNA, 40 bp, Homo sapiens
aggacttagcaagaagttatggaattccttttattgaaac

SEQ ID NO: 53207 - DNA, 40 bp, Homo sapiens
gtttcaataaaaggaattccataacttcttgctaagtcct

SEQ ID NO: 53208 - DNA, 40 bp, Homo sapiens
ggacttagcaagaagttatggaattccttttattgaaaca

SEQ ID NO: 53209 - DNA, 40 bp, Homo sapiens
tgtttcaataaaaggaattccataacttcttgctaagtcc

SEQ ID NO: 53210 - DNA, 40 bp, Homo sapiens
gacttagcaagaagttatggaattccttttattgaaacat

SEQ ID NO: 53211 - DNA, 40 bp, Homo sapiens
atgtttcaataaaaggaattccataacttcttgctaagtc

SEQ ID NO: 53212 - DNA, 40 bp, Homo sapiens
acttagcaagaagttatggaattccttttattgaaacatc

SEQ ID NO: 53213 - DNA, 40 bp, Homo sapiens
gatgtttcaataaaaggaattccataacttcttgctaagt

SEQ ID NO: 53214 - DNA, 40 bp, Homo sapiens
cttagcaagaagttatggaattccttttattgaaacatca

SEQ ID NO: 53215 - DNA, 40 bp, Homo sapiens
tgatgtttcaataaaaggaattccataacttcttgctaag

SEQ ID NO: 53216 - DNA, 40 bp, Homo sapiens
ttagcaagaagttatggaattccttttattgaaacatcag

SEQ ID NO: 53217 - DNA, 40 bp, Homo sapiens
ctgatgtttcaataaaaggaattccataacttcttgctaa

SEQ ID NO: 53218 - DNA, 40 bp, Homo sapiens
tagcaagaagttatggaattccttttattgaaacatcagc

SEQ ID NO: 53219 - DNA, 40 bp, Homo sapiens
gctgatgtttcaataaaaggaattccataacttcttgcta

SEQ ID NO: 53220 - DNA, 40 bp, Homo sapiens
agcaagaagttatggaattccttttattgaaacatcagca

SEQ ID NO: 53221 - DNA, 40 bp, Homo sapiens
tgctgatgtttcaataaaaggaattccataacttcttgct

SEQ ID NO: 53222 - DNA, 40 bp, Homo sapiens
gcaagaagttatggaattccttttattgaaacatcagcaa

SEQ ID NO: 53223 - DNA, 40 bp, Homo sapiens
ttgctgatgtttcaataaaaggaattccataacttcttgc

SEQ ID NO: 53224 - DNA, 40 bp, Homo sapiens
caagaagttatggaattccttttattgaaacatcagcaaa

SEQ ID NO: 53225 - DNA, 40 bp, Homo sapiens
tttgctgatgtttcaataaaaggaattccataacttcttg

SEQ ID NO: 53226 - DNA, 40 bp, Homo sapiens
aagaagttatggaattccttttattgaaacatcagcaaag

SEQ ID NO: 53227 - DNA, 40 bp, Homo sapiens
ctttgctgatgtttcaataaaaggaattccataacttctt

SEQ ID NO: 53228 - DNA, 40 bp, Homo sapiens
agaagttatggaattccttttattgaaacatcagcaaaga

SEQ ID NO: 53229 - DNA, 40 bp, Homo sapiens
tctttgctgatgtttcaataaaaggaattccataacttct

SEQ ID NO: 53230 - DNA, 40 bp, Homo sapiens
gaagttatggaattccttttattgaaacatcagcaaagac

SEQ ID NO: 53231 - DNA, 40 bp, Homo sapiens
gtctttgctgatgtttcaataaaaggaattccataacttc

SEQ ID NO: 53232 - DNA, 40 bp, Homo sapiens
aagttatggaattccttttattgaaacatcagcaaagaca

SEQ ID NO: 53233 - DNA, 40 bp, Homo sapiens
tgtctttgctgatgtttcaataaaaggaattccataactt

SEQ ID NO: 53234 - DNA, 40 bp, Homo sapiens
agttatggaattccttttattgaaacatcagcaaagacaa

SEQ ID NO: 53235 - DNA, 40 bp, Homo sapiens
ttgtctttgctgatgtttcaataaaaggaattccataact

SEQ ID NO: 53236 - DNA, 40 bp, Homo sapiens
gttatggaattccttttattgaaacatcagcaaagacaag

SEQ ID NO: 53237 - DNA, 40 bp, Homo sapiens
cttgtctttgctgatgtttcaataaaaggaattccataac

SEQ ID NO: 53238 - DNA, 40 bp, Homo sapiens
ttatggaattccttttattgaaacatcagcaaagacaaga

SEQ ID NO: 53239 - DNA, 40 bp, Homo sapiens
tcttgtctttgctgatgtttcaataaaaggaattccataa

SEQ ID NO: 53240 - DNA, 40 bp, Homo sapiens
tatggaattccttttattgaaacatcagcaaagacaagac

SEQ ID NO: 53241 - DNA, 40 bp, Homo sapiens
gtcttgtctttgctgatgtttcaataaaaggaattccata

SEQ ID NO: 53242 - DNA, 40 bp, Homo sapiens
atggaattccttttattgaaacatcagcaaagacaagaca

SEQ ID NO: 53243 - DNA, 40 bp, Homo sapiens
tgtcttgtctttgctgatgtttcaataaaaggaattccat

SEQ ID NO: 53244 - DNA, 40 bp, Homo sapiens
tggaattccttttattgaaacatcagcaaagacaagacag

SEQ ID NO: 53245 - DNA, 40 bp, Homo sapiens
ctgtcttgtctttgctgatgtttcaataaaaggaattcca

SEQ ID NO: 53246 - DNA, 40 bp, Homo sapiens
ggaattccttttattgaaacatcagcaaagacaagacagg

SEQ ID NO: 53247 - DNA, 40 bp, Homo sapiens
cctgtcttgtctttgctgatgtttcaataaaaggaattcc

SEQ ID NO: 53248 - DNA, 40 bp, Homo sapiens
gaattccttttattgaaacatcagcaaagacaagacaggt

SEQ ID NO: 53249 - DNA, 40 bp, Homo sapiens
acctgtcttgtctttgctgatgtttcaataaaaggaattc

SEQ ID NO: 53250 - DNA, 40 bp, Homo sapiens
aattccttttattgaaacatcagcaaagacaagacaggta

SEQ ID NO: 53251 - DNA, 40 bp, Homo sapiens
tacctgtcttgtctttgctgatgtttcaataaaaggaatt

SEQ ID NO: 53252 - DNA, 40 bp, Homo sapiens
attccttttattgaaacatcagcaaagacaagacaggtaa

SEQ ID NO: 53253 - DNA, 40 bp, Homo sapiens
ttacctgtcttgtctttgctgatgtttcaataaaaggaat

SEQ ID NO: 53254 - DNA, 40 bp, Homo sapiens
ttccttttattgaaacatcagcaaagacaagacaggtaag

SEQ ID NO: 53255 - DNA, 40 bp, Homo sapiens
cttacctgtcttgtctttgctgatgtttcaataaaaggaa

SEQ ID NO: 53256 - DNA, 40 bp, Homo sapiens
tccttttattgaaacatcagcaaagacaagacaggtaagt

SEQ ID NO: 53257 - DNA, 40 bp, Homo sapiens
acttacctgtcttgtctttgctgatgtttcaataaaagga

SEQ ID NO: 53258 - DNA, 40 bp, Homo sapiens
ccttttattgaaacatcagcaaagacaagacaggtaagta

SEQ ID NO: 53259 - DNA, 40 bp, Homo sapiens
tacttacctgtcttgtctttgctgatgtttcaataaaagg

SEQ ID NO: 53260 - DNA, 40 bp, Homo sapiens
cttttattgaaacatcagcaaagacaagacaggtaagtaa

SEQ ID NO: 53261 - DNA, 40 bp, Homo sapiens
ttacttacctgtcttgtctttgctgatgtttcaataaaag

SEQ ID NO: 53262 - DNA, 40 bp, Homo sapiens
ttttattgaaacatcagcaaagacaagacaggtaagtaac

SEQ ID NO: 53263 - DNA, 40 bp, Homo sapiens
gttacttacctgtcttgtctttgctgatgtttcaataaaa

SEQ ID NO: 53264 - DNA, 40 bp, Homo sapiens
tttattgaaacatcagcaaagacaagacaggtaagtaaca

SEQ ID NO: 53265 - DNA, 40 bp, Homo sapiens
tgttacttacctgtcttgtctttgctgatgtttcaataaa

SEQ ID NO: 53266 - DNA, 40 bp, Homo sapiens
ttattgaaacatcagcaaagacaagacaggtaagtaacac

SEQ ID NO: 53267 - DNA, 40 bp, Homo sapiens
gtgttacttacctgtcttgtctttgctgatgtttcaataa

SEQ ID NO: 53268 - DNA, 40 bp, Homo sapiens
tattgaaacatcagcaaagacaagacaggtaagtaacact

SEQ ID NO: 53269 - DNA, 40 bp, Homo sapiens
agtgttacttacctgtcttgtctttgctgatgtttcaata

SEQ ID NO: 53270 - DNA, 40 bp, Homo sapiens
attgaaacatcagcaaagacaagacaggtaagtaacactg

SEQ ID NO: 53271 - DNA, 40 bp, Homo sapiens
cagtgttacttacctgtcttgtctttgctgatgtttcaat

SEQ ID NO: 53272 - DNA, 40 bp, Homo sapiens
ttgaaacatcagcaaagacaagacaggtaagtaacactga

SEQ ID NO: 53273 - DNA, 40 bp, Homo sapiens
tcagtgttacttacctgtcttgtctttgctgatgtttcaa

SEQ ID NO: 53274 - DNA, 40 bp, Homo sapiens
tgaaacatcagcaaagacaagacaggtaagtaacactgaa

SEQ ID NO: 53275 - DNA, 40 bp, Homo sapiens
ttcagtgttacttacctgtcttgtctttgctgatgtttca

SEQ ID NO: 53276 - DNA, 40 bp, Homo sapiens
gaaacatcagcaaagacaagacaggtaagtaacactgaaa

SEQ ID NO: 53277 - DNA, 40 bp, Homo sapiens
tttcagtgttacttacctgtcttgtctttgctgatgtttc

SEQ ID NO: 53278 - DNA, 40 bp, Homo sapiens
aaacatcagcaaagacaagacaggtaagtaacactgaaat

SEQ ID NO: 53279 - DNA, 40 bp, Homo sapiens
atttcagtgttacttacctgtcttgtctttgctgatgttt

SEQ ID NO: 53280 - DNA, 40 bp, Homo sapiens
aacatcagcaaagacaagacaggtaagtaacactgaaata

SEQ ID NO: 53281 - DNA, 40 bp, Homo sapiens
tatttcagtgttacttacctgtcttgtctttgctgatgtt

SEQ ID NO: 53282 - DNA, 40 bp, Homo sapiens
acatcagcaaagacaagacaggtaagtaacactgaaataa

SEQ ID NO: 53283 - DNA, 40 bp, Homo sapiens
ttatttcagtgttacttacctgtcttgtctttgctgatgt

SEQ ID NO: 53284 - DNA, 40 bp, Homo sapiens
catcagcaaagacaagacaggtaagtaacactgaaataaa

SEQ ID NO: 53285 - DNA, 40 bp, Homo sapiens
tttatttcagtgttacttacctgtcttgtctttgctgatg

SEQ ID NO: 53286 - DNA, 40 bp, Homo sapiens
atcagcaaagacaagacaggtaagtaacactgaaataaat

SEQ ID NO: 53287 - DNA, 40 bp, Homo sapiens
atttatttcagtgttacttacctgtcttgtctttgctgat

SEQ ID NO: 53288 - DNA, 40 bp, Homo sapiens
tcagcaaagacaagacaggtaagtaacactgaaataaata

SEQ ID NO: 53289 - DNA, 40 bp, Homo sapiens
tatttatttcagtgttacttacctgtcttgtctttgctga

SEQ ID NO: 53290 - DNA, 40 bp, Homo sapiens
cagcaaagacaagacaggtaagtaacactgaaataaatac

SEQ ID NO: 53291 - DNA, 40 bp, Homo sapiens
gtatttatttcagtgttacttacctgtcttgtctttgctg

SEQ ID NO: 53292 - DNA, 40 bp, Homo sapiens
agcaaagacaagacaggtaagtaacactgaaataaataca

SEQ ID NO: 53293 - DNA, 40 bp, Homo sapiens
tgtatttatttcagtgttacttacctgtcttgtctttgct

SEQ ID NO: 53294 - DNA, 40 bp, Homo sapiens
gcaaagacaagacaggtaagtaacactgaaataaatacag

SEQ ID NO: 53295 - DNA, 40 bp, Homo sapiens
ctgtatttatttcagtgttacttacctgtcttgtctttgc

SEQ ID NO: 53296 - DNA, 40 bp, Homo sapiens
caaagacaagacaggtaagtaacactgaaataaatacaga

SEQ ID NO: 53297 - DNA, 40 bp, Homo sapiens
tctgtatttatttcagtgttacttacctgtcttgtctttg

SEQ ID NO: 53298 - DNA, 40 bp, Homo sapiens
aaagacaagacaggtaagtaacactgaaataaatacagat

SEQ ID NO: 53299 - DNA, 40 bp, Homo sapiens
atctgtatttatttcagtgttacttacctgtcttgtcttt

SEQ ID NO: 53300 - DNA, 40 bp, Homo sapiens
aagacaagacaggtaagtaacactgaaataaatacagatc

SEQ ID NO: 53301 - DNA, 40 bp, Homo sapiens
gatctgtatttatttcagtgttacttacctgtcttgtctt

SEQ ID NO: 53302 - DNA, 40 bp, Homo sapiens
agacaagacaggtaagtaacactgaaataaatacagatct

SEQ ID NO: 53303 - DNA, 40 bp, Homo sapiens
agatctgtatttatttcagtgttacttacctgtcttgtct

SEQ ID NO: 53304 - DNA, 40 bp, Homo sapiens
gacaagacaggtaagtaacactgaaataaatacagatctg

SEQ ID NO: 53305 - DNA, 40 bp, Homo sapiens
cagatctgtatttatttcagtgttacttacctgtcttgtc

SEQ ID NO: 53306 - DNA, 40 bp, Homo sapiens
acaagacaggtaagtaacactgaaataaatacagatctgt

SEQ ID NO: 53307 - DNA, 40 bp, Homo sapiens
acagatctgtatttatttcagtgttacttacctgtcttgt

SEQ ID NO: 53308 - DNA, 40 bp, Homo sapiens
caagacaggtaagtaacactgaaataaatacagatctgtt

SEQ ID NO: 53309 - DNA, 40 bp, Homo sapiens
aacagatctgtatttatttcagtgttacttacctgtcttg

SEQ ID NO: 53310 - DNA, 40 bp, Homo sapiens
aagacaggtaagtaacactgaaataaatacagatctgttt

SEQ ID NO: 53311 - DNA, 40 bp, Homo sapiens
aaacagatctgtatttatttcagtgttacttacctgtctt

SEQ ID NO: 53312 - DNA, 40 bp, Homo sapiens
agacaggtaagtaacactgaaataaatacagatctgtttt

SEQ ID NO: 53313 - DNA, 40 bp, Homo sapiens
aaaacagatctgtatttatttcagtgttacttacctgtct

SEQ ID NO: 53314 - DNA, 40 bp, Homo sapiens
gacaggtaagtaacactgaaataaatacagatctgttttc

SEQ ID NO: 53315 - DNA, 40 bp, Homo sapiens
gaaaacagatctgtatttatttcagtgttacttacctgtc

SEQ ID NO: 53316 - DNA, 40 bp, Homo sapiens
acaggtaagtaacactgaaataaatacagatctgttttct

SEQ ID NO: 53317 - DNA, 40 bp, Homo sapiens
agaaaacagatctgtatttatttcagtgttacttacctgt

SEQ ID NO: 53318 - DNA, 40 bp, Homo sapiens
caggtaagtaacactgaaataaatacagatctgttttctg

SEQ ID NO: 53319 - DNA, 40 bp, Homo sapiens
cagaaaacagatctgtatttatttcagtgttacttacctg

SEQ ID NO: 53320 - DNA, 40 bp, Homo sapiens
aggtaagtaacactgaaataaatacagatctgttttctgc

SEQ ID NO: 53321 - DNA, 40 bp, Homo sapiens
gcagaaaacagatctgtatttatttcagtgttacttacct

SEQ ID NO: 53322 - DNA, 40 bp, Homo sapiens
ggtaagtaacactgaaataaatacagatctgttttctgca

SEQ ID NO: 53323 - DNA, 40 bp, Homo sapiens
tgcagaaaacagatctgtatttatttcagtgttacttacc

SEQ ID NO: 53324 - DNA, 40 bp, Homo sapiens
gtaagtaacactgaaataaatacagatctgttttctgcaa

SEQ ID NO: 53325 - DNA, 40 bp, Homo sapiens
ttgcagaaaacagatctgtatttatttcagtgttacttac

SEQ ID NO: 53326 - DNA, 40 bp, Homo sapiens
taagtaacactgaaataaatacagatctgttttctgcaaa

SEQ ID NO: 53327 - DNA, 40 bp, Homo sapiens
tttgcagaaaacagatctgtatttatttcagtgttactta

SEQ ID NO: 53328 - DNA, 40 bp, Homo sapiens
aagtaacactgaaataaatacagatctgttttctgcaaaa

SEQ ID NO: 53329 - DNA, 40 bp, Homo sapiens
ttttgcagaaaacagatctgtatttatttcagtgttactt

SEQ ID NO: 53330 - DNA, 40 bp, Homo sapiens
agtaacactgaaataaatacagatctgttttctgcaaaat

SEQ ID NO: 53331 - DNA, 40 bp, Homo sapiens
attttgcagaaaacagatctgtatttatttcagtgttact

SEQ ID NO: 53332 - DNA, 40 bp, Homo sapiens
gtaacactgaaataaatacagatctgttttctgcaaaatc

SEQ ID NO: 53333 - DNA, 40 bp, Homo sapiens
gattttgcagaaaacagatctgtatttatttcagtgttac

SEQ ID NO: 53334 - DNA, 40 bp, Homo sapiens
taacactgaaataaatacagatctgttttctgcaaaatca

SEQ ID NO: 53335 - DNA, 40 bp, Homo sapiens
tgattttgcagaaaacagatctgtatttatttcagtgtta

SEQ ID NO: 53336 - DNA, 40 bp, Homo sapiens
aacactgaaataaatacagatctgttttctgcaaaatcat

SEQ ID NO: 53337 - DNA, 40 bp, Homo sapiens
atgattttgcagaaaacagatctgtatttatttcagtgtt

SEQ ID NO: 53338 - DNA, 40 bp, Homo sapiens
acactgaaataaatacagatctgttttctgcaaaatcata

SEQ ID NO: 53339 - DNA, 40 bp, Homo sapiens
tatgattttgcagaaaacagatctgtatttatttcagtgt

SEQ ID NO: 53340 - DNA, 40 bp, Homo sapiens
cactgaaataaatacagatctgttttctgcaaaatcataa

SEQ ID NO: 53341 - DNA, 40 bp, Homo sapiens
ttatgattttgcagaaaacagatctgtatttatttcagtg

SEQ ID NO: 53342 - DNA, 40 bp, Homo sapiens
actgaaataaatacagatctgttttctgcaaaatcataac

SEQ ID NO: 53343 - DNA, 40 bp, Homo sapiens
gttatgattttgcagaaaacagatctgtatttatttcagt

SEQ ID NO: 53344 - DNA, 40 bp, Homo sapiens
ctgaaataaatacagatctgttttctgcaaaatcataact

SEQ ID NO: 53345 - DNA, 40 bp, Homo sapiens
agttatgattttgcagaaaacagatctgtatttatttcag

SEQ ID NO: 53346 - DNA, 40 bp, Homo sapiens
tgaaataaatacagatctgttttctgcaaaatcataactg

SEQ ID NO: 53347 - DNA, 40 bp, Homo sapiens
cagttatgattttgcagaaaacagatctgtatttatttca

SEQ ID NO: 53348 - DNA, 40 bp, Homo sapiens
gaaataaatacagatctgttttctgcaaaatcataactgt

SEQ ID NO: 53349 - DNA, 40 bp, Homo sapiens
acagttatgattttgcagaaaacagatctgtatttatttc

SEQ ID NO: 53350 - DNA, 40 bp, Homo sapiens
aaataaatacagatctgttttctgcaaaatcataactgtt

SEQ ID NO: 53351 - DNA, 40 bp, Homo sapiens
aacagttatgattttgcagaaaacagatctgtatttattt

SEQ ID NO: 53352 - DNA, 40 bp, Homo sapiens
aataaatacagatctgttttctgcaaaatcataactgtta

SEQ ID NO: 53353 - DNA, 40 bp, Homo sapiens
taacagttatgattttgcagaaaacagatctgtatttatt

SEQ ID NO: 53354 - DNA, 40 bp, Homo sapiens
ataaatacagatctgttttctgcaaaatcataactgttat

SEQ ID NO: 53355 - DNA, 40 bp, Homo sapiens
ataacagttatgattttgcagaaaacagatctgtatttat

SEQ ID NO: 53356 - DNA, 40 bp, Homo sapiens
taaatacagatctgttttctgcaaaatcataactgttatg

SEQ ID NO: 53357 - DNA, 40 bp, Homo sapiens
cataacagttatgattttgcagaaaacagatctgtattta

SEQ ID NO: 53358 - DNA, 40 bp, Homo sapiens
aaatacagatctgttttctgcaaaatcataactgttatgt

SEQ ID NO: 53359 - DNA, 40 bp, Homo sapiens
acataacagttatgattttgcagaaaacagatctgtattt

SEQ ID NO: 53360 - DNA, 40 bp, Homo sapiens
aatacagatctgttttctgcaaaatcataactgttatgtc

SEQ ID NO: 53361 - DNA, 40 bp, Homo sapiens
gacataacagttatgattttgcagaaaacagatctgtatt

SEQ ID NO: 53362 - DNA, 40 bp, Homo sapiens
atacagatctgttttctgcaaaatcataactgttatgtca

SEQ ID NO: 53363 - DNA, 40 bp, Homo sapiens
tgacataacagttatgattttgcagaaaacagatctgtat

SEQ ID NO: 53364 - DNA, 40 bp, Homo sapiens
tacagatctgttttctgcaaaatcataactgttatgtcat

SEQ ID NO: 53365 - DNA, 40 bp, Homo sapiens
atgacataacagttatgattttgcagaaaacagatctgta

SEQ ID NO: 53366 - DNA, 40 bp, Homo sapiens
acagatctgttttctgcaaaatcataactgttatgtcatt

SEQ ID NO: 53367 - DNA, 40 bp, Homo sapiens
aatgacataacagttatgattttgcagaaaacagatctgt

SEQ ID NO: 53368 - DNA, 40 bp, Homo sapiens
cagatctgttttctgcaaaatcataactgttatgtcattt

SEQ ID NO: 53369 - DNA, 40 bp, Homo sapiens
aaatgacataacagttatgattttgcagaaaacagatctg

SEQ ID NO: 53370 - DNA, 40 bp, Homo sapiens
agatctgttttctgcaaaatcataactgttatgtcattta

SEQ ID NO: 53371 - DNA, 40 bp, Homo sapiens
taaatgacataacagttatgattttgcagaaaacagatct

SEQ ID NO: 53372 - DNA, 40 bp, Homo sapiens
gatctgttttctgcaaaatcataactgttatgtcatttaa

SEQ ID NO: 53373 - DNA, 40 bp, Homo sapiens
ttaaatgacataacagttatgattttgcagaaaacagatc

SEQ ID NO: 53374 - DNA, 40 bp, Homo sapiens
atctgttttctgcaaaatcataactgttatgtcatttaat

SEQ ID NO: 53375 - DNA, 40 bp, Homo sapiens
attaaatgacataacagttatgattttgcagaaaacagat

SEQ ID NO: 53376 - DNA, 40 bp, Homo sapiens
tctgttttctgcaaaatcataactgttatgtcatttaata

SEQ ID NO: 53377 - DNA, 40 bp, Homo sapiens
tattaaatgacataacagttatgattttgcagaaaacaga

SEQ ID NO: 53378 - DNA, 40 bp, Homo sapiens
ctgttttctgcaaaatcataactgttatgtcatttaatat

SEQ ID NO: 53379 - DNA, 40 bp, Homo sapiens
atattaaatgacataacagttatgattttgcagaaaacag

SEQ ID NO: 53380 - DNA, 40 bp, Homo sapiens
tgttttctgcaaaatcataactgttatgtcatttaatata

SEQ ID NO: 53381 - DNA, 40 bp, Homo sapiens
tatattaaatgacataacagttatgattttgcagaaaaca

SEQ ID NO: 53382 - DNA, 40 bp, Homo sapiens
gttttctgcaaaatcataactgttatgtcatttaatatat

SEQ ID NO: 53383 - DNA, 40 bp, Homo sapiens
atatattaaatgacataacagttatgattttgcagaaaac

SEQ ID NO: 53384 - DNA, 40 bp, Homo sapiens
ttttctgcaaaatcataactgttatgtcatttaatatatc

SEQ ID NO: 53385 - DNA, 40 bp, Homo sapiens
gatatattaaatgacataacagttatgattttgcagaaaa

SEQ ID NO: 53386 - DNA, 40 bp, Homo sapiens
tttctgcaaaatcataactgttatgtcatttaatatatca

SEQ ID NO: 53387 - DNA, 40 bp, Homo sapiens
tgatatattaaatgacataacagttatgattttgcagaaa

SEQ ID NO: 53388 - DNA, 40 bp, Homo sapiens
ttctgcaaaatcataactgttatgtcatttaatatatcag

SEQ ID NO: 53389 - DNA, 40 bp, Homo sapiens
ctgatatattaaatgacataacagttatgattttgcagaa

SEQ ID NO: 53390 - DNA, 40 bp, Homo sapiens
tctgcaaaatcataactgttatgtcatttaatatatcagt

SEQ ID NO: 53391 - DNA, 40 bp, Homo sapiens
actgatatattaaatgacataacagttatgattttgcaga

SEQ ID NO: 53392 - DNA, 40 bp, Homo sapiens
ctgcaaaatcataactgttatgtcatttaatatatcagtt

SEQ ID NO: 53393 - DNA, 40 bp, Homo sapiens
aactgatatattaaatgacataacagttatgattttgcag

SEQ ID NO: 53394 - DNA, 40 bp, Homo sapiens
tgcaaaatcataactgttatgtcatttaatatatcagttt

SEQ ID NO: 53395 - DNA, 40 bp, Homo sapiens
aaactgatatattaaatgacataacagttatgattttgca

SEQ ID NO: 53396 - DNA, 40 bp, Homo sapiens
gcaaaatcataactgttatgtcatttaatatatcagtttt

SEQ ID NO: 53397 - DNA, 40 bp, Homo sapiens
aaaactgatatattaaatgacataacagttatgattttgc

SEQ ID NO: 53398 - DNA, 40 bp, Homo sapiens
caaaatcataactgttatgtcatttaatatatcagttttt

SEQ ID NO: 53399 - DNA, 40 bp, Homo sapiens
aaaaactgatatattaaatgacataacagttatgattttg

SEQ ID NO: 53400 - DNA, 40 bp, Homo sapiens
aaaatcataactgttatgtcatttaatatatcagtttttc

SEQ ID NO: 53401 - DNA, 40 bp, Homo sapiens
gaaaaactgatatattaaatgacataacagttatgatttt

SEQ ID NO: 53402 - DNA, 40 bp, Homo sapiens
aaatcataactgttatgtcatttaatatatcagtttttct

SEQ ID NO: 53403 - DNA, 40 bp, Homo sapiens
agaaaaactgatatattaaatgacataacagttatgattt

SEQ ID NO: 53404 - DNA, 40 bp, Homo sapiens
aatcataactgttatgtcatttaatatatcagtttttctc

SEQ ID NO: 53405 - DNA, 40 bp, Homo sapiens
gagaaaaactgatatattaaatgacataacagttatgatt

SEQ ID NO: 53406 - DNA, 40 bp, Homo sapiens
atcataactgttatgtcatttaatatatcagtttttctct

SEQ ID NO: 53407 - DNA, 40 bp, Homo sapiens
agagaaaaactgatatattaaatgacataacagttatgat

SEQ ID NO: 53408 - DNA, 40 bp, Homo sapiens
tcataactgttatgtcatttaatatatcagtttttctctc

SEQ ID NO: 53409 - DNA, 40 bp, Homo sapiens
gagagaaaaactgatatattaaatgacataacagttatga

SEQ ID NO: 53410 - DNA, 40 bp, Homo sapiens
cataactgttatgtcatttaatatatcagtttttctctca

SEQ ID NO: 53411 - DNA, 40 bp, Homo sapiens
tgagagaaaaactgatatattaaatgacataacagttatg

SEQ ID NO: 53412 - DNA, 40 bp, Homo sapiens
ataactgttatgtcatttaatatatcagtttttctctcaa

SEQ ID NO: 53413 - DNA, 40 bp, Homo sapiens
ttgagagaaaaactgatatattaaatgacataacagttat

SEQ ID NO: 53414 - DNA, 40 bp, Homo sapiens
taactgttatgtcatttaatatatcagtttttctctcaat

SEQ ID NO: 53415 - DNA, 40 bp, Homo sapiens
attgagagaaaaactgatatattaaatgacataacagtta

SEQ ID NO: 53416 - DNA, 40 bp, Homo sapiens
aactgttatgtcatttaatatatcagtttttctctcaatt

SEQ ID NO: 53417 - DNA, 40 bp, Homo sapiens
aattgagagaaaaactgatatattaaatgacataacagtt

SEQ ID NO: 53418 - DNA, 40 bp, Homo sapiens
actgttatgtcatttaatatatcagtttttctctcaatta

SEQ ID NO: 53419 - DNA, 40 bp, Homo sapiens
taattgagagaaaaactgatatattaaatgacataacagt

SEQ ID NO: 53420 - DNA, 40 bp, Homo sapiens
ctgttatgtcatttaatatatcagtttttctctcaattat

SEQ ID NO: 53421 - DNA, 40 bp, Homo sapiens
ataattgagagaaaaactgatatattaaatgacataacag

SEQ ID NO: 53422 - DNA, 40 bp, Homo sapiens
tgttatgtcatttaatatatcagtttttctctcaattatg

SEQ ID NO: 53423 - DNA, 40 bp, Homo sapiens
cataattgagagaaaaactgatatattaaatgacataaca

SEQ ID NO: 53424 - DNA, 40 bp, Homo sapiens
gttatgtcatttaatatatcagtttttctctcaattatgc

SEQ ID NO: 53425 - DNA, 40 bp, Homo sapiens
gcataattgagagaaaaactgatatattaaatgacataac

SEQ ID NO: 53426 - DNA, 40 bp, Homo sapiens
ttatgtcatttaatatatcagtttttctctcaattatgct

SEQ ID NO: 53427 - DNA, 40 bp, Homo sapiens
agcataattgagagaaaaactgatatattaaatgacataa

SEQ ID NO: 53428 - DNA, 40 bp, Homo sapiens
tatgtcatttaatatatcagtttttctctcaattatgcta

SEQ ID NO: 53429 - DNA, 40 bp, Homo sapiens
tagcataattgagagaaaaactgatatattaaatgacata

SEQ ID NO: 53430 - DNA, 40 bp, Homo sapiens
atgtcatttaatatatcagtttttctctcaattatgctat

SEQ ID NO: 53431 - DNA, 40 bp, Homo sapiens
atagcataattgagagaaaaactgatatattaaatgacat

SEQ ID NO: 53432 - DNA, 40 bp, Homo sapiens
tgtcatttaatatatcagtttttctctcaattatgctata

SEQ ID NO: 53433 - DNA, 40 bp, Homo sapiens
tatagcataattgagagaaaaactgatatattaaatgaca

SEQ ID NO: 53434 - DNA, 40 bp, Homo sapiens
gtcatttaatatatcagtttttctctcaattatgctatac

SEQ ID NO: 53435 - DNA, 40 bp, Homo sapiens
gtatagcataattgagagaaaaactgatatattaaatgac

SEQ ID NO: 53436 - DNA, 40 bp, Homo sapiens
tcatttaatatatcagtttttctctcaattatgctatact

SEQ ID NO: 53437 - DNA, 40 bp, Homo sapiens
agtatagcataattgagagaaaaactgatatattaaatga

SEQ ID NO: 53438 - DNA, 40 bp, Homo sapiens
catttaatatatcagtttttctctcaattatgctatacta

SEQ ID NO: 53439 - DNA, 40 bp, Homo sapiens
tagtatagcataattgagagaaaaactgatatattaaatg

SEQ ID NO: 53440 - DNA, 40 bp, Homo sapiens
atttaatatatcagtttttctctcaattatgctatactag

SEQ ID NO: 53441 - DNA, 40 bp, Homo sapiens
ctagtatagcataattgagagaaaaactgatatattaaat

SEQ ID NO: 53442 - DNA, 40 bp, Homo sapiens
tttaatatatcagtttttctctcaattatgctatactagg

SEQ ID NO: 53443 - DNA, 40 bp, Homo sapiens
cctagtatagcataattgagagaaaaactgatatattaaa

SEQ ID NO: 53444 - DNA, 40 bp, Homo sapiens
ttaatatatcagtttttctctcaattatgctatactagga

SEQ ID NO: 53445 - DNA, 40 bp, Homo sapiens
tcctagtatagcataattgagagaaaaactgatatattaa

SEQ ID NO: 53446 - DNA, 40 bp, Homo sapiens
taatatatcagtttttctctcaattatgctatactaggaa

SEQ ID NO: 53447 - DNA, 40 bp, Homo sapiens
ttcctagtatagcataattgagagaaaaactgatatatta

SEQ ID NO: 53448 - DNA, 40 bp, Homo sapiens
aatatatcagtttttctctcaattatgctatactaggaaa

SEQ ID NO: 53449 - DNA, 40 bp, Homo sapiens
tttcctagtatagcataattgagagaaaaactgatatatt

SEQ ID NO: 53450 - DNA, 40 bp, Homo sapiens
atatatcagtttttctctcaattatgctatactaggaaat

SEQ ID NO: 53451 - DNA, 40 bp, Homo sapiens
atttcctagtatagcataattgagagaaaaactgatatat

SEQ ID NO: 53452 - DNA, 40 bp, Homo sapiens
tatatcagtttttctctcaattatgctatactaggaaata

SEQ ID NO: 53453 - DNA, 40 bp, Homo sapiens
tatttcctagtatagcataattgagagaaaaactgatata

SEQ ID NO: 53454 - DNA, 40 bp, Homo sapiens
atatcagtttttctctcaattatgctatactaggaaataa

SEQ ID NO: 53455 - DNA, 40 bp, Homo sapiens
ttatttcctagtatagcataattgagagaaaaactgatat

SEQ ID NO: 53456 - DNA, 40 bp, Homo sapiens
tatcagtttttctctcaattatgctatactaggaaataaa

SEQ ID NO: 53457 - DNA, 40 bp, Homo sapiens
tttatttcctagtatagcataattgagagaaaaactgata

SEQ ID NO: 53458 - DNA, 40 bp, Homo sapiens
atcagtttttctctcaattatgctatactaggaaataaaa

SEQ ID NO: 53459 - DNA, 40 bp, Homo sapiens
ttttatttcctagtatagcataattgagagaaaaactgat

SEQ ID NO: 53460 - DNA, 40 bp, Homo sapiens
tcagtttttctctcaattatgctatactaggaaataaaac

SEQ ID NO: 53461 - DNA, 40 bp, Homo sapiens
gttttatttcctagtatagcataattgagagaaaaactga

SEQ ID NO: 53462 - DNA, 40 bp, Homo sapiens
cagtttttctctcaattatgctatactaggaaataaaaca

SEQ ID NO: 53463 - DNA, 40 bp, Homo sapiens
tgttttatttcctagtatagcataattgagagaaaaactg

SEQ ID NO: 53464 - DNA, 40 bp, Homo sapiens
agtttttctctcaattatgctatactaggaaataaaacaa

SEQ ID NO: 53465 - DNA, 40 bp, Homo sapiens
ttgttttatttcctagtatagcataattgagagaaaaact

SEQ ID NO: 53466 - DNA, 40 bp, Homo sapiens
gtttttctctcaattatgctatactaggaaataaaacaat

SEQ ID NO: 53467 - DNA, 40 bp, Homo sapiens
attgttttatttcctagtatagcataattgagagaaaaac

SEQ ID NO: 53468 - DNA, 40 bp, Homo sapiens
tttttctctcaattatgctatactaggaaataaaacaata

SEQ ID NO: 53469 - DNA, 40 bp, Homo sapiens
tattgttttatttcctagtatagcataattgagagaaaaa

SEQ ID NO: 53470 - DNA, 40 bp, Homo sapiens
ttttctctcaattatgctatactaggaaataaaacaatat

SEQ ID NO: 53471 - DNA, 40 bp, Homo sapiens
atattgttttatttcctagtatagcataattgagagaaaa

SEQ ID NO: 53472 - DNA, 40 bp, Homo sapiens
tttctctcaattatgctatactaggaaataaaacaatatt

SEQ ID NO: 53473 - DNA, 40 bp, Homo sapiens
aatattgttttatttcctagtatagcataattgagagaaa

SEQ ID NO: 53474 - DNA, 40 bp, Homo sapiens
ttctctcaattatgctatactaggaaataaaacaatattt

SEQ ID NO: 53475 - DNA, 40 bp, Homo sapiens
aaatattgttttatttcctagtatagcataattgagagaa

SEQ ID NO: 53476 - DNA, 40 bp, Homo sapiens
tctctcaattatgctatactaggaaataaaacaatattta

SEQ ID NO: 53477 - DNA, 40 bp, Homo sapiens
taaatattgttttatttcctagtatagcataattgagaga

SEQ ID NO: 53478 - DNA, 40 bp, Homo sapiens
ctctcaattatgctatactaggaaataaaacaatatttag

SEQ ID NO: 53479 - DNA, 40 bp, Homo sapiens
ctaaatattgttttatttcctagtatagcataattgagag

SEQ ID NO: 53480 - DNA, 40 bp, Homo sapiens
tctcaattatgctatactaggaaataaaacaatatttagt

SEQ ID NO: 53481 - DNA, 40 bp, Homo sapiens
actaaatattgttttatttcctagtatagcataattgaga

SEQ ID NO: 53482 - DNA, 40 bp, Homo sapiens
ctcaattatgctatactaggaaataaaacaatatttagta

SEQ ID NO: 53483 - DNA, 40 bp, Homo sapiens
tactaaatattgttttatttcctagtatagcataattgag

SEQ ID NO: 53484 - DNA, 40 bp, Homo sapiens
tcaattatgctatactaggaaataaaacaatatttagtaa

SEQ ID NO: 53485 - DNA, 40 bp, Homo sapiens
ttactaaatattgttttatttcctagtatagcataattga

SEQ ID NO: 53486 - DNA, 40 bp, Homo sapiens
caattatgctatactaggaaataaaacaatatttagtaaa

SEQ ID NO: 53487 - DNA, 40 bp, Homo sapiens
tttactaaatattgttttatttcctagtatagcataattg

SEQ ID NO: 53488 - DNA, 40 bp, Homo sapiens
aattatgctatactaggaaataaaacaatatttagtaaat

SEQ ID NO: 53489 - DNA, 40 bp, Homo sapiens
atttactaaatattgttttatttcctagtatagcataatt

SEQ ID NO: 53490 - DNA, 40 bp, Homo sapiens
attatgctatactaggaaataaaacaatatttagtaaatg

SEQ ID NO: 53491 - DNA, 40 bp, Homo sapiens
catttactaaatattgttttatttcctagtatagcataat

SEQ ID NO: 53492 - DNA, 40 bp, Homo sapiens
ttatgctatactaggaaataaaacaatatttagtaaatgt

SEQ ID NO: 53493 - DNA, 40 bp, Homo sapiens
acatttactaaatattgttttatttcctagtatagcataa

SEQ ID NO: 53494 - DNA, 40 bp, Homo sapiens
tatgctatactaggaaataaaacaatatttagtaaatgtt

SEQ ID NO: 53495 - DNA, 40 bp, Homo sapiens
aacatttactaaatattgttttatttcctagtatagcata

SEQ ID NO: 53496 - DNA, 40 bp, Homo sapiens
atgctatactaggaaataaaacaatatttagtaaatgttt

SEQ ID NO: 53497 - DNA, 40 bp, Homo sapiens
aaacatttactaaatattgttttatttcctagtatagcat

SEQ ID NO: 53498 - DNA, 40 bp, Homo sapiens
tgctatactaggaaataaaacaatatttagtaaatgtttt

SEQ ID NO: 53499 - DNA, 40 bp, Homo sapiens
aaaacatttactaaatattgttttatttcctagtatagca

SEQ ID NO: 53500 - DNA, 40 bp, Homo sapiens
gctatactaggaaataaaacaatatttagtaaatgttttt

SEQ ID NO: 53501 - DNA, 40 bp, Homo sapiens
aaaaacatttactaaatattgttttatttcctagtatagc

SEQ ID NO: 53502 - DNA, 40 bp, Homo sapiens
ctatactaggaaataaaacaatatttagtaaatgtttttg

SEQ ID NO: 53503 - DNA, 40 bp, Homo sapiens
caaaaacatttactaaatattgttttatttcctagtatag

SEQ ID NO: 53504 - DNA, 40 bp, Homo sapiens
tatactaggaaataaaacaatatttagtaaatgtttttgt

SEQ ID NO: 53505 - DNA, 40 bp, Homo sapiens
acaaaaacatttactaaatattgttttatttcctagtata

SEQ ID NO: 53506 - DNA, 40 bp, Homo sapiens
atactaggaaataaaacaatatttagtaaatgtttttgtc

SEQ ID NO: 53507 - DNA, 40 bp, Homo sapiens
gacaaaaacatttactaaatattgttttatttcctagtat

SEQ ID NO: 53508 - DNA, 40 bp, Homo sapiens
tactaggaaataaaacaatatttagtaaatgtttttgtct

SEQ ID NO: 53509 - DNA, 40 bp, Homo sapiens
agacaaaaacatttactaaatattgttttatttcctagta

SEQ ID NO: 53510 - DNA, 40 bp, Homo sapiens
actaggaaataaaacaatatttagtaaatgtttttgtctc

SEQ ID NO: 53511 - DNA, 40 bp, Homo sapiens
gagacaaaaacatttactaaatattgttttatttcctagt

SEQ ID NO: 53512 - DNA, 40 bp, Homo sapiens
ctaggaaataaaacaatatttagtaaatgtttttgtctct

SEQ ID NO: 53513 - DNA, 40 bp, Homo sapiens
agagacaaaaacatttactaaatattgttttatttcctag

SEQ ID NO: 53514 - DNA, 40 bp, Homo sapiens
taggaaataaaacaatatttagtaaatgtttttgtctctt

SEQ ID NO: 53515 - DNA, 40 bp, Homo sapiens
aagagacaaaaacatttactaaatattgttttatttccta

SEQ ID NO: 53516 - DNA, 40 bp, Homo sapiens
aggaaataaaacaatatttagtaaatgtttttgtctcttg

SEQ ID NO: 53517 - DNA, 40 bp, Homo sapiens
caagagacaaaaacatttactaaatattgttttatttcct

SEQ ID NO: 53518 - DNA, 40 bp, Homo sapiens
ggaaataaaacaatatttagtaaatgtttttgtctcttga

SEQ ID NO: 53519 - DNA, 40 bp, Homo sapiens
tcaagagacaaaaacatttactaaatattgttttatttcc

SEQ ID NO: 53520 - DNA, 40 bp, Homo sapiens
gaaataaaacaatatttagtaaatgtttttgtctcttgag

SEQ ID NO: 53521 - DNA, 40 bp, Homo sapiens
ctcaagagacaaaaacatttactaaatattgttttatttc

SEQ ID NO: 53522 - DNA, 40 bp, Homo sapiens
aaataaaacaatatttagtaaatgtttttgtctcttgaga

SEQ ID NO: 53523 - DNA, 40 bp, Homo sapiens
tctcaagagacaaaaacatttactaaatattgttttattt

SEQ ID NO: 53524 - DNA, 40 bp, Homo sapiens
aataaaacaatatttagtaaatgtttttgtctcttgagag

SEQ ID NO: 53525 - DNA, 40 bp, Homo sapiens
ctctcaagagacaaaaacatttactaaatattgttttatt

SEQ ID NO: 53526 - DNA, 40 bp, Homo sapiens
ataaaacaatatttagtaaatgtttttgtctcttgagagg

SEQ ID NO: 53527 - DNA, 40 bp, Homo sapiens
cctctcaagagacaaaaacatttactaaatattgttttat

SEQ ID NO: 53528 - DNA, 40 bp, Homo sapiens
taaaacaatatttagtaaatgtttttgtctcttgagaggg

SEQ ID NO: 53529 - DNA, 40 bp, Homo sapiens
ccctctcaagagacaaaaacatttactaaatattgtttta

SEQ ID NO: 53530 - DNA, 40 bp, Homo sapiens
aaaacaatatttagtaaatgtttttgtctcttgagagggc

SEQ ID NO: 53531 - DNA, 40 bp, Homo sapiens
gccctctcaagagacaaaaacatttactaaatattgtttt

SEQ ID NO: 53532 - DNA, 40 bp, Homo sapiens
aaacaatatttagtaaatgtttttgtctcttgagagggca

SEQ ID NO: 53533 - DNA, 40 bp, Homo sapiens
tgccctctcaagagacaaaaacatttactaaatattgttt

SEQ ID NO: 53534 - DNA, 40 bp, Homo sapiens
aacaatatttagtaaatgtttttgtctcttgagagggcat

SEQ ID NO: 53535 - DNA, 40 bp, Homo sapiens
atgccctctcaagagacaaaaacatttactaaatattgtt

SEQ ID NO: 53536 - DNA, 40 bp, Homo sapiens
acaatatttagtaaatgtttttgtctcttgagagggcatt

SEQ ID NO: 53537 - DNA, 40 bp, Homo sapiens
aatgccctctcaagagacaaaaacatttactaaatattgt

SEQ ID NO: 53538 - DNA, 40 bp, Homo sapiens
caatatttagtaaatgtttttgtctcttgagagggcattg

SEQ ID NO: 53539 - DNA, 40 bp, Homo sapiens
caatgccctctcaagagacaaaaacatttactaaatattg

SEQ ID NO: 53540 - DNA, 40 bp, Homo sapiens
aatatttagtaaatgtttttgtctcttgagagggcattgc

SEQ ID NO: 53541 - DNA, 40 bp, Homo sapiens
gcaatgccctctcaagagacaaaaacatttactaaatatt

SEQ ID NO: 53542 - DNA, 40 bp, Homo sapiens
atatttagtaaatgtttttgtctcttgagagggcattgct

SEQ ID NO: 53543 - DNA, 40 bp, Homo sapiens
agcaatgccctctcaagagacaaaaacatttactaaatat

SEQ ID NO: 53544 - DNA, 40 bp, Homo sapiens
tatttagtaaatgtttttgtctcttgagagggcattgctt

SEQ ID NO: 53545 - DNA, 40 bp, Homo sapiens
aagcaatgccctctcaagagacaaaaacatttactaaata

SEQ ID NO: 53546 - DNA, 40 bp, Homo sapiens
atttagtaaatgtttttgtctcttgagagggcattgcttc

SEQ ID NO: 53547 - DNA, 40 bp, Homo sapiens
gaagcaatgccctctcaagagacaaaaacatttactaaat

SEQ ID NO: 53548 - DNA, 40 bp, Homo sapiens
tttagtaaatgtttttgtctcttgagagggcattgcttct

SEQ ID NO: 53549 - DNA, 40 bp, Homo sapiens
agaagcaatgccctctcaagagacaaaaacatttactaaa

SEQ ID NO: 53550 - DNA, 40 bp, Homo sapiens
ttagtaaatgtttttgtctcttgagagggcattgcttctt

SEQ ID NO: 53551 - DNA, 40 bp, Homo sapiens
aagaagcaatgccctctcaagagacaaaaacatttactaa

SEQ ID NO: 53552 - DNA, 40 bp, Homo sapiens
tagtaaatgtttttgtctcttgagagggcattgcttctta

SEQ ID NO: 53553 - DNA, 40 bp, Homo sapiens
taagaagcaatgccctctcaagagacaaaaacatttacta

SEQ ID NO: 53554 - DNA, 40 bp, Homo sapiens
agtaaatgtttttgtctcttgagagggcattgcttcttaa

SEQ ID NO: 53555 - DNA, 40 bp, Homo sapiens
ttaagaagcaatgccctctcaagagacaaaaacatttact

SEQ ID NO: 53556 - DNA, 40 bp, Homo sapiens
gtaaatgtttttgtctcttgagagggcattgcttcttaat

SEQ ID NO: 53557 - DNA, 40 bp, Homo sapiens
attaagaagcaatgccctctcaagagacaaaaacatttac

SEQ ID NO: 53558 - DNA, 40 bp, Homo sapiens
taaatgtttttgtctcttgagagggcattgcttcttaatc

SEQ ID NO: 53559 - DNA, 40 bp, Homo sapiens
gattaagaagcaatgccctctcaagagacaaaaacattta

SEQ ID NO: 53560 - DNA, 40 bp, Homo sapiens
aaatgtttttgtctcttgagagggcattgcttcttaatcc

SEQ ID NO: 53561 - DNA, 40 bp, Homo sapiens
ggattaagaagcaatgccctctcaagagacaaaaacattt

SEQ ID NO: 53562 - DNA, 40 bp, Homo sapiens
aatgtttttgtctcttgagagggcattgcttcttaatcca

SEQ ID NO: 53563 - DNA, 40 bp, Homo sapiens
tggattaagaagcaatgccctctcaagagacaaaaacatt

SEQ ID NO: 53564 - DNA, 40 bp, Homo sapiens
atgtttttgtctcttgagagggcattgcttcttaatccag

SEQ ID NO: 53565 - DNA, 40 bp, Homo sapiens
ctggattaagaagcaatgccctctcaagagacaaaaacat

SEQ ID NO: 53566 - DNA, 40 bp, Homo sapiens
tgtttttgtctcttgagagggcattgcttcttaatccagt

SEQ ID NO: 53567 - DNA, 40 bp, Homo sapiens
actggattaagaagcaatgccctctcaagagacaaaaaca

SEQ ID NO: 53568 - DNA, 40 bp, Homo sapiens
gtttttgtctcttgagagggcattgcttcttaatccagtg

SEQ ID NO: 53569 - DNA, 40 bp, Homo sapiens
cactggattaagaagcaatgccctctcaagagacaaaaac

SEQ ID NO: 53570 - DNA, 40 bp, Homo sapiens
tttttgtctcttgagagggcattgcttcttaatccagtgt

SEQ ID NO: 53571 - DNA, 40 bp, Homo sapiens
acactggattaagaagcaatgccctctcaagagacaaaaa

SEQ ID NO: 53572 - DNA, 40 bp, Homo sapiens
ttttgtctcttgagagggcattgcttcttaatccagtgtc

SEQ ID NO: 53573 - DNA, 40 bp, Homo sapiens
gacactggattaagaagcaatgccctctcaagagacaaaa

SEQ ID NO: 53574 - DNA, 40 bp, Homo sapiens
tttgtctcttgagagggcattgcttcttaatccagtgtcc

SEQ ID NO: 53575 - DNA, 40 bp, Homo sapiens
ggacactggattaagaagcaatgccctctcaagagacaaa

SEQ ID NO: 53576 - DNA, 40 bp, Homo sapiens
ttgtctcttgagagggcattgcttcttaatccagtgtcca

SEQ ID NO: 53577 - DNA, 40 bp, Homo sapiens
tggacactggattaagaagcaatgccctctcaagagacaa

SEQ ID NO: 53578 - DNA, 40 bp, Homo sapiens
tgtctcttgagagggcattgcttcttaatccagtgtccat

SEQ ID NO: 53579 - DNA, 40 bp, Homo sapiens
atggacactggattaagaagcaatgccctctcaagagaca

SEQ ID NO: 53580 - DNA, 40 bp, Homo sapiens
gtctcttgagagggcattgcttcttaatccagtgtccatg

SEQ ID NO: 53581 - DNA, 40 bp, Homo sapiens
catggacactggattaagaagcaatgccctctcaagagac

SEQ ID NO: 53582 - DNA, 40 bp, Homo sapiens
tctcttgagagggcattgcttcttaatccagtgtccatgg

SEQ ID NO: 53583 - DNA, 40 bp, Homo sapiens
ccatggacactggattaagaagcaatgccctctcaagaga

SEQ ID NO: 53584 - DNA, 40 bp, Homo sapiens
ctcttgagagggcattgcttcttaatccagtgtccatggt

SEQ ID NO: 53585 - DNA, 40 bp, Homo sapiens
accatggacactggattaagaagcaatgccctctcaagag

SEQ ID NO: 53586 - DNA, 40 bp, Homo sapiens
tcttgagagggcattgcttcttaatccagtgtccatggta

SEQ ID NO: 53587 - DNA, 40 bp, Homo sapiens
taccatggacactggattaagaagcaatgccctctcaaga

SEQ ID NO: 53588 - DNA, 40 bp, Homo sapiens
cttgagagggcattgcttcttaatccagtgtccatggtac

SEQ ID NO: 53589 - DNA, 40 bp, Homo sapiens
gtaccatggacactggattaagaagcaatgccctctcaag

SEQ ID NO: 53590 - DNA, 40 bp, Homo sapiens
ttgagagggcattgcttcttaatccagtgtccatggtact

SEQ ID NO: 53591 - DNA, 40 bp, Homo sapiens
agtaccatggacactggattaagaagcaatgccctctcaa

SEQ ID NO: 53592 - DNA, 40 bp, Homo sapiens
tgagagggcattgcttcttaatccagtgtccatggtactg

SEQ ID NO: 53593 - DNA, 40 bp, Homo sapiens
cagtaccatggacactggattaagaagcaatgccctctca

SEQ ID NO: 53594 - DNA, 40 bp, Homo sapiens
gagagggcattgcttcttaatccagtgtccatggtactgc

SEQ ID NO: 53595 - DNA, 40 bp, Homo sapiens
gcagtaccatggacactggattaagaagcaatgccctctc

SEQ ID NO: 53596 - DNA, 40 bp, Homo sapiens
agagggcattgcttcttaatccagtgtccatggtactgct

SEQ ID NO: 53597 - DNA, 40 bp, Homo sapiens
agcagtaccatggacactggattaagaagcaatgccctct

SEQ ID NO: 53598 - DNA, 40 bp, Homo sapiens
gagggcattgcttcttaatccagtgtccatggtactgctt

SEQ ID NO: 53599 - DNA, 40 bp, Homo sapiens
aagcagtaccatggacactggattaagaagcaatgccctc

SEQ ID NO: 53600 - DNA, 40 bp, Homo sapiens
agggcattgcttcttaatccagtgtccatggtactgcttt

SEQ ID NO: 53601 - DNA, 40 bp, Homo sapiens
aaagcagtaccatggacactggattaagaagcaatgccct

SEQ ID NO: 53602 - DNA, 40 bp, Homo sapiens
gggcattgcttcttaatccagtgtccatggtactgctttt

SEQ ID NO: 53603 - DNA, 40 bp, Homo sapiens
aaaagcagtaccatggacactggattaagaagcaatgccc

SEQ ID NO: 53604 - DNA, 40 bp, Homo sapiens
ggcattgcttcttaatccagtgtccatggtactgcttttg

SEQ ID NO: 53605 - DNA, 40 bp, Homo sapiens
caaaagcagtaccatggacactggattaagaagcaatgcc

SEQ ID NO: 53606 - DNA, 40 bp, Homo sapiens
gcattgcttcttaatccagtgtccatggtactgcttttgg

SEQ ID NO: 53607 - DNA, 40 bp, Homo sapiens
ccaaaagcagtaccatggacactggattaagaagcaatgc

SEQ ID NO: 53608 - DNA, 40 bp, Homo sapiens
cattgcttcttaatccagtgtccatggtactgcttttggc

SEQ ID NO: 53609 - DNA, 40 bp, Homo sapiens
gccaaaagcagtaccatggacactggattaagaagcaatg

SEQ ID NO: 53610 - DNA, 40 bp, Homo sapiens
attgcttcttaatccagtgtccatggtactgcttttggct

SEQ ID NO: 53611 - DNA, 40 bp, Homo sapiens
agccaaaagcagtaccatggacactggattaagaagcaat

SEQ ID NO: 53612 - DNA, 40 bp, Homo sapiens
ttgcttcttaatccagtgtccatggtactgcttttggctt

SEQ ID NO: 53613 - DNA, 40 bp, Homo sapiens
aagccaaaagcagtaccatggacactggattaagaagcaa

SEQ ID NO: 53614 - DNA, 40 bp, Homo sapiens
tgcttcttaatccagtgtccatggtactgcttttggcttt

SEQ ID NO: 53615 - DNA, 40 bp, Homo sapiens
aaagccaaaagcagtaccatggacactggattaagaagca

SEQ ID NO: 53616 - DNA, 40 bp, Homo sapiens
gcttcttaatccagtgtccatggtactgcttttggctttg

SEQ ID NO: 53617 - DNA, 40 bp, Homo sapiens
caaagccaaaagcagtaccatggacactggattaagaagc

SEQ ID NO: 53618 - DNA, 40 bp, Homo sapiens
cttcttaatccagtgtccatggtactgcttttggctttgg

SEQ ID NO: 53619 - DNA, 40 bp, Homo sapiens
ccaaagccaaaagcagtaccatggacactggattaagaag

SEQ ID NO: 53620 - DNA, 40 bp, Homo sapiens
ttcttaatccagtgtccatggtactgcttttggctttggt

SEQ ID NO: 53621 - DNA, 40 bp, Homo sapiens
accaaagccaaaagcagtaccatggacactggattaagaa

SEQ ID NO: 53622 - DNA, 40 bp, Homo sapiens
tcttaatccagtgtccatggtactgcttttggctttggtt

SEQ ID NO: 53623 - DNA, 40 bp, Homo sapiens
aaccaaagccaaaagcagtaccatggacactggattaaga

SEQ ID NO: 53624 - DNA, 40 bp, Homo sapiens
cttaatccagtgtccatggtactgcttttggctttggttt

SEQ ID NO: 53625 - DNA, 40 bp, Homo sapiens
aaaccaaagccaaaagcagtaccatggacactggattaag

SEQ ID NO: 53626 - DNA, 40 bp, Homo sapiens
ttaatccagtgtccatggtactgcttttggctttggtttc

SEQ ID NO: 53627 - DNA, 40 bp, Homo sapiens
gaaaccaaagccaaaagcagtaccatggacactggattaa

SEQ ID NO: 53628 - DNA, 40 bp, Homo sapiens
taatccagtgtccatggtactgcttttggctttggtttct

SEQ ID NO: 53629 - DNA, 40 bp, Homo sapiens
agaaaccaaagccaaaagcagtaccatggacactggatta

SEQ ID NO: 53630 - DNA, 40 bp, Homo sapiens
aatccagtgtccatggtactgcttttggctttggtttctt

SEQ ID NO: 53631 - DNA, 40 bp, Homo sapiens
aagaaaccaaagccaaaagcagtaccatggacactggatt

SEQ ID NO: 53632 - DNA, 40 bp, Homo sapiens
atccagtgtccatggtactgcttttggctttggtttcttt

SEQ ID NO: 53633 - DNA, 40 bp, Homo sapiens
aaagaaaccaaagccaaaagcagtaccatggacactggat

SEQ ID NO: 53634 - DNA, 40 bp, Homo sapiens
tccagtgtccatggtactgcttttggctttggtttctttc

SEQ ID NO: 53635 - DNA, 40 bp, Homo sapiens
gaaagaaaccaaagccaaaagcagtaccatggacactgga

SEQ ID NO: 53636 - DNA, 40 bp, Homo sapiens
ccagtgtccatggtactgcttttggctttggtttctttct

SEQ ID NO: 53637 - DNA, 40 bp, Homo sapiens
agaaagaaaccaaagccaaaagcagtaccatggacactgg

SEQ ID NO: 53638 - DNA, 40 bp, Homo sapiens
cagtgtccatggtactgcttttggctttggtttctttcta

SEQ ID NO: 53639 - DNA, 40 bp, Homo sapiens
tagaaagaaaccaaagccaaaagcagtaccatggacactg

SEQ ID NO: 53640 - DNA, 40 bp, Homo sapiens
agtgtccatggtactgcttttggctttggtttctttctac

SEQ ID NO: 53641 - DNA, 40 bp, Homo sapiens
gtagaaagaaaccaaagccaaaagcagtaccatggacact

SEQ ID NO: 53642 - DNA, 40 bp, Homo sapiens
gtgtccatggtactgcttttggctttggtttctttctaca

SEQ ID NO: 53643 - DNA, 40 bp, Homo sapiens
tgtagaaagaaaccaaagccaaaagcagtaccatggacac

SEQ ID NO: 53644 - DNA, 40 bp, Homo sapiens
tgtccatggtactgcttttggctttggtttctttctacat

SEQ ID NO: 53645 - DNA, 40 bp, Homo sapiens
atgtagaaagaaaccaaagccaaaagcagtaccatggaca

SEQ ID NO: 53646 - DNA, 40 bp, Homo sapiens
gtccatggtactgcttttggctttggtttctttctacatt

SEQ ID NO: 53647 - DNA, 40 bp, Homo sapiens
aatgtagaaagaaaccaaagccaaaagcagtaccatggac

SEQ ID NO: 53648 - DNA, 40 bp, Homo sapiens
tccatggtactgcttttggctttggtttctttctacattg

SEQ ID NO: 53649 - DNA, 40 bp, Homo sapiens
caatgtagaaagaaaccaaagccaaaagcagtaccatgga

SEQ ID NO: 53650 - DNA, 40 bp, Homo sapiens
ccatggtactgcttttggctttggtttctttctacattga

SEQ ID NO: 53651 - DNA, 40 bp, Homo sapiens
tcaatgtagaaagaaaccaaagccaaaagcagtaccatgg

SEQ ID NO: 53652 - DNA, 40 bp, Homo sapiens
catggtactgcttttggctttggtttctttctacattgaa

SEQ ID NO: 53653 - DNA, 40 bp, Homo sapiens
ttcaatgtagaaagaaaccaaagccaaaagcagtaccatg

SEQ ID NO: 53654 - DNA, 40 bp, Homo sapiens
atggtactgcttttggctttggtttctttctacattgaaa

SEQ ID NO: 53655 - DNA, 40 bp, Homo sapiens
tttcaatgtagaaagaaaccaaagccaaaagcagtaccat

SEQ ID NO: 53656 - DNA, 40 bp, Homo sapiens
tggtactgcttttggctttggtttctttctacattgaaaa

SEQ ID NO: 53657 - DNA, 40 bp, Homo sapiens
ttttcaatgtagaaagaaaccaaagccaaaagcagtacca

SEQ ID NO: 53658 - DNA, 40 bp, Homo sapiens
ggtactgcttttggctttggtttctttctacattgaaaat

SEQ ID NO: 53659 - DNA, 40 bp, Homo sapiens
attttcaatgtagaaagaaaccaaagccaaaagcagtacc

SEQ ID NO: 53660 - DNA, 40 bp, Homo sapiens
gtactgcttttggctttggtttctttctacattgaaaatt

SEQ ID NO: 53661 - DNA, 40 bp, Homo sapiens
aattttcaatgtagaaagaaaccaaagccaaaagcagtac

SEQ ID NO: 53662 - DNA, 40 bp, Homo sapiens
tactgcttttggctttggtttctttctacattgaaaattt

SEQ ID NO: 53663 - DNA, 40 bp, Homo sapiens
aaattttcaatgtagaaagaaaccaaagccaaaagcagta

SEQ ID NO: 53664 - DNA, 40 bp, Homo sapiens
actgcttttggctttggtttctttctacattgaaaatttc

SEQ ID NO: 53665 - DNA, 40 bp, Homo sapiens
gaaattttcaatgtagaaagaaaccaaagccaaaagcagt

SEQ ID NO: 53666 - DNA, 40 bp, Homo sapiens
ctgcttttggctttggtttctttctacattgaaaatttct

SEQ ID NO: 53667 - DNA, 40 bp, Homo sapiens
agaaattttcaatgtagaaagaaaccaaagccaaaagcag

SEQ ID NO: 53668 - DNA, 40 bp, Homo sapiens
tgcttttggctttggtttctttctacattgaaaatttctc

SEQ ID NO: 53669 - DNA, 40 bp, Homo sapiens
gagaaattttcaatgtagaaagaaaccaaagccaaaagca

SEQ ID NO: 53670 - DNA, 40 bp, Homo sapiens
gcttttggctttggtttctttctacattgaaaatttctct

SEQ ID NO: 53671 - DNA, 40 bp, Homo sapiens
agagaaattttcaatgtagaaagaaaccaaagccaaaagc

SEQ ID NO: 53672 - DNA, 40 bp, Homo sapiens
cttttggctttggtttctttctacattgaaaatttctctt

SEQ ID NO: 53673 - DNA, 40 bp, Homo sapiens
aagagaaattttcaatgtagaaagaaaccaaagccaaaag

SEQ ID NO: 53674 - DNA, 40 bp, Homo sapiens
ttttggctttggtttctttctacattgaaaatttctcttc

SEQ ID NO: 53675 - DNA, 40 bp, Homo sapiens
gaagagaaattttcaatgtagaaagaaaccaaagccaaaa

SEQ ID NO: 53676 - DNA, 40 bp, Homo sapiens
tttggctttggtttctttctacattgaaaatttctcttca

SEQ ID NO: 53677 - DNA, 40 bp, Homo sapiens
tgaagagaaattttcaatgtagaaagaaaccaaagccaaa

SEQ ID NO: 53678 - DNA, 40 bp, Homo sapiens
ttggctttggtttctttctacattgaaaatttctcttcaa

SEQ ID NO: 53679 - DNA, 40 bp, Homo sapiens
ttgaagagaaattttcaatgtagaaagaaaccaaagccaa

SEQ ID NO: 53680 - DNA, 40 bp, Homo sapiens
tggctttggtttctttctacattgaaaatttctcttcaat

SEQ ID NO: 53681 - DNA, 40 bp, Homo sapiens
attgaagagaaattttcaatgtagaaagaaaccaaagcca

SEQ ID NO: 53682 - DNA, 40 bp, Homo sapiens
ggctttggtttctttctacattgaaaatttctcttcaatt

SEQ ID NO: 53683 - DNA, 40 bp, Homo sapiens
aattgaagagaaattttcaatgtagaaagaaaccaaagcc

SEQ ID NO: 53684 - DNA, 40 bp, Homo sapiens
gctttggtttctttctacattgaaaatttctcttcaattc

SEQ ID NO: 53685 - DNA, 40 bp, Homo sapiens
gaattgaagagaaattttcaatgtagaaagaaaccaaagc

SEQ ID NO: 53686 - DNA, 40 bp, Homo sapiens
ctttggtttctttctacattgaaaatttctcttcaattct

SEQ ID NO: 53687 - DNA, 40 bp, Homo sapiens
agaattgaagagaaattttcaatgtagaaagaaaccaaag

SEQ ID NO: 53688 - DNA, 40 bp, Homo sapiens
tttggtttctttctacattgaaaatttctcttcaattctg

SEQ ID NO: 53689 - DNA, 40 bp, Homo sapiens
cagaattgaagagaaattttcaatgtagaaagaaaccaaa

SEQ ID NO: 53690 - DNA, 40 bp, Homo sapiens
ttggtttctttctacattgaaaatttctcttcaattctga

SEQ ID NO: 53691 - DNA, 40 bp, Homo sapiens
tcagaattgaagagaaattttcaatgtagaaagaaaccaa

SEQ ID NO: 53692 - DNA, 40 bp, Homo sapiens
tggtttctttctacattgaaaatttctcttcaattctgag

SEQ ID NO: 53693 - DNA, 40 bp, Homo sapiens
ctcagaattgaagagaaattttcaatgtagaaagaaacca

SEQ ID NO: 53694 - DNA, 40 bp, Homo sapiens
ggtttctttctacattgaaaatttctcttcaattctgagc

SEQ ID NO: 53695 - DNA, 40 bp, Homo sapiens
gctcagaattgaagagaaattttcaatgtagaaagaaacc

SEQ ID NO: 53696 - DNA, 40 bp, Homo sapiens
gtttctttctacattgaaaatttctcttcaattctgagca

SEQ ID NO: 53697 - DNA, 40 bp, Homo sapiens
tgctcagaattgaagagaaattttcaatgtagaaagaaac

SEQ ID NO: 53698 - DNA, 40 bp, Homo sapiens
tttctttctacattgaaaatttctcttcaattctgagcac

SEQ ID NO: 53699 - DNA, 40 bp, Homo sapiens
gtgctcagaattgaagagaaattttcaatgtagaaagaaa

SEQ ID NO: 53700 - DNA, 40 bp, Homo sapiens
ttctttctacattgaaaatttctcttcaattctgagcaca

SEQ ID NO: 53701 - DNA, 40 bp, Homo sapiens
tgtgctcagaattgaagagaaattttcaatgtagaaagaa

SEQ ID NO: 53702 - DNA, 40 bp, Homo sapiens
tctttctacattgaaaatttctcttcaattctgagcacat

SEQ ID NO: 53703 - DNA, 40 bp, Homo sapiens
atgtgctcagaattgaagagaaattttcaatgtagaaaga

SEQ ID NO: 53704 - DNA, 40 bp, Homo sapiens
ctttctacattgaaaatttctcttcaattctgagcacatg

SEQ ID NO: 53705 - DNA, 40 bp, Homo sapiens
catgtgctcagaattgaagagaaattttcaatgtagaaag

SEQ ID NO: 53706 - DNA, 40 bp, Homo sapiens
tttctacattgaaaatttctcttcaattctgagcacatgt

SEQ ID NO: 53707 - DNA, 40 bp, Homo sapiens
acatgtgctcagaattgaagagaaattttcaatgtagaaa

SEQ ID NO: 53708 - DNA, 40 bp, Homo sapiens
ttctacattgaaaatttctcttcaattctgagcacatgtt

SEQ ID NO: 53709 - DNA, 40 bp, Homo sapiens
aacatgtgctcagaattgaagagaaattttcaatgtagaa

SEQ ID NO: 53710 - DNA, 40 bp, Homo sapiens
tctacattgaaaatttctcttcaattctgagcacatgtta

SEQ ID NO: 53711 - DNA, 40 bp, Homo sapiens
taacatgtgctcagaattgaagagaaattttcaatgtaga

SEQ ID NO: 53712 - DNA, 40 bp, Homo sapiens
ctacattgaaaatttctcttcaattctgagcacatgttaa

SEQ ID NO: 53713 - DNA, 40 bp, Homo sapiens
ttaacatgtgctcagaattgaagagaaattttcaatgtag

SEQ ID NO: 53714 - DNA, 40 bp, Homo sapiens
tacattgaaaatttctcttcaattctgagcacatgttaac

SEQ ID NO: 53715 - DNA, 40 bp, Homo sapiens
gttaacatgtgctcagaattgaagagaaattttcaatgta

SEQ ID NO: 53716 - DNA, 40 bp, Homo sapiens
acattgaaaatttctcttcaattctgagcacatgttaaca

SEQ ID NO: 53717 - DNA, 40 bp, Homo sapiens
tgttaacatgtgctcagaattgaagagaaattttcaatgt

SEQ ID NO: 53718 - DNA, 40 bp, Homo sapiens
cattgaaaatttctcttcaattctgagcacatgttaacat

SEQ ID NO: 53719 - DNA, 40 bp, Homo sapiens
atgttaacatgtgctcagaattgaagagaaattttcaatg

SEQ ID NO: 53720 - DNA, 40 bp, Homo sapiens
attgaaaatttctcttcaattctgagcacatgttaacatt

SEQ ID NO: 53721 - DNA, 40 bp, Homo sapiens
aatgttaacatgtgctcagaattgaagagaaattttcaat

SEQ ID NO: 53722 - DNA, 40 bp, Homo sapiens
ttgaaaatttctcttcaattctgagcacatgttaacattt

SEQ ID NO: 53723 - DNA, 40 bp, Homo sapiens
aaatgttaacatgtgctcagaattgaagagaaattttcaa

SEQ ID NO: 53724 - DNA, 40 bp, Homo sapiens
tgaaaatttctcttcaattctgagcacatgttaacattta

SEQ ID NO: 53725 - DNA, 40 bp, Homo sapiens
taaatgttaacatgtgctcagaattgaagagaaattttca

SEQ ID NO: 53726 - DNA, 40 bp, Homo sapiens
gaaaatttctcttcaattctgagcacatgttaacatttag

SEQ ID NO: 53727 - DNA, 40 bp, Homo sapiens
ctaaatgttaacatgtgctcagaattgaagagaaattttc

SEQ ID NO: 53728 - DNA, 40 bp, Homo sapiens
aaaatttctcttcaattctgagcacatgttaacatttaga

SEQ ID NO: 53729 - DNA, 40 bp, Homo sapiens
tctaaatgttaacatgtgctcagaattgaagagaaatttt

SEQ ID NO: 53730 - DNA, 40 bp, Homo sapiens
aaatttctcttcaattctgagcacatgttaacatttagaa

SEQ ID NO: 53731 - DNA, 40 bp, Homo sapiens
ttctaaatgttaacatgtgctcagaattgaagagaaattt

SEQ ID NO: 53732 - DNA, 40 bp, Homo sapiens
aatttctcttcaattctgagcacatgttaacatttagaat

SEQ ID NO: 53733 - DNA, 40 bp, Homo sapiens
attctaaatgttaacatgtgctcagaattgaagagaaatt

SEQ ID NO: 53734 - DNA, 40 bp, Homo sapiens
atttctcttcaattctgagcacatgttaacatttagaatt

SEQ ID NO: 53735 - DNA, 40 bp, Homo sapiens
aattctaaatgttaacatgtgctcagaattgaagagaaat

SEQ ID NO: 53736 - DNA, 40 bp, Homo sapiens
tttctcttcaattctgagcacatgttaacatttagaattc

SEQ ID NO: 53737 - DNA, 40 bp, Homo sapiens
gaattctaaatgttaacatgtgctcagaattgaagagaaa

SEQ ID NO: 53738 - DNA, 40 bp, Homo sapiens
ttctcttcaattctgagcacatgttaacatttagaattca

SEQ ID NO: 53739 - DNA, 40 bp, Homo sapiens
tgaattctaaatgttaacatgtgctcagaattgaagagaa

SEQ ID NO: 53740 - DNA, 40 bp, Homo sapiens
tctcttcaattctgagcacatgttaacatttagaattcaa

SEQ ID NO: 53741 - DNA, 40 bp, Homo sapiens
ttgaattctaaatgttaacatgtgctcagaattgaagaga

SEQ ID NO: 53742 - DNA, 40 bp, Homo sapiens
ctcttcaattctgagcacatgttaacatttagaattcaag

SEQ ID NO: 53743 - DNA, 40 bp, Homo sapiens
cttgaattctaaatgttaacatgtgctcagaattgaagag

SEQ ID NO: 53744 - DNA, 40 bp, Homo sapiens
tcttcaattctgagcacatgttaacatttagaattcaaga

SEQ ID NO: 53745 - DNA, 40 bp, Homo sapiens
tcttgaattctaaatgttaacatgtgctcagaattgaaga

SEQ ID NO: 53746 - DNA, 40 bp, Homo sapiens
cttcaattctgagcacatgttaacatttagaattcaagag

SEQ ID NO: 53747 - DNA, 40 bp, Homo sapiens
ctcttgaattctaaatgttaacatgtgctcagaattgaag

SEQ ID NO: 53748 - DNA, 40 bp, Homo sapiens
ttcaattctgagcacatgttaacatttagaattcaagagg

SEQ ID NO: 53749 - DNA, 40 bp, Homo sapiens
cctcttgaattctaaatgttaacatgtgctcagaattgaa

SEQ ID NO: 53750 - DNA, 40 bp, Homo sapiens
tcaattctgagcacatgttaacatttagaattcaagaggt

SEQ ID NO: 53751 - DNA, 40 bp, Homo sapiens
acctcttgaattctaaatgttaacatgtgctcagaattga

SEQ ID NO: 53752 - DNA, 40 bp, Homo sapiens
caattctgagcacatgttaacatttagaattcaagaggtg

SEQ ID NO: 53753 - DNA, 40 bp, Homo sapiens
cacctcttgaattctaaatgttaacatgtgctcagaattg

SEQ ID NO: 53754 - DNA, 40 bp, Homo sapiens
aattctgagcacatgttaacatttagaattcaagaggtgg

SEQ ID NO: 53755 - DNA, 40 bp, Homo sapiens
ccacctcttgaattctaaatgttaacatgtgctcagaatt

SEQ ID NO: 53756 - DNA, 40 bp, Homo sapiens
attctgagcacatgttaacatttagaattcaagaggtggg

SEQ ID NO: 53757 - DNA, 40 bp, Homo sapiens
cccacctcttgaattctaaatgttaacatgtgctcagaat

SEQ ID NO: 53758 - DNA, 40 bp, Homo sapiens
ttctgagcacatgttaacatttagaattcaagaggtgggg

SEQ ID NO: 53759 - DNA, 40 bp, Homo sapiens
ccccacctcttgaattctaaatgttaacatgtgctcagaa

SEQ ID NO: 53760 - DNA, 40 bp, Homo sapiens
tctgagcacatgttaacatttagaattcaagaggtgggga

SEQ ID NO: 53761 - DNA, 40 bp, Homo sapiens
tccccacctcttgaattctaaatgttaacatgtgctcaga

SEQ ID NO: 53762 - DNA, 40 bp, Homo sapiens
ctgagcacatgttaacatttagaattcaagaggtggggat

SEQ ID NO: 53763 - DNA, 40 bp, Homo sapiens
atccccacctcttgaattctaaatgttaacatgtgctcag

SEQ ID NO: 53764 - DNA, 40 bp, Homo sapiens
tgagcacatgttaacatttagaattcaagaggtggggatt

SEQ ID NO: 53765 - DNA, 40 bp, Homo sapiens
aatccccacctcttgaattctaaatgttaacatgtgctca

SEQ ID NO: 53766 - DNA, 40 bp, Homo sapiens
gagcacatgttaacatttagaattcaagaggtggggattt

SEQ ID NO: 53767 - DNA, 40 bp, Homo sapiens
aaatccccacctcttgaattctaaatgttaacatgtgctc

SEQ ID NO: 53768 - DNA, 40 bp, Homo sapiens
agcacatgttaacatttagaattcaagaggtggggatttt

SEQ ID NO: 53769 - DNA, 40 bp, Homo sapiens
aaaatccccacctcttgaattctaaatgttaacatgtgct

SEQ ID NO: 53770 - DNA, 40 bp, Homo sapiens
gcacatgttaacatttagaattcaagaggtggggattttt

SEQ ID NO: 53771 - DNA, 40 bp, Homo sapiens
aaaaatccccacctcttgaattctaaatgttaacatgtgc

SEQ ID NO: 53772 - DNA, 40 bp, Homo sapiens
cacatgttaacatttagaattcaagaggtggggatttttt

SEQ ID NO: 53773 - DNA, 40 bp, Homo sapiens
aaaaaatccccacctcttgaattctaaatgttaacatgtg

SEQ ID NO: 53774 - DNA, 40 bp, Homo sapiens
acatgttaacatttagaattcaagaggtggggattttttt

SEQ ID NO: 53775 - DNA, 40 bp, Homo sapiens
aaaaaaatccccacctcttgaattctaaatgttaacatgt

SEQ ID NO: 53776 - DNA, 40 bp, Homo sapiens
catgttaacatttagaattcaagaggtggggatttttttt

SEQ ID NO: 53777 - DNA, 40 bp, Homo sapiens
aaaaaaaatccccacctcttgaattctaaatgttaacatg

SEQ ID NO: 53778 - DNA, 40 bp, Homo sapiens
atgttaacatttagaattcaagaggtggggattttttttt

SEQ ID NO: 53779 - DNA, 40 bp, Homo sapiens
aaaaaaaaatccccacctcttgaattctaaatgttaacat

SEQ ID NO: 53780 - DNA, 40 bp, Homo sapiens
tgttaacatttagaattcaagaggtggggatttttttttc

SEQ ID NO: 53781 - DNA, 40 bp, Homo sapiens
gaaaaaaaaatccccacctcttgaattctaaatgttaaca

SEQ ID NO: 53782 - DNA, 40 bp, Homo sapiens
gttaacatttagaattcaagaggtggggatttttttttcc

SEQ ID NO: 53783 - DNA, 40 bp, Homo sapiens
ggaaaaaaaaatccccacctcttgaattctaaatgttaac

SEQ ID NO: 53784 - DNA, 40 bp, Homo sapiens
ttaacatttagaattcaagaggtggggatttttttttccc

SEQ ID NO: 53785 - DNA, 40 bp, Homo sapiens
gggaaaaaaaaatccccacctcttgaattctaaatgttaa

SEQ ID NO: 53786 - DNA, 40 bp, Homo sapiens
taacatttagaattcaagaggtggggatttttttttccca

SEQ ID NO: 53787 - DNA, 40 bp, Homo sapiens
tgggaaaaaaaaatccccacctcttgaattctaaatgtta

SEQ ID NO: 53788 - DNA, 40 bp, Homo sapiens
aacatttagaattcaagaggtggggatttttttttcccat

SEQ ID NO: 53789 - DNA, 40 bp, Homo sapiens
atgggaaaaaaaaatccccacctcttgaattctaaatgtt

SEQ ID NO: 53790 - DNA, 40 bp, Homo sapiens
acatttagaattcaagaggtggggatttttttttcccatg

SEQ ID NO: 53791 - DNA, 40 bp, Homo sapiens
catgggaaaaaaaaatccccacctcttgaattctaaatgt

SEQ ID NO: 53792 - DNA, 40 bp, Homo sapiens
catttagaattcaagaggtggggatttttttttcccatgg

SEQ ID NO: 53793 - DNA, 40 bp, Homo sapiens
ccatgggaaaaaaaaatccccacctcttgaattctaaatg

SEQ ID NO: 53794 - DNA, 40 bp, Homo sapiens
atttagaattcaagaggtggggatttttttttcccatggt

SEQ ID NO: 53795 - DNA, 40 bp, Homo sapiens
accatgggaaaaaaaaatccccacctcttgaattctaaat

SEQ ID NO: 53796 - DNA, 40 bp, Homo sapiens
tttagaattcaagaggtggggatttttttttcccatggtt

SEQ ID NO: 53797 - DNA, 40 bp, Homo sapiens
aaccatgggaaaaaaaaatccccacctcttgaattctaaa

SEQ ID NO: 53798 - DNA, 40 bp, Homo sapiens
ttagaattcaagaggtggggatttttttttcccatggtta

SEQ ID NO: 53799 - DNA, 40 bp, Homo sapiens
taaccatgggaaaaaaaaatccccacctcttgaattctaa

SEQ ID NO: 53800 - DNA, 40 bp, Homo sapiens
tagaattcaagaggtggggatttttttttcccatggttac

SEQ ID NO: 53801 - DNA, 40 bp, Homo sapiens
gtaaccatgggaaaaaaaaatccccacctcttgaattcta

SEQ ID NO: 53802 - DNA, 40 bp, Homo sapiens
agaattcaagaggtggggatttttttttcccatggttaca

SEQ ID NO: 53803 - DNA, 40 bp, Homo sapiens
tgtaaccatgggaaaaaaaaatccccacctcttgaattct

SEQ ID NO: 53804 - DNA, 40 bp, Homo sapiens
gaattcaagaggtggggatttttttttcccatggttacat

SEQ ID NO: 53805 - DNA, 40 bp, Homo sapiens
atgtaaccatgggaaaaaaaaatccccacctcttgaattc

SEQ ID NO: 53806 - DNA, 40 bp, Homo sapiens
aattcaagaggtggggatttttttttcccatggttacata

SEQ ID NO: 53807 - DNA, 40 bp, Homo sapiens
tatgtaaccatgggaaaaaaaaatccccacctcttgaatt

SEQ ID NO: 53808 - DNA, 40 bp, Homo sapiens
attcaagaggtggggatttttttttcccatggttacatat

SEQ ID NO: 53809 - DNA, 40 bp, Homo sapiens
atatgtaaccatgggaaaaaaaaatccccacctcttgaat

SEQ ID NO: 53810 - DNA, 40 bp, Homo sapiens
ttcaagaggtggggatttttttttcccatggttacatata

SEQ ID NO: 53811 - DNA, 40 bp, Homo sapiens
tatatgtaaccatgggaaaaaaaaatccccacctcttgaa

SEQ ID NO: 53812 - DNA, 40 bp, Homo sapiens
tcaagaggtggggatttttttttcccatggttacatatat

SEQ ID NO: 53813 - DNA, 40 bp, Homo sapiens
atatatgtaaccatgggaaaaaaaaatccccacctcttga

SEQ ID NO: 53814 - DNA, 40 bp, Homo sapiens
caagaggtggggatttttttttcccatggttacatatata

SEQ ID NO: 53815 - DNA, 40 bp, Homo sapiens
tatatatgtaaccatgggaaaaaaaaatccccacctcttg

SEQ ID NO: 53816 - DNA, 40 bp, Homo sapiens
aagaggtggggatttttttttcccatggttacatatatat

SEQ ID NO: 53817 - DNA, 40 bp, Homo sapiens
atatatatgtaaccatgggaaaaaaaaatccccacctctt

SEQ ID NO: 53818 - DNA, 40 bp, Homo sapiens
agaggtggggatttttttttcccatggttacatatatata

SEQ ID NO: 53819 - DNA, 40 bp, Homo sapiens
tatatatatgtaaccatgggaaaaaaaaatccccacctct

SEQ ID NO: 53820 - DNA, 40 bp, Homo sapiens
gaggtggggatttttttttcccatggttacatatatatat

SEQ ID NO: 53821 - DNA, 40 bp, Homo sapiens
atatatatatgtaaccatgggaaaaaaaaatccccacctc

SEQ ID NO: 53822 - DNA, 40 bp, Homo sapiens
aggtggggatttttttttcccatggttacatatatatata

SEQ ID NO: 53823 - DNA, 40 bp, Homo sapiens
tatatatatatgtaaccatgggaaaaaaaaatccccacct

SEQ ID NO: 53824 - DNA, 40 bp, Homo sapiens
ggtggggatttttttttcccatggttacatatatatatat

SEQ ID NO: 53825 - DNA, 40 bp, Homo sapiens
atatatatatatgtaaccatgggaaaaaaaaatccccacc

SEQ ID NO: 53826 - DNA, 40 bp, Homo sapiens
gtggggatttttttttcccatggttacatatatatatata

SEQ ID NO: 53827 - DNA, 40 bp, Homo sapiens
tatatatatatatgtaaccatgggaaaaaaaaatccccac

SEQ ID NO: 53828 - DNA, 40 bp, Homo sapiens
tggggatttttttttcccatggttacatatatatatatat

SEQ ID NO: 53829 - DNA, 40 bp, Homo sapiens
atatatatatatatgtaaccatgggaaaaaaaaatcccca

SEQ ID NO: 53830 - DNA, 40 bp, Homo sapiens
ggggatttttttttcccatggttacatatatatatatata

SEQ ID NO: 53831 - DNA, 40 bp, Homo sapiens
tatatatatatatatgtaaccatgggaaaaaaaaatcccc

SEQ ID NO: 53832 - DNA, 40 bp, Homo sapiens
gggatttttttttcccatggttacatatatatatatatat

SEQ ID NO: 53833 - DNA, 40 bp, Homo sapiens
atatatatatatatatgtaaccatgggaaaaaaaaatccc

SEQ ID NO: 53834 - DNA, 40 bp, Homo sapiens
ggatttttttttcccatggttacatatatatatatatata

SEQ ID NO: 53835 - DNA, 40 bp, Homo sapiens
tatatatatatatatatgtaaccatgggaaaaaaaaatcc

SEQ ID NO: 53836 - DNA, 40 bp, Homo sapiens
gatttttttttcccatggttacatatatatatatatatat

SEQ ID NO: 53837 - DNA, 40 bp, Homo sapiens
atatatatatatatatatgtaaccatgggaaaaaaaaatc

SEQ ID NO: 53838 - DNA, 40 bp, Homo sapiens
atttttttttcccatggttacatatatatatatatatata

SEQ ID NO: 53839 - DNA, 40 bp, Homo sapiens
tatatatatatatatatatgtaaccatgggaaaaaaaaat

SEQ ID NO: 53840 - DNA, 40 bp, Homo sapiens
tttttttttcccatggttacatatatatatatatatatat

SEQ ID NO: 53841 - DNA, 40 bp, Homo sapiens
atatatatatatatatatatgtaaccatgggaaaaaaaaa

SEQ ID NO: 53842 - DNA, 40 bp, Homo sapiens
ttttttttcccatggttacatatatatatatatatatata

SEQ ID NO: 53843 - DNA, 40 bp, Homo sapiens
tatatatatatatatatatatgtaaccatgggaaaaaaaa

SEQ ID NO: 53844 - DNA, 40 bp, Homo sapiens
tttttttcccatggttacatatatatatatatatatatat

SEQ ID NO: 53845 - DNA, 40 bp, Homo sapiens
atatatatatatatatatatatgtaaccatgggaaaaaaa

SEQ ID NO: 53846 - DNA, 40 bp, Homo sapiens
ttttttcccatggttacatatatatatatatatatatata

SEQ ID NO: 53847 - DNA, 40 bp, Homo sapiens
tatatatatatatatatatatatgtaaccatgggaaaaaa

SEQ ID NO: 53848 - DNA, 40 bp, Homo sapiens
tttttcccatggttacatatatatatatatatatatatat

SEQ ID NO: 53849 - DNA, 40 bp, Homo sapiens
atatatatatatatatatatatatgtaaccatgggaaaaa

SEQ ID NO: 53850 - DNA, 40 bp, Homo sapiens
ttttcccatggttacatatatatatatatatatatatata

SEQ ID NO: 53851 - DNA, 40 bp, Homo sapiens
tatatatatatatatatatatatatgtaaccatgggaaaa

SEQ ID NO: 53852 - DNA, 40 bp, Homo sapiens
tttcccatggttacatatatatatatatatatatatatat

SEQ ID NO: 53853 - DNA, 40 bp, Homo sapiens
atatatatatatatatatatatatatgtaaccatgggaaa

SEQ ID NO: 53854 - DNA, 40 bp, Homo sapiens
ttcccatggttacatatatatatatatatatatatatata

SEQ ID NO: 53855 - DNA, 40 bp, Homo sapiens
tatatatatatatatatatatatatatgtaaccatgggaa

SEQ ID NO: 53856 - DNA, 40 bp, Homo sapiens
tcccatggttacatatatatatatatatatatatatatat

SEQ ID NO: 53857 - DNA, 40 bp, Homo sapiens
atatatatatatatatatatatatatatgtaaccatggga

SEQ ID NO: 53858 - DNA, 40 bp, Homo sapiens
cccatggttacatatatatatatatatatatatatatata

SEQ ID NO: 53859 - DNA, 40 bp, Homo sapiens
tatatatatatatatatatatatatatatgtaaccatggg

SEQ ID NO: 53860 - DNA, 40 bp, Homo sapiens
ccatggttacatatatatatatatatatatatatatatat

SEQ ID NO: 53861 - DNA, 40 bp, Homo sapiens
atatatatatatatatatatatatatatatgtaaccatgg

SEQ ID NO: 53862 - DNA, 40 bp, Homo sapiens
catggttacatatatatatatatatatatatatatatata

SEQ ID NO: 53863 - DNA, 40 bp, Homo sapiens
tatatatatatatatatatatatatatatatgtaaccatg

SEQ ID NO: 53864 - DNA, 40 bp, Homo sapiens
atggttacatatatatatatatatatatatatatatatat

SEQ ID NO: 53865 - DNA, 40 bp, Homo sapiens
atatatatatatatatatatatatatatatatgtaaccat

SEQ ID NO: 53866 - DNA, 40 bp, Homo sapiens
tggttacatatatatatatatatatatatatatatatata

SEQ ID NO: 53867 - DNA, 40 bp, Homo sapiens
tatatatatatatatatatatatatatatatatgtaacca

SEQ ID NO: 53868 - DNA, 40 bp, Homo sapiens
ggttacatatatatatatatatatatatatatatatatat

SEQ ID NO: 53869 - DNA, 40 bp, Homo sapiens
atatatatatatatatatatatatatatatatatgtaacc

SEQ ID NO: 53870 - DNA, 40 bp, Homo sapiens
gttacatatatatatatatatatatatatatatatatata

SEQ ID NO: 53871 - DNA, 40 bp, Homo sapiens
tatatatatatatatatatatatatatatatatatgtaac

SEQ ID NO: 53872 - DNA, 40 bp, Homo sapiens
ttacatatatatatatatatatatatatatatatatatat

SEQ ID NO: 53873 - DNA, 40 bp, Homo sapiens
atatatatatatatatatatatatatatatatatatgtaa

SEQ ID NO: 53874 - DNA, 40 bp, Homo sapiens
tacatatatatatatatatatatatatatatatatatata

SEQ ID NO: 53875 - DNA, 40 bp, Homo sapiens
tatatatatatatatatatatatatatatatatatatgta

SEQ ID NO: 53876 - DNA, 40 bp, Homo sapiens
acatatatatatatatatatatatatatatatatatatat

SEQ ID NO: 53877 - DNA, 40 bp, Homo sapiens
atatatatatatatatatatatatatatatatatatatgt

SEQ ID NO: 53878 - DNA, 40 bp, Homo sapiens
catatatatatatatatatatatatatatatatatatata

SEQ ID NO: 53879 - DNA, 40 bp, Homo sapiens
tatatatatatatatatatatatatatatatatatatatg

SEQ ID NO: 53880 - DNA, 40 bp, Homo sapiens
atatatatatatatatatatatatatatatatatatatat

SEQ ID NO: 53881 - DNA, 40 bp, Homo sapiens; identical to SEQ ID NO: 53880

SEQ ID NO: 53882 - DNA, 40 bp, Homo sapiens
tatatatatatatatatatatatatatatatatatatata

SEQ ID NO: 53883 - DNA, 40 bp, Homo sapiens; identical to SEQ ID NO: 53882

SEQ ID NO: 53884 - DNA, 40 bp, Homo sapiens; identical to SEQ ID NO: 53880

SEQ ID NO: 53885 - DNA, 40 bp, Homo sapiens; identical to SEQ ID NO: 53880

SEQ ID NO: 53886 - DNA, 40 bp, Homo sapiens; identical to SEQ ID NO: 53882

SEQ ID NO: 53887 - DNA, 40 bp, Homo sapiens; identical to SEQ ID NO: 53882

SEQ ID NO: 53888 - DNA, 40 bp, Homo sapiens; identical to SEQ ID NO: 53880

SEQ ID NO: 53889 - DNA, 40 bp, Homo sapiens; identical to SEQ ID NO: 53880

SEQ ID NO: 53890 - DNA, 40 bp, Homo sapiens; identical to SEQ ID NO: 53882

SEQ ID NO: 53891 - DNA, 40 bp, Homo sapiens; identical to SEQ ID NO: 53882

SEQ ID NO: 53892 - DNA, 40 bp, Homo sapiens; identical to SEQ ID NO: 53880

SEQ ID NO: 53893 - DNA, 40 bp, Homo sapiens; identical to SEQ ID NO: 53880

SEQ ID NO: 53894 - DNA, 40 bp, Homo sapiens; identical to SEQ ID NO: 53882

SEQ ID NO: 53895 - DNA, 40 bp, Homo sapiens; identical to SEQ ID NO: 53882

SEQ ID NO: 53896 - DNA, 40 bp, Homo sapiens; identical to SEQ ID NO: 53880

SEQ ID NO: 53897 - DNA, 40 bp, Homo sapiens; identical to SEQ ID NO: 53880

SEQ ID NO: 53898 - DNA, 40 bp, Homo sapiens; identical to SEQ ID NO: 53882

SEQ ID NO: 53899 - DNA, 40 bp, Homo sapiens; identical to SEQ ID NO: 53882

SEQ ID NO: 53900 - DNA, 40 bp, Homo sapiens
atatatatatatatatatatatatatatatatatatataa

SEQ ID NO: 53901 - DNA, 40 bp, Homo sapiens
ttatatatatatatatatatatatatatatatatatatat

SEQ ID NO: 53902 - DNA, 40 bp, Homo sapiens
tatatatatatatatatatatatatatatatatatataaa

SEQ ID NO: 53903 - DNA, 40 bp, Homo sapiens
tttatatatatatatatatatatatatatatatatatata

SEQ ID NO: 53904 - DNA, 40 bp, Homo sapiens
atatatatatatatatatatatatatatatatatataaag

SEQ ID NO: 53905 - DNA, 40 bp, Homo sapiens
ctttatatatatatatatatatatatatatatatatatat

SEQ ID NO: 53906 - DNA, 40 bp, Homo sapiens
tatatatatatatatatatatatatatatatatataaaga

SEQ ID NO: 53907 - DNA, 40 bp, Homo sapiens
tctttatatatatatatatatatatatatatatatatata

SEQ ID NO: 53908 - DNA, 40 bp, Homo sapiens
atatatatatatatatatatatatatatatatataaagaa

SEQ ID NO: 53909 - DNA, 40 bp, Homo sapiens
ttctttatatatatatatatatatatatatatatatatat

SEQ ID NO: 53910 - DNA, 40 bp, Homo sapiens
tatatatatatatatatatatatatatatatataaagaac

SEQ ID NO: 53911 - DNA, 40 bp, Homo sapiens
gttctttatatatatatatatatatatatatatatatata

SEQ ID NO: 53912 - DNA, 40 bp, Homo sapiens
atatatatatatatatatatatatatatatataaagaaca

SEQ ID NO: 53913 - DNA, 40 bp, Homo sapiens
tgttctttatatatatatatatatatatatatatatatat

SEQ ID NO: 53914 - DNA, 40 bp, Homo sapiens
tatatatatatatatatatatatatatatataaagaacag

SEQ ID NO: 53915 - DNA, 40 bp, Homo sapiens
ctgttctttatatatatatatatatatatatatatatata

SEQ ID NO: 53916 - DNA, 40 bp, Homo sapiens
atatatatatatatatatatatatatatataaagaacagg

SEQ ID NO: 53917 - DNA, 40 bp, Homo sapiens
cctgttctttatatatatatatatatatatatatatatat

SEQ ID NO: 53918 - DNA, 40 bp, Homo sapiens
tatatatatatatatatatatatatatataaagaacaggg

SEQ ID NO: 53919 - DNA, 40 bp, Homo sapiens
ccctgttctttatatatatatatatatatatatatatata

SEQ ID NO: 53920 - DNA, 40 bp, Homo sapiens
atatatatatatatatatatatatatataaagaacagggc

SEQ ID NO: 53921 - DNA, 40 bp, Homo sapiens
gccctgttctttatatatatatatatatatatatatatat

SEQ ID NO: 53922 - DNA, 40 bp, Homo sapiens
tatatatatatatatatatatatatataaagaacagggca

SEQ ID NO: 53923 - DNA, 40 bp, Homo sapiens
tgccctgttctttatatatatatatatatatatatatata

SEQ ID NO: 53924 - DNA, 40 bp, Homo sapiens
atatatatatatatatatatatatataaagaacagggcaa

SEQ ID NO: 53925 - DNA, 40 bp, Homo sapiens
ttgccctgttctttatatatatatatatatatatatatat

SEQ ID NO: 53926 - DNA, 40 bp, Homo sapiens
tatatatatatatatatatatatataaagaacagggcaac

SEQ ID NO: 53927 - DNA, 40 bp, Homo sapiens
gttgccctgttctttatatatatatatatatatatatata

SEQ ID NO: 53928 - DNA, 40 bp, Homo sapiens
atatatatatatatatatatatataaagaacagggcaaca

SEQ ID NO: 53929 - DNA, 40 bp, Homo sapiens
tgttgccctgttctttatatatatatatatatatatatat

SEQ ID NO: 53930 - DNA, 40 bp, Homo sapiens
tatatatatatatatatatatataaagaacagggcaacaa

SEQ ID NO: 53931 - DNA, 40 bp, Homo sapiens
ttgttgccctgttctttatatatatatatatatatatata

SEQ ID NO: 53932 - DNA, 40 bp, Homo sapiens
atatatatatatatatatatataaagaacagggcaacaaa

SEQ ID NO: 53933 - DNA, 40 bp, Homo sapiens
tttgttgccctgttctttatatatatatatatatatatat

SEQ ID NO: 53934 - DNA, 40 bp, Homo sapiens
tatatatatatatatatatataaagaacagggcaacaaat

SEQ ID NO: 53935 - DNA, 40 bp, Homo sapiens
atttgttgccctgttctttatatatatatatatatatata

SEQ ID NO: 53936 - DNA, 40 bp, Homo sapiens
atatatatatatatatatataaagaacagggcaacaaatt

SEQ ID NO: 53937 - DNA, 40 bp, Homo sapiens
aatttgttgccctgttctttatatatatatatatatatat

SEQ ID NO: 53938 - DNA, 40 bp, Homo sapiens
tatatatatatatatatataaagaacagggcaacaaattt

SEQ ID NO: 53939 - DNA, 40 bp, Homo sapiens
aaatttgttgccctgttctttatatatatatatatatata

SEQ ID NO: 53940 - DNA, 40 bp, Homo sapiens
atatatatatatatatataaagaacagggcaacaaatttt

SEQ ID NO: 53941 - DNA, 40 bp, Homo sapiens
aaaatttgttgccctgttctttatatatatatatatatat

SEQ ID NO: 53942 - DNA, 40 bp, Homo sapiens
tatatatatatatatataaagaacagggcaacaaattttt

SEQ ID NO: 53943 - DNA, 40 bp, Homo sapiens
aaaaatttgttgccctgttctttatatatatatatatata

SEQ ID NO: 53944 - DNA, 40 bp, Homo sapiens
atatatatatatatataaagaacagggcaacaaatttttg

SEQ ID NO: 53945 - DNA, 40 bp, Homo sapiens
caaaaatttgttgccctgttctttatatatatatatatat

SEQ ID NO: 53946 - DNA, 40 bp, Homo sapiens
tatatatatatatataaagaacagggcaacaaatttttgc

SEQ ID NO: 53947 - DNA, 40 bp, Homo sapiens
gcaaaaatttgttgccctgttctttatatatatatatata

SEQ ID NO: 53948 - DNA, 40 bp, Homo sapiens
atatatatatatataaagaacagggcaacaaatttttgcg

SEQ ID NO: 53949 - DNA, 40 bp, Homo sapiens
cgcaaaaatttgttgccctgttctttatatatatatatat

SEQ ID NO: 53950 - DNA, 40 bp, Homo sapiens
tatatatatatataaagaacagggcaacaaatttttgcgt

SEQ ID NO: 53951 - DNA, 40 bp, Homo sapiens
acgcaaaaatttgttgccctgttctttatatatatatata

SEQ ID NO: 53952 - DNA, 40 bp, Homo sapiens
atatatatatataaagaacagggcaacaaatttttgcgtt

SEQ ID NO: 53953 - DNA, 40 bp, Homo sapiens
aacgcaaaaatttgttgccctgttctttatatatatatat

SEQ ID NO: 53954 - DNA, 40 bp, Homo sapiens
tatatatatataaagaacagggcaacaaatttttgcgttt

SEQ ID NO: 53955 - DNA, 40 bp, Homo sapiens
aaacgcaaaaatttgttgccctgttctttatatatatata

SEQ ID NO: 53956 - DNA, 40 bp, Homo sapiens
atatatatataaagaacagggcaacaaatttttgcgtttt

SEQ ID NO: 53957 - DNA, 40 bp, Homo sapiens
aaaacgcaaaaatttgttgccctgttctttatatatatat

SEQ ID NO: 53958 - DNA, 40 bp, Homo sapiens
tatatatataaagaacagggcaacaaatttttgcgttttc

SEQ ID NO: 53959 - DNA, 40 bp, Homo sapiens
gaaaacgcaaaaatttgttgccctgttctttatatatata

SEQ ID NO: 53960 - DNA, 40 bp, Homo sapiens
atatatataaagaacagggcaacaaatttttgcgttttct

SEQ ID NO: 53961 - DNA, 40 bp, Homo sapiens
agaaaacgcaaaaatttgttgccctgttctttatatatat

SEQ ID NO: 53962 - DNA, 40 bp, Homo sapiens
tatatataaagaacagggcaacaaatttttgcgttttcta

SEQ ID NO: 53963 - DNA, 40 bp, Homo sapiens
tagaaaacgcaaaaatttgttgccctgttctttatatata

SEQ ID NO: 53964 - DNA, 40 bp, Homo sapiens
atatataaagaacagggcaacaaatttttgcgttttctat

SEQ ID NO: 53965 - DNA, 40 bp, Homo sapiens
atagaaaacgcaaaaatttgttgccctgttctttatatat

SEQ ID NO: 53966 - DNA, 40 bp, Homo sapiens
tatataaagaacagggcaacaaatttttgcgttttctatt

SEQ ID NO: 53967 - DNA, 40 bp, Homo sapiens
aatagaaaacgcaaaaatttgttgccctgttctttatata

SEQ ID NO: 53968 - DNA, 40 bp, Homo sapiens
atataaagaacagggcaacaaatttttgcgttttctattt

SEQ ID NO: 53969 - DNA, 40 bp, Homo sapiens
aaatagaaaacgcaaaaatttgttgccctgttctttatat

SEQ ID NO: 53970 - DNA, 40 bp, Homo sapiens
tataaagaacagggcaacaaatttttgcgttttctatttc

SEQ ID NO: 53971 - DNA, 40 bp, Homo sapiens
gaaatagaaaacgcaaaaatttgttgccctgttctttata

SEQ ID NO: 53972 - DNA, 40 bp, Homo sapiens
ataaagaacagggcaacaaatttttgcgttttctatttcg

SEQ ID NO: 53973 - DNA, 40 bp, Homo sapiens
cgaaatagaaaacgcaaaaatttgttgccctgttctttat

SEQ ID NO: 53974 - DNA, 40 bp, Homo sapiens
taaagaacagggcaacaaatttttgcgttttctatttcgg

SEQ ID NO: 53975 - DNA, 40 bp, Homo sapiens
ccgaaatagaaaacgcaaaaatttgttgccctgttcttta

SEQ ID NO: 53976 - DNA, 40 bp, Homo sapiens
aaagaacagggcaacaaatttttgcgttttctatttcggt

SEQ ID NO: 53977 - DNA, 40 bp, Homo sapiens
accgaaatagaaaacgcaaaaatttgttgccctgttcttt

SEQ ID NO: 53978 - DNA, 40 bp, Homo sapiens
aagaacagggcaacaaatttttgcgttttctatttcggta

SEQ ID NO: 53979 - DNA, 40 bp, Homo sapiens
taccgaaatagaaaacgcaaaaatttgttgccctgttctt

SEQ ID NO: 53980 - DNA, 40 bp, Homo sapiens
agaacagggcaacaaatttttgcgttttctatttcggtag

SEQ ID NO: 53981 - DNA, 40 bp, Homo sapiens
ctaccgaaatagaaaacgcaaaaatttgttgccctgttct

SEQ ID NO: 53982 - DNA, 40 bp, Homo sapiens
gaacagggcaacaaatttttgcgttttctatttcggtagt

SEQ ID NO: 53983 - DNA, 40 bp, Homo sapiens
actaccgaaatagaaaacgcaaaaatttgttgccctgttc

SEQ ID NO: 53984 - DNA, 40 bp, Homo sapiens
aacagggcaacaaatttttgcgttttctatttcggtagta

SEQ ID NO: 53985 - DNA, 40 bp, Homo sapiens
tactaccgaaatagaaaacgcaaaaatttgttgccctgtt

SEQ ID NO: 53986 - DNA, 40 bp, Homo sapiens
acagggcaacaaatttttgcgttttctatttcggtagtac

SEQ ID NO: 53987 - DNA, 40 bp, Homo sapiens
gtactaccgaaatagaaaacgcaaaaatttgttgccctgt

SEQ ID NO: 53988 - DNA, 40 bp, Homo sapiens
cagggcaacaaatttttgcgttttctatttcggtagtact

SEQ ID NO: 53989 - DNA, 40 bp, Homo sapiens
agtactaccgaaatagaaaacgcaaaaatttgttgccctg

SEQ ID NO: 53990 - DNA, 40 bp, Homo sapiens
agggcaacaaatttttgcgttttctatttcggtagtactt

SEQ ID NO: 53991 - DNA, 40 bp, Homo sapiens
aagtactaccgaaatagaaaacgcaaaaatttgttgccct

SEQ ID NO: 53992 - DNA, 40 bp, Homo sapiens
gggcaacaaatttttgcgttttctatttcggtagtacttt

SEQ ID NO: 53993 - DNA, 40 bp, Homo sapiens
aaagtactaccgaaatagaaaacgcaaaaatttgttgccc

SEQ ID NO: 53994 - DNA, 40 bp, Homo sapiens
ggcaacaaatttttgcgttttctatttcggtagtactttt

SEQ ID NO: 53995 - DNA, 40 bp, Homo sapiens
aaaagtactaccgaaatagaaaacgcaaaaatttgttgcc

SEQ ID NO: 53996 - DNA, 40 bp, Homo sapiens
gcaacaaatttttgcgttttctatttcggtagtactttta

SEQ ID NO: 53997 - DNA, 40 bp, Homo sapiens
taaaagtactaccgaaatagaaaacgcaaaaatttgttgc

SEQ ID NO: 53998 - DNA, 40 bp, Homo sapiens
caacaaatttttgcgttttctatttcggtagtacttttaa

SEQ ID NO: 53999 - DNA, 40 bp, Homo sapiens
ttaaaagtactaccgaaatagaaaacgcaaaaatttgttg

SEQ ID NO: 54000 - DNA, 40 bp, Homo sapiens
aacaaatttttgcgttttctatttcggtagtacttttaaa

SEQ ID NO: 54001 - DNA, 40 bp, Homo sapiens
tttaaaagtactaccgaaatagaaaacgcaaaaatttgtt

SEQ ID NO: 54002 - DNA, 40 bp, Homo sapiens
acaaatttttgcgttttctatttcggtagtacttttaaac

SEQ ID NO: 54003 - DNA, 40 bp, Homo sapiens
gtttaaaagtactaccgaaatagaaaacgcaaaaatttgt

SEQ ID NO: 54004 - DNA, 40 bp, Homo sapiens
caaatttttgcgttttctatttcggtagtacttttaaacc

SEQ ID NO: 54005 - DNA, 40 bp, Homo sapiens
ggtttaaaagtactaccgaaatagaaaacgcaaaaatttg

SEQ ID NO: 54006 - DNA, 40 bp, Homo sapiens
aaatttttgcgttttctatttcggtagtacttttaaacca

SEQ ID NO: 54007 - DNA, 40 bp, Homo sapiens
tggtttaaaagtactaccgaaatagaaaacgcaaaaattt

SEQ ID NO: 54008 - DNA, 40 bp, Homo sapiens
aatttttgcgttttctatttcggtagtacttttaaaccat

SEQ ID NO: 54009 - DNA, 40 bp, Homo sapiens
atggtttaaaagtactaccgaaatagaaaacgcaaaaatt

SEQ ID NO: 54010 - DNA, 40 bp, Homo sapiens
atttttgcgttttctatttcggtagtacttttaaaccatt

SEQ ID NO: 54011 - DNA, 40 bp, Homo sapiens
aatggtttaaaagtactaccgaaatagaaaacgcaaaaat

SEQ ID NO: 54012 - DNA, 40 bp, Homo sapiens
tttttgcgttttctatttcggtagtacttttaaaccatta

SEQ ID NO: 54013 - DNA, 40 bp, Homo sapiens
taatggtttaaaagtactaccgaaatagaaaacgcaaaaa

SEQ ID NO: 54014 - DNA, 40 bp, Homo sapiens
ttttgcgttttctatttcggtagtacttttaaaccattat

SEQ ID NO: 54015 - DNA, 40 bp, Homo sapiens
ataatggtttaaaagtactaccgaaatagaaaacgcaaaa

SEQ ID NO: 54016 - DNA, 40 bp, Homo sapiens
tttgcgttttctatttcggtagtacttttaaaccattatg

SEQ ID NO: 54017 - DNA, 40 bp, Homo sapiens
cataatggtttaaaagtactaccgaaatagaaaacgcaaa

SEQ ID NO: 54018 - DNA, 40 bp, Homo sapiens
ttgcgttttctatttcggtagtacttttaaaccattatgt

SEQ ID NO: 54019 - DNA, 40 bp, Homo sapiens
acataatggtttaaaagtactaccgaaatagaaaacgcaa

SEQ ID NO: 54020 - DNA, 40 bp, Homo sapiens
tgcgttttctatttcggtagtacttttaaaccattatgtc

SEQ ID NO: 54021 - DNA, 40 bp, Homo sapiens
gacataatggtttaaaagtactaccgaaatagaaaacgca

SEQ ID NO: 54022 - DNA, 40 bp, Homo sapiens
gcgttttctatttcggtagtacttttaaaccattatgtca

SEQ ID NO: 54023 - DNA, 40 bp, Homo sapiens
tgacataatggtttaaaagtactaccgaaatagaaaacgc

SEQ ID NO: 54024 - DNA, 40 bp, Homo sapiens
cgttttctatttcggtagtacttttaaaccattatgtcat

SEQ ID NO: 54025 - DNA, 40 bp, Homo sapiens
atgacataatggtttaaaagtactaccgaaatagaaaacg

SEQ ID NO: 54026 - DNA, 40 bp, Homo sapiens
gttttctatttcggtagtacttttaaaccattatgtcatg

SEQ ID NO: 54027 - DNA, 40 bp, Homo sapiens
catgacataatggtttaaaagtactaccgaaatagaaaac

SEQ ID NO: 54028 - DNA, 40 bp, Homo sapiens
ttttctatttcggtagtacttttaaaccattatgtcatgt

SEQ ID NO: 54029 - DNA, 40 bp, Homo sapiens
acatgacataatggtttaaaagtactaccgaaatagaaaa

SEQ ID NO: 54030 - DNA, 40 bp, Homo sapiens
tttctatttcggtagtacttttaaaccattatgtcatgtt

SEQ ID NO: 54031 - DNA, 40 bp, Homo sapiens
aacatgacataatggtttaaaagtactaccgaaatagaaa

SEQ ID NO: 54032 - DNA, 40 bp, Homo sapiens
ttctatttcggtagtacttttaaaccattatgtcatgttt

SEQ ID NO: 54033 - DNA, 40 bp, Homo sapiens
aaacatgacataatggtttaaaagtactaccgaaatagaa

SEQ ID NO: 54034 - DNA, 40 bp, Homo sapiens
tctatttcggtagtacttttaaaccattatgtcatgtttc

SEQ ID NO: 54035 - DNA, 40 bp, Homo sapiens
gaaacatgacataatggtttaaaagtactaccgaaataga

SEQ ID NO: 54036 - DNA, 40 bp, Homo sapiens
ctatttcggtagtacttttaaaccattatgtcatgtttct

SEQ ID NO: 54037 - DNA, 40 bp, Homo sapiens
agaaacatgacataatggtttaaaagtactaccgaaatag

SEQ ID NO: 54038 - DNA, 40 bp, Homo sapiens
tatttcggtagtacttttaaaccattatgtcatgtttcta

SEQ ID NO: 54039 - DNA, 40 bp, Homo sapiens
tagaaacatgacataatggtttaaaagtactaccgaaata

SEQ ID NO: 54040 - DNA, 40 bp, Homo sapiens
atttcggtagtacttttaaaccattatgtcatgtttctag

SEQ ID NO: 54041 - DNA, 40 bp, Homo sapiens
ctagaaacatgacataatggtttaaaagtactaccgaaat

SEQ ID NO: 54042 - DNA, 40 bp, Homo sapiens
tttcggtagtacttttaaaccattatgtcatgtttctagg

SEQ ID NO: 54043 - DNA, 40 bp, Homo sapiens
cctagaaacatgacataatggtttaaaagtactaccgaaa

SEQ ID NO: 54044 - DNA, 40 bp, Homo sapiens
ttcggtagtacttttaaaccattatgtcatgtttctaggt

SEQ ID NO: 54045 - DNA, 40 bp, Homo sapiens
acctagaaacatgacataatggtttaaaagtactaccgaa

SEQ ID NO: 54046 - DNA, 40 bp, Homo sapiens
tcggtagtacttttaaaccattatgtcatgtttctaggtt

SEQ ID NO: 54047 - DNA, 40 bp, Homo sapiens
aacctagaaacatgacataatggtttaaaagtactaccga

SEQ ID NO: 54048 - DNA, 40 bp, Homo sapiens
cggtagtacttttaaaccattatgtcatgtttctaggtta

SEQ ID NO: 54049 - DNA, 40 bp, Homo sapiens
taacctagaaacatgacataatggtttaaaagtactaccg

SEQ ID NO: 54050 - DNA, 40 bp, Homo sapiens
ggtagtacttttaaaccattatgtcatgtttctaggttaa

SEQ ID NO: 54051 - DNA, 40 bp, Homo sapiens
ttaacctagaaacatgacataatggtttaaaagtactacc

SEQ ID NO: 54052 - DNA, 40 bp, Homo sapiens
gtagtacttttaaaccattatgtcatgtttctaggttaaa

SEQ ID NO: 54053 - DNA, 40 bp, Homo sapiens
tttaacctagaaacatgacataatggtttaaaagtactac

SEQ ID NO: 54054 - DNA, 40 bp, Homo sapiens
tagtacttttaaaccattatgtcatgtttctaggttaaac

SEQ ID NO: 54055 - DNA, 40 bp, Homo sapiens
gtttaacctagaaacatgacataatggtttaaaagtacta

SEQ ID NO: 54056 - DNA, 40 bp, Homo sapiens
agtacttttaaaccattatgtcatgtttctaggttaaacg

SEQ ID NO: 54057 - DNA, 40 bp, Homo sapiens
cgtttaacctagaaacatgacataatggtttaaaagtact

SEQ ID NO: 54058 - DNA, 40 bp, Homo sapiens
gtacttttaaaccattatgtcatgtttctaggttaaacgt

SEQ ID NO: 54059 - DNA, 40 bp, Homo sapiens
acgtttaacctagaaacatgacataatggtttaaaagtac

SEQ ID NO: 54060 - DNA, 40 bp, Homo sapiens
tacttttaaaccattatgtcatgtttctaggttaaacgtt

SEQ ID NO: 54061 - DNA, 40 bp, Homo sapiens
aacgtttaacctagaaacatgacataatggtttaaaagta

SEQ ID NO: 54062 - DNA, 40 bp, Homo sapiens
acttttaaaccattatgtcatgtttctaggttaaacgttg

SEQ ID NO: 54063 - DNA, 40 bp, Homo sapiens
caacgtttaacctagaaacatgacataatggtttaaaagt

SEQ ID NO: 54064 - DNA, 40 bp, Homo sapiens
cttttaaaccattatgtcatgtttctaggttaaacgttgt

SEQ ID NO: 54065 - DNA, 40 bp, Homo sapiens
acaacgtttaacctagaaacatgacataatggtttaaaag

SEQ ID NO: 54066 - DNA, 40 bp, Homo sapiens
ttttaaaccattatgtcatgtttctaggttaaacgttgtt

SEQ ID NO: 54067 - DNA, 40 bp, Homo sapiens
aacaacgtttaacctagaaacatgacataatggtttaaaa

SEQ ID NO: 54068 - DNA, 40 bp, Homo sapiens
tttaaaccattatgtcatgtttctaggttaaacgttgttg

SEQ ID NO: 54069 - DNA, 40 bp, Homo sapiens
caacaacgtttaacctagaaacatgacataatggtttaaa

SEQ ID NO: 54070 - DNA, 40 bp, Homo sapiens
ttaaaccattatgtcatgtttctaggttaaacgttgttgt

SEQ ID NO: 54071 - DNA, 40 bp, Homo sapiens
acaacaacgtttaacctagaaacatgacataatggtttaa

SEQ ID NO: 54072 - DNA, 40 bp, Homo sapiens
taaaccattatgtcatgtttctaggttaaacgttgttgta

SEQ ID NO: 54073 - DNA, 40 bp, Homo sapiens
tacaacaacgtttaacctagaaacatgacataatggttta

SEQ ID NO: 54074 - DNA, 40 bp, Homo sapiens
aaaccattatgtcatgtttctaggttaaacgttgttgtat

SEQ ID NO: 54075 - DNA, 40 bp, Homo sapiens
atacaacaacgtttaacctagaaacatgacataatggttt

SEQ ID NO: 54076 - DNA, 40 bp, Homo sapiens
aaccattatgtcatgtttctaggttaaacgttgttgtatt

SEQ ID NO: 54077 - DNA, 40 bp, Homo sapiens
aatacaacaacgtttaacctagaaacatgacataatggtt

SEQ ID NO: 54078 - DNA, 40 bp, Homo sapiens
accattatgtcatgtttctaggttaaacgttgttgtattt

SEQ ID NO: 54079 - DNA, 40 bp, Homo sapiens
aaatacaacaacgtttaacctagaaacatgacataatggt

SEQ ID NO: 54080 - DNA, 40 bp, Homo sapiens
ccattatgtcatgtttctaggttaaacgttgttgtatttg

SEQ ID NO: 54081 - DNA, 40 bp, Homo sapiens
caaatacaacaacgtttaacctagaaacatgacataatgg

SEQ ID NO: 54082 - DNA, 40 bp, Homo sapiens
cattatgtcatgtttctaggttaaacgttgttgtatttga

SEQ ID NO: 54083 - DNA, 40 bp, Homo sapiens
tcaaatacaacaacgtttaacctagaaacatgacataatg

SEQ ID NO: 54084 - DNA, 40 bp, Homo sapiens
attatgtcatgtttctaggttaaacgttgttgtatttgaa

SEQ ID NO: 54085 - DNA, 40 bp, Homo sapiens
ttcaaatacaacaacgtttaacctagaaacatgacataat

SEQ ID NO: 54086 - DNA, 40 bp, Homo sapiens
ttatgtcatgtttctaggttaaacgttgttgtatttgaag

SEQ ID NO: 54087 - DNA, 40 bp, Homo sapiens
cttcaaatacaacaacgtttaacctagaaacatgacataa

SEQ ID NO: 54088 - DNA, 40 bp, Homo sapiens
tatgtcatgtttctaggttaaacgttgttgtatttgaaga

SEQ ID NO: 54089 - DNA, 40 bp, Homo sapiens
tcttcaaatacaacaacgtttaacctagaaacatgacata

SEQ ID NO: 54090 - DNA, 40 bp, Homo sapiens
atgtcatgtttctaggttaaacgttgttgtatttgaagaa

SEQ ID NO: 54091 - DNA, 40 bp, Homo sapiens
ttcttcaaatacaacaacgtttaacctagaaacatgacat

SEQ ID NO: 54092 - DNA, 40 bp, Homo sapiens
tgtcatgtttctaggttaaacgttgttgtatttgaagaat

SEQ ID NO: 54093 - DNA, 40 bp, Homo sapiens
attcttcaaatacaacaacgtttaacctagaaacatgaca

SEQ ID NO: 54094 - DNA, 40 bp, Homo sapiens
gtcatgtttctaggttaaacgttgttgtatttgaagaatt

SEQ ID NO: 54095 - DNA, 40 bp, Homo sapiens
aattcttcaaatacaacaacgtttaacctagaaacatgac

SEQ ID NO: 54096 - DNA, 40 bp, Homo sapiens
tcatgtttctaggttaaacgttgttgtatttgaagaattt

SEQ ID NO: 54097 - DNA, 40 bp, Homo sapiens
aaattcttcaaatacaacaacgtttaacctagaaacatga

SEQ ID NO: 54098 - DNA, 40 bp, Homo sapiens
catgtttctaggttaaacgttgttgtatttgaagaatttt

SEQ ID NO: 54099 - DNA, 40 bp, Homo sapiens
aaaattcttcaaatacaacaacgtttaacctagaaacatg

SEQ ID NO: 54100 - DNA, 40 bp, Homo sapiens
atgtttctaggttaaacgttgttgtatttgaagaatttta

SEQ ID NO: 54101 - DNA, 40 bp, Homo sapiens
taaaattcttcaaatacaacaacgtttaacctagaaacat

SEQ ID NO: 54102 - DNA, 40 bp, Homo sapiens
tgtttctaggttaaacgttgttgtatttgaagaattttac

SEQ ID NO: 54103 - DNA, 40 bp, Homo sapiens
gtaaaattcttcaaatacaacaacgtttaacctagaaaca

SEQ ID NO: 54104 - DNA, 40 bp, Homo sapiens
gtttctaggttaaacgttgttgtatttgaagaattttact

SEQ ID NO: 54105 - DNA, 40 bp, Homo sapiens
agtaaaattcttcaaatacaacaacgtttaacctagaaac

SEQ ID NO: 54106 - DNA, 40 bp, Homo sapiens
tttctaggttaaacgttgttgtatttgaagaattttactt

SEQ ID NO: 54107 - DNA, 40 bp, Homo sapiens
aagtaaaattcttcaaatacaacaacgtttaacctagaaa

SEQ ID NO: 54108 - DNA, 40 bp, Homo sapiens
ttctaggttaaacgttgttgtatttgaagaattttacttt

SEQ ID NO: 54109 - DNA, 40 bp, Homo sapiens
aaagtaaaattcttcaaatacaacaacgtttaacctagaa

SEQ ID NO: 54110 - DNA, 40 bp, Homo sapiens
tctaggttaaacgttgttgtatttgaagaattttactttg

SEQ ID NO: 54111 - DNA, 40 bp, Homo sapiens
caaagtaaaattcttcaaatacaacaacgtttaacctaga

SEQ ID NO: 54112 - DNA, 40 bp, Homo sapiens
ctaggttaaacgttgttgtatttgaagaattttactttgg

SEQ ID NO: 54113 - DNA, 40 bp, Homo sapiens
ccaaagtaaaattcttcaaatacaacaacgtttaacctag

SEQ ID NO: 54114 - DNA, 40 bp, Homo sapiens
taggttaaacgttgttgtatttgaagaattttactttggc

SEQ ID NO: 54115 - DNA, 40 bp, Homo sapiens
gccaaagtaaaattcttcaaatacaacaacgtttaaccta

SEQ ID NO: 54116 - DNA, 40 bp, Homo sapiens
aggttaaacgttgttgtatttgaagaattttactttggca

SEQ ID NO: 54117 - DNA, 40 bp, Homo sapiens
tgccaaagtaaaattcttcaaatacaacaacgtttaacct

SEQ ID NO: 54118 - DNA, 40 bp, Homo sapiens
ggttaaacgttgttgtatttgaagaattttactttggcag

SEQ ID NO: 54119 - DNA, 40 bp, Homo sapiens
ctgccaaagtaaaattcttcaaatacaacaacgtttaacc

SEQ ID NO: 54120 - DNA, 40 bp, Homo sapiens
gttaaacgttgttgtatttgaagaattttactttggcaga

SEQ ID NO: 54121 - DNA, 40 bp, Homo sapiens
tctgccaaagtaaaattcttcaaatacaacaacgtttaac

SEQ ID NO: 54122 - DNA, 40 bp, Homo sapiens
ttaaacgttgttgtatttgaagaattttactttggcagaa

SEQ ID NO: 54123 - DNA, 40 bp, Homo sapiens
ttctgccaaagtaaaattcttcaaatacaacaacgtttaa

SEQ ID NO: 54124 - DNA, 40 bp, Homo sapiens
taaacgttgttgtatttgaagaattttactttggcagaat

SEQ ID NO: 54125 - DNA, 40 bp, Homo sapiens
attctgccaaagtaaaattcttcaaatacaacaacgttta

SEQ ID NO: 54126 - DNA, 40 bp, Homo sapiens
aaacgttgttgtatttgaagaattttactttggcagaatt

SEQ ID NO: 54127 - DNA, 40 bp, Homo sapiens
aattctgccaaagtaaaattcttcaaatacaacaacgttt

SEQ ID NO: 54128 - DNA, 40 bp, Homo sapiens
aacgttgttgtatttgaagaattttactttggcagaattt

SEQ ID NO: 54129 - DNA, 40 bp, Homo sapiens
aaattctgccaaagtaaaattcttcaaatacaacaacgtt

SEQ ID NO: 54130 - DNA, 40 bp, Homo sapiens
acgttgttgtatttgaagaattttactttggcagaatttt

SEQ ID NO: 54131 - DNA, 40 bp, Homo sapiens
aaaattctgccaaagtaaaattcttcaaatacaacaacgt

SEQ ID NO: 54132 - DNA, 40 bp, Homo sapiens
cgttgttgtatttgaagaattttactttggcagaattttt

SEQ ID NO: 54133 - DNA, 40 bp, Homo sapiens
aaaaattctgccaaagtaaaattcttcaaatacaacaacg

SEQ ID NO: 54134 - DNA, 40 bp, Homo sapiens
gttgttgtatttgaagaattttactttggcagaatttttt

SEQ ID NO: 54135 - DNA, 40 bp, Homo sapiens
aaaaaattctgccaaagtaaaattcttcaaatacaacaac

SEQ ID NO: 54136 - DNA, 40 bp, Homo sapiens
ttgttgtatttgaagaattttactttggcagaattttttt

SEQ ID NO: 54137 - DNA, 40 bp, Homo sapiens
aaaaaaattctgccaaagtaaaattcttcaaatacaacaa

SEQ ID NO: 54138 - DNA, 40 bp, Homo sapiens
tgttgtatttgaagaattttactttggcagaatttttttg

SEQ ID NO: 54139 - DNA, 40 bp, Homo sapiens
caaaaaaattctgccaaagtaaaattcttcaaatacaaca

SEQ ID NO: 54140 - DNA, 40 bp, Homo sapiens
gttgtatttgaagaattttactttggcagaatttttttga

SEQ ID NO: 54141 - DNA, 40 bp, Homo sapiens
tcaaaaaaattctgccaaagtaaaattcttcaaatacaac

SEQ ID NO: 54142 - DNA, 40 bp, Homo sapiens
ttgtatttgaagaattttactttggcagaatttttttgag

SEQ ID NO: 54143 - DNA, 40 bp, Homo sapiens
ctcaaaaaaattctgccaaagtaaaattcttcaaatacaa

SEQ ID NO: 54144 - DNA, 40 bp, Homo sapiens
tgtatttgaagaattttactttggcagaatttttttgagg

SEQ ID NO: 54145 - DNA, 40 bp, Homo sapiens
cctcaaaaaaattctgccaaagtaaaattcttcaaataca

SEQ ID NO: 54146 - DNA, 40 bp, Homo sapiens
gtatttgaagaattttactttggcagaatttttttgagga

SEQ ID NO: 54147 - DNA, 40 bp, Homo sapiens
tcctcaaaaaaattctgccaaagtaaaattcttcaaatac

SEQ ID NO: 54148 - DNA, 40 bp, Homo sapiens
tatttgaagaattttactttggcagaatttttttgaggat

SEQ ID NO: 54149 - DNA, 40 bp, Homo sapiens
atcctcaaaaaaattctgccaaagtaaaattcttcaaata

SEQ ID NO: 54150 - DNA, 40 bp, Homo sapiens
atttgaagaattttactttggcagaatttttttgaggatg

SEQ ID NO: 54151 - DNA, 40 bp, Homo sapiens
catcctcaaaaaaattctgccaaagtaaaattcttcaaat

SEQ ID NO: 54152 - DNA, 40 bp, Homo sapiens
tttgaagaattttactttggcagaatttttttgaggatgt

SEQ ID NO: 54153 - DNA, 40 bp, Homo sapiens
acatcctcaaaaaaattctgccaaagtaaaattcttcaaa

SEQ ID NO: 54154 - DNA, 40 bp, Homo sapiens
ttgaagaattttactttggcagaatttttttgaggatgtg

SEQ ID NO: 54155 - DNA, 40 bp, Homo sapiens
cacatcctcaaaaaaattctgccaaagtaaaattcttcaa

SEQ ID NO: 54156 - DNA, 40 bp, Homo sapiens
tgaagaattttactttggcagaatttttttgaggatgtgt

SEQ ID NO: 54157 - DNA, 40 bp, Homo sapiens
acacatcctcaaaaaaattctgccaaagtaaaattcttca

SEQ ID NO: 54158 - DNA, 40 bp, Homo sapiens
gaagaattttactttggcagaatttttttgaggatgtgtt

SEQ ID NO: 54159 - DNA, 40 bp, Homo sapiens
aacacatcctcaaaaaaattctgccaaagtaaaattcttc

SEQ ID NO: 54160 - DNA, 40 bp, Homo sapiens
aagaattttactttggcagaatttttttgaggatgtgttt

SEQ ID NO: 54161 - DNA, 40 bp, Homo sapiens
aaacacatcctcaaaaaaattctgccaaagtaaaattctt

SEQ ID NO: 54162 - DNA, 40 bp, Homo sapiens
agaattttactttggcagaatttttttgaggatgtgttta

SEQ ID NO: 54163 - DNA, 40 bp, Homo sapiens
taaacacatcctcaaaaaaattctgccaaagtaaaattct

SEQ ID NO: 54164 - DNA, 40 bp, Homo sapiens
gaattttactttggcagaatttttttgaggatgtgtttat

SEQ ID NO: 54165 - DNA, 40 bp, Homo sapiens
ataaacacatcctcaaaaaaattctgccaaagtaaaattc

SEQ ID NO: 54166 - DNA, 40 bp, Homo sapiens
aattttactttggcagaatttttttgaggatgtgtttatt

SEQ ID NO: 54167 - DNA, 40 bp, Homo sapiens
aataaacacatcctcaaaaaaattctgccaaagtaaaatt

SEQ ID NO: 54168 - DNA, 40 bp, Homo sapiens
attttactttggcagaatttttttgaggatgtgtttattt

SEQ ID NO: 54169 - DNA, 40 bp, Homo sapiens
aaataaacacatcctcaaaaaaattctgccaaagtaaaat

SEQ ID NO: 54170 - DNA, 40 bp, Homo sapiens
ttttactttggcagaatttttttgaggatgtgtttatttc

SEQ ID NO: 54171 - DNA, 40 bp, Homo sapiens
gaaataaacacatcctcaaaaaaattctgccaaagtaaaa

SEQ ID NO: 54172 - DNA, 40 bp, Homo sapiens
tttactttggcagaatttttttgaggatgtgtttatttct

SEQ ID NO: 54173 - DNA, 40 bp, Homo sapiens
agaaataaacacatcctcaaaaaaattctgccaaagtaaa

SEQ ID NO: 54174 - DNA, 40 bp, Homo sapiens
ttactttggcagaatttttttgaggatgtgtttatttctg

SEQ ID NO: 54175 - DNA, 40 bp, Homo sapiens
cagaaataaacacatcctcaaaaaaattctgccaaagtaa

SEQ ID NO: 54176 - DNA, 40 bp, Homo sapiens
tactttggcagaatttttttgaggatgtgtttatttctgg

SEQ ID NO: 54177 - DNA, 40 bp, Homo sapiens
ccagaaataaacacatcctcaaaaaaattctgccaaagta

SEQ ID NO: 54178 - DNA, 40 bp, Homo sapiens
actttggcagaatttttttgaggatgtgtttatttctgga

SEQ ID NO: 54179 - DNA, 40 bp, Homo sapiens
tccagaaataaacacatcctcaaaaaaattctgccaaagt

SEQ ID NO: 54180 - DNA, 40 bp, Homo sapiens
ctttggcagaatttttttgaggatgtgtttatttctggag

SEQ ID NO: 54181 - DNA, 40 bp, Homo sapiens
ctccagaaataaacacatcctcaaaaaaattctgccaaag

SEQ ID NO: 54182 - DNA, 40 bp, Homo sapiens
tttggcagaatttttttgaggatgtgtttatttctggaga

SEQ ID NO: 54183 - DNA, 40 bp, Homo sapiens
tctccagaaataaacacatcctcaaaaaaattctgccaaa

SEQ ID NO: 54184 - DNA, 40 bp, Homo sapiens
ttggcagaatttttttgaggatgtgtttatttctggagaa

SEQ ID NO: 54185 - DNA, 40 bp, Homo sapiens
ttctccagaaataaacacatcctcaaaaaaattctgccaa

SEQ ID NO: 54186 - DNA, 40 bp, Homo sapiens
tggcagaatttttttgaggatgtgtttatttctggagaaa

SEQ ID NO: 54187 - DNA, 40 bp, Homo sapiens
tttctccagaaataaacacatcctcaaaaaaattctgcca

SEQ ID NO: 54188 - DNA, 40 bp, Homo sapiens
ggcagaatttttttgaggatgtgtttatttctggagaaag

SEQ ID NO: 54189 - DNA, 40 bp, Homo sapiens
ctttctccagaaataaacacatcctcaaaaaaattctgcc

SEQ ID NO: 54190 - DNA, 40 bp, Homo sapiens
gcagaatttttttgaggatgtgtttatttctggagaaagg

SEQ ID NO: 54191 - DNA, 40 bp, Homo sapiens
cctttctccagaaataaacacatcctcaaaaaaattctgc

SEQ ID NO: 54192 - DNA, 40 bp, Homo sapiens
cagaatttttttgaggatgtgtttatttctggagaaaggt

SEQ ID NO: 54193 - DNA, 40 bp, Homo sapiens
acctttctccagaaataaacacatcctcaaaaaaattctg

SEQ ID NO: 54194 - DNA, 40 bp, Homo sapiens
agaatttttttgaggatgtgtttatttctggagaaaggtc

SEQ ID NO: 54195 - DNA, 40 bp, Homo sapiens
gacctttctccagaaataaacacatcctcaaaaaaattct

SEQ ID NO: 54196 - DNA, 40 bp, Homo sapiens
gaatttttttgaggatgtgtttatttctggagaaaggtct

SEQ ID NO: 54197 - DNA, 40 bp, Homo sapiens
agacctttctccagaaataaacacatcctcaaaaaaattc

SEQ ID NO: 54198 - DNA, 40 bp, Homo sapiens
aatttttttgaggatgtgtttatttctggagaaaggtctc

SEQ ID NO: 54199 - DNA, 40 bp, Homo sapiens
gagacctttctccagaaataaacacatcctcaaaaaaatt

SEQ ID NO: 54200 - DNA, 40 bp, Homo sapiens
atttttttgaggatgtgtttatttctggagaaaggtctca

SEQ ID NO: 54201 - DNA, 40 bp, Homo sapiens
tgagacctttctccagaaataaacacatcctcaaaaaaat

SEQ ID NO: 54202 - DNA, 40 bp, Homo sapiens
tttttttgaggatgtgtttatttctggagaaaggtctcat

SEQ ID NO: 54203 - DNA, 40 bp, Homo sapiens
atgagacctttctccagaaataaacacatcctcaaaaaaa

SEQ ID NO: 54204 - DNA, 40 bp, Homo sapiens
ttttttgaggatgtgtttatttctggagaaaggtctcatt

SEQ ID NO: 54205 - DNA, 40 bp, Homo sapiens
aatgagacctttctccagaaataaacacatcctcaaaaaa

SEQ ID NO: 54206 - DNA, 40 bp, Homo sapiens
tttttgaggatgtgtttatttctggagaaaggtctcatta

SEQ ID NO: 54207 - DNA, 40 bp, Homo sapiens
taatgagacctttctccagaaataaacacatcctcaaaaa

SEQ ID NO: 54208 - DNA, 40 bp, Homo sapiens
ttttgaggatgtgtttatttctggagaaaggtctcattaa

SEQ ID NO: 54209 - DNA, 40 bp, Homo sapiens
ttaatgagacctttctccagaaataaacacatcctcaaaa

SEQ ID NO: 54210 - DNA, 40 bp, Homo sapiens
tttgaggatgtgtttatttctggagaaaggtctcattaaa

SEQ ID NO: 54211 - DNA, 40 bp, Homo sapiens
tttaatgagacctttctccagaaataaacacatcctcaaa

SEQ ID NO: 54212 - DNA, 40 bp, Homo sapiens
ttgaggatgtgtttatttctggagaaaggtctcattaaag

SEQ ID NO: 54213 - DNA, 40 bp, Homo sapiens
ctttaatgagacctttctccagaaataaacacatcctcaa

SEQ ID NO: 54214 - DNA, 40 bp, Homo sapiens
tgaggatgtgtttatttctggagaaaggtctcattaaaga

SEQ ID NO: 54215 - DNA, 40 bp, Homo sapiens
tctttaatgagacctttctccagaaataaacacatcctca

SEQ ID NO: 54216 - DNA, 40 bp, Homo sapiens
gaggatgtgtttatttctggagaaaggtctcattaaagaa

SEQ ID NO: 54217 - DNA, 40 bp, Homo sapiens
ttctttaatgagacctttctccagaaataaacacatcctc

SEQ ID NO: 54218 - DNA, 40 bp, Homo sapiens
aggatgtgtttatttctggagaaaggtctcattaaagaaa

SEQ ID NO: 54219 - DNA, 40 bp, Homo sapiens
tttctttaatgagacctttctccagaaataaacacatcct

SEQ ID NO: 54220 - DNA, 40 bp, Homo sapiens
ggatgtgtttatttctggagaaaggtctcattaaagaaag

SEQ ID NO: 54221 - DNA, 40 bp, Homo sapiens
ctttctttaatgagacctttctccagaaataaacacatcc

SEQ ID NO: 54222 - DNA, 40 bp, Homo sapiens
gatgtgtttatttctggagaaaggtctcattaaagaaaga

SEQ ID NO: 54223 - DNA, 40 bp, Homo sapiens
tctttctttaatgagacctttctccagaaataaacacatc

SEQ ID NO: 54224 - DNA, 40 bp, Homo sapiens
atgtgtttatttctggagaaaggtctcattaaagaaagac

SEQ ID NO: 54225 - DNA, 40 bp, Homo sapiens
gtctttctttaatgagacctttctccagaaataaacacat

SEQ ID NO: 54226 - DNA, 40 bp, Homo sapiens
tgtgtttatttctggagaaaggtctcattaaagaaagaca

SEQ ID NO: 54227 - DNA, 40 bp, Homo sapiens
tgtctttctttaatgagacctttctccagaaataaacaca

SEQ ID NO: 54228 - DNA, 40 bp, Homo sapiens
gtgtttatttctggagaaaggtctcattaaagaaagacaa

SEQ ID NO: 54229 - DNA, 40 bp, Homo sapiens
ttgtctttctttaatgagacctttctccagaaataaacac

SEQ ID NO: 54230 - DNA, 40 bp, Homo sapiens
tgtttatttctggagaaaggtctcattaaagaaagacaat

SEQ ID NO: 54231 - DNA, 40 bp, Homo sapiens
attgtctttctttaatgagacctttctccagaaataaaca

SEQ ID NO: 54232 - DNA, 40 bp, Homo sapiens
gtttatttctggagaaaggtctcattaaagaaagacaata

SEQ ID NO: 54233 - DNA, 40 bp, Homo sapiens
tattgtctttctttaatgagacctttctccagaaataaac

SEQ ID NO: 54234 - DNA, 40 bp, Homo sapiens
tttatttctggagaaaggtctcattaaagaaagacaatac

SEQ ID NO: 54235 - DNA, 40 bp, Homo sapiens
gtattgtctttctttaatgagacctttctccagaaataaa

SEQ ID NO: 54236 - DNA, 40 bp, Homo sapiens
ttatttctggagaaaggtctcattaaagaaagacaatacc

SEQ ID NO: 54237 - DNA, 40 bp, Homo sapiens
ggtattgtctttctttaatgagacctttctccagaaataa

SEQ ID NO: 54238 - DNA, 40 bp, Homo sapiens
tatttctggagaaaggtctcattaaagaaagacaataccc

SEQ ID NO: 54239 - DNA, 40 bp, Homo sapiens
gggtattgtctttctttaatgagacctttctccagaaata

SEQ ID NO: 54240 - DNA, 40 bp, Homo sapiens
atttctggagaaaggtctcattaaagaaagacaataccca

SEQ ID NO: 54241 - DNA, 40 bp, Homo sapiens
tgggtattgtctttctttaatgagacctttctccagaaat

SEQ ID NO: 54242 - DNA, 40 bp, Homo sapiens
tttctggagaaaggtctcattaaagaaagacaatacccag

SEQ ID NO: 54243 - DNA, 40 bp, Homo sapiens
ctgggtattgtctttctttaatgagacctttctccagaaa

SEQ ID NO: 54244 - DNA, 40 bp, Homo sapiens
ttctggagaaaggtctcattaaagaaagacaatacccaga

SEQ ID NO: 54245 - DNA, 40 bp, Homo sapiens
tctgggtattgtctttctttaatgagacctttctccagaa

SEQ ID NO: 54246 - DNA, 40 bp, Homo sapiens
tctggagaaaggtctcattaaagaaagacaatacccagaa

SEQ ID NO: 54247 - DNA, 40 bp, Homo sapiens
ttctgggtattgtctttctttaatgagacctttctccaga

SEQ ID NO: 54248 - DNA, 40 bp, Homo sapiens
ctggagaaaggtctcattaaagaaagacaatacccagaaa

SEQ ID NO: 54249 - DNA, 40 bp, Homo sapiens
tttctgggtattgtctttctttaatgagacctttctccag

SEQ ID NO: 54250 - DNA, 40 bp, Homo sapiens
tggagaaaggtctcattaaagaaagacaatacccagaaag

SEQ ID NO: 54251 - DNA, 40 bp, Homo sapiens
ctttctgggtattgtctttctttaatgagacctttctcca

SEQ ID NO: 54252 - DNA, 40 bp, Homo sapiens
ggagaaaggtctcattaaagaaagacaatacccagaaagc

SEQ ID NO: 54253 - DNA, 40 bp, Homo sapiens
gctttctgggtattgtctttctttaatgagacctttctcc

SEQ ID NO: 54254 - DNA, 40 bp, Homo sapiens
gagaaaggtctcattaaagaaagacaatacccagaaagcc

SEQ ID NO: 54255 - DNA, 40 bp, Homo sapiens
ggctttctgggtattgtctttctttaatgagacctttctc

SEQ ID NO: 54256 - DNA, 40 bp, Homo sapiens
agaaaggtctcattaaagaaagacaatacccagaaagcca

SEQ ID NO: 54257 - DNA, 40 bp, Homo sapiens
tggctttctgggtattgtctttctttaatgagacctttct

SEQ ID NO: 54258 - DNA, 40 bp, Homo sapiens
gaaaggtctcattaaagaaagacaatacccagaaagccaa

SEQ ID NO: 54259 - DNA, 40 bp, Homo sapiens
ttggctttctgggtattgtctttctttaatgagacctttc

SEQ ID NO: 54260 - DNA, 40 bp, Homo sapiens
aaaggtctcattaaagaaagacaatacccagaaagccaac

SEQ ID NO: 54261 - DNA, 40 bp, Homo sapiens
gttggctttctgggtattgtctttctttaatgagaccttt

SEQ ID NO: 54262 - DNA, 40 bp, Homo sapiens
aaggtctcattaaagaaagacaatacccagaaagccaaca

SEQ ID NO: 54263 - DNA, 40 bp, Homo sapiens
tgttggctttctgggtattgtctttctttaatgagacctt

SEQ ID NO: 54264 - DNA, 40 bp, Homo sapiens
aggtctcattaaagaaagacaatacccagaaagccaacag

SEQ ID NO: 54265 - DNA, 40 bp, Homo sapiens
ctgttggctttctgggtattgtctttctttaatgagacct

SEQ ID NO: 54266 - DNA, 40 bp, Homo sapiens
ggtctcattaaagaaagacaatacccagaaagccaacaga

SEQ ID NO: 54267 - DNA, 40 bp, Homo sapiens
tctgttggctttctgggtattgtctttctttaatgagacc

SEQ ID NO: 54268 - DNA, 40 bp, Homo sapiens
gtctcattaaagaaagacaatacccagaaagccaacagaa

SEQ ID NO: 54269 - DNA, 40 bp, Homo sapiens
ttctgttggctttctgggtattgtctttctttaatgagac

SEQ ID NO: 54270 - DNA, 40 bp, Homo sapiens
tctcattaaagaaagacaatacccagaaagccaacagaaa

SEQ ID NO: 54271 - DNA, 40 bp, Homo sapiens
tttctgttggctttctgggtattgtctttctttaatgaga

SEQ ID NO: 54272 - DNA, 40 bp, Homo sapiens
ctcattaaagaaagacaatacccagaaagccaacagaaat

SEQ ID NO: 54273 - DNA, 40 bp, Homo sapiens
atttctgttggctttctgggtattgtctttctttaatgag

SEQ ID NO: 54274 - DNA, 40 bp, Homo sapiens
tcattaaagaaagacaatacccagaaagccaacagaaatt

SEQ ID NO: 54275 - DNA, 40 bp, Homo sapiens
aatttctgttggctttctgggtattgtctttctttaatga

SEQ ID NO: 54276 - DNA, 40 bp, Homo sapiens
cattaaagaaagacaatacccagaaagccaacagaaattc

SEQ ID NO: 54277 - DNA, 40 bp, Homo sapiens
gaatttctgttggctttctgggtattgtctttctttaatg

SEQ ID NO: 54278 - DNA, 40 bp, Homo sapiens
attaaagaaagacaatacccagaaagccaacagaaattct

SEQ ID NO: 54279 - DNA, 40 bp, Homo sapiens
agaatttctgttggctttctgggtattgtctttctttaat

SEQ ID NO: 54280 - DNA, 40 bp, Homo sapiens
ttaaagaaagacaatacccagaaagccaacagaaattctg

SEQ ID NO: 54281 - DNA, 40 bp, Homo sapiens
cagaatttctgttggctttctgggtattgtctttctttaa

SEQ ID NO: 54282 - DNA, 40 bp, Homo sapiens
taaagaaagacaatacccagaaagccaacagaaattctgt

SEQ ID NO: 54283 - DNA, 40 bp, Homo sapiens
acagaatttctgttggctttctgggtattgtctttcttta

SEQ ID NO: 54284 - DNA, 40 bp, Homo sapiens
aaagaaagacaatacccagaaagccaacagaaattctgtt

SEQ ID NO: 54285 - DNA, 40 bp, Homo sapiens
aacagaatttctgttggctttctgggtattgtctttcttt

SEQ ID NO: 54286 - DNA, 40 bp, Homo sapiens
aagaaagacaatacccagaaagccaacagaaattctgtta

SEQ ID NO: 54287 - DNA, 40 bp, Homo sapiens
taacagaatttctgttggctttctgggtattgtctttctt

SEQ ID NO: 54288 - DNA, 40 bp, Homo sapiens
agaaagacaatacccagaaagccaacagaaattctgttac

SEQ ID NO: 54289 - DNA, 40 bp, Homo sapiens
gtaacagaatttctgttggctttctgggtattgtctttct

SEQ ID NO: 54290 - DNA, 40 bp, Homo sapiens
gaaagacaatacccagaaagccaacagaaattctgttact

SEQ ID NO: 54291 - DNA, 40 bp, Homo sapiens
agtaacagaatttctgttggctttctgggtattgtctttc

SEQ ID NO: 54292 - DNA, 40 bp, Homo sapiens
aaagacaatacccagaaagccaacagaaattctgttactc

SEQ ID NO: 54293 - DNA, 40 bp, Homo sapiens
gagtaacagaatttctgttggctttctgggtattgtcttt

SEQ ID NO: 54294 - DNA, 40 bp, Homo sapiens
aagacaatacccagaaagccaacagaaattctgttactca

SEQ ID NO: 54295 - DNA, 40 bp, Homo sapiens
tgagtaacagaatttctgttggctttctgggtattgtctt

SEQ ID NO: 54296 - DNA, 40 bp, Homo sapiens
agacaatacccagaaagccaacagaaattctgttactcat

SEQ ID NO: 54297 - DNA, 40 bp, Homo sapiens
atgagtaacagaatttctgttggctttctgggtattgtct

SEQ ID NO: 54298 - DNA, 40 bp, Homo sapiens
gacaatacccagaaagccaacagaaattctgttactcatt

SEQ ID NO: 54299 - DNA, 40 bp, Homo sapiens
aatgagtaacagaatttctgttggctttctgggtattgtc

SEQ ID NO: 54300 - DNA, 40 bp, Homo sapiens
acaatacccagaaagccaacagaaattctgttactcattt

SEQ ID NO: 54301 - DNA, 40 bp, Homo sapiens
aaatgagtaacagaatttctgttggctttctgggtattgt

SEQ ID NO: 54302 - DNA, 40 bp, Homo sapiens
caatacccagaaagccaacagaaattctgttactcattta

SEQ ID NO: 54303 - DNA, 40 bp, Homo sapiens
taaatgagtaacagaatttctgttggctttctgggtattg

SEQ ID NO: 54304 - DNA, 40 bp, Homo sapiens
aatacccagaaagccaacagaaattctgttactcatttaa

SEQ ID NO: 54305 - DNA, 40 bp, Homo sapiens
ttaaatgagtaacagaatttctgttggctttctgggtatt

SEQ ID NO: 54306 - DNA, 40 bp, Homo sapiens
atacccagaaagccaacagaaattctgttactcatttaat

SEQ ID NO: 54307 - DNA, 40 bp, Homo sapiens
attaaatgagtaacagaatttctgttggctttctgggtat

SEQ ID NO: 54308 - DNA, 40 bp, Homo sapiens
tacccagaaagccaacagaaattctgttactcatttaatg

SEQ ID NO: 54309 - DNA, 40 bp, Homo sapiens
cattaaatgagtaacagaatttctgttggctttctgggta

SEQ ID NO: 54310 - DNA, 40 bp, Homo sapiens
acccagaaagccaacagaaattctgttactcatttaatgc

SEQ ID NO: 54311 - DNA, 40 bp, Homo sapiens
gcattaaatgagtaacagaatttctgttggctttctgggt

SEQ ID NO: 54312 - DNA, 40 bp, Homo sapiens
cccagaaagccaacagaaattctgttactcatttaatgca

SEQ ID NO: 54313 - DNA, 40 bp, Homo sapiens
tgcattaaatgagtaacagaatttctgttggctttctggg

SEQ ID NO: 54314 - DNA, 40 bp, Homo sapiens
ccagaaagccaacagaaattctgttactcatttaatgcat

SEQ ID NO: 54315 - DNA, 40 bp, Homo sapiens
atgcattaaatgagtaacagaatttctgttggctttctgg

SEQ ID NO: 54316 - DNA, 40 bp, Homo sapiens
cagaaagccaacagaaattctgttactcatttaatgcatt

SEQ ID NO: 54317 - DNA, 40 bp, Homo sapiens
aatgcattaaatgagtaacagaatttctgttggctttctg

SEQ ID NO: 54318 - DNA, 40 bp, Homo sapiens
agaaagccaacagaaattctgttactcatttaatgcattt

SEQ ID NO: 54319 - DNA, 40 bp, Homo sapiens
aaatgcattaaatgagtaacagaatttctgttggctttct

SEQ ID NO: 54320 - DNA, 40 bp, Homo sapiens
gaaagccaacagaaattctgttactcatttaatgcatttt

SEQ ID NO: 54321 - DNA, 40 bp, Homo sapiens
aaaatgcattaaatgagtaacagaatttctgttggctttc

SEQ ID NO: 54322 - DNA, 40 bp, Homo sapiens
aaagccaacagaaattctgttactcatttaatgcattttt

SEQ ID NO: 54323 - DNA, 40 bp, Homo sapiens
aaaaatgcattaaatgagtaacagaatttctgttggcttt

SEQ ID NO: 54324 - DNA, 40 bp, Homo sapiens
aagccaacagaaattctgttactcatttaatgcatttttc

SEQ ID NO: 54325 - DNA, 40 bp, Homo sapiens
gaaaaatgcattaaatgagtaacagaatttctgttggctt

SEQ ID NO: 54326 - DNA, 40 bp, Homo sapiens
agccaacagaaattctgttactcatttaatgcatttttct

SEQ ID NO: 54327 - DNA, 40 bp, Homo sapiens
agaaaaatgcattaaatgagtaacagaatttctgttggct

SEQ ID NO: 54328 - DNA, 40 bp, Homo sapiens
gccaacagaaattctgttactcatttaatgcatttttctg

SEQ ID NO: 54329 - DNA, 40 bp, Homo sapiens
cagaaaaatgcattaaatgagtaacagaatttctgttggc

SEQ ID NO: 54330 - DNA, 40 bp, Homo sapiens
ccaacagaaattctgttactcatttaatgcatttttctga

SEQ ID NO: 54331 - DNA, 40 bp, Homo sapiens
tcagaaaaatgcattaaatgagtaacagaatttctgttgg

SEQ ID NO: 54332 - DNA, 40 bp, Homo sapiens
caacagaaattctgttactcatttaatgcatttttctgac

SEQ ID NO: 54333 - DNA, 40 bp, Homo sapiens
gtcagaaaaatgcattaaatgagtaacagaatttctgttg

SEQ ID NO: 54334 - DNA, 40 bp, Homo sapiens
aacagaaattctgttactcatttaatgcatttttctgaca

SEQ ID NO: 54335 - DNA, 40 bp, Homo sapiens
tgtcagaaaaatgcattaaatgagtaacagaatttctgtt

SEQ ID NO: 54336 - DNA, 40 bp, Homo sapiens
acagaaattctgttactcatttaatgcatttttctgacaa

SEQ ID NO: 54337 - DNA, 40 bp, Homo sapiens
ttgtcagaaaaatgcattaaatgagtaacagaatttctgt

SEQ ID NO: 54338 - DNA, 40 bp, Homo sapiens
cagaaattctgttactcatttaatgcatttttctgacaaa

SEQ ID NO: 54339 - DNA, 40 bp, Homo sapiens
tttgtcagaaaaatgcattaaatgagtaacagaatttctg

SEQ ID NO: 54340 - DNA, 40 bp, Homo sapiens
agaaattctgttactcatttaatgcatttttctgacaaaa

SEQ ID NO: 54341 - DNA, 40 bp, Homo sapiens
ttttgtcagaaaaatgcattaaatgagtaacagaatttct

SEQ ID NO: 54342 - DNA, 40 bp, Homo sapiens
gaaattctgttactcatttaatgcatttttctgacaaaaa

SEQ ID NO: 54343 - DNA, 40 bp, Homo sapiens
tttttgtcagaaaaatgcattaaatgagtaacagaatttc

SEQ ID NO: 54344 - DNA, 40 bp, Homo sapiens
aaattctgttactcatttaatgcatttttctgacaaaaat

SEQ ID NO: 54345 - DNA, 40 bp, Homo sapiens
atttttgtcagaaaaatgcattaaatgagtaacagaattt

SEQ ID NO: 54346 - DNA, 40 bp, Homo sapiens
aattctgttactcatttaatgcatttttctgacaaaaatt

SEQ ID NO: 54347 - DNA, 40 bp, Homo sapiens
aatttttgtcagaaaaatgcattaaatgagtaacagaatt

SEQ ID NO: 54348 - DNA, 40 bp, Homo sapiens
attctgttactcatttaatgcatttttctgacaaaaatta

SEQ ID NO: 54349 - DNA, 40 bp, Homo sapiens
taatttttgtcagaaaaatgcattaaatgagtaacagaat

SEQ ID NO: 54350 - DNA, 40 bp, Homo sapiens
ttctgttactcatttaatgcatttttctgacaaaaattat

SEQ ID NO: 54351 - DNA, 40 bp, Homo sapiens
ataatttttgtcagaaaaatgcattaaatgagtaacagaa

SEQ ID NO: 54352 - DNA, 40 bp, Homo sapiens
tctgttactcatttaatgcatttttctgacaaaaattatt

SEQ ID NO: 54353 - DNA, 40 bp, Homo sapiens
aataatttttgtcagaaaaatgcattaaatgagtaacaga

SEQ ID NO: 54354 - DNA, 40 bp, Homo sapiens
ctgttactcatttaatgcatttttctgacaaaaattattg

SEQ ID NO: 54355 - DNA, 40 bp, Homo sapiens
caataatttttgtcagaaaaatgcattaaatgagtaacag

SEQ ID NO: 54356 - DNA, 40 bp, Homo sapiens
tgttactcatttaatgcatttttctgacaaaaattattgc

SEQ ID NO: 54357 - DNA, 40 bp, Homo sapiens
gcaataatttttgtcagaaaaatgcattaaatgagtaaca

SEQ ID NO: 54358 - DNA, 40 bp, Homo sapiens
gttactcatttaatgcatttttctgacaaaaattattgcc

SEQ ID NO: 54359 - DNA, 40 bp, Homo sapiens
ggcaataatttttgtcagaaaaatgcattaaatgagtaac

SEQ ID NO: 54360 - DNA, 40 bp, Homo sapiens
ttactcatttaatgcatttttctgacaaaaattattgcca

SEQ ID NO: 54361 - DNA, 40 bp, Homo sapiens
tggcaataatttttgtcagaaaaatgcattaaatgagtaa

SEQ ID NO: 54362 - DNA, 40 bp, Homo sapiens
tactcatttaatgcatttttctgacaaaaattattgccag

SEQ ID NO: 54363 - DNA, 40 bp, Homo sapiens
ctggcaataatttttgtcagaaaaatgcattaaatgagta

SEQ ID NO: 54364 - DNA, 40 bp, Homo sapiens
actcatttaatgcatttttctgacaaaaattattgccaga

SEQ ID NO: 54365 - DNA, 40 bp, Homo sapiens
tctggcaataatttttgtcagaaaaatgcattaaatgagt

SEQ ID NO: 54366 - DNA, 40 bp, Homo sapiens
ctcatttaatgcatttttctgacaaaaattattgccagag

SEQ ID NO: 54367 - DNA, 40 bp, Homo sapiens
ctctggcaataatttttgtcagaaaaatgcattaaatgag

SEQ ID NO: 54368 - DNA, 40 bp, Homo sapiens
tcatttaatgcatttttctgacaaaaattattgccagaga

SEQ ID NO: 54369 - DNA, 40 bp, Homo sapiens
tctctggcaataatttttgtcagaaaaatgcattaaatga

SEQ ID NO: 54370 - DNA, 40 bp, Homo sapiens
catttaatgcatttttctgacaaaaattattgccagagag

SEQ ID NO: 54371 - DNA, 40 bp, Homo sapiens
ctctctggcaataatttttgtcagaaaaatgcattaaatg

SEQ ID NO: 54372 - DNA, 40 bp, Homo sapiens
atttaatgcatttttctgacaaaaattattgccagagaga

SEQ ID NO: 54373 - DNA, 40 bp, Homo sapiens
tctctctggcaataatttttgtcagaaaaatgcattaaat

SEQ ID NO: 54374 - DNA, 40 bp, Homo sapiens
tttaatgcatttttctgacaaaaattattgccagagagaa

SEQ ID NO: 54375 - DNA, 40 bp, Homo sapiens
ttctctctggcaataatttttgtcagaaaaatgcattaaa

SEQ ID NO: 54376 - DNA, 40 bp, Homo sapiens
ttaatgcatttttctgacaaaaattattgccagagagaac

SEQ ID NO: 54377 - DNA, 40 bp, Homo sapiens
gttctctctggcaataatttttgtcagaaaaatgcattaa

SEQ ID NO: 54378 - DNA, 40 bp, Homo sapiens
taatgcatttttctgacaaaaattattgccagagagaacc

SEQ ID NO: 54379 - DNA, 40 bp, Homo sapiens
ggttctctctggcaataatttttgtcagaaaaatgcatta

SEQ ID NO: 54380 - DNA, 40 bp, Homo sapiens
aatgcatttttctgacaaaaattattgccagagagaacct

SEQ ID NO: 54381 - DNA, 40 bp, Homo sapiens
aggttctctctggcaataatttttgtcagaaaaatgcatt

SEQ ID NO: 54382 - DNA, 40 bp, Homo sapiens
atgcatttttctgacaaaaattattgccagagagaacctg

SEQ ID NO: 54383 - DNA, 40 bp, Homo sapiens
caggttctctctggcaataatttttgtcagaaaaatgcat

SEQ ID NO: 54384 - DNA, 40 bp, Homo sapiens
tgcatttttctgacaaaaattattgccagagagaacctga

SEQ ID NO: 54385 - DNA, 40 bp, Homo sapiens
tcaggttctctctggcaataatttttgtcagaaaaatgca

SEQ ID NO: 54386 - DNA, 40 bp, Homo sapiens
gcatttttctgacaaaaattattgccagagagaacctgaa

SEQ ID NO: 54387 - DNA, 40 bp, Homo sapiens
ttcaggttctctctggcaataatttttgtcagaaaaatgc

SEQ ID NO: 54388 - DNA, 40 bp, Homo sapiens
catttttctgacaaaaattattgccagagagaacctgaat

SEQ ID NO: 54389 - DNA, 40 bp, Homo sapiens
attcaggttctctctggcaataatttttgtcagaaaaatg

SEQ ID NO: 54390 - DNA, 40 bp, Homo sapiens
atttttctgacaaaaattattgccagagagaacctgaatt

SEQ ID NO: 54391 - DNA, 40 bp, Homo sapiens
aattcaggttctctctggcaataatttttgtcagaaaaat

SEQ ID NO: 54392 - DNA, 40 bp, Homo sapiens
tttttctgacaaaaattattgccagagagaacctgaattt

SEQ ID NO: 54393 - DNA, 40 bp, Homo sapiens
aaattcaggttctctctggcaataatttttgtcagaaaaa

SEQ ID NO: 54394 - DNA, 40 bp, Homo sapiens
ttttctgacaaaaattattgccagagagaacctgaatttt

SEQ ID NO: 54395 - DNA, 40 bp, Homo sapiens
aaaattcaggttctctctggcaataatttttgtcagaaaa

SEQ ID NO: 54396 - DNA, 40 bp, Homo sapiens
tttctgacaaaaattattgccagagagaacctgaattttg

SEQ ID NO: 54397 - DNA, 40 bp, Homo sapiens
caaaattcaggttctctctggcaataatttttgtcagaaa

SEQ ID NO: 54398 - DNA, 40 bp, Homo sapiens
ttctgacaaaaattattgccagagagaacctgaattttgt

SEQ ID NO: 54399 - DNA, 40 bp, Homo sapiens
acaaaattcaggttctctctggcaataatttttgtcagaa

SEQ ID NO: 54400 - DNA, 40 bp, Homo sapiens
tctgacaaaaattattgccagagagaacctgaattttgtt

SEQ ID NO: 54401 - DNA, 40 bp, Homo sapiens
aacaaaattcaggttctctctggcaataatttttgtcaga

SEQ ID NO: 54402 - DNA, 40 bp, Homo sapiens
ctgacaaaaattattgccagagagaacctgaattttgttt

SEQ ID NO: 54403 - DNA, 40 bp, Homo sapiens
aaacaaaattcaggttctctctggcaataatttttgtcag

SEQ ID NO: 54404 - DNA, 40 bp, Homo sapiens
tgacaaaaattattgccagagagaacctgaattttgtttc

SEQ ID NO: 54405 - DNA, 40 bp, Homo sapiens
gaaacaaaattcaggttctctctggcaataatttttgtca

SEQ ID NO: 54406 - DNA, 40 bp, Homo sapiens
gacaaaaattattgccagagagaacctgaattttgtttca

SEQ ID NO: 54407 - DNA, 40 bp, Homo sapiens
tgaaacaaaattcaggttctctctggcaataatttttgtc

SEQ ID NO: 54408 - DNA, 40 bp, Homo sapiens
acaaaaattattgccagagagaacctgaattttgtttcaa

SEQ ID NO: 54409 - DNA, 40 bp, Homo sapiens
ttgaaacaaaattcaggttctctctggcaataatttttgt

SEQ ID NO: 54410 - DNA, 40 bp, Homo sapiens
caaaaattattgccagagagaacctgaattttgtttcaaa

SEQ ID NO: 54411 - DNA, 40 bp, Homo sapiens
tttgaaacaaaattcaggttctctctggcaataatttttg

SEQ ID NO: 54412 - DNA, 40 bp, Homo sapiens
aaaaattattgccagagagaacctgaattttgtttcaaaa

SEQ ID NO: 54413 - DNA, 40 bp, Homo sapiens
ttttgaaacaaaattcaggttctctctggcaataattttt

SEQ ID NO: 54414 - DNA, 40 bp, Homo sapiens
aaaattattgccagagagaacctgaattttgtttcaaaaa

SEQ ID NO: 54415 - DNA, 40 bp, Homo sapiens
tttttgaaacaaaattcaggttctctctggcaataatttt

SEQ ID NO: 54416 - DNA, 40 bp, Homo sapiens
aaattattgccagagagaacctgaattttgtttcaaaaat

SEQ ID NO: 54417 - DNA, 40 bp, Homo sapiens
atttttgaaacaaaattcaggttctctctggcaataattt

SEQ ID NO: 54418 - DNA, 40 bp, Homo sapiens
aattattgccagagagaacctgaattttgtttcaaaaatc

SEQ ID NO: 54419 - DNA, 40 bp, Homo sapiens
gatttttgaaacaaaattcaggttctctctggcaataatt

SEQ ID NO: 54420 - DNA, 40 bp, Homo sapiens
attattgccagagagaacctgaattttgtttcaaaaatca

SEQ ID NO: 54421 - DNA, 40 bp, Homo sapiens
tgatttttgaaacaaaattcaggttctctctggcaataat

SEQ ID NO: 54422 - DNA, 40 bp, Homo sapiens
ttattgccagagagaacctgaattttgtttcaaaaatcat

SEQ ID NO: 54423 - DNA, 40 bp, Homo sapiens
atgatttttgaaacaaaattcaggttctctctggcaataa

SEQ ID NO: 54424 - DNA, 40 bp, Homo sapiens
tattgccagagagaacctgaattttgtttcaaaaatcatc

SEQ ID NO: 54425 - DNA, 40 bp, Homo sapiens
gatgatttttgaaacaaaattcaggttctctctggcaata

SEQ ID NO: 54426 - DNA, 40 bp, Homo sapiens
attgccagagagaacctgaattttgtttcaaaaatcatct

SEQ ID NO: 54427 - DNA, 40 bp, Homo sapiens
agatgatttttgaaacaaaattcaggttctctctggcaat

SEQ ID NO: 54428 - DNA, 40 bp, Homo sapiens
ttgccagagagaacctgaattttgtttcaaaaatcatctt

SEQ ID NO: 54429 - DNA, 40 bp, Homo sapiens
aagatgatttttgaaacaaaattcaggttctctctggcaa

SEQ ID NO: 54430 - DNA, 40 bp, Homo sapiens
tgccagagagaacctgaattttgtttcaaaaatcatcttt

SEQ ID NO: 54431 - DNA, 40 bp, Homo sapiens
aaagatgatttttgaaacaaaattcaggttctctctggca

SEQ ID NO: 54432 - DNA, 40 bp, Homo sapiens
gccagagagaacctgaattttgtttcaaaaatcatctttg

SEQ ID NO: 54433 - DNA, 40 bp, Homo sapiens
caaagatgatttttgaaacaaaattcaggttctctctggc

SEQ ID NO: 54434 - DNA, 40 bp, Homo sapiens
ccagagagaacctgaattttgtttcaaaaatcatctttgt

SEQ ID NO: 54435 - DNA, 40 bp, Homo sapiens
acaaagatgatttttgaaacaaaattcaggttctctctgg

SEQ ID NO: 54436 - DNA, 40 bp, Homo sapiens
cagagagaacctgaattttgtttcaaaaatcatctttgtt

SEQ ID NO: 54437 - DNA, 40 bp, Homo sapiens
aacaaagatgatttttgaaacaaaattcaggttctctctg

SEQ ID NO: 54438 - DNA, 40 bp, Homo sapiens
agagagaacctgaattttgtttcaaaaatcatctttgttt

SEQ ID NO: 54439 - DNA, 40 bp, Homo sapiens
aaacaaagatgatttttgaaacaaaattcaggttctctct

SEQ ID NO: 54440 - DNA, 40 bp, Homo sapiens
gagagaacctgaattttgtttcaaaaatcatctttgtttt

SEQ ID NO: 54441 - DNA, 40 bp, Homo sapiens
aaaacaaagatgatttttgaaacaaaattcaggttctctc

SEQ ID NO: 54442 - DNA, 40 bp, Homo sapiens
agagaacctgaattttgtttcaaaaatcatctttgtttta

SEQ ID NO: 54443 - DNA, 40 bp, Homo sapiens
taaaacaaagatgatttttgaaacaaaattcaggttctct

SEQ ID NO: 54444 - DNA, 40 bp, Homo sapiens
gagaacctgaattttgtttcaaaaatcatctttgttttaa

SEQ ID NO: 54445 - DNA, 40 bp, Homo sapiens
ttaaaacaaagatgatttttgaaacaaaattcaggttctc

SEQ ID NO: 54446 - DNA, 40 bp, Homo sapiens
agaacctgaattttgtttcaaaaatcatctttgttttaaa

SEQ ID NO: 54447 - DNA, 40 bp, Homo sapiens
tttaaaacaaagatgatttttgaaacaaaattcaggttct

SEQ ID NO: 54448 - DNA, 40 bp, Homo sapiens
gaacctgaattttgtttcaaaaatcatctttgttttaaaa

SEQ ID NO: 54449 - DNA, 40 bp, Homo sapiens
ttttaaaacaaagatgatttttgaaacaaaattcaggttc

SEQ ID NO: 54450 - DNA, 40 bp, Homo sapiens
aacctgaattttgtttcaaaaatcatctttgttttaaaaa

SEQ ID NO: 54451 - DNA, 40 bp, Homo sapiens
tttttaaaacaaagatgatttttgaaacaaaattcaggtt

SEQ ID NO: 54452 - DNA, 40 bp, Homo sapiens
acctgaattttgtttcaaaaatcatctttgttttaaaaat

SEQ ID NO: 54453 - DNA, 40 bp, Homo sapiens
atttttaaaacaaagatgatttttgaaacaaaattcaggt

SEQ ID NO: 54454 - DNA, 40 bp, Homo sapiens
cctgaattttgtttcaaaaatcatctttgttttaaaaatg

SEQ ID NO: 54455 - DNA, 40 bp, Homo sapiens
catttttaaaacaaagatgatttttgaaacaaaattcagg

SEQ ID NO: 54456 - DNA, 40 bp, Homo sapiens
ctgaattttgtttcaaaaatcatctttgttttaaaaatga

SEQ ID NO: 54457 - DNA, 40 bp, Homo sapiens
tcatttttaaaacaaagatgatttttgaaacaaaattcag

SEQ ID NO: 54458 - DNA, 40 bp, Homo sapiens
tgaattttgtttcaaaaatcatctttgttttaaaaatgac

SEQ ID NO: 54459 - DNA, 40 bp, Homo sapiens
gtcatttttaaaacaaagatgatttttgaaacaaaattca

SEQ ID NO: 54460 - DNA, 40 bp, Homo sapiens
gaattttgtttcaaaaatcatctttgttttaaaaatgact

SEQ ID NO: 54461 - DNA, 40 bp, Homo sapiens
agtcatttttaaaacaaagatgatttttgaaacaaaattc

SEQ ID NO: 54462 - DNA, 40 bp, Homo sapiens
aattttgtttcaaaaatcatctttgttttaaaaatgactt

SEQ ID NO: 54463 - DNA, 40 bp, Homo sapiens
aagtcatttttaaaacaaagatgatttttgaaacaaaatt

SEQ ID NO: 54464 - DNA, 40 bp, Homo sapiens
attttgtttcaaaaatcatctttgttttaaaaatgacttt

SEQ ID NO: 54465 - DNA, 40 bp, Homo sapiens
aaagtcatttttaaaacaaagatgatttttgaaacaaaat

SEQ ID NO: 54466 - DNA, 40 bp, Homo sapiens
ttttgtttcaaaaatcatctttgttttaaaaatgactttt

SEQ ID NO: 54467 - DNA, 40 bp, Homo sapiens
aaaagtcatttttaaaacaaagatgatttttgaaacaaaa

SEQ ID NO: 54468 - DNA, 40 bp, Homo sapiens
tttgtttcaaaaatcatctttgttttaaaaatgacttttt

SEQ ID NO: 54469 - DNA, 40 bp, Homo sapiens
aaaaagtcatttttaaaacaaagatgatttttgaaacaaa

SEQ ID NO: 54470 - DNA, 40 bp, Homo sapiens
ttgtttcaaaaatcatctttgttttaaaaatgactttttc

SEQ ID NO: 54471 - DNA, 40 bp, Homo sapiens
gaaaaagtcatttttaaaacaaagatgatttttgaaacaa

SEQ ID NO: 54472 - DNA, 40 bp, Homo sapiens
tgtttcaaaaatcatctttgttttaaaaatgactttttct

SEQ ID NO: 54473 - DNA, 40 bp, Homo sapiens
agaaaaagtcatttttaaaacaaagatgatttttgaaaca

SEQ ID NO: 54474 - DNA, 40 bp, Homo sapiens
gtttcaaaaatcatctttgttttaaaaatgactttttctt

SEQ ID NO: 54475 - DNA, 40 bp, Homo sapiens
aagaaaaagtcatttttaaaacaaagatgatttttgaaac

SEQ ID NO: 54476 - DNA, 40 bp, Homo sapiens
tttcaaaaatcatctttgttttaaaaatgactttttcttc

SEQ ID NO: 54477 - DNA, 40 bp, Homo sapiens
gaagaaaaagtcatttttaaaacaaagatgatttttgaaa

SEQ ID NO: 54478 - DNA, 40 bp, Homo sapiens
ttcaaaaatcatctttgttttaaaaatgactttttcttca

SEQ ID NO: 54479 - DNA, 40 bp, Homo sapiens
tgaagaaaaagtcatttttaaaacaaagatgatttttgaa

SEQ ID NO: 54480 - DNA, 40 bp, Homo sapiens
tcaaaaatcatctttgttttaaaaatgactttttcttcag

SEQ ID NO: 54481 - DNA, 40 bp, Homo sapiens
ctgaagaaaaagtcatttttaaaacaaagatgatttttga

SEQ ID NO: 54482 - DNA, 40 bp, Homo sapiens
caaaaatcatctttgttttaaaaatgactttttcttcagg

SEQ ID NO: 54483 - DNA, 40 bp, Homo sapiens
cctgaagaaaaagtcatttttaaaacaaagatgatttttg

SEQ ID NO: 54484 - DNA, 40 bp, Homo sapiens
aaaaatcatctttgttttaaaaatgactttttcttcaggt

SEQ ID NO: 54485 - DNA, 40 bp, Homo sapiens
acctgaagaaaaagtcatttttaaaacaaagatgattttt

SEQ ID NO: 54486 - DNA, 40 bp, Homo sapiens
aaaatcatctttgttttaaaaatgactttttcttcaggta

SEQ ID NO: 54487 - DNA, 40 bp, Homo sapiens
tacctgaagaaaaagtcatttttaaaacaaagatgatttt

SEQ ID NO: 54488 - DNA, 40 bp, Homo sapiens
aaatcatctttgttttaaaaatgactttttcttcaggtaa

SEQ ID NO: 54489 - DNA, 40 bp, Homo sapiens
ttacctgaagaaaaagtcatttttaaaacaaagatgattt

SEQ ID NO: 54490 - DNA, 40 bp, Homo sapiens
aatcatctttgttttaaaaatgactttttcttcaggtaaa

SEQ ID NO: 54491 - DNA, 40 bp, Homo sapiens
tttacctgaagaaaaagtcatttttaaaacaaagatgatt

SEQ ID NO: 54492 - DNA, 40 bp, Homo sapiens
atcatctttgttttaaaaatgactttttcttcaggtaaaa

SEQ ID NO: 54493 - DNA, 40 bp, Homo sapiens
ttttacctgaagaaaaagtcatttttaaaacaaagatgat

SEQ ID NO: 54494 - DNA, 40 bp, Homo sapiens
tcatctttgttttaaaaatgactttttcttcaggtaaaat

SEQ ID NO: 54495 - DNA, 40 bp, Homo sapiens
attttacctgaagaaaaagtcatttttaaaacaaagatga

SEQ ID NO: 54496 - DNA, 40 bp, Homo sapiens
catctttgttttaaaaatgactttttcttcaggtaaaata

SEQ ID NO: 54497 - DNA, 40 bp, Homo sapiens
tattttacctgaagaaaaagtcatttttaaaacaaagatg

SEQ ID NO: 54498 - DNA, 40 bp, Homo sapiens
atctttgttttaaaaatgactttttcttcaggtaaaataa

SEQ ID NO: 54499 - DNA, 40 bp, Homo sapiens
ttattttacctgaagaaaaagtcatttttaaaacaaagat

SEQ ID NO: 54500 - DNA, 40 bp, Homo sapiens
tctttgttttaaaaatgactttttcttcaggtaaaataaa

SEQ ID NO: 54501 - DNA, 40 bp, Homo sapiens
tttattttacctgaagaaaaagtcatttttaaaacaaaga

SEQ ID NO: 54502 - DNA, 40 bp, Homo sapiens
ctttgttttaaaaatgactttttcttcaggtaaaataaaa

SEQ ID NO: 54503 - DNA, 40 bp, Homo sapiens
ttttattttacctgaagaaaaagtcatttttaaaacaaag

SEQ ID NO: 54504 - DNA, 40 bp, Homo sapiens
tttgttttaaaaatgactttttcttcaggtaaaataaaat

SEQ ID NO: 54505 - DNA, 40 bp, Homo sapiens
attttattttacctgaagaaaaagtcatttttaaaacaaa

SEQ ID NO: 54506 - DNA, 40 bp, Homo sapiens
ttgttttaaaaatgactttttcttcaggtaaaataaaata

SEQ ID NO: 54507 - DNA, 40 bp, Homo sapiens
tattttattttacctgaagaaaaagtcatttttaaaacaa

SEQ ID NO: 54508 - DNA, 40 bp, Homo sapiens
tgttttaaaaatgactttttcttcaggtaaaataaaataa

SEQ ID NO: 54509 - DNA, 40 bp, Homo sapiens
ttattttattttacctgaagaaaaagtcatttttaaaaca

SEQ ID NO: 54510 - DNA, 40 bp, Homo sapiens
gttttaaaaatgactttttcttcaggtaaaataaaataat

SEQ ID NO: 54511 - DNA, 40 bp, Homo sapiens
attattttattttacctgaagaaaaagtcatttttaaaac

SEQ ID NO: 54512 - DNA, 40 bp, Homo sapiens
ttttaaaaatgactttttcttcaggtaaaataaaataatt

SEQ ID NO: 54513 - DNA, 40 bp, Homo sapiens
aattattttattttacctgaagaaaaagtcatttttaaaa

SEQ ID NO: 54514 - DNA, 40 bp, Homo sapiens
tttaaaaatgactttttcttcaggtaaaataaaataattt

SEQ ID NO: 54515 - DNA, 40 bp, Homo sapiens
aaattattttattttacctgaagaaaaagtcatttttaaa

SEQ ID NO: 54516 - DNA, 40 bp, Homo sapiens
ttaaaaatgactttttcttcaggtaaaataaaataatttc

SEQ ID NO: 54517 - DNA, 40 bp, Homo sapiens
gaaattattttattttacctgaagaaaaagtcatttttaa

SEQ ID NO: 54518 - DNA, 40 bp, Homo sapiens
taaaaatgactttttcttcaggtaaaataaaataatttca

SEQ ID NO: 54519 - DNA, 40 bp, Homo sapiens
tgaaattattttattttacctgaagaaaaagtcattttta

SEQ ID NO: 54520 - DNA, 40 bp, Homo sapiens
aaaaatgactttttcttcaggtaaaataaaataatttcag

SEQ ID NO: 54521 - DNA, 40 bp, Homo sapiens
ctgaaattattttattttacctgaagaaaaagtcattttt

SEQ ID NO: 54522 - DNA, 40 bp, Homo sapiens
aaaatgactttttcttcaggtaaaataaaataatttcagt

SEQ ID NO: 54523 - DNA, 40 bp, Homo sapiens
actgaaattattttattttacctgaagaaaaagtcatttt

SEQ ID NO: 54524 - DNA, 40 bp, Homo sapiens
aaatgactttttcttcaggtaaaataaaataatttcagtt

SEQ ID NO: 54525 - DNA, 40 bp, Homo sapiens
aactgaaattattttattttacctgaagaaaaagtcattt

SEQ ID NO: 54526 - DNA, 40 bp, Homo sapiens
aatgactttttcttcaggtaaaataaaataatttcagttg

SEQ ID NO: 54527 - DNA, 40 bp, Homo sapiens
caactgaaattattttattttacctgaagaaaaagtcatt

SEQ ID NO: 54528 - DNA, 40 bp, Homo sapiens
atgactttttcttcaggtaaaataaaataatttcagttgc

SEQ ID NO: 54529 - DNA, 40 bp, Homo sapiens
gcaactgaaattattttattttacctgaagaaaaagtcat

SEQ ID NO: 54530 - DNA, 40 bp, Homo sapiens
tgactttttcttcaggtaaaataaaataatttcagttgct

SEQ ID NO: 54531 - DNA, 40 bp, Homo sapiens
agcaactgaaattattttattttacctgaagaaaaagtca

SEQ ID NO: 54532 - DNA, 40 bp, Homo sapiens
gactttttcttcaggtaaaataaaataatttcagttgcta

SEQ ID NO: 54533 - DNA, 40 bp, Homo sapiens
tagcaactgaaattattttattttacctgaagaaaaagtc

SEQ ID NO: 54534 - DNA, 40 bp, Homo sapiens
actttttcttcaggtaaaataaaataatttcagttgctat

SEQ ID NO: 54535 - DNA, 40 bp, Homo sapiens
atagcaactgaaattattttattttacctgaagaaaaagt

SEQ ID NO: 54536 - DNA, 40 bp, Homo sapiens
ctttttcttcaggtaaaataaaataatttcagttgctatt

SEQ ID NO: 54537 - DNA, 40 bp, Homo sapiens
aatagcaactgaaattattttattttacctgaagaaaaag

SEQ ID NO: 54538 - DNA, 40 bp, Homo sapiens
tttttcttcaggtaaaataaaataatttcagttgctatta

SEQ ID NO: 54539 - DNA, 40 bp, Homo sapiens
taatagcaactgaaattattttattttacctgaagaaaaa

SEQ ID NO: 54540 - DNA, 40 bp, Homo sapiens
ttttcttcaggtaaaataaaataatttcagttgctattat

SEQ ID NO: 54541 - DNA, 40 bp, Homo sapiens
ataatagcaactgaaattattttattttacctgaagaaaa

SEQ ID NO: 54542 - DNA, 40 bp, Homo sapiens
tttcttcaggtaaaataaaataatttcagttgctattatt

SEQ ID NO: 54543 - DNA, 40 bp, Homo sapiens
aataatagcaactgaaattattttattttacctgaagaaa

SEQ ID NO: 54544 - DNA, 40 bp, Homo sapiens
ttcttcaggtaaaataaaataatttcagttgctattattt

SEQ ID NO: 54545 - DNA, 40 bp, Homo sapiens
aaataatagcaactgaaattattttattttacctgaagaa

SEQ ID NO: 54546 - DNA, 40 bp, Homo sapiens
tcttcaggtaaaataaaataatttcagttgctattattta

SEQ ID NO: 54547 - DNA, 40 bp, Homo sapiens
taaataatagcaactgaaattattttattttacctgaaga

SEQ ID NO: 54548 - DNA, 40 bp, Homo sapiens
cttcaggtaaaataaaataatttcagttgctattatttaa

SEQ ID NO: 54549 - DNA, 40 bp, Homo sapiens
ttaaataatagcaactgaaattattttattttacctgaag

SEQ ID NO: 54550 - DNA, 40 bp, Homo sapiens
ttcaggtaaaataaaataatttcagttgctattatttaac

SEQ ID NO: 54551 - DNA, 40 bp, Homo sapiens
gttaaataatagcaactgaaattattttattttacctgaa

SEQ ID NO: 54552 - DNA, 40 bp, Homo sapiens
tcaggtaaaataaaataatttcagttgctattatttaacc

SEQ ID NO: 54553 - DNA, 40 bp, Homo sapiens
ggttaaataatagcaactgaaattattttattttacctga

SEQ ID NO: 54554 - DNA, 40 bp, Homo sapiens
caggtaaaataaaataatttcagttgctattatttaacct

SEQ ID NO: 54555 - DNA, 40 bp, Homo sapiens
aggttaaataatagcaactgaaattattttattttacctg

SEQ ID NO: 54556 - DNA, 40 bp, Homo sapiens
aggtaaaataaaataatttcagttgctattatttaacctg

SEQ ID NO: 54557 - DNA, 40 bp, Homo sapiens
caggttaaataatagcaactgaaattattttattttacct

SEQ ID NO: 54558 - DNA, 40 bp, Homo sapiens
ggtaaaataaaataatttcagttgctattatttaacctgt

SEQ ID NO: 54559 - DNA, 40 bp, Homo sapiens
acaggttaaataatagcaactgaaattattttattttacc

SEQ ID NO: 54560 - DNA, 40 bp, Homo sapiens
gtaaaataaaataatttcagttgctattatttaacctgtt

SEQ ID NO: 54561 - DNA, 40 bp, Homo sapiens
aacaggttaaataatagcaactgaaattattttattttac

SEQ ID NO: 54562 - DNA, 40 bp, Homo sapiens
taaaataaaataatttcagttgctattatttaacctgttt

SEQ ID NO: 54563 - DNA, 40 bp, Homo sapiens
aaacaggttaaataatagcaactgaaattattttatttta

SEQ ID NO: 54564 - DNA, 40 bp, Homo sapiens
aaaataaaataatttcagttgctattatttaacctgtttg

SEQ ID NO: 54565 - DNA, 40 bp, Homo sapiens
caaacaggttaaataatagcaactgaaattattttatttt

SEQ ID NO: 54566 - DNA, 40 bp, Homo sapiens
aaataaaataatttcagttgctattatttaacctgtttgt

SEQ ID NO: 54567 - DNA, 40 bp, Homo sapiens
acaaacaggttaaataatagcaactgaaattattttattt

SEQ ID NO: 54568 - DNA, 40 bp, Homo sapiens
aataaaataatttcagttgctattatttaacctgtttgta

SEQ ID NO: 54569 - DNA, 40 bp, Homo sapiens
tacaaacaggttaaataatagcaactgaaattattttatt

SEQ ID NO: 54570 - DNA, 40 bp, Homo sapiens
ataaaataatttcagttgctattatttaacctgtttgtat

SEQ ID NO: 54571 - DNA, 40 bp, Homo sapiens
atacaaacaggttaaataatagcaactgaaattattttat

SEQ ID NO: 54572 - DNA, 40 bp, Homo sapiens
taaaataatttcagttgctattatttaacctgtttgtatg

SEQ ID NO: 54573 - DNA, 40 bp, Homo sapiens
catacaaacaggttaaataatagcaactgaaattatttta

SEQ ID NO: 54574 - DNA, 40 bp, Homo sapiens
aaaataatttcagttgctattatttaacctgtttgtatga

SEQ ID NO: 54575 - DNA, 40 bp, Homo sapiens
tcatacaaacaggttaaataatagcaactgaaattatttt

SEQ ID NO: 54576 - DNA, 40 bp, Homo sapiens
aaataatttcagttgctattatttaacctgtttgtatgaa

SEQ ID NO: 54577 - DNA, 40 bp, Homo sapiens
ttcatacaaacaggttaaataatagcaactgaaattattt

SEQ ID NO: 54578 - DNA, 40 bp, Homo sapiens
aataatttcagttgctattatttaacctgtttgtatgaag

SEQ ID NO: 54579 - DNA, 40 bp, Homo sapiens
cttcatacaaacaggttaaataatagcaactgaaattatt

SEQ ID NO: 54580 - DNA, 40 bp, Homo sapiens
ataatttcagttgctattatttaacctgtttgtatgaaga

SEQ ID NO: 54581 - DNA, 40 bp, Homo sapiens
tcttcatacaaacaggttaaataatagcaactgaaattat

SEQ ID NO: 54582 - DNA, 40 bp, Homo sapiens
taatttcagttgctattatttaacctgtttgtatgaagag

SEQ ID NO: 54583 - DNA, 40 bp, Homo sapiens
ctcttcatacaaacaggttaaataatagcaactgaaatta

SEQ ID NO: 54584 - DNA, 40 bp, Homo sapiens
aatttcagttgctattatttaacctgtttgtatgaagagt

SEQ ID NO: 54585 - DNA, 40 bp, Homo sapiens
actcttcatacaaacaggttaaataatagcaactgaaatt

SEQ ID NO: 54586 - DNA, 40 bp, Homo sapiens
atttcagttgctattatttaacctgtttgtatgaagagtt

SEQ ID NO: 54587 - DNA, 40 bp, Homo sapiens
aactcttcatacaaacaggttaaataatagcaactgaaat

SEQ ID NO: 54588 - DNA, 40 bp, Homo sapiens
tttcagttgctattatttaacctgtttgtatgaagagttt

SEQ ID NO: 54589 - DNA, 40 bp, Homo sapiens
aaactcttcatacaaacaggttaaataatagcaactgaaa

SEQ ID NO: 54590 - DNA, 40 bp, Homo sapiens
ttcagttgctattatttaacctgtttgtatgaagagttta

SEQ ID NO: 54591 - DNA, 40 bp, Homo sapiens
taaactcttcatacaaacaggttaaataatagcaactgaa

SEQ ID NO: 54592 - DNA, 40 bp, Homo sapiens
tcagttgctattatttaacctgtttgtatgaagagtttaa

SEQ ID NO: 54593 - DNA, 40 bp, Homo sapiens
ttaaactcttcatacaaacaggttaaataatagcaactga

SEQ ID NO: 54594 - DNA, 40 bp, Homo sapiens
cagttgctattatttaacctgtttgtatgaagagtttaac

SEQ ID NO: 54595 - DNA, 40 bp, Homo sapiens
gttaaactcttcatacaaacaggttaaataatagcaactg

SEQ ID NO: 54596 - DNA, 40 bp, Homo sapiens
agttgctattatttaacctgtttgtatgaagagtttaaca

SEQ ID NO: 54597 - DNA, 40 bp, Homo sapiens
tgttaaactcttcatacaaacaggttaaataatagcaact

SEQ ID NO: 54598 - DNA, 40 bp, Homo sapiens
gttgctattatttaacctgtttgtatgaagagtttaacat

SEQ ID NO: 54599 - DNA, 40 bp, Homo sapiens
atgttaaactcttcatacaaacaggttaaataatagcaac

SEQ ID NO: 54600 - DNA, 40 bp, Homo sapiens
ttgctattatttaacctgtttgtatgaagagtttaacata

SEQ ID NO: 54601 - DNA, 40 bp, Homo sapiens
tatgttaaactcttcatacaaacaggttaaataatagcaa

SEQ ID NO: 54602 - DNA, 40 bp, Homo sapiens
tgctattatttaacctgtttgtatgaagagtttaacatat

SEQ ID NO: 54603 - DNA, 40 bp, Homo sapiens
atatgttaaactcttcatacaaacaggttaaataatagca

SEQ ID NO: 54604 - DNA, 40 bp, Homo sapiens
gctattatttaacctgtttgtatgaagagtttaacatata

SEQ ID NO: 54605 - DNA, 40 bp, Homo sapiens
tatatgttaaactcttcatacaaacaggttaaataatagc

SEQ ID NO: 54606 - DNA, 40 bp, Homo sapiens
ctattatttaacctgtttgtatgaagagtttaacatatag

SEQ ID NO: 54607 - DNA, 40 bp, Homo sapiens
ctatatgttaaactcttcatacaaacaggttaaataatag

SEQ ID NO: 54608 - DNA, 40 bp, Homo sapiens
tattatttaacctgtttgtatgaagagtttaacatatagg

SEQ ID NO: 54609 - DNA, 40 bp, Homo sapiens
cctatatgttaaactcttcatacaaacaggttaaataata

SEQ ID NO: 54610 - DNA, 40 bp, Homo sapiens
attatttaacctgtttgtatgaagagtttaacatatagga

SEQ ID NO: 54611 - DNA, 40 bp, Homo sapiens
tcctatatgttaaactcttcatacaaacaggttaaataat

SEQ ID NO: 54612 - DNA, 40 bp, Homo sapiens
ttatttaacctgtttgtatgaagagtttaacatataggaa

SEQ ID NO: 54613 - DNA, 40 bp, Homo sapiens
ttcctatatgttaaactcttcatacaaacaggttaaataa

SEQ ID NO: 54614 - DNA, 40 bp, Homo sapiens
tatttaacctgtttgtatgaagagtttaacatataggaaa

SEQ ID NO: 54615 - DNA, 40 bp, Homo sapiens
tttcctatatgttaaactcttcatacaaacaggttaaata

SEQ ID NO: 54616 - DNA, 40 bp, Homo sapiens
atttaacctgtttgtatgaagagtttaacatataggaaat

SEQ ID NO: 54617 - DNA, 40 bp, Homo sapiens
atttcctatatgttaaactcttcatacaaacaggttaaat

SEQ ID NO: 54618 - DNA, 40 bp, Homo sapiens
tttaacctgtttgtatgaagagtttaacatataggaaatg

SEQ ID NO: 54619 - DNA, 40 bp, Homo sapiens
catttcctatatgttaaactcttcatacaaacaggttaaa

SEQ ID NO: 54620 - DNA, 40 bp, Homo sapiens
ttaacctgtttgtatgaagagtttaacatataggaaatga

SEQ ID NO: 54621 - DNA, 40 bp, Homo sapiens
tcatttcctatatgttaaactcttcatacaaacaggttaa

SEQ ID NO: 54622 - DNA, 40 bp, Homo sapiens
taacctgtttgtatgaagagtttaacatataggaaatgaa

SEQ ID NO: 54623 - DNA, 40 bp, Homo sapiens
ttcatttcctatatgttaaactcttcatacaaacaggtta

SEQ ID NO: 54624 - DNA, 40 bp, Homo sapiens
aacctgtttgtatgaagagtttaacatataggaaatgaat

SEQ ID NO: 54625 - DNA, 40 bp, Homo sapiens
attcatttcctatatgttaaactcttcatacaaacaggtt

SEQ ID NO: 54626 - DNA, 40 bp, Homo sapiens
acctgtttgtatgaagagtttaacatataggaaatgaata

SEQ ID NO: 54627 - DNA, 40 bp, Homo sapiens
tattcatttcctatatgttaaactcttcatacaaacaggt

SEQ ID NO: 54628 - DNA, 40 bp, Homo sapiens
cctgtttgtatgaagagtttaacatataggaaatgaatac

SEQ ID NO: 54629 - DNA, 40 bp, Homo sapiens
gtattcatttcctatatgttaaactcttcatacaaacagg

SEQ ID NO: 54630 - DNA, 40 bp, Homo sapiens
ctgtttgtatgaagagtttaacatataggaaatgaataca

SEQ ID NO: 54631 - DNA, 40 bp, Homo sapiens
tgtattcatttcctatatgttaaactcttcatacaaacag

SEQ ID NO: 54632 - DNA, 40 bp, Homo sapiens
tgtttgtatgaagagtttaacatataggaaatgaatacat

SEQ ID NO: 54633 - DNA, 40 bp, Homo sapiens
atgtattcatttcctatatgttaaactcttcatacaaaca

SEQ ID NO: 54634 - DNA, 40 bp, Homo sapiens
gtttgtatgaagagtttaacatataggaaatgaatacata

SEQ ID NO: 54635 - DNA, 40 bp, Homo sapiens
tatgtattcatttcctatatgttaaactcttcatacaaac

SEQ ID NO: 54636 - DNA, 40 bp, Homo sapiens
tttgtatgaagagtttaacatataggaaatgaatacataa

SEQ ID NO: 54637 - DNA, 40 bp, Homo sapiens
ttatgtattcatttcctatatgttaaactcttcatacaaa

SEQ ID NO: 54638 - DNA, 40 bp, Homo sapiens
ttgtatgaagagtttaacatataggaaatgaatacataaa

SEQ ID NO: 54639 - DNA, 40 bp, Homo sapiens
tttatgtattcatttcctatatgttaaactcttcatacaa

SEQ ID NO: 54640 - DNA, 40 bp, Homo sapiens
tgtatgaagagtttaacatataggaaatgaatacataaag

SEQ ID NO: 54641 - DNA, 40 bp, Homo sapiens
ctttatgtattcatttcctatatgttaaactcttcataca

SEQ ID NO: 54642 - DNA, 40 bp, Homo sapiens
gtatgaagagtttaacatataggaaatgaatacataaaga

SEQ ID NO: 54643 - DNA, 40 bp, Homo sapiens
tctttatgtattcatttcctatatgttaaactcttcatac

SEQ ID NO: 54644 - DNA, 40 bp, Homo sapiens
tatgaagagtttaacatataggaaatgaatacataaagat

SEQ ID NO: 54645 - DNA, 40 bp, Homo sapiens
atctttatgtattcatttcctatatgttaaactcttcata

SEQ ID NO: 54646 - DNA, 40 bp, Homo sapiens
atgaagagtttaacatataggaaatgaatacataaagata

SEQ ID NO: 54647 - DNA, 40 bp, Homo sapiens
tatctttatgtattcatttcctatatgttaaactcttcat

SEQ ID NO: 54648 - DNA, 40 bp, Homo sapiens
tgaagagtttaacatataggaaatgaatacataaagatag

SEQ ID NO: 54649 - DNA, 40 bp, Homo sapiens
ctatctttatgtattcatttcctatatgttaaactcttca

SEQ ID NO: 54650 - DNA, 40 bp, Homo sapiens
gaagagtttaacatataggaaatgaatacataaagatagg

SEQ ID NO: 54651 - DNA, 40 bp, Homo sapiens
cctatctttatgtattcatttcctatatgttaaactcttc

SEQ ID NO: 54652 - DNA, 40 bp, Homo sapiens
aagagtttaacatataggaaatgaatacataaagatagga

SEQ ID NO: 54653 - DNA, 40 bp, Homo sapiens
tcctatctttatgtattcatttcctatatgttaaactctt

SEQ ID NO: 54654 - DNA, 40 bp, Homo sapiens
agagtttaacatataggaaatgaatacataaagataggaa

SEQ ID NO: 54655 - DNA, 40 bp, Homo sapiens
ttcctatctttatgtattcatttcctatatgttaaactct

SEQ ID NO: 54656 - DNA, 40 bp, Homo sapiens
gagtttaacatataggaaatgaatacataaagataggaag

SEQ ID NO: 54657 - DNA, 40 bp, Homo sapiens
cttcctatctttatgtattcatttcctatatgttaaactc

SEQ ID NO: 54658 - DNA, 40 bp, Homo sapiens
agtttaacatataggaaatgaatacataaagataggaagg

SEQ ID NO: 54659 - DNA, 40 bp, Homo sapiens
ccttcctatctttatgtattcatttcctatatgttaaact

SEQ ID NO: 54660 - DNA, 40 bp, Homo sapiens
gtttaacatataggaaatgaatacataaagataggaagga

SEQ ID NO: 54661 - DNA, 40 bp, Homo sapiens
tccttcctatctttatgtattcatttcctatatgttaaac

SEQ ID NO: 54662 - DNA, 40 bp, Homo sapiens
tttaacatataggaaatgaatacataaagataggaaggaa

SEQ ID NO: 54663 - DNA, 40 bp, Homo sapiens
ttccttcctatctttatgtattcatttcctatatgttaaa

SEQ ID NO: 54664 - DNA, 40 bp, Homo sapiens
ttaacatataggaaatgaatacataaagataggaaggaat

SEQ ID NO: 54665 - DNA, 40 bp, Homo sapiens
attccttcctatctttatgtattcatttcctatatgttaa

SEQ ID NO: 54666 - DNA, 40 bp, Homo sapiens
taacatataggaaatgaatacataaagataggaaggaatt

SEQ ID NO: 54667 - DNA, 40 bp, Homo sapiens
aattccttcctatctttatgtattcatttcctatatgtta

SEQ ID NO: 54668 - DNA, 40 bp, Homo sapiens
aacatataggaaatgaatacataaagataggaaggaatta

SEQ ID NO: 54669 - DNA, 40 bp, Homo sapiens
taattccttcctatctttatgtattcatttcctatatgtt

SEQ ID NO: 54670 - DNA, 40 bp, Homo sapiens
acatataggaaatgaatacataaagataggaaggaattaa

SEQ ID NO: 54671 - DNA, 40 bp, Homo sapiens
ttaattccttcctatctttatgtattcatttcctatatgt

SEQ ID NO: 54672 - DNA, 40 bp, Homo sapiens
catataggaaatgaatacataaagataggaaggaattaat

SEQ ID NO: 54673 - DNA, 40 bp, Homo sapiens
attaattccttcctatctttatgtattcatttcctatatg

SEQ ID NO: 54674 - DNA, 40 bp, Homo sapiens
atataggaaatgaatacataaagataggaaggaattaatt

SEQ ID NO: 54675 - DNA, 40 bp, Homo sapiens
aattaattccttcctatctttatgtattcatttcctatat

SEQ ID NO: 54676 - DNA, 40 bp, Homo sapiens
tataggaaatgaatacataaagataggaaggaattaattg

SEQ ID NO: 54677 - DNA, 40 bp, Homo sapiens
caattaattccttcctatctttatgtattcatttcctata

SEQ ID NO: 54678 - DNA, 40 bp, Homo sapiens
ataggaaatgaatacataaagataggaaggaattaattgt

SEQ ID NO: 54679 - DNA, 40 bp, Homo sapiens
acaattaattccttcctatctttatgtattcatttcctat

SEQ ID NO: 54680 - DNA, 40 bp, Homo sapiens
taggaaatgaatacataaagataggaaggaattaattgtt

SEQ ID NO: 54681 - DNA, 40 bp, Homo sapiens
aacaattaattccttcctatctttatgtattcatttccta

SEQ ID NO: 54682 - DNA, 40 bp, Homo sapiens
aggaaatgaatacataaagataggaaggaattaattgtta

SEQ ID NO: 54683 - DNA, 40 bp, Homo sapiens
taacaattaattccttcctatctttatgtattcatttcct

SEQ ID NO: 54684 - DNA, 40 bp, Homo sapiens
ggaaatgaatacataaagataggaaggaattaattgttat

SEQ ID NO: 54685 - DNA, 40 bp, Homo sapiens
ataacaattaattccttcctatctttatgtattcatttcc

SEQ ID NO: 54686 - DNA, 40 bp, Homo sapiens
gaaatgaatacataaagataggaaggaattaattgttata

SEQ ID NO: 54687 - DNA, 40 bp, Homo sapiens
tataacaattaattccttcctatctttatgtattcatttc

SEQ ID NO: 54688 - DNA, 40 bp, Homo sapiens
aaatgaatacataaagataggaaggaattaattgttatat

SEQ ID NO: 54689 - DNA, 40 bp, Homo sapiens
atataacaattaattccttcctatctttatgtattcattt

SEQ ID NO: 54690 - DNA, 40 bp, Homo sapiens
aatgaatacataaagataggaaggaattaattgttatatg

SEQ ID NO: 54691 - DNA, 40 bp, Homo sapiens
catataacaattaattccttcctatctttatgtattcatt

SEQ ID NO: 54692 - DNA, 40 bp, Homo sapiens
atgaatacataaagataggaaggaattaattgttatatgt

SEQ ID NO: 54693 - DNA, 40 bp, Homo sapiens
acatataacaattaattccttcctatctttatgtattcat

SEQ ID NO: 54694 - DNA, 40 bp, Homo sapiens
tgaatacataaagataggaaggaattaattgttatatgta

SEQ ID NO: 54695 - DNA, 40 bp, Homo sapiens
tacatataacaattaattccttcctatctttatgtattca

SEQ ID NO: 54696 - DNA, 40 bp, Homo sapiens
gaatacataaagataggaaggaattaattgttatatgtag

SEQ ID NO: 54697 - DNA, 40 bp, Homo sapiens
ctacatataacaattaattccttcctatctttatgtattc

SEQ ID NO: 54698 - DNA, 40 bp, Homo sapiens
aatacataaagataggaaggaattaattgttatatgtagt

SEQ ID NO: 54699 - DNA, 40 bp, Homo sapiens
actacatataacaattaattccttcctatctttatgtatt

SEQ ID NO: 54700 - DNA, 40 bp, Homo sapiens
atacataaagataggaaggaattaattgttatatgtagtc

SEQ ID NO: 54701 - DNA, 40 bp, Homo sapiens
gactacatataacaattaattccttcctatctttatgtat

SEQ ID NO: 54702 - DNA, 40 bp, Homo sapiens
tacataaagataggaaggaattaattgttatatgtagtca

SEQ ID NO: 54703 - DNA, 40 bp, Homo sapiens
tgactacatataacaattaattccttcctatctttatgta

SEQ ID NO: 54704 - DNA, 40 bp, Homo sapiens
acataaagataggaaggaattaattgttatatgtagtcat

SEQ ID NO: 54705 - DNA, 40 bp, Homo sapiens
atgactacatataacaattaattccttcctatctttatgt

SEQ ID NO: 54706 - DNA, 40 bp, Homo sapiens
cataaagataggaaggaattaattgttatatgtagtcata

SEQ ID NO: 54707 - DNA, 40 bp, Homo sapiens
tatgactacatataacaattaattccttcctatctttatg

SEQ ID NO: 54708 - DNA, 40 bp, Homo sapiens
ataaagataggaaggaattaattgttatatgtagtcatat

SEQ ID NO: 54709 - DNA, 40 bp, Homo sapiens
atatgactacatataacaattaattccttcctatctttat

SEQ ID NO: 54710 - DNA, 40 bp, Homo sapiens
taaagataggaaggaattaattgttatatgtagtcatatg

SEQ ID NO: 54711 - DNA, 40 bp, Homo sapiens
catatgactacatataacaattaattccttcctatcttta

SEQ ID NO: 54712 - DNA, 40 bp, Homo sapiens
aaagataggaaggaattaattgttatatgtagtcatatgt

SEQ ID NO: 54713 - DNA, 40 bp, Homo sapiens
acatatgactacatataacaattaattccttcctatcttt

SEQ ID NO: 54714 - DNA, 40 bp, Homo sapiens
aagataggaaggaattaattgttatatgtagtcatatgtc

SEQ ID NO: 54715 - DNA, 40 bp, Homo sapiens
gacatatgactacatataacaattaattccttcctatctt

SEQ ID NO: 54716 - DNA, 40 bp, Homo sapiens
agataggaaggaattaattgttatatgtagtcatatgtct

SEQ ID NO: 54717 - DNA, 40 bp, Homo sapiens
agacatatgactacatataacaattaattccttcctatct

SEQ ID NO: 54718 - DNA, 40 bp, Homo sapiens
gataggaaggaattaattgttatatgtagtcatatgtctc

SEQ ID NO: 54719 - DNA, 40 bp, Homo sapiens
gagacatatgactacatataacaattaattccttcctatc

SEQ ID NO: 54720 - DNA, 40 bp, Homo sapiens
ataggaaggaattaattgttatatgtagtcatatgtctct

SEQ ID NO: 54721 - DNA, 40 bp, Homo sapiens
agagacatatgactacatataacaattaattccttcctat

SEQ ID NO: 54722 - DNA, 40 bp, Homo sapiens
taggaaggaattaattgttatatgtagtcatatgtctctt

SEQ ID NO: 54723 - DNA, 40 bp, Homo sapiens
aagagacatatgactacatataacaattaattccttccta

SEQ ID NO: 54724 - DNA, 40 bp, Homo sapiens
aggaaggaattaattgttatatgtagtcatatgtctctta

SEQ ID NO: 54725 - DNA, 40 bp, Homo sapiens
taagagacatatgactacatataacaattaattccttcct

SEQ ID NO: 54726 - DNA, 40 bp, Homo sapiens
ggaaggaattaattgttatatgtagtcatatgtctcttaa

SEQ ID NO: 54727 - DNA, 40 bp, Homo sapiens
ttaagagacatatgactacatataacaattaattccttcc

SEQ ID NO: 54728 - DNA, 40 bp, Homo sapiens
gaaggaattaattgttatatgtagtcatatgtctcttaat

SEQ ID NO: 54729 - DNA, 40 bp, Homo sapiens
attaagagacatatgactacatataacaattaattccttc

SEQ ID NO: 54730 - DNA, 40 bp, Homo sapiens
aaggaattaattgttatatgtagtcatatgtctcttaatg

SEQ ID NO: 54731 - DNA, 40 bp, Homo sapiens
cattaagagacatatgactacatataacaattaattcctt

SEQ ID NO: 54732 - DNA, 40 bp, Homo sapiens
aggaattaattgttatatgtagtcatatgtctcttaatga

SEQ ID NO: 54733 - DNA, 40 bp, Homo sapiens
tcattaagagacatatgactacatataacaattaattcct

SEQ ID NO: 54734 - DNA, 40 bp, Homo sapiens
ggaattaattgttatatgtagtcatatgtctcttaatgac

SEQ ID NO: 54735 - DNA, 40 bp, Homo sapiens
gtcattaagagacatatgactacatataacaattaattcc

SEQ ID NO: 54736 - DNA, 40 bp, Homo sapiens
gaattaattgttatatgtagtcatatgtctcttaatgaca

SEQ ID NO: 54737 - DNA, 40 bp, Homo sapiens
tgtcattaagagacatatgactacatataacaattaattc

SEQ ID NO: 54738 - DNA, 40 bp, Homo sapiens
aattaattgttatatgtagtcatatgtctcttaatgacag

SEQ ID NO: 54739 - DNA, 40 bp, Homo sapiens
ctgtcattaagagacatatgactacatataacaattaatt

SEQ ID NO: 54740 - DNA, 40 bp, Homo sapiens
attaattgttatatgtagtcatatgtctcttaatgacagg

SEQ ID NO: 54741 - DNA, 40 bp, Homo sapiens
cctgtcattaagagacatatgactacatataacaattaat

SEQ ID NO: 54742 - DNA, 40 bp, Homo sapiens
ttaattgttatatgtagtcatatgtctcttaatgacaggg

SEQ ID NO: 54743 - DNA, 40 bp, Homo sapiens
ccctgtcattaagagacatatgactacatataacaattaa

SEQ ID NO: 54744 - DNA, 40 bp, Homo sapiens
taattgttatatgtagtcatatgtctcttaatgacaggga

SEQ ID NO: 54745 - DNA, 40 bp, Homo sapiens
tccctgtcattaagagacatatgactacatataacaatta

SEQ ID NO: 54746 - DNA, 40 bp, Homo sapiens
aattgttatatgtagtcatatgtctcttaatgacagggat

SEQ ID NO: 54747 - DNA, 40 bp, Homo sapiens
atccctgtcattaagagacatatgactacatataacaatt

SEQ ID NO: 54748 - DNA, 40 bp, Homo sapiens
attgttatatgtagtcatatgtctcttaatgacagggata

SEQ ID NO: 54749 - DNA, 40 bp, Homo sapiens
tatccctgtcattaagagacatatgactacatataacaat

SEQ ID NO: 54750 - DNA, 40 bp, Homo sapiens
ttgttatatgtagtcatatgtctcttaatgacagggatac

SEQ ID NO: 54751 - DNA, 40 bp, Homo sapiens
gtatccctgtcattaagagacatatgactacatataacaa

SEQ ID NO: 54752 - DNA, 40 bp, Homo sapiens
tgttatatgtagtcatatgtctcttaatgacagggatact

SEQ ID NO: 54753 - DNA, 40 bp, Homo sapiens
agtatccctgtcattaagagacatatgactacatataaca

SEQ ID NO: 54754 - DNA, 40 bp, Homo sapiens
gttatatgtagtcatatgtctcttaatgacagggatactt

SEQ ID NO: 54755 - DNA, 40 bp, Homo sapiens
aagtatccctgtcattaagagacatatgactacatataac

SEQ ID NO: 54756 - DNA, 40 bp, Homo sapiens
ttatatgtagtcatatgtctcttaatgacagggatacttt

SEQ ID NO: 54757 - DNA, 40 bp, Homo sapiens
aaagtatccctgtcattaagagacatatgactacatataa

SEQ ID NO: 54758 - DNA, 40 bp, Homo sapiens
tatatgtagtcatatgtctcttaatgacagggatactttc

SEQ ID NO: 54759 - DNA, 40 bp, Homo sapiens
gaaagtatccctgtcattaagagacatatgactacatata

SEQ ID NO: 54760 - DNA, 40 bp, Homo sapiens
atatgtagtcatatgtctcttaatgacagggatactttct

SEQ ID NO: 54761 - DNA, 40 bp, Homo sapiens
agaaagtatccctgtcattaagagacatatgactacatat

SEQ ID NO: 54762 - DNA, 40 bp, Homo sapiens
tatgtagtcatatgtctcttaatgacagggatactttcta

SEQ ID NO: 54763 - DNA, 40 bp, Homo sapiens
tagaaagtatccctgtcattaagagacatatgactacata

SEQ ID NO: 54764 - DNA, 40 bp, Homo sapiens
atgtagtcatatgtctcttaatgacagggatactttctaa

SEQ ID NO: 54765 - DNA, 40 bp, Homo sapiens
ttagaaagtatccctgtcattaagagacatatgactacat

SEQ ID NO: 54766 - DNA, 40 bp, Homo sapiens
tgtagtcatatgtctcttaatgacagggatactttctaag

SEQ ID NO: 54767 - DNA, 40 bp, Homo sapiens
cttagaaagtatccctgtcattaagagacatatgactaca

SEQ ID NO: 54768 - DNA, 40 bp, Homo sapiens
gtagtcatatgtctcttaatgacagggatactttctaaga

SEQ ID NO: 54769 - DNA, 40 bp, Homo sapiens
tcttagaaagtatccctgtcattaagagacatatgactac

SEQ ID NO: 54770 - DNA, 40 bp, Homo sapiens
tagtcatatgtctcttaatgacagggatactttctaagaa

SEQ ID NO: 54771 - DNA, 40 bp, Homo sapiens
ttcttagaaagtatccctgtcattaagagacatatgacta

SEQ ID NO: 54772 - DNA, 40 bp, Homo sapiens
agtcatatgtctcttaatgacagggatactttctaagaaa

SEQ ID NO: 54773 - DNA, 40 bp, Homo sapiens
tttcttagaaagtatccctgtcattaagagacatatgact

SEQ ID NO: 54774 - DNA, 40 bp, Homo sapiens
gtcatatgtctcttaatgacagggatactttctaagaaat

SEQ ID NO: 54775 - DNA, 40 bp, Homo sapiens
atttcttagaaagtatccctgtcattaagagacatatgac

SEQ ID NO: 54776 - DNA, 40 bp, Homo sapiens
tcatatgtctcttaatgacagggatactttctaagaaata

SEQ ID NO: 54777 - DNA, 40 bp, Homo sapiens
tatttcttagaaagtatccctgtcattaagagacatatga

SEQ ID NO: 54778 - DNA, 40 bp, Homo sapiens
catatgtctcttaatgacagggatactttctaagaaatac

SEQ ID NO: 54779 - DNA, 40 bp, Homo sapiens
gtatttcttagaaagtatccctgtcattaagagacatatg

SEQ ID NO: 54780 - DNA, 40 bp, Homo sapiens
atatgtctcttaatgacagggatactttctaagaaataca

SEQ ID NO: 54781 - DNA, 40 bp, Homo sapiens
tgtatttcttagaaagtatccctgtcattaagagacatat

SEQ ID NO: 54782 - DNA, 40 bp, Homo sapiens
tatgtctcttaatgacagggatactttctaagaaatacat

SEQ ID NO: 54783 - DNA, 40 bp, Homo sapiens
atgtatttcttagaaagtatccctgtcattaagagacata

SEQ ID NO: 54784 - DNA, 40 bp, Homo sapiens
atgtctcttaatgacagggatactttctaagaaatacatt

SEQ ID NO: 54785 - DNA, 40 bp, Homo sapiens
aatgtatttcttagaaagtatccctgtcattaagagacat

SEQ ID NO: 54786 - DNA, 40 bp, Homo sapiens
tgtctcttaatgacagggatactttctaagaaatacattg

SEQ ID NO: 54787 - DNA, 40 bp, Homo sapiens
caatgtatttcttagaaagtatccctgtcattaagagaca

SEQ ID NO: 54788 - DNA, 40 bp, Homo sapiens
gtctcttaatgacagggatactttctaagaaatacattgt

SEQ ID NO: 54789 - DNA, 40 bp, Homo sapiens
acaatgtatttcttagaaagtatccctgtcattaagagac

SEQ ID NO: 54790 - DNA, 40 bp, Homo sapiens
tctcttaatgacagggatactttctaagaaatacattgtt

SEQ ID NO: 54791 - DNA, 40 bp, Homo sapiens
aacaatgtatttcttagaaagtatccctgtcattaagaga

SEQ ID NO: 54792 - DNA, 40 bp, Homo sapiens
ctcttaatgacagggatactttctaagaaatacattgtta

SEQ ID NO: 54793 - DNA, 40 bp, Homo sapiens
taacaatgtatttcttagaaagtatccctgtcattaagag

SEQ ID NO: 54794 - DNA, 40 bp, Homo sapiens
tcttaatgacagggatactttctaagaaatacattgttag

SEQ ID NO: 54795 - DNA, 40 bp, Homo sapiens
ctaacaatgtatttcttagaaagtatccctgtcattaaga

SEQ ID NO: 54796 - DNA, 40 bp, Homo sapiens
cttaatgacagggatactttctaagaaatacattgttagg

SEQ ID NO: 54797 - DNA, 40 bp, Homo sapiens
cctaacaatgtatttcttagaaagtatccctgtcattaag

SEQ ID NO: 54798 - DNA, 40 bp, Homo sapiens
ttaatgacagggatactttctaagaaatacattgttaggt

SEQ ID NO: 54799 - DNA, 40 bp, Homo sapiens
acctaacaatgtatttcttagaaagtatccctgtcattaa

SEQ ID NO: 54800 - DNA, 40 bp, Homo sapiens
taatgacagggatactttctaagaaatacattgttaggtg

SEQ ID NO: 54801 - DNA, 40 bp, Homo sapiens
cacctaacaatgtatttcttagaaagtatccctgtcatta

SEQ ID NO: 54802 - DNA, 40 bp, Homo sapiens
aatgacagggatactttctaagaaatacattgttaggtga

SEQ ID NO: 54803 - DNA, 40 bp, Homo sapiens
tcacctaacaatgtatttcttagaaagtatccctgtcatt

SEQ ID NO: 54804 - DNA, 40 bp, Homo sapiens
atgacagggatactttctaagaaatacattgttaggtgat

SEQ ID NO: 54805 - DNA, 40 bp, Homo sapiens
atcacctaacaatgtatttcttagaaagtatccctgtcat

SEQ ID NO: 54806 - DNA, 40 bp, Homo sapiens
tgacagggatactttctaagaaatacattgttaggtgatt

SEQ ID NO: 54807 - DNA, 40 bp, Homo sapiens
aatcacctaacaatgtatttcttagaaagtatccctgtca

SEQ ID NO: 54808 - DNA, 40 bp, Homo sapiens
gacagggatactttctaagaaatacattgttaggtgattt

SEQ ID NO: 54809 - DNA, 40 bp, Homo sapiens
aaatcacctaacaatgtatttcttagaaagtatccctgtc

SEQ ID NO: 54810 - DNA, 40 bp, Homo sapiens
acagggatactttctaagaaatacattgttaggtgatttt

SEQ ID NO: 54811 - DNA, 40 bp, Homo sapiens
aaaatcacctaacaatgtatttcttagaaagtatccctgt

SEQ ID NO: 54812 - DNA, 40 bp, Homo sapiens
cagggatactttctaagaaatacattgttaggtgattttg

SEQ ID NO: 54813 - DNA, 40 bp, Homo sapiens
caaaatcacctaacaatgtatttcttagaaagtatccctg

SEQ ID NO: 54814 - DNA, 40 bp, Homo sapiens
agggatactttctaagaaatacattgttaggtgattttgt

SEQ ID NO: 54815 - DNA, 40 bp, Homo sapiens
acaaaatcacctaacaatgtatttcttagaaagtatccct

SEQ ID NO: 54816 - DNA, 40 bp, Homo sapiens
gggatactttctaagaaatacattgttaggtgattttgtc

SEQ ID NO: 54817 - DNA, 40 bp, Homo sapiens
gacaaaatcacctaacaatgtatttcttagaaagtatccc

SEQ ID NO: 54818 - DNA, 40 bp, Homo sapiens
ggatactttctaagaaatacattgttaggtgattttgtca

SEQ ID NO: 54819 - DNA, 40 bp, Homo sapiens
tgacaaaatcacctaacaatgtatttcttagaaagtatcc

SEQ ID NO: 54820 - DNA, 40 bp, Homo sapiens
gatactttctaagaaatacattgttaggtgattttgtcat

SEQ ID NO: 54821 - DNA, 40 bp, Homo sapiens
atgacaaaatcacctaacaatgtatttcttagaaagtatc

SEQ ID NO: 54822 - DNA, 40 bp, Homo sapiens
atactttctaagaaatacattgttaggtgattttgtcatt

SEQ ID NO: 54823 - DNA, 40 bp, Homo sapiens
aatgacaaaatcacctaacaatgtatttcttagaaagtat

SEQ ID NO: 54824 - DNA, 40 bp, Homo sapiens
tactttctaagaaatacattgttaggtgattttgtcattg

SEQ ID NO: 54825 - DNA, 40 bp, Homo sapiens
caatgacaaaatcacctaacaatgtatttcttagaaagta

SEQ ID NO: 54826 - DNA, 40 bp, Homo sapiens
actttctaagaaatacattgttaggtgattttgtcattgt

SEQ ID NO: 54827 - DNA, 40 bp, Homo sapiens
acaatgacaaaatcacctaacaatgtatttcttagaaagt

SEQ ID NO: 54828 - DNA, 40 bp, Homo sapiens
ctttctaagaaatacattgttaggtgattttgtcattgtg

SEQ ID NO: 54829 - DNA, 40 bp, Homo sapiens
cacaatgacaaaatcacctaacaatgtatttcttagaaag

SEQ ID NO: 54830 - DNA, 40 bp, Homo sapiens
tttctaagaaatacattgttaggtgattttgtcattgtgc

SEQ ID NO: 54831 - DNA, 40 bp, Homo sapiens
gcacaatgacaaaatcacctaacaatgtatttcttagaaa

SEQ ID NO: 54832 - DNA, 40 bp, Homo sapiens
ttctaagaaatacattgttaggtgattttgtcattgtgca

SEQ ID NO: 54833 - DNA, 40 bp, Homo sapiens
tgcacaatgacaaaatcacctaacaatgtatttcttagaa

SEQ ID NO: 54834 - DNA, 40 bp, Homo sapiens
tctaagaaatacattgttaggtgattttgtcattgtgcaa

SEQ ID NO: 54835 - DNA, 40 bp, Homo sapiens
ttgcacaatgacaaaatcacctaacaatgtatttcttaga

SEQ ID NO: 54836 - DNA, 40 bp, Homo sapiens
ctaagaaatacattgttaggtgattttgtcattgtgcaaa

SEQ ID NO: 54837 - DNA, 40 bp, Homo sapiens
tttgcacaatgacaaaatcacctaacaatgtatttcttag

SEQ ID NO: 54838 - DNA, 40 bp, Homo sapiens
taagaaatacattgttaggtgattttgtcattgtgcaaac

SEQ ID NO: 54839 - DNA, 40 bp, Homo sapiens
gtttgcacaatgacaaaatcacctaacaatgtatttctta

SEQ ID NO: 54840 - DNA, 40 bp, Homo sapiens
aagaaatacattgttaggtgattttgtcattgtgcaaaca

SEQ ID NO: 54841 - DNA, 40 bp, Homo sapiens
tgtttgcacaatgacaaaatcacctaacaatgtatttctt

SEQ ID NO: 54842 - DNA, 40 bp, Homo sapiens
agaaatacattgttaggtgattttgtcattgtgcaaacat

SEQ ID NO: 54843 - DNA, 40 bp, Homo sapiens
atgtttgcacaatgacaaaatcacctaacaatgtatttct

SEQ ID NO: 54844 - DNA, 40 bp, Homo sapiens
gaaatacattgttaggtgattttgtcattgtgcaaacatc

SEQ ID NO: 54845 - DNA, 40 bp, Homo sapiens
gatgtttgcacaatgacaaaatcacctaacaatgtatttc

SEQ ID NO: 54846 - DNA, 40 bp, Homo sapiens
aaatacattgttaggtgattttgtcattgtgcaaacatca

SEQ ID NO: 54847 - DNA, 40 bp, Homo sapiens
tgatgtttgcacaatgacaaaatcacctaacaatgtattt

SEQ ID NO: 54848 - DNA, 40 bp, Homo sapiens
aatacattgttaggtgattttgtcattgtgcaaacatcat

SEQ ID NO: 54849 - DNA, 40 bp, Homo sapiens
atgatgtttgcacaatgacaaaatcacctaacaatgtatt

SEQ ID NO: 54850 - DNA, 40 bp, Homo sapiens
atacattgttaggtgattttgtcattgtgcaaacatcata

SEQ ID NO: 54851 - DNA, 40 bp, Homo sapiens
tatgatgtttgcacaatgacaaaatcacctaacaatgtat

SEQ ID NO: 54852 - DNA, 40 bp, Homo sapiens
tacattgttaggtgattttgtcattgtgcaaacatcatag

SEQ ID NO: 54853 - DNA, 40 bp, Homo sapiens
ctatgatgtttgcacaatgacaaaatcacctaacaatgta

SEQ ID NO: 54854 - DNA, 40 bp, Homo sapiens
acattgttaggtgattttgtcattgtgcaaacatcataga

SEQ ID NO: 54855 - DNA, 40 bp, Homo sapiens
tctatgatgtttgcacaatgacaaaatcacctaacaatgt

SEQ ID NO: 54856 - DNA, 40 bp, Homo sapiens
cattgttaggtgattttgtcattgtgcaaacatcatagaa

SEQ ID NO: 54857 - DNA, 40 bp, Homo sapiens
ttctatgatgtttgcacaatgacaaaatcacctaacaatg

SEQ ID NO: 54858 - DNA, 40 bp, Homo sapiens
attgttaggtgattttgtcattgtgcaaacatcatagaat

SEQ ID NO: 54859 - DNA, 40 bp, Homo sapiens
attctatgatgtttgcacaatgacaaaatcacctaacaat

SEQ ID NO: 54860 - DNA, 40 bp, Homo sapiens
ttgttaggtgattttgtcattgtgcaaacatcatagaata

SEQ ID NO: 54861 - DNA, 40 bp, Homo sapiens
tattctatgatgtttgcacaatgacaaaatcacctaacaa

SEQ ID NO: 54862 - DNA, 40 bp, Homo sapiens
tgttaggtgattttgtcattgtgcaaacatcatagaatat

SEQ ID NO: 54863 - DNA, 40 bp, Homo sapiens
atattctatgatgtttgcacaatgacaaaatcacctaaca

SEQ ID NO: 54864 - DNA, 40 bp, Homo sapiens
gttaggtgattttgtcattgtgcaaacatcatagaatata

SEQ ID NO: 54865 - DNA, 40 bp, Homo sapiens
tatattctatgatgtttgcacaatgacaaaatcacctaac

SEQ ID NO: 54866 - DNA, 40 bp, Homo sapiens
ttaggtgattttgtcattgtgcaaacatcatagaatatac

SEQ ID NO: 54867 - DNA, 40 bp, Homo sapiens
gtatattctatgatgtttgcacaatgacaaaatcacctaa

SEQ ID NO: 54868 - DNA, 40 bp, Homo sapiens
taggtgattttgtcattgtgcaaacatcatagaatatact

SEQ ID NO: 54869 - DNA, 40 bp, Homo sapiens
agtatattctatgatgtttgcacaatgacaaaatcaccta

SEQ ID NO: 54870 - DNA, 40 bp, Homo sapiens
aggtgattttgtcattgtgcaaacatcatagaatatactt

SEQ ID NO: 54871 - DNA, 40 bp, Homo sapiens
aagtatattctatgatgtttgcacaatgacaaaatcacct

SEQ ID NO: 54872 - DNA, 40 bp, Homo sapiens
ggtgattttgtcattgtgcaaacatcatagaatatactta

SEQ ID NO: 54873 - DNA, 40 bp, Homo sapiens
taagtatattctatgatgtttgcacaatgacaaaatcacc

SEQ ID NO: 54874 - DNA, 40 bp, Homo sapiens
gtgattttgtcattgtgcaaacatcatagaatatacttac

SEQ ID NO: 54875 - DNA, 40 bp, Homo sapiens
gtaagtatattctatgatgtttgcacaatgacaaaatcac

SEQ ID NO: 54876 - DNA, 40 bp, Homo sapiens
tgattttgtcattgtgcaaacatcatagaatatacttaca

SEQ ID NO: 54877 - DNA, 40 bp, Homo sapiens
tgtaagtatattctatgatgtttgcacaatgacaaaatca

SEQ ID NO: 54878 - DNA, 40 bp, Homo sapiens
gattttgtcattgtgcaaacatcatagaatatacttacac

SEQ ID NO: 54879 - DNA, 40 bp, Homo sapiens
gtgtaagtatattctatgatgtttgcacaatgacaaaatc

SEQ ID NO: 54880 - DNA, 40 bp, Homo sapiens
attttgtcattgtgcaaacatcatagaatatacttacaca

SEQ ID NO: 54881 - DNA, 40 bp, Homo sapiens
tgtgtaagtatattctatgatgtttgcacaatgacaaaat

SEQ ID NO: 54882 - DNA, 40 bp, Homo sapiens
ttttgtcattgtgcaaacatcatagaatatacttacacaa

SEQ ID NO: 54883 - DNA, 40 bp, Homo sapiens
ttgtgtaagtatattctatgatgtttgcacaatgacaaaa

SEQ ID NO: 54884 - DNA, 40 bp, Homo sapiens
tttgtcattgtgcaaacatcatagaatatacttacacaaa

SEQ ID NO: 54885 - DNA, 40 bp, Homo sapiens
tttgtgtaagtatattctatgatgtttgcacaatgacaaa

SEQ ID NO: 54886 - DNA, 40 bp, Homo sapiens
ttgtcattgtgcaaacatcatagaatatacttacacaaac

SEQ ID NO: 54887 - DNA, 40 bp, Homo sapiens
gtttgtgtaagtatattctatgatgtttgcacaatgacaa

SEQ ID NO: 54888 - DNA, 40 bp, Homo sapiens
tgtcattgtgcaaacatcatagaatatacttacacaaacc

SEQ ID NO: 54889 - DNA, 40 bp, Homo sapiens
ggtttgtgtaagtatattctatgatgtttgcacaatgaca

SEQ ID NO: 54890 - DNA, 40 bp, Homo sapiens
gtcattgtgcaaacatcatagaatatacttacacaaacct

SEQ ID NO: 54891 - DNA, 40 bp, Homo sapiens
aggtttgtgtaagtatattctatgatgtttgcacaatgac

SEQ ID NO: 54892 - DNA, 40 bp, Homo sapiens
tcattgtgcaaacatcatagaatatacttacacaaacctt

SEQ ID NO: 54893 - DNA, 40 bp, Homo sapiens
aaggtttgtgtaagtatattctatgatgtttgcacaatga

SEQ ID NO: 54894 - DNA, 40 bp, Homo sapiens
cattgtgcaaacatcatagaatatacttacacaaaccttg

SEQ ID NO: 54895 - DNA, 40 bp, Homo sapiens
caaggtttgtgtaagtatattctatgatgtttgcacaatg

SEQ ID NO: 54896 - DNA, 40 bp, Homo sapiens
attgtgcaaacatcatagaatatacttacacaaaccttgg

SEQ ID NO: 54897 - DNA, 40 bp, Homo sapiens
ccaaggtttgtgtaagtatattctatgatgtttgcacaat

SEQ ID NO: 54898 - DNA, 40 bp, Homo sapiens
ttgtgcaaacatcatagaatatacttacacaaaccttggt

SEQ ID NO: 54899 - DNA, 40 bp, Homo sapiens
accaaggtttgtgtaagtatattctatgatgtttgcacaa

SEQ ID NO: 54900 - DNA, 40 bp, Homo sapiens
tgtgcaaacatcatagaatatacttacacaaaccttggta

SEQ ID NO: 54901 - DNA, 40 bp, Homo sapiens
taccaaggtttgtgtaagtatattctatgatgtttgcaca

SEQ ID NO: 54902 - DNA, 40 bp, Homo sapiens
gtgcaaacatcatagaatatacttacacaaaccttggtag

SEQ ID NO: 54903 - DNA, 40 bp, Homo sapiens
ctaccaaggtttgtgtaagtatattctatgatgtttgcac

SEQ ID NO: 54904 - DNA, 40 bp, Homo sapiens
tgcaaacatcatagaatatacttacacaaaccttggtagt

SEQ ID NO: 54905 - DNA, 40 bp, Homo sapiens
actaccaaggtttgtgtaagtatattctatgatgtttgca

SEQ ID NO: 54906 - DNA, 40 bp, Homo sapiens
gcaaacatcatagaatatacttacacaaaccttggtagta

SEQ ID NO: 54907 - DNA, 40 bp, Homo sapiens
tactaccaaggtttgtgtaagtatattctatgatgtttgc

SEQ ID NO: 54908 - DNA, 40 bp, Homo sapiens
caaacatcatagaatatacttacacaaaccttggtagtat

SEQ ID NO: 54909 - DNA, 40 bp, Homo sapiens
atactaccaaggtttgtgtaagtatattctatgatgtttg

SEQ ID NO: 54910 - DNA, 40 bp, Homo sapiens
aaacatcatagaatatacttacacaaaccttggtagtata

SEQ ID NO: 54911 - DNA, 40 bp, Homo sapiens
tatactaccaaggtttgtgtaagtatattctatgatgttt

SEQ ID NO: 54912 - DNA, 40 bp, Homo sapiens
aacatcatagaatatacttacacaaaccttggtagtataa

SEQ ID NO: 54913 - DNA, 40 bp, Homo sapiens
ttatactaccaaggtttgtgtaagtatattctatgatgtt

SEQ ID NO: 54914 - DNA, 40 bp, Homo sapiens
acatcatagaatatacttacacaaaccttggtagtataac

SEQ ID NO: 54915 - DNA, 40 bp, Homo sapiens
gttatactaccaaggtttgtgtaagtatattctatgatgt

SEQ ID NO: 54916 - DNA, 40 bp, Homo sapiens
catcatagaatatacttacacaaaccttggtagtataacc

SEQ ID NO: 54917 - DNA, 40 bp, Homo sapiens
ggttatactaccaaggtttgtgtaagtatattctatgatg

SEQ ID NO: 54918 - DNA, 40 bp, Homo sapiens
atcatagaatatacttacacaaaccttggtagtataacct

SEQ ID NO: 54919 - DNA, 40 bp, Homo sapiens
aggttatactaccaaggtttgtgtaagtatattctatgat

SEQ ID NO: 54920 - DNA, 40 bp, Homo sapiens
tcatagaatatacttacacaaaccttggtagtataaccta

SEQ ID NO: 54921 - DNA, 40 bp, Homo sapiens
taggttatactaccaaggtttgtgtaagtatattctatga

SEQ ID NO: 54922 - DNA, 40 bp, Homo sapiens
catagaatatacttacacaaaccttggtagtataacctac

SEQ ID NO: 54923 - DNA, 40 bp, Homo sapiens
gtaggttatactaccaaggtttgtgtaagtatattctatg

SEQ ID NO: 54924 - DNA, 40 bp, Homo sapiens
atagaatatacttacacaaaccttggtagtataacctact

SEQ ID NO: 54925 - DNA, 40 bp, Homo sapiens
agtaggttatactaccaaggtttgtgtaagtatattctat

SEQ ID NO: 54926 - DNA, 40 bp, Homo sapiens
tagaatatacttacacaaaccttggtagtataacctacta

SEQ ID NO: 54927 - DNA, 40 bp, Homo sapiens
tagtaggttatactaccaaggtttgtgtaagtatattcta

SEQ ID NO: 54928 - DNA, 40 bp, Homo sapiens
agaatatacttacacaaaccttggtagtataacctactat

SEQ ID NO: 54929 - DNA, 40 bp, Homo sapiens
atagtaggttatactaccaaggtttgtgtaagtatattct

SEQ ID NO: 54930 - DNA, 40 bp, Homo sapiens
gaatatacttacacaaaccttggtagtataacctactata

SEQ ID NO: 54931 - DNA, 40 bp, Homo sapiens
tatagtaggttatactaccaaggtttgtgtaagtatattc

SEQ ID NO: 54932 - DNA, 40 bp, Homo sapiens
aatatacttacacaaaccttggtagtataacctactatac

SEQ ID NO: 54933 - DNA, 40 bp, Homo sapiens
gtatagtaggttatactaccaaggtttgtgtaagtatatt

SEQ ID NO: 54934 - DNA, 40 bp, Homo sapiens
atatacttacacaaaccttggtagtataacctactataca

SEQ ID NO: 54935 - DNA, 40 bp, Homo sapiens
tgtatagtaggttatactaccaaggtttgtgtaagtatat

SEQ ID NO: 54936 - DNA, 40 bp, Homo sapiens
tatacttacacaaaccttggtagtataacctactatacac

SEQ ID NO: 54937 - DNA, 40 bp, Homo sapiens
gtgtatagtaggttatactaccaaggtttgtgtaagtata

SEQ ID NO: 54938 - DNA, 40 bp, Homo sapiens
atacttacacaaaccttggtagtataacctactatacacc

SEQ ID NO: 54939 - DNA, 40 bp, Homo sapiens
ggtgtatagtaggttatactaccaaggtttgtgtaagtat

SEQ ID NO: 54940 - DNA, 40 bp, Homo sapiens
tacttacacaaaccttggtagtataacctactatacacct

SEQ ID NO: 54941 - DNA, 40 bp, Homo sapiens
aggtgtatagtaggttatactaccaaggtttgtgtaagta

SEQ ID NO: 54942 - DNA, 40 bp, Homo sapiens
acttacacaaaccttggtagtataacctactatacacctg

SEQ ID NO: 54943 - DNA, 40 bp, Homo sapiens
caggtgtatagtaggttatactaccaaggtttgtgtaagt

SEQ ID NO: 54944 - DNA, 40 bp, Homo sapiens
cttacacaaaccttggtagtataacctactatacacctgg

SEQ ID NO: 54945 - DNA, 40 bp, Homo sapiens
ccaggtgtatagtaggttatactaccaaggtttgtgtaag

SEQ ID NO: 54946 - DNA, 40 bp, Homo sapiens
ttacacaaaccttggtagtataacctactatacacctggg

SEQ ID NO: 54947 - DNA, 40 bp, Homo sapiens
cccaggtgtatagtaggttatactaccaaggtttgtgtaa

SEQ ID NO: 54948 - DNA, 40 bp, Homo sapiens
tacacaaaccttggtagtataacctactatacacctggga

SEQ ID NO: 54949 - DNA, 40 bp, Homo sapiens
tcccaggtgtatagtaggttatactaccaaggtttgtgta

SEQ ID NO: 54950 - DNA, 40 bp, Homo sapiens
acacaaaccttggtagtataacctactatacacctgggat

SEQ ID NO: 54951 - DNA, 40 bp, Homo sapiens
atcccaggtgtatagtaggttatactaccaaggtttgtgt

SEQ ID NO: 54952 - DNA, 40 bp, Homo sapiens
cacaaaccttggtagtataacctactatacacctgggata

SEQ ID NO: 54953 - DNA, 40 bp, Homo sapiens
tatcccaggtgtatagtaggttatactaccaaggtttgtg

SEQ ID NO: 54954 - DNA, 40 bp, Homo sapiens
acaaaccttggtagtataacctactatacacctgggatat

SEQ ID NO: 54955 - DNA, 40 bp, Homo sapiens
atatcccaggtgtatagtaggttatactaccaaggtttgt

SEQ ID NO: 54956 - DNA, 40 bp, Homo sapiens
caaaccttggtagtataacctactatacacctgggatatg

SEQ ID NO: 54957 - DNA, 40 bp, Homo sapiens
catatcccaggtgtatagtaggttatactaccaaggtttg

SEQ ID NO: 54958 - DNA, 40 bp, Homo sapiens
aaaccttggtagtataacctactatacacctgggatatgt

SEQ ID NO: 54959 - DNA, 40 bp, Homo sapiens
acatatcccaggtgtatagtaggttatactaccaaggttt

SEQ ID NO: 54960 - DNA, 40 bp, Homo sapiens
aaccttggtagtataacctactatacacctgggatatgta

SEQ ID NO: 54961 - DNA, 40 bp, Homo sapiens
tacatatcccaggtgtatagtaggttatactaccaaggtt

SEQ ID NO: 54962 - DNA, 40 bp, Homo sapiens
accttggtagtataacctactatacacctgggatatgtag

SEQ ID NO: 54963 - DNA, 40 bp, Homo sapiens
ctacatatcccaggtgtatagtaggttatactaccaaggt

SEQ ID NO: 54964 - DNA, 40 bp, Homo sapiens
ccttggtagtataacctactatacacctgggatatgtagt

SEQ ID NO: 54965 - DNA, 40 bp, Homo sapiens
actacatatcccaggtgtatagtaggttatactaccaagg

SEQ ID NO: 54966 - DNA, 40 bp, Homo sapiens
cttggtagtataacctactatacacctgggatatgtagta

SEQ ID NO: 54967 - DNA, 40 bp, Homo sapiens
tactacatatcccaggtgtatagtaggttatactaccaag

SEQ ID NO: 54968 - DNA, 40 bp, Homo sapiens
ttggtagtataacctactatacacctgggatatgtagtat

SEQ ID NO: 54969 - DNA, 40 bp, Homo sapiens
atactacatatcccaggtgtatagtaggttatactaccaa

SEQ ID NO: 54970 - DNA, 40 bp, Homo sapiens
tggtagtataacctactatacacctgggatatgtagtata

SEQ ID NO: 54971 - DNA, 40 bp, Homo sapiens
tatactacatatcccaggtgtatagtaggttatactacca

SEQ ID NO: 54972 - DNA, 40 bp, Homo sapiens
ggtagtataacctactatacacctgggatatgtagtatag

SEQ ID NO: 54973 - DNA, 40 bp, Homo sapiens
ctatactacatatcccaggtgtatagtaggttatactacc

SEQ ID NO: 54974 - DNA, 40 bp, Homo sapiens
gtagtataacctactatacacctgggatatgtagtatagt

SEQ ID NO: 54975 - DNA, 40 bp, Homo sapiens
actatactacatatcccaggtgtatagtaggttatactac

SEQ ID NO: 54976 - DNA, 40 bp, Homo sapiens
tagtataacctactatacacctgggatatgtagtatagtc

SEQ ID NO: 54977 - DNA, 40 bp, Homo sapiens
gactatactacatatcccaggtgtatagtaggttatacta

SEQ ID NO: 54978 - DNA, 40 bp, Homo sapiens
agtataacctactatacacctgggatatgtagtatagtct

SEQ ID NO: 54979 - DNA, 40 bp, Homo sapiens
agactatactacatatcccaggtgtatagtaggttatact

SEQ ID NO: 54980 - DNA, 40 bp, Homo sapiens
gtataacctactatacacctgggatatgtagtatagtctc

SEQ ID NO: 54981 - DNA, 40 bp, Homo sapiens
gagactatactacatatcccaggtgtatagtaggttatac

SEQ ID NO: 54982 - DNA, 40 bp, Homo sapiens
tataacctactatacacctgggatatgtagtatagtctct

SEQ ID NO: 54983 - DNA, 40 bp, Homo sapiens
agagactatactacatatcccaggtgtatagtaggttata

SEQ ID NO: 54984 - DNA, 40 bp, Homo sapiens
ataacctactatacacctgggatatgtagtatagtctctt

SEQ ID NO: 54985 - DNA, 40 bp, Homo sapiens
aagagactatactacatatcccaggtgtatagtaggttat

SEQ ID NO: 54986 - DNA, 40 bp, Homo sapiens
taacctactatacacctgggatatgtagtatagtctcttg

SEQ ID NO: 54987 - DNA, 40 bp, Homo sapiens
caagagactatactacatatcccaggtgtatagtaggtta

SEQ ID NO: 54988 - DNA, 40 bp, Homo sapiens
aacctactatacacctgggatatgtagtatagtctcttgc

SEQ ID NO: 54989 - DNA, 40 bp, Homo sapiens
gcaagagactatactacatatcccaggtgtatagtaggtt

SEQ ID NO: 54990 - DNA, 40 bp, Homo sapiens
acctactatacacctgggatatgtagtatagtctcttgcc

SEQ ID NO: 54991 - DNA, 40 bp, Homo sapiens
ggcaagagactatactacatatcccaggtgtatagtaggt

SEQ ID NO: 54992 - DNA, 40 bp, Homo sapiens
cctactatacacctgggatatgtagtatagtctcttgccc

SEQ ID NO: 54993 - DNA, 40 bp, Homo sapiens
gggcaagagactatactacatatcccaggtgtatagtagg

SEQ ID NO: 54994 - DNA, 40 bp, Homo sapiens
ctactatacacctgggatatgtagtatagtctcttgcccc

SEQ ID NO: 54995 - DNA, 40 bp, Homo sapiens
ggggcaagagactatactacatatcccaggtgtatagtag

SEQ ID NO: 54996 - DNA, 40 bp, Homo sapiens
tactatacacctgggatatgtagtatagtctcttgcccca

SEQ ID NO: 54997 - DNA, 40 bp, Homo sapiens
tggggcaagagactatactacatatcccaggtgtatagta

SEQ ID NO: 54998 - DNA, 40 bp, Homo sapiens
actatacacctgggatatgtagtatagtctcttgccccag

SEQ ID NO: 54999 - DNA, 40 bp, Homo sapiens
ctggggcaagagactatactacatatcccaggtgtatagt

SEQ ID NO: 55000 - DNA, 40 bp, Homo sapiens
ctatacacctgggatatgtagtatagtctcttgccccagg

SEQ ID NO: 55001 - DNA, 40 bp, Homo sapiens
cctggggcaagagactatactacatatcccaggtgtatag

SEQ ID NO: 55002 - DNA, 40 bp, Homo sapiens
tatacacctgggatatgtagtatagtctcttgccccaggg

SEQ ID NO: 55003 - DNA, 40 bp, Homo sapiens
ccctggggcaagagactatactacatatcccaggtgtata

SEQ ID NO: 55004 - DNA, 40 bp, Homo sapiens
atacacctgggatatgtagtatagtctcttgccccaggga

SEQ ID NO: 55005 - DNA, 40 bp, Homo sapiens
tccctggggcaagagactatactacatatcccaggtgtat

SEQ ID NO: 55006 - DNA, 40 bp, Homo sapiens
tacacctgggatatgtagtatagtctcttgccccagggat

SEQ ID NO: 55007 - DNA, 40 bp, Homo sapiens
atccctggggcaagagactatactacatatcccaggtgta

SEQ ID NO: 55008 - DNA, 40 bp, Homo sapiens
acacctgggatatgtagtatagtctcttgccccagggata

SEQ ID NO: 55009 - DNA, 40 bp, Homo sapiens
tatccctggggcaagagactatactacatatcccaggtgt

SEQ ID NO: 55010 - DNA, 40 bp, Homo sapiens
cacctgggatatgtagtatagtctcttgccccagggatac

SEQ ID NO: 55011 - DNA, 40 bp, Homo sapiens
gtatccctggggcaagagactatactacatatcccaggtg

SEQ ID NO: 55012 - DNA, 40 bp, Homo sapiens
acctgggatatgtagtatagtctcttgccccagggataca

SEQ ID NO: 55013 - DNA, 40 bp, Homo sapiens
tgtatccctggggcaagagactatactacatatcccaggt

SEQ ID NO: 55014 - DNA, 40 bp, Homo sapiens
cctgggatatgtagtatagtctcttgccccagggatacaa

SEQ ID NO: 55015 - DNA, 40 bp, Homo sapiens
ttgtatccctggggcaagagactatactacatatcccagg

SEQ ID NO: 55016 - DNA, 40 bp, Homo sapiens
ctgggatatgtagtatagtctcttgccccagggatacaaa

SEQ ID NO: 55017 - DNA, 40 bp, Homo sapiens
tttgtatccctggggcaagagactatactacatatcccag

SEQ ID NO: 55018 - DNA, 40 bp, Homo sapiens
tgggatatgtagtatagtctcttgccccagggatacaaac

SEQ ID NO: 55019 - DNA, 40 bp, Homo sapiens
gtttgtatccctggggcaagagactatactacatatccca

SEQ ID NO: 55020 - DNA, 40 bp, Homo sapiens
gggatatgtagtatagtctcttgccccagggatacaaacc

SEQ ID NO: 55021 - DNA, 40 bp, Homo sapiens
ggtttgtatccctggggcaagagactatactacatatccc

SEQ ID NO: 55022 - DNA, 40 bp, Homo sapiens
ggatatgtagtatagtctcttgccccagggatacaaacct

SEQ ID NO: 55023 - DNA, 40 bp, Homo sapiens
aggtttgtatccctggggcaagagactatactacatatcc

SEQ ID NO: 55024 - DNA, 40 bp, Homo sapiens
gatatgtagtatagtctcttgccccagggatacaaacctg

SEQ ID NO: 55025 - DNA, 40 bp, Homo sapiens
caggtttgtatccctggggcaagagactatactacatatc

SEQ ID NO: 55026 - DNA, 40 bp, Homo sapiens
atatgtagtatagtctcttgccccagggatacaaacctgt

SEQ ID NO: 55027 - DNA, 40 bp, Homo sapiens
acaggtttgtatccctggggcaagagactatactacatat

SEQ ID NO: 55028 - DNA, 40 bp, Homo sapiens
tatgtagtatagtctcttgccccagggatacaaacctgta

SEQ ID NO: 55029 - DNA, 40 bp, Homo sapiens
tacaggtttgtatccctggggcaagagactatactacata

SEQ ID NO: 55030 - DNA, 40 bp, Homo sapiens
atgtagtatagtctcttgccccagggatacaaacctgtac

SEQ ID NO: 55031 - DNA, 40 bp, Homo sapiens
gtacaggtttgtatccctggggcaagagactatactacat

SEQ ID NO: 55032 - DNA, 40 bp, Homo sapiens
tgtagtatagtctcttgccccagggatacaaacctgtaca

SEQ ID NO: 55033 - DNA, 40 bp, Homo sapiens
tgtacaggtttgtatccctggggcaagagactatactaca

SEQ ID NO: 55034 - DNA, 40 bp, Homo sapiens
gtagtatagtctcttgccccagggatacaaacctgtacag

SEQ ID NO: 55035 - DNA, 40 bp, Homo sapiens
ctgtacaggtttgtatccctggggcaagagactatactac

SEQ ID NO: 55036 - DNA, 40 bp, Homo sapiens
tagtatagtctcttgccccagggatacaaacctgtacagt

SEQ ID NO: 55037 - DNA, 40 bp, Homo sapiens
actgtacaggtttgtatccctggggcaagagactatacta

SEQ ID NO: 55038 - DNA, 40 bp, Homo sapiens
agtatagtctcttgccccagggatacaaacctgtacagta

SEQ ID NO: 55039 - DNA, 40 bp, Homo sapiens
tactgtacaggtttgtatccctggggcaagagactatact

SEQ ID NO: 55040 - DNA, 40 bp, Homo sapiens
gtatagtctcttgccccagggatacaaacctgtacagtat

SEQ ID NO: 55041 - DNA, 40 bp, Homo sapiens
atactgtacaggtttgtatccctggggcaagagactatac

SEQ ID NO: 55042 - DNA, 40 bp, Homo sapiens
tatagtctcttgccccagggatacaaacctgtacagtatg

SEQ ID NO: 55043 - DNA, 40 bp, Homo sapiens
catactgtacaggtttgtatccctggggcaagagactata

SEQ ID NO: 55044 - DNA, 40 bp, Homo sapiens
atagtctcttgccccagggatacaaacctgtacagtatgt

SEQ ID NO: 55045 - DNA, 40 bp, Homo sapiens
acatactgtacaggtttgtatccctggggcaagagactat

SEQ ID NO: 55046 - DNA, 40 bp, Homo sapiens
tagtctcttgccccagggatacaaacctgtacagtatgta

SEQ ID NO: 55047 - DNA, 40 bp, Homo sapiens
tacatactgtacaggtttgtatccctggggcaagagacta

SEQ ID NO: 55048 - DNA, 40 bp, Homo sapiens
agtctcttgccccagggatacaaacctgtacagtatgtaa

SEQ ID NO: 55049 - DNA, 40 bp, Homo sapiens
ttacatactgtacaggtttgtatccctggggcaagagact

SEQ ID NO: 55050 - DNA, 40 bp, Homo sapiens
gtctcttgccccagggatacaaacctgtacagtatgtaac

SEQ ID NO: 55051 - DNA, 40 bp, Homo sapiens
gttacatactgtacaggtttgtatccctggggcaagagac

SEQ ID NO: 55052 - DNA, 40 bp, Homo sapiens
tctcttgccccagggatacaaacctgtacagtatgtaact

SEQ ID NO: 55053 - DNA, 40 bp, Homo sapiens
agttacatactgtacaggtttgtatccctggggcaagaga

SEQ ID NO: 55054 - DNA, 40 bp, Homo sapiens
ctcttgccccagggatacaaacctgtacagtatgtaactg

SEQ ID NO: 55055 - DNA, 40 bp, Homo sapiens
cagttacatactgtacaggtttgtatccctggggcaagag

SEQ ID NO: 55056 - DNA, 40 bp, Homo sapiens
tcttgccccagggatacaaacctgtacagtatgtaactgt

SEQ ID NO: 55057 - DNA, 40 bp, Homo sapiens
acagttacatactgtacaggtttgtatccctggggcaaga

SEQ ID NO: 55058 - DNA, 40 bp, Homo sapiens
cttgccccagggatacaaacctgtacagtatgtaactgta

SEQ ID NO: 55059 - DNA, 40 bp, Homo sapiens
tacagttacatactgtacaggtttgtatccctggggcaag

SEQ ID NO: 55060 - DNA, 40 bp, Homo sapiens
ttgccccagggatacaaacctgtacagtatgtaactgtac

SEQ ID NO: 55061 - DNA, 40 bp, Homo sapiens
gtacagttacatactgtacaggtttgtatccctggggcaa

SEQ ID NO: 55062 - DNA, 40 bp, Homo sapiens
tgccccagggatacaaacctgtacagtatgtaactgtact

SEQ ID NO: 55063 - DNA, 40 bp, Homo sapiens
agtacagttacatactgtacaggtttgtatccctggggca

SEQ ID NO: 55064 - DNA, 40 bp, Homo sapiens
gccccagggatacaaacctgtacagtatgtaactgtacta

SEQ ID NO: 55065 - DNA, 40 bp, Homo sapiens
tagtacagttacatactgtacaggtttgtatccctggggc

SEQ ID NO: 55066 - DNA, 40 bp, Homo sapiens
ccccagggatacaaacctgtacagtatgtaactgtactaa

SEQ ID NO: 55067 - DNA, 40 bp, Homo sapiens
ttagtacagttacatactgtacaggtttgtatccctgggg

SEQ ID NO: 55068 - DNA, 40 bp, Homo sapiens
cccagggatacaaacctgtacagtatgtaactgtactaat

SEQ ID NO: 55069 - DNA, 40 bp, Homo sapiens
attagtacagttacatactgtacaggtttgtatccctggg

SEQ ID NO: 55070 - DNA, 40 bp, Homo sapiens
ccagggatacaaacctgtacagtatgtaactgtactaatg

SEQ ID NO: 55071 - DNA, 40 bp, Homo sapiens
cattagtacagttacatactgtacaggtttgtatccctgg

SEQ ID NO: 55072 - DNA, 40 bp, Homo sapiens
cagggatacaaacctgtacagtatgtaactgtactaatga

SEQ ID NO: 55073 - DNA, 40 bp, Homo sapiens
tcattagtacagttacatactgtacaggtttgtatccctg

SEQ ID NO: 55074 - DNA, 40 bp, Homo sapiens
agggatacaaacctgtacagtatgtaactgtactaatgac

SEQ ID NO: 55075 - DNA, 40 bp, Homo sapiens
gtcattagtacagttacatactgtacaggtttgtatccct

SEQ ID NO: 55076 - DNA, 40 bp, Homo sapiens
gggatacaaacctgtacagtatgtaactgtactaatgact

SEQ ID NO: 55077 - DNA, 40 bp, Homo sapiens
agtcattagtacagttacatactgtacaggtttgtatccc

SEQ ID NO: 55078 - DNA, 40 bp, Homo sapiens
ggatacaaacctgtacagtatgtaactgtactaatgacta

SEQ ID NO: 55079 - DNA, 40 bp, Homo sapiens
tagtcattagtacagttacatactgtacaggtttgtatcc

SEQ ID NO: 55080 - DNA, 40 bp, Homo sapiens
gatacaaacctgtacagtatgtaactgtactaatgactat

SEQ ID NO: 55081 - DNA, 40 bp, Homo sapiens
atagtcattagtacagttacatactgtacaggtttgtatc

SEQ ID NO: 55082 - DNA, 40 bp, Homo sapiens
atacaaacctgtacagtatgtaactgtactaatgactata

SEQ ID NO: 55083 - DNA, 40 bp, Homo sapiens
tatagtcattagtacagttacatactgtacaggtttgtat

SEQ ID NO: 55084 - DNA, 40 bp, Homo sapiens
tacaaacctgtacagtatgtaactgtactaatgactataa

SEQ ID NO: 55085 - DNA, 40 bp, Homo sapiens
ttatagtcattagtacagttacatactgtacaggtttgta

SEQ ID NO: 55086 - DNA, 40 bp, Homo sapiens
acaaacctgtacagtatgtaactgtactaatgactataag

SEQ ID NO: 55087 - DNA, 40 bp, Homo sapiens
cttatagtcattagtacagttacatactgtacaggtttgt

SEQ ID NO: 55088 - DNA, 40 bp, Homo sapiens
caaacctgtacagtatgtaactgtactaatgactataagg

SEQ ID NO: 55089 - DNA, 40 bp, Homo sapiens
ccttatagtcattagtacagttacatactgtacaggtttg

SEQ ID NO: 55090 - DNA, 40 bp, Homo sapiens
aaacctgtacagtatgtaactgtactaatgactataaggc

SEQ ID NO: 55091 - DNA, 40 bp, Homo sapiens
gccttatagtcattagtacagttacatactgtacaggttt

SEQ ID NO: 55092 - DNA, 40 bp, Homo sapiens
aacctgtacagtatgtaactgtactaatgactataaggca

SEQ ID NO: 55093 - DNA, 40 bp, Homo sapiens
tgccttatagtcattagtacagttacatactgtacaggtt

SEQ ID NO: 55094 - DNA, 40 bp, Homo sapiens
acctgtacagtatgtaactgtactaatgactataaggcaa

SEQ ID NO: 55095 - DNA, 40 bp, Homo sapiens
ttgccttatagtcattagtacagttacatactgtacaggt

SEQ ID NO: 55096 - DNA, 40 bp, Homo sapiens
cctgtacagtatgtaactgtactaatgactataaggcaat

SEQ ID NO: 55097 - DNA, 40 bp, Homo sapiens
attgccttatagtcattagtacagttacatactgtacagg

SEQ ID NO: 55098 - DNA, 40 bp, Homo sapiens
ctgtacagtatgtaactgtactaatgactataaggcaatt

SEQ ID NO: 55099 - DNA, 40 bp, Homo sapiens
aattgccttatagtcattagtacagttacatactgtacag

SEQ ID NO: 55100 - DNA, 40 bp, Homo sapiens
tgtacagtatgtaactgtactaatgactataaggcaattg

SEQ ID NO: 55101 - DNA, 40 bp, Homo sapiens
caattgccttatagtcattagtacagttacatactgtaca

SEQ ID NO: 55102 - DNA, 40 bp, Homo sapiens
gtacagtatgtaactgtactaatgactataaggcaattgt

SEQ ID NO: 55103 - DNA, 40 bp, Homo sapiens
acaattgccttatagtcattagtacagttacatactgtac

SEQ ID NO: 55104 - DNA, 40 bp, Homo sapiens
tacagtatgtaactgtactaatgactataaggcaattgtt

SEQ ID NO: 55105 - DNA, 40 bp, Homo sapiens
aacaattgccttatagtcattagtacagttacatactgta

SEQ ID NO: 55106 - DNA, 40 bp, Homo sapiens
acagtatgtaactgtactaatgactataaggcaattgtta

SEQ ID NO: 55107 - DNA, 40 bp, Homo sapiens
taacaattgccttatagtcattagtacagttacatactgt

SEQ ID NO: 55108 - DNA, 40 bp, Homo sapiens
cagtatgtaactgtactaatgactataaggcaattgttaa

SEQ ID NO: 55109 - DNA, 40 bp, Homo sapiens
ttaacaattgccttatagtcattagtacagttacatactg

SEQ ID NO: 55110 - DNA, 40 bp, Homo sapiens
agtatgtaactgtactaatgactataaggcaattgttaac

SEQ ID NO: 55111 - DNA, 40 bp, Homo sapiens
gttaacaattgccttatagtcattagtacagttacatact

SEQ ID NO: 55112 - DNA, 40 bp, Homo sapiens
gtatgtaactgtactaatgactataaggcaattgttaaca

SEQ ID NO: 55113 - DNA, 40 bp, Homo sapiens
tgttaacaattgccttatagtcattagtacagttacatac

SEQ ID NO: 55114 - DNA, 40 bp, Homo sapiens
tatgtaactgtactaatgactataaggcaattgttaacac

SEQ ID NO: 55115 - DNA, 40 bp, Homo sapiens
gtgttaacaattgccttatagtcattagtacagttacata

SEQ ID NO: 55116 - DNA, 40 bp, Homo sapiens
atgtaactgtactaatgactataaggcaattgttaacaca

SEQ ID NO: 55117 - DNA, 40 bp, Homo sapiens
tgtgttaacaattgccttatagtcattagtacagttacat

SEQ ID NO: 55118 - DNA, 40 bp, Homo sapiens
tgtaactgtactaatgactataaggcaattgttaacacaa

SEQ ID NO: 55119 - DNA, 40 bp, Homo sapiens
ttgtgttaacaattgccttatagtcattagtacagttaca

SEQ ID NO: 55120 - DNA, 40 bp, Homo sapiens
gtaactgtactaatgactataaggcaattgttaacacaat

SEQ ID NO: 55121 - DNA, 40 bp, Homo sapiens
attgtgttaacaattgccttatagtcattagtacagttac

SEQ ID NO: 55122 - DNA, 40 bp, Homo sapiens
taactgtactaatgactataaggcaattgttaacacaatg

SEQ ID NO: 55123 - DNA, 40 bp, Homo sapiens
cattgtgttaacaattgccttatagtcattagtacagtta

SEQ ID NO: 55124 - DNA, 40 bp, Homo sapiens
aactgtactaatgactataaggcaattgttaacacaatgg

SEQ ID NO: 55125 - DNA, 40 bp, Homo sapiens
ccattgtgttaacaattgccttatagtcattagtacagtt

SEQ ID NO: 55126 - DNA, 40 bp, Homo sapiens
actgtactaatgactataaggcaattgttaacacaatggt

SEQ ID NO: 55127 - DNA, 40 bp, Homo sapiens
accattgtgttaacaattgccttatagtcattagtacagt

SEQ ID NO: 55128 - DNA, 40 bp, Homo sapiens
ctgtactaatgactataaggcaattgttaacacaatggta

SEQ ID NO: 55129 - DNA, 40 bp, Homo sapiens
taccattgtgttaacaattgccttatagtcattagtacag

SEQ ID NO: 55130 - DNA, 40 bp, Homo sapiens
tgtactaatgactataaggcaattgttaacacaatggtaa

SEQ ID NO: 55131 - DNA, 40 bp, Homo sapiens
ttaccattgtgttaacaattgccttatagtcattagtaca

SEQ ID NO: 55132 - DNA, 40 bp, Homo sapiens
gtactaatgactataaggcaattgttaacacaatggtaag

SEQ ID NO: 55133 - DNA, 40 bp, Homo sapiens
cttaccattgtgttaacaattgccttatagtcattagtac

SEQ ID NO: 55134 - DNA, 40 bp, Homo sapiens
tactaatgactataaggcaattgttaacacaatggtaagt

SEQ ID NO: 55135 - DNA, 40 bp, Homo sapiens
acttaccattgtgttaacaattgccttatagtcattagta

SEQ ID NO: 55136 - DNA, 40 bp, Homo sapiens
actaatgactataaggcaattgttaacacaatggtaagtt

SEQ ID NO: 55137 - DNA, 40 bp, Homo sapiens
aacttaccattgtgttaacaattgccttatagtcattagt

SEQ ID NO: 55138 - DNA, 40 bp, Homo sapiens
ctaatgactataaggcaattgttaacacaatggtaagttt

SEQ ID NO: 55139 - DNA, 40 bp, Homo sapiens
aaacttaccattgtgttaacaattgccttatagtcattag

SEQ ID NO: 55140 - DNA, 40 bp, Homo sapiens
taatgactataaggcaattgttaacacaatggtaagtttt

SEQ ID NO: 55141 - DNA, 40 bp, Homo sapiens
aaaacttaccattgtgttaacaattgccttatagtcatta

SEQ ID NO: 55142 - DNA, 40 bp, Homo sapiens
aatgactataaggcaattgttaacacaatggtaagttttg

SEQ ID NO: 55143 - DNA, 40 bp, Homo sapiens
caaaacttaccattgtgttaacaattgccttatagtcatt

SEQ ID NO: 55144 - DNA, 40 bp, Homo sapiens
atgactataaggcaattgttaacacaatggtaagttttgt

SEQ ID NO: 55145 - DNA, 40 bp, Homo sapiens
acaaaacttaccattgtgttaacaattgccttatagtcat

SEQ ID NO: 55146 - DNA, 40 bp, Homo sapiens
tgactataaggcaattgttaacacaatggtaagttttgtg

SEQ ID NO: 55147 - DNA, 40 bp, Homo sapiens
cacaaaacttaccattgtgttaacaattgccttatagtca

SEQ ID NO: 55148 - DNA, 40 bp, Homo sapiens
gactataaggcaattgttaacacaatggtaagttttgtgt

SEQ ID NO: 55149 - DNA, 40 bp, Homo sapiens
acacaaaacttaccattgtgttaacaattgccttatagtc

SEQ ID NO: 55150 - DNA, 40 bp, Homo sapiens
actataaggcaattgttaacacaatggtaagttttgtgtg

SEQ ID NO: 55151 - DNA, 40 bp, Homo sapiens
cacacaaaacttaccattgtgttaacaattgccttatagt

SEQ ID NO: 55152 - DNA, 40 bp, Homo sapiens
ctataaggcaattgttaacacaatggtaagttttgtgtgt

SEQ ID NO: 55153 - DNA, 40 bp, Homo sapiens
acacacaaaacttaccattgtgttaacaattgccttatag

SEQ ID NO: 55154 - DNA, 40 bp, Homo sapiens
tataaggcaattgttaacacaatggtaagttttgtgtgtc

SEQ ID NO: 55155 - DNA, 40 bp, Homo sapiens
gacacacaaaacttaccattgtgttaacaattgccttata

SEQ ID NO: 55156 - DNA, 40 bp, Homo sapiens
ataaggcaattgttaacacaatggtaagttttgtgtgtct

SEQ ID NO: 55157 - DNA, 40 bp, Homo sapiens
agacacacaaaacttaccattgtgttaacaattgccttat

SEQ ID NO: 55158 - DNA, 40 bp, Homo sapiens
taaggcaattgttaacacaatggtaagttttgtgtgtcta

SEQ ID NO: 55159 - DNA, 40 bp, Homo sapiens
tagacacacaaaacttaccattgtgttaacaattgcctta

SEQ ID NO: 55160 - DNA, 40 bp, Homo sapiens
aaggcaattgttaacacaatggtaagttttgtgtgtctaa

SEQ ID NO: 55161 - DNA, 40 bp, Homo sapiens
ttagacacacaaaacttaccattgtgttaacaattgcctt

SEQ ID NO: 55162 - DNA, 40 bp, Homo sapiens
aggcaattgttaacacaatggtaagttttgtgtgtctaaa

SEQ ID NO: 55163 - DNA, 40 bp, Homo sapiens
tttagacacacaaaacttaccattgtgttaacaattgcct

SEQ ID NO: 55164 - DNA, 40 bp, Homo sapiens
ggcaattgttaacacaatggtaagttttgtgtgtctaaac

SEQ ID NO: 55165 - DNA, 40 bp, Homo sapiens
gtttagacacacaaaacttaccattgtgttaacaattgcc

SEQ ID NO: 55166 - DNA, 40 bp, Homo sapiens
gcaattgttaacacaatggtaagttttgtgtgtctaaacc

SEQ ID NO: 55167 - DNA, 40 bp, Homo sapiens
ggtttagacacacaaaacttaccattgtgttaacaattgc

SEQ ID NO: 55168 - DNA, 40 bp, Homo sapiens
caattgttaacacaatggtaagttttgtgtgtctaaacct

SEQ ID NO: 55169 - DNA, 40 bp, Homo sapiens
aggtttagacacacaaaacttaccattgtgttaacaattg

SEQ ID NO: 55170 - DNA, 40 bp, Homo sapiens
aattgttaacacaatggtaagttttgtgtgtctaaaccta

SEQ ID NO: 55171 - DNA, 40 bp, Homo sapiens
taggtttagacacacaaaacttaccattgtgttaacaatt

SEQ ID NO: 55172 - DNA, 40 bp, Homo sapiens
attgttaacacaatggtaagttttgtgtgtctaaacctac

SEQ ID NO: 55173 - DNA, 40 bp, Homo sapiens
gtaggtttagacacacaaaacttaccattgtgttaacaat

SEQ ID NO: 55174 - DNA, 40 bp, Homo sapiens
ttgttaacacaatggtaagttttgtgtgtctaaacctaca

SEQ ID NO: 55175 - DNA, 40 bp, Homo sapiens
tgtaggtttagacacacaaaacttaccattgtgttaacaa

SEQ ID NO: 55176 - DNA, 40 bp, Homo sapiens
tgttaacacaatggtaagttttgtgtgtctaaacctacac

SEQ ID NO: 55177 - DNA, 40 bp, Homo sapiens
gtgtaggtttagacacacaaaacttaccattgtgttaaca

SEQ ID NO: 55178 - DNA, 40 bp, Homo sapiens
gttaacacaatggtaagttttgtgtgtctaaacctacact

SEQ ID NO: 55179 - DNA, 40 bp, Homo sapiens
agtgtaggtttagacacacaaaacttaccattgtgttaac

SEQ ID NO: 55180 - DNA, 40 bp, Homo sapiens
ttaacacaatggtaagttttgtgtgtctaaacctacactt

SEQ ID NO: 55181 - DNA, 40 bp, Homo sapiens
aagtgtaggtttagacacacaaaacttaccattgtgttaa

SEQ ID NO: 55182 - DNA, 40 bp, Homo sapiens
taacacaatggtaagttttgtgtgtctaaacctacacttg

SEQ ID NO: 55183 - DNA, 40 bp, Homo sapiens
caagtgtaggtttagacacacaaaacttaccattgtgtta

SEQ ID NO: 55184 - DNA, 40 bp, Homo sapiens
aacacaatggtaagttttgtgtgtctaaacctacacttgg

SEQ ID NO: 55185 - DNA, 40 bp, Homo sapiens
ccaagtgtaggtttagacacacaaaacttaccattgtgtt

SEQ ID NO: 55186 - DNA, 40 bp, Homo sapiens
acacaatggtaagttttgtgtgtctaaacctacacttggg

SEQ ID NO: 55187 - DNA, 40 bp, Homo sapiens
cccaagtgtaggtttagacacacaaaacttaccattgtgt

SEQ ID NO: 55188 - DNA, 40 bp, Homo sapiens
cacaatggtaagttttgtgtgtctaaacctacacttgggc

SEQ ID NO: 55189 - DNA, 40 bp, Homo sapiens
gcccaagtgtaggtttagacacacaaaacttaccattgtg

SEQ ID NO: 55190 - DNA, 40 bp, Homo sapiens
acaatggtaagttttgtgtgtctaaacctacacttgggct

SEQ ID NO: 55191 - DNA, 40 bp, Homo sapiens
agcccaagtgtaggtttagacacacaaaacttaccattgt

SEQ ID NO: 55192 - DNA, 40 bp, Homo sapiens
caatggtaagttttgtgtgtctaaacctacacttgggcta

SEQ ID NO: 55193 - DNA, 40 bp, Homo sapiens
tagcccaagtgtaggtttagacacacaaaacttaccattg

SEQ ID NO: 55194 - DNA, 40 bp, Homo sapiens
aatggtaagttttgtgtgtctaaacctacacttgggctac

SEQ ID NO: 55195 - DNA, 40 bp, Homo sapiens
gtagcccaagtgtaggtttagacacacaaaacttaccatt

SEQ ID NO: 55196 - DNA, 40 bp, Homo sapiens
atggtaagttttgtgtgtctaaacctacacttgggctacc

SEQ ID NO: 55197 - DNA, 40 bp, Homo sapiens
ggtagcccaagtgtaggtttagacacacaaaacttaccat

SEQ ID NO: 55198 - DNA, 40 bp, Homo sapiens
tggtaagttttgtgtgtctaaacctacacttgggctaccc

SEQ ID NO: 55199 - DNA, 40 bp, Homo sapiens
gggtagcccaagtgtaggtttagacacacaaaacttacca

SEQ ID NO: 55200 - DNA, 40 bp, Homo sapiens
ggtaagttttgtgtgtctaaacctacacttgggctaccct

SEQ ID NO: 55201 - DNA, 40 bp, Homo sapiens
agggtagcccaagtgtaggtttagacacacaaaacttacc

SEQ ID NO: 55202 - DNA, 40 bp, Homo sapiens
gtaagttttgtgtgtctaaacctacacttgggctacccta

SEQ ID NO: 55203 - DNA, 40 bp, Homo sapiens
tagggtagcccaagtgtaggtttagacacacaaaacttac

SEQ ID NO: 55204 - DNA, 40 bp, Homo sapiens
taagttttgtgtgtctaaacctacacttgggctaccctaa

SEQ ID NO: 55205 - DNA, 40 bp, Homo sapiens
ttagggtagcccaagtgtaggtttagacacacaaaactta

SEQ ID NO: 55206 - DNA, 40 bp, Homo sapiens
aagttttgtgtgtctaaacctacacttgggctaccctaag

SEQ ID NO: 55207 - DNA, 40 bp, Homo sapiens
cttagggtagcccaagtgtaggtttagacacacaaaactt

SEQ ID NO: 55208 - DNA, 40 bp, Homo sapiens
agttttgtgtgtctaaacctacacttgggctaccctaagt

SEQ ID NO: 55209 - DNA, 40 bp, Homo sapiens
acttagggtagcccaagtgtaggtttagacacacaaaact

SEQ ID NO: 55210 - DNA, 40 bp, Homo sapiens
gttttgtgtgtctaaacctacacttgggctaccctaagtt

SEQ ID NO: 55211 - DNA, 40 bp, Homo sapiens
aacttagggtagcccaagtgtaggtttagacacacaaaac

SEQ ID NO: 55212 - DNA, 40 bp, Homo sapiens
ttttgtgtgtctaaacctacacttgggctaccctaagttt

SEQ ID NO: 55213 - DNA, 40 bp, Homo sapiens
aaacttagggtagcccaagtgtaggtttagacacacaaaa

SEQ ID NO: 55214 - DNA, 40 bp, Homo sapiens
tttgtgtgtctaaacctacacttgggctaccctaagttta

SEQ ID NO: 55215 - DNA, 40 bp, Homo sapiens
taaacttagggtagcccaagtgtaggtttagacacacaaa

SEQ ID NO: 55216 - DNA, 40 bp, Homo sapiens
ttgtgtgtctaaacctacacttgggctaccctaagtttat

SEQ ID NO: 55217 - DNA, 40 bp, Homo sapiens
ataaacttagggtagcccaagtgtaggtttagacacacaa

SEQ ID NO: 55218 - DNA, 40 bp, Homo sapiens
tgtgtgtctaaacctacacttgggctaccctaagtttata

SEQ ID NO: 55219 - DNA, 40 bp, Homo sapiens
tataaacttagggtagcccaagtgtaggtttagacacaca

SEQ ID NO: 55220 - DNA, 40 bp, Homo sapiens
gtgtgtctaaacctacacttgggctaccctaagtttatat

SEQ ID NO: 55221 - DNA, 40 bp, Homo sapiens
atataaacttagggtagcccaagtgtaggtttagacacac

SEQ ID NO: 55222 - DNA, 40 bp, Homo sapiens
tgtgtctaaacctacacttgggctaccctaagtttatata

SEQ ID NO: 55223 - DNA, 40 bp, Homo sapiens
tatataaacttagggtagcccaagtgtaggtttagacaca

SEQ ID NO: 55224 - DNA, 40 bp, Homo sapiens
gtgtctaaacctacacttgggctaccctaagtttatatat

SEQ ID NO: 55225 - DNA, 40 bp, Homo sapiens
atatataaacttagggtagcccaagtgtaggtttagacac

SEQ ID NO: 55226 - DNA, 40 bp, Homo sapiens
tgtctaaacctacacttgggctaccctaagtttatatatt

SEQ ID NO: 55227 - DNA, 40 bp, Homo sapiens
aatatataaacttagggtagcccaagtgtaggtttagaca

SEQ ID NO: 55228 - DNA, 40 bp, Homo sapiens
gtctaaacctacacttgggctaccctaagtttatatattt

SEQ ID NO: 55229 - DNA, 40 bp, Homo sapiens
aaatatataaacttagggtagcccaagtgtaggtttagac

SEQ ID NO: 55230 - DNA, 40 bp, Homo sapiens
tctaaacctacacttgggctaccctaagtttatatatttt

SEQ ID NO: 55231 - DNA, 40 bp, Homo sapiens
aaaatatataaacttagggtagcccaagtgtaggtttaga

SEQ ID NO: 55232 - DNA, 40 bp, Homo sapiens
ctaaacctacacttgggctaccctaagtttatatattttt

SEQ ID NO: 55233 - DNA, 40 bp, Homo sapiens
aaaaatatataaacttagggtagcccaagtgtaggtttag

SEQ ID NO: 55234 - DNA, 40 bp, Homo sapiens
taaacctacacttgggctaccctaagtttatatatttttt

SEQ ID NO: 55235 - DNA, 40 bp, Homo sapiens
aaaaaatatataaacttagggtagcccaagtgtaggttta

SEQ ID NO: 55236 - DNA, 40 bp, Homo sapiens
aaacctacacttgggctaccctaagtttatatattttttt

SEQ ID NO: 55237 - DNA, 40 bp, Homo sapiens
aaaaaaatatataaacttagggtagcccaagtgtaggttt

SEQ ID NO: 55238 - DNA, 40 bp, Homo sapiens
aacctacacttgggctaccctaagtttatatattttttta

SEQ ID NO: 55239 - DNA, 40 bp, Homo sapiens
taaaaaaatatataaacttagggtagcccaagtgtaggtt

SEQ ID NO: 55240 - DNA, 40 bp, Homo sapiens
acctacacttgggctaccctaagtttatatatttttttaa

SEQ ID NO: 55241 - DNA, 40 bp, Homo sapiens
ttaaaaaaatatataaacttagggtagcccaagtgtaggt

SEQ ID NO: 55242 - DNA, 40 bp, Homo sapiens
cctacacttgggctaccctaagtttatatatttttttaaa

SEQ ID NO: 55243 - DNA, 40 bp, Homo sapiens
tttaaaaaaatatataaacttagggtagcccaagtgtagg

SEQ ID NO: 55244 - DNA, 40 bp, Homo sapiens
ctacacttgggctaccctaagtttatatatttttttaaat

SEQ ID NO: 55245 - DNA, 40 bp, Homo sapiens
atttaaaaaaatatataaacttagggtagcccaagtgtag

SEQ ID NO: 55246 - DNA, 40 bp, Homo sapiens
tacacttgggctaccctaagtttatatatttttttaaatt

SEQ ID NO: 55247 - DNA, 40 bp, Homo sapiens
aatttaaaaaaatatataaacttagggtagcccaagtgta

SEQ ID NO: 55248 - DNA, 40 bp, Homo sapiens
acacttgggctaccctaagtttatatatttttttaaattt

SEQ ID NO: 55249 - DNA, 40 bp, Homo sapiens
aaatttaaaaaaatatataaacttagggtagcccaagtgt

SEQ ID NO: 55250 - DNA, 40 bp, Homo sapiens
cacttgggctaccctaagtttatatatttttttaaatttc

SEQ ID NO: 55251 - DNA, 40 bp, Homo sapiens
gaaatttaaaaaaatatataaacttagggtagcccaagtg

SEQ ID NO: 55252 - DNA, 40 bp, Homo sapiens
acttgggctaccctaagtttatatatttttttaaatttct

SEQ ID NO: 55253 - DNA, 40 bp, Homo sapiens
agaaatttaaaaaaatatataaacttagggtagcccaagt

SEQ ID NO: 55254 - DNA, 40 bp, Homo sapiens
cttgggctaccctaagtttatatatttttttaaatttctg

SEQ ID NO: 55255 - DNA, 40 bp, Homo sapiens
cagaaatttaaaaaaatatataaacttagggtagcccaag

SEQ ID NO: 55256 - DNA, 40 bp, Homo sapiens
ttgggctaccctaagtttatatatttttttaaatttctgt

SEQ ID NO: 55257 - DNA, 40 bp, Homo sapiens
acagaaatttaaaaaaatatataaacttagggtagcccaa

SEQ ID NO: 55258 - DNA, 40 bp, Homo sapiens
tgggctaccctaagtttatatatttttttaaatttctgtt

SEQ ID NO: 55259 - DNA, 40 bp, Homo sapiens
aacagaaatttaaaaaaatatataaacttagggtagccca

SEQ ID NO: 55260 - DNA, 40 bp, Homo sapiens
gggctaccctaagtttatatatttttttaaatttctgttc

SEQ ID NO: 55261 - DNA, 40 bp, Homo sapiens
gaacagaaatttaaaaaaatatataaacttagggtagccc

SEQ ID NO: 55262 - DNA, 40 bp, Homo sapiens
ggctaccctaagtttatatatttttttaaatttctgttca

SEQ ID NO: 55263 - DNA, 40 bp, Homo sapiens
tgaacagaaatttaaaaaaatatataaacttagggtagcc

SEQ ID NO: 55264 - DNA, 40 bp, Homo sapiens
gctaccctaagtttatatatttttttaaatttctgttcaa

SEQ ID NO: 55265 - DNA, 40 bp, Homo sapiens
ttgaacagaaatttaaaaaaatatataaacttagggtagc

SEQ ID NO: 55266 - DNA, 40 bp, Homo sapiens
ctaccctaagtttatatatttttttaaatttctgttcaat

SEQ ID NO: 55267 - DNA, 40 bp, Homo sapiens
attgaacagaaatttaaaaaaatatataaacttagggtag

SEQ ID NO: 55268 - DNA, 40 bp, Homo sapiens
taccctaagtttatatatttttttaaatttctgttcaata

SEQ ID NO: 55269 - DNA, 40 bp, Homo sapiens
tattgaacagaaatttaaaaaaatatataaacttagggta

SEQ ID NO: 55270 - DNA, 40 bp, Homo sapiens
accctaagtttatatatttttttaaatttctgttcaataa

SEQ ID NO: 55271 - DNA, 40 bp, Homo sapiens
ttattgaacagaaatttaaaaaaatatataaacttagggt

SEQ ID NO: 55272 - DNA, 40 bp, Homo sapiens
ccctaagtttatatatttttttaaatttctgttcaataat

SEQ ID NO: 55273 - DNA, 40 bp, Homo sapiens
attattgaacagaaatttaaaaaaatatataaacttaggg

SEQ ID NO: 55274 - DNA, 40 bp, Homo sapiens
cctaagtttatatatttttttaaatttctgttcaataata

SEQ ID NO: 55275 - DNA, 40 bp, Homo sapiens
tattattgaacagaaatttaaaaaaatatataaacttagg

SEQ ID NO: 55276 - DNA, 40 bp, Homo sapiens
ctaagtttatatatttttttaaatttctgttcaataataa

SEQ ID NO: 55277 - DNA, 40 bp, Homo sapiens
ttattattgaacagaaatttaaaaaaatatataaacttag

SEQ ID NO: 55278 - DNA, 40 bp, Homo sapiens
taagtttatatatttttttaaatttctgttcaataataaa

SEQ ID NO: 55279 - DNA, 40 bp, Homo sapiens
tttattattgaacagaaatttaaaaaaatatataaactta

SEQ ID NO: 55280 - DNA, 40 bp, Homo sapiens
aagtttatatatttttttaaatttctgttcaataataaat

SEQ ID NO: 55281 - DNA, 40 bp, Homo sapiens
atttattattgaacagaaatttaaaaaaatatataaactt

SEQ ID NO: 55282 - DNA, 40 bp, Homo sapiens
agtttatatatttttttaaatttctgttcaataataaatt

SEQ ID NO: 55283 - DNA, 40 bp, Homo sapiens
aatttattattgaacagaaatttaaaaaaatatataaact

SEQ ID NO: 55284 - DNA, 40 bp, Homo sapiens
gtttatatatttttttaaatttctgttcaataataaatta

SEQ ID NO: 55285 - DNA, 40 bp, Homo sapiens
taatttattattgaacagaaatttaaaaaaatatataaac

SEQ ID NO: 55286 - DNA, 40 bp, Homo sapiens
tttatatatttttttaaatttctgttcaataataaattaa

SEQ ID NO: 55287 - DNA, 40 bp, Homo sapiens
ttaatttattattgaacagaaatttaaaaaaatatataaa

SEQ ID NO: 55288 - DNA, 40 bp, Homo sapiens
ttatatatttttttaaatttctgttcaataataaattaac

SEQ ID NO: 55289 - DNA, 40 bp, Homo sapiens
gttaatttattattgaacagaaatttaaaaaaatatataa

SEQ ID NO: 55290 - DNA, 40 bp, Homo sapiens
tatatatttttttaaatttctgttcaataataaattaacc

SEQ ID NO: 55291 - DNA, 40 bp, Homo sapiens
ggttaatttattattgaacagaaatttaaaaaaatatata

SEQ ID NO: 55292 - DNA, 40 bp, Homo sapiens
atatatttttttaaatttctgttcaataataaattaacct

SEQ ID NO: 55293 - DNA, 40 bp, Homo sapiens
aggttaatttattattgaacagaaatttaaaaaaatatat

SEQ ID NO: 55294 - DNA, 40 bp, Homo sapiens
tatatttttttaaatttctgttcaataataaattaacctt

SEQ ID NO: 55295 - DNA, 40 bp, Homo sapiens
aaggttaatttattattgaacagaaatttaaaaaaatata

SEQ ID NO: 55296 - DNA, 40 bp, Homo sapiens
atatttttttaaatttctgttcaataataaattaacctta

SEQ ID NO: 55297 - DNA, 40 bp, Homo sapiens
taaggttaatttattattgaacagaaatttaaaaaaatat

SEQ ID NO: 55298 - DNA, 40 bp, Homo sapiens
tatttttttaaatttctgttcaataataaattaaccttac

SEQ ID NO: 55299 - DNA, 40 bp, Homo sapiens
gtaaggttaatttattattgaacagaaatttaaaaaaata

SEQ ID NO: 55300 - DNA, 40 bp, Homo sapiens
atttttttaaatttctgttcaataataaattaaccttact

SEQ ID NO: 55301 - DNA, 40 bp, Homo sapiens
agtaaggttaatttattattgaacagaaatttaaaaaaat

SEQ ID NO: 55302 - DNA, 40 bp, Homo sapiens
tttttttaaatttctgttcaataataaattaaccttactt

SEQ ID NO: 55303 - DNA, 40 bp, Homo sapiens
aagtaaggttaatttattattgaacagaaatttaaaaaaa

SEQ ID NO: 55304 - DNA, 40 bp, Homo sapiens
ttttttaaatttctgttcaataataaattaaccttacttt

SEQ ID NO: 55305 - DNA, 40 bp, Homo sapiens
aaagtaaggttaatttattattgaacagaaatttaaaaaa

SEQ ID NO: 55306 - DNA, 40 bp, Homo sapiens
tttttaaatttctgttcaataataaattaaccttacttta

SEQ ID NO: 55307 - DNA, 40 bp, Homo sapiens
taaagtaaggttaatttattattgaacagaaatttaaaaa

SEQ ID NO: 55308 - DNA, 40 bp, Homo sapiens
ttttaaatttctgttcaataataaattaaccttactttac

SEQ ID NO: 55309 - DNA, 40 bp, Homo sapiens
gtaaagtaaggttaatttattattgaacagaaatttaaaa

SEQ ID NO: 55310 - DNA, 40 bp, Homo sapiens
tttaaatttctgttcaataataaattaaccttactttact

SEQ ID NO: 55311 - DNA, 40 bp, Homo sapiens
agtaaagtaaggttaatttattattgaacagaaatttaaa

SEQ ID NO: 55312 - DNA, 40 bp, Homo sapiens
ttaaatttctgttcaataataaattaaccttactttactg

SEQ ID NO: 55313 - DNA, 40 bp, Homo sapiens
cagtaaagtaaggttaatttattattgaacagaaatttaa

SEQ ID NO: 55314 - DNA, 40 bp, Homo sapiens
taaatttctgttcaataataaattaaccttactttactgt

SEQ ID NO: 55315 - DNA, 40 bp, Homo sapiens
acagtaaagtaaggttaatttattattgaacagaaattta

SEQ ID NO: 55316 - DNA, 40 bp, Homo sapiens
aaatttctgttcaataataaattaaccttactttactgta

SEQ ID NO: 55317 - DNA, 40 bp, Homo sapiens
tacagtaaagtaaggttaatttattattgaacagaaattt

SEQ ID NO: 55318 - DNA, 40 bp, Homo sapiens
aatttctgttcaataataaattaaccttactttactgtaa

SEQ ID NO: 55319 - DNA, 40 bp, Homo sapiens
ttacagtaaagtaaggttaatttattattgaacagaaatt

SEQ ID NO: 55320 - DNA, 40 bp, Homo sapiens
atttctgttcaataataaattaaccttactttactgtaac

SEQ ID NO: 55321 - DNA, 40 bp, Homo sapiens
gttacagtaaagtaaggttaatttattattgaacagaaat

SEQ ID NO: 55322 - DNA, 40 bp, Homo sapiens
tttctgttcaataataaattaaccttactttactgtaact

SEQ ID NO: 55323 - DNA, 40 bp, Homo sapiens
agttacagtaaagtaaggttaatttattattgaacagaaa

SEQ ID NO: 55324 - DNA, 40 bp, Homo sapiens
ttctgttcaataataaattaaccttactttactgtaactt

SEQ ID NO: 55325 - DNA, 40 bp, Homo sapiens
aagttacagtaaagtaaggttaatttattattgaacagaa

SEQ ID NO: 55326 - DNA, 40 bp, Homo sapiens
tctgttcaataataaattaaccttactttactgtaacttt

SEQ ID NO: 55327 - DNA, 40 bp, Homo sapiens
aaagttacagtaaagtaaggttaatttattattgaacaga

SEQ ID NO: 55328 - DNA, 40 bp, Homo sapiens
ctgttcaataataaattaaccttactttactgtaactttt

SEQ ID NO: 55329 - DNA, 40 bp, Homo sapiens
aaaagttacagtaaagtaaggttaatttattattgaacag

SEQ ID NO: 55330 - DNA, 40 bp, Homo sapiens
tgttcaataataaattaaccttactttactgtaacttttt

SEQ ID NO: 55331 - DNA, 40 bp, Homo sapiens
aaaaagttacagtaaagtaaggttaatttattattgaaca

SEQ ID NO: 55332 - DNA, 40 bp, Homo sapiens
gttcaataataaattaaccttactttactgtaacttttta

SEQ ID NO: 55333 - DNA, 40 bp, Homo sapiens
taaaaagttacagtaaagtaaggttaatttattattgaac

SEQ ID NO: 55334 - DNA, 40 bp, Homo sapiens
ttcaataataaattaaccttactttactgtaactttttaa

SEQ ID NO: 55335 - DNA, 40 bp, Homo sapiens
ttaaaaagttacagtaaagtaaggttaatttattattgaa

SEQ ID NO: 55336 - DNA, 40 bp, Homo sapiens
tcaataataaattaaccttactttactgtaactttttaaa

SEQ ID NO: 55337 - DNA, 40 bp, Homo sapiens
tttaaaaagttacagtaaagtaaggttaatttattattga

SEQ ID NO: 55338 - DNA, 40 bp, Homo sapiens
caataataaattaaccttactttactgtaactttttaaac

SEQ ID NO: 55339 - DNA, 40 bp, Homo sapiens
gtttaaaaagttacagtaaagtaaggttaatttattattg

SEQ ID NO: 55340 - DNA, 40 bp, Homo sapiens
aataataaattaaccttactttactgtaactttttaaact

SEQ ID NO: 55341 - DNA, 40 bp, Homo sapiens
agtttaaaaagttacagtaaagtaaggttaatttattatt

SEQ ID NO: 55342 - DNA, 40 bp, Homo sapiens
ataataaattaaccttactttactgtaactttttaaactt

SEQ ID NO: 55343 - DNA, 40 bp, Homo sapiens
aagtttaaaaagttacagtaaagtaaggttaatttattat

SEQ ID NO: 55344 - DNA, 40 bp, Homo sapiens
taataaattaaccttactttactgtaactttttaaacttt

SEQ ID NO: 55345 - DNA, 40 bp, Homo sapiens
aaagtttaaaaagttacagtaaagtaaggttaatttatta

SEQ ID NO: 55346 - DNA, 40 bp, Homo sapiens
aataaattaaccttactttactgtaactttttaaactttt

SEQ ID NO: 55347 - DNA, 40 bp, Homo sapiens
aaaagtttaaaaagttacagtaaagtaaggttaatttatt

SEQ ID NO: 55348 - DNA, 40 bp, Homo sapiens
ataaattaaccttactttactgtaactttttaaacttttt

SEQ ID NO: 55349 - DNA, 40 bp, Homo sapiens
aaaaagtttaaaaagttacagtaaagtaaggttaatttat

SEQ ID NO: 55350 - DNA, 40 bp, Homo sapiens
taaattaaccttactttactgtaactttttaaacttttta

SEQ ID NO: 55351 - DNA, 40 bp, Homo sapiens
taaaaagtttaaaaagttacagtaaagtaaggttaattta

SEQ ID NO: 55352 - DNA, 40 bp, Homo sapiens
aaattaaccttactttactgtaactttttaaactttttaa

SEQ ID NO: 55353 - DNA, 40 bp, Homo sapiens
ttaaaaagtttaaaaagttacagtaaagtaaggttaattt

SEQ ID NO: 55354 - DNA, 40 bp, Homo sapiens
aattaaccttactttactgtaactttttaaactttttaat

SEQ ID NO: 55355 - DNA, 40 bp, Homo sapiens
attaaaaagtttaaaaagttacagtaaagtaaggttaatt

SEQ ID NO: 55356 - DNA, 40 bp, Homo sapiens
attaaccttactttactgtaactttttaaactttttaatt

SEQ ID NO: 55357 - DNA, 40 bp, Homo sapiens
aattaaaaagtttaaaaagttacagtaaagtaaggttaat

SEQ ID NO: 55358 - DNA, 40 bp, Homo sapiens
ttaaccttactttactgtaactttttaaactttttaattt

SEQ ID NO: 55359 - DNA, 40 bp, Homo sapiens
aaattaaaaagtttaaaaagttacagtaaagtaaggttaa

SEQ ID NO: 55360 - DNA, 40 bp, Homo sapiens
taaccttactttactgtaactttttaaactttttaatttt

SEQ ID NO: 55361 - DNA, 40 bp, Homo sapiens
aaaattaaaaagtttaaaaagttacagtaaagtaaggtta

SEQ ID NO: 55362 - DNA, 40 bp, Homo sapiens
aaccttactttactgtaactttttaaactttttaattttt

SEQ ID NO: 55363 - DNA, 40 bp, Homo sapiens
aaaaattaaaaagtttaaaaagttacagtaaagtaaggtt

SEQ ID NO: 55364 - DNA, 40 bp, Homo sapiens
accttactttactgtaactttttaaactttttaatttttc

SEQ ID NO: 55365 - DNA, 40 bp, Homo sapiens
gaaaaattaaaaagtttaaaaagttacagtaaagtaaggt

SEQ ID NO: 55366 - DNA, 40 bp, Homo sapiens
ccttactttactgtaactttttaaactttttaatttttcc

SEQ ID NO: 55367 - DNA, 40 bp, Homo sapiens
ggaaaaattaaaaagtttaaaaagttacagtaaagtaagg

SEQ ID NO: 55368 - DNA, 40 bp, Homo sapiens
cttactttactgtaactttttaaactttttaatttttcct

SEQ ID NO: 55369 - DNA, 40 bp, Homo sapiens
aggaaaaattaaaaagtttaaaaagttacagtaaagtaag

SEQ ID NO: 55370 - DNA, 40 bp, Homo sapiens
ttactttactgtaactttttaaactttttaatttttccta

SEQ ID NO: 55371 - DNA, 40 bp, Homo sapiens
taggaaaaattaaaaagtttaaaaagttacagtaaagtaa

SEQ ID NO: 55372 - DNA, 40 bp, Homo sapiens
tactttactgtaactttttaaactttttaatttttcctaa

SEQ ID NO: 55373 - DNA, 40 bp, Homo sapiens
ttaggaaaaattaaaaagtttaaaaagttacagtaaagta

SEQ ID NO: 55374 - DNA, 40 bp, Homo sapiens
actttactgtaactttttaaactttttaatttttcctaac

SEQ ID NO: 55375 - DNA, 40 bp, Homo sapiens
gttaggaaaaattaaaaagtttaaaaagttacagtaaagt

SEQ ID NO: 55376 - DNA, 40 bp, Homo sapiens
ctttactgtaactttttaaactttttaatttttcctaaca

SEQ ID NO: 55377 - DNA, 40 bp, Homo sapiens
tgttaggaaaaattaaaaagtttaaaaagttacagtaaag

SEQ ID NO: 55378 - DNA, 40 bp, Homo sapiens
tttactgtaactttttaaactttttaatttttcctaacat

SEQ ID NO: 55379 - DNA, 40 bp, Homo sapiens
atgttaggaaaaattaaaaagtttaaaaagttacagtaaa

SEQ ID NO: 55380 - DNA, 40 bp, Homo sapiens
ttactgtaactttttaaactttttaatttttcctaacatt

SEQ ID NO: 55381 - DNA, 40 bp, Homo sapiens
aatgttaggaaaaattaaaaagtttaaaaagttacagtaa

SEQ ID NO: 55382 - DNA, 40 bp, Homo sapiens
tactgtaactttttaaactttttaatttttcctaacattt

SEQ ID NO: 55383 - DNA, 40 bp, Homo sapiens
aaatgttaggaaaaattaaaaagtttaaaaagttacagta

SEQ ID NO: 55384 - DNA, 40 bp, Homo sapiens
actgtaactttttaaactttttaatttttcctaacatttt

SEQ ID NO: 55385 - DNA, 40 bp, Homo sapiens
aaaatgttaggaaaaattaaaaagtttaaaaagttacagt

SEQ ID NO: 55386 - DNA, 40 bp, Homo sapiens
ctgtaactttttaaactttttaatttttcctaacattttg

SEQ ID NO: 55387 - DNA, 40 bp, Homo sapiens
caaaatgttaggaaaaattaaaaagtttaaaaagttacag

SEQ ID NO: 55388 - DNA, 40 bp, Homo sapiens
tgtaactttttaaactttttaatttttcctaacattttga

SEQ ID NO: 55389 - DNA, 40 bp, Homo sapiens
tcaaaatgttaggaaaaattaaaaagtttaaaaagttaca

SEQ ID NO: 55390 - DNA, 40 bp, Homo sapiens
gtaactttttaaactttttaatttttcctaacattttgac

SEQ ID NO: 55391 - DNA, 40 bp, Homo sapiens
gtcaaaatgttaggaaaaattaaaaagtttaaaaagttac

SEQ ID NO: 55392 - DNA, 40 bp, Homo sapiens
taactttttaaactttttaatttttcctaacattttgact

SEQ ID NO: 55393 - DNA, 40 bp, Homo sapiens
agtcaaaatgttaggaaaaattaaaaagtttaaaaagtta

SEQ ID NO: 55394 - DNA, 40 bp, Homo sapiens
aactttttaaactttttaatttttcctaacattttgactt

SEQ ID NO: 55395 - DNA, 40 bp, Homo sapiens
aagtcaaaatgttaggaaaaattaaaaagtttaaaaagtt

SEQ ID NO: 55396 - DNA, 40 bp, Homo sapiens
actttttaaactttttaatttttcctaacattttgacttt

SEQ ID NO: 55397 - DNA, 40 bp, Homo sapiens
aaagtcaaaatgttaggaaaaattaaaaagtttaaaaagt

SEQ ID NO: 55398 - DNA, 40 bp, Homo sapiens
ctttttaaactttttaatttttcctaacattttgactttt

SEQ ID NO: 55399 - DNA, 40 bp, Homo sapiens
aaaagtcaaaatgttaggaaaaattaaaaagtttaaaaag

SEQ ID NO: 55400 - DNA, 40 bp, Homo sapiens
tttttaaactttttaatttttcctaacattttgacttttg

SEQ ID NO: 55401 - DNA, 40 bp, Homo sapiens
caaaagtcaaaatgttaggaaaaattaaaaagtttaaaaa

SEQ ID NO: 55402 - DNA, 40 bp, Homo sapiens
ttttaaactttttaatttttcctaacattttgacttttgt

SEQ ID NO: 55403 - DNA, 40 bp, Homo sapiens
acaaaagtcaaaatgttaggaaaaattaaaaagtttaaaa

SEQ ID NO: 55404 - DNA, 40 bp, Homo sapiens
tttaaactttttaatttttcctaacattttgacttttgta

SEQ ID NO: 55405 - DNA, 40 bp, Homo sapiens
tacaaaagtcaaaatgttaggaaaaattaaaaagtttaaa

SEQ ID NO: 55406 - DNA, 40 bp, Homo sapiens
ttaaactttttaatttttcctaacattttgacttttgtaa

SEQ ID NO: 55407 - DNA, 40 bp, Homo sapiens
ttacaaaagtcaaaatgttaggaaaaattaaaaagtttaa

SEQ ID NO: 55408 - DNA, 40 bp, Homo sapiens
taaactttttaatttttcctaacattttgacttttgtaat

SEQ ID NO: 55409 - DNA, 40 bp, Homo sapiens
attacaaaagtcaaaatgttaggaaaaattaaaaagttta

SEQ ID NO: 55410 - DNA, 40 bp, Homo sapiens
aaactttttaatttttcctaacattttgacttttgtaata

SEQ ID NO: 55411 - DNA, 40 bp, Homo sapiens
tattacaaaagtcaaaatgttaggaaaaattaaaaagttt

SEQ ID NO: 55412 - DNA, 40 bp, Homo sapiens
aactttttaatttttcctaacattttgacttttgtaatac

SEQ ID NO: 55413 - DNA, 40 bp, Homo sapiens
gtattacaaaagtcaaaatgttaggaaaaattaaaaagtt

SEQ ID NO: 55414 - DNA, 40 bp, Homo sapiens
actttttaatttttcctaacattttgacttttgtaataca

SEQ ID NO: 55415 - DNA, 40 bp, Homo sapiens
tgtattacaaaagtcaaaatgttaggaaaaattaaaaagt

SEQ ID NO: 55416 - DNA, 40 bp, Homo sapiens
ctttttaatttttcctaacattttgacttttgtaatacag

SEQ ID NO: 55417 - DNA, 40 bp, Homo sapiens
ctgtattacaaaagtcaaaatgttaggaaaaattaaaaag

SEQ ID NO: 55418 - DNA, 40 bp, Homo sapiens
tttttaatttttcctaacattttgacttttgtaatacagc

SEQ ID NO: 55419 - DNA, 40 bp, Homo sapiens
gctgtattacaaaagtcaaaatgttaggaaaaattaaaaa

SEQ ID NO: 55420 - DNA, 40 bp, Homo sapiens
ttttaatttttcctaacattttgacttttgtaatacagct

SEQ ID NO: 55421 - DNA, 40 bp, Homo sapiens
agctgtattacaaaagtcaaaatgttaggaaaaattaaaa

SEQ ID NO: 55422 - DNA, 40 bp, Homo sapiens
tttaatttttcctaacattttgacttttgtaatacagctt

SEQ ID NO: 55423 - DNA, 40 bp, Homo sapiens
aagctgtattacaaaagtcaaaatgttaggaaaaattaaa

SEQ ID NO: 55424 - DNA, 40 bp, Homo sapiens
ttaatttttcctaacattttgacttttgtaatacagctta

SEQ ID NO: 55425 - DNA, 40 bp, Homo sapiens
taagctgtattacaaaagtcaaaatgttaggaaaaattaa

SEQ ID NO: 55426 - DNA, 40 bp, Homo sapiens
taatttttcctaacattttgacttttgtaatacagcttaa

SEQ ID NO: 55427 - DNA, 40 bp, Homo sapiens
ttaagctgtattacaaaagtcaaaatgttaggaaaaatta

SEQ ID NO: 55428 - DNA, 40 bp, Homo sapiens
aatttttcctaacattttgacttttgtaatacagcttaaa

SEQ ID NO: 55429 - DNA, 40 bp, Homo sapiens
tttaagctgtattacaaaagtcaaaatgttaggaaaaatt

SEQ ID NO: 55430 - DNA, 40 bp, Homo sapiens
atttttcctaacattttgacttttgtaatacagcttaaaa

SEQ ID NO: 55431 - DNA, 40 bp, Homo sapiens
ttttaagctgtattacaaaagtcaaaatgttaggaaaaat

SEQ ID NO: 55432 - DNA, 40 bp, Homo sapiens
tttttcctaacattttgacttttgtaatacagcttaaaac

SEQ ID NO: 55433 - DNA, 40 bp, Homo sapiens
gttttaagctgtattacaaaagtcaaaatgttaggaaaaa

SEQ ID NO: 55434 - DNA, 40 bp, Homo sapiens
ttttcctaacattttgacttttgtaatacagcttaaaaca

SEQ ID NO: 55435 - DNA, 40 bp, Homo sapiens
tgttttaagctgtattacaaaagtcaaaatgttaggaaaa

SEQ ID NO: 55436 - DNA, 40 bp, Homo sapiens
tttcctaacattttgacttttgtaatacagcttaaaacac

SEQ ID NO: 55437 - DNA, 40 bp, Homo sapiens
gtgttttaagctgtattacaaaagtcaaaatgttaggaaa

SEQ ID NO: 55438 - DNA, 40 bp, Homo sapiens
ttcctaacattttgacttttgtaatacagcttaaaacaca

SEQ ID NO: 55439 - DNA, 40 bp, Homo sapiens
tgtgttttaagctgtattacaaaagtcaaaatgttaggaa

SEQ ID NO: 55440 - DNA, 40 bp, Homo sapiens
tcctaacattttgacttttgtaatacagcttaaaacacac

SEQ ID NO: 55441 - DNA, 40 bp, Homo sapiens
gtgtgttttaagctgtattacaaaagtcaaaatgttagga

SEQ ID NO: 55442 - DNA, 40 bp, Homo sapiens
cctaacattttgacttttgtaatacagcttaaaacacaca

SEQ ID NO: 55443 - DNA, 40 bp, Homo sapiens
tgtgtgttttaagctgtattacaaaagtcaaaatgttagg

SEQ ID NO: 55444 - DNA, 40 bp, Homo sapiens
ctaacattttgacttttgtaatacagcttaaaacacacat

SEQ ID NO: 55445 - DNA, 40 bp, Homo sapiens
atgtgtgttttaagctgtattacaaaagtcaaaatgttag

SEQ ID NO: 55446 - DNA, 40 bp, Homo sapiens
taacattttgacttttgtaatacagcttaaaacacacatt

SEQ ID NO: 55447 - DNA, 40 bp, Homo sapiens
aatgtgtgttttaagctgtattacaaaagtcaaaatgtta

SEQ ID NO: 55448 - DNA, 40 bp, Homo sapiens
aacattttgacttttgtaatacagcttaaaacacacatta

SEQ ID NO: 55449 - DNA, 40 bp, Homo sapiens
taatgtgtgttttaagctgtattacaaaagtcaaaatgtt

SEQ ID NO: 55450 - DNA, 40 bp, Homo sapiens
acattttgacttttgtaatacagcttaaaacacacattat

SEQ ID NO: 55451 - DNA, 40 bp, Homo sapiens
ataatgtgtgttttaagctgtattacaaaagtcaaaatgt

SEQ ID NO: 55452 - DNA, 40 bp, Homo sapiens
cattttgacttttgtaatacagcttaaaacacacattata

SEQ ID NO: 55453 - DNA, 40 bp, Homo sapiens
tataatgtgtgttttaagctgtattacaaaagtcaaaatg

SEQ ID NO: 55454 - DNA, 40 bp, Homo sapiens
attttgacttttgtaatacagcttaaaacacacattatac

SEQ ID NO: 55455 - DNA, 40 bp, Homo sapiens
gtataatgtgtgttttaagctgtattacaaaagtcaaaat

SEQ ID NO: 55456 - DNA, 40 bp, Homo sapiens
ttttgacttttgtaatacagcttaaaacacacattataca

SEQ ID NO: 55457 - DNA, 40 bp, Homo sapiens
tgtataatgtgtgttttaagctgtattacaaaagtcaaaa

SEQ ID NO: 55458 - DNA, 40 bp, Homo sapiens
tttgacttttgtaatacagcttaaaacacacattatacag

SEQ ID NO: 55459 - DNA, 40 bp, Homo sapiens
ctgtataatgtgtgttttaagctgtattacaaaagtcaaa

SEQ ID NO: 55460 - DNA, 40 bp, Homo sapiens
ttgacttttgtaatacagcttaaaacacacattatacagc

SEQ ID NO: 55461 - DNA, 40 bp, Homo sapiens
gctgtataatgtgtgttttaagctgtattacaaaagtcaa

SEQ ID NO: 55462 - DNA, 40 bp, Homo sapiens
tgacttttgtaatacagcttaaaacacacattatacagct

SEQ ID NO: 55463 - DNA, 40 bp, Homo sapiens
agctgtataatgtgtgttttaagctgtattacaaaagtca

SEQ ID NO: 55464 - DNA, 40 bp, Homo sapiens
gacttttgtaatacagcttaaaacacacattatacagcta

SEQ ID NO: 55465 - DNA, 40 bp, Homo sapiens
tagctgtataatgtgtgttttaagctgtattacaaaagtc

SEQ ID NO: 55466 - DNA, 40 bp, Homo sapiens
acttttgtaatacagcttaaaacacacattatacagctat

SEQ ID NO: 55467 - DNA, 40 bp, Homo sapiens
atagctgtataatgtgtgttttaagctgtattacaaaagt

SEQ ID NO: 55468 - DNA, 40 bp, Homo sapiens
cttttgtaatacagcttaaaacacacattatacagctata

SEQ ID NO: 55469 - DNA, 40 bp, Homo sapiens
tatagctgtataatgtgtgttttaagctgtattacaaaag

SEQ ID NO: 55470 - DNA, 40 bp, Homo sapiens
ttttgtaatacagcttaaaacacacattatacagctatac

SEQ ID NO: 55471 - DNA, 40 bp, Homo sapiens
gtatagctgtataatgtgtgttttaagctgtattacaaaa

SEQ ID NO: 55472 - DNA, 40 bp, Homo sapiens
tttgtaatacagcttaaaacacacattatacagctataca

SEQ ID NO: 55473 - DNA, 40 bp, Homo sapiens
tgtatagctgtataatgtgtgttttaagctgtattacaaa

SEQ ID NO: 55474 - DNA, 40 bp, Homo sapiens
ttgtaatacagcttaaaacacacattatacagctatacaa

SEQ ID NO: 55475 - DNA, 40 bp, Homo sapiens
ttgtatagctgtataatgtgtgttttaagctgtattacaa

SEQ ID NO: 55476 - DNA, 40 bp, Homo sapiens
tgtaatacagcttaaaacacacattatacagctatacaaa

SEQ ID NO: 55477 - DNA, 40 bp, Homo sapiens
tttgtatagctgtataatgtgtgttttaagctgtattaca

SEQ ID NO: 55478 - DNA, 40 bp, Homo sapiens
gtaatacagcttaaaacacacattatacagctatacaaat

SEQ ID NO: 55479 - DNA, 40 bp, Homo sapiens
atttgtatagctgtataatgtgtgttttaagctgtattac

SEQ ID NO: 55480 - DNA, 40 bp, Homo sapiens
taatacagcttaaaacacacattatacagctatacaaatt

SEQ ID NO: 55481 - DNA, 40 bp, Homo sapiens
aatttgtatagctgtataatgtgtgttttaagctgtatta

SEQ ID NO: 55482 - DNA, 40 bp, Homo sapiens
aatacagcttaaaacacacattatacagctatacaaattt

SEQ ID NO: 55483 - DNA, 40 bp, Homo sapiens
aaatttgtatagctgtataatgtgtgttttaagctgtatt

SEQ ID NO: 55484 - DNA, 40 bp, Homo sapiens
atacagcttaaaacacacattatacagctatacaaatttt

SEQ ID NO: 55485 - DNA, 40 bp, Homo sapiens
aaaatttgtatagctgtataatgtgtgttttaagctgtat

SEQ ID NO: 55486 - DNA, 40 bp, Homo sapiens
tacagcttaaaacacacattatacagctatacaaattttt

SEQ ID NO: 55487 - DNA, 40 bp, Homo sapiens
aaaaatttgtatagctgtataatgtgtgttttaagctgta

SEQ ID NO: 55488 - DNA, 40 bp, Homo sapiens
acagcttaaaacacacattatacagctatacaaatttttc

SEQ ID NO: 55489 - DNA, 40 bp, Homo sapiens
gaaaaatttgtatagctgtataatgtgtgttttaagctgt

SEQ ID NO: 55490 - DNA, 40 bp, Homo sapiens
cagcttaaaacacacattatacagctatacaaatttttct

SEQ ID NO: 55491 - DNA, 40 bp, Homo sapiens
agaaaaatttgtatagctgtataatgtgtgttttaagctg

SEQ ID NO: 55492 - DNA, 40 bp, Homo sapiens
agcttaaaacacacattatacagctatacaaatttttctt

SEQ ID NO: 55493 - DNA, 40 bp, Homo sapiens
aagaaaaatttgtatagctgtataatgtgtgttttaagct

SEQ ID NO: 55494 - DNA, 40 bp, Homo sapiens
gcttaaaacacacattatacagctatacaaatttttcttt

SEQ ID NO: 55495 - DNA, 40 bp, Homo sapiens
aaagaaaaatttgtatagctgtataatgtgtgttttaagc

SEQ ID NO: 55496 - DNA, 40 bp, Homo sapiens
cttaaaacacacattatacagctatacaaatttttctttc

SEQ ID NO: 55497 - DNA, 40 bp, Homo sapiens
gaaagaaaaatttgtatagctgtataatgtgtgttttaag

SEQ ID NO: 55498 - DNA, 40 bp, Homo sapiens
ttaaaacacacattatacagctatacaaatttttctttcc

SEQ ID NO: 55499 - DNA, 40 bp, Homo sapiens
ggaaagaaaaatttgtatagctgtataatgtgtgttttaa

SEQ ID NO: 55500 - DNA, 40 bp, Homo sapiens
taaaacacacattatacagctatacaaatttttctttcct

SEQ ID NO: 55501 - DNA, 40 bp, Homo sapiens
aggaaagaaaaatttgtatagctgtataatgtgtgtttta

SEQ ID NO: 55502 - DNA, 40 bp, Homo sapiens
aaaacacacattatacagctatacaaatttttctttcctt

SEQ ID NO: 55503 - DNA, 40 bp, Homo sapiens
aaggaaagaaaaatttgtatagctgtataatgtgtgtttt

SEQ ID NO: 55504 - DNA, 40 bp, Homo sapiens
aaacacacattatacagctatacaaatttttctttcctta

SEQ ID NO: 55505 - DNA, 40 bp, Homo sapiens
taaggaaagaaaaatttgtatagctgtataatgtgtgttt

SEQ ID NO: 55506 - DNA, 40 bp, Homo sapiens
aacacacattatacagctatacaaatttttctttccttat

SEQ ID NO: 55507 - DNA, 40 bp, Homo sapiens
ataaggaaagaaaaatttgtatagctgtataatgtgtgtt

SEQ ID NO: 55508 - DNA, 40 bp, Homo sapiens
acacacattatacagctatacaaatttttctttccttata

SEQ ID NO: 55509 - DNA, 40 bp, Homo sapiens
tataaggaaagaaaaatttgtatagctgtataatgtgtgt

SEQ ID NO: 55510 - DNA, 40 bp, Homo sapiens
cacacattatacagctatacaaatttttctttccttatat

SEQ ID NO: 55511 - DNA, 40 bp, Homo sapiens
atataaggaaagaaaaatttgtatagctgtataatgtgtg

SEQ ID NO: 55512 - DNA, 40 bp, Homo sapiens
acacattatacagctatacaaatttttctttccttatatc

SEQ ID NO: 55513 - DNA, 40 bp, Homo sapiens
gatataaggaaagaaaaatttgtatagctgtataatgtgt

SEQ ID NO: 55514 - DNA, 40 bp, Homo sapiens
cacattatacagctatacaaatttttctttccttatatct

SEQ ID NO: 55515 - DNA, 40 bp, Homo sapiens
agatataaggaaagaaaaatttgtatagctgtataatgtg

SEQ ID NO: 55516 - DNA, 40 bp, Homo sapiens
acattatacagctatacaaatttttctttccttatatctt

SEQ ID NO: 55517 - DNA, 40 bp, Homo sapiens
aagatataaggaaagaaaaatttgtatagctgtataatgt

SEQ ID NO: 55518 - DNA, 40 bp, Homo sapiens
cattatacagctatacaaatttttctttccttatatcttt

SEQ ID NO: 55519 - DNA, 40 bp, Homo sapiens
aaagatataaggaaagaaaaatttgtatagctgtataatg

SEQ ID NO: 55520 - DNA, 40 bp, Homo sapiens
attatacagctatacaaatttttctttccttatatcttta

SEQ ID NO: 55521 - DNA, 40 bp, Homo sapiens
taaagatataaggaaagaaaaatttgtatagctgtataat

SEQ ID NO: 55522 - DNA, 40 bp, Homo sapiens
ttatacagctatacaaatttttctttccttatatctttat

SEQ ID NO: 55523 - DNA, 40 bp, Homo sapiens
ataaagatataaggaaagaaaaatttgtatagctgtataa

SEQ ID NO: 55524 - DNA, 40 bp, Homo sapiens
tatacagctatacaaatttttctttccttatatctttatt

SEQ ID NO: 55525 - DNA, 40 bp, Homo sapiens
aataaagatataaggaaagaaaaatttgtatagctgtata

SEQ ID NO: 55526 - DNA, 40 bp, Homo sapiens
atacagctatacaaatttttctttccttatatctttattc

SEQ ID NO: 55527 - DNA, 40 bp, Homo sapiens
gaataaagatataaggaaagaaaaatttgtatagctgtat

SEQ ID NO: 55528 - DNA, 40 bp, Homo sapiens
tacagctatacaaatttttctttccttatatctttattct

SEQ ID NO: 55529 - DNA, 40 bp, Homo sapiens
agaataaagatataaggaaagaaaaatttgtatagctgta

SEQ ID NO: 55530 - DNA, 40 bp, Homo sapiens
acagctatacaaatttttctttccttatatctttattctg

SEQ ID NO: 55531 - DNA, 40 bp, Homo sapiens
cagaataaagatataaggaaagaaaaatttgtatagctgt

SEQ ID NO: 55532 - DNA, 40 bp, Homo sapiens
cagctatacaaatttttctttccttatatctttattctgt

SEQ ID NO: 55533 - DNA, 40 bp, Homo sapiens
acagaataaagatataaggaaagaaaaatttgtatagctg

SEQ ID NO: 55534 - DNA, 40 bp, Homo sapiens
agctatacaaatttttctttccttatatctttattctgta

SEQ ID NO: 55535 - DNA, 40 bp, Homo sapiens
tacagaataaagatataaggaaagaaaaatttgtatagct

SEQ ID NO: 55536 - DNA, 40 bp, Homo sapiens
gctatacaaatttttctttccttatatctttattctgtaa

SEQ ID NO: 55537 - DNA, 40 bp, Homo sapiens
ttacagaataaagatataaggaaagaaaaatttgtatagc

SEQ ID NO: 55538 - DNA, 40 bp, Homo sapiens
ctatacaaatttttctttccttatatctttattctgtaag

SEQ ID NO: 55539 - DNA, 40 bp, Homo sapiens
cttacagaataaagatataaggaaagaaaaatttgtatag

SEQ ID NO: 55540 - DNA, 40 bp, Homo sapiens
tatacaaatttttctttccttatatctttattctgtaagc

SEQ ID NO: 55541 - DNA, 40 bp, Homo sapiens
gcttacagaataaagatataaggaaagaaaaatttgtata

SEQ ID NO: 55542 - DNA, 40 bp, Homo sapiens
atacaaatttttctttccttatatctttattctgtaagct

SEQ ID NO: 55543 - DNA, 40 bp, Homo sapiens
agcttacagaataaagatataaggaaagaaaaatttgtat

SEQ ID NO: 55544 - DNA, 40 bp, Homo sapiens
tacaaatttttctttccttatatctttattctgtaagctt

SEQ ID NO: 55545 - DNA, 40 bp, Homo sapiens
aagcttacagaataaagatataaggaaagaaaaatttgta

SEQ ID NO: 55546 - DNA, 40 bp, Homo sapiens
acaaatttttctttccttatatctttattctgtaagcttt

SEQ ID NO: 55547 - DNA, 40 bp, Homo sapiens
aaagcttacagaataaagatataaggaaagaaaaatttgt

SEQ ID NO: 55548 - DNA, 40 bp, Homo sapiens
caaatttttctttccttatatctttattctgtaagctttt

SEQ ID NO: 55549 - DNA, 40 bp, Homo sapiens
aaaagcttacagaataaagatataaggaaagaaaaatttg

SEQ ID NO: 55550 - DNA, 40 bp, Homo sapiens
aaatttttctttccttatatctttattctgtaagcttttt

SEQ ID NO: 55551 - DNA, 40 bp, Homo sapiens
aaaaagcttacagaataaagatataaggaaagaaaaattt

SEQ ID NO: 55552 - DNA, 40 bp, Homo sapiens
aatttttctttccttatatctttattctgtaagctttttt

SEQ ID NO: 55553 - DNA, 40 bp, Homo sapiens
aaaaaagcttacagaataaagatataaggaaagaaaaatt

SEQ ID NO: 55554 - DNA, 40 bp, Homo sapiens
atttttctttccttatatctttattctgtaagcttttttc

SEQ ID NO: 55555 - DNA, 40 bp, Homo sapiens
gaaaaaagcttacagaataaagatataaggaaagaaaaat

SEQ ID NO: 55556 - DNA, 40 bp, Homo sapiens
tttttctttccttatatctttattctgtaagcttttttcc

SEQ ID NO: 55557 - DNA, 40 bp, Homo sapiens
ggaaaaaagcttacagaataaagatataaggaaagaaaaa

SEQ ID NO: 55558 - DNA, 40 bp, Homo sapiens
ttttctttccttatatctttattctgtaagcttttttcca

SEQ ID NO: 55559 - DNA, 40 bp, Homo sapiens
tggaaaaaagcttacagaataaagatataaggaaagaaaa

SEQ ID NO: 55560 - DNA, 40 bp, Homo sapiens
tttctttccttatatctttattctgtaagcttttttccat

SEQ ID NO: 55561 - DNA, 40 bp, Homo sapiens
atggaaaaaagcttacagaataaagatataaggaaagaaa

SEQ ID NO: 55562 - DNA, 40 bp, Homo sapiens
ttctttccttatatctttattctgtaagcttttttccata

SEQ ID NO: 55563 - DNA, 40 bp, Homo sapiens
tatggaaaaaagcttacagaataaagatataaggaaagaa

SEQ ID NO: 55564 - DNA, 40 bp, Homo sapiens
tctttccttatatctttattctgtaagcttttttccatat

SEQ ID NO: 55565 - DNA, 40 bp, Homo sapiens
atatggaaaaaagcttacagaataaagatataaggaaaga

SEQ ID NO: 55566 - DNA, 40 bp, Homo sapiens
ctttccttatatctttattctgtaagcttttttccatatt

SEQ ID NO: 55567 - DNA, 40 bp, Homo sapiens
aatatggaaaaaagcttacagaataaagatataaggaaag

SEQ ID NO: 55568 - DNA, 40 bp, Homo sapiens
tttccttatatctttattctgtaagcttttttccatattt

SEQ ID NO: 55569 - DNA, 40 bp, Homo sapiens
aaatatggaaaaaagcttacagaataaagatataaggaaa

SEQ ID NO: 55570 - DNA, 40 bp, Homo sapiens
ttccttatatctttattctgtaagcttttttccatattta

SEQ ID NO: 55571 - DNA, 40 bp, Homo sapiens
taaatatggaaaaaagcttacagaataaagatataaggaa

SEQ ID NO: 55572 - DNA, 40 bp, Homo sapiens
tccttatatctttattctgtaagcttttttccatatttaa

SEQ ID NO: 55573 - DNA, 40 bp, Homo sapiens
ttaaatatggaaaaaagcttacagaataaagatataagga

SEQ ID NO: 55574 - DNA, 40 bp, Homo sapiens
ccttatatctttattctgtaagcttttttccatatttaaa

SEQ ID NO: 55575 - DNA, 40 bp, Homo sapiens
tttaaatatggaaaaaagcttacagaataaagatataagg

SEQ ID NO: 55576 - DNA, 40 bp, Homo sapiens
cttatatctttattctgtaagcttttttccatatttaaaa

SEQ ID NO: 55577 - DNA, 40 bp, Homo sapiens
ttttaaatatggaaaaaagcttacagaataaagatataag

SEQ ID NO: 55578 - DNA, 40 bp, Homo sapiens
ttatatctttattctgtaagcttttttccatatttaaaat

SEQ ID NO: 55579 - DNA, 40 bp, Homo sapiens
attttaaatatggaaaaaagcttacagaataaagatataa

SEQ ID NO: 55580 - DNA, 40 bp, Homo sapiens
tatatctttattctgtaagcttttttccatatttaaaatt

SEQ ID NO: 55581 - DNA, 40 bp, Homo sapiens
aattttaaatatggaaaaaagcttacagaataaagatata

SEQ ID NO: 55582 - DNA, 40 bp, Homo sapiens
atatctttattctgtaagcttttttccatatttaaaattt

SEQ ID NO: 55583 - DNA, 40 bp, Homo sapiens
aaattttaaatatggaaaaaagcttacagaataaagatat

SEQ ID NO: 55584 - DNA, 40 bp, Homo sapiens
tatctttattctgtaagcttttttccatatttaaaatttt

SEQ ID NO: 55585 - DNA, 40 bp, Homo sapiens
aaaattttaaatatggaaaaaagcttacagaataaagata

SEQ ID NO: 55586 - DNA, 40 bp, Homo sapiens
atctttattctgtaagcttttttccatatttaaaattttt

SEQ ID NO: 55587 - DNA, 40 bp, Homo sapiens
aaaaattttaaatatggaaaaaagcttacagaataaagat

SEQ ID NO: 55588 - DNA, 40 bp, Homo sapiens
tctttattctgtaagcttttttccatatttaaaatttttt

SEQ ID NO: 55589 - DNA, 40 bp, Homo sapiens
aaaaaattttaaatatggaaaaaagcttacagaataaaga

SEQ ID NO: 55590 - DNA, 40 bp, Homo sapiens
ctttattctgtaagcttttttccatatttaaaattttttg

SEQ ID NO: 55591 - DNA, 40 bp, Homo sapiens
caaaaaattttaaatatggaaaaaagcttacagaataaag

SEQ ID NO: 55592 - DNA, 40 bp, Homo sapiens
tttattctgtaagcttttttccatatttaaaattttttgt

SEQ ID NO: 55593 - DNA, 40 bp, Homo sapiens
acaaaaaattttaaatatggaaaaaagcttacagaataaa

SEQ ID NO: 55594 - DNA, 40 bp, Homo sapiens
ttattctgtaagcttttttccatatttaaaattttttgtt

SEQ ID NO: 55595 - DNA, 40 bp, Homo sapiens
aacaaaaaattttaaatatggaaaaaagcttacagaataa

SEQ ID NO: 55596 - DNA, 40 bp, Homo sapiens
tattctgtaagcttttttccatatttaaaattttttgttt

SEQ ID NO: 55597 - DNA, 40 bp, Homo sapiens
aaacaaaaaattttaaatatggaaaaaagcttacagaata

SEQ ID NO: 55598 - DNA, 40 bp, Homo sapiens
attctgtaagcttttttccatatttaaaattttttgtttg

SEQ ID NO: 55599 - DNA, 40 bp, Homo sapiens
caaacaaaaaattttaaatatggaaaaaagcttacagaat

SEQ ID NO: 55600 - DNA, 40 bp, Homo sapiens
ttctgtaagcttttttccatatttaaaattttttgtttgt

SEQ ID NO: 55601 - DNA, 40 bp, Homo sapiens
acaaacaaaaaattttaaatatggaaaaaagcttacagaa

SEQ ID NO: 55602 - DNA, 40 bp, Homo sapiens
tctgtaagcttttttccatatttaaaattttttgtttgtt

SEQ ID NO: 55603 - DNA, 40 bp, Homo sapiens
aacaaacaaaaaattttaaatatggaaaaaagcttacaga

SEQ ID NO: 55604 - DNA, 40 bp, Homo sapiens
ctgtaagcttttttccatatttaaaattttttgtttgttt

SEQ ID NO: 55605 - DNA, 40 bp, Homo sapiens
aaacaaacaaaaaattttaaatatggaaaaaagcttacag

SEQ ID NO: 55606 - DNA, 40 bp, Homo sapiens
tgtaagcttttttccatatttaaaattttttgtttgtttt

SEQ ID NO: 55607 - DNA, 40 bp, Homo sapiens
aaaacaaacaaaaaattttaaatatggaaaaaagcttaca

SEQ ID NO: 55608 - DNA, 40 bp, Homo sapiens
gtaagcttttttccatatttaaaattttttgtttgttttt

SEQ ID NO: 55609 - DNA, 40 bp, Homo sapiens
aaaaacaaacaaaaaattttaaatatggaaaaaagcttac

SEQ ID NO: 55610 - DNA, 40 bp, Homo sapiens
taagcttttttccatatttaaaattttttgtttgttttta

SEQ ID NO: 55611 - DNA, 40 bp, Homo sapiens
taaaaacaaacaaaaaattttaaatatggaaaaaagctta

SEQ ID NO: 55612 - DNA, 40 bp, Homo sapiens
aagcttttttccatatttaaaattttttgtttgtttttac

SEQ ID NO: 55613 - DNA, 40 bp, Homo sapiens
gtaaaaacaaacaaaaaattttaaatatggaaaaaagctt

SEQ ID NO: 55614 - DNA, 40 bp, Homo sapiens
agcttttttccatatttaaaattttttgtttgtttttact

SEQ ID NO: 55615 - DNA, 40 bp, Homo sapiens
agtaaaaacaaacaaaaaattttaaatatggaaaaaagct

SEQ ID NO: 55616 - DNA, 40 bp, Homo sapiens
gcttttttccatatttaaaattttttgtttgtttttactt

SEQ ID NO: 55617 - DNA, 40 bp, Homo sapiens
aagtaaaaacaaacaaaaaattttaaatatggaaaaaagc

SEQ ID NO: 55618 - DNA, 40 bp, Homo sapiens
cttttttccatatttaaaattttttgtttgtttttactta

SEQ ID NO: 55619 - DNA, 40 bp, Homo sapiens
taagtaaaaacaaacaaaaaattttaaatatggaaaaaag

SEQ ID NO: 55620 - DNA, 40 bp, Homo sapiens
ttttttccatatttaaaattttttgtttgtttttacttat

SEQ ID NO: 55621 - DNA, 40 bp, Homo sapiens
ataagtaaaaacaaacaaaaaattttaaatatggaaaaaa

SEQ ID NO: 55622 - DNA, 40 bp, Homo sapiens
tttttccatatttaaaattttttgtttgtttttacttatt

SEQ ID NO: 55623 - DNA, 40 bp, Homo sapiens
aataagtaaaaacaaacaaaaaattttaaatatggaaaaa

SEQ ID NO: 55624 - DNA, 40 bp, Homo sapiens
ttttccatatttaaaattttttgtttgtttttacttatta

SEQ ID NO: 55625 - DNA, 40 bp, Homo sapiens
taataagtaaaaacaaacaaaaaattttaaatatggaaaa

SEQ ID NO: 55626 - DNA, 40 bp, Homo sapiens
tttccatatttaaaattttttgtttgtttttacttattaa

SEQ ID NO: 55627 - DNA, 40 bp, Homo sapiens
ttaataagtaaaaacaaacaaaaaattttaaatatggaaa

SEQ ID NO: 55628 - DNA, 40 bp, Homo sapiens
ttccatatttaaaattttttgtttgtttttacttattaaa

SEQ ID NO: 55629 - DNA, 40 bp, Homo sapiens
tttaataagtaaaaacaaacaaaaaattttaaatatggaa

SEQ ID NO: 55630 - DNA, 40 bp, Homo sapiens
tccatatttaaaattttttgtttgtttttacttattaaac

SEQ ID NO: 55631 - DNA, 40 bp, Homo sapiens
gtttaataagtaaaaacaaacaaaaaattttaaatatgga

SEQ ID NO: 55632 - DNA, 40 bp, Homo sapiens
ccatatttaaaattttttgtttgtttttacttattaaact

SEQ ID NO: 55633 - DNA, 40 bp, Homo sapiens
agtttaataagtaaaaacaaacaaaaaattttaaatatgg

SEQ ID NO: 55634 - DNA, 40 bp, Homo sapiens
catatttaaaattttttgtttgtttttacttattaaactt

SEQ ID NO: 55635 - DNA, 40 bp, Homo sapiens
aagtttaataagtaaaaacaaacaaaaaattttaaatatg

SEQ ID NO: 55636 - DNA, 40 bp, Homo sapiens
atatttaaaattttttgtttgtttttacttattaaacttt

SEQ ID NO: 55637 - DNA, 40 bp, Homo sapiens
aaagtttaataagtaaaaacaaacaaaaaattttaaatat

SEQ ID NO: 55638 - DNA, 40 bp, Homo sapiens
tatttaaaattttttgtttgtttttacttattaaactttt

SEQ ID NO: 55639 - DNA, 40 bp, Homo sapiens
aaaagtttaataagtaaaaacaaacaaaaaattttaaata

SEQ ID NO: 55640 - DNA, 40 bp, Homo sapiens
atttaaaattttttgtttgtttttacttattaaacttttt

SEQ ID NO: 55641 - DNA, 40 bp, Homo sapiens
aaaaagtttaataagtaaaaacaaacaaaaaattttaaat

SEQ ID NO: 55642 - DNA, 40 bp, Homo sapiens
tttaaaattttttgtttgtttttacttattaaactttttt

SEQ ID NO: 55643 - DNA, 40 bp, Homo sapiens
aaaaaagtttaataagtaaaaacaaacaaaaaattttaaa

SEQ ID NO: 55644 - DNA, 40 bp, Homo sapiens
ttaaaattttttgtttgtttttacttattaaacttttttg

SEQ ID NO: 55645 - DNA, 40 bp, Homo sapiens
caaaaaagtttaataagtaaaaacaaacaaaaaattttaa

SEQ ID NO: 55646 - DNA, 40 bp, Homo sapiens
taaaattttttgtttgtttttacttattaaacttttttgt

SEQ ID NO: 55647 - DNA, 40 bp, Homo sapiens
acaaaaaagtttaataagtaaaaacaaacaaaaaatttta

SEQ ID NO: 55648 - DNA, 40 bp, Homo sapiens
aaaattttttgtttgtttttacttattaaacttttttgtt

SEQ ID NO: 55649 - DNA, 40 bp, Homo sapiens
aacaaaaaagtttaataagtaaaaacaaacaaaaaatttt

SEQ ID NO: 55650 - DNA, 40 bp, Homo sapiens
aaattttttgtttgtttttacttattaaacttttttgtta

SEQ ID NO: 55651 - DNA, 40 bp, Homo sapiens
taacaaaaaagtttaataagtaaaaacaaacaaaaaattt

SEQ ID NO: 55652 - DNA, 40 bp, Homo sapiens
aattttttgtttgtttttacttattaaacttttttgttaa

SEQ ID NO: 55653 - DNA, 40 bp, Homo sapiens
ttaacaaaaaagtttaataagtaaaaacaaacaaaaaatt

SEQ ID NO: 55654 - DNA, 40 bp, Homo sapiens
attttttgtttgtttttacttattaaacttttttgttaaa

SEQ ID NO: 55655 - DNA, 40 bp, Homo sapiens
tttaacaaaaaagtttaataagtaaaaacaaacaaaaaat

SEQ ID NO: 55656 - DNA, 40 bp, Homo sapiens
ttttttgtttgtttttacttattaaacttttttgttaaaa

SEQ ID NO: 55657 - DNA, 40 bp, Homo sapiens
ttttaacaaaaaagtttaataagtaaaaacaaacaaaaaa

SEQ ID NO: 55658 - DNA, 40 bp, Homo sapiens
tttttgtttgtttttacttattaaacttttttgttaaaaa

SEQ ID NO: 55659 - DNA, 40 bp, Homo sapiens
tttttaacaaaaaagtttaataagtaaaaacaaacaaaaa

SEQ ID NO: 55660 - DNA, 40 bp, Homo sapiens
ttttgtttgtttttacttattaaacttttttgttaaaaac

SEQ ID NO: 55661 - DNA, 40 bp, Homo sapiens
gtttttaacaaaaaagtttaataagtaaaaacaaacaaaa

SEQ ID NO: 55662 - DNA, 40 bp, Homo sapiens
tttgtttgtttttacttattaaacttttttgttaaaaact

SEQ ID NO: 55663 - DNA, 40 bp, Homo sapiens
agtttttaacaaaaaagtttaataagtaaaaacaaacaaa

SEQ ID NO: 55664 - DNA, 40 bp, Homo sapiens
ttgtttgtttttacttattaaacttttttgttaaaaacta

SEQ ID NO: 55665 - DNA, 40 bp, Homo sapiens
tagtttttaacaaaaaagtttaataagtaaaaacaaacaa

SEQ ID NO: 55666 - DNA, 40 bp, Homo sapiens
tgtttgtttttacttattaaacttttttgttaaaaactaa

SEQ ID NO: 55667 - DNA, 40 bp, Homo sapiens
ttagtttttaacaaaaaagtttaataagtaaaaacaaaca

SEQ ID NO: 55668 - DNA, 40 bp, Homo sapiens
gtttgtttttacttattaaacttttttgttaaaaactaag

SEQ ID NO: 55669 - DNA, 40 bp, Homo sapiens
cttagtttttaacaaaaaagtttaataagtaaaaacaaac

SEQ ID NO: 55670 - DNA, 40 bp, Homo sapiens
tttgtttttacttattaaacttttttgttaaaaactaaga

SEQ ID NO: 55671 - DNA, 40 bp, Homo sapiens
tcttagtttttaacaaaaaagtttaataagtaaaaacaaa

SEQ ID NO: 55672 - DNA, 40 bp, Homo sapiens
ttgtttttacttattaaacttttttgttaaaaactaagac

SEQ ID NO: 55673 - DNA, 40 bp, Homo sapiens
gtcttagtttttaacaaaaaagtttaataagtaaaaacaa

SEQ ID NO: 55674 - DNA, 40 bp, Homo sapiens
tgtttttacttattaaacttttttgttaaaaactaagaca

SEQ ID NO: 55675 - DNA, 40 bp, Homo sapiens
tgtcttagtttttaacaaaaaagtttaataagtaaaaaca

SEQ ID NO: 55676 - DNA, 40 bp, Homo sapiens
gtttttacttattaaacttttttgttaaaaactaagacat

SEQ ID NO: 55677 - DNA, 40 bp, Homo sapiens
atgtcttagtttttaacaaaaaagtttaataagtaaaaac

SEQ ID NO: 55678 - DNA, 40 bp, Homo sapiens
tttttacttattaaacttttttgttaaaaactaagacatg

SEQ ID NO: 55679 - DNA, 40 bp, Homo sapiens
catgtcttagtttttaacaaaaaagtttaataagtaaaaa

SEQ ID NO: 55680 - DNA, 40 bp, Homo sapiens
ttttacttattaaacttttttgttaaaaactaagacatgc

SEQ ID NO: 55681 - DNA, 40 bp, Homo sapiens
gcatgtcttagtttttaacaaaaaagtttaataagtaaaa

SEQ ID NO: 55682 - DNA, 40 bp, Homo sapiens
tttacttattaaacttttttgttaaaaactaagacatgca

SEQ ID NO: 55683 - DNA, 40 bp, Homo sapiens
tgcatgtcttagtttttaacaaaaaagtttaataagtaaa

SEQ ID NO: 55684 - DNA, 40 bp, Homo sapiens
ttacttattaaacttttttgttaaaaactaagacatgcat

SEQ ID NO: 55685 - DNA, 40 bp, Homo sapiens
atgcatgtcttagtttttaacaaaaaagtttaataagtaa

SEQ ID NO: 55686 - DNA, 40 bp, Homo sapiens
tacttattaaacttttttgttaaaaactaagacatgcatg

SEQ ID NO: 55687 - DNA, 40 bp, Homo sapiens
catgcatgtcttagtttttaacaaaaaagtttaataagta

SEQ ID NO: 55688 - DNA, 40 bp, Homo sapiens
acttattaaacttttttgttaaaaactaagacatgcatgc

SEQ ID NO: 55689 - DNA, 40 bp, Homo sapiens
gcatgcatgtcttagtttttaacaaaaaagtttaataagt

SEQ ID NO: 55690 - DNA, 40 bp, Homo sapiens
cttattaaacttttttgttaaaaactaagacatgcatgca

SEQ ID NO: 55691 - DNA, 40 bp, Homo sapiens
tgcatgcatgtcttagtttttaacaaaaaagtttaataag

SEQ ID NO: 55692 - DNA, 40 bp, Homo sapiens
ttattaaacttttttgttaaaaactaagacatgcatgcac

SEQ ID NO: 55693 - DNA, 40 bp, Homo sapiens
gtgcatgcatgtcttagtttttaacaaaaaagtttaataa

SEQ ID NO: 55694 - DNA, 40 bp, Homo sapiens
tattaaacttttttgttaaaaactaagacatgcatgcaca

SEQ ID NO: 55695 - DNA, 40 bp, Homo sapiens
tgtgcatgcatgtcttagtttttaacaaaaaagtttaata

SEQ ID NO: 55696 - DNA, 40 bp, Homo sapiens
attaaacttttttgttaaaaactaagacatgcatgcacat

SEQ ID NO: 55697 - DNA, 40 bp, Homo sapiens
atgtgcatgcatgtcttagtttttaacaaaaaagtttaat

SEQ ID NO: 55698 - DNA, 40 bp, Homo sapiens
ttaaacttttttgttaaaaactaagacatgcatgcacatt

SEQ ID NO: 55699 - DNA, 40 bp, Homo sapiens
aatgtgcatgcatgtcttagtttttaacaaaaaagtttaa

SEQ ID NO: 55700 - DNA, 40 bp, Homo sapiens
taaacttttttgttaaaaactaagacatgcatgcacatta

SEQ ID NO: 55701 - DNA, 40 bp, Homo sapiens
taatgtgcatgcatgtcttagtttttaacaaaaaagttta

SEQ ID NO: 55702 - DNA, 40 bp, Homo sapiens
aaacttttttgttaaaaactaagacatgcatgcacattaa

SEQ ID NO: 55703 - DNA, 40 bp, Homo sapiens
ttaatgtgcatgcatgtcttagtttttaacaaaaaagttt

SEQ ID NO: 55704 - DNA, 40 bp, Homo sapiens
aacttttttgttaaaaactaagacatgcatgcacattaac

SEQ ID NO: 55705 - DNA, 40 bp, Homo sapiens
gttaatgtgcatgcatgtcttagtttttaacaaaaaagtt

SEQ ID NO: 55706 - DNA, 40 bp, Homo sapiens
acttttttgttaaaaactaagacatgcatgcacattaacc

SEQ ID NO: 55707 - DNA, 40 bp, Homo sapiens
ggttaatgtgcatgcatgtcttagtttttaacaaaaaagt

SEQ ID NO: 55708 - DNA, 40 bp, Homo sapiens
cttttttgttaaaaactaagacatgcatgcacattaacct

SEQ ID NO: 55709 - DNA, 40 bp, Homo sapiens
aggttaatgtgcatgcatgtcttagtttttaacaaaaaag

SEQ ID NO: 55710 - DNA, 40 bp, Homo sapiens
ttttttgttaaaaactaagacatgcatgcacattaaccta

SEQ ID NO: 55711 - DNA, 40 bp, Homo sapiens
taggttaatgtgcatgcatgtcttagtttttaacaaaaaa

SEQ ID NO: 55712 - DNA, 40 bp, Homo sapiens
tttttgttaaaaactaagacatgcatgcacattaacctag

SEQ ID NO: 55713 - DNA, 40 bp, Homo sapiens
ctaggttaatgtgcatgcatgtcttagtttttaacaaaaa

SEQ ID NO: 55714 - DNA, 40 bp, Homo sapiens
ttttgttaaaaactaagacatgcatgcacattaacctagg

SEQ ID NO: 55715 - DNA, 40 bp, Homo sapiens
cctaggttaatgtgcatgcatgtcttagtttttaacaaaa

SEQ ID NO: 55716 - DNA, 40 bp, Homo sapiens
tttgttaaaaactaagacatgcatgcacattaacctaggc

SEQ ID NO: 55717 - DNA, 40 bp, Homo sapiens
gcctaggttaatgtgcatgcatgtcttagtttttaacaaa

SEQ ID NO: 55718 - DNA, 40 bp, Homo sapiens
ttgttaaaaactaagacatgcatgcacattaacctaggcc

SEQ ID NO: 55719 - DNA, 40 bp, Homo sapiens
ggcctaggttaatgtgcatgcatgtcttagtttttaacaa

SEQ ID NO: 55720 - DNA, 40 bp, Homo sapiens
tgttaaaaactaagacatgcatgcacattaacctaggcct

SEQ ID NO: 55721 - DNA, 40 bp, Homo sapiens
aggcctaggttaatgtgcatgcatgtcttagtttttaaca

SEQ ID NO: 55722 - DNA, 40 bp, Homo sapiens
gttaaaaactaagacatgcatgcacattaacctaggccta

SEQ ID NO: 55723 - DNA, 40 bp, Homo sapiens
taggcctaggttaatgtgcatgcatgtcttagtttttaac

SEQ ID NO: 55724 - DNA, 40 bp, Homo sapiens
ttaaaaactaagacatgcatgcacattaacctaggcctac

SEQ ID NO: 55725 - DNA, 40 bp, Homo sapiens
gtaggcctaggttaatgtgcatgcatgtcttagtttttaa

SEQ ID NO: 55726 - DNA, 40 bp, Homo sapiens
taaaaactaagacatgcatgcacattaacctaggcctaca

SEQ ID NO: 55727 - DNA, 40 bp, Homo sapiens
tgtaggcctaggttaatgtgcatgcatgtcttagttttta

SEQ ID NO: 55728 - DNA, 40 bp, Homo sapiens
aaaaactaagacatgcatgcacattaacctaggcctacac

SEQ ID NO: 55729 - DNA, 40 bp, Homo sapiens
gtgtaggcctaggttaatgtgcatgcatgtcttagttttt

SEQ ID NO: 55730 - DNA, 40 bp, Homo sapiens
aaaactaagacatgcatgcacattaacctaggcctacaca

SEQ ID NO: 55731 - DNA, 40 bp, Homo sapiens
tgtgtaggcctaggttaatgtgcatgcatgtcttagtttt

SEQ ID NO: 55732 - DNA, 40 bp, Homo sapiens
aaactaagacatgcatgcacattaacctaggcctacacag

SEQ ID NO: 55733 - DNA, 40 bp, Homo sapiens
ctgtgtaggcctaggttaatgtgcatgcatgtcttagttt

SEQ ID NO: 55734 - DNA, 40 bp, Homo sapiens
aactaagacatgcatgcacattaacctaggcctacacagg

SEQ ID NO: 55735 - DNA, 40 bp, Homo sapiens
cctgtgtaggcctaggttaatgtgcatgcatgtcttagtt

SEQ ID NO: 55736 - DNA, 40 bp, Homo sapiens
actaagacatgcatgcacattaacctaggcctacacaggg

SEQ ID NO: 55737 - DNA, 40 bp, Homo sapiens
ccctgtgtaggcctaggttaatgtgcatgcatgtcttagt

SEQ ID NO: 55738 - DNA, 40 bp, Homo sapiens
ctaagacatgcatgcacattaacctaggcctacacagggt

SEQ ID NO: 55739 - DNA, 40 bp, Homo sapiens
accctgtgtaggcctaggttaatgtgcatgcatgtcttag

SEQ ID NO: 55740 - DNA, 40 bp, Homo sapiens
taagacatgcatgcacattaacctaggcctacacagggtc

SEQ ID NO: 55741 - DNA, 40 bp, Homo sapiens
gaccctgtgtaggcctaggttaatgtgcatgcatgtctta

SEQ ID NO: 55742 - DNA, 40 bp, Homo sapiens
aagacatgcatgcacattaacctaggcctacacagggtca

SEQ ID NO: 55743 - DNA, 40 bp, Homo sapiens
tgaccctgtgtaggcctaggttaatgtgcatgcatgtctt

SEQ ID NO: 55744 - DNA, 40 bp, Homo sapiens
agacatgcatgcacattaacctaggcctacacagggtcag

SEQ ID NO: 55745 - DNA, 40 bp, Homo sapiens
ctgaccctgtgtaggcctaggttaatgtgcatgcatgtct

SEQ ID NO: 55746 - DNA, 40 bp, Homo sapiens
gacatgcatgcacattaacctaggcctacacagggtcagg

SEQ ID NO: 55747 - DNA, 40 bp, Homo sapiens
cctgaccctgtgtaggcctaggttaatgtgcatgcatgtc

SEQ ID NO: 55748 - DNA, 40 bp, Homo sapiens
acatgcatgcacattaacctaggcctacacagggtcagga

SEQ ID NO: 55749 - DNA, 40 bp, Homo sapiens
tcctgaccctgtgtaggcctaggttaatgtgcatgcatgt

SEQ ID NO: 55750 - DNA, 40 bp, Homo sapiens
catgcatgcacattaacctaggcctacacagggtcaggac

SEQ ID NO: 55751 - DNA, 40 bp, Homo sapiens
gtcctgaccctgtgtaggcctaggttaatgtgcatgcatg

SEQ ID NO: 55752 - DNA, 40 bp, Homo sapiens
atgcatgcacattaacctaggcctacacagggtcaggacc

SEQ ID NO: 55753 - DNA, 40 bp, Homo sapiens
ggtcctgaccctgtgtaggcctaggttaatgtgcatgcat

SEQ ID NO: 55754 - DNA, 40 bp, Homo sapiens
tgcatgcacattaacctaggcctacacagggtcaggacca

SEQ ID NO: 55755 - DNA, 40 bp, Homo sapiens
tggtcctgaccctgtgtaggcctaggttaatgtgcatgca

SEQ ID NO: 55756 - DNA, 40 bp, Homo sapiens
gcatgcacattaacctaggcctacacagggtcaggaccat

SEQ ID NO: 55757 - DNA, 40 bp, Homo sapiens
atggtcctgaccctgtgtaggcctaggttaatgtgcatgc

SEQ ID NO: 55758 - DNA, 40 bp, Homo sapiens
catgcacattaacctaggcctacacagggtcaggaccatc

SEQ ID NO: 55759 - DNA, 40 bp, Homo sapiens
gatggtcctgaccctgtgtaggcctaggttaatgtgcatg

SEQ ID NO: 55760 - DNA, 40 bp, Homo sapiens
atgcacattaacctaggcctacacagggtcaggaccatca

SEQ ID NO: 55761 - DNA, 40 bp, Homo sapiens
tgatggtcctgaccctgtgtaggcctaggttaatgtgcat

SEQ ID NO: 55762 - DNA, 40 bp, Homo sapiens
tgcacattaacctaggcctacacagggtcaggaccatcaa

SEQ ID NO: 55763 - DNA, 40 bp, Homo sapiens
ttgatggtcctgaccctgtgtaggcctaggttaatgtgca

SEQ ID NO: 55764 - DNA, 40 bp, Homo sapiens
gcacattaacctaggcctacacagggtcaggaccatcaat

SEQ ID NO: 55765 - DNA, 40 bp, Homo sapiens
attgatggtcctgaccctgtgtaggcctaggttaatgtgc

SEQ ID NO: 55766 - DNA, 40 bp, Homo sapiens
cacattaacctaggcctacacagggtcaggaccatcaata

SEQ ID NO: 55767 - DNA, 40 bp, Homo sapiens
tattgatggtcctgaccctgtgtaggcctaggttaatgtg

SEQ ID NO: 55768 - DNA, 40 bp, Homo sapiens
acattaacctaggcctacacagggtcaggaccatcaatat

SEQ ID NO: 55769 - DNA, 40 bp, Homo sapiens
atattgatggtcctgaccctgtgtaggcctaggttaatgt

SEQ ID NO: 55770 - DNA, 40 bp, Homo sapiens
cattaacctaggcctacacagggtcaggaccatcaatatc

SEQ ID NO: 55771 - DNA, 40 bp, Homo sapiens
gatattgatggtcctgaccctgtgtaggcctaggttaatg

SEQ ID NO: 55772 - DNA, 40 bp, Homo sapiens
attaacctaggcctacacagggtcaggaccatcaatatca

SEQ ID NO: 55773 - DNA, 40 bp, Homo sapiens
tgatattgatggtcctgaccctgtgtaggcctaggttaat

SEQ ID NO: 55774 - DNA, 40 bp, Homo sapiens
ttaacctaggcctacacagggtcaggaccatcaatatcat

SEQ ID NO: 55775 - DNA, 40 bp, Homo sapiens
atgatattgatggtcctgaccctgtgtaggcctaggttaa

SEQ ID NO: 55776 - DNA, 40 bp, Homo sapiens
taacctaggcctacacagggtcaggaccatcaatatcatt

SEQ ID NO: 55777 - DNA, 40 bp, Homo sapiens
aatgatattgatggtcctgaccctgtgtaggcctaggtta

SEQ ID NO: 55778 - DNA, 40 bp, Homo sapiens
aacctaggcctacacagggtcaggaccatcaatatcattg

SEQ ID NO: 55779 - DNA, 40 bp, Homo sapiens
caatgatattgatggtcctgaccctgtgtaggcctaggtt

SEQ ID NO: 55780 - DNA, 40 bp, Homo sapiens
acctaggcctacacagggtcaggaccatcaatatcattgt

SEQ ID NO: 55781 - DNA, 40 bp, Homo sapiens
acaatgatattgatggtcctgaccctgtgtaggcctaggt

SEQ ID NO: 55782 - DNA, 40 bp, Homo sapiens
cctaggcctacacagggtcaggaccatcaatatcattgtc

SEQ ID NO: 55783 - DNA, 40 bp, Homo sapiens
gacaatgatattgatggtcctgaccctgtgtaggcctagg

SEQ ID NO: 55784 - DNA, 40 bp, Homo sapiens
ctaggcctacacagggtcaggaccatcaatatcattgtct

SEQ ID NO: 55785 - DNA, 40 bp, Homo sapiens
agacaatgatattgatggtcctgaccctgtgtaggcctag

SEQ ID NO: 55786 - DNA, 40 bp, Homo sapiens
taggcctacacagggtcaggaccatcaatatcattgtctt

SEQ ID NO: 55787 - DNA, 40 bp, Homo sapiens
aagacaatgatattgatggtcctgaccctgtgtaggccta

SEQ ID NO: 55788 - DNA, 40 bp, Homo sapiens
aggcctacacagggtcaggaccatcaatatcattgtcttc

SEQ ID NO: 55789 - DNA, 40 bp, Homo sapiens
gaagacaatgatattgatggtcctgaccctgtgtaggcct

SEQ ID NO: 55790 - DNA, 40 bp, Homo sapiens
ggcctacacagggtcaggaccatcaatatcattgtcttcc

SEQ ID NO: 55791 - DNA, 40 bp, Homo sapiens
ggaagacaatgatattgatggtcctgaccctgtgtaggcc

SEQ ID NO: 55792 - DNA, 40 bp, Homo sapiens
gcctacacagggtcaggaccatcaatatcattgtcttcca

SEQ ID NO: 55793 - DNA, 40 bp, Homo sapiens
tggaagacaatgatattgatggtcctgaccctgtgtaggc

SEQ ID NO: 55794 - DNA, 40 bp, Homo sapiens
cctacacagggtcaggaccatcaatatcattgtcttccac

SEQ ID NO: 55795 - DNA, 40 bp, Homo sapiens
gtggaagacaatgatattgatggtcctgaccctgtgtagg

SEQ ID NO: 55796 - DNA, 40 bp, Homo sapiens
ctacacagggtcaggaccatcaatatcattgtcttccact

SEQ ID NO: 55797 - DNA, 40 bp, Homo sapiens
agtggaagacaatgatattgatggtcctgaccctgtgtag

SEQ ID NO: 55798 - DNA, 40 bp, Homo sapiens
tacacagggtcaggaccatcaatatcattgtcttccactt

SEQ ID NO: 55799 - DNA, 40 bp, Homo sapiens
aagtggaagacaatgatattgatggtcctgaccctgtgta

SEQ ID NO: 55800 - DNA, 40 bp, Homo sapiens
acacagggtcaggaccatcaatatcattgtcttccacttc

SEQ ID NO: 55801 - DNA, 40 bp, Homo sapiens
gaagtggaagacaatgatattgatggtcctgaccctgtgt

SEQ ID NO: 55802 - DNA, 40 bp, Homo sapiens
cacagggtcaggaccatcaatatcattgtcttccacttcc

SEQ ID NO: 55803 - DNA, 40 bp, Homo sapiens
ggaagtggaagacaatgatattgatggtcctgaccctgtg

SEQ ID NO: 55804 - DNA, 40 bp, Homo sapiens
acagggtcaggaccatcaatatcattgtcttccacttcca

SEQ ID NO: 55805 - DNA, 40 bp, Homo sapiens
tggaagtggaagacaatgatattgatggtcctgaccctgt

SEQ ID NO: 55806 - DNA, 40 bp, Homo sapiens
cagggtcaggaccatcaatatcattgtcttccacttccac

SEQ ID NO: 55807 - DNA, 40 bp, Homo sapiens
gtggaagtggaagacaatgatattgatggtcctgaccctg

SEQ ID NO: 55808 - DNA, 40 bp, Homo sapiens
agggtcaggaccatcaatatcattgtcttccacttccaca

SEQ ID NO: 55809 - DNA, 40 bp, Homo sapiens
tgtggaagtggaagacaatgatattgatggtcctgaccct

SEQ ID NO: 55810 - DNA, 40 bp, Homo sapiens
gggtcaggaccatcaatatcattgtcttccacttccacat

SEQ ID NO: 55811 - DNA, 40 bp, Homo sapiens
atgtggaagtggaagacaatgatattgatggtcctgaccc

SEQ ID NO: 55812 - DNA, 40 bp, Homo sapiens
ggtcaggaccatcaatatcattgtcttccacttccacatc

SEQ ID NO: 55813 - DNA, 40 bp, Homo sapiens
gatgtggaagtggaagacaatgatattgatggtcctgacc

SEQ ID NO: 55814 - DNA, 40 bp, Homo sapiens
gtcaggaccatcaatatcattgtcttccacttccacatct

SEQ ID NO: 55815 - DNA, 40 bp, Homo sapiens
agatgtggaagtggaagacaatgatattgatggtcctgac

SEQ ID NO: 55816 - DNA, 40 bp, Homo sapiens
tcaggaccatcaatatcattgtcttccacttccacatctt

SEQ ID NO: 55817 - DNA, 40 bp, Homo sapiens
aagatgtggaagtggaagacaatgatattgatggtcctga

SEQ ID NO: 55818 - DNA, 40 bp, Homo sapiens
caggaccatcaatatcattgtcttccacttccacatcttg

SEQ ID NO: 55819 - DNA, 40 bp, Homo sapiens
caagatgtggaagtggaagacaatgatattgatggtcctg

SEQ ID NO: 55820 - DNA, 40 bp, Homo sapiens
aggaccatcaatatcattgtcttccacttccacatcttgt

SEQ ID NO: 55821 - DNA, 40 bp, Homo sapiens
acaagatgtggaagtggaagacaatgatattgatggtcct

SEQ ID NO: 55822 - DNA, 40 bp, Homo sapiens
ggaccatcaatatcattgtcttccacttccacatcttgtc

SEQ ID NO: 55823 - DNA, 40 bp, Homo sapiens
gacaagatgtggaagtggaagacaatgatattgatggtcc

SEQ ID NO: 55824 - DNA, 40 bp, Homo sapiens
gaccatcaatatcattgtcttccacttccacatcttgtcc

SEQ ID NO: 55825 - DNA, 40 bp, Homo sapiens
ggacaagatgtggaagtggaagacaatgatattgatggtc

SEQ ID NO: 55826 - DNA, 40 bp, Homo sapiens
accatcaatatcattgtcttccacttccacatcttgtccc

SEQ ID NO: 55827 - DNA, 40 bp, Homo sapiens
gggacaagatgtggaagtggaagacaatgatattgatggt

SEQ ID NO: 55828 - DNA, 40 bp, Homo sapiens
ccatcaatatcattgtcttccacttccacatcttgtccca

SEQ ID NO: 55829 - DNA, 40 bp, Homo sapiens
tgggacaagatgtggaagtggaagacaatgatattgatgg

SEQ ID NO: 55830 - DNA, 40 bp, Homo sapiens
catcaatatcattgtcttccacttccacatcttgtcccac

SEQ ID NO: 55831 - DNA, 40 bp, Homo sapiens
gtgggacaagatgtggaagtggaagacaatgatattgatg

SEQ ID NO: 55832 - DNA, 40 bp, Homo sapiens
atcaatatcattgtcttccacttccacatcttgtcccact

SEQ ID NO: 55833 - DNA, 40 bp, Homo sapiens
agtgggacaagatgtggaagtggaagacaatgatattgat

SEQ ID NO: 55834 - DNA, 40 bp, Homo sapiens
tcaatatcattgtcttccacttccacatcttgtcccactg

SEQ ID NO: 55835 - DNA, 40 bp, Homo sapiens
cagtgggacaagatgtggaagtggaagacaatgatattga

SEQ ID NO: 55836 - DNA, 40 bp, Homo sapiens
caatatcattgtcttccacttccacatcttgtcccactgg

SEQ ID NO: 55837 - DNA, 40 bp, Homo sapiens
ccagtgggacaagatgtggaagtggaagacaatgatattg

SEQ ID NO: 55838 - DNA, 40 bp, Homo sapiens
aatatcattgtcttccacttccacatcttgtcccactgga

SEQ ID NO: 55839 - DNA, 40 bp, Homo sapiens
tccagtgggacaagatgtggaagtggaagacaatgatatt

SEQ ID NO: 55840 - DNA, 40 bp, Homo sapiens
atatcattgtcttccacttccacatcttgtcccactggaa

SEQ ID NO: 55841 - DNA, 40 bp, Homo sapiens
ttccagtgggacaagatgtggaagtggaagacaatgatat

SEQ ID NO: 55842 - DNA, 40 bp, Homo sapiens
tatcattgtcttccacttccacatcttgtcccactggaag

SEQ ID NO: 55843 - DNA, 40 bp, Homo sapiens
cttccagtgggacaagatgtggaagtggaagacaatgata

SEQ ID NO: 55844 - DNA, 40 bp, Homo sapiens
atcattgtcttccacttccacatcttgtcccactggaaga

SEQ ID NO: 55845 - DNA, 40 bp, Homo sapiens
tcttccagtgggacaagatgtggaagtggaagacaatgat

SEQ ID NO: 55846 - DNA, 40 bp, Homo sapiens
tcattgtcttccacttccacatcttgtcccactggaagat

SEQ ID NO: 55847 - DNA, 40 bp, Homo sapiens
atcttccagtgggacaagatgtggaagtggaagacaatga

SEQ ID NO: 55848 - DNA, 40 bp, Homo sapiens
cattgtcttccacttccacatcttgtcccactggaagatc

SEQ ID NO: 55849 - DNA, 40 bp, Homo sapiens
gatcttccagtgggacaagatgtggaagtggaagacaatg

SEQ ID NO: 55850 - DNA, 40 bp, Homo sapiens
attgtcttccacttccacatcttgtcccactggaagatct

SEQ ID NO: 55851 - DNA, 40 bp, Homo sapiens
agatcttccagtgggacaagatgtggaagtggaagacaat

SEQ ID NO: 55852 - DNA, 40 bp, Homo sapiens
ttgtcttccacttccacatcttgtcccactggaagatctt

SEQ ID NO: 55853 - DNA, 40 bp, Homo sapiens
aagatcttccagtgggacaagatgtggaagtggaagacaa

SEQ ID NO: 55854 - DNA, 40 bp, Homo sapiens
tgtcttccacttccacatcttgtcccactggaagatcttc

SEQ ID NO: 55855 - DNA, 40 bp, Homo sapiens
gaagatcttccagtgggacaagatgtggaagtggaagaca

SEQ ID NO: 55856 - DNA, 40 bp, Homo sapiens
gtcttccacttccacatcttgtcccactggaagatcttca

SEQ ID NO: 55857 - DNA, 40 bp, Homo sapiens
tgaagatcttccagtgggacaagatgtggaagtggaagac

SEQ ID NO: 55858 - DNA, 40 bp, Homo sapiens
tcttccacttccacatcttgtcccactggaagatcttcag

SEQ ID NO: 55859 - DNA, 40 bp, Homo sapiens
ctgaagatcttccagtgggacaagatgtggaagtggaaga

SEQ ID NO: 55860 - DNA, 40 bp, Homo sapiens
cttccacttccacatcttgtcccactggaagatcttcagg

SEQ ID NO: 55861 - DNA, 40 bp, Homo sapiens
cctgaagatcttccagtgggacaagatgtggaagtggaag

SEQ ID NO: 55862 - DNA, 40 bp, Homo sapiens
ttccacttccacatcttgtcccactggaagatcttcaggg

SEQ ID NO: 55863 - DNA, 40 bp, Homo sapiens
ccctgaagatcttccagtgggacaagatgtggaagtggaa

SEQ ID NO: 55864 - DNA, 40 bp, Homo sapiens
tccacttccacatcttgtcccactggaagatcttcagggg

SEQ ID NO: 55865 - DNA, 40 bp, Homo sapiens
cccctgaagatcttccagtgggacaagatgtggaagtgga

SEQ ID NO: 55866 - DNA, 40 bp, Homo sapiens
ccacttccacatcttgtcccactggaagatcttcaggggc

SEQ ID NO: 55867 - DNA, 40 bp, Homo sapiens
gcccctgaagatcttccagtgggacaagatgtggaagtgg

SEQ ID NO: 55868 - DNA, 40 bp, Homo sapiens
cacttccacatcttgtcccactggaagatcttcaggggca

SEQ ID NO: 55869 - DNA, 40 bp, Homo sapiens
tgcccctgaagatcttccagtgggacaagatgtggaagtg

SEQ ID NO: 55870 - DNA, 40 bp, Homo sapiens
acttccacatcttgtcccactggaagatcttcaggggcag

SEQ ID NO: 55871 - DNA, 40 bp, Homo sapiens
ctgcccctgaagatcttccagtgggacaagatgtggaagt

SEQ ID NO: 55872 - DNA, 40 bp, Homo sapiens
cttccacatcttgtcccactggaagatcttcaggggcagt

SEQ ID NO: 55873 - DNA, 40 bp, Homo sapiens
actgcccctgaagatcttccagtgggacaagatgtggaag

SEQ ID NO: 55874 - DNA, 40 bp, Homo sapiens
ttccacatcttgtcccactggaagatcttcaggggcagta

SEQ ID NO: 55875 - DNA, 40 bp, Homo sapiens
tactgcccctgaagatcttccagtgggacaagatgtggaa

SEQ ID NO: 55876 - DNA, 40 bp, Homo sapiens
tccacatcttgtcccactggaagatcttcaggggcagtaa

SEQ ID NO: 55877 - DNA, 40 bp, Homo sapiens
ttactgcccctgaagatcttccagtgggacaagatgtgga

SEQ ID NO: 55878 - DNA, 40 bp, Homo sapiens
ccacatcttgtcccactggaagatcttcaggggcagtaac

SEQ ID NO: 55879 - DNA, 40 bp, Homo sapiens
gttactgcccctgaagatcttccagtgggacaagatgtgg

SEQ ID NO: 55880 - DNA, 40 bp, Homo sapiens
cacatcttgtcccactggaagatcttcaggggcagtaaca

SEQ ID NO: 55881 - DNA, 40 bp, Homo sapiens
tgttactgcccctgaagatcttccagtgggacaagatgtg

SEQ ID NO: 55882 - DNA, 40 bp, Homo sapiens
acatcttgtcccactggaagatcttcaggggcagtaacac

SEQ ID NO: 55883 - DNA, 40 bp, Homo sapiens
gtgttactgcccctgaagatcttccagtgggacaagatgt

SEQ ID NO: 55884 - DNA, 40 bp, Homo sapiens
catcttgtcccactggaagatcttcaggggcagtaacaca

SEQ ID NO: 55885 - DNA, 40 bp, Homo sapiens
tgtgttactgcccctgaagatcttccagtgggacaagatg

SEQ ID NO: 55886 - DNA, 40 bp, Homo sapiens
atcttgtcccactggaagatcttcaggggcagtaacacac

SEQ ID NO: 55887 - DNA, 40 bp, Homo sapiens
gtgtgttactgcccctgaagatcttccagtgggacaagat

SEQ ID NO: 55888 - DNA, 40 bp, Homo sapiens
tcttgtcccactggaagatcttcaggggcagtaacacacg

SEQ ID NO: 55889 - DNA, 40 bp, Homo sapiens
cgtgtgttactgcccctgaagatcttccagtgggacaaga

SEQ ID NO: 55890 - DNA, 40 bp, Homo sapiens
cttgtcccactggaagatcttcaggggcagtaacacacgt

SEQ ID NO: 55891 - DNA, 40 bp, Homo sapiens
acgtgtgttactgcccctgaagatcttccagtgggacaag

SEQ ID NO: 55892 - DNA, 40 bp, Homo sapiens
ttgtcccactggaagatcttcaggggcagtaacacacgtg

SEQ ID NO: 55893 - DNA, 40 bp, Homo sapiens
cacgtgtgttactgcccctgaagatcttccagtgggacaa

SEQ ID NO: 55894 - DNA, 40 bp, Homo sapiens
tgtcccactggaagatcttcaggggcagtaacacacgtgg

SEQ ID NO: 55895 - DNA, 40 bp, Homo sapiens
ccacgtgtgttactgcccctgaagatcttccagtgggaca

SEQ ID NO: 55896 - DNA, 40 bp, Homo sapiens
gtcccactggaagatcttcaggggcagtaacacacgtgga

SEQ ID NO: 55897 - DNA, 40 bp, Homo sapiens
tccacgtgtgttactgcccctgaagatcttccagtgggac

SEQ ID NO: 55898 - DNA, 40 bp, Homo sapiens
tcccactggaagatcttcaggggcagtaacacacgtggag

SEQ ID NO: 55899 - DNA, 40 bp, Homo sapiens
ctccacgtgtgttactgcccctgaagatcttccagtggga

SEQ ID NO: 55900 - DNA, 40 bp, Homo sapiens
cccactggaagatcttcaggggcagtaacacacgtggagc

SEQ ID NO: 55901 - DNA, 40 bp, Homo sapiens
gctccacgtgtgttactgcccctgaagatcttccagtggg

SEQ ID NO: 55902 - DNA, 40 bp, Homo sapiens
ccactggaagatcttcaggggcagtaacacacgtggagct

SEQ ID NO: 55903 - DNA, 40 bp, Homo sapiens
agctccacgtgtgttactgcccctgaagatcttccagtgg

SEQ ID NO: 55904 - DNA, 40 bp, Homo sapiens
cactggaagatcttcaggggcagtaacacacgtggagctg

SEQ ID NO: 55905 - DNA, 40 bp, Homo sapiens
cagctccacgtgtgttactgcccctgaagatcttccagtg

SEQ ID NO: 55906 - DNA, 40 bp, Homo sapiens
actggaagatcttcaggggcagtaacacacgtggagctgt

SEQ ID NO: 55907 - DNA, 40 bp, Homo sapiens
acagctccacgtgtgttactgcccctgaagatcttccagt

SEQ ID NO: 55908 - DNA, 40 bp, Homo sapiens
ctggaagatcttcaggggcagtaacacacgtggagctgtc

SEQ ID NO: 55909 - DNA, 40 bp, Homo sapiens
gacagctccacgtgtgttactgcccctgaagatcttccag

SEQ ID NO: 55910 - DNA, 40 bp, Homo sapiens
tggaagatcttcaggggcagtaacacacgtggagctgtca

SEQ ID NO: 55911 - DNA, 40 bp, Homo sapiens
tgacagctccacgtgtgttactgcccctgaagatcttcca

SEQ ID NO: 55912 - DNA, 40 bp, Homo sapiens
ggaagatcttcaggggcagtaacacacgtggagctgtcat

SEQ ID NO: 55913 - DNA, 40 bp, Homo sapiens
atgacagctccacgtgtgttactgcccctgaagatcttcc

SEQ ID NO: 55914 - DNA, 40 bp, Homo sapiens
gaagatcttcaggggcagtaacacacgtggagctgtcatc

SEQ ID NO: 55915 - DNA, 40 bp, Homo sapiens
gatgacagctccacgtgtgttactgcccctgaagatcttc

SEQ ID NO: 55916 - DNA, 40 bp, Homo sapiens
aagatcttcaggggcagtaacacacgtggagctgtcatct

SEQ ID NO: 55917 - DNA, 40 bp, Homo sapiens
agatgacagctccacgtgtgttactgcccctgaagatctt

SEQ ID NO: 55918 - DNA, 40 bp, Homo sapiens
agatcttcaggggcagtaacacacgtggagctgtcatctc

SEQ ID NO: 55919 - DNA, 40 bp, Homo sapiens
gagatgacagctccacgtgtgttactgcccctgaagatct

SEQ ID NO: 55920 - DNA, 40 bp, Homo sapiens
gatcttcaggggcagtaacacacgtggagctgtcatctcc

SEQ ID NO: 55921 - DNA, 40 bp, Homo sapiens
ggagatgacagctccacgtgtgttactgcccctgaagatc

SEQ ID NO: 55922 - DNA, 40 bp, Homo sapiens
atcttcaggggcagtaacacacgtggagctgtcatctcct

SEQ ID NO: 55923 - DNA, 40 bp, Homo sapiens
aggagatgacagctccacgtgtgttactgcccctgaagat

SEQ ID NO: 55924 - DNA, 40 bp, Homo sapiens
tcttcaggggcagtaacacacgtggagctgtcatctccta

SEQ ID NO: 55925 - DNA, 40 bp, Homo sapiens
taggagatgacagctccacgtgtgttactgcccctgaaga

SEQ ID NO: 55926 - DNA, 40 bp, Homo sapiens
cttcaggggcagtaacacacgtggagctgtcatctcctat

SEQ ID NO: 55927 - DNA, 40 bp, Homo sapiens
ataggagatgacagctccacgtgtgttactgcccctgaag

SEQ ID NO: 55928 - DNA, 40 bp, Homo sapiens
ttcaggggcagtaacacacgtggagctgtcatctcctata

SEQ ID NO: 55929 - DNA, 40 bp, Homo sapiens
tataggagatgacagctccacgtgtgttactgcccctgaa

SEQ ID NO: 55930 - DNA, 40 bp, Homo sapiens
tcaggggcagtaacacacgtggagctgtcatctcctataa

SEQ ID NO: 55931 - DNA, 40 bp, Homo sapiens
ttataggagatgacagctccacgtgtgttactgcccctga

SEQ ID NO: 55932 - DNA, 40 bp, Homo sapiens
caggggcagtaacacacgtggagctgtcatctcctataat

SEQ ID NO: 55933 - DNA, 40 bp, Homo sapiens
attataggagatgacagctccacgtgtgttactgcccctg

SEQ ID NO: 55934 - DNA, 40 bp, Homo sapiens
aggggcagtaacacacgtggagctgtcatctcctataata

SEQ ID NO: 55935 - DNA, 40 bp, Homo sapiens
tattataggagatgacagctccacgtgtgttactgcccct

SEQ ID NO: 55936 - DNA, 40 bp, Homo sapiens
ggggcagtaacacacgtggagctgtcatctcctataataa

SEQ ID NO: 55937 - DNA, 40 bp, Homo sapiens
ttattataggagatgacagctccacgtgtgttactgcccc

SEQ ID NO: 55938 - DNA, 40 bp, Homo sapiens
gggcagtaacacacgtggagctgtcatctcctataataac

SEQ ID NO: 55939 - DNA, 40 bp, Homo sapiens
gttattataggagatgacagctccacgtgtgttactgccc

SEQ ID NO: 55940 - DNA, 40 bp, Homo sapiens
ggcagtaacacacgtggagctgtcatctcctataataaca

SEQ ID NO: 55941 - DNA, 40 bp, Homo sapiens
tgttattataggagatgacagctccacgtgtgttactgcc

SEQ ID NO: 55942 - DNA, 40 bp, Homo sapiens
gcagtaacacacgtggagctgtcatctcctataataacat

SEQ ID NO: 55943 - DNA, 40 bp, Homo sapiens
atgttattataggagatgacagctccacgtgtgttactgc

SEQ ID NO: 55944 - DNA, 40 bp, Homo sapiens
cagtaacacacgtggagctgtcatctcctataataacatt

SEQ ID NO: 55945 - DNA, 40 bp, Homo sapiens
aatgttattataggagatgacagctccacgtgtgttactg

SEQ ID NO: 55946 - DNA, 40 bp, Homo sapiens
agtaacacacgtggagctgtcatctcctataataacattg

SEQ ID NO: 55947 - DNA, 40 bp, Homo sapiens
caatgttattataggagatgacagctccacgtgtgttact

SEQ ID NO: 55948 - DNA, 40 bp, Homo sapiens
gtaacacacgtggagctgtcatctcctataataacattgc

SEQ ID NO: 55949 - DNA, 40 bp, Homo sapiens
gcaatgttattataggagatgacagctccacgtgtgttac

SEQ ID NO: 55950 - DNA, 40 bp, Homo sapiens
taacacacgtggagctgtcatctcctataataacattgcc

SEQ ID NO: 55951 - DNA, 40 bp, Homo sapiens
ggcaatgttattataggagatgacagctccacgtgtgtta

SEQ ID NO: 55952 - DNA, 40 bp, Homo sapiens
aacacacgtggagctgtcatctcctataataacattgcct

SEQ ID NO: 55953 - DNA, 40 bp, Homo sapiens
aggcaatgttattataggagatgacagctccacgtgtgtt

SEQ ID NO: 55954 - DNA, 40 bp, Homo sapiens
acacacgtggagctgtcatctcctataataacattgcctt

SEQ ID NO: 55955 - DNA, 40 bp, Homo sapiens
aaggcaatgttattataggagatgacagctccacgtgtgt

SEQ ID NO: 55956 - DNA, 40 bp, Homo sapiens
cacacgtggagctgtcatctcctataataacattgccttc

SEQ ID NO: 55957 - DNA, 40 bp, Homo sapiens
gaaggcaatgttattataggagatgacagctccacgtgtg

SEQ ID NO: 55958 - DNA, 40 bp, Homo sapiens
acacgtggagctgtcatctcctataataacattgccttct

SEQ ID NO: 55959 - DNA, 40 bp, Homo sapiens
agaaggcaatgttattataggagatgacagctccacgtgt

SEQ ID NO: 55960 - DNA, 40 bp, Homo sapiens
cacgtggagctgtcatctcctataataacattgccttctt

SEQ ID NO: 55961 - DNA, 40 bp, Homo sapiens
aagaaggcaatgttattataggagatgacagctccacgtg

SEQ ID NO: 55962 - DNA, 40 bp, Homo sapiens
acgtggagctgtcatctcctataataacattgccttcttt

SEQ ID NO: 55963 - DNA, 40 bp, Homo sapiens
aaagaaggcaatgttattataggagatgacagctccacgt

SEQ ID NO: 55964 - DNA, 40 bp, Homo sapiens
cgtggagctgtcatctcctataataacattgccttctttt

SEQ ID NO: 55965 - DNA, 40 bp, Homo sapiens
aaaagaaggcaatgttattataggagatgacagctccacg

SEQ ID NO: 55966 - DNA, 40 bp, Homo sapiens
gtggagctgtcatctcctataataacattgccttcttttg

SEQ ID NO: 55967 - DNA, 40 bp, Homo sapiens
caaaagaaggcaatgttattataggagatgacagctccac

SEQ ID NO: 55968 - DNA, 40 bp, Homo sapiens
tggagctgtcatctcctataataacattgccttcttttgg

SEQ ID NO: 55969 - DNA, 40 bp, Homo sapiens
ccaaaagaaggcaatgttattataggagatgacagctcca

SEQ ID NO: 55970 - DNA, 40 bp, Homo sapiens
ggagctgtcatctcctataataacattgccttcttttgga

SEQ ID NO: 55971 - DNA, 40 bp, Homo sapiens
tccaaaagaaggcaatgttattataggagatgacagctcc

SEQ ID NO: 55972 - DNA, 40 bp, Homo sapiens
gagctgtcatctcctataataacattgccttcttttggaa

SEQ ID NO: 55973 - DNA, 40 bp, Homo sapiens
ttccaaaagaaggcaatgttattataggagatgacagctc

SEQ ID NO: 55974 - DNA, 40 bp, Homo sapiens
agctgtcatctcctataataacattgccttcttttggaat

SEQ ID NO: 55975 - DNA, 40 bp, Homo sapiens
attccaaaagaaggcaatgttattataggagatgacagct

SEQ ID NO: 55976 - DNA, 40 bp, Homo sapiens
gctgtcatctcctataataacattgccttcttttggaata

SEQ ID NO: 55977 - DNA, 40 bp, Homo sapiens
tattccaaaagaaggcaatgttattataggagatgacagc

SEQ ID NO: 55978 - DNA, 40 bp, Homo sapiens
ctgtcatctcctataataacattgccttcttttggaatac

SEQ ID NO: 55979 - DNA, 40 bp, Homo sapiens
gtattccaaaagaaggcaatgttattataggagatgacag

SEQ ID NO: 55980 - DNA, 40 bp, Homo sapiens
tgtcatctcctataataacattgccttcttttggaatacc

SEQ ID NO: 55981 - DNA, 40 bp, Homo sapiens
ggtattccaaaagaaggcaatgttattataggagatgaca

SEQ ID NO: 55982 - DNA, 40 bp, Homo sapiens
gtcatctcctataataacattgccttcttttggaatacct

SEQ ID NO: 55983 - DNA, 40 bp, Homo sapiens
aggtattccaaaagaaggcaatgttattataggagatgac

SEQ ID NO: 55984 - DNA, 40 bp, Homo sapiens
tcatctcctataataacattgccttcttttggaatacctc

SEQ ID NO: 55985 - DNA, 40 bp, Homo sapiens
gaggtattccaaaagaaggcaatgttattataggagatga

SEQ ID NO: 55986 - DNA, 40 bp, Homo sapiens
catctcctataataacattgccttcttttggaatacctcc

SEQ ID NO: 55987 - DNA, 40 bp, Homo sapiens
ggaggtattccaaaagaaggcaatgttattataggagatg

SEQ ID NO: 55988 - DNA, 40 bp, Homo sapiens
atctcctataataacattgccttcttttggaatacctcct

SEQ ID NO: 55989 - DNA, 40 bp, Homo sapiens
aggaggtattccaaaagaaggcaatgttattataggagat

SEQ ID NO: 55990 - DNA, 40 bp, Homo sapiens
tctcctataataacattgccttcttttggaatacctcctg

SEQ ID NO: 55991 - DNA, 40 bp, Homo sapiens
caggaggtattccaaaagaaggcaatgttattataggaga

SEQ ID NO: 55992 - DNA, 40 bp, Homo sapiens
ctcctataataacattgccttcttttggaatacctcctga

SEQ ID NO: 55993 - DNA, 40 bp, Homo sapiens
tcaggaggtattccaaaagaaggcaatgttattataggag

SEQ ID NO: 55994 - DNA, 40 bp, Homo sapiens
tcctataataacattgccttcttttggaatacctcctgaa

SEQ ID NO: 55995 - DNA, 40 bp, Homo sapiens
ttcaggaggtattccaaaagaaggcaatgttattatagga

SEQ ID NO: 55996 - DNA, 40 bp, Homo sapiens
cctataataacattgccttcttttggaatacctcctgaag

SEQ ID NO: 55997 - DNA, 40 bp, Homo sapiens
cttcaggaggtattccaaaagaaggcaatgttattatagg

SEQ ID NO: 55998 - DNA, 40 bp, Homo sapiens
ctataataacattgccttcttttggaatacctcctgaagg

SEQ ID NO: 55999 - DNA, 40 bp, Homo sapiens
ccttcaggaggtattccaaaagaaggcaatgttattatag

SEQ ID NO: 56000 - DNA, 40 bp, Homo sapiens
tataataacattgccttcttttggaatacctcctgaagga

SEQ ID NO: 56001 - DNA, 40 bp, Homo sapiens
tccttcaggaggtattccaaaagaaggcaatgttattata

SEQ ID NO: 56002 - DNA, 40 bp, Homo sapiens
ataataacattgccttcttttggaatacctcctgaaggac

SEQ ID NO: 56003 - DNA, 40 bp, Homo sapiens
gtccttcaggaggtattccaaaagaaggcaatgttattat

SEQ ID NO: 56004 - DNA, 40 bp, Homo sapiens
taataacattgccttcttttggaatacctcctgaaggacc

SEQ ID NO: 56005 - DNA, 40 bp, Homo sapiens
ggtccttcaggaggtattccaaaagaaggcaatgttatta

SEQ ID NO: 56006 - DNA, 40 bp, Homo sapiens
aataacattgccttcttttggaatacctcctgaaggacct

SEQ ID NO: 56007 - DNA, 40 bp, Homo sapiens
aggtccttcaggaggtattccaaaagaaggcaatgttatt

SEQ ID NO: 56008 - DNA, 40 bp, Homo sapiens
ataacattgccttcttttggaatacctcctgaaggaccta

SEQ ID NO: 56009 - DNA, 40 bp, Homo sapiens
taggtccttcaggaggtattccaaaagaaggcaatgttat

SEQ ID NO: 56010 - DNA, 40 bp, Homo sapiens
taacattgccttcttttggaatacctcctgaaggacctat

SEQ ID NO: 56011 - DNA, 40 bp, Homo sapiens
ataggtccttcaggaggtattccaaaagaaggcaatgtta

SEQ ID NO: 56012 - DNA, 40 bp, Homo sapiens
aacattgccttcttttggaatacctcctgaaggacctatc

SEQ ID NO: 56013 - DNA, 40 bp, Homo sapiens
gataggtccttcaggaggtattccaaaagaaggcaatgtt

SEQ ID NO: 56014 - DNA, 40 bp, Homo sapiens
acattgccttcttttggaatacctcctgaaggacctatcc

SEQ ID NO: 56015 - DNA, 40 bp, Homo sapiens
ggataggtccttcaggaggtattccaaaagaaggcaatgt

SEQ ID NO: 56016 - DNA, 40 bp, Homo sapiens
cattgccttcttttggaatacctcctgaaggacctatcca

SEQ ID NO: 56017 - DNA, 40 bp, Homo sapiens
tggataggtccttcaggaggtattccaaaagaaggcaatg

SEQ ID NO: 56018 - DNA, 40 bp, Homo sapiens
attgccttcttttggaatacctcctgaaggacctatccaa

SEQ ID NO: 56019 - DNA, 40 bp, Homo sapiens
ttggataggtccttcaggaggtattccaaaagaaggcaat

SEQ ID NO: 56020 - DNA, 40 bp, Homo sapiens
ttgccttcttttggaatacctcctgaaggacctatccaag

SEQ ID NO: 56021 - DNA, 40 bp, Homo sapiens
cttggataggtccttcaggaggtattccaaaagaaggcaa

SEQ ID NO: 56022 - DNA, 40 bp, Homo sapiens
tgccttcttttggaatacctcctgaaggacctatccaagg

SEQ ID NO: 56023 - DNA, 40 bp, Homo sapiens
ccttggataggtccttcaggaggtattccaaaagaaggca

SEQ ID NO: 56024 - DNA, 40 bp, Homo sapiens
gccttcttttggaatacctcctgaaggacctatccaaggc

SEQ ID NO: 56025 - DNA, 40 bp, Homo sapiens
gccttggataggtccttcaggaggtattccaaaagaaggc

SEQ ID NO: 56026 - DNA, 40 bp, Homo sapiens
ccttcttttggaatacctcctgaaggacctatccaaggct

SEQ ID NO: 56027 - DNA, 40 bp, Homo sapiens
agccttggataggtccttcaggaggtattccaaaagaagg

SEQ ID NO: 56028 - DNA, 40 bp, Homo sapiens
cttcttttggaatacctcctgaaggacctatccaaggctg

SEQ ID NO: 56029 - DNA, 40 bp, Homo sapiens
cagccttggataggtccttcaggaggtattccaaaagaag

SEQ ID NO: 56030 - DNA, 40 bp, Homo sapiens
ttcttttggaatacctcctgaaggacctatccaaggctgt

SEQ ID NO: 56031 - DNA, 40 bp, Homo sapiens
acagccttggataggtccttcaggaggtattccaaaagaa

SEQ ID NO: 56032 - DNA, 40 bp, Homo sapiens
tcttttggaatacctcctgaaggacctatccaaggctgtt

SEQ ID NO: 56033 - DNA, 40 bp, Homo sapiens
aacagccttggataggtccttcaggaggtattccaaaaga

SEQ ID NO: 56034 - DNA, 40 bp, Homo sapiens
cttttggaatacctcctgaaggacctatccaaggctgttt

SEQ ID NO: 56035 - DNA, 40 bp, Homo sapiens
aaacagccttggataggtccttcaggaggtattccaaaag

SEQ ID NO: 56036 - DNA, 40 bp, Homo sapiens
ttttggaatacctcctgaaggacctatccaaggctgttta

SEQ ID NO: 56037 - DNA, 40 bp, Homo sapiens
taaacagccttggataggtccttcaggaggtattccaaaa

SEQ ID NO: 56038 - DNA, 40 bp, Homo sapiens
tttggaatacctcctgaaggacctatccaaggctgtttat

SEQ ID NO: 56039 - DNA, 40 bp, Homo sapiens
ataaacagccttggataggtccttcaggaggtattccaaa

SEQ ID NO: 56040 - DNA, 40 bp, Homo sapiens
ttggaatacctcctgaaggacctatccaaggctgtttata

SEQ ID NO: 56041 - DNA, 40 bp, Homo sapiens
tataaacagccttggataggtccttcaggaggtattccaa

SEQ ID NO: 56042 - DNA, 40 bp, Homo sapiens
tggaatacctcctgaaggacctatccaaggctgtttatag

SEQ ID NO: 56043 - DNA, 40 bp, Homo sapiens
ctataaacagccttggataggtccttcaggaggtattcca

SEQ ID NO: 56044 - DNA, 40 bp, Homo sapiens
ggaatacctcctgaaggacctatccaaggctgtttatagt

SEQ ID NO: 56045 - DNA, 40 bp, Homo sapiens
actataaacagccttggataggtccttcaggaggtattcc

SEQ ID NO: 56046 - DNA, 40 bp, Homo sapiens
gaatacctcctgaaggacctatccaaggctgtttatagtt

SEQ ID NO: 56047 - DNA, 40 bp, Homo sapiens
aactataaacagccttggataggtccttcaggaggtattc

SEQ ID NO: 56048 - DNA, 40 bp, Homo sapiens
aatacctcctgaaggacctatccaaggctgtttatagtta

SEQ ID NO: 56049 - DNA, 40 bp, Homo sapiens
taactataaacagccttggataggtccttcaggaggtatt

SEQ ID NO: 56050 - DNA, 40 bp, Homo sapiens
atacctcctgaaggacctatccaaggctgtttatagttaa

SEQ ID NO: 56051 - DNA, 40 bp, Homo sapiens
ttaactataaacagccttggataggtccttcaggaggtat

SEQ ID NO: 56052 - DNA, 40 bp, Homo sapiens
tacctcctgaaggacctatccaaggctgtttatagttaac

SEQ ID NO: 56053 - DNA, 40 bp, Homo sapiens
gttaactataaacagccttggataggtccttcaggaggta

SEQ ID NO: 56054 - DNA, 40 bp, Homo sapiens
acctcctgaaggacctatccaaggctgtttatagttaact

SEQ ID NO: 56055 - DNA, 40 bp, Homo sapiens
agttaactataaacagccttggataggtccttcaggaggt

SEQ ID NO: 56056 - DNA, 40 bp, Homo sapiens
cctcctgaaggacctatccaaggctgtttatagttaactt

SEQ ID NO: 56057 - DNA, 40 bp, Homo sapiens
aagttaactataaacagccttggataggtccttcaggagg

SEQ ID NO: 56058 - DNA, 40 bp, Homo sapiens
ctcctgaaggacctatccaaggctgtttatagttaacttt

SEQ ID NO: 56059 - DNA, 40 bp, Homo sapiens
aaagttaactataaacagccttggataggtccttcaggag

SEQ ID NO: 56060 - DNA, 40 bp, Homo sapiens
tcctgaaggacctatccaaggctgtttatagttaactttt

SEQ ID NO: 56061 - DNA, 40 bp, Homo sapiens
aaaagttaactataaacagccttggataggtccttcagga

SEQ ID NO: 56062 - DNA, 40 bp, Homo sapiens
cctgaaggacctatccaaggctgtttatagttaacttttt

SEQ ID NO: 56063 - DNA, 40 bp, Homo sapiens
aaaaagttaactataaacagccttggataggtccttcagg

SEQ ID NO: 56064 - DNA, 40 bp, Homo sapiens
ctgaaggacctatccaaggctgtttatagttaactttttt

SEQ ID NO: 56065 - DNA, 40 bp, Homo sapiens
aaaaaagttaactataaacagccttggataggtccttcag

SEQ ID NO: 56066 - DNA, 40 bp, Homo sapiens
tgaaggacctatccaaggctgtttatagttaacttttttt

SEQ ID NO: 56067 - DNA, 40 bp, Homo sapiens
aaaaaaagttaactataaacagccttggataggtccttca

SEQ ID NO: 56068 - DNA, 40 bp, Homo sapiens
gaaggacctatccaaggctgtttatagttaactttttttt

SEQ ID NO: 56069 - DNA, 40 bp, Homo sapiens
aaaaaaaagttaactataaacagccttggataggtccttc

SEQ ID NO: 56070 - DNA, 40 bp, Homo sapiens
aaggacctatccaaggctgtttatagttaacttttttttt

SEQ ID NO: 56071 - DNA, 40 bp, Homo sapiens
aaaaaaaaagttaactataaacagccttggataggtcctt

SEQ ID NO: 56072 - DNA, 40 bp, Homo sapiens
aggacctatccaaggctgtttatagttaactttttttttt

SEQ ID NO: 56073 - DNA, 40 bp, Homo sapiens
aaaaaaaaaagttaactataaacagccttggataggtcct

SEQ ID NO: 56074 - DNA, 40 bp, Homo sapiens
ggacctatccaaggctgtttatagttaacttttttttttt

SEQ ID NO: 56075 - DNA, 40 bp, Homo sapiens
aaaaaaaaaaagttaactataaacagccttggataggtcc

SEQ ID NO: 56076 - DNA, 40 bp, Homo sapiens
gacctatccaaggctgtttatagttaactttttttttttt

SEQ ID NO: 56077 - DNA, 40 bp, Homo sapiens
aaaaaaaaaaaagttaactataaacagccttggataggtc

SEQ ID NO: 56078 - DNA, 40 bp, Homo sapiens
acctatccaaggctgtttatagttaacttttttttttttt

SEQ ID NO: 56079 - DNA, 40 bp, Homo sapiens
aaaaaaaaaaaaagttaactataaacagccttggataggt

SEQ ID NO: 56080 - DNA, 40 bp, Homo sapiens
cctatccaaggctgtttatagttaactttttttttttttt

SEQ ID NO: 56081 - DNA, 40 bp, Homo sapiens
aaaaaaaaaaaaaagttaactataaacagccttggatagg

SEQ ID NO: 56082 - DNA, 40 bp, Homo sapiens
ctatccaaggctgtttatagttaacttttttttttttttt

SEQ ID NO: 56083 - DNA, 40 bp, Homo sapiens
aaaaaaaaaaaaaaagttaactataaacagccttggatag

SEQ ID NO: 56084 - DNA, 40 bp, Homo sapiens
tatccaaggctgtttatagttaactttttttttttttttt

SEQ ID NO: 56085 - DNA, 40 bp, Homo sapiens
aaaaaaaaaaaaaaaagttaactataaacagccttggata

SEQ ID NO: 56086 - DNA, 40 bp, Homo sapiens
atccaaggctgtttatagttaacttttttttttttttttt

SEQ ID NO: 56087 - DNA, 40 bp, Homo sapiens
aaaaaaaaaaaaaaaaagttaactataaacagccttggat

SEQ ID NO: 56088 - DNA, 40 bp, Homo sapiens
tccaaggctgtttatagttaactttttttttttttttttt

SEQ ID NO: 56089 - DNA, 40 bp, Homo sapiens
aaaaaaaaaaaaaaaaaagttaactataaacagccttgga

SEQ ID NO: 56090 - DNA, 40 bp, Homo sapiens
ccaaggctgtttatagttaacttttttttttttttttttt

SEQ ID NO: 56091 - DNA, 40 bp, Homo sapiens
aaaaaaaaaaaaaaaaaaagttaactataaacagccttgg

SEQ ID NO: 56092 - DNA, 40 bp, Homo sapiens
caaggctgtttatagttaactttttttttttttttttttt

SEQ ID NO: 56093 - DNA, 40 bp, Homo sapiens
aaaaaaaaaaaaaaaaaaaagttaactataaacagccttg

SEQ ID NO: 56094 - DNA, 40 bp, Homo sapiens
aaggctgtttatagttaacttttttttttttttttttttt

SEQ ID NO: 56095 - DNA, 40 bp, Homo sapiens
aaaaaaaaaaaaaaaaaaaaagttaactataaacagcctt

SEQ ID NO: 56096 - DNA, 40 bp, Homo sapiens
aggctgtttatagttaactttttttttttttttttttttt

SEQ ID NO: 56097 - DNA, 40 bp, Homo sapiens
aaaaaaaaaaaaaaaaaaaaaagttaactataaacagcct

SEQ ID NO: 56098 - DNA, 40 bp, Homo sapiens
ggctgtttatagttaacttttttttttttttttttttttt

SEQ ID NO: 56099 - DNA, 40 bp, Homo sapiens
aaaaaaaaaaaaaaaaaaaaaaagttaactataaacagcc

SEQ ID NO: 56100 - DNA, 40 bp, Homo sapiens
gctgtttatagttaactttttttttttttttttttttttt

SEQ ID NO: 56101 - DNA, 40 bp, Homo sapiens
aaaaaaaaaaaaaaaaaaaaaaaagttaactataaacagc

SEQ ID NO: 56102 - DNA, 40 bp, Homo sapiens
ctgtttatagttaacttttttttttttttttttttttttt

SEQ ID NO: 56103 - DNA, 40 bp, Homo sapiens
aaaaaaaaaaaaaaaaaaaaaaaaagttaactataaacag

SEQ ID NO: 56104 - DNA, 40 bp, Homo sapiens
tgtttatagttaactttttttttttttttttttttttttt

SEQ ID NO: 56105 - DNA, 40 bp, Homo sapiens
aaaaaaaaaaaaaaaaaaaaaaaaaagttaactataaaca

SEQ ID NO: 56106 - DNA, 40 bp, Homo sapiens
gtttatagttaactttttttttttttttttttttttttta

SEQ ID NO: 56107 - DNA, 40 bp, Homo sapiens
taaaaaaaaaaaaaaaaaaaaaaaaaagttaactataaac

SEQ ID NO: 56108 - DNA, 40 bp, Homo sapiens
tttatagttaacttttttttttttttttttttttttttag

SEQ ID NO: 56109 - DNA, 40 bp, Homo sapiens
ctaaaaaaaaaaaaaaaaaaaaaaaaaagttaactataaa

SEQ ID NO: 56110 - DNA, 40 bp, Homo sapiens
ttatagttaacttttttttttttttttttttttttttagt

SEQ ID NO: 56111 - DNA, 40 bp, Homo sapiens
actaaaaaaaaaaaaaaaaaaaaaaaaaagttaactataa

SEQ ID NO: 56112 - DNA, 40 bp, Homo sapiens
tatagttaacttttttttttttttttttttttttttagta

SEQ ID NO: 56113 - DNA, 40 bp, Homo sapiens
tactaaaaaaaaaaaaaaaaaaaaaaaaaagttaactata

SEQ ID NO: 56114 - DNA, 40 bp, Homo sapiens
atagttaacttttttttttttttttttttttttttagtaa

SEQ ID NO: 56115 - DNA, 40 bp, Homo sapiens
ttactaaaaaaaaaaaaaaaaaaaaaaaaaagttaactat

SEQ ID NO: 56116 - DNA, 40 bp, Homo sapiens
tagttaacttttttttttttttttttttttttttagtaaa

SEQ ID NO: 56117 - DNA, 40 bp, Homo sapiens
tttactaaaaaaaaaaaaaaaaaaaaaaaaaagttaacta

SEQ ID NO: 56118 - DNA, 40 bp, Homo sapiens
agttaacttttttttttttttttttttttttttagtaaat

SEQ ID NO: 56119 - DNA, 40 bp, Homo sapiens
atttactaaaaaaaaaaaaaaaaaaaaaaaaaagttaact

SEQ ID NO: 56120 - DNA, 40 bp, Homo sapiens
gttaacttttttttttttttttttttttttttagtaaata

SEQ ID NO: 56121 - DNA, 40 bp, Homo sapiens
tatttactaaaaaaaaaaaaaaaaaaaaaaaaaagttaac

SEQ ID NO: 56122 - DNA, 40 bp, Homo sapiens
ttaacttttttttttttttttttttttttttagtaaatag

SEQ ID NO: 56123 - DNA, 40 bp, Homo sapiens
ctatttactaaaaaaaaaaaaaaaaaaaaaaaaaagttaa

SEQ ID NO: 56124 - DNA, 40 bp, Homo sapiens
taacttttttttttttttttttttttttttagtaaatagg

SEQ ID NO: 56125 - DNA, 40 bp, Homo sapiens
cctatttactaaaaaaaaaaaaaaaaaaaaaaaaaagtta

SEQ ID NO: 56126 - DNA, 40 bp, Homo sapiens
aacttttttttttttttttttttttttttagtaaatagga

SEQ ID NO: 56127 - DNA, 40 bp, Homo sapiens
tcctatttactaaaaaaaaaaaaaaaaaaaaaaaaaagtt

SEQ ID NO: 56128 - DNA, 40 bp, Homo sapiens
acttttttttttttttttttttttttttagtaaataggag

SEQ ID NO: 56129 - DNA, 40 bp, Homo sapiens
ctcctatttactaaaaaaaaaaaaaaaaaaaaaaaaaagt

SEQ ID NO: 56130 - DNA, 40 bp, Homo sapiens
cttttttttttttttttttttttttttagtaaataggagg

SEQ ID NO: 56131 - DNA, 40 bp, Homo sapiens
cctcctatttactaaaaaaaaaaaaaaaaaaaaaaaaaag

SEQ ID NO: 56132 - DNA, 40 bp, Homo sapiens
ttttttttttttttttttttttttttagtaaataggagga

SEQ ID NO: 56133 - DNA, 40 bp, Homo sapiens
tcctcctatttactaaaaaaaaaaaaaaaaaaaaaaaaaa

SEQ ID NO: 56134 - DNA, 40 bp, Homo sapiens
tttttttttttttttttttttttttagtaaataggaggag

SEQ ID NO: 56135 - DNA, 40 bp, Homo sapiens
ctcctcctatttactaaaaaaaaaaaaaaaaaaaaaaaaa

SEQ ID NO: 56136 - DNA, 40 bp, Homo sapiens
ttttttttttttttttttttttttagtaaataggaggagt

SEQ ID NO: 56137 - DNA, 40 bp, Homo sapiens
actcctcctatttactaaaaaaaaaaaaaaaaaaaaaaaa

SEQ ID NO: 56138 - DNA, 40 bp, Homo sapiens
tttttttttttttttttttttttagtaaataggaggagta

SEQ ID NO: 56139 - DNA, 40 bp, Homo sapiens
tactcctcctatttactaaaaaaaaaaaaaaaaaaaaaaa

SEQ ID NO: 56140 - DNA, 40 bp, Homo sapiens
ttttttttttttttttttttttagtaaataggaggagtac

SEQ ID NO: 56141 - DNA, 40 bp, Homo sapiens
gtactcctcctatttactaaaaaaaaaaaaaaaaaaaaaa

SEQ ID NO: 56142 - DNA, 40 bp, Homo sapiens
tttttttttttttttttttttagtaaataggaggagtaca

SEQ ID NO: 56143 - DNA, 40 bp, Homo sapiens
tgtactcctcctatttactaaaaaaaaaaaaaaaaaaaaa

SEQ ID NO: 56144 - DNA, 40 bp, Homo sapiens
ttttttttttttttttttttagtaaataggaggagtacac

SEQ ID NO: 56145 - DNA, 40 bp, Homo sapiens
gtgtactcctcctatttactaaaaaaaaaaaaaaaaaaaa

SEQ ID NO: 56146 - DNA, 40 bp, Homo sapiens
tttttttttttttttttttagtaaataggaggagtacact

SEQ ID NO: 56147 - DNA, 40 bp, Homo sapiens
agtgtactcctcctatttactaaaaaaaaaaaaaaaaaaa

SEQ ID NO: 56148 - DNA, 40 bp, Homo sapiens
ttttttttttttttttttagtaaataggaggagtacacta

SEQ ID NO: 56149 - DNA, 40 bp, Homo sapiens
tagtgtactcctcctatttactaaaaaaaaaaaaaaaaaa

SEQ ID NO: 56150 - DNA, 40 bp, Homo sapiens
tttttttttttttttttagtaaataggaggagtacactat

SEQ ID NO: 56151 - DNA, 40 bp, Homo sapiens
atagtgtactcctcctatttactaaaaaaaaaaaaaaaaa

SEQ ID NO: 56152 - DNA, 40 bp, Homo sapiens
ttttttttttttttttagtaaataggaggagtacactata

SEQ ID NO: 56153 - DNA, 40 bp, Homo sapiens
tatagtgtactcctcctatttactaaaaaaaaaaaaaaaa

SEQ ID NO: 56154 - DNA, 40 bp, Homo sapiens
tttttttttttttttagtaaataggaggagtacactataa

SEQ ID NO: 56155 - DNA, 40 bp, Homo sapiens
ttatagtgtactcctcctatttactaaaaaaaaaaaaaaa

SEQ ID NO: 56156 - DNA, 40 bp, Homo sapiens
ttttttttttttttagtaaataggaggagtacactataaa

SEQ ID NO: 56157 - DNA, 40 bp, Homo sapiens
tttatagtgtactcctcctatttactaaaaaaaaaaaaaa

SEQ ID NO: 56158 - DNA, 40 bp, Homo sapiens
tttttttttttttagtaaataggaggagtacactataaaa

SEQ ID NO: 56159 - DNA, 40 bp, Homo sapiens
ttttatagtgtactcctcctatttactaaaaaaaaaaaaa

SEQ ID NO: 56160 - DNA, 40 bp, Homo sapiens
ttttttttttttagtaaataggaggagtacactataaaat

SEQ ID NO: 56161 - DNA, 40 bp, Homo sapiens
attttatagtgtactcctcctatttactaaaaaaaaaaaa

SEQ ID NO: 56162 - DNA, 40 bp, Homo sapiens
tttttttttttagtaaataggaggagtacactataaaata

SEQ ID NO: 56163 - DNA, 40 bp, Homo sapiens
tattttatagtgtactcctcctatttactaaaaaaaaaaa

SEQ ID NO: 56164 - DNA, 40 bp, Homo sapiens
ttttttttttagtaaataggaggagtacactataaaataa

SEQ ID NO: 56165 - DNA, 40 bp, Homo sapiens
ttattttatagtgtactcctcctatttactaaaaaaaaaa

SEQ ID NO: 56166 - DNA, 40 bp, Homo sapiens
tttttttttagtaaataggaggagtacactataaaataac

SEQ ID NO: 56167 - DNA, 40 bp, Homo sapiens
gttattttatagtgtactcctcctatttactaaaaaaaaa

SEQ ID NO: 56168 - DNA, 40 bp, Homo sapiens
ttttttttagtaaataggaggagtacactataaaataaca

SEQ ID NO: 56169 - DNA, 40 bp, Homo sapiens
tgttattttatagtgtactcctcctatttactaaaaaaaa

SEQ ID NO: 56170 - DNA, 40 bp, Homo sapiens
tttttttagtaaataggaggagtacactataaaataacaa

SEQ ID NO: 56171 - DNA, 40 bp, Homo sapiens
ttgttattttatagtgtactcctcctatttactaaaaaaa

SEQ ID NO: 56172 - DNA, 40 bp, Homo sapiens
ttttttagtaaataggaggagtacactataaaataacaat

SEQ ID NO: 56173 - DNA, 40 bp, Homo sapiens
attgttattttatagtgtactcctcctatttactaaaaaa

SEQ ID NO: 56174 - DNA, 40 bp, Homo sapiens
tttttagtaaataggaggagtacactataaaataacaata

SEQ ID NO: 56175 - DNA, 40 bp, Homo sapiens
tattgttattttatagtgtactcctcctatttactaaaaa

SEQ ID NO: 56176 - DNA, 40 bp, Homo sapiens
ttttagtaaataggaggagtacactataaaataacaatat

SEQ ID NO: 56177 - DNA, 40 bp, Homo sapiens
atattgttattttatagtgtactcctcctatttactaaaa

SEQ ID NO: 56178 - DNA, 40 bp, Homo sapiens
tttagtaaataggaggagtacactataaaataacaatata

SEQ ID NO: 56179 - DNA, 40 bp, Homo sapiens
tatattgttattttatagtgtactcctcctatttactaaa

SEQ ID NO: 56180 - DNA, 40 bp, Homo sapiens
ttagtaaataggaggagtacactataaaataacaatatag

SEQ ID NO: 56181 - DNA, 40 bp, Homo sapiens
ctatattgttattttatagtgtactcctcctatttactaa

SEQ ID NO: 56182 - DNA, 40 bp, Homo sapiens
tagtaaataggaggagtacactataaaataacaatatagg

SEQ ID NO: 56183 - DNA, 40 bp, Homo sapiens
cctatattgttattttatagtgtactcctcctatttacta

SEQ ID NO: 56184 - DNA, 40 bp, Homo sapiens
agtaaataggaggagtacactataaaataacaatataggt

SEQ ID NO: 56185 - DNA, 40 bp, Homo sapiens
acctatattgttattttatagtgtactcctcctatttact

SEQ ID NO: 56186 - DNA, 40 bp, Homo sapiens
gtaaataggaggagtacactataaaataacaatataggtg

SEQ ID NO: 56187 - DNA, 40 bp, Homo sapiens
cacctatattgttattttatagtgtactcctcctatttac

SEQ ID NO: 56188 - DNA, 40 bp, Homo sapiens
taaataggaggagtacactataaaataacaatataggtgc

SEQ ID NO: 56189 - DNA, 40 bp, Homo sapiens
gcacctatattgttattttatagtgtactcctcctattta

SEQ ID NO: 56190 - DNA, 40 bp, Homo sapiens
aaataggaggagtacactataaaataacaatataggtgct

SEQ ID NO: 56191 - DNA, 40 bp, Homo sapiens
agcacctatattgttattttatagtgtactcctcctattt

SEQ ID NO: 56192 - DNA, 40 bp, Homo sapiens
aataggaggagtacactataaaataacaatataggtgcta

SEQ ID NO: 56193 - DNA, 40 bp, Homo sapiens
tagcacctatattgttattttatagtgtactcctcctatt

SEQ ID NO: 56194 - DNA, 40 bp, Homo sapiens
ataggaggagtacactataaaataacaatataggtgctat

SEQ ID NO: 56195 - DNA, 40 bp, Homo sapiens
atagcacctatattgttattttatagtgtactcctcctat

SEQ ID NO: 56196 - DNA, 40 bp, Homo sapiens
taggaggagtacactataaaataacaatataggtgctata

SEQ ID NO: 56197 - DNA, 40 bp, Homo sapiens
tatagcacctatattgttattttatagtgtactcctccta

SEQ ID NO: 56198 - DNA, 40 bp, Homo sapiens
aggaggagtacactataaaataacaatataggtgctatac

SEQ ID NO: 56199 - DNA, 40 bp, Homo sapiens
gtatagcacctatattgttattttatagtgtactcctcct

SEQ ID NO: 56200 - DNA, 40 bp, Homo sapiens
ggaggagtacactataaaataacaatataggtgctatacc

SEQ ID NO: 56201 - DNA, 40 bp, Homo sapiens
ggtatagcacctatattgttattttatagtgtactcctcc

SEQ ID NO: 56202 - DNA, 40 bp, Homo sapiens
gaggagtacactataaaataacaatataggtgctatacca

SEQ ID NO: 56203 - DNA, 40 bp, Homo sapiens
tggtatagcacctatattgttattttatagtgtactcctc

SEQ ID NO: 56204 - DNA, 40 bp, Homo sapiens
aggagtacactataaaataacaatataggtgctataccat

SEQ ID NO: 56205 - DNA, 40 bp, Homo sapiens
atggtatagcacctatattgttattttatagtgtactcct

SEQ ID NO: 56206 - DNA, 40 bp, Homo sapiens
ggagtacactataaaataacaatataggtgctataccatt

SEQ ID NO: 56207 - DNA, 40 bp, Homo sapiens
aatggtatagcacctatattgttattttatagtgtactcc

SEQ ID NO: 56208 - DNA, 40 bp, Homo sapiens
gagtacactataaaataacaatataggtgctataccatta

SEQ ID NO: 56209 - DNA, 40 bp, Homo sapiens
taatggtatagcacctatattgttattttatagtgtactc

SEQ ID NO: 56210 - DNA, 40 bp, Homo sapiens
agtacactataaaataacaatataggtgctataccattat

SEQ ID NO: 56211 - DNA, 40 bp, Homo sapiens
ataatggtatagcacctatattgttattttatagtgtact

SEQ ID NO: 56212 - DNA, 40 bp, Homo sapiens
gtacactataaaataacaatataggtgctataccattata

SEQ ID NO: 56213 - DNA, 40 bp, Homo sapiens
tataatggtatagcacctatattgttattttatagtgtac

SEQ ID NO: 56214 - DNA, 40 bp, Homo sapiens
tacactataaaataacaatataggtgctataccattatac

SEQ ID NO: 56215 - DNA, 40 bp, Homo sapiens
gtataatggtatagcacctatattgttattttatagtgta

SEQ ID NO: 56216 - DNA, 40 bp, Homo sapiens
acactataaaataacaatataggtgctataccattataca

SEQ ID NO: 56217 - DNA, 40 bp, Homo sapiens
tgtataatggtatagcacctatattgttattttatagtgt

SEQ ID NO: 56218 - DNA, 40 bp, Homo sapiens
cactataaaataacaatataggtgctataccattatacaa

SEQ ID NO: 56219 - DNA, 40 bp, Homo sapiens
ttgtataatggtatagcacctatattgttattttatagtg

SEQ ID NO: 56220 - DNA, 40 bp, Homo sapiens
actataaaataacaatataggtgctataccattatacaac

SEQ ID NO: 56221 - DNA, 40 bp, Homo sapiens
gttgtataatggtatagcacctatattgttattttatagt

SEQ ID NO: 56222 - DNA, 40 bp, Homo sapiens
ctataaaataacaatataggtgctataccattatacaact

SEQ ID NO: 56223 - DNA, 40 bp, Homo sapiens
agttgtataatggtatagcacctatattgttattttatag

SEQ ID NO: 56224 - DNA, 40 bp, Homo sapiens
tataaaataacaatataggtgctataccattatacaactg

SEQ ID NO: 56225 - DNA, 40 bp, Homo sapiens
cagttgtataatggtatagcacctatattgttattttata

SEQ ID NO: 56226 - DNA, 40 bp, Homo sapiens
ataaaataacaatataggtgctataccattatacaactga

SEQ ID NO: 56227 - DNA, 40 bp, Homo sapiens
tcagttgtataatggtatagcacctatattgttattttat

SEQ ID NO: 56228 - DNA, 40 bp, Homo sapiens
taaaataacaatataggtgctataccattatacaactgac

SEQ ID NO: 56229 - DNA, 40 bp, Homo sapiens
gtcagttgtataatggtatagcacctatattgttatttta

SEQ ID NO: 56230 - DNA, 40 bp, Homo sapiens
aaaataacaatataggtgctataccattatacaactgaca

SEQ ID NO: 56231 - DNA, 40 bp, Homo sapiens
tgtcagttgtataatggtatagcacctatattgttatttt

SEQ ID NO: 56232 - DNA, 40 bp, Homo sapiens
aaataacaatataggtgctataccattatacaactgacag

SEQ ID NO: 56233 - DNA, 40 bp, Homo sapiens
ctgtcagttgtataatggtatagcacctatattgttattt

SEQ ID NO: 56234 - DNA, 40 bp, Homo sapiens
aataacaatataggtgctataccattatacaactgacagt

SEQ ID NO: 56235 - DNA, 40 bp, Homo sapiens
actgtcagttgtataatggtatagcacctatattgttatt

SEQ ID NO: 56236 - DNA, 40 bp, Homo sapiens
ataacaatataggtgctataccattatacaactgacagtg

SEQ ID NO: 56237 - DNA, 40 bp, Homo sapiens
cactgtcagttgtataatggtatagcacctatattgttat

SEQ ID NO: 56238 - DNA, 40 bp, Homo sapiens
taacaatataggtgctataccattatacaactgacagtgc

SEQ ID NO: 56239 - DNA, 40 bp, Homo sapiens
gcactgtcagttgtataatggtatagcacctatattgtta

SEQ ID NO: 56240 - DNA, 40 bp, Homo sapiens
aacaatataggtgctataccattatacaactgacagtgca

SEQ ID NO: 56241 - DNA, 40 bp, Homo sapiens
tgcactgtcagttgtataatggtatagcacctatattgtt

SEQ ID NO: 56242 - DNA, 40 bp, Homo sapiens
acaatataggtgctataccattatacaactgacagtgcag

SEQ ID NO: 56243 - DNA, 40 bp, Homo sapiens
ctgcactgtcagttgtataatggtatagcacctatattgt

SEQ ID NO: 56244 - DNA, 40 bp, Homo sapiens
caatataggtgctataccattatacaactgacagtgcagt

SEQ ID NO: 56245 - DNA, 40 bp, Homo sapiens
actgcactgtcagttgtataatggtatagcacctatattg

SEQ ID NO: 56246 - DNA, 40 bp, Homo sapiens
aatataggtgctataccattatacaactgacagtgcagta

SEQ ID NO: 56247 - DNA, 40 bp, Homo sapiens
tactgcactgtcagttgtataatggtatagcacctatatt

SEQ ID NO: 56248 - DNA, 40 bp, Homo sapiens
atataggtgctataccattatacaactgacagtgcagtag

SEQ ID NO: 56249 - DNA, 40 bp, Homo sapiens
ctactgcactgtcagttgtataatggtatagcacctatat

SEQ ID NO: 56250 - DNA, 40 bp, Homo sapiens
tataggtgctataccattatacaactgacagtgcagtagg

SEQ ID NO: 56251 - DNA, 40 bp, Homo sapiens
cctactgcactgtcagttgtataatggtatagcacctata

SEQ ID NO: 56252 - DNA, 40 bp, Homo sapiens
ataggtgctataccattatacaactgacagtgcagtaggt

SEQ ID NO: 56253 - DNA, 40 bp, Homo sapiens
acctactgcactgtcagttgtataatggtatagcacctat

SEQ ID NO: 56254 - DNA, 40 bp, Homo sapiens
taggtgctataccattatacaactgacagtgcagtaggtt

SEQ ID NO: 56255 - DNA, 40 bp, Homo sapiens
aacctactgcactgtcagttgtataatggtatagcaccta

SEQ ID NO: 56256 - DNA, 40 bp, Homo sapiens
aggtgctataccattatacaactgacagtgcagtaggttt

SEQ ID NO: 56257 - DNA, 40 bp, Homo sapiens
aaacctactgcactgtcagttgtataatggtatagcacct

SEQ ID NO: 56258 - DNA, 40 bp, Homo sapiens
ggtgctataccattatacaactgacagtgcagtaggtttg

SEQ ID NO: 56259 - DNA, 40 bp, Homo sapiens
caaacctactgcactgtcagttgtataatggtatagcacc

SEQ ID NO: 56260 - DNA, 40 bp, Homo sapiens
gtgctataccattatacaactgacagtgcagtaggtttgt

SEQ ID NO: 56261 - DNA, 40 bp, Homo sapiens
acaaacctactgcactgtcagttgtataatggtatagcac

SEQ ID NO: 56262 - DNA, 40 bp, Homo sapiens
tgctataccattatacaactgacagtgcagtaggtttgtt

SEQ ID NO: 56263 - DNA, 40 bp, Homo sapiens
aacaaacctactgcactgtcagttgtataatggtatagca

SEQ ID NO: 56264 - DNA, 40 bp, Homo sapiens
gctataccattatacaactgacagtgcagtaggtttgttt

SEQ ID NO: 56265 - DNA, 40 bp, Homo sapiens
aaacaaacctactgcactgtcagttgtataatggtatagc

SEQ ID NO: 56266 - DNA, 40 bp, Homo sapiens
ctataccattatacaactgacagtgcagtaggtttgttta

SEQ ID NO: 56267 - DNA, 40 bp, Homo sapiens
taaacaaacctactgcactgtcagttgtataatggtatag

SEQ ID NO: 56268 - DNA, 40 bp, Homo sapiens
tataccattatacaactgacagtgcagtaggtttgtttac

SEQ ID NO: 56269 - DNA, 40 bp, Homo sapiens
gtaaacaaacctactgcactgtcagttgtataatggtata

SEQ ID NO: 56270 - DNA, 40 bp, Homo sapiens
ataccattatacaactgacagtgcagtaggtttgtttaca

SEQ ID NO: 56271 - DNA, 40 bp, Homo sapiens
tgtaaacaaacctactgcactgtcagttgtataatggtat

SEQ ID NO: 56272 - DNA, 40 bp, Homo sapiens
taccattatacaactgacagtgcagtaggtttgtttacac

SEQ ID NO: 56273 - DNA, 40 bp, Homo sapiens
gtgtaaacaaacctactgcactgtcagttgtataatggta

SEQ ID NO: 56274 - DNA, 40 bp, Homo sapiens
accattatacaactgacagtgcagtaggtttgtttacacc

SEQ ID NO: 56275 - DNA, 40 bp, Homo sapiens
ggtgtaaacaaacctactgcactgtcagttgtataatggt

SEQ ID NO: 56276 - DNA, 40 bp, Homo sapiens
ccattatacaactgacagtgcagtaggtttgtttacacca

SEQ ID NO: 56277 - DNA, 40 bp, Homo sapiens
tggtgtaaacaaacctactgcactgtcagttgtataatgg

SEQ ID NO: 56278 - DNA, 40 bp, Homo sapiens
cattatacaactgacagtgcagtaggtttgtttacaccag

SEQ ID NO: 56279 - DNA, 40 bp, Homo sapiens
ctggtgtaaacaaacctactgcactgtcagttgtataatg

SEQ ID NO: 56280 - DNA, 40 bp, Homo sapiens
attatacaactgacagtgcagtaggtttgtttacaccagc

SEQ ID NO: 56281 - DNA, 40 bp, Homo sapiens
gctggtgtaaacaaacctactgcactgtcagttgtataat

SEQ ID NO: 56282 - DNA, 40 bp, Homo sapiens
ttatacaactgacagtgcagtaggtttgtttacaccagca

SEQ ID NO: 56283 - DNA, 40 bp, Homo sapiens
tgctggtgtaaacaaacctactgcactgtcagttgtataa

SEQ ID NO: 56284 - DNA, 40 bp, Homo sapiens
tatacaactgacagtgcagtaggtttgtttacaccagcat

SEQ ID NO: 56285 - DNA, 40 bp, Homo sapiens
atgctggtgtaaacaaacctactgcactgtcagttgtata

SEQ ID NO: 56286 - DNA, 40 bp, Homo sapiens
atacaactgacagtgcagtaggtttgtttacaccagcatc

SEQ ID NO: 56287 - DNA, 40 bp, Homo sapiens
gatgctggtgtaaacaaacctactgcactgtcagttgtat

SEQ ID NO: 56288 - DNA, 40 bp, Homo sapiens
tacaactgacagtgcagtaggtttgtttacaccagcatca

SEQ ID NO: 56289 - DNA, 40 bp, Homo sapiens
tgatgctggtgtaaacaaacctactgcactgtcagttgta

SEQ ID NO: 56290 - DNA, 40 bp, Homo sapiens
acaactgacagtgcagtaggtttgtttacaccagcatcac

SEQ ID NO: 56291 - DNA, 40 bp, Homo sapiens
gtgatgctggtgtaaacaaacctactgcactgtcagttgt

SEQ ID NO: 56292 - DNA, 40 bp, Homo sapiens
caactgacagtgcagtaggtttgtttacaccagcatcacc

SEQ ID NO: 56293 - DNA, 40 bp, Homo sapiens
ggtgatgctggtgtaaacaaacctactgcactgtcagttg

SEQ ID NO: 56294 - DNA, 40 bp, Homo sapiens
aactgacagtgcagtaggtttgtttacaccagcatcacca

SEQ ID NO: 56295 - DNA, 40 bp, Homo sapiens
tggtgatgctggtgtaaacaaacctactgcactgtcagtt

SEQ ID NO: 56296 - DNA, 40 bp, Homo sapiens
actgacagtgcagtaggtttgtttacaccagcatcaccac

SEQ ID NO: 56297 - DNA, 40 bp, Homo sapiens
gtggtgatgctggtgtaaacaaacctactgcactgtcagt

SEQ ID NO: 56298 - DNA, 40 bp, Homo sapiens
ctgacagtgcagtaggtttgtttacaccagcatcaccaca

SEQ ID NO: 56299 - DNA, 40 bp, Homo sapiens
tgtggtgatgctggtgtaaacaaacctactgcactgtcag

SEQ ID NO: 56300 - DNA, 40 bp, Homo sapiens
tgacagtgcagtaggtttgtttacaccagcatcaccacaa

SEQ ID NO: 56301 - DNA, 40 bp, Homo sapiens
ttgtggtgatgctggtgtaaacaaacctactgcactgtca

SEQ ID NO: 56302 - DNA, 40 bp, Homo sapiens
gacagtgcagtaggtttgtttacaccagcatcaccacaaa

SEQ ID NO: 56303 - DNA, 40 bp, Homo sapiens
tttgtggtgatgctggtgtaaacaaacctactgcactgtc

SEQ ID NO: 56304 - DNA, 40 bp, Homo sapiens
acagtgcagtaggtttgtttacaccagcatcaccacaaac

SEQ ID NO: 56305 - DNA, 40 bp, Homo sapiens
gtttgtggtgatgctggtgtaaacaaacctactgcactgt

SEQ ID NO: 56306 - DNA, 40 bp, Homo sapiens
cagtgcagtaggtttgtttacaccagcatcaccacaaaca

SEQ ID NO: 56307 - DNA, 40 bp, Homo sapiens
tgtttgtggtgatgctggtgtaaacaaacctactgcactg

SEQ ID NO: 56308 - DNA, 40 bp, Homo sapiens
agtgcagtaggtttgtttacaccagcatcaccacaaacac

SEQ ID NO: 56309 - DNA, 40 bp, Homo sapiens
gtgtttgtggtgatgctggtgtaaacaaacctactgcact

SEQ ID NO: 56310 - DNA, 40 bp, Homo sapiens
gtgcagtaggtttgtttacaccagcatcaccacaaacacg

SEQ ID NO: 56311 - DNA, 40 bp, Homo sapiens
cgtgtttgtggtgatgctggtgtaaacaaacctactgcac

SEQ ID NO: 56312 - DNA, 40 bp, Homo sapiens
tgcagtaggtttgtttacaccagcatcaccacaaacacgt

SEQ ID NO: 56313 - DNA, 40 bp, Homo sapiens
acgtgtttgtggtgatgctggtgtaaacaaacctactgca

SEQ ID NO: 56314 - DNA, 40 bp, Homo sapiens
gcagtaggtttgtttacaccagcatcaccacaaacacgtg

SEQ ID NO: 56315 - DNA, 40 bp, Homo sapiens
cacgtgtttgtggtgatgctggtgtaaacaaacctactgc

SEQ ID NO: 56316 - DNA, 40 bp, Homo sapiens
cagtaggtttgtttacaccagcatcaccacaaacacgtga

SEQ ID NO: 56317 - DNA, 40 bp, Homo sapiens
tcacgtgtttgtggtgatgctggtgtaaacaaacctactg

SEQ ID NO: 56318 - DNA, 40 bp, Homo sapiens
agtaggtttgtttacaccagcatcaccacaaacacgtgag

SEQ ID NO: 56319 - DNA, 40 bp, Homo sapiens
ctcacgtgtttgtggtgatgctggtgtaaacaaacctact

SEQ ID NO: 56320 - DNA, 40 bp, Homo sapiens
gtaggtttgtttacaccagcatcaccacaaacacgtgagc

SEQ ID NO: 56321 - DNA, 40 bp, Homo sapiens
gctcacgtgtttgtggtgatgctggtgtaaacaaacctac

SEQ ID NO: 56322 - DNA, 40 bp, Homo sapiens
taggtttgtttacaccagcatcaccacaaacacgtgagca

SEQ ID NO: 56323 - DNA, 40 bp, Homo sapiens
tgctcacgtgtttgtggtgatgctggtgtaaacaaaccta

SEQ ID NO: 56324 - DNA, 40 bp, Homo sapiens
aggtttgtttacaccagcatcaccacaaacacgtgagcaa

SEQ ID NO: 56325 - DNA, 40 bp, Homo sapiens
ttgctcacgtgtttgtggtgatgctggtgtaaacaaacct

SEQ ID NO: 56326 - DNA, 40 bp, Homo sapiens
ggtttgtttacaccagcatcaccacaaacacgtgagcaat

SEQ ID NO: 56327 - DNA, 40 bp, Homo sapiens
attgctcacgtgtttgtggtgatgctggtgtaaacaaacc

SEQ ID NO: 56328 - DNA, 40 bp, Homo sapiens
gtttgtttacaccagcatcaccacaaacacgtgagcaatg

SEQ ID NO: 56329 - DNA, 40 bp, Homo sapiens
cattgctcacgtgtttgtggtgatgctggtgtaaacaaac

SEQ ID NO: 56330 - DNA, 40 bp, Homo sapiens
tttgtttacaccagcatcaccacaaacacgtgagcaatgt

SEQ ID NO: 56331 - DNA, 40 bp, Homo sapiens
acattgctcacgtgtttgtggtgatgctggtgtaaacaaa

SEQ ID NO: 56332 - DNA, 40 bp, Homo sapiens
ttgtttacaccagcatcaccacaaacacgtgagcaatgtg

SEQ ID NO: 56333 - DNA, 40 bp, Homo sapiens
cacattgctcacgtgtttgtggtgatgctggtgtaaacaa

SEQ ID NO: 56334 - DNA, 40 bp, Homo sapiens
tgtttacaccagcatcaccacaaacacgtgagcaatgtgt

SEQ ID NO: 56335 - DNA, 40 bp, Homo sapiens
acacattgctcacgtgtttgtggtgatgctggtgtaaaca

SEQ ID NO: 56336 - DNA, 40 bp, Homo sapiens
gtttacaccagcatcaccacaaacacgtgagcaatgtgtc

SEQ ID NO: 56337 - DNA, 40 bp, Homo sapiens
gacacattgctcacgtgtttgtggtgatgctggtgtaaac

SEQ ID NO: 56338 - DNA, 40 bp, Homo sapiens
tttacaccagcatcaccacaaacacgtgagcaatgtgtcg

SEQ ID NO: 56339 - DNA, 40 bp, Homo sapiens
cgacacattgctcacgtgtttgtggtgatgctggtgtaaa

SEQ ID NO: 56340 - DNA, 40 bp, Homo sapiens
ttacaccagcatcaccacaaacacgtgagcaatgtgtcgt

SEQ ID NO: 56341 - DNA, 40 bp, Homo sapiens
acgacacattgctcacgtgtttgtggtgatgctggtgtaa

SEQ ID NO: 56342 - DNA, 40 bp, Homo sapiens
tacaccagcatcaccacaaacacgtgagcaatgtgtcgta

SEQ ID NO: 56343 - DNA, 40 bp, Homo sapiens
tacgacacattgctcacgtgtttgtggtgatgctggtgta

SEQ ID NO: 56344 - DNA, 40 bp, Homo sapiens
acaccagcatcaccacaaacacgtgagcaatgtgtcgtac

SEQ ID NO: 56345 - DNA, 40 bp, Homo sapiens
gtacgacacattgctcacgtgtttgtggtgatgctggtgt

SEQ ID NO: 56346 - DNA, 40 bp, Homo sapiens
caccagcatcaccacaaacacgtgagcaatgtgtcgtact

SEQ ID NO: 56347 - DNA, 40 bp, Homo sapiens
agtacgacacattgctcacgtgtttgtggtgatgctggtg

SEQ ID NO: 56348 - DNA, 40 bp, Homo sapiens
accagcatcaccacaaacacgtgagcaatgtgtcgtacta

SEQ ID NO: 56349 - DNA, 40 bp, Homo sapiens
tagtacgacacattgctcacgtgtttgtggtgatgctggt

SEQ ID NO: 56350 - DNA, 40 bp, Homo sapiens
ccagcatcaccacaaacacgtgagcaatgtgtcgtactac

SEQ ID NO: 56351 - DNA, 40 bp, Homo sapiens
gtagtacgacacattgctcacgtgtttgtggtgatgctgg

SEQ ID NO: 56352 - DNA, 40 bp, Homo sapiens
cagcatcaccacaaacacgtgagcaatgtgtcgtactaca

SEQ ID NO: 56353 - DNA, 40 bp, Homo sapiens
tgtagtacgacacattgctcacgtgtttgtggtgatgctg

SEQ ID NO: 56354 - DNA, 40 bp, Homo sapiens
agcatcaccacaaacacgtgagcaatgtgtcgtactacag

SEQ ID NO: 56355 - DNA, 40 bp, Homo sapiens
ctgtagtacgacacattgctcacgtgtttgtggtgatgct

SEQ ID NO: 56356 - DNA, 40 bp, Homo sapiens
gcatcaccacaaacacgtgagcaatgtgtcgtactacagt

SEQ ID NO: 56357 - DNA, 40 bp, Homo sapiens
actgtagtacgacacattgctcacgtgtttgtggtgatgc

SEQ ID NO: 56358 - DNA, 40 bp, Homo sapiens
catcaccacaaacacgtgagcaatgtgtcgtactacagtg

SEQ ID NO: 56359 - DNA, 40 bp, Homo sapiens
cactgtagtacgacacattgctcacgtgtttgtggtgatg

SEQ ID NO: 56360 - DNA, 40 bp, Homo sapiens
atcaccacaaacacgtgagcaatgtgtcgtactacagtgt

SEQ ID NO: 56361 - DNA, 40 bp, Homo sapiens
acactgtagtacgacacattgctcacgtgtttgtggtgat

SEQ ID NO: 56362 - DNA, 40 bp, Homo sapiens
tcaccacaaacacgtgagcaatgtgtcgtactacagtgtt

SEQ ID NO: 56363 - DNA, 40 bp, Homo sapiens
aacactgtagtacgacacattgctcacgtgtttgtggtga

SEQ ID NO: 56364 - DNA, 40 bp, Homo sapiens
caccacaaacacgtgagcaatgtgtcgtactacagtgtta

SEQ ID NO: 56365 - DNA, 40 bp, Homo sapiens
taacactgtagtacgacacattgctcacgtgtttgtggtg

SEQ ID NO: 56366 - DNA, 40 bp, Homo sapiens
accacaaacacgtgagcaatgtgtcgtactacagtgttag

SEQ ID NO: 56367 - DNA, 40 bp, Homo sapiens
ctaacactgtagtacgacacattgctcacgtgtttgtggt

SEQ ID NO: 56368 - DNA, 40 bp, Homo sapiens
ccacaaacacgtgagcaatgtgtcgtactacagtgttagg

SEQ ID NO: 56369 - DNA, 40 bp, Homo sapiens
cctaacactgtagtacgacacattgctcacgtgtttgtgg

SEQ ID NO: 56370 - DNA, 40 bp, Homo sapiens
cacaaacacgtgagcaatgtgtcgtactacagtgttagga

SEQ ID NO: 56371 - DNA, 40 bp, Homo sapiens
tcctaacactgtagtacgacacattgctcacgtgtttgtg

SEQ ID NO: 56372 - DNA, 40 bp, Homo sapiens
acaaacacgtgagcaatgtgtcgtactacagtgttaggat

SEQ ID NO: 56373 - DNA, 40 bp, Homo sapiens
atcctaacactgtagtacgacacattgctcacgtgtttgt

SEQ ID NO: 56374 - DNA, 40 bp, Homo sapiens
caaacacgtgagcaatgtgtcgtactacagtgttaggatg

SEQ ID NO: 56375 - DNA, 40 bp, Homo sapiens
catcctaacactgtagtacgacacattgctcacgtgtttg

SEQ ID NO: 56376 - DNA, 40 bp, Homo sapiens
aaacacgtgagcaatgtgtcgtactacagtgttaggatgg

SEQ ID NO: 56377 - DNA, 40 bp, Homo sapiens
ccatcctaacactgtagtacgacacattgctcacgtgttt

SEQ ID NO: 56378 - DNA, 40 bp, Homo sapiens
aacacgtgagcaatgtgtcgtactacagtgttaggatggc

SEQ ID NO: 56379 - DNA, 40 bp, Homo sapiens
gccatcctaacactgtagtacgacacattgctcacgtgtt

SEQ ID NO: 56380 - DNA, 40 bp, Homo sapiens
acacgtgagcaatgtgtcgtactacagtgttaggatggct

SEQ ID NO: 56381 - DNA, 40 bp, Homo sapiens
agccatcctaacactgtagtacgacacattgctcacgtgt

SEQ ID NO: 56382 - DNA, 40 bp, Homo sapiens
cacgtgagcaatgtgtcgtactacagtgttaggatggcta

SEQ ID NO: 56383 - DNA, 40 bp, Homo sapiens
tagccatcctaacactgtagtacgacacattgctcacgtg

SEQ ID NO: 56384 - DNA, 40 bp, Homo sapiens
acgtgagcaatgtgtcgtactacagtgttaggatggctat

SEQ ID NO: 56385 - DNA, 40 bp, Homo sapiens
atagccatcctaacactgtagtacgacacattgctcacgt

SEQ ID NO: 56386 - DNA, 40 bp, Homo sapiens
cgtgagcaatgtgtcgtactacagtgttaggatggctata

SEQ ID NO: 56387 - DNA, 40 bp, Homo sapiens
tatagccatcctaacactgtagtacgacacattgctcacg

SEQ ID NO: 56388 - DNA, 40 bp, Homo sapiens
gtgagcaatgtgtcgtactacagtgttaggatggctataa

SEQ ID NO: 56389 - DNA, 40 bp, Homo sapiens
ttatagccatcctaacactgtagtacgacacattgctcac

SEQ ID NO: 56390 - DNA, 40 bp, Homo sapiens
tgagcaatgtgtcgtactacagtgttaggatggctataac

SEQ ID NO: 56391 - DNA, 40 bp, Homo sapiens
gttatagccatcctaacactgtagtacgacacattgctca

SEQ ID NO: 56392 - DNA, 40 bp, Homo sapiens
gagcaatgtgtcgtactacagtgttaggatggctataaca

SEQ ID NO: 56393 - DNA, 40 bp, Homo sapiens
tgttatagccatcctaacactgtagtacgacacattgctc

SEQ ID NO: 56394 - DNA, 40 bp, Homo sapiens
agcaatgtgtcgtactacagtgttaggatggctataacat

SEQ ID NO: 56395 - DNA, 40 bp, Homo sapiens
atgttatagccatcctaacactgtagtacgacacattgct

SEQ ID NO: 56396 - DNA, 40 bp, Homo sapiens
gcaatgtgtcgtactacagtgttaggatggctataacatc

SEQ ID NO: 56397 - DNA, 40 bp, Homo sapiens
gatgttatagccatcctaacactgtagtacgacacattgc

SEQ ID NO: 56398 - DNA, 40 bp, Homo sapiens
caatgtgtcgtactacagtgttaggatggctataacatca

SEQ ID NO: 56399 - DNA, 40 bp, Homo sapiens
tgatgttatagccatcctaacactgtagtacgacacattg

SEQ ID NO: 56400 - DNA, 40 bp, Homo sapiens
aatgtgtcgtactacagtgttaggatggctataacatcac

SEQ ID NO: 56401 - DNA, 40 bp, Homo sapiens
gtgatgttatagccatcctaacactgtagtacgacacatt

SEQ ID NO: 56402 - DNA, 40 bp, Homo sapiens
atgtgtcgtactacagtgttaggatggctataacatcact

SEQ ID NO: 56403 - DNA, 40 bp, Homo sapiens
agtgatgttatagccatcctaacactgtagtacgacacat

SEQ ID NO: 56404 - DNA, 40 bp, Homo sapiens
tgtgtcgtactacagtgttaggatggctataacatcacta

SEQ ID NO: 56405 - DNA, 40 bp, Homo sapiens
tagtgatgttatagccatcctaacactgtagtacgacaca

SEQ ID NO: 56406 - DNA, 40 bp, Homo sapiens
gtgtcgtactacagtgttaggatggctataacatcactaa

SEQ ID NO: 56407 - DNA, 40 bp, Homo sapiens
ttagtgatgttatagccatcctaacactgtagtacgacac

SEQ ID NO: 56408 - DNA, 40 bp, Homo sapiens
tgtcgtactacagtgttaggatggctataacatcactaag

SEQ ID NO: 56409 - DNA, 40 bp, Homo sapiens
cttagtgatgttatagccatcctaacactgtagtacgaca

SEQ ID NO: 56410 - DNA, 40 bp, Homo sapiens
gtcgtactacagtgttaggatggctataacatcactaagc

SEQ ID NO: 56411 - DNA, 40 bp, Homo sapiens
gcttagtgatgttatagccatcctaacactgtagtacgac

SEQ ID NO: 56412 - DNA, 40 bp, Homo sapiens
tcgtactacagtgttaggatggctataacatcactaagca

SEQ ID NO: 56413 - DNA, 40 bp, Homo sapiens
tgcttagtgatgttatagccatcctaacactgtagtacga

SEQ ID NO: 56414 - DNA, 40 bp, Homo sapiens
cgtactacagtgttaggatggctataacatcactaagcaa

SEQ ID NO: 56415 - DNA, 40 bp, Homo sapiens
ttgcttagtgatgttatagccatcctaacactgtagtacg

SEQ ID NO: 56416 - DNA, 40 bp, Homo sapiens
gtactacagtgttaggatggctataacatcactaagcaat

SEQ ID NO: 56417 - DNA, 40 bp, Homo sapiens
attgcttagtgatgttatagccatcctaacactgtagtac

SEQ ID NO: 56418 - DNA, 40 bp, Homo sapiens
tactacagtgttaggatggctataacatcactaagcaata

SEQ ID NO: 56419 - DNA, 40 bp, Homo sapiens
tattgcttagtgatgttatagccatcctaacactgtagta

SEQ ID NO: 56420 - DNA, 40 bp, Homo sapiens
actacagtgttaggatggctataacatcactaagcaatag

SEQ ID NO: 56421 - DNA, 40 bp, Homo sapiens
ctattgcttagtgatgttatagccatcctaacactgtagt

SEQ ID NO: 56422 - DNA, 40 bp, Homo sapiens
ctacagtgttaggatggctataacatcactaagcaatagg

SEQ ID NO: 56423 - DNA, 40 bp, Homo sapiens
cctattgcttagtgatgttatagccatcctaacactgtag

SEQ ID NO: 56424 - DNA, 40 bp, Homo sapiens
tacagtgttaggatggctataacatcactaagcaatagga

SEQ ID NO: 56425 - DNA, 40 bp, Homo sapiens
tcctattgcttagtgatgttatagccatcctaacactgta

SEQ ID NO: 56426 - DNA, 40 bp, Homo sapiens
acagtgttaggatggctataacatcactaagcaataggaa

SEQ ID NO: 56427 - DNA, 40 bp, Homo sapiens
ttcctattgcttagtgatgttatagccatcctaacactgt

SEQ ID NO: 56428 - DNA, 40 bp, Homo sapiens
cagtgttaggatggctataacatcactaagcaataggaac

SEQ ID NO: 56429 - DNA, 40 bp, Homo sapiens
gttcctattgcttagtgatgttatagccatcctaacactg

SEQ ID NO: 56430 - DNA, 40 bp, Homo sapiens
agtgttaggatggctataacatcactaagcaataggaact

SEQ ID NO: 56431 - DNA, 40 bp, Homo sapiens
agttcctattgcttagtgatgttatagccatcctaacact

SEQ ID NO: 56432 - DNA, 40 bp, Homo sapiens
gtgttaggatggctataacatcactaagcaataggaactt

SEQ ID NO: 56433 - DNA, 40 bp, Homo sapiens
aagttcctattgcttagtgatgttatagccatcctaacac

SEQ ID NO: 56434 - DNA, 40 bp, Homo sapiens
tgttaggatggctataacatcactaagcaataggaacttt

SEQ ID NO: 56435 - DNA, 40 bp, Homo sapiens
aaagttcctattgcttagtgatgttatagccatcctaaca

SEQ ID NO: 56436 - DNA, 40 bp, Homo sapiens
gttaggatggctataacatcactaagcaataggaactttt

SEQ ID NO: 56437 - DNA, 40 bp, Homo sapiens
aaaagttcctattgcttagtgatgttatagccatcctaac

SEQ ID NO: 56438 - DNA, 40 bp, Homo sapiens
ttaggatggctataacatcactaagcaataggaactttta

SEQ ID NO: 56439 - DNA, 40 bp, Homo sapiens
taaaagttcctattgcttagtgatgttatagccatcctaa

SEQ ID NO: 56440 - DNA, 40 bp, Homo sapiens
taggatggctataacatcactaagcaataggaacttttaa

SEQ ID NO: 56441 - DNA, 40 bp, Homo sapiens
ttaaaagttcctattgcttagtgatgttatagccatccta

SEQ ID NO: 56442 - DNA, 40 bp, Homo sapiens
aggatggctataacatcactaagcaataggaacttttaaa

SEQ ID NO: 56443 - DNA, 40 bp, Homo sapiens
tttaaaagttcctattgcttagtgatgttatagccatcct

SEQ ID NO: 56444 - DNA, 40 bp, Homo sapiens
ggatggctataacatcactaagcaataggaacttttaaac

SEQ ID NO: 56445 - DNA, 40 bp, Homo sapiens
gtttaaaagttcctattgcttagtgatgttatagccatcc

SEQ ID NO: 56446 - DNA, 40 bp, Homo sapiens
gatggctataacatcactaagcaataggaacttttaaact

SEQ ID NO: 56447 - DNA, 40 bp, Homo sapiens
agtttaaaagttcctattgcttagtgatgttatagccatc

SEQ ID NO: 56448 - DNA, 40 bp, Homo sapiens
atggctataacatcactaagcaataggaacttttaaactc

SEQ ID NO: 56449 - DNA, 40 bp, Homo sapiens
gagtttaaaagttcctattgcttagtgatgttatagccat

SEQ ID NO: 56450 - DNA, 40 bp, Homo sapiens
tggctataacatcactaagcaataggaacttttaaactcc

SEQ ID NO: 56451 - DNA, 40 bp, Homo sapiens
ggagtttaaaagttcctattgcttagtgatgttatagcca

SEQ ID NO: 56452 - DNA, 40 bp, Homo sapiens
ggctataacatcactaagcaataggaacttttaaactcca

SEQ ID NO: 56453 - DNA, 40 bp, Homo sapiens
tggagtttaaaagttcctattgcttagtgatgttatagcc

SEQ ID NO: 56454 - DNA, 40 bp, Homo sapiens
gctataacatcactaagcaataggaacttttaaactccat

SEQ ID NO: 56455 - DNA, 40 bp, Homo sapiens
atggagtttaaaagttcctattgcttagtgatgttatagc

SEQ ID NO: 56456 - DNA, 40 bp, Homo sapiens
ctataacatcactaagcaataggaacttttaaactccatt

SEQ ID NO: 56457 - DNA, 40 bp, Homo sapiens
aatggagtttaaaagttcctattgcttagtgatgttatag

SEQ ID NO: 56458 - DNA, 40 bp, Homo sapiens
tataacatcactaagcaataggaacttttaaactccatta

SEQ ID NO: 56459 - DNA, 40 bp, Homo sapiens
taatggagtttaaaagttcctattgcttagtgatgttata

SEQ ID NO: 56460 - DNA, 40 bp, Homo sapiens
ataacatcactaagcaataggaacttttaaactccattat

SEQ ID NO: 56461 - DNA, 40 bp, Homo sapiens
ataatggagtttaaaagttcctattgcttagtgatgttat

SEQ ID NO: 56462 - DNA, 40 bp, Homo sapiens
taacatcactaagcaataggaacttttaaactccattata

SEQ ID NO: 56463 - DNA, 40 bp, Homo sapiens
tataatggagtttaaaagttcctattgcttagtgatgtta

SEQ ID NO: 56464 - DNA, 40 bp, Homo sapiens
aacatcactaagcaataggaacttttaaactccattataa

SEQ ID NO: 56465 - DNA, 40 bp, Homo sapiens
ttataatggagtttaaaagttcctattgcttagtgatgtt

SEQ ID NO: 56466 - DNA, 40 bp, Homo sapiens
acatcactaagcaataggaacttttaaactccattataat

SEQ ID NO: 56467 - DNA, 40 bp, Homo sapiens
attataatggagtttaaaagttcctattgcttagtgatgt

SEQ ID NO: 56468 - DNA, 40 bp, Homo sapiens
catcactaagcaataggaacttttaaactccattataatc

SEQ ID NO: 56469 - DNA, 40 bp, Homo sapiens
gattataatggagtttaaaagttcctattgcttagtgatg

SEQ ID NO: 56470 - DNA, 40 bp, Homo sapiens
atcactaagcaataggaacttttaaactccattataatct

SEQ ID NO: 56471 - DNA, 40 bp, Homo sapiens
agattataatggagtttaaaagttcctattgcttagtgat

SEQ ID NO: 56472 - DNA, 40 bp, Homo sapiens
tcactaagcaataggaacttttaaactccattataatctt

SEQ ID NO: 56473 - DNA, 40 bp, Homo sapiens
aagattataatggagtttaaaagttcctattgcttagtga

SEQ ID NO: 56474 - DNA, 40 bp, Homo sapiens
cactaagcaataggaacttttaaactccattataatctta

SEQ ID NO: 56475 - DNA, 40 bp, Homo sapiens
taagattataatggagtttaaaagttcctattgcttagtg

SEQ ID NO: 56476 - DNA, 40 bp, Homo sapiens
actaagcaataggaacttttaaactccattataatcttat

SEQ ID NO: 56477 - DNA, 40 bp, Homo sapiens
ataagattataatggagtttaaaagttcctattgcttagt

SEQ ID NO: 56478 - DNA, 40 bp, Homo sapiens
ctaagcaataggaacttttaaactccattataatcttatg

SEQ ID NO: 56479 - DNA, 40 bp, Homo sapiens
cataagattataatggagtttaaaagttcctattgcttag

SEQ ID NO: 56480 - DNA, 40 bp, Homo sapiens
taagcaataggaacttttaaactccattataatcttatgg

SEQ ID NO: 56481 - DNA, 40 bp, Homo sapiens
ccataagattataatggagtttaaaagttcctattgctta

SEQ ID NO: 56482 - DNA, 40 bp, Homo sapiens
aagcaataggaacttttaaactccattataatcttatggg

SEQ ID NO: 56483 - DNA, 40 bp, Homo sapiens
cccataagattataatggagtttaaaagttcctattgctt

SEQ ID NO: 56484 - DNA, 40 bp, Homo sapiens
agcaataggaacttttaaactccattataatcttatggga

SEQ ID NO: 56485 - DNA, 40 bp, Homo sapiens
tcccataagattataatggagtttaaaagttcctattgct

SEQ ID NO: 56486 - DNA, 40 bp, Homo sapiens
gcaataggaacttttaaactccattataatcttatgggac

SEQ ID NO: 56487 - DNA, 40 bp, Homo sapiens
gtcccataagattataatggagtttaaaagttcctattgc

SEQ ID NO: 56488 - DNA, 40 bp, Homo sapiens
caataggaacttttaaactccattataatcttatgggacc

SEQ ID NO: 56489 - DNA, 40 bp, Homo sapiens
ggtcccataagattataatggagtttaaaagttcctattg

SEQ ID NO: 56490 - DNA, 40 bp, Homo sapiens
aataggaacttttaaactccattataatcttatgggacca

SEQ ID NO: 56491 - DNA, 40 bp, Homo sapiens
tggtcccataagattataatggagtttaaaagttcctatt

SEQ ID NO: 56492 - DNA, 40 bp, Homo sapiens
ataggaacttttaaactccattataatcttatgggaccac

SEQ ID NO: 56493 - DNA, 40 bp, Homo sapiens
gtggtcccataagattataatggagtttaaaagttcctat

SEQ ID NO: 56494 - DNA, 40 bp, Homo sapiens
taggaacttttaaactccattataatcttatgggaccact

SEQ ID NO: 56495 - DNA, 40 bp, Homo sapiens
agtggtcccataagattataatggagtttaaaagttccta

SEQ ID NO: 56496 - DNA, 40 bp, Homo sapiens
aggaacttttaaactccattataatcttatgggaccacta

SEQ ID NO: 56497 - DNA, 40 bp, Homo sapiens
tagtggtcccataagattataatggagtttaaaagttcct

SEQ ID NO: 56498 - DNA, 40 bp, Homo sapiens
ggaacttttaaactccattataatcttatgggaccactat

SEQ ID NO: 56499 - DNA, 40 bp, Homo sapiens
atagtggtcccataagattataatggagtttaaaagttcc

SEQ ID NO: 56500 - DNA, 40 bp, Homo sapiens
gaacttttaaactccattataatcttatgggaccactatc

SEQ ID NO: 56501 - DNA, 40 bp, Homo sapiens
gatagtggtcccataagattataatggagtttaaaagttc

SEQ ID NO: 56502 - DNA, 40 bp, Homo sapiens
aacttttaaactccattataatcttatgggaccactatca

SEQ ID NO: 56503 - DNA, 40 bp, Homo sapiens
tgatagtggtcccataagattataatggagtttaaaagtt

SEQ ID NO: 56504 - DNA, 40 bp, Homo sapiens
acttttaaactccattataatcttatgggaccactatcac

SEQ ID NO: 56505 - DNA, 40 bp, Homo sapiens
gtgatagtggtcccataagattataatggagtttaaaagt

SEQ ID NO: 56506 - DNA, 40 bp, Homo sapiens
cttttaaactccattataatcttatgggaccactatcaca

SEQ ID NO: 56507 - DNA, 40 bp, Homo sapiens
tgtgatagtggtcccataagattataatggagtttaaaag

SEQ ID NO: 56508 - DNA, 40 bp, Homo sapiens
ttttaaactccattataatcttatgggaccactatcacat

SEQ ID NO: 56509 - DNA, 40 bp, Homo sapiens
atgtgatagtggtcccataagattataatggagtttaaaa

SEQ ID NO: 56510 - DNA, 40 bp, Homo sapiens
tttaaactccattataatcttatgggaccactatcacata

SEQ ID NO: 56511 - DNA, 40 bp, Homo sapiens
tatgtgatagtggtcccataagattataatggagtttaaa

SEQ ID NO: 56512 - DNA, 40 bp, Homo sapiens
ttaaactccattataatcttatgggaccactatcacatat

SEQ ID NO: 56513 - DNA, 40 bp, Homo sapiens
atatgtgatagtggtcccataagattataatggagtttaa

SEQ ID NO: 56514 - DNA, 40 bp, Homo sapiens
taaactccattataatcttatgggaccactatcacatatg

SEQ ID NO: 56515 - DNA, 40 bp, Homo sapiens
catatgtgatagtggtcccataagattataatggagttta

SEQ ID NO: 56516 - DNA, 40 bp, Homo sapiens
aaactccattataatcttatgggaccactatcacatatgc

SEQ ID NO: 56517 - DNA, 40 bp, Homo sapiens
gcatatgtgatagtggtcccataagattataatggagttt

SEQ ID NO: 56518 - DNA, 40 bp, Homo sapiens
aactccattataatcttatgggaccactatcacatatgca

SEQ ID NO: 56519 - DNA, 40 bp, Homo sapiens
tgcatatgtgatagtggtcccataagattataatggagtt

SEQ ID NO: 56520 - DNA, 40 bp, Homo sapiens
actccattataatcttatgggaccactatcacatatgcaa

SEQ ID NO: 56521 - DNA, 40 bp, Homo sapiens
ttgcatatgtgatagtggtcccataagattataatggagt

SEQ ID NO: 56522 - DNA, 40 bp, Homo sapiens
ctccattataatcttatgggaccactatcacatatgcaat

SEQ ID NO: 56523 - DNA, 40 bp, Homo sapiens
attgcatatgtgatagtggtcccataagattataatggag

SEQ ID NO: 56524 - DNA, 40 bp, Homo sapiens
tccattataatcttatgggaccactatcacatatgcaatc

SEQ ID NO: 56525 - DNA, 40 bp, Homo sapiens
gattgcatatgtgatagtggtcccataagattataatgga

SEQ ID NO: 56526 - DNA, 40 bp, Homo sapiens
ccattataatcttatgggaccactatcacatatgcaatct

SEQ ID NO: 56527 - DNA, 40 bp, Homo sapiens
agattgcatatgtgatagtggtcccataagattataatgg

SEQ ID NO: 56528 - DNA, 40 bp, Homo sapiens
cattataatcttatgggaccactatcacatatgcaatctc

SEQ ID NO: 56529 - DNA, 40 bp, Homo sapiens
gagattgcatatgtgatagtggtcccataagattataatg

SEQ ID NO: 56530 - DNA, 40 bp, Homo sapiens
attataatcttatgggaccactatcacatatgcaatctcc

SEQ ID NO: 56531 - DNA, 40 bp, Homo sapiens
ggagattgcatatgtgatagtggtcccataagattataat

SEQ ID NO: 56532 - DNA, 40 bp, Homo sapiens
ttataatcttatgggaccactatcacatatgcaatctcct

SEQ ID NO: 56533 - DNA, 40 bp, Homo sapiens
aggagattgcatatgtgatagtggtcccataagattataa

SEQ ID NO: 56534 - DNA, 40 bp, Homo sapiens
tataatcttatgggaccactatcacatatgcaatctcctg

SEQ ID NO: 56535 - DNA, 40 bp, Homo sapiens
caggagattgcatatgtgatagtggtcccataagattata

SEQ ID NO: 56536 - DNA, 40 bp, Homo sapiens
ataatcttatgggaccactatcacatatgcaatctcctgt

SEQ ID NO: 56537 - DNA, 40 bp, Homo sapiens
acaggagattgcatatgtgatagtggtcccataagattat

SEQ ID NO: 56538 - DNA, 40 bp, Homo sapiens
taatcttatgggaccactatcacatatgcaatctcctgtg

SEQ ID NO: 56539 - DNA, 40 bp, Homo sapiens
cacaggagattgcatatgtgatagtggtcccataagatta

SEQ ID NO: 56540 - DNA, 40 bp, Homo sapiens
aatcttatgggaccactatcacatatgcaatctcctgtgg

SEQ ID NO: 56541 - DNA, 40 bp, Homo sapiens
ccacaggagattgcatatgtgatagtggtcccataagatt

SEQ ID NO: 56542 - DNA, 40 bp, Homo sapiens
atcttatgggaccactatcacatatgcaatctcctgtgga

SEQ ID NO: 56543 - DNA, 40 bp, Homo sapiens
tccacaggagattgcatatgtgatagtggtcccataagat

SEQ ID NO: 56544 - DNA, 40 bp, Homo sapiens
tcttatgggaccactatcacatatgcaatctcctgtggac

SEQ ID NO: 56545 - DNA, 40 bp, Homo sapiens
gtccacaggagattgcatatgtgatagtggtcccataaga

SEQ ID NO: 56546 - DNA, 40 bp, Homo sapiens
cttatgggaccactatcacatatgcaatctcctgtggacc

SEQ ID NO: 56547 - DNA, 40 bp, Homo sapiens
ggtccacaggagattgcatatgtgatagtggtcccataag

SEQ ID NO: 56548 - DNA, 40 bp, Homo sapiens
ttatgggaccactatcacatatgcaatctcctgtggacca

SEQ ID NO: 56549 - DNA, 40 bp, Homo sapiens
tggtccacaggagattgcatatgtgatagtggtcccataa

SEQ ID NO: 56550 - DNA, 40 bp, Homo sapiens
tatgggaccactatcacatatgcaatctcctgtggaccaa

SEQ ID NO: 56551 - DNA, 40 bp, Homo sapiens
ttggtccacaggagattgcatatgtgatagtggtcccata

SEQ ID NO: 56552 - DNA, 40 bp, Homo sapiens
atgggaccactatcacatatgcaatctcctgtggaccaaa

SEQ ID NO: 56553 - DNA, 40 bp, Homo sapiens
tttggtccacaggagattgcatatgtgatagtggtcccat

SEQ ID NO: 56554 - DNA, 40 bp, Homo sapiens
tgggaccactatcacatatgcaatctcctgtggaccaaaa

SEQ ID NO: 56555 - DNA, 40 bp, Homo sapiens
ttttggtccacaggagattgcatatgtgatagtggtccca

SEQ ID NO: 56556 - DNA, 40 bp, Homo sapiens
gggaccactatcacatatgcaatctcctgtggaccaaaat

SEQ ID NO: 56557 - DNA, 40 bp, Homo sapiens
attttggtccacaggagattgcatatgtgatagtggtccc

SEQ ID NO: 56558 - DNA, 40 bp, Homo sapiens
ggaccactatcacatatgcaatctcctgtggaccaaaatg

SEQ ID NO: 56559 - DNA, 40 bp, Homo sapiens
cattttggtccacaggagattgcatatgtgatagtggtcc

SEQ ID NO: 56560 - DNA, 40 bp, Homo sapiens
gaccactatcacatatgcaatctcctgtggaccaaaatgt

SEQ ID NO: 56561 - DNA, 40 bp, Homo sapiens
acattttggtccacaggagattgcatatgtgatagtggtc

SEQ ID NO: 56562 - DNA, 40 bp, Homo sapiens
accactatcacatatgcaatctcctgtggaccaaaatgtc

SEQ ID NO: 56563 - DNA, 40 bp, Homo sapiens
gacattttggtccacaggagattgcatatgtgatagtggt

SEQ ID NO: 56564 - DNA, 40 bp, Homo sapiens
ccactatcacatatgcaatctcctgtggaccaaaatgtca

SEQ ID NO: 56565 - DNA, 40 bp, Homo sapiens
tgacattttggtccacaggagattgcatatgtgatagtgg

SEQ ID NO: 56566 - DNA, 40 bp, Homo sapiens
cactatcacatatgcaatctcctgtggaccaaaatgtcat

SEQ ID NO: 56567 - DNA, 40 bp, Homo sapiens
atgacattttggtccacaggagattgcatatgtgatagtg

SEQ ID NO: 56568 - DNA, 40 bp, Homo sapiens
actatcacatatgcaatctcctgtggaccaaaatgtcatt

SEQ ID NO: 56569 - DNA, 40 bp, Homo sapiens
aatgacattttggtccacaggagattgcatatgtgatagt

SEQ ID NO: 56570 - DNA, 40 bp, Homo sapiens
ctatcacatatgcaatctcctgtggaccaaaatgtcatta

SEQ ID NO: 56571 - DNA, 40 bp, Homo sapiens
taatgacattttggtccacaggagattgcatatgtgatag

SEQ ID NO: 56572 - DNA, 40 bp, Homo sapiens
tatcacatatgcaatctcctgtggaccaaaatgtcattat

SEQ ID NO: 56573 - DNA, 40 bp, Homo sapiens
ataatgacattttggtccacaggagattgcatatgtgata

SEQ ID NO: 56574 - DNA, 40 bp, Homo sapiens
atcacatatgcaatctcctgtggaccaaaatgtcattatg

SEQ ID NO: 56575 - DNA, 40 bp, Homo sapiens
cataatgacattttggtccacaggagattgcatatgtgat

SEQ ID NO: 56576 - DNA, 40 bp, Homo sapiens
tcacatatgcaatctcctgtggaccaaaatgtcattatgt

SEQ ID NO: 56577 - DNA, 40 bp, Homo sapiens
acataatgacattttggtccacaggagattgcatatgtga

SEQ ID NO: 56578 - DNA, 40 bp, Homo sapiens
cacatatgcaatctcctgtggaccaaaatgtcattatgtg

SEQ ID NO: 56579 - DNA, 40 bp, Homo sapiens
cacataatgacattttggtccacaggagattgcatatgtg

SEQ ID NO: 56580 - DNA, 40 bp, Homo sapiens
acatatgcaatctcctgtggaccaaaatgtcattatgtgg

SEQ ID NO: 56581 - DNA, 40 bp, Homo sapiens
ccacataatgacattttggtccacaggagattgcatatgt

SEQ ID NO: 56582 - DNA, 40 bp, Homo sapiens
catatgcaatctcctgtggaccaaaatgtcattatgtggt

SEQ ID NO: 56583 - DNA, 40 bp, Homo sapiens
accacataatgacattttggtccacaggagattgcatatg

SEQ ID NO: 56584 - DNA, 40 bp, Homo sapiens
atatgcaatctcctgtggaccaaaatgtcattatgtggta

SEQ ID NO: 56585 - DNA, 40 bp, Homo sapiens
taccacataatgacattttggtccacaggagattgcatat

SEQ ID NO: 56586 - DNA, 40 bp, Homo sapiens
tatgcaatctcctgtggaccaaaatgtcattatgtggtac

SEQ ID NO: 56587 - DNA, 40 bp, Homo sapiens
gtaccacataatgacattttggtccacaggagattgcata

SEQ ID NO: 56588 - DNA, 40 bp, Homo sapiens
atgcaatctcctgtggaccaaaatgtcattatgtggtaca

SEQ ID NO: 56589 - DNA, 40 bp, Homo sapiens
tgtaccacataatgacattttggtccacaggagattgcat

SEQ ID NO: 56590 - DNA, 40 bp, Homo sapiens
tgcaatctcctgtggaccaaaatgtcattatgtggtacat

SEQ ID NO: 56591 - DNA, 40 bp, Homo sapiens
atgtaccacataatgacattttggtccacaggagattgca

SEQ ID NO: 56592 - DNA, 40 bp, Homo sapiens
gcaatctcctgtggaccaaaatgtcattatgtggtacatg

SEQ ID NO: 56593 - DNA, 40 bp, Homo sapiens
catgtaccacataatgacattttggtccacaggagattgc

SEQ ID NO: 56594 - DNA, 40 bp, Homo sapiens
caatctcctgtggaccaaaatgtcattatgtggtacatga

SEQ ID NO: 56595 - DNA, 40 bp, Homo sapiens
tcatgtaccacataatgacattttggtccacaggagattg

SEQ ID NO: 56596 - DNA, 40 bp, Homo sapiens
aatctcctgtggaccaaaatgtcattatgtggtacatgac

SEQ ID NO: 56597 - DNA, 40 bp, Homo sapiens
gtcatgtaccacataatgacattttggtccacaggagatt

SEQ ID NO: 56598 - DNA, 40 bp, Homo sapiens
atctcctgtggaccaaaatgtcattatgtggtacatgact

SEQ ID NO: 56599 - DNA, 40 bp, Homo sapiens
agtcatgtaccacataatgacattttggtccacaggagat

SEQ ID NO: 56600 - DNA, 40 bp, Homo sapiens
tctcctgtggaccaaaatgtcattatgtggtacatgactg

SEQ ID NO: 56601 - DNA, 40 bp, Homo sapiens
cagtcatgtaccacataatgacattttggtccacaggaga

SEQ ID NO: 56602 - DNA, 40 bp, Homo sapiens
ctcctgtggaccaaaatgtcattatgtggtacatgactgt

SEQ ID NO: 56603 - DNA, 40 bp, Homo sapiens
acagtcatgtaccacataatgacattttggtccacaggag

SEQ ID NO: 56604 - DNA, 40 bp, Homo sapiens
tcctgtggaccaaaatgtcattatgtggtacatgactgta

SEQ ID NO: 56605 - DNA, 40 bp, Homo sapiens
tacagtcatgtaccacataatgacattttggtccacagga

SEQ ID NO: 56606 - DNA, 40 bp, Homo sapiens
cctgtggaccaaaatgtcattatgtggtacatgactgtac

SEQ ID NO: 56607 - DNA, 40 bp, Homo sapiens
gtacagtcatgtaccacataatgacattttggtccacagg

SEQ ID NO: 56608 - DNA, 40 bp, Homo sapiens
ctgtggaccaaaatgtcattatgtggtacatgactgtact

SEQ ID NO: 56609 - DNA, 40 bp, Homo sapiens
agtacagtcatgtaccacataatgacattttggtccacag

SEQ ID NO: 56610 - DNA, 40 bp, Homo sapiens
tgtggaccaaaatgtcattatgtggtacatgactgtacta

SEQ ID NO: 56611 - DNA, 40 bp, Homo sapiens
tagtacagtcatgtaccacataatgacattttggtccaca

SEQ ID NO: 56612 - DNA, 40 bp, Homo sapiens
gtggaccaaaatgtcattatgtggtacatgactgtactaa

SEQ ID NO: 56613 - DNA, 40 bp, Homo sapiens
ttagtacagtcatgtaccacataatgacattttggtccac

SEQ ID NO: 56614 - DNA, 40 bp, Homo sapiens
tggaccaaaatgtcattatgtggtacatgactgtactaag

SEQ ID NO: 56615 - DNA, 40 bp, Homo sapiens
cttagtacagtcatgtaccacataatgacattttggtcca

SEQ ID NO: 56616 - DNA, 40 bp, Homo sapiens
ggaccaaaatgtcattatgtggtacatgactgtactaaga

SEQ ID NO: 56617 - DNA, 40 bp, Homo sapiens
tcttagtacagtcatgtaccacataatgacattttggtcc

SEQ ID NO: 56618 - DNA, 40 bp, Homo sapiens
gaccaaaatgtcattatgtggtacatgactgtactaagaa

SEQ ID NO: 56619 - DNA, 40 bp, Homo sapiens
ttcttagtacagtcatgtaccacataatgacattttggtc

SEQ ID NO: 56620 - DNA, 40 bp, Homo sapiens
accaaaatgtcattatgtggtacatgactgtactaagaaa

SEQ ID NO: 56621 - DNA, 40 bp, Homo sapiens
tttcttagtacagtcatgtaccacataatgacattttggt

SEQ ID NO: 56622 - DNA, 40 bp, Homo sapiens
ccaaaatgtcattatgtggtacatgactgtactaagaaat

SEQ ID NO: 56623 - DNA, 40 bp, Homo sapiens
atttcttagtacagtcatgtaccacataatgacattttgg

SEQ ID NO: 56624 - DNA, 40 bp, Homo sapiens
caaaatgtcattatgtggtacatgactgtactaagaaatt

SEQ ID NO: 56625 - DNA, 40 bp, Homo sapiens
aatttcttagtacagtcatgtaccacataatgacattttg

SEQ ID NO: 56626 - DNA, 40 bp, Homo sapiens
aaaatgtcattatgtggtacatgactgtactaagaaattg

SEQ ID NO: 56627 - DNA, 40 bp, Homo sapiens
caatttcttagtacagtcatgtaccacataatgacatttt

SEQ ID NO: 56628 - DNA, 40 bp, Homo sapiens
aaatgtcattatgtggtacatgactgtactaagaaattga

SEQ ID NO: 56629 - DNA, 40 bp, Homo sapiens
tcaatttcttagtacagtcatgtaccacataatgacattt

SEQ ID NO: 56630 - DNA, 40 bp, Homo sapiens
aatgtcattatgtggtacatgactgtactaagaaattgat

SEQ ID NO: 56631 - DNA, 40 bp, Homo sapiens
atcaatttcttagtacagtcatgtaccacataatgacatt

SEQ ID NO: 56632 - DNA, 40 bp, Homo sapiens
atgtcattatgtggtacatgactgtactaagaaattgatc

SEQ ID NO: 56633 - DNA, 40 bp, Homo sapiens
gatcaatttcttagtacagtcatgtaccacataatgacat

SEQ ID NO: 56634 - DNA, 40 bp, Homo sapiens
tgtcattatgtggtacatgactgtactaagaaattgatcc

SEQ ID NO: 56635 - DNA, 40 bp, Homo sapiens
ggatcaatttcttagtacagtcatgtaccacataatgaca

SEQ ID NO: 56636 - DNA, 40 bp, Homo sapiens
gtcattatgtggtacatgactgtactaagaaattgatcca

SEQ ID NO: 56637 - DNA, 40 bp, Homo sapiens
tggatcaatttcttagtacagtcatgtaccacataatgac

SEQ ID NO: 56638 - DNA, 40 bp, Homo sapiens
tcattatgtggtacatgactgtactaagaaattgatccat

SEQ ID NO: 56639 - DNA, 40 bp, Homo sapiens
atggatcaatttcttagtacagtcatgtaccacataatga

SEQ ID NO: 56640 - DNA, 40 bp, Homo sapiens
cattatgtggtacatgactgtactaagaaattgatccatc

SEQ ID NO: 56641 - DNA, 40 bp, Homo sapiens
gatggatcaatttcttagtacagtcatgtaccacataatg

SEQ ID NO: 56642 - DNA, 40 bp, Homo sapiens
attatgtggtacatgactgtactaagaaattgatccatct

SEQ ID NO: 56643 - DNA, 40 bp, Homo sapiens
agatggatcaatttcttagtacagtcatgtaccacataat

SEQ ID NO: 56644 - DNA, 40 bp, Homo sapiens
ttatgtggtacatgactgtactaagaaattgatccatcta

SEQ ID NO: 56645 - DNA, 40 bp, Homo sapiens
tagatggatcaatttcttagtacagtcatgtaccacataa

SEQ ID NO: 56646 - DNA, 40 bp, Homo sapiens
tatgtggtacatgactgtactaagaaattgatccatctat

SEQ ID NO: 56647 - DNA, 40 bp, Homo sapiens
atagatggatcaatttcttagtacagtcatgtaccacata

SEQ ID NO: 56648 - DNA, 40 bp, Homo sapiens
atgtggtacatgactgtactaagaaattgatccatctata

SEQ ID NO: 56649 - DNA, 40 bp, Homo sapiens
tatagatggatcaatttcttagtacagtcatgtaccacat

SEQ ID NO: 56650 - DNA, 40 bp, Homo sapiens
tgtggtacatgactgtactaagaaattgatccatctatat

SEQ ID NO: 56651 - DNA, 40 bp, Homo sapiens
atatagatggatcaatttcttagtacagtcatgtaccaca

SEQ ID NO: 56652 - DNA, 40 bp, Homo sapiens
gtggtacatgactgtactaagaaattgatccatctatatt

SEQ ID NO: 56653 - DNA, 40 bp, Homo sapiens
aatatagatggatcaatttcttagtacagtcatgtaccac

SEQ ID NO: 56654 - DNA, 40 bp, Homo sapiens
tggtacatgactgtactaagaaattgatccatctatattc

SEQ ID NO: 56655 - DNA, 40 bp, Homo sapiens
gaatatagatggatcaatttcttagtacagtcatgtacca

SEQ ID NO: 56656 - DNA, 40 bp, Homo sapiens
ggtacatgactgtactaagaaattgatccatctatattcc

SEQ ID NO: 56657 - DNA, 40 bp, Homo sapiens
ggaatatagatggatcaatttcttagtacagtcatgtacc

SEQ ID NO: 56658 - DNA, 40 bp, Homo sapiens
gtacatgactgtactaagaaattgatccatctatattcca

SEQ ID NO: 56659 - DNA, 40 bp, Homo sapiens
tggaatatagatggatcaatttcttagtacagtcatgtac

SEQ ID NO: 56660 - DNA, 40 bp, Homo sapiens
tacatgactgtactaagaaattgatccatctatattccat

SEQ ID NO: 56661 - DNA, 40 bp, Homo sapiens
atggaatatagatggatcaatttcttagtacagtcatgta

SEQ ID NO: 56662 - DNA, 40 bp, Homo sapiens
acatgactgtactaagaaattgatccatctatattccatc

SEQ ID NO: 56663 - DNA, 40 bp, Homo sapiens
gatggaatatagatggatcaatttcttagtacagtcatgt

SEQ ID NO: 56664 - DNA, 40 bp, Homo sapiens
catgactgtactaagaaattgatccatctatattccatca

SEQ ID NO: 56665 - DNA, 40 bp, Homo sapiens
tgatggaatatagatggatcaatttcttagtacagtcatg

SEQ ID NO: 56666 - DNA, 40 bp, Homo sapiens
atgactgtactaagaaattgatccatctatattccatcaa

SEQ ID NO: 56667 - DNA, 40 bp, Homo sapiens
ttgatggaatatagatggatcaatttcttagtacagtcat

SEQ ID NO: 56668 - DNA, 40 bp, Homo sapiens
tgactgtactaagaaattgatccatctatattccatcaat

SEQ ID NO: 56669 - DNA, 40 bp, Homo sapiens
attgatggaatatagatggatcaatttcttagtacagtca

SEQ ID NO: 56670 - DNA, 40 bp, Homo sapiens
gactgtactaagaaattgatccatctatattccatcaatt

SEQ ID NO: 56671 - DNA, 40 bp, Homo sapiens
aattgatggaatatagatggatcaatttcttagtacagtc

SEQ ID NO: 56672 - DNA, 40 bp, Homo sapiens
actgtactaagaaattgatccatctatattccatcaattt

SEQ ID NO: 56673 - DNA, 40 bp, Homo sapiens
aaattgatggaatatagatggatcaatttcttagtacagt

SEQ ID NO: 56674 - DNA, 40 bp, Homo sapiens
ctgtactaagaaattgatccatctatattccatcaatttg

SEQ ID NO: 56675 - DNA, 40 bp, Homo sapiens
caaattgatggaatatagatggatcaatttcttagtacag

SEQ ID NO: 56676 - DNA, 40 bp, Homo sapiens
tgtactaagaaattgatccatctatattccatcaatttgt

SEQ ID NO: 56677 - DNA, 40 bp, Homo sapiens
acaaattgatggaatatagatggatcaatttcttagtaca

SEQ ID NO: 56678 - DNA, 40 bp, Homo sapiens
gtactaagaaattgatccatctatattccatcaatttgtt

SEQ ID NO: 56679 - DNA, 40 bp, Homo sapiens
aacaaattgatggaatatagatggatcaatttcttagtac

SEQ ID NO: 56680 - DNA, 40 bp, Homo sapiens
tactaagaaattgatccatctatattccatcaatttgttt

SEQ ID NO: 56681 - DNA, 40 bp, Homo sapiens
aaacaaattgatggaatatagatggatcaatttcttagta

SEQ ID NO: 56682 - DNA, 40 bp, Homo sapiens
actaagaaattgatccatctatattccatcaatttgttta

SEQ ID NO: 56683 - DNA, 40 bp, Homo sapiens
taaacaaattgatggaatatagatggatcaatttcttagt

SEQ ID NO: 56684 - DNA, 40 bp, Homo sapiens
ctaagaaattgatccatctatattccatcaatttgtttag

SEQ ID NO: 56685 - DNA, 40 bp, Homo sapiens
ctaaacaaattgatggaatatagatggatcaatttcttag

SEQ ID NO: 56686 - DNA, 40 bp, Homo sapiens
taagaaattgatccatctatattccatcaatttgtttagg

SEQ ID NO: 56687 - DNA, 40 bp, Homo sapiens
cctaaacaaattgatggaatatagatggatcaatttctta

SEQ ID NO: 56688 - DNA, 40 bp, Homo sapiens
aagaaattgatccatctatattccatcaatttgtttaggg

SEQ ID NO: 56689 - DNA, 40 bp, Homo sapiens
ccctaaacaaattgatggaatatagatggatcaatttctt

SEQ ID NO: 56690 - DNA, 40 bp, Homo sapiens
agaaattgatccatctatattccatcaatttgtttagggc

SEQ ID NO: 56691 - DNA, 40 bp, Homo sapiens
gccctaaacaaattgatggaatatagatggatcaatttct

SEQ ID NO: 56692 - DNA, 40 bp, Homo sapiens
gaaattgatccatctatattccatcaatttgtttagggct

SEQ ID NO: 56693 - DNA, 40 bp, Homo sapiens
agccctaaacaaattgatggaatatagatggatcaatttc

SEQ ID NO: 56694 - DNA, 40 bp, Homo sapiens
aaattgatccatctatattccatcaatttgtttagggctt

SEQ ID NO: 56695 - DNA, 40 bp, Homo sapiens
aagccctaaacaaattgatggaatatagatggatcaattt

SEQ ID NO: 56696 - DNA, 40 bp, Homo sapiens
aattgatccatctatattccatcaatttgtttagggcttt

SEQ ID NO: 56697 - DNA, 40 bp, Homo sapiens
aaagccctaaacaaattgatggaatatagatggatcaatt

SEQ ID NO: 56698 - DNA, 40 bp, Homo sapiens
attgatccatctatattccatcaatttgtttagggctttt

SEQ ID NO: 56699 - DNA, 40 bp, Homo sapiens
aaaagccctaaacaaattgatggaatatagatggatcaat

SEQ ID NO: 56700 - DNA, 40 bp, Homo sapiens
ttgatccatctatattccatcaatttgtttagggcttttt

SEQ ID NO: 56701 - DNA, 40 bp, Homo sapiens
aaaaagccctaaacaaattgatggaatatagatggatcaa

SEQ ID NO: 56702 - DNA, 40 bp, Homo sapiens
tgatccatctatattccatcaatttgtttagggctttttc

SEQ ID NO: 56703 - DNA, 40 bp, Homo sapiens
gaaaaagccctaaacaaattgatggaatatagatggatca

SEQ ID NO: 56704 - DNA, 40 bp, Homo sapiens
gatccatctatattccatcaatttgtttagggctttttct

SEQ ID NO: 56705 - DNA, 40 bp, Homo sapiens
agaaaaagccctaaacaaattgatggaatatagatggatc

SEQ ID NO: 56706 - DNA, 40 bp, Homo sapiens
atccatctatattccatcaatttgtttagggctttttctg

SEQ ID NO: 56707 - DNA, 40 bp, Homo sapiens
cagaaaaagccctaaacaaattgatggaatatagatggat

SEQ ID NO: 56708 - DNA, 40 bp, Homo sapiens
tccatctatattccatcaatttgtttagggctttttctgg

SEQ ID NO: 56709 - DNA, 40 bp, Homo sapiens
ccagaaaaagccctaaacaaattgatggaatatagatgga

SEQ ID NO: 56710 - DNA, 40 bp, Homo sapiens
ccatctatattccatcaatttgtttagggctttttctggt

SEQ ID NO: 56711 - DNA, 40 bp, Homo sapiens
accagaaaaagccctaaacaaattgatggaatatagatgg

SEQ ID NO: 56712 - DNA, 40 bp, Homo sapiens
catctatattccatcaatttgtttagggctttttctggtt

SEQ ID NO: 56713 - DNA, 40 bp, Homo sapiens
aaccagaaaaagccctaaacaaattgatggaatatagatg

SEQ ID NO: 56714 - DNA, 40 bp, Homo sapiens
atctatattccatcaatttgtttagggctttttctggtta

SEQ ID NO: 56715 - DNA, 40 bp, Homo sapiens
taaccagaaaaagccctaaacaaattgatggaatatagat

SEQ ID NO: 56716 - DNA, 40 bp, Homo sapiens
tctatattccatcaatttgtttagggctttttctggttac

SEQ ID NO: 56717 - DNA, 40 bp, Homo sapiens
gtaaccagaaaaagccctaaacaaattgatggaatataga

SEQ ID NO: 56718 - DNA, 40 bp, Homo sapiens
ctatattccatcaatttgtttagggctttttctggttaca

SEQ ID NO: 56719 - DNA, 40 bp, Homo sapiens
tgtaaccagaaaaagccctaaacaaattgatggaatatag

SEQ ID NO: 56720 - DNA, 40 bp, Homo sapiens
tatattccatcaatttgtttagggctttttctggttacat

SEQ ID NO: 56721 - DNA, 40 bp, Homo sapiens
atgtaaccagaaaaagccctaaacaaattgatggaatata

SEQ ID NO: 56722 - DNA, 40 bp, Homo sapiens
atattccatcaatttgtttagggctttttctggttacatt

SEQ ID NO: 56723 - DNA, 40 bp, Homo sapiens
aatgtaaccagaaaaagccctaaacaaattgatggaatat

SEQ ID NO: 56724 - DNA, 40 bp, Homo sapiens
tattccatcaatttgtttagggctttttctggttacattt

SEQ ID NO: 56725 - DNA, 40 bp, Homo sapiens
aaatgtaaccagaaaaagccctaaacaaattgatggaata

SEQ ID NO: 56726 - DNA, 40 bp, Homo sapiens
attccatcaatttgtttagggctttttctggttacattta

SEQ ID NO: 56727 - DNA, 40 bp, Homo sapiens
taaatgtaaccagaaaaagccctaaacaaattgatggaat

SEQ ID NO: 56728 - DNA, 40 bp, Homo sapiens
ttccatcaatttgtttagggctttttctggttacatttac

SEQ ID NO: 56729 - DNA, 40 bp, Homo sapiens
gtaaatgtaaccagaaaaagccctaaacaaattgatggaa

SEQ ID NO: 56730 - DNA, 40 bp, Homo sapiens
tccatcaatttgtttagggctttttctggttacatttacc

SEQ ID NO: 56731 - DNA, 40 bp, Homo sapiens
ggtaaatgtaaccagaaaaagccctaaacaaattgatgga

SEQ ID NO: 56732 - DNA, 40 bp, Homo sapiens
ccatcaatttgtttagggctttttctggttacatttacct

SEQ ID NO: 56733 - DNA, 40 bp, Homo sapiens
aggtaaatgtaaccagaaaaagccctaaacaaattgatgg

SEQ ID NO: 56734 - DNA, 40 bp, Homo sapiens
catcaatttgtttagggctttttctggttacatttacctg

SEQ ID NO: 56735 - DNA, 40 bp, Homo sapiens
caggtaaatgtaaccagaaaaagccctaaacaaattgatg

SEQ ID NO: 56736 - DNA, 40 bp, Homo sapiens
atcaatttgtttagggctttttctggttacatttacctgt

SEQ ID NO: 56737 - DNA, 40 bp, Homo sapiens
acaggtaaatgtaaccagaaaaagccctaaacaaattgat

SEQ ID NO: 56738 - DNA, 40 bp, Homo sapiens
tcaatttgtttagggctttttctggttacatttacctgtg

SEQ ID NO: 56739 - DNA, 40 bp, Homo sapiens
cacaggtaaatgtaaccagaaaaagccctaaacaaattga

SEQ ID NO: 56740 - DNA, 40 bp, Homo sapiens
caatttgtttagggctttttctggttacatttacctgtga

SEQ ID NO: 56741 - DNA, 40 bp, Homo sapiens
tcacaggtaaatgtaaccagaaaaagccctaaacaaattg

SEQ ID NO: 56742 - DNA, 40 bp, Homo sapiens
aatttgtttagggctttttctggttacatttacctgtgag

SEQ ID NO: 56743 - DNA, 40 bp, Homo sapiens
ctcacaggtaaatgtaaccagaaaaagccctaaacaaatt

SEQ ID NO: 56744 - DNA, 40 bp, Homo sapiens
atttgtttagggctttttctggttacatttacctgtgagc

SEQ ID NO: 56745 - DNA, 40 bp, Homo sapiens
gctcacaggtaaatgtaaccagaaaaagccctaaacaaat

SEQ ID NO: 56746 - DNA, 40 bp, Homo sapiens
tttgtttagggctttttctggttacatttacctgtgagcc

SEQ ID NO: 56747 - DNA, 40 bp, Homo sapiens
ggctcacaggtaaatgtaaccagaaaaagccctaaacaaa

SEQ ID NO: 56748 - DNA, 40 bp, Homo sapiens
ttgtttagggctttttctggttacatttacctgtgagccc

SEQ ID NO: 56749 - DNA, 40 bp, Homo sapiens
gggctcacaggtaaatgtaaccagaaaaagccctaaacaa

SEQ ID NO: 56750 - DNA, 40 bp, Homo sapiens
tgtttagggctttttctggttacatttacctgtgagccca

SEQ ID NO: 56751 - DNA, 40 bp, Homo sapiens
tgggctcacaggtaaatgtaaccagaaaaagccctaaaca

SEQ ID NO: 56752 - DNA, 40 bp, Homo sapiens
gtttagggctttttctggttacatttacctgtgagcccag

SEQ ID NO: 56753 - DNA, 40 bp, Homo sapiens
ctgggctcacaggtaaatgtaaccagaaaaagccctaaac

SEQ ID NO: 56754 - DNA, 40 bp, Homo sapiens
tttagggctttttctggttacatttacctgtgagcccaga

SEQ ID NO: 56755 - DNA, 40 bp, Homo sapiens
tctgggctcacaggtaaatgtaaccagaaaaagccctaaa

SEQ ID NO: 56756 - DNA, 40 bp, Homo sapiens
ttagggctttttctggttacatttacctgtgagcccagaa

SEQ ID NO: 56757 - DNA, 40 bp, Homo sapiens
ttctgggctcacaggtaaatgtaaccagaaaaagccctaa

SEQ ID NO: 56758 - DNA, 40 bp, Homo sapiens
tagggctttttctggttacatttacctgtgagcccagaaa

SEQ ID NO: 56759 - DNA, 40 bp, Homo sapiens
tttctgggctcacaggtaaatgtaaccagaaaaagcccta

SEQ ID NO: 56760 - DNA, 40 bp, Homo sapiens
agggctttttctggttacatttacctgtgagcccagaaaa

SEQ ID NO: 56761 - DNA, 40 bp, Homo sapiens
ttttctgggctcacaggtaaatgtaaccagaaaaagccct

SEQ ID NO: 56762 - DNA, 40 bp, Homo sapiens
gggctttttctggttacatttacctgtgagcccagaaaac

SEQ ID NO: 56763 - DNA, 40 bp, Homo sapiens
gttttctgggctcacaggtaaatgtaaccagaaaaagccc

SEQ ID NO: 56764 - DNA, 40 bp, Homo sapiens
ggctttttctggttacatttacctgtgagcccagaaaacc

SEQ ID NO: 56765 - DNA, 40 bp, Homo sapiens
ggttttctgggctcacaggtaaatgtaaccagaaaaagcc

SEQ ID NO: 56766 - DNA, 40 bp, Homo sapiens
gctttttctggttacatttacctgtgagcccagaaaacca

SEQ ID NO: 56767 - DNA, 40 bp, Homo sapiens
tggttttctgggctcacaggtaaatgtaaccagaaaaagc

SEQ ID NO: 56768 - DNA, 40 bp, Homo sapiens
ctttttctggttacatttacctgtgagcccagaaaaccag

SEQ ID NO: 56769 - DNA, 40 bp, Homo sapiens
ctggttttctgggctcacaggtaaatgtaaccagaaaaag

SEQ ID NO: 56770 - DNA, 40 bp, Homo sapiens
tttttctggttacatttacctgtgagcccagaaaaccagt

SEQ ID NO: 56771 - DNA, 40 bp, Homo sapiens
actggttttctgggctcacaggtaaatgtaaccagaaaaa

SEQ ID NO: 56772 - DNA, 40 bp, Homo sapiens
ttttctggttacatttacctgtgagcccagaaaaccagtt

SEQ ID NO: 56773 - DNA, 40 bp, Homo sapiens
aactggttttctgggctcacaggtaaatgtaaccagaaaa

SEQ ID NO: 56774 - DNA, 40 bp, Homo sapiens
tttctggttacatttacctgtgagcccagaaaaccagttt

SEQ ID NO: 56775 - DNA, 40 bp, Homo sapiens
aaactggttttctgggctcacaggtaaatgtaaccagaaa

SEQ ID NO: 56776 - DNA, 40 bp, Homo sapiens
ttctggttacatttacctgtgagcccagaaaaccagtttt

SEQ ID NO: 56777 - DNA, 40 bp, Homo sapiens
aaaactggttttctgggctcacaggtaaatgtaaccagaa

SEQ ID NO: 56778 - DNA, 40 bp, Homo sapiens
tctggttacatttacctgtgagcccagaaaaccagttttg

SEQ ID NO: 56779 - DNA, 40 bp, Homo sapiens
caaaactggttttctgggctcacaggtaaatgtaaccaga

SEQ ID NO: 56780 - DNA, 40 bp, Homo sapiens
ctggttacatttacctgtgagcccagaaaaccagttttgt

SEQ ID NO: 56781 - DNA, 40 bp, Homo sapiens
acaaaactggttttctgggctcacaggtaaatgtaaccag

SEQ ID NO: 56782 - DNA, 40 bp, Homo sapiens
tggttacatttacctgtgagcccagaaaaccagttttgta

SEQ ID NO: 56783 - DNA, 40 bp, Homo sapiens
tacaaaactggttttctgggctcacaggtaaatgtaacca

SEQ ID NO: 56784 - DNA, 40 bp, Homo sapiens
ggttacatttacctgtgagcccagaaaaccagttttgtag

SEQ ID NO: 56785 - DNA, 40 bp, Homo sapiens
ctacaaaactggttttctgggctcacaggtaaatgtaacc

SEQ ID NO: 56786 - DNA, 40 bp, Homo sapiens
gttacatttacctgtgagcccagaaaaccagttttgtaga

SEQ ID NO: 56787 - DNA, 40 bp, Homo sapiens
tctacaaaactggttttctgggctcacaggtaaatgtaac

SEQ ID NO: 56788 - DNA, 40 bp, Homo sapiens
ttacatttacctgtgagcccagaaaaccagttttgtagaa

SEQ ID NO: 56789 - DNA, 40 bp, Homo sapiens
ttctacaaaactggttttctgggctcacaggtaaatgtaa

SEQ ID NO: 56790 - DNA, 40 bp, Homo sapiens
tacatttacctgtgagcccagaaaaccagttttgtagaaa

SEQ ID NO: 56791 - DNA, 40 bp, Homo sapiens
tttctacaaaactggttttctgggctcacaggtaaatgta

SEQ ID NO: 56792 - DNA, 40 bp, Homo sapiens
acatttacctgtgagcccagaaaaccagttttgtagaaat

SEQ ID NO: 56793 - DNA, 40 bp, Homo sapiens
atttctacaaaactggttttctgggctcacaggtaaatgt

SEQ ID NO: 56794 - DNA, 40 bp, Homo sapiens
catttacctgtgagcccagaaaaccagttttgtagaaatt

SEQ ID NO: 56795 - DNA, 40 bp, Homo sapiens
aatttctacaaaactggttttctgggctcacaggtaaatg

SEQ ID NO: 56796 - DNA, 40 bp, Homo sapiens
atttacctgtgagcccagaaaaccagttttgtagaaatta

SEQ ID NO: 56797 - DNA, 40 bp, Homo sapiens
taatttctacaaaactggttttctgggctcacaggtaaat

SEQ ID NO: 56798 - DNA, 40 bp, Homo sapiens
tttacctgtgagcccagaaaaccagttttgtagaaattaa

SEQ ID NO: 56799 - DNA, 40 bp, Homo sapiens
ttaatttctacaaaactggttttctgggctcacaggtaaa

SEQ ID NO: 56800 - DNA, 40 bp, Homo sapiens
ttacctgtgagcccagaaaaccagttttgtagaaattaac

SEQ ID NO: 56801 - DNA, 40 bp, Homo sapiens
gttaatttctacaaaactggttttctgggctcacaggtaa

SEQ ID NO: 56802 - DNA, 40 bp, Homo sapiens
tacctgtgagcccagaaaaccagttttgtagaaattaact

SEQ ID NO: 56803 - DNA, 40 bp, Homo sapiens
agttaatttctacaaaactggttttctgggctcacaggta

SEQ ID NO: 56804 - DNA, 40 bp, Homo sapiens
acctgtgagcccagaaaaccagttttgtagaaattaactt

SEQ ID NO: 56805 - DNA, 40 bp, Homo sapiens
aagttaatttctacaaaactggttttctgggctcacaggt

SEQ ID NO: 56806 - DNA, 40 bp, Homo sapiens
cctgtgagcccagaaaaccagttttgtagaaattaacttc

SEQ ID NO: 56807 - DNA, 40 bp, Homo sapiens
gaagttaatttctacaaaactggttttctgggctcacagg

SEQ ID NO: 56808 - DNA, 40 bp, Homo sapiens
ctgtgagcccagaaaaccagttttgtagaaattaacttct

SEQ ID NO: 56809 - DNA, 40 bp, Homo sapiens
agaagttaatttctacaaaactggttttctgggctcacag

SEQ ID NO: 56810 - DNA, 40 bp, Homo sapiens
tgtgagcccagaaaaccagttttgtagaaattaacttctg

SEQ ID NO: 56811 - DNA, 40 bp, Homo sapiens
cagaagttaatttctacaaaactggttttctgggctcaca

SEQ ID NO: 56812 - DNA, 40 bp, Homo sapiens
gtgagcccagaaaaccagttttgtagaaattaacttctgt

SEQ ID NO: 56813 - DNA, 40 bp, Homo sapiens
acagaagttaatttctacaaaactggttttctgggctcac

SEQ ID NO: 56814 - DNA, 40 bp, Homo sapiens
tgagcccagaaaaccagttttgtagaaattaacttctgta

SEQ ID NO: 56815 - DNA, 40 bp, Homo sapiens
tacagaagttaatttctacaaaactggttttctgggctca

SEQ ID NO: 56816 - DNA, 40 bp, Homo sapiens
gagcccagaaaaccagttttgtagaaattaacttctgtaa

SEQ ID NO: 56817 - DNA, 40 bp, Homo sapiens
ttacagaagttaatttctacaaaactggttttctgggctc

SEQ ID NO: 56818 - DNA, 40 bp, Homo sapiens
agcccagaaaaccagttttgtagaaattaacttctgtaat

SEQ ID NO: 56819 - DNA, 40 bp, Homo sapiens
attacagaagttaatttctacaaaactggttttctgggct

SEQ ID NO: 56820 - DNA, 40 bp, Homo sapiens
gcccagaaaaccagttttgtagaaattaacttctgtaatg

SEQ ID NO: 56821 - DNA, 40 bp, Homo sapiens
cattacagaagttaatttctacaaaactggttttctgggc

SEQ ID NO: 56822 - DNA, 40 bp, Homo sapiens
cccagaaaaccagttttgtagaaattaacttctgtaatgc

SEQ ID NO: 56823 - DNA, 40 bp, Homo sapiens
gcattacagaagttaatttctacaaaactggttttctggg

SEQ ID NO: 56824 - DNA, 40 bp, Homo sapiens
ccagaaaaccagttttgtagaaattaacttctgtaatgct

SEQ ID NO: 56825 - DNA, 40 bp, Homo sapiens
agcattacagaagttaatttctacaaaactggttttctgg

SEQ ID NO: 56826 - DNA, 40 bp, Homo sapiens
cagaaaaccagttttgtagaaattaacttctgtaatgcta

SEQ ID NO: 56827 - DNA, 40 bp, Homo sapiens
tagcattacagaagttaatttctacaaaactggttttctg

SEQ ID NO: 56828 - DNA, 40 bp, Homo sapiens
agaaaaccagttttgtagaaattaacttctgtaatgctag

SEQ ID NO: 56829 - DNA, 40 bp, Homo sapiens
ctagcattacagaagttaatttctacaaaactggttttct

SEQ ID NO: 56830 - DNA, 40 bp, Homo sapiens
gaaaaccagttttgtagaaattaacttctgtaatgctagg

SEQ ID NO: 56831 - DNA, 40 bp, Homo sapiens
cctagcattacagaagttaatttctacaaaactggttttc

SEQ ID NO: 56832 - DNA, 40 bp, Homo sapiens
aaaaccagttttgtagaaattaacttctgtaatgctagga

SEQ ID NO: 56833 - DNA, 40 bp, Homo sapiens
tcctagcattacagaagttaatttctacaaaactggtttt

SEQ ID NO: 56834 - DNA, 40 bp, Homo sapiens
aaaccagttttgtagaaattaacttctgtaatgctaggag

SEQ ID NO: 56835 - DNA, 40 bp, Homo sapiens
ctcctagcattacagaagttaatttctacaaaactggttt

SEQ ID NO: 56836 - DNA, 40 bp, Homo sapiens
aaccagttttgtagaaattaacttctgtaatgctaggagt

SEQ ID NO: 56837 - DNA, 40 bp, Homo sapiens
actcctagcattacagaagttaatttctacaaaactggtt

SEQ ID NO: 56838 - DNA, 40 bp, Homo sapiens
accagttttgtagaaattaacttctgtaatgctaggagtt

SEQ ID NO: 56839 - DNA, 40 bp, Homo sapiens
aactcctagcattacagaagttaatttctacaaaactggt

SEQ ID NO: 56840 - DNA, 40 bp, Homo sapiens
ccagttttgtagaaattaacttctgtaatgctaggagtta

SEQ ID NO: 56841 - DNA, 40 bp, Homo sapiens
taactcctagcattacagaagttaatttctacaaaactgg

SEQ ID NO: 56842 - DNA, 40 bp, Homo sapiens
cagttttgtagaaattaacttctgtaatgctaggagttaa

SEQ ID NO: 56843 - DNA, 40 bp, Homo sapiens
ttaactcctagcattacagaagttaatttctacaaaactg

SEQ ID NO: 56844 - DNA, 40 bp, Homo sapiens
agttttgtagaaattaacttctgtaatgctaggagttaaa

SEQ ID NO: 56845 - DNA, 40 bp, Homo sapiens
tttaactcctagcattacagaagttaatttctacaaaact

SEQ ID NO: 56846 - DNA, 40 bp, Homo sapiens
gttttgtagaaattaacttctgtaatgctaggagttaaaa

SEQ ID NO: 56847 - DNA, 40 bp, Homo sapiens
ttttaactcctagcattacagaagttaatttctacaaaac

SEQ ID NO: 56848 - DNA, 40 bp, Homo sapiens
ttttgtagaaattaacttctgtaatgctaggagttaaaaa

SEQ ID NO: 56849 - DNA, 40 bp, Homo sapiens
tttttaactcctagcattacagaagttaatttctacaaaa

SEQ ID NO: 56850 - DNA, 40 bp, Homo sapiens
tttgtagaaattaacttctgtaatgctaggagttaaaaaa

SEQ ID NO: 56851 - DNA, 40 bp, Homo sapiens
ttttttaactcctagcattacagaagttaatttctacaaa

SEQ ID NO: 56852 - DNA, 40 bp, Homo sapiens
ttgtagaaattaacttctgtaatgctaggagttaaaaaaa

SEQ ID NO: 56853 - DNA, 40 bp, Homo sapiens
tttttttaactcctagcattacagaagttaatttctacaa

SEQ ID NO: 56854 - DNA, 40 bp, Homo sapiens
tgtagaaattaacttctgtaatgctaggagttaaaaaaaa

SEQ ID NO: 56855 - DNA, 40 bp, Homo sapiens
ttttttttaactcctagcattacagaagttaatttctaca

SEQ ID NO: 56856 - DNA, 40 bp, Homo sapiens
gtagaaattaacttctgtaatgctaggagttaaaaaaaat

SEQ ID NO: 56857 - DNA, 40 bp, Homo sapiens
attttttttaactcctagcattacagaagttaatttctac

SEQ ID NO: 56858 - DNA, 40 bp, Homo sapiens
tagaaattaacttctgtaatgctaggagttaaaaaaaatt

SEQ ID NO: 56859 - DNA, 40 bp, Homo sapiens
aattttttttaactcctagcattacagaagttaatttcta

SEQ ID NO: 56860 - DNA, 40 bp, Homo sapiens
agaaattaacttctgtaatgctaggagttaaaaaaaattg

SEQ ID NO: 56861 - DNA, 40 bp, Homo sapiens
caattttttttaactcctagcattacagaagttaatttct

SEQ ID NO: 56862 - DNA, 40 bp, Homo sapiens
gaaattaacttctgtaatgctaggagttaaaaaaaattgc

SEQ ID NO: 56863 - DNA, 40 bp, Homo sapiens
gcaattttttttaactcctagcattacagaagttaatttc

SEQ ID NO: 56864 - DNA, 40 bp, Homo sapiens
aaattaacttctgtaatgctaggagttaaaaaaaattgct

SEQ ID NO: 56865 - DNA, 40 bp, Homo sapiens
agcaattttttttaactcctagcattacagaagttaattt

SEQ ID NO: 56866 - DNA, 40 bp, Homo sapiens
aattaacttctgtaatgctaggagttaaaaaaaattgctg

SEQ ID NO: 56867 - DNA, 40 bp, Homo sapiens
cagcaattttttttaactcctagcattacagaagttaatt

SEQ ID NO: 56868 - DNA, 40 bp, Homo sapiens
attaacttctgtaatgctaggagttaaaaaaaattgctga

SEQ ID NO: 56869 - DNA, 40 bp, Homo sapiens
tcagcaattttttttaactcctagcattacagaagttaat

SEQ ID NO: 56870 - DNA, 40 bp, Homo sapiens
ttaacttctgtaatgctaggagttaaaaaaaattgctgaa

SEQ ID NO: 56871 - DNA, 40 bp, Homo sapiens
ttcagcaattttttttaactcctagcattacagaagttaa

SEQ ID NO: 56872 - DNA, 40 bp, Homo sapiens
taacttctgtaatgctaggagttaaaaaaaattgctgaac

SEQ ID NO: 56873 - DNA, 40 bp, Homo sapiens
gttcagcaattttttttaactcctagcattacagaagtta

SEQ ID NO: 56874 - DNA, 40 bp, Homo sapiens
aacttctgtaatgctaggagttaaaaaaaattgctgaaca

SEQ ID NO: 56875 - DNA, 40 bp, Homo sapiens
tgttcagcaattttttttaactcctagcattacagaagtt

SEQ ID NO: 56876 - DNA, 40 bp, Homo sapiens
acttctgtaatgctaggagttaaaaaaaattgctgaacaa

SEQ ID NO: 56877 - DNA, 40 bp, Homo sapiens
ttgttcagcaattttttttaactcctagcattacagaagt

SEQ ID NO: 56878 - DNA, 40 bp, Homo sapiens
cttctgtaatgctaggagttaaaaaaaattgctgaacaac

SEQ ID NO: 56879 - DNA, 40 bp, Homo sapiens
gttgttcagcaattttttttaactcctagcattacagaag

SEQ ID NO: 56880 - DNA, 40 bp, Homo sapiens
ttctgtaatgctaggagttaaaaaaaattgctgaacaact

SEQ ID NO: 56881 - DNA, 40 bp, Homo sapiens
agttgttcagcaattttttttaactcctagcattacagaa

SEQ ID NO: 56882 - DNA, 40 bp, Homo sapiens
tctgtaatgctaggagttaaaaaaaattgctgaacaactt

SEQ ID NO: 56883 - DNA, 40 bp, Homo sapiens
aagttgttcagcaattttttttaactcctagcattacaga

SEQ ID NO: 56884 - DNA, 40 bp, Homo sapiens
ctgtaatgctaggagttaaaaaaaattgctgaacaacttt

SEQ ID NO: 56885 - DNA, 40 bp, Homo sapiens
aaagttgttcagcaattttttttaactcctagcattacag

SEQ ID NO: 56886 - DNA, 40 bp, Homo sapiens
tgtaatgctaggagttaaaaaaaattgctgaacaactttt

SEQ ID NO: 56887 - DNA, 40 bp, Homo sapiens
aaaagttgttcagcaattttttttaactcctagcattaca

SEQ ID NO: 56888 - DNA, 40 bp, Homo sapiens
gtaatgctaggagttaaaaaaaattgctgaacaactttta

SEQ ID NO: 56889 - DNA, 40 bp, Homo sapiens
taaaagttgttcagcaattttttttaactcctagcattac

SEQ ID NO: 56890 - DNA, 40 bp, Homo sapiens
taatgctaggagttaaaaaaaattgctgaacaacttttac

SEQ ID NO: 56891 - DNA, 40 bp, Homo sapiens
gtaaaagttgttcagcaattttttttaactcctagcatta

SEQ ID NO: 56892 - DNA, 40 bp, Homo sapiens
aatgctaggagttaaaaaaaattgctgaacaacttttaca

SEQ ID NO: 56893 - DNA, 40 bp, Homo sapiens
tgtaaaagttgttcagcaattttttttaactcctagcatt

SEQ ID NO: 56894 - DNA, 40 bp, Homo sapiens
atgctaggagttaaaaaaaattgctgaacaacttttacat

SEQ ID NO: 56895 - DNA, 40 bp, Homo sapiens
atgtaaaagttgttcagcaattttttttaactcctagcat

SEQ ID NO: 56896 - DNA, 40 bp, Homo sapiens
tgctaggagttaaaaaaaattgctgaacaacttttacatt

SEQ ID NO: 56897 - DNA, 40 bp, Homo sapiens
aatgtaaaagttgttcagcaattttttttaactcctagca

SEQ ID NO: 56898 - DNA, 40 bp, Homo sapiens
gctaggagttaaaaaaaattgctgaacaacttttacattg

SEQ ID NO: 56899 - DNA, 40 bp, Homo sapiens
caatgtaaaagttgttcagcaattttttttaactcctagc

SEQ ID NO: 56900 - DNA, 40 bp, Homo sapiens
ctaggagttaaaaaaaattgctgaacaacttttacattgt

SEQ ID NO: 56901 - DNA, 40 bp, Homo sapiens
acaatgtaaaagttgttcagcaattttttttaactcctag

SEQ ID NO: 56902 - DNA, 40 bp, Homo sapiens
taggagttaaaaaaaattgctgaacaacttttacattgtt

SEQ ID NO: 56903 - DNA, 40 bp, Homo sapiens
aacaatgtaaaagttgttcagcaattttttttaactccta

SEQ ID NO: 56904 - DNA, 40 bp, Homo sapiens
aggagttaaaaaaaattgctgaacaacttttacattgtta

SEQ ID NO: 56905 - DNA, 40 bp, Homo sapiens
taacaatgtaaaagttgttcagcaattttttttaactcct

SEQ ID NO: 56906 - DNA, 40 bp, Homo sapiens
ggagttaaaaaaaattgctgaacaacttttacattgttaa

SEQ ID NO: 56907 - DNA, 40 bp, Homo sapiens
ttaacaatgtaaaagttgttcagcaattttttttaactcc

SEQ ID NO: 56908 - DNA, 40 bp, Homo sapiens
gagttaaaaaaaattgctgaacaacttttacattgttaaa

SEQ ID NO: 56909 - DNA, 40 bp, Homo sapiens
tttaacaatgtaaaagttgttcagcaattttttttaactc

SEQ ID NO: 56910 - DNA, 40 bp, Homo sapiens
agttaaaaaaaattgctgaacaacttttacattgttaaac

SEQ ID NO: 56911 - DNA, 40 bp, Homo sapiens
gtttaacaatgtaaaagttgttcagcaattttttttaact

SEQ ID NO: 56912 - DNA, 40 bp, Homo sapiens
gttaaaaaaaattgctgaacaacttttacattgttaaaca

SEQ ID NO: 56913 - DNA, 40 bp, Homo sapiens
tgtttaacaatgtaaaagttgttcagcaattttttttaac

SEQ ID NO: 56914 - DNA, 40 bp, Homo sapiens
ttaaaaaaaattgctgaacaacttttacattgttaaacat

SEQ ID NO: 56915 - DNA, 40 bp, Homo sapiens
atgtttaacaatgtaaaagttgttcagcaattttttttaa

SEQ ID NO: 56916 - DNA, 40 bp, Homo sapiens
taaaaaaaattgctgaacaacttttacattgttaaacatt

SEQ ID NO: 56917 - DNA, 40 bp, Homo sapiens
aatgtttaacaatgtaaaagttgttcagcaatttttttta

SEQ ID NO: 56918 - DNA, 40 bp, Homo sapiens
aaaaaaaattgctgaacaacttttacattgttaaacattt

SEQ ID NO: 56919 - DNA, 40 bp, Homo sapiens
aaatgtttaacaatgtaaaagttgttcagcaatttttttt

SEQ ID NO: 56920 - DNA, 40 bp, Homo sapiens
aaaaaaattgctgaacaacttttacattgttaaacattta

SEQ ID NO: 56921 - DNA, 40 bp, Homo sapiens
taaatgtttaacaatgtaaaagttgttcagcaattttttt

SEQ ID NO: 56922 - DNA, 40 bp, Homo sapiens
aaaaaattgctgaacaacttttacattgttaaacatttaa

SEQ ID NO: 56923 - DNA, 40 bp, Homo sapiens
ttaaatgtttaacaatgtaaaagttgttcagcaatttttt

SEQ ID NO: 56924 - DNA, 40 bp, Homo sapiens
aaaaattgctgaacaacttttacattgttaaacatttaaa

SEQ ID NO: 56925 - DNA, 40 bp, Homo sapiens
tttaaatgtttaacaatgtaaaagttgttcagcaattttt

SEQ ID NO: 56926 - DNA, 40 bp, Homo sapiens
aaaattgctgaacaacttttacattgttaaacatttaaaa

SEQ ID NO: 56927 - DNA, 40 bp, Homo sapiens
ttttaaatgtttaacaatgtaaaagttgttcagcaatttt

SEQ ID NO: 56928 - DNA, 40 bp, Homo sapiens
aaattgctgaacaacttttacattgttaaacatttaaaaa

SEQ ID NO: 56929 - DNA, 40 bp, Homo sapiens
tttttaaatgtttaacaatgtaaaagttgttcagcaattt

SEQ ID NO: 56930 - DNA, 40 bp, Homo sapiens
aattgctgaacaacttttacattgttaaacatttaaaaac

SEQ ID NO: 56931 - DNA, 40 bp, Homo sapiens
gtttttaaatgtttaacaatgtaaaagttgttcagcaatt

SEQ ID NO: 56932 - DNA, 40 bp, Homo sapiens
attgctgaacaacttttacattgttaaacatttaaaaaca

SEQ ID NO: 56933 - DNA, 40 bp, Homo sapiens
tgtttttaaatgtttaacaatgtaaaagttgttcagcaat

SEQ ID NO: 56934 - DNA, 40 bp, Homo sapiens
ttgctgaacaacttttacattgttaaacatttaaaaacaa

SEQ ID NO: 56935 - DNA, 40 bp, Homo sapiens
ttgtttttaaatgtttaacaatgtaaaagttgttcagcaa

SEQ ID NO: 56936 - DNA, 40 bp, Homo sapiens
tgctgaacaacttttacattgttaaacatttaaaaacaag

SEQ ID NO: 56937 - DNA, 40 bp, Homo sapiens
cttgtttttaaatgtttaacaatgtaaaagttgttcagca

SEQ ID NO: 56938 - DNA, 40 bp, Homo sapiens
gctgaacaacttttacattgttaaacatttaaaaacaagc

SEQ ID NO: 56939 - DNA, 40 bp, Homo sapiens
gcttgtttttaaatgtttaacaatgtaaaagttgttcagc

SEQ ID NO: 56940 - DNA, 40 bp, Homo sapiens
ctgaacaacttttacattgttaaacatttaaaaacaagcg

SEQ ID NO: 56941 - DNA, 40 bp, Homo sapiens
cgcttgtttttaaatgtttaacaatgtaaaagttgttcag

SEQ ID NO: 56942 - DNA, 40 bp, Homo sapiens
tgaacaacttttacattgttaaacatttaaaaacaagcgt

SEQ ID NO: 56943 - DNA, 40 bp, Homo sapiens
acgcttgtttttaaatgtttaacaatgtaaaagttgttca

SEQ ID NO: 56944 - DNA, 40 bp, Homo sapiens
gaacaacttttacattgttaaacatttaaaaacaagcgtt

SEQ ID NO: 56945 - DNA, 40 bp, Homo sapiens
aacgcttgtttttaaatgtttaacaatgtaaaagttgttc

SEQ ID NO: 56946 - DNA, 40 bp, Homo sapiens
aacaacttttacattgttaaacatttaaaaacaagcgttc

SEQ ID NO: 56947 - DNA, 40 bp, Homo sapiens
gaacgcttgtttttaaatgtttaacaatgtaaaagttgtt

SEQ ID NO: 56948 - DNA, 40 bp, Homo sapiens
acaacttttacattgttaaacatttaaaaacaagcgttct

SEQ ID NO: 56949 - DNA, 40 bp, Homo sapiens
agaacgcttgtttttaaatgtttaacaatgtaaaagttgt

SEQ ID NO: 56950 - DNA, 40 bp, Homo sapiens
caacttttacattgttaaacatttaaaaacaagcgttcta

SEQ ID NO: 56951 - DNA, 40 bp, Homo sapiens
tagaacgcttgtttttaaatgtttaacaatgtaaaagttg

SEQ ID NO: 56952 - DNA, 40 bp, Homo sapiens
aacttttacattgttaaacatttaaaaacaagcgttctag

SEQ ID NO: 56953 - DNA, 40 bp, Homo sapiens
ctagaacgcttgtttttaaatgtttaacaatgtaaaagtt

SEQ ID NO: 56954 - DNA, 40 bp, Homo sapiens
acttttacattgttaaacatttaaaaacaagcgttctaga

SEQ ID NO: 56955 - DNA, 40 bp, Homo sapiens
tctagaacgcttgtttttaaatgtttaacaatgtaaaagt

SEQ ID NO: 56956 - DNA, 40 bp, Homo sapiens
cttttacattgttaaacatttaaaaacaagcgttctagaa

SEQ ID NO: 56957 - DNA, 40 bp, Homo sapiens
ttctagaacgcttgtttttaaatgtttaacaatgtaaaag

SEQ ID NO: 56958 - DNA, 40 bp, Homo sapiens
ttttacattgttaaacatttaaaaacaagcgttctagaag

SEQ ID NO: 56959 - DNA, 40 bp, Homo sapiens
cttctagaacgcttgtttttaaatgtttaacaatgtaaaa

SEQ ID NO: 56960 - DNA, 40 bp, Homo sapiens
tttacattgttaaacatttaaaaacaagcgttctagaagt

SEQ ID NO: 56961 - DNA, 40 bp, Homo sapiens
acttctagaacgcttgtttttaaatgtttaacaatgtaaa

SEQ ID NO: 56962 - DNA, 40 bp, Homo sapiens
ttacattgttaaacatttaaaaacaagcgttctagaagtt

SEQ ID NO: 56963 - DNA, 40 bp, Homo sapiens
aacttctagaacgcttgtttttaaatgtttaacaatgtaa

SEQ ID NO: 56964 - DNA, 40 bp, Homo sapiens
tacattgttaaacatttaaaaacaagcgttctagaagttt

SEQ ID NO: 56965 - DNA, 40 bp, Homo sapiens
aaacttctagaacgcttgtttttaaatgtttaacaatgta

SEQ ID NO: 56966 - DNA, 40 bp, Homo sapiens
acattgttaaacatttaaaaacaagcgttctagaagttta

SEQ ID NO: 56967 - DNA, 40 bp, Homo sapiens
taaacttctagaacgcttgtttttaaatgtttaacaatgt

SEQ ID NO: 56968 - DNA, 40 bp, Homo sapiens
cattgttaaacatttaaaaacaagcgttctagaagtttat

SEQ ID NO: 56969 - DNA, 40 bp, Homo sapiens
ataaacttctagaacgcttgtttttaaatgtttaacaatg

SEQ ID NO: 56970 - DNA, 40 bp, Homo sapiens
attgttaaacatttaaaaacaagcgttctagaagtttatc

SEQ ID NO: 56971 - DNA, 40 bp, Homo sapiens
gataaacttctagaacgcttgtttttaaatgtttaacaat

SEQ ID NO: 56972 - DNA, 40 bp, Homo sapiens
ttgttaaacatttaaaaacaagcgttctagaagtttatca

SEQ ID NO: 56973 - DNA, 40 bp, Homo sapiens
tgataaacttctagaacgcttgtttttaaatgtttaacaa

SEQ ID NO: 56974 - DNA, 40 bp, Homo sapiens
tgttaaacatttaaaaacaagcgttctagaagtttatcaa

SEQ ID NO: 56975 - DNA, 40 bp, Homo sapiens
ttgataaacttctagaacgcttgtttttaaatgtttaaca

SEQ ID NO: 56976 - DNA, 40 bp, Homo sapiens
gttaaacatttaaaaacaagcgttctagaagtttatcaaa

SEQ ID NO: 56977 - DNA, 40 bp, Homo sapiens
tttgataaacttctagaacgcttgtttttaaatgtttaac

SEQ ID NO: 56978 - DNA, 40 bp, Homo sapiens
ttaaacatttaaaaacaagcgttctagaagtttatcaaat

SEQ ID NO: 56979 - DNA, 40 bp, Homo sapiens
atttgataaacttctagaacgcttgtttttaaatgtttaa

SEQ ID NO: 56980 - DNA, 40 bp, Homo sapiens
taaacatttaaaaacaagcgttctagaagtttatcaaatt

SEQ ID NO: 56981 - DNA, 40 bp, Homo sapiens
aatttgataaacttctagaacgcttgtttttaaatgttta

SEQ ID NO: 56982 - DNA, 40 bp, Homo sapiens
aaacatttaaaaacaagcgttctagaagtttatcaaattt

SEQ ID NO: 56983 - DNA, 40 bp, Homo sapiens
aaatttgataaacttctagaacgcttgtttttaaatgttt

SEQ ID NO: 56984 - DNA, 40 bp, Homo sapiens
aacatttaaaaacaagcgttctagaagtttatcaaatttc

SEQ ID NO: 56985 - DNA, 40 bp, Homo sapiens
gaaatttgataaacttctagaacgcttgtttttaaatgtt

SEQ ID NO: 56986 - DNA, 40 bp, Homo sapiens
acatttaaaaacaagcgttctagaagtttatcaaatttca

SEQ ID NO: 56987 - DNA, 40 bp, Homo sapiens
tgaaatttgataaacttctagaacgcttgtttttaaatgt

SEQ ID NO: 56988 - DNA, 40 bp, Homo sapiens
catttaaaaacaagcgttctagaagtttatcaaatttcat

SEQ ID NO: 56989 - DNA, 40 bp, Homo sapiens
atgaaatttgataaacttctagaacgcttgtttttaaatg

SEQ ID NO: 56990 - DNA, 40 bp, Homo sapiens
atttaaaaacaagcgttctagaagtttatcaaatttcata

SEQ ID NO: 56991 - DNA, 40 bp, Homo sapiens
tatgaaatttgataaacttctagaacgcttgtttttaaat

SEQ ID NO: 56992 - DNA, 40 bp, Homo sapiens
tttaaaaacaagcgttctagaagtttatcaaatttcataa

SEQ ID NO: 56993 - DNA, 40 bp, Homo sapiens
ttatgaaatttgataaacttctagaacgcttgtttttaaa

SEQ ID NO: 56994 - DNA, 40 bp, Homo sapiens
ttaaaaacaagcgttctagaagtttatcaaatttcataaa

SEQ ID NO: 56995 - DNA, 40 bp, Homo sapiens
tttatgaaatttgataaacttctagaacgcttgtttttaa

SEQ ID NO: 56996 - DNA, 40 bp, Homo sapiens
taaaaacaagcgttctagaagtttatcaaatttcataaag

SEQ ID NO: 56997 - DNA, 40 bp, Homo sapiens
ctttatgaaatttgataaacttctagaacgcttgttttta

SEQ ID NO: 56998 - DNA, 40 bp, Homo sapiens
aaaaacaagcgttctagaagtttatcaaatttcataaagg

SEQ ID NO: 56999 - DNA, 40 bp, Homo sapiens
cctttatgaaatttgataaacttctagaacgcttgttttt

SEQ ID NO: 57000 - DNA, 40 bp, Homo sapiens
aaaacaagcgttctagaagtttatcaaatttcataaaggt

SEQ ID NO: 57001 - DNA, 40 bp, Homo sapiens
acctttatgaaatttgataaacttctagaacgcttgtttt

SEQ ID NO: 57002 - DNA, 40 bp, Homo sapiens
aaacaagcgttctagaagtttatcaaatttcataaaggtg

SEQ ID NO: 57003 - DNA, 40 bp, Homo sapiens
cacctttatgaaatttgataaacttctagaacgcttgttt

SEQ ID NO: 57004 - DNA, 40 bp, Homo sapiens
aacaagcgttctagaagtttatcaaatttcataaaggtgc

SEQ ID NO: 57005 - DNA, 40 bp, Homo sapiens
gcacctttatgaaatttgataaacttctagaacgcttgtt

SEQ ID NO: 57006 - DNA, 40 bp, Homo sapiens
acaagcgttctagaagtttatcaaatttcataaaggtgca

SEQ ID NO: 57007 - DNA, 40 bp, Homo sapiens
tgcacctttatgaaatttgataaacttctagaacgcttgt

SEQ ID NO: 57008 - DNA, 40 bp, Homo sapiens
caagcgttctagaagtttatcaaatttcataaaggtgcaa

SEQ ID NO: 57009 - DNA, 40 bp, Homo sapiens
ttgcacctttatgaaatttgataaacttctagaacgcttg

SEQ ID NO: 57010 - DNA, 40 bp, Homo sapiens
aagcgttctagaagtttatcaaatttcataaaggtgcaaa

SEQ ID NO: 57011 - DNA, 40 bp, Homo sapiens
tttgcacctttatgaaatttgataaacttctagaacgctt

SEQ ID NO: 57012 - DNA, 40 bp, Homo sapiens
agcgttctagaagtttatcaaatttcataaaggtgcaaaa

SEQ ID NO: 57013 - DNA, 40 bp, Homo sapiens
ttttgcacctttatgaaatttgataaacttctagaacgct

SEQ ID NO: 57014 - DNA, 40 bp, Homo sapiens
gcgttctagaagtttatcaaatttcataaaggtgcaaaaa

SEQ ID NO: 57015 - DNA, 40 bp, Homo sapiens
tttttgcacctttatgaaatttgataaacttctagaacgc

SEQ ID NO: 57016 - DNA, 40 bp, Homo sapiens
cgttctagaagtttatcaaatttcataaaggtgcaaaaat

SEQ ID NO: 57017 - DNA, 40 bp, Homo sapiens
atttttgcacctttatgaaatttgataaacttctagaacg

SEQ ID NO: 57018 - DNA, 40 bp, Homo sapiens
gttctagaagtttatcaaatttcataaaggtgcaaaaatg

SEQ ID NO: 57019 - DNA, 40 bp, Homo sapiens
catttttgcacctttatgaaatttgataaacttctagaac

SEQ ID NO: 57020 - DNA, 40 bp, Homo sapiens
ttctagaagtttatcaaatttcataaaggtgcaaaaatgt

SEQ ID NO: 57021 - DNA, 40 bp, Homo sapiens
acatttttgcacctttatgaaatttgataaacttctagaa

SEQ ID NO: 57022 - DNA, 40 bp, Homo sapiens
tctagaagtttatcaaatttcataaaggtgcaaaaatgta

SEQ ID NO: 57023 - DNA, 40 bp, Homo sapiens
tacatttttgcacctttatgaaatttgataaacttctaga

SEQ ID NO: 57024 - DNA, 40 bp, Homo sapiens
ctagaagtttatcaaatttcataaaggtgcaaaaatgtaa

SEQ ID NO: 57025 - DNA, 40 bp, Homo sapiens
ttacatttttgcacctttatgaaatttgataaacttctag

SEQ ID NO: 57026 - DNA, 40 bp, Homo sapiens
tagaagtttatcaaatttcataaaggtgcaaaaatgtaaa

SEQ ID NO: 57027 - DNA, 40 bp, Homo sapiens
tttacatttttgcacctttatgaaatttgataaacttcta

SEQ ID NO: 57028 - DNA, 40 bp, Homo sapiens
agaagtttatcaaatttcataaaggtgcaaaaatgtaaat

SEQ ID NO: 57029 - DNA, 40 bp, Homo sapiens
atttacatttttgcacctttatgaaatttgataaacttct

SEQ ID NO: 57030 - DNA, 40 bp, Homo sapiens
gaagtttatcaaatttcataaaggtgcaaaaatgtaaatg

SEQ ID NO: 57031 - DNA, 40 bp, Homo sapiens
catttacatttttgcacctttatgaaatttgataaacttc

SEQ ID NO: 57032 - DNA, 40 bp, Homo sapiens
aagtttatcaaatttcataaaggtgcaaaaatgtaaatgt

SEQ ID NO: 57033 - DNA, 40 bp, Homo sapiens
acatttacatttttgcacctttatgaaatttgataaactt

SEQ ID NO: 57034 - DNA, 40 bp, Homo sapiens
agtttatcaaatttcataaaggtgcaaaaatgtaaatgta

SEQ ID NO: 57035 - DNA, 40 bp, Homo sapiens
tacatttacatttttgcacctttatgaaatttgataaact

SEQ ID NO: 57036 - DNA, 40 bp, Homo sapiens
gtttatcaaatttcataaaggtgcaaaaatgtaaatgtaa

SEQ ID NO: 57037 - DNA, 40 bp, Homo sapiens
ttacatttacatttttgcacctttatgaaatttgataaac

SEQ ID NO: 57038 - DNA, 40 bp, Homo sapiens
tttatcaaatttcataaaggtgcaaaaatgtaaatgtaaa

SEQ ID NO: 57039 - DNA, 40 bp, Homo sapiens
tttacatttacatttttgcacctttatgaaatttgataaa

SEQ ID NO: 57040 - DNA, 40 bp, Homo sapiens
ttatcaaatttcataaaggtgcaaaaatgtaaatgtaaat

SEQ ID NO: 57041 - DNA, 40 bp, Homo sapiens
atttacatttacatttttgcacctttatgaaatttgataa

SEQ ID NO: 57042 - DNA, 40 bp, Homo sapiens
tatcaaatttcataaaggtgcaaaaatgtaaatgtaaatc

SEQ ID NO: 57043 - DNA, 40 bp, Homo sapiens
gatttacatttacatttttgcacctttatgaaatttgata

SEQ ID NO: 57044 - DNA, 40 bp, Homo sapiens
atcaaatttcataaaggtgcaaaaatgtaaatgtaaatca

SEQ ID NO: 57045 - DNA, 40 bp, Homo sapiens
tgatttacatttacatttttgcacctttatgaaatttgat

SEQ ID NO: 57046 - DNA, 40 bp, Homo sapiens
tcaaatttcataaaggtgcaaaaatgtaaatgtaaatcat

SEQ ID NO: 57047 - DNA, 40 bp, Homo sapiens
atgatttacatttacatttttgcacctttatgaaatttga

SEQ ID NO: 57048 - DNA, 40 bp, Homo sapiens
caaatttcataaaggtgcaaaaatgtaaatgtaaatcatt

SEQ ID NO: 57049 - DNA, 40 bp, Homo sapiens
aatgatttacatttacatttttgcacctttatgaaatttg

SEQ ID NO: 57050 - DNA, 40 bp, Homo sapiens
aaatttcataaaggtgcaaaaatgtaaatgtaaatcatta

SEQ ID NO: 57051 - DNA, 40 bp, Homo sapiens
taatgatttacatttacatttttgcacctttatgaaattt

SEQ ID NO: 57052 - DNA, 40 bp, Homo sapiens
aatttcataaaggtgcaaaaatgtaaatgtaaatcattat

SEQ ID NO: 57053 - DNA, 40 bp, Homo sapiens
ataatgatttacatttacatttttgcacctttatgaaatt

SEQ ID NO: 57054 - DNA, 40 bp, Homo sapiens
atttcataaaggtgcaaaaatgtaaatgtaaatcattatc

SEQ ID NO: 57055 - DNA, 40 bp, Homo sapiens
gataatgatttacatttacatttttgcacctttatgaaat

SEQ ID NO: 57056 - DNA, 40 bp, Homo sapiens
tttcataaaggtgcaaaaatgtaaatgtaaatcattatcc

SEQ ID NO: 57057 - DNA, 40 bp, Homo sapiens
ggataatgatttacatttacatttttgcacctttatgaaa

SEQ ID NO: 57058 - DNA, 40 bp, Homo sapiens
ttcataaaggtgcaaaaatgtaaatgtaaatcattatcca

SEQ ID NO: 57059 - DNA, 40 bp, Homo sapiens
tggataatgatttacatttacatttttgcacctttatgaa

SEQ ID NO: 57060 - DNA, 40 bp, Homo sapiens
tcataaaggtgcaaaaatgtaaatgtaaatcattatccag

SEQ ID NO: 57061 - DNA, 40 bp, Homo sapiens
ctggataatgatttacatttacatttttgcacctttatga

SEQ ID NO: 57062 - DNA, 40 bp, Homo sapiens
cataaaggtgcaaaaatgtaaatgtaaatcattatccagc

SEQ ID NO: 57063 - DNA, 40 bp, Homo sapiens
gctggataatgatttacatttacatttttgcacctttatg

SEQ ID NO: 57064 - DNA, 40 bp, Homo sapiens
ataaaggtgcaaaaatgtaaatgtaaatcattatccagct

SEQ ID NO: 57065 - DNA, 40 bp, Homo sapiens
agctggataatgatttacatttacatttttgcacctttat

SEQ ID NO: 57066 - DNA, 40 bp, Homo sapiens
taaaggtgcaaaaatgtaaatgtaaatcattatccagcta

SEQ ID NO: 57067 - DNA, 40 bp, Homo sapiens
tagctggataatgatttacatttacatttttgcaccttta

SEQ ID NO: 57068 - DNA, 40 bp, Homo sapiens
aaaggtgcaaaaatgtaaatgtaaatcattatccagctaa

SEQ ID NO: 57069 - DNA, 40 bp, Homo sapiens
ttagctggataatgatttacatttacatttttgcaccttt

SEQ ID NO: 57070 - DNA, 40 bp, Homo sapiens
aaggtgcaaaaatgtaaatgtaaatcattatccagctaat

SEQ ID NO: 57071 - DNA, 40 bp, Homo sapiens
attagctggataatgatttacatttacatttttgcacctt

SEQ ID NO: 57072 - DNA, 40 bp, Homo sapiens
aggtgcaaaaatgtaaatgtaaatcattatccagctaata

SEQ ID NO: 57073 - DNA, 40 bp, Homo sapiens
tattagctggataatgatttacatttacatttttgcacct

SEQ ID NO: 57074 - DNA, 40 bp, Homo sapiens
ggtgcaaaaatgtaaatgtaaatcattatccagctaatat

SEQ ID NO: 57075 - DNA, 40 bp, Homo sapiens
atattagctggataatgatttacatttacatttttgcacc

SEQ ID NO: 57076 - DNA, 40 bp, Homo sapiens
gtgcaaaaatgtaaatgtaaatcattatccagctaatata

SEQ ID NO: 57077 - DNA, 40 bp, Homo sapiens
tatattagctggataatgatttacatttacatttttgcac

SEQ ID NO: 57078 - DNA, 40 bp, Homo sapiens
tgcaaaaatgtaaatgtaaatcattatccagctaatatat

SEQ ID NO: 57079 - DNA, 40 bp, Homo sapiens
atatattagctggataatgatttacatttacatttttgca

SEQ ID NO: 57080 - DNA, 40 bp, Homo sapiens
gcaaaaatgtaaatgtaaatcattatccagctaatatata

SEQ ID NO: 57081 - DNA, 40 bp, Homo sapiens
tatatattagctggataatgatttacatttacatttttgc

SEQ ID NO: 57082 - DNA, 40 bp, Homo sapiens
caaaaatgtaaatgtaaatcattatccagctaatatatat

SEQ ID NO: 57083 - DNA, 40 bp, Homo sapiens
atatatattagctggataatgatttacatttacatttttg

SEQ ID NO: 57084 - DNA, 40 bp, Homo sapiens
aaaaatgtaaatgtaaatcattatccagctaatatatatg

SEQ ID NO: 57085 - DNA, 40 bp, Homo sapiens
catatatattagctggataatgatttacatttacattttt

SEQ ID NO: 57086 - DNA, 40 bp, Homo sapiens
aaaatgtaaatgtaaatcattatccagctaatatatatgt

SEQ ID NO: 57087 - DNA, 40 bp, Homo sapiens
acatatatattagctggataatgatttacatttacatttt

SEQ ID NO: 57088 - DNA, 40 bp, Homo sapiens
aaatgtaaatgtaaatcattatccagctaatatatatgtt

SEQ ID NO: 57089 - DNA, 40 bp, Homo sapiens
aacatatatattagctggataatgatttacatttacattt

SEQ ID NO: 57090 - DNA, 40 bp, Homo sapiens
aatgtaaatgtaaatcattatccagctaatatatatgttg

SEQ ID NO: 57091 - DNA, 40 bp, Homo sapiens
caacatatatattagctggataatgatttacatttacatt

SEQ ID NO: 57092 - DNA, 40 bp, Homo sapiens
atgtaaatgtaaatcattatccagctaatatatatgttgt

SEQ ID NO: 57093 - DNA, 40 bp, Homo sapiens
acaacatatatattagctggataatgatttacatttacat

SEQ ID NO: 57094 - DNA, 40 bp, Homo sapiens
tgtaaatgtaaatcattatccagctaatatatatgttgta

SEQ ID NO: 57095 - DNA, 40 bp, Homo sapiens
tacaacatatatattagctggataatgatttacatttaca

SEQ ID NO: 57096 - DNA, 40 bp, Homo sapiens
gtaaatgtaaatcattatccagctaatatatatgttgtat

SEQ ID NO: 57097 - DNA, 40 bp, Homo sapiens
atacaacatatatattagctggataatgatttacatttac

SEQ ID NO: 57098 - DNA, 40 bp, Homo sapiens
taaatgtaaatcattatccagctaatatatatgttgtatt

SEQ ID NO: 57099 - DNA, 40 bp, Homo sapiens
aatacaacatatatattagctggataatgatttacattta

SEQ ID NO: 57100 - DNA, 40 bp, Homo sapiens
aaatgtaaatcattatccagctaatatatatgttgtattt

SEQ ID NO: 57101 - DNA, 40 bp, Homo sapiens
aaatacaacatatatattagctggataatgatttacattt

SEQ ID NO: 57102 - DNA, 40 bp, Homo sapiens
aatgtaaatcattatccagctaatatatatgttgtatttc

SEQ ID NO: 57103 - DNA, 40 bp, Homo sapiens
gaaatacaacatatatattagctggataatgatttacatt

SEQ ID NO: 57104 - DNA, 40 bp, Homo sapiens
atgtaaatcattatccagctaatatatatgttgtatttcc

SEQ ID NO: 57105 - DNA, 40 bp, Homo sapiens
ggaaatacaacatatatattagctggataatgatttacat

SEQ ID NO: 57106 - DNA, 40 bp, Homo sapiens
tgtaaatcattatccagctaatatatatgttgtatttccc

SEQ ID NO: 57107 - DNA, 40 bp, Homo sapiens
gggaaatacaacatatatattagctggataatgatttaca

SEQ ID NO: 57108 - DNA, 40 bp, Homo sapiens
gtaaatcattatccagctaatatatatgttgtatttccct

SEQ ID NO: 57109 - DNA, 40 bp, Homo sapiens
agggaaatacaacatatatattagctggataatgatttac

SEQ ID NO: 57110 - DNA, 40 bp, Homo sapiens
taaatcattatccagctaatatatatgttgtatttcccta

SEQ ID NO: 57111 - DNA, 40 bp, Homo sapiens
tagggaaatacaacatatatattagctggataatgattta

SEQ ID NO: 57112 - DNA, 40 bp, Homo sapiens
aaatcattatccagctaatatatatgttgtatttccctag

SEQ ID NO: 57113 - DNA, 40 bp, Homo sapiens
ctagggaaatacaacatatatattagctggataatgattt

SEQ ID NO: 57114 - DNA, 40 bp, Homo sapiens
aatcattatccagctaatatatatgttgtatttccctagt

SEQ ID NO: 57115 - DNA, 40 bp, Homo sapiens
actagggaaatacaacatatatattagctggataatgatt

SEQ ID NO: 57116 - DNA, 40 bp, Homo sapiens
atcattatccagctaatatatatgttgtatttccctagta

SEQ ID NO: 57117 - DNA, 40 bp, Homo sapiens
tactagggaaatacaacatatatattagctggataatgat

SEQ ID NO: 57118 - DNA, 40 bp, Homo sapiens
tcattatccagctaatatatatgttgtatttccctagtag

SEQ ID NO: 57119 - DNA, 40 bp, Homo sapiens
ctactagggaaatacaacatatatattagctggataatga

SEQ ID NO: 57120 - DNA, 40 bp, Homo sapiens
cattatccagctaatatatatgttgtatttccctagtagg

SEQ ID NO: 57121 - DNA, 40 bp, Homo sapiens
cctactagggaaatacaacatatatattagctggataatg

SEQ ID NO: 57122 - DNA, 40 bp, Homo sapiens
attatccagctaatatatatgttgtatttccctagtagga

SEQ ID NO: 57123 - DNA, 40 bp, Homo sapiens
tcctactagggaaatacaacatatatattagctggataat

SEQ ID NO: 57124 - DNA, 40 bp, Homo sapiens
ttatccagctaatatatatgttgtatttccctagtaggag

SEQ ID NO: 57125 - DNA, 40 bp, Homo sapiens
ctcctactagggaaatacaacatatatattagctggataa

SEQ ID NO: 57126 - DNA, 40 bp, Homo sapiens
tatccagctaatatatatgttgtatttccctagtaggaga

SEQ ID NO: 57127 - DNA, 40 bp, Homo sapiens
tctcctactagggaaatacaacatatatattagctggata

SEQ ID NO: 57128 - DNA, 40 bp, Homo sapiens
atccagctaatatatatgttgtatttccctagtaggagag

SEQ ID NO: 57129 - DNA, 40 bp, Homo sapiens
ctctcctactagggaaatacaacatatatattagctggat

SEQ ID NO: 57130 - DNA, 40 bp, Homo sapiens
tccagctaatatatatgttgtatttccctagtaggagagc

SEQ ID NO: 57131 - DNA, 40 bp, Homo sapiens
gctctcctactagggaaatacaacatatatattagctgga

SEQ ID NO: 57132 - DNA, 40 bp, Homo sapiens
ccagctaatatatatgttgtatttccctagtaggagagca

SEQ ID NO: 57133 - DNA, 40 bp, Homo sapiens
tgctctcctactagggaaatacaacatatatattagctgg

SEQ ID NO: 57134 - DNA, 40 bp, Homo sapiens
cagctaatatatatgttgtatttccctagtaggagagcat

SEQ ID NO: 57135 - DNA, 40 bp, Homo sapiens
atgctctcctactagggaaatacaacatatatattagctg

SEQ ID NO: 57136 - DNA, 40 bp, Homo sapiens
agctaatatatatgttgtatttccctagtaggagagcata

SEQ ID NO: 57137 - DNA, 40 bp, Homo sapiens
tatgctctcctactagggaaatacaacatatatattagct

SEQ ID NO: 57138 - DNA, 40 bp, Homo sapiens
gctaatatatatgttgtatttccctagtaggagagcatat

SEQ ID NO: 57139 - DNA, 40 bp, Homo sapiens
atatgctctcctactagggaaatacaacatatatattagc

SEQ ID NO: 57140 - DNA, 40 bp, Homo sapiens
ctaatatatatgttgtatttccctagtaggagagcatatg

SEQ ID NO: 57141 - DNA, 40 bp, Homo sapiens
catatgctctcctactagggaaatacaacatatatattag

SEQ ID NO: 57142 - DNA, 40 bp, Homo sapiens
taatatatatgttgtatttccctagtaggagagcatatgt

SEQ ID NO: 57143 - DNA, 40 bp, Homo sapiens
acatatgctctcctactagggaaatacaacatatatatta

SEQ ID NO: 57144 - DNA, 40 bp, Homo sapiens
aatatatatgttgtatttccctagtaggagagcatatgta

SEQ ID NO: 57145 - DNA, 40 bp, Homo sapiens
tacatatgctctcctactagggaaatacaacatatatatt

SEQ ID NO: 57146 - DNA, 40 bp, Homo sapiens
atatatatgttgtatttccctagtaggagagcatatgtac

SEQ ID NO: 57147 - DNA, 40 bp, Homo sapiens
gtacatatgctctcctactagggaaatacaacatatatat

SEQ ID NO: 57148 - DNA, 40 bp, Homo sapiens
tatatatgttgtatttccctagtaggagagcatatgtacc

SEQ ID NO: 57149 - DNA, 40 bp, Homo sapiens
ggtacatatgctctcctactagggaaatacaacatatata

SEQ ID NO: 57150 - DNA, 40 bp, Homo sapiens
atatatgttgtatttccctagtaggagagcatatgtacct

SEQ ID NO: 57151 - DNA, 40 bp, Homo sapiens
aggtacatatgctctcctactagggaaatacaacatatat

SEQ ID NO: 57152 - DNA, 40 bp, Homo sapiens
tatatgttgtatttccctagtaggagagcatatgtacctc

SEQ ID NO: 57153 - DNA, 40 bp, Homo sapiens
gaggtacatatgctctcctactagggaaatacaacatata

SEQ ID NO: 57154 - DNA, 40 bp, Homo sapiens
atatgttgtatttccctagtaggagagcatatgtacctct

SEQ ID NO: 57155 - DNA, 40 bp, Homo sapiens
agaggtacatatgctctcctactagggaaatacaacatat

SEQ ID NO: 57156 - DNA, 40 bp, Homo sapiens
tatgttgtatttccctagtaggagagcatatgtacctctt

SEQ ID NO: 57157 - DNA, 40 bp, Homo sapiens
aagaggtacatatgctctcctactagggaaatacaacata

SEQ ID NO: 57158 - DNA, 40 bp, Homo sapiens
atgttgtatttccctagtaggagagcatatgtacctcttc

SEQ ID NO: 57159 - DNA, 40 bp, Homo sapiens
gaagaggtacatatgctctcctactagggaaatacaacat

SEQ ID NO: 57160 - DNA, 40 bp, Homo sapiens
tgttgtatttccctagtaggagagcatatgtacctcttcc

SEQ ID NO: 57161 - DNA, 40 bp, Homo sapiens
ggaagaggtacatatgctctcctactagggaaatacaaca

SEQ ID NO: 57162 - DNA, 40 bp, Homo sapiens
gttgtatttccctagtaggagagcatatgtacctcttcct

SEQ ID NO: 57163 - DNA, 40 bp, Homo sapiens
aggaagaggtacatatgctctcctactagggaaatacaac

SEQ ID NO: 57164 - DNA, 40 bp, Homo sapiens
ttgtatttccctagtaggagagcatatgtacctcttccta

SEQ ID NO: 57165 - DNA, 40 bp, Homo sapiens
taggaagaggtacatatgctctcctactagggaaatacaa

SEQ ID NO: 57166 - DNA, 40 bp, Homo sapiens
tgtatttccctagtaggagagcatatgtacctcttcctag

SEQ ID NO: 57167 - DNA, 40 bp, Homo sapiens
ctaggaagaggtacatatgctctcctactagggaaataca

SEQ ID NO: 57168 - DNA, 40 bp, Homo sapiens
gtatttccctagtaggagagcatatgtacctcttcctagt

SEQ ID NO: 57169 - DNA, 40 bp, Homo sapiens
actaggaagaggtacatatgctctcctactagggaaatac

SEQ ID NO: 57170 - DNA, 40 bp, Homo sapiens
tatttccctagtaggagagcatatgtacctcttcctagtt

SEQ ID NO: 57171 - DNA, 40 bp, Homo sapiens
aactaggaagaggtacatatgctctcctactagggaaata

SEQ ID NO: 57172 - DNA, 40 bp, Homo sapiens
atttccctagtaggagagcatatgtacctcttcctagtta

SEQ ID NO: 57173 - DNA, 40 bp, Homo sapiens
taactaggaagaggtacatatgctctcctactagggaaat

SEQ ID NO: 57174 - DNA, 40 bp, Homo sapiens
tttccctagtaggagagcatatgtacctcttcctagttat

SEQ ID NO: 57175 - DNA, 40 bp, Homo sapiens
ataactaggaagaggtacatatgctctcctactagggaaa

SEQ ID NO: 57176 - DNA, 40 bp, Homo sapiens
ttccctagtaggagagcatatgtacctcttcctagttata

SEQ ID NO: 57177 - DNA, 40 bp, Homo sapiens
tataactaggaagaggtacatatgctctcctactagggaa

SEQ ID NO: 57178 - DNA, 40 bp, Homo sapiens
tccctagtaggagagcatatgtacctcttcctagttatac

SEQ ID NO: 57179 - DNA, 40 bp, Homo sapiens
gtataactaggaagaggtacatatgctctcctactaggga

SEQ ID NO: 57180 - DNA, 40 bp, Homo sapiens
ccctagtaggagagcatatgtacctcttcctagttataca

SEQ ID NO: 57181 - DNA, 40 bp, Homo sapiens
tgtataactaggaagaggtacatatgctctcctactaggg

SEQ ID NO: 57182 - DNA, 40 bp, Homo sapiens
cctagtaggagagcatatgtacctcttcctagttatacaa

SEQ ID NO: 57183 - DNA, 40 bp, Homo sapiens
ttgtataactaggaagaggtacatatgctctcctactagg

SEQ ID NO: 57184 - DNA, 40 bp, Homo sapiens
ctagtaggagagcatatgtacctcttcctagttatacaaa

SEQ ID NO: 57185 - DNA, 40 bp, Homo sapiens
tttgtataactaggaagaggtacatatgctctcctactag

SEQ ID NO: 57186 - DNA, 40 bp, Homo sapiens
tagtaggagagcatatgtacctcttcctagttatacaaat

SEQ ID NO: 57187 - DNA, 40 bp, Homo sapiens
atttgtataactaggaagaggtacatatgctctcctacta

SEQ ID NO: 57188 - DNA, 40 bp, Homo sapiens
agtaggagagcatatgtacctcttcctagttatacaaatt

SEQ ID NO: 57189 - DNA, 40 bp, Homo sapiens
aatttgtataactaggaagaggtacatatgctctcctact

SEQ ID NO: 57190 - DNA, 40 bp, Homo sapiens
gtaggagagcatatgtacctcttcctagttatacaaattt

SEQ ID NO: 57191 - DNA, 40 bp, Homo sapiens
aaatttgtataactaggaagaggtacatatgctctcctac

SEQ ID NO: 57192 - DNA, 40 bp, Homo sapiens
taggagagcatatgtacctcttcctagttatacaaatttg

SEQ ID NO: 57193 - DNA, 40 bp, Homo sapiens
caaatttgtataactaggaagaggtacatatgctctccta

SEQ ID NO: 57194 - DNA, 40 bp, Homo sapiens
aggagagcatatgtacctcttcctagttatacaaatttga

SEQ ID NO: 57195 - DNA, 40 bp, Homo sapiens
tcaaatttgtataactaggaagaggtacatatgctctcct

SEQ ID NO: 57196 - DNA, 40 bp, Homo sapiens
ggagagcatatgtacctcttcctagttatacaaatttgat

SEQ ID NO: 57197 - DNA, 40 bp, Homo sapiens
atcaaatttgtataactaggaagaggtacatatgctctcc

SEQ ID NO: 57198 - DNA, 40 bp, Homo sapiens
gagagcatatgtacctcttcctagttatacaaatttgata

SEQ ID NO: 57199 - DNA, 40 bp, Homo sapiens
tatcaaatttgtataactaggaagaggtacatatgctctc

SEQ ID NO: 57200 - DNA, 40 bp, Homo sapiens
agagcatatgtacctcttcctagttatacaaatttgatat

SEQ ID NO: 57201 - DNA, 40 bp, Homo sapiens
atatcaaatttgtataactaggaagaggtacatatgctct

SEQ ID NO: 57202 - DNA, 40 bp, Homo sapiens
gagcatatgtacctcttcctagttatacaaatttgatata

SEQ ID NO: 57203 - DNA, 40 bp, Homo sapiens
tatatcaaatttgtataactaggaagaggtacatatgctc

SEQ ID NO: 57204 - DNA, 40 bp, Homo sapiens
agcatatgtacctcttcctagttatacaaatttgatatat

SEQ ID NO: 57205 - DNA, 40 bp, Homo sapiens
atatatcaaatttgtataactaggaagaggtacatatgct

SEQ ID NO: 57206 - DNA, 40 bp, Homo sapiens
gcatatgtacctcttcctagttatacaaatttgatatata

SEQ ID NO: 57207 - DNA, 40 bp, Homo sapiens
tatatatcaaatttgtataactaggaagaggtacatatgc

SEQ ID NO: 57208 - DNA, 40 bp, Homo sapiens
catatgtacctcttcctagttatacaaatttgatatatag

SEQ ID NO: 57209 - DNA, 40 bp, Homo sapiens
ctatatatcaaatttgtataactaggaagaggtacatatg

SEQ ID NO: 57210 - DNA, 40 bp, Homo sapiens
atatgtacctcttcctagttatacaaatttgatatatagt

SEQ ID NO: 57211 - DNA, 40 bp, Homo sapiens
actatatatcaaatttgtataactaggaagaggtacatat

SEQ ID NO: 57212 - DNA, 40 bp, Homo sapiens
tatgtacctcttcctagttatacaaatttgatatatagta

SEQ ID NO: 57213 - DNA, 40 bp, Homo sapiens
tactatatatcaaatttgtataactaggaagaggtacata

SEQ ID NO: 57214 - DNA, 40 bp, Homo sapiens
atgtacctcttcctagttatacaaatttgatatatagtaa

SEQ ID NO: 57215 - DNA, 40 bp, Homo sapiens
ttactatatatcaaatttgtataactaggaagaggtacat

SEQ ID NO: 57216 - DNA, 40 bp, Homo sapiens
tgtacctcttcctagttatacaaatttgatatatagtaaa

SEQ ID NO: 57217 - DNA, 40 bp, Homo sapiens
tttactatatatcaaatttgtataactaggaagaggtaca

SEQ ID NO: 57218 - DNA, 40 bp, Homo sapiens
gtacctcttcctagttatacaaatttgatatatagtaaag

SEQ ID NO: 57219 - DNA, 40 bp, Homo sapiens
ctttactatatatcaaatttgtataactaggaagaggtac

SEQ ID NO: 57220 - DNA, 40 bp, Homo sapiens
tacctcttcctagttatacaaatttgatatatagtaaaga

SEQ ID NO: 57221 - DNA, 40 bp, Homo sapiens
tctttactatatatcaaatttgtataactaggaagaggta

SEQ ID NO: 57222 - DNA, 40 bp, Homo sapiens
acctcttcctagttatacaaatttgatatatagtaaagaa

SEQ ID NO: 57223 - DNA, 40 bp, Homo sapiens
ttctttactatatatcaaatttgtataactaggaagaggt

SEQ ID NO: 57224 - DNA, 40 bp, Homo sapiens
cctcttcctagttatacaaatttgatatatagtaaagaaa

SEQ ID NO: 57225 - DNA, 40 bp, Homo sapiens
tttctttactatatatcaaatttgtataactaggaagagg

SEQ ID NO: 57226 - DNA, 40 bp, Homo sapiens
ctcttcctagttatacaaatttgatatatagtaaagaaac

SEQ ID NO: 57227 - DNA, 40 bp, Homo sapiens
gtttctttactatatatcaaatttgtataactaggaagag

SEQ ID NO: 57228 - DNA, 40 bp, Homo sapiens
tcttcctagttatacaaatttgatatatagtaaagaaaca

SEQ ID NO: 57229 - DNA, 40 bp, Homo sapiens
tgtttctttactatatatcaaatttgtataactaggaaga

SEQ ID NO: 57230 - DNA, 40 bp, Homo sapiens
cttcctagttatacaaatttgatatatagtaaagaaacag

SEQ ID NO: 57231 - DNA, 40 bp, Homo sapiens
ctgtttctttactatatatcaaatttgtataactaggaag

SEQ ID NO: 57232 - DNA, 40 bp, Homo sapiens
ttcctagttatacaaatttgatatatagtaaagaaacagt

SEQ ID NO: 57233 - DNA, 40 bp, Homo sapiens
actgtttctttactatatatcaaatttgtataactaggaa

SEQ ID NO: 57234 - DNA, 40 bp, Homo sapiens
tcctagttatacaaatttgatatatagtaaagaaacagta

SEQ ID NO: 57235 - DNA, 40 bp, Homo sapiens
tactgtttctttactatatatcaaatttgtataactagga

SEQ ID NO: 57236 - DNA, 40 bp, Homo sapiens
cctagttatacaaatttgatatatagtaaagaaacagtaa

SEQ ID NO: 57237 - DNA, 40 bp, Homo sapiens
ttactgtttctttactatatatcaaatttgtataactagg

SEQ ID NO: 57238 - DNA, 40 bp, Homo sapiens
ctagttatacaaatttgatatatagtaaagaaacagtaaa

SEQ ID NO: 57239 - DNA, 40 bp, Homo sapiens
tttactgtttctttactatatatcaaatttgtataactag

SEQ ID NO: 57240 - DNA, 40 bp, Homo sapiens
tagttatacaaatttgatatatagtaaagaaacagtaaat

SEQ ID NO: 57241 - DNA, 40 bp, Homo sapiens
atttactgtttctttactatatatcaaatttgtataacta

SEQ ID NO: 57242 - DNA, 40 bp, Homo sapiens
agttatacaaatttgatatatagtaaagaaacagtaaatt

SEQ ID NO: 57243 - DNA, 40 bp, Homo sapiens
aatttactgtttctttactatatatcaaatttgtataact

SEQ ID NO: 57244 - DNA, 40 bp, Homo sapiens
gttatacaaatttgatatatagtaaagaaacagtaaattc

SEQ ID NO: 57245 - DNA, 40 bp, Homo sapiens
gaatttactgtttctttactatatatcaaatttgtataac

SEQ ID NO: 57246 - DNA, 40 bp, Homo sapiens
ttatacaaatttgatatatagtaaagaaacagtaaattct

SEQ ID NO: 57247 - DNA, 40 bp, Homo sapiens
agaatttactgtttctttactatatatcaaatttgtataa

SEQ ID NO: 57248 - DNA, 40 bp, Homo sapiens
tatacaaatttgatatatagtaaagaaacagtaaattcta

SEQ ID NO: 57249 - DNA, 40 bp, Homo sapiens
tagaatttactgtttctttactatatatcaaatttgtata

SEQ ID NO: 57250 - DNA, 40 bp, Homo sapiens
atacaaatttgatatatagtaaagaaacagtaaattctac

SEQ ID NO: 57251 - DNA, 40 bp, Homo sapiens
gtagaatttactgtttctttactatatatcaaatttgtat

SEQ ID NO: 57252 - DNA, 40 bp, Homo sapiens
tacaaatttgatatatagtaaagaaacagtaaattctact

SEQ ID NO: 57253 - DNA, 40 bp, Homo sapiens
agtagaatttactgtttctttactatatatcaaatttgta

SEQ ID NO: 57254 - DNA, 40 bp, Homo sapiens
acaaatttgatatatagtaaagaaacagtaaattctactt

SEQ ID NO: 57255 - DNA, 40 bp, Homo sapiens
aagtagaatttactgtttctttactatatatcaaatttgt

SEQ ID NO: 57256 - DNA, 40 bp, Homo sapiens
caaatttgatatatagtaaagaaacagtaaattctacttc

SEQ ID NO: 57257 - DNA, 40 bp, Homo sapiens
gaagtagaatttactgtttctttactatatatcaaatttg

SEQ ID NO: 57258 - DNA, 40 bp, Homo sapiens
aaatttgatatatagtaaagaaacagtaaattctacttca

SEQ ID NO: 57259 - DNA, 40 bp, Homo sapiens
tgaagtagaatttactgtttctttactatatatcaaattt

SEQ ID NO: 57260 - DNA, 40 bp, Homo sapiens
aatttgatatatagtaaagaaacagtaaattctacttcaa

SEQ ID NO: 57261 - DNA, 40 bp, Homo sapiens
ttgaagtagaatttactgtttctttactatatatcaaatt

SEQ ID NO: 57262 - DNA, 40 bp, Homo sapiens
atttgatatatagtaaagaaacagtaaattctacttcaag

SEQ ID NO: 57263 - DNA, 40 bp, Homo sapiens
cttgaagtagaatttactgtttctttactatatatcaaat

SEQ ID NO: 57264 - DNA, 40 bp, Homo sapiens
tttgatatatagtaaagaaacagtaaattctacttcaagt

SEQ ID NO: 57265 - DNA, 40 bp, Homo sapiens
acttgaagtagaatttactgtttctttactatatatcaaa

SEQ ID NO: 57266 - DNA, 40 bp, Homo sapiens
ttgatatatagtaaagaaacagtaaattctacttcaagtc

SEQ ID NO: 57267 - DNA, 40 bp, Homo sapiens
gacttgaagtagaatttactgtttctttactatatatcaa

SEQ ID NO: 57268 - DNA, 40 bp, Homo sapiens
tgatatatagtaaagaaacagtaaattctacttcaagtca

SEQ ID NO: 57269 - DNA, 40 bp, Homo sapiens
tgacttgaagtagaatttactgtttctttactatatatca

SEQ ID NO: 57270 - DNA, 40 bp, Homo sapiens
gatatatagtaaagaaacagtaaattctacttcaagtcat

SEQ ID NO: 57271 - DNA, 40 bp, Homo sapiens
atgacttgaagtagaatttactgtttctttactatatatc

SEQ ID NO: 57272 - DNA, 40 bp, Homo sapiens
atatatagtaaagaaacagtaaattctacttcaagtcatt

SEQ ID NO: 57273 - DNA, 40 bp, Homo sapiens
aatgacttgaagtagaatttactgtttctttactatatat

SEQ ID NO: 57274 - DNA, 40 bp, Homo sapiens
tatatagtaaagaaacagtaaattctacttcaagtcattt

SEQ ID NO: 57275 - DNA, 40 bp, Homo sapiens
aaatgacttgaagtagaatttactgtttctttactatata

SEQ ID NO: 57276 - DNA, 40 bp, Homo sapiens
atatagtaaagaaacagtaaattctacttcaagtcatttt

SEQ ID NO: 57277 - DNA, 40 bp, Homo sapiens
aaaatgacttgaagtagaatttactgtttctttactatat

SEQ ID NO: 57278 - DNA, 40 bp, Homo sapiens
tatagtaaagaaacagtaaattctacttcaagtcattttg

SEQ ID NO: 57279 - DNA, 40 bp, Homo sapiens
caaaatgacttgaagtagaatttactgtttctttactata

SEQ ID NO: 57280 - DNA, 40 bp, Homo sapiens
atagtaaagaaacagtaaattctacttcaagtcattttgg

SEQ ID NO: 57281 - DNA, 40 bp, Homo sapiens
ccaaaatgacttgaagtagaatttactgtttctttactat

SEQ ID NO: 57282 - DNA, 40 bp, Homo sapiens
tagtaaagaaacagtaaattctacttcaagtcattttggg

SEQ ID NO: 57283 - DNA, 40 bp, Homo sapiens
cccaaaatgacttgaagtagaatttactgtttctttacta

SEQ ID NO: 57284 - DNA, 40 bp, Homo sapiens
agtaaagaaacagtaaattctacttcaagtcattttggga

SEQ ID NO: 57285 - DNA, 40 bp, Homo sapiens
tcccaaaatgacttgaagtagaatttactgtttctttact

SEQ ID NO: 57286 - DNA, 40 bp, Homo sapiens
gtaaagaaacagtaaattctacttcaagtcattttgggag

SEQ ID NO: 57287 - DNA, 40 bp, Homo sapiens
ctcccaaaatgacttgaagtagaatttactgtttctttac

SEQ ID NO: 57288 - DNA, 40 bp, Homo sapiens
taaagaaacagtaaattctacttcaagtcattttgggagg

SEQ ID NO: 57289 - DNA, 40 bp, Homo sapiens
cctcccaaaatgacttgaagtagaatttactgtttcttta

SEQ ID NO: 57290 - DNA, 40 bp, Homo sapiens
aaagaaacagtaaattctacttcaagtcattttgggagga

SEQ ID NO: 57291 - DNA, 40 bp, Homo sapiens
tcctcccaaaatgacttgaagtagaatttactgtttcttt

SEQ ID NO: 57292 - DNA, 40 bp, Homo sapiens
aagaaacagtaaattctacttcaagtcattttgggaggat

SEQ ID NO: 57293 - DNA, 40 bp, Homo sapiens
atcctcccaaaatgacttgaagtagaatttactgtttctt

SEQ ID NO: 57294 - DNA, 40 bp, Homo sapiens
agaaacagtaaattctacttcaagtcattttgggaggatt

SEQ ID NO: 57295 - DNA, 40 bp, Homo sapiens
aatcctcccaaaatgacttgaagtagaatttactgtttct

SEQ ID NO: 57296 - DNA, 40 bp, Homo sapiens
gaaacagtaaattctacttcaagtcattttgggaggatta

SEQ ID NO: 57297 - DNA, 40 bp, Homo sapiens
taatcctcccaaaatgacttgaagtagaatttactgtttc

SEQ ID NO: 57298 - DNA, 40 bp, Homo sapiens
aaacagtaaattctacttcaagtcattttgggaggattaa

SEQ ID NO: 57299 - DNA, 40 bp, Homo sapiens
ttaatcctcccaaaatgacttgaagtagaatttactgttt

SEQ ID NO: 57300 - DNA, 40 bp, Homo sapiens
aacagtaaattctacttcaagtcattttgggaggattaaa

SEQ ID NO: 57301 - DNA, 40 bp, Homo sapiens
tttaatcctcccaaaatgacttgaagtagaatttactgtt

SEQ ID NO: 57302 - DNA, 40 bp, Homo sapiens
acagtaaattctacttcaagtcattttgggaggattaaaa

SEQ ID NO: 57303 - DNA, 40 bp, Homo sapiens
ttttaatcctcccaaaatgacttgaagtagaatttactgt

SEQ ID NO: 57304 - DNA, 40 bp, Homo sapiens
cagtaaattctacttcaagtcattttgggaggattaaaaa

SEQ ID NO: 57305 - DNA, 40 bp, Homo sapiens
tttttaatcctcccaaaatgacttgaagtagaatttactg

SEQ ID NO: 57306 - DNA, 40 bp, Homo sapiens
agtaaattctacttcaagtcattttgggaggattaaaaac

SEQ ID NO: 57307 - DNA, 40 bp, Homo sapiens
gtttttaatcctcccaaaatgacttgaagtagaatttact

SEQ ID NO: 57308 - DNA, 40 bp, Homo sapiens
gtaaattctacttcaagtcattttgggaggattaaaaact

SEQ ID NO: 57309 - DNA, 40 bp, Homo sapiens
agtttttaatcctcccaaaatgacttgaagtagaatttac

SEQ ID NO: 57310 - DNA, 40 bp, Homo sapiens
taaattctacttcaagtcattttgggaggattaaaaactg

SEQ ID NO: 57311 - DNA, 40 bp, Homo sapiens
cagtttttaatcctcccaaaatgacttgaagtagaattta

SEQ ID NO: 57312 - DNA, 40 bp, Homo sapiens
aaattctacttcaagtcattttgggaggattaaaaactga

SEQ ID NO: 57313 - DNA, 40 bp, Homo sapiens
tcagtttttaatcctcccaaaatgacttgaagtagaattt

SEQ ID NO: 57314 - DNA, 40 bp, Homo sapiens
aattctacttcaagtcattttgggaggattaaaaactgaa

SEQ ID NO: 57315 - DNA, 40 bp, Homo sapiens
ttcagtttttaatcctcccaaaatgacttgaagtagaatt

SEQ ID NO: 57316 - DNA, 40 bp, Homo sapiens
attctacttcaagtcattttgggaggattaaaaactgaat

SEQ ID NO: 57317 - DNA, 40 bp, Homo sapiens
attcagtttttaatcctcccaaaatgacttgaagtagaat

SEQ ID NO: 57318 - DNA, 40 bp, Homo sapiens
ttctacttcaagtcattttgggaggattaaaaactgaatt

SEQ ID NO: 57319 - DNA, 40 bp, Homo sapiens
aattcagtttttaatcctcccaaaatgacttgaagtagaa

SEQ ID NO: 57320 - DNA, 40 bp, Homo sapiens
tctacttcaagtcattttgggaggattaaaaactgaattt

SEQ ID NO: 57321 - DNA, 40 bp, Homo sapiens
aaattcagtttttaatcctcccaaaatgacttgaagtaga

SEQ ID NO: 57322 - DNA, 40 bp, Homo sapiens
ctacttcaagtcattttgggaggattaaaaactgaatttc

SEQ ID NO: 57323 - DNA, 40 bp, Homo sapiens
gaaattcagtttttaatcctcccaaaatgacttgaagtag

SEQ ID NO: 57324 - DNA, 40 bp, Homo sapiens
tacttcaagtcattttgggaggattaaaaactgaatttct

SEQ ID NO: 57325 - DNA, 40 bp, Homo sapiens
agaaattcagtttttaatcctcccaaaatgacttgaagta

SEQ ID NO: 57326 - DNA, 40 bp, Homo sapiens
acttcaagtcattttgggaggattaaaaactgaatttctc

SEQ ID NO: 57327 - DNA, 40 bp, Homo sapiens
gagaaattcagtttttaatcctcccaaaatgacttgaagt

SEQ ID NO: 57328 - DNA, 40 bp, Homo sapiens
cttcaagtcattttgggaggattaaaaactgaatttctct

SEQ ID NO: 57329 - DNA, 40 bp, Homo sapiens
agagaaattcagtttttaatcctcccaaaatgacttgaag

SEQ ID NO: 57330 - DNA, 40 bp, Homo sapiens
ttcaagtcattttgggaggattaaaaactgaatttctcta

SEQ ID NO: 57331 - DNA, 40 bp, Homo sapiens
tagagaaattcagtttttaatcctcccaaaatgacttgaa

SEQ ID NO: 57332 - DNA, 40 bp, Homo sapiens
tcaagtcattttgggaggattaaaaactgaatttctctag

SEQ ID NO: 57333 - DNA, 40 bp, Homo sapiens
ctagagaaattcagtttttaatcctcccaaaatgacttga

SEQ ID NO: 57334 - DNA, 40 bp, Homo sapiens
caagtcattttgggaggattaaaaactgaatttctctagt

SEQ ID NO: 57335 - DNA, 40 bp, Homo sapiens
actagagaaattcagtttttaatcctcccaaaatgacttg

SEQ ID NO: 57336 - DNA, 40 bp, Homo sapiens
aagtcattttgggaggattaaaaactgaatttctctagtt

SEQ ID NO: 57337 - DNA, 40 bp, Homo sapiens
aactagagaaattcagtttttaatcctcccaaaatgactt

SEQ ID NO: 57338 - DNA, 40 bp, Homo sapiens
agtcattttgggaggattaaaaactgaatttctctagttt

SEQ ID NO: 57339 - DNA, 40 bp, Homo sapiens
aaactagagaaattcagtttttaatcctcccaaaatgact

SEQ ID NO: 57340 - DNA, 40 bp, Homo sapiens
gtcattttgggaggattaaaaactgaatttctctagtttg

SEQ ID NO: 57341 - DNA, 40 bp, Homo sapiens
caaactagagaaattcagtttttaatcctcccaaaatgac

SEQ ID NO: 57342 - DNA, 40 bp, Homo sapiens
tcattttgggaggattaaaaactgaatttctctagtttga

SEQ ID NO: 57343 - DNA, 40 bp, Homo sapiens
tcaaactagagaaattcagtttttaatcctcccaaaatga

SEQ ID NO: 57344 - DNA, 40 bp, Homo sapiens
cattttgggaggattaaaaactgaatttctctagtttgac

SEQ ID NO: 57345 - DNA, 40 bp, Homo sapiens
gtcaaactagagaaattcagtttttaatcctcccaaaatg

SEQ ID NO: 57346 - DNA, 40 bp, Homo sapiens
attttgggaggattaaaaactgaatttctctagtttgacc

SEQ ID NO: 57347 - DNA, 40 bp, Homo sapiens
ggtcaaactagagaaattcagtttttaatcctcccaaaat

SEQ ID NO: 57348 - DNA, 40 bp, Homo sapiens
ttttgggaggattaaaaactgaatttctctagtttgacca

SEQ ID NO: 57349 - DNA, 40 bp, Homo sapiens
tggtcaaactagagaaattcagtttttaatcctcccaaaa

SEQ ID NO: 57350 - DNA, 40 bp, Homo sapiens
tttgggaggattaaaaactgaatttctctagtttgaccat

SEQ ID NO: 57351 - DNA, 40 bp, Homo sapiens
atggtcaaactagagaaattcagtttttaatcctcccaaa

SEQ ID NO: 57352 - DNA, 40 bp, Homo sapiens
ttgggaggattaaaaactgaatttctctagtttgaccatt

SEQ ID NO: 57353 - DNA, 40 bp, Homo sapiens
aatggtcaaactagagaaattcagtttttaatcctcccaa

SEQ ID NO: 57354 - DNA, 40 bp, Homo sapiens
tgggaggattaaaaactgaatttctctagtttgaccattg

SEQ ID NO: 57355 - DNA, 40 bp, Homo sapiens
caatggtcaaactagagaaattcagtttttaatcctccca

SEQ ID NO: 57356 - DNA, 40 bp, Homo sapiens
gggaggattaaaaactgaatttctctagtttgaccattgt

SEQ ID NO: 57357 - DNA, 40 bp, Homo sapiens
acaatggtcaaactagagaaattcagtttttaatcctccc

SEQ ID NO: 57358 - DNA, 40 bp, Homo sapiens
ggaggattaaaaactgaatttctctagtttgaccattgta

SEQ ID NO: 57359 - DNA, 40 bp, Homo sapiens
tacaatggtcaaactagagaaattcagtttttaatcctcc

SEQ ID NO: 57360 - DNA, 40 bp, Homo sapiens
gaggattaaaaactgaatttctctagtttgaccattgtac

SEQ ID NO: 57361 - DNA, 40 bp, Homo sapiens
gtacaatggtcaaactagagaaattcagtttttaatcctc

SEQ ID NO: 57362 - DNA, 40 bp, Homo sapiens
aggattaaaaactgaatttctctagtttgaccattgtaca

SEQ ID NO: 57363 - DNA, 40 bp, Homo sapiens
tgtacaatggtcaaactagagaaattcagtttttaatcct

SEQ ID NO: 57364 - DNA, 40 bp, Homo sapiens
ggattaaaaactgaatttctctagtttgaccattgtacag

SEQ ID NO: 57365 - DNA, 40 bp, Homo sapiens
ctgtacaatggtcaaactagagaaattcagtttttaatcc

SEQ ID NO: 57366 - DNA, 40 bp, Homo sapiens
gattaaaaactgaatttctctagtttgaccattgtacaga

SEQ ID NO: 57367 - DNA, 40 bp, Homo sapiens
tctgtacaatggtcaaactagagaaattcagtttttaatc

SEQ ID NO: 57368 - DNA, 40 bp, Homo sapiens
attaaaaactgaatttctctagtttgaccattgtacagat

SEQ ID NO: 57369 - DNA, 40 bp, Homo sapiens
atctgtacaatggtcaaactagagaaattcagtttttaat

SEQ ID NO: 57370 - DNA, 40 bp, Homo sapiens
ttaaaaactgaatttctctagtttgaccattgtacagatt

SEQ ID NO: 57371 - DNA, 40 bp, Homo sapiens
aatctgtacaatggtcaaactagagaaattcagtttttaa

SEQ ID NO: 57372 - DNA, 40 bp, Homo sapiens
taaaaactgaatttctctagtttgaccattgtacagattt

SEQ ID NO: 57373 - DNA, 40 bp, Homo sapiens
aaatctgtacaatggtcaaactagagaaattcagttttta

SEQ ID NO: 57374 - DNA, 40 bp, Homo sapiens
aaaaactgaatttctctagtttgaccattgtacagattta

SEQ ID NO: 57375 - DNA, 40 bp, Homo sapiens
taaatctgtacaatggtcaaactagagaaattcagttttt

SEQ ID NO: 57376 - DNA, 40 bp, Homo sapiens
aaaactgaatttctctagtttgaccattgtacagatttat

SEQ ID NO: 57377 - DNA, 40 bp, Homo sapiens
ataaatctgtacaatggtcaaactagagaaattcagtttt

SEQ ID NO: 57378 - DNA, 40 bp, Homo sapiens
aaactgaatttctctagtttgaccattgtacagatttatc

SEQ ID NO: 57379 - DNA, 40 bp, Homo sapiens
gataaatctgtacaatggtcaaactagagaaattcagttt

SEQ ID NO: 57380 - DNA, 40 bp, Homo sapiens
aactgaatttctctagtttgaccattgtacagatttatct

SEQ ID NO: 57381 - DNA, 40 bp, Homo sapiens
agataaatctgtacaatggtcaaactagagaaattcagtt

SEQ ID NO: 57382 - DNA, 40 bp, Homo sapiens
actgaatttctctagtttgaccattgtacagatttatctg

SEQ ID NO: 57383 - DNA, 40 bp, Homo sapiens
cagataaatctgtacaatggtcaaactagagaaattcagt

SEQ ID NO: 57384 - DNA, 40 bp, Homo sapiens
ctgaatttctctagtttgaccattgtacagatttatctgg

SEQ ID NO: 57385 - DNA, 40 bp, Homo sapiens
ccagataaatctgtacaatggtcaaactagagaaattcag

SEQ ID NO: 57386 - DNA, 40 bp, Homo sapiens
tgaatttctctagtttgaccattgtacagatttatctggc

SEQ ID NO: 57387 - DNA, 40 bp, Homo sapiens
gccagataaatctgtacaatggtcaaactagagaaattca

SEQ ID NO: 57388 - DNA, 40 bp, Homo sapiens
gaatttctctagtttgaccattgtacagatttatctggca

SEQ ID NO: 57389 - DNA, 40 bp, Homo sapiens
tgccagataaatctgtacaatggtcaaactagagaaattc

SEQ ID NO: 57390 - DNA, 40 bp, Homo sapiens
aatttctctagtttgaccattgtacagatttatctggcaa

SEQ ID NO: 57391 - DNA, 40 bp, Homo sapiens
ttgccagataaatctgtacaatggtcaaactagagaaatt

SEQ ID NO: 57392 - DNA, 40 bp, Homo sapiens
atttctctagtttgaccattgtacagatttatctggcaat

SEQ ID NO: 57393 - DNA, 40 bp, Homo sapiens
attgccagataaatctgtacaatggtcaaactagagaaat

SEQ ID NO: 57394 - DNA, 40 bp, Homo sapiens
tttctctagtttgaccattgtacagatttatctggcaatt

SEQ ID NO: 57395 - DNA, 40 bp, Homo sapiens
aattgccagataaatctgtacaatggtcaaactagagaaa

SEQ ID NO: 57396 - DNA, 40 bp, Homo sapiens
ttctctagtttgaccattgtacagatttatctggcaattt

SEQ ID NO: 57397 - DNA, 40 bp, Homo sapiens
aaattgccagataaatctgtacaatggtcaaactagagaa

SEQ ID NO: 57398 - DNA, 40 bp, Homo sapiens
tctctagtttgaccattgtacagatttatctggcaatttt

SEQ ID NO: 57399 - DNA, 40 bp, Homo sapiens
aaaattgccagataaatctgtacaatggtcaaactagaga

SEQ ID NO: 57400 - DNA, 40 bp, Homo sapiens
ctctagtttgaccattgtacagatttatctggcaatttta

SEQ ID NO: 57401 - DNA, 40 bp, Homo sapiens
taaaattgccagataaatctgtacaatggtcaaactagag

SEQ ID NO: 57402 - DNA, 40 bp, Homo sapiens
tctagtttgaccattgtacagatttatctggcaattttac

SEQ ID NO: 57403 - DNA, 40 bp, Homo sapiens
gtaaaattgccagataaatctgtacaatggtcaaactaga

SEQ ID NO: 57404 - DNA, 40 bp, Homo sapiens
ctagtttgaccattgtacagatttatctggcaattttact

SEQ ID NO: 57405 - DNA, 40 bp, Homo sapiens
agtaaaattgccagataaatctgtacaatggtcaaactag

SEQ ID NO: 57406 - DNA, 40 bp, Homo sapiens
tagtttgaccattgtacagatttatctggcaattttacta

SEQ ID NO: 57407 - DNA, 40 bp, Homo sapiens
tagtaaaattgccagataaatctgtacaatggtcaaacta

SEQ ID NO: 57408 - DNA, 40 bp, Homo sapiens
agtttgaccattgtacagatttatctggcaattttactaa

SEQ ID NO: 57409 - DNA, 40 bp, Homo sapiens
ttagtaaaattgccagataaatctgtacaatggtcaaact

SEQ ID NO: 57410 - DNA, 40 bp, Homo sapiens
gtttgaccattgtacagatttatctggcaattttactaaa

SEQ ID NO: 57411 - DNA, 40 bp, Homo sapiens
tttagtaaaattgccagataaatctgtacaatggtcaaac

SEQ ID NO: 57412 - DNA, 40 bp, Homo sapiens
tttgaccattgtacagatttatctggcaattttactaaaa

SEQ ID NO: 57413 - DNA, 40 bp, Homo sapiens
ttttagtaaaattgccagataaatctgtacaatggtcaaa

SEQ ID NO: 57414 - DNA, 40 bp, Homo sapiens
ttgaccattgtacagatttatctggcaattttactaaaac

SEQ ID NO: 57415 - DNA, 40 bp, Homo sapiens
gttttagtaaaattgccagataaatctgtacaatggtcaa

SEQ ID NO: 57416 - DNA, 40 bp, Homo sapiens
tgaccattgtacagatttatctggcaattttactaaaacc

SEQ ID NO: 57417 - DNA, 40 bp, Homo sapiens
ggttttagtaaaattgccagataaatctgtacaatggtca

SEQ ID NO: 57418 - DNA, 40 bp, Homo sapiens
gaccattgtacagatttatctggcaattttactaaaacct

SEQ ID NO: 57419 - DNA, 40 bp, Homo sapiens
aggttttagtaaaattgccagataaatctgtacaatggtc

SEQ ID NO: 57420 - DNA, 40 bp, Homo sapiens
accattgtacagatttatctggcaattttactaaaacctg

SEQ ID NO: 57421 - DNA, 40 bp, Homo sapiens
caggttttagtaaaattgccagataaatctgtacaatggt

SEQ ID NO: 57422 - DNA, 40 bp, Homo sapiens
ccattgtacagatttatctggcaattttactaaaacctga

SEQ ID NO: 57423 - DNA, 40 bp, Homo sapiens
tcaggttttagtaaaattgccagataaatctgtacaatgg

SEQ ID NO: 57424 - DNA, 40 bp, Homo sapiens
cattgtacagatttatctggcaattttactaaaacctgat

SEQ ID NO: 57425 - DNA, 40 bp, Homo sapiens
atcaggttttagtaaaattgccagataaatctgtacaatg

SEQ ID NO: 57426 - DNA, 40 bp, Homo sapiens
attgtacagatttatctggcaattttactaaaacctgatt

SEQ ID NO: 57427 - DNA, 40 bp, Homo sapiens
aatcaggttttagtaaaattgccagataaatctgtacaat

SEQ ID NO: 57428 - DNA, 40 bp, Homo sapiens
ttgtacagatttatctggcaattttactaaaacctgattt

SEQ ID NO: 57429 - DNA, 40 bp, Homo sapiens
aaatcaggttttagtaaaattgccagataaatctgtacaa

SEQ ID NO: 57430 - DNA, 40 bp, Homo sapiens
tgtacagatttatctggcaattttactaaaacctgattta

SEQ ID NO: 57431 - DNA, 40 bp, Homo sapiens
taaatcaggttttagtaaaattgccagataaatctgtaca

SEQ ID NO: 57432 - DNA, 40 bp, Homo sapiens
gtacagatttatctggcaattttactaaaacctgatttat

SEQ ID NO: 57433 - DNA, 40 bp, Homo sapiens
ataaatcaggttttagtaaaattgccagataaatctgtac

SEQ ID NO: 57434 - DNA, 40 bp, Homo sapiens
tacagatttatctggcaattttactaaaacctgatttata

SEQ ID NO: 57435 - DNA, 40 bp, Homo sapiens
tataaatcaggttttagtaaaattgccagataaatctgta

SEQ ID NO: 57436 - DNA, 40 bp, Homo sapiens
acagatttatctggcaattttactaaaacctgatttatag

SEQ ID NO: 57437 - DNA, 40 bp, Homo sapiens
ctataaatcaggttttagtaaaattgccagataaatctgt

SEQ ID NO: 57438 - DNA, 40 bp, Homo sapiens
cagatttatctggcaattttactaaaacctgatttatagg

SEQ ID NO: 57439 - DNA, 40 bp, Homo sapiens
cctataaatcaggttttagtaaaattgccagataaatctg

SEQ ID NO: 57440 - DNA, 40 bp, Homo sapiens
agatttatctggcaattttactaaaacctgatttataggt

SEQ ID NO: 57441 - DNA, 40 bp, Homo sapiens
acctataaatcaggttttagtaaaattgccagataaatct

SEQ ID NO: 57442 - DNA, 40 bp, Homo sapiens
gatttatctggcaattttactaaaacctgatttataggtt

SEQ ID NO: 57443 - DNA, 40 bp, Homo sapiens
aacctataaatcaggttttagtaaaattgccagataaatc

SEQ ID NO: 57444 - DNA, 40 bp, Homo sapiens
atttatctggcaattttactaaaacctgatttataggtta

SEQ ID NO: 57445 - DNA, 40 bp, Homo sapiens
taacctataaatcaggttttagtaaaattgccagataaat

SEQ ID NO: 57446 - DNA, 40 bp, Homo sapiens
tttatctggcaattttactaaaacctgatttataggttaa

SEQ ID NO: 57447 - DNA, 40 bp, Homo sapiens
ttaacctataaatcaggttttagtaaaattgccagataaa

SEQ ID NO: 57448 - DNA, 40 bp, Homo sapiens
ttatctggcaattttactaaaacctgatttataggttaaa

SEQ ID NO: 57449 - DNA, 40 bp, Homo sapiens
tttaacctataaatcaggttttagtaaaattgccagataa

SEQ ID NO: 57450 - DNA, 40 bp, Homo sapiens
tatctggcaattttactaaaacctgatttataggttaaac

SEQ ID NO: 57451 - DNA, 40 bp, Homo sapiens
gtttaacctataaatcaggttttagtaaaattgccagata

SEQ ID NO: 57452 - DNA, 40 bp, Homo sapiens
atctggcaattttactaaaacctgatttataggttaaact

SEQ ID NO: 57453 - DNA, 40 bp, Homo sapiens
agtttaacctataaatcaggttttagtaaaattgccagat

SEQ ID NO: 57454 - DNA, 40 bp, Homo sapiens
tctggcaattttactaaaacctgatttataggttaaactt

SEQ ID NO: 57455 - DNA, 40 bp, Homo sapiens
aagtttaacctataaatcaggttttagtaaaattgccaga

SEQ ID NO: 57456 - DNA, 40 bp, Homo sapiens
ctggcaattttactaaaacctgatttataggttaaacttg

SEQ ID NO: 57457 - DNA, 40 bp, Homo sapiens
caagtttaacctataaatcaggttttagtaaaattgccag

SEQ ID NO: 57458 - DNA, 40 bp, Homo sapiens
tggcaattttactaaaacctgatttataggttaaacttgg

SEQ ID NO: 57459 - DNA, 40 bp, Homo sapiens
ccaagtttaacctataaatcaggttttagtaaaattgcca

SEQ ID NO: 57460 - DNA, 40 bp, Homo sapiens
ggcaattttactaaaacctgatttataggttaaacttggt

SEQ ID NO: 57461 - DNA, 40 bp, Homo sapiens
accaagtttaacctataaatcaggttttagtaaaattgcc

SEQ ID NO: 57462 - DNA, 40 bp, Homo sapiens
gcaattttactaaaacctgatttataggttaaacttggtg

SEQ ID NO: 57463 - DNA, 40 bp, Homo sapiens
caccaagtttaacctataaatcaggttttagtaaaattgc

SEQ ID NO: 57464 - DNA, 40 bp, Homo sapiens
caattttactaaaacctgatttataggttaaacttggtgt

SEQ ID NO: 57465 - DNA, 40 bp, Homo sapiens
acaccaagtttaacctataaatcaggttttagtaaaattg

SEQ ID NO: 57466 - DNA, 40 bp, Homo sapiens
aattttactaaaacctgatttataggttaaacttggtgta

SEQ ID NO: 57467 - DNA, 40 bp, Homo sapiens
tacaccaagtttaacctataaatcaggttttagtaaaatt

SEQ ID NO: 57468 - DNA, 40 bp, Homo sapiens
attttactaaaacctgatttataggttaaacttggtgtat

SEQ ID NO: 57469 - DNA, 40 bp, Homo sapiens
atacaccaagtttaacctataaatcaggttttagtaaaat

SEQ ID NO: 57470 - DNA, 40 bp, Homo sapiens
ttttactaaaacctgatttataggttaaacttggtgtata

SEQ ID NO: 57471 - DNA, 40 bp, Homo sapiens
tatacaccaagtttaacctataaatcaggttttagtaaaa

SEQ ID NO: 57472 - DNA, 40 bp, Homo sapiens
tttactaaaacctgatttataggttaaacttggtgtatat

SEQ ID NO: 57473 - DNA, 40 bp, Homo sapiens
atatacaccaagtttaacctataaatcaggttttagtaaa

SEQ ID NO: 57474 - DNA, 40 bp, Homo sapiens
ttactaaaacctgatttataggttaaacttggtgtatatc

SEQ ID NO: 57475 - DNA, 40 bp, Homo sapiens
gatatacaccaagtttaacctataaatcaggttttagtaa

SEQ ID NO: 57476 - DNA, 40 bp, Homo sapiens
tactaaaacctgatttataggttaaacttggtgtatatca

SEQ ID NO: 57477 - DNA, 40 bp, Homo sapiens
tgatatacaccaagtttaacctataaatcaggttttagta

SEQ ID NO: 57478 - DNA, 40 bp, Homo sapiens
actaaaacctgatttataggttaaacttggtgtatatcat

SEQ ID NO: 57479 - DNA, 40 bp, Homo sapiens
atgatatacaccaagtttaacctataaatcaggttttagt

SEQ ID NO: 57480 - DNA, 40 bp, Homo sapiens
ctaaaacctgatttataggttaaacttggtgtatatcata

SEQ ID NO: 57481 - DNA, 40 bp, Homo sapiens
tatgatatacaccaagtttaacctataaatcaggttttag

SEQ ID NO: 57482 - DNA, 40 bp, Homo sapiens
taaaacctgatttataggttaaacttggtgtatatcatat

SEQ ID NO: 57483 - DNA, 40 bp, Homo sapiens
atatgatatacaccaagtttaacctataaatcaggtttta

SEQ ID NO: 57484 - DNA, 40 bp, Homo sapiens
aaaacctgatttataggttaaacttggtgtatatcatata

SEQ ID NO: 57485 - DNA, 40 bp, Homo sapiens
tatatgatatacaccaagtttaacctataaatcaggtttt

SEQ ID NO: 57486 - DNA, 40 bp, Homo sapiens
aaacctgatttataggttaaacttggtgtatatcatatat

SEQ ID NO: 57487 - DNA, 40 bp, Homo sapiens
atatatgatatacaccaagtttaacctataaatcaggttt

SEQ ID NO: 57488 - DNA, 40 bp, Homo sapiens
aacctgatttataggttaaacttggtgtatatcatatatc

SEQ ID NO: 57489 - DNA, 40 bp, Homo sapiens
gatatatgatatacaccaagtttaacctataaatcaggtt

SEQ ID NO: 57490 - DNA, 40 bp, Homo sapiens
acctgatttataggttaaacttggtgtatatcatatatca

SEQ ID NO: 57491 - DNA, 40 bp, Homo sapiens
tgatatatgatatacaccaagtttaacctataaatcaggt

SEQ ID NO: 57492 - DNA, 40 bp, Homo sapiens
cctgatttataggttaaacttggtgtatatcatatatcac

SEQ ID NO: 57493 - DNA, 40 bp, Homo sapiens
gtgatatatgatatacaccaagtttaacctataaatcagg

SEQ ID NO: 57494 - DNA, 40 bp, Homo sapiens
ctgatttataggttaaacttggtgtatatcatatatcact

SEQ ID NO: 57495 - DNA, 40 bp, Homo sapiens
agtgatatatgatatacaccaagtttaacctataaatcag

SEQ ID NO: 57496 - DNA, 40 bp, Homo sapiens
tgatttataggttaaacttggtgtatatcatatatcactt

SEQ ID NO: 57497 - DNA, 40 bp, Homo sapiens
aagtgatatatgatatacaccaagtttaacctataaatca

SEQ ID NO: 57498 - DNA, 40 bp, Homo sapiens
gatttataggttaaacttggtgtatatcatatatcacttt

SEQ ID NO: 57499 - DNA, 40 bp, Homo sapiens
aaagtgatatatgatatacaccaagtttaacctataaatc

SEQ ID NO: 57500 - DNA, 40 bp, Homo sapiens
atttataggttaaacttggtgtatatcatatatcacttta

SEQ ID NO: 57501 - DNA, 40 bp, Homo sapiens
taaagtgatatatgatatacaccaagtttaacctataaat

SEQ ID NO: 57502 - DNA, 40 bp, Homo sapiens
tttataggttaaacttggtgtatatcatatatcactttac

SEQ ID NO: 57503 - DNA, 40 bp, Homo sapiens
gtaaagtgatatatgatatacaccaagtttaacctataaa

SEQ ID NO: 57504 - DNA, 40 bp, Homo sapiens
ttataggttaaacttggtgtatatcatatatcactttact

SEQ ID NO: 57505 - DNA, 40 bp, Homo sapiens
agtaaagtgatatatgatatacaccaagtttaacctataa

SEQ ID NO: 57506 - DNA, 40 bp, Homo sapiens
tataggttaaacttggtgtatatcatatatcactttactt

SEQ ID NO: 57507 - DNA, 40 bp, Homo sapiens
aagtaaagtgatatatgatatacaccaagtttaacctata

SEQ ID NO: 57508 - DNA, 40 bp, Homo sapiens
ataggttaaacttggtgtatatcatatatcactttacttt

SEQ ID NO: 57509 - DNA, 40 bp, Homo sapiens
aaagtaaagtgatatatgatatacaccaagtttaacctat

SEQ ID NO: 57510 - DNA, 40 bp, Homo sapiens
taggttaaacttggtgtatatcatatatcactttacttta

SEQ ID NO: 57511 - DNA, 40 bp, Homo sapiens
taaagtaaagtgatatatgatatacaccaagtttaaccta

SEQ ID NO: 57512 - DNA, 40 bp, Homo sapiens
aggttaaacttggtgtatatcatatatcactttactttag

SEQ ID NO: 57513 - DNA, 40 bp, Homo sapiens
ctaaagtaaagtgatatatgatatacaccaagtttaacct

SEQ ID NO: 57514 - DNA, 40 bp, Homo sapiens
ggttaaacttggtgtatatcatatatcactttactttaga

SEQ ID NO: 57515 - DNA, 40 bp, Homo sapiens
tctaaagtaaagtgatatatgatatacaccaagtttaacc

SEQ ID NO: 57516 - DNA, 40 bp, Homo sapiens
gttaaacttggtgtatatcatatatcactttactttagag

SEQ ID NO: 57517 - DNA, 40 bp, Homo sapiens
ctctaaagtaaagtgatatatgatatacaccaagtttaac

SEQ ID NO: 57518 - DNA, 40 bp, Homo sapiens
ttaaacttggtgtatatcatatatcactttactttagagg

SEQ ID NO: 57519 - DNA, 40 bp, Homo sapiens
cctctaaagtaaagtgatatatgatatacaccaagtttaa

SEQ ID NO: 57520 - DNA, 40 bp, Homo sapiens
taaacttggtgtatatcatatatcactttactttagagga

SEQ ID NO: 57521 - DNA, 40 bp, Homo sapiens
tcctctaaagtaaagtgatatatgatatacaccaagttta

SEQ ID NO: 57522 - DNA, 40 bp, Homo sapiens
aaacttggtgtatatcatatatcactttactttagaggaa

SEQ ID NO: 57523 - DNA, 40 bp, Homo sapiens
ttcctctaaagtaaagtgatatatgatatacaccaagttt

SEQ ID NO: 57524 - DNA, 40 bp, Homo sapiens
aacttggtgtatatcatatatcactttactttagaggaat

SEQ ID NO: 57525 - DNA, 40 bp, Homo sapiens
attcctctaaagtaaagtgatatatgatatacaccaagtt

SEQ ID NO: 57526 - DNA, 40 bp, Homo sapiens
acttggtgtatatcatatatcactttactttagaggaatt

SEQ ID NO: 57527 - DNA, 40 bp, Homo sapiens
aattcctctaaagtaaagtgatatatgatatacaccaagt

SEQ ID NO: 57528 - DNA, 40 bp, Homo sapiens
cttggtgtatatcatatatcactttactttagaggaatta

SEQ ID NO: 57529 - DNA, 40 bp, Homo sapiens
taattcctctaaagtaaagtgatatatgatatacaccaag

SEQ ID NO: 57530 - DNA, 40 bp, Homo sapiens
ttggtgtatatcatatatcactttactttagaggaattaa

SEQ ID NO: 57531 - DNA, 40 bp, Homo sapiens
ttaattcctctaaagtaaagtgatatatgatatacaccaa

SEQ ID NO: 57532 - DNA, 40 bp, Homo sapiens
tggtgtatatcatatatcactttactttagaggaattaag

SEQ ID NO: 57533 - DNA, 40 bp, Homo sapiens
cttaattcctctaaagtaaagtgatatatgatatacacca

SEQ ID NO: 57534 - DNA, 40 bp, Homo sapiens
ggtgtatatcatatatcactttactttagaggaattaaga

SEQ ID NO: 57535 - DNA, 40 bp, Homo sapiens
tcttaattcctctaaagtaaagtgatatatgatatacacc

SEQ ID NO: 57536 - DNA, 40 bp, Homo sapiens
gtgtatatcatatatcactttactttagaggaattaagat

SEQ ID NO: 57537 - DNA, 40 bp, Homo sapiens
atcttaattcctctaaagtaaagtgatatatgatatacac

SEQ ID NO: 57538 - DNA, 40 bp, Homo sapiens
tgtatatcatatatcactttactttagaggaattaagatt

SEQ ID NO: 57539 - DNA, 40 bp, Homo sapiens
aatcttaattcctctaaagtaaagtgatatatgatataca

SEQ ID NO: 57540 - DNA, 40 bp, Homo sapiens
gtatatcatatatcactttactttagaggaattaagattt

SEQ ID NO: 57541 - DNA, 40 bp, Homo sapiens
aaatcttaattcctctaaagtaaagtgatatatgatatac

SEQ ID NO: 57542 - DNA, 40 bp, Homo sapiens
tatatcatatatcactttactttagaggaattaagatttc

SEQ ID NO: 57543 - DNA, 40 bp, Homo sapiens
gaaatcttaattcctctaaagtaaagtgatatatgatata

SEQ ID NO: 57544 - DNA, 40 bp, Homo sapiens
atatcatatatcactttactttagaggaattaagatttca

SEQ ID NO: 57545 - DNA, 40 bp, Homo sapiens
tgaaatcttaattcctctaaagtaaagtgatatatgatat

SEQ ID NO: 57546 - DNA, 40 bp, Homo sapiens
tatcatatatcactttactttagaggaattaagatttcac

SEQ ID NO: 57547 - DNA, 40 bp, Homo sapiens
gtgaaatcttaattcctctaaagtaaagtgatatatgata

SEQ ID NO: 57548 - DNA, 40 bp, Homo sapiens
atcatatatcactttactttagaggaattaagatttcaca

SEQ ID NO: 57549 - DNA, 40 bp, Homo sapiens
tgtgaaatcttaattcctctaaagtaaagtgatatatgat

SEQ ID NO: 57550 - DNA, 40 bp, Homo sapiens
tcatatatcactttactttagaggaattaagatttcacat

SEQ ID NO: 57551 - DNA, 40 bp, Homo sapiens
atgtgaaatcttaattcctctaaagtaaagtgatatatga

SEQ ID NO: 57552 - DNA, 40 bp, Homo sapiens
catatatcactttactttagaggaattaagatttcacata

SEQ ID NO: 57553 - DNA, 40 bp, Homo sapiens
tatgtgaaatcttaattcctctaaagtaaagtgatatatg

SEQ ID NO: 57554 - DNA, 40 bp, Homo sapiens
atatatcactttactttagaggaattaagatttcacataa

SEQ ID NO: 57555 - DNA, 40 bp, Homo sapiens
ttatgtgaaatcttaattcctctaaagtaaagtgatatat

SEQ ID NO: 57556 - DNA, 40 bp, Homo sapiens
tatatcactttactttagaggaattaagatttcacataaa

SEQ ID NO: 57557 - DNA, 40 bp, Homo sapiens
tttatgtgaaatcttaattcctctaaagtaaagtgatata

SEQ ID NO: 57558 - DNA, 40 bp, Homo sapiens
atatcactttactttagaggaattaagatttcacataaat

SEQ ID NO: 57559 - DNA, 40 bp, Homo sapiens
atttatgtgaaatcttaattcctctaaagtaaagtgatat

SEQ ID NO: 57560 - DNA, 40 bp, Homo sapiens
tatcactttactttagaggaattaagatttcacataaatc

SEQ ID NO: 57561 - DNA, 40 bp, Homo sapiens
gatttatgtgaaatcttaattcctctaaagtaaagtgata

SEQ ID NO: 57562 - DNA, 40 bp, Homo sapiens
atcactttactttagaggaattaagatttcacataaatcc

SEQ ID NO: 57563 - DNA, 40 bp, Homo sapiens
ggatttatgtgaaatcttaattcctctaaagtaaagtgat

SEQ ID NO: 57564 - DNA, 40 bp, Homo sapiens
tcactttactttagaggaattaagatttcacataaatcca

SEQ ID NO: 57565 - DNA, 40 bp, Homo sapiens
tggatttatgtgaaatcttaattcctctaaagtaaagtga

SEQ ID NO: 57566 - DNA, 40 bp, Homo sapiens
cactttactttagaggaattaagatttcacataaatccat

SEQ ID NO: 57567 - DNA, 40 bp, Homo sapiens
atggatttatgtgaaatcttaattcctctaaagtaaagtg

SEQ ID NO: 57568 - DNA, 40 bp, Homo sapiens
actttactttagaggaattaagatttcacataaatccatt

SEQ ID NO: 57569 - DNA, 40 bp, Homo sapiens
aatggatttatgtgaaatcttaattcctctaaagtaaagt

SEQ ID NO: 57570 - DNA, 40 bp, Homo sapiens
ctttactttagaggaattaagatttcacataaatccattt

SEQ ID NO: 57571 - DNA, 40 bp, Homo sapiens
aaatggatttatgtgaaatcttaattcctctaaagtaaag

SEQ ID NO: 57572 - DNA, 40 bp, Homo sapiens
tttactttagaggaattaagatttcacataaatccatttc

SEQ ID NO: 57573 - DNA, 40 bp, Homo sapiens
gaaatggatttatgtgaaatcttaattcctctaaagtaaa

SEQ ID NO: 57574 - DNA, 40 bp, Homo sapiens
ttactttagaggaattaagatttcacataaatccatttcc

SEQ ID NO: 57575 - DNA, 40 bp, Homo sapiens
ggaaatggatttatgtgaaatcttaattcctctaaagtaa

SEQ ID NO: 57576 - DNA, 40 bp, Homo sapiens
tactttagaggaattaagatttcacataaatccatttcca

SEQ ID NO: 57577 - DNA, 40 bp, Homo sapiens
tggaaatggatttatgtgaaatcttaattcctctaaagta

SEQ ID NO: 57578 - DNA, 40 bp, Homo sapiens
actttagaggaattaagatttcacataaatccatttccag

SEQ ID NO: 57579 - DNA, 40 bp, Homo sapiens
ctggaaatggatttatgtgaaatcttaattcctctaaagt

SEQ ID NO: 57580 - DNA, 40 bp, Homo sapiens
ctttagaggaattaagatttcacataaatccatttccagg

SEQ ID NO: 57581 - DNA, 40 bp, Homo sapiens
cctggaaatggatttatgtgaaatcttaattcctctaaag

SEQ ID NO: 57582 - DNA, 40 bp, Homo sapiens
tttagaggaattaagatttcacataaatccatttccaggt

SEQ ID NO: 57583 - DNA, 40 bp, Homo sapiens
acctggaaatggatttatgtgaaatcttaattcctctaaa

SEQ ID NO: 57584 - DNA, 40 bp, Homo sapiens
ttagaggaattaagatttcacataaatccatttccaggtt

SEQ ID NO: 57585 - DNA, 40 bp, Homo sapiens
aacctggaaatggatttatgtgaaatcttaattcctctaa

SEQ ID NO: 57586 - DNA, 40 bp, Homo sapiens
tagaggaattaagatttcacataaatccatttccaggttc

SEQ ID NO: 57587 - DNA, 40 bp, Homo sapiens
gaacctggaaatggatttatgtgaaatcttaattcctcta

SEQ ID NO: 57588 - DNA, 40 bp, Homo sapiens
agaggaattaagatttcacataaatccatttccaggttcc

SEQ ID NO: 57589 - DNA, 40 bp, Homo sapiens
ggaacctggaaatggatttatgtgaaatcttaattcctct

SEQ ID NO: 57590 - DNA, 40 bp, Homo sapiens
gaggaattaagatttcacataaatccatttccaggttcca

SEQ ID NO: 57591 - DNA, 40 bp, Homo sapiens
tggaacctggaaatggatttatgtgaaatcttaattcctc

SEQ ID NO: 57592 - DNA, 40 bp, Homo sapiens
aggaattaagatttcacataaatccatttccaggttccaa

SEQ ID NO: 57593 - DNA, 40 bp, Homo sapiens
ttggaacctggaaatggatttatgtgaaatcttaattcct

SEQ ID NO: 57594 - DNA, 40 bp, Homo sapiens
ggaattaagatttcacataaatccatttccaggttccaaa

SEQ ID NO: 57595 - DNA, 40 bp, Homo sapiens
tttggaacctggaaatggatttatgtgaaatcttaattcc

SEQ ID NO: 57596 - DNA, 40 bp, Homo sapiens
gaattaagatttcacataaatccatttccaggttccaaag

SEQ ID NO: 57597 - DNA, 40 bp, Homo sapiens
ctttggaacctggaaatggatttatgtgaaatcttaattc

SEQ ID NO: 57598 - DNA, 40 bp, Homo sapiens
aattaagatttcacataaatccatttccaggttccaaaga

SEQ ID NO: 57599 - DNA, 40 bp, Homo sapiens
tctttggaacctggaaatggatttatgtgaaatcttaatt

SEQ ID NO: 57600 - DNA, 40 bp, Homo sapiens
attaagatttcacataaatccatttccaggttccaaagac

SEQ ID NO: 57601 - DNA, 40 bp, Homo sapiens
gtctttggaacctggaaatggatttatgtgaaatcttaat

SEQ ID NO: 57602 - DNA, 40 bp, Homo sapiens
ttaagatttcacataaatccatttccaggttccaaagacc

SEQ ID NO: 57603 - DNA, 40 bp, Homo sapiens
ggtctttggaacctggaaatggatttatgtgaaatcttaa

SEQ ID NO: 57604 - DNA, 40 bp, Homo sapiens
taagatttcacataaatccatttccaggttccaaagacca

SEQ ID NO: 57605 - DNA, 40 bp, Homo sapiens
tggtctttggaacctggaaatggatttatgtgaaatctta

SEQ ID NO: 57606 - DNA, 40 bp, Homo sapiens
aagatttcacataaatccatttccaggttccaaagaccag

SEQ ID NO: 57607 - DNA, 40 bp, Homo sapiens
ctggtctttggaacctggaaatggatttatgtgaaatctt

SEQ ID NO: 57608 - DNA, 40 bp, Homo sapiens
agatttcacataaatccatttccaggttccaaagaccagg

SEQ ID NO: 57609 - DNA, 40 bp, Homo sapiens
cctggtctttggaacctggaaatggatttatgtgaaatct

SEQ ID NO: 57610 - DNA, 40 bp, Homo sapiens
gatttcacataaatccatttccaggttccaaagaccagga

SEQ ID NO: 57611 - DNA, 40 bp, Homo sapiens
tcctggtctttggaacctggaaatggatttatgtgaaatc

SEQ ID NO: 57612 - DNA, 40 bp, Homo sapiens
atttcacataaatccatttccaggttccaaagaccaggaa

SEQ ID NO: 57613 - DNA, 40 bp, Homo sapiens
ttcctggtctttggaacctggaaatggatttatgtgaaat

SEQ ID NO: 57614 - DNA, 40 bp, Homo sapiens
tttcacataaatccatttccaggttccaaagaccaggaag

SEQ ID NO: 57615 - DNA, 40 bp, Homo sapiens
cttcctggtctttggaacctggaaatggatttatgtgaaa

SEQ ID NO: 57616 - DNA, 40 bp, Homo sapiens
ttcacataaatccatttccaggttccaaagaccaggaaga

SEQ ID NO: 57617 - DNA, 40 bp, Homo sapiens
tcttcctggtctttggaacctggaaatggatttatgtgaa

SEQ ID NO: 57618 - DNA, 40 bp, Homo sapiens
tcacataaatccatttccaggttccaaagaccaggaagag

SEQ ID NO: 57619 - DNA, 40 bp, Homo sapiens
ctcttcctggtctttggaacctggaaatggatttatgtga

SEQ ID NO: 57620 - DNA, 40 bp, Homo sapiens
cacataaatccatttccaggttccaaagaccaggaagagg

SEQ ID NO: 57621 - DNA, 40 bp, Homo sapiens
cctcttcctggtctttggaacctggaaatggatttatgtg

SEQ ID NO: 57622 - DNA, 40 bp, Homo sapiens
acataaatccatttccaggttccaaagaccaggaagaggc

SEQ ID NO: 57623 - DNA, 40 bp, Homo sapiens
gcctcttcctggtctttggaacctggaaatggatttatgt

SEQ ID NO: 57624 - DNA, 40 bp, Homo sapiens
cataaatccatttccaggttccaaagaccaggaagaggct

SEQ ID NO: 57625 - DNA, 40 bp, Homo sapiens
agcctcttcctggtctttggaacctggaaatggatttatg

SEQ ID NO: 57626 - DNA, 40 bp, Homo sapiens
ataaatccatttccaggttccaaagaccaggaagaggctt

SEQ ID NO: 57627 - DNA, 40 bp, Homo sapiens
aagcctcttcctggtctttggaacctggaaatggatttat

SEQ ID NO: 57628 - DNA, 40 bp, Homo sapiens
taaatccatttccaggttccaaagaccaggaagaggcttg

SEQ ID NO: 57629 - DNA, 40 bp, Homo sapiens
caagcctcttcctggtctttggaacctggaaatggattta

SEQ ID NO: 57630 - DNA, 40 bp, Homo sapiens
aaatccatttccaggttccaaagaccaggaagaggcttgg

SEQ ID NO: 57631 - DNA, 40 bp, Homo sapiens
ccaagcctcttcctggtctttggaacctggaaatggattt

SEQ ID NO: 57632 - DNA, 40 bp, Homo sapiens
aatccatttccaggttccaaagaccaggaagaggcttggt

SEQ ID NO: 57633 - DNA, 40 bp, Homo sapiens
accaagcctcttcctggtctttggaacctggaaatggatt

SEQ ID NO: 57634 - DNA, 40 bp, Homo sapiens
atccatttccaggttccaaagaccaggaagaggcttggtt

SEQ ID NO: 57635 - DNA, 40 bp, Homo sapiens
aaccaagcctcttcctggtctttggaacctggaaatggat

SEQ ID NO: 57636 - DNA, 40 bp, Homo sapiens
tccatttccaggttccaaagaccaggaagaggcttggttt

SEQ ID NO: 57637 - DNA, 40 bp, Homo sapiens
aaaccaagcctcttcctggtctttggaacctggaaatgga

SEQ ID NO: 57638 - DNA, 40 bp, Homo sapiens
ccatttccaggttccaaagaccaggaagaggcttggtttt

SEQ ID NO: 57639 - DNA, 40 bp, Homo sapiens
aaaaccaagcctcttcctggtctttggaacctggaaatgg

SEQ ID NO: 57640 - DNA, 40 bp, Homo sapiens
catttccaggttccaaagaccaggaagaggcttggttttt

SEQ ID NO: 57641 - DNA, 40 bp, Homo sapiens
aaaaaccaagcctcttcctggtctttggaacctggaaatg

SEQ ID NO: 57642 - DNA, 40 bp, Homo sapiens
atttccaggttccaaagaccaggaagaggcttggtttttg

SEQ ID NO: 57643 - DNA, 40 bp, Homo sapiens
caaaaaccaagcctcttcctggtctttggaacctggaaat

SEQ ID NO: 57644 - DNA, 40 bp, Homo sapiens
tttccaggttccaaagaccaggaagaggcttggtttttgt

SEQ ID NO: 57645 - DNA, 40 bp, Homo sapiens
acaaaaaccaagcctcttcctggtctttggaacctggaaa

SEQ ID NO: 57646 - DNA, 40 bp, Homo sapiens
ttccaggttccaaagaccaggaagaggcttggtttttgtt

SEQ ID NO: 57647 - DNA, 40 bp, Homo sapiens
aacaaaaaccaagcctcttcctggtctttggaacctggaa

SEQ ID NO: 57648 - DNA, 40 bp, Homo sapiens
tccaggttccaaagaccaggaagaggcttggtttttgttt

SEQ ID NO: 57649 - DNA, 40 bp, Homo sapiens
aaacaaaaaccaagcctcttcctggtctttggaacctgga

SEQ ID NO: 57650 - DNA, 40 bp, Homo sapiens
ccaggttccaaagaccaggaagaggcttggtttttgtttt

SEQ ID NO: 57651 - DNA, 40 bp, Homo sapiens
aaaacaaaaaccaagcctcttcctggtctttggaacctgg

SEQ ID NO: 57652 - DNA, 40 bp, Homo sapiens
caggttccaaagaccaggaagaggcttggtttttgttttt

SEQ ID NO: 57653 - DNA, 40 bp, Homo sapiens
aaaaacaaaaaccaagcctcttcctggtctttggaacctg

SEQ ID NO: 57654 - DNA, 40 bp, Homo sapiens
aggttccaaagaccaggaagaggcttggtttttgtttttc

SEQ ID NO: 57655 - DNA, 40 bp, Homo sapiens
gaaaaacaaaaaccaagcctcttcctggtctttggaacct

SEQ ID NO: 57656 - DNA, 40 bp, Homo sapiens
ggttccaaagaccaggaagaggcttggtttttgtttttct

SEQ ID NO: 57657 - DNA, 40 bp, Homo sapiens
agaaaaacaaaaaccaagcctcttcctggtctttggaacc

SEQ ID NO: 57658 - DNA, 40 bp, Homo sapiens
gttccaaagaccaggaagaggcttggtttttgtttttctt

SEQ ID NO: 57659 - DNA, 40 bp, Homo sapiens
aagaaaaacaaaaaccaagcctcttcctggtctttggaac

SEQ ID NO: 57660 - DNA, 40 bp, Homo sapiens
ttccaaagaccaggaagaggcttggtttttgtttttcttt

SEQ ID NO: 57661 - DNA, 40 bp, Homo sapiens
aaagaaaaacaaaaaccaagcctcttcctggtctttggaa

SEQ ID NO: 57662 - DNA, 40 bp, Homo sapiens
tccaaagaccaggaagaggcttggtttttgtttttctttt

SEQ ID NO: 57663 - DNA, 40 bp, Homo sapiens
aaaagaaaaacaaaaaccaagcctcttcctggtctttgga

SEQ ID NO: 57664 - DNA, 40 bp, Homo sapiens
ccaaagaccaggaagaggcttggtttttgtttttcttttt

SEQ ID NO: 57665 - DNA, 40 bp, Homo sapiens
aaaaagaaaaacaaaaaccaagcctcttcctggtctttgg

SEQ ID NO: 57666 - DNA, 40 bp, Homo sapiens
caaagaccaggaagaggcttggtttttgtttttcttttta

SEQ ID NO: 57667 - DNA, 40 bp, Homo sapiens
taaaaagaaaaacaaaaaccaagcctcttcctggtctttg

SEQ ID NO: 57668 - DNA, 40 bp, Homo sapiens
aaagaccaggaagaggcttggtttttgtttttctttttac

SEQ ID NO: 57669 - DNA, 40 bp, Homo sapiens
gtaaaaagaaaaacaaaaaccaagcctcttcctggtcttt

SEQ ID NO: 57670 - DNA, 40 bp, Homo sapiens
aagaccaggaagaggcttggtttttgtttttctttttact

SEQ ID NO: 57671 - DNA, 40 bp, Homo sapiens
agtaaaaagaaaaacaaaaaccaagcctcttcctggtctt

SEQ ID NO: 57672 - DNA, 40 bp, Homo sapiens
agaccaggaagaggcttggtttttgtttttctttttactg

SEQ ID NO: 57673 - DNA, 40 bp, Homo sapiens
cagtaaaaagaaaaacaaaaaccaagcctcttcctggtct

SEQ ID NO: 57674 - DNA, 40 bp, Homo sapiens
gaccaggaagaggcttggtttttgtttttctttttactgt

SEQ ID NO: 57675 - DNA, 40 bp, Homo sapiens
acagtaaaaagaaaaacaaaaaccaagcctcttcctggtc

SEQ ID NO: 57676 - DNA, 40 bp, Homo sapiens
accaggaagaggcttggtttttgtttttctttttactgtc

SEQ ID NO: 57677 - DNA, 40 bp, Homo sapiens
gacagtaaaaagaaaaacaaaaaccaagcctcttcctggt

SEQ ID NO: 57678 - DNA, 40 bp, Homo sapiens
ccaggaagaggcttggtttttgtttttctttttactgtct

SEQ ID NO: 57679 - DNA, 40 bp, Homo sapiens
agacagtaaaaagaaaaacaaaaaccaagcctcttcctgg

SEQ ID NO: 57680 - DNA, 40 bp, Homo sapiens
caggaagaggcttggtttttgtttttctttttactgtctt

SEQ ID NO: 57681 - DNA, 40 bp, Homo sapiens
aagacagtaaaaagaaaaacaaaaaccaagcctcttcctg

SEQ ID NO: 57682 - DNA, 40 bp, Homo sapiens
aggaagaggcttggtttttgtttttctttttactgtcttt

SEQ ID NO: 57683 - DNA, 40 bp, Homo sapiens
aaagacagtaaaaagaaaaacaaaaaccaagcctcttcct

SEQ ID NO: 57684 - DNA, 40 bp, Homo sapiens
ggaagaggcttggtttttgtttttctttttactgtcttta

SEQ ID NO: 57685 - DNA, 40 bp, Homo sapiens
taaagacagtaaaaagaaaaacaaaaaccaagcctcttcc

SEQ ID NO: 57686 - DNA, 40 bp, Homo sapiens
gaagaggcttggtttttgtttttctttttactgtctttac

SEQ ID NO: 57687 - DNA, 40 bp, Homo sapiens
gtaaagacagtaaaaagaaaaacaaaaaccaagcctcttc

SEQ ID NO: 57688 - DNA, 40 bp, Homo sapiens
aagaggcttggtttttgtttttctttttactgtctttaca

SEQ ID NO: 57689 - DNA, 40 bp, Homo sapiens
tgtaaagacagtaaaaagaaaaacaaaaaccaagcctctt

SEQ ID NO: 57690 - DNA, 40 bp, Homo sapiens
agaggcttggtttttgtttttctttttactgtctttacag

SEQ ID NO: 57691 - DNA, 40 bp, Homo sapiens
ctgtaaagacagtaaaaagaaaaacaaaaaccaagcctct

SEQ ID NO: 57692 - DNA, 40 bp, Homo sapiens
gaggcttggtttttgtttttctttttactgtctttacagt

SEQ ID NO: 57693 - DNA, 40 bp, Homo sapiens
actgtaaagacagtaaaaagaaaaacaaaaaccaagcctc

SEQ ID NO: 57694 - DNA, 40 bp, Homo sapiens
aggcttggtttttgtttttctttttactgtctttacagtc

SEQ ID NO: 57695 - DNA, 40 bp, Homo sapiens
gactgtaaagacagtaaaaagaaaaacaaaaaccaagcct

SEQ ID NO: 57696 - DNA, 40 bp, Homo sapiens
ggcttggtttttgtttttctttttactgtctttacagtct

SEQ ID NO: 57697 - DNA, 40 bp, Homo sapiens
agactgtaaagacagtaaaaagaaaaacaaaaaccaagcc

SEQ ID NO: 57698 - DNA, 40 bp, Homo sapiens
gcttggtttttgtttttctttttactgtctttacagtctc

SEQ ID NO: 57699 - DNA, 40 bp, Homo sapiens
gagactgtaaagacagtaaaaagaaaaacaaaaaccaagc

SEQ ID NO: 57700 - DNA, 40 bp, Homo sapiens
cttggtttttgtttttctttttactgtctttacagtctcc

SEQ ID NO: 57701 - DNA, 40 bp, Homo sapiens
ggagactgtaaagacagtaaaaagaaaaacaaaaaccaag

SEQ ID NO: 57702 - DNA, 40 bp, Homo sapiens
ttggtttttgtttttctttttactgtctttacagtctcct

SEQ ID NO: 57703 - DNA, 40 bp, Homo sapiens
aggagactgtaaagacagtaaaaagaaaaacaaaaaccaa

SEQ ID NO: 57704 - DNA, 40 bp, Homo sapiens
tggtttttgtttttctttttactgtctttacagtctcctt

SEQ ID NO: 57705 - DNA, 40 bp, Homo sapiens
aaggagactgtaaagacagtaaaaagaaaaacaaaaacca

SEQ ID NO: 57706 - DNA, 40 bp, Homo sapiens
ggtttttgtttttctttttactgtctttacagtctccttg

SEQ ID NO: 57707 - DNA, 40 bp, Homo sapiens
caaggagactgtaaagacagtaaaaagaaaaacaaaaacc

SEQ ID NO: 57708 - DNA, 40 bp, Homo sapiens
gtttttgtttttctttttactgtctttacagtctccttga

SEQ ID NO: 57709 - DNA, 40 bp, Homo sapiens
tcaaggagactgtaaagacagtaaaaagaaaaacaaaaac

SEQ ID NO: 57710 - DNA, 40 bp, Homo sapiens
tttttgtttttctttttactgtctttacagtctccttgac

SEQ ID NO: 57711 - DNA, 40 bp, Homo sapiens
gtcaaggagactgtaaagacagtaaaaagaaaaacaaaaa

SEQ ID NO: 57712 - DNA, 40 bp, Homo sapiens
ttttgtttttctttttactgtctttacagtctccttgact

SEQ ID NO: 57713 - DNA, 40 bp, Homo sapiens
agtcaaggagactgtaaagacagtaaaaagaaaaacaaaa

SEQ ID NO: 57714 - DNA, 40 bp, Homo sapiens
tttgtttttctttttactgtctttacagtctccttgactt

SEQ ID NO: 57715 - DNA, 40 bp, Homo sapiens
aagtcaaggagactgtaaagacagtaaaaagaaaaacaaa

SEQ ID NO: 57716 - DNA, 40 bp, Homo sapiens
ttgtttttctttttactgtctttacagtctccttgacttt

SEQ ID NO: 57717 - DNA, 40 bp, Homo sapiens
aaagtcaaggagactgtaaagacagtaaaaagaaaaacaa

SEQ ID NO: 57718 - DNA, 40 bp, Homo sapiens
tgtttttctttttactgtctttacagtctccttgactttt

SEQ ID NO: 57719 - DNA, 40 bp, Homo sapiens
aaaagtcaaggagactgtaaagacagtaaaaagaaaaaca

SEQ ID NO: 57720 - DNA, 40 bp, Homo sapiens
gtttttctttttactgtctttacagtctccttgacttttc

SEQ ID NO: 57721 - DNA, 40 bp, Homo sapiens
gaaaagtcaaggagactgtaaagacagtaaaaagaaaaac

SEQ ID NO: 57722 - DNA, 40 bp, Homo sapiens
tttttctttttactgtctttacagtctccttgacttttct

SEQ ID NO: 57723 - DNA, 40 bp, Homo sapiens
agaaaagtcaaggagactgtaaagacagtaaaaagaaaaa

SEQ ID NO: 57724 - DNA, 40 bp, Homo sapiens
ttttctttttactgtctttacagtctccttgacttttctt

SEQ ID NO: 57725 - DNA, 40 bp, Homo sapiens
aagaaaagtcaaggagactgtaaagacagtaaaaagaaaa

SEQ ID NO: 57726 - DNA, 40 bp, Homo sapiens
tttctttttactgtctttacagtctccttgacttttctta

SEQ ID NO: 57727 - DNA, 40 bp, Homo sapiens
taagaaaagtcaaggagactgtaaagacagtaaaaagaaa

SEQ ID NO: 57728 - DNA, 40 bp, Homo sapiens
ttctttttactgtctttacagtctccttgacttttcttag

SEQ ID NO: 57729 - DNA, 40 bp, Homo sapiens
ctaagaaaagtcaaggagactgtaaagacagtaaaaagaa

SEQ ID NO: 57730 - DNA, 40 bp, Homo sapiens
tctttttactgtctttacagtctccttgacttttcttagg

SEQ ID NO: 57731 - DNA, 40 bp, Homo sapiens
cctaagaaaagtcaaggagactgtaaagacagtaaaaaga

SEQ ID NO: 57732 - DNA, 40 bp, Homo sapiens
ctttttactgtctttacagtctccttgacttttcttagga

SEQ ID NO: 57733 - DNA, 40 bp, Homo sapiens
tcctaagaaaagtcaaggagactgtaaagacagtaaaaag

SEQ ID NO: 57734 - DNA, 40 bp, Homo sapiens
tttttactgtctttacagtctccttgacttttcttaggag

SEQ ID NO: 57735 - DNA, 40 bp, Homo sapiens
ctcctaagaaaagtcaaggagactgtaaagacagtaaaaa

SEQ ID NO: 57736 - DNA, 40 bp, Homo sapiens
ttttactgtctttacagtctccttgacttttcttaggaga

SEQ ID NO: 57737 - DNA, 40 bp, Homo sapiens
tctcctaagaaaagtcaaggagactgtaaagacagtaaaa

SEQ ID NO: 57738 - DNA, 40 bp, Homo sapiens
tttactgtctttacagtctccttgacttttcttaggagag

SEQ ID NO: 57739 - DNA, 40 bp, Homo sapiens
ctctcctaagaaaagtcaaggagactgtaaagacagtaaa

SEQ ID NO: 57740 - DNA, 40 bp, Homo sapiens
ttactgtctttacagtctccttgacttttcttaggagaga

SEQ ID NO: 57741 - DNA, 40 bp, Homo sapiens
tctctcctaagaaaagtcaaggagactgtaaagacagtaa

SEQ ID NO: 57742 - DNA, 40 bp, Homo sapiens
tactgtctttacagtctccttgacttttcttaggagagaa

SEQ ID NO: 57743 - DNA, 40 bp, Homo sapiens
ttctctcctaagaaaagtcaaggagactgtaaagacagta

SEQ ID NO: 57744 - DNA, 40 bp, Homo sapiens
actgtctttacagtctccttgacttttcttaggagagaag

SEQ ID NO: 57745 - DNA, 40 bp, Homo sapiens
cttctctcctaagaaaagtcaaggagactgtaaagacagt

SEQ ID NO: 57746 - DNA, 40 bp, Homo sapiens
ctgtctttacagtctccttgacttttcttaggagagaagg

SEQ ID NO: 57747 - DNA, 40 bp, Homo sapiens
ccttctctcctaagaaaagtcaaggagactgtaaagacag

SEQ ID NO: 57748 - DNA, 40 bp, Homo sapiens
tgtctttacagtctccttgacttttcttaggagagaaggt

SEQ ID NO: 57749 - DNA, 40 bp, Homo sapiens
accttctctcctaagaaaagtcaaggagactgtaaagaca

SEQ ID NO: 57750 - DNA, 40 bp, Homo sapiens
gtctttacagtctccttgacttttcttaggagagaaggta

SEQ ID NO: 57751 - DNA, 40 bp, Homo sapiens
taccttctctcctaagaaaagtcaaggagactgtaaagac

SEQ ID NO: 57752 - DNA, 40 bp, Homo sapiens
tctttacagtctccttgacttttcttaggagagaaggtac

SEQ ID NO: 57753 - DNA, 40 bp, Homo sapiens
gtaccttctctcctaagaaaagtcaaggagactgtaaaga

SEQ ID NO: 57754 - DNA, 40 bp, Homo sapiens
ctttacagtctccttgacttttcttaggagagaaggtact

SEQ ID NO: 57755 - DNA, 40 bp, Homo sapiens
agtaccttctctcctaagaaaagtcaaggagactgtaaag

SEQ ID NO: 57756 - DNA, 40 bp, Homo sapiens
tttacagtctccttgacttttcttaggagagaaggtactg

SEQ ID NO: 57757 - DNA, 40 bp, Homo sapiens
cagtaccttctctcctaagaaaagtcaaggagactgtaaa

SEQ ID NO: 57758 - DNA, 40 bp, Homo sapiens
ttacagtctccttgacttttcttaggagagaaggtactga

SEQ ID NO: 57759 - DNA, 40 bp, Homo sapiens
tcagtaccttctctcctaagaaaagtcaaggagactgtaa

SEQ ID NO: 57760 - DNA, 40 bp, Homo sapiens
tacagtctccttgacttttcttaggagagaaggtactgag

SEQ ID NO: 57761 - DNA, 40 bp, Homo sapiens
ctcagtaccttctctcctaagaaaagtcaaggagactgta

SEQ ID NO: 57762 - DNA, 40 bp, Homo sapiens
acagtctccttgacttttcttaggagagaaggtactgaga

SEQ ID NO: 57763 - DNA, 40 bp, Homo sapiens
tctcagtaccttctctcctaagaaaagtcaaggagactgt

SEQ ID NO: 57764 - DNA, 40 bp, Homo sapiens
cagtctccttgacttttcttaggagagaaggtactgagaa

SEQ ID NO: 57765 - DNA, 40 bp, Homo sapiens
ttctcagtaccttctctcctaagaaaagtcaaggagactg

SEQ ID NO: 57766 - DNA, 40 bp, Homo sapiens
agtctccttgacttttcttaggagagaaggtactgagaaa

SEQ ID NO: 57767 - DNA, 40 bp, Homo sapiens
tttctcagtaccttctctcctaagaaaagtcaaggagact

SEQ ID NO: 57768 - DNA, 40 bp, Homo sapiens
gtctccttgacttttcttaggagagaaggtactgagaaaa

SEQ ID NO: 57769 - DNA, 40 bp, Homo sapiens
ttttctcagtaccttctctcctaagaaaagtcaaggagac

SEQ ID NO: 57770 - DNA, 40 bp, Homo sapiens
tctccttgacttttcttaggagagaaggtactgagaaaac

SEQ ID NO: 57771 - DNA, 40 bp, Homo sapiens
gttttctcagtaccttctctcctaagaaaagtcaaggaga

SEQ ID NO: 57772 - DNA, 40 bp, Homo sapiens
ctccttgacttttcttaggagagaaggtactgagaaaaca

SEQ ID NO: 57773 - DNA, 40 bp, Homo sapiens
tgttttctcagtaccttctctcctaagaaaagtcaaggag

SEQ ID NO: 57774 - DNA, 40 bp, Homo sapiens
tccttgacttttcttaggagagaaggtactgagaaaacat

SEQ ID NO: 57775 - DNA, 40 bp, Homo sapiens
atgttttctcagtaccttctctcctaagaaaagtcaagga

SEQ ID NO: 57776 - DNA, 40 bp, Homo sapiens
ccttgacttttcttaggagagaaggtactgagaaaacatg

SEQ ID NO: 57777 - DNA, 40 bp, Homo sapiens
catgttttctcagtaccttctctcctaagaaaagtcaagg

SEQ ID NO: 57778 - DNA, 40 bp, Homo sapiens
cttgacttttcttaggagagaaggtactgagaaaacatga

SEQ ID NO: 57779 - DNA, 40 bp, Homo sapiens
tcatgttttctcagtaccttctctcctaagaaaagtcaag

SEQ ID NO: 57780 - DNA, 40 bp, Homo sapiens
ttgacttttcttaggagagaaggtactgagaaaacatgat

SEQ ID NO: 57781 - DNA, 40 bp, Homo sapiens
atcatgttttctcagtaccttctctcctaagaaaagtcaa

SEQ ID NO: 57782 - DNA, 40 bp, Homo sapiens
tgacttttcttaggagagaaggtactgagaaaacatgatt

SEQ ID NO: 57783 - DNA, 40 bp, Homo sapiens
aatcatgttttctcagtaccttctctcctaagaaaagtca

SEQ ID NO: 57784 - DNA, 40 bp, Homo sapiens
gacttttcttaggagagaaggtactgagaaaacatgattc

SEQ ID NO: 57785 - DNA, 40 bp, Homo sapiens
gaatcatgttttctcagtaccttctctcctaagaaaagtc

SEQ ID NO: 57786 - DNA, 40 bp, Homo sapiens
acttttcttaggagagaaggtactgagaaaacatgattct

SEQ ID NO: 57787 - DNA, 40 bp, Homo sapiens
agaatcatgttttctcagtaccttctctcctaagaaaagt

SEQ ID NO: 57788 - DNA, 40 bp, Homo sapiens
cttttcttaggagagaaggtactgagaaaacatgattcta

SEQ ID NO: 57789 - DNA, 40 bp, Homo sapiens
tagaatcatgttttctcagtaccttctctcctaagaaaag

SEQ ID NO: 57790 - DNA, 40 bp, Homo sapiens
ttttcttaggagagaaggtactgagaaaacatgattctaa

SEQ ID NO: 57791 - DNA, 40 bp, Homo sapiens
ttagaatcatgttttctcagtaccttctctcctaagaaaa

SEQ ID NO: 57792 - DNA, 40 bp, Homo sapiens
tttcttaggagagaaggtactgagaaaacatgattctaat

SEQ ID NO: 57793 - DNA, 40 bp, Homo sapiens
attagaatcatgttttctcagtaccttctctcctaagaaa

SEQ ID NO: 57794 - DNA, 40 bp, Homo sapiens
ttcttaggagagaaggtactgagaaaacatgattctaata

SEQ ID NO: 57795 - DNA, 40 bp, Homo sapiens
tattagaatcatgttttctcagtaccttctctcctaagaa

SEQ ID NO: 57796 - DNA, 40 bp, Homo sapiens
tcttaggagagaaggtactgagaaaacatgattctaatat

SEQ ID NO: 57797 - DNA, 40 bp, Homo sapiens
atattagaatcatgttttctcagtaccttctctcctaaga

SEQ ID NO: 57798 - DNA, 40 bp, Homo sapiens
cttaggagagaaggtactgagaaaacatgattctaatatt

SEQ ID NO: 57799 - DNA, 40 bp, Homo sapiens
aatattagaatcatgttttctcagtaccttctctcctaag

SEQ ID NO: 57800 - DNA, 40 bp, Homo sapiens
ttaggagagaaggtactgagaaaacatgattctaatattt

SEQ ID NO: 57801 - DNA, 40 bp, Homo sapiens
aaatattagaatcatgttttctcagtaccttctctcctaa

SEQ ID NO: 57802 - DNA, 40 bp, Homo sapiens
taggagagaaggtactgagaaaacatgattctaatattta

SEQ ID NO: 57803 - DNA, 40 bp, Homo sapiens
taaatattagaatcatgttttctcagtaccttctctccta

SEQ ID NO: 57804 - DNA, 40 bp, Homo sapiens
aggagagaaggtactgagaaaacatgattctaatatttat

SEQ ID NO: 57805 - DNA, 40 bp, Homo sapiens
ataaatattagaatcatgttttctcagtaccttctctcct

SEQ ID NO: 57806 - DNA, 40 bp, Homo sapiens
ggagagaaggtactgagaaaacatgattctaatatttatt

SEQ ID NO: 57807 - DNA, 40 bp, Homo sapiens
aataaatattagaatcatgttttctcagtaccttctctcc

SEQ ID NO: 57808 - DNA, 40 bp, Homo sapiens
gagagaaggtactgagaaaacatgattctaatatttatta

SEQ ID NO: 57809 - DNA, 40 bp, Homo sapiens
taataaatattagaatcatgttttctcagtaccttctctc

SEQ ID NO: 57810 - DNA, 40 bp, Homo sapiens
agagaaggtactgagaaaacatgattctaatatttattat

SEQ ID NO: 57811 - DNA, 40 bp, Homo sapiens
ataataaatattagaatcatgttttctcagtaccttctct

SEQ ID NO: 57812 - DNA, 40 bp, Homo sapiens
gagaaggtactgagaaaacatgattctaatatttattatt

SEQ ID NO: 57813 - DNA, 40 bp, Homo sapiens
aataataaatattagaatcatgttttctcagtaccttctc

SEQ ID NO: 57814 - DNA, 40 bp, Homo sapiens
agaaggtactgagaaaacatgattctaatatttattattt

SEQ ID NO: 57815 - DNA, 40 bp, Homo sapiens
aaataataaatattagaatcatgttttctcagtaccttct

SEQ ID NO: 57816 - DNA, 40 bp, Homo sapiens
gaaggtactgagaaaacatgattctaatatttattatttt

SEQ ID NO: 57817 - DNA, 40 bp, Homo sapiens
aaaataataaatattagaatcatgttttctcagtaccttc

SEQ ID NO: 57818 - DNA, 40 bp, Homo sapiens
aaggtactgagaaaacatgattctaatatttattattttt

SEQ ID NO: 57819 - DNA, 40 bp, Homo sapiens
aaaaataataaatattagaatcatgttttctcagtacctt

SEQ ID NO: 57820 - DNA, 40 bp, Homo sapiens
aggtactgagaaaacatgattctaatatttattatttttt

SEQ ID NO: 57821 - DNA, 40 bp, Homo sapiens
aaaaaataataaatattagaatcatgttttctcagtacct

SEQ ID NO: 57822 - DNA, 40 bp, Homo sapiens
ggtactgagaaaacatgattctaatatttattattttttc

SEQ ID NO: 57823 - DNA, 40 bp, Homo sapiens
gaaaaaataataaatattagaatcatgttttctcagtacc

SEQ ID NO: 57824 - DNA, 40 bp, Homo sapiens
gtactgagaaaacatgattctaatatttattattttttct

SEQ ID NO: 57825 - DNA, 40 bp, Homo sapiens
agaaaaaataataaatattagaatcatgttttctcagtac

SEQ ID NO: 57826 - DNA, 40 bp, Homo sapiens
tactgagaaaacatgattctaatatttattattttttctt

SEQ ID NO: 57827 - DNA, 40 bp, Homo sapiens
aagaaaaaataataaatattagaatcatgttttctcagta

SEQ ID NO: 57828 - DNA, 40 bp, Homo sapiens
actgagaaaacatgattctaatatttattattttttcttc

SEQ ID NO: 57829 - DNA, 40 bp, Homo sapiens
gaagaaaaaataataaatattagaatcatgttttctcagt

SEQ ID NO: 57830 - DNA, 40 bp, Homo sapiens
ctgagaaaacatgattctaatatttattattttttcttcc

SEQ ID NO: 57831 - DNA, 40 bp, Homo sapiens
ggaagaaaaaataataaatattagaatcatgttttctcag

SEQ ID NO: 57832 - DNA, 40 bp, Homo sapiens
tgagaaaacatgattctaatatttattattttttcttcca

SEQ ID NO: 57833 - DNA, 40 bp, Homo sapiens
tggaagaaaaaataataaatattagaatcatgttttctca

SEQ ID NO: 57834 - DNA, 40 bp, Homo sapiens
gagaaaacatgattctaatatttattattttttcttccaa

SEQ ID NO: 57835 - DNA, 40 bp, Homo sapiens
ttggaagaaaaaataataaatattagaatcatgttttctc

SEQ ID NO: 57836 - DNA, 40 bp, Homo sapiens
agaaaacatgattctaatatttattattttttcttccaac

SEQ ID NO: 57837 - DNA, 40 bp, Homo sapiens
gttggaagaaaaaataataaatattagaatcatgttttct

SEQ ID NO: 57838 - DNA, 40 bp, Homo sapiens
gaaaacatgattctaatatttattattttttcttccaaca

SEQ ID NO: 57839 - DNA, 40 bp, Homo sapiens
tgttggaagaaaaaataataaatattagaatcatgttttc

SEQ ID NO: 57840 - DNA, 40 bp, Homo sapiens
aaaacatgattctaatatttattattttttcttccaacat

SEQ ID NO: 57841 - DNA, 40 bp, Homo sapiens
atgttggaagaaaaaataataaatattagaatcatgtttt

SEQ ID NO: 57842 - DNA, 40 bp, Homo sapiens
aaacatgattctaatatttattattttttcttccaacatt

SEQ ID NO: 57843 - DNA, 40 bp, Homo sapiens
aatgttggaagaaaaaataataaatattagaatcatgttt

SEQ ID NO: 57844 - DNA, 40 bp, Homo sapiens
aacatgattctaatatttattattttttcttccaacattt

SEQ ID NO: 57845 - DNA, 40 bp, Homo sapiens
aaatgttggaagaaaaaataataaatattagaatcatgtt

SEQ ID NO: 57846 - DNA, 40 bp, Homo sapiens
acatgattctaatatttattattttttcttccaacatttt

SEQ ID NO: 57847 - DNA, 40 bp, Homo sapiens
aaaatgttggaagaaaaaataataaatattagaatcatgt

SEQ ID NO: 57848 - DNA, 40 bp, Homo sapiens
catgattctaatatttattattttttcttccaacattttc

SEQ ID NO: 57849 - DNA, 40 bp, Homo sapiens
gaaaatgttggaagaaaaaataataaatattagaatcatg

SEQ ID NO: 57850 - DNA, 40 bp, Homo sapiens
atgattctaatatttattattttttcttccaacattttct

SEQ ID NO: 57851 - DNA, 40 bp, Homo sapiens
agaaaatgttggaagaaaaaataataaatattagaatcat

SEQ ID NO: 57852 - DNA, 40 bp, Homo sapiens
tgattctaatatttattattttttcttccaacattttctt

SEQ ID NO: 57853 - DNA, 40 bp, Homo sapiens
aagaaaatgttggaagaaaaaataataaatattagaatca

SEQ ID NO: 57854 - DNA, 40 bp, Homo sapiens
gattctaatatttattattttttcttccaacattttctta

SEQ ID NO: 57855 - DNA, 40 bp, Homo sapiens
taagaaaatgttggaagaaaaaataataaatattagaatc

SEQ ID NO: 57856 - DNA, 40 bp, Homo sapiens
attctaatatttattattttttcttccaacattttcttat

SEQ ID NO: 57857 - DNA, 40 bp, Homo sapiens
ataagaaaatgttggaagaaaaaataataaatattagaat

SEQ ID NO: 57858 - DNA, 40 bp, Homo sapiens
ttctaatatttattattttttcttccaacattttcttatg

SEQ ID NO: 57859 - DNA, 40 bp, Homo sapiens
cataagaaaatgttggaagaaaaaataataaatattagaa

SEQ ID NO: 57860 - DNA, 40 bp, Homo sapiens
tctaatatttattattttttcttccaacattttcttatga

SEQ ID NO: 57861 - DNA, 40 bp, Homo sapiens
tcataagaaaatgttggaagaaaaaataataaatattaga

SEQ ID NO: 57862 - DNA, 40 bp, Homo sapiens
ctaatatttattattttttcttccaacattttcttatgaa

SEQ ID NO: 57863 - DNA, 40 bp, Homo sapiens
ttcataagaaaatgttggaagaaaaaataataaatattag

SEQ ID NO: 57864 - DNA, 40 bp, Homo sapiens
taatatttattattttttcttccaacattttcttatgaaa

SEQ ID NO: 57865 - DNA, 40 bp, Homo sapiens
tttcataagaaaatgttggaagaaaaaataataaatatta

SEQ ID NO: 57866 - DNA, 40 bp, Homo sapiens
aatatttattattttttcttccaacattttcttatgaaac

SEQ ID NO: 57867 - DNA, 40 bp, Homo sapiens
gtttcataagaaaatgttggaagaaaaaataataaatatt

SEQ ID NO: 57868 - DNA, 40 bp, Homo sapiens
atatttattattttttcttccaacattttcttatgaaaca

SEQ ID NO: 57869 - DNA, 40 bp, Homo sapiens
tgtttcataagaaaatgttggaagaaaaaataataaatat

SEQ ID NO: 57870 - DNA, 40 bp, Homo sapiens
tatttattattttttcttccaacattttcttatgaaacat

SEQ ID NO: 57871 - DNA, 40 bp, Homo sapiens
atgtttcataagaaaatgttggaagaaaaaataataaata

SEQ ID NO: 57872 - DNA, 40 bp, Homo sapiens
atttattattttttcttccaacattttcttatgaaacatt

SEQ ID NO: 57873 - DNA, 40 bp, Homo sapiens
aatgtttcataagaaaatgttggaagaaaaaataataaat

SEQ ID NO: 57874 - DNA, 40 bp, Homo sapiens
tttattattttttcttccaacattttcttatgaaacattt

SEQ ID NO: 57875 - DNA, 40 bp, Homo sapiens
aaatgtttcataagaaaatgttggaagaaaaaataataaa

SEQ ID NO: 57876 - DNA, 40 bp, Homo sapiens
ttattattttttcttccaacattttcttatgaaacatttt

SEQ ID NO: 57877 - DNA, 40 bp, Homo sapiens
aaaatgtttcataagaaaatgttggaagaaaaaataataa

SEQ ID NO: 57878 - DNA, 40 bp, Homo sapiens
tattattttttcttccaacattttcttatgaaacattttc

SEQ ID NO: 57879 - DNA, 40 bp, Homo sapiens
gaaaatgtttcataagaaaatgttggaagaaaaaataata

SEQ ID NO: 57880 - DNA, 40 bp, Homo sapiens
attattttttcttccaacattttcttatgaaacattttca

SEQ ID NO: 57881 - DNA, 40 bp, Homo sapiens
tgaaaatgtttcataagaaaatgttggaagaaaaaataat

SEQ ID NO: 57882 - DNA, 40 bp, Homo sapiens
ttattttttcttccaacattttcttatgaaacattttcaa

SEQ ID NO: 57883 - DNA, 40 bp, Homo sapiens
ttgaaaatgtttcataagaaaatgttggaagaaaaaataa

SEQ ID NO: 57884 - DNA, 40 bp, Homo sapiens
tattttttcttccaacattttcttatgaaacattttcaaa

SEQ ID NO: 57885 - DNA, 40 bp, Homo sapiens
tttgaaaatgtttcataagaaaatgttggaagaaaaaata

SEQ ID NO: 57886 - DNA, 40 bp, Homo sapiens
attttttcttccaacattttcttatgaaacattttcaaat

SEQ ID NO: 57887 - DNA, 40 bp, Homo sapiens
atttgaaaatgtttcataagaaaatgttggaagaaaaaat

SEQ ID NO: 57888 - DNA, 40 bp, Homo sapiens
ttttttcttccaacattttcttatgaaacattttcaaata

SEQ ID NO: 57889 - DNA, 40 bp, Homo sapiens
tatttgaaaatgtttcataagaaaatgttggaagaaaaaa

SEQ ID NO: 57890 - DNA, 40 bp, Homo sapiens
tttttcttccaacattttcttatgaaacattttcaaatac

SEQ ID NO: 57891 - DNA, 40 bp, Homo sapiens
gtatttgaaaatgtttcataagaaaatgttggaagaaaaa

SEQ ID NO: 57892 - DNA, 40 bp, Homo sapiens
ttttcttccaacattttcttatgaaacattttcaaataca

SEQ ID NO: 57893 - DNA, 40 bp, Homo sapiens
tgtatttgaaaatgtttcataagaaaatgttggaagaaaa

SEQ ID NO: 57894 - DNA, 40 bp, Homo sapiens
tttcttccaacattttcttatgaaacattttcaaatacaa

SEQ ID NO: 57895 - DNA, 40 bp, Homo sapiens
ttgtatttgaaaatgtttcataagaaaatgttggaagaaa

SEQ ID NO: 57896 - DNA, 40 bp, Homo sapiens
ttcttccaacattttcttatgaaacattttcaaatacaaa

SEQ ID NO: 57897 - DNA, 40 bp, Homo sapiens
tttgtatttgaaaatgtttcataagaaaatgttggaagaa

SEQ ID NO: 57898 - DNA, 40 bp, Homo sapiens
tcttccaacattttcttatgaaacattttcaaatacaaaa

SEQ ID NO: 57899 - DNA, 40 bp, Homo sapiens
ttttgtatttgaaaatgtttcataagaaaatgttggaaga

SEQ ID NO: 57900 - DNA, 40 bp, Homo sapiens
cttccaacattttcttatgaaacattttcaaatacaaaat

SEQ ID NO: 57901 - DNA, 40 bp, Homo sapiens
attttgtatttgaaaatgtttcataagaaaatgttggaag

SEQ ID NO: 57902 - DNA, 40 bp, Homo sapiens
ttccaacattttcttatgaaacattttcaaatacaaaatt

SEQ ID NO: 57903 - DNA, 40 bp, Homo sapiens
aattttgtatttgaaaatgtttcataagaaaatgttggaa

SEQ ID NO: 57904 - DNA, 40 bp, Homo sapiens
tccaacattttcttatgaaacattttcaaatacaaaattg

SEQ ID NO: 57905 - DNA, 40 bp, Homo sapiens
caattttgtatttgaaaatgtttcataagaaaatgttgga

SEQ ID NO: 57906 - DNA, 40 bp, Homo sapiens
ccaacattttcttatgaaacattttcaaatacaaaattga

SEQ ID NO: 57907 - DNA, 40 bp, Homo sapiens
tcaattttgtatttgaaaatgtttcataagaaaatgttgg

SEQ ID NO: 57908 - DNA, 40 bp, Homo sapiens
caacattttcttatgaaacattttcaaatacaaaattgag

SEQ ID NO: 57909 - DNA, 40 bp, Homo sapiens
ctcaattttgtatttgaaaatgtttcataagaaaatgttg

SEQ ID NO: 57910 - DNA, 40 bp, Homo sapiens
aacattttcttatgaaacattttcaaatacaaaattgagt

SEQ ID NO: 57911 - DNA, 40 bp, Homo sapiens
actcaattttgtatttgaaaatgtttcataagaaaatgtt

SEQ ID NO: 57912 - DNA, 40 bp, Homo sapiens
acattttcttatgaaacattttcaaatacaaaattgagtt

SEQ ID NO: 57913 - DNA, 40 bp, Homo sapiens
aactcaattttgtatttgaaaatgtttcataagaaaatgt

SEQ ID NO: 57914 - DNA, 40 bp, Homo sapiens
cattttcttatgaaacattttcaaatacaaaattgagttt

SEQ ID NO: 57915 - DNA, 40 bp, Homo sapiens
aaactcaattttgtatttgaaaatgtttcataagaaaatg

SEQ ID NO: 57916 - DNA, 40 bp, Homo sapiens
attttcttatgaaacattttcaaatacaaaattgagtttt

SEQ ID NO: 57917 - DNA, 40 bp, Homo sapiens
aaaactcaattttgtatttgaaaatgtttcataagaaaat

SEQ ID NO: 57918 - DNA, 40 bp, Homo sapiens
ttttcttatgaaacattttcaaatacaaaattgagtttta

SEQ ID NO: 57919 - DNA, 40 bp, Homo sapiens
taaaactcaattttgtatttgaaaatgtttcataagaaaa

SEQ ID NO: 57920 - DNA, 40 bp, Homo sapiens
tttcttatgaaacattttcaaatacaaaattgagttttat

SEQ ID NO: 57921 - DNA, 40 bp, Homo sapiens
ataaaactcaattttgtatttgaaaatgtttcataagaaa

SEQ ID NO: 57922 - DNA, 40 bp, Homo sapiens
ttcttatgaaacattttcaaatacaaaattgagttttatt

SEQ ID NO: 57923 - DNA, 40 bp, Homo sapiens
aataaaactcaattttgtatttgaaaatgtttcataagaa

SEQ ID NO: 57924 - DNA, 40 bp, Homo sapiens
tcttatgaaacattttcaaatacaaaattgagttttattt

SEQ ID NO: 57925 - DNA, 40 bp, Homo sapiens
aaataaaactcaattttgtatttgaaaatgtttcataaga

SEQ ID NO: 57926 - DNA, 40 bp, Homo sapiens
cttatgaaacattttcaaatacaaaattgagttttattta

SEQ ID NO: 57927 - DNA, 40 bp, Homo sapiens
taaataaaactcaattttgtatttgaaaatgtttcataag

SEQ ID NO: 57928 - DNA, 40 bp, Homo sapiens
ttatgaaacattttcaaatacaaaattgagttttatttaa

SEQ ID NO: 57929 - DNA, 40 bp, Homo sapiens
ttaaataaaactcaattttgtatttgaaaatgtttcataa

SEQ ID NO: 57930 - DNA, 40 bp, Homo sapiens
tatgaaacattttcaaatacaaaattgagttttatttaaa

SEQ ID NO: 57931 - DNA, 40 bp, Homo sapiens
tttaaataaaactcaattttgtatttgaaaatgtttcata

SEQ ID NO: 57932 - DNA, 40 bp, Homo sapiens
atgaaacattttcaaatacaaaattgagttttatttaaaa

SEQ ID NO: 57933 - DNA, 40 bp, Homo sapiens
ttttaaataaaactcaattttgtatttgaaaatgtttcat

SEQ ID NO: 57934 - DNA, 40 bp, Homo sapiens
tgaaacattttcaaatacaaaattgagttttatttaaaac

SEQ ID NO: 57935 - DNA, 40 bp, Homo sapiens
gttttaaataaaactcaattttgtatttgaaaatgtttca

SEQ ID NO: 57936 - DNA, 40 bp, Homo sapiens
gaaacattttcaaatacaaaattgagttttatttaaaaca

SEQ ID NO: 57937 - DNA, 40 bp, Homo sapiens
tgttttaaataaaactcaattttgtatttgaaaatgtttc

SEQ ID NO: 57938 - DNA, 40 bp, Homo sapiens
aaacattttcaaatacaaaattgagttttatttaaaacat

SEQ ID NO: 57939 - DNA, 40 bp, Homo sapiens
atgttttaaataaaactcaattttgtatttgaaaatgttt

SEQ ID NO: 57940 - DNA, 40 bp, Homo sapiens
aacattttcaaatacaaaattgagttttatttaaaacatt

SEQ ID NO: 57941 - DNA, 40 bp, Homo sapiens
aatgttttaaataaaactcaattttgtatttgaaaatgtt

SEQ ID NO: 57942 - DNA, 40 bp, Homo sapiens
acattttcaaatacaaaattgagttttatttaaaacattt

SEQ ID NO: 57943 - DNA, 40 bp, Homo sapiens
aaatgttttaaataaaactcaattttgtatttgaaaatgt

SEQ ID NO: 57944 - DNA, 40 bp, Homo sapiens
cattttcaaatacaaaattgagttttatttaaaacatttg

SEQ ID NO: 57945 - DNA, 40 bp, Homo sapiens
caaatgttttaaataaaactcaattttgtatttgaaaatg

SEQ ID NO: 57946 - DNA, 40 bp, Homo sapiens
attttcaaatacaaaattgagttttatttaaaacatttgc

SEQ ID NO: 57947 - DNA, 40 bp, Homo sapiens
gcaaatgttttaaataaaactcaattttgtatttgaaaat

SEQ ID NO: 57948 - DNA, 40 bp, Homo sapiens
ttttcaaatacaaaattgagttttatttaaaacatttgca

SEQ ID NO: 57949 - DNA, 40 bp, Homo sapiens
tgcaaatgttttaaataaaactcaattttgtatttgaaaa

SEQ ID NO: 57950 - DNA, 40 bp, Homo sapiens
tttcaaatacaaaattgagttttatttaaaacatttgcaa

SEQ ID NO: 57951 - DNA, 40 bp, Homo sapiens
ttgcaaatgttttaaataaaactcaattttgtatttgaaa

SEQ ID NO: 57952 - DNA, 40 bp, Homo sapiens
ttcaaatacaaaattgagttttatttaaaacatttgcaaa

SEQ ID NO: 57953 - DNA, 40 bp, Homo sapiens
tttgcaaatgttttaaataaaactcaattttgtatttgaa

SEQ ID NO: 57954 - DNA, 40 bp, Homo sapiens
tcaaatacaaaattgagttttatttaaaacatttgcaaat

SEQ ID NO: 57955 - DNA, 40 bp, Homo sapiens
atttgcaaatgttttaaataaaactcaattttgtatttga

SEQ ID NO: 57956 - DNA, 40 bp, Homo sapiens
caaatacaaaattgagttttatttaaaacatttgcaaata

SEQ ID NO: 57957 - DNA, 40 bp, Homo sapiens
tatttgcaaatgttttaaataaaactcaattttgtatttg

SEQ ID NO: 57958 - DNA, 40 bp, Homo sapiens
aaatacaaaattgagttttatttaaaacatttgcaaatat

SEQ ID NO: 57959 - DNA, 40 bp, Homo sapiens
atatttgcaaatgttttaaataaaactcaattttgtattt

SEQ ID NO: 57960 - DNA, 40 bp, Homo sapiens
aatacaaaattgagttttatttaaaacatttgcaaatata

SEQ ID NO: 57961 - DNA, 40 bp, Homo sapiens
tatatttgcaaatgttttaaataaaactcaattttgtatt

SEQ ID NO: 57962 - DNA, 40 bp, Homo sapiens
atacaaaattgagttttatttaaaacatttgcaaatatac

SEQ ID NO: 57963 - DNA, 40 bp, Homo sapiens
gtatatttgcaaatgttttaaataaaactcaattttgtat

SEQ ID NO: 57964 - DNA, 40 bp, Homo sapiens
tacaaaattgagttttatttaaaacatttgcaaatatact

SEQ ID NO: 57965 - DNA, 40 bp, Homo sapiens
agtatatttgcaaatgttttaaataaaactcaattttgta

SEQ ID NO: 57966 - DNA, 40 bp, Homo sapiens
acaaaattgagttttatttaaaacatttgcaaatatacta

SEQ ID NO: 57967 - DNA, 40 bp, Homo sapiens
tagtatatttgcaaatgttttaaataaaactcaattttgt

SEQ ID NO: 57968 - DNA, 40 bp, Homo sapiens
caaaattgagttttatttaaaacatttgcaaatatactac

SEQ ID NO: 57969 - DNA, 40 bp, Homo sapiens
gtagtatatttgcaaatgttttaaataaaactcaattttg

SEQ ID NO: 57970 - DNA, 40 bp, Homo sapiens
aaaattgagttttatttaaaacatttgcaaatatactacc

SEQ ID NO: 57971 - DNA, 40 bp, Homo sapiens
ggtagtatatttgcaaatgttttaaataaaactcaatttt

SEQ ID NO: 57972 - DNA, 40 bp, Homo sapiens
aaattgagttttatttaaaacatttgcaaatatactacct

SEQ ID NO: 57973 - DNA, 40 bp, Homo sapiens
aggtagtatatttgcaaatgttttaaataaaactcaattt

SEQ ID NO: 57974 - DNA, 40 bp, Homo sapiens
aattgagttttatttaaaacatttgcaaatatactaccta

SEQ ID NO: 57975 - DNA, 40 bp, Homo sapiens
taggtagtatatttgcaaatgttttaaataaaactcaatt

SEQ ID NO: 57976 - DNA, 40 bp, Homo sapiens
attgagttttatttaaaacatttgcaaatatactacctag

SEQ ID NO: 57977 - DNA, 40 bp, Homo sapiens
ctaggtagtatatttgcaaatgttttaaataaaactcaat

SEQ ID NO: 57978 - DNA, 40 bp, Homo sapiens
ttgagttttatttaaaacatttgcaaatatactacctaga

SEQ ID NO: 57979 - DNA, 40 bp, Homo sapiens
tctaggtagtatatttgcaaatgttttaaataaaactcaa

SEQ ID NO: 57980 - DNA, 40 bp, Homo sapiens
tgagttttatttaaaacatttgcaaatatactacctagat

SEQ ID NO: 57981 - DNA, 40 bp, Homo sapiens
atctaggtagtatatttgcaaatgttttaaataaaactca

SEQ ID NO: 57982 - DNA, 40 bp, Homo sapiens
gagttttatttaaaacatttgcaaatatactacctagatt

SEQ ID NO: 57983 - DNA, 40 bp, Homo sapiens
aatctaggtagtatatttgcaaatgttttaaataaaactc

SEQ ID NO: 57984 - DNA, 40 bp, Homo sapiens
agttttatttaaaacatttgcaaatatactacctagattc

SEQ ID NO: 57985 - DNA, 40 bp, Homo sapiens
gaatctaggtagtatatttgcaaatgttttaaataaaact

SEQ ID NO: 57986 - DNA, 40 bp, Homo sapiens
gttttatttaaaacatttgcaaatatactacctagattct

SEQ ID NO: 57987 - DNA, 40 bp, Homo sapiens
agaatctaggtagtatatttgcaaatgttttaaataaaac

SEQ ID NO: 57988 - DNA, 40 bp, Homo sapiens
ttttatttaaaacatttgcaaatatactacctagattcta

SEQ ID NO: 57989 - DNA, 40 bp, Homo sapiens
tagaatctaggtagtatatttgcaaatgttttaaataaaa

SEQ ID NO: 57990 - DNA, 40 bp, Homo sapiens
tttatttaaaacatttgcaaatatactacctagattctac

SEQ ID NO: 57991 - DNA, 40 bp, Homo sapiens
gtagaatctaggtagtatatttgcaaatgttttaaataaa

SEQ ID NO: 57992 - DNA, 40 bp, Homo sapiens
ttatttaaaacatttgcaaatatactacctagattctacc

SEQ ID NO: 57993 - DNA, 40 bp, Homo sapiens
ggtagaatctaggtagtatatttgcaaatgttttaaataa

SEQ ID NO: 57994 - DNA, 40 bp, Homo sapiens
tatttaaaacatttgcaaatatactacctagattctacca

SEQ ID NO: 57995 - DNA, 40 bp, Homo sapiens
tggtagaatctaggtagtatatttgcaaatgttttaaata

SEQ ID NO: 57996 - DNA, 40 bp, Homo sapiens
atttaaaacatttgcaaatatactacctagattctaccat

SEQ ID NO: 57997 - DNA, 40 bp, Homo sapiens
atggtagaatctaggtagtatatttgcaaatgttttaaat

SEQ ID NO: 57998 - DNA, 40 bp, Homo sapiens
tttaaaacatttgcaaatatactacctagattctaccatt

SEQ ID NO: 57999 - DNA, 40 bp, Homo sapiens
aatggtagaatctaggtagtatatttgcaaatgttttaaa

SEQ ID NO: 58000 - DNA, 40 bp, Homo sapiens
ttaaaacatttgcaaatatactacctagattctaccattg

SEQ ID NO: 58001 - DNA, 40 bp, Homo sapiens
caatggtagaatctaggtagtatatttgcaaatgttttaa

SEQ ID NO: 58002 - DNA, 40 bp, Homo sapiens
taaaacatttgcaaatatactacctagattctaccattgt

SEQ ID NO: 58003 - DNA, 40 bp, Homo sapiens
acaatggtagaatctaggtagtatatttgcaaatgtttta

SEQ ID NO: 58004 - DNA, 40 bp, Homo sapiens
aaaacatttgcaaatatactacctagattctaccattgtt

SEQ ID NO: 58005 - DNA, 40 bp, Homo sapiens
aacaatggtagaatctaggtagtatatttgcaaatgtttt

SEQ ID NO: 58006 - DNA, 40 bp, Homo sapiens
aaacatttgcaaatatactacctagattctaccattgttg

SEQ ID NO: 58007 - DNA, 40 bp, Homo sapiens
caacaatggtagaatctaggtagtatatttgcaaatgttt

SEQ ID NO: 58008 - DNA, 40 bp, Homo sapiens
aacatttgcaaatatactacctagattctaccattgttgt

SEQ ID NO: 58009 - DNA, 40 bp, Homo sapiens
acaacaatggtagaatctaggtagtatatttgcaaatgtt

SEQ ID NO: 58010 - DNA, 40 bp, Homo sapiens
acatttgcaaatatactacctagattctaccattgttgtt

SEQ ID NO: 58011 - DNA, 40 bp, Homo sapiens
aacaacaatggtagaatctaggtagtatatttgcaaatgt

SEQ ID NO: 58012 - DNA, 40 bp, Homo sapiens
catttgcaaatatactacctagattctaccattgttgttt

SEQ ID NO: 58013 - DNA, 40 bp, Homo sapiens
aaacaacaatggtagaatctaggtagtatatttgcaaatg

SEQ ID NO: 58014 - DNA, 40 bp, Homo sapiens
atttgcaaatatactacctagattctaccattgttgtttt

SEQ ID NO: 58015 - DNA, 40 bp, Homo sapiens
aaaacaacaatggtagaatctaggtagtatatttgcaaat

SEQ ID NO: 58016 - DNA, 40 bp, Homo sapiens
tttgcaaatatactacctagattctaccattgttgtttta

SEQ ID NO: 58017 - DNA, 40 bp, Homo sapiens
taaaacaacaatggtagaatctaggtagtatatttgcaaa

SEQ ID NO: 58018 - DNA, 40 bp, Homo sapiens
ttgcaaatatactacctagattctaccattgttgttttat

SEQ ID NO: 58019 - DNA, 40 bp, Homo sapiens
ataaaacaacaatggtagaatctaggtagtatatttgcaa

SEQ ID NO: 58020 - DNA, 40 bp, Homo sapiens
tgcaaatatactacctagattctaccattgttgttttata

SEQ ID NO: 58021 - DNA, 40 bp, Homo sapiens
tataaaacaacaatggtagaatctaggtagtatatttgca

SEQ ID NO: 58022 - DNA, 40 bp, Homo sapiens
gcaaatatactacctagattctaccattgttgttttatat

SEQ ID NO: 58023 - DNA, 40 bp, Homo sapiens
atataaaacaacaatggtagaatctaggtagtatatttgc

SEQ ID NO: 58024 - DNA, 40 bp, Homo sapiens
caaatatactacctagattctaccattgttgttttatatt

SEQ ID NO: 58025 - DNA, 40 bp, Homo sapiens
aatataaaacaacaatggtagaatctaggtagtatatttg

SEQ ID NO: 58026 - DNA, 40 bp, Homo sapiens
aaatatactacctagattctaccattgttgttttatattt

SEQ ID NO: 58027 - DNA, 40 bp, Homo sapiens
aaatataaaacaacaatggtagaatctaggtagtatattt

SEQ ID NO: 58028 - DNA, 40 bp, Homo sapiens
aatatactacctagattctaccattgttgttttatatttg

SEQ ID NO: 58029 - DNA, 40 bp, Homo sapiens
caaatataaaacaacaatggtagaatctaggtagtatatt

SEQ ID NO: 58030 - DNA, 40 bp, Homo sapiens
atatactacctagattctaccattgttgttttatatttgc

SEQ ID NO: 58031 - DNA, 40 bp, Homo sapiens
gcaaatataaaacaacaatggtagaatctaggtagtatat

SEQ ID NO: 58032 - DNA, 40 bp, Homo sapiens
tatactacctagattctaccattgttgttttatatttgct

SEQ ID NO: 58033 - DNA, 40 bp, Homo sapiens
agcaaatataaaacaacaatggtagaatctaggtagtata

SEQ ID NO: 58034 - DNA, 40 bp, Homo sapiens
atactacctagattctaccattgttgttttatatttgctt

SEQ ID NO: 58035 - DNA, 40 bp, Homo sapiens
aagcaaatataaaacaacaatggtagaatctaggtagtat

SEQ ID NO: 58036 - DNA, 40 bp, Homo sapiens
tactacctagattctaccattgttgttttatatttgcttt

SEQ ID NO: 58037 - DNA, 40 bp, Homo sapiens
aaagcaaatataaaacaacaatggtagaatctaggtagta

SEQ ID NO: 58038 - DNA, 40 bp, Homo sapiens
actacctagattctaccattgttgttttatatttgcttta

SEQ ID NO: 58039 - DNA, 40 bp, Homo sapiens
taaagcaaatataaaacaacaatggtagaatctaggtagt

SEQ ID NO: 58040 - DNA, 40 bp, Homo sapiens
ctacctagattctaccattgttgttttatatttgctttac

SEQ ID NO: 58041 - DNA, 40 bp, Homo sapiens
gtaaagcaaatataaaacaacaatggtagaatctaggtag

SEQ ID NO: 58042 - DNA, 40 bp, Homo sapiens
tacctagattctaccattgttgttttatatttgctttact

SEQ ID NO: 58043 - DNA, 40 bp, Homo sapiens
agtaaagcaaatataaaacaacaatggtagaatctaggta

SEQ ID NO: 58044 - DNA, 40 bp, Homo sapiens
acctagattctaccattgttgttttatatttgctttactt

SEQ ID NO: 58045 - DNA, 40 bp, Homo sapiens
aagtaaagcaaatataaaacaacaatggtagaatctaggt

SEQ ID NO: 58046 - DNA, 40 bp, Homo sapiens
cctagattctaccattgttgttttatatttgctttactta

SEQ ID NO: 58047 - DNA, 40 bp, Homo sapiens
taagtaaagcaaatataaaacaacaatggtagaatctagg

SEQ ID NO: 58048 - DNA, 40 bp, Homo sapiens
ctagattctaccattgttgttttatatttgctttacttac

SEQ ID NO: 58049 - DNA, 40 bp, Homo sapiens
gtaagtaaagcaaatataaaacaacaatggtagaatctag

SEQ ID NO: 58050 - DNA, 40 bp, Homo sapiens
tagattctaccattgttgttttatatttgctttacttaca

SEQ ID NO: 58051 - DNA, 40 bp, Homo sapiens
tgtaagtaaagcaaatataaaacaacaatggtagaatcta

SEQ ID NO: 58052 - DNA, 40 bp, Homo sapiens
agattctaccattgttgttttatatttgctttacttacaa

SEQ ID NO: 58053 - DNA, 40 bp, Homo sapiens
ttgtaagtaaagcaaatataaaacaacaatggtagaatct

SEQ ID NO: 58054 - DNA, 40 bp, Homo sapiens
gattctaccattgttgttttatatttgctttacttacaac

SEQ ID NO: 58055 - DNA, 40 bp, Homo sapiens
gttgtaagtaaagcaaatataaaacaacaatggtagaatc

SEQ ID NO: 58056 - DNA, 40 bp, Homo sapiens
attctaccattgttgttttatatttgctttacttacaact

SEQ ID NO: 58057 - DNA, 40 bp, Homo sapiens
agttgtaagtaaagcaaatataaaacaacaatggtagaat

SEQ ID NO: 58058 - DNA, 40 bp, Homo sapiens
ttctaccattgttgttttatatttgctttacttacaactt

SEQ ID NO: 58059 - DNA, 40 bp, Homo sapiens
aagttgtaagtaaagcaaatataaaacaacaatggtagaa

SEQ ID NO: 58060 - DNA, 40 bp, Homo sapiens
tctaccattgttgttttatatttgctttacttacaacttt

SEQ ID NO: 58061 - DNA, 40 bp, Homo sapiens
aaagttgtaagtaaagcaaatataaaacaacaatggtaga

SEQ ID NO: 58062 - DNA, 40 bp, Homo sapiens
ctaccattgttgttttatatttgctttacttacaactttt

SEQ ID NO: 58063 - DNA, 40 bp, Homo sapiens
aaaagttgtaagtaaagcaaatataaaacaacaatggtag

SEQ ID NO: 58064 - DNA, 40 bp, Homo sapiens
taccattgttgttttatatttgctttacttacaactttta

SEQ ID NO: 58065 - DNA, 40 bp, Homo sapiens
taaaagttgtaagtaaagcaaatataaaacaacaatggta

SEQ ID NO: 58066 - DNA, 40 bp, Homo sapiens
accattgttgttttatatttgctttacttacaacttttaa

SEQ ID NO: 58067 - DNA, 40 bp, Homo sapiens
ttaaaagttgtaagtaaagcaaatataaaacaacaatggt

SEQ ID NO: 58068 - DNA, 40 bp, Homo sapiens
ccattgttgttttatatttgctttacttacaacttttaaa

SEQ ID NO: 58069 - DNA, 40 bp, Homo sapiens
tttaaaagttgtaagtaaagcaaatataaaacaacaatgg

SEQ ID NO: 58070 - DNA, 40 bp, Homo sapiens
cattgttgttttatatttgctttacttacaacttttaaaa

SEQ ID NO: 58071 - DNA, 40 bp, Homo sapiens
ttttaaaagttgtaagtaaagcaaatataaaacaacaatg

SEQ ID NO: 58072 - DNA, 40 bp, Homo sapiens
attgttgttttatatttgctttacttacaacttttaaaag

SEQ ID NO: 58073 - DNA, 40 bp, Homo sapiens
cttttaaaagttgtaagtaaagcaaatataaaacaacaat

SEQ ID NO: 58074 - DNA, 40 bp, Homo sapiens
ttgttgttttatatttgctttacttacaacttttaaaaga

SEQ ID NO: 58075 - DNA, 40 bp, Homo sapiens
tcttttaaaagttgtaagtaaagcaaatataaaacaacaa

SEQ ID NO: 58076 - DNA, 40 bp, Homo sapiens
tgttgttttatatttgctttacttacaacttttaaaagat

SEQ ID NO: 58077 - DNA, 40 bp, Homo sapiens
atcttttaaaagttgtaagtaaagcaaatataaaacaaca

SEQ ID NO: 58078 - DNA, 40 bp, Homo sapiens
gttgttttatatttgctttacttacaacttttaaaagatg

SEQ ID NO: 58079 - DNA, 40 bp, Homo sapiens
catcttttaaaagttgtaagtaaagcaaatataaaacaac

SEQ ID NO: 58080 - DNA, 40 bp, Homo sapiens
ttgttttatatttgctttacttacaacttttaaaagatgc

SEQ ID NO: 58081 - DNA, 40 bp, Homo sapiens
gcatcttttaaaagttgtaagtaaagcaaatataaaacaa

SEQ ID NO: 58082 - DNA, 40 bp, Homo sapiens
tgttttatatttgctttacttacaacttttaaaagatgct

SEQ ID NO: 58083 - DNA, 40 bp, Homo sapiens
agcatcttttaaaagttgtaagtaaagcaaatataaaaca

SEQ ID NO: 58084 - DNA, 40 bp, Homo sapiens
gttttatatttgctttacttacaacttttaaaagatgctt

SEQ ID NO: 58085 - DNA, 40 bp, Homo sapiens
aagcatcttttaaaagttgtaagtaaagcaaatataaaac

SEQ ID NO: 58086 - DNA, 40 bp, Homo sapiens
ttttatatttgctttacttacaacttttaaaagatgcttt

SEQ ID NO: 58087 - DNA, 40 bp, Homo sapiens
aaagcatcttttaaaagttgtaagtaaagcaaatataaaa

SEQ ID NO: 58088 - DNA, 40 bp, Homo sapiens
tttatatttgctttacttacaacttttaaaagatgctttt

SEQ ID NO: 58089 - DNA, 40 bp, Homo sapiens
aaaagcatcttttaaaagttgtaagtaaagcaaatataaa

SEQ ID NO: 58090 - DNA, 40 bp, Homo sapiens
ttatatttgctttacttacaacttttaaaagatgcttttt

SEQ ID NO: 58091 - DNA, 40 bp, Homo sapiens
aaaaagcatcttttaaaagttgtaagtaaagcaaatataa

SEQ ID NO: 58092 - DNA, 40 bp, Homo sapiens
tatatttgctttacttacaacttttaaaagatgcttttta

SEQ ID NO: 58093 - DNA, 40 bp, Homo sapiens
taaaaagcatcttttaaaagttgtaagtaaagcaaatata

SEQ ID NO: 58094 - DNA, 40 bp, Homo sapiens
atatttgctttacttacaacttttaaaagatgctttttat

SEQ ID NO: 58095 - DNA, 40 bp, Homo sapiens
ataaaaagcatcttttaaaagttgtaagtaaagcaaatat

SEQ ID NO: 58096 - DNA, 40 bp, Homo sapiens
tatttgctttacttacaacttttaaaagatgctttttata

SEQ ID NO: 58097 - DNA, 40 bp, Homo sapiens
tataaaaagcatcttttaaaagttgtaagtaaagcaaata

SEQ ID NO: 58098 - DNA, 40 bp, Homo sapiens
atttgctttacttacaacttttaaaagatgctttttatac

SEQ ID NO: 58099 - DNA, 40 bp, Homo sapiens
gtataaaaagcatcttttaaaagttgtaagtaaagcaaat

SEQ ID NO: 58100 - DNA, 40 bp, Homo sapiens
tttgctttacttacaacttttaaaagatgctttttatacc

SEQ ID NO: 58101 - DNA, 40 bp, Homo sapiens
ggtataaaaagcatcttttaaaagttgtaagtaaagcaaa

SEQ ID NO: 58102 - DNA, 40 bp, Homo sapiens
ttgctttacttacaacttttaaaagatgctttttatacca

SEQ ID NO: 58103 - DNA, 40 bp, Homo sapiens
tggtataaaaagcatcttttaaaagttgtaagtaaagcaa

SEQ ID NO: 58104 - DNA, 40 bp, Homo sapiens
tgctttacttacaacttttaaaagatgctttttataccac

SEQ ID NO: 58105 - DNA, 40 bp, Homo sapiens
gtggtataaaaagcatcttttaaaagttgtaagtaaagca

SEQ ID NO: 58106 - DNA, 40 bp, Homo sapiens
gctttacttacaacttttaaaagatgctttttataccact

SEQ ID NO: 58107 - DNA, 40 bp, Homo sapiens
agtggtataaaaagcatcttttaaaagttgtaagtaaagc

SEQ ID NO: 58108 - DNA, 40 bp, Homo sapiens
ctttacttacaacttttaaaagatgctttttataccactg

SEQ ID NO: 58109 - DNA, 40 bp, Homo sapiens
cagtggtataaaaagcatcttttaaaagttgtaagtaaag

SEQ ID NO: 58110 - DNA, 40 bp, Homo sapiens
tttacttacaacttttaaaagatgctttttataccactga

SEQ ID NO: 58111 - DNA, 40 bp, Homo sapiens
tcagtggtataaaaagcatcttttaaaagttgtaagtaaa

SEQ ID NO: 58112 - DNA, 40 bp, Homo sapiens
ttacttacaacttttaaaagatgctttttataccactgaa

SEQ ID NO: 58113 - DNA, 40 bp, Homo sapiens
ttcagtggtataaaaagcatcttttaaaagttgtaagtaa

SEQ ID NO: 58114 - DNA, 40 bp, Homo sapiens
tacttacaacttttaaaagatgctttttataccactgaac

SEQ ID NO: 58115 - DNA, 40 bp, Homo sapiens
gttcagtggtataaaaagcatcttttaaaagttgtaagta

SEQ ID NO: 58116 - DNA, 40 bp, Homo sapiens
acttacaacttttaaaagatgctttttataccactgaaca

SEQ ID NO: 58117 - DNA, 40 bp, Homo sapiens
tgttcagtggtataaaaagcatcttttaaaagttgtaagt

SEQ ID NO: 58118 - DNA, 40 bp, Homo sapiens
cttacaacttttaaaagatgctttttataccactgaacat

SEQ ID NO: 58119 - DNA, 40 bp, Homo sapiens
atgttcagtggtataaaaagcatcttttaaaagttgtaag

SEQ ID NO: 58120 - DNA, 40 bp, Homo sapiens
ttacaacttttaaaagatgctttttataccactgaacatt

SEQ ID NO: 58121 - DNA, 40 bp, Homo sapiens
aatgttcagtggtataaaaagcatcttttaaaagttgtaa

SEQ ID NO: 58122 - DNA, 40 bp, Homo sapiens
tacaacttttaaaagatgctttttataccactgaacattt

SEQ ID NO: 58123 - DNA, 40 bp, Homo sapiens
aaatgttcagtggtataaaaagcatcttttaaaagttgta

SEQ ID NO: 58124 - DNA, 40 bp, Homo sapiens
acaacttttaaaagatgctttttataccactgaacatttt

SEQ ID NO: 58125 - DNA, 40 bp, Homo sapiens
aaaatgttcagtggtataaaaagcatcttttaaaagttgt

SEQ ID NO: 58126 - DNA, 40 bp, Homo sapiens
caacttttaaaagatgctttttataccactgaacatttta

SEQ ID NO: 58127 - DNA, 40 bp, Homo sapiens
taaaatgttcagtggtataaaaagcatcttttaaaagttg

SEQ ID NO: 58128 - DNA, 40 bp, Homo sapiens
aacttttaaaagatgctttttataccactgaacattttag

SEQ ID NO: 58129 - DNA, 40 bp, Homo sapiens
ctaaaatgttcagtggtataaaaagcatcttttaaaagtt

SEQ ID NO: 58130 - DNA, 40 bp, Homo sapiens
acttttaaaagatgctttttataccactgaacattttagc

SEQ ID NO: 58131 - DNA, 40 bp, Homo sapiens
gctaaaatgttcagtggtataaaaagcatcttttaaaagt

SEQ ID NO: 58132 - DNA, 40 bp, Homo sapiens
cttttaaaagatgctttttataccactgaacattttagct

SEQ ID NO: 58133 - DNA, 40 bp, Homo sapiens
agctaaaatgttcagtggtataaaaagcatcttttaaaag

SEQ ID NO: 58134 - DNA, 40 bp, Homo sapiens
ttttaaaagatgctttttataccactgaacattttagctt

SEQ ID NO: 58135 - DNA, 40 bp, Homo sapiens
aagctaaaatgttcagtggtataaaaagcatcttttaaaa

SEQ ID NO: 58136 - DNA, 40 bp, Homo sapiens
tttaaaagatgctttttataccactgaacattttagctta

SEQ ID NO: 58137 - DNA, 40 bp, Homo sapiens
taagctaaaatgttcagtggtataaaaagcatcttttaaa

SEQ ID NO: 58138 - DNA, 40 bp, Homo sapiens
ttaaaagatgctttttataccactgaacattttagcttac

SEQ ID NO: 58139 - DNA, 40 bp, Homo sapiens
gtaagctaaaatgttcagtggtataaaaagcatcttttaa

SEQ ID NO: 58140 - DNA, 40 bp, Homo sapiens
taaaagatgctttttataccactgaacattttagcttaca

SEQ ID NO: 58141 - DNA, 40 bp, Homo sapiens
tgtaagctaaaatgttcagtggtataaaaagcatctttta

SEQ ID NO: 58142 - DNA, 40 bp, Homo sapiens
aaaagatgctttttataccactgaacattttagcttacat

SEQ ID NO: 58143 - DNA, 40 bp, Homo sapiens
atgtaagctaaaatgttcagtggtataaaaagcatctttt

SEQ ID NO: 58144 - DNA, 40 bp, Homo sapiens
aaagatgctttttataccactgaacattttagcttacatt

SEQ ID NO: 58145 - DNA, 40 bp, Homo sapiens
aatgtaagctaaaatgttcagtggtataaaaagcatcttt

SEQ ID NO: 58146 - DNA, 40 bp, Homo sapiens
aagatgctttttataccactgaacattttagcttacattt

SEQ ID NO: 58147 - DNA, 40 bp, Homo sapiens
aaatgtaagctaaaatgttcagtggtataaaaagcatctt

SEQ ID NO: 58148 - DNA, 40 bp, Homo sapiens
agatgctttttataccactgaacattttagcttacatttc

SEQ ID NO: 58149 - DNA, 40 bp, Homo sapiens
gaaatgtaagctaaaatgttcagtggtataaaaagcatct

SEQ ID NO: 58150 - DNA, 40 bp, Homo sapiens
gatgctttttataccactgaacattttagcttacatttca

SEQ ID NO: 58151 - DNA, 40 bp, Homo sapiens
tgaaatgtaagctaaaatgttcagtggtataaaaagcatc

SEQ ID NO: 58152 - DNA, 40 bp, Homo sapiens
atgctttttataccactgaacattttagcttacatttcac

SEQ ID NO: 58153 - DNA, 40 bp, Homo sapiens
gtgaaatgtaagctaaaatgttcagtggtataaaaagcat

SEQ ID NO: 58154 - DNA, 40 bp, Homo sapiens
tgctttttataccactgaacattttagcttacatttcaca

SEQ ID NO: 58155 - DNA, 40 bp, Homo sapiens
tgtgaaatgtaagctaaaatgttcagtggtataaaaagca

SEQ ID NO: 58156 - DNA, 40 bp, Homo sapiens
gctttttataccactgaacattttagcttacatttcacaa

SEQ ID NO: 58157 - DNA, 40 bp, Homo sapiens
ttgtgaaatgtaagctaaaatgttcagtggtataaaaagc

SEQ ID NO: 58158 - DNA, 40 bp, Homo sapiens
ctttttataccactgaacattttagcttacatttcacaaa

SEQ ID NO: 58159 - DNA, 40 bp, Homo sapiens
tttgtgaaatgtaagctaaaatgttcagtggtataaaaag

SEQ ID NO: 58160 - DNA, 40 bp, Homo sapiens
tttttataccactgaacattttagcttacatttcacaaag

SEQ ID NO: 58161 - DNA, 40 bp, Homo sapiens
ctttgtgaaatgtaagctaaaatgttcagtggtataaaaa

SEQ ID NO: 58162 - DNA, 40 bp, Homo sapiens
ttttataccactgaacattttagcttacatttcacaaaga

SEQ ID NO: 58163 - DNA, 40 bp, Homo sapiens
tctttgtgaaatgtaagctaaaatgttcagtggtataaaa

SEQ ID NO: 58164 - DNA, 40 bp, Homo sapiens
tttataccactgaacattttagcttacatttcacaaagaa

SEQ ID NO: 58165 - DNA, 40 bp, Homo sapiens
ttctttgtgaaatgtaagctaaaatgttcagtggtataaa

SEQ ID NO: 58166 - DNA, 40 bp, Homo sapiens
ttataccactgaacattttagcttacatttcacaaagaaa

SEQ ID NO: 58167 - DNA, 40 bp, Homo sapiens
tttctttgtgaaatgtaagctaaaatgttcagtggtataa

SEQ ID NO: 58168 - DNA, 40 bp, Homo sapiens
tataccactgaacattttagcttacatttcacaaagaaaa

SEQ ID NO: 58169 - DNA, 40 bp, Homo sapiens
ttttctttgtgaaatgtaagctaaaatgttcagtggtata

SEQ ID NO: 58170 - DNA, 40 bp, Homo sapiens
ataccactgaacattttagcttacatttcacaaagaaaag

SEQ ID NO: 58171 - DNA, 40 bp, Homo sapiens
cttttctttgtgaaatgtaagctaaaatgttcagtggtat

SEQ ID NO: 58172 - DNA, 40 bp, Homo sapiens
taccactgaacattttagcttacatttcacaaagaaaaga

SEQ ID NO: 58173 - DNA, 40 bp, Homo sapiens
tcttttctttgtgaaatgtaagctaaaatgttcagtggta

SEQ ID NO: 58174 - DNA, 40 bp, Homo sapiens
accactgaacattttagcttacatttcacaaagaaaagaa

SEQ ID NO: 58175 - DNA, 40 bp, Homo sapiens
ttcttttctttgtgaaatgtaagctaaaatgttcagtggt

SEQ ID NO: 58176 - DNA, 40 bp, Homo sapiens
ccactgaacattttagcttacatttcacaaagaaaagaaa

SEQ ID NO: 58177 - DNA, 40 bp, Homo sapiens
tttcttttctttgtgaaatgtaagctaaaatgttcagtgg

SEQ ID NO: 58178 - DNA, 40 bp, Homo sapiens
cactgaacattttagcttacatttcacaaagaaaagaaaa

SEQ ID NO: 58179 - DNA, 40 bp, Homo sapiens
ttttcttttctttgtgaaatgtaagctaaaatgttcagtg

SEQ ID NO: 58180 - DNA, 40 bp, Homo sapiens
actgaacattttagcttacatttcacaaagaaaagaaaaa

SEQ ID NO: 58181 - DNA, 40 bp, Homo sapiens
tttttcttttctttgtgaaatgtaagctaaaatgttcagt

SEQ ID NO: 58182 - DNA, 40 bp, Homo sapiens
ctgaacattttagcttacatttcacaaagaaaagaaaaaa

SEQ ID NO: 58183 - DNA, 40 bp, Homo sapiens
ttttttcttttctttgtgaaatgtaagctaaaatgttcag

SEQ ID NO: 58184 - DNA, 40 bp, Homo sapiens
tgaacattttagcttacatttcacaaagaaaagaaaaaat

SEQ ID NO: 58185 - DNA, 40 bp, Homo sapiens
attttttcttttctttgtgaaatgtaagctaaaatgttca

SEQ ID NO: 58186 - DNA, 40 bp, Homo sapiens
gaacattttagcttacatttcacaaagaaaagaaaaaatt

SEQ ID NO: 58187 - DNA, 40 bp, Homo sapiens
aattttttcttttctttgtgaaatgtaagctaaaatgttc

SEQ ID NO: 58188 - DNA, 40 bp, Homo sapiens
aacattttagcttacatttcacaaagaaaagaaaaaattt

SEQ ID NO: 58189 - DNA, 40 bp, Homo sapiens
aaattttttcttttctttgtgaaatgtaagctaaaatgtt

SEQ ID NO: 58190 - DNA, 40 bp, Homo sapiens
acattttagcttacatttcacaaagaaaagaaaaaattta

SEQ ID NO: 58191 - DNA, 40 bp, Homo sapiens
taaattttttcttttctttgtgaaatgtaagctaaaatgt

SEQ ID NO: 58192 - DNA, 40 bp, Homo sapiens
cattttagcttacatttcacaaagaaaagaaaaaatttaa

SEQ ID NO: 58193 - DNA, 40 bp, Homo sapiens
ttaaattttttcttttctttgtgaaatgtaagctaaaatg

SEQ ID NO: 58194 - DNA, 40 bp, Homo sapiens
attttagcttacatttcacaaagaaaagaaaaaatttaag

SEQ ID NO: 58195 - DNA, 40 bp, Homo sapiens
cttaaattttttcttttctttgtgaaatgtaagctaaaat

SEQ ID NO: 58196 - DNA, 40 bp, Homo sapiens
ttttagcttacatttcacaaagaaaagaaaaaatttaaga

SEQ ID NO: 58197 - DNA, 40 bp, Homo sapiens
tcttaaattttttcttttctttgtgaaatgtaagctaaaa

SEQ ID NO: 58198 - DNA, 40 bp, Homo sapiens
tttagcttacatttcacaaagaaaagaaaaaatttaagag

SEQ ID NO: 58199 - DNA, 40 bp, Homo sapiens
ctcttaaattttttcttttctttgtgaaatgtaagctaaa

SEQ ID NO: 58200 - DNA, 40 bp, Homo sapiens
ttagcttacatttcacaaagaaaagaaaaaatttaagaga

SEQ ID NO: 58201 - DNA, 40 bp, Homo sapiens
tctcttaaattttttcttttctttgtgaaatgtaagctaa

SEQ ID NO: 58202 - DNA, 40 bp, Homo sapiens
tagcttacatttcacaaagaaaagaaaaaatttaagagac

SEQ ID NO: 58203 - DNA, 40 bp, Homo sapiens
gtctcttaaattttttcttttctttgtgaaatgtaagcta

SEQ ID NO: 58204 - DNA, 40 bp, Homo sapiens
agcttacatttcacaaagaaaagaaaaaatttaagagact

SEQ ID NO: 58205 - DNA, 40 bp, Homo sapiens
agtctcttaaattttttcttttctttgtgaaatgtaagct

SEQ ID NO: 58206 - DNA, 40 bp, Homo sapiens
gcttacatttcacaaagaaaagaaaaaatttaagagactt

SEQ ID NO: 58207 - DNA, 40 bp, Homo sapiens
aagtctcttaaattttttcttttctttgtgaaatgtaagc

SEQ ID NO: 58208 - DNA, 40 bp, Homo sapiens
cttacatttcacaaagaaaagaaaaaatttaagagacttt

SEQ ID NO: 58209 - DNA, 40 bp, Homo sapiens
aaagtctcttaaattttttcttttctttgtgaaatgtaag

SEQ ID NO: 58210 - DNA, 40 bp, Homo sapiens
ttacatttcacaaagaaaagaaaaaatttaagagactttg

SEQ ID NO: 58211 - DNA, 40 bp, Homo sapiens
caaagtctcttaaattttttcttttctttgtgaaatgtaa

SEQ ID NO: 58212 - DNA, 40 bp, Homo sapiens
tacatttcacaaagaaaagaaaaaatttaagagactttgc

SEQ ID NO: 58213 - DNA, 40 bp, Homo sapiens
gcaaagtctcttaaattttttcttttctttgtgaaatgta

SEQ ID NO: 58214 - DNA, 40 bp, Homo sapiens
acatttcacaaagaaaagaaaaaatttaagagactttgca

SEQ ID NO: 58215 - DNA, 40 bp, Homo sapiens
tgcaaagtctcttaaattttttcttttctttgtgaaatgt

SEQ ID NO: 58216 - DNA, 40 bp, Homo sapiens
catttcacaaagaaaagaaaaaatttaagagactttgcat

SEQ ID NO: 58217 - DNA, 40 bp, Homo sapiens
atgcaaagtctcttaaattttttcttttctttgtgaaatg

SEQ ID NO: 58218 - DNA, 40 bp, Homo sapiens
atttcacaaagaaaagaaaaaatttaagagactttgcata

SEQ ID NO: 58219 - DNA, 40 bp, Homo sapiens
tatgcaaagtctcttaaattttttcttttctttgtgaaat

SEQ ID NO: 58220 - DNA, 40 bp, Homo sapiens
tttcacaaagaaaagaaaaaatttaagagactttgcataa

SEQ ID NO: 58221 - DNA, 40 bp, Homo sapiens
ttatgcaaagtctcttaaattttttcttttctttgtgaaa

SEQ ID NO: 58222 - DNA, 40 bp, Homo sapiens
ttcacaaagaaaagaaaaaatttaagagactttgcataat

SEQ ID NO: 58223 - DNA, 40 bp, Homo sapiens
attatgcaaagtctcttaaattttttcttttctttgtgaa

SEQ ID NO: 58224 - DNA, 40 bp, Homo sapiens
tcacaaagaaaagaaaaaatttaagagactttgcataatg

SEQ ID NO: 58225 - DNA, 40 bp, Homo sapiens
cattatgcaaagtctcttaaattttttcttttctttgtga

SEQ ID NO: 58226 - DNA, 40 bp, Homo sapiens
cacaaagaaaagaaaaaatttaagagactttgcataatgt

SEQ ID NO: 58227 - DNA, 40 bp, Homo sapiens
acattatgcaaagtctcttaaattttttcttttctttgtg

SEQ ID NO: 58228 - DNA, 40 bp, Homo sapiens
acaaagaaaagaaaaaatttaagagactttgcataatgtt

SEQ ID NO: 58229 - DNA, 40 bp, Homo sapiens
aacattatgcaaagtctcttaaattttttcttttctttgt

SEQ ID NO: 58230 - DNA, 40 bp, Homo sapiens
caaagaaaagaaaaaatttaagagactttgcataatgttt

SEQ ID NO: 58231 - DNA, 40 bp, Homo sapiens
aaacattatgcaaagtctcttaaattttttcttttctttg

SEQ ID NO: 58232 - DNA, 40 bp, Homo sapiens
aaagaaaagaaaaaatttaagagactttgcataatgtttt

SEQ ID NO: 58233 - DNA, 40 bp, Homo sapiens
aaaacattatgcaaagtctcttaaattttttcttttcttt

SEQ ID NO: 58234 - DNA, 40 bp, Homo sapiens
aagaaaagaaaaaatttaagagactttgcataatgtttta

SEQ ID NO: 58235 - DNA, 40 bp, Homo sapiens
taaaacattatgcaaagtctcttaaattttttcttttctt

SEQ ID NO: 58236 - DNA, 40 bp, Homo sapiens
agaaaagaaaaaatttaagagactttgcataatgttttaa

SEQ ID NO: 58237 - DNA, 40 bp, Homo sapiens
ttaaaacattatgcaaagtctcttaaattttttcttttct

SEQ ID NO: 58238 - DNA, 40 bp, Homo sapiens
gaaaagaaaaaatttaagagactttgcataatgttttaag

SEQ ID NO: 58239 - DNA, 40 bp, Homo sapiens
cttaaaacattatgcaaagtctcttaaattttttcttttc

SEQ ID NO: 58240 - DNA, 40 bp, Homo sapiens
aaaagaaaaaatttaagagactttgcataatgttttaagg

SEQ ID NO: 58241 - DNA, 40 bp, Homo sapiens
ccttaaaacattatgcaaagtctcttaaattttttctttt

SEQ ID NO: 58242 - DNA, 40 bp, Homo sapiens
aaagaaaaaatttaagagactttgcataatgttttaaggg

SEQ ID NO: 58243 - DNA, 40 bp, Homo sapiens
cccttaaaacattatgcaaagtctcttaaattttttcttt

SEQ ID NO: 58244 - DNA, 40 bp, Homo sapiens
aagaaaaaatttaagagactttgcataatgttttaagggg

SEQ ID NO: 58245 - DNA, 40 bp, Homo sapiens
ccccttaaaacattatgcaaagtctcttaaattttttctt

SEQ ID NO: 58246 - DNA, 40 bp, Homo sapiens
agaaaaaatttaagagactttgcataatgttttaaggggt

SEQ ID NO: 58247 - DNA, 40 bp, Homo sapiens
accccttaaaacattatgcaaagtctcttaaattttttct

SEQ ID NO: 58248 - DNA, 40 bp, Homo sapiens
gaaaaaatttaagagactttgcataatgttttaaggggtt

SEQ ID NO: 58249 - DNA, 40 bp, Homo sapiens
aaccccttaaaacattatgcaaagtctcttaaattttttc

SEQ ID NO: 58250 - DNA, 40 bp, Homo sapiens
aaaaaatttaagagactttgcataatgttttaaggggttg

SEQ ID NO: 58251 - DNA, 40 bp, Homo sapiens
caaccccttaaaacattatgcaaagtctcttaaatttttt

SEQ ID NO: 58252 - DNA, 40 bp, Homo sapiens
aaaaatttaagagactttgcataatgttttaaggggttgc

SEQ ID NO: 58253 - DNA, 40 bp, Homo sapiens
gcaaccccttaaaacattatgcaaagtctcttaaattttt

SEQ ID NO: 58254 - DNA, 40 bp, Homo sapiens
aaaatttaagagactttgcataatgttttaaggggttgca

SEQ ID NO: 58255 - DNA, 40 bp, Homo sapiens
tgcaaccccttaaaacattatgcaaagtctcttaaatttt

SEQ ID NO: 58256 - DNA, 40 bp, Homo sapiens
aaatttaagagactttgcataatgttttaaggggttgcag

SEQ ID NO: 58257 - DNA, 40 bp, Homo sapiens
ctgcaaccccttaaaacattatgcaaagtctcttaaattt

SEQ ID NO: 58258 - DNA, 40 bp, Homo sapiens
aatttaagagactttgcataatgttttaaggggttgcagt

SEQ ID NO: 58259 - DNA, 40 bp, Homo sapiens
actgcaaccccttaaaacattatgcaaagtctcttaaatt

SEQ ID NO: 58260 - DNA, 40 bp, Homo sapiens
atttaagagactttgcataatgttttaaggggttgcagta

SEQ ID NO: 58261 - DNA, 40 bp, Homo sapiens
tactgcaaccccttaaaacattatgcaaagtctcttaaat

SEQ ID NO: 58262 - DNA, 40 bp, Homo sapiens
tttaagagactttgcataatgttttaaggggttgcagtaa

SEQ ID NO: 58263 - DNA, 40 bp, Homo sapiens
ttactgcaaccccttaaaacattatgcaaagtctcttaaa

SEQ ID NO: 58264 - DNA, 40 bp, Homo sapiens
ttaagagactttgcataatgttttaaggggttgcagtaaa

SEQ ID NO: 58265 - DNA, 40 bp, Homo sapiens
tttactgcaaccccttaaaacattatgcaaagtctcttaa

SEQ ID NO: 58266 - DNA, 40 bp, Homo sapiens
taagagactttgcataatgttttaaggggttgcagtaaag

SEQ ID NO: 58267 - DNA, 40 bp, Homo sapiens
ctttactgcaaccccttaaaacattatgcaaagtctctta

SEQ ID NO: 58268 - DNA, 40 bp, Homo sapiens
aagagactttgcataatgttttaaggggttgcagtaaaga

SEQ ID NO: 58269 - DNA, 40 bp, Homo sapiens
tctttactgcaaccccttaaaacattatgcaaagtctctt

SEQ ID NO: 58270 - DNA, 40 bp, Homo sapiens
agagactttgcataatgttttaaggggttgcagtaaagaa

SEQ ID NO: 58271 - DNA, 40 bp, Homo sapiens
ttctttactgcaaccccttaaaacattatgcaaagtctct

SEQ ID NO: 58272 - DNA, 40 bp, Homo sapiens
gagactttgcataatgttttaaggggttgcagtaaagaag

SEQ ID NO: 58273 - DNA, 40 bp, Homo sapiens
cttctttactgcaaccccttaaaacattatgcaaagtctc

SEQ ID NO: 58274 - DNA, 40 bp, Homo sapiens
agactttgcataatgttttaaggggttgcagtaaagaagt

SEQ ID NO: 58275 - DNA, 40 bp, Homo sapiens
acttctttactgcaaccccttaaaacattatgcaaagtct

SEQ ID NO: 58276 - DNA, 40 bp, Homo sapiens
gactttgcataatgttttaaggggttgcagtaaagaagtg

SEQ ID NO: 58277 - DNA, 40 bp, Homo sapiens
cacttctttactgcaaccccttaaaacattatgcaaagtc

SEQ ID NO: 58278 - DNA, 40 bp, Homo sapiens
actttgcataatgttttaaggggttgcagtaaagaagtgc

SEQ ID NO: 58279 - DNA, 40 bp, Homo sapiens
gcacttctttactgcaaccccttaaaacattatgcaaagt

SEQ ID NO: 58280 - DNA, 40 bp, Homo sapiens
ctttgcataatgttttaaggggttgcagtaaagaagtgct

SEQ ID NO: 58281 - DNA, 40 bp, Homo sapiens
agcacttctttactgcaaccccttaaaacattatgcaaag

SEQ ID NO: 58282 - DNA, 40 bp, Homo sapiens
tttgcataatgttttaaggggttgcagtaaagaagtgctt

SEQ ID NO: 58283 - DNA, 40 bp, Homo sapiens
aagcacttctttactgcaaccccttaaaacattatgcaaa

SEQ ID NO: 58284 - DNA, 40 bp, Homo sapiens
ttgcataatgttttaaggggttgcagtaaagaagtgcttc

SEQ ID NO: 58285 - DNA, 40 bp, Homo sapiens
gaagcacttctttactgcaaccccttaaaacattatgcaa

SEQ ID NO: 58286 - DNA, 40 bp, Homo sapiens
tgcataatgttttaaggggttgcagtaaagaagtgcttct

SEQ ID NO: 58287 - DNA, 40 bp, Homo sapiens
agaagcacttctttactgcaaccccttaaaacattatgca

SEQ ID NO: 58288 - DNA, 40 bp, Homo sapiens
gcataatgttttaaggggttgcagtaaagaagtgcttctt

SEQ ID NO: 58289 - DNA, 40 bp, Homo sapiens
aagaagcacttctttactgcaaccccttaaaacattatgc

SEQ ID NO: 58290 - DNA, 40 bp, Homo sapiens
cataatgttttaaggggttgcagtaaagaagtgcttctta

SEQ ID NO: 58291 - DNA, 40 bp, Homo sapiens
taagaagcacttctttactgcaaccccttaaaacattatg

SEQ ID NO: 58292 - DNA, 40 bp, Homo sapiens
ataatgttttaaggggttgcagtaaagaagtgcttcttat

SEQ ID NO: 58293 - DNA, 40 bp, Homo sapiens
ataagaagcacttctttactgcaaccccttaaaacattat

SEQ ID NO: 58294 - DNA, 40 bp, Homo sapiens
taatgttttaaggggttgcagtaaagaagtgcttcttata

SEQ ID NO: 58295 - DNA, 40 bp, Homo sapiens
tataagaagcacttctttactgcaaccccttaaaacatta

SEQ ID NO: 58296 - DNA, 40 bp, Homo sapiens
aatgttttaaggggttgcagtaaagaagtgcttcttatat

SEQ ID NO: 58297 - DNA, 40 bp, Homo sapiens
atataagaagcacttctttactgcaaccccttaaaacatt

SEQ ID NO: 58298 - DNA, 40 bp, Homo sapiens
atgttttaaggggttgcagtaaagaagtgcttcttatatt

SEQ ID NO: 58299 - DNA, 40 bp, Homo sapiens
aatataagaagcacttctttactgcaaccccttaaaacat

SEQ ID NO: 58300 - DNA, 40 bp, Homo sapiens
tgttttaaggggttgcagtaaagaagtgcttcttatattt

SEQ ID NO: 58301 - DNA, 40 bp, Homo sapiens
aaatataagaagcacttctttactgcaaccccttaaaaca

SEQ ID NO: 58302 - DNA, 40 bp, Homo sapiens
gttttaaggggttgcagtaaagaagtgcttcttatatttt

SEQ ID NO: 58303 - DNA, 40 bp, Homo sapiens
aaaatataagaagcacttctttactgcaaccccttaaaac

SEQ ID NO: 58304 - DNA, 40 bp, Homo sapiens
ttttaaggggttgcagtaaagaagtgcttcttatattttc

SEQ ID NO: 58305 - DNA, 40 bp, Homo sapiens
gaaaatataagaagcacttctttactgcaaccccttaaaa

SEQ ID NO: 58306 - DNA, 40 bp, Homo sapiens
tttaaggggttgcagtaaagaagtgcttcttatattttct

SEQ ID NO: 58307 - DNA, 40 bp, Homo sapiens
agaaaatataagaagcacttctttactgcaaccccttaaa

SEQ ID NO: 58308 - DNA, 40 bp, Homo sapiens
ttaaggggttgcagtaaagaagtgcttcttatattttctt

SEQ ID NO: 58309 - DNA, 40 bp, Homo sapiens
aagaaaatataagaagcacttctttactgcaaccccttaa

SEQ ID NO: 58310 - DNA, 40 bp, Homo sapiens
taaggggttgcagtaaagaagtgcttcttatattttctta

SEQ ID NO: 58311 - DNA, 40 bp, Homo sapiens
taagaaaatataagaagcacttctttactgcaacccctta

SEQ ID NO: 58312 - DNA, 40 bp, Homo sapiens
aaggggttgcagtaaagaagtgcttcttatattttcttat

SEQ ID NO: 58313 - DNA, 40 bp, Homo sapiens
ataagaaaatataagaagcacttctttactgcaacccctt

SEQ ID NO: 58314 - DNA, 40 bp, Homo sapiens
aggggttgcagtaaagaagtgcttcttatattttcttatg

SEQ ID NO: 58315 - DNA, 40 bp, Homo sapiens
cataagaaaatataagaagcacttctttactgcaacccct

SEQ ID NO: 58316 - DNA, 40 bp, Homo sapiens
ggggttgcagtaaagaagtgcttcttatattttcttatgc

SEQ ID NO: 58317 - DNA, 40 bp, Homo sapiens
gcataagaaaatataagaagcacttctttactgcaacccc

SEQ ID NO: 58318 - DNA, 40 bp, Homo sapiens
gggttgcagtaaagaagtgcttcttatattttcttatgca

SEQ ID NO: 58319 - DNA, 40 bp, Homo sapiens
tgcataagaaaatataagaagcacttctttactgcaaccc

SEQ ID NO: 58320 - DNA, 40 bp, Homo sapiens
ggttgcagtaaagaagtgcttcttatattttcttatgcat

SEQ ID NO: 58321 - DNA, 40 bp, Homo sapiens
atgcataagaaaatataagaagcacttctttactgcaacc

SEQ ID NO: 58322 - DNA, 40 bp, Homo sapiens
gttgcagtaaagaagtgcttcttatattttcttatgcata

SEQ ID NO: 58323 - DNA, 40 bp, Homo sapiens
tatgcataagaaaatataagaagcacttctttactgcaac

SEQ ID NO: 58324 - DNA, 40 bp, Homo sapiens
ttgcagtaaagaagtgcttcttatattttcttatgcatac

SEQ ID NO: 58325 - DNA, 40 bp, Homo sapiens
gtatgcataagaaaatataagaagcacttctttactgcaa

SEQ ID NO: 58326 - DNA, 40 bp, Homo sapiens
tgcagtaaagaagtgcttcttatattttcttatgcataca

SEQ ID NO: 58327 - DNA, 40 bp, Homo sapiens
tgtatgcataagaaaatataagaagcacttctttactgca

SEQ ID NO: 58328 - DNA, 40 bp, Homo sapiens
gcagtaaagaagtgcttcttatattttcttatgcatacaa

SEQ ID NO: 58329 - DNA, 40 bp, Homo sapiens
ttgtatgcataagaaaatataagaagcacttctttactgc

SEQ ID NO: 58330 - DNA, 40 bp, Homo sapiens
cagtaaagaagtgcttcttatattttcttatgcatacaaa

SEQ ID NO: 58331 - DNA, 40 bp, Homo sapiens
tttgtatgcataagaaaatataagaagcacttctttactg

SEQ ID NO: 58332 - DNA, 40 bp, Homo sapiens
agtaaagaagtgcttcttatattttcttatgcatacaaat

SEQ ID NO: 58333 - DNA, 40 bp, Homo sapiens
atttgtatgcataagaaaatataagaagcacttctttact

SEQ ID NO: 58334 - DNA, 40 bp, Homo sapiens
gtaaagaagtgcttcttatattttcttatgcatacaaatc

SEQ ID NO: 58335 - DNA, 40 bp, Homo sapiens
gatttgtatgcataagaaaatataagaagcacttctttac

SEQ ID NO: 58336 - DNA, 40 bp, Homo sapiens
taaagaagtgcttcttatattttcttatgcatacaaatca

SEQ ID NO: 58337 - DNA, 40 bp, Homo sapiens
tgatttgtatgcataagaaaatataagaagcacttcttta

SEQ ID NO: 58338 - DNA, 40 bp, Homo sapiens
aaagaagtgcttcttatattttcttatgcatacaaatcag

SEQ ID NO: 58339 - DNA, 40 bp, Homo sapiens
ctgatttgtatgcataagaaaatataagaagcacttcttt

SEQ ID NO: 58340 - DNA, 40 bp, Homo sapiens
aagaagtgcttcttatattttcttatgcatacaaatcagc

SEQ ID NO: 58341 - DNA, 40 bp, Homo sapiens
gctgatttgtatgcataagaaaatataagaagcacttctt

SEQ ID NO: 58342 - DNA, 40 bp, Homo sapiens
agaagtgcttcttatattttcttatgcatacaaatcagct

SEQ ID NO: 58343 - DNA, 40 bp, Homo sapiens
agctgatttgtatgcataagaaaatataagaagcacttct

SEQ ID NO: 58344 - DNA, 40 bp, Homo sapiens
gaagtgcttcttatattttcttatgcatacaaatcagctg

SEQ ID NO: 58345 - DNA, 40 bp, Homo sapiens
cagctgatttgtatgcataagaaaatataagaagcacttc

SEQ ID NO: 58346 - DNA, 40 bp, Homo sapiens
aagtgcttcttatattttcttatgcatacaaatcagctgg

SEQ ID NO: 58347 - DNA, 40 bp, Homo sapiens
ccagctgatttgtatgcataagaaaatataagaagcactt

SEQ ID NO: 58348 - DNA, 40 bp, Homo sapiens
agtgcttcttatattttcttatgcatacaaatcagctggg

SEQ ID NO: 58349 - DNA, 40 bp, Homo sapiens
cccagctgatttgtatgcataagaaaatataagaagcact

SEQ ID NO: 58350 - DNA, 40 bp, Homo sapiens
gtgcttcttatattttcttatgcatacaaatcagctgggc

SEQ ID NO: 58351 - DNA, 40 bp, Homo sapiens
gcccagctgatttgtatgcataagaaaatataagaagcac

SEQ ID NO: 58352 - DNA, 40 bp, Homo sapiens
tgcttcttatattttcttatgcatacaaatcagctgggct

SEQ ID NO: 58353 - DNA, 40 bp, Homo sapiens
agcccagctgatttgtatgcataagaaaatataagaagca

SEQ ID NO: 58354 - DNA, 40 bp, Homo sapiens
gcttcttatattttcttatgcatacaaatcagctgggctt

SEQ ID NO: 58355 - DNA, 40 bp, Homo sapiens
aagcccagctgatttgtatgcataagaaaatataagaagc

SEQ ID NO: 58356 - DNA, 40 bp, Homo sapiens
cttcttatattttcttatgcatacaaatcagctgggctta

SEQ ID NO: 58357 - DNA, 40 bp, Homo sapiens
taagcccagctgatttgtatgcataagaaaatataagaag

SEQ ID NO: 58358 - DNA, 40 bp, Homo sapiens
ttcttatattttcttatgcatacaaatcagctgggcttat

SEQ ID NO: 58359 - DNA, 40 bp, Homo sapiens
ataagcccagctgatttgtatgcataagaaaatataagaa

SEQ ID NO: 58360 - DNA, 40 bp, Homo sapiens
tcttatattttcttatgcatacaaatcagctgggcttatt

SEQ ID NO: 58361 - DNA, 40 bp, Homo sapiens
aataagcccagctgatttgtatgcataagaaaatataaga

SEQ ID NO: 58362 - DNA, 40 bp, Homo sapiens
cttatattttcttatgcatacaaatcagctgggcttatta

SEQ ID NO: 58363 - DNA, 40 bp, Homo sapiens
taataagcccagctgatttgtatgcataagaaaatataag

SEQ ID NO: 58364 - DNA, 40 bp, Homo sapiens
ttatattttcttatgcatacaaatcagctgggcttattaa

SEQ ID NO: 58365 - DNA, 40 bp, Homo sapiens
ttaataagcccagctgatttgtatgcataagaaaatataa

SEQ ID NO: 58366 - DNA, 40 bp, Homo sapiens
tatattttcttatgcatacaaatcagctgggcttattaaa

SEQ ID NO: 58367 - DNA, 40 bp, Homo sapiens
tttaataagcccagctgatttgtatgcataagaaaatata

SEQ ID NO: 58368 - DNA, 40 bp, Homo sapiens
atattttcttatgcatacaaatcagctgggcttattaaaa

SEQ ID NO: 58369 - DNA, 40 bp, Homo sapiens
ttttaataagcccagctgatttgtatgcataagaaaatat

SEQ ID NO: 58370 - DNA, 40 bp, Homo sapiens
tattttcttatgcatacaaatcagctgggcttattaaaat

SEQ ID NO: 58371 - DNA, 40 bp, Homo sapiens
attttaataagcccagctgatttgtatgcataagaaaata

SEQ ID NO: 58372 - DNA, 40 bp, Homo sapiens
attttcttatgcatacaaatcagctgggcttattaaaatc

SEQ ID NO: 58373 - DNA, 40 bp, Homo sapiens
gattttaataagcccagctgatttgtatgcataagaaaat

SEQ ID NO: 58374 - DNA, 40 bp, Homo sapiens
ttttcttatgcatacaaatcagctgggcttattaaaatcc

SEQ ID NO: 58375 - DNA, 40 bp, Homo sapiens
ggattttaataagcccagctgatttgtatgcataagaaaa

SEQ ID NO: 58376 - DNA, 40 bp, Homo sapiens
tttcttatgcatacaaatcagctgggcttattaaaatcca

SEQ ID NO: 58377 - DNA, 40 bp, Homo sapiens
tggattttaataagcccagctgatttgtatgcataagaaa

SEQ ID NO: 58378 - DNA, 40 bp, Homo sapiens
ttcttatgcatacaaatcagctgggcttattaaaatccag

SEQ ID NO: 58379 - DNA, 40 bp, Homo sapiens
ctggattttaataagcccagctgatttgtatgcataagaa

SEQ ID NO: 58380 - DNA, 40 bp, Homo sapiens
tcttatgcatacaaatcagctgggcttattaaaatccaga

SEQ ID NO: 58381 - DNA, 40 bp, Homo sapiens
tctggattttaataagcccagctgatttgtatgcataaga

SEQ ID NO: 58382 - DNA, 40 bp, Homo sapiens
cttatgcatacaaatcagctgggcttattaaaatccagat

SEQ ID NO: 58383 - DNA, 40 bp, Homo sapiens
atctggattttaataagcccagctgatttgtatgcataag

SEQ ID NO: 58384 - DNA, 40 bp, Homo sapiens
ttatgcatacaaatcagctgggcttattaaaatccagatt

SEQ ID NO: 58385 - DNA, 40 bp, Homo sapiens
aatctggattttaataagcccagctgatttgtatgcataa

SEQ ID NO: 58386 - DNA, 40 bp, Homo sapiens
tatgcatacaaatcagctgggcttattaaaatccagattc

SEQ ID NO: 58387 - DNA, 40 bp, Homo sapiens
gaatctggattttaataagcccagctgatttgtatgcata

SEQ ID NO: 58388 - DNA, 40 bp, Homo sapiens
atgcatacaaatcagctgggcttattaaaatccagattct

SEQ ID NO: 58389 - DNA, 40 bp, Homo sapiens
agaatctggattttaataagcccagctgatttgtatgcat

SEQ ID NO: 58390 - DNA, 40 bp, Homo sapiens
tgcatacaaatcagctgggcttattaaaatccagattcta

SEQ ID NO: 58391 - DNA, 40 bp, Homo sapiens
tagaatctggattttaataagcccagctgatttgtatgca

SEQ ID NO: 58392 - DNA, 40 bp, Homo sapiens
gcatacaaatcagctgggcttattaaaatccagattctaa

SEQ ID NO: 58393 - DNA, 40 bp, Homo sapiens
ttagaatctggattttaataagcccagctgatttgtatgc

SEQ ID NO: 58394 - DNA, 40 bp, Homo sapiens
catacaaatcagctgggcttattaaaatccagattctaat

SEQ ID NO: 58395 - DNA, 40 bp, Homo sapiens
attagaatctggattttaataagcccagctgatttgtatg

SEQ ID NO: 58396 - DNA, 40 bp, Homo sapiens
atacaaatcagctgggcttattaaaatccagattctaatt

SEQ ID NO: 58397 - DNA, 40 bp, Homo sapiens
aattagaatctggattttaataagcccagctgatttgtat

SEQ ID NO: 58398 - DNA, 40 bp, Homo sapiens
tacaaatcagctgggcttattaaaatccagattctaattc

SEQ ID NO: 58399 - DNA, 40 bp, Homo sapiens
gaattagaatctggattttaataagcccagctgatttgta

SEQ ID NO: 58400 - DNA, 40 bp, Homo sapiens
acaaatcagctgggcttattaaaatccagattctaattca

SEQ ID NO: 58401 - DNA, 40 bp, Homo sapiens
tgaattagaatctggattttaataagcccagctgatttgt

SEQ ID NO: 58402 - DNA, 40 bp, Homo sapiens
caaatcagctgggcttattaaaatccagattctaattcag

SEQ ID NO: 58403 - DNA, 40 bp, Homo sapiens
ctgaattagaatctggattttaataagcccagctgatttg

SEQ ID NO: 58404 - DNA, 40 bp, Homo sapiens
aaatcagctgggcttattaaaatccagattctaattcaga

SEQ ID NO: 58405 - DNA, 40 bp, Homo sapiens
tctgaattagaatctggattttaataagcccagctgattt

SEQ ID NO: 58406 - DNA, 40 bp, Homo sapiens
aatcagctgggcttattaaaatccagattctaattcagaa

SEQ ID NO: 58407 - DNA, 40 bp, Homo sapiens
ttctgaattagaatctggattttaataagcccagctgatt

SEQ ID NO: 58408 - DNA, 40 bp, Homo sapiens
atcagctgggcttattaaaatccagattctaattcagaag

SEQ ID NO: 58409 - DNA, 40 bp, Homo sapiens
cttctgaattagaatctggattttaataagcccagctgat

SEQ ID NO: 58410 - DNA, 40 bp, Homo sapiens
tcagctgggcttattaaaatccagattctaattcagaagg

SEQ ID NO: 58411 - DNA, 40 bp, Homo sapiens
ccttctgaattagaatctggattttaataagcccagctga

SEQ ID NO: 58412 - DNA, 40 bp, Homo sapiens
cagctgggcttattaaaatccagattctaattcagaaggt

SEQ ID NO: 58413 - DNA, 40 bp, Homo sapiens
accttctgaattagaatctggattttaataagcccagctg

SEQ ID NO: 58414 - DNA, 40 bp, Homo sapiens
agctgggcttattaaaatccagattctaattcagaaggtt

SEQ ID NO: 58415 - DNA, 40 bp, Homo sapiens
aaccttctgaattagaatctggattttaataagcccagct

SEQ ID NO: 58416 - DNA, 40 bp, Homo sapiens
gctgggcttattaaaatccagattctaattcagaaggttt

SEQ ID NO: 58417 - DNA, 40 bp, Homo sapiens
aaaccttctgaattagaatctggattttaataagcccagc

SEQ ID NO: 58418 - DNA, 40 bp, Homo sapiens
ctgggcttattaaaatccagattctaattcagaaggttta

SEQ ID NO: 58419 - DNA, 40 bp, Homo sapiens
taaaccttctgaattagaatctggattttaataagcccag

SEQ ID NO: 58420 - DNA, 40 bp, Homo sapiens
tgggcttattaaaatccagattctaattcagaaggtttag

SEQ ID NO: 58421 - DNA, 40 bp, Homo sapiens
ctaaaccttctgaattagaatctggattttaataagccca

SEQ ID NO: 58422 - DNA, 40 bp, Homo sapiens
gggcttattaaaatccagattctaattcagaaggtttagg

SEQ ID NO: 58423 - DNA, 40 bp, Homo sapiens
cctaaaccttctgaattagaatctggattttaataagccc

SEQ ID NO: 58424 - DNA, 40 bp, Homo sapiens
ggcttattaaaatccagattctaattcagaaggtttaggt

SEQ ID NO: 58425 - DNA, 40 bp, Homo sapiens
acctaaaccttctgaattagaatctggattttaataagcc

SEQ ID NO: 58426 - DNA, 40 bp, Homo sapiens
gcttattaaaatccagattctaattcagaaggtttaggtg

SEQ ID NO: 58427 - DNA, 40 bp, Homo sapiens
cacctaaaccttctgaattagaatctggattttaataagc

SEQ ID NO: 58428 - DNA, 40 bp, Homo sapiens
cttattaaaatccagattctaattcagaaggtttaggtgg

SEQ ID NO: 58429 - DNA, 40 bp, Homo sapiens
ccacctaaaccttctgaattagaatctggattttaataag

SEQ ID NO: 58430 - DNA, 40 bp, Homo sapiens
ttattaaaatccagattctaattcagaaggtttaggtggg

SEQ ID NO: 58431 - DNA, 40 bp, Homo sapiens
cccacctaaaccttctgaattagaatctggattttaataa

SEQ ID NO: 58432 - DNA, 40 bp, Homo sapiens
tattaaaatccagattctaattcagaaggtttaggtgggg

SEQ ID NO: 58433 - DNA, 40 bp, Homo sapiens
ccccacctaaaccttctgaattagaatctggattttaata

SEQ ID NO: 58434 - DNA, 40 bp, Homo sapiens
attaaaatccagattctaattcagaaggtttaggtgggga

SEQ ID NO: 58435 - DNA, 40 bp, Homo sapiens
tccccacctaaaccttctgaattagaatctggattttaat

SEQ ID NO: 58436 - DNA, 40 bp, Homo sapiens
ttaaaatccagattctaattcagaaggtttaggtggggac

SEQ ID NO: 58437 - DNA, 40 bp, Homo sapiens
gtccccacctaaaccttctgaattagaatctggattttaa

SEQ ID NO: 58438 - DNA, 40 bp, Homo sapiens
taaaatccagattctaattcagaaggtttaggtggggacc

SEQ ID NO: 58439 - DNA, 40 bp, Homo sapiens
ggtccccacctaaaccttctgaattagaatctggatttta

SEQ ID NO: 58440 - DNA, 40 bp, Homo sapiens
aaaatccagattctaattcagaaggtttaggtggggaccg

SEQ ID NO: 58441 - DNA, 40 bp, Homo sapiens
cggtccccacctaaaccttctgaattagaatctggatttt

SEQ ID NO: 58442 - DNA, 40 bp, Homo sapiens
aaatccagattctaattcagaaggtttaggtggggaccga

SEQ ID NO: 58443 - DNA, 40 bp, Homo sapiens
tcggtccccacctaaaccttctgaattagaatctggattt

SEQ ID NO: 58444 - DNA, 40 bp, Homo sapiens
aatccagattctaattcagaaggtttaggtggggaccgag

SEQ ID NO: 58445 - DNA, 40 bp, Homo sapiens
ctcggtccccacctaaaccttctgaattagaatctggatt

SEQ ID NO: 58446 - DNA, 40 bp, Homo sapiens
atccagattctaattcagaaggtttaggtggggaccgagt

SEQ ID NO: 58447 - DNA, 40 bp, Homo sapiens
actcggtccccacctaaaccttctgaattagaatctggat

SEQ ID NO: 58448 - DNA, 40 bp, Homo sapiens
tccagattctaattcagaaggtttaggtggggaccgagtc

SEQ ID NO: 58449 - DNA, 40 bp, Homo sapiens
gactcggtccccacctaaaccttctgaattagaatctgga

SEQ ID NO: 58450 - DNA, 40 bp, Homo sapiens
ccagattctaattcagaaggtttaggtggggaccgagtct

SEQ ID NO: 58451 - DNA, 40 bp, Homo sapiens
agactcggtccccacctaaaccttctgaattagaatctgg

SEQ ID NO: 58452 - DNA, 40 bp, Homo sapiens
cagattctaattcagaaggtttaggtggggaccgagtctg

SEQ ID NO: 58453 - DNA, 40 bp, Homo sapiens
cagactcggtccccacctaaaccttctgaattagaatctg

SEQ ID NO: 58454 - DNA, 40 bp, Homo sapiens
agattctaattcagaaggtttaggtggggaccgagtctgc

SEQ ID NO: 58455 - DNA, 40 bp, Homo sapiens
gcagactcggtccccacctaaaccttctgaattagaatct

SEQ ID NO: 58456 - DNA, 40 bp, Homo sapiens
gattctaattcagaaggtttaggtggggaccgagtctgca

SEQ ID NO: 58457 - DNA, 40 bp, Homo sapiens
tgcagactcggtccccacctaaaccttctgaattagaatc

SEQ ID NO: 58458 - DNA, 40 bp, Homo sapiens
attctaattcagaaggtttaggtggggaccgagtctgcat

SEQ ID NO: 58459 - DNA, 40 bp, Homo sapiens
atgcagactcggtccccacctaaaccttctgaattagaat

SEQ ID NO: 58460 - DNA, 40 bp, Homo sapiens
ttctaattcagaaggtttaggtggggaccgagtctgcatt

SEQ ID NO: 58461 - DNA, 40 bp, Homo sapiens
aatgcagactcggtccccacctaaaccttctgaattagaa

SEQ ID NO: 58462 - DNA, 40 bp, Homo sapiens
tctaattcagaaggtttaggtggggaccgagtctgcattt

SEQ ID NO: 58463 - DNA, 40 bp, Homo sapiens
aaatgcagactcggtccccacctaaaccttctgaattaga

SEQ ID NO: 58464 - DNA, 40 bp, Homo sapiens
ctaattcagaaggtttaggtggggaccgagtctgcatttc

SEQ ID NO: 58465 - DNA, 40 bp, Homo sapiens
gaaatgcagactcggtccccacctaaaccttctgaattag

SEQ ID NO: 58466 - DNA, 40 bp, Homo sapiens
taattcagaaggtttaggtggggaccgagtctgcatttct

SEQ ID NO: 58467 - DNA, 40 bp, Homo sapiens
agaaatgcagactcggtccccacctaaaccttctgaatta

SEQ ID NO: 58468 - DNA, 40 bp, Homo sapiens
aattcagaaggtttaggtggggaccgagtctgcatttcta

SEQ ID NO: 58469 - DNA, 40 bp, Homo sapiens
tagaaatgcagactcggtccccacctaaaccttctgaatt

SEQ ID NO: 58470 - DNA, 40 bp, Homo sapiens
attcagaaggtttaggtggggaccgagtctgcatttctaa

SEQ ID NO: 58471 - DNA, 40 bp, Homo sapiens
ttagaaatgcagactcggtccccacctaaaccttctgaat

SEQ ID NO: 58472 - DNA, 40 bp, Homo sapiens
ttcagaaggtttaggtggggaccgagtctgcatttctaac

SEQ ID NO: 58473 - DNA, 40 bp, Homo sapiens
gttagaaatgcagactcggtccccacctaaaccttctgaa

SEQ ID NO: 58474 - DNA, 40 bp, Homo sapiens
tcagaaggtttaggtggggaccgagtctgcatttctaaca

SEQ ID NO: 58475 - DNA, 40 bp, Homo sapiens
tgttagaaatgcagactcggtccccacctaaaccttctga

SEQ ID NO: 58476 - DNA, 40 bp, Homo sapiens
cagaaggtttaggtggggaccgagtctgcatttctaacaa

SEQ ID NO: 58477 - DNA, 40 bp, Homo sapiens
ttgttagaaatgcagactcggtccccacctaaaccttctg

SEQ ID NO: 58478 - DNA, 40 bp, Homo sapiens
agaaggtttaggtggggaccgagtctgcatttctaacaaa

SEQ ID NO: 58479 - DNA, 40 bp, Homo sapiens
tttgttagaaatgcagactcggtccccacctaaaccttct

SEQ ID NO: 58480 - DNA, 40 bp, Homo sapiens
gaaggtttaggtggggaccgagtctgcatttctaacaaac

SEQ ID NO: 58481 - DNA, 40 bp, Homo sapiens
gtttgttagaaatgcagactcggtccccacctaaaccttc

SEQ ID NO: 58482 - DNA, 40 bp, Homo sapiens
aaggtttaggtggggaccgagtctgcatttctaacaaact

SEQ ID NO: 58483 - DNA, 40 bp, Homo sapiens
agtttgttagaaatgcagactcggtccccacctaaacctt

SEQ ID NO: 58484 - DNA, 40 bp, Homo sapiens
aggtttaggtggggaccgagtctgcatttctaacaaactc

SEQ ID NO: 58485 - DNA, 40 bp, Homo sapiens
gagtttgttagaaatgcagactcggtccccacctaaacct

SEQ ID NO: 58486 - DNA, 40 bp, Homo sapiens
ggtttaggtggggaccgagtctgcatttctaacaaactcc

SEQ ID NO: 58487 - DNA, 40 bp, Homo sapiens
ggagtttgttagaaatgcagactcggtccccacctaaacc

SEQ ID NO: 58488 - DNA, 40 bp, Homo sapiens
gtttaggtggggaccgagtctgcatttctaacaaactcct

SEQ ID NO: 58489 - DNA, 40 bp, Homo sapiens
aggagtttgttagaaatgcagactcggtccccacctaaac

SEQ ID NO: 58490 - DNA, 40 bp, Homo sapiens
tttaggtggggaccgagtctgcatttctaacaaactccta

SEQ ID NO: 58491 - DNA, 40 bp, Homo sapiens
taggagtttgttagaaatgcagactcggtccccacctaaa

SEQ ID NO: 58492 - DNA, 40 bp, Homo sapiens
ttaggtggggaccgagtctgcatttctaacaaactcctag

SEQ ID NO: 58493 - DNA, 40 bp, Homo sapiens
ctaggagtttgttagaaatgcagactcggtccccacctaa

SEQ ID NO: 58494 - DNA, 40 bp, Homo sapiens
taggtggggaccgagtctgcatttctaacaaactcctagg

SEQ ID NO: 58495 - DNA, 40 bp, Homo sapiens
cctaggagtttgttagaaatgcagactcggtccccaccta

SEQ ID NO: 58496 - DNA, 40 bp, Homo sapiens
aggtggggaccgagtctgcatttctaacaaactcctaggt

SEQ ID NO: 58497 - DNA, 40 bp, Homo sapiens
acctaggagtttgttagaaatgcagactcggtccccacct

SEQ ID NO: 58498 - DNA, 40 bp, Homo sapiens
ggtggggaccgagtctgcatttctaacaaactcctaggtg

SEQ ID NO: 58499 - DNA, 40 bp, Homo sapiens
cacctaggagtttgttagaaatgcagactcggtccccacc

SEQ ID NO: 58500 - DNA, 40 bp, Homo sapiens
gtggggaccgagtctgcatttctaacaaactcctaggtgg

SEQ ID NO: 58501 - DNA, 40 bp, Homo sapiens
ccacctaggagtttgttagaaatgcagactcggtccccac

SEQ ID NO: 58502 - DNA, 40 bp, Homo sapiens
tggggaccgagtctgcatttctaacaaactcctaggtggt

SEQ ID NO: 58503 - DNA, 40 bp, Homo sapiens
accacctaggagtttgttagaaatgcagactcggtcccca

SEQ ID NO: 58504 - DNA, 40 bp, Homo sapiens
ggggaccgagtctgcatttctaacaaactcctaggtggta

SEQ ID NO: 58505 - DNA, 40 bp, Homo sapiens
taccacctaggagtttgttagaaatgcagactcggtcccc

SEQ ID NO: 58506 - DNA, 40 bp, Homo sapiens
gggaccgagtctgcatttctaacaaactcctaggtggtat

SEQ ID NO: 58507 - DNA, 40 bp, Homo sapiens
ataccacctaggagtttgttagaaatgcagactcggtccc

SEQ ID NO: 58508 - DNA, 40 bp, Homo sapiens
ggaccgagtctgcatttctaacaaactcctaggtggtatt

SEQ ID NO: 58509 - DNA, 40 bp, Homo sapiens
aataccacctaggagtttgttagaaatgcagactcggtcc

SEQ ID NO: 58510 - DNA, 40 bp, Homo sapiens
gaccgagtctgcatttctaacaaactcctaggtggtattt

SEQ ID NO: 58511 - DNA, 40 bp, Homo sapiens
aaataccacctaggagtttgttagaaatgcagactcggtc

SEQ ID NO: 58512 - DNA, 40 bp, Homo sapiens
accgagtctgcatttctaacaaactcctaggtggtatttt

SEQ ID NO: 58513 - DNA, 40 bp, Homo sapiens
aaaataccacctaggagtttgttagaaatgcagactcggt

SEQ ID NO: 58514 - DNA, 40 bp, Homo sapiens
ccgagtctgcatttctaacaaactcctaggtggtattttt

SEQ ID NO: 58515 - DNA, 40 bp, Homo sapiens
aaaaataccacctaggagtttgttagaaatgcagactcgg

SEQ ID NO: 58516 - DNA, 40 bp, Homo sapiens
cgagtctgcatttctaacaaactcctaggtggtatttttc

SEQ ID NO: 58517 - DNA, 40 bp, Homo sapiens
gaaaaataccacctaggagtttgttagaaatgcagactcg

SEQ ID NO: 58518 - DNA, 40 bp, Homo sapiens
gagtctgcatttctaacaaactcctaggtggtatttttct

SEQ ID NO: 58519 - DNA, 40 bp, Homo sapiens
agaaaaataccacctaggagtttgttagaaatgcagactc

SEQ ID NO: 58520 - DNA, 40 bp, Homo sapiens
agtctgcatttctaacaaactcctaggtggtatttttctt

SEQ ID NO: 58521 - DNA, 40 bp, Homo sapiens
aagaaaaataccacctaggagtttgttagaaatgcagact

SEQ ID NO: 58522 - DNA, 40 bp, Homo sapiens
gtctgcatttctaacaaactcctaggtggtatttttcttg

SEQ ID NO: 58523 - DNA, 40 bp, Homo sapiens
caagaaaaataccacctaggagtttgttagaaatgcagac

SEQ ID NO: 58524 - DNA, 40 bp, Homo sapiens
tctgcatttctaacaaactcctaggtggtatttttcttgg

SEQ ID NO: 58525 - DNA, 40 bp, Homo sapiens
ccaagaaaaataccacctaggagtttgttagaaatgcaga

SEQ ID NO: 58526 - DNA, 40 bp, Homo sapiens
ctgcatttctaacaaactcctaggtggtatttttcttggt

SEQ ID NO: 58527 - DNA, 40 bp, Homo sapiens
accaagaaaaataccacctaggagtttgttagaaatgcag

SEQ ID NO: 58528 - DNA, 40 bp, Homo sapiens
tgcatttctaacaaactcctaggtggtatttttcttggta

SEQ ID NO: 58529 - DNA, 40 bp, Homo sapiens
taccaagaaaaataccacctaggagtttgttagaaatgca

SEQ ID NO: 58530 - DNA, 40 bp, Homo sapiens
gcatttctaacaaactcctaggtggtatttttcttggtac

SEQ ID NO: 58531 - DNA, 40 bp, Homo sapiens
gtaccaagaaaaataccacctaggagtttgttagaaatgc

SEQ ID NO: 58532 - DNA, 40 bp, Homo sapiens
catttctaacaaactcctaggtggtatttttcttggtact

SEQ ID NO: 58533 - DNA, 40 bp, Homo sapiens
agtaccaagaaaaataccacctaggagtttgttagaaatg

SEQ ID NO: 58534 - DNA, 40 bp, Homo sapiens
atttctaacaaactcctaggtggtatttttcttggtactt

SEQ ID NO: 58535 - DNA, 40 bp, Homo sapiens
aagtaccaagaaaaataccacctaggagtttgttagaaat

SEQ ID NO: 58536 - DNA, 40 bp, Homo sapiens
tttctaacaaactcctaggtggtatttttcttggtacttg

SEQ ID NO: 58537 - DNA, 40 bp, Homo sapiens
caagtaccaagaaaaataccacctaggagtttgttagaaa

SEQ ID NO: 58538 - DNA, 40 bp, Homo sapiens
ttctaacaaactcctaggtggtatttttcttggtacttgg

SEQ ID NO: 58539 - DNA, 40 bp, Homo sapiens
ccaagtaccaagaaaaataccacctaggagtttgttagaa

SEQ ID NO: 58540 - DNA, 40 bp, Homo sapiens
tctaacaaactcctaggtggtatttttcttggtacttgga

SEQ ID NO: 58541 - DNA, 40 bp, Homo sapiens
tccaagtaccaagaaaaataccacctaggagtttgttaga

SEQ ID NO: 58542 - DNA, 40 bp, Homo sapiens
ctaacaaactcctaggtggtatttttcttggtacttggac

SEQ ID NO: 58543 - DNA, 40 bp, Homo sapiens
gtccaagtaccaagaaaaataccacctaggagtttgttag

SEQ ID NO: 58544 - DNA, 40 bp, Homo sapiens
taacaaactcctaggtggtatttttcttggtacttggacc

SEQ ID NO: 58545 - DNA, 40 bp, Homo sapiens
ggtccaagtaccaagaaaaataccacctaggagtttgtta

SEQ ID NO: 58546 - DNA, 40 bp, Homo sapiens
aacaaactcctaggtggtatttttcttggtacttggacca

SEQ ID NO: 58547 - DNA, 40 bp, Homo sapiens
tggtccaagtaccaagaaaaataccacctaggagtttgtt

SEQ ID NO: 58548 - DNA, 40 bp, Homo sapiens
acaaactcctaggtggtatttttcttggtacttggaccat

SEQ ID NO: 58549 - DNA, 40 bp, Homo sapiens
atggtccaagtaccaagaaaaataccacctaggagtttgt

SEQ ID NO: 58550 - DNA, 40 bp, Homo sapiens
caaactcctaggtggtatttttcttggtacttggaccata

SEQ ID NO: 58551 - DNA, 40 bp, Homo sapiens
tatggtccaagtaccaagaaaaataccacctaggagtttg

SEQ ID NO: 58552 - DNA, 40 bp, Homo sapiens
aaactcctaggtggtatttttcttggtacttggaccatac

SEQ ID NO: 58553 - DNA, 40 bp, Homo sapiens
gtatggtccaagtaccaagaaaaataccacctaggagttt

SEQ ID NO: 58554 - DNA, 40 bp, Homo sapiens
aactcctaggtggtatttttcttggtacttggaccatact

SEQ ID NO: 58555 - DNA, 40 bp, Homo sapiens
agtatggtccaagtaccaagaaaaataccacctaggagtt

SEQ ID NO: 58556 - DNA, 40 bp, Homo sapiens
actcctaggtggtatttttcttggtacttggaccatactt

SEQ ID NO: 58557 - DNA, 40 bp, Homo sapiens
aagtatggtccaagtaccaagaaaaataccacctaggagt

SEQ ID NO: 58558 - DNA, 40 bp, Homo sapiens
ctcctaggtggtatttttcttggtacttggaccatacttt

SEQ ID NO: 58559 - DNA, 40 bp, Homo sapiens
aaagtatggtccaagtaccaagaaaaataccacctaggag

SEQ ID NO: 58560 - DNA, 40 bp, Homo sapiens
tcctaggtggtatttttcttggtacttggaccatactttg

SEQ ID NO: 58561 - DNA, 40 bp, Homo sapiens
caaagtatggtccaagtaccaagaaaaataccacctagga

SEQ ID NO: 58562 - DNA, 40 bp, Homo sapiens
cctaggtggtatttttcttggtacttggaccatactttga

SEQ ID NO: 58563 - DNA, 40 bp, Homo sapiens
tcaaagtatggtccaagtaccaagaaaaataccacctagg

SEQ ID NO: 58564 - DNA, 40 bp, Homo sapiens
ctaggtggtatttttcttggtacttggaccatactttgag

SEQ ID NO: 58565 - DNA, 40 bp, Homo sapiens
ctcaaagtatggtccaagtaccaagaaaaataccacctag

SEQ ID NO: 58566 - DNA, 40 bp, Homo sapiens
taggtggtatttttcttggtacttggaccatactttgagt

SEQ ID NO: 58567 - DNA, 40 bp, Homo sapiens
actcaaagtatggtccaagtaccaagaaaaataccaccta

SEQ ID NO: 58568 - DNA, 40 bp, Homo sapiens
aggtggtatttttcttggtacttggaccatactttgagta

SEQ ID NO: 58569 - DNA, 40 bp, Homo sapiens
tactcaaagtatggtccaagtaccaagaaaaataccacct

SEQ ID NO: 58570 - DNA, 40 bp, Homo sapiens
ggtggtatttttcttggtacttggaccatactttgagtag

SEQ ID NO: 58571 - DNA, 40 bp, Homo sapiens
ctactcaaagtatggtccaagtaccaagaaaaataccacc

SEQ ID NO: 58572 - DNA, 40 bp, Homo sapiens
gtggtatttttcttggtacttggaccatactttgagtaga

SEQ ID NO: 58573 - DNA, 40 bp, Homo sapiens
tctactcaaagtatggtccaagtaccaagaaaaataccac

SEQ ID NO: 58574 - DNA, 40 bp, Homo sapiens
tggtatttttcttggtacttggaccatactttgagtagaa

SEQ ID NO: 58575 - DNA, 40 bp, Homo sapiens
ttctactcaaagtatggtccaagtaccaagaaaaatacca

SEQ ID NO: 58576 - DNA, 40 bp, Homo sapiens
ggtatttttcttggtacttggaccatactttgagtagaaa

SEQ ID NO: 58577 - DNA, 40 bp, Homo sapiens
tttctactcaaagtatggtccaagtaccaagaaaaatacc

SEQ ID NO: 58578 - DNA, 40 bp, Homo sapiens
gtatttttcttggtacttggaccatactttgagtagaaaa

SEQ ID NO: 58579 - DNA, 40 bp, Homo sapiens
ttttctactcaaagtatggtccaagtaccaagaaaaatac

SEQ ID NO: 58580 - DNA, 40 bp, Homo sapiens
tatttttcttggtacttggaccatactttgagtagaaaag

SEQ ID NO: 58581 - DNA, 40 bp, Homo sapiens
cttttctactcaaagtatggtccaagtaccaagaaaaata

SEQ ID NO: 58582 - DNA, 40 bp, Homo sapiens
atttttcttggtacttggaccatactttgagtagaaaagc

SEQ ID NO: 58583 - DNA, 40 bp, Homo sapiens
gcttttctactcaaagtatggtccaagtaccaagaaaaat

SEQ ID NO: 58584 - DNA, 40 bp, Homo sapiens
tttttcttggtacttggaccatactttgagtagaaaagca

SEQ ID NO: 58585 - DNA, 40 bp, Homo sapiens
tgcttttctactcaaagtatggtccaagtaccaagaaaaa

SEQ ID NO: 58586 - DNA, 40 bp, Homo sapiens
ttttcttggtacttggaccatactttgagtagaaaagcag

SEQ ID NO: 58587 - DNA, 40 bp, Homo sapiens
ctgcttttctactcaaagtatggtccaagtaccaagaaaa

SEQ ID NO: 58588 - DNA, 40 bp, Homo sapiens
tttcttggtacttggaccatactttgagtagaaaagcagt

SEQ ID NO: 58589 - DNA, 40 bp, Homo sapiens
actgcttttctactcaaagtatggtccaagtaccaagaaa

SEQ ID NO: 58590 - DNA, 40 bp, Homo sapiens
ttcttggtacttggaccatactttgagtagaaaagcagta

SEQ ID NO: 58591 - DNA, 40 bp, Homo sapiens
tactgcttttctactcaaagtatggtccaagtaccaagaa

SEQ ID NO: 58592 - DNA, 40 bp, Homo sapiens
tcttggtacttggaccatactttgagtagaaaagcagtag

SEQ ID NO: 58593 - DNA, 40 bp, Homo sapiens
ctactgcttttctactcaaagtatggtccaagtaccaaga

SEQ ID NO: 58594 - DNA, 40 bp, Homo sapiens
cttggtacttggaccatactttgagtagaaaagcagtaga

SEQ ID NO: 58595 - DNA, 40 bp, Homo sapiens
tctactgcttttctactcaaagtatggtccaagtaccaag

SEQ ID NO: 58596 - DNA, 40 bp, Homo sapiens
ttggtacttggaccatactttgagtagaaaagcagtagag

SEQ ID NO: 58597 - DNA, 40 bp, Homo sapiens
ctctactgcttttctactcaaagtatggtccaagtaccaa

SEQ ID NO: 58598 - DNA, 40 bp, Homo sapiens
tggtacttggaccatactttgagtagaaaagcagtagagg

SEQ ID NO: 58599 - DNA, 40 bp, Homo sapiens
cctctactgcttttctactcaaagtatggtccaagtacca

SEQ ID NO: 58600 - DNA, 40 bp, Homo sapiens
ggtacttggaccatactttgagtagaaaagcagtagagga

SEQ ID NO: 58601 - DNA, 40 bp, Homo sapiens
tcctctactgcttttctactcaaagtatggtccaagtacc

SEQ ID NO: 58602 - DNA, 40 bp, Homo sapiens
gtacttggaccatactttgagtagaaaagcagtagaggac

SEQ ID NO: 58603 - DNA, 40 bp, Homo sapiens
gtcctctactgcttttctactcaaagtatggtccaagtac

SEQ ID NO: 58604 - DNA, 40 bp, Homo sapiens
tacttggaccatactttgagtagaaaagcagtagaggaca

SEQ ID NO: 58605 - DNA, 40 bp, Homo sapiens
tgtcctctactgcttttctactcaaagtatggtccaagta

SEQ ID NO: 58606 - DNA, 40 bp, Homo sapiens
acttggaccatactttgagtagaaaagcagtagaggacat

SEQ ID NO: 58607 - DNA, 40 bp, Homo sapiens
atgtcctctactgcttttctactcaaagtatggtccaagt

SEQ ID NO: 58608 - DNA, 40 bp, Homo sapiens
cttggaccatactttgagtagaaaagcagtagaggacata

SEQ ID NO: 58609 - DNA, 40 bp, Homo sapiens
tatgtcctctactgcttttctactcaaagtatggtccaag

SEQ ID NO: 58610 - DNA, 40 bp, Homo sapiens
ttggaccatactttgagtagaaaagcagtagaggacataa

SEQ ID NO: 58611 - DNA, 40 bp, Homo sapiens
ttatgtcctctactgcttttctactcaaagtatggtccaa

SEQ ID NO: 58612 - DNA, 40 bp, Homo sapiens
tggaccatactttgagtagaaaagcagtagaggacataaa

SEQ ID NO: 58613 - DNA, 40 bp, Homo sapiens
tttatgtcctctactgcttttctactcaaagtatggtcca

SEQ ID NO: 58614 - DNA, 40 bp, Homo sapiens
ggaccatactttgagtagaaaagcagtagaggacataaaa

SEQ ID NO: 58615 - DNA, 40 bp, Homo sapiens
ttttatgtcctctactgcttttctactcaaagtatggtcc

SEQ ID NO: 58616 - DNA, 40 bp, Homo sapiens
gaccatactttgagtagaaaagcagtagaggacataaaaa

SEQ ID NO: 58617 - DNA, 40 bp, Homo sapiens
tttttatgtcctctactgcttttctactcaaagtatggtc

SEQ ID NO: 58618 - DNA, 40 bp, Homo sapiens
accatactttgagtagaaaagcagtagaggacataaaaag

SEQ ID NO: 58619 - DNA, 40 bp, Homo sapiens
ctttttatgtcctctactgcttttctactcaaagtatggt

SEQ ID NO: 58620 - DNA, 40 bp, Homo sapiens
ccatactttgagtagaaaagcagtagaggacataaaaaga

SEQ ID NO: 58621 - DNA, 40 bp, Homo sapiens
tctttttatgtcctctactgcttttctactcaaagtatgg

SEQ ID NO: 58622 - DNA, 40 bp, Homo sapiens
catactttgagtagaaaagcagtagaggacataaaaagag

SEQ ID NO: 58623 - DNA, 40 bp, Homo sapiens
ctctttttatgtcctctactgcttttctactcaaagtatg

SEQ ID NO: 58624 - DNA, 40 bp, Homo sapiens
atactttgagtagaaaagcagtagaggacataaaaagagt

SEQ ID NO: 58625 - DNA, 40 bp, Homo sapiens
actctttttatgtcctctactgcttttctactcaaagtat

SEQ ID NO: 58626 - DNA, 40 bp, Homo sapiens
tactttgagtagaaaagcagtagaggacataaaaagagtc

SEQ ID NO: 58627 - DNA, 40 bp, Homo sapiens
gactctttttatgtcctctactgcttttctactcaaagta

SEQ ID NO: 58628 - DNA, 40 bp, Homo sapiens
actttgagtagaaaagcagtagaggacataaaaagagtct

SEQ ID NO: 58629 - DNA, 40 bp, Homo sapiens
agactctttttatgtcctctactgcttttctactcaaagt

SEQ ID NO: 58630 - DNA, 40 bp, Homo sapiens
ctttgagtagaaaagcagtagaggacataaaaagagtctt

SEQ ID NO: 58631 - DNA, 40 bp, Homo sapiens
aagactctttttatgtcctctactgcttttctactcaaag

SEQ ID NO: 58632 - DNA, 40 bp, Homo sapiens
tttgagtagaaaagcagtagaggacataaaaagagtcttg

SEQ ID NO: 58633 - DNA, 40 bp, Homo sapiens
caagactctttttatgtcctctactgcttttctactcaaa

SEQ ID NO: 58634 - DNA, 40 bp, Homo sapiens
ttgagtagaaaagcagtagaggacataaaaagagtcttgt

SEQ ID NO: 58635 - DNA, 40 bp, Homo sapiens
acaagactctttttatgtcctctactgcttttctactcaa

SEQ ID NO: 58636 - DNA, 40 bp, Homo sapiens
tgagtagaaaagcagtagaggacataaaaagagtcttgtt

SEQ ID NO: 58637 - DNA, 40 bp, Homo sapiens
aacaagactctttttatgtcctctactgcttttctactca

SEQ ID NO: 58638 - DNA, 40 bp, Homo sapiens
gagtagaaaagcagtagaggacataaaaagagtcttgtta

SEQ ID NO: 58639 - DNA, 40 bp, Homo sapiens
taacaagactctttttatgtcctctactgcttttctactc

SEQ ID NO: 58640 - DNA, 40 bp, Homo sapiens
agtagaaaagcagtagaggacataaaaagagtcttgttag

SEQ ID NO: 58641 - DNA, 40 bp, Homo sapiens
ctaacaagactctttttatgtcctctactgcttttctact

SEQ ID NO: 58642 - DNA, 40 bp, Homo sapiens
gtagaaaagcagtagaggacataaaaagagtcttgttagt

SEQ ID NO: 58643 - DNA, 40 bp, Homo sapiens
actaacaagactctttttatgtcctctactgcttttctac

SEQ ID NO: 58644 - DNA, 40 bp, Homo sapiens
tagaaaagcagtagaggacataaaaagagtcttgttagtc

SEQ ID NO: 58645 - DNA, 40 bp, Homo sapiens
gactaacaagactctttttatgtcctctactgcttttcta

SEQ ID NO: 58646 - DNA, 40 bp, Homo sapiens
agaaaagcagtagaggacataaaaagagtcttgttagtcc

SEQ ID NO: 58647 - DNA, 40 bp, Homo sapiens
ggactaacaagactctttttatgtcctctactgcttttct

SEQ ID NO: 58648 - DNA, 40 bp, Homo sapiens
gaaaagcagtagaggacataaaaagagtcttgttagtccc

SEQ ID NO: 58649 - DNA, 40 bp, Homo sapiens
gggactaacaagactctttttatgtcctctactgcttttc

SEQ ID NO: 58650 - DNA, 40 bp, Homo sapiens
aaaagcagtagaggacataaaaagagtcttgttagtccca

SEQ ID NO: 58651 - DNA, 40 bp, Homo sapiens
tgggactaacaagactctttttatgtcctctactgctttt

SEQ ID NO: 58652 - DNA, 40 bp, Homo sapiens
aaagcagtagaggacataaaaagagtcttgttagtcccac

SEQ ID NO: 58653 - DNA, 40 bp, Homo sapiens
gtgggactaacaagactctttttatgtcctctactgcttt

SEQ ID NO: 58654 - DNA, 40 bp, Homo sapiens
aagcagtagaggacataaaaagagtcttgttagtcccact

SEQ ID NO: 58655 - DNA, 40 bp, Homo sapiens
agtgggactaacaagactctttttatgtcctctactgctt

SEQ ID NO: 58656 - DNA, 40 bp, Homo sapiens
agcagtagaggacataaaaagagtcttgttagtcccactt

SEQ ID NO: 58657 - DNA, 40 bp, Homo sapiens
aagtgggactaacaagactctttttatgtcctctactgct

SEQ ID NO: 58658 - DNA, 40 bp, Homo sapiens
gcagtagaggacataaaaagagtcttgttagtcccacttt

SEQ ID NO: 58659 - DNA, 40 bp, Homo sapiens
aaagtgggactaacaagactctttttatgtcctctactgc

SEQ ID NO: 58660 - DNA, 40 bp, Homo sapiens
cagtagaggacataaaaagagtcttgttagtcccactttg

SEQ ID NO: 58661 - DNA, 40 bp, Homo sapiens
caaagtgggactaacaagactctttttatgtcctctactg

SEQ ID NO: 58662 - DNA, 40 bp, Homo sapiens
agtagaggacataaaaagagtcttgttagtcccactttgt

SEQ ID NO: 58663 - DNA, 40 bp, Homo sapiens
acaaagtgggactaacaagactctttttatgtcctctact

SEQ ID NO: 58664 - DNA, 40 bp, Homo sapiens
gtagaggacataaaaagagtcttgttagtcccactttgtt

SEQ ID NO: 58665 - DNA, 40 bp, Homo sapiens
aacaaagtgggactaacaagactctttttatgtcctctac

SEQ ID NO: 58666 - DNA, 40 bp, Homo sapiens
tagaggacataaaaagagtcttgttagtcccactttgttg

SEQ ID NO: 58667 - DNA, 40 bp, Homo sapiens
caacaaagtgggactaacaagactctttttatgtcctcta

SEQ ID NO: 58668 - DNA, 40 bp, Homo sapiens
agaggacataaaaagagtcttgttagtcccactttgttgc

SEQ ID NO: 58669 - DNA, 40 bp, Homo sapiens
gcaacaaagtgggactaacaagactctttttatgtcctct

SEQ ID NO: 58670 - DNA, 40 bp, Homo sapiens
gaggacataaaaagagtcttgttagtcccactttgttgct

SEQ ID NO: 58671 - DNA, 40 bp, Homo sapiens
agcaacaaagtgggactaacaagactctttttatgtcctc

SEQ ID NO: 58672 - DNA, 40 bp, Homo sapiens
aggacataaaaagagtcttgttagtcccactttgttgctg

SEQ ID NO: 58673 - DNA, 40 bp, Homo sapiens
cagcaacaaagtgggactaacaagactctttttatgtcct

SEQ ID NO: 58674 - DNA, 40 bp, Homo sapiens
ggacataaaaagagtcttgttagtcccactttgttgctgt

SEQ ID NO: 58675 - DNA, 40 bp, Homo sapiens
acagcaacaaagtgggactaacaagactctttttatgtcc

SEQ ID NO: 58676 - DNA, 40 bp, Homo sapiens
gacataaaaagagtcttgttagtcccactttgttgctgtc

SEQ ID NO: 58677 - DNA, 40 bp, Homo sapiens
gacagcaacaaagtgggactaacaagactctttttatgtc

SEQ ID NO: 58678 - DNA, 40 bp, Homo sapiens
acataaaaagagtcttgttagtcccactttgttgctgtcc

SEQ ID NO: 58679 - DNA, 40 bp, Homo sapiens
ggacagcaacaaagtgggactaacaagactctttttatgt

SEQ ID NO: 58680 - DNA, 40 bp, Homo sapiens
cataaaaagagtcttgttagtcccactttgttgctgtcca

SEQ ID NO: 58681 - DNA, 40 bp, Homo sapiens
tggacagcaacaaagtgggactaacaagactctttttatg

SEQ ID NO: 58682 - DNA, 40 bp, Homo sapiens
ataaaaagagtcttgttagtcccactttgttgctgtccac

SEQ ID NO: 58683 - DNA, 40 bp, Homo sapiens
gtggacagcaacaaagtgggactaacaagactctttttat

SEQ ID NO: 58684 - DNA, 40 bp, Homo sapiens
taaaaagagtcttgttagtcccactttgttgctgtccact

SEQ ID NO: 58685 - DNA, 40 bp, Homo sapiens
agtggacagcaacaaagtgggactaacaagactcttttta

SEQ ID NO: 58686 - DNA, 40 bp, Homo sapiens
aaaaagagtcttgttagtcccactttgttgctgtccactt

SEQ ID NO: 58687 - DNA, 40 bp, Homo sapiens
aagtggacagcaacaaagtgggactaacaagactcttttt

SEQ ID NO: 58688 - DNA, 40 bp, Homo sapiens
aaaagagtcttgttagtcccactttgttgctgtccacttc

SEQ ID NO: 58689 - DNA, 40 bp, Homo sapiens
gaagtggacagcaacaaagtgggactaacaagactctttt

SEQ ID NO: 58690 - DNA, 40 bp, Homo sapiens
aaagagtcttgttagtcccactttgttgctgtccacttct

SEQ ID NO: 58691 - DNA, 40 bp, Homo sapiens
agaagtggacagcaacaaagtgggactaacaagactcttt

SEQ ID NO: 58692 - DNA, 40 bp, Homo sapiens
aagagtcttgttagtcccactttgttgctgtccacttctc

SEQ ID NO: 58693 - DNA, 40 bp, Homo sapiens
gagaagtggacagcaacaaagtgggactaacaagactctt

SEQ ID NO: 58694 - DNA, 40 bp, Homo sapiens
agagtcttgttagtcccactttgttgctgtccacttctca

SEQ ID NO: 58695 - DNA, 40 bp, Homo sapiens
tgagaagtggacagcaacaaagtgggactaacaagactct

SEQ ID NO: 58696 - DNA, 40 bp, Homo sapiens
gagtcttgttagtcccactttgttgctgtccacttctcat

SEQ ID NO: 58697 - DNA, 40 bp, Homo sapiens
atgagaagtggacagcaacaaagtgggactaacaagactc

SEQ ID NO: 58698 - DNA, 40 bp, Homo sapiens
agtcttgttagtcccactttgttgctgtccacttctcatt

SEQ ID NO: 58699 - DNA, 40 bp, Homo sapiens
aatgagaagtggacagcaacaaagtgggactaacaagact

SEQ ID NO: 58700 - DNA, 40 bp, Homo sapiens
gtcttgttagtcccactttgttgctgtccacttctcattt

SEQ ID NO: 58701 - DNA, 40 bp, Homo sapiens
aaatgagaagtggacagcaacaaagtgggactaacaagac

SEQ ID NO: 58702 - DNA, 40 bp, Homo sapiens
tcttgttagtcccactttgttgctgtccacttctcatttg

SEQ ID NO: 58703 - DNA, 40 bp, Homo sapiens
caaatgagaagtggacagcaacaaagtgggactaacaaga

SEQ ID NO: 58704 - DNA, 40 bp, Homo sapiens
cttgttagtcccactttgttgctgtccacttctcatttga

SEQ ID NO: 58705 - DNA, 40 bp, Homo sapiens
tcaaatgagaagtggacagcaacaaagtgggactaacaag

SEQ ID NO: 58706 - DNA, 40 bp, Homo sapiens
ttgttagtcccactttgttgctgtccacttctcatttgat

SEQ ID NO: 58707 - DNA, 40 bp, Homo sapiens
atcaaatgagaagtggacagcaacaaagtgggactaacaa

SEQ ID NO: 58708 - DNA, 40 bp, Homo sapiens
tgttagtcccactttgttgctgtccacttctcatttgata

SEQ ID NO: 58709 - DNA, 40 bp, Homo sapiens
tatcaaatgagaagtggacagcaacaaagtgggactaaca

SEQ ID NO: 58710 - DNA, 40 bp, Homo sapiens
gttagtcccactttgttgctgtccacttctcatttgataa

SEQ ID NO: 58711 - DNA, 40 bp, Homo sapiens
ttatcaaatgagaagtggacagcaacaaagtgggactaac

SEQ ID NO: 58712 - DNA, 40 bp, Homo sapiens
ttagtcccactttgttgctgtccacttctcatttgataat

SEQ ID NO: 58713 - DNA, 40 bp, Homo sapiens
attatcaaatgagaagtggacagcaacaaagtgggactaa

SEQ ID NO: 58714 - DNA, 40 bp, Homo sapiens
tagtcccactttgttgctgtccacttctcatttgataata

SEQ ID NO: 58715 - DNA, 40 bp, Homo sapiens
tattatcaaatgagaagtggacagcaacaaagtgggacta

SEQ ID NO: 58716 - DNA, 40 bp, Homo sapiens
agtcccactttgttgctgtccacttctcatttgataatat

SEQ ID NO: 58717 - DNA, 40 bp, Homo sapiens
atattatcaaatgagaagtggacagcaacaaagtgggact

SEQ ID NO: 58718 - DNA, 40 bp, Homo sapiens
gtcccactttgttgctgtccacttctcatttgataatatc

SEQ ID NO: 58719 - DNA, 40 bp, Homo sapiens
gatattatcaaatgagaagtggacagcaacaaagtgggac

SEQ ID NO: 58720 - DNA, 40 bp, Homo sapiens
tcccactttgttgctgtccacttctcatttgataatatcc

SEQ ID NO: 58721 - DNA, 40 bp, Homo sapiens
ggatattatcaaatgagaagtggacagcaacaaagtggga

SEQ ID NO: 58722 - DNA, 40 bp, Homo sapiens
cccactttgttgctgtccacttctcatttgataatatcct

SEQ ID NO: 58723 - DNA, 40 bp, Homo sapiens
aggatattatcaaatgagaagtggacagcaacaaagtggg

SEQ ID NO: 58724 - DNA, 40 bp, Homo sapiens
ccactttgttgctgtccacttctcatttgataatatccta

SEQ ID NO: 58725 - DNA, 40 bp, Homo sapiens
taggatattatcaaatgagaagtggacagcaacaaagtgg

SEQ ID NO: 58726 - DNA, 40 bp, Homo sapiens
cactttgttgctgtccacttctcatttgataatatcctaa

SEQ ID NO: 58727 - DNA, 40 bp, Homo sapiens
ttaggatattatcaaatgagaagtggacagcaacaaagtg

SEQ ID NO: 58728 - DNA, 40 bp, Homo sapiens
actttgttgctgtccacttctcatttgataatatcctaaa

SEQ ID NO: 58729 - DNA, 40 bp, Homo sapiens
tttaggatattatcaaatgagaagtggacagcaacaaagt

SEQ ID NO: 58730 - DNA, 40 bp, Homo sapiens
ctttgttgctgtccacttctcatttgataatatcctaaaa

SEQ ID NO: 58731 - DNA, 40 bp, Homo sapiens
ttttaggatattatcaaatgagaagtggacagcaacaaag

SEQ ID NO: 58732 - DNA, 40 bp, Homo sapiens
tttgttgctgtccacttctcatttgataatatcctaaaat

SEQ ID NO: 58733 - DNA, 40 bp, Homo sapiens
attttaggatattatcaaatgagaagtggacagcaacaaa

SEQ ID NO: 58734 - DNA, 40 bp, Homo sapiens
ttgttgctgtccacttctcatttgataatatcctaaaata

SEQ ID NO: 58735 - DNA, 40 bp, Homo sapiens
tattttaggatattatcaaatgagaagtggacagcaacaa

SEQ ID NO: 58736 - DNA, 40 bp, Homo sapiens
tgttgctgtccacttctcatttgataatatcctaaaatag

SEQ ID NO: 58737 - DNA, 40 bp, Homo sapiens
ctattttaggatattatcaaatgagaagtggacagcaaca

SEQ ID NO: 58738 - DNA, 40 bp, Homo sapiens
gttgctgtccacttctcatttgataatatcctaaaatagc

SEQ ID NO: 58739 - DNA, 40 bp, Homo sapiens
gctattttaggatattatcaaatgagaagtggacagcaac

SEQ ID NO: 58740 - DNA, 40 bp, Homo sapiens
ttgctgtccacttctcatttgataatatcctaaaatagct

SEQ ID NO: 58741 - DNA, 40 bp, Homo sapiens
agctattttaggatattatcaaatgagaagtggacagcaa

SEQ ID NO: 58742 - DNA, 40 bp, Homo sapiens
tgctgtccacttctcatttgataatatcctaaaatagctg

SEQ ID NO: 58743 - DNA, 40 bp, Homo sapiens
cagctattttaggatattatcaaatgagaagtggacagca

SEQ ID NO: 58744 - DNA, 40 bp, Homo sapiens
gctgtccacttctcatttgataatatcctaaaatagctgt

SEQ ID NO: 58745 - DNA, 40 bp, Homo sapiens
acagctattttaggatattatcaaatgagaagtggacagc

SEQ ID NO: 58746 - DNA, 40 bp, Homo sapiens
ctgtccacttctcatttgataatatcctaaaatagctgtg

SEQ ID NO: 58747 - DNA, 40 bp, Homo sapiens
cacagctattttaggatattatcaaatgagaagtggacag

SEQ ID NO: 58748 - DNA, 40 bp, Homo sapiens
tgtccacttctcatttgataatatcctaaaatagctgtgt

SEQ ID NO: 58749 - DNA, 40 bp, Homo sapiens
acacagctattttaggatattatcaaatgagaagtggaca

SEQ ID NO: 58750 - DNA, 40 bp, Homo sapiens
gtccacttctcatttgataatatcctaaaatagctgtgtc

SEQ ID NO: 58751 - DNA, 40 bp, Homo sapiens
gacacagctattttaggatattatcaaatgagaagtggac

SEQ ID NO: 58752 - DNA, 40 bp, Homo sapiens
tccacttctcatttgataatatcctaaaatagctgtgtct

SEQ ID NO: 58753 - DNA, 40 bp, Homo sapiens
agacacagctattttaggatattatcaaatgagaagtgga

SEQ ID NO: 58754 - DNA, 40 bp, Homo sapiens
ccacttctcatttgataatatcctaaaatagctgtgtctc

SEQ ID NO: 58755 - DNA, 40 bp, Homo sapiens
gagacacagctattttaggatattatcaaatgagaagtgg

SEQ ID NO: 58756 - DNA, 40 bp, Homo sapiens
cacttctcatttgataatatcctaaaatagctgtgtctcc

SEQ ID NO: 58757 - DNA, 40 bp, Homo sapiens
ggagacacagctattttaggatattatcaaatgagaagtg

SEQ ID NO: 58758 - DNA, 40 bp, Homo sapiens
acttctcatttgataatatcctaaaatagctgtgtctcct

SEQ ID NO: 58759 - DNA, 40 bp, Homo sapiens
aggagacacagctattttaggatattatcaaatgagaagt

SEQ ID NO: 58760 - DNA, 40 bp, Homo sapiens
cttctcatttgataatatcctaaaatagctgtgtctcctt

SEQ ID NO: 58761 - DNA, 40 bp, Homo sapiens
aaggagacacagctattttaggatattatcaaatgagaag

SEQ ID NO: 58762 - DNA, 40 bp, Homo sapiens
ttctcatttgataatatcctaaaatagctgtgtctccttt

SEQ ID NO: 58763 - DNA, 40 bp, Homo sapiens
aaaggagacacagctattttaggatattatcaaatgagaa

SEQ ID NO: 58764 - DNA, 40 bp, Homo sapiens
tctcatttgataatatcctaaaatagctgtgtctcctttt

SEQ ID NO: 58765 - DNA, 40 bp, Homo sapiens
aaaaggagacacagctattttaggatattatcaaatgaga

SEQ ID NO: 58766 - DNA, 40 bp, Homo sapiens
ctcatttgataatatcctaaaatagctgtgtctccttttt

SEQ ID NO: 58767 - DNA, 40 bp, Homo sapiens
aaaaaggagacacagctattttaggatattatcaaatgag

SEQ ID NO: 58768 - DNA, 40 bp, Homo sapiens
tcatttgataatatcctaaaatagctgtgtctcctttttg

SEQ ID NO: 58769 - DNA, 40 bp, Homo sapiens
caaaaaggagacacagctattttaggatattatcaaatga

SEQ ID NO: 58770 - DNA, 40 bp, Homo sapiens
catttgataatatcctaaaatagctgtgtctcctttttgg

SEQ ID NO: 58771 - DNA, 40 bp, Homo sapiens
ccaaaaaggagacacagctattttaggatattatcaaatg

SEQ ID NO: 58772 - DNA, 40 bp, Homo sapiens
atttgataatatcctaaaatagctgtgtctcctttttggt

SEQ ID NO: 58773 - DNA, 40 bp, Homo sapiens
accaaaaaggagacacagctattttaggatattatcaaat

SEQ ID NO: 58774 - DNA, 40 bp, Homo sapiens
tttgataatatcctaaaatagctgtgtctcctttttggtg

SEQ ID NO: 58775 - DNA, 40 bp, Homo sapiens
caccaaaaaggagacacagctattttaggatattatcaaa

SEQ ID NO: 58776 - DNA, 40 bp, Homo sapiens
ttgataatatcctaaaatagctgtgtctcctttttggtgg

SEQ ID NO: 58777 - DNA, 40 bp, Homo sapiens
ccaccaaaaaggagacacagctattttaggatattatcaa

SEQ ID NO: 58778 - DNA, 40 bp, Homo sapiens
tgataatatcctaaaatagctgtgtctcctttttggtggt

SEQ ID NO: 58779 - DNA, 40 bp, Homo sapiens
accaccaaaaaggagacacagctattttaggatattatca

SEQ ID NO: 58780 - DNA, 40 bp, Homo sapiens
gataatatcctaaaatagctgtgtctcctttttggtggtt

SEQ ID NO: 58781 - DNA, 40 bp, Homo sapiens
aaccaccaaaaaggagacacagctattttaggatattatc

SEQ ID NO: 58782 - DNA, 40 bp, Homo sapiens
ataatatcctaaaatagctgtgtctcctttttggtggttg

SEQ ID NO: 58783 - DNA, 40 bp, Homo sapiens
caaccaccaaaaaggagacacagctattttaggatattat

SEQ ID NO: 58784 - DNA, 40 bp, Homo sapiens
taatatcctaaaatagctgtgtctcctttttggtggttgt

SEQ ID NO: 58785 - DNA, 40 bp, Homo sapiens
acaaccaccaaaaaggagacacagctattttaggatatta

SEQ ID NO: 58786 - DNA, 40 bp, Homo sapiens
aatatcctaaaatagctgtgtctcctttttggtggttgta

SEQ ID NO: 58787 - DNA, 40 bp, Homo sapiens
tacaaccaccaaaaaggagacacagctattttaggatatt

SEQ ID NO: 58788 - DNA, 40 bp, Homo sapiens
atatcctaaaatagctgtgtctcctttttggtggttgtat

SEQ ID NO: 58789 - DNA, 40 bp, Homo sapiens
atacaaccaccaaaaaggagacacagctattttaggatat

SEQ ID NO: 58790 - DNA, 40 bp, Homo sapiens
tatcctaaaatagctgtgtctcctttttggtggttgtatg

SEQ ID NO: 58791 - DNA, 40 bp, Homo sapiens
catacaaccaccaaaaaggagacacagctattttaggata

SEQ ID NO: 58792 - DNA, 40 bp, Homo sapiens
atcctaaaatagctgtgtctcctttttggtggttgtatga

SEQ ID NO: 58793 - DNA, 40 bp, Homo sapiens
tcatacaaccaccaaaaaggagacacagctattttaggat

SEQ ID NO: 58794 - DNA, 40 bp, Homo sapiens
tcctaaaatagctgtgtctcctttttggtggttgtatgat

SEQ ID NO: 58795 - DNA, 40 bp, Homo sapiens
atcatacaaccaccaaaaaggagacacagctattttagga

SEQ ID NO: 58796 - DNA, 40 bp, Homo sapiens
cctaaaatagctgtgtctcctttttggtggttgtatgatt

SEQ ID NO: 58797 - DNA, 40 bp, Homo sapiens
aatcatacaaccaccaaaaaggagacacagctattttagg

SEQ ID NO: 58798 - DNA, 40 bp, Homo sapiens
ctaaaatagctgtgtctcctttttggtggttgtatgatta

SEQ ID NO: 58799 - DNA, 40 bp, Homo sapiens
taatcatacaaccaccaaaaaggagacacagctattttag

SEQ ID NO: 58800 - DNA, 40 bp, Homo sapiens
taaaatagctgtgtctcctttttggtggttgtatgattac

SEQ ID NO: 58801 - DNA, 40 bp, Homo sapiens
gtaatcatacaaccaccaaaaaggagacacagctatttta

SEQ ID NO: 58802 - DNA, 40 bp, Homo sapiens
aaaatagctgtgtctcctttttggtggttgtatgattact

SEQ ID NO: 58803 - DNA, 40 bp, Homo sapiens
agtaatcatacaaccaccaaaaaggagacacagctatttt

SEQ ID NO: 58804 - DNA, 40 bp, Homo sapiens
aaatagctgtgtctcctttttggtggttgtatgattacta

SEQ ID NO: 58805 - DNA, 40 bp, Homo sapiens
tagtaatcatacaaccaccaaaaaggagacacagctattt

SEQ ID NO: 58806 - DNA, 40 bp, Homo sapiens
aatagctgtgtctcctttttggtggttgtatgattactac

SEQ ID NO: 58807 - DNA, 40 bp, Homo sapiens
gtagtaatcatacaaccaccaaaaaggagacacagctatt

SEQ ID NO: 58808 - DNA, 40 bp, Homo sapiens
atagctgtgtctcctttttggtggttgtatgattactacc

SEQ ID NO: 58809 - DNA, 40 bp, Homo sapiens
ggtagtaatcatacaaccaccaaaaaggagacacagctat

SEQ ID NO: 58810 - DNA, 40 bp, Homo sapiens
tagctgtgtctcctttttggtggttgtatgattactacct

SEQ ID NO: 58811 - DNA, 40 bp, Homo sapiens
aggtagtaatcatacaaccaccaaaaaggagacacagcta

SEQ ID NO: 58812 - DNA, 40 bp, Homo sapiens
agctgtgtctcctttttggtggttgtatgattactacctc

SEQ ID NO: 58813 - DNA, 40 bp, Homo sapiens
gaggtagtaatcatacaaccaccaaaaaggagacacagct

SEQ ID NO: 58814 - DNA, 40 bp, Homo sapiens
gctgtgtctcctttttggtggttgtatgattactacctca

SEQ ID NO: 58815 - DNA, 40 bp, Homo sapiens
tgaggtagtaatcatacaaccaccaaaaaggagacacagc

SEQ ID NO: 58816 - DNA, 40 bp, Homo sapiens
ctgtgtctcctttttggtggttgtatgattactacctcag

SEQ ID NO: 58817 - DNA, 40 bp, Homo sapiens
ctgaggtagtaatcatacaaccaccaaaaaggagacacag

SEQ ID NO: 58818 - DNA, 40 bp, Homo sapiens
tgtgtctcctttttggtggttgtatgattactacctcaga

SEQ ID NO: 58819 - DNA, 40 bp, Homo sapiens
tctgaggtagtaatcatacaaccaccaaaaaggagacaca

SEQ ID NO: 58820 - DNA, 40 bp, Homo sapiens
gtgtctcctttttggtggttgtatgattactacctcagaa

SEQ ID NO: 58821 - DNA, 40 bp, Homo sapiens
ttctgaggtagtaatcatacaaccaccaaaaaggagacac

SEQ ID NO: 58822 - DNA, 40 bp, Homo sapiens
tgtctcctttttggtggttgtatgattactacctcagaag

SEQ ID NO: 58823 - DNA, 40 bp, Homo sapiens
cttctgaggtagtaatcatacaaccaccaaaaaggagaca

SEQ ID NO: 58824 - DNA, 40 bp, Homo sapiens
gtctcctttttggtggttgtatgattactacctcagaagt

SEQ ID NO: 58825 - DNA, 40 bp, Homo sapiens
acttctgaggtagtaatcatacaaccaccaaaaaggagac

SEQ ID NO: 58826 - DNA, 40 bp, Homo sapiens
tctcctttttggtggttgtatgattactacctcagaagta

SEQ ID NO: 58827 - DNA, 40 bp, Homo sapiens
tacttctgaggtagtaatcatacaaccaccaaaaaggaga

SEQ ID NO: 58828 - DNA, 40 bp, Homo sapiens
ctcctttttggtggttgtatgattactacctcagaagtac

SEQ ID NO: 58829 - DNA, 40 bp, Homo sapiens
gtacttctgaggtagtaatcatacaaccaccaaaaaggag

SEQ ID NO: 58830 - DNA, 40 bp, Homo sapiens
tcctttttggtggttgtatgattactacctcagaagtact

SEQ ID NO: 58831 - DNA, 40 bp, Homo sapiens
agtacttctgaggtagtaatcatacaaccaccaaaaagga

SEQ ID NO: 58832 - DNA, 40 bp, Homo sapiens
cctttttggtggttgtatgattactacctcagaagtacta

SEQ ID NO: 58833 - DNA, 40 bp, Homo sapiens
tagtacttctgaggtagtaatcatacaaccaccaaaaagg

SEQ ID NO: 58834 - DNA, 40 bp, Homo sapiens
ctttttggtggttgtatgattactacctcagaagtactaa

SEQ ID NO: 58835 - DNA, 40 bp, Homo sapiens
ttagtacttctgaggtagtaatcatacaaccaccaaaaag

SEQ ID NO: 58836 - DNA, 40 bp, Homo sapiens
tttttggtggttgtatgattactacctcagaagtactaat

SEQ ID NO: 58837 - DNA, 40 bp, Homo sapiens
attagtacttctgaggtagtaatcatacaaccaccaaaaa

SEQ ID NO: 58838 - DNA, 40 bp, Homo sapiens
ttttggtggttgtatgattactacctcagaagtactaatt

SEQ ID NO: 58839 - DNA, 40 bp, Homo sapiens
aattagtacttctgaggtagtaatcatacaaccaccaaaa

SEQ ID NO: 58840 - DNA, 40 bp, Homo sapiens
tttggtggttgtatgattactacctcagaagtactaattg

SEQ ID NO: 58841 - DNA, 40 bp, Homo sapiens
caattagtacttctgaggtagtaatcatacaaccaccaaa

SEQ ID NO: 58842 - DNA, 40 bp, Homo sapiens
ttggtggttgtatgattactacctcagaagtactaattga

SEQ ID NO: 58843 - DNA, 40 bp, Homo sapiens
tcaattagtacttctgaggtagtaatcatacaaccaccaa

SEQ ID NO: 58844 - DNA, 40 bp, Homo sapiens
tggtggttgtatgattactacctcagaagtactaattgat

SEQ ID NO: 58845 - DNA, 40 bp, Homo sapiens
atcaattagtacttctgaggtagtaatcatacaaccacca

SEQ ID NO: 58846 - DNA, 40 bp, Homo sapiens
ggtggttgtatgattactacctcagaagtactaattgatt

SEQ ID NO: 58847 - DNA, 40 bp, Homo sapiens
aatcaattagtacttctgaggtagtaatcatacaaccacc

SEQ ID NO: 58848 - DNA, 40 bp, Homo sapiens
gtggttgtatgattactacctcagaagtactaattgattc

SEQ ID NO: 58849 - DNA, 40 bp, Homo sapiens
gaatcaattagtacttctgaggtagtaatcatacaaccac

SEQ ID NO: 58850 - DNA, 40 bp, Homo sapiens
tggttgtatgattactacctcagaagtactaattgattct

SEQ ID NO: 58851 - DNA, 40 bp, Homo sapiens
agaatcaattagtacttctgaggtagtaatcatacaacca

SEQ ID NO: 58852 - DNA, 40 bp, Homo sapiens
ggttgtatgattactacctcagaagtactaattgattctt

SEQ ID NO: 58853 - DNA, 40 bp, Homo sapiens
aagaatcaattagtacttctgaggtagtaatcatacaacc

SEQ ID NO: 58854 - DNA, 40 bp, Homo sapiens
gttgtatgattactacctcagaagtactaattgattcttg

SEQ ID NO: 58855 - DNA, 40 bp, Homo sapiens
caagaatcaattagtacttctgaggtagtaatcatacaac

SEQ ID NO: 58856 - DNA, 40 bp, Homo sapiens
ttgtatgattactacctcagaagtactaattgattcttgc

SEQ ID NO: 58857 - DNA, 40 bp, Homo sapiens
gcaagaatcaattagtacttctgaggtagtaatcatacaa

SEQ ID NO: 58858 - DNA, 40 bp, Homo sapiens
tgtatgattactacctcagaagtactaattgattcttgct

SEQ ID NO: 58859 - DNA, 40 bp, Homo sapiens
agcaagaatcaattagtacttctgaggtagtaatcataca

SEQ ID NO: 58860 - DNA, 40 bp, Homo sapiens
gtatgattactacctcagaagtactaattgattcttgcta

SEQ ID NO: 58861 - DNA, 40 bp, Homo sapiens
tagcaagaatcaattagtacttctgaggtagtaatcatac

SEQ ID NO: 58862 - DNA, 40 bp, Homo sapiens
tatgattactacctcagaagtactaattgattcttgctat

SEQ ID NO: 58863 - DNA, 40 bp, Homo sapiens
atagcaagaatcaattagtacttctgaggtagtaatcata

SEQ ID NO: 58864 - DNA, 40 bp, Homo sapiens
atgattactacctcagaagtactaattgattcttgctatt

SEQ ID NO: 58865 - DNA, 40 bp, Homo sapiens
aatagcaagaatcaattagtacttctgaggtagtaatcat

SEQ ID NO: 58866 - DNA, 40 bp, Homo sapiens
tgattactacctcagaagtactaattgattcttgctattt

SEQ ID NO: 58867 - DNA, 40 bp, Homo sapiens
aaatagcaagaatcaattagtacttctgaggtagtaatca

SEQ ID NO: 58868 - DNA, 40 bp, Homo sapiens
gattactacctcagaagtactaattgattcttgctatttg

SEQ ID NO: 58869 - DNA, 40 bp, Homo sapiens
caaatagcaagaatcaattagtacttctgaggtagtaatc

SEQ ID NO: 58870 - DNA, 40 bp, Homo sapiens
attactacctcagaagtactaattgattcttgctatttga

SEQ ID NO: 58871 - DNA, 40 bp, Homo sapiens
tcaaatagcaagaatcaattagtacttctgaggtagtaat

SEQ ID NO: 58872 - DNA, 40 bp, Homo sapiens
ttactacctcagaagtactaattgattcttgctatttgac

SEQ ID NO: 58873 - DNA, 40 bp, Homo sapiens
gtcaaatagcaagaatcaattagtacttctgaggtagtaa

SEQ ID NO: 58874 - DNA, 40 bp, Homo sapiens
tactacctcagaagtactaattgattcttgctatttgacc

SEQ ID NO: 58875 - DNA, 40 bp, Homo sapiens
ggtcaaatagcaagaatcaattagtacttctgaggtagta

SEQ ID NO: 58876 - DNA, 40 bp, Homo sapiens
actacctcagaagtactaattgattcttgctatttgacct

SEQ ID NO: 58877 - DNA, 40 bp, Homo sapiens
aggtcaaatagcaagaatcaattagtacttctgaggtagt

SEQ ID NO: 58878 - DNA, 40 bp, Homo sapiens
ctacctcagaagtactaattgattcttgctatttgacctt

SEQ ID NO: 58879 - DNA, 40 bp, Homo sapiens
aaggtcaaatagcaagaatcaattagtacttctgaggtag

SEQ ID NO: 58880 - DNA, 40 bp, Homo sapiens
tacctcagaagtactaattgattcttgctatttgacctta

SEQ ID NO: 58881 - DNA, 40 bp, Homo sapiens
taaggtcaaatagcaagaatcaattagtacttctgaggta

SEQ ID NO: 58882 - DNA, 40 bp, Homo sapiens
acctcagaagtactaattgattcttgctatttgaccttaa

SEQ ID NO: 58883 - DNA, 40 bp, Homo sapiens
ttaaggtcaaatagcaagaatcaattagtacttctgaggt

SEQ ID NO: 58884 - DNA, 40 bp, Homo sapiens
cctcagaagtactaattgattcttgctatttgaccttaat

SEQ ID NO: 58885 - DNA, 40 bp, Homo sapiens
attaaggtcaaatagcaagaatcaattagtacttctgagg

SEQ ID NO: 58886 - DNA, 40 bp, Homo sapiens
ctcagaagtactaattgattcttgctatttgaccttaata

SEQ ID NO: 58887 - DNA, 40 bp, Homo sapiens
tattaaggtcaaatagcaagaatcaattagtacttctgag

SEQ ID NO: 58888 - DNA, 40 bp, Homo sapiens
tcagaagtactaattgattcttgctatttgaccttaatac

SEQ ID NO: 58889 - DNA, 40 bp, Homo sapiens
gtattaaggtcaaatagcaagaatcaattagtacttctga

SEQ ID NO: 58890 - DNA, 40 bp, Homo sapiens
cagaagtactaattgattcttgctatttgaccttaatact

SEQ ID NO: 58891 - DNA, 40 bp, Homo sapiens
agtattaaggtcaaatagcaagaatcaattagtacttctg

SEQ ID NO: 58892 - DNA, 40 bp, Homo sapiens
agaagtactaattgattcttgctatttgaccttaatactt

SEQ ID NO: 58893 - DNA, 40 bp, Homo sapiens
aagtattaaggtcaaatagcaagaatcaattagtacttct

SEQ ID NO: 58894 - DNA, 40 bp, Homo sapiens
gaagtactaattgattcttgctatttgaccttaatacttt

SEQ ID NO: 58895 - DNA, 40 bp, Homo sapiens
aaagtattaaggtcaaatagcaagaatcaattagtacttc

SEQ ID NO: 58896 - DNA, 40 bp, Homo sapiens
aagtactaattgattcttgctatttgaccttaatacttta

SEQ ID NO: 58897 - DNA, 40 bp, Homo sapiens
taaagtattaaggtcaaatagcaagaatcaattagtactt

SEQ ID NO: 58898 - DNA, 40 bp, Homo sapiens
agtactaattgattcttgctatttgaccttaatactttaa

SEQ ID NO: 58899 - DNA, 40 bp, Homo sapiens
ttaaagtattaaggtcaaatagcaagaatcaattagtact

SEQ ID NO: 58900 - DNA, 40 bp, Homo sapiens
gtactaattgattcttgctatttgaccttaatactttaat

SEQ ID NO: 58901 - DNA, 40 bp, Homo sapiens
attaaagtattaaggtcaaatagcaagaatcaattagtac

SEQ ID NO: 58902 - DNA, 40 bp, Homo sapiens
tactaattgattcttgctatttgaccttaatactttaata

SEQ ID NO: 58903 - DNA, 40 bp, Homo sapiens
tattaaagtattaaggtcaaatagcaagaatcaattagta

SEQ ID NO: 58904 - DNA, 40 bp, Homo sapiens
actaattgattcttgctatttgaccttaatactttaatat

SEQ ID NO: 58905 - DNA, 40 bp, Homo sapiens
atattaaagtattaaggtcaaatagcaagaatcaattagt

SEQ ID NO: 58906 - DNA, 40 bp, Homo sapiens
ctaattgattcttgctatttgaccttaatactttaatata

SEQ ID NO: 58907 - DNA, 40 bp, Homo sapiens
tatattaaagtattaaggtcaaatagcaagaatcaattag

SEQ ID NO: 58908 - DNA, 40 bp, Homo sapiens
taattgattcttgctatttgaccttaatactttaatataa

SEQ ID NO: 58909 - DNA, 40 bp, Homo sapiens
ttatattaaagtattaaggtcaaatagcaagaatcaatta

SEQ ID NO: 58910 - DNA, 40 bp, Homo sapiens
aattgattcttgctatttgaccttaatactttaatataac

SEQ ID NO: 58911 - DNA, 40 bp, Homo sapiens
gttatattaaagtattaaggtcaaatagcaagaatcaatt

SEQ ID NO: 58912 - DNA, 40 bp, Homo sapiens
attgattcttgctatttgaccttaatactttaatataaca

SEQ ID NO: 58913 - DNA, 40 bp, Homo sapiens
tgttatattaaagtattaaggtcaaatagcaagaatcaat

SEQ ID NO: 58914 - DNA, 40 bp, Homo sapiens
ttgattcttgctatttgaccttaatactttaatataacac

SEQ ID NO: 58915 - DNA, 40 bp, Homo sapiens
gtgttatattaaagtattaaggtcaaatagcaagaatcaa

SEQ ID NO: 58916 - DNA, 40 bp, Homo sapiens
tgattcttgctatttgaccttaatactttaatataacaca

SEQ ID NO: 58917 - DNA, 40 bp, Homo sapiens
tgtgttatattaaagtattaaggtcaaatagcaagaatca

SEQ ID NO: 58918 - DNA, 40 bp, Homo sapiens
gattcttgctatttgaccttaatactttaatataacacag

SEQ ID NO: 58919 - DNA, 40 bp, Homo sapiens
ctgtgttatattaaagtattaaggtcaaatagcaagaatc

SEQ ID NO: 58920 - DNA, 40 bp, Homo sapiens
attcttgctatttgaccttaatactttaatataacacagc

SEQ ID NO: 58921 - DNA, 40 bp, Homo sapiens
gctgtgttatattaaagtattaaggtcaaatagcaagaat

SEQ ID NO: 58922 - DNA, 40 bp, Homo sapiens
ttcttgctatttgaccttaatactttaatataacacagca

SEQ ID NO: 58923 - DNA, 40 bp, Homo sapiens
tgctgtgttatattaaagtattaaggtcaaatagcaagaa

SEQ ID NO: 58924 - DNA, 40 bp, Homo sapiens
tcttgctatttgaccttaatactttaatataacacagcat

SEQ ID NO: 58925 - DNA, 40 bp, Homo sapiens
atgctgtgttatattaaagtattaaggtcaaatagcaaga

SEQ ID NO: 58926 - DNA, 40 bp, Homo sapiens
cttgctatttgaccttaatactttaatataacacagcatt

SEQ ID NO: 58927 - DNA, 40 bp, Homo sapiens
aatgctgtgttatattaaagtattaaggtcaaatagcaag

SEQ ID NO: 58928 - DNA, 40 bp, Homo sapiens
ttgctatttgaccttaatactttaatataacacagcattc

SEQ ID NO: 58929 - DNA, 40 bp, Homo sapiens
gaatgctgtgttatattaaagtattaaggtcaaatagcaa

SEQ ID NO: 58930 - DNA, 40 bp, Homo sapiens
tgctatttgaccttaatactttaatataacacagcattca

SEQ ID NO: 58931 - DNA, 40 bp, Homo sapiens
tgaatgctgtgttatattaaagtattaaggtcaaatagca

SEQ ID NO: 58932 - DNA, 40 bp, Homo sapiens
gctatttgaccttaatactttaatataacacagcattcat

SEQ ID NO: 58933 - DNA, 40 bp, Homo sapiens
atgaatgctgtgttatattaaagtattaaggtcaaatagc

SEQ ID NO: 58934 - DNA, 40 bp, Homo sapiens
ctatttgaccttaatactttaatataacacagcattcata

SEQ ID NO: 58935 - DNA, 40 bp, Homo sapiens
tatgaatgctgtgttatattaaagtattaaggtcaaatag

SEQ ID NO: 58936 - DNA, 40 bp, Homo sapiens
tatttgaccttaatactttaatataacacagcattcatat

SEQ ID NO: 58937 - DNA, 40 bp, Homo sapiens
atatgaatgctgtgttatattaaagtattaaggtcaaata

SEQ ID NO: 58938 - DNA, 40 bp, Homo sapiens
atttgaccttaatactttaatataacacagcattcatatt

SEQ ID NO: 58939 - DNA, 40 bp, Homo sapiens
aatatgaatgctgtgttatattaaagtattaaggtcaaat

SEQ ID NO: 58940 - DNA, 40 bp, Homo sapiens
tttgaccttaatactttaatataacacagcattcatattt

SEQ ID NO: 58941 - DNA, 40 bp, Homo sapiens
aaatatgaatgctgtgttatattaaagtattaaggtcaaa

SEQ ID NO: 58942 - DNA, 40 bp, Homo sapiens
ttgaccttaatactttaatataacacagcattcatatttg

SEQ ID NO: 58943 - DNA, 40 bp, Homo sapiens
caaatatgaatgctgtgttatattaaagtattaaggtcaa

SEQ ID NO: 58944 - DNA, 40 bp, Homo sapiens
tgaccttaatactttaatataacacagcattcatatttga

SEQ ID NO: 58945 - DNA, 40 bp, Homo sapiens
tcaaatatgaatgctgtgttatattaaagtattaaggtca

SEQ ID NO: 58946 - DNA, 40 bp, Homo sapiens
gaccttaatactttaatataacacagcattcatatttgat

SEQ ID NO: 58947 - DNA, 40 bp, Homo sapiens
atcaaatatgaatgctgtgttatattaaagtattaaggtc

SEQ ID NO: 58948 - DNA, 40 bp, Homo sapiens
accttaatactttaatataacacagcattcatatttgatc

SEQ ID NO: 58949 - DNA, 40 bp, Homo sapiens
gatcaaatatgaatgctgtgttatattaaagtattaaggt

SEQ ID NO: 58950 - DNA, 40 bp, Homo sapiens
ccttaatactttaatataacacagcattcatatttgatca

SEQ ID NO: 58951 - DNA, 40 bp, Homo sapiens
tgatcaaatatgaatgctgtgttatattaaagtattaagg

SEQ ID NO: 58952 - DNA, 40 bp, Homo sapiens
cttaatactttaatataacacagcattcatatttgatcag

SEQ ID NO: 58953 - DNA, 40 bp, Homo sapiens
ctgatcaaatatgaatgctgtgttatattaaagtattaag

SEQ ID NO: 58954 - DNA, 40 bp, Homo sapiens
ttaatactttaatataacacagcattcatatttgatcaga

SEQ ID NO: 58955 - DNA, 40 bp, Homo sapiens
tctgatcaaatatgaatgctgtgttatattaaagtattaa

SEQ ID NO: 58956 - DNA, 40 bp, Homo sapiens
taatactttaatataacacagcattcatatttgatcagaa

SEQ ID NO: 58957 - DNA, 40 bp, Homo sapiens
ttctgatcaaatatgaatgctgtgttatattaaagtatta

SEQ ID NO: 58958 - DNA, 40 bp, Homo sapiens
aatactttaatataacacagcattcatatttgatcagaaa

SEQ ID NO: 58959 - DNA, 40 bp, Homo sapiens
tttctgatcaaatatgaatgctgtgttatattaaagtatt

SEQ ID NO: 58960 - DNA, 40 bp, Homo sapiens
atactttaatataacacagcattcatatttgatcagaaaa

SEQ ID NO: 58961 - DNA, 40 bp, Homo sapiens
ttttctgatcaaatatgaatgctgtgttatattaaagtat

SEQ ID NO: 58962 - DNA, 40 bp, Homo sapiens
tactttaatataacacagcattcatatttgatcagaaaac

SEQ ID NO: 58963 - DNA, 40 bp, Homo sapiens
gttttctgatcaaatatgaatgctgtgttatattaaagta

SEQ ID NO: 58964 - DNA, 40 bp, Homo sapiens
actttaatataacacagcattcatatttgatcagaaaact

SEQ ID NO: 58965 - DNA, 40 bp, Homo sapiens
agttttctgatcaaatatgaatgctgtgttatattaaagt

SEQ ID NO: 58966 - DNA, 40 bp, Homo sapiens
ctttaatataacacagcattcatatttgatcagaaaacta

SEQ ID NO: 58967 - DNA, 40 bp, Homo sapiens
tagttttctgatcaaatatgaatgctgtgttatattaaag

SEQ ID NO: 58968 - DNA, 40 bp, Homo sapiens
tttaatataacacagcattcatatttgatcagaaaactat

SEQ ID NO: 58969 - DNA, 40 bp, Homo sapiens
atagttttctgatcaaatatgaatgctgtgttatattaaa

SEQ ID NO: 58970 - DNA, 40 bp, Homo sapiens
ttaatataacacagcattcatatttgatcagaaaactatc

SEQ ID NO: 58971 - DNA, 40 bp, Homo sapiens
gatagttttctgatcaaatatgaatgctgtgttatattaa

SEQ ID NO: 58972 - DNA, 40 bp, Homo sapiens
taatataacacagcattcatatttgatcagaaaactatct

SEQ ID NO: 58973 - DNA, 40 bp, Homo sapiens
agatagttttctgatcaaatatgaatgctgtgttatatta

SEQ ID NO: 58974 - DNA, 40 bp, Homo sapiens
aatataacacagcattcatatttgatcagaaaactatctg

SEQ ID NO: 58975 - DNA, 40 bp, Homo sapiens
cagatagttttctgatcaaatatgaatgctgtgttatatt

SEQ ID NO: 58976 - DNA, 40 bp, Homo sapiens
atataacacagcattcatatttgatcagaaaactatctgg

SEQ ID NO: 58977 - DNA, 40 bp, Homo sapiens
ccagatagttttctgatcaaatatgaatgctgtgttatat

SEQ ID NO: 58978 - DNA, 40 bp, Homo sapiens
tataacacagcattcatatttgatcagaaaactatctggc

SEQ ID NO: 58979 - DNA, 40 bp, Homo sapiens
gccagatagttttctgatcaaatatgaatgctgtgttata

SEQ ID NO: 58980 - DNA, 40 bp, Homo sapiens
ataacacagcattcatatttgatcagaaaactatctggct

SEQ ID NO: 58981 - DNA, 40 bp, Homo sapiens
agccagatagttttctgatcaaatatgaatgctgtgttat

SEQ ID NO: 58982 - DNA, 40 bp, Homo sapiens
taacacagcattcatatttgatcagaaaactatctggctt

SEQ ID NO: 58983 - DNA, 40 bp, Homo sapiens
aagccagatagttttctgatcaaatatgaatgctgtgtta

SEQ ID NO: 58984 - DNA, 40 bp, Homo sapiens
aacacagcattcatatttgatcagaaaactatctggcttc

SEQ ID NO: 58985 - DNA, 40 bp, Homo sapiens
gaagccagatagttttctgatcaaatatgaatgctgtgtt

SEQ ID NO: 58986 - DNA, 40 bp, Homo sapiens
acacagcattcatatttgatcagaaaactatctggcttcc

SEQ ID NO: 58987 - DNA, 40 bp, Homo sapiens
ggaagccagatagttttctgatcaaatatgaatgctgtgt

SEQ ID NO: 58988 - DNA, 40 bp, Homo sapiens
cacagcattcatatttgatcagaaaactatctggcttcct

SEQ ID NO: 58989 - DNA, 40 bp, Homo sapiens
aggaagccagatagttttctgatcaaatatgaatgctgtg

SEQ ID NO: 58990 - DNA, 40 bp, Homo sapiens
acagcattcatatttgatcagaaaactatctggcttcctt

SEQ ID NO: 58991 - DNA, 40 bp, Homo sapiens
aaggaagccagatagttttctgatcaaatatgaatgctgt

SEQ ID NO: 58992 - DNA, 40 bp, Homo sapiens
cagcattcatatttgatcagaaaactatctggcttccttt

SEQ ID NO: 58993 - DNA, 40 bp, Homo sapiens
aaaggaagccagatagttttctgatcaaatatgaatgctg

SEQ ID NO: 58994 - DNA, 40 bp, Homo sapiens
agcattcatatttgatcagaaaactatctggcttcctttt

SEQ ID NO: 58995 - DNA, 40 bp, Homo sapiens
aaaaggaagccagatagttttctgatcaaatatgaatgct

SEQ ID NO: 58996 - DNA, 40 bp, Homo sapiens
gcattcatatttgatcagaaaactatctggcttcctttta

SEQ ID NO: 58997 - DNA, 40 bp, Homo sapiens
taaaaggaagccagatagttttctgatcaaatatgaatgc

SEQ ID NO: 58998 - DNA, 40 bp, Homo sapiens
cattcatatttgatcagaaaactatctggcttccttttat

SEQ ID NO: 58999 - DNA, 40 bp, Homo sapiens
ataaaaggaagccagatagttttctgatcaaatatgaatg

SEQ ID NO: 59000 - DNA, 40 bp, Homo sapiens
attcatatttgatcagaaaactatctggcttccttttata

SEQ ID NO: 59001 - DNA, 40 bp, Homo sapiens
tataaaaggaagccagatagttttctgatcaaatatgaat

SEQ ID NO: 59002 - DNA, 40 bp, Homo sapiens
ttcatatttgatcagaaaactatctggcttccttttataa

SEQ ID NO: 59003 - DNA, 40 bp, Homo sapiens
ttataaaaggaagccagatagttttctgatcaaatatgaa

SEQ ID NO: 59004 - DNA, 40 bp, Homo sapiens
tcatatttgatcagaaaactatctggcttccttttataag

SEQ ID NO: 59005 - DNA, 40 bp, Homo sapiens
cttataaaaggaagccagatagttttctgatcaaatatga

SEQ ID NO: 59006 - DNA, 40 bp, Homo sapiens
catatttgatcagaaaactatctggcttccttttataaga

SEQ ID NO: 59007 - DNA, 40 bp, Homo sapiens
tcttataaaaggaagccagatagttttctgatcaaatatg

SEQ ID NO: 59008 - DNA, 40 bp, Homo sapiens
atatttgatcagaaaactatctggcttccttttataagag

SEQ ID NO: 59009 - DNA, 40 bp, Homo sapiens
ctcttataaaaggaagccagatagttttctgatcaaatat

SEQ ID NO: 59010 - DNA, 40 bp, Homo sapiens
tatttgatcagaaaactatctggcttccttttataagaga

SEQ ID NO: 59011 - DNA, 40 bp, Homo sapiens
tctcttataaaaggaagccagatagttttctgatcaaata

SEQ ID NO: 59012 - DNA, 40 bp, Homo sapiens
atttgatcagaaaactatctggcttccttttataagagat

SEQ ID NO: 59013 - DNA, 40 bp, Homo sapiens
atctcttataaaaggaagccagatagttttctgatcaaat

SEQ ID NO: 59014 - DNA, 40 bp, Homo sapiens
tttgatcagaaaactatctggcttccttttataagagatt

SEQ ID NO: 59015 - DNA, 40 bp, Homo sapiens
aatctcttataaaaggaagccagatagttttctgatcaaa

SEQ ID NO: 59016 - DNA, 40 bp, Homo sapiens
ttgatcagaaaactatctggcttccttttataagagattt

SEQ ID NO: 59017 - DNA, 40 bp, Homo sapiens
aaatctcttataaaaggaagccagatagttttctgatcaa

SEQ ID NO: 59018 - DNA, 40 bp, Homo sapiens
tgatcagaaaactatctggcttccttttataagagatttt

SEQ ID NO: 59019 - DNA, 40 bp, Homo sapiens
aaaatctcttataaaaggaagccagatagttttctgatca

SEQ ID NO: 59020 - DNA, 40 bp, Homo sapiens
gatcagaaaactatctggcttccttttataagagattttt

SEQ ID NO: 59021 - DNA, 40 bp, Homo sapiens
aaaaatctcttataaaaggaagccagatagttttctgatc

SEQ ID NO: 59022 - DNA, 40 bp, Homo sapiens
atcagaaaactatctggcttccttttataagagattttta

SEQ ID NO: 59023 - DNA, 40 bp, Homo sapiens
taaaaatctcttataaaaggaagccagatagttttctgat

SEQ ID NO: 59024 - DNA, 40 bp, Homo sapiens
tcagaaaactatctggcttccttttataagagatttttag

SEQ ID NO: 59025 - DNA, 40 bp, Homo sapiens
ctaaaaatctcttataaaaggaagccagatagttttctga

SEQ ID NO: 59026 - DNA, 40 bp, Homo sapiens
cagaaaactatctggcttccttttataagagatttttagg

SEQ ID NO: 59027 - DNA, 40 bp, Homo sapiens
cctaaaaatctcttataaaaggaagccagatagttttctg

SEQ ID NO: 59028 - DNA, 40 bp, Homo sapiens
agaaaactatctggcttccttttataagagatttttaggt

SEQ ID NO: 59029 - DNA, 40 bp, Homo sapiens
acctaaaaatctcttataaaaggaagccagatagttttct

SEQ ID NO: 59030 - DNA, 40 bp, Homo sapiens
gaaaactatctggcttccttttataagagatttttaggtt

SEQ ID NO: 59031 - DNA, 40 bp, Homo sapiens
aacctaaaaatctcttataaaaggaagccagatagttttc

SEQ ID NO: 59032 - DNA, 40 bp, Homo sapiens
aaaactatctggcttccttttataagagatttttaggttt

SEQ ID NO: 59033 - DNA, 40 bp, Homo sapiens
aaacctaaaaatctcttataaaaggaagccagatagtttt

SEQ ID NO: 59034 - DNA, 40 bp, Homo sapiens
aaactatctggcttccttttataagagatttttaggtttt

SEQ ID NO: 59035 - DNA, 40 bp, Homo sapiens
aaaacctaaaaatctcttataaaaggaagccagatagttt

SEQ ID NO: 59036 - DNA, 40 bp, Homo sapiens
aactatctggcttccttttataagagatttttaggtttta

SEQ ID NO: 59037 - DNA, 40 bp, Homo sapiens
taaaacctaaaaatctcttataaaaggaagccagatagtt

SEQ ID NO: 59038 - DNA, 40 bp, Homo sapiens
actatctggcttccttttataagagatttttaggttttat

SEQ ID NO: 59039 - DNA, 40 bp, Homo sapiens
ataaaacctaaaaatctcttataaaaggaagccagatagt

SEQ ID NO: 59040 - DNA, 40 bp, Homo sapiens
ctatctggcttccttttataagagatttttaggttttata

SEQ ID NO: 59041 - DNA, 40 bp, Homo sapiens
tataaaacctaaaaatctcttataaaaggaagccagatag

SEQ ID NO: 59042 - DNA, 40 bp, Homo sapiens
tatctggcttccttttataagagatttttaggttttatac

SEQ ID NO: 59043 - DNA, 40 bp, Homo sapiens
gtataaaacctaaaaatctcttataaaaggaagccagata

SEQ ID NO: 59044 - DNA, 40 bp, Homo sapiens
atctggcttccttttataagagatttttaggttttataca

SEQ ID NO: 59045 - DNA, 40 bp, Homo sapiens
tgtataaaacctaaaaatctcttataaaaggaagccagat

SEQ ID NO: 59046 - DNA, 40 bp, Homo sapiens
tctggcttccttttataagagatttttaggttttatacag

SEQ ID NO: 59047 - DNA, 40 bp, Homo sapiens
ctgtataaaacctaaaaatctcttataaaaggaagccaga

SEQ ID NO: 59048 - DNA, 40 bp, Homo sapiens
ctggcttccttttataagagatttttaggttttatacagt

SEQ ID NO: 59049 - DNA, 40 bp, Homo sapiens
actgtataaaacctaaaaatctcttataaaaggaagccag

SEQ ID NO: 59050 - DNA, 40 bp, Homo sapiens
tggcttccttttataagagatttttaggttttatacagtt

SEQ ID NO: 59051 - DNA, 40 bp, Homo sapiens
aactgtataaaacctaaaaatctcttataaaaggaagcca

SEQ ID NO: 59052 - DNA, 40 bp, Homo sapiens
ggcttccttttataagagatttttaggttttatacagttt

SEQ ID NO: 59053 - DNA, 40 bp, Homo sapiens
aaactgtataaaacctaaaaatctcttataaaaggaagcc

SEQ ID NO: 59054 - DNA, 40 bp, Homo sapiens
gcttccttttataagagatttttaggttttatacagtttt

SEQ ID NO: 59055 - DNA, 40 bp, Homo sapiens
aaaactgtataaaacctaaaaatctcttataaaaggaagc

SEQ ID NO: 59056 - DNA, 40 bp, Homo sapiens
cttccttttataagagatttttaggttttatacagttttg

SEQ ID NO: 59057 - DNA, 40 bp, Homo sapiens
caaaactgtataaaacctaaaaatctcttataaaaggaag

SEQ ID NO: 59058 - DNA, 40 bp, Homo sapiens
ttccttttataagagatttttaggttttatacagttttgt

SEQ ID NO: 59059 - DNA, 40 bp, Homo sapiens
acaaaactgtataaaacctaaaaatctcttataaaaggaa

SEQ ID NO: 59060 - DNA, 40 bp, Homo sapiens
tccttttataagagatttttaggttttatacagttttgtg

SEQ ID NO: 59061 - DNA, 40 bp, Homo sapiens
cacaaaactgtataaaacctaaaaatctcttataaaagga

SEQ ID NO: 59062 - DNA, 40 bp, Homo sapiens
ccttttataagagatttttaggttttatacagttttgtgg

SEQ ID NO: 59063 - DNA, 40 bp, Homo sapiens
ccacaaaactgtataaaacctaaaaatctcttataaaagg

SEQ ID NO: 59064 - DNA, 40 bp, Homo sapiens
cttttataagagatttttaggttttatacagttttgtggc

SEQ ID NO: 59065 - DNA, 40 bp, Homo sapiens
gccacaaaactgtataaaacctaaaaatctcttataaaag

SEQ ID NO: 59066 - DNA, 40 bp, Homo sapiens
ttttataagagatttttaggttttatacagttttgtggcc

SEQ ID NO: 59067 - DNA, 40 bp, Homo sapiens
ggccacaaaactgtataaaacctaaaaatctcttataaaa

SEQ ID NO: 59068 - DNA, 40 bp, Homo sapiens
tttataagagatttttaggttttatacagttttgtggcct

SEQ ID NO: 59069 - DNA, 40 bp, Homo sapiens
aggccacaaaactgtataaaacctaaaaatctcttataaa

SEQ ID NO: 59070 - DNA, 40 bp, Homo sapiens
ttataagagatttttaggttttatacagttttgtggcctt

SEQ ID NO: 59071 - DNA, 40 bp, Homo sapiens
aaggccacaaaactgtataaaacctaaaaatctcttataa

SEQ ID NO: 59072 - DNA, 40 bp, Homo sapiens
tataagagatttttaggttttatacagttttgtggccttg

SEQ ID NO: 59073 - DNA, 40 bp, Homo sapiens
caaggccacaaaactgtataaaacctaaaaatctcttata

SEQ ID NO: 59074 - DNA, 40 bp, Homo sapiens
ataagagatttttaggttttatacagttttgtggccttgg

SEQ ID NO: 59075 - DNA, 40 bp, Homo sapiens
ccaaggccacaaaactgtataaaacctaaaaatctcttat

SEQ ID NO: 59076 - DNA, 40 bp, Homo sapiens
taagagatttttaggttttatacagttttgtggccttggg

SEQ ID NO: 59077 - DNA, 40 bp, Homo sapiens
cccaaggccacaaaactgtataaaacctaaaaatctctta

SEQ ID NO: 59078 - DNA, 40 bp, Homo sapiens
aagagatttttaggttttatacagttttgtggccttgggt

SEQ ID NO: 59079 - DNA, 40 bp, Homo sapiens
acccaaggccacaaaactgtataaaacctaaaaatctctt

SEQ ID NO: 59080 - DNA, 40 bp, Homo sapiens
agagatttttaggttttatacagttttgtggccttgggtt

SEQ ID NO: 59081 - DNA, 40 bp, Homo sapiens
aacccaaggccacaaaactgtataaaacctaaaaatctct

SEQ ID NO: 59082 - DNA, 40 bp, Homo sapiens
gagatttttaggttttatacagttttgtggccttgggttt

SEQ ID NO: 59083 - DNA, 40 bp, Homo sapiens
aaacccaaggccacaaaactgtataaaacctaaaaatctc

SEQ ID NO: 59084 - DNA, 40 bp, Homo sapiens
agatttttaggttttatacagttttgtggccttgggtttt

SEQ ID NO: 59085 - DNA, 40 bp, Homo sapiens
aaaacccaaggccacaaaactgtataaaacctaaaaatct

SEQ ID NO: 59086 - DNA, 40 bp, Homo sapiens
gatttttaggttttatacagttttgtggccttgggttttt

SEQ ID NO: 59087 - DNA, 40 bp, Homo sapiens
aaaaacccaaggccacaaaactgtataaaacctaaaaatc

SEQ ID NO: 59088 - DNA, 40 bp, Homo sapiens
atttttaggttttatacagttttgtggccttgggtttttt

SEQ ID NO: 59089 - DNA, 40 bp, Homo sapiens
aaaaaacccaaggccacaaaactgtataaaacctaaaaat

SEQ ID NO: 59090 - DNA, 40 bp, Homo sapiens
tttttaggttttatacagttttgtggccttgggttttttt

SEQ ID NO: 59091 - DNA, 40 bp, Homo sapiens
aaaaaaacccaaggccacaaaactgtataaaacctaaaaa

SEQ ID NO: 59092 - DNA, 40 bp, Homo sapiens
ttttaggttttatacagttttgtggccttgggtttttttg

SEQ ID NO: 59093 - DNA, 40 bp, Homo sapiens
caaaaaaacccaaggccacaaaactgtataaaacctaaaa

SEQ ID NO: 59094 - DNA, 40 bp, Homo sapiens
tttaggttttatacagttttgtggccttgggtttttttgt

SEQ ID NO: 59095 - DNA, 40 bp, Homo sapiens
acaaaaaaacccaaggccacaaaactgtataaaacctaaa

SEQ ID NO: 59096 - DNA, 40 bp, Homo sapiens
ttaggttttatacagttttgtggccttgggtttttttgtt

SEQ ID NO: 59097 - DNA, 40 bp, Homo sapiens
aacaaaaaaacccaaggccacaaaactgtataaaacctaa

SEQ ID NO: 59098 - DNA, 40 bp, Homo sapiens
taggttttatacagttttgtggccttgggtttttttgttt

SEQ ID NO: 59099 - DNA, 40 bp, Homo sapiens
aaacaaaaaaacccaaggccacaaaactgtataaaaccta

SEQ ID NO: 59100 - DNA, 40 bp, Homo sapiens
aggttttatacagttttgtggccttgggtttttttgtttg

SEQ ID NO: 59101 - DNA, 40 bp, Homo sapiens
caaacaaaaaaacccaaggccacaaaactgtataaaacct

SEQ ID NO: 59102 - DNA, 40 bp, Homo sapiens
ggttttatacagttttgtggccttgggtttttttgtttga

SEQ ID NO: 59103 - DNA, 40 bp, Homo sapiens
tcaaacaaaaaaacccaaggccacaaaactgtataaaacc

SEQ ID NO: 59104 - DNA, 40 bp, Homo sapiens
gttttatacagttttgtggccttgggtttttttgtttgat

SEQ ID NO: 59105 - DNA, 40 bp, Homo sapiens
atcaaacaaaaaaacccaaggccacaaaactgtataaaac

SEQ ID NO: 59106 - DNA, 40 bp, Homo sapiens
ttttatacagttttgtggccttgggtttttttgtttgatt

SEQ ID NO: 59107 - DNA, 40 bp, Homo sapiens
aatcaaacaaaaaaacccaaggccacaaaactgtataaaa

SEQ ID NO: 59108 - DNA, 40 bp, Homo sapiens
tttatacagttttgtggccttgggtttttttgtttgattt

SEQ ID NO: 59109 - DNA, 40 bp, Homo sapiens
aaatcaaacaaaaaaacccaaggccacaaaactgtataaa

SEQ ID NO: 59110 - DNA, 40 bp, Homo sapiens
ttatacagttttgtggccttgggtttttttgtttgatttg

SEQ ID NO: 59111 - DNA, 40 bp, Homo sapiens
caaatcaaacaaaaaaacccaaggccacaaaactgtataa

SEQ ID NO: 59112 - DNA, 40 bp, Homo sapiens
tatacagttttgtggccttgggtttttttgtttgatttgt

SEQ ID NO: 59113 - DNA, 40 bp, Homo sapiens
acaaatcaaacaaaaaaacccaaggccacaaaactgtata

SEQ ID NO: 59114 - DNA, 40 bp, Homo sapiens
atacagttttgtggccttgggtttttttgtttgatttgtt

SEQ ID NO: 59115 - DNA, 40 bp, Homo sapiens
aacaaatcaaacaaaaaaacccaaggccacaaaactgtat

SEQ ID NO: 59116 - DNA, 40 bp, Homo sapiens
tacagttttgtggccttgggtttttttgtttgatttgttt

SEQ ID NO: 59117 - DNA, 40 bp, Homo sapiens
aaacaaatcaaacaaaaaaacccaaggccacaaaactgta

SEQ ID NO: 59118 - DNA, 40 bp, Homo sapiens
acagttttgtggccttgggtttttttgtttgatttgtttt

SEQ ID NO: 59119 - DNA, 40 bp, Homo sapiens
aaaacaaatcaaacaaaaaaacccaaggccacaaaactgt

SEQ ID NO: 59120 - DNA, 40 bp, Homo sapiens
cagttttgtggccttgggtttttttgtttgatttgttttt

SEQ ID NO: 59121 - DNA, 40 bp, Homo sapiens
aaaaacaaatcaaacaaaaaaacccaaggccacaaaactg

SEQ ID NO: 59122 - DNA, 40 bp, Homo sapiens
agttttgtggccttgggtttttttgtttgatttgtttttt

SEQ ID NO: 59123 - DNA, 40 bp, Homo sapiens
aaaaaacaaatcaaacaaaaaaacccaaggccacaaaact

SEQ ID NO: 59124 - DNA, 40 bp, Homo sapiens
gttttgtggccttgggtttttttgtttgatttgttttttt

SEQ ID NO: 59125 - DNA, 40 bp, Homo sapiens
aaaaaaacaaatcaaacaaaaaaacccaaggccacaaaac

SEQ ID NO: 59126 - DNA, 40 bp, Homo sapiens
ttttgtggccttgggtttttttgtttgatttgtttttttg

SEQ ID NO: 59127 - DNA, 40 bp, Homo sapiens
caaaaaaacaaatcaaacaaaaaaacccaaggccacaaaa

SEQ ID NO: 59128 - DNA, 40 bp, Homo sapiens
tttgtggccttgggtttttttgtttgatttgtttttttga

SEQ ID NO: 59129 - DNA, 40 bp, Homo sapiens
tcaaaaaaacaaatcaaacaaaaaaacccaaggccacaaa

SEQ ID NO: 59130 - DNA, 40 bp, Homo sapiens
ttgtggccttgggtttttttgtttgatttgtttttttgaa

SEQ ID NO: 59131 - DNA, 40 bp, Homo sapiens
ttcaaaaaaacaaatcaaacaaaaaaacccaaggccacaa

SEQ ID NO: 59132 - DNA, 40 bp, Homo sapiens
tgtggccttgggtttttttgtttgatttgtttttttgaag

SEQ ID NO: 59133 - DNA, 40 bp, Homo sapiens
cttcaaaaaaacaaatcaaacaaaaaaacccaaggccaca

SEQ ID NO: 59134 - DNA, 40 bp, Homo sapiens
gtggccttgggtttttttgtttgatttgtttttttgaagg

SEQ ID NO: 59135 - DNA, 40 bp, Homo sapiens
ccttcaaaaaaacaaatcaaacaaaaaaacccaaggccac

SEQ ID NO: 59136 - DNA, 40 bp, Homo sapiens
tggccttgggtttttttgtttgatttgtttttttgaaggt

SEQ ID NO: 59137 - DNA, 40 bp, Homo sapiens
accttcaaaaaaacaaatcaaacaaaaaaacccaaggcca

SEQ ID NO: 59138 - DNA, 40 bp, Homo sapiens
ggccttgggtttttttgtttgatttgtttttttgaaggta

SEQ ID NO: 59139 - DNA, 40 bp, Homo sapiens
taccttcaaaaaaacaaatcaaacaaaaaaacccaaggcc

SEQ ID NO: 59140 - DNA, 40 bp, Homo sapiens
gccttgggtttttttgtttgatttgtttttttgaaggtat

SEQ ID NO: 59141 - DNA, 40 bp, Homo sapiens
ataccttcaaaaaaacaaatcaaacaaaaaaacccaaggc

SEQ ID NO: 59142 - DNA, 40 bp, Homo sapiens
ccttgggtttttttgtttgatttgtttttttgaaggtata

SEQ ID NO: 59143 - DNA, 40 bp, Homo sapiens
tataccttcaaaaaaacaaatcaaacaaaaaaacccaagg

SEQ ID NO: 59144 - DNA, 40 bp, Homo sapiens
cttgggtttttttgtttgatttgtttttttgaaggtatat

SEQ ID NO: 59145 - DNA, 40 bp, Homo sapiens
atataccttcaaaaaaacaaatcaaacaaaaaaacccaag

SEQ ID NO: 59146 - DNA, 40 bp, Homo sapiens
ttgggtttttttgtttgatttgtttttttgaaggtatata

SEQ ID NO: 59147 - DNA, 40 bp, Homo sapiens
tatataccttcaaaaaaacaaatcaaacaaaaaaacccaa

SEQ ID NO: 59148 - DNA, 40 bp, Homo sapiens
tgggtttttttgtttgatttgtttttttgaaggtatataa

SEQ ID NO: 59149 - DNA, 40 bp, Homo sapiens
ttatataccttcaaaaaaacaaatcaaacaaaaaaaccca

SEQ ID NO: 59150 - DNA, 40 bp, Homo sapiens
gggtttttttgtttgatttgtttttttgaaggtatataat

SEQ ID NO: 59151 - DNA, 40 bp, Homo sapiens
attatataccttcaaaaaaacaaatcaaacaaaaaaaccc

SEQ ID NO: 59152 - DNA, 40 bp, Homo sapiens
ggtttttttgtttgatttgtttttttgaaggtatataata

SEQ ID NO: 59153 - DNA, 40 bp, Homo sapiens
tattatataccttcaaaaaaacaaatcaaacaaaaaaacc

SEQ ID NO: 59154 - DNA, 40 bp, Homo sapiens
gtttttttgtttgatttgtttttttgaaggtatataatat

SEQ ID NO: 59155 - DNA, 40 bp, Homo sapiens
atattatataccttcaaaaaaacaaatcaaacaaaaaaac

SEQ ID NO: 59156 - DNA, 40 bp, Homo sapiens
tttttttgtttgatttgtttttttgaaggtatataatatg

SEQ ID NO: 59157 - DNA, 40 bp, Homo sapiens
catattatataccttcaaaaaaacaaatcaaacaaaaaaa

SEQ ID NO: 59158 - DNA, 40 bp, Homo sapiens
ttttttgtttgatttgtttttttgaaggtatataatatgt

SEQ ID NO: 59159 - DNA, 40 bp, Homo sapiens
acatattatataccttcaaaaaaacaaatcaaacaaaaaa

SEQ ID NO: 59160 - DNA, 40 bp, Homo sapiens
tttttgtttgatttgtttttttgaaggtatataatatgta

SEQ ID NO: 59161 - DNA, 40 bp, Homo sapiens
tacatattatataccttcaaaaaaacaaatcaaacaaaaa

SEQ ID NO: 59162 - DNA, 40 bp, Homo sapiens
ttttgtttgatttgtttttttgaaggtatataatatgtaa

SEQ ID NO: 59163 - DNA, 40 bp, Homo sapiens
ttacatattatataccttcaaaaaaacaaatcaaacaaaa

SEQ ID NO: 59164 - DNA, 40 bp, Homo sapiens
tttgtttgatttgtttttttgaaggtatataatatgtaag

SEQ ID NO: 59165 - DNA, 40 bp, Homo sapiens
cttacatattatataccttcaaaaaaacaaatcaaacaaa

SEQ ID NO: 59166 - DNA, 40 bp, Homo sapiens
ttgtttgatttgtttttttgaaggtatataatatgtaagt

SEQ ID NO: 59167 - DNA, 40 bp, Homo sapiens
acttacatattatataccttcaaaaaaacaaatcaaacaa

SEQ ID NO: 59168 - DNA, 40 bp, Homo sapiens
tgtttgatttgtttttttgaaggtatataatatgtaagta

SEQ ID NO: 59169 - DNA, 40 bp, Homo sapiens
tacttacatattatataccttcaaaaaaacaaatcaaaca

SEQ ID NO: 59170 - DNA, 40 bp, Homo sapiens
gtttgatttgtttttttgaaggtatataatatgtaagtag

SEQ ID NO: 59171 - DNA, 40 bp, Homo sapiens
ctacttacatattatataccttcaaaaaaacaaatcaaac

SEQ ID NO: 59172 - DNA, 40 bp, Homo sapiens
tttgatttgtttttttgaaggtatataatatgtaagtaga

SEQ ID NO: 59173 - DNA, 40 bp, Homo sapiens
tctacttacatattatataccttcaaaaaaacaaatcaaa

SEQ ID NO: 59174 - DNA, 40 bp, Homo sapiens
ttgatttgtttttttgaaggtatataatatgtaagtagat

SEQ ID NO: 59175 - DNA, 40 bp, Homo sapiens
atctacttacatattatataccttcaaaaaaacaaatcaa

SEQ ID NO: 59176 - DNA, 40 bp, Homo sapiens
tgatttgtttttttgaaggtatataatatgtaagtagata

SEQ ID NO: 59177 - DNA, 40 bp, Homo sapiens
tatctacttacatattatataccttcaaaaaaacaaatca

SEQ ID NO: 59178 - DNA, 40 bp, Homo sapiens
gatttgtttttttgaaggtatataatatgtaagtagataa

SEQ ID NO: 59179 - DNA, 40 bp, Homo sapiens
ttatctacttacatattatataccttcaaaaaaacaaatc

SEQ ID NO: 59180 - DNA, 40 bp, Homo sapiens
atttgtttttttgaaggtatataatatgtaagtagataaa

SEQ ID NO: 59181 - DNA, 40 bp, Homo sapiens
tttatctacttacatattatataccttcaaaaaaacaaat

SEQ ID NO: 59182 - DNA, 40 bp, Homo sapiens
tttgtttttttgaaggtatataatatgtaagtagataaac

SEQ ID NO: 59183 - DNA, 40 bp, Homo sapiens
gtttatctacttacatattatataccttcaaaaaaacaaa

SEQ ID NO: 59184 - DNA, 40 bp, Homo sapiens
ttgtttttttgaaggtatataatatgtaagtagataaaca

SEQ ID NO: 59185 - DNA, 40 bp, Homo sapiens
tgtttatctacttacatattatataccttcaaaaaaacaa

SEQ ID NO: 59186 - DNA, 40 bp, Homo sapiens
tgtttttttgaaggtatataatatgtaagtagataaacaa

SEQ ID NO: 59187 - DNA, 40 bp, Homo sapiens
ttgtttatctacttacatattatataccttcaaaaaaaca

SEQ ID NO: 59188 - DNA, 40 bp, Homo sapiens
gtttttttgaaggtatataatatgtaagtagataaacaaa

SEQ ID NO: 59189 - DNA, 40 bp, Homo sapiens
tttgtttatctacttacatattatataccttcaaaaaaac

SEQ ID NO: 59190 - DNA, 40 bp, Homo sapiens
tttttttgaaggtatataatatgtaagtagataaacaaat

SEQ ID NO: 59191 - DNA, 40 bp, Homo sapiens
atttgtttatctacttacatattatataccttcaaaaaaa

SEQ ID NO: 59192 - DNA, 40 bp, Homo sapiens
ttttttgaaggtatataatatgtaagtagataaacaaatt

SEQ ID NO: 59193 - DNA, 40 bp, Homo sapiens
aatttgtttatctacttacatattatataccttcaaaaaa

SEQ ID NO: 59194 - DNA, 40 bp, Homo sapiens
tttttgaaggtatataatatgtaagtagataaacaaattt

SEQ ID NO: 59195 - DNA, 40 bp, Homo sapiens
aaatttgtttatctacttacatattatataccttcaaaaa

SEQ ID NO: 59196 - DNA, 40 bp, Homo sapiens
ttttgaaggtatataatatgtaagtagataaacaaatttg

SEQ ID NO: 59197 - DNA, 40 bp, Homo sapiens
caaatttgtttatctacttacatattatataccttcaaaa

SEQ ID NO: 59198 - DNA, 40 bp, Homo sapiens
tttgaaggtatataatatgtaagtagataaacaaatttga

SEQ ID NO: 59199 - DNA, 40 bp, Homo sapiens
tcaaatttgtttatctacttacatattatataccttcaaa

SEQ ID NO: 59200 - DNA, 40 bp, Homo sapiens
ttgaaggtatataatatgtaagtagataaacaaatttgat

SEQ ID NO: 59201 - DNA, 40 bp, Homo sapiens
atcaaatttgtttatctacttacatattatataccttcaa

SEQ ID NO: 59202 - DNA, 40 bp, Homo sapiens
tgaaggtatataatatgtaagtagataaacaaatttgatt

SEQ ID NO: 59203 - DNA, 40 bp, Homo sapiens
aatcaaatttgtttatctacttacatattatataccttca

SEQ ID NO: 59204 - DNA, 40 bp, Homo sapiens
gaaggtatataatatgtaagtagataaacaaatttgattt

SEQ ID NO: 59205 - DNA, 40 bp, Homo sapiens
aaatcaaatttgtttatctacttacatattatataccttc

SEQ ID NO: 59206 - DNA, 40 bp, Homo sapiens
aaggtatataatatgtaagtagataaacaaatttgatttg

SEQ ID NO: 59207 - DNA, 40 bp, Homo sapiens
caaatcaaatttgtttatctacttacatattatatacctt

SEQ ID NO: 59208 - DNA, 40 bp, Homo sapiens
aggtatataatatgtaagtagataaacaaatttgatttgt

SEQ ID NO: 59209 - DNA, 40 bp, Homo sapiens
acaaatcaaatttgtttatctacttacatattatatacct

SEQ ID NO: 59210 - DNA, 40 bp, Homo sapiens
ggtatataatatgtaagtagataaacaaatttgatttgta

SEQ ID NO: 59211 - DNA, 40 bp, Homo sapiens
tacaaatcaaatttgtttatctacttacatattatatacc

SEQ ID NO: 59212 - DNA, 40 bp, Homo sapiens
gtatataatatgtaagtagataaacaaatttgatttgtag

SEQ ID NO: 59213 - DNA, 40 bp, Homo sapiens
ctacaaatcaaatttgtttatctacttacatattatatac

SEQ ID NO: 59214 - DNA, 40 bp, Homo sapiens
tatataatatgtaagtagataaacaaatttgatttgtaga

SEQ ID NO: 59215 - DNA, 40 bp, Homo sapiens
tctacaaatcaaatttgtttatctacttacatattatata

SEQ ID NO: 59216 - DNA, 40 bp, Homo sapiens
atataatatgtaagtagataaacaaatttgatttgtagac

SEQ ID NO: 59217 - DNA, 40 bp, Homo sapiens
gtctacaaatcaaatttgtttatctacttacatattatat

SEQ ID NO: 59218 - DNA, 40 bp, Homo sapiens
tataatatgtaagtagataaacaaatttgatttgtagaca

SEQ ID NO: 59219 - DNA, 40 bp, Homo sapiens
tgtctacaaatcaaatttgtttatctacttacatattata

SEQ ID NO: 59220 - DNA, 40 bp, Homo sapiens
ataatatgtaagtagataaacaaatttgatttgtagacat

SEQ ID NO: 59221 - DNA, 40 bp, Homo sapiens
atgtctacaaatcaaatttgtttatctacttacatattat

SEQ ID NO: 59222 - DNA, 40 bp, Homo sapiens
taatatgtaagtagataaacaaatttgatttgtagacatt

SEQ ID NO: 59223 - DNA, 40 bp, Homo sapiens
aatgtctacaaatcaaatttgtttatctacttacatatta

SEQ ID NO: 59224 - DNA, 40 bp, Homo sapiens
aatatgtaagtagataaacaaatttgatttgtagacattt

SEQ ID NO: 59225 - DNA, 40 bp, Homo sapiens
aaatgtctacaaatcaaatttgtttatctacttacatatt

SEQ ID NO: 59226 - DNA, 40 bp, Homo sapiens
atatgtaagtagataaacaaatttgatttgtagacatttt

SEQ ID NO: 59227 - DNA, 40 bp, Homo sapiens
aaaatgtctacaaatcaaatttgtttatctacttacatat

SEQ ID NO: 59228 - DNA, 40 bp, Homo sapiens
tatgtaagtagataaacaaatttgatttgtagacattttt

SEQ ID NO: 59229 - DNA, 40 bp, Homo sapiens
aaaaatgtctacaaatcaaatttgtttatctacttacata

SEQ ID NO: 59230 - DNA, 40 bp, Homo sapiens
atgtaagtagataaacaaatttgatttgtagacattttta

SEQ ID NO: 59231 - DNA, 40 bp, Homo sapiens
taaaaatgtctacaaatcaaatttgtttatctacttacat

SEQ ID NO: 59232 - DNA, 40 bp, Homo sapiens
tgtaagtagataaacaaatttgatttgtagacatttttat

SEQ ID NO: 59233 - DNA, 40 bp, Homo sapiens
ataaaaatgtctacaaatcaaatttgtttatctacttaca

SEQ ID NO: 59234 - DNA, 40 bp, Homo sapiens
gtaagtagataaacaaatttgatttgtagacatttttatg

SEQ ID NO: 59235 - DNA, 40 bp, Homo sapiens
cataaaaatgtctacaaatcaaatttgtttatctacttac

SEQ ID NO: 59236 - DNA, 40 bp, Homo sapiens
taagtagataaacaaatttgatttgtagacatttttatgt

SEQ ID NO: 59237 - DNA, 40 bp, Homo sapiens
acataaaaatgtctacaaatcaaatttgtttatctactta

SEQ ID NO: 59238 - DNA, 40 bp, Homo sapiens
aagtagataaacaaatttgatttgtagacatttttatgtg

SEQ ID NO: 59239 - DNA, 40 bp, Homo sapiens
cacataaaaatgtctacaaatcaaatttgtttatctactt

SEQ ID NO: 59240 - DNA, 40 bp, Homo sapiens
agtagataaacaaatttgatttgtagacatttttatgtgg

SEQ ID NO: 59241 - DNA, 40 bp, Homo sapiens
ccacataaaaatgtctacaaatcaaatttgtttatctact

SEQ ID NO: 59242 - DNA, 40 bp, Homo sapiens
gtagataaacaaatttgatttgtagacatttttatgtgga

SEQ ID NO: 59243 - DNA, 40 bp, Homo sapiens
tccacataaaaatgtctacaaatcaaatttgtttatctac

SEQ ID NO: 59244 - DNA, 40 bp, Homo sapiens
tagataaacaaatttgatttgtagacatttttatgtggat

SEQ ID NO: 59245 - DNA, 40 bp, Homo sapiens
atccacataaaaatgtctacaaatcaaatttgtttatcta

SEQ ID NO: 59246 - DNA, 40 bp, Homo sapiens
agataaacaaatttgatttgtagacatttttatgtggatc

SEQ ID NO: 59247 - DNA, 40 bp, Homo sapiens
gatccacataaaaatgtctacaaatcaaatttgtttatct

SEQ ID NO: 59248 - DNA, 40 bp, Homo sapiens
gataaacaaatttgatttgtagacatttttatgtggatca

SEQ ID NO: 59249 - DNA, 40 bp, Homo sapiens
tgatccacataaaaatgtctacaaatcaaatttgtttatc

SEQ ID NO: 59250 - DNA, 40 bp, Homo sapiens
ataaacaaatttgatttgtagacatttttatgtggatcat

SEQ ID NO: 59251 - DNA, 40 bp, Homo sapiens
atgatccacataaaaatgtctacaaatcaaatttgtttat

SEQ ID NO: 59252 - DNA, 40 bp, Homo sapiens
taaacaaatttgatttgtagacatttttatgtggatcatc

SEQ ID NO: 59253 - DNA, 40 bp, Homo sapiens
gatgatccacataaaaatgtctacaaatcaaatttgttta

SEQ ID NO: 59254 - DNA, 40 bp, Homo sapiens
aaacaaatttgatttgtagacatttttatgtggatcatct

SEQ ID NO: 59255 - DNA, 40 bp, Homo sapiens
agatgatccacataaaaatgtctacaaatcaaatttgttt

SEQ ID NO: 59256 - DNA, 40 bp, Homo sapiens
aacaaatttgatttgtagacatttttatgtggatcatcta

SEQ ID NO: 59257 - DNA, 40 bp, Homo sapiens
tagatgatccacataaaaatgtctacaaatcaaatttgtt

SEQ ID NO: 59258 - DNA, 40 bp, Homo sapiens
acaaatttgatttgtagacatttttatgtggatcatctaa

SEQ ID NO: 59259 - DNA, 40 bp, Homo sapiens
ttagatgatccacataaaaatgtctacaaatcaaatttgt

SEQ ID NO: 59260 - DNA, 40 bp, Homo sapiens
caaatttgatttgtagacatttttatgtggatcatctaat

SEQ ID NO: 59261 - DNA, 40 bp, Homo sapiens
attagatgatccacataaaaatgtctacaaatcaaatttg

SEQ ID NO: 59262 - DNA, 40 bp, Homo sapiens
aaatttgatttgtagacatttttatgtggatcatctaatt

SEQ ID NO: 59263 - DNA, 40 bp, Homo sapiens
aattagatgatccacataaaaatgtctacaaatcaaattt

SEQ ID NO: 59264 - DNA, 40 bp, Homo sapiens
aatttgatttgtagacatttttatgtggatcatctaatta

SEQ ID NO: 59265 - DNA, 40 bp, Homo sapiens
taattagatgatccacataaaaatgtctacaaatcaaatt

SEQ ID NO: 59266 - DNA, 40 bp, Homo sapiens
atttgatttgtagacatttttatgtggatcatctaattaa

SEQ ID NO: 59267 - DNA, 40 bp, Homo sapiens
ttaattagatgatccacataaaaatgtctacaaatcaaat

SEQ ID NO: 59268 - DNA, 40 bp, Homo sapiens
tttgatttgtagacatttttatgtggatcatctaattaaa

SEQ ID NO: 59269 - DNA, 40 bp, Homo sapiens
tttaattagatgatccacataaaaatgtctacaaatcaaa

SEQ ID NO: 59270 - DNA, 40 bp, Homo sapiens
ttgatttgtagacatttttatgtggatcatctaattaaaa

SEQ ID NO: 59271 - DNA, 40 bp, Homo sapiens
ttttaattagatgatccacataaaaatgtctacaaatcaa

SEQ ID NO: 59272 - DNA, 40 bp, Homo sapiens
tgatttgtagacatttttatgtggatcatctaattaaaaa

SEQ ID NO: 59273 - DNA, 40 bp, Homo sapiens
tttttaattagatgatccacataaaaatgtctacaaatca

SEQ ID NO: 59274 - DNA, 40 bp, Homo sapiens
gatttgtagacatttttatgtggatcatctaattaaaaat

SEQ ID NO: 59275 - DNA, 40 bp, Homo sapiens
atttttaattagatgatccacataaaaatgtctacaaatc

SEQ ID NO: 59276 - DNA, 40 bp, Homo sapiens
atttgtagacatttttatgtggatcatctaattaaaaatg

SEQ ID NO: 59277 - DNA, 40 bp, Homo sapiens
catttttaattagatgatccacataaaaatgtctacaaat

SEQ ID NO: 59278 - DNA, 40 bp, Homo sapiens
tttgtagacatttttatgtggatcatctaattaaaaatgg

SEQ ID NO: 59279 - DNA, 40 bp, Homo sapiens
ccatttttaattagatgatccacataaaaatgtctacaaa

SEQ ID NO: 59280 - DNA, 40 bp, Homo sapiens
ttgtagacatttttatgtggatcatctaattaaaaatgga

SEQ ID NO: 59281 - DNA, 40 bp, Homo sapiens
tccatttttaattagatgatccacataaaaatgtctacaa

SEQ ID NO: 59282 - DNA, 40 bp, Homo sapiens
tgtagacatttttatgtggatcatctaattaaaaatggag

SEQ ID NO: 59283 - DNA, 40 bp, Homo sapiens
ctccatttttaattagatgatccacataaaaatgtctaca

SEQ ID NO: 59284 - DNA, 40 bp, Homo sapiens
gtagacatttttatgtggatcatctaattaaaaatggagg

SEQ ID NO: 59285 - DNA, 40 bp, Homo sapiens
cctccatttttaattagatgatccacataaaaatgtctac

SEQ ID NO: 59286 - DNA, 40 bp, Homo sapiens
tagacatttttatgtggatcatctaattaaaaatggaggg

SEQ ID NO: 59287 - DNA, 40 bp, Homo sapiens
ccctccatttttaattagatgatccacataaaaatgtcta

SEQ ID NO: 59288 - DNA, 40 bp, Homo sapiens
agacatttttatgtggatcatctaattaaaaatggaggga

SEQ ID NO: 59289 - DNA, 40 bp, Homo sapiens
tccctccatttttaattagatgatccacataaaaatgtct

SEQ ID NO: 59290 - DNA, 40 bp, Homo sapiens
gacatttttatgtggatcatctaattaaaaatggagggat

SEQ ID NO: 59291 - DNA, 40 bp, Homo sapiens
atccctccatttttaattagatgatccacataaaaatgtc

SEQ ID NO: 59292 - DNA, 40 bp, Homo sapiens
acatttttatgtggatcatctaattaaaaatggagggata

SEQ ID NO: 59293 - DNA, 40 bp, Homo sapiens
tatccctccatttttaattagatgatccacataaaaatgt

SEQ ID NO: 59294 - DNA, 40 bp, Homo sapiens
catttttatgtggatcatctaattaaaaatggagggatac

SEQ ID NO: 59295 - DNA, 40 bp, Homo sapiens
gtatccctccatttttaattagatgatccacataaaaatg

SEQ ID NO: 59296 - DNA, 40 bp, Homo sapiens
atttttatgtggatcatctaattaaaaatggagggataca

SEQ ID NO: 59297 - DNA, 40 bp, Homo sapiens
tgtatccctccatttttaattagatgatccacataaaaat

SEQ ID NO: 59298 - DNA, 40 bp, Homo sapiens
tttttatgtggatcatctaattaaaaatggagggatacag

SEQ ID NO: 59299 - DNA, 40 bp, Homo sapiens
ctgtatccctccatttttaattagatgatccacataaaaa

SEQ ID NO: 59300 - DNA, 40 bp, Homo sapiens
ttttatgtggatcatctaattaaaaatggagggatacagt

SEQ ID NO: 59301 - DNA, 40 bp, Homo sapiens
actgtatccctccatttttaattagatgatccacataaaa

SEQ ID NO: 59302 - DNA, 40 bp, Homo sapiens
tttatgtggatcatctaattaaaaatggagggatacagta

SEQ ID NO: 59303 - DNA, 40 bp, Homo sapiens
tactgtatccctccatttttaattagatgatccacataaa

SEQ ID NO: 59304 - DNA, 40 bp, Homo sapiens
ttatgtggatcatctaattaaaaatggagggatacagtat

SEQ ID NO: 59305 - DNA, 40 bp, Homo sapiens
atactgtatccctccatttttaattagatgatccacataa

SEQ ID NO: 59306 - DNA, 40 bp, Homo sapiens
tatgtggatcatctaattaaaaatggagggatacagtatg

SEQ ID NO: 59307 - DNA, 40 bp, Homo sapiens
catactgtatccctccatttttaattagatgatccacata

SEQ ID NO: 59308 - DNA, 40 bp, Homo sapiens
atgtggatcatctaattaaaaatggagggatacagtatga

SEQ ID NO: 59309 - DNA, 40 bp, Homo sapiens
tcatactgtatccctccatttttaattagatgatccacat

SEQ ID NO: 59310 - DNA, 40 bp, Homo sapiens
tgtggatcatctaattaaaaatggagggatacagtatgaa

SEQ ID NO: 59311 - DNA, 40 bp, Homo sapiens
ttcatactgtatccctccatttttaattagatgatccaca

SEQ ID NO: 59312 - DNA, 40 bp, Homo sapiens
gtggatcatctaattaaaaatggagggatacagtatgaaa

SEQ ID NO: 59313 - DNA, 40 bp, Homo sapiens
tttcatactgtatccctccatttttaattagatgatccac

SEQ ID NO: 59314 - DNA, 40 bp, Homo sapiens
tggatcatctaattaaaaatggagggatacagtatgaaag

SEQ ID NO: 59315 - DNA, 40 bp, Homo sapiens
ctttcatactgtatccctccatttttaattagatgatcca

SEQ ID NO: 59316 - DNA, 40 bp, Homo sapiens
ggatcatctaattaaaaatggagggatacagtatgaaaga

SEQ ID NO: 59317 - DNA, 40 bp, Homo sapiens
tctttcatactgtatccctccatttttaattagatgatcc

SEQ ID NO: 59318 - DNA, 40 bp, Homo sapiens
gatcatctaattaaaaatggagggatacagtatgaaagaa

SEQ ID NO: 59319 - DNA, 40 bp, Homo sapiens
ttctttcatactgtatccctccatttttaattagatgatc

SEQ ID NO: 59320 - DNA, 40 bp, Homo sapiens
atcatctaattaaaaatggagggatacagtatgaaagaat

SEQ ID NO: 59321 - DNA, 40 bp, Homo sapiens
attctttcatactgtatccctccatttttaattagatgat

SEQ ID NO: 59322 - DNA, 40 bp, Homo sapiens
tcatctaattaaaaatggagggatacagtatgaaagaata

SEQ ID NO: 59323 - DNA, 40 bp, Homo sapiens
tattctttcatactgtatccctccatttttaattagatga

SEQ ID NO: 59324 - DNA, 40 bp, Homo sapiens
catctaattaaaaatggagggatacagtatgaaagaatac

SEQ ID NO: 59325 - DNA, 40 bp, Homo sapiens
gtattctttcatactgtatccctccatttttaattagatg

SEQ ID NO: 59326 - DNA, 40 bp, Homo sapiens
atctaattaaaaatggagggatacagtatgaaagaatact

SEQ ID NO: 59327 - DNA, 40 bp, Homo sapiens
agtattctttcatactgtatccctccatttttaattagat

SEQ ID NO: 59328 - DNA, 40 bp, Homo sapiens
tctaattaaaaatggagggatacagtatgaaagaatactt

SEQ ID NO: 59329 - DNA, 40 bp, Homo sapiens
aagtattctttcatactgtatccctccatttttaattaga

SEQ ID NO: 59330 - DNA, 40 bp, Homo sapiens
ctaattaaaaatggagggatacagtatgaaagaatacttg

SEQ ID NO: 59331 - DNA, 40 bp, Homo sapiens
caagtattctttcatactgtatccctccatttttaattag

SEQ ID NO: 59332 - DNA, 40 bp, Homo sapiens
taattaaaaatggagggatacagtatgaaagaatacttgt

SEQ ID NO: 59333 - DNA, 40 bp, Homo sapiens
acaagtattctttcatactgtatccctccatttttaatta

SEQ ID NO: 59334 - DNA, 40 bp, Homo sapiens
aattaaaaatggagggatacagtatgaaagaatacttgta

SEQ ID NO: 59335 - DNA, 40 bp, Homo sapiens
tacaagtattctttcatactgtatccctccatttttaatt

SEQ ID NO: 59336 - DNA, 40 bp, Homo sapiens
attaaaaatggagggatacagtatgaaagaatacttgtac

SEQ ID NO: 59337 - DNA, 40 bp, Homo sapiens
gtacaagtattctttcatactgtatccctccatttttaat

SEQ ID NO: 59338 - DNA, 40 bp, Homo sapiens
ttaaaaatggagggatacagtatgaaagaatacttgtact

SEQ ID NO: 59339 - DNA, 40 bp, Homo sapiens
agtacaagtattctttcatactgtatccctccatttttaa

SEQ ID NO: 59340 - DNA, 40 bp, Homo sapiens
taaaaatggagggatacagtatgaaagaatacttgtactt

SEQ ID NO: 59341 - DNA, 40 bp, Homo sapiens
aagtacaagtattctttcatactgtatccctccattttta

SEQ ID NO: 59342 - DNA, 40 bp, Homo sapiens
aaaaatggagggatacagtatgaaagaatacttgtacttc

SEQ ID NO: 59343 - DNA, 40 bp, Homo sapiens
gaagtacaagtattctttcatactgtatccctccattttt

SEQ ID NO: 59344 - DNA, 40 bp, Homo sapiens
aaaatggagggatacagtatgaaagaatacttgtacttct

SEQ ID NO: 59345 - DNA, 40 bp, Homo sapiens
agaagtacaagtattctttcatactgtatccctccatttt

SEQ ID NO: 59346 - DNA, 40 bp, Homo sapiens
aaatggagggatacagtatgaaagaatacttgtacttctt

SEQ ID NO: 59347 - DNA, 40 bp, Homo sapiens
aagaagtacaagtattctttcatactgtatccctccattt

SEQ ID NO: 59348 - DNA, 40 bp, Homo sapiens
aatggagggatacagtatgaaagaatacttgtacttctta

SEQ ID NO: 59349 - DNA, 40 bp, Homo sapiens
taagaagtacaagtattctttcatactgtatccctccatt

SEQ ID NO: 59350 - DNA, 40 bp, Homo sapiens
atggagggatacagtatgaaagaatacttgtacttcttaa

SEQ ID NO: 59351 - DNA, 40 bp, Homo sapiens
ttaagaagtacaagtattctttcatactgtatccctccat

SEQ ID NO: 59352 - DNA, 40 bp, Homo sapiens
tggagggatacagtatgaaagaatacttgtacttcttaac

SEQ ID NO: 59353 - DNA, 40 bp, Homo sapiens
gttaagaagtacaagtattctttcatactgtatccctcca

SEQ ID NO: 59354 - DNA, 40 bp, Homo sapiens
ggagggatacagtatgaaagaatacttgtacttcttaaca

SEQ ID NO: 59355 - DNA, 40 bp, Homo sapiens
tgttaagaagtacaagtattctttcatactgtatccctcc

SEQ ID NO: 59356 - DNA, 40 bp, Homo sapiens
gagggatacagtatgaaagaatacttgtacttcttaacag

SEQ ID NO: 59357 - DNA, 40 bp, Homo sapiens
ctgttaagaagtacaagtattctttcatactgtatccctc

SEQ ID NO: 59358 - DNA, 40 bp, Homo sapiens
agggatacagtatgaaagaatacttgtacttcttaacaga

SEQ ID NO: 59359 - DNA, 40 bp, Homo sapiens
tctgttaagaagtacaagtattctttcatactgtatccct

SEQ ID NO: 59360 - DNA, 40 bp, Homo sapiens
gggatacagtatgaaagaatacttgtacttcttaacagag

SEQ ID NO: 59361 - DNA, 40 bp, Homo sapiens
ctctgttaagaagtacaagtattctttcatactgtatccc

SEQ ID NO: 59362 - DNA, 40 bp, Homo sapiens
ggatacagtatgaaagaatacttgtacttcttaacagagc

SEQ ID NO: 59363 - DNA, 40 bp, Homo sapiens
gctctgttaagaagtacaagtattctttcatactgtatcc

SEQ ID NO: 59364 - DNA, 40 bp, Homo sapiens
gatacagtatgaaagaatacttgtacttcttaacagagca

SEQ ID NO: 59365 - DNA, 40 bp, Homo sapiens
tgctctgttaagaagtacaagtattctttcatactgtatc

SEQ ID NO: 59366 - DNA, 40 bp, Homo sapiens
atacagtatgaaagaatacttgtacttcttaacagagcac

SEQ ID NO: 59367 - DNA, 40 bp, Homo sapiens
gtgctctgttaagaagtacaagtattctttcatactgtat

SEQ ID NO: 59368 - DNA, 40 bp, Homo sapiens
tacagtatgaaagaatacttgtacttcttaacagagcact

SEQ ID NO: 59369 - DNA, 40 bp, Homo sapiens
agtgctctgttaagaagtacaagtattctttcatactgta

SEQ ID NO: 59370 - DNA, 40 bp, Homo sapiens
acagtatgaaagaatacttgtacttcttaacagagcactc

SEQ ID NO: 59371 - DNA, 40 bp, Homo sapiens
gagtgctctgttaagaagtacaagtattctttcatactgt

SEQ ID NO: 59372 - DNA, 40 bp, Homo sapiens
cagtatgaaagaatacttgtacttcttaacagagcactca

SEQ ID NO: 59373 - DNA, 40 bp, Homo sapiens
tgagtgctctgttaagaagtacaagtattctttcatactg

SEQ ID NO: 59374 - DNA, 40 bp, Homo sapiens
agtatgaaagaatacttgtacttcttaacagagcactcaa

SEQ ID NO: 59375 - DNA, 40 bp, Homo sapiens
ttgagtgctctgttaagaagtacaagtattctttcatact

SEQ ID NO: 59376 - DNA, 40 bp, Homo sapiens
gtatgaaagaatacttgtacttcttaacagagcactcaac

SEQ ID NO: 59377 - DNA, 40 bp, Homo sapiens
gttgagtgctctgttaagaagtacaagtattctttcatac

SEQ ID NO: 59378 - DNA, 40 bp, Homo sapiens
tatgaaagaatacttgtacttcttaacagagcactcaacc

SEQ ID NO: 59379 - DNA, 40 bp, Homo sapiens
ggttgagtgctctgttaagaagtacaagtattctttcata

SEQ ID NO: 59380 - DNA, 40 bp, Homo sapiens
atgaaagaatacttgtacttcttaacagagcactcaacct

SEQ ID NO: 59381 - DNA, 40 bp, Homo sapiens
aggttgagtgctctgttaagaagtacaagtattctttcat

SEQ ID NO: 59382 - DNA, 40 bp, Homo sapiens
tgaaagaatacttgtacttcttaacagagcactcaacctt

SEQ ID NO: 59383 - DNA, 40 bp, Homo sapiens
aaggttgagtgctctgttaagaagtacaagtattctttca

SEQ ID NO: 59384 - DNA, 40 bp, Homo sapiens
gaaagaatacttgtacttcttaacagagcactcaaccttt

SEQ ID NO: 59385 - DNA, 40 bp, Homo sapiens
aaaggttgagtgctctgttaagaagtacaagtattctttc

SEQ ID NO: 59386 - DNA, 40 bp, Homo sapiens
aaagaatacttgtacttcttaacagagcactcaacctttc

SEQ ID NO: 59387 - DNA, 40 bp, Homo sapiens
gaaaggttgagtgctctgttaagaagtacaagtattcttt

SEQ ID NO: 59388 - DNA, 40 bp, Homo sapiens
aagaatacttgtacttcttaacagagcactcaacctttct

SEQ ID NO: 59389 - DNA, 40 bp, Homo sapiens
agaaaggttgagtgctctgttaagaagtacaagtattctt

SEQ ID NO: 59390 - DNA, 40 bp, Homo sapiens
agaatacttgtacttcttaacagagcactcaacctttctt

SEQ ID NO: 59391 - DNA, 40 bp, Homo sapiens
aagaaaggttgagtgctctgttaagaagtacaagtattct

SEQ ID NO: 59392 - DNA, 40 bp, Homo sapiens
gaatacttgtacttcttaacagagcactcaacctttcttt

SEQ ID NO: 59393 - DNA, 40 bp, Homo sapiens
aaagaaaggttgagtgctctgttaagaagtacaagtattc

SEQ ID NO: 59394 - DNA, 40 bp, Homo sapiens
aatacttgtacttcttaacagagcactcaacctttctttt

SEQ ID NO: 59395 - DNA, 40 bp, Homo sapiens
aaaagaaaggttgagtgctctgttaagaagtacaagtatt

SEQ ID NO: 59396 - DNA, 40 bp, Homo sapiens
atacttgtacttcttaacagagcactcaacctttctttta

SEQ ID NO: 59397 - DNA, 40 bp, Homo sapiens
taaaagaaaggttgagtgctctgttaagaagtacaagtat

SEQ ID NO: 59398 - DNA, 40 bp, Homo sapiens
tacttgtacttcttaacagagcactcaacctttcttttac

SEQ ID NO: 59399 - DNA, 40 bp, Homo sapiens
gtaaaagaaaggttgagtgctctgttaagaagtacaagta

SEQ ID NO: 59400 - DNA, 40 bp, Homo sapiens
acttgtacttcttaacagagcactcaacctttcttttaca

SEQ ID NO: 59401 - DNA, 40 bp, Homo sapiens
tgtaaaagaaaggttgagtgctctgttaagaagtacaagt

SEQ ID NO: 59402 - DNA, 40 bp, Homo sapiens
cttgtacttcttaacagagcactcaacctttcttttacat

SEQ ID NO: 59403 - DNA, 40 bp, Homo sapiens
atgtaaaagaaaggttgagtgctctgttaagaagtacaag

SEQ ID NO: 59404 - DNA, 40 bp, Homo sapiens
ttgtacttcttaacagagcactcaacctttcttttacatc

SEQ ID NO: 59405 - DNA, 40 bp, Homo sapiens
gatgtaaaagaaaggttgagtgctctgttaagaagtacaa

SEQ ID NO: 59406 - DNA, 40 bp, Homo sapiens
tgtacttcttaacagagcactcaacctttcttttacatcc

SEQ ID NO: 59407 - DNA, 40 bp, Homo sapiens
ggatgtaaaagaaaggttgagtgctctgttaagaagtaca

SEQ ID NO: 59408 - DNA, 40 bp, Homo sapiens
gtacttcttaacagagcactcaacctttcttttacatcct

SEQ ID NO: 59409 - DNA, 40 bp, Homo sapiens
aggatgtaaaagaaaggttgagtgctctgttaagaagtac

SEQ ID NO: 59410 - DNA, 40 bp, Homo sapiens
tacttcttaacagagcactcaacctttcttttacatcctg

SEQ ID NO: 59411 - DNA, 40 bp, Homo sapiens
caggatgtaaaagaaaggttgagtgctctgttaagaagta

SEQ ID NO: 59412 - DNA, 40 bp, Homo sapiens
acttcttaacagagcactcaacctttcttttacatcctgt

SEQ ID NO: 59413 - DNA, 40 bp, Homo sapiens
acaggatgtaaaagaaaggttgagtgctctgttaagaagt

SEQ ID NO: 59414 - DNA, 40 bp, Homo sapiens
cttcttaacagagcactcaacctttcttttacatcctgtt

SEQ ID NO: 59415 - DNA, 40 bp, Homo sapiens
aacaggatgtaaaagaaaggttgagtgctctgttaagaag

SEQ ID NO: 59416 - DNA, 40 bp, Homo sapiens
ttcttaacagagcactcaacctttcttttacatcctgttt

SEQ ID NO: 59417 - DNA, 40 bp, Homo sapiens
aaacaggatgtaaaagaaaggttgagtgctctgttaagaa

SEQ ID NO: 59418 - DNA, 40 bp, Homo sapiens
tcttaacagagcactcaacctttcttttacatcctgtttc

SEQ ID NO: 59419 - DNA, 40 bp, Homo sapiens
gaaacaggatgtaaaagaaaggttgagtgctctgttaaga

SEQ ID NO: 59420 - DNA, 40 bp, Homo sapiens
cttaacagagcactcaacctttcttttacatcctgtttca

SEQ ID NO: 59421 - DNA, 40 bp, Homo sapiens
tgaaacaggatgtaaaagaaaggttgagtgctctgttaag

SEQ ID NO: 59422 - DNA, 40 bp, Homo sapiens
ttaacagagcactcaacctttcttttacatcctgtttcac

SEQ ID NO: 59423 - DNA, 40 bp, Homo sapiens
gtgaaacaggatgtaaaagaaaggttgagtgctctgttaa

SEQ ID NO: 59424 - DNA, 40 bp, Homo sapiens
taacagagcactcaacctttcttttacatcctgtttcact

SEQ ID NO: 59425 - DNA, 40 bp, Homo sapiens
agtgaaacaggatgtaaaagaaaggttgagtgctctgtta

SEQ ID NO: 59426 - DNA, 40 bp, Homo sapiens
aacagagcactcaacctttcttttacatcctgtttcactg

SEQ ID NO: 59427 - DNA, 40 bp, Homo sapiens
cagtgaaacaggatgtaaaagaaaggttgagtgctctgtt

SEQ ID NO: 59428 - DNA, 40 bp, Homo sapiens
acagagcactcaacctttcttttacatcctgtttcactga

SEQ ID NO: 59429 - DNA, 40 bp, Homo sapiens
tcagtgaaacaggatgtaaaagaaaggttgagtgctctgt

SEQ ID NO: 59430 - DNA, 40 bp, Homo sapiens
cagagcactcaacctttcttttacatcctgtttcactgat

SEQ ID NO: 59431 - DNA, 40 bp, Homo sapiens
atcagtgaaacaggatgtaaaagaaaggttgagtgctctg

SEQ ID NO: 59432 - DNA, 40 bp, Homo sapiens
agagcactcaacctttcttttacatcctgtttcactgatg

SEQ ID NO: 59433 - DNA, 40 bp, Homo sapiens
catcagtgaaacaggatgtaaaagaaaggttgagtgctct

SEQ ID NO: 59434 - DNA, 40 bp, Homo sapiens
gagcactcaacctttcttttacatcctgtttcactgatgt

SEQ ID NO: 59435 - DNA, 40 bp, Homo sapiens
acatcagtgaaacaggatgtaaaagaaaggttgagtgctc

SEQ ID NO: 59436 - DNA, 40 bp, Homo sapiens
agcactcaacctttcttttacatcctgtttcactgatgtt

SEQ ID NO: 59437 - DNA, 40 bp, Homo sapiens
aacatcagtgaaacaggatgtaaaagaaaggttgagtgct

SEQ ID NO: 59438 - DNA, 40 bp, Homo sapiens
gcactcaacctttcttttacatcctgtttcactgatgtta

SEQ ID NO: 59439 - DNA, 40 bp, Homo sapiens
taacatcagtgaaacaggatgtaaaagaaaggttgagtgc

SEQ ID NO: 59440 - DNA, 40 bp, Homo sapiens
cactcaacctttcttttacatcctgtttcactgatgttat

SEQ ID NO: 59441 - DNA, 40 bp, Homo sapiens
ataacatcagtgaaacaggatgtaaaagaaaggttgagtg

SEQ ID NO: 59442 - DNA, 40 bp, Homo sapiens
actcaacctttcttttacatcctgtttcactgatgttatt

SEQ ID NO: 59443 - DNA, 40 bp, Homo sapiens
aataacatcagtgaaacaggatgtaaaagaaaggttgagt

SEQ ID NO: 59444 - DNA, 40 bp, Homo sapiens
ctcaacctttcttttacatcctgtttcactgatgttatta

SEQ ID NO: 59445 - DNA, 40 bp, Homo sapiens
taataacatcagtgaaacaggatgtaaaagaaaggttgag

SEQ ID NO: 59446 - DNA, 40 bp, Homo sapiens
tcaacctttcttttacatcctgtttcactgatgttattat

SEQ ID NO: 59447 - DNA, 40 bp, Homo sapiens
ataataacatcagtgaaacaggatgtaaaagaaaggttga

SEQ ID NO: 59448 - DNA, 40 bp, Homo sapiens
caacctttcttttacatcctgtttcactgatgttattatg

SEQ ID NO: 59449 - DNA, 40 bp, Homo sapiens
cataataacatcagtgaaacaggatgtaaaagaaaggttg

SEQ ID NO: 59450 - DNA, 40 bp, Homo sapiens
aacctttcttttacatcctgtttcactgatgttattatgt

SEQ ID NO: 59451 - DNA, 40 bp, Homo sapiens
acataataacatcagtgaaacaggatgtaaaagaaaggtt

SEQ ID NO: 59452 - DNA, 40 bp, Homo sapiens
acctttcttttacatcctgtttcactgatgttattatgta

SEQ ID NO: 59453 - DNA, 40 bp, Homo sapiens
tacataataacatcagtgaaacaggatgtaaaagaaaggt

SEQ ID NO: 59454 - DNA, 40 bp, Homo sapiens
cctttcttttacatcctgtttcactgatgttattatgtaa

SEQ ID NO: 59455 - DNA, 40 bp, Homo sapiens
ttacataataacatcagtgaaacaggatgtaaaagaaagg

SEQ ID NO: 59456 - DNA, 40 bp, Homo sapiens
ctttcttttacatcctgtttcactgatgttattatgtaat

SEQ ID NO: 59457 - DNA, 40 bp, Homo sapiens
attacataataacatcagtgaaacaggatgtaaaagaaag

SEQ ID NO: 59458 - DNA, 40 bp, Homo sapiens
tttcttttacatcctgtttcactgatgttattatgtaatt

SEQ ID NO: 59459 - DNA, 40 bp, Homo sapiens
aattacataataacatcagtgaaacaggatgtaaaagaaa

SEQ ID NO: 59460 - DNA, 40 bp, Homo sapiens
ttcttttacatcctgtttcactgatgttattatgtaattt

SEQ ID NO: 59461 - DNA, 40 bp, Homo sapiens
aaattacataataacatcagtgaaacaggatgtaaaagaa

SEQ ID NO: 59462 - DNA, 40 bp, Homo sapiens
tcttttacatcctgtttcactgatgttattatgtaattta

SEQ ID NO: 59463 - DNA, 40 bp, Homo sapiens
taaattacataataacatcagtgaaacaggatgtaaaaga

SEQ ID NO: 59464 - DNA, 40 bp, Homo sapiens
cttttacatcctgtttcactgatgttattatgtaatttat

SEQ ID NO: 59465 - DNA, 40 bp, Homo sapiens
ataaattacataataacatcagtgaaacaggatgtaaaag

SEQ ID NO: 59466 - DNA, 40 bp, Homo sapiens
ttttacatcctgtttcactgatgttattatgtaatttatg

SEQ ID NO: 59467 - DNA, 40 bp, Homo sapiens
cataaattacataataacatcagtgaaacaggatgtaaaa

SEQ ID NO: 59468 - DNA, 40 bp, Homo sapiens
tttacatcctgtttcactgatgttattatgtaatttatgt

SEQ ID NO: 59469 - DNA, 40 bp, Homo sapiens
acataaattacataataacatcagtgaaacaggatgtaaa

SEQ ID NO: 59470 - DNA, 40 bp, Homo sapiens
ttacatcctgtttcactgatgttattatgtaatttatgtt

SEQ ID NO: 59471 - DNA, 40 bp, Homo sapiens
aacataaattacataataacatcagtgaaacaggatgtaa

SEQ ID NO: 59472 - DNA, 40 bp, Homo sapiens
tacatcctgtttcactgatgttattatgtaatttatgttg

SEQ ID NO: 59473 - DNA, 40 bp, Homo sapiens
caacataaattacataataacatcagtgaaacaggatgta

SEQ ID NO: 59474 - DNA, 40 bp, Homo sapiens
acatcctgtttcactgatgttattatgtaatttatgttgc

SEQ ID NO: 59475 - DNA, 40 bp, Homo sapiens
gcaacataaattacataataacatcagtgaaacaggatgt

SEQ ID NO: 59476 - DNA, 40 bp, Homo sapiens
catcctgtttcactgatgttattatgtaatttatgttgct

SEQ ID NO: 59477 - DNA, 40 bp, Homo sapiens
agcaacataaattacataataacatcagtgaaacaggatg

SEQ ID NO: 59478 - DNA, 40 bp, Homo sapiens
atcctgtttcactgatgttattatgtaatttatgttgcta

SEQ ID NO: 59479 - DNA, 40 bp, Homo sapiens
tagcaacataaattacataataacatcagtgaaacaggat

SEQ ID NO: 59480 - DNA, 40 bp, Homo sapiens
tcctgtttcactgatgttattatgtaatttatgttgctaa

SEQ ID NO: 59481 - DNA, 40 bp, Homo sapiens
ttagcaacataaattacataataacatcagtgaaacagga

SEQ ID NO: 59482 - DNA, 40 bp, Homo sapiens
cctgtttcactgatgttattatgtaatttatgttgctaaa

SEQ ID NO: 59483 - DNA, 40 bp, Homo sapiens
tttagcaacataaattacataataacatcagtgaaacagg

SEQ ID NO: 59484 - DNA, 40 bp, Homo sapiens
ctgtttcactgatgttattatgtaatttatgttgctaaac

SEQ ID NO: 59485 - DNA, 40 bp, Homo sapiens
gtttagcaacataaattacataataacatcagtgaaacag

SEQ ID NO: 59486 - DNA, 40 bp, Homo sapiens
tgtttcactgatgttattatgtaatttatgttgctaaact

SEQ ID NO: 59487 - DNA, 40 bp, Homo sapiens
agtttagcaacataaattacataataacatcagtgaaaca

SEQ ID NO: 59488 - DNA, 40 bp, Homo sapiens
gtttcactgatgttattatgtaatttatgttgctaaacta

SEQ ID NO: 59489 - DNA, 40 bp, Homo sapiens
tagtttagcaacataaattacataataacatcagtgaaac

SEQ ID NO: 59490 - DNA, 40 bp, Homo sapiens
tttcactgatgttattatgtaatttatgttgctaaactat

SEQ ID NO: 59491 - DNA, 40 bp, Homo sapiens
atagtttagcaacataaattacataataacatcagtgaaa

SEQ ID NO: 59492 - DNA, 40 bp, Homo sapiens
ttcactgatgttattatgtaatttatgttgctaaactata

SEQ ID NO: 59493 - DNA, 40 bp, Homo sapiens
tatagtttagcaacataaattacataataacatcagtgaa

SEQ ID NO: 59494 - DNA, 40 bp, Homo sapiens
tcactgatgttattatgtaatttatgttgctaaactataa

SEQ ID NO: 59495 - DNA, 40 bp, Homo sapiens
ttatagtttagcaacataaattacataataacatcagtga

SEQ ID NO: 59496 - DNA, 40 bp, Homo sapiens
cactgatgttattatgtaatttatgttgctaaactataaa

SEQ ID NO: 59497 - DNA, 40 bp, Homo sapiens
tttatagtttagcaacataaattacataataacatcagtg

SEQ ID NO: 59498 - DNA, 40 bp, Homo sapiens
actgatgttattatgtaatttatgttgctaaactataaat

SEQ ID NO: 59499 - DNA, 40 bp, Homo sapiens
atttatagtttagcaacataaattacataataacatcagt

SEQ ID NO: 59500 - DNA, 40 bp, Homo sapiens
ctgatgttattatgtaatttatgttgctaaactataaatt

SEQ ID NO: 59501 - DNA, 40 bp, Homo sapiens
aatttatagtttagcaacataaattacataataacatcag

SEQ ID NO: 59502 - DNA, 40 bp, Homo sapiens
tgatgttattatgtaatttatgttgctaaactataaatta

SEQ ID NO: 59503 - DNA, 40 bp, Homo sapiens
taatttatagtttagcaacataaattacataataacatca

SEQ ID NO: 59504 - DNA, 40 bp, Homo sapiens
gatgttattatgtaatttatgttgctaaactataaattag

SEQ ID NO: 59505 - DNA, 40 bp, Homo sapiens
ctaatttatagtttagcaacataaattacataataacatc

SEQ ID NO: 59506 - DNA, 40 bp, Homo sapiens
atgttattatgtaatttatgttgctaaactataaattaga

SEQ ID NO: 59507 - DNA, 40 bp, Homo sapiens
tctaatttatagtttagcaacataaattacataataacat

SEQ ID NO: 59508 - DNA, 40 bp, Homo sapiens
tgttattatgtaatttatgttgctaaactataaattagat

SEQ ID NO: 59509 - DNA, 40 bp, Homo sapiens
atctaatttatagtttagcaacataaattacataataaca

SEQ ID NO: 59510 - DNA, 40 bp, Homo sapiens
gttattatgtaatttatgttgctaaactataaattagata

SEQ ID NO: 59511 - DNA, 40 bp, Homo sapiens
tatctaatttatagtttagcaacataaattacataataac

SEQ ID NO: 59512 - DNA, 40 bp, Homo sapiens
ttattatgtaatttatgttgctaaactataaattagatat

SEQ ID NO: 59513 - DNA, 40 bp, Homo sapiens
atatctaatttatagtttagcaacataaattacataataa

SEQ ID NO: 59514 - DNA, 40 bp, Homo sapiens
tattatgtaatttatgttgctaaactataaattagatatt

SEQ ID NO: 59515 - DNA, 40 bp, Homo sapiens
aatatctaatttatagtttagcaacataaattacataata

SEQ ID NO: 59516 - DNA, 40 bp, Homo sapiens
attatgtaatttatgttgctaaactataaattagatattt

SEQ ID NO: 59517 - DNA, 40 bp, Homo sapiens
aaatatctaatttatagtttagcaacataaattacataat

SEQ ID NO: 59518 - DNA, 40 bp, Homo sapiens
ttatgtaatttatgttgctaaactataaattagatattta

SEQ ID NO: 59519 - DNA, 40 bp, Homo sapiens
taaatatctaatttatagtttagcaacataaattacataa

SEQ ID NO: 59520 - DNA, 40 bp, Homo sapiens
tatgtaatttatgttgctaaactataaattagatatttaa

SEQ ID NO: 59521 - DNA, 40 bp, Homo sapiens
ttaaatatctaatttatagtttagcaacataaattacata

SEQ ID NO: 59522 - DNA, 40 bp, Homo sapiens
atgtaatttatgttgctaaactataaattagatatttaat

SEQ ID NO: 59523 - DNA, 40 bp, Homo sapiens
attaaatatctaatttatagtttagcaacataaattacat

SEQ ID NO: 59524 - DNA, 40 bp, Homo sapiens
tgtaatttatgttgctaaactataaattagatatttaatt

SEQ ID NO: 59525 - DNA, 40 bp, Homo sapiens
aattaaatatctaatttatagtttagcaacataaattaca

SEQ ID NO: 59526 - DNA, 40 bp, Homo sapiens
gtaatttatgttgctaaactataaattagatatttaattt

SEQ ID NO: 59527 - DNA, 40 bp, Homo sapiens
aaattaaatatctaatttatagtttagcaacataaattac

SEQ ID NO: 59528 - DNA, 40 bp, Homo sapiens
taatttatgttgctaaactataaattagatatttaatttc

SEQ ID NO: 59529 - DNA, 40 bp, Homo sapiens
gaaattaaatatctaatttatagtttagcaacataaatta

SEQ ID NO: 59530 - DNA, 40 bp, Homo sapiens
aatttatgttgctaaactataaattagatatttaatttct

SEQ ID NO: 59531 - DNA, 40 bp, Homo sapiens
agaaattaaatatctaatttatagtttagcaacataaatt

SEQ ID NO: 59532 - DNA, 40 bp, Homo sapiens
atttatgttgctaaactataaattagatatttaatttctg

SEQ ID NO: 59533 - DNA, 40 bp, Homo sapiens
cagaaattaaatatctaatttatagtttagcaacataaat

SEQ ID NO: 59534 - DNA, 40 bp, Homo sapiens
tttatgttgctaaactataaattagatatttaatttctgt

SEQ ID NO: 59535 - DNA, 40 bp, Homo sapiens
acagaaattaaatatctaatttatagtttagcaacataaa

SEQ ID NO: 59536 - DNA, 40 bp, Homo sapiens
ttatgttgctaaactataaattagatatttaatttctgtt

SEQ ID NO: 59537 - DNA, 40 bp, Homo sapiens
aacagaaattaaatatctaatttatagtttagcaacataa

SEQ ID NO: 59538 - DNA, 40 bp, Homo sapiens
tatgttgctaaactataaattagatatttaatttctgttc

SEQ ID NO: 59539 - DNA, 40 bp, Homo sapiens
gaacagaaattaaatatctaatttatagtttagcaacata

SEQ ID NO: 59540 - DNA, 40 bp, Homo sapiens
atgttgctaaactataaattagatatttaatttctgttct

SEQ ID NO: 59541 - DNA, 40 bp, Homo sapiens
agaacagaaattaaatatctaatttatagtttagcaacat

SEQ ID NO: 59542 - DNA, 40 bp, Homo sapiens
tgttgctaaactataaattagatatttaatttctgttctt

SEQ ID NO: 59543 - DNA, 40 bp, Homo sapiens
aagaacagaaattaaatatctaatttatagtttagcaaca

SEQ ID NO: 59544 - DNA, 40 bp, Homo sapiens
gttgctaaactataaattagatatttaatttctgttcttt

SEQ ID NO: 59545 - DNA, 40 bp, Homo sapiens
aaagaacagaaattaaatatctaatttatagtttagcaac

SEQ ID NO: 59546 - DNA, 40 bp, Homo sapiens
ttgctaaactataaattagatatttaatttctgttctttg

SEQ ID NO: 59547 - DNA, 40 bp, Homo sapiens
caaagaacagaaattaaatatctaatttatagtttagcaa

SEQ ID NO: 59548 - DNA, 40 bp, Homo sapiens
tgctaaactataaattagatatttaatttctgttctttga

SEQ ID NO: 59549 - DNA, 40 bp, Homo sapiens
tcaaagaacagaaattaaatatctaatttatagtttagca

SEQ ID NO: 59550 - DNA, 40 bp, Homo sapiens
gctaaactataaattagatatttaatttctgttctttgat

SEQ ID NO: 59551 - DNA, 40 bp, Homo sapiens
atcaaagaacagaaattaaatatctaatttatagtttagc

SEQ ID NO: 59552 - DNA, 40 bp, Homo sapiens
ctaaactataaattagatatttaatttctgttctttgatt

SEQ ID NO: 59553 - DNA, 40 bp, Homo sapiens
aatcaaagaacagaaattaaatatctaatttatagtttag

SEQ ID NO: 59554 - DNA, 40 bp, Homo sapiens
taaactataaattagatatttaatttctgttctttgattt

SEQ ID NO: 59555 - DNA, 40 bp, Homo sapiens
aaatcaaagaacagaaattaaatatctaatttatagttta

SEQ ID NO: 59556 - DNA, 40 bp, Homo sapiens
aaactataaattagatatttaatttctgttctttgatttc

SEQ ID NO: 59557 - DNA, 40 bp, Homo sapiens
gaaatcaaagaacagaaattaaatatctaatttatagttt

SEQ ID NO: 59558 - DNA, 40 bp, Homo sapiens
aactataaattagatatttaatttctgttctttgatttcc

SEQ ID NO: 59559 - DNA, 40 bp, Homo sapiens
ggaaatcaaagaacagaaattaaatatctaatttatagtt

SEQ ID NO: 59560 - DNA, 40 bp, Homo sapiens
actataaattagatatttaatttctgttctttgatttcct

SEQ ID NO: 59561 - DNA, 40 bp, Homo sapiens
aggaaatcaaagaacagaaattaaatatctaatttatagt

SEQ ID NO: 59562 - DNA, 40 bp, Homo sapiens
ctataaattagatatttaatttctgttctttgatttcctt

SEQ ID NO: 59563 - DNA, 40 bp, Homo sapiens
aaggaaatcaaagaacagaaattaaatatctaatttatag

SEQ ID NO: 59564 - DNA, 40 bp, Homo sapiens
tataaattagatatttaatttctgttctttgatttccttt

SEQ ID NO: 59565 - DNA, 40 bp, Homo sapiens
aaaggaaatcaaagaacagaaattaaatatctaatttata

SEQ ID NO: 59566 - DNA, 40 bp, Homo sapiens
ataaattagatatttaatttctgttctttgatttcctttt

SEQ ID NO: 59567 - DNA, 40 bp, Homo sapiens
aaaaggaaatcaaagaacagaaattaaatatctaatttat

SEQ ID NO: 59568 - DNA, 40 bp, Homo sapiens
taaattagatatttaatttctgttctttgatttcctttta

SEQ ID NO: 59569 - DNA, 40 bp, Homo sapiens
taaaaggaaatcaaagaacagaaattaaatatctaattta

SEQ ID NO: 59570 - DNA, 40 bp, Homo sapiens
aaattagatatttaatttctgttctttgatttccttttat

SEQ ID NO: 59571 - DNA, 40 bp, Homo sapiens
ataaaaggaaatcaaagaacagaaattaaatatctaattt

SEQ ID NO: 59572 - DNA, 40 bp, Homo sapiens
aattagatatttaatttctgttctttgatttccttttatt

SEQ ID NO: 59573 - DNA, 40 bp, Homo sapiens
aataaaaggaaatcaaagaacagaaattaaatatctaatt

SEQ ID NO: 59574 - DNA, 40 bp, Homo sapiens
attagatatttaatttctgttctttgatttccttttatta

SEQ ID NO: 59575 - DNA, 40 bp, Homo sapiens
taataaaaggaaatcaaagaacagaaattaaatatctaat

SEQ ID NO: 59576 - DNA, 40 bp, Homo sapiens
ttagatatttaatttctgttctttgatttccttttattat

SEQ ID NO: 59577 - DNA, 40 bp, Homo sapiens
ataataaaaggaaatcaaagaacagaaattaaatatctaa

SEQ ID NO: 59578 - DNA, 40 bp, Homo sapiens
tagatatttaatttctgttctttgatttccttttattatt

SEQ ID NO: 59579 - DNA, 40 bp, Homo sapiens
aataataaaaggaaatcaaagaacagaaattaaatatcta

SEQ ID NO: 59580 - DNA, 40 bp, Homo sapiens
agatatttaatttctgttctttgatttccttttattatta

SEQ ID NO: 59581 - DNA, 40 bp, Homo sapiens
taataataaaaggaaatcaaagaacagaaattaaatatct

SEQ ID NO: 59582 - DNA, 40 bp, Homo sapiens
gatatttaatttctgttctttgatttccttttattattaa

SEQ ID NO: 59583 - DNA, 40 bp, Homo sapiens
ttaataataaaaggaaatcaaagaacagaaattaaatatc

SEQ ID NO: 59584 - DNA, 40 bp, Homo sapiens
atatttaatttctgttctttgatttccttttattattaaa

SEQ ID NO: 59585 - DNA, 40 bp, Homo sapiens
tttaataataaaaggaaatcaaagaacagaaattaaatat

SEQ ID NO: 59586 - DNA, 40 bp, Homo sapiens
tatttaatttctgttctttgatttccttttattattaaat

SEQ ID NO: 59587 - DNA, 40 bp, Homo sapiens
atttaataataaaaggaaatcaaagaacagaaattaaata

SEQ ID NO: 59588 - DNA, 40 bp, Homo sapiens
atttaatttctgttctttgatttccttttattattaaatg

SEQ ID NO: 59589 - DNA, 40 bp, Homo sapiens
catttaataataaaaggaaatcaaagaacagaaattaaat

SEQ ID NO: 59590 - DNA, 40 bp, Homo sapiens
tttaatttctgttctttgatttccttttattattaaatgg

SEQ ID NO: 59591 - DNA, 40 bp, Homo sapiens
ccatttaataataaaaggaaatcaaagaacagaaattaaa

SEQ ID NO: 59592 - DNA, 40 bp, Homo sapiens
ttaatttctgttctttgatttccttttattattaaatgga

SEQ ID NO: 59593 - DNA, 40 bp, Homo sapiens
tccatttaataataaaaggaaatcaaagaacagaaattaa

SEQ ID NO: 59594 - DNA, 40 bp, Homo sapiens
taatttctgttctttgatttccttttattattaaatggac

SEQ ID NO: 59595 - DNA, 40 bp, Homo sapiens
gtccatttaataataaaaggaaatcaaagaacagaaatta

SEQ ID NO: 59596 - DNA, 40 bp, Homo sapiens
aatttctgttctttgatttccttttattattaaatggact

SEQ ID NO: 59597 - DNA, 40 bp, Homo sapiens
agtccatttaataataaaaggaaatcaaagaacagaaatt

SEQ ID NO: 59598 - DNA, 40 bp, Homo sapiens
atttctgttctttgatttccttttattattaaatggactt

SEQ ID NO: 59599 - DNA, 40 bp, Homo sapiens
aagtccatttaataataaaaggaaatcaaagaacagaaat

SEQ ID NO: 59600 - DNA, 40 bp, Homo sapiens
tttctgttctttgatttccttttattattaaatggacttg

SEQ ID NO: 59601 - DNA, 40 bp, Homo sapiens
caagtccatttaataataaaaggaaatcaaagaacagaaa

SEQ ID NO: 59602 - DNA, 40 bp, Homo sapiens
ttctgttctttgatttccttttattattaaatggacttgt

SEQ ID NO: 59603 - DNA, 40 bp, Homo sapiens
acaagtccatttaataataaaaggaaatcaaagaacagaa

SEQ ID NO: 59604 - DNA, 40 bp, Homo sapiens
tctgttctttgatttccttttattattaaatggacttgtt

SEQ ID NO: 59605 - DNA, 40 bp, Homo sapiens
aacaagtccatttaataataaaaggaaatcaaagaacaga

SEQ ID NO: 59606 - DNA, 40 bp, Homo sapiens
ctgttctttgatttccttttattattaaatggacttgttg

SEQ ID NO: 59607 - DNA, 40 bp, Homo sapiens
caacaagtccatttaataataaaaggaaatcaaagaacag

SEQ ID NO: 59608 - DNA, 40 bp, Homo sapiens
tgttctttgatttccttttattattaaatggacttgttga

SEQ ID NO: 59609 - DNA, 40 bp, Homo sapiens
tcaacaagtccatttaataataaaaggaaatcaaagaaca

SEQ ID NO: 59610 - DNA, 40 bp, Homo sapiens
gttctttgatttccttttattattaaatggacttgttgat

SEQ ID NO: 59611 - DNA, 40 bp, Homo sapiens
atcaacaagtccatttaataataaaaggaaatcaaagaac

SEQ ID NO: 59612 - DNA, 40 bp, Homo sapiens
ttctttgatttccttttattattaaatggacttgttgatt

SEQ ID NO: 59613 - DNA, 40 bp, Homo sapiens
aatcaacaagtccatttaataataaaaggaaatcaaagaa

SEQ ID NO: 59614 - DNA, 40 bp, Homo sapiens
tctttgatttccttttattattaaatggacttgttgattt

SEQ ID NO: 59615 - DNA, 40 bp, Homo sapiens
aaatcaacaagtccatttaataataaaaggaaatcaaaga

SEQ ID NO: 59616 - DNA, 40 bp, Homo sapiens
ctttgatttccttttattattaaatggacttgttgatttg

SEQ ID NO: 59617 - DNA, 40 bp, Homo sapiens
caaatcaacaagtccatttaataataaaaggaaatcaaag

SEQ ID NO: 59618 - DNA, 40 bp, Homo sapiens
tttgatttccttttattattaaatggacttgttgatttgc

SEQ ID NO: 59619 - DNA, 40 bp, Homo sapiens
gcaaatcaacaagtccatttaataataaaaggaaatcaaa

SEQ ID NO: 59620 - DNA, 40 bp, Homo sapiens
ttgatttccttttattattaaatggacttgttgatttgcc

SEQ ID NO: 59621 - DNA, 40 bp, Homo sapiens
ggcaaatcaacaagtccatttaataataaaaggaaatcaa

SEQ ID NO: 59622 - DNA, 40 bp, Homo sapiens
tgatttccttttattattaaatggacttgttgatttgcct

SEQ ID NO: 59623 - DNA, 40 bp, Homo sapiens
aggcaaatcaacaagtccatttaataataaaaggaaatca

SEQ ID NO: 59624 - DNA, 40 bp, Homo sapiens
gatttccttttattattaaatggacttgttgatttgccta

SEQ ID NO: 59625 - DNA, 40 bp, Homo sapiens
taggcaaatcaacaagtccatttaataataaaaggaaatc

SEQ ID NO: 59626 - DNA, 40 bp, Homo sapiens
atttccttttattattaaatggacttgttgatttgcctag

SEQ ID NO: 59627 - DNA, 40 bp, Homo sapiens
ctaggcaaatcaacaagtccatttaataataaaaggaaat

SEQ ID NO: 59628 - DNA, 40 bp, Homo sapiens
tttccttttattattaaatggacttgttgatttgcctaga

SEQ ID NO: 59629 - DNA, 40 bp, Homo sapiens
tctaggcaaatcaacaagtccatttaataataaaaggaaa

SEQ ID NO: 59630 - DNA, 40 bp, Homo sapiens
ttccttttattattaaatggacttgttgatttgcctagaa

SEQ ID NO: 59631 - DNA, 40 bp, Homo sapiens
ttctaggcaaatcaacaagtccatttaataataaaaggaa

SEQ ID NO: 59632 - DNA, 40 bp, Homo sapiens
tccttttattattaaatggacttgttgatttgcctagaaa

SEQ ID NO: 59633 - DNA, 40 bp, Homo sapiens
tttctaggcaaatcaacaagtccatttaataataaaagga

SEQ ID NO: 59634 - DNA, 40 bp, Homo sapiens
ccttttattattaaatggacttgttgatttgcctagaaat

SEQ ID NO: 59635 - DNA, 40 bp, Homo sapiens
atttctaggcaaatcaacaagtccatttaataataaaagg

SEQ ID NO: 59636 - DNA, 40 bp, Homo sapiens
cttttattattaaatggacttgttgatttgcctagaaatt

SEQ ID NO: 59637 - DNA, 40 bp, Homo sapiens
aatttctaggcaaatcaacaagtccatttaataataaaag

SEQ ID NO: 59638 - DNA, 40 bp, Homo sapiens
ttttattattaaatggacttgttgatttgcctagaaatta

SEQ ID NO: 59639 - DNA, 40 bp, Homo sapiens
taatttctaggcaaatcaacaagtccatttaataataaaa

SEQ ID NO: 59640 - DNA, 40 bp, Homo sapiens
tttattattaaatggacttgttgatttgcctagaaattaa

SEQ ID NO: 59641 - DNA, 40 bp, Homo sapiens
ttaatttctaggcaaatcaacaagtccatttaataataaa

SEQ ID NO: 59642 - DNA, 40 bp, Homo sapiens
ttattattaaatggacttgttgatttgcctagaaattaat

SEQ ID NO: 59643 - DNA, 40 bp, Homo sapiens
attaatttctaggcaaatcaacaagtccatttaataataa

SEQ ID NO: 59644 - DNA, 40 bp, Homo sapiens
tattattaaatggacttgttgatttgcctagaaattaatt

SEQ ID NO: 59645 - DNA, 40 bp, Homo sapiens
aattaatttctaggcaaatcaacaagtccatttaataata

SEQ ID NO: 59646 - DNA, 40 bp, Homo sapiens
attattaaatggacttgttgatttgcctagaaattaattt

SEQ ID NO: 59647 - DNA, 40 bp, Homo sapiens
aaattaatttctaggcaaatcaacaagtccatttaataat

SEQ ID NO: 59648 - DNA, 40 bp, Homo sapiens
ttattaaatggacttgttgatttgcctagaaattaatttg

SEQ ID NO: 59649 - DNA, 40 bp, Homo sapiens
caaattaatttctaggcaaatcaacaagtccatttaataa

SEQ ID NO: 59650 - DNA, 40 bp, Homo sapiens
tattaaatggacttgttgatttgcctagaaattaatttgc

SEQ ID NO: 59651 - DNA, 40 bp, Homo sapiens
gcaaattaatttctaggcaaatcaacaagtccatttaata

SEQ ID NO: 59652 - DNA, 40 bp, Homo sapiens
attaaatggacttgttgatttgcctagaaattaatttgcc

SEQ ID NO: 59653 - DNA, 40 bp, Homo sapiens
ggcaaattaatttctaggcaaatcaacaagtccatttaat

SEQ ID NO: 59654 - DNA, 40 bp, Homo sapiens
ttaaatggacttgttgatttgcctagaaattaatttgcct

SEQ ID NO: 59655 - DNA, 40 bp, Homo sapiens
aggcaaattaatttctaggcaaatcaacaagtccatttaa

SEQ ID NO: 59656 - DNA, 40 bp, Homo sapiens
taaatggacttgttgatttgcctagaaattaatttgcctt

SEQ ID NO: 59657 - DNA, 40 bp, Homo sapiens
aaggcaaattaatttctaggcaaatcaacaagtccattta

SEQ ID NO: 59658 - DNA, 40 bp, Homo sapiens
aaatggacttgttgatttgcctagaaattaatttgccttt

SEQ ID NO: 59659 - DNA, 40 bp, Homo sapiens
aaaggcaaattaatttctaggcaaatcaacaagtccattt

SEQ ID NO: 59660 - DNA, 40 bp, Homo sapiens
aatggacttgttgatttgcctagaaattaatttgcctttc

SEQ ID NO: 59661 - DNA, 40 bp, Homo sapiens
gaaaggcaaattaatttctaggcaaatcaacaagtccatt

SEQ ID NO: 59662 - DNA, 40 bp, Homo sapiens
atggacttgttgatttgcctagaaattaatttgcctttca

SEQ ID NO: 59663 - DNA, 40 bp, Homo sapiens
tgaaaggcaaattaatttctaggcaaatcaacaagtccat

SEQ ID NO: 59664 - DNA, 40 bp, Homo sapiens
tggacttgttgatttgcctagaaattaatttgcctttcaa

SEQ ID NO: 59665 - DNA, 40 bp, Homo sapiens
ttgaaaggcaaattaatttctaggcaaatcaacaagtcca

SEQ ID NO: 59666 - DNA, 40 bp, Homo sapiens
ggacttgttgatttgcctagaaattaatttgcctttcaaa

SEQ ID NO: 59667 - DNA, 40 bp, Homo sapiens
tttgaaaggcaaattaatttctaggcaaatcaacaagtcc

SEQ ID NO: 59668 - DNA, 40 bp, Homo sapiens
gacttgttgatttgcctagaaattaatttgcctttcaaaa

SEQ ID NO: 59669 - DNA, 40 bp, Homo sapiens
ttttgaaaggcaaattaatttctaggcaaatcaacaagtc

SEQ ID NO: 59670 - DNA, 40 bp, Homo sapiens
acttgttgatttgcctagaaattaatttgcctttcaaaag

SEQ ID NO: 59671 - DNA, 40 bp, Homo sapiens
cttttgaaaggcaaattaatttctaggcaaatcaacaagt

SEQ ID NO: 59672 - DNA, 40 bp, Homo sapiens
cttgttgatttgcctagaaattaatttgcctttcaaaagt

SEQ ID NO: 59673 - DNA, 40 bp, Homo sapiens
acttttgaaaggcaaattaatttctaggcaaatcaacaag

SEQ ID NO: 59674 - DNA, 40 bp, Homo sapiens
ttgttgatttgcctagaaattaatttgcctttcaaaagtc

SEQ ID NO: 59675 - DNA, 40 bp, Homo sapiens
gacttttgaaaggcaaattaatttctaggcaaatcaacaa

SEQ ID NO: 59676 - DNA, 40 bp, Homo sapiens
tgttgatttgcctagaaattaatttgcctttcaaaagtct

SEQ ID NO: 59677 - DNA, 40 bp, Homo sapiens
agacttttgaaaggcaaattaatttctaggcaaatcaaca

SEQ ID NO: 59678 - DNA, 40 bp, Homo sapiens
gttgatttgcctagaaattaatttgcctttcaaaagtctt

SEQ ID NO: 59679 - DNA, 40 bp, Homo sapiens
aagacttttgaaaggcaaattaatttctaggcaaatcaac

SEQ ID NO: 59680 - DNA, 40 bp, Homo sapiens
ttgatttgcctagaaattaatttgcctttcaaaagtctta

SEQ ID NO: 59681 - DNA, 40 bp, Homo sapiens
taagacttttgaaaggcaaattaatttctaggcaaatcaa

SEQ ID NO: 59682 - DNA, 40 bp, Homo sapiens
tgatttgcctagaaattaatttgcctttcaaaagtcttat

SEQ ID NO: 59683 - DNA, 40 bp, Homo sapiens
ataagacttttgaaaggcaaattaatttctaggcaaatca

SEQ ID NO: 59684 - DNA, 40 bp, Homo sapiens
gatttgcctagaaattaatttgcctttcaaaagtcttatt

SEQ ID NO: 59685 - DNA, 40 bp, Homo sapiens
aataagacttttgaaaggcaaattaatttctaggcaaatc

SEQ ID NO: 59686 - DNA, 40 bp, Homo sapiens
atttgcctagaaattaatttgcctttcaaaagtcttatta

SEQ ID NO: 59687 - DNA, 40 bp, Homo sapiens
taataagacttttgaaaggcaaattaatttctaggcaaat

SEQ ID NO: 59688 - DNA, 40 bp, Homo sapiens
tttgcctagaaattaatttgcctttcaaaagtcttattaa

SEQ ID NO: 59689 - DNA, 40 bp, Homo sapiens
ttaataagacttttgaaaggcaaattaatttctaggcaaa

SEQ ID NO: 59690 - DNA, 40 bp, Homo sapiens
ttgcctagaaattaatttgcctttcaaaagtcttattaat

SEQ ID NO: 59691 - DNA, 40 bp, Homo sapiens
attaataagacttttgaaaggcaaattaatttctaggcaa

SEQ ID NO: 59692 - DNA, 40 bp, Homo sapiens
tgcctagaaattaatttgcctttcaaaagtcttattaatc

SEQ ID NO: 59693 - DNA, 40 bp, Homo sapiens
gattaataagacttttgaaaggcaaattaatttctaggca

SEQ ID NO: 59694 - DNA, 40 bp, Homo sapiens
gcctagaaattaatttgcctttcaaaagtcttattaatct

SEQ ID NO: 59695 - DNA, 40 bp, Homo sapiens
agattaataagacttttgaaaggcaaattaatttctaggc

SEQ ID NO: 59696 - DNA, 40 bp, Homo sapiens
cctagaaattaatttgcctttcaaaagtcttattaatctt

SEQ ID NO: 59697 - DNA, 40 bp, Homo sapiens
aagattaataagacttttgaaaggcaaattaatttctagg

SEQ ID NO: 59698 - DNA, 40 bp, Homo sapiens
ctagaaattaatttgcctttcaaaagtcttattaatcttc

SEQ ID NO: 59699 - DNA, 40 bp, Homo sapiens
gaagattaataagacttttgaaaggcaaattaatttctag

SEQ ID NO: 59700 - DNA, 40 bp, Homo sapiens
tagaaattaatttgcctttcaaaagtcttattaatcttcc

SEQ ID NO: 59701 - DNA, 40 bp, Homo sapiens
ggaagattaataagacttttgaaaggcaaattaatttcta

SEQ ID NO: 59702 - DNA, 40 bp, Homo sapiens
agaaattaatttgcctttcaaaagtcttattaatcttcct

SEQ ID NO: 59703 - DNA, 40 bp, Homo sapiens
aggaagattaataagacttttgaaaggcaaattaatttct

SEQ ID NO: 59704 - DNA, 40 bp, Homo sapiens
gaaattaatttgcctttcaaaagtcttattaatcttcctc

SEQ ID NO: 59705 - DNA, 40 bp, Homo sapiens
gaggaagattaataagacttttgaaaggcaaattaatttc

SEQ ID NO: 59706 - DNA, 40 bp, Homo sapiens
aaattaatttgcctttcaaaagtcttattaatcttcctcc

SEQ ID NO: 59707 - DNA, 40 bp, Homo sapiens
ggaggaagattaataagacttttgaaaggcaaattaattt

SEQ ID NO: 59708 - DNA, 40 bp, Homo sapiens
aattaatttgcctttcaaaagtcttattaatcttcctccg

SEQ ID NO: 59709 - DNA, 40 bp, Homo sapiens
cggaggaagattaataagacttttgaaaggcaaattaatt

SEQ ID NO: 59710 - DNA, 40 bp, Homo sapiens
attaatttgcctttcaaaagtcttattaatcttcctccgt

SEQ ID NO: 59711 - DNA, 40 bp, Homo sapiens
acggaggaagattaataagacttttgaaaggcaaattaat

SEQ ID NO: 59712 - DNA, 40 bp, Homo sapiens
ttaatttgcctttcaaaagtcttattaatcttcctccgtt

SEQ ID NO: 59713 - DNA, 40 bp, Homo sapiens
aacggaggaagattaataagacttttgaaaggcaaattaa

SEQ ID NO: 59714 - DNA, 40 bp, Homo sapiens
taatttgcctttcaaaagtcttattaatcttcctccgttg

SEQ ID NO: 59715 - DNA, 40 bp, Homo sapiens
caacggaggaagattaataagacttttgaaaggcaaatta

SEQ ID NO: 59716 - DNA, 40 bp, Homo sapiens
aatttgcctttcaaaagtcttattaatcttcctccgttga

SEQ ID NO: 59717 - DNA, 40 bp, Homo sapiens
tcaacggaggaagattaataagacttttgaaaggcaaatt

SEQ ID NO: 59718 - DNA, 40 bp, Homo sapiens
atttgcctttcaaaagtcttattaatcttcctccgttgaa

SEQ ID NO: 59719 - DNA, 40 bp, Homo sapiens
ttcaacggaggaagattaataagacttttgaaaggcaaat

SEQ ID NO: 59720 - DNA, 40 bp, Homo sapiens
tttgcctttcaaaagtcttattaatcttcctccgttgaaa

SEQ ID NO: 59721 - DNA, 40 bp, Homo sapiens
tttcaacggaggaagattaataagacttttgaaaggcaaa

SEQ ID NO: 59722 - DNA, 40 bp, Homo sapiens
ttgcctttcaaaagtcttattaatcttcctccgttgaaat

SEQ ID NO: 59723 - DNA, 40 bp, Homo sapiens
atttcaacggaggaagattaataagacttttgaaaggcaa

SEQ ID NO: 59724 - DNA, 40 bp, Homo sapiens
tgcctttcaaaagtcttattaatcttcctccgttgaaatt

SEQ ID NO: 59725 - DNA, 40 bp, Homo sapiens
aatttcaacggaggaagattaataagacttttgaaaggca

SEQ ID NO: 59726 - DNA, 40 bp, Homo sapiens
gcctttcaaaagtcttattaatcttcctccgttgaaatta

SEQ ID NO: 59727 - DNA, 40 bp, Homo sapiens
taatttcaacggaggaagattaataagacttttgaaaggc

SEQ ID NO: 59728 - DNA, 40 bp, Homo sapiens
cctttcaaaagtcttattaatcttcctccgttgaaattaa

SEQ ID NO: 59729 - DNA, 40 bp, Homo sapiens
ttaatttcaacggaggaagattaataagacttttgaaagg

SEQ ID NO: 59730 - DNA, 40 bp, Homo sapiens
ctttcaaaagtcttattaatcttcctccgttgaaattaat

SEQ ID NO: 59731 - DNA, 40 bp, Homo sapiens
attaatttcaacggaggaagattaataagacttttgaaag

SEQ ID NO: 59732 - DNA, 40 bp, Homo sapiens
tttcaaaagtcttattaatcttcctccgttgaaattaatt

SEQ ID NO: 59733 - DNA, 40 bp, Homo sapiens
aattaatttcaacggaggaagattaataagacttttgaaa

SEQ ID NO: 59734 - DNA, 40 bp, Homo sapiens
ttcaaaagtcttattaatcttcctccgttgaaattaattt

SEQ ID NO: 59735 - DNA, 40 bp, Homo sapiens
aaattaatttcaacggaggaagattaataagacttttgaa

SEQ ID NO: 59736 - DNA, 40 bp, Homo sapiens
tcaaaagtcttattaatcttcctccgttgaaattaatttg

SEQ ID NO: 59737 - DNA, 40 bp, Homo sapiens
caaattaatttcaacggaggaagattaataagacttttga

SEQ ID NO: 59738 - DNA, 40 bp, Homo sapiens
caaaagtcttattaatcttcctccgttgaaattaatttga

SEQ ID NO: 59739 - DNA, 40 bp, Homo sapiens
tcaaattaatttcaacggaggaagattaataagacttttg

SEQ ID NO: 59740 - DNA, 40 bp, Homo sapiens
aaaagtcttattaatcttcctccgttgaaattaatttgat

SEQ ID NO: 59741 - DNA, 40 bp, Homo sapiens
atcaaattaatttcaacggaggaagattaataagactttt

SEQ ID NO: 59742 - DNA, 40 bp, Homo sapiens
aaagtcttattaatcttcctccgttgaaattaatttgata

SEQ ID NO: 59743 - DNA, 40 bp, Homo sapiens
tatcaaattaatttcaacggaggaagattaataagacttt

SEQ ID NO: 59744 - DNA, 40 bp, Homo sapiens
aagtcttattaatcttcctccgttgaaattaatttgatat

SEQ ID NO: 59745 - DNA, 40 bp, Homo sapiens
atatcaaattaatttcaacggaggaagattaataagactt

SEQ ID NO: 59746 - DNA, 40 bp, Homo sapiens
agtcttattaatcttcctccgttgaaattaatttgatatt

SEQ ID NO: 59747 - DNA, 40 bp, Homo sapiens
aatatcaaattaatttcaacggaggaagattaataagact

SEQ ID NO: 59748 - DNA, 40 bp, Homo sapiens
gtcttattaatcttcctccgttgaaattaatttgatattt

SEQ ID NO: 59749 - DNA, 40 bp, Homo sapiens
aaatatcaaattaatttcaacggaggaagattaataagac

SEQ ID NO: 59750 - DNA, 40 bp, Homo sapiens
tcttattaatcttcctccgttgaaattaatttgatatttg

SEQ ID NO: 59751 - DNA, 40 bp, Homo sapiens
caaatatcaaattaatttcaacggaggaagattaataaga

SEQ ID NO: 59752 - DNA, 40 bp, Homo sapiens
cttattaatcttcctccgttgaaattaatttgatatttgc

SEQ ID NO: 59753 - DNA, 40 bp, Homo sapiens
gcaaatatcaaattaatttcaacggaggaagattaataag

SEQ ID NO: 59754 - DNA, 40 bp, Homo sapiens
ttattaatcttcctccgttgaaattaatttgatatttgca

SEQ ID NO: 59755 - DNA, 40 bp, Homo sapiens
tgcaaatatcaaattaatttcaacggaggaagattaataa

SEQ ID NO: 59756 - DNA, 40 bp, Homo sapiens
tattaatcttcctccgttgaaattaatttgatatttgcat

SEQ ID NO: 59757 - DNA, 40 bp, Homo sapiens
atgcaaatatcaaattaatttcaacggaggaagattaata

SEQ ID NO: 59758 - DNA, 40 bp, Homo sapiens
attaatcttcctccgttgaaattaatttgatatttgcatg

SEQ ID NO: 59759 - DNA, 40 bp, Homo sapiens
catgcaaatatcaaattaatttcaacggaggaagattaat

SEQ ID NO: 59760 - DNA, 40 bp, Homo sapiens
ttaatcttcctccgttgaaattaatttgatatttgcatgc

SEQ ID NO: 59761 - DNA, 40 bp, Homo sapiens
gcatgcaaatatcaaattaatttcaacggaggaagattaa

SEQ ID NO: 59762 - DNA, 40 bp, Homo sapiens
taatcttcctccgttgaaattaatttgatatttgcatgct

SEQ ID NO: 59763 - DNA, 40 bp, Homo sapiens
agcatgcaaatatcaaattaatttcaacggaggaagatta

SEQ ID NO: 59764 - DNA, 40 bp, Homo sapiens
aatcttcctccgttgaaattaatttgatatttgcatgctt

SEQ ID NO: 59765 - DNA, 40 bp, Homo sapiens
aagcatgcaaatatcaaattaatttcaacggaggaagatt

SEQ ID NO: 59766 - DNA, 40 bp, Homo sapiens
atcttcctccgttgaaattaatttgatatttgcatgcttc

SEQ ID NO: 59767 - DNA, 40 bp, Homo sapiens
gaagcatgcaaatatcaaattaatttcaacggaggaagat

SEQ ID NO: 59768 - DNA, 40 bp, Homo sapiens
tcttcctccgttgaaattaatttgatatttgcatgcttct

SEQ ID NO: 59769 - DNA, 40 bp, Homo sapiens
agaagcatgcaaatatcaaattaatttcaacggaggaaga

SEQ ID NO: 59770 - DNA, 40 bp, Homo sapiens
cttcctccgttgaaattaatttgatatttgcatgcttctg

SEQ ID NO: 59771 - DNA, 40 bp, Homo sapiens
cagaagcatgcaaatatcaaattaatttcaacggaggaag

SEQ ID NO: 59772 - DNA, 40 bp, Homo sapiens
ttcctccgttgaaattaatttgatatttgcatgcttctgg

SEQ ID NO: 59773 - DNA, 40 bp, Homo sapiens
ccagaagcatgcaaatatcaaattaatttcaacggaggaa

SEQ ID NO: 59774 - DNA, 40 bp, Homo sapiens
tcctccgttgaaattaatttgatatttgcatgcttctgga

SEQ ID NO: 59775 - DNA, 40 bp, Homo sapiens
tccagaagcatgcaaatatcaaattaatttcaacggagga

SEQ ID NO: 59776 - DNA, 40 bp, Homo sapiens
cctccgttgaaattaatttgatatttgcatgcttctggaa

SEQ ID NO: 59777 - DNA, 40 bp, Homo sapiens
ttccagaagcatgcaaatatcaaattaatttcaacggagg

SEQ ID NO: 59778 - DNA, 40 bp, Homo sapiens
ctccgttgaaattaatttgatatttgcatgcttctggaag

SEQ ID NO: 59779 - DNA, 40 bp, Homo sapiens
cttccagaagcatgcaaatatcaaattaatttcaacggag

SEQ ID NO: 59780 - DNA, 40 bp, Homo sapiens
tccgttgaaattaatttgatatttgcatgcttctggaaga

SEQ ID NO: 59781 - DNA, 40 bp, Homo sapiens
tcttccagaagcatgcaaatatcaaattaatttcaacgga

SEQ ID NO: 59782 - DNA, 40 bp, Homo sapiens
ccgttgaaattaatttgatatttgcatgcttctggaagac

SEQ ID NO: 59783 - DNA, 40 bp, Homo sapiens
gtcttccagaagcatgcaaatatcaaattaatttcaacgg

SEQ ID NO: 59784 - DNA, 40 bp, Homo sapiens
cgttgaaattaatttgatatttgcatgcttctggaagact

SEQ ID NO: 59785 - DNA, 40 bp, Homo sapiens
agtcttccagaagcatgcaaatatcaaattaatttcaacg

SEQ ID NO: 59786 - DNA, 40 bp, Homo sapiens
gttgaaattaatttgatatttgcatgcttctggaagactt

SEQ ID NO: 59787 - DNA, 40 bp, Homo sapiens
aagtcttccagaagcatgcaaatatcaaattaatttcaac

SEQ ID NO: 59788 - DNA, 40 bp, Homo sapiens
ttgaaattaatttgatatttgcatgcttctggaagacttt

SEQ ID NO: 59789 - DNA, 40 bp, Homo sapiens
aaagtcttccagaagcatgcaaatatcaaattaatttcaa

SEQ ID NO: 59790 - DNA, 40 bp, Homo sapiens
tgaaattaatttgatatttgcatgcttctggaagacttta

SEQ ID NO: 59791 - DNA, 40 bp, Homo sapiens
taaagtcttccagaagcatgcaaatatcaaattaatttca

SEQ ID NO: 59792 - DNA, 40 bp, Homo sapiens
gaaattaatttgatatttgcatgcttctggaagactttaa

SEQ ID NO: 59793 - DNA, 40 bp, Homo sapiens
ttaaagtcttccagaagcatgcaaatatcaaattaatttc

SEQ ID NO: 59794 - DNA, 40 bp, Homo sapiens
aaattaatttgatatttgcatgcttctggaagactttaaa

SEQ ID NO: 59795 - DNA, 40 bp, Homo sapiens
tttaaagtcttccagaagcatgcaaatatcaaattaattt

SEQ ID NO: 59796 - DNA, 40 bp, Homo sapiens
aattaatttgatatttgcatgcttctggaagactttaaag

SEQ ID NO: 59797 - DNA, 40 bp, Homo sapiens
ctttaaagtcttccagaagcatgcaaatatcaaattaatt

SEQ ID NO: 59798 - DNA, 40 bp, Homo sapiens
attaatttgatatttgcatgcttctggaagactttaaaga

SEQ ID NO: 59799 - DNA, 40 bp, Homo sapiens
tctttaaagtcttccagaagcatgcaaatatcaaattaat

SEQ ID NO: 59800 - DNA, 40 bp, Homo sapiens
ttaatttgatatttgcatgcttctggaagactttaaagag

SEQ ID NO: 59801 - DNA, 40 bp, Homo sapiens
ctctttaaagtcttccagaagcatgcaaatatcaaattaa

SEQ ID NO: 59802 - DNA, 40 bp, Homo sapiens
taatttgatatttgcatgcttctggaagactttaaagagc

SEQ ID NO: 59803 - DNA, 40 bp, Homo sapiens
gctctttaaagtcttccagaagcatgcaaatatcaaatta

SEQ ID NO: 59804 - DNA, 40 bp, Homo sapiens
aatttgatatttgcatgcttctggaagactttaaagagct

SEQ ID NO: 59805 - DNA, 40 bp, Homo sapiens
agctctttaaagtcttccagaagcatgcaaatatcaaatt

SEQ ID NO: 59806 - DNA, 40 bp, Homo sapiens
atttgatatttgcatgcttctggaagactttaaagagcta

SEQ ID NO: 59807 - DNA, 40 bp, Homo sapiens
tagctctttaaagtcttccagaagcatgcaaatatcaaat

SEQ ID NO: 59808 - DNA, 40 bp, Homo sapiens
tttgatatttgcatgcttctggaagactttaaagagctat

SEQ ID NO: 59809 - DNA, 40 bp, Homo sapiens
atagctctttaaagtcttccagaagcatgcaaatatcaaa

SEQ ID NO: 59810 - DNA, 40 bp, Homo sapiens
ttgatatttgcatgcttctggaagactttaaagagctatt

SEQ ID NO: 59811 - DNA, 40 bp, Homo sapiens
aatagctctttaaagtcttccagaagcatgcaaatatcaa

SEQ ID NO: 59812 - DNA, 40 bp, Homo sapiens
tgatatttgcatgcttctggaagactttaaagagctattc

SEQ ID NO: 59813 - DNA, 40 bp, Homo sapiens
gaatagctctttaaagtcttccagaagcatgcaaatatca

SEQ ID NO: 59814 - DNA, 40 bp, Homo sapiens
gatatttgcatgcttctggaagactttaaagagctattcc

SEQ ID NO: 59815 - DNA, 40 bp, Homo sapiens
ggaatagctctttaaagtcttccagaagcatgcaaatatc

SEQ ID NO: 59816 - DNA, 40 bp, Homo sapiens
atatttgcatgcttctggaagactttaaagagctattccg

SEQ ID NO: 59817 - DNA, 40 bp, Homo sapiens
cggaatagctctttaaagtcttccagaagcatgcaaatat

SEQ ID NO: 59818 - DNA, 40 bp, Homo sapiens
tatttgcatgcttctggaagactttaaagagctattccga

SEQ ID NO: 59819 - DNA, 40 bp, Homo sapiens
tcggaatagctctttaaagtcttccagaagcatgcaaata

SEQ ID NO: 59820 - DNA, 40 bp, Homo sapiens
atttgcatgcttctggaagactttaaagagctattccgag

SEQ ID NO: 59821 - DNA, 40 bp, Homo sapiens
ctcggaatagctctttaaagtcttccagaagcatgcaaat

SEQ ID NO: 59822 - DNA, 40 bp, Homo sapiens
tttgcatgcttctggaagactttaaagagctattccgagt

SEQ ID NO: 59823 - DNA, 40 bp, Homo sapiens
actcggaatagctctttaaagtcttccagaagcatgcaaa

SEQ ID NO: 59824 - DNA, 40 bp, Homo sapiens
ttgcatgcttctggaagactttaaagagctattccgagta

SEQ ID NO: 59825 - DNA, 40 bp, Homo sapiens
tactcggaatagctctttaaagtcttccagaagcatgcaa

SEQ ID NO: 59826 - DNA, 40 bp, Homo sapiens
tgcatgcttctggaagactttaaagagctattccgagtaa

SEQ ID NO: 59827 - DNA, 40 bp, Homo sapiens
ttactcggaatagctctttaaagtcttccagaagcatgca

SEQ ID NO: 59828 - DNA, 40 bp, Homo sapiens
gcatgcttctggaagactttaaagagctattccgagtaac

SEQ ID NO: 59829 - DNA, 40 bp, Homo sapiens
gttactcggaatagctctttaaagtcttccagaagcatgc

SEQ ID NO: 59830 - DNA, 40 bp, Homo sapiens
catgcttctggaagactttaaagagctattccgagtaact

SEQ ID NO: 59831 - DNA, 40 bp, Homo sapiens
agttactcggaatagctctttaaagtcttccagaagcatg

SEQ ID NO: 59832 - DNA, 40 bp, Homo sapiens
atgcttctggaagactttaaagagctattccgagtaactg

SEQ ID NO: 59833 - DNA, 40 bp, Homo sapiens
cagttactcggaatagctctttaaagtcttccagaagcat

SEQ ID NO: 59834 - DNA, 40 bp, Homo sapiens
tgcttctggaagactttaaagagctattccgagtaactgt

SEQ ID NO: 59835 - DNA, 40 bp, Homo sapiens
acagttactcggaatagctctttaaagtcttccagaagca

SEQ ID NO: 59836 - DNA, 40 bp, Homo sapiens
gcttctggaagactttaaagagctattccgagtaactgta

SEQ ID NO: 59837 - DNA, 40 bp, Homo sapiens
tacagttactcggaatagctctttaaagtcttccagaagc

SEQ ID NO: 59838 - DNA, 40 bp, Homo sapiens
cttctggaagactttaaagagctattccgagtaactgtag

SEQ ID NO: 59839 - DNA, 40 bp, Homo sapiens
ctacagttactcggaatagctctttaaagtcttccagaag

SEQ ID NO: 59840 - DNA, 40 bp, Homo sapiens
ttctggaagactttaaagagctattccgagtaactgtaga

SEQ ID NO: 59841 - DNA, 40 bp, Homo sapiens
tctacagttactcggaatagctctttaaagtcttccagaa

SEQ ID NO: 59842 - DNA, 40 bp, Homo sapiens
tctggaagactttaaagagctattccgagtaactgtagag

SEQ ID NO: 59843 - DNA, 40 bp, Homo sapiens
ctctacagttactcggaatagctctttaaagtcttccaga

SEQ ID NO: 59844 - DNA, 40 bp, Homo sapiens
ctggaagactttaaagagctattccgagtaactgtagaga

SEQ ID NO: 59845 - DNA, 40 bp, Homo sapiens
tctctacagttactcggaatagctctttaaagtcttccag

SEQ ID NO: 59846 - DNA, 40 bp, Homo sapiens
tggaagactttaaagagctattccgagtaactgtagagat

SEQ ID NO: 59847 - DNA, 40 bp, Homo sapiens
atctctacagttactcggaatagctctttaaagtcttcca

SEQ ID NO: 59848 - DNA, 40 bp, Homo sapiens
ggaagactttaaagagctattccgagtaactgtagagatt

SEQ ID NO: 59849 - DNA, 40 bp, Homo sapiens
aatctctacagttactcggaatagctctttaaagtcttcc

SEQ ID NO: 59850 - DNA, 40 bp, Homo sapiens
gaagactttaaagagctattccgagtaactgtagagatta

SEQ ID NO: 59851 - DNA, 40 bp, Homo sapiens
taatctctacagttactcggaatagctctttaaagtcttc

SEQ ID NO: 59852 - DNA, 40 bp, Homo sapiens
aagactttaaagagctattccgagtaactgtagagattat

SEQ ID NO: 59853 - DNA, 40 bp, Homo sapiens
ataatctctacagttactcggaatagctctttaaagtctt

SEQ ID NO: 59854 - DNA, 40 bp, Homo sapiens
agactttaaagagctattccgagtaactgtagagattata

SEQ ID NO: 59855 - DNA, 40 bp, Homo sapiens
tataatctctacagttactcggaatagctctttaaagtct

SEQ ID NO: 59856 - DNA, 40 bp, Homo sapiens
gactttaaagagctattccgagtaactgtagagattataa

SEQ ID NO: 59857 - DNA, 40 bp, Homo sapiens
ttataatctctacagttactcggaatagctctttaaagtc

SEQ ID NO: 59858 - DNA, 40 bp, Homo sapiens
actttaaagagctattccgagtaactgtagagattataaa

SEQ ID NO: 59859 - DNA, 40 bp, Homo sapiens
tttataatctctacagttactcggaatagctctttaaagt

SEQ ID NO: 59860 - DNA, 40 bp, Homo sapiens
ctttaaagagctattccgagtaactgtagagattataaaa

SEQ ID NO: 59861 - DNA, 40 bp, Homo sapiens
ttttataatctctacagttactcggaatagctctttaaag

SEQ ID NO: 59862 - DNA, 40 bp, Homo sapiens
tttaaagagctattccgagtaactgtagagattataaaat

SEQ ID NO: 59863 - DNA, 40 bp, Homo sapiens
attttataatctctacagttactcggaatagctctttaaa

SEQ ID NO: 59864 - DNA, 40 bp, Homo sapiens
ttaaagagctattccgagtaactgtagagattataaaatg

SEQ ID NO: 59865 - DNA, 40 bp, Homo sapiens
cattttataatctctacagttactcggaatagctctttaa

SEQ ID NO: 59866 - DNA, 40 bp, Homo sapiens
taaagagctattccgagtaactgtagagattataaaatga

SEQ ID NO: 59867 - DNA, 40 bp, Homo sapiens
tcattttataatctctacagttactcggaatagctcttta

SEQ ID NO: 59868 - DNA, 40 bp, Homo sapiens
aaagagctattccgagtaactgtagagattataaaatgaa

SEQ ID NO: 59869 - DNA, 40 bp, Homo sapiens
ttcattttataatctctacagttactcggaatagctcttt

SEQ ID NO: 59870 - DNA, 40 bp, Homo sapiens
aagagctattccgagtaactgtagagattataaaatgaaa

SEQ ID NO: 59871 - DNA, 40 bp, Homo sapiens
tttcattttataatctctacagttactcggaatagctctt

SEQ ID NO: 59872 - DNA, 40 bp, Homo sapiens
agagctattccgagtaactgtagagattataaaatgaaat

SEQ ID NO: 59873 - DNA, 40 bp, Homo sapiens
atttcattttataatctctacagttactcggaatagctct

SEQ ID NO: 59874 - DNA, 40 bp, Homo sapiens
gagctattccgagtaactgtagagattataaaatgaaata

SEQ ID NO: 59875 - DNA, 40 bp, Homo sapiens
tatttcattttataatctctacagttactcggaatagctc

SEQ ID NO: 59876 - DNA, 40 bp, Homo sapiens
agctattccgagtaactgtagagattataaaatgaaatat

SEQ ID NO: 59877 - DNA, 40 bp, Homo sapiens
atatttcattttataatctctacagttactcggaatagct

SEQ ID NO: 59878 - DNA, 40 bp, Homo sapiens
gctattccgagtaactgtagagattataaaatgaaatatg

SEQ ID NO: 59879 - DNA, 40 bp, Homo sapiens
catatttcattttataatctctacagttactcggaatagc

SEQ ID NO: 59880 - DNA, 40 bp, Homo sapiens
ctattccgagtaactgtagagattataaaatgaaatatgg

SEQ ID NO: 59881 - DNA, 40 bp, Homo sapiens
ccatatttcattttataatctctacagttactcggaatag

SEQ ID NO: 59882 - DNA, 40 bp, Homo sapiens
tattccgagtaactgtagagattataaaatgaaatatggg

SEQ ID NO: 59883 - DNA, 40 bp, Homo sapiens
cccatatttcattttataatctctacagttactcggaata

SEQ ID NO: 59884 - DNA, 40 bp, Homo sapiens
attccgagtaactgtagagattataaaatgaaatatggga

SEQ ID NO: 59885 - DNA, 40 bp, Homo sapiens
tcccatatttcattttataatctctacagttactcggaat

SEQ ID NO: 59886 - DNA, 40 bp, Homo sapiens
ttccgagtaactgtagagattataaaatgaaatatgggaa

SEQ ID NO: 59887 - DNA, 40 bp, Homo sapiens
ttcccatatttcattttataatctctacagttactcggaa

SEQ ID NO: 59888 - DNA, 40 bp, Homo sapiens
tccgagtaactgtagagattataaaatgaaatatgggaat

SEQ ID NO: 59889 - DNA, 40 bp, Homo sapiens
attcccatatttcattttataatctctacagttactcgga

SEQ ID NO: 59890 - DNA, 40 bp, Homo sapiens
ccgagtaactgtagagattataaaatgaaatatgggaatt

SEQ ID NO: 59891 - DNA, 40 bp, Homo sapiens
aattcccatatttcattttataatctctacagttactcgg

SEQ ID NO: 59892 - DNA, 40 bp, Homo sapiens
cgagtaactgtagagattataaaatgaaatatgggaattt

SEQ ID NO: 59893 - DNA, 40 bp, Homo sapiens
aaattcccatatttcattttataatctctacagttactcg

SEQ ID NO: 59894 - DNA, 40 bp, Homo sapiens
gagtaactgtagagattataaaatgaaatatgggaatttt

SEQ ID NO: 59895 - DNA, 40 bp, Homo sapiens
aaaattcccatatttcattttataatctctacagttactc

SEQ ID NO: 59896 - DNA, 40 bp, Homo sapiens
agtaactgtagagattataaaatgaaatatgggaatttta

SEQ ID NO: 59897 - DNA, 40 bp, Homo sapiens
taaaattcccatatttcattttataatctctacagttact

SEQ ID NO: 59898 - DNA, 40 bp, Homo sapiens
gtaactgtagagattataaaatgaaatatgggaattttaa

SEQ ID NO: 59899 - DNA, 40 bp, Homo sapiens
ttaaaattcccatatttcattttataatctctacagttac

SEQ ID NO: 59900 - DNA, 40 bp, Homo sapiens
taactgtagagattataaaatgaaatatgggaattttaat

SEQ ID NO: 59901 - DNA, 40 bp, Homo sapiens
attaaaattcccatatttcattttataatctctacagtta

SEQ ID NO: 59902 - DNA, 40 bp, Homo sapiens
aactgtagagattataaaatgaaatatgggaattttaata

SEQ ID NO: 59903 - DNA, 40 bp, Homo sapiens
tattaaaattcccatatttcattttataatctctacagtt

SEQ ID NO: 59904 - DNA, 40 bp, Homo sapiens
actgtagagattataaaatgaaatatgggaattttaataa

SEQ ID NO: 59905 - DNA, 40 bp, Homo sapiens
ttattaaaattcccatatttcattttataatctctacagt

SEQ ID NO: 59906 - DNA, 40 bp, Homo sapiens
ctgtagagattataaaatgaaatatgggaattttaataaa

SEQ ID NO: 59907 - DNA, 40 bp, Homo sapiens
tttattaaaattcccatatttcattttataatctctacag

SEQ ID NO: 59908 - DNA, 40 bp, Homo sapiens
tgtagagattataaaatgaaatatgggaattttaataaat

SEQ ID NO: 59909 - DNA, 40 bp, Homo sapiens
atttattaaaattcccatatttcattttataatctctaca

SEQ ID NO: 59910 - DNA, 40 bp, Homo sapiens
gtagagattataaaatgaaatatgggaattttaataaatt

SEQ ID NO: 59911 - DNA, 40 bp, Homo sapiens
aatttattaaaattcccatatttcattttataatctctac

SEQ ID NO: 59912 - DNA, 40 bp, Homo sapiens
tagagattataaaatgaaatatgggaattttaataaattt

SEQ ID NO: 59913 - DNA, 40 bp, Homo sapiens
aaatttattaaaattcccatatttcattttataatctcta

SEQ ID NO: 59914 - DNA, 40 bp, Homo sapiens
agagattataaaatgaaatatgggaattttaataaatttt

SEQ ID NO: 59915 - DNA, 40 bp, Homo sapiens
aaaatttattaaaattcccatatttcattttataatctct

SEQ ID NO: 59916 - DNA, 40 bp, Homo sapiens
gagattataaaatgaaatatgggaattttaataaatttta

SEQ ID NO: 59917 - DNA, 40 bp, Homo sapiens
taaaatttattaaaattcccatatttcattttataatctc

SEQ ID NO: 59918 - DNA, 40 bp, Homo sapiens
agattataaaatgaaatatgggaattttaataaattttac

SEQ ID NO: 59919 - DNA, 40 bp, Homo sapiens
gtaaaatttattaaaattcccatatttcattttataatct

SEQ ID NO: 59920 - DNA, 40 bp, Homo sapiens
gattataaaatgaaatatgggaattttaataaattttaca

SEQ ID NO: 59921 - DNA, 40 bp, Homo sapiens
tgtaaaatttattaaaattcccatatttcattttataatc

SEQ ID NO: 59922 - DNA, 40 bp, Homo sapiens
attataaaatgaaatatgggaattttaataaattttacat

SEQ ID NO: 59923 - DNA, 40 bp, Homo sapiens
atgtaaaatttattaaaattcccatatttcattttataat

SEQ ID NO: 59924 - DNA, 40 bp, Homo sapiens
ttataaaatgaaatatgggaattttaataaattttacatc

SEQ ID NO: 59925 - DNA, 40 bp, Homo sapiens
gatgtaaaatttattaaaattcccatatttcattttataa

SEQ ID NO: 59926 - DNA, 40 bp, Homo sapiens
tataaaatgaaatatgggaattttaataaattttacatct

SEQ ID NO: 59927 - DNA, 40 bp, Homo sapiens
agatgtaaaatttattaaaattcccatatttcattttata

SEQ ID NO: 59928 - DNA, 40 bp, Homo sapiens
ataaaatgaaatatgggaattttaataaattttacatctc

SEQ ID NO: 59929 - DNA, 40 bp, Homo sapiens
gagatgtaaaatttattaaaattcccatatttcattttat

SEQ ID NO: 59930 - DNA, 40 bp, Homo sapiens
taaaatgaaatatgggaattttaataaattttacatctcc

SEQ ID NO: 59931 - DNA, 40 bp, Homo sapiens
ggagatgtaaaatttattaaaattcccatatttcatttta

SEQ ID NO: 59932 - DNA, 40 bp, Homo sapiens
aaaatgaaatatgggaattttaataaattttacatctcca

SEQ ID NO: 59933 - DNA, 40 bp, Homo sapiens
tggagatgtaaaatttattaaaattcccatatttcatttt

SEQ ID NO: 59934 - DNA, 40 bp, Homo sapiens
aaatgaaatatgggaattttaataaattttacatctccag

SEQ ID NO: 59935 - DNA, 40 bp, Homo sapiens
ctggagatgtaaaatttattaaaattcccatatttcattt

SEQ ID NO: 59936 - DNA, 40 bp, Homo sapiens
aatgaaatatgggaattttaataaattttacatctccagt

SEQ ID NO: 59937 - DNA, 40 bp, Homo sapiens
actggagatgtaaaatttattaaaattcccatatttcatt

SEQ ID NO: 59938 - DNA, 40 bp, Homo sapiens
atgaaatatgggaattttaataaattttacatctccagtt

SEQ ID NO: 59939 - DNA, 40 bp, Homo sapiens
aactggagatgtaaaatttattaaaattcccatatttcat

SEQ ID NO: 59940 - DNA, 40 bp, Homo sapiens
tgaaatatgggaattttaataaattttacatctccagtta

SEQ ID NO: 59941 - DNA, 40 bp, Homo sapiens
taactggagatgtaaaatttattaaaattcccatatttca

SEQ ID NO: 59942 - DNA, 40 bp, Homo sapiens
gaaatatgggaattttaataaattttacatctccagttac

SEQ ID NO: 59943 - DNA, 40 bp, Homo sapiens
gtaactggagatgtaaaatttattaaaattcccatatttc

SEQ ID NO: 59944 - DNA, 40 bp, Homo sapiens
aaatatgggaattttaataaattttacatctccagttact

SEQ ID NO: 59945 - DNA, 40 bp, Homo sapiens
agtaactggagatgtaaaatttattaaaattcccatattt

SEQ ID NO: 59946 - DNA, 40 bp, Homo sapiens
aatatgggaattttaataaattttacatctccagttactg

SEQ ID NO: 59947 - DNA, 40 bp, Homo sapiens
cagtaactggagatgtaaaatttattaaaattcccatatt

SEQ ID NO: 59948 - DNA, 40 bp, Homo sapiens
atatgggaattttaataaattttacatctccagttactgg

SEQ ID NO: 59949 - DNA, 40 bp, Homo sapiens
ccagtaactggagatgtaaaatttattaaaattcccatat

SEQ ID NO: 59950 - DNA, 40 bp, Homo sapiens
tatgggaattttaataaattttacatctccagttactggt

SEQ ID NO: 59951 - DNA, 40 bp, Homo sapiens
accagtaactggagatgtaaaatttattaaaattcccata

SEQ ID NO: 59952 - DNA, 40 bp, Homo sapiens
atgggaattttaataaattttacatctccagttactggtg

SEQ ID NO: 59953 - DNA, 40 bp, Homo sapiens
caccagtaactggagatgtaaaatttattaaaattcccat

SEQ ID NO: 59954 - DNA, 40 bp, Homo sapiens
tgggaattttaataaattttacatctccagttactggtga

SEQ ID NO: 59955 - DNA, 40 bp, Homo sapiens
tcaccagtaactggagatgtaaaatttattaaaattccca

SEQ ID NO: 59956 - DNA, 40 bp, Homo sapiens
gggaattttaataaattttacatctccagttactggtgaa

SEQ ID NO: 59957 - DNA, 40 bp, Homo sapiens
ttcaccagtaactggagatgtaaaatttattaaaattccc

SEQ ID NO: 59958 - DNA, 40 bp, Homo sapiens
ggaattttaataaattttacatctccagttactggtgaaa

SEQ ID NO: 59959 - DNA, 40 bp, Homo sapiens
tttcaccagtaactggagatgtaaaatttattaaaattcc

SEQ ID NO: 59960 - DNA, 40 bp, Homo sapiens
gaattttaataaattttacatctccagttactggtgaaaa

SEQ ID NO: 59961 - DNA, 40 bp, Homo sapiens
ttttcaccagtaactggagatgtaaaatttattaaaattc

SEQ ID NO: 59962 - DNA, 40 bp, Homo sapiens
aattttaataaattttacatctccagttactggtgaaaat

SEQ ID NO: 59963 - DNA, 40 bp, Homo sapiens
attttcaccagtaactggagatgtaaaatttattaaaatt

SEQ ID NO: 59964 - DNA, 40 bp, Homo sapiens
attttaataaattttacatctccagttactggtgaaaatg

SEQ ID NO: 59965 - DNA, 40 bp, Homo sapiens
cattttcaccagtaactggagatgtaaaatttattaaaat

SEQ ID NO: 59966 - DNA, 40 bp, Homo sapiens
ttttaataaattttacatctccagttactggtgaaaatgt

SEQ ID NO: 59967 - DNA, 40 bp, Homo sapiens
acattttcaccagtaactggagatgtaaaatttattaaaa

SEQ ID NO: 59968 - DNA, 40 bp, Homo sapiens
tttaataaattttacatctccagttactggtgaaaatgtc

SEQ ID NO: 59969 - DNA, 40 bp, Homo sapiens
gacattttcaccagtaactggagatgtaaaatttattaaa

SEQ ID NO: 59970 - DNA, 40 bp, Homo sapiens
ttaataaattttacatctccagttactggtgaaaatgtca

SEQ ID NO: 59971 - DNA, 40 bp, Homo sapiens
tgacattttcaccagtaactggagatgtaaaatttattaa

SEQ ID NO: 59972 - DNA, 40 bp, Homo sapiens
taataaattttacatctccagttactggtgaaaatgtcaa

SEQ ID NO: 59973 - DNA, 40 bp, Homo sapiens
ttgacattttcaccagtaactggagatgtaaaatttatta

SEQ ID NO: 59974 - DNA, 40 bp, Homo sapiens
aataaattttacatctccagttactggtgaaaatgtcaag

SEQ ID NO: 59975 - DNA, 40 bp, Homo sapiens
cttgacattttcaccagtaactggagatgtaaaatttatt

SEQ ID NO: 59976 - DNA, 40 bp, Homo sapiens
ataaattttacatctccagttactggtgaaaatgtcaagt

SEQ ID NO: 59977 - DNA, 40 bp, Homo sapiens
acttgacattttcaccagtaactggagatgtaaaatttat

SEQ ID NO: 59978 - DNA, 40 bp, Homo sapiens
taaattttacatctccagttactggtgaaaatgtcaagtc

SEQ ID NO: 59979 - DNA, 40 bp, Homo sapiens
gacttgacattttcaccagtaactggagatgtaaaattta

SEQ ID NO: 59980 - DNA, 40 bp, Homo sapiens
aaattttacatctccagttactggtgaaaatgtcaagtcc

SEQ ID NO: 59981 - DNA, 40 bp, Homo sapiens
ggacttgacattttcaccagtaactggagatgtaaaattt

SEQ ID NO: 59982 - DNA, 40 bp, Homo sapiens
aattttacatctccagttactggtgaaaatgtcaagtcct

SEQ ID NO: 59983 - DNA, 40 bp, Homo sapiens
aggacttgacattttcaccagtaactggagatgtaaaatt

SEQ ID NO: 59984 - DNA, 40 bp, Homo sapiens
attttacatctccagttactggtgaaaatgtcaagtcctc

SEQ ID NO: 59985 - DNA, 40 bp, Homo sapiens
gaggacttgacattttcaccagtaactggagatgtaaaat

SEQ ID NO: 59986 - DNA, 40 bp, Homo sapiens
ttttacatctccagttactggtgaaaatgtcaagtcctcc

SEQ ID NO: 59987 - DNA, 40 bp, Homo sapiens
ggaggacttgacattttcaccagtaactggagatgtaaaa

SEQ ID NO: 59988 - DNA, 40 bp, Homo sapiens
tttacatctccagttactggtgaaaatgtcaagtcctcct

SEQ ID NO: 59989 - DNA, 40 bp, Homo sapiens
aggaggacttgacattttcaccagtaactggagatgtaaa

SEQ ID NO: 59990 - DNA, 40 bp, Homo sapiens
ttacatctccagttactggtgaaaatgtcaagtcctcctt

SEQ ID NO: 59991 - DNA, 40 bp, Homo sapiens
aaggaggacttgacattttcaccagtaactggagatgtaa

SEQ ID NO: 59992 - DNA, 40 bp, Homo sapiens
tacatctccagttactggtgaaaatgtcaagtcctccttt

SEQ ID NO: 59993 - DNA, 40 bp, Homo sapiens
aaaggaggacttgacattttcaccagtaactggagatgta

SEQ ID NO: 59994 - DNA, 40 bp, Homo sapiens
acatctccagttactggtgaaaatgtcaagtcctcctttc

SEQ ID NO: 59995 - DNA, 40 bp, Homo sapiens
gaaaggaggacttgacattttcaccagtaactggagatgt

SEQ ID NO: 59996 - DNA, 40 bp, Homo sapiens
catctccagttactggtgaaaatgtcaagtcctcctttct

SEQ ID NO: 59997 - DNA, 40 bp, Homo sapiens
agaaaggaggacttgacattttcaccagtaactggagatg

SEQ ID NO: 59998 - DNA, 40 bp, Homo sapiens
atctccagttactggtgaaaatgtcaagtcctcctttctg

SEQ ID NO: 59999 - DNA, 40 bp, Homo sapiens
cagaaaggaggacttgacattttcaccagtaactggagat

SEQ ID NO: 60000 - DNA, 40 bp, Homo sapiens
tctccagttactggtgaaaatgtcaagtcctcctttctgc

SEQ ID NO: 60001 - DNA, 40 bp, Homo sapiens
gcagaaaggaggacttgacattttcaccagtaactggaga

SEQ ID NO: 60002 - DNA, 40 bp, Homo sapiens
ctccagttactggtgaaaatgtcaagtcctcctttctgca

SEQ ID NO: 60003 - DNA, 40 bp, Homo sapiens
tgcagaaaggaggacttgacattttcaccagtaactggag

SEQ ID NO: 60004 - DNA, 40 bp, Homo sapiens
tccagttactggtgaaaatgtcaagtcctcctttctgcag

SEQ ID NO: 60005 - DNA, 40 bp, Homo sapiens
ctgcagaaaggaggacttgacattttcaccagtaactgga

SEQ ID NO: 60006 - DNA, 40 bp, Homo sapiens
ccagttactggtgaaaatgtcaagtcctcctttctgcaga

SEQ ID NO: 60007 - DNA, 40 bp, Homo sapiens
tctgcagaaaggaggacttgacattttcaccagtaactgg

SEQ ID NO: 60008 - DNA, 40 bp, Homo sapiens
cagttactggtgaaaatgtcaagtcctcctttctgcagag

SEQ ID NO: 60009 - DNA, 40 bp, Homo sapiens
ctctgcagaaaggaggacttgacattttcaccagtaactg

SEQ ID NO: 60010 - DNA, 40 bp, Homo sapiens
agttactggtgaaaatgtcaagtcctcctttctgcagagt

SEQ ID NO: 60011 - DNA, 40 bp, Homo sapiens
actctgcagaaaggaggacttgacattttcaccagtaact

SEQ ID NO: 60012 - DNA, 40 bp, Homo sapiens
gttactggtgaaaatgtcaagtcctcctttctgcagagta

SEQ ID NO: 60013 - DNA, 40 bp, Homo sapiens
tactctgcagaaaggaggacttgacattttcaccagtaac

SEQ ID NO: 60014 - DNA, 40 bp, Homo sapiens
ttactggtgaaaatgtcaagtcctcctttctgcagagtat

SEQ ID NO: 60015 - DNA, 40 bp, Homo sapiens
atactctgcagaaaggaggacttgacattttcaccagtaa

SEQ ID NO: 60016 - DNA, 40 bp, Homo sapiens
tactggtgaaaatgtcaagtcctcctttctgcagagtatt

SEQ ID NO: 60017 - DNA, 40 bp, Homo sapiens
aatactctgcagaaaggaggacttgacattttcaccagta

SEQ ID NO: 60018 - DNA, 40 bp, Homo sapiens
actggtgaaaatgtcaagtcctcctttctgcagagtattt

SEQ ID NO: 60019 - DNA, 40 bp, Homo sapiens
aaatactctgcagaaaggaggacttgacattttcaccagt

SEQ ID NO: 60020 - DNA, 40 bp, Homo sapiens
ctggtgaaaatgtcaagtcctcctttctgcagagtatttt

SEQ ID NO: 60021 - DNA, 40 bp, Homo sapiens
aaaatactctgcagaaaggaggacttgacattttcaccag

SEQ ID NO: 60022 - DNA, 40 bp, Homo sapiens
tggtgaaaatgtcaagtcctcctttctgcagagtattttg

SEQ ID NO: 60023 - DNA, 40 bp, Homo sapiens
caaaatactctgcagaaaggaggacttgacattttcacca

SEQ ID NO: 60024 - DNA, 40 bp, Homo sapiens
ggtgaaaatgtcaagtcctcctttctgcagagtattttgt

SEQ ID NO: 60025 - DNA, 40 bp, Homo sapiens
acaaaatactctgcagaaaggaggacttgacattttcacc

SEQ ID NO: 60026 - DNA, 40 bp, Homo sapiens
gtgaaaatgtcaagtcctcctttctgcagagtattttgtt

SEQ ID NO: 60027 - DNA, 40 bp, Homo sapiens
aacaaaatactctgcagaaaggaggacttgacattttcac

SEQ ID NO: 60028 - DNA, 40 bp, Homo sapiens
tgaaaatgtcaagtcctcctttctgcagagtattttgtta

SEQ ID NO: 60029 - DNA, 40 bp, Homo sapiens
taacaaaatactctgcagaaaggaggacttgacattttca

SEQ ID NO: 60030 - DNA, 40 bp, Homo sapiens
gaaaatgtcaagtcctcctttctgcagagtattttgttac

SEQ ID NO: 60031 - DNA, 40 bp, Homo sapiens
gtaacaaaatactctgcagaaaggaggacttgacattttc

SEQ ID NO: 60032 - DNA, 40 bp, Homo sapiens
aaaatgtcaagtcctcctttctgcagagtattttgttact

SEQ ID NO: 60033 - DNA, 40 bp, Homo sapiens
agtaacaaaatactctgcagaaaggaggacttgacatttt

SEQ ID NO: 60034 - DNA, 40 bp, Homo sapiens
aaatgtcaagtcctcctttctgcagagtattttgttactc

SEQ ID NO: 60035 - DNA, 40 bp, Homo sapiens
gagtaacaaaatactctgcagaaaggaggacttgacattt

SEQ ID NO: 60036 - DNA, 40 bp, Homo sapiens
aatgtcaagtcctcctttctgcagagtattttgttactca

SEQ ID NO: 60037 - DNA, 40 bp, Homo sapiens
tgagtaacaaaatactctgcagaaaggaggacttgacatt

SEQ ID NO: 60038 - DNA, 40 bp, Homo sapiens
atgtcaagtcctcctttctgcagagtattttgttactcat

SEQ ID NO: 60039 - DNA, 40 bp, Homo sapiens
atgagtaacaaaatactctgcagaaaggaggacttgacat

SEQ ID NO: 60040 - DNA, 40 bp, Homo sapiens
tgtcaagtcctcctttctgcagagtattttgttactcatc

SEQ ID NO: 60041 - DNA, 40 bp, Homo sapiens
gatgagtaacaaaatactctgcagaaaggaggacttgaca

SEQ ID NO: 60042 - DNA, 40 bp, Homo sapiens
gtcaagtcctcctttctgcagagtattttgttactcatct

SEQ ID NO: 60043 - DNA, 40 bp, Homo sapiens
agatgagtaacaaaatactctgcagaaaggaggacttgac

SEQ ID NO: 60044 - DNA, 40 bp, Homo sapiens
tcaagtcctcctttctgcagagtattttgttactcatctg

SEQ ID NO: 60045 - DNA, 40 bp, Homo sapiens
cagatgagtaacaaaatactctgcagaaaggaggacttga

SEQ ID NO: 60046 - DNA, 40 bp, Homo sapiens
caagtcctcctttctgcagagtattttgttactcatctgt

SEQ ID NO: 60047 - DNA, 40 bp, Homo sapiens
acagatgagtaacaaaatactctgcagaaaggaggacttg

SEQ ID NO: 60048 - DNA, 40 bp, Homo sapiens
aagtcctcctttctgcagagtattttgttactcatctgtt

SEQ ID NO: 60049 - DNA, 40 bp, Homo sapiens
aacagatgagtaacaaaatactctgcagaaaggaggactt

SEQ ID NO: 60050 - DNA, 40 bp, Homo sapiens
agtcctcctttctgcagagtattttgttactcatctgtta

SEQ ID NO: 60051 - DNA, 40 bp, Homo sapiens
taacagatgagtaacaaaatactctgcagaaaggaggact

SEQ ID NO: 60052 - DNA, 40 bp, Homo sapiens
gtcctcctttctgcagagtattttgttactcatctgttat

SEQ ID NO: 60053 - DNA, 40 bp, Homo sapiens
ataacagatgagtaacaaaatactctgcagaaaggaggac

SEQ ID NO: 60054 - DNA, 40 bp, Homo sapiens
tcctcctttctgcagagtattttgttactcatctgttatt

SEQ ID NO: 60055 - DNA, 40 bp, Homo sapiens
aataacagatgagtaacaaaatactctgcagaaaggagga

SEQ ID NO: 60056 - DNA, 40 bp, Homo sapiens
cctcctttctgcagagtattttgttactcatctgttattc

SEQ ID NO: 60057 - DNA, 40 bp, Homo sapiens
gaataacagatgagtaacaaaatactctgcagaaaggagg

SEQ ID NO: 60058 - DNA, 40 bp, Homo sapiens
ctcctttctgcagagtattttgttactcatctgttattca

SEQ ID NO: 60059 - DNA, 40 bp, Homo sapiens
tgaataacagatgagtaacaaaatactctgcagaaaggag

SEQ ID NO: 60060 - DNA, 40 bp, Homo sapiens
tcctttctgcagagtattttgttactcatctgttattcag

SEQ ID NO: 60061 - DNA, 40 bp, Homo sapiens
ctgaataacagatgagtaacaaaatactctgcagaaagga

SEQ ID NO: 60062 - DNA, 40 bp, Homo sapiens
cctttctgcagagtattttgttactcatctgttattcagc

SEQ ID NO: 60063 - DNA, 40 bp, Homo sapiens
gctgaataacagatgagtaacaaaatactctgcagaaagg

SEQ ID NO: 60064 - DNA, 40 bp, Homo sapiens
ctttctgcagagtattttgttactcatctgttattcagct

SEQ ID NO: 60065 - DNA, 40 bp, Homo sapiens
agctgaataacagatgagtaacaaaatactctgcagaaag

SEQ ID NO: 60066 - DNA, 40 bp, Homo sapiens
tttctgcagagtattttgttactcatctgttattcagctt

SEQ ID NO: 60067 - DNA, 40 bp, Homo sapiens
aagctgaataacagatgagtaacaaaatactctgcagaaa

SEQ ID NO: 60068 - DNA, 40 bp, Homo sapiens
ttctgcagagtattttgttactcatctgttattcagctta

SEQ ID NO: 60069 - DNA, 40 bp, Homo sapiens
taagctgaataacagatgagtaacaaaatactctgcagaa

SEQ ID NO: 60070 - DNA, 40 bp, Homo sapiens
tctgcagagtattttgttactcatctgttattcagcttat

SEQ ID NO: 60071 - DNA, 40 bp, Homo sapiens
ataagctgaataacagatgagtaacaaaatactctgcaga

SEQ ID NO: 60072 - DNA, 40 bp, Homo sapiens
ctgcagagtattttgttactcatctgttattcagcttatt

SEQ ID NO: 60073 - DNA, 40 bp, Homo sapiens
aataagctgaataacagatgagtaacaaaatactctgcag

SEQ ID NO: 60074 - DNA, 40 bp, Homo sapiens
tgcagagtattttgttactcatctgttattcagcttattt

SEQ ID NO: 60075 - DNA, 40 bp, Homo sapiens
aaataagctgaataacagatgagtaacaaaatactctgca

SEQ ID NO: 60076 - DNA, 40 bp, Homo sapiens
gcagagtattttgttactcatctgttattcagcttattta

SEQ ID NO: 60077 - DNA, 40 bp, Homo sapiens
taaataagctgaataacagatgagtaacaaaatactctgc

SEQ ID NO: 60078 - DNA, 40 bp, Homo sapiens
cagagtattttgttactcatctgttattcagcttatttat

SEQ ID NO: 60079 - DNA, 40 bp, Homo sapiens
ataaataagctgaataacagatgagtaacaaaatactctg

SEQ ID NO: 60080 - DNA, 40 bp, Homo sapiens
agagtattttgttactcatctgttattcagcttatttatt

SEQ ID NO: 60081 - DNA, 40 bp, Homo sapiens
aataaataagctgaataacagatgagtaacaaaatactct

SEQ ID NO: 60082 - DNA, 40 bp, Homo sapiens
gagtattttgttactcatctgttattcagcttatttattt

SEQ ID NO: 60083 - DNA, 40 bp, Homo sapiens
aaataaataagctgaataacagatgagtaacaaaatactc

SEQ ID NO: 60084 - DNA, 40 bp, Homo sapiens
agtattttgttactcatctgttattcagcttatttattta

SEQ ID NO: 60085 - DNA, 40 bp, Homo sapiens
taaataaataagctgaataacagatgagtaacaaaatact

SEQ ID NO: 60086 - DNA, 40 bp, Homo sapiens
gtattttgttactcatctgttattcagcttatttatttat

SEQ ID NO: 60087 - DNA, 40 bp, Homo sapiens
ataaataaataagctgaataacagatgagtaacaaaatac

SEQ ID NO: 60088 - DNA, 40 bp, Homo sapiens
tattttgttactcatctgttattcagcttatttatttatt

SEQ ID NO: 60089 - DNA, 40 bp, Homo sapiens
aataaataaataagctgaataacagatgagtaacaaaata

SEQ ID NO: 60090 - DNA, 40 bp, Homo sapiens
attttgttactcatctgttattcagcttatttatttattt

SEQ ID NO: 60091 - DNA, 40 bp, Homo sapiens
aaataaataaataagctgaataacagatgagtaacaaaat

SEQ ID NO: 60092 - DNA, 40 bp, Homo sapiens
ttttgttactcatctgttattcagcttatttatttattta

SEQ ID NO: 60093 - DNA, 40 bp, Homo sapiens
taaataaataaataagctgaataacagatgagtaacaaaa

SEQ ID NO: 60094 - DNA, 40 bp, Homo sapiens
tttgttactcatctgttattcagcttatttatttatttat

SEQ ID NO: 60095 - DNA, 40 bp, Homo sapiens
ataaataaataaataagctgaataacagatgagtaacaaa

SEQ ID NO: 60096 - DNA, 40 bp, Homo sapiens
ttgttactcatctgttattcagcttatttatttatttatt

SEQ ID NO: 60097 - DNA, 40 bp, Homo sapiens
aataaataaataaataagctgaataacagatgagtaacaa

SEQ ID NO: 60098 - DNA, 40 bp, Homo sapiens
tgttactcatctgttattcagcttatttatttatttattt

SEQ ID NO: 60099 - DNA, 40 bp, Homo sapiens
aaataaataaataaataagctgaataacagatgagtaaca

SEQ ID NO: 60100 - DNA, 40 bp, Homo sapiens
gttactcatctgttattcagcttatttatttatttattta

SEQ ID NO: 60101 - DNA, 40 bp, Homo sapiens
taaataaataaataaataagctgaataacagatgagtaac

SEQ ID NO: 60102 - DNA, 40 bp, Homo sapiens
ttactcatctgttattcagcttatttatttatttatttat

SEQ ID NO: 60103 - DNA, 40 bp, Homo sapiens
ataaataaataaataaataagctgaataacagatgagtaa

SEQ ID NO: 60104 - DNA, 40 bp, Homo sapiens
tactcatctgttattcagcttatttatttatttatttatt

SEQ ID NO: 60105 - DNA, 40 bp, Homo sapiens
aataaataaataaataaataagctgaataacagatgagta

SEQ ID NO: 60106 - DNA, 40 bp, Homo sapiens
actcatctgttattcagcttatttatttatttatttattt

SEQ ID NO: 60107 - DNA, 40 bp, Homo sapiens
aaataaataaataaataaataagctgaataacagatgagt

SEQ ID NO: 60108 - DNA, 40 bp, Homo sapiens
ctcatctgttattcagcttatttatttatttatttattta

SEQ ID NO: 60109 - DNA, 40 bp, Homo sapiens
taaataaataaataaataaataagctgaataacagatgag

SEQ ID NO: 60110 - DNA, 40 bp, Homo sapiens
tcatctgttattcagcttatttatttatttatttatttat

SEQ ID NO: 60111 - DNA, 40 bp, Homo sapiens
ataaataaataaataaataaataagctgaataacagatga

SEQ ID NO: 60112 - DNA, 40 bp, Homo sapiens
catctgttattcagcttatttatttatttatttatttatt

SEQ ID NO: 60113 - DNA, 40 bp, Homo sapiens
aataaataaataaataaataaataagctgaataacagatg

SEQ ID NO: 60114 - DNA, 40 bp, Homo sapiens
atctgttattcagcttatttatttatttatttatttattt

SEQ ID NO: 60115 - DNA, 40 bp, Homo sapiens
aaataaataaataaataaataaataagctgaataacagat

SEQ ID NO: 60116 - DNA, 40 bp, Homo sapiens
tctgttattcagcttatttatttatttatttatttattta

SEQ ID NO: 60117 - DNA, 40 bp, Homo sapiens
taaataaataaataaataaataaataagctgaataacaga

SEQ ID NO: 60118 - DNA, 40 bp, Homo sapiens
ctgttattcagcttatttatttatttatttatttatttat

SEQ ID NO: 60119 - DNA, 40 bp, Homo sapiens
ataaataaataaataaataaataaataagctgaataacag

SEQ ID NO: 60120 - DNA, 40 bp, Homo sapiens
tgttattcagcttatttatttatttatttatttatttatt

SEQ ID NO: 60121 - DNA, 40 bp, Homo sapiens
aataaataaataaataaataaataaataagctgaataaca

SEQ ID NO: 60122 - DNA, 40 bp, Homo sapiens
gttattcagcttatttatttatttatttatttatttattt

SEQ ID NO: 60123 - DNA, 40 bp, Homo sapiens
aaataaataaataaataaataaataaataagctgaataac

SEQ ID NO: 60124 - DNA, 40 bp, Homo sapiens
ttattcagcttatttatttatttatttatttatttatttt

SEQ ID NO: 60125 - DNA, 40 bp, Homo sapiens
aaaataaataaataaataaataaataaataagctgaataa

SEQ ID NO: 60126 - DNA, 40 bp, Homo sapiens
tattcagcttatttatttatttatttatttatttattttt

SEQ ID NO: 60127 - DNA, 40 bp, Homo sapiens
aaaaataaataaataaataaataaataaataagctgaata

SEQ ID NO: 60128 - DNA, 40 bp, Homo sapiens
attcagcttatttatttatttatttatttatttatttttc

SEQ ID NO: 60129 - DNA, 40 bp, Homo sapiens
gaaaaataaataaataaataaataaataaataagctgaat

SEQ ID NO: 60130 - DNA, 40 bp, Homo sapiens
ttcagcttatttatttatttatttatttatttatttttct

SEQ ID NO: 60131 - DNA, 40 bp, Homo sapiens
agaaaaataaataaataaataaataaataaataagctgaa

SEQ ID NO: 60132 - DNA, 40 bp, Homo sapiens
tcagcttatttatttatttatttatttatttatttttctt

SEQ ID NO: 60133 - DNA, 40 bp, Homo sapiens
aagaaaaataaataaataaataaataaataaataagctga

SEQ ID NO: 60134 - DNA, 40 bp, Homo sapiens
cagcttatttatttatttatttatttatttatttttcttt

SEQ ID NO: 60135 - DNA, 40 bp, Homo sapiens
aaagaaaaataaataaataaataaataaataaataagctg

SEQ ID NO: 60136 - DNA, 40 bp, Homo sapiens
agcttatttatttatttatttatttatttatttttctttc

SEQ ID NO: 60137 - DNA, 40 bp, Homo sapiens
gaaagaaaaataaataaataaataaataaataaataagct

SEQ ID NO: 60138 - DNA, 40 bp, Homo sapiens
gcttatttatttatttatttatttatttatttttctttct

SEQ ID NO: 60139 - DNA, 40 bp, Homo sapiens
agaaagaaaaataaataaataaataaataaataaataagc

SEQ ID NO: 60140 - DNA, 40 bp, Homo sapiens
cttatttatttatttatttatttatttatttttctttctt

SEQ ID NO: 60141 - DNA, 40 bp, Homo sapiens
aagaaagaaaaataaataaataaataaataaataaataag

SEQ ID NO: 60142 - DNA, 40 bp, Homo sapiens
ttatttatttatttatttatttatttatttttctttcttt

SEQ ID NO: 60143 - DNA, 40 bp, Homo sapiens
aaagaaagaaaaataaataaataaataaataaataaataa

SEQ ID NO: 60144 - DNA, 40 bp, Homo sapiens
tatttatttatttatttatttatttatttttctttctttc

SEQ ID NO: 60145 - DNA, 40 bp, Homo sapiens
gaaagaaagaaaaataaataaataaataaataaataaata

SEQ ID NO: 60146 - DNA, 40 bp, Homo sapiens
atttatttatttatttatttatttatttttctttctttct

SEQ ID NO: 60147 - DNA, 40 bp, Homo sapiens
agaaagaaagaaaaataaataaataaataaataaataaat

SEQ ID NO: 60148 - DNA, 40 bp, Homo sapiens
tttatttatttatttatttatttatttttctttctttctt

SEQ ID NO: 60149 - DNA, 40 bp, Homo sapiens
aagaaagaaagaaaaataaataaataaataaataaataaa

SEQ ID NO: 60150 - DNA, 40 bp, Homo sapiens
ttatttatttatttatttatttatttttctttctttcttg

SEQ ID NO: 60151 - DNA, 40 bp, Homo sapiens
caagaaagaaagaaaaataaataaataaataaataaataa

SEQ ID NO: 60152 - DNA, 40 bp, Homo sapiens
tatttatttatttatttatttatttttctttctttcttgt

SEQ ID NO: 60153 - DNA, 40 bp, Homo sapiens
acaagaaagaaagaaaaataaataaataaataaataaata

SEQ ID NO: 60154 - DNA, 40 bp, Homo sapiens
atttatttatttatttatttatttttctttctttcttgtt

SEQ ID NO: 60155 - DNA, 40 bp, Homo sapiens
aacaagaaagaaagaaaaataaataaataaataaataaat

SEQ ID NO: 60156 - DNA, 40 bp, Homo sapiens
tttatttatttatttatttatttttctttctttcttgttt

SEQ ID NO: 60157 - DNA, 40 bp, Homo sapiens
aaacaagaaagaaagaaaaataaataaataaataaataaa

SEQ ID NO: 60158 - DNA, 40 bp, Homo sapiens
ttatttatttatttatttatttttctttctttcttgtttt

SEQ ID NO: 60159 - DNA, 40 bp, Homo sapiens
aaaacaagaaagaaagaaaaataaataaataaataaataa

SEQ ID NO: 60160 - DNA, 40 bp, Homo sapiens
tatttatttatttatttatttttctttctttcttgttttt

SEQ ID NO: 60161 - DNA, 40 bp, Homo sapiens
aaaaacaagaaagaaagaaaaataaataaataaataaata

SEQ ID NO: 60162 - DNA, 40 bp, Homo sapiens
atttatttatttatttatttttctttctttcttgtttttt

SEQ ID NO: 60163 - DNA, 40 bp, Homo sapiens
aaaaaacaagaaagaaagaaaaataaataaataaataaat

SEQ ID NO: 60164 - DNA, 40 bp, Homo sapiens
tttatttatttatttatttttctttctttcttgttttttt

SEQ ID NO: 60165 - DNA, 40 bp, Homo sapiens
aaaaaaacaagaaagaaagaaaaataaataaataaataaa

SEQ ID NO: 60166 - DNA, 40 bp, Homo sapiens
ttatttatttatttatttttctttctttcttgtttttttt

SEQ ID NO: 60167 - DNA, 40 bp, Homo sapiens
aaaaaaaacaagaaagaaagaaaaataaataaataaataa

SEQ ID NO: 60168 - DNA, 40 bp, Homo sapiens
tatttatttatttatttttctttctttcttgttttttttt

SEQ ID NO: 60169 - DNA, 40 bp, Homo sapiens
aaaaaaaaacaagaaagaaagaaaaataaataaataaata

SEQ ID NO: 60170 - DNA, 40 bp, Homo sapiens
atttatttatttatttttctttctttcttgtttttttttt

SEQ ID NO: 60171 - DNA, 40 bp, Homo sapiens
aaaaaaaaaacaagaaagaaagaaaaataaataaataaat

SEQ ID NO: 60172 - DNA, 40 bp, Homo sapiens
tttatttatttatttttctttctttcttgttttttttttt

SEQ ID NO: 60173 - DNA, 40 bp, Homo sapiens
aaaaaaaaaaacaagaaagaaagaaaaataaataaataaa

SEQ ID NO: 60174 - DNA, 40 bp, Homo sapiens
ttatttatttatttttctttctttcttgtttttttttttt

SEQ ID NO: 60175 - DNA, 40 bp, Homo sapiens
aaaaaaaaaaaacaagaaagaaagaaaaataaataaataa

SEQ ID NO: 60176 - DNA, 40 bp, Homo sapiens
tatttatttatttttctttctttcttgttttttttttttg

SEQ ID NO: 60177 - DNA, 40 bp, Homo sapiens
caaaaaaaaaaaacaagaaagaaagaaaaataaataaata

SEQ ID NO: 60178 - DNA, 40 bp, Homo sapiens
atttatttatttttctttctttcttgttttttttttttga

SEQ ID NO: 60179 - DNA, 40 bp, Homo sapiens
tcaaaaaaaaaaaacaagaaagaaagaaaaataaataaat

SEQ ID NO: 60180 - DNA, 40 bp, Homo sapiens
tttatttatttttctttctttcttgttttttttttttgag

SEQ ID NO: 60181 - DNA, 40 bp, Homo sapiens
ctcaaaaaaaaaaaacaagaaagaaagaaaaataaataaa

SEQ ID NO: 60182 - DNA, 40 bp, Homo sapiens
ttatttatttttctttctttcttgttttttttttttgaga

SEQ ID NO: 60183 - DNA, 40 bp, Homo sapiens
tctcaaaaaaaaaaaacaagaaagaaagaaaaataaataa

SEQ ID NO: 60184 - DNA, 40 bp, Homo sapiens
tatttatttttctttctttcttgttttttttttttgagac

SEQ ID NO: 60185 - DNA, 40 bp, Homo sapiens
gtctcaaaaaaaaaaaacaagaaagaaagaaaaataaata

SEQ ID NO: 60186 - DNA, 40 bp, Homo sapiens
atttatttttctttctttcttgttttttttttttgagacg

SEQ ID NO: 60187 - DNA, 40 bp, Homo sapiens
cgtctcaaaaaaaaaaaacaagaaagaaagaaaaataaat

SEQ ID NO: 60188 - DNA, 40 bp, Homo sapiens
tttatttttctttctttcttgttttttttttttgagacgg

SEQ ID NO: 60189 - DNA, 40 bp, Homo sapiens
ccgtctcaaaaaaaaaaaacaagaaagaaagaaaaataaa

SEQ ID NO: 60190 - DNA, 40 bp, Homo sapiens
ttatttttctttctttcttgttttttttttttgagacgga

SEQ ID NO: 60191 - DNA, 40 bp, Homo sapiens
tccgtctcaaaaaaaaaaaacaagaaagaaagaaaaataa

SEQ ID NO: 60192 - DNA, 40 bp, Homo sapiens
tatttttctttctttcttgttttttttttttgagacggag

SEQ ID NO: 60193 - DNA, 40 bp, Homo sapiens
ctccgtctcaaaaaaaaaaaacaagaaagaaagaaaaata

SEQ ID NO: 60194 - DNA, 40 bp, Homo sapiens
atttttctttctttcttgttttttttttttgagacggagt

SEQ ID NO: 60195 - DNA, 40 bp, Homo sapiens
actccgtctcaaaaaaaaaaaacaagaaagaaagaaaaat

SEQ ID NO: 60196 - DNA, 40 bp, Homo sapiens
tttttctttctttcttgttttttttttttgagacggagtc

SEQ ID NO: 60197 - DNA, 40 bp, Homo sapiens
gactccgtctcaaaaaaaaaaaacaagaaagaaagaaaaa

SEQ ID NO: 60198 - DNA, 40 bp, Homo sapiens
ttttctttctttcttgttttttttttttgagacggagtct

SEQ ID NO: 60199 - DNA, 40 bp, Homo sapiens
agactccgtctcaaaaaaaaaaaacaagaaagaaagaaaa

SEQ ID NO: 60200 - DNA, 40 bp, Homo sapiens
tttctttctttcttgttttttttttttgagacggagtctt

SEQ ID NO: 60201 - DNA, 40 bp, Homo sapiens
aagactccgtctcaaaaaaaaaaaacaagaaagaaagaaa

SEQ ID NO: 60202 - DNA, 40 bp, Homo sapiens
ttctttctttcttgttttttttttttgagacggagtcttg

SEQ ID NO: 60203 - DNA, 40 bp, Homo sapiens
caagactccgtctcaaaaaaaaaaaacaagaaagaaagaa

SEQ ID NO: 60204 - DNA, 40 bp, Homo sapiens
tctttctttcttgttttttttttttgagacggagtcttgc

SEQ ID NO: 60205 - DNA, 40 bp, Homo sapiens
gcaagactccgtctcaaaaaaaaaaaacaagaaagaaaga

SEQ ID NO: 60206 - DNA, 40 bp, Homo sapiens
ctttctttcttgttttttttttttgagacggagtcttgct

SEQ ID NO: 60207 - DNA, 40 bp, Homo sapiens
agcaagactccgtctcaaaaaaaaaaaacaagaaagaaag

SEQ ID NO: 60208 - DNA, 40 bp, Homo sapiens
tttctttcttgttttttttttttgagacggagtcttgctt

SEQ ID NO: 60209 - DNA, 40 bp, Homo sapiens
aagcaagactccgtctcaaaaaaaaaaaacaagaaagaaa

SEQ ID NO: 60210 - DNA, 40 bp, Homo sapiens
ttctttcttgttttttttttttgagacggagtcttgcttt

SEQ ID NO: 60211 - DNA, 40 bp, Homo sapiens
aaagcaagactccgtctcaaaaaaaaaaaacaagaaagaa

SEQ ID NO: 60212 - DNA, 40 bp, Homo sapiens
tctttcttgttttttttttttgagacggagtcttgctttg

SEQ ID NO: 60213 - DNA, 40 bp, Homo sapiens
caaagcaagactccgtctcaaaaaaaaaaaacaagaaaga

SEQ ID NO: 60214 - DNA, 40 bp, Homo sapiens
ctttcttgttttttttttttgagacggagtcttgctttgt

SEQ ID NO: 60215 - DNA, 40 bp, Homo sapiens
acaaagcaagactccgtctcaaaaaaaaaaaacaagaaag

SEQ ID NO: 60216 - DNA, 40 bp, Homo sapiens
tttcttgttttttttttttgagacggagtcttgctttgtc

SEQ ID NO: 60217 - DNA, 40 bp, Homo sapiens
gacaaagcaagactccgtctcaaaaaaaaaaaacaagaaa

SEQ ID NO: 60218 - DNA, 40 bp, Homo sapiens
ttcttgttttttttttttgagacggagtcttgctttgtcg

SEQ ID NO: 60219 - DNA, 40 bp, Homo sapiens
cgacaaagcaagactccgtctcaaaaaaaaaaaacaagaa

SEQ ID NO: 60220 - DNA, 40 bp, Homo sapiens
tcttgttttttttttttgagacggagtcttgctttgtcgc

SEQ ID NO: 60221 - DNA, 40 bp, Homo sapiens
gcgacaaagcaagactccgtctcaaaaaaaaaaaacaaga

SEQ ID NO: 60222 - DNA, 40 bp, Homo sapiens
cttgttttttttttttgagacggagtcttgctttgtcgcc

SEQ ID NO: 60223 - DNA, 40 bp, Homo sapiens
ggcgacaaagcaagactccgtctcaaaaaaaaaaaacaag

SEQ ID NO: 60224 - DNA, 40 bp, Homo sapiens
ttgttttttttttttgagacggagtcttgctttgtcgccc

SEQ ID NO: 60225 - DNA, 40 bp, Homo sapiens
gggcgacaaagcaagactccgtctcaaaaaaaaaaaacaa

SEQ ID NO: 60226 - DNA, 40 bp, Homo sapiens
tgttttttttttttgagacggagtcttgctttgtcgccca

SEQ ID NO: 60227 - DNA, 40 bp, Homo sapiens
tgggcgacaaagcaagactccgtctcaaaaaaaaaaaaca

SEQ ID NO: 60228 - DNA, 40 bp, Homo sapiens
gttttttttttttgagacggagtcttgctttgtcgcccag

SEQ ID NO: 60229 - DNA, 40 bp, Homo sapiens
ctgggcgacaaagcaagactccgtctcaaaaaaaaaaaac

SEQ ID NO: 60230 - DNA, 40 bp, Homo sapiens
ttttttttttttgagacggagtcttgctttgtcgcccagg

SEQ ID NO: 60231 - DNA, 40 bp, Homo sapiens
cctgggcgacaaagcaagactccgtctcaaaaaaaaaaaa

SEQ ID NO: 60232 - DNA, 40 bp, Homo sapiens
tttttttttttgagacggagtcttgctttgtcgcccaggc

SEQ ID NO: 60233 - DNA, 40 bp, Homo sapiens
gcctgggcgacaaagcaagactccgtctcaaaaaaaaaaa

SEQ ID NO: 60234 - DNA, 40 bp, Homo sapiens
ttttttttttgagacggagtcttgctttgtcgcccaggct

SEQ ID NO: 60235 - DNA, 40 bp, Homo sapiens
agcctgggcgacaaagcaagactccgtctcaaaaaaaaaa

SEQ ID NO: 60236 - DNA, 40 bp, Homo sapiens
tttttttttgagacggagtcttgctttgtcgcccaggctg

SEQ ID NO: 60237 - DNA, 40 bp, Homo sapiens
cagcctgggcgacaaagcaagactccgtctcaaaaaaaaa

SEQ ID NO: 60238 - DNA, 40 bp, Homo sapiens
ttttttttgagacggagtcttgctttgtcgcccaggctgg

SEQ ID NO: 60239 - DNA, 40 bp, Homo sapiens
ccagcctgggcgacaaagcaagactccgtctcaaaaaaaa

SEQ ID NO: 60240 - DNA, 40 bp, Homo sapiens
tttttttgagacggagtcttgctttgtcgcccaggctgga

SEQ ID NO: 60241 - DNA, 40 bp, Homo sapiens
tccagcctgggcgacaaagcaagactccgtctcaaaaaaa

SEQ ID NO: 60242 - DNA, 40 bp, Homo sapiens
ttttttgagacggagtcttgctttgtcgcccaggctggag

SEQ ID NO: 60243 - DNA, 40 bp, Homo sapiens
ctccagcctgggcgacaaagcaagactccgtctcaaaaaa

SEQ ID NO: 60244 - DNA, 40 bp, Homo sapiens
tttttgagacggagtcttgctttgtcgcccaggctggagt

SEQ ID NO: 60245 - DNA, 40 bp, Homo sapiens
actccagcctgggcgacaaagcaagactccgtctcaaaaa

SEQ ID NO: 60246 - DNA, 40 bp, Homo sapiens
ttttgagacggagtcttgctttgtcgcccaggctggagta

SEQ ID NO: 60247 - DNA, 40 bp, Homo sapiens
tactccagcctgggcgacaaagcaagactccgtctcaaaa

SEQ ID NO: 60248 - DNA, 40 bp, Homo sapiens
tttgagacggagtcttgctttgtcgcccaggctggagtac

SEQ ID NO: 60249 - DNA, 40 bp, Homo sapiens
gtactccagcctgggcgacaaagcaagactccgtctcaaa

SEQ ID NO: 60250 - DNA, 40 bp, Homo sapiens
ttgagacggagtcttgctttgtcgcccaggctggagtaca

SEQ ID NO: 60251 - DNA, 40 bp, Homo sapiens
tgtactccagcctgggcgacaaagcaagactccgtctcaa

SEQ ID NO: 60252 - DNA, 40 bp, Homo sapiens
tgagacggagtcttgctttgtcgcccaggctggagtacag

SEQ ID NO: 60253 - DNA, 40 bp, Homo sapiens
ctgtactccagcctgggcgacaaagcaagactccgtctca

SEQ ID NO: 60254 - DNA, 40 bp, Homo sapiens
gagacggagtcttgctttgtcgcccaggctggagtacagt

SEQ ID NO: 60255 - DNA, 40 bp, Homo sapiens
actgtactccagcctgggcgacaaagcaagactccgtctc

SEQ ID NO: 60256 - DNA, 40 bp, Homo sapiens
agacggagtcttgctttgtcgcccaggctggagtacagtg

SEQ ID NO: 60257 - DNA, 40 bp, Homo sapiens
cactgtactccagcctgggcgacaaagcaagactccgtct

SEQ ID NO: 60258 - DNA, 40 bp, Homo sapiens
gacggagtcttgctttgtcgcccaggctggagtacagtgg

SEQ ID NO: 60259 - DNA, 40 bp, Homo sapiens
ccactgtactccagcctgggcgacaaagcaagactccgtc

SEQ ID NO: 60260 - DNA, 40 bp, Homo sapiens
acggagtcttgctttgtcgcccaggctggagtacagtggt

SEQ ID NO: 60261 - DNA, 40 bp, Homo sapiens
accactgtactccagcctgggcgacaaagcaagactccgt

SEQ ID NO: 60262 - DNA, 40 bp, Homo sapiens
cggagtcttgctttgtcgcccaggctggagtacagtggtg

SEQ ID NO: 60263 - DNA, 40 bp, Homo sapiens
caccactgtactccagcctgggcgacaaagcaagactccg

SEQ ID NO: 60264 - DNA, 40 bp, Homo sapiens
ggagtcttgctttgtcgcccaggctggagtacagtggtgg

SEQ ID NO: 60265 - DNA, 40 bp, Homo sapiens
ccaccactgtactccagcctgggcgacaaagcaagactcc

SEQ ID NO: 60266 - DNA, 40 bp, Homo sapiens
gagtcttgctttgtcgcccaggctggagtacagtggtggg

SEQ ID NO: 60267 - DNA, 40 bp, Homo sapiens
cccaccactgtactccagcctgggcgacaaagcaagactc

SEQ ID NO: 60268 - DNA, 40 bp, Homo sapiens
agtcttgctttgtcgcccaggctggagtacagtggtggga

SEQ ID NO: 60269 - DNA, 40 bp, Homo sapiens
tcccaccactgtactccagcctgggcgacaaagcaagact

SEQ ID NO: 60270 - DNA, 40 bp, Homo sapiens
gtcttgctttgtcgcccaggctggagtacagtggtgggat

SEQ ID NO: 60271 - DNA, 40 bp, Homo sapiens
atcccaccactgtactccagcctgggcgacaaagcaagac

SEQ ID NO: 60272 - DNA, 40 bp, Homo sapiens
tcttgctttgtcgcccaggctggagtacagtggtgggatc

SEQ ID NO: 60273 - DNA, 40 bp, Homo sapiens
gatcccaccactgtactccagcctgggcgacaaagcaaga

SEQ ID NO: 60274 - DNA, 40 bp, Homo sapiens
cttgctttgtcgcccaggctggagtacagtggtgggatct

SEQ ID NO: 60275 - DNA, 40 bp, Homo sapiens
agatcccaccactgtactccagcctgggcgacaaagcaag

SEQ ID NO: 60276 - DNA, 40 bp, Homo sapiens
ttgctttgtcgcccaggctggagtacagtggtgggatctt

SEQ ID NO: 60277 - DNA, 40 bp, Homo sapiens
aagatcccaccactgtactccagcctgggcgacaaagcaa

SEQ ID NO: 60278 - DNA, 40 bp, Homo sapiens
tgctttgtcgcccaggctggagtacagtggtgggatcttg

SEQ ID NO: 60279 - DNA, 40 bp, Homo sapiens
caagatcccaccactgtactccagcctgggcgacaaagca

SEQ ID NO: 60280 - DNA, 40 bp, Homo sapiens
gctttgtcgcccaggctggagtacagtggtgggatcttgg

SEQ ID NO: 60281 - DNA, 40 bp, Homo sapiens
ccaagatcccaccactgtactccagcctgggcgacaaagc

SEQ ID NO: 60282 - DNA, 40 bp, Homo sapiens
ctttgtcgcccaggctggagtacagtggtgggatcttggc

SEQ ID NO: 60283 - DNA, 40 bp, Homo sapiens
gccaagatcccaccactgtactccagcctgggcgacaaag

SEQ ID NO: 60284 - DNA, 40 bp, Homo sapiens
tttgtcgcccaggctggagtacagtggtgggatcttggct

SEQ ID NO: 60285 - DNA, 40 bp, Homo sapiens
agccaagatcccaccactgtactccagcctgggcgacaaa

SEQ ID NO: 60286 - DNA, 40 bp, Homo sapiens
ttgtcgcccaggctggagtacagtggtgggatcttggctc

SEQ ID NO: 60287 - DNA, 40 bp, Homo sapiens
gagccaagatcccaccactgtactccagcctgggcgacaa

SEQ ID NO: 60288 - DNA, 40 bp, Homo sapiens
tgtcgcccaggctggagtacagtggtgggatcttggctca

SEQ ID NO: 60289 - DNA, 40 bp, Homo sapiens
tgagccaagatcccaccactgtactccagcctgggcgaca

SEQ ID NO: 60290 - DNA, 40 bp, Homo sapiens
gtcgcccaggctggagtacagtggtgggatcttggctcac

SEQ ID NO: 60291 - DNA, 40 bp, Homo sapiens
gtgagccaagatcccaccactgtactccagcctgggcgac

SEQ ID NO: 60292 - DNA, 40 bp, Homo sapiens
tcgcccaggctggagtacagtggtgggatcttggctcact

SEQ ID NO: 60293 - DNA, 40 bp, Homo sapiens
agtgagccaagatcccaccactgtactccagcctgggcga

SEQ ID NO: 60294 - DNA, 40 bp, Homo sapiens
cgcccaggctggagtacagtggtgggatcttggctcactg

SEQ ID NO: 60295 - DNA, 40 bp, Homo sapiens
cagtgagccaagatcccaccactgtactccagcctgggcg

SEQ ID NO: 60296 - DNA, 40 bp, Homo sapiens
gcccaggctggagtacagtggtgggatcttggctcactgc

SEQ ID NO: 60297 - DNA, 40 bp, Homo sapiens
gcagtgagccaagatcccaccactgtactccagcctgggc

SEQ ID NO: 60298 - DNA, 40 bp, Homo sapiens
cccaggctggagtacagtggtgggatcttggctcactgca

SEQ ID NO: 60299 - DNA, 40 bp, Homo sapiens
tgcagtgagccaagatcccaccactgtactccagcctggg

SEQ ID NO: 60300 - DNA, 40 bp, Homo sapiens
ccaggctggagtacagtggtgggatcttggctcactgcag

SEQ ID NO: 60301 - DNA, 40 bp, Homo sapiens
ctgcagtgagccaagatcccaccactgtactccagcctgg

SEQ ID NO: 60302 - DNA, 40 bp, Homo sapiens
caggctggagtacagtggtgggatcttggctcactgcagg

SEQ ID NO: 60303 - DNA, 40 bp, Homo sapiens
cctgcagtgagccaagatcccaccactgtactccagcctg

SEQ ID NO: 60304 - DNA, 40 bp, Homo sapiens
aggctggagtacagtggtgggatcttggctcactgcaggc

SEQ ID NO: 60305 - DNA, 40 bp, Homo sapiens
gcctgcagtgagccaagatcccaccactgtactccagcct

SEQ ID NO: 60306 - DNA, 40 bp, Homo sapiens
ggctggagtacagtggtgggatcttggctcactgcaggct

SEQ ID NO: 60307 - DNA, 40 bp, Homo sapiens
agcctgcagtgagccaagatcccaccactgtactccagcc

SEQ ID NO: 60308 - DNA, 40 bp, Homo sapiens
gctggagtacagtggtgggatcttggctcactgcaggctc

SEQ ID NO: 60309 - DNA, 40 bp, Homo sapiens
gagcctgcagtgagccaagatcccaccactgtactccagc

SEQ ID NO: 60310 - DNA, 40 bp, Homo sapiens
ctggagtacagtggtgggatcttggctcactgcaggctcc

SEQ ID NO: 60311 - DNA, 40 bp, Homo sapiens
ggagcctgcagtgagccaagatcccaccactgtactccag

SEQ ID NO: 60312 - DNA, 40 bp, Homo sapiens
tggagtacagtggtgggatcttggctcactgcaggctccg

SEQ ID NO: 60313 - DNA, 40 bp, Homo sapiens
cggagcctgcagtgagccaagatcccaccactgtactcca

SEQ ID NO: 60314 - DNA, 40 bp, Homo sapiens
ggagtacagtggtgggatcttggctcactgcaggctccgc

SEQ ID NO: 60315 - DNA, 40 bp, Homo sapiens
gcggagcctgcagtgagccaagatcccaccactgtactcc

SEQ ID NO: 60316 - DNA, 40 bp, Homo sapiens
gagtacagtggtgggatcttggctcactgcaggctccgcc

SEQ ID NO: 60317 - DNA, 40 bp, Homo sapiens
ggcggagcctgcagtgagccaagatcccaccactgtactc

SEQ ID NO: 60318 - DNA, 40 bp, Homo sapiens
agtacagtggtgggatcttggctcactgcaggctccgcct

SEQ ID NO: 60319 - DNA, 40 bp, Homo sapiens
aggcggagcctgcagtgagccaagatcccaccactgtact

SEQ ID NO: 60320 - DNA, 40 bp, Homo sapiens
gtacagtggtgggatcttggctcactgcaggctccgcctc

SEQ ID NO: 60321 - DNA, 40 bp, Homo sapiens
gaggcggagcctgcagtgagccaagatcccaccactgtac

SEQ ID NO: 60322 - DNA, 40 bp, Homo sapiens
tacagtggtgggatcttggctcactgcaggctccgcctcc

SEQ ID NO: 60323 - DNA, 40 bp, Homo sapiens
ggaggcggagcctgcagtgagccaagatcccaccactgta

SEQ ID NO: 60324 - DNA, 40 bp, Homo sapiens
acagtggtgggatcttggctcactgcaggctccgcctccc

SEQ ID NO: 60325 - DNA, 40 bp, Homo sapiens
gggaggcggagcctgcagtgagccaagatcccaccactgt

SEQ ID NO: 60326 - DNA, 40 bp, Homo sapiens
cagtggtgggatcttggctcactgcaggctccgcctcccg

SEQ ID NO: 60327 - DNA, 40 bp, Homo sapiens
cgggaggcggagcctgcagtgagccaagatcccaccactg

SEQ ID NO: 60328 - DNA, 40 bp, Homo sapiens
agtggtgggatcttggctcactgcaggctccgcctcccgg

SEQ ID NO: 60329 - DNA, 40 bp, Homo sapiens
ccgggaggcggagcctgcagtgagccaagatcccaccact

SEQ ID NO: 60330 - DNA, 40 bp, Homo sapiens
gtggtgggatcttggctcactgcaggctccgcctcccggg

SEQ ID NO: 60331 - DNA, 40 bp, Homo sapiens
cccgggaggcggagcctgcagtgagccaagatcccaccac

SEQ ID NO: 60332 - DNA, 40 bp, Homo sapiens
tggtgggatcttggctcactgcaggctccgcctcccgggt

SEQ ID NO: 60333 - DNA, 40 bp, Homo sapiens
acccgggaggcggagcctgcagtgagccaagatcccacca

SEQ ID NO: 60334 - DNA, 40 bp, Homo sapiens
ggtgggatcttggctcactgcaggctccgcctcccgggtt

SEQ ID NO: 60335 - DNA, 40 bp, Homo sapiens
aacccgggaggcggagcctgcagtgagccaagatcccacc

SEQ ID NO: 60336 - DNA, 40 bp, Homo sapiens
gtgggatcttggctcactgcaggctccgcctcccgggttc

SEQ ID NO: 60337 - DNA, 40 bp, Homo sapiens
gaacccgggaggcggagcctgcagtgagccaagatcccac

SEQ ID NO: 60338 - DNA, 40 bp, Homo sapiens
tgggatcttggctcactgcaggctccgcctcccgggttca

SEQ ID NO: 60339 - DNA, 40 bp, Homo sapiens
tgaacccgggaggcggagcctgcagtgagccaagatccca

SEQ ID NO: 60340 - DNA, 40 bp, Homo sapiens
gggatcttggctcactgcaggctccgcctcccgggttcac

SEQ ID NO: 60341 - DNA, 40 bp, Homo sapiens
gtgaacccgggaggcggagcctgcagtgagccaagatccc

SEQ ID NO: 60342 - DNA, 40 bp, Homo sapiens
ggatcttggctcactgcaggctccgcctcccgggttcaca

SEQ ID NO: 60343 - DNA, 40 bp, Homo sapiens
tgtgaacccgggaggcggagcctgcagtgagccaagatcc

SEQ ID NO: 60344 - DNA, 40 bp, Homo sapiens
gatcttggctcactgcaggctccgcctcccgggttcacac

SEQ ID NO: 60345 - DNA, 40 bp, Homo sapiens
gtgtgaacccgggaggcggagcctgcagtgagccaagatc

SEQ ID NO: 60346 - DNA, 40 bp, Homo sapiens
atcttggctcactgcaggctccgcctcccgggttcacacc

SEQ ID NO: 60347 - DNA, 40 bp, Homo sapiens
ggtgtgaacccgggaggcggagcctgcagtgagccaagat

SEQ ID NO: 60348 - DNA, 40 bp, Homo sapiens
tcttggctcactgcaggctccgcctcccgggttcacacca

SEQ ID NO: 60349 - DNA, 40 bp, Homo sapiens
tggtgtgaacccgggaggcggagcctgcagtgagccaaga

SEQ ID NO: 60350 - DNA, 40 bp, Homo sapiens
cttggctcactgcaggctccgcctcccgggttcacaccat

SEQ ID NO: 60351 - DNA, 40 bp, Homo sapiens
atggtgtgaacccgggaggcggagcctgcagtgagccaag

SEQ ID NO: 60352 - DNA, 40 bp, Homo sapiens
ttggctcactgcaggctccgcctcccgggttcacaccatt

SEQ ID NO: 60353 - DNA, 40 bp, Homo sapiens
aatggtgtgaacccgggaggcggagcctgcagtgagccaa

SEQ ID NO: 60354 - DNA, 40 bp, Homo sapiens
tggctcactgcaggctccgcctcccgggttcacaccattc

SEQ ID NO: 60355 - DNA, 40 bp, Homo sapiens
gaatggtgtgaacccgggaggcggagcctgcagtgagcca

SEQ ID NO: 60356 - DNA, 40 bp, Homo sapiens
ggctcactgcaggctccgcctcccgggttcacaccattct

SEQ ID NO: 60357 - DNA, 40 bp, Homo sapiens
agaatggtgtgaacccgggaggcggagcctgcagtgagcc

SEQ ID NO: 60358 - DNA, 40 bp, Homo sapiens
gctcactgcaggctccgcctcccgggttcacaccattctt

SEQ ID NO: 60359 - DNA, 40 bp, Homo sapiens
aagaatggtgtgaacccgggaggcggagcctgcagtgagc

SEQ ID NO: 60360 - DNA, 40 bp, Homo sapiens
ctcactgcaggctccgcctcccgggttcacaccattcttc

SEQ ID NO: 60361 - DNA, 40 bp, Homo sapiens
gaagaatggtgtgaacccgggaggcggagcctgcagtgag

SEQ ID NO: 60362 - DNA, 40 bp, Homo sapiens
tcactgcaggctccgcctcccgggttcacaccattcttct

SEQ ID NO: 60363 - DNA, 40 bp, Homo sapiens
agaagaatggtgtgaacccgggaggcggagcctgcagtga

SEQ ID NO: 60364 - DNA, 40 bp, Homo sapiens
cactgcaggctccgcctcccgggttcacaccattcttctg

SEQ ID NO: 60365 - DNA, 40 bp, Homo sapiens
cagaagaatggtgtgaacccgggaggcggagcctgcagtg

SEQ ID NO: 60366 - DNA, 40 bp, Homo sapiens
actgcaggctccgcctcccgggttcacaccattcttctgc

SEQ ID NO: 60367 - DNA, 40 bp, Homo sapiens
gcagaagaatggtgtgaacccgggaggcggagcctgcagt

SEQ ID NO: 60368 - DNA, 40 bp, Homo sapiens
ctgcaggctccgcctcccgggttcacaccattcttctgcc

SEQ ID NO: 60369 - DNA, 40 bp, Homo sapiens
ggcagaagaatggtgtgaacccgggaggcggagcctgcag

SEQ ID NO: 60370 - DNA, 40 bp, Homo sapiens
tgcaggctccgcctcccgggttcacaccattcttctgcct

SEQ ID NO: 60371 - DNA, 40 bp, Homo sapiens
aggcagaagaatggtgtgaacccgggaggcggagcctgca

SEQ ID NO: 60372 - DNA, 40 bp, Homo sapiens
gcaggctccgcctcccgggttcacaccattcttctgcctc

SEQ ID NO: 60373 - DNA, 40 bp, Homo sapiens
gaggcagaagaatggtgtgaacccgggaggcggagcctgc

SEQ ID NO: 60374 - DNA, 40 bp, Homo sapiens
caggctccgcctcccgggttcacaccattcttctgcctca

SEQ ID NO: 60375 - DNA, 40 bp, Homo sapiens
tgaggcagaagaatggtgtgaacccgggaggcggagcctg

SEQ ID NO: 60376 - DNA, 40 bp, Homo sapiens
aggctccgcctcccgggttcacaccattcttctgcctcag

SEQ ID NO: 60377 - DNA, 40 bp, Homo sapiens
ctgaggcagaagaatggtgtgaacccgggaggcggagcct

SEQ ID NO: 60378 - DNA, 40 bp, Homo sapiens
ggctccgcctcccgggttcacaccattcttctgcctcagc

SEQ ID NO: 60379 - DNA, 40 bp, Homo sapiens
gctgaggcagaagaatggtgtgaacccgggaggcggagcc

SEQ ID NO: 60380 - DNA, 40 bp, Homo sapiens
gctccgcctcccgggttcacaccattcttctgcctcagcc

SEQ ID NO: 60381 - DNA, 40 bp, Homo sapiens
ggctgaggcagaagaatggtgtgaacccgggaggcggagc

SEQ ID NO: 60382 - DNA, 40 bp, Homo sapiens
ctccgcctcccgggttcacaccattcttctgcctcagcct

SEQ ID NO: 60383 - DNA, 40 bp, Homo sapiens
aggctgaggcagaagaatggtgtgaacccgggaggcggag

SEQ ID NO: 60384 - DNA, 40 bp, Homo sapiens
tccgcctcccgggttcacaccattcttctgcctcagcctc

SEQ ID NO: 60385 - DNA, 40 bp, Homo sapiens
gaggctgaggcagaagaatggtgtgaacccgggaggcgga

SEQ ID NO: 60386 - DNA, 40 bp, Homo sapiens
ccgcctcccgggttcacaccattcttctgcctcagcctcc

SEQ ID NO: 60387 - DNA, 40 bp, Homo sapiens
ggaggctgaggcagaagaatggtgtgaacccgggaggcgg

SEQ ID NO: 60388 - DNA, 40 bp, Homo sapiens
cgcctcccgggttcacaccattcttctgcctcagcctccc

SEQ ID NO: 60389 - DNA, 40 bp, Homo sapiens
gggaggctgaggcagaagaatggtgtgaacccgggaggcg

SEQ ID NO: 60390 - DNA, 40 bp, Homo sapiens
gcctcccgggttcacaccattcttctgcctcagcctccca

SEQ ID NO: 60391 - DNA, 40 bp, Homo sapiens
tgggaggctgaggcagaagaatggtgtgaacccgggaggc

SEQ ID NO: 60392 - DNA, 40 bp, Homo sapiens
cctcccgggttcacaccattcttctgcctcagcctcccaa

SEQ ID NO: 60393 - DNA, 40 bp, Homo sapiens
ttgggaggctgaggcagaagaatggtgtgaacccgggagg

SEQ ID NO: 60394 - DNA, 40 bp, Homo sapiens
ctcccgggttcacaccattcttctgcctcagcctcccaag

SEQ ID NO: 60395 - DNA, 40 bp, Homo sapiens
cttgggaggctgaggcagaagaatggtgtgaacccgggag

SEQ ID NO: 60396 - DNA, 40 bp, Homo sapiens
tcccgggttcacaccattcttctgcctcagcctcccaagt

SEQ ID NO: 60397 - DNA, 40 bp, Homo sapiens
acttgggaggctgaggcagaagaatggtgtgaacccggga

SEQ ID NO: 60398 - DNA, 40 bp, Homo sapiens
cccgggttcacaccattcttctgcctcagcctcccaagta

SEQ ID NO: 60399 - DNA, 40 bp, Homo sapiens
tacttgggaggctgaggcagaagaatggtgtgaacccggg

SEQ ID NO: 60400 - DNA, 40 bp, Homo sapiens
ccgggttcacaccattcttctgcctcagcctcccaagtag

SEQ ID NO: 60401 - DNA, 40 bp, Homo sapiens
ctacttgggaggctgaggcagaagaatggtgtgaacccgg

SEQ ID NO: 60402 - DNA, 40 bp, Homo sapiens
cgggttcacaccattcttctgcctcagcctcccaagtagc

SEQ ID NO: 60403 - DNA, 40 bp, Homo sapiens
gctacttgggaggctgaggcagaagaatggtgtgaacccg

SEQ ID NO: 60404 - DNA, 40 bp, Homo sapiens
gggttcacaccattcttctgcctcagcctcccaagtagct

SEQ ID NO: 60405 - DNA, 40 bp, Homo sapiens
agctacttgggaggctgaggcagaagaatggtgtgaaccc

SEQ ID NO: 60406 - DNA, 40 bp, Homo sapiens
ggttcacaccattcttctgcctcagcctcccaagtagctg

SEQ ID NO: 60407 - DNA, 40 bp, Homo sapiens
cagctacttgggaggctgaggcagaagaatggtgtgaacc

SEQ ID NO: 60408 - DNA, 40 bp, Homo sapiens
gttcacaccattcttctgcctcagcctcccaagtagctgg

SEQ ID NO: 60409 - DNA, 40 bp, Homo sapiens
ccagctacttgggaggctgaggcagaagaatggtgtgaac

SEQ ID NO: 60410 - DNA, 40 bp, Homo sapiens
ttcacaccattcttctgcctcagcctcccaagtagctggg

SEQ ID NO: 60411 - DNA, 40 bp, Homo sapiens
cccagctacttgggaggctgaggcagaagaatggtgtgaa

SEQ ID NO: 60412 - DNA, 40 bp, Homo sapiens
tcacaccattcttctgcctcagcctcccaagtagctggga

SEQ ID NO: 60413 - DNA, 40 bp, Homo sapiens
tcccagctacttgggaggctgaggcagaagaatggtgtga

SEQ ID NO: 60414 - DNA, 40 bp, Homo sapiens
cacaccattcttctgcctcagcctcccaagtagctgggac

SEQ ID NO: 60415 - DNA, 40 bp, Homo sapiens
gtcccagctacttgggaggctgaggcagaagaatggtgtg

SEQ ID NO: 60416 - DNA, 40 bp, Homo sapiens
acaccattcttctgcctcagcctcccaagtagctgggact

SEQ ID NO: 60417 - DNA, 40 bp, Homo sapiens
agtcccagctacttgggaggctgaggcagaagaatggtgt

SEQ ID NO: 60418 - DNA, 40 bp, Homo sapiens
caccattcttctgcctcagcctcccaagtagctgggacta

SEQ ID NO: 60419 - DNA, 40 bp, Homo sapiens
tagtcccagctacttgggaggctgaggcagaagaatggtg

SEQ ID NO: 60420 - DNA, 40 bp, Homo sapiens
accattcttctgcctcagcctcccaagtagctgggactac

SEQ ID NO: 60421 - DNA, 40 bp, Homo sapiens
gtagtcccagctacttgggaggctgaggcagaagaatggt

SEQ ID NO: 60422 - DNA, 40 bp, Homo sapiens; identical to SEQ ID NO: 10886

SEQ ID NO: 60423 - DNA, 40 bp, Homo sapiens; identical to SEQ ID NO: 10887

SEQ ID NO: 60424 - DNA, 40 bp, Homo sapiens; identical to SEQ ID NO: 10888

SEQ ID NO: 60425 - DNA, 40 bp, Homo sapiens; identical to SEQ ID NO: 10889

SEQ ID NO: 60426 - DNA, 40 bp, Homo sapiens; identical to SEQ ID NO: 10890

SEQ ID NO: 60427 - DNA, 40 bp, Homo sapiens; identical to SEQ ID NO: 10891

SEQ ID NO: 60428 - DNA, 40 bp, Homo sapiens; identical to SEQ ID NO: 10892

SEQ ID NO: 60429 - DNA, 40 bp, Homo sapiens; identical to SEQ ID NO: 10893

SEQ ID NO: 60430 - DNA, 40 bp, Homo sapiens
tcttctgcctcagcctcccaagtagctgggactacaggca

SEQ ID NO: 60431 - DNA, 40 bp, Homo sapiens
tgcctgtagtcccagctacttgggaggctgaggcagaaga

SEQ ID NO: 60432 - DNA, 40 bp, Homo sapiens
cttctgcctcagcctcccaagtagctgggactacaggcac

SEQ ID NO: 60433 - DNA, 40 bp, Homo sapiens
gtgcctgtagtcccagctacttgggaggctgaggcagaag

SEQ ID NO: 60434 - DNA, 40 bp, Homo sapiens
ttctgcctcagcctcccaagtagctgggactacaggcacc

SEQ ID NO: 60435 - DNA, 40 bp, Homo sapiens
ggtgcctgtagtcccagctacttgggaggctgaggcagaa

SEQ ID NO: 60436 - DNA, 40 bp, Homo sapiens
tctgcctcagcctcccaagtagctgggactacaggcaccc

SEQ ID NO: 60437 - DNA, 40 bp, Homo sapiens
gggtgcctgtagtcccagctacttgggaggctgaggcaga

SEQ ID NO: 60438 - DNA, 40 bp, Homo sapiens
ctgcctcagcctcccaagtagctgggactacaggcacccg

SEQ ID NO: 60439 - DNA, 40 bp, Homo sapiens
cgggtgcctgtagtcccagctacttgggaggctgaggcag

SEQ ID NO: 60440 - DNA, 40 bp, Homo sapiens
tgcctcagcctcccaagtagctgggactacaggcacccgc

SEQ ID NO: 60441 - DNA, 40 bp, Homo sapiens
gcgggtgcctgtagtcccagctacttgggaggctgaggca

SEQ ID NO: 60442 - DNA, 40 bp, Homo sapiens
gcctcagcctcccaagtagctgggactacaggcacccgcc

SEQ ID NO: 60443 - DNA, 40 bp, Homo sapiens
ggcgggtgcctgtagtcccagctacttgggaggctgaggc

SEQ ID NO: 60444 - DNA, 40 bp, Homo sapiens
cctcagcctcccaagtagctgggactacaggcacccgcca

SEQ ID NO: 60445 - DNA, 40 bp, Homo sapiens
tggcgggtgcctgtagtcccagctacttgggaggctgagg

SEQ ID NO: 60446 - DNA, 40 bp, Homo sapiens
ctcagcctcccaagtagctgggactacaggcacccgccac

SEQ ID NO: 60447 - DNA, 40 bp, Homo sapiens
gtggcgggtgcctgtagtcccagctacttgggaggctgag

SEQ ID NO: 60448 - DNA, 40 bp, Homo sapiens
tcagcctcccaagtagctgggactacaggcacccgccacc

SEQ ID NO: 60449 - DNA, 40 bp, Homo sapiens
ggtggcgggtgcctgtagtcccagctacttgggaggctga

SEQ ID NO: 60450 - DNA, 40 bp, Homo sapiens
cagcctcccaagtagctgggactacaggcacccgccacca

SEQ ID NO: 60451 - DNA, 40 bp, Homo sapiens
tggtggcgggtgcctgtagtcccagctacttgggaggctg

SEQ ID NO: 60452 - DNA, 40 bp, Homo sapiens
agcctcccaagtagctgggactacaggcacccgccaccat

SEQ ID NO: 60453 - DNA, 40 bp, Homo sapiens
atggtggcgggtgcctgtagtcccagctacttgggaggct

SEQ ID NO: 60454 - DNA, 40 bp, Homo sapiens
gcctcccaagtagctgggactacaggcacccgccaccatg

SEQ ID NO: 60455 - DNA, 40 bp, Homo sapiens
catggtggcgggtgcctgtagtcccagctacttgggaggc

SEQ ID NO: 60456 - DNA, 40 bp, Homo sapiens
cctcccaagtagctgggactacaggcacccgccaccatgc

SEQ ID NO: 60457 - DNA, 40 bp, Homo sapiens
gcatggtggcgggtgcctgtagtcccagctacttgggagg

SEQ ID NO: 60458 - DNA, 40 bp, Homo sapiens
ctcccaagtagctgggactacaggcacccgccaccatgcc

SEQ ID NO: 60459 - DNA, 40 bp, Homo sapiens
ggcatggtggcgggtgcctgtagtcccagctacttgggag

SEQ ID NO: 60460 - DNA, 40 bp, Homo sapiens
tcccaagtagctgggactacaggcacccgccaccatgcct

SEQ ID NO: 60461 - DNA, 40 bp, Homo sapiens
aggcatggtggcgggtgcctgtagtcccagctacttggga

SEQ ID NO: 60462 - DNA, 40 bp, Homo sapiens
cccaagtagctgggactacaggcacccgccaccatgcctt

SEQ ID NO: 60463 - DNA, 40 bp, Homo sapiens
aaggcatggtggcgggtgcctgtagtcccagctacttggg

SEQ ID NO: 60464 - DNA, 40 bp, Homo sapiens
ccaagtagctgggactacaggcacccgccaccatgccttg

SEQ ID NO: 60465 - DNA, 40 bp, Homo sapiens
caaggcatggtggcgggtgcctgtagtcccagctacttgg

SEQ ID NO: 60466 - DNA, 40 bp, Homo sapiens
caagtagctgggactacaggcacccgccaccatgccttgc

SEQ ID NO: 60467 - DNA, 40 bp, Homo sapiens
gcaaggcatggtggcgggtgcctgtagtcccagctacttg

SEQ ID NO: 60468 - DNA, 40 bp, Homo sapiens
aagtagctgggactacaggcacccgccaccatgccttgct

SEQ ID NO: 60469 - DNA, 40 bp, Homo sapiens
agcaaggcatggtggcgggtgcctgtagtcccagctactt

SEQ ID NO: 60470 - DNA, 40 bp, Homo sapiens
agtagctgggactacaggcacccgccaccatgccttgcta

SEQ ID NO: 60471 - DNA, 40 bp, Homo sapiens
tagcaaggcatggtggcgggtgcctgtagtcccagctact

SEQ ID NO: 60472 - DNA, 40 bp, Homo sapiens
gtagctgggactacaggcacccgccaccatgccttgctaa

SEQ ID NO: 60473 - DNA, 40 bp, Homo sapiens
ttagcaaggcatggtggcgggtgcctgtagtcccagctac

SEQ ID NO: 60474 - DNA, 40 bp, Homo sapiens
tagctgggactacaggcacccgccaccatgccttgctaaa

SEQ ID NO: 60475 - DNA, 40 bp, Homo sapiens
tttagcaaggcatggtggcgggtgcctgtagtcccagcta

SEQ ID NO: 60476 - DNA, 40 bp, Homo sapiens
agctgggactacaggcacccgccaccatgccttgctaaat

SEQ ID NO: 60477 - DNA, 40 bp, Homo sapiens
atttagcaaggcatggtggcgggtgcctgtagtcccagct

SEQ ID NO: 60478 - DNA, 40 bp, Homo sapiens
gctgggactacaggcacccgccaccatgccttgctaaatt

SEQ ID NO: 60479 - DNA, 40 bp, Homo sapiens
aatttagcaaggcatggtggcgggtgcctgtagtcccagc

SEQ ID NO: 60480 - DNA, 40 bp, Homo sapiens
ctgggactacaggcacccgccaccatgccttgctaaattt

SEQ ID NO: 60481 - DNA, 40 bp, Homo sapiens
aaatttagcaaggcatggtggcgggtgcctgtagtcccag

SEQ ID NO: 60482 - DNA, 40 bp, Homo sapiens
tgggactacaggcacccgccaccatgccttgctaaatttt

SEQ ID NO: 60483 - DNA, 40 bp, Homo sapiens
aaaatttagcaaggcatggtggcgggtgcctgtagtccca

SEQ ID NO: 60484 - DNA, 40 bp, Homo sapiens
gggactacaggcacccgccaccatgccttgctaaattttt

SEQ ID NO: 60485 - DNA, 40 bp, Homo sapiens
aaaaatttagcaaggcatggtggcgggtgcctgtagtccc

SEQ ID NO: 60486 - DNA, 40 bp, Homo sapiens
ggactacaggcacccgccaccatgccttgctaaatttttg

SEQ ID NO: 60487 - DNA, 40 bp, Homo sapiens
caaaaatttagcaaggcatggtggcgggtgcctgtagtcc

SEQ ID NO: 60488 - DNA, 40 bp, Homo sapiens
gactacaggcacccgccaccatgccttgctaaatttttgt

SEQ ID NO: 60489 - DNA, 40 bp, Homo sapiens
acaaaaatttagcaaggcatggtggcgggtgcctgtagtc

SEQ ID NO: 60490 - DNA, 40 bp, Homo sapiens
actacaggcacccgccaccatgccttgctaaatttttgta

SEQ ID NO: 60491 - DNA, 40 bp, Homo sapiens
tacaaaaatttagcaaggcatggtggcgggtgcctgtagt

SEQ ID NO: 60492 - DNA, 40 bp, Homo sapiens
ctacaggcacccgccaccatgccttgctaaatttttgtat

SEQ ID NO: 60493 - DNA, 40 bp, Homo sapiens
atacaaaaatttagcaaggcatggtggcgggtgcctgtag

SEQ ID NO: 60494 - DNA, 40 bp, Homo sapiens
tacaggcacccgccaccatgccttgctaaatttttgtatt

SEQ ID NO: 60495 - DNA, 40 bp, Homo sapiens
aatacaaaaatttagcaaggcatggtggcgggtgcctgta

SEQ ID NO: 60496 - DNA, 40 bp, Homo sapiens
acaggcacccgccaccatgccttgctaaatttttgtattt

SEQ ID NO: 60497 - DNA, 40 bp, Homo sapiens
aaatacaaaaatttagcaaggcatggtggcgggtgcctgt

SEQ ID NO: 60498 - DNA, 40 bp, Homo sapiens
caggcacccgccaccatgccttgctaaatttttgtatttt

SEQ ID NO: 60499 - DNA, 40 bp, Homo sapiens
aaaatacaaaaatttagcaaggcatggtggcgggtgcctg

SEQ ID NO: 60500 - DNA, 40 bp, Homo sapiens
aggcacccgccaccatgccttgctaaatttttgtattttt

SEQ ID NO: 60501 - DNA, 40 bp, Homo sapiens
aaaaatacaaaaatttagcaaggcatggtggcgggtgcct

SEQ ID NO: 60502 - DNA, 40 bp, Homo sapiens
ggcacccgccaccatgccttgctaaatttttgtattttta

SEQ ID NO: 60503 - DNA, 40 bp, Homo sapiens
taaaaatacaaaaatttagcaaggcatggtggcgggtgcc

SEQ ID NO: 60504 - DNA, 40 bp, Homo sapiens
gcacccgccaccatgccttgctaaatttttgtatttttag

SEQ ID NO: 60505 - DNA, 40 bp, Homo sapiens
ctaaaaatacaaaaatttagcaaggcatggtggcgggtgc

SEQ ID NO: 60506 - DNA, 40 bp, Homo sapiens
cacccgccaccatgccttgctaaatttttgtatttttagt

SEQ ID NO: 60507 - DNA, 40 bp, Homo sapiens
actaaaaatacaaaaatttagcaaggcatggtggcgggtg

SEQ ID NO: 60508 - DNA, 40 bp, Homo sapiens
acccgccaccatgccttgctaaatttttgtatttttagta

SEQ ID NO: 60509 - DNA, 40 bp, Homo sapiens
tactaaaaatacaaaaatttagcaaggcatggtggcgggt

SEQ ID NO: 60510 - DNA, 40 bp, Homo sapiens
cccgccaccatgccttgctaaatttttgtatttttagtag

SEQ ID NO: 60511 - DNA, 40 bp, Homo sapiens
ctactaaaaatacaaaaatttagcaaggcatggtggcggg

SEQ ID NO: 60512 - DNA, 40 bp, Homo sapiens
ccgccaccatgccttgctaaatttttgtatttttagtaga

SEQ ID NO: 60513 - DNA, 40 bp, Homo sapiens
tctactaaaaatacaaaaatttagcaaggcatggtggcgg

SEQ ID NO: 60514 - DNA, 40 bp, Homo sapiens
cgccaccatgccttgctaaatttttgtatttttagtagag

SEQ ID NO: 60515 - DNA, 40 bp, Homo sapiens
ctctactaaaaatacaaaaatttagcaaggcatggtggcg

SEQ ID NO: 60516 - DNA, 40 bp, Homo sapiens
gccaccatgccttgctaaatttttgtatttttagtagaga

SEQ ID NO: 60517 - DNA, 40 bp, Homo sapiens
tctctactaaaaatacaaaaatttagcaaggcatggtggc

SEQ ID NO: 60518 - DNA, 40 bp, Homo sapiens
ccaccatgccttgctaaatttttgtatttttagtagagac

SEQ ID NO: 60519 - DNA, 40 bp, Homo sapiens
gtctctactaaaaatacaaaaatttagcaaggcatggtgg

SEQ ID NO: 60520 - DNA, 40 bp, Homo sapiens
caccatgccttgctaaatttttgtatttttagtagagacg

SEQ ID NO: 60521 - DNA, 40 bp, Homo sapiens
cgtctctactaaaaatacaaaaatttagcaaggcatggtg

SEQ ID NO: 60522 - DNA, 40 bp, Homo sapiens
accatgccttgctaaatttttgtatttttagtagagacgg

SEQ ID NO: 60523 - DNA, 40 bp, Homo sapiens
ccgtctctactaaaaatacaaaaatttagcaaggcatggt

SEQ ID NO: 60524 - DNA, 40 bp, Homo sapiens
ccatgccttgctaaatttttgtatttttagtagagacggg

SEQ ID NO: 60525 - DNA, 40 bp, Homo sapiens
cccgtctctactaaaaatacaaaaatttagcaaggcatgg

SEQ ID NO: 60526 - DNA, 40 bp, Homo sapiens
catgccttgctaaatttttgtatttttagtagagacgggt

SEQ ID NO: 60527 - DNA, 40 bp, Homo sapiens
acccgtctctactaaaaatacaaaaatttagcaaggcatg

SEQ ID NO: 60528 - DNA, 40 bp, Homo sapiens
atgccttgctaaatttttgtatttttagtagagacgggtt

SEQ ID NO: 60529 - DNA, 40 bp, Homo sapiens
aacccgtctctactaaaaatacaaaaatttagcaaggcat

SEQ ID NO: 60530 - DNA, 40 bp, Homo sapiens
tgccttgctaaatttttgtatttttagtagagacgggttt

SEQ ID NO: 60531 - DNA, 40 bp, Homo sapiens
aaacccgtctctactaaaaatacaaaaatttagcaaggca

SEQ ID NO: 60532 - DNA, 40 bp, Homo sapiens
gccttgctaaatttttgtatttttagtagagacgggtttc

SEQ ID NO: 60533 - DNA, 40 bp, Homo sapiens
gaaacccgtctctactaaaaatacaaaaatttagcaaggc

SEQ ID NO: 60534 - DNA, 40 bp, Homo sapiens
ccttgctaaatttttgtatttttagtagagacgggtttca

SEQ ID NO: 60535 - DNA, 40 bp, Homo sapiens
tgaaacccgtctctactaaaaatacaaaaatttagcaagg

SEQ ID NO: 60536 - DNA, 40 bp, Homo sapiens
cttgctaaatttttgtatttttagtagagacgggtttcac

SEQ ID NO: 60537 - DNA, 40 bp, Homo sapiens
gtgaaacccgtctctactaaaaatacaaaaatttagcaag

SEQ ID NO: 60538 - DNA, 40 bp, Homo sapiens
ttgctaaatttttgtatttttagtagagacgggtttcact

SEQ ID NO: 60539 - DNA, 40 bp, Homo sapiens
agtgaaacccgtctctactaaaaatacaaaaatttagcaa

SEQ ID NO: 60540 - DNA, 40 bp, Homo sapiens
tgctaaatttttgtatttttagtagagacgggtttcactg

SEQ ID NO: 60541 - DNA, 40 bp, Homo sapiens
cagtgaaacccgtctctactaaaaatacaaaaatttagca

SEQ ID NO: 60542 - DNA, 40 bp, Homo sapiens
gctaaatttttgtatttttagtagagacgggtttcactgt

SEQ ID NO: 60543 - DNA, 40 bp, Homo sapiens
acagtgaaacccgtctctactaaaaatacaaaaatttagc

SEQ ID NO: 60544 - DNA, 40 bp, Homo sapiens
ctaaatttttgtatttttagtagagacgggtttcactgtg

SEQ ID NO: 60545 - DNA, 40 bp, Homo sapiens
cacagtgaaacccgtctctactaaaaatacaaaaatttag

SEQ ID NO: 60546 - DNA, 40 bp, Homo sapiens
taaatttttgtatttttagtagagacgggtttcactgtgt

SEQ ID NO: 60547 - DNA, 40 bp, Homo sapiens
acacagtgaaacccgtctctactaaaaatacaaaaattta

SEQ ID NO: 60548 - DNA, 40 bp, Homo sapiens
aaatttttgtatttttagtagagacgggtttcactgtgtt

SEQ ID NO: 60549 - DNA, 40 bp, Homo sapiens
aacacagtgaaacccgtctctactaaaaatacaaaaattt

SEQ ID NO: 60550 - DNA, 40 bp, Homo sapiens
aatttttgtatttttagtagagacgggtttcactgtgtta

SEQ ID NO: 60551 - DNA, 40 bp, Homo sapiens
taacacagtgaaacccgtctctactaaaaatacaaaaatt

SEQ ID NO: 60552 - DNA, 40 bp, Homo sapiens
atttttgtatttttagtagagacgggtttcactgtgttag

SEQ ID NO: 60553 - DNA, 40 bp, Homo sapiens
ctaacacagtgaaacccgtctctactaaaaatacaaaaat

SEQ ID NO: 60554 - DNA, 40 bp, Homo sapiens
tttttgtatttttagtagagacgggtttcactgtgttagc

SEQ ID NO: 60555 - DNA, 40 bp, Homo sapiens
gctaacacagtgaaacccgtctctactaaaaatacaaaaa

SEQ ID NO: 60556 - DNA, 40 bp, Homo sapiens
ttttgtatttttagtagagacgggtttcactgtgttagcc

SEQ ID NO: 60557 - DNA, 40 bp, Homo sapiens
ggctaacacagtgaaacccgtctctactaaaaatacaaaa

SEQ ID NO: 60558 - DNA, 40 bp, Homo sapiens
tttgtatttttagtagagacgggtttcactgtgttagcca

SEQ ID NO: 60559 - DNA, 40 bp, Homo sapiens
tggctaacacagtgaaacccgtctctactaaaaatacaaa

SEQ ID NO: 60560 - DNA, 40 bp, Homo sapiens
ttgtatttttagtagagacgggtttcactgtgttagccag

SEQ ID NO: 60561 - DNA, 40 bp, Homo sapiens
ctggctaacacagtgaaacccgtctctactaaaaatacaa

SEQ ID NO: 60562 - DNA, 40 bp, Homo sapiens
tgtatttttagtagagacgggtttcactgtgttagccagg

SEQ ID NO: 60563 - DNA, 40 bp, Homo sapiens
cctggctaacacagtgaaacccgtctctactaaaaataca

SEQ ID NO: 60564 - DNA, 40 bp, Homo sapiens
gtatttttagtagagacgggtttcactgtgttagccagga

SEQ ID NO: 60565 - DNA, 40 bp, Homo sapiens
tcctggctaacacagtgaaacccgtctctactaaaaatac

SEQ ID NO: 60566 - DNA, 40 bp, Homo sapiens
tatttttagtagagacgggtttcactgtgttagccaggat

SEQ ID NO: 60567 - DNA, 40 bp, Homo sapiens
atcctggctaacacagtgaaacccgtctctactaaaaata

SEQ ID NO: 60568 - DNA, 40 bp, Homo sapiens
atttttagtagagacgggtttcactgtgttagccaggatg

SEQ ID NO: 60569 - DNA, 40 bp, Homo sapiens
catcctggctaacacagtgaaacccgtctctactaaaaat

SEQ ID NO: 60570 - DNA, 40 bp, Homo sapiens
tttttagtagagacgggtttcactgtgttagccaggatgg

SEQ ID NO: 60571 - DNA, 40 bp, Homo sapiens
ccatcctggctaacacagtgaaacccgtctctactaaaaa

SEQ ID NO: 60572 - DNA, 40 bp, Homo sapiens
ttttagtagagacgggtttcactgtgttagccaggatggt

SEQ ID NO: 60573 - DNA, 40 bp, Homo sapiens
accatcctggctaacacagtgaaacccgtctctactaaaa

SEQ ID NO: 60574 - DNA, 40 bp, Homo sapiens
tttagtagagacgggtttcactgtgttagccaggatggtc

SEQ ID NO: 60575 - DNA, 40 bp, Homo sapiens
gaccatcctggctaacacagtgaaacccgtctctactaaa

SEQ ID NO: 60576 - DNA, 40 bp, Homo sapiens
ttagtagagacgggtttcactgtgttagccaggatggtct

SEQ ID NO: 60577 - DNA, 40 bp, Homo sapiens
agaccatcctggctaacacagtgaaacccgtctctactaa

SEQ ID NO: 60578 - DNA, 40 bp, Homo sapiens
tagtagagacgggtttcactgtgttagccaggatggtctc

SEQ ID NO: 60579 - DNA, 40 bp, Homo sapiens
gagaccatcctggctaacacagtgaaacccgtctctacta

SEQ ID NO: 60580 - DNA, 40 bp, Homo sapiens
agtagagacgggtttcactgtgttagccaggatggtctcg

SEQ ID NO: 60581 - DNA, 40 bp, Homo sapiens
cgagaccatcctggctaacacagtgaaacccgtctctact

SEQ ID NO: 60582 - DNA, 40 bp, Homo sapiens
gtagagacgggtttcactgtgttagccaggatggtctcga

SEQ ID NO: 60583 - DNA, 40 bp, Homo sapiens
tcgagaccatcctggctaacacagtgaaacccgtctctac

SEQ ID NO: 60584 - DNA, 40 bp, Homo sapiens
tagagacgggtttcactgtgttagccaggatggtctcgat

SEQ ID NO: 60585 - DNA, 40 bp, Homo sapiens
atcgagaccatcctggctaacacagtgaaacccgtctcta

SEQ ID NO: 60586 - DNA, 40 bp, Homo sapiens
agagacgggtttcactgtgttagccaggatggtctcgatc

SEQ ID NO: 60587 - DNA, 40 bp, Homo sapiens
gatcgagaccatcctggctaacacagtgaaacccgtctct

SEQ ID NO: 60588 - DNA, 40 bp, Homo sapiens
gagacgggtttcactgtgttagccaggatggtctcgatct

SEQ ID NO: 60589 - DNA, 40 bp, Homo sapiens
agatcgagaccatcctggctaacacagtgaaacccgtctc

SEQ ID NO: 60590 - DNA, 40 bp, Homo sapiens
agacgggtttcactgtgttagccaggatggtctcgatctc

SEQ ID NO: 60591 - DNA, 40 bp, Homo sapiens
gagatcgagaccatcctggctaacacagtgaaacccgtct

SEQ ID NO: 60592 - DNA, 40 bp, Homo sapiens
gacgggtttcactgtgttagccaggatggtctcgatctct

SEQ ID NO: 60593 - DNA, 40 bp, Homo sapiens
agagatcgagaccatcctggctaacacagtgaaacccgtc

SEQ ID NO: 60594 - DNA, 40 bp, Homo sapiens
acgggtttcactgtgttagccaggatggtctcgatctctt

SEQ ID NO: 60595 - DNA, 40 bp, Homo sapiens
aagagatcgagaccatcctggctaacacagtgaaacccgt

SEQ ID NO: 60596 - DNA, 40 bp, Homo sapiens
cgggtttcactgtgttagccaggatggtctcgatctcttg

SEQ ID NO: 60597 - DNA, 40 bp, Homo sapiens
caagagatcgagaccatcctggctaacacagtgaaacccg

SEQ ID NO: 60598 - DNA, 40 bp, Homo sapiens
gggtttcactgtgttagccaggatggtctcgatctcttga

SEQ ID NO: 60599 - DNA, 40 bp, Homo sapiens
tcaagagatcgagaccatcctggctaacacagtgaaaccc

SEQ ID NO: 60600 - DNA, 40 bp, Homo sapiens
ggtttcactgtgttagccaggatggtctcgatctcttgac

SEQ ID NO: 60601 - DNA, 40 bp, Homo sapiens
gtcaagagatcgagaccatcctggctaacacagtgaaacc

SEQ ID NO: 60602 - DNA, 40 bp, Homo sapiens
gtttcactgtgttagccaggatggtctcgatctcttgacc

SEQ ID NO: 60603 - DNA, 40 bp, Homo sapiens
ggtcaagagatcgagaccatcctggctaacacagtgaaac

SEQ ID NO: 60604 - DNA, 40 bp, Homo sapiens
tttcactgtgttagccaggatggtctcgatctcttgacct

SEQ ID NO: 60605 - DNA, 40 bp, Homo sapiens
aggtcaagagatcgagaccatcctggctaacacagtgaaa

SEQ ID NO: 60606 - DNA, 40 bp, Homo sapiens
ttcactgtgttagccaggatggtctcgatctcttgacctc

SEQ ID NO: 60607 - DNA, 40 bp, Homo sapiens
gaggtcaagagatcgagaccatcctggctaacacagtgaa

SEQ ID NO: 60608 - DNA, 40 bp, Homo sapiens
tcactgtgttagccaggatggtctcgatctcttgacctcg

SEQ ID NO: 60609 - DNA, 40 bp, Homo sapiens
cgaggtcaagagatcgagaccatcctggctaacacagtga

SEQ ID NO: 60610 - DNA, 40 bp, Homo sapiens
cactgtgttagccaggatggtctcgatctcttgacctcgt

SEQ ID NO: 60611 - DNA, 40 bp, Homo sapiens
acgaggtcaagagatcgagaccatcctggctaacacagtg

SEQ ID NO: 60612 - DNA, 40 bp, Homo sapiens
actgtgttagccaggatggtctcgatctcttgacctcgtg

SEQ ID NO: 60613 - DNA, 40 bp, Homo sapiens
cacgaggtcaagagatcgagaccatcctggctaacacagt

SEQ ID NO: 60614 - DNA, 40 bp, Homo sapiens
ctgtgttagccaggatggtctcgatctcttgacctcgtga

SEQ ID NO: 60615 - DNA, 40 bp, Homo sapiens
tcacgaggtcaagagatcgagaccatcctggctaacacag

SEQ ID NO: 60616 - DNA, 40 bp, Homo sapiens
tgtgttagccaggatggtctcgatctcttgacctcgtgat

SEQ ID NO: 60617 - DNA, 40 bp, Homo sapiens
atcacgaggtcaagagatcgagaccatcctggctaacaca

SEQ ID NO: 60618 - DNA, 40 bp, Homo sapiens
gtgttagccaggatggtctcgatctcttgacctcgtgatc

SEQ ID NO: 60619 - DNA, 40 bp, Homo sapiens
gatcacgaggtcaagagatcgagaccatcctggctaacac

SEQ ID NO: 60620 - DNA, 40 bp, Homo sapiens
tgttagccaggatggtctcgatctcttgacctcgtgatcc

SEQ ID NO: 60621 - DNA, 40 bp, Homo sapiens
ggatcacgaggtcaagagatcgagaccatcctggctaaca

SEQ ID NO: 60622 - DNA, 40 bp, Homo sapiens
gttagccaggatggtctcgatctcttgacctcgtgatcca

SEQ ID NO: 60623 - DNA, 40 bp, Homo sapiens
tggatcacgaggtcaagagatcgagaccatcctggctaac

SEQ ID NO: 60624 - DNA, 40 bp, Homo sapiens
ttagccaggatggtctcgatctcttgacctcgtgatccac

SEQ ID NO: 60625 - DNA, 40 bp, Homo sapiens
gtggatcacgaggtcaagagatcgagaccatcctggctaa

SEQ ID NO: 60626 - DNA, 40 bp, Homo sapiens
tagccaggatggtctcgatctcttgacctcgtgatccacc

SEQ ID NO: 60627 - DNA, 40 bp, Homo sapiens
ggtggatcacgaggtcaagagatcgagaccatcctggcta

SEQ ID NO: 60628 - DNA, 40 bp, Homo sapiens
agccaggatggtctcgatctcttgacctcgtgatccacct

SEQ ID NO: 60629 - DNA, 40 bp, Homo sapiens
aggtggatcacgaggtcaagagatcgagaccatcctggct

SEQ ID NO: 60630 - DNA, 40 bp, Homo sapiens
gccaggatggtctcgatctcttgacctcgtgatccacctg

SEQ ID NO: 60631 - DNA, 40 bp, Homo sapiens
caggtggatcacgaggtcaagagatcgagaccatcctggc

SEQ ID NO: 60632 - DNA, 40 bp, Homo sapiens
ccaggatggtctcgatctcttgacctcgtgatccacctgc

SEQ ID NO: 60633 - DNA, 40 bp, Homo sapiens
gcaggtggatcacgaggtcaagagatcgagaccatcctgg

SEQ ID NO: 60634 - DNA, 40 bp, Homo sapiens
caggatggtctcgatctcttgacctcgtgatccacctgcc

SEQ ID NO: 60635 - DNA, 40 bp, Homo sapiens
ggcaggtggatcacgaggtcaagagatcgagaccatcctg

SEQ ID NO: 60636 - DNA, 40 bp, Homo sapiens
aggatggtctcgatctcttgacctcgtgatccacctgcct

SEQ ID NO: 60637 - DNA, 40 bp, Homo sapiens
aggcaggtggatcacgaggtcaagagatcgagaccatcct

SEQ ID NO: 60638 - DNA, 40 bp, Homo sapiens
ggatggtctcgatctcttgacctcgtgatccacctgcctc

SEQ ID NO: 60639 - DNA, 40 bp, Homo sapiens
gaggcaggtggatcacgaggtcaagagatcgagaccatcc

SEQ ID NO: 60640 - DNA, 40 bp, Homo sapiens
gatggtctcgatctcttgacctcgtgatccacctgcctcg

SEQ ID NO: 60641 - DNA, 40 bp, Homo sapiens
cgaggcaggtggatcacgaggtcaagagatcgagaccatc

SEQ ID NO: 60642 - DNA, 40 bp, Homo sapiens
atggtctcgatctcttgacctcgtgatccacctgcctcgg

SEQ ID NO: 60643 - DNA, 40 bp, Homo sapiens
ccgaggcaggtggatcacgaggtcaagagatcgagaccat

SEQ ID NO: 60644 - DNA, 40 bp, Homo sapiens
tggtctcgatctcttgacctcgtgatccacctgcctcggc

SEQ ID NO: 60645 - DNA, 40 bp, Homo sapiens
gccgaggcaggtggatcacgaggtcaagagatcgagacca

SEQ ID NO: 60646 - DNA, 40 bp, Homo sapiens
ggtctcgatctcttgacctcgtgatccacctgcctcggcc

SEQ ID NO: 60647 - DNA, 40 bp, Homo sapiens
ggccgaggcaggtggatcacgaggtcaagagatcgagacc

SEQ ID NO: 60648 - DNA, 40 bp, Homo sapiens
gtctcgatctcttgacctcgtgatccacctgcctcggcct

SEQ ID NO: 60649 - DNA, 40 bp, Homo sapiens
aggccgaggcaggtggatcacgaggtcaagagatcgagac

SEQ ID NO: 60650 - DNA, 40 bp, Homo sapiens
tctcgatctcttgacctcgtgatccacctgcctcggcctc

SEQ ID NO: 60651 - DNA, 40 bp, Homo sapiens
gaggccgaggcaggtggatcacgaggtcaagagatcgaga

SEQ ID NO: 60652 - DNA, 40 bp, Homo sapiens
ctcgatctcttgacctcgtgatccacctgcctcggcctcc

SEQ ID NO: 60653 - DNA, 40 bp, Homo sapiens
ggaggccgaggcaggtggatcacgaggtcaagagatcgag

SEQ ID NO: 60654 - DNA, 40 bp, Homo sapiens
tcgatctcttgacctcgtgatccacctgcctcggcctccc

SEQ ID NO: 60655 - DNA, 40 bp, Homo sapiens
gggaggccgaggcaggtggatcacgaggtcaagagatcga

SEQ ID NO: 60656 - DNA, 40 bp, Homo sapiens
cgatctcttgacctcgtgatccacctgcctcggcctccca

SEQ ID NO: 60657 - DNA, 40 bp, Homo sapiens
tgggaggccgaggcaggtggatcacgaggtcaagagatcg

SEQ ID NO: 60658 - DNA, 40 bp, Homo sapiens
gatctcttgacctcgtgatccacctgcctcggcctcccaa

SEQ ID NO: 60659 - DNA, 40 bp, Homo sapiens
ttgggaggccgaggcaggtggatcacgaggtcaagagatc

SEQ ID NO: 60660 - DNA, 40 bp, Homo sapiens
atctcttgacctcgtgatccacctgcctcggcctcccaaa

SEQ ID NO: 60661 - DNA, 40 bp, Homo sapiens
tttgggaggccgaggcaggtggatcacgaggtcaagagat

SEQ ID NO: 60662 - DNA, 40 bp, Homo sapiens
tctcttgacctcgtgatccacctgcctcggcctcccaaag

SEQ ID NO: 60663 - DNA, 40 bp, Homo sapiens
ctttgggaggccgaggcaggtggatcacgaggtcaagaga

SEQ ID NO: 60664 - DNA, 40 bp, Homo sapiens
ctcttgacctcgtgatccacctgcctcggcctcccaaagt

SEQ ID NO: 60665 - DNA, 40 bp, Homo sapiens
actttgggaggccgaggcaggtggatcacgaggtcaagag

SEQ ID NO: 60666 - DNA, 40 bp, Homo sapiens
tcttgacctcgtgatccacctgcctcggcctcccaaagtg

SEQ ID NO: 60667 - DNA, 40 bp, Homo sapiens
cactttgggaggccgaggcaggtggatcacgaggtcaaga

SEQ ID NO: 60668 - DNA, 40 bp, Homo sapiens
cttgacctcgtgatccacctgcctcggcctcccaaagtgc

SEQ ID NO: 60669 - DNA, 40 bp, Homo sapiens
gcactttgggaggccgaggcaggtggatcacgaggtcaag

SEQ ID NO: 60670 - DNA, 40 bp, Homo sapiens
ttgacctcgtgatccacctgcctcggcctcccaaagtgct

SEQ ID NO: 60671 - DNA, 40 bp, Homo sapiens
agcactttgggaggccgaggcaggtggatcacgaggtcaa

SEQ ID NO: 60672 - DNA, 40 bp, Homo sapiens
tgacctcgtgatccacctgcctcggcctcccaaagtgctg

SEQ ID NO: 60673 - DNA, 40 bp, Homo sapiens
cagcactttgggaggccgaggcaggtggatcacgaggtca

SEQ ID NO: 60674 - DNA, 40 bp, Homo sapiens
gacctcgtgatccacctgcctcggcctcccaaagtgctgg

SEQ ID NO: 60675 - DNA, 40 bp, Homo sapiens
ccagcactttgggaggccgaggcaggtggatcacgaggtc

SEQ ID NO: 60676 - DNA, 40 bp, Homo sapiens
acctcgtgatccacctgcctcggcctcccaaagtgctggg

SEQ ID NO: 60677 - DNA, 40 bp, Homo sapiens
cccagcactttgggaggccgaggcaggtggatcacgaggt

SEQ ID NO: 60678 - DNA, 40 bp, Homo sapiens
cctcgtgatccacctgcctcggcctcccaaagtgctggga

SEQ ID NO: 60679 - DNA, 40 bp, Homo sapiens
tcccagcactttgggaggccgaggcaggtggatcacgagg

SEQ ID NO: 60680 - DNA, 40 bp, Homo sapiens
ctcgtgatccacctgcctcggcctcccaaagtgctgggat

SEQ ID NO: 60681 - DNA, 40 bp, Homo sapiens
atcccagcactttgggaggccgaggcaggtggatcacgag

SEQ ID NO: 60682 - DNA, 40 bp, Homo sapiens
tcgtgatccacctgcctcggcctcccaaagtgctgggatt

SEQ ID NO: 60683 - DNA, 40 bp, Homo sapiens
aatcccagcactttgggaggccgaggcaggtggatcacga

SEQ ID NO: 60684 - DNA, 40 bp, Homo sapiens
cgtgatccacctgcctcggcctcccaaagtgctgggatta

SEQ ID NO: 60685 - DNA, 40 bp, Homo sapiens
taatcccagcactttgggaggccgaggcaggtggatcacg

SEQ ID NO: 60686 - DNA, 40 bp, Homo sapiens
gtgatccacctgcctcggcctcccaaagtgctgggattac

SEQ ID NO: 60687 - DNA, 40 bp, Homo sapiens
gtaatcccagcactttgggaggccgaggcaggtggatcac

SEQ ID NO: 60688 - DNA, 40 bp, Homo sapiens
tgatccacctgcctcggcctcccaaagtgctgggattaca

SEQ ID NO: 60689 - DNA, 40 bp, Homo sapiens
tgtaatcccagcactttgggaggccgaggcaggtggatca

SEQ ID NO: 60690 - DNA, 40 bp, Homo sapiens
gatccacctgcctcggcctcccaaagtgctgggattacag

SEQ ID NO: 60691 - DNA, 40 bp, Homo sapiens
ctgtaatcccagcactttgggaggccgaggcaggtggatc

SEQ ID NO: 60692 - DNA, 40 bp, Homo sapiens
atccacctgcctcggcctcccaaagtgctgggattacagg

SEQ ID NO: 60693 - DNA, 40 bp, Homo sapiens
cctgtaatcccagcactttgggaggccgaggcaggtggat

SEQ ID NO: 60694 - DNA, 40 bp, Homo sapiens
tccacctgcctcggcctcccaaagtgctgggattacaggc

SEQ ID NO: 60695 - DNA, 40 bp, Homo sapiens
gcctgtaatcccagcactttgggaggccgaggcaggtgga

SEQ ID NO: 60696 - DNA, 40 bp, Homo sapiens
ccacctgcctcggcctcccaaagtgctgggattacaggca

SEQ ID NO: 60697 - DNA, 40 bp, Homo sapiens
tgcctgtaatcccagcactttgggaggccgaggcaggtgg

SEQ ID NO: 60698 - DNA, 40 bp, Homo sapiens
cacctgcctcggcctcccaaagtgctgggattacaggcat

SEQ ID NO: 60699 - DNA, 40 bp, Homo sapiens
atgcctgtaatcccagcactttgggaggccgaggcaggtg

SEQ ID NO: 60700 - DNA, 40 bp, Homo sapiens
acctgcctcggcctcccaaagtgctgggattacaggcatg

SEQ ID NO: 60701 - DNA, 40 bp, Homo sapiens
catgcctgtaatcccagcactttgggaggccgaggcaggt

SEQ ID NO: 60702 - DNA, 40 bp, Homo sapiens
cctgcctcggcctcccaaagtgctgggattacaggcatga

SEQ ID NO: 60703 - DNA, 40 bp, Homo sapiens
tcatgcctgtaatcccagcactttgggaggccgaggcagg

SEQ ID NO: 60704 - DNA, 40 bp, Homo sapiens
ctgcctcggcctcccaaagtgctgggattacaggcatgag

SEQ ID NO: 60705 - DNA, 40 bp, Homo sapiens
ctcatgcctgtaatcccagcactttgggaggccgaggcag

SEQ ID NO: 60706 - DNA, 40 bp, Homo sapiens
tgcctcggcctcccaaagtgctgggattacaggcatgagc

SEQ ID NO: 60707 - DNA, 40 bp, Homo sapiens
gctcatgcctgtaatcccagcactttgggaggccgaggca

SEQ ID NO: 60708 - DNA, 40 bp, Homo sapiens
gcctcggcctcccaaagtgctgggattacaggcatgagcc

SEQ ID NO: 60709 - DNA, 40 bp, Homo sapiens
ggctcatgcctgtaatcccagcactttgggaggccgaggc

SEQ ID NO: 60710 - DNA, 40 bp, Homo sapiens
cctcggcctcccaaagtgctgggattacaggcatgagcca

SEQ ID NO: 60711 - DNA, 40 bp, Homo sapiens
tggctcatgcctgtaatcccagcactttgggaggccgagg

SEQ ID NO: 60712 - DNA, 40 bp, Homo sapiens
ctcggcctcccaaagtgctgggattacaggcatgagccac

SEQ ID NO: 60713 - DNA, 40 bp, Homo sapiens
gtggctcatgcctgtaatcccagcactttgggaggccgag

SEQ ID NO: 60714 - DNA, 40 bp, Homo sapiens
tcggcctcccaaagtgctgggattacaggcatgagccacc

SEQ ID NO: 60715 - DNA, 40 bp, Homo sapiens
ggtggctcatgcctgtaatcccagcactttgggaggccga

SEQ ID NO: 60716 - DNA, 40 bp, Homo sapiens
cggcctcccaaagtgctgggattacaggcatgagccaccg

SEQ ID NO: 60717 - DNA, 40 bp, Homo sapiens
cggtggctcatgcctgtaatcccagcactttgggaggccg

SEQ ID NO: 60718 - DNA, 40 bp, Homo sapiens
ggcctcccaaagtgctgggattacaggcatgagccaccgc

SEQ ID NO: 60719 - DNA, 40 bp, Homo sapiens
gcggtggctcatgcctgtaatcccagcactttgggaggcc

SEQ ID NO: 60720 - DNA, 40 bp, Homo sapiens
gcctcccaaagtgctgggattacaggcatgagccaccgcg

SEQ ID NO: 60721 - DNA, 40 bp, Homo sapiens
cgcggtggctcatgcctgtaatcccagcactttgggaggc

SEQ ID NO: 60722 - DNA, 40 bp, Homo sapiens
cctcccaaagtgctgggattacaggcatgagccaccgcgc

SEQ ID NO: 60723 - DNA, 40 bp, Homo sapiens
gcgcggtggctcatgcctgtaatcccagcactttgggagg

SEQ ID NO: 60724 - DNA, 40 bp, Homo sapiens
ctcccaaagtgctgggattacaggcatgagccaccgcgcc

SEQ ID NO: 60725 - DNA, 40 bp, Homo sapiens
ggcgcggtggctcatgcctgtaatcccagcactttgggag

SEQ ID NO: 60726 - DNA, 40 bp, Homo sapiens
tcccaaagtgctgggattacaggcatgagccaccgcgcct

SEQ ID NO: 60727 - DNA, 40 bp, Homo sapiens
aggcgcggtggctcatgcctgtaatcccagcactttggga

SEQ ID NO: 60728 - DNA, 40 bp, Homo sapiens
cccaaagtgctgggattacaggcatgagccaccgcgcctg

SEQ ID NO: 60729 - DNA, 40 bp, Homo sapiens
caggcgcggtggctcatgcctgtaatcccagcactttggg

SEQ ID NO: 60730 - DNA, 40 bp, Homo sapiens
ccaaagtgctgggattacaggcatgagccaccgcgcctgg

SEQ ID NO: 60731 - DNA, 40 bp, Homo sapiens
ccaggcgcggtggctcatgcctgtaatcccagcactttgg

SEQ ID NO: 60732 - DNA, 40 bp, Homo sapiens
caaagtgctgggattacaggcatgagccaccgcgcctggc

SEQ ID NO: 60733 - DNA, 40 bp, Homo sapiens
gccaggcgcggtggctcatgcctgtaatcccagcactttg

SEQ ID NO: 60734 - DNA, 40 bp, Homo sapiens
aaagtgctgggattacaggcatgagccaccgcgcctggcc

SEQ ID NO: 60735 - DNA, 40 bp, Homo sapiens
ggccaggcgcggtggctcatgcctgtaatcccagcacttt

SEQ ID NO: 60736 - DNA, 40 bp, Homo sapiens
aagtgctgggattacaggcatgagccaccgcgcctggccc

SEQ ID NO: 60737 - DNA, 40 bp, Homo sapiens
gggccaggcgcggtggctcatgcctgtaatcccagcactt

SEQ ID NO: 60738 - DNA, 40 bp, Homo sapiens
agtgctgggattacaggcatgagccaccgcgcctggccct

SEQ ID NO: 60739 - DNA, 40 bp, Homo sapiens
agggccaggcgcggtggctcatgcctgtaatcccagcact

SEQ ID NO: 60740 - DNA, 40 bp, Homo sapiens
gtgctgggattacaggcatgagccaccgcgcctggccctt

SEQ ID NO: 60741 - DNA, 40 bp, Homo sapiens
aagggccaggcgcggtggctcatgcctgtaatcccagcac

SEQ ID NO: 60742 - DNA, 40 bp, Homo sapiens
tgctgggattacaggcatgagccaccgcgcctggccctta

SEQ ID NO: 60743 - DNA, 40 bp, Homo sapiens
taagggccaggcgcggtggctcatgcctgtaatcccagca

SEQ ID NO: 60744 - DNA, 40 bp, Homo sapiens
gctgggattacaggcatgagccaccgcgcctggcccttat

SEQ ID NO: 60745 - DNA, 40 bp, Homo sapiens
ataagggccaggcgcggtggctcatgcctgtaatcccagc

SEQ ID NO: 60746 - DNA, 40 bp, Homo sapiens
ctgggattacaggcatgagccaccgcgcctggcccttatt

SEQ ID NO: 60747 - DNA, 40 bp, Homo sapiens
aataagggccaggcgcggtggctcatgcctgtaatcccag

SEQ ID NO: 60748 - DNA, 40 bp, Homo sapiens
tgggattacaggcatgagccaccgcgcctggcccttattt

SEQ ID NO: 60749 - DNA, 40 bp, Homo sapiens
aaataagggccaggcgcggtggctcatgcctgtaatccca

SEQ ID NO: 60750 - DNA, 40 bp, Homo sapiens
gggattacaggcatgagccaccgcgcctggcccttatttg

SEQ ID NO: 60751 - DNA, 40 bp, Homo sapiens
caaataagggccaggcgcggtggctcatgcctgtaatccc

SEQ ID NO: 60752 - DNA, 40 bp, Homo sapiens
ggattacaggcatgagccaccgcgcctggcccttatttgt

SEQ ID NO: 60753 - DNA, 40 bp, Homo sapiens
acaaataagggccaggcgcggtggctcatgcctgtaatcc

SEQ ID NO: 60754 - DNA, 40 bp, Homo sapiens
gattacaggcatgagccaccgcgcctggcccttatttgtt

SEQ ID NO: 60755 - DNA, 40 bp, Homo sapiens
aacaaataagggccaggcgcggtggctcatgcctgtaatc

SEQ ID NO: 60756 - DNA, 40 bp, Homo sapiens
attacaggcatgagccaccgcgcctggcccttatttgttt

SEQ ID NO: 60757 - DNA, 40 bp, Homo sapiens
aaacaaataagggccaggcgcggtggctcatgcctgtaat

SEQ ID NO: 60758 - DNA, 40 bp, Homo sapiens
ttacaggcatgagccaccgcgcctggcccttatttgtttt

SEQ ID NO: 60759 - DNA, 40 bp, Homo sapiens
aaaacaaataagggccaggcgcggtggctcatgcctgtaa

SEQ ID NO: 60760 - DNA, 40 bp, Homo sapiens
tacaggcatgagccaccgcgcctggcccttatttgttttt

SEQ ID NO: 60761 - DNA, 40 bp, Homo sapiens
aaaaacaaataagggccaggcgcggtggctcatgcctgta

SEQ ID NO: 60762 - DNA, 40 bp, Homo sapiens
acaggcatgagccaccgcgcctggcccttatttgtttttt

SEQ ID NO: 60763 - DNA, 40 bp, Homo sapiens
aaaaaacaaataagggccaggcgcggtggctcatgcctgt

SEQ ID NO: 60764 - DNA, 40 bp, Homo sapiens
caggcatgagccaccgcgcctggcccttatttgtttttta

SEQ ID NO: 60765 - DNA, 40 bp, Homo sapiens
taaaaaacaaataagggccaggcgcggtggctcatgcctg

SEQ ID NO: 60766 - DNA, 40 bp, Homo sapiens
aggcatgagccaccgcgcctggcccttatttgttttttaa

SEQ ID NO: 60767 - DNA, 40 bp, Homo sapiens
ttaaaaaacaaataagggccaggcgcggtggctcatgcct

SEQ ID NO: 60768 - DNA, 40 bp, Homo sapiens
ggcatgagccaccgcgcctggcccttatttgttttttaaa

SEQ ID NO: 60769 - DNA, 40 bp, Homo sapiens
tttaaaaaacaaataagggccaggcgcggtggctcatgcc

SEQ ID NO: 60770 - DNA, 40 bp, Homo sapiens
gcatgagccaccgcgcctggcccttatttgttttttaaac

SEQ ID NO: 60771 - DNA, 40 bp, Homo sapiens
gtttaaaaaacaaataagggccaggcgcggtggctcatgc

SEQ ID NO: 60772 - DNA, 40 bp, Homo sapiens
catgagccaccgcgcctggcccttatttgttttttaaaca

SEQ ID NO: 60773 - DNA, 40 bp, Homo sapiens
tgtttaaaaaacaaataagggccaggcgcggtggctcatg

SEQ ID NO: 60774 - DNA, 40 bp, Homo sapiens
atgagccaccgcgcctggcccttatttgttttttaaacaa

SEQ ID NO: 60775 - DNA, 40 bp, Homo sapiens
ttgtttaaaaaacaaataagggccaggcgcggtggctcat

SEQ ID NO: 60776 - DNA, 40 bp, Homo sapiens
tgagccaccgcgcctggcccttatttgttttttaaacaaa

SEQ ID NO: 60777 - DNA, 40 bp, Homo sapiens
tttgtttaaaaaacaaataagggccaggcgcggtggctca

SEQ ID NO: 60778 - DNA, 40 bp, Homo sapiens
gagccaccgcgcctggcccttatttgttttttaaacaaaa

SEQ ID NO: 60779 - DNA, 40 bp, Homo sapiens
ttttgtttaaaaaacaaataagggccaggcgcggtggctc

SEQ ID NO: 60780 - DNA, 40 bp, Homo sapiens
agccaccgcgcctggcccttatttgttttttaaacaaaat

SEQ ID NO: 60781 - DNA, 40 bp, Homo sapiens
attttgtttaaaaaacaaataagggccaggcgcggtggct

SEQ ID NO: 60782 - DNA, 40 bp, Homo sapiens
gccaccgcgcctggcccttatttgttttttaaacaaaatt

SEQ ID NO: 60783 - DNA, 40 bp, Homo sapiens
aattttgtttaaaaaacaaataagggccaggcgcggtggc

SEQ ID NO: 60784 - DNA, 40 bp, Homo sapiens
ccaccgcgcctggcccttatttgttttttaaacaaaatta

SEQ ID NO: 60785 - DNA, 40 bp, Homo sapiens
taattttgtttaaaaaacaaataagggccaggcgcggtgg

SEQ ID NO: 60786 - DNA, 40 bp, Homo sapiens
caccgcgcctggcccttatttgttttttaaacaaaattag

SEQ ID NO: 60787 - DNA, 40 bp, Homo sapiens
ctaattttgtttaaaaaacaaataagggccaggcgcggtg

SEQ ID NO: 60788 - DNA, 40 bp, Homo sapiens
accgcgcctggcccttatttgttttttaaacaaaattagt

SEQ ID NO: 60789 - DNA, 40 bp, Homo sapiens
actaattttgtttaaaaaacaaataagggccaggcgcggt

SEQ ID NO: 60790 - DNA, 40 bp, Homo sapiens
ccgcgcctggcccttatttgttttttaaacaaaattagtg

SEQ ID NO: 60791 - DNA, 40 bp, Homo sapiens
cactaattttgtttaaaaaacaaataagggccaggcgcgg

SEQ ID NO: 60792 - DNA, 40 bp, Homo sapiens
cgcgcctggcccttatttgttttttaaacaaaattagtgt

SEQ ID NO: 60793 - DNA, 40 bp, Homo sapiens
acactaattttgtttaaaaaacaaataagggccaggcgcg

SEQ ID NO: 60794 - DNA, 40 bp, Homo sapiens
gcgcctggcccttatttgttttttaaacaaaattagtgtg

SEQ ID NO: 60795 - DNA, 40 bp, Homo sapiens
cacactaattttgtttaaaaaacaaataagggccaggcgc

SEQ ID NO: 60796 - DNA, 40 bp, Homo sapiens
cgcctggcccttatttgttttttaaacaaaattagtgtgc

SEQ ID NO: 60797 - DNA, 40 bp, Homo sapiens
gcacactaattttgtttaaaaaacaaataagggccaggcg

SEQ ID NO: 60798 - DNA, 40 bp, Homo sapiens
gcctggcccttatttgttttttaaacaaaattagtgtgca

SEQ ID NO: 60799 - DNA, 40 bp, Homo sapiens
tgcacactaattttgtttaaaaaacaaataagggccaggc

SEQ ID NO: 60800 - DNA, 40 bp, Homo sapiens
cctggcccttatttgttttttaaacaaaattagtgtgcat

SEQ ID NO: 60801 - DNA, 40 bp, Homo sapiens
atgcacactaattttgtttaaaaaacaaataagggccagg

SEQ ID NO: 60802 - DNA, 40 bp, Homo sapiens
ctggcccttatttgttttttaaacaaaattagtgtgcata

SEQ ID NO: 60803 - DNA, 40 bp, Homo sapiens
tatgcacactaattttgtttaaaaaacaaataagggccag

SEQ ID NO: 60804 - DNA, 40 bp, Homo sapiens
tggcccttatttgttttttaaacaaaattagtgtgcatat

SEQ ID NO: 60805 - DNA, 40 bp, Homo sapiens
atatgcacactaattttgtttaaaaaacaaataagggcca

SEQ ID NO: 60806 - DNA, 40 bp, Homo sapiens
ggcccttatttgttttttaaacaaaattagtgtgcatatc

SEQ ID NO: 60807 - DNA, 40 bp, Homo sapiens
gatatgcacactaattttgtttaaaaaacaaataagggcc

SEQ ID NO: 60808 - DNA, 40 bp, Homo sapiens
gcccttatttgttttttaaacaaaattagtgtgcatatcc

SEQ ID NO: 60809 - DNA, 40 bp, Homo sapiens
ggatatgcacactaattttgtttaaaaaacaaataagggc

SEQ ID NO: 60810 - DNA, 40 bp, Homo sapiens
cccttatttgttttttaaacaaaattagtgtgcatatcct

SEQ ID NO: 60811 - DNA, 40 bp, Homo sapiens
aggatatgcacactaattttgtttaaaaaacaaataaggg

SEQ ID NO: 60812 - DNA, 40 bp, Homo sapiens
ccttatttgttttttaaacaaaattagtgtgcatatcctt

SEQ ID NO: 60813 - DNA, 40 bp, Homo sapiens
aaggatatgcacactaattttgtttaaaaaacaaataagg

SEQ ID NO: 60814 - DNA, 40 bp, Homo sapiens
cttatttgttttttaaacaaaattagtgtgcatatccttg

SEQ ID NO: 60815 - DNA, 40 bp, Homo sapiens
caaggatatgcacactaattttgtttaaaaaacaaataag

SEQ ID NO: 60816 - DNA, 40 bp, Homo sapiens
ttatttgttttttaaacaaaattagtgtgcatatccttgt

SEQ ID NO: 60817 - DNA, 40 bp, Homo sapiens
acaaggatatgcacactaattttgtttaaaaaacaaataa

SEQ ID NO: 60818 - DNA, 40 bp, Homo sapiens
tatttgttttttaaacaaaattagtgtgcatatccttgtt

SEQ ID NO: 60819 - DNA, 40 bp, Homo sapiens
aacaaggatatgcacactaattttgtttaaaaaacaaata

SEQ ID NO: 60820 - DNA, 40 bp, Homo sapiens
atttgttttttaaacaaaattagtgtgcatatccttgttg

SEQ ID NO: 60821 - DNA, 40 bp, Homo sapiens
caacaaggatatgcacactaattttgtttaaaaaacaaat

SEQ ID NO: 60822 - DNA, 40 bp, Homo sapiens
tttgttttttaaacaaaattagtgtgcatatccttgttgt

SEQ ID NO: 60823 - DNA, 40 bp, Homo sapiens
acaacaaggatatgcacactaattttgtttaaaaaacaaa

SEQ ID NO: 60824 - DNA, 40 bp, Homo sapiens
ttgttttttaaacaaaattagtgtgcatatccttgttgta

SEQ ID NO: 60825 - DNA, 40 bp, Homo sapiens
tacaacaaggatatgcacactaattttgtttaaaaaacaa

SEQ ID NO: 60826 - DNA, 40 bp, Homo sapiens
tgttttttaaacaaaattagtgtgcatatccttgttgtat

SEQ ID NO: 60827 - DNA, 40 bp, Homo sapiens
atacaacaaggatatgcacactaattttgtttaaaaaaca

SEQ ID NO: 60828 - DNA, 40 bp, Homo sapiens
gttttttaaacaaaattagtgtgcatatccttgttgtatt

SEQ ID NO: 60829 - DNA, 40 bp, Homo sapiens
aatacaacaaggatatgcacactaattttgtttaaaaaac

SEQ ID NO: 60830 - DNA, 40 bp, Homo sapiens
ttttttaaacaaaattagtgtgcatatccttgttgtattt

SEQ ID NO: 60831 - DNA, 40 bp, Homo sapiens
aaatacaacaaggatatgcacactaattttgtttaaaaaa

SEQ ID NO: 60832 - DNA, 40 bp, Homo sapiens
tttttaaacaaaattagtgtgcatatccttgttgtatttt

SEQ ID NO: 60833 - DNA, 40 bp, Homo sapiens
aaaatacaacaaggatatgcacactaattttgtttaaaaa

SEQ ID NO: 60834 - DNA, 40 bp, Homo sapiens
ttttaaacaaaattagtgtgcatatccttgttgtatttta

SEQ ID NO: 60835 - DNA, 40 bp, Homo sapiens
taaaatacaacaaggatatgcacactaattttgtttaaaa

SEQ ID NO: 60836 - DNA, 40 bp, Homo sapiens
tttaaacaaaattagtgtgcatatccttgttgtattttat

SEQ ID NO: 60837 - DNA, 40 bp, Homo sapiens
ataaaatacaacaaggatatgcacactaattttgtttaaa

SEQ ID NO: 60838 - DNA, 40 bp, Homo sapiens
ttaaacaaaattagtgtgcatatccttgttgtattttatc

SEQ ID NO: 60839 - DNA, 40 bp, Homo sapiens
gataaaatacaacaaggatatgcacactaattttgtttaa

SEQ ID NO: 60840 - DNA, 40 bp, Homo sapiens
taaacaaaattagtgtgcatatccttgttgtattttatcg

SEQ ID NO: 60841 - DNA, 40 bp, Homo sapiens
cgataaaatacaacaaggatatgcacactaattttgttta

SEQ ID NO: 60842 - DNA, 40 bp, Homo sapiens
aaacaaaattagtgtgcatatccttgttgtattttatcgg

SEQ ID NO: 60843 - DNA, 40 bp, Homo sapiens
ccgataaaatacaacaaggatatgcacactaattttgttt

SEQ ID NO: 60844 - DNA, 40 bp, Homo sapiens
aacaaaattagtgtgcatatccttgttgtattttatcggc

SEQ ID NO: 60845 - DNA, 40 bp, Homo sapiens
gccgataaaatacaacaaggatatgcacactaattttgtt

SEQ ID NO: 60846 - DNA, 40 bp, Homo sapiens
acaaaattagtgtgcatatccttgttgtattttatcggca

SEQ ID NO: 60847 - DNA, 40 bp, Homo sapiens
tgccgataaaatacaacaaggatatgcacactaattttgt

SEQ ID NO: 60848 - DNA, 40 bp, Homo sapiens
caaaattagtgtgcatatccttgttgtattttatcggcaa

SEQ ID NO: 60849 - DNA, 40 bp, Homo sapiens
ttgccgataaaatacaacaaggatatgcacactaattttg

SEQ ID NO: 60850 - DNA, 40 bp, Homo sapiens
aaaattagtgtgcatatccttgttgtattttatcggcaag

SEQ ID NO: 60851 - DNA, 40 bp, Homo sapiens
cttgccgataaaatacaacaaggatatgcacactaatttt

SEQ ID NO: 60852 - DNA, 40 bp, Homo sapiens
aaattagtgtgcatatccttgttgtattttatcggcaagt

SEQ ID NO: 60853 - DNA, 40 bp, Homo sapiens
acttgccgataaaatacaacaaggatatgcacactaattt

SEQ ID NO: 60854 - DNA, 40 bp, Homo sapiens
aattagtgtgcatatccttgttgtattttatcggcaagtt

SEQ ID NO: 60855 - DNA, 40 bp, Homo sapiens
aacttgccgataaaatacaacaaggatatgcacactaatt

SEQ ID NO: 60856 - DNA, 40 bp, Homo sapiens
attagtgtgcatatccttgttgtattttatcggcaagttg

SEQ ID NO: 60857 - DNA, 40 bp, Homo sapiens
caacttgccgataaaatacaacaaggatatgcacactaat

SEQ ID NO: 60858 - DNA, 40 bp, Homo sapiens
ttagtgtgcatatccttgttgtattttatcggcaagttgt

SEQ ID NO: 60859 - DNA, 40 bp, Homo sapiens
acaacttgccgataaaatacaacaaggatatgcacactaa

SEQ ID NO: 60860 - DNA, 40 bp, Homo sapiens
tagtgtgcatatccttgttgtattttatcggcaagttgtt

SEQ ID NO: 60861 - DNA, 40 bp, Homo sapiens
aacaacttgccgataaaatacaacaaggatatgcacacta

SEQ ID NO: 60862 - DNA, 40 bp, Homo sapiens
agtgtgcatatccttgttgtattttatcggcaagttgttt

SEQ ID NO: 60863 - DNA, 40 bp, Homo sapiens
aaacaacttgccgataaaatacaacaaggatatgcacact

SEQ ID NO: 60864 - DNA, 40 bp, Homo sapiens
gtgtgcatatccttgttgtattttatcggcaagttgtttt

SEQ ID NO: 60865 - DNA, 40 bp, Homo sapiens
aaaacaacttgccgataaaatacaacaaggatatgcacac

SEQ ID NO: 60866 - DNA, 40 bp, Homo sapiens
tgtgcatatccttgttgtattttatcggcaagttgtttta

SEQ ID NO: 60867 - DNA, 40 bp, Homo sapiens
taaaacaacttgccgataaaatacaacaaggatatgcaca

SEQ ID NO: 60868 - DNA, 40 bp, Homo sapiens
gtgcatatccttgttgtattttatcggcaagttgttttat

SEQ ID NO: 60869 - DNA, 40 bp, Homo sapiens
ataaaacaacttgccgataaaatacaacaaggatatgcac

SEQ ID NO: 60870 - DNA, 40 bp, Homo sapiens
tgcatatccttgttgtattttatcggcaagttgttttatg

SEQ ID NO: 60871 - DNA, 40 bp, Homo sapiens
cataaaacaacttgccgataaaatacaacaaggatatgca

SEQ ID NO: 60872 - DNA, 40 bp, Homo sapiens
gcatatccttgttgtattttatcggcaagttgttttatgc

SEQ ID NO: 60873 - DNA, 40 bp, Homo sapiens
gcataaaacaacttgccgataaaatacaacaaggatatgc

SEQ ID NO: 60874 - DNA, 40 bp, Homo sapiens
catatccttgttgtattttatcggcaagttgttttatgcc

SEQ ID NO: 60875 - DNA, 40 bp, Homo sapiens
ggcataaaacaacttgccgataaaatacaacaaggatatg

SEQ ID NO: 60876 - DNA, 40 bp, Homo sapiens
atatccttgttgtattttatcggcaagttgttttatgccc

SEQ ID NO: 60877 - DNA, 40 bp, Homo sapiens
gggcataaaacaacttgccgataaaatacaacaaggatat

SEQ ID NO: 60878 - DNA, 40 bp, Homo sapiens
tatccttgttgtattttatcggcaagttgttttatgccct

SEQ ID NO: 60879 - DNA, 40 bp, Homo sapiens
agggcataaaacaacttgccgataaaatacaacaaggata

SEQ ID NO: 60880 - DNA, 40 bp, Homo sapiens
atccttgttgtattttatcggcaagttgttttatgcccta

SEQ ID NO: 60881 - DNA, 40 bp, Homo sapiens
tagggcataaaacaacttgccgataaaatacaacaaggat

SEQ ID NO: 60882 - DNA, 40 bp, Homo sapiens
tccttgttgtattttatcggcaagttgttttatgccctaa

SEQ ID NO: 60883 - DNA, 40 bp, Homo sapiens
ttagggcataaaacaacttgccgataaaatacaacaagga

SEQ ID NO: 60884 - DNA, 40 bp, Homo sapiens
ccttgttgtattttatcggcaagttgttttatgccctaac

SEQ ID NO: 60885 - DNA, 40 bp, Homo sapiens
gttagggcataaaacaacttgccgataaaatacaacaagg

SEQ ID NO: 60886 - DNA, 40 bp, Homo sapiens
cttgttgtattttatcggcaagttgttttatgccctaact

SEQ ID NO: 60887 - DNA, 40 bp, Homo sapiens
agttagggcataaaacaacttgccgataaaatacaacaag

SEQ ID NO: 60888 - DNA, 40 bp, Homo sapiens
ttgttgtattttatcggcaagttgttttatgccctaactt

SEQ ID NO: 60889 - DNA, 40 bp, Homo sapiens
aagttagggcataaaacaacttgccgataaaatacaacaa

SEQ ID NO: 60890 - DNA, 40 bp, Homo sapiens
tgttgtattttatcggcaagttgttttatgccctaacttt

SEQ ID NO: 60891 - DNA, 40 bp, Homo sapiens
aaagttagggcataaaacaacttgccgataaaatacaaca

SEQ ID NO: 60892 - DNA, 40 bp, Homo sapiens
gttgtattttatcggcaagttgttttatgccctaactttt

SEQ ID NO: 60893 - DNA, 40 bp, Homo sapiens
aaaagttagggcataaaacaacttgccgataaaatacaac

SEQ ID NO: 60894 - DNA, 40 bp, Homo sapiens
ttgtattttatcggcaagttgttttatgccctaacttttg

SEQ ID NO: 60895 - DNA, 40 bp, Homo sapiens
caaaagttagggcataaaacaacttgccgataaaatacaa

SEQ ID NO: 60896 - DNA, 40 bp, Homo sapiens
tgtattttatcggcaagttgttttatgccctaacttttgg

SEQ ID NO: 60897 - DNA, 40 bp, Homo sapiens
ccaaaagttagggcataaaacaacttgccgataaaataca

SEQ ID NO: 60898 - DNA, 40 bp, Homo sapiens
gtattttatcggcaagttgttttatgccctaacttttggg

SEQ ID NO: 60899 - DNA, 40 bp, Homo sapiens
cccaaaagttagggcataaaacaacttgccgataaaatac

SEQ ID NO: 60900 - DNA, 40 bp, Homo sapiens
tattttatcggcaagttgttttatgccctaacttttgggg

SEQ ID NO: 60901 - DNA, 40 bp, Homo sapiens
ccccaaaagttagggcataaaacaacttgccgataaaata

SEQ ID NO: 60902 - DNA, 40 bp, Homo sapiens
attttatcggcaagttgttttatgccctaacttttggggt

SEQ ID NO: 60903 - DNA, 40 bp, Homo sapiens
accccaaaagttagggcataaaacaacttgccgataaaat

SEQ ID NO: 60904 - DNA, 40 bp, Homo sapiens
ttttatcggcaagttgttttatgccctaacttttggggtc

SEQ ID NO: 60905 - DNA, 40 bp, Homo sapiens
gaccccaaaagttagggcataaaacaacttgccgataaaa

SEQ ID NO: 60906 - DNA, 40 bp, Homo sapiens
tttatcggcaagttgttttatgccctaacttttggggtct

SEQ ID NO: 60907 - DNA, 40 bp, Homo sapiens
agaccccaaaagttagggcataaaacaacttgccgataaa

SEQ ID NO: 60908 - DNA, 40 bp, Homo sapiens
ttatcggcaagttgttttatgccctaacttttggggtctt

SEQ ID NO: 60909 - DNA, 40 bp, Homo sapiens
aagaccccaaaagttagggcataaaacaacttgccgataa

SEQ ID NO: 60910 - DNA, 40 bp, Homo sapiens
tatcggcaagttgttttatgccctaacttttggggtcttg

SEQ ID NO: 60911 - DNA, 40 bp, Homo sapiens
caagaccccaaaagttagggcataaaacaacttgccgata

SEQ ID NO: 60912 - DNA, 40 bp, Homo sapiens
atcggcaagttgttttatgccctaacttttggggtcttga

SEQ ID NO: 60913 - DNA, 40 bp, Homo sapiens
tcaagaccccaaaagttagggcataaaacaacttgccgat

SEQ ID NO: 60914 - DNA, 40 bp, Homo sapiens
tcggcaagttgttttatgccctaacttttggggtcttgat

SEQ ID NO: 60915 - DNA, 40 bp, Homo sapiens
atcaagaccccaaaagttagggcataaaacaacttgccga

SEQ ID NO: 60916 - DNA, 40 bp, Homo sapiens
cggcaagttgttttatgccctaacttttggggtcttgatc

SEQ ID NO: 60917 - DNA, 40 bp, Homo sapiens
gatcaagaccccaaaagttagggcataaaacaacttgccg

SEQ ID NO: 60918 - DNA, 40 bp, Homo sapiens
ggcaagttgttttatgccctaacttttggggtcttgatca

SEQ ID NO: 60919 - DNA, 40 bp, Homo sapiens
tgatcaagaccccaaaagttagggcataaaacaacttgcc

SEQ ID NO: 60920 - DNA, 40 bp, Homo sapiens
gcaagttgttttatgccctaacttttggggtcttgatcat

SEQ ID NO: 60921 - DNA, 40 bp, Homo sapiens
atgatcaagaccccaaaagttagggcataaaacaacttgc

SEQ ID NO: 60922 - DNA, 40 bp, Homo sapiens
caagttgttttatgccctaacttttggggtcttgatcatg

SEQ ID NO: 60923 - DNA, 40 bp, Homo sapiens
catgatcaagaccccaaaagttagggcataaaacaacttg

SEQ ID NO: 60924 - DNA, 40 bp, Homo sapiens
aagttgttttatgccctaacttttggggtcttgatcatga

SEQ ID NO: 60925 - DNA, 40 bp, Homo sapiens
tcatgatcaagaccccaaaagttagggcataaaacaactt

SEQ ID NO: 60926 - DNA, 40 bp, Homo sapiens
agttgttttatgccctaacttttggggtcttgatcatgag

SEQ ID NO: 60927 - DNA, 40 bp, Homo sapiens
ctcatgatcaagaccccaaaagttagggcataaaacaact

SEQ ID NO: 60928 - DNA, 40 bp, Homo sapiens
gttgttttatgccctaacttttggggtcttgatcatgagc

SEQ ID NO: 60929 - DNA, 40 bp, Homo sapiens
gctcatgatcaagaccccaaaagttagggcataaaacaac

SEQ ID NO: 60930 - DNA, 40 bp, Homo sapiens
ttgttttatgccctaacttttggggtcttgatcatgagcc

SEQ ID NO: 60931 - DNA, 40 bp, Homo sapiens
ggctcatgatcaagaccccaaaagttagggcataaaacaa

SEQ ID NO: 60932 - DNA, 40 bp, Homo sapiens
tgttttatgccctaacttttggggtcttgatcatgagcct

SEQ ID NO: 60933 - DNA, 40 bp, Homo sapiens
aggctcatgatcaagaccccaaaagttagggcataaaaca

SEQ ID NO: 60934 - DNA, 40 bp, Homo sapiens
gttttatgccctaacttttggggtcttgatcatgagccta

SEQ ID NO: 60935 - DNA, 40 bp, Homo sapiens
taggctcatgatcaagaccccaaaagttagggcataaaac

SEQ ID NO: 60936 - DNA, 40 bp, Homo sapiens
ttttatgccctaacttttggggtcttgatcatgagcctaa

SEQ ID NO: 60937 - DNA, 40 bp, Homo sapiens
ttaggctcatgatcaagaccccaaaagttagggcataaaa

SEQ ID NO: 60938 - DNA, 40 bp, Homo sapiens
tttatgccctaacttttggggtcttgatcatgagcctaaa

SEQ ID NO: 60939 - DNA, 40 bp, Homo sapiens
tttaggctcatgatcaagaccccaaaagttagggcataaa

SEQ ID NO: 60940 - DNA, 40 bp, Homo sapiens
ttatgccctaacttttggggtcttgatcatgagcctaaaa

SEQ ID NO: 60941 - DNA, 40 bp, Homo sapiens
ttttaggctcatgatcaagaccccaaaagttagggcataa

SEQ ID NO: 60942 - DNA, 40 bp, Homo sapiens
tatgccctaacttttggggtcttgatcatgagcctaaaac

SEQ ID NO: 60943 - DNA, 40 bp, Homo sapiens
gttttaggctcatgatcaagaccccaaaagttagggcata

SEQ ID NO: 60944 - DNA, 40 bp, Homo sapiens
atgccctaacttttggggtcttgatcatgagcctaaaaca

SEQ ID NO: 60945 - DNA, 40 bp, Homo sapiens
tgttttaggctcatgatcaagaccccaaaagttagggcat

SEQ ID NO: 60946 - DNA, 40 bp, Homo sapiens
tgccctaacttttggggtcttgatcatgagcctaaaacac

SEQ ID NO: 60947 - DNA, 40 bp, Homo sapiens
gtgttttaggctcatgatcaagaccccaaaagttagggca

SEQ ID NO: 60948 - DNA, 40 bp, Homo sapiens
gccctaacttttggggtcttgatcatgagcctaaaacacg

SEQ ID NO: 60949 - DNA, 40 bp, Homo sapiens
cgtgttttaggctcatgatcaagaccccaaaagttagggc

SEQ ID NO: 60950 - DNA, 40 bp, Homo sapiens
ccctaacttttggggtcttgatcatgagcctaaaacacgt

SEQ ID NO: 60951 - DNA, 40 bp, Homo sapiens
acgtgttttaggctcatgatcaagaccccaaaagttaggg

SEQ ID NO: 60952 - DNA, 40 bp, Homo sapiens
cctaacttttggggtcttgatcatgagcctaaaacacgta

SEQ ID NO: 60953 - DNA, 40 bp, Homo sapiens
tacgtgttttaggctcatgatcaagaccccaaaagttagg

SEQ ID NO: 60954 - DNA, 40 bp, Homo sapiens
ctaacttttggggtcttgatcatgagcctaaaacacgtaa

SEQ ID NO: 60955 - DNA, 40 bp, Homo sapiens
ttacgtgttttaggctcatgatcaagaccccaaaagttag

SEQ ID NO: 60956 - DNA, 40 bp, Homo sapiens
taacttttggggtcttgatcatgagcctaaaacacgtaaa

SEQ ID NO: 60957 - DNA, 40 bp, Homo sapiens
tttacgtgttttaggctcatgatcaagaccccaaaagtta

SEQ ID NO: 60958 - DNA, 40 bp, Homo sapiens
aacttttggggtcttgatcatgagcctaaaacacgtaaac

SEQ ID NO: 60959 - DNA, 40 bp, Homo sapiens
gtttacgtgttttaggctcatgatcaagaccccaaaagtt

SEQ ID NO: 60960 - DNA, 40 bp, Homo sapiens
acttttggggtcttgatcatgagcctaaaacacgtaaaca

SEQ ID NO: 60961 - DNA, 40 bp, Homo sapiens
tgtttacgtgttttaggctcatgatcaagaccccaaaagt

SEQ ID NO: 60962 - DNA, 40 bp, Homo sapiens
cttttggggtcttgatcatgagcctaaaacacgtaaacac

SEQ ID NO: 60963 - DNA, 40 bp, Homo sapiens
gtgtttacgtgttttaggctcatgatcaagaccccaaaag

SEQ ID NO: 60964 - DNA, 40 bp, Homo sapiens
ttttggggtcttgatcatgagcctaaaacacgtaaacacc

SEQ ID NO: 60965 - DNA, 40 bp, Homo sapiens
ggtgtttacgtgttttaggctcatgatcaagaccccaaaa

SEQ ID NO: 60966 - DNA, 40 bp, Homo sapiens
tttggggtcttgatcatgagcctaaaacacgtaaacaccc

SEQ ID NO: 60967 - DNA, 40 bp, Homo sapiens
gggtgtttacgtgttttaggctcatgatcaagaccccaaa

SEQ ID NO: 60968 - DNA, 40 bp, Homo sapiens
ttggggtcttgatcatgagcctaaaacacgtaaacaccca

SEQ ID NO: 60969 - DNA, 40 bp, Homo sapiens
tgggtgtttacgtgttttaggctcatgatcaagaccccaa

SEQ ID NO: 60970 - DNA, 40 bp, Homo sapiens
tggggtcttgatcatgagcctaaaacacgtaaacacccaa

SEQ ID NO: 60971 - DNA, 40 bp, Homo sapiens
ttgggtgtttacgtgttttaggctcatgatcaagacccca

SEQ ID NO: 60972 - DNA, 40 bp, Homo sapiens
ggggtcttgatcatgagcctaaaacacgtaaacacccaaa

SEQ ID NO: 60973 - DNA, 40 bp, Homo sapiens
tttgggtgtttacgtgttttaggctcatgatcaagacccc

SEQ ID NO: 60974 - DNA, 40 bp, Homo sapiens
gggtcttgatcatgagcctaaaacacgtaaacacccaaaa

SEQ ID NO: 60975 - DNA, 40 bp, Homo sapiens
ttttgggtgtttacgtgttttaggctcatgatcaagaccc

SEQ ID NO: 60976 - DNA, 40 bp, Homo sapiens
ggtcttgatcatgagcctaaaacacgtaaacacccaaaaa

SEQ ID NO: 60977 - DNA, 40 bp, Homo sapiens
tttttgggtgtttacgtgttttaggctcatgatcaagacc

SEQ ID NO: 60978 - DNA, 40 bp, Homo sapiens
gtcttgatcatgagcctaaaacacgtaaacacccaaaaag

SEQ ID NO: 60979 - DNA, 40 bp, Homo sapiens
ctttttgggtgtttacgtgttttaggctcatgatcaagac

SEQ ID NO: 60980 - DNA, 40 bp, Homo sapiens
tcttgatcatgagcctaaaacacgtaaacacccaaaaaga

SEQ ID NO: 60981 - DNA, 40 bp, Homo sapiens
tctttttgggtgtttacgtgttttaggctcatgatcaaga

SEQ ID NO: 60982 - DNA, 40 bp, Homo sapiens
cttgatcatgagcctaaaacacgtaaacacccaaaaagaa

SEQ ID NO: 60983 - DNA, 40 bp, Homo sapiens
ttctttttgggtgtttacgtgttttaggctcatgatcaag

SEQ ID NO: 60984 - DNA, 40 bp, Homo sapiens
ttgatcatgagcctaaaacacgtaaacacccaaaaagaat

SEQ ID NO: 60985 - DNA, 40 bp, Homo sapiens
attctttttgggtgtttacgtgttttaggctcatgatcaa

SEQ ID NO: 60986 - DNA, 40 bp, Homo sapiens
tgatcatgagcctaaaacacgtaaacacccaaaaagaatt

SEQ ID NO: 60987 - DNA, 40 bp, Homo sapiens
aattctttttgggtgtttacgtgttttaggctcatgatca

SEQ ID NO: 60988 - DNA, 40 bp, Homo sapiens
gatcatgagcctaaaacacgtaaacacccaaaaagaatta

SEQ ID NO: 60989 - DNA, 40 bp, Homo sapiens
taattctttttgggtgtttacgtgttttaggctcatgatc

SEQ ID NO: 60990 - DNA, 40 bp, Homo sapiens
atcatgagcctaaaacacgtaaacacccaaaaagaattat

SEQ ID NO: 60991 - DNA, 40 bp, Homo sapiens
ataattctttttgggtgtttacgtgttttaggctcatgat

SEQ ID NO: 60992 - DNA, 40 bp, Homo sapiens
tcatgagcctaaaacacgtaaacacccaaaaagaattata

SEQ ID NO: 60993 - DNA, 40 bp, Homo sapiens
tataattctttttgggtgtttacgtgttttaggctcatga

SEQ ID NO: 60994 - DNA, 40 bp, Homo sapiens
catgagcctaaaacacgtaaacacccaaaaagaattatat

SEQ ID NO: 60995 - DNA, 40 bp, Homo sapiens
atataattctttttgggtgtttacgtgttttaggctcatg

SEQ ID NO: 60996 - DNA, 40 bp, Homo sapiens
atgagcctaaaacacgtaaacacccaaaaagaattatatt

SEQ ID NO: 60997 - DNA, 40 bp, Homo sapiens
aatataattctttttgggtgtttacgtgttttaggctcat

SEQ ID NO: 60998 - DNA, 40 bp, Homo sapiens
tgagcctaaaacacgtaaacacccaaaaagaattatattc

SEQ ID NO: 60999 - DNA, 40 bp, Homo sapiens
gaatataattctttttgggtgtttacgtgttttaggctca

SEQ ID NO: 61000 - DNA, 40 bp, Homo sapiens
gagcctaaaacacgtaaacacccaaaaagaattatattcc

SEQ ID NO: 61001 - DNA, 40 bp, Homo sapiens
ggaatataattctttttgggtgtttacgtgttttaggctc

SEQ ID NO: 61002 - DNA, 40 bp, Homo sapiens
agcctaaaacacgtaaacacccaaaaagaattatattccg

SEQ ID NO: 61003 - DNA, 40 bp, Homo sapiens
cggaatataattctttttgggtgtttacgtgttttaggct

SEQ ID NO: 61004 - DNA, 40 bp, Homo sapiens
gcctaaaacacgtaaacacccaaaaagaattatattccgg

SEQ ID NO: 61005 - DNA, 40 bp, Homo sapiens
ccggaatataattctttttgggtgtttacgtgttttaggc

SEQ ID NO: 61006 - DNA, 40 bp, Homo sapiens
cctaaaacacgtaaacacccaaaaagaattatattccggt

SEQ ID NO: 61007 - DNA, 40 bp, Homo sapiens
accggaatataattctttttgggtgtttacgtgttttagg

SEQ ID NO: 61008 - DNA, 40 bp, Homo sapiens
ctaaaacacgtaaacacccaaaaagaattatattccggtt

SEQ ID NO: 61009 - DNA, 40 bp, Homo sapiens
aaccggaatataattctttttgggtgtttacgtgttttag

SEQ ID NO: 61010 - DNA, 40 bp, Homo sapiens
taaaacacgtaaacacccaaaaagaattatattccggtta

SEQ ID NO: 61011 - DNA, 40 bp, Homo sapiens
taaccggaatataattctttttgggtgtttacgtgtttta

SEQ ID NO: 61012 - DNA, 40 bp, Homo sapiens
aaaacacgtaaacacccaaaaagaattatattccggttaa

SEQ ID NO: 61013 - DNA, 40 bp, Homo sapiens
ttaaccggaatataattctttttgggtgtttacgtgtttt

SEQ ID NO: 61014 - DNA, 40 bp, Homo sapiens
aaacacgtaaacacccaaaaagaattatattccggttaaa

SEQ ID NO: 61015 - DNA, 40 bp, Homo sapiens
tttaaccggaatataattctttttgggtgtttacgtgttt

SEQ ID NO: 61016 - DNA, 40 bp, Homo sapiens
aacacgtaaacacccaaaaagaattatattccggttaaag

SEQ ID NO: 61017 - DNA, 40 bp, Homo sapiens
ctttaaccggaatataattctttttgggtgtttacgtgtt

SEQ ID NO: 61018 - DNA, 40 bp, Homo sapiens
acacgtaaacacccaaaaagaattatattccggttaaagg

SEQ ID NO: 61019 - DNA, 40 bp, Homo sapiens
cctttaaccggaatataattctttttgggtgtttacgtgt

SEQ ID NO: 61020 - DNA, 40 bp, Homo sapiens
cacgtaaacacccaaaaagaattatattccggttaaagga

SEQ ID NO: 61021 - DNA, 40 bp, Homo sapiens
tcctttaaccggaatataattctttttgggtgtttacgtg

SEQ ID NO: 61022 - DNA, 40 bp, Homo sapiens
acgtaaacacccaaaaagaattatattccggttaaaggaa

SEQ ID NO: 61023 - DNA, 40 bp, Homo sapiens
ttcctttaaccggaatataattctttttgggtgtttacgt

SEQ ID NO: 61024 - DNA, 40 bp, Homo sapiens
cgtaaacacccaaaaagaattatattccggttaaaggaac

SEQ ID NO: 61025 - DNA, 40 bp, Homo sapiens
gttcctttaaccggaatataattctttttgggtgtttacg

SEQ ID NO: 61026 - DNA, 40 bp, Homo sapiens
gtaaacacccaaaaagaattatattccggttaaaggaaca

SEQ ID NO: 61027 - DNA, 40 bp, Homo sapiens
tgttcctttaaccggaatataattctttttgggtgtttac

SEQ ID NO: 61028 - DNA, 40 bp, Homo sapiens
taaacacccaaaaagaattatattccggttaaaggaacaa

SEQ ID NO: 61029 - DNA, 40 bp, Homo sapiens
ttgttcctttaaccggaatataattctttttgggtgttta

SEQ ID NO: 61030 - DNA, 40 bp, Homo sapiens
aaacacccaaaaagaattatattccggttaaaggaacaaa

SEQ ID NO: 61031 - DNA, 40 bp, Homo sapiens
tttgttcctttaaccggaatataattctttttgggtgttt

SEQ ID NO: 61032 - DNA, 40 bp, Homo sapiens
aacacccaaaaagaattatattccggttaaaggaacaaaa

SEQ ID NO: 61033 - DNA, 40 bp, Homo sapiens
ttttgttcctttaaccggaatataattctttttgggtgtt

SEQ ID NO: 61034 - DNA, 40 bp, Homo sapiens
acacccaaaaagaattatattccggttaaaggaacaaaac

SEQ ID NO: 61035 - DNA, 40 bp, Homo sapiens
gttttgttcctttaaccggaatataattctttttgggtgt

SEQ ID NO: 61036 - DNA, 40 bp, Homo sapiens
cacccaaaaagaattatattccggttaaaggaacaaaaca

SEQ ID NO: 61037 - DNA, 40 bp, Homo sapiens
tgttttgttcctttaaccggaatataattctttttgggtg

SEQ ID NO: 61038 - DNA, 40 bp, Homo sapiens
acccaaaaagaattatattccggttaaaggaacaaaacat

SEQ ID NO: 61039 - DNA, 40 bp, Homo sapiens
atgttttgttcctttaaccggaatataattctttttgggt

SEQ ID NO: 61040 - DNA, 40 bp, Homo sapiens
cccaaaaagaattatattccggttaaaggaacaaaacatt

SEQ ID NO: 61041 - DNA, 40 bp, Homo sapiens
aatgttttgttcctttaaccggaatataattctttttggg

SEQ ID NO: 61042 - DNA, 40 bp, Homo sapiens
ccaaaaagaattatattccggttaaaggaacaaaacattc

SEQ ID NO: 61043 - DNA, 40 bp, Homo sapiens
gaatgttttgttcctttaaccggaatataattctttttgg

SEQ ID NO: 61044 - DNA, 40 bp, Homo sapiens
caaaaagaattatattccggttaaaggaacaaaacattca

SEQ ID NO: 61045 - DNA, 40 bp, Homo sapiens
tgaatgttttgttcctttaaccggaatataattctttttg

SEQ ID NO: 61046 - DNA, 40 bp, Homo sapiens
aaaaagaattatattccggttaaaggaacaaaacattcat

SEQ ID NO: 61047 - DNA, 40 bp, Homo sapiens
atgaatgttttgttcctttaaccggaatataattcttttt

SEQ ID NO: 61048 - DNA, 40 bp, Homo sapiens
aaaagaattatattccggttaaaggaacaaaacattcatt

SEQ ID NO: 61049 - DNA, 40 bp, Homo sapiens
aatgaatgttttgttcctttaaccggaatataattctttt

SEQ ID NO: 61050 - DNA, 40 bp, Homo sapiens
aaagaattatattccggttaaaggaacaaaacattcattt

SEQ ID NO: 61051 - DNA, 40 bp, Homo sapiens
aaatgaatgttttgttcctttaaccggaatataattcttt

SEQ ID NO: 61052 - DNA, 40 bp, Homo sapiens
aagaattatattccggttaaaggaacaaaacattcattta

SEQ ID NO: 61053 - DNA, 40 bp, Homo sapiens
taaatgaatgttttgttcctttaaccggaatataattctt

SEQ ID NO: 61054 - DNA, 40 bp, Homo sapiens
agaattatattccggttaaaggaacaaaacattcatttag

SEQ ID NO: 61055 - DNA, 40 bp, Homo sapiens
ctaaatgaatgttttgttcctttaaccggaatataattct

SEQ ID NO: 61056 - DNA, 40 bp, Homo sapiens
gaattatattccggttaaaggaacaaaacattcatttaga

SEQ ID NO: 61057 - DNA, 40 bp, Homo sapiens
tctaaatgaatgttttgttcctttaaccggaatataattc

SEQ ID NO: 61058 - DNA, 40 bp, Homo sapiens
aattatattccggttaaaggaacaaaacattcatttagaa

SEQ ID NO: 61059 - DNA, 40 bp, Homo sapiens
ttctaaatgaatgttttgttcctttaaccggaatataatt

SEQ ID NO: 61060 - DNA, 40 bp, Homo sapiens
attatattccggttaaaggaacaaaacattcatttagaag

SEQ ID NO: 61061 - DNA, 40 bp, Homo sapiens
cttctaaatgaatgttttgttcctttaaccggaatataat

SEQ ID NO: 61062 - DNA, 40 bp, Homo sapiens
ttatattccggttaaaggaacaaaacattcatttagaagt

SEQ ID NO: 61063 - DNA, 40 bp, Homo sapiens
acttctaaatgaatgttttgttcctttaaccggaatataa

SEQ ID NO: 61064 - DNA, 40 bp, Homo sapiens
tatattccggttaaaggaacaaaacattcatttagaagtt

SEQ ID NO: 61065 - DNA, 40 bp, Homo sapiens
aacttctaaatgaatgttttgttcctttaaccggaatata

SEQ ID NO: 61066 - DNA, 40 bp, Homo sapiens
atattccggttaaaggaacaaaacattcatttagaagttc

SEQ ID NO: 61067 - DNA, 40 bp, Homo sapiens
gaacttctaaatgaatgttttgttcctttaaccggaatat

SEQ ID NO: 61068 - DNA, 40 bp, Homo sapiens
tattccggttaaaggaacaaaacattcatttagaagttct

SEQ ID NO: 61069 - DNA, 40 bp, Homo sapiens
agaacttctaaatgaatgttttgttcctttaaccggaata

SEQ ID NO: 61070 - DNA, 40 bp, Homo sapiens
attccggttaaaggaacaaaacattcatttagaagttctc

SEQ ID NO: 61071 - DNA, 40 bp, Homo sapiens
gagaacttctaaatgaatgttttgttcctttaaccggaat

SEQ ID NO: 61072 - DNA, 40 bp, Homo sapiens
ttccggttaaaggaacaaaacattcatttagaagttctca

SEQ ID NO: 61073 - DNA, 40 bp, Homo sapiens
tgagaacttctaaatgaatgttttgttcctttaaccggaa

SEQ ID NO: 61074 - DNA, 40 bp, Homo sapiens
tccggttaaaggaacaaaacattcatttagaagttctcat

SEQ ID NO: 61075 - DNA, 40 bp, Homo sapiens
atgagaacttctaaatgaatgttttgttcctttaaccgga

SEQ ID NO: 61076 - DNA, 40 bp, Homo sapiens
ccggttaaaggaacaaaacattcatttagaagttctcatc

SEQ ID NO: 61077 - DNA, 40 bp, Homo sapiens
gatgagaacttctaaatgaatgttttgttcctttaaccgg

SEQ ID NO: 61078 - DNA, 40 bp, Homo sapiens
cggttaaaggaacaaaacattcatttagaagttctcatcc

SEQ ID NO: 61079 - DNA, 40 bp, Homo sapiens
ggatgagaacttctaaatgaatgttttgttcctttaaccg

SEQ ID NO: 61080 - DNA, 40 bp, Homo sapiens
ggttaaaggaacaaaacattcatttagaagttctcatcca

SEQ ID NO: 61081 - DNA, 40 bp, Homo sapiens
tggatgagaacttctaaatgaatgttttgttcctttaacc

SEQ ID NO: 61082 - DNA, 40 bp, Homo sapiens
gttaaaggaacaaaacattcatttagaagttctcatccat

SEQ ID NO: 61083 - DNA, 40 bp, Homo sapiens
atggatgagaacttctaaatgaatgttttgttcctttaac

SEQ ID NO: 61084 - DNA, 40 bp, Homo sapiens
ttaaaggaacaaaacattcatttagaagttctcatccatg

SEQ ID NO: 61085 - DNA, 40 bp, Homo sapiens
catggatgagaacttctaaatgaatgttttgttcctttaa

SEQ ID NO: 61086 - DNA, 40 bp, Homo sapiens
taaaggaacaaaacattcatttagaagttctcatccatgt

SEQ ID NO: 61087 - DNA, 40 bp, Homo sapiens
acatggatgagaacttctaaatgaatgttttgttccttta

SEQ ID NO: 61088 - DNA, 40 bp, Homo sapiens
aaaggaacaaaacattcatttagaagttctcatccatgta

SEQ ID NO: 61089 - DNA, 40 bp, Homo sapiens
tacatggatgagaacttctaaatgaatgttttgttccttt

SEQ ID NO: 61090 - DNA, 40 bp, Homo sapiens
aaggaacaaaacattcatttagaagttctcatccatgtaa

SEQ ID NO: 61091 - DNA, 40 bp, Homo sapiens
ttacatggatgagaacttctaaatgaatgttttgttcctt

SEQ ID NO: 61092 - DNA, 40 bp, Homo sapiens
aggaacaaaacattcatttagaagttctcatccatgtaaa

SEQ ID NO: 61093 - DNA, 40 bp, Homo sapiens
tttacatggatgagaacttctaaatgaatgttttgttcct

SEQ ID NO: 61094 - DNA, 40 bp, Homo sapiens
ggaacaaaacattcatttagaagttctcatccatgtaaat

SEQ ID NO: 61095 - DNA, 40 bp, Homo sapiens
atttacatggatgagaacttctaaatgaatgttttgttcc

SEQ ID NO: 61096 - DNA, 40 bp, Homo sapiens
gaacaaaacattcatttagaagttctcatccatgtaaatc

SEQ ID NO: 61097 - DNA, 40 bp, Homo sapiens
gatttacatggatgagaacttctaaatgaatgttttgttc

SEQ ID NO: 61098 - DNA, 40 bp, Homo sapiens
aacaaaacattcatttagaagttctcatccatgtaaatca

SEQ ID NO: 61099 - DNA, 40 bp, Homo sapiens
tgatttacatggatgagaacttctaaatgaatgttttgtt

SEQ ID NO: 61100 - DNA, 40 bp, Homo sapiens
acaaaacattcatttagaagttctcatccatgtaaatcag

SEQ ID NO: 61101 - DNA, 40 bp, Homo sapiens
ctgatttacatggatgagaacttctaaatgaatgttttgt

SEQ ID NO: 61102 - DNA, 40 bp, Homo sapiens
caaaacattcatttagaagttctcatccatgtaaatcaga

SEQ ID NO: 61103 - DNA, 40 bp, Homo sapiens
tctgatttacatggatgagaacttctaaatgaatgttttg

SEQ ID NO: 61104 - DNA, 40 bp, Homo sapiens
aaaacattcatttagaagttctcatccatgtaaatcagag

SEQ ID NO: 61105 - DNA, 40 bp, Homo sapiens
ctctgatttacatggatgagaacttctaaatgaatgtttt

SEQ ID NO: 61106 - DNA, 40 bp, Homo sapiens
aaacattcatttagaagttctcatccatgtaaatcagagg

SEQ ID NO: 61107 - DNA, 40 bp, Homo sapiens
cctctgatttacatggatgagaacttctaaatgaatgttt

SEQ ID NO: 61108 - DNA, 40 bp, Homo sapiens
aacattcatttagaagttctcatccatgtaaatcagaggc

SEQ ID NO: 61109 - DNA, 40 bp, Homo sapiens
gcctctgatttacatggatgagaacttctaaatgaatgtt

SEQ ID NO: 61110 - DNA, 40 bp, Homo sapiens
acattcatttagaagttctcatccatgtaaatcagaggct

SEQ ID NO: 61111 - DNA, 40 bp, Homo sapiens
agcctctgatttacatggatgagaacttctaaatgaatgt

SEQ ID NO: 61112 - DNA, 40 bp, Homo sapiens
cattcatttagaagttctcatccatgtaaatcagaggctg

SEQ ID NO: 61113 - DNA, 40 bp, Homo sapiens
cagcctctgatttacatggatgagaacttctaaatgaatg

SEQ ID NO: 61114 - DNA, 40 bp, Homo sapiens
attcatttagaagttctcatccatgtaaatcagaggctgg

SEQ ID NO: 61115 - DNA, 40 bp, Homo sapiens
ccagcctctgatttacatggatgagaacttctaaatgaat

SEQ ID NO: 61116 - DNA, 40 bp, Homo sapiens
ttcatttagaagttctcatccatgtaaatcagaggctggc

SEQ ID NO: 61117 - DNA, 40 bp, Homo sapiens
gccagcctctgatttacatggatgagaacttctaaatgaa

SEQ ID NO: 61118 - DNA, 40 bp, Homo sapiens
tcatttagaagttctcatccatgtaaatcagaggctggca

SEQ ID NO: 61119 - DNA, 40 bp, Homo sapiens
tgccagcctctgatttacatggatgagaacttctaaatga

SEQ ID NO: 61120 - DNA, 40 bp, Homo sapiens
catttagaagttctcatccatgtaaatcagaggctggcaa

SEQ ID NO: 61121 - DNA, 40 bp, Homo sapiens
ttgccagcctctgatttacatggatgagaacttctaaatg

SEQ ID NO: 61122 - DNA, 40 bp, Homo sapiens
atttagaagttctcatccatgtaaatcagaggctggcaaa

SEQ ID NO: 61123 - DNA, 40 bp, Homo sapiens
tttgccagcctctgatttacatggatgagaacttctaaat

SEQ ID NO: 61124 - DNA, 40 bp, Homo sapiens
tttagaagttctcatccatgtaaatcagaggctggcaaat

SEQ ID NO: 61125 - DNA, 40 bp, Homo sapiens
atttgccagcctctgatttacatggatgagaacttctaaa

SEQ ID NO: 61126 - DNA, 40 bp, Homo sapiens
ttagaagttctcatccatgtaaatcagaggctggcaaata

SEQ ID NO: 61127 - DNA, 40 bp, Homo sapiens
tatttgccagcctctgatttacatggatgagaacttctaa

SEQ ID NO: 61128 - DNA, 40 bp, Homo sapiens
tagaagttctcatccatgtaaatcagaggctggcaaatat

SEQ ID NO: 61129 - DNA, 40 bp, Homo sapiens
atatttgccagcctctgatttacatggatgagaacttcta

SEQ ID NO: 61130 - DNA, 40 bp, Homo sapiens
agaagttctcatccatgtaaatcagaggctggcaaatatt

SEQ ID NO: 61131 - DNA, 40 bp, Homo sapiens
aatatttgccagcctctgatttacatggatgagaacttct

SEQ ID NO: 61132 - DNA, 40 bp, Homo sapiens
gaagttctcatccatgtaaatcagaggctggcaaatattt

SEQ ID NO: 61133 - DNA, 40 bp, Homo sapiens
aaatatttgccagcctctgatttacatggatgagaacttc

SEQ ID NO: 61134 - DNA, 40 bp, Homo sapiens
aagttctcatccatgtaaatcagaggctggcaaatatttt

SEQ ID NO: 61135 - DNA, 40 bp, Homo sapiens
aaaatatttgccagcctctgatttacatggatgagaactt

SEQ ID NO: 61136 - DNA, 40 bp, Homo sapiens
agttctcatccatgtaaatcagaggctggcaaatattttc

SEQ ID NO: 61137 - DNA, 40 bp, Homo sapiens
gaaaatatttgccagcctctgatttacatggatgagaact

SEQ ID NO: 61138 - DNA, 40 bp, Homo sapiens
gttctcatccatgtaaatcagaggctggcaaatattttct

SEQ ID NO: 61139 - DNA, 40 bp, Homo sapiens
agaaaatatttgccagcctctgatttacatggatgagaac

SEQ ID NO: 61140 - DNA, 40 bp, Homo sapiens
ttctcatccatgtaaatcagaggctggcaaatattttctg

SEQ ID NO: 61141 - DNA, 40 bp, Homo sapiens
cagaaaatatttgccagcctctgatttacatggatgagaa

SEQ ID NO: 61142 - DNA, 40 bp, Homo sapiens
tctcatccatgtaaatcagaggctggcaaatattttctgt

SEQ ID NO: 61143 - DNA, 40 bp, Homo sapiens
acagaaaatatttgccagcctctgatttacatggatgaga

SEQ ID NO: 61144 - DNA, 40 bp, Homo sapiens
ctcatccatgtaaatcagaggctggcaaatattttctgta

SEQ ID NO: 61145 - DNA, 40 bp, Homo sapiens
tacagaaaatatttgccagcctctgatttacatggatgag

SEQ ID NO: 61146 - DNA, 40 bp, Homo sapiens
tcatccatgtaaatcagaggctggcaaatattttctgtaa

SEQ ID NO: 61147 - DNA, 40 bp, Homo sapiens
ttacagaaaatatttgccagcctctgatttacatggatga

SEQ ID NO: 61148 - DNA, 40 bp, Homo sapiens
catccatgtaaatcagaggctggcaaatattttctgtaaa

SEQ ID NO: 61149 - DNA, 40 bp, Homo sapiens
tttacagaaaatatttgccagcctctgatttacatggatg

SEQ ID NO: 61150 - DNA, 40 bp, Homo sapiens
atccatgtaaatcagaggctggcaaatattttctgtaaag

SEQ ID NO: 61151 - DNA, 40 bp, Homo sapiens
ctttacagaaaatatttgccagcctctgatttacatggat

SEQ ID NO: 61152 - DNA, 40 bp, Homo sapiens
tccatgtaaatcagaggctggcaaatattttctgtaaagg

SEQ ID NO: 61153 - DNA, 40 bp, Homo sapiens
cctttacagaaaatatttgccagcctctgatttacatgga

SEQ ID NO: 61154 - DNA, 40 bp, Homo sapiens
ccatgtaaatcagaggctggcaaatattttctgtaaaggg

SEQ ID NO: 61155 - DNA, 40 bp, Homo sapiens
ccctttacagaaaatatttgccagcctctgatttacatgg

SEQ ID NO: 61156 - DNA, 40 bp, Homo sapiens
catgtaaatcagaggctggcaaatattttctgtaaagggc

SEQ ID NO: 61157 - DNA, 40 bp, Homo sapiens
gccctttacagaaaatatttgccagcctctgatttacatg

SEQ ID NO: 61158 - DNA, 40 bp, Homo sapiens
atgtaaatcagaggctggcaaatattttctgtaaagggcc

SEQ ID NO: 61159 - DNA, 40 bp, Homo sapiens
ggccctttacagaaaatatttgccagcctctgatttacat

SEQ ID NO: 61160 - DNA, 40 bp, Homo sapiens
tgtaaatcagaggctggcaaatattttctgtaaagggcca

SEQ ID NO: 61161 - DNA, 40 bp, Homo sapiens
tggccctttacagaaaatatttgccagcctctgatttaca

SEQ ID NO: 61162 - DNA, 40 bp, Homo sapiens
gtaaatcagaggctggcaaatattttctgtaaagggccaa

SEQ ID NO: 61163 - DNA, 40 bp, Homo sapiens
ttggccctttacagaaaatatttgccagcctctgatttac

SEQ ID NO: 61164 - DNA, 40 bp, Homo sapiens
taaatcagaggctggcaaatattttctgtaaagggccaag

SEQ ID NO: 61165 - DNA, 40 bp, Homo sapiens
cttggccctttacagaaaatatttgccagcctctgattta

SEQ ID NO: 61166 - DNA, 40 bp, Homo sapiens
aaatcagaggctggcaaatattttctgtaaagggccaaga

SEQ ID NO: 61167 - DNA, 40 bp, Homo sapiens
tcttggccctttacagaaaatatttgccagcctctgattt

SEQ ID NO: 61168 - DNA, 40 bp, Homo sapiens
aatcagaggctggcaaatattttctgtaaagggccaagat

SEQ ID NO: 61169 - DNA, 40 bp, Homo sapiens
atcttggccctttacagaaaatatttgccagcctctgatt

SEQ ID NO: 61170 - DNA, 40 bp, Homo sapiens
atcagaggctggcaaatattttctgtaaagggccaagata

SEQ ID NO: 61171 - DNA, 40 bp, Homo sapiens
tatcttggccctttacagaaaatatttgccagcctctgat

SEQ ID NO: 61172 - DNA, 40 bp, Homo sapiens
tcagaggctggcaaatattttctgtaaagggccaagatag

SEQ ID NO: 61173 - DNA, 40 bp, Homo sapiens
ctatcttggccctttacagaaaatatttgccagcctctga

SEQ ID NO: 61174 - DNA, 40 bp, Homo sapiens
cagaggctggcaaatattttctgtaaagggccaagatagt

SEQ ID NO: 61175 - DNA, 40 bp, Homo sapiens
actatcttggccctttacagaaaatatttgccagcctctg

SEQ ID NO: 61176 - DNA, 40 bp, Homo sapiens
agaggctggcaaatattttctgtaaagggccaagatagta

SEQ ID NO: 61177 - DNA, 40 bp, Homo sapiens
tactatcttggccctttacagaaaatatttgccagcctct

SEQ ID NO: 61178 - DNA, 40 bp, Homo sapiens
gaggctggcaaatattttctgtaaagggccaagatagtaa

SEQ ID NO: 61179 - DNA, 40 bp, Homo sapiens
ttactatcttggccctttacagaaaatatttgccagcctc

SEQ ID NO: 61180 - DNA, 40 bp, Homo sapiens
aggctggcaaatattttctgtaaagggccaagatagtaaa

SEQ ID NO: 61181 - DNA, 40 bp, Homo sapiens
tttactatcttggccctttacagaaaatatttgccagcct

SEQ ID NO: 61182 - DNA, 40 bp, Homo sapiens
ggctggcaaatattttctgtaaagggccaagatagtaaat

SEQ ID NO: 61183 - DNA, 40 bp, Homo sapiens
atttactatcttggccctttacagaaaatatttgccagcc

SEQ ID NO: 61184 - DNA, 40 bp, Homo sapiens
gctggcaaatattttctgtaaagggccaagatagtaaatg

SEQ ID NO: 61185 - DNA, 40 bp, Homo sapiens
catttactatcttggccctttacagaaaatatttgccagc

SEQ ID NO: 61186 - DNA, 40 bp, Homo sapiens
ctggcaaatattttctgtaaagggccaagatagtaaatgt

SEQ ID NO: 61187 - DNA, 40 bp, Homo sapiens
acatttactatcttggccctttacagaaaatatttgccag

SEQ ID NO: 61188 - DNA, 40 bp, Homo sapiens
tggcaaatattttctgtaaagggccaagatagtaaatgtt

SEQ ID NO: 61189 - DNA, 40 bp, Homo sapiens
aacatttactatcttggccctttacagaaaatatttgcca

SEQ ID NO: 61190 - DNA, 40 bp, Homo sapiens
ggcaaatattttctgtaaagggccaagatagtaaatgttt

SEQ ID NO: 61191 - DNA, 40 bp, Homo sapiens
aaacatttactatcttggccctttacagaaaatatttgcc

SEQ ID NO: 61192 - DNA, 40 bp, Homo sapiens
gcaaatattttctgtaaagggccaagatagtaaatgtttt

SEQ ID NO: 61193 - DNA, 40 bp, Homo sapiens
aaaacatttactatcttggccctttacagaaaatatttgc

SEQ ID NO: 61194 - DNA, 40 bp, Homo sapiens
caaatattttctgtaaagggccaagatagtaaatgtttta

SEQ ID NO: 61195 - DNA, 40 bp, Homo sapiens
taaaacatttactatcttggccctttacagaaaatatttg

SEQ ID NO: 61196 - DNA, 40 bp, Homo sapiens
aaatattttctgtaaagggccaagatagtaaatgttttag

SEQ ID NO: 61197 - DNA, 40 bp, Homo sapiens
ctaaaacatttactatcttggccctttacagaaaatattt

SEQ ID NO: 61198 - DNA, 40 bp, Homo sapiens
aatattttctgtaaagggccaagatagtaaatgttttagg

SEQ ID NO: 61199 - DNA, 40 bp, Homo sapiens
cctaaaacatttactatcttggccctttacagaaaatatt

SEQ ID NO: 61200 - DNA, 40 bp, Homo sapiens
atattttctgtaaagggccaagatagtaaatgttttaggc

SEQ ID NO: 61201 - DNA, 40 bp, Homo sapiens
gcctaaaacatttactatcttggccctttacagaaaatat

SEQ ID NO: 61202 - DNA, 40 bp, Homo sapiens
tattttctgtaaagggccaagatagtaaatgttttaggct

SEQ ID NO: 61203 - DNA, 40 bp, Homo sapiens
agcctaaaacatttactatcttggccctttacagaaaata

SEQ ID NO: 61204 - DNA, 40 bp, Homo sapiens
attttctgtaaagggccaagatagtaaatgttttaggctt

SEQ ID NO: 61205 - DNA, 40 bp, Homo sapiens
aagcctaaaacatttactatcttggccctttacagaaaat

SEQ ID NO: 61206 - DNA, 40 bp, Homo sapiens
ttttctgtaaagggccaagatagtaaatgttttaggcttt

SEQ ID NO: 61207 - DNA, 40 bp, Homo sapiens
aaagcctaaaacatttactatcttggccctttacagaaaa

SEQ ID NO: 61208 - DNA, 40 bp, Homo sapiens
tttctgtaaagggccaagatagtaaatgttttaggctttg

SEQ ID NO: 61209 - DNA, 40 bp, Homo sapiens
caaagcctaaaacatttactatcttggccctttacagaaa

SEQ ID NO: 61210 - DNA, 40 bp, Homo sapiens
ttctgtaaagggccaagatagtaaatgttttaggctttga

SEQ ID NO: 61211 - DNA, 40 bp, Homo sapiens
tcaaagcctaaaacatttactatcttggccctttacagaa

SEQ ID NO: 61212 - DNA, 40 bp, Homo sapiens
tctgtaaagggccaagatagtaaatgttttaggctttgag

SEQ ID NO: 61213 - DNA, 40 bp, Homo sapiens
ctcaaagcctaaaacatttactatcttggccctttacaga

SEQ ID NO: 61214 - DNA, 40 bp, Homo sapiens
ctgtaaagggccaagatagtaaatgttttaggctttgagg

SEQ ID NO: 61215 - DNA, 40 bp, Homo sapiens
cctcaaagcctaaaacatttactatcttggccctttacag

SEQ ID NO: 61216 - DNA, 40 bp, Homo sapiens
tgtaaagggccaagatagtaaatgttttaggctttgaggg

SEQ ID NO: 61217 - DNA, 40 bp, Homo sapiens
ccctcaaagcctaaaacatttactatcttggccctttaca

SEQ ID NO: 61218 - DNA, 40 bp, Homo sapiens
gtaaagggccaagatagtaaatgttttaggctttgagggc

SEQ ID NO: 61219 - DNA, 40 bp, Homo sapiens
gccctcaaagcctaaaacatttactatcttggccctttac

SEQ ID NO: 61220 - DNA, 40 bp, Homo sapiens
taaagggccaagatagtaaatgttttaggctttgagggcc

SEQ ID NO: 61221 - DNA, 40 bp, Homo sapiens
ggccctcaaagcctaaaacatttactatcttggcccttta

SEQ ID NO: 61222 - DNA, 40 bp, Homo sapiens
aaagggccaagatagtaaatgttttaggctttgagggcca

SEQ ID NO: 61223 - DNA, 40 bp, Homo sapiens
tggccctcaaagcctaaaacatttactatcttggcccttt

SEQ ID NO: 61224 - DNA, 40 bp, Homo sapiens
aagggccaagatagtaaatgttttaggctttgagggccac

SEQ ID NO: 61225 - DNA, 40 bp, Homo sapiens
gtggccctcaaagcctaaaacatttactatcttggccctt

SEQ ID NO: 61226 - DNA, 40 bp, Homo sapiens
agggccaagatagtaaatgttttaggctttgagggccaca

SEQ ID NO: 61227 - DNA, 40 bp, Homo sapiens
tgtggccctcaaagcctaaaacatttactatcttggccct

SEQ ID NO: 61228 - DNA, 40 bp, Homo sapiens
gggccaagatagtaaatgttttaggctttgagggccacaa

SEQ ID NO: 61229 - DNA, 40 bp, Homo sapiens
ttgtggccctcaaagcctaaaacatttactatcttggccc

SEQ ID NO: 61230 - DNA, 40 bp, Homo sapiens
ggccaagatagtaaatgttttaggctttgagggccacaag

SEQ ID NO: 61231 - DNA, 40 bp, Homo sapiens
cttgtggccctcaaagcctaaaacatttactatcttggcc

SEQ ID NO: 61232 - DNA, 40 bp, Homo sapiens
gccaagatagtaaatgttttaggctttgagggccacaagt

SEQ ID NO: 61233 - DNA, 40 bp, Homo sapiens
acttgtggccctcaaagcctaaaacatttactatcttggc

SEQ ID NO: 61234 - DNA, 40 bp, Homo sapiens
ccaagatagtaaatgttttaggctttgagggccacaagtg

SEQ ID NO: 61235 - DNA, 40 bp, Homo sapiens
cacttgtggccctcaaagcctaaaacatttactatcttgg

SEQ ID NO: 61236 - DNA, 40 bp, Homo sapiens
caagatagtaaatgttttaggctttgagggccacaagtgg

SEQ ID NO: 61237 - DNA, 40 bp, Homo sapiens
ccacttgtggccctcaaagcctaaaacatttactatcttg

SEQ ID NO: 61238 - DNA, 40 bp, Homo sapiens
aagatagtaaatgttttaggctttgagggccacaagtggt

SEQ ID NO: 61239 - DNA, 40 bp, Homo sapiens
accacttgtggccctcaaagcctaaaacatttactatctt

SEQ ID NO: 61240 - DNA, 40 bp, Homo sapiens
agatagtaaatgttttaggctttgagggccacaagtggta

SEQ ID NO: 61241 - DNA, 40 bp, Homo sapiens
taccacttgtggccctcaaagcctaaaacatttactatct

SEQ ID NO: 61242 - DNA, 40 bp, Homo sapiens
gatagtaaatgttttaggctttgagggccacaagtggtat

SEQ ID NO: 61243 - DNA, 40 bp, Homo sapiens
ataccacttgtggccctcaaagcctaaaacatttactatc

SEQ ID NO: 61244 - DNA, 40 bp, Homo sapiens
atagtaaatgttttaggctttgagggccacaagtggtatc

SEQ ID NO: 61245 - DNA, 40 bp, Homo sapiens
gataccacttgtggccctcaaagcctaaaacatttactat

SEQ ID NO: 61246 - DNA, 40 bp, Homo sapiens
tagtaaatgttttaggctttgagggccacaagtggtatct

SEQ ID NO: 61247 - DNA, 40 bp, Homo sapiens
agataccacttgtggccctcaaagcctaaaacatttacta

SEQ ID NO: 61248 - DNA, 40 bp, Homo sapiens
agtaaatgttttaggctttgagggccacaagtggtatctg

SEQ ID NO: 61249 - DNA, 40 bp, Homo sapiens
cagataccacttgtggccctcaaagcctaaaacatttact

SEQ ID NO: 61250 - DNA, 40 bp, Homo sapiens
gtaaatgttttaggctttgagggccacaagtggtatctgt

SEQ ID NO: 61251 - DNA, 40 bp, Homo sapiens
acagataccacttgtggccctcaaagcctaaaacatttac

SEQ ID NO: 61252 - DNA, 40 bp, Homo sapiens
taaatgttttaggctttgagggccacaagtggtatctgtt

SEQ ID NO: 61253 - DNA, 40 bp, Homo sapiens
aacagataccacttgtggccctcaaagcctaaaacattta

SEQ ID NO: 61254 - DNA, 40 bp, Homo sapiens
aaatgttttaggctttgagggccacaagtggtatctgttg

SEQ ID NO: 61255 - DNA, 40 bp, Homo sapiens
caacagataccacttgtggccctcaaagcctaaaacattt

SEQ ID NO: 61256 - DNA, 40 bp, Homo sapiens
aatgttttaggctttgagggccacaagtggtatctgttgc

SEQ ID NO: 61257 - DNA, 40 bp, Homo sapiens
gcaacagataccacttgtggccctcaaagcctaaaacatt

SEQ ID NO: 61258 - DNA, 40 bp, Homo sapiens
atgttttaggctttgagggccacaagtggtatctgttgca

SEQ ID NO: 61259 - DNA, 40 bp, Homo sapiens
tgcaacagataccacttgtggccctcaaagcctaaaacat

SEQ ID NO: 61260 - DNA, 40 bp, Homo sapiens
tgttttaggctttgagggccacaagtggtatctgttgcat

SEQ ID NO: 61261 - DNA, 40 bp, Homo sapiens
atgcaacagataccacttgtggccctcaaagcctaaaaca

SEQ ID NO: 61262 - DNA, 40 bp, Homo sapiens
gttttaggctttgagggccacaagtggtatctgttgcatt

SEQ ID NO: 61263 - DNA, 40 bp, Homo sapiens
aatgcaacagataccacttgtggccctcaaagcctaaaac

SEQ ID NO: 61264 - DNA, 40 bp, Homo sapiens
ttttaggctttgagggccacaagtggtatctgttgcattt

SEQ ID NO: 61265 - DNA, 40 bp, Homo sapiens
aaatgcaacagataccacttgtggccctcaaagcctaaaa

SEQ ID NO: 61266 - DNA, 40 bp, Homo sapiens
tttaggctttgagggccacaagtggtatctgttgcatttt

SEQ ID NO: 61267 - DNA, 40 bp, Homo sapiens
aaaatgcaacagataccacttgtggccctcaaagcctaaa

SEQ ID NO: 61268 - DNA, 40 bp, Homo sapiens
ttaggctttgagggccacaagtggtatctgttgcattttt

SEQ ID NO: 61269 - DNA, 40 bp, Homo sapiens
aaaaatgcaacagataccacttgtggccctcaaagcctaa

SEQ ID NO: 61270 - DNA, 40 bp, Homo sapiens
taggctttgagggccacaagtggtatctgttgcatttttt

SEQ ID NO: 61271 - DNA, 40 bp, Homo sapiens
aaaaaatgcaacagataccacttgtggccctcaaagccta

SEQ ID NO: 61272 - DNA, 40 bp, Homo sapiens
aggctttgagggccacaagtggtatctgttgcattttttt

SEQ ID NO: 61273 - DNA, 40 bp, Homo sapiens
aaaaaaatgcaacagataccacttgtggccctcaaagcct

SEQ ID NO: 61274 - DNA, 40 bp, Homo sapiens
ggctttgagggccacaagtggtatctgttgcatttttttt

SEQ ID NO: 61275 - DNA, 40 bp, Homo sapiens
aaaaaaaatgcaacagataccacttgtggccctcaaagcc

SEQ ID NO: 61276 - DNA, 40 bp, Homo sapiens
gctttgagggccacaagtggtatctgttgcattttttttt

SEQ ID NO: 61277 - DNA, 40 bp, Homo sapiens
aaaaaaaaatgcaacagataccacttgtggccctcaaagc

SEQ ID NO: 61278 - DNA, 40 bp, Homo sapiens
ctttgagggccacaagtggtatctgttgcattttttttta

SEQ ID NO: 61279 - DNA, 40 bp, Homo sapiens
taaaaaaaaatgcaacagataccacttgtggccctcaaag

SEQ ID NO: 61280 - DNA, 40 bp, Homo sapiens
tttgagggccacaagtggtatctgttgcatttttttttaa

SEQ ID NO: 61281 - DNA, 40 bp, Homo sapiens
ttaaaaaaaaatgcaacagataccacttgtggccctcaaa

SEQ ID NO: 61282 - DNA, 40 bp, Homo sapiens
ttgagggccacaagtggtatctgttgcatttttttttaat

SEQ ID NO: 61283 - DNA, 40 bp, Homo sapiens
attaaaaaaaaatgcaacagataccacttgtggccctcaa

SEQ ID NO: 61284 - DNA, 40 bp, Homo sapiens
tgagggccacaagtggtatctgttgcatttttttttaatt

SEQ ID NO: 61285 - DNA, 40 bp, Homo sapiens
aattaaaaaaaaatgcaacagataccacttgtggccctca

SEQ ID NO: 61286 - DNA, 40 bp, Homo sapiens
gagggccacaagtggtatctgttgcatttttttttaatta

SEQ ID NO: 61287 - DNA, 40 bp, Homo sapiens
taattaaaaaaaaatgcaacagataccacttgtggccctc

SEQ ID NO: 61288 - DNA, 40 bp, Homo sapiens
agggccacaagtggtatctgttgcatttttttttaattat

SEQ ID NO: 61289 - DNA, 40 bp, Homo sapiens
ataattaaaaaaaaatgcaacagataccacttgtggccct

SEQ ID NO: 61290 - DNA, 40 bp, Homo sapiens
gggccacaagtggtatctgttgcatttttttttaattatg

SEQ ID NO: 61291 - DNA, 40 bp, Homo sapiens
cataattaaaaaaaaatgcaacagataccacttgtggccc

SEQ ID NO: 61292 - DNA, 40 bp, Homo sapiens
ggccacaagtggtatctgttgcatttttttttaattatga

SEQ ID NO: 61293 - DNA, 40 bp, Homo sapiens
tcataattaaaaaaaaatgcaacagataccacttgtggcc

SEQ ID NO: 61294 - DNA, 40 bp, Homo sapiens
gccacaagtggtatctgttgcatttttttttaattatgac

SEQ ID NO: 61295 - DNA, 40 bp, Homo sapiens
gtcataattaaaaaaaaatgcaacagataccacttgtggc

SEQ ID NO: 61296 - DNA, 40 bp, Homo sapiens
ccacaagtggtatctgttgcatttttttttaattatgacc

SEQ ID NO: 61297 - DNA, 40 bp, Homo sapiens
ggtcataattaaaaaaaaatgcaacagataccacttgtgg

SEQ ID NO: 61298 - DNA, 40 bp, Homo sapiens
cacaagtggtatctgttgcatttttttttaattatgaccc

SEQ ID NO: 61299 - DNA, 40 bp, Homo sapiens
gggtcataattaaaaaaaaatgcaacagataccacttgtg

SEQ ID NO: 61300 - DNA, 40 bp, Homo sapiens
acaagtggtatctgttgcatttttttttaattatgaccct

SEQ ID NO: 61301 - DNA, 40 bp, Homo sapiens
agggtcataattaaaaaaaaatgcaacagataccacttgt

SEQ ID NO: 61302 - DNA, 40 bp, Homo sapiens
caagtggtatctgttgcatttttttttaattatgaccctt

SEQ ID NO: 61303 - DNA, 40 bp, Homo sapiens
aagggtcataattaaaaaaaaatgcaacagataccacttg

SEQ ID NO: 61304 - DNA, 40 bp, Homo sapiens
aagtggtatctgttgcatttttttttaattatgacccttt

SEQ ID NO: 61305 - DNA, 40 bp, Homo sapiens
aaagggtcataattaaaaaaaaatgcaacagataccactt

SEQ ID NO: 61306 - DNA, 40 bp, Homo sapiens
agtggtatctgttgcatttttttttaattatgacccttta

SEQ ID NO: 61307 - DNA, 40 bp, Homo sapiens
taaagggtcataattaaaaaaaaatgcaacagataccact

SEQ ID NO: 61308 - DNA, 40 bp, Homo sapiens
gtggtatctgttgcatttttttttaattatgaccctttaa

SEQ ID NO: 61309 - DNA, 40 bp, Homo sapiens
ttaaagggtcataattaaaaaaaaatgcaacagataccac

SEQ ID NO: 61310 - DNA, 40 bp, Homo sapiens
tggtatctgttgcatttttttttaattatgaccctttaaa

SEQ ID NO: 61311 - DNA, 40 bp, Homo sapiens
tttaaagggtcataattaaaaaaaaatgcaacagatacca

SEQ ID NO: 61312 - DNA, 40 bp, Homo sapiens
ggtatctgttgcatttttttttaattatgaccctttaaaa

SEQ ID NO: 61313 - DNA, 40 bp, Homo sapiens
ttttaaagggtcataattaaaaaaaaatgcaacagatacc

SEQ ID NO: 61314 - DNA, 40 bp, Homo sapiens
gtatctgttgcatttttttttaattatgaccctttaaaat

SEQ ID NO: 61315 - DNA, 40 bp, Homo sapiens
attttaaagggtcataattaaaaaaaaatgcaacagatac

SEQ ID NO: 61316 - DNA, 40 bp, Homo sapiens
tatctgttgcatttttttttaattatgaccctttaaaatg

SEQ ID NO: 61317 - DNA, 40 bp, Homo sapiens
cattttaaagggtcataattaaaaaaaaatgcaacagata

SEQ ID NO: 61318 - DNA, 40 bp, Homo sapiens
atctgttgcatttttttttaattatgaccctttaaaatgc

SEQ ID NO: 61319 - DNA, 40 bp, Homo sapiens
gcattttaaagggtcataattaaaaaaaaatgcaacagat

SEQ ID NO: 61320 - DNA, 40 bp, Homo sapiens
tctgttgcatttttttttaattatgaccctttaaaatgca

SEQ ID NO: 61321 - DNA, 40 bp, Homo sapiens
tgcattttaaagggtcataattaaaaaaaaatgcaacaga

SEQ ID NO: 61322 - DNA, 40 bp, Homo sapiens
ctgttgcatttttttttaattatgaccctttaaaatgcaa

SEQ ID NO: 61323 - DNA, 40 bp, Homo sapiens
ttgcattttaaagggtcataattaaaaaaaaatgcaacag

SEQ ID NO: 61324 - DNA, 40 bp, Homo sapiens
tgttgcatttttttttaattatgaccctttaaaatgcaaa

SEQ ID NO: 61325 - DNA, 40 bp, Homo sapiens
tttgcattttaaagggtcataattaaaaaaaaatgcaaca

SEQ ID NO: 61326 - DNA, 40 bp, Homo sapiens
gttgcatttttttttaattatgaccctttaaaatgcaaaa

SEQ ID NO: 61327 - DNA, 40 bp, Homo sapiens
ttttgcattttaaagggtcataattaaaaaaaaatgcaac

SEQ ID NO: 61328 - DNA, 40 bp, Homo sapiens
ttgcatttttttttaattatgaccctttaaaatgcaaaaa

SEQ ID NO: 61329 - DNA, 40 bp, Homo sapiens
tttttgcattttaaagggtcataattaaaaaaaaatgcaa

SEQ ID NO: 61330 - DNA, 40 bp, Homo sapiens
tgcatttttttttaattatgaccctttaaaatgcaaaaat

SEQ ID NO: 61331 - DNA, 40 bp, Homo sapiens
atttttgcattttaaagggtcataattaaaaaaaaatgca

SEQ ID NO: 61332 - DNA, 40 bp, Homo sapiens
gcatttttttttaattatgaccctttaaaatgcaaaaatc

SEQ ID NO: 61333 - DNA, 40 bp, Homo sapiens
gatttttgcattttaaagggtcataattaaaaaaaaatgc

SEQ ID NO: 61334 - DNA, 40 bp, Homo sapiens
catttttttttaattatgaccctttaaaatgcaaaaatcg

SEQ ID NO: 61335 - DNA, 40 bp, Homo sapiens
cgatttttgcattttaaagggtcataattaaaaaaaaatg

SEQ ID NO: 61336 - DNA, 40 bp, Homo sapiens
atttttttttaattatgaccctttaaaatgcaaaaatcgt

SEQ ID NO: 61337 - DNA, 40 bp, Homo sapiens
acgatttttgcattttaaagggtcataattaaaaaaaaat

SEQ ID NO: 61338 - DNA, 40 bp, Homo sapiens
tttttttttaattatgaccctttaaaatgcaaaaatcgtt

SEQ ID NO: 61339 - DNA, 40 bp, Homo sapiens
aacgatttttgcattttaaagggtcataattaaaaaaaaa

SEQ ID NO: 61340 - DNA, 40 bp, Homo sapiens
ttttttttaattatgaccctttaaaatgcaaaaatcgttg

SEQ ID NO: 61341 - DNA, 40 bp, Homo sapiens
caacgatttttgcattttaaagggtcataattaaaaaaaa

SEQ ID NO: 61342 - DNA, 40 bp, Homo sapiens
tttttttaattatgaccctttaaaatgcaaaaatcgttgt

SEQ ID NO: 61343 - DNA, 40 bp, Homo sapiens
acaacgatttttgcattttaaagggtcataattaaaaaaa

SEQ ID NO: 61344 - DNA, 40 bp, Homo sapiens
ttttttaattatgaccctttaaaatgcaaaaatcgttgtt

SEQ ID NO: 61345 - DNA, 40 bp, Homo sapiens
aacaacgatttttgcattttaaagggtcataattaaaaaa

SEQ ID NO: 61346 - DNA, 40 bp, Homo sapiens
tttttaattatgaccctttaaaatgcaaaaatcgttgtta

SEQ ID NO: 61347 - DNA, 40 bp, Homo sapiens
taacaacgatttttgcattttaaagggtcataattaaaaa

SEQ ID NO: 61348 - DNA, 40 bp, Homo sapiens
ttttaattatgaccctttaaaatgcaaaaatcgttgttag

SEQ ID NO: 61349 - DNA, 40 bp, Homo sapiens
ctaacaacgatttttgcattttaaagggtcataattaaaa

SEQ ID NO: 61350 - DNA, 40 bp, Homo sapiens
tttaattatgaccctttaaaatgcaaaaatcgttgttagc

SEQ ID NO: 61351 - DNA, 40 bp, Homo sapiens
gctaacaacgatttttgcattttaaagggtcataattaaa

SEQ ID NO: 61352 - DNA, 40 bp, Homo sapiens
ttaattatgaccctttaaaatgcaaaaatcgttgttagct

SEQ ID NO: 61353 - DNA, 40 bp, Homo sapiens
agctaacaacgatttttgcattttaaagggtcataattaa

SEQ ID NO: 61354 - DNA, 40 bp, Homo sapiens
taattatgaccctttaaaatgcaaaaatcgttgttagctt

SEQ ID NO: 61355 - DNA, 40 bp, Homo sapiens
aagctaacaacgatttttgcattttaaagggtcataatta

SEQ ID NO: 61356 - DNA, 40 bp, Homo sapiens
aattatgaccctttaaaatgcaaaaatcgttgttagcttg

SEQ ID NO: 61357 - DNA, 40 bp, Homo sapiens
caagctaacaacgatttttgcattttaaagggtcataatt

SEQ ID NO: 61358 - DNA, 40 bp, Homo sapiens
attatgaccctttaaaatgcaaaaatcgttgttagcttgt

SEQ ID NO: 61359 - DNA, 40 bp, Homo sapiens
acaagctaacaacgatttttgcattttaaagggtcataat

SEQ ID NO: 61360 - DNA, 40 bp, Homo sapiens
ttatgaccctttaaaatgcaaaaatcgttgttagcttgtg

SEQ ID NO: 61361 - DNA, 40 bp, Homo sapiens
cacaagctaacaacgatttttgcattttaaagggtcataa

SEQ ID NO: 61362 - DNA, 40 bp, Homo sapiens
tatgaccctttaaaatgcaaaaatcgttgttagcttgtgc

SEQ ID NO: 61363 - DNA, 40 bp, Homo sapiens
gcacaagctaacaacgatttttgcattttaaagggtcata

SEQ ID NO: 61364 - DNA, 40 bp, Homo sapiens
atgaccctttaaaatgcaaaaatcgttgttagcttgtgca

SEQ ID NO: 61365 - DNA, 40 bp, Homo sapiens
tgcacaagctaacaacgatttttgcattttaaagggtcat

SEQ ID NO: 61366 - DNA, 40 bp, Homo sapiens
tgaccctttaaaatgcaaaaatcgttgttagcttgtgcat

SEQ ID NO: 61367 - DNA, 40 bp, Homo sapiens
atgcacaagctaacaacgatttttgcattttaaagggtca

SEQ ID NO: 61368 - DNA, 40 bp, Homo sapiens
gaccctttaaaatgcaaaaatcgttgttagcttgtgcata

SEQ ID NO: 61369 - DNA, 40 bp, Homo sapiens
tatgcacaagctaacaacgatttttgcattttaaagggtc

SEQ ID NO: 61370 - DNA, 40 bp, Homo sapiens
accctttaaaatgcaaaaatcgttgttagcttgtgcatag

SEQ ID NO: 61371 - DNA, 40 bp, Homo sapiens
ctatgcacaagctaacaacgatttttgcattttaaagggt

SEQ ID NO: 61372 - DNA, 40 bp, Homo sapiens
ccctttaaaatgcaaaaatcgttgttagcttgtgcatagt

SEQ ID NO: 61373 - DNA, 40 bp, Homo sapiens
actatgcacaagctaacaacgatttttgcattttaaaggg

SEQ ID NO: 61374 - DNA, 40 bp, Homo sapiens
cctttaaaatgcaaaaatcgttgttagcttgtgcatagta

SEQ ID NO: 61375 - DNA, 40 bp, Homo sapiens
tactatgcacaagctaacaacgatttttgcattttaaagg

SEQ ID NO: 61376 - DNA, 40 bp, Homo sapiens
ctttaaaatgcaaaaatcgttgttagcttgtgcatagtat

SEQ ID NO: 61377 - DNA, 40 bp, Homo sapiens
atactatgcacaagctaacaacgatttttgcattttaaag

SEQ ID NO: 61378 - DNA, 40 bp, Homo sapiens
tttaaaatgcaaaaatcgttgttagcttgtgcatagtata

SEQ ID NO: 61379 - DNA, 40 bp, Homo sapiens
tatactatgcacaagctaacaacgatttttgcattttaaa

SEQ ID NO: 61380 - DNA, 40 bp, Homo sapiens
ttaaaatgcaaaaatcgttgttagcttgtgcatagtataa

SEQ ID NO: 61381 - DNA, 40 bp, Homo sapiens
ttatactatgcacaagctaacaacgatttttgcattttaa

SEQ ID NO: 61382 - DNA, 40 bp, Homo sapiens
taaaatgcaaaaatcgttgttagcttgtgcatagtataaa

SEQ ID NO: 61383 - DNA, 40 bp, Homo sapiens
tttatactatgcacaagctaacaacgatttttgcatttta

SEQ ID NO: 61384 - DNA, 40 bp, Homo sapiens
aaaatgcaaaaatcgttgttagcttgtgcatagtataaaa

SEQ ID NO: 61385 - DNA, 40 bp, Homo sapiens
ttttatactatgcacaagctaacaacgatttttgcatttt

SEQ ID NO: 61386 - DNA, 40 bp, Homo sapiens
aaatgcaaaaatcgttgttagcttgtgcatagtataaaaa

SEQ ID NO: 61387 - DNA, 40 bp, Homo sapiens
tttttatactatgcacaagctaacaacgatttttgcattt

SEQ ID NO: 61388 - DNA, 40 bp, Homo sapiens
aatgcaaaaatcgttgttagcttgtgcatagtataaaaat

SEQ ID NO: 61389 - DNA, 40 bp, Homo sapiens
atttttatactatgcacaagctaacaacgatttttgcatt

SEQ ID NO: 61390 - DNA, 40 bp, Homo sapiens
atgcaaaaatcgttgttagcttgtgcatagtataaaaata

SEQ ID NO: 61391 - DNA, 40 bp, Homo sapiens
tatttttatactatgcacaagctaacaacgatttttgcat

SEQ ID NO: 61392 - DNA, 40 bp, Homo sapiens
tgcaaaaatcgttgttagcttgtgcatagtataaaaatag

SEQ ID NO: 61393 - DNA, 40 bp, Homo sapiens
ctatttttatactatgcacaagctaacaacgatttttgca

SEQ ID NO: 61394 - DNA, 40 bp, Homo sapiens
gcaaaaatcgttgttagcttgtgcatagtataaaaatagg

SEQ ID NO: 61395 - DNA, 40 bp, Homo sapiens
cctatttttatactatgcacaagctaacaacgatttttgc

SEQ ID NO: 61396 - DNA, 40 bp, Homo sapiens
caaaaatcgttgttagcttgtgcatagtataaaaataggc

SEQ ID NO: 61397 - DNA, 40 bp, Homo sapiens
gcctatttttatactatgcacaagctaacaacgatttttg

SEQ ID NO: 61398 - DNA, 40 bp, Homo sapiens
aaaaatcgttgttagcttgtgcatagtataaaaataggct

SEQ ID NO: 61399 - DNA, 40 bp, Homo sapiens
agcctatttttatactatgcacaagctaacaacgattttt

SEQ ID NO: 61400 - DNA, 40 bp, Homo sapiens
aaaatcgttgttagcttgtgcatagtataaaaataggctg

SEQ ID NO: 61401 - DNA, 40 bp, Homo sapiens
cagcctatttttatactatgcacaagctaacaacgatttt

SEQ ID NO: 61402 - DNA, 40 bp, Homo sapiens
aaatcgttgttagcttgtgcatagtataaaaataggctgg

SEQ ID NO: 61403 - DNA, 40 bp, Homo sapiens
ccagcctatttttatactatgcacaagctaacaacgattt

SEQ ID NO: 61404 - DNA, 40 bp, Homo sapiens
aatcgttgttagcttgtgcatagtataaaaataggctggc

SEQ ID NO: 61405 - DNA, 40 bp, Homo sapiens
gccagcctatttttatactatgcacaagctaacaacgatt

SEQ ID NO: 61406 - DNA, 40 bp, Homo sapiens
atcgttgttagcttgtgcatagtataaaaataggctggcc

SEQ ID NO: 61407 - DNA, 40 bp, Homo sapiens
ggccagcctatttttatactatgcacaagctaacaacgat

SEQ ID NO: 61408 - DNA, 40 bp, Homo sapiens
tcgttgttagcttgtgcatagtataaaaataggctggccg

SEQ ID NO: 61409 - DNA, 40 bp, Homo sapiens
cggccagcctatttttatactatgcacaagctaacaacga

SEQ ID NO: 61410 - DNA, 40 bp, Homo sapiens
cgttgttagcttgtgcatagtataaaaataggctggccgc

SEQ ID NO: 61411 - DNA, 40 bp, Homo sapiens
gcggccagcctatttttatactatgcacaagctaacaacg

SEQ ID NO: 61412 - DNA, 40 bp, Homo sapiens
gttgttagcttgtgcatagtataaaaataggctggccgca

SEQ ID NO: 61413 - DNA, 40 bp, Homo sapiens
tgcggccagcctatttttatactatgcacaagctaacaac

SEQ ID NO: 61414 - DNA, 40 bp, Homo sapiens
ttgttagcttgtgcatagtataaaaataggctggccgcat

SEQ ID NO: 61415 - DNA, 40 bp, Homo sapiens
atgcggccagcctatttttatactatgcacaagctaacaa

SEQ ID NO: 61416 - DNA, 40 bp, Homo sapiens
tgttagcttgtgcatagtataaaaataggctggccgcatg

SEQ ID NO: 61417 - DNA, 40 bp, Homo sapiens
catgcggccagcctatttttatactatgcacaagctaaca

SEQ ID NO: 61418 - DNA, 40 bp, Homo sapiens
gttagcttgtgcatagtataaaaataggctggccgcatgc

SEQ ID NO: 61419 - DNA, 40 bp, Homo sapiens
gcatgcggccagcctatttttatactatgcacaagctaac

SEQ ID NO: 61420 - DNA, 40 bp, Homo sapiens
ttagcttgtgcatagtataaaaataggctggccgcatgct

SEQ ID NO: 61421 - DNA, 40 bp, Homo sapiens
agcatgcggccagcctatttttatactatgcacaagctaa

SEQ ID NO: 61422 - DNA, 40 bp, Homo sapiens
tagcttgtgcatagtataaaaataggctggccgcatgctg

SEQ ID NO: 61423 - DNA, 40 bp, Homo sapiens
cagcatgcggccagcctatttttatactatgcacaagcta

SEQ ID NO: 61424 - DNA, 40 bp, Homo sapiens
agcttgtgcatagtataaaaataggctggccgcatgctgt

SEQ ID NO: 61425 - DNA, 40 bp, Homo sapiens
acagcatgcggccagcctatttttatactatgcacaagct

SEQ ID NO: 61426 - DNA, 40 bp, Homo sapiens
gcttgtgcatagtataaaaataggctggccgcatgctgtg

SEQ ID NO: 61427 - DNA, 40 bp, Homo sapiens
cacagcatgcggccagcctatttttatactatgcacaagc

SEQ ID NO: 61428 - DNA, 40 bp, Homo sapiens
cttgtgcatagtataaaaataggctggccgcatgctgtgg

SEQ ID NO: 61429 - DNA, 40 bp, Homo sapiens
ccacagcatgcggccagcctatttttatactatgcacaag

SEQ ID NO: 61430 - DNA, 40 bp, Homo sapiens
ttgtgcatagtataaaaataggctggccgcatgctgtggc

SEQ ID NO: 61431 - DNA, 40 bp, Homo sapiens
gccacagcatgcggccagcctatttttatactatgcacaa

SEQ ID NO: 61432 - DNA, 40 bp, Homo sapiens
tgtgcatagtataaaaataggctggccgcatgctgtggct

SEQ ID NO: 61433 - DNA, 40 bp, Homo sapiens
agccacagcatgcggccagcctatttttatactatgcaca

SEQ ID NO: 61434 - DNA, 40 bp, Homo sapiens
gtgcatagtataaaaataggctggccgcatgctgtggctc

SEQ ID NO: 61435 - DNA, 40 bp, Homo sapiens
gagccacagcatgcggccagcctatttttatactatgcac

SEQ ID NO: 61436 - DNA, 40 bp, Homo sapiens
tgcatagtataaaaataggctggccgcatgctgtggctca

SEQ ID NO: 61437 - DNA, 40 bp, Homo sapiens
tgagccacagcatgcggccagcctatttttatactatgca

SEQ ID NO: 61438 - DNA, 40 bp, Homo sapiens
gcatagtataaaaataggctggccgcatgctgtggctcat

SEQ ID NO: 61439 - DNA, 40 bp, Homo sapiens
atgagccacagcatgcggccagcctatttttatactatgc

SEQ ID NO: 61440 - DNA, 40 bp, Homo sapiens
catagtataaaaataggctggccgcatgctgtggctcatg

SEQ ID NO: 61441 - DNA, 40 bp, Homo sapiens
catgagccacagcatgcggccagcctatttttatactatg

SEQ ID NO: 61442 - DNA, 40 bp, Homo sapiens
atagtataaaaataggctggccgcatgctgtggctcatgc

SEQ ID NO: 61443 - DNA, 40 bp, Homo sapiens
gcatgagccacagcatgcggccagcctatttttatactat

SEQ ID NO: 61444 - DNA, 40 bp, Homo sapiens
tagtataaaaataggctggccgcatgctgtggctcatgcc

SEQ ID NO: 61445 - DNA, 40 bp, Homo sapiens
ggcatgagccacagcatgcggccagcctatttttatacta

SEQ ID NO: 61446 - DNA, 40 bp, Homo sapiens
agtataaaaataggctggccgcatgctgtggctcatgcct

SEQ ID NO: 61447 - DNA, 40 bp, Homo sapiens
aggcatgagccacagcatgcggccagcctatttttatact

SEQ ID NO: 61448 - DNA, 40 bp, Homo sapiens
gtataaaaataggctggccgcatgctgtggctcatgcctg

SEQ ID NO: 61449 - DNA, 40 bp, Homo sapiens
caggcatgagccacagcatgcggccagcctatttttatac

SEQ ID NO: 61450 - DNA, 40 bp, Homo sapiens
tataaaaataggctggccgcatgctgtggctcatgcctgt

SEQ ID NO: 61451 - DNA, 40 bp, Homo sapiens
acaggcatgagccacagcatgcggccagcctatttttata

SEQ ID NO: 61452 - DNA, 40 bp, Homo sapiens
ataaaaataggctggccgcatgctgtggctcatgcctgta

SEQ ID NO: 61453 - DNA, 40 bp, Homo sapiens
tacaggcatgagccacagcatgcggccagcctatttttat

SEQ ID NO: 61454 - DNA, 40 bp, Homo sapiens
taaaaataggctggccgcatgctgtggctcatgcctgtaa

SEQ ID NO: 61455 - DNA, 40 bp, Homo sapiens
ttacaggcatgagccacagcatgcggccagcctattttta

SEQ ID NO: 61456 - DNA, 40 bp, Homo sapiens
aaaaataggctggccgcatgctgtggctcatgcctgtaat

SEQ ID NO: 61457 - DNA, 40 bp, Homo sapiens
attacaggcatgagccacagcatgcggccagcctattttt

SEQ ID NO: 61458 - DNA, 40 bp, Homo sapiens
aaaataggctggccgcatgctgtggctcatgcctgtaatc

SEQ ID NO: 61459 - DNA, 40 bp, Homo sapiens
gattacaggcatgagccacagcatgcggccagcctatttt

SEQ ID NO: 61460 - DNA, 40 bp, Homo sapiens
aaataggctggccgcatgctgtggctcatgcctgtaatcc

SEQ ID NO: 61461 - DNA, 40 bp, Homo sapiens
ggattacaggcatgagccacagcatgcggccagcctattt

SEQ ID NO: 61462 - DNA, 40 bp, Homo sapiens
aataggctggccgcatgctgtggctcatgcctgtaatccc

SEQ ID NO: 61463 - DNA, 40 bp, Homo sapiens
gggattacaggcatgagccacagcatgcggccagcctatt

SEQ ID NO: 61464 - DNA, 40 bp, Homo sapiens
ataggctggccgcatgctgtggctcatgcctgtaatccca

SEQ ID NO: 61465 - DNA, 40 bp, Homo sapiens
tgggattacaggcatgagccacagcatgcggccagcctat

SEQ ID NO: 61466 - DNA, 40 bp, Homo sapiens
taggctggccgcatgctgtggctcatgcctgtaatcccag

SEQ ID NO: 61467 - DNA, 40 bp, Homo sapiens
ctgggattacaggcatgagccacagcatgcggccagccta

SEQ ID NO: 61468 - DNA, 40 bp, Homo sapiens
aggctggccgcatgctgtggctcatgcctgtaatcccaga

SEQ ID NO: 61469 - DNA, 40 bp, Homo sapiens
tctgggattacaggcatgagccacagcatgcggccagcct

SEQ ID NO: 61470 - DNA, 40 bp, Homo sapiens
ggctggccgcatgctgtggctcatgcctgtaatcccagaa

SEQ ID NO: 61471 - DNA, 40 bp, Homo sapiens
ttctgggattacaggcatgagccacagcatgcggccagcc

SEQ ID NO: 61472 - DNA, 40 bp, Homo sapiens
gctggccgcatgctgtggctcatgcctgtaatcccagaaa

SEQ ID NO: 61473 - DNA, 40 bp, Homo sapiens
tttctgggattacaggcatgagccacagcatgcggccagc

SEQ ID NO: 61474 - DNA, 40 bp, Homo sapiens
ctggccgcatgctgtggctcatgcctgtaatcccagaaat

SEQ ID NO: 61475 - DNA, 40 bp, Homo sapiens
atttctgggattacaggcatgagccacagcatgcggccag

SEQ ID NO: 61476 - DNA, 40 bp, Homo sapiens
tggccgcatgctgtggctcatgcctgtaatcccagaaatg

SEQ ID NO: 61477 - DNA, 40 bp, Homo sapiens
catttctgggattacaggcatgagccacagcatgcggcca

SEQ ID NO: 61478 - DNA, 40 bp, Homo sapiens
ggccgcatgctgtggctcatgcctgtaatcccagaaatga

SEQ ID NO: 61479 - DNA, 40 bp, Homo sapiens
tcatttctgggattacaggcatgagccacagcatgcggcc

SEQ ID NO: 61480 - DNA, 40 bp, Homo sapiens
gccgcatgctgtggctcatgcctgtaatcccagaaatgag

SEQ ID NO: 61481 - DNA, 40 bp, Homo sapiens
ctcatttctgggattacaggcatgagccacagcatgcggc

SEQ ID NO: 61482 - DNA, 40 bp, Homo sapiens
ccgcatgctgtggctcatgcctgtaatcccagaaatgagg

SEQ ID NO: 61483 - DNA, 40 bp, Homo sapiens
cctcatttctgggattacaggcatgagccacagcatgcgg

SEQ ID NO: 61484 - DNA, 40 bp, Homo sapiens
cgcatgctgtggctcatgcctgtaatcccagaaatgaggt

SEQ ID NO: 61485 - DNA, 40 bp, Homo sapiens
acctcatttctgggattacaggcatgagccacagcatgcg

SEQ ID NO: 61486 - DNA, 40 bp, Homo sapiens
gcatgctgtggctcatgcctgtaatcccagaaatgaggtg

SEQ ID NO: 61487 - DNA, 40 bp, Homo sapiens
cacctcatttctgggattacaggcatgagccacagcatgc

SEQ ID NO: 61488 - DNA, 40 bp, Homo sapiens
catgctgtggctcatgcctgtaatcccagaaatgaggtgg

SEQ ID NO: 61489 - DNA, 40 bp, Homo sapiens
ccacctcatttctgggattacaggcatgagccacagcatg

SEQ ID NO: 61490 - DNA, 40 bp, Homo sapiens
atgctgtggctcatgcctgtaatcccagaaatgaggtggg

SEQ ID NO: 61491 - DNA, 40 bp, Homo sapiens
cccacctcatttctgggattacaggcatgagccacagcat

SEQ ID NO: 61492 - DNA, 40 bp, Homo sapiens
tgctgtggctcatgcctgtaatcccagaaatgaggtggga

SEQ ID NO: 61493 - DNA, 40 bp, Homo sapiens
tcccacctcatttctgggattacaggcatgagccacagca

SEQ ID NO: 61494 - DNA, 40 bp, Homo sapiens
gctgtggctcatgcctgtaatcccagaaatgaggtgggaa

SEQ ID NO: 61495 - DNA, 40 bp, Homo sapiens
ttcccacctcatttctgggattacaggcatgagccacagc

SEQ ID NO: 61496 - DNA, 40 bp, Homo sapiens
ctgtggctcatgcctgtaatcccagaaatgaggtgggaag

SEQ ID NO: 61497 - DNA, 40 bp, Homo sapiens
cttcccacctcatttctgggattacaggcatgagccacag

SEQ ID NO: 61498 - DNA, 40 bp, Homo sapiens
tgtggctcatgcctgtaatcccagaaatgaggtgggaagc

SEQ ID NO: 61499 - DNA, 40 bp, Homo sapiens
gcttcccacctcatttctgggattacaggcatgagccaca

SEQ ID NO: 61500 - DNA, 40 bp, Homo sapiens
gtggctcatgcctgtaatcccagaaatgaggtgggaagcc

SEQ ID NO: 61501 - DNA, 40 bp, Homo sapiens
ggcttcccacctcatttctgggattacaggcatgagccac

SEQ ID NO: 61502 - DNA, 40 bp, Homo sapiens
tggctcatgcctgtaatcccagaaatgaggtgggaagccg

SEQ ID NO: 61503 - DNA, 40 bp, Homo sapiens
cggcttcccacctcatttctgggattacaggcatgagcca

SEQ ID NO: 61504 - DNA, 40 bp, Homo sapiens
ggctcatgcctgtaatcccagaaatgaggtgggaagccga

SEQ ID NO: 61505 - DNA, 40 bp, Homo sapiens
tcggcttcccacctcatttctgggattacaggcatgagcc

SEQ ID NO: 61506 - DNA, 40 bp, Homo sapiens
gctcatgcctgtaatcccagaaatgaggtgggaagccgag

SEQ ID NO: 61507 - DNA, 40 bp, Homo sapiens
ctcggcttcccacctcatttctgggattacaggcatgagc

SEQ ID NO: 61508 - DNA, 40 bp, Homo sapiens
ctcatgcctgtaatcccagaaatgaggtgggaagccgagg

SEQ ID NO: 61509 - DNA, 40 bp, Homo sapiens
cctcggcttcccacctcatttctgggattacaggcatgag

SEQ ID NO: 61510 - DNA, 40 bp, Homo sapiens
tcatgcctgtaatcccagaaatgaggtgggaagccgaggt

SEQ ID NO: 61511 - DNA, 40 bp, Homo sapiens
acctcggcttcccacctcatttctgggattacaggcatga

SEQ ID NO: 61512 - DNA, 40 bp, Homo sapiens
catgcctgtaatcccagaaatgaggtgggaagccgaggtg

SEQ ID NO: 61513 - DNA, 40 bp, Homo sapiens
cacctcggcttcccacctcatttctgggattacaggcatg

SEQ ID NO: 61514 - DNA, 40 bp, Homo sapiens
atgcctgtaatcccagaaatgaggtgggaagccgaggtgg

SEQ ID NO: 61515 - DNA, 40 bp, Homo sapiens
ccacctcggcttcccacctcatttctgggattacaggcat

SEQ ID NO: 61516 - DNA, 40 bp, Homo sapiens
tgcctgtaatcccagaaatgaggtgggaagccgaggtggg

SEQ ID NO: 61517 - DNA, 40 bp, Homo sapiens
cccacctcggcttcccacctcatttctgggattacaggca

SEQ ID NO: 61518 - DNA, 40 bp, Homo sapiens
gcctgtaatcccagaaatgaggtgggaagccgaggtgggc

SEQ ID NO: 61519 - DNA, 40 bp, Homo sapiens
gcccacctcggcttcccacctcatttctgggattacaggc

SEQ ID NO: 61520 - DNA, 40 bp, Homo sapiens
cctgtaatcccagaaatgaggtgggaagccgaggtgggca

SEQ ID NO: 61521 - DNA, 40 bp, Homo sapiens
tgcccacctcggcttcccacctcatttctgggattacagg

SEQ ID NO: 61522 - DNA, 40 bp, Homo sapiens
ctgtaatcccagaaatgaggtgggaagccgaggtgggcac

SEQ ID NO: 61523 - DNA, 40 bp, Homo sapiens
gtgcccacctcggcttcccacctcatttctgggattacag

SEQ ID NO: 61524 - DNA, 40 bp, Homo sapiens
tgtaatcccagaaatgaggtgggaagccgaggtgggcaca

SEQ ID NO: 61525 - DNA, 40 bp, Homo sapiens
tgtgcccacctcggcttcccacctcatttctgggattaca

SEQ ID NO: 61526 - DNA, 40 bp, Homo sapiens
gtaatcccagaaatgaggtgggaagccgaggtgggcacac

SEQ ID NO: 61527 - DNA, 40 bp, Homo sapiens
gtgtgcccacctcggcttcccacctcatttctgggattac

SEQ ID NO: 61528 - DNA, 40 bp, Homo sapiens
taatcccagaaatgaggtgggaagccgaggtgggcacacc

SEQ ID NO: 61529 - DNA, 40 bp, Homo sapiens
ggtgtgcccacctcggcttcccacctcatttctgggatta

SEQ ID NO: 61530 - DNA, 40 bp, Homo sapiens
aatcccagaaatgaggtgggaagccgaggtgggcacacca

SEQ ID NO: 61531 - DNA, 40 bp, Homo sapiens
tggtgtgcccacctcggcttcccacctcatttctgggatt

SEQ ID NO: 61532 - DNA, 40 bp, Homo sapiens
atcccagaaatgaggtgggaagccgaggtgggcacaccac

SEQ ID NO: 61533 - DNA, 40 bp, Homo sapiens
gtggtgtgcccacctcggcttcccacctcatttctgggat

SEQ ID NO: 61534 - DNA, 40 bp, Homo sapiens
tcccagaaatgaggtgggaagccgaggtgggcacaccacc

SEQ ID NO: 61535 - DNA, 40 bp, Homo sapiens
ggtggtgtgcccacctcggcttcccacctcatttctggga

SEQ ID NO: 61536 - DNA, 40 bp, Homo sapiens
cccagaaatgaggtgggaagccgaggtgggcacaccacct

SEQ ID NO: 61537 - DNA, 40 bp, Homo sapiens
aggtggtgtgcccacctcggcttcccacctcatttctggg

SEQ ID NO: 61538 - DNA, 40 bp, Homo sapiens
ccagaaatgaggtgggaagccgaggtgggcacaccacctg

SEQ ID NO: 61539 - DNA, 40 bp, Homo sapiens
caggtggtgtgcccacctcggcttcccacctcatttctgg

SEQ ID NO: 61540 - DNA, 40 bp, Homo sapiens
cagaaatgaggtgggaagccgaggtgggcacaccacctga

SEQ ID NO: 61541 - DNA, 40 bp, Homo sapiens
tcaggtggtgtgcccacctcggcttcccacctcatttctg

SEQ ID NO: 61542 - DNA, 40 bp, Homo sapiens
agaaatgaggtgggaagccgaggtgggcacaccacctgag

SEQ ID NO: 61543 - DNA, 40 bp, Homo sapiens
ctcaggtggtgtgcccacctcggcttcccacctcatttct

SEQ ID NO: 61544 - DNA, 40 bp, Homo sapiens
gaaatgaggtgggaagccgaggtgggcacaccacctgagg

SEQ ID NO: 61545 - DNA, 40 bp, Homo sapiens
cctcaggtggtgtgcccacctcggcttcccacctcatttc

SEQ ID NO: 61546 - DNA, 40 bp, Homo sapiens
aaatgaggtgggaagccgaggtgggcacaccacctgaggt

SEQ ID NO: 61547 - DNA, 40 bp, Homo sapiens
acctcaggtggtgtgcccacctcggcttcccacctcattt

SEQ ID NO: 61548 - DNA, 40 bp, Homo sapiens
aatgaggtgggaagccgaggtgggcacaccacctgaggtc

SEQ ID NO: 61549 - DNA, 40 bp, Homo sapiens
gacctcaggtggtgtgcccacctcggcttcccacctcatt

SEQ ID NO: 61550 - DNA, 40 bp, Homo sapiens
atgaggtgggaagccgaggtgggcacaccacctgaggtca

SEQ ID NO: 61551 - DNA, 40 bp, Homo sapiens
tgacctcaggtggtgtgcccacctcggcttcccacctcat

SEQ ID NO: 61552 - DNA, 40 bp, Homo sapiens
tgaggtgggaagccgaggtgggcacaccacctgaggtcag

SEQ ID NO: 61553 - DNA, 40 bp, Homo sapiens
ctgacctcaggtggtgtgcccacctcggcttcccacctca

SEQ ID NO: 61554 - DNA, 40 bp, Homo sapiens
gaggtgggaagccgaggtgggcacaccacctgaggtcagg

SEQ ID NO: 61555 - DNA, 40 bp, Homo sapiens
cctgacctcaggtggtgtgcccacctcggcttcccacctc

SEQ ID NO: 61556 - DNA, 40 bp, Homo sapiens
aggtgggaagccgaggtgggcacaccacctgaggtcagga

SEQ ID NO: 61557 - DNA, 40 bp, Homo sapiens
tcctgacctcaggtggtgtgcccacctcggcttcccacct

SEQ ID NO: 61558 - DNA, 40 bp, Homo sapiens
ggtgggaagccgaggtgggcacaccacctgaggtcaggag

SEQ ID NO: 61559 - DNA, 40 bp, Homo sapiens
ctcctgacctcaggtggtgtgcccacctcggcttcccacc

SEQ ID NO: 61560 - DNA, 40 bp, Homo sapiens
gtgggaagccgaggtgggcacaccacctgaggtcaggagt

SEQ ID NO: 61561 - DNA, 40 bp, Homo sapiens
actcctgacctcaggtggtgtgcccacctcggcttcccac

SEQ ID NO: 61562 - DNA, 40 bp, Homo sapiens
tgggaagccgaggtgggcacaccacctgaggtcaggagtt

SEQ ID NO: 61563 - DNA, 40 bp, Homo sapiens
aactcctgacctcaggtggtgtgcccacctcggcttccca

SEQ ID NO: 61564 - DNA, 40 bp, Homo sapiens
gggaagccgaggtgggcacaccacctgaggtcaggagttc

SEQ ID NO: 61565 - DNA, 40 bp, Homo sapiens
gaactcctgacctcaggtggtgtgcccacctcggcttccc

SEQ ID NO: 61566 - DNA, 40 bp, Homo sapiens
ggaagccgaggtgggcacaccacctgaggtcaggagttcg

SEQ ID NO: 61567 - DNA, 40 bp, Homo sapiens
cgaactcctgacctcaggtggtgtgcccacctcggcttcc

SEQ ID NO: 61568 - DNA, 40 bp, Homo sapiens
gaagccgaggtgggcacaccacctgaggtcaggagttcga

SEQ ID NO: 61569 - DNA, 40 bp, Homo sapiens
tcgaactcctgacctcaggtggtgtgcccacctcggcttc

SEQ ID NO: 61570 - DNA, 40 bp, Homo sapiens
aagccgaggtgggcacaccacctgaggtcaggagttcgag

SEQ ID NO: 61571 - DNA, 40 bp, Homo sapiens
ctcgaactcctgacctcaggtggtgtgcccacctcggctt

SEQ ID NO: 61572 - DNA, 40 bp, Homo sapiens
agccgaggtgggcacaccacctgaggtcaggagttcgagg

SEQ ID NO: 61573 - DNA, 40 bp, Homo sapiens
cctcgaactcctgacctcaggtggtgtgcccacctcggct

SEQ ID NO: 61574 - DNA, 40 bp, Homo sapiens
gccgaggtgggcacaccacctgaggtcaggagttcgaggc

SEQ ID NO: 61575 - DNA, 40 bp, Homo sapiens
gcctcgaactcctgacctcaggtggtgtgcccacctcggc

SEQ ID NO: 61576 - DNA, 40 bp, Homo sapiens
ccgaggtgggcacaccacctgaggtcaggagttcgaggcc

SEQ ID NO: 61577 - DNA, 40 bp, Homo sapiens
ggcctcgaactcctgacctcaggtggtgtgcccacctcgg

SEQ ID NO: 61578 - DNA, 40 bp, Homo sapiens
cgaggtgggcacaccacctgaggtcaggagttcgaggcca

SEQ ID NO: 61579 - DNA, 40 bp, Homo sapiens
tggcctcgaactcctgacctcaggtggtgtgcccacctcg

SEQ ID NO: 61580 - DNA, 40 bp, Homo sapiens
gaggtgggcacaccacctgaggtcaggagttcgaggccag

SEQ ID NO: 61581 - DNA, 40 bp, Homo sapiens
ctggcctcgaactcctgacctcaggtggtgtgcccacctc

SEQ ID NO: 61582 - DNA, 40 bp, Homo sapiens
aggtgggcacaccacctgaggtcaggagttcgaggccagc

SEQ ID NO: 61583 - DNA, 40 bp, Homo sapiens
gctggcctcgaactcctgacctcaggtggtgtgcccacct

SEQ ID NO: 61584 - DNA, 40 bp, Homo sapiens
ggtgggcacaccacctgaggtcaggagttcgaggccagcc

SEQ ID NO: 61585 - DNA, 40 bp, Homo sapiens
ggctggcctcgaactcctgacctcaggtggtgtgcccacc

SEQ ID NO: 61586 - DNA, 40 bp, Homo sapiens
gtgggcacaccacctgaggtcaggagttcgaggccagcct

SEQ ID NO: 61587 - DNA, 40 bp, Homo sapiens
aggctggcctcgaactcctgacctcaggtggtgtgcccac

SEQ ID NO: 61588 - DNA, 40 bp, Homo sapiens
tgggcacaccacctgaggtcaggagttcgaggccagcctg

SEQ ID NO: 61589 - DNA, 40 bp, Homo sapiens
caggctggcctcgaactcctgacctcaggtggtgtgccca

SEQ ID NO: 61590 - DNA, 40 bp, Homo sapiens
gggcacaccacctgaggtcaggagttcgaggccagcctgg

SEQ ID NO: 61591 - DNA, 40 bp, Homo sapiens
ccaggctggcctcgaactcctgacctcaggtggtgtgccc

SEQ ID NO: 61592 - DNA, 40 bp, Homo sapiens
ggcacaccacctgaggtcaggagttcgaggccagcctggc

SEQ ID NO: 61593 - DNA, 40 bp, Homo sapiens
gccaggctggcctcgaactcctgacctcaggtggtgtgcc

SEQ ID NO: 61594 - DNA, 40 bp, Homo sapiens
gcacaccacctgaggtcaggagttcgaggccagcctggcc

SEQ ID NO: 61595 - DNA, 40 bp, Homo sapiens
ggccaggctggcctcgaactcctgacctcaggtggtgtgc

SEQ ID NO: 61596 - DNA, 40 bp, Homo sapiens
cacaccacctgaggtcaggagttcgaggccagcctggcca

SEQ ID NO: 61597 - DNA, 40 bp, Homo sapiens
tggccaggctggcctcgaactcctgacctcaggtggtgtg

SEQ ID NO: 61598 - DNA, 40 bp, Homo sapiens
acaccacctgaggtcaggagttcgaggccagcctggccaa

SEQ ID NO: 61599 - DNA, 40 bp, Homo sapiens
ttggccaggctggcctcgaactcctgacctcaggtggtgt

SEQ ID NO: 61600 - DNA, 40 bp, Homo sapiens
caccacctgaggtcaggagttcgaggccagcctggccaac

SEQ ID NO: 61601 - DNA, 40 bp, Homo sapiens
gttggccaggctggcctcgaactcctgacctcaggtggtg

SEQ ID NO: 61602 - DNA, 40 bp, Homo sapiens
accacctgaggtcaggagttcgaggccagcctggccaacg

SEQ ID NO: 61603 - DNA, 40 bp, Homo sapiens
cgttggccaggctggcctcgaactcctgacctcaggtggt

SEQ ID NO: 61604 - DNA, 40 bp, Homo sapiens
ccacctgaggtcaggagttcgaggccagcctggccaacgt

SEQ ID NO: 61605 - DNA, 40 bp, Homo sapiens
acgttggccaggctggcctcgaactcctgacctcaggtgg

SEQ ID NO: 61606 - DNA, 40 bp, Homo sapiens
cacctgaggtcaggagttcgaggccagcctggccaacgtg

SEQ ID NO: 61607 - DNA, 40 bp, Homo sapiens
cacgttggccaggctggcctcgaactcctgacctcaggtg

SEQ ID NO: 61608 - DNA, 40 bp, Homo sapiens
acctgaggtcaggagttcgaggccagcctggccaacgtgg

SEQ ID NO: 61609 - DNA, 40 bp, Homo sapiens
ccacgttggccaggctggcctcgaactcctgacctcaggt

SEQ ID NO: 61610 - DNA, 40 bp, Homo sapiens
cctgaggtcaggagttcgaggccagcctggccaacgtggt

SEQ ID NO: 61611 - DNA, 40 bp, Homo sapiens
accacgttggccaggctggcctcgaactcctgacctcagg

SEQ ID NO: 61612 - DNA, 40 bp, Homo sapiens
ctgaggtcaggagttcgaggccagcctggccaacgtggtt

SEQ ID NO: 61613 - DNA, 40 bp, Homo sapiens
aaccacgttggccaggctggcctcgaactcctgacctcag

SEQ ID NO: 61614 - DNA, 40 bp, Homo sapiens
tgaggtcaggagttcgaggccagcctggccaacgtggttg

SEQ ID NO: 61615 - DNA, 40 bp, Homo sapiens
caaccacgttggccaggctggcctcgaactcctgacctca

SEQ ID NO: 61616 - DNA, 40 bp, Homo sapiens
gaggtcaggagttcgaggccagcctggccaacgtggttga

SEQ ID NO: 61617 - DNA, 40 bp, Homo sapiens
tcaaccacgttggccaggctggcctcgaactcctgacctc

SEQ ID NO: 61618 - DNA, 40 bp, Homo sapiens
aggtcaggagttcgaggccagcctggccaacgtggttgaa

SEQ ID NO: 61619 - DNA, 40 bp, Homo sapiens
ttcaaccacgttggccaggctggcctcgaactcctgacct

SEQ ID NO: 61620 - DNA, 40 bp, Homo sapiens
ggtcaggagttcgaggccagcctggccaacgtggttgaaa

SEQ ID NO: 61621 - DNA, 40 bp, Homo sapiens
tttcaaccacgttggccaggctggcctcgaactcctgacc

SEQ ID NO: 61622 - DNA, 40 bp, Homo sapiens
gtcaggagttcgaggccagcctggccaacgtggttgaaac

SEQ ID NO: 61623 - DNA, 40 bp, Homo sapiens
gtttcaaccacgttggccaggctggcctcgaactcctgac

SEQ ID NO: 61624 - DNA, 40 bp, Homo sapiens
tcaggagttcgaggccagcctggccaacgtggttgaaacc

SEQ ID NO: 61625 - DNA, 40 bp, Homo sapiens
ggtttcaaccacgttggccaggctggcctcgaactcctga

SEQ ID NO: 61626 - DNA, 40 bp, Homo sapiens
caggagttcgaggccagcctggccaacgtggttgaaaccc

SEQ ID NO: 61627 - DNA, 40 bp, Homo sapiens
gggtttcaaccacgttggccaggctggcctcgaactcctg

SEQ ID NO: 61628 - DNA, 40 bp, Homo sapiens
aggagttcgaggccagcctggccaacgtggttgaaacccc

SEQ ID NO: 61629 - DNA, 40 bp, Homo sapiens
ggggtttcaaccacgttggccaggctggcctcgaactcct

SEQ ID NO: 61630 - DNA, 40 bp, Homo sapiens
ggagttcgaggccagcctggccaacgtggttgaaaccccg

SEQ ID NO: 61631 - DNA, 40 bp, Homo sapiens
cggggtttcaaccacgttggccaggctggcctcgaactcc

SEQ ID NO: 61632 - DNA, 40 bp, Homo sapiens
gagttcgaggccagcctggccaacgtggttgaaaccccgt

SEQ ID NO: 61633 - DNA, 40 bp, Homo sapiens
acggggtttcaaccacgttggccaggctggcctcgaactc

SEQ ID NO: 61634 - DNA, 40 bp, Homo sapiens
agttcgaggccagcctggccaacgtggttgaaaccccgtc

SEQ ID NO: 61635 - DNA, 40 bp, Homo sapiens
gacggggtttcaaccacgttggccaggctggcctcgaact

SEQ ID NO: 61636 - DNA, 40 bp, Homo sapiens
gttcgaggccagcctggccaacgtggttgaaaccccgtct

SEQ ID NO: 61637 - DNA, 40 bp, Homo sapiens
agacggggtttcaaccacgttggccaggctggcctcgaac

SEQ ID NO: 61638 - DNA, 40 bp, Homo sapiens
ttcgaggccagcctggccaacgtggttgaaaccccgtctc

SEQ ID NO: 61639 - DNA, 40 bp, Homo sapiens
gagacggggtttcaaccacgttggccaggctggcctcgaa

SEQ ID NO: 61640 - DNA, 40 bp, Homo sapiens
tcgaggccagcctggccaacgtggttgaaaccccgtctct

SEQ ID NO: 61641 - DNA, 40 bp, Homo sapiens
agagacggggtttcaaccacgttggccaggctggcctcga

SEQ ID NO: 61642 - DNA, 40 bp, Homo sapiens
cgaggccagcctggccaacgtggttgaaaccccgtctcta

SEQ ID NO: 61643 - DNA, 40 bp, Homo sapiens
tagagacggggtttcaaccacgttggccaggctggcctcg

SEQ ID NO: 61644 - DNA, 40 bp, Homo sapiens
gaggccagcctggccaacgtggttgaaaccccgtctctac

SEQ ID NO: 61645 - DNA, 40 bp, Homo sapiens
gtagagacggggtttcaaccacgttggccaggctggcctc

SEQ ID NO: 61646 - DNA, 40 bp, Homo sapiens
aggccagcctggccaacgtggttgaaaccccgtctctact

SEQ ID NO: 61647 - DNA, 40 bp, Homo sapiens
agtagagacggggtttcaaccacgttggccaggctggcct

SEQ ID NO: 61648 - DNA, 40 bp, Homo sapiens
ggccagcctggccaacgtggttgaaaccccgtctctacta

SEQ ID NO: 61649 - DNA, 40 bp, Homo sapiens
tagtagagacggggtttcaaccacgttggccaggctggcc

SEQ ID NO: 61650 - DNA, 40 bp, Homo sapiens
gccagcctggccaacgtggttgaaaccccgtctctactaa

SEQ ID NO: 61651 - DNA, 40 bp, Homo sapiens
ttagtagagacggggtttcaaccacgttggccaggctggc

SEQ ID NO: 61652 - DNA, 40 bp, Homo sapiens
ccagcctggccaacgtggttgaaaccccgtctctactaaa

SEQ ID NO: 61653 - DNA, 40 bp, Homo sapiens
tttagtagagacggggtttcaaccacgttggccaggctgg

SEQ ID NO: 61654 - DNA, 40 bp, Homo sapiens
cagcctggccaacgtggttgaaaccccgtctctactaaaa

SEQ ID NO: 61655 - DNA, 40 bp, Homo sapiens
ttttagtagagacggggtttcaaccacgttggccaggctg

SEQ ID NO: 61656 - DNA, 40 bp, Homo sapiens
agcctggccaacgtggttgaaaccccgtctctactaaaaa

SEQ ID NO: 61657 - DNA, 40 bp, Homo sapiens
tttttagtagagacggggtttcaaccacgttggccaggct

SEQ ID NO: 61658 - DNA, 40 bp, Homo sapiens
gcctggccaacgtggttgaaaccccgtctctactaaaaat

SEQ ID NO: 61659 - DNA, 40 bp, Homo sapiens
atttttagtagagacggggtttcaaccacgttggccaggc

SEQ ID NO: 61660 - DNA, 40 bp, Homo sapiens
cctggccaacgtggttgaaaccccgtctctactaaaaata

SEQ ID NO: 61661 - DNA, 40 bp, Homo sapiens
tatttttagtagagacggggtttcaaccacgttggccagg

SEQ ID NO: 61662 - DNA, 40 bp, Homo sapiens
ctggccaacgtggttgaaaccccgtctctactaaaaatac

SEQ ID NO: 61663 - DNA, 40 bp, Homo sapiens
gtatttttagtagagacggggtttcaaccacgttggccag

SEQ ID NO: 61664 - DNA, 40 bp, Homo sapiens
tggccaacgtggttgaaaccccgtctctactaaaaataca

SEQ ID NO: 61665 - DNA, 40 bp, Homo sapiens
tgtatttttagtagagacggggtttcaaccacgttggcca

SEQ ID NO: 61666 - DNA, 40 bp, Homo sapiens
ggccaacgtggttgaaaccccgtctctactaaaaatacaa

SEQ ID NO: 61667 - DNA, 40 bp, Homo sapiens
ttgtatttttagtagagacggggtttcaaccacgttggcc

SEQ ID NO: 61668 - DNA, 40 bp, Homo sapiens
gccaacgtggttgaaaccccgtctctactaaaaatacaaa

SEQ ID NO: 61669 - DNA, 40 bp, Homo sapiens
tttgtatttttagtagagacggggtttcaaccacgttggc

SEQ ID NO: 61670 - DNA, 40 bp, Homo sapiens
ccaacgtggttgaaaccccgtctctactaaaaatacaaaa

SEQ ID NO: 61671 - DNA, 40 bp, Homo sapiens
ttttgtatttttagtagagacggggtttcaaccacgttgg

SEQ ID NO: 61672 - DNA, 40 bp, Homo sapiens
caacgtggttgaaaccccgtctctactaaaaatacaaaac

SEQ ID NO: 61673 - DNA, 40 bp, Homo sapiens
gttttgtatttttagtagagacggggtttcaaccacgttg

SEQ ID NO: 61674 - DNA, 40 bp, Homo sapiens
aacgtggttgaaaccccgtctctactaaaaatacaaaact

SEQ ID NO: 61675 - DNA, 40 bp, Homo sapiens
agttttgtatttttagtagagacggggtttcaaccacgtt

SEQ ID NO: 61676 - DNA, 40 bp, Homo sapiens
acgtggttgaaaccccgtctctactaaaaatacaaaactt

SEQ ID NO: 61677 - DNA, 40 bp, Homo sapiens
aagttttgtatttttagtagagacggggtttcaaccacgt

SEQ ID NO: 61678 - DNA, 40 bp, Homo sapiens
cgtggttgaaaccccgtctctactaaaaatacaaaactta

SEQ ID NO: 61679 - DNA, 40 bp, Homo sapiens
taagttttgtatttttagtagagacggggtttcaaccacg

SEQ ID NO: 61680 - DNA, 40 bp, Homo sapiens
gtggttgaaaccccgtctctactaaaaatacaaaacttag

SEQ ID NO: 61681 - DNA, 40 bp, Homo sapiens
ctaagttttgtatttttagtagagacggggtttcaaccac

SEQ ID NO: 61682 - DNA, 40 bp, Homo sapiens
tggttgaaaccccgtctctactaaaaatacaaaacttagc

SEQ ID NO: 61683 - DNA, 40 bp, Homo sapiens
gctaagttttgtatttttagtagagacggggtttcaacca

SEQ ID NO: 61684 - DNA, 40 bp, Homo sapiens
ggttgaaaccccgtctctactaaaaatacaaaacttagcc

SEQ ID NO: 61685 - DNA, 40 bp, Homo sapiens
ggctaagttttgtatttttagtagagacggggtttcaacc

SEQ ID NO: 61686 - DNA, 40 bp, Homo sapiens
gttgaaaccccgtctctactaaaaatacaaaacttagcca

SEQ ID NO: 61687 - DNA, 40 bp, Homo sapiens
tggctaagttttgtatttttagtagagacggggtttcaac

SEQ ID NO: 61688 - DNA, 40 bp, Homo sapiens
ttgaaaccccgtctctactaaaaatacaaaacttagccag

SEQ ID NO: 61689 - DNA, 40 bp, Homo sapiens
ctggctaagttttgtatttttagtagagacggggtttcaa

SEQ ID NO: 61690 - DNA, 40 bp, Homo sapiens
tgaaaccccgtctctactaaaaatacaaaacttagccagg

SEQ ID NO: 61691 - DNA, 40 bp, Homo sapiens
cctggctaagttttgtatttttagtagagacggggtttca

SEQ ID NO: 61692 - DNA, 40 bp, Homo sapiens
gaaaccccgtctctactaaaaatacaaaacttagccaggc

SEQ ID NO: 61693 - DNA, 40 bp, Homo sapiens
gcctggctaagttttgtatttttagtagagacggggtttc

SEQ ID NO: 61694 - DNA, 40 bp, Homo sapiens
aaaccccgtctctactaaaaatacaaaacttagccaggcg

SEQ ID NO: 61695 - DNA, 40 bp, Homo sapiens
cgcctggctaagttttgtatttttagtagagacggggttt

SEQ ID NO: 61696 - DNA, 40 bp, Homo sapiens
aaccccgtctctactaaaaatacaaaacttagccaggcgt

SEQ ID NO: 61697 - DNA, 40 bp, Homo sapiens
acgcctggctaagttttgtatttttagtagagacggggtt

SEQ ID NO: 61698 - DNA, 40 bp, Homo sapiens
accccgtctctactaaaaatacaaaacttagccaggcgtg

SEQ ID NO: 61699 - DNA, 40 bp, Homo sapiens
cacgcctggctaagttttgtatttttagtagagacggggt

SEQ ID NO: 61700 - DNA, 40 bp, Homo sapiens
ccccgtctctactaaaaatacaaaacttagccaggcgtgg

SEQ ID NO: 61701 - DNA, 40 bp, Homo sapiens
ccacgcctggctaagttttgtatttttagtagagacgggg

SEQ ID NO: 61702 - DNA, 40 bp, Homo sapiens
cccgtctctactaaaaatacaaaacttagccaggcgtggt

SEQ ID NO: 61703 - DNA, 40 bp, Homo sapiens
accacgcctggctaagttttgtatttttagtagagacggg

SEQ ID NO: 61704 - DNA, 40 bp, Homo sapiens
ccgtctctactaaaaatacaaaacttagccaggcgtggtg

SEQ ID NO: 61705 - DNA, 40 bp, Homo sapiens
caccacgcctggctaagttttgtatttttagtagagacgg

SEQ ID NO: 61706 - DNA, 40 bp, Homo sapiens
cgtctctactaaaaatacaaaacttagccaggcgtggtgg

SEQ ID NO: 61707 - DNA, 40 bp, Homo sapiens
ccaccacgcctggctaagttttgtatttttagtagagacg

SEQ ID NO: 61708 - DNA, 40 bp, Homo sapiens
gtctctactaaaaatacaaaacttagccaggcgtggtggc

SEQ ID NO: 61709 - DNA, 40 bp, Homo sapiens
gccaccacgcctggctaagttttgtatttttagtagagac

SEQ ID NO: 61710 - DNA, 40 bp, Homo sapiens
tctctactaaaaatacaaaacttagccaggcgtggtggcg

SEQ ID NO: 61711 - DNA, 40 bp, Homo sapiens
cgccaccacgcctggctaagttttgtatttttagtagaga

SEQ ID NO: 61712 - DNA, 40 bp, Homo sapiens
ctctactaaaaatacaaaacttagccaggcgtggtggcgg

SEQ ID NO: 61713 - DNA, 40 bp, Homo sapiens
ccgccaccacgcctggctaagttttgtatttttagtagag

SEQ ID NO: 61714 - DNA, 40 bp, Homo sapiens
tctactaaaaatacaaaacttagccaggcgtggtggcggg

SEQ ID NO: 61715 - DNA, 40 bp, Homo sapiens
cccgccaccacgcctggctaagttttgtatttttagtaga

SEQ ID NO: 61716 - DNA, 40 bp, Homo sapiens
ctactaaaaatacaaaacttagccaggcgtggtggcgggt

SEQ ID NO: 61717 - DNA, 40 bp, Homo sapiens
acccgccaccacgcctggctaagttttgtatttttagtag

SEQ ID NO: 61718 - DNA, 40 bp, Homo sapiens
tactaaaaatacaaaacttagccaggcgtggtggcgggtg

SEQ ID NO: 61719 - DNA, 40 bp, Homo sapiens
cacccgccaccacgcctggctaagttttgtatttttagta

SEQ ID NO: 61720 - DNA, 40 bp, Homo sapiens
actaaaaatacaaaacttagccaggcgtggtggcgggtgc

SEQ ID NO: 61721 - DNA, 40 bp, Homo sapiens
gcacccgccaccacgcctggctaagttttgtatttttagt

SEQ ID NO: 61722 - DNA, 40 bp, Homo sapiens
ctaaaaatacaaaacttagccaggcgtggtggcgggtgcc

SEQ ID NO: 61723 - DNA, 40 bp, Homo sapiens
ggcacccgccaccacgcctggctaagttttgtatttttag

SEQ ID NO: 61724 - DNA, 40 bp, Homo sapiens
taaaaatacaaaacttagccaggcgtggtggcgggtgcct

SEQ ID NO: 61725 - DNA, 40 bp, Homo sapiens
aggcacccgccaccacgcctggctaagttttgtattttta

SEQ ID NO: 61726 - DNA, 40 bp, Homo sapiens
aaaaatacaaaacttagccaggcgtggtggcgggtgcctg

SEQ ID NO: 61727 - DNA, 40 bp, Homo sapiens
caggcacccgccaccacgcctggctaagttttgtattttt

SEQ ID NO: 61728 - DNA, 40 bp, Homo sapiens
aaaatacaaaacttagccaggcgtggtggcgggtgcctgt

SEQ ID NO: 61729 - DNA, 40 bp, Homo sapiens
acaggcacccgccaccacgcctggctaagttttgtatttt

SEQ ID NO: 61730 - DNA, 40 bp, Homo sapiens
aaatacaaaacttagccaggcgtggtggcgggtgcctgtt

SEQ ID NO: 61731 - DNA, 40 bp, Homo sapiens
aacaggcacccgccaccacgcctggctaagttttgtattt

SEQ ID NO: 61732 - DNA, 40 bp, Homo sapiens
aatacaaaacttagccaggcgtggtggcgggtgcctgtta

SEQ ID NO: 61733 - DNA, 40 bp, Homo sapiens
taacaggcacccgccaccacgcctggctaagttttgtatt

SEQ ID NO: 61734 - DNA, 40 bp, Homo sapiens
atacaaaacttagccaggcgtggtggcgggtgcctgttat

SEQ ID NO: 61735 - DNA, 40 bp, Homo sapiens
ataacaggcacccgccaccacgcctggctaagttttgtat

SEQ ID NO: 61736 - DNA, 40 bp, Homo sapiens
tacaaaacttagccaggcgtggtggcgggtgcctgttatc

SEQ ID NO: 61737 - DNA, 40 bp, Homo sapiens
gataacaggcacccgccaccacgcctggctaagttttgta

SEQ ID NO: 61738 - DNA, 40 bp, Homo sapiens
acaaaacttagccaggcgtggtggcgggtgcctgttatcc

SEQ ID NO: 61739 - DNA, 40 bp, Homo sapiens
ggataacaggcacccgccaccacgcctggctaagttttgt

SEQ ID NO: 61740 - DNA, 40 bp, Homo sapiens
caaaacttagccaggcgtggtggcgggtgcctgttatcct

SEQ ID NO: 61741 - DNA, 40 bp, Homo sapiens
aggataacaggcacccgccaccacgcctggctaagttttg

SEQ ID NO: 61742 - DNA, 40 bp, Homo sapiens
aaaacttagccaggcgtggtggcgggtgcctgttatcctg

SEQ ID NO: 61743 - DNA, 40 bp, Homo sapiens
caggataacaggcacccgccaccacgcctggctaagtttt

SEQ ID NO: 61744 - DNA, 40 bp, Homo sapiens
aaacttagccaggcgtggtggcgggtgcctgttatcctgg

SEQ ID NO: 61745 - DNA, 40 bp, Homo sapiens
ccaggataacaggcacccgccaccacgcctggctaagttt

SEQ ID NO: 61746 - DNA, 40 bp, Homo sapiens
aacttagccaggcgtggtggcgggtgcctgttatcctggc

SEQ ID NO: 61747 - DNA, 40 bp, Homo sapiens
gccaggataacaggcacccgccaccacgcctggctaagtt

SEQ ID NO: 61748 - DNA, 40 bp, Homo sapiens
acttagccaggcgtggtggcgggtgcctgttatcctggct

SEQ ID NO: 61749 - DNA, 40 bp, Homo sapiens
agccaggataacaggcacccgccaccacgcctggctaagt

SEQ ID NO: 61750 - DNA, 40 bp, Homo sapiens
cttagccaggcgtggtggcgggtgcctgttatcctggcta

SEQ ID NO: 61751 - DNA, 40 bp, Homo sapiens
tagccaggataacaggcacccgccaccacgcctggctaag

SEQ ID NO: 61752 - DNA, 40 bp, Homo sapiens
ttagccaggcgtggtggcgggtgcctgttatcctggctac

SEQ ID NO: 61753 - DNA, 40 bp, Homo sapiens
gtagccaggataacaggcacccgccaccacgcctggctaa

SEQ ID NO: 61754 - DNA, 40 bp, Homo sapiens
tagccaggcgtggtggcgggtgcctgttatcctggctact

SEQ ID NO: 61755 - DNA, 40 bp, Homo sapiens
agtagccaggataacaggcacccgccaccacgcctggcta

SEQ ID NO: 61756 - DNA, 40 bp, Homo sapiens
agccaggcgtggtggcgggtgcctgttatcctggctactc

SEQ ID NO: 61757 - DNA, 40 bp, Homo sapiens
gagtagccaggataacaggcacccgccaccacgcctggct

SEQ ID NO: 61758 - DNA, 40 bp, Homo sapiens
gccaggcgtggtggcgggtgcctgttatcctggctactca

SEQ ID NO: 61759 - DNA, 40 bp, Homo sapiens
tgagtagccaggataacaggcacccgccaccacgcctggc

SEQ ID NO: 61760 - DNA, 40 bp, Homo sapiens
ccaggcgtggtggcgggtgcctgttatcctggctactcaa

SEQ ID NO: 61761 - DNA, 40 bp, Homo sapiens
ttgagtagccaggataacaggcacccgccaccacgcctgg

SEQ ID NO: 61762 - DNA, 40 bp, Homo sapiens
caggcgtggtggcgggtgcctgttatcctggctactcaag

SEQ ID NO: 61763 - DNA, 40 bp, Homo sapiens
cttgagtagccaggataacaggcacccgccaccacgcctg

SEQ ID NO: 61764 - DNA, 40 bp, Homo sapiens
aggcgtggtggcgggtgcctgttatcctggctactcaagg

SEQ ID NO: 61765 - DNA, 40 bp, Homo sapiens
ccttgagtagccaggataacaggcacccgccaccacgcct

SEQ ID NO: 61766 - DNA, 40 bp, Homo sapiens
ggcgtggtggcgggtgcctgttatcctggctactcaaggg

SEQ ID NO: 61767 - DNA, 40 bp, Homo sapiens
cccttgagtagccaggataacaggcacccgccaccacgcc

SEQ ID NO: 61768 - DNA, 40 bp, Homo sapiens
gcgtggtggcgggtgcctgttatcctggctactcaagggg

SEQ ID NO: 61769 - DNA, 40 bp, Homo sapiens
ccccttgagtagccaggataacaggcacccgccaccacgc

SEQ ID NO: 61770 - DNA, 40 bp, Homo sapiens
cgtggtggcgggtgcctgttatcctggctactcaaggggc

SEQ ID NO: 61771 - DNA, 40 bp, Homo sapiens
gccccttgagtagccaggataacaggcacccgccaccacg

SEQ ID NO: 61772 - DNA, 40 bp, Homo sapiens
gtggtggcgggtgcctgttatcctggctactcaaggggct

SEQ ID NO: 61773 - DNA, 40 bp, Homo sapiens
agccccttgagtagccaggataacaggcacccgccaccac

SEQ ID NO: 61774 - DNA, 40 bp, Homo sapiens
tggtggcgggtgcctgttatcctggctactcaaggggctg

SEQ ID NO: 61775 - DNA, 40 bp, Homo sapiens
cagccccttgagtagccaggataacaggcacccgccacca

SEQ ID NO: 61776 - DNA, 40 bp, Homo sapiens
ggtggcgggtgcctgttatcctggctactcaaggggctga

SEQ ID NO: 61777 - DNA, 40 bp, Homo sapiens
tcagccccttgagtagccaggataacaggcacccgccacc

SEQ ID NO: 61778 - DNA, 40 bp, Homo sapiens
gtggcgggtgcctgttatcctggctactcaaggggctgag

SEQ ID NO: 61779 - DNA, 40 bp, Homo sapiens
ctcagccccttgagtagccaggataacaggcacccgccac

SEQ ID NO: 61780 - DNA, 40 bp, Homo sapiens
tggcgggtgcctgttatcctggctactcaaggggctgagg

SEQ ID NO: 61781 - DNA, 40 bp, Homo sapiens
cctcagccccttgagtagccaggataacaggcacccgcca

SEQ ID NO: 61782 - DNA, 40 bp, Homo sapiens
ggcgggtgcctgttatcctggctactcaaggggctgaggc

SEQ ID NO: 61783 - DNA, 40 bp, Homo sapiens
gcctcagccccttgagtagccaggataacaggcacccgcc

SEQ ID NO: 61784 - DNA, 40 bp, Homo sapiens
gcgggtgcctgttatcctggctactcaaggggctgaggca

SEQ ID NO: 61785 - DNA, 40 bp, Homo sapiens
tgcctcagccccttgagtagccaggataacaggcacccgc

SEQ ID NO: 61786 - DNA, 40 bp, Homo sapiens
cgggtgcctgttatcctggctactcaaggggctgaggcag

SEQ ID NO: 61787 - DNA, 40 bp, Homo sapiens
ctgcctcagccccttgagtagccaggataacaggcacccg

SEQ ID NO: 61788 - DNA, 40 bp, Homo sapiens
gggtgcctgttatcctggctactcaaggggctgaggcagt

SEQ ID NO: 61789 - DNA, 40 bp, Homo sapiens
actgcctcagccccttgagtagccaggataacaggcaccc

SEQ ID NO: 61790 - DNA, 40 bp, Homo sapiens
ggtgcctgttatcctggctactcaaggggctgaggcagta

SEQ ID NO: 61791 - DNA, 40 bp, Homo sapiens
tactgcctcagccccttgagtagccaggataacaggcacc

SEQ ID NO: 61792 - DNA, 40 bp, Homo sapiens
gtgcctgttatcctggctactcaaggggctgaggcagtag

SEQ ID NO: 61793 - DNA, 40 bp, Homo sapiens
ctactgcctcagccccttgagtagccaggataacaggcac

SEQ ID NO: 61794 - DNA, 40 bp, Homo sapiens
tgcctgttatcctggctactcaaggggctgaggcagtaga

SEQ ID NO: 61795 - DNA, 40 bp, Homo sapiens
tctactgcctcagccccttgagtagccaggataacaggca

SEQ ID NO: 61796 - DNA, 40 bp, Homo sapiens
gcctgttatcctggctactcaaggggctgaggcagtagaa

SEQ ID NO: 61797 - DNA, 40 bp, Homo sapiens
ttctactgcctcagccccttgagtagccaggataacaggc

SEQ ID NO: 61798 - DNA, 40 bp, Homo sapiens
cctgttatcctggctactcaaggggctgaggcagtagaat

SEQ ID NO: 61799 - DNA, 40 bp, Homo sapiens
attctactgcctcagccccttgagtagccaggataacagg

SEQ ID NO: 61800 - DNA, 40 bp, Homo sapiens
ctgttatcctggctactcaaggggctgaggcagtagaatt

SEQ ID NO: 61801 - DNA, 40 bp, Homo sapiens
aattctactgcctcagccccttgagtagccaggataacag

SEQ ID NO: 61802 - DNA, 40 bp, Homo sapiens
tgttatcctggctactcaaggggctgaggcagtagaattg

SEQ ID NO: 61803 - DNA, 40 bp, Homo sapiens
caattctactgcctcagccccttgagtagccaggataaca

SEQ ID NO: 61804 - DNA, 40 bp, Homo sapiens
gttatcctggctactcaaggggctgaggcagtagaattgc

SEQ ID NO: 61805 - DNA, 40 bp, Homo sapiens
gcaattctactgcctcagccccttgagtagccaggataac

SEQ ID NO: 61806 - DNA, 40 bp, Homo sapiens
ttatcctggctactcaaggggctgaggcagtagaattgct

SEQ ID NO: 61807 - DNA, 40 bp, Homo sapiens
agcaattctactgcctcagccccttgagtagccaggataa

SEQ ID NO: 61808 - DNA, 40 bp, Homo sapiens
tatcctggctactcaaggggctgaggcagtagaattgctt

SEQ ID NO: 61809 - DNA, 40 bp, Homo sapiens
aagcaattctactgcctcagccccttgagtagccaggata

SEQ ID NO: 61810 - DNA, 40 bp, Homo sapiens
atcctggctactcaaggggctgaggcagtagaattgcttg

SEQ ID NO: 61811 - DNA, 40 bp, Homo sapiens
caagcaattctactgcctcagccccttgagtagccaggat

SEQ ID NO: 61812 - DNA, 40 bp, Homo sapiens
tcctggctactcaaggggctgaggcagtagaattgcttga

SEQ ID NO: 61813 - DNA, 40 bp, Homo sapiens
tcaagcaattctactgcctcagccccttgagtagccagga

SEQ ID NO: 61814 - DNA, 40 bp, Homo sapiens
cctggctactcaaggggctgaggcagtagaattgcttgaa

SEQ ID NO: 61815 - DNA, 40 bp, Homo sapiens
ttcaagcaattctactgcctcagccccttgagtagccagg

SEQ ID NO: 61816 - DNA, 40 bp, Homo sapiens
ctggctactcaaggggctgaggcagtagaattgcttgaac

SEQ ID NO: 61817 - DNA, 40 bp, Homo sapiens
gttcaagcaattctactgcctcagccccttgagtagccag

SEQ ID NO: 61818 - DNA, 40 bp, Homo sapiens
tggctactcaaggggctgaggcagtagaattgcttgaacc

SEQ ID NO: 61819 - DNA, 40 bp, Homo sapiens
ggttcaagcaattctactgcctcagccccttgagtagcca

SEQ ID NO: 61820 - DNA, 40 bp, Homo sapiens
ggctactcaaggggctgaggcagtagaattgcttgaacct

SEQ ID NO: 61821 - DNA, 40 bp, Homo sapiens
aggttcaagcaattctactgcctcagccccttgagtagcc

SEQ ID NO: 61822 - DNA, 40 bp, Homo sapiens
gctactcaaggggctgaggcagtagaattgcttgaacctg

SEQ ID NO: 61823 - DNA, 40 bp, Homo sapiens
caggttcaagcaattctactgcctcagccccttgagtagc

SEQ ID NO: 61824 - DNA, 40 bp, Homo sapiens
ctactcaaggggctgaggcagtagaattgcttgaacctga

SEQ ID NO: 61825 - DNA, 40 bp, Homo sapiens
tcaggttcaagcaattctactgcctcagccccttgagtag

SEQ ID NO: 61826 - DNA, 40 bp, Homo sapiens
tactcaaggggctgaggcagtagaattgcttgaacctgag

SEQ ID NO: 61827 - DNA, 40 bp, Homo sapiens
ctcaggttcaagcaattctactgcctcagccccttgagta

SEQ ID NO: 61828 - DNA, 40 bp, Homo sapiens
actcaaggggctgaggcagtagaattgcttgaacctgaga

SEQ ID NO: 61829 - DNA, 40 bp, Homo sapiens
tctcaggttcaagcaattctactgcctcagccccttgagt

SEQ ID NO: 61830 - DNA, 40 bp, Homo sapiens
ctcaaggggctgaggcagtagaattgcttgaacctgagag

SEQ ID NO: 61831 - DNA, 40 bp, Homo sapiens
ctctcaggttcaagcaattctactgcctcagccccttgag

SEQ ID NO: 61832 - DNA, 40 bp, Homo sapiens
tcaaggggctgaggcagtagaattgcttgaacctgagagg

SEQ ID NO: 61833 - DNA, 40 bp, Homo sapiens
cctctcaggttcaagcaattctactgcctcagccccttga

SEQ ID NO: 61834 - DNA, 40 bp, Homo sapiens
caaggggctgaggcagtagaattgcttgaacctgagaggc

SEQ ID NO: 61835 - DNA, 40 bp, Homo sapiens
gcctctcaggttcaagcaattctactgcctcagccccttg

SEQ ID NO: 61836 - DNA, 40 bp, Homo sapiens
aaggggctgaggcagtagaattgcttgaacctgagaggca

SEQ ID NO: 61837 - DNA, 40 bp, Homo sapiens
tgcctctcaggttcaagcaattctactgcctcagcccctt

SEQ ID NO: 61838 - DNA, 40 bp, Homo sapiens
aggggctgaggcagtagaattgcttgaacctgagaggcag

SEQ ID NO: 61839 - DNA, 40 bp, Homo sapiens
ctgcctctcaggttcaagcaattctactgcctcagcccct

SEQ ID NO: 61840 - DNA, 40 bp, Homo sapiens
ggggctgaggcagtagaattgcttgaacctgagaggcaga

SEQ ID NO: 61841 - DNA, 40 bp, Homo sapiens
tctgcctctcaggttcaagcaattctactgcctcagcccc

SEQ ID NO: 61842 - DNA, 40 bp, Homo sapiens
gggctgaggcagtagaattgcttgaacctgagaggcagag

SEQ ID NO: 61843 - DNA, 40 bp, Homo sapiens
ctctgcctctcaggttcaagcaattctactgcctcagccc

SEQ ID NO: 61844 - DNA, 40 bp, Homo sapiens
ggctgaggcagtagaattgcttgaacctgagaggcagagg

SEQ ID NO: 61845 - DNA, 40 bp, Homo sapiens
cctctgcctctcaggttcaagcaattctactgcctcagcc

SEQ ID NO: 61846 - DNA, 40 bp, Homo sapiens
gctgaggcagtagaattgcttgaacctgagaggcagaggc

SEQ ID NO: 61847 - DNA, 40 bp, Homo sapiens
gcctctgcctctcaggttcaagcaattctactgcctcagc

SEQ ID NO: 61848 - DNA, 40 bp, Homo sapiens
ctgaggcagtagaattgcttgaacctgagaggcagaggct

SEQ ID NO: 61849 - DNA, 40 bp, Homo sapiens
agcctctgcctctcaggttcaagcaattctactgcctcag

SEQ ID NO: 61850 - DNA, 40 bp, Homo sapiens
tgaggcagtagaattgcttgaacctgagaggcagaggctg

SEQ ID NO: 61851 - DNA, 40 bp, Homo sapiens
cagcctctgcctctcaggttcaagcaattctactgcctca

SEQ ID NO: 61852 - DNA, 40 bp, Homo sapiens
gaggcagtagaattgcttgaacctgagaggcagaggctgt

SEQ ID NO: 61853 - DNA, 40 bp, Homo sapiens
acagcctctgcctctcaggttcaagcaattctactgcctc

SEQ ID NO: 61854 - DNA, 40 bp, Homo sapiens
aggcagtagaattgcttgaacctgagaggcagaggctgta

SEQ ID NO: 61855 - DNA, 40 bp, Homo sapiens
tacagcctctgcctctcaggttcaagcaattctactgcct

SEQ ID NO: 61856 - DNA, 40 bp, Homo sapiens
ggcagtagaattgcttgaacctgagaggcagaggctgtag

SEQ ID NO: 61857 - DNA, 40 bp, Homo sapiens
ctacagcctctgcctctcaggttcaagcaattctactgcc

SEQ ID NO: 61858 - DNA, 40 bp, Homo sapiens
gcagtagaattgcttgaacctgagaggcagaggctgtagt

SEQ ID NO: 61859 - DNA, 40 bp, Homo sapiens
actacagcctctgcctctcaggttcaagcaattctactgc

SEQ ID NO: 61860 - DNA, 40 bp, Homo sapiens
cagtagaattgcttgaacctgagaggcagaggctgtagtg

SEQ ID NO: 61861 - DNA, 40 bp, Homo sapiens
cactacagcctctgcctctcaggttcaagcaattctactg

SEQ ID NO: 61862 - DNA, 40 bp, Homo sapiens
agtagaattgcttgaacctgagaggcagaggctgtagtga

SEQ ID NO: 61863 - DNA, 40 bp, Homo sapiens
tcactacagcctctgcctctcaggttcaagcaattctact

SEQ ID NO: 61864 - DNA, 40 bp, Homo sapiens
gtagaattgcttgaacctgagaggcagaggctgtagtgag

SEQ ID NO: 61865 - DNA, 40 bp, Homo sapiens
ctcactacagcctctgcctctcaggttcaagcaattctac

SEQ ID NO: 61866 - DNA, 40 bp, Homo sapiens
tagaattgcttgaacctgagaggcagaggctgtagtgagc

SEQ ID NO: 61867 - DNA, 40 bp, Homo sapiens
gctcactacagcctctgcctctcaggttcaagcaattcta

SEQ ID NO: 61868 - DNA, 40 bp, Homo sapiens
agaattgcttgaacctgagaggcagaggctgtagtgagcc

SEQ ID NO: 61869 - DNA, 40 bp, Homo sapiens
ggctcactacagcctctgcctctcaggttcaagcaattct

SEQ ID NO: 61870 - DNA, 40 bp, Homo sapiens
gaattgcttgaacctgagaggcagaggctgtagtgagccc

SEQ ID NO: 61871 - DNA, 40 bp, Homo sapiens
gggctcactacagcctctgcctctcaggttcaagcaattc

SEQ ID NO: 61872 - DNA, 40 bp, Homo sapiens
aattgcttgaacctgagaggcagaggctgtagtgagccca

SEQ ID NO: 61873 - DNA, 40 bp, Homo sapiens
tgggctcactacagcctctgcctctcaggttcaagcaatt

SEQ ID NO: 61874 - DNA, 40 bp, Homo sapiens
attgcttgaacctgagaggcagaggctgtagtgagcccag

SEQ ID NO: 61875 - DNA, 40 bp, Homo sapiens
ctgggctcactacagcctctgcctctcaggttcaagcaat

SEQ ID NO: 61876 - DNA, 40 bp, Homo sapiens
ttgcttgaacctgagaggcagaggctgtagtgagcccaga

SEQ ID NO: 61877 - DNA, 40 bp, Homo sapiens
tctgggctcactacagcctctgcctctcaggttcaagcaa

SEQ ID NO: 61878 - DNA, 40 bp, Homo sapiens
tgcttgaacctgagaggcagaggctgtagtgagcccagat

SEQ ID NO: 61879 - DNA, 40 bp, Homo sapiens
atctgggctcactacagcctctgcctctcaggttcaagca

SEQ ID NO: 61880 - DNA, 40 bp, Homo sapiens
gcttgaacctgagaggcagaggctgtagtgagcccagatc

SEQ ID NO: 61881 - DNA, 40 bp, Homo sapiens
gatctgggctcactacagcctctgcctctcaggttcaagc

SEQ ID NO: 61882 - DNA, 40 bp, Homo sapiens
cttgaacctgagaggcagaggctgtagtgagcccagatca

SEQ ID NO: 61883 - DNA, 40 bp, Homo sapiens
tgatctgggctcactacagcctctgcctctcaggttcaag

SEQ ID NO: 61884 - DNA, 40 bp, Homo sapiens
ttgaacctgagaggcagaggctgtagtgagcccagatcaa

SEQ ID NO: 61885 - DNA, 40 bp, Homo sapiens
ttgatctgggctcactacagcctctgcctctcaggttcaa

SEQ ID NO: 61886 - DNA, 40 bp, Homo sapiens
tgaacctgagaggcagaggctgtagtgagcccagatcaag

SEQ ID NO: 61887 - DNA, 40 bp, Homo sapiens
cttgatctgggctcactacagcctctgcctctcaggttca

SEQ ID NO: 61888 - DNA, 40 bp, Homo sapiens
gaacctgagaggcagaggctgtagtgagcccagatcaagc

SEQ ID NO: 61889 - DNA, 40 bp, Homo sapiens
gcttgatctgggctcactacagcctctgcctctcaggttc

SEQ ID NO: 61890 - DNA, 40 bp, Homo sapiens
aacctgagaggcagaggctgtagtgagcccagatcaagcc

SEQ ID NO: 61891 - DNA, 40 bp, Homo sapiens
ggcttgatctgggctcactacagcctctgcctctcaggtt

SEQ ID NO: 61892 - DNA, 40 bp, Homo sapiens
acctgagaggcagaggctgtagtgagcccagatcaagcca

SEQ ID NO: 61893 - DNA, 40 bp, Homo sapiens
tggcttgatctgggctcactacagcctctgcctctcaggt

SEQ ID NO: 61894 - DNA, 40 bp, Homo sapiens
cctgagaggcagaggctgtagtgagcccagatcaagccag

SEQ ID NO: 61895 - DNA, 40 bp, Homo sapiens
ctggcttgatctgggctcactacagcctctgcctctcagg

SEQ ID NO: 61896 - DNA, 40 bp, Homo sapiens
ctgagaggcagaggctgtagtgagcccagatcaagccagt

SEQ ID NO: 61897 - DNA, 40 bp, Homo sapiens
actggcttgatctgggctcactacagcctctgcctctcag

SEQ ID NO: 61898 - DNA, 40 bp, Homo sapiens
tgagaggcagaggctgtagtgagcccagatcaagccagtg

SEQ ID NO: 61899 - DNA, 40 bp, Homo sapiens
cactggcttgatctgggctcactacagcctctgcctctca

SEQ ID NO: 61900 - DNA, 40 bp, Homo sapiens
gagaggcagaggctgtagtgagcccagatcaagccagtgc

SEQ ID NO: 61901 - DNA, 40 bp, Homo sapiens
gcactggcttgatctgggctcactacagcctctgcctctc

SEQ ID NO: 61902 - DNA, 40 bp, Homo sapiens
agaggcagaggctgtagtgagcccagatcaagccagtgca

SEQ ID NO: 61903 - DNA, 40 bp, Homo sapiens
tgcactggcttgatctgggctcactacagcctctgcctct

SEQ ID NO: 61904 - DNA, 40 bp, Homo sapiens
gaggcagaggctgtagtgagcccagatcaagccagtgcac

SEQ ID NO: 61905 - DNA, 40 bp, Homo sapiens
gtgcactggcttgatctgggctcactacagcctctgcctc

SEQ ID NO: 61906 - DNA, 40 bp, Homo sapiens
aggcagaggctgtagtgagcccagatcaagccagtgcaca

SEQ ID NO: 61907 - DNA, 40 bp, Homo sapiens
tgtgcactggcttgatctgggctcactacagcctctgcct

SEQ ID NO: 61908 - DNA, 40 bp, Homo sapiens
ggcagaggctgtagtgagcccagatcaagccagtgcacac

SEQ ID NO: 61909 - DNA, 40 bp, Homo sapiens
gtgtgcactggcttgatctgggctcactacagcctctgcc

SEQ ID NO: 61910 - DNA, 40 bp, Homo sapiens
gcagaggctgtagtgagcccagatcaagccagtgcacacc

SEQ ID NO: 61911 - DNA, 40 bp, Homo sapiens
ggtgtgcactggcttgatctgggctcactacagcctctgc

SEQ ID NO: 61912 - DNA, 40 bp, Homo sapiens
cagaggctgtagtgagcccagatcaagccagtgcacacca

SEQ ID NO: 61913 - DNA, 40 bp, Homo sapiens
tggtgtgcactggcttgatctgggctcactacagcctctg

SEQ ID NO: 61914 - DNA, 40 bp, Homo sapiens
agaggctgtagtgagcccagatcaagccagtgcacaccag

SEQ ID NO: 61915 - DNA, 40 bp, Homo sapiens
ctggtgtgcactggcttgatctgggctcactacagcctct

SEQ ID NO: 61916 - DNA, 40 bp, Homo sapiens
gaggctgtagtgagcccagatcaagccagtgcacaccagc

SEQ ID NO: 61917 - DNA, 40 bp, Homo sapiens
gctggtgtgcactggcttgatctgggctcactacagcctc

SEQ ID NO: 61918 - DNA, 40 bp, Homo sapiens
aggctgtagtgagcccagatcaagccagtgcacaccagcc

SEQ ID NO: 61919 - DNA, 40 bp, Homo sapiens
ggctggtgtgcactggcttgatctgggctcactacagcct

SEQ ID NO: 61920 - DNA, 40 bp, Homo sapiens
ggctgtagtgagcccagatcaagccagtgcacaccagcct

SEQ ID NO: 61921 - DNA, 40 bp, Homo sapiens
aggctggtgtgcactggcttgatctgggctcactacagcc

SEQ ID NO: 61922 - DNA, 40 bp, Homo sapiens
gctgtagtgagcccagatcaagccagtgcacaccagcctg

SEQ ID NO: 61923 - DNA, 40 bp, Homo sapiens
caggctggtgtgcactggcttgatctgggctcactacagc

SEQ ID NO: 61924 - DNA, 40 bp, Homo sapiens
ctgtagtgagcccagatcaagccagtgcacaccagcctgg

SEQ ID NO: 61925 - DNA, 40 bp, Homo sapiens
ccaggctggtgtgcactggcttgatctgggctcactacag

SEQ ID NO: 61926 - DNA, 40 bp, Homo sapiens
tgtagtgagcccagatcaagccagtgcacaccagcctgga

SEQ ID NO: 61927 - DNA, 40 bp, Homo sapiens
tccaggctggtgtgcactggcttgatctgggctcactaca

SEQ ID NO: 61928 - DNA, 40 bp, Homo sapiens
gtagtgagcccagatcaagccagtgcacaccagcctggac

SEQ ID NO: 61929 - DNA, 40 bp, Homo sapiens
gtccaggctggtgtgcactggcttgatctgggctcactac

SEQ ID NO: 61930 - DNA, 40 bp, Homo sapiens
tagtgagcccagatcaagccagtgcacaccagcctggacg

SEQ ID NO: 61931 - DNA, 40 bp, Homo sapiens
cgtccaggctggtgtgcactggcttgatctgggctcacta

SEQ ID NO: 61932 - DNA, 40 bp, Homo sapiens
agtgagcccagatcaagccagtgcacaccagcctggacga

SEQ ID NO: 61933 - DNA, 40 bp, Homo sapiens
tcgtccaggctggtgtgcactggcttgatctgggctcact

SEQ ID NO: 61934 - DNA, 40 bp, Homo sapiens
gtgagcccagatcaagccagtgcacaccagcctggacgac

SEQ ID NO: 61935 - DNA, 40 bp, Homo sapiens
gtcgtccaggctggtgtgcactggcttgatctgggctcac

SEQ ID NO: 61936 - DNA, 40 bp, Homo sapiens
tgagcccagatcaagccagtgcacaccagcctggacgacc

SEQ ID NO: 61937 - DNA, 40 bp, Homo sapiens
ggtcgtccaggctggtgtgcactggcttgatctgggctca

SEQ ID NO: 61938 - DNA, 40 bp, Homo sapiens
gagcccagatcaagccagtgcacaccagcctggacgaccg

SEQ ID NO: 61939 - DNA, 40 bp, Homo sapiens
cggtcgtccaggctggtgtgcactggcttgatctgggctc

SEQ ID NO: 61940 - DNA, 40 bp, Homo sapiens
agcccagatcaagccagtgcacaccagcctggacgaccga

SEQ ID NO: 61941 - DNA, 40 bp, Homo sapiens
tcggtcgtccaggctggtgtgcactggcttgatctgggct

SEQ ID NO: 61942 - DNA, 40 bp, Homo sapiens
gcccagatcaagccagtgcacaccagcctggacgaccgag

SEQ ID NO: 61943 - DNA, 40 bp, Homo sapiens
ctcggtcgtccaggctggtgtgcactggcttgatctgggc

SEQ ID NO: 61944 - DNA, 40 bp, Homo sapiens
cccagatcaagccagtgcacaccagcctggacgaccgagc

SEQ ID NO: 61945 - DNA, 40 bp, Homo sapiens
gctcggtcgtccaggctggtgtgcactggcttgatctggg

SEQ ID NO: 61946 - DNA, 40 bp, Homo sapiens
ccagatcaagccagtgcacaccagcctggacgaccgagcg

SEQ ID NO: 61947 - DNA, 40 bp, Homo sapiens
cgctcggtcgtccaggctggtgtgcactggcttgatctgg

SEQ ID NO: 61948 - DNA, 40 bp, Homo sapiens
cagatcaagccagtgcacaccagcctggacgaccgagcga

SEQ ID NO: 61949 - DNA, 40 bp, Homo sapiens
tcgctcggtcgtccaggctggtgtgcactggcttgatctg

SEQ ID NO: 61950 - DNA, 40 bp, Homo sapiens
agatcaagccagtgcacaccagcctggacgaccgagcgag

SEQ ID NO: 61951 - DNA, 40 bp, Homo sapiens
ctcgctcggtcgtccaggctggtgtgcactggcttgatct

SEQ ID NO: 61952 - DNA, 40 bp, Homo sapiens
gatcaagccagtgcacaccagcctggacgaccgagcgaga

SEQ ID NO: 61953 - DNA, 40 bp, Homo sapiens
tctcgctcggtcgtccaggctggtgtgcactggcttgatc

SEQ ID NO: 61954 - DNA, 40 bp, Homo sapiens
atcaagccagtgcacaccagcctggacgaccgagcgagac

SEQ ID NO: 61955 - DNA, 40 bp, Homo sapiens
gtctcgctcggtcgtccaggctggtgtgcactggcttgat

SEQ ID NO: 61956 - DNA, 40 bp, Homo sapiens
tcaagccagtgcacaccagcctggacgaccgagcgagact

SEQ ID NO: 61957 - DNA, 40 bp, Homo sapiens
agtctcgctcggtcgtccaggctggtgtgcactggcttga

SEQ ID NO: 61958 - DNA, 40 bp, Homo sapiens
caagccagtgcacaccagcctggacgaccgagcgagactc

SEQ ID NO: 61959 - DNA, 40 bp, Homo sapiens
gagtctcgctcggtcgtccaggctggtgtgcactggcttg

SEQ ID NO: 61960 - DNA, 40 bp, Homo sapiens
aagccagtgcacaccagcctggacgaccgagcgagactct

SEQ ID NO: 61961 - DNA, 40 bp, Homo sapiens
agagtctcgctcggtcgtccaggctggtgtgcactggctt

SEQ ID NO: 61962 - DNA, 40 bp, Homo sapiens
agccagtgcacaccagcctggacgaccgagcgagactctg

SEQ ID NO: 61963 - DNA, 40 bp, Homo sapiens
cagagtctcgctcggtcgtccaggctggtgtgcactggct

SEQ ID NO: 61964 - DNA, 40 bp, Homo sapiens
gccagtgcacaccagcctggacgaccgagcgagactctgt

SEQ ID NO: 61965 - DNA, 40 bp, Homo sapiens
acagagtctcgctcggtcgtccaggctggtgtgcactggc

SEQ ID NO: 61966 - DNA, 40 bp, Homo sapiens
ccagtgcacaccagcctggacgaccgagcgagactctgtc

SEQ ID NO: 61967 - DNA, 40 bp, Homo sapiens
gacagagtctcgctcggtcgtccaggctggtgtgcactgg

SEQ ID NO: 61968 - DNA, 40 bp, Homo sapiens
cagtgcacaccagcctggacgaccgagcgagactctgtct

SEQ ID NO: 61969 - DNA, 40 bp, Homo sapiens
agacagagtctcgctcggtcgtccaggctggtgtgcactg

SEQ ID NO: 61970 - DNA, 40 bp, Homo sapiens
agtgcacaccagcctggacgaccgagcgagactctgtctc

SEQ ID NO: 61971 - DNA, 40 bp, Homo sapiens
gagacagagtctcgctcggtcgtccaggctggtgtgcact

SEQ ID NO: 61972 - DNA, 40 bp, Homo sapiens
gtgcacaccagcctggacgaccgagcgagactctgtctca

SEQ ID NO: 61973 - DNA, 40 bp, Homo sapiens
tgagacagagtctcgctcggtcgtccaggctggtgtgcac

SEQ ID NO: 61974 - DNA, 40 bp, Homo sapiens
tgcacaccagcctggacgaccgagcgagactctgtctcaa

SEQ ID NO: 61975 - DNA, 40 bp, Homo sapiens
ttgagacagagtctcgctcggtcgtccaggctggtgtgca

SEQ ID NO: 61976 - DNA, 40 bp, Homo sapiens
gcacaccagcctggacgaccgagcgagactctgtctcaaa

SEQ ID NO: 61977 - DNA, 40 bp, Homo sapiens
tttgagacagagtctcgctcggtcgtccaggctggtgtgc

SEQ ID NO: 61978 - DNA, 40 bp, Homo sapiens
cacaccagcctggacgaccgagcgagactctgtctcaaaa

SEQ ID NO: 61979 - DNA, 40 bp, Homo sapiens
ttttgagacagagtctcgctcggtcgtccaggctggtgtg

SEQ ID NO: 61980 - DNA, 40 bp, Homo sapiens
acaccagcctggacgaccgagcgagactctgtctcaaaaa

SEQ ID NO: 61981 - DNA, 40 bp, Homo sapiens
tttttgagacagagtctcgctcggtcgtccaggctggtgt

SEQ ID NO: 61982 - DNA, 40 bp, Homo sapiens
caccagcctggacgaccgagcgagactctgtctcaaaaaa

SEQ ID NO: 61983 - DNA, 40 bp, Homo sapiens
ttttttgagacagagtctcgctcggtcgtccaggctggtg

SEQ ID NO: 61984 - DNA, 40 bp, Homo sapiens
accagcctggacgaccgagcgagactctgtctcaaaaaaa

SEQ ID NO: 61985 - DNA, 40 bp, Homo sapiens
tttttttgagacagagtctcgctcggtcgtccaggctggt

SEQ ID NO: 61986 - DNA, 40 bp, Homo sapiens
ccagcctggacgaccgagcgagactctgtctcaaaaaaaa

SEQ ID NO: 61987 - DNA, 40 bp, Homo sapiens
ttttttttgagacagagtctcgctcggtcgtccaggctgg

SEQ ID NO: 61988 - DNA, 40 bp, Homo sapiens
cagcctggacgaccgagcgagactctgtctcaaaaaaaaa

SEQ ID NO: 61989 - DNA, 40 bp, Homo sapiens
tttttttttgagacagagtctcgctcggtcgtccaggctg

SEQ ID NO: 61990 - DNA, 40 bp, Homo sapiens
agcctggacgaccgagcgagactctgtctcaaaaaaaaaa

SEQ ID NO: 61991 - DNA, 40 bp, Homo sapiens
ttttttttttgagacagagtctcgctcggtcgtccaggct

SEQ ID NO: 61992 - DNA, 40 bp, Homo sapiens
gcctggacgaccgagcgagactctgtctcaaaaaaaaaaa

SEQ ID NO: 61993 - DNA, 40 bp, Homo sapiens
tttttttttttgagacagagtctcgctcggtcgtccaggc

SEQ ID NO: 61994 - DNA, 40 bp, Homo sapiens
cctggacgaccgagcgagactctgtctcaaaaaaaaaaaa

SEQ ID NO: 61995 - DNA, 40 bp, Homo sapiens
ttttttttttttgagacagagtctcgctcggtcgtccagg

SEQ ID NO: 61996 - DNA, 40 bp, Homo sapiens
ctggacgaccgagcgagactctgtctcaaaaaaaaaaaaa

SEQ ID NO: 61997 - DNA, 40 bp, Homo sapiens
tttttttttttttgagacagagtctcgctcggtcgtccag

SEQ ID NO: 61998 - DNA, 40 bp, Homo sapiens
tggacgaccgagcgagactctgtctcaaaaaaaaaaaaaa

SEQ ID NO: 61999 - DNA, 40 bp, Homo sapiens
ttttttttttttttgagacagagtctcgctcggtcgtcca

SEQ ID NO: 62000 - DNA, 40 bp, Homo sapiens
ggacgaccgagcgagactctgtctcaaaaaaaaaaaaaaa

SEQ ID NO: 62001 - DNA, 40 bp, Homo sapiens
tttttttttttttttgagacagagtctcgctcggtcgtcc

SEQ ID NO: 62002 - DNA, 40 bp, Homo sapiens
gacgaccgagcgagactctgtctcaaaaaaaaaaaaaaaa

SEQ ID NO: 62003 - DNA, 40 bp, Homo sapiens
ttttttttttttttttgagacagagtctcgctcggtcgtc

SEQ ID NO: 62004 - DNA, 40 bp, Homo sapiens
acgaccgagcgagactctgtctcaaaaaaaaaaaaaaaag

SEQ ID NO: 62005 - DNA, 40 bp, Homo sapiens
cttttttttttttttttgagacagagtctcgctcggtcgt

SEQ ID NO: 62006 - DNA, 40 bp, Homo sapiens
cgaccgagcgagactctgtctcaaaaaaaaaaaaaaaagg

SEQ ID NO: 62007 - DNA, 40 bp, Homo sapiens
ccttttttttttttttttgagacagagtctcgctcggtcg

SEQ ID NO: 62008 - DNA, 40 bp, Homo sapiens
gaccgagcgagactctgtctcaaaaaaaaaaaaaaaaggc

SEQ ID NO: 62009 - DNA, 40 bp, Homo sapiens
gccttttttttttttttttgagacagagtctcgctcggtc

SEQ ID NO: 62010 - DNA, 40 bp, Homo sapiens
accgagcgagactctgtctcaaaaaaaaaaaaaaaaggct

SEQ ID NO: 62011 - DNA, 40 bp, Homo sapiens
agccttttttttttttttttgagacagagtctcgctcggt

SEQ ID NO: 62012 - DNA, 40 bp, Homo sapiens
ccgagcgagactctgtctcaaaaaaaaaaaaaaaaggctg

SEQ ID NO: 62013 - DNA, 40 bp, Homo sapiens
cagccttttttttttttttttgagacagagtctcgctcgg

SEQ ID NO: 62014 - DNA, 40 bp, Homo sapiens
cgagcgagactctgtctcaaaaaaaaaaaaaaaaggctgt

SEQ ID NO: 62015 - DNA, 40 bp, Homo sapiens
acagccttttttttttttttttgagacagagtctcgctcg

SEQ ID NO: 62016 - DNA, 40 bp, Homo sapiens
gagcgagactctgtctcaaaaaaaaaaaaaaaaggctgtg

SEQ ID NO: 62017 - DNA, 40 bp, Homo sapiens
cacagccttttttttttttttttgagacagagtctcgctc

SEQ ID NO: 62018 - DNA, 40 bp, Homo sapiens
agcgagactctgtctcaaaaaaaaaaaaaaaaggctgtgg

SEQ ID NO: 62019 - DNA, 40 bp, Homo sapiens
ccacagccttttttttttttttttgagacagagtctcgct

SEQ ID NO: 62020 - DNA, 40 bp, Homo sapiens
gcgagactctgtctcaaaaaaaaaaaaaaaaggctgtggc

SEQ ID NO: 62021 - DNA, 40 bp, Homo sapiens
gccacagccttttttttttttttttgagacagagtctcgc

SEQ ID NO: 62022 - DNA, 40 bp, Homo sapiens
cgagactctgtctcaaaaaaaaaaaaaaaaggctgtggct

SEQ ID NO: 62023 - DNA, 40 bp, Homo sapiens
agccacagccttttttttttttttttgagacagagtctcg

SEQ ID NO: 62024 - DNA, 40 bp, Homo sapiens
gagactctgtctcaaaaaaaaaaaaaaaaggctgtggctg

SEQ ID NO: 62025 - DNA, 40 bp, Homo sapiens
cagccacagccttttttttttttttttgagacagagtctc

SEQ ID NO: 62026 - DNA, 40 bp, Homo sapiens
agactctgtctcaaaaaaaaaaaaaaaaggctgtggctgc

SEQ ID NO: 62027 - DNA, 40 bp, Homo sapiens
gcagccacagccttttttttttttttttgagacagagtct

SEQ ID NO: 62028 - DNA, 40 bp, Homo sapiens
gactctgtctcaaaaaaaaaaaaaaaaggctgtggctgca

SEQ ID NO: 62029 - DNA, 40 bp, Homo sapiens
tgcagccacagccttttttttttttttttgagacagagtc

SEQ ID NO: 62030 - DNA, 40 bp, Homo sapiens
actctgtctcaaaaaaaaaaaaaaaaggctgtggctgcat

SEQ ID NO: 62031 - DNA, 40 bp, Homo sapiens
atgcagccacagccttttttttttttttttgagacagagt

SEQ ID NO: 62032 - DNA, 40 bp, Homo sapiens
ctctgtctcaaaaaaaaaaaaaaaaggctgtggctgcatt

SEQ ID NO: 62033 - DNA, 40 bp, Homo sapiens
aatgcagccacagccttttttttttttttttgagacagag

SEQ ID NO: 62034 - DNA, 40 bp, Homo sapiens
tctgtctcaaaaaaaaaaaaaaaaggctgtggctgcattt

SEQ ID NO: 62035 - DNA, 40 bp, Homo sapiens
aaatgcagccacagccttttttttttttttttgagacaga

SEQ ID NO: 62036 - DNA, 40 bp, Homo sapiens
ctgtctcaaaaaaaaaaaaaaaaggctgtggctgcatttg

SEQ ID NO: 62037 - DNA, 40 bp, Homo sapiens
caaatgcagccacagccttttttttttttttttgagacag

SEQ ID NO: 62038 - DNA, 40 bp, Homo sapiens
tgtctcaaaaaaaaaaaaaaaaggctgtggctgcatttgg

SEQ ID NO: 62039 - DNA, 40 bp, Homo sapiens
ccaaatgcagccacagccttttttttttttttttgagaca

SEQ ID NO: 62040 - DNA, 40 bp, Homo sapiens
gtctcaaaaaaaaaaaaaaaaggctgtggctgcatttggt

SEQ ID NO: 62041 - DNA, 40 bp, Homo sapiens
accaaatgcagccacagccttttttttttttttttgagac

SEQ ID NO: 62042 - DNA, 40 bp, Homo sapiens
tctcaaaaaaaaaaaaaaaaggctgtggctgcatttggtc

SEQ ID NO: 62043 - DNA, 40 bp, Homo sapiens
gaccaaatgcagccacagccttttttttttttttttgaga

SEQ ID NO: 62044 - DNA, 40 bp, Homo sapiens
ctcaaaaaaaaaaaaaaaaggctgtggctgcatttggtcc

SEQ ID NO: 62045 - DNA, 40 bp, Homo sapiens
ggaccaaatgcagccacagccttttttttttttttttgag

SEQ ID NO: 62046 - DNA, 40 bp, Homo sapiens
tcaaaaaaaaaaaaaaaaggctgtggctgcatttggtcca

SEQ ID NO: 62047 - DNA, 40 bp, Homo sapiens
tggaccaaatgcagccacagccttttttttttttttttga

SEQ ID NO: 62048 - DNA, 40 bp, Homo sapiens
caaaaaaaaaaaaaaaaggctgtggctgcatttggtccat

SEQ ID NO: 62049 - DNA, 40 bp, Homo sapiens
atggaccaaatgcagccacagccttttttttttttttttg

SEQ ID NO: 62050 - DNA, 40 bp, Homo sapiens
aaaaaaaaaaaaaaaaggctgtggctgcatttggtccatt

SEQ ID NO: 62051 - DNA, 40 bp, Homo sapiens
aatggaccaaatgcagccacagcctttttttttttttttt

SEQ ID NO: 62052 - DNA, 40 bp, Homo sapiens
aaaaaaaaaaaaaaaggctgtggctgcatttggtccattg

SEQ ID NO: 62053 - DNA, 40 bp, Homo sapiens
caatggaccaaatgcagccacagccttttttttttttttt

SEQ ID NO: 62054 - DNA, 40 bp, Homo sapiens
aaaaaaaaaaaaaaggctgtggctgcatttggtccattgg

SEQ ID NO: 62055 - DNA, 40 bp, Homo sapiens
ccaatggaccaaatgcagccacagcctttttttttttttt

SEQ ID NO: 62056 - DNA, 40 bp, Homo sapiens
aaaaaaaaaaaaaggctgtggctgcatttggtccattggc

SEQ ID NO: 62057 - DNA, 40 bp, Homo sapiens
gccaatggaccaaatgcagccacagccttttttttttttt

SEQ ID NO: 62058 - DNA, 40 bp, Homo sapiens
aaaaaaaaaaaaggctgtggctgcatttggtccattggct

SEQ ID NO: 62059 - DNA, 40 bp, Homo sapiens
agccaatggaccaaatgcagccacagcctttttttttttt

SEQ ID NO: 62060 - DNA, 40 bp, Homo sapiens
aaaaaaaaaaaggctgtggctgcatttggtccattggctg

SEQ ID NO: 62061 - DNA, 40 bp, Homo sapiens
cagccaatggaccaaatgcagccacagccttttttttttt

SEQ ID NO: 62062 - DNA, 40 bp, Homo sapiens
aaaaaaaaaaggctgtggctgcatttggtccattggctgt

SEQ ID NO: 62063 - DNA, 40 bp, Homo sapiens
acagccaatggaccaaatgcagccacagcctttttttttt

SEQ ID NO: 62064 - DNA, 40 bp, Homo sapiens
aaaaaaaaaggctgtggctgcatttggtccattggctgta

SEQ ID NO: 62065 - DNA, 40 bp, Homo sapiens
tacagccaatggaccaaatgcagccacagccttttttttt

SEQ ID NO: 62066 - DNA, 40 bp, Homo sapiens
aaaaaaaaggctgtggctgcatttggtccattggctgtaa

SEQ ID NO: 62067 - DNA, 40 bp, Homo sapiens
ttacagccaatggaccaaatgcagccacagcctttttttt

SEQ ID NO: 62068 - DNA, 40 bp, Homo sapiens
aaaaaaaggctgtggctgcatttggtccattggctgtaat

SEQ ID NO: 62069 - DNA, 40 bp, Homo sapiens
attacagccaatggaccaaatgcagccacagccttttttt

SEQ ID NO: 62070 - DNA, 40 bp, Homo sapiens
aaaaaaggctgtggctgcatttggtccattggctgtaata

SEQ ID NO: 62071 - DNA, 40 bp, Homo sapiens
tattacagccaatggaccaaatgcagccacagcctttttt

SEQ ID NO: 62072 - DNA, 40 bp, Homo sapiens
aaaaaggctgtggctgcatttggtccattggctgtaatat

SEQ ID NO: 62073 - DNA, 40 bp, Homo sapiens
atattacagccaatggaccaaatgcagccacagccttttt

SEQ ID NO: 62074 - DNA, 40 bp, Homo sapiens
aaaaggctgtggctgcatttggtccattggctgtaatatg

SEQ ID NO: 62075 - DNA, 40 bp, Homo sapiens
catattacagccaatggaccaaatgcagccacagcctttt

SEQ ID NO: 62076 - DNA, 40 bp, Homo sapiens
aaaggctgtggctgcatttggtccattggctgtaatatgc

SEQ ID NO: 62077 - DNA, 40 bp, Homo sapiens
gcatattacagccaatggaccaaatgcagccacagccttt

SEQ ID NO: 62078 - DNA, 40 bp, Homo sapiens
aaggctgtggctgcatttggtccattggctgtaatatgct

SEQ ID NO: 62079 - DNA, 40 bp, Homo sapiens
agcatattacagccaatggaccaaatgcagccacagcctt

SEQ ID NO: 62080 - DNA, 40 bp, Homo sapiens
aggctgtggctgcatttggtccattggctgtaatatgctg

SEQ ID NO: 62081 - DNA, 40 bp, Homo sapiens
cagcatattacagccaatggaccaaatgcagccacagcct

SEQ ID NO: 62082 - DNA, 40 bp, Homo sapiens
ggctgtggctgcatttggtccattggctgtaatatgctga

SEQ ID NO: 62083 - DNA, 40 bp, Homo sapiens
tcagcatattacagccaatggaccaaatgcagccacagcc

SEQ ID NO: 62084 - DNA, 40 bp, Homo sapiens
gctgtggctgcatttggtccattggctgtaatatgctgat

SEQ ID NO: 62085 - DNA, 40 bp, Homo sapiens
atcagcatattacagccaatggaccaaatgcagccacagc

SEQ ID NO: 62086 - DNA, 40 bp, Homo sapiens
ctgtggctgcatttggtccattggctgtaatatgctgatt

SEQ ID NO: 62087 - DNA, 40 bp, Homo sapiens
aatcagcatattacagccaatggaccaaatgcagccacag

SEQ ID NO: 62088 - DNA, 40 bp, Homo sapiens
tgtggctgcatttggtccattggctgtaatatgctgattc

SEQ ID NO: 62089 - DNA, 40 bp, Homo sapiens
gaatcagcatattacagccaatggaccaaatgcagccaca

SEQ ID NO: 62090 - DNA, 40 bp, Homo sapiens
gtggctgcatttggtccattggctgtaatatgctgattcc

SEQ ID NO: 62091 - DNA, 40 bp, Homo sapiens
ggaatcagcatattacagccaatggaccaaatgcagccac

SEQ ID NO: 62092 - DNA, 40 bp, Homo sapiens
tggctgcatttggtccattggctgtaatatgctgattcct

SEQ ID NO: 62093 - DNA, 40 bp, Homo sapiens
aggaatcagcatattacagccaatggaccaaatgcagcca

SEQ ID NO: 62094 - DNA, 40 bp, Homo sapiens
ggctgcatttggtccattggctgtaatatgctgattccta

SEQ ID NO: 62095 - DNA, 40 bp, Homo sapiens
taggaatcagcatattacagccaatggaccaaatgcagcc

SEQ ID NO: 62096 - DNA, 40 bp, Homo sapiens
gctgcatttggtccattggctgtaatatgctgattcctaa

SEQ ID NO: 62097 - DNA, 40 bp, Homo sapiens
ttaggaatcagcatattacagccaatggaccaaatgcagc

SEQ ID NO: 62098 - DNA, 40 bp, Homo sapiens
ctgcatttggtccattggctgtaatatgctgattcctaat

SEQ ID NO: 62099 - DNA, 40 bp, Homo sapiens
attaggaatcagcatattacagccaatggaccaaatgcag

SEQ ID NO: 62100 - DNA, 40 bp, Homo sapiens
tgcatttggtccattggctgtaatatgctgattcctaatt

SEQ ID NO: 62101 - DNA, 40 bp, Homo sapiens
aattaggaatcagcatattacagccaatggaccaaatgca

SEQ ID NO: 62102 - DNA, 40 bp, Homo sapiens
gcatttggtccattggctgtaatatgctgattcctaattc

SEQ ID NO: 62103 - DNA, 40 bp, Homo sapiens
gaattaggaatcagcatattacagccaatggaccaaatgc

SEQ ID NO: 62104 - DNA, 40 bp, Homo sapiens
catttggtccattggctgtaatatgctgattcctaattct

SEQ ID NO: 62105 - DNA, 40 bp, Homo sapiens
agaattaggaatcagcatattacagccaatggaccaaatg

SEQ ID NO: 62106 - DNA, 40 bp, Homo sapiens
atttggtccattggctgtaatatgctgattcctaattctc

SEQ ID NO: 62107 - DNA, 40 bp, Homo sapiens
gagaattaggaatcagcatattacagccaatggaccaaat

SEQ ID NO: 62108 - DNA, 40 bp, Homo sapiens
tttggtccattggctgtaatatgctgattcctaattctct

SEQ ID NO: 62109 - DNA, 40 bp, Homo sapiens
agagaattaggaatcagcatattacagccaatggaccaaa

SEQ ID NO: 62110 - DNA, 40 bp, Homo sapiens
ttggtccattggctgtaatatgctgattcctaattctctg

SEQ ID NO: 62111 - DNA, 40 bp, Homo sapiens
cagagaattaggaatcagcatattacagccaatggaccaa

SEQ ID NO: 62112 - DNA, 40 bp, Homo sapiens
tggtccattggctgtaatatgctgattcctaattctctgg

SEQ ID NO: 62113 - DNA, 40 bp, Homo sapiens
ccagagaattaggaatcagcatattacagccaatggacca

SEQ ID NO: 62114 - DNA, 40 bp, Homo sapiens
ggtccattggctgtaatatgctgattcctaattctctggg

SEQ ID NO: 62115 - DNA, 40 bp, Homo sapiens
cccagagaattaggaatcagcatattacagccaatggacc

SEQ ID NO: 62116 - DNA, 40 bp, Homo sapiens
gtccattggctgtaatatgctgattcctaattctctgggt

SEQ ID NO: 62117 - DNA, 40 bp, Homo sapiens
acccagagaattaggaatcagcatattacagccaatggac

SEQ ID NO: 62118 - DNA, 40 bp, Homo sapiens
tccattggctgtaatatgctgattcctaattctctgggta

SEQ ID NO: 62119 - DNA, 40 bp, Homo sapiens
tacccagagaattaggaatcagcatattacagccaatgga

SEQ ID NO: 62120 - DNA, 40 bp, Homo sapiens
ccattggctgtaatatgctgattcctaattctctgggtaa

SEQ ID NO: 62121 - DNA, 40 bp, Homo sapiens
ttacccagagaattaggaatcagcatattacagccaatgg

SEQ ID NO: 62122 - DNA, 40 bp, Homo sapiens
cattggctgtaatatgctgattcctaattctctgggtaac

SEQ ID NO: 62123 - DNA, 40 bp, Homo sapiens
gttacccagagaattaggaatcagcatattacagccaatg

SEQ ID NO: 62124 - DNA, 40 bp, Homo sapiens
attggctgtaatatgctgattcctaattctctgggtaact

SEQ ID NO: 62125 - DNA, 40 bp, Homo sapiens
agttacccagagaattaggaatcagcatattacagccaat

SEQ ID NO: 62126 - DNA, 40 bp, Homo sapiens
ttggctgtaatatgctgattcctaattctctgggtaactt

SEQ ID NO: 62127 - DNA, 40 bp, Homo sapiens
aagttacccagagaattaggaatcagcatattacagccaa

SEQ ID NO: 62128 - DNA, 40 bp, Homo sapiens
tggctgtaatatgctgattcctaattctctgggtaacttt

SEQ ID NO: 62129 - DNA, 40 bp, Homo sapiens
aaagttacccagagaattaggaatcagcatattacagcca

SEQ ID NO: 62130 - DNA, 40 bp, Homo sapiens
ggctgtaatatgctgattcctaattctctgggtaacttta

SEQ ID NO: 62131 - DNA, 40 bp, Homo sapiens
taaagttacccagagaattaggaatcagcatattacagcc

SEQ ID NO: 62132 - DNA, 40 bp, Homo sapiens
gctgtaatatgctgattcctaattctctgggtaactttag

SEQ ID NO: 62133 - DNA, 40 bp, Homo sapiens
ctaaagttacccagagaattaggaatcagcatattacagc

SEQ ID NO: 62134 - DNA, 40 bp, Homo sapiens
ctgtaatatgctgattcctaattctctgggtaactttagt

SEQ ID NO: 62135 - DNA, 40 bp, Homo sapiens
actaaagttacccagagaattaggaatcagcatattacag

SEQ ID NO: 62136 - DNA, 40 bp, Homo sapiens
tgtaatatgctgattcctaattctctgggtaactttagtg

SEQ ID NO: 62137 - DNA, 40 bp, Homo sapiens
cactaaagttacccagagaattaggaatcagcatattaca

SEQ ID NO: 62138 - DNA, 40 bp, Homo sapiens
gtaatatgctgattcctaattctctgggtaactttagtgt

SEQ ID NO: 62139 - DNA, 40 bp, Homo sapiens
acactaaagttacccagagaattaggaatcagcatattac

SEQ ID NO: 62140 - DNA, 40 bp, Homo sapiens
taatatgctgattcctaattctctgggtaactttagtgtt

SEQ ID NO: 62141 - DNA, 40 bp, Homo sapiens
aacactaaagttacccagagaattaggaatcagcatatta

SEQ ID NO: 62142 - DNA, 40 bp, Homo sapiens
aatatgctgattcctaattctctgggtaactttagtgttt

SEQ ID NO: 62143 - DNA, 40 bp, Homo sapiens
aaacactaaagttacccagagaattaggaatcagcatatt

SEQ ID NO: 62144 - DNA, 40 bp, Homo sapiens
atatgctgattcctaattctctgggtaactttagtgtttg

SEQ ID NO: 62145 - DNA, 40 bp, Homo sapiens
caaacactaaagttacccagagaattaggaatcagcatat

SEQ ID NO: 62146 - DNA, 40 bp, Homo sapiens
tatgctgattcctaattctctgggtaactttagtgtttga

SEQ ID NO: 62147 - DNA, 40 bp, Homo sapiens
tcaaacactaaagttacccagagaattaggaatcagcata

SEQ ID NO: 62148 - DNA, 40 bp, Homo sapiens
atgctgattcctaattctctgggtaactttagtgtttgat

SEQ ID NO: 62149 - DNA, 40 bp, Homo sapiens
atcaaacactaaagttacccagagaattaggaatcagcat

SEQ ID NO: 62150 - DNA, 40 bp, Homo sapiens
tgctgattcctaattctctgggtaactttagtgtttgatt

SEQ ID NO: 62151 - DNA, 40 bp, Homo sapiens
aatcaaacactaaagttacccagagaattaggaatcagca

SEQ ID NO: 62152 - DNA, 40 bp, Homo sapiens
gctgattcctaattctctgggtaactttagtgtttgatta

SEQ ID NO: 62153 - DNA, 40 bp, Homo sapiens
taatcaaacactaaagttacccagagaattaggaatcagc

SEQ ID NO: 62154 - DNA, 40 bp, Homo sapiens
ctgattcctaattctctgggtaactttagtgtttgattag

SEQ ID NO: 62155 - DNA, 40 bp, Homo sapiens
ctaatcaaacactaaagttacccagagaattaggaatcag

SEQ ID NO: 62156 - DNA, 40 bp, Homo sapiens
tgattcctaattctctgggtaactttagtgtttgattagc

SEQ ID NO: 62157 - DNA, 40 bp, Homo sapiens
gctaatcaaacactaaagttacccagagaattaggaatca

SEQ ID NO: 62158 - DNA, 40 bp, Homo sapiens
gattcctaattctctgggtaactttagtgtttgattagct

SEQ ID NO: 62159 - DNA, 40 bp, Homo sapiens
agctaatcaaacactaaagttacccagagaattaggaatc

SEQ ID NO: 62160 - DNA, 40 bp, Homo sapiens
attcctaattctctgggtaactttagtgtttgattagcta

SEQ ID NO: 62161 - DNA, 40 bp, Homo sapiens
tagctaatcaaacactaaagttacccagagaattaggaat

SEQ ID NO: 62162 - DNA, 40 bp, Homo sapiens
ttcctaattctctgggtaactttagtgtttgattagctac

SEQ ID NO: 62163 - DNA, 40 bp, Homo sapiens
gtagctaatcaaacactaaagttacccagagaattaggaa

SEQ ID NO: 62164 - DNA, 40 bp, Homo sapiens
tcctaattctctgggtaactttagtgtttgattagctact

SEQ ID NO: 62165 - DNA, 40 bp, Homo sapiens
agtagctaatcaaacactaaagttacccagagaattagga

SEQ ID NO: 62166 - DNA, 40 bp, Homo sapiens
cctaattctctgggtaactttagtgtttgattagctacta

SEQ ID NO: 62167 - DNA, 40 bp, Homo sapiens
tagtagctaatcaaacactaaagttacccagagaattagg

SEQ ID NO: 62168 - DNA, 40 bp, Homo sapiens
ctaattctctgggtaactttagtgtttgattagctactag

SEQ ID NO: 62169 - DNA, 40 bp, Homo sapiens
ctagtagctaatcaaacactaaagttacccagagaattag

SEQ ID NO: 62170 - DNA, 40 bp, Homo sapiens
taattctctgggtaactttagtgtttgattagctactaga

SEQ ID NO: 62171 - DNA, 40 bp, Homo sapiens
tctagtagctaatcaaacactaaagttacccagagaatta

SEQ ID NO: 62172 - DNA, 40 bp, Homo sapiens
aattctctgggtaactttagtgtttgattagctactagaa

SEQ ID NO: 62173 - DNA, 40 bp, Homo sapiens
ttctagtagctaatcaaacactaaagttacccagagaatt

SEQ ID NO: 62174 - DNA, 40 bp, Homo sapiens
attctctgggtaactttagtgtttgattagctactagaag

SEQ ID NO: 62175 - DNA, 40 bp, Homo sapiens
cttctagtagctaatcaaacactaaagttacccagagaat

SEQ ID NO: 62176 - DNA, 40 bp, Homo sapiens
ttctctgggtaactttagtgtttgattagctactagaagt

SEQ ID NO: 62177 - DNA, 40 bp, Homo sapiens
acttctagtagctaatcaaacactaaagttacccagagaa

SEQ ID NO: 62178 - DNA, 40 bp, Homo sapiens
tctctgggtaactttagtgtttgattagctactagaagtt

SEQ ID NO: 62179 - DNA, 40 bp, Homo sapiens
aacttctagtagctaatcaaacactaaagttacccagaga

SEQ ID NO: 62180 - DNA, 40 bp, Homo sapiens
ctctgggtaactttagtgtttgattagctactagaagtta

SEQ ID NO: 62181 - DNA, 40 bp, Homo sapiens
taacttctagtagctaatcaaacactaaagttacccagag

SEQ ID NO: 62182 - DNA, 40 bp, Homo sapiens
tctgggtaactttagtgtttgattagctactagaagttag

SEQ ID NO: 62183 - DNA, 40 bp, Homo sapiens
ctaacttctagtagctaatcaaacactaaagttacccaga

SEQ ID NO: 62184 - DNA, 40 bp, Homo sapiens
ctgggtaactttagtgtttgattagctactagaagttagg

SEQ ID NO: 62185 - DNA, 40 bp, Homo sapiens
cctaacttctagtagctaatcaaacactaaagttacccag

SEQ ID NO: 62186 - DNA, 40 bp, Homo sapiens
tgggtaactttagtgtttgattagctactagaagttaggt

SEQ ID NO: 62187 - DNA, 40 bp, Homo sapiens
acctaacttctagtagctaatcaaacactaaagttaccca

SEQ ID NO: 62188 - DNA, 40 bp, Homo sapiens
gggtaactttagtgtttgattagctactagaagttaggtt

SEQ ID NO: 62189 - DNA, 40 bp, Homo sapiens
aacctaacttctagtagctaatcaaacactaaagttaccc

SEQ ID NO: 62190 - DNA, 40 bp, Homo sapiens
ggtaactttagtgtttgattagctactagaagttaggtta

SEQ ID NO: 62191 - DNA, 40 bp, Homo sapiens
taacctaacttctagtagctaatcaaacactaaagttacc

SEQ ID NO: 62192 - DNA, 40 bp, Homo sapiens
gtaactttagtgtttgattagctactagaagttaggttaa

SEQ ID NO: 62193 - DNA, 40 bp, Homo sapiens
ttaacctaacttctagtagctaatcaaacactaaagttac

SEQ ID NO: 62194 - DNA, 40 bp, Homo sapiens
taactttagtgtttgattagctactagaagttaggttaaa

SEQ ID NO: 62195 - DNA, 40 bp, Homo sapiens
tttaacctaacttctagtagctaatcaaacactaaagtta

SEQ ID NO: 62196 - DNA, 40 bp, Homo sapiens
aactttagtgtttgattagctactagaagttaggttaaac

SEQ ID NO: 62197 - DNA, 40 bp, Homo sapiens
gtttaacctaacttctagtagctaatcaaacactaaagtt

SEQ ID NO: 62198 - DNA, 40 bp, Homo sapiens
actttagtgtttgattagctactagaagttaggttaaact

SEQ ID NO: 62199 - DNA, 40 bp, Homo sapiens
agtttaacctaacttctagtagctaatcaaacactaaagt

SEQ ID NO: 62200 - DNA, 40 bp, Homo sapiens
ctttagtgtttgattagctactagaagttaggttaaactt

SEQ ID NO: 62201 - DNA, 40 bp, Homo sapiens
aagtttaacctaacttctagtagctaatcaaacactaaag

SEQ ID NO: 62202 - DNA, 40 bp, Homo sapiens
tttagtgtttgattagctactagaagttaggttaaacttt

SEQ ID NO: 62203 - DNA, 40 bp, Homo sapiens
aaagtttaacctaacttctagtagctaatcaaacactaaa

SEQ ID NO: 62204 - DNA, 40 bp, Homo sapiens
ttagtgtttgattagctactagaagttaggttaaactttt

SEQ ID NO: 62205 - DNA, 40 bp, Homo sapiens
aaaagtttaacctaacttctagtagctaatcaaacactaa

SEQ ID NO: 62206 - DNA, 40 bp, Homo sapiens
tagtgtttgattagctactagaagttaggttaaacttttg

SEQ ID NO: 62207 - DNA, 40 bp, Homo sapiens
caaaagtttaacctaacttctagtagctaatcaaacacta

SEQ ID NO: 62208 - DNA, 40 bp, Homo sapiens
agtgtttgattagctactagaagttaggttaaacttttgt

SEQ ID NO: 62209 - DNA, 40 bp, Homo sapiens
acaaaagtttaacctaacttctagtagctaatcaaacact

SEQ ID NO: 62210 - DNA, 40 bp, Homo sapiens
gtgtttgattagctactagaagttaggttaaacttttgta

SEQ ID NO: 62211 - DNA, 40 bp, Homo sapiens
tacaaaagtttaacctaacttctagtagctaatcaaacac

SEQ ID NO: 62212 - DNA, 40 bp, Homo sapiens
tgtttgattagctactagaagttaggttaaacttttgtat

SEQ ID NO: 62213 - DNA, 40 bp, Homo sapiens
atacaaaagtttaacctaacttctagtagctaatcaaaca

SEQ ID NO: 62214 - DNA, 40 bp, Homo sapiens
gtttgattagctactagaagttaggttaaacttttgtatt

SEQ ID NO: 62215 - DNA, 40 bp, Homo sapiens
aatacaaaagtttaacctaacttctagtagctaatcaaac

SEQ ID NO: 62216 - DNA, 40 bp, Homo sapiens
tttgattagctactagaagttaggttaaacttttgtattt

SEQ ID NO: 62217 - DNA, 40 bp, Homo sapiens
aaatacaaaagtttaacctaacttctagtagctaatcaaa

SEQ ID NO: 62218 - DNA, 40 bp, Homo sapiens
ttgattagctactagaagttaggttaaacttttgtatttt

SEQ ID NO: 62219 - DNA, 40 bp, Homo sapiens
aaaatacaaaagtttaacctaacttctagtagctaatcaa

SEQ ID NO: 62220 - DNA, 40 bp, Homo sapiens
tgattagctactagaagttaggttaaacttttgtatttta

SEQ ID NO: 62221 - DNA, 40 bp, Homo sapiens
taaaatacaaaagtttaacctaacttctagtagctaatca

SEQ ID NO: 62222 - DNA, 40 bp, Homo sapiens
gattagctactagaagttaggttaaacttttgtattttac

SEQ ID NO: 62223 - DNA, 40 bp, Homo sapiens
gtaaaatacaaaagtttaacctaacttctagtagctaatc

SEQ ID NO: 62224 - DNA, 40 bp, Homo sapiens
attagctactagaagttaggttaaacttttgtattttaca

SEQ ID NO: 62225 - DNA, 40 bp, Homo sapiens
tgtaaaatacaaaagtttaacctaacttctagtagctaat

SEQ ID NO: 62226 - DNA, 40 bp, Homo sapiens
ttagctactagaagttaggttaaacttttgtattttacag

SEQ ID NO: 62227 - DNA, 40 bp, Homo sapiens
ctgtaaaatacaaaagtttaacctaacttctagtagctaa

SEQ ID NO: 62228 - DNA, 40 bp, Homo sapiens
tagctactagaagttaggttaaacttttgtattttacagg

SEQ ID NO: 62229 - DNA, 40 bp, Homo sapiens
cctgtaaaatacaaaagtttaacctaacttctagtagcta

SEQ ID NO: 62230 - DNA, 40 bp, Homo sapiens
agctactagaagttaggttaaacttttgtattttacaggc

SEQ ID NO: 62231 - DNA, 40 bp, Homo sapiens
gcctgtaaaatacaaaagtttaacctaacttctagtagct

SEQ ID NO: 62232 - DNA, 40 bp, Homo sapiens
gctactagaagttaggttaaacttttgtattttacaggct

SEQ ID NO: 62233 - DNA, 40 bp, Homo sapiens
agcctgtaaaatacaaaagtttaacctaacttctagtagc

SEQ ID NO: 62234 - DNA, 40 bp, Homo sapiens
ctactagaagttaggttaaacttttgtattttacaggcta

SEQ ID NO: 62235 - DNA, 40 bp, Homo sapiens
tagcctgtaaaatacaaaagtttaacctaacttctagtag

SEQ ID NO: 62236 - DNA, 40 bp, Homo sapiens
tactagaagttaggttaaacttttgtattttacaggctaa

SEQ ID NO: 62237 - DNA, 40 bp, Homo sapiens
ttagcctgtaaaatacaaaagtttaacctaacttctagta

SEQ ID NO: 62238 - DNA, 40 bp, Homo sapiens
actagaagttaggttaaacttttgtattttacaggctaac

SEQ ID NO: 62239 - DNA, 40 bp, Homo sapiens
gttagcctgtaaaatacaaaagtttaacctaacttctagt

SEQ ID NO: 62240 - DNA, 40 bp, Homo sapiens
ctagaagttaggttaaacttttgtattttacaggctaact

SEQ ID NO: 62241 - DNA, 40 bp, Homo sapiens
agttagcctgtaaaatacaaaagtttaacctaacttctag

SEQ ID NO: 62242 - DNA, 40 bp, Homo sapiens
tagaagttaggttaaacttttgtattttacaggctaactt

SEQ ID NO: 62243 - DNA, 40 bp, Homo sapiens
aagttagcctgtaaaatacaaaagtttaacctaacttcta

SEQ ID NO: 62244 - DNA, 40 bp, Homo sapiens
agaagttaggttaaacttttgtattttacaggctaacttt

SEQ ID NO: 62245 - DNA, 40 bp, Homo sapiens
aaagttagcctgtaaaatacaaaagtttaacctaacttct

SEQ ID NO: 62246 - DNA, 40 bp, Homo sapiens
gaagttaggttaaacttttgtattttacaggctaacttta

SEQ ID NO: 62247 - DNA, 40 bp, Homo sapiens
taaagttagcctgtaaaatacaaaagtttaacctaacttc

SEQ ID NO: 62248 - DNA, 40 bp, Homo sapiens
aagttaggttaaacttttgtattttacaggctaactttaa

SEQ ID NO: 62249 - DNA, 40 bp, Homo sapiens
ttaaagttagcctgtaaaatacaaaagtttaacctaactt

SEQ ID NO: 62250 - DNA, 40 bp, Homo sapiens
agttaggttaaacttttgtattttacaggctaactttaat

SEQ ID NO: 62251 - DNA, 40 bp, Homo sapiens
attaaagttagcctgtaaaatacaaaagtttaacctaact

SEQ ID NO: 62252 - DNA, 40 bp, Homo sapiens
gttaggttaaacttttgtattttacaggctaactttaata

SEQ ID NO: 62253 - DNA, 40 bp, Homo sapiens
tattaaagttagcctgtaaaatacaaaagtttaacctaac

SEQ ID NO: 62254 - DNA, 40 bp, Homo sapiens
ttaggttaaacttttgtattttacaggctaactttaataa

SEQ ID NO: 62255 - DNA, 40 bp, Homo sapiens
ttattaaagttagcctgtaaaatacaaaagtttaacctaa

SEQ ID NO: 62256 - DNA, 40 bp, Homo sapiens
taggttaaacttttgtattttacaggctaactttaataat

SEQ ID NO: 62257 - DNA, 40 bp, Homo sapiens
attattaaagttagcctgtaaaatacaaaagtttaaccta

SEQ ID NO: 62258 - DNA, 40 bp, Homo sapiens
aggttaaacttttgtattttacaggctaactttaataatc

SEQ ID NO: 62259 - DNA, 40 bp, Homo sapiens
gattattaaagttagcctgtaaaatacaaaagtttaacct

SEQ ID NO: 62260 - DNA, 40 bp, Homo sapiens
ggttaaacttttgtattttacaggctaactttaataatct

SEQ ID NO: 62261 - DNA, 40 bp, Homo sapiens
agattattaaagttagcctgtaaaatacaaaagtttaacc

SEQ ID NO: 62262 - DNA, 40 bp, Homo sapiens
gttaaacttttgtattttacaggctaactttaataatctt

SEQ ID NO: 62263 - DNA, 40 bp, Homo sapiens
aagattattaaagttagcctgtaaaatacaaaagtttaac

SEQ ID NO: 62264 - DNA, 40 bp, Homo sapiens
ttaaacttttgtattttacaggctaactttaataatctta

SEQ ID NO: 62265 - DNA, 40 bp, Homo sapiens
taagattattaaagttagcctgtaaaatacaaaagtttaa

SEQ ID NO: 62266 - DNA, 40 bp, Homo sapiens
taaacttttgtattttacaggctaactttaataatcttaa

SEQ ID NO: 62267 - DNA, 40 bp, Homo sapiens
ttaagattattaaagttagcctgtaaaatacaaaagttta

SEQ ID NO: 62268 - DNA, 40 bp, Homo sapiens
aaacttttgtattttacaggctaactttaataatcttaaa

SEQ ID NO: 62269 - DNA, 40 bp, Homo sapiens
tttaagattattaaagttagcctgtaaaatacaaaagttt

SEQ ID NO: 62270 - DNA, 40 bp, Homo sapiens
aacttttgtattttacaggctaactttaataatcttaaag

SEQ ID NO: 62271 - DNA, 40 bp, Homo sapiens
ctttaagattattaaagttagcctgtaaaatacaaaagtt

SEQ ID NO: 62272 - DNA, 40 bp, Homo sapiens
acttttgtattttacaggctaactttaataatcttaaagt

SEQ ID NO: 62273 - DNA, 40 bp, Homo sapiens
actttaagattattaaagttagcctgtaaaatacaaaagt

SEQ ID NO: 62274 - DNA, 40 bp, Homo sapiens
cttttgtattttacaggctaactttaataatcttaaagta

SEQ ID NO: 62275 - DNA, 40 bp, Homo sapiens
tactttaagattattaaagttagcctgtaaaatacaaaag

SEQ ID NO: 62276 - DNA, 40 bp, Homo sapiens
ttttgtattttacaggctaactttaataatcttaaagtaa

SEQ ID NO: 62277 - DNA, 40 bp, Homo sapiens
ttactttaagattattaaagttagcctgtaaaatacaaaa

SEQ ID NO: 62278 - DNA, 40 bp, Homo sapiens
tttgtattttacaggctaactttaataatcttaaagtaaa

SEQ ID NO: 62279 - DNA, 40 bp, Homo sapiens
tttactttaagattattaaagttagcctgtaaaatacaaa

SEQ ID NO: 62280 - DNA, 40 bp, Homo sapiens
ttgtattttacaggctaactttaataatcttaaagtaaaa

SEQ ID NO: 62281 - DNA, 40 bp, Homo sapiens
ttttactttaagattattaaagttagcctgtaaaatacaa

SEQ ID NO: 62282 - DNA, 40 bp, Homo sapiens
tgtattttacaggctaactttaataatcttaaagtaaaac

SEQ ID NO: 62283 - DNA, 40 bp, Homo sapiens
gttttactttaagattattaaagttagcctgtaaaataca

SEQ ID NO: 62284 - DNA, 40 bp, Homo sapiens
gtattttacaggctaactttaataatcttaaagtaaaact

SEQ ID NO: 62285 - DNA, 40 bp, Homo sapiens
agttttactttaagattattaaagttagcctgtaaaatac

SEQ ID NO: 62286 - DNA, 40 bp, Homo sapiens
tattttacaggctaactttaataatcttaaagtaaaactt

SEQ ID NO: 62287 - DNA, 40 bp, Homo sapiens
aagttttactttaagattattaaagttagcctgtaaaata

SEQ ID NO: 62288 - DNA, 40 bp, Homo sapiens
attttacaggctaactttaataatcttaaagtaaaactta

SEQ ID NO: 62289 - DNA, 40 bp, Homo sapiens
taagttttactttaagattattaaagttagcctgtaaaat

SEQ ID NO: 62290 - DNA, 40 bp, Homo sapiens
ttttacaggctaactttaataatcttaaagtaaaacttaa

SEQ ID NO: 62291 - DNA, 40 bp, Homo sapiens
ttaagttttactttaagattattaaagttagcctgtaaaa

SEQ ID NO: 62292 - DNA, 40 bp, Homo sapiens
tttacaggctaactttaataatcttaaagtaaaacttaac

SEQ ID NO: 62293 - DNA, 40 bp, Homo sapiens
gttaagttttactttaagattattaaagttagcctgtaaa

SEQ ID NO: 62294 - DNA, 40 bp, Homo sapiens
ttacaggctaactttaataatcttaaagtaaaacttaaca

SEQ ID NO: 62295 - DNA, 40 bp, Homo sapiens
tgttaagttttactttaagattattaaagttagcctgtaa

SEQ ID NO: 62296 - DNA, 40 bp, Homo sapiens
tacaggctaactttaataatcttaaagtaaaacttaacat

SEQ ID NO: 62297 - DNA, 40 bp, Homo sapiens
atgttaagttttactttaagattattaaagttagcctgta

SEQ ID NO: 62298 - DNA, 40 bp, Homo sapiens
acaggctaactttaataatcttaaagtaaaacttaacata

SEQ ID NO: 62299 - DNA, 40 bp, Homo sapiens
tatgttaagttttactttaagattattaaagttagcctgt

SEQ ID NO: 62300 - DNA, 40 bp, Homo sapiens
caggctaactttaataatcttaaagtaaaacttaacatag

SEQ ID NO: 62301 - DNA, 40 bp, Homo sapiens
ctatgttaagttttactttaagattattaaagttagcctg

SEQ ID NO: 62302 - DNA, 40 bp, Homo sapiens
aggctaactttaataatcttaaagtaaaacttaacatagt

SEQ ID NO: 62303 - DNA, 40 bp, Homo sapiens
actatgttaagttttactttaagattattaaagttagcct

SEQ ID NO: 62304 - DNA, 40 bp, Homo sapiens
ggctaactttaataatcttaaagtaaaacttaacatagtt

SEQ ID NO: 62305 - DNA, 40 bp, Homo sapiens
aactatgttaagttttactttaagattattaaagttagcc

SEQ ID NO: 62306 - DNA, 40 bp, Homo sapiens
gctaactttaataatcttaaagtaaaacttaacatagttc

SEQ ID NO: 62307 - DNA, 40 bp, Homo sapiens
gaactatgttaagttttactttaagattattaaagttagc

SEQ ID NO: 62308 - DNA, 40 bp, Homo sapiens
ctaactttaataatcttaaagtaaaacttaacatagttca

SEQ ID NO: 62309 - DNA, 40 bp, Homo sapiens
tgaactatgttaagttttactttaagattattaaagttag

SEQ ID NO: 62310 - DNA, 40 bp, Homo sapiens
taactttaataatcttaaagtaaaacttaacatagttcat

SEQ ID NO: 62311 - DNA, 40 bp, Homo sapiens
atgaactatgttaagttttactttaagattattaaagtta
